United States Patent Application Publication US 2007/0042381 A1 - sequence listing, part 82

SEQ ID NO: 3752880 - RNA, 12 nt, Human
cucugccugccc

SEQ ID NO: 3752881 - RNA, 20 nt, Human
cucugccugccccgccccca

SEQ ID NO: 3752882 - RNA, 13 nt, Human
cucugccuguccc

SEQ ID NO: 3752883 - RNA, 16 nt, Human
cucugccugugagcca

SEQ ID NO: 3752884 - RNA, 17 nt, Human
cucugccugugagccag

SEQ ID NO: 3752885 - RNA, 14 nt, Human
cucugccuugccuu

SEQ ID NO: 3752886 - RNA, 15 nt, Human
cucugccuuugacau

SEQ ID NO: 3752887 - RNA, 19 nt, Human
cucugccuuugacauuuaa

SEQ ID NO: 3752888 - RNA, 23 nt, Human
cucugccuuugacauuuaauuua

SEQ ID NO: 3752889 - RNA, 22 nt, Human
cucugccuuugcaccacgggac

SEQ ID NO: 3752890 - RNA, 13 nt, Human
cucugccuuugcu

SEQ ID NO: 3752891 - RNA, 17 nt, Human
cucugcggaccccagcu

SEQ ID NO: 3752892 - RNA, 19 nt, Human
cucugcggaccccagcugu

SEQ ID NO: 3752893 - RNA, 21 nt, Human
cucugcggagcacacuggcuc

SEQ ID NO: 3752894 - RNA, 21 nt, Human
cucugcgucgguccuggugcc

SEQ ID NO: 3752895 - RNA, 22 nt, Human
cucugcgugucaccugugcuuc

SEQ ID NO: 3752896 - RNA, 17 nt, Human
cucugcuaccuugcccc

SEQ ID NO: 3752897 - RNA, 19 nt, Human
cucugcuacguuccuauug

SEQ ID NO: 3752898 - RNA, 13 nt, Human
cucugcucagcca

SEQ ID NO: 3752899 - RNA, 14 nt, Human
cucugcuccaccac

SEQ ID NO: 3752900 - RNA, 13 nt, Human
cucugcuccccag

SEQ ID NO: 3752901 - RNA, 12 nt, Human
cucugcuccccc

SEQ ID NO: 3752902 - RNA, 17 nt, Human
cucugcuccuggagccu

SEQ ID NO: 3752903 - RNA, 22 nt, Human
cucugcuccuggagccuuugaa

SEQ ID NO: 3752904 - RNA, 20 nt, Human
cucugcucgcccuccuuucu

SEQ ID NO: 3752905 - RNA, 11 nt, Human
cucugcucuga

SEQ ID NO: 3752906 - RNA, 14 nt, Human
cucugcucugaugc

SEQ ID NO: 3752907 - RNA, 13 nt, Human
cucugcucuugca

SEQ ID NO: 3752908 - RNA, 14 nt, Human
gagguccagcccau

SEQ ID NO: 3752909 - RNA, 23 nt, Human
gagguccagcccuggcugaagga

SEQ ID NO: 3752910 - RNA, 20 nt, Human
gaggucccaagguucugggu

SEQ ID NO: 3752911 - RNA, 14 nt, Human
gagguccucuggag

SEQ ID NO: 3752912 - RNA, 12 nt, Human
gagguccugagc

SEQ ID NO: 3752913 - RNA, 13 nt, Human
gagguccugagca

SEQ ID NO: 3752914 - RNA, 14 nt, Human
gagguccugagcac

SEQ ID NO: 3752915 - RNA, 19 nt, Human
gagguccugagcacugcca

SEQ ID NO: 3752916 - RNA, 20 nt, Human
gagguccugagcacugccag

SEQ ID NO: 3752917 - RNA, 21 nt, Human
gagguccugagcacugccagg

SEQ ID NO: 3752918 - RNA, 23 nt, Human
gagguccugagcacugccaggag

SEQ ID NO: 3752919 - RNA, 18 nt, Human
gagguccugggggccuga

SEQ ID NO: 3752920 - RNA, 21 nt, Human
gagguccugugaucuuauuuu

SEQ ID NO: 3752921 - RNA, 23 nt, Human
gaggucucgcugaugcugggcug

SEQ ID NO: 3752922 - RNA, 16 nt, Human
gaggucucugccggcu

SEQ ID NO: 3752923 - RNA, 17 nt, Human
gaggucucuugagggag

SEQ ID NO: 3752924 - RNA, 14 nt, Human
gaggucugaaaugg

SEQ ID NO: 3752925 - RNA, 19 nt, Human
gaggucugcucggccgucu

SEQ ID NO: 3752926 - RNA, 15 nt, Human
gaggucugugcugag

SEQ ID NO: 3752927 - RNA, 16 nt, Human
gaggucuguuccuuuu

SEQ ID NO: 3752928 - RNA, 13 nt, Human
gaggucuguucuu

SEQ ID NO: 3752929 - RNA, 17 nt, Human
gaggugaaaaggccaag

SEQ ID NO: 3752930 - RNA, 16 nt, Human
gaggugaccccagggc

SEQ ID NO: 3752931 - RNA, 17 nt, Human
gaggugaccccagggca

SEQ ID NO: 3752932 - RNA, 14 nt, Human
gaggugauagcauu

SEQ ID NO: 3752933 - RNA, 14 nt, Human
gaggugcacuggga

SEQ ID NO: 3752934 - RNA, 14 nt, Human
gaggugccacugga

SEQ ID NO: 3752935 - RNA, 17 nt, Human
gaggugccagcaaagcc

SEQ ID NO: 3752936 - RNA, 13 nt, Human
gaggugccugucc

SEQ ID NO: 3752937 - RNA, 12 nt, Human
gaggugccuucu

SEQ ID NO: 3752938 - RNA, 20 nt, Human
gaggugccuucuucagggcc

SEQ ID NO: 3752939 - RNA, 22 nt, Human
gaggugccuucuucagggccug

SEQ ID NO: 3752940 - RNA, 20 nt, Human
gaggugcugcauugccugcg

SEQ ID NO: 3752941 - RNA, 16 nt, Human
gaggugcugggaggga

SEQ ID NO: 3752942 - RNA, 15 nt, Human
gagguggaagaaggg

SEQ ID NO: 3752943 - RNA, 15 nt, Human
gagguggaagcccuc

SEQ ID NO: 3752944 - RNA, 16 nt, Human
gagguggagggaggga

SEQ ID NO: 3752945 - RNA, 18 nt, Human
gagguggagggagggaag

SEQ ID NO: 3752946 - RNA, 19 nt, Human
gagguggagguugcauuga

SEQ ID NO: 3752947 - RNA, 18 nt, Human
gagguggcagcccuguag

SEQ ID NO: 3752948 - RNA, 19 nt, Human
gagguggccagagcuggga

SEQ ID NO: 3752949 - RNA, 21 nt, Human
gagguggccagagcugggagg

SEQ ID NO: 3752950 - RNA, 23 nt, Human
gagguggccagagcugggaggca

SEQ ID NO: 3752951 - RNA, 13 nt, Human
gagguggccuccu

SEQ ID NO: 3752952 - RNA, 20 nt, Human
gagguggcugagccccuguc

SEQ ID NO: 3752953 - RNA, 20 nt, Human
gagguggcuuuugcggccag

SEQ ID NO: 3752954 - RNA, 23 nt, Human
gaggugggagcaggagauugaga

SEQ ID NO: 3752955 - RNA, 14 nt, Human
gaggugggagggcc

SEQ ID NO: 3752956 - RNA, 12 nt, Human
gaggugggaucc

SEQ ID NO: 3752957 - RNA, 21 nt, Human
gaggugggauccuccaggugc

SEQ ID NO: 3752958 - RNA, 21 nt, Human
gaggugggcaggugguggcac

SEQ ID NO: 3752959 - RNA, 14 nt, Human
gaggugggcccagg

SEQ ID NO: 3752960 - RNA, 19 nt, Human
gagguggggcgaggcaggc

SEQ ID NO: 3752961 - RNA, 15 nt, Human
gaggugggguuggga

SEQ ID NO: 3752962 - RNA, 16 nt, Human
gagguggucugaaugu

SEQ ID NO: 3752963 - RNA, 12 nt, Human
gaggugguuuua

SEQ ID NO: 3752964 - RNA, 20 nt, Human
gagguguauggagagaaaac

SEQ ID NO: 3752965 - RNA, 15 nt, Human
gagguguccaacugg

SEQ ID NO: 3752966 - RNA, 13 nt, Human
gaggugucucagg

SEQ ID NO: 3752967 - RNA, 15 nt, Human
gaggugucucaggcu

SEQ ID NO: 3752968 - RNA, 16 nt, Human
gaggugucucaggcug

SEQ ID NO: 3752969 - RNA, 14 nt, Human
gagguguuuaaaga

SEQ ID NO: 3752970 - RNA, 21 nt, Human
gagguguuuaaagagagguua

SEQ ID NO: 3752971 - RNA, 19 nt, Human
gagguuaaggcugaggaaa

SEQ ID NO: 3752972 - RNA, 22 nt, Human
gagguuauaggucacuccuggg

SEQ ID NO: 3752973 - RNA, 19 nt, Human
gagguucaaagauauuuug

SEQ ID NO: 3752974 - RNA, 14 nt, Human
gagguucuaaggcc

SEQ ID NO: 3752975 - RNA, 18 nt, Human
gagguugauaacuuugcu

SEQ ID NO: 3752976 - RNA, 19 nt, Human
gagguugauaacuuugcuu

SEQ ID NO: 3752977 - RNA, 13 nt, Human
gagguugcaggga

SEQ ID NO: 3752978 - RNA, 19 nt, Human
gagguugcagggagccgag

SEQ ID NO: 3752979 - RNA, 15 nt, Human
gagguugcagugagc

SEQ ID NO: 3752980 - RNA, 19 nt, Human
gagguugcagugagccaag

SEQ ID NO: 3752981 - RNA, 12 nt, Human
gagguugggagg

SEQ ID NO: 3752982 - RNA, 13 nt, Human
gagguuguaguga

SEQ ID NO: 3752983 - RNA, 16 nt, Human
gagguugugcacuguu

SEQ ID NO: 3752984 - RNA, 16 nt, Human
gagguuucaaaccucc

SEQ ID NO: 3752985 - RNA, 23 nt, Human
gagguuugucgggcaccagccag

SEQ ID NO: 3752986 - RNA, 16 nt, Human
gaguaaaaagaaaaca

SEQ ID NO: 3752987 - RNA, 18 nt, Human
gaguaaagaauuauuuug

SEQ ID NO: 3752988 - RNA, 16 nt, Human
gaguaaaucagauguu

SEQ ID NO: 3752989 - RNA, 15 nt, Human
gaguaacauuugcug

SEQ ID NO: 3752990 - RNA, 20 nt, Human
gaguaaucugaucguucuuu

SEQ ID NO: 3752991 - RNA, 13 nt, Human
gaguaaucugugu

SEQ ID NO: 3752992 - RNA, 22 nt, Human
gaguaaucuguguacaaagaaa

SEQ ID NO: 3752993 - RNA, 22 nt, Human
gaguaauggguuucauauuucu

SEQ ID NO: 3752994 - RNA, 14 nt, Human
gaguacaaaugccu

SEQ ID NO: 3752995 - RNA, 18 nt, Human
gaguacauugaaggccug

SEQ ID NO: 3752996 - RNA, 14 nt, Human
gaguacugugggca

SEQ ID NO: 3752997 - RNA, 18 nt, Human
gaguacugugggcaauuu

SEQ ID NO: 3752998 - RNA, 23 nt, Human
gaguacugugggcaauuuagaaa

SEQ ID NO: 3752999 - RNA, 23 nt, Human
gaguagaaaaugugacccuccaa

SEQ ID NO: 3753000 - RNA, 17 nt, Human
gaguagaaauaaaagug

SEQ ID NO: 3753001 - RNA, 15 nt, Human
gaguagaauguaguu

SEQ ID NO: 3753002 - RNA, 17 nt, Human
gaguagaauugcauuga

SEQ ID NO: 3753003 - RNA, 18 nt, Human
gaguagaccccuggcugg

SEQ ID NO: 3753004 - RNA, 18 nt, Human
gaguagauggugaaauuu

SEQ ID NO: 3753005 - RNA, 17 nt, Human
gaguagccgagagccug

SEQ ID NO: 3753006 - RNA, 15 nt, Human
gaguagcgguccaag

SEQ ID NO: 3753007 - RNA, 20 nt, Human
gaguagcgguccaagccugc

SEQ ID NO: 3753008 - RNA, 14 nt, Human
gaguagcugagcuc

SEQ ID NO: 3753009 - RNA, 15 nt, Human
gaguagcugagcuca

SEQ ID NO: 3753010 - RNA, 13 nt, Human
gaguaggaagacu

SEQ ID NO: 3753011 - RNA, 18 nt, Human
gaguaggaagacuuugga

SEQ ID NO: 3753012 - RNA, 23 nt, Human
gaguaguuauauaauuguugaac

SEQ ID NO: 3753013 - RNA, 11 nt, Human
gaguauauguc

SEQ ID NO: 3753014 - RNA, 15 nt, Human
gaguauauuauaaua

SEQ ID NO: 3753015 - RNA, 22 nt, Human
gaguaucagaauugaaacacuu

SEQ ID NO: 3753016 - RNA, 21 nt, Human
gaguauuguuuaaaauguaau

SEQ ID NO: 3753017 - RNA, 14 nt, Human
gaguauuuuugaca

SEQ ID NO: 3753018 - RNA, 13 nt, Human
gaguauuuuugua

SEQ ID NO: 3753019 - RNA, 14 nt, Human
gagucaaaaagaac

SEQ ID NO: 3753020 - RNA, 14 nt, Human
gagucaaaacacuu

SEQ ID NO: 3753021 - RNA, 19 nt, Human
gagucaaaacuacaaauca

SEQ ID NO: 3753022 - RNA, 19 nt, Human
gagucaaaugguaggcauu

SEQ ID NO: 3753023 - RNA, 14 nt, Human
gagucaaguuguuc

SEQ ID NO: 3753024 - RNA, 19 nt, Human
gagucaauccccucauuca

SEQ ID NO: 3753025 - RNA, 18 nt, Human
gagucaauuggaaagacu

SEQ ID NO: 3753026 - RNA, 15 nt, Human
gagucaccuuccagg

SEQ ID NO: 3753027 - RNA, 18 nt, Human
gagucaccuuccaggacc

SEQ ID NO: 3753028 - RNA, 21 nt, Human
gagucaccuuccaggaccccu

SEQ ID NO: 3753029 - RNA, 21 nt, Human
gagucacugccucucccuggc

SEQ ID NO: 3753030 - RNA, 21 nt, Human
gagucacuggaacacuaauga

SEQ ID NO: 3753031 - RNA, 22 nt, Human
gagucagaaguuucugccgcag

SEQ ID NO: 3753032 - RNA, 16 nt, Human
gagucagccaggagcu

SEQ ID NO: 3753033 - RNA, 18 nt, Human
gagucagcucucugcccu

SEQ ID NO: 3753034 - RNA, 23 nt, Human
gagucaggacuugaacccagguc

SEQ ID NO: 3753035 - RNA, 17 nt, Human
gagucagggaccccugc

SEQ ID NO: 3753036 - RNA, 17 nt, Human
gagucagggcccagagg

SEQ ID NO: 3753037 - RNA, 18 nt, Human
gagucagugccagguccu

SEQ ID NO: 3753038 - RNA, 22 nt, Human
gagucaucuguuagggccuugg

SEQ ID NO: 3753039 - RNA, 19 nt, Human
gagucaugaucucccugcc

SEQ ID NO: 3753040 - RNA, 12 nt, Human
gagucaugccaa

SEQ ID NO: 3753041 - RNA, 14 nt, Human
gagucauuucugau

SEQ ID NO: 3753042 - RNA, 15 nt, Human
gagucauuucugauu

SEQ ID NO: 3753043 - RNA, 21 nt, Human
gagucauuuuguguugaagag

SEQ ID NO: 3753044 - RNA, 14 nt, Human
gagucauuuuuaca

SEQ ID NO: 3753045 - RNA, 22 nt, Human
gaguccaacguggggcagcaca

SEQ ID NO: 3753046 - RNA, 19 nt, Human
gaguccaagguuuaaagag

SEQ ID NO: 3753047 - RNA, 22 nt, Human
gaguccacuuuguuucgugggg

SEQ ID NO: 3753048 - RNA, 16 nt, Human
gaguccaggcacagga

SEQ ID NO: 3753049 - RNA, 13 nt, Human
gaguccagucucu

SEQ ID NO: 3753050 - RNA, 15 nt, Human
gagucccaaggaaag

SEQ ID NO: 3753051 - RNA, 18 nt, Human
gagucccaaggaaagccc

SEQ ID NO: 3753052 - RNA, 12 nt, Human
gagucccaccuu

SEQ ID NO: 3753053 - RNA, 14 nt, Human
gagucccacugccu

SEQ ID NO: 3753054 - RNA, 20 nt, Human
gagucccacugccucagguu

SEQ ID NO: 3753055 - RNA, 19 nt, Human
gagucccagagcaggaggc

SEQ ID NO: 3753056 - RNA, 20 nt, Human
gagucccaggagcugcccag

SEQ ID NO: 3753057 - RNA, 22 nt, Human
gagucccagguuggcucugcca

SEQ ID NO: 3753058 - RNA, 20 nt, Human
gagucacccaugaagacagg

SEQ ID NO: 3753059 - RNA, 23 nt, Human
gagucaccuuccaggaccccugg

SEQ ID NO: 3753060 - RNA, 14 nt, Human
gagucaccuucccu

SEQ ID NO: 3753061 - RNA, 14 nt, Human
gagucacuggaaca

SEQ ID NO: 3753062 - RNA, 18 nt, Human
gagucagaaguuucugcc

SEQ ID NO: 3753063 - RNA, 22 nt, Human
gagucagacauuuuaagauggu

SEQ ID NO: 3753064 - RNA, 20 nt, Human
gagucagccucgcaggccuc

SEQ ID NO: 3753065 - RNA, 14 nt, Human
gagucagcucucug

SEQ ID NO: 3753066 - RNA, 16 nt, Human
gagucagcuguuucua

SEQ ID NO: 3753067 - RNA, 18 nt, Human
gagucagggaccccugcc

SEQ ID NO: 3753068 - RNA, 22 nt, Human
gagucagggcccagaggcugag

SEQ ID NO: 3753069 - RNA, 24 nt, Human
gagucagucgccuuucagcaggca

SEQ ID NO: 3753070 - RNA, 18 nt, Human
gagucauucguucugugg

SEQ ID NO: 3753071 - RNA, 14 nt, Human
gagucauuuaaaug

SEQ ID NO: 3753072 - RNA, 15 nt, Human
gagucauuuaaaugu

SEQ ID NO: 3753073 - RNA, 16 nt, Human
gagucauuuaaaugug

SEQ ID NO: 3753074 - RNA, 20 nt, Human
gagucauuuaaauguguaca

SEQ ID NO: 3753075 - RNA, 15 nt, Human
gaguccaagaaucca

SEQ ID NO: 3753076 - RNA, 14 nt, Human
gaguccaagcuggg

SEQ ID NO: 3753077 - RNA, 12 nt, Human
gaguccagggaa

SEQ ID NO: 3753078 - RNA, 13 nt, Human
gaguccaucagcc

SEQ ID NO: 3753079 - RNA, 15 nt, Human
gaguccaucagccuc

SEQ ID NO: 3753080 - RNA, 17 nt, Human
gaguccauucucccagg

SEQ ID NO: 3753081 - RNA, 14 nt, Human
gagucccaaggaaa

SEQ ID NO: 3753082 - RNA, 16 nt, Human
gagucccaaggaaagc

SEQ ID NO: 3753083 - RNA, 13 nt, Human
gagucccaccuug

SEQ ID NO: 3753084 - RNA, 20 nt, Human
gagucccaccuuggcugcag

SEQ ID NO: 3753085 - RNA, 22 nt, Human
gagucccacugccucagguucc

SEQ ID NO: 3753086 - RNA, 23 nt, Human
gagucccacugccucagguuccu

SEQ ID NO: 3753087 - RNA, 18 nt, Human
gagucccagugggaggcg

SEQ ID NO: 3753088 - RNA, 22 nt, Human
gaguccccccucccaccuccag

SEQ ID NO: 3753089 - RNA, 17 nt, Human
gaguccccucaccuccu

SEQ ID NO: 3753090 - RNA, 14 nt, Human
gagucccgucagga

SEQ ID NO: 3753091 - RNA, 14 nt, Human
gagucccugccauc

SEQ ID NO: 3753092 - RNA, 19 nt, Human
gagucccugccuggaccag

SEQ ID NO: 3753093 - RNA, 22 nt, Human
gaguccgaccuggccugucugu

SEQ ID NO: 3753094 - RNA, 17 nt, Human
gaguccucacucccagu

SEQ ID NO: 3753095 - RNA, 19 nt, Human
gaguccuggaugauacuaa

SEQ ID NO: 3753096 - RNA, 18 nt, Human
gaguccuuaaacagggca

SEQ ID NO: 3753097 - RNA, 13 nt, Human
gagucgcugugcc

SEQ ID NO: 3753098 - RNA, 22 nt, Human
gagucguacagaaagcugccug

SEQ ID NO: 3753099 - RNA, 20 nt, Human
gagucguggggugugcuggg

SEQ ID NO: 3753100 - RNA, 21 nt, Human
gagucguggggugugcuggga

SEQ ID NO: 3753101 - RNA, 12 nt, Human
gagucuaaagau

SEQ ID NO: 3753102 - RNA, 22 nt, Human
gagucuaaagauggaguuucua

SEQ ID NO: 3753103 - RNA, 20 nt, Human
gagucuagaaguuguuuguc

SEQ ID NO: 3753104 - RNA, 11 nt, Human
gagucuagaug

SEQ ID NO: 3753105 - RNA, 17 nt, Human
gagucuagauucaaagg

SEQ ID NO: 3753106 - RNA, 21 nt, Human
gagucuagauucaaagguucu

SEQ ID NO: 3753107 - RNA, 22 nt, Human
gagucuagauucaaagguucua

SEQ ID NO: 3753108 - RNA, 15 nt, Human
gagucuaucaaucaa

SEQ ID NO: 3753109 - RNA, 20 nt, Human
gagucucacuguugcccagg

SEQ ID NO: 3753110 - RNA, 14 nt, Human
gagucucucugggc

SEQ ID NO: 3753111 - RNA, 12 nt, Human
gagucugaaggc

SEQ ID NO: 3753112 - RNA, 21 nt, Human
gagucugaaggcuggguucug

SEQ ID NO: 3753113 - RNA, 13 nt, Human
gagucugaggucc

SEQ ID NO: 3753114 - RNA, 14 nt, Human
gagucugagguccu

SEQ ID NO: 3753115 - RNA, 18 nt, Human
gagucugagguccugagc

SEQ ID NO: 3753116 - RNA, 23 nt, Human
gagucugagguccugagcacugc

SEQ ID NO: 3753117 - RNA, 18 nt, Human
gagucugccacccaggau

SEQ ID NO: 3753118 - RNA, 17 nt, Human
gagucuggagugggcag

SEQ ID NO: 3753119 - RNA, 17 nt, Human
gagucuggcccuagacu

SEQ ID NO: 3753120 - RNA, 12 nt, Human
gagucugucuca

SEQ ID NO: 3753121 - RNA, 15 nt, Human
gagucugucucuguc

SEQ ID NO: 3753122 - RNA, 20 nt, Human
gagucuguugugugucaugc

SEQ ID NO: 3753123 - RNA, 17 nt, Human
gagucuguuuuguaaag

SEQ ID NO: 3753124 - RNA, 20 nt, Human
gagucuuacucugccgccca

SEQ ID NO: 3753125 - RNA, 16 nt, Human
gagucuugcagugauu

SEQ ID NO: 3753126 - RNA, 19 nt, Human
gagucuugguuucucucua

SEQ ID NO: 3753127 - RNA, 15 nt, Human
gagucuuugguucua

SEQ ID NO: 3753128 - RNA, 17 nt, Human
gagucuuugguucuaag

SEQ ID NO: 3753129 - RNA, 23 nt, Human
gagucuuuguaaguaaacugccc

SEQ ID NO: 3753130 - RNA, 20 nt, Human
gagugaaaccuuuagggcag

SEQ ID NO: 3753131 - RNA, 22 nt, Human
gagugaaaccuuuagggcagcu

SEQ ID NO: 3753132 - RNA, 23 nt, Human
gagugaaaccuuuagggcagcuu

SEQ ID NO: 3753133 - RNA, 12 nt, Human
gagugaaauacu

SEQ ID NO: 3753134 - RNA, 19 nt, Human
gagugaacaaauuuacaga

SEQ ID NO: 3753135 - RNA, 23 nt, Human
gagugaacaaauuuacagagaca

SEQ ID NO: 3753136 - RNA, 15 nt, Human
gagugaaccaucauu

SEQ ID NO: 3753137 - RNA, 16 nt, Human
gagugaaccuaccuuc

SEQ ID NO: 3753138 - RNA, 14 nt, Human
gagugaagaggggc

SEQ ID NO: 3753139 - RNA, 15 nt, Human
gagugaagaggggca

SEQ ID NO: 3753140 - RNA, 16 nt, Human
gagugaagaggggcag

SEQ ID NO: 3753141 - RNA, 14 nt, Human
gagugaauaaaugu

SEQ ID NO: 3753142 - RNA, 15 nt, Human
gagugaauaaauguc

SEQ ID NO: 3753143 - RNA, 17 nt, Human
gagugaaugccagugug

SEQ ID NO: 3753144 - RNA, 17 nt, Human
gagugacagaggcagcc

SEQ ID NO: 3753145 - RNA, 20 nt, Human
gagugacagaggcagcccca

SEQ ID NO: 3753146 - RNA, 14 nt, Human
gagugacagaguaa

SEQ ID NO: 3753147 - RNA, 20 nt, Human
gagugacggucccacacugg

SEQ ID NO: 3753148 - RNA, 16 nt, Human
gagugacuacacacag

SEQ ID NO: 3753149 - RNA, 17 nt, Human
gagugacuccaagaaca

SEQ ID NO: 3753150 - RNA, 18 nt, Human
gagugacucgaggguugg

SEQ ID NO: 3753151 - RNA, 19 nt, Human
gagugagacaaaauuuuag

SEQ ID NO: 3753152 - RNA, 18 nt, Human
gagugagaggggaggcca

SEQ ID NO: 3753153 - RNA, 20 nt, Human
gagugaggauaugaguagcc

SEQ ID NO: 3753154 - RNA, 17 nt, Human
gagugauauggagcaag

SEQ ID NO: 3753155 - RNA, 23 nt, Human
gagugcaaaaggcuugcagaacu

SEQ ID NO: 3753156 - RNA, 21 nt, Human
gagugcaagccccugcuccag

SEQ ID NO: 3753157 - RNA, 19 nt, Human
gagugcaaugacacagucu

SEQ ID NO: 3753158 - RNA, 14 nt, Human
gagugcaccaaaga

SEQ ID NO: 3753159 - RNA, 17 nt, Human
gagugcaccaaagagaa

SEQ ID NO: 3753160 - RNA, 23 nt, Human
gagugcagccguuugagaagaaa

SEQ ID NO: 3753161 - RNA, 14 nt, Human
gagugcaggcccac

SEQ ID NO: 3753162 - RNA, 19 nt, Human
gagugcaggcccacccugc

SEQ ID NO: 3753163 - RNA, 17 nt, Human
gagugcaggccugcuca

SEQ ID NO: 3753164 - RNA, 11 nt, Human
gagugcaguga

SEQ ID NO: 3753165 - RNA, 13 nt, Human
gagugccaggacu

SEQ ID NO: 3753166 - RNA, 19 nt, Human
gagugccaggacuccccag

SEQ ID NO: 3753167 - RNA, 22 nt, Human
gagugccaggacuccccaggcc

SEQ ID NO: 3753168 - RNA, 14 nt, Human
gagugccccaccug

SEQ ID NO: 3753169 - RNA, 19 nt, Human
gagugccccaccugccacu

SEQ ID NO: 3753170 - RNA, 14 nt, Human
gagugccuggccaa

SEQ ID NO: 3753171 - RNA, 16 nt, Human
gagugccuucuguggg

SEQ ID NO: 3753172 - RNA, 19 nt, Human
gagugcugaaggaauggaa

SEQ ID NO: 3753173 - RNA, 22 nt, Human
gagugcuggcucacaguacagc

SEQ ID NO: 3753174 - RNA, 12 nt, Human
gagugcuguuuu

SEQ ID NO: 3753175 - RNA, 17 nt, Human
gaguggacuggagugga

SEQ ID NO: 3753176 - RNA, 19 nt, Human
gaguggacuguucccugag

SEQ ID NO: 3753177 - RNA, 18 nt, Human
gaguggaggaggccuggg

SEQ ID NO: 3753178 - RNA, 19 nt, Human
gaguggagguuaaggcuga

SEQ ID NO: 3753179 - RNA, 20 nt, Human
gaguggagucugccacccag

SEQ ID NO: 3753180 - RNA, 18 nt, Human
gaguggaguggaagaaga

SEQ ID NO: 3753181 - RNA, 16 nt, Human
gaguggauagaugccc

SEQ ID NO: 3753182 - RNA, 18 nt, Human
gaguggauagaugcccug

SEQ ID NO: 3753183 - RNA, 16 nt, Human
gaguggaucuccaagg

SEQ ID NO: 3753184 - RNA, 19 nt, Human
gaguggaucuccaaggacc

SEQ ID NO: 3753185 - RNA, 18 nt, Human
gaguggaugauguuucgu

SEQ ID NO: 3753186 - RNA, 16 nt, Human
gaguggcagcccagcc

SEQ ID NO: 3753187 - RNA, 21 nt, Human
gaguggcagcccagccagcgu

SEQ ID NO: 3753188 - RNA, 14 nt, Human
gaguggcaggggac

SEQ ID NO: 3753189 - RNA, 23 nt, Human
gaguggcauuggcagcaggugcu

SEQ ID NO: 3753190 - RNA, 13 nt, Human
gaguggccccacc

SEQ ID NO: 3753191 - RNA, 12 nt, Human
gaguggccuggc

SEQ ID NO: 3753192 - RNA, 13 nt, Human
gaguggccuggcc

SEQ ID NO: 3753193 - RNA, 19 nt, Human
gaguggccuggccaggagc

SEQ ID NO: 3753194 - RNA, 13 nt, Human
gaguggcuccucc

SEQ ID NO: 3753195 - RNA, 16 nt, Human
gaguggcucgccaggc

SEQ ID NO: 3753196 - RNA, 12 nt, Human
gagugggaagcc

SEQ ID NO: 3753197 - RNA, 13 nt, Human
gagugggaagccc

SEQ ID NO: 3753198 - RNA, 23 nt, Human
gagugggggaucacagccucuga

SEQ ID NO: 3753199 - RNA, 21 nt, Human
gagugggguuaucucuguguu

SEQ ID NO: 3753200 - RNA, 13 nt, Human
gagugggugaaua

SEQ ID NO: 3753201 - RNA, 15 nt, Human
gaguggguggggagu

SEQ ID NO: 3753202 - RNA, 16 nt, Human
gaguggucagaacaga

SEQ ID NO: 3753203 - RNA, 14 nt, Human
gaguggucuuucug

SEQ ID NO: 3753204 - RNA, 19 nt, Human
gagugguggcucaugccug

SEQ ID NO: 3753205 - RNA, 21 nt, Human
gagugguuuaggcuauuugua

SEQ ID NO: 3753206 - RNA, 13 nt, Human
gaguguagaagca

SEQ ID NO: 3753207 - RNA, 20 nt, Human
gaguguagaagcauuccuuc

SEQ ID NO: 3753208 - RNA, 12 nt, Human
cucugcugaaga

SEQ ID NO: 3753209 - RNA, 13 nt, Human
cucugcugaagac

SEQ ID NO: 3753210 - RNA, 14 nt, Human
cucugcugaagguu

SEQ ID NO: 3753211 - RNA, 13 nt, Human
cucugcugacaga

SEQ ID NO: 3753212 - RNA, 21 nt, Human
cucugcugccgccccacccag

SEQ ID NO: 3753213 - RNA, 13 nt, Human
cucugcugcuggc

SEQ ID NO: 3753214 - RNA, 14 nt, Human
cucugcugcuggcu

SEQ ID NO: 3753215 - RNA, 16 nt, Human
cucugcugcugucccu

SEQ ID NO: 3753216 - RNA, 13 nt, Human
cucugcugcuuag

SEQ ID NO: 3753217 - RNA, 15 nt, Human
cucugcuggccuggc

SEQ ID NO: 3753218 - RNA, 17 nt, Human
cucugcuggccuggccg

SEQ ID NO: 3753219 - RNA, 16 nt, Human
cucugcuggucuucaa

SEQ ID NO: 3753220 - RNA, 18 nt, Human
cucugcuggucuucaauu

SEQ ID NO: 3753221 - RNA, 23 nt, Human
cucugcuguacauauuugagacu

SEQ ID NO: 3753222 - RNA, 14 nt, Human
cucugcuucccagg

SEQ ID NO: 3753223 - RNA, 18 nt, Human
cucugcuugagucagguu

SEQ ID NO: 3753224 - RNA, 17 nt, Human
cucugcuugccaucccu

SEQ ID NO: 3753225 - RNA, 18 nt, Human
cucugcuugccgaaacug

SEQ ID NO: 3753226 - RNA, 21 nt, Human
cucugcuugccgaaacuggaa

SEQ ID NO: 3753227 - RNA, 22 nt, Human
cucugcuugccgaaacuggaag

SEQ ID NO: 3753228 - RNA, 14 nt, Human
cucugcuuuaaagu

SEQ ID NO: 3753229 - RNA, 13 nt, Human
cucugcuuucuga

SEQ ID NO: 3753230 - RNA, 24 nt, Human
cucugcuuugacugagcagacugg

SEQ ID NO: 3753231 - RNA, 21 nt, Human
cucuggaaugacaugugucaa

SEQ ID NO: 3753232 - RNA, 15 nt, Human
cucuggacagcccca

SEQ ID NO: 3753233 - RNA, 16 nt, Human
cucuggacaggcaugu

SEQ ID NO: 3753234 - RNA, 16 nt, Human
cucuggaccaacccug

SEQ ID NO: 3753235 - RNA, 13 nt, Human
cucuggaccagcc

SEQ ID NO: 3753236 - RNA, 14 nt, Human
cucuggaccugccc

SEQ ID NO: 3753237 - RNA, 21 nt, Human
cucuggaccugcccccgcauc

SEQ ID NO: 3753238 - RNA, 17 nt, Human
cucuggacggcaggcuc

SEQ ID NO: 3753239 - RNA, 21 nt, Human
cucuggacucuaaagaccaaa

SEQ ID NO: 3753240 - RNA, 12 nt, Human
cucuggacugug

SEQ ID NO: 3753241 - RNA, 16 nt, Human
cucuggagacagcccc

SEQ ID NO: 3753242 - RNA, 17 nt, Human
cucuggagacagcccca

SEQ ID NO: 3753243 - RNA, 13 nt, Human
cucuggagagaaa

SEQ ID NO: 3753244 - RNA, 15 nt, Human
cucuggagagaaaca

SEQ ID NO: 3753245 - RNA, 14 nt, Human
cucuggagccaccu

SEQ ID NO: 3753246 - RNA, 15 nt, Human
cucuggagccaccug

SEQ ID NO: 3753247 - RNA, 21 nt, Human
cucuggagccagccgagcagg

SEQ ID NO: 3753248 - RNA, 13 nt, Human
cucuggagcccua

SEQ ID NO: 3753249 - RNA, 16 nt, Human
cucuggaggccucugg

SEQ ID NO: 3753250 - RNA, 17 nt, Human
cucuggaggccucuggg

SEQ ID NO: 3753251 - RNA, 20 nt, Human
cucuggaggccucugggccu

SEQ ID NO: 3753252 - RNA, 14 nt, Human
cucuggaggggagg

SEQ ID NO: 3753253 - RNA, 20 nt, Human
cucuggagggguguggcucc

SEQ ID NO: 3753254 - RNA, 14 nt, Human
cucuggagguacga

SEQ ID NO: 3753255 - RNA, 16 nt, Human
cucuggaguggccacu

SEQ ID NO: 3753256 - RNA, 22 nt, Human
cucuggaucaaaguaggcagga

SEQ ID NO: 3753257 - RNA, 15 nt, Human
cucuggaugccugau

SEQ ID NO: 3753258 - RNA, 15 nt, Human
cucuggauggcacca

SEQ ID NO: 3753259 - RNA, 19 nt, Human
cucuggauggcaccagagg

SEQ ID NO: 3753260 - RNA, 19 nt, Human
cucuggauuauauuaugaa

SEQ ID NO: 3753261 - RNA, 22 nt, Human
cucuggauuggagauagggaaa

SEQ ID NO: 3753262 - RNA, 14 nt, Human
cucuggcagcaccg

SEQ ID NO: 3753263 - RNA, 17 nt, Human
cucuggcagccacacuu

SEQ ID NO: 3753264 - RNA, 12 nt, Human
cucuggcagcuc

SEQ ID NO: 3753265 - RNA, 15 nt, Human
cucuggcagcucaga

SEQ ID NO: 3753266 - RNA, 19 nt, Human
cucuggcagcucagagagg

SEQ ID NO: 3753267 - RNA, 20 nt, Human
cucuggcagcucagagaggg

SEQ ID NO: 3753268 - RNA, 19 nt, Human
cucuggcaguucuggaaug

SEQ ID NO: 3753269 - RNA, 23 nt, Human
cucuggcauuagaauuauuuaaa

SEQ ID NO: 3753270 - RNA, 14 nt, Human
cucuggccacaaca

SEQ ID NO: 3753271 - RNA, 10 nt, Human
cucuggccag

SEQ ID NO: 3753272 - RNA, 15 nt, Human
cucuggccaggaugg

SEQ ID NO: 3753273 - RNA, 19 nt, Human
cucuggccaggauggaggg

SEQ ID NO: 3753274 - RNA, 14 nt, Human
cucuggccccaagg

SEQ ID NO: 3753275 - RNA, 13 nt, Human
cucuggcccugcc

SEQ ID NO: 3753276 - RNA, 15 nt, Human
cucuggcccugccuu

SEQ ID NO: 3753277 - RNA, 18 nt, Human
cucuggcccugccuucuu

SEQ ID NO: 3753278 - RNA, 13 nt, Human
cucuggcccuggc

SEQ ID NO: 3753279 - RNA, 13 nt, Human
cucuggccuccca

SEQ ID NO: 3753280 - RNA, 18 nt, Human
cucuggccuucggccucc

SEQ ID NO: 3753281 - RNA, 16 nt, Human
cucuggcuagaggcca

SEQ ID NO: 3753282 - RNA, 22 nt, Human
cucuggcuagaggccagcccca

SEQ ID NO: 3753283 - RNA, 15 nt, Human
cucuggcuccagcug

SEQ ID NO: 3753284 - RNA, 16 nt, Human
cucuggcuccagcugg

SEQ ID NO: 3753285 - RNA, 17 nt, Human
cucuggcugaacccugu

SEQ ID NO: 3753286 - RNA, 21 nt, Human
cucuggcugaacccugugcug

SEQ ID NO: 3753287 - RNA, 19 nt, Human
cucuggcuguaaggcucua

SEQ ID NO: 3753288 - RNA, 12 nt, Human
cucuggcuucca

SEQ ID NO: 3753289 - RNA, 15 nt, Human
cucuggcuuuuggaa

SEQ ID NO: 3753290 - RNA, 22 nt, Human
cucugggaaaugagaaggcagc

SEQ ID NO: 3753291 - RNA, 15 nt, Human
cucugggaaccuccc

SEQ ID NO: 3753292 - RNA, 17 nt, Human
cucugggaaccucccag

SEQ ID NO: 3753293 - RNA, 23 nt, Human
cucugggaaccucccagaggucc

SEQ ID NO: 3753294 - RNA, 23 nt, Human
cucugggccaagucaaagacauu

SEQ ID NO: 3753295 - RNA, 17 nt, Human
cucugggccacuuggag

SEQ ID NO: 3753296 - RNA, 17 nt, Human
cucugggcuauggacac

SEQ ID NO: 3753297 - RNA, 20 nt, Human
cucugggcuauggacacagg

SEQ ID NO: 3753298 - RNA, 13 nt, Human
cucugggcucuga

SEQ ID NO: 3753299 - RNA, 21 nt, Human
cucugggcuggaugagcuccc

SEQ ID NO: 3753300 - RNA, 16 nt, Human
cucuggggcucuaggg

SEQ ID NO: 3753301 - RNA, 19 nt, Human
cucugggggguggccaggc

SEQ ID NO: 3753302 - RNA, 20 nt, Human
cucugggggguggccaggcc

SEQ ID NO: 3753303 - RNA, 20 nt, Human
cucuggggucccccaucccc

SEQ ID NO: 3753304 - RNA, 15 nt, Human
cucuggggugggcag

SEQ ID NO: 3753305 - RNA, 20 nt, Human
cucugggucagugguccaca

SEQ ID NO: 3753306 - RNA, 15 nt, Human
cucuggguccuuccu

SEQ ID NO: 3753307 - RNA, 18 nt, Human
cucuggguccuuccugaa

SEQ ID NO: 3753308 - RNA, 20 nt, Human
cucugguacaauuucuuuug

SEQ ID NO: 3753309 - RNA, 14 nt, Human
cucugguaucuaau

SEQ ID NO: 3753310 - RNA, 19 nt, Human
cucugguccauagagagca

SEQ ID NO: 3753311 - RNA, 17 nt, Human
cucuggucgcuccugcc

SEQ ID NO: 3753312 - RNA, 20 nt, Human
cucuggucgcuccugcccac

SEQ ID NO: 3753313 - RNA, 19 nt, Human
cucuggucuccucuuuguu

SEQ ID NO: 3753314 - RNA, 20 nt, Human
cucuggucuucuuuggguaa

SEQ ID NO: 3753315 - RNA, 16 nt, Human
cucuggucuuggaauu

SEQ ID NO: 3753316 - RNA, 16 nt, Human
cucuggugacaccagc

SEQ ID NO: 3753317 - RNA, 18 nt, Human
cucuggugacaccagccu

SEQ ID NO: 3753318 - RNA, 22 nt, Human
cucuggugagucuuggcggcag

SEQ ID NO: 3753319 - RNA, 13 nt, Human
cucuggugccucc

SEQ ID NO: 3753320 - RNA, 18 nt, Human
cucuggugccuccagagg

SEQ ID NO: 3753321 - RNA, 16 nt, Human
cucugguucuucauuu

SEQ ID NO: 3753322 - RNA, 13 nt, Human
cucugguucuuug

SEQ ID NO: 3753323 - RNA, 20 nt, Human
cucugguuguuucuguucca

SEQ ID NO: 3753324 - RNA, 22 nt, Human
cucugguuguuucuguuccaaa

SEQ ID NO: 3753325 - RNA, 14 nt, Human
cucugguuucucau

SEQ ID NO: 3753326 - RNA, 21 nt, Human
cucuguaaagcuaaaauaaag

SEQ ID NO: 3753327 - RNA, 18 nt, Human
cucuguaaucucguuuca

SEQ ID NO: 3753328 - RNA, 18 nt, Human
cucuguaauugaauauua

SEQ ID NO: 3753329 - RNA, 15 nt, Human
cucuguaauugcaaa

SEQ ID NO: 3753330 - RNA, 16 nt, Human
cucuguacauauuagc

SEQ ID NO: 3753331 - RNA, 20 nt, Human
cucuguacuuuucauucucu

SEQ ID NO: 3753332 - RNA, 15 nt, Human
cucugucaaugaaaa

SEQ ID NO: 3753333 - RNA, 16 nt, Human
cucugucacccuuguc

SEQ ID NO: 3753334 - RNA, 20 nt, Human
cucugucacuccucaugccu

SEQ ID NO: 3753335 - RNA, 13 nt, Human
cucugucagaugg

SEQ ID NO: 3753336 - RNA, 14 nt, Human
cucugucagucaca

SEQ ID NO: 3753337 - RNA, 20 nt, Human
cucugucagucacagccacc

SEQ ID NO: 3753338 - RNA, 12 nt, Human
cucuguccaggc

SEQ ID NO: 3753339 - RNA, 20 nt, Human
cucuguccagggcccugagc

SEQ ID NO: 3753340 - RNA, 21 nt, Human
cucuguccagggcccugagcu

SEQ ID NO: 3753341 - RNA, 18 nt, Human
cucugucccauucccugg

SEQ ID NO: 3753342 - RNA, 19 nt, Human
cucugucccauucccuggg

SEQ ID NO: 3753343 - RNA, 13 nt, Human
cucuguccccagc

SEQ ID NO: 3753344 - RNA, 16 nt, Human
cucugucccuugcugu

SEQ ID NO: 3753345 - RNA, 13 nt, Human
cucuguccugaag

SEQ ID NO: 3753346 - RNA, 17 nt, Human
cucuguccugaaggccu

SEQ ID NO: 3753347 - RNA, 19 nt, Human
cucuguccugaaggccuga

SEQ ID NO: 3753348 - RNA, 14 nt, Human
cucuguccugcuuc

SEQ ID NO: 3753349 - RNA, 13 nt, Human
cucuguccuggga

SEQ ID NO: 3753350 - RNA, 15 nt, Human
cucugucgcccaggc

SEQ ID NO: 3753351 - RNA, 18 nt, Human
cucugucgcccaggcugg

SEQ ID NO: 3753352 - RNA, 18 nt, Human
cucugucgcccaugcugg

SEQ ID NO: 3753353 - RNA, 15 nt, Human
cucugucuacaaaua

SEQ ID NO: 3753354 - RNA, 16 nt, Human
cucugucuaccaucuc

SEQ ID NO: 3753355 - RNA, 22 nt, Human
cucugucuaccaucucccucga

SEQ ID NO: 3753356 - RNA, 19 nt, Human
cucugucuacuugcucagg

SEQ ID NO: 3753357 - RNA, 15 nt, Human
cucugucucauccau

SEQ ID NO: 3753358 - RNA, 17 nt, Human
cucugucucauccuccu

SEQ ID NO: 3753359 - RNA, 15 nt, Human
gaguguagacugugg

SEQ ID NO: 3753360 - RNA, 11 nt, Human
gaguguaguga

SEQ ID NO: 3753361 - RNA, 18 nt, Human
gagugucaaccagacaga

SEQ ID NO: 3753362 - RNA, 20 nt, Human
gagugucaaccagacagagg

SEQ ID NO: 3753363 - RNA, 18 nt, Human
gagugucuggaauugugg

SEQ ID NO: 3753364 - RNA, 11 nt, Human
gagugugaagg

SEQ ID NO: 3753365 - RNA, 20 nt, Human
gagugugaauauaaaugugu

SEQ ID NO: 3753366 - RNA, 22 nt, Human
gagugugaauauaaaugugugu

SEQ ID NO: 3753367 - RNA, 16 nt, Human
gagugugacagggcca

SEQ ID NO: 3753368 - RNA, 18 nt, Human
gagugugagccaccuaag

SEQ ID NO: 3753369 - RNA, 15 nt, Human
gagugugcugcugua

SEQ ID NO: 3753370 - RNA, 15 nt, Human
gagugugcuggagga

SEQ ID NO: 3753371 - RNA, 16 nt, Human
gaguguggcuccccuc

SEQ ID NO: 3753372 - RNA, 16 nt, Human
gaguguggcugaggag

SEQ ID NO: 3753373 - RNA, 19 nt, Human
gagugugguuucuuuuuga

SEQ ID NO: 3753374 - RNA, 17 nt, Human
gaguguguaugccaaga

SEQ ID NO: 3753375 - RNA, 21 nt, Human
gaguguguccaagugugugug

SEQ ID NO: 3753376 - RNA, 19 nt, Human
gagugugugcaugugugug

SEQ ID NO: 3753377 - RNA, 15 nt, Human
gagugugugugugca

SEQ ID NO: 3753378 - RNA, 19 nt, Human
gaguguguguuugugcuga

SEQ ID NO: 3753379 - RNA, 14 nt, Human
gaguguuauguauu

SEQ ID NO: 3753380 - RNA, 13 nt, Human
gaguguucccuau

SEQ ID NO: 3753381 - RNA, 17 nt, Human
gaguguuugggggacgu

SEQ ID NO: 3753382 - RNA, 13 nt, Human
gaguuaagaagcu

SEQ ID NO: 3753383 - RNA, 12 nt, Human
gaguuaagaccu

SEQ ID NO: 3753384 - RNA, 17 nt, Human
gaguuaagaccuggcag

SEQ ID NO: 3753385 - RNA, 12 nt, Human
gaguuacagaca

SEQ ID NO: 3753386 - RNA, 15 nt, Human
gaguuacagacaaag

SEQ ID NO: 3753387 - RNA, 19 nt, Human
gaguuacagcgagaggcag

SEQ ID NO: 3753388 - RNA, 16 nt, Human
gaguuagaggccagcc

SEQ ID NO: 3753389 - RNA, 17 nt, Human
gaguuaggaaugagaag

SEQ ID NO: 3753390 - RNA, 14 nt, Human
gaguuauauguuca

SEQ ID NO: 3753391 - RNA, 17 nt, Human
gaguuaucaugaauuuu

SEQ ID NO: 3753392 - RNA, 19 nt, Human
gaguuaucaugaauuuuaa

SEQ ID NO: 3753393 - RNA, 23 nt, Human
gaguuaucaugaauuuuaaagua

SEQ ID NO: 3753394 - RNA, 20 nt, Human
gaguuauugaagcagagugg

SEQ ID NO: 3753395 - RNA, 19 nt, Human
gaguucaagaccagccugg

SEQ ID NO: 3753396 - RNA, 13 nt, Human
gaguucaaugauc

SEQ ID NO: 3753397 - RNA, 16 nt, Human
gaguucaaugaucuag

SEQ ID NO: 3753398 - RNA, 15 nt, Human
gaguucagcugcuuc

SEQ ID NO: 3753399 - RNA, 19 nt, Human
gaguucagguagcugcccc

SEQ ID NO: 3753400 - RNA, 20 nt, Human
gaguucauacccuguuacca

SEQ ID NO: 3753401 - RNA, 20 nt, Human
gaguucaucuugaauuguaa

SEQ ID NO: 3753402 - RNA, 16 nt, Human
gaguuccagaaaguaa

SEQ ID NO: 3753403 - RNA, 23 nt, Human
gaguuccugcggagugaagaggg

SEQ ID NO: 3753404 - RNA, 21 nt, Human
gaguuccuugaucuguauaua

SEQ ID NO: 3753405 - RNA, 19 nt, Human
gaguucgagaccagccugg

SEQ ID NO: 3753406 - RNA, 20 nt, Human
gaguucgagaccagccuggc

SEQ ID NO: 3753407 - RNA, 13 nt, Human
gaguucucagggc

SEQ ID NO: 3753408 - RNA, 18 nt, Human
gaguucucagggcuccug

SEQ ID NO: 3753409 - RNA, 19 nt, Human
gaguucucagggcuccugc

SEQ ID NO: 3753410 - RNA, 16 nt, Human
gaguucucccuguaca

SEQ ID NO: 3753411 - RNA, 22 nt, Human
gaguucucccuguacaguguua

SEQ ID NO: 3753412 - RNA, 21 nt, Human
gaguucuguguauuuucaguc

SEQ ID NO: 3753413 - RNA, 17 nt, Human
gaguucuuuuugaagua

SEQ ID NO: 3753414 - RNA, 16 nt, Human
cucuuuuuggaggugc

SEQ ID NO: 3753415 - RNA, 17 nt, Human
cucuuuuugggcuccuu

SEQ ID NO: 3753416 - RNA, 14 nt, Human
cucuuuuuguuuuu

SEQ ID NO: 3753417 - RNA, 14 nt, Human
cucuuuuuuacaaa

SEQ ID NO: 3753418 - RNA, 15 nt, Human
cucuuuuuuacucau

SEQ ID NO: 3753419 - RNA, 16 nt, Human
cucuuuuuuacucauu

SEQ ID NO: 3753420 - RNA, 17 nt, Human
cucuuuuuucguuuguu

SEQ ID NO: 3753421 - RNA, 14 nt, Human
cugaaaaaaaguuu

SEQ ID NO: 3753422 - RNA, 22 nt, Human
cugaaaaaacaccuagcuuuau

SEQ ID NO: 3753423 - RNA, 21 nt, Human
cugaaaaaucacauccuggcc

SEQ ID NO: 3753424 - RNA, 23 nt, Human
cugaaaaaucacauccuggccug

SEQ ID NO: 3753425 - RNA, 21 nt, Human
cugaaaaaugguaauuguugc

SEQ ID NO: 3753426 - RNA, 17 nt, Human
cugaaaacacugugcac

SEQ ID NO: 3753427 - RNA, 19 nt, Human
cugaaaaccaucuggccug

SEQ ID NO: 3753428 - RNA, 20 nt, Human
cugaaaaccaucuggccugg

SEQ ID NO: 3753429 - RNA, 19 nt, Human
cugaaaaccuaaguccuuu

SEQ ID NO: 3753430 - RNA, 17 nt, Human
cugaaaacggcccucuu

SEQ ID NO: 3753431 - RNA, 21 nt, Human
cugaaaacuggaauaagaagc

SEQ ID NO: 3753432 - RNA, 17 nt, Human
cugaaaacuucauucuu

SEQ ID NO: 3753433 - RNA, 18 nt, Human
cugaaaagaaggaaagau

SEQ ID NO: 3753434 - RNA, 18 nt, Human
cugaaaagacucaguguu

SEQ ID NO: 3753435 - RNA, 13 nt, Human
cugaaaagagagc

SEQ ID NO: 3753436 - RNA, 17 nt, Human
cugaaaagagagcagag

SEQ ID NO: 3753437 - RNA, 23 nt, Human
cugaaaagagagcagagaauaua

SEQ ID NO: 3753438 - RNA, 18 nt, Human
cugaaaauaccaucaggc

SEQ ID NO: 3753439 - RNA, 15 nt, Human
cugaaaauauaacca

SEQ ID NO: 3753440 - RNA, 22 nt, Human
cugaaaauauuguuuuacaaua

SEQ ID NO: 3753441 - RNA, 24 nt, Human
cugaaaauauuguuuuacaauagu

SEQ ID NO: 3753442 - RNA, 17 nt, Human
cugaaaaucuaauauua

SEQ ID NO: 3753443 - RNA, 20 nt, Human
cugaaaaucuaauauuaaaa

SEQ ID NO: 3753444 - RNA, 14 nt, Human
cugaaaauguaugu

SEQ ID NO: 3753445 - RNA, 18 nt, Human
cugaaaauguccuuguga

SEQ ID NO: 3753446 - RNA, 13 nt, Human
cugaaaaugugaa

SEQ ID NO: 3753447 - RNA, 12 nt, Human
cugaaaauguug

SEQ ID NO: 3753448 - RNA, 16 nt, Human
cugaaaauuaacacug

SEQ ID NO: 3753449 - RNA, 23 nt, Human
cugaaaauuggacagauugccug

SEQ ID NO: 3753450 - RNA, 13 nt, Human
cugaaacagauuu

SEQ ID NO: 3753451 - RNA, 10 nt, Human
cugaaacagc

SEQ ID NO: 3753452 - RNA, 12 nt, Human
cugaaacagcug

SEQ ID NO: 3753453 - RNA, 15 nt, Human
cugaaacagcugccu

SEQ ID NO: 3753454 - RNA, 16 nt, Human
cugaaacagcugccuu

SEQ ID NO: 3753455 - RNA, 18 nt, Human
cugaaacagcugccuuag

SEQ ID NO: 3753456 - RNA, 13 nt, Human
cugaaacaggaga

SEQ ID NO: 3753457 - RNA, 16 nt, Human
cugaaacccuggacca

SEQ ID NO: 3753458 - RNA, 17 nt, Human
cugaaaccuuuaagaaa

SEQ ID NO: 3753459 - RNA, 20 nt, Human
cugaaacgcuccuuugugug

SEQ ID NO: 3753460 - RNA, 15 nt, Human
cugaaacuaaugaaa

SEQ ID NO: 3753461 - RNA, 19 nt, Human
cugaaacucauagacacug

SEQ ID NO: 3753462 - RNA, 17 nt, Human
cugaaacuuacacacaa

SEQ ID NO: 3753463 - RNA, 20 nt, Human
cugaaacuucaagcaccagg

SEQ ID NO: 3753464 - RNA, 21 nt, Human
cugaaacuugcugagcuguuu

SEQ ID NO: 3753465 - RNA, 15 nt, Human
cugaaagacaauaua

SEQ ID NO: 3753466 - RNA, 21 nt, Human
cugaaagacugaagaaagugu

SEQ ID NO: 3753467 - RNA, 22 nt, Human
cugaaagaguccauuguuuaaa

SEQ ID NO: 3753468 - RNA, 16 nt, Human
cugaaagcacaggaga

SEQ ID NO: 3753469 - RNA, 16 nt, Human
cugaaagcccugagcu

SEQ ID NO: 3753470 - RNA, 18 nt, Human
cugaaagcccugagcuuu

SEQ ID NO: 3753471 - RNA, 16 nt, Human
cugaaaggaagcugug

SEQ ID NO: 3753472 - RNA, 19 nt, Human
cugaaagugaaaguccaga

SEQ ID NO: 3753473 - RNA, 21 nt, Human
cugaaaguguguguaguuuua

SEQ ID NO: 3753474 - RNA, 13 nt, Human
cugaaaguuaccc

SEQ ID NO: 3753475 - RNA, 22 nt, Human
cugaaaguuacccacugaagcc

SEQ ID NO: 3753476 - RNA, 15 nt, Human
cugaaaguuguacau

SEQ ID NO: 3753477 - RNA, 16 nt, Human
cugaaaguuguacaug

SEQ ID NO: 3753478 - RNA, 20 nt, Human
cugaaaguuguacaugaaau

SEQ ID NO: 3753479 - RNA, 17 nt, Human
cugaaaguuuuguaaaa

SEQ ID NO: 3753480 - RNA, 15 nt, Human
cugaaauaaaagcua

SEQ ID NO: 3753481 - RNA, 20 nt, Human
cugaaauaaacgucuuaaau

SEQ ID NO: 3753482 - RNA, 19 nt, Human
cugaaauauacacacagca

SEQ ID NO: 3753483 - RNA, 22 nt, Human
cugaaauaucccgggggugggg

SEQ ID NO: 3753484 - RNA, 14 nt, Human
cugaaauccugguu

SEQ ID NO: 3753485 - RNA, 17 nt, Human
cugaaauccugguuccu

SEQ ID NO: 3753486 - RNA, 13 nt, Human
cugaaaugaagau

SEQ ID NO: 3753487 - RNA, 17 nt, Human
cugaaaugccuuacuuu

SEQ ID NO: 3753488 - RNA, 23 nt, Human
cugaaaugccuuacuuuguauga

SEQ ID NO: 3753489 - RNA, 16 nt, Human
cugaaaugugugugau

SEQ ID NO: 3753490 - RNA, 19 nt, Human
cugaaaugugugugaugug

SEQ ID NO: 3753491 - RNA, 20 nt, Human
cugaaaugugugugauguga

SEQ ID NO: 3753492 - RNA, 16 nt, Human
cugaaauguguuuccu

SEQ ID NO: 3753493 - RNA, 14 nt, Human
cugaaauucuaaag

SEQ ID NO: 3753494 - RNA, 15 nt, Human
cugaaauucuccugg

SEQ ID NO: 3753495 - RNA, 15 nt, Human
cugaaauugaaaagu

SEQ ID NO: 3753496 - RNA, 14 nt, Human
cugaaauuucagau

SEQ ID NO: 3753497 - RNA, 13 nt, Human
cugaaauuuuaga

SEQ ID NO: 3753498 - RNA, 18 nt, Human
cugaaauuuuagaaauau

SEQ ID NO: 3753499 - RNA, 16 nt, Human
cugaaauuuuucuucu

SEQ ID NO: 3753500 - RNA, 19 nt, Human
cugaaauuuuucuucuuga

SEQ ID NO: 3753501 - RNA, 13 nt, Human
cugaacaaaaaaa

SEQ ID NO: 3753502 - RNA, 21 nt, Human
cugaacaaacuaaaggugcac

SEQ ID NO: 3753503 - RNA, 21 nt, Human
cugaacaaacuaucagaggaa

SEQ ID NO: 3753504 - RNA, 16 nt, Human
cugaacacaggcagcu

SEQ ID NO: 3753505 - RNA, 17 nt, Human
cugaacacaggcagcuu

SEQ ID NO: 3753506 - RNA, 11 nt, Human
cugaacaccau

SEQ ID NO: 3753507 - RNA, 23 nt, Human
cugaacacuccaauuaaggauuu

SEQ ID NO: 3753508 - RNA, 22 nt, Human
cugaacacugaagucaguucuc

SEQ ID NO: 3753509 - RNA, 13 nt, Human
cugaacagaagcu

SEQ ID NO: 3753510 - RNA, 14 nt, Human
cugaacagcuggug

SEQ ID NO: 3753511 - RNA, 15 nt, Human
cugaacagcuggugu

SEQ ID NO: 3753512 - RNA, 19 nt, Human
cugaacagcugguguagcu

SEQ ID NO: 3753513 - RNA, 13 nt, Human
cugaacagcugua

SEQ ID NO: 3753514 - RNA, 12 nt, Human
cugaacagugga

SEQ ID NO: 3753515 - RNA, 17 nt, Human
cugaacaucacagcuua

SEQ ID NO: 3753516 - RNA, 17 nt, Human
cugaacauccuuccuuc

SEQ ID NO: 3753517 - RNA, 15 nt, Human
cugaacaucugaguc

SEQ ID NO: 3753518 - RNA, 14 nt, Human
cugaacauugcaua

SEQ ID NO: 3753519 - RNA, 15 nt, Human
cugaaccacuuguag

SEQ ID NO: 3753520 - RNA, 18 nt, Human
cugaaccacuuguagauu

SEQ ID NO: 3753521 - RNA, 14 nt, Human
cugaaccaucccug

SEQ ID NO: 3753522 - RNA, 16 nt, Human
cugaaccccagggcug

SEQ ID NO: 3753523 - RNA, 17 nt, Human
cugaacccugugcuggu

SEQ ID NO: 3753524 - RNA, 17 nt, Human
cugaaccgcacagcuca

SEQ ID NO: 3753525 - RNA, 18 nt, Human
cugaaccgcacagcucag

SEQ ID NO: 3753526 - RNA, 19 nt, Human
cugaaccgcacagcucagg

SEQ ID NO: 3753527 - RNA, 20 nt, Human
cugaaccgcacagcucagga

SEQ ID NO: 3753528 - RNA, 23 nt, Human
cugaaccuauuucuuaaacacuu

SEQ ID NO: 3753529 - RNA, 17 nt, Human
cugaacggggagaaaag

SEQ ID NO: 3753530 - RNA, 23 nt, Human
cugaacguuugguucaaaugugu

SEQ ID NO: 3753531 - RNA, 18 nt, Human
cugaacucaaacugagga

SEQ ID NO: 3753532 - RNA, 13 nt, Human
cugaacucuccag

SEQ ID NO: 3753533 - RNA, 13 nt, Human
cugaacugaacac

SEQ ID NO: 3753534 - RNA, 15 nt, Human
cugaacuguguguaa

SEQ ID NO: 3753535 - RNA, 20 nt, Human
cugaacuuaauaacugugua

SEQ ID NO: 3753536 - RNA, 13 nt, Human
cugaacuuuggag

SEQ ID NO: 3753537 - RNA, 16 nt, Human
cugaacuuuggagagu

SEQ ID NO: 3753538 - RNA, 14 nt, Human
cugaacuuugggaa

SEQ ID NO: 3753539 - RNA, 15 nt, Human
cugaagaaccagucc

SEQ ID NO: 3753540 - RNA, 17 nt, Human
cugaagaacucucugga

SEQ ID NO: 3753541 - RNA, 17 nt, Human
cugaagaauuaagauac

SEQ ID NO: 3753542 - RNA, 14 nt, Human
cugaagaggcgggc

SEQ ID NO: 3753543 - RNA, 15 nt, Human
cugaagaggcgggcc

SEQ ID NO: 3753544 - RNA, 23 nt, Human
cugaagaguugccccgucucugu

SEQ ID NO: 3753545 - RNA, 19 nt, Human
cugaagauacaugucuuuc

SEQ ID NO: 3753546 - RNA, 15 nt, Human
cugaagauagaagaa

SEQ ID NO: 3753547 - RNA, 16 nt, Human
cugaagauagaagaaa

SEQ ID NO: 3753548 - RNA, 14 nt, Human
cugaagauuguuua

SEQ ID NO: 3753549 - RNA, 15 nt, Human
cugaagauuguuuau

SEQ ID NO: 3753550 - RNA, 16 nt, Human
cugaagauuguuuauc

SEQ ID NO: 3753551 - RNA, 13 nt, Human
gauauucuaagac

SEQ ID NO: 3753552 - RNA, 15 nt, Human
gauauucuuuguuaa

SEQ ID NO: 3753553 - RNA, 13 nt, Human
gauauugaauguu

SEQ ID NO: 3753554 - RNA, 18 nt, Human
gauauugaggccaagaau

SEQ ID NO: 3753555 - RNA, 15 nt, Human
gauauuguacauaaa

SEQ ID NO: 3753556 - RNA, 13 nt, Human
gauauugugaaca

SEQ ID NO: 3753557 - RNA, 17 nt, Human
gauauugugaaguacau

SEQ ID NO: 3753558 - RNA, 20 nt, Human
gauauuuaagaaaauacaau

SEQ ID NO: 3753559 - RNA, 23 nt, Human
gauauuuaagaaaauacaauaaa

SEQ ID NO: 3753560 - RNA, 11 nt, Human
gauauuucaga

SEQ ID NO: 3753561 - RNA, 23 nt, Human
gauauuucuauuuccuggaaugg

SEQ ID NO: 3753562 - RNA, 22 nt, Human
gauauuucucuaguaguuaaaa

SEQ ID NO: 3753563 - RNA, 13 nt, Human
gauauuuggcuua

SEQ ID NO: 3753564 - RNA, 18 nt, Human
gauauuuggcuuaaauau

SEQ ID NO: 3753565 - RNA, 20 nt, Human
gauauuuguauuuauucuuu

SEQ ID NO: 3753566 - RNA, 13 nt, Human
gauauuugugcau

SEQ ID NO: 3753567 - RNA, 21 nt, Human
gauauuuuaccucuuauugca

SEQ ID NO: 3753568 - RNA, 20 nt, Human
gauauuuuauuuugaaaugg

SEQ ID NO: 3753569 - RNA, 18 nt, Human
gauauuuucaaauuguau

SEQ ID NO: 3753570 - RNA, 20 nt, Human
gauauuuucaaauuguaucu

SEQ ID NO: 3753571 - RNA, 21 nt, Human
gauauuuucugugccugaaua

SEQ ID NO: 3753572 - RNA, 13 nt, Human
gauauuuuuaaua

SEQ ID NO: 3753573 - RNA, 17 nt, Human
gauauuuuucauaaaca

SEQ ID NO: 3753574 - RNA, 18 nt, Human
gauauuuuuccauuuuuu

SEQ ID NO: 3753575 - RNA, 14 nt, Human
gaucaaaaaggcuu

SEQ ID NO: 3753576 - RNA, 20 nt, Human
gaucaaaauaaaaagugaca

SEQ ID NO: 3753577 - RNA, 18 nt, Human
gaucaaauguuuaaucau

SEQ ID NO: 3753578 - RNA, 16 nt, Human
gaucaacaucuuuucu

SEQ ID NO: 3753579 - RNA, 17 nt, Human
gaucaacaucuuuucuu

SEQ ID NO: 3753580 - RNA, 16 nt, Human
gaucaacgccucacug

SEQ ID NO: 3753581 - RNA, 18 nt, Human
gaucaacgccucacugaa

SEQ ID NO: 3753582 - RNA, 20 nt, Human
gaucaagcaauaauaauuuu

SEQ ID NO: 3753583 - RNA, 18 nt, Human
gaucaaggagaggaggca

SEQ ID NO: 3753584 - RNA, 13 nt, Human
gaucaaguauuac

SEQ ID NO: 3753585 - RNA, 22 nt, Human
gaucaauccuuuauuauuauuu

SEQ ID NO: 3753586 - RNA, 12 nt, Human
gaucaaugacag

SEQ ID NO: 3753587 - RNA, 15 nt, Human
gaucaauuaaaugua

SEQ ID NO: 3753588 - RNA, 18 nt, Human
gaucaauuauaguuucug

SEQ ID NO: 3753589 - RNA, 12 nt, Human
gaucacaaauga

SEQ ID NO: 3753590 - RNA, 15 nt, Human
gaucacaacgugcau

SEQ ID NO: 3753591 - RNA, 22 nt, Human
gaucacaacgugcauugugcuu

SEQ ID NO: 3753592 - RNA, 14 nt, Human
gaucacaagaugga

SEQ ID NO: 3753593 - RNA, 16 nt, Human
gaucacagcagcuucu

SEQ ID NO: 3753594 - RNA, 19 nt, Human
gaucacagcuucagccagg

SEQ ID NO: 3753595 - RNA, 21 nt, Human
gaucacagcuucagccaggag

SEQ ID NO: 3753596 - RNA, 13 nt, Human
gaucacagggccc

SEQ ID NO: 3753597 - RNA, 20 nt, Human
gaucacagggccccagaagg

SEQ ID NO: 3753598 - RNA, 16 nt, Human
gaucacauguggacuu

SEQ ID NO: 3753599 - RNA, 20 nt, Human
gaucaccagcccggccugcu

SEQ ID NO: 3753600 - RNA, 23 nt, Human
gaucaccgacugaaaauauuguu

SEQ ID NO: 3753601 - RNA, 14 nt, Human
gaucaccugagguc

SEQ ID NO: 3753602 - RNA, 14 nt, Human
gaucaccugagguu

SEQ ID NO: 3753603 - RNA, 17 nt, Human
gaucacgacgcugcaga

SEQ ID NO: 3753604 - RNA, 21 nt, Human
gaucacgagaucaagagauca

SEQ ID NO: 3753605 - RNA, 15 nt, Human
gaucacgaggucagg

SEQ ID NO: 3753606 - RNA, 13 nt, Human
gaucacgccacug

SEQ ID NO: 3753607 - RNA, 15 nt, Human
gaucacgccacugca

SEQ ID NO: 3753608 - RNA, 15 nt, Human
gaucacggcucacug

SEQ ID NO: 3753609 - RNA, 23 nt, Human
gaucacggcucacugcagccuca

SEQ ID NO: 3753610 - RNA, 14 nt, Human
gaucacugaaauaa

SEQ ID NO: 3753611 - RNA, 16 nt, Human
gaucacugccacacuc

SEQ ID NO: 3753612 - RNA, 12 nt, Human
gaucacuggagc

SEQ ID NO: 3753613 - RNA, 13 nt, Human
gaucacuggagcc

SEQ ID NO: 3753614 - RNA, 14 nt, Human
gaucacuggagccc

SEQ ID NO: 3753615 - RNA, 15 nt, Human
gaucacuuguuguuu

SEQ ID NO: 3753616 - RNA, 22 nt, Human
gaucagaaaaauggagcaaagu

SEQ ID NO: 3753617 - RNA, 11 nt, Human
gaucagaaagu

SEQ ID NO: 3753618 - RNA, 12 nt, Human
gaucagaaagua

SEQ ID NO: 3753619 - RNA, 15 nt, Human
gaucagaaauacaga

SEQ ID NO: 3753620 - RNA, 13 nt, Human
gaucagaacaaau

SEQ ID NO: 3753621 - RNA, 16 nt, Human
gaucagaccauaaugu

SEQ ID NO: 3753622 - RNA, 23 nt, Human
gaucagagcaggaccucccuucc

SEQ ID NO: 3753623 - RNA, 16 nt, Human
gaucagagccgugguc

SEQ ID NO: 3753624 - RNA, 23 nt, Human
gaucagagccgugguccuuuggg

SEQ ID NO: 3753625 - RNA, 14 nt, Human
gaucagaucugaca

SEQ ID NO: 3753626 - RNA, 21 nt, Human
gaucagaugcuccaagauucu

SEQ ID NO: 3753627 - RNA, 16 nt, Human
gaucagccccacccug

SEQ ID NO: 3753628 - RNA, 15 nt, Human
gaucagcguggccuu

SEQ ID NO: 3753629 - RNA, 18 nt, Human
gaucagcuguuugucaua

SEQ ID NO: 3753630 - RNA, 12 nt, Human
gaucaggaagag

SEQ ID NO: 3753631 - RNA, 15 nt, Human
gaucaggaagagaag

SEQ ID NO: 3753632 - RNA, 16 nt, Human
gaucaggaagagaagg

SEQ ID NO: 3753633 - RNA, 18 nt, Human
gaucaggaagagaaggag

SEQ ID NO: 3753634 - RNA, 13 nt, Human
gaucaggugggga

SEQ ID NO: 3753635 - RNA, 14 nt, Human
gaucaguaaaauua

SEQ ID NO: 3753636 - RNA, 16 nt, Human
gaucaguaguuugcau

SEQ ID NO: 3753637 - RNA, 17 nt, Human
gaucaguaguuugcauu

SEQ ID NO: 3753638 - RNA, 20 nt, Human
gaucaguauaauuuuuuaaa

SEQ ID NO: 3753639 - RNA, 18 nt, Human
gaucaguuauaaguagca

SEQ ID NO: 3753640 - RNA, 17 nt, Human
gaucauaaggcuucaaa

SEQ ID NO: 3753641 - RNA, 15 nt, Human
gaucauaagugaauu

SEQ ID NO: 3753642 - RNA, 17 nt, Human
gaucauaagugaauuua

SEQ ID NO: 3753643 - RNA, 19 nt, Human
gaucauagauuucugauuu

SEQ ID NO: 3753644 - RNA, 18 nt, Human
gaucauagguauuucaaa

SEQ ID NO: 3753645 - RNA, 22 nt, Human
gaucaucccaucuaagcugcag

SEQ ID NO: 3753646 - RNA, 16 nt, Human
gaucaucgccagaggu

SEQ ID NO: 3753647 - RNA, 23 nt, Human
gaucaucgccagaggugcuucac

SEQ ID NO: 3753648 - RNA, 17 nt, Human
gaucaugcauagagugu

SEQ ID NO: 3753649 - RNA, 14 nt, Human
gaucauggcaucca

SEQ ID NO: 3753650 - RNA, 16 nt, Human
gaucauggcucacugc

SEQ ID NO: 3753651 - RNA, 20 nt, Human
gaucaugguguaauaagaca

SEQ ID NO: 3753652 - RNA, 20 nt, Human
gaucauugugaaauuauuca

SEQ ID NO: 3753653 - RNA, 15 nt, Human
gaucauuugaguuca

SEQ ID NO: 3753654 - RNA, 18 nt, Human
gaucauuuguuggaauga

SEQ ID NO: 3753655 - RNA, 14 nt, Human
gaucauuuuccccc

SEQ ID NO: 3753656 - RNA, 19 nt, Human
gaucauuuuccccccacuc

SEQ ID NO: 3753657 - RNA, 23 nt, Human
gaucauuuuccccccacucuccc

SEQ ID NO: 3753658 - RNA, 13 nt, Human
gaucauuuucuua

SEQ ID NO: 3753659 - RNA, 23 nt, Human
gauccaaaagaagcccccagcua

SEQ ID NO: 3753660 - RNA, 11 nt, Human
gauccaaagac

SEQ ID NO: 3753661 - RNA, 19 nt, Human
gauccaaauugugcuucuc

SEQ ID NO: 3753662 - RNA, 15 nt, Human
gauccaagcaaaugg

SEQ ID NO: 3753663 - RNA, 15 nt, Human
gauccaagcuaagca

SEQ ID NO: 3753664 - RNA, 22 nt, Human
gauccaagcuaagcacugccac

SEQ ID NO: 3753665 - RNA, 12 nt, Human
gauccaagcugg

SEQ ID NO: 3753666 - RNA, 16 nt, Human
gauccaauguuagaga

SEQ ID NO: 3753667 - RNA, 21 nt, Human
gauccacccaccucagccucc

SEQ ID NO: 3753668 - RNA, 22 nt, Human
gauccacccaccucagccuccc

SEQ ID NO: 3753669 - RNA, 13 nt, Human
gauccacuggcug

SEQ ID NO: 3753670 - RNA, 14 nt, Human
gauccagagcacag

SEQ ID NO: 3753671 - RNA, 19 nt, Human
gauccagcagauuauucac

SEQ ID NO: 3753672 - RNA, 23 nt, Human
gauccagcccugaguuccuagcc

SEQ ID NO: 3753673 - RNA, 13 nt, Human
gauccagccuggg

SEQ ID NO: 3753674 - RNA, 21 nt, Human
gauccagccuggggucuggag

SEQ ID NO: 3753675 - RNA, 19 nt, Human
gauccaggaagcaugagug

SEQ ID NO: 3753676 - RNA, 16 nt, Human
gauccaggagcuccag

SEQ ID NO: 3753677 - RNA, 13 nt, Human
gauccagggacag

SEQ ID NO: 3753678 - RNA, 19 nt, Human
gauccauuaauuuaaauga

SEQ ID NO: 3753679 - RNA, 17 nt, Human
gaucccagagagcccga

SEQ ID NO: 3753680 - RNA, 21 nt, Human
gaucccagagagcccgaggag

SEQ ID NO: 3753681 - RNA, 17 nt, Human
gaucccagcucacguca

SEQ ID NO: 3753682 - RNA, 18 nt, Human
gaucccaggccccuggag

SEQ ID NO: 3753683 - RNA, 23 nt, Human
gaucccaggggcccaaggcggcc

SEQ ID NO: 3753684 - RNA, 15 nt, Human
gaucccaugagcucc

SEQ ID NO: 3753685 - RNA, 17 nt, Human
gaucccaugagcuccuu

SEQ ID NO: 3753686 - RNA, 20 nt, Human
gauccccaagccuggcaagg

SEQ ID NO: 3753687 - RNA, 18 nt, Human
gauccccaagugugaaca

SEQ ID NO: 3753688 - RNA, 16 nt, Human
gauccccacgccacag

SEQ ID NO: 3753689 - RNA, 21 nt, Human
gauccccacgccacagcccuu

SEQ ID NO: 3753690 - RNA, 14 nt, Human
gauccccgccuggc

SEQ ID NO: 3753691 - RNA, 15 nt, Human
gauccccgccuggcc

SEQ ID NO: 3753692 - RNA, 16 nt, Human
gauccccgccuggcca

SEQ ID NO: 3753693 - RNA, 18 nt, Human
gauccccgccuggccagg

SEQ ID NO: 3753694 - RNA, 17 nt, Human
gauccccguuccugaca

SEQ ID NO: 3753695 - RNA, 21 nt, Human
gauccccucugucuacaaaua

SEQ ID NO: 3753696 - RNA, 18 nt, Human
gauccccuuccuaccacc

SEQ ID NO: 3753697 - RNA, 21 nt, Human
gaucccuagcugugaccucuc

SEQ ID NO: 3753698 - RNA, 12 nt, Human
gaucccucaucu

SEQ ID NO: 3753699 - RNA, 19 nt, Human
gaucccucccccccaugca

SEQ ID NO: 3753700 - RNA, 18 nt, Human
gaucccuguuacccagag

SEQ ID NO: 3753701 - RNA, 20 nt, Human
gaucccuuccaccugcucug

SEQ ID NO: 3753702 - RNA, 17 nt, Human
gauccaagcugguccca

SEQ ID NO: 3753703 - RNA, 16 nt, Human
gauccacacacagagg

SEQ ID NO: 3753704 - RNA, 17 nt, Human
gauccacacacagagga

SEQ ID NO: 3753705 - RNA, 18 nt, Human
gauccacacacagaggaa

SEQ ID NO: 3753706 - RNA, 18 nt, Human
gauccacccaccucagcc

SEQ ID NO: 3753707 - RNA, 20 nt, Human
gauccacccaccucagccuc

SEQ ID NO: 3753708 - RNA, 19 nt, Human
gauccaccugucucagccu

SEQ ID NO: 3753709 - RNA, 14 nt, Human
gauccacuuugggg

SEQ ID NO: 3753710 - RNA, 17 nt, Human
gauccagccucuccccu

SEQ ID NO: 3753711 - RNA, 12 nt, Human
gauccaggacua

SEQ ID NO: 3753712 - RNA, 15 nt, Human
gauccaggagcucca

SEQ ID NO: 3753713 - RNA, 23 nt, Human
gauccaggccggcuugccacacc

SEQ ID NO: 3753714 - RNA, 14 nt, Human
gauccagggacaga

SEQ ID NO: 3753715 - RNA, 18 nt, Human
gauccagggacagaggcc

SEQ ID NO: 3753716 - RNA, 16 nt, Human
gauccaguauaagacu

SEQ ID NO: 3753717 - RNA, 11 nt, Human
gauccaguuuu

SEQ ID NO: 3753718 - RNA, 18 nt, Human
gauccauccagcuugcca

SEQ ID NO: 3753719 - RNA, 15 nt, Human
gauccauuucuaauu

SEQ ID NO: 3753720 - RNA, 18 nt, Human
gauccauuuuuuauauuu

SEQ ID NO: 3753721 - RNA, 12 nt, Human
gaucccaacacu

SEQ ID NO: 3753722 - RNA, 16 nt, Human
gaucccaacacugcca

SEQ ID NO: 3753723 - RNA, 21 nt, Human
gaucccaaguagaaucucagu

SEQ ID NO: 3753724 - RNA, 15 nt, Human
gaucccacacaggcu

SEQ ID NO: 3753725 - RNA, 22 nt, Human
gaucccacuccuaggacauguu

SEQ ID NO: 3753726 - RNA, 19 nt, Human
gaucccaggccccuggagg

SEQ ID NO: 3753727 - RNA, 20 nt, Human
gauccccaagugugaacaaa

SEQ ID NO: 3753728 - RNA, 14 nt, Human
gauccccagcuguu

SEQ ID NO: 3753729 - RNA, 13 nt, Human
gauccccucagga

SEQ ID NO: 3753730 - RNA, 16 nt, Human
gauccccuuccuacca

SEQ ID NO: 3753731 - RNA, 15 nt, Human
gaucccucauccuca

SEQ ID NO: 3753732 - RNA, 18 nt, Human
gaucccucaucugucccu

SEQ ID NO: 3753733 - RNA, 23 nt, Human
gaucccucccccccaugcacugu

SEQ ID NO: 3753734 - RNA, 18 nt, Human
gaucccuguguugucucu

SEQ ID NO: 3753735 - RNA, 20 nt, Human
gaucccuguguugucucuag

SEQ ID NO: 3753736 - RNA, 20 nt, Human
gaucccuguuacccagagaa

SEQ ID NO: 3753737 - RNA, 20 nt, Human
gaucccuucuuacuuaaccu

SEQ ID NO: 3753738 - RNA, 18 nt, Human
gauccgacugcuuuggac

SEQ ID NO: 3753739 - RNA, 19 nt, Human
gauccuaacugaagagaca

SEQ ID NO: 3753740 - RNA, 18 nt, Human
gauccuaagggcucaccg

SEQ ID NO: 3753741 - RNA, 23 nt, Human
gauccuaaugaaugcauaaaaug

SEQ ID NO: 3753742 - RNA, 20 nt, Human
gauccuagccuuauccucug

SEQ ID NO: 3753743 - RNA, 22 nt, Human
gauccuagccuuauccucugau

SEQ ID NO: 3753744 - RNA, 23 nt, Human
gauccucauauggcccaguguca

SEQ ID NO: 3753745 - RNA, 16 nt, Human
gauccucccaggcuuc

SEQ ID NO: 3753746 - RNA, 16 nt, Human
gauccuccugcagacc

SEQ ID NO: 3753747 - RNA, 21 nt, Human
gauccucuccuuugaaaccug

SEQ ID NO: 3753748 - RNA, 12 nt, Human
gauccucucugg

SEQ ID NO: 3753749 - RNA, 19 nt, Human
gauccugagccagauuuca

SEQ ID NO: 3753750 - RNA, 21 nt, Human
gauccugagccagauuucacu

SEQ ID NO: 3753751 - RNA, 14 nt, Human
gauccugccacccu

SEQ ID NO: 3753752 - RNA, 16 nt, Human
gauccugccacccugu

SEQ ID NO: 3753753 - RNA, 17 nt, Human
gauccugcggguggggc

SEQ ID NO: 3753754 - RNA, 17 nt, Human
gauccuggaggcccagu

SEQ ID NO: 3753755 - RNA, 21 nt, Human
gauccuuagagguccucugga

SEQ ID NO: 3753756 - RNA, 13 nt, Human
gauccuucaaagu

SEQ ID NO: 3753757 - RNA, 21 nt, Human
gauccuucaaagucucaauga

SEQ ID NO: 3753758 - RNA, 15 nt, Human
gauccuuuuggaguc

SEQ ID NO: 3753759 - RNA, 21 nt, Human
gauccuuuuggagucagacag

SEQ ID NO: 3753760 - RNA, 16 nt, Human
gaucgagaccauccug

SEQ ID NO: 3753761 - RNA, 17 nt, Human
gaucgagaccauccugg

SEQ ID NO: 3753762 - RNA, 18 nt, Human
gaucgagaccauccuggc

SEQ ID NO: 3753763 - RNA, 18 nt, Human
gaucgcaguuugccuggu

SEQ ID NO: 3753764 - RNA, 17 nt, Human
gaucgguuaacaaauaa

SEQ ID NO: 3753765 - RNA, 18 nt, Human
gaucgucugacugguguu

SEQ ID NO: 3753766 - RNA, 19 nt, Human
gaucgugacgcugaauaaa

SEQ ID NO: 3753767 - RNA, 23 nt, Human
gaucgugccguuacucuccaacc

SEQ ID NO: 3753768 - RNA, 15 nt, Human
gaucguucucugccu

SEQ ID NO: 3753769 - RNA, 21 nt, Human
gaucuaaaaauaacuguaauu

SEQ ID NO: 3753770 - RNA, 11 nt, Human
gaucuaaauaa

SEQ ID NO: 3753771 - RNA, 17 nt, Human
gaucuaagccuuuccau

SEQ ID NO: 3753772 - RNA, 21 nt, Human
gaucuaaggaugucacagggc

SEQ ID NO: 3753773 - RNA, 23 nt, Human
gaucuaaggaugucacagggcca

SEQ ID NO: 3753774 - RNA, 13 nt, Human
gaucuacaugaau

SEQ ID NO: 3753775 - RNA, 15 nt, Human
gaucuaccuggaggg

SEQ ID NO: 3753776 - RNA, 18 nt, Human
gaucuagaauaaucuugc

SEQ ID NO: 3753777 - RNA, 14 nt, Human
gaucuaggaagacu

SEQ ID NO: 3753778 - RNA, 14 nt, Human
gaucuagguuuaac

SEQ ID NO: 3753779 - RNA, 16 nt, Human
gaucuagguuuaacuc

SEQ ID NO: 3753780 - RNA, 18 nt, Human
gaucuagguuuaacucag

SEQ ID NO: 3753781 - RNA, 19 nt, Human
gaucuagguuuaacucaga

SEQ ID NO: 3753782 - RNA, 21 nt, Human
gaucuagguuuaacucagauc

SEQ ID NO: 3753783 - RNA, 15 nt, Human
gaucuauguuucauc

SEQ ID NO: 3753784 - RNA, 19 nt, Human
gaucucagcucacugcaac

SEQ ID NO: 3753785 - RNA, 16 nt, Human
gaucucagcuuugaga

SEQ ID NO: 3753786 - RNA, 22 nt, Human
gaucucagcuuugagaagccuu

SEQ ID NO: 3753787 - RNA, 21 nt, Human
gaucucagggaagcccagcuc

SEQ ID NO: 3753788 - RNA, 17 nt, Human
gaucucaggggcuguuu

SEQ ID NO: 3753789 - RNA, 18 nt, Human
gaucucaggggcuguuug

SEQ ID NO: 3753790 - RNA, 19 nt, Human
gaucucaggggcuguuuga

SEQ ID NO: 3753791 - RNA, 13 nt, Human
gaucucagguucu

SEQ ID NO: 3753792 - RNA, 15 nt, Human
gaucucauucaguau

SEQ ID NO: 3753793 - RNA, 17 nt, Human
gaucucauucaguauua

SEQ ID NO: 3753794 - RNA, 21 nt, Human
gaucucauuggacccuuccau

SEQ ID NO: 3753795 - RNA, 12 nt, Human
gaucuccaaagc

SEQ ID NO: 3753796 - RNA, 13 nt, Human
gaucuccaaagcu

SEQ ID NO: 3753797 - RNA, 20 nt, Human
gaucuccaaggaccagguua

SEQ ID NO: 3753798 - RNA, 16 nt, Human
gaucucccugagaugg

SEQ ID NO: 3753799 - RNA, 19 nt, Human
gaucucucaggagcacagg

SEQ ID NO: 3753800 - RNA, 20 nt, Human
gaucucucaggagcacaggc

SEQ ID NO: 3753801 - RNA, 22 nt, Human
gaucucucaggagcacaggcag

SEQ ID NO: 3753802 - RNA, 23 nt, Human
gaucucucaggagcacaggcagc

SEQ ID NO: 3753803 - RNA, 24 nt, Human
gaucucucaggagcacaggcagcu

SEQ ID NO: 3753804 - RNA, 16 nt, Human
gaucucuccuggccua

SEQ ID NO: 3753805 - RNA, 12 nt, Human
gaucucugcagg

SEQ ID NO: 3753806 - RNA, 12 nt, Human
gaucucuuaaga

SEQ ID NO: 3753807 - RNA, 19 nt, Human
gaucucuucuuaauguaca

SEQ ID NO: 3753808 - RNA, 20 nt, Human
gaucucuuucuaaagacagg

SEQ ID NO: 3753809 - RNA, 17 nt, Human
gaucugacaugauuccu

SEQ ID NO: 3753810 - RNA, 22 nt, Human
gaucugacaugauuccuuccug

SEQ ID NO: 3753811 - RNA, 14 nt, Human
gaucugagaaucuu

SEQ ID NO: 3753812 - RNA, 18 nt, Human
gaucugagaaucuuuauu

SEQ ID NO: 3753813 - RNA, 17 nt, Human
gaucugagucagagcca

SEQ ID NO: 3753814 - RNA, 23 nt, Human
gaucugauugaccguguuggucu

SEQ ID NO: 3753815 - RNA, 20 nt, Human
gaucugcagggggugugucu

SEQ ID NO: 3753816 - RNA, 21 nt, Human
gaucugcccaucgugaagaag

SEQ ID NO: 3753817 - RNA, 20 nt, Human
gaucugccccucccugcuuc

SEQ ID NO: 3753818 - RNA, 16 nt, Human
gaucugccuaaggacu

SEQ ID NO: 3753819 - RNA, 20 nt, Human
gaucugccuaaggacuucuu

SEQ ID NO: 3753820 - RNA, 18 nt, Human
gaucugcggaucucagcu

SEQ ID NO: 3753821 - RNA, 13 nt, Human
gaucugcucagcc

SEQ ID NO: 3753822 - RNA, 18 nt, Human
gaucugcucagcccugga

SEQ ID NO: 3753823 - RNA, 12 nt, Human
gaucuggaaccc

SEQ ID NO: 3753824 - RNA, 18 nt, Human
gaucuggaacccagacuc

SEQ ID NO: 3753825 - RNA, 18 nt, Human
gaucuggaaccucagccu

SEQ ID NO: 3753826 - RNA, 13 nt, Human
gaucuggcugcag

SEQ ID NO: 3753827 - RNA, 18 nt, Human
gaucuggguucacugcaa

SEQ ID NO: 3753828 - RNA, 16 nt, Human
gaucugguccuaccca

SEQ ID NO: 3753829 - RNA, 19 nt, Human
gaucugguggucagcccua

SEQ ID NO: 3753830 - RNA, 20 nt, Human
gaucugguggucagcccuag

SEQ ID NO: 3753831 - RNA, 14 nt, Human
gaucugguuuugcu

SEQ ID NO: 3753832 - RNA, 16 nt, Human
gaucugguuuugcuau

SEQ ID NO: 3753833 - RNA, 17 nt, Human
gaucugucacaccagcc

SEQ ID NO: 3753834 - RNA, 14 nt, Human
gaucuguccucagc

SEQ ID NO: 3753835 - RNA, 17 nt, Human
gaucuguccucagccuu

SEQ ID NO: 3753836 - RNA, 13 nt, Human
gaucugucuugua

SEQ ID NO: 3753837 - RNA, 16 nt, Human
gaucugugcccagaga

SEQ ID NO: 3753838 - RNA, 18 nt, Human
gaucugugccccaugccu

SEQ ID NO: 3753839 - RNA, 19 nt, Human
gaucugugcuuuccagcuc

SEQ ID NO: 3753840 - RNA, 17 nt, Human
gaucuguuuugaaggca

SEQ ID NO: 3753841 - RNA, 20 nt, Human
gaucuguuuugaaggcaaaa

SEQ ID NO: 3753842 - RNA, 19 nt, Human
gaucuguuuuuaaaaauca

SEQ ID NO: 3753843 - RNA, 15 nt, Human
gaucuuaauauaaau

SEQ ID NO: 3753844 - RNA, 16 nt, Human
gaucuuaauauaaauu

SEQ ID NO: 3753845 - RNA, 19 nt, Human
gaucuuagggugaaccacu

SEQ ID NO: 3753846 - RNA, 15 nt, Human
gaucuucaacaaauu

SEQ ID NO: 3753847 - RNA, 14 nt, Human
gaucuucagagcag

SEQ ID NO: 3753848 - RNA, 18 nt, Human
gaucuucauuaccaauag

SEQ ID NO: 3753849 - RNA, 17 nt, Human
gaucuuccucugcuaaa

SEQ ID NO: 3753850 - RNA, 18 nt, Human
gaucuuccucugcuaaau

SEQ ID NO: 3753851 - RNA, 20 nt, Human
gauccgacugcuuuggaccu

SEQ ID NO: 3753852 - RNA, 14 nt, Human
gauccggaaagaag

SEQ ID NO: 3753853 - RNA, 16 nt, Human
gauccuaagcaucuaa

SEQ ID NO: 3753854 - RNA, 14 nt, Human
gauccuaccccuga

SEQ ID NO: 3753855 - RNA, 15 nt, Human
gauccuagauccuaa

SEQ ID NO: 3753856 - RNA, 23 nt, Human
gauccuagccuuauccucugauc

SEQ ID NO: 3753857 - RNA, 20 nt, Human
gauccuauucucaccaggaa

SEQ ID NO: 3753858 - RNA, 19 nt, Human
gauccucacaaccaccuaa

SEQ ID NO: 3753859 - RNA, 12 nt, Human
gauccuccaggu

SEQ ID NO: 3753860 - RNA, 14 nt, Human
gauccuccaggugc

SEQ ID NO: 3753861 - RNA, 17 nt, Human
gauccucccaccucagc

SEQ ID NO: 3753862 - RNA, 18 nt, Human
gauccucccaccucagcc

SEQ ID NO: 3753863 - RNA, 20 nt, Human
gauccucccaccucagccuc

SEQ ID NO: 3753864 - RNA, 17 nt, Human
gauccuccccuggacuc

SEQ ID NO: 3753865 - RNA, 12 nt, Human
gauccuccucau

SEQ ID NO: 3753866 - RNA, 21 nt, Human
gauccuccugcagaccacgcc

SEQ ID NO: 3753867 - RNA, 19 nt, Human
gauccucucaccucagccu

SEQ ID NO: 3753868 - RNA, 17 nt, Human
gauccucuccuuugaaa

SEQ ID NO: 3753869 - RNA, 13 nt, Human
gauccugagccag

SEQ ID NO: 3753870 - RNA, 15 nt, Human
gauccugagccagau

SEQ ID NO: 3753871 - RNA, 21 nt, Human
gauccugcacugacucuggaa

SEQ ID NO: 3753872 - RNA, 15 nt, Human
gauccugccacccug

SEQ ID NO: 3753873 - RNA, 17 nt, Human
gauccugccacccugua

SEQ ID NO: 3753874 - RNA, 18 nt, Human
gauccugcggguggggcu

SEQ ID NO: 3753875 - RNA, 14 nt, Human
gauccuggaaauca

SEQ ID NO: 3753876 - RNA, 12 nt, Human
gauccuggaggc

SEQ ID NO: 3753877 - RNA, 16 nt, Human
gauccuggaggcccag

SEQ ID NO: 3753878 - RNA, 23 nt, Human
gauccuggguggucugcaggcag

SEQ ID NO: 3753879 - RNA, 20 nt, Human
gauccuguauucagacagau

SEQ ID NO: 3753880 - RNA, 19 nt, Human
gauccuguguggagaggga

SEQ ID NO: 3753881 - RNA, 20 nt, Human
gauccuuguguuuaucagaa

SEQ ID NO: 3753882 - RNA, 19 nt, Human
gaucgagaccauccuggcu

SEQ ID NO: 3753883 - RNA, 23 nt, Human
gaucgcaucauugcacucuagcc

SEQ ID NO: 3753884 - RNA, 12 nt, Human
gaucgccuuccc

SEQ ID NO: 3753885 - RNA, 14 nt, Human
gaucgccuucccca

SEQ ID NO: 3753886 - RNA, 16 nt, Human
gaucgccuuccccacc

SEQ ID NO: 3753887 - RNA, 19 nt, Human
gaucggcaggacacccuga

SEQ ID NO: 3753888 - RNA, 20 nt, Human
gaucgugacgcugaauaaau

SEQ ID NO: 3753889 - RNA, 22 nt, Human
gaucgugacgcugaauaaaugu

SEQ ID NO: 3753890 - RNA, 18 nt, Human
gaucgugcuaaauuuuca

SEQ ID NO: 3753891 - RNA, 16 nt, Human
gaucguucaaagcaug

SEQ ID NO: 3753892 - RNA, 17 nt, Human
gaucuaaauaaaaugcu

SEQ ID NO: 3753893 - RNA, 18 nt, Human
gaucuaaauaaaaugcua

SEQ ID NO: 3753894 - RNA, 21 nt, Human
gaucuacaugaaugcaaaaca

SEQ ID NO: 3753895 - RNA, 23 nt, Human
gaucuacaugaggaacuguagau

SEQ ID NO: 3753896 - RNA, 17 nt, Human
gaucuaccuggagggaa

SEQ ID NO: 3753897 - RNA, 13 nt, Human
gaucuaggaagac

SEQ ID NO: 3753898 - RNA, 18 nt, Human
gaucuaggaagacuuugg

SEQ ID NO: 3753899 - RNA, 20 nt, Human
gaucuaggaagacuuuggaa

SEQ ID NO: 3753900 - RNA, 15 nt, Human
gaucuaggugaggau

SEQ ID NO: 3753901 - RNA, 15 nt, Human
gaucuagguuuaacu

SEQ ID NO: 3753902 - RNA, 20 nt, Human
gaucuagguuuaacucagau

SEQ ID NO: 3753903 - RNA, 16 nt, Human
gaucuauacuugcuuu

SEQ ID NO: 3753904 - RNA, 23 nt, Human
gaucuauacuugcuuuguguucu

SEQ ID NO: 3753905 - RNA, 16 nt, Human
gaucuaucaauaguca

SEQ ID NO: 3753906 - RNA, 13 nt, Human
gaucuauuucaug

SEQ ID NO: 3753907 - RNA, 14 nt, Human
gaucucaccaggca

SEQ ID NO: 3753908 - RNA, 15 nt, Human
gaucucaccaggcag

SEQ ID NO: 3753909 - RNA, 13 nt, Human
gaucucacucugc

SEQ ID NO: 3753910 - RNA, 17 nt, Human
gaucucagcucacuaca

SEQ ID NO: 3753911 - RNA, 17 nt, Human
gaucucagcucacugca

SEQ ID NO: 3753912 - RNA, 14 nt, Human
gaucucagcuuuga

SEQ ID NO: 3753913 - RNA, 18 nt, Human
gaucucagggaagcccag

SEQ ID NO: 3753914 - RNA, 19 nt, Human
gaucucagggaagcccagc

SEQ ID NO: 3753915 - RNA, 21 nt, Human
gaucucaggggucuuaccuug

SEQ ID NO: 3753916 - RNA, 21 nt, Human
gaucucauuguucaauuccca

SEQ ID NO: 3753917 - RNA, 19 nt, Human
gaucuccaaggaccagguu

SEQ ID NO: 3753918 - RNA, 11 nt, Human
gaucuccagcg

SEQ ID NO: 3753919 - RNA, 17 nt, Human
gaucuccauauguuaca

SEQ ID NO: 3753920 - RNA, 19 nt, Human
gaucuccauggcuuccucc

SEQ ID NO: 3753921 - RNA, 15 nt, Human
gaucucccagggcua

SEQ ID NO: 3753922 - RNA, 15 nt, Human
gaucucccugagaug

SEQ ID NO: 3753923 - RNA, 12 nt, Human
gaucucccugcc

SEQ ID NO: 3753924 - RNA, 14 nt, Human
gaucucccugccgc

SEQ ID NO: 3753925 - RNA, 14 nt, Human
gaucucucaggagc

SEQ ID NO: 3753926 - RNA, 14 nt, Human
gaucucuccuggcc

SEQ ID NO: 3753927 - RNA, 11 nt, Human
gaucucugaag

SEQ ID NO: 3753928 - RNA, 23 nt, Human
gaucucugcaggaaauggcugug

SEQ ID NO: 3753929 - RNA, 13 nt, Human
gaucucuuccugu

SEQ ID NO: 3753930 - RNA, 21 nt, Human
gaucucuucuuaauguacaua

SEQ ID NO: 3753931 - RNA, 12 nt, Human
gaucucuugagc

SEQ ID NO: 3753932 - RNA, 19 nt, Human
gaucugaacagaaauacca

SEQ ID NO: 3753933 - RNA, 19 nt, Human
gaucugacaugauuccuuc

SEQ ID NO: 3753934 - RNA, 14 nt, Human
gaucugacugcacg

SEQ ID NO: 3753935 - RNA, 22 nt, Human
gaucugagucagagccaugucu

SEQ ID NO: 3753936 - RNA, 17 nt, Human
gaucugaugcaagcaag

SEQ ID NO: 3753937 - RNA, 13 nt, Human
gaucugcccaucg

SEQ ID NO: 3753938 - RNA, 23 nt, Human
gaucugcccaucgugaagaagcc

SEQ ID NO: 3753939 - RNA, 13 nt, Human
gaucugccccucc

SEQ ID NO: 3753940 - RNA, 21 nt, Human
gaucugccuaaggacuucuuu

SEQ ID NO: 3753941 - RNA, 14 nt, Human
gaucugcucagccc

SEQ ID NO: 3753942 - RNA, 16 nt, Human
gaucugcucagcccug

SEQ ID NO: 3753943 - RNA, 21 nt, Human
gaucugcucagcccuggaggu

SEQ ID NO: 3753944 - RNA, 12 nt, Human
gaucugcugcag

SEQ ID NO: 3753945 - RNA, 18 nt, Human
gaucugcugcagagcagu

SEQ ID NO: 3753946 - RNA, 15 nt, Human
gaucuggaacccaga

SEQ ID NO: 3753947 - RNA, 17 nt, Human
gaucuggaaccucagcc

SEQ ID NO: 3753948 - RNA, 21 nt, Human
gaucuggaaccucagccuggc

SEQ ID NO: 3753949 - RNA, 17 nt, Human
gaucuggaagggccaag

SEQ ID NO: 3753950 - RNA, 17 nt, Human
gaucugggacccuuucc

SEQ ID NO: 3753951 - RNA, 23 nt, Human
gaucugggacccuuuccuuccuu

SEQ ID NO: 3753952 - RNA, 17 nt, Human
gaucuggggcucuggga

SEQ ID NO: 3753953 - RNA, 18 nt, Human
gaucuggggcucugggau

SEQ ID NO: 3753954 - RNA, 16 nt, Human
gaucugggucucuaau

SEQ ID NO: 3753955 - RNA, 15 nt, Human
gaucugguccuaccc

SEQ ID NO: 3753956 - RNA, 14 nt, Human
gaucugguggucag

SEQ ID NO: 3753957 - RNA, 16 nt, Human
gaucugguuugacucc

SEQ ID NO: 3753958 - RNA, 20 nt, Human
gaucuguauauacaauaaca

SEQ ID NO: 3753959 - RNA, 19 nt, Human
gaucugucacaccagccau

SEQ ID NO: 3753960 - RNA, 20 nt, Human
gaucugucacaccagccaua

SEQ ID NO: 3753961 - RNA, 13 nt, Human
gaucugucugugg

SEQ ID NO: 3753962 - RNA, 21 nt, Human
gaucugugauaguucaccccc

SEQ ID NO: 3753963 - RNA, 13 nt, Human
gaucugugcccca

SEQ ID NO: 3753964 - RNA, 22 nt, Human
gaucugugccuuuuuuauaucu

SEQ ID NO: 3753965 - RNA, 18 nt, Human
gaucugugcuuuccagcu

SEQ ID NO: 3753966 - RNA, 21 nt, Human
gaucuguugcaaacucagccu

SEQ ID NO: 3753967 - RNA, 19 nt, Human
gaucuguuuugaaggcaaa

SEQ ID NO: 3753968 - RNA, 22 nt, Human
gaucuguuuugugguuuggaau

SEQ ID NO: 3753969 - RNA, 21 nt, Human
gaucuguuuuuaaaaaucaua

SEQ ID NO: 3753970 - RNA, 13 nt, Human
gaucuuagauucu

SEQ ID NO: 3753971 - RNA, 14 nt, Human
gaucuuauuuuucu

SEQ ID NO: 3753972 - RNA, 19 nt, Human
gaucuucaaaaguaaugcc

SEQ ID NO: 3753973 - RNA, 12 nt, Human
gaucuucugaaa

SEQ ID NO: 3753974 - RNA, 15 nt, Human
gaucuucugaaauga

SEQ ID NO: 3753975 - RNA, 16 nt, Human
gaucuucugaaaugaa

SEQ ID NO: 3753976 - RNA, 20 nt, Human
gaucuucugggagcaggaac

SEQ ID NO: 3753977 - RNA, 13 nt, Human
gaucuugaaugug

SEQ ID NO: 3753978 - RNA, 16 nt, Human
gaucuugugacauauu

SEQ ID NO: 3753979 - RNA, 12 nt, Human
gaucuuucagaa

SEQ ID NO: 3753980 - RNA, 16 nt, Human
gaucuuugcagacagg

SEQ ID NO: 3753981 - RNA, 18 nt, Human
gaucuuugcagacaggca

SEQ ID NO: 3753982 - RNA, 21 nt, Human
gaucuuuggacagaagcagcu

SEQ ID NO: 3753983 - RNA, 15 nt, Human
gaucuuuuguuccca

SEQ ID NO: 3753984 - RNA, 14 nt, Human
gaucuuuuuuguca

SEQ ID NO: 3753985 - RNA, 15 nt, Human
gaugaaaaaauaaca

SEQ ID NO: 3753986 - RNA, 16 nt, Human
gaugaaaaagcaugua

SEQ ID NO: 3753987 - RNA, 17 nt, Human
gaugaaaaagcauguac

SEQ ID NO: 3753988 - RNA, 20 nt, Human
gaugaaaaagcauguacagu

SEQ ID NO: 3753989 - RNA, 14 nt, Human
gaugaaaaauagca

SEQ ID NO: 3753990 - RNA, 13 nt, Human
gaugaaaagauuu

SEQ ID NO: 3753991 - RNA, 11 nt, Human
gaugaaaauaa

SEQ ID NO: 3753992 - RNA, 14 nt, Human
gaugaaaauaaaga

SEQ ID NO: 3753993 - RNA, 14 nt, Human
gaugaaaauauuua

SEQ ID NO: 3753994 - RNA, 15 nt, Human
gaugaaaugagguca

SEQ ID NO: 3753995 - RNA, 14 nt, Human
gaugaacaucuaac

SEQ ID NO: 3753996 - RNA, 22 nt, Human
gaugaacccaggacgcuucuga

SEQ ID NO: 3753997 - RNA, 18 nt, Human
gaugaacucugaacuuug

SEQ ID NO: 3753998 - RNA, 18 nt, Human
gaugaacucuuagaaaug

SEQ ID NO: 3753999 - RNA, 13 nt, Human
gaugaacuuucuc

SEQ ID NO: 3754000 - RNA, 18 nt, Human
gaugaaggucuguuuugu

SEQ ID NO: 3754001 - RNA, 22 nt, Human
gaugaaguuuguaguuguuuua

SEQ ID NO: 3754002 - RNA, 18 nt, Human
gaucuucugaaaugaaac

SEQ ID NO: 3754003 - RNA, 19 nt, Human
gaucuucuuuauaauucua

SEQ ID NO: 3754004 - RNA, 15 nt, Human
gaucuugcagaaguu

SEQ ID NO: 3754005 - RNA, 13 nt, Human
gaucuuuaaaaua

SEQ ID NO: 3754006 - RNA, 21 nt, Human
gaucuuucacccacagaaaga

SEQ ID NO: 3754007 - RNA, 22 nt, Human
gaucuuucacccacagaaagag

SEQ ID NO: 3754008 - RNA, 18 nt, Human
gaucuuucagaaauauaa

SEQ ID NO: 3754009 - RNA, 15 nt, Human
gaucuuucaggaaag

SEQ ID NO: 3754010 - RNA, 17 nt, Human
gaucuuuuaaaguguua

SEQ ID NO: 3754011 - RNA, 15 nt, Human
gaucuuuuauuuugc

SEQ ID NO: 3754012 - RNA, 15 nt, Human
gaugaaaaagcaugu

SEQ ID NO: 3754013 - RNA, 18 nt, Human
gaugaaaaagcauguaca

SEQ ID NO: 3754014 - RNA, 22 nt, Human
gaugaaaaagcauguacagugu

SEQ ID NO: 3754015 - RNA, 20 nt, Human
gaugaaaaauugcugacugu

SEQ ID NO: 3754016 - RNA, 14 nt, Human
gaugaaaacauagc

SEQ ID NO: 3754017 - RNA, 21 nt, Human
gaugaaaaccuacauauucca

SEQ ID NO: 3754018 - RNA, 23 nt, Human
gaugaaaaguauauugauaaccu

SEQ ID NO: 3754019 - RNA, 19 nt, Human
gaugaaaauaaagaaugga

SEQ ID NO: 3754020 - RNA, 14 nt, Human
gaugaaaauauuug

SEQ ID NO: 3754021 - RNA, 15 nt, Human
gaugaaaauuugaga

SEQ ID NO: 3754022 - RNA, 16 nt, Human
gaugaaacuaaagcaa

SEQ ID NO: 3754023 - RNA, 18 nt, Human
gaugaaauaacuccuucu

SEQ ID NO: 3754024 - RNA, 20 nt, Human
gaugaaaucuuacagcuggg

SEQ ID NO: 3754025 - RNA, 21 nt, Human
gaugaaaugaggucagagccu

SEQ ID NO: 3754026 - RNA, 13 nt, Human
gaugaacccagga

SEQ ID NO: 3754027 - RNA, 22 nt, Human
gaugaacucuuagaaaugaagg

SEQ ID NO: 3754028 - RNA, 20 nt, Human
gaugaagaaaagugggccag

SEQ ID NO: 3754029 - RNA, 14 nt, Human
gaugaagacagccc

SEQ ID NO: 3754030 - RNA, 21 nt, Human
gaugaagagagagagggccug

SEQ ID NO: 3754031 - RNA, 14 nt, Human
gaugaagagugaga

SEQ ID NO: 3754032 - RNA, 16 nt, Human
gaugaagcaaacacau

SEQ ID NO: 3754033 - RNA, 22 nt, Human
gaugaaguuuuacauuguugag

SEQ ID NO: 3754034 - RNA, 22 nt, Human
gaugaauaaauguuauagcugc

SEQ ID NO: 3754035 - RNA, 19 nt, Human
gaugaaucucccacuccag

SEQ ID NO: 3754036 - RNA, 19 nt, Human
gaugaaugaggucccaggc

SEQ ID NO: 3754037 - RNA, 15 nt, Human
gaugaaugauaaacu

SEQ ID NO: 3754038 - RNA, 16 nt, Human
gaugaauuaaauuuaa

SEQ ID NO: 3754039 - RNA, 22 nt, Human
gaugaauuguaaaagcaacauc

SEQ ID NO: 3754040 - RNA, 19 nt, Human
gaugacaaauggagaagaa

SEQ ID NO: 3754041 - RNA, 17 nt, Human
gaugacaagaugguaca

SEQ ID NO: 3754042 - RNA, 20 nt, Human
gaugacaugcacucagcucu

SEQ ID NO: 3754043 - RNA, 23 nt, Human
gaugacauucuggucucgucuuc

SEQ ID NO: 3754044 - RNA, 14 nt, Human
gaugaccacuuuuu

SEQ ID NO: 3754045 - RNA, 13 nt, Human
gaugaccagaaca

SEQ ID NO: 3754046 - RNA, 13 nt, Human
gaugacccaggcu

SEQ ID NO: 3754047 - RNA, 21 nt, Human
gaugacccaggcugccugagc

SEQ ID NO: 3754048 - RNA, 20 nt, Human
gaugacgguauuaugcuucu

SEQ ID NO: 3754049 - RNA, 21 nt, Human
gaugacgguauuaugcuucuu

SEQ ID NO: 3754050 - RNA, 18 nt, Human
gaugacuaaaauauuuau

SEQ ID NO: 3754051 - RNA, 14 nt, Human
gaugacuauggaaa

SEQ ID NO: 3754052 - RNA, 18 nt, Human
gaugacucccuuaaaaua

SEQ ID NO: 3754053 - RNA, 21 nt, Human
gaugacucccuuaaaauagaa

SEQ ID NO: 3754054 - RNA, 17 nt, Human
gaugacugaguccucgu

SEQ ID NO: 3754055 - RNA, 17 nt, Human
gaugacuggcauuuuau

SEQ ID NO: 3754056 - RNA, 18 nt, Human
gaugacuuaguacaaagu

SEQ ID NO: 3754057 - RNA, 14 nt, Human
gaugagaagagggg

SEQ ID NO: 3754058 - RNA, 21 nt, Human
gaugagaguuuuggaugcagu

SEQ ID NO: 3754059 - RNA, 17 nt, Human
gaugagcauggagcugg

SEQ ID NO: 3754060 - RNA, 18 nt, Human
gaugagcauuuagggcaa

SEQ ID NO: 3754061 - RNA, 20 nt, Human
gaugagcccagcccuguucu

SEQ ID NO: 3754062 - RNA, 21 nt, Human
gaugagcccagcccuguucug

SEQ ID NO: 3754063 - RNA, 23 nt, Human
gaugagccgcugugagccccugg

SEQ ID NO: 3754064 - RNA, 12 nt, Human
gaugagcuccca

SEQ ID NO: 3754065 - RNA, 23 nt, Human
gaugagcucccacaagccugagg

SEQ ID NO: 3754066 - RNA, 11 nt, Human
gaugagcucua

SEQ ID NO: 3754067 - RNA, 19 nt, Human
gaugagcucuacccagggc

SEQ ID NO: 3754068 - RNA, 15 nt, Human
gaugaggccagacca

SEQ ID NO: 3754069 - RNA, 20 nt, Human
gaugaggcccuccacaccug

SEQ ID NO: 3754070 - RNA, 22 nt, Human
gaugaggcccuccacaccugcg

SEQ ID NO: 3754071 - RNA, 21 nt, Human
gaugaggccgcuagaggccug

SEQ ID NO: 3754072 - RNA, 21 nt, Human
gaugagggaaaagaaaaagau

SEQ ID NO: 3754073 - RNA, 19 nt, Human
gaugagggaugggccuggc

SEQ ID NO: 3754074 - RNA, 21 nt, Human
gaugagggcagcagccagccc

SEQ ID NO: 3754075 - RNA, 17 nt, Human
gaugaguguaacaagaa

SEQ ID NO: 3754076 - RNA, 19 nt, Human
gaugauaaagagacaguga

SEQ ID NO: 3754077 - RNA, 19 nt, Human
gaugauaaugaugaugacg

SEQ ID NO: 3754078 - RNA, 21 nt, Human
gaugauacaagauuagaagcu

SEQ ID NO: 3754079 - RNA, 20 nt, Human
gaugaucaauuauaguuucu

SEQ ID NO: 3754080 - RNA, 15 nt, Human
gaugaucuaggaaga

SEQ ID NO: 3754081 - RNA, 21 nt, Human
gaugaucuaggaagacuuugg

SEQ ID NO: 3754082 - RNA, 21 nt, Human
gaugaucuuugcagacaggca

SEQ ID NO: 3754083 - RNA, 19 nt, Human
gaugaugagaauuucuaaa

SEQ ID NO: 3754084 - RNA, 23 nt, Human
gaugaugauaaugaugaugacga

SEQ ID NO: 3754085 - RNA, 13 nt, Human
gaugaugccacac

SEQ ID NO: 3754086 - RNA, 19 nt, Human
gaugaugggaauuguguga

SEQ ID NO: 3754087 - RNA, 17 nt, Human
gaugaugugccugggug

SEQ ID NO: 3754088 - RNA, 13 nt, Human
gaugauguguaua

SEQ ID NO: 3754089 - RNA, 23 nt, Human
gaugauuaaauaagauucuaacg

SEQ ID NO: 3754090 - RNA, 18 nt, Human
gaugauuaauucaccuuc

SEQ ID NO: 3754091 - RNA, 16 nt, Human
gaugauucaagccauu

SEQ ID NO: 3754092 - RNA, 15 nt, Human
gaugauucagaaauu

SEQ ID NO: 3754093 - RNA, 22 nt, Human
gaugauuggaggggggaggugg

SEQ ID NO: 3754094 - RNA, 14 nt, Human
gaugauuucagaaa

SEQ ID NO: 3754095 - RNA, 23 nt, Human
gaugauuucuaugcugaguuugu

SEQ ID NO: 3754096 - RNA, 13 nt, Human
gaugauuugcaau

SEQ ID NO: 3754097 - RNA, 14 nt, Human
gaugcaaagaggca

SEQ ID NO: 3754098 - RNA, 18 nt, Human
gaugcaaaguacaaugug

SEQ ID NO: 3754099 - RNA, 17 nt, Human
gaugcaagauauuuaua

SEQ ID NO: 3754100 - RNA, 18 nt, Human
gaugcaauccuuacaaau

SEQ ID NO: 3754101 - RNA, 20 nt, Human
gaugcaauccuuacaaauga

SEQ ID NO: 3754102 - RNA, 18 nt, Human
gaugcaaugugcuacuga

SEQ ID NO: 3754103 - RNA, 13 nt, Human
gaugcacagagaa

SEQ ID NO: 3754104 - RNA, 15 nt, Human
gaugcacagagaagc

SEQ ID NO: 3754105 - RNA, 21 nt, Human
gaugcacagagaagcugggga

SEQ ID NO: 3754106 - RNA, 16 nt, Human
gaugcacaucccugga

SEQ ID NO: 3754107 - RNA, 21 nt, Human
gaugcacuuugcuuuaauaua

SEQ ID NO: 3754108 - RNA, 21 nt, Human
gaugcagacagggggccagaa

SEQ ID NO: 3754109 - RNA, 23 nt, Human
gaugcagagagccauuuugugaa

SEQ ID NO: 3754110 - RNA, 14 nt, Human
gaugcagcucaaga

SEQ ID NO: 3754111 - RNA, 22 nt, Human
gaugcaggauuuguucucuguc

SEQ ID NO: 3754112 - RNA, 20 nt, Human
gaugcaggcuccccugagga

SEQ ID NO: 3754113 - RNA, 13 nt, Human
gaugcagucuccu

SEQ ID NO: 3754114 - RNA, 22 nt, Human
gaugcagugcucgcuguugcug

SEQ ID NO: 3754115 - RNA, 18 nt, Human
gaugcaguucugaagaag

SEQ ID NO: 3754116 - RNA, 20 nt, Human
gaugcaucagaaagggaggg

SEQ ID NO: 3754117 - RNA, 20 nt, Human
gaugcauggagauagcccca

SEQ ID NO: 3754118 - RNA, 17 nt, Human
gaugcauguacccuaag

SEQ ID NO: 3754119 - RNA, 22 nt, Human
gaugcaugugguuugguuccuc

SEQ ID NO: 3754120 - RNA, 16 nt, Human
gaugcauuaaaagaaa

SEQ ID NO: 3754121 - RNA, 21 nt, Human
gaugcauucuugguuggcugg

SEQ ID NO: 3754122 - RNA, 20 nt, Human
gaugcauuguaguuuaacca

SEQ ID NO: 3754123 - RNA, 19 nt, Human
gaugcauuuggguccagga

SEQ ID NO: 3754124 - RNA, 20 nt, Human
gaugcauuuggguccaggag

SEQ ID NO: 3754125 - RNA, 19 nt, Human
gaugccaauauuaaaucug

SEQ ID NO: 3754126 - RNA, 15 nt, Human
gaugccacacaagga

SEQ ID NO: 3754127 - RNA, 19 nt, Human
gaugccacaccaagcugug

SEQ ID NO: 3754128 - RNA, 22 nt, Human
gaugccacaccaagcugugcca

SEQ ID NO: 3754129 - RNA, 22 nt, Human
gaugccacuaccccuugauuuu

SEQ ID NO: 3754130 - RNA, 18 nt, Human
gaugccacuccucccucc

SEQ ID NO: 3754131 - RNA, 17 nt, Human
gaugccagggccgacca

SEQ ID NO: 3754132 - RNA, 16 nt, Human
gaugccaucugugucc

SEQ ID NO: 3754133 - RNA, 17 nt, Human
gaugccaucuguguccu

SEQ ID NO: 3754134 - RNA, 15 nt, Human
gaugccauuacauuu

SEQ ID NO: 3754135 - RNA, 15 nt, Human
gaugcccacugagga

SEQ ID NO: 3754136 - RNA, 20 nt, Human
gaugcccagagggcccaggc

SEQ ID NO: 3754137 - RNA, 12 nt, Human
gaugccccagag

SEQ ID NO: 3754138 - RNA, 23 nt, Human
gaugcccccuaauccccuucucc

SEQ ID NO: 3754139 - RNA, 21 nt, Human
gaugccccgucccccucuggc

SEQ ID NO: 3754140 - RNA, 18 nt, Human
gaugccgagguaaaaguu

SEQ ID NO: 3754141 - RNA, 20 nt, Human
gaugccuccaccgcugccua

SEQ ID NO: 3754142 - RNA, 22 nt, Human
gaugccugauugccaagcucag

SEQ ID NO: 3754143 - RNA, 16 nt, Human
gaugccuggcggggug

SEQ ID NO: 3754144 - RNA, 18 nt, Human
gaugccugguggcagcug

SEQ ID NO: 3754145 - RNA, 19 nt, Human
gaugcgcagccccaucugu

SEQ ID NO: 3754146 - RNA, 14 nt, Human
gaugcgcagugccu

SEQ ID NO: 3754147 - RNA, 13 nt, Human
gaugcggccaaga

SEQ ID NO: 3754148 - RNA, 18 nt, Human
gaugcgggcauggcagcc

SEQ ID NO: 3754149 - RNA, 21 nt, Human
cugaagcaaggcgguggacuu

SEQ ID NO: 3754150 - RNA, 14 nt, Human
cugaagcagccucu

SEQ ID NO: 3754151 - RNA, 20 nt, Human
cugaagcagccucuccccag

SEQ ID NO: 3754152 - RNA, 20 nt, Human
cugaagcagguucccaagcu

SEQ ID NO: 3754153 - RNA, 23 nt, Human
cugaagcauguuucauguuuugu

SEQ ID NO: 3754154 - RNA, 13 nt, Human
cugaagcccuugu

SEQ ID NO: 3754155 - RNA, 15 nt, Human
cugaagccucuggga

SEQ ID NO: 3754156 - RNA, 13 nt, Human
cugaagccugcag

SEQ ID NO: 3754157 - RNA, 15 nt, Human
cugaagccugcagga

SEQ ID NO: 3754158 - RNA, 15 nt, Human
cugaagcucccacag

SEQ ID NO: 3754159 - RNA, 12 nt, Human
cugaagcugagg

SEQ ID NO: 3754160 - RNA, 12 nt, Human
cugaagcuuauu

SEQ ID NO: 3754161 - RNA, 16 nt, Human
cugaagcuuauuaaug

SEQ ID NO: 3754162 - RNA, 20 nt, Human
cugaagcuuauuaaugcuaa

SEQ ID NO: 3754163 - RNA, 14 nt, Human
cugaagcuugacuc

SEQ ID NO: 3754164 - RNA, 21 nt, Human
cugaagcuugacucccaaguu

SEQ ID NO: 3754165 - RNA, 16 nt, Human
cugaaggaaaaacaca

SEQ ID NO: 3754166 - RNA, 21 nt, Human
cugaaggaaaaacacaagcaa

SEQ ID NO: 3754167 - RNA, 13 nt, Human
cugaaggacugug

SEQ ID NO: 3754168 - RNA, 22 nt, Human
cugaaggacugugacaggcagc

SEQ ID NO: 3754169 - RNA, 23 nt, Human
cugaaggacugugacaggcagca

SEQ ID NO: 3754170 - RNA, 12 nt, Human
cugaaggagauu

SEQ ID NO: 3754171 - RNA, 19 nt, Human
cugaaggaggccaccuccu

SEQ ID NO: 3754172 - RNA, 18 nt, Human
cugaaggccccgcccagg

SEQ ID NO: 3754173 - RNA, 19 nt, Human
cugaaggccccgcccaggc

SEQ ID NO: 3754174 - RNA, 21 nt, Human
cugaaggccccgcccaggcuu

SEQ ID NO: 3754175 - RNA, 23 nt, Human
cugaaggcuuucagggccuccag

SEQ ID NO: 3754176 - RNA, 15 nt, Human
cugaaggcuuuguga

SEQ ID NO: 3754177 - RNA, 19 nt, Human
cugaagggauaugugaaac

SEQ ID NO: 3754178 - RNA, 22 nt, Human
cugaaggggaaggaaauagcuu

SEQ ID NO: 3754179 - RNA, 15 nt, Human
cugaaggggccauga

SEQ ID NO: 3754180 - RNA, 19 nt, Human
cugaagggguuuucuugau

SEQ ID NO: 3754181 - RNA, 22 nt, Human
cugaagguggccacuuuaagag

SEQ ID NO: 3754182 - RNA, 19 nt, Human
cugaagucacacagugagu

SEQ ID NO: 3754183 - RNA, 17 nt, Human
cugaagucacugcacag

SEQ ID NO: 3754184 - RNA, 15 nt, Human
cugaagucagaucug

SEQ ID NO: 3754185 - RNA, 14 nt, Human
cugaagucugaaau

SEQ ID NO: 3754186 - RNA, 24 nt, Human
cugaagucuuuguacagacaacaa

SEQ ID NO: 3754187 - RNA, 17 nt, Human
cugaagugaaacugcuu

SEQ ID NO: 3754188 - RNA, 19 nt, Human
cugaagugagcacagccua

SEQ ID NO: 3754189 - RNA, 21 nt, Human
cugaagugagcacagccuagg

SEQ ID NO: 3754190 - RNA, 18 nt, Human
cugaagugcauccaaagg

SEQ ID NO: 3754191 - RNA, 23 nt, Human
cugaaguggacucuuugguggcu

SEQ ID NO: 3754192 - RNA, 14 nt, Human
cugaaguuauauuu

SEQ ID NO: 3754193 - RNA, 14 nt, Human
cugaaguuaugugu

SEQ ID NO: 3754194 - RNA, 17 nt, Human
cugaaguugcagauguu

SEQ ID NO: 3754195 - RNA, 14 nt, Human
cugaaguuggacag

SEQ ID NO: 3754196 - RNA, 15 nt, Human
cugaaguuucauuua

SEQ ID NO: 3754197 - RNA, 17 nt, Human
cugaaguuuuuuugcug

SEQ ID NO: 3754198 - RNA, 23 nt, Human
cugaaguuuuuuugcugcugccu

SEQ ID NO: 3754199 - RNA, 15 nt, Human
cugaauaaagcaauu

SEQ ID NO: 3754200 - RNA, 21 nt, Human
cugaauaaauaccucuuagcu

SEQ ID NO: 3754201 - RNA, 21 nt, Human
cugaauaaauuguacagccgg

SEQ ID NO: 3754202 - RNA, 18 nt, Human
cugaauaagcacuuuuua

SEQ ID NO: 3754203 - RNA, 13 nt, Human
cugaauaauuucu

SEQ ID NO: 3754204 - RNA, 15 nt, Human
cugaauaauuucuua

SEQ ID NO: 3754205 - RNA, 16 nt, Human
cugaauaauuucuuac

SEQ ID NO: 3754206 - RNA, 16 nt, Human
cugaauacauucugcu

SEQ ID NO: 3754207 - RNA, 23 nt, Human
cugaauaccacucuguaauugca

SEQ ID NO: 3754208 - RNA, 17 nt, Human
cugaauacccuuuucug

SEQ ID NO: 3754209 - RNA, 16 nt, Human
cugaauagaaauggga

SEQ ID NO: 3754210 - RNA, 19 nt, Human
cugaauagucuucagagau

SEQ ID NO: 3754211 - RNA, 21 nt, Human
cugaauaugaacggugagcau

SEQ ID NO: 3754212 - RNA, 20 nt, Human
cugaauauuuauauuucacu

SEQ ID NO: 3754213 - RNA, 18 nt, Human
cugaauauuuuuugaggc

SEQ ID NO: 3754214 - RNA, 13 nt, Human
cugaaucaugagc

SEQ ID NO: 3754215 - RNA, 20 nt, Human
cugaaucaugagccugcugg

SEQ ID NO: 3754216 - RNA, 21 nt, Human
cugaaucaugagccugcugga

SEQ ID NO: 3754217 - RNA, 20 nt, Human
cugaauccaaacuaauccau

SEQ ID NO: 3754218 - RNA, 13 nt, Human
cugaaucccugua

SEQ ID NO: 3754219 - RNA, 22 nt, Human
cugaaucugcuaccaaaacagu

SEQ ID NO: 3754220 - RNA, 12 nt, Human
cugaaucuguac

SEQ ID NO: 3754221 - RNA, 20 nt, Human
cugaaugaaacccccacaca

SEQ ID NO: 3754222 - RNA, 22 nt, Human
cugaaugaaacccccacacaca

SEQ ID NO: 3754223 - RNA, 23 nt, Human
cugaaugaaacccccacacacac

SEQ ID NO: 3754224 - RNA, 17 nt, Human
cugaaugaaauaucaga

SEQ ID NO: 3754225 - RNA, 22 nt, Human
cugaaugaacaaccucggcucc

SEQ ID NO: 3754226 - RNA, 22 nt, Human
cugaaugccgcgaugggucagg

SEQ ID NO: 3754227 - RNA, 23 nt, Human
cugaaugccucaaugugaccagg

SEQ ID NO: 3754228 - RNA, 12 nt, Human
cugaaugcucug

SEQ ID NO: 3754229 - RNA, 22 nt, Human
cugaaugcuuauagguggccuc

SEQ ID NO: 3754230 - RNA, 14 nt, Human
cugaaugcuucuaa

SEQ ID NO: 3754231 - RNA, 20 nt, Human
cugaaugcuucuaaguaaau

SEQ ID NO: 3754232 - RNA, 15 nt, Human
cugaaugguccaggg

SEQ ID NO: 3754233 - RNA, 18 nt, Human
cugaaugguccaggguug

SEQ ID NO: 3754234 - RNA, 19 nt, Human
cugaaugguuuucaaaaua

SEQ ID NO: 3754235 - RNA, 14 nt, Human
cugaauguaauuug

SEQ ID NO: 3754236 - RNA, 17 nt, Human
cugaauguaauuugugu

SEQ ID NO: 3754237 - RNA, 22 nt, Human
cugaauguaauuuguguaauaa

SEQ ID NO: 3754238 - RNA, 13 nt, Human
cugaauguaugua

SEQ ID NO: 3754239 - RNA, 17 nt, Human
cugaaugugcugaucau

SEQ ID NO: 3754240 - RNA, 12 nt, Human
cugaauguucug

SEQ ID NO: 3754241 - RNA, 18 nt, Human
cugaauguucugacauua

SEQ ID NO: 3754242 - RNA, 20 nt, Human
cugaauguucugacauuaac

SEQ ID NO: 3754243 - RNA, 22 nt, Human
cugaauguuuaaagaucaugac

SEQ ID NO: 3754244 - RNA, 16 nt, Human
cugaauguuuauuccu

SEQ ID NO: 3754245 - RNA, 18 nt, Human
cugaauguuuuucuaaag

SEQ ID NO: 3754246 - RNA, 20 nt, Human
cugaauguuuuucuaaagga

SEQ ID NO: 3754247 - RNA, 23 nt, Human
cugaauguuuuucuaaaggaguu

SEQ ID NO: 3754248 - RNA, 22 nt, Human
cugaauuaaugacagagccagu

SEQ ID NO: 3754249 - RNA, 14 nt, Human
cugaauuaauuaau

SEQ ID NO: 3754250 - RNA, 17 nt, Human
cugaauuaucuauuuca

SEQ ID NO: 3754251 - RNA, 15 nt, Human
cugaauuaugaaacu

SEQ ID NO: 3754252 - RNA, 16 nt, Human
cugaauuaugaaacuu

SEQ ID NO: 3754253 - RNA, 16 nt, Human
cugaauucuauuugcu

SEQ ID NO: 3754254 - RNA, 20 nt, Human
cugaauugagccuaaaaaua

SEQ ID NO: 3754255 - RNA, 21 nt, Human
cugaauugagccuaaaaauaa

SEQ ID NO: 3754256 - RNA, 22 nt, Human
cugaauugagccuaaaaauaaa

SEQ ID NO: 3754257 - RNA, 15 nt, Human
cugaauuguccccag

SEQ ID NO: 3754258 - RNA, 17 nt, Human
cugaauuuaucuuugau

SEQ ID NO: 3754259 - RNA, 11 nt, Human
cugaauuuuua

SEQ ID NO: 3754260 - RNA, 19 nt, Human
cugaauuuuuuuguaauaa

SEQ ID NO: 3754261 - RNA, 20 nt, Human
cugaauuuuuuuguaauaag

SEQ ID NO: 3754262 - RNA, 23 nt, Human
cugacaaaucaaguuuccaagca

SEQ ID NO: 3754263 - RNA, 19 nt, Human
cugacaacagacuucugaa

SEQ ID NO: 3754264 - RNA, 13 nt, Human
cugacaacuugaa

SEQ ID NO: 3754265 - RNA, 23 nt, Human
cugacaagauuauaauauuuuaa

SEQ ID NO: 3754266 - RNA, 14 nt, Human
cugacaagccaucu

SEQ ID NO: 3754267 - RNA, 14 nt, Human
cugacaagggcuga

SEQ ID NO: 3754268 - RNA, 21 nt, Human
cugacaaucaacucuaauagu

SEQ ID NO: 3754269 - RNA, 18 nt, Human
cugacacaaaaaaaguug

SEQ ID NO: 3754270 - RNA, 18 nt, Human
cugacacaaaaaguagau

SEQ ID NO: 3754271 - RNA, 14 nt, Human
cugacacaaaccug

SEQ ID NO: 3754272 - RNA, 20 nt, Human
cugacacaaaccugccuggg

SEQ ID NO: 3754273 - RNA, 13 nt, Human
cugacacacagcu

SEQ ID NO: 3754274 - RNA, 15 nt, Human
cugacacacagcucu

SEQ ID NO: 3754275 - RNA, 17 nt, Human
cugacacacagcucugu

SEQ ID NO: 3754276 - RNA, 22 nt, Human
cugacacacagcucuguccugg

SEQ ID NO: 3754277 - RNA, 14 nt, Human
cugacacaccaggc

SEQ ID NO: 3754278 - RNA, 19 nt, Human
cugacacaccaggcgcuaa

SEQ ID NO: 3754279 - RNA, 23 nt, Human
cugacacaccaggcgcuaauuca

SEQ ID NO: 3754280 - RNA, 23 nt, Human
cugacacaccugcagccucccuc

SEQ ID NO: 3754281 - RNA, 16 nt, Human
cugacacacuaaccaa

SEQ ID NO: 3754282 - RNA, 19 nt, Human
cugacacacuaaccaagcu

SEQ ID NO: 3754283 - RNA, 17 nt, Human
cugacaccccacuuagc

SEQ ID NO: 3754284 - RNA, 18 nt, Human
cugacaccccacuuagcc

SEQ ID NO: 3754285 - RNA, 17 nt, Human
cugacacguccacccca

SEQ ID NO: 3754286 - RNA, 17 nt, Human
cugacacucccuugggc

SEQ ID NO: 3754287 - RNA, 22 nt, Human
cugacacugguauuccugccuc

SEQ ID NO: 3754288 - RNA, 14 nt, Human
cugacagaaagcag

SEQ ID NO: 3754289 - RNA, 16 nt, Human
cugacagaaggugcca

SEQ ID NO: 3754290 - RNA, 15 nt, Human
cugacagacacaggc

SEQ ID NO: 3754291 - RNA, 19 nt, Human
cugacagacagcccuccau

SEQ ID NO: 3754292 - RNA, 16 nt, Human
cugacagagggaugga

SEQ ID NO: 3754293 - RNA, 11 nt, Human
cugacagauuu

SEQ ID NO: 3754294 - RNA, 15 nt, Human
cugacagcagcaucu

SEQ ID NO: 3754295 - RNA, 15 nt, Human
cugacagcaugugcc

SEQ ID NO: 3754296 - RNA, 18 nt, Human
cugacagcaugugcccuc

SEQ ID NO: 3754297 - RNA, 20 nt, Human
cugacagcaugugcccuccu

SEQ ID NO: 3754298 - RNA, 20 nt, Human
gaugaaucacuguuuuuaga

SEQ ID NO: 3754299 - RNA, 13 nt, Human
gaugaaucuugcg

SEQ ID NO: 3754300 - RNA, 20 nt, Human
gaugaauuaggggacacugu

SEQ ID NO: 3754301 - RNA, 22 nt, Human
gaugaauugcguuggucucugc

SEQ ID NO: 3754302 - RNA, 20 nt, Human
gaugacaaaaauucaacuca

SEQ ID NO: 3754303 - RNA, 17 nt, Human
gaugacaacuucccagu

SEQ ID NO: 3754304 - RNA, 14 nt, Human
gaugacagagcgag

SEQ ID NO: 3754305 - RNA, 17 nt, Human
gaugacauucccugcua

SEQ ID NO: 3754306 - RNA, 17 nt, Human
gaugacauugacuauuu

SEQ ID NO: 3754307 - RNA, 14 nt, Human
gaugacauugcuaa

SEQ ID NO: 3754308 - RNA, 15 nt, Human
gaugacauugcuaag

SEQ ID NO: 3754309 - RNA, 21 nt, Human
gaugacauugcuaagaugcuc

SEQ ID NO: 3754310 - RNA, 17 nt, Human
gaugaccccuccccuaa

SEQ ID NO: 3754311 - RNA, 19 nt, Human
gaugaccuaaccuaagcaa

SEQ ID NO: 3754312 - RNA, 15 nt, Human
gaugacuagaggcag

SEQ ID NO: 3754313 - RNA, 16 nt, Human
gaugacucaagauucc

SEQ ID NO: 3754314 - RNA, 22 nt, Human
gaugacucaagauucccaggag

SEQ ID NO: 3754315 - RNA, 23 nt, Human
gaugacucaagauucccaggagu

SEQ ID NO: 3754316 - RNA, 17 nt, Human
gaugacuggaauuuuua

SEQ ID NO: 3754317 - RNA, 19 nt, Human
gaugacuggggugggaggu

SEQ ID NO: 3754318 - RNA, 15 nt, Human
gaugacuguuuuuaa

SEQ ID NO: 3754319 - RNA, 21 nt, Human
gaugacuucccaacugcaagu

SEQ ID NO: 3754320 - RNA, 23 nt, Human
gaugagaaauaaaguuucuguug

SEQ ID NO: 3754321 - RNA, 17 nt, Human
gaugagaacaaagcugu

SEQ ID NO: 3754322 - RNA, 20 nt, Human
gaugagaacagauaaagauu

SEQ ID NO: 3754323 - RNA, 18 nt, Human
gaugagaauucagcugcc

SEQ ID NO: 3754324 - RNA, 21 nt, Human
gaugagaauuucuaaaaagau

SEQ ID NO: 3754325 - RNA, 18 nt, Human
gaugagaguuuuggaugc

SEQ ID NO: 3754326 - RNA, 20 nt, Human
gaugagauuggcauggcuuu

SEQ ID NO: 3754327 - RNA, 16 nt, Human
gaugagcaucccagga

SEQ ID NO: 3754328 - RNA, 17 nt, Human
gaugagcaucccaggau

SEQ ID NO: 3754329 - RNA, 15 nt, Human
gaugagcauggagcu

SEQ ID NO: 3754330 - RNA, 15 nt, Human
gaugagcccucagaa

SEQ ID NO: 3754331 - RNA, 13 nt, Human
gaugagccgcugu

SEQ ID NO: 3754332 - RNA, 22 nt, Human
gaugagccuucgugcccccccu

SEQ ID NO: 3754333 - RNA, 21 nt, Human
gaugagcucccacaagccuga

SEQ ID NO: 3754334 - RNA, 16 nt, Human
gaugagcucuacccag

SEQ ID NO: 3754335 - RNA, 22 nt, Human
gaugaggaguaaaauucaguuu

SEQ ID NO: 3754336 - RNA, 15 nt, Human
gaugaggcccuccac

SEQ ID NO: 3754337 - RNA, 23 nt, Human
gaugaggccucuuggaccucugc

SEQ ID NO: 3754338 - RNA, 13 nt, Human
gaugagggcagca

SEQ ID NO: 3754339 - RNA, 16 nt, Human
gaugagggcagcagcc

SEQ ID NO: 3754340 - RNA, 14 nt, Human
gaugaggugcuggg

SEQ ID NO: 3754341 - RNA, 19 nt, Human
gaugaggugcugggaggga

SEQ ID NO: 3754342 - RNA, 19 nt, Human
gaugaguuuugggaaguua

SEQ ID NO: 3754343 - RNA, 16 nt, Human
gaugauaaacgacuuu

SEQ ID NO: 3754344 - RNA, 20 nt, Human
gaugauaaguuccuuuccuu

SEQ ID NO: 3754345 - RNA, 18 nt, Human
gaugauagaggauuuuau

SEQ ID NO: 3754346 - RNA, 22 nt, Human
gaugaucaauuauaguuucuga

SEQ ID NO: 3754347 - RNA, 23 nt, Human
gaugauccaugaguuugcccugg

SEQ ID NO: 3754348 - RNA, 16 nt, Human
gaugauccccacgcca

SEQ ID NO: 3754349 - RNA, 15 nt, Human
gaugaucuacucaga

SEQ ID NO: 3754350 - RNA, 15 nt, Human
gaugaugccacacca

SEQ ID NO: 3754351 - RNA, 14 nt, Human
gaugaugcugccag

SEQ ID NO: 3754352 - RNA, 22 nt, Human
gaugaugcuuguaacaagaaaa

SEQ ID NO: 3754353 - RNA, 15 nt, Human
gaugaugugccuggg

SEQ ID NO: 3754354 - RNA, 14 nt, Human
gaugauugaagaaa

SEQ ID NO: 3754355 - RNA, 15 nt, Human
gaugauugaagaaac

SEQ ID NO: 3754356 - RNA, 13 nt, Human
gaugauuguacag

SEQ ID NO: 3754357 - RNA, 14 nt, Human
gaugauuuaagugu

SEQ ID NO: 3754358 - RNA, 21 nt, Human
gaugcaaaguacaauguguuu

SEQ ID NO: 3754359 - RNA, 19 nt, Human
gaugcaauccuuacaaaug

SEQ ID NO: 3754360 - RNA, 13 nt, Human
gaugcaaugaaca

SEQ ID NO: 3754361 - RNA, 21 nt, Human
gaugcacagaguuguuacauu

SEQ ID NO: 3754362 - RNA, 22 nt, Human
gaugcacagaguuguuacauuu

SEQ ID NO: 3754363 - RNA, 14 nt, Human
gaugcaccagcccu

SEQ ID NO: 3754364 - RNA, 15 nt, Human
gaugcaccagcccuu

SEQ ID NO: 3754365 - RNA, 23 nt, Human
gaugcaccagcccuuagcaggga

SEQ ID NO: 3754366 - RNA, 20 nt, Human
gaugcagacagggggccaga

SEQ ID NO: 3754367 - RNA, 23 nt, Human
gaugcagacagggggccagaaca

SEQ ID NO: 3754368 - RNA, 17 nt, Human
gaugcagcaaaauguga

SEQ ID NO: 3754369 - RNA, 13 nt, Human
gaugcagcauuug

SEQ ID NO: 3754370 - RNA, 14 nt, Human
gaugcagccgccuu

SEQ ID NO: 3754371 - RNA, 22 nt, Human
gaugcagccgccuuccuugacc

SEQ ID NO: 3754372 - RNA, 15 nt, Human
gaugcagcuuauacg

SEQ ID NO: 3754373 - RNA, 17 nt, Human
gaugcaggcuccccuga

SEQ ID NO: 3754374 - RNA, 22 nt, Human
gaugcaggugagcccauggccc

SEQ ID NO: 3754375 - RNA, 14 nt, Human
gaugcagugcuucc

SEQ ID NO: 3754376 - RNA, 22 nt, Human
gaugcaucuaccgcucuuggga

SEQ ID NO: 3754377 - RNA, 13 nt, Human
gaugcauggagau

SEQ ID NO: 3754378 - RNA, 14 nt, Human
gaugcaugucuuuu

SEQ ID NO: 3754379 - RNA, 16 nt, Human
gaugcaugucuuuuaa

SEQ ID NO: 3754380 - RNA, 22 nt, Human
gaugcauuuggguccaggagga

SEQ ID NO: 3754381 - RNA, 19 nt, Human
gaugccaaaaaaaaauaca

SEQ ID NO: 3754382 - RNA, 20 nt, Human
gaugccaaguuguuugagaa

SEQ ID NO: 3754383 - RNA, 16 nt, Human
gaugccacaccaagcu

SEQ ID NO: 3754384 - RNA, 16 nt, Human
gaugccacccuagcca

SEQ ID NO: 3754385 - RNA, 15 nt, Human
gaugccacuccuccc

SEQ ID NO: 3754386 - RNA, 17 nt, Human
gaugccacuccucccuc

SEQ ID NO: 3754387 - RNA, 19 nt, Human
gaugccacuccucccuccg

SEQ ID NO: 3754388 - RNA, 15 nt, Human
gaugccagccaagcu

SEQ ID NO: 3754389 - RNA, 16 nt, Human
gaugccagggacccac

SEQ ID NO: 3754390 - RNA, 14 nt, Human
gaugccagguucua

SEQ ID NO: 3754391 - RNA, 22 nt, Human
gaugccagguucuauuuggaau

SEQ ID NO: 3754392 - RNA, 20 nt, Human
gaugccaucuguguccuggu

SEQ ID NO: 3754393 - RNA, 22 nt, Human
gaugccaugagccgcccaaggc

SEQ ID NO: 3754394 - RNA, 19 nt, Human
gaugcccaaagaugcagcc

SEQ ID NO: 3754395 - RNA, 20 nt, Human
gaugcccaaagaugcagccg

SEQ ID NO: 3754396 - RNA, 18 nt, Human
gaugcccagaggacuccc

SEQ ID NO: 3754397 - RNA, 18 nt, Human
gaugcccagagggcccag

SEQ ID NO: 3754398 - RNA, 13 nt, Human
gaugcccugcccu

SEQ ID NO: 3754399 - RNA, 12 nt, Human
gaugcccuggag

SEQ ID NO: 3754400 - RNA, 18 nt, Human
gaugcccuggagguggcu

SEQ ID NO: 3754401 - RNA, 19 nt, Human
gaugcccuggagguggcug

SEQ ID NO: 3754402 - RNA, 19 nt, Human
gaugccugguggcagcugc

SEQ ID NO: 3754403 - RNA, 20 nt, Human
gaugccugguggcagcugcg

SEQ ID NO: 3754404 - RNA, 18 nt, Human
gaugccuuuuuuguaguu

SEQ ID NO: 3754405 - RNA, 14 nt, Human
gaugcgcacugcau

SEQ ID NO: 3754406 - RNA, 16 nt, Human
gaugcgcagccccauc

SEQ ID NO: 3754407 - RNA, 13 nt, Human
gaugcuaaaaccu

SEQ ID NO: 3754408 - RNA, 21 nt, Human
gaugcuagcgcguugccuguc

SEQ ID NO: 3754409 - RNA, 16 nt, Human
gaugcuaucaguuuua

SEQ ID NO: 3754410 - RNA, 14 nt, Human
gaugcucaggcuug

SEQ ID NO: 3754411 - RNA, 21 nt, Human
gaugcucaggcuugaaaugca

SEQ ID NO: 3754412 - RNA, 19 nt, Human
gaugcucagguacagagaa

SEQ ID NO: 3754413 - RNA, 20 nt, Human
gaugcucagguacagagaag

SEQ ID NO: 3754414 - RNA, 19 nt, Human
gaugcucaguugcuaaaca

SEQ ID NO: 3754415 - RNA, 17 nt, Human
gaugcuccaagauucua

SEQ ID NO: 3754416 - RNA, 20 nt, Human
gaugcuccaagauucuagau

SEQ ID NO: 3754417 - RNA, 12 nt, Human
gaugcuccagcc

SEQ ID NO: 3754418 - RNA, 16 nt, Human
gaugcuccagccaacc

SEQ ID NO: 3754419 - RNA, 22 nt, Human
gaugcuccagccaaccccugug

SEQ ID NO: 3754420 - RNA, 23 nt, Human
gaugcuccagccaaccccugugg

SEQ ID NO: 3754421 - RNA, 13 nt, Human
gaugcucccuccc

SEQ ID NO: 3754422 - RNA, 15 nt, Human
gaugcucccuccccu

SEQ ID NO: 3754423 - RNA, 13 nt, Human
gaugcuccuuggg

SEQ ID NO: 3754424 - RNA, 14 nt, Human
gaugcuccuugggc

SEQ ID NO: 3754425 - RNA, 21 nt, Human
gaugcuccuugggcccuuuga

SEQ ID NO: 3754426 - RNA, 15 nt, Human
gaugcucuucugugg

SEQ ID NO: 3754427 - RNA, 12 nt, Human
gaugcucuuucc

SEQ ID NO: 3754428 - RNA, 19 nt, Human
gaugcugaaagagaaaaga

SEQ ID NO: 3754429 - RNA, 17 nt, Human
gaugcugacuguacucc

SEQ ID NO: 3754430 - RNA, 19 nt, Human
gaugcugauguucagugua

SEQ ID NO: 3754431 - RNA, 23 nt, Human
gaugcugccagggcgccaucgcc

SEQ ID NO: 3754432 - RNA, 14 nt, Human
gaugcugccugagu

SEQ ID NO: 3754433 - RNA, 16 nt, Human
gaugcugccugaguca

SEQ ID NO: 3754434 - RNA, 11 nt, Human
gaugcugcuuu

SEQ ID NO: 3754435 - RNA, 16 nt, Human
gaugcuggagagguua

SEQ ID NO: 3754436 - RNA, 16 nt, Human
gaugcuggaugcuccu

SEQ ID NO: 3754437 - RNA, 22 nt, Human
gaugcuggaugucugccaauuu

SEQ ID NO: 3754438 - RNA, 12 nt, Human
gaugcuggccca

SEQ ID NO: 3754439 - RNA, 23 nt, Human
gaugcugggcacuucaucugauc

SEQ ID NO: 3754440 - RNA, 12 nt, Human
gaugcugggugg

SEQ ID NO: 3754441 - RNA, 19 nt, Human
gaugcuggguuggugcaca

SEQ ID NO: 3754442 - RNA, 20 nt, Human
gaugcuggguuggugcacag

SEQ ID NO: 3754443 - RNA, 13 nt, Human
gaugcugugaaau

SEQ ID NO: 3754444 - RNA, 12 nt, Human
gaugcuguugcc

SEQ ID NO: 3754445 - RNA, 14 nt, Human
gaugcuguuugaca

SEQ ID NO: 3754446 - RNA, 22 nt, Human
gaugcuuagagggauuucuuug

SEQ ID NO: 3754447 - RNA, 16 nt, Human
gaugcgguggcucacg

SEQ ID NO: 3754448 - RNA, 13 nt, Human
gaugcuauuugca

SEQ ID NO: 3754449 - RNA, 20 nt, Human
gaugcucaaaaucuuuccaa

SEQ ID NO: 3754450 - RNA, 23 nt, Human
gaugcucagguacagagaaggaa

SEQ ID NO: 3754451 - RNA, 22 nt, Human
gaugcucaguugcuaaacacug

SEQ ID NO: 3754452 - RNA, 13 nt, Human
gaugcuccagcca

SEQ ID NO: 3754453 - RNA, 23 nt, Human
gaugcucccuccccugcccuggu

SEQ ID NO: 3754454 - RNA, 18 nt, Human
gaugcucugugcagacac

SEQ ID NO: 3754455 - RNA, 13 nt, Human
gaugcucuuuccc

SEQ ID NO: 3754456 - RNA, 17 nt, Human
gaugcugaaaauguccu

SEQ ID NO: 3754457 - RNA, 21 nt, Human
gaugcugacauucaccugccc

SEQ ID NO: 3754458 - RNA, 15 nt, Human
gaugcugacuaguga

SEQ ID NO: 3754459 - RNA, 14 nt, Human
gaugcugauggagc

SEQ ID NO: 3754460 - RNA, 15 nt, Human
gaugcugauguucag

SEQ ID NO: 3754461 - RNA, 16 nt, Human
gaugcugauguucagu

SEQ ID NO: 3754462 - RNA, 17 nt, Human
gaugcugauguucagug

SEQ ID NO: 3754463 - RNA, 14 nt, Human
gaugcuggagaaga

SEQ ID NO: 3754464 - RNA, 16 nt, Human
gaugcuggagaagaga

SEQ ID NO: 3754465 - RNA, 19 nt, Human
gaugcuggagaagagagga

SEQ ID NO: 3754466 - RNA, 15 nt, Human
gaugcuggagagguu

SEQ ID NO: 3754467 - RNA, 20 nt, Human
gaugcuggaugucugccaau

SEQ ID NO: 3754468 - RNA, 17 nt, Human
gaugcuggcccagggcc

SEQ ID NO: 3754469 - RNA, 19 nt, Human
gaugcuggcccagggccca

SEQ ID NO: 3754470 - RNA, 22 nt, Human
gaugcuggcccagggcccagag

SEQ ID NO: 3754471 - RNA, 23 nt, Human
gaugcuggcccagggcccagagc

SEQ ID NO: 3754472 - RNA, 11 nt, Human
gaugcugggau

SEQ ID NO: 3754473 - RNA, 13 nt, Human
gaugcugggcugg

SEQ ID NO: 3754474 - RNA, 22 nt, Human
gaugcugggcuggcucccucuu

SEQ ID NO: 3754475 - RNA, 17 nt, Human
gaugcuggguggcccug

SEQ ID NO: 3754476 - RNA, 23 nt, Human
gaugcuucucacugccaugccag

SEQ ID NO: 3754477 - RNA, 24 nt, Human
gaugcuugccuagggccuggucca

SEQ ID NO: 3754478 - RNA, 23 nt, Human
gaugcuugcggcaaaaggaaagc

SEQ ID NO: 3754479 - RNA, 20 nt, Human
gaugcuuguaacaagaaaac

SEQ ID NO: 3754480 - RNA, 14 nt, Human
gaugcuuuaccaaa

SEQ ID NO: 3754481 - RNA, 21 nt, Human
gaugcuuuaccaaacagcaaa

SEQ ID NO: 3754482 - RNA, 17 nt, Human
gaugcuuuuagcucaaa

SEQ ID NO: 3754483 - RNA, 21 nt, Human
gaugcuuuucugucucugccu

SEQ ID NO: 3754484 - RNA, 16 nt, Human
gaugcuuuugucuaau

SEQ ID NO: 3754485 - RNA, 15 nt, Human
gauggaaacaaagug

SEQ ID NO: 3754486 - RNA, 22 nt, Human
gauggaacccuuuuggcccccg

SEQ ID NO: 3754487 - RNA, 18 nt, Human
gauggaaccgcaggaagc

SEQ ID NO: 3754488 - RNA, 15 nt, Human
gauggaagcuuccag

SEQ ID NO: 3754489 - RNA, 17 nt, Human
gauggaaguaaagccuc

SEQ ID NO: 3754490 - RNA, 15 nt, Human
gauggaauucuuccu

SEQ ID NO: 3754491 - RNA, 12 nt, Human
gauggacagacu

SEQ ID NO: 3754492 - RNA, 22 nt, Human
gauggacaguucacacccugca

SEQ ID NO: 3754493 - RNA, 13 nt, Human
gauggacaucuug

SEQ ID NO: 3754494 - RNA, 12 nt, Human
gauggagaagga

SEQ ID NO: 3754495 - RNA, 13 nt, Human
gauggagaaggaa

SEQ ID NO: 3754496 - RNA, 22 nt, Human
gauggagacugguccugugugc

SEQ ID NO: 3754497 - RNA, 22 nt, Human
gauggagcgcaccugcccccug

SEQ ID NO: 3754498 - RNA, 23 nt, Human
gauggaggaaaaccaagccgugg

SEQ ID NO: 3754499 - RNA, 11 nt, Human
gauggaggagg

SEQ ID NO: 3754500 - RNA, 21 nt, Human
gauggaggggugguccugacu

SEQ ID NO: 3754501 - RNA, 22 nt, Human
gauggaggggugguccugacuc

SEQ ID NO: 3754502 - RNA, 17 nt, Human
gauggaguuucuaaggu

SEQ ID NO: 3754503 - RNA, 12 nt, Human
gauggauuccaa

SEQ ID NO: 3754504 - RNA, 21 nt, Human
gauggauuccaaccccaacuc

SEQ ID NO: 3754505 - RNA, 14 nt, Human
gauggauucucaga

SEQ ID NO: 3754506 - RNA, 16 nt, Human
gauggauucucagaua

SEQ ID NO: 3754507 - RNA, 14 nt, Human
gauggauuugccug

SEQ ID NO: 3754508 - RNA, 15 nt, Human
gauggauuuguauca

SEQ ID NO: 3754509 - RNA, 13 nt, Human
gauggauuuuaua

SEQ ID NO: 3754510 - RNA, 20 nt, Human
gauggcaaagaaggagagca

SEQ ID NO: 3754511 - RNA, 17 nt, Human
gauggcaacagaucugg

SEQ ID NO: 3754512 - RNA, 18 nt, Human
gauggcaaccagaccauu

SEQ ID NO: 3754513 - RNA, 15 nt, Human
gauggcaccagaggc

SEQ ID NO: 3754514 - RNA, 21 nt, Human
gauggcacuuauaaccaaagc

SEQ ID NO: 3754515 - RNA, 17 nt, Human
gauggcagcuuuuaaaa

SEQ ID NO: 3754516 - RNA, 18 nt, Human
gauggcagcuuuuaaaag

SEQ ID NO: 3754517 - RNA, 19 nt, Human
gauggccagccccuuagac

SEQ ID NO: 3754518 - RNA, 13 nt, Human
gauggccaggcug

SEQ ID NO: 3754519 - RNA, 19 nt, Human
gauggcccauucuacuugc

SEQ ID NO: 3754520 - RNA, 15 nt, Human
gauggcccucuggua

SEQ ID NO: 3754521 - RNA, 22 nt, Human
gauggcccuucccacuggaggu

SEQ ID NO: 3754522 - RNA, 22 nt, Human
gauggcccuuccuccuccacca

SEQ ID NO: 3754523 - RNA, 21 nt, Human
gauggccuggccagggccugg

SEQ ID NO: 3754524 - RNA, 14 nt, Human
gauggcgcuaggca

SEQ ID NO: 3754525 - RNA, 14 nt, Human
gauggcgggugggg

SEQ ID NO: 3754526 - RNA, 16 nt, Human
gauggcgggugggggu

SEQ ID NO: 3754527 - RNA, 20 nt, Human
gauggcuaacuuacaaagau

SEQ ID NO: 3754528 - RNA, 14 nt, Human
gauggcucagaggg

SEQ ID NO: 3754529 - RNA, 13 nt, Human
gauggcucccagg

SEQ ID NO: 3754530 - RNA, 16 nt, Human
gaugggaaugaagcuu

SEQ ID NO: 3754531 - RNA, 18 nt, Human
gaugggaaugaagcuugu

SEQ ID NO: 3754532 - RNA, 23 nt, Human
gaugggaaugaggugggaggugg

SEQ ID NO: 3754533 - RNA, 15 nt, Human
gaugggacugggagg

SEQ ID NO: 3754534 - RNA, 17 nt, Human
gaugggacugggagggc

SEQ ID NO: 3754535 - RNA, 21 nt, Human
gaugggagcuccucuccugga

SEQ ID NO: 3754536 - RNA, 22 nt, Human
gaugggagcuccucuccuggag

SEQ ID NO: 3754537 - RNA, 20 nt, Human
gaugggaugauugaagaaac

SEQ ID NO: 3754538 - RNA, 15 nt, Human
gaugggcacuugaga

SEQ ID NO: 3754539 - RNA, 21 nt, Human
gaugggcauggggugggccuc

SEQ ID NO: 3754540 - RNA, 22 nt, Human
gaugggcauggggugggccucu

SEQ ID NO: 3754541 - RNA, 15 nt, Human
gaugggccaccgccg

SEQ ID NO: 3754542 - RNA, 16 nt, Human
gaugggcccaauucuu

SEQ ID NO: 3754543 - RNA, 10 nt, Human
gaugggccug

SEQ ID NO: 3754544 - RNA, 12 nt, Human
gaugggccugag

SEQ ID NO: 3754545 - RNA, 14 nt, Human
gaugggccuggcau

SEQ ID NO: 3754546 - RNA, 13 nt, Human
gaugggcuuccca

SEQ ID NO: 3754547 - RNA, 15 nt, Human
gaugggcuucccaag

SEQ ID NO: 3754548 - RNA, 13 nt, Human
gauggggaaggag

SEQ ID NO: 3754549 - RNA, 21 nt, Human
gauggggagaucggggccaga

SEQ ID NO: 3754550 - RNA, 19 nt, Human
gauggggcugcaccggcug

SEQ ID NO: 3754551 - RNA, 17 nt, Human
gaugggggaaagcacag

SEQ ID NO: 3754552 - RNA, 16 nt, Human
gaugggggcagggcug

SEQ ID NO: 3754553 - RNA, 16 nt, Human
gauggggucuguaaaa

SEQ ID NO: 3754554 - RNA, 15 nt, Human
gaugggucagagcua

SEQ ID NO: 3754555 - RNA, 21 nt, Human
gaugggucaguuguaucagca

SEQ ID NO: 3754556 - RNA, 23 nt, Human
gaugggucugguuugcagagcuu

SEQ ID NO: 3754557 - RNA, 16 nt, Human
gaugggugaaggcugg

SEQ ID NO: 3754558 - RNA, 22 nt, Human
gaugggugggugggguauuuuu

SEQ ID NO: 3754559 - RNA, 14 nt, Human
gaugguaagagaaa

SEQ ID NO: 3754560 - RNA, 18 nt, Human
gaugguaagagaaaagag

SEQ ID NO: 3754561 - RNA, 23 nt, Human
gaugguaucuauagucaagacga

SEQ ID NO: 3754562 - RNA, 15 nt, Human
gauggucagcucccu

SEQ ID NO: 3754563 - RNA, 15 nt, Human
gaugguccuggggcu

SEQ ID NO: 3754564 - RNA, 24 nt, Human
gaugguccuggggcucugugcagg

SEQ ID NO: 3754565 - RNA, 12 nt, Human
gauggugcaaug

SEQ ID NO: 3754566 - RNA, 20 nt, Human
gauggugcaaugaccuuuca

SEQ ID NO: 3754567 - RNA, 19 nt, Human
gaugguguggccuguggcu

SEQ ID NO: 3754568 - RNA, 15 nt, Human
gaugguuacacuguu

SEQ ID NO: 3754569 - RNA, 14 nt, Human
cugaggccacacuc

SEQ ID NO: 3754570 - RNA, 20 nt, Human
cugaggccacacucagcaca

SEQ ID NO: 3754571 - RNA, 14 nt, Human
cugaggccagccug

SEQ ID NO: 3754572 - RNA, 15 nt, Human
cugaggcccagaggg

SEQ ID NO: 3754573 - RNA, 17 nt, Human
cugaggcccagagggcc

SEQ ID NO: 3754574 - RNA, 19 nt, Human
cugaggcccagagggccug

SEQ ID NO: 3754575 - RNA, 21 nt, Human
cugaggccccuucuagguggc

SEQ ID NO: 3754576 - RNA, 18 nt, Human
cugaggcccuucucucca

SEQ ID NO: 3754577 - RNA, 24 nt, Human
cugaggcccuucucuccagccccu

SEQ ID NO: 3754578 - RNA, 20 nt, Human
cugaggccguugcugacuua

SEQ ID NO: 3754579 - RNA, 19 nt, Human
cugaggccuaaaaguaaac

SEQ ID NO: 3754580 - RNA, 19 nt, Human
cugaggccuagacucuguc

SEQ ID NO: 3754581 - RNA, 15 nt, Human
cugaggccugagacc

SEQ ID NO: 3754582 - RNA, 22 nt, Human
cugaggccugagcgcuccugcc

SEQ ID NO: 3754583 - RNA, 16 nt, Human
cugaggccugcagcac

SEQ ID NO: 3754584 - RNA, 20 nt, Human
cugaggccuggacuuuccug

SEQ ID NO: 3754585 - RNA, 19 nt, Human
cugaggccugggccgcugc

SEQ ID NO: 3754586 - RNA, 22 nt, Human
cugaggccugggccgcugccac

SEQ ID NO: 3754587 - RNA, 23 nt, Human
cugaggcgccccaacccguggag

SEQ ID NO: 3754588 - RNA, 17 nt, Human
cugaggcuccugugcua

SEQ ID NO: 3754589 - RNA, 15 nt, Human
cugaggcugagacug

SEQ ID NO: 3754590 - RNA, 24 nt, Human
cugaggcuggacuccagaucugca

SEQ ID NO: 3754591 - RNA, 21 nt, Human
cugaggcuggauccuagccuu

SEQ ID NO: 3754592 - RNA, 11 nt, Human
cugaggcuggc

SEQ ID NO: 3754593 - RNA, 13 nt, Human
cugaggcuggcac

SEQ ID NO: 3754594 - RNA, 19 nt, Human
cugaggcuggcacaggaca

SEQ ID NO: 3754595 - RNA, 20 nt, Human
cugaggcuggcacaggacau

SEQ ID NO: 3754596 - RNA, 22 nt, Human
cugaggcugggcucccuuccca

SEQ ID NO: 3754597 - RNA, 19 nt, Human
cugaggcuguggucacagc

SEQ ID NO: 3754598 - RNA, 18 nt, Human
cugaggcuuccagagagu

SEQ ID NO: 3754599 - RNA, 18 nt, Human
cugaggcuuuggauuuga

SEQ ID NO: 3754600 - RNA, 18 nt, Human
cugagggaaaggccagca

SEQ ID NO: 3754601 - RNA, 20 nt, Human
cugagggaaaggccagcacu

SEQ ID NO: 3754602 - RNA, 21 nt, Human
cugagggaaaggccagcacuc

SEQ ID NO: 3754603 - RNA, 21 nt, Human
cugagggaaauguuuuguaaa

SEQ ID NO: 3754604 - RNA, 23 nt, Human
cugagggaaauguuuuguaaaca

SEQ ID NO: 3754605 - RNA, 22 nt, Human
cugagggacucugaagccucug

SEQ ID NO: 3754606 - RNA, 23 nt, Human
cugagggacucugaagccucugg

SEQ ID NO: 3754607 - RNA, 13 nt, Human
cugagggagccug

SEQ ID NO: 3754608 - RNA, 15 nt, Human
cugagggaggaccug

SEQ ID NO: 3754609 - RNA, 19 nt, Human
cugagggaggaccuggggc

SEQ ID NO: 3754610 - RNA, 13 nt, Human
cugagggaggagg

SEQ ID NO: 3754611 - RNA, 21 nt, Human
cugagggaggaggccaccucu

SEQ ID NO: 3754612 - RNA, 22 nt, Human
cugagggaggaggccaccucuc

SEQ ID NO: 3754613 - RNA, 15 nt, Human
cugagggaucuuuac

SEQ ID NO: 3754614 - RNA, 20 nt, Human
cugagggauggacugaugcu

SEQ ID NO: 3754615 - RNA, 21 nt, Human
cugagggauggacugaugcuu

SEQ ID NO: 3754616 - RNA, 12 nt, Human
cugagggcaaau

SEQ ID NO: 3754617 - RNA, 20 nt, Human
cugagggcagaaagguucug

SEQ ID NO: 3754618 - RNA, 20 nt, Human
cugagggcagacuggggcau

SEQ ID NO: 3754619 - RNA, 16 nt, Human
cugagggcagucgaua

SEQ ID NO: 3754620 - RNA, 12 nt, Human
cugagggcaguu

SEQ ID NO: 3754621 - RNA, 22 nt, Human
cugagggcaguucgcagccacc

SEQ ID NO: 3754622 - RNA, 13 nt, Human
cugagggccacac

SEQ ID NO: 3754623 - RNA, 19 nt, Human
cugagggccccucugccca

SEQ ID NO: 3754624 - RNA, 22 nt, Human
cugagggccccucugcccagcu

SEQ ID NO: 3754625 - RNA, 16 nt, Human
cugagggccugcugga

SEQ ID NO: 3754626 - RNA, 21 nt, Human
cugaggggaggaucacuggag

SEQ ID NO: 3754627 - RNA, 23 nt, Human
cugaggggaggaucacuggagcc

SEQ ID NO: 3754628 - RNA, 21 nt, Human
cugaggggcaacgaagaaaaa

SEQ ID NO: 3754629 - RNA, 19 nt, Human
cugaggggcagccugccuu

SEQ ID NO: 3754630 - RNA, 20 nt, Human
cugaggggcaucugccccuc

SEQ ID NO: 3754631 - RNA, 18 nt, Human
cugaggggcuaccaggaa

SEQ ID NO: 3754632 - RNA, 13 nt, Human
cugagggggagcc

SEQ ID NO: 3754633 - RNA, 20 nt, Human
cugaggggggccgugcccag

SEQ ID NO: 3754634 - RNA, 22 nt, Human
cugaggggggccgugcccaggg

SEQ ID NO: 3754635 - RNA, 15 nt, Human
gauuuucagcccuca

SEQ ID NO: 3754636 - RNA, 19 nt, Human
gauuuucagcccucagaau

SEQ ID NO: 3754637 - RNA, 12 nt, Human
gauuuucaguua

SEQ ID NO: 3754638 - RNA, 14 nt, Human
gauuuucaguuacu

SEQ ID NO: 3754639 - RNA, 16 nt, Human
gauuuucauaacuuau

SEQ ID NO: 3754640 - RNA, 14 nt, Human
gauuuucauguucu

SEQ ID NO: 3754641 - RNA, 13 nt, Human
gauuuuccaaaug

SEQ ID NO: 3754642 - RNA, 11 nt, Human
gauuuuccauc

SEQ ID NO: 3754643 - RNA, 21 nt, Human
gauuuuccaucuaaaaauaua

SEQ ID NO: 3754644 - RNA, 23 nt, Human
gauuuucuauuauggaaaacugu

SEQ ID NO: 3754645 - RNA, 15 nt, Human
gauuuucugguucua

SEQ ID NO: 3754646 - RNA, 15 nt, Human
gauuuucuuuugccu

SEQ ID NO: 3754647 - RNA, 16 nt, Human
gauuuugaaaacuaca

SEQ ID NO: 3754648 - RNA, 21 nt, Human
gauuuugaaaucaugaagaua

SEQ ID NO: 3754649 - RNA, 21 nt, Human
gauuuugggguuguguuguca

SEQ ID NO: 3754650 - RNA, 17 nt, Human
gauuuuguaagaaguuu

SEQ ID NO: 3754651 - RNA, 21 nt, Human
gauuuuguguuuauucuugau

SEQ ID NO: 3754652 - RNA, 13 nt, Human
gauuuuuaaaaug

SEQ ID NO: 3754653 - RNA, 16 nt, Human
gauuuuuaaaauguac

SEQ ID NO: 3754654 - RNA, 22 nt, Human
gauuuuuacguuugaagacauu

SEQ ID NO: 3754655 - RNA, 18 nt, Human
gauuuuuacuguguuuua

SEQ ID NO: 3754656 - RNA, 22 nt, Human
gauuuuuauauuaguugcuuug

SEQ ID NO: 3754657 - RNA, 15 nt, Human
gauuuuuaugucugg

SEQ ID NO: 3754658 - RNA, 16 nt, Human
gauuuuucuaaccuug

SEQ ID NO: 3754659 - RNA, 23 nt, Human
gauuuuucuaaccuugaaugcug

SEQ ID NO: 3754660 - RNA, 15 nt, Human
gauuuuucuuuaacu

SEQ ID NO: 3754661 - RNA, 14 nt, Human
gauuuuucuuuaca

SEQ ID NO: 3754662 - RNA, 15 nt, Human
gauuuuucuuuacaa

SEQ ID NO: 3754663 - RNA, 21 nt, Human
gauuuuugagcccuuguuuca

SEQ ID NO: 3754664 - RNA, 15 nt, Human
gauuuuugucuugug

SEQ ID NO: 3754665 - RNA, 14 nt, Human
gauuuuuguugauu

SEQ ID NO: 3754666 - RNA, 18 nt, Human
gauuuuuuaauuguuuaa

SEQ ID NO: 3754667 - RNA, 14 nt, Human
gauuuuuuauugcu

SEQ ID NO: 3754668 - RNA, 18 nt, Human
gauuuuuuauugcuagua

SEQ ID NO: 3754669 - RNA, 22 nt, Human
gauuuuuuauugcuaguauuug

SEQ ID NO: 3754670 - RNA, 21 nt, Human
gauuuuuucagacuugucaag

SEQ ID NO: 3754671 - RNA, 23 nt, Human
gauuuuuuuuuagaacagaaaac

SEQ ID NO: 3754672 - RNA, 21 nt, Human
gauuuuuuuuuccuucagugc

SEQ ID NO: 3754673 - RNA, 14 nt, Human
gcaaaaaagaaaac

SEQ ID NO: 3754674 - RNA, 15 nt, Human
gcaaaaaagaaaacc

SEQ ID NO: 3754675 - RNA, 12 nt, Human
gcaaaaaauacu

SEQ ID NO: 3754676 - RNA, 12 nt, Human
gcaaaaaaucuu

SEQ ID NO: 3754677 - RNA, 13 nt, Human
gcaaaaagcaaaa

SEQ ID NO: 3754678 - RNA, 18 nt, Human
gcaaaaauccgaggugcu

SEQ ID NO: 3754679 - RNA, 12 nt, Human
gcaaaaaugcua

SEQ ID NO: 3754680 - RNA, 13 nt, Human
gcaaaaaugcuaa

SEQ ID NO: 3754681 - RNA, 22 nt, Human
gcaaaacagcguuuaagacugu

SEQ ID NO: 3754682 - RNA, 21 nt, Human
gcaaaaccacuagaacucucc

SEQ ID NO: 3754683 - RNA, 16 nt, Human
gcaaaaccauugcuuc

SEQ ID NO: 3754684 - RNA, 20 nt, Human
gcaaaacuaaauacuugcuc

SEQ ID NO: 3754685 - RNA, 23 nt, Human
gcaaaacuaaauacuugcuccau

SEQ ID NO: 3754686 - RNA, 23 nt, Human
gcaaaacucuacuuaauccaaug

SEQ ID NO: 3754687 - RNA, 14 nt, Human
gcaaaacuuuuaaa

SEQ ID NO: 3754688 - RNA, 16 nt, Human
gcaaaacuuuuaaacu

SEQ ID NO: 3754689 - RNA, 11 nt, Human
gcaaaagaaga

SEQ ID NO: 3754690 - RNA, 19 nt, Human
gcaaaagaauggcagaaaa

SEQ ID NO: 3754691 - RNA, 16 nt, Human
gcaaaagacuaauuua

SEQ ID NO: 3754692 - RNA, 21 nt, Human
gcaaaagaguguaaaauauuu

SEQ ID NO: 3754693 - RNA, 15 nt, Human
gcaaaagaugcuucu

SEQ ID NO: 3754694 - RNA, 23 nt, Human
gcaaaagccuuguguauauuugu

SEQ ID NO: 3754695 - RNA, 12 nt, Human
gcaaaaggagag

SEQ ID NO: 3754696 - RNA, 23 nt, Human
gcaaaaggaucuuuguggccaag

SEQ ID NO: 3754697 - RNA, 17 nt, Human
gcaaaaggccucuugua

SEQ ID NO: 3754698 - RNA, 18 nt, Human
gcaaaaguucugacuuga

SEQ ID NO: 3754699 - RNA, 15 nt, Human
gcaaaauaauuuuaa

SEQ ID NO: 3754700 - RNA, 20 nt, Human
gcaaaauaauuuuaaacaaa

SEQ ID NO: 3754701 - RNA, 15 nt, Human
gcaaaaucaagagau

SEQ ID NO: 3754702 - RNA, 15 nt, Human
gcaaaaucaguuuuc

SEQ ID NO: 3754703 - RNA, 17 nt, Human
gcaaaaugaggaaugua

SEQ ID NO: 3754704 - RNA, 19 nt, Human
gcaaaauguuacagaaucu

SEQ ID NO: 3754705 - RNA, 20 nt, Human
gcaaaauuugaugccaggac

SEQ ID NO: 3754706 - RNA, 22 nt, Human
gcaaaauuugaugccaggacac

SEQ ID NO: 3754707 - RNA, 16 nt, Human
gcaaaauuuuauagcu

SEQ ID NO: 3754708 - RNA, 12 nt, Human
gcaaacacuuaa

SEQ ID NO: 3754709 - RNA, 13 nt, Human
gcaaacagaacag

SEQ ID NO: 3754710 - RNA, 14 nt, Human
gcaaacagaacagg

SEQ ID NO: 3754711 - RNA, 23 nt, Human
gcaaacagaggaagaauuuguua

SEQ ID NO: 3754712 - RNA, 18 nt, Human
gcaaacagggccucugcg

SEQ ID NO: 3754713 - RNA, 13 nt, Human
gcaaaccaacaag

SEQ ID NO: 3754714 - RNA, 20 nt, Human
gcaaaccaacaagaauaaag

SEQ ID NO: 3754715 - RNA, 17 nt, Human
gcaaaccacacuggacu

SEQ ID NO: 3754716 - RNA, 18 nt, Human
gcaaaccacacuggacuc

SEQ ID NO: 3754717 - RNA, 21 nt, Human
gcaaaccaucauugaaaucuu

SEQ ID NO: 3754718 - RNA, 15 nt, Human
gcaaacccugucaaa

SEQ ID NO: 3754719 - RNA, 17 nt, Human
gcaaaccugccccaucc

SEQ ID NO: 3754720 - RNA, 18 nt, Human
gcaaaccugccccauccc

SEQ ID NO: 3754721 - RNA, 16 nt, Human
gcaaacgcugccugcc

SEQ ID NO: 3754722 - RNA, 21 nt, Human
gcaaacucaagcuucuucacu

SEQ ID NO: 3754723 - RNA, 10 nt, Human
gcaaacucuu

SEQ ID NO: 3754724 - RNA, 22 nt, Human
gcaaacucuuuggucguuuuuu

SEQ ID NO: 3754725 - RNA, 15 nt, Human
gcaaacugcaugccc

SEQ ID NO: 3754726 - RNA, 16 nt, Human
gcaaacugcaugccca

SEQ ID NO: 3754727 - RNA, 22 nt, Human
gcaaacugcaugcccagagacc

SEQ ID NO: 3754728 - RNA, 22 nt, Human
gcaaacugggaaccccuuuccc

SEQ ID NO: 3754729 - RNA, 23 nt, Human
gcaaacuuuguaugucauuuccu

SEQ ID NO: 3754730 - RNA, 23 nt, Human
gcaaagaaagugggaggucagga

SEQ ID NO: 3754731 - RNA, 22 nt, Human
gcaaagaauuucaauuuguuca

SEQ ID NO: 3754732 - RNA, 17 nt, Human
gcaaagacagaagccuc

SEQ ID NO: 3754733 - RNA, 14 nt, Human
gcaaagagagauuu

SEQ ID NO: 3754734 - RNA, 20 nt, Human
gcaaagagccagcacccuga

SEQ ID NO: 3754735 - RNA, 16 nt, Human
gcaaagaggacucgcu

SEQ ID NO: 3754736 - RNA, 20 nt, Human
gcaaagaggacucgcuugua

SEQ ID NO: 3754737 - RNA, 13 nt, Human
gcaaagaggcaag

SEQ ID NO: 3754738 - RNA, 16 nt, Human
gcaaagaucaaaauaa

SEQ ID NO: 3754739 - RNA, 20 nt, Human
gcaaagaucuguccucagcc

SEQ ID NO: 3754740 - RNA, 18 nt, Human
gcaaagaugaaggucugu

SEQ ID NO: 3754741 - RNA, 13 nt, Human
gcaaagcaccagc

SEQ ID NO: 3754742 - RNA, 21 nt, Human
gcaaagcaccagcuucuccag

SEQ ID NO: 3754743 - RNA, 23 nt, Human
gcaaagcacugacuucuaaguaa

SEQ ID NO: 3754744 - RNA, 20 nt, Human
gcaaagcauguuuugcaugu

SEQ ID NO: 3754745 - RNA, 13 nt, Human
gcaaagcccagcu

SEQ ID NO: 3754746 - RNA, 18 nt, Human
gcaaagccccaugcugga

SEQ ID NO: 3754747 - RNA, 12 nt, Human
gcaaagcuguuc

SEQ ID NO: 3754748 - RNA, 18 nt, Human
gcaaagcuguucuuccug

SEQ ID NO: 3754749 - RNA, 15 nt, Human
gcaaaggaaggugga

SEQ ID NO: 3754750 - RNA, 20 nt, Human
gcaaaggaagguggauggcc

SEQ ID NO: 3754751 - RNA, 13 nt, Human
gcaaaggcuggga

SEQ ID NO: 3754752 - RNA, 17 nt, Human
gcaaagggagcagaacu

SEQ ID NO: 3754753 - RNA, 19 nt, Human
gcaaagggcugaaagccau

SEQ ID NO: 3754754 - RNA, 19 nt, Human
gcaaaggggacagcugugu

SEQ ID NO: 3754755 - RNA, 22 nt, Human
gcaaaggguccagaaggagaca

SEQ ID NO: 3754756 - RNA, 20 nt, Human
gcaaaguacagguacuuugu

SEQ ID NO: 3754757 - RNA, 13 nt, Human
gcaaaguaguacu

SEQ ID NO: 3754758 - RNA, 14 nt, Human
gcaaagucuaaagu

SEQ ID NO: 3754759 - RNA, 22 nt, Human
gcaaagucuaaaguuuacagua

SEQ ID NO: 3754760 - RNA, 15 nt, Human
gcaaagugguucccu

SEQ ID NO: 3754761 - RNA, 14 nt, Human
gcaaaguguuuugu

SEQ ID NO: 3754762 - RNA, 19 nt, Human
gcaaauaauuuccuggugu

SEQ ID NO: 3754763 - RNA, 14 nt, Human
gcaaauauaaaacu

SEQ ID NO: 3754764 - RNA, 22 nt, Human
gcaaaucagaaacuugugaagu

SEQ ID NO: 3754765 - RNA, 19 nt, Human
gcaaaucaguguuuuucuu

SEQ ID NO: 3754766 - RNA, 19 nt, Human
gcaaauccuaugugauuuu

SEQ ID NO: 3754767 - RNA, 22 nt, Human
gcaaauccuugugggaaaagaa

SEQ ID NO: 3754768 - RNA, 18 nt, Human
gcaaauccuuugugaaaa

SEQ ID NO: 3754769 - RNA, 16 nt, Human
gcaaaugacaugcacu

SEQ ID NO: 3754770 - RNA, 14 nt, Human
gcaaaugccagggc

SEQ ID NO: 3754771 - RNA, 14 nt, Human
gcaaaugcccaagg

SEQ ID NO: 3754772 - RNA, 23 nt, Human
gcaaaugcuaaugucaaacuuga

SEQ ID NO: 3754773 - RNA, 21 nt, Human
gcaaaugucagauacaaugua

SEQ ID NO: 3754774 - RNA, 18 nt, Human
gcaaaugucaugcugccu

SEQ ID NO: 3754775 - RNA, 20 nt, Human
gcaaaugucaugcugccuua

SEQ ID NO: 3754776 - RNA, 12 nt, Human
gcaaaugugaau

SEQ ID NO: 3754777 - RNA, 12 nt, Human
gcaaauguuaaa

SEQ ID NO: 3754778 - RNA, 21 nt, Human
gcaaauuaauuggcagcagau

SEQ ID NO: 3754779 - RNA, 16 nt, Human
gcaaauucuuuugaau

SEQ ID NO: 3754780 - RNA, 17 nt, Human
gcaaauucuuuugaauu

SEQ ID NO: 3754781 - RNA, 20 nt, Human
gcaaauucuuuugaauuguu

SEQ ID NO: 3754782 - RNA, 14 nt, Human
gcaaauuggagaaa

SEQ ID NO: 3754783 - RNA, 15 nt, Human
gcaaauuggagaaaa

SEQ ID NO: 3754784 - RNA, 16 nt, Human
gcaaauuuauaauuuu

SEQ ID NO: 3754785 - RNA, 18 nt, Human
gauuauuuuuucagaccg

SEQ ID NO: 3754786 - RNA, 14 nt, Human
gauucaaaauauuu

SEQ ID NO: 3754787 - RNA, 15 nt, Human
gauucaaagguucua

SEQ ID NO: 3754788 - RNA, 18 nt, Human
gauucaaagguucuaggu

SEQ ID NO: 3754789 - RNA, 10 nt, Human
gauucaaauu

SEQ ID NO: 3754790 - RNA, 14 nt, Human
gauucaaauuuauu

SEQ ID NO: 3754791 - RNA, 19 nt, Human
gauucaacagguuuuccug

SEQ ID NO: 3754792 - RNA, 23 nt, Human
gauucaacuaaaaaaaaaaaagu

SEQ ID NO: 3754793 - RNA, 13 nt, Human
gauucaagccauu

SEQ ID NO: 3754794 - RNA, 18 nt, Human
gauucaaucuguaaacug

SEQ ID NO: 3754795 - RNA, 19 nt, Human
gauucaaucuguaaacugu

SEQ ID NO: 3754796 - RNA, 18 nt, Human
gauucaaugccucuggcu

SEQ ID NO: 3754797 - RNA, 17 nt, Human
gauucaauuuucuuuaa

SEQ ID NO: 3754798 - RNA, 18 nt, Human
gauucacaaugaaaugcu

SEQ ID NO: 3754799 - RNA, 16 nt, Human
gauucacaccccaccu

SEQ ID NO: 3754800 - RNA, 19 nt, Human
gauucacaccccaccugcg

SEQ ID NO: 3754801 - RNA, 21 nt, Human
gauucacaccugacucugaaa

SEQ ID NO: 3754802 - RNA, 14 nt, Human
gauucacaucugca

SEQ ID NO: 3754803 - RNA, 13 nt, Human
gauucacauguuu

SEQ ID NO: 3754804 - RNA, 20 nt, Human
gauucacauguuuucaaaug

SEQ ID NO: 3754805 - RNA, 14 nt, Human
gauucaccugagca

SEQ ID NO: 3754806 - RNA, 13 nt, Human
gauucaccuguaa

SEQ ID NO: 3754807 - RNA, 19 nt, Human
gauucaccuguaaaacuuu

SEQ ID NO: 3754808 - RNA, 12 nt, Human
gauucagacagc

SEQ ID NO: 3754809 - RNA, 13 nt, Human
gauucagacagcu

SEQ ID NO: 3754810 - RNA, 20 nt, Human
gauucagauuucucuuugaa

SEQ ID NO: 3754811 - RNA, 15 nt, Human
gauucagccuucuuu

SEQ ID NO: 3754812 - RNA, 21 nt, Human
gauucagccuucuuuuucugg

SEQ ID NO: 3754813 - RNA, 15 nt, Human
gauucagcucugcaa

SEQ ID NO: 3754814 - RNA, 18 nt, Human
gauucaggaaaaggccug

SEQ ID NO: 3754815 - RNA, 20 nt, Human
gauucaggaaaaggccuggg

SEQ ID NO: 3754816 - RNA, 21 nt, Human
gauucaggaaaaggccugggg

SEQ ID NO: 3754817 - RNA, 23 nt, Human
gauucaggaaaaggccuggggug

SEQ ID NO: 3754818 - RNA, 13 nt, Human
gauucaggaaugu

SEQ ID NO: 3754819 - RNA, 22 nt, Human
gauucagggaaagugggacagc

SEQ ID NO: 3754820 - RNA, 20 nt, Human
gauucaggugcagaggaagu

SEQ ID NO: 3754821 - RNA, 14 nt, Human
gauucagucacaug

SEQ ID NO: 3754822 - RNA, 15 nt, Human
gauucaguuuucauu

SEQ ID NO: 3754823 - RNA, 17 nt, Human
gauucauauuuacuucu

SEQ ID NO: 3754824 - RNA, 22 nt, Human
gauucaucuacccugcugaccu

SEQ ID NO: 3754825 - RNA, 16 nt, Human
gauucauuuccugccc

SEQ ID NO: 3754826 - RNA, 23 nt, Human
gauucauuuccugcccuuccuca

SEQ ID NO: 3754827 - RNA, 10 nt, Human
gauucauuuu

SEQ ID NO: 3754828 - RNA, 19 nt, Human
gauucauuuuaacaucuga

SEQ ID NO: 3754829 - RNA, 22 nt, Human
gauuccagagaguggcuccucc

SEQ ID NO: 3754830 - RNA, 18 nt, Human
gauuccagccaucaccuu

SEQ ID NO: 3754831 - RNA, 15 nt, Human
gauuccagcccacau

SEQ ID NO: 3754832 - RNA, 14 nt, Human
gauuccaucuccuu

SEQ ID NO: 3754833 - RNA, 15 nt, Human
gauuccaucuccuug

SEQ ID NO: 3754834 - RNA, 20 nt, Human
gauuccaugcuaagcaagcu

SEQ ID NO: 3754835 - RNA, 17 nt, Human
gauuccauuuacugcau

SEQ ID NO: 3754836 - RNA, 17 nt, Human
gauucccaagcucugcu

SEQ ID NO: 3754837 - RNA, 21 nt, Human
gauucccaagcucugcuccuc

SEQ ID NO: 3754838 - RNA, 13 nt, Human
gauucccagagac

SEQ ID NO: 3754839 - RNA, 19 nt, Human
gauucccagagcaaaauaa

SEQ ID NO: 3754840 - RNA, 12 nt, Human
gauucccaggag

SEQ ID NO: 3754841 - RNA, 21 nt, Human
gauucccaggaguucugcuca

SEQ ID NO: 3754842 - RNA, 23 nt, Human
gauucccauugaaaauguaagua

SEQ ID NO: 3754843 - RNA, 19 nt, Human
gauucccucucccaggccc

SEQ ID NO: 3754844 - RNA, 16 nt, Human
gauuccgcagugagag

SEQ ID NO: 3754845 - RNA, 22 nt, Human
gauuccuaaucacucagagcag

SEQ ID NO: 3754846 - RNA, 17 nt, Human
gauuccucucuaagugg

SEQ ID NO: 3754847 - RNA, 17 nt, Human
gauuccugacccaggcc

SEQ ID NO: 3754848 - RNA, 12 nt, Human
gauuccuuccca

SEQ ID NO: 3754849 - RNA, 13 nt, Human
gauuccuucucug

SEQ ID NO: 3754850 - RNA, 22 nt, Human
gauuccuucucugaacacaggc

SEQ ID NO: 3754851 - RNA, 13 nt, Human
gauuccuuuaaca

SEQ ID NO: 3754852 - RNA, 15 nt, Human
gauuccuuuaacaac

SEQ ID NO: 3754853 - RNA, 20 nt, Human
gauuccuuuaacaacauguu

SEQ ID NO: 3754854 - RNA, 17 nt, Human
gauuccuuugaagagga

SEQ ID NO: 3754855 - RNA, 15 nt, Human
gauuccuuuucuugu

SEQ ID NO: 3754856 - RNA, 16 nt, Human
gauuccuuuuuucaaa

SEQ ID NO: 3754857 - RNA, 17 nt, Human
gauucgaaugacacugu

SEQ ID NO: 3754858 - RNA, 21 nt, Human
gauucgagcuauauuuaagua

SEQ ID NO: 3754859 - RNA, 13 nt, Human
gauucggcugucu

SEQ ID NO: 3754860 - RNA, 16 nt, Human
gauucgguaucccccc

SEQ ID NO: 3754861 - RNA, 11 nt, Human
gauucuaaaau

SEQ ID NO: 3754862 - RNA, 15 nt, Human
gauucuaaaggucca

SEQ ID NO: 3754863 - RNA, 19 nt, Human
gauucuaauuuuuaagcaa

SEQ ID NO: 3754864 - RNA, 23 nt, Human
gauucuaccacacagcagcaguu

SEQ ID NO: 3754865 - RNA, 18 nt, Human
gauucuagaucagaugcu

SEQ ID NO: 3754866 - RNA, 13 nt, Human
gauucuaggaccu

SEQ ID NO: 3754867 - RNA, 17 nt, Human
gauucuauguuaauauu

SEQ ID NO: 3754868 - RNA, 15 nt, Human
gauucuauuuauaug

SEQ ID NO: 3754869 - RNA, 21 nt, Human
gauucuauuuauauguacaug

SEQ ID NO: 3754870 - RNA, 15 nt, Human
gauucucaccagcug

SEQ ID NO: 3754871 - RNA, 12 nt, Human
gauucucagggu

SEQ ID NO: 3754872 - RNA, 17 nt, Human
gauucucagggucucug

SEQ ID NO: 3754873 - RNA, 18 nt, Human
gauucuccugccucagcc

SEQ ID NO: 3754874 - RNA, 19 nt, Human
gauucuccugccucagccu

SEQ ID NO: 3754875 - RNA, 13 nt, Human
gauucuccuucag

SEQ ID NO: 3754876 - RNA, 22 nt, Human
gauucucuccauuuuggugucu

SEQ ID NO: 3754877 - RNA, 14 nt, Human
gauucucuugccuc

SEQ ID NO: 3754878 - RNA, 23 nt, Human
gauucucuugccucagcuucccc

SEQ ID NO: 3754879 - RNA, 13 nt, Human
gauucugagagcu

SEQ ID NO: 3754880 - RNA, 15 nt, Human
gauucugcaguaaau

SEQ ID NO: 3754881 - RNA, 16 nt, Human
gauucugcaguaaauc

SEQ ID NO: 3754882 - RNA, 18 nt, Human
gauucugcaguaaaucuu

SEQ ID NO: 3754883 - RNA, 13 nt, Human
gauucugcuuuua

SEQ ID NO: 3754884 - RNA, 16 nt, Human
gauucuggcuuuaagc

SEQ ID NO: 3754885 - RNA, 22 nt, Human
gauucugggaggaagcagguug

SEQ ID NO: 3754886 - RNA, 17 nt, Human
gauucugggaugcuccu

SEQ ID NO: 3754887 - RNA, 17 nt, Human
gauucugguuccagggu

SEQ ID NO: 3754888 - RNA, 12 nt, Human
gauucuguacau

SEQ ID NO: 3754889 - RNA, 22 nt, Human
gauucuguguguuuucauaaua

SEQ ID NO: 3754890 - RNA, 13 nt, Human
gauucuuccagau

SEQ ID NO: 3754891 - RNA, 15 nt, Human
gauucuucugcuuca

SEQ ID NO: 3754892 - RNA, 20 nt, Human
gauucuucugcuucagccuc

SEQ ID NO: 3754893 - RNA, 20 nt, Human
gauucuuucaguucuuugga

SEQ ID NO: 3754894 - RNA, 18 nt, Human
gauucuuuccauuugcau

SEQ ID NO: 3754895 - RNA, 17 nt, Human
gauucuuuccugaggcu

SEQ ID NO: 3754896 - RNA, 16 nt, Human
gauucuuuugcccaca

SEQ ID NO: 3754897 - RNA, 19 nt, Human
gauugaaaacuuuucucag

SEQ ID NO: 3754898 - RNA, 18 nt, Human
gauugaaaauguccagga

SEQ ID NO: 3754899 - RNA, 20 nt, Human
gauugaaaauguccaggaaa

SEQ ID NO: 3754900 - RNA, 23 nt, Human
gauugaaguauuuugcuggaaua

SEQ ID NO: 3754901 - RNA, 15 nt, Human
gauugacaguaacuu

SEQ ID NO: 3754902 - RNA, 18 nt, Human
gauugacaguaacuuggu

SEQ ID NO: 3754903 - RNA, 14 nt, Human
gauugaccugcucc

SEQ ID NO: 3754904 - RNA, 16 nt, Human
gauugagaaggagaga

SEQ ID NO: 3754905 - RNA, 22 nt, Human
gauugagaaguuacuuuccauu

SEQ ID NO: 3754906 - RNA, 19 nt, Human
gauugagaccuacaggcug

SEQ ID NO: 3754907 - RNA, 13 nt, Human
gauugaggccugc

SEQ ID NO: 3754908 - RNA, 15 nt, Human
gauugauuugaagaa

SEQ ID NO: 3754909 - RNA, 15 nt, Human
gauugcaacaggcug

SEQ ID NO: 3754910 - RNA, 16 nt, Human
gauugcaacaggcugg

SEQ ID NO: 3754911 - RNA, 17 nt, Human
gauugcaacaggcuggg

SEQ ID NO: 3754912 - RNA, 18 nt, Human
gauugcaacaggcugggc

SEQ ID NO: 3754913 - RNA, 21 nt, Human
gauugcaacaggcugggcuuc

SEQ ID NO: 3754914 - RNA, 18 nt, Human
gauugcaauaucugaagc

SEQ ID NO: 3754915 - RNA, 21 nt, Human
gauugcaauaucugaagcccu

SEQ ID NO: 3754916 - RNA, 14 nt, Human
gauugcaauuugca

SEQ ID NO: 3754917 - RNA, 15 nt, Human
gauugcacguggccu

SEQ ID NO: 3754918 - RNA, 19 nt, Human
gauugcagaaaauucugug

SEQ ID NO: 3754919 - RNA, 16 nt, Human
gauugcagaauuguuu

SEQ ID NO: 3754920 - RNA, 23 nt, Human
gauugcaggagucccugccauca

SEQ ID NO: 3754921 - RNA, 19 nt, Human
gauugcagguggaacucag

SEQ ID NO: 3754922 - RNA, 15 nt, Human
gauugccuuuuuaua

SEQ ID NO: 3754923 - RNA, 14 nt, Human
gauugcgagagaug

SEQ ID NO: 3754924 - RNA, 17 nt, Human
gauugcgagagaugugu

SEQ ID NO: 3754925 - RNA, 16 nt, Human
gauugcuaaauguaac

SEQ ID NO: 3754926 - RNA, 20 nt, Human
gauugcuaaauguaacaguc

SEQ ID NO: 3754927 - RNA, 13 nt, Human
gauugcugccacu

SEQ ID NO: 3754928 - RNA, 18 nt, Human
gauugcuguguccaacuc

SEQ ID NO: 3754929 - RNA, 19 nt, Human
gauugcuguguccaacucc

SEQ ID NO: 3754930 - RNA, 22 nt, Human
gauugcuguguccaacuccagu

SEQ ID NO: 3754931 - RNA, 23 nt, Human
gauugcuguguccaacuccagua

SEQ ID NO: 3754932 - RNA, 17 nt, Human
gauugcuuaaaauagca

SEQ ID NO: 3754933 - RNA, 14 nt, Human
gauugcuucuguag

SEQ ID NO: 3754934 - RNA, 16 nt, Human
gauugcuucuguagua

SEQ ID NO: 3754935 - RNA, 23 nt, Human
cugaggggggccgugcccagggg

SEQ ID NO: 3754936 - RNA, 18 nt, Human
cugagggucugggcggcg

SEQ ID NO: 3754937 - RNA, 12 nt, Human
cugagggucugu

SEQ ID NO: 3754938 - RNA, 19 nt, Human
cugaggguggagacuaagc

SEQ ID NO: 3754939 - RNA, 22 nt, Human
cugagguaaccucauuaucagu

SEQ ID NO: 3754940 - RNA, 17 nt, Human
cugaggucagggagugc

SEQ ID NO: 3754941 - RNA, 18 nt, Human
cugagguccugagcacug

SEQ ID NO: 3754942 - RNA, 19 nt, Human
cugaggucucgcugaugcu

SEQ ID NO: 3754943 - RNA, 16 nt, Human
cugaggucuggcugcu

SEQ ID NO: 3754944 - RNA, 19 nt, Human
cugaggugaaagggagcua

SEQ ID NO: 3754945 - RNA, 19 nt, Human
cugaggugccugucccacc

SEQ ID NO: 3754946 - RNA, 12 nt, Human
cugaggugggag

SEQ ID NO: 3754947 - RNA, 22 nt, Human
cugaggugggaggaucucuuga

SEQ ID NO: 3754948 - RNA, 14 nt, Human
cugaggugggcaga

SEQ ID NO: 3754949 - RNA, 23 nt, Human
cugaggugggcccaggaccagcu

SEQ ID NO: 3754950 - RNA, 16 nt, Human
cugaggugugggggcu

SEQ ID NO: 3754951 - RNA, 20 nt, Human
cugaggugugggggcugcag

SEQ ID NO: 3754952 - RNA, 17 nt, Human
cugagguuacuggaaau

SEQ ID NO: 3754953 - RNA, 21 nt, Human
cugagguuacuggaaauuagg

SEQ ID NO: 3754954 - RNA, 17 nt, Human
cugagguuccucugccu

SEQ ID NO: 3754955 - RNA, 20 nt, Human
cugagguugggagaggugca

SEQ ID NO: 3754956 - RNA, 21 nt, Human
cugagguugggagaggugcac

SEQ ID NO: 3754957 - RNA, 21 nt, Human
cugaguaaaaaagcugugugc

SEQ ID NO: 3754958 - RNA, 15 nt, Human
cugaguacuccacac

SEQ ID NO: 3754959 - RNA, 19 nt, Human
cugaguagaaaggccuuua

SEQ ID NO: 3754960 - RNA, 22 nt, Human
cugaguagaugcgcagccccau

SEQ ID NO: 3754961 - RNA, 20 nt, Human
cugaguagcuggauuacagg

SEQ ID NO: 3754962 - RNA, 13 nt, Human
cugaguaugugga

SEQ ID NO: 3754963 - RNA, 23 nt, Human
cugaguauuaaaauguaugcaug

SEQ ID NO: 3754964 - RNA, 14 nt, Human
cugagucaccagga

SEQ ID NO: 3754965 - RNA, 20 nt, Human
cugagucacccaugaagaca

SEQ ID NO: 3754966 - RNA, 22 nt, Human
cugagucacccaugaagacagg

SEQ ID NO: 3754967 - RNA, 23 nt, Human
cugagucacccuaccugugccug

SEQ ID NO: 3754968 - RNA, 19 nt, Human
cugagucagagccaugucu

SEQ ID NO: 3754969 - RNA, 22 nt, Human
cugagucaucuguuagggccuu

SEQ ID NO: 3754970 - RNA, 21 nt, Human
cugagucccaggagcugccca

SEQ ID NO: 3754971 - RNA, 22 nt, Human
cugagucccaggagcugcccag

SEQ ID NO: 3754972 - RNA, 13 nt, Human
cugagucccaucc

SEQ ID NO: 3754973 - RNA, 18 nt, Human
cugagucguacagaaagc

SEQ ID NO: 3754974 - RNA, 16 nt, Human
cugagucucccaaggc

SEQ ID NO: 3754975 - RNA, 14 nt, Human
cugagucuccugug

SEQ ID NO: 3754976 - RNA, 15 nt, Human
cugagucuccugugc

SEQ ID NO: 3754977 - RNA, 16 nt, Human
cugagucuccugugcc

SEQ ID NO: 3754978 - RNA, 13 nt, Human
cugagucugaagg

SEQ ID NO: 3754979 - RNA, 18 nt, Human
cugagucugaaggcuggg

SEQ ID NO: 3754980 - RNA, 14 nt, Human
cugagucugggcag

SEQ ID NO: 3754981 - RNA, 14 nt, Human
cugagugcaggccc

SEQ ID NO: 3754982 - RNA, 15 nt, Human
cugagugcaggccca

SEQ ID NO: 3754983 - RNA, 21 nt, Human
cugagugcaggcccacccugc

SEQ ID NO: 3754984 - RNA, 13 nt, Human
cugagugccuggc

SEQ ID NO: 3754985 - RNA, 18 nt, Human
cugagugccuucuguggg

SEQ ID NO: 3754986 - RNA, 23 nt, Human
cugagugccuucuguggggacuc

SEQ ID NO: 3754987 - RNA, 16 nt, Human
cugagugccuuuuggu

SEQ ID NO: 3754988 - RNA, 17 nt, Human
cugagugcuugcuuuuc

SEQ ID NO: 3754989 - RNA, 18 nt, Human
cugaguggaucuccaagg

SEQ ID NO: 3754990 - RNA, 13 nt, Human
cugaguggcaggg

SEQ ID NO: 3754991 - RNA, 18 nt, Human
cugaguggcaggggacag

SEQ ID NO: 3754992 - RNA, 13 nt, Human
cugaguggcuuca

SEQ ID NO: 3754993 - RNA, 15 nt, Human
cugaguggcuucacu

SEQ ID NO: 3754994 - RNA, 16 nt, Human
cugaguggcuucacuc

SEQ ID NO: 3754995 - RNA, 22 nt, Human
cugaguggcuucacuccugcug

SEQ ID NO: 3754996 - RNA, 17 nt, Human
cugaguguacagagugg

SEQ ID NO: 3754997 - RNA, 17 nt, Human
cugaguuacauugucau

SEQ ID NO: 3754998 - RNA, 17 nt, Human
cugaguucaagggcugu

SEQ ID NO: 3754999 - RNA, 15 nt, Human
cugaguuccuagcca

SEQ ID NO: 3755000 - RNA, 14 nt, Human
cugaguuccugcau

SEQ ID NO: 3755001 - RNA, 22 nt, Human
cugaguugaagucaugcucccc

SEQ ID NO: 3755002 - RNA, 18 nt, Human
cugaguugccaagacaaa

SEQ ID NO: 3755003 - RNA, 16 nt, Human
cugaguugcuuuucag

SEQ ID NO: 3755004 - RNA, 20 nt, Human
cugaguuguugagucuguuu

SEQ ID NO: 3755005 - RNA, 15 nt, Human
cugaguuuaccauuu

SEQ ID NO: 3755006 - RNA, 20 nt, Human
cugaguuuaccauuuguaau

SEQ ID NO: 3755007 - RNA, 23 nt, Human
cugaguuuaccauuuguaauaaa

SEQ ID NO: 3755008 - RNA, 18 nt, Human
cugaguuucauucuccug

SEQ ID NO: 3755009 - RNA, 11 nt, Human
cugaguuuccu

SEQ ID NO: 3755010 - RNA, 12 nt, Human
cugaguuuccua

SEQ ID NO: 3755011 - RNA, 20 nt, Human
cugaguuuccuaugggaaca

SEQ ID NO: 3755012 - RNA, 19 nt, Human
cugaguuuuguguuuguug

SEQ ID NO: 3755013 - RNA, 18 nt, Human
cugauaaagcacagcugu

SEQ ID NO: 3755014 - RNA, 17 nt, Human
cugauaacaaccuggag

SEQ ID NO: 3755015 - RNA, 23 nt, Human
cugauaacuagauggugcugaga

SEQ ID NO: 3755016 - RNA, 17 nt, Human
cugauacauaacuaaau

SEQ ID NO: 3755017 - RNA, 12 nt, Human
cugauaccucaa

SEQ ID NO: 3755018 - RNA, 20 nt, Human
cugauacuuugacaguguuu

SEQ ID NO: 3755019 - RNA, 20 nt, Human
cugauagaggaagccugauu

SEQ ID NO: 3755020 - RNA, 23 nt, Human
cugauagcguuggaauuaaaaca

SEQ ID NO: 3755021 - RNA, 17 nt, Human
cugauagggauacaugc

SEQ ID NO: 3755022 - RNA, 20 nt, Human
cugauaggguuugugacagg

SEQ ID NO: 3755023 - RNA, 23 nt, Human
cugauaggguuugugacagggcg

SEQ ID NO: 3755024 - RNA, 15 nt, Human
cugauaguuacuguu

SEQ ID NO: 3755025 - RNA, 21 nt, Human
cugauaguuacuguugugacc

SEQ ID NO: 3755026 - RNA, 16 nt, Human
cugauauaaauucugu

SEQ ID NO: 3755027 - RNA, 12 nt, Human
cugauauagaau

SEQ ID NO: 3755028 - RNA, 14 nt, Human
cugauauauuuaaa

SEQ ID NO: 3755029 - RNA, 16 nt, Human
cugauauauuuuccag

SEQ ID NO: 3755030 - RNA, 23 nt, Human
cugauaucuggccuaaaaucuug

SEQ ID NO: 3755031 - RNA, 16 nt, Human
cugauaugauuuaaaa

SEQ ID NO: 3755032 - RNA, 23 nt, Human
cugauaugauuuaaaacauguaa

SEQ ID NO: 3755033 - RNA, 16 nt, Human
cugauaugggacugag

SEQ ID NO: 3755034 - RNA, 20 nt, Human
cugauauuaauuuaucagau

SEQ ID NO: 3755035 - RNA, 19 nt, Human
cugauauuccaugaaugua

SEQ ID NO: 3755036 - RNA, 14 nt, Human
cugauauugaagua

SEQ ID NO: 3755037 - RNA, 16 nt, Human
cugauauugaaguaaa

SEQ ID NO: 3755038 - RNA, 17 nt, Human
cugauauuuuaccucuu

SEQ ID NO: 3755039 - RNA, 15 nt, Human
cugauauuuucucua

SEQ ID NO: 3755040 - RNA, 16 nt, Human
cugauauuuucucuag

SEQ ID NO: 3755041 - RNA, 16 nt, Human
cugaucaacaauuugg

SEQ ID NO: 3755042 - RNA, 20 nt, Human
cugaucacuaugcauuuuaa

SEQ ID NO: 3755043 - RNA, 15 nt, Human
cugaucacugaaaua

SEQ ID NO: 3755044 - RNA, 18 nt, Human
cugaucaggaccuccaag

SEQ ID NO: 3755045 - RNA, 12 nt, Human
cugaucaugcau

SEQ ID NO: 3755046 - RNA, 14 nt, Human
cugaucaugcauug

SEQ ID NO: 3755047 - RNA, 20 nt, Human
cugauccaguuuuguuugga

SEQ ID NO: 3755048 - RNA, 17 nt, Human
cugaucccacuccuagg

SEQ ID NO: 3755049 - RNA, 18 nt, Human
cugaucccagagagcccg

SEQ ID NO: 3755050 - RNA, 20 nt, Human
cugaucccauuuuccucuga

SEQ ID NO: 3755051 - RNA, 17 nt, Human
cugaucccugaucccuu

SEQ ID NO: 3755052 - RNA, 18 nt, Human
cugaucccuuccaccugc

SEQ ID NO: 3755053 - RNA, 12 nt, Human
cugauccuggag

SEQ ID NO: 3755054 - RNA, 19 nt, Human
cugauccuggaggcccagu

SEQ ID NO: 3755055 - RNA, 21 nt, Human
cugauccuggaggcccaguuc

SEQ ID NO: 3755056 - RNA, 20 nt, Human
cugauccugugaaguaagga

SEQ ID NO: 3755057 - RNA, 23 nt, Human
cugauccugugaaguaaggaugu

SEQ ID NO: 3755058 - RNA, 20 nt, Human
cugaucgccaaccuuucccc

SEQ ID NO: 3755059 - RNA, 21 nt, Human
cugaucgugacgcugaauaaa

SEQ ID NO: 3755060 - RNA, 15 nt, Human
cugaucguucuuucu

SEQ ID NO: 3755061 - RNA, 15 nt, Human
cugaucucagggaag

SEQ ID NO: 3755062 - RNA, 20 nt, Human
cugaucucagggaagcccag

SEQ ID NO: 3755063 - RNA, 21 nt, Human
cugaucuccauaaacaugaaa

SEQ ID NO: 3755064 - RNA, 13 nt, Human
cugaucuccaugg

SEQ ID NO: 3755065 - RNA, 14 nt, Human
cugaucuccauggc

SEQ ID NO: 3755066 - RNA, 13 nt, Human
cugaucucguuuu

SEQ ID NO: 3755067 - RNA, 18 nt, Human
cugaucucucgugauuga

SEQ ID NO: 3755068 - RNA, 15 nt, Human
cugaucucuuccugu

SEQ ID NO: 3755069 - RNA, 23 nt, Human
cugaucugcccaucgugaagaag

SEQ ID NO: 3755070 - RNA, 20 nt, Human
cugaucugcggaucucagcu

SEQ ID NO: 3755071 - RNA, 15 nt, Human
cugaucuggcugcag

SEQ ID NO: 3755072 - RNA, 21 nt, Human
cugaucugugcuuuccagcuc

SEQ ID NO: 3755073 - RNA, 22 nt, Human
cugaucugugcuuuccagcuca

SEQ ID NO: 3755074 - RNA, 14 nt, Human
cugaucuguuauag

SEQ ID NO: 3755075 - RNA, 22 nt, Human
cugaugaaaaauugcugacugu

SEQ ID NO: 3755076 - RNA, 12 nt, Human
cugaugaaaaca

SEQ ID NO: 3755077 - RNA, 13 nt, Human
cugaugaaaauaa

SEQ ID NO: 3755078 - RNA, 19 nt, Human
cugaugaaaauaaagaaug

SEQ ID NO: 3755079 - RNA, 15 nt, Human
cugaugaaucuugcg

SEQ ID NO: 3755080 - RNA, 14 nt, Human
cugaugacacugag

SEQ ID NO: 3755081 - RNA, 15 nt, Human
cugaugacccaggcu

SEQ ID NO: 3755082 - RNA, 15 nt, Human
cugaugacucaagau

SEQ ID NO: 3755083 - RNA, 22 nt, Human
cugaugacucaagauucccagg

SEQ ID NO: 3755084 - RNA, 22 nt, Human
gcaaauuucaaaagacauguug

SEQ ID NO: 3755085 - RNA, 21 nt, Human
gcaacaaacugcacaugauuu

SEQ ID NO: 3755086 - RNA, 20 nt, Human
gcaacaagguccucugucag

SEQ ID NO: 3755087 - RNA, 13 nt, Human
gcaacaauaaaua

SEQ ID NO: 3755088 - RNA, 22 nt, Human
gcaacaauacaugcugcuaauu

SEQ ID NO: 3755089 - RNA, 13 nt, Human
gcaacacacagac

SEQ ID NO: 3755090 - RNA, 23 nt, Human
gcaacacagccugggccccagcu

SEQ ID NO: 3755091 - RNA, 16 nt, Human
gcaacacgcaugguca

SEQ ID NO: 3755092 - RNA, 18 nt, Human
gcaacacuggucugcugu

SEQ ID NO: 3755093 - RNA, 18 nt, Human
gcaacacuuuuuauguua

SEQ ID NO: 3755094 - RNA, 19 nt, Human
gcaacagagugagacccug

SEQ ID NO: 3755095 - RNA, 16 nt, Human
gcaacagaucaguaaa

SEQ ID NO: 3755096 - RNA, 14 nt, Human
gcaacagaucugga

SEQ ID NO: 3755097 - RNA, 20 nt, Human
gcaacagaucuggaaccuca

SEQ ID NO: 3755098 - RNA, 17 nt, Human
gcaacagcauaacaagg

SEQ ID NO: 3755099 - RNA, 18 nt, Human
gcaacaggaaucaagagc

SEQ ID NO: 3755100 - RNA, 17 nt, Human
gcaacaguagcauagga

SEQ ID NO: 3755101 - RNA, 17 nt, Human
gcaacaguuugacauuu

SEQ ID NO: 3755102 - RNA, 17 nt, Human
gcaacauccaaaauagu

SEQ ID NO: 3755103 - RNA, 22 nt, Human
gcaacauuguucaccuuuguag

SEQ ID NO: 3755104 - RNA, 15 nt, Human
gcaaccaaaaagaaa

SEQ ID NO: 3755105 - RNA, 13 nt, Human
gcaaccacacacc

SEQ ID NO: 3755106 - RNA, 11 nt, Human
gcaaccaggaa

SEQ ID NO: 3755107 - RNA, 17 nt, Human
gcaaccaggaacagcaa

SEQ ID NO: 3755108 - RNA, 14 nt, Human
gcaaccaguuggcu

SEQ ID NO: 3755109 - RNA, 20 nt, Human
gcaacccaaggacugaggga

SEQ ID NO: 3755110 - RNA, 14 nt, Human
gcaacccacgugua

SEQ ID NO: 3755111 - RNA, 19 nt, Human
gcaaccccaguucugcucc

SEQ ID NO: 3755112 - RNA, 14 nt, Human
gcaacccccagccu

SEQ ID NO: 3755113 - RNA, 14 nt, Human
gcaaccccuggacc

SEQ ID NO: 3755114 - RNA, 18 nt, Human
gcaacccgugccaagucc

SEQ ID NO: 3755115 - RNA, 23 nt, Human
gcaacccuccuaucaccuccccu

SEQ ID NO: 3755116 - RNA, 21 nt, Human
gcaacccuuaccccuuagccu

SEQ ID NO: 3755117 - RNA, 20 nt, Human
gcaaccguggcccuuccugg

SEQ ID NO: 3755118 - RNA, 21 nt, Human
gcaaccguggcccuuccugga

SEQ ID NO: 3755119 - RNA, 22 nt, Human
gcaaccguggcccuuccuggac

SEQ ID NO: 3755120 - RNA, 14 nt, Human
gcaaccuacccagc

SEQ ID NO: 3755121 - RNA, 18 nt, Human
gcaaccuacccagcgugg

SEQ ID NO: 3755122 - RNA, 13 nt, Human
gcaaccuccaccu

SEQ ID NO: 3755123 - RNA, 17 nt, Human
gcaaccuccaccuccug

SEQ ID NO: 3755124 - RNA, 22 nt, Human
gcaaccuuucaccuuuguguau

SEQ ID NO: 3755125 - RNA, 23 nt, Human
gcaaccuuucaccuuuguguauu

SEQ ID NO: 3755126 - RNA, 14 nt, Human
gcaacgaagaaaaa

SEQ ID NO: 3755127 - RNA, 20 nt, Human
gcaacgaccagggccgagga

SEQ ID NO: 3755128 - RNA, 22 nt, Human
gcaacgaccagggccgaggagg

SEQ ID NO: 3755129 - RNA, 21 nt, Human
gcaacgaucacaaaugacuuu

SEQ ID NO: 3755130 - RNA, 19 nt, Human
gcaacuaucagacuaagcc

SEQ ID NO: 3755131 - RNA, 22 nt, Human
gcaacuaucagacuaagccagc

SEQ ID NO: 3755132 - RNA, 16 nt, Human
gcaacugaacaaaaaa

SEQ ID NO: 3755133 - RNA, 12 nt, Human
gcaacugaauaa

SEQ ID NO: 3755134 - RNA, 14 nt, Human
gcaacugaggcaga

SEQ ID NO: 3755135 - RNA, 15 nt, Human
gcaacugaggcagac

SEQ ID NO: 3755136 - RNA, 18 nt, Human
gcaacugagucugcggga

SEQ ID NO: 3755137 - RNA, 19 nt, Human
gcaacugucuauuucugcu

SEQ ID NO: 3755138 - RNA, 20 nt, Human
gcaacugucuauuucugcug

SEQ ID NO: 3755139 - RNA, 12 nt, Human
gcaacuguuaug

SEQ ID NO: 3755140 - RNA, 21 nt, Human
gcaacuguuaugaaauaaaga

SEQ ID NO: 3755141 - RNA, 16 nt, Human
gcaacuucaguccugg

SEQ ID NO: 3755142 - RNA, 20 nt, Human
gcaacuucuucuccaucccu

SEQ ID NO: 3755143 - RNA, 19 nt, Human
gcaacuugaaauuauaucu

SEQ ID NO: 3755144 - RNA, 23 nt, Human
gcaacuugucuuuuucuggacug

SEQ ID NO: 3755145 - RNA, 22 nt, Human
gcaacuuuguauaaaagggacu

SEQ ID NO: 3755146 - RNA, 21 nt, Human
gcaagaacucaucacuguggc

SEQ ID NO: 3755147 - RNA, 14 nt, Human
gcaagaaggaggcu

SEQ ID NO: 3755148 - RNA, 16 nt, Human
gcaagaaggcaaaaau

SEQ ID NO: 3755149 - RNA, 13 nt, Human
gcaagaaguagca

SEQ ID NO: 3755150 - RNA, 17 nt, Human
gcaagaauaaaaaagaa

SEQ ID NO: 3755151 - RNA, 21 nt, Human
gcaagaaucagagaaggaaca

SEQ ID NO: 3755152 - RNA, 15 nt, Human
gcaagaauuugaucg

SEQ ID NO: 3755153 - RNA, 15 nt, Human
gcaagaccaguugaa

SEQ ID NO: 3755154 - RNA, 21 nt, Human
gcaagacgcugugcugcccug

SEQ ID NO: 3755155 - RNA, 22 nt, Human
gcaagacgcugugcugcccugc

SEQ ID NO: 3755156 - RNA, 19 nt, Human
gcaagagaauugcuugaac

SEQ ID NO: 3755157 - RNA, 20 nt, Human
gcaagagacucuggccucca

SEQ ID NO: 3755158 - RNA, 14 nt, Human
gcaagagagaaccu

SEQ ID NO: 3755159 - RNA, 23 nt, Human
gcaagaggccguggcugcugugg

SEQ ID NO: 3755160 - RNA, 13 nt, Human
gcaagaggggugg

SEQ ID NO: 3755161 - RNA, 17 nt, Human
gcaagagggguggagac

SEQ ID NO: 3755162 - RNA, 15 nt, Human
gcaagauaaacauua

SEQ ID NO: 3755163 - RNA, 16 nt, Human
gcaagauauuuauaua

SEQ ID NO: 3755164 - RNA, 22 nt, Human
gcaagauuuuccacaagauucc

SEQ ID NO: 3755165 - RNA, 14 nt, Human
gcaagcaagaggcc

SEQ ID NO: 3755166 - RNA, 23 nt, Human
gcaagcaagaggccguggcugcu

SEQ ID NO: 3755167 - RNA, 17 nt, Human
gcaagcaagcucucuug

SEQ ID NO: 3755168 - RNA, 18 nt, Human
gcaagcaccuccugccuc

SEQ ID NO: 3755169 - RNA, 21 nt, Human
gcaagcagaggaccagggccu

SEQ ID NO: 3755170 - RNA, 15 nt, Human
gcaagcaguuucaau

SEQ ID NO: 3755171 - RNA, 16 nt, Human
gcaagcaugcuuguga

SEQ ID NO: 3755172 - RNA, 18 nt, Human
gcaagcauucagaagaaa

SEQ ID NO: 3755173 - RNA, 20 nt, Human
gcaagcauuuauguuuauuu

SEQ ID NO: 3755174 - RNA, 13 nt, Human
gcaagccaggcuc

SEQ ID NO: 3755175 - RNA, 21 nt, Human
gcaagccaggcucacucacag

SEQ ID NO: 3755176 - RNA, 20 nt, Human
gcaagcccuacagagcugug

SEQ ID NO: 3755177 - RNA, 21 nt, Human
gcaagcccuacagagcugugg

SEQ ID NO: 3755178 - RNA, 19 nt, Human
gcaagccuaagggauccug

SEQ ID NO: 3755179 - RNA, 15 nt, Human
gcaagcuaaccuuau

SEQ ID NO: 3755180 - RNA, 23 nt, Human
gcaagcuaaccuuauccugcauu

SEQ ID NO: 3755181 - RNA, 15 nt, Human
gcaagcuccgcagga

SEQ ID NO: 3755182 - RNA, 11 nt, Human
gcaaggaaaaa

SEQ ID NO: 3755183 - RNA, 14 nt, Human
gcaaggaaaaagaa

SEQ ID NO: 3755184 - RNA, 17 nt, Human
gcaaggaaaaagaaaau

SEQ ID NO: 3755185 - RNA, 18 nt, Human
gcaaggaaaaagaaaaua

SEQ ID NO: 3755186 - RNA, 10 nt, Human
gcaaggaaag

SEQ ID NO: 3755187 - RNA, 22 nt, Human
gcaaggacuacguuaagggaag

SEQ ID NO: 3755188 - RNA, 14 nt, Human
gcaaggacuuugua

SEQ ID NO: 3755189 - RNA, 16 nt, Human
gcaaggacuuuguaca

SEQ ID NO: 3755190 - RNA, 19 nt, Human
gcaaggacuuuguacauuu

SEQ ID NO: 3755191 - RNA, 15 nt, Human
gcaaggaggcuggcu

SEQ ID NO: 3755192 - RNA, 20 nt, Human
gcaaggaggcuggcuggggc

SEQ ID NO: 3755193 - RNA, 22 nt, Human
gcaaggcaaauguuuauuuaaa

SEQ ID NO: 3755194 - RNA, 21 nt, Human
gcaaggcaggugccuccaggu

SEQ ID NO: 3755195 - RNA, 22 nt, Human
gcaaggcaggugccuccaggug

SEQ ID NO: 3755196 - RNA, 13 nt, Human
gcaaggcccacag

SEQ ID NO: 3755197 - RNA, 16 nt, Human
gcaaggcccacaggag

SEQ ID NO: 3755198 - RNA, 14 nt, Human
gcaaggcccgagca

SEQ ID NO: 3755199 - RNA, 16 nt, Human
gcaaggcccgagcagc

SEQ ID NO: 3755200 - RNA, 17 nt, Human
gcaaggcccgagcagcu

SEQ ID NO: 3755201 - RNA, 21 nt, Human
gcaaggcccgagcagcugagc

SEQ ID NO: 3755202 - RNA, 19 nt, Human
gcaaggcccugcugcccaa

SEQ ID NO: 3755203 - RNA, 20 nt, Human
gcaaggccgcuguucaccca

SEQ ID NO: 3755204 - RNA, 20 nt, Human
gcaaggccugguguuucuug

SEQ ID NO: 3755205 - RNA, 16 nt, Human
gcaaggcgcuaacuug

SEQ ID NO: 3755206 - RNA, 20 nt, Human
gcaaggcgcuaacuugcuua

SEQ ID NO: 3755207 - RNA, 23 nt, Human
gcaaggcgguggacuugaacuuu

SEQ ID NO: 3755208 - RNA, 11 nt, Human
gcaaggcuguc

SEQ ID NO: 3755209 - RNA, 13 nt, Human
gcaaggcugucaa

SEQ ID NO: 3755210 - RNA, 14 nt, Human
gcaaggcugucaau

SEQ ID NO: 3755211 - RNA, 18 nt, Human
gcaaggcugucaauuaca

SEQ ID NO: 3755212 - RNA, 18 nt, Human
gcaaggcugugcucccug

SEQ ID NO: 3755213 - RNA, 21 nt, Human
gcaagggcggccuuucccacu

SEQ ID NO: 3755214 - RNA, 14 nt, Human
gcaaggggcucugc

SEQ ID NO: 3755215 - RNA, 14 nt, Human
gcaaggggugccug

SEQ ID NO: 3755216 - RNA, 16 nt, Human
gcaaggggugccuggg

SEQ ID NO: 3755217 - RNA, 15 nt, Human
gcaagguacucuggu

SEQ ID NO: 3755218 - RNA, 17 nt, Human
gcaagguacucugguga

SEQ ID NO: 3755219 - RNA, 18 nt, Human
gcaaggucuugcucuccu

SEQ ID NO: 3755220 - RNA, 21 nt, Human
gcaaggugcucacaccccauu

SEQ ID NO: 3755221 - RNA, 13 nt, Human
gcaagguggagug

SEQ ID NO: 3755222 - RNA, 23 nt, Human
gcaagguggaguggaugccucag

SEQ ID NO: 3755223 - RNA, 14 nt, Human
gcaagguuuaaguu

SEQ ID NO: 3755224 - RNA, 21 nt, Human
gcaagguuuaggcugguggcc

SEQ ID NO: 3755225 - RNA, 15 nt, Human
gcaagucagaggaug

SEQ ID NO: 3755226 - RNA, 21 nt, Human
gcaagucagaggauggccagu

SEQ ID NO: 3755227 - RNA, 23 nt, Human
gcaagucagaggauggccagugu

SEQ ID NO: 3755228 - RNA, 16 nt, Human
gcaaguccugcaacca

SEQ ID NO: 3755229 - RNA, 12 nt, Human
gcaagucugcag

SEQ ID NO: 3755230 - RNA, 13 nt, Human
gcaagucugcagg

SEQ ID NO: 3755231 - RNA, 18 nt, Human
gcaagugaagguuuacaa

SEQ ID NO: 3755232 - RNA, 15 nt, Human
gcaagugagagcugg

SEQ ID NO: 3755233 - RNA, 13 nt, Human
gauugcuuuuaaa

SEQ ID NO: 3755234 - RNA, 16 nt, Human
gauugcuuuuaaaauu

SEQ ID NO: 3755235 - RNA, 21 nt, Human
gauuggaaggagacacagaug

SEQ ID NO: 3755236 - RNA, 22 nt, Human
gauuggaaggagacacagaugu

SEQ ID NO: 3755237 - RNA, 14 nt, Human
gauuggacaaaaug

SEQ ID NO: 3755238 - RNA, 16 nt, Human
gauuggacggccugau

SEQ ID NO: 3755239 - RNA, 14 nt, Human
gauuggauuauuca

SEQ ID NO: 3755240 - RNA, 22 nt, Human
gauuggauuauuuaauaacauu

SEQ ID NO: 3755241 - RNA, 19 nt, Human
gauuggauuuuauguugac

SEQ ID NO: 3755242 - RNA, 22 nt, Human
gauuggauuuuauguugacauu

SEQ ID NO: 3755243 - RNA, 11 nt, Human
gauuggccugu

SEQ ID NO: 3755244 - RNA, 20 nt, Human
gauuggccuguagaguugcu

SEQ ID NO: 3755245 - RNA, 17 nt, Human
gauuggcucacacugag

SEQ ID NO: 3755246 - RNA, 20 nt, Human
gauuggcucacacugagaau

SEQ ID NO: 3755247 - RNA, 18 nt, Human
gauuggcuuguguguuuc

SEQ ID NO: 3755248 - RNA, 15 nt, Human
gauugggccccugcc

SEQ ID NO: 3755249 - RNA, 22 nt, Human
gauuggggaagagagccugcag

SEQ ID NO: 3755250 - RNA, 14 nt, Human
gauugggggcuggu

SEQ ID NO: 3755251 - RNA, 17 nt, Human
gauugggggcuggugcc

SEQ ID NO: 3755252 - RNA, 12 nt, Human
gauugggucuag

SEQ ID NO: 3755253 - RNA, 20 nt, Human
gauugggugggcaggaaaag

SEQ ID NO: 3755254 - RNA, 15 nt, Human
gauugguuucucuuc

SEQ ID NO: 3755255 - RNA, 16 nt, Human
gauugguuucucuucu

SEQ ID NO: 3755256 - RNA, 12 nt, Human
gauuguaaaaua

SEQ ID NO: 3755257 - RNA, 23 nt, Human
gauuguaaaauagcuuguauagu

SEQ ID NO: 3755258 - RNA, 13 nt, Human
gauuguaaacuuc

SEQ ID NO: 3755259 - RNA, 19 nt, Human
gauuguaacguugcugugg

SEQ ID NO: 3755260 - RNA, 11 nt, Human
gauuguaacuc

SEQ ID NO: 3755261 - RNA, 21 nt, Human
gauuguacagaaucauugcuu

SEQ ID NO: 3755262 - RNA, 20 nt, Human
gauuguaggugcaagaugga

SEQ ID NO: 3755263 - RNA, 10 nt, Human
gauuguauug

SEQ ID NO: 3755264 - RNA, 15 nt, Human
gauuguauugcuguc

SEQ ID NO: 3755265 - RNA, 21 nt, Human
gauugucaaugcuggagaaaa

SEQ ID NO: 3755266 - RNA, 16 nt, Human
gauuguccuuuugcaa

SEQ ID NO: 3755267 - RNA, 18 nt, Human
gauuguccuuuugcaaag

SEQ ID NO: 3755268 - RNA, 19 nt, Human
gauugugucccauuccccc

SEQ ID NO: 3755269 - RNA, 16 nt, Human
gauuguuauuaaaugu

SEQ ID NO: 3755270 - RNA, 17 nt, Human
gauuguuugcucugaga

SEQ ID NO: 3755271 - RNA, 18 nt, Human
gauuuaaaagccugcuca

SEQ ID NO: 3755272 - RNA, 16 nt, Human
gauuuaaacaaacaaa

SEQ ID NO: 3755273 - RNA, 20 nt, Human
gauuuaaacacauuaaaggu

SEQ ID NO: 3755274 - RNA, 12 nt, Human
gauuuaaaucag

SEQ ID NO: 3755275 - RNA, 12 nt, Human
gauuuaaaugcc

SEQ ID NO: 3755276 - RNA, 14 nt, Human
gauuuaaauuuaag

SEQ ID NO: 3755277 - RNA, 14 nt, Human
gauuuaacagaaau

SEQ ID NO: 3755278 - RNA, 15 nt, Human
gauuuaacagaaaug

SEQ ID NO: 3755279 - RNA, 18 nt, Human
gauuuaacagaaauguac

SEQ ID NO: 3755280 - RNA, 19 nt, Human
gauuuaacagaaauguaca

SEQ ID NO: 3755281 - RNA, 23 nt, Human
gauuuaacagaaauguacagcaa

SEQ ID NO: 3755282 - RNA, 18 nt, Human
gauuuaacauuaucuagu

SEQ ID NO: 3755283 - RNA, 20 nt, Human
gauuuaagggcccaggucag

SEQ ID NO: 3755284 - RNA, 13 nt, Human
gauuuaagguauu

SEQ ID NO: 3755285 - RNA, 17 nt, Human
gauuuaaguuacaaugu

SEQ ID NO: 3755286 - RNA, 15 nt, Human
gauuuaauaguguua

SEQ ID NO: 3755287 - RNA, 21 nt, Human
gauuuaauaguguuaaucaau

SEQ ID NO: 3755288 - RNA, 14 nt, Human
gauuuaauauggau

SEQ ID NO: 3755289 - RNA, 13 nt, Human
gauuuaauucucu

SEQ ID NO: 3755290 - RNA, 16 nt, Human
gauuuaauuugaaaua

SEQ ID NO: 3755291 - RNA, 19 nt, Human
gauuuaauuugauaucaca

SEQ ID NO: 3755292 - RNA, 23 nt, Human
gauuuaauuugauaucacagucu

SEQ ID NO: 3755293 - RNA, 15 nt, Human
gauuuaauuugccaa

SEQ ID NO: 3755294 - RNA, 23 nt, Human
gauuuaauuugccaaaauaaugu

SEQ ID NO: 3755295 - RNA, 16 nt, Human
gauuuacacugggaga

SEQ ID NO: 3755296 - RNA, 22 nt, Human
gauuuacaguuucaaaaacugu

SEQ ID NO: 3755297 - RNA, 21 nt, Human
gauuuacccagaaugucagau

SEQ ID NO: 3755298 - RNA, 12 nt, Human
gauuuagaaaaa

SEQ ID NO: 3755299 - RNA, 20 nt, Human
gauuuagaaaaaaguuuaca

SEQ ID NO: 3755300 - RNA, 21 nt, Human
gauuuagaaaaaaguuuacaa

SEQ ID NO: 3755301 - RNA, 21 nt, Human
gauuuaguguuuuuaccucug

SEQ ID NO: 3755302 - RNA, 15 nt, Human
gauuuaguuucagua

SEQ ID NO: 3755303 - RNA, 15 nt, Human
gauuuauacucauuu

SEQ ID NO: 3755304 - RNA, 15 nt, Human
gauuuaucaaaucag

SEQ ID NO: 3755305 - RNA, 15 nt, Human
gauuuaucacacaaa

SEQ ID NO: 3755306 - RNA, 12 nt, Human
gauuuauuaaag

SEQ ID NO: 3755307 - RNA, 19 nt, Human
gauuuauuaaagaaaaaaa

SEQ ID NO: 3755308 - RNA, 12 nt, Human
gauuuauuuaaa

SEQ ID NO: 3755309 - RNA, 18 nt, Human
gauuuauuuaaaauagca

SEQ ID NO: 3755310 - RNA, 22 nt, Human
gauuuauuucaucauauuauac

SEQ ID NO: 3755311 - RNA, 13 nt, Human
gauuuauuugcuu

SEQ ID NO: 3755312 - RNA, 22 nt, Human
gauuucaagaaaaaauaaaugg

SEQ ID NO: 3755313 - RNA, 15 nt, Human
gauuucaagauccuc

SEQ ID NO: 3755314 - RNA, 14 nt, Human
gauuucacaaauau

SEQ ID NO: 3755315 - RNA, 12 nt, Human
gauuucacucuc

SEQ ID NO: 3755316 - RNA, 16 nt, Human
gauuucacucuccuug

SEQ ID NO: 3755317 - RNA, 17 nt, Human
gauuucagcucacugca

SEQ ID NO: 3755318 - RNA, 17 nt, Human
gauuucauaguucagaa

SEQ ID NO: 3755319 - RNA, 18 nt, Human
gauuucauaguucagaau

SEQ ID NO: 3755320 - RNA, 20 nt, Human
gauuucaucugcucuccuuc

SEQ ID NO: 3755321 - RNA, 21 nt, Human
gauuucaucugcucuccuucc

SEQ ID NO: 3755322 - RNA, 22 nt, Human
gauuucaucugcucuccuuccu

SEQ ID NO: 3755323 - RNA, 18 nt, Human
gauuucaugcuaucucug

SEQ ID NO: 3755324 - RNA, 18 nt, Human
gauuuccaaguaauauaa

SEQ ID NO: 3755325 - RNA, 22 nt, Human
gauuucccauccccugugggaa

SEQ ID NO: 3755326 - RNA, 21 nt, Human
gauuuccccccuccgccucca

SEQ ID NO: 3755327 - RNA, 21 nt, Human
gauuuccucuugaaccagaac

SEQ ID NO: 3755328 - RNA, 12 nt, Human
gauuuccuucuu

SEQ ID NO: 3755329 - RNA, 22 nt, Human
gauuuccuugaauguggcuuga

SEQ ID NO: 3755330 - RNA, 23 nt, Human
gauuucuagaaagccuguucccc

SEQ ID NO: 3755331 - RNA, 20 nt, Human
gauuucuaguuauuuauucu

SEQ ID NO: 3755332 - RNA, 13 nt, Human
gauuucucuuuga

SEQ ID NO: 3755333 - RNA, 11 nt, Human
gauuucugauu

SEQ ID NO: 3755334 - RNA, 16 nt, Human
gauuucugccuuccuu

SEQ ID NO: 3755335 - RNA, 17 nt, Human
gauuucugccuuccuug

SEQ ID NO: 3755336 - RNA, 16 nt, Human
gauuucugguucugau

SEQ ID NO: 3755337 - RNA, 18 nt, Human
gauuucugguucugaugc

SEQ ID NO: 3755338 - RNA, 21 nt, Human
gauuucuguuuagauaauaca

SEQ ID NO: 3755339 - RNA, 11 nt, Human
gauuucuuucc

SEQ ID NO: 3755340 - RNA, 15 nt, Human
gauuucuuuccagag

SEQ ID NO: 3755341 - RNA, 17 nt, Human
gauuucuuuccagaggg

SEQ ID NO: 3755342 - RNA, 17 nt, Human
gauuucuuugcuguaag

SEQ ID NO: 3755343 - RNA, 22 nt, Human
gauuucuuuuguaauaaacuau

SEQ ID NO: 3755344 - RNA, 16 nt, Human
gauuugaacucagauc

SEQ ID NO: 3755345 - RNA, 20 nt, Human
gauuugaagaacaugugaga

SEQ ID NO: 3755346 - RNA, 16 nt, Human
gauuugaagcaaagca

SEQ ID NO: 3755347 - RNA, 13 nt, Human
gauuugacauugc

SEQ ID NO: 3755348 - RNA, 17 nt, Human
gauuugaccuccucccu

SEQ ID NO: 3755349 - RNA, 18 nt, Human
gauuugacuguuuuuacc

SEQ ID NO: 3755350 - RNA, 21 nt, Human
gauuugaugcuggagagguua

SEQ ID NO: 3755351 - RNA, 11 nt, Human
gauuugcaaua

SEQ ID NO: 3755352 - RNA, 19 nt, Human
gauuugcauauucauucau

SEQ ID NO: 3755353 - RNA, 17 nt, Human
gauuugccauagaguac

SEQ ID NO: 3755354 - RNA, 15 nt, Human
gauuugccugugcca

SEQ ID NO: 3755355 - RNA, 21 nt, Human
gauuugcugggcaguuuuucu

SEQ ID NO: 3755356 - RNA, 12 nt, Human
gauuuggaaaaa

SEQ ID NO: 3755357 - RNA, 15 nt, Human
gauuugggaaccaag

SEQ ID NO: 3755358 - RNA, 23 nt, Human
gauuugggcuggaacagauucac

SEQ ID NO: 3755359 - RNA, 20 nt, Human
gauuuggggcucagaguggg

SEQ ID NO: 3755360 - RNA, 19 nt, Human
gauuuguaacccacugaga

SEQ ID NO: 3755361 - RNA, 21 nt, Human
gauuuguacuacaguucuuuu

SEQ ID NO: 3755362 - RNA, 23 nt, Human
gauuuguaggaaggucucauucu

SEQ ID NO: 3755363 - RNA, 17 nt, Human
gauuugucacugcuuca

SEQ ID NO: 3755364 - RNA, 14 nt, Human
gauuugucccaggu

SEQ ID NO: 3755365 - RNA, 21 nt, Human
gauuuguccuuggggacaucu

SEQ ID NO: 3755366 - RNA, 11 nt, Human
gauuugugaac

SEQ ID NO: 3755367 - RNA, 20 nt, Human
gauuugugaacucagccaag

SEQ ID NO: 3755368 - RNA, 19 nt, Human
gauuuguuaaugauagcua

SEQ ID NO: 3755369 - RNA, 22 nt, Human
gauuuguugccaugugcaccuu

SEQ ID NO: 3755370 - RNA, 17 nt, Human
gauuuguuuuagaauga

SEQ ID NO: 3755371 - RNA, 22 nt, Human
gauuuguuuuuaaacuguacag

SEQ ID NO: 3755372 - RNA, 12 nt, Human
gauuuuaaaaug

SEQ ID NO: 3755373 - RNA, 22 nt, Human
gauuuuaaagagugaaaaauga

SEQ ID NO: 3755374 - RNA, 12 nt, Human
gauuuuaaaugu

SEQ ID NO: 3755375 - RNA, 21 nt, Human
gauuuuaaauucacaauagaa

SEQ ID NO: 3755376 - RNA, 14 nt, Human
gauuuuaacaauaa

SEQ ID NO: 3755377 - RNA, 17 nt, Human
gauuuuaacaauaacua

SEQ ID NO: 3755378 - RNA, 15 nt, Human
gauuuuaacuuaacu

SEQ ID NO: 3755379 - RNA, 20 nt, Human
gauuuuaacuuaacugaaau

SEQ ID NO: 3755380 - RNA, 22 nt, Human
gauuuuaauagggaauauaucu

SEQ ID NO: 3755381 - RNA, 17 nt, Human
gauuuuaaucaaguuga

SEQ ID NO: 3755382 - RNA, 18 nt, Human
gauuuuaaucaaguugaa

SEQ ID NO: 3755383 - RNA, 16 nt, Human
cugaugagaauuuaua

SEQ ID NO: 3755384 - RNA, 11 nt, Human
cugaugagcaa

SEQ ID NO: 3755385 - RNA, 17 nt, Human
cugaugaugugccuggg

SEQ ID NO: 3755386 - RNA, 21 nt, Human
cugaugauuuagagugcuguc

SEQ ID NO: 3755387 - RNA, 20 nt, Human
cugaugauuucuugaaaagg

SEQ ID NO: 3755388 - RNA, 23 nt, Human
cugaugcagucacguggaggagc

SEQ ID NO: 3755389 - RNA, 14 nt, Human
cugaugcaucagaa

SEQ ID NO: 3755390 - RNA, 22 nt, Human
cugaugcaucagaaagggaggg

SEQ ID NO: 3755391 - RNA, 14 nt, Human
cugaugcucccucc

SEQ ID NO: 3755392 - RNA, 15 nt, Human
cugaugcucccuccc

SEQ ID NO: 3755393 - RNA, 23 nt, Human
cugaugcugagauucuucaggcu

SEQ ID NO: 3755394 - RNA, 14 nt, Human
cugaugcugccccu

SEQ ID NO: 3755395 - RNA, 19 nt, Human
cugaugcugggcugggugc

SEQ ID NO: 3755396 - RNA, 18 nt, Human
cugaugcuucuucagaga

SEQ ID NO: 3755397 - RNA, 18 nt, Human
cugauggaaacaaagugg

SEQ ID NO: 3755398 - RNA, 18 nt, Human
cugauggaauuuuuuugu

SEQ ID NO: 3755399 - RNA, 17 nt, Human
cugauggagaaggaagg

SEQ ID NO: 3755400 - RNA, 22 nt, Human
cugauggcacuuagcuaucaga

SEQ ID NO: 3755401 - RNA, 16 nt, Human
cugauggcaggauggc

SEQ ID NO: 3755402 - RNA, 19 nt, Human
cugauggccuuaauuuccu

SEQ ID NO: 3755403 - RNA, 20 nt, Human
cugauggccuuaauuuccuu

SEQ ID NO: 3755404 - RNA, 21 nt, Human
cugauggccuuaauuuccuuu

SEQ ID NO: 3755405 - RNA, 12 nt, Human
cugauggcuucu

SEQ ID NO: 3755406 - RNA, 22 nt, Human
cugaugggaaaacugccaauau

SEQ ID NO: 3755407 - RNA, 18 nt, Human
cugaugggcaacccccag

SEQ ID NO: 3755408 - RNA, 23 nt, Human
cugaugggcguacgcuggugcug

SEQ ID NO: 3755409 - RNA, 21 nt, Human
cugaugggguggaaggcaugg

SEQ ID NO: 3755410 - RNA, 16 nt, Human
cugaugguacaggaaa

SEQ ID NO: 3755411 - RNA, 14 nt, Human
cugauggucagcuc

SEQ ID NO: 3755412 - RNA, 15 nt, Human
cugauggucagcucc

SEQ ID NO: 3755413 - RNA, 14 nt, Human
cugauggugcaaug

SEQ ID NO: 3755414 - RNA, 19 nt, Human
cugauggugcaaugaccuu

SEQ ID NO: 3755415 - RNA, 21 nt, Human
cugaugguguggccuguggcu

SEQ ID NO: 3755416 - RNA, 16 nt, Human
cugauguaaaugaagu

SEQ ID NO: 3755417 - RNA, 18 nt, Human
cugauguacaguugggaa

SEQ ID NO: 3755418 - RNA, 15 nt, Human
cugauguccucacca

SEQ ID NO: 3755419 - RNA, 15 nt, Human
cugaugucuccuaag

SEQ ID NO: 3755420 - RNA, 20 nt, Human
cugauguguccucagggagc

SEQ ID NO: 3755421 - RNA, 17 nt, Human
cugauguuaggcugggc

SEQ ID NO: 3755422 - RNA, 13 nt, Human
cugauguucagug

SEQ ID NO: 3755423 - RNA, 15 nt, Human
cugauguucagugua

SEQ ID NO: 3755424 - RNA, 17 nt, Human
cugauguucaguguaau

SEQ ID NO: 3755425 - RNA, 20 nt, Human
cugauguuccuagugaaaga

SEQ ID NO: 3755426 - RNA, 21 nt, Human
cugauguuccuagugaaagag

SEQ ID NO: 3755427 - RNA, 15 nt, Human
cugauguuggaagag

SEQ ID NO: 3755428 - RNA, 12 nt, Human
cugauguugugu

SEQ ID NO: 3755429 - RNA, 21 nt, Human
cugauuaaaaugcuuccuccc

SEQ ID NO: 3755430 - RNA, 12 nt, Human
cugauuagcuuu

SEQ ID NO: 3755431 - RNA, 15 nt, Human
cugauuagcuuugug

SEQ ID NO: 3755432 - RNA, 22 nt, Human
cugauuaguaagucuugccuau

SEQ ID NO: 3755433 - RNA, 23 nt, Human
cugauuaugucuuuuauauuugu

SEQ ID NO: 3755434 - RNA, 13 nt, Human
cugauucacugca

SEQ ID NO: 3755435 - RNA, 17 nt, Human
cugauucgaaugacacu

SEQ ID NO: 3755436 - RNA, 15 nt, Human
cugauucucaggguc

SEQ ID NO: 3755437 - RNA, 21 nt, Human
cugauucucagggucucugcu

SEQ ID NO: 3755438 - RNA, 14 nt, Human
cugauucugggaug

SEQ ID NO: 3755439 - RNA, 22 nt, Human
cugauucuuguugcuguacaaa

SEQ ID NO: 3755440 - RNA, 16 nt, Human
cugauugaccugcucc

SEQ ID NO: 3755441 - RNA, 23 nt, Human
cugauuguaacguugcuguggga

SEQ ID NO: 3755442 - RNA, 13 nt, Human
cugauuguauuua

SEQ ID NO: 3755443 - RNA, 21 nt, Human
cugauugugucucuugguccu

SEQ ID NO: 3755444 - RNA, 17 nt, Human
cugauuguuucauugcg

SEQ ID NO: 3755445 - RNA, 12 nt, Human
cugauuuacagu

SEQ ID NO: 3755446 - RNA, 16 nt, Human
cugauuuaggagaagc

SEQ ID NO: 3755447 - RNA, 20 nt, Human
cugauuuaggagaagccagg

SEQ ID NO: 3755448 - RNA, 22 nt, Human
cugauuuaggagaagccaggaa

SEQ ID NO: 3755449 - RNA, 13 nt, Human
cugauuuccccuu

SEQ ID NO: 3755450 - RNA, 18 nt, Human
cugauuuccccuuuugca

SEQ ID NO: 3755451 - RNA, 14 nt, Human
cugauuuccuuugg

SEQ ID NO: 3755452 - RNA, 21 nt, Human
cugauuucuagaacccgugac

SEQ ID NO: 3755453 - RNA, 14 nt, Human
cugauuucuccugc

SEQ ID NO: 3755454 - RNA, 13 nt, Human
cugauuucuucag

SEQ ID NO: 3755455 - RNA, 13 nt, Human
cugauuucuuuuc

SEQ ID NO: 3755456 - RNA, 21 nt, Human
cugauuugacauagucuggcu

SEQ ID NO: 3755457 - RNA, 23 nt, Human
cugauuugacauagucuggcugu

SEQ ID NO: 3755458 - RNA, 11 nt, Human
cugauuugcaa

SEQ ID NO: 3755459 - RNA, 16 nt, Human
cugauuugcugcucuu

SEQ ID NO: 3755460 - RNA, 21 nt, Human
cugauuugcugggcaguuuuu

SEQ ID NO: 3755461 - RNA, 23 nt, Human
cugauuugguacuuuugagugug

SEQ ID NO: 3755462 - RNA, 12 nt, Human
cugauuuuaaca

SEQ ID NO: 3755463 - RNA, 22 nt, Human
cugauuuuaauggauuguuaau

SEQ ID NO: 3755464 - RNA, 23 nt, Human
cugauuuuaauggauuguuaauu

SEQ ID NO: 3755465 - RNA, 10 nt, Human
cugauuuuau

SEQ ID NO: 3755466 - RNA, 15 nt, Human
cugauuuuauucuug

SEQ ID NO: 3755467 - RNA, 16 nt, Human
cugauuuuauucuuga

SEQ ID NO: 3755468 - RNA, 21 nt, Human
cugauuuucaaagcuuuuucc

SEQ ID NO: 3755469 - RNA, 15 nt, Human
cugauuuuuuuuccu

SEQ ID NO: 3755470 - RNA, 23 nt, Human
cugauuuuuuuuuccuucagugc

SEQ ID NO: 3755471 - RNA, 14 nt, Human
cugcaaaaagaaaa

SEQ ID NO: 3755472 - RNA, 15 nt, Human
cugcaaaaauauuua

SEQ ID NO: 3755473 - RNA, 20 nt, Human
cugcaaaaauauuuauaaaa

SEQ ID NO: 3755474 - RNA, 21 nt, Human
cugcaaaaauauuuauaaaac

SEQ ID NO: 3755475 - RNA, 18 nt, Human
cugcaaaaggacucucag

SEQ ID NO: 3755476 - RNA, 12 nt, Human
cugcaaaauaga

SEQ ID NO: 3755477 - RNA, 13 nt, Human
cugcaaaaucugu

SEQ ID NO: 3755478 - RNA, 14 nt, Human
cugcaaaaugagac

SEQ ID NO: 3755479 - RNA, 22 nt, Human
cugcaaacaccaacauguuggg

SEQ ID NO: 3755480 - RNA, 21 nt, Human
cugcaaacagaacagggucau

SEQ ID NO: 3755481 - RNA, 13 nt, Human
cugcaaacgcugc

SEQ ID NO: 3755482 - RNA, 17 nt, Human
cugcaaacgcugccugc

SEQ ID NO: 3755483 - RNA, 18 nt, Human
cugcaaacgcugccugcc

SEQ ID NO: 3755484 - RNA, 19 nt, Human
cugcaaacgcugccugccc

SEQ ID NO: 3755485 - RNA, 15 nt, Human
cugcaaacugccuuc

SEQ ID NO: 3755486 - RNA, 15 nt, Human
cugcaaacugggaac

SEQ ID NO: 3755487 - RNA, 23 nt, Human
cugcaaacugggaaccccuuucc

SEQ ID NO: 3755488 - RNA, 17 nt, Human
cugcaaagcccagcuug

SEQ ID NO: 3755489 - RNA, 18 nt, Human
cugcaaagcccagcuuga

SEQ ID NO: 3755490 - RNA, 14 nt, Human
cugcaaaggacaga

SEQ ID NO: 3755491 - RNA, 22 nt, Human
cugcaaaggacuguuuuuuccu

SEQ ID NO: 3755492 - RNA, 13 nt, Human
cugcaaagguaau

SEQ ID NO: 3755493 - RNA, 23 nt, Human
cugcaaaguguuuuguaccagug

SEQ ID NO: 3755494 - RNA, 21 nt, Human
cugcaaaucagccaugugcug

SEQ ID NO: 3755495 - RNA, 20 nt, Human
cugcaaaucugauggccuua

SEQ ID NO: 3755496 - RNA, 12 nt, Human
cugcaacaaaau

SEQ ID NO: 3755497 - RNA, 12 nt, Human
cugcaacaggcu

SEQ ID NO: 3755498 - RNA, 21 nt, Human
cugcaaccaaacucccaucag

SEQ ID NO: 3755499 - RNA, 16 nt, Human
cugcaaccuccaccuc

SEQ ID NO: 3755500 - RNA, 20 nt, Human
cugcaaccuccgccucuugg

SEQ ID NO: 3755501 - RNA, 19 nt, Human
cugcaaccugauugugucu

SEQ ID NO: 3755502 - RNA, 21 nt, Human
cugcaaccugauugugucucu

SEQ ID NO: 3755503 - RNA, 22 nt, Human
cugcaaccugauugugucucuu

SEQ ID NO: 3755504 - RNA, 15 nt, Human
cugcaacucaaggac

SEQ ID NO: 3755505 - RNA, 14 nt, Human
cugcaacuucugcc

SEQ ID NO: 3755506 - RNA, 19 nt, Human
cugcaacuuguaaaugugg

SEQ ID NO: 3755507 - RNA, 17 nt, Human
cugcaacuuuaagcagc

SEQ ID NO: 3755508 - RNA, 18 nt, Human
cugcaagaauugaagcag

SEQ ID NO: 3755509 - RNA, 19 nt, Human
cugcaagagccuugguguc

SEQ ID NO: 3755510 - RNA, 16 nt, Human
cugcaagaggcuccug

SEQ ID NO: 3755511 - RNA, 20 nt, Human
cugcaagauucugaaacauu

SEQ ID NO: 3755512 - RNA, 21 nt, Human
cugcaagcuccgccucccggg

SEQ ID NO: 3755513 - RNA, 16 nt, Human
cugcaaggcccacagg

SEQ ID NO: 3755514 - RNA, 17 nt, Human
cugcaaggcccacagga

SEQ ID NO: 3755515 - RNA, 17 nt, Human
cugcaaggccuuucugu

SEQ ID NO: 3755516 - RNA, 12 nt, Human
cugcaagggagu

SEQ ID NO: 3755517 - RNA, 22 nt, Human
cugcaagggcuccccacugccu

SEQ ID NO: 3755518 - RNA, 23 nt, Human
cugcaagguuuaggcugguggcc

SEQ ID NO: 3755519 - RNA, 15 nt, Human
cugcaagucagagga

SEQ ID NO: 3755520 - RNA, 15 nt, Human
cugcaaguccuuuug

SEQ ID NO: 3755521 - RNA, 19 nt, Human
cugcaagugagguguguca

SEQ ID NO: 3755522 - RNA, 14 nt, Human
cugcaauagagacu

SEQ ID NO: 3755523 - RNA, 15 nt, Human
cugcaauagagacug

SEQ ID NO: 3755524 - RNA, 23 nt, Human
cugcaauccugucuuucugagca

SEQ ID NO: 3755525 - RNA, 13 nt, Human
cugcaaugaaagg

SEQ ID NO: 3755526 - RNA, 18 nt, Human
cugcaaugugaucuaugu

SEQ ID NO: 3755527 - RNA, 23 nt, Human
cugcaauuaaagugauacugaaa

SEQ ID NO: 3755528 - RNA, 22 nt, Human
cugcaauucaaaaguuccaaga

SEQ ID NO: 3755529 - RNA, 18 nt, Human
cugcaauuucauaugcug

SEQ ID NO: 3755530 - RNA, 20 nt, Human
cugcaauuucauaugcugua

SEQ ID NO: 3755531 - RNA, 21 nt, Human
cugcacaaagcccuuccaugu

SEQ ID NO: 3755532 - RNA, 16 nt, Human
gcaagugagagcuggg

SEQ ID NO: 3755533 - RNA, 19 nt, Human
gcaagugagagcugggugu

SEQ ID NO: 3755534 - RNA, 15 nt, Human
gcaagugcuggaguc

SEQ ID NO: 3755535 - RNA, 21 nt, Human
gcaagugcuggagucuccuga

SEQ ID NO: 3755536 - RNA, 15 nt, Human
gcaagugucugugug

SEQ ID NO: 3755537 - RNA, 22 nt, Human
gcaagugugggggguccuucuc

SEQ ID NO: 3755538 - RNA, 23 nt, Human
gcaagugugugcacaugugugcg

SEQ ID NO: 3755539 - RNA, 21 nt, Human
gcaagugugugcaugugugcg

SEQ ID NO: 3755540 - RNA, 22 nt, Human
gcaagugugugcaugugugcga

SEQ ID NO: 3755541 - RNA, 14 nt, Human
gcaaguuaagagaa

SEQ ID NO: 3755542 - RNA, 19 nt, Human
gcaaguuaagagaaacuuu

SEQ ID NO: 3755543 - RNA, 13 nt, Human
gcaaguucccagu

SEQ ID NO: 3755544 - RNA, 15 nt, Human
gcaaguucccaguug

SEQ ID NO: 3755545 - RNA, 17 nt, Human
gcaaguucuagagaaga

SEQ ID NO: 3755546 - RNA, 20 nt, Human
gcaaguucuagagaagaggc

SEQ ID NO: 3755547 - RNA, 18 nt, Human
gcaaguuuccaucaucua

SEQ ID NO: 3755548 - RNA, 19 nt, Human
gcaauaaaauuauuugcag

SEQ ID NO: 3755549 - RNA, 12 nt, Human
gcaauaaaauuu

SEQ ID NO: 3755550 - RNA, 19 nt, Human
gcaauaaaauuuaaaaaau

SEQ ID NO: 3755551 - RNA, 21 nt, Human
gcaauaaaauuuaaaaaauaa

SEQ ID NO: 3755552 - RNA, 21 nt, Human
gcaauaaagcagcguuucuau

SEQ ID NO: 3755553 - RNA, 18 nt, Human
gcaauaaaucugacccag

SEQ ID NO: 3755554 - RNA, 14 nt, Human
gcaauaaauuuuga

SEQ ID NO: 3755555 - RNA, 14 nt, Human
gcaauaacuucuga

SEQ ID NO: 3755556 - RNA, 14 nt, Human
gcaauaagaacaaa

SEQ ID NO: 3755557 - RNA, 21 nt, Human
gcaauaagaauuuagggagaa

SEQ ID NO: 3755558 - RNA, 23 nt, Human
gcaauaccguguugguuuugacu

SEQ ID NO: 3755559 - RNA, 13 nt, Human
gcaauagaaacaa

SEQ ID NO: 3755560 - RNA, 14 nt, Human
gcaauagagacugu

SEQ ID NO: 3755561 - RNA, 13 nt, Human
gcaauaguguguu

SEQ ID NO: 3755562 - RNA, 17 nt, Human
gcaauauaucuaaauug

SEQ ID NO: 3755563 - RNA, 19 nt, Human
gcaauauauuuuguaugca

SEQ ID NO: 3755564 - RNA, 20 nt, Human
gcaauaucuucguuaguaau

SEQ ID NO: 3755565 - RNA, 21 nt, Human
gcaauauucucuguacauauu

SEQ ID NO: 3755566 - RNA, 21 nt, Human
gcaauauuuauggaugcaaca

SEQ ID NO: 3755567 - RNA, 20 nt, Human
gcaaucagauuuuccugugg

SEQ ID NO: 3755568 - RNA, 21 nt, Human
gcaauccauguuaguuuuuac

SEQ ID NO: 3755569 - RNA, 23 nt, Human
gcaauccucccacuucagccucc

SEQ ID NO: 3755570 - RNA, 17 nt, Human
gcaauccucucaccuca

SEQ ID NO: 3755571 - RNA, 13 nt, Human
gcaauccuuacaa

SEQ ID NO: 3755572 - RNA, 14 nt, Human
gcaauccuuacaaa

SEQ ID NO: 3755573 - RNA, 23 nt, Human
gcaaucuggggauacuggcaaag

SEQ ID NO: 3755574 - RNA, 12 nt, Human
gcaaucuuugaa

SEQ ID NO: 3755575 - RNA, 17 nt, Human
gcaaucuuugaaagacu

SEQ ID NO: 3755576 - RNA, 18 nt, Human
gcaaucuuugaaagacuu

SEQ ID NO: 3755577 - RNA, 14 nt, Human
gcaaugaacacuua

SEQ ID NO: 3755578 - RNA, 13 nt, Human
gcaaugaaggaaa

SEQ ID NO: 3755579 - RNA, 19 nt, Human
gcaaugaagucucugaagu

SEQ ID NO: 3755580 - RNA, 19 nt, Human
gcaaugacagguaaauuaa

SEQ ID NO: 3755581 - RNA, 16 nt, Human
gcaaugacaucucagg

SEQ ID NO: 3755582 - RNA, 21 nt, Human
gcaaugacaucucaggggcca

SEQ ID NO: 3755583 - RNA, 15 nt, Human
gcaaugaccuuucaa

SEQ ID NO: 3755584 - RNA, 17 nt, Human
gcaaugaugaaugagaa

SEQ ID NO: 3755585 - RNA, 16 nt, Human
gcaaugauuacucuuu

SEQ ID NO: 3755586 - RNA, 11 nt, Human
gcaaugcauuu

SEQ ID NO: 3755587 - RNA, 13 nt, Human
gcaaugccacagc

SEQ ID NO: 3755588 - RNA, 20 nt, Human
gcaaugcugaugaaucacug

SEQ ID NO: 3755589 - RNA, 23 nt, Human
gcaaugcuggcuguuggcugggg

SEQ ID NO: 3755590 - RNA, 19 nt, Human
gcaaugggagcugaggcca

SEQ ID NO: 3755591 - RNA, 20 nt, Human
gcaaugggagcugaggccac

SEQ ID NO: 3755592 - RNA, 17 nt, Human
gcaaugguaguuucugu

SEQ ID NO: 3755593 - RNA, 17 nt, Human
gcaauguaagcauacuu

SEQ ID NO: 3755594 - RNA, 22 nt, Human
gcaauguagaggggaaaagaga

SEQ ID NO: 3755595 - RNA, 15 nt, Human
gcaaugugggcagag

SEQ ID NO: 3755596 - RNA, 17 nt, Human
gcaauguguauaaacaa

SEQ ID NO: 3755597 - RNA, 20 nt, Human
gcaauguguauaaacaagaa

SEQ ID NO: 3755598 - RNA, 23 nt, Human
gcaauguguauaaacaagaaaaa

SEQ ID NO: 3755599 - RNA, 19 nt, Human
gcaauguguguauauggac

SEQ ID NO: 3755600 - RNA, 15 nt, Human
gcaauguuuauuuca

SEQ ID NO: 3755601 - RNA, 14 nt, Human
gcaauguuuugcuu

SEQ ID NO: 3755602 - RNA, 17 nt, Human
gcaauguuuugcuuuug

SEQ ID NO: 3755603 - RNA, 21 nt, Human
gcaauuaaacuuccaaagaaa

SEQ ID NO: 3755604 - RNA, 16 nt, Human
gcaauuaauuccuuca

SEQ ID NO: 3755605 - RNA, 19 nt, Human
gcaauuagguuuuuccuua

SEQ ID NO: 3755606 - RNA, 14 nt, Human
gcaauuccccucug

SEQ ID NO: 3755607 - RNA, 16 nt, Human
gcaauuccugcuccua

SEQ ID NO: 3755608 - RNA, 20 nt, Human
gcaauucuccugccucagcc

SEQ ID NO: 3755609 - RNA, 15 nt, Human
gcaauugauuucuuu

SEQ ID NO: 3755610 - RNA, 23 nt, Human
gcaauuggcaccgaagcccagag

SEQ ID NO: 3755611 - RNA, 12 nt, Human
gcaauugucuga

SEQ ID NO: 3755612 - RNA, 13 nt, Human
gcaauuucaaggu

SEQ ID NO: 3755613 - RNA, 14 nt, Human
gcaauuucauaugc

SEQ ID NO: 3755614 - RNA, 18 nt, Human
gcaauuuccuuuuuuguu

SEQ ID NO: 3755615 - RNA, 20 nt, Human
gcaauuuguuugugcuucua

SEQ ID NO: 3755616 - RNA, 17 nt, Human
gcaauuuuccuugaagc

SEQ ID NO: 3755617 - RNA, 18 nt, Human
gcaauuuugcauuugaau

SEQ ID NO: 3755618 - RNA, 14 nt, Human
gcaauuuuguaacg

SEQ ID NO: 3755619 - RNA, 14 nt, Human
gcaauuuugugguu

SEQ ID NO: 3755620 - RNA, 23 nt, Human
gcaauuuuuccaugaaguuugaa

SEQ ID NO: 3755621 - RNA, 23 nt, Human
gcacaaaaagauaccuuaaaauu

SEQ ID NO: 3755622 - RNA, 23 nt, Human
gcacaaaaugaaugaggucuggg

SEQ ID NO: 3755623 - RNA, 22 nt, Human
gcacaaaauucgaccugauuua

SEQ ID NO: 3755624 - RNA, 13 nt, Human
gcacaaacauuuu

SEQ ID NO: 3755625 - RNA, 18 nt, Human
gcacaaacucaccaucug

SEQ ID NO: 3755626 - RNA, 17 nt, Human
gcacaaagacccuggcu

SEQ ID NO: 3755627 - RNA, 13 nt, Human
gcacaaauauuua

SEQ ID NO: 3755628 - RNA, 18 nt, Human
gcacaacccccagcuccc

SEQ ID NO: 3755629 - RNA, 24 nt, Human
gcacaagaagcgugagacgccacc

SEQ ID NO: 3755630 - RNA, 16 nt, Human
gcacaagaauggauca

SEQ ID NO: 3755631 - RNA, 15 nt, Human
gcacaagcuccaagc

SEQ ID NO: 3755632 - RNA, 18 nt, Human
gcacaagcuccaagcucc

SEQ ID NO: 3755633 - RNA, 22 nt, Human
gcacaagcuccaagcucccagg

SEQ ID NO: 3755634 - RNA, 19 nt, Human
gcacaaguguaaugaauac

SEQ ID NO: 3755635 - RNA, 17 nt, Human
gcacaauaaaaauguuu

SEQ ID NO: 3755636 - RNA, 18 nt, Human
gcacaauaacuccuccca

SEQ ID NO: 3755637 - RNA, 21 nt, Human
gcacaauaacuccucccaggg

SEQ ID NO: 3755638 - RNA, 12 nt, Human
gcacaaugucuu

SEQ ID NO: 3755639 - RNA, 14 nt, Human
gcacaaugucuugg

SEQ ID NO: 3755640 - RNA, 12 nt, Human
gcacaauuauaa

SEQ ID NO: 3755641 - RNA, 12 nt, Human
gcacacacacaa

SEQ ID NO: 3755642 - RNA, 14 nt, Human
gcacacacacacac

SEQ ID NO: 3755643 - RNA, 16 nt, Human
gcacacacacacacag

SEQ ID NO: 3755644 - RNA, 20 nt, Human
gcacacacacacacaggagg

SEQ ID NO: 3755645 - RNA, 22 nt, Human
gcacacacacacacaugcacac

SEQ ID NO: 3755646 - RNA, 15 nt, Human
gcacacaccagagcc

SEQ ID NO: 3755647 - RNA, 17 nt, Human
gcacacaccagagccca

SEQ ID NO: 3755648 - RNA, 13 nt, Human
gcacacaccugua

SEQ ID NO: 3755649 - RNA, 17 nt, Human
gcacacacugugcuuuc

SEQ ID NO: 3755650 - RNA, 23 nt, Human
gcacacagcuuuuaguacccacc

SEQ ID NO: 3755651 - RNA, 16 nt, Human
gcacaccaaucuuacu

SEQ ID NO: 3755652 - RNA, 15 nt, Human
gcacacccagguuug

SEQ ID NO: 3755653 - RNA, 14 nt, Human
gcacaccgggcacu

SEQ ID NO: 3755654 - RNA, 17 nt, Human
gcacacgccucccacug

SEQ ID NO: 3755655 - RNA, 16 nt, Human
gcacacgcguuauagu

SEQ ID NO: 3755656 - RNA, 14 nt, Human
gcacacgcugcucu

SEQ ID NO: 3755657 - RNA, 18 nt, Human
gcacacgcugcucugccc

SEQ ID NO: 3755658 - RNA, 23 nt, Human
gcacacggggugcgucuccccgg

SEQ ID NO: 3755659 - RNA, 21 nt, Human
gcacacuccccugcacuggag

SEQ ID NO: 3755660 - RNA, 16 nt, Human
gcacacucuggucuug

SEQ ID NO: 3755661 - RNA, 20 nt, Human
gcacacuuggcccaaguggc

SEQ ID NO: 3755662 - RNA, 16 nt, Human
gcacagaaaacuagaa

SEQ ID NO: 3755663 - RNA, 23 nt, Human
gcacagaaaauggaagacagcuc

SEQ ID NO: 3755664 - RNA, 12 nt, Human
gcacagaaggag

SEQ ID NO: 3755665 - RNA, 15 nt, Human
gcacagaaguccugu

SEQ ID NO: 3755666 - RNA, 17 nt, Human
gcacagaaguccuguau

SEQ ID NO: 3755667 - RNA, 11 nt, Human
gcacagacagg

SEQ ID NO: 3755668 - RNA, 16 nt, Human
gcacagagaagacaaa

SEQ ID NO: 3755669 - RNA, 18 nt, Human
gcacagagcucuccagcu

SEQ ID NO: 3755670 - RNA, 23 nt, Human
gcacagagcucuccagcuccaag

SEQ ID NO: 3755671 - RNA, 12 nt, Human
gcacagaggccu

SEQ ID NO: 3755672 - RNA, 21 nt, Human
gcacagaguuguuacauuuuu

SEQ ID NO: 3755673 - RNA, 19 nt, Human
gcacagauggauuugccug

SEQ ID NO: 3755674 - RNA, 14 nt, Human
gcacagauggccag

SEQ ID NO: 3755675 - RNA, 13 nt, Human
gcacagauuuuaa

SEQ ID NO: 3755676 - RNA, 19 nt, Human
gcacagcaaggaggcuggc

SEQ ID NO: 3755677 - RNA, 22 nt, Human
gcacagcaaggaggcuggcugg

SEQ ID NO: 3755678 - RNA, 13 nt, Human
gcacagcagcauc

SEQ ID NO: 3755679 - RNA, 14 nt, Human
gcacagcagccugc

SEQ ID NO: 3755680 - RNA, 20 nt, Human
gcacagcagccugcuuccca

SEQ ID NO: 3755681 - RNA, 15 nt, Human
gcacagcagccuggg

SEQ ID NO: 3755682 - RNA, 15 nt, Human
gauuuuaauugucau

SEQ ID NO: 3755683 - RNA, 12 nt, Human
gauuuuacauga

SEQ ID NO: 3755684 - RNA, 24 nt, Human
gauuuuagcuaggauuugaacacu

SEQ ID NO: 3755685 - RNA, 19 nt, Human
gauuuuaugaucaguguug

SEQ ID NO: 3755686 - RNA, 22 nt, Human
gauuuuauuacuggcguggauu

SEQ ID NO: 3755687 - RNA, 20 nt, Human
gauuuuauuauguaaauccc

SEQ ID NO: 3755688 - RNA, 13 nt, Human
gauuuuauucuug

SEQ ID NO: 3755689 - RNA, 15 nt, Human
gauuuuauucuugau

SEQ ID NO: 3755690 - RNA, 17 nt, Human
gauuuucaaaagauaau

SEQ ID NO: 3755691 - RNA, 19 nt, Human
gauuuucaaagcuuuuucc

SEQ ID NO: 3755692 - RNA, 14 nt, Human
gauuuucauaacuu

SEQ ID NO: 3755693 - RNA, 15 nt, Human
gauuuucauguucuu

SEQ ID NO: 3755694 - RNA, 22 nt, Human
gauuuuccaggacuguuucaaa

SEQ ID NO: 3755695 - RNA, 16 nt, Human
gauuuuccaucuaaaa

SEQ ID NO: 3755696 - RNA, 13 nt, Human
gauuuuccugugg

SEQ ID NO: 3755697 - RNA, 13 nt, Human
gauuuucuccagc

SEQ ID NO: 3755698 - RNA, 16 nt, Human
gauuuucuccagcuca

SEQ ID NO: 3755699 - RNA, 20 nt, Human
gauuuucugcuacuuugcug

SEQ ID NO: 3755700 - RNA, 21 nt, Human
gauuuucugggccuaaaggau

SEQ ID NO: 3755701 - RNA, 16 nt, Human
gauuuucugguucuaa

SEQ ID NO: 3755702 - RNA, 21 nt, Human
gauuuugaaaacuacauuuua

SEQ ID NO: 3755703 - RNA, 21 nt, Human
gauuuugaaauuuuuauuaaa

SEQ ID NO: 3755704 - RNA, 12 nt, Human
gauuuugauaac

SEQ ID NO: 3755705 - RNA, 13 nt, Human
gauuuugauaacu

SEQ ID NO: 3755706 - RNA, 15 nt, Human
gauuuugcuguauau

SEQ ID NO: 3755707 - RNA, 22 nt, Human
gauuuugggagugacucaagaa

SEQ ID NO: 3755708 - RNA, 13 nt, Human
gauuuuguaaccc

SEQ ID NO: 3755709 - RNA, 16 nt, Human
gauuuuguaacccaga

SEQ ID NO: 3755710 - RNA, 13 nt, Human
gauuuuguguuua

SEQ ID NO: 3755711 - RNA, 15 nt, Human
gauuuuguuuugcuu

SEQ ID NO: 3755712 - RNA, 22 nt, Human
gauuuuguuuugcuuuuucuga

SEQ ID NO: 3755713 - RNA, 17 nt, Human
gauuuuuaaaaaauauu

SEQ ID NO: 3755714 - RNA, 21 nt, Human
gauuuuuaaaaaauauuuucu

SEQ ID NO: 3755715 - RNA, 22 nt, Human
gauuuuuaauuaaaaacuagua

SEQ ID NO: 3755716 - RNA, 20 nt, Human
gauuuuuauauuaguugcuu

SEQ ID NO: 3755717 - RNA, 20 nt, Human
gauuuuuauccaaucuuguu

SEQ ID NO: 3755718 - RNA, 23 nt, Human
gauuuuucuggagguugauaacu

SEQ ID NO: 3755719 - RNA, 13 nt, Human
gauuuuucuuuaa

SEQ ID NO: 3755720 - RNA, 13 nt, Human
gauuuuugccucu

SEQ ID NO: 3755721 - RNA, 17 nt, Human
gauuuuuuaaaagaaau

SEQ ID NO: 3755722 - RNA, 20 nt, Human
gauuuuuuacagcugccugc

SEQ ID NO: 3755723 - RNA, 13 nt, Human
aaccacuucccuc

SEQ ID NO: 3755724 - RNA, 17 nt, Human
aaccacuuguagauuug

SEQ ID NO: 3755725 - RNA, 21 nt, Human
gcacugagagagcgcagccgc

SEQ ID NO: 3755726 - RNA, 13 nt, Human
gcacugagcagag

SEQ ID NO: 3755727 - RNA, 11 nt, Human
gcacugaggaa

SEQ ID NO: 3755728 - RNA, 13 nt, Human
gcacugaggaaga

SEQ ID NO: 3755729 - RNA, 17 nt, Human
gcacugaggaccagcca

SEQ ID NO: 3755730 - RNA, 15 nt, Human
gcacugagggccaca

SEQ ID NO: 3755731 - RNA, 22 nt, Human
gcacugauauauuuaaaaacaa

SEQ ID NO: 3755732 - RNA, 14 nt, Human
gcacugauauuuua

SEQ ID NO: 3755733 - RNA, 20 nt, Human
gcacugauuucacaacagau

SEQ ID NO: 3755734 - RNA, 14 nt, Human
gcacugccaugcag

SEQ ID NO: 3755735 - RNA, 17 nt, Human
gcacugccaugcagggc

SEQ ID NO: 3755736 - RNA, 19 nt, Human
gcacugcccugguggcccu

SEQ ID NO: 3755737 - RNA, 14 nt, Human
gcacugccucucac

SEQ ID NO: 3755738 - RNA, 19 nt, Human
gcacugccucucacagcug

SEQ ID NO: 3755739 - RNA, 11 nt, Human
gcacugccuga

SEQ ID NO: 3755740 - RNA, 21 nt, Human
gcacugcuaggcgagugccag

SEQ ID NO: 3755741 - RNA, 12 nt, Human
gcacugcugccc

SEQ ID NO: 3755742 - RNA, 14 nt, Human
gcacugcugcccag

SEQ ID NO: 3755743 - RNA, 20 nt, Human
gcacugcugcccagccucca

SEQ ID NO: 3755744 - RNA, 15 nt, Human
gcacugcuggguggc

SEQ ID NO: 3755745 - RNA, 11 nt, Human
gcacugcugug

SEQ ID NO: 3755746 - RNA, 16 nt, Human
gcacugcuuccaguga

SEQ ID NO: 3755747 - RNA, 23 nt, Human
gcacugcuuccagugaggcucug

SEQ ID NO: 3755748 - RNA, 16 nt, Human
gcacugcuugaggaaa

SEQ ID NO: 3755749 - RNA, 14 nt, Human
gcacuggaguccag

SEQ ID NO: 3755750 - RNA, 18 nt, Human
gcacuggaguccagucuc

SEQ ID NO: 3755751 - RNA, 16 nt, Human
gcacuggagugcaggg

SEQ ID NO: 3755752 - RNA, 16 nt, Human
gcacuggauguggccc

SEQ ID NO: 3755753 - RNA, 19 nt, Human
gcacuggcaaacagggccu

SEQ ID NO: 3755754 - RNA, 22 nt, Human
gcacuggcaaacagggccucug

SEQ ID NO: 3755755 - RNA, 12 nt, Human
gcacuggcccag

SEQ ID NO: 3755756 - RNA, 15 nt, Human
gcacuggccccaccc

SEQ ID NO: 3755757 - RNA, 15 nt, Human
gcacuggccugcacg

SEQ ID NO: 3755758 - RNA, 16 nt, Human
gcacuggccuucugau

SEQ ID NO: 3755759 - RNA, 17 nt, Human
gcacuggccuucugaug

SEQ ID NO: 3755760 - RNA, 17 nt, Human
gcacuggcucucuccag

SEQ ID NO: 3755761 - RNA, 18 nt, Human
gcacuggcucucuccagg

SEQ ID NO: 3755762 - RNA, 18 nt, Human
gcacugggcucccgggcc

SEQ ID NO: 3755763 - RNA, 15 nt, Human
gcacugggcuccgga

SEQ ID NO: 3755764 - RNA, 12 nt, Human
gcacugggcugu

SEQ ID NO: 3755765 - RNA, 14 nt, Human
gcacugggcuuggg

SEQ ID NO: 3755766 - RNA, 19 nt, Human
gcacuggggagcccgucuc

SEQ ID NO: 3755767 - RNA, 18 nt, Human
gcacuggggcaggggccg

SEQ ID NO: 3755768 - RNA, 16 nt, Human
gcacugggggcagcgg

SEQ ID NO: 3755769 - RNA, 21 nt, Human
gcacuggguugcaggggauug

SEQ ID NO: 3755770 - RNA, 22 nt, Human
gcacugguagguugggacacca

SEQ ID NO: 3755771 - RNA, 14 nt, Human
gcacugguggcccg

SEQ ID NO: 3755772 - RNA, 19 nt, Human
gcacugguggcccgacagc

SEQ ID NO: 3755773 - RNA, 23 nt, Human
gcacugguggcccgacagccugg

SEQ ID NO: 3755774 - RNA, 19 nt, Human
gcacugguuuguucccugu

SEQ ID NO: 3755775 - RNA, 12 nt, Human
gcacuguaaaau

SEQ ID NO: 3755776 - RNA, 14 nt, Human
gcacuguaaaaugu

SEQ ID NO: 3755777 - RNA, 16 nt, Human
gcacuguaguucuaag

SEQ ID NO: 3755778 - RNA, 16 nt, Human
gcacuguaugcuggac

SEQ ID NO: 3755779 - RNA, 18 nt, Human
gcacugucacuuugcucu

SEQ ID NO: 3755780 - RNA, 12 nt, Human
gcacuguccugc

SEQ ID NO: 3755781 - RNA, 18 nt, Human
gcacugugaaggacccuu

SEQ ID NO: 3755782 - RNA, 13 nt, Human
gcacugugcucag

SEQ ID NO: 3755783 - RNA, 16 nt, Human
gcacugugcucagggc

SEQ ID NO: 3755784 - RNA, 19 nt, Human
gcacuguucccccugugca

SEQ ID NO: 3755785 - RNA, 20 nt, Human
gcacuguucccccugugcag

SEQ ID NO: 3755786 - RNA, 19 nt, Human
gcacuguuuuauuuuaauu

SEQ ID NO: 3755787 - RNA, 20 nt, Human
gcacuguuuucuaguguauc

SEQ ID NO: 3755788 - RNA, 21 nt, Human
gcacuguuuucuaguguauca

SEQ ID NO: 3755789 - RNA, 14 nt, Human
gcacuuaaagaagu

SEQ ID NO: 3755790 - RNA, 18 nt, Human
gcacuuaagagaauauuu

SEQ ID NO: 3755791 - RNA, 17 nt, Human
gcacuuagcuaucagaa

SEQ ID NO: 3755792 - RNA, 17 nt, Human
gcacuuauugaauauau

SEQ ID NO: 3755793 - RNA, 19 nt, Human
gcacuuauugaccauuuuu

SEQ ID NO: 3755794 - RNA, 14 nt, Human
gcacuuauuguaaa

SEQ ID NO: 3755795 - RNA, 18 nt, Human
gcacuucaaauucaaaua

SEQ ID NO: 3755796 - RNA, 14 nt, Human
gcacuucacagagu

SEQ ID NO: 3755797 - RNA, 23 nt, Human
gcacuucaucuggcugccuuugc

SEQ ID NO: 3755798 - RNA, 23 nt, Human
gcacuucauugagaguuuugucu

SEQ ID NO: 3755799 - RNA, 11 nt, Human
gcacuuccaaa

SEQ ID NO: 3755800 - RNA, 18 nt, Human
gcacuuccaaaauucuua

SEQ ID NO: 3755801 - RNA, 13 nt, Human
gcacuucccugcu

SEQ ID NO: 3755802 - RNA, 22 nt, Human
gcacuuccuguuuuauaaugaa

SEQ ID NO: 3755803 - RNA, 16 nt, Human
gcacuugcagacucua

SEQ ID NO: 3755804 - RNA, 16 nt, Human
gcacuuggagaggcug

SEQ ID NO: 3755805 - RNA, 14 nt, Human
gcacuuggccucug

SEQ ID NO: 3755806 - RNA, 17 nt, Human
gcacuuggggcaccuug

SEQ ID NO: 3755807 - RNA, 18 nt, Human
gcacuugggggcucagca

SEQ ID NO: 3755808 - RNA, 23 nt, Human
gcacuugggggcucagcaaggcc

SEQ ID NO: 3755809 - RNA, 16 nt, Human
gcacuuguccagcuga

SEQ ID NO: 3755810 - RNA, 17 nt, Human
gcacuugugauuauuua

SEQ ID NO: 3755811 - RNA, 20 nt, Human
gcacuuuagaauaugccuug

SEQ ID NO: 3755812 - RNA, 18 nt, Human
gcacuuucuucuucccau

SEQ ID NO: 3755813 - RNA, 22 nt, Human
gcacuuugaaauaccucauguu

SEQ ID NO: 3755814 - RNA, 23 nt, Human
gcacuuugaaauaccucauguuu

SEQ ID NO: 3755815 - RNA, 15 nt, Human
gcacuuugaugucau

SEQ ID NO: 3755816 - RNA, 19 nt, Human
gcacuuugcuuuaauauaa

SEQ ID NO: 3755817 - RNA, 20 nt, Human
gcacuuugcuuuaauauaaa

SEQ ID NO: 3755818 - RNA, 21 nt, Human
gcacuuuggcuuauaauucuu

SEQ ID NO: 3755819 - RNA, 20 nt, Human
gcacuuugggaggccgaggc

SEQ ID NO: 3755820 - RNA, 17 nt, Human
gcacuuuguaguguuug

SEQ ID NO: 3755821 - RNA, 22 nt, Human
gcagaaaaaccaacaucuacaa

SEQ ID NO: 3755822 - RNA, 18 nt, Human
gcagaaaaaugucauuga

SEQ ID NO: 3755823 - RNA, 17 nt, Human
gcagaaaacccuugggc

SEQ ID NO: 3755824 - RNA, 10 nt, Human
gcagaaacag

SEQ ID NO: 3755825 - RNA, 17 nt, Human
gcagaaacgaagccauc

SEQ ID NO: 3755826 - RNA, 18 nt, Human
gcagaaagcagaggcugg

SEQ ID NO: 3755827 - RNA, 21 nt, Human
gcagaaaggaaaaccugaaga

SEQ ID NO: 3755828 - RNA, 14 nt, Human
gcagaaagugccuu

SEQ ID NO: 3755829 - RNA, 16 nt, Human
gcagaaauccaagcac

SEQ ID NO: 3755830 - RNA, 14 nt, Human
gcagaaauucuguu

SEQ ID NO: 3755831 - RNA, 21 nt, Human
gcagaaauucuguuuuuaaaa

SEQ ID NO: 3755832 - RNA, 14 nt, Human
gcagaacaaaugaa

SEQ ID NO: 3755833 - RNA, 15 nt, Human
gcagaacaaaugaag

SEQ ID NO: 3755834 - RNA, 14 nt, Human
gcagaacacuaacc

SEQ ID NO: 3755835 - RNA, 18 nt, Human
gcagaacagccgcuccug

SEQ ID NO: 3755836 - RNA, 23 nt, Human
gcagaacagccgcuccugucugc

SEQ ID NO: 3755837 - RNA, 20 nt, Human
gcagaacaguuaagcagccg

SEQ ID NO: 3755838 - RNA, 14 nt, Human
gcagaacccuggug

SEQ ID NO: 3755839 - RNA, 14 nt, Human
gcagaacugagcuc

SEQ ID NO: 3755840 - RNA, 15 nt, Human
gcagaagaaaggaac

SEQ ID NO: 3755841 - RNA, 14 nt, Human
gcagaagacaccag

SEQ ID NO: 3755842 - RNA, 20 nt, Human
gcagaagacaccagagcaga

SEQ ID NO: 3755843 - RNA, 16 nt, Human
gcagaagagggugugu

SEQ ID NO: 3755844 - RNA, 21 nt, Human
gcagaagcaagggggugaugu

SEQ ID NO: 3755845 - RNA, 13 nt, Human
gcagaagcagcaa

SEQ ID NO: 3755846 - RNA, 23 nt, Human
gcagaagcucucgauggacaaug

SEQ ID NO: 3755847 - RNA, 13 nt, Human
gcagaaggaaaaa

SEQ ID NO: 3755848 - RNA, 13 nt, Human
gcagaagggagaa

SEQ ID NO: 3755849 - RNA, 18 nt, Human
gcagaagggagcuggcuc

SEQ ID NO: 3755850 - RNA, 23 nt, Human
gcagaagggggucucuucuucca

SEQ ID NO: 3755851 - RNA, 15 nt, Human
gcagaaguaagccuc

SEQ ID NO: 3755852 - RNA, 20 nt, Human
gcagaaguaggggaagaaua

SEQ ID NO: 3755853 - RNA, 14 nt, Human
gcagaauaaagcaa

SEQ ID NO: 3755854 - RNA, 16 nt, Human
gcagaauaaagcaauu

SEQ ID NO: 3755855 - RNA, 18 nt, Human
gcagaauaaucuuugggu

SEQ ID NO: 3755856 - RNA, 17 nt, Human
gcagaauagcaaggugc

SEQ ID NO: 3755857 - RNA, 23 nt, Human
gcagaauccuaggcuccacccca

SEQ ID NO: 3755858 - RNA, 18 nt, Human
gcagaauguaagugggcc

SEQ ID NO: 3755859 - RNA, 22 nt, Human
gcagaauguaagugggcccacc

SEQ ID NO: 3755860 - RNA, 17 nt, Human
gcagaauguuuuuaaaa

SEQ ID NO: 3755861 - RNA, 19 nt, Human
gcagacaauaaacccucag

SEQ ID NO: 3755862 - RNA, 20 nt, Human
gcagacacgccuuccccuca

SEQ ID NO: 3755863 - RNA, 23 nt, Human
gcagacacggaucugagaaucuu

SEQ ID NO: 3755864 - RNA, 13 nt, Human
gcagacagagcca

SEQ ID NO: 3755865 - RNA, 21 nt, Human
gcagacagagccaggagaagc

SEQ ID NO: 3755866 - RNA, 14 nt, Human
gcagacagcagcuc

SEQ ID NO: 3755867 - RNA, 16 nt, Human
gcagacagcagcucag

SEQ ID NO: 3755868 - RNA, 19 nt, Human
gcagacagcagcucaggca

SEQ ID NO: 3755869 - RNA, 20 nt, Human
gcagacagcaggcagcgcca

SEQ ID NO: 3755870 - RNA, 15 nt, Human
gcagacaggaccagg

SEQ ID NO: 3755871 - RNA, 17 nt, Human
gcagacaggaggaauca

SEQ ID NO: 3755872 - RNA, 13 nt, Human
gcagaccucccca

SEQ ID NO: 3755873 - RNA, 16 nt, Human
gcagaccuccccagcc

SEQ ID NO: 3755874 - RNA, 22 nt, Human
gcagaccuccccagccccuagc

SEQ ID NO: 3755875 - RNA, 20 nt, Human
gcacaauaguaaccugggua

SEQ ID NO: 3755876 - RNA, 20 nt, Human
gcacaauauugaacuuuuuu

SEQ ID NO: 3755877 - RNA, 21 nt, Human
gcacaaucucggcucacugca

SEQ ID NO: 3755878 - RNA, 20 nt, Human
gcacacaaggggcccuugga

SEQ ID NO: 3755879 - RNA, 10 nt, Human
gcacacacac

SEQ ID NO: 3755880 - RNA, 17 nt, Human
gcacacacacacacagg

SEQ ID NO: 3755881 - RNA, 21 nt, Human
gcacacacacacacaugcaca

SEQ ID NO: 3755882 - RNA, 12 nt, Human
gcacacaccaga

SEQ ID NO: 3755883 - RNA, 11 nt, Human
gcacacacugu

SEQ ID NO: 3755884 - RNA, 13 nt, Human
gcacacagaaaua

SEQ ID NO: 3755885 - RNA, 14 nt, Human
gcacacagaaauau

SEQ ID NO: 3755886 - RNA, 17 nt, Human
gcacacagaaauauaua

SEQ ID NO: 3755887 - RNA, 22 nt, Human
gcacacagaaauauauauacau

SEQ ID NO: 3755888 - RNA, 18 nt, Human
gcacacagaggggaguca

SEQ ID NO: 3755889 - RNA, 18 nt, Human
gcacacagcacgggggcc

SEQ ID NO: 3755890 - RNA, 13 nt, Human
gcacacagcuacu

SEQ ID NO: 3755891 - RNA, 21 nt, Human
gcacacagcuuuuaguaccca

SEQ ID NO: 3755892 - RNA, 11 nt, Human
gcacacauuuu

SEQ ID NO: 3755893 - RNA, 20 nt, Human
gcacaccaaucuuacuuugu

SEQ ID NO: 3755894 - RNA, 21 nt, Human
gcacaccaaucuuacuuugua

SEQ ID NO: 3755895 - RNA, 22 nt, Human
gcacaccaaucuuacuuuguaa

SEQ ID NO: 3755896 - RNA, 19 nt, Human
gcacacccucacucugcca

SEQ ID NO: 3755897 - RNA, 21 nt, Human
gcacacccucacucugccagg

SEQ ID NO: 3755898 - RNA, 19 nt, Human
gcacaccuccucccacugc

SEQ ID NO: 3755899 - RNA, 20 nt, Human
gcacacgcguuauaguaacu

SEQ ID NO: 3755900 - RNA, 21 nt, Human
gcacacgcugcucugccccag

SEQ ID NO: 3755901 - RNA, 20 nt, Human
gcacacucauccccucacuu

SEQ ID NO: 3755902 - RNA, 20 nt, Human
gcacacuccccugcacugga

SEQ ID NO: 3755903 - RNA, 13 nt, Human
gcacacucugcca

SEQ ID NO: 3755904 - RNA, 14 nt, Human
gcacacuuccagac

SEQ ID NO: 3755905 - RNA, 15 nt, Human
gcacagaaaacuaga

SEQ ID NO: 3755906 - RNA, 20 nt, Human
gcacagaaacacaauauuuu

SEQ ID NO: 3755907 - RNA, 17 nt, Human
gcacagaagcacaugca

SEQ ID NO: 3755908 - RNA, 13 nt, Human
gcacagaaguccu

SEQ ID NO: 3755909 - RNA, 19 nt, Human
gcacagaaguccuguaugu

SEQ ID NO: 3755910 - RNA, 15 nt, Human
gcacagacccugccc

SEQ ID NO: 3755911 - RNA, 16 nt, Human
gcacagacccugcccu

SEQ ID NO: 3755912 - RNA, 21 nt, Human
gcacagacccugcccuguggg

SEQ ID NO: 3755913 - RNA, 18 nt, Human
gcacagacgucccuccac

SEQ ID NO: 3755914 - RNA, 14 nt, Human
gcacagagaagcug

SEQ ID NO: 3755915 - RNA, 19 nt, Human
gcacagagagggggccacc

SEQ ID NO: 3755916 - RNA, 16 nt, Human
gcacagagagucugga

SEQ ID NO: 3755917 - RNA, 19 nt, Human
gcacagagcucuccagcuc

SEQ ID NO: 3755918 - RNA, 16 nt, Human
gcacagaguuguuaca

SEQ ID NO: 3755919 - RNA, 18 nt, Human
gcacagaguuguuacauu

SEQ ID NO: 3755920 - RNA, 20 nt, Human
gcacagauaaaaaguggaau

SEQ ID NO: 3755921 - RNA, 21 nt, Human
gcacagauuuuaauugucaug

SEQ ID NO: 3755922 - RNA, 13 nt, Human
gcacagcaaacug

SEQ ID NO: 3755923 - RNA, 17 nt, Human
gcacagcaaggaggcug

SEQ ID NO: 3755924 - RNA, 13 nt, Human
gcacagcagccug

SEQ ID NO: 3755925 - RNA, 17 nt, Human
gcacagcaggcugccag

SEQ ID NO: 3755926 - RNA, 22 nt, Human
gcacagcaggcugccagugccu

SEQ ID NO: 3755927 - RNA, 11 nt, Human
gcacagcccuc

SEQ ID NO: 3755928 - RNA, 16 nt, Human
gcacagcccucccgcc

SEQ ID NO: 3755929 - RNA, 17 nt, Human
gcacagcccucccgccc

SEQ ID NO: 3755930 - RNA, 21 nt, Human
gcacagcccucccgccccuuc

SEQ ID NO: 3755931 - RNA, 16 nt, Human
gcacagccggggccug

SEQ ID NO: 3755932 - RNA, 21 nt, Human
gcacagcggggccccagggcu

SEQ ID NO: 3755933 - RNA, 19 nt, Human
gcacagcguuaugugucug

SEQ ID NO: 3755934 - RNA, 19 nt, Human
gcacagcuaacauggaagu

SEQ ID NO: 3755935 - RNA, 12 nt, Human
gcacagcucagg

SEQ ID NO: 3755936 - RNA, 14 nt, Human
gcacagcucccugc

SEQ ID NO: 3755937 - RNA, 17 nt, Human
gcacagcucccugccaa

SEQ ID NO: 3755938 - RNA, 12 nt, Human
gcacagcuggcc

SEQ ID NO: 3755939 - RNA, 16 nt, Human
gcacagcuguaguggg

SEQ ID NO: 3755940 - RNA, 12 nt, Human
gcacagcugugg

SEQ ID NO: 3755941 - RNA, 16 nt, Human
gcacagcuuagauuuc

SEQ ID NO: 3755942 - RNA, 23 nt, Human
gcacagcuucauuuccugugucu

SEQ ID NO: 3755943 - RNA, 14 nt, Human
gcacagcuugaccu

SEQ ID NO: 3755944 - RNA, 19 nt, Human
gcacagcuugaccugaggc

SEQ ID NO: 3755945 - RNA, 21 nt, Human
gcacagcuugaccugaggcug

SEQ ID NO: 3755946 - RNA, 21 nt, Human
gcacaggagcuaccugugugg

SEQ ID NO: 3755947 - RNA, 23 nt, Human
gcacaggagggggucguggagag

SEQ ID NO: 3755948 - RNA, 12 nt, Human
gcacaggcagcu

SEQ ID NO: 3755949 - RNA, 14 nt, Human
gcacaggcagggca

SEQ ID NO: 3755950 - RNA, 15 nt, Human
gcacaggcagggcag

SEQ ID NO: 3755951 - RNA, 12 nt, Human
gcacagggagaa

SEQ ID NO: 3755952 - RNA, 17 nt, Human
gcacagggcagcugggc

SEQ ID NO: 3755953 - RNA, 18 nt, Human
gcacagggcagcugggcc

SEQ ID NO: 3755954 - RNA, 18 nt, Human
gcacagggcaugaaauga

SEQ ID NO: 3755955 - RNA, 22 nt, Human
gcacagggcaugaaaugaacac

SEQ ID NO: 3755956 - RNA, 16 nt, Human
gcacagggccuggccc

SEQ ID NO: 3755957 - RNA, 12 nt, Human
gcacagggucug

SEQ ID NO: 3755958 - RNA, 18 nt, Human
gcacagggucugcucuuu

SEQ ID NO: 3755959 - RNA, 13 nt, Human
gcacaggucccac

SEQ ID NO: 3755960 - RNA, 19 nt, Human
gcacaggucccaccuccag

SEQ ID NO: 3755961 - RNA, 20 nt, Human
gcacaggugggcuucccagu

SEQ ID NO: 3755962 - RNA, 16 nt, Human
gcacaguccaggaaca

SEQ ID NO: 3755963 - RNA, 16 nt, Human
gcacagugaagugcug

SEQ ID NO: 3755964 - RNA, 17 nt, Human
gcacagugacuucugag

SEQ ID NO: 3755965 - RNA, 18 nt, Human
gcacagugacuucugaga

SEQ ID NO: 3755966 - RNA, 21 nt, Human
gcacagugcaucucagcccac

SEQ ID NO: 3755967 - RNA, 14 nt, Human
gcacagugccugca

SEQ ID NO: 3755968 - RNA, 15 nt, Human
gcacagugucugggc

SEQ ID NO: 3755969 - RNA, 19 nt, Human
gcacagugucugggcugac

SEQ ID NO: 3755970 - RNA, 21 nt, Human
gcacagugucugggcugacug

SEQ ID NO: 3755971 - RNA, 20 nt, Human
gcacaguguuaaaugaaauu

SEQ ID NO: 3755972 - RNA, 20 nt, Human
gcacaguuuucugagaaaga

SEQ ID NO: 3755973 - RNA, 23 nt, Human
gcacaguuuucugagaaagacua

SEQ ID NO: 3755974 - RNA, 17 nt, Human
gcacauauacacacaca

SEQ ID NO: 3755975 - RNA, 23 nt, Human
gcacauauggaauuuugcaaaga

SEQ ID NO: 3755976 - RNA, 18 nt, Human
gcacauauggacucugca

SEQ ID NO: 3755977 - RNA, 19 nt, Human
gcacauauuagugcagcca

SEQ ID NO: 3755978 - RNA, 15 nt, Human
gcacaucagaaagga

SEQ ID NO: 3755979 - RNA, 20 nt, Human
gcacaucagcacgauuucug

SEQ ID NO: 3755980 - RNA, 13 nt, Human
gcacaucauuuca

SEQ ID NO: 3755981 - RNA, 19 nt, Human
gcacauccaggcaauggcc

SEQ ID NO: 3755982 - RNA, 20 nt, Human
gcacauccgcgugugccugu

SEQ ID NO: 3755983 - RNA, 23 nt, Human
gcacauccgcgugugccugugug

SEQ ID NO: 3755984 - RNA, 18 nt, Human
gcacaucucaacaggccu

SEQ ID NO: 3755985 - RNA, 22 nt, Human
gcacaucucaacaggccucagg

SEQ ID NO: 3755986 - RNA, 21 nt, Human
gcacaucugcauuuucacccc

SEQ ID NO: 3755987 - RNA, 17 nt, Human
gcacaucugugucuugu

SEQ ID NO: 3755988 - RNA, 15 nt, Human
gcacaucuguuuugu

SEQ ID NO: 3755989 - RNA, 16 nt, Human
gcacaugaagaaauac

SEQ ID NO: 3755990 - RNA, 13 nt, Human
gcacaugacucgg

SEQ ID NO: 3755991 - RNA, 12 nt, Human
gcacaugauuuc

SEQ ID NO: 3755992 - RNA, 22 nt, Human
gcacaugauuucacaaauauua

SEQ ID NO: 3755993 - RNA, 18 nt, Human
gcacaugccucucucagg

SEQ ID NO: 3755994 - RNA, 20 nt, Human
gcacaugccucucucaggcc

SEQ ID NO: 3755995 - RNA, 22 nt, Human
gcacaugccucucucaggccaa

SEQ ID NO: 3755996 - RNA, 22 nt, Human
gcacaugcugagucucccaagg

SEQ ID NO: 3755997 - RNA, 17 nt, Human
gcacaugucuuaaugaa

SEQ ID NO: 3755998 - RNA, 22 nt, Human
gcacaugucuuaaugaaguuug

SEQ ID NO: 3755999 - RNA, 13 nt, Human
gcacaugucuugu

SEQ ID NO: 3756000 - RNA, 21 nt, Human
gcacaugucuuguacaugugu

SEQ ID NO: 3756001 - RNA, 17 nt, Human
gcacauucuuagaguua

SEQ ID NO: 3756002 - RNA, 23 nt, Human
gcacauuuaagagacagucaccc

SEQ ID NO: 3756003 - RNA, 22 nt, Human
gcacauuuuuuuuuuuaauuuu

SEQ ID NO: 3756004 - RNA, 14 nt, Human
gcaccaaaagaagu

SEQ ID NO: 3756005 - RNA, 16 nt, Human
gcaccaaaagaaguaa

SEQ ID NO: 3756006 - RNA, 23 nt, Human
gcaccaaagaugcagccgccuuc

SEQ ID NO: 3756007 - RNA, 21 nt, Human
gcaccaaaucaaaaucucucc

SEQ ID NO: 3756008 - RNA, 17 nt, Human
gcaccaacccagccgcu

SEQ ID NO: 3756009 - RNA, 18 nt, Human
gcaccaacccagccgcug

SEQ ID NO: 3756010 - RNA, 20 nt, Human
gcaccaacccagccgcugcc

SEQ ID NO: 3756011 - RNA, 17 nt, Human
gcaccaagagccaaugg

SEQ ID NO: 3756012 - RNA, 15 nt, Human
gcaccaagcaggaaa

SEQ ID NO: 3756013 - RNA, 17 nt, Human
gcaccacacucagcccu

SEQ ID NO: 3756014 - RNA, 14 nt, Human
gcaccaccaagcca

SEQ ID NO: 3756015 - RNA, 17 nt, Human
gcaccaccaagccaagg

SEQ ID NO: 3756016 - RNA, 18 nt, Human
gcaccaccaagccaaggg

SEQ ID NO: 3756017 - RNA, 14 nt, Human
gcaccaccaggucu

SEQ ID NO: 3756018 - RNA, 15 nt, Human
gcaccaccaggucuc

SEQ ID NO: 3756019 - RNA, 11 nt, Human
gcaccacccua

SEQ ID NO: 3756020 - RNA, 23 nt, Human
gcaccacccuagucccuuccccu

SEQ ID NO: 3756021 - RNA, 13 nt, Human
gcaccacccuccu

SEQ ID NO: 3756022 - RNA, 16 nt, Human
gcaccacccuccuucc

SEQ ID NO: 3756023 - RNA, 17 nt, Human
gcaccacccuccuuccc

SEQ ID NO: 3756024 - RNA, 12 nt, Human
cugcauuuuuca

SEQ ID NO: 3756025 - RNA, 15 nt, Human
cugccaaaaugcucu

SEQ ID NO: 3756026 - RNA, 20 nt, Human
cugccaaauuuuggccaaag

SEQ ID NO: 3756027 - RNA, 17 nt, Human
cugccaaccucgcucca

SEQ ID NO: 3756028 - RNA, 21 nt, Human
cugccaaccucgcuccaacuc

SEQ ID NO: 3756029 - RNA, 21 nt, Human
cugccaagacugcuguggcca

SEQ ID NO: 3756030 - RNA, 13 nt, Human
cugccaagccaug

SEQ ID NO: 3756031 - RNA, 21 nt, Human
cugccaagccccauccugccg

SEQ ID NO: 3756032 - RNA, 15 nt, Human
cugccaaggccagag

SEQ ID NO: 3756033 - RNA, 21 nt, Human
cugccaaggccagaguggccu

SEQ ID NO: 3756034 - RNA, 20 nt, Human
cugccacaaccagccaggca

SEQ ID NO: 3756035 - RNA, 18 nt, Human
cugccacaaggaagaaau

SEQ ID NO: 3756036 - RNA, 12 nt, Human
cugccacacagg

SEQ ID NO: 3756037 - RNA, 24 nt, Human
cugccacacgucugacccucucca

SEQ ID NO: 3756038 - RNA, 17 nt, Human
cugccacacuucaggcu

SEQ ID NO: 3756039 - RNA, 22 nt, Human
cugccacagccuccccugccag

SEQ ID NO: 3756040 - RNA, 23 nt, Human
cugccacagccuccccugccagg

SEQ ID NO: 3756041 - RNA, 14 nt, Human
cugccaccagagac

SEQ ID NO: 3756042 - RNA, 21 nt, Human
cugccaccagagaccguccuc

SEQ ID NO: 3756043 - RNA, 13 nt, Human
cugccaccaggcc

SEQ ID NO: 3756044 - RNA, 17 nt, Human
cugccaccagucacugu

SEQ ID NO: 3756045 - RNA, 14 nt, Human
cugccacccaccuc

SEQ ID NO: 3756046 - RNA, 17 nt, Human
cugccacccagccccag

SEQ ID NO: 3756047 - RNA, 18 nt, Human
cugccacccagccccagc

SEQ ID NO: 3756048 - RNA, 12 nt, Human
cugccacccugg

SEQ ID NO: 3756049 - RNA, 16 nt, Human
cugccacccugggccu

SEQ ID NO: 3756050 - RNA, 23 nt, Human
cugccacccugggccuggcagcu

SEQ ID NO: 3756051 - RNA, 15 nt, Human
cugccacccugggga

SEQ ID NO: 3756052 - RNA, 14 nt, Human
cugccacccuugac

SEQ ID NO: 3756053 - RNA, 12 nt, Human
cugccaccuccc

SEQ ID NO: 3756054 - RNA, 21 nt, Human
cugccaccuccccccacaagu

SEQ ID NO: 3756055 - RNA, 17 nt, Human
cugccaccuccccuugc

SEQ ID NO: 3756056 - RNA, 20 nt, Human
cugccaccuccccuugccag

SEQ ID NO: 3756057 - RNA, 22 nt, Human
cugccaccuccccuugccagcu

SEQ ID NO: 3756058 - RNA, 15 nt, Human
cugccaccucccuga

SEQ ID NO: 3756059 - RNA, 17 nt, Human
cugccaccucccugacc

SEQ ID NO: 3756060 - RNA, 18 nt, Human
cugccaccucccugaccc

SEQ ID NO: 3756061 - RNA, 19 nt, Human
cugccaccuccugccucag

SEQ ID NO: 3756062 - RNA, 17 nt, Human
cugccaccucuccaucc

SEQ ID NO: 3756063 - RNA, 20 nt, Human
cugccaccuggaccccugca

SEQ ID NO: 3756064 - RNA, 21 nt, Human
cugccaccuggaccccugcau

SEQ ID NO: 3756065 - RNA, 14 nt, Human
cugccaccuggggc

SEQ ID NO: 3756066 - RNA, 11 nt, Human
cugccaccugu

SEQ ID NO: 3756067 - RNA, 14 nt, Human
cugccaccugucug

SEQ ID NO: 3756068 - RNA, 15 nt, Human
cugccaccugucugu

SEQ ID NO: 3756069 - RNA, 18 nt, Human
cugccaccugucugucug

SEQ ID NO: 3756070 - RNA, 12 nt, Human
cugccacucaca

SEQ ID NO: 3756071 - RNA, 19 nt, Human
cugccacucacuaggcccc

SEQ ID NO: 3756072 - RNA, 20 nt, Human
cugccacugacugcagggac

SEQ ID NO: 3756073 - RNA, 21 nt, Human
cugccacugacugcagggaca

SEQ ID NO: 3756074 - RNA, 14 nt, Human
cugccacuuugcac

SEQ ID NO: 3756075 - RNA, 20 nt, Human
cugccacuuugcacauuuug

SEQ ID NO: 3756076 - RNA, 22 nt, Human
cugccagacggcacccacccag

SEQ ID NO: 3756077 - RNA, 14 nt, Human
cugccagaugcuga

SEQ ID NO: 3756078 - RNA, 12 nt, Human
cugccagcagca

SEQ ID NO: 3756079 - RNA, 13 nt, Human
cugccagcagcag

SEQ ID NO: 3756080 - RNA, 17 nt, Human
cugccagcagcagcagg

SEQ ID NO: 3756081 - RNA, 20 nt, Human
cugccagcauuucccuuccu

SEQ ID NO: 3756082 - RNA, 14 nt, Human
cugccagccagcag

SEQ ID NO: 3756083 - RNA, 19 nt, Human
cugccagccagcagccagc

SEQ ID NO: 3756084 - RNA, 20 nt, Human
cugccagccagcagccagcu

SEQ ID NO: 3756085 - RNA, 17 nt, Human
cugccagccccacacag

SEQ ID NO: 3756086 - RNA, 14 nt, Human
cugccagccccugc

SEQ ID NO: 3756087 - RNA, 19 nt, Human
cugccagccgagauagcca

SEQ ID NO: 3756088 - RNA, 14 nt, Human
cugccagccuggcu

SEQ ID NO: 3756089 - RNA, 22 nt, Human
cugccagccuggcuucuggagc

SEQ ID NO: 3756090 - RNA, 21 nt, Human
cugccagccuugagcccuggc

SEQ ID NO: 3756091 - RNA, 15 nt, Human
cugccagcucuuccu

SEQ ID NO: 3756092 - RNA, 17 nt, Human
cugccagcucuuccuag

SEQ ID NO: 3756093 - RNA, 21 nt, Human
cugccagcucuuccuagcugg

SEQ ID NO: 3756094 - RNA, 14 nt, Human
cugccaggaagcca

SEQ ID NO: 3756095 - RNA, 16 nt, Human
cugccaggagacaggu

SEQ ID NO: 3756096 - RNA, 16 nt, Human
cugccaggaggaccca

SEQ ID NO: 3756097 - RNA, 19 nt, Human
cugccaggaggacccaggg

SEQ ID NO: 3756098 - RNA, 22 nt, Human
cugccaggaggacccagggcuc

SEQ ID NO: 3756099 - RNA, 13 nt, Human
cugccaggcacag

SEQ ID NO: 3756100 - RNA, 15 nt, Human
cugccaggcacaggc

SEQ ID NO: 3756101 - RNA, 16 nt, Human
cugccaggcacaggca

SEQ ID NO: 3756102 - RNA, 21 nt, Human
cugccaggcacaggcagggca

SEQ ID NO: 3756103 - RNA, 15 nt, Human
cugccaggcaggggu

SEQ ID NO: 3756104 - RNA, 20 nt, Human
cugccaggccagccuccgag

SEQ ID NO: 3756105 - RNA, 23 nt, Human
cugccaggcccccaccacacauc

SEQ ID NO: 3756106 - RNA, 11 nt, Human
cugccagggac

SEQ ID NO: 3756107 - RNA, 15 nt, Human
cugccagggacagag

SEQ ID NO: 3756108 - RNA, 18 nt, Human
cugccagggagacagagc

SEQ ID NO: 3756109 - RNA, 19 nt, Human
cugccagggagacagagcu

SEQ ID NO: 3756110 - RNA, 12 nt, Human
cugccagggcag

SEQ ID NO: 3756111 - RNA, 15 nt, Human
cugccagggcagggc

SEQ ID NO: 3756112 - RNA, 16 nt, Human
cugccagggcagggcc

SEQ ID NO: 3756113 - RNA, 15 nt, Human
cugccagggcagugc

SEQ ID NO: 3756114 - RNA, 21 nt, Human
cugccagggccccucucccca

SEQ ID NO: 3756115 - RNA, 18 nt, Human
cugccaggugagaaacug

SEQ ID NO: 3756116 - RNA, 17 nt, Human
cugccagucccccugcc

SEQ ID NO: 3756117 - RNA, 22 nt, Human
cugccagucccccugccccagg

SEQ ID NO: 3756118 - RNA, 23 nt, Human
cugccagugacagacaggcucuu

SEQ ID NO: 3756119 - RNA, 20 nt, Human
cugccagugccuuaccuccu

SEQ ID NO: 3756120 - RNA, 23 nt, Human
cugccagugccuuaccuccugcc

SEQ ID NO: 3756121 - RNA, 22 nt, Human
cugccaguggggccugaggcuc

SEQ ID NO: 3756122 - RNA, 12 nt, Human
cugccaguuuug

SEQ ID NO: 3756123 - RNA, 13 nt, Human
cugccaguuuugu

SEQ ID NO: 3756124 - RNA, 23 nt, Human
cugccauaaaacauuaagaaaau

SEQ ID NO: 3756125 - RNA, 17 nt, Human
cugccaucauguuuaca

SEQ ID NO: 3756126 - RNA, 23 nt, Human
cugccaucauguuuacagaggac

SEQ ID NO: 3756127 - RNA, 20 nt, Human
cugccauccuggcccagggc

SEQ ID NO: 3756128 - RNA, 17 nt, Human
cugccaucuagccagcc

SEQ ID NO: 3756129 - RNA, 20 nt, Human
cugccaucuagccagccccu

SEQ ID NO: 3756130 - RNA, 20 nt, Human
cugccaucucaccuccugcu

SEQ ID NO: 3756131 - RNA, 14 nt, Human
cugccaucuuccca

SEQ ID NO: 3756132 - RNA, 17 nt, Human
cugccaucuucccagca

SEQ ID NO: 3756133 - RNA, 18 nt, Human
cugccaugaacuggaggc

SEQ ID NO: 3756134 - RNA, 16 nt, Human
cugccaugccaggaac

SEQ ID NO: 3756135 - RNA, 18 nt, Human
cugccauggaacuguuuc

SEQ ID NO: 3756136 - RNA, 20 nt, Human
cugccauggaggcacacagc

SEQ ID NO: 3756137 - RNA, 17 nt, Human
cugccauguaccucccc

SEQ ID NO: 3756138 - RNA, 17 nt, Human
cugccauucacuucaua

SEQ ID NO: 3756139 - RNA, 20 nt, Human
cugccauuugcacccuccgc

SEQ ID NO: 3756140 - RNA, 17 nt, Human
cugcccaaaaauauggu

SEQ ID NO: 3756141 - RNA, 22 nt, Human
cugcccaaagugcuuccaaggc

SEQ ID NO: 3756142 - RNA, 20 nt, Human
cugcccaacccuucccucac

SEQ ID NO: 3756143 - RNA, 14 nt, Human
cugcccaacugugu

SEQ ID NO: 3756144 - RNA, 18 nt, Human
cugcccaagcccaggcca

SEQ ID NO: 3756145 - RNA, 21 nt, Human
cugcccaauaugcaguucugc

SEQ ID NO: 3756146 - RNA, 12 nt, Human
cugcccaccccc

SEQ ID NO: 3756147 - RNA, 14 nt, Human
cugcccacccccuc

SEQ ID NO: 3756148 - RNA, 12 nt, Human
cugcccacccgu

SEQ ID NO: 3756149 - RNA, 12 nt, Human
cugcccaccugc

SEQ ID NO: 3756150 - RNA, 13 nt, Human
cugcccaccugcc

SEQ ID NO: 3756151 - RNA, 21 nt, Human
cugcccaccugccuggccggc

SEQ ID NO: 3756152 - RNA, 12 nt, Human
cugcccaccugg

SEQ ID NO: 3756153 - RNA, 16 nt, Human
cugcccaccuggccuc

SEQ ID NO: 3756154 - RNA, 20 nt, Human
cugcccaccuggccucugca

SEQ ID NO: 3756155 - RNA, 12 nt, Human
cugcccaccugu

SEQ ID NO: 3756156 - RNA, 16 nt, Human
cugcccacugcugcag

SEQ ID NO: 3756157 - RNA, 13 nt, Human
cugcccagagcug

SEQ ID NO: 3756158 - RNA, 14 nt, Human
cugcccagagcugg

SEQ ID NO: 3756159 - RNA, 15 nt, Human
cugcccagagcuggg

SEQ ID NO: 3756160 - RNA, 17 nt, Human
cugcccagagcugggug

SEQ ID NO: 3756161 - RNA, 22 nt, Human
cugcccagaguugcugggagcu

SEQ ID NO: 3756162 - RNA, 18 nt, Human
cugcccagaucagccaga

SEQ ID NO: 3756163 - RNA, 22 nt, Human
cugcccagaucagccagaagcc

SEQ ID NO: 3756164 - RNA, 18 nt, Human
cugcccagaucccagaag

SEQ ID NO: 3756165 - RNA, 16 nt, Human
cugcccagcuugggcc

SEQ ID NO: 3756166 - RNA, 20 nt, Human
cugcccagcuugggcccagc

SEQ ID NO: 3756167 - RNA, 17 nt, Human
cugcccaggagagccag

SEQ ID NO: 3756168 - RNA, 22 nt, Human
cugcccaggagagccagcccuc

SEQ ID NO: 3756169 - RNA, 23 nt, Human
cugcccaggagagccagcccucc

SEQ ID NO: 3756170 - RNA, 15 nt, Human
cugcccaggcacugc

SEQ ID NO: 3756171 - RNA, 20 nt, Human
cugcccaggcacugcuaggc

SEQ ID NO: 3756172 - RNA, 17 nt, Human
cugcccaggccugccug

SEQ ID NO: 3756173 - RNA, 18 nt, Human
cugcccaggggagcccuc

SEQ ID NO: 3756174 - RNA, 23 nt, Human
gcagaccuccccagccccuagcc

SEQ ID NO: 3756175 - RNA, 19 nt, Human
gcagaccuguccuccuggu

SEQ ID NO: 3756176 - RNA, 14 nt, Human
gcagacguccauca

SEQ ID NO: 3756177 - RNA, 16 nt, Human
gcagacuacacaggau

SEQ ID NO: 3756178 - RNA, 20 nt, Human
gcagacucaauaaaaucaug

SEQ ID NO: 3756179 - RNA, 15 nt, Human
gcagacucagcucug

SEQ ID NO: 3756180 - RNA, 17 nt, Human
gcagacucaguuuguca

SEQ ID NO: 3756181 - RNA, 17 nt, Human
gcagacucuacagaggc

SEQ ID NO: 3756182 - RNA, 18 nt, Human
gcagacucuacagaggcc

SEQ ID NO: 3756183 - RNA, 22 nt, Human
gcagacucuacagaggccaugg

SEQ ID NO: 3756184 - RNA, 12 nt, Human
gcagacuggagg

SEQ ID NO: 3756185 - RNA, 14 nt, Human
gcagacuggagggg

SEQ ID NO: 3756186 - RNA, 17 nt, Human
gcagacuggugagcaga

SEQ ID NO: 3756187 - RNA, 16 nt, Human
gcagacuugaccccga

SEQ ID NO: 3756188 - RNA, 20 nt, Human
gcagagaaacuuaagcaaag

SEQ ID NO: 3756189 - RNA, 14 nt, Human
gcagagaagccuug

SEQ ID NO: 3756190 - RNA, 22 nt, Human
gcagagaagggcauaaaacagc

SEQ ID NO: 3756191 - RNA, 20 nt, Human
gcagagaagugacgguuccu

SEQ ID NO: 3756192 - RNA, 19 nt, Human
gcagagaaugaaagggccc

SEQ ID NO: 3756193 - RNA, 21 nt, Human
gcagagaauucucuuauccaa

SEQ ID NO: 3756194 - RNA, 15 nt, Human
gcagagacagagagg

SEQ ID NO: 3756195 - RNA, 17 nt, Human
gcagagacaggaccuga

SEQ ID NO: 3756196 - RNA, 15 nt, Human
gcagagagccauuuu

SEQ ID NO: 3756197 - RNA, 15 nt, Human
gcagagaugccuccc

SEQ ID NO: 3756198 - RNA, 22 nt, Human
gcagagauuggaaugggcagcu

SEQ ID NO: 3756199 - RNA, 16 nt, Human
gcagagauuucucauu

SEQ ID NO: 3756200 - RNA, 17 nt, Human
gcagagcaagucugcag

SEQ ID NO: 3756201 - RNA, 22 nt, Human
gcagagcaccuuagacaguccc

SEQ ID NO: 3756202 - RNA, 23 nt, Human
gcagagcaccuuagacagucccu

SEQ ID NO: 3756203 - RNA, 24 nt, Human
gcagagcaccuuagacagucccug

SEQ ID NO: 3756204 - RNA, 22 nt, Human
gcagagcaccuuugcacaggau

SEQ ID NO: 3756205 - RNA, 19 nt, Human
gcagagcagagaccauccc

SEQ ID NO: 3756206 - RNA, 14 nt, Human
gcagagccaggaag

SEQ ID NO: 3756207 - RNA, 15 nt, Human
gcagagccaggaaga

SEQ ID NO: 3756208 - RNA, 13 nt, Human
gcagagcccugcu

SEQ ID NO: 3756209 - RNA, 20 nt, Human
gcagagccucccaaggagaa

SEQ ID NO: 3756210 - RNA, 19 nt, Human
gcagagccuucucagaagc

SEQ ID NO: 3756211 - RNA, 23 nt, Human
gcagagccuucucagaagcacag

SEQ ID NO: 3756212 - RNA, 18 nt, Human
gcagagcgcgccccuagc

SEQ ID NO: 3756213 - RNA, 14 nt, Human
gcagagcucugccg

SEQ ID NO: 3756214 - RNA, 19 nt, Human
gcagagcugauggagaagg

SEQ ID NO: 3756215 - RNA, 22 nt, Human
gcagagcugauggagaaggaag

SEQ ID NO: 3756216 - RNA, 15 nt, Human
gcagagcuggcucug

SEQ ID NO: 3756217 - RNA, 23 nt, Human
gcagagcuggcucugagcgccuc

SEQ ID NO: 3756218 - RNA, 14 nt, Human
gcagagcuggugcg

SEQ ID NO: 3756219 - RNA, 21 nt, Human
gcagagcuggugcggcuggcc

SEQ ID NO: 3756220 - RNA, 16 nt, Human
gcagagcuucuuccag

SEQ ID NO: 3756221 - RNA, 13 nt, Human
gcagaggaaagca

SEQ ID NO: 3756222 - RNA, 20 nt, Human
gcagaggaaagcaaaggaga

SEQ ID NO: 3756223 - RNA, 21 nt, Human
gcagaggaaagcaaaggagau

SEQ ID NO: 3756224 - RNA, 11 nt, Human
gcagaggacag

SEQ ID NO: 3756225 - RNA, 15 nt, Human
gcagaggaggggccg

SEQ ID NO: 3756226 - RNA, 21 nt, Human
gcagaggaggggccgcugcca

SEQ ID NO: 3756227 - RNA, 12 nt, Human
gcagaggcagcg

SEQ ID NO: 3756228 - RNA, 18 nt, Human
gcagaggcaguaccuggg

SEQ ID NO: 3756229 - RNA, 11 nt, Human
gcagaggcugu

SEQ ID NO: 3756230 - RNA, 18 nt, Human
gcagagggcagaggcugg

SEQ ID NO: 3756231 - RNA, 12 nt, Human
gcagagggcugg

SEQ ID NO: 3756232 - RNA, 19 nt, Human
gcagagggcuggaggccca

SEQ ID NO: 3756233 - RNA, 14 nt, Human
gcagaggggcagag

SEQ ID NO: 3756234 - RNA, 19 nt, Human
gcagaggggcaggcccugc

SEQ ID NO: 3756235 - RNA, 20 nt, Human
gcagaggggcaggcccugca

SEQ ID NO: 3756236 - RNA, 12 nt, Human
gcagaggggcuu

SEQ ID NO: 3756237 - RNA, 19 nt, Human
gcagaggggcuuucuggag

SEQ ID NO: 3756238 - RNA, 19 nt, Human
gcagagggguaagagagga

SEQ ID NO: 3756239 - RNA, 23 nt, Human
gcagagguaaaagugugagcagu

SEQ ID NO: 3756240 - RNA, 15 nt, Human
gcagagguacccugg

SEQ ID NO: 3756241 - RNA, 17 nt, Human
gcagagguacccugggu

SEQ ID NO: 3756242 - RNA, 22 nt, Human
gcagaguaggggucugucuuuu

SEQ ID NO: 3756243 - RNA, 14 nt, Human
gcagaguauuuuug

SEQ ID NO: 3756244 - RNA, 18 nt, Human
gcagagucacaagccucg

SEQ ID NO: 3756245 - RNA, 14 nt, Human
gcagagucacacgg

SEQ ID NO: 3756246 - RNA, 14 nt, Human
gcagaguccuggag

SEQ ID NO: 3756247 - RNA, 15 nt, Human
gcagagugcacagcu

SEQ ID NO: 3756248 - RNA, 18 nt, Human
gcagagugcacagcuguc

SEQ ID NO: 3756249 - RNA, 21 nt, Human
gcagaguuaaaucucaaauag

SEQ ID NO: 3756250 - RNA, 13 nt, Human
gcagaguuacuug

SEQ ID NO: 3756251 - RNA, 15 nt, Human
gcagaguugaagaca

SEQ ID NO: 3756252 - RNA, 19 nt, Human
gcagaguugaagacagagc

SEQ ID NO: 3756253 - RNA, 17 nt, Human
gcagaguuguaaauaua

SEQ ID NO: 3756254 - RNA, 21 nt, Human
gcagaguuguaaauauauaaa

SEQ ID NO: 3756255 - RNA, 23 nt, Human
gcagaguuguaaauauauaaaua

SEQ ID NO: 3756256 - RNA, 18 nt, Human
gcagaguuuccaaaacca

SEQ ID NO: 3756257 - RNA, 13 nt, Human
gcagaguuugccu

SEQ ID NO: 3756258 - RNA, 18 nt, Human
gcagauaaacaguaguga

SEQ ID NO: 3756259 - RNA, 21 nt, Human
gcagauaacaaugcagcaagg

SEQ ID NO: 3756260 - RNA, 20 nt, Human
gcagauaacauuuguguguu

SEQ ID NO: 3756261 - RNA, 14 nt, Human
gcagaucaccugag

SEQ ID NO: 3756262 - RNA, 12 nt, Human
gcagaucccagc

SEQ ID NO: 3756263 - RNA, 22 nt, Human
gcagaucucccacaugccaggg

SEQ ID NO: 3756264 - RNA, 14 nt, Human
gcagaucugugccc

SEQ ID NO: 3756265 - RNA, 16 nt, Human
gcagaucuuggacuca

SEQ ID NO: 3756266 - RNA, 13 nt, Human
gcagaugacaaaa

SEQ ID NO: 3756267 - RNA, 12 nt, Human
gcagaugacaag

SEQ ID NO: 3756268 - RNA, 15 nt, Human
gcagaugaccccucc

SEQ ID NO: 3756269 - RNA, 16 nt, Human
gcagaugaccccuccc

SEQ ID NO: 3756270 - RNA, 23 nt, Human
gcagaugaggugaaaaggccaag

SEQ ID NO: 3756271 - RNA, 14 nt, Human
gcagaugagguugc

SEQ ID NO: 3756272 - RNA, 15 nt, Human
gcagaugcaaagagg

SEQ ID NO: 3756273 - RNA, 16 nt, Human
gcagaugcaaagaggc

SEQ ID NO: 3756274 - RNA, 17 nt, Human
gcagaugcaaagaggca

SEQ ID NO: 3756275 - RNA, 19 nt, Human
gcagaugcaaagaggcaag

SEQ ID NO: 3756276 - RNA, 17 nt, Human
gcagaugcagagagcca

SEQ ID NO: 3756277 - RNA, 14 nt, Human
gcagaugcagcucu

SEQ ID NO: 3756278 - RNA, 15 nt, Human
gcagaugcagcucuu

SEQ ID NO: 3756279 - RNA, 17 nt, Human
gcagaugccacccuagc

SEQ ID NO: 3756280 - RNA, 14 nt, Human
gcagaugccagagc

SEQ ID NO: 3756281 - RNA, 13 nt, Human
gcagaugccuggg

SEQ ID NO: 3756282 - RNA, 23 nt, Human
gcagaugcuagcgcguugccugu

SEQ ID NO: 3756283 - RNA, 15 nt, Human
gcagaugcuggucau

SEQ ID NO: 3756284 - RNA, 18 nt, Human
gcagauggagaccccuug

SEQ ID NO: 3756285 - RNA, 15 nt, Human
gcagauguaggaggg

SEQ ID NO: 3756286 - RNA, 17 nt, Human
gcagaugugcagcagau

SEQ ID NO: 3756287 - RNA, 18 nt, Human
gcagauguuagauauuuu

SEQ ID NO: 3756288 - RNA, 17 nt, Human
gcagauucagaaaugag

SEQ ID NO: 3756289 - RNA, 20 nt, Human
gcagauucauuuuucuuucu

SEQ ID NO: 3756290 - RNA, 21 nt, Human
gcagauucuaggaccuguguc

SEQ ID NO: 3756291 - RNA, 19 nt, Human
gcagauucucccuugcucu

SEQ ID NO: 3756292 - RNA, 17 nt, Human
gcagauugagaccuaca

SEQ ID NO: 3756293 - RNA, 14 nt, Human
gcagauuggaagga

SEQ ID NO: 3756294 - RNA, 20 nt, Human
gcagauuguguaacaauuuu

SEQ ID NO: 3756295 - RNA, 17 nt, Human
gcagauuuuacaaaaga

SEQ ID NO: 3756296 - RNA, 20 nt, Human
gcagauuuuaggaaaugaau

SEQ ID NO: 3756297 - RNA, 19 nt, Human
gcagauuuugcccuugaca

SEQ ID NO: 3756298 - RNA, 23 nt, Human
gcagauuuuuauauuaguugcuu

SEQ ID NO: 3756299 - RNA, 14 nt, Human
gcagcaaaaauaua

SEQ ID NO: 3756300 - RNA, 18 nt, Human
gcagcaaaaauauaaaau

SEQ ID NO: 3756301 - RNA, 16 nt, Human
gcagcaaacacuccac

SEQ ID NO: 3756302 - RNA, 16 nt, Human
gcagcaacaauaaaua

SEQ ID NO: 3756303 - RNA, 19 nt, Human
gcagcaacacaauguuauu

SEQ ID NO: 3756304 - RNA, 20 nt, Human
gcagcaaccagagcacugua

SEQ ID NO: 3756305 - RNA, 22 nt, Human
gcagcaacuuguccuagcacag

SEQ ID NO: 3756306 - RNA, 20 nt, Human
gcagcaagaaaaaaaaaugc

SEQ ID NO: 3756307 - RNA, 22 nt, Human
gcagcaaggcccgagcagcuga

SEQ ID NO: 3756308 - RNA, 19 nt, Human
gcagcaaggcccugcugcc

SEQ ID NO: 3756309 - RNA, 23 nt, Human
gcagcaauauauuaccagcaaga

SEQ ID NO: 3756310 - RNA, 15 nt, Human
gcagcaauuuaaaug

SEQ ID NO: 3756311 - RNA, 16 nt, Human
gcagcaauuuaaaugu

SEQ ID NO: 3756312 - RNA, 18 nt, Human
gcagcacaaguguaauga

SEQ ID NO: 3756313 - RNA, 15 nt, Human
gcagcacaggagggc

SEQ ID NO: 3756314 - RNA, 21 nt, Human
gcagcacccagguuuugcacu

SEQ ID NO: 3756315 - RNA, 19 nt, Human
gcagcacccuauaaaucaa

SEQ ID NO: 3756316 - RNA, 16 nt, Human
gcagcaccgaggggcc

SEQ ID NO: 3756317 - RNA, 18 nt, Human
gcagcaccguucugugca

SEQ ID NO: 3756318 - RNA, 16 nt, Human
gcagcaccuccaggcc

SEQ ID NO: 3756319 - RNA, 17 nt, Human
gcagcaccuccaggccu

SEQ ID NO: 3756320 - RNA, 19 nt, Human
gcagcaccuccaggccugu

SEQ ID NO: 3756321 - RNA, 19 nt, Human
gcagcaccuccucagccug

SEQ ID NO: 3756322 - RNA, 13 nt, Human
gcagcaccugccc

SEQ ID NO: 3756323 - RNA, 23 nt, Human
gcaccacgggacaucacagggug

SEQ ID NO: 3756324 - RNA, 13 nt, Human
gcaccacucaaga

SEQ ID NO: 3756325 - RNA, 17 nt, Human
gcaccacucaagaccaa

SEQ ID NO: 3756326 - RNA, 14 nt, Human
gcaccacucuccuu

SEQ ID NO: 3756327 - RNA, 19 nt, Human
gcaccacugcacuccagcc

SEQ ID NO: 3756328 - RNA, 18 nt, Human
gcaccacuguguauuuaa

SEQ ID NO: 3756329 - RNA, 14 nt, Human
gcaccagacaccca

SEQ ID NO: 3756330 - RNA, 15 nt, Human
gcaccagacacccag

SEQ ID NO: 3756331 - RNA, 19 nt, Human
gcaccagagcaaccucuca

SEQ ID NO: 3756332 - RNA, 19 nt, Human
gcaccagcccagaagugca

SEQ ID NO: 3756333 - RNA, 17 nt, Human
gcaccagcuucuccagg

SEQ ID NO: 3756334 - RNA, 20 nt, Human
gcaccaggcacgaacccacc

SEQ ID NO: 3756335 - RNA, 21 nt, Human
gcaccaggcacgaacccaccu

SEQ ID NO: 3756336 - RNA, 13 nt, Human
gcaccagggaaga

SEQ ID NO: 3756337 - RNA, 19 nt, Human
gcaccagggguuucucgca

SEQ ID NO: 3756338 - RNA, 12 nt, Human
gcaccauaacuu

SEQ ID NO: 3756339 - RNA, 20 nt, Human
gcaccaucacaauacagaua

SEQ ID NO: 3756340 - RNA, 17 nt, Human
gcaccauccccuccggc

SEQ ID NO: 3756341 - RNA, 19 nt, Human
gcaccauccgccagggccc

SEQ ID NO: 3756342 - RNA, 20 nt, Human
gcaccaugcugcuggggaag

SEQ ID NO: 3756343 - RNA, 19 nt, Human
gcaccauuuuaagucccug

SEQ ID NO: 3756344 - RNA, 21 nt, Human
gcacccaagaccucagggcac

SEQ ID NO: 3756345 - RNA, 22 nt, Human
gcacccaccaucaugucuggcu

SEQ ID NO: 3756346 - RNA, 19 nt, Human
gcacccacccagcacccag

SEQ ID NO: 3756347 - RNA, 17 nt, Human
gcacccacccugggacc

SEQ ID NO: 3756348 - RNA, 14 nt, Human
gcacccacucugcu

SEQ ID NO: 3756349 - RNA, 13 nt, Human
gcacccagcccug

SEQ ID NO: 3756350 - RNA, 22 nt, Human
gcacccauccaccguccccucc

SEQ ID NO: 3756351 - RNA, 17 nt, Human
gcaccccaugcuguuga

SEQ ID NO: 3756352 - RNA, 15 nt, Human
gcacccccacgcccu

SEQ ID NO: 3756353 - RNA, 12 nt, Human
gcacccccagcc

SEQ ID NO: 3756354 - RNA, 21 nt, Human
gcacccccagccugggccuau

SEQ ID NO: 3756355 - RNA, 18 nt, Human
gcaccccccuguucuaag

SEQ ID NO: 3756356 - RNA, 16 nt, Human
gcacccccgucaagag

SEQ ID NO: 3756357 - RNA, 12 nt, Human
gcacccccuccu

SEQ ID NO: 3756358 - RNA, 16 nt, Human
gcacccccuccugcug

SEQ ID NO: 3756359 - RNA, 13 nt, Human
gcacccccugcag

SEQ ID NO: 3756360 - RNA, 18 nt, Human
gcaccccgauguggaccu

SEQ ID NO: 3756361 - RNA, 16 nt, Human
gcaccccuacucacau

SEQ ID NO: 3756362 - RNA, 13 nt, Human
gcaccccucccau

SEQ ID NO: 3756363 - RNA, 13 nt, Human
gcaccccuuccau

SEQ ID NO: 3756364 - RNA, 14 nt, Human
gcaccccuuccugg

SEQ ID NO: 3756365 - RNA, 12 nt, Human
gcaccccuucuc

SEQ ID NO: 3756366 - RNA, 18 nt, Human
gcaccccuucucuccucc

SEQ ID NO: 3756367 - RNA, 22 nt, Human
gcacccgggcucagggaccaca

SEQ ID NO: 3756368 - RNA, 23 nt, Human
gcacccguguuuguaaaaaugua

SEQ ID NO: 3756369 - RNA, 21 nt, Human
gcacccuaguucuaccucagg

SEQ ID NO: 3756370 - RNA, 13 nt, Human
gcacccuccaccc

SEQ ID NO: 3756371 - RNA, 16 nt, Human
gcacccuccacccugu

SEQ ID NO: 3756372 - RNA, 17 nt, Human
gcacccuccacccuguc

SEQ ID NO: 3756373 - RNA, 13 nt, Human
gcacccuccccuc

SEQ ID NO: 3756374 - RNA, 15 nt, Human
gcacccuccuagggc

SEQ ID NO: 3756375 - RNA, 15 nt, Human
gcacccucuauccca

SEQ ID NO: 3756376 - RNA, 12 nt, Human
gcacccugaggg

SEQ ID NO: 3756377 - RNA, 14 nt, Human
gcacccuggggccu

SEQ ID NO: 3756378 - RNA, 15 nt, Human
gcacccuggggccug

SEQ ID NO: 3756379 - RNA, 20 nt, Human
gcacccuuccaucugauucc

SEQ ID NO: 3756380 - RNA, 17 nt, Human
gcacccuucuuuccucu

SEQ ID NO: 3756381 - RNA, 15 nt, Human
gcaccgaagcccaga

SEQ ID NO: 3756382 - RNA, 23 nt, Human
gcaccgaagcccagagggucugg

SEQ ID NO: 3756383 - RNA, 19 nt, Human
gcaccgccggccagcuggg

SEQ ID NO: 3756384 - RNA, 14 nt, Human
gcaccgccucuucc

SEQ ID NO: 3756385 - RNA, 17 nt, Human
gcaccgccucuucccgc

SEQ ID NO: 3756386 - RNA, 14 nt, Human
gcaccggaccagcc

SEQ ID NO: 3756387 - RNA, 18 nt, Human
gcaccggcuggccuggcc

SEQ ID NO: 3756388 - RNA, 17 nt, Human
gcaccgucauggcuuaa

SEQ ID NO: 3756389 - RNA, 21 nt, Human
gcaccgucauggcuuaauguu

SEQ ID NO: 3756390 - RNA, 21 nt, Human
gcaccgugucaagcugcucug

SEQ ID NO: 3756391 - RNA, 18 nt, Human
gcaccuaaagcagccagc

SEQ ID NO: 3756392 - RNA, 22 nt, Human
gcaccuaauccaggcagaucca

SEQ ID NO: 3756393 - RNA, 19 nt, Human
gcaccuacaguguacaguc

SEQ ID NO: 3756394 - RNA, 21 nt, Human
gcaccuaccaccacgcccggc

SEQ ID NO: 3756395 - RNA, 17 nt, Human
gcaccuaccaucaggga

SEQ ID NO: 3756396 - RNA, 21 nt, Human
gcaccuacuacaucgcccucc

SEQ ID NO: 3756397 - RNA, 16 nt, Human
gcaccuaguccaguga

SEQ ID NO: 3756398 - RNA, 21 nt, Human
gcaccucacagaaaugagauc

SEQ ID NO: 3756399 - RNA, 18 nt, Human
gcaccuccccccacugca

SEQ ID NO: 3756400 - RNA, 23 nt, Human
gcaccuccccccacugcaggccc

SEQ ID NO: 3756401 - RNA, 14 nt, Human
gcaccuccucagcc

SEQ ID NO: 3756402 - RNA, 21 nt, Human
gcaccuccucggcuggcuguc

SEQ ID NO: 3756403 - RNA, 14 nt, Human
gcaccuccugccuc

SEQ ID NO: 3756404 - RNA, 14 nt, Human
gcaccucuuccuug

SEQ ID NO: 3756405 - RNA, 23 nt, Human
gcaccugcauccguaguucccug

SEQ ID NO: 3756406 - RNA, 15 nt, Human
gcaccugcccccugg

SEQ ID NO: 3756407 - RNA, 21 nt, Human
gcaccugcccuaccugcccca

SEQ ID NO: 3756408 - RNA, 21 nt, Human
gcaccugccgaccucguccuc

SEQ ID NO: 3756409 - RNA, 21 nt, Human
gcaccuggcugagccuggcug

SEQ ID NO: 3756410 - RNA, 15 nt, Human
gcaccugggcccugg

SEQ ID NO: 3756411 - RNA, 16 nt, Human
gcaccugggcccuggg

SEQ ID NO: 3756412 - RNA, 13 nt, Human
gcaccuguacagu

SEQ ID NO: 3756413 - RNA, 17 nt, Human
gcaccuguagucccagc

SEQ ID NO: 3756414 - RNA, 18 nt, Human
gcaccuguccccacccuc

SEQ ID NO: 3756415 - RNA, 18 nt, Human
gcaccugucugcuccagc

SEQ ID NO: 3756416 - RNA, 18 nt, Human
gcaccuuaccaacuuucu

SEQ ID NO: 3756417 - RNA, 19 nt, Human
gcaccuuagacagucccug

SEQ ID NO: 3756418 - RNA, 14 nt, Human
gcaccuucagacuu

SEQ ID NO: 3756419 - RNA, 15 nt, Human
gcaccuuccucacuu

SEQ ID NO: 3756420 - RNA, 15 nt, Human
gcaccuugugccugg

SEQ ID NO: 3756421 - RNA, 14 nt, Human
gcaccuugugucug

SEQ ID NO: 3756422 - RNA, 18 nt, Human
gcaccuuucuaguugaaa

SEQ ID NO: 3756423 - RNA, 15 nt, Human
gcaccuuuuacugug

SEQ ID NO: 3756424 - RNA, 16 nt, Human
gcacgaacccaccugc

SEQ ID NO: 3756425 - RNA, 16 nt, Human
gcacgacgcccucucc

SEQ ID NO: 3756426 - RNA, 19 nt, Human
gcacgacgcccucucccca

SEQ ID NO: 3756427 - RNA, 20 nt, Human
gcacgacgcccucuccccac

SEQ ID NO: 3756428 - RNA, 12 nt, Human
gcacgauuucug

SEQ ID NO: 3756429 - RNA, 13 nt, Human
gcacgcacacaca

SEQ ID NO: 3756430 - RNA, 16 nt, Human
gcacgcacacacacaa

SEQ ID NO: 3756431 - RNA, 15 nt, Human
gcacgcccaugugug

SEQ ID NO: 3756432 - RNA, 18 nt, Human
gcacgcccaugugugagu

SEQ ID NO: 3756433 - RNA, 22 nt, Human
gcacgcccaugugugagugugu

SEQ ID NO: 3756434 - RNA, 18 nt, Human
gcacgcgcccuuucuacc

SEQ ID NO: 3756435 - RNA, 15 nt, Human
gcacgcgugugcagg

SEQ ID NO: 3756436 - RNA, 20 nt, Human
gcacgcugugggcagguggg

SEQ ID NO: 3756437 - RNA, 21 nt, Human
gcacgcuugcguaugucuguu

SEQ ID NO: 3756438 - RNA, 16 nt, Human
gcacggacaauaaacc

SEQ ID NO: 3756439 - RNA, 12 nt, Human
gcacggacucuu

SEQ ID NO: 3756440 - RNA, 23 nt, Human
gcacggccccgaagggcccccac

SEQ ID NO: 3756441 - RNA, 14 nt, Human
gcacggcucugucc

SEQ ID NO: 3756442 - RNA, 18 nt, Human
gcacggcucuguccccag

SEQ ID NO: 3756443 - RNA, 14 nt, Human
gcacgggugguccc

SEQ ID NO: 3756444 - RNA, 16 nt, Human
gcacgggugguccccg

SEQ ID NO: 3756445 - RNA, 16 nt, Human
gcacggugggccuugc

SEQ ID NO: 3756446 - RNA, 18 nt, Human
gcacgguggugaggcagu

SEQ ID NO: 3756447 - RNA, 23 nt, Human
gcacguggcauguggccuguggc

SEQ ID NO: 3756448 - RNA, 13 nt, Human
gcacguggccucu

SEQ ID NO: 3756449 - RNA, 23 nt, Human
gcacguggcuucugaugaaucuu

SEQ ID NO: 3756450 - RNA, 23 nt, Human
gcacgugggucuucagggggcca

SEQ ID NO: 3756451 - RNA, 14 nt, Human
gcacgugugugcac

SEQ ID NO: 3756452 - RNA, 16 nt, Human
gcacguguguuuuucu

SEQ ID NO: 3756453 - RNA, 15 nt, Human
gcacguugcuucagg

SEQ ID NO: 3756454 - RNA, 17 nt, Human
gcacguuuaaaguucug

SEQ ID NO: 3756455 - RNA, 18 nt, Human
gcacuaaagccagccuga

SEQ ID NO: 3756456 - RNA, 19 nt, Human
gcacuaaagccagccugac

SEQ ID NO: 3756457 - RNA, 20 nt, Human
gcacuaaaguauguaaagua

SEQ ID NO: 3756458 - RNA, 22 nt, Human
gcacuaaaguauguaaaguaug

SEQ ID NO: 3756459 - RNA, 17 nt, Human
gcacuaaaucagagaca

SEQ ID NO: 3756460 - RNA, 17 nt, Human
gcacuaaggugugcucu

SEQ ID NO: 3756461 - RNA, 18 nt, Human
gcacuaaggugugcucug

SEQ ID NO: 3756462 - RNA, 22 nt, Human
gcacuaagucucuuuuuuacaa

SEQ ID NO: 3756463 - RNA, 16 nt, Human
gcacuacauaaacuga

SEQ ID NO: 3756464 - RNA, 12 nt, Human
gcacuacauuca

SEQ ID NO: 3756465 - RNA, 16 nt, Human
gcacuacauucauuua

SEQ ID NO: 3756466 - RNA, 21 nt, Human
gcacuacucccucaaagcaca

SEQ ID NO: 3756467 - RNA, 17 nt, Human
gcacuacuccucugcag

SEQ ID NO: 3756468 - RNA, 17 nt, Human
gcacuacucugugccag

SEQ ID NO: 3756469 - RNA, 17 nt, Human
gcacuacugacaugugg

SEQ ID NO: 3756470 - RNA, 18 nt, Human
gcacuacugacauguggg

SEQ ID NO: 3756471 - RNA, 14 nt, Human
gcacuacugggugu

SEQ ID NO: 3756472 - RNA, 19 nt, Human
gcacuacugggugucauuu

SEQ ID NO: 3756473 - RNA, 14 nt, Human
aaccacuuuuugca

SEQ ID NO: 3756474 - RNA, 15 nt, Human
aaccacuuuuugcag

SEQ ID NO: 3756475 - RNA, 17 nt, Human
aaccacuuuuugcagcu

SEQ ID NO: 3756476 - RNA, 13 nt, Human
aaccagacagagg

SEQ ID NO: 3756477 - RNA, 15 nt, Human
aaccagaccuggaag

SEQ ID NO: 3756478 - RNA, 14 nt, Human
aaccagacucuugc

SEQ ID NO: 3756479 - RNA, 23 nt, Human
aaccagaucuagucaaucaaguc

SEQ ID NO: 3756480 - RNA, 21 nt, Human
aaccagcaucccuugaccagg

SEQ ID NO: 3756481 - RNA, 14 nt, Human
aaccagcuaagaaa

SEQ ID NO: 3756482 - RNA, 14 nt, Human
aaccagcucagcac

SEQ ID NO: 3756483 - RNA, 17 nt, Human
aaccagcucagcacugc

SEQ ID NO: 3756484 - RNA, 22 nt, Human
aaccagcucagcacugccugcu

SEQ ID NO: 3756485 - RNA, 21 nt, Human
aaccagcuuccuucagagagc

SEQ ID NO: 3756486 - RNA, 15 nt, Human
aaccaggaaauggaa

SEQ ID NO: 3756487 - RNA, 17 nt, Human
aaccaggagcugcucac

SEQ ID NO: 3756488 - RNA, 14 nt, Human
aaccaggcuuucua

SEQ ID NO: 3756489 - RNA, 19 nt, Human
aaccagggaagcugucccu

SEQ ID NO: 3756490 - RNA, 16 nt, Human
aaccagggagacugca

SEQ ID NO: 3756491 - RNA, 21 nt, Human
aaccagggagccccuuugaug

SEQ ID NO: 3756492 - RNA, 17 nt, Human
aaccagggcaccaagcc

SEQ ID NO: 3756493 - RNA, 16 nt, Human
aaccagguccaaugag

SEQ ID NO: 3756494 - RNA, 15 nt, Human
aaccaguauuguaca

SEQ ID NO: 3756495 - RNA, 22 nt, Human
aaccaguauuguacaaaguauu

SEQ ID NO: 3756496 - RNA, 18 nt, Human
aaccaguccccccacccu

SEQ ID NO: 3756497 - RNA, 14 nt, Human
aaccagucugaagu

SEQ ID NO: 3756498 - RNA, 21 nt, Human
aaccagucugaaguuucauuu

SEQ ID NO: 3756499 - RNA, 23 nt, Human
aaccagucugaaguuucauuuau

SEQ ID NO: 3756500 - RNA, 19 nt, Human
aaccaguguuguggauuua

SEQ ID NO: 3756501 - RNA, 13 nt, Human
aaccaguuggcua

SEQ ID NO: 3756502 - RNA, 18 nt, Human
aaccauaaaauguccagu

SEQ ID NO: 3756503 - RNA, 14 nt, Human
aaccauaaauucaa

SEQ ID NO: 3756504 - RNA, 18 nt, Human
aaccauaacaacuucaua

SEQ ID NO: 3756505 - RNA, 13 nt, Human
aaccauacugaaa

SEQ ID NO: 3756506 - RNA, 15 nt, Human
aaccauaguuacugu

SEQ ID NO: 3756507 - RNA, 20 nt, Human
aaccauaguuacuguaaaau

SEQ ID NO: 3756508 - RNA, 14 nt, Human
aaccauaugauacu

SEQ ID NO: 3756509 - RNA, 12 nt, Human
aaccauaugccc

SEQ ID NO: 3756510 - RNA, 16 nt, Human
aaccaucauuauaaac

SEQ ID NO: 3756511 - RNA, 12 nt, Human
aaccaucauuga

SEQ ID NO: 3756512 - RNA, 17 nt, Human
aaccaucauugaaaucu

SEQ ID NO: 3756513 - RNA, 21 nt, Human
aaccaucauugaaaucuuuuu

SEQ ID NO: 3756514 - RNA, 18 nt, Human
aaccaucucccuggugcu

SEQ ID NO: 3756515 - RNA, 19 nt, Human
aaccaucucccuggugcuu

SEQ ID NO: 3756516 - RNA, 13 nt, Human
aaccaucuggccu

SEQ ID NO: 3756517 - RNA, 19 nt, Human
aaccaucuugugucuuugg

SEQ ID NO: 3756518 - RNA, 16 nt, Human
aaccaugaagacagga

SEQ ID NO: 3756519 - RNA, 20 nt, Human
aaccaugaagucucuaacaa

SEQ ID NO: 3756520 - RNA, 13 nt, Human
aaccauggacuuu

SEQ ID NO: 3756521 - RNA, 18 nt, Human
aaccaugggauaaaugcc

SEQ ID NO: 3756522 - RNA, 21 nt, Human
aaccaugggauaaaugccauc

SEQ ID NO: 3756523 - RNA, 17 nt, Human
aaccauguagaaaauuu

SEQ ID NO: 3756524 - RNA, 17 nt, Human
aaccaugucauuucaga

SEQ ID NO: 3756525 - RNA, 23 nt, Human
aaccauuaaaacugaagucugaa

SEQ ID NO: 3756526 - RNA, 19 nt, Human
aaccauuauaaccuuaauu

SEQ ID NO: 3756527 - RNA, 19 nt, Human
aaccauucaaaaauuucac

SEQ ID NO: 3756528 - RNA, 16 nt, Human
aaccauugugcauucu

SEQ ID NO: 3756529 - RNA, 13 nt, Human
aaccauuuaucuu

SEQ ID NO: 3756530 - RNA, 15 nt, Human
aaccauuuccucaga

SEQ ID NO: 3756531 - RNA, 16 nt, Human
aaccauuuccucagac

SEQ ID NO: 3756532 - RNA, 14 nt, Human
aaccauuuuauaaa

SEQ ID NO: 3756533 - RNA, 17 nt, Human
aaccauuuuauaaagug

SEQ ID NO: 3756534 - RNA, 22 nt, Human
aaccauuuuuguuacucucuuc

SEQ ID NO: 3756535 - RNA, 20 nt, Human
aaccauuuuuuuucagcaga

SEQ ID NO: 3756536 - RNA, 13 nt, Human
aacccaaaccugg

SEQ ID NO: 3756537 - RNA, 16 nt, Human
aacccaaaccuggaga

SEQ ID NO: 3756538 - RNA, 18 nt, Human
aacccaaauguucaucaa

SEQ ID NO: 3756539 - RNA, 14 nt, Human
aacccaacaugacu

SEQ ID NO: 3756540 - RNA, 13 nt, Human
aacccaagcuccu

SEQ ID NO: 3756541 - RNA, 16 nt, Human
aacccaaggagcacag

SEQ ID NO: 3756542 - RNA, 17 nt, Human
aacccaaggagcacagg

SEQ ID NO: 3756543 - RNA, 16 nt, Human
aacccaagugggggca

SEQ ID NO: 3756544 - RNA, 15 nt, Human
aacccagacucagac

SEQ ID NO: 3756545 - RNA, 18 nt, Human
aacccagacucagacauu

SEQ ID NO: 3756546 - RNA, 11 nt, Human
aacccagagag

SEQ ID NO: 3756547 - RNA, 10 nt, Human
aacccagccg

SEQ ID NO: 3756548 - RNA, 14 nt, Human
aacccagccgcugc

SEQ ID NO: 3756549 - RNA, 13 nt, Human
aacccagcucugg

SEQ ID NO: 3756550 - RNA, 14 nt, Human
aacccagcucuggu

SEQ ID NO: 3756551 - RNA, 11 nt, Human
aacccagcugc

SEQ ID NO: 3756552 - RNA, 15 nt, Human
aacccagcuuacauu

SEQ ID NO: 3756553 - RNA, 17 nt, Human
aacccaggacgcuucug

SEQ ID NO: 3756554 - RNA, 18 nt, Human
aacccaggacgcuucuga

SEQ ID NO: 3756555 - RNA, 19 nt, Human
aacccaggacgcuucugaa

SEQ ID NO: 3756556 - RNA, 22 nt, Human
aacccaggagcauccaccuccu

SEQ ID NO: 3756557 - RNA, 20 nt, Human
aacccagggcucugccccag

SEQ ID NO: 3756558 - RNA, 21 nt, Human
aacccagggcucugccccagu

SEQ ID NO: 3756559 - RNA, 15 nt, Human
aacccaguugccauc

SEQ ID NO: 3756560 - RNA, 16 nt, Human
aacccaguuucccguc

SEQ ID NO: 3756561 - RNA, 21 nt, Human
aacccauaggcccacacacag

SEQ ID NO: 3756562 - RNA, 22 nt, Human
aacccauaggcccacacacagg

SEQ ID NO: 3756563 - RNA, 20 nt, Human
aacccauauuuguacaccaa

SEQ ID NO: 3756564 - RNA, 20 nt, Human
aacccaucaacaaaaauugu

SEQ ID NO: 3756565 - RNA, 19 nt, Human
aacccaucagaaggagaag

SEQ ID NO: 3756566 - RNA, 20 nt, Human
aacccaucuaccccuggaug

SEQ ID NO: 3756567 - RNA, 16 nt, Human
aaccccaacuccagua

SEQ ID NO: 3756568 - RNA, 13 nt, Human
aaccccaggcccc

SEQ ID NO: 3756569 - RNA, 18 nt, Human
aaccccauguccucagca

SEQ ID NO: 3756570 - RNA, 12 nt, Human
aacccccacaca

SEQ ID NO: 3756571 - RNA, 15 nt, Human
aacccccacacacac

SEQ ID NO: 3756572 - RNA, 19 nt, Human
aacccccaccccacacuug

SEQ ID NO: 3756573 - RNA, 15 nt, Human
aacccccagccugcu

SEQ ID NO: 3756574 - RNA, 12 nt, Human
aacccccagcuc

SEQ ID NO: 3756575 - RNA, 11 nt, Human
aaccccccagc

SEQ ID NO: 3756576 - RNA, 19 nt, Human
aaccccccagcacugagga

SEQ ID NO: 3756577 - RNA, 15 nt, Human
aaccccccuguacac

SEQ ID NO: 3756578 - RNA, 15 nt, Human
aaccccgucaacaaa

SEQ ID NO: 3756579 - RNA, 18 nt, Human
aaccccgucaacaaaucu

SEQ ID NO: 3756580 - RNA, 15 nt, Human
aaccccucgcccagu

SEQ ID NO: 3756581 - RNA, 17 nt, Human
aaccccuguaggccuca

SEQ ID NO: 3756582 - RNA, 15 nt, Human
aaccccuucucugug

SEQ ID NO: 3756583 - RNA, 16 nt, Human
aaccccuucucuguga

SEQ ID NO: 3756584 - RNA, 20 nt, Human
aacccgacagagggaagaaa

SEQ ID NO: 3756585 - RNA, 22 nt, Human
aacccgaggcugagaaucagac

SEQ ID NO: 3756586 - RNA, 23 nt, Human
aacccgagucauucguucugugg

SEQ ID NO: 3756587 - RNA, 17 nt, Human
aacccguggaggcugcu

SEQ ID NO: 3756588 - RNA, 18 nt, Human
aacccguggaggcugcuc

SEQ ID NO: 3756589 - RNA, 18 nt, Human
aacccuagccuugcuugu

SEQ ID NO: 3756590 - RNA, 23 nt, Human
aacccuaucuccugacagaaggu

SEQ ID NO: 3756591 - RNA, 15 nt, Human
aacccuauugguaaa

SEQ ID NO: 3756592 - RNA, 20 nt, Human
aacccucacaucagagugac

SEQ ID NO: 3756593 - RNA, 19 nt, Human
aacccucagagccaccccu

SEQ ID NO: 3756594 - RNA, 17 nt, Human
aacccucaggggaaaac

SEQ ID NO: 3756595 - RNA, 22 nt, Human
aacccucaggggaaaacuguua

SEQ ID NO: 3756596 - RNA, 14 nt, Human
aacccucccucagc

SEQ ID NO: 3756597 - RNA, 15 nt, Human
aacccucccucagcc

SEQ ID NO: 3756598 - RNA, 18 nt, Human
aacccucuguuccuuccc

SEQ ID NO: 3756599 - RNA, 21 nt, Human
aacccugacaaauuuuaauua

SEQ ID NO: 3756600 - RNA, 19 nt, Human
aacccugccccugccccgu

SEQ ID NO: 3756601 - RNA, 18 nt, Human
aacccugccgucaccacc

SEQ ID NO: 3756602 - RNA, 17 nt, Human
aacccugcguggggaca

SEQ ID NO: 3756603 - RNA, 19 nt, Human
aacccuggggaaggagcca

SEQ ID NO: 3756604 - RNA, 18 nt, Human
aacccuggggccugacug

SEQ ID NO: 3756605 - RNA, 17 nt, Human
aacccugucaaacauua

SEQ ID NO: 3756606 - RNA, 21 nt, Human
aacccugugcugguguccuga

SEQ ID NO: 3756607 - RNA, 13 nt, Human
aacccuguuuccu

SEQ ID NO: 3756608 - RNA, 20 nt, Human
aacccuguuuuauacuguac

SEQ ID NO: 3756609 - RNA, 22 nt, Human
aacccuguuuuauacuguacuu

SEQ ID NO: 3756610 - RNA, 16 nt, Human
aacccuucaucuuccu

SEQ ID NO: 3756611 - RNA, 20 nt, Human
aacccuugggccagaaguac

SEQ ID NO: 3756612 - RNA, 16 nt, Human
aacccuuuuggccccc

SEQ ID NO: 3756613 - RNA, 19 nt, Human
aacccuuuugucugccucu

SEQ ID NO: 3756614 - RNA, 17 nt, Human
aaccgagcaaagaucaa

SEQ ID NO: 3756615 - RNA, 13 nt, Human
aaccgcacagcuc

SEQ ID NO: 3756616 - RNA, 15 nt, Human
aaccgcacagcucag

SEQ ID NO: 3756617 - RNA, 18 nt, Human
aaccgcacucacccaugu

SEQ ID NO: 3756618 - RNA, 15 nt, Human
aaccgcaggaagcug

SEQ ID NO: 3756619 - RNA, 22 nt, Human
aaccgccagcucuguucuuccu

SEQ ID NO: 3756620 - RNA, 16 nt, Human
aaccgcucaccuagag

SEQ ID NO: 3756621 - RNA, 21 nt, Human
aaccggauggcggacaccugg

SEQ ID NO: 3756622 - RNA, 15 nt, Human
aaccgucaauaggca

SEQ ID NO: 3756623 - RNA, 13 nt, Human
aaccguccucuuu

SEQ ID NO: 3756624 - RNA, 21 nt, Human
gcacuagccaaaccucaccaa

SEQ ID NO: 3756625 - RNA, 18 nt, Human
gcacuagccuuuggcucu

SEQ ID NO: 3756626 - RNA, 19 nt, Human
gcacuagguucaauucccu

SEQ ID NO: 3756627 - RNA, 15 nt, Human
gcacuauaauguaag

SEQ ID NO: 3756628 - RNA, 15 nt, Human
gcacuauaugcaaac

SEQ ID NO: 3756629 - RNA, 18 nt, Human
gcacuauaugcaaacagg

SEQ ID NO: 3756630 - RNA, 19 nt, Human
gcacuaucuuuaaacgaaa

SEQ ID NO: 3756631 - RNA, 17 nt, Human
gcacuaugcuuuccuuc

SEQ ID NO: 3756632 - RNA, 18 nt, Human
gcacucaaaucuuaagaa

SEQ ID NO: 3756633 - RNA, 20 nt, Human
gcacucaaaucuuaagaaau

SEQ ID NO: 3756634 - RNA, 13 nt, Human
gcacucaacauga

SEQ ID NO: 3756635 - RNA, 14 nt, Human
gcacucacaugcug

SEQ ID NO: 3756636 - RNA, 23 nt, Human
gcacucacccaugugccaaggug

SEQ ID NO: 3756637 - RNA, 17 nt, Human
gcacucaggcucuccau

SEQ ID NO: 3756638 - RNA, 19 nt, Human
gcacucaggugacauccuc

SEQ ID NO: 3756639 - RNA, 18 nt, Human
gcacuccaaccuaaccug

SEQ ID NO: 3756640 - RNA, 15 nt, Human
gcacuccagccuggg

SEQ ID NO: 3756641 - RNA, 17 nt, Human
gcacuccagccuggggg

SEQ ID NO: 3756642 - RNA, 19 nt, Human
gcacuccagccugggggac

SEQ ID NO: 3756643 - RNA, 16 nt, Human
gcacuccaugagcacc

SEQ ID NO: 3756644 - RNA, 18 nt, Human
gcacucccaccugacaca

SEQ ID NO: 3756645 - RNA, 22 nt, Human
gcacucccaccugacacaccag

SEQ ID NO: 3756646 - RNA, 16 nt, Human
gcacuccccugcuggg

SEQ ID NO: 3756647 - RNA, 18 nt, Human
gcacucccuccagcacaa

SEQ ID NO: 3756648 - RNA, 20 nt, Human
gcacucgcuagcaguggcag

SEQ ID NO: 3756649 - RNA, 17 nt, Human
gcacucuaaaagguuca

SEQ ID NO: 3756650 - RNA, 21 nt, Human
gcacucuaaaagguucaggga

SEQ ID NO: 3756651 - RNA, 17 nt, Human
gcacucuguauauuuga

SEQ ID NO: 3756652 - RNA, 11 nt, Human
gcacucugugc

SEQ ID NO: 3756653 - RNA, 13 nt, Human
gcacucugugccc

SEQ ID NO: 3756654 - RNA, 14 nt, Human
gcacucugugccca

SEQ ID NO: 3756655 - RNA, 21 nt, Human
gcacucugugcccaugggcac

SEQ ID NO: 3756656 - RNA, 14 nt, Human
gcacucuguuauuu

SEQ ID NO: 3756657 - RNA, 13 nt, Human
gcacucuucaugg

SEQ ID NO: 3756658 - RNA, 15 nt, Human
gcacucuucauggug

SEQ ID NO: 3756659 - RNA, 18 nt, Human
gcacucuuguucccacac

SEQ ID NO: 3756660 - RNA, 20 nt, Human
gcacucuuuaagggagugua

SEQ ID NO: 3756661 - RNA, 22 nt, Human
gcacugaaagucacggcugcgc

SEQ ID NO: 3756662 - RNA, 22 nt, Human
gcacugaaggcuuucagggccu

SEQ ID NO: 3756663 - RNA, 22 nt, Human
gcacugaagggauaugugaaac

SEQ ID NO: 3756664 - RNA, 17 nt, Human
gcacugaagugcuuagu

SEQ ID NO: 3756665 - RNA, 22 nt, Human
gcacugaauaaauuguacagcc

SEQ ID NO: 3756666 - RNA, 17 nt, Human
gcacugacagauuucca

SEQ ID NO: 3756667 - RNA, 20 nt, Human
gcacugacccacagccucug

SEQ ID NO: 3756668 - RNA, 19 nt, Human
gcacugacggacucaugau

SEQ ID NO: 3756669 - RNA, 13 nt, Human
gcacugacucugg

SEQ ID NO: 3756670 - RNA, 16 nt, Human
gcacugacucuggaaa

SEQ ID NO: 3756671 - RNA, 17 nt, Human
gcacugacucuggaaaa

SEQ ID NO: 3756672 - RNA, 18 nt, Human
gcacugacucuggaaaag

SEQ ID NO: 3756673 - RNA, 17 nt, Human
gcacugacugggcauag

SEQ ID NO: 3756674 - RNA, 13 nt, Human
gcacugagccccc

SEQ ID NO: 3756675 - RNA, 14 nt, Human
gcacugagggccac

SEQ ID NO: 3756676 - RNA, 16 nt, Human
gcacugagggccacac

SEQ ID NO: 3756677 - RNA, 20 nt, Human
gcacugagggccacacuauu

SEQ ID NO: 3756678 - RNA, 18 nt, Human
gcacugaugcugccccuc

SEQ ID NO: 3756679 - RNA, 17 nt, Human
gcacugauguuguguuu

SEQ ID NO: 3756680 - RNA, 15 nt, Human
gcacugauuucacaa

SEQ ID NO: 3756681 - RNA, 13 nt, Human
gcacugcaggggc

SEQ ID NO: 3756682 - RNA, 13 nt, Human
gcacugccacugg

SEQ ID NO: 3756683 - RNA, 18 nt, Human
gcacugccaggagggaca

SEQ ID NO: 3756684 - RNA, 23 nt, Human
gcacugccaggagggacaaagga

SEQ ID NO: 3756685 - RNA, 21 nt, Human
gcacugcccauggacaggcug

SEQ ID NO: 3756686 - RNA, 12 nt, Human
gcacugcccugg

SEQ ID NO: 3756687 - RNA, 16 nt, Human
gcacugccucucacag

SEQ ID NO: 3756688 - RNA, 20 nt, Human
gcacugcuaggcgagugcca

SEQ ID NO: 3756689 - RNA, 13 nt, Human
gcacugcucucac

SEQ ID NO: 3756690 - RNA, 17 nt, Human
gcacugcuggguggccc

SEQ ID NO: 3756691 - RNA, 18 nt, Human
gcacugcuggguggccca

SEQ ID NO: 3756692 - RNA, 19 nt, Human
gcacugcuggguggcccau

SEQ ID NO: 3756693 - RNA, 15 nt, Human
gcacugcugugcugu

SEQ ID NO: 3756694 - RNA, 12 nt, Human
gcacugcuucca

SEQ ID NO: 3756695 - RNA, 18 nt, Human
gcacugcuuccagugagg

SEQ ID NO: 3756696 - RNA, 20 nt, Human
gcacugcuuccagugaggcu

SEQ ID NO: 3756697 - RNA, 22 nt, Human
gcacugcuuccagugaggcucu

SEQ ID NO: 3756698 - RNA, 11 nt, Human
gcacuggccug

SEQ ID NO: 3756699 - RNA, 21 nt, Human
gcacuggccuucugaugaaau

SEQ ID NO: 3756700 - RNA, 15 nt, Human
gcacuggcucucucc

SEQ ID NO: 3756701 - RNA, 16 nt, Human
gcacuggcucucucca

SEQ ID NO: 3756702 - RNA, 19 nt, Human
gcacuggcucucuccagga

SEQ ID NO: 3756703 - RNA, 20 nt, Human
gcacugggaggcuccccuuc

SEQ ID NO: 3756704 - RNA, 23 nt, Human
gcacugggaugagccgcugugag

SEQ ID NO: 3756705 - RNA, 13 nt, Human
gcacugggcauga

SEQ ID NO: 3756706 - RNA, 12 nt, Human
gcacugggcuug

SEQ ID NO: 3756707 - RNA, 15 nt, Human
gcacuggggcagggg

SEQ ID NO: 3756708 - RNA, 18 nt, Human
gcacuggguugcagggga

SEQ ID NO: 3756709 - RNA, 19 nt, Human
gcacugguagguugggaca

SEQ ID NO: 3756710 - RNA, 22 nt, Human
gcacugguggcccgacagccug

SEQ ID NO: 3756711 - RNA, 16 nt, Human
gcacugucacuuugcu

SEQ ID NO: 3756712 - RNA, 16 nt, Human
gcacuguccugcucca

SEQ ID NO: 3756713 - RNA, 17 nt, Human
gcacuguccugcuccac

SEQ ID NO: 3756714 - RNA, 20 nt, Human
gcacugucucaguuucacuu

SEQ ID NO: 3756715 - RNA, 11 nt, Human
gcacugugaag

SEQ ID NO: 3756716 - RNA, 14 nt, Human
gcacugugaaggac

SEQ ID NO: 3756717 - RNA, 19 nt, Human
gcacugugacccccagcuc

SEQ ID NO: 3756718 - RNA, 14 nt, Human
gcacugugcucagg

SEQ ID NO: 3756719 - RNA, 14 nt, Human
gcacuguggccuug

SEQ ID NO: 3756720 - RNA, 15 nt, Human
gcacuguucccccug

SEQ ID NO: 3756721 - RNA, 14 nt, Human
gcacuguugagaag

SEQ ID NO: 3756722 - RNA, 18 nt, Human
gcacuguugagaaggaga

SEQ ID NO: 3756723 - RNA, 18 nt, Human
gcacuguugauguaucug

SEQ ID NO: 3756724 - RNA, 19 nt, Human
gcacuguugauguaucuga

SEQ ID NO: 3756725 - RNA, 20 nt, Human
gcacuguugcaaacucagug

SEQ ID NO: 3756726 - RNA, 21 nt, Human
gcacuuaaauaucaaucauuu

SEQ ID NO: 3756727 - RNA, 15 nt, Human
gcacuuacaauccca

SEQ ID NO: 3756728 - RNA, 22 nt, Human
gcacuuacugguaggaccaagc

SEQ ID NO: 3756729 - RNA, 19 nt, Human
gcacuuagcuaucagaaga

SEQ ID NO: 3756730 - RNA, 16 nt, Human
gcacuuaugauuucau

SEQ ID NO: 3756731 - RNA, 18 nt, Human
gcacuuauugaauauaug

SEQ ID NO: 3756732 - RNA, 20 nt, Human
gcacuuauugaauauaugau

SEQ ID NO: 3756733 - RNA, 18 nt, Human
gcacuuauugaccauuuu

SEQ ID NO: 3756734 - RNA, 16 nt, Human
gcacuuauuguaaauu

SEQ ID NO: 3756735 - RNA, 17 nt, Human
gcacuucagaauuccau

SEQ ID NO: 3756736 - RNA, 11 nt, Human
gcacuucccug

SEQ ID NO: 3756737 - RNA, 20 nt, Human
gcacuuccucucgcggcccu

SEQ ID NO: 3756738 - RNA, 21 nt, Human
gcacuugcacgcccaugugug

SEQ ID NO: 3756739 - RNA, 13 nt, Human
gcacuugccuggg

SEQ ID NO: 3756740 - RNA, 18 nt, Human
gcacuugccugggucaca

SEQ ID NO: 3756741 - RNA, 22 nt, Human
gcacuugcgguuccggcaugga

SEQ ID NO: 3756742 - RNA, 18 nt, Human
gcacuuggacucuugcuc

SEQ ID NO: 3756743 - RNA, 16 nt, Human
gcacuuggagccaagg

SEQ ID NO: 3756744 - RNA, 16 nt, Human
gcacuuggcagccuug

SEQ ID NO: 3756745 - RNA, 21 nt, Human
gcacuugggggcucagcaagg

SEQ ID NO: 3756746 - RNA, 15 nt, Human
gcacuuguauauacg

SEQ ID NO: 3756747 - RNA, 20 nt, Human
gcacuugugauuauuuauua

SEQ ID NO: 3756748 - RNA, 21 nt, Human
gcacuugugauuauuuauuau

SEQ ID NO: 3756749 - RNA, 18 nt, Human
gcacuuuaaaugaagcua

SEQ ID NO: 3756750 - RNA, 18 nt, Human
gcacuuuagaauaugccu

SEQ ID NO: 3756751 - RNA, 13 nt, Human
gcacuuucauugc

SEQ ID NO: 3756752 - RNA, 21 nt, Human
gcacuuucauugccagugucu

SEQ ID NO: 3756753 - RNA, 19 nt, Human
gcacuuuccacuucuuccu

SEQ ID NO: 3756754 - RNA, 20 nt, Human
gcacuuuccacuucuuccuu

SEQ ID NO: 3756755 - RNA, 22 nt, Human
gcacuuucuacaaugugaacuu

SEQ ID NO: 3756756 - RNA, 16 nt, Human
gcacuuugaaauaccu

SEQ ID NO: 3756757 - RNA, 19 nt, Human
gcacuuugaaauaccucau

SEQ ID NO: 3756758 - RNA, 21 nt, Human
gcacuuugaaauaccucaugu

SEQ ID NO: 3756759 - RNA, 20 nt, Human
gcacuuuggcuuauaauucu

SEQ ID NO: 3756760 - RNA, 19 nt, Human
gcacuuugggaggccaagg

SEQ ID NO: 3756761 - RNA, 16 nt, Human
gcacuuugggaggccu

SEQ ID NO: 3756762 - RNA, 18 nt, Human
gcacuuugggaggcugag

SEQ ID NO: 3756763 - RNA, 13 nt, Human
gcacuuuguaaau

SEQ ID NO: 3756764 - RNA, 11 nt, Human
gcacuuuguag

SEQ ID NO: 3756765 - RNA, 16 nt, Human
gcacuuuguucuggcu

SEQ ID NO: 3756766 - RNA, 16 nt, Human
gcacuuuuuaauucac

SEQ ID NO: 3756767 - RNA, 20 nt, Human
gcacuuuuuaauucaccaaa

SEQ ID NO: 3756768 - RNA, 14 nt, Human
gcacuuuuucauuu

SEQ ID NO: 3756769 - RNA, 22 nt, Human
gcacuuuuucuuaaucauuuuu

SEQ ID NO: 3756770 - RNA, 17 nt, Human
gcagaaaaaggcugugc

SEQ ID NO: 3756771 - RNA, 14 nt, Human
gcagaaaacauugu

SEQ ID NO: 3756772 - RNA, 15 nt, Human
gcagaaaacauuguu

SEQ ID NO: 3756773 - RNA, 16 nt, Human
gcagaaaagcaccugc

SEQ ID NO: 3756774 - RNA, 15 nt, Human
cugcccaggggugcc

SEQ ID NO: 3756775 - RNA, 20 nt, Human
cugcccaggggugcccccuc

SEQ ID NO: 3756776 - RNA, 18 nt, Human
cugcccagucccccaacc

SEQ ID NO: 3756777 - RNA, 19 nt, Human
cugcccagugcacuugcug

SEQ ID NO: 3756778 - RNA, 21 nt, Human
cugcccagugcacuugcugga

SEQ ID NO: 3756779 - RNA, 12 nt, Human
cugcccaguguu

SEQ ID NO: 3756780 - RNA, 20 nt, Human
cugcccaguguuguuuguaa

SEQ ID NO: 3756781 - RNA, 13 nt, Human
cugcccaguugca

SEQ ID NO: 3756782 - RNA, 18 nt, Human
cugcccaucacaggguug

SEQ ID NO: 3756783 - RNA, 21 nt, Human
cugcccaucgugaagaagccu

SEQ ID NO: 3756784 - RNA, 21 nt, Human
cugcccauucaccaaaauuau

SEQ ID NO: 3756785 - RNA, 15 nt, Human
cugcccauuccccag

SEQ ID NO: 3756786 - RNA, 17 nt, Human
cugccccaaccugcuga

SEQ ID NO: 3756787 - RNA, 18 nt, Human
cugccccacuuguccuua

SEQ ID NO: 3756788 - RNA, 13 nt, Human
cugccccagccca

SEQ ID NO: 3756789 - RNA, 13 nt, Human
cugccccaggccu

SEQ ID NO: 3756790 - RNA, 19 nt, Human
cugccccagggcucccggc

SEQ ID NO: 3756791 - RNA, 16 nt, Human
cugccccauccuccag

SEQ ID NO: 3756792 - RNA, 13 nt, Human
cugccccaucucc

SEQ ID NO: 3756793 - RNA, 20 nt, Human
cugccccaucuccccucagc

SEQ ID NO: 3756794 - RNA, 14 nt, Human
cugcccccaaauaa

SEQ ID NO: 3756795 - RNA, 15 nt, Human
cugcccccaaauaag

SEQ ID NO: 3756796 - RNA, 20 nt, Human
cugcccccacaccuggcccu

SEQ ID NO: 3756797 - RNA, 15 nt, Human
cugcccccaccccgg

SEQ ID NO: 3756798 - RNA, 14 nt, Human
cugcccccacuucc

SEQ ID NO: 3756799 - RNA, 18 nt, Human
cugcccccagagccacag

SEQ ID NO: 3756800 - RNA, 19 nt, Human
cugcccccagagccacagu

SEQ ID NO: 3756801 - RNA, 20 nt, Human
cugcccccagagccacaguu

SEQ ID NO: 3756802 - RNA, 15 nt, Human
cugcccccagcccaa

SEQ ID NO: 3756803 - RNA, 16 nt, Human
cugcccccagccccgg

SEQ ID NO: 3756804 - RNA, 19 nt, Human
cugcccccaggacugggcc

SEQ ID NO: 3756805 - RNA, 13 nt, Human
cugccccccagcc

SEQ ID NO: 3756806 - RNA, 14 nt, Human
cugcccccgcaucc

SEQ ID NO: 3756807 - RNA, 16 nt, Human
cugcccccgcaucccc

SEQ ID NO: 3756808 - RNA, 17 nt, Human
cugcccccgcucauggg

SEQ ID NO: 3756809 - RNA, 18 nt, Human
cugcccccuccccuucac

SEQ ID NO: 3756810 - RNA, 13 nt, Human
cugcccccuccug

SEQ ID NO: 3756811 - RNA, 18 nt, Human
cugcccccucugcccugc

SEQ ID NO: 3756812 - RNA, 18 nt, Human
cugcccccugaaacuuau

SEQ ID NO: 3756813 - RNA, 20 nt, Human
cugcccccugaaacuuauuu

SEQ ID NO: 3756814 - RNA, 22 nt, Human
cugcccccugcaggaaggagcu

SEQ ID NO: 3756815 - RNA, 23 nt, Human
cugcccccugcaggaaggagcug

SEQ ID NO: 3756816 - RNA, 13 nt, Human
cugcccccuggug

SEQ ID NO: 3756817 - RNA, 14 nt, Human
cugcccccuucucc

SEQ ID NO: 3756818 - RNA, 16 nt, Human
cugcccccuucuccca

SEQ ID NO: 3756819 - RNA, 19 nt, Human
cugcccccuucucccacac

SEQ ID NO: 3756820 - RNA, 16 nt, Human
cugccccgcccagcug

SEQ ID NO: 3756821 - RNA, 16 nt, Human
cugccccgcccccagu

SEQ ID NO: 3756822 - RNA, 15 nt, Human
cugccccgcccucau

SEQ ID NO: 3756823 - RNA, 20 nt, Human
cugccccuaaucucuguagg

SEQ ID NO: 3756824 - RNA, 21 nt, Human
cugccccuacccuggacuugc

SEQ ID NO: 3756825 - RNA, 22 nt, Human
cugccccucaacucuccuccag

SEQ ID NO: 3756826 - RNA, 15 nt, Human
cugccccucagagac

SEQ ID NO: 3756827 - RNA, 13 nt, Human
cugccccucccag

SEQ ID NO: 3756828 - RNA, 15 nt, Human
cugccccucccagaa

SEQ ID NO: 3756829 - RNA, 22 nt, Human
cugccccucccccaacccccac

SEQ ID NO: 3756830 - RNA, 14 nt, Human
cugccccucccuuc

SEQ ID NO: 3756831 - RNA, 18 nt, Human
cugccccuccucucugcc

SEQ ID NO: 3756832 - RNA, 13 nt, Human
cugccccucucac

SEQ ID NO: 3756833 - RNA, 17 nt, Human
cugccccucucaccaaa

SEQ ID NO: 3756834 - RNA, 13 nt, Human
cugccccucuuuc

SEQ ID NO: 3756835 - RNA, 13 nt, Human
cugccccugcccc

SEQ ID NO: 3756836 - RNA, 12 nt, Human
cugccccugccu

SEQ ID NO: 3756837 - RNA, 22 nt, Human
cugccccuuccuuuaaaaaacu

SEQ ID NO: 3756838 - RNA, 19 nt, Human
cugccccuucuacacucuc

SEQ ID NO: 3756839 - RNA, 20 nt, Human
cugccccuucuacacucucc

SEQ ID NO: 3756840 - RNA, 22 nt, Human
cugccccuucuacacucuccug

SEQ ID NO: 3756841 - RNA, 17 nt, Human
cugcccgagcuggugca

SEQ ID NO: 3756842 - RNA, 17 nt, Human
cugcccgcacacccuca

SEQ ID NO: 3756843 - RNA, 15 nt, Human
cugcccgcacagcag

SEQ ID NO: 3756844 - RNA, 16 nt, Human
cugcccgcacagcagc

SEQ ID NO: 3756845 - RNA, 15 nt, Human
cugcccgccugccca

SEQ ID NO: 3756846 - RNA, 21 nt, Human
cugcccgccugcccaccugcc

SEQ ID NO: 3756847 - RNA, 22 nt, Human
cugcccgccugcccaccugccu

SEQ ID NO: 3756848 - RNA, 16 nt, Human
cugcccgcucccagug

SEQ ID NO: 3756849 - RNA, 17 nt, Human
cugcccgcucccagugu

SEQ ID NO: 3756850 - RNA, 20 nt, Human
cugcccggcaggguccuaga

SEQ ID NO: 3756851 - RNA, 17 nt, Human
cugcccggcgcccucug

SEQ ID NO: 3756852 - RNA, 22 nt, Human
cugcccggcgcccucuguccug

SEQ ID NO: 3756853 - RNA, 22 nt, Human
cugcccggggcagcugccagag

SEQ ID NO: 3756854 - RNA, 23 nt, Human
cugcccgucucucucccauggag

SEQ ID NO: 3756855 - RNA, 24 nt, Human
cugcccgucucucucccauggagc

SEQ ID NO: 3756856 - RNA, 15 nt, Human
cugcccgucuucagc

SEQ ID NO: 3756857 - RNA, 16 nt, Human
cugcccgucuucagcc

SEQ ID NO: 3756858 - RNA, 16 nt, Human
cugcccuacucacucu

SEQ ID NO: 3756859 - RNA, 15 nt, Human
cugcccuagagcaca

SEQ ID NO: 3756860 - RNA, 12 nt, Human
cugcccuaggcu

SEQ ID NO: 3756861 - RNA, 17 nt, Human
cugcccuaugggccugc

SEQ ID NO: 3756862 - RNA, 21 nt, Human
cugcccuaugggccugccggg

SEQ ID NO: 3756863 - RNA, 13 nt, Human
cugcccucaggga

SEQ ID NO: 3756864 - RNA, 12 nt, Human
cugcccucaugg

SEQ ID NO: 3756865 - RNA, 20 nt, Human
cugcccucauuacugggccu

SEQ ID NO: 3756866 - RNA, 21 nt, Human
cugcccucauuacugggccuu

SEQ ID NO: 3756867 - RNA, 15 nt, Human
cugcccuccaucccg

SEQ ID NO: 3756868 - RNA, 10 nt, Human
cugcccuccc

SEQ ID NO: 3756869 - RNA, 22 nt, Human
cugcccuccccuccggacuggu

SEQ ID NO: 3756870 - RNA, 19 nt, Human
cugcccuccugugcucagc

SEQ ID NO: 3756871 - RNA, 18 nt, Human
cugcccucguggccagcc

SEQ ID NO: 3756872 - RNA, 20 nt, Human
cugcccucuagagccuucag

SEQ ID NO: 3756873 - RNA, 12 nt, Human
cugcccucuccu

SEQ ID NO: 3756874 - RNA, 12 nt, Human
cugcccugagaa

SEQ ID NO: 3756875 - RNA, 19 nt, Human
cugcccugagaagcugcuc

SEQ ID NO: 3756876 - RNA, 21 nt, Human
cugcccugagaagcugcucca

SEQ ID NO: 3756877 - RNA, 11 nt, Human
cugcccugcca

SEQ ID NO: 3756878 - RNA, 15 nt, Human
cugcccugccaccug

SEQ ID NO: 3756879 - RNA, 17 nt, Human
cugcccugccaccuguc

SEQ ID NO: 3756880 - RNA, 18 nt, Human
cugcccugccaccugucu

SEQ ID NO: 3756881 - RNA, 17 nt, Human
cugcgaucuucagagca

SEQ ID NO: 3756882 - RNA, 19 nt, Human
cugcgaucuucagagcagg

SEQ ID NO: 3756883 - RNA, 17 nt, Human
cugcgauuuugccugug

SEQ ID NO: 3756884 - RNA, 20 nt, Human
cugcgccacugcuccgugga

SEQ ID NO: 3756885 - RNA, 16 nt, Human
cugcgccaguccugcu

SEQ ID NO: 3756886 - RNA, 15 nt, Human
cugcgcccaccccgc

SEQ ID NO: 3756887 - RNA, 17 nt, Human
cugcgcccaccccgcuc

SEQ ID NO: 3756888 - RNA, 17 nt, Human
cugcgcccuuaccuucc

SEQ ID NO: 3756889 - RNA, 14 nt, Human
cugcgcccuucccc

SEQ ID NO: 3756890 - RNA, 12 nt, Human
cugcgccucagg

SEQ ID NO: 3756891 - RNA, 17 nt, Human
cugcgcucucuuugcaa

SEQ ID NO: 3756892 - RNA, 18 nt, Human
cugcgcucucuuugcaac

SEQ ID NO: 3756893 - RNA, 20 nt, Human
cugcggaaugaaccacaucu

SEQ ID NO: 3756894 - RNA, 21 nt, Human
cugcggaaugaaccacaucuu

SEQ ID NO: 3756895 - RNA, 20 nt, Human
cugcggagagaggccuuguc

SEQ ID NO: 3756896 - RNA, 20 nt, Human
cugcggagugaagaggggca

SEQ ID NO: 3756897 - RNA, 21 nt, Human
cugcggagugaagaggggcag

SEQ ID NO: 3756898 - RNA, 22 nt, Human
cugcggagugaagaggggcagc

SEQ ID NO: 3756899 - RNA, 15 nt, Human
cugcggaucucagcu

SEQ ID NO: 3756900 - RNA, 21 nt, Human
cugcggcacccuugcgcuuuu

SEQ ID NO: 3756901 - RNA, 18 nt, Human
cugcggcccaauccaagg

SEQ ID NO: 3756902 - RNA, 15 nt, Human
cugcggccugcugga

SEQ ID NO: 3756903 - RNA, 17 nt, Human
cugcggcguacaggcug

SEQ ID NO: 3756904 - RNA, 17 nt, Human
cugcggcugcugugugc

SEQ ID NO: 3756905 - RNA, 18 nt, Human
cugcgggaugguccuggg

SEQ ID NO: 3756906 - RNA, 22 nt, Human
cugcgggcuggguguggucucc

SEQ ID NO: 3756907 - RNA, 15 nt, Human
cugcggggcuuggcu

SEQ ID NO: 3756908 - RNA, 18 nt, Human
cugcgggggcagugcuca

SEQ ID NO: 3756909 - RNA, 23 nt, Human
cugcgggucacaggagggagggg

SEQ ID NO: 3756910 - RNA, 22 nt, Human
cugcgggugaacaaagcagcca

SEQ ID NO: 3756911 - RNA, 13 nt, Human
cugcggguggggc

SEQ ID NO: 3756912 - RNA, 15 nt, Human
cugcggucaaggcca

SEQ ID NO: 3756913 - RNA, 18 nt, Human
cugcgguccacccaggag

SEQ ID NO: 3756914 - RNA, 19 nt, Human
cugcgguccacccaggagc

SEQ ID NO: 3756915 - RNA, 19 nt, Human
cugcggugcuaucuccccc

SEQ ID NO: 3756916 - RNA, 14 nt, Human
cugcguccuccuca

SEQ ID NO: 3756917 - RNA, 13 nt, Human
cugcgucuauccu

SEQ ID NO: 3756918 - RNA, 16 nt, Human
cugcgucuggaggggc

SEQ ID NO: 3756919 - RNA, 23 nt, Human
cugcgucuggaggggccccugcu

SEQ ID NO: 3756920 - RNA, 17 nt, Human
cugcgucuuccgccccu

SEQ ID NO: 3756921 - RNA, 20 nt, Human
cugcgugccagucaagaaga

SEQ ID NO: 3756922 - RNA, 15 nt, Human
cugcguggcugaccc

SEQ ID NO: 3756923 - RNA, 20 nt, Human
cugcguggcugaccccccuc

SEQ ID NO: 3756924 - RNA, 18 nt, Human
cugcguggggacagggcu

SEQ ID NO: 3756925 - RNA, 20 nt, Human
cugcguggggacagggcucg

SEQ ID NO: 3756926 - RNA, 14 nt, Human
cugcgugggucaga

SEQ ID NO: 3756927 - RNA, 17 nt, Human
cugcguguucucagagg

SEQ ID NO: 3756928 - RNA, 18 nt, Human
cugcguugguccagagcg

SEQ ID NO: 3756929 - RNA, 12 nt, Human
cugcuaaauaaa

SEQ ID NO: 3756930 - RNA, 17 nt, Human
cugcuaaaucuccuauu

SEQ ID NO: 3756931 - RNA, 19 nt, Human
cugcuaaauugauguugau

SEQ ID NO: 3756932 - RNA, 18 nt, Human
cugcuaacggugcucagg

SEQ ID NO: 3756933 - RNA, 16 nt, Human
cugcuaaggucuugga

SEQ ID NO: 3756934 - RNA, 18 nt, Human
cugcuaaguauuucccag

SEQ ID NO: 3756935 - RNA, 16 nt, Human
cugcuaauauuuuccu

SEQ ID NO: 3756936 - RNA, 14 nt, Human
cugcuaaucuucag

SEQ ID NO: 3756937 - RNA, 16 nt, Human
cugcuaauuccccaga

SEQ ID NO: 3756938 - RNA, 23 nt, Human
cugcuaauucuuugcaaaaaucc

SEQ ID NO: 3756939 - RNA, 12 nt, Human
cugcuacaaaga

SEQ ID NO: 3756940 - RNA, 23 nt, Human
cugcuacaccuauuaucccagcu

SEQ ID NO: 3756941 - RNA, 12 nt, Human
cugcuacagcaa

SEQ ID NO: 3756942 - RNA, 15 nt, Human
cugcuacccuagaug

SEQ ID NO: 3756943 - RNA, 16 nt, Human
cugcuacccucccugc

SEQ ID NO: 3756944 - RNA, 20 nt, Human
cugcuacccucccugcuguc

SEQ ID NO: 3756945 - RNA, 12 nt, Human
cugcuaccucac

SEQ ID NO: 3756946 - RNA, 15 nt, Human
cugcuaccucacugg

SEQ ID NO: 3756947 - RNA, 20 nt, Human
cugcuacguuccuauuguca

SEQ ID NO: 3756948 - RNA, 22 nt, Human
cugcuacucuguuccuucacau

SEQ ID NO: 3756949 - RNA, 12 nt, Human
cugcuacugcca

SEQ ID NO: 3756950 - RNA, 15 nt, Human
cugcuacugccaacc

SEQ ID NO: 3756951 - RNA, 17 nt, Human
cugcuacuggcaaaagg

SEQ ID NO: 3756952 - RNA, 15 nt, Human
cugcuagaacauggu

SEQ ID NO: 3756953 - RNA, 13 nt, Human
cugcuagaacuuu

SEQ ID NO: 3756954 - RNA, 16 nt, Human
cugcuagagccagcaa

SEQ ID NO: 3756955 - RNA, 18 nt, Human
cugcuagcuagcucaacu

SEQ ID NO: 3756956 - RNA, 20 nt, Human
cugcuaggccagagcccacu

SEQ ID NO: 3756957 - RNA, 21 nt, Human
cugcuaggccagagcccacuc

SEQ ID NO: 3756958 - RNA, 15 nt, Human
cugcuaggcgagugc

SEQ ID NO: 3756959 - RNA, 22 nt, Human
cugcuaggcgagugccaggacu

SEQ ID NO: 3756960 - RNA, 22 nt, Human
cugcuaggugggccagccccuc

SEQ ID NO: 3756961 - RNA, 15 nt, Human
cugcuauagccuggg

SEQ ID NO: 3756962 - RNA, 18 nt, Human
gcagugguguggagaagc

SEQ ID NO: 3756963 - RNA, 19 nt, Human
gcagugugaggccagggca

SEQ ID NO: 3756964 - RNA, 13 nt, Human
gcagugugccccc

SEQ ID NO: 3756965 - RNA, 16 nt, Human
gcagugugucuccugc

SEQ ID NO: 3756966 - RNA, 20 nt, Human
gcagugugucuccugcaugc

SEQ ID NO: 3756967 - RNA, 21 nt, Human
gcaguguuccccaucuggguc

SEQ ID NO: 3756968 - RNA, 22 nt, Human
gcaguguucgcuuggcuccaug

SEQ ID NO: 3756969 - RNA, 15 nt, Human
gcaguguuuccuuuu

SEQ ID NO: 3756970 - RNA, 15 nt, Human
gcaguguuuugcaag

SEQ ID NO: 3756971 - RNA, 13 nt, Human
gcaguuacaaauu

SEQ ID NO: 3756972 - RNA, 20 nt, Human
gcaguuacaaauuauaaugu

SEQ ID NO: 3756973 - RNA, 13 nt, Human
gcaguuacaugca

SEQ ID NO: 3756974 - RNA, 14 nt, Human
gcaguuauagaaaa

SEQ ID NO: 3756975 - RNA, 11 nt, Human
gcaguuauauu

SEQ ID NO: 3756976 - RNA, 17 nt, Human
gcaguuaugugaccuca

SEQ ID NO: 3756977 - RNA, 17 nt, Human
gcaguucagagcugccc

SEQ ID NO: 3756978 - RNA, 18 nt, Human
gcaguucagagcugcccu

SEQ ID NO: 3756979 - RNA, 20 nt, Human
gcaguucagagcugcccucu

SEQ ID NO: 3756980 - RNA, 17 nt, Human
gcaguucagcaccaccc

SEQ ID NO: 3756981 - RNA, 22 nt, Human
gcaguucgcagccacccugagg

SEQ ID NO: 3756982 - RNA, 21 nt, Human
gcaguucuaguuugcauuccu

SEQ ID NO: 3756983 - RNA, 17 nt, Human
gcaguucugaagaagau

SEQ ID NO: 3756984 - RNA, 15 nt, Human
gcaguucugcaaaua

SEQ ID NO: 3756985 - RNA, 19 nt, Human
gcaguucugggugcucccu

SEQ ID NO: 3756986 - RNA, 16 nt, Human
gcaguucuuaacccag

SEQ ID NO: 3756987 - RNA, 22 nt, Human
gcaguugaaaagacuccaaaga

SEQ ID NO: 3756988 - RNA, 17 nt, Human
gcaguugacagcaggug

SEQ ID NO: 3756989 - RNA, 17 nt, Human
gcaguugagacaagaaa

SEQ ID NO: 3756990 - RNA, 21 nt, Human
gcaguugagaggacacucccg

SEQ ID NO: 3756991 - RNA, 23 nt, Human
gcaguugcccagccucuuucccu

SEQ ID NO: 3756992 - RNA, 22 nt, Human
gcaguuggccagagagccuggu

SEQ ID NO: 3756993 - RNA, 14 nt, Human
gcaguugucucugu

SEQ ID NO: 3756994 - RNA, 16 nt, Human
gcaguugucucuguuu

SEQ ID NO: 3756995 - RNA, 13 nt, Human
gcaguugugucag

SEQ ID NO: 3756996 - RNA, 22 nt, Human
gcaguuguugcccacagcugua

SEQ ID NO: 3756997 - RNA, 20 nt, Human
gcaguuuaucauucaagugu

SEQ ID NO: 3756998 - RNA, 20 nt, Human
gcaguuucuguccugcuggu

SEQ ID NO: 3756999 - RNA, 17 nt, Human
gcaguuucuucaucuca

SEQ ID NO: 3757000 - RNA, 11 nt, Human
gcaguuugaaa

SEQ ID NO: 3757001 - RNA, 17 nt, Human
gcaguuugaaauucuga

SEQ ID NO: 3757002 - RNA, 19 nt, Human
gcaguuugaaauucugaau

SEQ ID NO: 3757003 - RNA, 20 nt, Human
gcaguuuugacaucagccag

SEQ ID NO: 3757004 - RNA, 21 nt, Human
gcaguuuugacaucagccagc

SEQ ID NO: 3757005 - RNA, 21 nt, Human
gcaguuuuguuuuaaaacugg

SEQ ID NO: 3757006 - RNA, 23 nt, Human
gcaguuuuucaggagcgcaagau

SEQ ID NO: 3757007 - RNA, 17 nt, Human
gcaguuuuuuuuuucuu

SEQ ID NO: 3757008 - RNA, 23 nt, Human
gcaguuuuuuuuuucuugucuau

SEQ ID NO: 3757009 - RNA, 15 nt, Human
gcauaaaaauuagcc

SEQ ID NO: 3757010 - RNA, 11 nt, Human
gcauaaaacag

SEQ ID NO: 3757011 - RNA, 21 nt, Human
gcauaaaauucuuaaaauaua

SEQ ID NO: 3757012 - RNA, 12 nt, Human
gcauaaacuguu

SEQ ID NO: 3757013 - RNA, 14 nt, Human
gcauaaaggccuuu

SEQ ID NO: 3757014 - RNA, 19 nt, Human
gcauaacugacaaaucaag

SEQ ID NO: 3757015 - RNA, 22 nt, Human
gcauaacugacaaaucaaguuu

SEQ ID NO: 3757016 - RNA, 23 nt, Human
gcauaauucugaaguuauauuuc

SEQ ID NO: 3757017 - RNA, 17 nt, Human
gcauaauuuaaaaauau

SEQ ID NO: 3757018 - RNA, 19 nt, Human
gcauaauuuaaaaauauau

SEQ ID NO: 3757019 - RNA, 18 nt, Human
gcauacaaacaagcauau

SEQ ID NO: 3757020 - RNA, 20 nt, Human
gcauacaaguuucauucucc

SEQ ID NO: 3757021 - RNA, 11 nt, Human
gcauacacaca

SEQ ID NO: 3757022 - RNA, 14 nt, Human
gcauacacacacac

SEQ ID NO: 3757023 - RNA, 21 nt, Human
gcauacagaaauauaauaaaa

SEQ ID NO: 3757024 - RNA, 20 nt, Human
gcauaccuuuauugugaucu

SEQ ID NO: 3757025 - RNA, 15 nt, Human
gcauacguacacauu

SEQ ID NO: 3757026 - RNA, 17 nt, Human
gcauacguacacauuuu

SEQ ID NO: 3757027 - RNA, 16 nt, Human
gcauacuaauaaagua

SEQ ID NO: 3757028 - RNA, 22 nt, Human
gcauacugagccaaguauaauu

SEQ ID NO: 3757029 - RNA, 16 nt, Human
gcauagaacuggguaa

SEQ ID NO: 3757030 - RNA, 17 nt, Human
gcauagaacuggguaaa

SEQ ID NO: 3757031 - RNA, 19 nt, Human
gcauagaugcaggugagcc

SEQ ID NO: 3757032 - RNA, 20 nt, Human
gcauagcaguauauguuaau

SEQ ID NO: 3757033 - RNA, 15 nt, Human
gcauagcucuggggu

SEQ ID NO: 3757034 - RNA, 19 nt, Human
gcauaggaccuuuccacca

SEQ ID NO: 3757035 - RNA, 22 nt, Human
gcauaggccugcuuugucuccu

SEQ ID NO: 3757036 - RNA, 12 nt, Human
gcauaggccugg

SEQ ID NO: 3757037 - RNA, 16 nt, Human
gcauaggccugggugc

SEQ ID NO: 3757038 - RNA, 22 nt, Human
gcauaggccugggugcuggcug

SEQ ID NO: 3757039 - RNA, 23 nt, Human
gcauaggccugggugcuggcugc

SEQ ID NO: 3757040 - RNA, 17 nt, Human
gcauagguuuaauaauu

SEQ ID NO: 3757041 - RNA, 18 nt, Human
gcauaguucccauguuaa

SEQ ID NO: 3757042 - RNA, 22 nt, Human
gcauauaaaauggcaacaaacu

SEQ ID NO: 3757043 - RNA, 15 nt, Human
gcauauaacuuauau

SEQ ID NO: 3757044 - RNA, 16 nt, Human
gcauauagauuguccu

SEQ ID NO: 3757045 - RNA, 21 nt, Human
gcauauauuaaagcaucagga

SEQ ID NO: 3757046 - RNA, 16 nt, Human
gcauauauuuuuauau

SEQ ID NO: 3757047 - RNA, 20 nt, Human
gcauauauuuuuauauuuac

SEQ ID NO: 3757048 - RNA, 21 nt, Human
gcauaucagucucugagggcu

SEQ ID NO: 3757049 - RNA, 14 nt, Human
gcauaucugccuuu

SEQ ID NO: 3757050 - RNA, 18 nt, Human
gcauaucugccuuuauug

SEQ ID NO: 3757051 - RNA, 21 nt, Human
gcauaucugccuuuauugugu

SEQ ID NO: 3757052 - RNA, 16 nt, Human
gcauaugaaaggagag

SEQ ID NO: 3757053 - RNA, 20 nt, Human
gcauaugaaaggagagcauc

SEQ ID NO: 3757054 - RNA, 23 nt, Human
gcauaugaguaagggcacugacg

SEQ ID NO: 3757055 - RNA, 15 nt, Human
gcauauguguuggcu

SEQ ID NO: 3757056 - RNA, 18 nt, Human
gcauauguguuggcuugu

SEQ ID NO: 3757057 - RNA, 12 nt, Human
gcauauguugaa

SEQ ID NO: 3757058 - RNA, 14 nt, Human
gcauauguugaaua

SEQ ID NO: 3757059 - RNA, 17 nt, Human
gcauauguugaauacuu

SEQ ID NO: 3757060 - RNA, 23 nt, Human
gcauauuauuuuauguugcauag

SEQ ID NO: 3757061 - RNA, 20 nt, Human
gcauauuccuuucuaucauu

SEQ ID NO: 3757062 - RNA, 22 nt, Human
gcauauucuuuucugcaaaaua

SEQ ID NO: 3757063 - RNA, 22 nt, Human
gcauauugcauacuauuaaaca

SEQ ID NO: 3757064 - RNA, 18 nt, Human
gcauauuguacacuuuuu

SEQ ID NO: 3757065 - RNA, 19 nt, Human
gcauauuguacacuuuuuu

SEQ ID NO: 3757066 - RNA, 21 nt, Human
gcauauuguauuacuagaaga

SEQ ID NO: 3757067 - RNA, 14 nt, Human
gcauauuuuguaac

SEQ ID NO: 3757068 - RNA, 14 nt, Human
gcauauuuuucaca

SEQ ID NO: 3757069 - RNA, 20 nt, Human
gcauauuuuucacauaucua

SEQ ID NO: 3757070 - RNA, 16 nt, Human
gcaucaaaagacaauu

SEQ ID NO: 3757071 - RNA, 18 nt, Human
gcaucaaaagacaauucu

SEQ ID NO: 3757072 - RNA, 15 nt, Human
gcaucacagggcaga

SEQ ID NO: 3757073 - RNA, 17 nt, Human
gcaucacagggcagagc

SEQ ID NO: 3757074 - RNA, 21 nt, Human
gcaucacagggcagagccggg

SEQ ID NO: 3757075 - RNA, 14 nt, Human
gcaucaccucaggc

SEQ ID NO: 3757076 - RNA, 15 nt, Human
gcaucaccucuguaa

SEQ ID NO: 3757077 - RNA, 18 nt, Human
gcaucaccuuaggcaggg

SEQ ID NO: 3757078 - RNA, 23 nt, Human
gcaucagaaagggagggcucuga

SEQ ID NO: 3757079 - RNA, 12 nt, Human
gcaucagaaaug

SEQ ID NO: 3757080 - RNA, 21 nt, Human
gcaucagcuggcgucaugcaa

SEQ ID NO: 3757081 - RNA, 24 nt, Human
gcaucagggggaagaagcagagag

SEQ ID NO: 3757082 - RNA, 12 nt, Human
gcaucaggguua

SEQ ID NO: 3757083 - RNA, 23 nt, Human
gcaucaucaauaaaacaguuggc

SEQ ID NO: 3757084 - RNA, 15 nt, Human
gcaucaucucagcuc

SEQ ID NO: 3757085 - RNA, 19 nt, Human
gcaucaucuugaacauuaa

SEQ ID NO: 3757086 - RNA, 21 nt, Human
gcaucaucuugaacauuaauc

SEQ ID NO: 3757087 - RNA, 15 nt, Human
gcaucaugccucuga

SEQ ID NO: 3757088 - RNA, 17 nt, Human
gcaucauuauuuaugua

SEQ ID NO: 3757089 - RNA, 19 nt, Human
gcaucauuauuuauguauu

SEQ ID NO: 3757090 - RNA, 22 nt, Human
gcaucauuauuugcagagacag

SEQ ID NO: 3757091 - RNA, 16 nt, Human
gcaucauucucuaaua

SEQ ID NO: 3757092 - RNA, 14 nt, Human
gcaucauugcagau

SEQ ID NO: 3757093 - RNA, 15 nt, Human
gcaucauugcagaug

SEQ ID NO: 3757094 - RNA, 18 nt, Human
gcauccaaucucaaggaa

SEQ ID NO: 3757095 - RNA, 22 nt, Human
gcauccagagucccugccugga

SEQ ID NO: 3757096 - RNA, 11 nt, Human
gcauccagccu

SEQ ID NO: 3757097 - RNA, 14 nt, Human
gcauccaguaucuu

SEQ ID NO: 3757098 - RNA, 12 nt, Human
gcauccauacca

SEQ ID NO: 3757099 - RNA, 19 nt, Human
gcauccauaccagcucgca

SEQ ID NO: 3757100 - RNA, 11 nt, Human
gcauccauggg

SEQ ID NO: 3757101 - RNA, 21 nt, Human
gcauccauuccucagggacag

SEQ ID NO: 3757102 - RNA, 22 nt, Human
gcaucccagcaccugccuccuc

SEQ ID NO: 3757103 - RNA, 16 nt, Human
gcaucccaguggccuc

SEQ ID NO: 3757104 - RNA, 14 nt, Human
gcauccccugccuc

SEQ ID NO: 3757105 - RNA, 17 nt, Human
gcauccccugccuccau

SEQ ID NO: 3757106 - RNA, 19 nt, Human
gcauccccuuggcugugag

SEQ ID NO: 3757107 - RNA, 19 nt, Human
gcaucccggaggaaaucug

SEQ ID NO: 3757108 - RNA, 17 nt, Human
gcaucccugggccuugg

SEQ ID NO: 3757109 - RNA, 19 nt, Human
gcaucccugggccuugggc

SEQ ID NO: 3757110 - RNA, 17 nt, Human
gcaggcucacugccagg

SEQ ID NO: 3757111 - RNA, 23 nt, Human
gcaggcucacugccaggccagcc

SEQ ID NO: 3757112 - RNA, 22 nt, Human
gcaggcucccagggacaccugg

SEQ ID NO: 3757113 - RNA, 16 nt, Human
gcaggcuccccugagg

SEQ ID NO: 3757114 - RNA, 22 nt, Human
gcaggcucgggcuccccagccc

SEQ ID NO: 3757115 - RNA, 16 nt, Human
gcaggcucucaggcca

SEQ ID NO: 3757116 - RNA, 20 nt, Human
gcaggcucucaggccagcug

SEQ ID NO: 3757117 - RNA, 22 nt, Human
gcaggcucucaggccagcugcu

SEQ ID NO: 3757118 - RNA, 17 nt, Human
gcaggcugauuucuagg

SEQ ID NO: 3757119 - RNA, 17 nt, Human
gcaggcuggcagcucuc

SEQ ID NO: 3757120 - RNA, 18 nt, Human
gcaggcuggcagcucucc

SEQ ID NO: 3757121 - RNA, 14 nt, Human
gcaggcuggcccug

SEQ ID NO: 3757122 - RNA, 17 nt, Human
gcaggcuggccuaugug

SEQ ID NO: 3757123 - RNA, 15 nt, Human
gcaggcuggcuggcc

SEQ ID NO: 3757124 - RNA, 10 nt, Human
gcaggcuggg

SEQ ID NO: 3757125 - RNA, 13 nt, Human
gcaggcugggcca

SEQ ID NO: 3757126 - RNA, 18 nt, Human
gcaggcuuaauaaaaaug

SEQ ID NO: 3757127 - RNA, 23 nt, Human
gcaggcuuugccauugugaacca

SEQ ID NO: 3757128 - RNA, 15 nt, Human
gcagggaaggccuga

SEQ ID NO: 3757129 - RNA, 16 nt, Human
gcagggaaggccugac

SEQ ID NO: 3757130 - RNA, 15 nt, Human
gcagggacaaagagg

SEQ ID NO: 3757131 - RNA, 18 nt, Human
gcagggacacgggcagcc

SEQ ID NO: 3757132 - RNA, 22 nt, Human
gcagggagccgagaucacgcca

SEQ ID NO: 3757133 - RNA, 16 nt, Human
gcagggagcugggccc

SEQ ID NO: 3757134 - RNA, 16 nt, Human
gcagggagcugggcuu

SEQ ID NO: 3757135 - RNA, 10 nt, Human
gcagggaggg

SEQ ID NO: 3757136 - RNA, 18 nt, Human
gcagggagggcaguuuuc

SEQ ID NO: 3757137 - RNA, 16 nt, Human
gcagggagggcuucug

SEQ ID NO: 3757138 - RNA, 12 nt, Human
gcagggagggga

SEQ ID NO: 3757139 - RNA, 22 nt, Human
gcagggauguggguuccacaga

SEQ ID NO: 3757140 - RNA, 19 nt, Human
gcagggauuaaccucugca

SEQ ID NO: 3757141 - RNA, 13 nt, Human
gcagggcacaggg

SEQ ID NO: 3757142 - RNA, 13 nt, Human
gcagggcagcccc

SEQ ID NO: 3757143 - RNA, 12 nt, Human
gcagggcagccg

SEQ ID NO: 3757144 - RNA, 14 nt, Human
gcagggcaggacca

SEQ ID NO: 3757145 - RNA, 19 nt, Human
gcagggcaggaccagccca

SEQ ID NO: 3757146 - RNA, 13 nt, Human
gcagggcagucau

SEQ ID NO: 3757147 - RNA, 19 nt, Human
gcagggccaacccuucucc

SEQ ID NO: 3757148 - RNA, 22 nt, Human
gcagggccgcccgggcccagag

SEQ ID NO: 3757149 - RNA, 23 nt, Human
gcagggccgcccgggcccagagg

SEQ ID NO: 3757150 - RNA, 14 nt, Human
gcagggccggggaa

SEQ ID NO: 3757151 - RNA, 23 nt, Human
gcagggccggggaacuggccaag

SEQ ID NO: 3757152 - RNA, 20 nt, Human
gcagggccuagcugcuacaa

SEQ ID NO: 3757153 - RNA, 22 nt, Human
gcagggcuacccugagcugagg

SEQ ID NO: 3757154 - RNA, 23 nt, Human
gcagggcuacccugagcugaggc

SEQ ID NO: 3757155 - RNA, 13 nt, Human
gcagggcucagga

SEQ ID NO: 3757156 - RNA, 16 nt, Human
gcagggcucugcccca

SEQ ID NO: 3757157 - RNA, 21 nt, Human
gcagggcucugccccagaggc

SEQ ID NO: 3757158 - RNA, 15 nt, Human
gcagggcugugcuug

SEQ ID NO: 3757159 - RNA, 23 nt, Human
gcagggcugugcuugaaggcccu

SEQ ID NO: 3757160 - RNA, 17 nt, Human
gcagggcuuuaaaauuc

SEQ ID NO: 3757161 - RNA, 15 nt, Human
gcaggggaggccauc

SEQ ID NO: 3757162 - RNA, 21 nt, Human
gcaggggaggccaucuggaga

SEQ ID NO: 3757163 - RNA, 20 nt, Human
gcaggggcaaacaccugcug

SEQ ID NO: 3757164 - RNA, 19 nt, Human
gcaggggccgggggcaguc

SEQ ID NO: 3757165 - RNA, 13 nt, Human
gcaggggccugga

SEQ ID NO: 3757166 - RNA, 16 nt, Human
gcaggggccuggagau

SEQ ID NO: 3757167 - RNA, 20 nt, Human
gcaggggccuggagauccuc

SEQ ID NO: 3757168 - RNA, 17 nt, Human
gcaggggcuacaagagg

SEQ ID NO: 3757169 - RNA, 12 nt, Human
gcaggggcucug

SEQ ID NO: 3757170 - RNA, 13 nt, Human
gcaggggcucugg

SEQ ID NO: 3757171 - RNA, 17 nt, Human
gcaggggcucuggagag

SEQ ID NO: 3757172 - RNA, 19 nt, Human
gcaggggcucuggagagaa

SEQ ID NO: 3757173 - RNA, 22 nt, Human
gcaggggcucuggagagaaaca

SEQ ID NO: 3757174 - RNA, 15 nt, Human
gcaggggcugcagua

SEQ ID NO: 3757175 - RNA, 13 nt, Human
gcaggggcuuccu

SEQ ID NO: 3757176 - RNA, 18 nt, Human
gcaggggcuuccuggugc

SEQ ID NO: 3757177 - RNA, 22 nt, Human
gcaggggcuuccuggugcugga

SEQ ID NO: 3757178 - RNA, 17 nt, Human
gcagggggcugcugcug

SEQ ID NO: 3757179 - RNA, 22 nt, Human
gcagggggcugcugcugggcuc

SEQ ID NO: 3757180 - RNA, 17 nt, Human
gcaggggugggggugga

SEQ ID NO: 3757181 - RNA, 21 nt, Human
gcagggguggggguggaggcu

SEQ ID NO: 3757182 - RNA, 19 nt, Human
gcagggguuggggaaacag

SEQ ID NO: 3757183 - RNA, 17 nt, Human
gcagggucaggagaggg

SEQ ID NO: 3757184 - RNA, 21 nt, Human
gcagggucccauuucucacug

SEQ ID NO: 3757185 - RNA, 17 nt, Human
gcagggucucacucugu

SEQ ID NO: 3757186 - RNA, 21 nt, Human
gcagggucuguuuggacugca

SEQ ID NO: 3757187 - RNA, 22 nt, Human
gcagggugggcuuguggggccu

SEQ ID NO: 3757188 - RNA, 17 nt, Human
gcaggguggugcuggga

SEQ ID NO: 3757189 - RNA, 18 nt, Human
gcaggguggugcugggac

SEQ ID NO: 3757190 - RNA, 15 nt, Human
gcagguaaacaguuc

SEQ ID NO: 3757191 - RNA, 17 nt, Human
gcagguagaccugucuc

SEQ ID NO: 3757192 - RNA, 19 nt, Human
gcagguagccagggggacu

SEQ ID NO: 3757193 - RNA, 17 nt, Human
gcagguagccugcuggu

SEQ ID NO: 3757194 - RNA, 16 nt, Human
gcagguaggaauauua

SEQ ID NO: 3757195 - RNA, 20 nt, Human
gcagguaggaauauuauauu

SEQ ID NO: 3757196 - RNA, 22 nt, Human
gcagguaugaucggcaggacac

SEQ ID NO: 3757197 - RNA, 21 nt, Human
gcaggucacugaaacuucaag

SEQ ID NO: 3757198 - RNA, 22 nt, Human
gcagguccaggguuugaguuca

SEQ ID NO: 3757199 - RNA, 14 nt, Human
gcagguccccagac

SEQ ID NO: 3757200 - RNA, 11 nt, Human
gcaggucccua

SEQ ID NO: 3757201 - RNA, 20 nt, Human
gcaggucccuaauaaagcug

SEQ ID NO: 3757202 - RNA, 23 nt, Human
gcaggucccuaauaaagcugugu

SEQ ID NO: 3757203 - RNA, 19 nt, Human
gcaggucuugaacuccugg

SEQ ID NO: 3757204 - RNA, 14 nt, Human
gcaggucuuuaaau

SEQ ID NO: 3757205 - RNA, 16 nt, Human
gcaggugccuccaggu

SEQ ID NO: 3757206 - RNA, 18 nt, Human
gcaggugccuccaggugu

SEQ ID NO: 3757207 - RNA, 15 nt, Human
gcaggugcugcuacc

SEQ ID NO: 3757208 - RNA, 20 nt, Human
gcaggugcugcuacccuccc

SEQ ID NO: 3757209 - RNA, 22 nt, Human
gcaggugcugcuacccucccug

SEQ ID NO: 3757210 - RNA, 17 nt, Human
gcaggugcuggucccgg

SEQ ID NO: 3757211 - RNA, 16 nt, Human
gcaggugggagcuuga

SEQ ID NO: 3757212 - RNA, 21 nt, Human
gcagguggggagacugggcug

SEQ ID NO: 3757213 - RNA, 16 nt, Human
gcaggugguccugaga

SEQ ID NO: 3757214 - RNA, 20 nt, Human
gcagguggugucgggcccuu

SEQ ID NO: 3757215 - RNA, 22 nt, Human
gcaggugucauauauggggggc

SEQ ID NO: 3757216 - RNA, 16 nt, Human
gcagguuagaaccuag

SEQ ID NO: 3757217 - RNA, 15 nt, Human
gcagguuagagaaaa

SEQ ID NO: 3757218 - RNA, 16 nt, Human
gcagguucccaagcuc

SEQ ID NO: 3757219 - RNA, 18 nt, Human
gcagguucccaagcucag

SEQ ID NO: 3757220 - RNA, 12 nt, Human
gcagguucccac

SEQ ID NO: 3757221 - RNA, 23 nt, Human
gcagguucccacuuaaaaauuaa

SEQ ID NO: 3757222 - RNA, 16 nt, Human
gcagguugaagccaug

SEQ ID NO: 3757223 - RNA, 21 nt, Human
gcagguugaggggcuccugga

SEQ ID NO: 3757224 - RNA, 22 nt, Human
gcagguugaggggcuccuggaa

SEQ ID NO: 3757225 - RNA, 16 nt, Human
gcagguugauaaauca

SEQ ID NO: 3757226 - RNA, 18 nt, Human
gcagguuggaccccagag

SEQ ID NO: 3757227 - RNA, 22 nt, Human
gcagguugggccauacuggccu

SEQ ID NO: 3757228 - RNA, 19 nt, Human
gcaguaaaaaaugguguuu

SEQ ID NO: 3757229 - RNA, 16 nt, Human
gcaguaaagagaaacu

SEQ ID NO: 3757230 - RNA, 17 nt, Human
gcaguaaagagaaacuu

SEQ ID NO: 3757231 - RNA, 15 nt, Human
gcaguaaauuugcua

SEQ ID NO: 3757232 - RNA, 13 nt, Human
gcaguaacuuggg

SEQ ID NO: 3757233 - RNA, 15 nt, Human
gcaguaagucuuuuu

SEQ ID NO: 3757234 - RNA, 13 nt, Human
gcaguaauaaaaa

SEQ ID NO: 3757235 - RNA, 23 nt, Human
gcaguaccuauaaaguaaagcua

SEQ ID NO: 3757236 - RNA, 21 nt, Human
gcaguacuaacauuuauuuga

SEQ ID NO: 3757237 - RNA, 20 nt, Human
gcaguagaaauaauaugcau

SEQ ID NO: 3757238 - RNA, 19 nt, Human
gcaguagacauuuuaacaa

SEQ ID NO: 3757239 - RNA, 20 nt, Human
gcaguauaaagaauaggacu

SEQ ID NO: 3757240 - RNA, 20 nt, Human
gcaguaucggcacuguacaa

SEQ ID NO: 3757241 - RNA, 23 nt, Human
gcaguauuuuguguccuccagga

SEQ ID NO: 3757242 - RNA, 17 nt, Human
gcagucacaucucuucc

SEQ ID NO: 3757243 - RNA, 24 nt, Human
gcagucacguggaggagcagugca

SEQ ID NO: 3757244 - RNA, 14 nt, Human
gcagucaucagaag

SEQ ID NO: 3757245 - RNA, 18 nt, Human
gcaguccacuucugacag

SEQ ID NO: 3757246 - RNA, 20 nt, Human
gcaguccacuucugacagcc

SEQ ID NO: 3757247 - RNA, 21 nt, Human
gcaguccacuucugacagccu

SEQ ID NO: 3757248 - RNA, 16 nt, Human
gcaguccaugcaugac

SEQ ID NO: 3757249 - RNA, 23 nt, Human
gcaguccccuucccuccaagaag

SEQ ID NO: 3757250 - RNA, 21 nt, Human
gcaguccguguggauccaaug

SEQ ID NO: 3757251 - RNA, 19 nt, Human
gcaguccugaucagagccg

SEQ ID NO: 3757252 - RNA, 15 nt, Human
gcaguccuuuguaaa

SEQ ID NO: 3757253 - RNA, 22 nt, Human
gcaguccuuuguaaacaguguu

SEQ ID NO: 3757254 - RNA, 21 nt, Human
gcagucgggggcuggccuagg

SEQ ID NO: 3757255 - RNA, 18 nt, Human
gcagucgucgcacagucu

SEQ ID NO: 3757256 - RNA, 22 nt, Human
gcagucgucgcacagucucucu

SEQ ID NO: 3757257 - RNA, 13 nt, Human
gcagucgugccug

SEQ ID NO: 3757258 - RNA, 15 nt, Human
gcauccgcaggugcu

SEQ ID NO: 3757259 - RNA, 16 nt, Human
gcauccgcaggugcug

SEQ ID NO: 3757260 - RNA, 20 nt, Human
gcauccgcaggugcuggucc

SEQ ID NO: 3757261 - RNA, 18 nt, Human
gcauccguaguucccuga

SEQ ID NO: 3757262 - RNA, 13 nt, Human
gcauccuaagaaa

SEQ ID NO: 3757263 - RNA, 20 nt, Human
gcauccucaguuccugcagc

SEQ ID NO: 3757264 - RNA, 14 nt, Human
gcauccuccaagaa

SEQ ID NO: 3757265 - RNA, 18 nt, Human
gcauccuccacaauagca

SEQ ID NO: 3757266 - RNA, 13 nt, Human
gcauccuccagcc

SEQ ID NO: 3757267 - RNA, 17 nt, Human
gcauccuccagccccug

SEQ ID NO: 3757268 - RNA, 17 nt, Human
gcauccuccgccucccg

SEQ ID NO: 3757269 - RNA, 20 nt, Human
gcauccucuggagccagccg

SEQ ID NO: 3757270 - RNA, 13 nt, Human
gcauccuggcacc

SEQ ID NO: 3757271 - RNA, 22 nt, Human
gcauccuggcacccggccccug

SEQ ID NO: 3757272 - RNA, 16 nt, Human
gcauccuuccuauaac

SEQ ID NO: 3757273 - RNA, 19 nt, Human
gcauccuuccuauaacuug

SEQ ID NO: 3757274 - RNA, 23 nt, Human
gcauccuuccuauaacuugaugc

SEQ ID NO: 3757275 - RNA, 18 nt, Human
gcaucgcaccauucugac

SEQ ID NO: 3757276 - RNA, 15 nt, Human
gcaucggccuagggc

SEQ ID NO: 3757277 - RNA, 16 nt, Human
gcaucggccuagggcc

SEQ ID NO: 3757278 - RNA, 23 nt, Human
gcaucgucaugcacaguauuugu

SEQ ID NO: 3757279 - RNA, 13 nt, Human
gcaucguggagac

SEQ ID NO: 3757280 - RNA, 14 nt, Human
gcaucuaucucauc

SEQ ID NO: 3757281 - RNA, 18 nt, Human
gcaucuaucuggugauuu

SEQ ID NO: 3757282 - RNA, 12 nt, Human
gcaucucagccc

SEQ ID NO: 3757283 - RNA, 22 nt, Human
gcaucucagcucaucuucacug

SEQ ID NO: 3757284 - RNA, 17 nt, Human
gcaucuccaagcagcuu

SEQ ID NO: 3757285 - RNA, 19 nt, Human
gcaucuccaagcagcuuag

SEQ ID NO: 3757286 - RNA, 17 nt, Human
gcaucuccaccugcucc

SEQ ID NO: 3757287 - RNA, 20 nt, Human
gcaucuccaccugcucccag

SEQ ID NO: 3757288 - RNA, 16 nt, Human
gcaucuccaggaaggc

SEQ ID NO: 3757289 - RNA, 12 nt, Human
gcaucucccaga

SEQ ID NO: 3757290 - RNA, 14 nt, Human
gcaucuccugagga

SEQ ID NO: 3757291 - RNA, 16 nt, Human
gcaucuccugugcaug

SEQ ID NO: 3757292 - RNA, 22 nt, Human
gcaucucuaccuucuccccagc

SEQ ID NO: 3757293 - RNA, 23 nt, Human
gcaucucugggcuggaugagcuc

SEQ ID NO: 3757294 - RNA, 21 nt, Human
gcaucucugucccauucccug

SEQ ID NO: 3757295 - RNA, 22 nt, Human
gcaucucugucccauucccugg

SEQ ID NO: 3757296 - RNA, 23 nt, Human
gcaucucugucccauucccuggg

SEQ ID NO: 3757297 - RNA, 14 nt, Human
gcaucucuugaggc

SEQ ID NO: 3757298 - RNA, 16 nt, Human
gcaucucuugaggcca

SEQ ID NO: 3757299 - RNA, 20 nt, Human
gcaucucuugaggccaggag

SEQ ID NO: 3757300 - RNA, 20 nt, Human
gcaucugaaauaggaaacaa

SEQ ID NO: 3757301 - RNA, 17 nt, Human
gcaucugacacaaaaaa

SEQ ID NO: 3757302 - RNA, 17 nt, Human
gcaucugaccagcagcg

SEQ ID NO: 3757303 - RNA, 15 nt, Human
gcaucugagggggag

SEQ ID NO: 3757304 - RNA, 14 nt, Human
gcaucugccccucc

SEQ ID NO: 3757305 - RNA, 15 nt, Human
gcaucugccccuccc

SEQ ID NO: 3757306 - RNA, 15 nt, Human
gcaucuggagagaac

SEQ ID NO: 3757307 - RNA, 11 nt, Human
gcaucuggccu

SEQ ID NO: 3757308 - RNA, 15 nt, Human
gcaucuggccuggcc

SEQ ID NO: 3757309 - RNA, 17 nt, Human
gcaucuggccuggccag

SEQ ID NO: 3757310 - RNA, 12 nt, Human
gcaucuggccuu

SEQ ID NO: 3757311 - RNA, 16 nt, Human
gcaucugggauuccca

SEQ ID NO: 3757312 - RNA, 20 nt, Human
gcaucuggggcccauacugg

SEQ ID NO: 3757313 - RNA, 16 nt, Human
gcaucuuacugaaggu

SEQ ID NO: 3757314 - RNA, 17 nt, Human
gcaucuucucacucccu

SEQ ID NO: 3757315 - RNA, 14 nt, Human
gcaucuucuccauc

SEQ ID NO: 3757316 - RNA, 20 nt, Human
gcaucuucuggagucuccag

SEQ ID NO: 3757317 - RNA, 23 nt, Human
gcaucuucuggagucuccagugg

SEQ ID NO: 3757318 - RNA, 16 nt, Human
gcaucuugccuccagg

SEQ ID NO: 3757319 - RNA, 19 nt, Human
gcaucuugccuccaggugc

SEQ ID NO: 3757320 - RNA, 20 nt, Human
gcaucuuuagugcuuucuug

SEQ ID NO: 3757321 - RNA, 20 nt, Human
gcaucuuugaauacaaagaa

SEQ ID NO: 3757322 - RNA, 15 nt, Human
gcaucuuugccuugg

SEQ ID NO: 3757323 - RNA, 22 nt, Human
gcaucuuugccuugggcugcuc

SEQ ID NO: 3757324 - RNA, 19 nt, Human
gcaucuuuuguauuaagaa

SEQ ID NO: 3757325 - RNA, 23 nt, Human
gcaucuuuuguauuaagaaagga

SEQ ID NO: 3757326 - RNA, 16 nt, Human
gcaugaaaauuguguu

SEQ ID NO: 3757327 - RNA, 16 nt, Human
gcaugaaaugaacaca

SEQ ID NO: 3757328 - RNA, 18 nt, Human
gcaugaaaugaacacaaa

SEQ ID NO: 3757329 - RNA, 19 nt, Human
gcaugaaaugaacacaaau

SEQ ID NO: 3757330 - RNA, 22 nt, Human
gcaugaaaugugaauuuuuauu

SEQ ID NO: 3757331 - RNA, 20 nt, Human
gcaugaacauguacuguucu

SEQ ID NO: 3757332 - RNA, 22 nt, Human
gcaugaagagaagcaauuuugg

SEQ ID NO: 3757333 - RNA, 21 nt, Human
gcaugaaguaauaugcacaca

SEQ ID NO: 3757334 - RNA, 17 nt, Human
gcaugaauuugugaagg

SEQ ID NO: 3757335 - RNA, 22 nt, Human
gcaugacacgaauauugcugau

SEQ ID NO: 3757336 - RNA, 17 nt, Human
gcaugacagaaaauaug

SEQ ID NO: 3757337 - RNA, 18 nt, Human
gcaugacagaaaauaugu

SEQ ID NO: 3757338 - RNA, 13 nt, Human
gcaugacagccuc

SEQ ID NO: 3757339 - RNA, 14 nt, Human
gcaugagaaauaca

SEQ ID NO: 3757340 - RNA, 17 nt, Human
gcaugagaaauacaaaa

SEQ ID NO: 3757341 - RNA, 21 nt, Human
gcaugagacucagugcagaug

SEQ ID NO: 3757342 - RNA, 20 nt, Human
gcaugagauagcugguguua

SEQ ID NO: 3757343 - RNA, 21 nt, Human
gcaugaggaacuagccaccaa

SEQ ID NO: 3757344 - RNA, 22 nt, Human
gcaugaggaacuagccaccaac

SEQ ID NO: 3757345 - RNA, 20 nt, Human
gcaugagggguuccuccccu

SEQ ID NO: 3757346 - RNA, 22 nt, Human
gcaugagggguuccuccccucc

SEQ ID NO: 3757347 - RNA, 23 nt, Human
gcaugagugcuggauauuuuacu

SEQ ID NO: 3757348 - RNA, 18 nt, Human
gcaugauccaagcaagac

SEQ ID NO: 3757349 - RNA, 20 nt, Human
gcaugauguuaaccagaaua

SEQ ID NO: 3757350 - RNA, 13 nt, Human
gcaugauguuugc

SEQ ID NO: 3757351 - RNA, 22 nt, Human
gcaugauguuugcccaaaauuu

SEQ ID NO: 3757352 - RNA, 16 nt, Human
gcaugcaaaugagcuc

SEQ ID NO: 3757353 - RNA, 14 nt, Human
gcaugcacagcugu

SEQ ID NO: 3757354 - RNA, 23 nt, Human
gcaugcacuguucccccugugca

SEQ ID NO: 3757355 - RNA, 15 nt, Human
gcaugcagcagcuug

SEQ ID NO: 3757356 - RNA, 17 nt, Human
gcaugcagcagcuugcu

SEQ ID NO: 3757357 - RNA, 12 nt, Human
gcaugcaguguu

SEQ ID NO: 3757358 - RNA, 15 nt, Human
gcaugcauuuugcag

SEQ ID NO: 3757359 - RNA, 20 nt, Human
gcaugccaacaagaaugcau

SEQ ID NO: 3757360 - RNA, 21 nt, Human
gcaugccaacaagaaugcauu

SEQ ID NO: 3757361 - RNA, 12 nt, Human
gcaugcccagag

SEQ ID NO: 3757362 - RNA, 19 nt, Human
gcaugcccagagacccagc

SEQ ID NO: 3757363 - RNA, 20 nt, Human
gcaugcccagagacccagcg

SEQ ID NO: 3757364 - RNA, 15 nt, Human
gcaugcccccucgug

SEQ ID NO: 3757365 - RNA, 17 nt, Human
gcaugccccggccaccu

SEQ ID NO: 3757366 - RNA, 22 nt, Human
gcaugccccggccaccucugcg

SEQ ID NO: 3757367 - RNA, 23 nt, Human
gcaugccccggccaccucugcgg

SEQ ID NO: 3757368 - RNA, 21 nt, Human
gcaugccucugauaugggacu

SEQ ID NO: 3757369 - RNA, 22 nt, Human
gcaugccugagagacauggcuu

SEQ ID NO: 3757370 - RNA, 13 nt, Human
gcaugccugugug

SEQ ID NO: 3757371 - RNA, 16 nt, Human
gcaugcggcccagccc

SEQ ID NO: 3757372 - RNA, 20 nt, Human
gcaugcggcccagcccggcu

SEQ ID NO: 3757373 - RNA, 15 nt, Human
gcaugcggcccagga

SEQ ID NO: 3757374 - RNA, 13 nt, Human
gcaugcucucugc

SEQ ID NO: 3757375 - RNA, 14 nt, Human
gcaugcucucugca

SEQ ID NO: 3757376 - RNA, 15 nt, Human
gcaugcugucccuua

SEQ ID NO: 3757377 - RNA, 16 nt, Human
gcaugcuucuucucaa

SEQ ID NO: 3757378 - RNA, 19 nt, Human
gcauggaaaucagccaagu

SEQ ID NO: 3757379 - RNA, 23 nt, Human
gcauggaaauucccuucaucugg

SEQ ID NO: 3757380 - RNA, 23 nt, Human
gcauggaaauuuaaagcagguuc

SEQ ID NO: 3757381 - RNA, 16 nt, Human
gcauggaacacuucga

SEQ ID NO: 3757382 - RNA, 21 nt, Human
gcauggacaauggaccggaga

SEQ ID NO: 3757383 - RNA, 18 nt, Human
gcauggagauagccccac

SEQ ID NO: 3757384 - RNA, 12 nt, Human
gcauggagcugg

SEQ ID NO: 3757385 - RNA, 20 nt, Human
gcauggaguguguauuguuc

SEQ ID NO: 3757386 - RNA, 24 nt, Human
gcauggaguguguauuguucccag

SEQ ID NO: 3757387 - RNA, 15 nt, Human
gcauggauuucuuug

SEQ ID NO: 3757388 - RNA, 18 nt, Human
gcauggauuucuuugaaa

SEQ ID NO: 3757389 - RNA, 21 nt, Human
gcauggcaccugucgcccagu

SEQ ID NO: 3757390 - RNA, 14 nt, Human
gcauggcagcccuc

SEQ ID NO: 3757391 - RNA, 18 nt, Human
gcauggcagggggcugcu

SEQ ID NO: 3757392 - RNA, 21 nt, Human
gcauggcauccuccagccccu

SEQ ID NO: 3757393 - RNA, 12 nt, Human
gcauggcccugg

SEQ ID NO: 3757394 - RNA, 15 nt, Human
gcauggcuauuuuau

SEQ ID NO: 3757395 - RNA, 14 nt, Human
gcauggcuccaguc

SEQ ID NO: 3757396 - RNA, 15 nt, Human
gcauggcuccagucu

SEQ ID NO: 3757397 - RNA, 15 nt, Human
gcaugggcacucccu

SEQ ID NO: 3757398 - RNA, 19 nt, Human
gcaugggcaguuucaguuu

SEQ ID NO: 3757399 - RNA, 14 nt, Human
gcaugggccaccac

SEQ ID NO: 3757400 - RNA, 17 nt, Human
gcaugggccagccccuc

SEQ ID NO: 3757401 - RNA, 15 nt, Human
gcauggggugggccu

SEQ ID NO: 3757402 - RNA, 19 nt, Human
gcauggggugggccucugg

SEQ ID NO: 3757403 - RNA, 21 nt, Human
gcaugggugaagggagagcca

SEQ ID NO: 3757404 - RNA, 15 nt, Human
gcauggguuuuguag

SEQ ID NO: 3757405 - RNA, 22 nt, Human
gcauggucaacccucaggggaa

SEQ ID NO: 3757406 - RNA, 15 nt, Human
gcauggucacacacu

SEQ ID NO: 3757407 - RNA, 18 nt, Human
cugcuauauauaaaacgg

SEQ ID NO: 3757408 - RNA, 19 nt, Human
cugcuauauuuucaugacu

SEQ ID NO: 3757409 - RNA, 17 nt, Human
cugcuaucaaagagguu

SEQ ID NO: 3757410 - RNA, 15 nt, Human
cugcuaucauuauuc

SEQ ID NO: 3757411 - RNA, 16 nt, Human
cugcuauccccaucuc

SEQ ID NO: 3757412 - RNA, 21 nt, Human
cugcuaugguuuucuccaaga

SEQ ID NO: 3757413 - RNA, 18 nt, Human
cugcuauuucccaagcug

SEQ ID NO: 3757414 - RNA, 19 nt, Human
cugcuauuucccaagcugg

SEQ ID NO: 3757415 - RNA, 21 nt, Human
cugcuauuucccaagcuggag

SEQ ID NO: 3757416 - RNA, 23 nt, Human
cugcuauuucccaagcuggagug

SEQ ID NO: 3757417 - RNA, 24 nt, Human
cugcuauuucccaagcuggagugc

SEQ ID NO: 3757418 - RNA, 14 nt, Human
cugcuauuugaagu

SEQ ID NO: 3757419 - RNA, 17 nt, Human
cugcuauuuuacugucu

SEQ ID NO: 3757420 - RNA, 19 nt, Human
cugcuauuuuccuguucua

SEQ ID NO: 3757421 - RNA, 17 nt, Human
cugcuauuuuucauccu

SEQ ID NO: 3757422 - RNA, 16 nt, Human
cugcucaacuugcaaa

SEQ ID NO: 3757423 - RNA, 16 nt, Human
cugcucacauaucugu

SEQ ID NO: 3757424 - RNA, 19 nt, Human
cugcucacuaccuccucag

SEQ ID NO: 3757425 - RNA, 20 nt, Human
cugcucacuaccuccucagg

SEQ ID NO: 3757426 - RNA, 18 nt, Human
cugcucacuuuaaaccug

SEQ ID NO: 3757427 - RNA, 22 nt, Human
cugcucagaacuugcugcuguc

SEQ ID NO: 3757428 - RNA, 21 nt, Human
cugcucagcccugcaccaugc

SEQ ID NO: 3757429 - RNA, 14 nt, Human
cugcucagcccugg

SEQ ID NO: 3757430 - RNA, 18 nt, Human
cugcucagcccuggaggu

SEQ ID NO: 3757431 - RNA, 21 nt, Human
cugcucagcccuggaggugcc

SEQ ID NO: 3757432 - RNA, 13 nt, Human
cugcucagcucug

SEQ ID NO: 3757433 - RNA, 16 nt, Human
cugcucagcucugggc

SEQ ID NO: 3757434 - RNA, 22 nt, Human
cugcucagcucugggccauucu

SEQ ID NO: 3757435 - RNA, 13 nt, Human
cugcucagcuucu

SEQ ID NO: 3757436 - RNA, 18 nt, Human
cugcucagcuucuccugu

SEQ ID NO: 3757437 - RNA, 17 nt, Human
cugcucaggaaacgaga

SEQ ID NO: 3757438 - RNA, 22 nt, Human
cugcucaggcugcagcuggaca

SEQ ID NO: 3757439 - RNA, 19 nt, Human
cugcucaguaaagcacuug

SEQ ID NO: 3757440 - RNA, 20 nt, Human
cugcucaguguuucauauuc

SEQ ID NO: 3757441 - RNA, 17 nt, Human
cugcucaucauucucug

SEQ ID NO: 3757442 - RNA, 19 nt, Human
cugcuccacagccauccca

SEQ ID NO: 3757443 - RNA, 14 nt, Human
cugcuccacagugu

SEQ ID NO: 3757444 - RNA, 11 nt, Human
cugcuccacca

SEQ ID NO: 3757445 - RNA, 11 nt, Human
cugcuccaccc

SEQ ID NO: 3757446 - RNA, 17 nt, Human
cugcuccacccuuggcc

SEQ ID NO: 3757447 - RNA, 19 nt, Human
cugcuccacccuuggccug

SEQ ID NO: 3757448 - RNA, 18 nt, Human
cugcuccagaauuuggaa

SEQ ID NO: 3757449 - RNA, 20 nt, Human
cugcuccagaauuuggaaau

SEQ ID NO: 3757450 - RNA, 14 nt, Human
cugcuccagacagg

SEQ ID NO: 3757451 - RNA, 21 nt, Human
cugcuccagaccugauccugg

SEQ ID NO: 3757452 - RNA, 22 nt, Human
cugcuccagaccugauccugga

SEQ ID NO: 3757453 - RNA, 19 nt, Human
cugcuccagcuguucagcu

SEQ ID NO: 3757454 - RNA, 20 nt, Human
cugcuccagcuguucagcug

SEQ ID NO: 3757455 - RNA, 12 nt, Human
cugcuccaggcc

SEQ ID NO: 3757456 - RNA, 15 nt, Human
cugcuccaggccugc

SEQ ID NO: 3757457 - RNA, 19 nt, Human
cugcuccaggccugcagca

SEQ ID NO: 3757458 - RNA, 22 nt, Human
cugcucccaaggggccugagca

SEQ ID NO: 3757459 - RNA, 15 nt, Human
cugcucccaccuggc

SEQ ID NO: 3757460 - RNA, 18 nt, Human
cugcucccaccuggcucu

SEQ ID NO: 3757461 - RNA, 14 nt, Human
cugcucccagcagc

SEQ ID NO: 3757462 - RNA, 15 nt, Human
cugcucccagcagcc

SEQ ID NO: 3757463 - RNA, 22 nt, Human
cugcucccagcagcccuaagga

SEQ ID NO: 3757464 - RNA, 16 nt, Human
cugcuccccagcccug

SEQ ID NO: 3757465 - RNA, 17 nt, Human
cugcuccccagcccugg

SEQ ID NO: 3757466 - RNA, 13 nt, Human
cugcuccccuccc

SEQ ID NO: 3757467 - RNA, 12 nt, Human
cugcucccucag

SEQ ID NO: 3757468 - RNA, 15 nt, Human
cugcucccugaagcc

SEQ ID NO: 3757469 - RNA, 16 nt, Human
cugcucccugaagcca

SEQ ID NO: 3757470 - RNA, 22 nt, Human
cugcucccugaagccagccuuc

SEQ ID NO: 3757471 - RNA, 14 nt, Human
cugcuccgcugcuc

SEQ ID NO: 3757472 - RNA, 21 nt, Human
cugcuccgcugcuccuuggcu

SEQ ID NO: 3757473 - RNA, 15 nt, Human
cugcuccuagaggga

SEQ ID NO: 3757474 - RNA, 14 nt, Human
cugcuccucauggu

SEQ ID NO: 3757475 - RNA, 12 nt, Human
cugcuccuccag

SEQ ID NO: 3757476 - RNA, 13 nt, Human
cugcuccuccagg

SEQ ID NO: 3757477 - RNA, 22 nt, Human
cugcuccuccagggccacgugc

SEQ ID NO: 3757478 - RNA, 24 nt, Human
cugcuccuccagggccacgugcca

SEQ ID NO: 3757479 - RNA, 15 nt, Human
cugcuccucccuggc

SEQ ID NO: 3757480 - RNA, 18 nt, Human
cugcuccucccuggcugc

SEQ ID NO: 3757481 - RNA, 19 nt, Human
cugcuccucccuggcugcc

SEQ ID NO: 3757482 - RNA, 21 nt, Human
cugcuccucccuggcugcccu

SEQ ID NO: 3757483 - RNA, 17 nt, Human
cugcuccucuccccagc

SEQ ID NO: 3757484 - RNA, 20 nt, Human
cugcuccucuccccagcaag

SEQ ID NO: 3757485 - RNA, 23 nt, Human
cugcuccucuccccagcaaguga

SEQ ID NO: 3757486 - RNA, 12 nt, Human
cugcuccugagc

SEQ ID NO: 3757487 - RNA, 13 nt, Human
cugcuccugagcc

SEQ ID NO: 3757488 - RNA, 20 nt, Human
cugcuccuggagccuuugaa

SEQ ID NO: 3757489 - RNA, 15 nt, Human
cugcuccuguggccu

SEQ ID NO: 3757490 - RNA, 18 nt, Human
cugcuccuuccuucaccu

SEQ ID NO: 3757491 - RNA, 13 nt, Human
cugcuccuuuccc

SEQ ID NO: 3757492 - RNA, 14 nt, Human
cugcuccuuucccc

SEQ ID NO: 3757493 - RNA, 15 nt, Human
cugcuccuuuccccu

SEQ ID NO: 3757494 - RNA, 19 nt, Human
cugcucgcccuccuuucug

SEQ ID NO: 3757495 - RNA, 16 nt, Human
cugcucgccuuagcac

SEQ ID NO: 3757496 - RNA, 17 nt, Human
cugcucgggcccaggcc

SEQ ID NO: 3757497 - RNA, 17 nt, Human
cugcucuaacagcccuc

SEQ ID NO: 3757498 - RNA, 17 nt, Human
cugcucuaagcacacgg

SEQ ID NO: 3757499 - RNA, 17 nt, Human
cugcucuagugggacag

SEQ ID NO: 3757500 - RNA, 23 nt, Human
cugcucuagugggacagcccaga

SEQ ID NO: 3757501 - RNA, 17 nt, Human
cugcucucauauaagac

SEQ ID NO: 3757502 - RNA, 19 nt, Human
cugcucuccgaccagacac

SEQ ID NO: 3757503 - RNA, 13 nt, Human
cugcucuccucuu

SEQ ID NO: 3757504 - RNA, 16 nt, Human
cugcucuccuuccugg

SEQ ID NO: 3757505 - RNA, 20 nt, Human
cugcucuccuuccuggagcc

SEQ ID NO: 3757506 - RNA, 14 nt, Human
cugcucucuaccca

SEQ ID NO: 3757507 - RNA, 22 nt, Human
cugcucugaauuaguccuugcu

SEQ ID NO: 3757508 - RNA, 13 nt, Human
cugcucugagaau

SEQ ID NO: 3757509 - RNA, 13 nt, Human
cugcucugcccag

SEQ ID NO: 3757510 - RNA, 17 nt, Human
cugcucugcccagagcu

SEQ ID NO: 3757511 - RNA, 18 nt, Human
cugcucugcccagagcug

SEQ ID NO: 3757512 - RNA, 21 nt, Human
cugcucugcccagagcugggu

SEQ ID NO: 3757513 - RNA, 17 nt, Human
cugcucugccccagcuu

SEQ ID NO: 3757514 - RNA, 22 nt, Human
cugcucugccccagcuugggca

SEQ ID NO: 3757515 - RNA, 22 nt, Human
cugcucugcgugucaccugugc

SEQ ID NO: 3757516 - RNA, 12 nt, Human
cugcucugcuga

SEQ ID NO: 3757517 - RNA, 18 nt, Human
cugcucuggaauuugcaa

SEQ ID NO: 3757518 - RNA, 16 nt, Human
cugcucuugaacuccu

SEQ ID NO: 3757519 - RNA, 19 nt, Human
cugcucuugaacuccugac

SEQ ID NO: 3757520 - RNA, 11 nt, Human
cugcucuugca

SEQ ID NO: 3757521 - RNA, 20 nt, Human
cugcucuuggcuggacccag

SEQ ID NO: 3757522 - RNA, 23 nt, Human
cugcucuuggcuggacccagcca

SEQ ID NO: 3757523 - RNA, 14 nt, Human
cugcucuuucucug

SEQ ID NO: 3757524 - RNA, 14 nt, Human
cugcucuuuggccu

SEQ ID NO: 3757525 - RNA, 23 nt, Human
cugcugaaaaccaucuggccugg

SEQ ID NO: 3757526 - RNA, 18 nt, Human
cugcugaaacaacaaaua

SEQ ID NO: 3757527 - RNA, 16 nt, Human
cugcugaagcugccug

SEQ ID NO: 3757528 - RNA, 17 nt, Human
cugcugaaggaauaaau

SEQ ID NO: 3757529 - RNA, 18 nt, Human
cugcugaaggaauaaauu

SEQ ID NO: 3757530 - RNA, 11 nt, Human
cugcugaaggc

SEQ ID NO: 3757531 - RNA, 12 nt, Human
cugcugaaggcu

SEQ ID NO: 3757532 - RNA, 14 nt, Human
cugcugaaggcucg

SEQ ID NO: 3757533 - RNA, 18 nt, Human
cugcugaaggcucgagca

SEQ ID NO: 3757534 - RNA, 14 nt, Human
cugcugaauuuuca

SEQ ID NO: 3757535 - RNA, 23 nt, Human
cugcugaauuuucacaugaacau

SEQ ID NO: 3757536 - RNA, 21 nt, Human
cugcugacagacacaggcccg

SEQ ID NO: 3757537 - RNA, 23 nt, Human
cugcugacagacacaggcccggc

SEQ ID NO: 3757538 - RNA, 13 nt, Human
cugcugacagugu

SEQ ID NO: 3757539 - RNA, 23 nt, Human
cugcugaccaauugugcugccau

SEQ ID NO: 3757540 - RNA, 15 nt, Human
cugcugaccugugca

SEQ ID NO: 3757541 - RNA, 16 nt, Human
cugcugaccugugcac

SEQ ID NO: 3757542 - RNA, 16 nt, Human
cugcugagaaccuggc

SEQ ID NO: 3757543 - RNA, 20 nt, Human
cugcugagacugcugaguga

SEQ ID NO: 3757544 - RNA, 21 nt, Human
cugcugagcucugagaggccc

SEQ ID NO: 3757545 - RNA, 22 nt, Human
cugcugagcucugagaggcccu

SEQ ID NO: 3757546 - RNA, 13 nt, Human
cugcugagggucc

SEQ ID NO: 3757547 - RNA, 19 nt, Human
cugcugagucccaggcuga

SEQ ID NO: 3757548 - RNA, 21 nt, Human
cugcugaguccgaccuggccu

SEQ ID NO: 3757549 - RNA, 20 nt, Human
cugcugauaauguauaugaa

SEQ ID NO: 3757550 - RNA, 17 nt, Human
cugcugaucgccuuccc

SEQ ID NO: 3757551 - RNA, 18 nt, Human
cugcugaucgccuucccc

SEQ ID NO: 3757552 - RNA, 19 nt, Human
cugcugaucgccuucccca

SEQ ID NO: 3757553 - RNA, 22 nt, Human
cugcugauuuaaacacauuaaa

SEQ ID NO: 3757554 - RNA, 16 nt, Human
cugcugcaaggccuuu

SEQ ID NO: 3757555 - RNA, 19 nt, Human
cugcugcaaggccuuucug

SEQ ID NO: 3757556 - RNA, 20 nt, Human
gcagucuauauguuuguaua

SEQ ID NO: 3757557 - RNA, 23 nt, Human
gcagucuccucuuuaaaacaaaa

SEQ ID NO: 3757558 - RNA, 21 nt, Human
gcagucucuauaccaauaaag

SEQ ID NO: 3757559 - RNA, 17 nt, Human
gcagucugauccaggag

SEQ ID NO: 3757560 - RNA, 14 nt, Human
gcagucuggagggg

SEQ ID NO: 3757561 - RNA, 15 nt, Human
gcagucuggaggggc

SEQ ID NO: 3757562 - RNA, 17 nt, Human
gcagucuuaugcuucca

SEQ ID NO: 3757563 - RNA, 14 nt, Human
gcagugaacuauuu

SEQ ID NO: 3757564 - RNA, 20 nt, Human
gcagugaaugauucaguguu

SEQ ID NO: 3757565 - RNA, 14 nt, Human
gcagugaauuguga

SEQ ID NO: 3757566 - RNA, 18 nt, Human
gcagugacgugcaccugu

SEQ ID NO: 3757567 - RNA, 18 nt, Human
gcagugacuguggccaug

SEQ ID NO: 3757568 - RNA, 22 nt, Human
gcagugacuguggccauggucc

SEQ ID NO: 3757569 - RNA, 21 nt, Human
gcagugagaaaaagcuccugu

SEQ ID NO: 3757570 - RNA, 13 nt, Human
gcagugagacugg

SEQ ID NO: 3757571 - RNA, 14 nt, Human
gcagugagacuggg

SEQ ID NO: 3757572 - RNA, 13 nt, Human
gcagugagcagag

SEQ ID NO: 3757573 - RNA, 14 nt, Human
gcagugagcggaga

SEQ ID NO: 3757574 - RNA, 14 nt, Human
gcagugagcugaga

SEQ ID NO: 3757575 - RNA, 14 nt, Human
gcagugagcugugu

SEQ ID NO: 3757576 - RNA, 17 nt, Human
gcagugagugagccugg

SEQ ID NO: 3757577 - RNA, 19 nt, Human
gcagugagugagccuggcu

SEQ ID NO: 3757578 - RNA, 20 nt, Human
gcagugagugagccuggcuc

SEQ ID NO: 3757579 - RNA, 18 nt, Human
gcagugauauucuuuguu

SEQ ID NO: 3757580 - RNA, 22 nt, Human
gcagugauuaaggucucucuuu

SEQ ID NO: 3757581 - RNA, 22 nt, Human
gcagugcaagagacucuggccu

SEQ ID NO: 3757582 - RNA, 16 nt, Human
gcagugcaaggaggga

SEQ ID NO: 3757583 - RNA, 16 nt, Human
gcagugcagcaaccag

SEQ ID NO: 3757584 - RNA, 21 nt, Human
gcagugcagcaaccagagcac

SEQ ID NO: 3757585 - RNA, 23 nt, Human
gcagugcagcaaccagagcacug

SEQ ID NO: 3757586 - RNA, 18 nt, Human
gcagugcaggcacaguau

SEQ ID NO: 3757587 - RNA, 14 nt, Human
gcagugcccaggug

SEQ ID NO: 3757588 - RNA, 13 nt, Human
gcagugccucugg

SEQ ID NO: 3757589 - RNA, 22 nt, Human
gcagugcgcgugcacguggaga

SEQ ID NO: 3757590 - RNA, 19 nt, Human
gcagugcuagugagcuggg

SEQ ID NO: 3757591 - RNA, 22 nt, Human
gcagugcuagugagcugggcau

SEQ ID NO: 3757592 - RNA, 16 nt, Human
gcagugcuucucuaca

SEQ ID NO: 3757593 - RNA, 16 nt, Human
gcagugcuuggcccag

SEQ ID NO: 3757594 - RNA, 19 nt, Human
gcagugcuuggcccaggag

SEQ ID NO: 3757595 - RNA, 13 nt, Human
gcagugcuuuugg

SEQ ID NO: 3757596 - RNA, 22 nt, Human
gcaguggacucagaaagccaac

SEQ ID NO: 3757597 - RNA, 16 nt, Human
gcaguggaggugcugc

SEQ ID NO: 3757598 - RNA, 23 nt, Human
gcaguggaggugggguguuuggg

SEQ ID NO: 3757599 - RNA, 22 nt, Human
gcaguggcaggcagaggcccag

SEQ ID NO: 3757600 - RNA, 18 nt, Human
gcaguggcgcgaucucag

SEQ ID NO: 3757601 - RNA, 22 nt, Human
gcaguggcgugaucucagcuca

SEQ ID NO: 3757602 - RNA, 14 nt, Human
gcaguggcuggucc

SEQ ID NO: 3757603 - RNA, 15 nt, Human
gcaguggcuggucca

SEQ ID NO: 3757604 - RNA, 11 nt, Human
gcagugggagc

SEQ ID NO: 3757605 - RNA, 13 nt, Human
gcagugggagcug

SEQ ID NO: 3757606 - RNA, 18 nt, Human
gcagugggaggguaccag

SEQ ID NO: 3757607 - RNA, 16 nt, Human
gcagugggccuggcca

SEQ ID NO: 3757608 - RNA, 17 nt, Human
gcagugggccuggccag

SEQ ID NO: 3757609 - RNA, 18 nt, Human
gcagugggcuccuggcag

SEQ ID NO: 3757610 - RNA, 18 nt, Human
gcagugggucccacuucc

SEQ ID NO: 3757611 - RNA, 23 nt, Human
gcagugggucccacuuccccucc

SEQ ID NO: 3757612 - RNA, 21 nt, Human
gcaguggugcgaucuggguuc

SEQ ID NO: 3757613 - RNA, 22 nt, Human
gcaguggugcgaucuggguuca

SEQ ID NO: 3757614 - RNA, 22 nt, Human
gcaguggugguuuucuguucuu

SEQ ID NO: 3757615 - RNA, 24 nt, Human
gcagugguuuuggcaaacgcuaaa

SEQ ID NO: 3757616 - RNA, 18 nt, Human
gcagugucaucagaagau

SEQ ID NO: 3757617 - RNA, 18 nt, Human
gcagugucuguguuuuga

SEQ ID NO: 3757618 - RNA, 16 nt, Human
gcagugucuuccauaa

SEQ ID NO: 3757619 - RNA, 17 nt, Human
gcaguguggccaggcug

SEQ ID NO: 3757620 - RNA, 14 nt, Human
gcaguguuuccuuu

SEQ ID NO: 3757621 - RNA, 22 nt, Human
gcaguguuuugcaagugcugga

SEQ ID NO: 3757622 - RNA, 13 nt, Human
gcaguucaccaug

SEQ ID NO: 3757623 - RNA, 20 nt, Human
gcaguucccccaaccucaga

SEQ ID NO: 3757624 - RNA, 23 nt, Human
gcaguucccccaaccucagacuu

SEQ ID NO: 3757625 - RNA, 17 nt, Human
gcaguuccccuggaagc

SEQ ID NO: 3757626 - RNA, 23 nt, Human
gcaguuccggauuggcuugugug

SEQ ID NO: 3757627 - RNA, 16 nt, Human
gcaguucgaccagcca

SEQ ID NO: 3757628 - RNA, 16 nt, Human
gcaguucgcagccacc

SEQ ID NO: 3757629 - RNA, 18 nt, Human
gcaguucuacucaggcug

SEQ ID NO: 3757630 - RNA, 20 nt, Human
gcaguucuacucaggcuggu

SEQ ID NO: 3757631 - RNA, 16 nt, Human
gcaguucuaguuugca

SEQ ID NO: 3757632 - RNA, 15 nt, Human
gcaguucugaagaag

SEQ ID NO: 3757633 - RNA, 11 nt, Human
gcaguucuguu

SEQ ID NO: 3757634 - RNA, 12 nt, Human
gcaguucuguua

SEQ ID NO: 3757635 - RNA, 15 nt, Human
gcaguugaaaagacu

SEQ ID NO: 3757636 - RNA, 22 nt, Human
gcaguugaaugacaacagaagc

SEQ ID NO: 3757637 - RNA, 18 nt, Human
gcaguugaauuuuuauau

SEQ ID NO: 3757638 - RNA, 16 nt, Human
gcaguugcccagccuc

SEQ ID NO: 3757639 - RNA, 15 nt, Human
gcaguugucucuguu

SEQ ID NO: 3757640 - RNA, 18 nt, Human
gcaguuuauauuuaacuc

SEQ ID NO: 3757641 - RNA, 14 nt, Human
gcaguuuaucauuc

SEQ ID NO: 3757642 - RNA, 16 nt, Human
gcaguuuaucauucaa

SEQ ID NO: 3757643 - RNA, 12 nt, Human
gcaguuucaaua

SEQ ID NO: 3757644 - RNA, 20 nt, Human
gcaguuucaauaaaguuuga

SEQ ID NO: 3757645 - RNA, 16 nt, Human
gcaguuucuguccugc

SEQ ID NO: 3757646 - RNA, 14 nt, Human
gcaguuugaaauuc

SEQ ID NO: 3757647 - RNA, 18 nt, Human
gcaguuugaaauucugaa

SEQ ID NO: 3757648 - RNA, 13 nt, Human
gcaguuugcaaaa

SEQ ID NO: 3757649 - RNA, 14 nt, Human
gcaguuugggaggu

SEQ ID NO: 3757650 - RNA, 17 nt, Human
gcaguuugguauuugcg

SEQ ID NO: 3757651 - RNA, 20 nt, Human
gcaguuuuuuuuuucuuguc

SEQ ID NO: 3757652 - RNA, 15 nt, Human
gcauaaaauuggauu

SEQ ID NO: 3757653 - RNA, 14 nt, Human
gcauaaauaugcag

SEQ ID NO: 3757654 - RNA, 15 nt, Human
gcauaaauaugcagu

SEQ ID NO: 3757655 - RNA, 16 nt, Human
gcauaacaauuccucu

SEQ ID NO: 3757656 - RNA, 17 nt, Human
gcauaacaauuccucua

SEQ ID NO: 3757657 - RNA, 13 nt, Human
gcauaacauaaau

SEQ ID NO: 3757658 - RNA, 21 nt, Human
gcauaacauaaaucugugaac

SEQ ID NO: 3757659 - RNA, 23 nt, Human
gcauaacauaaaucugugaacuu

SEQ ID NO: 3757660 - RNA, 22 nt, Human
gcauaacguauaaaagccuguu

SEQ ID NO: 3757661 - RNA, 15 nt, Human
gcauaaguccucuag

SEQ ID NO: 3757662 - RNA, 20 nt, Human
gcauaauaaaugcuucagug

SEQ ID NO: 3757663 - RNA, 18 nt, Human
gcauaauaagcuaaagag

SEQ ID NO: 3757664 - RNA, 12 nt, Human
gcauacaaacaa

SEQ ID NO: 3757665 - RNA, 16 nt, Human
gcauaccacuuuuguu

SEQ ID NO: 3757666 - RNA, 20 nt, Human
gcauaccacuuuuguucuug

SEQ ID NO: 3757667 - RNA, 20 nt, Human
gcauacccacacaaauaaca

SEQ ID NO: 3757668 - RNA, 13 nt, Human
gcauaccuuuauu

SEQ ID NO: 3757669 - RNA, 18 nt, Human
gcauacguacacauuuua

SEQ ID NO: 3757670 - RNA, 13 nt, Human
gcauacuauuaaa

SEQ ID NO: 3757671 - RNA, 14 nt, Human
gcauacuauuaaac

SEQ ID NO: 3757672 - RNA, 23 nt, Human
gcauacugagccaaguauaauuu

SEQ ID NO: 3757673 - RNA, 22 nt, Human
gcauacugccuuguuuaauggu

SEQ ID NO: 3757674 - RNA, 13 nt, Human
gcauacuucaaaa

SEQ ID NO: 3757675 - RNA, 17 nt, Human
gcauacuucaaaaguau

SEQ ID NO: 3757676 - RNA, 18 nt, Human
gcauacuucaaaaguauu

SEQ ID NO: 3757677 - RNA, 21 nt, Human
gcauacuucaaaaguauuuuc

SEQ ID NO: 3757678 - RNA, 14 nt, Human
gcauacuuuguauu

SEQ ID NO: 3757679 - RNA, 18 nt, Human
gcauacuuuguauuuuga

SEQ ID NO: 3757680 - RNA, 22 nt, Human
gcauagagguaccagcaauaug

SEQ ID NO: 3757681 - RNA, 19 nt, Human
gcauagauaauauuguuug

SEQ ID NO: 3757682 - RNA, 16 nt, Human
gcauagaugcagguga

SEQ ID NO: 3757683 - RNA, 23 nt, Human
gcauagauguuuugguagauuaa

SEQ ID NO: 3757684 - RNA, 18 nt, Human
gcauagcccauguuaagu

SEQ ID NO: 3757685 - RNA, 18 nt, Human
gcauaggaguuuggagga

SEQ ID NO: 3757686 - RNA, 23 nt, Human
gcauaggccugcuuugucuccuc

SEQ ID NO: 3757687 - RNA, 19 nt, Human
gcauaggugauccauguaa

SEQ ID NO: 3757688 - RNA, 21 nt, Human
gcauaggugaucucauuuaau

SEQ ID NO: 3757689 - RNA, 17 nt, Human
gcauaguaaauguaguu

SEQ ID NO: 3757690 - RNA, 20 nt, Human
gcauaguaccaaucauuuua

SEQ ID NO: 3757691 - RNA, 22 nt, Human
gcauagucuacuuguuauaaau

SEQ ID NO: 3757692 - RNA, 18 nt, Human
gcauaguuguagacaaag

SEQ ID NO: 3757693 - RNA, 13 nt, Human
gcauaguuucuuu

SEQ ID NO: 3757694 - RNA, 12 nt, Human
gcauauaaaauu

SEQ ID NO: 3757695 - RNA, 23 nt, Human
gcauauaacuuauauuguaagaa

SEQ ID NO: 3757696 - RNA, 17 nt, Human
gcauauaaugaauaaau

SEQ ID NO: 3757697 - RNA, 11 nt, Human
gcauauauuuu

SEQ ID NO: 3757698 - RNA, 14 nt, Human
gcauauauuuuuau

SEQ ID NO: 3757699 - RNA, 18 nt, Human
gcauaucaugcuuugaaa

SEQ ID NO: 3757700 - RNA, 22 nt, Human
gcauaucugccuuuauuguguu

SEQ ID NO: 3757701 - RNA, 14 nt, Human
gcauaugacaaaug

SEQ ID NO: 3757702 - RNA, 18 nt, Human
gcauauguugaauacuuu

SEQ ID NO: 3757703 - RNA, 19 nt, Human
gcauauguugaauacuuuu

SEQ ID NO: 3757704 - RNA, 20 nt, Human
gcauauguugaauacuuuuu

SEQ ID NO: 3757705 - RNA, 20 nt, Human
gcauggucccacaucccugg

SEQ ID NO: 3757706 - RNA, 18 nt, Human
gcauggugccccaggacc

SEQ ID NO: 3757707 - RNA, 19 nt, Human
gcauggugccccaggacca

SEQ ID NO: 3757708 - RNA, 20 nt, Human
gcauggugccccaggaccag

SEQ ID NO: 3757709 - RNA, 23 nt, Human
gcauggugccccaggaccagcuc

SEQ ID NO: 3757710 - RNA, 15 nt, Human
gcaugguggccagag

SEQ ID NO: 3757711 - RNA, 13 nt, Human
gcauggugguugg

SEQ ID NO: 3757712 - RNA, 16 nt, Human
gcaugguuucagcacu

SEQ ID NO: 3757713 - RNA, 17 nt, Human
gcaugguuucagcacua

SEQ ID NO: 3757714 - RNA, 19 nt, Human
gcaugguuuugugccaucu

SEQ ID NO: 3757715 - RNA, 15 nt, Human
gcauguaaacacgcc

SEQ ID NO: 3757716 - RNA, 15 nt, Human
gcauguaaauguaaa

SEQ ID NO: 3757717 - RNA, 17 nt, Human
gcauguaacgcaaguuc

SEQ ID NO: 3757718 - RNA, 13 nt, Human
gcauguacagugu

SEQ ID NO: 3757719 - RNA, 18 nt, Human
gcauguagaggcuuguuu

SEQ ID NO: 3757720 - RNA, 14 nt, Human
gcauguaggagaau

SEQ ID NO: 3757721 - RNA, 13 nt, Human
gcauguaguaaca

SEQ ID NO: 3757722 - RNA, 21 nt, Human
gcauguaguaacacuaauaua

SEQ ID NO: 3757723 - RNA, 24 nt, Human
gcauguaguaacacuaauauauuu

SEQ ID NO: 3757724 - RNA, 17 nt, Human
gcauguauuggccugga

SEQ ID NO: 3757725 - RNA, 18 nt, Human
gcauguauuggccuggag

SEQ ID NO: 3757726 - RNA, 20 nt, Human
gcauguauugugucuuuugc

SEQ ID NO: 3757727 - RNA, 14 nt, Human
gcaugucaaacaug

SEQ ID NO: 3757728 - RNA, 21 nt, Human
gcaugucaaacaugagaugug

SEQ ID NO: 3757729 - RNA, 22 nt, Human
gcaugucccaugugagcugcug

SEQ ID NO: 3757730 - RNA, 19 nt, Human
gcauguccuguaaagguua

SEQ ID NO: 3757731 - RNA, 23 nt, Human
gcaugucgugaccaacuagacau

SEQ ID NO: 3757732 - RNA, 15 nt, Human
gcaugucuuuuaaaa

SEQ ID NO: 3757733 - RNA, 16 nt, Human
gcaugucuuuuuuucu

SEQ ID NO: 3757734 - RNA, 12 nt, Human
gcauguggccug

SEQ ID NO: 3757735 - RNA, 15 nt, Human
gcaugugggcuucaa

SEQ ID NO: 3757736 - RNA, 21 nt, Human
gcauguguauuuccagugcaa

SEQ ID NO: 3757737 - RNA, 18 nt, Human
gcaugugucaugcaugaa

SEQ ID NO: 3757738 - RNA, 11 nt, Human
gcaugugugug

SEQ ID NO: 3757739 - RNA, 13 nt, Human
gcaugugugugug

SEQ ID NO: 3757740 - RNA, 14 nt, Human
gcaugugugugugu

SEQ ID NO: 3757741 - RNA, 22 nt, Human
gcauguguuaaucuuaauguau

SEQ ID NO: 3757742 - RNA, 22 nt, Human
gcauguguuugguucuggggcc

SEQ ID NO: 3757743 - RNA, 13 nt, Human
gcauguuauguuu

SEQ ID NO: 3757744 - RNA, 19 nt, Human
gcauguuauguuuaauaag

SEQ ID NO: 3757745 - RNA, 14 nt, Human
gcauguucucugag

SEQ ID NO: 3757746 - RNA, 22 nt, Human
gcauguucucugaggacacuaa

SEQ ID NO: 3757747 - RNA, 20 nt, Human
gcauguugaccaugucuaug

SEQ ID NO: 3757748 - RNA, 16 nt, Human
gcauguuuagacuuua

SEQ ID NO: 3757749 - RNA, 15 nt, Human
gcauguuuccagcag

SEQ ID NO: 3757750 - RNA, 14 nt, Human
gcauguuugaaaug

SEQ ID NO: 3757751 - RNA, 18 nt, Human
gcauguuuuccagcuccu

SEQ ID NO: 3757752 - RNA, 19 nt, Human
gcauguuuuccagcuccuc

SEQ ID NO: 3757753 - RNA, 18 nt, Human
gcauguuuuguauacaaa

SEQ ID NO: 3757754 - RNA, 19 nt, Human
gcauuaaauauaauaugca

SEQ ID NO: 3757755 - RNA, 22 nt, Human
gcauuaaauucacaaacuuuua

SEQ ID NO: 3757756 - RNA, 20 nt, Human
gcauuaaauuuuaagguaga

SEQ ID NO: 3757757 - RNA, 13 nt, Human
gcauuaacacaaa

SEQ ID NO: 3757758 - RNA, 16 nt, Human
gcauuaacuucucugg

SEQ ID NO: 3757759 - RNA, 19 nt, Human
gcauuacagagaggagaaa

SEQ ID NO: 3757760 - RNA, 13 nt, Human
gcauuacauuccu

SEQ ID NO: 3757761 - RNA, 20 nt, Human
gcauuaccgcguuguaaaau

SEQ ID NO: 3757762 - RNA, 18 nt, Human
gcauuaccucuuuggaaa

SEQ ID NO: 3757763 - RNA, 17 nt, Human
gcauuacgugagccagg

SEQ ID NO: 3757764 - RNA, 24 nt, Human
gcauuacucuuguaagauuuugaa

SEQ ID NO: 3757765 - RNA, 14 nt, Human
gcauuacugcaugc

SEQ ID NO: 3757766 - RNA, 15 nt, Human
gcauuagaauuauuu

SEQ ID NO: 3757767 - RNA, 17 nt, Human
gcauuagaauuauuuaa

SEQ ID NO: 3757768 - RNA, 17 nt, Human
gcauuagcacagauuuu

SEQ ID NO: 3757769 - RNA, 18 nt, Human
gcauuagggaugccuccu

SEQ ID NO: 3757770 - RNA, 19 nt, Human
gcauuaucuagauacugua

SEQ ID NO: 3757771 - RNA, 24 nt, Human
gcauuaucuagauacuguaucaug

SEQ ID NO: 3757772 - RNA, 18 nt, Human
gcauuaugcaauuuuuau

SEQ ID NO: 3757773 - RNA, 20 nt, Human
gcauuaugcaauuuuuauau

SEQ ID NO: 3757774 - RNA, 19 nt, Human
gcauuauguccacugugua

SEQ ID NO: 3757775 - RNA, 18 nt, Human
gcauuauucauuuaguga

SEQ ID NO: 3757776 - RNA, 22 nt, Human
gcauuauucucuuuuaucuguu

SEQ ID NO: 3757777 - RNA, 15 nt, Human
gcauucacccagaca

SEQ ID NO: 3757778 - RNA, 16 nt, Human
gcauucagaagaaaaa

SEQ ID NO: 3757779 - RNA, 18 nt, Human
gcauucagaagaaaaaga

SEQ ID NO: 3757780 - RNA, 22 nt, Human
gcauucauuuuuauagcaacaa

SEQ ID NO: 3757781 - RNA, 18 nt, Human
gcauuccaacaaaggguu

SEQ ID NO: 3757782 - RNA, 12 nt, Human
gcauuccagccc

SEQ ID NO: 3757783 - RNA, 15 nt, Human
gcauuccccaggagg

SEQ ID NO: 3757784 - RNA, 17 nt, Human
gcauuccccaggaggcc

SEQ ID NO: 3757785 - RNA, 21 nt, Human
gcauuccccaggaggccagcc

SEQ ID NO: 3757786 - RNA, 22 nt, Human
gcauuccccaggaggccagccu

SEQ ID NO: 3757787 - RNA, 16 nt, Human
gcauuccuacaaagau

SEQ ID NO: 3757788 - RNA, 19 nt, Human
gcauuccuacaaagauguu

SEQ ID NO: 3757789 - RNA, 19 nt, Human
gcauuccugauaugauuua

SEQ ID NO: 3757790 - RNA, 19 nt, Human
gcauuccuucuuugauaau

SEQ ID NO: 3757791 - RNA, 22 nt, Human
gcauuccuucuuugauaauguu

SEQ ID NO: 3757792 - RNA, 13 nt, Human
gcauucucacucc

SEQ ID NO: 3757793 - RNA, 18 nt, Human
gcauucucacuccuaccu

SEQ ID NO: 3757794 - RNA, 20 nt, Human
gcauucucauuggaaauuua

SEQ ID NO: 3757795 - RNA, 22 nt, Human
gcauucugccgugugcccucgg

SEQ ID NO: 3757796 - RNA, 19 nt, Human
gcauucuggaccucugggu

SEQ ID NO: 3757797 - RNA, 15 nt, Human
gcauucuuauucauc

SEQ ID NO: 3757798 - RNA, 13 nt, Human
gcauucuucucug

SEQ ID NO: 3757799 - RNA, 21 nt, Human
gcauucuucugaucacugaaa

SEQ ID NO: 3757800 - RNA, 12 nt, Human
gcauugaacaca

SEQ ID NO: 3757801 - RNA, 16 nt, Human
gcauugaacacaaacu

SEQ ID NO: 3757802 - RNA, 18 nt, Human
gcauugaacacaaacugu

SEQ ID NO: 3757803 - RNA, 22 nt, Human
gcauugaacacaaacuguaaau

SEQ ID NO: 3757804 - RNA, 16 nt, Human
gcauugacaaaucugu

SEQ ID NO: 3757805 - RNA, 23 nt, Human
gcauugaccgcgacuaauuucaa

SEQ ID NO: 3757806 - RNA, 15 nt, Human
gcauugacuuucccc

SEQ ID NO: 3757807 - RNA, 12 nt, Human
gcauugagaacu

SEQ ID NO: 3757808 - RNA, 21 nt, Human
gcauugagaacugcauauguu

SEQ ID NO: 3757809 - RNA, 18 nt, Human
gcauugaggaagagucuu

SEQ ID NO: 3757810 - RNA, 16 nt, Human
gcauugauggggaagg

SEQ ID NO: 3757811 - RNA, 12 nt, Human
gcauugcauuua

SEQ ID NO: 3757812 - RNA, 20 nt, Human
gcauugccuggccuuccugu

SEQ ID NO: 3757813 - RNA, 15 nt, Human
gcauugcuagauaaa

SEQ ID NO: 3757814 - RNA, 16 nt, Human
gcauugcuagauaaaa

SEQ ID NO: 3757815 - RNA, 16 nt, Human
gcauugcuggacucug

SEQ ID NO: 3757816 - RNA, 13 nt, Human
gcauugcugguuc

SEQ ID NO: 3757817 - RNA, 12 nt, Human
gcauugcuuucc

SEQ ID NO: 3757818 - RNA, 13 nt, Human
gcauugcuuucgu

SEQ ID NO: 3757819 - RNA, 19 nt, Human
gcauuggaacuggaggcag

SEQ ID NO: 3757820 - RNA, 18 nt, Human
gcauuggauacagcagua

SEQ ID NO: 3757821 - RNA, 20 nt, Human
gcauuggcagcaggugcugc

SEQ ID NO: 3757822 - RNA, 21 nt, Human
gcauuggcagcaggugcugcu

SEQ ID NO: 3757823 - RNA, 10 nt, Human
gcauuguaaa

SEQ ID NO: 3757824 - RNA, 11 nt, Human
gcauuguaaau

SEQ ID NO: 3757825 - RNA, 22 nt, Human
gcauuguaagcguauggcuuua

SEQ ID NO: 3757826 - RNA, 15 nt, Human
gcauuguaucgaugu

SEQ ID NO: 3757827 - RNA, 18 nt, Human
gcauuguaucugucuuuc

SEQ ID NO: 3757828 - RNA, 19 nt, Human
gcauuguaucugucuuucc

SEQ ID NO: 3757829 - RNA, 17 nt, Human
gcauugucuauuuuucu

SEQ ID NO: 3757830 - RNA, 18 nt, Human
gcauugugaacugacagg

SEQ ID NO: 3757831 - RNA, 23 nt, Human
gcauugugaguaaaucagauguu

SEQ ID NO: 3757832 - RNA, 22 nt, Human
gcauugugauuggccuguagag

SEQ ID NO: 3757833 - RNA, 16 nt, Human
gcauuguggcugucag

SEQ ID NO: 3757834 - RNA, 19 nt, Human
gcauuguggcugucagcag

SEQ ID NO: 3757835 - RNA, 18 nt, Human
gcauugugggaaggggag

SEQ ID NO: 3757836 - RNA, 15 nt, Human
gcauuguugaggugg

SEQ ID NO: 3757837 - RNA, 23 nt, Human
gcauuguugagguggucugaaug

SEQ ID NO: 3757838 - RNA, 14 nt, Human
gcauuguuucugug

SEQ ID NO: 3757839 - RNA, 17 nt, Human
gcauuguuucugugggc

SEQ ID NO: 3757840 - RNA, 22 nt, Human
gcauuguuugcuuauuguucca

SEQ ID NO: 3757841 - RNA, 13 nt, Human
gcauuuaaaaaaa

SEQ ID NO: 3757842 - RNA, 15 nt, Human
gcauuuaaaagauac

SEQ ID NO: 3757843 - RNA, 16 nt, Human
gcauuuaaaagauaca

SEQ ID NO: 3757844 - RNA, 17 nt, Human
gcauuuaaaagauacag

SEQ ID NO: 3757845 - RNA, 18 nt, Human
gcauuuaaaagauacagu

SEQ ID NO: 3757846 - RNA, 22 nt, Human
gcauuuaaaagauacaguuacu

SEQ ID NO: 3757847 - RNA, 18 nt, Human
gcauuuacuuuguguuca

SEQ ID NO: 3757848 - RNA, 12 nt, Human
gcauuuagaugu

SEQ ID NO: 3757849 - RNA, 23 nt, Human
gcauuuagggaguauucuaauaa

SEQ ID NO: 3757850 - RNA, 17 nt, Human
gcauuuaucauucuugu

SEQ ID NO: 3757851 - RNA, 19 nt, Human
gcauuuauggucaacacuu

SEQ ID NO: 3757852 - RNA, 19 nt, Human
gcauuucacuugaguggag

SEQ ID NO: 3757853 - RNA, 16 nt, Human
gcauuucauaaacuaa

SEQ ID NO: 3757854 - RNA, 18 nt, Human
gcauauuauuuuauguug

SEQ ID NO: 3757855 - RNA, 17 nt, Human
gcauauucaggaagcuc

SEQ ID NO: 3757856 - RNA, 16 nt, Human
gcauauuccuuucuau

SEQ ID NO: 3757857 - RNA, 14 nt, Human
gcauauugacuuuu

SEQ ID NO: 3757858 - RNA, 19 nt, Human
gcauauugcuuuuucuaau

SEQ ID NO: 3757859 - RNA, 12 nt, Human
gcauauuguaca

SEQ ID NO: 3757860 - RNA, 16 nt, Human
gcauauuguacacuuu

SEQ ID NO: 3757861 - RNA, 23 nt, Human
gcauauuuauagcaauccauguu

SEQ ID NO: 3757862 - RNA, 21 nt, Human
gcauauuuauccaaaaugugu

SEQ ID NO: 3757863 - RNA, 23 nt, Human
gcauauuuauccaaaauguguau

SEQ ID NO: 3757864 - RNA, 19 nt, Human
gcauauuugcaaaguguau

SEQ ID NO: 3757865 - RNA, 15 nt, Human
gcauauuuuucacau

SEQ ID NO: 3757866 - RNA, 19 nt, Human
gcauauuuuucacauaucu

SEQ ID NO: 3757867 - RNA, 13 nt, Human
gcaucaaaagaca

SEQ ID NO: 3757868 - RNA, 17 nt, Human
gcaucaaaagacaauuc

SEQ ID NO: 3757869 - RNA, 19 nt, Human
gcaucaaaagacaauucuu

SEQ ID NO: 3757870 - RNA, 22 nt, Human
gcaucaaaagacaauucuuuau

SEQ ID NO: 3757871 - RNA, 23 nt, Human
gcaucaagaggugggagggcccu

SEQ ID NO: 3757872 - RNA, 17 nt, Human
gcaucaagaugugacau

SEQ ID NO: 3757873 - RNA, 12 nt, Human
gcaucaagccac

SEQ ID NO: 3757874 - RNA, 17 nt, Human
gcaucaccucaggccag

SEQ ID NO: 3757875 - RNA, 14 nt, Human
gcaucaccugccug

SEQ ID NO: 3757876 - RNA, 15 nt, Human
gcaucaccugccugu

SEQ ID NO: 3757877 - RNA, 22 nt, Human
gcaucaccuuaggcagggaagu

SEQ ID NO: 3757878 - RNA, 18 nt, Human
gcaucagaaagggagggc

SEQ ID NO: 3757879 - RNA, 19 nt, Human
gcaucagcugcucagaucc

SEQ ID NO: 3757880 - RNA, 12 nt, Human
gcaucaggccag

SEQ ID NO: 3757881 - RNA, 16 nt, Human
gcaucaggccaggccc

SEQ ID NO: 3757882 - RNA, 17 nt, Human
gcaucaggccaggcccu

SEQ ID NO: 3757883 - RNA, 18 nt, Human
gcaucaggccaggcccuc

SEQ ID NO: 3757884 - RNA, 23 nt, Human
gcaucaggccaggcccucugccc

SEQ ID NO: 3757885 - RNA, 21 nt, Human
gcaucagggggaagaagcaga

SEQ ID NO: 3757886 - RNA, 17 nt, Human
gcaucauaguaguuuuu

SEQ ID NO: 3757887 - RNA, 20 nt, Human
gcaucaucuguagauacuag

SEQ ID NO: 3757888 - RNA, 13 nt, Human
gcaucaugcaugu

SEQ ID NO: 3757889 - RNA, 14 nt, Human
gcaucaugccucug

SEQ ID NO: 3757890 - RNA, 13 nt, Human
gcaucauggcuau

SEQ ID NO: 3757891 - RNA, 11 nt, Human
gcaucauugca

SEQ ID NO: 3757892 - RNA, 19 nt, Human
gcauccaaucucaaggaau

SEQ ID NO: 3757893 - RNA, 15 nt, Human
gcauccaccuccuuc

SEQ ID NO: 3757894 - RNA, 17 nt, Human
gcauccaccuccuucuc

SEQ ID NO: 3757895 - RNA, 23 nt, Human
gcauccagagucccugccuggac

SEQ ID NO: 3757896 - RNA, 12 nt, Human
gcauccaggcac

SEQ ID NO: 3757897 - RNA, 17 nt, Human
gcauccaguaucuugaa

SEQ ID NO: 3757898 - RNA, 18 nt, Human
gcauccaguaucuugaag

SEQ ID NO: 3757899 - RNA, 15 nt, Human
gcauccaguuaacca

SEQ ID NO: 3757900 - RNA, 17 nt, Human
gcauccauaccagcucg

SEQ ID NO: 3757901 - RNA, 21 nt, Human
gcauccauggggucucucaca

SEQ ID NO: 3757902 - RNA, 12 nt, Human
gcauccauuccu

SEQ ID NO: 3757903 - RNA, 14 nt, Human
gcauccauuccuca

SEQ ID NO: 3757904 - RNA, 18 nt, Human
gcauccauuccucaggga

SEQ ID NO: 3757905 - RNA, 15 nt, Human
gcaucccagcaccug

SEQ ID NO: 3757906 - RNA, 20 nt, Human
gcaucccaggaugcugggug

SEQ ID NO: 3757907 - RNA, 15 nt, Human
gcaucccaguggccu

SEQ ID NO: 3757908 - RNA, 23 nt, Human
gcaucccaguggccucaacccuc

SEQ ID NO: 3757909 - RNA, 20 nt, Human
gcauccccuuggcugugagg

SEQ ID NO: 3757910 - RNA, 16 nt, Human
gcaucccggaggaaau

SEQ ID NO: 3757911 - RNA, 22 nt, Human
gcaucccggaggaaaucugcag

SEQ ID NO: 3757912 - RNA, 17 nt, Human
gcaucccugaggcugga

SEQ ID NO: 3757913 - RNA, 20 nt, Human
gcaucccugaggcuggacuc

SEQ ID NO: 3757914 - RNA, 12 nt, Human
gcaucccugggc

SEQ ID NO: 3757915 - RNA, 18 nt, Human
gcaucccugggccuuggg

SEQ ID NO: 3757916 - RNA, 14 nt, Human
gcauccgaccaggu

SEQ ID NO: 3757917 - RNA, 16 nt, Human
gcauccgaccagguug

SEQ ID NO: 3757918 - RNA, 19 nt, Human
gcauccguaguucccugaa

SEQ ID NO: 3757919 - RNA, 14 nt, Human
gcauccuaagaaau

SEQ ID NO: 3757920 - RNA, 21 nt, Human
gcauccuaagaaauaugugag

SEQ ID NO: 3757921 - RNA, 24 nt, Human
gcauccuaagaaauaugugagauu

SEQ ID NO: 3757922 - RNA, 15 nt, Human
gcauccucaguuccu

SEQ ID NO: 3757923 - RNA, 15 nt, Human
gcauccuccaagaau

SEQ ID NO: 3757924 - RNA, 16 nt, Human
gcauccucuggagcca

SEQ ID NO: 3757925 - RNA, 18 nt, Human
gcauccucuggagccagc

SEQ ID NO: 3757926 - RNA, 14 nt, Human
gcauccugagcccc

SEQ ID NO: 3757927 - RNA, 23 nt, Human
gcauccugccuuagagccaggca

SEQ ID NO: 3757928 - RNA, 23 nt, Human
gcauccuggcacccggccccugc

SEQ ID NO: 3757929 - RNA, 14 nt, Human
gcauccugugaagu

SEQ ID NO: 3757930 - RNA, 14 nt, Human
gcauccuuccuaua

SEQ ID NO: 3757931 - RNA, 20 nt, Human
gcauccuuuucugcagaggg

SEQ ID NO: 3757932 - RNA, 20 nt, Human
gcaucgcaccauucugacuc

SEQ ID NO: 3757933 - RNA, 20 nt, Human
gcaucggccuagggccccca

SEQ ID NO: 3757934 - RNA, 17 nt, Human
gcaucguccccuccccc

SEQ ID NO: 3757935 - RNA, 15 nt, Human
gcaucuaaacuuuaa

SEQ ID NO: 3757936 - RNA, 21 nt, Human
gcaucuagaggcuuccuucau

SEQ ID NO: 3757937 - RNA, 20 nt, Human
gcaucuagcaugucgucaaa

SEQ ID NO: 3757938 - RNA, 15 nt, Human
gcaucuaucugugcu

SEQ ID NO: 3757939 - RNA, 21 nt, Human
gcaucucacagcuaugcaaaa

SEQ ID NO: 3757940 - RNA, 12 nt, Human
gcaucucacucc

SEQ ID NO: 3757941 - RNA, 15 nt, Human
gcaucucagcccaca

SEQ ID NO: 3757942 - RNA, 20 nt, Human
gcaucuccaagcagcuuaga

SEQ ID NO: 3757943 - RNA, 13 nt, Human
gcaucucccagau

SEQ ID NO: 3757944 - RNA, 21 nt, Human
gcaucucccagauaaugugaa

SEQ ID NO: 3757945 - RNA, 17 nt, Human
gcaucucccucacugaa

SEQ ID NO: 3757946 - RNA, 23 nt, Human
gcaucuccugaggaucagaaagu

SEQ ID NO: 3757947 - RNA, 18 nt, Human
gcaucucuaccuucuccc

SEQ ID NO: 3757948 - RNA, 17 nt, Human
gcaucucuguacuuugc

SEQ ID NO: 3757949 - RNA, 17 nt, Human
gcaucucuugaggccag

SEQ ID NO: 3757950 - RNA, 18 nt, Human
gcaucucuugaggccagg

SEQ ID NO: 3757951 - RNA, 15 nt, Human
gcaucugaccagcag

SEQ ID NO: 3757952 - RNA, 20 nt, Human
gcaucugaccagcagcgccu

SEQ ID NO: 3757953 - RNA, 20 nt, Human
gcaucugauuugcauauuca

SEQ ID NO: 3757954 - RNA, 16 nt, Human
gcaucuggagagaaca

SEQ ID NO: 3757955 - RNA, 16 nt, Human
gcaucuggccuggcca

SEQ ID NO: 3757956 - RNA, 23 nt, Human
gcaucugggauucccaccaaggu

SEQ ID NO: 3757957 - RNA, 17 nt, Human
gcaucuggguagcugua

SEQ ID NO: 3757958 - RNA, 12 nt, Human
gcaucuguacaa

SEQ ID NO: 3757959 - RNA, 15 nt, Human
gcaucuguacaaagg

SEQ ID NO: 3757960 - RNA, 21 nt, Human
gcaucuguauaaguaagaaaa

SEQ ID NO: 3757961 - RNA, 22 nt, Human
gcaucuguauaaguaagaaaau

SEQ ID NO: 3757962 - RNA, 23 nt, Human
gcaucuguauaaguaagaaaaua

SEQ ID NO: 3757963 - RNA, 16 nt, Human
gcaucugucccccuuu

SEQ ID NO: 3757964 - RNA, 15 nt, Human
gcaucugugauggga

SEQ ID NO: 3757965 - RNA, 18 nt, Human
gcaucugugaugggagcg

SEQ ID NO: 3757966 - RNA, 13 nt, Human
gcaucuguucugg

SEQ ID NO: 3757967 - RNA, 22 nt, Human
gcaucuuauagcacuuugaaau

SEQ ID NO: 3757968 - RNA, 13 nt, Human
gcaucuuccagaa

SEQ ID NO: 3757969 - RNA, 17 nt, Human
gcaucuuccagaagugu

SEQ ID NO: 3757970 - RNA, 20 nt, Human
gcaucuucgucuucacucuu

SEQ ID NO: 3757971 - RNA, 23 nt, Human
gcaucuucgucuucacucuuagg

SEQ ID NO: 3757972 - RNA, 13 nt, Human
gcaucuucuccau

SEQ ID NO: 3757973 - RNA, 19 nt, Human
gcaucuucuggagucucca

SEQ ID NO: 3757974 - RNA, 17 nt, Human
gcaucuugccuccaggu

SEQ ID NO: 3757975 - RNA, 15 nt, Human
gcaucuugcuggcua

SEQ ID NO: 3757976 - RNA, 11 nt, Human
gcaucuuugau

SEQ ID NO: 3757977 - RNA, 17 nt, Human
gcaucuuugauguguug

SEQ ID NO: 3757978 - RNA, 13 nt, Human
gcaucuuugccuu

SEQ ID NO: 3757979 - RNA, 23 nt, Human
gcaucuuugccuugggcugcucc

SEQ ID NO: 3757980 - RNA, 23 nt, Human
gcaucuuuggggagguguucacu

SEQ ID NO: 3757981 - RNA, 12 nt, Human
gcaucuuuugua

SEQ ID NO: 3757982 - RNA, 16 nt, Human
gcaucuuuuguauuaa

SEQ ID NO: 3757983 - RNA, 18 nt, Human
gcaugaaaggcuuuuaaa

SEQ ID NO: 3757984 - RNA, 15 nt, Human
gcaugaaauuuuuaa

SEQ ID NO: 3757985 - RNA, 20 nt, Human
gcaugaagagcaaaaauauc

SEQ ID NO: 3757986 - RNA, 13 nt, Human
gcaugaagguuuc

SEQ ID NO: 3757987 - RNA, 16 nt, Human
gcaugacaagccccag

SEQ ID NO: 3757988 - RNA, 17 nt, Human
gcaugacaagccccagg

SEQ ID NO: 3757989 - RNA, 21 nt, Human
gcaugacaagccccaggcagg

SEQ ID NO: 3757990 - RNA, 20 nt, Human
gcaugacacgaauauugcug

SEQ ID NO: 3757991 - RNA, 21 nt, Human
gcaugacacgaauauugcuga

SEQ ID NO: 3757992 - RNA, 15 nt, Human
gcaugacagaaaaua

SEQ ID NO: 3757993 - RNA, 19 nt, Human
gcaugacagaaaauaugua

SEQ ID NO: 3757994 - RNA, 21 nt, Human
gcaugacagaaaauauguauu

SEQ ID NO: 3757995 - RNA, 15 nt, Human
gcaugacagccucua

SEQ ID NO: 3757996 - RNA, 14 nt, Human
gcaugacauuucuu

SEQ ID NO: 3757997 - RNA, 15 nt, Human
gcaugaccagaugcg

SEQ ID NO: 3757998 - RNA, 18 nt, Human
gcaugagacucagugcag

SEQ ID NO: 3757999 - RNA, 17 nt, Human
gcaugagggguuccucc

SEQ ID NO: 3758000 - RNA, 23 nt, Human
gcaugauagacacauaugagggg

SEQ ID NO: 3758001 - RNA, 22 nt, Human
gcaugauccaagcaagacugag

SEQ ID NO: 3758002 - RNA, 16 nt, Human
gcaugaucugaaaaau

SEQ ID NO: 3758003 - RNA, 22 nt, Human
gcauuucauucuucucuagcug

SEQ ID NO: 3758004 - RNA, 22 nt, Human
gcauuuccaacaccacagacac

SEQ ID NO: 3758005 - RNA, 18 nt, Human
gcauuuccugcuggucaa

SEQ ID NO: 3758006 - RNA, 13 nt, Human
gcauuucucuggg

SEQ ID NO: 3758007 - RNA, 13 nt, Human
gcauuucugaagu

SEQ ID NO: 3758008 - RNA, 21 nt, Human
gcauuucuugauguugcuuag

SEQ ID NO: 3758009 - RNA, 14 nt, Human
gcauuugaaaauuu

SEQ ID NO: 3758010 - RNA, 16 nt, Human
gcauuugaaaauuuug

SEQ ID NO: 3758011 - RNA, 12 nt, Human
gcauuugaaugc

SEQ ID NO: 3758012 - RNA, 16 nt, Human
gcauuugaaugcauuu

SEQ ID NO: 3758013 - RNA, 13 nt, Human
gcauuugagaaau

SEQ ID NO: 3758014 - RNA, 18 nt, Human
gcauuugaggucuguucu

SEQ ID NO: 3758015 - RNA, 13 nt, Human
gcauuugcugaau

SEQ ID NO: 3758016 - RNA, 14 nt, Human
gcauuugcugaaua

SEQ ID NO: 3758017 - RNA, 23 nt, Human
gcauuugcugaauacagaggcaa

SEQ ID NO: 3758018 - RNA, 23 nt, Human
gcauuuggauuggggucccucua

SEQ ID NO: 3758019 - RNA, 20 nt, Human
gcauuuggguaauuuagauu

SEQ ID NO: 3758020 - RNA, 17 nt, Human
gcauuuggguccaggag

SEQ ID NO: 3758021 - RNA, 18 nt, Human
gcauuuggguccaggagg

SEQ ID NO: 3758022 - RNA, 13 nt, Human
gcauuuguaaaua

SEQ ID NO: 3758023 - RNA, 18 nt, Human
gcauuuguaaauauuaaa

SEQ ID NO: 3758024 - RNA, 21 nt, Human
gcauuuguaaauauuaaacca

SEQ ID NO: 3758025 - RNA, 16 nt, Human
gcauuuguauuuugug

SEQ ID NO: 3758026 - RNA, 19 nt, Human
gcauuuguauuuuguguga

SEQ ID NO: 3758027 - RNA, 18 nt, Human
gcauuugucaaugacagu

SEQ ID NO: 3758028 - RNA, 23 nt, Human
gcauuugucuauucuccagcuga

SEQ ID NO: 3758029 - RNA, 13 nt, Human
gcauuuguguguu

SEQ ID NO: 3758030 - RNA, 23 nt, Human
gcauuuuaaacaaaauagaaagu

SEQ ID NO: 3758031 - RNA, 22 nt, Human
cuggagggcuagaaccuggaga

SEQ ID NO: 3758032 - RNA, 21 nt, Human
cuggaggggacgcugguagag

SEQ ID NO: 3758033 - RNA, 21 nt, Human
cuggaggggagcucugucugu

SEQ ID NO: 3758034 - RNA, 13 nt, Human
cuggaggggaggg

SEQ ID NO: 3758035 - RNA, 14 nt, Human
cuggaggggcaugg

SEQ ID NO: 3758036 - RNA, 16 nt, Human
cuggaggggccccugc

SEQ ID NO: 3758037 - RNA, 15 nt, Human
cuggagggggaaugg

SEQ ID NO: 3758038 - RNA, 20 nt, Human
cuggagguaaggccuuugag

SEQ ID NO: 3758039 - RNA, 22 nt, Human
cuggagguacgaaaagagggga

SEQ ID NO: 3758040 - RNA, 21 nt, Human
cuggaggucacauucaggaag

SEQ ID NO: 3758041 - RNA, 13 nt, Human
cuggaggugccag

SEQ ID NO: 3758042 - RNA, 23 nt, Human
cuggaggugccagcaaagcccca

SEQ ID NO: 3758043 - RNA, 14 nt, Human
cuggaggugggagc

SEQ ID NO: 3758044 - RNA, 14 nt, Human
gccaaccccugugg

SEQ ID NO: 3758045 - RNA, 15 nt, Human
gccaaccccugugga

SEQ ID NO: 3758046 - RNA, 22 nt, Human
gccaacccuucuccucuuguaa

SEQ ID NO: 3758047 - RNA, 15 nt, Human
gccaaccuauuuuga

SEQ ID NO: 3758048 - RNA, 16 nt, Human
gccaaccuauuuugaa

SEQ ID NO: 3758049 - RNA, 18 nt, Human
gccaaccuguaauaaaua

SEQ ID NO: 3758050 - RNA, 14 nt, Human
gccaacgacaaagc

SEQ ID NO: 3758051 - RNA, 23 nt, Human
gccaacgacaaagccaaacucug

SEQ ID NO: 3758052 - RNA, 17 nt, Human
gccaacuagccccuggg

SEQ ID NO: 3758053 - RNA, 18 nt, Human
gccaacuaugauuauuaa

SEQ ID NO: 3758054 - RNA, 19 nt, Human
gccaacuauggccugugga

SEQ ID NO: 3758055 - RNA, 17 nt, Human
gccaacugaucuguuau

SEQ ID NO: 3758056 - RNA, 15 nt, Human
gccaacuugagggcc

SEQ ID NO: 3758057 - RNA, 23 nt, Human
gccaacuugagggcccagagcag

SEQ ID NO: 3758058 - RNA, 15 nt, Human
gccaacuuguaaaua

SEQ ID NO: 3758059 - RNA, 20 nt, Human
gccaacuuguaaauacacca

SEQ ID NO: 3758060 - RNA, 18 nt, Human
gccaagaauauugcaaaa

SEQ ID NO: 3758061 - RNA, 13 nt, Human
gccaagacaaauc

SEQ ID NO: 3758062 - RNA, 22 nt, Human
gccaagacaaaucaacagaagc

SEQ ID NO: 3758063 - RNA, 23 nt, Human
gccaagacaaaucaacagaagca

SEQ ID NO: 3758064 - RNA, 21 nt, Human
gccaagacugcuguggccagg

SEQ ID NO: 3758065 - RNA, 23 nt, Human
gccaagacugcuguggccaggag

SEQ ID NO: 3758066 - RNA, 12 nt, Human
gccaagacuugg

SEQ ID NO: 3758067 - RNA, 18 nt, Human
gccaagacuuggcaacag

SEQ ID NO: 3758068 - RNA, 18 nt, Human
gccaagagaaacuuccua

SEQ ID NO: 3758069 - RNA, 22 nt, Human
gccaagagaaaggccugcacac

SEQ ID NO: 3758070 - RNA, 23 nt, Human
gccaagagaaaggccugcacaca

SEQ ID NO: 3758071 - RNA, 16 nt, Human
gccaagaggcugcagc

SEQ ID NO: 3758072 - RNA, 17 nt, Human
gccaagaggcugcagcc

SEQ ID NO: 3758073 - RNA, 21 nt, Human
gccaagagguuuggcuccugc

SEQ ID NO: 3758074 - RNA, 20 nt, Human
gccaagaguggccccaccug

SEQ ID NO: 3758075 - RNA, 22 nt, Human
gccaagcaccuagccucgcucu

SEQ ID NO: 3758076 - RNA, 23 nt, Human
gccaagcacugugcucagggcua

SEQ ID NO: 3758077 - RNA, 12 nt, Human
gccaagcagcca

SEQ ID NO: 3758078 - RNA, 22 nt, Human
gccaagcauuuaauguagccau

SEQ ID NO: 3758079 - RNA, 20 nt, Human
gccaagcucaggaccaggca

SEQ ID NO: 3758080 - RNA, 16 nt, Human
gccaagcuccaagccc

SEQ ID NO: 3758081 - RNA, 22 nt, Human
gccaagcuuguuaucagcuuuc

SEQ ID NO: 3758082 - RNA, 15 nt, Human
gccaagcuuuaaauu

SEQ ID NO: 3758083 - RNA, 13 nt, Human
gccaaggagcugc

SEQ ID NO: 3758084 - RNA, 14 nt, Human
gccaaggagcugcu

SEQ ID NO: 3758085 - RNA, 21 nt, Human
gccaaggagggugagugcaag

SEQ ID NO: 3758086 - RNA, 23 nt, Human
gccaaggaggguggaucaccuga

SEQ ID NO: 3758087 - RNA, 21 nt, Human
gccaaggagucacugagacca

SEQ ID NO: 3758088 - RNA, 15 nt, Human
gccaaggcagaggcc

SEQ ID NO: 3758089 - RNA, 21 nt, Human
gccaaggcagaggccugggcu

SEQ ID NO: 3758090 - RNA, 19 nt, Human
gccaaggccaaaggaagca

SEQ ID NO: 3758091 - RNA, 20 nt, Human
gccaaggccaaaggaagcac

SEQ ID NO: 3758092 - RNA, 24 nt, Human
gccaaggccaaaggaagcacaugc

SEQ ID NO: 3758093 - RNA, 21 nt, Human
gccaaggccagaguggccugg

SEQ ID NO: 3758094 - RNA, 15 nt, Human
gccaaggccuucucc

SEQ ID NO: 3758095 - RNA, 19 nt, Human
gccaaggcuggagugcagu

SEQ ID NO: 3758096 - RNA, 19 nt, Human
gccaagggaaccugugucc

SEQ ID NO: 3758097 - RNA, 21 nt, Human
gccaagggaugaaagagaagg

SEQ ID NO: 3758098 - RNA, 21 nt, Human
gccaagggccgacuaagagaa

SEQ ID NO: 3758099 - RNA, 16 nt, Human
gccaaggucugagcca

SEQ ID NO: 3758100 - RNA, 23 nt, Human
gccaaggugggaggauugcuuga

SEQ ID NO: 3758101 - RNA, 22 nt, Human
gccaaggugggcugagcccugg

SEQ ID NO: 3758102 - RNA, 13 nt, Human
gccaagguguccu

SEQ ID NO: 3758103 - RNA, 18 nt, Human
gccaaguggggugcuggg

SEQ ID NO: 3758104 - RNA, 19 nt, Human
gccaaguggggugcuggga

SEQ ID NO: 3758105 - RNA, 20 nt, Human
gccaaguggggugcugggag

SEQ ID NO: 3758106 - RNA, 23 nt, Human
gccaaguggggugcugggaggag

SEQ ID NO: 3758107 - RNA, 16 nt, Human
gccaaguuccucuaac

SEQ ID NO: 3758108 - RNA, 15 nt, Human
gccaaguuccucuag

SEQ ID NO: 3758109 - RNA, 12 nt, Human
gccaaguucuua

SEQ ID NO: 3758110 - RNA, 19 nt, Human
gccaauaaaccaaugaacg

SEQ ID NO: 3758111 - RNA, 22 nt, Human
gccaauaaaccaaugaacgaag

SEQ ID NO: 3758112 - RNA, 14 nt, Human
gccaauauccuaau

SEQ ID NO: 3758113 - RNA, 18 nt, Human
gccaauauccuaauaaaa

SEQ ID NO: 3758114 - RNA, 19 nt, Human
gccaauauccuaauaaaaa

SEQ ID NO: 3758115 - RNA, 17 nt, Human
gccaauauguauuguaa

SEQ ID NO: 3758116 - RNA, 22 nt, Human
gccaauauuaguaggauuuuug

SEQ ID NO: 3758117 - RNA, 13 nt, Human
gccaauccccucc

SEQ ID NO: 3758118 - RNA, 19 nt, Human
gccaauccccuccuugggc

SEQ ID NO: 3758119 - RNA, 16 nt, Human
gccaaugcacggccuc

SEQ ID NO: 3758120 - RNA, 21 nt, Human
gccaaugcuacaguaauaaau

SEQ ID NO: 3758121 - RNA, 13 nt, Human
gccaauggaaccu

SEQ ID NO: 3758122 - RNA, 17 nt, Human
gccaauggaaccuccuu

SEQ ID NO: 3758123 - RNA, 18 nt, Human
gccaauggaaccuccuuu

SEQ ID NO: 3758124 - RNA, 20 nt, Human
gccaauggaaccuccuuucu

SEQ ID NO: 3758125 - RNA, 22 nt, Human
gccaauguauugauaagagggc

SEQ ID NO: 3758126 - RNA, 16 nt, Human
gccaaugucuccuccc

SEQ ID NO: 3758127 - RNA, 14 nt, Human
gccaauuauguuaa

SEQ ID NO: 3758128 - RNA, 19 nt, Human
gccaauuauguuaaacuag

SEQ ID NO: 3758129 - RNA, 18 nt, Human
gccaauucagacaggcaa

SEQ ID NO: 3758130 - RNA, 20 nt, Human
gccaauuucaaguuccaagu

SEQ ID NO: 3758131 - RNA, 20 nt, Human
gccaauuucucuuaaguacu

SEQ ID NO: 3758132 - RNA, 12 nt, Human
gccaauuugcac

SEQ ID NO: 3758133 - RNA, 22 nt, Human
gccaauuuuucugcacugagca

SEQ ID NO: 3758134 - RNA, 15 nt, Human
gccacaaaaacaggu

SEQ ID NO: 3758135 - RNA, 15 nt, Human
gccacaaauaaaaug

SEQ ID NO: 3758136 - RNA, 22 nt, Human
gccacaagacccuugugguccc

SEQ ID NO: 3758137 - RNA, 18 nt, Human
gccacaaggacuuccugu

SEQ ID NO: 3758138 - RNA, 19 nt, Human
gccacaaggacuuccuguc

SEQ ID NO: 3758139 - RNA, 10 nt, Human
gccacacaca

SEQ ID NO: 3758140 - RNA, 14 nt, Human
gccacacacacaga

SEQ ID NO: 3758141 - RNA, 13 nt, Human
gccacacagaaac

SEQ ID NO: 3758142 - RNA, 14 nt, Human
gccacacagaccac

SEQ ID NO: 3758143 - RNA, 14 nt, Human
gccacacagcugcc

SEQ ID NO: 3758144 - RNA, 15 nt, Human
gccacacagcugccg

SEQ ID NO: 3758145 - RNA, 13 nt, Human
gccacaccaagcu

SEQ ID NO: 3758146 - RNA, 14 nt, Human
gccacaccaagcug

SEQ ID NO: 3758147 - RNA, 16 nt, Human
gccacaccaagcugug

SEQ ID NO: 3758148 - RNA, 19 nt, Human
gccacaccaagcugugcca

SEQ ID NO: 3758149 - RNA, 16 nt, Human
gccacaccaggauaga

SEQ ID NO: 3758150 - RNA, 13 nt, Human
gccacacccuccc

SEQ ID NO: 3758151 - RNA, 21 nt, Human
gccacacuauuaccaugagaa

SEQ ID NO: 3758152 - RNA, 19 nt, Human
gccacacucagcacaaggc

SEQ ID NO: 3758153 - RNA, 18 nt, Human
gccacacucuccaucacc

SEQ ID NO: 3758154 - RNA, 21 nt, Human
gccacacucuuucuccugcuu

SEQ ID NO: 3758155 - RNA, 15 nt, Human
gccacacugugacac

SEQ ID NO: 3758156 - RNA, 17 nt, Human
gccacacugugacacac

SEQ ID NO: 3758157 - RNA, 18 nt, Human
gccacacugugacacacu

SEQ ID NO: 3758158 - RNA, 22 nt, Human
gccacacuucaggcucuucucc

SEQ ID NO: 3758159 - RNA, 16 nt, Human
gccacacuucucagga

SEQ ID NO: 3758160 - RNA, 17 nt, Human
gccacacuucucaggac

SEQ ID NO: 3758161 - RNA, 23 nt, Human
gccacacuucucaggacacaggc

SEQ ID NO: 3758162 - RNA, 18 nt, Human
gccacacuugaaccuaau

SEQ ID NO: 3758163 - RNA, 22 nt, Human
gccacagaaaauucuucuccac

SEQ ID NO: 3758164 - RNA, 19 nt, Human
gccacagaagccaggagca

SEQ ID NO: 3758165 - RNA, 22 nt, Human
gccacagaguguagccaggucc

SEQ ID NO: 3758166 - RNA, 23 nt, Human
gccacagaguguagccagguccc

SEQ ID NO: 3758167 - RNA, 15 nt, Human
gccacagcagcauuu

SEQ ID NO: 3758168 - RNA, 20 nt, Human
gccacagcagccucugaagu

SEQ ID NO: 3758169 - RNA, 21 nt, Human
gccacagcccauccauaguaa

SEQ ID NO: 3758170 - RNA, 15 nt, Human
gccacagcccuguca

SEQ ID NO: 3758171 - RNA, 15 nt, Human
gccacagcuugggug

SEQ ID NO: 3758172 - RNA, 12 nt, Human
gccacagcuuuu

SEQ ID NO: 3758173 - RNA, 12 nt, Human
gccacaggacac

SEQ ID NO: 3758174 - RNA, 11 nt, Human
gccacaggacc

SEQ ID NO: 3758175 - RNA, 12 nt, Human
gccacaggccuc

SEQ ID NO: 3758176 - RNA, 14 nt, Human
gccacaggccuccc

SEQ ID NO: 3758177 - RNA, 22 nt, Human
gccacaggccucccuguuugaa

SEQ ID NO: 3758178 - RNA, 22 nt, Human
gccacaggccugagauuucauc

SEQ ID NO: 3758179 - RNA, 23 nt, Human
gccacaggccugagauuucaucu

SEQ ID NO: 3758180 - RNA, 18 nt, Human
gccacaguagucuugaug

SEQ ID NO: 3758181 - RNA, 15 nt, Human
gccacagugggauga

SEQ ID NO: 3758182 - RNA, 14 nt, Human
gccacaguuccccu

SEQ ID NO: 3758183 - RNA, 15 nt, Human
gccacaguuccccua

SEQ ID NO: 3758184 - RNA, 23 nt, Human
gccacauccacagucucccccac

SEQ ID NO: 3758185 - RNA, 16 nt, Human
gccacaugagucccag

SEQ ID NO: 3758186 - RNA, 21 nt, Human
gccacauggcuuccuccugcg

SEQ ID NO: 3758187 - RNA, 22 nt, Human
gccacauggcuuccuccugcgc

SEQ ID NO: 3758188 - RNA, 17 nt, Human
gccacauggggcugggc

SEQ ID NO: 3758189 - RNA, 16 nt, Human
gccacauugggcagcg

SEQ ID NO: 3758190 - RNA, 16 nt, Human
gccacauuugguucua

SEQ ID NO: 3758191 - RNA, 16 nt, Human
gccacauuuucagcca

SEQ ID NO: 3758192 - RNA, 16 nt, Human
gccagcagacauuguc

SEQ ID NO: 3758193 - RNA, 17 nt, Human
gccagcagacauuguca

SEQ ID NO: 3758194 - RNA, 13 nt, Human
gccagcagcaccu

SEQ ID NO: 3758195 - RNA, 19 nt, Human
gccagcagccagcucucag

SEQ ID NO: 3758196 - RNA, 17 nt, Human
gccagcaggcucucagg

SEQ ID NO: 3758197 - RNA, 21 nt, Human
gccagcaggcucucaggccag

SEQ ID NO: 3758198 - RNA, 19 nt, Human
gccagcaguucagagcugc

SEQ ID NO: 3758199 - RNA, 21 nt, Human
gccagcaguucagagcugccc

SEQ ID NO: 3758200 - RNA, 23 nt, Human
gccagcaguucagagcugcccuc

SEQ ID NO: 3758201 - RNA, 14 nt, Human
gccagcaucugggc

SEQ ID NO: 3758202 - RNA, 22 nt, Human
gccagccaagcuuuaaauuaug

SEQ ID NO: 3758203 - RNA, 13 nt, Human
gccagccagcagc

SEQ ID NO: 3758204 - RNA, 14 nt, Human
gccagccagcagcc

SEQ ID NO: 3758205 - RNA, 19 nt, Human
gccagccagcagccagcuc

SEQ ID NO: 3758206 - RNA, 15 nt, Human
gccagccagccacuc

SEQ ID NO: 3758207 - RNA, 16 nt, Human
gccagccagccacucu

SEQ ID NO: 3758208 - RNA, 13 nt, Human
gccagccaggcgg

SEQ ID NO: 3758209 - RNA, 21 nt, Human
gccagccaggcgggcucaagg

SEQ ID NO: 3758210 - RNA, 13 nt, Human
gccagccaugucu

SEQ ID NO: 3758211 - RNA, 13 nt, Human
gccagcccagccc

SEQ ID NO: 3758212 - RNA, 18 nt, Human
gccagcccauuugggcag

SEQ ID NO: 3758213 - RNA, 19 nt, Human
gccagcccauuugggcaga

SEQ ID NO: 3758214 - RNA, 22 nt, Human
gccagcccauuugggcagagag

SEQ ID NO: 3758215 - RNA, 22 nt, Human
gccagccccacacagcuacagc

SEQ ID NO: 3758216 - RNA, 17 nt, Human
gccagccccacagccca

SEQ ID NO: 3758217 - RNA, 17 nt, Human
gccagccccacccagga

SEQ ID NO: 3758218 - RNA, 18 nt, Human
gccagccccacccaggag

SEQ ID NO: 3758219 - RNA, 19 nt, Human
gccagccccacccaggagg

SEQ ID NO: 3758220 - RNA, 21 nt, Human
gccagccccggcccugggcuc

SEQ ID NO: 3758221 - RNA, 13 nt, Human
gccagccccucca

SEQ ID NO: 3758222 - RNA, 20 nt, Human
gccagccccucccaccacag

SEQ ID NO: 3758223 - RNA, 21 nt, Human
gccagccccucccaccacagc

SEQ ID NO: 3758224 - RNA, 14 nt, Human
gccagccccugcca

SEQ ID NO: 3758225 - RNA, 19 nt, Human
gccagccccuggccccagg

SEQ ID NO: 3758226 - RNA, 21 nt, Human
gccagcccggccgcuccacca

SEQ ID NO: 3758227 - RNA, 21 nt, Human
gccagcccucccuguccuccu

SEQ ID NO: 3758228 - RNA, 10 nt, Human
gccagcccug

SEQ ID NO: 3758229 - RNA, 15 nt, Human
gccagcccugccugg

SEQ ID NO: 3758230 - RNA, 20 nt, Human
gccagccgagauagccaagg

SEQ ID NO: 3758231 - RNA, 21 nt, Human
gccagccgagauagccaaggc

SEQ ID NO: 3758232 - RNA, 22 nt, Human
gccagccgagauagccaaggcc

SEQ ID NO: 3758233 - RNA, 19 nt, Human
gccagccgcgcaucagacu

SEQ ID NO: 3758234 - RNA, 17 nt, Human
gccagccgcucuccugc

SEQ ID NO: 3758235 - RNA, 18 nt, Human
gccagccgcucuccugcc

SEQ ID NO: 3758236 - RNA, 20 nt, Human
gccagccuccgagagggaga

SEQ ID NO: 3758237 - RNA, 13 nt, Human
gccagccugaggc

SEQ ID NO: 3758238 - RNA, 12 nt, Human
gccagccuggcc

SEQ ID NO: 3758239 - RNA, 15 nt, Human
gccagccuggccucc

SEQ ID NO: 3758240 - RNA, 19 nt, Human
gccagccuggccuccugcc

SEQ ID NO: 3758241 - RNA, 13 nt, Human
gccagccuggcug

SEQ ID NO: 3758242 - RNA, 17 nt, Human
gccagccuggcugggac

SEQ ID NO: 3758243 - RNA, 16 nt, Human
gccagccuggcuucug

SEQ ID NO: 3758244 - RNA, 20 nt, Human
gccagccuggcuucuggagc

SEQ ID NO: 3758245 - RNA, 22 nt, Human
gccagccuggcuucuggagccc

SEQ ID NO: 3758246 - RNA, 16 nt, Human
gccagccuggggccug

SEQ ID NO: 3758247 - RNA, 14 nt, Human
gccagccuggucca

SEQ ID NO: 3758248 - RNA, 12 nt, Human
gccagccuucuu

SEQ ID NO: 3758249 - RNA, 19 nt, Human
gccagccuucuuccauccc

SEQ ID NO: 3758250 - RNA, 21 nt, Human
gccagccuucuuccaucccag

SEQ ID NO: 3758251 - RNA, 18 nt, Human
gccagccuugagcccugg

SEQ ID NO: 3758252 - RNA, 19 nt, Human
gccagccuugagcccuggc

SEQ ID NO: 3758253 - RNA, 22 nt, Human
gccagccuugagcccuggcugu

SEQ ID NO: 3758254 - RNA, 14 nt, Human
gccagcgccucccu

SEQ ID NO: 3758255 - RNA, 18 nt, Human
gccagcgccucccuccac

SEQ ID NO: 3758256 - RNA, 21 nt, Human
gccagcgccucccuccacccc

SEQ ID NO: 3758257 - RNA, 19 nt, Human
gccagcgggaauggcagcu

SEQ ID NO: 3758258 - RNA, 13 nt, Human
gccagcguccucc

SEQ ID NO: 3758259 - RNA, 19 nt, Human
gccagcguccuccucugug

SEQ ID NO: 3758260 - RNA, 22 nt, Human
gccagcguccuccucugugacc

SEQ ID NO: 3758261 - RNA, 14 nt, Human
gccagcguggcgca

SEQ ID NO: 3758262 - RNA, 16 nt, Human
gccagcguggcgcagu

SEQ ID NO: 3758263 - RNA, 15 nt, Human
gccagcuaaggggug

SEQ ID NO: 3758264 - RNA, 22 nt, Human
gccagcuaagggguggggcugc

SEQ ID NO: 3758265 - RNA, 19 nt, Human
gccagcucacagugcugug

SEQ ID NO: 3758266 - RNA, 15 nt, Human
gccagcucucagcca

SEQ ID NO: 3758267 - RNA, 12 nt, Human
gccagcucuguu

SEQ ID NO: 3758268 - RNA, 13 nt, Human
gccagcucuguuc

SEQ ID NO: 3758269 - RNA, 22 nt, Human
gccagcucuguucuuccucagc

SEQ ID NO: 3758270 - RNA, 23 nt, Human
gccagcucuguucuuccucagcc

SEQ ID NO: 3758271 - RNA, 21 nt, Human
gccagcucuuccuagcuggag

SEQ ID NO: 3758272 - RNA, 14 nt, Human
gccagcugaugacu

SEQ ID NO: 3758273 - RNA, 19 nt, Human
gccagcugaugacucaaga

SEQ ID NO: 3758274 - RNA, 20 nt, Human
gccagcugcacugaugcugc

SEQ ID NO: 3758275 - RNA, 20 nt, Human
gccagcugcagcugggcugu

SEQ ID NO: 3758276 - RNA, 14 nt, Human
gccagcugcaucua

SEQ ID NO: 3758277 - RNA, 12 nt, Human
gccagcugcccc

SEQ ID NO: 3758278 - RNA, 17 nt, Human
gccagcugccccagcca

SEQ ID NO: 3758279 - RNA, 20 nt, Human
gccagcugcccuaugggccu

SEQ ID NO: 3758280 - RNA, 21 nt, Human
gccagcugcccuaugggccug

SEQ ID NO: 3758281 - RNA, 14 nt, Human
gccagcugccuagg

SEQ ID NO: 3758282 - RNA, 13 nt, Human
gccagcugcuccc

SEQ ID NO: 3758283 - RNA, 14 nt, Human
gccagcugcucccc

SEQ ID NO: 3758284 - RNA, 15 nt, Human
gccagcugcucccca

SEQ ID NO: 3758285 - RNA, 19 nt, Human
gccagcugcugagccgcag

SEQ ID NO: 3758286 - RNA, 20 nt, Human
gccagcugcugagccgcaga

SEQ ID NO: 3758287 - RNA, 15 nt, Human
gccagcugcuugggc

SEQ ID NO: 3758288 - RNA, 13 nt, Human
gccagcuggagaa

SEQ ID NO: 3758289 - RNA, 14 nt, Human
gccagcuggaggca

SEQ ID NO: 3758290 - RNA, 15 nt, Human
gccagcuggaggcag

SEQ ID NO: 3758291 - RNA, 17 nt, Human
gccagcuggcagcagag

SEQ ID NO: 3758292 - RNA, 14 nt, Human
gccagcuuguuuac

SEQ ID NO: 3758293 - RNA, 15 nt, Human
gccaggaaccugucc

SEQ ID NO: 3758294 - RNA, 22 nt, Human
gccaggaaccuguccuaaggaa

SEQ ID NO: 3758295 - RNA, 19 nt, Human
gccaggaagaucccccaga

SEQ ID NO: 3758296 - RNA, 11 nt, Human
gccaggaagcc

SEQ ID NO: 3758297 - RNA, 14 nt, Human
gccaggaagccagc

SEQ ID NO: 3758298 - RNA, 18 nt, Human
gccaggaaguagcacagg

SEQ ID NO: 3758299 - RNA, 22 nt, Human
gccaggaaguagcacaggcuga

SEQ ID NO: 3758300 - RNA, 18 nt, Human
gccaggaauuucccagga

SEQ ID NO: 3758301 - RNA, 19 nt, Human
gccaggaauuucccaggac

SEQ ID NO: 3758302 - RNA, 23 nt, Human
gccaggaauuucccaggacccug

SEQ ID NO: 3758303 - RNA, 15 nt, Human
gccaggacaggcccg

SEQ ID NO: 3758304 - RNA, 16 nt, Human
gccaggacagucagcu

SEQ ID NO: 3758305 - RNA, 15 nt, Human
gccaggacuccccag

SEQ ID NO: 3758306 - RNA, 17 nt, Human
gccaggacuccccaggc

SEQ ID NO: 3758307 - RNA, 13 nt, Human
gccaggacucugc

SEQ ID NO: 3758308 - RNA, 16 nt, Human
gccaggacucugcagc

SEQ ID NO: 3758309 - RNA, 15 nt, Human
gccaggacugagccc

SEQ ID NO: 3758310 - RNA, 17 nt, Human
gccaggacugagccccg

SEQ ID NO: 3758311 - RNA, 13 nt, Human
gccaggagaagcu

SEQ ID NO: 3758312 - RNA, 22 nt, Human
gccaggagaagcucagcugcau

SEQ ID NO: 3758313 - RNA, 13 nt, Human
gccaggagagcuu

SEQ ID NO: 3758314 - RNA, 20 nt, Human
gccaggagagcuuagggucu

SEQ ID NO: 3758315 - RNA, 21 nt, Human
gccaggagagcuuagggucuc

SEQ ID NO: 3758316 - RNA, 19 nt, Human
gccaggagcacggcucugu

SEQ ID NO: 3758317 - RNA, 16 nt, Human
gccaggaggacccagg

SEQ ID NO: 3758318 - RNA, 17 nt, Human
gccaggaggacccaggg

SEQ ID NO: 3758319 - RNA, 22 nt, Human
gccaggagggacaaaggagccu

SEQ ID NO: 3758320 - RNA, 17 nt, Human
gccaggaggugccacug

SEQ ID NO: 3758321 - RNA, 19 nt, Human
gccaggaucaugguguaau

SEQ ID NO: 3758322 - RNA, 19 nt, Human
gccaggcaacuucaguccu

SEQ ID NO: 3758323 - RNA, 23 nt, Human
gccaggcacacacugugcuuucu

SEQ ID NO: 3758324 - RNA, 12 nt, Human
gccaggcacagg

SEQ ID NO: 3758325 - RNA, 13 nt, Human
gccaggcacaggc

SEQ ID NO: 3758326 - RNA, 15 nt, Human
gccaggcacaggcag

SEQ ID NO: 3758327 - RNA, 16 nt, Human
gccaggcacaggcagg

SEQ ID NO: 3758328 - RNA, 14 nt, Human
gccaggcagaucug

SEQ ID NO: 3758329 - RNA, 21 nt, Human
gccaggcagaucugugcccca

SEQ ID NO: 3758330 - RNA, 23 nt, Human
gccaggcagaucugugccccaug

SEQ ID NO: 3758331 - RNA, 18 nt, Human
gccaggccacaagacccu

SEQ ID NO: 3758332 - RNA, 21 nt, Human
gccaggccacaagacccuugu

SEQ ID NO: 3758333 - RNA, 12 nt, Human
gccaggccagag

SEQ ID NO: 3758334 - RNA, 13 nt, Human
gccaggccagagg

SEQ ID NO: 3758335 - RNA, 12 nt, Human
gccaggccagcc

SEQ ID NO: 3758336 - RNA, 14 nt, Human
gccaggccagccuc

SEQ ID NO: 3758337 - RNA, 13 nt, Human
gccaggccagcug

SEQ ID NO: 3758338 - RNA, 13 nt, Human
gccaggccccagg

SEQ ID NO: 3758339 - RNA, 19 nt, Human
gccaggcccccaagccugc

SEQ ID NO: 3758340 - RNA, 19 nt, Human
gccaggcccccaccacaca

SEQ ID NO: 3758341 - RNA, 23 nt, Human
gccaggcccccaccacacauccc

SEQ ID NO: 3758342 - RNA, 17 nt, Human
gccaccaaaggccaggg

SEQ ID NO: 3758343 - RNA, 20 nt, Human
gccaccaacauacucccauc

SEQ ID NO: 3758344 - RNA, 23 nt, Human
gccaccaagugaaaaauguuagg

SEQ ID NO: 3758345 - RNA, 16 nt, Human
gccaccaccucugugg

SEQ ID NO: 3758346 - RNA, 13 nt, Human
gccaccacgcccg

SEQ ID NO: 3758347 - RNA, 24 nt, Human
gccaccacgccuagccucacgcuc

SEQ ID NO: 3758348 - RNA, 14 nt, Human
gccaccacguccag

SEQ ID NO: 3758349 - RNA, 19 nt, Human
gccaccagagaccguccuc

SEQ ID NO: 3758350 - RNA, 22 nt, Human
gccaccagagaccguccucacc

SEQ ID NO: 3758351 - RNA, 10 nt, Human
gccaccagcg

SEQ ID NO: 3758352 - RNA, 17 nt, Human
gccaccagcucugccgu

SEQ ID NO: 3758353 - RNA, 15 nt, Human
gccaccaggccaccu

SEQ ID NO: 3758354 - RNA, 18 nt, Human
gccaccaggccaccuccc

SEQ ID NO: 3758355 - RNA, 12 nt, Human
gccaccaggcug

SEQ ID NO: 3758356 - RNA, 17 nt, Human
gccaccaggcuggcgca

SEQ ID NO: 3758357 - RNA, 18 nt, Human
gccaccaggcuggcgcag

SEQ ID NO: 3758358 - RNA, 20 nt, Human
gccaccaggcuggcgcagcc

SEQ ID NO: 3758359 - RNA, 16 nt, Human
gccaccagucacuguc

SEQ ID NO: 3758360 - RNA, 23 nt, Human
gccaccauauucagugcuguggc

SEQ ID NO: 3758361 - RNA, 17 nt, Human
gccaccauccugcagcc

SEQ ID NO: 3758362 - RNA, 14 nt, Human
gccaccauccugcu

SEQ ID NO: 3758363 - RNA, 13 nt, Human
gccaccaugcccg

SEQ ID NO: 3758364 - RNA, 17 nt, Human
gccaccauggccagcca

SEQ ID NO: 3758365 - RNA, 14 nt, Human
gccaccauuccugg

SEQ ID NO: 3758366 - RNA, 18 nt, Human
gccacccaccucccugcc

SEQ ID NO: 3758367 - RNA, 15 nt, Human
gccacccaggaggca

SEQ ID NO: 3758368 - RNA, 16 nt, Human
gccacccaggaggcag

SEQ ID NO: 3758369 - RNA, 12 nt, Human
gccaccccacuu

SEQ ID NO: 3758370 - RNA, 18 nt, Human
gccacccccgcuggagga

SEQ ID NO: 3758371 - RNA, 13 nt, Human
gccacccuaccug

SEQ ID NO: 3758372 - RNA, 16 nt, Human
gccacccucaugcugu

SEQ ID NO: 3758373 - RNA, 19 nt, Human
gccacccugaggagucuga

SEQ ID NO: 3758374 - RNA, 22 nt, Human
gccacccugaggagucugaggu

SEQ ID NO: 3758375 - RNA, 13 nt, Human
gccacccugggcu

SEQ ID NO: 3758376 - RNA, 13 nt, Human
gccacccugugca

SEQ ID NO: 3758377 - RNA, 15 nt, Human
gccacccuucuucag

SEQ ID NO: 3758378 - RNA, 13 nt, Human
gccaccgccuugc

SEQ ID NO: 3758379 - RNA, 23 nt, Human
gccaccgcuuccggcuccugugc

SEQ ID NO: 3758380 - RNA, 17 nt, Human
gccaccgugccuggcca

SEQ ID NO: 3758381 - RNA, 19 nt, Human
gccaccuaucucgugggag

SEQ ID NO: 3758382 - RNA, 22 nt, Human
gccaccuaucucgugggagagc

SEQ ID NO: 3758383 - RNA, 23 nt, Human
gccaccucagaccccggggugag

SEQ ID NO: 3758384 - RNA, 13 nt, Human
gccaccuccagaa

SEQ ID NO: 3758385 - RNA, 15 nt, Human
gccaccuccagaaac

SEQ ID NO: 3758386 - RNA, 15 nt, Human
gccaccuccccaggc

SEQ ID NO: 3758387 - RNA, 22 nt, Human
gccaccuccccuauccacccag

SEQ ID NO: 3758388 - RNA, 20 nt, Human
gccaccuccuaaaaggccca

SEQ ID NO: 3758389 - RNA, 23 nt, Human
gccaccuccuaaaaggcccagag

SEQ ID NO: 3758390 - RNA, 17 nt, Human
gccaccucuccaagggc

SEQ ID NO: 3758391 - RNA, 11 nt, Human
gccaccucugc

SEQ ID NO: 3758392 - RNA, 14 nt, Human
gccaccucugcgga

SEQ ID NO: 3758393 - RNA, 20 nt, Human
gccaccucugcggaccccag

SEQ ID NO: 3758394 - RNA, 22 nt, Human
gccaccucugcggaccccagcu

SEQ ID NO: 3758395 - RNA, 14 nt, Human
gccaccucuuccug

SEQ ID NO: 3758396 - RNA, 21 nt, Human
gccaccugaggugggcccagg

SEQ ID NO: 3758397 - RNA, 16 nt, Human
gccaccugaguuccug

SEQ ID NO: 3758398 - RNA, 11 nt, Human
gccaccugccc

SEQ ID NO: 3758399 - RNA, 12 nt, Human
gccaccugccug

SEQ ID NO: 3758400 - RNA, 13 nt, Human
gccaccugccugc

SEQ ID NO: 3758401 - RNA, 21 nt, Human
gccaccugccugcgucuuccg

SEQ ID NO: 3758402 - RNA, 17 nt, Human
gccaccugccuguuggg

SEQ ID NO: 3758403 - RNA, 20 nt, Human
gccaccugcggugcuaucuc

SEQ ID NO: 3758404 - RNA, 16 nt, Human
gccaccuggaccccug

SEQ ID NO: 3758405 - RNA, 20 nt, Human
gccaccuggcauuccuucug

SEQ ID NO: 3758406 - RNA, 14 nt, Human
gccaccuggggcag

SEQ ID NO: 3758407 - RNA, 11 nt, Human
gccaccugggu

SEQ ID NO: 3758408 - RNA, 10 nt, Human
gccaccuguc

SEQ ID NO: 3758409 - RNA, 15 nt, Human
gccacgauugcagga

SEQ ID NO: 3758410 - RNA, 16 nt, Human
gccacgcagccaggac

SEQ ID NO: 3758411 - RNA, 13 nt, Human
gccacgcuccagc

SEQ ID NO: 3758412 - RNA, 17 nt, Human
gccacgcuccagcugcc

SEQ ID NO: 3758413 - RNA, 13 nt, Human
gccacggcagccu

SEQ ID NO: 3758414 - RNA, 14 nt, Human
gccacggccaggcc

SEQ ID NO: 3758415 - RNA, 15 nt, Human
gccacggccaggcca

SEQ ID NO: 3758416 - RNA, 16 nt, Human
gccacggccaggccag

SEQ ID NO: 3758417 - RNA, 18 nt, Human
gccacggccaggccagag

SEQ ID NO: 3758418 - RNA, 13 nt, Human
gccacgugccagg

SEQ ID NO: 3758419 - RNA, 21 nt, Human
gccacguuccuuacugcagaa

SEQ ID NO: 3758420 - RNA, 22 nt, Human
gccacguuggagaagcccgugu

SEQ ID NO: 3758421 - RNA, 14 nt, Human
gccacguuuucacc

SEQ ID NO: 3758422 - RNA, 22 nt, Human
gccacuaaccuugccugguaca

SEQ ID NO: 3758423 - RNA, 15 nt, Human
gccacuaagcagagg

SEQ ID NO: 3758424 - RNA, 17 nt, Human
gccacuaagcagaggag

SEQ ID NO: 3758425 - RNA, 20 nt, Human
gccacuaagcagaggagggg

SEQ ID NO: 3758426 - RNA, 23 nt, Human
gccacuaauuuuaguauucauuc

SEQ ID NO: 3758427 - RNA, 22 nt, Human
gccacuacacuccagccugagc

SEQ ID NO: 3758428 - RNA, 22 nt, Human
gccacuaggcugggugcccaca

SEQ ID NO: 3758429 - RNA, 16 nt, Human
gccacuaguaaguaau

SEQ ID NO: 3758430 - RNA, 14 nt, Human
gccacucacacagc

SEQ ID NO: 3758431 - RNA, 18 nt, Human
gccacucacacagccagg

SEQ ID NO: 3758432 - RNA, 14 nt, Human
gccacucacuaggc

SEQ ID NO: 3758433 - RNA, 19 nt, Human
gccacucacuaggccccca

SEQ ID NO: 3758434 - RNA, 23 nt, Human
gccacucacuaggcccccacuug

SEQ ID NO: 3758435 - RNA, 13 nt, Human
gccacucagcuuc

SEQ ID NO: 3758436 - RNA, 21 nt, Human
gccacucaggaggcugaggca

SEQ ID NO: 3758437 - RNA, 14 nt, Human
gccacucaggccca

SEQ ID NO: 3758438 - RNA, 16 nt, Human
gccacucauuccugua

SEQ ID NO: 3758439 - RNA, 18 nt, Human
gccacucauuucaucuca

SEQ ID NO: 3758440 - RNA, 22 nt, Human
gccacuccccggcaugagacuc

SEQ ID NO: 3758441 - RNA, 12 nt, Human
gccacuccuccc

SEQ ID NO: 3758442 - RNA, 13 nt, Human
gccacuccuuccu

SEQ ID NO: 3758443 - RNA, 14 nt, Human
gccacuccuuccug

SEQ ID NO: 3758444 - RNA, 15 nt, Human
gccacuccuuccugc

SEQ ID NO: 3758445 - RNA, 20 nt, Human
gccacucuaccagugcaggc

SEQ ID NO: 3758446 - RNA, 19 nt, Human
gccacucucuucccuuucc

SEQ ID NO: 3758447 - RNA, 12 nt, Human
gccacucugccu

SEQ ID NO: 3758448 - RNA, 19 nt, Human
gccacucugccucugccug

SEQ ID NO: 3758449 - RNA, 23 nt, Human
gccacucuguuccuggcucagcc

SEQ ID NO: 3758450 - RNA, 15 nt, Human
gccacugaaaucugu

SEQ ID NO: 3758451 - RNA, 11 nt, Human
gccacugaaga

SEQ ID NO: 3758452 - RNA, 18 nt, Human
gccacugaagaggaggag

SEQ ID NO: 3758453 - RNA, 22 nt, Human
gccacugcacagagcucuccag

SEQ ID NO: 3758454 - RNA, 19 nt, Human
gccacugcacuccaaucug

SEQ ID NO: 3758455 - RNA, 12 nt, Human
gccacugccucu

SEQ ID NO: 3758456 - RNA, 13 nt, Human
gccacugcugcuu

SEQ ID NO: 3758457 - RNA, 17 nt, Human
gccacuggccaucucca

SEQ ID NO: 3758458 - RNA, 16 nt, Human
gccacuggggcucaga

SEQ ID NO: 3758459 - RNA, 18 nt, Human
gccacuggggcucagagc

SEQ ID NO: 3758460 - RNA, 19 nt, Human
gccacuggggcucagagcc

SEQ ID NO: 3758461 - RNA, 19 nt, Human
gccacugugcuccagccug

SEQ ID NO: 3758462 - RNA, 16 nt, Human
gccacuguguuccuuc

SEQ ID NO: 3758463 - RNA, 13 nt, Human
gccacuuaaugua

SEQ ID NO: 3758464 - RNA, 18 nt, Human
gccacuuaauguauguua

SEQ ID NO: 3758465 - RNA, 14 nt, Human
gccacuuaccuuca

SEQ ID NO: 3758466 - RNA, 13 nt, Human
gccacuucccagg

SEQ ID NO: 3758467 - RNA, 20 nt, Human
gccacuucuggguggggcag

SEQ ID NO: 3758468 - RNA, 15 nt, Human
gccacuugaaauguu

SEQ ID NO: 3758469 - RNA, 14 nt, Human
gccacuuuauuucu

SEQ ID NO: 3758470 - RNA, 21 nt, Human
gccacuuugcacgacgcccuc

SEQ ID NO: 3758471 - RNA, 12 nt, Human
gccagaaauaaa

SEQ ID NO: 3758472 - RNA, 20 nt, Human
gccagaaccccgagcccuac

SEQ ID NO: 3758473 - RNA, 18 nt, Human
gccagaacguggcucugc

SEQ ID NO: 3758474 - RNA, 20 nt, Human
gccagaacguggcucugcug

SEQ ID NO: 3758475 - RNA, 18 nt, Human
gccagaagauccccucag

SEQ ID NO: 3758476 - RNA, 18 nt, Human
gccagaaguaccagacua

SEQ ID NO: 3758477 - RNA, 21 nt, Human
gccagaaguuugucaagucaa

SEQ ID NO: 3758478 - RNA, 15 nt, Human
gccagaauuucaaac

SEQ ID NO: 3758479 - RNA, 15 nt, Human
gccagacacucugcu

SEQ ID NO: 3758480 - RNA, 14 nt, Human
gccagaccagagcu

SEQ ID NO: 3758481 - RNA, 13 nt, Human
gccagaccugcag

SEQ ID NO: 3758482 - RNA, 14 nt, Human
gccagaccugcaga

SEQ ID NO: 3758483 - RNA, 22 nt, Human
gccagacgcucauucagcaucu

SEQ ID NO: 3758484 - RNA, 15 nt, Human
gccagacuggcacag

SEQ ID NO: 3758485 - RNA, 13 nt, Human
gccagagaagcua

SEQ ID NO: 3758486 - RNA, 11 nt, Human
gccagagaagu

SEQ ID NO: 3758487 - RNA, 22 nt, Human
gccagagacacaagccuucggc

SEQ ID NO: 3758488 - RNA, 13 nt, Human
gccagagauccaa

SEQ ID NO: 3758489 - RNA, 16 nt, Human
gccagagauccaaaag

SEQ ID NO: 3758490 - RNA, 20 nt, Human
gccagagauccaaaagaagc

SEQ ID NO: 3758491 - RNA, 23 nt, Human
gccagagauccaaaagaagcccc

SEQ ID NO: 3758492 - RNA, 18 nt, Human
gccagagcaaagggccag

SEQ ID NO: 3758493 - RNA, 13 nt, Human
gccaggcccucug

SEQ ID NO: 3758494 - RNA, 15 nt, Human
gccaggcccucugcc

SEQ ID NO: 3758495 - RNA, 16 nt, Human
gccaggcccucugccc

SEQ ID NO: 3758496 - RNA, 15 nt, Human
gccaggccgggccug

SEQ ID NO: 3758497 - RNA, 21 nt, Human
gccaggccucuuggcagucac

SEQ ID NO: 3758498 - RNA, 14 nt, Human
gccaggccuggguc

SEQ ID NO: 3758499 - RNA, 16 nt, Human
gccaggcgagaugggg

SEQ ID NO: 3758500 - RNA, 17 nt, Human
gccaggcucacucacag

SEQ ID NO: 3758501 - RNA, 20 nt, Human
gccaggcuccuuccugucuu

SEQ ID NO: 3758502 - RNA, 16 nt, Human
gccaggcucugugcug

SEQ ID NO: 3758503 - RNA, 18 nt, Human
gccaggcugaccacagca

SEQ ID NO: 3758504 - RNA, 14 nt, Human
gccaggcugccugg

SEQ ID NO: 3758505 - RNA, 13 nt, Human
gccaggcugcucu

SEQ ID NO: 3758506 - RNA, 18 nt, Human
gccaggcuggagugcagu

SEQ ID NO: 3758507 - RNA, 23 nt, Human
gccaggcugggucgcccuggacu

SEQ ID NO: 3758508 - RNA, 19 nt, Human
gccagggaaagacuggcaa

SEQ ID NO: 3758509 - RNA, 18 nt, Human
gccagggacagagggggu

SEQ ID NO: 3758510 - RNA, 22 nt, Human
gccagggaccccagaaucaugu

SEQ ID NO: 3758511 - RNA, 16 nt, Human
gccagggagaagcucc

SEQ ID NO: 3758512 - RNA, 18 nt, Human
gccagggagaccuggaca

SEQ ID NO: 3758513 - RNA, 21 nt, Human
gccagggagaccuggacacag

SEQ ID NO: 3758514 - RNA, 19 nt, Human
gccagggagagcccaggag

SEQ ID NO: 3758515 - RNA, 22 nt, Human
gccagggagagcccaggagcuc

SEQ ID NO: 3758516 - RNA, 11 nt, Human
gccagggagcu

SEQ ID NO: 3758517 - RNA, 15 nt, Human
gccagggauggggcc

SEQ ID NO: 3758518 - RNA, 15 nt, Human
gccagggcagaguga

SEQ ID NO: 3758519 - RNA, 16 nt, Human
gccagggcagagugag

SEQ ID NO: 3758520 - RNA, 19 nt, Human
gccagggcagggccccagg

SEQ ID NO: 3758521 - RNA, 20 nt, Human
gccagggccacgcuccagcu

SEQ ID NO: 3758522 - RNA, 22 nt, Human
gccagggccacgcuccagcugc

SEQ ID NO: 3758523 - RNA, 21 nt, Human
gccagggccaugucagacaca

SEQ ID NO: 3758524 - RNA, 16 nt, Human
gccagggccccucucc

SEQ ID NO: 3758525 - RNA, 19 nt, Human
gccagggccccucucccca

SEQ ID NO: 3758526 - RNA, 13 nt, Human
gccagggcccgca

SEQ ID NO: 3758527 - RNA, 16 nt, Human
gccagggccuggaaga

SEQ ID NO: 3758528 - RNA, 22 nt, Human
gccagggccuggaagacagaga

SEQ ID NO: 3758529 - RNA, 14 nt, Human
gccagggcugcccc

SEQ ID NO: 3758530 - RNA, 17 nt, Human
gccagggcugcccugag

SEQ ID NO: 3758531 - RNA, 19 nt, Human
gccagggcugcccugagaa

SEQ ID NO: 3758532 - RNA, 21 nt, Human
gccaggggaaaaucagccugc

SEQ ID NO: 3758533 - RNA, 17 nt, Human
gccaggggaccuccugg

SEQ ID NO: 3758534 - RNA, 21 nt, Human
gccagggggacuagccccugu

SEQ ID NO: 3758535 - RNA, 15 nt, Human
gccagggggaugcca

SEQ ID NO: 3758536 - RNA, 19 nt, Human
gccaggggggugaggagcu

SEQ ID NO: 3758537 - RNA, 21 nt, Human
gccaggggucucccuggagug

SEQ ID NO: 3758538 - RNA, 15 nt, Human
gccagggucuccaga

SEQ ID NO: 3758539 - RNA, 22 nt, Human
gccagggucucucccucaggug

SEQ ID NO: 3758540 - RNA, 15 nt, Human
gccagggugagagcu

SEQ ID NO: 3758541 - RNA, 20 nt, Human
gccaggguguggcccugcca

SEQ ID NO: 3758542 - RNA, 15 nt, Human
gccaggucccccugc

SEQ ID NO: 3758543 - RNA, 16 nt, Human
gccaggucccccugca

SEQ ID NO: 3758544 - RNA, 17 nt, Human
gccaggucccccugcag

SEQ ID NO: 3758545 - RNA, 18 nt, Human
gccaggucccccugcagc

SEQ ID NO: 3758546 - RNA, 19 nt, Human
gccaggucccccugcagcu

SEQ ID NO: 3758547 - RNA, 16 nt, Human
gccaggugagaaacug

SEQ ID NO: 3758548 - RNA, 14 nt, Human
gccaggugcagugg

SEQ ID NO: 3758549 - RNA, 14 nt, Human
gccaggugccuugg

SEQ ID NO: 3758550 - RNA, 18 nt, Human
gccagguggccacuccag

SEQ ID NO: 3758551 - RNA, 18 nt, Human
gccagguucuauuuggaa

SEQ ID NO: 3758552 - RNA, 18 nt, Human
gccagguugcuaagaaac

SEQ ID NO: 3758553 - RNA, 13 nt, Human
gccagguuuucug

SEQ ID NO: 3758554 - RNA, 17 nt, Human
gccagguuuuuggucug

SEQ ID NO: 3758555 - RNA, 21 nt, Human
gccaguaagggaaauagaaaa

SEQ ID NO: 3758556 - RNA, 16 nt, Human
gccaguacuugucaua

SEQ ID NO: 3758557 - RNA, 23 nt, Human
gccaguauuagacuggaaguuca

SEQ ID NO: 3758558 - RNA, 13 nt, Human
gccagucaccccg

SEQ ID NO: 3758559 - RNA, 15 nt, Human
gccagucccccugcc

SEQ ID NO: 3758560 - RNA, 19 nt, Human
gccaguccuagcugcacag

SEQ ID NO: 3758561 - RNA, 22 nt, Human
gccaguccuagcugcacagggc

SEQ ID NO: 3758562 - RNA, 22 nt, Human
gccaguccugcuaccucccuug

SEQ ID NO: 3758563 - RNA, 17 nt, Human
gccagucgcgcugccug

SEQ ID NO: 3758564 - RNA, 20 nt, Human
gccagucgcgcugccugugu

SEQ ID NO: 3758565 - RNA, 17 nt, Human
gccagucugggcugccg

SEQ ID NO: 3758566 - RNA, 13 nt, Human
gccagucuugugu

SEQ ID NO: 3758567 - RNA, 14 nt, Human
gccagugacagaca

SEQ ID NO: 3758568 - RNA, 15 nt, Human
gccagugacuccagg

SEQ ID NO: 3758569 - RNA, 19 nt, Human
gccagugaugcuaaagguu

SEQ ID NO: 3758570 - RNA, 15 nt, Human
gccagugcccugagc

SEQ ID NO: 3758571 - RNA, 17 nt, Human
gccagugcccugagcca

SEQ ID NO: 3758572 - RNA, 18 nt, Human
gccagugcccugagccag

SEQ ID NO: 3758573 - RNA, 18 nt, Human
gccagugcccugauccca

SEQ ID NO: 3758574 - RNA, 10 nt, Human
gccagugccu

SEQ ID NO: 3758575 - RNA, 11 nt, Human
gccagugccuu

SEQ ID NO: 3758576 - RNA, 23 nt, Human
gccagugccuuaccuccugccca

SEQ ID NO: 3758577 - RNA, 16 nt, Human
gccagugcuccaggca

SEQ ID NO: 3758578 - RNA, 18 nt, Human
gccaguggaaauucaggu

SEQ ID NO: 3758579 - RNA, 15 nt, Human
gccaguggggccugu

SEQ ID NO: 3758580 - RNA, 18 nt, Human
gccaguggggccugugga

SEQ ID NO: 3758581 - RNA, 17 nt, Human
gccaguguaauccccca

SEQ ID NO: 3758582 - RNA, 21 nt, Human
gccagugucugucccgggguc

SEQ ID NO: 3758583 - RNA, 12 nt, Human
gccagugucuuu

SEQ ID NO: 3758584 - RNA, 13 nt, Human
gccagugugacaa

SEQ ID NO: 3758585 - RNA, 20 nt, Human
gccagugugaucccaagugc

SEQ ID NO: 3758586 - RNA, 15 nt, Human
gccaguguugccuaa

SEQ ID NO: 3758587 - RNA, 20 nt, Human
gccaguucaguaccuggagg

SEQ ID NO: 3758588 - RNA, 21 nt, Human
gccaguucaguaccuggagga

SEQ ID NO: 3758589 - RNA, 22 nt, Human
gccaguucaguaccuggaggag

SEQ ID NO: 3758590 - RNA, 21 nt, Human
gccaguuggucccccuuccau

SEQ ID NO: 3758591 - RNA, 22 nt, Human
gccauaaaacagguaauauaaa

SEQ ID NO: 3758592 - RNA, 13 nt, Human
gccauaaaacauu

SEQ ID NO: 3758593 - RNA, 14 nt, Human
gccauaaaacauua

SEQ ID NO: 3758594 - RNA, 19 nt, Human
gccauacauaaaagaaaua

SEQ ID NO: 3758595 - RNA, 13 nt, Human
gccauacuggccu

SEQ ID NO: 3758596 - RNA, 18 nt, Human
gccauacuggccucgccu

SEQ ID NO: 3758597 - RNA, 14 nt, Human
gccauacugugucc

SEQ ID NO: 3758598 - RNA, 16 nt, Human
gccauacuuugucuga

SEQ ID NO: 3758599 - RNA, 19 nt, Human
gccauagaguacacugccu

SEQ ID NO: 3758600 - RNA, 16 nt, Human
gccauagaguuuaaca

SEQ ID NO: 3758601 - RNA, 15 nt, Human
gccauagcuccugcu

SEQ ID NO: 3758602 - RNA, 23 nt, Human
gccauagcuccugcuccacagcc

SEQ ID NO: 3758603 - RNA, 15 nt, Human
gccauaggcccuuuc

SEQ ID NO: 3758604 - RNA, 16 nt, Human
gccauaggcccuuuca

SEQ ID NO: 3758605 - RNA, 23 nt, Human
gccauagucaaagagaguuuuua

SEQ ID NO: 3758606 - RNA, 16 nt, Human
gccauagucacauggc

SEQ ID NO: 3758607 - RNA, 19 nt, Human
gccauauaaguuugaagga

SEQ ID NO: 3758608 - RNA, 22 nt, Human
gccauauaaguuugaaggaaac

SEQ ID NO: 3758609 - RNA, 19 nt, Human
gccauauacucuucaagga

SEQ ID NO: 3758610 - RNA, 16 nt, Human
gccauauuaaauuuuu

SEQ ID NO: 3758611 - RNA, 19 nt, Human
gccauauucuguuggccag

SEQ ID NO: 3758612 - RNA, 20 nt, Human
gccauauucuguuggccagu

SEQ ID NO: 3758613 - RNA, 16 nt, Human
gccauauuuaccucag

SEQ ID NO: 3758614 - RNA, 14 nt, Human
gccauauuuacuac

SEQ ID NO: 3758615 - RNA, 14 nt, Human
gccauauuuguaaa

SEQ ID NO: 3758616 - RNA, 17 nt, Human
gccaucaacaagaguug

SEQ ID NO: 3758617 - RNA, 15 nt, Human
gccaucaagagacug

SEQ ID NO: 3758618 - RNA, 19 nt, Human
gccaucaucaguggagcca

SEQ ID NO: 3758619 - RNA, 21 nt, Human
gccaucauguaaauuaccagu

SEQ ID NO: 3758620 - RNA, 14 nt, Human
gccaucauugcugu

SEQ ID NO: 3758621 - RNA, 20 nt, Human
gccauccaaauaagaaaccu

SEQ ID NO: 3758622 - RNA, 20 nt, Human
gccauccagguucagcuugu

SEQ ID NO: 3758623 - RNA, 16 nt, Human
gccaucccagccuugg

SEQ ID NO: 3758624 - RNA, 18 nt, Human
gccauccccagggggcau

SEQ ID NO: 3758625 - RNA, 11 nt, Human
gccaucccucc

SEQ ID NO: 3758626 - RNA, 14 nt, Human
gccaucccucccuc

SEQ ID NO: 3758627 - RNA, 16 nt, Human
gccaucccucccucca

SEQ ID NO: 3758628 - RNA, 14 nt, Human
gccaucccugugag

SEQ ID NO: 3758629 - RNA, 19 nt, Human
gccauccggcccccagagc

SEQ ID NO: 3758630 - RNA, 22 nt, Human
gccauccggcccccagagcgcc

SEQ ID NO: 3758631 - RNA, 19 nt, Human
gccauccucuuucucuuuu

SEQ ID NO: 3758632 - RNA, 20 nt, Human
gccauccuggcccagggcau

SEQ ID NO: 3758633 - RNA, 23 nt, Human
gccauccuggcccagggcaucug

SEQ ID NO: 3758634 - RNA, 21 nt, Human
gccauccuugacuuugaacua

SEQ ID NO: 3758635 - RNA, 19 nt, Human
gccaucgccgggacuccag

SEQ ID NO: 3758636 - RNA, 14 nt, Human
gccaucuaaaguaa

SEQ ID NO: 3758637 - RNA, 15 nt, Human
gccaucuagccagcc

SEQ ID NO: 3758638 - RNA, 19 nt, Human
gccaucucaugaggggaga

SEQ ID NO: 3758639 - RNA, 21 nt, Human
gccaucucaugaggggagagg

SEQ ID NO: 3758640 - RNA, 13 nt, Human
gccaucucugcuc

SEQ ID NO: 3758641 - RNA, 15 nt, Human
gccaucucuggaugc

SEQ ID NO: 3758642 - RNA, 14 nt, Human
gccaucugcccagg

SEQ ID NO: 3758643 - RNA, 19 nt, Human
cuggaggugggagcaggag

SEQ ID NO: 3758644 - RNA, 21 nt, Human
cuggagguggggcgaggcagg

SEQ ID NO: 3758645 - RNA, 16 nt, Human
cuggagguugaagcca

SEQ ID NO: 3758646 - RNA, 17 nt, Human
cuggagguugauaacuu

SEQ ID NO: 3758647 - RNA, 18 nt, Human
cuggagguugauaacuuu

SEQ ID NO: 3758648 - RNA, 22 nt, Human
cuggagguugauaacuuugcuu

SEQ ID NO: 3758649 - RNA, 20 nt, Human
cuggagucaugccaagcauu

SEQ ID NO: 3758650 - RNA, 16 nt, Human
cuggaguccagucucu

SEQ ID NO: 3758651 - RNA, 14 nt, Human
cuggagucuccagu

SEQ ID NO: 3758652 - RNA, 15 nt, Human
cuggagucuccagug

SEQ ID NO: 3758653 - RNA, 13 nt, Human
cuggagucuccug

SEQ ID NO: 3758654 - RNA, 12 nt, Human
cuggagucugga

SEQ ID NO: 3758655 - RNA, 14 nt, Human
cuggagugaggggu

SEQ ID NO: 3758656 - RNA, 12 nt, Human
cuggagugcagg

SEQ ID NO: 3758657 - RNA, 16 nt, Human
cuggagugcagggagg

SEQ ID NO: 3758658 - RNA, 14 nt, Human
cuggagugcaguga

SEQ ID NO: 3758659 - RNA, 17 nt, Human
cuggagugcagugagcc

SEQ ID NO: 3758660 - RNA, 20 nt, Human
cuggagugcagugagccgag

SEQ ID NO: 3758661 - RNA, 13 nt, Human
cuggagugcaguu

SEQ ID NO: 3758662 - RNA, 22 nt, Human
cuggagugcccacccugggaga

SEQ ID NO: 3758663 - RNA, 13 nt, Human
cuggaguggccac

SEQ ID NO: 3758664 - RNA, 14 nt, Human
cuggaguggccacu

SEQ ID NO: 3758665 - RNA, 13 nt, Human
cuggagugggcag

SEQ ID NO: 3758666 - RNA, 19 nt, Human
cuggagugguguucagcca

SEQ ID NO: 3758667 - RNA, 20 nt, Human
cuggaguguggcugaggagg

SEQ ID NO: 3758668 - RNA, 22 nt, Human
cuggaguguggcugaggaggcc

SEQ ID NO: 3758669 - RNA, 22 nt, Human
cuggaguuacauuaauguuaau

SEQ ID NO: 3758670 - RNA, 17 nt, Human
cuggaguucugguuccu

SEQ ID NO: 3758671 - RNA, 16 nt, Human
cuggaguuggggcaga

SEQ ID NO: 3758672 - RNA, 13 nt, Human
cuggaguuucaug

SEQ ID NO: 3758673 - RNA, 18 nt, Human
cuggaguuucauguacaa

SEQ ID NO: 3758674 - RNA, 14 nt, Human
cuggauaacuuagg

SEQ ID NO: 3758675 - RNA, 18 nt, Human
cuggauaacuuccacagg

SEQ ID NO: 3758676 - RNA, 22 nt, Human
cuggauaacuuccacagggucc

SEQ ID NO: 3758677 - RNA, 15 nt, Human
cuggauaggagccug

SEQ ID NO: 3758678 - RNA, 22 nt, Human
cuggaucacagcugcuuucugu

SEQ ID NO: 3758679 - RNA, 20 nt, Human
cuggaucacgacgcugcaga

SEQ ID NO: 3758680 - RNA, 15 nt, Human
cuggaucagaacagg

SEQ ID NO: 3758681 - RNA, 16 nt, Human
cuggaucagcguggcc

SEQ ID NO: 3758682 - RNA, 19 nt, Human
cuggaucagcguggccuug

SEQ ID NO: 3758683 - RNA, 14 nt, Human
cuggaucaguaaaa

SEQ ID NO: 3758684 - RNA, 20 nt, Human
cuggaucaguccuuugauca

SEQ ID NO: 3758685 - RNA, 17 nt, Human
cuggauccaucaggcca

SEQ ID NO: 3758686 - RNA, 19 nt, Human
cuggauccaucaggccacu

SEQ ID NO: 3758687 - RNA, 19 nt, Human
cuggauccuagccuuaucc

SEQ ID NO: 3758688 - RNA, 23 nt, Human
cuggauccuagccuuauccucug

SEQ ID NO: 3758689 - RNA, 10 nt, Human
cuggaucuac

SEQ ID NO: 3758690 - RNA, 17 nt, Human
cuggaucuaccuggagg

SEQ ID NO: 3758691 - RNA, 18 nt, Human
cuggaucuaccuggaggg

SEQ ID NO: 3758692 - RNA, 16 nt, Human
cuggaucucccagggc

SEQ ID NO: 3758693 - RNA, 20 nt, Human
cuggaucucuuaagacagca

SEQ ID NO: 3758694 - RNA, 14 nt, Human
cuggaugagcuccc

SEQ ID NO: 3758695 - RNA, 15 nt, Human
cuggaugagcuccca

SEQ ID NO: 3758696 - RNA, 23 nt, Human
cuggaugauacuaauaaacuaau

SEQ ID NO: 3758697 - RNA, 17 nt, Human
cuggaugcagccucaca

SEQ ID NO: 3758698 - RNA, 22 nt, Human
cuggaugcagccucacaguccu

SEQ ID NO: 3758699 - RNA, 23 nt, Human
cuggaugcccauccacugggugu

SEQ ID NO: 3758700 - RNA, 17 nt, Human
cuggaugcccccugugg

SEQ ID NO: 3758701 - RNA, 19 nt, Human
cuggaugcccccuguggau

SEQ ID NO: 3758702 - RNA, 16 nt, Human
cuggaugcuccuucca

SEQ ID NO: 3758703 - RNA, 11 nt, Human
cuggauggagc

SEQ ID NO: 3758704 - RNA, 17 nt, Human
cuggauggagcccaggc

SEQ ID NO: 3758705 - RNA, 21 nt, Human
cuggauggauuugaagcaaag

SEQ ID NO: 3758706 - RNA, 15 nt, Human
cuggauggcaccaga

SEQ ID NO: 3758707 - RNA, 16 nt, Human
cuggauggcaccagag

SEQ ID NO: 3758708 - RNA, 21 nt, Human
cuggauggcggaagcugcuac

SEQ ID NO: 3758709 - RNA, 18 nt, Human
cuggaugggcugcagcag

SEQ ID NO: 3758710 - RNA, 20 nt, Human
cuggaugggcugcagcagag

SEQ ID NO: 3758711 - RNA, 13 nt, Human
cuggauggggcag

SEQ ID NO: 3758712 - RNA, 17 nt, Human
cuggauggggcaggcca

SEQ ID NO: 3758713 - RNA, 12 nt, Human
cuggaugucuga

SEQ ID NO: 3758714 - RNA, 13 nt, Human
cuggaugucugaa

SEQ ID NO: 3758715 - RNA, 15 nt, Human
cuggaugucugccaa

SEQ ID NO: 3758716 - RNA, 20 nt, Human
cuggauguuuuuucccuguu

SEQ ID NO: 3758717 - RNA, 17 nt, Human
cuggauucaaauuuauu

SEQ ID NO: 3758718 - RNA, 15 nt, Human
cuggauucagccuuc

SEQ ID NO: 3758719 - RNA, 17 nt, Human
cuggauucagccuucuu

SEQ ID NO: 3758720 - RNA, 17 nt, Human
cuggauucauugucucu

SEQ ID NO: 3758721 - RNA, 18 nt, Human
cuggauucauuuccugcc

SEQ ID NO: 3758722 - RNA, 13 nt, Human
cuggauuccagag

SEQ ID NO: 3758723 - RNA, 21 nt, Human
cuggauuccagagcacugcuc

SEQ ID NO: 3758724 - RNA, 13 nt, Human
cuggauucccagg

SEQ ID NO: 3758725 - RNA, 14 nt, Human
cuggauucccagga

SEQ ID NO: 3758726 - RNA, 19 nt, Human
cuggauuguacuuugugcu

SEQ ID NO: 3758727 - RNA, 20 nt, Human
cuggauuguacuuugugcug

SEQ ID NO: 3758728 - RNA, 12 nt, Human
cuggauuuucag

SEQ ID NO: 3758729 - RNA, 13 nt, Human
cuggauuuuguca

SEQ ID NO: 3758730 - RNA, 12 nt, Human
cuggcaaagcag

SEQ ID NO: 3758731 - RNA, 21 nt, Human
cuggcaaagcagaaaauugua

SEQ ID NO: 3758732 - RNA, 19 nt, Human
cuggcaaagggagcagaac

SEQ ID NO: 3758733 - RNA, 15 nt, Human
cuggcaacacagagg

SEQ ID NO: 3758734 - RNA, 21 nt, Human
cuggcaagcaagccugggagc

SEQ ID NO: 3758735 - RNA, 19 nt, Human
cuggcaagcuagaaccugg

SEQ ID NO: 3758736 - RNA, 17 nt, Human
cuggcaaggacacagau

SEQ ID NO: 3758737 - RNA, 18 nt, Human
cuggcaaggacacagaug

SEQ ID NO: 3758738 - RNA, 12 nt, Human
cuggcaaugcca

SEQ ID NO: 3758739 - RNA, 19 nt, Human
cuggcaaugccacagcccu

SEQ ID NO: 3758740 - RNA, 21 nt, Human
cuggcaaugguaguuucugug

SEQ ID NO: 3758741 - RNA, 15 nt, Human
cuggcaauugucuau

SEQ ID NO: 3758742 - RNA, 18 nt, Human
cuggcacaaacucuuggu

SEQ ID NO: 3758743 - RNA, 16 nt, Human
cuggcacagaaaccuc

SEQ ID NO: 3758744 - RNA, 13 nt, Human
cuggcacagccug

SEQ ID NO: 3758745 - RNA, 14 nt, Human
cuggcacagccugc

SEQ ID NO: 3758746 - RNA, 21 nt, Human
cuggcacagccuggcuguggc

SEQ ID NO: 3758747 - RNA, 15 nt, Human
cuggcacaggacuga

SEQ ID NO: 3758748 - RNA, 16 nt, Human
cuggcacagggcagug

SEQ ID NO: 3758749 - RNA, 17 nt, Human
cuggcacagggcagugg

SEQ ID NO: 3758750 - RNA, 21 nt, Human
cuggcacagugucugggcuga

SEQ ID NO: 3758751 - RNA, 20 nt, Human
cuggcacaguuuucugagaa

SEQ ID NO: 3758752 - RNA, 19 nt, Human
cuggcacaucagaaaggaa

SEQ ID NO: 3758753 - RNA, 19 nt, Human
cuggcacauuuccccagac

SEQ ID NO: 3758754 - RNA, 23 nt, Human
cuggcacauuuccccagaccuga

SEQ ID NO: 3758755 - RNA, 21 nt, Human
cuggcacgguggcucaggccu

SEQ ID NO: 3758756 - RNA, 19 nt, Human
cuggcacuaccaaaggaca

SEQ ID NO: 3758757 - RNA, 22 nt, Human
cuggcacuauaauguaagcucu

SEQ ID NO: 3758758 - RNA, 19 nt, Human
cuggcacucuuguucccac

SEQ ID NO: 3758759 - RNA, 13 nt, Human
cuggcacugcugu

SEQ ID NO: 3758760 - RNA, 14 nt, Human
cuggcacugcugug

SEQ ID NO: 3758761 - RNA, 13 nt, Human
cuggcacugcuuc

SEQ ID NO: 3758762 - RNA, 23 nt, Human
cuggcacugcuuccagugaggcu

SEQ ID NO: 3758763 - RNA, 21 nt, Human
cuggcacuggaugcagaaaca

SEQ ID NO: 3758764 - RNA, 21 nt, Human
cuggcagaaagcaaaugugac

SEQ ID NO: 3758765 - RNA, 23 nt, Human
cuggcagaaagggaacagaaagg

SEQ ID NO: 3758766 - RNA, 17 nt, Human
cuggcagaacugagcuc

SEQ ID NO: 3758767 - RNA, 20 nt, Human
cuggcagaacugagcuccuc

SEQ ID NO: 3758768 - RNA, 21 nt, Human
cuggcagaacugagcuccucu

SEQ ID NO: 3758769 - RNA, 16 nt, Human
cuggcagaagggagca

SEQ ID NO: 3758770 - RNA, 23 nt, Human
cuggcagacuguguaaaauguaa

SEQ ID NO: 3758771 - RNA, 17 nt, Human
cuggcagagaugccucc

SEQ ID NO: 3758772 - RNA, 18 nt, Human
cuggcagagaugccuccc

SEQ ID NO: 3758773 - RNA, 20 nt, Human
cuggcagaguugaagacaga

SEQ ID NO: 3758774 - RNA, 21 nt, Human
cuggcagaguugaagacagag

SEQ ID NO: 3758775 - RNA, 15 nt, Human
cuggcagauucaaau

SEQ ID NO: 3758776 - RNA, 15 nt, Human
cuggcagcaccgccu

SEQ ID NO: 3758777 - RNA, 20 nt, Human
cuggcagcaccgccucuucc

SEQ ID NO: 3758778 - RNA, 11 nt, Human
cuggcagccca

SEQ ID NO: 3758779 - RNA, 16 nt, Human
cuggcagccccagcac

SEQ ID NO: 3758780 - RNA, 12 nt, Human
cuggcagccccu

SEQ ID NO: 3758781 - RNA, 18 nt, Human
cuggcagccgugccuuca

SEQ ID NO: 3758782 - RNA, 19 nt, Human
cuggcagccgugccuucag

SEQ ID NO: 3758783 - RNA, 21 nt, Human
cuggcagccgugccuucagcu

SEQ ID NO: 3758784 - RNA, 20 nt, Human
cuggcagccucccauccagg

SEQ ID NO: 3758785 - RNA, 13 nt, Human
cuggcagcucaga

SEQ ID NO: 3758786 - RNA, 14 nt, Human
cuggcagcucagag

SEQ ID NO: 3758787 - RNA, 16 nt, Human
cuggcagcucagagag

SEQ ID NO: 3758788 - RNA, 14 nt, Human
cuggcagcucagcu

SEQ ID NO: 3758789 - RNA, 13 nt, Human
cuggcagcucucc

SEQ ID NO: 3758790 - RNA, 14 nt, Human
cuggcagcucucca

SEQ ID NO: 3758791 - RNA, 18 nt, Human
cuggcagcucuggacagc

SEQ ID NO: 3758792 - RNA, 17 nt, Human
cuggcagggaggucagg

SEQ ID NO: 3758793 - RNA, 19 nt, Human
gccaucugcccaggggugc

SEQ ID NO: 3758794 - RNA, 21 nt, Human
gccaucugcgugacaauaaaa

SEQ ID NO: 3758795 - RNA, 14 nt, Human
gccaucuggagagc

SEQ ID NO: 3758796 - RNA, 17 nt, Human
gccaucugugggcacgc

SEQ ID NO: 3758797 - RNA, 18 nt, Human
gccaucuguguccugguu

SEQ ID NO: 3758798 - RNA, 15 nt, Human
gccaugaaaccagag

SEQ ID NO: 3758799 - RNA, 15 nt, Human
gccaugaagggaccc

SEQ ID NO: 3758800 - RNA, 19 nt, Human
gccaugacaacuucuaauu

SEQ ID NO: 3758801 - RNA, 14 nt, Human
gccaugacccugcc

SEQ ID NO: 3758802 - RNA, 18 nt, Human
gccaugacccugccucuc

SEQ ID NO: 3758803 - RNA, 18 nt, Human
gccaugagccgcccaagg

SEQ ID NO: 3758804 - RNA, 23 nt, Human
gccaugauggcaacagaucugga

SEQ ID NO: 3758805 - RNA, 21 nt, Human
gccaugauggugcugaccucu

SEQ ID NO: 3758806 - RNA, 22 nt, Human
gccaugauggugcugaccucug

SEQ ID NO: 3758807 - RNA, 20 nt, Human
gccaugauucgcccaaagcc

SEQ ID NO: 3758808 - RNA, 14 nt, Human
gccaugccacccug

SEQ ID NO: 3758809 - RNA, 16 nt, Human
gccaugccagcuggcc

SEQ ID NO: 3758810 - RNA, 13 nt, Human
gccaugccagcuu

SEQ ID NO: 3758811 - RNA, 19 nt, Human
gccaugccagcuuaucuca

SEQ ID NO: 3758812 - RNA, 14 nt, Human
gccaugccucagcc

SEQ ID NO: 3758813 - RNA, 15 nt, Human
gccaugccuccucag

SEQ ID NO: 3758814 - RNA, 16 nt, Human
gccaugcuccucuucc

SEQ ID NO: 3758815 - RNA, 24 nt, Human
gccaugcuccuggcccacugcauc

SEQ ID NO: 3758816 - RNA, 18 nt, Human
gccaugcugaggccuggg

SEQ ID NO: 3758817 - RNA, 19 nt, Human
gccaugcugaggccugggc

SEQ ID NO: 3758818 - RNA, 20 nt, Human
gccaugcugaggccugggcc

SEQ ID NO: 3758819 - RNA, 20 nt, Human
gccauggacucuacacugug

SEQ ID NO: 3758820 - RNA, 17 nt, Human
gccauggacucuguccu

SEQ ID NO: 3758821 - RNA, 22 nt, Human
gccauggacucuguccugaagg

SEQ ID NO: 3758822 - RNA, 16 nt, Human
gccauggagaaagcug

SEQ ID NO: 3758823 - RNA, 20 nt, Human
gccauggagaaagcugacuu

SEQ ID NO: 3758824 - RNA, 18 nt, Human
gccauggagagcuggagc

SEQ ID NO: 3758825 - RNA, 22 nt, Human
gccauggagagcuggagccugg

SEQ ID NO: 3758826 - RNA, 23 nt, Human
gccauggccugcaaacugggaac

SEQ ID NO: 3758827 - RNA, 23 nt, Human
gccauggcucaggguggucucuu

SEQ ID NO: 3758828 - RNA, 24 nt, Human
gccauggcuuccaagguggucugc

SEQ ID NO: 3758829 - RNA, 23 nt, Human
gccaugggacagggaggacgcuc

SEQ ID NO: 3758830 - RNA, 14 nt, Human
gccaugggaggccu

SEQ ID NO: 3758831 - RNA, 15 nt, Human
gccaugggaggccuu

SEQ ID NO: 3758832 - RNA, 15 nt, Human
gccaugggccuccug

SEQ ID NO: 3758833 - RNA, 20 nt, Human
gccauggguagccugggugu

SEQ ID NO: 3758834 - RNA, 14 nt, Human
gccaugggugcuug

SEQ ID NO: 3758835 - RNA, 14 nt, Human
gccaugguaccccc

SEQ ID NO: 3758836 - RNA, 20 nt, Human
gccaugguacccccuucugg

SEQ ID NO: 3758837 - RNA, 21 nt, Human
gccaugguacccccuucuggg

SEQ ID NO: 3758838 - RNA, 22 nt, Human
gccauguaaauccccacuggga

SEQ ID NO: 3758839 - RNA, 15 nt, Human
gccauguaccucccc

SEQ ID NO: 3758840 - RNA, 16 nt, Human
gccauguagaagcugc

SEQ ID NO: 3758841 - RNA, 15 nt, Human
gccauguaugaagcc

SEQ ID NO: 3758842 - RNA, 14 nt, Human
gccaugucagacac

SEQ ID NO: 3758843 - RNA, 23 nt, Human
gccaugucugcagugugcccccc

SEQ ID NO: 3758844 - RNA, 15 nt, Human
gccaugugaagaggg

SEQ ID NO: 3758845 - RNA, 18 nt, Human
gccaugugacucuggcuu

SEQ ID NO: 3758846 - RNA, 12 nt, Human
gccaugugcaua

SEQ ID NO: 3758847 - RNA, 22 nt, Human
gccaugugcuaguaauuggaaa

SEQ ID NO: 3758848 - RNA, 23 nt, Human
gccauguggaaggcaagccaggc

SEQ ID NO: 3758849 - RNA, 14 nt, Human
gccauguuggccag

SEQ ID NO: 3758850 - RNA, 16 nt, Human
gccauguuuaagauuu

SEQ ID NO: 3758851 - RNA, 22 nt, Human
gccauguuuauuacaguauaau

SEQ ID NO: 3758852 - RNA, 21 nt, Human
gccauuaaaugaauauuuuga

SEQ ID NO: 3758853 - RNA, 13 nt, Human
gccauuaccaugg

SEQ ID NO: 3758854 - RNA, 14 nt, Human
gccauuagccaagg

SEQ ID NO: 3758855 - RNA, 20 nt, Human
gccauuagccagauuugucu

SEQ ID NO: 3758856 - RNA, 22 nt, Human
gccauuaucccugaaucccccu

SEQ ID NO: 3758857 - RNA, 21 nt, Human
gccauucacuucauaauccag

SEQ ID NO: 3758858 - RNA, 16 nt, Human
gccauuccaaaauauu

SEQ ID NO: 3758859 - RNA, 14 nt, Human
gccauuccaacagc

SEQ ID NO: 3758860 - RNA, 16 nt, Human
gccauucucaagcccu

SEQ ID NO: 3758861 - RNA, 20 nt, Human
gccauucuccugccucagcc

SEQ ID NO: 3758862 - RNA, 17 nt, Human
gccauucugacucauau

SEQ ID NO: 3758863 - RNA, 19 nt, Human
gccauucuuucccaacacc

SEQ ID NO: 3758864 - RNA, 20 nt, Human
gccauucuuuuuuucuuggc

SEQ ID NO: 3758865 - RNA, 19 nt, Human
gccauugaucauaaacuga

SEQ ID NO: 3758866 - RNA, 18 nt, Human
gccauugcacuccagccu

SEQ ID NO: 3758867 - RNA, 21 nt, Human
gccauugcacuccagccuggg

SEQ ID NO: 3758868 - RNA, 17 nt, Human
gccauugccaccaggag

SEQ ID NO: 3758869 - RNA, 23 nt, Human
gccauugucuucggaaaccuugg

SEQ ID NO: 3758870 - RNA, 11 nt, Human
gccauuuaaaa

SEQ ID NO: 3758871 - RNA, 21 nt, Human
gccauuuaugugagugugugu

SEQ ID NO: 3758872 - RNA, 17 nt, Human
gccauuugauuuuucua

SEQ ID NO: 3758873 - RNA, 12 nt, Human
gccauuugcaau

SEQ ID NO: 3758874 - RNA, 23 nt, Human
gccauuugcaauaacagcugcaa

SEQ ID NO: 3758875 - RNA, 13 nt, Human
gccauuuugugaa

SEQ ID NO: 3758876 - RNA, 13 nt, Human
gccauuuuuacau

SEQ ID NO: 3758877 - RNA, 15 nt, Human
gccauuuuuacaucu

SEQ ID NO: 3758878 - RNA, 18 nt, Human
gcccaaaaauaugguuga

SEQ ID NO: 3758879 - RNA, 15 nt, Human
gcccaaaauuuauuu

SEQ ID NO: 3758880 - RNA, 21 nt, Human
gcccaaaccaccagaagccca

SEQ ID NO: 3758881 - RNA, 22 nt, Human
gcccaaaccaccagaagcccag

SEQ ID NO: 3758882 - RNA, 23 nt, Human
gcccaaaccaccagaagcccaga

SEQ ID NO: 3758883 - RNA, 22 nt, Human
gcccaaagagcacaaacauuuu

SEQ ID NO: 3758884 - RNA, 15 nt, Human
gcccaaagaugcagc

SEQ ID NO: 3758885 - RNA, 17 nt, Human
gcccaaagccagacagc

SEQ ID NO: 3758886 - RNA, 17 nt, Human
gcccaaagucuguguga

SEQ ID NO: 3758887 - RNA, 19 nt, Human
gcccaaagugguauagaaa

SEQ ID NO: 3758888 - RNA, 15 nt, Human
gcccaaaugcuggcu

SEQ ID NO: 3758889 - RNA, 19 nt, Human
gcccaaauuaucaagcuaa

SEQ ID NO: 3758890 - RNA, 13 nt, Human
gcccaacaccagc

SEQ ID NO: 3758891 - RNA, 18 nt, Human
gcccaacaccagccccug

SEQ ID NO: 3758892 - RNA, 22 nt, Human
gcccaacaccagccccugcccc

SEQ ID NO: 3758893 - RNA, 13 nt, Human
gcccaacaggggc

SEQ ID NO: 3758894 - RNA, 21 nt, Human
gcccaacaggggcuccaugcc

SEQ ID NO: 3758895 - RNA, 13 nt, Human
gcccaacccuguc

SEQ ID NO: 3758896 - RNA, 14 nt, Human
gcccaacccugucu

SEQ ID NO: 3758897 - RNA, 17 nt, Human
gcccaaccucagcaacc

SEQ ID NO: 3758898 - RNA, 21 nt, Human
gcccaaccucuuccuccugac

SEQ ID NO: 3758899 - RNA, 14 nt, Human
gcccaaccugcucu

SEQ ID NO: 3758900 - RNA, 22 nt, Human
gcccaagaauagaugcugacug

SEQ ID NO: 3758901 - RNA, 16 nt, Human
gcccaagccagaggcu

SEQ ID NO: 3758902 - RNA, 13 nt, Human
gcccaagcccuga

SEQ ID NO: 3758903 - RNA, 20 nt, Human
gcccaagcucagaaggcucu

SEQ ID NO: 3758904 - RNA, 18 nt, Human
gcccaagcuucccuccau

SEQ ID NO: 3758905 - RNA, 13 nt, Human
gcccaaggccuuc

SEQ ID NO: 3758906 - RNA, 18 nt, Human
gcccaaggcggccccucc

SEQ ID NO: 3758907 - RNA, 18 nt, Human
gcccaagggaucuggucc

SEQ ID NO: 3758908 - RNA, 13 nt, Human
gcccaagucccug

SEQ ID NO: 3758909 - RNA, 14 nt, Human
gcccaagucccugu

SEQ ID NO: 3758910 - RNA, 12 nt, Human
gcccaauauuau

SEQ ID NO: 3758911 - RNA, 20 nt, Human
gcccaauuggaggaaagcaa

SEQ ID NO: 3758912 - RNA, 23 nt, Human
gcccacaaaggcaaaggguccag

SEQ ID NO: 3758913 - RNA, 15 nt, Human
gcccacacacaggug

SEQ ID NO: 3758914 - RNA, 18 nt, Human
gcccacaccuccuggggc

SEQ ID NO: 3758915 - RNA, 21 nt, Human
gcccacaccuccuucccucuc

SEQ ID NO: 3758916 - RNA, 20 nt, Human
gcccacagcacagcucccug

SEQ ID NO: 3758917 - RNA, 14 nt, Human
gcccacagcuccca

SEQ ID NO: 3758918 - RNA, 16 nt, Human
gcccacagcucccacc

SEQ ID NO: 3758919 - RNA, 19 nt, Human
gcccacagcucccacccca

SEQ ID NO: 3758920 - RNA, 17 nt, Human
gcccacaggaggcaagc

SEQ ID NO: 3758921 - RNA, 13 nt, Human
gcccacaggauca

SEQ ID NO: 3758922 - RNA, 18 nt, Human
gcccacaggaucagucug

SEQ ID NO: 3758923 - RNA, 19 nt, Human
gcccacaggaucagucuga

SEQ ID NO: 3758924 - RNA, 17 nt, Human
gcccacaggugucccca

SEQ ID NO: 3758925 - RNA, 23 nt, Human
gcccacagguguccccagcccac

SEQ ID NO: 3758926 - RNA, 22 nt, Human
gcccacauccggggccagcucc

SEQ ID NO: 3758927 - RNA, 20 nt, Human
gcccacauuuagucucuuua

SEQ ID NO: 3758928 - RNA, 13 nt, Human
gcccaccccccuc

SEQ ID NO: 3758929 - RNA, 16 nt, Human
gcccacccccggcagc

SEQ ID NO: 3758930 - RNA, 20 nt, Human
gcccacccccugcccugcac

SEQ ID NO: 3758931 - RNA, 22 nt, Human
gcccacccccugcccugcacgu

SEQ ID NO: 3758932 - RNA, 15 nt, Human
gcccaccccucaaca

SEQ ID NO: 3758933 - RNA, 20 nt, Human
gcccacccuccugucuuccc

SEQ ID NO: 3758934 - RNA, 16 nt, Human
gcccacccugcugcug

SEQ ID NO: 3758935 - RNA, 17 nt, Human
gcccacccugcugcugg

SEQ ID NO: 3758936 - RNA, 22 nt, Human
gcccacccugcugcuggugcac

SEQ ID NO: 3758937 - RNA, 21 nt, Human
gcccacccugcuuggcccagg

SEQ ID NO: 3758938 - RNA, 22 nt, Human
gcccacccugcuuggcccaggg

SEQ ID NO: 3758939 - RNA, 16 nt, Human
gcccaccgcaugcccc

SEQ ID NO: 3758940 - RNA, 15 nt, Human
gcccaccuccccacg

SEQ ID NO: 3758941 - RNA, 12 nt, Human
gccagagccagg

SEQ ID NO: 3758942 - RNA, 14 nt, Human
gccagagccagggg

SEQ ID NO: 3758943 - RNA, 16 nt, Human
gccagagcccacucca

SEQ ID NO: 3758944 - RNA, 12 nt, Human
gccagagccugg

SEQ ID NO: 3758945 - RNA, 18 nt, Human
gccagaggaacuguccag

SEQ ID NO: 3758946 - RNA, 19 nt, Human
gccagaggaauccuggcag

SEQ ID NO: 3758947 - RNA, 20 nt, Human
gccagaggaauccuggcagc

SEQ ID NO: 3758948 - RNA, 21 nt, Human
gccagaggaauccuggcagcc

SEQ ID NO: 3758949 - RNA, 24 nt, Human
gccagaggaauccuggcagcccag

SEQ ID NO: 3758950 - RNA, 13 nt, Human
gccagaggagaga

SEQ ID NO: 3758951 - RNA, 16 nt, Human
gccagaggcccccagc

SEQ ID NO: 3758952 - RNA, 19 nt, Human
gccagaggcccccagccca

SEQ ID NO: 3758953 - RNA, 23 nt, Human
gccagaggcccccagcccagggc

SEQ ID NO: 3758954 - RNA, 24 nt, Human
gccagaggcccccagcccagggcu

SEQ ID NO: 3758955 - RNA, 17 nt, Human
gccagagggagugacag

SEQ ID NO: 3758956 - RNA, 19 nt, Human
gccagagggagugacagag

SEQ ID NO: 3758957 - RNA, 22 nt, Human
gccagagggagugacagaggca

SEQ ID NO: 3758958 - RNA, 23 nt, Human
gccagagggagugacagaggcag

SEQ ID NO: 3758959 - RNA, 15 nt, Human
gccagagggcuugug

SEQ ID NO: 3758960 - RNA, 20 nt, Human
gccagaggugggcagguggu

SEQ ID NO: 3758961 - RNA, 14 nt, Human
gccagauccagccu

SEQ ID NO: 3758962 - RNA, 13 nt, Human
gccagaucuguua

SEQ ID NO: 3758963 - RNA, 16 nt, Human
gccagaugaucaacuc

SEQ ID NO: 3758964 - RNA, 16 nt, Human
gccagaugcaccagcc

SEQ ID NO: 3758965 - RNA, 17 nt, Human
gccagaugcaccagccc

SEQ ID NO: 3758966 - RNA, 18 nt, Human
gccagaugcaccagcccu

SEQ ID NO: 3758967 - RNA, 17 nt, Human
gccagaugcugauguuc

SEQ ID NO: 3758968 - RNA, 20 nt, Human
gccagaugcugauguucagu

SEQ ID NO: 3758969 - RNA, 21 nt, Human
gccagaugcugauguucagug

SEQ ID NO: 3758970 - RNA, 15 nt, Human
gccagauggcccgga

SEQ ID NO: 3758971 - RNA, 16 nt, Human
gccagauucuuuccug

SEQ ID NO: 3758972 - RNA, 20 nt, Human
gccagauucuuuccugaggc

SEQ ID NO: 3758973 - RNA, 16 nt, Human
gccagauuucacucuc

SEQ ID NO: 3758974 - RNA, 21 nt, Human
gccagauuucacucuccuugg

SEQ ID NO: 3758975 - RNA, 16 nt, Human
gccagauuugucuuuu

SEQ ID NO: 3758976 - RNA, 16 nt, Human
gccagauuuuuuaaaa

SEQ ID NO: 3758977 - RNA, 23 nt, Human
gccagauuuuuuaaaauuuauau

SEQ ID NO: 3758978 - RNA, 12 nt, Human
gccagcacacag

SEQ ID NO: 3758979 - RNA, 15 nt, Human
gccagcacacagggc

SEQ ID NO: 3758980 - RNA, 22 nt, Human
gccagcacagaaacagaggaga

SEQ ID NO: 3758981 - RNA, 21 nt, Human
gccagcaccggaccagccugg

SEQ ID NO: 3758982 - RNA, 22 nt, Human
gccagcaccggaccagccuggc

SEQ ID NO: 3758983 - RNA, 14 nt, Human
gccagcaccuggca

SEQ ID NO: 3758984 - RNA, 18 nt, Human
gccagcacucgcuagcag

SEQ ID NO: 3758985 - RNA, 23 nt, Human
gccagcacucgcuagcaguggca

SEQ ID NO: 3758986 - RNA, 14 nt, Human
gccagcacuugucc

SEQ ID NO: 3758987 - RNA, 13 nt, Human
gccagcagacauu

SEQ ID NO: 3758988 - RNA, 14 nt, Human
gccagcagacauug

SEQ ID NO: 3758989 - RNA, 16 nt, Human
gccagcagcagcaggu

SEQ ID NO: 3758990 - RNA, 19 nt, Human
gccagcagcagcaggugau

SEQ ID NO: 3758991 - RNA, 12 nt, Human
gccagcagccag

SEQ ID NO: 3758992 - RNA, 13 nt, Human
gccagcagccagc

SEQ ID NO: 3758993 - RNA, 16 nt, Human
gccagcagccagcucu

SEQ ID NO: 3758994 - RNA, 18 nt, Human
gccagcagccagcucuca

SEQ ID NO: 3758995 - RNA, 21 nt, Human
gccagcagccagcucucagcc

SEQ ID NO: 3758996 - RNA, 13 nt, Human
gccagcaggcucu

SEQ ID NO: 3758997 - RNA, 20 nt, Human
gccagcaggcucucaggcca

SEQ ID NO: 3758998 - RNA, 23 nt, Human
gccagcaggcucucaggccagcu

SEQ ID NO: 3758999 - RNA, 13 nt, Human
gccagcaguucag

SEQ ID NO: 3759000 - RNA, 14 nt, Human
gccagcaguucaga

SEQ ID NO: 3759001 - RNA, 20 nt, Human
gccagcaguucagagcugcc

SEQ ID NO: 3759002 - RNA, 22 nt, Human
gccagcaguucagagcugcccu

SEQ ID NO: 3759003 - RNA, 13 nt, Human
gccagcaucuggg

SEQ ID NO: 3759004 - RNA, 20 nt, Human
gccagccaaacacacagaag

SEQ ID NO: 3759005 - RNA, 21 nt, Human
gccagccaaacacacagaagg

SEQ ID NO: 3759006 - RNA, 22 nt, Human
gccagccaaacacacagaaggg

SEQ ID NO: 3759007 - RNA, 18 nt, Human
gccagccaacucugggaa

SEQ ID NO: 3759008 - RNA, 20 nt, Human
gccagccaagcucugcaguc

SEQ ID NO: 3759009 - RNA, 21 nt, Human
gccagccaagcucugcagucc

SEQ ID NO: 3759010 - RNA, 21 nt, Human
gccagccacggggacucagcc

SEQ ID NO: 3759011 - RNA, 21 nt, Human
gccagccacucuaccagugca

SEQ ID NO: 3759012 - RNA, 14 nt, Human
gccagccagccacu

SEQ ID NO: 3759013 - RNA, 11 nt, Human
gccagccaggc

SEQ ID NO: 3759014 - RNA, 19 nt, Human
gccagccagugaccugagg

SEQ ID NO: 3759015 - RNA, 16 nt, Human
gccagcccagaggccg

SEQ ID NO: 3759016 - RNA, 14 nt, Human
gccagcccagccca

SEQ ID NO: 3759017 - RNA, 17 nt, Human
gccagcccauuugggca

SEQ ID NO: 3759018 - RNA, 18 nt, Human
gccagccccacagcccac

SEQ ID NO: 3759019 - RNA, 13 nt, Human
gccagccccaccc

SEQ ID NO: 3759020 - RNA, 18 nt, Human
gccagccccggcccuggg

SEQ ID NO: 3759021 - RNA, 19 nt, Human
gccagccccggcccugggc

SEQ ID NO: 3759022 - RNA, 10 nt, Human
gccagccccu

SEQ ID NO: 3759023 - RNA, 12 nt, Human
gccagccccucc

SEQ ID NO: 3759024 - RNA, 17 nt, Human
gccagccccucccacca

SEQ ID NO: 3759025 - RNA, 14 nt, Human
gccagccccuggcc

SEQ ID NO: 3759026 - RNA, 19 nt, Human
gccagccccuuagacagag

SEQ ID NO: 3759027 - RNA, 22 nt, Human
gccagcccggccgcuccaccag

SEQ ID NO: 3759028 - RNA, 14 nt, Human
gccagcccucccug

SEQ ID NO: 3759029 - RNA, 15 nt, Human
gccagcccucccugu

SEQ ID NO: 3759030 - RNA, 20 nt, Human
gccagcccucccuguccucc

SEQ ID NO: 3759031 - RNA, 22 nt, Human
gccagcccucccuguccuccuc

SEQ ID NO: 3759032 - RNA, 13 nt, Human
gccagcccugccu

SEQ ID NO: 3759033 - RNA, 16 nt, Human
gccagcccugccugga

SEQ ID NO: 3759034 - RNA, 16 nt, Human
gccagccgcucuccug

SEQ ID NO: 3759035 - RNA, 18 nt, Human
gccagccgugaugcucag

SEQ ID NO: 3759036 - RNA, 21 nt, Human
gccagccgugaugcucaggcu

SEQ ID NO: 3759037 - RNA, 16 nt, Human
gccagccuccucugga

SEQ ID NO: 3759038 - RNA, 19 nt, Human
gccagccugcuccuuccca

SEQ ID NO: 3759039 - RNA, 13 nt, Human
gccagccuggccu

SEQ ID NO: 3759040 - RNA, 14 nt, Human
gccagccuggccuc

SEQ ID NO: 3759041 - RNA, 16 nt, Human
gccagccuggccuccu

SEQ ID NO: 3759042 - RNA, 12 nt, Human
gccagccuggcu

SEQ ID NO: 3759043 - RNA, 17 nt, Human
gccagccuggcuucugg

SEQ ID NO: 3759044 - RNA, 18 nt, Human
gccagccuggcuucugga

SEQ ID NO: 3759045 - RNA, 21 nt, Human
gccagccuggcuucuggagcc

SEQ ID NO: 3759046 - RNA, 15 nt, Human
gccagccuggggccu

SEQ ID NO: 3759047 - RNA, 17 nt, Human
gccagccuggggccugg

SEQ ID NO: 3759048 - RNA, 20 nt, Human
gccagccugucccauggaca

SEQ ID NO: 3759049 - RNA, 17 nt, Human
gccagccuuccucugca

SEQ ID NO: 3759050 - RNA, 19 nt, Human
gccagccuuccucugcagc

SEQ ID NO: 3759051 - RNA, 21 nt, Human
gccagccuuccucugcagcug

SEQ ID NO: 3759052 - RNA, 12 nt, Human
gccagccuugac

SEQ ID NO: 3759053 - RNA, 20 nt, Human
gccagccuugaccauucucc

SEQ ID NO: 3759054 - RNA, 16 nt, Human
gccagcgaacuugaca

SEQ ID NO: 3759055 - RNA, 20 nt, Human
gccagcgagcgcccagcucc

SEQ ID NO: 3759056 - RNA, 17 nt, Human
gccagcgccucccucca

SEQ ID NO: 3759057 - RNA, 22 nt, Human
gccagcgccucccuccacccca

SEQ ID NO: 3759058 - RNA, 12 nt, Human
gccagcguccuc

SEQ ID NO: 3759059 - RNA, 18 nt, Human
gccagcgucggucugugc

SEQ ID NO: 3759060 - RNA, 20 nt, Human
gccagcgucggucugugccc

SEQ ID NO: 3759061 - RNA, 21 nt, Human
gccagcgucggucugugcccc

SEQ ID NO: 3759062 - RNA, 22 nt, Human
gccagcgucggucugugccccu

SEQ ID NO: 3759063 - RNA, 16 nt, Human
gccagcuaaggggugg

SEQ ID NO: 3759064 - RNA, 14 nt, Human
gccagcucauuuca

SEQ ID NO: 3759065 - RNA, 13 nt, Human
gccagcucucagc

SEQ ID NO: 3759066 - RNA, 21 nt, Human
gccagcucuguucuuccucag

SEQ ID NO: 3759067 - RNA, 19 nt, Human
gccagcucuuccuagcugg

SEQ ID NO: 3759068 - RNA, 17 nt, Human
gccagcugaugacucaa

SEQ ID NO: 3759069 - RNA, 15 nt, Human
gccagcugccgacca

SEQ ID NO: 3759070 - RNA, 15 nt, Human
gccagcugcugagcc

SEQ ID NO: 3759071 - RNA, 18 nt, Human
gccagcugcugagccgca

SEQ ID NO: 3759072 - RNA, 17 nt, Human
gccagcugcuugggcuu

SEQ ID NO: 3759073 - RNA, 18 nt, Human
gccagcugcuugggcuuc

SEQ ID NO: 3759074 - RNA, 20 nt, Human
gccagcugcuugggcuucau

SEQ ID NO: 3759075 - RNA, 18 nt, Human
gccagcuggcagcagagu

SEQ ID NO: 3759076 - RNA, 18 nt, Human
gccagcuggccuuuguaa

SEQ ID NO: 3759077 - RNA, 22 nt, Human
gccagcuuggggccaccaaagc

SEQ ID NO: 3759078 - RNA, 15 nt, Human
gccagcuuguuuaca

SEQ ID NO: 3759079 - RNA, 17 nt, Human
gccagcuuguuuacaug

SEQ ID NO: 3759080 - RNA, 17 nt, Human
gccagcuuuuccucccu

SEQ ID NO: 3759081 - RNA, 22 nt, Human
gccaggaagcuuuggugagaac

SEQ ID NO: 3759082 - RNA, 17 nt, Human
gccaggaaguacuucca

SEQ ID NO: 3759083 - RNA, 21 nt, Human
gccaggaaguagcacaggcug

SEQ ID NO: 3759084 - RNA, 17 nt, Human
gccaggaauuucccagg

SEQ ID NO: 3759085 - RNA, 20 nt, Human
gccaggaauuucccaggacc

SEQ ID NO: 3759086 - RNA, 21 nt, Human
gccaggaauuucccaggaccc

SEQ ID NO: 3759087 - RNA, 22 nt, Human
gccaggaauuucccaggacccu

SEQ ID NO: 3759088 - RNA, 22 nt, Human
gccaggaccagucaaccugggc

SEQ ID NO: 3759089 - RNA, 19 nt, Human
gccaggacuccccaggcca

SEQ ID NO: 3759090 - RNA, 23 nt, Human
cuggcagggcuggccccagggca

SEQ ID NO: 3759091 - RNA, 18 nt, Human
cuggcagggugggaugga

SEQ ID NO: 3759092 - RNA, 19 nt, Human
cuggcaguccgugggacgg

SEQ ID NO: 3759093 - RNA, 22 nt, Human
cuggcaguccuggaagccagcu

SEQ ID NO: 3759094 - RNA, 19 nt, Human
cuggcaguggaacuaagaa

SEQ ID NO: 3759095 - RNA, 15 nt, Human
cuggcaguuuaaaaa

SEQ ID NO: 3759096 - RNA, 19 nt, Human
cuggcaguuuaaaaaaauu

SEQ ID NO: 3759097 - RNA, 15 nt, Human
cuggcauaguuucau

SEQ ID NO: 3759098 - RNA, 17 nt, Human
cuggcaucgcaccauuc

SEQ ID NO: 3759099 - RNA, 19 nt, Human
cuggcaucgcaccauucug

SEQ ID NO: 3759100 - RNA, 20 nt, Human
cuggcaucgcaccauucuga

SEQ ID NO: 3759101 - RNA, 23 nt, Human
cuggcaucgcaccauucugacuc

SEQ ID NO: 3759102 - RNA, 22 nt, Human
cuggcaucuuugcuauggggac

SEQ ID NO: 3759103 - RNA, 18 nt, Human
cuggcaugauccaagcaa

SEQ ID NO: 3759104 - RNA, 17 nt, Human
cuggcauggcaccuguc

SEQ ID NO: 3759105 - RNA, 18 nt, Human
cuggcaugggaaugaaug

SEQ ID NO: 3759106 - RNA, 24 nt, Human
cuggcaugggaaugaaugucagug

SEQ ID NO: 3759107 - RNA, 15 nt, Human
cuggcaugggagacc

SEQ ID NO: 3759108 - RNA, 18 nt, Human
cuggcaugucaacagcgu

SEQ ID NO: 3759109 - RNA, 15 nt, Human
cuggcauuacagcug

SEQ ID NO: 3759110 - RNA, 20 nt, Human
cuggcauuagaauuauuuaa

SEQ ID NO: 3759111 - RNA, 17 nt, Human
cuggcauugucccugug

SEQ ID NO: 3759112 - RNA, 17 nt, Human
cuggcauuuuauagaca

SEQ ID NO: 3759113 - RNA, 23 nt, Human
cuggcauuuuauagacacccugg

SEQ ID NO: 3759114 - RNA, 17 nt, Human
cuggccaaauagcaaag

SEQ ID NO: 3759115 - RNA, 23 nt, Human
cuggccaacaucgugaaacccug

SEQ ID NO: 3759116 - RNA, 18 nt, Human
cuggccaacauggcgaaa

SEQ ID NO: 3759117 - RNA, 15 nt, Human
cuggccaagcugagg

SEQ ID NO: 3759118 - RNA, 21 nt, Human
cuggccaagcugaggugccca

SEQ ID NO: 3759119 - RNA, 19 nt, Human
cuggccaccaccccccacu

SEQ ID NO: 3759120 - RNA, 20 nt, Human
cuggccaccaccccccacuc

SEQ ID NO: 3759121 - RNA, 21 nt, Human
cuggccaccaccccccacucu

SEQ ID NO: 3759122 - RNA, 16 nt, Human
cuggccaccaggcugg

SEQ ID NO: 3759123 - RNA, 19 nt, Human
cuggccaccaggcuggcgc

SEQ ID NO: 3759124 - RNA, 21 nt, Human
cuggccaccaggcuggcgcag

SEQ ID NO: 3759125 - RNA, 14 nt, Human
cuggccacgcagcc

SEQ ID NO: 3759126 - RNA, 21 nt, Human
cuggccacgcagccaggacac

SEQ ID NO: 3759127 - RNA, 20 nt, Human
cuggccacugcacagagcuc

SEQ ID NO: 3759128 - RNA, 17 nt, Human
cuggccagacacaggcc

SEQ ID NO: 3759129 - RNA, 19 nt, Human
cuggccagacacaggcccu

SEQ ID NO: 3759130 - RNA, 21 nt, Human
cuggccagacacaggcccucc

SEQ ID NO: 3759131 - RNA, 13 nt, Human
cuggccagaggcu

SEQ ID NO: 3759132 - RNA, 14 nt, Human
cuggccagaugcac

SEQ ID NO: 3759133 - RNA, 17 nt, Human
cuggccagaugcaccag

SEQ ID NO: 3759134 - RNA, 14 nt, Human
cuggccagccccac

SEQ ID NO: 3759135 - RNA, 16 nt, Human
cuggccagccccacag

SEQ ID NO: 3759136 - RNA, 18 nt, Human
cuggccagccccacagcc

SEQ ID NO: 3759137 - RNA, 19 nt, Human
cuggccagccgcucuccug

SEQ ID NO: 3759138 - RNA, 20 nt, Human
cuggccagccgcucuccugc

SEQ ID NO: 3759139 - RNA, 23 nt, Human
cuggccagccgcucuccugccac

SEQ ID NO: 3759140 - RNA, 15 nt, Human
cuggccagccugggg

SEQ ID NO: 3759141 - RNA, 19 nt, Human
cuggccagccuggggccug

SEQ ID NO: 3759142 - RNA, 20 nt, Human
cuggccagccuggggccugg

SEQ ID NO: 3759143 - RNA, 24 nt, Human
cuggccagccuggggccuggcagg

SEQ ID NO: 3759144 - RNA, 12 nt, Human
cuggccagcgag

SEQ ID NO: 3759145 - RNA, 13 nt, Human
cuggccaggagcu

SEQ ID NO: 3759146 - RNA, 17 nt, Human
cuggccaggagcucuuc

SEQ ID NO: 3759147 - RNA, 20 nt, Human
cuggccaggagcucuucagg

SEQ ID NO: 3759148 - RNA, 22 nt, Human
cuggccaggagcucuucaggcc

SEQ ID NO: 3759149 - RNA, 14 nt, Human
cuggccagggccac

SEQ ID NO: 3759150 - RNA, 22 nt, Human
cuggccaguccacccugccugc

SEQ ID NO: 3759151 - RNA, 15 nt, Human
cuggccaguccaggc

SEQ ID NO: 3759152 - RNA, 23 nt, Human
cuggccaguccaggcugccgugg

SEQ ID NO: 3759153 - RNA, 17 nt, Human
cuggccagugcccugau

SEQ ID NO: 3759154 - RNA, 21 nt, Human
cuggccagugcccugauccca

SEQ ID NO: 3759155 - RNA, 22 nt, Human
cuggccagugcccugaucccag

SEQ ID NO: 3759156 - RNA, 12 nt, Human
cuggccaucucu

SEQ ID NO: 3759157 - RNA, 20 nt, Human
cuggccauggagaaagcuga

SEQ ID NO: 3759158 - RNA, 16 nt, Human
cuggccauggccugca

SEQ ID NO: 3759159 - RNA, 10 nt, Human
cuggcccagc

SEQ ID NO: 3759160 - RNA, 11 nt, Human
cuggcccagcc

SEQ ID NO: 3759161 - RNA, 13 nt, Human
cuggcccagccaa

SEQ ID NO: 3759162 - RNA, 20 nt, Human
cuggcccagccaaacccugu

SEQ ID NO: 3759163 - RNA, 14 nt, Human
cuggcccagcccug

SEQ ID NO: 3759164 - RNA, 18 nt, Human
cuggcccagcccugcugg

SEQ ID NO: 3759165 - RNA, 19 nt, Human
cuggcccagcccugcuggc

SEQ ID NO: 3759166 - RNA, 20 nt, Human
cuggcccagcccugcuggcc

SEQ ID NO: 3759167 - RNA, 14 nt, Human
cuggcccagccggc

SEQ ID NO: 3759168 - RNA, 23 nt, Human
cuggcccagccggccucucuggc

SEQ ID NO: 3759169 - RNA, 15 nt, Human
cuggcccagccuuug

SEQ ID NO: 3759170 - RNA, 13 nt, Human
cuggcccagcggc

SEQ ID NO: 3759171 - RNA, 11 nt, Human
cuggcccaggg

SEQ ID NO: 3759172 - RNA, 17 nt, Human
cuggcccagggcaucug

SEQ ID NO: 3759173 - RNA, 19 nt, Human
cuggcccagggcccagagc

SEQ ID NO: 3759174 - RNA, 16 nt, Human
cuggcccauagaaaca

SEQ ID NO: 3759175 - RNA, 13 nt, Human
cuggcccaucaug

SEQ ID NO: 3759176 - RNA, 21 nt, Human
cuggcccauguauggccagga

SEQ ID NO: 3759177 - RNA, 12 nt, Human
cuggccccaccc

SEQ ID NO: 3759178 - RNA, 18 nt, Human
cuggccccagcccugcug

SEQ ID NO: 3759179 - RNA, 23 nt, Human
cuggccccagcccugcuggggau

SEQ ID NO: 3759180 - RNA, 16 nt, Human
cuggccccaggaccug

SEQ ID NO: 3759181 - RNA, 20 nt, Human
cuggccccaggaccuggcug

SEQ ID NO: 3759182 - RNA, 14 nt, Human
cuggccccagggca

SEQ ID NO: 3759183 - RNA, 15 nt, Human
cuggccccagggcac

SEQ ID NO: 3759184 - RNA, 16 nt, Human
cuggccccagggcacc

SEQ ID NO: 3759185 - RNA, 17 nt, Human
gcccaccaacaucccau

SEQ ID NO: 3759186 - RNA, 14 nt, Human
gcccaccagagcug

SEQ ID NO: 3759187 - RNA, 14 nt, Human
gcccaccagugacu

SEQ ID NO: 3759188 - RNA, 16 nt, Human
gcccaccccacccacu

SEQ ID NO: 3759189 - RNA, 21 nt, Human
gcccaccccacccacuucugc

SEQ ID NO: 3759190 - RNA, 22 nt, Human
gcccacccccucaagccaaucc

SEQ ID NO: 3759191 - RNA, 14 nt, Human
gcccacccccugcc

SEQ ID NO: 3759192 - RNA, 13 nt, Human
gcccaccccgcuc

SEQ ID NO: 3759193 - RNA, 17 nt, Human
gcccaccccgcucugca

SEQ ID NO: 3759194 - RNA, 18 nt, Human
gcccaccccgcucugcau

SEQ ID NO: 3759195 - RNA, 14 nt, Human
gcccacccuccugu

SEQ ID NO: 3759196 - RNA, 19 nt, Human
gcccacccuccugucuucc

SEQ ID NO: 3759197 - RNA, 22 nt, Human
gcccacccuccugucuucccag

SEQ ID NO: 3759198 - RNA, 18 nt, Human
gcccacccugcugcuggu

SEQ ID NO: 3759199 - RNA, 19 nt, Human
gcccacccugcugcuggug

SEQ ID NO: 3759200 - RNA, 19 nt, Human
gcccaccgcaugcccccuc

SEQ ID NO: 3759201 - RNA, 15 nt, Human
gcccaccuaccuuca

SEQ ID NO: 3759202 - RNA, 21 nt, Human
gcccaccuccccacgcccucc

SEQ ID NO: 3759203 - RNA, 13 nt, Human
gcccaccugccca

SEQ ID NO: 3759204 - RNA, 15 nt, Human
gcccaccugccggcc

SEQ ID NO: 3759205 - RNA, 14 nt, Human
gcccaccugccugg

SEQ ID NO: 3759206 - RNA, 21 nt, Human
gcccaccugccuggccggcca

SEQ ID NO: 3759207 - RNA, 19 nt, Human
gcccaccuggccaccugag

SEQ ID NO: 3759208 - RNA, 21 nt, Human
gcccaccuggccucugcacuc

SEQ ID NO: 3759209 - RNA, 13 nt, Human
gcccaccuuggcu

SEQ ID NO: 3759210 - RNA, 16 nt, Human
gcccaccuuggcucaa

SEQ ID NO: 3759211 - RNA, 19 nt, Human
gcccacgacacugcagccc

SEQ ID NO: 3759212 - RNA, 14 nt, Human
gcccacgcccccac

SEQ ID NO: 3759213 - RNA, 16 nt, Human
gcccacgcccccacug

SEQ ID NO: 3759214 - RNA, 15 nt, Human
gcccacgcuggagug

SEQ ID NO: 3759215 - RNA, 21 nt, Human
gcccacgcuggagugcaguga

SEQ ID NO: 3759216 - RNA, 23 nt, Human
gcccacgcuggagugcagugagc

SEQ ID NO: 3759217 - RNA, 19 nt, Human
gcccacggcuaagaggcug

SEQ ID NO: 3759218 - RNA, 20 nt, Human
gcccacggcuaagaggcugc

SEQ ID NO: 3759219 - RNA, 17 nt, Human
gcccacguagggcggca

SEQ ID NO: 3759220 - RNA, 15 nt, Human
gcccacguccuguca

SEQ ID NO: 3759221 - RNA, 14 nt, Human
gcccacucccugca

SEQ ID NO: 3759222 - RNA, 16 nt, Human
gcccacuccugcucug

SEQ ID NO: 3759223 - RNA, 17 nt, Human
gcccacuccugcucugc

SEQ ID NO: 3759224 - RNA, 18 nt, Human
gcccacuccugcucugcu

SEQ ID NO: 3759225 - RNA, 19 nt, Human
gcccacugcccacccccuc

SEQ ID NO: 3759226 - RNA, 11 nt, Human
gcccacuggcc

SEQ ID NO: 3759227 - RNA, 15 nt, Human
gcccacuguacuugc

SEQ ID NO: 3759228 - RNA, 20 nt, Human
gcccacuguacuugcucuug

SEQ ID NO: 3759229 - RNA, 22 nt, Human
gcccacuguacuugcucuugau

SEQ ID NO: 3759230 - RNA, 16 nt, Human
gcccacuguccugggc

SEQ ID NO: 3759231 - RNA, 21 nt, Human
gcccacuguccugggccugca

SEQ ID NO: 3759232 - RNA, 19 nt, Human
gcccacuguccugggcgcc

SEQ ID NO: 3759233 - RNA, 20 nt, Human
gcccacugugccucagagac

SEQ ID NO: 3759234 - RNA, 16 nt, Human
gcccacugugcguggg

SEQ ID NO: 3759235 - RNA, 14 nt, Human
gcccacuucugcca

SEQ ID NO: 3759236 - RNA, 18 nt, Human
gcccagaaaaggacagaa

SEQ ID NO: 3759237 - RNA, 19 nt, Human
gcccagaaaaggacagaaa

SEQ ID NO: 3759238 - RNA, 17 nt, Human
gcccagaacuucccuga

SEQ ID NO: 3759239 - RNA, 23 nt, Human
gcccagaauaaguuauugcaguu

SEQ ID NO: 3759240 - RNA, 17 nt, Human
gcccagaauacugaugg

SEQ ID NO: 3759241 - RNA, 16 nt, Human
gcccagaaugaggcug

SEQ ID NO: 3759242 - RNA, 17 nt, Human
gcccagaaugaggcugc

SEQ ID NO: 3759243 - RNA, 21 nt, Human
gcccagaccccucuggccagg

SEQ ID NO: 3759244 - RNA, 13 nt, Human
gcccagagaacag

SEQ ID NO: 3759245 - RNA, 20 nt, Human
gcccagagacauacuugaag

SEQ ID NO: 3759246 - RNA, 23 nt, Human
gcccagagacauacuugaagggc

SEQ ID NO: 3759247 - RNA, 23 nt, Human
gcccagagacccagcggacacac

SEQ ID NO: 3759248 - RNA, 12 nt, Human
gcccagagacuu

SEQ ID NO: 3759249 - RNA, 20 nt, Human
gcccagagagaagagcccca

SEQ ID NO: 3759250 - RNA, 23 nt, Human
gcccagagagaagagccccacuc

SEQ ID NO: 3759251 - RNA, 17 nt, Human
gcccagagaugccucca

SEQ ID NO: 3759252 - RNA, 20 nt, Human
gcccagagaugccuccaccg

SEQ ID NO: 3759253 - RNA, 21 nt, Human
gcccagagaugggacugggag

SEQ ID NO: 3759254 - RNA, 14 nt, Human
gcccagagcaggaa

SEQ ID NO: 3759255 - RNA, 16 nt, Human
gcccagagcaggaagc

SEQ ID NO: 3759256 - RNA, 14 nt, Human
gcccagagcccagc

SEQ ID NO: 3759257 - RNA, 16 nt, Human
gcccagagcccagcuc

SEQ ID NO: 3759258 - RNA, 19 nt, Human
gcccagagcugggugagug

SEQ ID NO: 3759259 - RNA, 20 nt, Human
gcccagaggacucccaaccc

SEQ ID NO: 3759260 - RNA, 14 nt, Human
gcccagaggagcug

SEQ ID NO: 3759261 - RNA, 23 nt, Human
gcccagaggagggcagcagaagg

SEQ ID NO: 3759262 - RNA, 14 nt, Human
gcccagaggcacag

SEQ ID NO: 3759263 - RNA, 19 nt, Human
gcccagaggcacagccggg

SEQ ID NO: 3759264 - RNA, 23 nt, Human
gcccagaggccaacacugugggu

SEQ ID NO: 3759265 - RNA, 22 nt, Human
gcccagagggccugcaagggag

SEQ ID NO: 3759266 - RNA, 18 nt, Human
gcccagagggucuggggg

SEQ ID NO: 3759267 - RNA, 18 nt, Human
gcccagagguaacagaac

SEQ ID NO: 3759268 - RNA, 20 nt, Human
gcccagagguaacagaacag

SEQ ID NO: 3759269 - RNA, 18 nt, Human
gcccagaguccccccacu

SEQ ID NO: 3759270 - RNA, 23 nt, Human
gcccagaguccccccacucccag

SEQ ID NO: 3759271 - RNA, 14 nt, Human
gcccagaguugcug

SEQ ID NO: 3759272 - RNA, 23 nt, Human
gcccagaguugcugggagcugaa

SEQ ID NO: 3759273 - RNA, 17 nt, Human
gcccagaucagcuccua

SEQ ID NO: 3759274 - RNA, 15 nt, Human
gcccagaucccagaa

SEQ ID NO: 3759275 - RNA, 22 nt, Human
gcccagauuaaagucuuuaucc

SEQ ID NO: 3759276 - RNA, 19 nt, Human
gcccagauuccccuguguc

SEQ ID NO: 3759277 - RNA, 18 nt, Human
gcccagauugugccacug

SEQ ID NO: 3759278 - RNA, 19 nt, Human
gcccagcacaugugcugcc

SEQ ID NO: 3759279 - RNA, 20 nt, Human
gcccagcacugcuugaggaa

SEQ ID NO: 3759280 - RNA, 19 nt, Human
gccccguguccugccuguc

SEQ ID NO: 3759281 - RNA, 15 nt, Human
gccccguucuguuug

SEQ ID NO: 3759282 - RNA, 15 nt, Human
gccccuaaucucugu

SEQ ID NO: 3759283 - RNA, 19 nt, Human
gccccuaaucucuguagga

SEQ ID NO: 3759284 - RNA, 16 nt, Human
gccccuaccccacacc

SEQ ID NO: 3759285 - RNA, 18 nt, Human
gccccuacccuggacuug

SEQ ID NO: 3759286 - RNA, 18 nt, Human
gccccuagaaacccaagc

SEQ ID NO: 3759287 - RNA, 15 nt, Human
gccccuagcccagga

SEQ ID NO: 3759288 - RNA, 18 nt, Human
gccccuagcccaggagag

SEQ ID NO: 3759289 - RNA, 19 nt, Human
gccccuagcccaggagaga

SEQ ID NO: 3759290 - RNA, 20 nt, Human
gccccuagccgguuccuguc

SEQ ID NO: 3759291 - RNA, 21 nt, Human
gccccuagcgcuaucucccug

SEQ ID NO: 3759292 - RNA, 20 nt, Human
gccccuauguaguccgugcu

SEQ ID NO: 3759293 - RNA, 16 nt, Human
gccccucaaccuccug

SEQ ID NO: 3759294 - RNA, 12 nt, Human
gccccuccagcu

SEQ ID NO: 3759295 - RNA, 15 nt, Human
gccccucccacacac

SEQ ID NO: 3759296 - RNA, 22 nt, Human
gccccucccacacccaaagcug

SEQ ID NO: 3759297 - RNA, 16 nt, Human
gccccucccaccacag

SEQ ID NO: 3759298 - RNA, 23 nt, Human
gccccucccccaacccccacccc

SEQ ID NO: 3759299 - RNA, 12 nt, Human
gccccucccccg

SEQ ID NO: 3759300 - RNA, 19 nt, Human
gccccucccccguccugga

SEQ ID NO: 3759301 - RNA, 22 nt, Human
gccccucccccguccuggaggu

SEQ ID NO: 3759302 - RNA, 16 nt, Human
gccccuccccuccaaa

SEQ ID NO: 3759303 - RNA, 17 nt, Human
gccccuccccuccaaaa

SEQ ID NO: 3759304 - RNA, 15 nt, Human
gccccucccuaccuc

SEQ ID NO: 3759305 - RNA, 17 nt, Human
gccccucccuaccucaa

SEQ ID NO: 3759306 - RNA, 18 nt, Human
gccccucccuaccucaac

SEQ ID NO: 3759307 - RNA, 21 nt, Human
gccccucccuaccucaaccug

SEQ ID NO: 3759308 - RNA, 15 nt, Human
gccccucccuccucu

SEQ ID NO: 3759309 - RNA, 20 nt, Human
gccccucccucuccagcagg

SEQ ID NO: 3759310 - RNA, 12 nt, Human
gccccucccuuc

SEQ ID NO: 3759311 - RNA, 15 nt, Human
gccccucccuucaac

SEQ ID NO: 3759312 - RNA, 18 nt, Human
gccccuccuccagccccu

SEQ ID NO: 3759313 - RNA, 17 nt, Human
gccccuccucugccacc

SEQ ID NO: 3759314 - RNA, 22 nt, Human
gccccuccucugccaccucccc

SEQ ID NO: 3759315 - RNA, 23 nt, Human
gccccuccucugccaccuccccu

SEQ ID NO: 3759316 - RNA, 23 nt, Human
gccccucgccuguggagcucagc

SEQ ID NO: 3759317 - RNA, 14 nt, Human
gccccucucaccaa

SEQ ID NO: 3759318 - RNA, 18 nt, Human
gccccucuccccagggaa

SEQ ID NO: 3759319 - RNA, 23 nt, Human
gccccucucccuugggcucugau

SEQ ID NO: 3759320 - RNA, 17 nt, Human
gccccucuccuucuuag

SEQ ID NO: 3759321 - RNA, 22 nt, Human
gccccucuggucgcuccugccc

SEQ ID NO: 3759322 - RNA, 18 nt, Human
gccccucuugccccccac

SEQ ID NO: 3759323 - RNA, 21 nt, Human
gccccucuugccccccacccc

SEQ ID NO: 3759324 - RNA, 22 nt, Human
gccccucuuggagaagucucag

SEQ ID NO: 3759325 - RNA, 23 nt, Human
gccccugcagcacggacaauaaa

SEQ ID NO: 3759326 - RNA, 14 nt, Human
gccccugcaucccc

SEQ ID NO: 3759327 - RNA, 20 nt, Human
gccccugcauccccuuggcu

SEQ ID NO: 3759328 - RNA, 11 nt, Human
gccccugccag

SEQ ID NO: 3759329 - RNA, 21 nt, Human
gccccugccauuguagcgucu

SEQ ID NO: 3759330 - RNA, 22 nt, Human
gccccugccccgucaccaucuc

SEQ ID NO: 3759331 - RNA, 13 nt, Human
gccccugcccggc

SEQ ID NO: 3759332 - RNA, 14 nt, Human
gccccugcccggcu

SEQ ID NO: 3759333 - RNA, 12 nt, Human
gccccugccucu

SEQ ID NO: 3759334 - RNA, 15 nt, Human
gccccugccucucug

SEQ ID NO: 3759335 - RNA, 16 nt, Human
gccccugccucucugc

SEQ ID NO: 3759336 - RNA, 20 nt, Human
gccccugccucucugcaggu

SEQ ID NO: 3759337 - RNA, 23 nt, Human
gccccugccucucugcagguccc

SEQ ID NO: 3759338 - RNA, 22 nt, Human
gccccugccugccauguaccuc

SEQ ID NO: 3759339 - RNA, 10 nt, Human
gccccugcug

SEQ ID NO: 3759340 - RNA, 16 nt, Human
gccccugcugccuccc

SEQ ID NO: 3759341 - RNA, 15 nt, Human
gccccugcugcuguc

SEQ ID NO: 3759342 - RNA, 18 nt, Human
gccccugcuucuccagcc

SEQ ID NO: 3759343 - RNA, 19 nt, Human
gccccugcuucuccagccu

SEQ ID NO: 3759344 - RNA, 11 nt, Human
gccccuggagg

SEQ ID NO: 3759345 - RNA, 16 nt, Human
gccccuggaugcagcc

SEQ ID NO: 3759346 - RNA, 13 nt, Human
gccccuggcacuc

SEQ ID NO: 3759347 - RNA, 13 nt, Human
gccccuggcagag

SEQ ID NO: 3759348 - RNA, 17 nt, Human
gccccuggcagagaugc

SEQ ID NO: 3759349 - RNA, 12 nt, Human
gccccuggcagc

SEQ ID NO: 3759350 - RNA, 19 nt, Human
gccccuggcccagcggccc

SEQ ID NO: 3759351 - RNA, 22 nt, Human
gccccuggcccagcggccccuc

SEQ ID NO: 3759352 - RNA, 13 nt, Human
gccccuggcccca

SEQ ID NO: 3759353 - RNA, 15 nt, Human
gccccuggccgcgcu

SEQ ID NO: 3759354 - RNA, 19 nt, Human
gccccugggcuuggccugc

SEQ ID NO: 3759355 - RNA, 16 nt, Human
gccccuggggccuaga

SEQ ID NO: 3759356 - RNA, 21 nt, Human
gccccugggucagucuggugg

SEQ ID NO: 3759357 - RNA, 16 nt, Human
gccccugguccugagg

SEQ ID NO: 3759358 - RNA, 22 nt, Human
gccccuuagacagaggcccuca

SEQ ID NO: 3759359 - RNA, 15 nt, Human
gccccuuaggccagu

SEQ ID NO: 3759360 - RNA, 21 nt, Human
gccccuucauugauuuccugu

SEQ ID NO: 3759361 - RNA, 15 nt, Human
gccccuucccaucuc

SEQ ID NO: 3759362 - RNA, 21 nt, Human
gccccuuccgccacuggggcu

SEQ ID NO: 3759363 - RNA, 20 nt, Human
gccccuuccuugcucugcac

SEQ ID NO: 3759364 - RNA, 14 nt, Human
gccccuuccuuuaa

SEQ ID NO: 3759365 - RNA, 21 nt, Human
gccccuucuacacucuccugg

SEQ ID NO: 3759366 - RNA, 23 nt, Human
gccccuucuagguggcaaggcug

SEQ ID NO: 3759367 - RNA, 18 nt, Human
gccccuucugcucagcuc

SEQ ID NO: 3759368 - RNA, 15 nt, Human
gccccuuuacggaca

SEQ ID NO: 3759369 - RNA, 22 nt, Human
gccccuuuacggacacccccuc

SEQ ID NO: 3759370 - RNA, 23 nt, Human
gccccuuucccuuguagcuccuc

SEQ ID NO: 3759371 - RNA, 17 nt, Human
gccccuuugcugacccu

SEQ ID NO: 3759372 - RNA, 20 nt, Human
gccccuuugcugacccuccc

SEQ ID NO: 3759373 - RNA, 16 nt, Human
gccccuuugggcccug

SEQ ID NO: 3759374 - RNA, 17 nt, Human
gccccuuugggcccugc

SEQ ID NO: 3759375 - RNA, 18 nt, Human
gccccuuugggcccugca

SEQ ID NO: 3759376 - RNA, 20 nt, Human
gccccuuugggcccugcaug

SEQ ID NO: 3759377 - RNA, 21 nt, Human
gccccuuugggcccugcaugu

SEQ ID NO: 3759378 - RNA, 21 nt, Human
gccccuuuucacucccuccau

SEQ ID NO: 3759379 - RNA, 15 nt, Human
gcccgacagccuggc

SEQ ID NO: 3759380 - RNA, 16 nt, Human
gcccgacagccuggca

SEQ ID NO: 3759381 - RNA, 19 nt, Human
gcccgacauggcuccggcc

SEQ ID NO: 3759382 - RNA, 24 nt, Human
gcccgacauggcuccggccucugc

SEQ ID NO: 3759383 - RNA, 13 nt, Human
gcccgacuugcug

SEQ ID NO: 3759384 - RNA, 12 nt, Human
gcccgagcagcu

SEQ ID NO: 3759385 - RNA, 20 nt, Human
gcccgagcagcugagcaggg

SEQ ID NO: 3759386 - RNA, 22 nt, Human
gcccgagcagcugagcagggcc

SEQ ID NO: 3759387 - RNA, 13 nt, Human
gcccgagcuggug

SEQ ID NO: 3759388 - RNA, 19 nt, Human
gcccgaggaggugucucag

SEQ ID NO: 3759389 - RNA, 16 nt, Human
gcccgagguggcugcc

SEQ ID NO: 3759390 - RNA, 17 nt, Human
gcccgagguggcugccu

SEQ ID NO: 3759391 - RNA, 19 nt, Human
gcccgagguggcugccugg

SEQ ID NO: 3759392 - RNA, 22 nt, Human
gcccgagguggcugccuggagc

SEQ ID NO: 3759393 - RNA, 17 nt, Human
gcccgauccuccccugg

SEQ ID NO: 3759394 - RNA, 21 nt, Human
gcccgauccuccccuggacuc

SEQ ID NO: 3759395 - RNA, 24 nt, Human
gcccgcacacccucacucugccag

SEQ ID NO: 3759396 - RNA, 17 nt, Human
gcccgcacagcagccug

SEQ ID NO: 3759397 - RNA, 18 nt, Human
gcccgcacagcagccugc

SEQ ID NO: 3759398 - RNA, 15 nt, Human
gcccgcacccccacc

SEQ ID NO: 3759399 - RNA, 17 nt, Human
gcccgcacccccacccu

SEQ ID NO: 3759400 - RNA, 22 nt, Human
gcccgcaugcagcagcuugcug

SEQ ID NO: 3759401 - RNA, 17 nt, Human
gcccgcccacuguccug

SEQ ID NO: 3759402 - RNA, 19 nt, Human
gcccgcccacuguccuggg

SEQ ID NO: 3759403 - RNA, 17 nt, Human
gcccgccugccaguccu

SEQ ID NO: 3759404 - RNA, 13 nt, Human
gcccgccuggcag

SEQ ID NO: 3759405 - RNA, 18 nt, Human
gcccgccuggcagaacug

SEQ ID NO: 3759406 - RNA, 17 nt, Human
gcccgcgccacaggacc

SEQ ID NO: 3759407 - RNA, 23 nt, Human
gcccgcgcccucgcccccgcccc

SEQ ID NO: 3759408 - RNA, 17 nt, Human
gcccgcugaguggacug

SEQ ID NO: 3759409 - RNA, 12 nt, Human
gcccgcugggcu

SEQ ID NO: 3759410 - RNA, 17 nt, Human
gcccgcugggcugagcc

SEQ ID NO: 3759411 - RNA, 12 nt, Human
gcccgcuugccu

SEQ ID NO: 3759412 - RNA, 18 nt, Human
gcccgcuugccucggcuc

SEQ ID NO: 3759413 - RNA, 23 nt, Human
gcccggagcugccccucucuggg

SEQ ID NO: 3759414 - RNA, 16 nt, Human
gcccggaugcugcuuc

SEQ ID NO: 3759415 - RNA, 15 nt, Human
gcccggauucuggga

SEQ ID NO: 3759416 - RNA, 18 nt, Human
gcccggccagccaugucu

SEQ ID NO: 3759417 - RNA, 20 nt, Human
gcccggccgcuccaccagca

SEQ ID NO: 3759418 - RNA, 15 nt, Human
gcccggccugcuccc

SEQ ID NO: 3759419 - RNA, 22 nt, Human
gcccggccugcucccagcagcc

SEQ ID NO: 3759420 - RNA, 15 nt, Human
gcccggcgcccucug

SEQ ID NO: 3759421 - RNA, 15 nt, Human
gcccggcgccuggcc

SEQ ID NO: 3759422 - RNA, 23 nt, Human
gcccggcgccuggccuccaggcc

SEQ ID NO: 3759423 - RNA, 18 nt, Human
gcccgggaaggucaccag

SEQ ID NO: 3759424 - RNA, 13 nt, Human
gcccgggagccua

SEQ ID NO: 3759425 - RNA, 12 nt, Human
gcccgggcucug

SEQ ID NO: 3759426 - RNA, 20 nt, Human
gcccgggcucugccucccau

SEQ ID NO: 3759427 - RNA, 13 nt, Human
gcccgggcugccu

SEQ ID NO: 3759428 - RNA, 17 nt, Human
gcccggggcagcugcca

SEQ ID NO: 3759429 - RNA, 17 nt, Human
cugggcacacucugcca

SEQ ID NO: 3759430 - RNA, 18 nt, Human
cugggcacacucugccag

SEQ ID NO: 3759431 - RNA, 21 nt, Human
cugggcacacucugccagcaa

SEQ ID NO: 3759432 - RNA, 20 nt, Human
cugggcaccacaaaauauac

SEQ ID NO: 3759433 - RNA, 19 nt, Human
cugggcacugcucucaccu

SEQ ID NO: 3759434 - RNA, 18 nt, Human
cugggcagaaggaagacu

SEQ ID NO: 3759435 - RNA, 16 nt, Human
cugggcagaaggccaa

SEQ ID NO: 3759436 - RNA, 13 nt, Human
cugggcagaccuu

SEQ ID NO: 3759437 - RNA, 16 nt, Human
cugggcagaggaaagc

SEQ ID NO: 3759438 - RNA, 20 nt, Human
cugggcagaggaaagcaaag

SEQ ID NO: 3759439 - RNA, 16 nt, Human
cugggcagccaggcug

SEQ ID NO: 3759440 - RNA, 17 nt, Human
cugggcagccaggcugc

SEQ ID NO: 3759441 - RNA, 13 nt, Human
cugggcagcccgc

SEQ ID NO: 3759442 - RNA, 20 nt, Human
cugggcagcccgcuaggcuc

SEQ ID NO: 3759443 - RNA, 13 nt, Human
cugggcagcugcc

SEQ ID NO: 3759444 - RNA, 14 nt, Human
cugggcagcugccu

SEQ ID NO: 3759445 - RNA, 12 nt, Human
cugggcagcugu

SEQ ID NO: 3759446 - RNA, 16 nt, Human
cugggcagcugucccu

SEQ ID NO: 3759447 - RNA, 17 nt, Human
cugggcaggacucagcu

SEQ ID NO: 3759448 - RNA, 20 nt, Human
cugggcaugguaccagcccu

SEQ ID NO: 3759449 - RNA, 19 nt, Human
cugggccaacucaccugag

SEQ ID NO: 3759450 - RNA, 18 nt, Human
cugggccaaguuccucua

SEQ ID NO: 3759451 - RNA, 18 nt, Human
cugggccacuucugggug

SEQ ID NO: 3759452 - RNA, 14 nt, Human
cugggcccagaagg

SEQ ID NO: 3759453 - RNA, 14 nt, Human
cugggcccagaggc

SEQ ID NO: 3759454 - RNA, 17 nt, Human
cugggcccaucucccug

SEQ ID NO: 3759455 - RNA, 19 nt, Human
cugggcccaucucccugcu

SEQ ID NO: 3759456 - RNA, 24 nt, Human
cugggccccaaacgggcugcccug

SEQ ID NO: 3759457 - RNA, 13 nt, Human
cugggccccacca

SEQ ID NO: 3759458 - RNA, 14 nt, Human
cugggccccaccac

SEQ ID NO: 3759459 - RNA, 16 nt, Human
cugggccccaccaccu

SEQ ID NO: 3759460 - RNA, 18 nt, Human
cugggccccaccaccuag

SEQ ID NO: 3759461 - RNA, 12 nt, Human
cugggccccagc

SEQ ID NO: 3759462 - RNA, 15 nt, Human
cugggccccagccca

SEQ ID NO: 3759463 - RNA, 17 nt, Human
cugggccccccagcuca

SEQ ID NO: 3759464 - RNA, 10 nt, Human
cugggccccu

SEQ ID NO: 3759465 - RNA, 19 nt, Human
cugggccccucccuaccuc

SEQ ID NO: 3759466 - RNA, 22 nt, Human
cugggccccucccuaccucaac

SEQ ID NO: 3759467 - RNA, 16 nt, Human
cugggccccugccucu

SEQ ID NO: 3759468 - RNA, 23 nt, Human
cugggccccugccucucugcagg

SEQ ID NO: 3759469 - RNA, 17 nt, Human
cugggcccgauuuggua

SEQ ID NO: 3759470 - RNA, 13 nt, Human
cugggcccugggg

SEQ ID NO: 3759471 - RNA, 14 nt, Human
cugggcccuggggc

SEQ ID NO: 3759472 - RNA, 15 nt, Human
cugggcccuggggcc

SEQ ID NO: 3759473 - RNA, 16 nt, Human
cugggccgcugccacg

SEQ ID NO: 3759474 - RNA, 24 nt, Human
cugggccguaucuccggcucccag

SEQ ID NO: 3759475 - RNA, 17 nt, Human
cugggccuauggagagc

SEQ ID NO: 3759476 - RNA, 21 nt, Human
cugggccuauggagagcccug

SEQ ID NO: 3759477 - RNA, 22 nt, Human
cugggccuauggagagcccugg

SEQ ID NO: 3759478 - RNA, 20 nt, Human
cugggccuccucacaacaug

SEQ ID NO: 3759479 - RNA, 23 nt, Human
cugggccuccucuaacaggggcu

SEQ ID NO: 3759480 - RNA, 17 nt, Human
cugggccucggacccca

SEQ ID NO: 3759481 - RNA, 12 nt, Human
cugggccugcug

SEQ ID NO: 3759482 - RNA, 15 nt, Human
cugggccugcugcug

SEQ ID NO: 3759483 - RNA, 16 nt, Human
cugggccugcugcuga

SEQ ID NO: 3759484 - RNA, 20 nt, Human
cugggccugcugcugagaac

SEQ ID NO: 3759485 - RNA, 15 nt, Human
cugggccuggucuca

SEQ ID NO: 3759486 - RNA, 11 nt, Human
cugggccuugg

SEQ ID NO: 3759487 - RNA, 18 nt, Human
cugggccuuggccuggag

SEQ ID NO: 3759488 - RNA, 14 nt, Human
cugggccuugggcu

SEQ ID NO: 3759489 - RNA, 17 nt, Human
cugggccuugggcuccg

SEQ ID NO: 3759490 - RNA, 16 nt, Human
cugggcgcccuggaag

SEQ ID NO: 3759491 - RNA, 18 nt, Human
cugggcgcccuggaagcc

SEQ ID NO: 3759492 - RNA, 22 nt, Human
cugggcggcgggcggcuggguc

SEQ ID NO: 3759493 - RNA, 18 nt, Human
cugggcuagguagaaaaa

SEQ ID NO: 3759494 - RNA, 18 nt, Human
cugggcuauggacacagg

SEQ ID NO: 3759495 - RNA, 19 nt, Human
cugggcuauggacacaggg

SEQ ID NO: 3759496 - RNA, 24 nt, Human
cugggcucaagcaauccuccugag

SEQ ID NO: 3759497 - RNA, 18 nt, Human
cugggcucccgggcccca

SEQ ID NO: 3759498 - RNA, 21 nt, Human
cugggcucccuucccaccucu

SEQ ID NO: 3759499 - RNA, 22 nt, Human
cugggcucccuucccaccucuc

SEQ ID NO: 3759500 - RNA, 22 nt, Human
cugggcuccggaggacucacca

SEQ ID NO: 3759501 - RNA, 14 nt, Human
cugggcuccuggac

SEQ ID NO: 3759502 - RNA, 21 nt, Human
cugggcucggaggcugccccc

SEQ ID NO: 3759503 - RNA, 14 nt, Human
cugggcucuccacc

SEQ ID NO: 3759504 - RNA, 15 nt, Human
cugggcucuccaccu

SEQ ID NO: 3759505 - RNA, 19 nt, Human
cugggcucuccaccucagc

SEQ ID NO: 3759506 - RNA, 20 nt, Human
cugggcucucgcggccucuu

SEQ ID NO: 3759507 - RNA, 13 nt, Human
cugggcucugagu

SEQ ID NO: 3759508 - RNA, 13 nt, Human
cugggcucugugg

SEQ ID NO: 3759509 - RNA, 15 nt, Human
cugggcucugugggc

SEQ ID NO: 3759510 - RNA, 20 nt, Human
cugggcucugugggcugcac

SEQ ID NO: 3759511 - RNA, 21 nt, Human
cugggcucugugggcugcacu

SEQ ID NO: 3759512 - RNA, 12 nt, Human
cugggcugacug

SEQ ID NO: 3759513 - RNA, 13 nt, Human
cugggcugagaga

SEQ ID NO: 3759514 - RNA, 15 nt, Human
cugggcugagccccu

SEQ ID NO: 3759515 - RNA, 12 nt, Human
cugggcugaggg

SEQ ID NO: 3759516 - RNA, 13 nt, Human
cugggcugaggga

SEQ ID NO: 3759517 - RNA, 16 nt, Human
cugggcugagggagcc

SEQ ID NO: 3759518 - RNA, 17 nt, Human
cugggcugccaugugaa

SEQ ID NO: 3759519 - RNA, 20 nt, Human
cugggcugccaugugaagag

SEQ ID NO: 3759520 - RNA, 16 nt, Human
cugggcuggaugagcu

SEQ ID NO: 3759521 - RNA, 22 nt, Human
cugggcuggccaguuggaacca

SEQ ID NO: 3759522 - RNA, 22 nt, Human
cugggcugggcacugcucucac

SEQ ID NO: 3759523 - RNA, 15 nt, Human
cugggcuggggccug

SEQ ID NO: 3759524 - RNA, 18 nt, Human
cugggcugggugcgaccc

SEQ ID NO: 3759525 - RNA, 23 nt, Human
cugggcuguaacguggcacuggu

SEQ ID NO: 3759526 - RNA, 12 nt, Human
cugggcugugcu

SEQ ID NO: 3759527 - RNA, 14 nt, Human
cugggcuguuggca

SEQ ID NO: 3759528 - RNA, 15 nt, Human
cugggcuguuggcac

SEQ ID NO: 3759529 - RNA, 19 nt, Human
cugggcuucaucuggcaac

SEQ ID NO: 3759530 - RNA, 13 nt, Human
cugggcuuccugg

SEQ ID NO: 3759531 - RNA, 14 nt, Human
cugggcuuccugga

SEQ ID NO: 3759532 - RNA, 15 nt, Human
cugggcuuccuggag

SEQ ID NO: 3759533 - RNA, 22 nt, Human
cugggcuuccuggagcagaagc

SEQ ID NO: 3759534 - RNA, 17 nt, Human
cugggcuuggccugcug

SEQ ID NO: 3759535 - RNA, 20 nt, Human
cugggcuuggccugcuguga

SEQ ID NO: 3759536 - RNA, 20 nt, Human
cugggcuuggggaccagagc

SEQ ID NO: 3759537 - RNA, 18 nt, Human
cugggcuugucuguagau

SEQ ID NO: 3759538 - RNA, 16 nt, Human
cuggggaaagacacug

SEQ ID NO: 3759539 - RNA, 19 nt, Human
cuggggaaagacacugccu

SEQ ID NO: 3759540 - RNA, 21 nt, Human
cuggggaaagacacugccugg

SEQ ID NO: 3759541 - RNA, 17 nt, Human
cuggggaaccugacccc

SEQ ID NO: 3759542 - RNA, 18 nt, Human
cuggggaagacaguggcc

SEQ ID NO: 3759543 - RNA, 15 nt, Human
cuggggaaggagcca

SEQ ID NO: 3759544 - RNA, 16 nt, Human
cuggggaaggagccag

SEQ ID NO: 3759545 - RNA, 18 nt, Human
cuggggaaggagccaguu

SEQ ID NO: 3759546 - RNA, 12 nt, Human
cuggggacccac

SEQ ID NO: 3759547 - RNA, 20 nt, Human
cuggggaccugguacccucc

SEQ ID NO: 3759548 - RNA, 17 nt, Human
cuggggacggggggccc

SEQ ID NO: 3759549 - RNA, 17 nt, Human
cuggggacuuggccucu

SEQ ID NO: 3759550 - RNA, 13 nt, Human
cuggggacuugug

SEQ ID NO: 3759551 - RNA, 13 nt, Human
cuggggagaaagu

SEQ ID NO: 3759552 - RNA, 14 nt, Human
cuggggagaaagua

SEQ ID NO: 3759553 - RNA, 16 nt, Human
cuggggagaggaaaga

SEQ ID NO: 3759554 - RNA, 12 nt, Human
cuggggagcccg

SEQ ID NO: 3759555 - RNA, 22 nt, Human
cuggggagcgggucugcuccca

SEQ ID NO: 3759556 - RNA, 14 nt, Human
cuggggaggaccug

SEQ ID NO: 3759557 - RNA, 17 nt, Human
cuggggagugggacaga

SEQ ID NO: 3759558 - RNA, 18 nt, Human
cuggggauacuggcaaag

SEQ ID NO: 3759559 - RNA, 16 nt, Human
cuggggaugucucuca

SEQ ID NO: 3759560 - RNA, 22 nt, Human
cuggggaugugggagggagcag

SEQ ID NO: 3759561 - RNA, 16 nt, Human
cuggggauugggcccc

SEQ ID NO: 3759562 - RNA, 21 nt, Human
cuggggcaagucccugacucu

SEQ ID NO: 3759563 - RNA, 12 nt, Human
cuggggcacagu

SEQ ID NO: 3759564 - RNA, 17 nt, Human
cuggggcacaguccagg

SEQ ID NO: 3759565 - RNA, 19 nt, Human
cuggggcagccucugggcc

SEQ ID NO: 3759566 - RNA, 19 nt, Human
cuggggcaggcugggccau

SEQ ID NO: 3759567 - RNA, 17 nt, Human
cuggggcauccaugggg

SEQ ID NO: 3759568 - RNA, 18 nt, Human
cuggggccaggcuggguc

SEQ ID NO: 3759569 - RNA, 23 nt, Human
cuggggccuagcgaucucuccug

SEQ ID NO: 3759570 - RNA, 15 nt, Human
cuggggccucagacg

SEQ ID NO: 3759571 - RNA, 11 nt, Human
cuggggccucc

SEQ ID NO: 3759572 - RNA, 12 nt, Human
cuggggccucca

SEQ ID NO: 3759573 - RNA, 17 nt, Human
cuggggccuccagaacu

SEQ ID NO: 3759574 - RNA, 15 nt, Human
cuggggccugacugc

SEQ ID NO: 3759575 - RNA, 12 nt, Human
cuggggccuggc

SEQ ID NO: 3759576 - RNA, 16 nt, Human
cuggggccuguacugc

SEQ ID NO: 3759577 - RNA, 18 nt, Human
cuggggccuguacugccu

SEQ ID NO: 3759578 - RNA, 22 nt, Human
cuggggccuguacugccugcuu

SEQ ID NO: 3759579 - RNA, 16 nt, Human
cuggggcguggggagg

SEQ ID NO: 3759580 - RNA, 17 nt, Human
gcccgguaagagcaaaa

SEQ ID NO: 3759581 - RNA, 17 nt, Human
gcccguaaacacgccug

SEQ ID NO: 3759582 - RNA, 18 nt, Human
gcccgucauguuccucaa

SEQ ID NO: 3759583 - RNA, 14 nt, Human
gcccguccugccug

SEQ ID NO: 3759584 - RNA, 15 nt, Human
gcccguccugccugu

SEQ ID NO: 3759585 - RNA, 14 nt, Human
gcccgucucagugu

SEQ ID NO: 3759586 - RNA, 18 nt, Human
gcccgucuguccaucugc

SEQ ID NO: 3759587 - RNA, 23 nt, Human
gcccgucugugugugaccccucc

SEQ ID NO: 3759588 - RNA, 18 nt, Human
gcccgucuucagccuagc

SEQ ID NO: 3759589 - RNA, 15 nt, Human
gcccguggggccggg

SEQ ID NO: 3759590 - RNA, 22 nt, Human
gcccguggggccggggcuucug

SEQ ID NO: 3759591 - RNA, 17 nt, Human
gcccguguggccccuuc

SEQ ID NO: 3759592 - RNA, 17 nt, Human
gcccguugaggaugagg

SEQ ID NO: 3759593 - RNA, 22 nt, Human
gcccguugucucccuggcccuc

SEQ ID NO: 3759594 - RNA, 18 nt, Human
gcccuaaacccuguuccu

SEQ ID NO: 3759595 - RNA, 15 nt, Human
gcccuaaggaucucu

SEQ ID NO: 3759596 - RNA, 14 nt, Human
gcccuaagggagug

SEQ ID NO: 3759597 - RNA, 16 nt, Human
gcccuaaugcgcaggc

SEQ ID NO: 3759598 - RNA, 23 nt, Human
gcccuaaugcgcaggcuggcccu

SEQ ID NO: 3759599 - RNA, 15 nt, Human
gcccuaaugucugua

SEQ ID NO: 3759600 - RNA, 23 nt, Human
gcccuaauucagccauguacaga

SEQ ID NO: 3759601 - RNA, 16 nt, Human
gcccuacagagcugug

SEQ ID NO: 3759602 - RNA, 20 nt, Human
gcccuacagagcuguggagg

SEQ ID NO: 3759603 - RNA, 16 nt, Human
gcccuacagaggucuc

SEQ ID NO: 3759604 - RNA, 20 nt, Human
gcccuaccagcgcccgcugg

SEQ ID NO: 3759605 - RNA, 12 nt, Human
gcccuacuggga

SEQ ID NO: 3759606 - RNA, 13 nt, Human
gcccuagagcaca

SEQ ID NO: 3759607 - RNA, 21 nt, Human
gcccuagagcacacuguagca

SEQ ID NO: 3759608 - RNA, 14 nt, Human
gcccuagagccugc

SEQ ID NO: 3759609 - RNA, 19 nt, Human
gcccuagagccugccugga

SEQ ID NO: 3759610 - RNA, 20 nt, Human
gcccuagagccugccuggag

SEQ ID NO: 3759611 - RNA, 23 nt, Human
gcccuagagccugccuggagcgu

SEQ ID NO: 3759612 - RNA, 19 nt, Human
gcccuagcccagcgcucug

SEQ ID NO: 3759613 - RNA, 14 nt, Human
gcccuaggccuggc

SEQ ID NO: 3759614 - RNA, 17 nt, Human
gcccuaggcuccgucag

SEQ ID NO: 3759615 - RNA, 14 nt, Human
gcccuauggaugug

SEQ ID NO: 3759616 - RNA, 17 nt, Human
gcccuauuucuugauaa

SEQ ID NO: 3759617 - RNA, 23 nt, Human
gcccucaagacccuuuuggguuu

SEQ ID NO: 3759618 - RNA, 19 nt, Human
gcccucaaggccucccaca

SEQ ID NO: 3759619 - RNA, 15 nt, Human
gcccucaaucccagc

SEQ ID NO: 3759620 - RNA, 16 nt, Human
gcccucacacacccug

SEQ ID NO: 3759621 - RNA, 18 nt, Human
gcccucaccccugguucu

SEQ ID NO: 3759622 - RNA, 14 nt, Human
gcccucacccgccc

SEQ ID NO: 3759623 - RNA, 17 nt, Human
gcccucagaacccuugg

SEQ ID NO: 3759624 - RNA, 15 nt, Human
gcccucagauguccc

SEQ ID NO: 3759625 - RNA, 19 nt, Human
gcccucaggggacuugaau

SEQ ID NO: 3759626 - RNA, 23 nt, Human
gcccucaggucagggugaggaug

SEQ ID NO: 3759627 - RNA, 21 nt, Human
gcccucaucuaugaggaaagg

SEQ ID NO: 3759628 - RNA, 16 nt, Human
gcccucauggccccuc

SEQ ID NO: 3759629 - RNA, 18 nt, Human
gcccucauggccccucug

SEQ ID NO: 3759630 - RNA, 22 nt, Human
gcccucauggccccucugaccu

SEQ ID NO: 3759631 - RNA, 17 nt, Human
gcccucauuacggcucc

SEQ ID NO: 3759632 - RNA, 18 nt, Human
gcccucauuacggcuccu

SEQ ID NO: 3759633 - RNA, 21 nt, Human
gcccucauuacggcuccucuc

SEQ ID NO: 3759634 - RNA, 22 nt, Human
gcccuccaagaccuucuccuuc

SEQ ID NO: 3759635 - RNA, 20 nt, Human
gcccuccacagccgcagccu

SEQ ID NO: 3759636 - RNA, 21 nt, Human
gcccuccacgccggcucuucc

SEQ ID NO: 3759637 - RNA, 15 nt, Human
gcccuccacugcccu

SEQ ID NO: 3759638 - RNA, 16 nt, Human
gcccuccacugcccuc

SEQ ID NO: 3759639 - RNA, 18 nt, Human
gcccuccacugcccucug

SEQ ID NO: 3759640 - RNA, 18 nt, Human
gcccuccagagccccaca

SEQ ID NO: 3759641 - RNA, 22 nt, Human
gcccuccagagccccacagccc

SEQ ID NO: 3759642 - RNA, 17 nt, Human
gcccuccagcucuuucc

SEQ ID NO: 3759643 - RNA, 21 nt, Human
gcccuccagcucuuuccuccu

SEQ ID NO: 3759644 - RNA, 14 nt, Human
gcccuccaggcuuu

SEQ ID NO: 3759645 - RNA, 16 nt, Human
gcccuccaucccgaca

SEQ ID NO: 3759646 - RNA, 14 nt, Human
gcccucccaucccg

SEQ ID NO: 3759647 - RNA, 13 nt, Human
gcccuccccagag

SEQ ID NO: 3759648 - RNA, 14 nt, Human
gcccuccccaggaa

SEQ ID NO: 3759649 - RNA, 17 nt, Human
gcccuccccaucccaug

SEQ ID NO: 3759650 - RNA, 19 nt, Human
gcccuccccauggagccag

SEQ ID NO: 3759651 - RNA, 12 nt, Human
gcccuccccucc

SEQ ID NO: 3759652 - RNA, 13 nt, Human
gcccuccccuccc

SEQ ID NO: 3759653 - RNA, 16 nt, Human
gcccuccccuccccug

SEQ ID NO: 3759654 - RNA, 18 nt, Human
gcccuccccuccccugcu

SEQ ID NO: 3759655 - RNA, 23 nt, Human
gcccuccccuccggacuggugcc

SEQ ID NO: 3759656 - RNA, 13 nt, Human
gcccucccgcccc

SEQ ID NO: 3759657 - RNA, 15 nt, Human
gcccucccgccccuu

SEQ ID NO: 3759658 - RNA, 19 nt, Human
gcccucccuccccagcucc

SEQ ID NO: 3759659 - RNA, 21 nt, Human
gcccucccuguccuccucgga

SEQ ID NO: 3759660 - RNA, 18 nt, Human
gcccucccuguuccccag

SEQ ID NO: 3759661 - RNA, 22 nt, Human
gcccucccuguuccccagagaa

SEQ ID NO: 3759662 - RNA, 20 nt, Human
gcccucccuucucccuggau

SEQ ID NO: 3759663 - RNA, 22 nt, Human
gcccuccgaccacuuccagggg

SEQ ID NO: 3759664 - RNA, 20 nt, Human
gcccuccucccucccagcuc

SEQ ID NO: 3759665 - RNA, 12 nt, Human
gcccuccucucc

SEQ ID NO: 3759666 - RNA, 21 nt, Human
gcccuccugugcucagcccug

SEQ ID NO: 3759667 - RNA, 17 nt, Human
gcccuccuuguccaccc

SEQ ID NO: 3759668 - RNA, 19 nt, Human
gcccuccuuguccacccac

SEQ ID NO: 3759669 - RNA, 13 nt, Human
gcccuccuuucug

SEQ ID NO: 3759670 - RNA, 20 nt, Human
gcccuccuuucugugcccua

SEQ ID NO: 3759671 - RNA, 14 nt, Human
gcccucgcugccag

SEQ ID NO: 3759672 - RNA, 15 nt, Human
gcccucguggccagc

SEQ ID NO: 3759673 - RNA, 17 nt, Human
gcccucguggccagccc

SEQ ID NO: 3759674 - RNA, 20 nt, Human
gcccucguggccagcccggc

SEQ ID NO: 3759675 - RNA, 13 nt, Human
gcccucucccacc

SEQ ID NO: 3759676 - RNA, 19 nt, Human
gcccucucccacccucuuc

SEQ ID NO: 3759677 - RNA, 11 nt, Human
gcccucucccc

SEQ ID NO: 3759678 - RNA, 14 nt, Human
gcccucuccccugc

SEQ ID NO: 3759679 - RNA, 16 nt, Human
gcccucuccccugccc

SEQ ID NO: 3759680 - RNA, 20 nt, Human
gcccucuccccugcccccug

SEQ ID NO: 3759681 - RNA, 22 nt, Human
gcccucuccccugcccccugca

SEQ ID NO: 3759682 - RNA, 17 nt, Human
gcccucucccucuaggc

SEQ ID NO: 3759683 - RNA, 21 nt, Human
gcccucucccuuacccuggga

SEQ ID NO: 3759684 - RNA, 22 nt, Human
gcccucucccuuacccugggaa

SEQ ID NO: 3759685 - RNA, 14 nt, Human
gcccucuccugggc

SEQ ID NO: 3759686 - RNA, 16 nt, Human
gcccucuccugggcag

SEQ ID NO: 3759687 - RNA, 16 nt, Human
gcccucuccuuccuua

SEQ ID NO: 3759688 - RNA, 20 nt, Human
gcccucucugaaggaggcca

SEQ ID NO: 3759689 - RNA, 23 nt, Human
gcccucucugaaggaggccaccu

SEQ ID NO: 3759690 - RNA, 17 nt, Human
gcccucugaacuugccu

SEQ ID NO: 3759691 - RNA, 22 nt, Human
gcccucugcauccucuggagcc

SEQ ID NO: 3759692 - RNA, 16 nt, Human
gcccucugcccacucc

SEQ ID NO: 3759693 - RNA, 18 nt, Human
gcccucugcccacucccu

SEQ ID NO: 3759694 - RNA, 22 nt, Human
gcccucugcccacucccugcaa

SEQ ID NO: 3759695 - RNA, 18 nt, Human
gcccucuggaguggccac

SEQ ID NO: 3759696 - RNA, 13 nt, Human
gcccucugggcuc

SEQ ID NO: 3759697 - RNA, 15 nt, Human
gcccucugggcucug

SEQ ID NO: 3759698 - RNA, 13 nt, Human
gcccucuguccug

SEQ ID NO: 3759699 - RNA, 12 nt, Human
gcccucuuccug

SEQ ID NO: 3759700 - RNA, 13 nt, Human
gcccucuucuuac

SEQ ID NO: 3759701 - RNA, 17 nt, Human
gcccugacauuggagcc

SEQ ID NO: 3759702 - RNA, 14 nt, Human
gcccugacccugug

SEQ ID NO: 3759703 - RNA, 13 nt, Human
gcccugaccuccc

SEQ ID NO: 3759704 - RNA, 16 nt, Human
gcccugaccucccagc

SEQ ID NO: 3759705 - RNA, 21 nt, Human
gcccugagccagggucuccag

SEQ ID NO: 3759706 - RNA, 13 nt, Human
gcccugagcucgg

SEQ ID NO: 3759707 - RNA, 16 nt, Human
gcccugaggaaggagg

SEQ ID NO: 3759708 - RNA, 14 nt, Human
gcccugaggugugg

SEQ ID NO: 3759709 - RNA, 24 nt, Human
gcccugaggugugggggcugcagc

SEQ ID NO: 3759710 - RNA, 21 nt, Human
gcccugaguggaucuccaagg

SEQ ID NO: 3759711 - RNA, 22 nt, Human
gcccugaguggaucuccaagga

SEQ ID NO: 3759712 - RNA, 16 nt, Human
gcccugaguuccuagc

SEQ ID NO: 3759713 - RNA, 22 nt, Human
gcccugauguguccucagggag

SEQ ID NO: 3759714 - RNA, 21 nt, Human
gcccugcaaaaggacucucag

SEQ ID NO: 3759715 - RNA, 23 nt, Human
gcccugcaauguaucccuucuca

SEQ ID NO: 3759716 - RNA, 17 nt, Human
gcccugcaccaugcugc

SEQ ID NO: 3759717 - RNA, 22 nt, Human
gcccugcaccaugcugcugggg

SEQ ID NO: 3759718 - RNA, 14 nt, Human
gcccugcacugucc

SEQ ID NO: 3759719 - RNA, 17 nt, Human
gcccugcacuguccugc

SEQ ID NO: 3759720 - RNA, 19 nt, Human
gcccugcacuguccugcuc

SEQ ID NO: 3759721 - RNA, 14 nt, Human
gcccugcagacccu

SEQ ID NO: 3759722 - RNA, 19 nt, Human
gcccugcagacccugcccu

SEQ ID NO: 3759723 - RNA, 15 nt, Human
gcccugcagagggca

SEQ ID NO: 3759724 - RNA, 15 nt, Human
gcccugcaugggcca

SEQ ID NO: 3759725 - RNA, 18 nt, Human
gcccugcaugggccagcc

SEQ ID NO: 3759726 - RNA, 11 nt, Human
gcccugcaugu

SEQ ID NO: 3759727 - RNA, 13 nt, Human
gcccugccaccug

SEQ ID NO: 3759728 - RNA, 14 nt, Human
gcccugccaccugu

SEQ ID NO: 3759729 - RNA, 11 nt, Human
gcccugccacu

SEQ ID NO: 3759730 - RNA, 16 nt, Human
aaccgucuguuaugcu

SEQ ID NO: 3759731 - RNA, 22 nt, Human
aaccgucuguuaugcugugaca

SEQ ID NO: 3759732 - RNA, 23 nt, Human
aaccgugagcaggaaggccuggg

SEQ ID NO: 3759733 - RNA, 18 nt, Human
aaccguggcccuuccugg

SEQ ID NO: 3759734 - RNA, 18 nt, Human
aaccgugguaugucugcc

SEQ ID NO: 3759735 - RNA, 20 nt, Human
aaccguguuugucucuucug

SEQ ID NO: 3759736 - RNA, 15 nt, Human
aaccguuauuauaau

SEQ ID NO: 3759737 - RNA, 13 nt, Human
aaccuaaaaaaga

SEQ ID NO: 3759738 - RNA, 14 nt, Human
aaccuaaaaaagau

SEQ ID NO: 3759739 - RNA, 16 nt, Human
aaccuaaccugugucu

SEQ ID NO: 3759740 - RNA, 18 nt, Human
aaccuaaccugugucugc

SEQ ID NO: 3759741 - RNA, 15 nt, Human
aaccuaacuguaucu

SEQ ID NO: 3759742 - RNA, 17 nt, Human
aaccuaacuguaucuug

SEQ ID NO: 3759743 - RNA, 21 nt, Human
aaccuaaucaccauguaagca

SEQ ID NO: 3759744 - RNA, 18 nt, Human
aaccuaccaccccuuccu

SEQ ID NO: 3759745 - RNA, 20 nt, Human
aaccuacuuucauacugaag

SEQ ID NO: 3759746 - RNA, 19 nt, Human
aaccuaggagugccccauu

SEQ ID NO: 3759747 - RNA, 21 nt, Human
aaccuaguuaaagaaaggaaa

SEQ ID NO: 3759748 - RNA, 15 nt, Human
aaccuauuucucuuu

SEQ ID NO: 3759749 - RNA, 15 nt, Human
aaccucaaagugacu

SEQ ID NO: 3759750 - RNA, 17 nt, Human
aaccucaacugccuacu

SEQ ID NO: 3759751 - RNA, 20 nt, Human
aaccucaaguaaacuccccu

SEQ ID NO: 3759752 - RNA, 13 nt, Human
aaccucacucuug

SEQ ID NO: 3759753 - RNA, 22 nt, Human
aaccucagacuuaccaggaagc

SEQ ID NO: 3759754 - RNA, 15 nt, Human
aaccucagcaaccug

SEQ ID NO: 3759755 - RNA, 13 nt, Human
aaccucagccugg

SEQ ID NO: 3759756 - RNA, 13 nt, Human
aaccucagcucug

SEQ ID NO: 3759757 - RNA, 18 nt, Human
aaccucagggcucccagg

SEQ ID NO: 3759758 - RNA, 18 nt, Human
aaccucaguaauuuagaa

SEQ ID NO: 3759759 - RNA, 18 nt, Human
aaccucagugucauuuau

SEQ ID NO: 3759760 - RNA, 14 nt, Human
aaccucauccucuc

SEQ ID NO: 3759761 - RNA, 16 nt, Human
aaccucaucuucuuca

SEQ ID NO: 3759762 - RNA, 14 nt, Human
aaccucauucccca

SEQ ID NO: 3759763 - RNA, 16 nt, Human
aaccucauugacaaga

SEQ ID NO: 3759764 - RNA, 17 nt, Human
aaccucccagaggucca

SEQ ID NO: 3759765 - RNA, 24 nt, Human
aaccucccagagguccagcccauc

SEQ ID NO: 3759766 - RNA, 19 nt, Human
aaccucccucuuguuuugu

SEQ ID NO: 3759767 - RNA, 20 nt, Human
aaccucccucuuguuuuguu

SEQ ID NO: 3759768 - RNA, 23 nt, Human
aaccucccucuuguuuuguuugu

SEQ ID NO: 3759769 - RNA, 19 nt, Human
aaccuccgccucccggguu

SEQ ID NO: 3759770 - RNA, 17 nt, Human
aaccuccgccucuuggg

SEQ ID NO: 3759771 - RNA, 14 nt, Human
aaccuccugggcua

SEQ ID NO: 3759772 - RNA, 15 nt, Human
aaccuccuguggaac

SEQ ID NO: 3759773 - RNA, 13 nt, Human
aaccuccuuucuc

SEQ ID NO: 3759774 - RNA, 17 nt, Human
aaccuccuuucucuucu

SEQ ID NO: 3759775 - RNA, 14 nt, Human
aaccucgaguacug

SEQ ID NO: 3759776 - RNA, 15 nt, Human
aaccucgaguacugu

SEQ ID NO: 3759777 - RNA, 14 nt, Human
aaccucgcccucuc

SEQ ID NO: 3759778 - RNA, 20 nt, Human
aaccucgcccucuccuuugu

SEQ ID NO: 3759779 - RNA, 19 nt, Human
aaccucgcuggacucucag

SEQ ID NO: 3759780 - RNA, 16 nt, Human
aaccucuacauauuua

SEQ ID NO: 3759781 - RNA, 21 nt, Human
aaccucuccucauguucugcu

SEQ ID NO: 3759782 - RNA, 20 nt, Human
aaccucugccuccuggguuc

SEQ ID NO: 3759783 - RNA, 18 nt, Human
aaccucugcuucccaggu

SEQ ID NO: 3759784 - RNA, 16 nt, Human
aaccucuguucagugu

SEQ ID NO: 3759785 - RNA, 16 nt, Human
aaccucuuugucuaca

SEQ ID NO: 3759786 - RNA, 19 nt, Human
aaccugacaaaaaaaaagu

SEQ ID NO: 3759787 - RNA, 20 nt, Human
aaccugacagaugucagccg

SEQ ID NO: 3759788 - RNA, 17 nt, Human
aaccugaccccugcuca

SEQ ID NO: 3759789 - RNA, 16 nt, Human
aaccugagauggcccu

SEQ ID NO: 3759790 - RNA, 18 nt, Human
aaccugagccccaaaagg

SEQ ID NO: 3759791 - RNA, 17 nt, Human
aaccugaggauucuauu

SEQ ID NO: 3759792 - RNA, 17 nt, Human
aaccugaugaaaauaaa

SEQ ID NO: 3759793 - RNA, 22 nt, Human
aaccugaugaaaauaaagaaug

SEQ ID NO: 3759794 - RNA, 15 nt, Human
aaccugauuguaaac

SEQ ID NO: 3759795 - RNA, 22 nt, Human
aaccugcaagggcuccccacug

SEQ ID NO: 3759796 - RNA, 18 nt, Human
aaccugcaggcguucucu

SEQ ID NO: 3759797 - RNA, 15 nt, Human
aaccugcaucuuuag

SEQ ID NO: 3759798 - RNA, 15 nt, Human
aaccugccagggaga

SEQ ID NO: 3759799 - RNA, 11 nt, Human
aaccugcccug

SEQ ID NO: 3759800 - RNA, 16 nt, Human
aaccugcccugccuga

SEQ ID NO: 3759801 - RNA, 17 nt, Human
aaccugcccugccugag

SEQ ID NO: 3759802 - RNA, 19 nt, Human
aaccugcccugccugaggg

SEQ ID NO: 3759803 - RNA, 13 nt, Human
aaccugcucuccu

SEQ ID NO: 3759804 - RNA, 19 nt, Human
aaccuggaaaaauuccaga

SEQ ID NO: 3759805 - RNA, 15 nt, Human
aaccuggagauggug

SEQ ID NO: 3759806 - RNA, 17 nt, Human
aaccuggagauggugga

SEQ ID NO: 3759807 - RNA, 19 nt, Human
aaccuggcaagcuagaacc

SEQ ID NO: 3759808 - RNA, 19 nt, Human
aaccuggccgcguuuagac

SEQ ID NO: 3759809 - RNA, 12 nt, Human
aaccuggccuuc

SEQ ID NO: 3759810 - RNA, 21 nt, Human
aaccugggaaagagauuuaaa

SEQ ID NO: 3759811 - RNA, 12 nt, Human
aaccuggggggc

SEQ ID NO: 3759812 - RNA, 19 nt, Human
aaccuggguccaaauaaaa

SEQ ID NO: 3759813 - RNA, 22 nt, Human
aaccuguauaacccuguuacaa

SEQ ID NO: 3759814 - RNA, 16 nt, Human
aaccuguaucuuucua

SEQ ID NO: 3759815 - RNA, 23 nt, Human
aaccuguccuaaggaaccuuccu

SEQ ID NO: 3759816 - RNA, 11 nt, Human
aaccuguccuu

SEQ ID NO: 3759817 - RNA, 15 nt, Human
aaccugucuccacug

SEQ ID NO: 3759818 - RNA, 22 nt, Human
aaccugucuccacugugccuuu

SEQ ID NO: 3759819 - RNA, 12 nt, Human
aaccugugucuc

SEQ ID NO: 3759820 - RNA, 17 nt, Human
aaccuuaaacaccccuc

SEQ ID NO: 3759821 - RNA, 13 nt, Human
aaccuuaagaccu

SEQ ID NO: 3759822 - RNA, 13 nt, Human
aaccuuaagauac

SEQ ID NO: 3759823 - RNA, 18 nt, Human
aaccuuaauauuucuuca

SEQ ID NO: 3759824 - RNA, 18 nt, Human
aaccuuaauuuauuauua

SEQ ID NO: 3759825 - RNA, 16 nt, Human
aaccuuacuuacagca

SEQ ID NO: 3759826 - RNA, 15 nt, Human
aaccuuauuguaccu

SEQ ID NO: 3759827 - RNA, 17 nt, Human
aaccuuauuguaccucu

SEQ ID NO: 3759828 - RNA, 19 nt, Human
aaccuucacacacagacug

SEQ ID NO: 3759829 - RNA, 17 nt, Human
aaccuuccaucucgcca

SEQ ID NO: 3759830 - RNA, 19 nt, Human
aaccuuccaucucgccacc

SEQ ID NO: 3759831 - RNA, 15 nt, Human
aaccuucguccuuuu

SEQ ID NO: 3759832 - RNA, 15 nt, Human
aaccuugagacagcu

SEQ ID NO: 3759833 - RNA, 19 nt, Human
aaccuuggcuuggcccugg

SEQ ID NO: 3759834 - RNA, 22 nt, Human
aaccuugguguaguugaacuga

SEQ ID NO: 3759835 - RNA, 13 nt, Human
aaccuuguauaaa

SEQ ID NO: 3759836 - RNA, 16 nt, Human
aaccuuguauaaauua

SEQ ID NO: 3759837 - RNA, 15 nt, Human
aaccuugugccuggc

SEQ ID NO: 3759838 - RNA, 18 nt, Human
aaccuuguuuauuaaauu

SEQ ID NO: 3759839 - RNA, 20 nt, Human
aaccuuguuuauuaaauugc

SEQ ID NO: 3759840 - RNA, 13 nt, Human
aaccuuguuuugg

SEQ ID NO: 3759841 - RNA, 19 nt, Human
aaccuuuacaugaggacuc

SEQ ID NO: 3759842 - RNA, 18 nt, Human
aaccuuucaaauuucaca

SEQ ID NO: 3759843 - RNA, 14 nt, Human
aaccuuucccucac

SEQ ID NO: 3759844 - RNA, 17 nt, Human
aaccuuucccucacccc

SEQ ID NO: 3759845 - RNA, 16 nt, Human
aaccuuucuauaauuu

SEQ ID NO: 3759846 - RNA, 14 nt, Human
aaccuuugugcccu

SEQ ID NO: 3759847 - RNA, 19 nt, Human
aaccuuuuacugguugcau

SEQ ID NO: 3759848 - RNA, 21 nt, Human
aaccuuuuacugguugcaugg

SEQ ID NO: 3759849 - RNA, 13 nt, Human
aaccuuuucuugu

SEQ ID NO: 3759850 - RNA, 18 nt, Human
aaccuuuuuauuucaaac

SEQ ID NO: 3759851 - RNA, 15 nt, Human
aaccuuuuuuaagau

SEQ ID NO: 3759852 - RNA, 17 nt, Human
aaccuuuuuuaagauuu

SEQ ID NO: 3759853 - RNA, 21 nt, Human
aaccuuuuuuaagauuuuucu

SEQ ID NO: 3759854 - RNA, 16 nt, Human
aacgaaauaucaaagu

SEQ ID NO: 3759855 - RNA, 12 nt, Human
aacgaagaaaaa

SEQ ID NO: 3759856 - RNA, 23 nt, Human
aacgaagaguucccuugaaacuu

SEQ ID NO: 3759857 - RNA, 17 nt, Human
aacgacaaaucugucug

SEQ ID NO: 3759858 - RNA, 18 nt, Human
aacgacugggcacugcca

SEQ ID NO: 3759859 - RNA, 23 nt, Human
aacgagaggggaagaguguacug

SEQ ID NO: 3759860 - RNA, 12 nt, Human
aacgaggaagcc

SEQ ID NO: 3759861 - RNA, 22 nt, Human
aacgaucacaaaugacuuuauu

SEQ ID NO: 3759862 - RNA, 16 nt, Human
aacgaugugucuguau

SEQ ID NO: 3759863 - RNA, 20 nt, Human
aacgaugugucuguauuuca

SEQ ID NO: 3759864 - RNA, 12 nt, Human
aacgauuuagaa

SEQ ID NO: 3759865 - RNA, 13 nt, Human
aacgauuuagaaa

SEQ ID NO: 3759866 - RNA, 15 nt, Human
aacgauuuuuaaaau

SEQ ID NO: 3759867 - RNA, 19 nt, Human
aacgcaaguucccaguugg

SEQ ID NO: 3759868 - RNA, 12 nt, Human
aacgcacaggaa

SEQ ID NO: 3759869 - RNA, 15 nt, Human
aacgcagacacugag

SEQ ID NO: 3759870 - RNA, 23 nt, Human
aacgcagcccuagagccugccug

SEQ ID NO: 3759871 - RNA, 13 nt, Human
aacgcauggagug

SEQ ID NO: 3759872 - RNA, 18 nt, Human
aacgccuccccugcccca

SEQ ID NO: 3759873 - RNA, 13 nt, Human
aacgcgcagaugu

SEQ ID NO: 3759874 - RNA, 13 nt, Human
aacgcguugaaau

SEQ ID NO: 3759875 - RNA, 15 nt, Human
aacgcguugaaauug

SEQ ID NO: 3759876 - RNA, 22 nt, Human
aacgcuaaagagcccuugccuc

SEQ ID NO: 3759877 - RNA, 16 nt, Human
aacgcuccaaagucau

SEQ ID NO: 3759878 - RNA, 19 nt, Human
aacgcucucuacucugcuu

SEQ ID NO: 3759879 - RNA, 15 nt, Human
aacgcugauuuaaag

SEQ ID NO: 3759880 - RNA, 11 nt, Human
aacgcugccug

SEQ ID NO: 3759881 - RNA, 16 nt, Human
gcccagcauugcuggu

SEQ ID NO: 3759882 - RNA, 17 nt, Human
gcccagccaaacccugu

SEQ ID NO: 3759883 - RNA, 23 nt, Human
gcccagccacggacgcuggcucc

SEQ ID NO: 3759884 - RNA, 14 nt, Human
gcccagccagcguc

SEQ ID NO: 3759885 - RNA, 14 nt, Human
gcccagccaggccc

SEQ ID NO: 3759886 - RNA, 17 nt, Human
gcccagccaggccccag

SEQ ID NO: 3759887 - RNA, 12 nt, Human
gcccagcccagc

SEQ ID NO: 3759888 - RNA, 14 nt, Human
gcccagcccagcug

SEQ ID NO: 3759889 - RNA, 16 nt, Human
gcccagcccagcugcu

SEQ ID NO: 3759890 - RNA, 17 nt, Human
gcccagccccacuccuc

SEQ ID NO: 3759891 - RNA, 12 nt, Human
gcccagccccua

SEQ ID NO: 3759892 - RNA, 17 nt, Human
gcccagccccuacugcu

SEQ ID NO: 3759893 - RNA, 20 nt, Human
gcccagccccuacugcugug

SEQ ID NO: 3759894 - RNA, 16 nt, Human
gcccagccccuucuga

SEQ ID NO: 3759895 - RNA, 17 nt, Human
gcccagccccuucugac

SEQ ID NO: 3759896 - RNA, 20 nt, Human
gcccagccccuucugaccca

SEQ ID NO: 3759897 - RNA, 13 nt, Human
gcccagcccggcu

SEQ ID NO: 3759898 - RNA, 16 nt, Human
gcccagcccuccccau

SEQ ID NO: 3759899 - RNA, 12 nt, Human
gcccagcccugc

SEQ ID NO: 3759900 - RNA, 15 nt, Human
gcccagcccugcugg

SEQ ID NO: 3759901 - RNA, 16 nt, Human
gcccagcccugcuggc

SEQ ID NO: 3759902 - RNA, 15 nt, Human
gcccagcccuguucu

SEQ ID NO: 3759903 - RNA, 13 nt, Human
gcccagccgaccc

SEQ ID NO: 3759904 - RNA, 22 nt, Human
gcccagccggccucucuggccu

SEQ ID NO: 3759905 - RNA, 14 nt, Human
gcccagccuggaug

SEQ ID NO: 3759906 - RNA, 17 nt, Human
gcccagccuuuguuccc

SEQ ID NO: 3759907 - RNA, 20 nt, Human
gcccagcggccccucccaca

SEQ ID NO: 3759908 - RNA, 23 nt, Human
gcccagcggccccucccacacac

SEQ ID NO: 3759909 - RNA, 21 nt, Human
gcccagcggcuugccugccug

SEQ ID NO: 3759910 - RNA, 12 nt, Human
gcccagcucagu

SEQ ID NO: 3759911 - RNA, 16 nt, Human
gcccagcuccagggcc

SEQ ID NO: 3759912 - RNA, 13 nt, Human
gcccagcucugaa

SEQ ID NO: 3759913 - RNA, 13 nt, Human
gcccagcugcacc

SEQ ID NO: 3759914 - RNA, 14 nt, Human
gcccagcugcaccu

SEQ ID NO: 3759915 - RNA, 23 nt, Human
gcccagcugcaccugccagccug

SEQ ID NO: 3759916 - RNA, 11 nt, Human
gcccagcugcu

SEQ ID NO: 3759917 - RNA, 13 nt, Human
gcccagcugcucu

SEQ ID NO: 3759918 - RNA, 15 nt, Human
gcccagcugcucugc

SEQ ID NO: 3759919 - RNA, 16 nt, Human
gcccagcugcucugcc

SEQ ID NO: 3759920 - RNA, 22 nt, Human
gcccagcugcucugcccagagc

SEQ ID NO: 3759921 - RNA, 18 nt, Human
gcccagcugggcucugcc

SEQ ID NO: 3759922 - RNA, 18 nt, Human
gcccagcugggucaggca

SEQ ID NO: 3759923 - RNA, 16 nt, Human
gcccagcuugggccca

SEQ ID NO: 3759924 - RNA, 17 nt, Human
gcccagcuugggcccag

SEQ ID NO: 3759925 - RNA, 12 nt, Human
gcccaggaaagg

SEQ ID NO: 3759926 - RNA, 18 nt, Human
gcccaggaaaggcuccag

SEQ ID NO: 3759927 - RNA, 19 nt, Human
gcccaggaaaggcuccagg

SEQ ID NO: 3759928 - RNA, 21 nt, Human
gcccaggaaaggcuccaggag

SEQ ID NO: 3759929 - RNA, 23 nt, Human
gcccaggaaaggcuccaggagca

SEQ ID NO: 3759930 - RNA, 11 nt, Human
gcccaggaagu

SEQ ID NO: 3759931 - RNA, 18 nt, Human
gcccaggaagucucaucu

SEQ ID NO: 3759932 - RNA, 13 nt, Human
gcccaggaccagc

SEQ ID NO: 3759933 - RNA, 18 nt, Human
gcccaggaccagcugggg

SEQ ID NO: 3759934 - RNA, 19 nt, Human
gcccaggacggggccggcc

SEQ ID NO: 3759935 - RNA, 21 nt, Human
gcccaggacggggccggccag

SEQ ID NO: 3759936 - RNA, 17 nt, Human
gcccaggagaaugcugc

SEQ ID NO: 3759937 - RNA, 11 nt, Human
gcccaggagac

SEQ ID NO: 3759938 - RNA, 22 nt, Human
gcccaggagagagaaagccagg

SEQ ID NO: 3759939 - RNA, 15 nt, Human
gcccaggagagccag

SEQ ID NO: 3759940 - RNA, 18 nt, Human
gcccaggagagccagccc

SEQ ID NO: 3759941 - RNA, 20 nt, Human
gcccaggagagccagcccuc

SEQ ID NO: 3759942 - RNA, 21 nt, Human
gcccaggagagccagcccucc

SEQ ID NO: 3759943 - RNA, 14 nt, Human
gcccaggagccuca

SEQ ID NO: 3759944 - RNA, 11 nt, Human
gcccaggagcu

SEQ ID NO: 3759945 - RNA, 14 nt, Human
gcccaggagcuccc

SEQ ID NO: 3759946 - RNA, 17 nt, Human
gcccaggagcuccccuc

SEQ ID NO: 3759947 - RNA, 24 nt, Human
gcccaggagcuccccuccccaacu

SEQ ID NO: 3759948 - RNA, 13 nt, Human
gcccaggagggag

SEQ ID NO: 3759949 - RNA, 16 nt, Human
gcccaggaguuuggcc

SEQ ID NO: 3759950 - RNA, 20 nt, Human
gcccaggaguuuggccagaa

SEQ ID NO: 3759951 - RNA, 17 nt, Human
gcccaggauacuggcac

SEQ ID NO: 3759952 - RNA, 15 nt, Human
gcccaggauggcuuu

SEQ ID NO: 3759953 - RNA, 11 nt, Human
gcccaggcagg

SEQ ID NO: 3759954 - RNA, 16 nt, Human
gcccaggcaggucuug

SEQ ID NO: 3759955 - RNA, 16 nt, Human
gcccaggccaggacuc

SEQ ID NO: 3759956 - RNA, 22 nt, Human
gcccaggccaggacucugcagc

SEQ ID NO: 3759957 - RNA, 23 nt, Human
gcccaggccaggacucugcagcc

SEQ ID NO: 3759958 - RNA, 13 nt, Human
gcccaggccaucu

SEQ ID NO: 3759959 - RNA, 18 nt, Human
gcccaggccaucuuccag

SEQ ID NO: 3759960 - RNA, 23 nt, Human
gcccaggccaucuuccagguggg

SEQ ID NO: 3759961 - RNA, 11 nt, Human
gcccaggcccc

SEQ ID NO: 3759962 - RNA, 13 nt, Human
gcccaggccggcc

SEQ ID NO: 3759963 - RNA, 12 nt, Human
gcccaggccuca

SEQ ID NO: 3759964 - RNA, 17 nt, Human
gcccaggccuccagcuc

SEQ ID NO: 3759965 - RNA, 18 nt, Human
gcccaggccuccuacagc

SEQ ID NO: 3759966 - RNA, 12 nt, Human
gcccaggcggga

SEQ ID NO: 3759967 - RNA, 18 nt, Human
gcccaggcugccgucccc

SEQ ID NO: 3759968 - RNA, 12 nt, Human
gcccaggcugga

SEQ ID NO: 3759969 - RNA, 15 nt, Human
gcccaggcuggagug

SEQ ID NO: 3759970 - RNA, 20 nt, Human
gcccaggcuggagugcaaug

SEQ ID NO: 3759971 - RNA, 19 nt, Human
gcccaggcuggagugcagu

SEQ ID NO: 3759972 - RNA, 20 nt, Human
gcccaggcuggagugcagug

SEQ ID NO: 3759973 - RNA, 16 nt, Human
gcccaggcuggccagc

SEQ ID NO: 3759974 - RNA, 19 nt, Human
gcccaggcuggccagcccc

SEQ ID NO: 3759975 - RNA, 20 nt, Human
gcccaggcuggccagcccca

SEQ ID NO: 3759976 - RNA, 22 nt, Human
gcccaggcuggccagccccaca

SEQ ID NO: 3759977 - RNA, 23 nt, Human
gcccaggcuggccagccccacag

SEQ ID NO: 3759978 - RNA, 14 nt, Human
gcccaggcuggcgu

SEQ ID NO: 3759979 - RNA, 15 nt, Human
gcccaggcuggcgug

SEQ ID NO: 3759980 - RNA, 19 nt, Human
gcccaggcuggcgugcagu

SEQ ID NO: 3759981 - RNA, 24 nt, Human
gcccaggcuggucuugaaguccug

SEQ ID NO: 3759982 - RNA, 22 nt, Human
gcccaggcugugcagcgcagcu

SEQ ID NO: 3759983 - RNA, 17 nt, Human
gcccagggacaccagcc

SEQ ID NO: 3759984 - RNA, 17 nt, Human
gcccagggagcggaaag

SEQ ID NO: 3759985 - RNA, 20 nt, Human
gcccagggagcggaaagcag

SEQ ID NO: 3759986 - RNA, 21 nt, Human
gcccagggagcggaaagcagc

SEQ ID NO: 3759987 - RNA, 15 nt, Human
gcccagggcaucugg

SEQ ID NO: 3759988 - RNA, 18 nt, Human
gcccagggcaucuugcug

SEQ ID NO: 3759989 - RNA, 23 nt, Human
gcccagggcaucuugcuggcuac

SEQ ID NO: 3759990 - RNA, 15 nt, Human
gcccagggccacucu

SEQ ID NO: 3759991 - RNA, 16 nt, Human
gcccagggcccagagc

SEQ ID NO: 3759992 - RNA, 18 nt, Human
gcccagggcccagagccc

SEQ ID NO: 3759993 - RNA, 19 nt, Human
gcccagggcccagagccca

SEQ ID NO: 3759994 - RNA, 20 nt, Human
gcccagggcccagagcccag

SEQ ID NO: 3759995 - RNA, 15 nt, Human
gcccagggcugggag

SEQ ID NO: 3759996 - RNA, 17 nt, Human
gcccagggcugggagga

SEQ ID NO: 3759997 - RNA, 21 nt, Human
gcccagggcugggaggaagga

SEQ ID NO: 3759998 - RNA, 21 nt, Human
gcccagggcuuuaaaaagaau

SEQ ID NO: 3759999 - RNA, 22 nt, Human
gcccaggggaggcggcacucca

SEQ ID NO: 3760000 - RNA, 19 nt, Human
gcccaggggcccacaggga

SEQ ID NO: 3760001 - RNA, 20 nt, Human
gcccaggggcccacagggaa

SEQ ID NO: 3760002 - RNA, 15 nt, Human
gcccaggggugcccc

SEQ ID NO: 3760003 - RNA, 23 nt, Human
gcccaggguggacuuagaaagca

SEQ ID NO: 3760004 - RNA, 23 nt, Human
gcccaggguucccccagcccugu

SEQ ID NO: 3760005 - RNA, 13 nt, Human
gcccagucccagc

SEQ ID NO: 3760006 - RNA, 17 nt, Human
gcccagucccagcagcc

SEQ ID NO: 3760007 - RNA, 18 nt, Human
gcccagucccagcagcca

SEQ ID NO: 3760008 - RNA, 13 nt, Human
gcccaguccccca

SEQ ID NO: 3760009 - RNA, 21 nt, Human
gcccagucccccaaccccagc

SEQ ID NO: 3760010 - RNA, 13 nt, Human
gcccaguccuggc

SEQ ID NO: 3760011 - RNA, 15 nt, Human
gcccaguccuggccu

SEQ ID NO: 3760012 - RNA, 17 nt, Human
gcccaguccuuccaccu

SEQ ID NO: 3760013 - RNA, 19 nt, Human
gcccagucuggaaugcagu

SEQ ID NO: 3760014 - RNA, 20 nt, Human
gcccagucuggaaugcagug

SEQ ID NO: 3760015 - RNA, 15 nt, Human
gcccagugcacugaa

SEQ ID NO: 3760016 - RNA, 11 nt, Human
gcccagugcau

SEQ ID NO: 3760017 - RNA, 12 nt, Human
gcccagugcaug

SEQ ID NO: 3760018 - RNA, 20 nt, Human
gcccagugcaugguggccag

SEQ ID NO: 3760019 - RNA, 17 nt, Human
gcccagugcccuggggc

SEQ ID NO: 3760020 - RNA, 18 nt, Human
gcccagugcccuggggcu

SEQ ID NO: 3760021 - RNA, 13 nt, Human
gcccaguggcugc

SEQ ID NO: 3760022 - RNA, 14 nt, Human
gcccaguuaaucuu

SEQ ID NO: 3760023 - RNA, 19 nt, Human
gcccaguucacccugauuu

SEQ ID NO: 3760024 - RNA, 22 nt, Human
gcccaguuggguggaugccugg

SEQ ID NO: 3760025 - RNA, 16 nt, Human
gcccauacucagccug

SEQ ID NO: 3760026 - RNA, 19 nt, Human
gcccauacucagccugcug

SEQ ID NO: 3760027 - RNA, 21 nt, Human
gcccauacucagccugcugcc

SEQ ID NO: 3760028 - RNA, 18 nt, Human
gcccauagaaacaugaca

SEQ ID NO: 3760029 - RNA, 17 nt, Human
gcccaucaauuauagaa

SEQ ID NO: 3760030 - RNA, 22 nt, Human
gcccaucaguguacccccgccc

SEQ ID NO: 3760031 - RNA, 19 nt, Human
gcccauccauuaggccagc

SEQ ID NO: 3760032 - RNA, 14 nt, Human
gcccauccccccuc

SEQ ID NO: 3760033 - RNA, 20 nt, Human
gcccauccccccucaccagg

SEQ ID NO: 3760034 - RNA, 22 nt, Human
gcccauccccuugaggucucag

SEQ ID NO: 3760035 - RNA, 12 nt, Human
gcccaucccugc

SEQ ID NO: 3760036 - RNA, 14 nt, Human
gcccauccugacca

SEQ ID NO: 3760037 - RNA, 15 nt, Human
gcccauccugaccag

SEQ ID NO: 3760038 - RNA, 18 nt, Human
gcccaucgccacaaacuc

SEQ ID NO: 3760039 - RNA, 13 nt, Human
gcccaucucccug

SEQ ID NO: 3760040 - RNA, 14 nt, Human
gcccaucucggagc

SEQ ID NO: 3760041 - RNA, 20 nt, Human
gcccaucucggagcaucccg

SEQ ID NO: 3760042 - RNA, 22 nt, Human
gcccaucugggggccucuucug

SEQ ID NO: 3760043 - RNA, 20 nt, Human
gcccaugagagcgcagcccg

SEQ ID NO: 3760044 - RNA, 23 nt, Human
gcccauggacaggcuggcuccag

SEQ ID NO: 3760045 - RNA, 23 nt, Human
gcccauggagauugaccuggaug

SEQ ID NO: 3760046 - RNA, 20 nt, Human
gcccaugggcacugcugggu

SEQ ID NO: 3760047 - RNA, 21 nt, Human
gcccaugggcacugcugggug

SEQ ID NO: 3760048 - RNA, 15 nt, Human
gcccauguauggcca

SEQ ID NO: 3760049 - RNA, 20 nt, Human
gcccauguauggccaggaag

SEQ ID NO: 3760050 - RNA, 21 nt, Human
gcccauguauggccaggaagu

SEQ ID NO: 3760051 - RNA, 19 nt, Human
gcccaugucgcgcucagca

SEQ ID NO: 3760052 - RNA, 21 nt, Human
gcccaugucgcgcucagcaug

SEQ ID NO: 3760053 - RNA, 15 nt, Human
gcccaugugugagug

SEQ ID NO: 3760054 - RNA, 22 nt, Human
gcccauguuaaguccucccuga

SEQ ID NO: 3760055 - RNA, 14 nt, Human
gcccauucuacuug

SEQ ID NO: 3760056 - RNA, 15 nt, Human
gcccauucuacuugc

SEQ ID NO: 3760057 - RNA, 17 nt, Human
gcccauucucucuccug

SEQ ID NO: 3760058 - RNA, 20 nt, Human
gcccauucugcccuguggga

SEQ ID NO: 3760059 - RNA, 22 nt, Human
gcccauuucgugagccccaucu

SEQ ID NO: 3760060 - RNA, 17 nt, Human
gcccauuuggagggccu

SEQ ID NO: 3760061 - RNA, 19 nt, Human
gccccaaaaccacagcccu

SEQ ID NO: 3760062 - RNA, 18 nt, Human
gccccaaaacucuccucu

SEQ ID NO: 3760063 - RNA, 19 nt, Human
gccccaaaacucuccucug

SEQ ID NO: 3760064 - RNA, 11 nt, Human
gccccaaaagg

SEQ ID NO: 3760065 - RNA, 14 nt, Human
gccccaaaggaaaa

SEQ ID NO: 3760066 - RNA, 21 nt, Human
gccccaaauauagcguuccca

SEQ ID NO: 3760067 - RNA, 18 nt, Human
gccccaacccaaaccugg

SEQ ID NO: 3760068 - RNA, 21 nt, Human
gccccaacccaaaccuggaga

SEQ ID NO: 3760069 - RNA, 14 nt, Human
gccccaacccccag

SEQ ID NO: 3760070 - RNA, 19 nt, Human
gccccaacccccagcaccc

SEQ ID NO: 3760071 - RNA, 21 nt, Human
gccccaacccguggaggcugc

SEQ ID NO: 3760072 - RNA, 22 nt, Human
gccccaacccguggaggcugcu

SEQ ID NO: 3760073 - RNA, 14 nt, Human
gccccaacccuucu

SEQ ID NO: 3760074 - RNA, 15 nt, Human
gccccaaccugcuga

SEQ ID NO: 3760075 - RNA, 15 nt, Human
gccccaacuccugga

SEQ ID NO: 3760076 - RNA, 17 nt, Human
gccccaacuccuggaag

SEQ ID NO: 3760077 - RNA, 20 nt, Human
gccccaacuccuuccagcua

SEQ ID NO: 3760078 - RNA, 21 nt, Human
gccccaacuccuuccagcuag

SEQ ID NO: 3760079 - RNA, 21 nt, Human
gccccaacucgggcucccggg

SEQ ID NO: 3760080 - RNA, 21 nt, Human
gccccaagaaggcuggggcua

SEQ ID NO: 3760081 - RNA, 19 nt, Human
gccccaaguccugaagagg

SEQ ID NO: 3760082 - RNA, 13 nt, Human
gccccaaguuggg

SEQ ID NO: 3760083 - RNA, 19 nt, Human
gccccaaucccuuuauuac

SEQ ID NO: 3760084 - RNA, 16 nt, Human
gccccacacuggggug

SEQ ID NO: 3760085 - RNA, 22 nt, Human
gccccacacuggggugccgccu

SEQ ID NO: 3760086 - RNA, 23 nt, Human
gccccacacuggggugccgccug

SEQ ID NO: 3760087 - RNA, 17 nt, Human
gccccacagcccacguc

SEQ ID NO: 3760088 - RNA, 23 nt, Human
gccccaccaccuaggccacuccu

SEQ ID NO: 3760089 - RNA, 13 nt, Human
gccccaccagugc

SEQ ID NO: 3760090 - RNA, 16 nt, Human
gccccaccagugccuc

SEQ ID NO: 3760091 - RNA, 12 nt, Human
gccccacccagg

SEQ ID NO: 3760092 - RNA, 17 nt, Human
gccccaccccagggcag

SEQ ID NO: 3760093 - RNA, 18 nt, Human
gccccaccccagggcagc

SEQ ID NO: 3760094 - RNA, 12 nt, Human
gccccacccucg

SEQ ID NO: 3760095 - RNA, 13 nt, Human
gccccacccucgg

SEQ ID NO: 3760096 - RNA, 16 nt, Human
gccccacccucgggga

SEQ ID NO: 3760097 - RNA, 22 nt, Human
gccccacccucggggauguguc

SEQ ID NO: 3760098 - RNA, 21 nt, Human
gccccacccucguggacaccu

SEQ ID NO: 3760099 - RNA, 12 nt, Human
gccccacccugg

SEQ ID NO: 3760100 - RNA, 14 nt, Human
gccccacccugggc

SEQ ID NO: 3760101 - RNA, 16 nt, Human
gccccacccugggccc

SEQ ID NO: 3760102 - RNA, 20 nt, Human
gccccacccugggcccuggg

SEQ ID NO: 3760103 - RNA, 24 nt, Human
gccccacccugggcccugggcugg

SEQ ID NO: 3760104 - RNA, 18 nt, Human
gccccaccugcagcuccc

SEQ ID NO: 3760105 - RNA, 14 nt, Human
gccccaccugccac

SEQ ID NO: 3760106 - RNA, 15 nt, Human
gccccaccugccacu

SEQ ID NO: 3760107 - RNA, 23 nt, Human
gccccaccugccacuaggcuggg

SEQ ID NO: 3760108 - RNA, 14 nt, Human
gccccaccuggccc

SEQ ID NO: 3760109 - RNA, 14 nt, Human
gccccacucucaga

SEQ ID NO: 3760110 - RNA, 18 nt, Human
gccccacucucagaggcc

SEQ ID NO: 3760111 - RNA, 22 nt, Human
gccccacucucagaggccccaa

SEQ ID NO: 3760112 - RNA, 12 nt, Human
gccccacugcca

SEQ ID NO: 3760113 - RNA, 16 nt, Human
gccccacugccagcag

SEQ ID NO: 3760114 - RNA, 17 nt, Human
gccccacugccagcagc

SEQ ID NO: 3760115 - RNA, 18 nt, Human
gccccacugcccuucuca

SEQ ID NO: 3760116 - RNA, 13 nt, Human
gccccacugggga

SEQ ID NO: 3760117 - RNA, 14 nt, Human
gccccacuuguccu

SEQ ID NO: 3760118 - RNA, 16 nt, Human
gccccacuuguccuua

SEQ ID NO: 3760119 - RNA, 15 nt, Human
gccccagagacucag

SEQ ID NO: 3760120 - RNA, 12 nt, Human
gccccagaggcc

SEQ ID NO: 3760121 - RNA, 17 nt, Human
gccccagauaccagccc

SEQ ID NO: 3760122 - RNA, 13 nt, Human
gccccagcacagc

SEQ ID NO: 3760123 - RNA, 19 nt, Human
gccccagcacuaaagcagu

SEQ ID NO: 3760124 - RNA, 12 nt, Human
gccccagccaga

SEQ ID NO: 3760125 - RNA, 19 nt, Human
gccccagccagaguuccug

SEQ ID NO: 3760126 - RNA, 12 nt, Human
gccccagcccaa

SEQ ID NO: 3760127 - RNA, 14 nt, Human
gccccagcccaagu

SEQ ID NO: 3760128 - RNA, 16 nt, Human
gccccagcccacccuc

SEQ ID NO: 3760129 - RNA, 13 nt, Human
gccccagcccaga

SEQ ID NO: 3760130 - RNA, 14 nt, Human
gccccagcccagcc

SEQ ID NO: 3760131 - RNA, 23 nt, Human
gccccagcccagccccacuccuc

SEQ ID NO: 3760132 - RNA, 18 nt, Human
gccccagcccugcugggg

SEQ ID NO: 3760133 - RNA, 10 nt, Human
gccccagccu

SEQ ID NO: 3760134 - RNA, 18 nt, Human
gccccagccucccugaag

SEQ ID NO: 3760135 - RNA, 14 nt, Human
gccccagccuggcc

SEQ ID NO: 3760136 - RNA, 17 nt, Human
gccccagccuggcccag

SEQ ID NO: 3760137 - RNA, 17 nt, Human
gccccagcuugggcaga

SEQ ID NO: 3760138 - RNA, 22 nt, Human
gccccaggaaaggcccagccac

SEQ ID NO: 3760139 - RNA, 14 nt, Human
gccccaggaccagc

SEQ ID NO: 3760140 - RNA, 15 nt, Human
gccccaggaccagcu

SEQ ID NO: 3760141 - RNA, 17 nt, Human
gccccaggaccagcuca

SEQ ID NO: 3760142 - RNA, 22 nt, Human
gccccaggaccagcucaggaca

SEQ ID NO: 3760143 - RNA, 22 nt, Human
gccccaggaccuggcugccaua

SEQ ID NO: 3760144 - RNA, 22 nt, Human
gccccaggcagggccaacccuu

SEQ ID NO: 3760145 - RNA, 14 nt, Human
gccccaggccucug

SEQ ID NO: 3760146 - RNA, 15 nt, Human
gccccaggccugaaa

SEQ ID NO: 3760147 - RNA, 12 nt, Human
gccccaggcugc

SEQ ID NO: 3760148 - RNA, 19 nt, Human
gccccaggggaacacuggg

SEQ ID NO: 3760149 - RNA, 16 nt, Human
gccccagggugcccag

SEQ ID NO: 3760150 - RNA, 15 nt, Human
gccccagucagccuc

SEQ ID NO: 3760151 - RNA, 16 nt, Human
gccccagucagccucu

SEQ ID NO: 3760152 - RNA, 18 nt, Human
gccccagucagccucucu

SEQ ID NO: 3760153 - RNA, 22 nt, Human
gccccagucagccucucuccca

SEQ ID NO: 3760154 - RNA, 23 nt, Human
gccccagucagccucucucccag

SEQ ID NO: 3760155 - RNA, 14 nt, Human
gccccagugacagc

SEQ ID NO: 3760156 - RNA, 12 nt, Human
gccccagugccc

SEQ ID NO: 3760157 - RNA, 16 nt, Human
gccccagugcccacag

SEQ ID NO: 3760158 - RNA, 17 nt, Human
gccccagugcccacagg

SEQ ID NO: 3760159 - RNA, 13 nt, Human
gccccaucacugc

SEQ ID NO: 3760160 - RNA, 15 nt, Human
gccccaucagcucca

SEQ ID NO: 3760161 - RNA, 16 nt, Human
gccccauccuccagca

SEQ ID NO: 3760162 - RNA, 18 nt, Human
gccccauccuccagcagg

SEQ ID NO: 3760163 - RNA, 13 nt, Human
gccccauccucug

SEQ ID NO: 3760164 - RNA, 16 nt, Human
gccccaucuucaccca

SEQ ID NO: 3760165 - RNA, 14 nt, Human
gccccaugaccucc

SEQ ID NO: 3760166 - RNA, 16 nt, Human
gccccaugaccuccag

SEQ ID NO: 3760167 - RNA, 18 nt, Human
gccccauucugccugccc

SEQ ID NO: 3760168 - RNA, 22 nt, Human
gccccauucuuuuguaauuuaa

SEQ ID NO: 3760169 - RNA, 20 nt, Human
gccccauuuauccaccucca

SEQ ID NO: 3760170 - RNA, 15 nt, Human
gcccccaaauaagaa

SEQ ID NO: 3760171 - RNA, 21 nt, Human
gcccccaaccauuuccucaga

SEQ ID NO: 3760172 - RNA, 18 nt, Human
gcccccacaccuggcccu

SEQ ID NO: 3760173 - RNA, 16 nt, Human
gcccccaccacacauc

SEQ ID NO: 3760174 - RNA, 20 nt, Human
gcccccaccacacaucccag

SEQ ID NO: 3760175 - RNA, 23 nt, Human
gcccccaccacacaucccagccc

SEQ ID NO: 3760176 - RNA, 21 nt, Human
gcccccaccacuaggacucug

SEQ ID NO: 3760177 - RNA, 17 nt, Human
gcccccacccacuuccc

SEQ ID NO: 3760178 - RNA, 14 nt, Human
gcccccacccuguu

SEQ ID NO: 3760179 - RNA, 18 nt, Human
gcccccacccuguuccug

SEQ ID NO: 3760180 - RNA, 23 nt, Human
gcccccacccuguuccugcugcu

SEQ ID NO: 3760181 - RNA, 22 nt, Human
cuggggcucccuucaucuccag

SEQ ID NO: 3760182 - RNA, 19 nt, Human
cuggggcuccuuucuccag

SEQ ID NO: 3760183 - RNA, 20 nt, Human
cuggggcuccuuucuccagc

SEQ ID NO: 3760184 - RNA, 17 nt, Human
cuggggcucugugcagg

SEQ ID NO: 3760185 - RNA, 13 nt, Human
cuggggcugaagg

SEQ ID NO: 3760186 - RNA, 17 nt, Human
cuggggcugaucucagg

SEQ ID NO: 3760187 - RNA, 20 nt, Human
cuggggcugaucucagggaa

SEQ ID NO: 3760188 - RNA, 23 nt, Human
cuggggcugaucucagggaagcc

SEQ ID NO: 3760189 - RNA, 15 nt, Human
cuggggcugcuggcc

SEQ ID NO: 3760190 - RNA, 16 nt, Human
cuggggcugcuggccu

SEQ ID NO: 3760191 - RNA, 15 nt, Human
cuggggcugcuguga

SEQ ID NO: 3760192 - RNA, 13 nt, Human
cuggggcuggcuu

SEQ ID NO: 3760193 - RNA, 14 nt, Human
cuggggcuggcuuu

SEQ ID NO: 3760194 - RNA, 16 nt, Human
cuggggcuucuccuga

SEQ ID NO: 3760195 - RNA, 19 nt, Human
cuggggcuucuccugaccc

SEQ ID NO: 3760196 - RNA, 16 nt, Human
cugggggaagcccugg

SEQ ID NO: 3760197 - RNA, 20 nt, Human
cugggggaaugagcccagag

SEQ ID NO: 3760198 - RNA, 14 nt, Human
cugggggagagccg

SEQ ID NO: 3760199 - RNA, 13 nt, Human
cugggggagugga

SEQ ID NO: 3760200 - RNA, 14 nt, Human
cugggggcacagga

SEQ ID NO: 3760201 - RNA, 23 nt, Human
cugggggcagccugcguggcuga

SEQ ID NO: 3760202 - RNA, 14 nt, Human
cugggggccaugag

SEQ ID NO: 3760203 - RNA, 23 nt, Human
cugggggccaugagcuccagacc

SEQ ID NO: 3760204 - RNA, 13 nt, Human
cugggggccuggc

SEQ ID NO: 3760205 - RNA, 16 nt, Human
cugggggccuggcugg

SEQ ID NO: 3760206 - RNA, 14 nt, Human
cuggggggacccag

SEQ ID NO: 3760207 - RNA, 21 nt, Human
cuggggggacccagugcagaa

SEQ ID NO: 3760208 - RNA, 13 nt, Human
cuggggggcagug

SEQ ID NO: 3760209 - RNA, 12 nt, Human
cugggggguggc

SEQ ID NO: 3760210 - RNA, 15 nt, Human
cugggggguggccag

SEQ ID NO: 3760211 - RNA, 16 nt, Human
cugggggucaggaggc

SEQ ID NO: 3760212 - RNA, 19 nt, Human
cuggggguggggagguguc

SEQ ID NO: 3760213 - RNA, 16 nt, Human
cuggggguugcggggg

SEQ ID NO: 3760214 - RNA, 19 nt, Human
cugggguaaguggucuaag

SEQ ID NO: 3760215 - RNA, 19 nt, Human
cuggggucacccucuccag

SEQ ID NO: 3760216 - RNA, 15 nt, Human
cugggguccagggag

SEQ ID NO: 3760217 - RNA, 14 nt, Human
cuggggucccagca

SEQ ID NO: 3760218 - RNA, 16 nt, Human
cuggggucccagcagc

SEQ ID NO: 3760219 - RNA, 15 nt, Human
cuggggugcagggau

SEQ ID NO: 3760220 - RNA, 14 nt, Human
cuggggugcccucc

SEQ ID NO: 3760221 - RNA, 19 nt, Human
cuggggugcccuccacugc

SEQ ID NO: 3760222 - RNA, 23 nt, Human
cuggggugcccuccacugcccuc

SEQ ID NO: 3760223 - RNA, 13 nt, Human
cugggguggccug

SEQ ID NO: 3760224 - RNA, 18 nt, Human
cugggguggccugugugg

SEQ ID NO: 3760225 - RNA, 20 nt, Human
cuggggugggaggucuugcu

SEQ ID NO: 3760226 - RNA, 21 nt, Human
cuggggugggaggucuugcua

SEQ ID NO: 3760227 - RNA, 22 nt, Human
cugggguggggaccucaggccu

SEQ ID NO: 3760228 - RNA, 23 nt, Human
cugggguggggaccucaggccug

SEQ ID NO: 3760229 - RNA, 24 nt, Human
cuggggugggggugggaggccagc

SEQ ID NO: 3760230 - RNA, 14 nt, Human
cuggggugggguca

SEQ ID NO: 3760231 - RNA, 20 nt, Human
cugggguggggucaugcccu

SEQ ID NO: 3760232 - RNA, 23 nt, Human
cugggguggguggggcagugcuu

SEQ ID NO: 3760233 - RNA, 16 nt, Human
cuggggugugggaggc

SEQ ID NO: 3760234 - RNA, 19 nt, Human
cuggggugugggaggcccg

SEQ ID NO: 3760235 - RNA, 13 nt, Human
cugggguucagcc

SEQ ID NO: 3760236 - RNA, 17 nt, Human
cugggguucagccccuc

SEQ ID NO: 3760237 - RNA, 23 nt, Human
cugggguucagccccuccucugc

SEQ ID NO: 3760238 - RNA, 14 nt, Human
cugggguugagggc

SEQ ID NO: 3760239 - RNA, 15 nt, Human
cugggguugucagcu

SEQ ID NO: 3760240 - RNA, 16 nt, Human
cuggguaauaaaagug

SEQ ID NO: 3760241 - RNA, 18 nt, Human
cuggguaaugaaacaaag

SEQ ID NO: 3760242 - RNA, 23 nt, Human
cuggguacuuguggacacagcuc

SEQ ID NO: 3760243 - RNA, 17 nt, Human
cuggguagcgggggagg

SEQ ID NO: 3760244 - RNA, 15 nt, Human
cuggguauuggaaau

SEQ ID NO: 3760245 - RNA, 21 nt, Human
cugggucagucuggugggagg

SEQ ID NO: 3760246 - RNA, 12 nt, Human
cugggucagugg

SEQ ID NO: 3760247 - RNA, 13 nt, Human
cuggguccaaaua

SEQ ID NO: 3760248 - RNA, 14 nt, Human
cuggguccaaauaa

SEQ ID NO: 3760249 - RNA, 16 nt, Human
cuggguccaaauaaaa

SEQ ID NO: 3760250 - RNA, 23 nt, Human
cuggguccaaauaaaaacuaaau

SEQ ID NO: 3760251 - RNA, 13 nt, Human
cugggucgcccug

SEQ ID NO: 3760252 - RNA, 22 nt, Human
cugggucgcccuggacugugug

SEQ ID NO: 3760253 - RNA, 19 nt, Human
cugggucucaccggcucuc

SEQ ID NO: 3760254 - RNA, 15 nt, Human
cugggucugugucuc

SEQ ID NO: 3760255 - RNA, 16 nt, Human
cugggucugugucucu

SEQ ID NO: 3760256 - RNA, 21 nt, Human
cugggucuucagcauucccuc

SEQ ID NO: 3760257 - RNA, 16 nt, Human
cugggucuuucauggg

SEQ ID NO: 3760258 - RNA, 13 nt, Human
cugggugacagag

SEQ ID NO: 3760259 - RNA, 23 nt, Human
cugggugacagagcaagacucug

SEQ ID NO: 3760260 - RNA, 14 nt, Human
cugggugcagcuga

SEQ ID NO: 3760261 - RNA, 13 nt, Human
cugggugcaggag

SEQ ID NO: 3760262 - RNA, 20 nt, Human
cugggugcaugaucuugagc

SEQ ID NO: 3760263 - RNA, 19 nt, Human
cugggugcccacagcccgc

SEQ ID NO: 3760264 - RNA, 23 nt, Human
cugggugcccacagcccgcaugc

SEQ ID NO: 3760265 - RNA, 21 nt, Human
cugggugcgaccccaucugcc

SEQ ID NO: 3760266 - RNA, 18 nt, Human
cugggugcuacuggggaa

SEQ ID NO: 3760267 - RNA, 14 nt, Human
cugggugcucccua

SEQ ID NO: 3760268 - RNA, 23 nt, Human
cuggguggacauggccccuguga

SEQ ID NO: 3760269 - RNA, 16 nt, Human
cuggguggaugggcca

SEQ ID NO: 3760270 - RNA, 18 nt, Human
cuggguggcaccagcagc

SEQ ID NO: 3760271 - RNA, 21 nt, Human
cuggguggcaccagcagccug

SEQ ID NO: 3760272 - RNA, 22 nt, Human
cuggguggcaccagcagccugg

SEQ ID NO: 3760273 - RNA, 20 nt, Human
cuggguggcacugccaugca

SEQ ID NO: 3760274 - RNA, 21 nt, Human
cuggguggcacugccaugcag

SEQ ID NO: 3760275 - RNA, 20 nt, Human
cuggguggcccauccccccu

SEQ ID NO: 3760276 - RNA, 23 nt, Human
cuggguggccucgggacaccugc

SEQ ID NO: 3760277 - RNA, 15 nt, Human
cuggguggcuacucu

SEQ ID NO: 3760278 - RNA, 21 nt, Human
cuggguggcuacucugugcca

SEQ ID NO: 3760279 - RNA, 13 nt, Human
cuggguggggcug

SEQ ID NO: 3760280 - RNA, 18 nt, Human
cuggguggggcugcuccu

SEQ ID NO: 3760281 - RNA, 17 nt, Human
cuggguggguggugggg

SEQ ID NO: 3760282 - RNA, 19 nt, Human
cugggugggugguggggag

SEQ ID NO: 3760283 - RNA, 19 nt, Human
cugggugguacccucugga

SEQ ID NO: 3760284 - RNA, 21 nt, Human
cuggguggucugcaggcaggg

SEQ ID NO: 3760285 - RNA, 19 nt, Human
cuggguguaaaaccuggag

SEQ ID NO: 3760286 - RNA, 21 nt, Human
cuggguguaaaaccuggagau

SEQ ID NO: 3760287 - RNA, 16 nt, Human
cuggguguaaacacau

SEQ ID NO: 3760288 - RNA, 13 nt, Human
cugggugucauuu

SEQ ID NO: 3760289 - RNA, 21 nt, Human
cugggugucauuucauuccau

SEQ ID NO: 3760290 - RNA, 14 nt, Human
cuggguguggcgca

SEQ ID NO: 3760291 - RNA, 15 nt, Human
cuggguguggcgcag

SEQ ID NO: 3760292 - RNA, 21 nt, Human
cuggguuagacugccagcucu

SEQ ID NO: 3760293 - RNA, 23 nt, Human
cuggguuagacugccagcucuuc

SEQ ID NO: 3760294 - RNA, 14 nt, Human
cuggguucacugca

SEQ ID NO: 3760295 - RNA, 18 nt, Human
cuggguucacugcaaccu

SEQ ID NO: 3760296 - RNA, 20 nt, Human
cuggguucacugcaaccucc

SEQ ID NO: 3760297 - RNA, 21 nt, Human
cuggguucagaaaugcugccu

SEQ ID NO: 3760298 - RNA, 15 nt, Human
cuggguucuacccag

SEQ ID NO: 3760299 - RNA, 15 nt, Human
cuggguucugggugg

SEQ ID NO: 3760300 - RNA, 16 nt, Human
cuggguucuggguggu

SEQ ID NO: 3760301 - RNA, 18 nt, Human
cuggguugcagacaggaa

SEQ ID NO: 3760302 - RNA, 13 nt, Human
cuggguuggaaaa

SEQ ID NO: 3760303 - RNA, 18 nt, Human
cuggguuggaaaacagua

SEQ ID NO: 3760304 - RNA, 16 nt, Human
cuggguuggcgcaccc

SEQ ID NO: 3760305 - RNA, 16 nt, Human
cuggguugggaucagg

SEQ ID NO: 3760306 - RNA, 13 nt, Human
cuggguugggggc

SEQ ID NO: 3760307 - RNA, 14 nt, Human
cuggguuggugcac

SEQ ID NO: 3760308 - RNA, 15 nt, Human
cuggguuggugcaca

SEQ ID NO: 3760309 - RNA, 18 nt, Human
cuggguuucucuguauag

SEQ ID NO: 3760310 - RNA, 19 nt, Human
cuggguuuggaccccagcu

SEQ ID NO: 3760311 - RNA, 21 nt, Human
cuggguuuggaccccagcugg

SEQ ID NO: 3760312 - RNA, 13 nt, Human
cugguaaaaugaa

SEQ ID NO: 3760313 - RNA, 22 nt, Human
cugguaaaaugaagaauuuaaa

SEQ ID NO: 3760314 - RNA, 18 nt, Human
cugguaacaguucauguu

SEQ ID NO: 3760315 - RNA, 19 nt, Human
cugguaauauugacuugua

SEQ ID NO: 3760316 - RNA, 23 nt, Human
cugguacaguauggggguuguaa

SEQ ID NO: 3760317 - RNA, 16 nt, Human
cugguaccaguugaaa

SEQ ID NO: 3760318 - RNA, 17 nt, Human
cugguaccaguugaaau

SEQ ID NO: 3760319 - RNA, 17 nt, Human
cugguacccagccaucu

SEQ ID NO: 3760320 - RNA, 19 nt, Human
cugguacccagccaucugc

SEQ ID NO: 3760321 - RNA, 22 nt, Human
cugguacccagccaucugccca

SEQ ID NO: 3760322 - RNA, 16 nt, Human
cugguacucuccuaga

SEQ ID NO: 3760323 - RNA, 19 nt, Human
cugguacuuagaguuucug

SEQ ID NO: 3760324 - RNA, 20 nt, Human
cugguacuuagaguuucugu

SEQ ID NO: 3760325 - RNA, 21 nt, Human
cugguagaagggaaagcccau

SEQ ID NO: 3760326 - RNA, 13 nt, Human
cugguagagcagg

SEQ ID NO: 3760327 - RNA, 23 nt, Human
cugguagauagaaauaaauagcu

SEQ ID NO: 3760328 - RNA, 14 nt, Human
cugguagcucaggu

SEQ ID NO: 3760329 - RNA, 23 nt, Human
cugguaggaaagggcaagucuuu

SEQ ID NO: 3760330 - RNA, 20 nt, Human
gcccugccacucacuaggcc

SEQ ID NO: 3760331 - RNA, 21 nt, Human
gcccugccacucacuaggccc

SEQ ID NO: 3760332 - RNA, 18 nt, Human
gcccugccaucuucccag

SEQ ID NO: 3760333 - RNA, 22 nt, Human
gcccugcccaccuggccucugc

SEQ ID NO: 3760334 - RNA, 13 nt, Human
gcccugcccugag

SEQ ID NO: 3760335 - RNA, 22 nt, Human
gcccugccuccuuugugaggaa

SEQ ID NO: 3760336 - RNA, 15 nt, Human
gcccugccucuccgc

SEQ ID NO: 3760337 - RNA, 18 nt, Human
gcccugccucuccgcccc

SEQ ID NO: 3760338 - RNA, 21 nt, Human
gcccugccucuccgccccuga

SEQ ID NO: 3760339 - RNA, 15 nt, Human
gcccugccugagggc

SEQ ID NO: 3760340 - RNA, 14 nt, Human
gcccugccuggagg

SEQ ID NO: 3760341 - RNA, 20 nt, Human
gcccugcucccucucccccu

SEQ ID NO: 3760342 - RNA, 18 nt, Human
gcccugccuggaggaccu

SEQ ID NO: 3760343 - RNA, 23 nt, Human
gcccugccuggaggaccugagcc

SEQ ID NO: 3760344 - RNA, 20 nt, Human
gcccugcgggucacaggagg

SEQ ID NO: 3760345 - RNA, 18 nt, Human
gcccugcgguagauggga

SEQ ID NO: 3760346 - RNA, 15 nt, Human
gcccugcuccucccu

SEQ ID NO: 3760347 - RNA, 23 nt, Human
gcccugcuccucccuggcugccc

SEQ ID NO: 3760348 - RNA, 14 nt, Human
gcccugcuccugca

SEQ ID NO: 3760349 - RNA, 16 nt, Human
gcccugcuccugcagc

SEQ ID NO: 3760350 - RNA, 22 nt, Human
gcccugcugagucccaggcuga

SEQ ID NO: 3760351 - RNA, 12 nt, Human
gcccugcugccc

SEQ ID NO: 3760352 - RNA, 15 nt, Human
gcccugcugcccucc

SEQ ID NO: 3760353 - RNA, 22 nt, Human
gcccugcugccgccucccagcc

SEQ ID NO: 3760354 - RNA, 11 nt, Human
gcccugcuggc

SEQ ID NO: 3760355 - RNA, 14 nt, Human
gcccugcuggccgc

SEQ ID NO: 3760356 - RNA, 21 nt, Human
gcccugcuggccgccucaccc

SEQ ID NO: 3760357 - RNA, 21 nt, Human
gcccugcuggggauccccgcc

SEQ ID NO: 3760358 - RNA, 16 nt, Human
gcccugcuuccugcuu

SEQ ID NO: 3760359 - RNA, 22 nt, Human
gcccugcuuccugcuugccaag

SEQ ID NO: 3760360 - RNA, 16 nt, Human
gcccugcuuugggcug

SEQ ID NO: 3760361 - RNA, 18 nt, Human
gcccugcuuugggcugcc

SEQ ID NO: 3760362 - RNA, 21 nt, Human
gcccugcuuugggcugcccug

SEQ ID NO: 3760363 - RNA, 23 nt, Human
gcccugcuuugggcugcccuggu

SEQ ID NO: 3760364 - RNA, 20 nt, Human
gcccuggaagccggcggccc

SEQ ID NO: 3760365 - RNA, 12 nt, Human
gcccuggacugu

SEQ ID NO: 3760366 - RNA, 16 nt, Human
gcccuggacugugugc

SEQ ID NO: 3760367 - RNA, 18 nt, Human
gcccuggagguggcugag

SEQ ID NO: 3760368 - RNA, 19 nt, Human
gcccuggagucaugccaag

SEQ ID NO: 3760369 - RNA, 20 nt, Human
gcccuggagucaugccaagc

SEQ ID NO: 3760370 - RNA, 20 nt, Human
cuguaggaagguacuguaug

SEQ ID NO: 3760371 - RNA, 19 nt, Human
cuguaggacucgcagucag

SEQ ID NO: 3760372 - RNA, 22 nt, Human
cuguaggagcuacccuuuuccu

SEQ ID NO: 3760373 - RNA, 14 nt, Human
cuguagggaacucu

SEQ ID NO: 3760374 - RNA, 20 nt, Human
cuguagggagggcggcaggg

SEQ ID NO: 3760375 - RNA, 16 nt, Human
cuguagggcuggaccu

SEQ ID NO: 3760376 - RNA, 15 nt, Human
cuguaggugguaugu

SEQ ID NO: 3760377 - RNA, 16 nt, Human
cuguagguugcacacu

SEQ ID NO: 3760378 - RNA, 19 nt, Human
cuguaguaaacuauuuauc

SEQ ID NO: 3760379 - RNA, 20 nt, Human
cuguaguaaacuauuuaucu

SEQ ID NO: 3760380 - RNA, 18 nt, Human
cuguaguaaauaaugcuu

SEQ ID NO: 3760381 - RNA, 19 nt, Human
cuguaguaaauaaugcuuu

SEQ ID NO: 3760382 - RNA, 18 nt, Human
cuguaguacuccuuaaga

SEQ ID NO: 3760383 - RNA, 23 nt, Human
cuguaguacuccuuaagaacaca

SEQ ID NO: 3760384 - RNA, 19 nt, Human
cuguaguagcccuuucugu

SEQ ID NO: 3760385 - RNA, 18 nt, Human
cuguaguaggcauuuuua

SEQ ID NO: 3760386 - RNA, 22 nt, Human
cuguaguaggcauuuuuaccau

SEQ ID NO: 3760387 - RNA, 14 nt, Human
cuguagucagccga

SEQ ID NO: 3760388 - RNA, 17 nt, Human
cuguagucauuuacuaa

SEQ ID NO: 3760389 - RNA, 23 nt, Human
cuguagucauuuacuaaacauau

SEQ ID NO: 3760390 - RNA, 12 nt, Human
cuguagucccag

SEQ ID NO: 3760391 - RNA, 18 nt, Human
cuguagucccagccacuc

SEQ ID NO: 3760392 - RNA, 20 nt, Human
cuguaguccuagccacucag

SEQ ID NO: 3760393 - RNA, 14 nt, Human
cuguagucucagga

SEQ ID NO: 3760394 - RNA, 22 nt, Human
cuguagugagauagcauuguga

SEQ ID NO: 3760395 - RNA, 20 nt, Human
cuguagugcuacagggucca

SEQ ID NO: 3760396 - RNA, 14 nt, Human
cuguaguucuaaga

SEQ ID NO: 3760397 - RNA, 19 nt, Human
cuguaguucuaagacucaa

SEQ ID NO: 3760398 - RNA, 18 nt, Human
cuguauaaacauuaaaug

SEQ ID NO: 3760399 - RNA, 19 nt, Human
cuguauaaacauuaaaugu

SEQ ID NO: 3760400 - RNA, 14 nt, Human
cuguauaaauagga

SEQ ID NO: 3760401 - RNA, 16 nt, Human
cuguauaaauaggaga

SEQ ID NO: 3760402 - RNA, 17 nt, Human
cuguauaacccuguuac

SEQ ID NO: 3760403 - RNA, 12 nt, Human
cuguauaaguaa

SEQ ID NO: 3760404 - RNA, 16 nt, Human
cuguauaaguaagaaa

SEQ ID NO: 3760405 - RNA, 22 nt, Human
cuguauacagugcagagccuuc

SEQ ID NO: 3760406 - RNA, 16 nt, Human
cuguauacguuucaaa

SEQ ID NO: 3760407 - RNA, 21 nt, Human
cuguauagacaguuuguaaau

SEQ ID NO: 3760408 - RNA, 18 nt, Human
cuguauauaaaugggaac

SEQ ID NO: 3760409 - RNA, 19 nt, Human
cuguauauaaaugggaaca

SEQ ID NO: 3760410 - RNA, 15 nt, Human
cuguauauacaauaa

SEQ ID NO: 3760411 - RNA, 14 nt, Human
cuguauauacuuuu

SEQ ID NO: 3760412 - RNA, 15 nt, Human
cuguauauacuuuuu

SEQ ID NO: 3760413 - RNA, 19 nt, Human
cuguauauuuguaaagcua

SEQ ID NO: 3760414 - RNA, 15 nt, Human
cuguauauuuguaug

SEQ ID NO: 3760415 - RNA, 17 nt, Human
cuguauauuuuaagaag

SEQ ID NO: 3760416 - RNA, 17 nt, Human
cuguaucaagucauggc

SEQ ID NO: 3760417 - RNA, 22 nt, Human
cuguaucaggacccagaggaag

SEQ ID NO: 3760418 - RNA, 16 nt, Human
cuguaucauuuucuuu

SEQ ID NO: 3760419 - RNA, 18 nt, Human
cuguaucccaugagccuc

SEQ ID NO: 3760420 - RNA, 18 nt, Human
cuguaucuguguagacua

SEQ ID NO: 3760421 - RNA, 15 nt, Human
cuguaucuuucuaug

SEQ ID NO: 3760422 - RNA, 21 nt, Human
cuguaugaaaaauuggggagg

SEQ ID NO: 3760423 - RNA, 15 nt, Human
cuguaugaucaaaug

SEQ ID NO: 3760424 - RNA, 18 nt, Human
cuguaugaucaaauguuu

SEQ ID NO: 3760425 - RNA, 23 nt, Human
cuguaugaucaaauguuuaauca

SEQ ID NO: 3760426 - RNA, 12 nt, Human
cuguaugauuua

SEQ ID NO: 3760427 - RNA, 22 nt, Human
cuguaugcugaucaucgccaga

SEQ ID NO: 3760428 - RNA, 15 nt, Human
cuguaugucugucau

SEQ ID NO: 3760429 - RNA, 19 nt, Human
cuguauguuauagaacuuc

SEQ ID NO: 3760430 - RNA, 15 nt, Human
cuguauuaagccacu

SEQ ID NO: 3760431 - RNA, 17 nt, Human
cuguauuagucacagag

SEQ ID NO: 3760432 - RNA, 15 nt, Human
cuguauucagacaga

SEQ ID NO: 3760433 - RNA, 18 nt, Human
cuguauucucaaacacag

SEQ ID NO: 3760434 - RNA, 21 nt, Human
cuguauugaaucauguaguau

SEQ ID NO: 3760435 - RNA, 19 nt, Human
cuguauuuaaaaauagaaa

SEQ ID NO: 3760436 - RNA, 14 nt, Human
cuguauuuaagcaa

SEQ ID NO: 3760437 - RNA, 17 nt, Human
cuguauuucauguggcu

SEQ ID NO: 3760438 - RNA, 19 nt, Human
cuguauuucauguggcugu

SEQ ID NO: 3760439 - RNA, 19 nt, Human
cuguauuugaaagugccuu

SEQ ID NO: 3760440 - RNA, 22 nt, Human
cuguauuugaaauaagaauuca

SEQ ID NO: 3760441 - RNA, 23 nt, Human
cuguauuuguaucucugaagcau

SEQ ID NO: 3760442 - RNA, 13 nt, Human
cuguauuugugac

SEQ ID NO: 3760443 - RNA, 14 nt, Human
cuguauuugugacu

SEQ ID NO: 3760444 - RNA, 19 nt, Human
cuguauuuguucccaagag

SEQ ID NO: 3760445 - RNA, 18 nt, Human
cuguauuuuuaaagcaug

SEQ ID NO: 3760446 - RNA, 21 nt, Human
cuguauuuuuucuugcauuga

SEQ ID NO: 3760447 - RNA, 21 nt, Human
cuguauuuuuuuuucuaagag

SEQ ID NO: 3760448 - RNA, 22 nt, Human
cuguauuuuuuuuucuaagaga

SEQ ID NO: 3760449 - RNA, 15 nt, Human
cugucaaaacacugu

SEQ ID NO: 3760450 - RNA, 18 nt, Human
cugucaaacaaagccaga

SEQ ID NO: 3760451 - RNA, 19 nt, Human
cugucaaacaaagccagaa

SEQ ID NO: 3760452 - RNA, 22 nt, Human
cugucaaacaaagccagaagcu

SEQ ID NO: 3760453 - RNA, 12 nt, Human
cugucaaacauu

SEQ ID NO: 3760454 - RNA, 13 nt, Human
cugucaaacauua

SEQ ID NO: 3760455 - RNA, 14 nt, Human
cugucaaaugaugu

SEQ ID NO: 3760456 - RNA, 18 nt, Human
cugucaagccauuuuuac

SEQ ID NO: 3760457 - RNA, 17 nt, Human
cugucaaggcugcuuag

SEQ ID NO: 3760458 - RNA, 19 nt, Human
cugucaaguuccuuugggu

SEQ ID NO: 3760459 - RNA, 12 nt, Human
cugucaauaaac

SEQ ID NO: 3760460 - RNA, 13 nt, Human
cugucaauaaaca

SEQ ID NO: 3760461 - RNA, 20 nt, Human
cugucaaugauuauuuucau

SEQ ID NO: 3760462 - RNA, 13 nt, Human
cugucaauuacag

SEQ ID NO: 3760463 - RNA, 15 nt, Human
cugucaauuacagga

SEQ ID NO: 3760464 - RNA, 18 nt, Human
cugucaauuacaggaagu

SEQ ID NO: 3760465 - RNA, 19 nt, Human
cugucaauuacaggaagua

SEQ ID NO: 3760466 - RNA, 16 nt, Human
cugucacaccagccau

SEQ ID NO: 3760467 - RNA, 21 nt, Human
cugucacaguaaaaauaaaau

SEQ ID NO: 3760468 - RNA, 14 nt, Human
cugucacauugcau

SEQ ID NO: 3760469 - RNA, 22 nt, Human
cugucacccagguuggagugca

SEQ ID NO: 3760470 - RNA, 16 nt, Human
cugucaccucucccac

SEQ ID NO: 3760471 - RNA, 16 nt, Human
cugucacugcaggcac

SEQ ID NO: 3760472 - RNA, 17 nt, Human
cugucacugcucuggac

SEQ ID NO: 3760473 - RNA, 24 nt, Human
cugucacugcucuggacugugugg

SEQ ID NO: 3760474 - RNA, 20 nt, Human
cugucacuguuucucugcug

SEQ ID NO: 3760475 - RNA, 15 nt, Human
cugucacuuugcucu

SEQ ID NO: 3760476 - RNA, 13 nt, Human
cugucagauccag

SEQ ID NO: 3760477 - RNA, 17 nt, Human
cugucagaugagaacaa

SEQ ID NO: 3760478 - RNA, 19 nt, Human
cugucagaugagaacaaag

SEQ ID NO: 3760479 - RNA, 20 nt, Human
cugucagaugagaacaaagc

SEQ ID NO: 3760480 - RNA, 22 nt, Human
cugucagaugagaacaaagcug

SEQ ID NO: 3760481 - RNA, 23 nt, Human
cugucagaugagaacaaagcugu

SEQ ID NO: 3760482 - RNA, 16 nt, Human
cugucagcaugaauuu

SEQ ID NO: 3760483 - RNA, 22 nt, Human
cugucagcaugaauuuguaaug

SEQ ID NO: 3760484 - RNA, 21 nt, Human
cugucagcuccccucggagaa

SEQ ID NO: 3760485 - RNA, 14 nt, Human
cugucaggaagaaa

SEQ ID NO: 3760486 - RNA, 17 nt, Human
cugucaggaagaaauca

SEQ ID NO: 3760487 - RNA, 17 nt, Human
cugucaggauugcgaga

SEQ ID NO: 3760488 - RNA, 19 nt, Human
cugucaggauugcgagaga

SEQ ID NO: 3760489 - RNA, 21 nt, Human
cugucaggauugcgagagaug

SEQ ID NO: 3760490 - RNA, 22 nt, Human
cugucaggauugcgagagaugu

SEQ ID NO: 3760491 - RNA, 18 nt, Human
cugucaggcugaaaacaa

SEQ ID NO: 3760492 - RNA, 14 nt, Human
cugucagucacagc

SEQ ID NO: 3760493 - RNA, 14 nt, Human
cugucagucugcuu

SEQ ID NO: 3760494 - RNA, 18 nt, Human
cugucagugcagcccgug

SEQ ID NO: 3760495 - RNA, 17 nt, Human
cugucagugccgccgcc

SEQ ID NO: 3760496 - RNA, 22 nt, Human
cugucagugccgccgccucgcc

SEQ ID NO: 3760497 - RNA, 22 nt, Human
cugucaguuaugacauccacaa

SEQ ID NO: 3760498 - RNA, 19 nt, Human
cugucaguucuaaccuccu

SEQ ID NO: 3760499 - RNA, 17 nt, Human
cugucauccagcucacu

SEQ ID NO: 3760500 - RNA, 22 nt, Human
cugucauccucaaagaaagugu

SEQ ID NO: 3760501 - RNA, 18 nt, Human
cugucaucuaccuuuucu

SEQ ID NO: 3760502 - RNA, 17 nt, Human
cugucaucugagaauga

SEQ ID NO: 3760503 - RNA, 14 nt, Human
cugucaucuuucuu

SEQ ID NO: 3760504 - RNA, 18 nt, Human
cugucaugaaaucagcaa

SEQ ID NO: 3760505 - RNA, 19 nt, Human
cugucaugaacauguuccu

SEQ ID NO: 3760506 - RNA, 18 nt, Human
cugucaugccccccucaa

SEQ ID NO: 3760507 - RNA, 23 nt, Human
cugucauucccaccacccugagg

SEQ ID NO: 3760508 - RNA, 19 nt, Human
cugucauugcuucuucuga

SEQ ID NO: 3760509 - RNA, 17 nt, Human
cugucauuugagcaggg

SEQ ID NO: 3760510 - RNA, 20 nt, Human
cugucauuugagcagggcuc

SEQ ID NO: 3760511 - RNA, 22 nt, Human
cugucauuugagcagggcucag

SEQ ID NO: 3760512 - RNA, 16 nt, Human
cugucauuuguuguga

SEQ ID NO: 3760513 - RNA, 22 nt, Human
cuguccaaaggaggcuggcagg

SEQ ID NO: 3760514 - RNA, 20 nt, Human
cuguccaaccuaaccccuuu

SEQ ID NO: 3760515 - RNA, 23 nt, Human
cuguccaaccuaaccccuuuccu

SEQ ID NO: 3760516 - RNA, 22 nt, Human
cuguccacaggcuucugagcag

SEQ ID NO: 3760517 - RNA, 16 nt, Human
cuguccaccagcccau

SEQ ID NO: 3760518 - RNA, 24 nt, Human
gccuccagggcuggacugaggccu

SEQ ID NO: 3760519 - RNA, 15 nt, Human
gccuccaggugcaga

SEQ ID NO: 3760520 - RNA, 14 nt, Human
gccuccaggugugc

SEQ ID NO: 3760521 - RNA, 23 nt, Human
gccuccauccuacccccugugcc

SEQ ID NO: 3760522 - RNA, 12 nt, Human
gccuccauccug

SEQ ID NO: 3760523 - RNA, 13 nt, Human
gccuccauccuga

SEQ ID NO: 3760524 - RNA, 14 nt, Human
gccuccauccugag

SEQ ID NO: 3760525 - RNA, 11 nt, Human
gccuccaucuc

SEQ ID NO: 3760526 - RNA, 13 nt, Human
gccuccaugggcc

SEQ ID NO: 3760527 - RNA, 14 nt, Human
gccuccauggugcc

SEQ ID NO: 3760528 - RNA, 17 nt, Human
gccucccaaagugcugg

SEQ ID NO: 3760529 - RNA, 18 nt, Human
gccucccaaagugcuggg

SEQ ID NO: 3760530 - RNA, 17 nt, Human
gccucccaacucacccc

SEQ ID NO: 3760531 - RNA, 19 nt, Human
gccucccaacucaccccag

SEQ ID NO: 3760532 - RNA, 21 nt, Human
gccucccaacucaccccagcc

SEQ ID NO: 3760533 - RNA, 23 nt, Human
gccucccaacucaccccagcccc

SEQ ID NO: 3760534 - RNA, 14 nt, Human
gccucccacaguga

SEQ ID NO: 3760535 - RNA, 12 nt, Human
gccucccacccg

SEQ ID NO: 3760536 - RNA, 20 nt, Human
gccucccacccgaugcugcu

SEQ ID NO: 3760537 - RNA, 16 nt, Human
gccucccaucacccgc

SEQ ID NO: 3760538 - RNA, 17 nt, Human
gccucccaucacccgcu

SEQ ID NO: 3760539 - RNA, 15 nt, Human
gccucccauccaggg

SEQ ID NO: 3760540 - RNA, 14 nt, Human
gccucccauguuca

SEQ ID NO: 3760541 - RNA, 20 nt, Human
gccuccccaacccugccccu

SEQ ID NO: 3760542 - RNA, 22 nt, Human
gccuccccaacccugccccugc

SEQ ID NO: 3760543 - RNA, 17 nt, Human
gccuccccaccuccagg

SEQ ID NO: 3760544 - RNA, 22 nt, Human
gccuccccauuucccaucugca

SEQ ID NO: 3760545 - RNA, 23 nt, Human
gccuccccauuucccaucugcac

SEQ ID NO: 3760546 - RNA, 20 nt, Human
gccucccccacuuucuuucu

SEQ ID NO: 3760547 - RNA, 18 nt, Human
gccucccccuagccauuu

SEQ ID NO: 3760548 - RNA, 12 nt, Human
gccuccccuccu

SEQ ID NO: 3760549 - RNA, 16 nt, Human
gccuccccuccucugc

SEQ ID NO: 3760550 - RNA, 19 nt, Human
gccuccccuccucugcuug

SEQ ID NO: 3760551 - RNA, 20 nt, Human
gccuccccuccucugcuugc

SEQ ID NO: 3760552 - RNA, 23 nt, Human
gccuccccuccucugcuugccau

SEQ ID NO: 3760553 - RNA, 14 nt, Human
gccuccccugccac

SEQ ID NO: 3760554 - RNA, 19 nt, Human
gccuccccugccaccaggc

SEQ ID NO: 3760555 - RNA, 15 nt, Human
gccuccccugcugaa

SEQ ID NO: 3760556 - RNA, 16 nt, Human
gccuccccugugcagu

SEQ ID NO: 3760557 - RNA, 19 nt, Human
gccuccccuuaaaggggag

SEQ ID NO: 3760558 - RNA, 20 nt, Human
gccuccccuuaaaggggaga

SEQ ID NO: 3760559 - RNA, 21 nt, Human
gccuccccuuaaaggggagac

SEQ ID NO: 3760560 - RNA, 20 nt, Human
gccucccgaauagcugggac

SEQ ID NO: 3760561 - RNA, 19 nt, Human
gccucccgcguugggcaac

SEQ ID NO: 3760562 - RNA, 13 nt, Human
gccucccucaacc

SEQ ID NO: 3760563 - RNA, 18 nt, Human
gccucccucacccugagc

SEQ ID NO: 3760564 - RNA, 20 nt, Human
gccucccucacccugagccc

SEQ ID NO: 3760565 - RNA, 16 nt, Human
gccucccuccacccca

SEQ ID NO: 3760566 - RNA, 18 nt, Human
gccucccuccaccccagg

SEQ ID NO: 3760567 - RNA, 20 nt, Human
gccucccuccaccccaggac

SEQ ID NO: 3760568 - RNA, 16 nt, Human
gccucccucucucuuc

SEQ ID NO: 3760569 - RNA, 23 nt, Human
gccucccucucucuucugcucca

SEQ ID NO: 3760570 - RNA, 12 nt, Human
gccucccugagc

SEQ ID NO: 3760571 - RNA, 13 nt, Human
gccucccugagcu

SEQ ID NO: 3760572 - RNA, 16 nt, Human
gccucccuggucccuu

SEQ ID NO: 3760573 - RNA, 15 nt, Human
gccucccuggugaga

SEQ ID NO: 3760574 - RNA, 14 nt, Human
gccucccuguccac

SEQ ID NO: 3760575 - RNA, 23 nt, Human
gccucccuucaugcauggaaauu

SEQ ID NO: 3760576 - RNA, 13 nt, Human
gccucccuugacu

SEQ ID NO: 3760577 - RNA, 18 nt, Human
gccuccggcgucagccuc

SEQ ID NO: 3760578 - RNA, 21 nt, Human
gccuccggcgucagccuccag

SEQ ID NO: 3760579 - RNA, 23 nt, Human
gccuccggcgucagccuccagcc

SEQ ID NO: 3760580 - RNA, 19 nt, Human
gccuccgggacccccagga

SEQ ID NO: 3760581 - RNA, 21 nt, Human
gccuccgucacuaccuggcug

SEQ ID NO: 3760582 - RNA, 16 nt, Human
gccuccucacccccag

SEQ ID NO: 3760583 - RNA, 18 nt, Human
gccuccucacccccagcu

SEQ ID NO: 3760584 - RNA, 19 nt, Human
gccuccucacccccagcuu

SEQ ID NO: 3760585 - RNA, 12 nt, Human
gccuccucccuc

SEQ ID NO: 3760586 - RNA, 16 nt, Human
gccuccucccuuagcu

SEQ ID NO: 3760587 - RNA, 17 nt, Human
gccuccucccuuagcuc

SEQ ID NO: 3760588 - RNA, 20 nt, Human
gccuccucuaacaggggcug

SEQ ID NO: 3760589 - RNA, 21 nt, Human
gccuccucugucugcccuuca

SEQ ID NO: 3760590 - RNA, 17 nt, Human
gccuccucuucaccccg

SEQ ID NO: 3760591 - RNA, 23 nt, Human
gccuccugaguagcugggacuac

SEQ ID NO: 3760592 - RNA, 15 nt, Human
gccuccugcccaguc

SEQ ID NO: 3760593 - RNA, 17 nt, Human
gccuccugcccaguccc

SEQ ID NO: 3760594 - RNA, 20 nt, Human
gccuccugcccaguccccca

SEQ ID NO: 3760595 - RNA, 13 nt, Human
gccuccugccggc

SEQ ID NO: 3760596 - RNA, 20 nt, Human
gccuccugccggcuccuugg

SEQ ID NO: 3760597 - RNA, 23 nt, Human
gccuccugccugccccucucccg

SEQ ID NO: 3760598 - RNA, 14 nt, Human
gccuccuguggccu

SEQ ID NO: 3760599 - RNA, 19 nt, Human
gccuccuguguacuguguc

SEQ ID NO: 3760600 - RNA, 19 nt, Human
gccuccugugugugcgccu

SEQ ID NO: 3760601 - RNA, 19 nt, Human
gccuccuuccaccucccuc

SEQ ID NO: 3760602 - RNA, 14 nt, Human
gccuccuuccucuu

SEQ ID NO: 3760603 - RNA, 24 nt, Human
gccuccuuccucuuuuccuuccca

SEQ ID NO: 3760604 - RNA, 12 nt, Human
gccuccuucuga

SEQ ID NO: 3760605 - RNA, 22 nt, Human
gccuccuucugagcuccugucc

SEQ ID NO: 3760606 - RNA, 16 nt, Human
gccucgaacuccuggg

SEQ ID NO: 3760607 - RNA, 20 nt, Human
gccucgaacuggcugcaaag

SEQ ID NO: 3760608 - RNA, 17 nt, Human
gccucgacacagagugg

SEQ ID NO: 3760609 - RNA, 20 nt, Human
gccucgcaacccgugccaag

SEQ ID NO: 3760610 - RNA, 14 nt, Human
gccucgcccaccgc

SEQ ID NO: 3760611 - RNA, 16 nt, Human
gccucgcccauccccu

SEQ ID NO: 3760612 - RNA, 16 nt, Human
gccucgccccuggcag

SEQ ID NO: 3760613 - RNA, 17 nt, Human
gccucgccccuggcaga

SEQ ID NO: 3760614 - RNA, 18 nt, Human
gccucgccccuggcagag

SEQ ID NO: 3760615 - RNA, 13 nt, Human
gccucgccuggcc

SEQ ID NO: 3760616 - RNA, 14 nt, Human
gccucgcuccccac

SEQ ID NO: 3760617 - RNA, 18 nt, Human
gccucgcuccccacucug

SEQ ID NO: 3760618 - RNA, 24 nt, Human
gccucgcuccccacucugcucuga

SEQ ID NO: 3760619 - RNA, 23 nt, Human
gccucgcucuguuacccagggug

SEQ ID NO: 3760620 - RNA, 13 nt, Human
gccucggacuuag

SEQ ID NO: 3760621 - RNA, 18 nt, Human
gccucggauccccuuccu

SEQ ID NO: 3760622 - RNA, 22 nt, Human
gccucggauccccuuccuacca

SEQ ID NO: 3760623 - RNA, 13 nt, Human
gccucggccccuc

SEQ ID NO: 3760624 - RNA, 17 nt, Human
gccucggcuccugcugc

SEQ ID NO: 3760625 - RNA, 19 nt, Human
gccucggcuggcuccccug

SEQ ID NO: 3760626 - RNA, 20 nt, Human
gccucggcuggcuccccugc

SEQ ID NO: 3760627 - RNA, 19 nt, Human
gccucggcuuuucucagcu

SEQ ID NO: 3760628 - RNA, 23 nt, Human
gccucgggaaccucacucuugcc

SEQ ID NO: 3760629 - RNA, 20 nt, Human
gccucguuggaagaggaaca

SEQ ID NO: 3760630 - RNA, 16 nt, Human
gccucuaaccccaggc

SEQ ID NO: 3760631 - RNA, 16 nt, Human
gccucuacugggaagg

SEQ ID NO: 3760632 - RNA, 13 nt, Human
gccucuagggacc

SEQ ID NO: 3760633 - RNA, 17 nt, Human
gccucuagggaccccuc

SEQ ID NO: 3760634 - RNA, 18 nt, Human
gccucuagggaccccucc

SEQ ID NO: 3760635 - RNA, 23 nt, Human
gccucuagggaccccuccucccu

SEQ ID NO: 3760636 - RNA, 18 nt, Human
gccucucaucaacugaau

SEQ ID NO: 3760637 - RNA, 20 nt, Human
gccucucauuccagaggaag

SEQ ID NO: 3760638 - RNA, 21 nt, Human
gccucuccacucaugugacuc

SEQ ID NO: 3760639 - RNA, 24 nt, Human
gccucuccacucaugugacucuuu

SEQ ID NO: 3760640 - RNA, 21 nt, Human
gccucuccaguuugcaccugu

SEQ ID NO: 3760641 - RNA, 16 nt, Human
gccucuccauuugcuc

SEQ ID NO: 3760642 - RNA, 22 nt, Human
gccucuccccagguccagcucu

SEQ ID NO: 3760643 - RNA, 23 nt, Human
gccucuccccagguccagcucug

SEQ ID NO: 3760644 - RNA, 17 nt, Human
gccucuccccugccugc

SEQ ID NO: 3760645 - RNA, 18 nt, Human
gccucuccccugccugcc

SEQ ID NO: 3760646 - RNA, 23 nt, Human
gccucucccgucagggcccaagu

SEQ ID NO: 3760647 - RNA, 18 nt, Human
gccucucccucugguccc

SEQ ID NO: 3760648 - RNA, 17 nt, Human
gccucucccugcugcuc

SEQ ID NO: 3760649 - RNA, 20 nt, Human
gccucucccugcugcuccua

SEQ ID NO: 3760650 - RNA, 22 nt, Human
gccucucccugcugcuccuagg

SEQ ID NO: 3760651 - RNA, 21 nt, Human
gccucuccgccccugagccca

SEQ ID NO: 3760652 - RNA, 23 nt, Human
gccucuccgccccugagcccacu

SEQ ID NO: 3760653 - RNA, 14 nt, Human
gccucuccuuaaau

SEQ ID NO: 3760654 - RNA, 19 nt, Human
gccucucgguggccagcag

SEQ ID NO: 3760655 - RNA, 14 nt, Human
gccucucuacaguc

SEQ ID NO: 3760656 - RNA, 13 nt, Human
gccucucuagcac

SEQ ID NO: 3760657 - RNA, 21 nt, Human
gccucucuauccucucuuccu

SEQ ID NO: 3760658 - RNA, 23 nt, Human
gccucucuauccucucuuccucu

SEQ ID NO: 3760659 - RNA, 14 nt, Human
gccucucucaggcc

SEQ ID NO: 3760660 - RNA, 16 nt, Human
gccucucucaggccaa

SEQ ID NO: 3760661 - RNA, 12 nt, Human
gccucucuccca

SEQ ID NO: 3760662 - RNA, 13 nt, Human
gccucucucccag

SEQ ID NO: 3760663 - RNA, 17 nt, Human
gccucucucccagucua

SEQ ID NO: 3760664 - RNA, 16 nt, Human
gccucucugcaggucc

SEQ ID NO: 3760665 - RNA, 20 nt, Human
gccucucugcaggucccuaa

SEQ ID NO: 3760666 - RNA, 17 nt, Human
gcccuggaucagcgugg

SEQ ID NO: 3760667 - RNA, 19 nt, Human
gcccuggaucagcguggcc

SEQ ID NO: 3760668 - RNA, 20 nt, Human
gcccuggaucagcguggccu

SEQ ID NO: 3760669 - RNA, 23 nt, Human
gcccuggaucagcguggccuugu

SEQ ID NO: 3760670 - RNA, 19 nt, Human
gcccuggcaggaugacccu

SEQ ID NO: 3760671 - RNA, 14 nt, Human
gcccuggcaggcag

SEQ ID NO: 3760672 - RNA, 17 nt, Human
gcccuggcagggggcau

SEQ ID NO: 3760673 - RNA, 14 nt, Human
gcccuggccagagg

SEQ ID NO: 3760674 - RNA, 16 nt, Human
gcccuggcccaucaug

SEQ ID NO: 3760675 - RNA, 17 nt, Human
gcccuggcccccacaug

SEQ ID NO: 3760676 - RNA, 12 nt, Human
gcccuggcccug

SEQ ID NO: 3760677 - RNA, 12 nt, Human
gcccuggccucc

SEQ ID NO: 3760678 - RNA, 20 nt, Human
gcccuggccuugggcccucu

SEQ ID NO: 3760679 - RNA, 19 nt, Human
gcccuggcuccagugaaac

SEQ ID NO: 3760680 - RNA, 19 nt, Human
gcccuggcucccacaggcc

SEQ ID NO: 3760681 - RNA, 12 nt, Human
gcccuggcugcu

SEQ ID NO: 3760682 - RNA, 18 nt, Human
gcccugggaaaccccuuc

SEQ ID NO: 3760683 - RNA, 20 nt, Human
gcccugggaccgcuacacca

SEQ ID NO: 3760684 - RNA, 17 nt, Human
gcccugggaggcucugg

SEQ ID NO: 3760685 - RNA, 17 nt, Human
gcccugggccacacuga

SEQ ID NO: 3760686 - RNA, 18 nt, Human
gcccugggccccaccacc

SEQ ID NO: 3760687 - RNA, 19 nt, Human
gcccugggccccaccaccu

SEQ ID NO: 3760688 - RNA, 20 nt, Human
gcccugggccccaccaccua

SEQ ID NO: 3760689 - RNA, 16 nt, Human
gcccugggcucggagg

SEQ ID NO: 3760690 - RNA, 18 nt, Human
gcccugggcuggaaucag

SEQ ID NO: 3760691 - RNA, 12 nt, Human
gcccuggggccu

SEQ ID NO: 3760692 - RNA, 13 nt, Human
gcccuggggccug

SEQ ID NO: 3760693 - RNA, 15 nt, Human
gcccuggggccugua

SEQ ID NO: 3760694 - RNA, 20 nt, Human
gcccuggggcugaucucagg

SEQ ID NO: 3760695 - RNA, 15 nt, Human
gcccuggggcugggc

SEQ ID NO: 3760696 - RNA, 16 nt, Human
gcccugguccagggaa

SEQ ID NO: 3760697 - RNA, 20 nt, Human
gcccugguccagggaagcug

SEQ ID NO: 3760698 - RNA, 16 nt, Human
gcccuggucucagcag

SEQ ID NO: 3760699 - RNA, 17 nt, Human
gcccuggucucagcagc

SEQ ID NO: 3760700 - RNA, 17 nt, Human
gcccuggugcugccaca

SEQ ID NO: 3760701 - RNA, 14 nt, Human
gcccugguggagaa

SEQ ID NO: 3760702 - RNA, 18 nt, Human
gcccugguggagaaagca

SEQ ID NO: 3760703 - RNA, 17 nt, Human
gcccugguggcaguggg

SEQ ID NO: 3760704 - RNA, 18 nt, Human
gcccugguggcaguggga

SEQ ID NO: 3760705 - RNA, 23 nt, Human
gcccugguggcagugggagcugc

SEQ ID NO: 3760706 - RNA, 13 nt, Human
gcccugguggccc

SEQ ID NO: 3760707 - RNA, 14 nt, Human
gcccugguggcccu

SEQ ID NO: 3760708 - RNA, 15 nt, Human
gcccugguggcccuc

SEQ ID NO: 3760709 - RNA, 18 nt, Human
gcccugguggcccucucc

SEQ ID NO: 3760710 - RNA, 22 nt, Human
gcccugucagcaugaauuugua

SEQ ID NO: 3760711 - RNA, 15 nt, Human
gcccugucaggaggc

SEQ ID NO: 3760712 - RNA, 18 nt, Human
gcccugucaggaggcaga

SEQ ID NO: 3760713 - RNA, 15 nt, Human
gcccugucccuccca

SEQ ID NO: 3760714 - RNA, 16 nt, Human
gcccugucccucccac

SEQ ID NO: 3760715 - RNA, 18 nt, Human
gcccugucccucccaccu

SEQ ID NO: 3760716 - RNA, 22 nt, Human
gcccugucccucccaccucugu

SEQ ID NO: 3760717 - RNA, 15 nt, Human
gcccuguccugccau

SEQ ID NO: 3760718 - RNA, 16 nt, Human
gcccugucgagacacu

SEQ ID NO: 3760719 - RNA, 17 nt, Human
gcccugucgagacacuu

SEQ ID NO: 3760720 - RNA, 16 nt, Human
gcccugucgggcuuug

SEQ ID NO: 3760721 - RNA, 17 nt, Human
gcccugucgggcuuugu

SEQ ID NO: 3760722 - RNA, 19 nt, Human
gcccugucgggcuuugugu

SEQ ID NO: 3760723 - RNA, 21 nt, Human
gcccuguggaugagcccucag

SEQ ID NO: 3760724 - RNA, 16 nt, Human
gcccugugggccccca

SEQ ID NO: 3760725 - RNA, 13 nt, Human
gcccuguguacuu

SEQ ID NO: 3760726 - RNA, 17 nt, Human
gcccuguucagcuacuc

SEQ ID NO: 3760727 - RNA, 17 nt, Human
gcccuguugugccacag

SEQ ID NO: 3760728 - RNA, 16 nt, Human
gcccuuacacuuacug

SEQ ID NO: 3760729 - RNA, 19 nt, Human
gcccuuagcagggaaacag

SEQ ID NO: 3760730 - RNA, 16 nt, Human
gcccuuagucccccaa

SEQ ID NO: 3760731 - RNA, 20 nt, Human
gcccuuagucccccaacucu

SEQ ID NO: 3760732 - RNA, 16 nt, Human
gcccuuaucugugcuc

SEQ ID NO: 3760733 - RNA, 19 nt, Human
gcccuuaugacugccaaga

SEQ ID NO: 3760734 - RNA, 22 nt, Human
gcccuucacauuuuuuaugggc

SEQ ID NO: 3760735 - RNA, 21 nt, Human
gcccuucagcauccucaguuc

SEQ ID NO: 3760736 - RNA, 23 nt, Human
gcccuuccgcaguguggccaggc

SEQ ID NO: 3760737 - RNA, 15 nt, Human
gcccuuccucuccac

SEQ ID NO: 3760738 - RNA, 22 nt, Human
gcccuuccucuccacccuccca

SEQ ID NO: 3760739 - RNA, 17 nt, Human
gcccuuccucuccacug

SEQ ID NO: 3760740 - RNA, 17 nt, Human
gcccuuccugcugcgca

SEQ ID NO: 3760741 - RNA, 13 nt, Human
gcccuuccuggac

SEQ ID NO: 3760742 - RNA, 15 nt, Human
gcccuuccuggacag

SEQ ID NO: 3760743 - RNA, 17 nt, Human
gcccuuccuggacagcu

SEQ ID NO: 3760744 - RNA, 18 nt, Human
gcccuuccuggacagcug

SEQ ID NO: 3760745 - RNA, 21 nt, Human
gcccuucuauacccacccaga

SEQ ID NO: 3760746 - RNA, 16 nt, Human
gcccuucucuccagcc

SEQ ID NO: 3760747 - RNA, 21 nt, Human
gcccuucucuccagccccugg

SEQ ID NO: 3760748 - RNA, 22 nt, Human
gcccuucucuccagccccugga

SEQ ID NO: 3760749 - RNA, 16 nt, Human
gcccuucuuccccuuc

SEQ ID NO: 3760750 - RNA, 15 nt, Human
gcccuucuugcugcc

SEQ ID NO: 3760751 - RNA, 12 nt, Human
gcccuucuuucu

SEQ ID NO: 3760752 - RNA, 13 nt, Human
gcccuucuuucua

SEQ ID NO: 3760753 - RNA, 18 nt, Human
gcccuugagcuccccaaa

SEQ ID NO: 3760754 - RNA, 15 nt, Human
gcccuugcccaugcu

SEQ ID NO: 3760755 - RNA, 21 nt, Human
gcccuugcccugaccucccag

SEQ ID NO: 3760756 - RNA, 15 nt, Human
gcccuuggagcgugg

SEQ ID NO: 3760757 - RNA, 20 nt, Human
gcccuuggggguccuccucc

SEQ ID NO: 3760758 - RNA, 21 nt, Human
gcccuugucccacucaagcca

SEQ ID NO: 3760759 - RNA, 21 nt, Human
gcccuugucggccccaccagu

SEQ ID NO: 3760760 - RNA, 23 nt, Human
gcccuugugaaucaagggucagg

SEQ ID NO: 3760761 - RNA, 17 nt, Human
gcccuuguuuggggcag

SEQ ID NO: 3760762 - RNA, 19 nt, Human
gcccuuguuuggggcagga

SEQ ID NO: 3760763 - RNA, 20 nt, Human
gcccuuguuuggggcaggag

SEQ ID NO: 3760764 - RNA, 16 nt, Human
gcccuuuccuccucag

SEQ ID NO: 3760765 - RNA, 16 nt, Human
gcccuuucuguaccau

SEQ ID NO: 3760766 - RNA, 13 nt, Human
gcccuuucugugu

SEQ ID NO: 3760767 - RNA, 16 nt, Human
gcccuuugaagccuca

SEQ ID NO: 3760768 - RNA, 13 nt, Human
gcccuuugcuguc

SEQ ID NO: 3760769 - RNA, 14 nt, Human
gcccuuuugucucu

SEQ ID NO: 3760770 - RNA, 14 nt, Human
gcccuuuuucaaua

SEQ ID NO: 3760771 - RNA, 20 nt, Human
gcccuuuuuucugccuccuu

SEQ ID NO: 3760772 - RNA, 13 nt, Human
gccgaaacuggaa

SEQ ID NO: 3760773 - RNA, 22 nt, Human
gccgaagaaggguccuucccuc

SEQ ID NO: 3760774 - RNA, 19 nt, Human
gccgaagcuaacagggaag

SEQ ID NO: 3760775 - RNA, 14 nt, Human
gccgaaugugcagg

SEQ ID NO: 3760776 - RNA, 15 nt, Human
gccgacauugucucc

SEQ ID NO: 3760777 - RNA, 14 nt, Human
gccgaccagagccc

SEQ ID NO: 3760778 - RNA, 12 nt, Human
gccgaccucagc

SEQ ID NO: 3760779 - RNA, 15 nt, Human
gccgaccucagccuu

SEQ ID NO: 3760780 - RNA, 18 nt, Human
gccgacgcuugcacgacc

SEQ ID NO: 3760781 - RNA, 14 nt, Human
gccgacucuggccc

SEQ ID NO: 3760782 - RNA, 16 nt, Human
gccgacucuggcccug

SEQ ID NO: 3760783 - RNA, 17 nt, Human
gccgacucuggcccugg

SEQ ID NO: 3760784 - RNA, 18 nt, Human
gccgacucuggcccuggc

SEQ ID NO: 3760785 - RNA, 20 nt, Human
gccgagaagccagugcggca

SEQ ID NO: 3760786 - RNA, 22 nt, Human
gccgagacauggcuugccacag

SEQ ID NO: 3760787 - RNA, 21 nt, Human
gccgagacucgacucugugcc

SEQ ID NO: 3760788 - RNA, 15 nt, Human
gccgagagccugcuc

SEQ ID NO: 3760789 - RNA, 19 nt, Human
gccgagagccugcuccccc

SEQ ID NO: 3760790 - RNA, 21 nt, Human
gccgagaguccaucagccucc

SEQ ID NO: 3760791 - RNA, 21 nt, Human
gccgagaucacgccacugcac

SEQ ID NO: 3760792 - RNA, 18 nt, Human
gccgagauugcaccacug

SEQ ID NO: 3760793 - RNA, 20 nt, Human
gccgagcaaccguggcccuu

SEQ ID NO: 3760794 - RNA, 15 nt, Human
gccgagccgggccug

SEQ ID NO: 3760795 - RNA, 16 nt, Human
gccgagccgggccugg

SEQ ID NO: 3760796 - RNA, 17 nt, Human
gccgagccgggccuggg

SEQ ID NO: 3760797 - RNA, 19 nt, Human
gccgagccgggccuggggc

SEQ ID NO: 3760798 - RNA, 18 nt, Human
gccgaggagccaggcaac

SEQ ID NO: 3760799 - RNA, 18 nt, Human
gccgaggaggugccugga

SEQ ID NO: 3760800 - RNA, 20 nt, Human
gccgaggguccuggcuccug

SEQ ID NO: 3760801 - RNA, 14 nt, Human
gccgaguccaagcu

SEQ ID NO: 3760802 - RNA, 18 nt, Human
gccgaguccaagcuggga

SEQ ID NO: 3760803 - RNA, 22 nt, Human
gccgauagagggacggccaaga

SEQ ID NO: 3760804 - RNA, 21 nt, Human
gccgauggagacaccaaccga

SEQ ID NO: 3760805 - RNA, 16 nt, Human
gccgcaauacaggaac

SEQ ID NO: 3760806 - RNA, 19 nt, Human
gccgcaccauugaacugua

SEQ ID NO: 3760807 - RNA, 15 nt, Human
gccgcaccccagagu

SEQ ID NO: 3760808 - RNA, 16 nt, Human
gccgcaccccagagug

SEQ ID NO: 3760809 - RNA, 11 nt, Human
gccgcagcccu

SEQ ID NO: 3760810 - RNA, 12 nt, Human
gccgcagcccug

SEQ ID NO: 3760811 - RNA, 15 nt, Human
gccgcagcccugcag

SEQ ID NO: 3760812 - RNA, 17 nt, Human
gccgcagcccugcagag

SEQ ID NO: 3760813 - RNA, 20 nt, Human
gccgcagcccugcagagggc

SEQ ID NO: 3760814 - RNA, 17 nt, Human
gccgcagccucccucug

SEQ ID NO: 3760815 - RNA, 15 nt, Human
gccgcaucucacagc

SEQ ID NO: 3760816 - RNA, 23 nt, Human
gccucucugcaggucccuaauaa

SEQ ID NO: 3760817 - RNA, 17 nt, Human
gccucucuggccuccca

SEQ ID NO: 3760818 - RNA, 15 nt, Human
gccucucuuccuauc

SEQ ID NO: 3760819 - RNA, 17 nt, Human
gccucucuuccuauccc

SEQ ID NO: 3760820 - RNA, 22 nt, Human
gccucucuuccuaucccauccc

SEQ ID NO: 3760821 - RNA, 16 nt, Human
gccucugaaaagugug

SEQ ID NO: 3760822 - RNA, 16 nt, Human
gccucugacacacagc

SEQ ID NO: 3760823 - RNA, 17 nt, Human
gccucugacacacagcu

SEQ ID NO: 3760824 - RNA, 19 nt, Human
gccucugacacacagcucu

SEQ ID NO: 3760825 - RNA, 21 nt, Human
gccucugaccccuccucacug

SEQ ID NO: 3760826 - RNA, 14 nt, Human
gccucugaggccag

SEQ ID NO: 3760827 - RNA, 15 nt, Human
gccucugaggccagc

SEQ ID NO: 3760828 - RNA, 17 nt, Human
gccucugaggccagccu

SEQ ID NO: 3760829 - RNA, 19 nt, Human
gccucugaggccagccugg

SEQ ID NO: 3760830 - RNA, 23 nt, Human
gccucugaggccagccuggccuc

SEQ ID NO: 3760831 - RNA, 20 nt, Human
gccucugagggaaagcccag

SEQ ID NO: 3760832 - RNA, 13 nt, Human
gccucugauaugg

SEQ ID NO: 3760833 - RNA, 16 nt, Human
gccucugccacugacu

SEQ ID NO: 3760834 - RNA, 15 nt, Human
gccucuggaaagcaa

SEQ ID NO: 3760835 - RNA, 17 nt, Human
gccucuggaggccucug

SEQ ID NO: 3760836 - RNA, 19 nt, Human
gccucuggaggccucuggg

SEQ ID NO: 3760837 - RNA, 13 nt, Human
gccucuggcuaga

SEQ ID NO: 3760838 - RNA, 18 nt, Human
gccucuggcuagaggcca

SEQ ID NO: 3760839 - RNA, 21 nt, Human
gccucuggcuagaggccagcc

SEQ ID NO: 3760840 - RNA, 17 nt, Human
gccucugggggguggcc

SEQ ID NO: 3760841 - RNA, 20 nt, Human
gccucugggggguggccagg

SEQ ID NO: 3760842 - RNA, 21 nt, Human
gccucugggggguggccaggc

SEQ ID NO: 3760843 - RNA, 13 nt, Human
gccucugggucag

SEQ ID NO: 3760844 - RNA, 21 nt, Human
gccucugucauaucuucacaa

SEQ ID NO: 3760845 - RNA, 15 nt, Human
gccucuguccccuuc

SEQ ID NO: 3760846 - RNA, 19 nt, Human
gccucuguccccuucucuc

SEQ ID NO: 3760847 - RNA, 16 nt, Human
gccucugucuagcaug

SEQ ID NO: 3760848 - RNA, 12 nt, Human
gccucugugccu

SEQ ID NO: 3760849 - RNA, 11 nt, Human
gccucugugcu

SEQ ID NO: 3760850 - RNA, 14 nt, Human
gccucugugcugug

SEQ ID NO: 3760851 - RNA, 21 nt, Human
gccucuguggagccccagcau

SEQ ID NO: 3760852 - RNA, 15 nt, Human
gccucugugucacug

SEQ ID NO: 3760853 - RNA, 20 nt, Human
gccucugugucacuggcugc

SEQ ID NO: 3760854 - RNA, 21 nt, Human
gccucuguguccuucccugca

SEQ ID NO: 3760855 - RNA, 19 nt, Human
gccucuuaaauaaaccuuu

SEQ ID NO: 3760856 - RNA, 15 nt, Human
gccucuuagaugcag

SEQ ID NO: 3760857 - RNA, 18 nt, Human
gccucuuaugggcugggu

SEQ ID NO: 3760858 - RNA, 21 nt, Human
gccucuuaugggcuggguucu

SEQ ID NO: 3760859 - RNA, 16 nt, Human
gccucuucccccugcu

SEQ ID NO: 3760860 - RNA, 13 nt, Human
gccucuucccucu

SEQ ID NO: 3760861 - RNA, 17 nt, Human
gccucuucuagagccgu

SEQ ID NO: 3760862 - RNA, 15 nt, Human
gccucuucugagcuu

SEQ ID NO: 3760863 - RNA, 16 nt, Human
gccucuucugucccug

SEQ ID NO: 3760864 - RNA, 13 nt, Human
gccucuugaccag

SEQ ID NO: 3760865 - RNA, 14 nt, Human
gccucuugaccagg

SEQ ID NO: 3760866 - RNA, 16 nt, Human
gccucuugaccaggcu

SEQ ID NO: 3760867 - RNA, 17 nt, Human
gccucuugaccaggcug

SEQ ID NO: 3760868 - RNA, 19 nt, Human
gccucuugagcaguggcug

SEQ ID NO: 3760869 - RNA, 21 nt, Human
gccucuugagcaguggcuggu

SEQ ID NO: 3760870 - RNA, 20 nt, Human
gccucuugcggucccuucuu

SEQ ID NO: 3760871 - RNA, 17 nt, Human
gccucuuggaccucugc

SEQ ID NO: 3760872 - RNA, 18 nt, Human
gccucuuggaccucugcu

SEQ ID NO: 3760873 - RNA, 14 nt, Human
gccucuuggguuca

SEQ ID NO: 3760874 - RNA, 16 nt, Human
gccucuuguaaagacu

SEQ ID NO: 3760875 - RNA, 23 nt, Human
gccucuugucuuccuauuucaga

SEQ ID NO: 3760876 - RNA, 23 nt, Human
gccucuuucaagcagucgugccu

SEQ ID NO: 3760877 - RNA, 23 nt, Human
gccucuuucauccacuagugcaa

SEQ ID NO: 3760878 - RNA, 23 nt, Human
gccucuuugucuaaaacaauaaa

SEQ ID NO: 3760879 - RNA, 16 nt, Human
gccucuuuuaccugcu

SEQ ID NO: 3760880 - RNA, 19 nt, Human
gccucuuuuaccugcugcu

SEQ ID NO: 3760881 - RNA, 18 nt, Human
gccucuuuucucugugcu

SEQ ID NO: 3760882 - RNA, 14 nt, Human
gccugaaaggagcc

SEQ ID NO: 3760883 - RNA, 19 nt, Human
gccugaaccccagggcugu

SEQ ID NO: 3760884 - RNA, 21 nt, Human
gccugaaggaggugagagaag

SEQ ID NO: 3760885 - RNA, 11 nt, Human
gccugaauaaa

SEQ ID NO: 3760886 - RNA, 17 nt, Human
gccugaaucaugagccu

SEQ ID NO: 3760887 - RNA, 19 nt, Human
gccugaaucaugagccugc

SEQ ID NO: 3760888 - RNA, 23 nt, Human
gccugaaucaugagccugcugga

SEQ ID NO: 3760889 - RNA, 20 nt, Human
gccugacaaccacuggucug

SEQ ID NO: 3760890 - RNA, 15 nt, Human
gccugacacacuaac

SEQ ID NO: 3760891 - RNA, 15 nt, Human
gccugaccaaacagc

SEQ ID NO: 3760892 - RNA, 23 nt, Human
gccugacccuacuucuuuugcuc

SEQ ID NO: 3760893 - RNA, 15 nt, Human
gccugaccucccccu

SEQ ID NO: 3760894 - RNA, 20 nt, Human
gccugaccucccccuccuuc

SEQ ID NO: 3760895 - RNA, 15 nt, Human
gccugaccuuccuuc

SEQ ID NO: 3760896 - RNA, 20 nt, Human
gccugacuagggagccaugu

SEQ ID NO: 3760897 - RNA, 15 nt, Human
gccugacucccccag

SEQ ID NO: 3760898 - RNA, 21 nt, Human
gccugacucccccaguccccu

SEQ ID NO: 3760899 - RNA, 20 nt, Human
gccugacugccaagccaugg

SEQ ID NO: 3760900 - RNA, 20 nt, Human
gccugagagaauuggcucaa

SEQ ID NO: 3760901 - RNA, 16 nt, Human
gccugagaggcaggca

SEQ ID NO: 3760902 - RNA, 20 nt, Human
gccugagagucagcucucug

SEQ ID NO: 3760903 - RNA, 18 nt, Human
gccugagcaacucuugau

SEQ ID NO: 3760904 - RNA, 23 nt, Human
gccugagcaccucccagccccug

SEQ ID NO: 3760905 - RNA, 19 nt, Human
gccugagcaguccuuggcc

SEQ ID NO: 3760906 - RNA, 13 nt, Human
gccugagcccagg

SEQ ID NO: 3760907 - RNA, 15 nt, Human
gccugagcccaggga

SEQ ID NO: 3760908 - RNA, 17 nt, Human
gccugagcccagggagg

SEQ ID NO: 3760909 - RNA, 19 nt, Human
gccugagcccagggaggcc

SEQ ID NO: 3760910 - RNA, 20 nt, Human
gccugagcccagggaggccg

SEQ ID NO: 3760911 - RNA, 22 nt, Human
gccugagcccuacucccugcag

SEQ ID NO: 3760912 - RNA, 23 nt, Human
gccugagcgcuccugccgcagag

SEQ ID NO: 3760913 - RNA, 17 nt, Human
gccugagcucacucggc

SEQ ID NO: 3760914 - RNA, 21 nt, Human
gccugaggagcccagcgucca

SEQ ID NO: 3760915 - RNA, 14 nt, Human
gccugaggcugaga

SEQ ID NO: 3760916 - RNA, 14 nt, Human
gccugaggcuggga

SEQ ID NO: 3760917 - RNA, 10 nt, Human
gccugaggga

SEQ ID NO: 3760918 - RNA, 15 nt, Human
gccugagggccccuc

SEQ ID NO: 3760919 - RNA, 18 nt, Human
gccugagggccccucugc

SEQ ID NO: 3760920 - RNA, 12 nt, Human
gccugagggugg

SEQ ID NO: 3760921 - RNA, 16 nt, Human
gccugagguuacugga

SEQ ID NO: 3760922 - RNA, 16 nt, Human
gccugaguagaaaggc

SEQ ID NO: 3760923 - RNA, 20 nt, Human
gccugagucgugaccugcua

SEQ ID NO: 3760924 - RNA, 23 nt, Human
gccugagucgugaccugcuaggc

SEQ ID NO: 3760925 - RNA, 22 nt, Human
gccugagugagaggggaggcca

SEQ ID NO: 3760926 - RNA, 15 nt, Human
gccugagugccuggc

SEQ ID NO: 3760927 - RNA, 14 nt, Human
gccugauauaaaug

SEQ ID NO: 3760928 - RNA, 20 nt, Human
gccugaucagaccacggcuc

SEQ ID NO: 3760929 - RNA, 16 nt, Human
gccugaucucuuccug

SEQ ID NO: 3760930 - RNA, 13 nt, Human
gccugaucugccc

SEQ ID NO: 3760931 - RNA, 19 nt, Human
gccugaugacaauaaagcu

SEQ ID NO: 3760932 - RNA, 17 nt, Human
gccugaugacagagcga

SEQ ID NO: 3760933 - RNA, 19 nt, Human
gccugaugagauuuuuaaa

SEQ ID NO: 3760934 - RNA, 17 nt, Human
gccugaugcucccuccc

SEQ ID NO: 3760935 - RNA, 16 nt, Human
gccugauuaaagaaug

SEQ ID NO: 3760936 - RNA, 20 nt, Human
gccugauucggcugucucag

SEQ ID NO: 3760937 - RNA, 16 nt, Human
gccugauuuguuccuu

SEQ ID NO: 3760938 - RNA, 21 nt, Human
gccugcaaacucacugcucaa

SEQ ID NO: 3760939 - RNA, 18 nt, Human
gccugcaaucugagccag

SEQ ID NO: 3760940 - RNA, 11 nt, Human
gccugcacaca

SEQ ID NO: 3760941 - RNA, 17 nt, Human
gccugcacuccucaggg

SEQ ID NO: 3760942 - RNA, 19 nt, Human
gccugcacuugggggcuca

SEQ ID NO: 3760943 - RNA, 21 nt, Human
gccugcagaaguaagccucau

SEQ ID NO: 3760944 - RNA, 20 nt, Human
gccugcagagcugcgggcug

SEQ ID NO: 3760945 - RNA, 20 nt, Human
gccugcagaggucugugcug

SEQ ID NO: 3760946 - RNA, 13 nt, Human
gccugcaggaccu

SEQ ID NO: 3760947 - RNA, 17 nt, Human
gccugcaggaccucgug

SEQ ID NO: 3760948 - RNA, 18 nt, Human
gccugcaggaccucgugc

SEQ ID NO: 3760949 - RNA, 20 nt, Human
gccugcaggaccugccugua

SEQ ID NO: 3760950 - RNA, 16 nt, Human
gccugcaggaucucac

SEQ ID NO: 3760951 - RNA, 23 nt, Human
gccugcaggaucucaccaggcag

SEQ ID NO: 3760952 - RNA, 24 nt, Human
gccugcaggaucucaccaggcagc

SEQ ID NO: 3760953 - RNA, 14 nt, Human
gccugcagggccau

SEQ ID NO: 3760954 - RNA, 18 nt, Human
gccugcagggccauggcu

SEQ ID NO: 3760955 - RNA, 22 nt, Human
gccugcaggguggugcugggac

SEQ ID NO: 3760956 - RNA, 24 nt, Human
gccugcaguuaauuagcauucugg

SEQ ID NO: 3760957 - RNA, 16 nt, Human
gccugcauugagcuug

SEQ ID NO: 3760958 - RNA, 21 nt, Human
gccugcauuuccucgcagccu

SEQ ID NO: 3760959 - RNA, 15 nt, Human
gccugccaccuggac

SEQ ID NO: 3760960 - RNA, 18 nt, Human
gccugccaccuggacccc

SEQ ID NO: 3760961 - RNA, 14 nt, Human
gccugccagcugca

SEQ ID NO: 3760962 - RNA, 18 nt, Human
gccugccagcugcacuga

SEQ ID NO: 3760963 - RNA, 18 nt, Human
gccugccaggaggaccca

SEQ ID NO: 3760964 - RNA, 23 nt, Human
gccugccaggaggacccagggcu

SEQ ID NO: 3760965 - RNA, 22 nt, Human
cuguccacccgccccugccccu

SEQ ID NO: 3760966 - RNA, 15 nt, Human
cuguccagacagccu

SEQ ID NO: 3760967 - RNA, 11 nt, Human
cuguccagaga

SEQ ID NO: 3760968 - RNA, 17 nt, Human
cuguccagcagucacuu

SEQ ID NO: 3760969 - RNA, 15 nt, Human
cuguccagccugggc

SEQ ID NO: 3760970 - RNA, 18 nt, Human
cuguccagccugggcagc

SEQ ID NO: 3760971 - RNA, 14 nt, Human
cuguccagcuccaa

SEQ ID NO: 3760972 - RNA, 17 nt, Human
cuguccagcuccaaccu

SEQ ID NO: 3760973 - RNA, 18 nt, Human
cuguccagcuccaaccug

SEQ ID NO: 3760974 - RNA, 18 nt, Human
cuguccaggcacugcugc

SEQ ID NO: 3760975 - RNA, 20 nt, Human
cuguccaggcacugcugccc

SEQ ID NO: 3760976 - RNA, 12 nt, Human
cuguccaggcuc

SEQ ID NO: 3760977 - RNA, 20 nt, Human
cuguccagggcccugagcuc

SEQ ID NO: 3760978 - RNA, 16 nt, Human
cuguccaguucccaga

SEQ ID NO: 3760979 - RNA, 18 nt, Human
cuguccaguucccagaag

SEQ ID NO: 3760980 - RNA, 20 nt, Human
cuguccaguucccagaaggc

SEQ ID NO: 3760981 - RNA, 22 nt, Human
cuguccauauuuauagguaccc

SEQ ID NO: 3760982 - RNA, 18 nt, Human
cuguccaucagccaggac

SEQ ID NO: 3760983 - RNA, 23 nt, Human
cuguccaucugcccgccugccca

SEQ ID NO: 3760984 - RNA, 16 nt, Human
cuguccaugcuucuca

SEQ ID NO: 3760985 - RNA, 21 nt, Human
cuguccauuuauccacaggaa

SEQ ID NO: 3760986 - RNA, 19 nt, Human
cugucccaccaugcagugc

SEQ ID NO: 3760987 - RNA, 14 nt, Human
cugucccaccccca

SEQ ID NO: 3760988 - RNA, 16 nt, Human
cugucccacccccacc

SEQ ID NO: 3760989 - RNA, 15 nt, Human
cugucccaccucuuc

SEQ ID NO: 3760990 - RNA, 18 nt, Human
cugucccauagucccugc

SEQ ID NO: 3760991 - RNA, 19 nt, Human
cugucccauagucccugcc

SEQ ID NO: 3760992 - RNA, 21 nt, Human
cugucccaucuggucauuugg

SEQ ID NO: 3760993 - RNA, 18 nt, Human
cugucccauggacacucc

SEQ ID NO: 3760994 - RNA, 13 nt, Human
cugucccauuccc

SEQ ID NO: 3760995 - RNA, 16 nt, Human
cugucccauucccugg

SEQ ID NO: 3760996 - RNA, 23 nt, Human
cugucccauucccugggaucugg

SEQ ID NO: 3760997 - RNA, 12 nt, Human
cuguccccaccc

SEQ ID NO: 3760998 - RNA, 18 nt, Human
cuguccccacccuccacu

SEQ ID NO: 3760999 - RNA, 13 nt, Human
cugucccccagcu

SEQ ID NO: 3761000 - RNA, 15 nt, Human
cugucccccagcucu

SEQ ID NO: 3761001 - RNA, 17 nt, Human
cugucccccagcucugg

SEQ ID NO: 3761002 - RNA, 19 nt, Human
cuguccccgcacugggcuu

SEQ ID NO: 3761003 - RNA, 14 nt, Human
cuguccccucagcu

SEQ ID NO: 3761004 - RNA, 15 nt, Human
cuguccccucagcuc

SEQ ID NO: 3761005 - RNA, 16 nt, Human
cuguccccucuugccc

SEQ ID NO: 3761006 - RNA, 18 nt, Human
cuguccccucuugcccca

SEQ ID NO: 3761007 - RNA, 19 nt, Human
cuguccccucuugccccaa

SEQ ID NO: 3761008 - RNA, 20 nt, Human
cuguccccucuugccccaac

SEQ ID NO: 3761009 - RNA, 14 nt, Human
cuguccccuucucu

SEQ ID NO: 3761010 - RNA, 20 nt, Human
cuguccccuucucucaucuc

SEQ ID NO: 3761011 - RNA, 21 nt, Human
cuguccccuucucucaucucu

SEQ ID NO: 3761012 - RNA, 22 nt, Human
cuguccccuucucucaucucuu

SEQ ID NO: 3761013 - RNA, 17 nt, Human
cugucccgggguccugu

SEQ ID NO: 3761014 - RNA, 21 nt, Human
cugucccgggguccuguggca

SEQ ID NO: 3761015 - RNA, 13 nt, Human
cugucccucacag

SEQ ID NO: 3761016 - RNA, 13 nt, Human
cugucccucccac

SEQ ID NO: 3761017 - RNA, 17 nt, Human
cugucccucccaccucu

SEQ ID NO: 3761018 - RNA, 15 nt, Human
cugucccucccccuu

SEQ ID NO: 3761019 - RNA, 16 nt, Human
cugucccugcccuucu

SEQ ID NO: 3761020 - RNA, 17 nt, Human
cugucccuggccaucuc

SEQ ID NO: 3761021 - RNA, 18 nt, Human
cugucccuugccccccug

SEQ ID NO: 3761022 - RNA, 21 nt, Human
cugucccuugccccccuggcc

SEQ ID NO: 3761023 - RNA, 16 nt, Human
cugucccuugccucaa

SEQ ID NO: 3761024 - RNA, 19 nt, Human
cugucccuuggaacucuug

SEQ ID NO: 3761025 - RNA, 13 nt, Human
cugucccuuggag

SEQ ID NO: 3761026 - RNA, 15 nt, Human
cuguccgagcuuuga

SEQ ID NO: 3761027 - RNA, 20 nt, Human
cuguccuaaggaaccuuccu

SEQ ID NO: 3761028 - RNA, 16 nt, Human
cuguccuacucugugu

SEQ ID NO: 3761029 - RNA, 20 nt, Human
cuguccuacucugugucagg

SEQ ID NO: 3761030 - RNA, 16 nt, Human
cuguccuaugaaugcu

SEQ ID NO: 3761031 - RNA, 16 nt, Human
cuguccucacugcucc

SEQ ID NO: 3761032 - RNA, 21 nt, Human
cuguccucacugcucccugaa

SEQ ID NO: 3761033 - RNA, 14 nt, Human
cuguccucagccuu

SEQ ID NO: 3761034 - RNA, 19 nt, Human
cuguccucccgagcuccuc

SEQ ID NO: 3761035 - RNA, 14 nt, Human
cuguccucccucug

SEQ ID NO: 3761036 - RNA, 18 nt, Human
cuguccucuccccuccag

SEQ ID NO: 3761037 - RNA, 20 nt, Human
cuguccucucuggcugggga

SEQ ID NO: 3761038 - RNA, 21 nt, Human
cuguccucuuucagaaaacag

SEQ ID NO: 3761039 - RNA, 16 nt, Human
cuguccucuuucagcu

SEQ ID NO: 3761040 - RNA, 17 nt, Human
cuguccucuuucagcuc

SEQ ID NO: 3761041 - RNA, 18 nt, Human
cuguccugaccugucuca

SEQ ID NO: 3761042 - RNA, 23 nt, Human
cuguccugcagcaaacacuccac

SEQ ID NO: 3761043 - RNA, 11 nt, Human
cuguccugccu

SEQ ID NO: 3761044 - RNA, 13 nt, Human
cuguccugcucca

SEQ ID NO: 3761045 - RNA, 14 nt, Human
cuguccugcuccac

SEQ ID NO: 3761046 - RNA, 15 nt, Human
cuguccugcuccaca

SEQ ID NO: 3761047 - RNA, 13 nt, Human
cuguccugcuucu

SEQ ID NO: 3761048 - RNA, 22 nt, Human
cuguccugggcgcccuggaagc

SEQ ID NO: 3761049 - RNA, 14 nt, Human
cuguccugguggua

SEQ ID NO: 3761050 - RNA, 20 nt, Human
cuguccuggugguauuuuca

SEQ ID NO: 3761051 - RNA, 22 nt, Human
cuguccuguacauugugggaug

SEQ ID NO: 3761052 - RNA, 23 nt, Human
cuguccugucaucaucauggcca

SEQ ID NO: 3761053 - RNA, 16 nt, Human
cuguccuguccugcuc

SEQ ID NO: 3761054 - RNA, 20 nt, Human
cuguccugugagguuuccca

SEQ ID NO: 3761055 - RNA, 18 nt, Human
cuguccuguguagugauu

SEQ ID NO: 3761056 - RNA, 20 nt, Human
cuguccuguugauuaauuuc

SEQ ID NO: 3761057 - RNA, 12 nt, Human
cuguccuuaccc

SEQ ID NO: 3761058 - RNA, 14 nt, Human
cuguccuucagaug

SEQ ID NO: 3761059 - RNA, 15 nt, Human
cuguccuucucucac

SEQ ID NO: 3761060 - RNA, 20 nt, Human
cuguccuucucucaccuccu

SEQ ID NO: 3761061 - RNA, 20 nt, Human
cuguccuugaaggacuaaua

SEQ ID NO: 3761062 - RNA, 16 nt, Human
cuguccuugcacacuc

SEQ ID NO: 3761063 - RNA, 13 nt, Human
cuguccuugcccu

SEQ ID NO: 3761064 - RNA, 23 nt, Human
cuguccuuucuagagcacugcca

SEQ ID NO: 3761065 - RNA, 18 nt, Human
cuguccuuuuuccucucc

SEQ ID NO: 3761066 - RNA, 19 nt, Human
cugucgagaaacagccugu

SEQ ID NO: 3761067 - RNA, 23 nt, Human
cugucgagccugggggcuggagc

SEQ ID NO: 3761068 - RNA, 17 nt, Human
cugucgauuagacugga

SEQ ID NO: 3761069 - RNA, 19 nt, Human
cugucgauuagacuggaca

SEQ ID NO: 3761070 - RNA, 20 nt, Human
cugucgauuagacuggacag

SEQ ID NO: 3761071 - RNA, 15 nt, Human
cugucgcccagucug

SEQ ID NO: 3761072 - RNA, 16 nt, Human
cugucgcccagucugg

SEQ ID NO: 3761073 - RNA, 17 nt, Human
cugucgccuuagcaugu

SEQ ID NO: 3761074 - RNA, 18 nt, Human
cugucgccuuagcauguu

SEQ ID NO: 3761075 - RNA, 16 nt, Human
cugucgcucucaguuc

SEQ ID NO: 3761076 - RNA, 14 nt, Human
cugucgcugcuucg

SEQ ID NO: 3761077 - RNA, 17 nt, Human
cugucgcugcuucgugg

SEQ ID NO: 3761078 - RNA, 23 nt, Human
cugucggagcccugucuccucuc

SEQ ID NO: 3761079 - RNA, 13 nt, Human
cugucggaggaaa

SEQ ID NO: 3761080 - RNA, 17 nt, Human
cugucggaggaaagaca

SEQ ID NO: 3761081 - RNA, 15 nt, Human
cugucggugggaccu

SEQ ID NO: 3761082 - RNA, 16 nt, Human
cugucuaaaaaccaga

SEQ ID NO: 3761083 - RNA, 13 nt, Human
cugucuaacugcu

SEQ ID NO: 3761084 - RNA, 22 nt, Human
cugucuaaugaaaccugugucu

SEQ ID NO: 3761085 - RNA, 15 nt, Human
cugucuaccaucucc

SEQ ID NO: 3761086 - RNA, 18 nt, Human
cugucuacuugcucaggu

SEQ ID NO: 3761087 - RNA, 20 nt, Human
cugucuacuugcucagguac

SEQ ID NO: 3761088 - RNA, 13 nt, Human
cugucuagagagg

SEQ ID NO: 3761089 - RNA, 16 nt, Human
cugucuagagagggag

SEQ ID NO: 3761090 - RNA, 14 nt, Human
cugucuagcaugcc

SEQ ID NO: 3761091 - RNA, 23 nt, Human
cugucuaggucaguacccaccug

SEQ ID NO: 3761092 - RNA, 13 nt, Human
cugucucaaaaaa

SEQ ID NO: 3761093 - RNA, 21 nt, Human
cugucucaagagggcacuggu

SEQ ID NO: 3761094 - RNA, 22 nt, Human
cugucucaagagggcacuggug

SEQ ID NO: 3761095 - RNA, 23 nt, Human
cugucucaagagggcacuggugg

SEQ ID NO: 3761096 - RNA, 12 nt, Human
cugucucaccug

SEQ ID NO: 3761097 - RNA, 12 nt, Human
cugucucagccu

SEQ ID NO: 3761098 - RNA, 14 nt, Human
cugucucagccucc

SEQ ID NO: 3761099 - RNA, 15 nt, Human
cugucucagccuccc

SEQ ID NO: 3761100 - RNA, 14 nt, Human
cugucucaucccca

SEQ ID NO: 3761101 - RNA, 17 nt, Human
cugucucauccuccugg

SEQ ID NO: 3761102 - RNA, 15 nt, Human
cugucuccacugugc

SEQ ID NO: 3761103 - RNA, 12 nt, Human
cugucuccagac

SEQ ID NO: 3761104 - RNA, 15 nt, Human
cugucuccagacccc

SEQ ID NO: 3761105 - RNA, 16 nt, Human
cugucuccagaccccc

SEQ ID NO: 3761106 - RNA, 19 nt, Human
cugucuccuaccucugcuc

SEQ ID NO: 3761107 - RNA, 17 nt, Human
cugucuccucucucugu

SEQ ID NO: 3761108 - RNA, 12 nt, Human
cugucuccuggc

SEQ ID NO: 3761109 - RNA, 18 nt, Human
cugucucgagcgcccugc

SEQ ID NO: 3761110 - RNA, 20 nt, Human
cugucucgagcgcccugcag

SEQ ID NO: 3761111 - RNA, 21 nt, Human
cugucucgagcgcccugcaga

SEQ ID NO: 3761112 - RNA, 17 nt, Human
cugucucuagccacuuu

SEQ ID NO: 3761113 - RNA, 11 nt, Human
cugucucucuc

SEQ ID NO: 3761114 - RNA, 21 nt, Human
cugucucuuaaaaaaauaaaa

SEQ ID NO: 3761115 - RNA, 15 nt, Human
gccgcaucuucucca

SEQ ID NO: 3761116 - RNA, 20 nt, Human
gccgccaggaccgccaaaga

SEQ ID NO: 3761117 - RNA, 23 nt, Human
gccgcccaaggccuuccccuggc

SEQ ID NO: 3761118 - RNA, 16 nt, Human
gccgcccccuccugaa

SEQ ID NO: 3761119 - RNA, 17 nt, Human
gccgcccccugcccccc

SEQ ID NO: 3761120 - RNA, 16 nt, Human
gccgcccgggcccaga

SEQ ID NO: 3761121 - RNA, 18 nt, Human
gccgcccgggcccagagg

SEQ ID NO: 3761122 - RNA, 24 nt, Human
gccgccgccucgcccaccgcaugc

SEQ ID NO: 3761123 - RNA, 23 nt, Human
gccgccgcuagguagagucugag

SEQ ID NO: 3761124 - RNA, 22 nt, Human
gccgccggcaauaaaagcccag

SEQ ID NO: 3761125 - RNA, 14 nt, Human
gccgccucaccccc

SEQ ID NO: 3761126 - RNA, 16 nt, Human
gccgccucacccccuc

SEQ ID NO: 3761127 - RNA, 13 nt, Human
gccgccucccagc

SEQ ID NO: 3761128 - RNA, 14 nt, Human
gccgccucccagcc

SEQ ID NO: 3761129 - RNA, 16 nt, Human
gccgccucccagccug

SEQ ID NO: 3761130 - RNA, 19 nt, Human
gccgccuccgggaccccca

SEQ ID NO: 3761131 - RNA, 23 nt, Human
gccgccuccgggacccccaggac

SEQ ID NO: 3761132 - RNA, 15 nt, Human
gccgccugguacuca

SEQ ID NO: 3761133 - RNA, 18 nt, Human
gccgccugguacucaagc

SEQ ID NO: 3761134 - RNA, 15 nt, Human
gccgccuuaagcuga

SEQ ID NO: 3761135 - RNA, 17 nt, Human
gccgccuuaagcugauc

SEQ ID NO: 3761136 - RNA, 15 nt, Human
gccgccuucacagca

SEQ ID NO: 3761137 - RNA, 22 nt, Human
gccgccuuccuugaccuuccuc

SEQ ID NO: 3761138 - RNA, 18 nt, Human
gccgcgcguccagcugcc

SEQ ID NO: 3761139 - RNA, 17 nt, Human
gccgcguuuagaccaag

SEQ ID NO: 3761140 - RNA, 19 nt, Human
gccgcguuuagaccaagga

SEQ ID NO: 3761141 - RNA, 15 nt, Human
gccgcuaccucccuc

SEQ ID NO: 3761142 - RNA, 23 nt, Human
gccgcuagaugggcauggggugg

SEQ ID NO: 3761143 - RNA, 23 nt, Human
gccgcuagguagagucugagggc

SEQ ID NO: 3761144 - RNA, 15 nt, Human
gccgcuccugucugc

SEQ ID NO: 3761145 - RNA, 20 nt, Human
gccgcuccugucugccagcc

SEQ ID NO: 3761146 - RNA, 21 nt, Human
gccgcucggaggccccaaagg

SEQ ID NO: 3761147 - RNA, 16 nt, Human
gccgcucuccugccac

SEQ ID NO: 3761148 - RNA, 15 nt, Human
gccgcugagcgagga

SEQ ID NO: 3761149 - RNA, 23 nt, Human
gccgcugugagccccugguccug

SEQ ID NO: 3761150 - RNA, 17 nt, Human
gccgcuguucacccaca

SEQ ID NO: 3761151 - RNA, 15 nt, Human
gccggagucagugcc

SEQ ID NO: 3761152 - RNA, 16 nt, Human
gccggaguccacuccc

SEQ ID NO: 3761153 - RNA, 21 nt, Human
gccggcaaaacuuuggcacug

SEQ ID NO: 3761154 - RNA, 18 nt, Human
gccggcaaccccaguucu

SEQ ID NO: 3761155 - RNA, 23 nt, Human
gccggcaaccccaguucugcucc

SEQ ID NO: 3761156 - RNA, 20 nt, Human
gccggcaauaaaagcccagg

SEQ ID NO: 3761157 - RNA, 23 nt, Human
gccggcaauaaaagcccaggagc

SEQ ID NO: 3761158 - RNA, 22 nt, Human
gccggcacccacaagugccacu

SEQ ID NO: 3761159 - RNA, 14 nt, Human
gccggcagccccag

SEQ ID NO: 3761160 - RNA, 18 nt, Human
gccggcagccccagccug

SEQ ID NO: 3761161 - RNA, 12 nt, Human
gccggccagcca

SEQ ID NO: 3761162 - RNA, 15 nt, Human
gccggccagccagcc

SEQ ID NO: 3761163 - RNA, 14 nt, Human
gccggccccaggcu

SEQ ID NO: 3761164 - RNA, 20 nt, Human
gccggcccuggggcuaggcu

SEQ ID NO: 3761165 - RNA, 13 nt, Human
gccggcccugugu

SEQ ID NO: 3761166 - RNA, 14 nt, Human
gccggcccugugug

SEQ ID NO: 3761167 - RNA, 18 nt, Human
gccggcccugugugcagg

SEQ ID NO: 3761168 - RNA, 15 nt, Human
gccggccucucuggc

SEQ ID NO: 3761169 - RNA, 16 nt, Human
gccggccucucuggcc

SEQ ID NO: 3761170 - RNA, 19 nt, Human
gccggccucucuggccucc

SEQ ID NO: 3761171 - RNA, 23 nt, Human
gccggccucucuggccucccacc

SEQ ID NO: 3761172 - RNA, 18 nt, Human
gccggcgagcccugugga

SEQ ID NO: 3761173 - RNA, 13 nt, Human
gccggcuccuugg

SEQ ID NO: 3761174 - RNA, 16 nt, Human
gccggcugugcucaga

SEQ ID NO: 3761175 - RNA, 17 nt, Human
gccggcugugcucagag

SEQ ID NO: 3761176 - RNA, 16 nt, Human
gccgggacccagggcc

SEQ ID NO: 3761177 - RNA, 19 nt, Human
gccgggaccccgagccugg

SEQ ID NO: 3761178 - RNA, 13 nt, Human
gccgggcacagcu

SEQ ID NO: 3761179 - RNA, 16 nt, Human
gccgggcacagcugug

SEQ ID NO: 3761180 - RNA, 14 nt, Human
gccgggcagagcac

SEQ ID NO: 3761181 - RNA, 13 nt, Human
gccgggcagaggg

SEQ ID NO: 3761182 - RNA, 12 nt, Human
gccgggccccug

SEQ ID NO: 3761183 - RNA, 17 nt, Human
gccgggccccugggcuu

SEQ ID NO: 3761184 - RNA, 16 nt, Human
gccgggcgcgguggcu

SEQ ID NO: 3761185 - RNA, 21 nt, Human
gccgggcgcgguggcucacgc

SEQ ID NO: 3761186 - RNA, 19 nt, Human
gccgggcgugguggcgggc

SEQ ID NO: 3761187 - RNA, 22 nt, Human
gccggggguucauaggucacug

SEQ ID NO: 3761188 - RNA, 19 nt, Human
gccggggugggguggcugc

SEQ ID NO: 3761189 - RNA, 14 nt, Human
gccgguaccuggga

SEQ ID NO: 3761190 - RNA, 21 nt, Human
gccggucgcccuuugcugcau

SEQ ID NO: 3761191 - RNA, 17 nt, Human
gccgguuccugucccug

SEQ ID NO: 3761192 - RNA, 14 nt, Human
gccgguuugaguga

SEQ ID NO: 3761193 - RNA, 22 nt, Human
gccguaccccacccucagcacc

SEQ ID NO: 3761194 - RNA, 23 nt, Human
gccguaucuccggcucccagccu

SEQ ID NO: 3761195 - RNA, 13 nt, Human
gccgucaccacca

SEQ ID NO: 3761196 - RNA, 16 nt, Human
gccgucaccccugccu

SEQ ID NO: 3761197 - RNA, 20 nt, Human
gccguccccuagagucccag

SEQ ID NO: 3761198 - RNA, 14 nt, Human
gccguccucccggg

SEQ ID NO: 3761199 - RNA, 19 nt, Human
gccguccucccgggcccuc

SEQ ID NO: 3761200 - RNA, 17 nt, Human
gccguccuugucucugg

SEQ ID NO: 3761201 - RNA, 15 nt, Human
gccgucuaccugagg

SEQ ID NO: 3761202 - RNA, 14 nt, Human
gccgucuccagggg

SEQ ID NO: 3761203 - RNA, 19 nt, Human
gccgucuucacucgccccc

SEQ ID NO: 3761204 - RNA, 20 nt, Human
gccgucuucacucgcccccg

SEQ ID NO: 3761205 - RNA, 21 nt, Human
gccgucuucacucgcccccgg

SEQ ID NO: 3761206 - RNA, 16 nt, Human
gccgugaacugugcau

SEQ ID NO: 3761207 - RNA, 17 nt, Human
gccgugaccccugcaga

SEQ ID NO: 3761208 - RNA, 14 nt, Human
gccgugacgucugg

SEQ ID NO: 3761209 - RNA, 22 nt, Human
gccgugacgucuggguggcccu

SEQ ID NO: 3761210 - RNA, 17 nt, Human
gccgugaugcucaggcu

SEQ ID NO: 3761211 - RNA, 19 nt, Human
gccgugcauuagcacagau

SEQ ID NO: 3761212 - RNA, 15 nt, Human
gccgugcccaggggc

SEQ ID NO: 3761213 - RNA, 15 nt, Human
gccgugccuucagcu

SEQ ID NO: 3761214 - RNA, 21 nt, Human
gccgugcucgccccagcaggu

SEQ ID NO: 3761215 - RNA, 18 nt, Human
gccguggauggccgugga

SEQ ID NO: 3761216 - RNA, 21 nt, Human
gccguggauugcacguggccu

SEQ ID NO: 3761217 - RNA, 22 nt, Human
gccguggauugcacguggccuc

SEQ ID NO: 3761218 - RNA, 23 nt, Human
gccgugggcaauugucugaaaag

SEQ ID NO: 3761219 - RNA, 20 nt, Human
gccguggggccgccgccucu

SEQ ID NO: 3761220 - RNA, 23 nt, Human
gccguggggccgccgccucuuuc

SEQ ID NO: 3761221 - RNA, 14 nt, Human
gccguggucccuga

SEQ ID NO: 3761222 - RNA, 15 nt, Human
gccguggucccugag

SEQ ID NO: 3761223 - RNA, 20 nt, Human
gccguuacucuccaaccugg

SEQ ID NO: 3761224 - RNA, 19 nt, Human
gccguugauguuggcuggg

SEQ ID NO: 3761225 - RNA, 19 nt, Human
gccguugauucacuucacg

SEQ ID NO: 3761226 - RNA, 13 nt, Human
gccguuguuuacu

SEQ ID NO: 3761227 - RNA, 20 nt, Human
gccuaaaggauagaucaaag

SEQ ID NO: 3761228 - RNA, 20 nt, Human
gccuaaauuuaaugcugccu

SEQ ID NO: 3761229 - RNA, 17 nt, Human
gccuaaauuuauuaaau

SEQ ID NO: 3761230 - RNA, 18 nt, Human
gccuaaauuuauuaaaua

SEQ ID NO: 3761231 - RNA, 15 nt, Human
gccuaaccgagauca

SEQ ID NO: 3761232 - RNA, 18 nt, Human
gccuaagcauugccuggc

SEQ ID NO: 3761233 - RNA, 13 nt, Human
gccuaaggacuuc

SEQ ID NO: 3761234 - RNA, 18 nt, Human
gccuaaggacuucuuuaa

SEQ ID NO: 3761235 - RNA, 16 nt, Human
gccuaaggcugaacuu

SEQ ID NO: 3761236 - RNA, 23 nt, Human
gccuaagggauccugccugcccc

SEQ ID NO: 3761237 - RNA, 12 nt, Human
gccuaaguauua

SEQ ID NO: 3761238 - RNA, 16 nt, Human
gccuaaguggcugcug

SEQ ID NO: 3761239 - RNA, 15 nt, Human
gccuaauaaaacuga

SEQ ID NO: 3761240 - RNA, 18 nt, Human
gccuaauaaaacugaugu

SEQ ID NO: 3761241 - RNA, 22 nt, Human
gccuaauaaaacugaugugaaa

SEQ ID NO: 3761242 - RNA, 15 nt, Human
gccuaauaaacaauu

SEQ ID NO: 3761243 - RNA, 16 nt, Human
gccuaauacauuaaag

SEQ ID NO: 3761244 - RNA, 16 nt, Human
gccuaaucccugggca

SEQ ID NO: 3761245 - RNA, 23 nt, Human
gccuaaucccugggcauugcuuu

SEQ ID NO: 3761246 - RNA, 23 nt, Human
gccuaauuacgauaaggaagaaa

SEQ ID NO: 3761247 - RNA, 22 nt, Human
gccuacagcuuugaucccugac

SEQ ID NO: 3761248 - RNA, 23 nt, Human
gccuacagcuuugaucccugaca

SEQ ID NO: 3761249 - RNA, 21 nt, Human
gccuaccccgcagacaccuug

SEQ ID NO: 3761250 - RNA, 13 nt, Human
gccuaccugcucu

SEQ ID NO: 3761251 - RNA, 14 nt, Human
gccuaccuguaugu

SEQ ID NO: 3761252 - RNA, 19 nt, Human
gccuacuagggaccugggg

SEQ ID NO: 3761253 - RNA, 12 nt, Human
gccuacucacga

SEQ ID NO: 3761254 - RNA, 17 nt, Human
gccuacuccaaaauguu

SEQ ID NO: 3761255 - RNA, 16 nt, Human
gccuagaaacaacacu

SEQ ID NO: 3761256 - RNA, 22 nt, Human
gccuagaccagcagacagagcc

SEQ ID NO: 3761257 - RNA, 13 nt, Human
gccuagacucugu

SEQ ID NO: 3761258 - RNA, 12 nt, Human
gccuagcaagcu

SEQ ID NO: 3761259 - RNA, 18 nt, Human
gccuagcaagcuggccuc

SEQ ID NO: 3761260 - RNA, 14 nt, Human
gccuagcacagcag

SEQ ID NO: 3761261 - RNA, 18 nt, Human
gccuagcacucacaugcu

SEQ ID NO: 3761262 - RNA, 23 nt, Human
gccuagcacucacaugcuggaca

SEQ ID NO: 3761263 - RNA, 19 nt, Human
gccuagcauacguacacau

SEQ ID NO: 3761264 - RNA, 15 nt, Human
gccugccaguccuag

SEQ ID NO: 3761265 - RNA, 20 nt, Human
gccugccaguccuagcugca

SEQ ID NO: 3761266 - RNA, 20 nt, Human
gccugccauguaccuccccu

SEQ ID NO: 3761267 - RNA, 17 nt, Human
gccugcccaagcccagg

SEQ ID NO: 3761268 - RNA, 13 nt, Human
gccugcccacccg

SEQ ID NO: 3761269 - RNA, 14 nt, Human
gccugcccaccugc

SEQ ID NO: 3761270 - RNA, 20 nt, Human
gccugcccaccugccuggcc

SEQ ID NO: 3761271 - RNA, 14 nt, Human
gccugcccagacaa

SEQ ID NO: 3761272 - RNA, 15 nt, Human
gccugcccagacaag

SEQ ID NO: 3761273 - RNA, 12 nt, Human
gccugcccaggc

SEQ ID NO: 3761274 - RNA, 14 nt, Human
gccugcccaggccc

SEQ ID NO: 3761275 - RNA, 17 nt, Human
gccugcccaggccccug

SEQ ID NO: 3761276 - RNA, 18 nt, Human
gccugcccaggccccugc

SEQ ID NO: 3761277 - RNA, 22 nt, Human
gccugcccaggccccugccacc

SEQ ID NO: 3761278 - RNA, 17 nt, Human
gccugccccaaacaaau

SEQ ID NO: 3761279 - RNA, 16 nt, Human
gccugccccccucauc

SEQ ID NO: 3761280 - RNA, 21 nt, Human
gccugccccgcccccaguccc

SEQ ID NO: 3761281 - RNA, 14 nt, Human
gccugccccucucc

SEQ ID NO: 3761282 - RNA, 17 nt, Human
gccugccccucucccgc

SEQ ID NO: 3761283 - RNA, 21 nt, Human
gccugcccucauggccccucu

SEQ ID NO: 3761284 - RNA, 17 nt, Human
gccugcccuccccagag

SEQ ID NO: 3761285 - RNA, 14 nt, Human
gccugcccuugucu

SEQ ID NO: 3761286 - RNA, 21 nt, Human
gccugcccuugucugagaugc

SEQ ID NO: 3761287 - RNA, 16 nt, Human
gccugcccuuuguccu

SEQ ID NO: 3761288 - RNA, 19 nt, Human
gccugcccuuuguccuccu

SEQ ID NO: 3761289 - RNA, 16 nt, Human
gccugccgagcaaccg

SEQ ID NO: 3761290 - RNA, 21 nt, Human
gccugccgguaaacacgccug

SEQ ID NO: 3761291 - RNA, 17 nt, Human
gccugccuagcacucac

SEQ ID NO: 3761292 - RNA, 11 nt, Human
gccugccucca

SEQ ID NO: 3761293 - RNA, 18 nt, Human
gccugccuccagggcugg

SEQ ID NO: 3761294 - RNA, 22 nt, Human
gccugccuccagggcuggacug

SEQ ID NO: 3761295 - RNA, 13 nt, Human
gccugccuggcag

SEQ ID NO: 3761296 - RNA, 15 nt, Human
gccugccuggcaggc

SEQ ID NO: 3761297 - RNA, 17 nt, Human
gccugccuggcaggcug

SEQ ID NO: 3761298 - RNA, 16 nt, Human
gccugccuggccccuc

SEQ ID NO: 3761299 - RNA, 13 nt, Human
gccugccugucug

SEQ ID NO: 3761300 - RNA, 14 nt, Human
gccugccugucugu

SEQ ID NO: 3761301 - RNA, 16 nt, Human
gccugccugucugucu

SEQ ID NO: 3761302 - RNA, 23 nt, Human
gccugccuugaagccacugaagc

SEQ ID NO: 3761303 - RNA, 14 nt, Human
gccugcgacccugg

SEQ ID NO: 3761304 - RNA, 18 nt, Human
gccugcgcccaccccgcu

SEQ ID NO: 3761305 - RNA, 23 nt, Human
gccugcgcccaccccgcucugca

SEQ ID NO: 3761306 - RNA, 14 nt, Human
gccugcgccugcug

SEQ ID NO: 3761307 - RNA, 17 nt, Human
gccugcggccugcugga

SEQ ID NO: 3761308 - RNA, 14 nt, Human
gccugcguggcuga

SEQ ID NO: 3761309 - RNA, 20 nt, Human
gccugcguugguccagagcg

SEQ ID NO: 3761310 - RNA, 20 nt, Human
gccugcguuuuggaagcucu

SEQ ID NO: 3761311 - RNA, 20 nt, Human
gccugcuaaggucuuggaac

SEQ ID NO: 3761312 - RNA, 23 nt, Human
gccugcuagcuagcucaacuagu

SEQ ID NO: 3761313 - RNA, 20 nt, Human
gccugcuauuugaaguguaa

SEQ ID NO: 3761314 - RNA, 13 nt, Human
gccugcuccagac

SEQ ID NO: 3761315 - RNA, 14 nt, Human
gccugcuccagacc

SEQ ID NO: 3761316 - RNA, 15 nt, Human
gccugcuccagaccu

SEQ ID NO: 3761317 - RNA, 17 nt, Human
gccugcuccagaccuga

SEQ ID NO: 3761318 - RNA, 21 nt, Human
gccugcuccagaccugauccu

SEQ ID NO: 3761319 - RNA, 13 nt, Human
gccugcuccagcu

SEQ ID NO: 3761320 - RNA, 15 nt, Human
gccugcucccagcag

SEQ ID NO: 3761321 - RNA, 20 nt, Human
gccugcucccagcagcccua

SEQ ID NO: 3761322 - RNA, 21 nt, Human
gccugcucccauccugugugu

SEQ ID NO: 3761323 - RNA, 15 nt, Human
gccugcucccccacc

SEQ ID NO: 3761324 - RNA, 19 nt, Human
gccugcucccccacccccu

SEQ ID NO: 3761325 - RNA, 22 nt, Human
gccugcugcaugcccucucagg

SEQ ID NO: 3761326 - RNA, 13 nt, Human
gccugcugcccag

SEQ ID NO: 3761327 - RNA, 13 nt, Human
gccugcugcugag

SEQ ID NO: 3761328 - RNA, 15 nt, Human
gccugcugcugagaa

SEQ ID NO: 3761329 - RNA, 22 nt, Human
gccugcugcugagaaccuggcc

SEQ ID NO: 3761330 - RNA, 23 nt, Human
gccugcuggaggccucaggugcu

SEQ ID NO: 3761331 - RNA, 19 nt, Human
gccugcuggcacccaccgu

SEQ ID NO: 3761332 - RNA, 22 nt, Human
gccugcugggcucuccaccuca

SEQ ID NO: 3761333 - RNA, 18 nt, Human
gccugcuggucacagccu

SEQ ID NO: 3761334 - RNA, 21 nt, Human
gccugcuggucacagccuccu

SEQ ID NO: 3761335 - RNA, 22 nt, Human
gccugcuucccaccucccugcc

SEQ ID NO: 3761336 - RNA, 23 nt, Human
gccugcuucccaccucccugccc

SEQ ID NO: 3761337 - RNA, 19 nt, Human
gccugcuuuuuauggccug

SEQ ID NO: 3761338 - RNA, 21 nt, Human
gccugcuuuuuggaaagucag

SEQ ID NO: 3761339 - RNA, 14 nt, Human
gccuggaagacaga

SEQ ID NO: 3761340 - RNA, 15 nt, Human
gccuggaagagcagc

SEQ ID NO: 3761341 - RNA, 17 nt, Human
gccuggaagagcagccc

SEQ ID NO: 3761342 - RNA, 20 nt, Human
gccuggacauuugccuugcu

SEQ ID NO: 3761343 - RNA, 15 nt, Human
gccuggacccccagc

SEQ ID NO: 3761344 - RNA, 17 nt, Human
gccuggacccccagcuu

SEQ ID NO: 3761345 - RNA, 15 nt, Human
gccuggaccucugac

SEQ ID NO: 3761346 - RNA, 20 nt, Human
gccuggaccucugacagcag

SEQ ID NO: 3761347 - RNA, 21 nt, Human
gccuggaccucugacagcagc

SEQ ID NO: 3761348 - RNA, 23 nt, Human
gccuggaccucugacagcagcau

SEQ ID NO: 3761349 - RNA, 11 nt, Human
gccuggaccug

SEQ ID NO: 3761350 - RNA, 13 nt, Human
gccuggacugcua

SEQ ID NO: 3761351 - RNA, 16 nt, Human
gccuggacuuuccugc

SEQ ID NO: 3761352 - RNA, 15 nt, Human
gccuggagaagcuga

SEQ ID NO: 3761353 - RNA, 15 nt, Human
gccuggagacccacc

SEQ ID NO: 3761354 - RNA, 17 nt, Human
gccuggagacuuagggc

SEQ ID NO: 3761355 - RNA, 17 nt, Human
gccuggagauccuccug

SEQ ID NO: 3761356 - RNA, 22 nt, Human
gccuggagauccuccugcagac

SEQ ID NO: 3761357 - RNA, 14 nt, Human
gccuggagaugacu

SEQ ID NO: 3761358 - RNA, 13 nt, Human
gccuggagcccca

SEQ ID NO: 3761359 - RNA, 14 nt, Human
gccuggagccccac

SEQ ID NO: 3761360 - RNA, 16 nt, Human
gccuggagcuccuggg

SEQ ID NO: 3761361 - RNA, 16 nt, Human
gccuggaggaccugag

SEQ ID NO: 3761362 - RNA, 17 nt, Human
gccuggaggaccugagc

SEQ ID NO: 3761363 - RNA, 18 nt, Human
gccuggaggaccugagcc

SEQ ID NO: 3761364 - RNA, 24 nt, Human
gccuggaguguaugacugcacaug

SEQ ID NO: 3761365 - RNA, 20 nt, Human
gccuggauggggcugcaccg

SEQ ID NO: 3761366 - RNA, 20 nt, Human
gccuggauguugcugugcac

SEQ ID NO: 3761367 - RNA, 19 nt, Human
gccuggauucauuuccugc

SEQ ID NO: 3761368 - RNA, 16 nt, Human
gccuggauuucugguu

SEQ ID NO: 3761369 - RNA, 22 nt, Human
gccuggauuucugguucugaug

SEQ ID NO: 3761370 - RNA, 23 nt, Human
gccuggauuucugguucugaugc

SEQ ID NO: 3761371 - RNA, 14 nt, Human
gccuggcacacauc

SEQ ID NO: 3761372 - RNA, 14 nt, Human
gccuggcacagggc

SEQ ID NO: 3761373 - RNA, 21 nt, Human
gccuggcacagugucugggcu

SEQ ID NO: 3761374 - RNA, 23 nt, Human
gccuggcacagugucugggcuga

SEQ ID NO: 3761375 - RNA, 18 nt, Human
gccuggcagaacugagcu

SEQ ID NO: 3761376 - RNA, 19 nt, Human
gccuggcagaacugagcuc

SEQ ID NO: 3761377 - RNA, 12 nt, Human
gccuggcagccg

SEQ ID NO: 3761378 - RNA, 21 nt, Human
gccuggcagccgugccuucag

SEQ ID NO: 3761379 - RNA, 15 nt, Human
gccuggcagccuggc

SEQ ID NO: 3761380 - RNA, 23 nt, Human
gccuggcagggaggucaggcccu

SEQ ID NO: 3761381 - RNA, 20 nt, Human
gccuggcaguccgugggacg

SEQ ID NO: 3761382 - RNA, 22 nt, Human
gccuggcauucuuguacagugu

SEQ ID NO: 3761383 - RNA, 15 nt, Human
gccuggccaaaggga

SEQ ID NO: 3761384 - RNA, 14 nt, Human
gccuggccaccucu

SEQ ID NO: 3761385 - RNA, 18 nt, Human
gccuggccaccucucucc

SEQ ID NO: 3761386 - RNA, 18 nt, Human
gccuggccacgcagccag

SEQ ID NO: 3761387 - RNA, 19 nt, Human
gccuggccacgcagccagg

SEQ ID NO: 3761388 - RNA, 20 nt, Human
gccuggccacgcagccagga

SEQ ID NO: 3761389 - RNA, 22 nt, Human
gccuggccacgcagccaggaca

SEQ ID NO: 3761390 - RNA, 20 nt, Human
gccuggccagacacaggccc

SEQ ID NO: 3761391 - RNA, 15 nt, Human
gccuggccagaugca

SEQ ID NO: 3761392 - RNA, 19 nt, Human
gccuggccaggagcucuuc

SEQ ID NO: 3761393 - RNA, 13 nt, Human
gccuggccaggca

SEQ ID NO: 3761394 - RNA, 15 nt, Human
gccuggccaggcacc

SEQ ID NO: 3761395 - RNA, 17 nt, Human
gccuggccaggcagauc

SEQ ID NO: 3761396 - RNA, 18 nt, Human
gccuggccauacuguguc

SEQ ID NO: 3761397 - RNA, 21 nt, Human
gccuggcccacagcaggugcu

SEQ ID NO: 3761398 - RNA, 14 nt, Human
gccuggcccacccc

SEQ ID NO: 3761399 - RNA, 16 nt, Human
gccuggcccagcuccc

SEQ ID NO: 3761400 - RNA, 15 nt, Human
gccuggcccccagcu

SEQ ID NO: 3761401 - RNA, 18 nt, Human
gccuggcccccagcugug

SEQ ID NO: 3761402 - RNA, 17 nt, Human
gccuggcccccuguccu

SEQ ID NO: 3761403 - RNA, 15 nt, Human
gccuggccccucagg

SEQ ID NO: 3761404 - RNA, 20 nt, Human
gccuggccccucaggguccc

SEQ ID NO: 3761405 - RNA, 17 nt, Human
gccuggccggccagcca

SEQ ID NO: 3761406 - RNA, 20 nt, Human
gccuggccggccagccagcc

SEQ ID NO: 3761407 - RNA, 13 nt, Human
gccuggccuccag

SEQ ID NO: 3761408 - RNA, 17 nt, Human
gccuggccuccaggccc

SEQ ID NO: 3761409 - RNA, 14 nt, Human
gccuggccuccugc

SEQ ID NO: 3761410 - RNA, 18 nt, Human
gccuggccugagcuggga

SEQ ID NO: 3761411 - RNA, 14 nt, Human
gccuggccugaggu

SEQ ID NO: 3761412 - RNA, 14 nt, Human
gccuggccuggccc

SEQ ID NO: 3761413 - RNA, 17 nt, Human
gccuggccuggcccugc

SEQ ID NO: 3761414 - RNA, 19 nt, Human
cugucucuuuaagggcaug

SEQ ID NO: 3761415 - RNA, 20 nt, Human
cugucugaaggacacuuccu

SEQ ID NO: 3761416 - RNA, 22 nt, Human
cugucugagacucacaggaagg

SEQ ID NO: 3761417 - RNA, 18 nt, Human
cugucugagguugggaga

SEQ ID NO: 3761418 - RNA, 13 nt, Human
cugucugcagccu

SEQ ID NO: 3761419 - RNA, 17 nt, Human
cugucugccaaccuaaa

SEQ ID NO: 3761420 - RNA, 17 nt, Human
cugucugccagccagca

SEQ ID NO: 3761421 - RNA, 18 nt, Human
cugucugccccagcccag

SEQ ID NO: 3761422 - RNA, 19 nt, Human
cugucugccccgcccucau

SEQ ID NO: 3761423 - RNA, 15 nt, Human
cugucugcucagaca

SEQ ID NO: 3761424 - RNA, 16 nt, Human
cugucuggcaaugcca

SEQ ID NO: 3761425 - RNA, 17 nt, Human
cugucuggcaaugccac

SEQ ID NO: 3761426 - RNA, 23 nt, Human
cugucuggcaaugccacagcccu

SEQ ID NO: 3761427 - RNA, 19 nt, Human
cugucugggugcuacuggg

SEQ ID NO: 3761428 - RNA, 15 nt, Human
cugucugguggcccc

SEQ ID NO: 3761429 - RNA, 22 nt, Human
cugucuguagagggcccuggug

SEQ ID NO: 3761430 - RNA, 19 nt, Human
cugucugucccaguuaacu

SEQ ID NO: 3761431 - RNA, 16 nt, Human
cugucugucuggucca

SEQ ID NO: 3761432 - RNA, 16 nt, Human
cugucugucuguccca

SEQ ID NO: 3761433 - RNA, 14 nt, Human
cugucugucugucu

SEQ ID NO: 3761434 - RNA, 14 nt, Human
cugucugugaacag

SEQ ID NO: 3761435 - RNA, 13 nt, Human
cugucugugaccu

SEQ ID NO: 3761436 - RNA, 14 nt, Human
cugucugugaccug

SEQ ID NO: 3761437 - RNA, 15 nt, Human
cugucuuaauuaagu

SEQ ID NO: 3761438 - RNA, 17 nt, Human
cugucuucaacagcucc

SEQ ID NO: 3761439 - RNA, 22 nt, Human
cugucuucauagcagauuuuaa

SEQ ID NO: 3761440 - RNA, 20 nt, Human
cugucuucauccccucagaa

SEQ ID NO: 3761441 - RNA, 17 nt, Human
cugucuucauccuuagc

SEQ ID NO: 3761442 - RNA, 11 nt, Human
cugucuuccca

SEQ ID NO: 3761443 - RNA, 23 nt, Human
cugucuucccaggguagcccgcc

SEQ ID NO: 3761444 - RNA, 13 nt, Human
cugucuuccucaa

SEQ ID NO: 3761445 - RNA, 18 nt, Human
cugucuuccugcauucac

SEQ ID NO: 3761446 - RNA, 16 nt, Human
cugucuuccuuugcuu

SEQ ID NO: 3761447 - RNA, 19 nt, Human
cugucuuccuuugcuuccc

SEQ ID NO: 3761448 - RNA, 17 nt, Human
cugucuucucaggcucu

SEQ ID NO: 3761449 - RNA, 15 nt, Human
cugucuucugcuuug

SEQ ID NO: 3761450 - RNA, 15 nt, Human
cugucuucuggacug

SEQ ID NO: 3761451 - RNA, 13 nt, Human
cugucuucuguau

SEQ ID NO: 3761452 - RNA, 16 nt, Human
cugucuuuaaaagaga

SEQ ID NO: 3761453 - RNA, 16 nt, Human
cugucuuuaaggaaaa

SEQ ID NO: 3761454 - RNA, 15 nt, Human
cugucuuuccacucu

SEQ ID NO: 3761455 - RNA, 16 nt, Human
cugucuuuccacucug

SEQ ID NO: 3761456 - RNA, 18 nt, Human
cugucuuuccacucugga

SEQ ID NO: 3761457 - RNA, 19 nt, Human
cugucuuuccuaagaccug

SEQ ID NO: 3761458 - RNA, 22 nt, Human
cugucuuuggaaaaauguuugu

SEQ ID NO: 3761459 - RNA, 15 nt, Human
cugucuuuuaaacuc

SEQ ID NO: 3761460 - RNA, 21 nt, Human
cugucuuuuuucuaaaguaaa

SEQ ID NO: 3761461 - RNA, 12 nt, Human
cugugaaauagu

SEQ ID NO: 3761462 - RNA, 15 nt, Human
cugugaaauaucauc

SEQ ID NO: 3761463 - RNA, 15 nt, Human
cugugaacccaggac

SEQ ID NO: 3761464 - RNA, 19 nt, Human
cugugaacccaggacaagc

SEQ ID NO: 3761465 - RNA, 20 nt, Human
cugugaacccuggggccuga

SEQ ID NO: 3761466 - RNA, 22 nt, Human
cugugaacugaaauuaaaacua

SEQ ID NO: 3761467 - RNA, 13 nt, Human
cugugaacugaac

SEQ ID NO: 3761468 - RNA, 16 nt, Human
cugugaacugaacucu

SEQ ID NO: 3761469 - RNA, 16 nt, Human
cugugaacuugaaauu

SEQ ID NO: 3761470 - RNA, 17 nt, Human
cugugaacuugaaauuu

SEQ ID NO: 3761471 - RNA, 22 nt, Human
cugugaacuuggggaacaaggg

SEQ ID NO: 3761472 - RNA, 14 nt, Human
cugugaagaucuca

SEQ ID NO: 3761473 - RNA, 21 nt, Human
cugugaagcauucgagacaga

SEQ ID NO: 3761474 - RNA, 23 nt, Human
cugugaagcauucgagacagaac

SEQ ID NO: 3761475 - RNA, 14 nt, Human
cugugaaguaagga

SEQ ID NO: 3761476 - RNA, 16 nt, Human
cugugaaguccuucac

SEQ ID NO: 3761477 - RNA, 24 nt, Human
cugugaaguccuucaccucacuga

SEQ ID NO: 3761478 - RNA, 22 nt, Human
cugugaagugagaccuuccuuu

SEQ ID NO: 3761479 - RNA, 18 nt, Human
cugugaaguuuacauugu

SEQ ID NO: 3761480 - RNA, 16 nt, Human
cugugaaugccacugc

SEQ ID NO: 3761481 - RNA, 19 nt, Human
cugugaauuuguguaagga

SEQ ID NO: 3761482 - RNA, 17 nt, Human
cugugacacacuacacc

SEQ ID NO: 3761483 - RNA, 16 nt, Human
cugugacaggcagcag

SEQ ID NO: 3761484 - RNA, 17 nt, Human
cugugacauggugccug

SEQ ID NO: 3761485 - RNA, 21 nt, Human
cugugacauggugccugagag

SEQ ID NO: 3761486 - RNA, 22 nt, Human
cugugacauggugccugagagg

SEQ ID NO: 3761487 - RNA, 23 nt, Human
cugugacauggugccugagaggc

SEQ ID NO: 3761488 - RNA, 24 nt, Human
cugugacauggugccugagaggca

SEQ ID NO: 3761489 - RNA, 17 nt, Human
cugugaccaaugucuug

SEQ ID NO: 3761490 - RNA, 14 nt, Human
cugugaccagcacu

SEQ ID NO: 3761491 - RNA, 18 nt, Human
cugugaccaggaaggaag

SEQ ID NO: 3761492 - RNA, 23 nt, Human
cugugaccagucugacccuuaca

SEQ ID NO: 3761493 - RNA, 22 nt, Human
cugugacccacuucucaucaca

SEQ ID NO: 3761494 - RNA, 19 nt, Human
cugugugacaucaguggca

SEQ ID NO: 3761495 - RNA, 18 nt, Human
cugugugacucaaaccaa

SEQ ID NO: 3761496 - RNA, 15 nt, Human
cugugugaugaacuu

SEQ ID NO: 3761497 - RNA, 16 nt, Human
cugugugaugaacuuu

SEQ ID NO: 3761498 - RNA, 18 nt, Human
cugugugaugaacuuucu

SEQ ID NO: 3761499 - RNA, 19 nt, Human
cugugugaugaacuuucuc

SEQ ID NO: 3761500 - RNA, 22 nt, Human
cugugugauugacagcuuugcu

SEQ ID NO: 3761501 - RNA, 23 nt, Human
cugugugauugacagcuuugcug

SEQ ID NO: 3761502 - RNA, 9 nt, Human
cugugugca

SEQ ID NO: 3761503 - RNA, 16 nt, Human
cugugugcacaaauau

SEQ ID NO: 3761504 - RNA, 21 nt, Human
cugugugcaccuuaccaacuu

SEQ ID NO: 3761505 - RNA, 18 nt, Human
cugugugccugggggagu

SEQ ID NO: 3761506 - RNA, 19 nt, Human
cugugugcucaggagcccu

SEQ ID NO: 3761507 - RNA, 16 nt, Human
cuguguggacugugau

SEQ ID NO: 3761508 - RNA, 15 nt, Human
cuguguggagaggga

SEQ ID NO: 3761509 - RNA, 21 nt, Human
cuguguggccacuucugucca

SEQ ID NO: 3761510 - RNA, 12 nt, Human
cugugugguuug

SEQ ID NO: 3761511 - RNA, 21 nt, Human
cuguguguccaaaacugccuc

SEQ ID NO: 3761512 - RNA, 16 nt, Human
cugugugucccaggca

SEQ ID NO: 3761513 - RNA, 16 nt, Human
cugugugugaguguga

SEQ ID NO: 3761514 - RNA, 16 nt, Human
cugugugugcccucug

SEQ ID NO: 3761515 - RNA, 19 nt, Human
cugugugugcccucugggc

SEQ ID NO: 3761516 - RNA, 16 nt, Human
cugugugugugaauga

SEQ ID NO: 3761517 - RNA, 18 nt, Human
cugugugugugaaugaac

SEQ ID NO: 3761518 - RNA, 16 nt, Human
cuguguguguguaugu

SEQ ID NO: 3761519 - RNA, 20 nt, Human
cuguguguguguaugugggg

SEQ ID NO: 3761520 - RNA, 17 nt, Human
cuguguguuaagcucug

SEQ ID NO: 3761521 - RNA, 14 nt, Human
cuguguguuccugg

SEQ ID NO: 3761522 - RNA, 19 nt, Human
cuguguguugccacaggac

SEQ ID NO: 3761523 - RNA, 21 nt, Human
cuguguguugccacaggacac

SEQ ID NO: 3761524 - RNA, 18 nt, Human
cuguguguuuaugugugu

SEQ ID NO: 3761525 - RNA, 18 nt, Human
cuguguguuuucauaaua

SEQ ID NO: 3761526 - RNA, 21 nt, Human
cuguguuccuuccgcuuggag

SEQ ID NO: 3761527 - RNA, 14 nt, Human
cuguguugccaagc

SEQ ID NO: 3761528 - RNA, 16 nt, Human
cuguguugccaagcuc

SEQ ID NO: 3761529 - RNA, 19 nt, Human
cuguguugccaagcuccaa

SEQ ID NO: 3761530 - RNA, 21 nt, Human
cuguguuguaccaaaauucau

SEQ ID NO: 3761531 - RNA, 15 nt, Human
cuguguuguauuaac

SEQ ID NO: 3761532 - RNA, 18 nt, Human
cuguguuguauuaacaaa

SEQ ID NO: 3761533 - RNA, 19 nt, Human
cuguguuguugcuucuugu

SEQ ID NO: 3761534 - RNA, 18 nt, Human
cuguguuuaauuucuuca

SEQ ID NO: 3761535 - RNA, 16 nt, Human
cuguguuuauauggaa

SEQ ID NO: 3761536 - RNA, 19 nt, Human
cuguguuucaaguggggcu

SEQ ID NO: 3761537 - RNA, 17 nt, Human
cuguguuucuugccuca

SEQ ID NO: 3761538 - RNA, 20 nt, Human
cuguguuugcagccugcucu

SEQ ID NO: 3761539 - RNA, 22 nt, Human
cuguguuugcuccccuuccccu

SEQ ID NO: 3761540 - RNA, 17 nt, Human
cuguguuuggcuuucag

SEQ ID NO: 3761541 - RNA, 18 nt, Human
cuguguuuuauaaaauag

SEQ ID NO: 3761542 - RNA, 18 nt, Human
cuguguuuugaaagaaua

SEQ ID NO: 3761543 - RNA, 22 nt, Human
cuguguuuugaaagaauagaac

SEQ ID NO: 3761544 - RNA, 21 nt, Human
cuguuaaaagaugaaaauauu

SEQ ID NO: 3761545 - RNA, 11 nt, Human
cuguuaaaaug

SEQ ID NO: 3761546 - RNA, 11 nt, Human
cuguuaaacug

SEQ ID NO: 3761547 - RNA, 12 nt, Human
cuguuaaacugu

SEQ ID NO: 3761548 - RNA, 13 nt, Human
cuguuaaacuguu

SEQ ID NO: 3761549 - RNA, 21 nt, Human
cuguuaaacuguuagcacugu

SEQ ID NO: 3761550 - RNA, 23 nt, Human
cuguuaaacuguuagcacuguug

SEQ ID NO: 3761551 - RNA, 11 nt, Human
cuguuaaauac

SEQ ID NO: 3761552 - RNA, 23 nt, Human
cuguuaaauacaggaaacaguug

SEQ ID NO: 3761553 - RNA, 18 nt, Human
cuguuaaauugcugugua

SEQ ID NO: 3761554 - RNA, 19 nt, Human
cuguuaaauugcuguguau

SEQ ID NO: 3761555 - RNA, 12 nt, Human
cuguuaaccauu

SEQ ID NO: 3761556 - RNA, 15 nt, Human
cuguuaacugaauac

SEQ ID NO: 3761557 - RNA, 17 nt, Human
cuguuaacugaauacca

SEQ ID NO: 3761558 - RNA, 22 nt, Human
cuguuaacugaauaccacucug

SEQ ID NO: 3761559 - RNA, 14 nt, Human
cuguuaauguauuu

SEQ ID NO: 3761560 - RNA, 22 nt, Human
cuguuacaaaauguaacuguua

SEQ ID NO: 3761561 - RNA, 19 nt, Human
cuguuacacuuuuuggaag

SEQ ID NO: 3761562 - RNA, 20 nt, Human
cuguuacauaacaagaaaau

SEQ ID NO: 3761563 - RNA, 23 nt, Human
cuguuacauaacaagaaaaucaa

SEQ ID NO: 3761564 - RNA, 20 nt, Human
cuguuaccaugucacugugg

SEQ ID NO: 3761565 - RNA, 15 nt, Human
cuguuaccauucaca

SEQ ID NO: 3761566 - RNA, 19 nt, Human
cuguuaccauuggaaauuu

SEQ ID NO: 3761567 - RNA, 16 nt, Human
cuguuaccgccugucu

SEQ ID NO: 3761568 - RNA, 21 nt, Human
cuguuaccugaucaaugacag

SEQ ID NO: 3761569 - RNA, 16 nt, Human
cuguuacugggcccug

SEQ ID NO: 3761570 - RNA, 18 nt, Human
cuguuagaacacuauuuu

SEQ ID NO: 3761571 - RNA, 21 nt, Human
cuguuagaacacuauuuucag

SEQ ID NO: 3761572 - RNA, 16 nt, Human
cuguuagcacuguuga

SEQ ID NO: 3761573 - RNA, 15 nt, Human
cuguuagcagacagg

SEQ ID NO: 3761574 - RNA, 18 nt, Human
cuguuaggagaagcugca

SEQ ID NO: 3761575 - RNA, 17 nt, Human
cuguuagugcacugauu

SEQ ID NO: 3761576 - RNA, 13 nt, Human
cuguuauaaucuu

SEQ ID NO: 3761577 - RNA, 19 nt, Human
cuguuauaaucuuucacag

SEQ ID NO: 3761578 - RNA, 23 nt, Human
cuguuaucaaacaccaacauaaa

SEQ ID NO: 3761579 - RNA, 14 nt, Human
cuguuaugcuguga

SEQ ID NO: 3761580 - RNA, 16 nt, Human
cuguuaugucuguuua

SEQ ID NO: 3761581 - RNA, 22 nt, Human
cuguuaugucuguuuaagaaaa

SEQ ID NO: 3761582 - RNA, 20 nt, Human
cuguuauuuauaaucacuuu

SEQ ID NO: 3761583 - RNA, 16 nt, Human
cuguuauuuucagcau

SEQ ID NO: 3761584 - RNA, 16 nt, Human
cuguucaacaucacug

SEQ ID NO: 3761585 - RNA, 12 nt, Human
cuguucacagcc

SEQ ID NO: 3761586 - RNA, 22 nt, Human
cuguucacagccagacuggcac

SEQ ID NO: 3761587 - RNA, 13 nt, Human
cuguucacucuac

SEQ ID NO: 3761588 - RNA, 15 nt, Human
cuguucacucuacuu

SEQ ID NO: 3761589 - RNA, 18 nt, Human
cuguucacuuuuccuccc

SEQ ID NO: 3761590 - RNA, 16 nt, Human
cuguucagauuggaca

SEQ ID NO: 3761591 - RNA, 14 nt, Human
cuguucagcauucu

SEQ ID NO: 3761592 - RNA, 18 nt, Human
cuguucagcuccagcuca

SEQ ID NO: 3761593 - RNA, 19 nt, Human
cuguucagcuccagcucac

SEQ ID NO: 3761594 - RNA, 18 nt, Human
cuguucagcugguugagg

SEQ ID NO: 3761595 - RNA, 13 nt, Human
cuguucagcuuuu

SEQ ID NO: 3761596 - RNA, 17 nt, Human
cuguucagcuuuuauuc

SEQ ID NO: 3761597 - RNA, 13 nt, Human
cuguucaguuaca

SEQ ID NO: 3761598 - RNA, 14 nt, Human
cuguucaguuacag

SEQ ID NO: 3761599 - RNA, 18 nt, Human
cuguucaguuacagaaag

SEQ ID NO: 3761600 - RNA, 15 nt, Human
cuguucauuccucca

SEQ ID NO: 3761601 - RNA, 14 nt, Human
cuguucauuuguua

SEQ ID NO: 3761602 - RNA, 18 nt, Human
cuguuccaaauucaguuu

SEQ ID NO: 3761603 - RNA, 17 nt, Human
cuguuccagccugcccu

SEQ ID NO: 3761604 - RNA, 23 nt, Human
cuguucccccgccgcuuuucucc

SEQ ID NO: 3761605 - RNA, 12 nt, Human
gcgcucaguaaa

SEQ ID NO: 3761606 - RNA, 15 nt, Human
gcgcucaguaaacgg

SEQ ID NO: 3761607 - RNA, 17 nt, Human
gcgcucaguaaacggga

SEQ ID NO: 3761608 - RNA, 19 nt, Human
gcgcuccugccgcagagcu

SEQ ID NO: 3761609 - RNA, 19 nt, Human
gcgcucucuuugcaacugu

SEQ ID NO: 3761610 - RNA, 19 nt, Human
gcgcugacaaccaccgcuc

SEQ ID NO: 3761611 - RNA, 21 nt, Human
gcgcugccccuggcagccccu

SEQ ID NO: 3761612 - RNA, 19 nt, Human
gcgcugccgcaccccagag

SEQ ID NO: 3761613 - RNA, 21 nt, Human
gcgcugccgcaccccagagug

SEQ ID NO: 3761614 - RNA, 12 nt, Human
gcgcuggcccag

SEQ ID NO: 3761615 - RNA, 17 nt, Human
gcgcuggcccagccggc

SEQ ID NO: 3761616 - RNA, 20 nt, Human
gcgcugggcacuucccugcu

SEQ ID NO: 3761617 - RNA, 17 nt, Human
gcgcugguccuuucuuc

SEQ ID NO: 3761618 - RNA, 10 nt, Human
gcgcuucacu

SEQ ID NO: 3761619 - RNA, 21 nt, Human
gcgcuugggcgccgugcuggg

SEQ ID NO: 3761620 - RNA, 22 nt, Human
gcgcuugggcgccgugcugggc

SEQ ID NO: 3761621 - RNA, 15 nt, Human
gcggaaagcagcuca

SEQ ID NO: 3761622 - RNA, 10 nt, Human
gcggacacac

SEQ ID NO: 3761623 - RNA, 16 nt, Human
gcggacagccacggcc

SEQ ID NO: 3761624 - RNA, 23 nt, Human
gcggacagccacggccaggccag

SEQ ID NO: 3761625 - RNA, 14 nt, Human
gcggacaguggcag

SEQ ID NO: 3761626 - RNA, 15 nt, Human
gcggacaguggcagg

SEQ ID NO: 3761627 - RNA, 16 nt, Human
gcggacaucagcuggu

SEQ ID NO: 3761628 - RNA, 20 nt, Human
gcggaccccagcugugagcc

SEQ ID NO: 3761629 - RNA, 21 nt, Human
gcggaccccagcugugagccu

SEQ ID NO: 3761630 - RNA, 16 nt, Human
gcggacguuccagccg

SEQ ID NO: 3761631 - RNA, 19 nt, Human
gcggagacggagucccacc

SEQ ID NO: 3761632 - RNA, 23 nt, Human
gcggaggaaggaggacccaggac

SEQ ID NO: 3761633 - RNA, 14 nt, Human
gcggaggcugugug

SEQ ID NO: 3761634 - RNA, 16 nt, Human
gcggaggcugugugcc

SEQ ID NO: 3761635 - RNA, 18 nt, Human
gcggaggcugugugccug

SEQ ID NO: 3761636 - RNA, 20 nt, Human
gcggagugaagaggggcagc

SEQ ID NO: 3761637 - RNA, 22 nt, Human
gcggagugaagaggggcagccc

SEQ ID NO: 3761638 - RNA, 13 nt, Human
gcggauggccgga

SEQ ID NO: 3761639 - RNA, 18 nt, Human
gcggauuaauuugcaucu

SEQ ID NO: 3761640 - RNA, 22 nt, Human
gcggcaaucaauaaacagcagg

SEQ ID NO: 3761641 - RNA, 12 nt, Human
gcggcagagagg

SEQ ID NO: 3761642 - RNA, 22 nt, Human
gcggcaggagggagguuuguga

SEQ ID NO: 3761643 - RNA, 19 nt, Human
gcggcaggggccuggagau

SEQ ID NO: 3761644 - RNA, 16 nt, Human
gcggcauuaaagccau

SEQ ID NO: 3761645 - RNA, 23 nt, Human
gcggcccaagcccgacuugcugu

SEQ ID NO: 3761646 - RNA, 18 nt, Human
gcggcccagcccggcucc

SEQ ID NO: 3761647 - RNA, 21 nt, Human
gcggcccagcccggcucccac

SEQ ID NO: 3761648 - RNA, 13 nt, Human
gcggccccucccg

SEQ ID NO: 3761649 - RNA, 16 nt, Human
gcggccccucccgccc

SEQ ID NO: 3761650 - RNA, 13 nt, Human
gcggcccugucau

SEQ ID NO: 3761651 - RNA, 19 nt, Human
gcggccuaugacuugggca

SEQ ID NO: 3761652 - RNA, 18 nt, Human
gcggccucuucucucaga

SEQ ID NO: 3761653 - RNA, 16 nt, Human
gcggccuuuggcuuca

SEQ ID NO: 3761654 - RNA, 14 nt, Human
gcggcgggcggcug

SEQ ID NO: 3761655 - RNA, 14 nt, Human
gcggcggucccagc

SEQ ID NO: 3761656 - RNA, 17 nt, Human
gcggcggucccagcucc

SEQ ID NO: 3761657 - RNA, 13 nt, Human
gcggcuacucagc

SEQ ID NO: 3761658 - RNA, 21 nt, Human
gcggcuacucagcagcccucc

SEQ ID NO: 3761659 - RNA, 22 nt, Human
gcggcuacucagcagcccuccu

SEQ ID NO: 3761660 - RNA, 18 nt, Human
gcggcucaagcccaggag

SEQ ID NO: 3761661 - RNA, 12 nt, Human
gcggcugagagc

SEQ ID NO: 3761662 - RNA, 16 nt, Human
gcggcugagagcccca

SEQ ID NO: 3761663 - RNA, 18 nt, Human
gcggcugagagccccagc

SEQ ID NO: 3761664 - RNA, 23 nt, Human
gcggcugagucaugaucucccug

SEQ ID NO: 3761665 - RNA, 15 nt, Human
gcggcuggacuugga

SEQ ID NO: 3761666 - RNA, 15 nt, Human
gcggcuggcagccca

SEQ ID NO: 3761667 - RNA, 18 nt, Human
gcggcuggccauggagaa

SEQ ID NO: 3761668 - RNA, 22 nt, Human
gcggcugugcagccuguccugg

SEQ ID NO: 3761669 - RNA, 12 nt, Human
gcggcugugugu

SEQ ID NO: 3761670 - RNA, 19 nt, Human
gcgggaauauuguuucuuu

SEQ ID NO: 3761671 - RNA, 14 nt, Human
gcgggaccuguggc

SEQ ID NO: 3761672 - RNA, 14 nt, Human
gcgggagccucccu

SEQ ID NO: 3761673 - RNA, 18 nt, Human
gcgggagcgguggcccug

SEQ ID NO: 3761674 - RNA, 18 nt, Human
gcgggcagagggcuggag

SEQ ID NO: 3761675 - RNA, 19 nt, Human
gcgggcagagggcuggagg

SEQ ID NO: 3761676 - RNA, 14 nt, Human
gcgggcagcacagc

SEQ ID NO: 3761677 - RNA, 15 nt, Human
gcgggcagcacagca

SEQ ID NO: 3761678 - RNA, 19 nt, Human
gcgggccagccaggcgggc

SEQ ID NO: 3761679 - RNA, 19 nt, Human
gcgggcgaaucacgagguc

SEQ ID NO: 3761680 - RNA, 20 nt, Human
gcgggcgccuguagucccag

SEQ ID NO: 3761681 - RNA, 19 nt, Human
gcgggcggcugggucugug

SEQ ID NO: 3761682 - RNA, 14 nt, Human
gcgggcucaaggaa

SEQ ID NO: 3761683 - RNA, 14 nt, Human
gcgggcugggcagc

SEQ ID NO: 3761684 - RNA, 19 nt, Human
gcgggcuuauuuauuaaca

SEQ ID NO: 3761685 - RNA, 15 nt, Human
gcgggcuuccuccug

SEQ ID NO: 3761686 - RNA, 15 nt, Human
gcggggacagcuccu

SEQ ID NO: 3761687 - RNA, 18 nt, Human
gcggggacagcuccuucu

SEQ ID NO: 3761688 - RNA, 19 nt, Human
gcggggacucgguaagcac

SEQ ID NO: 3761689 - RNA, 12 nt, Human
gcggggccuugc

SEQ ID NO: 3761690 - RNA, 22 nt, Human
gcggggcugucggcgcugcccc

SEQ ID NO: 3761691 - RNA, 15 nt, Human
gcgggggccagggaa

SEQ ID NO: 3761692 - RNA, 13 nt, Human
gcggggggaggga

SEQ ID NO: 3761693 - RNA, 19 nt, Human
gcgggucacaggagggagg

SEQ ID NO: 3761694 - RNA, 15 nt, Human
gcgggucugcuccca

SEQ ID NO: 3761695 - RNA, 14 nt, Human
gcgguccacccagg

SEQ ID NO: 3761696 - RNA, 19 nt, Human
gcgguccacccaggagccc

SEQ ID NO: 3761697 - RNA, 22 nt, Human
gcgguccccuccgccaggcgag

SEQ ID NO: 3761698 - RNA, 20 nt, Human
gcggucucaggcugguggga

SEQ ID NO: 3761699 - RNA, 19 nt, Human
gcggucuucaacauccugc

SEQ ID NO: 3761700 - RNA, 19 nt, Human
gcggugagaggggaacaga

SEQ ID NO: 3761701 - RNA, 18 nt, Human
gcggugcccaaccacacu

SEQ ID NO: 3761702 - RNA, 19 nt, Human
gcggugcuaucucccccag

SEQ ID NO: 3761703 - RNA, 18 nt, Human
gcggugcuguccucaggu

SEQ ID NO: 3761704 - RNA, 20 nt, Human
gcggugggaccuagggaggc

SEQ ID NO: 3761705 - RNA, 21 nt, Human
gcggugucucuccugccccuu

SEQ ID NO: 3761706 - RNA, 19 nt, Human
gcgguuauaaaaaaugguu

SEQ ID NO: 3761707 - RNA, 18 nt, Human
gcgguuuaucgcccuggc

SEQ ID NO: 3761708 - RNA, 17 nt, Human
gcguaggcuacagagaa

SEQ ID NO: 3761709 - RNA, 20 nt, Human
gcguaggcuacagagaagcc

SEQ ID NO: 3761710 - RNA, 19 nt, Human
gcguagugcagcagggcag

SEQ ID NO: 3761711 - RNA, 19 nt, Human
gcguaugcaguguagauuu

SEQ ID NO: 3761712 - RNA, 18 nt, Human
gcguauggcuuuauuuuu

SEQ ID NO: 3761713 - RNA, 17 nt, Human
gcgucacaacaaccugg

SEQ ID NO: 3761714 - RNA, 15 nt, Human
gcgucagccuccagc

SEQ ID NO: 3761715 - RNA, 20 nt, Human
gcgucagccuccagccucug

SEQ ID NO: 3761716 - RNA, 21 nt, Human
gcgucagccuccagccucugu

SEQ ID NO: 3761717 - RNA, 17 nt, Human
gcgucagcugcucccug

SEQ ID NO: 3761718 - RNA, 21 nt, Human
gcgucaggguuggugugcuga

SEQ ID NO: 3761719 - RNA, 16 nt, Human
gcgucaguauuuuccc

SEQ ID NO: 3761720 - RNA, 14 nt, Human
gcgucagucuuuuu

SEQ ID NO: 3761721 - RNA, 15 nt, Human
gcgucaucugguccu

SEQ ID NO: 3761722 - RNA, 15 nt, Human
gcgucccgcaccugu

SEQ ID NO: 3761723 - RNA, 16 nt, Human
gcgucccuagcaguga

SEQ ID NO: 3761724 - RNA, 11 nt, Human
gcgucccuggc

SEQ ID NO: 3761725 - RNA, 16 nt, Human
gcguccuccucuguga

SEQ ID NO: 3761726 - RNA, 13 nt, Human
gcguccuguccac

SEQ ID NO: 3761727 - RNA, 15 nt, Human
gcgucgguccuggug

SEQ ID NO: 3761728 - RNA, 23 nt, Human
gcgucucccaucuuaacucuuug

SEQ ID NO: 3761729 - RNA, 18 nt, Human
gcgucugucuucaagggc

SEQ ID NO: 3761730 - RNA, 13 nt, Human
gcgucugugugcg

SEQ ID NO: 3761731 - RNA, 17 nt, Human
gcgucuguucccccuuc

SEQ ID NO: 3761732 - RNA, 12 nt, Human
gcgucuuccuga

SEQ ID NO: 3761733 - RNA, 14 nt, Human
gcgucuuccugagu

SEQ ID NO: 3761734 - RNA, 12 nt, Human
gcgugaaacaca

SEQ ID NO: 3761735 - RNA, 16 nt, Human
gcgugaaggccgagaa

SEQ ID NO: 3761736 - RNA, 16 nt, Human
gcgugacucacccaag

SEQ ID NO: 3761737 - RNA, 15 nt, Human
gcgugagaccugccc

SEQ ID NO: 3761738 - RNA, 11 nt, Human
gcgugagacgc

SEQ ID NO: 3761739 - RNA, 18 nt, Human
gcgugagccacugcaccg

SEQ ID NO: 3761740 - RNA, 14 nt, Human
gcgugagcugagca

SEQ ID NO: 3761741 - RNA, 12 nt, Human
gcgugagcuuaa

SEQ ID NO: 3761742 - RNA, 16 nt, Human
gcgugaggucccagga

SEQ ID NO: 3761743 - RNA, 20 nt, Human
gcgugaucaaagccacacuc

SEQ ID NO: 3761744 - RNA, 15 nt, Human
gcgugaucucagcuc

SEQ ID NO: 3761745 - RNA, 23 nt, Human
gcgugaucucggcucacugcaac

SEQ ID NO: 3761746 - RNA, 14 nt, Human
gcgugcacacacca

SEQ ID NO: 3761747 - RNA, 18 nt, Human
gcgugcacacaccagagc

SEQ ID NO: 3761748 - RNA, 14 nt, Human
gcgugcccggggca

SEQ ID NO: 3761749 - RNA, 17 nt, Human
gcgugcccggggcagca

SEQ ID NO: 3761750 - RNA, 20 nt, Human
gcgugccgugugagugugac

SEQ ID NO: 3761751 - RNA, 21 nt, Human
gcgugcgcaucuugccuccag

SEQ ID NO: 3761752 - RNA, 23 nt, Human
gcgugcgcaucuugccuccaggu

SEQ ID NO: 3761753 - RNA, 13 nt, Human
gcguggacucugc

SEQ ID NO: 3761754 - RNA, 14 nt, Human
gcguggacucugca

SEQ ID NO: 3761755 - RNA, 20 nt, Human
gcguggagggaggccccagg

SEQ ID NO: 3761756 - RNA, 19 nt, Human
gccugcguugguccagagc

SEQ ID NO: 3761757 - RNA, 20 nt, Human
gccugcuagcuagcucaacu

SEQ ID NO: 3761758 - RNA, 22 nt, Human
gccugcuagcuagcucaacuag

SEQ ID NO: 3761759 - RNA, 16 nt, Human
gccugcucccagcagc

SEQ ID NO: 3761760 - RNA, 17 nt, Human
gccugcucccagcagcc

SEQ ID NO: 3761761 - RNA, 22 nt, Human
gccugcucccagcagcccuaag

SEQ ID NO: 3761762 - RNA, 13 nt, Human
gccugcuccccca

SEQ ID NO: 3761763 - RNA, 12 nt, Human
gccugcuccuuc

SEQ ID NO: 3761764 - RNA, 15 nt, Human
gccugcuccuucccu

SEQ ID NO: 3761765 - RNA, 20 nt, Human
gccugcuccuucccuugcua

SEQ ID NO: 3761766 - RNA, 18 nt, Human
gccugcucuuuggccuga

SEQ ID NO: 3761767 - RNA, 23 nt, Human
gccugcugaaugauuuccaaaga

SEQ ID NO: 3761768 - RNA, 11 nt, Human
gccugcugcau

SEQ ID NO: 3761769 - RNA, 12 nt, Human
gccugcugcuga

SEQ ID NO: 3761770 - RNA, 18 nt, Human
gccugcuggaagcccagc

SEQ ID NO: 3761771 - RNA, 19 nt, Human
gccugcuggaggccucagg

SEQ ID NO: 3761772 - RNA, 13 nt, Human
gccugcuggaucu

SEQ ID NO: 3761773 - RNA, 22 nt, Human
gccugcuggcacccaccgugga

SEQ ID NO: 3761774 - RNA, 19 nt, Human
gccugcugggcucuccacc

SEQ ID NO: 3761775 - RNA, 20 nt, Human
gccugcugggcucuccaccu

SEQ ID NO: 3761776 - RNA, 23 nt, Human
gccugcugggcucuccaccucag

SEQ ID NO: 3761777 - RNA, 22 nt, Human
gccugcuggucacagccuccuc

SEQ ID NO: 3761778 - RNA, 22 nt, Human
gccugcugugauuccacuacac

SEQ ID NO: 3761779 - RNA, 16 nt, Human
gccugcuuccugucuu

SEQ ID NO: 3761780 - RNA, 22 nt, Human
gccugcuuuucacugcugcaag

SEQ ID NO: 3761781 - RNA, 23 nt, Human
gccuggaagacagagaccuccug

SEQ ID NO: 3761782 - RNA, 23 nt, Human
gccuggacccguucaugggggag

SEQ ID NO: 3761783 - RNA, 13 nt, Human
gccuggaccucug

SEQ ID NO: 3761784 - RNA, 14 nt, Human
gccuggaccugccu

SEQ ID NO: 3761785 - RNA, 15 nt, Human
gccuggaccugccuc

SEQ ID NO: 3761786 - RNA, 16 nt, Human
gccuggaccugccucc

SEQ ID NO: 3761787 - RNA, 17 nt, Human
gccuggaccugccuccu

SEQ ID NO: 3761788 - RNA, 23 nt, Human
gccuggaccugccuccugccugc

SEQ ID NO: 3761789 - RNA, 24 nt, Human
gccuggagacccaccccaccugca

SEQ ID NO: 3761790 - RNA, 23 nt, Human
gccuggagacuuagggcaccagg

SEQ ID NO: 3761791 - RNA, 18 nt, Human
gccuggagauccuccugc

SEQ ID NO: 3761792 - RNA, 20 nt, Human
gccuggagauccuccugcag

SEQ ID NO: 3761793 - RNA, 18 nt, Human
gccuggagccccacugcc

SEQ ID NO: 3761794 - RNA, 13 nt, Human
gccuggagcccuc

SEQ ID NO: 3761795 - RNA, 14 nt, Human
gccuggagcccucc

SEQ ID NO: 3761796 - RNA, 15 nt, Human
gccuggagcuccugg

SEQ ID NO: 3761797 - RNA, 21 nt, Human
gccuggaggaccugagccugc

SEQ ID NO: 3761798 - RNA, 22 nt, Human
gccuggaggaccugagccugcc

SEQ ID NO: 3761799 - RNA, 22 nt, Human
gccuggauacaguauaaaaaua

SEQ ID NO: 3761800 - RNA, 20 nt, Human
gccuggaugcggauggccgg

SEQ ID NO: 3761801 - RNA, 21 nt, Human
gccuggauucauuuccugccc

SEQ ID NO: 3761802 - RNA, 13 nt, Human
gccuggcagaacu

SEQ ID NO: 3761803 - RNA, 13 nt, Human
gccuggcagcuca

SEQ ID NO: 3761804 - RNA, 20 nt, Human
gccuggcagcucagcuuccc

SEQ ID NO: 3761805 - RNA, 17 nt, Human
gccuggcauggcaccug

SEQ ID NO: 3761806 - RNA, 17 nt, Human
gccuggccaccucucuc

SEQ ID NO: 3761807 - RNA, 15 nt, Human
gccuggccacgcagc

SEQ ID NO: 3761808 - RNA, 13 nt, Human
gccuggccagaca

SEQ ID NO: 3761809 - RNA, 20 nt, Human
gccuggccagaugcaccagc

SEQ ID NO: 3761810 - RNA, 21 nt, Human
gccuggccagaugcaccagcc

SEQ ID NO: 3761811 - RNA, 16 nt, Human
gccuggccagccuaca

SEQ ID NO: 3761812 - RNA, 21 nt, Human
gccuggccagccuacaauggg

SEQ ID NO: 3761813 - RNA, 14 nt, Human
gccuggccaggagc

SEQ ID NO: 3761814 - RNA, 17 nt, Human
gccuggccaggagcagg

SEQ ID NO: 3761815 - RNA, 15 nt, Human
gccuggccaggagcu

SEQ ID NO: 3761816 - RNA, 14 nt, Human
gccuggccaggcag

SEQ ID NO: 3761817 - RNA, 19 nt, Human
gccuggccagggccuggaa

SEQ ID NO: 3761818 - RNA, 17 nt, Human
gccuggccagugcccug

SEQ ID NO: 3761819 - RNA, 22 nt, Human
gccuggcccacagcaggugcug

SEQ ID NO: 3761820 - RNA, 13 nt, Human
gccuggcccagcu

SEQ ID NO: 3761821 - RNA, 19 nt, Human
gccuggcccauagaaacau

SEQ ID NO: 3761822 - RNA, 13 nt, Human
gccuggccccuca

SEQ ID NO: 3761823 - RNA, 22 nt, Human
gccuggccccucagggucccug

SEQ ID NO: 3761824 - RNA, 15 nt, Human
gccuggcccugcccu

SEQ ID NO: 3761825 - RNA, 18 nt, Human
gccuggccggcaacccca

SEQ ID NO: 3761826 - RNA, 16 nt, Human
gccuggccggccagcc

SEQ ID NO: 3761827 - RNA, 18 nt, Human
gccuggccggccagccag

SEQ ID NO: 3761828 - RNA, 23 nt, Human
gccuggccggccagccagccacu

SEQ ID NO: 3761829 - RNA, 12 nt, Human
gccuggccucca

SEQ ID NO: 3761830 - RNA, 14 nt, Human
gccuggccuccagg

SEQ ID NO: 3761831 - RNA, 16 nt, Human
gccuggccuccaggcc

SEQ ID NO: 3761832 - RNA, 16 nt, Human
gccuggccuccugccu

SEQ ID NO: 3761833 - RNA, 19 nt, Human
gccuggccuccugccucua

SEQ ID NO: 3761834 - RNA, 22 nt, Human
gccuggccuccugccucuacug

SEQ ID NO: 3761835 - RNA, 10 nt, Human
gccuggccug

SEQ ID NO: 3761836 - RNA, 15 nt, Human
gccuggccugagcug

SEQ ID NO: 3761837 - RNA, 13 nt, Human
gccuggccuggca

SEQ ID NO: 3761838 - RNA, 16 nt, Human
gccuggccuggcacac

SEQ ID NO: 3761839 - RNA, 13 nt, Human
gccuggccuggcc

SEQ ID NO: 3761840 - RNA, 22 nt, Human
gccuggccuuguccucagccag

SEQ ID NO: 3761841 - RNA, 17 nt, Human
gccuggcucagagccag

SEQ ID NO: 3761842 - RNA, 20 nt, Human
gccuggcuccaaacccucga

SEQ ID NO: 3761843 - RNA, 17 nt, Human
gccuggcucccaggaca

SEQ ID NO: 3761844 - RNA, 18 nt, Human
gccuggcucccaggacac

SEQ ID NO: 3761845 - RNA, 16 nt, Human
gccuggcuccccuggg

SEQ ID NO: 3761846 - RNA, 16 nt, Human
gccuggcucccucacu

SEQ ID NO: 3761847 - RNA, 21 nt, Human
gccuggcucccucacucucag

SEQ ID NO: 3761848 - RNA, 19 nt, Human
gccuggcuccgcugugugg

SEQ ID NO: 3761849 - RNA, 21 nt, Human
gccuggcugcagccugcgcca

SEQ ID NO: 3761850 - RNA, 16 nt, Human
gccuggcuggcugagg

SEQ ID NO: 3761851 - RNA, 16 nt, Human
gccuggcuucuccuuu

SEQ ID NO: 3761852 - RNA, 15 nt, Human
gccuggcuucuggag

SEQ ID NO: 3761853 - RNA, 16 nt, Human
gccuggcuucuggagc

SEQ ID NO: 3761854 - RNA, 20 nt, Human
gccuggcuucuuucucucag

SEQ ID NO: 3761855 - RNA, 18 nt, Human
gccugggaaauaagcccc

SEQ ID NO: 3761856 - RNA, 21 nt, Human
gccugggaaccuuccugucuu

SEQ ID NO: 3761857 - RNA, 23 nt, Human
gccugggaauguauuauucugca

SEQ ID NO: 3761858 - RNA, 22 nt, Human
gccugggacaacugcucccacc

SEQ ID NO: 3761859 - RNA, 21 nt, Human
gccugggacuuccaugccuua

SEQ ID NO: 3761860 - RNA, 21 nt, Human
gccugggaggucaaggcugca

SEQ ID NO: 3761861 - RNA, 22 nt, Human
gccugggaggucaaggcugcag

SEQ ID NO: 3761862 - RNA, 16 nt, Human
gccugggcaacagagc

SEQ ID NO: 3761863 - RNA, 22 nt, Human
gccugggcaacauagugagacc

SEQ ID NO: 3761864 - RNA, 17 nt, Human
gccugggcagccaggcu

SEQ ID NO: 3761865 - RNA, 13 nt, Human
gccugggcagugg

SEQ ID NO: 3761866 - RNA, 14 nt, Human
gccugggcagugga

SEQ ID NO: 3761867 - RNA, 20 nt, Human
gccugggccacagggcgaga

SEQ ID NO: 3761868 - RNA, 21 nt, Human
gccugggcccaucucccugcu

SEQ ID NO: 3761869 - RNA, 20 nt, Human
gccugggccccagcucgcgg

SEQ ID NO: 3761870 - RNA, 20 nt, Human
gccugggccuauggagagcc

SEQ ID NO: 3761871 - RNA, 21 nt, Human
gccugggccuauggagagccc

SEQ ID NO: 3761872 - RNA, 22 nt, Human
gccugggccuauggagagcccu

SEQ ID NO: 3761873 - RNA, 21 nt, Human
gccugggccuccucacaacau

SEQ ID NO: 3761874 - RNA, 13 nt, Human
gccugggccuggc

SEQ ID NO: 3761875 - RNA, 14 nt, Human
gccugggccuggcu

SEQ ID NO: 3761876 - RNA, 15 nt, Human
gccugggccuggcuc

SEQ ID NO: 3761877 - RNA, 17 nt, Human
gccugggcgcugguccu

SEQ ID NO: 3761878 - RNA, 18 nt, Human
gccugggcuguuggcacu

SEQ ID NO: 3761879 - RNA, 13 nt, Human
gccuggggccuga

SEQ ID NO: 3761880 - RNA, 14 nt, Human
gccuggggccugag

SEQ ID NO: 3761881 - RNA, 17 nt, Human
gccuggggccuggcagg

SEQ ID NO: 3761882 - RNA, 20 nt, Human
gccuggggcucuaacgccug

SEQ ID NO: 3761883 - RNA, 22 nt, Human
gccuggggcucuaacgccugag

SEQ ID NO: 3761884 - RNA, 14 nt, Human
gccuggggcuggcc

SEQ ID NO: 3761885 - RNA, 17 nt, Human
gccuggggcuggccucc

SEQ ID NO: 3761886 - RNA, 19 nt, Human
gccugggggaguuuuccuc

SEQ ID NO: 3761887 - RNA, 13 nt, Human
gccugggggccug

SEQ ID NO: 3761888 - RNA, 16 nt, Human
gccugggggccuggcu

SEQ ID NO: 3761889 - RNA, 20 nt, Human
gccugggggccuggcuggcu

SEQ ID NO: 3761890 - RNA, 17 nt, Human
gccugggggugccagga

SEQ ID NO: 3761891 - RNA, 21 nt, Human
gccugggggugccaggaccag

SEQ ID NO: 3761892 - RNA, 22 nt, Human
gccugggguaccaagagacucc

SEQ ID NO: 3761893 - RNA, 14 nt, Human
gccuggggucaggc

SEQ ID NO: 3761894 - RNA, 15 nt, Human
gccugggucuccuaa

SEQ ID NO: 3761895 - RNA, 13 nt, Human
gccugggugacag

SEQ ID NO: 3761896 - RNA, 20 nt, Human
gccugggugacagagcaaga

SEQ ID NO: 3761897 - RNA, 14 nt, Human
gccugggugcuggc

SEQ ID NO: 3761898 - RNA, 15 nt, Human
gccugggugcuggcu

SEQ ID NO: 3761899 - RNA, 22 nt, Human
gccuggguggggcugcuccucc

SEQ ID NO: 3761900 - RNA, 22 nt, Human
gccuggguguaaaaccuggaga

SEQ ID NO: 3761901 - RNA, 20 nt, Human
gccuggguuugguguauggu

SEQ ID NO: 3761902 - RNA, 22 nt, Human
gccuggguuuuguucccuauuu

SEQ ID NO: 3761903 - RNA, 17 nt, Human
gccugguauggcugcag

SEQ ID NO: 3761904 - RNA, 22 nt, Human
gcguggagggguaggggcuggg

SEQ ID NO: 3761905 - RNA, 13 nt, Human
gcguggauuaaac

SEQ ID NO: 3761906 - RNA, 15 nt, Human
gcguggcccaaggcu

SEQ ID NO: 3761907 - RNA, 20 nt, Human
gcguggcccaaggcuggcag

SEQ ID NO: 3761908 - RNA, 20 nt, Human
gcguggcgcaguggcccuga

SEQ ID NO: 3761909 - RNA, 23 nt, Human
gcguggcucuaaaagguaaugug

SEQ ID NO: 3761910 - RNA, 16 nt, Human
gcgugggagccagccu

SEQ ID NO: 3761911 - RNA, 13 nt, Human
gcgugggucagaa

SEQ ID NO: 3761912 - RNA, 13 nt, Human
gcguggugccauc

SEQ ID NO: 3761913 - RNA, 14 nt, Human
gcguggugccaucc

SEQ ID NO: 3761914 - RNA, 13 nt, Human
gcguggugcgagu

SEQ ID NO: 3761915 - RNA, 22 nt, Human
gcgugguguggagugugugucu

SEQ ID NO: 3761916 - RNA, 15 nt, Human
gcgugugcaggagcg

SEQ ID NO: 3761917 - RNA, 14 nt, Human
gcguguggcucacg

SEQ ID NO: 3761918 - RNA, 18 nt, Human
gcguguguccaugugugu

SEQ ID NO: 3761919 - RNA, 23 nt, Human
gcguguguccaugugugugcaag

SEQ ID NO: 3761920 - RNA, 15 nt, Human
gcguguucucagagg

SEQ ID NO: 3761921 - RNA, 14 nt, Human
gcguguuugcacgu

SEQ ID NO: 3761922 - RNA, 15 nt, Human
gcguguuugcacguu

SEQ ID NO: 3761923 - RNA, 16 nt, Human
gcguuccuuucuuuuc

SEQ ID NO: 3761924 - RNA, 23 nt, Human
gcguucuuaggcugcugggaugg

SEQ ID NO: 3761925 - RNA, 11 nt, Human
gcguucuugua

SEQ ID NO: 3761926 - RNA, 16 nt, Human
gcguucuuguaauuuu

SEQ ID NO: 3761927 - RNA, 17 nt, Human
gcguucuuguaauuuua

SEQ ID NO: 3761928 - RNA, 15 nt, Human
gcguugcaugucgug

SEQ ID NO: 3761929 - RNA, 17 nt, Human
gcguuggaauuaaaaca

SEQ ID NO: 3761930 - RNA, 22 nt, Human
gcguugguccagagcggaggcu

SEQ ID NO: 3761931 - RNA, 19 nt, Human
gcguuguaaaauauagcug

SEQ ID NO: 3761932 - RNA, 16 nt, Human
gcguuguuacaggaag

SEQ ID NO: 3761933 - RNA, 14 nt, Human
gcguuuagaccaag

SEQ ID NO: 3761934 - RNA, 19 nt, Human
gcguuugcccaaaucugcc

SEQ ID NO: 3761935 - RNA, 18 nt, Human
gcuaaaaaagcugaauca

SEQ ID NO: 3761936 - RNA, 22 nt, Human
gcuaaaaaugagcuugauuaaa

SEQ ID NO: 3761937 - RNA, 17 nt, Human
gcuaaaacaaugaauaa

SEQ ID NO: 3761938 - RNA, 16 nt, Human
gcuaaaaccugagcua

SEQ ID NO: 3761939 - RNA, 23 nt, Human
gcuaaaauaaagaaauagaacaa

SEQ ID NO: 3761940 - RNA, 17 nt, Human
gcuaaaauguuuucagc

SEQ ID NO: 3761941 - RNA, 20 nt, Human
gcuaaacacugcgcuuuauu

SEQ ID NO: 3761942 - RNA, 22 nt, Human
gcuaaacacugcgcuuuauuuu

SEQ ID NO: 3761943 - RNA, 23 nt, Human
gcuaaacuccuuccuggccugag

SEQ ID NO: 3761944 - RNA, 15 nt, Human
gcuaaacuuuucuga

SEQ ID NO: 3761945 - RNA, 17 nt, Human
gcuaaacuuuucugaua

SEQ ID NO: 3761946 - RNA, 13 nt, Human
gcuaaagaaaaag

SEQ ID NO: 3761947 - RNA, 19 nt, Human
gcuaaagaaguuugaacau

SEQ ID NO: 3761948 - RNA, 15 nt, Human
gcuaaagacaugaag

SEQ ID NO: 3761949 - RNA, 20 nt, Human
gcuaaagacugaucucaggg

SEQ ID NO: 3761950 - RNA, 18 nt, Human
gcuaaagagcccuugccu

SEQ ID NO: 3761951 - RNA, 15 nt, Human
gcuaaagcccagaga

SEQ ID NO: 3761952 - RNA, 16 nt, Human
gcuaaagcccagagac

SEQ ID NO: 3761953 - RNA, 20 nt, Human
gcuaaauaaaauuuguugca

SEQ ID NO: 3761954 - RNA, 19 nt, Human
gcuaaauccuuuacuguua

SEQ ID NO: 3761955 - RNA, 16 nt, Human
gcuaaaucuccuauuu

SEQ ID NO: 3761956 - RNA, 13 nt, Human
gcuaaaugugaau

SEQ ID NO: 3761957 - RNA, 16 nt, Human
gcuaaaugugaaugau

SEQ ID NO: 3761958 - RNA, 20 nt, Human
gcuaaauucuccacauuuug

SEQ ID NO: 3761959 - RNA, 18 nt, Human
gcuaaauugauguugaug

SEQ ID NO: 3761960 - RNA, 20 nt, Human
gcuaacaaggcgaaauccug

SEQ ID NO: 3761961 - RNA, 19 nt, Human
gcuaacacggugaaacccg

SEQ ID NO: 3761962 - RNA, 17 nt, Human
gcuaacacuggccccua

SEQ ID NO: 3761963 - RNA, 13 nt, Human
gcuaacaugaaga

SEQ ID NO: 3761964 - RNA, 14 nt, Human
gcuaacauggaagu

SEQ ID NO: 3761965 - RNA, 17 nt, Human
gcuaacauggaaguacu

SEQ ID NO: 3761966 - RNA, 20 nt, Human
gcuaacauggugaaaccccg

SEQ ID NO: 3761967 - RNA, 20 nt, Human
gcuaaccuuauccugcauug

SEQ ID NO: 3761968 - RNA, 15 nt, Human
gcuaacugaacuuug

SEQ ID NO: 3761969 - RNA, 13 nt, Human
gcuaacuggaagc

SEQ ID NO: 3761970 - RNA, 14 nt, Human
gcuaacuguaaauc

SEQ ID NO: 3761971 - RNA, 23 nt, Human
gcuaagaaaccaggaguaaaaga

SEQ ID NO: 3761972 - RNA, 19 nt, Human
gcuaagaagggaaaauauc

SEQ ID NO: 3761973 - RNA, 17 nt, Human
gcuaagaauauuugaau

SEQ ID NO: 3761974 - RNA, 20 nt, Human
gcuaagagcuagcgcugccg

SEQ ID NO: 3761975 - RNA, 13 nt, Human
gcuaagagggagg

SEQ ID NO: 3761976 - RNA, 21 nt, Human
gcuaagagggagggagggcuc

SEQ ID NO: 3761977 - RNA, 12 nt, Human
gcuaagaugcuc

SEQ ID NO: 3761978 - RNA, 19 nt, Human
gcuaagcaagcuaaccuua

SEQ ID NO: 3761979 - RNA, 22 nt, Human
gcuaagcucacguccugagaaa

SEQ ID NO: 3761980 - RNA, 20 nt, Human
gcuaaggacauuucccaggg

SEQ ID NO: 3761981 - RNA, 11 nt, Human
gcuaaggacuu

SEQ ID NO: 3761982 - RNA, 22 nt, Human
gcuaaggaggggaaaaaaaugu

SEQ ID NO: 3761983 - RNA, 15 nt, Human
gcuaaggcaccagcc

SEQ ID NO: 3761984 - RNA, 18 nt, Human
gcuaaggcguggagcugc

SEQ ID NO: 3761985 - RNA, 20 nt, Human
gcuaagggaagacauuucuu

SEQ ID NO: 3761986 - RNA, 22 nt, Human
gcuaagggaagacauuucuuuu

SEQ ID NO: 3761987 - RNA, 19 nt, Human
gcuaagggugggugcucag

SEQ ID NO: 3761988 - RNA, 21 nt, Human
gcuaagggugggugcucagaa

SEQ ID NO: 3761989 - RNA, 18 nt, Human
gcuaagugaaaaggucau

SEQ ID NO: 3761990 - RNA, 23 nt, Human
gcuaagugauccucccaccucag

SEQ ID NO: 3761991 - RNA, 13 nt, Human
gcuaagugugaac

SEQ ID NO: 3761992 - RNA, 21 nt, Human
gcuaauaaaaagcuuuugucu

SEQ ID NO: 3761993 - RNA, 17 nt, Human
gcuaauaaaauaucauu

SEQ ID NO: 3761994 - RNA, 18 nt, Human
gcuaauaaaauaucauuc

SEQ ID NO: 3761995 - RNA, 21 nt, Human
gcuaauaaaauaucauucagc

SEQ ID NO: 3761996 - RNA, 17 nt, Human
gcuaauaauguuaacca

SEQ ID NO: 3761997 - RNA, 20 nt, Human
gcuaauaucaauagaaggau

SEQ ID NO: 3761998 - RNA, 16 nt, Human
gcuaaucagcauucuc

SEQ ID NO: 3761999 - RNA, 22 nt, Human
gcuaaucagcauucucacuccu

SEQ ID NO: 3762000 - RNA, 19 nt, Human
gcuaaucagugucucacac

SEQ ID NO: 3762001 - RNA, 17 nt, Human
gcuaaucuguagggcug

SEQ ID NO: 3762002 - RNA, 18 nt, Human
gcuaaucuguagggcugg

SEQ ID NO: 3762003 - RNA, 20 nt, Human
gcuaaucuguagggcuggac

SEQ ID NO: 3762004 - RNA, 21 nt, Human
gcuaaucuguagggcuggacc

SEQ ID NO: 3762005 - RNA, 22 nt, Human
gcuaaucuguagggcuggaccu

SEQ ID NO: 3762006 - RNA, 17 nt, Human
gcuaaucuugugaaaau

SEQ ID NO: 3762007 - RNA, 21 nt, Human
gcuaaugaagggaaaggauau

SEQ ID NO: 3762008 - RNA, 13 nt, Human
gcuaaugggacac

SEQ ID NO: 3762009 - RNA, 14 nt, Human
gcuaauuauuuuaa

SEQ ID NO: 3762010 - RNA, 17 nt, Human
gcuaauuauuuuaauua

SEQ ID NO: 3762011 - RNA, 22 nt, Human
gcuaauucaaggaauuucuuaa

SEQ ID NO: 3762012 - RNA, 16 nt, Human
gcuaauucuacucaca

SEQ ID NO: 3762013 - RNA, 15 nt, Human
gcuaauucuuugcaa

SEQ ID NO: 3762014 - RNA, 21 nt, Human
gcuaauugcuguugaaagcaa

SEQ ID NO: 3762015 - RNA, 19 nt, Human
gcuaauugggaguccaggc

SEQ ID NO: 3762016 - RNA, 14 nt, Human
gcuaauuuucucaa

SEQ ID NO: 3762017 - RNA, 17 nt, Human
gcuaauuuucucaaaag

SEQ ID NO: 3762018 - RNA, 19 nt, Human
gcuaauuuucucaaaagca

SEQ ID NO: 3762019 - RNA, 17 nt, Human
gcuaauuuuuacuuuuu

SEQ ID NO: 3762020 - RNA, 18 nt, Human
gcuaauuuuuauuaauuu

SEQ ID NO: 3762021 - RNA, 21 nt, Human
gcuaauuuuuuuguauuuuag

SEQ ID NO: 3762022 - RNA, 18 nt, Human
gcuacaaaaacacagcaa

SEQ ID NO: 3762023 - RNA, 16 nt, Human
gcuacaaagaagacau

SEQ ID NO: 3762024 - RNA, 14 nt, Human
gcuacaacagccuc

SEQ ID NO: 3762025 - RNA, 15 nt, Human
gcuacaacuucagca

SEQ ID NO: 3762026 - RNA, 15 nt, Human
gcuacaauuuucucc

SEQ ID NO: 3762027 - RNA, 22 nt, Human
gcuacaauuuucucccaggaag

SEQ ID NO: 3762028 - RNA, 19 nt, Human
gcuacaccacucuggcagc

SEQ ID NO: 3762029 - RNA, 20 nt, Human
gcuacaccacucuggcagcc

SEQ ID NO: 3762030 - RNA, 16 nt, Human
gcuacagagaaaccag

SEQ ID NO: 3762031 - RNA, 19 nt, Human
gcuacagagaaaccagcuu

SEQ ID NO: 3762032 - RNA, 13 nt, Human
gcuacagagaagc

SEQ ID NO: 3762033 - RNA, 16 nt, Human
gcuacagagaagccuu

SEQ ID NO: 3762034 - RNA, 17 nt, Human
gcuacagagaagccuuc

SEQ ID NO: 3762035 - RNA, 12 nt, Human
gcuacagagccg

SEQ ID NO: 3762036 - RNA, 22 nt, Human
gcuacagagccgagcaauauuu

SEQ ID NO: 3762037 - RNA, 23 nt, Human
gcuacaggaagcaccccaugcca

SEQ ID NO: 3762038 - RNA, 18 nt, Human
gcuacagguuacaacaga

SEQ ID NO: 3762039 - RNA, 19 nt, Human
gcuacagguuacaacagau

SEQ ID NO: 3762040 - RNA, 20 nt, Human
gcuacagguuacaacagauu

SEQ ID NO: 3762041 - RNA, 23 nt, Human
gcuacaugacgacaaagcugcua

SEQ ID NO: 3762042 - RNA, 20 nt, Human
gcuacauggggucugggugg

SEQ ID NO: 3762043 - RNA, 15 nt, Human
gcuaccaccagcugu

SEQ ID NO: 3762044 - RNA, 14 nt, Human
gcuaccaguauuua

SEQ ID NO: 3762045 - RNA, 15 nt, Human
gcuaccaguauuuag

SEQ ID NO: 3762046 - RNA, 19 nt, Human
gcuaccaguauuuagaagc

SEQ ID NO: 3762047 - RNA, 21 nt, Human
gcuaccaguauuuagaagcca

SEQ ID NO: 3762048 - RNA, 21 nt, Human
gcuacccgggaagggggcugg

SEQ ID NO: 3762049 - RNA, 16 nt, Human
gcuacccuuuuucucc

SEQ ID NO: 3762050 - RNA, 19 nt, Human
gcuacccuuuuucuccagc

SEQ ID NO: 3762051 - RNA, 21 nt, Human
gcuacccuuuuucuccagcug

SEQ ID NO: 3762052 - RNA, 17 nt, Human
gcuaccucaagggggac

SEQ ID NO: 3762053 - RNA, 15 nt, Human
cuguucccccugugc

SEQ ID NO: 3762054 - RNA, 16 nt, Human
cuguucccccugugca

SEQ ID NO: 3762055 - RNA, 17 nt, Human
cuguucccccugugcag

SEQ ID NO: 3762056 - RNA, 17 nt, Human
cuguucccccuucacaa

SEQ ID NO: 3762057 - RNA, 14 nt, Human
cuguuccccucacu

SEQ ID NO: 3762058 - RNA, 15 nt, Human
cuguuccccucuccc

SEQ ID NO: 3762059 - RNA, 21 nt, Human
cuguuccccucucccuucccu

SEQ ID NO: 3762060 - RNA, 17 nt, Human
cuguucccucugcuccu

SEQ ID NO: 3762061 - RNA, 21 nt, Human
cuguuccugcugcugucuggg

SEQ ID NO: 3762062 - RNA, 16 nt, Human
cuguuccuguucagua

SEQ ID NO: 3762063 - RNA, 14 nt, Human
cuguuccuuuuaua

SEQ ID NO: 3762064 - RNA, 13 nt, Human
cuguucggaaggg

SEQ ID NO: 3762065 - RNA, 23 nt, Human
cuguucggaagggguuccucaaa

SEQ ID NO: 3762066 - RNA, 12 nt, Human
cuguucuaaagc

SEQ ID NO: 3762067 - RNA, 19 nt, Human
cuguucuacauagaugcuu

SEQ ID NO: 3762068 - RNA, 15 nt, Human
cuguucucuugggaa

SEQ ID NO: 3762069 - RNA, 21 nt, Human
cuguucucuugggaacugaac

SEQ ID NO: 3762070 - RNA, 16 nt, Human
cuguucugcacacagc

SEQ ID NO: 3762071 - RNA, 15 nt, Human
cuguucugcacugaa

SEQ ID NO: 3762072 - RNA, 16 nt, Human
cuguucugcacugaaa

SEQ ID NO: 3762073 - RNA, 14 nt, Human
cuguucugcagaca

SEQ ID NO: 3762074 - RNA, 14 nt, Human
cuguucugggcucu

SEQ ID NO: 3762075 - RNA, 14 nt, Human
cuguucuguggaaa

SEQ ID NO: 3762076 - RNA, 21 nt, Human
cuguucuguggaaaguguaaa

SEQ ID NO: 3762077 - RNA, 22 nt, Human
cuguucuguggaaaguguaaag

SEQ ID NO: 3762078 - RNA, 21 nt, Human
cuguucugugguuccucugcu

SEQ ID NO: 3762079 - RNA, 16 nt, Human
cuguucuuagcucaau

SEQ ID NO: 3762080 - RNA, 19 nt, Human
cuguucuuagcucaaugag

SEQ ID NO: 3762081 - RNA, 15 nt, Human
cuguucuuccuccag

SEQ ID NO: 3762082 - RNA, 20 nt, Human
cuguucuuccuccagcugca

SEQ ID NO: 3762083 - RNA, 22 nt, Human
cuguucuuccuccagcugcacc

SEQ ID NO: 3762084 - RNA, 12 nt, Human
cuguucuuccug

SEQ ID NO: 3762085 - RNA, 22 nt, Human
cuguucuugcugcuagaacuuu

SEQ ID NO: 3762086 - RNA, 16 nt, Human
cuguucuuuaauuuau

SEQ ID NO: 3762087 - RNA, 15 nt, Human
cuguucuuuccaaag

SEQ ID NO: 3762088 - RNA, 19 nt, Human
cuguucuuuccaaaguaca

SEQ ID NO: 3762089 - RNA, 21 nt, Human
cuguugaaaauuauuuuaaac

SEQ ID NO: 3762090 - RNA, 15 nt, Human
cuguugaaagcaaaa

SEQ ID NO: 3762091 - RNA, 18 nt, Human
cuguugaaagcaaaaaug

SEQ ID NO: 3762092 - RNA, 18 nt, Human
cuguugaagucaccuugu

SEQ ID NO: 3762093 - RNA, 22 nt, Human
cuguugaauuuuguucucuggg

SEQ ID NO: 3762094 - RNA, 21 nt, Human
cuguugacauauuuaauguuu

SEQ ID NO: 3762095 - RNA, 23 nt, Human
cuguugacauauuuaauguuuua

SEQ ID NO: 3762096 - RNA, 20 nt, Human
cuguugacauccaagcuucc

SEQ ID NO: 3762097 - RNA, 23 nt, Human
cuguugacauccaagcuuccuuu

SEQ ID NO: 3762098 - RNA, 17 nt, Human
cuguugacgaagucucu

SEQ ID NO: 3762099 - RNA, 19 nt, Human
cuguugacucuaguacugu

SEQ ID NO: 3762100 - RNA, 22 nt, Human
cuguugacucuaguacugugaa

SEQ ID NO: 3762101 - RNA, 22 nt, Human
cuguugacuggcugugugaccu

SEQ ID NO: 3762102 - RNA, 18 nt, Human
cuguugauaaaaacucag

SEQ ID NO: 3762103 - RNA, 18 nt, Human
cuguugauaaauccauca

SEQ ID NO: 3762104 - RNA, 21 nt, Human
cuguugaugaggccucuugga

SEQ ID NO: 3762105 - RNA, 16 nt, Human
cuguugauguaucuga

SEQ ID NO: 3762106 - RNA, 23 nt, Human
cuguugauguaucugaguugcca

SEQ ID NO: 3762107 - RNA, 15 nt, Human
cuguugauugcagga

SEQ ID NO: 3762108 - RNA, 17 nt, Human
cuguugauuucuuucca

SEQ ID NO: 3762109 - RNA, 19 nt, Human
cuguugcaaacucagccuc

SEQ ID NO: 3762110 - RNA, 17 nt, Human
cuguugcacccagcccu

SEQ ID NO: 3762111 - RNA, 13 nt, Human
cuguugccacaac

SEQ ID NO: 3762112 - RNA, 14 nt, Human
cuguugcccaggcu

SEQ ID NO: 3762113 - RNA, 16 nt, Human
cuguugcccaggcugg

SEQ ID NO: 3762114 - RNA, 20 nt, Human
cuguugcccuuucuguacca

SEQ ID NO: 3762115 - RNA, 12 nt, Human
cuguugccucau

SEQ ID NO: 3762116 - RNA, 23 nt, Human
cuguugcguaacuggcuguguuc

SEQ ID NO: 3762117 - RNA, 18 nt, Human
cuguugcgugacacucuc

SEQ ID NO: 3762118 - RNA, 22 nt, Human
cuguugcuaagccccagcaagc

SEQ ID NO: 3762119 - RNA, 11 nt, Human
cuguugcucaa

SEQ ID NO: 3762120 - RNA, 16 nt, Human
cuguugcugaauaggc

SEQ ID NO: 3762121 - RNA, 22 nt, Human
cuguugcugauuuuauucuuga

SEQ ID NO: 3762122 - RNA, 16 nt, Human
cuguugcuuacaauuu

SEQ ID NO: 3762123 - RNA, 11 nt, Human
cuguugcuuga

SEQ ID NO: 3762124 - RNA, 15 nt, Human
cuguugcuugaauag

SEQ ID NO: 3762125 - RNA, 12 nt, Human
cuguugcuuuuu

SEQ ID NO: 3762126 - RNA, 22 nt, Human
cuguuggacccgcucuggacca

SEQ ID NO: 3762127 - RNA, 18 nt, Human
cuguuggcaggcuggcca

SEQ ID NO: 3762128 - RNA, 19 nt, Human
cuguuggcaggcuggccag

SEQ ID NO: 3762129 - RNA, 12 nt, Human
cuguugggagag

SEQ ID NO: 3762130 - RNA, 17 nt, Human
cuguugggccaggagcc

SEQ ID NO: 3762131 - RNA, 17 nt, Human
cuguugggguggguaua

SEQ ID NO: 3762132 - RNA, 20 nt, Human
cuguugggguggguauaaaa

SEQ ID NO: 3762133 - RNA, 22 nt, Human
cuguugggguggguauaaaaga

SEQ ID NO: 3762134 - RNA, 20 nt, Human
cuguugguuccaagcccugg

SEQ ID NO: 3762135 - RNA, 16 nt, Human
cuguuguaacuaggcu

SEQ ID NO: 3762136 - RNA, 15 nt, Human
cuguuguaacuuaug

SEQ ID NO: 3762137 - RNA, 17 nt, Human
cuguuguaacuuaugua

SEQ ID NO: 3762138 - RNA, 20 nt, Human
cuguuguaacuuauguagau

SEQ ID NO: 3762139 - RNA, 15 nt, Human
cuguuguacauuuau

SEQ ID NO: 3762140 - RNA, 17 nt, Human
cuguuguacauuuauga

SEQ ID NO: 3762141 - RNA, 17 nt, Human
cuguugucauugcuuua

SEQ ID NO: 3762142 - RNA, 18 nt, Human
cuguugucauugcuuuac

SEQ ID NO: 3762143 - RNA, 17 nt, Human
cuguugucccucugcua

SEQ ID NO: 3762144 - RNA, 22 nt, Human
cuguuguguacguggagaggga

SEQ ID NO: 3762145 - RNA, 15 nt, Human
cuguuguguucguuc

SEQ ID NO: 3762146 - RNA, 23 nt, Human
cuguuguuaugaugugcuuaaca

SEQ ID NO: 3762147 - RNA, 17 nt, Human
cuguuguuguuaaugaa

SEQ ID NO: 3762148 - RNA, 16 nt, Human
cuguuguuuuguuuua

SEQ ID NO: 3762149 - RNA, 16 nt, Human
cuguuuaaaaaaccac

SEQ ID NO: 3762150 - RNA, 18 nt, Human
cuguuuaaaaaaccacau

SEQ ID NO: 3762151 - RNA, 22 nt, Human
cuguuuaaauauuucaagacau

SEQ ID NO: 3762152 - RNA, 12 nt, Human
cuguuuaagaga

SEQ ID NO: 3762153 - RNA, 14 nt, Human
cuguuuaagagaca

SEQ ID NO: 3762154 - RNA, 21 nt, Human
cuguuuaauauuuaaacagca

SEQ ID NO: 3762155 - RNA, 22 nt, Human
cuguuuaaucauaguuacugug

SEQ ID NO: 3762156 - RNA, 15 nt, Human
cuguuuaauguucug

SEQ ID NO: 3762157 - RNA, 17 nt, Human
cuguuuaccauuuuuca

SEQ ID NO: 3762158 - RNA, 19 nt, Human
cuguuuacuugaauaguau

SEQ ID NO: 3762159 - RNA, 14 nt, Human
cuguuuagaacaca

SEQ ID NO: 3762160 - RNA, 12 nt, Human
cuguuuagauaa

SEQ ID NO: 3762161 - RNA, 18 nt, Human
cuguuuagauaauacacc

SEQ ID NO: 3762162 - RNA, 21 nt, Human
cuguuuagauuugccauagag

SEQ ID NO: 3762163 - RNA, 16 nt, Human
cuguuuauggccucag

SEQ ID NO: 3762164 - RNA, 19 nt, Human
cuguuuauggccucagcug

SEQ ID NO: 3762165 - RNA, 14 nt, Human
cuguuuauuaaucu

SEQ ID NO: 3762166 - RNA, 18 nt, Human
cuguuuauuacuuccaug

SEQ ID NO: 3762167 - RNA, 17 nt, Human
cuguuuauucauaugca

SEQ ID NO: 3762168 - RNA, 20 nt, Human
cuguuuauucauaugcauau

SEQ ID NO: 3762169 - RNA, 15 nt, Human
cuguuuauucccauc

SEQ ID NO: 3762170 - RNA, 23 nt, Human
cuguuuauugaaagaauuauccu

SEQ ID NO: 3762171 - RNA, 12 nt, Human
cuguuucaaaca

SEQ ID NO: 3762172 - RNA, 12 nt, Human
cuguuucaaagu

SEQ ID NO: 3762173 - RNA, 11 nt, Human
cuguuucaagg

SEQ ID NO: 3762174 - RNA, 21 nt, Human
cuguuucaaggcacucuagau

SEQ ID NO: 3762175 - RNA, 22 nt, Human
cuguuucaaggcacucuagauu

SEQ ID NO: 3762176 - RNA, 21 nt, Human
cuguuucaaguucacaccugc

SEQ ID NO: 3762177 - RNA, 16 nt, Human
cuguuucccaggccca

SEQ ID NO: 3762178 - RNA, 17 nt, Human
cuguuuccuagcugugu

SEQ ID NO: 3762179 - RNA, 20 nt, Human
cuguuuccugacauugucuc

SEQ ID NO: 3762180 - RNA, 13 nt, Human
cuguuuccugggc

SEQ ID NO: 3762181 - RNA, 15 nt, Human
cuguuuccuuuuaug

SEQ ID NO: 3762182 - RNA, 20 nt, Human
cuguuucuauucucuccuca

SEQ ID NO: 3762183 - RNA, 18 nt, Human
cuguuucucagucucaca

SEQ ID NO: 3762184 - RNA, 11 nt, Human
cuguuucucau

SEQ ID NO: 3762185 - RNA, 21 nt, Human
cuguuucucugccgcuaccuc

SEQ ID NO: 3762186 - RNA, 19 nt, Human
cuguuucugaaaagaaaua

SEQ ID NO: 3762187 - RNA, 17 nt, Human
cuguuucugauuugcug

SEQ ID NO: 3762188 - RNA, 16 nt, Human
cuguuucugucaggag

SEQ ID NO: 3762189 - RNA, 13 nt, Human
cuguuucuugcuu

SEQ ID NO: 3762190 - RNA, 16 nt, Human
cuguuucuugcuugua

SEQ ID NO: 3762191 - RNA, 13 nt, Human
cuguuugagaaag

SEQ ID NO: 3762192 - RNA, 21 nt, Human
cuguuugaggaaagcaagaau

SEQ ID NO: 3762193 - RNA, 22 nt, Human
cuguuugaggauauauuuucac

SEQ ID NO: 3762194 - RNA, 18 nt, Human
cuguuugauauaccaaau

SEQ ID NO: 3762195 - RNA, 18 nt, Human
cuguuugcauuugauaca

SEQ ID NO: 3762196 - RNA, 19 nt, Human
cuguuugcuaagugaggau

SEQ ID NO: 3762197 - RNA, 14 nt, Human
cuguuugcugaugg

SEQ ID NO: 3762198 - RNA, 11 nt, Human
cuguuuggaaa

SEQ ID NO: 3762199 - RNA, 17 nt, Human
cuguuuggaaaagacag

SEQ ID NO: 3762200 - RNA, 23 nt, Human
cuguuuggaaauugauuuugaac

SEQ ID NO: 3762201 - RNA, 23 nt, Human
cuguuuggaggagcaaaggcuga

SEQ ID NO: 3762202 - RNA, 15 nt, Human
gcuaccucucugucc

SEQ ID NO: 3762203 - RNA, 22 nt, Human
gcuaccucucugucccuugcug

SEQ ID NO: 3762204 - RNA, 19 nt, Human
gcuaccugaucccacuccu

SEQ ID NO: 3762205 - RNA, 14 nt, Human
gcuaccugugugga

SEQ ID NO: 3762206 - RNA, 17 nt, Human
gcuaccuguguggacag

SEQ ID NO: 3762207 - RNA, 13 nt, Human
gcuaccuugcccc

SEQ ID NO: 3762208 - RNA, 20 nt, Human
gcuaccuugccccaacccuu

SEQ ID NO: 3762209 - RNA, 16 nt, Human
gcuaccuuucaaagcu

SEQ ID NO: 3762210 - RNA, 16 nt, Human
gcuaccuuuguauucu

SEQ ID NO: 3762211 - RNA, 15 nt, Human
gcuacgaaucuuccg

SEQ ID NO: 3762212 - RNA, 15 nt, Human
gcuacgccucuucug

SEQ ID NO: 3762213 - RNA, 17 nt, Human
gcuacgccucuucuguc

SEQ ID NO: 3762214 - RNA, 20 nt, Human
gcuacgugugauuuuucugg

SEQ ID NO: 3762215 - RNA, 19 nt, Human
gcuacguuccuauugucau

SEQ ID NO: 3762216 - RNA, 14 nt, Human
gcuacuaaugaugu

SEQ ID NO: 3762217 - RNA, 16 nt, Human
gcuacuaaugauguuu

SEQ ID NO: 3762218 - RNA, 14 nt, Human
gcuacuagcaaaau

SEQ ID NO: 3762219 - RNA, 16 nt, Human
gcuacuagcaaaauaa

SEQ ID NO: 3762220 - RNA, 16 nt, Human
gcuacuauaaagagaa

SEQ ID NO: 3762221 - RNA, 20 nt, Human
gcuacuaugauuuaauuuga

SEQ ID NO: 3762222 - RNA, 17 nt, Human
gcuacucaagaggcuga

SEQ ID NO: 3762223 - RNA, 21 nt, Human
gcuacucaagaggcugaggca

SEQ ID NO: 3762224 - RNA, 20 nt, Human
gcuacucacucaaguucaag

SEQ ID NO: 3762225 - RNA, 17 nt, Human
gcuacucagaagccuga

SEQ ID NO: 3762226 - RNA, 18 nt, Human
gcuacucagaagccugag

SEQ ID NO: 3762227 - RNA, 16 nt, Human
gcuacucagcagcccu

SEQ ID NO: 3762228 - RNA, 19 nt, Human
gcuacucagcagcccuccu

SEQ ID NO: 3762229 - RNA, 16 nt, Human
gcuacucaggaggcug

SEQ ID NO: 3762230 - RNA, 18 nt, Human
gcuacucgggaggcugag

SEQ ID NO: 3762231 - RNA, 22 nt, Human
gcuacucgggaggcugaggcac

SEQ ID NO: 3762232 - RNA, 20 nt, Human
gcuacucuaguauuccagac

SEQ ID NO: 3762233 - RNA, 17 nt, Human
gcuacucugugccagag

SEQ ID NO: 3762234 - RNA, 18 nt, Human
gcuacucugugccagagc

SEQ ID NO: 3762235 - RNA, 17 nt, Human
gcuacugauuuccuuug

SEQ ID NO: 3762236 - RNA, 20 nt, Human
gcuacugauuuccuuuggag

SEQ ID NO: 3762237 - RNA, 18 nt, Human
gcuacugcacuccagccu

SEQ ID NO: 3762238 - RNA, 17 nt, Human
gcuacugccauccuggc

SEQ ID NO: 3762239 - RNA, 18 nt, Human
gcuacugccauccuggcc

SEQ ID NO: 3762240 - RNA, 21 nt, Human
gcuacugccauccuggcccag

SEQ ID NO: 3762241 - RNA, 23 nt, Human
gcuacuggcaaaaggaucuuugu

SEQ ID NO: 3762242 - RNA, 17 nt, Human
gcuacuggggaaacugg

SEQ ID NO: 3762243 - RNA, 18 nt, Human
gcuacuguaauuuuauau

SEQ ID NO: 3762244 - RNA, 15 nt, Human
gcuacugucagcucc

SEQ ID NO: 3762245 - RNA, 21 nt, Human
gcuacugucucacugaaacau

SEQ ID NO: 3762246 - RNA, 16 nt, Human
gcuacugucuuuggaa

SEQ ID NO: 3762247 - RNA, 18 nt, Human
gcuacuguuguaagaauu

SEQ ID NO: 3762248 - RNA, 13 nt, Human
gcuacuuaagaga

SEQ ID NO: 3762249 - RNA, 16 nt, Human
gcuacuuaagagaaau

SEQ ID NO: 3762250 - RNA, 21 nt, Human
gcuacuuaagagaaauggcaa

SEQ ID NO: 3762251 - RNA, 17 nt, Human
gcuacuugggaggcuga

SEQ ID NO: 3762252 - RNA, 18 nt, Human
gcuacuugggccauagcu

SEQ ID NO: 3762253 - RNA, 15 nt, Human
gcuacuugguuugug

SEQ ID NO: 3762254 - RNA, 21 nt, Human
gcuacuuuauuuauacacugu

SEQ ID NO: 3762255 - RNA, 22 nt, Human
gcuacuuugguuucugucugua

SEQ ID NO: 3762256 - RNA, 11 nt, Human
gcuagaaauga

SEQ ID NO: 3762257 - RNA, 18 nt, Human
gcuagaaccuagaagggc

SEQ ID NO: 3762258 - RNA, 19 nt, Human
gcuagaaccuggaagggcu

SEQ ID NO: 3762259 - RNA, 20 nt, Human
gcuagaaccuggaagggcua

SEQ ID NO: 3762260 - RNA, 19 nt, Human
gcuagaaccuggagggcug

SEQ ID NO: 3762261 - RNA, 14 nt, Human
gcuagaacucccuu

SEQ ID NO: 3762262 - RNA, 15 nt, Human
gcuagaacucccuuu

SEQ ID NO: 3762263 - RNA, 18 nt, Human
gcuagaacucccuuucaa

SEQ ID NO: 3762264 - RNA, 12 nt, Human
gcuagaacuuuu

SEQ ID NO: 3762265 - RNA, 17 nt, Human
gcuagaacuuuuuuaaa

SEQ ID NO: 3762266 - RNA, 14 nt, Human
gcuagaagaaaaca

SEQ ID NO: 3762267 - RNA, 17 nt, Human
gcuagaaggccacaugu

SEQ ID NO: 3762268 - RNA, 20 nt, Human
gcuagaagugggccaggaca

SEQ ID NO: 3762269 - RNA, 13 nt, Human
gcuagaauacuuu

SEQ ID NO: 3762270 - RNA, 16 nt, Human
gcuagacacaugaagg

SEQ ID NO: 3762271 - RNA, 22 nt, Human
gcuagacacaugaagguaaaua

SEQ ID NO: 3762272 - RNA, 15 nt, Human
gcuagacacccauuu

SEQ ID NO: 3762273 - RNA, 22 nt, Human
gcuagacgagcaggcuucuucc

SEQ ID NO: 3762274 - RNA, 22 nt, Human
gcuagacuggugacugauucuu

SEQ ID NO: 3762275 - RNA, 23 nt, Human
gcuagagcagcccaaauuuuucu

SEQ ID NO: 3762276 - RNA, 18 nt, Human
gcuagaggaagcagccaa

SEQ ID NO: 3762277 - RNA, 21 nt, Human
gcuagaggccagccccaccca

SEQ ID NO: 3762278 - RNA, 24 nt, Human
gcuagaggccauggaggcaguagg

SEQ ID NO: 3762279 - RNA, 13 nt, Human
gcuagaggccuga

SEQ ID NO: 3762280 - RNA, 18 nt, Human
gcuagagguucaaagaua

SEQ ID NO: 3762281 - RNA, 20 nt, Human
gcuagaguccucacucccag

SEQ ID NO: 3762282 - RNA, 13 nt, Human
gcuagauaaaagc

SEQ ID NO: 3762283 - RNA, 22 nt, Human
gcuagaugagaauucagcugcc

SEQ ID NO: 3762284 - RNA, 16 nt, Human
gcuagcaaauaguaau

SEQ ID NO: 3762285 - RNA, 19 nt, Human
gcuagcaaauggcagaacc

SEQ ID NO: 3762286 - RNA, 15 nt, Human
gcuagcacagcuccc

SEQ ID NO: 3762287 - RNA, 16 nt, Human
gcuagcacaugcccua

SEQ ID NO: 3762288 - RNA, 17 nt, Human
gcuagcacuuggagcca

SEQ ID NO: 3762289 - RNA, 19 nt, Human
gcuagcuaagccaagaggc

SEQ ID NO: 3762290 - RNA, 18 nt, Human
gcuagcuccccuccucuc

SEQ ID NO: 3762291 - RNA, 22 nt, Human
gcuagcuccccuccucuccccu

SEQ ID NO: 3762292 - RNA, 15 nt, Human
gcuagcuggagccug

SEQ ID NO: 3762293 - RNA, 18 nt, Human
gcuagcuucugcuuuucu

SEQ ID NO: 3762294 - RNA, 22 nt, Human
gcuaggaaauccaggguggugg

SEQ ID NO: 3762295 - RNA, 18 nt, Human
gcuaggaacacuccuuca

SEQ ID NO: 3762296 - RNA, 21 nt, Human
gcuaggaacacuccuucacag

SEQ ID NO: 3762297 - RNA, 20 nt, Human
gcuaggaagagcaggacucc

SEQ ID NO: 3762298 - RNA, 17 nt, Human
gcuaggaagaggagugg

SEQ ID NO: 3762299 - RNA, 21 nt, Human
gcuaggaagagucuacccgac

SEQ ID NO: 3762300 - RNA, 18 nt, Human
gcuaggaauauagauuaa

SEQ ID NO: 3762301 - RNA, 12 nt, Human
gcuaggaaugaa

SEQ ID NO: 3762302 - RNA, 18 nt, Human
gcuaggaaugaaauccug

SEQ ID NO: 3762303 - RNA, 20 nt, Human
gcuaggaccccuccaugugg

SEQ ID NO: 3762304 - RNA, 17 nt, Human
gcuaggagcaaagccug

SEQ ID NO: 3762305 - RNA, 20 nt, Human
gcuaggcagggugucugccc

SEQ ID NO: 3762306 - RNA, 18 nt, Human
gcuaggcauacaaguagg

SEQ ID NO: 3762307 - RNA, 19 nt, Human
gcuaggcgagugccaggac

SEQ ID NO: 3762308 - RNA, 14 nt, Human
gcuaggugggccag

SEQ ID NO: 3762309 - RNA, 21 nt, Human
gcuaguaauuggaaaggcagc

SEQ ID NO: 3762310 - RNA, 16 nt, Human
gcuaguaucaaaagaa

SEQ ID NO: 3762311 - RNA, 11 nt, Human
gcuaguauuug

SEQ ID NO: 3762312 - RNA, 14 nt, Human
gcuaguauuugaau

SEQ ID NO: 3762313 - RNA, 16 nt, Human
gcuaguauuugaauua

SEQ ID NO: 3762314 - RNA, 18 nt, Human
gcuagucaagcuccuccu

SEQ ID NO: 3762315 - RNA, 21 nt, Human
gcuagucaagcuccuccuccc

SEQ ID NO: 3762316 - RNA, 22 nt, Human
gcuaguccggacccaccucacc

SEQ ID NO: 3762317 - RNA, 15 nt, Human
gcuagucuuucacag

SEQ ID NO: 3762318 - RNA, 22 nt, Human
gcuagucuuuugcuuuugccca

SEQ ID NO: 3762319 - RNA, 15 nt, Human
gcuagugagcugggc

SEQ ID NO: 3762320 - RNA, 17 nt, Human
gcuagugauguuuuuau

SEQ ID NO: 3762321 - RNA, 22 nt, Human
gcuaguguaccuccucucagug

SEQ ID NO: 3762322 - RNA, 21 nt, Human
gcuagugugguguuuccuggc

SEQ ID NO: 3762323 - RNA, 22 nt, Human
gcuagugugguguuuccuggca

SEQ ID NO: 3762324 - RNA, 14 nt, Human
gcuaguguucuguc

SEQ ID NO: 3762325 - RNA, 15 nt, Human
gcuaguguucugucu

SEQ ID NO: 3762326 - RNA, 22 nt, Human
gcuaguuauacuuauuuguaua

SEQ ID NO: 3762327 - RNA, 16 nt, Human
gcuaguugaauacuug

SEQ ID NO: 3762328 - RNA, 22 nt, Human
gcuaguugaauacuugaaccau

SEQ ID NO: 3762329 - RNA, 14 nt, Human
gcuaguugaaucua

SEQ ID NO: 3762330 - RNA, 14 nt, Human
gcuaguugggcuuc

SEQ ID NO: 3762331 - RNA, 19 nt, Human
gcuauaaagcaguauuuuu

SEQ ID NO: 3762332 - RNA, 17 nt, Human
gcuauaaauuauauucc

SEQ ID NO: 3762333 - RNA, 18 nt, Human
gcuauaaauuccucuuug

SEQ ID NO: 3762334 - RNA, 20 nt, Human
gcuauaacuauguugauaaa

SEQ ID NO: 3762335 - RNA, 23 nt, Human
gcuauaccugggcauacuaauaa

SEQ ID NO: 3762336 - RNA, 15 nt, Human
gcuauaccugugccu

SEQ ID NO: 3762337 - RNA, 19 nt, Human
gcuauagacccgaggaaac

SEQ ID NO: 3762338 - RNA, 14 nt, Human
gcuauagccuggac

SEQ ID NO: 3762339 - RNA, 16 nt, Human
gcuauagcucaggacc

SEQ ID NO: 3762340 - RNA, 16 nt, Human
gcuauaggcuggagaa

SEQ ID NO: 3762341 - RNA, 18 nt, Human
gcuauaggugcuacaaaa

SEQ ID NO: 3762342 - RNA, 19 nt, Human
gcuauaggugcuacaaaaa

SEQ ID NO: 3762343 - RNA, 13 nt, Human
gcuauaguauuug

SEQ ID NO: 3762344 - RNA, 16 nt, Human
gcuauaguauuugauu

SEQ ID NO: 3762345 - RNA, 23 nt, Human
gcuauaguuacuguccuguugau

SEQ ID NO: 3762346 - RNA, 14 nt, Human
gcuauauccaugua

SEQ ID NO: 3762347 - RNA, 15 nt, Human
gcuauauccauguac

SEQ ID NO: 3762348 - RNA, 23 nt, Human
gcuauauccauguacuguaguuu

SEQ ID NO: 3762349 - RNA, 19 nt, Human
gcuauaucuauauauaauu

SEQ ID NO: 3762350 - RNA, 22 nt, Human
gcuauauuuucaugacuuuucc

SEQ ID NO: 3762351 - RNA, 17 nt, Human
gccuggucacagggcau

SEQ ID NO: 3762352 - RNA, 13 nt, Human
gccuggucagccc

SEQ ID NO: 3762353 - RNA, 22 nt, Human
gccugguccaugauggagucag

SEQ ID NO: 3762354 - RNA, 13 nt, Human
gccugguccaugc

SEQ ID NO: 3762355 - RNA, 17 nt, Human
gccugguccucacacuc

SEQ ID NO: 3762356 - RNA, 18 nt, Human
gccuggucgccuuccacc

SEQ ID NO: 3762357 - RNA, 13 nt, Human
gccuggugcagug

SEQ ID NO: 3762358 - RNA, 15 nt, Human
gccugguggcagcug

SEQ ID NO: 3762359 - RNA, 17 nt, Human
gccugguggcagcugcg

SEQ ID NO: 3762360 - RNA, 19 nt, Human
gccugguggcagcugcggu

SEQ ID NO: 3762361 - RNA, 21 nt, Human
gccugguggcagcugcggucc

SEQ ID NO: 3762362 - RNA, 14 nt, Human
gccuggugguuuuc

SEQ ID NO: 3762363 - RNA, 13 nt, Human
gccugguugaaga

SEQ ID NO: 3762364 - RNA, 13 nt, Human
gccuguaaacuuu

SEQ ID NO: 3762365 - RNA, 18 nt, Human
gccuguaaucacagcuac

SEQ ID NO: 3762366 - RNA, 14 nt, Human
gccuguaaucccag

SEQ ID NO: 3762367 - RNA, 16 nt, Human
gccuguaaucccagca

SEQ ID NO: 3762368 - RNA, 20 nt, Human
gccuguaaucccagcacuuu

SEQ ID NO: 3762369 - RNA, 13 nt, Human
gccuguacagucu

SEQ ID NO: 3762370 - RNA, 22 nt, Human
gccuguacagucugucuucugu

SEQ ID NO: 3762371 - RNA, 11 nt, Human
gccuguacugc

SEQ ID NO: 3762372 - RNA, 14 nt, Human
gccuguacugccug

SEQ ID NO: 3762373 - RNA, 17 nt, Human
gccuguacugccugcuu

SEQ ID NO: 3762374 - RNA, 18 nt, Human
gccuguacugccugcuug

SEQ ID NO: 3762375 - RNA, 19 nt, Human
gccuguagaauagccugug

SEQ ID NO: 3762376 - RNA, 22 nt, Human
gccuguagaauagccuguggcc

SEQ ID NO: 3762377 - RNA, 14 nt, Human
gccuguagcaguga

SEQ ID NO: 3762378 - RNA, 13 nt, Human
gccuguagcccac

SEQ ID NO: 3762379 - RNA, 20 nt, Human
gccuguagccccagugacag

SEQ ID NO: 3762380 - RNA, 19 nt, Human
gccuguagucccagccacu

SEQ ID NO: 3762381 - RNA, 17 nt, Human
gccuguaguuaggaaau

SEQ ID NO: 3762382 - RNA, 22 nt, Human
gccuguaguuaggaaauaaaac

SEQ ID NO: 3762383 - RNA, 13 nt, Human
gccuguauacuuu

SEQ ID NO: 3762384 - RNA, 15 nt, Human
gccuguauacuuuag

SEQ ID NO: 3762385 - RNA, 17 nt, Human
gccuguauacuuuagua

SEQ ID NO: 3762386 - RNA, 18 nt, Human
gccugucagauccaggag

SEQ ID NO: 3762387 - RNA, 20 nt, Human
gccugucccacccccacccc

SEQ ID NO: 3762388 - RNA, 21 nt, Human
gccugucccauggacacucca

SEQ ID NO: 3762389 - RNA, 22 nt, Human
gccugucccauggacacuccag

SEQ ID NO: 3762390 - RNA, 20 nt, Human
gccugucccuggccaucucu

SEQ ID NO: 3762391 - RNA, 12 nt, Human
gccuguccugcc

SEQ ID NO: 3762392 - RNA, 13 nt, Human
gccuguccugggc

SEQ ID NO: 3762393 - RNA, 13 nt, Human
gccugucuccuuu

SEQ ID NO: 3762394 - RNA, 22 nt, Human
gccugucuccuuugcaggcuca

SEQ ID NO: 3762395 - RNA, 13 nt, Human
gccugucucuucc

SEQ ID NO: 3762396 - RNA, 23 nt, Human
gccugucugagacucacaggaag

SEQ ID NO: 3762397 - RNA, 21 nt, Human
gccugucugccccagcccaga

SEQ ID NO: 3762398 - RNA, 17 nt, Human
gccugucugucucucca

SEQ ID NO: 3762399 - RNA, 17 nt, Human
gccugucuuaauuuucu

SEQ ID NO: 3762400 - RNA, 14 nt, Human
gccugugaacccag

SEQ ID NO: 3762401 - RNA, 15 nt, Human
gccugugaacccagg

SEQ ID NO: 3762402 - RNA, 18 nt, Human
gccugugaacccaggaca

SEQ ID NO: 3762403 - RNA, 16 nt, Human
gccugugagccagucu

SEQ ID NO: 3762404 - RNA, 14 nt, Human
gccugugaggcagg

SEQ ID NO: 3762405 - RNA, 23 nt, Human
gccugugaggugcagagugccca

SEQ ID NO: 3762406 - RNA, 13 nt, Human
gccugugcacaca

SEQ ID NO: 3762407 - RNA, 15 nt, Human
gccugugcacacaca

SEQ ID NO: 3762408 - RNA, 12 nt, Human
gccugugcagug

SEQ ID NO: 3762409 - RNA, 19 nt, Human
gccugugcauguaugucuu

SEQ ID NO: 3762410 - RNA, 19 nt, Human
gccugugccacccaccagg

SEQ ID NO: 3762411 - RNA, 15 nt, Human
gccugugccagguga

SEQ ID NO: 3762412 - RNA, 19 nt, Human
gccugugccaggugagguc

SEQ ID NO: 3762413 - RNA, 22 nt, Human
gccugugccaggugaggucagc

SEQ ID NO: 3762414 - RNA, 19 nt, Human
gccugugccuccucacccc

SEQ ID NO: 3762415 - RNA, 14 nt, Human
gccugugcugcccg

SEQ ID NO: 3762416 - RNA, 14 nt, Human
gccugugcugugac

SEQ ID NO: 3762417 - RNA, 16 nt, Human
gccuguggaaugagug

SEQ ID NO: 3762418 - RNA, 18 nt, Human
gccuguggaaugagugug

SEQ ID NO: 3762419 - RNA, 19 nt, Human
gccuguggaaugagugugc

SEQ ID NO: 3762420 - RNA, 18 nt, Human
gccuguggagcucagccc

SEQ ID NO: 3762421 - RNA, 22 nt, Human
gccuguggaugaucaauccuuu

SEQ ID NO: 3762422 - RNA, 22 nt, Human
gccuguggcaguaaagagaaac

SEQ ID NO: 3762423 - RNA, 22 nt, Human
gccuguggcaucuuugccuugg

SEQ ID NO: 3762424 - RNA, 10 nt, Human
gccuguggcc

SEQ ID NO: 3762425 - RNA, 23 nt, Human
gccuguggccaugacccugccuc

SEQ ID NO: 3762426 - RNA, 17 nt, Human
gccuguggcccuguccu

SEQ ID NO: 3762427 - RNA, 14 nt, Human
gccuguggccugug

SEQ ID NO: 3762428 - RNA, 16 nt, Human
gccuguggccuguguc

SEQ ID NO: 3762429 - RNA, 17 nt, Human
gccuguggccugugucc

SEQ ID NO: 3762430 - RNA, 19 nt, Human
gccuguggcgccgucucca

SEQ ID NO: 3762431 - RNA, 16 nt, Human
gccuguggcggugccu

SEQ ID NO: 3762432 - RNA, 19 nt, Human
gccuguggcggugccuggg

SEQ ID NO: 3762433 - RNA, 13 nt, Human
gccuguggcugcg

SEQ ID NO: 3762434 - RNA, 12 nt, Human
gccuguggcugu

SEQ ID NO: 3762435 - RNA, 21 nt, Human
gccugugguucugagauggcu

SEQ ID NO: 3762436 - RNA, 19 nt, Human
gccuguguaacagcuccuu

SEQ ID NO: 3762437 - RNA, 20 nt, Human
gccuguguagcugugaccug

SEQ ID NO: 3762438 - RNA, 19 nt, Human
gccugugucccaugaccca

SEQ ID NO: 3762439 - RNA, 23 nt, Human
gccugugucccaugacccacccc

SEQ ID NO: 3762440 - RNA, 14 nt, Human
gccugugucuuuaa

SEQ ID NO: 3762441 - RNA, 22 nt, Human
gccugugucuuuaaaugcugcu

SEQ ID NO: 3762442 - RNA, 17 nt, Human
gccuguguucuuccugg

SEQ ID NO: 3762443 - RNA, 20 nt, Human
gccuguguucuuccuggccg

SEQ ID NO: 3762444 - RNA, 20 nt, Human
gccuguuaggagaagcugca

SEQ ID NO: 3762445 - RNA, 14 nt, Human
gccuguucccccgc

SEQ ID NO: 3762446 - RNA, 17 nt, Human
gccuguuccccucacug

SEQ ID NO: 3762447 - RNA, 14 nt, Human
gccuguugcccuuu

SEQ ID NO: 3762448 - RNA, 21 nt, Human
gccuguuggacccgcucugga

SEQ ID NO: 3762449 - RNA, 15 nt, Human
gccuguugggccagg

SEQ ID NO: 3762450 - RNA, 13 nt, Human
gccuguuuaagag

SEQ ID NO: 3762451 - RNA, 19 nt, Human
gccuguuucugauuugcug

SEQ ID NO: 3762452 - RNA, 16 nt, Human
gccuguuucuuccugu

SEQ ID NO: 3762453 - RNA, 21 nt, Human
gccuguuuggccucucuaucc

SEQ ID NO: 3762454 - RNA, 22 nt, Human
gccuguuuggcguuucccagag

SEQ ID NO: 3762455 - RNA, 20 nt, Human
gccuguuuuagaagguucuc

SEQ ID NO: 3762456 - RNA, 12 nt, Human
gccuuaaaacuu

SEQ ID NO: 3762457 - RNA, 16 nt, Human
gccuuaaaacuuuaau

SEQ ID NO: 3762458 - RNA, 20 nt, Human
gccuuaaaccuaccucccac

SEQ ID NO: 3762459 - RNA, 16 nt, Human
gccuuaagcugauccu

SEQ ID NO: 3762460 - RNA, 18 nt, Human
gccuuaagcugauccugc

SEQ ID NO: 3762461 - RNA, 22 nt, Human
gccuuaagugaggaaaucaaag

SEQ ID NO: 3762462 - RNA, 14 nt, Human
gccuuaauuuccuu

SEQ ID NO: 3762463 - RNA, 21 nt, Human
gccuuaauuuccuuuuugaca

SEQ ID NO: 3762464 - RNA, 21 nt, Human
gccuuacacaaugguuuucuu

SEQ ID NO: 3762465 - RNA, 12 nt, Human
gccuuaccuccu

SEQ ID NO: 3762466 - RNA, 13 nt, Human
gccuuaccuccug

SEQ ID NO: 3762467 - RNA, 14 nt, Human
gccuuaccuccugc

SEQ ID NO: 3762468 - RNA, 15 nt, Human
gccuuaccuccugcc

SEQ ID NO: 3762469 - RNA, 15 nt, Human
gccuuacuuuguaug

SEQ ID NO: 3762470 - RNA, 14 nt, Human
gccuuagagccagg

SEQ ID NO: 3762471 - RNA, 15 nt, Human
gccuuagaggagccc

SEQ ID NO: 3762472 - RNA, 14 nt, Human
gccuuagcuucagg

SEQ ID NO: 3762473 - RNA, 19 nt, Human
gccuuaggaagagccuucc

SEQ ID NO: 3762474 - RNA, 15 nt, Human
gccuuagggaagcug

SEQ ID NO: 3762475 - RNA, 22 nt, Human
gccuuagggaagcuggccugag

SEQ ID NO: 3762476 - RNA, 22 nt, Human
gccuuagucucaguuugugugu

SEQ ID NO: 3762477 - RNA, 16 nt, Human
gccuuagugggccagg

SEQ ID NO: 3762478 - RNA, 23 nt, Human
gccuuaucgggcuccagccaucu

SEQ ID NO: 3762479 - RNA, 16 nt, Human
gccuuauggaacacuc

SEQ ID NO: 3762480 - RNA, 12 nt, Human
gccuuauuaaag

SEQ ID NO: 3762481 - RNA, 19 nt, Human
gccuuauuagagugucuuu

SEQ ID NO: 3762482 - RNA, 17 nt, Human
gccuucacaaucuguca

SEQ ID NO: 3762483 - RNA, 22 nt, Human
gccuucacacagauagaccuuu

SEQ ID NO: 3762484 - RNA, 18 nt, Human
gccuucacauuccccugg

SEQ ID NO: 3762485 - RNA, 14 nt, Human
gccuucagcuccag

SEQ ID NO: 3762486 - RNA, 13 nt, Human
gccuucagcucua

SEQ ID NO: 3762487 - RNA, 23 nt, Human
gccuucaggguucagcaguacag

SEQ ID NO: 3762488 - RNA, 16 nt, Human
gccuucauucugcaag

SEQ ID NO: 3762489 - RNA, 17 nt, Human
gccuuccacccaggggc

SEQ ID NO: 3762490 - RNA, 13 nt, Human
gccuuccaccucu

SEQ ID NO: 3762491 - RNA, 22 nt, Human
gccuuccacuuggcuacacagg

SEQ ID NO: 3762492 - RNA, 22 nt, Human
gccuuccagauccucucugggg

SEQ ID NO: 3762493 - RNA, 23 nt, Human
gccuuccagauccucucuggggc

SEQ ID NO: 3762494 - RNA, 14 nt, Human
gccuuccagcugcu

SEQ ID NO: 3762495 - RNA, 13 nt, Human
gccuuccauaauu

SEQ ID NO: 3762496 - RNA, 15 nt, Human
gccuuccauaauuau

SEQ ID NO: 3762497 - RNA, 21 nt, Human
gccuucccaaguugugcuuga

SEQ ID NO: 3762498 - RNA, 14 nt, Human
gccuuccccagccu

SEQ ID NO: 3762499 - RNA, 16 nt, Human
gccuuccccagccucu

SEQ ID NO: 3762500 - RNA, 17 nt, Human
gccuuccccagccucuu

SEQ ID NO: 3762501 - RNA, 20 nt, Human
cuguuugggaagagcuuaga

SEQ ID NO: 3762502 - RNA, 22 nt, Human
cuguuugggaagagcuuagaaa

SEQ ID NO: 3762503 - RNA, 16 nt, Human
cuguuuguccugagau

SEQ ID NO: 3762504 - RNA, 18 nt, Human
cuguuugucuucucccca

SEQ ID NO: 3762505 - RNA, 18 nt, Human
cuguuuguggggugacgg

SEQ ID NO: 3762506 - RNA, 23 nt, Human
cuguuuguuucugaaagggacgc

SEQ ID NO: 3762507 - RNA, 20 nt, Human
cuguuuguuugacaaagaaa

SEQ ID NO: 3762508 - RNA, 23 nt, Human
cuguuuuaauuuauacuggcaug

SEQ ID NO: 3762509 - RNA, 21 nt, Human
cuguuuuacaaguuggaguca

SEQ ID NO: 3762510 - RNA, 12 nt, Human
cuguuuuacugc

SEQ ID NO: 3762511 - RNA, 19 nt, Human
cuguuuuauaauuuuguga

SEQ ID NO: 3762512 - RNA, 12 nt, Human
cuguuuuaugac

SEQ ID NO: 3762513 - RNA, 14 nt, Human
cuguuuuaugacuu

SEQ ID NO: 3762514 - RNA, 13 nt, Human
cuguuuucccuga

SEQ ID NO: 3762515 - RNA, 15 nt, Human
cuguuuuccucccuu

SEQ ID NO: 3762516 - RNA, 16 nt, Human
cuguuuuccucccuuc

SEQ ID NO: 3762517 - RNA, 23 nt, Human
cuguuuuccuuucucaccgcagu

SEQ ID NO: 3762518 - RNA, 21 nt, Human
cuguuuucucucggcucccca

SEQ ID NO: 3762519 - RNA, 17 nt, Human
cuguuuucucuugagag

SEQ ID NO: 3762520 - RNA, 14 nt, Human
cuguuuucuguuuc

SEQ ID NO: 3762521 - RNA, 14 nt, Human
cuguuuuguaaagu

SEQ ID NO: 3762522 - RNA, 16 nt, Human
cuguuuuguaaagucc

SEQ ID NO: 3762523 - RNA, 17 nt, Human
cuguuuuguaaaguccc

SEQ ID NO: 3762524 - RNA, 18 nt, Human
cuguuuugugguuuggaa

SEQ ID NO: 3762525 - RNA, 14 nt, Human
cuguuuuguucugu

SEQ ID NO: 3762526 - RNA, 16 nt, Human
cuguuuuguugacauu

SEQ ID NO: 3762527 - RNA, 17 nt, Human
cuguuuuguugacauuc

SEQ ID NO: 3762528 - RNA, 17 nt, Human
cuguuuuguuuggcaag

SEQ ID NO: 3762529 - RNA, 21 nt, Human
cuguuuuguuuggcaaggaaa

SEQ ID NO: 3762530 - RNA, 22 nt, Human
cuguuuuguuuggcaaggaaag

SEQ ID NO: 3762531 - RNA, 18 nt, Human
cuguuuuuaagcuguuuc

SEQ ID NO: 3762532 - RNA, 15 nt, Human
cuguuuuuagacacc

SEQ ID NO: 3762533 - RNA, 18 nt, Human
cuguuuuuauuauuaaca

SEQ ID NO: 3762534 - RNA, 20 nt, Human
cuguuuuuauuauuaacaaa

SEQ ID NO: 3762535 - RNA, 14 nt, Human
cuguuuuuguagug

SEQ ID NO: 3762536 - RNA, 14 nt, Human
cuguuuuuguugug

SEQ ID NO: 3762537 - RNA, 20 nt, Human
cuguuuuuguuuauuucauu

SEQ ID NO: 3762538 - RNA, 13 nt, Human
cuguuuuuuaguu

SEQ ID NO: 3762539 - RNA, 15 nt, Human
cuguuuuuuuuucau

SEQ ID NO: 3762540 - RNA, 21 nt, Human
cuuaaaaaaaaaaaaaagcuu

SEQ ID NO: 3762541 - RNA, 22 nt, Human
cuuaaaaaaaaaaaaaagcuuu

SEQ ID NO: 3762542 - RNA, 19 nt, Human
cuuaaaaaaaacucuuuaa

SEQ ID NO: 3762543 - RNA, 17 nt, Human
cuuaaaaaaaugacaga

SEQ ID NO: 3762544 - RNA, 15 nt, Human
cuuaaaaacugaaaa

SEQ ID NO: 3762545 - RNA, 16 nt, Human
cuuaaaaaguggaaaa

SEQ ID NO: 3762546 - RNA, 17 nt, Human
cuuaaaaaguggaaaaa

SEQ ID NO: 3762547 - RNA, 12 nt, Human
cuuaaaaaguua

SEQ ID NO: 3762548 - RNA, 22 nt, Human
cuuaaaaaucacacuguaaaua

SEQ ID NO: 3762549 - RNA, 21 nt, Human
cuuaaaaaugguuuaaauggu

SEQ ID NO: 3762550 - RNA, 17 nt, Human
cuuaaaaauguaaauau

SEQ ID NO: 3762551 - RNA, 14 nt, Human
cuuaaaacaacacu

SEQ ID NO: 3762552 - RNA, 14 nt, Human
cuuaaaaccaaaga

SEQ ID NO: 3762553 - RNA, 15 nt, Human
cuuaaaaccaaagag

SEQ ID NO: 3762554 - RNA, 21 nt, Human
cuuaaaaccaaagagggcuuc

SEQ ID NO: 3762555 - RNA, 23 nt, Human
cuuaaaaccugcuuuucaaugug

SEQ ID NO: 3762556 - RNA, 12 nt, Human
cuuaaaacuagg

SEQ ID NO: 3762557 - RNA, 12 nt, Human
cuuaaaacuuug

SEQ ID NO: 3762558 - RNA, 23 nt, Human
cuuaaaauaaaacacuguuuccc

SEQ ID NO: 3762559 - RNA, 17 nt, Human
cuuaaaauaaacaguug

SEQ ID NO: 3762560 - RNA, 21 nt, Human
cuuaaaauaaacaguugugaa

SEQ ID NO: 3762561 - RNA, 12 nt, Human
cuuaaaauaagc

SEQ ID NO: 3762562 - RNA, 22 nt, Human
cuuaaaauaaugaauacauuuc

SEQ ID NO: 3762563 - RNA, 12 nt, Human
cuuaaaauacaa

SEQ ID NO: 3762564 - RNA, 16 nt, Human
cuuaaaauacaagacu

SEQ ID NO: 3762565 - RNA, 18 nt, Human
cuuaaaauacaagacugc

SEQ ID NO: 3762566 - RNA, 19 nt, Human
cuuaaaauacaagacugcc

SEQ ID NO: 3762567 - RNA, 17 nt, Human
cuuaaaauauauuucag

SEQ ID NO: 3762568 - RNA, 18 nt, Human
cuuaaaauauuccugcau

SEQ ID NO: 3762569 - RNA, 13 nt, Human
cuuaaaauauuuu

SEQ ID NO: 3762570 - RNA, 11 nt, Human
cuuaaaaugau

SEQ ID NO: 3762571 - RNA, 15 nt, Human
cuuaaaaugcaauau

SEQ ID NO: 3762572 - RNA, 19 nt, Human
cuuaaaaugcaauauuugu

SEQ ID NO: 3762573 - RNA, 20 nt, Human
cuuaaaaugcaauauuugua

SEQ ID NO: 3762574 - RNA, 21 nt, Human
cuuaaaaugcaauauuuguaa

SEQ ID NO: 3762575 - RNA, 22 nt, Human
cuuaaaaugcaauauuuguaag

SEQ ID NO: 3762576 - RNA, 19 nt, Human
cuuaaacacucaccuucua

SEQ ID NO: 3762577 - RNA, 23 nt, Human
cuuaaaccuucaguuaugauuuu

SEQ ID NO: 3762578 - RNA, 19 nt, Human
cuuaaacgaagaguucccu

SEQ ID NO: 3762579 - RNA, 14 nt, Human
cuuaaacuaaaugu

SEQ ID NO: 3762580 - RNA, 23 nt, Human
cuuaaacuguguggacugugaug

SEQ ID NO: 3762581 - RNA, 15 nt, Human
cuuaaacuugugaau

SEQ ID NO: 3762582 - RNA, 16 nt, Human
cuuaaagaaacagcuu

SEQ ID NO: 3762583 - RNA, 17 nt, Human
cuuaaagaaacagcuuu

SEQ ID NO: 3762584 - RNA, 19 nt, Human
cuuaaagauuuaucaaauc

SEQ ID NO: 3762585 - RNA, 20 nt, Human
cuuaaagauuuaucaaauca

SEQ ID NO: 3762586 - RNA, 23 nt, Human
cuuaaagcugccuguaguuagga

SEQ ID NO: 3762587 - RNA, 21 nt, Human
cuuaaaggcugugguaguacu

SEQ ID NO: 3762588 - RNA, 23 nt, Human
cuuaaaggcugugguaguacucc

SEQ ID NO: 3762589 - RNA, 22 nt, Human
cuuaaagggcccaaugaauuau

SEQ ID NO: 3762590 - RNA, 13 nt, Human
cuuaaaggggaga

SEQ ID NO: 3762591 - RNA, 21 nt, Human
cuuaaaggugucuuccuccca

SEQ ID NO: 3762592 - RNA, 16 nt, Human
cuuaaagugccaguau

SEQ ID NO: 3762593 - RNA, 18 nt, Human
cuuaaaguugaauuuauu

SEQ ID NO: 3762594 - RNA, 22 nt, Human
cuuaaauaaaagaaaugcacaa

SEQ ID NO: 3762595 - RNA, 16 nt, Human
cuuaaauaagaaacuu

SEQ ID NO: 3762596 - RNA, 13 nt, Human
cuuaaauaauaaa

SEQ ID NO: 3762597 - RNA, 16 nt, Human
cuuaaauaaugugaaa

SEQ ID NO: 3762598 - RNA, 19 nt, Human
cuuaaauaaugugaaacug

SEQ ID NO: 3762599 - RNA, 16 nt, Human
cuuaaauacagcuuuu

SEQ ID NO: 3762600 - RNA, 13 nt, Human
cuuaaauaucaau

SEQ ID NO: 3762601 - RNA, 21 nt, Human
cuuaaauguagcaauggcacu

SEQ ID NO: 3762602 - RNA, 14 nt, Human
cuuaaaugugaauu

SEQ ID NO: 3762603 - RNA, 19 nt, Human
cuuaaaugugaauuacuaa

SEQ ID NO: 3762604 - RNA, 12 nt, Human
cuuaaauuaaac

SEQ ID NO: 3762605 - RNA, 17 nt, Human
cuuaaauuaaacaauuu

SEQ ID NO: 3762606 - RNA, 22 nt, Human
cuuaaauuaaacaauuuauuuu

SEQ ID NO: 3762607 - RNA, 19 nt, Human
cuuaaauuaguacagcacu

SEQ ID NO: 3762608 - RNA, 15 nt, Human
cuuaaauucauuuua

SEQ ID NO: 3762609 - RNA, 23 nt, Human
cuuaaauuggguucaugaugcag

SEQ ID NO: 3762610 - RNA, 13 nt, Human
cuuaaauuucuua

SEQ ID NO: 3762611 - RNA, 14 nt, Human
cuuaaauuucuuau

SEQ ID NO: 3762612 - RNA, 13 nt, Human
cuuaaauuuuaac

SEQ ID NO: 3762613 - RNA, 23 nt, Human
cuuaacaaacccucguuucugau

SEQ ID NO: 3762614 - RNA, 17 nt, Human
cuuaacaguuguauuua

SEQ ID NO: 3762615 - RNA, 15 nt, Human
cuuaacauagccaaa

SEQ ID NO: 3762616 - RNA, 19 nt, Human
cuuaacauagccaaaaugu

SEQ ID NO: 3762617 - RNA, 13 nt, Human
cuuaacauauuua

SEQ ID NO: 3762618 - RNA, 13 nt, Human
cuuaacaugcugu

SEQ ID NO: 3762619 - RNA, 16 nt, Human
cuuaacccaaggagca

SEQ ID NO: 3762620 - RNA, 20 nt, Human
cuuaaccccaguaagccacu

SEQ ID NO: 3762621 - RNA, 19 nt, Human
cuuaacugcauuuuuagac

SEQ ID NO: 3762622 - RNA, 16 nt, Human
cuuaacuggagcccca

SEQ ID NO: 3762623 - RNA, 22 nt, Human
cuuaacugugguguugaggcuu

SEQ ID NO: 3762624 - RNA, 15 nt, Human
cuuaacuucacauau

SEQ ID NO: 3762625 - RNA, 16 nt, Human
cuuaacuucacauauu

SEQ ID NO: 3762626 - RNA, 22 nt, Human
cuuaacuucuugcuucuuucua

SEQ ID NO: 3762627 - RNA, 17 nt, Human
cuuaagaaauguauaaa

SEQ ID NO: 3762628 - RNA, 20 nt, Human
cuuaagaaauguauaaacuu

SEQ ID NO: 3762629 - RNA, 18 nt, Human
cuuaagaaauuuguggaa

SEQ ID NO: 3762630 - RNA, 21 nt, Human
cuuaagaagacugcauuauau

SEQ ID NO: 3762631 - RNA, 22 nt, Human
cuuaagaaugaguuucuuagac

SEQ ID NO: 3762632 - RNA, 23 nt, Human
cuuaagaccaccucaaauuuaaa

SEQ ID NO: 3762633 - RNA, 20 nt, Human
cuuaagaccuacuguucuaa

SEQ ID NO: 3762634 - RNA, 22 nt, Human
cuuaagaccuacuguucuaaag

SEQ ID NO: 3762635 - RNA, 15 nt, Human
cuuaagcaaaagaaa

SEQ ID NO: 3762636 - RNA, 22 nt, Human
cuuaagcaaaggggacagcugu

SEQ ID NO: 3762637 - RNA, 11 nt, Human
cuuaagcacaa

SEQ ID NO: 3762638 - RNA, 14 nt, Human
cuuaagcagaagca

SEQ ID NO: 3762639 - RNA, 18 nt, Human
cuuaagcaucuggcucua

SEQ ID NO: 3762640 - RNA, 15 nt, Human
cuuaagccaucuugg

SEQ ID NO: 3762641 - RNA, 16 nt, Human
cuuaagccaucuuggu

SEQ ID NO: 3762642 - RNA, 19 nt, Human
cuuaagccaucuugguaaa

SEQ ID NO: 3762643 - RNA, 13 nt, Human
cuuaagcccuggc

SEQ ID NO: 3762644 - RNA, 12 nt, Human
cuuaagcugcag

SEQ ID NO: 3762645 - RNA, 15 nt, Human
cuuaagcugcaggau

SEQ ID NO: 3762646 - RNA, 16 nt, Human
cuuaguucucacuguu

SEQ ID NO: 3762647 - RNA, 13 nt, Human
cuuaguuugugaa

SEQ ID NO: 3762648 - RNA, 22 nt, Human
cuuaguuugugaauugauuuug

SEQ ID NO: 3762649 - RNA, 17 nt, Human
cuuaguuuguguguugu

SEQ ID NO: 3762650 - RNA, 15 nt, Human
cuuauaaaacagagu

SEQ ID NO: 3762651 - RNA, 18 nt, Human
cuuauaaaauccugugca

SEQ ID NO: 3762652 - RNA, 18 nt, Human
cuuauaaaguggaaguau

SEQ ID NO: 3762653 - RNA, 20 nt, Human
cuuauaaaguggaaguaugu

SEQ ID NO: 3762654 - RNA, 13 nt, Human
cuuauaaaucaua

SEQ ID NO: 3762655 - RNA, 22 nt, Human
cuuauaaaucauauugaugaaa

SEQ ID NO: 3762656 - RNA, 17 nt, Human
cuuauaaccuaguuaaa

SEQ ID NO: 3762657 - RNA, 19 nt, Human
cuuauaaccuaguuaaaga

SEQ ID NO: 3762658 - RNA, 20 nt, Human
cuuauaagguguuuucugug

SEQ ID NO: 3762659 - RNA, 21 nt, Human
cuuauaagguguuuucugugu

SEQ ID NO: 3762660 - RNA, 22 nt, Human
cuuauaagguguuuucugugua

SEQ ID NO: 3762661 - RNA, 20 nt, Human
cuuauaagugaagugauacu

SEQ ID NO: 3762662 - RNA, 19 nt, Human
cuuauaauacucuguugua

SEQ ID NO: 3762663 - RNA, 14 nt, Human
cuuauaauuguucu

SEQ ID NO: 3762664 - RNA, 15 nt, Human
cuuauacauuugaua

SEQ ID NO: 3762665 - RNA, 16 nt, Human
cuuauacgaguaauau

SEQ ID NO: 3762666 - RNA, 13 nt, Human
cuuauagaauauu

SEQ ID NO: 3762667 - RNA, 17 nt, Human
cuuauagcacuuugaaa

SEQ ID NO: 3762668 - RNA, 20 nt, Human
cuuauagcacuuugaaauac

SEQ ID NO: 3762669 - RNA, 17 nt, Human
cuuauaggaaagcuuga

SEQ ID NO: 3762670 - RNA, 21 nt, Human
cuuauaggaaagcuugaguaa

SEQ ID NO: 3762671 - RNA, 19 nt, Human
cuuauaggaauugacccac

SEQ ID NO: 3762672 - RNA, 19 nt, Human
cuuauaguacaugauaaau

SEQ ID NO: 3762673 - RNA, 21 nt, Human
cuuauagucuaagacuauaua

SEQ ID NO: 3762674 - RNA, 16 nt, Human
cuuauaguuacugugu

SEQ ID NO: 3762675 - RNA, 15 nt, Human
cuuauauaauugcca

SEQ ID NO: 3762676 - RNA, 17 nt, Human
cuuauauaugugaacau

SEQ ID NO: 3762677 - RNA, 21 nt, Human
cuuauaucaucagcauaccuu

SEQ ID NO: 3762678 - RNA, 13 nt, Human
cuuauauuaugga

SEQ ID NO: 3762679 - RNA, 20 nt, Human
cuuauauuuacaacacuuua

SEQ ID NO: 3762680 - RNA, 19 nt, Human
cuuauauuucccuaaaaua

SEQ ID NO: 3762681 - RNA, 14 nt, Human
cuuauauuugugua

SEQ ID NO: 3762682 - RNA, 20 nt, Human
cuuauauuuucguaugaaaa

SEQ ID NO: 3762683 - RNA, 21 nt, Human
cuuaucaaggacucugguuuc

SEQ ID NO: 3762684 - RNA, 12 nt, Human
cuuaucaagugu

SEQ ID NO: 3762685 - RNA, 14 nt, Human
cuuaucaagugucu

SEQ ID NO: 3762686 - RNA, 15 nt, Human
cuuaucaauuuguca

SEQ ID NO: 3762687 - RNA, 16 nt, Human
cuuaucaccagcugcc

SEQ ID NO: 3762688 - RNA, 21 nt, Human
cuuaucacugcauuauucucu

SEQ ID NO: 3762689 - RNA, 13 nt, Human
cuuaucagagcua

SEQ ID NO: 3762690 - RNA, 23 nt, Human
cuuaucagcuacuuaagagaaau

SEQ ID NO: 3762691 - RNA, 19 nt, Human
cuuaucauccacauuguuu

SEQ ID NO: 3762692 - RNA, 14 nt, Human
cuuaucauggucuc

SEQ ID NO: 3762693 - RNA, 15 nt, Human
cuuaucauggucuca

SEQ ID NO: 3762694 - RNA, 19 nt, Human
cuuauccaggacucuguca

SEQ ID NO: 3762695 - RNA, 15 nt, Human
cuuauccauaaaaaa

SEQ ID NO: 3762696 - RNA, 15 nt, Human
cuuaucccugcccau

SEQ ID NO: 3762697 - RNA, 15 nt, Human
cuuauccuccaccgu

SEQ ID NO: 3762698 - RNA, 14 nt, Human
cuuauccucccugu

SEQ ID NO: 3762699 - RNA, 13 nt, Human
cuuauccucugau

SEQ ID NO: 3762700 - RNA, 14 nt, Human
cuuauccucugauc

SEQ ID NO: 3762701 - RNA, 18 nt, Human
cuuaucgggcuccagcca

SEQ ID NO: 3762702 - RNA, 16 nt, Human
cuuaucuccaagacca

SEQ ID NO: 3762703 - RNA, 20 nt, Human
cuuaucugagcugagccagg

SEQ ID NO: 3762704 - RNA, 20 nt, Human
cuuaucuuacaauauugauu

SEQ ID NO: 3762705 - RNA, 17 nt, Human
cuuaucuuacgaaaaaa

SEQ ID NO: 3762706 - RNA, 13 nt, Human
cuuaugaaaagaa

SEQ ID NO: 3762707 - RNA, 13 nt, Human
cuuaugaaaugug

SEQ ID NO: 3762708 - RNA, 15 nt, Human
cuuaugaauauauuu

SEQ ID NO: 3762709 - RNA, 19 nt, Human
cuuaugaaugauuugcaua

SEQ ID NO: 3762710 - RNA, 18 nt, Human
cuuaugacuugcuacuuu

SEQ ID NO: 3762711 - RNA, 14 nt, Human
cuuaugaggagggg

SEQ ID NO: 3762712 - RNA, 20 nt, Human
cuuaugauuaaacuuccuuc

SEQ ID NO: 3762713 - RNA, 23 nt, Human
cuuaugauucagauuguuaucua

SEQ ID NO: 3762714 - RNA, 17 nt, Human
cuuaugccauuuguuua

SEQ ID NO: 3762715 - RNA, 16 nt, Human
cuuaugcgguuaauuu

SEQ ID NO: 3762716 - RNA, 18 nt, Human
cuuaugcuguacccaguu

SEQ ID NO: 3762717 - RNA, 13 nt, Human
cuuaugcuuccag

SEQ ID NO: 3762718 - RNA, 13 nt, Human
cuuauggaacacu

SEQ ID NO: 3762719 - RNA, 19 nt, Human
cuuauggaacacucugaga

SEQ ID NO: 3762720 - RNA, 14 nt, Human
cuuauggaauugau

SEQ ID NO: 3762721 - RNA, 20 nt, Human
cuuauggauguccccagcag

SEQ ID NO: 3762722 - RNA, 15 nt, Human
cuuauggccacagcc

SEQ ID NO: 3762723 - RNA, 15 nt, Human
cuuauguagauauuu

SEQ ID NO: 3762724 - RNA, 19 nt, Human
cuuauguagcaggaaauaa

SEQ ID NO: 3762725 - RNA, 14 nt, Human
cuuauuaaaguucu

SEQ ID NO: 3762726 - RNA, 18 nt, Human
cuuauuaaaguuucaaaa

SEQ ID NO: 3762727 - RNA, 20 nt, Human
cuuauuaaaguuucaaaaau

SEQ ID NO: 3762728 - RNA, 21 nt, Human
cuuauuaacaauuaggcagac

SEQ ID NO: 3762729 - RNA, 19 nt, Human
cuuauuaaugcuaagggca

SEQ ID NO: 3762730 - RNA, 20 nt, Human
cuuauuagaaaaauauuaua

SEQ ID NO: 3762731 - RNA, 11 nt, Human
cuuauuagaac

SEQ ID NO: 3762732 - RNA, 21 nt, Human
cuuauuagagugucuuuccac

SEQ ID NO: 3762733 - RNA, 17 nt, Human
cuuauucaaagagaaaa

SEQ ID NO: 3762734 - RNA, 19 nt, Human
cuuauucauugugguuauu

SEQ ID NO: 3762735 - RNA, 17 nt, Human
cuuauucauuuucucua

SEQ ID NO: 3762736 - RNA, 19 nt, Human
cuuauugauauucuaagaa

SEQ ID NO: 3762737 - RNA, 13 nt, Human
cuuauugccucac

SEQ ID NO: 3762738 - RNA, 14 nt, Human
cuuauugcgcugcu

SEQ ID NO: 3762739 - RNA, 16 nt, Human
cuuauugcugauuuua

SEQ ID NO: 3762740 - RNA, 19 nt, Human
cuuauugcugauuuuaaug

SEQ ID NO: 3762741 - RNA, 14 nt, Human
cuuauugcuuagua

SEQ ID NO: 3762742 - RNA, 16 nt, Human
cuuauugcuuaguaaa

SEQ ID NO: 3762743 - RNA, 20 nt, Human
cuuauuguggauaacaaaga

SEQ ID NO: 3762744 - RNA, 15 nt, Human
cuuauuguuccaaga

SEQ ID NO: 3762745 - RNA, 19 nt, Human
cuuauuguuccaagacauu

SEQ ID NO: 3762746 - RNA, 18 nt, Human
cuuauuguuucucugaaa

SEQ ID NO: 3762747 - RNA, 18 nt, Human
cuuauuuaaauagaugac

SEQ ID NO: 3762748 - RNA, 22 nt, Human
cuuauuuaaucuuuucuuauuu

SEQ ID NO: 3762749 - RNA, 15 nt, Human
cuuauuuaaugaaag

SEQ ID NO: 3762750 - RNA, 19 nt, Human
cuuauuuauguuaaaagau

SEQ ID NO: 3762751 - RNA, 23 nt, Human
cuuauuucacuuuaguuuuugaa

SEQ ID NO: 3762752 - RNA, 17 nt, Human
cuuauuucaugaaaauu

SEQ ID NO: 3762753 - RNA, 15 nt, Human
cuuauuuuauuucca

SEQ ID NO: 3762754 - RNA, 15 nt, Human
cuuauuuucaagaaa

SEQ ID NO: 3762755 - RNA, 18 nt, Human
cuuauuuucaagaaacug

SEQ ID NO: 3762756 - RNA, 19 nt, Human
cuuauuuucaagaaacuga

SEQ ID NO: 3762757 - RNA, 21 nt, Human
cuuauuuuuaaaauuuuaaua

SEQ ID NO: 3762758 - RNA, 16 nt, Human
cuuauuuuuagauggu

SEQ ID NO: 3762759 - RNA, 22 nt, Human
cuuauuuuuagaugguuacacu

SEQ ID NO: 3762760 - RNA, 23 nt, Human
cuuauuuuuagaugguuacacug

SEQ ID NO: 3762761 - RNA, 23 nt, Human
cuuauuuuuauaacaucuuuauu

SEQ ID NO: 3762762 - RNA, 21 nt, Human
cuucaaaaacugucaaagaau

SEQ ID NO: 3762763 - RNA, 15 nt, Human
cuucaaaaacuguuu

SEQ ID NO: 3762764 - RNA, 19 nt, Human
cuucaaaacaaacagaugc

SEQ ID NO: 3762765 - RNA, 21 nt, Human
cuucaaaaguaaugccucugu

SEQ ID NO: 3762766 - RNA, 15 nt, Human
cuucaaaaguauuuu

SEQ ID NO: 3762767 - RNA, 21 nt, Human
cuucaaaaguauuuuccugua

SEQ ID NO: 3762768 - RNA, 21 nt, Human
cuucaaaauauaaaaugccaa

SEQ ID NO: 3762769 - RNA, 22 nt, Human
cuucaaaauguuaucuucucaa

SEQ ID NO: 3762770 - RNA, 23 nt, Human
cuucaaaauguuaucuucucaag

SEQ ID NO: 3762771 - RNA, 23 nt, Human
cuucaaacuagggccaagcccag

SEQ ID NO: 3762772 - RNA, 16 nt, Human
cuucaaagcuugaaga

SEQ ID NO: 3762773 - RNA, 22 nt, Human
cuucaaagucucaaugaaauag

SEQ ID NO: 3762774 - RNA, 15 nt, Human
cuucaaaguuuaaua

SEQ ID NO: 3762775 - RNA, 19 nt, Human
cuucaaauauuaugcaggg

SEQ ID NO: 3762776 - RNA, 17 nt, Human
cuucaaauccauccaga

SEQ ID NO: 3762777 - RNA, 16 nt, Human
cuucaaaugccugacu

SEQ ID NO: 3762778 - RNA, 12 nt, Human
cuucaacaaggc

SEQ ID NO: 3762779 - RNA, 19 nt, Human
cuucaacaaggcuugcugc

SEQ ID NO: 3762780 - RNA, 21 nt, Human
cuucaacaaggcuugcugcag

SEQ ID NO: 3762781 - RNA, 22 nt, Human
cuucaacaaggcuugcugcaga

SEQ ID NO: 3762782 - RNA, 20 nt, Human
cuucaacaauucuaaaauga

SEQ ID NO: 3762783 - RNA, 16 nt, Human
cuucaacaucaauguu

SEQ ID NO: 3762784 - RNA, 18 nt, Human
cuucaacaucaauguuca

SEQ ID NO: 3762785 - RNA, 18 nt, Human
cuucaacauccugccagc

SEQ ID NO: 3762786 - RNA, 21 nt, Human
cuucaacauccugccagcccc

SEQ ID NO: 3762787 - RNA, 16 nt, Human
cuucaaccauucccca

SEQ ID NO: 3762788 - RNA, 17 nt, Human
cuucaaccuugagacag

SEQ ID NO: 3762789 - RNA, 17 nt, Human
cuucaacguuucuucac

SEQ ID NO: 3762790 - RNA, 21 nt, Human
cuucaacguuucuucacuuuu

SEQ ID NO: 3762791 - RNA, 17 nt, Human
cuucaagaccuucacca

SEQ ID NO: 3762792 - RNA, 18 nt, Human
cuucaagaucauguaccc

SEQ ID NO: 3762793 - RNA, 18 nt, Human
cuucaagaucccauuuga

SEQ ID NO: 3762794 - RNA, 12 nt, Human
cuucaagcucug

SEQ ID NO: 3762795 - RNA, 17 nt, Human
cuucaagcucugaggga

SEQ ID NO: 3762796 - RNA, 17 nt, Human
cuucaaggauccugagc

SEQ ID NO: 3762797 - RNA, 23 nt, Human
cuucaaggauccugagccagauu

SEQ ID NO: 3762798 - RNA, 15 nt, Human
cuucaaggcuucagu

SEQ ID NO: 3762799 - RNA, 16 nt, Human
cuucaagggcugcuuc

SEQ ID NO: 3762800 - RNA, 23 nt, Human
cuucaaggugacagaaggaccag

SEQ ID NO: 3762801 - RNA, 18 nt, Human
cuucaaguuaaagugaau

SEQ ID NO: 3762802 - RNA, 20 nt, Human
cuucaaguuagcucaggagg

SEQ ID NO: 3762803 - RNA, 20 nt, Human
cuucaauaaaucuuuggaaa

SEQ ID NO: 3762804 - RNA, 17 nt, Human
cuucaauccuugaaggu

SEQ ID NO: 3762805 - RNA, 18 nt, Human
cuucaaugggcucuucca

SEQ ID NO: 3762806 - RNA, 19 nt, Human
cuucaaugggcucuuccaa

SEQ ID NO: 3762807 - RNA, 15 nt, Human
cuucaauuuauaccu

SEQ ID NO: 3762808 - RNA, 15 nt, Human
cuucacaaauucuca

SEQ ID NO: 3762809 - RNA, 17 nt, Human
cuucacacacaggcaac

SEQ ID NO: 3762810 - RNA, 21 nt, Human
cuucacacacaggcaacugag

SEQ ID NO: 3762811 - RNA, 19 nt, Human
cuucacaccuacccuccuu

SEQ ID NO: 3762812 - RNA, 15 nt, Human
cuucacacugcaaga

SEQ ID NO: 3762813 - RNA, 17 nt, Human
cuucacagagugugcug

SEQ ID NO: 3762814 - RNA, 20 nt, Human
cuucacagagugugcuggag

SEQ ID NO: 3762815 - RNA, 23 nt, Human
cuucacagagugugcuggaggac

SEQ ID NO: 3762816 - RNA, 15 nt, Human
cuucacaguagagcc

SEQ ID NO: 3762817 - RNA, 17 nt, Human
cuucacaguagagccag

SEQ ID NO: 3762818 - RNA, 14 nt, Human
cuucacaguguuuc

SEQ ID NO: 3762819 - RNA, 20 nt, Human
cuucacauaagcucagaauc

SEQ ID NO: 3762820 - RNA, 22 nt, Human
cuucacauaagcucagaaucca

SEQ ID NO: 3762821 - RNA, 17 nt, Human
cuucacauacccucccc

SEQ ID NO: 3762822 - RNA, 13 nt, Human
cuucacauaguuu

SEQ ID NO: 3762823 - RNA, 14 nt, Human
cuucacauauugau

SEQ ID NO: 3762824 - RNA, 20 nt, Human
cuucacauccuguguuucua

SEQ ID NO: 3762825 - RNA, 14 nt, Human
cuucacauuaaaaa

SEQ ID NO: 3762826 - RNA, 21 nt, Human
cuucacauuccccuggggacc

SEQ ID NO: 3762827 - RNA, 16 nt, Human
cuucaccaucaauccu

SEQ ID NO: 3762828 - RNA, 17 nt, Human
cuucaccaucaauccug

SEQ ID NO: 3762829 - RNA, 19 nt, Human
cuucaccauggccuuauga

SEQ ID NO: 3762830 - RNA, 21 nt, Human
cuucaccauuuggcaaugcca

SEQ ID NO: 3762831 - RNA, 24 nt, Human
cuucacccagcuaaucuguagggc

SEQ ID NO: 3762832 - RNA, 21 nt, Human
cuucacccaggccuauguuga

SEQ ID NO: 3762833 - RNA, 18 nt, Human
cuucaccccaaucccagc

SEQ ID NO: 3762834 - RNA, 19 nt, Human
cuucaccccaguggccacu

SEQ ID NO: 3762835 - RNA, 14 nt, Human
cuucaccccggcag

SEQ ID NO: 3762836 - RNA, 21 nt, Human
cuucaccccggcaggcccugc

SEQ ID NO: 3762837 - RNA, 23 nt, Human
cuucaccccggcaggcccugcag

SEQ ID NO: 3762838 - RNA, 14 nt, Human
cuucaccuccugcc

SEQ ID NO: 3762839 - RNA, 16 nt, Human
cuucaccuccuuucaa

SEQ ID NO: 3762840 - RNA, 18 nt, Human
cuucaccugauucaacua

SEQ ID NO: 3762841 - RNA, 19 nt, Human
gcucucaggccagcugcuu

SEQ ID NO: 3762842 - RNA, 17 nt, Human
gcucucaucugaggcau

SEQ ID NO: 3762843 - RNA, 17 nt, Human
gcucucaugcugccccu

SEQ ID NO: 3762844 - RNA, 16 nt, Human
gcucuccaaaccacuu

SEQ ID NO: 3762845 - RNA, 22 nt, Human
gcucuccaaaccacuuuuugca

SEQ ID NO: 3762846 - RNA, 15 nt, Human
gcucuccaagcccag

SEQ ID NO: 3762847 - RNA, 16 nt, Human
gcucuccaagugccag

SEQ ID NO: 3762848 - RNA, 18 nt, Human
gcucuccaagugccagag

SEQ ID NO: 3762849 - RNA, 14 nt, Human
gcucuccaccucag

SEQ ID NO: 3762850 - RNA, 18 nt, Human
gcucuccagccugggagg

SEQ ID NO: 3762851 - RNA, 14 nt, Human
gcucuccauucugc

SEQ ID NO: 3762852 - RNA, 17 nt, Human
gcucuccauucugcucc

SEQ ID NO: 3762853 - RNA, 19 nt, Human
gcucucccgguucuuccag

SEQ ID NO: 3762854 - RNA, 14 nt, Human
gcucucccucuggc

SEQ ID NO: 3762855 - RNA, 15 nt, Human
gcucucccucuggcc

SEQ ID NO: 3762856 - RNA, 17 nt, Human
gcucucccucuggcccu

SEQ ID NO: 3762857 - RNA, 18 nt, Human
gcucucccucuggcccug

SEQ ID NO: 3762858 - RNA, 16 nt, Human
gcucucccucuucuca

SEQ ID NO: 3762859 - RNA, 19 nt, Human
gcucuccgaccagacaccu

SEQ ID NO: 3762860 - RNA, 21 nt, Human
gcucuccggggccauuugcaa

SEQ ID NO: 3762861 - RNA, 12 nt, Human
gcucuccuggcu

SEQ ID NO: 3762862 - RNA, 14 nt, Human
gcucuccuggcuuc

SEQ ID NO: 3762863 - RNA, 23 nt, Human
gcucuccuggcuucccaucccca

SEQ ID NO: 3762864 - RNA, 22 nt, Human
gcucuccuuccuggagcccaga

SEQ ID NO: 3762865 - RNA, 16 nt, Human
gcucuccuuucuuucu

SEQ ID NO: 3762866 - RNA, 19 nt, Human
gcucucgcacaccucugca

SEQ ID NO: 3762867 - RNA, 19 nt, Human
gcucucggguugugugucu

SEQ ID NO: 3762868 - RNA, 21 nt, Human
gcucucuacccagcccaucuu

SEQ ID NO: 3762869 - RNA, 20 nt, Human
gcucucuccaggcaggucug

SEQ ID NO: 3762870 - RNA, 18 nt, Human
gcucucugaguccuggcc

SEQ ID NO: 3762871 - RNA, 17 nt, Human
gcucucugcagccagcc

SEQ ID NO: 3762872 - RNA, 12 nt, Human
gcucucugcccu

SEQ ID NO: 3762873 - RNA, 11 nt, Human
gcucucugcug

SEQ ID NO: 3762874 - RNA, 19 nt, Human
gcucucuggccuuuuccua

SEQ ID NO: 3762875 - RNA, 11 nt, Human
gcucucuguau

SEQ ID NO: 3762876 - RNA, 18 nt, Human
gcucucuuccugccccuc

SEQ ID NO: 3762877 - RNA, 21 nt, Human
gcucucuuccugccccucuuu

SEQ ID NO: 3762878 - RNA, 16 nt, Human
gcucugaaaccagugu

SEQ ID NO: 3762879 - RNA, 22 nt, Human
gcucugaagucacaucacagga

SEQ ID NO: 3762880 - RNA, 21 nt, Human
gcucugaauuaguccuugcuu

SEQ ID NO: 3762881 - RNA, 16 nt, Human
gcucugacagaaagca

SEQ ID NO: 3762882 - RNA, 14 nt, Human
gcucugaccacuug

SEQ ID NO: 3762883 - RNA, 22 nt, Human
gcucugagaagaggagcccuca

SEQ ID NO: 3762884 - RNA, 22 nt, Human
gcucugagagcaaacuggcuug

SEQ ID NO: 3762885 - RNA, 18 nt, Human
gcucugagaggcccugga

SEQ ID NO: 3762886 - RNA, 13 nt, Human
gcucugagagucu

SEQ ID NO: 3762887 - RNA, 14 nt, Human
gcucugagagucua

SEQ ID NO: 3762888 - RNA, 18 nt, Human
gcucugagagucuagauu

SEQ ID NO: 3762889 - RNA, 20 nt, Human
gcucugagagucuagauucu

SEQ ID NO: 3762890 - RNA, 20 nt, Human
gcucugagcaaauguggcuc

SEQ ID NO: 3762891 - RNA, 18 nt, Human
gcucugagcgccuccauc

SEQ ID NO: 3762892 - RNA, 12 nt, Human
gcucugagcugu

SEQ ID NO: 3762893 - RNA, 13 nt, Human
gcucugagcuguc

SEQ ID NO: 3762894 - RNA, 23 nt, Human
gcucugaggcgccccaacccgug

SEQ ID NO: 3762895 - RNA, 16 nt, Human
gcucugaggcuuccag

SEQ ID NO: 3762896 - RNA, 13 nt, Human
gcucugagggaaa

SEQ ID NO: 3762897 - RNA, 16 nt, Human
gcucugauaggccaag

SEQ ID NO: 3762898 - RNA, 17 nt, Human
gcucugaucauccacug

SEQ ID NO: 3762899 - RNA, 17 nt, Human
gcucugcaauuccccuc

SEQ ID NO: 3762900 - RNA, 12 nt, Human
gcucugcacaga

SEQ ID NO: 3762901 - RNA, 15 nt, Human
gcucugcacagaugg

SEQ ID NO: 3762902 - RNA, 13 nt, Human
gcucugcagccca

SEQ ID NO: 3762903 - RNA, 20 nt, Human
gcucugcaggcuuaauaaaa

SEQ ID NO: 3762904 - RNA, 21 nt, Human
gcucugcaguccuacucaagc

SEQ ID NO: 3762905 - RNA, 11 nt, Human
gcucugcaugc

SEQ ID NO: 3762906 - RNA, 15 nt, Human
gcucugcaugcggcc

SEQ ID NO: 3762907 - RNA, 18 nt, Human
gcucugcaugcggcccag

SEQ ID NO: 3762908 - RNA, 15 nt, Human
gcucugcauuugucu

SEQ ID NO: 3762909 - RNA, 18 nt, Human
gcucugccacccuaccug

SEQ ID NO: 3762910 - RNA, 16 nt, Human
gcucugccaguccugu

SEQ ID NO: 3762911 - RNA, 18 nt, Human
gcucugccaguccugucc

SEQ ID NO: 3762912 - RNA, 13 nt, Human
gcucugcccagag

SEQ ID NO: 3762913 - RNA, 14 nt, Human
gcucugcccagagc

SEQ ID NO: 3762914 - RNA, 17 nt, Human
gcucugcccagagcugg

SEQ ID NO: 3762915 - RNA, 20 nt, Human
gcucugcccagagcugggug

SEQ ID NO: 3762916 - RNA, 21 nt, Human
gcucugcccagagcuggguga

SEQ ID NO: 3762917 - RNA, 15 nt, Human
gcucugcccauccug

SEQ ID NO: 3762918 - RNA, 15 nt, Human
gcucugccccagagg

SEQ ID NO: 3762919 - RNA, 16 nt, Human
gcucugccccagaggc

SEQ ID NO: 3762920 - RNA, 13 nt, Human
gcucugccccagc

SEQ ID NO: 3762921 - RNA, 18 nt, Human
gcucugccccagcucugg

SEQ ID NO: 3762922 - RNA, 19 nt, Human
gcucugccccagcucuggc

SEQ ID NO: 3762923 - RNA, 13 nt, Human
gcucugccuccca

SEQ ID NO: 3762924 - RNA, 13 nt, Human
gcucugccugugg

SEQ ID NO: 3762925 - RNA, 22 nt, Human
gcucugcuauuaggccagcaag

SEQ ID NO: 3762926 - RNA, 13 nt, Human
gcucugcuccucu

SEQ ID NO: 3762927 - RNA, 13 nt, Human
gcucugcuggccu

SEQ ID NO: 3762928 - RNA, 21 nt, Human
gcucugcuggccuggccggca

SEQ ID NO: 3762929 - RNA, 14 nt, Human
gcucugcuugacaa

SEQ ID NO: 3762930 - RNA, 21 nt, Human
gcucuggaaaaugugacccag

SEQ ID NO: 3762931 - RNA, 16 nt, Human
gcucuggacagcccca

SEQ ID NO: 3762932 - RNA, 19 nt, Human
gcucuggacagccccaccc

SEQ ID NO: 3762933 - RNA, 14 nt, Human
gcucuggacaggca

SEQ ID NO: 3762934 - RNA, 21 nt, Human
gcucuggacaggcauguucuc

SEQ ID NO: 3762935 - RNA, 14 nt, Human
gcucuggaccugcc

SEQ ID NO: 3762936 - RNA, 15 nt, Human
gcucuggaccugccc

SEQ ID NO: 3762937 - RNA, 15 nt, Human
gcucuggagagaaac

SEQ ID NO: 3762938 - RNA, 15 nt, Human
gcucuggagccaccu

SEQ ID NO: 3762939 - RNA, 20 nt, Human
gcucuggagccaccuguccc

SEQ ID NO: 3762940 - RNA, 15 nt, Human
gcucuggagcccacu

SEQ ID NO: 3762941 - RNA, 13 nt, Human
gcucuggagggga

SEQ ID NO: 3762942 - RNA, 15 nt, Human
gcucuggccuccaag

SEQ ID NO: 3762943 - RNA, 14 nt, Human
gcucuggcucacag

SEQ ID NO: 3762944 - RNA, 18 nt, Human
gcucuggcucacagacug

SEQ ID NO: 3762945 - RNA, 22 nt, Human
gcucuggcucacagacuggaga

SEQ ID NO: 3762946 - RNA, 15 nt, Human
gcucuggcugaaccc

SEQ ID NO: 3762947 - RNA, 21 nt, Human
gcucuggcugaacccugugcu

SEQ ID NO: 3762948 - RNA, 14 nt, Human
gcucugggccauuc

SEQ ID NO: 3762949 - RNA, 21 nt, Human
gcucuggggugggcaguuuuu

SEQ ID NO: 3762950 - RNA, 23 nt, Human
gcucugguccauagagagcaaga

SEQ ID NO: 3762951 - RNA, 18 nt, Human
gcucuggugacaccagcc

SEQ ID NO: 3762952 - RNA, 19 nt, Human
gcucuggugacaccagccu

SEQ ID NO: 3762953 - RNA, 22 nt, Human
gcucugguuguuucuguuccaa

SEQ ID NO: 3762954 - RNA, 17 nt, Human
gcucuguagugcuacag

SEQ ID NO: 3762955 - RNA, 23 nt, Human
gcucuguagugcuacagggucca

SEQ ID NO: 3762956 - RNA, 16 nt, Human
gcucugucacccaggc

SEQ ID NO: 3762957 - RNA, 14 nt, Human
gcucuguccuggga

SEQ ID NO: 3762958 - RNA, 19 nt, Human
gcucugucgcccaggcugg

SEQ ID NO: 3762959 - RNA, 14 nt, Human
gcucugugcaguca

SEQ ID NO: 3762960 - RNA, 21 nt, Human
gcucugugcagucacuggagg

SEQ ID NO: 3762961 - RNA, 14 nt, Human
gcucugugcugacc

SEQ ID NO: 3762962 - RNA, 15 nt, Human
gcucugugcugaccc

SEQ ID NO: 3762963 - RNA, 18 nt, Human
gcucugugcugacccucc

SEQ ID NO: 3762964 - RNA, 16 nt, Human
gcucuguggccacauu

SEQ ID NO: 3762965 - RNA, 23 nt, Human
gcucugugggcugcacucugugc

SEQ ID NO: 3762966 - RNA, 17 nt, Human
gcucuguguugccaugu

SEQ ID NO: 3762967 - RNA, 23 nt, Human
gcucuguuacccaggguggagug

SEQ ID NO: 3762968 - RNA, 23 nt, Human
gcucuguucuuccucagccagcc

SEQ ID NO: 3762969 - RNA, 22 nt, Human
gcucuguugcccaggcuggagu

SEQ ID NO: 3762970 - RNA, 15 nt, Human
gcucuguuugugggg

SEQ ID NO: 3762971 - RNA, 18 nt, Human
gcucuguuugugggguga

SEQ ID NO: 3762972 - RNA, 17 nt, Human
gcucuuagcagcuucca

SEQ ID NO: 3762973 - RNA, 15 nt, Human
gcucuucagaugcca

SEQ ID NO: 3762974 - RNA, 15 nt, Human
gcucuucaggccucc

SEQ ID NO: 3762975 - RNA, 19 nt, Human
gcucuucagugggagaaaa

SEQ ID NO: 3762976 - RNA, 19 nt, Human
gcucuucaucccauuccag

SEQ ID NO: 3762977 - RNA, 15 nt, Human
gcucuuccaggcugg

SEQ ID NO: 3762978 - RNA, 16 nt, Human
gcucuuccaggcuggg

SEQ ID NO: 3762979 - RNA, 22 nt, Human
gcucuuccaggcugggagagcc

SEQ ID NO: 3762980 - RNA, 15 nt, Human
gcucuucucauuuca

SEQ ID NO: 3762981 - RNA, 13 nt, Human
gcucuucugacua

SEQ ID NO: 3762982 - RNA, 21 nt, Human
gcucuucugccggcccugggg

SEQ ID NO: 3762983 - RNA, 14 nt, Human
gcucuucuucuuuc

SEQ ID NO: 3762984 - RNA, 17 nt, Human
gcucuugauaccccccu

SEQ ID NO: 3762985 - RNA, 20 nt, Human
gcucuugauaccccccucug

SEQ ID NO: 3762986 - RNA, 15 nt, Human
gcucuugaugccugg

SEQ ID NO: 3762987 - RNA, 16 nt, Human
gcucuugaugccuggc

SEQ ID NO: 3762988 - RNA, 18 nt, Human
gcucuugcccuucccugu

SEQ ID NO: 3762989 - RNA, 19 nt, Human
gcucuugcccuucccuguc

SEQ ID NO: 3762990 - RNA, 17 nt, Human
gcucuuggagcugugag

SEQ ID NO: 3762991 - RNA, 16 nt, Human
gcuaaaagaaacuuuc

SEQ ID NO: 3762992 - RNA, 19 nt, Human
gcuaaacguguauguuuuu

SEQ ID NO: 3762993 - RNA, 23 nt, Human
gcuaaacguguauguuuuucagu

SEQ ID NO: 3762994 - RNA, 17 nt, Human
gcuaaacguuggugacg

SEQ ID NO: 3762995 - RNA, 17 nt, Human
gcuaaacuccuuccugg

SEQ ID NO: 3762996 - RNA, 22 nt, Human
gcuaaacuccuuccuggccuga

SEQ ID NO: 3762997 - RNA, 14 nt, Human
gcuaaagagcccuu

SEQ ID NO: 3762998 - RNA, 22 nt, Human
gcuaaagagcccuugccucccc

SEQ ID NO: 3762999 - RNA, 17 nt, Human
gcuaaagcaauaugcau

SEQ ID NO: 3763000 - RNA, 19 nt, Human
gcuaaagcaauaugcauuu

SEQ ID NO: 3763001 - RNA, 21 nt, Human
gcuaaaguaaacaacucaagg

SEQ ID NO: 3763002 - RNA, 18 nt, Human
gcuaaauaaucuuacucu

SEQ ID NO: 3763003 - RNA, 18 nt, Human
gcuaaaugccuaauaaac

SEQ ID NO: 3763004 - RNA, 19 nt, Human
gcuaaaugccuaauaaaca

SEQ ID NO: 3763005 - RNA, 17 nt, Human
gcuaaauguaacagucu

SEQ ID NO: 3763006 - RNA, 18 nt, Human
gcuaaauguaagaaucau

SEQ ID NO: 3763007 - RNA, 20 nt, Human
gcuaaauugauguugaugca

SEQ ID NO: 3763008 - RNA, 16 nt, Human
gcuaacacuggccccu

SEQ ID NO: 3763009 - RNA, 15 nt, Human
gcuaacagggaaggc

SEQ ID NO: 3763010 - RNA, 18 nt, Human
gcuaacagggaaggcagg

SEQ ID NO: 3763011 - RNA, 14 nt, Human
gcuaacauuuuaaa

SEQ ID NO: 3763012 - RNA, 21 nt, Human
gcuaacauuuuaaauaaaaga

SEQ ID NO: 3763013 - RNA, 23 nt, Human
gcuaacauuuuaaauaaaagaaa

SEQ ID NO: 3763014 - RNA, 22 nt, Human
gcuaacccagguccccucauuc

SEQ ID NO: 3763015 - RNA, 19 nt, Human
gcuaaccuuauccugcauu

SEQ ID NO: 3763016 - RNA, 22 nt, Human
gcuaaccuuauccugcauuguu

SEQ ID NO: 3763017 - RNA, 21 nt, Human
gcuaacuagcuuggaaacugg

SEQ ID NO: 3763018 - RNA, 17 nt, Human
gcuaacugaacuuugaa

SEQ ID NO: 3763019 - RNA, 18 nt, Human
gcuaacugaacuuugaag

SEQ ID NO: 3763020 - RNA, 12 nt, Human
gcuaacuggaag

SEQ ID NO: 3763021 - RNA, 16 nt, Human
gcuaacuguaaaucau

SEQ ID NO: 3763022 - RNA, 18 nt, Human
gcuaacuugcuuaaaugu

SEQ ID NO: 3763023 - RNA, 20 nt, Human
gcuaacuugcuuaaauguga

SEQ ID NO: 3763024 - RNA, 20 nt, Human
gcuaacuuggagccccagug

SEQ ID NO: 3763025 - RNA, 14 nt, Human
gcuaagaaaagauu

SEQ ID NO: 3763026 - RNA, 16 nt, Human
gcuaagaaccuggaac

SEQ ID NO: 3763027 - RNA, 14 nt, Human
gcuaagaauauuug

SEQ ID NO: 3763028 - RNA, 13 nt, Human
gcuaagaggcugc

SEQ ID NO: 3763029 - RNA, 14 nt, Human
gcuaagaggcugcu

SEQ ID NO: 3763030 - RNA, 23 nt, Human
gcuaagagggagggagggcucca

SEQ ID NO: 3763031 - RNA, 17 nt, Human
gcuaagcaaaaugugau

SEQ ID NO: 3763032 - RNA, 14 nt, Human
gcuaagcauuccaa

SEQ ID NO: 3763033 - RNA, 17 nt, Human
gcuaagccccagcaagc

SEQ ID NO: 3763034 - RNA, 15 nt, Human
gcuaagcuaggaaug

SEQ ID NO: 3763035 - RNA, 19 nt, Human
gcuaagcuaggaaugaaau

SEQ ID NO: 3763036 - RNA, 18 nt, Human
gcuaagcuuaaaaaaaac

SEQ ID NO: 3763037 - RNA, 23 nt, Human
gcuaaggacuuguuagaucuagu

SEQ ID NO: 3763038 - RNA, 14 nt, Human
gcuaaggcaccagc

SEQ ID NO: 3763039 - RNA, 16 nt, Human
gcuaagggaagacauu

SEQ ID NO: 3763040 - RNA, 19 nt, Human
gcuaagggaagacauuucu

SEQ ID NO: 3763041 - RNA, 15 nt, Human
gcuaagggguggggc

SEQ ID NO: 3763042 - RNA, 20 nt, Human
gcuaagggugggugcucaga

SEQ ID NO: 3763043 - RNA, 20 nt, Human
gcuaagguguauuugguccu

SEQ ID NO: 3763044 - RNA, 15 nt, Human
gcuaagguucuaagg

SEQ ID NO: 3763045 - RNA, 20 nt, Human
gcuaaguacacaauaagcaa

SEQ ID NO: 3763046 - RNA, 18 nt, Human
gcuaagugauccucccac

SEQ ID NO: 3763047 - RNA, 22 nt, Human
gcuaagugauccucccaccuca

SEQ ID NO: 3763048 - RNA, 20 nt, Human
gcuaauaaaauaucauucag

SEQ ID NO: 3763049 - RNA, 15 nt, Human
gcuaauaacugaucu

SEQ ID NO: 3763050 - RNA, 21 nt, Human
gcuaauaaugagcuauuaaaa

SEQ ID NO: 3763051 - RNA, 21 nt, Human
gcuaaucaaagccagggucuc

SEQ ID NO: 3763052 - RNA, 19 nt, Human
gcuaaucuguagggcugga

SEQ ID NO: 3763053 - RNA, 15 nt, Human
gcuaaugggacacua

SEQ ID NO: 3763054 - RNA, 22 nt, Human
gcuaauguugcuggaucaggaa

SEQ ID NO: 3763055 - RNA, 15 nt, Human
gcuaauuaaaaaguu

SEQ ID NO: 3763056 - RNA, 15 nt, Human
gcuaauuauuuuaau

SEQ ID NO: 3763057 - RNA, 23 nt, Human
gcuaauuauuuuaauuagguuaa

SEQ ID NO: 3763058 - RNA, 13 nt, Human
gcuaauucuuugc

SEQ ID NO: 3763059 - RNA, 23 nt, Human
gcuaauugcuguugaaagcaaaa

SEQ ID NO: 3763060 - RNA, 12 nt, Human
gcuaauuugcau

SEQ ID NO: 3763061 - RNA, 20 nt, Human
gcuaauuuguuuuggauaua

SEQ ID NO: 3763062 - RNA, 12 nt, Human
gcuaauuuuuau

SEQ ID NO: 3763063 - RNA, 20 nt, Human
gcuaauuuuucauuuuuagu

SEQ ID NO: 3763064 - RNA, 16 nt, Human
gcuaauuuuuguaauu

SEQ ID NO: 3763065 - RNA, 17 nt, Human
gcuacaaaaacacagca

SEQ ID NO: 3763066 - RNA, 22 nt, Human
gcuacaaaacgcgcagaugugc

SEQ ID NO: 3763067 - RNA, 15 nt, Human
gcuacaaagaagaca

SEQ ID NO: 3763068 - RNA, 17 nt, Human
gcuacaaagaagacaug

SEQ ID NO: 3763069 - RNA, 15 nt, Human
gcuacaacagccuca

SEQ ID NO: 3763070 - RNA, 17 nt, Human
gcuacaacagccucacu

SEQ ID NO: 3763071 - RNA, 17 nt, Human
gcuacaacuucagcagu

SEQ ID NO: 3763072 - RNA, 20 nt, Human
gcuacaauuuucucccagga

SEQ ID NO: 3763073 - RNA, 13 nt, Human
gcuacacaccuaa

SEQ ID NO: 3763074 - RNA, 16 nt, Human
gcuacacagaucacag

SEQ ID NO: 3763075 - RNA, 22 nt, Human
gcuacacaggggaaaagaggag

SEQ ID NO: 3763076 - RNA, 19 nt, Human
gcuacacccuuuuccagcu

SEQ ID NO: 3763077 - RNA, 20 nt, Human
gcuacaccuuucuccuuugu

SEQ ID NO: 3763078 - RNA, 15 nt, Human
gcuacagagaaacca

SEQ ID NO: 3763079 - RNA, 17 nt, Human
gcuacagagaaaccagc

SEQ ID NO: 3763080 - RNA, 20 nt, Human
gcuacagagaaaccagcuuc

SEQ ID NO: 3763081 - RNA, 22 nt, Human
gcuacagagaaaccagcuuccu

SEQ ID NO: 3763082 - RNA, 14 nt, Human
gcuacagagaagcc

SEQ ID NO: 3763083 - RNA, 18 nt, Human
gcuacagagaagccuuca

SEQ ID NO: 3763084 - RNA, 17 nt, Human
gcuacagcaauuucuaa

SEQ ID NO: 3763085 - RNA, 21 nt, Human
gcuacagcuuucuugcucccu

SEQ ID NO: 3763086 - RNA, 21 nt, Human
gcuacaggaagcaccccaugc

SEQ ID NO: 3763087 - RNA, 22 nt, Human
gcuacaggaagcaccccaugcc

SEQ ID NO: 3763088 - RNA, 15 nt, Human
gcuacaggggccaga

SEQ ID NO: 3763089 - RNA, 15 nt, Human
gcuacagguuacaac

SEQ ID NO: 3763090 - RNA, 14 nt, Human
gcuacaguaauaaa

SEQ ID NO: 3763091 - RNA, 13 nt, Human
gcuacauaauuua

SEQ ID NO: 3763092 - RNA, 16 nt, Human
gcuacaugcugggguc

SEQ ID NO: 3763093 - RNA, 19 nt, Human
gcuacauggggcucacuca

SEQ ID NO: 3763094 - RNA, 11 nt, Human
gcuacauuaua

SEQ ID NO: 3763095 - RNA, 13 nt, Human
gcuacauuauaaa

SEQ ID NO: 3763096 - RNA, 17 nt, Human
gcuacauuauaaacgcu

SEQ ID NO: 3763097 - RNA, 14 nt, Human
gcuaccaccagcug

SEQ ID NO: 3763098 - RNA, 20 nt, Human
gcuaccaccagcugugucca

SEQ ID NO: 3763099 - RNA, 18 nt, Human
gcuaccaguauuuagaag

SEQ ID NO: 3763100 - RNA, 20 nt, Human
gcuacccccaugcuggaggu

SEQ ID NO: 3763101 - RNA, 14 nt, Human
gcuacccgggaagg

SEQ ID NO: 3763102 - RNA, 15 nt, Human
gcuacccgggaaggg

SEQ ID NO: 3763103 - RNA, 19 nt, Human
gcuacccucccugcugucc

SEQ ID NO: 3763104 - RNA, 14 nt, Human
gcuacccugagcug

SEQ ID NO: 3763105 - RNA, 20 nt, Human
gcuacccuuuuccuuugugg

SEQ ID NO: 3763106 - RNA, 13 nt, Human
gcuaccucaaggg

SEQ ID NO: 3763107 - RNA, 14 nt, Human
gcuaccucacuggg

SEQ ID NO: 3763108 - RNA, 12 nt, Human
gcuaccucccuc

SEQ ID NO: 3763109 - RNA, 14 nt, Human
gcuaccucccuccc

SEQ ID NO: 3763110 - RNA, 21 nt, Human
gcuaccucucugucccuugcu

SEQ ID NO: 3763111 - RNA, 20 nt, Human
gcuaccuguguggacaggac

SEQ ID NO: 3763112 - RNA, 14 nt, Human
gcuaccuugcccca

SEQ ID NO: 3763113 - RNA, 22 nt, Human
gcuaccuugccccaacccuucu

SEQ ID NO: 3763114 - RNA, 12 nt, Human
gcuacgccugca

SEQ ID NO: 3763115 - RNA, 14 nt, Human
gcuacguauuuaau

SEQ ID NO: 3763116 - RNA, 17 nt, Human
gcuacgugugauuuuuc

SEQ ID NO: 3763117 - RNA, 18 nt, Human
gcuacuagaauucuguau

SEQ ID NO: 3763118 - RNA, 22 nt, Human
gcuacuaugauuuaauuugaaa

SEQ ID NO: 3763119 - RNA, 16 nt, Human
gcuacucaagaggcug

SEQ ID NO: 3763120 - RNA, 20 nt, Human
gcuacucaagaggcugaggc

SEQ ID NO: 3763121 - RNA, 23 nt, Human
gcuacucacucaaguucaaggac

SEQ ID NO: 3763122 - RNA, 17 nt, Human
gcuacucagcagcccuc

SEQ ID NO: 3763123 - RNA, 24 nt, Human
gcuacucagcagcccuccucaccc

SEQ ID NO: 3763124 - RNA, 14 nt, Human
gcuacucaggaggc

SEQ ID NO: 3763125 - RNA, 15 nt, Human
gcuacucaggaggcu

SEQ ID NO: 3763126 - RNA, 19 nt, Human
gcuacucgggaggcugagg

SEQ ID NO: 3763127 - RNA, 21 nt, Human
gcuacucgggaggcugaggca

SEQ ID NO: 3763128 - RNA, 23 nt, Human
gcuacucgggaggcugaggcaca

SEQ ID NO: 3763129 - RNA, 23 nt, Human
gcuacucgggaggcugaggcagg

SEQ ID NO: 3763130 - RNA, 19 nt, Human
gcuacucgugagcgccagu

SEQ ID NO: 3763131 - RNA, 19 nt, Human
gcuacucuaguauuccaga

SEQ ID NO: 3763132 - RNA, 22 nt, Human
gcuacucuccccacgagggcug

SEQ ID NO: 3763133 - RNA, 13 nt, Human
gcuacucugugcc

SEQ ID NO: 3763134 - RNA, 14 nt, Human
gcuacucugugcca

SEQ ID NO: 3763135 - RNA, 16 nt, Human
gcuacucugugccaga

SEQ ID NO: 3763136 - RNA, 19 nt, Human
gcuacucugugccagagcc

SEQ ID NO: 3763137 - RNA, 22 nt, Human
gcuacucugugccagagccugg

SEQ ID NO: 3763138 - RNA, 17 nt, Human
gcuacucuguuccuuca

SEQ ID NO: 3763139 - RNA, 18 nt, Human
gcuacugaugagaauuua

SEQ ID NO: 3763140 - RNA, 19 nt, Human
gcucuuggcagguacucag

SEQ ID NO: 3763141 - RNA, 13 nt, Human
gcucuuggcugga

SEQ ID NO: 3763142 - RNA, 21 nt, Human
gcucuuguagcccaggcugga

SEQ ID NO: 3763143 - RNA, 22 nt, Human
gcucuugugcuggauggagccc

SEQ ID NO: 3763144 - RNA, 14 nt, Human
gcucuuuccuccuu

SEQ ID NO: 3763145 - RNA, 15 nt, Human
gcucuuuccuccuuc

SEQ ID NO: 3763146 - RNA, 17 nt, Human
gcucuuuccuccuucca

SEQ ID NO: 3763147 - RNA, 14 nt, Human
gcucuuucucugcc

SEQ ID NO: 3763148 - RNA, 15 nt, Human
gcucuuucucugcca

SEQ ID NO: 3763149 - RNA, 21 nt, Human
gcucuuucucugccagugaca

SEQ ID NO: 3763150 - RNA, 17 nt, Human
gcucuuugaaacaacuu

SEQ ID NO: 3763151 - RNA, 21 nt, Human
gcucuuugaaauagucugugu

SEQ ID NO: 3763152 - RNA, 13 nt, Human
gcucuuugagaaa

SEQ ID NO: 3763153 - RNA, 12 nt, Human
gcucuuugcacu

SEQ ID NO: 3763154 - RNA, 13 nt, Human
gcucuuugcacua

SEQ ID NO: 3763155 - RNA, 20 nt, Human
gcucuuuggggucagccagg

SEQ ID NO: 3763156 - RNA, 18 nt, Human
gcucuuugguagaaaagg

SEQ ID NO: 3763157 - RNA, 15 nt, Human
gcucuuugucaggga

SEQ ID NO: 3763158 - RNA, 22 nt, Human
gcucuuuuuuacucauugaaau

SEQ ID NO: 3763159 - RNA, 21 nt, Human
gcucuuuuuuguuuguuucuu

SEQ ID NO: 3763160 - RNA, 19 nt, Human
gcugaaaaaucacauccug

SEQ ID NO: 3763161 - RNA, 20 nt, Human
gcugaaaaccuaaguccuuu

SEQ ID NO: 3763162 - RNA, 11 nt, Human
gcugaaaauau

SEQ ID NO: 3763163 - RNA, 15 nt, Human
gcugaaaauauaaaa

SEQ ID NO: 3763164 - RNA, 16 nt, Human
gcugaaacaggagaga

SEQ ID NO: 3763165 - RNA, 17 nt, Human
gcugaaacaggagagaa

SEQ ID NO: 3763166 - RNA, 18 nt, Human
gcugaaacgcaucuaguu

SEQ ID NO: 3763167 - RNA, 15 nt, Human
gcugaaaugcugcau

SEQ ID NO: 3763168 - RNA, 16 nt, Human
gcugaaauucuccugg

SEQ ID NO: 3763169 - RNA, 16 nt, Human
gcugaaauuuuagaaa

SEQ ID NO: 3763170 - RNA, 18 nt, Human
gcugaacacauuucuuuu

SEQ ID NO: 3763171 - RNA, 20 nt, Human
gcugaacacuccaauuaagg

SEQ ID NO: 3763172 - RNA, 15 nt, Human
gcugaagagugagga

SEQ ID NO: 3763173 - RNA, 15 nt, Human
gcugaagcugccugc

SEQ ID NO: 3763174 - RNA, 21 nt, Human
gcugaagcuuauuaaugcuaa

SEQ ID NO: 3763175 - RNA, 13 nt, Human
gcugaaggacugu

SEQ ID NO: 3763176 - RNA, 14 nt, Human
gcugaaggacugug

SEQ ID NO: 3763177 - RNA, 12 nt, Human
gcugaaggcucg

SEQ ID NO: 3763178 - RNA, 23 nt, Human
gcugaaggcucgagcaugccugg

SEQ ID NO: 3763179 - RNA, 15 nt, Human
gcugaagguugaaga

SEQ ID NO: 3763180 - RNA, 17 nt, Human
gcugaagguuguggccu

SEQ ID NO: 3763181 - RNA, 20 nt, Human
gcugaagguuguggccuuug

SEQ ID NO: 3763182 - RNA, 12 nt, Human
gcugaauaaaug

SEQ ID NO: 3763183 - RNA, 16 nt, Human
gcugaauaaaugucuu

SEQ ID NO: 3763184 - RNA, 16 nt, Human
gcugaauagcuucucc

SEQ ID NO: 3763185 - RNA, 19 nt, Human
gcugaauaggcgaucacaa

SEQ ID NO: 3763186 - RNA, 15 nt, Human
gcugaauccagauca

SEQ ID NO: 3763187 - RNA, 22 nt, Human
gcugaauugagccuaaaaauaa

SEQ ID NO: 3763188 - RNA, 12 nt, Human
gcugaauuuuca

SEQ ID NO: 3763189 - RNA, 18 nt, Human
gcugacacaaaccugccu

SEQ ID NO: 3763190 - RNA, 19 nt, Human
gcugacacaaaccugccug

SEQ ID NO: 3763191 - RNA, 17 nt, Human
gcugacaccuaacucuu

SEQ ID NO: 3763192 - RNA, 13 nt, Human
gcugacagacaca

SEQ ID NO: 3763193 - RNA, 16 nt, Human
gcugacagacacaggc

SEQ ID NO: 3763194 - RNA, 19 nt, Human
gcugacagacacaggcccg

SEQ ID NO: 3763195 - RNA, 16 nt, Human
gcugacaguccucucc

SEQ ID NO: 3763196 - RNA, 13 nt, Human
gcugacaucugug

SEQ ID NO: 3763197 - RNA, 19 nt, Human
gcugacaucuguguuucaa

SEQ ID NO: 3763198 - RNA, 17 nt, Human
gcugacaugaagcuguu

SEQ ID NO: 3763199 - RNA, 22 nt, Human
gcugacauuguggcacauucuu

SEQ ID NO: 3763200 - RNA, 20 nt, Human
gcugaccaagagagaaagaa

SEQ ID NO: 3763201 - RNA, 15 nt, Human
gcugaccaauugugc

SEQ ID NO: 3763202 - RNA, 21 nt, Human
gcugaccaauugugcugccau

SEQ ID NO: 3763203 - RNA, 13 nt, Human
gcugaccacagca

SEQ ID NO: 3763204 - RNA, 14 nt, Human
gcugaccacagcac

SEQ ID NO: 3763205 - RNA, 17 nt, Human
gcugaccacagcacagc

SEQ ID NO: 3763206 - RNA, 12 nt, Human
gcugaccagaca

SEQ ID NO: 3763207 - RNA, 22 nt, Human
gcugaccaugcucaucugcugg

SEQ ID NO: 3763208 - RNA, 13 nt, Human
gcugacccagccu

SEQ ID NO: 3763209 - RNA, 14 nt, Human
gcugacccaugggc

SEQ ID NO: 3763210 - RNA, 19 nt, Human
gcugaccccaaagagccug

SEQ ID NO: 3763211 - RNA, 21 nt, Human
gcugaccccccucaggacccu

SEQ ID NO: 3763212 - RNA, 14 nt, Human
gcugacccuccugu

SEQ ID NO: 3763213 - RNA, 22 nt, Human
gcugacccuccuguugcaccca

SEQ ID NO: 3763214 - RNA, 18 nt, Human
gcugaccucccagugacc

SEQ ID NO: 3763215 - RNA, 14 nt, Human
gcugaccucuguug

SEQ ID NO: 3763216 - RNA, 16 nt, Human
gcugaccugccucuca

SEQ ID NO: 3763217 - RNA, 12 nt, Human
gcugaccugcug

SEQ ID NO: 3763218 - RNA, 17 nt, Human
gcugaccuuccucgcag

SEQ ID NO: 3763219 - RNA, 19 nt, Human
gcugaccuuccucgcagag

SEQ ID NO: 3763220 - RNA, 20 nt, Human
gcugaccuuccucgcagaga

SEQ ID NO: 3763221 - RNA, 22 nt, Human
gcugaccuuccucgcagagagg

SEQ ID NO: 3763222 - RNA, 20 nt, Human
gcugaccuugaacuccuggg

SEQ ID NO: 3763223 - RNA, 21 nt, Human
gcugaccuugaacuccugggc

SEQ ID NO: 3763224 - RNA, 19 nt, Human
gcugacgggacccacaugc

SEQ ID NO: 3763225 - RNA, 14 nt, Human
gcugacuaaauuug

SEQ ID NO: 3763226 - RNA, 20 nt, Human
gcugacuaaauuuggggaca

SEQ ID NO: 3763227 - RNA, 23 nt, Human
gcugacuagaagggccaguccug

SEQ ID NO: 3763228 - RNA, 20 nt, Human
gcugacugauguugagggaa

SEQ ID NO: 3763229 - RNA, 16 nt, Human
gcugacugggccaggg

SEQ ID NO: 3763230 - RNA, 21 nt, Human
gcugacuguacuccucccagg

SEQ ID NO: 3763231 - RNA, 14 nt, Human
gcugacuguagcuu

SEQ ID NO: 3763232 - RNA, 18 nt, Human
gcugacuguccucucccc

SEQ ID NO: 3763233 - RNA, 23 nt, Human
gcugacuguccucuccccuccag

SEQ ID NO: 3763234 - RNA, 22 nt, Human
gcugacuguuuucucuugagag

SEQ ID NO: 3763235 - RNA, 13 nt, Human
gcugacuuagaau

SEQ ID NO: 3763236 - RNA, 13 nt, Human
gcugacuucacuu

SEQ ID NO: 3763237 - RNA, 19 nt, Human
gcugacuucaucucccacc

SEQ ID NO: 3763238 - RNA, 15 nt, Human
gcugacuuggcuggu

SEQ ID NO: 3763239 - RNA, 18 nt, Human
gcugacuuggcuggugug

SEQ ID NO: 3763240 - RNA, 23 nt, Human
gcugacuuggcuggugugguaca

SEQ ID NO: 3763241 - RNA, 18 nt, Human
gcugacuuugcucuuucu

SEQ ID NO: 3763242 - RNA, 15 nt, Human
gcugagaaccuggcc

SEQ ID NO: 3763243 - RNA, 18 nt, Human
gcugagaaccuggccuuc

SEQ ID NO: 3763244 - RNA, 17 nt, Human
gcugagaacuccugacu

SEQ ID NO: 3763245 - RNA, 18 nt, Human
gcugagaagcuuuugaau

SEQ ID NO: 3763246 - RNA, 13 nt, Human
gcugagaauagaa

SEQ ID NO: 3763247 - RNA, 17 nt, Human
gcugagaauagaaggaa

SEQ ID NO: 3763248 - RNA, 18 nt, Human
gcugagaauagaaggaaa

SEQ ID NO: 3763249 - RNA, 16 nt, Human
gcugagaauguggaau

SEQ ID NO: 3763250 - RNA, 14 nt, Human
gcugagacaggaga

SEQ ID NO: 3763251 - RNA, 19 nt, Human
gcugagacaggagaaacac

SEQ ID NO: 3763252 - RNA, 9 nt, Human
gcugagacu

SEQ ID NO: 3763253 - RNA, 14 nt, Human
gcugagacugcggg

SEQ ID NO: 3763254 - RNA, 15 nt, Human
gcugagagaaaauaa

SEQ ID NO: 3763255 - RNA, 15 nt, Human
gcugagagacccaag

SEQ ID NO: 3763256 - RNA, 20 nt, Human
gcugagagccccagcugaca

SEQ ID NO: 3763257 - RNA, 16 nt, Human
gcugagaggagagaga

SEQ ID NO: 3763258 - RNA, 22 nt, Human
gcugagauccuggacugagggg

SEQ ID NO: 3763259 - RNA, 20 nt, Human
gcugagaucgugccacugca

SEQ ID NO: 3763260 - RNA, 21 nt, Human
gcugagcacccagcucugucu

SEQ ID NO: 3763261 - RNA, 12 nt, Human
gcugagcaggcc

SEQ ID NO: 3763262 - RNA, 14 nt, Human
gcugagcagggccg

SEQ ID NO: 3763263 - RNA, 16 nt, Human
gcugagcagggccggg

SEQ ID NO: 3763264 - RNA, 13 nt, Human
gcugagccaccug

SEQ ID NO: 3763265 - RNA, 15 nt, Human
gcugagccaccugcc

SEQ ID NO: 3763266 - RNA, 20 nt, Human
gcugagccccuaccccacac

SEQ ID NO: 3763267 - RNA, 21 nt, Human
gcugagccccuaccccacacc

SEQ ID NO: 3763268 - RNA, 13 nt, Human
gcugagccccugu

SEQ ID NO: 3763269 - RNA, 23 nt, Human
gcugagccccugucuagagaggg

SEQ ID NO: 3763270 - RNA, 17 nt, Human
gcugagccucacagcag

SEQ ID NO: 3763271 - RNA, 14 nt, Human
gcugagccuggcug

SEQ ID NO: 3763272 - RNA, 15 nt, Human
gcugagccuggcugg

SEQ ID NO: 3763273 - RNA, 16 nt, Human
gcugagccuucugagc

SEQ ID NO: 3763274 - RNA, 23 nt, Human
gcugagcgaggagaugcuccuug

SEQ ID NO: 3763275 - RNA, 23 nt, Human
gcugagcucacaaggcagcaagg

SEQ ID NO: 3763276 - RNA, 13 nt, Human
gcugagcucugag

SEQ ID NO: 3763277 - RNA, 21 nt, Human
gcugagcucugagaggcccug

SEQ ID NO: 3763278 - RNA, 22 nt, Human
gcugagcucugagaggcccugg

SEQ ID NO: 3763279 - RNA, 22 nt, Human
gcugaggaaaggccagcuggca

SEQ ID NO: 3763280 - RNA, 23 nt, Human
gcugaggaaaggccagcuggcag

SEQ ID NO: 3763281 - RNA, 16 nt, Human
gcugaggagcagcagg

SEQ ID NO: 3763282 - RNA, 16 nt, Human
gcugaggagugaggaa

SEQ ID NO: 3763283 - RNA, 20 nt, Human
gcugaggauuucaagccugc

SEQ ID NO: 3763284 - RNA, 15 nt, Human
gcugaggcaauucua

SEQ ID NO: 3763285 - RNA, 12 nt, Human
gcugaggcacaa

SEQ ID NO: 3763286 - RNA, 13 nt, Human
gcugaggcagaag

SEQ ID NO: 3763287 - RNA, 15 nt, Human
gcugaggcagaagaa

SEQ ID NO: 3763288 - RNA, 13 nt, Human
gcugaggcaggag

SEQ ID NO: 3763289 - RNA, 16 nt, Human
gcugaggcaggagacu

SEQ ID NO: 3763290 - RNA, 19 nt, Human
gcugaggccacacucagca

SEQ ID NO: 3763291 - RNA, 22 nt, Human
gcugaggccccuucuagguggc

SEQ ID NO: 3763292 - RNA, 14 nt, Human
gcugaggccucuca

SEQ ID NO: 3763293 - RNA, 15 nt, Human
gcugaggccugggcc

SEQ ID NO: 3763294 - RNA, 15 nt, Human
gcugaggcgggagaa

SEQ ID NO: 3763295 - RNA, 23 nt, Human
gcugaggcucugacccagugaga

SEQ ID NO: 3763296 - RNA, 15 nt, Human
gcugaggcuggcaca

SEQ ID NO: 3763297 - RNA, 21 nt, Human
gcugagggauggacugaugcu

SEQ ID NO: 3763298 - RNA, 23 nt, Human
gcugagggauggacugaugcuuu

SEQ ID NO: 3763299 - RNA, 21 nt, Human
gcugagggcaguucgcagcca

SEQ ID NO: 3763300 - RNA, 22 nt, Human
gcugagggcaguucgcagccac

SEQ ID NO: 3763301 - RNA, 15 nt, Human
gcugagggccugcug

SEQ ID NO: 3763302 - RNA, 18 nt, Human
gcugagggccugcuggag

SEQ ID NO: 3763303 - RNA, 23 nt, Human
gcugagggccugcuggaggccuc

SEQ ID NO: 3763304 - RNA, 22 nt, Human
gcugaggggaggaucacuggag

SEQ ID NO: 3763305 - RNA, 11 nt, Human
gcugaggggca

SEQ ID NO: 3763306 - RNA, 23 nt, Human
gcugaggggcaacgaagaaaaaa

SEQ ID NO: 3763307 - RNA, 15 nt, Human
gcugaggguccagaa

SEQ ID NO: 3763308 - RNA, 18 nt, Human
gcugagggugagugggug

SEQ ID NO: 3763309 - RNA, 19 nt, Human
gcugaggugagaggaucag

SEQ ID NO: 3763310 - RNA, 20 nt, Human
gcugagguuccucugccugc

SEQ ID NO: 3763311 - RNA, 21 nt, Human
gcugagguuccucugccugcc

SEQ ID NO: 3763312 - RNA, 21 nt, Human
gcugagguugcgccacuacac

SEQ ID NO: 3763313 - RNA, 18 nt, Human
gcugaguagcucugccuu

SEQ ID NO: 3763314 - RNA, 23 nt, Human
gcugaguauggagcagccuggag

SEQ ID NO: 3763315 - RNA, 23 nt, Human
gcugagucaugaucucccugccg

SEQ ID NO: 3763316 - RNA, 17 nt, Human
gcugagucccaggcuga

SEQ ID NO: 3763317 - RNA, 22 nt, Human
gcugagucccaggcugagccuc

SEQ ID NO: 3763318 - RNA, 15 nt, Human
gcugaguccgaccug

SEQ ID NO: 3763319 - RNA, 22 nt, Human
gcugagugaggaauggcaguga

SEQ ID NO: 3763320 - RNA, 22 nt, Human
gcugagugcaggcccacccugc

SEQ ID NO: 3763321 - RNA, 19 nt, Human
gcugaguggcaggggacag

SEQ ID NO: 3763322 - RNA, 23 nt, Human
gcugagugggggaucacagccuc

SEQ ID NO: 3763323 - RNA, 21 nt, Human
gcugaguuguugagucuguuu

SEQ ID NO: 3763324 - RNA, 15 nt, Human
gcugaguuuccuaug

SEQ ID NO: 3763325 - RNA, 22 nt, Human
gcugauaauguauaugaacuua

SEQ ID NO: 3763326 - RNA, 12 nt, Human
gcugauaauuuu

SEQ ID NO: 3763327 - RNA, 19 nt, Human
gcugauacauaacuaaauu

SEQ ID NO: 3763328 - RNA, 23 nt, Human
gcugauacauaacuaaauuugau

SEQ ID NO: 3763329 - RNA, 14 nt, Human
gcugauacuucauu

SEQ ID NO: 3763330 - RNA, 13 nt, Human
gcugauauaaauu

SEQ ID NO: 3763331 - RNA, 16 nt, Human
gcugaucagugggccu

SEQ ID NO: 3763332 - RNA, 18 nt, Human
gcugaucaucgccagagg

SEQ ID NO: 3763333 - RNA, 20 nt, Human
gcugaucaucgccagaggug

SEQ ID NO: 3763334 - RNA, 15 nt, Human
gcugaucgccuuccc

SEQ ID NO: 3763335 - RNA, 17 nt, Human
gcugaucgccuucccca

SEQ ID NO: 3763336 - RNA, 14 nt, Human
gcugaucuaaaaau

SEQ ID NO: 3763337 - RNA, 13 nt, Human
gcugaucucaggg

SEQ ID NO: 3763338 - RNA, 18 nt, Human
gcugaugaaucacuguuu

SEQ ID NO: 3763339 - RNA, 23 nt, Human
gcugaugacucaagauucccagg

SEQ ID NO: 3763340 - RNA, 20 nt, Human
gcugaugauuuguuuuugua

SEQ ID NO: 3763341 - RNA, 15 nt, Human
gcugaugcaggauuu

SEQ ID NO: 3763342 - RNA, 15 nt, Human
gcugaugcugggcug

SEQ ID NO: 3763343 - RNA, 23 nt, Human
gcugauggauaaccuauaugauu

SEQ ID NO: 3763344 - RNA, 17 nt, Human
gcugaugucaauuucug

SEQ ID NO: 3763345 - RNA, 20 nt, Human
gcugaugucaauuucugugu

SEQ ID NO: 3763346 - RNA, 15 nt, Human
gcugauguucagugu

SEQ ID NO: 3763347 - RNA, 16 nt, Human
gcugauguucagugua

SEQ ID NO: 3763348 - RNA, 20 nt, Human
gcugauguuggaagagaaag

SEQ ID NO: 3763349 - RNA, 20 nt, Human
gcugauuacugucaauaaac

SEQ ID NO: 3763350 - RNA, 13 nt, Human
gcugauuucuagg

SEQ ID NO: 3763351 - RNA, 15 nt, Human
gcugauuuuaacaau

SEQ ID NO: 3763352 - RNA, 12 nt, Human
gcugauuuuauu

SEQ ID NO: 3763353 - RNA, 16 nt, Human
gcugauuuuauucuug

SEQ ID NO: 3763354 - RNA, 20 nt, Human
gcugauuuuauucuugauca

SEQ ID NO: 3763355 - RNA, 21 nt, Human
gcugcaaaguguuuuguacca

SEQ ID NO: 3763356 - RNA, 20 nt, Human
gcugcaagguacucugguga

SEQ ID NO: 3763357 - RNA, 22 nt, Human
gcugcaagguggcuccagcacc

SEQ ID NO: 3763358 - RNA, 21 nt, Human
gcugcaagguuuaggcuggug

SEQ ID NO: 3763359 - RNA, 15 nt, Human
gcugcaauucccugg

SEQ ID NO: 3763360 - RNA, 16 nt, Human
gcugcaauucccugga

SEQ ID NO: 3763361 - RNA, 17 nt, Human
gcugcacagggcagcug

SEQ ID NO: 3763362 - RNA, 20 nt, Human
gcugcacagggcagcugggc

SEQ ID NO: 3763363 - RNA, 16 nt, Human
gcugcaccaacccagc

SEQ ID NO: 3763364 - RNA, 21 nt, Human
gcugcaccaacccagccgcug

SEQ ID NO: 3763365 - RNA, 14 nt, Human
gcugcaccagagca

SEQ ID NO: 3763366 - RNA, 22 nt, Human
gcugcaccagagcaaccucuca

SEQ ID NO: 3763367 - RNA, 14 nt, Human
gcugcaccccuucc

SEQ ID NO: 3763368 - RNA, 16 nt, Human
gcugcaccccuuccug

SEQ ID NO: 3763369 - RNA, 20 nt, Human
gcugcaccccuuccugggca

SEQ ID NO: 3763370 - RNA, 13 nt, Human
gcugcaccggcug

SEQ ID NO: 3763371 - RNA, 16 nt, Human
gcugcaccggcuggcc

SEQ ID NO: 3763372 - RNA, 18 nt, Human
gcugcaccggcuggccug

SEQ ID NO: 3763373 - RNA, 17 nt, Human
gcugcaccugccagccu

SEQ ID NO: 3763374 - RNA, 17 nt, Human
gcugcacucugugccca

SEQ ID NO: 3763375 - RNA, 19 nt, Human
gcugcacucugugcccaug

SEQ ID NO: 3763376 - RNA, 20 nt, Human
gcugcacucugugcccaugg

SEQ ID NO: 3763377 - RNA, 19 nt, Human
gcugcagaaggccaagaau

SEQ ID NO: 3763378 - RNA, 13 nt, Human
gcugcagagaaac

SEQ ID NO: 3763379 - RNA, 20 nt, Human
gcugcagagaaacuuaagca

SEQ ID NO: 3763380 - RNA, 12 nt, Human
gcugcagagggg

SEQ ID NO: 3763381 - RNA, 20 nt, Human
gcugcagaggggcaggcccu

SEQ ID NO: 3763382 - RNA, 20 nt, Human
gcugcagauaaguggccuug

SEQ ID NO: 3763383 - RNA, 17 nt, Human
gcugcagauuugggcug

SEQ ID NO: 3763384 - RNA, 14 nt, Human
gcugcagcagaggc

SEQ ID NO: 3763385 - RNA, 22 nt, Human
gcugcagcauguugcugaggag

SEQ ID NO: 3763386 - RNA, 16 nt, Human
gcugcagccucaggac

SEQ ID NO: 3763387 - RNA, 14 nt, Human
gcugcagcucccug

SEQ ID NO: 3763388 - RNA, 13 nt, Human
gcugcagcuuccu

SEQ ID NO: 3763389 - RNA, 14 nt, Human
gcugcagcuuccug

SEQ ID NO: 3763390 - RNA, 14 nt, Human
gcugcagcuuggga

SEQ ID NO: 3763391 - RNA, 22 nt, Human
gcugcagcuugggagagccccu

SEQ ID NO: 3763392 - RNA, 23 nt, Human
gcugcagcuugggagagccccug

SEQ ID NO: 3763393 - RNA, 11 nt, Human
gcugcaggggc

SEQ ID NO: 3763394 - RNA, 17 nt, Human
gcugcaggggcauggga

SEQ ID NO: 3763395 - RNA, 15 nt, Human
gcugcaggggcucug

SEQ ID NO: 3763396 - RNA, 17 nt, Human
gcugcaggggcucugga

SEQ ID NO: 3763397 - RNA, 22 nt, Human
gcugcaggggcucuggagagaa

SEQ ID NO: 3763398 - RNA, 20 nt, Human
gcugcaguaggggaggagca

SEQ ID NO: 3763399 - RNA, 18 nt, Human
gcugcaguaugaaaauaa

SEQ ID NO: 3763400 - RNA, 18 nt, Human
gcugcaguucgacucugu

SEQ ID NO: 3763401 - RNA, 13 nt, Human
gcugcaguuuuuu

SEQ ID NO: 3763402 - RNA, 14 nt, Human
gcugcauagaagga

SEQ ID NO: 3763403 - RNA, 15 nt, Human
gcugcauagaaggag

SEQ ID NO: 3763404 - RNA, 22 nt, Human
gcugcaucugggauucccacca

SEQ ID NO: 3763405 - RNA, 15 nt, Human
gcugcaugcccucuc

SEQ ID NO: 3763406 - RNA, 18 nt, Human
gcugcaugcccucucagg

SEQ ID NO: 3763407 - RNA, 22 nt, Human
gcugcaugcccucucaggccgg

SEQ ID NO: 3763408 - RNA, 20 nt, Human
gcugcaugccuggucuuucc

SEQ ID NO: 3763409 - RNA, 17 nt, Human
gcugcauggcagggggc

SEQ ID NO: 3763410 - RNA, 21 nt, Human
gcugcauugccugcggucaag

SEQ ID NO: 3763411 - RNA, 20 nt, Human
gcugccaagagugaagggaa

SEQ ID NO: 3763412 - RNA, 15 nt, Human
gcugccaaggccaga

SEQ ID NO: 3763413 - RNA, 18 nt, Human
gcugccaauauccuaaua

SEQ ID NO: 3763414 - RNA, 19 nt, Human
gcugccaauauccuaauaa

SEQ ID NO: 3763415 - RNA, 21 nt, Human
gcugccaauauccuaauaaaa

SEQ ID NO: 3763416 - RNA, 23 nt, Human
gcugccaauauccuaauaaaaag

SEQ ID NO: 3763417 - RNA, 19 nt, Human
gcugccaaugggagcucau

SEQ ID NO: 3763418 - RNA, 22 nt, Human
gcugccacacuucaggcucuuc

SEQ ID NO: 3763419 - RNA, 17 nt, Human
gcugccacccaccuccc

SEQ ID NO: 3763420 - RNA, 19 nt, Human
gcugccacccaccucccug

SEQ ID NO: 3763421 - RNA, 13 nt, Human
gcugccacugagg

SEQ ID NO: 3763422 - RNA, 19 nt, Human
gcugccagccuugagcccu

SEQ ID NO: 3763423 - RNA, 21 nt, Human
gcugccagccuugagcccugg

SEQ ID NO: 3763424 - RNA, 22 nt, Human
gcugccagccuugagcccuggc

SEQ ID NO: 3763425 - RNA, 18 nt, Human
gcugccagcucuguauca

SEQ ID NO: 3763426 - RNA, 13 nt, Human
gcugccaggagca

SEQ ID NO: 3763427 - RNA, 22 nt, Human
gcugccaucucaccuccugcug

SEQ ID NO: 3763428 - RNA, 22 nt, Human
gcugccauggcgugucccucuc

SEQ ID NO: 3763429 - RNA, 13 nt, Human
gcugccaugugaa

SEQ ID NO: 3763430 - RNA, 21 nt, Human
gcugccaugugaagagggaga

SEQ ID NO: 3763431 - RNA, 17 nt, Human
gcugcccaaucuccauc

SEQ ID NO: 3763432 - RNA, 12 nt, Human
gcugcccaggcc

SEQ ID NO: 3763433 - RNA, 14 nt, Human
gcugcccaggccca

SEQ ID NO: 3763434 - RNA, 21 nt, Human
gcugcccauuucgugagcccc

SEQ ID NO: 3763435 - RNA, 14 nt, Human
gcugccccaaccug

SEQ ID NO: 3763436 - RNA, 20 nt, Human
gcugccccaaccugcugaag

SEQ ID NO: 3763437 - RNA, 12 nt, Human
gcugccccagcc

SEQ ID NO: 3763438 - RNA, 14 nt, Human
gcugccccagccag

SEQ ID NO: 3763439 - RNA, 18 nt, Human
gcuacugcagcuuuacau

SEQ ID NO: 3763440 - RNA, 19 nt, Human
gcuacugcagcuuuacaug

SEQ ID NO: 3763441 - RNA, 11 nt, Human
gcuacugccau

SEQ ID NO: 3763442 - RNA, 13 nt, Human
gcuacugccaucc

SEQ ID NO: 3763443 - RNA, 20 nt, Human
gcuacugccauccuggccca

SEQ ID NO: 3763444 - RNA, 22 nt, Human
gcuacugccgucagugcugugc

SEQ ID NO: 3763445 - RNA, 18 nt, Human
gcuacuggcauaguuuca

SEQ ID NO: 3763446 - RNA, 19 nt, Human
gcuacuguaaggcaaucau

SEQ ID NO: 3763447 - RNA, 19 nt, Human
gcuacuguccuacccaccc

SEQ ID NO: 3763448 - RNA, 20 nt, Human
gcuacuguccuacccacccu

SEQ ID NO: 3763449 - RNA, 15 nt, Human
gcuacugugugugug

SEQ ID NO: 3763450 - RNA, 19 nt, Human
gcuacuguuguaagaauuc

SEQ ID NO: 3763451 - RNA, 20 nt, Human
gcuacuuccugccuggucuc

SEQ ID NO: 3763452 - RNA, 21 nt, Human
gcuacuuccugccuggucucc

SEQ ID NO: 3763453 - RNA, 13 nt, Human
gcuacuugggagg

SEQ ID NO: 3763454 - RNA, 16 nt, Human
gcuacuugguggguuu

SEQ ID NO: 3763455 - RNA, 16 nt, Human
gcuacuuugcugcuau

SEQ ID NO: 3763456 - RNA, 23 nt, Human
gcuacuuugcugcuaugguuuuc

SEQ ID NO: 3763457 - RNA, 19 nt, Human
gcuagaaaaauuguuaagg

SEQ ID NO: 3763458 - RNA, 14 nt, Human
gcuagaacaugguu

SEQ ID NO: 3763459 - RNA, 14 nt, Human
gcuagaacccucug

SEQ ID NO: 3763460 - RNA, 15 nt, Human
gcuagaacccucugu

SEQ ID NO: 3763461 - RNA, 15 nt, Human
gcuagaaccuggaga

SEQ ID NO: 3763462 - RNA, 20 nt, Human
gcuagaaccuggagagcuag

SEQ ID NO: 3763463 - RNA, 13 nt, Human
gcuagaacucccu

SEQ ID NO: 3763464 - RNA, 20 nt, Human
gcuagaacucccuuucaaca

SEQ ID NO: 3763465 - RNA, 11 nt, Human
gcuagaacuuu

SEQ ID NO: 3763466 - RNA, 20 nt, Human
gcuagaacuuuuuuaaauaa

SEQ ID NO: 3763467 - RNA, 22 nt, Human
gcuagaacuuuuuuaaauaaac

SEQ ID NO: 3763468 - RNA, 23 nt, Human
gcuagaagaaaacaaacugucac

SEQ ID NO: 3763469 - RNA, 13 nt, Human
gcuagaaggccac

SEQ ID NO: 3763470 - RNA, 15 nt, Human
gcuagaaggccacau

SEQ ID NO: 3763471 - RNA, 21 nt, Human
gcuagaagugggccaggacag

SEQ ID NO: 3763472 - RNA, 17 nt, Human
gcuagaauauccuacuu

SEQ ID NO: 3763473 - RNA, 22 nt, Human
gcuagaauucccucucucugac

SEQ ID NO: 3763474 - RNA, 21 nt, Human
gcuagaauugaguguuuaaag

SEQ ID NO: 3763475 - RNA, 23 nt, Human
gcuagacacaugaagguaaauaa

SEQ ID NO: 3763476 - RNA, 15 nt, Human
gcuagacuggugacu

SEQ ID NO: 3763477 - RNA, 16 nt, Human
gcuagacuggugacug

SEQ ID NO: 3763478 - RNA, 19 nt, Human
gcuagacuggugacugauu

SEQ ID NO: 3763479 - RNA, 21 nt, Human
gcuagagauauggcagcgaaa

SEQ ID NO: 3763480 - RNA, 15 nt, Human
gcuagagcuccuccc

SEQ ID NO: 3763481 - RNA, 17 nt, Human
gcuagagcuccucccuc

SEQ ID NO: 3763482 - RNA, 22 nt, Human
gcuagagcuucaagucugugcc

SEQ ID NO: 3763483 - RNA, 18 nt, Human
gcuagaggccagccccac

SEQ ID NO: 3763484 - RNA, 19 nt, Human
gcuagaggccagccccacc

SEQ ID NO: 3763485 - RNA, 13 nt, Human
gcuagaguccuca

SEQ ID NO: 3763486 - RNA, 19 nt, Human
gcuagaucauuuguucugg

SEQ ID NO: 3763487 - RNA, 23 nt, Human
gcuagaugagaauucagcugccc

SEQ ID NO: 3763488 - RNA, 17 nt, Human
gcuagcaaaagaaguaa

SEQ ID NO: 3763489 - RNA, 22 nt, Human
gcuagcaaaagaaguaacaaga

SEQ ID NO: 3763490 - RNA, 12 nt, Human
gcuagcaaauag

SEQ ID NO: 3763491 - RNA, 14 nt, Human
gcuagcacagcucc

SEQ ID NO: 3763492 - RNA, 16 nt, Human
gcuagcaguggcaggc

SEQ ID NO: 3763493 - RNA, 18 nt, Human
gcuagcaguggcaggcag

SEQ ID NO: 3763494 - RNA, 20 nt, Human
gcuagcaguggcaggcagag

SEQ ID NO: 3763495 - RNA, 14 nt, Human
gcuagcaucccuga

SEQ ID NO: 3763496 - RNA, 13 nt, Human
gcuagccagagga

SEQ ID NO: 3763497 - RNA, 21 nt, Human
gcuagcgcugccgcaccccag

SEQ ID NO: 3763498 - RNA, 12 nt, Human
gcuagcucaacu

SEQ ID NO: 3763499 - RNA, 16 nt, Human
gcuagcugcagagcca

SEQ ID NO: 3763500 - RNA, 15 nt, Human
gcuagcuucugcuuu

SEQ ID NO: 3763501 - RNA, 17 nt, Human
gcuagcuucugcuuuuc

SEQ ID NO: 3763502 - RNA, 23 nt, Human
gcuagcuucugcuuuucugcccu

SEQ ID NO: 3763503 - RNA, 12 nt, Human
gcuaggaagagg

SEQ ID NO: 3763504 - RNA, 13 nt, Human
gcuaggaaugaaa

SEQ ID NO: 3763505 - RNA, 21 nt, Human
gcuaggaauuguguuuauaau

SEQ ID NO: 3763506 - RNA, 22 nt, Human
gcuaggaccccuccaugugggc

SEQ ID NO: 3763507 - RNA, 19 nt, Human
gcuaggagcaaagccuguu

SEQ ID NO: 3763508 - RNA, 22 nt, Human
gcuaggcagggugucugccccc

SEQ ID NO: 3763509 - RNA, 14 nt, Human
gcuaggccuggcca

SEQ ID NO: 3763510 - RNA, 16 nt, Human
gcuaggccuggccaga

SEQ ID NO: 3763511 - RNA, 23 nt, Human
gcuaggccuggccagaugcacca

SEQ ID NO: 3763512 - RNA, 20 nt, Human
gcuaggcgagugccaggacu

SEQ ID NO: 3763513 - RNA, 17 nt, Human
gcuaggggacaucagag

SEQ ID NO: 3763514 - RNA, 20 nt, Human
gcuagguagaaaaaggguca

SEQ ID NO: 3763515 - RNA, 18 nt, Human
gcuaggugggccagcccc

SEQ ID NO: 3763516 - RNA, 20 nt, Human
gcuaggugggccagccccuc

SEQ ID NO: 3763517 - RNA, 21 nt, Human
gcuaggugggccagccccucc

SEQ ID NO: 3763518 - RNA, 18 nt, Human
gcuaguauuugaauuaaa

SEQ ID NO: 3763519 - RNA, 16 nt, Human
gcuagucaagcuccuc

SEQ ID NO: 3763520 - RNA, 19 nt, Human
gcuagucaagcuccuccuc

SEQ ID NO: 3763521 - RNA, 20 nt, Human
gcuaguccggacccaccuca

SEQ ID NO: 3763522 - RNA, 19 nt, Human
gcuaguccuagugaaccuc

SEQ ID NO: 3763523 - RNA, 12 nt, Human
gcuagucuuuug

SEQ ID NO: 3763524 - RNA, 19 nt, Human
gcuaguguucuuucucuuu

SEQ ID NO: 3763525 - RNA, 13 nt, Human
gcuaguugaauac

SEQ ID NO: 3763526 - RNA, 18 nt, Human
gcuaguugaauacuugaa

SEQ ID NO: 3763527 - RNA, 19 nt, Human
gcuaguugaauacuugaac

SEQ ID NO: 3763528 - RNA, 16 nt, Human
gcuaguugggcuuccu

SEQ ID NO: 3763529 - RNA, 21 nt, Human
gcuauaaagcaguauuuuucu

SEQ ID NO: 3763530 - RNA, 13 nt, Human
gcuauaaauauau

SEQ ID NO: 3763531 - RNA, 15 nt, Human
gcuauaacuaagcau

SEQ ID NO: 3763532 - RNA, 16 nt, Human
gcuauaauaaagaagu

SEQ ID NO: 3763533 - RNA, 23 nt, Human
gcuauagacccgaggaaacucag

SEQ ID NO: 3763534 - RNA, 16 nt, Human
gcuauagaugucuuuu

SEQ ID NO: 3763535 - RNA, 20 nt, Human
gcuauagaugucuuuuccca

SEQ ID NO: 3763536 - RNA, 21 nt, Human
gcuauagaugucuuuucccau

SEQ ID NO: 3763537 - RNA, 17 nt, Human
gcuauagccuggggugg

SEQ ID NO: 3763538 - RNA, 21 nt, Human
gcuauaggugcuacaaaaaca

SEQ ID NO: 3763539 - RNA, 11 nt, Human
gcuauauauau

SEQ ID NO: 3763540 - RNA, 13 nt, Human
gcuauauauauaa

SEQ ID NO: 3763541 - RNA, 17 nt, Human
gcuauauccauguacug

SEQ ID NO: 3763542 - RNA, 18 nt, Human
gcuauauccauguacugu

SEQ ID NO: 3763543 - RNA, 21 nt, Human
gcuauauccauguacuguagu

SEQ ID NO: 3763544 - RNA, 15 nt, Human
gcuauauuuaaguau

SEQ ID NO: 3763545 - RNA, 21 nt, Human
gcuauauuuaaguauucaaga

SEQ ID NO: 3763546 - RNA, 22 nt, Human
gcuauauuuaaguauucaagaa

SEQ ID NO: 3763547 - RNA, 14 nt, Human
gcuauauuuucaug

SEQ ID NO: 3763548 - RNA, 19 nt, Human
gcuaucaagaggcugagac

SEQ ID NO: 3763549 - RNA, 16 nt, Human
gcuaucaggagaaagc

SEQ ID NO: 3763550 - RNA, 19 nt, Human
gcuauccagcuauuuuuau

SEQ ID NO: 3763551 - RNA, 19 nt, Human
gcuauccccaucucccugc

SEQ ID NO: 3763552 - RNA, 17 nt, Human
gcuaucguaaaauuaag

SEQ ID NO: 3763553 - RNA, 15 nt, Human
gcuaucucccccagc

SEQ ID NO: 3763554 - RNA, 17 nt, Human
gcuaucucccccagccc

SEQ ID NO: 3763555 - RNA, 22 nt, Human
gcuaucucccccagccccaucc

SEQ ID NO: 3763556 - RNA, 23 nt, Human
gcuaucucccccagccccauccu

SEQ ID NO: 3763557 - RNA, 13 nt, Human
gcuaucucugugu

SEQ ID NO: 3763558 - RNA, 21 nt, Human
gcuaucuggaggccuuccagc

SEQ ID NO: 3763559 - RNA, 16 nt, Human
gcuaugcucaggggcc

SEQ ID NO: 3763560 - RNA, 20 nt, Human
gcuaugcucaggggcccugg

SEQ ID NO: 3763561 - RNA, 14 nt, Human
gcuauggacacagg

SEQ ID NO: 3763562 - RNA, 13 nt, Human
gcuaugggagccc

SEQ ID NO: 3763563 - RNA, 19 nt, Human
gcuauggggauagaugugu

SEQ ID NO: 3763564 - RNA, 22 nt, Human
gcuauggugagaugcagcugga

SEQ ID NO: 3763565 - RNA, 22 nt, Human
gcuauguauggaauacaguguu

SEQ ID NO: 3763566 - RNA, 17 nt, Human
gcuaugucauuucaugu

SEQ ID NO: 3763567 - RNA, 18 nt, Human
gcuauguuuuuaauguau

SEQ ID NO: 3763568 - RNA, 15 nt, Human
gcuauuaaaaaaguc

SEQ ID NO: 3763569 - RNA, 16 nt, Human
gcuauuaaaacucagc

SEQ ID NO: 3763570 - RNA, 19 nt, Human
gcuauuaaaacucuuuuaa

SEQ ID NO: 3763571 - RNA, 23 nt, Human
gcuauuacgaaguucaagaucaa

SEQ ID NO: 3763572 - RNA, 17 nt, Human
gcuauuauuuucacugu

SEQ ID NO: 3763573 - RNA, 19 nt, Human
gcuauucaguaauaacucu

SEQ ID NO: 3763574 - RNA, 21 nt, Human
gcuauuccuuucccuuccucu

SEQ ID NO: 3763575 - RNA, 14 nt, Human
gcuauucugucccu

SEQ ID NO: 3763576 - RNA, 16 nt, Human
gcuauucugucccuag

SEQ ID NO: 3763577 - RNA, 19 nt, Human
gcuauucugucccuaggug

SEQ ID NO: 3763578 - RNA, 16 nt, Human
gcuauugacaagucau

SEQ ID NO: 3763579 - RNA, 14 nt, Human
gcuauugacaauaa

SEQ ID NO: 3763580 - RNA, 19 nt, Human
gcuauuggaggaucaguuu

SEQ ID NO: 3763581 - RNA, 21 nt, Human
gcuauuucccaagcuggagug

SEQ ID NO: 3763582 - RNA, 16 nt, Human
gcuauuucuauauuuu

SEQ ID NO: 3763583 - RNA, 19 nt, Human
gcuauuucuauauuuucau

SEQ ID NO: 3763584 - RNA, 14 nt, Human
gcuauuugaagugu

SEQ ID NO: 3763585 - RNA, 15 nt, Human
gcuauuugauguaau

SEQ ID NO: 3763586 - RNA, 23 nt, Human
gcuauuuuauauuacacuacaca

SEQ ID NO: 3763587 - RNA, 17 nt, Human
gcuauuuucuaaagacu

SEQ ID NO: 3763588 - RNA, 14 nt, Human
cuucaccuuugucc

SEQ ID NO: 3763589 - RNA, 17 nt, Human
cuucaccuuugucccca

SEQ ID NO: 3763590 - RNA, 21 nt, Human
cuucaccuuuguccccaccgc

SEQ ID NO: 3763591 - RNA, 22 nt, Human
cuucaccuuuguccccaccgca

SEQ ID NO: 3763592 - RNA, 19 nt, Human
cuucacgaaguguugcaug

SEQ ID NO: 3763593 - RNA, 17 nt, Human
cuucacgcccuuggcca

SEQ ID NO: 3763594 - RNA, 13 nt, Human
cuucacggcagga

SEQ ID NO: 3763595 - RNA, 17 nt, Human
cuucacggcaggacaac

SEQ ID NO: 3763596 - RNA, 23 nt, Human
cuucacuaagaacaaaagaagca

SEQ ID NO: 3763597 - RNA, 17 nt, Human
cuucacucaaauuuugg

SEQ ID NO: 3763598 - RNA, 19 nt, Human
cuucacuccggugugccug

SEQ ID NO: 3763599 - RNA, 23 nt, Human
cuucacuccggugugccugcagc

SEQ ID NO: 3763600 - RNA, 13 nt, Human
cuucacuccugcu

SEQ ID NO: 3763601 - RNA, 20 nt, Human
cuucacucugggcacacucu

SEQ ID NO: 3763602 - RNA, 19 nt, Human
cuucacucuucaaaugccu

SEQ ID NO: 3763603 - RNA, 15 nt, Human
cuucacugccuuugc

SEQ ID NO: 3763604 - RNA, 15 nt, Human
cuucacuguaaaaua

SEQ ID NO: 3763605 - RNA, 16 nt, Human
cuucacuguauaaaua

SEQ ID NO: 3763606 - RNA, 23 nt, Human
cuucacuguauaaauaggagagg

SEQ ID NO: 3763607 - RNA, 17 nt, Human
cuucacuguccuccaag

SEQ ID NO: 3763608 - RNA, 18 nt, Human
cuucacuguccuccaagc

SEQ ID NO: 3763609 - RNA, 19 nt, Human
cuucacugugaccuugaga

SEQ ID NO: 3763610 - RNA, 19 nt, Human
cuucacuguugaaaauuau

SEQ ID NO: 3763611 - RNA, 17 nt, Human
cuucacuucugaccaca

SEQ ID NO: 3763612 - RNA, 19 nt, Human
cuucacuucugaccacacu

SEQ ID NO: 3763613 - RNA, 21 nt, Human
cuucacuucugaccacacuuc

SEQ ID NO: 3763614 - RNA, 14 nt, Human
cuucacuucugacu

SEQ ID NO: 3763615 - RNA, 15 nt, Human
cuucacuuuaauucu

SEQ ID NO: 3763616 - RNA, 16 nt, Human
cuucacuuuaauucuc

SEQ ID NO: 3763617 - RNA, 21 nt, Human
cuucacuuuugcaagguucca

SEQ ID NO: 3763618 - RNA, 16 nt, Human
cuucagaaugugauuu

SEQ ID NO: 3763619 - RNA, 20 nt, Human
cuucagaauuccauaucuug

SEQ ID NO: 3763620 - RNA, 20 nt, Human
cuucagacagagaggacugu

SEQ ID NO: 3763621 - RNA, 14 nt, Human
cuucagacucucag

SEQ ID NO: 3763622 - RNA, 19 nt, Human
cuucagacuuugcuuccca

SEQ ID NO: 3763623 - RNA, 19 nt, Human
cuucagagacuccugcagg

SEQ ID NO: 3763624 - RNA, 21 nt, Human
cuucagagacuccugcaggca

SEQ ID NO: 3763625 - RNA, 14 nt, Human
cuucagagagcagu

SEQ ID NO: 3763626 - RNA, 17 nt, Human
cuucagagagcagugcu

SEQ ID NO: 3763627 - RNA, 22 nt, Human
cuucagagagcugguaguuagu

SEQ ID NO: 3763628 - RNA, 12 nt, Human
cuucagagcagg

SEQ ID NO: 3763629 - RNA, 10 nt, Human
cuucagaggc

SEQ ID NO: 3763630 - RNA, 23 nt, Human
cuucagaggcccucgcugccagc

SEQ ID NO: 3763631 - RNA, 19 nt, Human
cuucagagggaaaguaaau

SEQ ID NO: 3763632 - RNA, 21 nt, Human
cuucagagguggcucuggaau

SEQ ID NO: 3763633 - RNA, 19 nt, Human
cuucagauauuauugcuuu

SEQ ID NO: 3763634 - RNA, 15 nt, Human
cuucagaucagugcu

SEQ ID NO: 3763635 - RNA, 17 nt, Human
cuucagaugccacuucu

SEQ ID NO: 3763636 - RNA, 18 nt, Human
cuucagauggaaacucuu

SEQ ID NO: 3763637 - RNA, 19 nt, Human
cuucagauguggagccagg

SEQ ID NO: 3763638 - RNA, 20 nt, Human
cuucagauguggagccaggc

SEQ ID NO: 3763639 - RNA, 16 nt, Human
cuucagcacuuuagaa

SEQ ID NO: 3763640 - RNA, 18 nt, Human
cuucagcauauuuauagc

SEQ ID NO: 3763641 - RNA, 13 nt, Human
cuucagcauuccc

SEQ ID NO: 3763642 - RNA, 21 nt, Human
cuucagcauucccucccauca

SEQ ID NO: 3763643 - RNA, 19 nt, Human
cuucagccaggagcugggc

SEQ ID NO: 3763644 - RNA, 14 nt, Human
cuucagccaucaac

SEQ ID NO: 3763645 - RNA, 16 nt, Human
cuucagcccucacccc

SEQ ID NO: 3763646 - RNA, 21 nt, Human
cuucagccuagccgaccucag

SEQ ID NO: 3763647 - RNA, 16 nt, Human
cuucagccuaguggcu

SEQ ID NO: 3763648 - RNA, 16 nt, Human
cuucagccucccgagu

SEQ ID NO: 3763649 - RNA, 15 nt, Human
cuucagccugaaaga

SEQ ID NO: 3763650 - RNA, 15 nt, Human
cuucagccugaggcu

SEQ ID NO: 3763651 - RNA, 13 nt, Human
cuucagccuuaau

SEQ ID NO: 3763652 - RNA, 16 nt, Human
cuucagcguaaaaugg

SEQ ID NO: 3763653 - RNA, 21 nt, Human
cuucagcuagcuuuuaggaaa

SEQ ID NO: 3763654 - RNA, 11 nt, Human
cuucagcucca

SEQ ID NO: 3763655 - RNA, 16 nt, Human
cuucagcuccagcccc

SEQ ID NO: 3763656 - RNA, 11 nt, Human
cuucagcugac

SEQ ID NO: 3763657 - RNA, 19 nt, Human
cuucagcuguacuucgucu

SEQ ID NO: 3763658 - RNA, 19 nt, Human
cuucaggacacucacuaca

SEQ ID NO: 3763659 - RNA, 18 nt, Human
cuucaggcaauucuccug

SEQ ID NO: 3763660 - RNA, 22 nt, Human
cuucaggcaauucuccugccuu

SEQ ID NO: 3763661 - RNA, 17 nt, Human
cuucaggcucuucuccu

SEQ ID NO: 3763662 - RNA, 19 nt, Human
cuucagggcacugcugcug

SEQ ID NO: 3763663 - RNA, 16 nt, Human
cuucagggcagauuuu

SEQ ID NO: 3763664 - RNA, 16 nt, Human
cuucagggcugcuggg

SEQ ID NO: 3763665 - RNA, 22 nt, Human
cuucaggggagucccgucagga

SEQ ID NO: 3763666 - RNA, 16 nt, Human
cuucaggggcugcccg

SEQ ID NO: 3763667 - RNA, 18 nt, Human
cuucaggggcugcccgcu

SEQ ID NO: 3763668 - RNA, 20 nt, Human
cuucaggggcugcccgcucc

SEQ ID NO: 3763669 - RNA, 23 nt, Human
cuucagggggccaggugcacaga

SEQ ID NO: 3763670 - RNA, 22 nt, Human
cuucagguaaagggcaaauaau

SEQ ID NO: 3763671 - RNA, 10 nt, Human
cuucaggucc

SEQ ID NO: 3763672 - RNA, 16 nt, Human
cuucagguggaaaaac

SEQ ID NO: 3763673 - RNA, 20 nt, Human
cuucagguuaucgaaauaac

SEQ ID NO: 3763674 - RNA, 22 nt, Human
cuucagguuaucgaaauaacaa

SEQ ID NO: 3763675 - RNA, 20 nt, Human
cuucaguaacccccacugga

SEQ ID NO: 3763676 - RNA, 22 nt, Human
cuucaguaacccccacuggacu

SEQ ID NO: 3763677 - RNA, 23 nt, Human
cuucaguaagccgugauuuucau

SEQ ID NO: 3763678 - RNA, 22 nt, Human
cuucaguacccucucagcucca

SEQ ID NO: 3763679 - RNA, 15 nt, Human
cuucaguauguuguc

SEQ ID NO: 3763680 - RNA, 22 nt, Human
cuucaguauguugucaaagaga

SEQ ID NO: 3763681 - RNA, 18 nt, Human
cuucaguccugcuccaga

SEQ ID NO: 3763682 - RNA, 23 nt, Human
cuucaguccugcuccagaauuug

SEQ ID NO: 3763683 - RNA, 13 nt, Human
cuucaguccuggg

SEQ ID NO: 3763684 - RNA, 18 nt, Human
cuucaguccugggagacc

SEQ ID NO: 3763685 - RNA, 19 nt, Human
cuucagugcaucugggaag

SEQ ID NO: 3763686 - RNA, 13 nt, Human
cuucagugcccac

SEQ ID NO: 3763687 - RNA, 22 nt, Human
cuucagugccuuauggaacacu

SEQ ID NO: 3763688 - RNA, 17 nt, Human
cuucaguggagaauuau

SEQ ID NO: 3763689 - RNA, 13 nt, Human
cuucaguggcagc

SEQ ID NO: 3763690 - RNA, 16 nt, Human
cuucaguggcagcugc

SEQ ID NO: 3763691 - RNA, 18 nt, Human
cuucaguuaagccuuugg

SEQ ID NO: 3763692 - RNA, 17 nt, Human
cuucaguugguguguuu

SEQ ID NO: 3763693 - RNA, 22 nt, Human
cuucaguugguguguuuuuggg

SEQ ID NO: 3763694 - RNA, 14 nt, Human
cuucaguugguugu

SEQ ID NO: 3763695 - RNA, 15 nt, Human
cuucaguugguugug

SEQ ID NO: 3763696 - RNA, 13 nt, Human
cuucaguugucuc

SEQ ID NO: 3763697 - RNA, 14 nt, Human
cuucaguugucucu

SEQ ID NO: 3763698 - RNA, 15 nt, Human
cuucaguuucacaga

SEQ ID NO: 3763699 - RNA, 17 nt, Human
cuucaguuucacagaaa

SEQ ID NO: 3763700 - RNA, 15 nt, Human
cuucauaacaauuuu

SEQ ID NO: 3763701 - RNA, 15 nt, Human
cuucauaauggccug

SEQ ID NO: 3763702 - RNA, 9 nt, Human
cuucauaca

SEQ ID NO: 3763703 - RNA, 20 nt, Human
cuucauaccuacauguauuu

SEQ ID NO: 3763704 - RNA, 21 nt, Human
cuucauacuuuuuuucacagu

SEQ ID NO: 3763705 - RNA, 16 nt, Human
cuucauaucauccaca

SEQ ID NO: 3763706 - RNA, 22 nt, Human
cuucauaugaaaggugccaugg

SEQ ID NO: 3763707 - RNA, 19 nt, Human
cuucaucccacuccaacuc

SEQ ID NO: 3763708 - RNA, 16 nt, Human
cuucaucccauuccag

SEQ ID NO: 3763709 - RNA, 13 nt, Human
cuucaucccuuuc

SEQ ID NO: 3763710 - RNA, 16 nt, Human
cuucaucccuuuccag

SEQ ID NO: 3763711 - RNA, 19 nt, Human
cuucauccggcagccugga

SEQ ID NO: 3763712 - RNA, 15 nt, Human
cuucauccuccucag

SEQ ID NO: 3763713 - RNA, 22 nt, Human
cuucaucucccaaagugcuggg

SEQ ID NO: 3763714 - RNA, 20 nt, Human
cuucaucucccaccuagcag

SEQ ID NO: 3763715 - RNA, 12 nt, Human
cuucaucugacu

SEQ ID NO: 3763716 - RNA, 21 nt, Human
cuucaucugacuaugacauaa

SEQ ID NO: 3763717 - RNA, 11 nt, Human
cuucaucugga

SEQ ID NO: 3763718 - RNA, 19 nt, Human
cuucaucuggauuccagag

SEQ ID NO: 3763719 - RNA, 19 nt, Human
cuucaucuggcaacaucuu

SEQ ID NO: 3763720 - RNA, 17 nt, Human
cuucaucuucccaggua

SEQ ID NO: 3763721 - RNA, 20 nt, Human
cuucaucuucucagcuccca

SEQ ID NO: 3763722 - RNA, 15 nt, Human
cuucaucuuuuaaag

SEQ ID NO: 3763723 - RNA, 16 nt, Human
cuucaugaaaauccua

SEQ ID NO: 3763724 - RNA, 17 nt, Human
cuucaugaaaauccuac

SEQ ID NO: 3763725 - RNA, 18 nt, Human
cuucaugaaaauccuacc

SEQ ID NO: 3763726 - RNA, 13 nt, Human
cuucaugaaaugc

SEQ ID NO: 3763727 - RNA, 23 nt, Human
cuucaugcugucuacacuaagag

SEQ ID NO: 3763728 - RNA, 18 nt, Human
cuucauggaauggacauc

SEQ ID NO: 3763729 - RNA, 20 nt, Human
cuucauggaauggacauccu

SEQ ID NO: 3763730 - RNA, 21 nt, Human
cuucauggaauucacaaagua

SEQ ID NO: 3763731 - RNA, 10 nt, Human
cuucauggau

SEQ ID NO: 3763732 - RNA, 13 nt, Human
cuucauggauggg

SEQ ID NO: 3763733 - RNA, 23 nt, Human
cuucauggaugggggaacucaga

SEQ ID NO: 3763734 - RNA, 21 nt, Human
cuucauggcagaaggcaaacc

SEQ ID NO: 3763735 - RNA, 15 nt, Human
cuucaugugucccag

SEQ ID NO: 3763736 - RNA, 20 nt, Human
cuucauguucccacuucaaa

SEQ ID NO: 3763737 - RNA, 20 nt, Human
gcugcccccaccccggggac

SEQ ID NO: 3763738 - RNA, 15 nt, Human
gcugcccccagagcc

SEQ ID NO: 3763739 - RNA, 14 nt, Human
gcugcccccggccc

SEQ ID NO: 3763740 - RNA, 23 nt, Human
gcugcccccggcccccuggucuc

SEQ ID NO: 3763741 - RNA, 22 nt, Human
gcugccccggccccucccccug

SEQ ID NO: 3763742 - RNA, 23 nt, Human
gcugccccggccccucccccuga

SEQ ID NO: 3763743 - RNA, 19 nt, Human
gcugccccuaaucucugua

SEQ ID NO: 3763744 - RNA, 22 nt, Human
gcugccccuaaucucuguagga

SEQ ID NO: 3763745 - RNA, 14 nt, Human
gcugccccucucug

SEQ ID NO: 3763746 - RNA, 15 nt, Human
gcugccccucucugg

SEQ ID NO: 3763747 - RNA, 17 nt, Human
gcugccccucucugggc

SEQ ID NO: 3763748 - RNA, 13 nt, Human
gcugccccuggca

SEQ ID NO: 3763749 - RNA, 16 nt, Human
gcugccccuggcagcc

SEQ ID NO: 3763750 - RNA, 20 nt, Human
gcugccccuggcagccccug

SEQ ID NO: 3763751 - RNA, 20 nt, Human
gcugccccuggugcacuggc

SEQ ID NO: 3763752 - RNA, 12 nt, Human
gcugcccgcucc

SEQ ID NO: 3763753 - RNA, 16 nt, Human
gcugcccgcucccagu

SEQ ID NO: 3763754 - RNA, 20 nt, Human
gcugcccgcucccagugucu

SEQ ID NO: 3763755 - RNA, 21 nt, Human
gcugcccuacagcacccugug

SEQ ID NO: 3763756 - RNA, 15 nt, Human
gcugcccuaggcucc

SEQ ID NO: 3763757 - RNA, 19 nt, Human
gcugcccuccaucccgaca

SEQ ID NO: 3763758 - RNA, 21 nt, Human
gcugcccuccugugcucagcc

SEQ ID NO: 3763759 - RNA, 23 nt, Human
gcugcccuccugugcucagcccu

SEQ ID NO: 3763760 - RNA, 20 nt, Human
gcugcccuccuuguccaccc

SEQ ID NO: 3763761 - RNA, 16 nt, Human
gcugcccucuccuggg

SEQ ID NO: 3763762 - RNA, 23 nt, Human
gcugcccucuccugggcagcugc

SEQ ID NO: 3763763 - RNA, 14 nt, Human
gcugcccugaagaa

SEQ ID NO: 3763764 - RNA, 18 nt, Human
gcugcccugagaagcugc

SEQ ID NO: 3763765 - RNA, 22 nt, Human
gcugcccugagcgccuggauuu

SEQ ID NO: 3763766 - RNA, 15 nt, Human
gcugcccugccacuu

SEQ ID NO: 3763767 - RNA, 12 nt, Human
gcugcccugccc

SEQ ID NO: 3763768 - RNA, 22 nt, Human
gcugcccugcccaccuggccuc

SEQ ID NO: 3763769 - RNA, 24 nt, Human
gcugcccugcccaccuggccucug

SEQ ID NO: 3763770 - RNA, 13 nt, Human
gcugcccuggccc

SEQ ID NO: 3763771 - RNA, 19 nt, Human
gcugcccuggcccugaggu

SEQ ID NO: 3763772 - RNA, 15 nt, Human
gcugcccuggugcug

SEQ ID NO: 3763773 - RNA, 17 nt, Human
gcugcccuggugcugcc

SEQ ID NO: 3763774 - RNA, 20 nt, Human
gcugcccuggugcugccaca

SEQ ID NO: 3763775 - RNA, 22 nt, Human
gcugcccuggugcugccacacu

SEQ ID NO: 3763776 - RNA, 23 nt, Human
gcugcccuggugcugccacacuu

SEQ ID NO: 3763777 - RNA, 14 nt, Human
gcugcccugugagu

SEQ ID NO: 3763778 - RNA, 20 nt, Human
gcugcccuugggccaccccu

SEQ ID NO: 3763779 - RNA, 17 nt, Human
gcugcccuuucugggca

SEQ ID NO: 3763780 - RNA, 16 nt, Human
gcugccgaccagagcc

SEQ ID NO: 3763781 - RNA, 13 nt, Human
gcugccgccuccc

SEQ ID NO: 3763782 - RNA, 15 nt, Human
gcugccgccucccag

SEQ ID NO: 3763783 - RNA, 16 nt, Human
gcugccgccucccagc

SEQ ID NO: 3763784 - RNA, 18 nt, Human
gcugccgccucccagccu

SEQ ID NO: 3763785 - RNA, 22 nt, Human
gcugccuaaauccacucugcag

SEQ ID NO: 3763786 - RNA, 15 nt, Human
gcugccuaagacaug

SEQ ID NO: 3763787 - RNA, 18 nt, Human
gcugccuaaguggcugcu

SEQ ID NO: 3763788 - RNA, 12 nt, Human
gcugccucacuu

SEQ ID NO: 3763789 - RNA, 14 nt, Human
gcugccucauuuag

SEQ ID NO: 3763790 - RNA, 14 nt, Human
gcugccuccacucc

SEQ ID NO: 3763791 - RNA, 16 nt, Human
gcugccuccacuccca

SEQ ID NO: 3763792 - RNA, 18 nt, Human
gcugccuccacucccacu

SEQ ID NO: 3763793 - RNA, 20 nt, Human
gcugccuccacucccacuuc

SEQ ID NO: 3763794 - RNA, 19 nt, Human
gcugccuccccaacccugc

SEQ ID NO: 3763795 - RNA, 14 nt, Human
gcugccuccccucc

SEQ ID NO: 3763796 - RNA, 14 nt, Human
gcugccucuucccu

SEQ ID NO: 3763797 - RNA, 18 nt, Human
gcugccucuucccucuuc

SEQ ID NO: 3763798 - RNA, 16 nt, Human
gcugccugaaaaucaa

SEQ ID NO: 3763799 - RNA, 16 nt, Human
gcuguuggcacucaca

SEQ ID NO: 3763800 - RNA, 21 nt, Human
gcuguuggcugggggccucag

SEQ ID NO: 3763801 - RNA, 14 nt, Human
gcuguuguacauuu

SEQ ID NO: 3763802 - RNA, 16 nt, Human
gcuguuguacauuuau

SEQ ID NO: 3763803 - RNA, 16 nt, Human
gcuguugucccucugc

SEQ ID NO: 3763804 - RNA, 17 nt, Human
gcuguugucccucugcu

SEQ ID NO: 3763805 - RNA, 15 nt, Human
gcuguugucucuucu

SEQ ID NO: 3763806 - RNA, 13 nt, Human
gcuguuguuauga

SEQ ID NO: 3763807 - RNA, 19 nt, Human
gcuguuguuaugaugugcu

SEQ ID NO: 3763808 - RNA, 18 nt, Human
gcuguuguuccauugaag

SEQ ID NO: 3763809 - RNA, 22 nt, Human
gcuguuuacuugaauaguauug

SEQ ID NO: 3763810 - RNA, 17 nt, Human
gcuguuuauggccucag

SEQ ID NO: 3763811 - RNA, 20 nt, Human
gcuguuugcuucaccgugga

SEQ ID NO: 3763812 - RNA, 18 nt, Human
gcuguuuguagugaaaua

SEQ ID NO: 3763813 - RNA, 16 nt, Human
gcuguuuuaaacauua

SEQ ID NO: 3763814 - RNA, 17 nt, Human
gcuguuuucccugaccu

SEQ ID NO: 3763815 - RNA, 16 nt, Human
gcuguuuuccucccuu

SEQ ID NO: 3763816 - RNA, 23 nt, Human
gcuguuuuguugacauucugaau

SEQ ID NO: 3763817 - RNA, 13 nt, Human
gcuuaaaaaaaac

SEQ ID NO: 3763818 - RNA, 15 nt, Human
gcuuaaaacuuuuca

SEQ ID NO: 3763819 - RNA, 21 nt, Human
gcuuaaaauaagcagguggau

SEQ ID NO: 3763820 - RNA, 12 nt, Human
gcuuaaaauaca

SEQ ID NO: 3763821 - RNA, 18 nt, Human
gcuuaaaauacaagacug

SEQ ID NO: 3763822 - RNA, 12 nt, Human
gcuuaaagaugu

SEQ ID NO: 3763823 - RNA, 17 nt, Human
gcuuaaaggugucuucc

SEQ ID NO: 3763824 - RNA, 12 nt, Human
gcuuaaauguga

SEQ ID NO: 3763825 - RNA, 21 nt, Human
gcuuaaauuucuuaugugaca

SEQ ID NO: 3763826 - RNA, 13 nt, Human
gcuuaaauuuuaa

SEQ ID NO: 3763827 - RNA, 15 nt, Human
gcuuaagcagaagca

SEQ ID NO: 3763828 - RNA, 15 nt, Human
gcuuaagccacugcc

SEQ ID NO: 3763829 - RNA, 11 nt, Human
gcuuaaguucc

SEQ ID NO: 3763830 - RNA, 22 nt, Human
gcuuaaucuucaaagccuucuc

SEQ ID NO: 3763831 - RNA, 18 nt, Human
gcuuaaugacacuagcua

SEQ ID NO: 3763832 - RNA, 18 nt, Human
gcuuaaugcuacauguga

SEQ ID NO: 3763833 - RNA, 15 nt, Human
gcuuaauucaaauaa

SEQ ID NO: 3763834 - RNA, 13 nt, Human
gcuuaauuucuaa

SEQ ID NO: 3763835 - RNA, 13 nt, Human
gcuuacaagccag

SEQ ID NO: 3763836 - RNA, 20 nt, Human
gcuuacaauucccugcuguc

SEQ ID NO: 3763837 - RNA, 15 nt, Human
gcuuacauaguuuua

SEQ ID NO: 3763838 - RNA, 22 nt, Human
gcuuacaugccuaccaauauuu

SEQ ID NO: 3763839 - RNA, 18 nt, Human
gcuuacauuuuuacaaua

SEQ ID NO: 3763840 - RNA, 15 nt, Human
gcuuaccucccaccu

SEQ ID NO: 3763841 - RNA, 14 nt, Human
gcuuaccugacaca

SEQ ID NO: 3763842 - RNA, 19 nt, Human
gcuuaccuugacuguugau

SEQ ID NO: 3763843 - RNA, 12 nt, Human
gcuuacggcccu

SEQ ID NO: 3763844 - RNA, 15 nt, Human
gcuuacguaguucua

SEQ ID NO: 3763845 - RNA, 23 nt, Human
gcuuacuaagcuuugccagcugc

SEQ ID NO: 3763846 - RNA, 14 nt, Human
gcuuacucauuaaa

SEQ ID NO: 3763847 - RNA, 15 nt, Human
gcuuagaaacuggaa

SEQ ID NO: 3763848 - RNA, 12 nt, Human
gcuuagaaauaa

SEQ ID NO: 3763849 - RNA, 16 nt, Human
gcuuagacccucaugc

SEQ ID NO: 3763850 - RNA, 13 nt, Human
gcuuagaccucag

SEQ ID NO: 3763851 - RNA, 17 nt, Human
gcuuagaccucagccug

SEQ ID NO: 3763852 - RNA, 16 nt, Human
gcuuagagccucccuc

SEQ ID NO: 3763853 - RNA, 16 nt, Human
gcuuagaguuggccau

SEQ ID NO: 3763854 - RNA, 18 nt, Human
gcuuagcaggagaggaga

SEQ ID NO: 3763855 - RNA, 23 nt, Human
gcuuagcaggagaggagagccag

SEQ ID NO: 3763856 - RNA, 19 nt, Human
gcuuagcaguccccuuccc

SEQ ID NO: 3763857 - RNA, 18 nt, Human
gcuuagcuuugcucugcc

SEQ ID NO: 3763858 - RNA, 21 nt, Human
gcuuaggagaagucuucuauu

SEQ ID NO: 3763859 - RNA, 13 nt, Human
gcuuaggcagggc

SEQ ID NO: 3763860 - RNA, 19 nt, Human
gcuuaguaaaauuuauuuc

SEQ ID NO: 3763861 - RNA, 22 nt, Human
gcuuaguaucucaucaacaaag

SEQ ID NO: 3763862 - RNA, 17 nt, Human
gcuuagucacugagaca

SEQ ID NO: 3763863 - RNA, 17 nt, Human
gcuuagucacugccugc

SEQ ID NO: 3763864 - RNA, 22 nt, Human
gcuuauaaaacagaguaaucuu

SEQ ID NO: 3763865 - RNA, 22 nt, Human
gcuuauaaccuaguuaaagaaa

SEQ ID NO: 3763866 - RNA, 17 nt, Human
gcuuauacgaaauaauu

SEQ ID NO: 3763867 - RNA, 11 nt, Human
gcuuauaucug

SEQ ID NO: 3763868 - RNA, 20 nt, Human
gcuuauauucaaccauggac

SEQ ID NO: 3763869 - RNA, 15 nt, Human
gcuuauauuguucac

SEQ ID NO: 3763870 - RNA, 16 nt, Human
gcuuaucaauuuguca

SEQ ID NO: 3763871 - RNA, 22 nt, Human
gcuuaucaauuugucauuuuga

SEQ ID NO: 3763872 - RNA, 23 nt, Human
gcuuaucaugcugucuuuacaug

SEQ ID NO: 3763873 - RNA, 16 nt, Human
gcuuauccauaaaaaa

SEQ ID NO: 3763874 - RNA, 17 nt, Human
gcuuauccuuccacgga

SEQ ID NO: 3763875 - RNA, 13 nt, Human
gcuuaucucaggg

SEQ ID NO: 3763876 - RNA, 19 nt, Human
gcuuaucucaggggugugc

SEQ ID NO: 3763877 - RNA, 21 nt, Human
gcuuaucucuuuuauauuugu

SEQ ID NO: 3763878 - RNA, 22 nt, Human
gcuuaucucuuuuauauuugua

SEQ ID NO: 3763879 - RNA, 15 nt, Human
gcuuaugaaaagaau

SEQ ID NO: 3763880 - RNA, 21 nt, Human
gcuuaugaauauuuauaacag

SEQ ID NO: 3763881 - RNA, 18 nt, Human
gcuuaugacaucacuugu

SEQ ID NO: 3763882 - RNA, 17 nt, Human
gcuuaugagauacuuug

SEQ ID NO: 3763883 - RNA, 18 nt, Human
gcuuaugagauacuuugc

SEQ ID NO: 3763884 - RNA, 16 nt, Human
gcuuauucucaaagca

SEQ ID NO: 3763885 - RNA, 18 nt, Human
gcuuauucucaaagcagg

SEQ ID NO: 3763886 - RNA, 20 nt, Human
gcuuauuguuccaagacauu

SEQ ID NO: 3763887 - RNA, 22 nt, Human
gcuuauuguuccaagacauugu

SEQ ID NO: 3763888 - RNA, 11 nt, Human
gcuuauuuaau

SEQ ID NO: 3763889 - RNA, 20 nt, Human
gcuuauuuauuguauucugg

SEQ ID NO: 3763890 - RNA, 17 nt, Human
gcuuauuuuaaugugau

SEQ ID NO: 3763891 - RNA, 17 nt, Human
gcuuauuuuuaaaauuu

SEQ ID NO: 3763892 - RNA, 22 nt, Human
gcuuauuuuuaaaauuuuaaua

SEQ ID NO: 3763893 - RNA, 16 nt, Human
gcuucaaaauagagaa

SEQ ID NO: 3763894 - RNA, 18 nt, Human
gcuucaaccuugagacag

SEQ ID NO: 3763895 - RNA, 21 nt, Human
gcuucaaggauccugagccag

SEQ ID NO: 3763896 - RNA, 18 nt, Human
gcuucaagucugugccug

SEQ ID NO: 3763897 - RNA, 17 nt, Human
gcuucacaguagagcca

SEQ ID NO: 3763898 - RNA, 19 nt, Human
gcuucacaguagagccagc

SEQ ID NO: 3763899 - RNA, 14 nt, Human
gcuucaccagagca

SEQ ID NO: 3763900 - RNA, 17 nt, Human
gcuucaccauggccuua

SEQ ID NO: 3763901 - RNA, 18 nt, Human
gcuucacggaagagccuu

SEQ ID NO: 3763902 - RNA, 20 nt, Human
gcuucacuccugcuguaaau

SEQ ID NO: 3763903 - RNA, 21 nt, Human
gcuucacuucugacucuuccc

SEQ ID NO: 3763904 - RNA, 17 nt, Human
gcuucagaauuaaaacu

SEQ ID NO: 3763905 - RNA, 21 nt, Human
gcuucagauguggagccaggc

SEQ ID NO: 3763906 - RNA, 14 nt, Human
gcuucagccaggag

SEQ ID NO: 3763907 - RNA, 19 nt, Human
gcuucagccucccacagug

SEQ ID NO: 3763908 - RNA, 21 nt, Human
gcuucagccucccacagugcu

SEQ ID NO: 3763909 - RNA, 12 nt, Human
gcuucagccuga

SEQ ID NO: 3763910 - RNA, 15 nt, Human
gcuucagccugaggc

SEQ ID NO: 3763911 - RNA, 21 nt, Human
gcuucagccugaggcugagac

SEQ ID NO: 3763912 - RNA, 14 nt, Human
gcuucagcuccagc

SEQ ID NO: 3763913 - RNA, 13 nt, Human
gcuucaggaaccu

SEQ ID NO: 3763914 - RNA, 14 nt, Human
gcuucaggaaccuc

SEQ ID NO: 3763915 - RNA, 23 nt, Human
gcuucaggaaccucgaguacugu

SEQ ID NO: 3763916 - RNA, 10 nt, Human
gcuucagggc

SEQ ID NO: 3763917 - RNA, 13 nt, Human
gcuucagggcagg

SEQ ID NO: 3763918 - RNA, 19 nt, Human
gcuucagggcagguggggu

SEQ ID NO: 3763919 - RNA, 19 nt, Human
gcuucagguuaucgaaaua

SEQ ID NO: 3763920 - RNA, 23 nt, Human
gcuucagguuaucgaaauaacaa

SEQ ID NO: 3763921 - RNA, 19 nt, Human
gcuucaguggcagcugcuu

SEQ ID NO: 3763922 - RNA, 15 nt, Human
gcuucaguuguuuuc

SEQ ID NO: 3763923 - RNA, 19 nt, Human
gcuucaguuuccuggucug

SEQ ID NO: 3763924 - RNA, 14 nt, Human
gcuucauaaaugaa

SEQ ID NO: 3763925 - RNA, 18 nt, Human
gcuucauaaaugaagcag

SEQ ID NO: 3763926 - RNA, 11 nt, Human
gcuucauacac

SEQ ID NO: 3763927 - RNA, 14 nt, Human
gcuucauagagacu

SEQ ID NO: 3763928 - RNA, 18 nt, Human
gcuccuagagggaggggc

SEQ ID NO: 3763929 - RNA, 22 nt, Human
gcuccuaggacccgucuccagc

SEQ ID NO: 3763930 - RNA, 15 nt, Human
gcuccuaucuguguu

SEQ ID NO: 3763931 - RNA, 14 nt, Human
gcuccucacugccc

SEQ ID NO: 3763932 - RNA, 23 nt, Human
gcuccucacugcccgcacacccu

SEQ ID NO: 3763933 - RNA, 19 nt, Human
gcuccucagggacucaggu

SEQ ID NO: 3763934 - RNA, 20 nt, Human
gcuccuccagggugugugcu

SEQ ID NO: 3763935 - RNA, 23 nt, Human
gcuccucccagcuuguaggagcu

SEQ ID NO: 3763936 - RNA, 23 nt, Human
gcuccuccccuuccucuugucug

SEQ ID NO: 3763937 - RNA, 14 nt, Human
gcuccucccggugc

SEQ ID NO: 3763938 - RNA, 19 nt, Human
gcuccucccggugcccaag

SEQ ID NO: 3763939 - RNA, 14 nt, Human
gcuccucccucuca

SEQ ID NO: 3763940 - RNA, 17 nt, Human
gcuccucccucugaggc

SEQ ID NO: 3763941 - RNA, 13 nt, Human
gcuccucccuggc

SEQ ID NO: 3763942 - RNA, 15 nt, Human
gcuccuccucccugc

SEQ ID NO: 3763943 - RNA, 20 nt, Human
gcuccuccucccugcaucug

SEQ ID NO: 3763944 - RNA, 20 nt, Human
gcuccuccuuggugccuggc

SEQ ID NO: 3763945 - RNA, 18 nt, Human
gcuccucgagggcaggga

SEQ ID NO: 3763946 - RNA, 12 nt, Human
gcuccucucagu

SEQ ID NO: 3763947 - RNA, 12 nt, Human
gcuccucuccag

SEQ ID NO: 3763948 - RNA, 15 nt, Human
gcuccucuccccagc

SEQ ID NO: 3763949 - RNA, 16 nt, Human
gcuccucuccccagca

SEQ ID NO: 3763950 - RNA, 18 nt, Human
gcuccucuccccagccca

SEQ ID NO: 3763951 - RNA, 19 nt, Human
gcuccucuccccagcccag

SEQ ID NO: 3763952 - RNA, 20 nt, Human
gcuccucuccccagcccaga

SEQ ID NO: 3763953 - RNA, 21 nt, Human
gcuccucuccccagcccagag

SEQ ID NO: 3763954 - RNA, 22 nt, Human
gcuccucuccccagcccagaga

SEQ ID NO: 3763955 - RNA, 14 nt, Human
gcuccucuccugga

SEQ ID NO: 3763956 - RNA, 18 nt, Human
gcuccucuccuggaggau

SEQ ID NO: 3763957 - RNA, 19 nt, Human
gcuccucuguccugcuucu

SEQ ID NO: 3763958 - RNA, 23 nt, Human
gcuccucugucucgagcgcccug

SEQ ID NO: 3763959 - RNA, 17 nt, Human
gcuccugacacugcugg

SEQ ID NO: 3763960 - RNA, 18 nt, Human
gcuccugacacugcugga

SEQ ID NO: 3763961 - RNA, 20 nt, Human
gcuccugaccaguugcaguc

SEQ ID NO: 3763962 - RNA, 23 nt, Human
gcuccugaggggcaucugccccu

SEQ ID NO: 3763963 - RNA, 23 nt, Human
gcuccugcaggccacagccaccu

SEQ ID NO: 3763964 - RNA, 18 nt, Human
gcuccugccaccacgccc

SEQ ID NO: 3763965 - RNA, 22 nt, Human
gcuccugccaccacgcccggcu

SEQ ID NO: 3763966 - RNA, 14 nt, Human
gcuccugcccccau

SEQ ID NO: 3763967 - RNA, 15 nt, Human
gcuccugccgcagag

SEQ ID NO: 3763968 - RNA, 17 nt, Human
gcuccugccgcagagcu

SEQ ID NO: 3763969 - RNA, 19 nt, Human
gcuccugccgcagagcugg

SEQ ID NO: 3763970 - RNA, 22 nt, Human
gcuccugccgcagagcuggccg

SEQ ID NO: 3763971 - RNA, 19 nt, Human
gcuccuggacucauugcuu

SEQ ID NO: 3763972 - RNA, 15 nt, Human
gcuccuggcccacug

SEQ ID NO: 3763973 - RNA, 17 nt, Human
gcuccuggcccagccuu

SEQ ID NO: 3763974 - RNA, 19 nt, Human
gcuccuggcccagccuuug

SEQ ID NO: 3763975 - RNA, 12 nt, Human
gcuccugggaag

SEQ ID NO: 3763976 - RNA, 19 nt, Human
gcuccuggucuugagaugu

SEQ ID NO: 3763977 - RNA, 14 nt, Human
gcuccuguccccug

SEQ ID NO: 3763978 - RNA, 13 nt, Human
gcuccuguccucc

SEQ ID NO: 3763979 - RNA, 20 nt, Human
gcuccuguggccccacccug

SEQ ID NO: 3763980 - RNA, 21 nt, Human
gcuccuguggccccacccugg

SEQ ID NO: 3763981 - RNA, 12 nt, Human
gcuccugugucu

SEQ ID NO: 3763982 - RNA, 17 nt, Human
gcuccuguuagcuccuc

SEQ ID NO: 3763983 - RNA, 15 nt, Human
gcuccuuaaggcucu

SEQ ID NO: 3763984 - RNA, 15 nt, Human
gcuccuuagcugcca

SEQ ID NO: 3763985 - RNA, 18 nt, Human
gcuccuuagcugccaagc

SEQ ID NO: 3763986 - RNA, 19 nt, Human
gcuccuuaggguuuucucu

SEQ ID NO: 3763987 - RNA, 15 nt, Human
gcuccuucccuugcu

SEQ ID NO: 3763988 - RNA, 13 nt, Human
gcuccuuccuguc

SEQ ID NO: 3763989 - RNA, 15 nt, Human
gcuccuugacuccuu

SEQ ID NO: 3763990 - RNA, 17 nt, Human
gcuccuugggaggaagc

SEQ ID NO: 3763991 - RNA, 18 nt, Human
gcuccuugggaggaagca

SEQ ID NO: 3763992 - RNA, 21 nt, Human
gcuccuugggaggccccacug

SEQ ID NO: 3763993 - RNA, 11 nt, Human
gcuccuugggc

SEQ ID NO: 3763994 - RNA, 19 nt, Human
gcuccuugggcccuuugag

SEQ ID NO: 3763995 - RNA, 15 nt, Human
gcuccuugugggccu

SEQ ID NO: 3763996 - RNA, 18 nt, Human
gcuccuugugggccuggg

SEQ ID NO: 3763997 - RNA, 14 nt, Human
gcuccuuguuccua

SEQ ID NO: 3763998 - RNA, 16 nt, Human
gcuccuuguuccuaga

SEQ ID NO: 3763999 - RNA, 17 nt, Human
gcuccuuucuccagcca

SEQ ID NO: 3764000 - RNA, 19 nt, Human
gcuccuuuguguguguguc

SEQ ID NO: 3764001 - RNA, 18 nt, Human
gcuccuuuuccagagcau

SEQ ID NO: 3764002 - RNA, 16 nt, Human
gcuccuuuuucucccu

SEQ ID NO: 3764003 - RNA, 19 nt, Human
gcuccuuuuucucccucug

SEQ ID NO: 3764004 - RNA, 17 nt, Human
gcucgagcaguccugcc

SEQ ID NO: 3764005 - RNA, 20 nt, Human
gcucgagcaguccugccuca

SEQ ID NO: 3764006 - RNA, 16 nt, Human
gcucgaugcagacagg

SEQ ID NO: 3764007 - RNA, 22 nt, Human
gcucgauguggucacagcugua

SEQ ID NO: 3764008 - RNA, 14 nt, Human
gcucgauuuuguau

SEQ ID NO: 3764009 - RNA, 16 nt, Human
gcucgccacagugggc

SEQ ID NO: 3764010 - RNA, 19 nt, Human
gcucgcccuccuuucugug

SEQ ID NO: 3764011 - RNA, 21 nt, Human
gcucgccucaggaaugggcug

SEQ ID NO: 3764012 - RNA, 13 nt, Human
gcucgccuucccu

SEQ ID NO: 3764013 - RNA, 14 nt, Human
gcucgcuguugcug

SEQ ID NO: 3764014 - RNA, 21 nt, Human
gcucgcuguugcugaauaggc

SEQ ID NO: 3764015 - RNA, 19 nt, Human
gcucggagaagagcgcagu

SEQ ID NO: 3764016 - RNA, 21 nt, Human
gcucggaggccccaaaggaaa

SEQ ID NO: 3764017 - RNA, 17 nt, Human
gcucggaggcugccccc

SEQ ID NO: 3764018 - RNA, 18 nt, Human
gcucggaggcugcccccg

SEQ ID NO: 3764019 - RNA, 17 nt, Human
gcucggccugcccccac

SEQ ID NO: 3764020 - RNA, 13 nt, Human
gcucggcucagcu

SEQ ID NO: 3764021 - RNA, 12 nt, Human
gcucgguggacc

SEQ ID NO: 3764022 - RNA, 17 nt, Human
gcucgguggacccaggg

SEQ ID NO: 3764023 - RNA, 22 nt, Human
gcucguggacugagugggaagc

SEQ ID NO: 3764024 - RNA, 23 nt, Human
gcucguguauccuggggcucccu

SEQ ID NO: 3764025 - RNA, 14 nt, Human
gcucuaacgccuga

SEQ ID NO: 3764026 - RNA, 17 nt, Human
gcucuaauguuugcaua

SEQ ID NO: 3764027 - RNA, 15 nt, Human
gcucuaauucacagu

SEQ ID NO: 3764028 - RNA, 16 nt, Human
gcucuaauucacagug

SEQ ID NO: 3764029 - RNA, 19 nt, Human
gcucuaauucacagugcuc

SEQ ID NO: 3764030 - RNA, 20 nt, Human
gcucuacagcuaaucagcau

SEQ ID NO: 3764031 - RNA, 17 nt, Human
gcucuacaucuucugcc

SEQ ID NO: 3764032 - RNA, 13 nt, Human
gcucuacgggggc

SEQ ID NO: 3764033 - RNA, 15 nt, Human
gcucuacuuccccau

SEQ ID NO: 3764034 - RNA, 16 nt, Human
gcucuacuuccccaug

SEQ ID NO: 3764035 - RNA, 13 nt, Human
gcucuagaaucug

SEQ ID NO: 3764036 - RNA, 17 nt, Human
gcucuagaugagcuggg

SEQ ID NO: 3764037 - RNA, 21 nt, Human
gcucuagccugggcaacaaca

SEQ ID NO: 3764038 - RNA, 19 nt, Human
gcucuaggguugcuggagc

SEQ ID NO: 3764039 - RNA, 24 nt, Human
gcucuaggguugcuggagccugag

SEQ ID NO: 3764040 - RNA, 15 nt, Human
gcucuagugggacag

SEQ ID NO: 3764041 - RNA, 19 nt, Human
gcucuaucgcccaggcugg

SEQ ID NO: 3764042 - RNA, 14 nt, Human
gcucuaucucucaa

SEQ ID NO: 3764043 - RNA, 17 nt, Human
gcucuaugcuuuccaaa

SEQ ID NO: 3764044 - RNA, 21 nt, Human
gcucuaugggcagaucuaccc

SEQ ID NO: 3764045 - RNA, 21 nt, Human
gcucuauuauauaaacuuuau

SEQ ID NO: 3764046 - RNA, 16 nt, Human
gcucuauuaugaaugu

SEQ ID NO: 3764047 - RNA, 22 nt, Human
gcucuauuaugaaugugaagcc

SEQ ID NO: 3764048 - RNA, 12 nt, Human
gcucucaccucu

SEQ ID NO: 3764049 - RNA, 13 nt, Human
gcucucagaagcc

SEQ ID NO: 3764050 - RNA, 11 nt, Human
gcucucagcca

SEQ ID NO: 3764051 - RNA, 13 nt, Human
gcucucaggccag

SEQ ID NO: 3764052 - RNA, 14 nt, Human
gcucucaggccagc

SEQ ID NO: 3764053 - RNA, 16 nt, Human
gcucucaggccagcug

SEQ ID NO: 3764054 - RNA, 18 nt, Human
gcucucaggccagcugcu

SEQ ID NO: 3764055 - RNA, 20 nt, Human
gcucucaggccagcugcuug

SEQ ID NO: 3764056 - RNA, 15 nt, Human
gcucucaucugaggc

SEQ ID NO: 3764057 - RNA, 18 nt, Human
gcucuccaagucucagug

SEQ ID NO: 3764058 - RNA, 22 nt, Human
gcucuccaagucucaguggcuu

SEQ ID NO: 3764059 - RNA, 13 nt, Human
gcucuccaagugc

SEQ ID NO: 3764060 - RNA, 17 nt, Human
gcucuccaagugccaga

SEQ ID NO: 3764061 - RNA, 15 nt, Human
gcucuccaccucagc

SEQ ID NO: 3764062 - RNA, 20 nt, Human
gcucuccaccucagccuugg

SEQ ID NO: 3764063 - RNA, 18 nt, Human
gcucuccauucugcuccu

SEQ ID NO: 3764064 - RNA, 20 nt, Human
gcucuccauucugcuccuuc

SEQ ID NO: 3764065 - RNA, 21 nt, Human
gcucuccauucugcuccuucc

SEQ ID NO: 3764066 - RNA, 16 nt, Human
gcucuccccugcccug

SEQ ID NO: 3764067 - RNA, 18 nt, Human
gcucucccgguucuucca

SEQ ID NO: 3764068 - RNA, 20 nt, Human
gcucucccgguucuuccagu

SEQ ID NO: 3764069 - RNA, 11 nt, Human
gcucucccucu

SEQ ID NO: 3764070 - RNA, 19 nt, Human
gcucucccucuggcccugc

SEQ ID NO: 3764071 - RNA, 21 nt, Human
gcucucccucuggcccugccu

SEQ ID NO: 3764072 - RNA, 23 nt, Human
gcucucccucuggcccugccuuc

SEQ ID NO: 3764073 - RNA, 15 nt, Human
gcucucccucuucuc

SEQ ID NO: 3764074 - RNA, 21 nt, Human
gcucucccucuucucaagugc

SEQ ID NO: 3764075 - RNA, 23 nt, Human
gcucucccucuucucaagugccu

SEQ ID NO: 3764076 - RNA, 24 nt, Human
gcucucccucuucucaagugccuu

SEQ ID NO: 3764077 - RNA, 20 nt, Human
cuuccugucuuccugcauuc

SEQ ID NO: 3764078 - RNA, 16 nt, Human
cuuccugugauccacc

SEQ ID NO: 3764079 - RNA, 23 nt, Human
cuuccuguguguccaaaacugcc

SEQ ID NO: 3764080 - RNA, 16 nt, Human
cuuccuguuuuucaca

SEQ ID NO: 3764081 - RNA, 19 nt, Human
cuuccuuacucccaggcac

SEQ ID NO: 3764082 - RNA, 15 nt, Human
cuuccuuaugcuucu

SEQ ID NO: 3764083 - RNA, 15 nt, Human
cuuccuucagagagc

SEQ ID NO: 3764084 - RNA, 16 nt, Human
cuuccuucagagagca

SEQ ID NO: 3764085 - RNA, 21 nt, Human
cuuccuucagagagcagugcu

SEQ ID NO: 3764086 - RNA, 22 nt, Human
cuuccuucagagagcagugcuu

SEQ ID NO: 3764087 - RNA, 13 nt, Human
cuuccuucauuuc

SEQ ID NO: 3764088 - RNA, 15 nt, Human
cuuccuucauuuccu

SEQ ID NO: 3764089 - RNA, 16 nt, Human
cuuccuucauuuccuc

SEQ ID NO: 3764090 - RNA, 12 nt, Human
cuuccuucccac

SEQ ID NO: 3764091 - RNA, 15 nt, Human
cuuccuucccugcug

SEQ ID NO: 3764092 - RNA, 17 nt, Human
cuuccuucccuggcuug

SEQ ID NO: 3764093 - RNA, 16 nt, Human
cuuccuucccugggcu

SEQ ID NO: 3764094 - RNA, 18 nt, Human
cuuccuucccugggcugu

SEQ ID NO: 3764095 - RNA, 14 nt, Human
cuuccuuccucucc

SEQ ID NO: 3764096 - RNA, 13 nt, Human
cuuccuuccuguu

SEQ ID NO: 3764097 - RNA, 11 nt, Human
cuuccuucugc

SEQ ID NO: 3764098 - RNA, 21 nt, Human
cuuccuugaagaacugcaggc

SEQ ID NO: 3764099 - RNA, 15 nt, Human
cuuccuugaccagca

SEQ ID NO: 3764100 - RNA, 18 nt, Human
cuuccuugaccuuccucu

SEQ ID NO: 3764101 - RNA, 15 nt, Human
cuuccuugcucuccc

SEQ ID NO: 3764102 - RNA, 16 nt, Human
cuuccuugcucugcac

SEQ ID NO: 3764103 - RNA, 19 nt, Human
cuuccuuggcaucacaggg

SEQ ID NO: 3764104 - RNA, 15 nt, Human
cuuccuuuaaaaaac

SEQ ID NO: 3764105 - RNA, 16 nt, Human
cuuccuuuaaaaaacu

SEQ ID NO: 3764106 - RNA, 17 nt, Human
cuuccuuuacuuucccu

SEQ ID NO: 3764107 - RNA, 21 nt, Human
cuuccuuuacuuucccuugcu

SEQ ID NO: 3764108 - RNA, 23 nt, Human
cuuccuuuacuuucccuugcuuu

SEQ ID NO: 3764109 - RNA, 17 nt, Human
cuuccuuucuccaggac

SEQ ID NO: 3764110 - RNA, 20 nt, Human
cuuccuuucucuuucucucu

SEQ ID NO: 3764111 - RNA, 21 nt, Human
cuuccuuucucuuucucucuu

SEQ ID NO: 3764112 - RNA, 23 nt, Human
cuuccuuucucuuucucucuucc

SEQ ID NO: 3764113 - RNA, 18 nt, Human
cuuccuuucuuucucucu

SEQ ID NO: 3764114 - RNA, 20 nt, Human
cuuccuuuuacuuuucuucu

SEQ ID NO: 3764115 - RNA, 15 nt, Human
cuuccuuuucccugc

SEQ ID NO: 3764116 - RNA, 15 nt, Human
cuuccuuuugaggga

SEQ ID NO: 3764117 - RNA, 15 nt, Human
cuucgaaaccuggga

SEQ ID NO: 3764118 - RNA, 20 nt, Human
cuucgaaagcaucauuauuu

SEQ ID NO: 3764119 - RNA, 15 nt, Human
cuucgacagcauuuu

SEQ ID NO: 3764120 - RNA, 18 nt, Human
cuucgacucaggauccag

SEQ ID NO: 3764121 - RNA, 23 nt, Human
cuucgacuguuguuaucuguuug

SEQ ID NO: 3764122 - RNA, 17 nt, Human
cuucgacuuuucuuaac

SEQ ID NO: 3764123 - RNA, 18 nt, Human
cuucgacuuuucuuaaca

SEQ ID NO: 3764124 - RNA, 17 nt, Human
cuucgagcacuguccag

SEQ ID NO: 3764125 - RNA, 23 nt, Human
cuucgagguggaucacagaggcu

SEQ ID NO: 3764126 - RNA, 16 nt, Human
cuucgaguucccaggg

SEQ ID NO: 3764127 - RNA, 16 nt, Human
cuucgcaucaaaagac

SEQ ID NO: 3764128 - RNA, 17 nt, Human
cuucgcaucaaaagaca

SEQ ID NO: 3764129 - RNA, 20 nt, Human
cuucgcaucaaaagacaauu

SEQ ID NO: 3764130 - RNA, 21 nt, Human
cuucgcaucaaaagacaauuc

SEQ ID NO: 3764131 - RNA, 17 nt, Human
cuucgcuccugugucuu

SEQ ID NO: 3764132 - RNA, 15 nt, Human
cuucgcuucuugccu

SEQ ID NO: 3764133 - RNA, 16 nt, Human
cuucgcuucuugccuc

SEQ ID NO: 3764134 - RNA, 21 nt, Human
cuucgcuucuugccucugugc

SEQ ID NO: 3764135 - RNA, 14 nt, Human
cuucggacaaaaua

SEQ ID NO: 3764136 - RNA, 15 nt, Human
cuucggacaaaauau

SEQ ID NO: 3764137 - RNA, 21 nt, Human
cuucggcauugguucccuuug

SEQ ID NO: 3764138 - RNA, 16 nt, Human
cuucggccagagcuga

SEQ ID NO: 3764139 - RNA, 17 nt, Human
cuucggccuccauccug

SEQ ID NO: 3764140 - RNA, 19 nt, Human
cuucggccuccauccugag

SEQ ID NO: 3764141 - RNA, 17 nt, Human
cuucgggaagagaggag

SEQ ID NO: 3764142 - RNA, 16 nt, Human
cuucgggcccuuccca

SEQ ID NO: 3764143 - RNA, 18 nt, Human
cuucgggcgucugugugc

SEQ ID NO: 3764144 - RNA, 14 nt, Human
cuucgggcugugcc

SEQ ID NO: 3764145 - RNA, 15 nt, Human
cuucgggcugugccc

SEQ ID NO: 3764146 - RNA, 14 nt, Human
cuucggggcuggga

SEQ ID NO: 3764147 - RNA, 12 nt, Human
cuucguacaguu

SEQ ID NO: 3764148 - RNA, 13 nt, Human
cuucguacaguuc

SEQ ID NO: 3764149 - RNA, 14 nt, Human
cuucguacaguucu

SEQ ID NO: 3764150 - RNA, 21 nt, Human
cuucguaucccgagucuggga

SEQ ID NO: 3764151 - RNA, 21 nt, Human
cuucgucuuucccauggggag

SEQ ID NO: 3764152 - RNA, 22 nt, Human
cuucgucuuucccauggggagg

SEQ ID NO: 3764153 - RNA, 21 nt, Human
cuucgugcggaaucagcuucu

SEQ ID NO: 3764154 - RNA, 23 nt, Human
cuucgugggaucugccccucccu

SEQ ID NO: 3764155 - RNA, 20 nt, Human
cuucguuaacuguguaugua

SEQ ID NO: 3764156 - RNA, 13 nt, Human
cuucguucgcaga

SEQ ID NO: 3764157 - RNA, 18 nt, Human
cuucguucuuuuuaaguu

SEQ ID NO: 3764158 - RNA, 19 nt, Human
cuucguuuacuaugccugu

SEQ ID NO: 3764159 - RNA, 15 nt, Human
cuucguuuauuuuca

SEQ ID NO: 3764160 - RNA, 16 nt, Human
cuucguuuauuuucaa

SEQ ID NO: 3764161 - RNA, 18 nt, Human
cuucguuuauuuucaaga

SEQ ID NO: 3764162 - RNA, 12 nt, Human
cuucuaaaaacu

SEQ ID NO: 3764163 - RNA, 14 nt, Human
cuucuaaaacugua

SEQ ID NO: 3764164 - RNA, 18 nt, Human
cuucuaaaacuguacuuu

SEQ ID NO: 3764165 - RNA, 19 nt, Human
cuucuaaacccaauccaaa

SEQ ID NO: 3764166 - RNA, 19 nt, Human
cuucuaaacuuccccaucu

SEQ ID NO: 3764167 - RNA, 22 nt, Human
cuucuaaacuuccccaucuucu

SEQ ID NO: 3764168 - RNA, 23 nt, Human
cuucuaaauggcaaaggaaggug

SEQ ID NO: 3764169 - RNA, 21 nt, Human
cuucuaaguugaguauauuau

SEQ ID NO: 3764170 - RNA, 17 nt, Human
cuucuaauaaauuauac

SEQ ID NO: 3764171 - RNA, 21 nt, Human
cuucuaauaaauuauacaaau

SEQ ID NO: 3764172 - RNA, 18 nt, Human
cuucuaauauauuuuuau

SEQ ID NO: 3764173 - RNA, 17 nt, Human
cuucuaauauuuauugc

SEQ ID NO: 3764174 - RNA, 20 nt, Human
cuucuaauauuuauugcuuu

SEQ ID NO: 3764175 - RNA, 21 nt, Human
cuucuaauauuuauugcuuua

SEQ ID NO: 3764176 - RNA, 16 nt, Human
cuucuaauugccaugu

SEQ ID NO: 3764177 - RNA, 15 nt, Human
cuucuaauugcugug

SEQ ID NO: 3764178 - RNA, 18 nt, Human
cuucuacacucuccuggg

SEQ ID NO: 3764179 - RNA, 15 nt, Human
cuucuaccaacugga

SEQ ID NO: 3764180 - RNA, 15 nt, Human
cuucuaccugccacu

SEQ ID NO: 3764181 - RNA, 16 nt, Human
cuucuaccugccacuc

SEQ ID NO: 3764182 - RNA, 14 nt, Human
cuucuaccugcccu

SEQ ID NO: 3764183 - RNA, 20 nt, Human
cuucuacucacuuuucccac

SEQ ID NO: 3764184 - RNA, 13 nt, Human
cuucuacuucugc

SEQ ID NO: 3764185 - RNA, 21 nt, Human
cuucuacuuuuaaguugcuga

SEQ ID NO: 3764186 - RNA, 13 nt, Human
cuucuagagcuua

SEQ ID NO: 3764187 - RNA, 15 nt, Human
cuucuagaguuuuau

SEQ ID NO: 3764188 - RNA, 19 nt, Human
cuucuaggguuauugcauu

SEQ ID NO: 3764189 - RNA, 16 nt, Human
cuucuagguucuaaaa

SEQ ID NO: 3764190 - RNA, 21 nt, Human
cuucuagugauuucuggggcc

SEQ ID NO: 3764191 - RNA, 17 nt, Human
cuucuaguucugccagg

SEQ ID NO: 3764192 - RNA, 19 nt, Human
cuucuaguucugccaggag

SEQ ID NO: 3764193 - RNA, 18 nt, Human
cuucuauagcaucacuua

SEQ ID NO: 3764194 - RNA, 15 nt, Human
cuucuaucccaggag

SEQ ID NO: 3764195 - RNA, 19 nt, Human
cuucuauuauagccacauc

SEQ ID NO: 3764196 - RNA, 20 nt, Human
cuucuauucuagccugcauu

SEQ ID NO: 3764197 - RNA, 18 nt, Human
cuucuauugccucugaga

SEQ ID NO: 3764198 - RNA, 19 nt, Human
cuucuauugccucugagag

SEQ ID NO: 3764199 - RNA, 22 nt, Human
cuucuauugccucugagagcau

SEQ ID NO: 3764200 - RNA, 24 nt, Human
cuucuauugccucugagagcauca

SEQ ID NO: 3764201 - RNA, 16 nt, Human
cuucuauuuuguaaac

SEQ ID NO: 3764202 - RNA, 17 nt, Human
cuucuauuuuguaaacu

SEQ ID NO: 3764203 - RNA, 19 nt, Human
cuucucaaaccuguuuaaa

SEQ ID NO: 3764204 - RNA, 22 nt, Human
cuucucaaaccuguuuaaauau

SEQ ID NO: 3764205 - RNA, 16 nt, Human
cuucucaaaccuugau

SEQ ID NO: 3764206 - RNA, 21 nt, Human
cuucucaaaggguacuuccac

SEQ ID NO: 3764207 - RNA, 15 nt, Human
cuucucaagauacug

SEQ ID NO: 3764208 - RNA, 12 nt, Human
cuucucaagugc

SEQ ID NO: 3764209 - RNA, 14 nt, Human
cuucucaagugccu

SEQ ID NO: 3764210 - RNA, 15 nt, Human
cuucucaagugccuu

SEQ ID NO: 3764211 - RNA, 16 nt, Human
cuucucaagugccuua

SEQ ID NO: 3764212 - RNA, 18 nt, Human
cuucucaagugccuuaau

SEQ ID NO: 3764213 - RNA, 17 nt, Human
cuucucaaguucuaaga

SEQ ID NO: 3764214 - RNA, 13 nt, Human
cuucucacagcac

SEQ ID NO: 3764215 - RNA, 18 nt, Human
cuucucacagcacaugcu

SEQ ID NO: 3764216 - RNA, 19 nt, Human
cuucucacagcacaugcug

SEQ ID NO: 3764217 - RNA, 13 nt, Human
cuucucacauuua

SEQ ID NO: 3764218 - RNA, 16 nt, Human
cuucucaccagcugca

SEQ ID NO: 3764219 - RNA, 17 nt, Human
cuucucaccagcugcaa

SEQ ID NO: 3764220 - RNA, 19 nt, Human
cuucucaccagcugcaaag

SEQ ID NO: 3764221 - RNA, 21 nt, Human
cuucucaccagcugcaaagug

SEQ ID NO: 3764222 - RNA, 22 nt, Human
cuucucaccagcugcaaagugu

SEQ ID NO: 3764223 - RNA, 14 nt, Human
cuucucagaagcac

SEQ ID NO: 3764224 - RNA, 22 nt, Human
cuucucagaaggcaaaugacuu

SEQ ID NO: 3764225 - RNA, 14 nt, Human
cuucucagaaucua

SEQ ID NO: 3764226 - RNA, 14 nt, Human
gcuucaucuggcaa

SEQ ID NO: 3764227 - RNA, 13 nt, Human
gcuucaugccuuu

SEQ ID NO: 3764228 - RNA, 14 nt, Human
gcuucauguguccc

SEQ ID NO: 3764229 - RNA, 15 nt, Human
gcuucauguguccca

SEQ ID NO: 3764230 - RNA, 15 nt, Human
gcuucauuagagcag

SEQ ID NO: 3764231 - RNA, 18 nt, Human
gcuucauucaauauugac

SEQ ID NO: 3764232 - RNA, 11 nt, Human
gcuucauugua

SEQ ID NO: 3764233 - RNA, 13 nt, Human
gcuucauuuccug

SEQ ID NO: 3764234 - RNA, 10 nt, Human
gcuuccacau

SEQ ID NO: 3764235 - RNA, 21 nt, Human
gcuuccagagaguccucugga

SEQ ID NO: 3764236 - RNA, 22 nt, Human
gcuuccagauugacgacaagug

SEQ ID NO: 3764237 - RNA, 23 nt, Human
gcuuccagauugacgacaagugc

SEQ ID NO: 3764238 - RNA, 15 nt, Human
gcuuccagcaggagg

SEQ ID NO: 3764239 - RNA, 16 nt, Human
gcuuccagugaggcuc

SEQ ID NO: 3764240 - RNA, 23 nt, Human
gcuuccagugaggcucugcccuu

SEQ ID NO: 3764241 - RNA, 16 nt, Human
gcuuccauagcugcug

SEQ ID NO: 3764242 - RNA, 17 nt, Human
gcuuccaugagaacagc

SEQ ID NO: 3764243 - RNA, 19 nt, Human
gcuuccaugauucuauuua

SEQ ID NO: 3764244 - RNA, 12 nt, Human
gcuuccauucca

SEQ ID NO: 3764245 - RNA, 23 nt, Human
gcuucccaaaugugugcccagcu

SEQ ID NO: 3764246 - RNA, 21 nt, Human
gcuucccaguggcugcugccc

SEQ ID NO: 3764247 - RNA, 12 nt, Human
gcuucccauccu

SEQ ID NO: 3764248 - RNA, 13 nt, Human
gcuucccauccua

SEQ ID NO: 3764249 - RNA, 19 nt, Human
gcuucccauuguggcuccu

SEQ ID NO: 3764250 - RNA, 14 nt, Human
gcuuccccaguagc

SEQ ID NO: 3764251 - RNA, 14 nt, Human
gcuucccccauagc

SEQ ID NO: 3764252 - RNA, 16 nt, Human
gcuucccccauagcca

SEQ ID NO: 3764253 - RNA, 14 nt, Human
gcuuccccucucuc

SEQ ID NO: 3764254 - RNA, 18 nt, Human
gcuuccccucucuccucc

SEQ ID NO: 3764255 - RNA, 17 nt, Human
gcuucccgcucagcccu

SEQ ID NO: 3764256 - RNA, 13 nt, Human
gcuucccuaaucu

SEQ ID NO: 3764257 - RNA, 17 nt, Human
gcuucccuccauccccc

SEQ ID NO: 3764258 - RNA, 14 nt, Human
gcuucccucccugc

SEQ ID NO: 3764259 - RNA, 17 nt, Human
gcuucccucugccuguc

SEQ ID NO: 3764260 - RNA, 11 nt, Human
gcuucccugaa

SEQ ID NO: 3764261 - RNA, 16 nt, Human
gcuucccugaagcucc

SEQ ID NO: 3764262 - RNA, 14 nt, Human
gcuucccugacuca

SEQ ID NO: 3764263 - RNA, 19 nt, Human
gcuucccugguucaagcga

SEQ ID NO: 3764264 - RNA, 19 nt, Human
gcuucccuuuuuuccuuuc

SEQ ID NO: 3764265 - RNA, 18 nt, Human
gcuuccggcuccugugcu

SEQ ID NO: 3764266 - RNA, 21 nt, Human
gcuuccgguagggaggcagcc

SEQ ID NO: 3764267 - RNA, 14 nt, Human
gcuuccucccaaca

SEQ ID NO: 3764268 - RNA, 15 nt, Human
gcuuccucuagaagc

SEQ ID NO: 3764269 - RNA, 20 nt, Human
gcuuccugcguccuccucac

SEQ ID NO: 3764270 - RNA, 14 nt, Human
gcuuccugcuugcc

SEQ ID NO: 3764271 - RNA, 16 nt, Human
gcuuccuggugcugga

SEQ ID NO: 3764272 - RNA, 14 nt, Human
gcuuccuguuugua

SEQ ID NO: 3764273 - RNA, 14 nt, Human
gcuuccuucagaga

SEQ ID NO: 3764274 - RNA, 20 nt, Human
gcuuccuucagagagcagug

SEQ ID NO: 3764275 - RNA, 23 nt, Human
gcuuccuuuccuguguguacucu

SEQ ID NO: 3764276 - RNA, 12 nt, Human
gcuuccuuucuu

SEQ ID NO: 3764277 - RNA, 22 nt, Human
gcuuccuuuguuuuuuuuuccu

SEQ ID NO: 3764278 - RNA, 19 nt, Human
gcuucgaggcccagcgacc

SEQ ID NO: 3764279 - RNA, 14 nt, Human
gcuucggcauuuga

SEQ ID NO: 3764280 - RNA, 18 nt, Human
gcuucgggcccuucccac

SEQ ID NO: 3764281 - RNA, 20 nt, Human
gcuucgggcccuucccacag

SEQ ID NO: 3764282 - RNA, 22 nt, Human
gcuucgguuucuaacuuggagc

SEQ ID NO: 3764283 - RNA, 16 nt, Human
gcuucguuuauuuuca

SEQ ID NO: 3764284 - RNA, 12 nt, Human
gcuucuaauaaa

SEQ ID NO: 3764285 - RNA, 18 nt, Human
gcuucuaauauuuauugc

SEQ ID NO: 3764286 - RNA, 22 nt, Human
gcuucuaauauuuauugcuuua

SEQ ID NO: 3764287 - RNA, 20 nt, Human
gcuucuaccaacuggaagca

SEQ ID NO: 3764288 - RNA, 22 nt, Human
gcuucuaccaacuggaagcaca

SEQ ID NO: 3764289 - RNA, 17 nt, Human
gcuucuaccaugaacag

SEQ ID NO: 3764290 - RNA, 19 nt, Human
gcuucuaccaugaacagaa

SEQ ID NO: 3764291 - RNA, 17 nt, Human
gcuucuaguucugccag

SEQ ID NO: 3764292 - RNA, 19 nt, Human
gcuucuaguucugccagga

SEQ ID NO: 3764293 - RNA, 14 nt, Human
gcuucuaucccagg

SEQ ID NO: 3764294 - RNA, 20 nt, Human
gcuucuaucccaggaggugg

SEQ ID NO: 3764295 - RNA, 16 nt, Human
gcuucuauuagccagu

SEQ ID NO: 3764296 - RNA, 16 nt, Human
gcuucucagcucgcug

SEQ ID NO: 3764297 - RNA, 16 nt, Human
gcuucucauacgucca

SEQ ID NO: 3764298 - RNA, 16 nt, Human
gcuucucauccugcag

SEQ ID NO: 3764299 - RNA, 12 nt, Human
gcuucuccaggc

SEQ ID NO: 3764300 - RNA, 14 nt, Human
gcuucucccaggca

SEQ ID NO: 3764301 - RNA, 15 nt, Human
gcuucucccaggcaa

SEQ ID NO: 3764302 - RNA, 18 nt, Human
gcuucucccaggcaaggc

SEQ ID NO: 3764303 - RNA, 23 nt, Human
gcuucucccaggcaaggcugugg

SEQ ID NO: 3764304 - RNA, 13 nt, Human
gcuucuccccaga

SEQ ID NO: 3764305 - RNA, 18 nt, Human
gcuucuccgccagccucc

SEQ ID NO: 3764306 - RNA, 19 nt, Human
gcuucuccgccagccuccu

SEQ ID NO: 3764307 - RNA, 23 nt, Human
gcuucuccgccagccuccucugg

SEQ ID NO: 3764308 - RNA, 15 nt, Human
gcuucuccuguguga

SEQ ID NO: 3764309 - RNA, 14 nt, Human
gcuucucuacagac

SEQ ID NO: 3764310 - RNA, 14 nt, Human
gcuucucucugugg

SEQ ID NO: 3764311 - RNA, 16 nt, Human
gcuucucucuguggga

SEQ ID NO: 3764312 - RNA, 13 nt, Human
gcuucucugacuu

SEQ ID NO: 3764313 - RNA, 18 nt, Human
gcuucucugacuucugcc

SEQ ID NO: 3764314 - RNA, 21 nt, Human
gcuucucugacuucugccugg

SEQ ID NO: 3764315 - RNA, 22 nt, Human
gcuucucugcccagcuuuucau

SEQ ID NO: 3764316 - RNA, 16 nt, Human
gcuucugaccucagca

SEQ ID NO: 3764317 - RNA, 21 nt, Human
gcuucugagcagcgagccugc

SEQ ID NO: 3764318 - RNA, 22 nt, Human
gcuucugagcagcgagccugcu

SEQ ID NO: 3764319 - RNA, 12 nt, Human
gcuucugcaccc

SEQ ID NO: 3764320 - RNA, 15 nt, Human
gcuucugcacccucc

SEQ ID NO: 3764321 - RNA, 17 nt, Human
gcuucugcacccuccac

SEQ ID NO: 3764322 - RNA, 19 nt, Human
gcuucugcacccuccaccc

SEQ ID NO: 3764323 - RNA, 21 nt, Human
gcuucugcacccuccacccug

SEQ ID NO: 3764324 - RNA, 21 nt, Human
gcuucugccacugcugggcuc

SEQ ID NO: 3764325 - RNA, 18 nt, Human
gcuucugccacuucccag

SEQ ID NO: 3764326 - RNA, 19 nt, Human
gcuucugccacuucccagg

SEQ ID NO: 3764327 - RNA, 17 nt, Human
gcuucugcccccugcag

SEQ ID NO: 3764328 - RNA, 18 nt, Human
gcuucugcccccugcaga

SEQ ID NO: 3764329 - RNA, 12 nt, Human
gcuucugcuggg

SEQ ID NO: 3764330 - RNA, 14 nt, Human
gcuucugcugggcu

SEQ ID NO: 3764331 - RNA, 15 nt, Human
gcuucugcugggcug

SEQ ID NO: 3764332 - RNA, 16 nt, Human
gcuucugcugggcugg

SEQ ID NO: 3764333 - RNA, 16 nt, Human
gcuucugcuggggccu

SEQ ID NO: 3764334 - RNA, 21 nt, Human
gcuucugcuggggccugggac

SEQ ID NO: 3764335 - RNA, 14 nt, Human
gcuucugcuuuucu

SEQ ID NO: 3764336 - RNA, 20 nt, Human
gcuucugcuuuucugcccug

SEQ ID NO: 3764337 - RNA, 17 nt, Human
gcuucuggagcccuugg

SEQ ID NO: 3764338 - RNA, 17 nt, Human
gcuucuggccaggaagc

SEQ ID NO: 3764339 - RNA, 21 nt, Human
gcuucugggguccccagggcu

SEQ ID NO: 3764340 - RNA, 16 nt, Human
gcuucugguacucucc

SEQ ID NO: 3764341 - RNA, 19 nt, Human
gcuucugguacucuccuag

SEQ ID NO: 3764342 - RNA, 19 nt, Human
gcuucuggugaccuuccaa

SEQ ID NO: 3764343 - RNA, 20 nt, Human
gcuucuguaguacuccuuaa

SEQ ID NO: 3764344 - RNA, 11 nt, Human
gcuucugucuc

SEQ ID NO: 3764345 - RNA, 23 nt, Human
gcuucugucuuauuugaaggcca

SEQ ID NO: 3764346 - RNA, 17 nt, Human
gcuucugugaugagcug

SEQ ID NO: 3764347 - RNA, 19 nt, Human
gcuucugugcccagaauac

SEQ ID NO: 3764348 - RNA, 18 nt, Human
gcuucuguggggccccuc

SEQ ID NO: 3764349 - RNA, 16 nt, Human
gcuucuguugucaccu

SEQ ID NO: 3764350 - RNA, 19 nt, Human
gcuucuguugucaccuuca

SEQ ID NO: 3764351 - RNA, 14 nt, Human
gcuucuguuucuag

SEQ ID NO: 3764352 - RNA, 15 nt, Human
gcuucuguuucuagu

SEQ ID NO: 3764353 - RNA, 16 nt, Human
gcuucuuaauuaauuu

SEQ ID NO: 3764354 - RNA, 17 nt, Human
gcuucuuaauuaauuug

SEQ ID NO: 3764355 - RNA, 18 nt, Human
gcuucuuacugauaauuu

SEQ ID NO: 3764356 - RNA, 15 nt, Human
gcuucuucagagacu

SEQ ID NO: 3764357 - RNA, 19 nt, Human
gcuucuucagagacuccug

SEQ ID NO: 3764358 - RNA, 21 nt, Human
gcuucuucagagacuccugca

SEQ ID NO: 3764359 - RNA, 18 nt, Human
gcuucuucuccuaugugu

SEQ ID NO: 3764360 - RNA, 16 nt, Human
gcuucuucugaggccu

SEQ ID NO: 3764361 - RNA, 17 nt, Human
gcuucuucugaggccug

SEQ ID NO: 3764362 - RNA, 12 nt, Human
gcuucuugccuc

SEQ ID NO: 3764363 - RNA, 15 nt, Human
gcuucuugccucugu

SEQ ID NO: 3764364 - RNA, 17 nt, Human
gcuucuugccucugugc

SEQ ID NO: 3764365 - RNA, 18 nt, Human
gcuucuugccucugugcu

SEQ ID NO: 3764366 - RNA, 21 nt, Human
gcuucuugccucugugcugug

SEQ ID NO: 3764367 - RNA, 20 nt, Human
gcuucuuuaaaaaagcuaua

SEQ ID NO: 3764368 - RNA, 22 nt, Human
gcuucuuucaagggcuuuccug

SEQ ID NO: 3764369 - RNA, 16 nt, Human
gcuucuuucauuuucu

SEQ ID NO: 3764370 - RNA, 21 nt, Human
gcuucuuucuagaaagagaaa

SEQ ID NO: 3764371 - RNA, 18 nt, Human
gcuucuuucuuugggaau

SEQ ID NO: 3764372 - RNA, 19 nt, Human
gcuugaaaagcuaguguac

SEQ ID NO: 3764373 - RNA, 19 nt, Human
gcuugaaacccguggcgcu

SEQ ID NO: 3764374 - RNA, 20 nt, Human
gcuugaaagaaaauaugcau

SEQ ID NO: 3764375 - RNA, 11 nt, Human
gcuugaacaca

SEQ ID NO: 3764376 - RNA, 13 nt, Human
gcuugaacccagg

SEQ ID NO: 3764377 - RNA, 17 nt, Human
cuucucaggacacaggc

SEQ ID NO: 3764378 - RNA, 18 nt, Human
cuucucaggacacaggcc

SEQ ID NO: 3764379 - RNA, 22 nt, Human
cuucucaggacacaggccugug

SEQ ID NO: 3764380 - RNA, 19 nt, Human
cuucucaucacacacaugg

SEQ ID NO: 3764381 - RNA, 18 nt, Human
cuucucaucacuccccuc

SEQ ID NO: 3764382 - RNA, 22 nt, Human
cuucucauuacuuguugccuau

SEQ ID NO: 3764383 - RNA, 17 nt, Human
cuucucauuucaccccu

SEQ ID NO: 3764384 - RNA, 20 nt, Human
cuucucauuuuuuaaaaaag

SEQ ID NO: 3764385 - RNA, 21 nt, Human
cuucuccaaaaaucugccugg

SEQ ID NO: 3764386 - RNA, 14 nt, Human
cuucuccaaggaaa

SEQ ID NO: 3764387 - RNA, 19 nt, Human
cuucuccaauucugcccaa

SEQ ID NO: 3764388 - RNA, 14 nt, Human
cuucuccacccugc

SEQ ID NO: 3764389 - RNA, 13 nt, Human
cuucuccacugga

SEQ ID NO: 3764390 - RNA, 11 nt, Human
cuucuccacuu

SEQ ID NO: 3764391 - RNA, 13 nt, Human
cuucuccaggcug

SEQ ID NO: 3764392 - RNA, 14 nt, Human
cuucuccaggcugu

SEQ ID NO: 3764393 - RNA, 19 nt, Human
cuucuccaggguccacagg

SEQ ID NO: 3764394 - RNA, 14 nt, Human
cuucuccauccaca

SEQ ID NO: 3764395 - RNA, 16 nt, Human
cuucuccauccacaug

SEQ ID NO: 3764396 - RNA, 14 nt, Human
cuucuccaucuggc

SEQ ID NO: 3764397 - RNA, 16 nt, Human
cuucucccacucuccu

SEQ ID NO: 3764398 - RNA, 17 nt, Human
cuucucccacucuccua

SEQ ID NO: 3764399 - RNA, 20 nt, Human
cuucucccacucuccuaggc

SEQ ID NO: 3764400 - RNA, 21 nt, Human
cuucucccaggcaaggcugug

SEQ ID NO: 3764401 - RNA, 17 nt, Human
cuucucccaucucuucc

SEQ ID NO: 3764402 - RNA, 13 nt, Human
cuucucccaugag

SEQ ID NO: 3764403 - RNA, 12 nt, Human
cuucuccccaga

SEQ ID NO: 3764404 - RNA, 13 nt, Human
cuucuccccagaa

SEQ ID NO: 3764405 - RNA, 19 nt, Human
cuucuccccagcucccagg

SEQ ID NO: 3764406 - RNA, 20 nt, Human
cuucuccccagcucccagga

SEQ ID NO: 3764407 - RNA, 17 nt, Human
cuucucccccauccuac

SEQ ID NO: 3764408 - RNA, 20 nt, Human
cuucucccccccggggcugg

SEQ ID NO: 3764409 - RNA, 22 nt, Human
cuucucccccccggggcugggu

SEQ ID NO: 3764410 - RNA, 16 nt, Human
cuucuccccugcacug

SEQ ID NO: 3764411 - RNA, 21 nt, Human
cuucuccccugcacuguaaaa

SEQ ID NO: 3764412 - RNA, 14 nt, Human
cuucuccccuucca

SEQ ID NO: 3764413 - RNA, 20 nt, Human
cuucuccccuuccauuucug

SEQ ID NO: 3764414 - RNA, 17 nt, Human
cuucuccgccagccucc

SEQ ID NO: 3764415 - RNA, 23 nt, Human
cuucuccgccagccuccucugga

SEQ ID NO: 3764416 - RNA, 14 nt, Human
cuucuccuaugugu

SEQ ID NO: 3764417 - RNA, 16 nt, Human
cuucuccuauguguaa

SEQ ID NO: 3764418 - RNA, 18 nt, Human
cuucuccucuuguaaaua

SEQ ID NO: 3764419 - RNA, 23 nt, Human
cuucuccucuuguaaauaaagcc

SEQ ID NO: 3764420 - RNA, 18 nt, Human
cuucuccuuccaacugcu

SEQ ID NO: 3764421 - RNA, 19 nt, Human
cuucuccuugauaacagcu

SEQ ID NO: 3764422 - RNA, 17 nt, Human
cuucuccuuucacaacc

SEQ ID NO: 3764423 - RNA, 22 nt, Human
cuucuccuuucacaaccuucug

SEQ ID NO: 3764424 - RNA, 21 nt, Human
cuucucguccucguuuguguu

SEQ ID NO: 3764425 - RNA, 13 nt, Human
cuucucuacagac

SEQ ID NO: 3764426 - RNA, 15 nt, Human
cuucucuauaaaaaa

SEQ ID NO: 3764427 - RNA, 18 nt, Human
cuucucuauaaaaaauau

SEQ ID NO: 3764428 - RNA, 14 nt, Human
cuucucucaccucc

SEQ ID NO: 3764429 - RNA, 15 nt, Human
cuucucucaccuccu

SEQ ID NO: 3764430 - RNA, 23 nt, Human
cuucucucagaccgucuuccucc

SEQ ID NO: 3764431 - RNA, 14 nt, Human
cuucucucaucucu

SEQ ID NO: 3764432 - RNA, 15 nt, Human
cuucucuccagcccc

SEQ ID NO: 3764433 - RNA, 14 nt, Human
cuucucuccagcug

SEQ ID NO: 3764434 - RNA, 13 nt, Human
cuucucucccugc

SEQ ID NO: 3764435 - RNA, 18 nt, Human
cuucucucucuaaaauga

SEQ ID NO: 3764436 - RNA, 13 nt, Human
cuucucucugcuc

SEQ ID NO: 3764437 - RNA, 14 nt, Human
cuucucucugcucu

SEQ ID NO: 3764438 - RNA, 18 nt, Human
cuucucugaacacaggca

SEQ ID NO: 3764439 - RNA, 22 nt, Human
cuucucugaacacaggcagcuu

SEQ ID NO: 3764440 - RNA, 13 nt, Human
cuucucugaagga

SEQ ID NO: 3764441 - RNA, 17 nt, Human
cuucucugaagggaggu

SEQ ID NO: 3764442 - RNA, 20 nt, Human
cuucucugacuucugccugg

SEQ ID NO: 3764443 - RNA, 21 nt, Human
cuucucugacuucugccugga

SEQ ID NO: 3764444 - RNA, 22 nt, Human
cuucucugacuucugccuggag

SEQ ID NO: 3764445 - RNA, 13 nt, Human
cuucucugcccau

SEQ ID NO: 3764446 - RNA, 17 nt, Human
cuucucugcccauuccc

SEQ ID NO: 3764447 - RNA, 19 nt, Human
cuucucugcccauucccca

SEQ ID NO: 3764448 - RNA, 12 nt, Human
cuucucugcucc

SEQ ID NO: 3764449 - RNA, 15 nt, Human
cuucucugcuccacc

SEQ ID NO: 3764450 - RNA, 21 nt, Human
cuucucugcuccaccacaucc

SEQ ID NO: 3764451 - RNA, 12 nt, Human
cuucucugcugc

SEQ ID NO: 3764452 - RNA, 20 nt, Human
cuucucuggagccaagucca

SEQ ID NO: 3764453 - RNA, 22 nt, Human
cuucucugugaacgauuuagaa

SEQ ID NO: 3764454 - RNA, 20 nt, Human
cuucucugugacccacuucu

SEQ ID NO: 3764455 - RNA, 13 nt, Human
cuucucuguucau

SEQ ID NO: 3764456 - RNA, 14 nt, Human
cuucucuguucauu

SEQ ID NO: 3764457 - RNA, 12 nt, Human
cuucucuuaauu

SEQ ID NO: 3764458 - RNA, 14 nt, Human
cuucucuuaauuua

SEQ ID NO: 3764459 - RNA, 16 nt, Human
cuucucuuccaggcag

SEQ ID NO: 3764460 - RNA, 17 nt, Human
cuucucuuccaggcagc

SEQ ID NO: 3764461 - RNA, 15 nt, Human
cuucucuugcuuucu

SEQ ID NO: 3764462 - RNA, 19 nt, Human
cuucucuuuaacucaggac

SEQ ID NO: 3764463 - RNA, 15 nt, Human
cuucucuuugccuca

SEQ ID NO: 3764464 - RNA, 17 nt, Human
cuucugaacucaaacug

SEQ ID NO: 3764465 - RNA, 18 nt, Human
cuucugaacucaaacuga

SEQ ID NO: 3764466 - RNA, 14 nt, Human
cuucugaauauuuu

SEQ ID NO: 3764467 - RNA, 15 nt, Human
cuucugaaugcugcu

SEQ ID NO: 3764468 - RNA, 15 nt, Human
cuucugacagccuca

SEQ ID NO: 3764469 - RNA, 19 nt, Human
cuucugacagccucaguga

SEQ ID NO: 3764470 - RNA, 19 nt, Human
cuucugacauaauccagua

SEQ ID NO: 3764471 - RNA, 23 nt, Human
cuucugacccaugcugcccugug

SEQ ID NO: 3764472 - RNA, 15 nt, Human
cuucugaccucagca

SEQ ID NO: 3764473 - RNA, 16 nt, Human
cuucugacggcccugc

SEQ ID NO: 3764474 - RNA, 17 nt, Human
cuucugacggcccugca

SEQ ID NO: 3764475 - RNA, 23 nt, Human
cuucugacucuuccccaggaagg

SEQ ID NO: 3764476 - RNA, 15 nt, Human
cuucugagcacagau

SEQ ID NO: 3764477 - RNA, 18 nt, Human
cuucugagcagcgagccu

SEQ ID NO: 3764478 - RNA, 22 nt, Human
cuucugagcccgguaagagcaa

SEQ ID NO: 3764479 - RNA, 20 nt, Human
cuucugagcuauuucaucua

SEQ ID NO: 3764480 - RNA, 13 nt, Human
cuucugagcuccu

SEQ ID NO: 3764481 - RNA, 15 nt, Human
cuucugaggacauuc

SEQ ID NO: 3764482 - RNA, 15 nt, Human
cuucugaugaaucuu

SEQ ID NO: 3764483 - RNA, 22 nt, Human
cuucugcaaaaauggauauuau

SEQ ID NO: 3764484 - RNA, 18 nt, Human
cuucugcaacaagcaugc

SEQ ID NO: 3764485 - RNA, 14 nt, Human
cuucugcacccucc

SEQ ID NO: 3764486 - RNA, 17 nt, Human
cuucugcacccuccacc

SEQ ID NO: 3764487 - RNA, 22 nt, Human
cuucugcacccuccacccuguc

SEQ ID NO: 3764488 - RNA, 17 nt, Human
cuucugcaccuuaucuu

SEQ ID NO: 3764489 - RNA, 14 nt, Human
cuucugccaagaga

SEQ ID NO: 3764490 - RNA, 12 nt, Human
cuucugccacuu

SEQ ID NO: 3764491 - RNA, 16 nt, Human
cuucugccacuuccca

SEQ ID NO: 3764492 - RNA, 17 nt, Human
cuucugccacuucccag

SEQ ID NO: 3764493 - RNA, 18 nt, Human
cuucugccagcauaauac

SEQ ID NO: 3764494 - RNA, 17 nt, Human
cuucugccauauucugu

SEQ ID NO: 3764495 - RNA, 21 nt, Human
cuucugccauauucuguuggc

SEQ ID NO: 3764496 - RNA, 20 nt, Human
cuucugccauuucugagauc

SEQ ID NO: 3764497 - RNA, 14 nt, Human
cuucugccugagcu

SEQ ID NO: 3764498 - RNA, 23 nt, Human
cuucugccugaggggcagccugc

SEQ ID NO: 3764499 - RNA, 18 nt, Human
cuucugccuuagucucag

SEQ ID NO: 3764500 - RNA, 14 nt, Human
cuucugccuucuca

SEQ ID NO: 3764501 - RNA, 15 nt, Human
cuucugcgccucagg

SEQ ID NO: 3764502 - RNA, 19 nt, Human
cuucugcuacuggcaaaag

SEQ ID NO: 3764503 - RNA, 20 nt, Human
cuucugcuacuggcaaaagg

SEQ ID NO: 3764504 - RNA, 14 nt, Human
cuucugcucagcuc

SEQ ID NO: 3764505 - RNA, 16 nt, Human
cuucugcucagcucug

SEQ ID NO: 3764506 - RNA, 12 nt, Human
cuucugcuccac

SEQ ID NO: 3764507 - RNA, 13 nt, Human
cuucugcuccacc

SEQ ID NO: 3764508 - RNA, 15 nt, Human
cuucugcuccacccu

SEQ ID NO: 3764509 - RNA, 17 nt, Human
cuucugcuccacccuug

SEQ ID NO: 3764510 - RNA, 19 nt, Human
cuucugcuccacccuuggc

SEQ ID NO: 3764511 - RNA, 15 nt, Human
cuucugcuggauaaa

SEQ ID NO: 3764512 - RNA, 13 nt, Human
cuucugcugggcu

SEQ ID NO: 3764513 - RNA, 17 nt, Human
cuucugcugggcugggg

SEQ ID NO: 3764514 - RNA, 15 nt, Human
cuucugcuggggccu

SEQ ID NO: 3764515 - RNA, 21 nt, Human
cuucugcuggggccugggaca

SEQ ID NO: 3764516 - RNA, 15 nt, Human
cuucugcuuaggaga

SEQ ID NO: 3764517 - RNA, 16 nt, Human
cuucugcuuaggagag

SEQ ID NO: 3764518 - RNA, 13 nt, Human
cuucugcuucagc

SEQ ID NO: 3764519 - RNA, 18 nt, Human
cuucugcuucagccuccc

SEQ ID NO: 3764520 - RNA, 11 nt, Human
cuucugcuuug

SEQ ID NO: 3764521 - RNA, 12 nt, Human
cuucugcuuugu

SEQ ID NO: 3764522 - RNA, 20 nt, Human
cuucugcuuuguugugugcc

SEQ ID NO: 3764523 - RNA, 14 nt, Human
cuucugcuuuucug

SEQ ID NO: 3764524 - RNA, 16 nt, Human
cuucugcuuuucugcc

SEQ ID NO: 3764525 - RNA, 21 nt, Human
cuucugcuuuucugcccuggc

SEQ ID NO: 3764526 - RNA, 22 nt, Human
cuucugcuuuucugcccuggcu

SEQ ID NO: 3764527 - RNA, 18 nt, Human
cuucuggacaggcucugc

SEQ ID NO: 3764528 - RNA, 17 nt, Human
gcucuccgaccagacac

SEQ ID NO: 3764529 - RNA, 20 nt, Human
gcucuccuagguagcccccu

SEQ ID NO: 3764530 - RNA, 17 nt, Human
gcucuccuccaccucaa

SEQ ID NO: 3764531 - RNA, 15 nt, Human
gcucuccucuucuac

SEQ ID NO: 3764532 - RNA, 15 nt, Human
gcucuccucuugcca

SEQ ID NO: 3764533 - RNA, 16 nt, Human
gcucuccugacuuuua

SEQ ID NO: 3764534 - RNA, 14 nt, Human
gcucuccugccaca

SEQ ID NO: 3764535 - RNA, 11 nt, Human
gcucuccuucc

SEQ ID NO: 3764536 - RNA, 20 nt, Human
gcucucuacccagcccaucu

SEQ ID NO: 3764537 - RNA, 19 nt, Human
gcucucuaggccucuccag

SEQ ID NO: 3764538 - RNA, 12 nt, Human
gcucucuccagg

SEQ ID NO: 3764539 - RNA, 15 nt, Human
gcucucugcagccag

SEQ ID NO: 3764540 - RNA, 20 nt, Human
gcucucugcaucuacuccca

SEQ ID NO: 3764541 - RNA, 11 nt, Human
gcucucugcca

SEQ ID NO: 3764542 - RNA, 11 nt, Human
gcucucuggcc

SEQ ID NO: 3764543 - RNA, 15 nt, Human
gcucucuggccuucg

SEQ ID NO: 3764544 - RNA, 18 nt, Human
gcucucuggccuuuuccu

SEQ ID NO: 3764545 - RNA, 18 nt, Human
gcucucuguauaaacauu

SEQ ID NO: 3764546 - RNA, 23 nt, Human
gcucucuguauaaacauuaaaug

SEQ ID NO: 3764547 - RNA, 20 nt, Human
gcucucugugggcuggcagu

SEQ ID NO: 3764548 - RNA, 18 nt, Human
gcucucugugucugagag

SEQ ID NO: 3764549 - RNA, 13 nt, Human
gcucucuuccugc

SEQ ID NO: 3764550 - RNA, 23 nt, Human
gcucucuuccugccccucuuucu

SEQ ID NO: 3764551 - RNA, 22 nt, Human
gcucucuugccgaggagccagg

SEQ ID NO: 3764552 - RNA, 23 nt, Human
gcucucuugccgaggagccaggc

SEQ ID NO: 3764553 - RNA, 14 nt, Human
gcucucuuucuguc

SEQ ID NO: 3764554 - RNA, 14 nt, Human
gcucucuuugcaac

SEQ ID NO: 3764555 - RNA, 17 nt, Human
gcucucuuuuauucugu

SEQ ID NO: 3764556 - RNA, 17 nt, Human
gcucucuuuucuguacu

SEQ ID NO: 3764557 - RNA, 23 nt, Human
gcucucuuuuucuccagggucag

SEQ ID NO: 3764558 - RNA, 14 nt, Human
gcucugacaaagcu

SEQ ID NO: 3764559 - RNA, 19 nt, Human
gcucugacaaagcuucccg

SEQ ID NO: 3764560 - RNA, 21 nt, Human
gcucugaccgaaacagcgcug

SEQ ID NO: 3764561 - RNA, 17 nt, Human
gcucugacuuuacacuc

SEQ ID NO: 3764562 - RNA, 10 nt, Human
gcucugagaa

SEQ ID NO: 3764563 - RNA, 14 nt, Human
gcucugagaagagg

SEQ ID NO: 3764564 - RNA, 23 nt, Human
gcucugagaggcccuggaucagc

SEQ ID NO: 3764565 - RNA, 14 nt, Human
gcucugagcgccuc

SEQ ID NO: 3764566 - RNA, 10 nt, Human
gcucugaggc

SEQ ID NO: 3764567 - RNA, 18 nt, Human
gcucugaggcuuccagag

SEQ ID NO: 3764568 - RNA, 19 nt, Human
gcucugaggcuuccagaga

SEQ ID NO: 3764569 - RNA, 22 nt, Human
gcucugaguaccccugcuuugg

SEQ ID NO: 3764570 - RNA, 21 nt, Human
gcucugauauuccaugaaugu

SEQ ID NO: 3764571 - RNA, 21 nt, Human
gcucugaucauccacugugcc

SEQ ID NO: 3764572 - RNA, 23 nt, Human
gcucugaucccucuacagagcuu

SEQ ID NO: 3764573 - RNA, 11 nt, Human
gcucugaugca

SEQ ID NO: 3764574 - RNA, 20 nt, Human
gcucugaugcaucagaaagg

SEQ ID NO: 3764575 - RNA, 23 nt, Human
gcucugcaagaauugaagcagga

SEQ ID NO: 3764576 - RNA, 23 nt, Human
gcucugcaaugggcacugggaug

SEQ ID NO: 3764577 - RNA, 11 nt, Human
gcucugcacag

SEQ ID NO: 3764578 - RNA, 18 nt, Human
gcucugcacagauggauu

SEQ ID NO: 3764579 - RNA, 12 nt, Human
gcucugccccag

SEQ ID NO: 3764580 - RNA, 13 nt, Human
gcucugccccagu

SEQ ID NO: 3764581 - RNA, 20 nt, Human
gcucugcccucccuccuucc

SEQ ID NO: 3764582 - RNA, 13 nt, Human
gcucugcccugcc

SEQ ID NO: 3764583 - RNA, 15 nt, Human
gcucugcccugcccu

SEQ ID NO: 3764584 - RNA, 13 nt, Human
gcucugcccuugg

SEQ ID NO: 3764585 - RNA, 14 nt, Human
gcucugcccuuggu

SEQ ID NO: 3764586 - RNA, 16 nt, Human
gcucugccgucucugg

SEQ ID NO: 3764587 - RNA, 16 nt, Human
gcucugccugacagag

SEQ ID NO: 3764588 - RNA, 14 nt, Human
gcucugcugacaga

SEQ ID NO: 3764589 - RNA, 17 nt, Human
gcucugcuggccuggcc

SEQ ID NO: 3764590 - RNA, 19 nt, Human
gcucugcuggccuggccgg

SEQ ID NO: 3764591 - RNA, 14 nt, Human
gcucuggaagagag

SEQ ID NO: 3764592 - RNA, 11 nt, Human
gcucuggaccu

SEQ ID NO: 3764593 - RNA, 12 nt, Human
gcucuggaccug

SEQ ID NO: 3764594 - RNA, 22 nt, Human
gcucuggaccugcccccgcauc

SEQ ID NO: 3764595 - RNA, 19 nt, Human
gcucuggagacagccccag

SEQ ID NO: 3764596 - RNA, 16 nt, Human
gcucuggagccaccug

SEQ ID NO: 3764597 - RNA, 22 nt, Human
gcucuggagccaccugucccac

SEQ ID NO: 3764598 - RNA, 17 nt, Human
gcucuggccuccaaguc

SEQ ID NO: 3764599 - RNA, 11 nt, Human
gcucuggcuga

SEQ ID NO: 3764600 - RNA, 17 nt, Human
gcucugggauccugggg

SEQ ID NO: 3764601 - RNA, 23 nt, Human
gcucugggccauucuccacagca

SEQ ID NO: 3764602 - RNA, 19 nt, Human
gcucuggggugggcaguuu

SEQ ID NO: 3764603 - RNA, 20 nt, Human
gcucugguuguuucuguucc

SEQ ID NO: 3764604 - RNA, 21 nt, Human
gcucugguuguuucuguucca

SEQ ID NO: 3764605 - RNA, 19 nt, Human
gcucuguaaucucguuuca

SEQ ID NO: 3764606 - RNA, 23 nt, Human
gcucuguaaucucguuucaaaaa

SEQ ID NO: 3764607 - RNA, 13 nt, Human
gcucuguccccag

SEQ ID NO: 3764608 - RNA, 15 nt, Human
gcucuguccccagcc

SEQ ID NO: 3764609 - RNA, 15 nt, Human
gcucuguccugggag

SEQ ID NO: 3764610 - RNA, 16 nt, Human
gcucuguccugggagu

SEQ ID NO: 3764611 - RNA, 23 nt, Human
gcucugucgcccaggcuggagug

SEQ ID NO: 3764612 - RNA, 22 nt, Human
gcucugugagggugcugacugg

SEQ ID NO: 3764613 - RNA, 14 nt, Human
gcucugugcaggga

SEQ ID NO: 3764614 - RNA, 19 nt, Human
gcucugugcagucacugga

SEQ ID NO: 3764615 - RNA, 19 nt, Human
gcucugugcugacccuccu

SEQ ID NO: 3764616 - RNA, 21 nt, Human
gcucugugcugacccuccugu

SEQ ID NO: 3764617 - RNA, 24 nt, Human
gcucuguggaugccagggccgacc

SEQ ID NO: 3764618 - RNA, 12 nt, Human
gcucugugggcu

SEQ ID NO: 3764619 - RNA, 24 nt, Human
gcucugugggcugcacucugugcc

SEQ ID NO: 3764620 - RNA, 16 nt, Human
gcucugugggugaugg

SEQ ID NO: 3764621 - RNA, 23 nt, Human
gcucugugggugauggggagggg

SEQ ID NO: 3764622 - RNA, 16 nt, Human
gcucuguguugccaug

SEQ ID NO: 3764623 - RNA, 20 nt, Human
gcucuguuaauaaucucaca

SEQ ID NO: 3764624 - RNA, 19 nt, Human
gcucuguucuuccucagcc

SEQ ID NO: 3764625 - RNA, 20 nt, Human
gcucuguucuuccucagcca

SEQ ID NO: 3764626 - RNA, 16 nt, Human
gcucuguugcccaggc

SEQ ID NO: 3764627 - RNA, 17 nt, Human
gcucuguugcccaggcu

SEQ ID NO: 3764628 - RNA, 18 nt, Human
gcucuuagcagcuuccag

SEQ ID NO: 3764629 - RNA, 13 nt, Human
gcucuuauuucau

SEQ ID NO: 3764630 - RNA, 15 nt, Human
gcucuuauuucauca

SEQ ID NO: 3764631 - RNA, 18 nt, Human
gcucuucaggccucccuc

SEQ ID NO: 3764632 - RNA, 18 nt, Human
gcucuuccaggcugggag

SEQ ID NO: 3764633 - RNA, 22 nt, Human
gcucuuccuggacaggccaggu

SEQ ID NO: 3764634 - RNA, 21 nt, Human
gcucuucgcgcccgccccugc

SEQ ID NO: 3764635 - RNA, 16 nt, Human
gcucuucucauuucac

SEQ ID NO: 3764636 - RNA, 22 nt, Human
gcucuucucauuucaccccucc

SEQ ID NO: 3764637 - RNA, 16 nt, Human
gcucuucuccaggcug

SEQ ID NO: 3764638 - RNA, 21 nt, Human
gcucuucuccuuucacaaccu

SEQ ID NO: 3764639 - RNA, 23 nt, Human
gcucuucugcccaauuggaggaa

SEQ ID NO: 3764640 - RNA, 14 nt, Human
gcucuugaacuccu

SEQ ID NO: 3764641 - RNA, 19 nt, Human
gcucuugaacuccugaccu

SEQ ID NO: 3764642 - RNA, 17 nt, Human
gcucuugaugccuggcg

SEQ ID NO: 3764643 - RNA, 20 nt, Human
gcucuugaugccuggcgggg

SEQ ID NO: 3764644 - RNA, 22 nt, Human
gcucuugcauaguaaauguagu

SEQ ID NO: 3764645 - RNA, 12 nt, Human
gcucuugcccuu

SEQ ID NO: 3764646 - RNA, 20 nt, Human
gcucuugcuaaucagugucu

SEQ ID NO: 3764647 - RNA, 15 nt, Human
gcucuuggcuggacc

SEQ ID NO: 3764648 - RNA, 20 nt, Human
gcucuuggcuggacccagcc

SEQ ID NO: 3764649 - RNA, 21 nt, Human
gcucuuggcuggacccagcca

SEQ ID NO: 3764650 - RNA, 23 nt, Human
gcucuuguccucaguccauuuau

SEQ ID NO: 3764651 - RNA, 16 nt, Human
gcucuugugaggaaag

SEQ ID NO: 3764652 - RNA, 20 nt, Human
gcucuugugaggaaagucau

SEQ ID NO: 3764653 - RNA, 23 nt, Human
gcucuuguuuuuauuaauuuaua

SEQ ID NO: 3764654 - RNA, 12 nt, Human
gcucuuucaggg

SEQ ID NO: 3764655 - RNA, 22 nt, Human
gcucuuucccacccagccuggg

SEQ ID NO: 3764656 - RNA, 16 nt, Human
gcucuuuccuugcuca

SEQ ID NO: 3764657 - RNA, 18 nt, Human
gcucuuuccuugcucaac

SEQ ID NO: 3764658 - RNA, 17 nt, Human
gcucuuucuacucugaa

SEQ ID NO: 3764659 - RNA, 17 nt, Human
gcucuuucucugccagu

SEQ ID NO: 3764660 - RNA, 14 nt, Human
gcucuuuggagauc

SEQ ID NO: 3764661 - RNA, 24 nt, Human
gcucuuuggccugaugaccaauuu

SEQ ID NO: 3764662 - RNA, 18 nt, Human
gcucuuuggggucagcca

SEQ ID NO: 3764663 - RNA, 13 nt, Human
gcucuuugguaga

SEQ ID NO: 3764664 - RNA, 22 nt, Human
gcucuuugguagaaaaggcuag

SEQ ID NO: 3764665 - RNA, 16 nt, Human
gcucuuugucagggag

SEQ ID NO: 3764666 - RNA, 18 nt, Human
gcucuuugucagggagug

SEQ ID NO: 3764667 - RNA, 12 nt, Human
gcucuuuuccua

SEQ ID NO: 3764668 - RNA, 21 nt, Human
gcucuuuuuuacucauugaaa

SEQ ID NO: 3764669 - RNA, 22 nt, Human
gcucuuuuuuguuuguuucuuu

SEQ ID NO: 3764670 - RNA, 20 nt, Human
gcugaaaaaucacauccugg

SEQ ID NO: 3764671 - RNA, 21 nt, Human
gcugaaaaccaucuggccugg

SEQ ID NO: 3764672 - RNA, 22 nt, Human
gcugaaaauugccuuucugugu

SEQ ID NO: 3764673 - RNA, 20 nt, Human
gcugaaauacugaggggucu

SEQ ID NO: 3764674 - RNA, 16 nt, Human
gcugaaaugcugcauu

SEQ ID NO: 3764675 - RNA, 17 nt, Human
gcugaaauucuccugga

SEQ ID NO: 3764676 - RNA, 18 nt, Human
gcugaaauucuccuggag

SEQ ID NO: 3764677 - RNA, 16 nt, Human
gcuugaacccaggagg

SEQ ID NO: 3764678 - RNA, 11 nt, Human
gcuugaagcca

SEQ ID NO: 3764679 - RNA, 20 nt, Human
gcuugaagccaaagaaaaau

SEQ ID NO: 3764680 - RNA, 11 nt, Human
gcuugaagcug

SEQ ID NO: 3764681 - RNA, 16 nt, Human
gcuugaaggcccugcu

SEQ ID NO: 3764682 - RNA, 19 nt, Human
gcuugaccaguauaaaauu

SEQ ID NO: 3764683 - RNA, 18 nt, Human
gcuugaccuuuaagagaa

SEQ ID NO: 3764684 - RNA, 17 nt, Human
gcuugacucccaaguuu

SEQ ID NO: 3764685 - RNA, 20 nt, Human
gcuugagaaauauggacacu

SEQ ID NO: 3764686 - RNA, 18 nt, Human
gcuugagccgggccccug

SEQ ID NO: 3764687 - RNA, 21 nt, Human
gcuugagccgggccccugggc

SEQ ID NO: 3764688 - RNA, 16 nt, Human
gcuugaggguugggcu

SEQ ID NO: 3764689 - RNA, 22 nt, Human
gcuugaggguugggcugguguc

SEQ ID NO: 3764690 - RNA, 19 nt, Human
gcuugaguuuggggaaugc

SEQ ID NO: 3764691 - RNA, 20 nt, Human
gcuugauagaaaugccaagc

SEQ ID NO: 3764692 - RNA, 20 nt, Human
gcuugaugaagcaaggaaga

SEQ ID NO: 3764693 - RNA, 14 nt, Human
gcuugauuuuugcc

SEQ ID NO: 3764694 - RNA, 18 nt, Human
gcuugcacucucuuggcu

SEQ ID NO: 3764695 - RNA, 11 nt, Human
gcuugcagaac

SEQ ID NO: 3764696 - RNA, 22 nt, Human
gcuugcagagaugaggccgcca

SEQ ID NO: 3764697 - RNA, 15 nt, Human
gcuugccaaggcaga

SEQ ID NO: 3764698 - RNA, 18 nt, Human
gcuugccaaggcagaggc

SEQ ID NO: 3764699 - RNA, 14 nt, Human
gcuugccacagagc

SEQ ID NO: 3764700 - RNA, 18 nt, Human
gcuugccaucccucccuc

SEQ ID NO: 3764701 - RNA, 18 nt, Human
gcuugccauuuuucaaaa

SEQ ID NO: 3764702 - RNA, 14 nt, Human
gcuugccccggccc

SEQ ID NO: 3764703 - RNA, 19 nt, Human
gcuugcccuggugccucac

SEQ ID NO: 3764704 - RNA, 16 nt, Human
gcuugccgaaacugga

SEQ ID NO: 3764705 - RNA, 19 nt, Human
gcuugccgaaacuggaagu

SEQ ID NO: 3764706 - RNA, 22 nt, Human
gcuugccuagggccugguccau

SEQ ID NO: 3764707 - RNA, 16 nt, Human
gcuugccucggcuccu

SEQ ID NO: 3764708 - RNA, 19 nt, Human
gcuugccucggcuccugcu

SEQ ID NO: 3764709 - RNA, 21 nt, Human
gcuugccucggcuccugcugc

SEQ ID NO: 3764710 - RNA, 23 nt, Human
gcuugccucggcuccugcugcac

SEQ ID NO: 3764711 - RNA, 14 nt, Human
gcuugccugcaggc

SEQ ID NO: 3764712 - RNA, 22 nt, Human
gcuugccugcagggccauggcu

SEQ ID NO: 3764713 - RNA, 14 nt, Human
gcuugccuggagac

SEQ ID NO: 3764714 - RNA, 16 nt, Human
gcuugcuagcuaugug

SEQ ID NO: 3764715 - RNA, 18 nt, Human
gcuugcuauucugucccu

SEQ ID NO: 3764716 - RNA, 13 nt, Human
gcuugcucccugu

SEQ ID NO: 3764717 - RNA, 23 nt, Human
gcuugcucuucagugggagaaaa

SEQ ID NO: 3764718 - RNA, 12 nt, Human
gcuugcugagag

SEQ ID NO: 3764719 - RNA, 12 nt, Human
gcuugcugcacc

SEQ ID NO: 3764720 - RNA, 11 nt, Human
gcuugcuggcc

SEQ ID NO: 3764721 - RNA, 23 nt, Human
gcuugcuuuucaugcaaacucuu

SEQ ID NO: 3764722 - RNA, 19 nt, Human
gcuuggaaagcaucaccuc

SEQ ID NO: 3764723 - RNA, 23 nt, Human
gcuuggaccucgugcuuuaagug

SEQ ID NO: 3764724 - RNA, 15 nt, Human
gcuuggaggaaggaa

SEQ ID NO: 3764725 - RNA, 14 nt, Human
gcuuggcacaugac

SEQ ID NO: 3764726 - RNA, 13 nt, Human
gcuuggcagcuga

SEQ ID NO: 3764727 - RNA, 16 nt, Human
gcuuggcccaggaguu

SEQ ID NO: 3764728 - RNA, 22 nt, Human
gcuuggcccaggaguuuggcca

SEQ ID NO: 3764729 - RNA, 23 nt, Human
gcuuggcccaggaguuuggccag

SEQ ID NO: 3764730 - RNA, 13 nt, Human
gcuuggcccaggg

SEQ ID NO: 3764731 - RNA, 17 nt, Human
gcuuggcccuggcagcc

SEQ ID NO: 3764732 - RNA, 13 nt, Human
gcuuggccugcug

SEQ ID NO: 3764733 - RNA, 14 nt, Human
gcuuggccugcugu

SEQ ID NO: 3764734 - RNA, 16 nt, Human
gcuuggccugcuguga

SEQ ID NO: 3764735 - RNA, 18 nt, Human
gcuuggcgaugccagcca

SEQ ID NO: 3764736 - RNA, 19 nt, Human
gcuuggcgaugccagccaa

SEQ ID NO: 3764737 - RNA, 15 nt, Human
gcuuggcuccaugcu

SEQ ID NO: 3764738 - RNA, 21 nt, Human
gcuugggaagacuccuagcug

SEQ ID NO: 3764739 - RNA, 21 nt, Human
gcuugggagagccccuggggc

SEQ ID NO: 3764740 - RNA, 16 nt, Human
gcuugggcagaucucc

SEQ ID NO: 3764741 - RNA, 17 nt, Human
gcuugggcagcaucccc

SEQ ID NO: 3764742 - RNA, 18 nt, Human
gcuugggcccagcugggc

SEQ ID NO: 3764743 - RNA, 20 nt, Human
gcuugggcccagcugggcuc

SEQ ID NO: 3764744 - RNA, 23 nt, Human
gcuugggcgccgugcugggcagc

SEQ ID NO: 3764745 - RNA, 21 nt, Human
gcuuggggaccagagcugcca

SEQ ID NO: 3764746 - RNA, 19 nt, Human
gcuuggggccaccaaagcu

SEQ ID NO: 3764747 - RNA, 20 nt, Human
gcuuggggccaccaaagcug

SEQ ID NO: 3764748 - RNA, 19 nt, Human
gcuuggguggagaagccau

SEQ ID NO: 3764749 - RNA, 19 nt, Human
gcuuggguguaacaggucu

SEQ ID NO: 3764750 - RNA, 16 nt, Human
gcuugguuccuuccca

SEQ ID NO: 3764751 - RNA, 15 nt, Human
gcuuguaaauaccag

SEQ ID NO: 3764752 - RNA, 17 nt, Human
gcuuguaacuaaaauaa

SEQ ID NO: 3764753 - RNA, 16 nt, Human
gcuuguaacuccacca

SEQ ID NO: 3764754 - RNA, 22 nt, Human
gcuuguaccacuuuugcaaaua

SEQ ID NO: 3764755 - RNA, 17 nt, Human
gcuuguagaauuguuau

SEQ ID NO: 3764756 - RNA, 15 nt, Human
gcuuguagccagccg

SEQ ID NO: 3764757 - RNA, 17 nt, Human
gcuuguagccagccggg

SEQ ID NO: 3764758 - RNA, 14 nt, Human
gcuuguaggagcug

SEQ ID NO: 3764759 - RNA, 18 nt, Human
gcuugucauuaccagacg

SEQ ID NO: 3764760 - RNA, 15 nt, Human
gcuuguccagcgccu

SEQ ID NO: 3764761 - RNA, 22 nt, Human
gcuuguccccuccucacucccu

SEQ ID NO: 3764762 - RNA, 15 nt, Human
gcuugucccugccca

SEQ ID NO: 3764763 - RNA, 13 nt, Human
gcuugugaacaga

SEQ ID NO: 3764764 - RNA, 20 nt, Human
gcuugugaauguauuuuucu

SEQ ID NO: 3764765 - RNA, 14 nt, Human
gcuugugcacaauu

SEQ ID NO: 3764766 - RNA, 23 nt, Human
gcuuguggauugaggguaggagg

SEQ ID NO: 3764767 - RNA, 18 nt, Human
gcuuguggggacccaggc

SEQ ID NO: 3764768 - RNA, 17 nt, Human
gcuuguggggccuggga

SEQ ID NO: 3764769 - RNA, 19 nt, Human
gcuuguguauccauuauca

SEQ ID NO: 3764770 - RNA, 20 nt, Human
gcuuguguauccauuaucau

SEQ ID NO: 3764771 - RNA, 22 nt, Human
gcuuguguauccauuaucaugu

SEQ ID NO: 3764772 - RNA, 14 nt, Human
gcuuguguguuuca

SEQ ID NO: 3764773 - RNA, 16 nt, Human
gcuuguguguuucacu

SEQ ID NO: 3764774 - RNA, 19 nt, Human
gcuuguguguuucacuuuu

SEQ ID NO: 3764775 - RNA, 20 nt, Human
gcuuguguguuucacuuuua

SEQ ID NO: 3764776 - RNA, 14 nt, Human
gcuuguuaaauuuu

SEQ ID NO: 3764777 - RNA, 23 nt, Human
gcuuguuaaugcuuucugaagcu

SEQ ID NO: 3764778 - RNA, 18 nt, Human
gcuuguucaucauccaga

SEQ ID NO: 3764779 - RNA, 21 nt, Human
gcuuguucaucauccagaugu

SEQ ID NO: 3764780 - RNA, 19 nt, Human
gcuuguuccaaugccacau

SEQ ID NO: 3764781 - RNA, 13 nt, Human
gcuuguugacaga

SEQ ID NO: 3764782 - RNA, 20 nt, Human
gcuuguugggauuccugacc

SEQ ID NO: 3764783 - RNA, 13 nt, Human
gcuuguugugcuu

SEQ ID NO: 3764784 - RNA, 13 nt, Human
gcuuguuuacagc

SEQ ID NO: 3764785 - RNA, 20 nt, Human
gcuuguuuacagcacuacuc

SEQ ID NO: 3764786 - RNA, 15 nt, Human
gcuuguuuacaugcu

SEQ ID NO: 3764787 - RNA, 16 nt, Human
gcuuguuuacaugcuu

SEQ ID NO: 3764788 - RNA, 23 nt, Human
gcuuguuuccuagcacacacuuu

SEQ ID NO: 3764789 - RNA, 20 nt, Human
gcuuguuuuauaaaauuuug

SEQ ID NO: 3764790 - RNA, 23 nt, Human
gcuuguuuucuugccaaugaggu

SEQ ID NO: 3764791 - RNA, 16 nt, Human
gcuuguuuuggacuuu

SEQ ID NO: 3764792 - RNA, 15 nt, Human
gcuuuaaaaacuauu

SEQ ID NO: 3764793 - RNA, 20 nt, Human
gcuuuaaaaagggaagaaac

SEQ ID NO: 3764794 - RNA, 22 nt, Human
gcuuuaaaaagggaagaaacug

SEQ ID NO: 3764795 - RNA, 13 nt, Human
gcuuuaaacaaau

SEQ ID NO: 3764796 - RNA, 14 nt, Human
gcuuuaagccuuca

SEQ ID NO: 3764797 - RNA, 13 nt, Human
gcuuuaauaaugu

SEQ ID NO: 3764798 - RNA, 21 nt, Human
gcuuuaauauaaaugcaaaua

SEQ ID NO: 3764799 - RNA, 20 nt, Human
gcuuuaauaucaucaguauu

SEQ ID NO: 3764800 - RNA, 19 nt, Human
gcuuuaauuccaugaaugu

SEQ ID NO: 3764801 - RNA, 16 nt, Human
gcuuuaauugugaauu

SEQ ID NO: 3764802 - RNA, 16 nt, Human
gcuuuacacacacaga

SEQ ID NO: 3764803 - RNA, 19 nt, Human
gcuuuacauacuuuaucaa

SEQ ID NO: 3764804 - RNA, 22 nt, Human
gcuuuaccaauugaaguaaaau

SEQ ID NO: 3764805 - RNA, 17 nt, Human
gcuuuaccuuuucaggg

SEQ ID NO: 3764806 - RNA, 18 nt, Human
gcuuuaccuuuucagggc

SEQ ID NO: 3764807 - RNA, 19 nt, Human
gcuuuacuccguaacagau

SEQ ID NO: 3764808 - RNA, 23 nt, Human
gcuuuacuggggcuggggaagga

SEQ ID NO: 3764809 - RNA, 16 nt, Human
gcuuuacuguuuguua

SEQ ID NO: 3764810 - RNA, 18 nt, Human
gcuuuacuuagcuuauca

SEQ ID NO: 3764811 - RNA, 20 nt, Human
gcuuuagaaagguuuugagc

SEQ ID NO: 3764812 - RNA, 14 nt, Human
gcuuuagacuugaa

SEQ ID NO: 3764813 - RNA, 18 nt, Human
gcuuuagacuugaaaaga

SEQ ID NO: 3764814 - RNA, 12 nt, Human
gcuuuagcuuau

SEQ ID NO: 3764815 - RNA, 14 nt, Human
gcuuuauaaauaaa

SEQ ID NO: 3764816 - RNA, 16 nt, Human
gcuuuauauauggaca

SEQ ID NO: 3764817 - RNA, 14 nt, Human
gcuuuaucaaaggg

SEQ ID NO: 3764818 - RNA, 19 nt, Human
gcuuuauccucuuuagagu

SEQ ID NO: 3764819 - RNA, 11 nt, Human
gcuuuaugauu

SEQ ID NO: 3764820 - RNA, 13 nt, Human
gcuuuaugcugaa

SEQ ID NO: 3764821 - RNA, 22 nt, Human
gcuuuaugguccuaaaagcaaa

SEQ ID NO: 3764822 - RNA, 15 nt, Human
gcuuuauguaauaau

SEQ ID NO: 3764823 - RNA, 21 nt, Human
gcuuuauuuuuuaaguauuua

SEQ ID NO: 3764824 - RNA, 23 nt, Human
gcuuucaaaggagcucgaaggau

SEQ ID NO: 3764825 - RNA, 20 nt, Human
gcuuucacggaaacucccga

SEQ ID NO: 3764826 - RNA, 17 nt, Human
gcuuucacuauuuccuu

SEQ ID NO: 3764827 - RNA, 19 nt, Human
gcuuucacuauuuccuuua

SEQ ID NO: 3764828 - RNA, 18 nt, Human
gcuuucagaaaacgggaa

SEQ ID NO: 3764829 - RNA, 19 nt, Human
gcuuucagaaaacgggaag

SEQ ID NO: 3764830 - RNA, 15 nt, Human
gcuuucagaagugcc

SEQ ID NO: 3764831 - RNA, 13 nt, Human
gcuuucagagccu

SEQ ID NO: 3764832 - RNA, 15 nt, Human
gcuuucagccucugg

SEQ ID NO: 3764833 - RNA, 18 nt, Human
gcuuucagggaggcccug

SEQ ID NO: 3764834 - RNA, 12 nt, Human
gcuuucaguauu

SEQ ID NO: 3764835 - RNA, 18 nt, Human
gcuuucaugauuagcaag

SEQ ID NO: 3764836 - RNA, 15 nt, Human
gcuuucauguaaacu

SEQ ID NO: 3764837 - RNA, 21 nt, Human
gcuuucauuuucucucaggug

SEQ ID NO: 3764838 - RNA, 19 nt, Human
gcuuuccaaaccuuaucuc

SEQ ID NO: 3764839 - RNA, 22 nt, Human
gcuuuccaaaccuuaucuccac

SEQ ID NO: 3764840 - RNA, 18 nt, Human
gcuuuccacaccuggcac

SEQ ID NO: 3764841 - RNA, 11 nt, Human
gcuuuccagcu

SEQ ID NO: 3764842 - RNA, 20 nt, Human
gcuuuccauauuuuuuuccu

SEQ ID NO: 3764843 - RNA, 21 nt, Human
gcuuucccacuucccacccug

SEQ ID NO: 3764844 - RNA, 17 nt, Human
gcuuuccccugugggga

SEQ ID NO: 3764845 - RNA, 15 nt, Human
gcuuucccuuggaua

SEQ ID NO: 3764846 - RNA, 16 nt, Human
gcuuuccucuuccuga

SEQ ID NO: 3764847 - RNA, 17 nt, Human
gcuuuccugccccaggc

SEQ ID NO: 3764848 - RNA, 14 nt, Human
gcuuuccugugcca

SEQ ID NO: 3764849 - RNA, 22 nt, Human
gcuuuccuuguggcagaggaug

SEQ ID NO: 3764850 - RNA, 23 nt, Human
gcuuuccuuuuuuaaaaaugcaa

SEQ ID NO: 3764851 - RNA, 13 nt, Human
gcuuucguccaca

SEQ ID NO: 3764852 - RNA, 19 nt, Human
gcuuucguguaaauuaugu

SEQ ID NO: 3764853 - RNA, 18 nt, Human
gcuuucucugcuucagcu

SEQ ID NO: 3764854 - RNA, 13 nt, Human
gcuuucucuucau

SEQ ID NO: 3764855 - RNA, 19 nt, Human
gcuuucugaacagcuggug

SEQ ID NO: 3764856 - RNA, 13 nt, Human
gcuuucugccacc

SEQ ID NO: 3764857 - RNA, 13 nt, Human
gcuuucuggagag

SEQ ID NO: 3764858 - RNA, 23 nt, Human
gcuuucuggggccuagcgaucuc

SEQ ID NO: 3764859 - RNA, 23 nt, Human
gcuuucuguugucauugcuguug

SEQ ID NO: 3764860 - RNA, 14 nt, Human
gcuuucuugcuggu

SEQ ID NO: 3764861 - RNA, 16 nt, Human
gcuuugaauaaaugug

SEQ ID NO: 3764862 - RNA, 20 nt, Human
gcuuugacucaggagccugu

SEQ ID NO: 3764863 - RNA, 15 nt, Human
gcuuugaguccccca

SEQ ID NO: 3764864 - RNA, 14 nt, Human
gcuuugaucccuga

SEQ ID NO: 3764865 - RNA, 14 nt, Human
gcuuugaucccuuc

SEQ ID NO: 3764866 - RNA, 15 nt, Human
gcuuugauguuccuu

SEQ ID NO: 3764867 - RNA, 19 nt, Human
gcuuugauguuccuuccag

SEQ ID NO: 3764868 - RNA, 15 nt, Human
gcuuugauucauagu

SEQ ID NO: 3764869 - RNA, 16 nt, Human
gcuuugauuccaucuc

SEQ ID NO: 3764870 - RNA, 20 nt, Human
gcuuugauuccaucuccuug

SEQ ID NO: 3764871 - RNA, 21 nt, Human
gcuuugauuuagauugaguaa

SEQ ID NO: 3764872 - RNA, 13 nt, Human
gcuuugcacuuuu

SEQ ID NO: 3764873 - RNA, 19 nt, Human
gcuuugccagcugcugcug

SEQ ID NO: 3764874 - RNA, 23 nt, Human
gcuuugcccaacaccagccccug

SEQ ID NO: 3764875 - RNA, 22 nt, Human
gcuuugccuuccacgcugucuc

SEQ ID NO: 3764876 - RNA, 16 nt, Human
gcuuugcuaccaaagc

SEQ ID NO: 3764877 - RNA, 12 nt, Human
gcuuugcucugc

SEQ ID NO: 3764878 - RNA, 13 nt, Human
gcuuugcucugcc

SEQ ID NO: 3764879 - RNA, 16 nt, Human
gcuuugcugcuacagg

SEQ ID NO: 3764880 - RNA, 19 nt, Human
gcuuugcuuucugcucagc

SEQ ID NO: 3764881 - RNA, 14 nt, Human
gcuuuggaagccau

SEQ ID NO: 3764882 - RNA, 14 nt, Human
gcuuuggaaguuuu

SEQ ID NO: 3764883 - RNA, 18 nt, Human
gcuuuggacccaaggaaa

SEQ ID NO: 3764884 - RNA, 18 nt, Human
gcuuuggacgcacacagc

SEQ ID NO: 3764885 - RNA, 18 nt, Human
gcuuugggcugcccuggu

SEQ ID NO: 3764886 - RNA, 18 nt, Human
gcuuuggggugucuuuuu

SEQ ID NO: 3764887 - RNA, 15 nt, Human
gcuuuguaggugucu

SEQ ID NO: 3764888 - RNA, 12 nt, Human
gcuuuguauaga

SEQ ID NO: 3764889 - RNA, 16 nt, Human
gcuuugucccacagcu

SEQ ID NO: 3764890 - RNA, 19 nt, Human
gcuuugucccacagcuugg

SEQ ID NO: 3764891 - RNA, 19 nt, Human
gcuuugucuccucuauccu

SEQ ID NO: 3764892 - RNA, 14 nt, Human
gcuuugucugucgu

SEQ ID NO: 3764893 - RNA, 16 nt, Human
gcuuugugugauugaa

SEQ ID NO: 3764894 - RNA, 13 nt, Human
gcuuuguguugua

SEQ ID NO: 3764895 - RNA, 22 nt, Human
gcuuuguguuguaauucuucag

SEQ ID NO: 3764896 - RNA, 13 nt, Human
gcuuuguguuugg

SEQ ID NO: 3764897 - RNA, 19 nt, Human
gcuuuguguuugguuuaca

SEQ ID NO: 3764898 - RNA, 20 nt, Human
gcuuuguguuugguuuacau

SEQ ID NO: 3764899 - RNA, 23 nt, Human
gcuuuguuaaaaaaaaaaagauu

SEQ ID NO: 3764900 - RNA, 15 nt, Human
gcuuuguugugugcc

SEQ ID NO: 3764901 - RNA, 17 nt, Human
gcuuuguugugugccuc

SEQ ID NO: 3764902 - RNA, 23 nt, Human
gcuuuguugugugccucuagcug

SEQ ID NO: 3764903 - RNA, 21 nt, Human
gcuuuguuuguugucagcuga

SEQ ID NO: 3764904 - RNA, 23 nt, Human
gcuuuguuuugcacacuuugcca

SEQ ID NO: 3764905 - RNA, 20 nt, Human
gcuuuuaaaacuacuuagca

SEQ ID NO: 3764906 - RNA, 23 nt, Human
gcuuuuaacuuuauaaauccagu

SEQ ID NO: 3764907 - RNA, 18 nt, Human
gcuuuuaaggaaaggcaa

SEQ ID NO: 3764908 - RNA, 20 nt, Human
gcuuuuaaugaaaaggaauc

SEQ ID NO: 3764909 - RNA, 17 nt, Human
gcuuuuacccuuuuucu

SEQ ID NO: 3764910 - RNA, 16 nt, Human
gcuuuuaccuuuuucu

SEQ ID NO: 3764911 - RNA, 19 nt, Human
gcuuuuacugaacuuucuu

SEQ ID NO: 3764912 - RNA, 21 nt, Human
gcuuuuacugaagccuuucuu

SEQ ID NO: 3764913 - RNA, 14 nt, Human
gcuuuuacuuaaac

SEQ ID NO: 3764914 - RNA, 12 nt, Human
gcuuuuagaaaa

SEQ ID NO: 3764915 - RNA, 22 nt, Human
gcuuuuaguacccaccugagcu

SEQ ID NO: 3764916 - RNA, 22 nt, Human
gcuuuuauagaggcuagcuucu

SEQ ID NO: 3764917 - RNA, 20 nt, Human
gcuuuuaugugaaacauguu

SEQ ID NO: 3764918 - RNA, 19 nt, Human
gcuuuuauuaaugcacuuu

SEQ ID NO: 3764919 - RNA, 22 nt, Human
gcuuuuauuaaugcacuuucua

SEQ ID NO: 3764920 - RNA, 15 nt, Human
gcuuuuauuuugaaa

SEQ ID NO: 3764921 - RNA, 22 nt, Human
gcuuuuauuuugaaaagcuucu

SEQ ID NO: 3764922 - RNA, 14 nt, Human
gcuuuucaaacaaa

SEQ ID NO: 3764923 - RNA, 13 nt, Human
gcuuuucacugcu

SEQ ID NO: 3764924 - RNA, 22 nt, Human
gcuuuucacugcuggcugccuu

SEQ ID NO: 3764925 - RNA, 23 nt, Human
gcuuuucagauuguggaauguug

SEQ ID NO: 3764926 - RNA, 15 nt, Human
gcuuuucccucuuuu

SEQ ID NO: 3764927 - RNA, 20 nt, Human
gcuuuucccuuuuuuuaagu

SEQ ID NO: 3764928 - RNA, 22 nt, Human
gcuuuuccuauuuguuuucaug

SEQ ID NO: 3764929 - RNA, 20 nt, Human
gcuuuuccuuggggcaggca

SEQ ID NO: 3764930 - RNA, 23 nt, Human
gcuuuuccuuggggcaggcagug

SEQ ID NO: 3764931 - RNA, 11 nt, Human
gcuuuucugau

SEQ ID NO: 3764932 - RNA, 15 nt, Human
gcuuuucugcccugg

SEQ ID NO: 3764933 - RNA, 18 nt, Human
gcuuuucugcccuggcug

SEQ ID NO: 3764934 - RNA, 14 nt, Human
gcuuuucuguauuu

SEQ ID NO: 3764935 - RNA, 18 nt, Human
gcuuuucuguauuuuauu

SEQ ID NO: 3764936 - RNA, 18 nt, Human
gcuuuucuguuuccugua

SEQ ID NO: 3764937 - RNA, 17 nt, Human
gcuuuucuuucuaccaa

SEQ ID NO: 3764938 - RNA, 13 nt, Human
gcuuuugccauua

SEQ ID NO: 3764939 - RNA, 23 nt, Human
gcuuuugcgguucaggaaaauug

SEQ ID NO: 3764940 - RNA, 22 nt, Human
gcuuuugcuggucacugccaug

SEQ ID NO: 3764941 - RNA, 21 nt, Human
gcuuuuggcggggaggaggaa

SEQ ID NO: 3764942 - RNA, 19 nt, Human
gcuuuugugauggagugcu

SEQ ID NO: 3764943 - RNA, 19 nt, Human
gcuuuugugcauuaucuag

SEQ ID NO: 3764944 - RNA, 23 nt, Human
gcuuuugugggggacuguaaguu

SEQ ID NO: 3764945 - RNA, 14 nt, Human
gcuuuuguuuugcu

SEQ ID NO: 3764946 - RNA, 15 nt, Human
gcuuuuuaauauuga

SEQ ID NO: 3764947 - RNA, 20 nt, Human
gcuuuuuaauuguuguuucu

SEQ ID NO: 3764948 - RNA, 21 nt, Human
gcuuuuuaauuguuguuucuu

SEQ ID NO: 3764949 - RNA, 22 nt, Human
gcuuuuuaauuguuguuucuuu

SEQ ID NO: 3764950 - RNA, 13 nt, Human
gcuuuuuauaaaa

SEQ ID NO: 3764951 - RNA, 15 nt, Human
gcuuuuuauuucugc

SEQ ID NO: 3764952 - RNA, 15 nt, Human
gcuuuuucacaguca

SEQ ID NO: 3764953 - RNA, 13 nt, Human
gcuuuuuccagag

SEQ ID NO: 3764954 - RNA, 14 nt, Human
gcuuuuugaaaacc

SEQ ID NO: 3764955 - RNA, 13 nt, Human
gcuuuuugaaaug

SEQ ID NO: 3764956 - RNA, 20 nt, Human
cuugccucagcuuccccagu

SEQ ID NO: 3764957 - RNA, 15 nt, Human
cuugccuccaggugc

SEQ ID NO: 3764958 - RNA, 16 nt, Human
cuugccuccaggugca

SEQ ID NO: 3764959 - RNA, 18 nt, Human
cuugccuccaggugcaga

SEQ ID NO: 3764960 - RNA, 23 nt, Human
cuugccuccaggugcagagguac

SEQ ID NO: 3764961 - RNA, 12 nt, Human
cuugccucccca

SEQ ID NO: 3764962 - RNA, 13 nt, Human
cuugccuccugga

SEQ ID NO: 3764963 - RNA, 15 nt, Human
cuugccucggcuccu

SEQ ID NO: 3764964 - RNA, 16 nt, Human
cuugccucggcuccug

SEQ ID NO: 3764965 - RNA, 20 nt, Human
cuugccucggcuccugcugc

SEQ ID NO: 3764966 - RNA, 21 nt, Human
cuugccucggcuccugcugca

SEQ ID NO: 3764967 - RNA, 24 nt, Human
cuugccucugcacacccuccagag

SEQ ID NO: 3764968 - RNA, 15 nt, Human
cuugccucugugcug

SEQ ID NO: 3764969 - RNA, 19 nt, Human
cuugccucugugcugugug

SEQ ID NO: 3764970 - RNA, 16 nt, Human
cuugccucuuccuuga

SEQ ID NO: 3764971 - RNA, 20 nt, Human
cuugccugaacauccuuccu

SEQ ID NO: 3764972 - RNA, 14 nt, Human
cuugccugauauaa

SEQ ID NO: 3764973 - RNA, 16 nt, Human
cuugccugcacaaacu

SEQ ID NO: 3764974 - RNA, 12 nt, Human
cuugccugcagg

SEQ ID NO: 3764975 - RNA, 13 nt, Human
cuugccugcaggc

SEQ ID NO: 3764976 - RNA, 15 nt, Human
cuugccugccuuucc

SEQ ID NO: 3764977 - RNA, 15 nt, Human
cuugccugguacagu

SEQ ID NO: 3764978 - RNA, 20 nt, Human
cuugccuguuucccaggccc

SEQ ID NO: 3764979 - RNA, 18 nt, Human
cuugccuuauuagagugu

SEQ ID NO: 3764980 - RNA, 20 nt, Human
cuugccuuauuagagugucu

SEQ ID NO: 3764981 - RNA, 21 nt, Human
cuugccuuccuaagccugugg

SEQ ID NO: 3764982 - RNA, 14 nt, Human
cuugccuuugaaga

SEQ ID NO: 3764983 - RNA, 22 nt, Human
cuugccuuuuucauuauuuuau

SEQ ID NO: 3764984 - RNA, 14 nt, Human
cuugcgaauccaag

SEQ ID NO: 3764985 - RNA, 20 nt, Human
cuugcgguuccggcauggac

SEQ ID NO: 3764986 - RNA, 15 nt, Human
cuugcuaaucagugu

SEQ ID NO: 3764987 - RNA, 21 nt, Human
cuugcuaaucagugucucaca

SEQ ID NO: 3764988 - RNA, 22 nt, Human
cuugcuaaucagugucucacac

SEQ ID NO: 3764989 - RNA, 17 nt, Human
cuugcuaauuuucucaa

SEQ ID NO: 3764990 - RNA, 22 nt, Human
cuugcuaccacggccuccuuuc

SEQ ID NO: 3764991 - RNA, 14 nt, Human
cuugcuauucuguc

SEQ ID NO: 3764992 - RNA, 17 nt, Human
cuugcuauucugucccu

SEQ ID NO: 3764993 - RNA, 15 nt, Human
cuugcucccuguguc

SEQ ID NO: 3764994 - RNA, 20 nt, Human
cuugcuccuggccuugcuga

SEQ ID NO: 3764995 - RNA, 22 nt, Human
cuugcucuaucucacagcacac

SEQ ID NO: 3764996 - RNA, 15 nt, Human
cuugcucucccucuu

SEQ ID NO: 3764997 - RNA, 12 nt, Human
cuugcucugcug

SEQ ID NO: 3764998 - RNA, 15 nt, Human
cuugcucuggaccug

SEQ ID NO: 3764999 - RNA, 16 nt, Human
cuugcucuggaccugc

SEQ ID NO: 3765000 - RNA, 18 nt, Human
cuugcucuggaccugccc

SEQ ID NO: 3765001 - RNA, 15 nt, Human
cuugcucuguaaucu

SEQ ID NO: 3765002 - RNA, 19 nt, Human
cuugcucuguuuguggggu

SEQ ID NO: 3765003 - RNA, 20 nt, Human
cuugcugcaagcacagcccu

SEQ ID NO: 3765004 - RNA, 21 nt, Human
cuugcugcaagcacagcccuu

SEQ ID NO: 3765005 - RNA, 12 nt, Human
cuugcugcaccc

SEQ ID NO: 3765006 - RNA, 16 nt, Human
cuugcugcacucuugc

SEQ ID NO: 3765007 - RNA, 16 nt, Human
cuugcugcccugcccc

SEQ ID NO: 3765008 - RNA, 20 nt, Human
cuugcugcccugccccaagu

SEQ ID NO: 3765009 - RNA, 11 nt, Human
cuugcugccuc

SEQ ID NO: 3765010 - RNA, 13 nt, Human
cuugcugccucgg

SEQ ID NO: 3765011 - RNA, 20 nt, Human
cuugcugccuucuggauucu

SEQ ID NO: 3765012 - RNA, 14 nt, Human
cuugcugcuagaac

SEQ ID NO: 3765013 - RNA, 17 nt, Human
cuugcugcuagaacuuu

SEQ ID NO: 3765014 - RNA, 17 nt, Human
cuugcugcugauuuaaa

SEQ ID NO: 3765015 - RNA, 22 nt, Human
cuugcuggacggggacugggga

SEQ ID NO: 3765016 - RNA, 16 nt, Human
ggaaggauuguaaaaa

SEQ ID NO: 3765017 - RNA, 17 nt, Human
ggaaggcagacagcagg

SEQ ID NO: 3765018 - RNA, 22 nt, Human
ggaaggcagacagcaggcagcg

SEQ ID NO: 3765019 - RNA, 14 nt, Human
ggaaggcaggcagg

SEQ ID NO: 3765020 - RNA, 17 nt, Human
ggaaggcagggaggagg

SEQ ID NO: 3765021 - RNA, 22 nt, Human
ggaaggccaaggggagucaccu

SEQ ID NO: 3765022 - RNA, 15 nt, Human
ggaaggcccagcacc

SEQ ID NO: 3765023 - RNA, 12 nt, Human
ggaaggccugac

SEQ ID NO: 3765024 - RNA, 19 nt, Human
ggaaggcuacuucggggcu

SEQ ID NO: 3765025 - RNA, 21 nt, Human
ggaaggcucuucuccccagag

SEQ ID NO: 3765026 - RNA, 19 nt, Human
ggaaggcuuguugugcuuu

SEQ ID NO: 3765027 - RNA, 15 nt, Human
ggaagggaccaaggc

SEQ ID NO: 3765028 - RNA, 16 nt, Human
ggaagggaccaaggca

SEQ ID NO: 3765029 - RNA, 16 nt, Human
ggaagggacuaggagc

SEQ ID NO: 3765030 - RNA, 15 nt, Human
ggaagggagccaagg

SEQ ID NO: 3765031 - RNA, 15 nt, Human
ggaagggcaggaagg

SEQ ID NO: 3765032 - RNA, 21 nt, Human
ggaaggggcccgugggaguca

SEQ ID NO: 3765033 - RNA, 20 nt, Human
ggaaggggcuggacuggcug

SEQ ID NO: 3765034 - RNA, 21 nt, Human
ggaagggggggcuacauuaua

SEQ ID NO: 3765035 - RNA, 21 nt, Human
ggaagggguuccucaaauuuu

SEQ ID NO: 3765036 - RNA, 22 nt, Human
ggaagggguuccucaaauuuuu

SEQ ID NO: 3765037 - RNA, 19 nt, Human
ggaaggugggcgggcaggg

SEQ ID NO: 3765038 - RNA, 18 nt, Human
ggaagguuuguauauugu

SEQ ID NO: 3765039 - RNA, 23 nt, Human
ggaaguaacaguaacgcagggga

SEQ ID NO: 3765040 - RNA, 18 nt, Human
ggaaguacaugaauacaa

SEQ ID NO: 3765041 - RNA, 12 nt, Human
ggaaguacugga

SEQ ID NO: 3765042 - RNA, 15 nt, Human
ggaaguagcacaggc

SEQ ID NO: 3765043 - RNA, 17 nt, Human
ggaaguagcacaggcug

SEQ ID NO: 3765044 - RNA, 18 nt, Human
ggaaguagcacaggcuga

SEQ ID NO: 3765045 - RNA, 18 nt, Human
ggaaguauguauauuaaa

SEQ ID NO: 3765046 - RNA, 18 nt, Human
ggaaguccccaggcccca

SEQ ID NO: 3765047 - RNA, 23 nt, Human
ggaaguccccaggccccaggaag

SEQ ID NO: 3765048 - RNA, 16 nt, Human
ggaaguccggccccag

SEQ ID NO: 3765049 - RNA, 21 nt, Human
ggaagucguccuuacuccugu

SEQ ID NO: 3765050 - RNA, 23 nt, Human
ggaagucguccuuacuccugugg

SEQ ID NO: 3765051 - RNA, 14 nt, Human
ggaagucuaggagc

SEQ ID NO: 3765052 - RNA, 22 nt, Human
ggaagucucaaauaauauuuuu

SEQ ID NO: 3765053 - RNA, 17 nt, Human
ggaagugacaaggcccc

SEQ ID NO: 3765054 - RNA, 19 nt, Human
ggaagugacaaggccccag

SEQ ID NO: 3765055 - RNA, 18 nt, Human
ggaagugcuaauuuugaa

SEQ ID NO: 3765056 - RNA, 22 nt, Human
ggaaguggcugagucaggacuu

SEQ ID NO: 3765057 - RNA, 11 nt, Human
ggaaguuuuca

SEQ ID NO: 3765058 - RNA, 18 nt, Human
ggaaguuuugcauuuaug

SEQ ID NO: 3765059 - RNA, 14 nt, Human
ggaauaaaauacua

SEQ ID NO: 3765060 - RNA, 12 nt, Human
ggaauaaauaug

SEQ ID NO: 3765061 - RNA, 18 nt, Human
ggaauaacauguaauuaa

SEQ ID NO: 3765062 - RNA, 22 nt, Human
ggaauaaccuuccauacauuuu

SEQ ID NO: 3765063 - RNA, 13 nt, Human
ggaauaauaccua

SEQ ID NO: 3765064 - RNA, 15 nt, Human
ggaauaauagaagaa

SEQ ID NO: 3765065 - RNA, 13 nt, Human
ggaauaauuauuu

SEQ ID NO: 3765066 - RNA, 14 nt, Human
ggaauaauugcuuu

SEQ ID NO: 3765067 - RNA, 17 nt, Human
ggaauaguauccuccag

SEQ ID NO: 3765068 - RNA, 19 nt, Human
ggaauaguauccuccaggu

SEQ ID NO: 3765069 - RNA, 20 nt, Human
ggaauaguauccuccagguu

SEQ ID NO: 3765070 - RNA, 16 nt, Human
ggaauaguugagcccc

SEQ ID NO: 3765071 - RNA, 23 nt, Human
ggaauauaaggaaagcaauaaau

SEQ ID NO: 3765072 - RNA, 16 nt, Human
ggaauauauaaccagu

SEQ ID NO: 3765073 - RNA, 17 nt, Human
ggaauaugggagaaaua

SEQ ID NO: 3765074 - RNA, 15 nt, Human
ggaauauuaaaaaac

SEQ ID NO: 3765075 - RNA, 15 nt, Human
ggaauauuuauaaau

SEQ ID NO: 3765076 - RNA, 15 nt, Human
ggaauauuugaaucu

SEQ ID NO: 3765077 - RNA, 13 nt, Human
ggaauauuuuauu

SEQ ID NO: 3765078 - RNA, 14 nt, Human
ggaaucaaaaauug

SEQ ID NO: 3765079 - RNA, 16 nt, Human
ggaaucaacagggcag

SEQ ID NO: 3765080 - RNA, 23 nt, Human
ggaaucaagagcugcccuccuug

SEQ ID NO: 3765081 - RNA, 20 nt, Human
ggaaucacucuuguggaugu

SEQ ID NO: 3765082 - RNA, 13 nt, Human
ggaaucagcuucu

SEQ ID NO: 3765083 - RNA, 14 nt, Human
ggaaucagcuucua

SEQ ID NO: 3765084 - RNA, 15 nt, Human
ggaaucaugucaggc

SEQ ID NO: 3765085 - RNA, 21 nt, Human
ggaaucaugucaggccugugu

SEQ ID NO: 3765086 - RNA, 17 nt, Human
ggaaucauuguccagag

SEQ ID NO: 3765087 - RNA, 24 nt, Human
ggaaucauuucuauuucuccucca

SEQ ID NO: 3765088 - RNA, 16 nt, Human
ggaauccagacccggc

SEQ ID NO: 3765089 - RNA, 23 nt, Human
ggaauccuauauagaaugcugca

SEQ ID NO: 3765090 - RNA, 14 nt, Human
ggaauccuccucca

SEQ ID NO: 3765091 - RNA, 20 nt, Human
ggaaucgaggaaccagagcc

SEQ ID NO: 3765092 - RNA, 22 nt, Human
ggaaucuaauauccccaaauua

SEQ ID NO: 3765093 - RNA, 18 nt, Human
ggaaucuagaagaaauga

SEQ ID NO: 3765094 - RNA, 18 nt, Human
ggaaucuucucuuugaca

SEQ ID NO: 3765095 - RNA, 23 nt, Human
ggaaugaacuuauuaauauuuuu

SEQ ID NO: 3765096 - RNA, 12 nt, Human
ggaaugaagcuu

SEQ ID NO: 3765097 - RNA, 16 nt, Human
ggaaugaagcuugugu

SEQ ID NO: 3765098 - RNA, 20 nt, Human
ggaaugagauuaauuccuuu

SEQ ID NO: 3765099 - RNA, 17 nt, Human
ggaaugagcccagagaa

SEQ ID NO: 3765100 - RNA, 17 nt, Human
ggaaugagcugaaggug

SEQ ID NO: 3765101 - RNA, 20 nt, Human
ggaaugaggcuugcugagag

SEQ ID NO: 3765102 - RNA, 20 nt, Human
ggaaugauauaagguuuuuu

SEQ ID NO: 3765103 - RNA, 18 nt, Human
ggaaugauaugcauuuga

SEQ ID NO: 3765104 - RNA, 12 nt, Human
ggaaugcagugg

SEQ ID NO: 3765105 - RNA, 16 nt, Human
ggaaugcggcaagaag

SEQ ID NO: 3765106 - RNA, 23 nt, Human
ggaaugcggccgcauucccugag

SEQ ID NO: 3765107 - RNA, 18 nt, Human
ggaaugcuugaaaaaugu

SEQ ID NO: 3765108 - RNA, 21 nt, Human
ggaauggaaaaagcagaaggc

SEQ ID NO: 3765109 - RNA, 14 nt, Human
ggaauggaggggca

SEQ ID NO: 3765110 - RNA, 16 nt, Human
ggaauggaggggcaga

SEQ ID NO: 3765111 - RNA, 12 nt, Human
ggaaugggcugu

SEQ ID NO: 3765112 - RNA, 20 nt, Human
ggaauguaacugcugaaaac

SEQ ID NO: 3765113 - RNA, 15 nt, Human
ggaauguguggccug

SEQ ID NO: 3765114 - RNA, 15 nt, Human
ggaauguuggauaag

SEQ ID NO: 3765115 - RNA, 20 nt, Human
ggaauguuggauaaggaauu

SEQ ID NO: 3765116 - RNA, 22 nt, Human
ggaauuaaguuaucuuuaaaau

SEQ ID NO: 3765117 - RNA, 22 nt, Human
ggaauuagcuuggggccaggga

SEQ ID NO: 3765118 - RNA, 15 nt, Human
ggaauuauuuuaaaa

SEQ ID NO: 3765119 - RNA, 13 nt, Human
ggaauucucuugg

SEQ ID NO: 3765120 - RNA, 22 nt, Human
ggaauuggagcucgugggacag

SEQ ID NO: 3765121 - RNA, 13 nt, Human
ggaauuguggcua

SEQ ID NO: 3765122 - RNA, 12 nt, Human
ggaauuguguuu

SEQ ID NO: 3765123 - RNA, 23 nt, Human
ggaauuuaagagcaguccauuuc

SEQ ID NO: 3765124 - RNA, 16 nt, Human
ggaauuucccaggacc

SEQ ID NO: 3765125 - RNA, 18 nt, Human
ggaauuucuuaacuucuu

SEQ ID NO: 3765126 - RNA, 22 nt, Human
ggaauuucuuaacuucuugcuu

SEQ ID NO: 3765127 - RNA, 16 nt, Human
ggaauuucuuguuucu

SEQ ID NO: 3765128 - RNA, 19 nt, Human
ggaauuuggaaaucucuuu

SEQ ID NO: 3765129 - RNA, 16 nt, Human
ggaauuuguaaccuca

SEQ ID NO: 3765130 - RNA, 18 nt, Human
ggaauuuguaaccucagc

SEQ ID NO: 3765131 - RNA, 12 nt, Human
ggaauuuguaag

SEQ ID NO: 3765132 - RNA, 20 nt, Human
ggaauuuucuccaauuuuuu

SEQ ID NO: 3765133 - RNA, 17 nt, Human
ggaauuuuugcuugacu

SEQ ID NO: 3765134 - RNA, 15 nt, Human
ggaauuuuuuauucu

SEQ ID NO: 3765135 - RNA, 17 nt, Human
ggaauuuuuuauucuug

SEQ ID NO: 3765136 - RNA, 20 nt, Human
ggaauuuuuuauucuuguga

SEQ ID NO: 3765137 - RNA, 18 nt, Human
ggacaaaacccaccuugu

SEQ ID NO: 3765138 - RNA, 15 nt, Human
ggacaaaggagccug

SEQ ID NO: 3765139 - RNA, 15 nt, Human
ggacaaaguauuuga

SEQ ID NO: 3765140 - RNA, 15 nt, Human
ggacaaagucuccag

SEQ ID NO: 3765141 - RNA, 19 nt, Human
ggacaaagucuccagccca

SEQ ID NO: 3765142 - RNA, 12 nt, Human
ggacaaagugcc

SEQ ID NO: 3765143 - RNA, 17 nt, Human
ggacaaagugccaaaga

SEQ ID NO: 3765144 - RNA, 18 nt, Human
ggacaaagugccaaagaa

SEQ ID NO: 3765145 - RNA, 21 nt, Human
ggacaaaucacauauuuuaaa

SEQ ID NO: 3765146 - RNA, 12 nt, Human
ggacaaauguga

SEQ ID NO: 3765147 - RNA, 19 nt, Human
ggacaaaugugaagaugca

SEQ ID NO: 3765148 - RNA, 14 nt, Human
ggacaaauugagac

SEQ ID NO: 3765149 - RNA, 13 nt, Human
ggacaagcagagg

SEQ ID NO: 3765150 - RNA, 20 nt, Human
ggacaagccaacuuguaaau

SEQ ID NO: 3765151 - RNA, 18 nt, Human
ggacaagcuucugagacg

SEQ ID NO: 3765152 - RNA, 20 nt, Human
ggacaaggaggucugugcca

SEQ ID NO: 3765153 - RNA, 22 nt, Human
ggacaagggaaaauaaaaaaag

SEQ ID NO: 3765154 - RNA, 12 nt, Human
ggacaauaaacc

SEQ ID NO: 3765155 - RNA, 15 nt, Human
ggacaauaugugcca

SEQ ID NO: 3765156 - RNA, 18 nt, Human
ggacaaucaguccccucc

SEQ ID NO: 3765157 - RNA, 23 nt, Human
ggacaauggaccggagagugggg

SEQ ID NO: 3765158 - RNA, 17 nt, Human
ggacacaaaacuccgcc

SEQ ID NO: 3765159 - RNA, 20 nt, Human
ggacacaaaacuccgccccc

SEQ ID NO: 3765160 - RNA, 14 nt, Human
ggacacacagccua

SEQ ID NO: 3765161 - RNA, 14 nt, Human
ggacacagcucuuc

SEQ ID NO: 3765162 - RNA, 12 nt, Human
ggacacaggccu

SEQ ID NO: 3765163 - RNA, 18 nt, Human
ggacacaggccugcucuc

SEQ ID NO: 3765164 - RNA, 23 nt, Human
ggacacaggccuguguagcugug

SEQ ID NO: 3765165 - RNA, 14 nt, Human
ggacacaguuccug

SEQ ID NO: 3765166 - RNA, 20 nt, Human
gcugcuuuguuaccuuaaaa

SEQ ID NO: 3765167 - RNA, 12 nt, Human
gcugcuuuuccu

SEQ ID NO: 3765168 - RNA, 22 nt, Human
gcugcuuuuccuuggggcaggc

SEQ ID NO: 3765169 - RNA, 23 nt, Human
gcugcuuuuccuuggggcaggca

SEQ ID NO: 3765170 - RNA, 22 nt, Human
gcugcuuuugucuaugggacuc

SEQ ID NO: 3765171 - RNA, 22 nt, Human
gcugcuuuuuuugaaacuuuga

SEQ ID NO: 3765172 - RNA, 23 nt, Human
gcuggaaaagggucuugggaaau

SEQ ID NO: 3765173 - RNA, 23 nt, Human
gcuggaaaaguauguuagugcaa

SEQ ID NO: 3765174 - RNA, 16 nt, Human
gcuggaacagauucac

SEQ ID NO: 3765175 - RNA, 21 nt, Human
gcuggaaccugcaaaaaauac

SEQ ID NO: 3765176 - RNA, 17 nt, Human
gcuggaagauagcugug

SEQ ID NO: 3765177 - RNA, 12 nt, Human
gcuggaagccca

SEQ ID NO: 3765178 - RNA, 14 nt, Human
gcuggaagcccagc

SEQ ID NO: 3765179 - RNA, 12 nt, Human
gcuggaaggagg

SEQ ID NO: 3765180 - RNA, 16 nt, Human
gcuggaaggaggaaga

SEQ ID NO: 3765181 - RNA, 18 nt, Human
gcuggaaggaggaagaau

SEQ ID NO: 3765182 - RNA, 16 nt, Human
gcuggaaucuggagag

SEQ ID NO: 3765183 - RNA, 16 nt, Human
gcuggaauuuuuuauu

SEQ ID NO: 3765184 - RNA, 14 nt, Human
gcuggacaaacugc

SEQ ID NO: 3765185 - RNA, 22 nt, Human
gcuggacagaggggacucuggg

SEQ ID NO: 3765186 - RNA, 20 nt, Human
gcuggacaguaucacugucu

SEQ ID NO: 3765187 - RNA, 16 nt, Human
gcuggacaugcugacu

SEQ ID NO: 3765188 - RNA, 13 nt, Human
gcuggacccagcc

SEQ ID NO: 3765189 - RNA, 21 nt, Human
gcuggacccagccaggcccag

SEQ ID NO: 3765190 - RNA, 23 nt, Human
gcuggaccuauguccuaaggaca

SEQ ID NO: 3765191 - RNA, 17 nt, Human
gcuggaccucaccaagc

SEQ ID NO: 3765192 - RNA, 18 nt, Human
gcuggaccuugaacuggg

SEQ ID NO: 3765193 - RNA, 19 nt, Human
gcuggacggggacugggga

SEQ ID NO: 3765194 - RNA, 12 nt, Human
gcuggacgucca

SEQ ID NO: 3765195 - RNA, 18 nt, Human
gcuggacgucuuucuuuu

SEQ ID NO: 3765196 - RNA, 14 nt, Human
gcuggacuacccac

SEQ ID NO: 3765197 - RNA, 22 nt, Human
gcuggacucucagucucugagc

SEQ ID NO: 3765198 - RNA, 13 nt, Human
gcuggacucugca

SEQ ID NO: 3765199 - RNA, 17 nt, Human
gcuggacugaggccuga

SEQ ID NO: 3765200 - RNA, 19 nt, Human
gcuggacugaggccugagc

SEQ ID NO: 3765201 - RNA, 14 nt, Human
gcuggagaaaaaua

SEQ ID NO: 3765202 - RNA, 13 nt, Human
gcuggagaagaga

SEQ ID NO: 3765203 - RNA, 15 nt, Human
gcuggagaagagagg

SEQ ID NO: 3765204 - RNA, 17 nt, Human
gcuggagaagagaggag

SEQ ID NO: 3765205 - RNA, 20 nt, Human
gcuggagaagagaggagagg

SEQ ID NO: 3765206 - RNA, 12 nt, Human
gcuggagaagcu

SEQ ID NO: 3765207 - RNA, 15 nt, Human
gcuggagaccaugca

SEQ ID NO: 3765208 - RNA, 17 nt, Human
gcuggagaccaugcaga

SEQ ID NO: 3765209 - RNA, 13 nt, Human
gcuggagacuccu

SEQ ID NO: 3765210 - RNA, 20 nt, Human
gcuggagacuccuaggcagg

SEQ ID NO: 3765211 - RNA, 22 nt, Human
gcuggagaggagcccugccucu

SEQ ID NO: 3765212 - RNA, 16 nt, Human
gcuggagcccagggag

SEQ ID NO: 3765213 - RNA, 11 nt, Human
gcuggagccug

SEQ ID NO: 3765214 - RNA, 23 nt, Human
gcuggagccugagucagggccca

SEQ ID NO: 3765215 - RNA, 14 nt, Human
gcuggagccugugu

SEQ ID NO: 3765216 - RNA, 22 nt, Human
gcuggagccuguguaacagcuc

SEQ ID NO: 3765217 - RNA, 22 nt, Human
gcuggagcuggcgucugucuuc

SEQ ID NO: 3765218 - RNA, 23 nt, Human
gcuggaggacuagaaccuggagg

SEQ ID NO: 3765219 - RNA, 13 nt, Human
gcuggaggagccc

SEQ ID NO: 3765220 - RNA, 15 nt, Human
gcuggaggagcccag

SEQ ID NO: 3765221 - RNA, 21 nt, Human
gcuggaggagcccaggccagg

SEQ ID NO: 3765222 - RNA, 12 nt, Human
gcuggaggcagg

SEQ ID NO: 3765223 - RNA, 14 nt, Human
gcuggaggcagggc

SEQ ID NO: 3765224 - RNA, 21 nt, Human
gcuggaggcagggccuugccc

SEQ ID NO: 3765225 - RNA, 20 nt, Human
gcuggaggcaggggcuuccu

SEQ ID NO: 3765226 - RNA, 21 nt, Human
gcuggaggcaggggcuuccug

SEQ ID NO: 3765227 - RNA, 12 nt, Human
gcuggaggccca

SEQ ID NO: 3765228 - RNA, 15 nt, Human
gcuggaggcccaggc

SEQ ID NO: 3765229 - RNA, 20 nt, Human
gcuggaggcccaggcuggga

SEQ ID NO: 3765230 - RNA, 12 nt, Human
gcuggaggccuc

SEQ ID NO: 3765231 - RNA, 14 nt, Human
gcuggaggccucag

SEQ ID NO: 3765232 - RNA, 19 nt, Human
gcuggaggccucaggugcu

SEQ ID NO: 3765233 - RNA, 14 nt, Human
gcuggaggugggag

SEQ ID NO: 3765234 - RNA, 15 nt, Human
gcuggaggugggagc

SEQ ID NO: 3765235 - RNA, 17 nt, Human
gcuggaggugggagcag

SEQ ID NO: 3765236 - RNA, 15 nt, Human
gcuggaguaaucaga

SEQ ID NO: 3765237 - RNA, 20 nt, Human
gcuggaguacaguggugcca

SEQ ID NO: 3765238 - RNA, 17 nt, Human
gcuggagugcagugagc

SEQ ID NO: 3765239 - RNA, 15 nt, Human
gcuggagugcagugg

SEQ ID NO: 3765240 - RNA, 20 nt, Human
gcuggagugcaguggugcga

SEQ ID NO: 3765241 - RNA, 22 nt, Human
gcuggaguuauugaagcagagu

SEQ ID NO: 3765242 - RNA, 19 nt, Human
gcuggaucucccagggcua

SEQ ID NO: 3765243 - RNA, 20 nt, Human
gcuggaucucccagggcuac

SEQ ID NO: 3765244 - RNA, 20 nt, Human
gcuggaugagacuuccaaac

SEQ ID NO: 3765245 - RNA, 23 nt, Human
gcuggaugagcucccacaagccu

SEQ ID NO: 3765246 - RNA, 15 nt, Human
gcuggaugauggucu

SEQ ID NO: 3765247 - RNA, 14 nt, Human
gcuggauggagccc

SEQ ID NO: 3765248 - RNA, 19 nt, Human
gcuggcaaagacagaagcc

SEQ ID NO: 3765249 - RNA, 14 nt, Human
gcuggcaacacaga

SEQ ID NO: 3765250 - RNA, 19 nt, Human
gcuggcaacacagaggcag

SEQ ID NO: 3765251 - RNA, 17 nt, Human
gcuggcaccgccuucuc

SEQ ID NO: 3765252 - RNA, 23 nt, Human
gcuggcagaaagggaacagaaag

SEQ ID NO: 3765253 - RNA, 13 nt, Human
gcuggcagcucuc

SEQ ID NO: 3765254 - RNA, 18 nt, Human
gcuggcagcucuccaguc

SEQ ID NO: 3765255 - RNA, 14 nt, Human
gcuggcagggcugg

SEQ ID NO: 3765256 - RNA, 21 nt, Human
gcuggcaugauccaagcaaga

SEQ ID NO: 3765257 - RNA, 15 nt, Human
gcuggccagccccac

SEQ ID NO: 3765258 - RNA, 19 nt, Human
gcuggccagccccacagcc

SEQ ID NO: 3765259 - RNA, 21 nt, Human
gcuggccagccuggggccugg

SEQ ID NO: 3765260 - RNA, 16 nt, Human
gcuggccagcgagcgc

SEQ ID NO: 3765261 - RNA, 22 nt, Human
gcuggccaguccacccugccug

SEQ ID NO: 3765262 - RNA, 17 nt, Human
gcuggccaguccaggcu

SEQ ID NO: 3765263 - RNA, 18 nt, Human
gcuggccauggagaaagc

SEQ ID NO: 3765264 - RNA, 14 nt, Human
gcuggcccagccaa

SEQ ID NO: 3765265 - RNA, 13 nt, Human
gcuggcccagggc

SEQ ID NO: 3765266 - RNA, 15 nt, Human
gcuggcccagggccc

SEQ ID NO: 3765267 - RNA, 16 nt, Human
gcuggcccagggccca

SEQ ID NO: 3765268 - RNA, 21 nt, Human
gcuggcccagggcccagagcc

SEQ ID NO: 3765269 - RNA, 18 nt, Human
gcuggccccagcccugcu

SEQ ID NO: 3765270 - RNA, 19 nt, Human
gcuggccccagcccugcug

SEQ ID NO: 3765271 - RNA, 22 nt, Human
gcuggccccagcccugcugggg

SEQ ID NO: 3765272 - RNA, 18 nt, Human
gcuggccccagggcaccc

SEQ ID NO: 3765273 - RNA, 20 nt, Human
gcuggccccagggcacccug

SEQ ID NO: 3765274 - RNA, 15 nt, Human
gcuggcccccacugg

SEQ ID NO: 3765275 - RNA, 17 nt, Human
gcuggcccccacuggcu

SEQ ID NO: 3765276 - RNA, 24 nt, Human
gcuggcccccacuggcugugggcu

SEQ ID NO: 3765277 - RNA, 13 nt, Human
gcuggccccgccg

SEQ ID NO: 3765278 - RNA, 19 nt, Human
gcuggccccucaccugggc

SEQ ID NO: 3765279 - RNA, 20 nt, Human
gcuggccccucaccugggca

SEQ ID NO: 3765280 - RNA, 23 nt, Human
gcuggccccucaccugggcaccu

SEQ ID NO: 3765281 - RNA, 13 nt, Human
gcuggcccugccc

SEQ ID NO: 3765282 - RNA, 15 nt, Human
gcuggcccugcccug

SEQ ID NO: 3765283 - RNA, 20 nt, Human
gcuggccgccucacccccuc

SEQ ID NO: 3765284 - RNA, 17 nt, Human
gcuggccgggcacagcu

SEQ ID NO: 3765285 - RNA, 19 nt, Human
gcuggccgggcacagcugu

SEQ ID NO: 3765286 - RNA, 13 nt, Human
gcuggccucagac

SEQ ID NO: 3765287 - RNA, 13 nt, Human
gcuggccucugcg

SEQ ID NO: 3765288 - RNA, 15 nt, Human
gcuggccucugcgag

SEQ ID NO: 3765289 - RNA, 16 nt, Human
gcuggccucugcgagu

SEQ ID NO: 3765290 - RNA, 14 nt, Human
gcuggccuggacag

SEQ ID NO: 3765291 - RNA, 13 nt, Human
gcuggccuggccc

SEQ ID NO: 3765292 - RNA, 14 nt, Human
gcuggccuggcccc

SEQ ID NO: 3765293 - RNA, 16 nt, Human
gcuggccuggccccuc

SEQ ID NO: 3765294 - RNA, 17 nt, Human
gcuggccuggccccuca

SEQ ID NO: 3765295 - RNA, 14 nt, Human
gcuggccuggccgg

SEQ ID NO: 3765296 - RNA, 13 nt, Human
gcuggccuuccug

SEQ ID NO: 3765297 - RNA, 16 nt, Human
gcuggccuuccugccc

SEQ ID NO: 3765298 - RNA, 19 nt, Human
gcuggccuuuguaagugca

SEQ ID NO: 3765299 - RNA, 14 nt, Human
gcuggcgcagccaa

SEQ ID NO: 3765300 - RNA, 16 nt, Human
gcuggcgcagccaagg

SEQ ID NO: 3765301 - RNA, 20 nt, Human
gcuggcgcagccaaggccga

SEQ ID NO: 3765302 - RNA, 16 nt, Human
gcuggcgccucugcaa

SEQ ID NO: 3765303 - RNA, 18 nt, Human
gcuggcgugcaguggugc

SEQ ID NO: 3765304 - RNA, 20 nt, Human
gcuggcgugcaguggugcga

SEQ ID NO: 3765305 - RNA, 18 nt, Human
gcuggcucacaguacagc

SEQ ID NO: 3765306 - RNA, 21 nt, Human
gcuggcuccagaugcagggca

SEQ ID NO: 3765307 - RNA, 22 nt, Human
gcuggcuccagaugcagggcag

SEQ ID NO: 3765308 - RNA, 23 nt, Human
gcuggcuccagaugcagggcagu

SEQ ID NO: 3765309 - RNA, 16 nt, Human
gcuggcucccagggcc

SEQ ID NO: 3765310 - RNA, 12 nt, Human
gcuggcucugag

SEQ ID NO: 3765311 - RNA, 16 nt, Human
gcuggcucuucugccc

SEQ ID NO: 3765312 - RNA, 16 nt, Human
gcuggcugagggcagu

SEQ ID NO: 3765313 - RNA, 11 nt, Human
gcuggcugccu

SEQ ID NO: 3765314 - RNA, 14 nt, Human
gcuggcuggccuca

SEQ ID NO: 3765315 - RNA, 16 nt, Human
gcuggcugggcaugga

SEQ ID NO: 3765316 - RNA, 21 nt, Human
gcuggcugggggccucacucc

SEQ ID NO: 3765317 - RNA, 13 nt, Human
gcuggcuggggug

SEQ ID NO: 3765318 - RNA, 16 nt, Human
gcuggcuguuggcugg

SEQ ID NO: 3765319 - RNA, 17 nt, Human
gcuggcuguuggcuggg

SEQ ID NO: 3765320 - RNA, 15 nt, Human
gcuggcuugggcagc

SEQ ID NO: 3765321 - RNA, 14 nt, Human
gcuggcuuuucugu

SEQ ID NO: 3765322 - RNA, 15 nt, Human
gcuggcuuuucuguu

SEQ ID NO: 3765323 - RNA, 20 nt, Human
gcugggaaacacuccuugca

SEQ ID NO: 3765324 - RNA, 18 nt, Human
gcugggaacucaccuggg

SEQ ID NO: 3765325 - RNA, 15 nt, Human
gcugggaacugcaga

SEQ ID NO: 3765326 - RNA, 23 nt, Human
gcugggacaccccgacuuuuguu

SEQ ID NO: 3765327 - RNA, 21 nt, Human
gcugggacguggcucagccag

SEQ ID NO: 3765328 - RNA, 14 nt, Human
gcugggacuacagg

SEQ ID NO: 3765329 - RNA, 14 nt, Human
gcugggacucagcc

SEQ ID NO: 3765330 - RNA, 22 nt, Human
gcugggacucagccuucagaca

SEQ ID NO: 3765331 - RNA, 23 nt, Human
gcugggacucagccuucagacag

SEQ ID NO: 3765332 - RNA, 16 nt, Human
gcugggacuggccagg

SEQ ID NO: 3765333 - RNA, 14 nt, Human
gcugggacugggaa

SEQ ID NO: 3765334 - RNA, 22 nt, Human
gcugggagaagggggucaaagc

SEQ ID NO: 3765335 - RNA, 22 nt, Human
gcugggagcuccacucugcuuc

SEQ ID NO: 3765336 - RNA, 13 nt, Human
gcugggagcugaa

SEQ ID NO: 3765337 - RNA, 15 nt, Human
gcugggaggaaggac

SEQ ID NO: 3765338 - RNA, 16 nt, Human
gcugggaggagggaga

SEQ ID NO: 3765339 - RNA, 16 nt, Human
gcugggaggcaagagg

SEQ ID NO: 3765340 - RNA, 21 nt, Human
gcugggagggauagagggggg

SEQ ID NO: 3765341 - RNA, 18 nt, Human
gcugggaguaguugucuu

SEQ ID NO: 3765342 - RNA, 18 nt, Human
gcugggaucugacugcac

SEQ ID NO: 3765343 - RNA, 20 nt, Human
gcugggaucugacugcacgu

SEQ ID NO: 3765344 - RNA, 19 nt, Human
gcugggaugauuggagggg

SEQ ID NO: 3765345 - RNA, 23 nt, Human
gcugggauggugggcuucagggc

SEQ ID NO: 3765346 - RNA, 18 nt, Human
gcugggauuacaggcgug

SEQ ID NO: 3765347 - RNA, 17 nt, Human
gcugggauuacagggau

SEQ ID NO: 3765348 - RNA, 15 nt, Human
gcugggcaaggaaaa

SEQ ID NO: 3765349 - RNA, 20 nt, Human
gcugggcaaggaaaaagaaa

SEQ ID NO: 3765350 - RNA, 22 nt, Human
gcugggcacacgccucccacug

SEQ ID NO: 3765351 - RNA, 15 nt, Human
gcugggcacuucccu

SEQ ID NO: 3765352 - RNA, 19 nt, Human
gcugggcagaaggccaaga

SEQ ID NO: 3765353 - RNA, 16 nt, Human
gcugggcagaggaaag

SEQ ID NO: 3765354 - RNA, 14 nt, Human
gcugggcagcccgc

SEQ ID NO: 3765355 - RNA, 13 nt, Human
gcugggcagcugu

SEQ ID NO: 3765356 - RNA, 14 nt, Human
gcugggcagcuguu

SEQ ID NO: 3765357 - RNA, 19 nt, Human
gcugggcaugguaccagcc

SEQ ID NO: 3765358 - RNA, 17 nt, Human
gcugggccauguccaaa

SEQ ID NO: 3765359 - RNA, 20 nt, Human
gcugggcccaacccugucug

SEQ ID NO: 3765360 - RNA, 20 nt, Human
gcugggcccacccaagcagg

SEQ ID NO: 3765361 - RNA, 12 nt, Human
gcugggcccaga

SEQ ID NO: 3765362 - RNA, 14 nt, Human
gcugggcccagaag

SEQ ID NO: 3765363 - RNA, 14 nt, Human
gcugggcccagagg

SEQ ID NO: 3765364 - RNA, 16 nt, Human
gcugggcccagaggca

SEQ ID NO: 3765365 - RNA, 24 nt, Human
gcugggccccagcccacccuccug

SEQ ID NO: 3765366 - RNA, 19 nt, Human
gcugggccccccagcucag

SEQ ID NO: 3765367 - RNA, 22 nt, Human
gcugggccccccagcucagggg

SEQ ID NO: 3765368 - RNA, 20 nt, Human
gcugggcccgacauggcucc

SEQ ID NO: 3765369 - RNA, 17 nt, Human
gcugggcccucucuucu

SEQ ID NO: 3765370 - RNA, 14 nt, Human
gcugggcucaguga

SEQ ID NO: 3765371 - RNA, 21 nt, Human
gcugggcucccuucccaccuc

SEQ ID NO: 3765372 - RNA, 21 nt, Human
gcugggcucuccaccucagcc

SEQ ID NO: 3765373 - RNA, 15 nt, Human
gcugggcucugccac

SEQ ID NO: 3765374 - RNA, 19 nt, Human
gcugggcugagccccuacc

SEQ ID NO: 3765375 - RNA, 15 nt, Human
gcugggcugggugcg

SEQ ID NO: 3765376 - RNA, 17 nt, Human
gcugggcuucaguggca

SEQ ID NO: 3765377 - RNA, 18 nt, Human
gcugggcuucaguggcag

SEQ ID NO: 3765378 - RNA, 20 nt, Human
gcugggcuucaguggcagcu

SEQ ID NO: 3765379 - RNA, 21 nt, Human
gcuggggaagacaguggcccc

SEQ ID NO: 3765380 - RNA, 20 nt, Human
gcuggggaaguccucugggu

SEQ ID NO: 3765381 - RNA, 18 nt, Human
gcuggggacagguccuca

SEQ ID NO: 3765382 - RNA, 15 nt, Human
gcuggggccucagac

SEQ ID NO: 3765383 - RNA, 13 nt, Human
gcuggggccuggg

SEQ ID NO: 3765384 - RNA, 16 nt, Human
gcuggggccugggaca

SEQ ID NO: 3765385 - RNA, 15 nt, Human
gcuggggcugaccuu

SEQ ID NO: 3765386 - RNA, 21 nt, Human
gcugggggaaugagcccagag

SEQ ID NO: 3765387 - RNA, 14 nt, Human
gcugggggcaacug

SEQ ID NO: 3765388 - RNA, 18 nt, Human
gcugggggcaacuggcca

SEQ ID NO: 3765389 - RNA, 20 nt, Human
gcugggggcagccugcgugg

SEQ ID NO: 3765390 - RNA, 22 nt, Human
gcugggggcagccugcguggcu

SEQ ID NO: 3765391 - RNA, 20 nt, Human
gcugggggcaggagggcccu

SEQ ID NO: 3765392 - RNA, 16 nt, Human
gcugggggccaugagc

SEQ ID NO: 3765393 - RNA, 13 nt, Human
gcugggggccuca

SEQ ID NO: 3765394 - RNA, 15 nt, Human
gcugggggccucagu

SEQ ID NO: 3765395 - RNA, 18 nt, Human
gcugggggccucagugcc

SEQ ID NO: 3765396 - RNA, 20 nt, Human
gcugggggccucagugccac

SEQ ID NO: 3765397 - RNA, 18 nt, Human
gcugggggugggccaggc

SEQ ID NO: 3765398 - RNA, 14 nt, Human
gcuggggucccagc

SEQ ID NO: 3765399 - RNA, 12 nt, Human
gcuggggugcag

SEQ ID NO: 3765400 - RNA, 15 nt, Human
gcuggggugcaggga

SEQ ID NO: 3765401 - RNA, 14 nt, Human
gcugggguggccug

SEQ ID NO: 3765402 - RNA, 18 nt, Human
gcugggguggccugugug

SEQ ID NO: 3765403 - RNA, 17 nt, Human
gcugggguggggaccuc

SEQ ID NO: 3765404 - RNA, 22 nt, Human
gcugggguuaucugaagucaga

SEQ ID NO: 3765405 - RNA, 23 nt, Human
gcugggguuaucugaagucagau

SEQ ID NO: 3765406 - RNA, 15 nt, Human
gcuggguauuggaaa

SEQ ID NO: 3765407 - RNA, 23 nt, Human
gcuggguauuggaaauggaugca

SEQ ID NO: 3765408 - RNA, 13 nt, Human
gcugggucaggca

SEQ ID NO: 3765409 - RNA, 19 nt, Human
gcuggguccaauuguggca

SEQ ID NO: 3765410 - RNA, 23 nt, Human
gcuggguccauaucacacacauu

SEQ ID NO: 3765411 - RNA, 15 nt, Human
gcugggucgcccugg

SEQ ID NO: 3765412 - RNA, 22 nt, Human
gcuggguggcaccagcagccug

SEQ ID NO: 3765413 - RNA, 17 nt, Human
gcuggguggcacugcca

SEQ ID NO: 3765414 - RNA, 20 nt, Human
gcuggguguauuaggacugg

SEQ ID NO: 3765415 - RNA, 15 nt, Human
gcuggguucuaccca

SEQ ID NO: 3765416 - RNA, 18 nt, Human
gcuggguucuacccaggu

SEQ ID NO: 3765417 - RNA, 14 nt, Human
gcuggguucugcac

SEQ ID NO: 3765418 - RNA, 18 nt, Human
gcugguaaaaugaagaau

SEQ ID NO: 3765419 - RNA, 23 nt, Human
gcugguaaaaugaagaauuuaaa

SEQ ID NO: 3765420 - RNA, 15 nt, Human
gcugguaagggccaa

SEQ ID NO: 3765421 - RNA, 17 nt, Human
gcugguacaacggaggc

SEQ ID NO: 3765422 - RNA, 14 nt, Human
gcugguagagcagg

SEQ ID NO: 3765423 - RNA, 14 nt, Human
gcugguagcucagg

SEQ ID NO: 3765424 - RNA, 16 nt, Human
gcugguaucucagaaa

SEQ ID NO: 3765425 - RNA, 18 nt, Human
gcugguauugguggcuuu

SEQ ID NO: 3765426 - RNA, 21 nt, Human
gcuggucacuucuucugucca

SEQ ID NO: 3765427 - RNA, 14 nt, Human
gcuggucccacuca

SEQ ID NO: 3765428 - RNA, 12 nt, Human
gcuggugcacag

SEQ ID NO: 3765429 - RNA, 15 nt, Human
gcuggugcagggccu

SEQ ID NO: 3765430 - RNA, 13 nt, Human
gcuggugcauuac

SEQ ID NO: 3765431 - RNA, 22 nt, Human
gcuggugcauuacagagaggag

SEQ ID NO: 3765432 - RNA, 13 nt, Human
gcuggugccagcc

SEQ ID NO: 3765433 - RNA, 15 nt, Human
gcuggugccagccuu

SEQ ID NO: 3765434 - RNA, 22 nt, Human
gcuggugcccugcuuucagaua

SEQ ID NO: 3765435 - RNA, 18 nt, Human
gcuggugcggcuggccau

SEQ ID NO: 3765436 - RNA, 15 nt, Human
gcugguggcccagga

SEQ ID NO: 3765437 - RNA, 15 nt, Human
gcuggugggcaccaa

SEQ ID NO: 3765438 - RNA, 12 nt, Human
gcuggugguuuc

SEQ ID NO: 3765439 - RNA, 22 nt, Human
gcuggugguuucacggugccag

SEQ ID NO: 3765440 - RNA, 22 nt, Human
gcugguguagcuacagagaaac

SEQ ID NO: 3765441 - RNA, 21 nt, Human
gcugguguaugugugaaguga

SEQ ID NO: 3765442 - RNA, 15 nt, Human
gcugguguccugacc

SEQ ID NO: 3765443 - RNA, 17 nt, Human
gcugguguccugaccac

SEQ ID NO: 3765444 - RNA, 18 nt, Human
gcugguguccugaccacc

SEQ ID NO: 3765445 - RNA, 22 nt, Human
gcugguguccugaccacccucc

SEQ ID NO: 3765446 - RNA, 16 nt, Human
gcugguguuaacagaa

SEQ ID NO: 3765447 - RNA, 22 nt, Human
gcugguguuaacagaagggagg

SEQ ID NO: 3765448 - RNA, 20 nt, Human
gcugguucggauuuggggug

SEQ ID NO: 3765449 - RNA, 21 nt, Human
gcugguucggauuuggggugg

SEQ ID NO: 3765450 - RNA, 15 nt, Human
gcugguugcugugug

SEQ ID NO: 3765451 - RNA, 12 nt, Human
gcugguuuuccu

SEQ ID NO: 3765452 - RNA, 21 nt, Human
gcugguuuuguaagaugcugg

SEQ ID NO: 3765453 - RNA, 22 nt, Human
gcugguuuuguaagaugcuggg

SEQ ID NO: 3765454 - RNA, 16 nt, Human
gcuguaaaaugcauga

SEQ ID NO: 3765455 - RNA, 20 nt, Human
gcuguaaauuuggcuucugu

SEQ ID NO: 3765456 - RNA, 16 nt, Human
gcuguaacguggcacu

SEQ ID NO: 3765457 - RNA, 21 nt, Human
gcuguaacuacuuuauaacua

SEQ ID NO: 3765458 - RNA, 13 nt, Human
gcuguaagaaauc

SEQ ID NO: 3765459 - RNA, 16 nt, Human
gcuguaagaagagacu

SEQ ID NO: 3765460 - RNA, 24 nt, Human
gcuguaagaagagacugggaagau

SEQ ID NO: 3765461 - RNA, 15 nt, Human
gcuguaagaugucug

SEQ ID NO: 3765462 - RNA, 19 nt, Human
gcuguaaggcaugaaggau

SEQ ID NO: 3765463 - RNA, 15 nt, Human
gcuguaaggcucuag

SEQ ID NO: 3765464 - RNA, 15 nt, Human
gcuguaaucauuugu

SEQ ID NO: 3765465 - RNA, 19 nt, Human
ggacacaguuccugggaac

SEQ ID NO: 3765466 - RNA, 12 nt, Human
ggacacaugucc

SEQ ID NO: 3765467 - RNA, 19 nt, Human
ggacacauguccaguggga

SEQ ID NO: 3765468 - RNA, 19 nt, Human
ggacaccagccaggcucug

SEQ ID NO: 3765469 - RNA, 13 nt, Human
ggacaccaggagu

SEQ ID NO: 3765470 - RNA, 21 nt, Human
ggacaccauuaccaaaauaau

SEQ ID NO: 3765471 - RNA, 13 nt, Human
ggacacccuguga

SEQ ID NO: 3765472 - RNA, 13 nt, Human
ggacaccugcccu

SEQ ID NO: 3765473 - RNA, 15 nt, Human
ggacaccugcccugc

SEQ ID NO: 3765474 - RNA, 16 nt, Human
ggacaccugcccugcc

SEQ ID NO: 3765475 - RNA, 22 nt, Human
ggacacgcgccccccucccaga

SEQ ID NO: 3765476 - RNA, 20 nt, Human
ggacacgcgcgucgccgcca

SEQ ID NO: 3765477 - RNA, 20 nt, Human
ggacacuacacccagcaaua

SEQ ID NO: 3765478 - RNA, 21 nt, Human
ggacacuacacccagcaauag

SEQ ID NO: 3765479 - RNA, 22 nt, Human
ggacacuacacccagcaauaga

SEQ ID NO: 3765480 - RNA, 15 nt, Human
ggacacuccagugcc

SEQ ID NO: 3765481 - RNA, 18 nt, Human
ggacacuccagugccagc

SEQ ID NO: 3765482 - RNA, 21 nt, Human
ggacacuguaacgugugcugu

SEQ ID NO: 3765483 - RNA, 18 nt, Human
ggacacuuaacagaugca

SEQ ID NO: 3765484 - RNA, 19 nt, Human
ggacacuuauccacgagag

SEQ ID NO: 3765485 - RNA, 17 nt, Human
ggacacuucccucuguu

SEQ ID NO: 3765486 - RNA, 14 nt, Human
ggacacuuccugcc

SEQ ID NO: 3765487 - RNA, 20 nt, Human
ggacacuuugaaauguguuu

SEQ ID NO: 3765488 - RNA, 23 nt, Human
ggacacuuugaaauguguuucug

SEQ ID NO: 3765489 - RNA, 22 nt, Human
ggacagaaaggagaguggccau

SEQ ID NO: 3765490 - RNA, 23 nt, Human
ggacagaggccccagccucccug

SEQ ID NO: 3765491 - RNA, 16 nt, Human
ggacagaggccugccc

SEQ ID NO: 3765492 - RNA, 17 nt, Human
ggacagaggccugcccg

SEQ ID NO: 3765493 - RNA, 12 nt, Human
ggacagagggga

SEQ ID NO: 3765494 - RNA, 20 nt, Human
ggacagaggggguggccucc

SEQ ID NO: 3765495 - RNA, 16 nt, Human
ggacagaguaugaaca

SEQ ID NO: 3765496 - RNA, 18 nt, Human
ggacagaucaauggcgca

SEQ ID NO: 3765497 - RNA, 23 nt, Human
ggacagauccagggacugaagcc

SEQ ID NO: 3765498 - RNA, 19 nt, Human
ggacagcaacuaucagacu

SEQ ID NO: 3765499 - RNA, 17 nt, Human
ggacagcauugccagua

SEQ ID NO: 3765500 - RNA, 15 nt, Human
ggacagccacggcca

SEQ ID NO: 3765501 - RNA, 20 nt, Human
ggacagccacggccaggcca

SEQ ID NO: 3765502 - RNA, 14 nt, Human
ggacagccccaccc

SEQ ID NO: 3765503 - RNA, 15 nt, Human
ggacagccccacccu

SEQ ID NO: 3765504 - RNA, 16 nt, Human
ggacagccccacccug

SEQ ID NO: 3765505 - RNA, 15 nt, Human
ggacagccccuccuc

SEQ ID NO: 3765506 - RNA, 21 nt, Human
ggacagccuguggcggugccu

SEQ ID NO: 3765507 - RNA, 16 nt, Human
ggacagcuccuucugu

SEQ ID NO: 3765508 - RNA, 12 nt, Human
ggacagcugugc

SEQ ID NO: 3765509 - RNA, 19 nt, Human
ggacagcuugagccgggcc

SEQ ID NO: 3765510 - RNA, 16 nt, Human
ggacaggaccccagcu

SEQ ID NO: 3765511 - RNA, 19 nt, Human
ggacaggacuaacacucag

SEQ ID NO: 3765512 - RNA, 18 nt, Human
ggacaggagaugcugugc

SEQ ID NO: 3765513 - RNA, 19 nt, Human
ggacaggagaugcugugcc

SEQ ID NO: 3765514 - RNA, 15 nt, Human
ggacaggauccaggc

SEQ ID NO: 3765515 - RNA, 17 nt, Human
ggacaggcagaaagagu

SEQ ID NO: 3765516 - RNA, 11 nt, Human
ggacaggcccg

SEQ ID NO: 3765517 - RNA, 16 nt, Human
ggacaggccgcagcuc

SEQ ID NO: 3765518 - RNA, 23 nt, Human
ggacaggccucaccucuacccaa

SEQ ID NO: 3765519 - RNA, 22 nt, Human
ggacaggcugcggccccucccc

SEQ ID NO: 3765520 - RNA, 13 nt, Human
ggacaggcuggcu

SEQ ID NO: 3765521 - RNA, 15 nt, Human
ggacaggcuggcucc

SEQ ID NO: 3765522 - RNA, 22 nt, Human
ggacagggcauggccagguggc

SEQ ID NO: 3765523 - RNA, 18 nt, Human
ggacagggcuggcccagc

SEQ ID NO: 3765524 - RNA, 20 nt, Human
ggacagggcuggcccagccc

SEQ ID NO: 3765525 - RNA, 22 nt, Human
ggacagggcuggcccagcccug

SEQ ID NO: 3765526 - RNA, 14 nt, Human
ggacagggucccug

SEQ ID NO: 3765527 - RNA, 20 nt, Human
ggacaggucugggagaggca

SEQ ID NO: 3765528 - RNA, 20 nt, Human
ggacaggugugccgacagaa

SEQ ID NO: 3765529 - RNA, 20 nt, Human
ggacaguaauaagaauggaa

SEQ ID NO: 3765530 - RNA, 18 nt, Human
ggacaguaucccacaucc

SEQ ID NO: 3765531 - RNA, 19 nt, Human
ggacaguauuuguggggag

SEQ ID NO: 3765532 - RNA, 17 nt, Human
ggacagucaccucaugg

SEQ ID NO: 3765533 - RNA, 12 nt, Human
ggacagucacug

SEQ ID NO: 3765534 - RNA, 13 nt, Human
ggacaguccuggg

SEQ ID NO: 3765535 - RNA, 16 nt, Human
ggacaguccugggaga

SEQ ID NO: 3765536 - RNA, 16 nt, Human
ggacaguggcaggaca

SEQ ID NO: 3765537 - RNA, 16 nt, Human
ggacaguucacacccu

SEQ ID NO: 3765538 - RNA, 22 nt, Human
ggacaguugcuuuucagcaugg

SEQ ID NO: 3765539 - RNA, 22 nt, Human
ggacaguuuaucaugaagccug

SEQ ID NO: 3765540 - RNA, 14 nt, Human
ggacauauucauuu

SEQ ID NO: 3765541 - RNA, 21 nt, Human
ggacaucacagggugggccuc

SEQ ID NO: 3765542 - RNA, 15 nt, Human
ggacaucagcaaaca

SEQ ID NO: 3765543 - RNA, 14 nt, Human
ggacauccucuucu

SEQ ID NO: 3765544 - RNA, 15 nt, Human
ggacaucucuuugaa

SEQ ID NO: 3765545 - RNA, 19 nt, Human
ggacaugcgguagccagca

SEQ ID NO: 3765546 - RNA, 19 nt, Human
ggacaugcugaagccaaag

SEQ ID NO: 3765547 - RNA, 14 nt, Human
ggacaugcuuagca

SEQ ID NO: 3765548 - RNA, 19 nt, Human
ggacaugggucgcccauga

SEQ ID NO: 3765549 - RNA, 21 nt, Human
ggacauguucccuucuccuuc

SEQ ID NO: 3765550 - RNA, 16 nt, Human
ggacauguuuugauaa

SEQ ID NO: 3765551 - RNA, 15 nt, Human
ggacauuaugugugc

SEQ ID NO: 3765552 - RNA, 20 nt, Human
ggacauuccaauuugcacuu

SEQ ID NO: 3765553 - RNA, 15 nt, Human
ggacauuuuuucagu

SEQ ID NO: 3765554 - RNA, 14 nt, Human
ggaccaaaaaccag

SEQ ID NO: 3765555 - RNA, 16 nt, Human
ggaccaaaaaccagua

SEQ ID NO: 3765556 - RNA, 12 nt, Human
ggaccaaagcaa

SEQ ID NO: 3765557 - RNA, 17 nt, Human
ggaccaaggagaugaag

SEQ ID NO: 3765558 - RNA, 19 nt, Human
ggaccaaggcaaggcaggu

SEQ ID NO: 3765559 - RNA, 15 nt, Human
ggaccacaggcucag

SEQ ID NO: 3765560 - RNA, 20 nt, Human
ggaccacaggugcccgccac

SEQ ID NO: 3765561 - RNA, 22 nt, Human
ggaccacccucacuggcucucc

SEQ ID NO: 3765562 - RNA, 16 nt, Human
ggaccacucagccccu

SEQ ID NO: 3765563 - RNA, 19 nt, Human
ggaccacuguuucuugcuu

SEQ ID NO: 3765564 - RNA, 15 nt, Human
ggaccagaagcuccc

SEQ ID NO: 3765565 - RNA, 21 nt, Human
ggaccagaagcucccccagca

SEQ ID NO: 3765566 - RNA, 14 nt, Human
ggaccagagcugcc

SEQ ID NO: 3765567 - RNA, 19 nt, Human
ggaccagagcugccaccug

SEQ ID NO: 3765568 - RNA, 14 nt, Human
ggaccagaugcuga

SEQ ID NO: 3765569 - RNA, 19 nt, Human
ggaccagcagccccacacc

SEQ ID NO: 3765570 - RNA, 23 nt, Human
ggaccagccagcagcagcccaag

SEQ ID NO: 3765571 - RNA, 12 nt, Human
ggaccagccucu

SEQ ID NO: 3765572 - RNA, 13 nt, Human
ggaccagccuggc

SEQ ID NO: 3765573 - RNA, 15 nt, Human
ggaccagccuggccc

SEQ ID NO: 3765574 - RNA, 15 nt, Human
ggaccagcuuuuccc

SEQ ID NO: 3765575 - RNA, 17 nt, Human
ggaccaggacaggacca

SEQ ID NO: 3765576 - RNA, 11 nt, Human
ggaccaggagu

SEQ ID NO: 3765577 - RNA, 15 nt, Human
ggaccaggcuguagg

SEQ ID NO: 3765578 - RNA, 17 nt, Human
ggaccagggcagggcca

SEQ ID NO: 3765579 - RNA, 17 nt, Human
ggaccagguauagagaa

SEQ ID NO: 3765580 - RNA, 19 nt, Human
ggaccaugcugucuggcac

SEQ ID NO: 3765581 - RNA, 22 nt, Human
ggaccauggaguggcagcccag

SEQ ID NO: 3765582 - RNA, 16 nt, Human
ggaccaugugucacuu

SEQ ID NO: 3765583 - RNA, 22 nt, Human
ggacccaaggaaaacugcaugg

SEQ ID NO: 3765584 - RNA, 17 nt, Human
ggacccagacccagugg

SEQ ID NO: 3765585 - RNA, 12 nt, Human
ggacccagccag

SEQ ID NO: 3765586 - RNA, 16 nt, Human
ggacccagccaggccc

SEQ ID NO: 3765587 - RNA, 17 nt, Human
ggacccagcgggcaggu

SEQ ID NO: 3765588 - RNA, 13 nt, Human
ggacccaggcucc

SEQ ID NO: 3765589 - RNA, 17 nt, Human
ggacccaggcuccgccc

SEQ ID NO: 3765590 - RNA, 19 nt, Human
ggacccaguggcagggcac

SEQ ID NO: 3765591 - RNA, 21 nt, Human
ggaccccagagauucccaagc

SEQ ID NO: 3765592 - RNA, 13 nt, Human
ggaccccagccuc

SEQ ID NO: 3765593 - RNA, 13 nt, Human
ggaccccagcucu

SEQ ID NO: 3765594 - RNA, 21 nt, Human
ggaccccagcugugagccuug

SEQ ID NO: 3765595 - RNA, 12 nt, Human
ggaccccaggcc

SEQ ID NO: 3765596 - RNA, 18 nt, Human
ggaccccaucugugaaua

SEQ ID NO: 3765597 - RNA, 13 nt, Human
ggacccccagcuu

SEQ ID NO: 3765598 - RNA, 21 nt, Human
ggaccccccuuucacaggcag

SEQ ID NO: 3765599 - RNA, 22 nt, Human
ggaccccccuuucacaggcagc

SEQ ID NO: 3765600 - RNA, 14 nt, Human
ggacccccgccccc

SEQ ID NO: 3765601 - RNA, 15 nt, Human
ggacccccgcccccu

SEQ ID NO: 3765602 - RNA, 19 nt, Human
ggacccccgcccccugccc

SEQ ID NO: 3765603 - RNA, 22 nt, Human
ggacccccgcccccugcccucc

SEQ ID NO: 3765604 - RNA, 12 nt, Human
ggacccccuucc

SEQ ID NO: 3765605 - RNA, 18 nt, Human
ggaccccgagccuggcuc

SEQ ID NO: 3765606 - RNA, 12 nt, Human
ggaccccugcau

SEQ ID NO: 3765607 - RNA, 23 nt, Human
ggaccccugcauuggaacuggag

SEQ ID NO: 3765608 - RNA, 19 nt, Human
ggacccgcucuggaccaac

SEQ ID NO: 3765609 - RNA, 21 nt, Human
ggacccuccaaggccaggccu

SEQ ID NO: 3765610 - RNA, 21 nt, Human
ggacccucgcuggcccccacu

SEQ ID NO: 3765611 - RNA, 13 nt, Human
ggacccugaggcc

SEQ ID NO: 3765612 - RNA, 24 nt, Human
ggacccugccaggcacaggcaggg

SEQ ID NO: 3765613 - RNA, 11 nt, Human
ggacccugcuu

SEQ ID NO: 3765614 - RNA, 13 nt, Human
ggacccuguugcu

SEQ ID NO: 3765615 - RNA, 12 nt, Human
cuugcuggcccc

SEQ ID NO: 3765616 - RNA, 16 nt, Human
cuugcuggucuaguca

SEQ ID NO: 3765617 - RNA, 19 nt, Human
cuugcugucccuuggaacu

SEQ ID NO: 3765618 - RNA, 16 nt, Human
cuugcuguccugaucu

SEQ ID NO: 3765619 - RNA, 16 nt, Human
cuugcugucucugcuc

SEQ ID NO: 3765620 - RNA, 16 nt, Human
cuugcuguggucucuu

SEQ ID NO: 3765621 - RNA, 23 nt, Human
cuugcuguugacauauuuaaugu

SEQ ID NO: 3765622 - RNA, 18 nt, Human
cuugcuguuuuguucugu

SEQ ID NO: 3765623 - RNA, 22 nt, Human
cuugcuuaaaugugaauuacua

SEQ ID NO: 3765624 - RNA, 16 nt, Human
cuugcuuaaauuucuu

SEQ ID NO: 3765625 - RNA, 22 nt, Human
cuugcuuaaauuucuuauguga

SEQ ID NO: 3765626 - RNA, 24 nt, Human
cuugcuuaccuugacuguugaugu

SEQ ID NO: 3765627 - RNA, 15 nt, Human
cuugcuuauuugaca

SEQ ID NO: 3765628 - RNA, 20 nt, Human
cuugcuucaaccccaugaga

SEQ ID NO: 3765629 - RNA, 19 nt, Human
cuugcuucucuagcucucu

SEQ ID NO: 3765630 - RNA, 14 nt, Human
cuugcuuguuacau

SEQ ID NO: 3765631 - RNA, 17 nt, Human
cuugcuuuaccuuuuca

SEQ ID NO: 3765632 - RNA, 22 nt, Human
cuugcuuucuuuuuuaaaauca

SEQ ID NO: 3765633 - RNA, 23 nt, Human
cuugcuuucuuuuuuaaaaucaa

SEQ ID NO: 3765634 - RNA, 14 nt, Human
cuugcuuugauuua

SEQ ID NO: 3765635 - RNA, 21 nt, Human
cuugcuuugauuuacagcaag

SEQ ID NO: 3765636 - RNA, 13 nt, Human
cuugcuuuucaug

SEQ ID NO: 3765637 - RNA, 15 nt, Human
cuugcuuuucccucu

SEQ ID NO: 3765638 - RNA, 22 nt, Human
cuugcuuuucccucuuuucuua

SEQ ID NO: 3765639 - RNA, 16 nt, Human
cuuggaaaccugcccu

SEQ ID NO: 3765640 - RNA, 18 nt, Human
cuuggaaaccugcccugc

SEQ ID NO: 3765641 - RNA, 21 nt, Human
cuuggaaaccugcccugccug

SEQ ID NO: 3765642 - RNA, 20 nt, Human
cuuggaaagcaucaccucag

SEQ ID NO: 3765643 - RNA, 23 nt, Human
cuuggaaagcaucaccucaggcc

SEQ ID NO: 3765644 - RNA, 15 nt, Human
cuuggaaaggaccag

SEQ ID NO: 3765645 - RNA, 13 nt, Human
cuuggaacugcau

SEQ ID NO: 3765646 - RNA, 22 nt, Human
cuuggaacuugccugccuuucc

SEQ ID NO: 3765647 - RNA, 14 nt, Human
cuuggaagcuccgc

SEQ ID NO: 3765648 - RNA, 15 nt, Human
cuuggaagcuguuug

SEQ ID NO: 3765649 - RNA, 20 nt, Human
cuuggaauuuguaaccucag

SEQ ID NO: 3765650 - RNA, 14 nt, Human
cuuggacaaaucac

SEQ ID NO: 3765651 - RNA, 19 nt, Human
cuuggacauccuccuccca

SEQ ID NO: 3765652 - RNA, 22 nt, Human
cuuggacauccuccucccaccc

SEQ ID NO: 3765653 - RNA, 16 nt, Human
cuuggaccagaucuaa

SEQ ID NO: 3765654 - RNA, 22 nt, Human
cuuggaccucgugcuuuaagug

SEQ ID NO: 3765655 - RNA, 12 nt, Human
cuuggaccucug

SEQ ID NO: 3765656 - RNA, 15 nt, Human
cuuggaccucugcuc

SEQ ID NO: 3765657 - RNA, 19 nt, Human
cuuggaccucugcucugag

SEQ ID NO: 3765658 - RNA, 15 nt, Human
cuuggacucuugcuc

SEQ ID NO: 3765659 - RNA, 15 nt, Human
cuuggagaaaugaaa

SEQ ID NO: 3765660 - RNA, 18 nt, Human
cuuggagaagucucagcu

SEQ ID NO: 3765661 - RNA, 15 nt, Human
cuuggagacccugca

SEQ ID NO: 3765662 - RNA, 22 nt, Human
cuuggagccaauggagacuguc

SEQ ID NO: 3765663 - RNA, 18 nt, Human
cuuggagccccagugcca

SEQ ID NO: 3765664 - RNA, 21 nt, Human
cuuggagccccagugccaagc

SEQ ID NO: 3765665 - RNA, 14 nt, Human
cuuggagccggacu

SEQ ID NO: 3765666 - RNA, 13 nt, Human
cuuggagccugca

SEQ ID NO: 3765667 - RNA, 17 nt, Human
cuuggagccugcagagc

SEQ ID NO: 3765668 - RNA, 12 nt, Human
cuuggagcugag

SEQ ID NO: 3765669 - RNA, 14 nt, Human
cuuggagcugagca

SEQ ID NO: 3765670 - RNA, 17 nt, Human
cuuggagcugagcaaau

SEQ ID NO: 3765671 - RNA, 17 nt, Human
cuuggaggagaugggga

SEQ ID NO: 3765672 - RNA, 15 nt, Human
cuuggaggccagcca

SEQ ID NO: 3765673 - RNA, 15 nt, Human
cuuggagggauaagc

SEQ ID NO: 3765674 - RNA, 12 nt, Human
cuuggagggcau

SEQ ID NO: 3765675 - RNA, 20 nt, Human
cuuggagggcccacuuguau

SEQ ID NO: 3765676 - RNA, 18 nt, Human
cuuggagggucccaagcu

SEQ ID NO: 3765677 - RNA, 19 nt, Human
cuuggagggucccaagcug

SEQ ID NO: 3765678 - RNA, 23 nt, Human
cuuggagggucccaagcugggcc

SEQ ID NO: 3765679 - RNA, 18 nt, Human
cuuggaggguugguccuc

SEQ ID NO: 3765680 - RNA, 17 nt, Human
cuuggagguagcuuuga

SEQ ID NO: 3765681 - RNA, 22 nt, Human
cuuggaguuuuucauugucgcu

SEQ ID NO: 3765682 - RNA, 22 nt, Human
cuuggauaaugcuguugccuca

SEQ ID NO: 3765683 - RNA, 23 nt, Human
cuuggauaaugcuguugccucau

SEQ ID NO: 3765684 - RNA, 15 nt, Human
cuuggauuaaauaca

SEQ ID NO: 3765685 - RNA, 17 nt, Human
cuuggauuccugauagu

SEQ ID NO: 3765686 - RNA, 15 nt, Human
cuuggauucucuaac

SEQ ID NO: 3765687 - RNA, 13 nt, Human
cuuggauuguccc

SEQ ID NO: 3765688 - RNA, 18 nt, Human
cuuggauuguccccgacc

SEQ ID NO: 3765689 - RNA, 15 nt, Human
cuuggcaacagaagc

SEQ ID NO: 3765690 - RNA, 23 nt, Human
cuuggcacauuuaagagacaguc

SEQ ID NO: 3765691 - RNA, 22 nt, Human
cuuggcaccaaagaugcagccg

SEQ ID NO: 3765692 - RNA, 19 nt, Human
cuuggcagcccaggccggg

SEQ ID NO: 3765693 - RNA, 16 nt, Human
cuuggcagccuuguga

SEQ ID NO: 3765694 - RNA, 15 nt, Human
cuuggcagcugaacu

SEQ ID NO: 3765695 - RNA, 15 nt, Human
cuuggcauagacaug

SEQ ID NO: 3765696 - RNA, 18 nt, Human
cuuggcaucacagggcag

SEQ ID NO: 3765697 - RNA, 20 nt, Human
cuuggcaucacagggcagag

SEQ ID NO: 3765698 - RNA, 17 nt, Human
cuuggcaucagcuggcg

SEQ ID NO: 3765699 - RNA, 17 nt, Human
cuuggcaugccuuccag

SEQ ID NO: 3765700 - RNA, 20 nt, Human
cuuggcaugccuuccagcac

SEQ ID NO: 3765701 - RNA, 15 nt, Human
cuuggccaagcaggg

SEQ ID NO: 3765702 - RNA, 16 nt, Human
cuuggccaugggaggc

SEQ ID NO: 3765703 - RNA, 23 nt, Human
cuuggcccaggaguuuggccaga

SEQ ID NO: 3765704 - RNA, 21 nt, Human
cuuggccgcaccuaaagcagc

SEQ ID NO: 3765705 - RNA, 19 nt, Human
cuuggccggcugugcucag

SEQ ID NO: 3765706 - RNA, 21 nt, Human
cuuggccggcugugcucagag

SEQ ID NO: 3765707 - RNA, 13 nt, Human
cuuggccuaucuc

SEQ ID NO: 3765708 - RNA, 21 nt, Human
cuuggccuaucuccuagggcu

SEQ ID NO: 3765709 - RNA, 11 nt, Human
cuuggccucag

SEQ ID NO: 3765710 - RNA, 14 nt, Human
cuuggccuggagca

SEQ ID NO: 3765711 - RNA, 15 nt, Human
cuuggccuggagcac

SEQ ID NO: 3765712 - RNA, 13 nt, Human
cuuggccugggcc

SEQ ID NO: 3765713 - RNA, 20 nt, Human
cuuggcgcugccccuggcag

SEQ ID NO: 3765714 - RNA, 21 nt, Human
cuuggcgcugccccuggcagc

SEQ ID NO: 3765715 - RNA, 17 nt, Human
cuuggcggcagcagcca

SEQ ID NO: 3765716 - RNA, 15 nt, Human
cuuggcguggagcag

SEQ ID NO: 3765717 - RNA, 16 nt, Human
cuuggcguggagcagg

SEQ ID NO: 3765718 - RNA, 17 nt, Human
cuuggcguggagccagg

SEQ ID NO: 3765719 - RNA, 21 nt, Human
cuuggcguggagccagggagc

SEQ ID NO: 3765720 - RNA, 17 nt, Human
cuuggcuacacagggau

SEQ ID NO: 3765721 - RNA, 16 nt, Human
cuuggcucagacaugu

SEQ ID NO: 3765722 - RNA, 18 nt, Human
cuuggcucgaaucucugu

SEQ ID NO: 3765723 - RNA, 13 nt, Human
cuuggcucugagg

SEQ ID NO: 3765724 - RNA, 12 nt, Human
cuuggcugcagg

SEQ ID NO: 3765725 - RNA, 13 nt, Human
cuuggcugcaggg

SEQ ID NO: 3765726 - RNA, 14 nt, Human
cuuggcugcaggga

SEQ ID NO: 3765727 - RNA, 14 nt, Human
cuuggcugcuuggc

SEQ ID NO: 3765728 - RNA, 20 nt, Human
cuuggcuggacccagccagg

SEQ ID NO: 3765729 - RNA, 11 nt, Human
cuuggcuggug

SEQ ID NO: 3765730 - RNA, 13 nt, Human
cuuggcuggugca

SEQ ID NO: 3765731 - RNA, 20 nt, Human
cuuggcuggugugguacaga

SEQ ID NO: 3765732 - RNA, 19 nt, Human
cuuggcuuaaucauuuuca

SEQ ID NO: 3765733 - RNA, 14 nt, Human
cuuggcuuaccuga

SEQ ID NO: 3765734 - RNA, 18 nt, Human
cuuggcuuaccugaccuc

SEQ ID NO: 3765735 - RNA, 22 nt, Human
cuuggcuuaccugaccucuugc

SEQ ID NO: 3765736 - RNA, 16 nt, Human
cuuggcuuccuuucuu

SEQ ID NO: 3765737 - RNA, 17 nt, Human
cuuggcuucugugauga

SEQ ID NO: 3765738 - RNA, 21 nt, Human
cuuggcuucugugaugagcug

SEQ ID NO: 3765739 - RNA, 17 nt, Human
cuuggcuugccauuuuu

SEQ ID NO: 3765740 - RNA, 22 nt, Human
cuuggcuuucauuauuaguacu

SEQ ID NO: 3765741 - RNA, 12 nt, Human
cuuggcuuuguu

SEQ ID NO: 3765742 - RNA, 19 nt, Human
cuugggaaauaugaaugcc

SEQ ID NO: 3765743 - RNA, 21 nt, Human
cuugggaagacuccuagcugu

SEQ ID NO: 3765744 - RNA, 10 nt, Human
cuugggaaug

SEQ ID NO: 3765745 - RNA, 13 nt, Human
cuugggaauuuua

SEQ ID NO: 3765746 - RNA, 19 nt, Human
cuugggacuaaaugcccug

SEQ ID NO: 3765747 - RNA, 17 nt, Human
cuugggagagccccugg

SEQ ID NO: 3765748 - RNA, 22 nt, Human
cuugggagagccccuggggccu

SEQ ID NO: 3765749 - RNA, 16 nt, Human
cuugggaggaagcaga

SEQ ID NO: 3765750 - RNA, 17 nt, Human
cuugggaggaagcagaa

SEQ ID NO: 3765751 - RNA, 20 nt, Human
cuugggaggaagcagaauaa

SEQ ID NO: 3765752 - RNA, 15 nt, Human
cuugggaggccccac

SEQ ID NO: 3765753 - RNA, 22 nt, Human
cuugggaggccccacuggggaa

SEQ ID NO: 3765754 - RNA, 16 nt, Human
cuugggaggcugaggc

SEQ ID NO: 3765755 - RNA, 15 nt, Human
cuugggaggcuuccc

SEQ ID NO: 3765756 - RNA, 14 nt, Human
cuugggaguuuuga

SEQ ID NO: 3765757 - RNA, 17 nt, Human
cuugggauccaggcccc

SEQ ID NO: 3765758 - RNA, 20 nt, Human
cuugggcaauauucucugua

SEQ ID NO: 3765759 - RNA, 19 nt, Human
cuugggcacccccagccug

SEQ ID NO: 3765760 - RNA, 15 nt, Human
cuugggcagagcugg

SEQ ID NO: 3765761 - RNA, 13 nt, Human
cuugggccacccc

SEQ ID NO: 3765762 - RNA, 16 nt, Human
cuugggccauagcucc

SEQ ID NO: 3765763 - RNA, 22 nt, Human
cuugggcccagcugggcucugc

SEQ ID NO: 3765764 - RNA, 14 nt, Human
cuugggcccucugg

SEQ ID NO: 3765765 - RNA, 22 nt, Human
gcuguaaucauuuguuuacauu

SEQ ID NO: 3765766 - RNA, 21 nt, Human
gcuguaaugaaacaccuucuc

SEQ ID NO: 3765767 - RNA, 13 nt, Human
gcuguacauacuu

SEQ ID NO: 3765768 - RNA, 14 nt, Human
gcuguacauacuuu

SEQ ID NO: 3765769 - RNA, 12 nt, Human
gcuguacaucua

SEQ ID NO: 3765770 - RNA, 13 nt, Human
gcuguacccaguu

SEQ ID NO: 3765771 - RNA, 18 nt, Human
gcuguacgacacgggugg

SEQ ID NO: 3765772 - RNA, 17 nt, Human
gcuguacugcucaggcu

SEQ ID NO: 3765773 - RNA, 20 nt, Human
gcuguacuucuugaauauaa

SEQ ID NO: 3765774 - RNA, 18 nt, Human
gcuguagacaucuguccu

SEQ ID NO: 3765775 - RNA, 20 nt, Human
gcuguaguccucauaaaaag

SEQ ID NO: 3765776 - RNA, 20 nt, Human
gcuguauaaaaucagccaau

SEQ ID NO: 3765777 - RNA, 17 nt, Human
gcuguaucccaugagcc

SEQ ID NO: 3765778 - RNA, 19 nt, Human
gcuguaucccaugagccuc

SEQ ID NO: 3765779 - RNA, 14 nt, Human
gcuguaucuuguuu

SEQ ID NO: 3765780 - RNA, 15 nt, Human
gcuguaugcugauca

SEQ ID NO: 3765781 - RNA, 20 nt, Human
gcuguaugucuuaaaaccug

SEQ ID NO: 3765782 - RNA, 17 nt, Human
gcuguauuaagccacuu

SEQ ID NO: 3765783 - RNA, 13 nt, Human
gcuguauucuucu

SEQ ID NO: 3765784 - RNA, 17 nt, Human
gcuguauugaaucaugu

SEQ ID NO: 3765785 - RNA, 12 nt, Human
gcuguauuuuaa

SEQ ID NO: 3765786 - RNA, 18 nt, Human
gcuguauuuuaaaagaau

SEQ ID NO: 3765787 - RNA, 20 nt, Human
gcuguauuuuaaaagaauga

SEQ ID NO: 3765788 - RNA, 13 nt, Human
gcuguauuuugaa

SEQ ID NO: 3765789 - RNA, 20 nt, Human
gcugucaaaacaaguuuuuc

SEQ ID NO: 3765790 - RNA, 22 nt, Human
gcugucaaugggaccuguggcu

SEQ ID NO: 3765791 - RNA, 16 nt, Human
gcugucaauuacagga

SEQ ID NO: 3765792 - RNA, 17 nt, Human
gcugucaauuacaggaa

SEQ ID NO: 3765793 - RNA, 16 nt, Human
gcugucacugcugcuu

SEQ ID NO: 3765794 - RNA, 17 nt, Human
gcugucagccauuccug

SEQ ID NO: 3765795 - RNA, 22 nt, Human
gcugucaggauugcgagagaug

SEQ ID NO: 3765796 - RNA, 23 nt, Human
gcugucaucaauugaauggucag

SEQ ID NO: 3765797 - RNA, 21 nt, Human
gcugucauugcacauaagcuu

SEQ ID NO: 3765798 - RNA, 20 nt, Human
gcugucauugcuucuucuga

SEQ ID NO: 3765799 - RNA, 18 nt, Human
gcuguccagacagccugu

SEQ ID NO: 3765800 - RNA, 16 nt, Human
gcuguccagugcccau

SEQ ID NO: 3765801 - RNA, 18 nt, Human
gcuguccagugcccauuc

SEQ ID NO: 3765802 - RNA, 18 nt, Human
gcugucccauagucccug

SEQ ID NO: 3765803 - RNA, 15 nt, Human
gcuguccccccacuc

SEQ ID NO: 3765804 - RNA, 19 nt, Human
gcuguccccucuugcccca

SEQ ID NO: 3765805 - RNA, 21 nt, Human
gcugucccuuacgugaguccu

SEQ ID NO: 3765806 - RNA, 16 nt, Human
gcugucccuuuuccuu

SEQ ID NO: 3765807 - RNA, 19 nt, Human
gcuguccucagguggccau

SEQ ID NO: 3765808 - RNA, 20 nt, Human
gcuguccucagguggccaug

SEQ ID NO: 3765809 - RNA, 21 nt, Human
gcuguccucagguggccaugc

SEQ ID NO: 3765810 - RNA, 13 nt, Human
gcuguccucccuc

SEQ ID NO: 3765811 - RNA, 18 nt, Human
gcuguccuugaaugccau

SEQ ID NO: 3765812 - RNA, 19 nt, Human
gcuguccuuuuuccucucc

SEQ ID NO: 3765813 - RNA, 14 nt, Human
gcugucuccagacc

SEQ ID NO: 3765814 - RNA, 15 nt, Human
gcugucuccagaccc

SEQ ID NO: 3765815 - RNA, 18 nt, Human
gcugucugaggcuaggug

SEQ ID NO: 3765816 - RNA, 17 nt, Human
gcugucuggccaggccu

SEQ ID NO: 3765817 - RNA, 23 nt, Human
gcugucuguuguauucauugugg

SEQ ID NO: 3765818 - RNA, 21 nt, Human
gcugucuuaaacuaaaugugc

SEQ ID NO: 3765819 - RNA, 20 nt, Human
gcugucuucucaggcucugc

SEQ ID NO: 3765820 - RNA, 22 nt, Human
gcugucuucucaggcucugccc

SEQ ID NO: 3765821 - RNA, 23 nt, Human
gcugucuucuggacaggcucugc

SEQ ID NO: 3765822 - RNA, 17 nt, Human
gcugucuuucuugcucc

SEQ ID NO: 3765823 - RNA, 18 nt, Human
gcugucuuucuugcuccc

SEQ ID NO: 3765824 - RNA, 23 nt, Human
gcugucuuucuugcucccugacu

SEQ ID NO: 3765825 - RNA, 13 nt, Human
gcugugaaaaaaa

SEQ ID NO: 3765826 - RNA, 20 nt, Human
gcugugaacaagugaacaca

SEQ ID NO: 3765827 - RNA, 16 nt, Human
gcugugaacaggcugg

SEQ ID NO: 3765828 - RNA, 19 nt, Human
gcugugaacccuggggccu

SEQ ID NO: 3765829 - RNA, 21 nt, Human
gcugugaacccuggggccuga

SEQ ID NO: 3765830 - RNA, 17 nt, Human
gcugugaacugaaauua

SEQ ID NO: 3765831 - RNA, 19 nt, Human
gcugugacccucaauucau

SEQ ID NO: 3765832 - RNA, 15 nt, Human
gcugugaccugcuga

SEQ ID NO: 3765833 - RNA, 16 nt, Human
gcugugaccugcugag

SEQ ID NO: 3765834 - RNA, 15 nt, Human
gcugugagacagugg

SEQ ID NO: 3765835 - RNA, 15 nt, Human
gcugugagccccugg

SEQ ID NO: 3765836 - RNA, 13 nt, Human
gcugugagccuug

SEQ ID NO: 3765837 - RNA, 14 nt, Human
gcugugagccuugg

SEQ ID NO: 3765838 - RNA, 18 nt, Human
gcugugaggccccuggac

SEQ ID NO: 3765839 - RNA, 15 nt, Human
gcugugaggcugucc

SEQ ID NO: 3765840 - RNA, 17 nt, Human
gcugugaggcuguccug

SEQ ID NO: 3765841 - RNA, 18 nt, Human
gcugugaggcuguccugu

SEQ ID NO: 3765842 - RNA, 14 nt, Human
gcugugagggaggg

SEQ ID NO: 3765843 - RNA, 15 nt, Human
gcugugagggagggg

SEQ ID NO: 3765844 - RNA, 20 nt, Human
gcugugcaacgccgugggcu

SEQ ID NO: 3765845 - RNA, 18 nt, Human
gcugugcacaaaguggca

SEQ ID NO: 3765846 - RNA, 21 nt, Human
gcugugcacaaaguggcauaa

SEQ ID NO: 3765847 - RNA, 16 nt, Human
gcugugcagccugucc

SEQ ID NO: 3765848 - RNA, 13 nt, Human
gcugugccacagg

SEQ ID NO: 3765849 - RNA, 15 nt, Human
gcugugccacaggcu

SEQ ID NO: 3765850 - RNA, 22 nt, Human
gcugugccacccugggcucugu

SEQ ID NO: 3765851 - RNA, 17 nt, Human
gcugugccucccaaaau

SEQ ID NO: 3765852 - RNA, 23 nt, Human
gcugugccucgcuccccacucug

SEQ ID NO: 3765853 - RNA, 12 nt, Human
gcugugccucug

SEQ ID NO: 3765854 - RNA, 16 nt, Human
gcugugcgcccagggc

SEQ ID NO: 3765855 - RNA, 16 nt, Human
gcugugcggaucucug

SEQ ID NO: 3765856 - RNA, 14 nt, Human
gcugugcuaugaau

SEQ ID NO: 3765857 - RNA, 12 nt, Human
gcugugcugccc

SEQ ID NO: 3765858 - RNA, 17 nt, Human
gcugugcugcccugaag

SEQ ID NO: 3765859 - RNA, 15 nt, Human
gcugugcugcccugc

SEQ ID NO: 3765860 - RNA, 16 nt, Human
gcugugcugcccugcc

SEQ ID NO: 3765861 - RNA, 22 nt, Human
gcugugcugcccugcccaccug

SEQ ID NO: 3765862 - RNA, 15 nt, Human
gcugugcugggagaa

SEQ ID NO: 3765863 - RNA, 18 nt, Human
gcugugcuugaaggcccu

SEQ ID NO: 3765864 - RNA, 19 nt, Human
gcugugcuugaaggcccug

SEQ ID NO: 3765865 - RNA, 19 nt, Human
gcuguggagacaaugucug

SEQ ID NO: 3765866 - RNA, 21 nt, Human
gcuguggagacaaugucugca

SEQ ID NO: 3765867 - RNA, 23 nt, Human
gcuguggagacaaugucugcagc

SEQ ID NO: 3765868 - RNA, 17 nt, Human
gcuguggaggauugcua

SEQ ID NO: 3765869 - RNA, 23 nt, Human
gcuguggcaggccagcugugguu

SEQ ID NO: 3765870 - RNA, 21 nt, Human
gcuguggcaugggugaagagg

SEQ ID NO: 3765871 - RNA, 13 nt, Human
gcuguggccaggg

SEQ ID NO: 3765872 - RNA, 18 nt, Human
gcugugggcaagccuaag

SEQ ID NO: 3765873 - RNA, 23 nt, Human
gcugugggcaggugggagcuuga

SEQ ID NO: 3765874 - RNA, 18 nt, Human
gcugugggccucaaggac

SEQ ID NO: 3765875 - RNA, 20 nt, Human
gcugugggcgugagaccugc

SEQ ID NO: 3765876 - RNA, 16 nt, Human
gcugugggcucccuuc

SEQ ID NO: 3765877 - RNA, 16 nt, Human
gcuguggguuuuuaau

SEQ ID NO: 3765878 - RNA, 23 nt, Human
gcugugguagggggugucucagg

SEQ ID NO: 3765879 - RNA, 19 nt, Human
gcuguggucaaggcuacag

SEQ ID NO: 3765880 - RNA, 19 nt, Human
gcuguggugagggaagacg

SEQ ID NO: 3765881 - RNA, 23 nt, Human
gcuguggugugucccccucuguc

SEQ ID NO: 3765882 - RNA, 16 nt, Human
gcugugguuccugggg

SEQ ID NO: 3765883 - RNA, 23 nt, Human
gcugugguuuccaucugaaagua

SEQ ID NO: 3765884 - RNA, 14 nt, Human
gcugugguuuucuu

SEQ ID NO: 3765885 - RNA, 23 nt, Human
gcugugguuuucuuuugccauga

SEQ ID NO: 3765886 - RNA, 14 nt, Human
gcuguguaaaguua

SEQ ID NO: 3765887 - RNA, 16 nt, Human
gcuguguaaaguuagu

SEQ ID NO: 3765888 - RNA, 19 nt, Human
gcuguguaaaguuagucua

SEQ ID NO: 3765889 - RNA, 18 nt, Human
gcuguguaagauuuguuu

SEQ ID NO: 3765890 - RNA, 14 nt, Human
gcuguguaucugau

SEQ ID NO: 3765891 - RNA, 19 nt, Human
gcuguguccaacuccagua

SEQ ID NO: 3765892 - RNA, 14 nt, Human
gcuguguccuugca

SEQ ID NO: 3765893 - RNA, 18 nt, Human
gcuguguccuugcaccug

SEQ ID NO: 3765894 - RNA, 20 nt, Human
gcuguguccuugcaccugca

SEQ ID NO: 3765895 - RNA, 21 nt, Human
gcuguguccuugcaccugcau

SEQ ID NO: 3765896 - RNA, 23 nt, Human
gcuguguccuugcaccugcaucc

SEQ ID NO: 3765897 - RNA, 14 nt, Human
gcugugucuaaacu

SEQ ID NO: 3765898 - RNA, 15 nt, Human
gcugugucucccuuc

SEQ ID NO: 3765899 - RNA, 18 nt, Human
gcugugugcuuuuuuugu

SEQ ID NO: 3765900 - RNA, 16 nt, Human
gcuguguggcagucug

SEQ ID NO: 3765901 - RNA, 15 nt, Human
gcugugugucccagg

SEQ ID NO: 3765902 - RNA, 14 nt, Human
gcuguguguggcuu

SEQ ID NO: 3765903 - RNA, 17 nt, Human
gcuguguucuggugagg

SEQ ID NO: 3765904 - RNA, 19 nt, Human
gcuguguuggguagaauag

SEQ ID NO: 3765905 - RNA, 19 nt, Human
gcuguguugguguggccca

SEQ ID NO: 3765906 - RNA, 22 nt, Human
gcuguguuuauauggaagaaag

SEQ ID NO: 3765907 - RNA, 17 nt, Human
gcuguguuugcagccug

SEQ ID NO: 3765908 - RNA, 19 nt, Human
gcuguguuugcagccugcu

SEQ ID NO: 3765909 - RNA, 14 nt, Human
gcuguguuugcucc

SEQ ID NO: 3765910 - RNA, 15 nt, Human
gcuguuaaacuguua

SEQ ID NO: 3765911 - RNA, 22 nt, Human
gcuguuaaauacaggaaacagu

SEQ ID NO: 3765912 - RNA, 18 nt, Human
gcuguuacuguuaaccau

SEQ ID NO: 3765913 - RNA, 20 nt, Human
gcuguuaugucuguuuaaga

SEQ ID NO: 3765914 - RNA, 17 nt, Human
cuugggcccuuugagug

SEQ ID NO: 3765915 - RNA, 13 nt, Human
cuugggcucccug

SEQ ID NO: 3765916 - RNA, 21 nt, Human
cuugggcucccuguaaccucu

SEQ ID NO: 3765917 - RNA, 21 nt, Human
cuugggcuccgugugggagac

SEQ ID NO: 3765918 - RNA, 14 nt, Human
cuugggcugagacu

SEQ ID NO: 3765919 - RNA, 17 nt, Human
cuugggcugagacugga

SEQ ID NO: 3765920 - RNA, 14 nt, Human
cuugggcugcuccu

SEQ ID NO: 3765921 - RNA, 18 nt, Human
cuuggggaacaagggugg

SEQ ID NO: 3765922 - RNA, 17 nt, Human
cuuggggaauuuccucu

SEQ ID NO: 3765923 - RNA, 22 nt, Human
cuuggggacaaccuuggcuugg

SEQ ID NO: 3765924 - RNA, 20 nt, Human
cuuggggacaggggcaggag

SEQ ID NO: 3765925 - RNA, 17 nt, Human
cuuggggaccagagcug

SEQ ID NO: 3765926 - RNA, 18 nt, Human
cuuggggaccagagcugc

SEQ ID NO: 3765927 - RNA, 20 nt, Human
cuuggggaccagagcugcca

SEQ ID NO: 3765928 - RNA, 23 nt, Human
cuuggggaggacaaaacuucuug

SEQ ID NO: 3765929 - RNA, 21 nt, Human
cuuggggaguuuagggugggg

SEQ ID NO: 3765930 - RNA, 19 nt, Human
cuuggggauucuuccaucu

SEQ ID NO: 3765931 - RNA, 21 nt, Human
cuuggggauucuuccaucuga

SEQ ID NO: 3765932 - RNA, 20 nt, Human
cuuggggcaacauuguucac

SEQ ID NO: 3765933 - RNA, 19 nt, Human
cuuggggccaccaaagcug

SEQ ID NO: 3765934 - RNA, 16 nt, Human
cuuggggcccagugca

SEQ ID NO: 3765935 - RNA, 17 nt, Human
cuuggggcccagugcau

SEQ ID NO: 3765936 - RNA, 19 nt, Human
cuuggggcccagugcaugg

SEQ ID NO: 3765937 - RNA, 15 nt, Human
cuuggggccuaugca

SEQ ID NO: 3765938 - RNA, 14 nt, Human
cuuggggcuuccua

SEQ ID NO: 3765939 - RNA, 16 nt, Human
cuuggggggcugaggu

SEQ ID NO: 3765940 - RNA, 18 nt, Human
cuuggggggguggccgcu

SEQ ID NO: 3765941 - RNA, 22 nt, Human
cuuggggggguggccgcugagu

SEQ ID NO: 3765942 - RNA, 13 nt, Human
cuuggggggugau

SEQ ID NO: 3765943 - RNA, 20 nt, Human
cuuggggguccuccuccagg

SEQ ID NO: 3765944 - RNA, 23 nt, Human
cuuggggguccuccuccagggac

SEQ ID NO: 3765945 - RNA, 23 nt, Human
cuuggggguucaggcccggcagg

SEQ ID NO: 3765946 - RNA, 15 nt, Human
cuuggggucaagaaa

SEQ ID NO: 3765947 - RNA, 13 nt, Human
cuuggggucaggu

SEQ ID NO: 3765948 - RNA, 20 nt, Human
cuugggguuuucaguaugaa

SEQ ID NO: 3765949 - RNA, 23 nt, Human
cuuggguagaguuuacagcucug

SEQ ID NO: 3765950 - RNA, 16 nt, Human
cuuggguagcgcacuc

SEQ ID NO: 3765951 - RNA, 15 nt, Human
cuuggguaggcggga

SEQ ID NO: 3765952 - RNA, 23 nt, Human
cuugggucccccacgugacagug

SEQ ID NO: 3765953 - RNA, 18 nt, Human
cuuggguggagaagccau

SEQ ID NO: 3765954 - RNA, 18 nt, Human
cuuggguuagaccuacag

SEQ ID NO: 3765955 - RNA, 18 nt, Human
cuugguacuugcugcuau

SEQ ID NO: 3765956 - RNA, 16 nt, Human
cuuggucaccagcucc

SEQ ID NO: 3765957 - RNA, 16 nt, Human
cuugguccaggaaaug

SEQ ID NO: 3765958 - RNA, 15 nt, Human
cuugguccuugauuu

SEQ ID NO: 3765959 - RNA, 16 nt, Human
cuuggucuuuguaucu

SEQ ID NO: 3765960 - RNA, 18 nt, Human
cuuggugcuuauugauau

SEQ ID NO: 3765961 - RNA, 19 nt, Human
cuugguggcucacgccugu

SEQ ID NO: 3765962 - RNA, 13 nt, Human
cuugguguaauuu

SEQ ID NO: 3765963 - RNA, 16 nt, Human
cuugguguccaccugg

SEQ ID NO: 3765964 - RNA, 20 nt, Human
cuuggugucgggcaugacac

SEQ ID NO: 3765965 - RNA, 21 nt, Human
cuugguguuaaaacacuucug

SEQ ID NO: 3765966 - RNA, 16 nt, Human
cuugguucauaaauga

SEQ ID NO: 3765967 - RNA, 19 nt, Human
cuugguucccccacugauc

SEQ ID NO: 3765968 - RNA, 13 nt, Human
cuugguuccuggg

SEQ ID NO: 3765969 - RNA, 16 nt, Human
cuugguuccuucccaa

SEQ ID NO: 3765970 - RNA, 19 nt, Human
cuugguucuugaggggacc

SEQ ID NO: 3765971 - RNA, 16 nt, Human
cuugguugaggaaaca

SEQ ID NO: 3765972 - RNA, 17 nt, Human
cuugguuggguccucac

SEQ ID NO: 3765973 - RNA, 18 nt, Human
cuugguugucuccacaca

SEQ ID NO: 3765974 - RNA, 15 nt, Human
cuugguugucuggca

SEQ ID NO: 3765975 - RNA, 23 nt, Human
cuugguuucucucuacagugcca

SEQ ID NO: 3765976 - RNA, 21 nt, Human
cuugguuuugcuacauaauua

SEQ ID NO: 3765977 - RNA, 22 nt, Human
cuugguuuuuacugcucugaga

SEQ ID NO: 3765978 - RNA, 18 nt, Human
cuuguaaaagacagugua

SEQ ID NO: 3765979 - RNA, 17 nt, Human
cuuguaaacagaagcaa

SEQ ID NO: 3765980 - RNA, 13 nt, Human
cuuguaaagacug

SEQ ID NO: 3765981 - RNA, 15 nt, Human
cuuguaaagacuggu

SEQ ID NO: 3765982 - RNA, 18 nt, Human
cuuguaaaggaauuuaaa

SEQ ID NO: 3765983 - RNA, 19 nt, Human
cuuguaaaggaauuuaaaa

SEQ ID NO: 3765984 - RNA, 17 nt, Human
cuuguaaauaaagcccu

SEQ ID NO: 3765985 - RNA, 19 nt, Human
cuuguaaauaaagcccugg

SEQ ID NO: 3765986 - RNA, 21 nt, Human
cuuguaaauagcucagguguc

SEQ ID NO: 3765987 - RNA, 14 nt, Human
cuuguaaauauaaa

SEQ ID NO: 3765988 - RNA, 16 nt, Human
cuuguaaauauaaaga

SEQ ID NO: 3765989 - RNA, 19 nt, Human
cuuguaaauauaaagacgu

SEQ ID NO: 3765990 - RNA, 23 nt, Human
cuuguaaauguguuggacaaaug

SEQ ID NO: 3765991 - RNA, 23 nt, Human
cuuguaaauuauuaauuuaugca

SEQ ID NO: 3765992 - RNA, 14 nt, Human
cuuguaacuccacc

SEQ ID NO: 3765993 - RNA, 15 nt, Human
cuuguaacuccacca

SEQ ID NO: 3765994 - RNA, 14 nt, Human
cuuguaagacccuu

SEQ ID NO: 3765995 - RNA, 19 nt, Human
cuuguaagagcuauacagu

SEQ ID NO: 3765996 - RNA, 12 nt, Human
cuuguaagauuu

SEQ ID NO: 3765997 - RNA, 15 nt, Human
cuuguaagauuuuga

SEQ ID NO: 3765998 - RNA, 18 nt, Human
cuuguaagauuuugaaaa

SEQ ID NO: 3765999 - RNA, 15 nt, Human
cuuguaaggcuuuga

SEQ ID NO: 3766000 - RNA, 21 nt, Human
cuuguaaugauauagccagaa

SEQ ID NO: 3766001 - RNA, 14 nt, Human
cuuguaauguaacu

SEQ ID NO: 3766002 - RNA, 10 nt, Human
cuuguaauua

SEQ ID NO: 3766003 - RNA, 12 nt, Human
cuuguaauuuaa

SEQ ID NO: 3766004 - RNA, 14 nt, Human
cuuguaauuuccag

SEQ ID NO: 3766005 - RNA, 19 nt, Human
cuuguacauaaugcgugca

SEQ ID NO: 3766006 - RNA, 22 nt, Human
cuuguacauguguagccugugc

SEQ ID NO: 3766007 - RNA, 23 nt, Human
cuuguacauguguagccugugca

SEQ ID NO: 3766008 - RNA, 18 nt, Human
cuuguagaacucacucug

SEQ ID NO: 3766009 - RNA, 14 nt, Human
cuuguagaauuguu

SEQ ID NO: 3766010 - RNA, 21 nt, Human
cuuguagccagccggggcgag

SEQ ID NO: 3766011 - RNA, 13 nt, Human
cuuguagcuccuc

SEQ ID NO: 3766012 - RNA, 22 nt, Human
cuuguagcuguaaaacgcuguc

SEQ ID NO: 3766013 - RNA, 13 nt, Human
cuuguauaaaugu

SEQ ID NO: 3766014 - RNA, 23 nt, Human
cuuguauaaauguauauacacau

SEQ ID NO: 3766015 - RNA, 19 nt, Human
cuuguauaagauccuagau

SEQ ID NO: 3766016 - RNA, 15 nt, Human
cuuguauaguguaaa

SEQ ID NO: 3766017 - RNA, 16 nt, Human
cuuguauaguguaaaa

SEQ ID NO: 3766018 - RNA, 18 nt, Human
cuuguauauuuguacaaa

SEQ ID NO: 3766019 - RNA, 20 nt, Human
cuuguaucaacacuguuacu

SEQ ID NO: 3766020 - RNA, 19 nt, Human
cuuguaucuggauucaaau

SEQ ID NO: 3766021 - RNA, 17 nt, Human
cuuguauuaaagacaga

SEQ ID NO: 3766022 - RNA, 13 nt, Human
cuuguauuaaguu

SEQ ID NO: 3766023 - RNA, 20 nt, Human
cuuguauuccaagcauauaa

SEQ ID NO: 3766024 - RNA, 16 nt, Human
cuuguauuuuuuaaug

SEQ ID NO: 3766025 - RNA, 19 nt, Human
cuugucaagccugugcaaa

SEQ ID NO: 3766026 - RNA, 22 nt, Human
cuugucaauauuuaaacauggu

SEQ ID NO: 3766027 - RNA, 18 nt, Human
cuugucacugacacaaag

SEQ ID NO: 3766028 - RNA, 23 nt, Human
cuugucacugacacaaaggaagu

SEQ ID NO: 3766029 - RNA, 15 nt, Human
cuugucacugguaga

SEQ ID NO: 3766030 - RNA, 13 nt, Human
cuugucacuugca

SEQ ID NO: 3766031 - RNA, 15 nt, Human
cuugucagagcuggg

SEQ ID NO: 3766032 - RNA, 16 nt, Human
cuugucauagccagug

SEQ ID NO: 3766033 - RNA, 20 nt, Human
cuugucauauguagccuuca

SEQ ID NO: 3766034 - RNA, 12 nt, Human
cuugucaugugu

SEQ ID NO: 3766035 - RNA, 16 nt, Human
cuugucauguguauaa

SEQ ID NO: 3766036 - RNA, 18 nt, Human
cuugucauuuuuuuucuu

SEQ ID NO: 3766037 - RNA, 18 nt, Human
cuuguccagcgccuagug

SEQ ID NO: 3766038 - RNA, 18 nt, Human
cuugucccacucaagcca

SEQ ID NO: 3766039 - RNA, 19 nt, Human
cuugucccacucaagccaa

SEQ ID NO: 3766040 - RNA, 21 nt, Human
cuugucccacucaagccaagc

SEQ ID NO: 3766041 - RNA, 13 nt, Human
cuuguccccacac

SEQ ID NO: 3766042 - RNA, 16 nt, Human
cuuguccccacacucc

SEQ ID NO: 3766043 - RNA, 16 nt, Human
cuuguccuagcacaga

SEQ ID NO: 3766044 - RNA, 16 nt, Human
cuuguccucaguccau

SEQ ID NO: 3766045 - RNA, 14 nt, Human
cuuguccuuagccu

SEQ ID NO: 3766046 - RNA, 22 nt, Human
cuugucgccccucccucccaga

SEQ ID NO: 3766047 - RNA, 16 nt, Human
cuugucuauaaagcau

SEQ ID NO: 3766048 - RNA, 20 nt, Human
cuugucuauaaagcauuuaa

SEQ ID NO: 3766049 - RNA, 13 nt, Human
cuugucucagauu

SEQ ID NO: 3766050 - RNA, 14 nt, Human
cuugucucagauuu

SEQ ID NO: 3766051 - RNA, 12 nt, Human
cuugucuccccu

SEQ ID NO: 3766052 - RNA, 18 nt, Human
cuugucuccuacuccuga

SEQ ID NO: 3766053 - RNA, 20 nt, Human
cuugucuccuacuccugacu

SEQ ID NO: 3766054 - RNA, 19 nt, Human
cuugucucuucaucuaaua

SEQ ID NO: 3766055 - RNA, 21 nt, Human
cuugucuguagcgucuguaua

SEQ ID NO: 3766056 - RNA, 21 nt, Human
cuugucuucugguacuuucug

SEQ ID NO: 3766057 - RNA, 16 nt, Human
cuugucuuucuggggu

SEQ ID NO: 3766058 - RNA, 18 nt, Human
cuugucuuuggacccuga

SEQ ID NO: 3766059 - RNA, 20 nt, Human
cuugucuuuggacccugagg

SEQ ID NO: 3766060 - RNA, 16 nt, Human
cuugugaaaauguguu

SEQ ID NO: 3766061 - RNA, 14 nt, Human
cuugugaaacacag

SEQ ID NO: 3766062 - RNA, 19 nt, Human
cuugugaaugcuucucacu

SEQ ID NO: 3766063 - RNA, 21 nt, Human
ggacccuucccuugagcccuc

SEQ ID NO: 3766064 - RNA, 12 nt, Human
ggacccuuuccu

SEQ ID NO: 3766065 - RNA, 23 nt, Human
ggacccuuuccuuccuucccugg

SEQ ID NO: 3766066 - RNA, 16 nt, Human
ggaccgaguagaggca

SEQ ID NO: 3766067 - RNA, 17 nt, Human
ggaccgccagauggggc

SEQ ID NO: 3766068 - RNA, 20 nt, Human
ggaccgcuacaccacucugg

SEQ ID NO: 3766069 - RNA, 15 nt, Human
ggaccggcugccccg

SEQ ID NO: 3766070 - RNA, 23 nt, Human
ggaccgggccgcuagaugggcau

SEQ ID NO: 3766071 - RNA, 22 nt, Human
ggaccuaaauggccucaugugg

SEQ ID NO: 3766072 - RNA, 17 nt, Human
ggaccuagggaggcaug

SEQ ID NO: 3766073 - RNA, 19 nt, Human
ggaccucagaguccaggcc

SEQ ID NO: 3766074 - RNA, 13 nt, Human
ggaccucaggccu

SEQ ID NO: 3766075 - RNA, 15 nt, Human
ggaccucaggccugg

SEQ ID NO: 3766076 - RNA, 19 nt, Human
ggaccucaggugagaagca

SEQ ID NO: 3766077 - RNA, 18 nt, Human
ggaccucauccaaacaau

SEQ ID NO: 3766078 - RNA, 17 nt, Human
ggaccuccccugaggcu

SEQ ID NO: 3766079 - RNA, 17 nt, Human
ggaccucccuuccgacc

SEQ ID NO: 3766080 - RNA, 15 nt, Human
ggaccuccucuuccc

SEQ ID NO: 3766081 - RNA, 23 nt, Human
ggaccuccucuucccccuuccaa

SEQ ID NO: 3766082 - RNA, 14 nt, Human
ggaccuccugagcg

SEQ ID NO: 3766083 - RNA, 12 nt, Human
ggaccucuccca

SEQ ID NO: 3766084 - RNA, 14 nt, Human
ggaccucucccagg

SEQ ID NO: 3766085 - RNA, 17 nt, Human
ggaccucugacagcagc

SEQ ID NO: 3766086 - RNA, 12 nt, Human
ggaccucugcuc

SEQ ID NO: 3766087 - RNA, 14 nt, Human
ggaccucugggcuu

SEQ ID NO: 3766088 - RNA, 14 nt, Human
ggaccugagccugc

SEQ ID NO: 3766089 - RNA, 13 nt, Human
ggaccuggggcac

SEQ ID NO: 3766090 - RNA, 16 nt, Human
ggaccuggggcacagu

SEQ ID NO: 3766091 - RNA, 16 nt, Human
ggaccuguggcugucg

SEQ ID NO: 3766092 - RNA, 15 nt, Human
ggaccuuaucugugc

SEQ ID NO: 3766093 - RNA, 22 nt, Human
ggaccuucacucuaagauguua

SEQ ID NO: 3766094 - RNA, 15 nt, Human
ggaccuuccugccac

SEQ ID NO: 3766095 - RNA, 18 nt, Human
ggaccuucgggcugugcc

SEQ ID NO: 3766096 - RNA, 20 nt, Human
ggaccuucgggcugugcccg

SEQ ID NO: 3766097 - RNA, 18 nt, Human
ggaccuugaacuggguac

SEQ ID NO: 3766098 - RNA, 19 nt, Human
ggaccuuuagugguggcca

SEQ ID NO: 3766099 - RNA, 20 nt, Human
ggaccuuuccaccacagcca

SEQ ID NO: 3766100 - RNA, 15 nt, Human
ggaccuuuuaaagug

SEQ ID NO: 3766101 - RNA, 22 nt, Human
ggaccuuuuaaaguguuucagc

SEQ ID NO: 3766102 - RNA, 19 nt, Human
ggacgaagaagagccacag

SEQ ID NO: 3766103 - RNA, 21 nt, Human
ggacgagaugggaaggcacag

SEQ ID NO: 3766104 - RNA, 14 nt, Human
ggacgcacugagca

SEQ ID NO: 3766105 - RNA, 15 nt, Human
ggacgccacccagca

SEQ ID NO: 3766106 - RNA, 20 nt, Human
ggacgccacucauuucaucu

SEQ ID NO: 3766107 - RNA, 20 nt, Human
ggacgccugggggugccagg

SEQ ID NO: 3766108 - RNA, 13 nt, Human
ggacgcucugcug

SEQ ID NO: 3766109 - RNA, 18 nt, Human
ggacgcugaccguggagc

SEQ ID NO: 3766110 - RNA, 15 nt, Human
ggacgcuuugucugu

SEQ ID NO: 3766111 - RNA, 17 nt, Human
ggacggccaagaaugua

SEQ ID NO: 3766112 - RNA, 20 nt, Human
uuuuucaucuucaguugucu

SEQ ID NO: 3766113 - RNA, 18 nt, Human
uuuuucaugauuuugaaa

SEQ ID NO: 3766114 - RNA, 10 nt, Human
uuuuucaugu

SEQ ID NO: 3766115 - RNA, 13 nt, Human
uuuuucauuauuu

SEQ ID NO: 3766116 - RNA, 22 nt, Human
uuuuucauuauuuuauuaugaa

SEQ ID NO: 3766117 - RNA, 19 nt, Human
uuuuucauugccaaaaacu

SEQ ID NO: 3766118 - RNA, 16 nt, Human
uuuuuccaaaaaaaua

SEQ ID NO: 3766119 - RNA, 11 nt, Human
uuuuuccaaca

SEQ ID NO: 3766120 - RNA, 20 nt, Human
uuuuuccaauuuuagaaaau

SEQ ID NO: 3766121 - RNA, 12 nt, Human
uuuuuccaggcu

SEQ ID NO: 3766122 - RNA, 14 nt, Human
uuuuuccauaguuu

SEQ ID NO: 3766123 - RNA, 20 nt, Human
uuuuuccauaguuuugauga

SEQ ID NO: 3766124 - RNA, 13 nt, Human
uuuuuccaucuuu

SEQ ID NO: 3766125 - RNA, 19 nt, Human
uuuuucccagcuacaccuu

SEQ ID NO: 3766126 - RNA, 15 nt, Human
uuuuucccauuuaga

SEQ ID NO: 3766127 - RNA, 17 nt, Human
uuuuuccccagacuugu

SEQ ID NO: 3766128 - RNA, 18 nt, Human
uuuuucccuaucacugaa

SEQ ID NO: 3766129 - RNA, 15 nt, Human
uuuuuccguaaaaau

SEQ ID NO: 3766130 - RNA, 18 nt, Human
uuuuuccuagcccucuca

SEQ ID NO: 3766131 - RNA, 15 nt, Human
uuuuuccuagccugu

SEQ ID NO: 3766132 - RNA, 22 nt, Human
uuuuuccuaugaccauaaaauu

SEQ ID NO: 3766133 - RNA, 17 nt, Human
uuuuuccuaugcuauug

SEQ ID NO: 3766134 - RNA, 22 nt, Human
uuuuuccuucaaaguuuaauaa

SEQ ID NO: 3766135 - RNA, 21 nt, Human
uuuuuccuucaagaaugcagu

SEQ ID NO: 3766136 - RNA, 15 nt, Human
uuuuuccuucucugg

SEQ ID NO: 3766137 - RNA, 17 nt, Human
uuuuuccuuguauuuaa

SEQ ID NO: 3766138 - RNA, 18 nt, Human
uuuuuccuuuaacugaca

SEQ ID NO: 3766139 - RNA, 14 nt, Human
uuuuucuaaaggag

SEQ ID NO: 3766140 - RNA, 18 nt, Human
uuuuucuacuuuuaaaga

SEQ ID NO: 3766141 - RNA, 11 nt, Human
uuuuucuauua

SEQ ID NO: 3766142 - RNA, 18 nt, Human
uuuuucuauuaaaagacu

SEQ ID NO: 3766143 - RNA, 21 nt, Human
uuuuucuauuaaaagacucau

SEQ ID NO: 3766144 - RNA, 15 nt, Human
uuuuucuccagugcu

SEQ ID NO: 3766145 - RNA, 11 nt, Human
uuuuucucuaa

SEQ ID NO: 3766146 - RNA, 16 nt, Human
uuuuucucucaacacc

SEQ ID NO: 3766147 - RNA, 18 nt, Human
uuuuucugacuccagugg

SEQ ID NO: 3766148 - RNA, 13 nt, Human
uuuuucugcacua

SEQ ID NO: 3766149 - RNA, 14 nt, Human
uuuuucugcacuga

SEQ ID NO: 3766150 - RNA, 14 nt, Human
uuuuucuguuauau

SEQ ID NO: 3766151 - RNA, 17 nt, Human
uuuuucuguuguaacuu

SEQ ID NO: 3766152 - RNA, 15 nt, Human
uuuuucuuaaaaagu

SEQ ID NO: 3766153 - RNA, 23 nt, Human
uuuuucuuaaauaauaaagauca

SEQ ID NO: 3766154 - RNA, 21 nt, Human
uuuuucuuaauauauagcauu

SEQ ID NO: 3766155 - RNA, 13 nt, Human
uuuuucuuuauaa

SEQ ID NO: 3766156 - RNA, 16 nt, Human
uuuuucuuuauaaacu

SEQ ID NO: 3766157 - RNA, 13 nt, Human
uuuuugaaaacau

SEQ ID NO: 3766158 - RNA, 20 nt, Human
uuuuugaaaagcagacauuu

SEQ ID NO: 3766159 - RNA, 23 nt, Human
uuuuugaaaggcauguuccucug

SEQ ID NO: 3766160 - RNA, 14 nt, Human
uuuuugaaauaaua

SEQ ID NO: 3766161 - RNA, 17 nt, Human
uuuuugaaaugcugaaa

SEQ ID NO: 3766162 - RNA, 20 nt, Human
uuuuugaaaugcugaaaauu

SEQ ID NO: 3766163 - RNA, 23 nt, Human
uuuuugaacuaagaaacuuuugu

SEQ ID NO: 3766164 - RNA, 22 nt, Human
uuuuugaaggcagaaagcaaaa

SEQ ID NO: 3766165 - RNA, 14 nt, Human
uuuuugaaguguag

SEQ ID NO: 3766166 - RNA, 12 nt, Human
uuuuugacacug

SEQ ID NO: 3766167 - RNA, 19 nt, Human
uuuuugacacugaaaguuu

SEQ ID NO: 3766168 - RNA, 22 nt, Human
uuuuugacacugaaaguuuugu

SEQ ID NO: 3766169 - RNA, 12 nt, Human
uuuuugacagaa

SEQ ID NO: 3766170 - RNA, 16 nt, Human
uuuuugacucccagau

SEQ ID NO: 3766171 - RNA, 12 nt, Human
uuuuugacuuuu

SEQ ID NO: 3766172 - RNA, 20 nt, Human
uuuuugacuuuuuuuguaug

SEQ ID NO: 3766173 - RNA, 16 nt, Human
uuuuugagacagaguc

SEQ ID NO: 3766174 - RNA, 16 nt, Human
uuuuugagucaaagac

SEQ ID NO: 3766175 - RNA, 13 nt, Human
uuuuugauagcau

SEQ ID NO: 3766176 - RNA, 19 nt, Human
uuuuugauagcauuguaag

SEQ ID NO: 3766177 - RNA, 12 nt, Human
uuuuugauauag

SEQ ID NO: 3766178 - RNA, 15 nt, Human
uuuuugcaagugaag

SEQ ID NO: 3766179 - RNA, 22 nt, Human
uuuuugcaauaaugcaguaugg

SEQ ID NO: 3766180 - RNA, 9 nt, Human
uuuuugcag

SEQ ID NO: 3766181 - RNA, 18 nt, Human
uuuuugcaggagcaguau

SEQ ID NO: 3766182 - RNA, 14 nt, Human
uuuuugcaguaacu

SEQ ID NO: 3766183 - RNA, 14 nt, Human
uuuuugccuucauu

SEQ ID NO: 3766184 - RNA, 18 nt, Human
uuuuuggaaaagaauaaa

SEQ ID NO: 3766185 - RNA, 15 nt, Human
uuuuuggacacauuu

SEQ ID NO: 3766186 - RNA, 18 nt, Human
uuuuuggacuucaaagca

SEQ ID NO: 3766187 - RNA, 24 nt, Human
uuuuuggcauaacauaaaucugug

SEQ ID NO: 3766188 - RNA, 20 nt, Human
uuuuuggcuuuagacacugg

SEQ ID NO: 3766189 - RNA, 22 nt, Human
uuuuugggaaaagaaaagucaa

SEQ ID NO: 3766190 - RNA, 21 nt, Human
uuuuugggcagcaauuuaaau

SEQ ID NO: 3766191 - RNA, 12 nt, Human
uuuuuggggaua

SEQ ID NO: 3766192 - RNA, 16 nt, Human
uuuuuggggauaugcu

SEQ ID NO: 3766193 - RNA, 22 nt, Human
uuuuugggggguuuucuugccu

SEQ ID NO: 3766194 - RNA, 22 nt, Human
uuuuuggucgaggaguaacaau

SEQ ID NO: 3766195 - RNA, 18 nt, Human
uuuuugguugucaauauu

SEQ ID NO: 3766196 - RNA, 10 nt, Human
uuuuuguaaa

SEQ ID NO: 3766197 - RNA, 14 nt, Human
uuuuuguaaagauu

SEQ ID NO: 3766198 - RNA, 22 nt, Human
uuuuuguaauaagcaaucaagg

SEQ ID NO: 3766199 - RNA, 11 nt, Human
uuuuuguacau

SEQ ID NO: 3766200 - RNA, 16 nt, Human
uuuuuguaccugguga

SEQ ID NO: 3766201 - RNA, 19 nt, Human
uuuuuguagcacugacaga

SEQ ID NO: 3766202 - RNA, 16 nt, Human
uuuuuguagccuuccu

SEQ ID NO: 3766203 - RNA, 13 nt, Human
uuuuugucucaau

SEQ ID NO: 3766204 - RNA, 13 nt, Human
uuuuugucuuuuc

SEQ ID NO: 3766205 - RNA, 19 nt, Human
uuuuugugaaaagcuccau

SEQ ID NO: 3766206 - RNA, 21 nt, Human
uuuuugugaagacggcacggu

SEQ ID NO: 3766207 - RNA, 15 nt, Human
uuuuuguguguauuu

SEQ ID NO: 3766208 - RNA, 18 nt, Human
uuuuuguguguauuugcu

SEQ ID NO: 3766209 - RNA, 20 nt, Human
uuuuuguucuuaauugcacu

SEQ ID NO: 3766210 - RNA, 14 nt, Human
uuuuuguuggagug

SEQ ID NO: 3766211 - RNA, 17 nt, Human
uuuuuguuuuacaaugu

SEQ ID NO: 3766212 - RNA, 13 nt, Human
uuuuuuaaaaaag

SEQ ID NO: 3766213 - RNA, 13 nt, Human
uuuuuuaaaaacu

SEQ ID NO: 3766214 - RNA, 16 nt, Human
uuuuuuaaacaaacau

SEQ ID NO: 3766215 - RNA, 12 nt, Human
uuuuuuaagcuu

SEQ ID NO: 3766216 - RNA, 15 nt, Human
uuuuuuaagcuucag

SEQ ID NO: 3766217 - RNA, 23 nt, Human
uuuuuuaagcuucaguugcuugu

SEQ ID NO: 3766218 - RNA, 15 nt, Human
uuuuuuaauaaauuu

SEQ ID NO: 3766219 - RNA, 12 nt, Human
uuuuuuacauuu

SEQ ID NO: 3766220 - RNA, 22 nt, Human
uuuuuuacucauugaaauguca

SEQ ID NO: 3766221 - RNA, 16 nt, Human
uuuuuuagaucaaaua

SEQ ID NO: 3766222 - RNA, 23 nt, Human
uuuuuuaguaaguuaauguauau

SEQ ID NO: 3766223 - RNA, 21 nt, Human
uuuuuuaguauuuauuuaugu

SEQ ID NO: 3766224 - RNA, 13 nt, Human
uuuuuuaguugaa

SEQ ID NO: 3766225 - RNA, 15 nt, Human
uuuuuuauacacaua

SEQ ID NO: 3766226 - RNA, 20 nt, Human
uuuuuuauacaggaugauga

SEQ ID NO: 3766227 - RNA, 13 nt, Human
uuuuuuaugcuaa

SEQ ID NO: 3766228 - RNA, 18 nt, Human
uuuuuucaauauuuauua

SEQ ID NO: 3766229 - RNA, 12 nt, Human
uuuuuucaaugu

SEQ ID NO: 3766230 - RNA, 11 nt, Human
uuuuuucagac

SEQ ID NO: 3766231 - RNA, 12 nt, Human
uuuuuucaucuu

SEQ ID NO: 3766232 - RNA, 13 nt, Human
uuuuuucaucuuc

SEQ ID NO: 3766233 - RNA, 20 nt, Human
uuuuuucauguuuuaacaaa

SEQ ID NO: 3766234 - RNA, 13 nt, Human
uuuuuucauuuau

SEQ ID NO: 3766235 - RNA, 13 nt, Human
uuuuuuccaucuu

SEQ ID NO: 3766236 - RNA, 15 nt, Human
uuuuuucccauaaga

SEQ ID NO: 3766237 - RNA, 12 nt, Human
uuuuuuccccag

SEQ ID NO: 3766238 - RNA, 15 nt, Human
uuuuuuccugucaua

SEQ ID NO: 3766239 - RNA, 20 nt, Human
uuuuuuccuuacauaaacau

SEQ ID NO: 3766240 - RNA, 12 nt, Human
uuuuuucugaau

SEQ ID NO: 3766241 - RNA, 11 nt, Human
uuuuuucugau

SEQ ID NO: 3766242 - RNA, 19 nt, Human
uuuuuugaacucuucucau

SEQ ID NO: 3766243 - RNA, 13 nt, Human
uuuuuugauauau

SEQ ID NO: 3766244 - RNA, 9 nt, Human
uuuuuugca

SEQ ID NO: 3766245 - RNA, 23 nt, Human
uuuuuuggggauaugcuuaguaa

SEQ ID NO: 3766246 - RNA, 13 nt, Human
uuuuuuguaauaa

SEQ ID NO: 3766247 - RNA, 13 nt, Human
uuuuuuguaccaa

SEQ ID NO: 3766248 - RNA, 13 nt, Human
uuuuuuguaugaa

SEQ ID NO: 3766249 - RNA, 12 nt, Human
uuuuuuguuauu

SEQ ID NO: 3766250 - RNA, 13 nt, Human
uuuuuuguuucau

SEQ ID NO: 3766251 - RNA, 13 nt, Human
uuuuuuguuuguu

SEQ ID NO: 3766252 - RNA, 13 nt, Human
uuuuuuucaaugu

SEQ ID NO: 3766253 - RNA, 14 nt, Human
uuuuuuucaaugug

SEQ ID NO: 3766254 - RNA, 14 nt, Human
uuuuuuucuaagag

SEQ ID NO: 3766255 - RNA, 11 nt, Human
uuuuuuugcca

SEQ ID NO: 3766256 - RNA, 10 nt, Human
uuuuuuuggc

SEQ ID NO: 3766257 - RNA, 13 nt, Human
uuuuuuuguuugu

SEQ ID NO: 3766258 - RNA, 11 nt, Human
uuuuuuuugca

SEQ ID NO: 3766259 - RNA, 12 nt, Human
uuuuuuuugcag

SEQ ID NO: 3766260 - RNA, 15 nt, Human
uuaaacgauuuuuaa

SEQ ID NO: 3766261 - RNA, 23 nt, Human
uuaaacgcucuagguacgaugac

SEQ ID NO: 3766262 - RNA, 14 nt, Human
uuaaacggauuauu

SEQ ID NO: 3766263 - RNA, 16 nt, Human
uuaaacggauuauuuu

SEQ ID NO: 3766264 - RNA, 18 nt, Human
uuaaacguaugcauguga

SEQ ID NO: 3766265 - RNA, 14 nt, Human
uuaaacgugcagac

SEQ ID NO: 3766266 - RNA, 23 nt, Human
uuaaacuagaugaccucauuaac

SEQ ID NO: 3766267 - RNA, 19 nt, Human
uuaaacuagcauaucugcc

SEQ ID NO: 3766268 - RNA, 16 nt, Human
uuaaacuaucuugugu

SEQ ID NO: 3766269 - RNA, 14 nt, Human
uuaaacucagggac

SEQ ID NO: 3766270 - RNA, 20 nt, Human
uuaaacucagggacagagcc

SEQ ID NO: 3766271 - RNA, 22 nt, Human
uuaaacucuguugcaagugcaa

SEQ ID NO: 3766272 - RNA, 19 nt, Human
uuaaacucuucacaaaauc

SEQ ID NO: 3766273 - RNA, 13 nt, Human
uuaaacuguacag

SEQ ID NO: 3766274 - RNA, 18 nt, Human
uuaaacuguacagugucu

SEQ ID NO: 3766275 - RNA, 20 nt, Human
uuaaacuguacagugucuuu

SEQ ID NO: 3766276 - RNA, 20 nt, Human
uuaaacugucgugucauacu

SEQ ID NO: 3766277 - RNA, 12 nt, Human
uuaaacugugua

SEQ ID NO: 3766278 - RNA, 19 nt, Human
uuaaacuguguacauaacu

SEQ ID NO: 3766279 - RNA, 20 nt, Human
uuaaacuguguggacuguga

SEQ ID NO: 3766280 - RNA, 20 nt, Human
uuaaacuguuagcacuguug

SEQ ID NO: 3766281 - RNA, 22 nt, Human
uuaaacuuaaucuaaauggaac

SEQ ID NO: 3766282 - RNA, 16 nt, Human
uuaaacuuccaaagaa

SEQ ID NO: 3766283 - RNA, 17 nt, Human
uuaaacuuccaaagaaa

SEQ ID NO: 3766284 - RNA, 20 nt, Human
uuaaacuucucugaagggag

SEQ ID NO: 3766285 - RNA, 15 nt, Human
uuaaacuugucuuuu

SEQ ID NO: 3766286 - RNA, 17 nt, Human
uuaaacuugugaaugcu

SEQ ID NO: 3766287 - RNA, 21 nt, Human
uuaaacuuuagugcuacagaa

SEQ ID NO: 3766288 - RNA, 19 nt, Human
uuaaagaaaaaaauguauu

SEQ ID NO: 3766289 - RNA, 20 nt, Human
uuaaagaaaaaaauguauuu

SEQ ID NO: 3766290 - RNA, 23 nt, Human
uuaaagaaaaaaaugucaaaagu

SEQ ID NO: 3766291 - RNA, 15 nt, Human
uuaaagaaaacccac

SEQ ID NO: 3766292 - RNA, 15 nt, Human
uuaaagaaaagauga

SEQ ID NO: 3766293 - RNA, 16 nt, Human
uuaaagaaaagaugaa

SEQ ID NO: 3766294 - RNA, 18 nt, Human
uuaaagaaaaguuuugua

SEQ ID NO: 3766295 - RNA, 19 nt, Human
uuaaagaaaaguuuuguaa

SEQ ID NO: 3766296 - RNA, 16 nt, Human
uuaaagaaacagcuuu

SEQ ID NO: 3766297 - RNA, 21 nt, Human
uuaaagaaacagcuuucaagu

SEQ ID NO: 3766298 - RNA, 17 nt, Human
uuaaagaaaggaaaaga

SEQ ID NO: 3766299 - RNA, 17 nt, Human
uuaaagaaaguguauuu

SEQ ID NO: 3766300 - RNA, 14 nt, Human
uuaaagaaguauuu

SEQ ID NO: 3766301 - RNA, 15 nt, Human
uuaaagaauucaaau

SEQ ID NO: 3766302 - RNA, 14 nt, Human
uuaaagacuuuuau

SEQ ID NO: 3766303 - RNA, 14 nt, Human
uuaaagagucuaga

SEQ ID NO: 3766304 - RNA, 23 nt, Human
uuaaagagucuagauucaaaggu

SEQ ID NO: 3766305 - RNA, 16 nt, Human
uuaaagcaaaaaauga

SEQ ID NO: 3766306 - RNA, 22 nt, Human
uuaaagcaagcaacacagagga

SEQ ID NO: 3766307 - RNA, 22 nt, Human
uuaaagcacuuacagauaggcc

SEQ ID NO: 3766308 - RNA, 18 nt, Human
uuaaagcagugcuucuca

SEQ ID NO: 3766309 - RNA, 19 nt, Human
uuaaagcauauagagauga

SEQ ID NO: 3766310 - RNA, 22 nt, Human
uuaaagcauugcuguuaugucu

SEQ ID NO: 3766311 - RNA, 16 nt, Human
uuaaagcauugcuuuu

SEQ ID NO: 3766312 - RNA, 22 nt, Human
uuaaagcauugcuuuuauuuug

SEQ ID NO: 3766313 - RNA, 13 nt, Human
uuaaagccuccuc

SEQ ID NO: 3766314 - RNA, 20 nt, Human
uuaaagcuuccauuguuguc

SEQ ID NO: 3766315 - RNA, 17 nt, Human
uuaaagcuuuugaugug

SEQ ID NO: 3766316 - RNA, 22 nt, Human
uuaaaggaagguucugguguga

SEQ ID NO: 3766317 - RNA, 12 nt, Human
uuaaaggaguua

SEQ ID NO: 3766318 - RNA, 17 nt, Human
uuaaaggauguuggugu

SEQ ID NO: 3766319 - RNA, 21 nt, Human
uuaaaggcaguauuuuguguc

SEQ ID NO: 3766320 - RNA, 16 nt, Human
uuaaaggcuucucucu

SEQ ID NO: 3766321 - RNA, 15 nt, Human
uuaaaggugucuucc

SEQ ID NO: 3766322 - RNA, 16 nt, Human
uuaaaguaauuguucc

SEQ ID NO: 3766323 - RNA, 22 nt, Human
uuaaaguaauuguuccagagac

SEQ ID NO: 3766324 - RNA, 13 nt, Human
uuaaaguauauau

SEQ ID NO: 3766325 - RNA, 23 nt, Human
uuaaaguaugcauuauuaaauug

SEQ ID NO: 3766326 - RNA, 18 nt, Human
uuaaagucagguccaauu

SEQ ID NO: 3766327 - RNA, 20 nt, Human
uuaaagugacuaauggcaug

SEQ ID NO: 3766328 - RNA, 17 nt, Human
uuaaaguggcaaucuca

SEQ ID NO: 3766329 - RNA, 17 nt, Human
uuaaaguguuucagcua

SEQ ID NO: 3766330 - RNA, 23 nt, Human
uuaaaguuaguaucuuuugauau

SEQ ID NO: 3766331 - RNA, 14 nt, Human
uuaaaguucaaacu

SEQ ID NO: 3766332 - RNA, 15 nt, Human
uuaaaguucaaacuc

SEQ ID NO: 3766333 - RNA, 13 nt, Human
uuaaaguucugug

SEQ ID NO: 3766334 - RNA, 22 nt, Human
uuaaaguugaauuuauuggcuu

SEQ ID NO: 3766335 - RNA, 19 nt, Human
uuaaaguuggaauuuacca

SEQ ID NO: 3766336 - RNA, 15 nt, Human
uuaaaguuguuugug

SEQ ID NO: 3766337 - RNA, 13 nt, Human
uuaaaguuucaaa

SEQ ID NO: 3766338 - RNA, 16 nt, Human
uuaaaguuucaaaaau

SEQ ID NO: 3766339 - RNA, 13 nt, Human
uuaaauaaaagaa

SEQ ID NO: 3766340 - RNA, 21 nt, Human
uuaaauaaaagaaaugcacaa

SEQ ID NO: 3766341 - RNA, 13 nt, Human
uuaaauaaacuuu

SEQ ID NO: 3766342 - RNA, 15 nt, Human
uuaaauaaacuuuuu

SEQ ID NO: 3766343 - RNA, 22 nt, Human
uuaaauaaacuuuuuuucaaug

SEQ ID NO: 3766344 - RNA, 21 nt, Human
uuaaauaaaguaucaugcauu

SEQ ID NO: 3766345 - RNA, 12 nt, Human
uuaaauaaaugu

SEQ ID NO: 3766346 - RNA, 17 nt, Human
uuaaauaaauuguauau

SEQ ID NO: 3766347 - RNA, 16 nt, Human
uuaaauaagauucuaa

SEQ ID NO: 3766348 - RNA, 18 nt, Human
uuaaauaagauucuaacg

SEQ ID NO: 3766349 - RNA, 24 nt, Human
uuaaauaauauggcuaugcuuaaa

SEQ ID NO: 3766350 - RNA, 15 nt, Human
uuaaauaauuuaacu

SEQ ID NO: 3766351 - RNA, 15 nt, Human
uuaaauaauuuccua

SEQ ID NO: 3766352 - RNA, 16 nt, Human
uuaaauacaaaacuuc

SEQ ID NO: 3766353 - RNA, 10 nt, Human
uuaaauacag

SEQ ID NO: 3766354 - RNA, 19 nt, Human
uuaaauacagacacuaagu

SEQ ID NO: 3766355 - RNA, 17 nt, Human
uuaaauacaggaaacag

SEQ ID NO: 3766356 - RNA, 20 nt, Human
uuaaauacaggaaacaguug

SEQ ID NO: 3766357 - RNA, 16 nt, Human
uuaaauacauauggau

SEQ ID NO: 3766358 - RNA, 23 nt, Human
uuaaauacauauggauguuacuc

SEQ ID NO: 3766359 - RNA, 13 nt, Human
uuaaauagauaca

SEQ ID NO: 3766360 - RNA, 17 nt, Human
uuaaauagauacaaaug

SEQ ID NO: 3766361 - RNA, 16 nt, Human
uuaaauagaugacauu

SEQ ID NO: 3766362 - RNA, 19 nt, Human
uuaaauagcuuuuuucucu

SEQ ID NO: 3766363 - RNA, 18 nt, Human
uuaaauaguuauauaauu

SEQ ID NO: 3766364 - RNA, 18 nt, Human
uuaaauauaauucuguaa

SEQ ID NO: 3766365 - RNA, 20 nt, Human
uuaaauauauguauguaaaa

SEQ ID NO: 3766366 - RNA, 23 nt, Human
uuaaauauauuuucaaaguacau

SEQ ID NO: 3766367 - RNA, 22 nt, Human
uuaaauaucaguagaaacucua

SEQ ID NO: 3766368 - RNA, 22 nt, Human
uuaaauaucugaacauuuacua

SEQ ID NO: 3766369 - RNA, 14 nt, Human
uuaaauaucuuuua

SEQ ID NO: 3766370 - RNA, 18 nt, Human
uuaaauaucuuuuauguu

SEQ ID NO: 3766371 - RNA, 20 nt, Human
uuaaauaucuuuuauguuug

SEQ ID NO: 3766372 - RNA, 14 nt, Human
uuaaauauuuacau

SEQ ID NO: 3766373 - RNA, 18 nt, Human
uuaaauauuucaagacau

SEQ ID NO: 3766374 - RNA, 22 nt, Human
uuaaaucauacuccuaugcuuu

SEQ ID NO: 3766375 - RNA, 14 nt, Human
uuaaauccuguuga

SEQ ID NO: 3766376 - RNA, 20 nt, Human
uuaaaucuaaaucuauuuau

SEQ ID NO: 3766377 - RNA, 16 nt, Human
uuaaaucuaugaagua

SEQ ID NO: 3766378 - RNA, 16 nt, Human
uuaaaucucauugcuu

SEQ ID NO: 3766379 - RNA, 15 nt, Human
uuaaaucugugauga

SEQ ID NO: 3766380 - RNA, 22 nt, Human
uuaaaugaacaagagaagcauu

SEQ ID NO: 3766381 - RNA, 21 nt, Human
uuaaaugaauauuuugauaau

SEQ ID NO: 3766382 - RNA, 21 nt, Human
uuaaaugacacucauauaauu

SEQ ID NO: 3766383 - RNA, 16 nt, Human
uuaaaugaggauuauu

SEQ ID NO: 3766384 - RNA, 16 nt, Human
uuaaaugauuuaaauu

SEQ ID NO: 3766385 - RNA, 20 nt, Human
uuaaaugcaaccauuugaaa

SEQ ID NO: 3766386 - RNA, 18 nt, Human
uuaaauguaaagacaaaa

SEQ ID NO: 3766387 - RNA, 16 nt, Human
uuaaauguacagacau

SEQ ID NO: 3766388 - RNA, 19 nt, Human
uuaaauguagcuucaguca

SEQ ID NO: 3766389 - RNA, 21 nt, Human
uuaaauguagcuucagucauu

SEQ ID NO: 3766390 - RNA, 19 nt, Human
uuaaaugucaaaugugaau

SEQ ID NO: 3766391 - RNA, 17 nt, Human
uuaaaugucuaauguau

SEQ ID NO: 3766392 - RNA, 18 nt, Human
uuaaaugugaauuacuaa

SEQ ID NO: 3766393 - RNA, 18 nt, Human
uuaaauguguacaaugua

SEQ ID NO: 3766394 - RNA, 21 nt, Human
uuaaaugugugagugcaugua

SEQ ID NO: 3766395 - RNA, 20 nt, Human
uuaaauguuaugacuaugua

SEQ ID NO: 3766396 - RNA, 11 nt, Human
uuaaauguuuu

SEQ ID NO: 3766397 - RNA, 17 nt, Human
uuaaauguuuuauaagu

SEQ ID NO: 3766398 - RNA, 12 nt, Human
uuaaauguuuug

SEQ ID NO: 3766399 - RNA, 15 nt, Human
uuaaauguuuuguaa

SEQ ID NO: 3766400 - RNA, 21 nt, Human
uuaaauguuuuuuuuuaaaga

SEQ ID NO: 3766401 - RNA, 11 nt, Human
uuaaauuaaua

SEQ ID NO: 3766402 - RNA, 12 nt, Human
uuaaauuacaau

SEQ ID NO: 3766403 - RNA, 16 nt, Human
uuaaauuacauuugua

SEQ ID NO: 3766404 - RNA, 21 nt, Human
uuaagagguugauuauaaagu

SEQ ID NO: 3766405 - RNA, 12 nt, Human
uuaagaguaaaa

SEQ ID NO: 3766406 - RNA, 12 nt, Human
uuaagagugaaa

SEQ ID NO: 3766407 - RNA, 14 nt, Human
uuaagauacaaauu

SEQ ID NO: 3766408 - RNA, 14 nt, Human
uuaagauggauucu

SEQ ID NO: 3766409 - RNA, 18 nt, Human
uuaagauggauucucaga

SEQ ID NO: 3766410 - RNA, 21 nt, Human
uuaagauggauucucagauau

SEQ ID NO: 3766411 - RNA, 22 nt, Human
uuaagauggauucucagauauu

SEQ ID NO: 3766412 - RNA, 13 nt, Human
uuaagauggcaau

SEQ ID NO: 3766413 - RNA, 21 nt, Human
uuaagauggcaauuacuuugg

SEQ ID NO: 3766414 - RNA, 13 nt, Human
uuaagaugugaaa

SEQ ID NO: 3766415 - RNA, 15 nt, Human
uuaagauuuuucuca

SEQ ID NO: 3766416 - RNA, 16 nt, Human
uuaagcaaaggggaca

SEQ ID NO: 3766417 - RNA, 14 nt, Human
uuaagcaaauacuu

SEQ ID NO: 3766418 - RNA, 19 nt, Human
uuaagcaaauguuaaaagu

SEQ ID NO: 3766419 - RNA, 19 nt, Human
uuaagcaacaucuuuuuaa

SEQ ID NO: 3766420 - RNA, 15 nt, Human
uuaagcaaguuaagu

SEQ ID NO: 3766421 - RNA, 16 nt, Human
uuaagcagaagcauua

SEQ ID NO: 3766422 - RNA, 21 nt, Human
uuaagcagauggaaugcugug

SEQ ID NO: 3766423 - RNA, 13 nt, Human
uuaagcagcucuu

SEQ ID NO: 3766424 - RNA, 15 nt, Human
uuaagcauauauuuu

SEQ ID NO: 3766425 - RNA, 23 nt, Human
uuaagcauauauuuuuauauuua

SEQ ID NO: 3766426 - RNA, 18 nt, Human
uuaagcaucacaaaugau

SEQ ID NO: 3766427 - RNA, 22 nt, Human
uuaagcaucuggcucuaauuca

SEQ ID NO: 3766428 - RNA, 23 nt, Human
uuaagcauuacucuuguaagauu

SEQ ID NO: 3766429 - RNA, 19 nt, Human
uuaagcauuguuugcuuau

SEQ ID NO: 3766430 - RNA, 20 nt, Human
uuaagccacugccucucccu

SEQ ID NO: 3766431 - RNA, 18 nt, Human
uuaagccaucuugguaaa

SEQ ID NO: 3766432 - RNA, 13 nt, Human
uuaagcccugagg

SEQ ID NO: 3766433 - RNA, 20 nt, Human
uuaagccuaaagauuuugau

SEQ ID NO: 3766434 - RNA, 17 nt, Human
uuaagccuuuguugaac

SEQ ID NO: 3766435 - RNA, 16 nt, Human
uuaagcucugagcugu

SEQ ID NO: 3766436 - RNA, 17 nt, Human
uuaagcucugagcuguc

SEQ ID NO: 3766437 - RNA, 18 nt, Human
uuaagcucugagcuguca

SEQ ID NO: 3766438 - RNA, 11 nt, Human
uuaagcugcag

SEQ ID NO: 3766439 - RNA, 16 nt, Human
uuaagcuuuuuggaau

SEQ ID NO: 3766440 - RNA, 23 nt, Human
uuaaggaaaacuaccuguauuua

SEQ ID NO: 3766441 - RNA, 12 nt, Human
uuaaggaaacaa

SEQ ID NO: 3766442 - RNA, 14 nt, Human
uuaaggaaacaaua

SEQ ID NO: 3766443 - RNA, 16 nt, Human
uuaaggaaacucuuau

SEQ ID NO: 3766444 - RNA, 20 nt, Human
uuaaggaaacucuuaucuca

SEQ ID NO: 3766445 - RNA, 23 nt, Human
uuaaggaaauuuguaccauuuca

SEQ ID NO: 3766446 - RNA, 17 nt, Human
uuaaggaagaaaaauca

SEQ ID NO: 3766447 - RNA, 18 nt, Human
uuaaggaagaaaaaucag

SEQ ID NO: 3766448 - RNA, 15 nt, Human
uuaaggacugacuga

SEQ ID NO: 3766449 - RNA, 18 nt, Human
uuaaggagaaucauguuu

SEQ ID NO: 3766450 - RNA, 21 nt, Human
uuaaggagaaucauguuucuu

SEQ ID NO: 3766451 - RNA, 14 nt, Human
uuaaggauaaauca

SEQ ID NO: 3766452 - RNA, 20 nt, Human
uuaaggaugcuuguacauaa

SEQ ID NO: 3766453 - RNA, 16 nt, Human
uuaagggaaaaauaua

SEQ ID NO: 3766454 - RNA, 15 nt, Human
uuaagggaaagaaaa

SEQ ID NO: 3766455 - RNA, 22 nt, Human
uuaagggaguguacucccaggg

SEQ ID NO: 3766456 - RNA, 20 nt, Human
uuaaggggaagaaugaaagc

SEQ ID NO: 3766457 - RNA, 16 nt, Human
uuaaggucucucuuug

SEQ ID NO: 3766458 - RNA, 13 nt, Human
uuaaggucuguuu

SEQ ID NO: 3766459 - RNA, 20 nt, Human
uuaaggugaggccugucugu

SEQ ID NO: 3766460 - RNA, 18 nt, Human
uuaaggugauauauuuaa

SEQ ID NO: 3766461 - RNA, 9 nt, Human
uuaaggugg

SEQ ID NO: 3766462 - RNA, 15 nt, Human
uuaagguuauuuauu

SEQ ID NO: 3766463 - RNA, 13 nt, Human
uuaaguaaacuaa

SEQ ID NO: 3766464 - RNA, 17 nt, Human
uuaaguacuauguauca

SEQ ID NO: 3766465 - RNA, 12 nt, Human
uuaaguagauuu

SEQ ID NO: 3766466 - RNA, 14 nt, Human
uuaaguaucagaaa

SEQ ID NO: 3766467 - RNA, 15 nt, Human
uuaaguauugcaucu

SEQ ID NO: 3766468 - RNA, 19 nt, Human
uuaaguauugcaucuguau

SEQ ID NO: 3766469 - RNA, 16 nt, Human
uuaaguauuuauauau

SEQ ID NO: 3766470 - RNA, 13 nt, Human
uuaagucagaaca

SEQ ID NO: 3766471 - RNA, 19 nt, Human
uuaagucccugucaccucu

SEQ ID NO: 3766472 - RNA, 20 nt, Human
uuaagucccugucaccucuu

SEQ ID NO: 3766473 - RNA, 14 nt, Human
uuaagucuguuuua

SEQ ID NO: 3766474 - RNA, 17 nt, Human
uuaagucuguuuuauga

SEQ ID NO: 3766475 - RNA, 18 nt, Human
uuaagucuguuuuaugac

SEQ ID NO: 3766476 - RNA, 12 nt, Human
uuaagugaaauu

SEQ ID NO: 3766477 - RNA, 13 nt, Human
uuaagugaaauuu

SEQ ID NO: 3766478 - RNA, 22 nt, Human
uuaaguuauagugaauacugcu

SEQ ID NO: 3766479 - RNA, 22 nt, Human
uuaaguucuggaugcauuucuc

SEQ ID NO: 3766480 - RNA, 21 nt, Human
uuaaguugagauaguuuucau

SEQ ID NO: 3766481 - RNA, 17 nt, Human
uuaaguuggcuucuguu

SEQ ID NO: 3766482 - RNA, 18 nt, Human
uuaaguuggcuucuguuu

SEQ ID NO: 3766483 - RNA, 23 nt, Human
uuaaguuggcuucuguuucuagu

SEQ ID NO: 3766484 - RNA, 16 nt, Human
uuaaguuguuugcaug

SEQ ID NO: 3766485 - RNA, 16 nt, Human
uuaaguuucaaacuua

SEQ ID NO: 3766486 - RNA, 21 nt, Human
uuaaguuuccuuccagcccag

SEQ ID NO: 3766487 - RNA, 13 nt, Human
uuaaguuugcacu

SEQ ID NO: 3766488 - RNA, 20 nt, Human
uuaaguuuugacaagcuggc

SEQ ID NO: 3766489 - RNA, 11 nt, Human
uuaauaaaaag

SEQ ID NO: 3766490 - RNA, 17 nt, Human
uuaauaaaaaugacaga

SEQ ID NO: 3766491 - RNA, 19 nt, Human
uuaauaaaaaugacagacu

SEQ ID NO: 3766492 - RNA, 18 nt, Human
uuaauaaaacacuauuuu

SEQ ID NO: 3766493 - RNA, 20 nt, Human
uuaauaaaacacuauuuuuu

SEQ ID NO: 3766494 - RNA, 20 nt, Human
uuaauaaaagaaaauuacaa

SEQ ID NO: 3766495 - RNA, 17 nt, Human
uuaauaaacacucuuga

SEQ ID NO: 3766496 - RNA, 13 nt, Human
uuaauaaagacag

SEQ ID NO: 3766497 - RNA, 14 nt, Human
uuaauaaagacagg

SEQ ID NO: 3766498 - RNA, 20 nt, Human
uuaauaaagcgaaaaacuca

SEQ ID NO: 3766499 - RNA, 15 nt, Human
uuaauaaauagagca

SEQ ID NO: 3766500 - RNA, 19 nt, Human
uuaauaaauccuacaguau

SEQ ID NO: 3766501 - RNA, 12 nt, Human
uuaauaacaauu

SEQ ID NO: 3766502 - RNA, 18 nt, Human
uuaauaacauaacaaaua

SEQ ID NO: 3766503 - RNA, 19 nt, Human
uuaauaacauaacaaauaa

SEQ ID NO: 3766504 - RNA, 14 nt, Human
uuaauaauaaauuc

SEQ ID NO: 3766505 - RNA, 16 nt, Human
uuaauaauaaucuagg

SEQ ID NO: 3766506 - RNA, 16 nt, Human
uuaauaauauacuugu

SEQ ID NO: 3766507 - RNA, 21 nt, Human
uuaauaauauacuuguggacu

SEQ ID NO: 3766508 - RNA, 20 nt, Human
uuaauaaucaagagccuuaa

SEQ ID NO: 3766509 - RNA, 24 nt, Human
uuaauaaucagcaagaauuugauc

SEQ ID NO: 3766510 - RNA, 16 nt, Human
uuaauaauguuucaaa

SEQ ID NO: 3766511 - RNA, 20 nt, Human
uuaauaauuauaugcuauuu

SEQ ID NO: 3766512 - RNA, 23 nt, Human
uuaauaauuauaugcuauuucua

SEQ ID NO: 3766513 - RNA, 13 nt, Human
uuaauacaaggua

SEQ ID NO: 3766514 - RNA, 22 nt, Human
uuaauacaguuuauuuuuaaag

SEQ ID NO: 3766515 - RNA, 21 nt, Human
uuaauacgcaggcaucugauu

SEQ ID NO: 3766516 - RNA, 15 nt, Human
uuaauacuaccuuga

SEQ ID NO: 3766517 - RNA, 21 nt, Human
uuaauacucaaaugaguaaca

SEQ ID NO: 3766518 - RNA, 20 nt, Human
uuaauacuguuauucuuugc

SEQ ID NO: 3766519 - RNA, 21 nt, Human
uuaauacuguuauucuuugca

SEQ ID NO: 3766520 - RNA, 18 nt, Human
uuaauagcaaagaauuga

SEQ ID NO: 3766521 - RNA, 20 nt, Human
uuaauagcaaagaauugacu

SEQ ID NO: 3766522 - RNA, 21 nt, Human
uuaauagguuuggacaaaaug

SEQ ID NO: 3766523 - RNA, 15 nt, Human
uuaauaguaauuugu

SEQ ID NO: 3766524 - RNA, 17 nt, Human
uuaauaguaauuuguaa

SEQ ID NO: 3766525 - RNA, 18 nt, Human
uuaauaguaauuuguaaa

SEQ ID NO: 3766526 - RNA, 14 nt, Human
uuaauaguguuaau

SEQ ID NO: 3766527 - RNA, 15 nt, Human
uuaauaguguuaauc

SEQ ID NO: 3766528 - RNA, 16 nt, Human
uuaauaguuugucuau

SEQ ID NO: 3766529 - RNA, 23 nt, Human
uuaauauaaaguaguccugugaa

SEQ ID NO: 3766530 - RNA, 23 nt, Human
uuaauauaaaguuuuauauauua

SEQ ID NO: 3766531 - RNA, 19 nt, Human
uuaauauauguauuauuua

SEQ ID NO: 3766532 - RNA, 13 nt, Human
uuaauauauuaaa

SEQ ID NO: 3766533 - RNA, 18 nt, Human
uuaauaucacucauuaau

SEQ ID NO: 3766534 - RNA, 20 nt, Human
uuaauaucacucauuaauua

SEQ ID NO: 3766535 - RNA, 19 nt, Human
uuaauauccuaaacaucau

SEQ ID NO: 3766536 - RNA, 14 nt, Human
uuaauaugaaaacu

SEQ ID NO: 3766537 - RNA, 19 nt, Human
uuaauaugcugcaacaaaa

SEQ ID NO: 3766538 - RNA, 20 nt, Human
uuaauaugcuuaaaauaagc

SEQ ID NO: 3766539 - RNA, 17 nt, Human
uuaauauggauuuguua

SEQ ID NO: 3766540 - RNA, 19 nt, Human
uuaauauguauuuuaugua

SEQ ID NO: 3766541 - RNA, 13 nt, Human
uuaauauuaaagc

SEQ ID NO: 3766542 - RNA, 14 nt, Human
uuaauauuaaagcc

SEQ ID NO: 3766543 - RNA, 20 nt, Human
uuaauauuaaagccauguuu

SEQ ID NO: 3766544 - RNA, 20 nt, Human
uuaauauucuuucaauaacg

SEQ ID NO: 3766545 - RNA, 22 nt, Human
uuaauauugauaugcuuauaca

SEQ ID NO: 3766546 - RNA, 15 nt, Human
uuaauauuuaaacag

SEQ ID NO: 3766547 - RNA, 16 nt, Human
uuaauauuuaaacagc

SEQ ID NO: 3766548 - RNA, 22 nt, Human
uuaauauuuauaggucacuuug

SEQ ID NO: 3766549 - RNA, 21 nt, Human
uuacauugcuggucuuguaag

SEQ ID NO: 3766550 - RNA, 13 nt, Human
uuacauuguaaau

SEQ ID NO: 3766551 - RNA, 15 nt, Human
uuacauugucauuua

SEQ ID NO: 3766552 - RNA, 17 nt, Human
uuacauuuacaaacuga

SEQ ID NO: 3766553 - RNA, 16 nt, Human
uuacauuuccaaauga

SEQ ID NO: 3766554 - RNA, 20 nt, Human
uuacauuuguauaaaauaau

SEQ ID NO: 3766555 - RNA, 15 nt, Human
uuacauuuuacacac

SEQ ID NO: 3766556 - RNA, 20 nt, Human
uuacauuuuuaagugcugca

SEQ ID NO: 3766557 - RNA, 21 nt, Human
uuacauuuuuaagugcugcau

SEQ ID NO: 3766558 - RNA, 18 nt, Human
uuacauuuuuacaauaaa

SEQ ID NO: 3766559 - RNA, 21 nt, Human
uuacauuuuuacaauaaauaa

SEQ ID NO: 3766560 - RNA, 21 nt, Human
uuacauuuuuauuuaugaagu

SEQ ID NO: 3766561 - RNA, 21 nt, Human
uuacauuuuuugggcagcaau

SEQ ID NO: 3766562 - RNA, 16 nt, Human
uuaccaaacagcaaac

SEQ ID NO: 3766563 - RNA, 19 nt, Human
uuaccaaacagcaaaccaa

SEQ ID NO: 3766564 - RNA, 12 nt, Human
uuaccaaccugu

SEQ ID NO: 3766565 - RNA, 15 nt, Human
uuaccaacuuucugu

SEQ ID NO: 3766566 - RNA, 16 nt, Human
uuaccaacuuucugua

SEQ ID NO: 3766567 - RNA, 14 nt, Human
uuaccaagaagccu

SEQ ID NO: 3766568 - RNA, 19 nt, Human
uuaccaauaggcaaauuaa

SEQ ID NO: 3766569 - RNA, 14 nt, Human
uuaccaaucauauu

SEQ ID NO: 3766570 - RNA, 14 nt, Human
uuaccacagacaua

SEQ ID NO: 3766571 - RNA, 17 nt, Human
uuaccacagacauacua

SEQ ID NO: 3766572 - RNA, 21 nt, Human
uuaccacuuguguuuugcaag

SEQ ID NO: 3766573 - RNA, 21 nt, Human
uuaccagauuuuuacacaugu

SEQ ID NO: 3766574 - RNA, 12 nt, Human
uuaccagcaaga

SEQ ID NO: 3766575 - RNA, 22 nt, Human
uuaccagccuccguauuucaga

SEQ ID NO: 3766576 - RNA, 23 nt, Human
uuaccaggcaccaaaagaaguaa

SEQ ID NO: 3766577 - RNA, 23 nt, Human
uuaccaguggcguuguugcaugu

SEQ ID NO: 3766578 - RNA, 24 nt, Human
uuaccaguggcguuguugcauguu

SEQ ID NO: 3766579 - RNA, 18 nt, Human
uuaccaguuaauuacuca

SEQ ID NO: 3766580 - RNA, 15 nt, Human
uuaccauaugugcuu

SEQ ID NO: 3766581 - RNA, 11 nt, Human
uuaccaugaga

SEQ ID NO: 3766582 - RNA, 16 nt, Human
uuaccaugugccugau

SEQ ID NO: 3766583 - RNA, 22 nt, Human
uuaccauuaaaccaucucccug

SEQ ID NO: 3766584 - RNA, 23 nt, Human
uuaccauuaaaccaucucccugg

SEQ ID NO: 3766585 - RNA, 15 nt, Human
uuaccauucacaaua

SEQ ID NO: 3766586 - RNA, 13 nt, Human
uuaccauuggaaa

SEQ ID NO: 3766587 - RNA, 15 nt, Human
uuaccauuggaaauu

SEQ ID NO: 3766588 - RNA, 14 nt, Human
uuaccauuuguaau

SEQ ID NO: 3766589 - RNA, 23 nt, Human
uuaccauuuugggguacccacug

SEQ ID NO: 3766590 - RNA, 14 nt, Human
uuacccaauuuccc

SEQ ID NO: 3766591 - RNA, 22 nt, Human
uuacccaccuagaacacuaacu

SEQ ID NO: 3766592 - RNA, 13 nt, Human
uuacccauauccc

SEQ ID NO: 3766593 - RNA, 17 nt, Human
uuacccccauucgcgcu

SEQ ID NO: 3766594 - RNA, 14 nt, Human
uuaccccucuacca

SEQ ID NO: 3766595 - RNA, 17 nt, Human
uuaccccuggcuguuug

SEQ ID NO: 3766596 - RNA, 12 nt, Human
uuacccuaaugu

SEQ ID NO: 3766597 - RNA, 18 nt, Human
uuacccuaaugucuucau

SEQ ID NO: 3766598 - RNA, 17 nt, Human
uuacccucuuugcugca

SEQ ID NO: 3766599 - RNA, 13 nt, Human
uuacccuucccug

SEQ ID NO: 3766600 - RNA, 21 nt, Human
uuacccuucugugcccagcuc

SEQ ID NO: 3766601 - RNA, 20 nt, Human
uuacccuugagcccucccca

SEQ ID NO: 3766602 - RNA, 20 nt, Human
uuaccgacaagcacagucag

SEQ ID NO: 3766603 - RNA, 21 nt, Human
uuaccgcguaaugcgccaaua

SEQ ID NO: 3766604 - RNA, 21 nt, Human
uuaccgcguuguaaaauauag

SEQ ID NO: 3766605 - RNA, 20 nt, Human
uuaccuaaacagauauaaau

SEQ ID NO: 3766606 - RNA, 15 nt, Human
uuaccuaaaguauuu

SEQ ID NO: 3766607 - RNA, 18 nt, Human
uuaccuaagugacauuug

SEQ ID NO: 3766608 - RNA, 13 nt, Human
uuaccuaauuaga

SEQ ID NO: 3766609 - RNA, 16 nt, Human
uuaccuaccacagugu

SEQ ID NO: 3766610 - RNA, 21 nt, Human
uuaccuaccacagugucugua

SEQ ID NO: 3766611 - RNA, 13 nt, Human
uuaccuacuuuga

SEQ ID NO: 3766612 - RNA, 14 nt, Human
uuaccucagccugg

SEQ ID NO: 3766613 - RNA, 15 nt, Human
uuaccucagccuggg

SEQ ID NO: 3766614 - RNA, 15 nt, Human
uuaccuccaacagaa

SEQ ID NO: 3766615 - RNA, 19 nt, Human
uuaccuccugcccaggaga

SEQ ID NO: 3766616 - RNA, 15 nt, Human
uuaccucucugucau

SEQ ID NO: 3766617 - RNA, 20 nt, Human
uuaccucuuaacaauuucug

SEQ ID NO: 3766618 - RNA, 15 nt, Human
uuaccucuuuggaaa

SEQ ID NO: 3766619 - RNA, 20 nt, Human
uuaccugaaaacacugugca

SEQ ID NO: 3766620 - RNA, 12 nt, Human
uuaccugacaca

SEQ ID NO: 3766621 - RNA, 16 nt, Human
uuaccugaccucuugc

SEQ ID NO: 3766622 - RNA, 20 nt, Human
uuaccugaucaaugacagag

SEQ ID NO: 3766623 - RNA, 12 nt, Human
uuaccugggaaa

SEQ ID NO: 3766624 - RNA, 19 nt, Human
uuaccuguauacagugcag

SEQ ID NO: 3766625 - RNA, 17 nt, Human
uuaccugucacauugca

SEQ ID NO: 3766626 - RNA, 15 nt, Human
uuaccuucaauaaag

SEQ ID NO: 3766627 - RNA, 18 nt, Human
uuaccuugacuguugaug

SEQ ID NO: 3766628 - RNA, 19 nt, Human
uuaccuugacuguugaugu

SEQ ID NO: 3766629 - RNA, 14 nt, Human
uuaccuuucucucu

SEQ ID NO: 3766630 - RNA, 20 nt, Human
uuaccuuuuuauuugcaugu

SEQ ID NO: 3766631 - RNA, 23 nt, Human
uuaccuuuuugaaaaagaaaaca

SEQ ID NO: 3766632 - RNA, 17 nt, Human
uuaccuuuuuugauaaa

SEQ ID NO: 3766633 - RNA, 23 nt, Human
uuaccuuuuuugauaaaguuucu

SEQ ID NO: 3766634 - RNA, 19 nt, Human
uuacgaaguucaagaucaa

SEQ ID NO: 3766635 - RNA, 15 nt, Human
uuacgaucaggcaca

SEQ ID NO: 3766636 - RNA, 18 nt, Human
uuacgcccaacccuuccc

SEQ ID NO: 3766637 - RNA, 15 nt, Human
uuacgcuuugauuca

SEQ ID NO: 3766638 - RNA, 16 nt, Human
uuacggacacccccuc

SEQ ID NO: 3766639 - RNA, 14 nt, Human
uuacggcuccucuc

SEQ ID NO: 3766640 - RNA, 19 nt, Human
uuacguaugucugguucuc

SEQ ID NO: 3766641 - RNA, 15 nt, Human
uuacgugagccaggu

SEQ ID NO: 3766642 - RNA, 15 nt, Human
uuacgugcucugugg

SEQ ID NO: 3766643 - RNA, 15 nt, Human
uuacuaaaaaguaua

SEQ ID NO: 3766644 - RNA, 19 nt, Human
uuacuaaaaguuuugagaa

SEQ ID NO: 3766645 - RNA, 23 nt, Human
uuacuaaagaaaauaucugaaau

SEQ ID NO: 3766646 - RNA, 15 nt, Human
uuacuaacuucuaaa

SEQ ID NO: 3766647 - RNA, 19 nt, Human
uuacuaacuucuaaaacug

SEQ ID NO: 3766648 - RNA, 20 nt, Human
uuacuaacuucuaaaacugu

SEQ ID NO: 3766649 - RNA, 22 nt, Human
uuacuaagaagaaaauugcugu

SEQ ID NO: 3766650 - RNA, 21 nt, Human
uuacuaagccacaagaaauuu

SEQ ID NO: 3766651 - RNA, 14 nt, Human
uuacuaagcuuugc

SEQ ID NO: 3766652 - RNA, 17 nt, Human
uuacuacaauauguaca

SEQ ID NO: 3766653 - RNA, 14 nt, Human
uuacuacaguuuuu

SEQ ID NO: 3766654 - RNA, 13 nt, Human
uuacuacaugcac

SEQ ID NO: 3766655 - RNA, 17 nt, Human
uuacuaccuccucuccu

SEQ ID NO: 3766656 - RNA, 13 nt, Human
uuacuaccuuauc

SEQ ID NO: 3766657 - RNA, 20 nt, Human
uuacuagaacacagaaagcc

SEQ ID NO: 3766658 - RNA, 15 nt, Human
uuacuagcuuuucaa

SEQ ID NO: 3766659 - RNA, 16 nt, Human
uuacuagguaacuuca

SEQ ID NO: 3766660 - RNA, 17 nt, Human
uuacuaguuucccuugc

SEQ ID NO: 3766661 - RNA, 20 nt, Human
uuacuauaagaacuuugagc

SEQ ID NO: 3766662 - RNA, 22 nt, Human
uuacuauauauauaugccuuuu

SEQ ID NO: 3766663 - RNA, 19 nt, Human
uuacuaucaugucaaacgu

SEQ ID NO: 3766664 - RNA, 19 nt, Human
uuacuauggcccuggccua

SEQ ID NO: 3766665 - RNA, 19 nt, Human
uuacuauucauuaaauguu

SEQ ID NO: 3766666 - RNA, 12 nt, Human
uuacuauuucuu

SEQ ID NO: 3766667 - RNA, 21 nt, Human
uuacuauuuugacaguuauuu

SEQ ID NO: 3766668 - RNA, 12 nt, Human
uuacucacugcu

SEQ ID NO: 3766669 - RNA, 18 nt, Human
uuacucagaauucucuag

SEQ ID NO: 3766670 - RNA, 22 nt, Human
uuacucagcccugggccccacc

SEQ ID NO: 3766671 - RNA, 21 nt, Human
uuacucagggcuccucccagc

SEQ ID NO: 3766672 - RNA, 18 nt, Human
uuacucauagcacuuccc

SEQ ID NO: 3766673 - RNA, 17 nt, Human
uuacucauuaucgccuu

SEQ ID NO: 3766674 - RNA, 14 nt, Human
uuacucauugaaau

SEQ ID NO: 3766675 - RNA, 15 nt, Human
uuacucauugaaaug

SEQ ID NO: 3766676 - RNA, 17 nt, Human
uuacucauugaaauguc

SEQ ID NO: 3766677 - RNA, 22 nt, Human
uuacuccagguuauugcaauaa

SEQ ID NO: 3766678 - RNA, 20 nt, Human
uuacucccaagacuucauug

SEQ ID NO: 3766679 - RNA, 22 nt, Human
uuacuccuauuuuuguaaacug

SEQ ID NO: 3766680 - RNA, 19 nt, Human
uuacucuaagaucuuagau

SEQ ID NO: 3766681 - RNA, 12 nt, Human
uuacucuuggga

SEQ ID NO: 3766682 - RNA, 14 nt, Human
uuacucuugggaca

SEQ ID NO: 3766683 - RNA, 18 nt, Human
uuacucuuguaagauuuu

SEQ ID NO: 3766684 - RNA, 21 nt, Human
uuacucuuguaagauuuugaa

SEQ ID NO: 3766685 - RNA, 22 nt, Human
uuacucuuguaagauuuugaaa

SEQ ID NO: 3766686 - RNA, 23 nt, Human
uuacugaacaaucaaagcacuug

SEQ ID NO: 3766687 - RNA, 14 nt, Human
uuacugauauauuu

SEQ ID NO: 3766688 - RNA, 14 nt, Human
uuacugaucaugca

SEQ ID NO: 3766689 - RNA, 13 nt, Human
uuacugauuauuu

SEQ ID NO: 3766690 - RNA, 21 nt, Human
uuacugcauggggaaagagau

SEQ ID NO: 3766691 - RNA, 11 nt, Human
uuacugccacu

SEQ ID NO: 3766692 - RNA, 19 nt, Human
uuacugcuuuaaucagaaa

SEQ ID NO: 3766693 - RNA, 16 nt, Human
uuacuggauaaauugu

SEQ ID NO: 3766694 - RNA, 20 nt, Human
uucaguguauggaaauaaau

SEQ ID NO: 3766695 - RNA, 22 nt, Human
uucaguguuaccugugugcuug

SEQ ID NO: 3766696 - RNA, 13 nt, Human
uucaguguuucug

SEQ ID NO: 3766697 - RNA, 15 nt, Human
uucaguuaagaaaaa

SEQ ID NO: 3766698 - RNA, 21 nt, Human
uucaguuaagaaaaaaauaau

SEQ ID NO: 3766699 - RNA, 13 nt, Human
uucaguucaaagu

SEQ ID NO: 3766700 - RNA, 10 nt, Human
uucaguucca

SEQ ID NO: 3766701 - RNA, 14 nt, Human
uucaguuccaagaa

SEQ ID NO: 3766702 - RNA, 19 nt, Human
uucaguucuaggaaaauaa

SEQ ID NO: 3766703 - RNA, 16 nt, Human
uucaguugaucacugg

SEQ ID NO: 3766704 - RNA, 16 nt, Human
uucaguugcacuucua

SEQ ID NO: 3766705 - RNA, 18 nt, Human
uucaguugcuugucuucu

SEQ ID NO: 3766706 - RNA, 17 nt, Human
uucaguugguaagcuuc

SEQ ID NO: 3766707 - RNA, 18 nt, Human
uucaguugguguguuuuu

SEQ ID NO: 3766708 - RNA, 19 nt, Human
uucaguugguugugucuuu

SEQ ID NO: 3766709 - RNA, 17 nt, Human
uucaguuguguuuguug

SEQ ID NO: 3766710 - RNA, 13 nt, Human
uucaguuucauaa

SEQ ID NO: 3766711 - RNA, 13 nt, Human
uucaguuuguaua

SEQ ID NO: 3766712 - RNA, 12 nt, Human
uucaguuuucag

SEQ ID NO: 3766713 - RNA, 21 nt, Human
uucaguuuucauuugguucau

SEQ ID NO: 3766714 - RNA, 16 nt, Human
uucaguuuuuguguuu

SEQ ID NO: 3766715 - RNA, 22 nt, Human
uucauaaagauucaccuaagag

SEQ ID NO: 3766716 - RNA, 20 nt, Human
uucauaaaguacuugagugu

SEQ ID NO: 3766717 - RNA, 15 nt, Human
uucauaaaugaauuu

SEQ ID NO: 3766718 - RNA, 16 nt, Human
uucauaaaugaauuuu

SEQ ID NO: 3766719 - RNA, 15 nt, Human
uucauaacagugcca

SEQ ID NO: 3766720 - RNA, 13 nt, Human
uucauaacuuauu

SEQ ID NO: 3766721 - RNA, 14 nt, Human
uucauaagccaauu

SEQ ID NO: 3766722 - RNA, 19 nt, Human
uucauaaguauuaugucuc

SEQ ID NO: 3766723 - RNA, 12 nt, Human
uucauacaaggc

SEQ ID NO: 3766724 - RNA, 18 nt, Human
uucauacacuaaccaaau

SEQ ID NO: 3766725 - RNA, 20 nt, Human
uucauacacuaaccaaaucu

SEQ ID NO: 3766726 - RNA, 21 nt, Human
uucauacagggaugguguuca

SEQ ID NO: 3766727 - RNA, 12 nt, Human
uucauacauauu

SEQ ID NO: 3766728 - RNA, 16 nt, Human
uucauaccuaaguacu

SEQ ID NO: 3766729 - RNA, 18 nt, Human
uucauaccuaaguacugu

SEQ ID NO: 3766730 - RNA, 15 nt, Human
uucauacuugaacgu

SEQ ID NO: 3766731 - RNA, 20 nt, Human
uucauagcugguuccugcua

SEQ ID NO: 3766732 - RNA, 17 nt, Human
uucauaguaagauugau

SEQ ID NO: 3766733 - RNA, 16 nt, Human
uucauaguucagaauu

SEQ ID NO: 3766734 - RNA, 14 nt, Human
uucauauaaaguau

SEQ ID NO: 3766735 - RNA, 16 nt, Human
uucauauaaaguauca

SEQ ID NO: 3766736 - RNA, 18 nt, Human
uucauauaugaggacuug

SEQ ID NO: 3766737 - RNA, 21 nt, Human
uucauauaugaggacuugugu

SEQ ID NO: 3766738 - RNA, 19 nt, Human
uucauaucacacuguuaaa

SEQ ID NO: 3766739 - RNA, 23 nt, Human
uucauaugaaaggugccauggaa

SEQ ID NO: 3766740 - RNA, 20 nt, Human
uucauaugacauucaugccu

SEQ ID NO: 3766741 - RNA, 13 nt, Human
uucauauguugcu

SEQ ID NO: 3766742 - RNA, 15 nt, Human
uucauauuacaauau

SEQ ID NO: 3766743 - RNA, 16 nt, Human
uucauauuacaauauu

SEQ ID NO: 3766744 - RNA, 14 nt, Human
uucauauugaauau

SEQ ID NO: 3766745 - RNA, 15 nt, Human
uucauauuugcacua

SEQ ID NO: 3766746 - RNA, 11 nt, Human
uucauauuugu

SEQ ID NO: 3766747 - RNA, 22 nt, Human
uucauauuuguacuuucuguua

SEQ ID NO: 3766748 - RNA, 21 nt, Human
uucauauuuuaaacagaggau

SEQ ID NO: 3766749 - RNA, 22 nt, Human
uucauauuuuaaacagaggaua

SEQ ID NO: 3766750 - RNA, 16 nt, Human
uucaucagaacagcug

SEQ ID NO: 3766751 - RNA, 18 nt, Human
uucaucagggaggaaagu

SEQ ID NO: 3766752 - RNA, 21 nt, Human
uucaucauccuaagcuauuca

SEQ ID NO: 3766753 - RNA, 19 nt, Human
uucaucaugaggaaagcag

SEQ ID NO: 3766754 - RNA, 19 nt, Human
uucaucauucccucucauc

SEQ ID NO: 3766755 - RNA, 22 nt, Human
uucaucauuguuucugcaugaa

SEQ ID NO: 3766756 - RNA, 18 nt, Human
uucauccaauccucacug

SEQ ID NO: 3766757 - RNA, 20 nt, Human
uucauccaauccucacuggg

SEQ ID NO: 3766758 - RNA, 22 nt, Human
uucauccaggcccaacugugag

SEQ ID NO: 3766759 - RNA, 21 nt, Human
uucaucccacuccaacucuuc

SEQ ID NO: 3766760 - RNA, 16 nt, Human
uucaucccaugaugua

SEQ ID NO: 3766761 - RNA, 15 nt, Human
uucauccccucagaa

SEQ ID NO: 3766762 - RNA, 15 nt, Human
uucauccuccucaga

SEQ ID NO: 3766763 - RNA, 13 nt, Human
uucauccuuagca

SEQ ID NO: 3766764 - RNA, 12 nt, Human
uucauccuuccc

SEQ ID NO: 3766765 - RNA, 12 nt, Human
uucauccuuuca

SEQ ID NO: 3766766 - RNA, 17 nt, Human
uucaucuauuucugaga

SEQ ID NO: 3766767 - RNA, 18 nt, Human
uucaucuauuucugagaa

SEQ ID NO: 3766768 - RNA, 14 nt, Human
uucaucuccaggga

SEQ ID NO: 3766769 - RNA, 15 nt, Human
uucaucuccagggag

SEQ ID NO: 3766770 - RNA, 12 nt, Human
uucaucugccca

SEQ ID NO: 3766771 - RNA, 15 nt, Human
uucaucugcucuccu

SEQ ID NO: 3766772 - RNA, 21 nt, Human
uucaucugcucuccuuccugg

SEQ ID NO: 3766773 - RNA, 13 nt, Human
uucaucuggaagu

SEQ ID NO: 3766774 - RNA, 14 nt, Human
uucaucuggaaguu

SEQ ID NO: 3766775 - RNA, 14 nt, Human
uucaucugggaaag

SEQ ID NO: 3766776 - RNA, 13 nt, Human
uucaucuguaacu

SEQ ID NO: 3766777 - RNA, 18 nt, Human
uucaucuguuguuuuguu

SEQ ID NO: 3766778 - RNA, 20 nt, Human
uucaucuuccaacucaaacu

SEQ ID NO: 3766779 - RNA, 15 nt, Human
uucaucuuccugugu

SEQ ID NO: 3766780 - RNA, 17 nt, Human
uucaucuugaauuguaa

SEQ ID NO: 3766781 - RNA, 16 nt, Human
uucaucuuuuaaagaa

SEQ ID NO: 3766782 - RNA, 21 nt, Human
uucaucuuuugaggcuucugu

SEQ ID NO: 3766783 - RNA, 17 nt, Human
uucaugaaaauccuacc

SEQ ID NO: 3766784 - RNA, 15 nt, Human
uucaugaaagauuca

SEQ ID NO: 3766785 - RNA, 18 nt, Human
uucaugaaagauucaaug

SEQ ID NO: 3766786 - RNA, 13 nt, Human
uucaugaaauccu

SEQ ID NO: 3766787 - RNA, 12 nt, Human
uucaugaaaugc

SEQ ID NO: 3766788 - RNA, 15 nt, Human
uucaugaaaugcuau

SEQ ID NO: 3766789 - RNA, 21 nt, Human
uucaugaaaugcuaugucauu

SEQ ID NO: 3766790 - RNA, 16 nt, Human
uucaugaguuuuuccc

SEQ ID NO: 3766791 - RNA, 15 nt, Human
uucaugauaaugaac

SEQ ID NO: 3766792 - RNA, 17 nt, Human
uucaugauuucauuuca

SEQ ID NO: 3766793 - RNA, 17 nt, Human
uucaugcaaacuuuauu

SEQ ID NO: 3766794 - RNA, 14 nt, Human
uucaugcagcugug

SEQ ID NO: 3766795 - RNA, 19 nt, Human
uucaugcauagguuuagca

SEQ ID NO: 3766796 - RNA, 13 nt, Human
uucaugcauggaa

SEQ ID NO: 3766797 - RNA, 16 nt, Human
uucaugcauggaaauu

SEQ ID NO: 3766798 - RNA, 21 nt, Human
uucaugccaauuagcaauuga

SEQ ID NO: 3766799 - RNA, 22 nt, Human
uucaugccagcuacuuccuccu

SEQ ID NO: 3766800 - RNA, 20 nt, Human
uucaugcuguucaugaaaga

SEQ ID NO: 3766801 - RNA, 20 nt, Human
uucauggaacgcguugaaau

SEQ ID NO: 3766802 - RNA, 19 nt, Human
uucauggaauggacauccu

SEQ ID NO: 3766803 - RNA, 14 nt, Human
uucauggacacuuu

SEQ ID NO: 3766804 - RNA, 16 nt, Human
uucauggacacuuuga

SEQ ID NO: 3766805 - RNA, 17 nt, Human
uucauggcagaaggcaa

SEQ ID NO: 3766806 - RNA, 23 nt, Human
uucauggcagauguaggagggac

SEQ ID NO: 3766807 - RNA, 21 nt, Human
uucauggcaugcuuaaauuuu

SEQ ID NO: 3766808 - RNA, 21 nt, Human
uucauggccuuugauaaaugu

SEQ ID NO: 3766809 - RNA, 18 nt, Human
uucauggcugcuguugcu

SEQ ID NO: 3766810 - RNA, 21 nt, Human
uucauggcugcuguugcuuaa

SEQ ID NO: 3766811 - RNA, 21 nt, Human
uucauggggugaugcugggcu

SEQ ID NO: 3766812 - RNA, 18 nt, Human
uucauguaaacugugcac

SEQ ID NO: 3766813 - RNA, 19 nt, Human
uucauguaaacugugcacc

SEQ ID NO: 3766814 - RNA, 18 nt, Human
uucauguaauccucaaga

SEQ ID NO: 3766815 - RNA, 13 nt, Human
uucauguacauuu

SEQ ID NO: 3766816 - RNA, 22 nt, Human
uucaugucccagaacuuagccu

SEQ ID NO: 3766817 - RNA, 16 nt, Human
uucaugucugcuauca

SEQ ID NO: 3766818 - RNA, 22 nt, Human
uucaugugggaucccaucuuuu

SEQ ID NO: 3766819 - RNA, 16 nt, Human
uucaugugucccagaa

SEQ ID NO: 3766820 - RNA, 22 nt, Human
uucauguuaguuaccuuauagu

SEQ ID NO: 3766821 - RNA, 12 nt, Human
uucauguuucuu

SEQ ID NO: 3766822 - RNA, 14 nt, Human
uucauguuuggugc

SEQ ID NO: 3766823 - RNA, 15 nt, Human
uucauguuuggugca

SEQ ID NO: 3766824 - RNA, 22 nt, Human
uucauguuuggugcauagaacu

SEQ ID NO: 3766825 - RNA, 15 nt, Human
uucauuaaagcauuu

SEQ ID NO: 3766826 - RNA, 23 nt, Human
uucauuaaaggcuucucucucac

SEQ ID NO: 3766827 - RNA, 14 nt, Human
uucauuaaauguuu

SEQ ID NO: 3766828 - RNA, 15 nt, Human
uucauuaaauguuug

SEQ ID NO: 3766829 - RNA, 15 nt, Human
uucauuaauaauaaa

SEQ ID NO: 3766830 - RNA, 16 nt, Human
uucauuaauucaggca

SEQ ID NO: 3766831 - RNA, 20 nt, Human
uucauuagcaaaaaaaguug

SEQ ID NO: 3766832 - RNA, 14 nt, Human
uucauuaguuuuga

SEQ ID NO: 3766833 - RNA, 14 nt, Human
uucauuauguaaaa

SEQ ID NO: 3766834 - RNA, 13 nt, Human
uucauuauucucu

SEQ ID NO: 3766835 - RNA, 17 nt, Human
uucauuauuggaauuaa

SEQ ID NO: 3766836 - RNA, 15 nt, Human
uucauuauuugucaa

SEQ ID NO: 3766837 - RNA, 21 nt, Human
uucauuauuugucaaauuguc

SEQ ID NO: 3766838 - RNA, 18 nt, Human
uucauuauuuuaaaaaua

SEQ ID NO: 3766839 - RNA, 18 nt, Human
uucauucaauauugacau

SEQ ID NO: 3766840 - RNA, 20 nt, Human
uucccaggacccugaagggg

SEQ ID NO: 3766841 - RNA, 16 nt, Human
uucccaggcaaauaaa

SEQ ID NO: 3766842 - RNA, 18 nt, Human
uucccaggcaaauaaaau

SEQ ID NO: 3766843 - RNA, 19 nt, Human
uucccaggcaaauaaaauu

SEQ ID NO: 3766844 - RNA, 19 nt, Human
uucccaggcccacugugcc

SEQ ID NO: 3766845 - RNA, 21 nt, Human
uucccagguaggccaaggugu

SEQ ID NO: 3766846 - RNA, 12 nt, Human
uucccaggugcu

SEQ ID NO: 3766847 - RNA, 15 nt, Human
uucccagucugucga

SEQ ID NO: 3766848 - RNA, 15 nt, Human
uucccaguggcugcu

SEQ ID NO: 3766849 - RNA, 17 nt, Human
uucccaguggcugcugc

SEQ ID NO: 3766850 - RNA, 20 nt, Human
uucccaguggcugcugccca

SEQ ID NO: 3766851 - RNA, 15 nt, Human
uucccaguuggagcu

SEQ ID NO: 3766852 - RNA, 16 nt, Human
uucccaguuggagcuc

SEQ ID NO: 3766853 - RNA, 21 nt, Human
uucccauaccacccaaugcug

SEQ ID NO: 3766854 - RNA, 23 nt, Human
uucccaucacuggagcaccaggc

SEQ ID NO: 3766855 - RNA, 15 nt, Human
uucccauccccagcg

SEQ ID NO: 3766856 - RNA, 15 nt, Human
uucccaucgcuguca

SEQ ID NO: 3766857 - RNA, 13 nt, Human
uucccaucuccuu

SEQ ID NO: 3766858 - RNA, 16 nt, Human
uucccaucuuuacucc

SEQ ID NO: 3766859 - RNA, 19 nt, Human
uucccaugacccaggcugg

SEQ ID NO: 3766860 - RNA, 20 nt, Human
uucccaugacccaggcuggg

SEQ ID NO: 3766861 - RNA, 20 nt, Human
uucccaugauuucauguacu

SEQ ID NO: 3766862 - RNA, 14 nt, Human
uucccauggggagg

SEQ ID NO: 3766863 - RNA, 23 nt, Human
uucccauugcaucaccucuguaa

SEQ ID NO: 3766864 - RNA, 15 nt, Human
uucccauuuagaaug

SEQ ID NO: 3766865 - RNA, 14 nt, Human
uucccauuuugcaa

SEQ ID NO: 3766866 - RNA, 19 nt, Human
uucccauuuugcaaaauuu

SEQ ID NO: 3766867 - RNA, 20 nt, Human
uuccccaccagaugcugaaa

SEQ ID NO: 3766868 - RNA, 19 nt, Human
uuccccacccaccaacccu

SEQ ID NO: 3766869 - RNA, 22 nt, Human
uuccccaccccagcucaugccc

SEQ ID NO: 3766870 - RNA, 15 nt, Human
uuccccacguuaaag

SEQ ID NO: 3766871 - RNA, 17 nt, Human
uuccccacugcacacac

SEQ ID NO: 3766872 - RNA, 15 nt, Human
uuccccagacuuguu

SEQ ID NO: 3766873 - RNA, 12 nt, Human
uuccccagcauc

SEQ ID NO: 3766874 - RNA, 18 nt, Human
uuccccagcaucacuccc

SEQ ID NO: 3766875 - RNA, 19 nt, Human
uuccccagcuuugcugccu

SEQ ID NO: 3766876 - RNA, 15 nt, Human
uuccccaggaggcca

SEQ ID NO: 3766877 - RNA, 17 nt, Human
uuccccaggaggccagc

SEQ ID NO: 3766878 - RNA, 23 nt, Human
uuccccauaacucaauggccuaa

SEQ ID NO: 3766879 - RNA, 14 nt, Human
uuccccauacaaau

SEQ ID NO: 3766880 - RNA, 20 nt, Human
uuccccaucguugcccccau

SEQ ID NO: 3766881 - RNA, 11 nt, Human
uuccccauggg

SEQ ID NO: 3766882 - RNA, 22 nt, Human
uuccccauuauaucacacuuau

SEQ ID NO: 3766883 - RNA, 18 nt, Human
uucccccaccagcuaagg

SEQ ID NO: 3766884 - RNA, 13 nt, Human
uucccccagccca

SEQ ID NO: 3766885 - RNA, 13 nt, Human
uucccccagcccu

SEQ ID NO: 3766886 - RNA, 14 nt, Human
uucccccauagcca

SEQ ID NO: 3766887 - RNA, 16 nt, Human
uucccccauuuuuccc

SEQ ID NO: 3766888 - RNA, 13 nt, Human
uuccccccaaggg

SEQ ID NO: 3766889 - RNA, 21 nt, Human
uuccccccacucuccccacac

SEQ ID NO: 3766890 - RNA, 23 nt, Human
uucccccgccgcuuuucuccucu

SEQ ID NO: 3766891 - RNA, 19 nt, Human
uucccccuccaaucccacc

SEQ ID NO: 3766892 - RNA, 15 nt, Human
uucccccucccaggg

SEQ ID NO: 3766893 - RNA, 14 nt, Human
uucccccuccccca

SEQ ID NO: 3766894 - RNA, 14 nt, Human
uucccccucuccca

SEQ ID NO: 3766895 - RNA, 17 nt, Human
uucccccucucccaguu

SEQ ID NO: 3766896 - RNA, 22 nt, Human
uucccccugcuuccaccucacc

SEQ ID NO: 3766897 - RNA, 22 nt, Human
uucccccuggccaccacccccc

SEQ ID NO: 3766898 - RNA, 15 nt, Human
uucccccuuucuucc

SEQ ID NO: 3766899 - RNA, 19 nt, Human
uuccccgcauuccaggcuc

SEQ ID NO: 3766900 - RNA, 16 nt, Human
uuccccggucccuuga

SEQ ID NO: 3766901 - RNA, 17 nt, Human
uuccccggucccuugag

SEQ ID NO: 3766902 - RNA, 19 nt, Human
uuccccgugggccauggca

SEQ ID NO: 3766903 - RNA, 19 nt, Human
uuccccucacuggaugaaa

SEQ ID NO: 3766904 - RNA, 16 nt, Human
uuccccucccuggcuc

SEQ ID NO: 3766905 - RNA, 13 nt, Human
uuccccuccuacc

SEQ ID NO: 3766906 - RNA, 17 nt, Human
uuccccuccuucucccu

SEQ ID NO: 3766907 - RNA, 12 nt, Human
uuccccucuccc

SEQ ID NO: 3766908 - RNA, 21 nt, Human
uuccccucucccuucccuccu

SEQ ID NO: 3766909 - RNA, 14 nt, Human
uuccccucugcugc

SEQ ID NO: 3766910 - RNA, 21 nt, Human
uuccccuggggacccacgugg

SEQ ID NO: 3766911 - RNA, 15 nt, Human
uuccccugugucauc

SEQ ID NO: 3766912 - RNA, 17 nt, Human
uuccccuuauccucccu

SEQ ID NO: 3766913 - RNA, 21 nt, Human
uuccccuuccacugagggcag

SEQ ID NO: 3766914 - RNA, 22 nt, Human
uuccccuuccuaauuccacagc

SEQ ID NO: 3766915 - RNA, 23 nt, Human
uuccccuugcccagggcucagcc

SEQ ID NO: 3766916 - RNA, 23 nt, Human
uuccccuugcccuugcccugacc

SEQ ID NO: 3766917 - RNA, 14 nt, Human
uuccccuuucccca

SEQ ID NO: 3766918 - RNA, 14 nt, Human
uuccccuuuccugu

SEQ ID NO: 3766919 - RNA, 15 nt, Human
uuccccuuuccuguc

SEQ ID NO: 3766920 - RNA, 20 nt, Human
uucccgcagugggagcaaac

SEQ ID NO: 3766921 - RNA, 22 nt, Human
uucccgcucagcccucccugcc

SEQ ID NO: 3766922 - RNA, 14 nt, Human
uucccggucccgag

SEQ ID NO: 3766923 - RNA, 15 nt, Human
uucccguggccccag

SEQ ID NO: 3766924 - RNA, 11 nt, Human
uucccuaaagc

SEQ ID NO: 3766925 - RNA, 12 nt, Human
uucccuaaagcc

SEQ ID NO: 3766926 - RNA, 15 nt, Human
uucccuaaagugaug

SEQ ID NO: 3766927 - RNA, 15 nt, Human
uucccuaagccaagg

SEQ ID NO: 3766928 - RNA, 19 nt, Human
uucccuacauuaaacauga

SEQ ID NO: 3766929 - RNA, 13 nt, Human
uucccuacuuccu

SEQ ID NO: 3766930 - RNA, 18 nt, Human
uucccuaggggacacuuc

SEQ ID NO: 3766931 - RNA, 21 nt, Human
uucccuaggggacacuucccu

SEQ ID NO: 3766932 - RNA, 22 nt, Human
uucccucaaagcuuccauucca

SEQ ID NO: 3766933 - RNA, 15 nt, Human
uucccucaaaugugu

SEQ ID NO: 3766934 - RNA, 14 nt, Human
uucccucacccccu

SEQ ID NO: 3766935 - RNA, 18 nt, Human
uucccucacccccuccca

SEQ ID NO: 3766936 - RNA, 19 nt, Human
uucccucacccccucccac

SEQ ID NO: 3766937 - RNA, 20 nt, Human
uucccucacucgucuccccc

SEQ ID NO: 3766938 - RNA, 17 nt, Human
uucccucaucucuccuc

SEQ ID NO: 3766939 - RNA, 23 nt, Human
uucccuccaucccccuuuacccu

SEQ ID NO: 3766940 - RNA, 13 nt, Human
uucccucccugcu

SEQ ID NO: 3766941 - RNA, 15 nt, Human
uucccucccugcugu

SEQ ID NO: 3766942 - RNA, 16 nt, Human
uucccucccugcuguc

SEQ ID NO: 3766943 - RNA, 17 nt, Human
uucccucccuuccucuu

SEQ ID NO: 3766944 - RNA, 20 nt, Human
uucccucccuuccucuuucc

SEQ ID NO: 3766945 - RNA, 12 nt, Human
uucccuccuccc

SEQ ID NO: 3766946 - RNA, 13 nt, Human
uucccuccuccca

SEQ ID NO: 3766947 - RNA, 14 nt, Human
uucccuccucccau

SEQ ID NO: 3766948 - RNA, 16 nt, Human
uucccucucccaggcc

SEQ ID NO: 3766949 - RNA, 13 nt, Human
uucccucucugga

SEQ ID NO: 3766950 - RNA, 15 nt, Human
uucccucucuggaga

SEQ ID NO: 3766951 - RNA, 11 nt, Human
uucccucugag

SEQ ID NO: 3766952 - RNA, 14 nt, Human
uucccucugccugu

SEQ ID NO: 3766953 - RNA, 18 nt, Human
uucccucugccugucccu

SEQ ID NO: 3766954 - RNA, 20 nt, Human
uucccucuuuggcuccccug

SEQ ID NO: 3766955 - RNA, 23 nt, Human
uucccucuuuucuuacuccuccu

SEQ ID NO: 3766956 - RNA, 23 nt, Human
uucccugaaaaccucacaugcau

SEQ ID NO: 3766957 - RNA, 13 nt, Human
uucccugaagcuc

SEQ ID NO: 3766958 - RNA, 19 nt, Human
uucccugagucaccaggaa

SEQ ID NO: 3766959 - RNA, 22 nt, Human
uucccugcacuaaagccagccu

SEQ ID NO: 3766960 - RNA, 23 nt, Human
uucccugccucucaucaacugaa

SEQ ID NO: 3766961 - RNA, 19 nt, Human
uucccugcgccugugaugc

SEQ ID NO: 3766962 - RNA, 15 nt, Human
uucccugcuuccagg

SEQ ID NO: 3766963 - RNA, 11 nt, Human
uucccuggacc

SEQ ID NO: 3766964 - RNA, 17 nt, Human
uucccuggccuuucaua

SEQ ID NO: 3766965 - RNA, 23 nt, Human
uucccuggcuuguaacuccacca

SEQ ID NO: 3766966 - RNA, 23 nt, Human
uucccuggguuagacugccagcu

SEQ ID NO: 3766967 - RNA, 22 nt, Human
uucccugguaagaaaaagcaaa

SEQ ID NO: 3766968 - RNA, 23 nt, Human
uucccuggucccuuguauccccu

SEQ ID NO: 3766969 - RNA, 20 nt, Human
uucccuguauuuucuuucuc

SEQ ID NO: 3766970 - RNA, 12 nt, Human
uucccugugcug

SEQ ID NO: 3766971 - RNA, 18 nt, Human
uucccuguuuucccccca

SEQ ID NO: 3766972 - RNA, 14 nt, Human
uucccuuaaaauuu

SEQ ID NO: 3766973 - RNA, 22 nt, Human
uucccuucaguacccucucagc

SEQ ID NO: 3766974 - RNA, 15 nt, Human
uucccuucaucugga

SEQ ID NO: 3766975 - RNA, 15 nt, Human
uucccuuccacugcc

SEQ ID NO: 3766976 - RNA, 19 nt, Human
uucccuuccacugccucug

SEQ ID NO: 3766977 - RNA, 20 nt, Human
uucccuuccaguuuauucca

SEQ ID NO: 3766978 - RNA, 13 nt, Human
uucccuuccucca

SEQ ID NO: 3766979 - RNA, 17 nt, Human
uucccuuccuccauccu

SEQ ID NO: 3766980 - RNA, 17 nt, Human
uucccuuccucuucggc

SEQ ID NO: 3766981 - RNA, 14 nt, Human
uucccuuccugcca

SEQ ID NO: 3766982 - RNA, 15 nt, Human
uucccuuccugccag

SEQ ID NO: 3766983 - RNA, 19 nt, Human
uucccuucgacagcauuuu

SEQ ID NO: 3766984 - RNA, 22 nt, Human
uucccuucuugguuuccaaagg

SEQ ID NO: 3766985 - RNA, 14 nt, Human
uugaggauuaguuu

SEQ ID NO: 3766986 - RNA, 17 nt, Human
uugaggauuaguuuaga

SEQ ID NO: 3766987 - RNA, 19 nt, Human
uugaggauuaguuuagaac

SEQ ID NO: 3766988 - RNA, 15 nt, Human
uugaggauuuugagu

SEQ ID NO: 3766989 - RNA, 16 nt, Human
uugaggcaaaagaagg

SEQ ID NO: 3766990 - RNA, 18 nt, Human
uugaggcaagugugggcc

SEQ ID NO: 3766991 - RNA, 21 nt, Human
uugaggccaagaauauugcaa

SEQ ID NO: 3766992 - RNA, 22 nt, Human
uugaggcuugguuccuucccaa

SEQ ID NO: 3766993 - RNA, 15 nt, Human
uugaggcuuucaggu

SEQ ID NO: 3766994 - RNA, 15 nt, Human
uugaggcuuuguguu

SEQ ID NO: 3766995 - RNA, 23 nt, Human
uugagggacaaauuuaaaacaaa

SEQ ID NO: 3766996 - RNA, 17 nt, Human
uugagggacugccucug

SEQ ID NO: 3766997 - RNA, 20 nt, Human
uugagggacugccucugcca

SEQ ID NO: 3766998 - RNA, 19 nt, Human
uugagggcccagagcagga

SEQ ID NO: 3766999 - RNA, 23 nt, Human
uugagggcccagagcaggaagca

SEQ ID NO: 3767000 - RNA, 15 nt, Human
uugaggggaccagga

SEQ ID NO: 3767001 - RNA, 20 nt, Human
uugaggggauuaauaugaaa

SEQ ID NO: 3767002 - RNA, 15 nt, Human
uugaggggcuccugg

SEQ ID NO: 3767003 - RNA, 17 nt, Human
uugagggugggguaagg

SEQ ID NO: 3767004 - RNA, 21 nt, Human
uugagguccagcccuggcuga

SEQ ID NO: 3767005 - RNA, 17 nt, Human
uugaggucugcucggcc

SEQ ID NO: 3767006 - RNA, 22 nt, Human
uugaggucuuuugacaugugga

SEQ ID NO: 3767007 - RNA, 22 nt, Human
uugagguggaagcccuccuucc

SEQ ID NO: 3767008 - RNA, 14 nt, Human
uugaguaaucugau

SEQ ID NO: 3767009 - RNA, 21 nt, Human
uugaguaaugguguagaacac

SEQ ID NO: 3767010 - RNA, 13 nt, Human
uugaguagaggcu

SEQ ID NO: 3767011 - RNA, 16 nt, Human
uugaguagauauuacu

SEQ ID NO: 3767012 - RNA, 17 nt, Human
uugaguagauauuacuu

SEQ ID NO: 3767013 - RNA, 19 nt, Human
uugaguagauauuacuuua

SEQ ID NO: 3767014 - RNA, 17 nt, Human
uugaguauaagaaaugc

SEQ ID NO: 3767015 - RNA, 19 nt, Human
uugaguauaagaaaugcau

SEQ ID NO: 3767016 - RNA, 13 nt, Human
uugaguauuguuu

SEQ ID NO: 3767017 - RNA, 14 nt, Human
uugaguauuguuua

SEQ ID NO: 3767018 - RNA, 13 nt, Human
uugagucauuuua

SEQ ID NO: 3767019 - RNA, 18 nt, Human
uugagucuguuuuguaaa

SEQ ID NO: 3767020 - RNA, 11 nt, Human
uugagucuuuu

SEQ ID NO: 3767021 - RNA, 11 nt, Human
uugagugccuu

SEQ ID NO: 3767022 - RNA, 14 nt, Human
uugagugcucugau

SEQ ID NO: 3767023 - RNA, 17 nt, Human
uugaguggaugauguuu

SEQ ID NO: 3767024 - RNA, 19 nt, Human
uugaguggaugauguuucg

SEQ ID NO: 3767025 - RNA, 23 nt, Human
uugagugggguuaucucuguguu

SEQ ID NO: 3767026 - RNA, 15 nt, Human
uugagugugugugug

SEQ ID NO: 3767027 - RNA, 18 nt, Human
uugagugugugugugcau

SEQ ID NO: 3767028 - RNA, 16 nt, Human
uugaguucagguagcu

SEQ ID NO: 3767029 - RNA, 18 nt, Human
uugaguucuguagagccu

SEQ ID NO: 3767030 - RNA, 23 nt, Human
uugaguucuuccuguaaucuugu

SEQ ID NO: 3767031 - RNA, 20 nt, Human
uugaguugauucagcucugc

SEQ ID NO: 3767032 - RNA, 22 nt, Human
uugaguuuccucaggcugcugg

SEQ ID NO: 3767033 - RNA, 15 nt, Human
uugauaaaaauacug

SEQ ID NO: 3767034 - RNA, 14 nt, Human
uugauaaagauuuu

SEQ ID NO: 3767035 - RNA, 20 nt, Human
uugauaaagauuuuuuaaua

SEQ ID NO: 3767036 - RNA, 15 nt, Human
uugauaaaucauuuu

SEQ ID NO: 3767037 - RNA, 15 nt, Human
uugauaaauccauca

SEQ ID NO: 3767038 - RNA, 18 nt, Human
uugauaacaauguuuuaa

SEQ ID NO: 3767039 - RNA, 12 nt, Human
uugauaacagcu

SEQ ID NO: 3767040 - RNA, 18 nt, Human
uugauaaccuugaaaaaa

SEQ ID NO: 3767041 - RNA, 16 nt, Human
uugauaagagggcaca

SEQ ID NO: 3767042 - RNA, 18 nt, Human
uugauaagaucuuuuauu

SEQ ID NO: 3767043 - RNA, 20 nt, Human
uugauaagggacugauguuu

SEQ ID NO: 3767044 - RNA, 17 nt, Human
uugauaaguucauacau

SEQ ID NO: 3767045 - RNA, 18 nt, Human
uugauaauaauauuguuu

SEQ ID NO: 3767046 - RNA, 14 nt, Human
uugauaaugauaaa

SEQ ID NO: 3767047 - RNA, 15 nt, Human
uugauaaugcuuuca

SEQ ID NO: 3767048 - RNA, 14 nt, Human
uugauaauguuaaa

SEQ ID NO: 3767049 - RNA, 18 nt, Human
uugauaauguuaaauuug

SEQ ID NO: 3767050 - RNA, 19 nt, Human
uugauaauguuaaauuugu

SEQ ID NO: 3767051 - RNA, 12 nt, Human
uugauaauucuu

SEQ ID NO: 3767052 - RNA, 22 nt, Human
uugauaauucuuauuuugugga

SEQ ID NO: 3767053 - RNA, 15 nt, Human
uugauaauugcauuc

SEQ ID NO: 3767054 - RNA, 17 nt, Human
uugauaauuuuccuuua

SEQ ID NO: 3767055 - RNA, 23 nt, Human
uugauacauaauaaaaaauuaug

SEQ ID NO: 3767056 - RNA, 15 nt, Human
uugauacauucaaau

SEQ ID NO: 3767057 - RNA, 21 nt, Human
uugauacauucaaauuugucu

SEQ ID NO: 3767058 - RNA, 15 nt, Human
uugauaccccccucu

SEQ ID NO: 3767059 - RNA, 20 nt, Human
uugauacucuuucuaaugcu

SEQ ID NO: 3767060 - RNA, 14 nt, Human
uugauacuguugca

SEQ ID NO: 3767061 - RNA, 16 nt, Human
uugauacuguugcacg

SEQ ID NO: 3767062 - RNA, 20 nt, Human
uugauacuguugcacgugug

SEQ ID NO: 3767063 - RNA, 17 nt, Human
uugauacuuguucaaaa

SEQ ID NO: 3767064 - RNA, 13 nt, Human
uugauagcaaagc

SEQ ID NO: 3767065 - RNA, 19 nt, Human
uugauagcacagacccugc

SEQ ID NO: 3767066 - RNA, 18 nt, Human
uugauauaaauaaaacau

SEQ ID NO: 3767067 - RNA, 20 nt, Human
uugauauacuuuuuucuuau

SEQ ID NO: 3767068 - RNA, 18 nt, Human
uugauauagaaguauaaa

SEQ ID NO: 3767069 - RNA, 20 nt, Human
uugauauagaaguauaaaga

SEQ ID NO: 3767070 - RNA, 22 nt, Human
uugauauagaaguauaaagaau

SEQ ID NO: 3767071 - RNA, 16 nt, Human
uugauaugaaaaauau

SEQ ID NO: 3767072 - RNA, 21 nt, Human
uugauaugaaaaauaugauau

SEQ ID NO: 3767073 - RNA, 22 nt, Human
uugauaugaaaaauaugauauu

SEQ ID NO: 3767074 - RNA, 13 nt, Human
uugauaugaguau

SEQ ID NO: 3767075 - RNA, 18 nt, Human
uugauaugaguauacaau

SEQ ID NO: 3767076 - RNA, 20 nt, Human
uugauaugccuuuucccaac

SEQ ID NO: 3767077 - RNA, 16 nt, Human
uugauaugugaacagu

SEQ ID NO: 3767078 - RNA, 15 nt, Human
uugauauucuaagaa

SEQ ID NO: 3767079 - RNA, 17 nt, Human
uugauauugugaacauu

SEQ ID NO: 3767080 - RNA, 20 nt, Human
uugauauugugaacauuugu

SEQ ID NO: 3767081 - RNA, 17 nt, Human
uugaucaaauucauuuu

SEQ ID NO: 3767082 - RNA, 14 nt, Human
uugaucacacuauu

SEQ ID NO: 3767083 - RNA, 17 nt, Human
uugaucacacuauuuua

SEQ ID NO: 3767084 - RNA, 18 nt, Human
uugaucaguaguuugcau

SEQ ID NO: 3767085 - RNA, 17 nt, Human
uugauccagaaagaaaa

SEQ ID NO: 3767086 - RNA, 18 nt, Human
uugauccauccagcuugc

SEQ ID NO: 3767087 - RNA, 19 nt, Human
uugaucgccuuucccaggu

SEQ ID NO: 3767088 - RNA, 14 nt, Human
uugaucucacauuu

SEQ ID NO: 3767089 - RNA, 18 nt, Human
uugaucucccuuuccuau

SEQ ID NO: 3767090 - RNA, 21 nt, Human
uugaucugcucagcccuggag

SEQ ID NO: 3767091 - RNA, 22 nt, Human
uugaucugcucagcccuggagg

SEQ ID NO: 3767092 - RNA, 13 nt, Human
uugaucuucaaca

SEQ ID NO: 3767093 - RNA, 17 nt, Human
uugaucuucaacaaauu

SEQ ID NO: 3767094 - RNA, 20 nt, Human
uugaugaaaagauuuaagca

SEQ ID NO: 3767095 - RNA, 14 nt, Human
uugaugaaaaugua

SEQ ID NO: 3767096 - RNA, 20 nt, Human
uugaugaaacgucauguguu

SEQ ID NO: 3767097 - RNA, 23 nt, Human
uugaugaagaaguugauaugccu

SEQ ID NO: 3767098 - RNA, 20 nt, Human
uugaugaccaaaguccuuuu

SEQ ID NO: 3767099 - RNA, 17 nt, Human
uugaugacccccaacca

SEQ ID NO: 3767100 - RNA, 18 nt, Human
uugaugacuggaauuuuu

SEQ ID NO: 3767101 - RNA, 16 nt, Human
uugaugacuggcauuu

SEQ ID NO: 3767102 - RNA, 22 nt, Human
uugaugacuggcauuuuauaga

SEQ ID NO: 3767103 - RNA, 19 nt, Human
uugaugcaauccuuacaaa

SEQ ID NO: 3767104 - RNA, 15 nt, Human
uugaugcagcauuug

SEQ ID NO: 3767105 - RNA, 20 nt, Human
uugaugcauuaaaagaaaau

SEQ ID NO: 3767106 - RNA, 15 nt, Human
uugaugccaggacac

SEQ ID NO: 3767107 - RNA, 15 nt, Human
uugaugcuggagagg

SEQ ID NO: 3767108 - RNA, 17 nt, Human
uugaugcuggagagguu

SEQ ID NO: 3767109 - RNA, 16 nt, Human
uugauggagugugagc

SEQ ID NO: 3767110 - RNA, 21 nt, Human
uugauggagugugagccaccu

SEQ ID NO: 3767111 - RNA, 12 nt, Human
uugauggcugcg

SEQ ID NO: 3767112 - RNA, 14 nt, Human
uugauggggaagga

SEQ ID NO: 3767113 - RNA, 21 nt, Human
uugauggucagacacaaacaa

SEQ ID NO: 3767114 - RNA, 23 nt, Human
uugauggugaugaaauguaaaua

SEQ ID NO: 3767115 - RNA, 19 nt, Human
uugauggugguauguuuuc

SEQ ID NO: 3767116 - RNA, 22 nt, Human
uugauguauccaacaagccaga

SEQ ID NO: 3767117 - RNA, 12 nt, Human
uugauguaucug

SEQ ID NO: 3767118 - RNA, 15 nt, Human
uugauguaucugagu

SEQ ID NO: 3767119 - RNA, 18 nt, Human
uugaugucagcaguugcu

SEQ ID NO: 3767120 - RNA, 19 nt, Human
uugaugugacaauaauauu

SEQ ID NO: 3767121 - RNA, 18 nt, Human
uugauguggcccuggcug

SEQ ID NO: 3767122 - RNA, 20 nt, Human
uugauguggcccuggcugcc

SEQ ID NO: 3767123 - RNA, 21 nt, Human
uugauguggugaaaagcaggu

SEQ ID NO: 3767124 - RNA, 14 nt, Human
uugauguuaacaca

SEQ ID NO: 3767125 - RNA, 16 nt, Human
uugauguuaacacauu

SEQ ID NO: 3767126 - RNA, 15 nt, Human
uugauguugaugcaa

SEQ ID NO: 3767127 - RNA, 16 nt, Human
uugauguugaugcaau

SEQ ID NO: 3767128 - RNA, 13 nt, Human
uugauguuugugg

SEQ ID NO: 3767129 - RNA, 19 nt, Human
uugccugcagagagaagcc

SEQ ID NO: 3767130 - RNA, 12 nt, Human
uugccugcaggc

SEQ ID NO: 3767131 - RNA, 14 nt, Human
uugccugccuuucc

SEQ ID NO: 3767132 - RNA, 18 nt, Human
uugccugcggucaaggcc

SEQ ID NO: 3767133 - RNA, 12 nt, Human
uugccugguaca

SEQ ID NO: 3767134 - RNA, 16 nt, Human
uugccuguucaguuac

SEQ ID NO: 3767135 - RNA, 23 nt, Human
uugccuguucaguuacagaaagu

SEQ ID NO: 3767136 - RNA, 14 nt, Human
uugccuucaacuaa

SEQ ID NO: 3767137 - RNA, 22 nt, Human
uugccuuccuaagccuguggcu

SEQ ID NO: 3767138 - RNA, 17 nt, Human
uugccuucucaccagcu

SEQ ID NO: 3767139 - RNA, 18 nt, Human
uugccuucuuugaagaag

SEQ ID NO: 3767140 - RNA, 21 nt, Human
uugccuugaaccacuucccuc

SEQ ID NO: 3767141 - RNA, 15 nt, Human
uugccuugcagaacu

SEQ ID NO: 3767142 - RNA, 19 nt, Human
uugccuugcagaacugcca

SEQ ID NO: 3767143 - RNA, 16 nt, Human
uugccuugcuguuugu

SEQ ID NO: 3767144 - RNA, 18 nt, Human
uugccuuggcugcaguuu

SEQ ID NO: 3767145 - RNA, 16 nt, Human
uugccuuucgaggccu

SEQ ID NO: 3767146 - RNA, 17 nt, Human
uugccuuucgaggccug

SEQ ID NO: 3767147 - RNA, 12 nt, Human
uugccuuucugu

SEQ ID NO: 3767148 - RNA, 17 nt, Human
uugccuuucuguguuua

SEQ ID NO: 3767149 - RNA, 15 nt, Human
uugccuuuuaauuuu

SEQ ID NO: 3767150 - RNA, 18 nt, Human
uugccuuuugcaaacuuu

SEQ ID NO: 3767151 - RNA, 17 nt, Human
uugccuuuuuauaacuu

SEQ ID NO: 3767152 - RNA, 13 nt, Human
uugccuuuuucau

SEQ ID NO: 3767153 - RNA, 17 nt, Human
uugccuuuuucauuuuc

SEQ ID NO: 3767154 - RNA, 22 nt, Human
uugccuuuuucauuuuccaaua

SEQ ID NO: 3767155 - RNA, 20 nt, Human
uugcgaauccaagcucccug

SEQ ID NO: 3767156 - RNA, 15 nt, Human
uugcgagagaugugu

SEQ ID NO: 3767157 - RNA, 19 nt, Human
uugcgagagauguguguug

SEQ ID NO: 3767158 - RNA, 21 nt, Human
uugcgcuccuggcccagccuu

SEQ ID NO: 3767159 - RNA, 16 nt, Human
uugcggcaaaaggaaa

SEQ ID NO: 3767160 - RNA, 21 nt, Human
uugcggccaguauuagacugg

SEQ ID NO: 3767161 - RNA, 14 nt, Human
uugcggggggaggg

SEQ ID NO: 3767162 - RNA, 14 nt, Human
uugcgguucaggaa

SEQ ID NO: 3767163 - RNA, 14 nt, Human
uugcguaugucugu

SEQ ID NO: 3767164 - RNA, 18 nt, Human
uugcguaugucuguuacc

SEQ ID NO: 3767165 - RNA, 21 nt, Human
uugcguggaauugugcugagu

SEQ ID NO: 3767166 - RNA, 12 nt, Human
uugcuaaaugua

SEQ ID NO: 3767167 - RNA, 23 nt, Human
uugcuaacagcaacacaaagcuu

SEQ ID NO: 3767168 - RNA, 13 nt, Human
uugcuaacugaac

SEQ ID NO: 3767169 - RNA, 14 nt, Human
uugcuaagaugcuc

SEQ ID NO: 3767170 - RNA, 16 nt, Human
uugcuaagaugcucua

SEQ ID NO: 3767171 - RNA, 17 nt, Human
uugcuaaguaaaucucu

SEQ ID NO: 3767172 - RNA, 16 nt, Human
uugcuaaucaaagcca

SEQ ID NO: 3767173 - RNA, 18 nt, Human
uugcuaaucaaagccagg

SEQ ID NO: 3767174 - RNA, 22 nt, Human
uugcuaaucaaagccagggucu

SEQ ID NO: 3767175 - RNA, 14 nt, Human
uugcuaaucagugu

SEQ ID NO: 3767176 - RNA, 14 nt, Human
uugcuaauugcugu

SEQ ID NO: 3767177 - RNA, 15 nt, Human
uugcuaauuuuuauu

SEQ ID NO: 3767178 - RNA, 22 nt, Human
uugcuacuuccugccuggucuc

SEQ ID NO: 3767179 - RNA, 21 nt, Human
uugcuagagcuccucccucuc

SEQ ID NO: 3767180 - RNA, 15 nt, Human
uugcuaguauuugaa

SEQ ID NO: 3767181 - RNA, 16 nt, Human
uugcuaguauuugaau

SEQ ID NO: 3767182 - RNA, 13 nt, Human
uugcuaucauugu

SEQ ID NO: 3767183 - RNA, 18 nt, Human
uugcuaucggggaagcca

SEQ ID NO: 3767184 - RNA, 15 nt, Human
uugcuaucuauugau

SEQ ID NO: 3767185 - RNA, 14 nt, Human
uugcuaucucuauu

SEQ ID NO: 3767186 - RNA, 23 nt, Human
uugcuaucuggaggccuuccagc

SEQ ID NO: 3767187 - RNA, 13 nt, Human
uugcuaucuuaau

SEQ ID NO: 3767188 - RNA, 15 nt, Human
uugcuauguuacuau

SEQ ID NO: 3767189 - RNA, 16 nt, Human
uugcuauguuacuauu

SEQ ID NO: 3767190 - RNA, 14 nt, Human
uugcuauuagagca

SEQ ID NO: 3767191 - RNA, 13 nt, Human
uugcuauucuguc

SEQ ID NO: 3767192 - RNA, 12 nt, Human
uugcuauuguaa

SEQ ID NO: 3767193 - RNA, 15 nt, Human
uugcuauuguaaaua

SEQ ID NO: 3767194 - RNA, 16 nt, Human
uugcuauuuuuguaaa

SEQ ID NO: 3767195 - RNA, 15 nt, Human
uugcucaaaaaauga

SEQ ID NO: 3767196 - RNA, 17 nt, Human
uugcucaaaaaaugagc

SEQ ID NO: 3767197 - RNA, 18 nt, Human
uugcucaaaaaaugagcu

SEQ ID NO: 3767198 - RNA, 16 nt, Human
uugcucaaaaaucugu

SEQ ID NO: 3767199 - RNA, 20 nt, Human
uugcucacaguuauuacaua

SEQ ID NO: 3767200 - RNA, 16 nt, Human
uugcucauauuuccca

SEQ ID NO: 3767201 - RNA, 23 nt, Human
uugcucaucucaguccucaaagc

SEQ ID NO: 3767202 - RNA, 12 nt, Human
uugcucauggaa

SEQ ID NO: 3767203 - RNA, 17 nt, Human
uugcuccaccccacuca

SEQ ID NO: 3767204 - RNA, 15 nt, Human
uugcucccuucagcc

SEQ ID NO: 3767205 - RNA, 13 nt, Human
uugcuccgccucu

SEQ ID NO: 3767206 - RNA, 21 nt, Human
uugcucuaaaauauuuaugaa

SEQ ID NO: 3767207 - RNA, 22 nt, Human
uugcucucccgguucuuccagu

SEQ ID NO: 3767208 - RNA, 13 nt, Human
uugcucucccucu

SEQ ID NO: 3767209 - RNA, 23 nt, Human
uugcucucccucuucucaagugc

SEQ ID NO: 3767210 - RNA, 13 nt, Human
uugcucugcaccc

SEQ ID NO: 3767211 - RNA, 20 nt, Human
uugcucugccaacuucuuca

SEQ ID NO: 3767212 - RNA, 13 nt, Human
uugcucuggaccu

SEQ ID NO: 3767213 - RNA, 16 nt, Human
uugcucuggaccugcc

SEQ ID NO: 3767214 - RNA, 14 nt, Human
uugcucuggcugag

SEQ ID NO: 3767215 - RNA, 19 nt, Human
uugcucuuaaguuguggag

SEQ ID NO: 3767216 - RNA, 14 nt, Human
uugcucuugaugcc

SEQ ID NO: 3767217 - RNA, 17 nt, Human
uugcugaaaaugguauu

SEQ ID NO: 3767218 - RNA, 14 nt, Human
uugcugaaagaucu

SEQ ID NO: 3767219 - RNA, 18 nt, Human
uugcugaacauuggagaa

SEQ ID NO: 3767220 - RNA, 19 nt, Human
uugcugaagggcauucuuu

SEQ ID NO: 3767221 - RNA, 21 nt, Human
uugcugaagggcauucuuucc

SEQ ID NO: 3767222 - RNA, 15 nt, Human
uugcugaaugcaaga

SEQ ID NO: 3767223 - RNA, 15 nt, Human
uugcugacccucccc

SEQ ID NO: 3767224 - RNA, 22 nt, Human
uugcugaccucagcgguugcca

SEQ ID NO: 3767225 - RNA, 15 nt, Human
uugcugacuuagaau

SEQ ID NO: 3767226 - RNA, 15 nt, Human
uugcugagccucugc

SEQ ID NO: 3767227 - RNA, 20 nt, Human
uugcugauggugcaaugacc

SEQ ID NO: 3767228 - RNA, 22 nt, Human
uugcugauggugcaaugaccuu

SEQ ID NO: 3767229 - RNA, 17 nt, Human
uugcugauuuccccucu

SEQ ID NO: 3767230 - RNA, 16 nt, Human
uugcugauuuuaaugg

SEQ ID NO: 3767231 - RNA, 18 nt, Human
uugcugauuuuaauggau

SEQ ID NO: 3767232 - RNA, 17 nt, Human
uugcugcacucuugcac

SEQ ID NO: 3767233 - RNA, 19 nt, Human
uugcugcacucuugcacau

SEQ ID NO: 3767234 - RNA, 16 nt, Human
uugcugcauggcaggg

SEQ ID NO: 3767235 - RNA, 16 nt, Human
uugcugcccugcccca

SEQ ID NO: 3767236 - RNA, 11 nt, Human
uugcugccuca

SEQ ID NO: 3767237 - RNA, 16 nt, Human
uugcugcuagaacuuu

SEQ ID NO: 3767238 - RNA, 18 nt, Human
uugcugcuagaacuuuuu

SEQ ID NO: 3767239 - RNA, 19 nt, Human
uugcugcugauuuaaacac

SEQ ID NO: 3767240 - RNA, 12 nt, Human
uugcugcugucu

SEQ ID NO: 3767241 - RNA, 13 nt, Human
uugcugcuucucc

SEQ ID NO: 3767242 - RNA, 14 nt, Human
uugcuggaaagagc

SEQ ID NO: 3767243 - RNA, 21 nt, Human
uugcuggaagacgcaagggcc

SEQ ID NO: 3767244 - RNA, 21 nt, Human
uugcuggacggggacugggga

SEQ ID NO: 3767245 - RNA, 23 nt, Human
uugcuggacugucauagaaauua

SEQ ID NO: 3767246 - RNA, 16 nt, Human
uugcuggcaaagacag

SEQ ID NO: 3767247 - RNA, 22 nt, Human
uugcuggccaguccacccugcc

SEQ ID NO: 3767248 - RNA, 12 nt, Human
uugcuggcugga

SEQ ID NO: 3767249 - RNA, 14 nt, Human
uugcugguacacac

SEQ ID NO: 3767250 - RNA, 18 nt, Human
uugcuggucuuguaagag

SEQ ID NO: 3767251 - RNA, 14 nt, Human
uugcugguugcugu

SEQ ID NO: 3767252 - RNA, 22 nt, Human
uugcugguugcugugugguuug

SEQ ID NO: 3767253 - RNA, 18 nt, Human
uugcuguaagaugucugu

SEQ ID NO: 3767254 - RNA, 16 nt, Human
uugcuguaauguuaau

SEQ ID NO: 3767255 - RNA, 17 nt, Human
uugcuguacaaaagcaa

SEQ ID NO: 3767256 - RNA, 21 nt, Human
uugcuguaccagcccagaugu

SEQ ID NO: 3767257 - RNA, 19 nt, Human
uugcuguaggaucuaaggc

SEQ ID NO: 3767258 - RNA, 16 nt, Human
uugcuguauaaguuau

SEQ ID NO: 3767259 - RNA, 11 nt, Human
uugcuguauau

SEQ ID NO: 3767260 - RNA, 18 nt, Human
uugcuguaugcugaucau

SEQ ID NO: 3767261 - RNA, 21 nt, Human
uugcugucauaagaaugaaua

SEQ ID NO: 3767262 - RNA, 15 nt, Human
uugcuguccuaggcc

SEQ ID NO: 3767263 - RNA, 16 nt, Human
uugcuguccugaucug

SEQ ID NO: 3767264 - RNA, 14 nt, Human
uugcugucucugcu

SEQ ID NO: 3767265 - RNA, 14 nt, Human
uugcugugaggcug

SEQ ID NO: 3767266 - RNA, 19 nt, Human
uugcugugaggcuguccug

SEQ ID NO: 3767267 - RNA, 12 nt, Human
uugcugugggaa

SEQ ID NO: 3767268 - RNA, 23 nt, Human
uugcugugggaacgagaggggaa

SEQ ID NO: 3767269 - RNA, 19 nt, Human
uugcuguguccaacuccag

SEQ ID NO: 3767270 - RNA, 20 nt, Human
uugcugugugucccaggcag

SEQ ID NO: 3767271 - RNA, 22 nt, Human
uugcuguugaaagcaaaaaugc

SEQ ID NO: 3767272 - RNA, 14 nt, Human
uugcuguugcuuga

SEQ ID NO: 3767273 - RNA, 13 nt, Human
uugcuguuuccuu

SEQ ID NO: 3767274 - RNA, 15 nt, Human
uugcuguuuccuuuu

SEQ ID NO: 3767275 - RNA, 11 nt, Human
uugggagcacu

SEQ ID NO: 3767276 - RNA, 16 nt, Human
uugggagcacuggagu

SEQ ID NO: 3767277 - RNA, 14 nt, Human
uugggagccucugg

SEQ ID NO: 3767278 - RNA, 22 nt, Human
uugggaggaagcagaauaaagc

SEQ ID NO: 3767279 - RNA, 17 nt, Human
uugggaggccccacugg

SEQ ID NO: 3767280 - RNA, 16 nt, Human
uugggaggccgaggcg

SEQ ID NO: 3767281 - RNA, 12 nt, Human
uugggaguccag

SEQ ID NO: 3767282 - RNA, 19 nt, Human
uugggagugagaugccugc

SEQ ID NO: 3767283 - RNA, 13 nt, Human
uugggaguuuuua

SEQ ID NO: 3767284 - RNA, 19 nt, Human
uugggauccaggccccucc

SEQ ID NO: 3767285 - RNA, 21 nt, Human
uugggauccaggccccucccu

SEQ ID NO: 3767286 - RNA, 19 nt, Human
uugggaugucuuauuuuua

SEQ ID NO: 3767287 - RNA, 13 nt, Human
uugggauuugcug

SEQ ID NO: 3767288 - RNA, 16 nt, Human
uugggauuuuagaaca

SEQ ID NO: 3767289 - RNA, 19 nt, Human
uugggcaauauucucugua

SEQ ID NO: 3767290 - RNA, 17 nt, Human
uugggcacccccagccu

SEQ ID NO: 3767291 - RNA, 23 nt, Human
uugggcacccccagccugggccu

SEQ ID NO: 3767292 - RNA, 16 nt, Human
uugggcacuauuuauu

SEQ ID NO: 3767293 - RNA, 18 nt, Human
uugggcagcaauuuaaau

SEQ ID NO: 3767294 - RNA, 14 nt, Human
uugggccagaagua

SEQ ID NO: 3767295 - RNA, 21 nt, Human
uugggccagaaguaccagacu

SEQ ID NO: 3767296 - RNA, 17 nt, Human
uugggccagacaugcca

SEQ ID NO: 3767297 - RNA, 18 nt, Human
uugggccagcuuuucaaa

SEQ ID NO: 3767298 - RNA, 19 nt, Human
uugggccauacuggccucg

SEQ ID NO: 3767299 - RNA, 16 nt, Human
uugggcccagcugggc

SEQ ID NO: 3767300 - RNA, 13 nt, Human
uugggcccaggga

SEQ ID NO: 3767301 - RNA, 13 nt, Human
uugggcccugcau

SEQ ID NO: 3767302 - RNA, 17 nt, Human
uugggccugcuccagac

SEQ ID NO: 3767303 - RNA, 21 nt, Human
uugggcgccgugcugggcagc

SEQ ID NO: 3767304 - RNA, 18 nt, Human
uugggcggcugagagccc

SEQ ID NO: 3767305 - RNA, 14 nt, Human
uugggcucugauga

SEQ ID NO: 3767306 - RNA, 22 nt, Human
uugggcugugcggaucucugga

SEQ ID NO: 3767307 - RNA, 14 nt, Human
uugggcuucagccu

SEQ ID NO: 3767308 - RNA, 23 nt, Human
uugggcuugcuauucugucccua

SEQ ID NO: 3767309 - RNA, 19 nt, Human
uuggggacaucucuuugaa

SEQ ID NO: 3767310 - RNA, 22 nt, Human
uuggggaggagggggccgggcg

SEQ ID NO: 3767311 - RNA, 20 nt, Human
uuggggaguuaagaccuggc

SEQ ID NO: 3767312 - RNA, 21 nt, Human
uuggggaguuaagaccuggca

SEQ ID NO: 3767313 - RNA, 16 nt, Human
uuggggauguuuuucu

SEQ ID NO: 3767314 - RNA, 22 nt, Human
uuggggcaacauuguucaccuu

SEQ ID NO: 3767315 - RNA, 16 nt, Human
uuggggcaagucaugu

SEQ ID NO: 3767316 - RNA, 22 nt, Human
uuggggcaggaguagcugagcu

SEQ ID NO: 3767317 - RNA, 23 nt, Human
uuggggcaggaguagcugagcuc

SEQ ID NO: 3767318 - RNA, 23 nt, Human
uuggggccaccaaagcugcccac

SEQ ID NO: 3767319 - RNA, 13 nt, Human
uuggggcccugcc

SEQ ID NO: 3767320 - RNA, 21 nt, Human
uuggggcgaggcagaggacag

SEQ ID NO: 3767321 - RNA, 13 nt, Human
uuggggcucccag

SEQ ID NO: 3767322 - RNA, 21 nt, Human
uuggggcuuuacauacuuuau

SEQ ID NO: 3767323 - RNA, 22 nt, Human
uugggggaggggagacuuugau

SEQ ID NO: 3767324 - RNA, 14 nt, Human
uugggggcuggugc

SEQ ID NO: 3767325 - RNA, 16 nt, Human
uugggggcuggugcca

SEQ ID NO: 3767326 - RNA, 23 nt, Human
uuggggggaguaaagaauuauuu

SEQ ID NO: 3767327 - RNA, 21 nt, Human
uugggggggcucccguggccu

SEQ ID NO: 3767328 - RNA, 20 nt, Human
uugggggucagugcugccug

SEQ ID NO: 3767329 - RNA, 15 nt, Human
uuggggucagccagg

SEQ ID NO: 3767330 - RNA, 14 nt, Human
uuggggucugaccc

SEQ ID NO: 3767331 - RNA, 15 nt, Human
uuggggucugacccc

SEQ ID NO: 3767332 - RNA, 18 nt, Human
uugggguggguauaaaag

SEQ ID NO: 3767333 - RNA, 15 nt, Human
uugggguuguguugu

SEQ ID NO: 3767334 - RNA, 16 nt, Human
uugggguuguguuguc

SEQ ID NO: 3767335 - RNA, 19 nt, Human
uugggucaccccuccagga

SEQ ID NO: 3767336 - RNA, 12 nt, Human
uuggguccagga

SEQ ID NO: 3767337 - RNA, 18 nt, Human
uuggguggagaagccauu

SEQ ID NO: 3767338 - RNA, 22 nt, Human
uuggguggggggcuucauacac

SEQ ID NO: 3767339 - RNA, 19 nt, Human
uuggguguaacaggucucc

SEQ ID NO: 3767340 - RNA, 18 nt, Human
uuggguuacuauuucuug

SEQ ID NO: 3767341 - RNA, 12 nt, Human
uuggguuagacc

SEQ ID NO: 3767342 - RNA, 16 nt, Human
uuggguuagaccuaca

SEQ ID NO: 3767343 - RNA, 20 nt, Human
uuggguuaggagaagucaag

SEQ ID NO: 3767344 - RNA, 17 nt, Human
uuggguucauuauugga

SEQ ID NO: 3767345 - RNA, 16 nt, Human
uuggguuccauucuca

SEQ ID NO: 3767346 - RNA, 18 nt, Human
uugguaaaacucacugug

SEQ ID NO: 3767347 - RNA, 16 nt, Human
uugguaaauuucccca

SEQ ID NO: 3767348 - RNA, 22 nt, Human
uugguaaauuuccccaacagug

SEQ ID NO: 3767349 - RNA, 19 nt, Human
uugguaacauccuuucuau

SEQ ID NO: 3767350 - RNA, 21 nt, Human
uugguaacauccuuucuauug

SEQ ID NO: 3767351 - RNA, 14 nt, Human
uugguaacuuuugu

SEQ ID NO: 3767352 - RNA, 15 nt, Human
uugguaacuuuugug

SEQ ID NO: 3767353 - RNA, 18 nt, Human
uugguaagagacagaaug

SEQ ID NO: 3767354 - RNA, 20 nt, Human
uugguaaggggaauugagga

SEQ ID NO: 3767355 - RNA, 12 nt, Human
uugguaaugugu

SEQ ID NO: 3767356 - RNA, 15 nt, Human
uugguaauuauuuug

SEQ ID NO: 3767357 - RNA, 15 nt, Human
uugguacaaaaauaa

SEQ ID NO: 3767358 - RNA, 13 nt, Human
uugguaccuugca

SEQ ID NO: 3767359 - RNA, 13 nt, Human
uugguagauuaaa

SEQ ID NO: 3767360 - RNA, 15 nt, Human
uugguagauuaaaua

SEQ ID NO: 3767361 - RNA, 18 nt, Human
uugguauuaauaaaaaga

SEQ ID NO: 3767362 - RNA, 16 nt, Human
uugguauuuaucuauu

SEQ ID NO: 3767363 - RNA, 22 nt, Human
uugguauuuaucuauuguaaga

SEQ ID NO: 3767364 - RNA, 23 nt, Human
uugguauuuaucuauuguaagau

SEQ ID NO: 3767365 - RNA, 15 nt, Human
uugguauuugaaaca

SEQ ID NO: 3767366 - RNA, 20 nt, Human
uuggucagaguaagcugcuu

SEQ ID NO: 3767367 - RNA, 15 nt, Human
uugguccaagauucc

SEQ ID NO: 3767368 - RNA, 17 nt, Human
uugguccacuuuuccag

SEQ ID NO: 3767369 - RNA, 12 nt, Human
uugguccagagc

SEQ ID NO: 3767370 - RNA, 15 nt, Human
uugguccucuugccu

SEQ ID NO: 3767371 - RNA, 13 nt, Human
uugguccugcugc

SEQ ID NO: 3767372 - RNA, 21 nt, Human
uugguccuggaggcucaaauu

SEQ ID NO: 3767373 - RNA, 17 nt, Human
uugguccuguccccgca

SEQ ID NO: 3767374 - RNA, 17 nt, Human
uuggucuaauuuauuca

SEQ ID NO: 3767375 - RNA, 21 nt, Human
uuggucucccauaugcagaaa

SEQ ID NO: 3767376 - RNA, 14 nt, Human
uuggucucuauuuc

SEQ ID NO: 3767377 - RNA, 17 nt, Human
uuggucugggacuuccu

SEQ ID NO: 3767378 - RNA, 14 nt, Human
uuggucuguacuga

SEQ ID NO: 3767379 - RNA, 15 nt, Human
uuggucuuauuuauu

SEQ ID NO: 3767380 - RNA, 18 nt, Human
uuggucuugccccaucac

SEQ ID NO: 3767381 - RNA, 13 nt, Human
uuggucuuuguau

SEQ ID NO: 3767382 - RNA, 14 nt, Human
uuggugagaaccug

SEQ ID NO: 3767383 - RNA, 16 nt, Human
uuggugauuccgcagu

SEQ ID NO: 3767384 - RNA, 17 nt, Human
uuggugcacagugauuu

SEQ ID NO: 3767385 - RNA, 15 nt, Human
uuggugcauagaacu

SEQ ID NO: 3767386 - RNA, 22 nt, Human
uuggugcauagaacuggguaaa

SEQ ID NO: 3767387 - RNA, 22 nt, Human
uuggugccuggccuggcacaca

SEQ ID NO: 3767388 - RNA, 14 nt, Human
uuggugccuuuccu

SEQ ID NO: 3767389 - RNA, 21 nt, Human
uuggugccuuuccuguucagc

SEQ ID NO: 3767390 - RNA, 16 nt, Human
uuggugcgggguacac

SEQ ID NO: 3767391 - RNA, 14 nt, Human
uuggugcugggaac

SEQ ID NO: 3767392 - RNA, 22 nt, Human
uuggugcuuacacaucucagac

SEQ ID NO: 3767393 - RNA, 17 nt, Human
uugguggaaucuuuagc

SEQ ID NO: 3767394 - RNA, 16 nt, Human
uugguggauguaaaua

SEQ ID NO: 3767395 - RNA, 14 nt, Human
uugguggccacaua

SEQ ID NO: 3767396 - RNA, 15 nt, Human
uugguggcuuauggg

SEQ ID NO: 3767397 - RNA, 23 nt, Human
uugguguaacaucuucaacaugu

SEQ ID NO: 3767398 - RNA, 21 nt, Human
uuggugucaacaugaaacacc

SEQ ID NO: 3767399 - RNA, 21 nt, Human
uugguguggcccauggcuguu

SEQ ID NO: 3767400 - RNA, 18 nt, Human
uugguguugucauuguaa

SEQ ID NO: 3767401 - RNA, 12 nt, Human
uugguguuuuuu

SEQ ID NO: 3767402 - RNA, 22 nt, Human
uugguuaaaacuguacauuuaa

SEQ ID NO: 3767403 - RNA, 13 nt, Human
uugguuauacaug

SEQ ID NO: 3767404 - RNA, 14 nt, Human
uugguuauacauga

SEQ ID NO: 3767405 - RNA, 23 nt, Human
uugguuauacaugacacugaaau

SEQ ID NO: 3767406 - RNA, 23 nt, Human
uugguuauagugcaauauauuuu

SEQ ID NO: 3767407 - RNA, 17 nt, Human
uugguucaucaguguua

SEQ ID NO: 3767408 - RNA, 20 nt, Human
uugguucaucaguguuaaaa

SEQ ID NO: 3767409 - RNA, 14 nt, Human
uugguucauuaauu

SEQ ID NO: 3767410 - RNA, 16 nt, Human
uugguucccuuugcuc

SEQ ID NO: 3767411 - RNA, 14 nt, Human
uugguucuaaggac

SEQ ID NO: 3767412 - RNA, 15 nt, Human
uugguucugugaaca

SEQ ID NO: 3767413 - RNA, 13 nt, Human
uugguugaauaaa

SEQ ID NO: 3767414 - RNA, 16 nt, Human
uugguuguauucuuug

SEQ ID NO: 3767415 - RNA, 22 nt, Human
uugguuuaaagaaaguguauuu

SEQ ID NO: 3767416 - RNA, 16 nt, Human
uugguuuaauuuaaag

SEQ ID NO: 3767417 - RNA, 14 nt, Human
uugguuuacauuua

SEQ ID NO: 3767418 - RNA, 17 nt, Human
uugguuucuagcaugaa

SEQ ID NO: 3767419 - RNA, 16 nt, Human
uugguuucucuucucc

SEQ ID NO: 3767420 - RNA, 13 nt, Human
uuucagcuuaaaa

SEQ ID NO: 3767421 - RNA, 17 nt, Human
uuucaggagcagccuca

SEQ ID NO: 3767422 - RNA, 12 nt, Human
uuucaggaggaa

SEQ ID NO: 3767423 - RNA, 18 nt, Human
uuucaggaggaauacuga

SEQ ID NO: 3767424 - RNA, 22 nt, Human
uuucaggaggaauacugaacau

SEQ ID NO: 3767425 - RNA, 19 nt, Human
uuucaggcauuggauauuu

SEQ ID NO: 3767426 - RNA, 21 nt, Human
uuucaggggucgucaccaccu

SEQ ID NO: 3767427 - RNA, 16 nt, Human
uuucaggugacaugug

SEQ ID NO: 3767428 - RNA, 19 nt, Human
uuucaggugacaugugaaa

SEQ ID NO: 3767429 - RNA, 20 nt, Human
uuucaggugacaugugaaac

SEQ ID NO: 3767430 - RNA, 20 nt, Human
uuucaggugcucaaaaugca

SEQ ID NO: 3767431 - RNA, 22 nt, Human
uuucaggugcucaaaaugcaaa

SEQ ID NO: 3767432 - RNA, 21 nt, Human
uuucagguucaguauuaugua

SEQ ID NO: 3767433 - RNA, 20 nt, Human
uuucaguaauaaaacaucuu

SEQ ID NO: 3767434 - RNA, 22 nt, Human
uuucaguacuucagcaagagag

SEQ ID NO: 3767435 - RNA, 15 nt, Human
uuucagucaaaacuu

SEQ ID NO: 3767436 - RNA, 17 nt, Human
uuucagucuuuuccugu

SEQ ID NO: 3767437 - RNA, 19 nt, Human
uuucagugaauaugccugu

SEQ ID NO: 3767438 - RNA, 11 nt, Human
uuucagugagg

SEQ ID NO: 3767439 - RNA, 20 nt, Human
uuucaguuauugucccuggc

SEQ ID NO: 3767440 - RNA, 13 nt, Human
uuucaguuccaag

SEQ ID NO: 3767441 - RNA, 15 nt, Human
uuucaguucuaggaa

SEQ ID NO: 3767442 - RNA, 21 nt, Human
uuucaguugaucacuggcaau

SEQ ID NO: 3767443 - RNA, 14 nt, Human
uuucaguuuguugg

SEQ ID NO: 3767444 - RNA, 15 nt, Human
uuucaguuuucagga

SEQ ID NO: 3767445 - RNA, 17 nt, Human
uuucauaaacaaguucg

SEQ ID NO: 3767446 - RNA, 20 nt, Human
uuucauaacuuauugcugau

SEQ ID NO: 3767447 - RNA, 14 nt, Human
uuucauaaguauuu

SEQ ID NO: 3767448 - RNA, 18 nt, Human
uuucauaaguauuucaaa

SEQ ID NO: 3767449 - RNA, 14 nt, Human
uuucauaaucuuug

SEQ ID NO: 3767450 - RNA, 20 nt, Human
uuucauacauuuucuaagaa

SEQ ID NO: 3767451 - RNA, 14 nt, Human
uuucauagcuaaaa

SEQ ID NO: 3767452 - RNA, 14 nt, Human
uuucauaggaagac

SEQ ID NO: 3767453 - RNA, 15 nt, Human
uuucauaguucagaa

SEQ ID NO: 3767454 - RNA, 20 nt, Human
uuucauaguuggggucauag

SEQ ID NO: 3767455 - RNA, 18 nt, Human
uuucauauaaauggaauu

SEQ ID NO: 3767456 - RNA, 21 nt, Human
uuucauauaggaauagaaaca

SEQ ID NO: 3767457 - RNA, 12 nt, Human
uuucauaucauu

SEQ ID NO: 3767458 - RNA, 17 nt, Human
uuucauaucuacagaua

SEQ ID NO: 3767459 - RNA, 15 nt, Human
uuucauaugcuguau

SEQ ID NO: 3767460 - RNA, 12 nt, Human
uuucauauugug

SEQ ID NO: 3767461 - RNA, 14 nt, Human
uuucauauugugcc

SEQ ID NO: 3767462 - RNA, 13 nt, Human
uuucauauuucuu

SEQ ID NO: 3767463 - RNA, 17 nt, Human
uuucauauuuuaaacag

SEQ ID NO: 3767464 - RNA, 22 nt, Human
uuucauauuuuaauuucaagcu

SEQ ID NO: 3767465 - RNA, 17 nt, Human
uuucaucauauuauaca

SEQ ID NO: 3767466 - RNA, 20 nt, Human
uuucaucauucacuucacug

SEQ ID NO: 3767467 - RNA, 16 nt, Human
uuucaucauuguuucu

SEQ ID NO: 3767468 - RNA, 17 nt, Human
uuucauccauaacugaa

SEQ ID NO: 3767469 - RNA, 22 nt, Human
uuucauccccuuacccuuagaa

SEQ ID NO: 3767470 - RNA, 19 nt, Human
uuucauccuaaagaacaaa

SEQ ID NO: 3767471 - RNA, 14 nt, Human
uuucauccuuccca

SEQ ID NO: 3767472 - RNA, 16 nt, Human
uuucauccuucccacu

SEQ ID NO: 3767473 - RNA, 16 nt, Human
uuucaucuauuucuga

SEQ ID NO: 3767474 - RNA, 21 nt, Human
uuucaucucauuuaagggaaa

SEQ ID NO: 3767475 - RNA, 22 nt, Human
uuucaucucauuuaagggaaaa

SEQ ID NO: 3767476 - RNA, 11 nt, Human
uuucaucugcu

SEQ ID NO: 3767477 - RNA, 19 nt, Human
uuucaucugcucuccuucc

SEQ ID NO: 3767478 - RNA, 22 nt, Human
uuucaucugcucuccuuccugg

SEQ ID NO: 3767479 - RNA, 15 nt, Human
uuucaucugggaaag

SEQ ID NO: 3767480 - RNA, 16 nt, Human
uuucaucugggaaaga

SEQ ID NO: 3767481 - RNA, 18 nt, Human
uuucaucugggaaagaca

SEQ ID NO: 3767482 - RNA, 19 nt, Human
uuucaucugggaaagacau

SEQ ID NO: 3767483 - RNA, 16 nt, Human
uuucaucuucaguugu

SEQ ID NO: 3767484 - RNA, 14 nt, Human
uuucaugaaaauac

SEQ ID NO: 3767485 - RNA, 17 nt, Human
uuucaugaccaguaaag

SEQ ID NO: 3767486 - RNA, 24 nt, Human
uuucaugaccaguaaaggcugcug

SEQ ID NO: 3767487 - RNA, 21 nt, Human
uuucaugcaaacucuuugguc

SEQ ID NO: 3767488 - RNA, 13 nt, Human
uuucaugcuuuau

SEQ ID NO: 3767489 - RNA, 18 nt, Human
uuucauggacacuuugaa

SEQ ID NO: 3767490 - RNA, 20 nt, Human
uuucauggcugcuguugcuu

SEQ ID NO: 3767491 - RNA, 22 nt, Human
uuucauggggugaugcugggcu

SEQ ID NO: 3767492 - RNA, 20 nt, Human
uuucauggugaaaauguacu

SEQ ID NO: 3767493 - RNA, 21 nt, Human
uuucauggugaaaauguacug

SEQ ID NO: 3767494 - RNA, 22 nt, Human
uuucauguacugcauuauuuga

SEQ ID NO: 3767495 - RNA, 23 nt, Human
uuucauguugcacacccacucag

SEQ ID NO: 3767496 - RNA, 19 nt, Human
uuucauguuuuaacaaaaa

SEQ ID NO: 3767497 - RNA, 15 nt, Human
uuucauguuuuugau

SEQ ID NO: 3767498 - RNA, 14 nt, Human
uuucauuaaagcau

SEQ ID NO: 3767499 - RNA, 14 nt, Human
uuucauuaaauaaa

SEQ ID NO: 3767500 - RNA, 17 nt, Human
uuucauuaaauaaauuu

SEQ ID NO: 3767501 - RNA, 16 nt, Human
uuucauuaaauccuuu

SEQ ID NO: 3767502 - RNA, 16 nt, Human
uuucauuacaauggaa

SEQ ID NO: 3767503 - RNA, 12 nt, Human
uuucauuagcaa

SEQ ID NO: 3767504 - RNA, 14 nt, Human
uuucauuagcaaaa

SEQ ID NO: 3767505 - RNA, 15 nt, Human
uuucauuagcaaaaa

SEQ ID NO: 3767506 - RNA, 23 nt, Human
uuucauuagcaaaaaaaguugua

SEQ ID NO: 3767507 - RNA, 20 nt, Human
uuucauuauguaaaauguuu

SEQ ID NO: 3767508 - RNA, 21 nt, Human
uuucauuauuaguacugcucu

SEQ ID NO: 3767509 - RNA, 14 nt, Human
uuucauuccaaagg

SEQ ID NO: 3767510 - RNA, 22 nt, Human
uuucauugacuaucaaacugaa

SEQ ID NO: 3767511 - RNA, 22 nt, Human
uuucauugauaugaaaaauaug

SEQ ID NO: 3767512 - RNA, 17 nt, Human
uuucauugccuguguau

SEQ ID NO: 3767513 - RNA, 22 nt, Human
uuucauugcugggcuugucugu

SEQ ID NO: 3767514 - RNA, 22 nt, Human
uuucauuggaaauuaggaugua

SEQ ID NO: 3767515 - RNA, 16 nt, Human
uuucauuguaugaugu

SEQ ID NO: 3767516 - RNA, 23 nt, Human
uuucauuuaagggaaagaaaaug

SEQ ID NO: 3767517 - RNA, 14 nt, Human
uuucauuucaacug

SEQ ID NO: 3767518 - RNA, 14 nt, Human
uuucauuugccuau

SEQ ID NO: 3767519 - RNA, 19 nt, Human
uuucauuugguucauuaau

SEQ ID NO: 3767520 - RNA, 14 nt, Human
uuucauuuuccaau

SEQ ID NO: 3767521 - RNA, 18 nt, Human
uuucauuuucucucaggu

SEQ ID NO: 3767522 - RNA, 15 nt, Human
uuucauuuucugcaa

SEQ ID NO: 3767523 - RNA, 16 nt, Human
uuucauuuugcuuuaa

SEQ ID NO: 3767524 - RNA, 23 nt, Human
uuucauuuugcuuuaauuuuagc

SEQ ID NO: 3767525 - RNA, 15 nt, Human
uuuccaaaacaaaaa

SEQ ID NO: 3767526 - RNA, 19 nt, Human
uuuccaaaauaaaacaaag

SEQ ID NO: 3767527 - RNA, 16 nt, Human
uuuccaaaauuuuuca

SEQ ID NO: 3767528 - RNA, 16 nt, Human
uuuccaaacaacagaa

SEQ ID NO: 3767529 - RNA, 16 nt, Human
uuuccaaacugacuca

SEQ ID NO: 3767530 - RNA, 14 nt, Human
uuuccaaaggcauu

SEQ ID NO: 3767531 - RNA, 15 nt, Human
uuuccaaaguacacu

SEQ ID NO: 3767532 - RNA, 22 nt, Human
uuuccaaauuauuucuuaauua

SEQ ID NO: 3767533 - RNA, 23 nt, Human
uuuccaaauucacaaguuguguu

SEQ ID NO: 3767534 - RNA, 12 nt, Human
uuuccaacuacu

SEQ ID NO: 3767535 - RNA, 13 nt, Human
uuuccaagcaaau

SEQ ID NO: 3767536 - RNA, 18 nt, Human
uuuccaagcaaauguuac

SEQ ID NO: 3767537 - RNA, 21 nt, Human
uuuccaagcaaauguuacaua

SEQ ID NO: 3767538 - RNA, 19 nt, Human
uuuccaagccucucuggca

SEQ ID NO: 3767539 - RNA, 13 nt, Human
uuuccaaggagcu

SEQ ID NO: 3767540 - RNA, 18 nt, Human
uuuccaaggagcugagaa

SEQ ID NO: 3767541 - RNA, 22 nt, Human
uuuccaaggagcugagaauaga

SEQ ID NO: 3767542 - RNA, 14 nt, Human
uuuccaaguaauau

SEQ ID NO: 3767543 - RNA, 16 nt, Human
uuuccaagugugcaua

SEQ ID NO: 3767544 - RNA, 17 nt, Human
uuuccaauaugugauuu

SEQ ID NO: 3767545 - RNA, 15 nt, Human
uuuccacaaaucagu

SEQ ID NO: 3767546 - RNA, 15 nt, Human
uuuccacagaagcuc

SEQ ID NO: 3767547 - RNA, 23 nt, Human
uuuccacauaaggaaacuggguu

SEQ ID NO: 3767548 - RNA, 15 nt, Human
uuuccacaugcucug

SEQ ID NO: 3767549 - RNA, 14 nt, Human
uuuccaccuucuca

SEQ ID NO: 3767550 - RNA, 19 nt, Human
uuuccacgaugaaaaacuu

SEQ ID NO: 3767551 - RNA, 21 nt, Human
uuuccacuaagaacaccugca

SEQ ID NO: 3767552 - RNA, 18 nt, Human
uuuccacuccuccuagcc

SEQ ID NO: 3767553 - RNA, 14 nt, Human
uuuccacucuggau

SEQ ID NO: 3767554 - RNA, 12 nt, Human
uuuccacugaag

SEQ ID NO: 3767555 - RNA, 16 nt, Human
uuuccacuucuucauu

SEQ ID NO: 3767556 - RNA, 16 nt, Human
uuuccacuuguucuca

SEQ ID NO: 3767557 - RNA, 18 nt, Human
uuuccacuuguucucagg

SEQ ID NO: 3767558 - RNA, 12 nt, Human
uuuccagagcau

SEQ ID NO: 3767559 - RNA, 18 nt, Human
uuuccagcauucccaggu

SEQ ID NO: 3767560 - RNA, 16 nt, Human
uuuccagcuuucuccc

SEQ ID NO: 3767561 - RNA, 22 nt, Human
uuuccaggcuauguauaaaaua

SEQ ID NO: 3767562 - RNA, 15 nt, Human
uuuccaggcugguuc

SEQ ID NO: 3767563 - RNA, 19 nt, Human
uuuccaggcuucugcuggg

SEQ ID NO: 3767564 - RNA, 12 nt, Human
uuuccaguauuu

SEQ ID NO: 3767565 - RNA, 11 nt, Human
uuucugagccc

SEQ ID NO: 3767566 - RNA, 21 nt, Human
uuucugagcccgggcugccug

SEQ ID NO: 3767567 - RNA, 14 nt, Human
uuucugagcgauua

SEQ ID NO: 3767568 - RNA, 15 nt, Human
uuucugaguuuuacc

SEQ ID NO: 3767569 - RNA, 23 nt, Human
uuucugauaacuagauggugcug

SEQ ID NO: 3767570 - RNA, 15 nt, Human
uuucugaucaaggcc

SEQ ID NO: 3767571 - RNA, 23 nt, Human
uuucugaucugaugcaagcaaga

SEQ ID NO: 3767572 - RNA, 16 nt, Human
uuucugauguugccuu

SEQ ID NO: 3767573 - RNA, 17 nt, Human
uuucugauuagcuuugu

SEQ ID NO: 3767574 - RNA, 20 nt, Human
uuucugauuagcuuuguguu

SEQ ID NO: 3767575 - RNA, 11 nt, Human
uuucugauugu

SEQ ID NO: 3767576 - RNA, 23 nt, Human
uuucugauuguaacguugcugug

SEQ ID NO: 3767577 - RNA, 18 nt, Human
uuucugcacugagcagag

SEQ ID NO: 3767578 - RNA, 21 nt, Human
uuucugcagccacuauuguua

SEQ ID NO: 3767579 - RNA, 13 nt, Human
uuucugcauaugu

SEQ ID NO: 3767580 - RNA, 12 nt, Human
uuucugcccugc

SEQ ID NO: 3767581 - RNA, 20 nt, Human
uuucugcccuggcugcugcc

SEQ ID NO: 3767582 - RNA, 13 nt, Human
uuucugccucuca

SEQ ID NO: 3767583 - RNA, 13 nt, Human
uuucugccuuccu

SEQ ID NO: 3767584 - RNA, 20 nt, Human
uuucugccuuccuugcuaau

SEQ ID NO: 3767585 - RNA, 16 nt, Human
uuucugccuuuuguuc

SEQ ID NO: 3767586 - RNA, 17 nt, Human
uuucugcuuuaaaaaug

SEQ ID NO: 3767587 - RNA, 20 nt, Human
uuucuggaauacaugaaaua

SEQ ID NO: 3767588 - RNA, 23 nt, Human
uuucuggcagguccuccccucuc

SEQ ID NO: 3767589 - RNA, 21 nt, Human
uuucuggccaaaagcaguaaa

SEQ ID NO: 3767590 - RNA, 16 nt, Human
uuucugggauaaguaa

SEQ ID NO: 3767591 - RNA, 19 nt, Human
uuucugggcugucuauucu

SEQ ID NO: 3767592 - RNA, 22 nt, Human
uuucuggggaaagacacugccu

SEQ ID NO: 3767593 - RNA, 17 nt, Human
uuucugguagauagaaa

SEQ ID NO: 3767594 - RNA, 15 nt, Human
uuucugguggucugu

SEQ ID NO: 3767595 - RNA, 22 nt, Human
uuucuguaagaaaccuacugcc

SEQ ID NO: 3767596 - RNA, 19 nt, Human
uuucuguaauucagguuuu

SEQ ID NO: 3767597 - RNA, 23 nt, Human
uuucuguaauucagguuuuuccu

SEQ ID NO: 3767598 - RNA, 14 nt, Human
uuucuguaccaguu

SEQ ID NO: 3767599 - RNA, 15 nt, Human
uuucuguaccaguua

SEQ ID NO: 3767600 - RNA, 20 nt, Human
uuucuguacuuuuuggcaua

SEQ ID NO: 3767601 - RNA, 24 nt, Human
uuucuguagucauuuacuaaacau

SEQ ID NO: 3767602 - RNA, 17 nt, Human
uuucuguauaaaugucu

SEQ ID NO: 3767603 - RNA, 19 nt, Human
uuucugucacaguaaaaau

SEQ ID NO: 3767604 - RNA, 16 nt, Human
uuucugucagaaugcu

SEQ ID NO: 3767605 - RNA, 17 nt, Human
uuucugugccugaauau

SEQ ID NO: 3767606 - RNA, 22 nt, Human
uuucugugugcaccuuaccaac

SEQ ID NO: 3767607 - RNA, 11 nt, Human
uuucugugugu

SEQ ID NO: 3767608 - RNA, 14 nt, Human
uuucuguuaaaaug

SEQ ID NO: 3767609 - RNA, 19 nt, Human
uuucuguuauauaaauggu

SEQ ID NO: 3767610 - RNA, 15 nt, Human
uuucuguuccaaauu

SEQ ID NO: 3767611 - RNA, 20 nt, Human
uuucuguuccaaauucaguu

SEQ ID NO: 3767612 - RNA, 16 nt, Human
uuucuguucuguggaa

SEQ ID NO: 3767613 - RNA, 20 nt, Human
uuucuguucuuucuggcuau

SEQ ID NO: 3767614 - RNA, 23 nt, Human
uuucuguuguaacuuauguagau

SEQ ID NO: 3767615 - RNA, 18 nt, Human
uuucuguugucauugcug

SEQ ID NO: 3767616 - RNA, 22 nt, Human
uuucuguuucuaauuugcugcu

SEQ ID NO: 3767617 - RNA, 12 nt, Human
uuucuuaaaaag

SEQ ID NO: 3767618 - RNA, 16 nt, Human
uuucuuaaacaaaugu

SEQ ID NO: 3767619 - RNA, 13 nt, Human
uuucuuaaagugc

SEQ ID NO: 3767620 - RNA, 21 nt, Human
uuucuuaaauaagaaacuuuu

SEQ ID NO: 3767621 - RNA, 21 nt, Human
uuucuuaaauaaugcuucaga

SEQ ID NO: 3767622 - RNA, 22 nt, Human
uuucuuaaauaaugcuucagau

SEQ ID NO: 3767623 - RNA, 14 nt, Human
uuucuuaacuucuu

SEQ ID NO: 3767624 - RNA, 16 nt, Human
uuucuuaauauauagc

SEQ ID NO: 3767625 - RNA, 15 nt, Human
uuucuuaaucauuuu

SEQ ID NO: 3767626 - RNA, 21 nt, Human
uuucuuaauuauuauaaaaau

SEQ ID NO: 3767627 - RNA, 17 nt, Human
uuucuuaauuuggaaac

SEQ ID NO: 3767628 - RNA, 18 nt, Human
uuucuuaauuuggaaacu

SEQ ID NO: 3767629 - RNA, 14 nt, Human
uuucuuagaaauuu

SEQ ID NO: 3767630 - RNA, 22 nt, Human
uuucuuagaaauuuauuuccua

SEQ ID NO: 3767631 - RNA, 21 nt, Human
uuucuuagcuuuuuaauuguu

SEQ ID NO: 3767632 - RNA, 22 nt, Human
uuucuuagcuuuuuaauuguug

SEQ ID NO: 3767633 - RNA, 19 nt, Human
uuucuuauaauacucuguu

SEQ ID NO: 3767634 - RNA, 21 nt, Human
uuucuuauaauacucuguugu

SEQ ID NO: 3767635 - RNA, 14 nt, Human
uuucuuaugugaca

SEQ ID NO: 3767636 - RNA, 21 nt, Human
uuucuucaaaauguauauauu

SEQ ID NO: 3767637 - RNA, 21 nt, Human
uuucuucaacaucaauguuca

SEQ ID NO: 3767638 - RNA, 18 nt, Human
uuucuucaccaaaucuug

SEQ ID NO: 3767639 - RNA, 16 nt, Human
uuucuucagggcugcu

SEQ ID NO: 3767640 - RNA, 16 nt, Human
uuucuucaugcaauga

SEQ ID NO: 3767641 - RNA, 14 nt, Human
uuucuucccaucac

SEQ ID NO: 3767642 - RNA, 17 nt, Human
uuucuuccuaccaaguc

SEQ ID NO: 3767643 - RNA, 15 nt, Human
uuucuuccuuuacuu

SEQ ID NO: 3767644 - RNA, 13 nt, Human
uuucuucucccuc

SEQ ID NO: 3767645 - RNA, 13 nt, Human
uuucuucucugcu

SEQ ID NO: 3767646 - RNA, 15 nt, Human
uuucuucucugugag

SEQ ID NO: 3767647 - RNA, 23 nt, Human
uuucuucuucaaaccuuugugug

SEQ ID NO: 3767648 - RNA, 21 nt, Human
uuucuugacaaaaccuaacuu

SEQ ID NO: 3767649 - RNA, 18 nt, Human
uuucuugauuugaguuga

SEQ ID NO: 3767650 - RNA, 12 nt, Human
uuucuugccuca

SEQ ID NO: 3767651 - RNA, 13 nt, Human
uuucuugccucau

SEQ ID NO: 3767652 - RNA, 12 nt, Human
uuucuugcuugu

SEQ ID NO: 3767653 - RNA, 21 nt, Human
uuucuuggacacuuaauucug

SEQ ID NO: 3767654 - RNA, 19 nt, Human
uuucuuguaauuuaaacag

SEQ ID NO: 3767655 - RNA, 16 nt, Human
uuucuuguugcuuugu

SEQ ID NO: 3767656 - RNA, 21 nt, Human
uuucuuguugcuuuguugcac

SEQ ID NO: 3767657 - RNA, 20 nt, Human
uuucuuguuuaucagcaguu

SEQ ID NO: 3767658 - RNA, 20 nt, Human
uuucuuuaaaagaaugggca

SEQ ID NO: 3767659 - RNA, 13 nt, Human
uuucuuuaaagau

SEQ ID NO: 3767660 - RNA, 14 nt, Human
uuucuuuaaagaug

SEQ ID NO: 3767661 - RNA, 23 nt, Human
uuucuuuaaccuuguauaaauua

SEQ ID NO: 3767662 - RNA, 18 nt, Human
uuucuuuaaugcuuuuau

SEQ ID NO: 3767663 - RNA, 16 nt, Human
uuucuuuagagaacug

SEQ ID NO: 3767664 - RNA, 19 nt, Human
uuucuuuagagaacugaaa

SEQ ID NO: 3767665 - RNA, 20 nt, Human
uuucuuuagagaacugaaaa

SEQ ID NO: 3767666 - RNA, 23 nt, Human
uuucuuuaucaccuggcuuguuu

SEQ ID NO: 3767667 - RNA, 15 nt, Human
uuucuuucagauuuu

SEQ ID NO: 3767668 - RNA, 11 nt, Human
uuucuuucagu

SEQ ID NO: 3767669 - RNA, 13 nt, Human
uuucuuuccagag

SEQ ID NO: 3767670 - RNA, 22 nt, Human
uuucuuugaaugcuuuuugaau

SEQ ID NO: 3767671 - RNA, 20 nt, Human
uuucuuugaauuuucauuuu

SEQ ID NO: 3767672 - RNA, 19 nt, Human
uuucuuugccaucucugcu

SEQ ID NO: 3767673 - RNA, 17 nt, Human
uuucuuugggaauauuu

SEQ ID NO: 3767674 - RNA, 21 nt, Human
uuucuuuggugccuuuccugu

SEQ ID NO: 3767675 - RNA, 17 nt, Human
uuucuuuguaucauuca

SEQ ID NO: 3767676 - RNA, 15 nt, Human
uuucuuuucuuccug

SEQ ID NO: 3767677 - RNA, 16 nt, Human
uuucuuuugaauuguu

SEQ ID NO: 3767678 - RNA, 24 nt, Human
uuucuuuuguuacuguucuugcug

SEQ ID NO: 3767679 - RNA, 22 nt, Human
uuucuuuuuaaguaauguggaa

SEQ ID NO: 3767680 - RNA, 13 nt, Human
uuucuuuuuacau

SEQ ID NO: 3767681 - RNA, 17 nt, Human
uuucuuuuuauuuuuua

SEQ ID NO: 3767682 - RNA, 20 nt, Human
uuucuuuuugaaucuuuaau

SEQ ID NO: 3767683 - RNA, 14 nt, Human
uuucuuuuuuuccu

SEQ ID NO: 3767684 - RNA, 16 nt, Human
uuugaaaaaaaauaaa

SEQ ID NO: 3767685 - RNA, 16 nt, Human
uuugaaaaaaacuuca

SEQ ID NO: 3767686 - RNA, 20 nt, Human
uuugaaaaagcagacagaag

SEQ ID NO: 3767687 - RNA, 15 nt, Human
uuugaaaaagcgaaa

SEQ ID NO: 3767688 - RNA, 23 nt, Human
uuugaaaaagcgaaaaaaucagg

SEQ ID NO: 3767689 - RNA, 13 nt, Human
uuugaaaaaguua

SEQ ID NO: 3767690 - RNA, 21 nt, Human
uuugaaaaauauaaaauuaug

SEQ ID NO: 3767691 - RNA, 14 nt, Human
uuugaaaacuacau

SEQ ID NO: 3767692 - RNA, 18 nt, Human
uuugaaaacuacauuuua

SEQ ID NO: 3767693 - RNA, 23 nt, Human
uuugaaaacuacauuuuaacaug

SEQ ID NO: 3767694 - RNA, 13 nt, Human
uuugaaaacuuca

SEQ ID NO: 3767695 - RNA, 16 nt, Human
uuugaaaagcagacau

SEQ ID NO: 3767696 - RNA, 13 nt, Human
uuugaaaagcuau

SEQ ID NO: 3767697 - RNA, 14 nt, Human
uuugaaaagcuauu

SEQ ID NO: 3767698 - RNA, 18 nt, Human
uuugaaaagcuauuagcc

SEQ ID NO: 3767699 - RNA, 17 nt, Human
uuugaaaagcuucuuaa

SEQ ID NO: 3767700 - RNA, 14 nt, Human
uuugaaaauaguuu

SEQ ID NO: 3767701 - RNA, 11 nt, Human
uuugaaaaugg

SEQ ID NO: 3767702 - RNA, 16 nt, Human
uuugaaacaauacuca

SEQ ID NO: 3767703 - RNA, 17 nt, Human
uuugaaacacuuugcau

SEQ ID NO: 3767704 - RNA, 21 nt, Human
uuugaaacaugcuuguguuuc

SEQ ID NO: 3767705 - RNA, 18 nt, Human
uuugaaacauugcuuuua

SEQ ID NO: 3767706 - RNA, 22 nt, Human
uuugaaaccccuguaggccuca

SEQ ID NO: 3767707 - RNA, 15 nt, Human
uuugaaaccugcucu

SEQ ID NO: 3767708 - RNA, 19 nt, Human
uuugaaagaaggaagacuu

SEQ ID NO: 3767709 - RNA, 16 nt, Human
ccuggaccaaagcuga

SEQ ID NO: 3767710 - RNA, 16 nt, Human
ccuggaccagaugcug

SEQ ID NO: 3767711 - RNA, 14 nt, Human
ccuggaccagccuc

SEQ ID NO: 3767712 - RNA, 15 nt, Human
ccuggaccagccucu

SEQ ID NO: 3767713 - RNA, 18 nt, Human
ccuggaccccccuuucac

SEQ ID NO: 3767714 - RNA, 13 nt, Human
ccuggaccccugc

SEQ ID NO: 3767715 - RNA, 23 nt, Human
ccuggacccguucaugggggagg

SEQ ID NO: 3767716 - RNA, 12 nt, Human
ccuggaccucug

SEQ ID NO: 3767717 - RNA, 19 nt, Human
ccuggaccucugacagcag

SEQ ID NO: 3767718 - RNA, 20 nt, Human
ccuggaccucugacagcagc

SEQ ID NO: 3767719 - RNA, 20 nt, Human
ccuggaccugccuccugccu

SEQ ID NO: 3767720 - RNA, 19 nt, Human
ccuggaccuuuuguuuucu

SEQ ID NO: 3767721 - RNA, 12 nt, Human
ccuggacucccg

SEQ ID NO: 3767722 - RNA, 13 nt, Human
ccuggacugaggg

SEQ ID NO: 3767723 - RNA, 15 nt, Human
ccuggacugcuaccu

SEQ ID NO: 3767724 - RNA, 22 nt, Human
ccuggacugguggccccugccu

SEQ ID NO: 3767725 - RNA, 17 nt, Human
ccuggacugugugcuca

SEQ ID NO: 3767726 - RNA, 20 nt, Human
ccuggacuuaagcaucuggc

SEQ ID NO: 3767727 - RNA, 12 nt, Human
ccuggagaacua

SEQ ID NO: 3767728 - RNA, 15 nt, Human
ccuggagaccccacc

SEQ ID NO: 3767729 - RNA, 19 nt, Human
ccuggagacuaaccccacc

SEQ ID NO: 3767730 - RNA, 14 nt, Human
ccuggagagccaga

SEQ ID NO: 3767731 - RNA, 14 nt, Human
ccuggagagcuaga

SEQ ID NO: 3767732 - RNA, 21 nt, Human
ccuggagagcuagaaccuaga

SEQ ID NO: 3767733 - RNA, 13 nt, Human
ccuggagauccuc

SEQ ID NO: 3767734 - RNA, 21 nt, Human
ccuggagaugacuugaggccu

SEQ ID NO: 3767735 - RNA, 21 nt, Human
ccuggagcaaucacagaugag

SEQ ID NO: 3767736 - RNA, 15 nt, Human
ccuggagcagaagca

SEQ ID NO: 3767737 - RNA, 22 nt, Human
ccuggagcagaagcagcaacuu

SEQ ID NO: 3767738 - RNA, 18 nt, Human
ccuggagcagaccacccc

SEQ ID NO: 3767739 - RNA, 17 nt, Human
ccuggagcagccacccc

SEQ ID NO: 3767740 - RNA, 18 nt, Human
ccuggagcaggccuugcg

SEQ ID NO: 3767741 - RNA, 18 nt, Human
ccuggagccaacugcugc

SEQ ID NO: 3767742 - RNA, 12 nt, Human
ccuggagcccga

SEQ ID NO: 3767743 - RNA, 17 nt, Human
ccuggagcccuccgccu

SEQ ID NO: 3767744 - RNA, 13 nt, Human
ccuggagcuccug

SEQ ID NO: 3767745 - RNA, 16 nt, Human
ccuggagcuccuggga

SEQ ID NO: 3767746 - RNA, 16 nt, Human
ccuggaggaaccgaaa

SEQ ID NO: 3767747 - RNA, 22 nt, Human
ccuggaggaaccgaaaggccaa

SEQ ID NO: 3767748 - RNA, 12 nt, Human
ccuggaggaccu

SEQ ID NO: 3767749 - RNA, 16 nt, Human
ccuggaggaccugagc

SEQ ID NO: 3767750 - RNA, 22 nt, Human
ccuggaggaccugagccugccg

SEQ ID NO: 3767751 - RNA, 15 nt, Human
ccuggaggaggagca

SEQ ID NO: 3767752 - RNA, 20 nt, Human
ccuggaggaggagcaggggc

SEQ ID NO: 3767753 - RNA, 13 nt, Human
ccuggaggcccag

SEQ ID NO: 3767754 - RNA, 16 nt, Human
ccuggaggcccaguuc

SEQ ID NO: 3767755 - RNA, 20 nt, Human
ccuggaggcggugcggcagg

SEQ ID NO: 3767756 - RNA, 17 nt, Human
ccuggaggcugccuccc

SEQ ID NO: 3767757 - RNA, 14 nt, Human
ccuggagggaagag

SEQ ID NO: 3767758 - RNA, 12 nt, Human
ccuggagggcua

SEQ ID NO: 3767759 - RNA, 23 nt, Human
ccuggagggcuagaaccuggaga

SEQ ID NO: 3767760 - RNA, 21 nt, Human
ccuggaggggcuagaaccuag

SEQ ID NO: 3767761 - RNA, 21 nt, Human
ccuggagggggaauggcagca

SEQ ID NO: 3767762 - RNA, 14 nt, Human
ccuggaggugccag

SEQ ID NO: 3767763 - RNA, 19 nt, Human
ccuggaggugccagcaaag

SEQ ID NO: 3767764 - RNA, 21 nt, Human
ccuggaggugccagcaaagcc

SEQ ID NO: 3767765 - RNA, 23 nt, Human
ccuggaggugccagcaaagcccc

SEQ ID NO: 3767766 - RNA, 22 nt, Human
ccuggagguggcugagccccug

SEQ ID NO: 3767767 - RNA, 20 nt, Human
ccuggaggugggguugggau

SEQ ID NO: 3767768 - RNA, 18 nt, Human
ccuggagucaugccaagc

SEQ ID NO: 3767769 - RNA, 21 nt, Human
ccuggaguguggcugaggagg

SEQ ID NO: 3767770 - RNA, 15 nt, Human
ccuggaguucugguu

SEQ ID NO: 3767771 - RNA, 21 nt, Human
ccuggaucacgacgcugcaga

SEQ ID NO: 3767772 - RNA, 19 nt, Human
ccuggaucuaccuggaggg

SEQ ID NO: 3767773 - RNA, 14 nt, Human
ccuggaucucccug

SEQ ID NO: 3767774 - RNA, 19 nt, Human
ccuggaugcagccucacag

SEQ ID NO: 3767775 - RNA, 16 nt, Human
ccuggaugcccccugu

SEQ ID NO: 3767776 - RNA, 18 nt, Human
ccuggauggggcaggcca

SEQ ID NO: 3767777 - RNA, 18 nt, Human
ccuggaugucugaacuuu

SEQ ID NO: 3767778 - RNA, 17 nt, Human
ccuggauguugugugua

SEQ ID NO: 3767779 - RNA, 12 nt, Human
ccuggauguuug

SEQ ID NO: 3767780 - RNA, 18 nt, Human
ccuggauucauuuccugc

SEQ ID NO: 3767781 - RNA, 14 nt, Human
ccuggauuugcaua

SEQ ID NO: 3767782 - RNA, 23 nt, Human
ccuggcaaagggagcagaacuga

SEQ ID NO: 3767783 - RNA, 13 nt, Human
ccuggcacacauc

SEQ ID NO: 3767784 - RNA, 16 nt, Human
ccuggcacagggcagu

SEQ ID NO: 3767785 - RNA, 18 nt, Human
ccuggcacagggcagugg

SEQ ID NO: 3767786 - RNA, 13 nt, Human
ccuggcacagugu

SEQ ID NO: 3767787 - RNA, 15 nt, Human
ccuggcacagugucu

SEQ ID NO: 3767788 - RNA, 22 nt, Human
ccuggcacagugucugggcuga

SEQ ID NO: 3767789 - RNA, 20 nt, Human
ccuggcacccggccccugcu

SEQ ID NO: 3767790 - RNA, 12 nt, Human
ccuggcacugcu

SEQ ID NO: 3767791 - RNA, 17 nt, Human
ccuggcacugcugugcu

SEQ ID NO: 3767792 - RNA, 21 nt, Human
ccuggcacugcuuccagugag

SEQ ID NO: 3767793 - RNA, 20 nt, Human
ccuggcacuggaccccagca

SEQ ID NO: 3767794 - RNA, 14 nt, Human
ccuggcagaacuga

SEQ ID NO: 3767795 - RNA, 19 nt, Human
ccuggcagagaugccuccc

SEQ ID NO: 3767796 - RNA, 15 nt, Human
ccuggcagcccagag

SEQ ID NO: 3767797 - RNA, 13 nt, Human
ccuggcagccccu

SEQ ID NO: 3767798 - RNA, 19 nt, Human
ccuggcagccgugccuuca

SEQ ID NO: 3767799 - RNA, 21 nt, Human
ccuggcagccgugccuucagc

SEQ ID NO: 3767800 - RNA, 17 nt, Human
ccuggcagcucuggaca

SEQ ID NO: 3767801 - RNA, 23 nt, Human
ccuggcagcucuggacagcccca

SEQ ID NO: 3767802 - RNA, 23 nt, Human
ccuggcagggucauccugugcuc

SEQ ID NO: 3767803 - RNA, 20 nt, Human
ccuggcagguuagaaccuag

SEQ ID NO: 3767804 - RNA, 19 nt, Human
ccuggcauucuuguacagu

SEQ ID NO: 3767805 - RNA, 18 nt, Human
ccuggccacgcagccagg

SEQ ID NO: 3767806 - RNA, 20 nt, Human
ccuggccacgcagccaggac

SEQ ID NO: 3767807 - RNA, 13 nt, Human
ccuggccacgccc

SEQ ID NO: 3767808 - RNA, 12 nt, Human
ccuggccagaca

SEQ ID NO: 3767809 - RNA, 16 nt, Human
ccuggccagacacagg

SEQ ID NO: 3767810 - RNA, 18 nt, Human
ccuggccagacacaggcc

SEQ ID NO: 3767811 - RNA, 12 nt, Human
ccuggccagagg

SEQ ID NO: 3767812 - RNA, 14 nt, Human
ccuggccagaggcu

SEQ ID NO: 3767813 - RNA, 23 nt, Human
ccuggccagaugcaccagcccuu

SEQ ID NO: 3767814 - RNA, 15 nt, Human
ccuggccagccuaca

SEQ ID NO: 3767815 - RNA, 11 nt, Human
ccuggccagga

SEQ ID NO: 3767816 - RNA, 14 nt, Human
ccuggccaggagca

SEQ ID NO: 3767817 - RNA, 14 nt, Human
ccuggccaggagcu

SEQ ID NO: 3767818 - RNA, 16 nt, Human
ccuggccaggagcucu

SEQ ID NO: 3767819 - RNA, 12 nt, Human
ccuggccaggca

SEQ ID NO: 3767820 - RNA, 14 nt, Human
ccuggccaucccac

SEQ ID NO: 3767821 - RNA, 16 nt, Human
ccuggcccacugcauc

SEQ ID NO: 3767822 - RNA, 12 nt, Human
ccuggcccagcc

SEQ ID NO: 3767823 - RNA, 14 nt, Human
ccuggcccagccuu

SEQ ID NO: 3767824 - RNA, 13 nt, Human
ccuggcccagcuc

SEQ ID NO: 3767825 - RNA, 14 nt, Human
ccuggcccagcucc

SEQ ID NO: 3767826 - RNA, 13 nt, Human
ccuggcccagggc

SEQ ID NO: 3767827 - RNA, 18 nt, Human
ccuggcccaucaguguac

SEQ ID NO: 3767828 - RNA, 15 nt, Human
ccuggcccauguaug

SEQ ID NO: 3767829 - RNA, 21 nt, Human
ccuggcccauguauggccagg

SEQ ID NO: 3767830 - RNA, 13 nt, Human
ccuggccccagga

SEQ ID NO: 3767831 - RNA, 18 nt, Human
ccuggccccauggucagc

SEQ ID NO: 3767832 - RNA, 17 nt, Human
ccuggccccaugucucu

SEQ ID NO: 3767833 - RNA, 20 nt, Human
ccuggcccccaaccucaggg

SEQ ID NO: 3767834 - RNA, 21 nt, Human
ccuggcccccacccucugcca

SEQ ID NO: 3767835 - RNA, 12 nt, Human
ccuggcccccag

SEQ ID NO: 3767836 - RNA, 13 nt, Human
ccuggcccccucc

SEQ ID NO: 3767837 - RNA, 16 nt, Human
ccuggccccucagggu

SEQ ID NO: 3767838 - RNA, 17 nt, Human
ccuggccccucgccugu

SEQ ID NO: 3767839 - RNA, 14 nt, Human
ccuggccccucucc

SEQ ID NO: 3767840 - RNA, 20 nt, Human
ccuggccccucucccuuggg

SEQ ID NO: 3767841 - RNA, 22 nt, Human
ccuggcccucaaggccucccac

SEQ ID NO: 3767842 - RNA, 16 nt, Human
ccuggcccugcccuga

SEQ ID NO: 3767843 - RNA, 17 nt, Human
ccuggcccugcccugag

SEQ ID NO: 3767844 - RNA, 13 nt, Human
ccuggcccugcuu

SEQ ID NO: 3767845 - RNA, 16 nt, Human
ccuggcccugcuuccu

SEQ ID NO: 3767846 - RNA, 21 nt, Human
ccuggcccugcuuccugcuug

SEQ ID NO: 3767847 - RNA, 23 nt, Human
ccuggcccugcuuccugcuugcc

SEQ ID NO: 3767848 - RNA, 17 nt, Human
ccuggcccuggggccug

SEQ ID NO: 3767849 - RNA, 12 nt, Human
ccuggccgcccc

SEQ ID NO: 3767850 - RNA, 14 nt, Human
ccuggccgcccccu

SEQ ID NO: 3767851 - RNA, 16 nt, Human
ccuggccgccuggguc

SEQ ID NO: 3767852 - RNA, 22 nt, Human
ccuggccggcaaccccaguucu

SEQ ID NO: 3767853 - RNA, 22 nt, Human
ccuggccggccagccagccacu

SEQ ID NO: 3767854 - RNA, 17 nt, Human
ccuggccuagaccagca

SEQ ID NO: 3767855 - RNA, 19 nt, Human
ccuguaaucccagcacacu

SEQ ID NO: 3767856 - RNA, 14 nt, Human
ccuguaauucagug

SEQ ID NO: 3767857 - RNA, 15 nt, Human
ccuguaauucagugu

SEQ ID NO: 3767858 - RNA, 23 nt, Human
ccuguaauuguuguuuguaugua

SEQ ID NO: 3767859 - RNA, 18 nt, Human
ccuguaauuuuuuucuua

SEQ ID NO: 3767860 - RNA, 15 nt, Human
ccuguacaauauuua

SEQ ID NO: 3767861 - RNA, 21 nt, Human
ccuguacaauauuuaaaauuu

SEQ ID NO: 3767862 - RNA, 12 nt, Human
ccuguacacuga

SEQ ID NO: 3767863 - RNA, 20 nt, Human
ccuguacagucugucuucug

SEQ ID NO: 3767864 - RNA, 14 nt, Human
ccuguacaguguua

SEQ ID NO: 3767865 - RNA, 21 nt, Human
ccuguacucaggaggcugagg

SEQ ID NO: 3767866 - RNA, 23 nt, Human
ccuguacucaggaggcugagggg

SEQ ID NO: 3767867 - RNA, 20 nt, Human
ccuguacucgcuugugcaga

SEQ ID NO: 3767868 - RNA, 16 nt, Human
ccuguacucuuccgaa

SEQ ID NO: 3767869 - RNA, 13 nt, Human
ccuguacuggaga

SEQ ID NO: 3767870 - RNA, 20 nt, Human
ccuguacuguucugugucuu

SEQ ID NO: 3767871 - RNA, 23 nt, Human
ccuguagaacucaaccucuacag

SEQ ID NO: 3767872 - RNA, 21 nt, Human
ccuguagaauagccuguggcc

SEQ ID NO: 3767873 - RNA, 13 nt, Human
ccuguagaccuag

SEQ ID NO: 3767874 - RNA, 18 nt, Human
ccuguagaccuagggagg

SEQ ID NO: 3767875 - RNA, 19 nt, Human
ccuguagagugggagcuga

SEQ ID NO: 3767876 - RNA, 21 nt, Human
ccuguagagugggagcugagu

SEQ ID NO: 3767877 - RNA, 13 nt, Human
ccuguagaguugc

SEQ ID NO: 3767878 - RNA, 14 nt, Human
ccuguagaguugcu

SEQ ID NO: 3767879 - RNA, 17 nt, Human
ccuguagaguugcugag

SEQ ID NO: 3767880 - RNA, 21 nt, Human
ccuguagcagugagaaaaagc

SEQ ID NO: 3767881 - RNA, 16 nt, Human
ccuguagcccacucug

SEQ ID NO: 3767882 - RNA, 19 nt, Human
ccuguagcccacucugcuc

SEQ ID NO: 3767883 - RNA, 22 nt, Human
ccuguagcccacucugcucgcc

SEQ ID NO: 3767884 - RNA, 13 nt, Human
ccuguagcccuaa

SEQ ID NO: 3767885 - RNA, 19 nt, Human
ccuguaggaagguacugua

SEQ ID NO: 3767886 - RNA, 18 nt, Human
ccuguaggauuuuuuucu

SEQ ID NO: 3767887 - RNA, 18 nt, Human
ccuguaguugcguggacu

SEQ ID NO: 3767888 - RNA, 19 nt, Human
ccuguaguuuuauuuuaug

SEQ ID NO: 3767889 - RNA, 17 nt, Human
ccuguauaagcacugaa

SEQ ID NO: 3767890 - RNA, 16 nt, Human
ccuguauaaguggagg

SEQ ID NO: 3767891 - RNA, 14 nt, Human
ccuguauaccuccu

SEQ ID NO: 3767892 - RNA, 12 nt, Human
ccuguauaguua

SEQ ID NO: 3767893 - RNA, 22 nt, Human
ccuguauaguuaggauagcauu

SEQ ID NO: 3767894 - RNA, 16 nt, Human
ccuguaugucuccagu

SEQ ID NO: 3767895 - RNA, 15 nt, Human
ccuguaugucuguca

SEQ ID NO: 3767896 - RNA, 13 nt, Human
ccuguauguuguc

SEQ ID NO: 3767897 - RNA, 14 nt, Human
ccuguauguugucc

SEQ ID NO: 3767898 - RNA, 13 nt, Human
ccugucaaacauu

SEQ ID NO: 3767899 - RNA, 22 nt, Human
ccugucaaacauuaguacuuua

SEQ ID NO: 3767900 - RNA, 20 nt, Human
ccugucaagcaaucaagaaa

SEQ ID NO: 3767901 - RNA, 15 nt, Human
ccugucacauugcau

SEQ ID NO: 3767902 - RNA, 20 nt, Human
ccugucacauugcauucuau

SEQ ID NO: 3767903 - RNA, 20 nt, Human
ccugucagauccaggagcuc

SEQ ID NO: 3767904 - RNA, 22 nt, Human
ccugucagauccaggagcucca

SEQ ID NO: 3767905 - RNA, 16 nt, Human
ccugucagcaugaauu

SEQ ID NO: 3767906 - RNA, 20 nt, Human
ccugucagcaugaauuugua

SEQ ID NO: 3767907 - RNA, 22 nt, Human
ccugucagcaugaauuuguaau

SEQ ID NO: 3767908 - RNA, 19 nt, Human
ccugucagugccgccgccu

SEQ ID NO: 3767909 - RNA, 19 nt, Human
ccugucaucaucauggcca

SEQ ID NO: 3767910 - RNA, 23 nt, Human
ccuguccaaacugccuaagcccu

SEQ ID NO: 3767911 - RNA, 23 nt, Human
ccuguccaaccuaaccccuuucc

SEQ ID NO: 3767912 - RNA, 12 nt, Human
ccugucccaccc

SEQ ID NO: 3767913 - RNA, 13 nt, Human
ccugucccacccc

SEQ ID NO: 3767914 - RNA, 18 nt, Human
ccugucccacccccaccc

SEQ ID NO: 3767915 - RNA, 13 nt, Human
ccugucccaccuc

SEQ ID NO: 3767916 - RNA, 14 nt, Human
ccugucccaccuca

SEQ ID NO: 3767917 - RNA, 14 nt, Human
ccugucccaccucu

SEQ ID NO: 3767918 - RNA, 13 nt, Human
ccuguccccaccc

SEQ ID NO: 3767919 - RNA, 15 nt, Human
ccuguccccaucugu

SEQ ID NO: 3767920 - RNA, 14 nt, Human
ccugucccccagcu

SEQ ID NO: 3767921 - RNA, 12 nt, Human
ccugucccccug

SEQ ID NO: 3767922 - RNA, 13 nt, Human
ccugucccccuga

SEQ ID NO: 3767923 - RNA, 17 nt, Human
ccugucccccugacaac

SEQ ID NO: 3767924 - RNA, 13 nt, Human
ccugucccuccca

SEQ ID NO: 3767925 - RNA, 14 nt, Human
ccugucccucccac

SEQ ID NO: 3767926 - RNA, 15 nt, Human
ccugucccucccacc

SEQ ID NO: 3767927 - RNA, 14 nt, Human
ccugucccuggcca

SEQ ID NO: 3767928 - RNA, 22 nt, Human
ccuguccgcccucuuccccucu

SEQ ID NO: 3767929 - RNA, 9 nt, Human
ccuguccuc

SEQ ID NO: 3767930 - RNA, 12 nt, Human
ccuguccucacu

SEQ ID NO: 3767931 - RNA, 16 nt, Human
ccuguccucacugcuc

SEQ ID NO: 3767932 - RNA, 21 nt, Human
ccuguccuccaacaccaagca

SEQ ID NO: 3767933 - RNA, 22 nt, Human
ccuguccuccaacaccaagcac

SEQ ID NO: 3767934 - RNA, 13 nt, Human
ccuguccucccag

SEQ ID NO: 3767935 - RNA, 22 nt, Human
ccuguccucccagcuccucacu

SEQ ID NO: 3767936 - RNA, 22 nt, Human
ccuguccucccauccccuggac

SEQ ID NO: 3767937 - RNA, 23 nt, Human
ccuguccucccauccccuggacu

SEQ ID NO: 3767938 - RNA, 13 nt, Human
ccuguccuccucg

SEQ ID NO: 3767939 - RNA, 19 nt, Human
ccuguccucuuucagcucc

SEQ ID NO: 3767940 - RNA, 22 nt, Human
ccuguccucuuucagcuccuga

SEQ ID NO: 3767941 - RNA, 12 nt, Human
ccuguccugccu

SEQ ID NO: 3767942 - RNA, 15 nt, Human
ccuguccugguggua

SEQ ID NO: 3767943 - RNA, 21 nt, Human
ccuguccuuuaccaaagauga

SEQ ID NO: 3767944 - RNA, 17 nt, Human
ccugucgagacacuugc

SEQ ID NO: 3767945 - RNA, 16 nt, Human
ccugucuaaaaauuca

SEQ ID NO: 3767946 - RNA, 22 nt, Human
ccugucuaaugaaaccuguguc

SEQ ID NO: 3767947 - RNA, 17 nt, Human
ccugucuagagagggag

SEQ ID NO: 3767948 - RNA, 21 nt, Human
ccugucuaggucaguacccac

SEQ ID NO: 3767949 - RNA, 22 nt, Human
ccugucuaggucaguacccacc

SEQ ID NO: 3767950 - RNA, 23 nt, Human
ccugucuaggucaguacccaccu

SEQ ID NO: 3767951 - RNA, 21 nt, Human
ccugucuagucucuccuguaa

SEQ ID NO: 3767952 - RNA, 23 nt, Human
ccugucuccacugugccuuugca

SEQ ID NO: 3767953 - RNA, 13 nt, Human
ccugucuccccuc

SEQ ID NO: 3767954 - RNA, 21 nt, Human
ccugucucccuccucugcccg

SEQ ID NO: 3767955 - RNA, 21 nt, Human
ccugucuccuuugcaggcuca

SEQ ID NO: 3767956 - RNA, 14 nt, Human
ccugucucuuccau

SEQ ID NO: 3767957 - RNA, 20 nt, Human
ccugucugaaggacacuucc

SEQ ID NO: 3767958 - RNA, 17 nt, Human
ccugucugacuacuuug

SEQ ID NO: 3767959 - RNA, 20 nt, Human
ccugucugagacucacagga

SEQ ID NO: 3767960 - RNA, 19 nt, Human
ccugucugccagccagcag

SEQ ID NO: 3767961 - RNA, 12 nt, Human
ccugucugcccc

SEQ ID NO: 3767962 - RNA, 17 nt, Human
ccugucugccccagccc

SEQ ID NO: 3767963 - RNA, 14 nt, Human
ccugucugcuccag

SEQ ID NO: 3767964 - RNA, 18 nt, Human
ccugucugcuccagcucu

SEQ ID NO: 3767965 - RNA, 22 nt, Human
ccugucuguagagggcccuggu

SEQ ID NO: 3767966 - RNA, 19 nt, Human
ccugucugucucuccaucu

SEQ ID NO: 3767967 - RNA, 13 nt, Human
ccugucugugacc

SEQ ID NO: 3767968 - RNA, 15 nt, Human
ccugucuucccaggg

SEQ ID NO: 3767969 - RNA, 18 nt, Human
ccugucuucccaggguag

SEQ ID NO: 3767970 - RNA, 19 nt, Human
ccugucuuccugcauucac

SEQ ID NO: 3767971 - RNA, 17 nt, Human
ccugucuugccuuuuuc

SEQ ID NO: 3767972 - RNA, 14 nt, Human
ccugucuuuaagga

SEQ ID NO: 3767973 - RNA, 19 nt, Human
ccugucuuuccuaagaccu

SEQ ID NO: 3767974 - RNA, 20 nt, Human
ccugucuuuccuaagaccug

SEQ ID NO: 3767975 - RNA, 21 nt, Human
ccugucuuuccuaagaccugg

SEQ ID NO: 3767976 - RNA, 22 nt, Human
ccugucuuugggagaaaacguc

SEQ ID NO: 3767977 - RNA, 18 nt, Human
ccugugaacccaggacaa

SEQ ID NO: 3767978 - RNA, 16 nt, Human
ccugugaacugaacuc

SEQ ID NO: 3767979 - RNA, 21 nt, Human
ccugugaagaaaggaccugca

SEQ ID NO: 3767980 - RNA, 19 nt, Human
ccugugaaugccacugccu

SEQ ID NO: 3767981 - RNA, 22 nt, Human
ccugugacauggugccugagag

SEQ ID NO: 3767982 - RNA, 23 nt, Human
ccugugacauggugccugagagg

SEQ ID NO: 3767983 - RNA, 16 nt, Human
ccugugaccagcacug

SEQ ID NO: 3767984 - RNA, 16 nt, Human
ccugugacugucucac

SEQ ID NO: 3767985 - RNA, 23 nt, Human
ccugugagauguguaucaguguu

SEQ ID NO: 3767986 - RNA, 14 nt, Human
ccugugagccaguc

SEQ ID NO: 3767987 - RNA, 15 nt, Human
ccugugagccagucu

SEQ ID NO: 3767988 - RNA, 16 nt, Human
ccugugagccagucua

SEQ ID NO: 3767989 - RNA, 23 nt, Human
ccugugagccagucuaguuccug

SEQ ID NO: 3767990 - RNA, 20 nt, Human
ccugugagcccagcuggguc

SEQ ID NO: 3767991 - RNA, 17 nt, Human
ccugugaggcaggggcg

SEQ ID NO: 3767992 - RNA, 20 nt, Human
ccugugaguacuacaguccu

SEQ ID NO: 3767993 - RNA, 22 nt, Human
ccugugaucuuauuuuucuaaa

SEQ ID NO: 3767994 - RNA, 22 nt, Human
ccugugauggggcccugccucc

SEQ ID NO: 3767995 - RNA, 22 nt, Human
ccugugcacaccccacucccac

SEQ ID NO: 3767996 - RNA, 13 nt, Human
ccugugcacagcc

SEQ ID NO: 3767997 - RNA, 23 nt, Human
ccugugcccacaucccaggcuuc

SEQ ID NO: 3767998 - RNA, 17 nt, Human
ccugugccucugggacu

SEQ ID NO: 3767999 - RNA, 16 nt, Human
ccuuccaggaccccug

SEQ ID NO: 3768000 - RNA, 18 nt, Human
ccuuccaggggugggaca

SEQ ID NO: 3768001 - RNA, 22 nt, Human
ccuuccaguguccuuagaacau

SEQ ID NO: 3768002 - RNA, 11 nt, Human
ccuuccauaau

SEQ ID NO: 3768003 - RNA, 16 nt, Human
ccuuccaucugauucc

SEQ ID NO: 3768004 - RNA, 17 nt, Human
ccuuccauggacuuugu

SEQ ID NO: 3768005 - RNA, 19 nt, Human
ccuuccaugucgccucugc

SEQ ID NO: 3768006 - RNA, 21 nt, Human
ccuuccaugucgccucugcau

SEQ ID NO: 3768007 - RNA, 12 nt, Human
ccuuccauucca

SEQ ID NO: 3768008 - RNA, 17 nt, Human
ccuuccauuuuccccca

SEQ ID NO: 3768009 - RNA, 19 nt, Human
ccuuccauuuucccccacu

SEQ ID NO: 3768010 - RNA, 20 nt, Human
ccuuccauuuucccccacua

SEQ ID NO: 3768011 - RNA, 22 nt, Human
ccuucccaaguaagaggcugga

SEQ ID NO: 3768012 - RNA, 19 nt, Human
ccuucccaaucagcacuga

SEQ ID NO: 3768013 - RNA, 20 nt, Human
ccuucccaaucagcacugaa

SEQ ID NO: 3768014 - RNA, 15 nt, Human
ccuucccacucaccc

SEQ ID NO: 3768015 - RNA, 17 nt, Human
ccuucccacucaccccg

SEQ ID NO: 3768016 - RNA, 22 nt, Human
ccuucccacucugucgagccug

SEQ ID NO: 3768017 - RNA, 17 nt, Human
ccuucccagaggggccu

SEQ ID NO: 3768018 - RNA, 22 nt, Human
ccuucccagaggggccugccac

SEQ ID NO: 3768019 - RNA, 13 nt, Human
ccuucccagcucu

SEQ ID NO: 3768020 - RNA, 16 nt, Human
ccuucccagcugcccc

SEQ ID NO: 3768021 - RNA, 23 nt, Human
ccuucccaugacccaggcugggc

SEQ ID NO: 3768022 - RNA, 15 nt, Human
ccuucccaugcccug

SEQ ID NO: 3768023 - RNA, 19 nt, Human
ccuuccccacugcacacac

SEQ ID NO: 3768024 - RNA, 22 nt, Human
ccuuccccacugccugcccacc

SEQ ID NO: 3768025 - RNA, 22 nt, Human
ccuuccccagcuuugcugccug

SEQ ID NO: 3768026 - RNA, 14 nt, Human
ccuuccccaugcuu

SEQ ID NO: 3768027 - RNA, 23 nt, Human
ccuuccccaugcuuccuugccug

SEQ ID NO: 3768028 - RNA, 21 nt, Human
ccuucccccaccgguccagcu

SEQ ID NO: 3768029 - RNA, 22 nt, Human
ccuucccccaccgguccagcug

SEQ ID NO: 3768030 - RNA, 17 nt, Human
ccuucccccagcccauc

SEQ ID NO: 3768031 - RNA, 19 nt, Human
ccuucccccuccaauccca

SEQ ID NO: 3768032 - RNA, 20 nt, Human
ccuucccccucccagggcca

SEQ ID NO: 3768033 - RNA, 23 nt, Human
ccuucccccuuuuuuguccccca

SEQ ID NO: 3768034 - RNA, 23 nt, Human
ccuuccccgagggaugaugccac

SEQ ID NO: 3768035 - RNA, 17 nt, Human
ccuuccccucccuggcu

SEQ ID NO: 3768036 - RNA, 21 nt, Human
ccuuccccuuauccucccugu

SEQ ID NO: 3768037 - RNA, 13 nt, Human
ccuuccccuuccu

SEQ ID NO: 3768038 - RNA, 13 nt, Human
ccuucccuccaag

SEQ ID NO: 3768039 - RNA, 14 nt, Human
ccuucccuccugcu

SEQ ID NO: 3768040 - RNA, 18 nt, Human
ccuucccucucuggagaa

SEQ ID NO: 3768041 - RNA, 18 nt, Human
ccuucccugggcugugcu

SEQ ID NO: 3768042 - RNA, 19 nt, Human
ccuucccugggcugugcua

SEQ ID NO: 3768043 - RNA, 14 nt, Human
ccuucccugucccu

SEQ ID NO: 3768044 - RNA, 16 nt, Human
ccuucccugucccucu

SEQ ID NO: 3768045 - RNA, 23 nt, Human
ccuucccuuccacugccucugcc

SEQ ID NO: 3768046 - RNA, 13 nt, Human
ccuucccuugcca

SEQ ID NO: 3768047 - RNA, 12 nt, Human
ccuucccuugcu

SEQ ID NO: 3768048 - RNA, 14 nt, Human
ccuuccgacccucu

SEQ ID NO: 3768049 - RNA, 17 nt, Human
ccuuccgacccucuggg

SEQ ID NO: 3768050 - RNA, 18 nt, Human
ccuuccgacccucuggga

SEQ ID NO: 3768051 - RNA, 19 nt, Human
ccuuccgacccucugggaa

SEQ ID NO: 3768052 - RNA, 22 nt, Human
ccuuccgccacuggggcucaga

SEQ ID NO: 3768053 - RNA, 9 nt, Human
ccuuccuaa

SEQ ID NO: 3768054 - RNA, 17 nt, Human
ccuuccuaagccugugg

SEQ ID NO: 3768055 - RNA, 20 nt, Human
ccuuccuaauuccacagcug

SEQ ID NO: 3768056 - RNA, 21 nt, Human
ccuuccuaauuccacagcugc

SEQ ID NO: 3768057 - RNA, 21 nt, Human
ccuuccuaguucaucccuucu

SEQ ID NO: 3768058 - RNA, 23 nt, Human
ccuuccuauaacuugaugcaugu

SEQ ID NO: 3768059 - RNA, 14 nt, Human
ccuuccucacugcc

SEQ ID NO: 3768060 - RNA, 15 nt, Human
ccuuccucacuucca

SEQ ID NO: 3768061 - RNA, 21 nt, Human
ccuuccucauccaccccaucc

SEQ ID NO: 3768062 - RNA, 21 nt, Human
ccuuccuccauccuccuccuu

SEQ ID NO: 3768063 - RNA, 16 nt, Human
ccuuccuccuccacca

SEQ ID NO: 3768064 - RNA, 21 nt, Human
ccuuccuccuccaccaccgcc

SEQ ID NO: 3768065 - RNA, 12 nt, Human
ccuuccuccugg

SEQ ID NO: 3768066 - RNA, 13 nt, Human
ccuuccuccuggg

SEQ ID NO: 3768067 - RNA, 21 nt, Human
ccuuccucuccacccucccag

SEQ ID NO: 3768068 - RNA, 14 nt, Human
ccuuccucuccacu

SEQ ID NO: 3768069 - RNA, 20 nt, Human
ccuuccucuccacugccuuc

SEQ ID NO: 3768070 - RNA, 15 nt, Human
ccuuccucugagccu

SEQ ID NO: 3768071 - RNA, 16 nt, Human
ccuuccucugagccuu

SEQ ID NO: 3768072 - RNA, 16 nt, Human
ccuuccucugcagcug

SEQ ID NO: 3768073 - RNA, 20 nt, Human
ccuuccucuucggcccucag

SEQ ID NO: 3768074 - RNA, 21 nt, Human
ccuuccucuugucugauuucu

SEQ ID NO: 3768075 - RNA, 14 nt, Human
ccuuccugccacca

SEQ ID NO: 3768076 - RNA, 16 nt, Human
ccuuccugccagcccc

SEQ ID NO: 3768077 - RNA, 17 nt, Human
ccuuccugccagccccu

SEQ ID NO: 3768078 - RNA, 13 nt, Human
ccuuccugcuuga

SEQ ID NO: 3768079 - RNA, 18 nt, Human
ccuuccuggacagcugug

SEQ ID NO: 3768080 - RNA, 13 nt, Human
ccuuccugggcac

SEQ ID NO: 3768081 - RNA, 19 nt, Human
ccuuccugucccaccucuu

SEQ ID NO: 3768082 - RNA, 12 nt, Human
ccuuccugucuu

SEQ ID NO: 3768083 - RNA, 17 nt, Human
ccuuccugucuuccugc

SEQ ID NO: 3768084 - RNA, 16 nt, Human
ccuuccuucccgccag

SEQ ID NO: 3768085 - RNA, 16 nt, Human
ccuuccuucccuggcu

SEQ ID NO: 3768086 - RNA, 15 nt, Human
ccuuccuucccuggg

SEQ ID NO: 3768087 - RNA, 14 nt, Human
ccuuccuucuugcu

SEQ ID NO: 3768088 - RNA, 22 nt, Human
ccuuccuuguuacccaugaaaa

SEQ ID NO: 3768089 - RNA, 19 nt, Human
ccuuccuuucuccaggacc

SEQ ID NO: 3768090 - RNA, 18 nt, Human
ccuuccuuuucccugcuu

SEQ ID NO: 3768091 - RNA, 20 nt, Human
ccuuccuuuucccugcuucc

SEQ ID NO: 3768092 - RNA, 21 nt, Human
ccuuccuuuucccugcuucca

SEQ ID NO: 3768093 - RNA, 22 nt, Human
ccuucgcguauuucaggauucu

SEQ ID NO: 3768094 - RNA, 15 nt, Human
ccuucgcuccugugu

SEQ ID NO: 3768095 - RNA, 18 nt, Human
ccuucgcuccugugucuu

SEQ ID NO: 3768096 - RNA, 18 nt, Human
ccuucgcuucuugccucu

SEQ ID NO: 3768097 - RNA, 19 nt, Human
ccuucgcuucuugccucug

SEQ ID NO: 3768098 - RNA, 21 nt, Human
ccuucgcuucuugccucugug

SEQ ID NO: 3768099 - RNA, 20 nt, Human
ccuucggacaacucaguccc

SEQ ID NO: 3768100 - RNA, 14 nt, Human
ccuucggccuccau

SEQ ID NO: 3768101 - RNA, 18 nt, Human
ccuucggccuccauccug

SEQ ID NO: 3768102 - RNA, 15 nt, Human
ccuucgggcugugcc

SEQ ID NO: 3768103 - RNA, 14 nt, Human
ccuucguaucccga

SEQ ID NO: 3768104 - RNA, 13 nt, Human
ccuucgugccccc

SEQ ID NO: 3768105 - RNA, 17 nt, Human
ccuucguuuacuaugcc

SEQ ID NO: 3768106 - RNA, 19 nt, Human
ccuucguuuacuaugccug

SEQ ID NO: 3768107 - RNA, 22 nt, Human
ccuucguuuacuaugccugugu

SEQ ID NO: 3768108 - RNA, 16 nt, Human
ccuucuacacucuccu

SEQ ID NO: 3768109 - RNA, 18 nt, Human
ccuucuacacucuccugg

SEQ ID NO: 3768110 - RNA, 20 nt, Human
ccuucuacacucuccugggc

SEQ ID NO: 3768111 - RNA, 13 nt, Human
ccuucuaccugcc

SEQ ID NO: 3768112 - RNA, 14 nt, Human
ccuucuaccugcca

SEQ ID NO: 3768113 - RNA, 17 nt, Human
ccuucuaccugccacuc

SEQ ID NO: 3768114 - RNA, 15 nt, Human
ccuucuacugagccu

SEQ ID NO: 3768115 - RNA, 17 nt, Human
ccuucuaguuucccaca

SEQ ID NO: 3768116 - RNA, 18 nt, Human
ccuucuaguuucccacaa

SEQ ID NO: 3768117 - RNA, 18 nt, Human
ccuucuauacccacccag

SEQ ID NO: 3768118 - RNA, 20 nt, Human
ccuucuauacccacccagaa

SEQ ID NO: 3768119 - RNA, 14 nt, Human
ccuucucacagcac

SEQ ID NO: 3768120 - RNA, 14 nt, Human
ccuucucaccagcu

SEQ ID NO: 3768121 - RNA, 17 nt, Human
ccuucucaccagcugca

SEQ ID NO: 3768122 - RNA, 18 nt, Human
ccuucucagaagcacaga

SEQ ID NO: 3768123 - RNA, 13 nt, Human
ccuucucaucacu

SEQ ID NO: 3768124 - RNA, 17 nt, Human
ccuucuccaucucucug

SEQ ID NO: 3768125 - RNA, 21 nt, Human
ccuucuccaucucucuggccc

SEQ ID NO: 3768126 - RNA, 22 nt, Human
ccuucuccauggcccugccaug

SEQ ID NO: 3768127 - RNA, 14 nt, Human
ccuucucccacacu

SEQ ID NO: 3768128 - RNA, 16 nt, Human
ccuucucccacacugc

SEQ ID NO: 3768129 - RNA, 15 nt, Human
ccuucucccacucuc

SEQ ID NO: 3768130 - RNA, 12 nt, Human
ccuucuccccag

SEQ ID NO: 3768131 - RNA, 14 nt, Human
ccuucucccccccg

SEQ ID NO: 3768132 - RNA, 22 nt, Human
ccuucucccccccggggcuggg

SEQ ID NO: 3768133 - RNA, 16 nt, Human
ccuucuccccugcacu

SEQ ID NO: 3768134 - RNA, 23 nt, Human
ccuucuccccugcacuguaaaau

SEQ ID NO: 3768135 - RNA, 17 nt, Human
ccuucucccuagcuccu

SEQ ID NO: 3768136 - RNA, 16 nt, Human
ccuucucccucauuuc

SEQ ID NO: 3768137 - RNA, 12 nt, Human
ccuucucccugg

SEQ ID NO: 3768138 - RNA, 17 nt, Human
ccuucuccucuuguaaa

SEQ ID NO: 3768139 - RNA, 18 nt, Human
ccuucuccuuccaacugc

SEQ ID NO: 3768140 - RNA, 17 nt, Human
ccuucucucaccuccua

SEQ ID NO: 3768141 - RNA, 12 nt, Human
ccuucucuccag

SEQ ID NO: 3768142 - RNA, 23 nt, Human
ccuucucuccagccccuggaugc

SEQ ID NO: 3768143 - RNA, 23 nt, Human
ucacuugaacccgggaggcagag

SEQ ID NO: 3768144 - RNA, 20 nt, Human
ucacuugaugauacaaugaa

SEQ ID NO: 3768145 - RNA, 19 nt, Human
ucacuugaugugccauuuu

SEQ ID NO: 3768146 - RNA, 15 nt, Human
ucacuugcauguccc

SEQ ID NO: 3768147 - RNA, 21 nt, Human
ucacuuggucugccaggcccc

SEQ ID NO: 3768148 - RNA, 15 nt, Human
ucacuuguacaaaau

SEQ ID NO: 3768149 - RNA, 16 nt, Human
ucacuuguacaaaaua

SEQ ID NO: 3768150 - RNA, 19 nt, Human
ucacuugucaggagugugu

SEQ ID NO: 3768151 - RNA, 21 nt, Human
ucacuugucaggagugugugu

SEQ ID NO: 3768152 - RNA, 13 nt, Human
ucacuugugcuuu

SEQ ID NO: 3768153 - RNA, 15 nt, Human
ucacuugugcuuugc

SEQ ID NO: 3768154 - RNA, 19 nt, Human
ucacuugugcuuugcucuu

SEQ ID NO: 3768155 - RNA, 15 nt, Human
ucacuuguuguuuua

SEQ ID NO: 3768156 - RNA, 17 nt, Human
ucacuuuagaugcugau

SEQ ID NO: 3768157 - RNA, 18 nt, Human
ucacuuucacauagaugu

SEQ ID NO: 3768158 - RNA, 14 nt, Human
ucacuuucuagauu

SEQ ID NO: 3768159 - RNA, 14 nt, Human
ucacuuucucaguu

SEQ ID NO: 3768160 - RNA, 14 nt, Human
ucacuuugcucugg

SEQ ID NO: 3768161 - RNA, 19 nt, Human
ucacuuuuaaugaacaaau

SEQ ID NO: 3768162 - RNA, 14 nt, Human
ucacuuuucaguga

SEQ ID NO: 3768163 - RNA, 13 nt, Human
ucacuuuucccac

SEQ ID NO: 3768164 - RNA, 21 nt, Human
ucacuuuucuguaacgccugc

SEQ ID NO: 3768165 - RNA, 18 nt, Human
ucacuuuugacaaaggca

SEQ ID NO: 3768166 - RNA, 21 nt, Human
ucacuuuugcaagguuccaca

SEQ ID NO: 3768167 - RNA, 13 nt, Human
ucacuuuuucuga

SEQ ID NO: 3768168 - RNA, 17 nt, Human
ucacuuuuucugauaaa

SEQ ID NO: 3768169 - RNA, 18 nt, Human
ucacuuuuugaacuaaga

SEQ ID NO: 3768170 - RNA, 19 nt, Human
ucacuuuuugaacuaagaa

SEQ ID NO: 3768171 - RNA, 20 nt, Human
ucacuuuuugaacuaagaaa

SEQ ID NO: 3768172 - RNA, 20 nt, Human
ucagaaaacagaaaaaaaac

SEQ ID NO: 3768173 - RNA, 14 nt, Human
ucagaaaagggaag

SEQ ID NO: 3768174 - RNA, 20 nt, Human
ucagaaaauaucccuccugu

SEQ ID NO: 3768175 - RNA, 20 nt, Human
ucagaaaauauuauguguuu

SEQ ID NO: 3768176 - RNA, 18 nt, Human
ucagaaaauguucuguuu

SEQ ID NO: 3768177 - RNA, 22 nt, Human
ucagaaacaaagcauuugacuu

SEQ ID NO: 3768178 - RNA, 24 nt, Human
ucagaaacaaagcauuugacuuuc

SEQ ID NO: 3768179 - RNA, 19 nt, Human
ucagaaacacccucacacu

SEQ ID NO: 3768180 - RNA, 21 nt, Human
ucagaaacacccucacacugg

SEQ ID NO: 3768181 - RNA, 18 nt, Human
ucagaaacacuggggcug

SEQ ID NO: 3768182 - RNA, 21 nt, Human
ucagaaacacuggggcuggca

SEQ ID NO: 3768183 - RNA, 14 nt, Human
ucagaaacaggacc

SEQ ID NO: 3768184 - RNA, 18 nt, Human
ucagaaaccaaacaguuu

SEQ ID NO: 3768185 - RNA, 15 nt, Human
ucagaaaccagacuc

SEQ ID NO: 3768186 - RNA, 13 nt, Human
ucagaaaccaguu

SEQ ID NO: 3768187 - RNA, 22 nt, Human
ucagaaaccaguuaugugaaug

SEQ ID NO: 3768188 - RNA, 16 nt, Human
ucagaaacuagaaaug

SEQ ID NO: 3768189 - RNA, 17 nt, Human
ucagaaacuugugaagu

SEQ ID NO: 3768190 - RNA, 23 nt, Human
ucagaaagccuuucauuuugcuu

SEQ ID NO: 3768191 - RNA, 19 nt, Human
ucagaaagggagggcucug

SEQ ID NO: 3768192 - RNA, 12 nt, Human
ucagaaagugua

SEQ ID NO: 3768193 - RNA, 15 nt, Human
ucagaaaguguaaau

SEQ ID NO: 3768194 - RNA, 18 nt, Human
ucagaaaguguaaauguu

SEQ ID NO: 3768195 - RNA, 14 nt, Human
ucagaaaugcugcc

SEQ ID NO: 3768196 - RNA, 18 nt, Human
ucagaaauguacaacuuu

SEQ ID NO: 3768197 - RNA, 15 nt, Human
ucagaaaugucugga

SEQ ID NO: 3768198 - RNA, 18 nt, Human
ucagaaauuggaacagaa

SEQ ID NO: 3768199 - RNA, 14 nt, Human
ucagaaauuuaauu

SEQ ID NO: 3768200 - RNA, 21 nt, Human
ucagaaauuuaauucauguuu

SEQ ID NO: 3768201 - RNA, 22 nt, Human
ucagaaauuuuuaucaguuucc

SEQ ID NO: 3768202 - RNA, 15 nt, Human
ucagaacacauucuu

SEQ ID NO: 3768203 - RNA, 23 nt, Human
ucagaacagcagacucagcucug

SEQ ID NO: 3768204 - RNA, 12 nt, Human
ucagaacccagg

SEQ ID NO: 3768205 - RNA, 14 nt, Human
ucagaacccagggc

SEQ ID NO: 3768206 - RNA, 22 nt, Human
ucagaacccagggcucugcccc

SEQ ID NO: 3768207 - RNA, 17 nt, Human
ucagaacccugccaugg

SEQ ID NO: 3768208 - RNA, 16 nt, Human
ucagaaccucuucccc

SEQ ID NO: 3768209 - RNA, 15 nt, Human
ucagaacuagaauuu

SEQ ID NO: 3768210 - RNA, 19 nt, Human
ucagaacuauguuuuuguu

SEQ ID NO: 3768211 - RNA, 14 nt, Human
ucagaacugugcca

SEQ ID NO: 3768212 - RNA, 16 nt, Human
ucagaacuugcugcug

SEQ ID NO: 3768213 - RNA, 18 nt, Human
ucagaacuugcugcuguc

SEQ ID NO: 3768214 - RNA, 14 nt, Human
ucagaagaaaauua

SEQ ID NO: 3768215 - RNA, 12 nt, Human
ucagaagaaauu

SEQ ID NO: 3768216 - RNA, 13 nt, Human
ucagaagacacug

SEQ ID NO: 3768217 - RNA, 14 nt, Human
ucagaagacacuga

SEQ ID NO: 3768218 - RNA, 17 nt, Human
ucagaagaguugugcac

SEQ ID NO: 3768219 - RNA, 13 nt, Human
ucagaagauaguc

SEQ ID NO: 3768220 - RNA, 16 nt, Human
ucagaagccuauugua

SEQ ID NO: 3768221 - RNA, 20 nt, Human
ucagaagccuauuguaaaua

SEQ ID NO: 3768222 - RNA, 12 nt, Human
ucagaagccugg

SEQ ID NO: 3768223 - RNA, 14 nt, Human
ucagaagccugggg

SEQ ID NO: 3768224 - RNA, 19 nt, Human
ucagaagccugggggccug

SEQ ID NO: 3768225 - RNA, 23 nt, Human
ucagaagggagcuagccagagga

SEQ ID NO: 3768226 - RNA, 13 nt, Human
ucagaagggaggc

SEQ ID NO: 3768227 - RNA, 19 nt, Human
ucagaaggucuguuuugag

SEQ ID NO: 3768228 - RNA, 17 nt, Human
ucagaagguuguuuuau

SEQ ID NO: 3768229 - RNA, 18 nt, Human
ucagaagucaucuugcua

SEQ ID NO: 3768230 - RNA, 22 nt, Human
ucagaagucaucuugcuaccag

SEQ ID NO: 3768231 - RNA, 21 nt, Human
ucagaagugagcuuugcugcu

SEQ ID NO: 3768232 - RNA, 17 nt, Human
ucagaaguuuggcaaua

SEQ ID NO: 3768233 - RNA, 15 nt, Human
ucagaauaaggcagg

SEQ ID NO: 3768234 - RNA, 22 nt, Human
ucagaauagccacauuuggaau

SEQ ID NO: 3768235 - RNA, 15 nt, Human
ucagaauaugucagu

SEQ ID NO: 3768236 - RNA, 17 nt, Human
ucagaaucacuucugag

SEQ ID NO: 3768237 - RNA, 15 nt, Human
ucagaaucagaagau

SEQ ID NO: 3768238 - RNA, 19 nt, Human
ucagaaucuacccaaagga

SEQ ID NO: 3768239 - RNA, 20 nt, Human
ucagaaucuacccaaaggau

SEQ ID NO: 3768240 - RNA, 17 nt, Human
ucagaaucucucuucuu

SEQ ID NO: 3768241 - RNA, 22 nt, Human
ucagaauuagagcaugggaggu

SEQ ID NO: 3768242 - RNA, 20 nt, Human
ucagaauucucagaaucuca

SEQ ID NO: 3768243 - RNA, 16 nt, Human
ucagaauucucuaguu

SEQ ID NO: 3768244 - RNA, 20 nt, Human
ucagaauuuuauacuuuccc

SEQ ID NO: 3768245 - RNA, 21 nt, Human
ucagaauuuuauacuuucccu

SEQ ID NO: 3768246 - RNA, 22 nt, Human
ucagaauuuuauacuuucccua

SEQ ID NO: 3768247 - RNA, 14 nt, Human
ucagacaaaaugga

SEQ ID NO: 3768248 - RNA, 22 nt, Human
ucagacacccucaaccucuucu

SEQ ID NO: 3768249 - RNA, 14 nt, Human
ucagacacuuugga

SEQ ID NO: 3768250 - RNA, 18 nt, Human
ucagacagaaccccuaca

SEQ ID NO: 3768251 - RNA, 17 nt, Human
ucagacagagaggacug

SEQ ID NO: 3768252 - RNA, 13 nt, Human
ucagacagcugcc

SEQ ID NO: 3768253 - RNA, 15 nt, Human
ucagacagcugccug

SEQ ID NO: 3768254 - RNA, 17 nt, Human
ucagacagcugccuggg

SEQ ID NO: 3768255 - RNA, 20 nt, Human
ucagacagcugccugggauc

SEQ ID NO: 3768256 - RNA, 14 nt, Human
ucagacauaaagcc

SEQ ID NO: 3768257 - RNA, 22 nt, Human
ucagacauagaauuaacacaug

SEQ ID NO: 3768258 - RNA, 18 nt, Human
ucagacccccacucucau

SEQ ID NO: 3768259 - RNA, 14 nt, Human
ucagacccuacccc

SEQ ID NO: 3768260 - RNA, 12 nt, Human
ucagacccugga

SEQ ID NO: 3768261 - RNA, 17 nt, Human
ucagacgacagccccug

SEQ ID NO: 3768262 - RNA, 16 nt, Human
ucagacgccugaggaa

SEQ ID NO: 3768263 - RNA, 17 nt, Human
ucagacuaagccagcac

SEQ ID NO: 3768264 - RNA, 19 nt, Human
ucagacucccauuccugaa

SEQ ID NO: 3768265 - RNA, 15 nt, Human
ucagacugcacccag

SEQ ID NO: 3768266 - RNA, 20 nt, Human
ucagacugcacccaggaggg

SEQ ID NO: 3768267 - RNA, 14 nt, Human
ucagacugcuggga

SEQ ID NO: 3768268 - RNA, 15 nt, Human
ucagacugcuuuaaa

SEQ ID NO: 3768269 - RNA, 21 nt, Human
ucagacuggcuggcugcagug

SEQ ID NO: 3768270 - RNA, 23 nt, Human
ucagacuugccaugugacucugg

SEQ ID NO: 3768271 - RNA, 14 nt, Human
ucagacuugucaag

SEQ ID NO: 3768272 - RNA, 17 nt, Human
ucagacuuuaaagaaua

SEQ ID NO: 3768273 - RNA, 20 nt, Human
ucagacuuuggaaaaugcau

SEQ ID NO: 3768274 - RNA, 17 nt, Human
ucagagaaaugucuguc

SEQ ID NO: 3768275 - RNA, 21 nt, Human
ucagagacaaaauauuuccca

SEQ ID NO: 3768276 - RNA, 12 nt, Human
ucagagacagau

SEQ ID NO: 3768277 - RNA, 23 nt, Human
ucagagacaggaagucuucaggg

SEQ ID NO: 3768278 - RNA, 16 nt, Human
ucagagaccaggcccu

SEQ ID NO: 3768279 - RNA, 20 nt, Human
ucagagaccagggcuccagc

SEQ ID NO: 3768280 - RNA, 14 nt, Human
ucagagacucaggg

SEQ ID NO: 3768281 - RNA, 22 nt, Human
ucagagacuccugcaggcagcc

SEQ ID NO: 3768282 - RNA, 15 nt, Human
ucagagacugcugug

SEQ ID NO: 3768283 - RNA, 19 nt, Human
ucagagagaauggcuuugg

SEQ ID NO: 3768284 - RNA, 12 nt, Human
ucagagagcagc

SEQ ID NO: 3768285 - RNA, 18 nt, Human
ucagagagcagugcuuuu

SEQ ID NO: 3768286 - RNA, 21 nt, Human
ucagagaggccuuuuggaaug

SEQ ID NO: 3768287 - RNA, 16 nt, Human
ucagagauaggccugu

SEQ ID NO: 3768288 - RNA, 18 nt, Human
ucaggggcuguuugagga

SEQ ID NO: 3768289 - RNA, 15 nt, Human
ucaggguaggcugga

SEQ ID NO: 3768290 - RNA, 19 nt, Human
ucagggucccugguggcag

SEQ ID NO: 3768291 - RNA, 16 nt, Human
ucagggucucugcugc

SEQ ID NO: 3768292 - RNA, 15 nt, Human
ucaggguucuccucu

SEQ ID NO: 3768293 - RNA, 18 nt, Human
ucaggguuggccccugcc

SEQ ID NO: 3768294 - RNA, 23 nt, Human
ucaggguuggccccugcccggcu

SEQ ID NO: 3768295 - RNA, 18 nt, Human
ucaggguuggugugcuga

SEQ ID NO: 3768296 - RNA, 13 nt, Human
ucagguaacaggc

SEQ ID NO: 3768297 - RNA, 16 nt, Human
ucagguaacaggcaga

SEQ ID NO: 3768298 - RNA, 16 nt, Human
ucagguaauacaaacu

SEQ ID NO: 3768299 - RNA, 20 nt, Human
ucagguaaucgaccugccuc

SEQ ID NO: 3768300 - RNA, 18 nt, Human
ucagguacagagaaggaa

SEQ ID NO: 3768301 - RNA, 21 nt, Human
ucagguagaggugcaugccua

SEQ ID NO: 3768302 - RNA, 21 nt, Human
ucagguauguugccuuuaugg

SEQ ID NO: 3768303 - RNA, 15 nt, Human
ucaggucagggugag

SEQ ID NO: 3768304 - RNA, 18 nt, Human
ucaggucagggugaggau

SEQ ID NO: 3768305 - RNA, 18 nt, Human
ucaggugaaaauguucau

SEQ ID NO: 3768306 - RNA, 23 nt, Human
ucaggugauccacccaccucagc

SEQ ID NO: 3768307 - RNA, 14 nt, Human
ucaggugcagagga

SEQ ID NO: 3768308 - RNA, 16 nt, Human
ucaggugcagaggaag

SEQ ID NO: 3768309 - RNA, 14 nt, Human
ucaggugcugccau

SEQ ID NO: 3768310 - RNA, 19 nt, Human
ucagguggggcagcuugag

SEQ ID NO: 3768311 - RNA, 21 nt, Human
ucagguggggucacucuggca

SEQ ID NO: 3768312 - RNA, 22 nt, Human
ucagguguuuuuuaugaagugc

SEQ ID NO: 3768313 - RNA, 23 nt, Human
ucagguuaucgaaauaacaaugu

SEQ ID NO: 3768314 - RNA, 22 nt, Human
ucagguugcugguugcugugug

SEQ ID NO: 3768315 - RNA, 17 nt, Human
ucagguuugccugaggg

SEQ ID NO: 3768316 - RNA, 13 nt, Human
ucagguuuuguaa

SEQ ID NO: 3768317 - RNA, 22 nt, Human
ucagguuuuuccuuuuuuugua

SEQ ID NO: 3768318 - RNA, 20 nt, Human
ucaguaaaauuauacugugu

SEQ ID NO: 3768319 - RNA, 23 nt, Human
ucaguaaaauuauacugugugug

SEQ ID NO: 3768320 - RNA, 21 nt, Human
ucaguaaacgggaacaugccc

SEQ ID NO: 3768321 - RNA, 22 nt, Human
ucaguaaacgggaacaugcccc

SEQ ID NO: 3768322 - RNA, 17 nt, Human
ucaguaaauaacuggaa

SEQ ID NO: 3768323 - RNA, 21 nt, Human
ucaguaacccccuuaaauuua

SEQ ID NO: 3768324 - RNA, 12 nt, Human
ucaguaagaggu

SEQ ID NO: 3768325 - RNA, 23 nt, Human
ucaguaaguuaucuuugaauaug

SEQ ID NO: 3768326 - RNA, 12 nt, Human
ucaguaauaaaa

SEQ ID NO: 3768327 - RNA, 13 nt, Human
ucaguaauaaaac

SEQ ID NO: 3768328 - RNA, 15 nt, Human
ucaguaauaaaacau

SEQ ID NO: 3768329 - RNA, 13 nt, Human
ucaguaauguuau

SEQ ID NO: 3768330 - RNA, 19 nt, Human
ucaguaauuuagaaaucau

SEQ ID NO: 3768331 - RNA, 20 nt, Human
ucaguaauuuagaaaucauu

SEQ ID NO: 3768332 - RNA, 15 nt, Human
ucaguaauuugagga

SEQ ID NO: 3768333 - RNA, 17 nt, Human
ucaguaauuugaggaca

SEQ ID NO: 3768334 - RNA, 18 nt, Human
ucaguacccaccugagcu

SEQ ID NO: 3768335 - RNA, 15 nt, Human
ucaguaccuggagga

SEQ ID NO: 3768336 - RNA, 18 nt, Human
ucaguaccuggaggagga

SEQ ID NO: 3768337 - RNA, 20 nt, Human
ucaguacuugugaaacacag

SEQ ID NO: 3768338 - RNA, 23 nt, Human
ucaguacuuuuuuaaauauuuuc

SEQ ID NO: 3768339 - RNA, 18 nt, Human
ucaguaggcuaaugucaa

SEQ ID NO: 3768340 - RNA, 15 nt, Human
ucaguagucccugca

SEQ ID NO: 3768341 - RNA, 19 nt, Human
ucaguaguuuaaaaguucu

SEQ ID NO: 3768342 - RNA, 15 nt, Human
ucaguaguuugcauu

SEQ ID NO: 3768343 - RNA, 16 nt, Human
ucaguauaauucugua

SEQ ID NO: 3768344 - RNA, 16 nt, Human
ucaguauaauuuuuua

SEQ ID NO: 3768345 - RNA, 13 nt, Human
ucaguauccaggc

SEQ ID NO: 3768346 - RNA, 17 nt, Human
ucaguauccaggcuuug

SEQ ID NO: 3768347 - RNA, 17 nt, Human
ucaguauccaugcucuu

SEQ ID NO: 3768348 - RNA, 17 nt, Human
ucaguaugaauuauuca

SEQ ID NO: 3768349 - RNA, 15 nt, Human
ucaguauguauucuu

SEQ ID NO: 3768350 - RNA, 12 nt, Human
ucaguaugugga

SEQ ID NO: 3768351 - RNA, 14 nt, Human
ucaguauguggaag

SEQ ID NO: 3768352 - RNA, 20 nt, Human
ucaguauguugucaaagaga

SEQ ID NO: 3768353 - RNA, 19 nt, Human
ucaguauguuuuacacugu

SEQ ID NO: 3768354 - RNA, 21 nt, Human
ucaguauuaaaggggggaggg

SEQ ID NO: 3768355 - RNA, 23 nt, Human
ucaguauuaauacuaaaauaugu

SEQ ID NO: 3768356 - RNA, 14 nt, Human
ucaguauuauaugu

SEQ ID NO: 3768357 - RNA, 16 nt, Human
ucaguauuauauguac

SEQ ID NO: 3768358 - RNA, 17 nt, Human
ucaguauuguuuugguu

SEQ ID NO: 3768359 - RNA, 13 nt, Human
ucaguauuuaacu

SEQ ID NO: 3768360 - RNA, 14 nt, Human
ucaguauuuaacua

SEQ ID NO: 3768361 - RNA, 14 nt, Human
ucaguauuucagug

SEQ ID NO: 3768362 - RNA, 23 nt, Human
ucaguauuuuggagaaauuauuu

SEQ ID NO: 3768363 - RNA, 14 nt, Human
ucaguauuuuuccu

SEQ ID NO: 3768364 - RNA, 15 nt, Human
ucagucagaaaacuu

SEQ ID NO: 3768365 - RNA, 19 nt, Human
ucagucagugcaaauguca

SEQ ID NO: 3768366 - RNA, 20 nt, Human
ucagucaugcauaaauaugc

SEQ ID NO: 3768367 - RNA, 15 nt, Human
ucaguccauagcaga

SEQ ID NO: 3768368 - RNA, 18 nt, Human
ucaguccaugaagaugua

SEQ ID NO: 3768369 - RNA, 15 nt, Human
ucaguccauuuauau

SEQ ID NO: 3768370 - RNA, 18 nt, Human
ucaguccccacagauaac

SEQ ID NO: 3768371 - RNA, 12 nt, Human
ucaguccccucc

SEQ ID NO: 3768372 - RNA, 13 nt, Human
ucaguccccuccc

SEQ ID NO: 3768373 - RNA, 15 nt, Human
ucaguccccucccau

SEQ ID NO: 3768374 - RNA, 18 nt, Human
ucaguccccucccaucug

SEQ ID NO: 3768375 - RNA, 20 nt, Human
ucaguccccucccaucuggg

SEQ ID NO: 3768376 - RNA, 18 nt, Human
ucagucccuauguauuug

SEQ ID NO: 3768377 - RNA, 19 nt, Human
ucaguccucaaagcuuuuu

SEQ ID NO: 3768378 - RNA, 23 nt, Human
ucaguccuccccucacagccucu

SEQ ID NO: 3768379 - RNA, 23 nt, Human
ucagucgccuuucagcaggcagc

SEQ ID NO: 3768380 - RNA, 14 nt, Human
ucagucucaggagc

SEQ ID NO: 3768381 - RNA, 16 nt, Human
ucagucucccucccuu

SEQ ID NO: 3768382 - RNA, 20 nt, Human
ucagucucccuucucccaug

SEQ ID NO: 3768383 - RNA, 14 nt, Human
ucagucucccuuuc

SEQ ID NO: 3768384 - RNA, 15 nt, Human
ucagucucuauacca

SEQ ID NO: 3768385 - RNA, 18 nt, Human
ucagucucuauaccaaua

SEQ ID NO: 3768386 - RNA, 20 nt, Human
ucagucucuauaccaauaaa

SEQ ID NO: 3768387 - RNA, 22 nt, Human
ucagucucuauaccaauaaagu

SEQ ID NO: 3768388 - RNA, 20 nt, Human
ucagucucucuucucuccag

SEQ ID NO: 3768389 - RNA, 17 nt, Human
ucagucucugagggcuu

SEQ ID NO: 3768390 - RNA, 23 nt, Human
ucagucugauucccaagcucugc

SEQ ID NO: 3768391 - RNA, 24 nt, Human
ucagucugauucccaagcucugcu

SEQ ID NO: 3768392 - RNA, 21 nt, Human
ucagucugcuuagaaauaaca

SEQ ID NO: 3768393 - RNA, 15 nt, Human
ucagucuggcccuuc

SEQ ID NO: 3768394 - RNA, 17 nt, Human
ucagucuggugggagga

SEQ ID NO: 3768395 - RNA, 12 nt, Human
ucagucuugccu

SEQ ID NO: 3768396 - RNA, 20 nt, Human
ucagucuugccuuacacaaa

SEQ ID NO: 3768397 - RNA, 22 nt, Human
ucagucuuucuuagugccugug

SEQ ID NO: 3768398 - RNA, 12 nt, Human
ucagucuuuuuc

SEQ ID NO: 3768399 - RNA, 21 nt, Human
ucagucuuuuucuguuguaac

SEQ ID NO: 3768400 - RNA, 13 nt, Human
ucagugaagacua

SEQ ID NO: 3768401 - RNA, 16 nt, Human
ucagugaaguugcugc

SEQ ID NO: 3768402 - RNA, 15 nt, Human
ucagugacagaguuc

SEQ ID NO: 3768403 - RNA, 19 nt, Human
ucagugacagaguucacua

SEQ ID NO: 3768404 - RNA, 19 nt, Human
ucagugauguaccaugaaa

SEQ ID NO: 3768405 - RNA, 15 nt, Human
ucagugcagcccgug

SEQ ID NO: 3768406 - RNA, 16 nt, Human
ucagugcauuugugcu

SEQ ID NO: 3768407 - RNA, 22 nt, Human
ucagugccaauaaaauuuagga

SEQ ID NO: 3768408 - RNA, 9 nt, Human
ucagugccc

SEQ ID NO: 3768409 - RNA, 13 nt, Human
ucagugcccacca

SEQ ID NO: 3768410 - RNA, 23 nt, Human
ucagugccccgucuacagcuccc

SEQ ID NO: 3768411 - RNA, 15 nt, Human
ucagugcccuccagc

SEQ ID NO: 3768412 - RNA, 16 nt, Human
ucagugccgccgccuc

SEQ ID NO: 3768413 - RNA, 21 nt, Human
ucagugccgccgccucgccca

SEQ ID NO: 3768414 - RNA, 11 nt, Human
ucagugccuua

SEQ ID NO: 3768415 - RNA, 12 nt, Human
ucagugccuuau

SEQ ID NO: 3768416 - RNA, 20 nt, Human
ucagugccuuauggaacacu

SEQ ID NO: 3768417 - RNA, 22 nt, Human
ucagugccuuauggaacacucu

SEQ ID NO: 3768418 - RNA, 13 nt, Human
ucagugcucccuc

SEQ ID NO: 3768419 - RNA, 12 nt, Human
ucagugcugccu

SEQ ID NO: 3768420 - RNA, 17 nt, Human
ucagugcuguggccugg

SEQ ID NO: 3768421 - RNA, 22 nt, Human
ucagugcuguggccugggcaag

SEQ ID NO: 3768422 - RNA, 21 nt, Human
ucaguggaagaagcagaugag

SEQ ID NO: 3768423 - RNA, 21 nt, Human
ucaguggacuuuccacccccu

SEQ ID NO: 3768424 - RNA, 12 nt, Human
ucaguggagcca

SEQ ID NO: 3768425 - RNA, 13 nt, Human
ucaguggcagcug

SEQ ID NO: 3768426 - RNA, 14 nt, Human
ucaguggcagcugc

SEQ ID NO: 3768427 - RNA, 16 nt, Human
ucaguggcagcugcuu

SEQ ID NO: 3768428 - RNA, 15 nt, Human
ucaguggcagggcuc

SEQ ID NO: 3768429 - RNA, 19 nt, Human
ucaguggcagggcucagga

SEQ ID NO: 3768430 - RNA, 19 nt, Human
ucaguggcauggcuccagu

SEQ ID NO: 3768431 - RNA, 17 nt, Human
ucaguggcuucaucugu

SEQ ID NO: 3768432 - RNA, 19 nt, Human
ucagugggaacgugacugc

SEQ ID NO: 3768433 - RNA, 14 nt, Human
ucauauuacaauau

SEQ ID NO: 3768434 - RNA, 22 nt, Human
ucauauuagacuucuguuuuca

SEQ ID NO: 3768435 - RNA, 16 nt, Human
ucauauucugucugga

SEQ ID NO: 3768436 - RNA, 16 nt, Human
ucauauucuuucaauu

SEQ ID NO: 3768437 - RNA, 14 nt, Human
ucauauugaugaaa

SEQ ID NO: 3768438 - RNA, 15 nt, Human
ucauauugaugaaaa

SEQ ID NO: 3768439 - RNA, 13 nt, Human
ucauauuuaauau

SEQ ID NO: 3768440 - RNA, 23 nt, Human
ucauauuuacuucuuauacauuu

SEQ ID NO: 3768441 - RNA, 13 nt, Human
ucauauuucccau

SEQ ID NO: 3768442 - RNA, 22 nt, Human
ucauauuucccaugauuucaug

SEQ ID NO: 3768443 - RNA, 19 nt, Human
ucauauuuguacuuucugu

SEQ ID NO: 3768444 - RNA, 15 nt, Human
ucauauuuucaugcu

SEQ ID NO: 3768445 - RNA, 23 nt, Human
ucaucaaauggaagacacauuga

SEQ ID NO: 3768446 - RNA, 18 nt, Human
ucaucaacaaagaaauau

SEQ ID NO: 3768447 - RNA, 15 nt, Human
ucaucaacugaauga

SEQ ID NO: 3768448 - RNA, 19 nt, Human
ucaucaagagaauuugggg

SEQ ID NO: 3768449 - RNA, 15 nt, Human
ucaucaaggcacugc

SEQ ID NO: 3768450 - RNA, 16 nt, Human
ucaucaaggcacugcc

SEQ ID NO: 3768451 - RNA, 13 nt, Human
ucaucaauaaaac

SEQ ID NO: 3768452 - RNA, 21 nt, Human
ucaucaaucaaauaaguauuu

SEQ ID NO: 3768453 - RNA, 19 nt, Human
ucaucaaucauuguacagu

SEQ ID NO: 3768454 - RNA, 19 nt, Human
ucaucaauggggccaguca

SEQ ID NO: 3768455 - RNA, 13 nt, Human
ucaucaauuaaag

SEQ ID NO: 3768456 - RNA, 12 nt, Human
ucaucaauuccc

SEQ ID NO: 3768457 - RNA, 15 nt, Human
ucaucaauucccauu

SEQ ID NO: 3768458 - RNA, 23 nt, Human
ucaucaauugaauggucagcguu

SEQ ID NO: 3768459 - RNA, 15 nt, Human
ucaucacuggaugaa

SEQ ID NO: 3768460 - RNA, 22 nt, Human
ucaucacuggaugaagauucuc

SEQ ID NO: 3768461 - RNA, 15 nt, Human
ucaucacuguggcug

SEQ ID NO: 3768462 - RNA, 16 nt, Human
ucaucagaaaggaaaa

SEQ ID NO: 3768463 - RNA, 15 nt, Human
ucaucagaacagcug

SEQ ID NO: 3768464 - RNA, 22 nt, Human
ucaucagaagugguaggaaagc

SEQ ID NO: 3768465 - RNA, 20 nt, Human
ucaucagauggaaauauuuu

SEQ ID NO: 3768466 - RNA, 12 nt, Human
ucaucagcauuu

SEQ ID NO: 3768467 - RNA, 15 nt, Human
ucaucaggaacguuu

SEQ ID NO: 3768468 - RNA, 20 nt, Human
ucaucagggaggaaaguuuc

SEQ ID NO: 3768469 - RNA, 13 nt, Human
ucaucagggccug

SEQ ID NO: 3768470 - RNA, 23 nt, Human
ucaucagggccuggggccugaga

SEQ ID NO: 3768471 - RNA, 14 nt, Human
ucaucaguauugaa

SEQ ID NO: 3768472 - RNA, 21 nt, Human
ucaucaguauugaagcauuuu

SEQ ID NO: 3768473 - RNA, 15 nt, Human
ucaucaguggagcca

SEQ ID NO: 3768474 - RNA, 15 nt, Human
ucaucauaaaauaaa

SEQ ID NO: 3768475 - RNA, 19 nt, Human
ucaucauaguaaaagaaau

SEQ ID NO: 3768476 - RNA, 17 nt, Human
ucaucauauuauacaga

SEQ ID NO: 3768477 - RNA, 16 nt, Human
ucaucaucauggccag

SEQ ID NO: 3768478 - RNA, 16 nt, Human
ucaucauccagaugug

SEQ ID NO: 3768479 - RNA, 17 nt, Human
ucaucauccagaugugg

SEQ ID NO: 3768480 - RNA, 19 nt, Human
ucaucaugcagcucaacuu

SEQ ID NO: 3768481 - RNA, 14 nt, Human
ucaucauggccagc

SEQ ID NO: 3768482 - RNA, 18 nt, Human
ucaucaugucuauugucc

SEQ ID NO: 3768483 - RNA, 14 nt, Human
ucaucauuauuauu

SEQ ID NO: 3768484 - RNA, 19 nt, Human
ucaucauucacuucacugu

SEQ ID NO: 3768485 - RNA, 14 nt, Human
ucaucauucccucu

SEQ ID NO: 3768486 - RNA, 14 nt, Human
ucaucauucucugu

SEQ ID NO: 3768487 - RNA, 19 nt, Human
ucaucauucucugucucau

SEQ ID NO: 3768488 - RNA, 20 nt, Human
ucaucauucucugucucauc

SEQ ID NO: 3768489 - RNA, 22 nt, Human
ucaucauucucugucucaucca

SEQ ID NO: 3768490 - RNA, 17 nt, Human
ucauccaacuuauguuu

SEQ ID NO: 3768491 - RNA, 19 nt, Human
ucauccaaguuaaauguag

SEQ ID NO: 3768492 - RNA, 15 nt, Human
ucauccaauccucac

SEQ ID NO: 3768493 - RNA, 18 nt, Human
ucauccaauccucacugg

SEQ ID NO: 3768494 - RNA, 20 nt, Human
ucauccaauccucacugggu

SEQ ID NO: 3768495 - RNA, 22 nt, Human
ucauccaauccucacugggugg

SEQ ID NO: 3768496 - RNA, 22 nt, Human
ucauccaaucuaaccacaucaa

SEQ ID NO: 3768497 - RNA, 19 nt, Human
ucauccacauacccugacc

SEQ ID NO: 3768498 - RNA, 16 nt, Human
ucauccacauuguuuu

SEQ ID NO: 3768499 - RNA, 20 nt, Human
ucauccaccccaucccuccc

SEQ ID NO: 3768500 - RNA, 14 nt, Human
ucauccacugugcc

SEQ ID NO: 3768501 - RNA, 21 nt, Human
ucauccacugugccaugugcc

SEQ ID NO: 3768502 - RNA, 17 nt, Human
ucauccaucaucaugug

SEQ ID NO: 3768503 - RNA, 14 nt, Human
ucauccauucuauu

SEQ ID NO: 3768504 - RNA, 17 nt, Human
ucaucccaugagacccu

SEQ ID NO: 3768505 - RNA, 22 nt, Human
ucaucccauuaaucauuucccc

SEQ ID NO: 3768506 - RNA, 20 nt, Human
ucaucccauuccaggcagcc

SEQ ID NO: 3768507 - RNA, 17 nt, Human
ucaucccuaaugcugca

SEQ ID NO: 3768508 - RNA, 14 nt, Human
ucaucccuucucuu

SEQ ID NO: 3768509 - RNA, 14 nt, Human
ucaucccuuuccag

SEQ ID NO: 3768510 - RNA, 15 nt, Human
ucauccgaggcaggg

SEQ ID NO: 3768511 - RNA, 15 nt, Human
ucauccuauuguuga

SEQ ID NO: 3768512 - RNA, 23 nt, Human
ucauccucacagugaacacucag

SEQ ID NO: 3768513 - RNA, 18 nt, Human
ucauccucauacccaccc

SEQ ID NO: 3768514 - RNA, 11 nt, Human
ucauccuccug

SEQ ID NO: 3768515 - RNA, 12 nt, Human
ucauccuccugg

SEQ ID NO: 3768516 - RNA, 16 nt, Human
ucauccugacucugcc

SEQ ID NO: 3768517 - RNA, 18 nt, Human
ucauccuucccacucugu

SEQ ID NO: 3768518 - RNA, 13 nt, Human
ucauccuugucuu

SEQ ID NO: 3768519 - RNA, 22 nt, Human
ucauccuuucacuucuuucccu

SEQ ID NO: 3768520 - RNA, 13 nt, Human
ucauccuuuucuc

SEQ ID NO: 3768521 - RNA, 14 nt, Human
ucauccuuuucucc

SEQ ID NO: 3768522 - RNA, 14 nt, Human
ucaucgccagaggu

SEQ ID NO: 3768523 - RNA, 15 nt, Human
ucaucgccagaggug

SEQ ID NO: 3768524 - RNA, 21 nt, Human
ucaucgccagaggugcuucac

SEQ ID NO: 3768525 - RNA, 17 nt, Human
ucaucgcguccuccuac

SEQ ID NO: 3768526 - RNA, 17 nt, Human
ucaucgcucguguguuc

SEQ ID NO: 3768527 - RNA, 20 nt, Human
ucaucguaggugauuugaag

SEQ ID NO: 3768528 - RNA, 16 nt, Human
ucaucuaaaagaaaaa

SEQ ID NO: 3768529 - RNA, 19 nt, Human
ucaucuaagucaguaccca

SEQ ID NO: 3768530 - RNA, 20 nt, Human
ucaucuaccauuuucugguu

SEQ ID NO: 3768531 - RNA, 18 nt, Human
ucaucuagguaaauuaca

SEQ ID NO: 3768532 - RNA, 13 nt, Human
ucaucuaguuuua

SEQ ID NO: 3768533 - RNA, 16 nt, Human
ucaucuauuucugaga

SEQ ID NO: 3768534 - RNA, 13 nt, Human
ucaucuauuuuga

SEQ ID NO: 3768535 - RNA, 13 nt, Human
ucaucucagcuca

SEQ ID NO: 3768536 - RNA, 20 nt, Human
ucaucucauuuaagggaaaa

SEQ ID NO: 3768537 - RNA, 23 nt, Human
ucaucucauuuaagggaaaaaua

SEQ ID NO: 3768538 - RNA, 20 nt, Human
ucaucucauuuaauccuccc

SEQ ID NO: 3768539 - RNA, 22 nt, Human
ucaucuccagggaguccccucc

SEQ ID NO: 3768540 - RNA, 23 nt, Human
ucaucuccagggaguccccuccc

SEQ ID NO: 3768541 - RNA, 13 nt, Human
ucaucuccaucag

SEQ ID NO: 3768542 - RNA, 22 nt, Human
ucaucucccaccuagcagcacc

SEQ ID NO: 3768543 - RNA, 18 nt, Human
ucaucuccugccuuccuc

SEQ ID NO: 3768544 - RNA, 21 nt, Human
ucaucuccugccuuccuccug

SEQ ID NO: 3768545 - RNA, 23 nt, Human
ucaucuccugccuuccuccuggg

SEQ ID NO: 3768546 - RNA, 15 nt, Human
ucaucucuccuccaa

SEQ ID NO: 3768547 - RNA, 14 nt, Human
ucaucucucugccc

SEQ ID NO: 3768548 - RNA, 16 nt, Human
ucaucucucugcccaa

SEQ ID NO: 3768549 - RNA, 16 nt, Human
ucaucucucuuuaaua

SEQ ID NO: 3768550 - RNA, 13 nt, Human
ucaucucuuagcu

SEQ ID NO: 3768551 - RNA, 23 nt, Human
ucaucugaauuugcccugggaaa

SEQ ID NO: 3768552 - RNA, 17 nt, Human
ucaucugacuaugacau

SEQ ID NO: 3768553 - RNA, 18 nt, Human
ucaucugacuaugacaua

SEQ ID NO: 3768554 - RNA, 14 nt, Human
ucaucugagaauga

SEQ ID NO: 3768555 - RNA, 19 nt, Human
ucaucugagaaugaacaaa

SEQ ID NO: 3768556 - RNA, 23 nt, Human
ucaucugagagaggcuaaaaugu

SEQ ID NO: 3768557 - RNA, 21 nt, Human
ucaucugcccaacuguguagc

SEQ ID NO: 3768558 - RNA, 17 nt, Human
ucaucugcucagcagcu

SEQ ID NO: 3768559 - RNA, 17 nt, Human
ucaucugcucuccuucc

SEQ ID NO: 3768560 - RNA, 14 nt, Human
ucaucugcuggucc

SEQ ID NO: 3768561 - RNA, 18 nt, Human
ucaucuggaaccaucaga

SEQ ID NO: 3768562 - RNA, 12 nt, Human
ucaucuggaagu

SEQ ID NO: 3768563 - RNA, 13 nt, Human
ucaucuggaaguu

SEQ ID NO: 3768564 - RNA, 21 nt, Human
ucaucuggauaggagccugcu

SEQ ID NO: 3768565 - RNA, 23 nt, Human
ucaucuggcaacaucuuuauccg

SEQ ID NO: 3768566 - RNA, 12 nt, Human
ucaucuggcugc

SEQ ID NO: 3768567 - RNA, 16 nt, Human
ucaucuggggagcagg

SEQ ID NO: 3768568 - RNA, 20 nt, Human
ucaucuggggagcaggcagc

SEQ ID NO: 3768569 - RNA, 23 nt, Human
ucaucuggggagcaggcagccag

SEQ ID NO: 3768570 - RNA, 16 nt, Human
ucaucugggggagugg

SEQ ID NO: 3768571 - RNA, 23 nt, Human
ucaucugguugaacucugguggc

SEQ ID NO: 3768572 - RNA, 16 nt, Human
ucaucuguaagcuguu

SEQ ID NO: 3768573 - RNA, 17 nt, Human
ucaucugucccuccggg

SEQ ID NO: 3768574 - RNA, 18 nt, Human
ucaucugucccuccggga

SEQ ID NO: 3768575 - RNA, 12 nt, Human
ucaucugugcac

SEQ ID NO: 3768576 - RNA, 14 nt, Human
ucaucugugugaaa

SEQ ID NO: 3768577 - RNA, 16 nt, Human
ucaucuuacuguaccu

SEQ ID NO: 3768578 - RNA, 17 nt, Human
uccccagacuuguuggc

SEQ ID NO: 3768579 - RNA, 11 nt, Human
uccccagagaa

SEQ ID NO: 3768580 - RNA, 23 nt, Human
uccccagagaaaggggagcccac

SEQ ID NO: 3768581 - RNA, 13 nt, Human
uccccagauugca

SEQ ID NO: 3768582 - RNA, 18 nt, Human
uccccagauugcaacagg

SEQ ID NO: 3768583 - RNA, 23 nt, Human
uccccagauugcaacaggcuggg

SEQ ID NO: 3768584 - RNA, 22 nt, Human
uccccagcaagugagagcuggg

SEQ ID NO: 3768585 - RNA, 10 nt, Human
uccccagcag

SEQ ID NO: 3768586 - RNA, 15 nt, Human
uccccagcagguggg

SEQ ID NO: 3768587 - RNA, 19 nt, Human
uccccagcaucacucccca

SEQ ID NO: 3768588 - RNA, 20 nt, Human
uccccagcaugcaccacggg

SEQ ID NO: 3768589 - RNA, 14 nt, Human
uccccagcccacug

SEQ ID NO: 3768590 - RNA, 14 nt, Human
uccccagcccagag

SEQ ID NO: 3768591 - RNA, 15 nt, Human
uccccagcccagaga

SEQ ID NO: 3768592 - RNA, 14 nt, Human
uccccagcccaggg

SEQ ID NO: 3768593 - RNA, 13 nt, Human
uccccagccccua

SEQ ID NO: 3768594 - RNA, 20 nt, Human
uccccagccccuagcccagg

SEQ ID NO: 3768595 - RNA, 13 nt, Human
uccccagcccugg

SEQ ID NO: 3768596 - RNA, 15 nt, Human
uccccagcccuggcu

SEQ ID NO: 3768597 - RNA, 16 nt, Human
uccccagcccuucaca

SEQ ID NO: 3768598 - RNA, 18 nt, Human
uccccagcccuuccucug

SEQ ID NO: 3768599 - RNA, 22 nt, Human
uccccagcccuuccucugcucc

SEQ ID NO: 3768600 - RNA, 18 nt, Human
uccccagccucucuuccu

SEQ ID NO: 3768601 - RNA, 15 nt, Human
uccccagcucccagg

SEQ ID NO: 3768602 - RNA, 20 nt, Human
uccccaggaggccagccuug

SEQ ID NO: 3768603 - RNA, 22 nt, Human
uccccaggccaggccaccagga

SEQ ID NO: 3768604 - RNA, 19 nt, Human
uccccaggccguggcugcc

SEQ ID NO: 3768605 - RNA, 17 nt, Human
uccccagggaagcagca

SEQ ID NO: 3768606 - RNA, 13 nt, Human
uccccagggcacg

SEQ ID NO: 3768607 - RNA, 21 nt, Human
uccccagggcacgugguugag

SEQ ID NO: 3768608 - RNA, 19 nt, Human
uccccaggggaaaaugaag

SEQ ID NO: 3768609 - RNA, 17 nt, Human
uccccaggggucccagc

SEQ ID NO: 3768610 - RNA, 23 nt, Human
uccccagguccagcucuggaggg

SEQ ID NO: 3768611 - RNA, 15 nt, Human
uccccagguggcuga

SEQ ID NO: 3768612 - RNA, 18 nt, Human
uccccagguggcugaccc

SEQ ID NO: 3768613 - RNA, 19 nt, Human
uccccagguggcugaccca

SEQ ID NO: 3768614 - RNA, 20 nt, Human
uccccagguggcugacccag

SEQ ID NO: 3768615 - RNA, 15 nt, Human
uccccaguaaaauug

SEQ ID NO: 3768616 - RNA, 16 nt, Human
uccccagucccaaugc

SEQ ID NO: 3768617 - RNA, 23 nt, Human
uccccaguucgccuggagcccuc

SEQ ID NO: 3768618 - RNA, 17 nt, Human
uccccaguuugcagaaa

SEQ ID NO: 3768619 - RNA, 15 nt, Human
uccccauacucuguc

SEQ ID NO: 3768620 - RNA, 18 nt, Human
uccccaucaucuguggaa

SEQ ID NO: 3768621 - RNA, 14 nt, Human
uccccaucucaggc

SEQ ID NO: 3768622 - RNA, 14 nt, Human
uccccaucucccug

SEQ ID NO: 3768623 - RNA, 15 nt, Human
uccccaucugucggc

SEQ ID NO: 3768624 - RNA, 14 nt, Human
uccccaucuucuaa

SEQ ID NO: 3768625 - RNA, 21 nt, Human
uccccaugccacguuccacag

SEQ ID NO: 3768626 - RNA, 22 nt, Human
uccccaugccacguuccacagu

SEQ ID NO: 3768627 - RNA, 13 nt, Human
uccccaugccugu

SEQ ID NO: 3768628 - RNA, 17 nt, Human
uccccaugccuguggcu

SEQ ID NO: 3768629 - RNA, 18 nt, Human
uccccaugccuguggcug

SEQ ID NO: 3768630 - RNA, 19 nt, Human
uccccaugccuguggcugc

SEQ ID NO: 3768631 - RNA, 13 nt, Human
uccccauggagcc

SEQ ID NO: 3768632 - RNA, 23 nt, Human
uccccauggcaugggggccucag

SEQ ID NO: 3768633 - RNA, 17 nt, Human
uccccaugucucgacuc

SEQ ID NO: 3768634 - RNA, 24 nt, Human
uccccauuagcuuucaauuccgua

SEQ ID NO: 3768635 - RNA, 15 nt, Human
uccccauuucccauc

SEQ ID NO: 3768636 - RNA, 16 nt, Human
uccccauuucccaucu

SEQ ID NO: 3768637 - RNA, 17 nt, Human
uccccauuucccaucug

SEQ ID NO: 3768638 - RNA, 19 nt, Human
uccccauuucccaucugca

SEQ ID NO: 3768639 - RNA, 15 nt, Human
ucccccaaccccagc

SEQ ID NO: 3768640 - RNA, 15 nt, Human
ucccccaacccccac

SEQ ID NO: 3768641 - RNA, 17 nt, Human
ucccccaacccccaccc

SEQ ID NO: 3768642 - RNA, 17 nt, Human
ucccccaaccucagacu

SEQ ID NO: 3768643 - RNA, 12 nt, Human
ucccccaacucu

SEQ ID NO: 3768644 - RNA, 19 nt, Human
ucccccaccccauuucucu

SEQ ID NO: 3768645 - RNA, 18 nt, Human
ucccccacccccucccca

SEQ ID NO: 3768646 - RNA, 22 nt, Human
ucccccaccgguccagcuggcc

SEQ ID NO: 3768647 - RNA, 18 nt, Human
ucccccacuacugcagca

SEQ ID NO: 3768648 - RNA, 13 nt, Human
ucccccacuccca

SEQ ID NO: 3768649 - RNA, 14 nt, Human
ucccccacugccau

SEQ ID NO: 3768650 - RNA, 19 nt, Human
ucccccagcagccuggggu

SEQ ID NO: 3768651 - RNA, 15 nt, Human
ucccccagccacucc

SEQ ID NO: 3768652 - RNA, 21 nt, Human
ucccccagccaugccagcugg

SEQ ID NO: 3768653 - RNA, 12 nt, Human
ucccccagcccu

SEQ ID NO: 3768654 - RNA, 12 nt, Human
ucccccagccuc

SEQ ID NO: 3768655 - RNA, 23 nt, Human
ucccccagucauucugggaacau

SEQ ID NO: 3768656 - RNA, 12 nt, Human
ucccccagugcg

SEQ ID NO: 3768657 - RNA, 21 nt, Human
ucccccauccuccccuucccu

SEQ ID NO: 3768658 - RNA, 19 nt, Human
ucccccauguucugucccu

SEQ ID NO: 3768659 - RNA, 22 nt, Human
uccccccaagggaggcugcugc

SEQ ID NO: 3768660 - RNA, 11 nt, Human
uccccccaccu

SEQ ID NO: 3768661 - RNA, 12 nt, Human
uccccccacugc

SEQ ID NO: 3768662 - RNA, 19 nt, Human
uccccccacugcaggcccc

SEQ ID NO: 3768663 - RNA, 22 nt, Human
uccccccaucuugcuucccuaa

SEQ ID NO: 3768664 - RNA, 19 nt, Human
uccccccccaaccuuuccc

SEQ ID NO: 3768665 - RNA, 16 nt, Human
uccccccccccuccaa

SEQ ID NO: 3768666 - RNA, 14 nt, Human
ucccccccggggcu

SEQ ID NO: 3768667 - RNA, 18 nt, Human
ucccccccggggcugggu

SEQ ID NO: 3768668 - RNA, 15 nt, Human
uccccccuccucuga

SEQ ID NO: 3768669 - RNA, 18 nt, Human
uccccccuccucugaaac

SEQ ID NO: 3768670 - RNA, 20 nt, Human
uccccccuuuuuuuccuuuu

SEQ ID NO: 3768671 - RNA, 18 nt, Human
ucccccguguuccccucu

SEQ ID NO: 3768672 - RNA, 19 nt, Human
ucccccguguuccccucuu

SEQ ID NO: 3768673 - RNA, 17 nt, Human
ucccccuaaaccaacug

SEQ ID NO: 3768674 - RNA, 17 nt, Human
ucccccuauccuuggca

SEQ ID NO: 3768675 - RNA, 14 nt, Human
ucccccucccccag

SEQ ID NO: 3768676 - RNA, 18 nt, Human
ucccccucccccuucucc

SEQ ID NO: 3768677 - RNA, 16 nt, Human
ucccccucccuccccu

SEQ ID NO: 3768678 - RNA, 18 nt, Human
ucccccuccucuccacca

SEQ ID NO: 3768679 - RNA, 12 nt, Human
ucccccuccuuc

SEQ ID NO: 3768680 - RNA, 18 nt, Human
ucccccugccagugccuu

SEQ ID NO: 3768681 - RNA, 23 nt, Human
ucccccugcccucguggccagcc

SEQ ID NO: 3768682 - RNA, 22 nt, Human
ucccccugggcucugccccagc

SEQ ID NO: 3768683 - RNA, 23 nt, Human
ucccccugggcucugccccagcu

SEQ ID NO: 3768684 - RNA, 21 nt, Human
ucccccuggggcuucuccuga

SEQ ID NO: 3768685 - RNA, 19 nt, Human
ucccccuguccccucagcu

SEQ ID NO: 3768686 - RNA, 22 nt, Human
ucccccuucacaaagcccaagg

SEQ ID NO: 3768687 - RNA, 15 nt, Human
ucccccuucucccac

SEQ ID NO: 3768688 - RNA, 16 nt, Human
ucccccuugccacccc

SEQ ID NO: 3768689 - RNA, 24 nt, Human
uccccgaaacaggcuacucuccuc

SEQ ID NO: 3768690 - RNA, 19 nt, Human
uccccgaaggugcuggagg

SEQ ID NO: 3768691 - RNA, 20 nt, Human
uccccgagggaugaugccac

SEQ ID NO: 3768692 - RNA, 13 nt, Human
uccccgcccuuuu

SEQ ID NO: 3768693 - RNA, 16 nt, Human
uccccgccuggccagg

SEQ ID NO: 3768694 - RNA, 20 nt, Human
uccccgccuggccaggagca

SEQ ID NO: 3768695 - RNA, 17 nt, Human
uccccggcacccucugg

SEQ ID NO: 3768696 - RNA, 15 nt, Human
uccccggggcccagg

SEQ ID NO: 3768697 - RNA, 23 nt, Human
uccccguaugaguuagaauaaua

SEQ ID NO: 3768698 - RNA, 17 nt, Human
uccccgugggccauggc

SEQ ID NO: 3768699 - RNA, 14 nt, Human
uccccguuccugac

SEQ ID NO: 3768700 - RNA, 15 nt, Human
uccccguuccugaca

SEQ ID NO: 3768701 - RNA, 14 nt, Human
uccccuaaccucau

SEQ ID NO: 3768702 - RNA, 18 nt, Human
uccccuaguaagugccuu

SEQ ID NO: 3768703 - RNA, 20 nt, Human
uccccuaguaagugccuucc

SEQ ID NO: 3768704 - RNA, 21 nt, Human
uccccuaguaagugccuucca

SEQ ID NO: 3768705 - RNA, 16 nt, Human
uccccuauccacccag

SEQ ID NO: 3768706 - RNA, 21 nt, Human
uccccuauccacccagcccau

SEQ ID NO: 3768707 - RNA, 18 nt, Human
uccccucaaagucugcaa

SEQ ID NO: 3768708 - RNA, 22 nt, Human
uccccucaaggacaaagucucc

SEQ ID NO: 3768709 - RNA, 24 nt, Human
uccccucaaggacaaagucuccag

SEQ ID NO: 3768710 - RNA, 13 nt, Human
uccccucacagcc

SEQ ID NO: 3768711 - RNA, 14 nt, Human
uccccucacagccu

SEQ ID NO: 3768712 - RNA, 17 nt, Human
uccccucacagccucug

SEQ ID NO: 3768713 - RNA, 19 nt, Human
uccccucacagccucugac

SEQ ID NO: 3768714 - RNA, 19 nt, Human
uccccucacugauggacaa

SEQ ID NO: 3768715 - RNA, 12 nt, Human
uccccucagcuc

SEQ ID NO: 3768716 - RNA, 13 nt, Human
uccccucauucag

SEQ ID NO: 3768717 - RNA, 22 nt, Human
uccccuccaaccuggggggcag

SEQ ID NO: 3768718 - RNA, 15 nt, Human
uccccuccaucccug

SEQ ID NO: 3768719 - RNA, 16 nt, Human
uccccuccaucccugg

SEQ ID NO: 3768720 - RNA, 17 nt, Human
uccccucccaucuggga

SEQ ID NO: 3768721 - RNA, 14 nt, Human
uccccuccccaacu

SEQ ID NO: 3768722 - RNA, 18 nt, Human
uccccuccccggcccuac

SEQ ID NO: 3768723 - RNA, 19 nt, Human
ucccuggucccuuggagac

SEQ ID NO: 3768724 - RNA, 17 nt, Human
ucccugguggcagcuca

SEQ ID NO: 3768725 - RNA, 19 nt, Human
ucccugguggcagcucacc

SEQ ID NO: 3768726 - RNA, 14 nt, Human
ucccugguucaagc

SEQ ID NO: 3768727 - RNA, 17 nt, Human
ucccugguucugaugau

SEQ ID NO: 3768728 - RNA, 19 nt, Human
ucccuguaaccucuucaga

SEQ ID NO: 3768729 - RNA, 20 nt, Human
ucccuguauuuucuuucucu

SEQ ID NO: 3768730 - RNA, 21 nt, Human
ucccuguauuuucuuucucua

SEQ ID NO: 3768731 - RNA, 18 nt, Human
ucccugucaccucuuccg

SEQ ID NO: 3768732 - RNA, 12 nt, Human
ucccugucccag

SEQ ID NO: 3768733 - RNA, 16 nt, Human
ucccugucggccuggu

SEQ ID NO: 3768734 - RNA, 19 nt, Human
ucccugucuuuacuccuca

SEQ ID NO: 3768735 - RNA, 14 nt, Human
ucccugugccccca

SEQ ID NO: 3768736 - RNA, 20 nt, Human
ucccugugccuaacaccagc

SEQ ID NO: 3768737 - RNA, 17 nt, Human
ucccuguguugucucua

SEQ ID NO: 3768738 - RNA, 13 nt, Human
ucccuguuauuuu

SEQ ID NO: 3768739 - RNA, 17 nt, Human
ucccuguuauuuucaag

SEQ ID NO: 3768740 - RNA, 17 nt, Human
ucccuguuccccagaga

SEQ ID NO: 3768741 - RNA, 18 nt, Human
ucccuguuccccagagaa

SEQ ID NO: 3768742 - RNA, 21 nt, Human
ucccuguucuuccuccagcug

SEQ ID NO: 3768743 - RNA, 18 nt, Human
ucccuguuuaauauuuaa

SEQ ID NO: 3768744 - RNA, 22 nt, Human
ucccuguuuaauauuuaaacag

SEQ ID NO: 3768745 - RNA, 19 nt, Human
ucccuguuuucccacgagg

SEQ ID NO: 3768746 - RNA, 18 nt, Human
ucccuguuuucugagccc

SEQ ID NO: 3768747 - RNA, 18 nt, Human
ucccuuaaaauagaaaua

SEQ ID NO: 3768748 - RNA, 20 nt, Human
ucccuuaacaguuguauuua

SEQ ID NO: 3768749 - RNA, 14 nt, Human
ucccuuaauauccu

SEQ ID NO: 3768750 - RNA, 17 nt, Human
ucccuuaauauccuaaa

SEQ ID NO: 3768751 - RNA, 17 nt, Human
ucccuuacgugaguccu

SEQ ID NO: 3768752 - RNA, 21 nt, Human
ucccuuacuuuaccucucugu

SEQ ID NO: 3768753 - RNA, 15 nt, Human
ucccuuaucccugcu

SEQ ID NO: 3768754 - RNA, 11 nt, Human
ucccuucaacc

SEQ ID NO: 3768755 - RNA, 22 nt, Human
ucccuucaaccauuccccaugg

SEQ ID NO: 3768756 - RNA, 19 nt, Human
ucccuucacauaguuuuua

SEQ ID NO: 3768757 - RNA, 13 nt, Human
ucccuucagcccc

SEQ ID NO: 3768758 - RNA, 19 nt, Human
ucccuucaguacccucuca

SEQ ID NO: 3768759 - RNA, 10 nt, Human
ucccuucaua

SEQ ID NO: 3768760 - RNA, 14 nt, Human
ucccuucauacuug

SEQ ID NO: 3768761 - RNA, 18 nt, Human
ucccuucaucuccaggga

SEQ ID NO: 3768762 - RNA, 21 nt, Human
ucccuucaucuggaaccauca

SEQ ID NO: 3768763 - RNA, 14 nt, Human
ucccuuccaccugc

SEQ ID NO: 3768764 - RNA, 15 nt, Human
ucccuuccaccugcu

SEQ ID NO: 3768765 - RNA, 21 nt, Human
ucccuuccaccugcucugcug

SEQ ID NO: 3768766 - RNA, 17 nt, Human
ucccuuccacugccucu

SEQ ID NO: 3768767 - RNA, 22 nt, Human
ucccuuccacugccucugccuu

SEQ ID NO: 3768768 - RNA, 21 nt, Human
ucccuuccagauggucaucca

SEQ ID NO: 3768769 - RNA, 13 nt, Human
ucccuucccaccu

SEQ ID NO: 3768770 - RNA, 16 nt, Human
ucccuuccccaugcuu

SEQ ID NO: 3768771 - RNA, 20 nt, Human
ucccuuccccucccuggcuc

SEQ ID NO: 3768772 - RNA, 16 nt, Human
ucccuuccgacccucu

SEQ ID NO: 3768773 - RNA, 13 nt, Human
ucccuuccucuuc

SEQ ID NO: 3768774 - RNA, 14 nt, Human
ucccuuccucuucg

SEQ ID NO: 3768775 - RNA, 19 nt, Human
ucccuuccugccagccccu

SEQ ID NO: 3768776 - RNA, 20 nt, Human
ucccuuccuuguagccuuuu

SEQ ID NO: 3768777 - RNA, 18 nt, Human
ucccuuccuuuucccugc

SEQ ID NO: 3768778 - RNA, 20 nt, Human
ucccuuccuuuucccugcuu

SEQ ID NO: 3768779 - RNA, 17 nt, Human
ucccuucgacagcauuu

SEQ ID NO: 3768780 - RNA, 20 nt, Human
ucccuucuaccugccacuca

SEQ ID NO: 3768781 - RNA, 16 nt, Human
ucccuucuacugcuuc

SEQ ID NO: 3768782 - RNA, 11 nt, Human
ucccuucucca

SEQ ID NO: 3768783 - RNA, 20 nt, Human
ucccuucucuguagggaacu

SEQ ID NO: 3768784 - RNA, 23 nt, Human
ucccuucucuguagggaacucug

SEQ ID NO: 3768785 - RNA, 12 nt, Human
ucccuucucuuc

SEQ ID NO: 3768786 - RNA, 15 nt, Human
ucccuucucuuccag

SEQ ID NO: 3768787 - RNA, 13 nt, Human
ucccuucugcuac

SEQ ID NO: 3768788 - RNA, 13 nt, Human
ucccuucuugcau

SEQ ID NO: 3768789 - RNA, 20 nt, Human
ucccuugaaacuuugggaaa

SEQ ID NO: 3768790 - RNA, 20 nt, Human
ucccuugacuuugcuccuca

SEQ ID NO: 3768791 - RNA, 23 nt, Human
ucccuugaggaaacaacagcuuu

SEQ ID NO: 3768792 - RNA, 18 nt, Human
ucccuugagggcugcagu

SEQ ID NO: 3768793 - RNA, 15 nt, Human
ucccuugaugaagaa

SEQ ID NO: 3768794 - RNA, 15 nt, Human
ucccuugaugcacag

SEQ ID NO: 3768795 - RNA, 18 nt, Human
ucccuugaugcacagaga

SEQ ID NO: 3768796 - RNA, 13 nt, Human
ucccuugccacuu

SEQ ID NO: 3768797 - RNA, 20 nt, Human
ucccuugccucaaugccagu

SEQ ID NO: 3768798 - RNA, 20 nt, Human
ucccuugccuuucgaggccu

SEQ ID NO: 3768799 - RNA, 22 nt, Human
ucccuugccuuucgaggccuga

SEQ ID NO: 3768800 - RNA, 14 nt, Human
ucccuugcuugccu

SEQ ID NO: 3768801 - RNA, 20 nt, Human
ucccuugcuugccugcaggg

SEQ ID NO: 3768802 - RNA, 21 nt, Human
ucccuugcuugccugcagggc

SEQ ID NO: 3768803 - RNA, 18 nt, Human
ucccuuggacauuuuaug

SEQ ID NO: 3768804 - RNA, 14 nt, Human
ucccuuggccucag

SEQ ID NO: 3768805 - RNA, 12 nt, Human
ucccuugggcuc

SEQ ID NO: 3768806 - RNA, 17 nt, Human
ucccuugggcucugaug

SEQ ID NO: 3768807 - RNA, 15 nt, Human
ucccuuguauccccu

SEQ ID NO: 3768808 - RNA, 19 nt, Human
ucccuuguauccccugcag

SEQ ID NO: 3768809 - RNA, 16 nt, Human
ucccuugugcgugggu

SEQ ID NO: 3768810 - RNA, 18 nt, Human
ucccuuguucucuaaguu

SEQ ID NO: 3768811 - RNA, 18 nt, Human
ucccuuuagcuguguuau

SEQ ID NO: 3768812 - RNA, 20 nt, Human
ucccuuuagcuguguuauua

SEQ ID NO: 3768813 - RNA, 16 nt, Human
ucccuuuccccagcau

SEQ ID NO: 3768814 - RNA, 15 nt, Human
ucccuuucccuucuu

SEQ ID NO: 3768815 - RNA, 14 nt, Human
ucccuuuccuucca

SEQ ID NO: 3768816 - RNA, 23 nt, Human
ucccuuucuccccugcccccagg

SEQ ID NO: 3768817 - RNA, 18 nt, Human
ucccuuugacgccauccc

SEQ ID NO: 3768818 - RNA, 22 nt, Human
ucccuuugacgccaucccagcc

SEQ ID NO: 3768819 - RNA, 23 nt, Human
ucccuuugacgccaucccagccc

SEQ ID NO: 3768820 - RNA, 19 nt, Human
ucccuuuuaauccuggcug

SEQ ID NO: 3768821 - RNA, 16 nt, Human
ucccuuuucuguucua

SEQ ID NO: 3768822 - RNA, 14 nt, Human
ucccuuuucuugac

SEQ ID NO: 3768823 - RNA, 17 nt, Human
ucccuuuuuccuugucc

SEQ ID NO: 3768824 - RNA, 16 nt, Human
ucccuuuuugaagugu

SEQ ID NO: 3768825 - RNA, 13 nt, Human
ucccuuuuuuuaa

SEQ ID NO: 3768826 - RNA, 23 nt, Human
uccgaaaaauccucuuccucuga

SEQ ID NO: 3768827 - RNA, 21 nt, Human
uccgaaagggacuuggaagcu

SEQ ID NO: 3768828 - RNA, 22 nt, Human
uccgaaagggacuuggaagcuc

SEQ ID NO: 3768829 - RNA, 15 nt, Human
uccgaaccuccucug

SEQ ID NO: 3768830 - RNA, 17 nt, Human
uccgaaccuccucugug

SEQ ID NO: 3768831 - RNA, 19 nt, Human
uccgaaccuccucugugaa

SEQ ID NO: 3768832 - RNA, 18 nt, Human
uccgaagcuacuucucca

SEQ ID NO: 3768833 - RNA, 22 nt, Human
uccgacaaccgaugcuccagcc

SEQ ID NO: 3768834 - RNA, 23 nt, Human
uccgacaaccgaugcuccagcca

SEQ ID NO: 3768835 - RNA, 17 nt, Human
uccgacagcccccucug

SEQ ID NO: 3768836 - RNA, 17 nt, Human
uccgacucuucugagca

SEQ ID NO: 3768837 - RNA, 23 nt, Human
uccgacugcccucugaggccucc

SEQ ID NO: 3768838 - RNA, 12 nt, Human
uccgacugcuuu

SEQ ID NO: 3768839 - RNA, 17 nt, Human
uccgagagagcaccccu

SEQ ID NO: 3768840 - RNA, 14 nt, Human
uccgagagggagag

SEQ ID NO: 3768841 - RNA, 15 nt, Human
uccgagagggagaga

SEQ ID NO: 3768842 - RNA, 21 nt, Human
uccgagccggggaguuucuuu

SEQ ID NO: 3768843 - RNA, 21 nt, Human
uccgaggacccaggaaaggca

SEQ ID NO: 3768844 - RNA, 19 nt, Human
uccgaguguguuucauccu

SEQ ID NO: 3768845 - RNA, 15 nt, Human
uccgcacuuuccacu

SEQ ID NO: 3768846 - RNA, 18 nt, Human
uccgcaggugcugguccc

SEQ ID NO: 3768847 - RNA, 18 nt, Human
uccgcaguguggccaggc

SEQ ID NO: 3768848 - RNA, 14 nt, Human
uccgcaucccuacc

SEQ ID NO: 3768849 - RNA, 14 nt, Human
uccgccacuggggc

SEQ ID NO: 3768850 - RNA, 19 nt, Human
uccgccacuggggcucaga

SEQ ID NO: 3768851 - RNA, 15 nt, Human
uccgccagccuccuc

SEQ ID NO: 3768852 - RNA, 11 nt, Human
uccgcccccag

SEQ ID NO: 3768853 - RNA, 15 nt, Human
uccgcccccagccua

SEQ ID NO: 3768854 - RNA, 15 nt, Human
uccgccccugagccc

SEQ ID NO: 3768855 - RNA, 18 nt, Human
uccgccccugagcccacu

SEQ ID NO: 3768856 - RNA, 13 nt, Human
uccgccccugccu

SEQ ID NO: 3768857 - RNA, 15 nt, Human
uccgccccugccugc

SEQ ID NO: 3768858 - RNA, 19 nt, Human
uccgccccugccugccaug

SEQ ID NO: 3768859 - RNA, 17 nt, Human
uccgcccugcuccuccc

SEQ ID NO: 3768860 - RNA, 20 nt, Human
uccgcccugcuccucccugg

SEQ ID NO: 3768861 - RNA, 16 nt, Human
uccgccuggccuggcc

SEQ ID NO: 3768862 - RNA, 17 nt, Human
uccgccuucacuccggu

SEQ ID NO: 3768863 - RNA, 12 nt, Human
uccgcucucuuc

SEQ ID NO: 3768864 - RNA, 15 nt, Human
uccgcucucuuccug

SEQ ID NO: 3768865 - RNA, 17 nt, Human
uccgcucucuuccugcc

SEQ ID NO: 3768866 - RNA, 19 nt, Human
uccgcugccagccuugagc

SEQ ID NO: 3768867 - RNA, 13 nt, Human
uccgcugcuccuu

SEQ ID NO: 3768868 - RNA, 21 nt, Human
uccuccccaaaucaauacacu

SEQ ID NO: 3768869 - RNA, 16 nt, Human
uccuccccagcaggug

SEQ ID NO: 3768870 - RNA, 20 nt, Human
uccuccccccuccucugaaa

SEQ ID NO: 3768871 - RNA, 13 nt, Human
uccucccccugcc

SEQ ID NO: 3768872 - RNA, 23 nt, Human
uccucccccugccagugccuuac

SEQ ID NO: 3768873 - RNA, 19 nt, Human
uccuccccuccagcucccu

SEQ ID NO: 3768874 - RNA, 22 nt, Human
uccuccccuccuccuggacucc

SEQ ID NO: 3768875 - RNA, 17 nt, Human
uccuccccucucuuguc

SEQ ID NO: 3768876 - RNA, 13 nt, Human
uccuccccuggag

SEQ ID NO: 3768877 - RNA, 16 nt, Human
uccuccccuuccucuu

SEQ ID NO: 3768878 - RNA, 20 nt, Human
uccucccgagcuccucuucc

SEQ ID NO: 3768879 - RNA, 15 nt, Human
uccucccgggcccuc

SEQ ID NO: 3768880 - RNA, 14 nt, Human
uccucccucccucu

SEQ ID NO: 3768881 - RNA, 17 nt, Human
uccucccucccucuuuc

SEQ ID NO: 3768882 - RNA, 19 nt, Human
uccucccucccucuuuccc

SEQ ID NO: 3768883 - RNA, 18 nt, Human
uccucccucugaggcugu

SEQ ID NO: 3768884 - RNA, 17 nt, Human
uccucccugacuuuucu

SEQ ID NO: 3768885 - RNA, 18 nt, Human
uccucccugacuuuucug

SEQ ID NO: 3768886 - RNA, 17 nt, Human
uccucccuggcugcccu

SEQ ID NO: 3768887 - RNA, 21 nt, Human
uccucccuggcugcccuggcc

SEQ ID NO: 3768888 - RNA, 14 nt, Human
uccucccuguaacu

SEQ ID NO: 3768889 - RNA, 12 nt, Human
uccucccuguua

SEQ ID NO: 3768890 - RNA, 13 nt, Human
uccucccuguuau

SEQ ID NO: 3768891 - RNA, 14 nt, Human
uccucccuuagcuc

SEQ ID NO: 3768892 - RNA, 10 nt, Human
uccucccuuc

SEQ ID NO: 3768893 - RNA, 14 nt, Human
uccucccuuccucc

SEQ ID NO: 3768894 - RNA, 17 nt, Human
uccucccuuccuuuucc

SEQ ID NO: 3768895 - RNA, 21 nt, Human
uccucccuuccuuuucccugc

SEQ ID NO: 3768896 - RNA, 14 nt, Human
uccucccuucugcu

SEQ ID NO: 3768897 - RNA, 18 nt, Human
uccucccuucugcuacug

SEQ ID NO: 3768898 - RNA, 16 nt, Human
uccucccuuguucucu

SEQ ID NO: 3768899 - RNA, 17 nt, Human
uccucccuuuuuccuug

SEQ ID NO: 3768900 - RNA, 14 nt, Human
uccuccgaggccag

SEQ ID NO: 3768901 - RNA, 22 nt, Human
uccuccguccauaucagaacug

SEQ ID NO: 3768902 - RNA, 19 nt, Human
uccuccgugcuuccucagu

SEQ ID NO: 3768903 - RNA, 22 nt, Human
uccuccuaccgaaaccuugccu

SEQ ID NO: 3768904 - RNA, 16 nt, Human
uccuccucaccucaug

SEQ ID NO: 3768905 - RNA, 18 nt, Human
uccuccucaccucaugcc

SEQ ID NO: 3768906 - RNA, 12 nt, Human
uccuccucagau

SEQ ID NO: 3768907 - RNA, 21 nt, Human
uccuccuccaaaggcccccua

SEQ ID NO: 3768908 - RNA, 13 nt, Human
uccuccuccacca

SEQ ID NO: 3768909 - RNA, 12 nt, Human
uccuccuccagg

SEQ ID NO: 3768910 - RNA, 14 nt, Human
uccuccuccaggga

SEQ ID NO: 3768911 - RNA, 14 nt, Human
uccuccucccaccc

SEQ ID NO: 3768912 - RNA, 15 nt, Human
uccuccucccccaga

SEQ ID NO: 3768913 - RNA, 17 nt, Human
uccuccucccugcaucu

SEQ ID NO: 3768914 - RNA, 16 nt, Human
uccuccuccuuccuag

SEQ ID NO: 3768915 - RNA, 13 nt, Human
uccuccucuuucu

SEQ ID NO: 3768916 - RNA, 17 nt, Human
uccuccucuuucucucc

SEQ ID NO: 3768917 - RNA, 18 nt, Human
uccuccugacaccccacu

SEQ ID NO: 3768918 - RNA, 21 nt, Human
uccuccugacaccccacuuag

SEQ ID NO: 3768919 - RNA, 22 nt, Human
uccuccugacaccccacuuagc

SEQ ID NO: 3768920 - RNA, 14 nt, Human
uccuccugcugcca

SEQ ID NO: 3768921 - RNA, 15 nt, Human
uccuccugcugccag

SEQ ID NO: 3768922 - RNA, 19 nt, Human
uccuccuggaaccuugcug

SEQ ID NO: 3768923 - RNA, 20 nt, Human
uccuccugggcccucucugc

SEQ ID NO: 3768924 - RNA, 13 nt, Human
uccuccugguggg

SEQ ID NO: 3768925 - RNA, 20 nt, Human
uccuccugguggguccaggg

SEQ ID NO: 3768926 - RNA, 13 nt, Human
uccuccuucccaa

SEQ ID NO: 3768927 - RNA, 20 nt, Human
uccuccuuccggggaaggau

SEQ ID NO: 3768928 - RNA, 22 nt, Human
uccuccuuccggggaaggauuu

SEQ ID NO: 3768929 - RNA, 13 nt, Human
uccuccuuucucc

SEQ ID NO: 3768930 - RNA, 19 nt, Human
uccuccuuuucacaguucu

SEQ ID NO: 3768931 - RNA, 23 nt, Human
uccucgagaucccaacacugcca

SEQ ID NO: 3768932 - RNA, 14 nt, Human
uccucgcaagcugg

SEQ ID NO: 3768933 - RNA, 16 nt, Human
uccucgcagagaggcc

SEQ ID NO: 3768934 - RNA, 13 nt, Human
uccucgccugaca

SEQ ID NO: 3768935 - RNA, 15 nt, Human
uccucgcuucuuuca

SEQ ID NO: 3768936 - RNA, 15 nt, Human
uccucggcccccucc

SEQ ID NO: 3768937 - RNA, 17 nt, Human
uccucgguacucccaua

SEQ ID NO: 3768938 - RNA, 14 nt, Human
uccucguuuguguu

SEQ ID NO: 3768939 - RNA, 22 nt, Human
uccucuaacaggggcugguggg

SEQ ID NO: 3768940 - RNA, 20 nt, Human
uccucuaagccacucuucca

SEQ ID NO: 3768941 - RNA, 17 nt, Human
uccucuacuaacaauca

SEQ ID NO: 3768942 - RNA, 18 nt, Human
uccucuacuuaaugagau

SEQ ID NO: 3768943 - RNA, 18 nt, Human
uccucuagaagccaaggg

SEQ ID NO: 3768944 - RNA, 21 nt, Human
uccucuagcugugggggugag

SEQ ID NO: 3768945 - RNA, 17 nt, Human
uccucuaggaggucucu

SEQ ID NO: 3768946 - RNA, 16 nt, Human
uccucuauacaucucu

SEQ ID NO: 3768947 - RNA, 21 nt, Human
uccucuauacaucucucccca

SEQ ID NO: 3768948 - RNA, 19 nt, Human
uccucuauugauguacagu

SEQ ID NO: 3768949 - RNA, 20 nt, Human
uccucucaaccaccuuucag

SEQ ID NO: 3768950 - RNA, 18 nt, Human
uccucucacuaaacuuua

SEQ ID NO: 3768951 - RNA, 13 nt, Human
uccucuccacccu

SEQ ID NO: 3768952 - RNA, 14 nt, Human
uccucuccacccuc

SEQ ID NO: 3768953 - RNA, 17 nt, Human
uccucuccaccuagugg

SEQ ID NO: 3768954 - RNA, 19 nt, Human
uccucuccaccuaguggcu

SEQ ID NO: 3768955 - RNA, 12 nt, Human
uccucuccacug

SEQ ID NO: 3768956 - RNA, 15 nt, Human
uccucuccacugccu

SEQ ID NO: 3768957 - RNA, 18 nt, Human
uccucuccacugccuucg

SEQ ID NO: 3768958 - RNA, 15 nt, Human
uccucuccaggcacc

SEQ ID NO: 3768959 - RNA, 16 nt, Human
uccucucccauccccc

SEQ ID NO: 3768960 - RNA, 18 nt, Human
uccucucccaucccccug

SEQ ID NO: 3768961 - RNA, 19 nt, Human
uccucucccaucccccugc

SEQ ID NO: 3768962 - RNA, 23 nt, Human
uccucucccaucccccugcccuc

SEQ ID NO: 3768963 - RNA, 23 nt, Human
uccucucccauugucccucugcc

SEQ ID NO: 3768964 - RNA, 17 nt, Human
uccucuccccagcccag

SEQ ID NO: 3768965 - RNA, 19 nt, Human
uccucuccccagcccagag

SEQ ID NO: 3768966 - RNA, 20 nt, Human
uccucuccccagcccagaga

SEQ ID NO: 3768967 - RNA, 14 nt, Human
uccucuccccucca

SEQ ID NO: 3768968 - RNA, 17 nt, Human
uccucucgcggcccuca

SEQ ID NO: 3768969 - RNA, 17 nt, Human
uccucucuaaccuccuu

SEQ ID NO: 3768970 - RNA, 18 nt, Human
uccucucuaagugggcau

SEQ ID NO: 3768971 - RNA, 13 nt, Human
uccucucuauauu

SEQ ID NO: 3768972 - RNA, 11 nt, Human
uccucucugcc

SEQ ID NO: 3768973 - RNA, 17 nt, Human
uccucucugguggcucu

SEQ ID NO: 3768974 - RNA, 14 nt, Human
uccucucuuccucu

SEQ ID NO: 3768975 - RNA, 15 nt, Human
uccucucuuuguucu

SEQ ID NO: 3768976 - RNA, 19 nt, Human
uccucucuuuguucucagc

SEQ ID NO: 3768977 - RNA, 12 nt, Human
uccucugaaaca

SEQ ID NO: 3768978 - RNA, 16 nt, Human
uccucugaaacagcug

SEQ ID NO: 3768979 - RNA, 19 nt, Human
uccucugaaacagcugccu

SEQ ID NO: 3768980 - RNA, 20 nt, Human
uccucugaaacagcugccuu

SEQ ID NO: 3768981 - RNA, 15 nt, Human
uccucugacucaggg

SEQ ID NO: 3768982 - RNA, 12 nt, Human
uccucugagccu

SEQ ID NO: 3768983 - RNA, 13 nt, Human
uccucugaucucc

SEQ ID NO: 3768984 - RNA, 16 nt, Human
uccucugcacucccac

SEQ ID NO: 3768985 - RNA, 22 nt, Human
uccucugcccgggagcucagga

SEQ ID NO: 3768986 - RNA, 11 nt, Human
uccucugccug

SEQ ID NO: 3768987 - RNA, 14 nt, Human
uccucugccugccc

SEQ ID NO: 3768988 - RNA, 22 nt, Human
uccucugccugccccgccccca

SEQ ID NO: 3768989 - RNA, 15 nt, Human
uccucugcuaaauug

SEQ ID NO: 3768990 - RNA, 17 nt, Human
uccucugcuugccaucc

SEQ ID NO: 3768991 - RNA, 21 nt, Human
uccucugcuugccaucccucc

SEQ ID NO: 3768992 - RNA, 22 nt, Human
uccucugcuugccaucccuccc

SEQ ID NO: 3768993 - RNA, 15 nt, Human
uccucuggacggcag

SEQ ID NO: 3768994 - RNA, 17 nt, Human
uccucuggacggcaggc

SEQ ID NO: 3768995 - RNA, 24 nt, Human
uccucuggacggcaggcucacugc

SEQ ID NO: 3768996 - RNA, 17 nt, Human
uccucuggauggcacca

SEQ ID NO: 3768997 - RNA, 19 nt, Human
uccucuggauggcaccaga

SEQ ID NO: 3768998 - RNA, 15 nt, Human
uccucuggcuuggcc

SEQ ID NO: 3768999 - RNA, 17 nt, Human
uccucuggggcucuagg

SEQ ID NO: 3769000 - RNA, 15 nt, Human
uccucuguacagagc

SEQ ID NO: 3769001 - RNA, 23 nt, Human
uccucuguccagggcccugagcu

SEQ ID NO: 3769002 - RNA, 15 nt, Human
uccucugucucgagc

SEQ ID NO: 3769003 - RNA, 23 nt, Human
uccucugucucgagcgcccugca

SEQ ID NO: 3769004 - RNA, 15 nt, Human
uccucugucugcccu

SEQ ID NO: 3769005 - RNA, 18 nt, Human
uccucugucugcccuuca

SEQ ID NO: 3769006 - RNA, 19 nt, Human
uccucugugaccaaugucu

SEQ ID NO: 3769007 - RNA, 21 nt, Human
uccucugugaccaaugucuug

SEQ ID NO: 3769008 - RNA, 22 nt, Human
uccucuguuucuccuucugaaa

SEQ ID NO: 3769009 - RNA, 20 nt, Human
uccucuuaaaaaauaaaaac

SEQ ID NO: 3769010 - RNA, 15 nt, Human
uccucuuccaugcug

SEQ ID NO: 3769011 - RNA, 12 nt, Human
uccucuucccca

SEQ ID NO: 3769012 - RNA, 18 nt, Human
uccucuuccccagacgcc

SEQ ID NO: 3769013 - RNA, 19 nt, Human
ucucaggcucugcccugcc

SEQ ID NO: 3769014 - RNA, 15 nt, Human
ucucaggcugccuga

SEQ ID NO: 3769015 - RNA, 21 nt, Human
ucucagggaagcccagcucca

SEQ ID NO: 3769016 - RNA, 23 nt, Human
ucucagggaagcccagcuccagg

SEQ ID NO: 3769017 - RNA, 13 nt, Human
ucucagggccugg

SEQ ID NO: 3769018 - RNA, 17 nt, Human
ucucagggugucccaga

SEQ ID NO: 3769019 - RNA, 22 nt, Human
ucucagguagaagguugacaca

SEQ ID NO: 3769020 - RNA, 16 nt, Human
ucucaggucugaguug

SEQ ID NO: 3769021 - RNA, 14 nt, Human
ucucagucaugcau

SEQ ID NO: 3769022 - RNA, 11 nt, Human
ucucagucucu

SEQ ID NO: 3769023 - RNA, 16 nt, Human
ucucagugaagaauac

SEQ ID NO: 3769024 - RNA, 20 nt, Human
ucucagugaagacuaugaaa

SEQ ID NO: 3769025 - RNA, 19 nt, Human
ucucagugccaacuguggc

SEQ ID NO: 3769026 - RNA, 20 nt, Human
ucucagugccaacuguggcu

SEQ ID NO: 3769027 - RNA, 15 nt, Human
ucucagugcuuuccu

SEQ ID NO: 3769028 - RNA, 12 nt, Human
ucucaguguuuu

SEQ ID NO: 3769029 - RNA, 19 nt, Human
ucucaguguuuuggacucc

SEQ ID NO: 3769030 - RNA, 23 nt, Human
ucucaguguuuuggacuccaucu

SEQ ID NO: 3769031 - RNA, 21 nt, Human
ucucaguuccgauuucccagg

SEQ ID NO: 3769032 - RNA, 16 nt, Human
ucucaguuuguauaga

SEQ ID NO: 3769033 - RNA, 17 nt, Human
ucucaguuugugugucu

SEQ ID NO: 3769034 - RNA, 15 nt, Human
ucucaguuuucauaa

SEQ ID NO: 3769035 - RNA, 15 nt, Human
ucucaguuuuucuua

SEQ ID NO: 3769036 - RNA, 22 nt, Human
ucucaguuuuucuuaauauaua

SEQ ID NO: 3769037 - RNA, 22 nt, Human
ucucauaauuuauacaggucau

SEQ ID NO: 3769038 - RNA, 16 nt, Human
ucucauaccucugacc

SEQ ID NO: 3769039 - RNA, 19 nt, Human
ucucauaccucugaccaac

SEQ ID NO: 3769040 - RNA, 17 nt, Human
ucucauacguccaccau

SEQ ID NO: 3769041 - RNA, 16 nt, Human
ucucauacucaccuca

SEQ ID NO: 3769042 - RNA, 20 nt, Human
ucucauagcauuaacuaauc

SEQ ID NO: 3769043 - RNA, 21 nt, Human
ucucauaggaaaaguacauuu

SEQ ID NO: 3769044 - RNA, 22 nt, Human
ucucauaggaaaaguacauuua

SEQ ID NO: 3769045 - RNA, 24 nt, Human
ucucauaggaaaaguacauuuaau

SEQ ID NO: 3769046 - RNA, 21 nt, Human
ucucauauauagacagcuuug

SEQ ID NO: 3769047 - RNA, 21 nt, Human
ucucaucaguguccucuugcu

SEQ ID NO: 3769048 - RNA, 18 nt, Human
ucucaucaugucuauugu

SEQ ID NO: 3769049 - RNA, 12 nt, Human
ucucauccacau

SEQ ID NO: 3769050 - RNA, 13 nt, Human
ucucauccaucau

SEQ ID NO: 3769051 - RNA, 19 nt, Human
ucucaucccacgcacucca

SEQ ID NO: 3769052 - RNA, 14 nt, Human
ucucauccuccagu

SEQ ID NO: 3769053 - RNA, 21 nt, Human
ucucauccuccaguaccuugc

SEQ ID NO: 3769054 - RNA, 13 nt, Human
ucucauccuccug

SEQ ID NO: 3769055 - RNA, 18 nt, Human
ucucauccuccuggaacc

SEQ ID NO: 3769056 - RNA, 13 nt, Human
ucucauccugcag

SEQ ID NO: 3769057 - RNA, 15 nt, Human
ucucauccugcaggc

SEQ ID NO: 3769058 - RNA, 19 nt, Human
ucucaucgccagacaacug

SEQ ID NO: 3769059 - RNA, 20 nt, Human
ucucaucucagugaagaaua

SEQ ID NO: 3769060 - RNA, 17 nt, Human
ucucaucucuuagcucc

SEQ ID NO: 3769061 - RNA, 16 nt, Human
ucucaucugcacccuu

SEQ ID NO: 3769062 - RNA, 23 nt, Human
ucucaucugcacccuucuuuucu

SEQ ID NO: 3769063 - RNA, 11 nt, Human
ucucaucuggg

SEQ ID NO: 3769064 - RNA, 17 nt, Human
ucucaucugugauuccc

SEQ ID NO: 3769065 - RNA, 14 nt, Human
ucucaucuugugaa

SEQ ID NO: 3769066 - RNA, 15 nt, Human
ucucaucuugugaaa

SEQ ID NO: 3769067 - RNA, 13 nt, Human
ucucaucuuucuu

SEQ ID NO: 3769068 - RNA, 22 nt, Human
ucucaucuuucuugaucaacau

SEQ ID NO: 3769069 - RNA, 22 nt, Human
ucucaugaggggagaggagacg

SEQ ID NO: 3769070 - RNA, 15 nt, Human
ucucaugauuuacag

SEQ ID NO: 3769071 - RNA, 12 nt, Human
ucucaugccagu

SEQ ID NO: 3769072 - RNA, 18 nt, Human
ucucaugccccuggcugg

SEQ ID NO: 3769073 - RNA, 16 nt, Human
ucucaugccucagccu

SEQ ID NO: 3769074 - RNA, 19 nt, Human
ucucaugccucagccuccu

SEQ ID NO: 3769075 - RNA, 20 nt, Human
ucucaugccucagccuccug

SEQ ID NO: 3769076 - RNA, 21 nt, Human
ucucaugccucagccuccuga

SEQ ID NO: 3769077 - RNA, 20 nt, Human
ucucauggagaagcagaaau

SEQ ID NO: 3769078 - RNA, 16 nt, Human
ucucauggagaaguua

SEQ ID NO: 3769079 - RNA, 14 nt, Human
ucucaugugauccu

SEQ ID NO: 3769080 - RNA, 18 nt, Human
ucucauguuuucaacugc

SEQ ID NO: 3769081 - RNA, 18 nt, Human
ucucauguuuuccauugu

SEQ ID NO: 3769082 - RNA, 20 nt, Human
ucucauuaaaagaauaucug

SEQ ID NO: 3769083 - RNA, 16 nt, Human
ucucauuccagaggaa

SEQ ID NO: 3769084 - RNA, 18 nt, Human
ucucauuccguugucugu

SEQ ID NO: 3769085 - RNA, 21 nt, Human
ucucauuccguugucugugga

SEQ ID NO: 3769086 - RNA, 22 nt, Human
ucucauugacuuuuauaaagca

SEQ ID NO: 3769087 - RNA, 14 nt, Human
ucucauugcucuga

SEQ ID NO: 3769088 - RNA, 14 nt, Human
ucucauuggaaauu

SEQ ID NO: 3769089 - RNA, 20 nt, Human
ucucauuggaaauuuagcau

SEQ ID NO: 3769090 - RNA, 21 nt, Human
ucucauuggaaauuuagcauu

SEQ ID NO: 3769091 - RNA, 19 nt, Human
ucucauuguucaauuccca

SEQ ID NO: 3769092 - RNA, 16 nt, Human
ucucauuuaagggaaa

SEQ ID NO: 3769093 - RNA, 17 nt, Human
ucucauuuaagggaaaa

SEQ ID NO: 3769094 - RNA, 23 nt, Human
ucucauuuaagggaaaaauauau

SEQ ID NO: 3769095 - RNA, 16 nt, Human
ucucauuuaauccucu

SEQ ID NO: 3769096 - RNA, 18 nt, Human
ucucauuuagaacuugca

SEQ ID NO: 3769097 - RNA, 18 nt, Human
ucucauuuuaauguaaag

SEQ ID NO: 3769098 - RNA, 22 nt, Human
ucucauuuuaauguaaagauuu

SEQ ID NO: 3769099 - RNA, 20 nt, Human
ucucauuuuuuaaaaaagcu

SEQ ID NO: 3769100 - RNA, 21 nt, Human
ucuccaaaaaucugccugggu

SEQ ID NO: 3769101 - RNA, 17 nt, Human
ucuccaaaauaaaacuu

SEQ ID NO: 3769102 - RNA, 19 nt, Human
ucuccaaaauaaaacuuuu

SEQ ID NO: 3769103 - RNA, 11 nt, Human
ucuccaaagcu

SEQ ID NO: 3769104 - RNA, 19 nt, Human
ucuccaacaucacagccca

SEQ ID NO: 3769105 - RNA, 20 nt, Human
ucuccaacaucacagcccag

SEQ ID NO: 3769106 - RNA, 21 nt, Human
ucuccaacaucacagcccagc

SEQ ID NO: 3769107 - RNA, 20 nt, Human
ucuccaaccccccagcacug

SEQ ID NO: 3769108 - RNA, 21 nt, Human
ucuccaaccccccagcacuga

SEQ ID NO: 3769109 - RNA, 16 nt, Human
ucuccaagaaugcuga

SEQ ID NO: 3769110 - RNA, 19 nt, Human
ucuccaagcagcuuagagu

SEQ ID NO: 3769111 - RNA, 16 nt, Human
ucuccaagcaggacau

SEQ ID NO: 3769112 - RNA, 21 nt, Human
ucuccaagggcuucugcaccc

SEQ ID NO: 3769113 - RNA, 14 nt, Human
ucuccaagugccag

SEQ ID NO: 3769114 - RNA, 21 nt, Human
ucuccaagugccagagguggg

SEQ ID NO: 3769115 - RNA, 23 nt, Human
ucuccaagugccagaggugggca

SEQ ID NO: 3769116 - RNA, 16 nt, Human
ucuccaauaucagugc

SEQ ID NO: 3769117 - RNA, 14 nt, Human
ucuccacagcaacc

SEQ ID NO: 3769118 - RNA, 22 nt, Human
ucuccaccagucauuuuucaga

SEQ ID NO: 3769119 - RNA, 13 nt, Human
ucuccacccugcu

SEQ ID NO: 3769120 - RNA, 14 nt, Human
ucuccacccugcuc

SEQ ID NO: 3769121 - RNA, 14 nt, Human
ucuccaccuagugg

SEQ ID NO: 3769122 - RNA, 23 nt, Human
ucuccaccuaguggcuguccagu

SEQ ID NO: 3769123 - RNA, 11 nt, Human
ucuccaccuca

SEQ ID NO: 3769124 - RNA, 16 nt, Human
ucuccaccucagccuu

SEQ ID NO: 3769125 - RNA, 17 nt, Human
ucuccaccucagccuug

SEQ ID NO: 3769126 - RNA, 13 nt, Human
ucuccacuccaga

SEQ ID NO: 3769127 - RNA, 19 nt, Human
ucuccacugugcacaccca

SEQ ID NO: 3769128 - RNA, 17 nt, Human
ucuccacuuucagcugu

SEQ ID NO: 3769129 - RNA, 15 nt, Human
ucuccagacccccac

SEQ ID NO: 3769130 - RNA, 20 nt, Human
ucuccagacccccaccccuu

SEQ ID NO: 3769131 - RNA, 15 nt, Human
ucuccagauguuucc

SEQ ID NO: 3769132 - RNA, 18 nt, Human
ucuccagauguuuccaga

SEQ ID NO: 3769133 - RNA, 16 nt, Human
ucuccagauuuuuaau

SEQ ID NO: 3769134 - RNA, 14 nt, Human
ucuccagcccacgu

SEQ ID NO: 3769135 - RNA, 13 nt, Human
ucuccagccccug

SEQ ID NO: 3769136 - RNA, 22 nt, Human
ucuccagccccuucucagaauc

SEQ ID NO: 3769137 - RNA, 22 nt, Human
ucuccagccucagcccccugcu

SEQ ID NO: 3769138 - RNA, 23 nt, Human
ucuccagccucagcccccugcuu

SEQ ID NO: 3769139 - RNA, 14 nt, Human
ucuccagccuggac

SEQ ID NO: 3769140 - RNA, 15 nt, Human
ucuccagccuggacc

SEQ ID NO: 3769141 - RNA, 22 nt, Human
ucuccagccuggacccccagcu

SEQ ID NO: 3769142 - RNA, 18 nt, Human
ucuccagcggcccuguca

SEQ ID NO: 3769143 - RNA, 22 nt, Human
ucuccagcuauaacaguaggga

SEQ ID NO: 3769144 - RNA, 17 nt, Human
ucuccagcucagaaccc

SEQ ID NO: 3769145 - RNA, 14 nt, Human
ucuccagcugacua

SEQ ID NO: 3769146 - RNA, 15 nt, Human
ucuccagcugcugag

SEQ ID NO: 3769147 - RNA, 17 nt, Human
ucuccagcugggcucug

SEQ ID NO: 3769148 - RNA, 14 nt, Human
ucuccaggaccaau

SEQ ID NO: 3769149 - RNA, 13 nt, Human
ucuccaggaucca

SEQ ID NO: 3769150 - RNA, 17 nt, Human
ucuccaggcaccaucuc

SEQ ID NO: 3769151 - RNA, 19 nt, Human
ucuccaggcaccaucuccc

SEQ ID NO: 3769152 - RNA, 22 nt, Human
ucuccaggggcugcuuccuccu

SEQ ID NO: 3769153 - RNA, 18 nt, Human
ucuccagggucagaaaca

SEQ ID NO: 3769154 - RNA, 22 nt, Human
ucuccauaaccccacccuugcc

SEQ ID NO: 3769155 - RNA, 23 nt, Human
ucuccauaaccccacccuugccc

SEQ ID NO: 3769156 - RNA, 13 nt, Human
ucuccauccacau

SEQ ID NO: 3769157 - RNA, 20 nt, Human
ucucucugacucucaaaucu

SEQ ID NO: 3769158 - RNA, 21 nt, Human
ucucucugacucucaaaucuu

SEQ ID NO: 3769159 - RNA, 18 nt, Human
ucucucugcagcugccgg

SEQ ID NO: 3769160 - RNA, 13 nt, Human
ucucucuggcccu

SEQ ID NO: 3769161 - RNA, 13 nt, Human
ucucucuguugug

SEQ ID NO: 3769162 - RNA, 16 nt, Human
ucucucuucagacucu

SEQ ID NO: 3769163 - RNA, 16 nt, Human
ucucucuucucagagu

SEQ ID NO: 3769164 - RNA, 16 nt, Human
ucucucuucugcucca

SEQ ID NO: 3769165 - RNA, 22 nt, Human
ucucucuuguucuuacuuuccu

SEQ ID NO: 3769166 - RNA, 20 nt, Human
ucucucuuugcauggauuuc

SEQ ID NO: 3769167 - RNA, 14 nt, Human
ucucugaaagugug

SEQ ID NO: 3769168 - RNA, 12 nt, Human
ucucugaacaca

SEQ ID NO: 3769169 - RNA, 20 nt, Human
ucucugaacacaggcagcuu

SEQ ID NO: 3769170 - RNA, 11 nt, Human
ucucugaaccc

SEQ ID NO: 3769171 - RNA, 23 nt, Human
ucucugaagaguggguuucacaa

SEQ ID NO: 3769172 - RNA, 12 nt, Human
ucucugaagcau

SEQ ID NO: 3769173 - RNA, 13 nt, Human
ucucugaagcaug

SEQ ID NO: 3769174 - RNA, 16 nt, Human
ucucugaagcauguuu

SEQ ID NO: 3769175 - RNA, 23 nt, Human
ucucugaaggaggccaccuccua

SEQ ID NO: 3769176 - RNA, 16 nt, Human
ucucugaagggaggug

SEQ ID NO: 3769177 - RNA, 14 nt, Human
ucucugaauccuaa

SEQ ID NO: 3769178 - RNA, 15 nt, Human
ucucugaaugcccca

SEQ ID NO: 3769179 - RNA, 14 nt, Human
ucucugacuucugc

SEQ ID NO: 3769180 - RNA, 17 nt, Human
ucucugacuucugccug

SEQ ID NO: 3769181 - RNA, 19 nt, Human
ucucugagcuccaguggaa

SEQ ID NO: 3769182 - RNA, 16 nt, Human
ucucugagcugugcag

SEQ ID NO: 3769183 - RNA, 18 nt, Human
ucucugaggaagcugggg

SEQ ID NO: 3769184 - RNA, 21 nt, Human
ucucugaggggcuaccaggaa

SEQ ID NO: 3769185 - RNA, 15 nt, Human
ucucugaugcagcuu

SEQ ID NO: 3769186 - RNA, 20 nt, Human
ucucugauucccugauuuaa

SEQ ID NO: 3769187 - RNA, 19 nt, Human
ucucugcaaacugccuucu

SEQ ID NO: 3769188 - RNA, 11 nt, Human
ucucugcaccc

SEQ ID NO: 3769189 - RNA, 20 nt, Human
ucucugcagccagcccagcc

SEQ ID NO: 3769190 - RNA, 12 nt, Human
ucucugcagcug

SEQ ID NO: 3769191 - RNA, 15 nt, Human
ucucugcagcugccg

SEQ ID NO: 3769192 - RNA, 13 nt, Human
ucucugcaggucc

SEQ ID NO: 3769193 - RNA, 14 nt, Human
ucucugcagguccc

SEQ ID NO: 3769194 - RNA, 20 nt, Human
ucucugcaggucccuaauaa

SEQ ID NO: 3769195 - RNA, 18 nt, Human
ucucugcaucuacuccca

SEQ ID NO: 3769196 - RNA, 21 nt, Human
ucucugcaucuacucccaagu

SEQ ID NO: 3769197 - RNA, 17 nt, Human
ucucugcaucugaccac

SEQ ID NO: 3769198 - RNA, 21 nt, Human
ucucugcauuuuucugcagaa

SEQ ID NO: 3769199 - RNA, 15 nt, Human
ucucugccagugaca

SEQ ID NO: 3769200 - RNA, 21 nt, Human
ucucugccagugacagacagg

SEQ ID NO: 3769201 - RNA, 14 nt, Human
ucucugccauccuu

SEQ ID NO: 3769202 - RNA, 12 nt, Human
ucucugcccaac

SEQ ID NO: 3769203 - RNA, 13 nt, Human
ucucugcccaacc

SEQ ID NO: 3769204 - RNA, 15 nt, Human
ucucugcccagcuuu

SEQ ID NO: 3769205 - RNA, 14 nt, Human
ucucugcccauucc

SEQ ID NO: 3769206 - RNA, 15 nt, Human
ucucugcccauuccc

SEQ ID NO: 3769207 - RNA, 16 nt, Human
ucucugcccuccaaga

SEQ ID NO: 3769208 - RNA, 12 nt, Human
ucucugcccugu

SEQ ID NO: 3769209 - RNA, 14 nt, Human
ucucugcccugugu

SEQ ID NO: 3769210 - RNA, 20 nt, Human
ucucugcccuugaucagccc

SEQ ID NO: 3769211 - RNA, 22 nt, Human
ucucugcccuugaucagcccca

SEQ ID NO: 3769212 - RNA, 16 nt, Human
ucucugccgcuaccuc

SEQ ID NO: 3769213 - RNA, 22 nt, Human
ucucugccgcuaccucccuccc

SEQ ID NO: 3769214 - RNA, 21 nt, Human
ucucugccggcucuuuccuug

SEQ ID NO: 3769215 - RNA, 23 nt, Human
ucucugccucccucacccugagc

SEQ ID NO: 3769216 - RNA, 18 nt, Human
ucucugccugugagccag

SEQ ID NO: 3769217 - RNA, 15 nt, Human
ucucugccuugccuu

SEQ ID NO: 3769218 - RNA, 11 nt, Human
ucucugcucca

SEQ ID NO: 3769219 - RNA, 13 nt, Human
ucucugcuccacc

SEQ ID NO: 3769220 - RNA, 14 nt, Human
ucucugcuccacca

SEQ ID NO: 3769221 - RNA, 14 nt, Human
ucucugcuggccca

SEQ ID NO: 3769222 - RNA, 19 nt, Human
ucucugcuggcccagccaa

SEQ ID NO: 3769223 - RNA, 18 nt, Human
ucucugcuugagucaggu

SEQ ID NO: 3769224 - RNA, 15 nt, Human
ucucuggcacuuuga

SEQ ID NO: 3769225 - RNA, 17 nt, Human
ucucuggccucccaccc

SEQ ID NO: 3769226 - RNA, 18 nt, Human
ucucuggccucccacccg

SEQ ID NO: 3769227 - RNA, 19 nt, Human
ucucuggccuucggccucc

SEQ ID NO: 3769228 - RNA, 22 nt, Human
ucucuggccuucggccuccauc

SEQ ID NO: 3769229 - RNA, 23 nt, Human
ucucuggccuucggccuccaucc

SEQ ID NO: 3769230 - RNA, 16 nt, Human
ucucuggcgacaguuu

SEQ ID NO: 3769231 - RNA, 20 nt, Human
ucucuggcuguaaggcucua

SEQ ID NO: 3769232 - RNA, 17 nt, Human
ucucugggagaaaauca

SEQ ID NO: 3769233 - RNA, 13 nt, Human
ucucugggcugga

SEQ ID NO: 3769234 - RNA, 17 nt, Human
ucucugggcuggaugag

SEQ ID NO: 3769235 - RNA, 21 nt, Human
ucucugggcuuggggcuuccu

SEQ ID NO: 3769236 - RNA, 16 nt, Human
ucucuggggcaggcug

SEQ ID NO: 3769237 - RNA, 18 nt, Human
ucucuggggccacacaga

SEQ ID NO: 3769238 - RNA, 16 nt, Human
ucucugggggcugagg

SEQ ID NO: 3769239 - RNA, 13 nt, Human
ucucugguccgga

SEQ ID NO: 3769240 - RNA, 21 nt, Human
ucucugguuccuccccuccuc

SEQ ID NO: 3769241 - RNA, 22 nt, Human
ucucuguaauaaacucauuucu

SEQ ID NO: 3769242 - RNA, 21 nt, Human
ucucuguacuuuucauucucu

SEQ ID NO: 3769243 - RNA, 19 nt, Human
ucucuguagggaacucugg

SEQ ID NO: 3769244 - RNA, 16 nt, Human
ucucuguauaaacauu

SEQ ID NO: 3769245 - RNA, 21 nt, Human
ucucuguauaaacauuaaaug

SEQ ID NO: 3769246 - RNA, 22 nt, Human
ucucuguauaaacauuaaaugu

SEQ ID NO: 3769247 - RNA, 22 nt, Human
ucucuguccagcagucacuucg

SEQ ID NO: 3769248 - RNA, 15 nt, Human
ucucugucccauucc

SEQ ID NO: 3769249 - RNA, 14 nt, Human
ucucugucccuugc

SEQ ID NO: 3769250 - RNA, 15 nt, Human
ucucugucccuugcu

SEQ ID NO: 3769251 - RNA, 15 nt, Human
ucucuguccgagugu

SEQ ID NO: 3769252 - RNA, 15 nt, Human
ucucugucucaucca

SEQ ID NO: 3769253 - RNA, 16 nt, Human
ucucugucucauccau

SEQ ID NO: 3769254 - RNA, 18 nt, Human
ucucugugaccugccccg

SEQ ID NO: 3769255 - RNA, 19 nt, Human
ucucugugagaagguuuau

SEQ ID NO: 3769256 - RNA, 19 nt, Human
ucucugugagacucgagaa

SEQ ID NO: 3769257 - RNA, 19 nt, Human
ucucugugcuucaauuaau

SEQ ID NO: 3769258 - RNA, 15 nt, Human
ucucugugucuaaga

SEQ ID NO: 3769259 - RNA, 17 nt, Human
ucucugugucuaagauu

SEQ ID NO: 3769260 - RNA, 17 nt, Human
ucucuguucauuuccuc

SEQ ID NO: 3769261 - RNA, 14 nt, Human
ucucuguuccauag

SEQ ID NO: 3769262 - RNA, 15 nt, Human
ucucuuacccuucug

SEQ ID NO: 3769263 - RNA, 19 nt, Human
ucucuuagcuccccuccaa

SEQ ID NO: 3769264 - RNA, 16 nt, Human
ucucuuaucuuacgaa

SEQ ID NO: 3769265 - RNA, 20 nt, Human
ucucuuauggauguccccag

SEQ ID NO: 3769266 - RNA, 18 nt, Human
ucucuucacagucacauu

SEQ ID NO: 3769267 - RNA, 13 nt, Human
ucucuucagguuc

SEQ ID NO: 3769268 - RNA, 19 nt, Human
ucucuucauuauucucugc

SEQ ID NO: 3769269 - RNA, 13 nt, Human
ucucuuccccucu

SEQ ID NO: 3769270 - RNA, 17 nt, Human
ucucuuccccucucaga

SEQ ID NO: 3769271 - RNA, 13 nt, Human
ucucuuccuaucc

SEQ ID NO: 3769272 - RNA, 22 nt, Human
ucucuuccucuucccccaagau

SEQ ID NO: 3769273 - RNA, 15 nt, Human
ucucuuccugccccu

SEQ ID NO: 3769274 - RNA, 16 nt, Human
ucucuuccugccccuc

SEQ ID NO: 3769275 - RNA, 14 nt, Human
ucucuucucagagu

SEQ ID NO: 3769276 - RNA, 17 nt, Human
ucucuucucagaguggu

SEQ ID NO: 3769277 - RNA, 13 nt, Human
ucucuucuccacu

SEQ ID NO: 3769278 - RNA, 16 nt, Human
ucucuucucccagaau

SEQ ID NO: 3769279 - RNA, 21 nt, Human
ucucuucucccagaaucccag

SEQ ID NO: 3769280 - RNA, 12 nt, Human
ucucuucucucc

SEQ ID NO: 3769281 - RNA, 23 nt, Human
ucucuucucuccagcugacuaaa

SEQ ID NO: 3769282 - RNA, 20 nt, Human
ucucuucugaauaaagcaau

SEQ ID NO: 3769283 - RNA, 21 nt, Human
ucucuucugagcuauuucauc

SEQ ID NO: 3769284 - RNA, 16 nt, Human
ucucuucugcuccacc

SEQ ID NO: 3769285 - RNA, 18 nt, Human
ucucuucuggguuccuuc

SEQ ID NO: 3769286 - RNA, 14 nt, Human
ucucuucuguguuu

SEQ ID NO: 3769287 - RNA, 18 nt, Human
ucucuucuuaauguacau

SEQ ID NO: 3769288 - RNA, 12 nt, Human
ucucuucuuguu

SEQ ID NO: 3769289 - RNA, 18 nt, Human
ucucuucuuuuggcuucc

SEQ ID NO: 3769290 - RNA, 22 nt, Human
ucucuugagggagcuuagccaa

SEQ ID NO: 3769291 - RNA, 14 nt, Human
ucucuugaguuugu

SEQ ID NO: 3769292 - RNA, 15 nt, Human
ucucuugaguuuguc

SEQ ID NO: 3769293 - RNA, 12 nt, Human
ucucuugauuuu

SEQ ID NO: 3769294 - RNA, 12 nt, Human
ucucuugcaccc

SEQ ID NO: 3769295 - RNA, 13 nt, Human
ucucuugcacccg

SEQ ID NO: 3769296 - RNA, 17 nt, Human
ucucuugcacccgccuc

SEQ ID NO: 3769297 - RNA, 18 nt, Human
ucucuuggcuggcuuccu

SEQ ID NO: 3769298 - RNA, 16 nt, Human
ucucuugggaacugaa

SEQ ID NO: 3769299 - RNA, 16 nt, Human
ucucuugguccugcug

SEQ ID NO: 3769300 - RNA, 17 nt, Human
ucucuugguccugcugc

SEQ ID NO: 3769301 - RNA, 17 nt, Human
ucucuugguuuccuucc

SEQ ID NO: 3769302 - RNA, 21 nt, Human
ucucuuuaaaaggaaagaaaa

SEQ ID NO: 3769303 - RNA, 14 nt, Human
ucuugucucaaugc

SEQ ID NO: 3769304 - RNA, 12 nt, Human
ucuugucucccc

SEQ ID NO: 3769305 - RNA, 12 nt, Human
ucuugucucugg

SEQ ID NO: 3769306 - RNA, 15 nt, Human
ucuugucucugggcu

SEQ ID NO: 3769307 - RNA, 16 nt, Human
ucuugucugauuucuu

SEQ ID NO: 3769308 - RNA, 19 nt, Human
ucuugucuuccuauuucag

SEQ ID NO: 3769309 - RNA, 17 nt, Human
ucuugugaaaauaauug

SEQ ID NO: 3769310 - RNA, 15 nt, Human
ucuugugaaggcagg

SEQ ID NO: 3769311 - RNA, 16 nt, Human
ucuugugaaggccaug

SEQ ID NO: 3769312 - RNA, 18 nt, Human
ucuugugacuagugcuga

SEQ ID NO: 3769313 - RNA, 19 nt, Human
ucuugugacuagugcugaa

SEQ ID NO: 3769314 - RNA, 21 nt, Human
ucuugugacuagugcugaagc

SEQ ID NO: 3769315 - RNA, 23 nt, Human
ucuugugaggaaagucauuggcu

SEQ ID NO: 3769316 - RNA, 14 nt, Human
ucuugugcuagaau

SEQ ID NO: 3769317 - RNA, 18 nt, Human
ucuugugcuagaauacuu

SEQ ID NO: 3769318 - RNA, 21 nt, Human
ucuugugcuagaauacuuuuu

SEQ ID NO: 3769319 - RNA, 22 nt, Human
ucuugugcuggauggagcccag

SEQ ID NO: 3769320 - RNA, 21 nt, Human
ucuugugcuuuuccuauuugu

SEQ ID NO: 3769321 - RNA, 22 nt, Human
ucuuguggaagugcaucuacuu

SEQ ID NO: 3769322 - RNA, 19 nt, Human
ucuugugguuauaacuuaa

SEQ ID NO: 3769323 - RNA, 20 nt, Human
ucuuguuaauauucuuucaa

SEQ ID NO: 3769324 - RNA, 15 nt, Human
ucuuguuagaaaaca

SEQ ID NO: 3769325 - RNA, 17 nt, Human
ucuuguuagaaaacaaa

SEQ ID NO: 3769326 - RNA, 15 nt, Human
ucuuguucaggaaaa

SEQ ID NO: 3769327 - RNA, 20 nt, Human
ucuuguucugagauucaaua

SEQ ID NO: 3769328 - RNA, 13 nt, Human
ucuuguucuguca

SEQ ID NO: 3769329 - RNA, 13 nt, Human
ucuuguugagccg

SEQ ID NO: 3769330 - RNA, 16 nt, Human
ucuuguugauaaaaau

SEQ ID NO: 3769331 - RNA, 21 nt, Human
ucuuguugcucaaaaaaugag

SEQ ID NO: 3769332 - RNA, 22 nt, Human
ucuuguugcucaaaaaaugagc

SEQ ID NO: 3769333 - RNA, 17 nt, Human
ucuuguuggugcacagc

SEQ ID NO: 3769334 - RNA, 20 nt, Human
ucuuguuuauaccuuugccu

SEQ ID NO: 3769335 - RNA, 14 nt, Human
ucuuguuuucaguu

SEQ ID NO: 3769336 - RNA, 13 nt, Human
ucuuguuuugaaa

SEQ ID NO: 3769337 - RNA, 17 nt, Human
ucuuguuuuguuugucu

SEQ ID NO: 3769338 - RNA, 17 nt, Human
ucuuguuuuuaaguuug

SEQ ID NO: 3769339 - RNA, 17 nt, Human
ucuuguuuuuauuaauu

SEQ ID NO: 3769340 - RNA, 20 nt, Human
ucuuguuuuuauuaauuuau

SEQ ID NO: 3769341 - RNA, 17 nt, Human
ucuuuaaaagaaugacu

SEQ ID NO: 3769342 - RNA, 14 nt, Human
ucuuuaaaagagag

SEQ ID NO: 3769343 - RNA, 16 nt, Human
ucuuuaaaaggaaaga

SEQ ID NO: 3769344 - RNA, 17 nt, Human
ucuuuaaaauacacacu

SEQ ID NO: 3769345 - RNA, 21 nt, Human
ucuuuaaaauuuaaguaucuu

SEQ ID NO: 3769346 - RNA, 23 nt, Human
ucuuuaaacaguauuucauugcc

SEQ ID NO: 3769347 - RNA, 13 nt, Human
ucuuuaaagaugu

SEQ ID NO: 3769348 - RNA, 14 nt, Human
ucuuuaaaggccca

SEQ ID NO: 3769349 - RNA, 16 nt, Human
ucuuuaaaucauuuua

SEQ ID NO: 3769350 - RNA, 11 nt, Human
ucuuuaaaugu

SEQ ID NO: 3769351 - RNA, 12 nt, Human
ucuuuaaauguu

SEQ ID NO: 3769352 - RNA, 17 nt, Human
ucuuuaaccuuguauaa

SEQ ID NO: 3769353 - RNA, 20 nt, Human
ucuuuaacuuaauugcuaug

SEQ ID NO: 3769354 - RNA, 14 nt, Human
ucuuuaagaaagua

SEQ ID NO: 3769355 - RNA, 18 nt, Human
ucuuuaagggcaugccuu

SEQ ID NO: 3769356 - RNA, 19 nt, Human
ucuuuaagggcaugccuug

SEQ ID NO: 3769357 - RNA, 22 nt, Human
ucuuuaagggcaugccuugugc

SEQ ID NO: 3769358 - RNA, 14 nt, Human
ucuuuaaucacuua

SEQ ID NO: 3769359 - RNA, 15 nt, Human
ucuuuaaucuucagu

SEQ ID NO: 3769360 - RNA, 17 nt, Human
ucuuuaaugauuccuau

SEQ ID NO: 3769361 - RNA, 20 nt, Human
ucuuuaaugauuccuauaaa

SEQ ID NO: 3769362 - RNA, 20 nt, Human
ucuuuaauuaaaaccuggga

SEQ ID NO: 3769363 - RNA, 18 nt, Human
ucuuuaauuuuggaauuu

SEQ ID NO: 3769364 - RNA, 16 nt, Human
ucuuuacccuugagcc

SEQ ID NO: 3769365 - RNA, 13 nt, Human
ucuuuaccugaga

SEQ ID NO: 3769366 - RNA, 23 nt, Human
ucuuuacuccucacacuuacugu

SEQ ID NO: 3769367 - RNA, 16 nt, Human
ucuuuagagaacugaa

SEQ ID NO: 3769368 - RNA, 20 nt, Human
ucuuuagagaacugaaaaga

SEQ ID NO: 3769369 - RNA, 16 nt, Human
ucuuuagaguuagacu

SEQ ID NO: 3769370 - RNA, 18 nt, Human
ucuuuagaguuagacugu

SEQ ID NO: 3769371 - RNA, 20 nt, Human
ucuuuagauagcccuguccu

SEQ ID NO: 3769372 - RNA, 21 nt, Human
ucuuuagauagcccuguccug

SEQ ID NO: 3769373 - RNA, 17 nt, Human
ucuuuaggauugugaug

SEQ ID NO: 3769374 - RNA, 12 nt, Human
ucuuuaguuuuu

SEQ ID NO: 3769375 - RNA, 12 nt, Human
ucuuuauaagaa

SEQ ID NO: 3769376 - RNA, 16 nt, Human
ucuuuauaagaaagcc

SEQ ID NO: 3769377 - RNA, 16 nt, Human
ucuuuauacuguaauu

SEQ ID NO: 3769378 - RNA, 21 nt, Human
ucuuuauauacaauaauggaa

SEQ ID NO: 3769379 - RNA, 14 nt, Human
ucuuuaugcuugca

SEQ ID NO: 3769380 - RNA, 21 nt, Human
ucuuuauuaaauguagaaagu

SEQ ID NO: 3769381 - RNA, 15 nt, Human
ucuuuauuccuaguu

SEQ ID NO: 3769382 - RNA, 14 nt, Human
ucuuuauucuuuuu

SEQ ID NO: 3769383 - RNA, 14 nt, Human
ucuuuauugaaauu

SEQ ID NO: 3769384 - RNA, 13 nt, Human
ucuuuauugagaa

SEQ ID NO: 3769385 - RNA, 14 nt, Human
ucuuuauugucugu

SEQ ID NO: 3769386 - RNA, 12 nt, Human
ucuuuauuuuga

SEQ ID NO: 3769387 - RNA, 18 nt, Human
ucuuuauuuuguguaaaa

SEQ ID NO: 3769388 - RNA, 23 nt, Human
ucuuucaaaaccuuuugaaauua

SEQ ID NO: 3769389 - RNA, 17 nt, Human
ucuuucaacucauugca

SEQ ID NO: 3769390 - RNA, 15 nt, Human
ucuuucaacuugcau

SEQ ID NO: 3769391 - RNA, 18 nt, Human
ucuuucaacuugcaucca

SEQ ID NO: 3769392 - RNA, 14 nt, Human
ucuuucaagaauga

SEQ ID NO: 3769393 - RNA, 20 nt, Human
ucuuucaagggcuuuccugu

SEQ ID NO: 3769394 - RNA, 20 nt, Human
ucuuucaagugaaucuaaaa

SEQ ID NO: 3769395 - RNA, 21 nt, Human
ucuuucaagugaaucuaaaag

SEQ ID NO: 3769396 - RNA, 21 nt, Human
ucuuucaauaaacuaaagaaa

SEQ ID NO: 3769397 - RNA, 18 nt, Human
ucuuucaauacagauaua

SEQ ID NO: 3769398 - RNA, 14 nt, Human
ucuuucaauucugu

SEQ ID NO: 3769399 - RNA, 15 nt, Human
ucuuucacaaaaaag

SEQ ID NO: 3769400 - RNA, 14 nt, Human
ucuuucacagcucc

SEQ ID NO: 3769401 - RNA, 18 nt, Human
ucuuucacagcuccuccc

SEQ ID NO: 3769402 - RNA, 23 nt, Human
ucuuucacccuuuucuguuugcu

SEQ ID NO: 3769403 - RNA, 11 nt, Human
ucuuucagaaa

SEQ ID NO: 3769404 - RNA, 16 nt, Human
ucuuucagaaaacaga

SEQ ID NO: 3769405 - RNA, 18 nt, Human
ucuuucagacuugccaug

SEQ ID NO: 3769406 - RNA, 21 nt, Human
ucuuucagcaagauaaacauu

SEQ ID NO: 3769407 - RNA, 20 nt, Human
ucuuucagccaagaauucuu

SEQ ID NO: 3769408 - RNA, 14 nt, Human
ucuuucagcuccug

SEQ ID NO: 3769409 - RNA, 13 nt, Human
ucuuucauccacu

SEQ ID NO: 3769410 - RNA, 23 nt, Human
ucuuucauccacuagugcaaauc

SEQ ID NO: 3769411 - RNA, 16 nt, Human
ucuuucauuucuucua

SEQ ID NO: 3769412 - RNA, 21 nt, Human
ucuuucauuugcuuuggaagu

SEQ ID NO: 3769413 - RNA, 14 nt, Human
ucuuuccaaaguac

SEQ ID NO: 3769414 - RNA, 17 nt, Human
ucuuuccaaaguacacu

SEQ ID NO: 3769415 - RNA, 14 nt, Human
ucuuuccaaauuau

SEQ ID NO: 3769416 - RNA, 20 nt, Human
ucuuuccaaauuauuucuua

SEQ ID NO: 3769417 - RNA, 22 nt, Human
ucuuuccacggagccacuccuc

SEQ ID NO: 3769418 - RNA, 21 nt, Human
ucuuuccacuccuccuagcca

SEQ ID NO: 3769419 - RNA, 13 nt, Human
ucuuuccacucug

SEQ ID NO: 3769420 - RNA, 23 nt, Human
ucuuuccacucuggauucagccu

SEQ ID NO: 3769421 - RNA, 21 nt, Human
ucuuuccaguggaucauaaga

SEQ ID NO: 3769422 - RNA, 16 nt, Human
ucuuuccauaauaaaa

SEQ ID NO: 3769423 - RNA, 19 nt, Human
ucuuuccauuaugauucuu

SEQ ID NO: 3769424 - RNA, 18 nt, Human
ucuuucccauggggaggg

SEQ ID NO: 3769425 - RNA, 14 nt, Human
ucuuucccuccuug

SEQ ID NO: 3769426 - RNA, 23 nt, Human
ucuuuccuaaggcugcaagguuu

SEQ ID NO: 3769427 - RNA, 14 nt, Human
ucuuuccuauuuca

SEQ ID NO: 3769428 - RNA, 24 nt, Human
ucuuuccuauuucaguguuaccug

SEQ ID NO: 3769429 - RNA, 14 nt, Human
ucuuuccuccuucc

SEQ ID NO: 3769430 - RNA, 15 nt, Human
ucuuuccuccuucca

SEQ ID NO: 3769431 - RNA, 16 nt, Human
ucuuuccugaggcugg

SEQ ID NO: 3769432 - RNA, 17 nt, Human
ucuuuccugaggcuggg

SEQ ID NO: 3769433 - RNA, 13 nt, Human
ucuuuccuugcuc

SEQ ID NO: 3769434 - RNA, 18 nt, Human
ucuuucuaaugugugaau

SEQ ID NO: 3769435 - RNA, 16 nt, Human
ucuuucuacucugaac

SEQ ID NO: 3769436 - RNA, 19 nt, Human
ucuuucuacucugaacuaa

SEQ ID NO: 3769437 - RNA, 16 nt, Human
ucuuucuaguggucuu

SEQ ID NO: 3769438 - RNA, 17 nt, Human
ucuuucuaguggucuuu

SEQ ID NO: 3769439 - RNA, 20 nt, Human
ucuuucuaguggucuuugua

SEQ ID NO: 3769440 - RNA, 21 nt, Human
ucuuucuaguggucuuuguaa

SEQ ID NO: 3769441 - RNA, 22 nt, Human
ucuuucuaguggucuuuguaag

SEQ ID NO: 3769442 - RNA, 22 nt, Human
ucuuucuaguucagcugcccca

SEQ ID NO: 3769443 - RNA, 15 nt, Human
ucuuucucuccuuuc

SEQ ID NO: 3769444 - RNA, 15 nt, Human
ucuuucucugaggac

SEQ ID NO: 3769445 - RNA, 12 nt, Human
ucuuucucugcc

SEQ ID NO: 3769446 - RNA, 13 nt, Human
ucuuucucugcca

SEQ ID NO: 3769447 - RNA, 16 nt, Human
ucuuucucugccagug

SEQ ID NO: 3769448 - RNA, 17 nt, Human
ugaaacacagcuguucu

SEQ ID NO: 3769449 - RNA, 16 nt, Human
ugaaacaccuucucug

SEQ ID NO: 3769450 - RNA, 18 nt, Human
ugaaacaccuucucugga

SEQ ID NO: 3769451 - RNA, 15 nt, Human
ugaaacacgaaacuu

SEQ ID NO: 3769452 - RNA, 20 nt, Human
ugaaacacgaaacuuguuau

SEQ ID NO: 3769453 - RNA, 13 nt, Human
ugaaacagacuug

SEQ ID NO: 3769454 - RNA, 14 nt, Human
ugaaacagacuugu

SEQ ID NO: 3769455 - RNA, 16 nt, Human
ugaaacagcugccuua

SEQ ID NO: 3769456 - RNA, 17 nt, Human
ugaaacagcugccuuag

SEQ ID NO: 3769457 - RNA, 12 nt, Human
ugaaacaugcuu

SEQ ID NO: 3769458 - RNA, 16 nt, Human
ugaaacauugcuuuua

SEQ ID NO: 3769459 - RNA, 19 nt, Human
ugaaacauugcuuuuaaaa

SEQ ID NO: 3769460 - RNA, 20 nt, Human
ugaaaccaguguuagggaag

SEQ ID NO: 3769461 - RNA, 11 nt, Human
ugaaacccagu

SEQ ID NO: 3769462 - RNA, 19 nt, Human
ugaaaccccaaacagugac

SEQ ID NO: 3769463 - RNA, 16 nt, Human
ugaaacccccacacac

SEQ ID NO: 3769464 - RNA, 17 nt, Human
ugaaacccccacacaca

SEQ ID NO: 3769465 - RNA, 18 nt, Human
ugaaacccugucucuacu

SEQ ID NO: 3769466 - RNA, 17 nt, Human
ugaaaccuuauuuuuuc

SEQ ID NO: 3769467 - RNA, 19 nt, Human
ugaaaccuuuuuuaagauu

SEQ ID NO: 3769468 - RNA, 21 nt, Human
ugaaaccuuuuuuaagauuuu

SEQ ID NO: 3769469 - RNA, 19 nt, Human
ugaaacuaaagcaauagaa

SEQ ID NO: 3769470 - RNA, 14 nt, Human
ugaaacuaaugaaa

SEQ ID NO: 3769471 - RNA, 19 nt, Human
ugaaacuauauuuugucau

SEQ ID NO: 3769472 - RNA, 16 nt, Human
ugaaacucacaaauga

SEQ ID NO: 3769473 - RNA, 17 nt, Human
ugaaacucacaaaugau

SEQ ID NO: 3769474 - RNA, 13 nt, Human
ugaaacuccaccu

SEQ ID NO: 3769475 - RNA, 17 nt, Human
ugaaacuccagaugcca

SEQ ID NO: 3769476 - RNA, 21 nt, Human
ugaaacugacuugcugugacu

SEQ ID NO: 3769477 - RNA, 22 nt, Human
ugaaacugagaugugaacacau

SEQ ID NO: 3769478 - RNA, 17 nt, Human
ugaaacuggauuaaacu

SEQ ID NO: 3769479 - RNA, 16 nt, Human
ugaaacuuacacacaa

SEQ ID NO: 3769480 - RNA, 21 nt, Human
ugaaacuuauuuuuuucugau

SEQ ID NO: 3769481 - RNA, 17 nt, Human
ugaaacuuguguaaaua

SEQ ID NO: 3769482 - RNA, 23 nt, Human
ugaaacuuguguaaauacaauuu

SEQ ID NO: 3769483 - RNA, 20 nt, Human
ugaaacuuguuucacugaaa

SEQ ID NO: 3769484 - RNA, 12 nt, Human
ugaaacuuugag

SEQ ID NO: 3769485 - RNA, 16 nt, Human
ugaaacuuugggaaaa

SEQ ID NO: 3769486 - RNA, 19 nt, Human
ugaaacuuugggaaaacau

SEQ ID NO: 3769487 - RNA, 22 nt, Human
ugaaacuuugggaaaacauguu

SEQ ID NO: 3769488 - RNA, 23 nt, Human
ugaaacuuugggaaaacauguua

SEQ ID NO: 3769489 - RNA, 13 nt, Human
ugaaagaaaauaa

SEQ ID NO: 3769490 - RNA, 13 nt, Human
ugaaagaaaauug

SEQ ID NO: 3769491 - RNA, 22 nt, Human
ugaaagaaacaguuaacuuuca

SEQ ID NO: 3769492 - RNA, 18 nt, Human
ugaaagaaaucauguuau

SEQ ID NO: 3769493 - RNA, 20 nt, Human
ugaaagaacauggacuugua

SEQ ID NO: 3769494 - RNA, 13 nt, Human
ugaaagaagaaaa

SEQ ID NO: 3769495 - RNA, 22 nt, Human
ugaaagaagaauguguuucaaa

SEQ ID NO: 3769496 - RNA, 22 nt, Human
ugaaagaauauauuuauuuaaa

SEQ ID NO: 3769497 - RNA, 17 nt, Human
ugaaagaccuucuccaa

SEQ ID NO: 3769498 - RNA, 22 nt, Human
ugaaagacugaagaaaguguag

SEQ ID NO: 3769499 - RNA, 18 nt, Human
ugaaagacuguacaaagu

SEQ ID NO: 3769500 - RNA, 15 nt, Human
ugaaagacuuccaaa

SEQ ID NO: 3769501 - RNA, 17 nt, Human
ugaaagacuuccaaaga

SEQ ID NO: 3769502 - RNA, 14 nt, Human
ugaaagagaaacac

SEQ ID NO: 3769503 - RNA, 23 nt, Human
ugaaagaggccaaacaggcccuc

SEQ ID NO: 3769504 - RNA, 11 nt, Human
ugaaagaugau

SEQ ID NO: 3769505 - RNA, 17 nt, Human
ugaaagaugauuugcaa

SEQ ID NO: 3769506 - RNA, 13 nt, Human
ugaaagauucaau

SEQ ID NO: 3769507 - RNA, 16 nt, Human
ugaaagcaaaaaugcu

SEQ ID NO: 3769508 - RNA, 17 nt, Human
ugaaagcaaaaaugcua

SEQ ID NO: 3769509 - RNA, 21 nt, Human
ugaaagcacaggagacacugu

SEQ ID NO: 3769510 - RNA, 23 nt, Human
ugaaagccagcugccgaccagag

SEQ ID NO: 3769511 - RNA, 13 nt, Human
ugaaagccaugga

SEQ ID NO: 3769512 - RNA, 18 nt, Human
ugaaagcccugagcuuuc

SEQ ID NO: 3769513 - RNA, 20 nt, Human
ugaaagcugagaacuccuga

SEQ ID NO: 3769514 - RNA, 18 nt, Human
ugaaagcugauuacuguc

SEQ ID NO: 3769515 - RNA, 17 nt, Human
ugaaagcugguggcaga

SEQ ID NO: 3769516 - RNA, 17 nt, Human
ugaaaggaaagaggcuc

SEQ ID NO: 3769517 - RNA, 14 nt, Human
ugaaaggaaagugc

SEQ ID NO: 3769518 - RNA, 18 nt, Human
ugaaaggaagcuccacug

SEQ ID NO: 3769519 - RNA, 18 nt, Human
ugaaaggcaaacauuuga

SEQ ID NO: 3769520 - RNA, 19 nt, Human
ugaaaggcaggccuauuuc

SEQ ID NO: 3769521 - RNA, 20 nt, Human
ugaaaggcaguagucauuuu

SEQ ID NO: 3769522 - RNA, 20 nt, Human
ugaaagggagcuaucaggaa

SEQ ID NO: 3769523 - RNA, 16 nt, Human
ugaaagguacuucaaa

SEQ ID NO: 3769524 - RNA, 15 nt, Human
ugaaagguuuacauu

SEQ ID NO: 3769525 - RNA, 14 nt, Human
ugaaaguacauuug

SEQ ID NO: 3769526 - RNA, 15 nt, Human
ugaaaguagggggcu

SEQ ID NO: 3769527 - RNA, 15 nt, Human
ugaaaguauaacuga

SEQ ID NO: 3769528 - RNA, 22 nt, Human
ugaaaguauaacugaguuaaau

SEQ ID NO: 3769529 - RNA, 17 nt, Human
ugaaaguauguuuuacu

SEQ ID NO: 3769530 - RNA, 19 nt, Human
ugaaagucaugaacacauc

SEQ ID NO: 3769531 - RNA, 16 nt, Human
ugaaaguccagaaacu

SEQ ID NO: 3769532 - RNA, 12 nt, Human
ugaaagucuguc

SEQ ID NO: 3769533 - RNA, 17 nt, Human
ugaaagucuguccuuga

SEQ ID NO: 3769534 - RNA, 21 nt, Human
ugaaagucuugugacuagugc

SEQ ID NO: 3769535 - RNA, 18 nt, Human
ugaaagugaauaaacuuc

SEQ ID NO: 3769536 - RNA, 11 nt, Human
ugaaagugacu

SEQ ID NO: 3769537 - RNA, 15 nt, Human
ugaaagugaugacau

SEQ ID NO: 3769538 - RNA, 14 nt, Human
ugaaagugcauuuu

SEQ ID NO: 3769539 - RNA, 20 nt, Human
ugaaagugcauuuuuguaaa

SEQ ID NO: 3769540 - RNA, 13 nt, Human
ugaaagugccuuu

SEQ ID NO: 3769541 - RNA, 14 nt, Human
ugaaagugccuuug

SEQ ID NO: 3769542 - RNA, 18 nt, Human
ugaaaguuguacaugaaa

SEQ ID NO: 3769543 - RNA, 16 nt, Human
ugaaaguuuuguaaaa

SEQ ID NO: 3769544 - RNA, 17 nt, Human
ugaaaguuuuguaaaag

SEQ ID NO: 3769545 - RNA, 17 nt, Human
ugaaauaaaacuggcuu

SEQ ID NO: 3769546 - RNA, 19 nt, Human
ugaaauaaaacuggcuuug

SEQ ID NO: 3769547 - RNA, 14 nt, Human
ugaaauaaaagcua

SEQ ID NO: 3769548 - RNA, 14 nt, Human
ugaaauaaaauaua

SEQ ID NO: 3769549 - RNA, 21 nt, Human
ugaaauaaagacccaggggga

SEQ ID NO: 3769550 - RNA, 16 nt, Human
ugaaauaacaaaaugg

SEQ ID NO: 3769551 - RNA, 17 nt, Human
ugaaauaacacagcagu

SEQ ID NO: 3769552 - RNA, 23 nt, Human
ugaaauaaccguaaagguuuauu

SEQ ID NO: 3769553 - RNA, 14 nt, Human
ugaaauaacuccuu

SEQ ID NO: 3769554 - RNA, 14 nt, Human
ugaaauaacuggaa

SEQ ID NO: 3769555 - RNA, 13 nt, Human
ugaaauaagagaa

SEQ ID NO: 3769556 - RNA, 14 nt, Human
ugaaauaagccaga

SEQ ID NO: 3769557 - RNA, 14 nt, Human
ugaaauaagcuauu

SEQ ID NO: 3769558 - RNA, 16 nt, Human
ugaaauaagcuauuug

SEQ ID NO: 3769559 - RNA, 14 nt, Human
ugaaauaauaaauc

SEQ ID NO: 3769560 - RNA, 13 nt, Human
ugaaauaaugugu

SEQ ID NO: 3769561 - RNA, 22 nt, Human
ugaaauaauguguaguucaugu

SEQ ID NO: 3769562 - RNA, 14 nt, Human
ugaaauaccagugu

SEQ ID NO: 3769563 - RNA, 21 nt, Human
ugaaauaccucauguuuauga

SEQ ID NO: 3769564 - RNA, 22 nt, Human
ugaaauaccucauguuuaugaa

SEQ ID NO: 3769565 - RNA, 23 nt, Human
ugaaauagacccacaagaggcag

SEQ ID NO: 3769566 - RNA, 21 nt, Human
ugaaauaggagggaaaccuuu

SEQ ID NO: 3769567 - RNA, 16 nt, Human
ugaaauagucugugug

SEQ ID NO: 3769568 - RNA, 17 nt, Human
ugaaauagucuguguga

SEQ ID NO: 3769569 - RNA, 18 nt, Human
ugaaauagucugugugaa

SEQ ID NO: 3769570 - RNA, 22 nt, Human
ugaaauagugguucuuggaaaa

SEQ ID NO: 3769571 - RNA, 22 nt, Human
ugaaauauauggucuaauguuu

SEQ ID NO: 3769572 - RNA, 23 nt, Human
ugaaauaucaucacguauguuau

SEQ ID NO: 3769573 - RNA, 17 nt, Human
ugaaauauccugcuuga

SEQ ID NO: 3769574 - RNA, 18 nt, Human
ugaaauaugcucuuuugu

SEQ ID NO: 3769575 - RNA, 21 nt, Human
ugaaauaugcucuuuuguuug

SEQ ID NO: 3769576 - RNA, 23 nt, Human
ugaaauauguauaacuuuaacuu

SEQ ID NO: 3769577 - RNA, 19 nt, Human
ugaaaucaaugcaagagug

SEQ ID NO: 3769578 - RNA, 17 nt, Human
ugaaaucaguaaacacu

SEQ ID NO: 3769579 - RNA, 17 nt, Human
ugaaaucauauuuggaa

SEQ ID NO: 3769580 - RNA, 18 nt, Human
ugaaaucuaggaaaauua

SEQ ID NO: 3769581 - RNA, 16 nt, Human
ugaaaucucagaauuc

SEQ ID NO: 3769582 - RNA, 19 nt, Human
ugaaaucucagaauuccuu

SEQ ID NO: 3769583 - RNA, 21 nt, Human
ugaaaucugucaagaguaguu

SEQ ID NO: 3769584 - RNA, 14 nt, Human
ugaaaugaaaacau

SEQ ID NO: 3769585 - RNA, 19 nt, Human
ugaaaugaaaacauguaau

SEQ ID NO: 3769586 - RNA, 13 nt, Human
ugaaaugaaauuu

SEQ ID NO: 3769587 - RNA, 15 nt, Human
ugaaaugaaauuuaa

SEQ ID NO: 3769588 - RNA, 16 nt, Human
ugaaaugaaauuuaaa

SEQ ID NO: 3769589 - RNA, 23 nt, Human
ugaaaugaaauuuaaacauuaaa

SEQ ID NO: 3769590 - RNA, 19 nt, Human
ugaaaugaccucaagaugu

SEQ ID NO: 3769591 - RNA, 21 nt, Human
ugaaaugagcaccuccauuaa

SEQ ID NO: 3769592 - RNA, 20 nt, Human
ugaagccgacucuggcccug

SEQ ID NO: 3769593 - RNA, 22 nt, Human
ugaagccugcguugguccagag

SEQ ID NO: 3769594 - RNA, 13 nt, Human
ugaagccugcucc

SEQ ID NO: 3769595 - RNA, 13 nt, Human
ugaagccuuuuga

SEQ ID NO: 3769596 - RNA, 16 nt, Human
ugaagccuuuugaaag

SEQ ID NO: 3769597 - RNA, 19 nt, Human
ugaagcuaauuauuuuaau

SEQ ID NO: 3769598 - RNA, 22 nt, Human
ugaagcuaauuauuuuaauuag

SEQ ID NO: 3769599 - RNA, 16 nt, Human
ugaagcucacuucugg

SEQ ID NO: 3769600 - RNA, 14 nt, Human
ugaagcugaaaaua

SEQ ID NO: 3769601 - RNA, 15 nt, Human
ugaagcugaaaauau

SEQ ID NO: 3769602 - RNA, 16 nt, Human
ugaagcugccugcuuu

SEQ ID NO: 3769603 - RNA, 19 nt, Human
ugaagcuguugugugaggu

SEQ ID NO: 3769604 - RNA, 16 nt, Human
ugaagcuuauuaaugc

SEQ ID NO: 3769605 - RNA, 20 nt, Human
ugaagcuuauuaaugcuaag

SEQ ID NO: 3769606 - RNA, 14 nt, Human
ugaagcuucaugca

SEQ ID NO: 3769607 - RNA, 21 nt, Human
ugaagcuucaugcacuuaaag

SEQ ID NO: 3769608 - RNA, 12 nt, Human
ugaagcuuccuu

SEQ ID NO: 3769609 - RNA, 15 nt, Human
ugaagcuuguguauc

SEQ ID NO: 3769610 - RNA, 14 nt, Human
ugaagcuuuauacg

SEQ ID NO: 3769611 - RNA, 23 nt, Human
ugaaggaaaaacacaagcaaaaa

SEQ ID NO: 3769612 - RNA, 12 nt, Human
ugaaggaaacag

SEQ ID NO: 3769613 - RNA, 16 nt, Human
ugaaggaaacaguuaa

SEQ ID NO: 3769614 - RNA, 21 nt, Human
ugaaggaaauaaaaaagucuc

SEQ ID NO: 3769615 - RNA, 23 nt, Human
ugaaggaaauaaaaaagucucua

SEQ ID NO: 3769616 - RNA, 22 nt, Human
ugaaggaagccaaauuuaucaa

SEQ ID NO: 3769617 - RNA, 22 nt, Human
ugaaggaauauauggcagaguu

SEQ ID NO: 3769618 - RNA, 22 nt, Human
ugaaggacauugcggacagcca

SEQ ID NO: 3769619 - RNA, 12 nt, Human
ugaaggacccuu

SEQ ID NO: 3769620 - RNA, 17 nt, Human
ugaaggacuaauagaaa

SEQ ID NO: 3769621 - RNA, 10 nt, Human
ugaaggacug

SEQ ID NO: 3769622 - RNA, 14 nt, Human
ugaaggacugugac

SEQ ID NO: 3769623 - RNA, 20 nt, Human
ugaaggagagcccuucauuu

SEQ ID NO: 3769624 - RNA, 18 nt, Human
ugaaggaggccaccuccu

SEQ ID NO: 3769625 - RNA, 21 nt, Human
ugaaggaggccaccuccuaaa

SEQ ID NO: 3769626 - RNA, 20 nt, Human
ugaaggaggcuccaggcagc

SEQ ID NO: 3769627 - RNA, 22 nt, Human
ugaaggaggcuccaggcagcac

SEQ ID NO: 3769628 - RNA, 18 nt, Human
ugaaggaggugagagaag

SEQ ID NO: 3769629 - RNA, 17 nt, Human
ugaaggaggugagggau

SEQ ID NO: 3769630 - RNA, 21 nt, Human
ugaaggauuauggaaaaauaa

SEQ ID NO: 3769631 - RNA, 22 nt, Human
ugaaggauuauggaaaaauaaa

SEQ ID NO: 3769632 - RNA, 15 nt, Human
ugaaggcagaaagca

SEQ ID NO: 3769633 - RNA, 18 nt, Human
ugaaggcagaaagcaaaa

SEQ ID NO: 3769634 - RNA, 18 nt, Human
ugaaggcagagaaaggga

SEQ ID NO: 3769635 - RNA, 19 nt, Human
ugaaggccccgcccaggcu

SEQ ID NO: 3769636 - RNA, 14 nt, Human
ugaaggcccugcug

SEQ ID NO: 3769637 - RNA, 15 nt, Human
ugaaggcccugcuga

SEQ ID NO: 3769638 - RNA, 18 nt, Human
ugaaggccucgcaggaag

SEQ ID NO: 3769639 - RNA, 11 nt, Human
ugaaggccugg

SEQ ID NO: 3769640 - RNA, 21 nt, Human
ugaaggcucgagcaugccugg

SEQ ID NO: 3769641 - RNA, 12 nt, Human
ugaaggcuggca

SEQ ID NO: 3769642 - RNA, 13 nt, Human
ugaaggcuucucu

SEQ ID NO: 3769643 - RNA, 18 nt, Human
ugaagggaaaggauauuu

SEQ ID NO: 3769644 - RNA, 9 nt, Human
ugaagggag

SEQ ID NO: 3769645 - RNA, 19 nt, Human
ugaagggagagccagcucc

SEQ ID NO: 3769646 - RNA, 17 nt, Human
ugaagggcauucuuucc

SEQ ID NO: 3769647 - RNA, 16 nt, Human
ugaagggccagagcca

SEQ ID NO: 3769648 - RNA, 17 nt, Human
ugaagggccagagccag

SEQ ID NO: 3769649 - RNA, 19 nt, Human
ugaagggccagagccaggg

SEQ ID NO: 3769650 - RNA, 23 nt, Human
ugaaggggcaaauucuuuugaau

SEQ ID NO: 3769651 - RNA, 19 nt, Human
ugaagggggauaugaaugg

SEQ ID NO: 3769652 - RNA, 15 nt, Human
ugaagggguuuucuu

SEQ ID NO: 3769653 - RNA, 18 nt, Human
ugaagguaaauaaaaaga

SEQ ID NO: 3769654 - RNA, 18 nt, Human
ugaagguagaauguuuuc

SEQ ID NO: 3769655 - RNA, 22 nt, Human
ugaaggucacucuuccugcaag

SEQ ID NO: 3769656 - RNA, 15 nt, Human
ugaaggugcugacgg

SEQ ID NO: 3769657 - RNA, 20 nt, Human
ugaagguuaggauuuaacag

SEQ ID NO: 3769658 - RNA, 14 nt, Human
ugaagguuuuugau

SEQ ID NO: 3769659 - RNA, 17 nt, Human
ugaagguuuuuguaaag

SEQ ID NO: 3769660 - RNA, 19 nt, Human
ugaagguuuuuguaaagau

SEQ ID NO: 3769661 - RNA, 23 nt, Human
ugaaguaaaacaaacaauaccug

SEQ ID NO: 3769662 - RNA, 19 nt, Human
ugaaguaaaauguggcagg

SEQ ID NO: 3769663 - RNA, 15 nt, Human
ugaaguaaacugcag

SEQ ID NO: 3769664 - RNA, 22 nt, Human
ugaaguaaacuuuuuguucugg

SEQ ID NO: 3769665 - RNA, 12 nt, Human
ugaaguaccacc

SEQ ID NO: 3769666 - RNA, 18 nt, Human
ugaaguacccguucacau

SEQ ID NO: 3769667 - RNA, 21 nt, Human
ugaaguacuugccagaaguug

SEQ ID NO: 3769668 - RNA, 15 nt, Human
ugaaguauacuguau

SEQ ID NO: 3769669 - RNA, 17 nt, Human
ugaaguaucuaaaagug

SEQ ID NO: 3769670 - RNA, 17 nt, Human
ugaaguauuuuuucagu

SEQ ID NO: 3769671 - RNA, 16 nt, Human
ugaagucacugcacag

SEQ ID NO: 3769672 - RNA, 21 nt, Human
ugaagucacugcacagugcau

SEQ ID NO: 3769673 - RNA, 23 nt, Human
ugaagucagaucugccuaaggac

SEQ ID NO: 3769674 - RNA, 14 nt, Human
ugaagucagaugug

SEQ ID NO: 3769675 - RNA, 16 nt, Human
ugaagucaugcucccc

SEQ ID NO: 3769676 - RNA, 22 nt, Human
ugaagucaugcuccccugugcc

SEQ ID NO: 3769677 - RNA, 13 nt, Human
ugaaguccaagca

SEQ ID NO: 3769678 - RNA, 21 nt, Human
ugaaguccaagcauuuagaug

SEQ ID NO: 3769679 - RNA, 14 nt, Human
ugaaguccuggcuu

SEQ ID NO: 3769680 - RNA, 16 nt, Human
ugaaguccuggcuuca

SEQ ID NO: 3769681 - RNA, 16 nt, Human
ugaagucguugugagg

SEQ ID NO: 3769682 - RNA, 11 nt, Human
ugaagucugaa

SEQ ID NO: 3769683 - RNA, 12 nt, Human
ugaagucugaaa

SEQ ID NO: 3769684 - RNA, 14 nt, Human
ugaagucugaaauu

SEQ ID NO: 3769685 - RNA, 21 nt, Human
ugaagucuuacuacagaaaug

SEQ ID NO: 3769686 - RNA, 17 nt, Human
ugaagucuuuguacaga

SEQ ID NO: 3769687 - RNA, 12 nt, Human
ugaagugaaacu

SEQ ID NO: 3769688 - RNA, 13 nt, Human
ugaagugaaacug

SEQ ID NO: 3769689 - RNA, 17 nt, Human
ugaagugcgugaaugua

SEQ ID NO: 3769690 - RNA, 21 nt, Human
ugaagugcgugaauguaugua

SEQ ID NO: 3769691 - RNA, 18 nt, Human
ugaagugcuguuuauuaa

SEQ ID NO: 3769692 - RNA, 16 nt, Human
ugaaguguaggcagac

SEQ ID NO: 3769693 - RNA, 20 nt, Human
ugaaguguauaauauaaaaa

SEQ ID NO: 3769694 - RNA, 22 nt, Human
ugaaguguguuuccuucagugc

SEQ ID NO: 3769695 - RNA, 20 nt, Human
ugaaguguuuuguucuuucu

SEQ ID NO: 3769696 - RNA, 21 nt, Human
ugaaguuagaauuccuucagg

SEQ ID NO: 3769697 - RNA, 23 nt, Human
ugaaguuagcuuuaacuuaaaua

SEQ ID NO: 3769698 - RNA, 12 nt, Human
ugaaguuauauu

SEQ ID NO: 3769699 - RNA, 13 nt, Human
ugaaguuauauuu

SEQ ID NO: 3769700 - RNA, 16 nt, Human
ugaaguugaaaaucau

SEQ ID NO: 3769701 - RNA, 14 nt, Human
ugaaguugcugcuu

SEQ ID NO: 3769702 - RNA, 20 nt, Human
ugaaguuguuacuaacuaaa

SEQ ID NO: 3769703 - RNA, 12 nt, Human
ugaaguuuacau

SEQ ID NO: 3769704 - RNA, 13 nt, Human
ugaaguuuacauu

SEQ ID NO: 3769705 - RNA, 22 nt, Human
ugaaguuucaaguuuuaaaguu

SEQ ID NO: 3769706 - RNA, 12 nt, Human
ugaaguuugaau

SEQ ID NO: 3769707 - RNA, 17 nt, Human
ugaaguuugaauguuaa

SEQ ID NO: 3769708 - RNA, 18 nt, Human
ugaauaaaaacucaagga

SEQ ID NO: 3769709 - RNA, 21 nt, Human
ugaauaaaaacuuugcuaaau

SEQ ID NO: 3769710 - RNA, 14 nt, Human
ugaauaaaaauuaa

SEQ ID NO: 3769711 - RNA, 14 nt, Human
ugaauaaaagugca

SEQ ID NO: 3769712 - RNA, 19 nt, Human
ugaauaaaauuauuccuuu

SEQ ID NO: 3769713 - RNA, 20 nt, Human
ugaauaaacuagauuacauu

SEQ ID NO: 3769714 - RNA, 15 nt, Human
ugaauaaacuucagc

SEQ ID NO: 3769715 - RNA, 15 nt, Human
ugaauaaagaauacu

SEQ ID NO: 3769716 - RNA, 16 nt, Human
ugaauaaagacaccua

SEQ ID NO: 3769717 - RNA, 14 nt, Human
ugaauaaagcaauu

SEQ ID NO: 3769718 - RNA, 16 nt, Human
ugaauaaauaaaugua

SEQ ID NO: 3769719 - RNA, 21 nt, Human
ugaauaaauucuauaggaaca

SEQ ID NO: 3769720 - RNA, 15 nt, Human
ugaauaaccacuuaa

SEQ ID NO: 3769721 - RNA, 21 nt, Human
ugaauaaccugaggauucuau

SEQ ID NO: 3769722 - RNA, 22 nt, Human
ugaauaagccauucugacucau

SEQ ID NO: 3769723 - RNA, 12 nt, Human
ugaauaauacag

SEQ ID NO: 3769724 - RNA, 14 nt, Human
ugaauaauggaaaa

SEQ ID NO: 3769725 - RNA, 20 nt, Human
ugaauaaugguaccagauaa

SEQ ID NO: 3769726 - RNA, 13 nt, Human
ugaauaauuacag

SEQ ID NO: 3769727 - RNA, 14 nt, Human
ugaauaauuuccca

SEQ ID NO: 3769728 - RNA, 22 nt, Human
ugaauaauuucccaauuaggaa

SEQ ID NO: 3769729 - RNA, 15 nt, Human
ugaauacaaacaaug

SEQ ID NO: 3769730 - RNA, 16 nt, Human
ugaauacaaacaaugg

SEQ ID NO: 3769731 - RNA, 17 nt, Human
ugaauacaaacaaugga

SEQ ID NO: 3769732 - RNA, 23 nt, Human
ugaauacaaacaauggaaacuga

SEQ ID NO: 3769733 - RNA, 15 nt, Human
ugaauacaaagugau

SEQ ID NO: 3769734 - RNA, 17 nt, Human
ugaauacagcagcaaga

SEQ ID NO: 3769735 - RNA, 18 nt, Human
ugaauacagcagcaagaa

SEQ ID NO: 3769736 - RNA, 20 nt, Human
ugaauacagcagcaagaaaa

SEQ ID NO: 3769737 - RNA, 14 nt, Human
ugagggcccagagc

SEQ ID NO: 3769738 - RNA, 15 nt, Human
ugagggcccagagca

SEQ ID NO: 3769739 - RNA, 18 nt, Human
ugagggcccagagcagga

SEQ ID NO: 3769740 - RNA, 20 nt, Human
ugagggcccagagcaggaag

SEQ ID NO: 3769741 - RNA, 14 nt, Human
ugagggccccucug

SEQ ID NO: 3769742 - RNA, 16 nt, Human
ugagggccccucugcc

SEQ ID NO: 3769743 - RNA, 21 nt, Human
ugagggccccucugcccagcu

SEQ ID NO: 3769744 - RNA, 19 nt, Human
ugagggccugcuggaggcc

SEQ ID NO: 3769745 - RNA, 22 nt, Human
ugagggccugcuggaggccuca

SEQ ID NO: 3769746 - RNA, 13 nt, Human
ugaggggaccagg

SEQ ID NO: 3769747 - RNA, 14 nt, Human
ugaggggaccagga

SEQ ID NO: 3769748 - RNA, 14 nt, Human
ugaggggagccagg

SEQ ID NO: 3769749 - RNA, 11 nt, Human
ugaggggagga

SEQ ID NO: 3769750 - RNA, 17 nt, Human
ugaggggcaacgaagaa

SEQ ID NO: 3769751 - RNA, 12 nt, Human
ugaggggccucu

SEQ ID NO: 3769752 - RNA, 13 nt, Human
ugaggggccucuu

SEQ ID NO: 3769753 - RNA, 17 nt, Human
ugaggggcuaccaggaa

SEQ ID NO: 3769754 - RNA, 15 nt, Human
ugaggggcuccugga

SEQ ID NO: 3769755 - RNA, 22 nt, Human
ugagggggaauagucuagaugg

SEQ ID NO: 3769756 - RNA, 22 nt, Human
ugaggggucccuagcagcccac

SEQ ID NO: 3769757 - RNA, 14 nt, Human
ugaggggucccuga

SEQ ID NO: 3769758 - RNA, 13 nt, Human
ugagggguuccuc

SEQ ID NO: 3769759 - RNA, 16 nt, Human
ugagggguuccucccc

SEQ ID NO: 3769760 - RNA, 14 nt, Human
ugaggguaaguauu

SEQ ID NO: 3769761 - RNA, 19 nt, Human
ugaggguccccaccuggga

SEQ ID NO: 3769762 - RNA, 22 nt, Human
ugaggguccugcagccugcagg

SEQ ID NO: 3769763 - RNA, 15 nt, Human
ugagggucuguaggu

SEQ ID NO: 3769764 - RNA, 18 nt, Human
ugagggucuguagguugc

SEQ ID NO: 3769765 - RNA, 22 nt, Human
ugagggucuguagguugcacac

SEQ ID NO: 3769766 - RNA, 12 nt, Human
ugagggucuucu

SEQ ID NO: 3769767 - RNA, 19 nt, Human
ugagggucuucuuacaugc

SEQ ID NO: 3769768 - RNA, 14 nt, Human
ugaggguggagacu

SEQ ID NO: 3769769 - RNA, 18 nt, Human
ugaggguuucagagagcc

SEQ ID NO: 3769770 - RNA, 14 nt, Human
ugagguaaagauau

SEQ ID NO: 3769771 - RNA, 20 nt, Human
ugaggucaaguaagaagaca

SEQ ID NO: 3769772 - RNA, 14 nt, Human
ugaggucagagccu

SEQ ID NO: 3769773 - RNA, 17 nt, Human
ugaggucagagccugca

SEQ ID NO: 3769774 - RNA, 12 nt, Human
ugaggucaggga

SEQ ID NO: 3769775 - RNA, 14 nt, Human
ugaggucagggagu

SEQ ID NO: 3769776 - RNA, 16 nt, Human
ugagguccagcccugg

SEQ ID NO: 3769777 - RNA, 15 nt, Human
ugaggucccaggaag

SEQ ID NO: 3769778 - RNA, 16 nt, Human
ugaggucccaggaagu

SEQ ID NO: 3769779 - RNA, 16 nt, Human
ugagguccugagcacu

SEQ ID NO: 3769780 - RNA, 20 nt, Human
ugagguccugagcacugcca

SEQ ID NO: 3769781 - RNA, 23 nt, Human
ugaggucuaggaacauacuucag

SEQ ID NO: 3769782 - RNA, 16 nt, Human
ugaggucugcucggcc

SEQ ID NO: 3769783 - RNA, 21 nt, Human
ugaggucuuuugacaugugga

SEQ ID NO: 3769784 - RNA, 23 nt, Human
ugaggucuuuugacauguggaaa

SEQ ID NO: 3769785 - RNA, 17 nt, Human
ugaggugaaagggagcu

SEQ ID NO: 3769786 - RNA, 18 nt, Human
ugaggugaaagggagcua

SEQ ID NO: 3769787 - RNA, 16 nt, Human
ugaggugcacugggag

SEQ ID NO: 3769788 - RNA, 17 nt, Human
ugaggugcagagugccc

SEQ ID NO: 3769789 - RNA, 21 nt, Human
ugaggugcagagugcccagaa

SEQ ID NO: 3769790 - RNA, 21 nt, Human
ugaggugcccagcuagcugca

SEQ ID NO: 3769791 - RNA, 16 nt, Human
ugaggugcugggaggg

SEQ ID NO: 3769792 - RNA, 16 nt, Human
ugaggugggcccagga

SEQ ID NO: 3769793 - RNA, 12 nt, Human
ugaggugguagg

SEQ ID NO: 3769794 - RNA, 21 nt, Human
ugaggugguaguaaaacacag

SEQ ID NO: 3769795 - RNA, 18 nt, Human
ugagguggucugaauguu

SEQ ID NO: 3769796 - RNA, 19 nt, Human
ugagguggucugaauguuc

SEQ ID NO: 3769797 - RNA, 20 nt, Human
ugagguggucugaauguucu

SEQ ID NO: 3769798 - RNA, 17 nt, Human
ugagguuacuggaaauu

SEQ ID NO: 3769799 - RNA, 14 nt, Human
ugagguuccucugc

SEQ ID NO: 3769800 - RNA, 15 nt, Human
ugagguuccucugcc

SEQ ID NO: 3769801 - RNA, 16 nt, Human
ugagguuccucugccu

SEQ ID NO: 3769802 - RNA, 19 nt, Human
ugagguuccucugccugcc

SEQ ID NO: 3769803 - RNA, 15 nt, Human
ugagguugcuuacua

SEQ ID NO: 3769804 - RNA, 15 nt, Human
ugagguuucacccuu

SEQ ID NO: 3769805 - RNA, 14 nt, Human
ugagguuucccaau

SEQ ID NO: 3769806 - RNA, 21 nt, Human
ugagguuuccuucagacagau

SEQ ID NO: 3769807 - RNA, 20 nt, Human
ugaguaaaaaguuucuaaag

SEQ ID NO: 3769808 - RNA, 21 nt, Human
ugaguaaaggaguaagaaccu

SEQ ID NO: 3769809 - RNA, 17 nt, Human
ugaguaaaucagauguu

SEQ ID NO: 3769810 - RNA, 16 nt, Human
ugaguaacauuugcug

SEQ ID NO: 3769811 - RNA, 19 nt, Human
ugaguaagaaaugcugccc

SEQ ID NO: 3769812 - RNA, 17 nt, Human
ugaguaagagcuggugu

SEQ ID NO: 3769813 - RNA, 18 nt, Human
ugaguaaugguguagaac

SEQ ID NO: 3769814 - RNA, 17 nt, Human
ugaguaauuuuggauuu

SEQ ID NO: 3769815 - RNA, 20 nt, Human
ugaguacaugcacacucaug

SEQ ID NO: 3769816 - RNA, 18 nt, Human
ugaguacguugugcauuu

SEQ ID NO: 3769817 - RNA, 15 nt, Human
ugaguacuacagucc

SEQ ID NO: 3769818 - RNA, 17 nt, Human
ugaguacuacaguccuc

SEQ ID NO: 3769819 - RNA, 21 nt, Human
ugaguacuacaguccucccau

SEQ ID NO: 3769820 - RNA, 22 nt, Human
ugaguacuacaguccucccauc

SEQ ID NO: 3769821 - RNA, 19 nt, Human
ugaguagacacauuuaagg

SEQ ID NO: 3769822 - RNA, 20 nt, Human
ugaguagagagcaagggaag

SEQ ID NO: 3769823 - RNA, 15 nt, Human
ugaguagauauuacu

SEQ ID NO: 3769824 - RNA, 19 nt, Human
ugaguagauauuacuuuau

SEQ ID NO: 3769825 - RNA, 19 nt, Human
ugaguagcuuauacaauua

SEQ ID NO: 3769826 - RNA, 14 nt, Human
ugaguagucucaug

SEQ ID NO: 3769827 - RNA, 18 nt, Human
ugaguauacaauauauaa

SEQ ID NO: 3769828 - RNA, 14 nt, Human
ugaguaucagaauu

SEQ ID NO: 3769829 - RNA, 23 nt, Human
ugaguauggagcagccuggagac

SEQ ID NO: 3769830 - RNA, 14 nt, Human
ugagucaauuggaa

SEQ ID NO: 3769831 - RNA, 16 nt, Human
ugagucaccaagccca

SEQ ID NO: 3769832 - RNA, 22 nt, Human
ugagucagggcccagaggcuga

SEQ ID NO: 3769833 - RNA, 20 nt, Human
ugagucaucuguuagggccu

SEQ ID NO: 3769834 - RNA, 20 nt, Human
ugagucaugaucucccugcc

SEQ ID NO: 3769835 - RNA, 16 nt, Human
ugagucauuuaaaugu

SEQ ID NO: 3769836 - RNA, 23 nt, Human
ugagucauuuaaauguguacaau

SEQ ID NO: 3769837 - RNA, 15 nt, Human
ugagucccaggcuga

SEQ ID NO: 3769838 - RNA, 20 nt, Human
ugagucccaggcugagccuc

SEQ ID NO: 3769839 - RNA, 20 nt, Human
ugagucccccagagauguca

SEQ ID NO: 3769840 - RNA, 19 nt, Human
ugaguccccuguuuguuuc

SEQ ID NO: 3769841 - RNA, 21 nt, Human
ugaguccccuguuuguuucug

SEQ ID NO: 3769842 - RNA, 14 nt, Human
ugagucccuuccag

SEQ ID NO: 3769843 - RNA, 12 nt, Human
ugaguccuccag

SEQ ID NO: 3769844 - RNA, 16 nt, Human
ugaguccuccagaacu

SEQ ID NO: 3769845 - RNA, 15 nt, Human
ugagucgaggacagg

SEQ ID NO: 3769846 - RNA, 17 nt, Human
ugagucgcgcaccgaaa

SEQ ID NO: 3769847 - RNA, 19 nt, Human
ugagucguacagaaagcug

SEQ ID NO: 3769848 - RNA, 18 nt, Human
ugagucgucaucacuuuu

SEQ ID NO: 3769849 - RNA, 22 nt, Human
ugagucucuggggcaggcugcu

SEQ ID NO: 3769850 - RNA, 15 nt, Human
ugagucucuucagaa

SEQ ID NO: 3769851 - RNA, 15 nt, Human
ugagucugaaggcug

SEQ ID NO: 3769852 - RNA, 21 nt, Human
ugagucugggcagcugucccu

SEQ ID NO: 3769853 - RNA, 14 nt, Human
ugagucuguucugg

SEQ ID NO: 3769854 - RNA, 18 nt, Human
ugagucuucauguuccca

SEQ ID NO: 3769855 - RNA, 19 nt, Human
ugagucuucauguucccac

SEQ ID NO: 3769856 - RNA, 21 nt, Human
ugagucuuggcggcagcagcc

SEQ ID NO: 3769857 - RNA, 17 nt, Human
ugagucuuugguucuaa

SEQ ID NO: 3769858 - RNA, 20 nt, Human
ugagucuuuuuuuuuuaagu

SEQ ID NO: 3769859 - RNA, 17 nt, Human
ugagugagccuggcucu

SEQ ID NO: 3769860 - RNA, 19 nt, Human
ugagugagccuggcucuug

SEQ ID NO: 3769861 - RNA, 22 nt, Human
ugagugaggguuucugagcugc

SEQ ID NO: 3769862 - RNA, 17 nt, Human
ugagugaucccauuucu

SEQ ID NO: 3769863 - RNA, 15 nt, Human
ugagugauccuccaa

SEQ ID NO: 3769864 - RNA, 14 nt, Human
ugagugauuauuug

SEQ ID NO: 3769865 - RNA, 18 nt, Human
ugagugcaaacuucagag

SEQ ID NO: 3769866 - RNA, 22 nt, Human
ugagugcaaacuucagaguucu

SEQ ID NO: 3769867 - RNA, 13 nt, Human
ugagugcaggccc

SEQ ID NO: 3769868 - RNA, 14 nt, Human
ugagugcaggccca

SEQ ID NO: 3769869 - RNA, 14 nt, Human
ugagugccuggcca

SEQ ID NO: 3769870 - RNA, 14 nt, Human
ugagugccuuacac

SEQ ID NO: 3769871 - RNA, 16 nt, Human
ugagugccuuacacaa

SEQ ID NO: 3769872 - RNA, 19 nt, Human
ugagugccuuuugcagaag

SEQ ID NO: 3769873 - RNA, 13 nt, Human
ugagugcucugau

SEQ ID NO: 3769874 - RNA, 19 nt, Human
ugagugcuugcuuuucaug

SEQ ID NO: 3769875 - RNA, 17 nt, Human
ugaguggccagggaauc

SEQ ID NO: 3769876 - RNA, 23 nt, Human
ugaguggcuucacuccugcugua

SEQ ID NO: 3769877 - RNA, 23 nt, Human
ugaguggggagacaccucagagc

SEQ ID NO: 3769878 - RNA, 21 nt, Human
ugaguggggggaacgcccacu

SEQ ID NO: 3769879 - RNA, 21 nt, Human
ugagugggugaauaauacagu

SEQ ID NO: 3769880 - RNA, 17 nt, Human
ugaguguaacaagaaag

SEQ ID NO: 3769881 - RNA, 15 nt, Human
ugaguguaaguguga

SEQ ID NO: 3769882 - RNA, 23 nt, Human
ugaugaucuuugcagacaggcaa

SEQ ID NO: 3769883 - RNA, 18 nt, Human
ugaugaugggaauugugu

SEQ ID NO: 3769884 - RNA, 13 nt, Human
ugaugauguaauu

SEQ ID NO: 3769885 - RNA, 16 nt, Human
ugaugaugugccuggg

SEQ ID NO: 3769886 - RNA, 15 nt, Human
ugaugauuucagaaa

SEQ ID NO: 3769887 - RNA, 13 nt, Human
ugaugcacagaga

SEQ ID NO: 3769888 - RNA, 18 nt, Human
ugaugcacagagaagcug

SEQ ID NO: 3769889 - RNA, 15 nt, Human
ugaugcagcauuuga

SEQ ID NO: 3769890 - RNA, 18 nt, Human
ugaugcagcauuugauaa

SEQ ID NO: 3769891 - RNA, 13 nt, Human
ugaugcaggcacu

SEQ ID NO: 3769892 - RNA, 21 nt, Human
ugaugcaucagaaagggaggg

SEQ ID NO: 3769893 - RNA, 22 nt, Human
ugaugcaugcuauucacaauua

SEQ ID NO: 3769894 - RNA, 16 nt, Human
ugaugcaugucuuuua

SEQ ID NO: 3769895 - RNA, 11 nt, Human
ugaugcaugug

SEQ ID NO: 3769896 - RNA, 19 nt, Human
ugaugcauuaaaagaaaau

SEQ ID NO: 3769897 - RNA, 14 nt, Human
ugaugccaaaaaaa

SEQ ID NO: 3769898 - RNA, 19 nt, Human
ugaugccaaguuguuugag

SEQ ID NO: 3769899 - RNA, 17 nt, Human
ugaugccacaccaagcu

SEQ ID NO: 3769900 - RNA, 20 nt, Human
ugaugccacaccaagcugug

SEQ ID NO: 3769901 - RNA, 22 nt, Human
ugaugccacaccaagcugugcc

SEQ ID NO: 3769902 - RNA, 14 nt, Human
ugaugccaggacac

SEQ ID NO: 3769903 - RNA, 15 nt, Human
ugaugccgugauccu

SEQ ID NO: 3769904 - RNA, 16 nt, Human
ugaugcgcaguugcug

SEQ ID NO: 3769905 - RNA, 11 nt, Human
ugaugcuaaau

SEQ ID NO: 3769906 - RNA, 16 nt, Human
ugaugcuaaauaggag

SEQ ID NO: 3769907 - RNA, 19 nt, Human
ugaugcuaucaguuuuaua

SEQ ID NO: 3769908 - RNA, 14 nt, Human
ugaugcugagauuc

SEQ ID NO: 3769909 - RNA, 22 nt, Human
ugaugcuggaacucuugacagc

SEQ ID NO: 3769910 - RNA, 15 nt, Human
ugaugcuggagaggu

SEQ ID NO: 3769911 - RNA, 16 nt, Human
ugaugcuggagagguu

SEQ ID NO: 3769912 - RNA, 17 nt, Human
ugaugcuggagagguua

SEQ ID NO: 3769913 - RNA, 13 nt, Human
ugaugcugggcug

SEQ ID NO: 3769914 - RNA, 18 nt, Human
ugaugcugggcugggugc

SEQ ID NO: 3769915 - RNA, 20 nt, Human
ugaugcugugcuaugaauuu

SEQ ID NO: 3769916 - RNA, 18 nt, Human
ugaugcuguucucuucuu

SEQ ID NO: 3769917 - RNA, 18 nt, Human
ugaugcuucuucagagac

SEQ ID NO: 3769918 - RNA, 21 nt, Human
ugaugcuucuucagagacucc

SEQ ID NO: 3769919 - RNA, 23 nt, Human
ugaugcuucuucagagacuccug

SEQ ID NO: 3769920 - RNA, 21 nt, Human
ugaugcuuguaacaagaaaac

SEQ ID NO: 3769921 - RNA, 22 nt, Human
ugaugcuuguaacaagaaaaca

SEQ ID NO: 3769922 - RNA, 23 nt, Human
ugaugcuuguaacaagaaaacau

SEQ ID NO: 3769923 - RNA, 18 nt, Human
ugauggaaauauuuauuu

SEQ ID NO: 3769924 - RNA, 16 nt, Human
ugauggacacuccagg

SEQ ID NO: 3769925 - RNA, 23 nt, Human
ugauggaccagugguuuccaguc

SEQ ID NO: 3769926 - RNA, 23 nt, Human
ugauggaccuucuagaauuauaa

SEQ ID NO: 3769927 - RNA, 14 nt, Human
ugauggagaaggaa

SEQ ID NO: 3769928 - RNA, 15 nt, Human
ugauggagaaggaag

SEQ ID NO: 3769929 - RNA, 17 nt, Human
ugauggagaaggaaggc

SEQ ID NO: 3769930 - RNA, 15 nt, Human
ugauggagcagagca

SEQ ID NO: 3769931 - RNA, 14 nt, Human
ugauggagugcugu

SEQ ID NO: 3769932 - RNA, 16 nt, Human
ugauggagugcuguuu

SEQ ID NO: 3769933 - RNA, 19 nt, Human
ugauggcaacagaucugga

SEQ ID NO: 3769934 - RNA, 12 nt, Human
ugauggccacaa

SEQ ID NO: 3769935 - RNA, 18 nt, Human
ugauggcccauucuacuu

SEQ ID NO: 3769936 - RNA, 20 nt, Human
ugauggcccauucuacuugc

SEQ ID NO: 3769937 - RNA, 21 nt, Human
ugauggcccauucuacuugcu

SEQ ID NO: 3769938 - RNA, 19 nt, Human
ugauggccuuaauuuccuu

SEQ ID NO: 3769939 - RNA, 19 nt, Human
ugaugggaaagcauuguaa

SEQ ID NO: 3769940 - RNA, 21 nt, Human
ugaugggaaguccggccccag

SEQ ID NO: 3769941 - RNA, 16 nt, Human
ugaugggauucuggac

SEQ ID NO: 3769942 - RNA, 17 nt, Human
ugauggggaaggaggcu

SEQ ID NO: 3769943 - RNA, 22 nt, Human
ugauggggcccuaauucagcca

SEQ ID NO: 3769944 - RNA, 14 nt, Human
ugauggggcccugc

SEQ ID NO: 3769945 - RNA, 16 nt, Human
ugauggucacuuaaaa

SEQ ID NO: 3769946 - RNA, 20 nt, Human
ugauggucacuuaaaaugug

SEQ ID NO: 3769947 - RNA, 15 nt, Human
ugauggucagacaca

SEQ ID NO: 3769948 - RNA, 16 nt, Human
ugauggugaugaaaug

SEQ ID NO: 3769949 - RNA, 17 nt, Human
ugauggugaugaaaugu

SEQ ID NO: 3769950 - RNA, 20 nt, Human
ugaugguguggccuguggcu

SEQ ID NO: 3769951 - RNA, 22 nt, Human
ugaugguguuuuggggaugaga

SEQ ID NO: 3769952 - RNA, 11 nt, Human
ugauguaaaau

SEQ ID NO: 3769953 - RNA, 17 nt, Human
ugauguaaaugaaguaa

SEQ ID NO: 3769954 - RNA, 19 nt, Human
ugauguaaaugaaguaacu

SEQ ID NO: 3769955 - RNA, 21 nt, Human
ugauguaaccgauucaucucu

SEQ ID NO: 3769956 - RNA, 16 nt, Human
ugauguacagucuguc

SEQ ID NO: 3769957 - RNA, 13 nt, Human
ugauguacaugua

SEQ ID NO: 3769958 - RNA, 20 nt, Human
ugauguaggguaaggugccu

SEQ ID NO: 3769959 - RNA, 20 nt, Human
ugauguauucuagcuaaugu

SEQ ID NO: 3769960 - RNA, 21 nt, Human
ugauguauucuagcuaaugua

SEQ ID NO: 3769961 - RNA, 18 nt, Human
ugaugucaauuucugugu

SEQ ID NO: 3769962 - RNA, 19 nt, Human
ugaugucaauuucuguguu

SEQ ID NO: 3769963 - RNA, 22 nt, Human
ugaugucauacagagaagucac

SEQ ID NO: 3769964 - RNA, 17 nt, Human
ugaugucaucugucacu

SEQ ID NO: 3769965 - RNA, 15 nt, Human
ugaugucauguguuc

SEQ ID NO: 3769966 - RNA, 12 nt, Human
ugauguccagaa

SEQ ID NO: 3769967 - RNA, 19 nt, Human
ugaugucccaacuuguaaa

SEQ ID NO: 3769968 - RNA, 15 nt, Human
ugauguccuguaaac

SEQ ID NO: 3769969 - RNA, 16 nt, Human
ugaugucuccuaagca

SEQ ID NO: 3769970 - RNA, 18 nt, Human
ugaugucuuuucuuggca

SEQ ID NO: 3769971 - RNA, 23 nt, Human
ugaugucuuuucuuggcaaaagc

SEQ ID NO: 3769972 - RNA, 17 nt, Human
ugaugucuuuuuauuaa

SEQ ID NO: 3769973 - RNA, 17 nt, Human
ugaugugacaauaauau

SEQ ID NO: 3769974 - RNA, 17 nt, Human
ugauguggaguggggca

SEQ ID NO: 3769975 - RNA, 18 nt, Human
ugauguggaguggggcag

SEQ ID NO: 3769976 - RNA, 15 nt, Human
ugauguggugccuga

SEQ ID NO: 3769977 - RNA, 16 nt, Human
ugauguggugccugag

SEQ ID NO: 3769978 - RNA, 20 nt, Human
ugauguguugccacuuucca

SEQ ID NO: 3769979 - RNA, 14 nt, Human
ugauguguuguucu

SEQ ID NO: 3769980 - RNA, 18 nt, Human
ugauguguuuauuuauag

SEQ ID NO: 3769981 - RNA, 12 nt, Human
ugauguuaaaaa

SEQ ID NO: 3769982 - RNA, 22 nt, Human
ugauguuaaccagaauaaaguu

SEQ ID NO: 3769983 - RNA, 17 nt, Human
ugauguuaggcugggcc

SEQ ID NO: 3769984 - RNA, 14 nt, Human
ugauguucagugua

SEQ ID NO: 3769985 - RNA, 16 nt, Human
ugauguucaguguaau

SEQ ID NO: 3769986 - RNA, 18 nt, Human
ugauguucaguguaauuu

SEQ ID NO: 3769987 - RNA, 13 nt, Human
ugauguuccuucc

SEQ ID NO: 3769988 - RNA, 12 nt, Human
ugauguucuaag

SEQ ID NO: 3769989 - RNA, 15 nt, Human
ugauguucuaaggcu

SEQ ID NO: 3769990 - RNA, 19 nt, Human
ugauguucuaaggcucuga

SEQ ID NO: 3769991 - RNA, 14 nt, Human
ugauguuggcuggg

SEQ ID NO: 3769992 - RNA, 20 nt, Human
ugauguuugugcaguaacuu

SEQ ID NO: 3769993 - RNA, 16 nt, Human
ugauguuuguggccuc

SEQ ID NO: 3769994 - RNA, 17 nt, Human
ugauguuuuccaugagu

SEQ ID NO: 3769995 - RNA, 19 nt, Human
ugauguuuuccaugagucc

SEQ ID NO: 3769996 - RNA, 16 nt, Human
ugauguuuuuaaaauc

SEQ ID NO: 3769997 - RNA, 19 nt, Human
ugauguuuuuaaaaucuua

SEQ ID NO: 3769998 - RNA, 21 nt, Human
ugauguuuuuaaaaucuuauu

SEQ ID NO: 3769999 - RNA, 15 nt, Human
ugauuaaaaugguga

SEQ ID NO: 3770000 - RNA, 20 nt, Human
ugauuaaagugcucacguua

SEQ ID NO: 3770001 - RNA, 22 nt, Human
ugauuaaauaagauucuaacgg

SEQ ID NO: 3770002 - RNA, 13 nt, Human
ugauuaaauucuu

SEQ ID NO: 3770003 - RNA, 17 nt, Human
ugauuaaauucuugcaa

SEQ ID NO: 3770004 - RNA, 20 nt, Human
ugauuaaauucuugcaaagu

SEQ ID NO: 3770005 - RNA, 15 nt, Human
ugauuaacaaauaug

SEQ ID NO: 3770006 - RNA, 14 nt, Human
ugauuaacagagag

SEQ ID NO: 3770007 - RNA, 20 nt, Human
ugauuaaccacuucagcuga

SEQ ID NO: 3770008 - RNA, 13 nt, Human
ugauuaagauuuu

SEQ ID NO: 3770009 - RNA, 15 nt, Human
ugauuaaguaaugau

SEQ ID NO: 3770010 - RNA, 18 nt, Human
ugauuaaguaaugauaac

SEQ ID NO: 3770011 - RNA, 14 nt, Human
ugauuaaugcuaaa

SEQ ID NO: 3770012 - RNA, 17 nt, Human
ugauuaauggaaauguu

SEQ ID NO: 3770013 - RNA, 21 nt, Human
ugauuaauuucugccauuuca

SEQ ID NO: 3770014 - RNA, 22 nt, Human
ugauuaauuucugccauuucau

SEQ ID NO: 3770015 - RNA, 18 nt, Human
ugauuacaccagccucgu

SEQ ID NO: 3770016 - RNA, 16 nt, Human
ugauuaccagggacug

SEQ ID NO: 3770017 - RNA, 13 nt, Human
ugauuacugucaa

SEQ ID NO: 3770018 - RNA, 15 nt, Human
ugauuacugucaaua

SEQ ID NO: 3770019 - RNA, 17 nt, Human
ugauuacugucaauaaa

SEQ ID NO: 3770020 - RNA, 23 nt, Human
ugauuacugucaauaaacagcuu

SEQ ID NO: 3770021 - RNA, 16 nt, Human
ugauuagacagaacac

SEQ ID NO: 3770022 - RNA, 18 nt, Human
ugauuagcaaguuacagu

SEQ ID NO: 3770023 - RNA, 15 nt, Human
ugauuagcuuugugu

SEQ ID NO: 3770024 - RNA, 19 nt, Human
ugauuagcuuuguguuugg

SEQ ID NO: 3770025 - RNA, 21 nt, Human
ugauuaguaagucuugccuau

SEQ ID NO: 3770026 - RNA, 22 nt, Human
ugauuagugaaaggaagauaaa

SEQ ID NO: 3770027 - RNA, 14 nt, Human
ugauuuuaacucug

SEQ ID NO: 3770028 - RNA, 15 nt, Human
ugauuuuagccuucu

SEQ ID NO: 3770029 - RNA, 15 nt, Human
ugauuuuaucuguga

SEQ ID NO: 3770030 - RNA, 19 nt, Human
ugauuuucaagcagcaucu

SEQ ID NO: 3770031 - RNA, 19 nt, Human
ugauuuuccaucuaaaaau

SEQ ID NO: 3770032 - RNA, 19 nt, Human
ugauuuuuaaagaaaaguu

SEQ ID NO: 3770033 - RNA, 22 nt, Human
ugauuuuuaccguuucuucccu

SEQ ID NO: 3770034 - RNA, 13 nt, Human
ugauuuuuacugu

SEQ ID NO: 3770035 - RNA, 18 nt, Human
ugauuuuuaugccaccug

SEQ ID NO: 3770036 - RNA, 21 nt, Human
ugauuuuugagcccuuguuuc

SEQ ID NO: 3770037 - RNA, 13 nt, Human
ugauuuuuugcau

SEQ ID NO: 3770038 - RNA, 13 nt, Human
ugauuuuuuucca

SEQ ID NO: 3770039 - RNA, 22 nt, Human
ugauuuuuuuucccauuuagaa

SEQ ID NO: 3770040 - RNA, 16 nt, Human
ugauuuuuuuuccuuu

SEQ ID NO: 3770041 - RNA, 16 nt, Human
ugauuuuuuuuuccuu

SEQ ID NO: 3770042 - RNA, 19 nt, Human
ugauuuuuuuuuccuucag

SEQ ID NO: 3770043 - RNA, 22 nt, Human
ugauuuuuuuuuccuucagugc

SEQ ID NO: 3770044 - RNA, 20 nt, Human
ugauuuuuuuuuuuaaucua

SEQ ID NO: 3770045 - RNA, 20 nt, Human
ugauuuuuuuuuuuuuuucc

SEQ ID NO: 3770046 - RNA, 15 nt, Human
ugcaaaaaaaauuag

SEQ ID NO: 3770047 - RNA, 20 nt, Human
ugcaaaaaaaauuagccggg

SEQ ID NO: 3770048 - RNA, 22 nt, Human
ugcaaaaaauacuuuuucuaau

SEQ ID NO: 3770049 - RNA, 16 nt, Human
ugcaaaaaaucuuaau

SEQ ID NO: 3770050 - RNA, 21 nt, Human
ugcaaaaacucuuugagaggg

SEQ ID NO: 3770051 - RNA, 16 nt, Human
ugcaaaaagcuucugu

SEQ ID NO: 3770052 - RNA, 22 nt, Human
ugcaaaaauauuuauaaaacuu

SEQ ID NO: 3770053 - RNA, 18 nt, Human
ugcaaaaauccaaauauu

SEQ ID NO: 3770054 - RNA, 21 nt, Human
ugcaaaaauccaaauauuguu

SEQ ID NO: 3770055 - RNA, 17 nt, Human
ugcaaaaauuuuuggau

SEQ ID NO: 3770056 - RNA, 16 nt, Human
ugcaaaaccuuuuacu

SEQ ID NO: 3770057 - RNA, 17 nt, Human
ugcaaaaccuuuuacug

SEQ ID NO: 3770058 - RNA, 18 nt, Human
ugcaaaaccuuuuacugg

SEQ ID NO: 3770059 - RNA, 23 nt, Human
ugcaaaagacuaauuuaaaaaau

SEQ ID NO: 3770060 - RNA, 13 nt, Human
ugcaaaagcagug

SEQ ID NO: 3770061 - RNA, 22 nt, Human
ugcaaaagguucacuaaagcag

SEQ ID NO: 3770062 - RNA, 13 nt, Human
ugcaaaauacaug

SEQ ID NO: 3770063 - RNA, 14 nt, Human
ugcaaaauuccuga

SEQ ID NO: 3770064 - RNA, 15 nt, Human
ugcaaacagaacagg

SEQ ID NO: 3770065 - RNA, 17 nt, Human
ugcaaacagaacagggu

SEQ ID NO: 3770066 - RNA, 18 nt, Human
ugcaaacauuggaagauu

SEQ ID NO: 3770067 - RNA, 18 nt, Human
ugcaaaccaucauugaaa

SEQ ID NO: 3770068 - RNA, 21 nt, Human
ugcaaaccaucauugaaaucu

SEQ ID NO: 3770069 - RNA, 23 nt, Human
ugcaaaccugaccccugcucagu

SEQ ID NO: 3770070 - RNA, 15 nt, Human
ugcaaacgcugccug

SEQ ID NO: 3770071 - RNA, 19 nt, Human
ugcaaacgcugccugccca

SEQ ID NO: 3770072 - RNA, 16 nt, Human
ugcaaacucacugcuc

SEQ ID NO: 3770073 - RNA, 20 nt, Human
ugcaaacucuuuggucguuu

SEQ ID NO: 3770074 - RNA, 16 nt, Human
ugcaaacuucagaguu

SEQ ID NO: 3770075 - RNA, 12 nt, Human
ugcaaacuuuau

SEQ ID NO: 3770076 - RNA, 13 nt, Human
ugcaaagaggcaa

SEQ ID NO: 3770077 - RNA, 23 nt, Human
ugcaaagaucuguccucagccuu

SEQ ID NO: 3770078 - RNA, 12 nt, Human
ugcaaagauuug

SEQ ID NO: 3770079 - RNA, 17 nt, Human
ugcaaagcccagcuuga

SEQ ID NO: 3770080 - RNA, 21 nt, Human
ugcaaagcucuguggccacau

SEQ ID NO: 3770081 - RNA, 12 nt, Human
ugcaaaggacug

SEQ ID NO: 3770082 - RNA, 14 nt, Human
ugcaaaggcuggga

SEQ ID NO: 3770083 - RNA, 19 nt, Human
ugcaaaguacaauguguuu

SEQ ID NO: 3770084 - RNA, 17 nt, Human
ugcaaaguacagguacu

SEQ ID NO: 3770085 - RNA, 20 nt, Human
ugcaaaguauuguaaauuau

SEQ ID NO: 3770086 - RNA, 22 nt, Human
ugcaaagucaugcaaaggcugg

SEQ ID NO: 3770087 - RNA, 10 nt, Human
ugcaaagugu

SEQ ID NO: 3770088 - RNA, 17 nt, Human
ugcaaaguucuguguuu

SEQ ID NO: 3770089 - RNA, 19 nt, Human
ugcaaaguucuguguuuaa

SEQ ID NO: 3770090 - RNA, 20 nt, Human
ugcaaaguucuguguuuaau

SEQ ID NO: 3770091 - RNA, 13 nt, Human
ugcaaauaaauau

SEQ ID NO: 3770092 - RNA, 21 nt, Human
ugcaaauaaguguauuuugaa

SEQ ID NO: 3770093 - RNA, 14 nt, Human
ugcaaauagaaaac

SEQ ID NO: 3770094 - RNA, 12 nt, Human
ugcaaauccuau

SEQ ID NO: 3770095 - RNA, 14 nt, Human
ugcaaauccuaugu

SEQ ID NO: 3770096 - RNA, 18 nt, Human
ugcaaaugucaucagaac

SEQ ID NO: 3770097 - RNA, 14 nt, Human
ugcaaauuaacagu

SEQ ID NO: 3770098 - RNA, 12 nt, Human
ugcaacaaaaua

SEQ ID NO: 3770099 - RNA, 14 nt, Human
ugcaacaaaaugua

SEQ ID NO: 3770100 - RNA, 20 nt, Human
ugcaacaaaauguagaauau

SEQ ID NO: 3770101 - RNA, 14 nt, Human
ugcaacaggcuggg

SEQ ID NO: 3770102 - RNA, 17 nt, Human
ugcaacaggcugggcuu

SEQ ID NO: 3770103 - RNA, 14 nt, Human
ugcaacaggcuugu

SEQ ID NO: 3770104 - RNA, 20 nt, Human
ugcaaccaaacucccaucag

SEQ ID NO: 3770105 - RNA, 17 nt, Human
ugcaaccaacuacaacc

SEQ ID NO: 3770106 - RNA, 15 nt, Human
ugcaaccacugcaau

SEQ ID NO: 3770107 - RNA, 12 nt, Human
ugcaaccaggaa

SEQ ID NO: 3770108 - RNA, 17 nt, Human
ugcaaccaggaacagca

SEQ ID NO: 3770109 - RNA, 20 nt, Human
ugcaaccaggaacagcaaau

SEQ ID NO: 3770110 - RNA, 17 nt, Human
ugcaacccuuaccccuu

SEQ ID NO: 3770111 - RNA, 16 nt, Human
ugcaaccgucuguuau

SEQ ID NO: 3770112 - RNA, 19 nt, Human
ugcaaccuccaccuccugg

SEQ ID NO: 3770113 - RNA, 14 nt, Human
ugcaaccuccgccu

SEQ ID NO: 3770114 - RNA, 20 nt, Human
ugcaaccuccgccucccggg

SEQ ID NO: 3770115 - RNA, 21 nt, Human
ugcaaccuccgccucccgggu

SEQ ID NO: 3770116 - RNA, 20 nt, Human
ugcaaccucgcuggacucuc

SEQ ID NO: 3770117 - RNA, 21 nt, Human
ugcaaccucuaccuccugggu

SEQ ID NO: 3770118 - RNA, 14 nt, Human
ugcaaccucugccu

SEQ ID NO: 3770119 - RNA, 18 nt, Human
ugcaaccucugcuuccca

SEQ ID NO: 3770120 - RNA, 22 nt, Human
ugcaaccugauugugucucuug

SEQ ID NO: 3770121 - RNA, 16 nt, Human
ugcaacucaaggacuu

SEQ ID NO: 3770122 - RNA, 17 nt, Human
ugcaacucaaggacuuu

SEQ ID NO: 3770123 - RNA, 13 nt, Human
ugcaacuucugcc

SEQ ID NO: 3770124 - RNA, 14 nt, Human
ugcaacuucugccu

SEQ ID NO: 3770125 - RNA, 23 nt, Human
ugcaagaacucaucacuguggcu

SEQ ID NO: 3770126 - RNA, 22 nt, Human
ugcaagaccccaagaggaaguu

SEQ ID NO: 3770127 - RNA, 17 nt, Human
ugcaagagacucuggcc

SEQ ID NO: 3770128 - RNA, 19 nt, Human
ugcaagagacucuggccuc

SEQ ID NO: 3770129 - RNA, 14 nt, Human
ugcaagagccuugg

SEQ ID NO: 3770130 - RNA, 15 nt, Human
ugcaagagugauugc

SEQ ID NO: 3770131 - RNA, 13 nt, Human
ugcaagaugugaa

SEQ ID NO: 3770132 - RNA, 16 nt, Human
ugcaagaugugaauua

SEQ ID NO: 3770133 - RNA, 16 nt, Human
ugcaagcagggcucug

SEQ ID NO: 3770134 - RNA, 20 nt, Human
ugcaagcagggcucugcccc

SEQ ID NO: 3770135 - RNA, 17 nt, Human
ugcaagcaguuucaaua

SEQ ID NO: 3770136 - RNA, 23 nt, Human
ugcaagcaguuucaauaaaguuu

SEQ ID NO: 3770137 - RNA, 21 nt, Human
ugcaagccagauuuuccugaa

SEQ ID NO: 3770138 - RNA, 12 nt, Human
ugcaagccugcg

SEQ ID NO: 3770139 - RNA, 14 nt, Human
ugcaagccugcguu

SEQ ID NO: 3770140 - RNA, 20 nt, Human
ugcaagcuguccagagaaaa

SEQ ID NO: 3770141 - RNA, 19 nt, Human
ugcaaggaagccacagcug

SEQ ID NO: 3770142 - RNA, 20 nt, Human
ugcaaggaagccacagcugg

SEQ ID NO: 3770143 - RNA, 15 nt, Human
ugcaaggaaggaaag

SEQ ID NO: 3770144 - RNA, 16 nt, Human
ugcaaggaaggaaaga

SEQ ID NO: 3770145 - RNA, 14 nt, Human
ugcaaggaccagga

SEQ ID NO: 3770146 - RNA, 15 nt, Human
ugcaaggaccaggac

SEQ ID NO: 3770147 - RNA, 17 nt, Human
ugcaaggaccuaaaaca

SEQ ID NO: 3770148 - RNA, 15 nt, Human
ugcaaggcagccgug

SEQ ID NO: 3770149 - RNA, 12 nt, Human
ugcaaggcccac

SEQ ID NO: 3770150 - RNA, 23 nt, Human
ugcaaggccgcuguucacccaca

SEQ ID NO: 3770151 - RNA, 23 nt, Human
ugcaaggccugguguuucuugau

SEQ ID NO: 3770152 - RNA, 16 nt, Human
ugcaagggacugugug

SEQ ID NO: 3770153 - RNA, 22 nt, Human
ugcaagggaugaauuguaaaag

SEQ ID NO: 3770154 - RNA, 20 nt, Human
ugcaagggcuccccacugcc

SEQ ID NO: 3770155 - RNA, 15 nt, Human
ugcaagguaaaauuu

SEQ ID NO: 3770156 - RNA, 19 nt, Human
ugcaaggucuugcauuuaa

SEQ ID NO: 3770157 - RNA, 15 nt, Human
ugcaagguggcucca

SEQ ID NO: 3770158 - RNA, 18 nt, Human
ugcaagguuccacagagu

SEQ ID NO: 3770159 - RNA, 23 nt, Human
ugcaagguuuaggcugguggccc

SEQ ID NO: 3770160 - RNA, 15 nt, Human
ugcaaguacugcugu

SEQ ID NO: 3770161 - RNA, 18 nt, Human
ugcaaguaugugagugug

SEQ ID NO: 3770162 - RNA, 15 nt, Human
ugcaagucagaggau

SEQ ID NO: 3770163 - RNA, 23 nt, Human
ugcaagucaguccaggaugcuaa

SEQ ID NO: 3770164 - RNA, 16 nt, Human
ugcaagucauggcugu

SEQ ID NO: 3770165 - RNA, 16 nt, Human
ugcaaguccuuuugua

SEQ ID NO: 3770166 - RNA, 18 nt, Human
ugcaaguccuuuuguaaa

SEQ ID NO: 3770167 - RNA, 20 nt, Human
ugcaaguccuuuuguaaagu

SEQ ID NO: 3770168 - RNA, 13 nt, Human
ugcaagugcugga

SEQ ID NO: 3770169 - RNA, 23 nt, Human
ugcaagugcuggagucuccugag

SEQ ID NO: 3770170 - RNA, 21 nt, Human
ugcaaguguaugcacgugugc

SEQ ID NO: 3770171 - RNA, 19 nt, Human
ugcaaguguguaugugcgu

SEQ ID NO: 3770172 - RNA, 22 nt, Human
ugcaccaacccagccgcugccc

SEQ ID NO: 3770173 - RNA, 14 nt, Human
ugcaccaccaagcc

SEQ ID NO: 3770174 - RNA, 18 nt, Human
ugcaccaccaagccaagg

SEQ ID NO: 3770175 - RNA, 19 nt, Human
ugcaccaccaagccaaggg

SEQ ID NO: 3770176 - RNA, 15 nt, Human
ugcaccacugcacuc

SEQ ID NO: 3770177 - RNA, 21 nt, Human
ugcaccagagcaaccucucac

SEQ ID NO: 3770178 - RNA, 13 nt, Human
ugcaccaggagac

SEQ ID NO: 3770179 - RNA, 17 nt, Human
ugcaccauacucaugca

SEQ ID NO: 3770180 - RNA, 22 nt, Human
ugcaccaugcugcuggggaaga

SEQ ID NO: 3770181 - RNA, 23 nt, Human
ugcaccauugcgcucuagccugg

SEQ ID NO: 3770182 - RNA, 21 nt, Human
ugcacccacucugcuuugacu

SEQ ID NO: 3770183 - RNA, 15 nt, Human
ugcacccagaagaag

SEQ ID NO: 3770184 - RNA, 18 nt, Human
ugcaccccaaagcuuucc

SEQ ID NO: 3770185 - RNA, 19 nt, Human
ugcaccccaaagcuuuccu

SEQ ID NO: 3770186 - RNA, 21 nt, Human
ugcaccccaaagcuuuccugc

SEQ ID NO: 3770187 - RNA, 15 nt, Human
ugcacccccuccugc

SEQ ID NO: 3770188 - RNA, 16 nt, Human
ugcacccccuccugcu

SEQ ID NO: 3770189 - RNA, 17 nt, Human
ugcacccccuccugcug

SEQ ID NO: 3770190 - RNA, 13 nt, Human
ugcaccccuccca

SEQ ID NO: 3770191 - RNA, 15 nt, Human
ugcaccccuuccugg

SEQ ID NO: 3770192 - RNA, 18 nt, Human
ugcaccccuuccugggca

SEQ ID NO: 3770193 - RNA, 19 nt, Human
ugcaccccuuccugggcac

SEQ ID NO: 3770194 - RNA, 16 nt, Human
ugcacccucaggcagg

SEQ ID NO: 3770195 - RNA, 14 nt, Human
ugcacccuccaccc

SEQ ID NO: 3770196 - RNA, 15 nt, Human
ugcacccuccacccu

SEQ ID NO: 3770197 - RNA, 17 nt, Human
ugcacccuccacccugu

SEQ ID NO: 3770198 - RNA, 18 nt, Human
ugcacccuccacccuguc

SEQ ID NO: 3770199 - RNA, 16 nt, Human
ugcacccuccgccuuc

SEQ ID NO: 3770200 - RNA, 13 nt, Human
ugcacccuucuuu

SEQ ID NO: 3770201 - RNA, 17 nt, Human
ugcaccgggccacagag

SEQ ID NO: 3770202 - RNA, 15 nt, Human
ugcaccuaaagaaaa

SEQ ID NO: 3770203 - RNA, 21 nt, Human
ugcaccuaaagaaaaacaaac

SEQ ID NO: 3770204 - RNA, 15 nt, Human
ugcaccuccccccac

SEQ ID NO: 3770205 - RNA, 17 nt, Human
ugcaccuccccccacug

SEQ ID NO: 3770206 - RNA, 11 nt, Human
ugcaccugcau

SEQ ID NO: 3770207 - RNA, 18 nt, Human
ugcaccugcauccguagu

SEQ ID NO: 3770208 - RNA, 17 nt, Human
ugcaccugccagccugg

SEQ ID NO: 3770209 - RNA, 13 nt, Human
ugcaccugggaca

SEQ ID NO: 3770210 - RNA, 20 nt, Human
ugcaccuguacucaggaggc

SEQ ID NO: 3770211 - RNA, 16 nt, Human
ugcaccuguccccacc

SEQ ID NO: 3770212 - RNA, 18 nt, Human
ugcaccuuaccaacuuuc

SEQ ID NO: 3770213 - RNA, 21 nt, Human
ugcaccuuaccaacuuucugu

SEQ ID NO: 3770214 - RNA, 14 nt, Human
ugcaccuuaucuua

SEQ ID NO: 3770215 - RNA, 16 nt, Human
ugcaccuugugucugu

SEQ ID NO: 3770216 - RNA, 18 nt, Human
ugcaccuuucuaguugaa

SEQ ID NO: 3770217 - RNA, 15 nt, Human
ugcacgaccuuggga

SEQ ID NO: 3770218 - RNA, 19 nt, Human
ugcacgacgcccucucccc

SEQ ID NO: 3770219 - RNA, 20 nt, Human
ugcacgacgcccucucccca

SEQ ID NO: 3770220 - RNA, 16 nt, Human
ugcacgcacacugucu

SEQ ID NO: 3770221 - RNA, 19 nt, Human
ugcacgcacacugucugcc

SEQ ID NO: 3770222 - RNA, 21 nt, Human
ugcacgcagauuagcaggcca

SEQ ID NO: 3770223 - RNA, 17 nt, Human
ugcacgcccauguguga

SEQ ID NO: 3770224 - RNA, 15 nt, Human
ugcacgcuggggaag

SEQ ID NO: 3770225 - RNA, 14 nt, Human
ugcacggcugcuga

SEQ ID NO: 3770226 - RNA, 18 nt, Human
ugcacggugaauggcuuu

SEQ ID NO: 3770227 - RNA, 22 nt, Human
ugcacggugaauggcuuuguau

SEQ ID NO: 3770228 - RNA, 18 nt, Human
ugcacggugggccuugcu

SEQ ID NO: 3770229 - RNA, 18 nt, Human
ugcacguaaaguacuugu

SEQ ID NO: 3770230 - RNA, 19 nt, Human
ugcacguaaaguacuugua

SEQ ID NO: 3770231 - RNA, 16 nt, Human
ugcacguacacacaca

SEQ ID NO: 3770232 - RNA, 17 nt, Human
ugcacguauuuuaauag

SEQ ID NO: 3770233 - RNA, 21 nt, Human
ugcacguggagagcuggugcc

SEQ ID NO: 3770234 - RNA, 23 nt, Human
ugcacguggcauguggccugugg

SEQ ID NO: 3770235 - RNA, 15 nt, Human
ugcacguggccucuu

SEQ ID NO: 3770236 - RNA, 17 nt, Human
ugcacguggccucuuga

SEQ ID NO: 3770237 - RNA, 15 nt, Human
ugcacgugugugcac

SEQ ID NO: 3770238 - RNA, 19 nt, Human
ugcacguguguuuuucuau

SEQ ID NO: 3770239 - RNA, 22 nt, Human
ugcacguguguuuuucuauuaa

SEQ ID NO: 3770240 - RNA, 19 nt, Human
ugcacguuaugguguuucu

SEQ ID NO: 3770241 - RNA, 15 nt, Human
ugcacguugcuucag

SEQ ID NO: 3770242 - RNA, 20 nt, Human
ugcacuaaagccagccugac

SEQ ID NO: 3770243 - RNA, 23 nt, Human
ugcacuacuccucugcagugccu

SEQ ID NO: 3770244 - RNA, 15 nt, Human
ugcacuacugacaug

SEQ ID NO: 3770245 - RNA, 16 nt, Human
ugcacuacugacaugu

SEQ ID NO: 3770246 - RNA, 18 nt, Human
ugcacuacugacaugugg

SEQ ID NO: 3770247 - RNA, 12 nt, Human
ugcacuauaugc

SEQ ID NO: 3770248 - RNA, 15 nt, Human
ugcacuauaugcaaa

SEQ ID NO: 3770249 - RNA, 17 nt, Human
ugcacuauaugcaaaca

SEQ ID NO: 3770250 - RNA, 20 nt, Human
ugcacuauaugcaaacaggg

SEQ ID NO: 3770251 - RNA, 19 nt, Human
ugcacucaaaucuuaagaa

SEQ ID NO: 3770252 - RNA, 14 nt, Human
ugcacucagcucuu

SEQ ID NO: 3770253 - RNA, 14 nt, Human
ugcacuccaaucug

SEQ ID NO: 3770254 - RNA, 14 nt, Human
ugcacuccagccug

SEQ ID NO: 3770255 - RNA, 15 nt, Human
ugcacuccagccugg

SEQ ID NO: 3770256 - RNA, 20 nt, Human
ugcacuccagccugggcaac

SEQ ID NO: 3770257 - RNA, 17 nt, Human
ugcacuccagccugggg

SEQ ID NO: 3770258 - RNA, 18 nt, Human
ugcacuccagccuggggg

SEQ ID NO: 3770259 - RNA, 14 nt, Human
ugcacucccaccug

SEQ ID NO: 3770260 - RNA, 12 nt, Human
ugcacuccccug

SEQ ID NO: 3770261 - RNA, 13 nt, Human
ugcacuccccugc

SEQ ID NO: 3770262 - RNA, 16 nt, Human
ugcacucuagccuggg

SEQ ID NO: 3770263 - RNA, 16 nt, Human
ugcacucucuuggcug

SEQ ID NO: 3770264 - RNA, 12 nt, Human
ugcacucuucua

SEQ ID NO: 3770265 - RNA, 23 nt, Human
ugcacucuuguuucucccgugcu

SEQ ID NO: 3770266 - RNA, 19 nt, Human
ugcacugaaguuugauaaa

SEQ ID NO: 3770267 - RNA, 24 nt, Human
ugcacugaaguuugauaaauagug

SEQ ID NO: 3770268 - RNA, 18 nt, Human
ugcacugacccacagccu

SEQ ID NO: 3770269 - RNA, 22 nt, Human
ugcacugacccacagccucugc

SEQ ID NO: 3770270 - RNA, 12 nt, Human
ugcacugacccu

SEQ ID NO: 3770271 - RNA, 17 nt, Human
ugcacugacccuuccag

SEQ ID NO: 3770272 - RNA, 23 nt, Human
ugcacugacccuuccagacauac

SEQ ID NO: 3770273 - RNA, 14 nt, Human
ugcacugacucugg

SEQ ID NO: 3770274 - RNA, 15 nt, Human
ugcacugacucugga

SEQ ID NO: 3770275 - RNA, 16 nt, Human
ugcacugacucuggaa

SEQ ID NO: 3770276 - RNA, 15 nt, Human
ugcacugagcagagu

SEQ ID NO: 3770277 - RNA, 15 nt, Human
ugcacuggaguccag

SEQ ID NO: 3770278 - RNA, 19 nt, Human
ugcacuggaguccagucuc

SEQ ID NO: 3770279 - RNA, 20 nt, Human
ugcacuggaguccagucucu

SEQ ID NO: 3770280 - RNA, 21 nt, Human
ugcacuggaguccagucucuu

SEQ ID NO: 3770281 - RNA, 17 nt, Human
ugcacuggccccacccu

SEQ ID NO: 3770282 - RNA, 17 nt, Human
ugcacugggaggcuccc

SEQ ID NO: 3770283 - RNA, 21 nt, Human
ugcacugggaggcuccccuuc

SEQ ID NO: 3770284 - RNA, 15 nt, Human
ugcacuguaugcugg

SEQ ID NO: 3770285 - RNA, 16 nt, Human
ugcacuguaugcugga

SEQ ID NO: 3770286 - RNA, 22 nt, Human
ugcacugucacuuugcucuggg

SEQ ID NO: 3770287 - RNA, 16 nt, Human
ugcacuguccugcucc

SEQ ID NO: 3770288 - RNA, 19 nt, Human
ugcacuguucccccugugc

SEQ ID NO: 3770289 - RNA, 21 nt, Human
ugcacuguucccccugugcag

SEQ ID NO: 3770290 - RNA, 13 nt, Human
ugcacuuaaagaa

SEQ ID NO: 3770291 - RNA, 23 nt, Human
ugcacuuaacaagcucccaggcc

SEQ ID NO: 3770292 - RNA, 15 nt, Human
ugcacuuaauuuguu

SEQ ID NO: 3770293 - RNA, 18 nt, Human
ugcacuuacuugcuuauu

SEQ ID NO: 3770294 - RNA, 18 nt, Human
ugcacuuaugauuucaug

SEQ ID NO: 3770295 - RNA, 20 nt, Human
ugcacuuaugauuucaugug

SEQ ID NO: 3770296 - RNA, 14 nt, Human
ugcacuuggccucu

SEQ ID NO: 3770297 - RNA, 15 nt, Human
ugcacuuggccucug

SEQ ID NO: 3770298 - RNA, 19 nt, Human
ugcacuugggggcucagca

SEQ ID NO: 3770299 - RNA, 22 nt, Human
ugcacuugggggcucagcaagg

SEQ ID NO: 3770300 - RNA, 17 nt, Human
ugcacuugugauuauuu

SEQ ID NO: 3770301 - RNA, 17 nt, Human
ugcacuuugaugucaug

SEQ ID NO: 3770302 - RNA, 20 nt, Human
ugcacuuugaugucaugugu

SEQ ID NO: 3770303 - RNA, 15 nt, Human
ugcacuuuguaaauu

SEQ ID NO: 3770304 - RNA, 12 nt, Human
ugcacuuuguag

SEQ ID NO: 3770305 - RNA, 14 nt, Human
ugcacuuuguucug

SEQ ID NO: 3770306 - RNA, 20 nt, Human
ugcacuuuguucuggcucuu

SEQ ID NO: 3770307 - RNA, 15 nt, Human
ugcagaaaacauugu

SEQ ID NO: 3770308 - RNA, 16 nt, Human
ugcagaaaacauuguu

SEQ ID NO: 3770309 - RNA, 17 nt, Human
ugcagaaaagcaccugc

SEQ ID NO: 3770310 - RNA, 19 nt, Human
ugcagaaaagcaccugccg

SEQ ID NO: 3770311 - RNA, 22 nt, Human
ugcagaaaagcaccugccgacc

SEQ ID NO: 3770312 - RNA, 20 nt, Human
ugcagaaagcaucccucacc

SEQ ID NO: 3770313 - RNA, 14 nt, Human
ugcagaacacauuu

SEQ ID NO: 3770314 - RNA, 13 nt, Human
ugcagaacugcca

SEQ ID NO: 3770315 - RNA, 14 nt, Human
ugcagaacugccau

SEQ ID NO: 3770316 - RNA, 20 nt, Human
ugcagaacugccauuauuuu

SEQ ID NO: 3770317 - RNA, 16 nt, Human
ugccuggucacagggc

SEQ ID NO: 3770318 - RNA, 17 nt, Human
ugccugguccucacacu

SEQ ID NO: 3770319 - RNA, 15 nt, Human
ugccugguggcagcu

SEQ ID NO: 3770320 - RNA, 17 nt, Human
ugccugguggcagcugc

SEQ ID NO: 3770321 - RNA, 18 nt, Human
ugccugguggcagcugcg

SEQ ID NO: 3770322 - RNA, 19 nt, Human
ugccugguggcagcugcgg

SEQ ID NO: 3770323 - RNA, 13 nt, Human
ugccuguaaacau

SEQ ID NO: 3770324 - RNA, 15 nt, Human
ugccuguaaacauag

SEQ ID NO: 3770325 - RNA, 15 nt, Human
ugccuguaacuugag

SEQ ID NO: 3770326 - RNA, 22 nt, Human
ugccuguagccccagugacagc

SEQ ID NO: 3770327 - RNA, 22 nt, Human
ugccuguaguuaggaaauaaaa

SEQ ID NO: 3770328 - RNA, 15 nt, Human
ugccuguccagccug

SEQ ID NO: 3770329 - RNA, 19 nt, Human
ugccuguccagccugggca

SEQ ID NO: 3770330 - RNA, 20 nt, Human
ugccuguccagccugggcag

SEQ ID NO: 3770331 - RNA, 16 nt, Human
ugccugucccaccccc

SEQ ID NO: 3770332 - RNA, 19 nt, Human
ugccugucccacccccacc

SEQ ID NO: 3770333 - RNA, 20 nt, Human
ugccugucgcuuucccuugg

SEQ ID NO: 3770334 - RNA, 11 nt, Human
ugccugucucc

SEQ ID NO: 3770335 - RNA, 13 nt, Human
ugccugucugccc

SEQ ID NO: 3770336 - RNA, 20 nt, Human
ugccugugccacccaccagg

SEQ ID NO: 3770337 - RNA, 23 nt, Human
ugccugugccaggugaggucagc

SEQ ID NO: 3770338 - RNA, 19 nt, Human
ugccugugcuacaauucau

SEQ ID NO: 3770339 - RNA, 11 nt, Human
ugccuguggcg

SEQ ID NO: 3770340 - RNA, 22 nt, Human
ugccuguggcgccgucuccagg

SEQ ID NO: 3770341 - RNA, 23 nt, Human
ugccuguggcgccgucuccaggg

SEQ ID NO: 3770342 - RNA, 21 nt, Human
ugccuguguccaugcgcucag

SEQ ID NO: 3770343 - RNA, 14 nt, Human
ugccugugucuucu

SEQ ID NO: 3770344 - RNA, 21 nt, Human
ugccugugugacaucaguggc

SEQ ID NO: 3770345 - RNA, 19 nt, Human
ugccuguuauaacucugca

SEQ ID NO: 3770346 - RNA, 18 nt, Human
ugccuguucagcuccagc

SEQ ID NO: 3770347 - RNA, 21 nt, Human
ugccuguucagcuccagcuca

SEQ ID NO: 3770348 - RNA, 16 nt, Human
ugccuguuucccaggc

SEQ ID NO: 3770349 - RNA, 16 nt, Human
ugccuuaaaaccaaag

SEQ ID NO: 3770350 - RNA, 15 nt, Human
ugccuuaaaacuuua

SEQ ID NO: 3770351 - RNA, 19 nt, Human
ugccuuaaacacucaccuu

SEQ ID NO: 3770352 - RNA, 18 nt, Human
ugccuuaaaccuaccucc

SEQ ID NO: 3770353 - RNA, 17 nt, Human
ugccuuaaagucaguaa

SEQ ID NO: 3770354 - RNA, 21 nt, Human
ugccuuaagugaggaaaucaa

SEQ ID NO: 3770355 - RNA, 22 nt, Human
ugccuuaagugaggaaaucaaa

SEQ ID NO: 3770356 - RNA, 20 nt, Human
ugccuuaauaaaaaaugaaa

SEQ ID NO: 3770357 - RNA, 14 nt, Human
ugccuuacacaaag

SEQ ID NO: 3770358 - RNA, 14 nt, Human
ugccuuaccuccug

SEQ ID NO: 3770359 - RNA, 20 nt, Human
ugccuuaccuccugcccagg

SEQ ID NO: 3770360 - RNA, 15 nt, Human
ugccuuacuuuguau

SEQ ID NO: 3770361 - RNA, 17 nt, Human
ugccuuagaaccuuucu

SEQ ID NO: 3770362 - RNA, 18 nt, Human
ugccuuagaggagcccac

SEQ ID NO: 3770363 - RNA, 16 nt, Human
ugccuuagcuucagga

SEQ ID NO: 3770364 - RNA, 17 nt, Human
ugccuuagcuucaggaa

SEQ ID NO: 3770365 - RNA, 17 nt, Human
ugccuuaggccuaccug

SEQ ID NO: 3770366 - RNA, 16 nt, Human
ugccuuauggaacacu

SEQ ID NO: 3770367 - RNA, 20 nt, Human
ugccuuauggaacacucuga

SEQ ID NO: 3770368 - RNA, 16 nt, Human
ugccuucagauguucu

SEQ ID NO: 3770369 - RNA, 14 nt, Human
ugccuuccacgcug

SEQ ID NO: 3770370 - RNA, 17 nt, Human
ugccuuccacgcugucu

SEQ ID NO: 3770371 - RNA, 22 nt, Human
ugccuuccacgcugucuccaga

SEQ ID NO: 3770372 - RNA, 23 nt, Human
ugccuuccacgcugucuccagac

SEQ ID NO: 3770373 - RNA, 18 nt, Human
ugccuuccagaaaacaaa

SEQ ID NO: 3770374 - RNA, 14 nt, Human
ugccuuccauaauu

SEQ ID NO: 3770375 - RNA, 21 nt, Human
ugccuuccaugucggccucua

SEQ ID NO: 3770376 - RNA, 13 nt, Human
ugccuucccuagc

SEQ ID NO: 3770377 - RNA, 19 nt, Human
ugccuuccuaagccugugg

SEQ ID NO: 3770378 - RNA, 20 nt, Human
ugccuuccuaagccuguggc

SEQ ID NO: 3770379 - RNA, 21 nt, Human
ugccuuccuaagccuguggcu

SEQ ID NO: 3770380 - RNA, 19 nt, Human
ugccuuccuccugggcccu

SEQ ID NO: 3770381 - RNA, 18 nt, Human
ugccuuccuuucuccagg

SEQ ID NO: 3770382 - RNA, 21 nt, Human
ugccuuccuuucuccaggacc

SEQ ID NO: 3770383 - RNA, 20 nt, Human
ugccuucgcgguggaaggcc

SEQ ID NO: 3770384 - RNA, 14 nt, Human
ugccuucgcuucuu

SEQ ID NO: 3770385 - RNA, 17 nt, Human
ugccuucgcuucuugcc

SEQ ID NO: 3770386 - RNA, 23 nt, Human
ugccuucgcuucuugccucugug

SEQ ID NO: 3770387 - RNA, 19 nt, Human
ugccuucgguacccaccac

SEQ ID NO: 3770388 - RNA, 19 nt, Human
ugccuucguuaacugugua

SEQ ID NO: 3770389 - RNA, 20 nt, Human
ugccuucguuaacuguguau

SEQ ID NO: 3770390 - RNA, 20 nt, Human
ugccuucucaccagcugcaa

SEQ ID NO: 3770391 - RNA, 22 nt, Human
ugccuucucaccagcugcaaag

SEQ ID NO: 3770392 - RNA, 23 nt, Human
ugccuucuccagacaaaccagaa

SEQ ID NO: 3770393 - RNA, 22 nt, Human
ugccuucugacggcccugcaau

SEQ ID NO: 3770394 - RNA, 11 nt, Human
ugccuucugug

SEQ ID NO: 3770395 - RNA, 21 nt, Human
ugccuucuuauucucacucca

SEQ ID NO: 3770396 - RNA, 14 nt, Human
ugccuucuucaccc

SEQ ID NO: 3770397 - RNA, 13 nt, Human
ugccuucuucagg

SEQ ID NO: 3770398 - RNA, 15 nt, Human
ugccuucuucagggc

SEQ ID NO: 3770399 - RNA, 20 nt, Human
ugccuucuucagggccuggu

SEQ ID NO: 3770400 - RNA, 21 nt, Human
ugccuucuucggggaacuccu

SEQ ID NO: 3770401 - RNA, 23 nt, Human
ugccuucuucggggaacuccugg

SEQ ID NO: 3770402 - RNA, 20 nt, Human
ugccuucuucuuuuugcugu

SEQ ID NO: 3770403 - RNA, 14 nt, Human
ugccuucuuugaag

SEQ ID NO: 3770404 - RNA, 15 nt, Human
ugccuucuuugaaga

SEQ ID NO: 3770405 - RNA, 16 nt, Human
ugccuucuuuugauua

SEQ ID NO: 3770406 - RNA, 13 nt, Human
ugccuucuuuugu

SEQ ID NO: 3770407 - RNA, 19 nt, Human
ugccuugaaccacuucccu

SEQ ID NO: 3770408 - RNA, 17 nt, Human
ugccuugaaccugugag

SEQ ID NO: 3770409 - RNA, 12 nt, Human
ugccuugaauaa

SEQ ID NO: 3770410 - RNA, 15 nt, Human
ugccuugcagaacug

SEQ ID NO: 3770411 - RNA, 20 nt, Human
ugccuugcagaacugccauu

SEQ ID NO: 3770412 - RNA, 22 nt, Human
ugccuugcuguuuguccugaga

SEQ ID NO: 3770413 - RNA, 19 nt, Human
ugccuuggagggucccaag

SEQ ID NO: 3770414 - RNA, 20 nt, Human
ugccuuggagggucccaagc

SEQ ID NO: 3770415 - RNA, 17 nt, Human
ugccuuggccucccaag

SEQ ID NO: 3770416 - RNA, 15 nt, Human
ugccuugggcugcuc

SEQ ID NO: 3770417 - RNA, 19 nt, Human
ugccuugggcugcuccuca

SEQ ID NO: 3770418 - RNA, 19 nt, Human
ugccuuggggaauuuccuc

SEQ ID NO: 3770419 - RNA, 15 nt, Human
ugccuugucacgcca

SEQ ID NO: 3770420 - RNA, 13 nt, Human
ugccuuguuucau

SEQ ID NO: 3770421 - RNA, 20 nt, Human
ugccuuguuuuuuguuuguu

SEQ ID NO: 3770422 - RNA, 14 nt, Human
ugccuuuaaaucug

SEQ ID NO: 3770423 - RNA, 18 nt, Human
ugccuuuaaaucugugau

SEQ ID NO: 3770424 - RNA, 14 nt, Human
ugccuuuacuucag

SEQ ID NO: 3770425 - RNA, 21 nt, Human
ugccuuuagccccucccaagc

SEQ ID NO: 3770426 - RNA, 21 nt, Human
ugccuuuauuguguuugucau

SEQ ID NO: 3770427 - RNA, 17 nt, Human
ugccuuuauuuccacug

SEQ ID NO: 3770428 - RNA, 17 nt, Human
ugccuuucaggaucuau

SEQ ID NO: 3770429 - RNA, 13 nt, Human
ugccuuuccuguu

SEQ ID NO: 3770430 - RNA, 14 nt, Human
ugccuuuccuguuc

SEQ ID NO: 3770431 - RNA, 16 nt, Human
ugccuuugaagaguga

SEQ ID NO: 3770432 - RNA, 13 nt, Human
ugccuuugagaca

SEQ ID NO: 3770433 - RNA, 17 nt, Human
ugccuuugagacaguuu

SEQ ID NO: 3770434 - RNA, 20 nt, Human
ugccuuugagacaguuucuu

SEQ ID NO: 3770435 - RNA, 21 nt, Human
ugccuuugaguuuccucaggc

SEQ ID NO: 3770436 - RNA, 22 nt, Human
ugccuuugaguuuccucaggcu

SEQ ID NO: 3770437 - RNA, 16 nt, Human
ugccuuugcaaaucag

SEQ ID NO: 3770438 - RNA, 19 nt, Human
ugccuuuggcacucugacu

SEQ ID NO: 3770439 - RNA, 17 nt, Human
ugccuuuggcagaguuc

SEQ ID NO: 3770440 - RNA, 11 nt, Human
ugccuuuguaa

SEQ ID NO: 3770441 - RNA, 12 nt, Human
ugccuuuguaag

SEQ ID NO: 3770442 - RNA, 13 nt, Human
ugccuuuguaagu

SEQ ID NO: 3770443 - RNA, 16 nt, Human
ugccuuuguaaguuau

SEQ ID NO: 3770444 - RNA, 16 nt, Human
ugccuuuuaauuuuua

SEQ ID NO: 3770445 - RNA, 16 nt, Human
ugccuuuuaguuccug

SEQ ID NO: 3770446 - RNA, 17 nt, Human
ugccuuuucccaacucc

SEQ ID NO: 3770447 - RNA, 15 nt, Human
ugccuuuugcacccc

SEQ ID NO: 3770448 - RNA, 17 nt, Human
ugccuuuugcaccccuc

SEQ ID NO: 3770449 - RNA, 20 nt, Human
ugccuuuugcaccccuccca

SEQ ID NO: 3770450 - RNA, 20 nt, Human
ugccuuuuuauaacuuuuua

SEQ ID NO: 3770451 - RNA, 19 nt, Human
ugccuuuuuuguaguuuuu

SEQ ID NO: 3770452 - RNA, 13 nt, Human
ugcgaaaggauga

SEQ ID NO: 3770453 - RNA, 16 nt, Human
ugcgaaguccuaugga

SEQ ID NO: 3770454 - RNA, 18 nt, Human
ugcgaauccaagcucccu

SEQ ID NO: 3770455 - RNA, 22 nt, Human
ugcgaauccaagcucccugccc

SEQ ID NO: 3770456 - RNA, 22 nt, Human
ugcgaaugguagucuaaccaaa

SEQ ID NO: 3770457 - RNA, 19 nt, Human
ugcgaccccaucugcccag

SEQ ID NO: 3770458 - RNA, 21 nt, Human
ugcgacccugggggcacagga

SEQ ID NO: 3770459 - RNA, 19 nt, Human
ugcgacggagagaaaaaag

SEQ ID NO: 3770460 - RNA, 17 nt, Human
ugcgacuuucugccugg

SEQ ID NO: 3770461 - RNA, 20 nt, Human
ugcuaccacggccuccuuuc

SEQ ID NO: 3770462 - RNA, 15 nt, Human
ugcuaccaguauuua

SEQ ID NO: 3770463 - RNA, 13 nt, Human
ugcuacccagcca

SEQ ID NO: 3770464 - RNA, 14 nt, Human
ugcuacccucccug

SEQ ID NO: 3770465 - RNA, 18 nt, Human
ugcuacccucccugcugu

SEQ ID NO: 3770466 - RNA, 18 nt, Human
ugcuaccguugacuucca

SEQ ID NO: 3770467 - RNA, 22 nt, Human
ugcuaccucacugggguccugg

SEQ ID NO: 3770468 - RNA, 19 nt, Human
ugcuaccugaucccacucc

SEQ ID NO: 3770469 - RNA, 19 nt, Human
ugcuaccuggguccuuuuc

SEQ ID NO: 3770470 - RNA, 15 nt, Human
ugcuaccuugcccca

SEQ ID NO: 3770471 - RNA, 13 nt, Human
ugcuacgugugau

SEQ ID NO: 3770472 - RNA, 15 nt, Human
ugcuacgugugauuu

SEQ ID NO: 3770473 - RNA, 19 nt, Human
ugcuacgugugauuuuucu

SEQ ID NO: 3770474 - RNA, 18 nt, Human
ugcuacuaaguucacauu

SEQ ID NO: 3770475 - RNA, 19 nt, Human
ugcuacucaaguagcauuu

SEQ ID NO: 3770476 - RNA, 15 nt, Human
ugcuacugcacucca

SEQ ID NO: 3770477 - RNA, 20 nt, Human
ugcuacugcacuccagccug

SEQ ID NO: 3770478 - RNA, 13 nt, Human
ugcuacuguacau

SEQ ID NO: 3770479 - RNA, 21 nt, Human
ugcuacuguccuacccacccu

SEQ ID NO: 3770480 - RNA, 22 nt, Human
ugcuacuguccuacccacccuc

SEQ ID NO: 3770481 - RNA, 18 nt, Human
ugcuacugucuuuggaaa

SEQ ID NO: 3770482 - RNA, 21 nt, Human
ugcuacuguuguaagaauucu

SEQ ID NO: 3770483 - RNA, 23 nt, Human
ugcuacuguuguaagaauucuga

SEQ ID NO: 3770484 - RNA, 19 nt, Human
ugcuacuuaauuccuuucu

SEQ ID NO: 3770485 - RNA, 22 nt, Human
ugcuacuuccugccuggucucc

SEQ ID NO: 3770486 - RNA, 13 nt, Human
ugcuacuuugccu

SEQ ID NO: 3770487 - RNA, 18 nt, Human
ugcuacuuugccuuuugc

SEQ ID NO: 3770488 - RNA, 15 nt, Human
ugcuagaacucccuu

SEQ ID NO: 3770489 - RNA, 17 nt, Human
ugcuagaacucccuuuc

SEQ ID NO: 3770490 - RNA, 19 nt, Human
ugcuagaacucccuuucaa

SEQ ID NO: 3770491 - RNA, 21 nt, Human
ugcuagaacucccuuucaaca

SEQ ID NO: 3770492 - RNA, 12 nt, Human
ugcuagaacuuu

SEQ ID NO: 3770493 - RNA, 20 nt, Human
ugcuagaacuuuuuuaaaua

SEQ ID NO: 3770494 - RNA, 15 nt, Human
ugcuagaagaaaaca

SEQ ID NO: 3770495 - RNA, 13 nt, Human
ugcuagaauacuu

SEQ ID NO: 3770496 - RNA, 14 nt, Human
ugcuagagcuccuc

SEQ ID NO: 3770497 - RNA, 16 nt, Human
ugcuagcacaugcccu

SEQ ID NO: 3770498 - RNA, 20 nt, Human
ugcuagcacuuggagccaag

SEQ ID NO: 3770499 - RNA, 18 nt, Human
ugcuagcaguaaaagaug

SEQ ID NO: 3770500 - RNA, 22 nt, Human
ugcuagcaguaaaagaugaagu

SEQ ID NO: 3770501 - RNA, 20 nt, Human
ugcuagccggccacuuugga

SEQ ID NO: 3770502 - RNA, 18 nt, Human
ugcuagcucugagccagu

SEQ ID NO: 3770503 - RNA, 17 nt, Human
ugcuaggaacacuccuu

SEQ ID NO: 3770504 - RNA, 12 nt, Human
ugcuaggaagag

SEQ ID NO: 3770505 - RNA, 20 nt, Human
ugcuaggguuaggagguccu

SEQ ID NO: 3770506 - RNA, 14 nt, Human
ugcuaggucucgga

SEQ ID NO: 3770507 - RNA, 15 nt, Human
ugcuaggugggccag

SEQ ID NO: 3770508 - RNA, 16 nt, Human
ugcuagguuaauucca

SEQ ID NO: 3770509 - RNA, 13 nt, Human
ugcuaguauuuga

SEQ ID NO: 3770510 - RNA, 16 nt, Human
ugcuagucuuaagaac

SEQ ID NO: 3770511 - RNA, 13 nt, Human
ugcuagugagcug

SEQ ID NO: 3770512 - RNA, 15 nt, Human
ugcuaguguucuguc

SEQ ID NO: 3770513 - RNA, 13 nt, Human
ugcuauaaucugu

SEQ ID NO: 3770514 - RNA, 21 nt, Human
ugcuauaaucuguuuuuacgu

SEQ ID NO: 3770515 - RNA, 13 nt, Human
ugcuauacugcau

SEQ ID NO: 3770516 - RNA, 18 nt, Human
ugcuauagagccuaccug

SEQ ID NO: 3770517 - RNA, 20 nt, Human
ugcuauaguauuugauucaa

SEQ ID NO: 3770518 - RNA, 22 nt, Human
ugcuauaguauuugauucaaaa

SEQ ID NO: 3770519 - RNA, 23 nt, Human
ugcuauauuugugauauaggaau

SEQ ID NO: 3770520 - RNA, 16 nt, Human
ugcuauauuuucauga

SEQ ID NO: 3770521 - RNA, 22 nt, Human
ugcuauauuuucaugacuuuuc

SEQ ID NO: 3770522 - RNA, 19 nt, Human
ugcuaucaacaauaaaauu

SEQ ID NO: 3770523 - RNA, 14 nt, Human
ugcuaucacacagu

SEQ ID NO: 3770524 - RNA, 17 nt, Human
ugcuaucauuauucgua

SEQ ID NO: 3770525 - RNA, 19 nt, Human
ugcuauccagcuauuuuua

SEQ ID NO: 3770526 - RNA, 20 nt, Human
ugcuauccccaucucccugc

SEQ ID NO: 3770527 - RNA, 17 nt, Human
ugcuaucucccccagcc

SEQ ID NO: 3770528 - RNA, 15 nt, Human
ugcuaucucuauuau

SEQ ID NO: 3770529 - RNA, 23 nt, Human
ugcuaucuggaggccuuccagcu

SEQ ID NO: 3770530 - RNA, 17 nt, Human
ugcuaucuuaauuuugg

SEQ ID NO: 3770531 - RNA, 18 nt, Human
ugcuaucuuaauuuuggu

SEQ ID NO: 3770532 - RNA, 13 nt, Human
ugcuaugaaugau

SEQ ID NO: 3770533 - RNA, 15 nt, Human
ugcuauggugcucug

SEQ ID NO: 3770534 - RNA, 17 nt, Human
ugcuaugucauuucaug

SEQ ID NO: 3770535 - RNA, 19 nt, Human
ugcuaugucauuucauguc

SEQ ID NO: 3770536 - RNA, 18 nt, Human
ugcuauguuacuauuuuc

SEQ ID NO: 3770537 - RNA, 20 nt, Human
ugcuauguuuugacauuuuu

SEQ ID NO: 3770538 - RNA, 12 nt, Human
ugcuauucuguc

SEQ ID NO: 3770539 - RNA, 16 nt, Human
ugcuauugacaauaaa

SEQ ID NO: 3770540 - RNA, 17 nt, Human
ugcuauugacaauaaaa

SEQ ID NO: 3770541 - RNA, 22 nt, Human
ugcuauuguagagccagagguc

SEQ ID NO: 3770542 - RNA, 16 nt, Human
ugcuauugugaauagu

SEQ ID NO: 3770543 - RNA, 18 nt, Human
ugcuauuuauuuuccuaa

SEQ ID NO: 3770544 - RNA, 19 nt, Human
ugcuauuuauuuuccuaaa

SEQ ID NO: 3770545 - RNA, 12 nt, Human
ugcuauuucuau

SEQ ID NO: 3770546 - RNA, 22 nt, Human
ugcuauuucuauauuuucauuc

SEQ ID NO: 3770547 - RNA, 20 nt, Human
ugcuauuugaacaagugggc

SEQ ID NO: 3770548 - RNA, 13 nt, Human
ugcuauuugcaau

SEQ ID NO: 3770549 - RNA, 15 nt, Human
ugcuauuuuacuguc

SEQ ID NO: 3770550 - RNA, 18 nt, Human
ugcuauuuuacugucuua

SEQ ID NO: 3770551 - RNA, 20 nt, Human
ugcuauuuuacugucuuaau

SEQ ID NO: 3770552 - RNA, 12 nt, Human
ugcuauuuuugu

SEQ ID NO: 3770553 - RNA, 14 nt, Human
ugcucaaaauuuga

SEQ ID NO: 3770554 - RNA, 19 nt, Human
ugcucaaaucuauucagac

SEQ ID NO: 3770555 - RNA, 13 nt, Human
ugcucaacuugca

SEQ ID NO: 3770556 - RNA, 17 nt, Human
ugcucaacuugcaaaau

SEQ ID NO: 3770557 - RNA, 13 nt, Human
ugcucaaggccag

SEQ ID NO: 3770558 - RNA, 19 nt, Human
ugcucacacuccacauccc

SEQ ID NO: 3770559 - RNA, 13 nt, Human
ugcucacagcugu

SEQ ID NO: 3770560 - RNA, 15 nt, Human
ugcucacaguuauua

SEQ ID NO: 3770561 - RNA, 17 nt, Human
ugcucaccaugcuucca

SEQ ID NO: 3770562 - RNA, 12 nt, Human
ugcucaccuggg

SEQ ID NO: 3770563 - RNA, 13 nt, Human
ugcucaccugggg

SEQ ID NO: 3770564 - RNA, 14 nt, Human
ugcucaccuggggu

SEQ ID NO: 3770565 - RNA, 23 nt, Human
ugcucaccuggggugugggaggc

SEQ ID NO: 3770566 - RNA, 16 nt, Human
ugcucacguuaccuug

SEQ ID NO: 3770567 - RNA, 21 nt, Human
ugcucacguuaccuugacaca

SEQ ID NO: 3770568 - RNA, 20 nt, Human
ugcucacuaccuccucaggg

SEQ ID NO: 3770569 - RNA, 21 nt, Human
ugcucacuaccuccucaggga

SEQ ID NO: 3770570 - RNA, 20 nt, Human
ugcucagaacuugcugcugu

SEQ ID NO: 3770571 - RNA, 22 nt, Human
ugcucagcccugacuggugcua

SEQ ID NO: 3770572 - RNA, 16 nt, Human
ugcucagcccugagga

SEQ ID NO: 3770573 - RNA, 17 nt, Human
ugcucagcccugaggac

SEQ ID NO: 3770574 - RNA, 15 nt, Human
ugcucagcccuggag

SEQ ID NO: 3770575 - RNA, 16 nt, Human
ugcucagcccuggagg

SEQ ID NO: 3770576 - RNA, 23 nt, Human
ugcucagcccuggaggugccagc

SEQ ID NO: 3770577 - RNA, 20 nt, Human
ugcucagcucugggccauuc

SEQ ID NO: 3770578 - RNA, 12 nt, Human
ugcucagcuucu

SEQ ID NO: 3770579 - RNA, 14 nt, Human
ugcucaggacucag

SEQ ID NO: 3770580 - RNA, 23 nt, Human
ugcucaggacucagaagccucug

SEQ ID NO: 3770581 - RNA, 18 nt, Human
ugcucaggagcccuggga

SEQ ID NO: 3770582 - RNA, 20 nt, Human
ugcucaggagcccugggagg

SEQ ID NO: 3770583 - RNA, 20 nt, Human
ugcucaggcugcagcuggac

SEQ ID NO: 3770584 - RNA, 21 nt, Human
ugcucaggcugcagcuggaca

SEQ ID NO: 3770585 - RNA, 22 nt, Human
ugcucaggcugcagcuggacag

SEQ ID NO: 3770586 - RNA, 23 nt, Human
ugcucaggcugcagcuggacaga

SEQ ID NO: 3770587 - RNA, 21 nt, Human
ugcucagggaaaagcagcucu

SEQ ID NO: 3770588 - RNA, 14 nt, Human
ugcucaggggcccu

SEQ ID NO: 3770589 - RNA, 17 nt, Human
ugcucaggggcccugga

SEQ ID NO: 3770590 - RNA, 21 nt, Human
ugcucagggggcgccuguggu

SEQ ID NO: 3770591 - RNA, 16 nt, Human
ugcucagggucaauuu

SEQ ID NO: 3770592 - RNA, 16 nt, Human
ugcucagucucccuuu

SEQ ID NO: 3770593 - RNA, 15 nt, Human
ugcucaguguuucau

SEQ ID NO: 3770594 - RNA, 16 nt, Human
ugcucaguguuucaua

SEQ ID NO: 3770595 - RNA, 18 nt, Human
ugcucaguucagaaucac

SEQ ID NO: 3770596 - RNA, 23 nt, Human
ugcucaguucagaaucacuucug

SEQ ID NO: 3770597 - RNA, 20 nt, Human
ugcucaguugcuaaacacug

SEQ ID NO: 3770598 - RNA, 17 nt, Human
ugcucaguuguagaaug

SEQ ID NO: 3770599 - RNA, 21 nt, Human
ugcucaguuguagaauguauu

SEQ ID NO: 3770600 - RNA, 24 nt, Human
ugcucauauuucccaugauuucau

SEQ ID NO: 3770601 - RNA, 17 nt, Human
ugcucaucauucucugu

SEQ ID NO: 3770602 - RNA, 23 nt, Human
ugcucaucauucucugucucauc

SEQ ID NO: 3770603 - RNA, 16 nt, Human
ugcucaucugcugguc

SEQ ID NO: 3770604 - RNA, 15 nt, Human
ugcucauuaauuuug

SEQ ID NO: 3770605 - RNA, 23 nt, Human
ugcucuuguuuuuauuaauuuau

SEQ ID NO: 3770606 - RNA, 17 nt, Human
ugcucuuucucugccag

SEQ ID NO: 3770607 - RNA, 21 nt, Human
ugcucuuucuucuuccacaca

SEQ ID NO: 3770608 - RNA, 20 nt, Human
ugcucuuuggccugaugacc

SEQ ID NO: 3770609 - RNA, 22 nt, Human
ugcucuuuguuuugugucucuu

SEQ ID NO: 3770610 - RNA, 22 nt, Human
ugcucuuuuuuacucauugaaa

SEQ ID NO: 3770611 - RNA, 16 nt, Human
ugcugaaaaaugggca

SEQ ID NO: 3770612 - RNA, 21 nt, Human
ugcugaaaaccaucuggccug

SEQ ID NO: 3770613 - RNA, 18 nt, Human
ugcugaaaauguccuugu

SEQ ID NO: 3770614 - RNA, 22 nt, Human
ugcugaaaauugccuuucugug

SEQ ID NO: 3770615 - RNA, 18 nt, Human
ugcugaacaaaaaauaaa

SEQ ID NO: 3770616 - RNA, 21 nt, Human
ugcugaacaccuuguggaagc

SEQ ID NO: 3770617 - RNA, 14 nt, Human
ugcugaacauugga

SEQ ID NO: 3770618 - RNA, 18 nt, Human
ugcugaagcuuauuaaug

SEQ ID NO: 3770619 - RNA, 20 nt, Human
ugcugaagcuuauuaaugcu

SEQ ID NO: 3770620 - RNA, 23 nt, Human
ugcugaaggaauaaauugcuccu

SEQ ID NO: 3770621 - RNA, 12 nt, Human
ugcugaaggcuc

SEQ ID NO: 3770622 - RNA, 13 nt, Human
ugcugaagggcau

SEQ ID NO: 3770623 - RNA, 23 nt, Human
ugcugaauacagaggcaacugca

SEQ ID NO: 3770624 - RNA, 11 nt, Human
ugcugaauagg

SEQ ID NO: 3770625 - RNA, 18 nt, Human
ugcugaauauacagcagg

SEQ ID NO: 3770626 - RNA, 22 nt, Human
ugcugaaugguuuucaaaauaa

SEQ ID NO: 3770627 - RNA, 18 nt, Human
ugcugaauguugggacug

SEQ ID NO: 3770628 - RNA, 14 nt, Human
ugcugaauuuucac

SEQ ID NO: 3770629 - RNA, 22 nt, Human
ugcugaauuuucacaugaacau

SEQ ID NO: 3770630 - RNA, 16 nt, Human
ugcugacagacacagg

SEQ ID NO: 3770631 - RNA, 22 nt, Human
ugcugacagacacaggcccggc

SEQ ID NO: 3770632 - RNA, 15 nt, Human
ugcugacagcugcuc

SEQ ID NO: 3770633 - RNA, 16 nt, Human
ugcugaccaauugugc

SEQ ID NO: 3770634 - RNA, 21 nt, Human
ugcugaccaauugugcugcca

SEQ ID NO: 3770635 - RNA, 16 nt, Human
ugcugacccaugggca

SEQ ID NO: 3770636 - RNA, 16 nt, Human
ugcugaccuccacagc

SEQ ID NO: 3770637 - RNA, 14 nt, Human
ugcugaccugcuga

SEQ ID NO: 3770638 - RNA, 17 nt, Human
ugcugacggccagggag

SEQ ID NO: 3770639 - RNA, 22 nt, Human
ugcugacggccagggagaagcu

SEQ ID NO: 3770640 - RNA, 23 nt, Human
ugcugacuccacgauccugccac

SEQ ID NO: 3770641 - RNA, 19 nt, Human
ugcugacuguacuccuccc

SEQ ID NO: 3770642 - RNA, 24 nt, Human
ugcugacuguuuucucuugagagg

SEQ ID NO: 3770643 - RNA, 21 nt, Human
ugcugagagacccaaggagga

SEQ ID NO: 3770644 - RNA, 22 nt, Human
ugcugagagggcucgaggggug

SEQ ID NO: 3770645 - RNA, 12 nt, Human
ugcugagccucu

SEQ ID NO: 3770646 - RNA, 14 nt, Human
ugcugagccucugc

SEQ ID NO: 3770647 - RNA, 21 nt, Human
ugcugagcucugagaggcccu

SEQ ID NO: 3770648 - RNA, 22 nt, Human
ugcugagcucugagaggcccug

SEQ ID NO: 3770649 - RNA, 17 nt, Human
ugcugaggccugggccg

SEQ ID NO: 3770650 - RNA, 14 nt, Human
ugcugagggaccag

SEQ ID NO: 3770651 - RNA, 16 nt, Human
ugcugagggaccagcc

SEQ ID NO: 3770652 - RNA, 19 nt, Human
ugcugagggaccagccaag

SEQ ID NO: 3770653 - RNA, 20 nt, Human
ugcugagggaccagccaaga

SEQ ID NO: 3770654 - RNA, 11 nt, Human
ugcugaggguc

SEQ ID NO: 3770655 - RNA, 12 nt, Human
ugcugagggugu

SEQ ID NO: 3770656 - RNA, 23 nt, Human
ugcugaggguguuucuuccugca

SEQ ID NO: 3770657 - RNA, 21 nt, Human
ugcugagucaucuguuagggc

SEQ ID NO: 3770658 - RNA, 20 nt, Human
ugcugaguccgaccuggccu

SEQ ID NO: 3770659 - RNA, 17 nt, Human
ugcugagucucccaagg

SEQ ID NO: 3770660 - RNA, 15 nt, Human
ugcugagucugaagg

SEQ ID NO: 3770661 - RNA, 17 nt, Human
ugcugagucugaaggcu

SEQ ID NO: 3770662 - RNA, 19 nt, Human
ugcugagucuguucuggua

SEQ ID NO: 3770663 - RNA, 21 nt, Human
ugcugagucuguucugguaau

SEQ ID NO: 3770664 - RNA, 19 nt, Human
ugcugaucaucgccagagg

SEQ ID NO: 3770665 - RNA, 14 nt, Human
ugcugauccuugca

SEQ ID NO: 3770666 - RNA, 17 nt, Human
ugcugaucgccuucccc

SEQ ID NO: 3770667 - RNA, 17 nt, Human
ugcugauggagccuucc

SEQ ID NO: 3770668 - RNA, 13 nt, Human
ugcugauggugca

SEQ ID NO: 3770669 - RNA, 17 nt, Human
ugcugauguccucacca

SEQ ID NO: 3770670 - RNA, 21 nt, Human
ugcugauguggcaacugcuga

SEQ ID NO: 3770671 - RNA, 13 nt, Human
ugcugauguucag

SEQ ID NO: 3770672 - RNA, 15 nt, Human
ugcugauguucagug

SEQ ID NO: 3770673 - RNA, 18 nt, Human
ugcugauguucaguguaa

SEQ ID NO: 3770674 - RNA, 15 nt, Human
ugcugauuuaaacac

SEQ ID NO: 3770675 - RNA, 17 nt, Human
ugcugauuuaaacacau

SEQ ID NO: 3770676 - RNA, 13 nt, Human
ugcugauuuuauu

SEQ ID NO: 3770677 - RNA, 19 nt, Human
ugcugauuuuauucuugau

SEQ ID NO: 3770678 - RNA, 13 nt, Human
ugcugcaaaccug

SEQ ID NO: 3770679 - RNA, 20 nt, Human
ugcugcaaaccugaccccug

SEQ ID NO: 3770680 - RNA, 19 nt, Human
ugcugcaagcacagcccuu

SEQ ID NO: 3770681 - RNA, 21 nt, Human
ugcugcaaggacauucuugua

SEQ ID NO: 3770682 - RNA, 13 nt, Human
ugcugcaaggccu

SEQ ID NO: 3770683 - RNA, 21 nt, Human
ugcugcagaggggcaggcccu

SEQ ID NO: 3770684 - RNA, 22 nt, Human
ugcugcagaggggcaggcccug

SEQ ID NO: 3770685 - RNA, 13 nt, Human
ugcugcagauacu

SEQ ID NO: 3770686 - RNA, 16 nt, Human
ugcugcagcucccugg

SEQ ID NO: 3770687 - RNA, 13 nt, Human
ugcugcaggggcu

SEQ ID NO: 3770688 - RNA, 19 nt, Human
ugcugcaggggcucuggag

SEQ ID NO: 3770689 - RNA, 18 nt, Human
ugcugcaguugccaguca

SEQ ID NO: 3770690 - RNA, 21 nt, Human
ugcugcaguugccagucaccc

SEQ ID NO: 3770691 - RNA, 22 nt, Human
ugcugcauggcagggggcugcu

SEQ ID NO: 3770692 - RNA, 18 nt, Human
ugcugcauuuaaaagaua

SEQ ID NO: 3770693 - RNA, 19 nt, Human
ugcugcauuuaaaagauac

SEQ ID NO: 3770694 - RNA, 19 nt, Human
ugcugccaguaccagcccc

SEQ ID NO: 3770695 - RNA, 12 nt, Human
ugcugccaucca

SEQ ID NO: 3770696 - RNA, 21 nt, Human
ugcugccauccagguucagcu

SEQ ID NO: 3770697 - RNA, 14 nt, Human
ugcugcccccaccc

SEQ ID NO: 3770698 - RNA, 20 nt, Human
ugcugcccccaccccgggga

SEQ ID NO: 3770699 - RNA, 20 nt, Human
ugcugccccugcacagcagg

SEQ ID NO: 3770700 - RNA, 15 nt, Human
ugcugccccugccuu

SEQ ID NO: 3770701 - RNA, 13 nt, Human
ugcugcccuccau

SEQ ID NO: 3770702 - RNA, 16 nt, Human
ugcugcccugcccacc

SEQ ID NO: 3770703 - RNA, 19 nt, Human
ugcugcccugcccaccugg

SEQ ID NO: 3770704 - RNA, 14 nt, Human
ugcugcccugugag

SEQ ID NO: 3770705 - RNA, 20 nt, Human
ugcugccgccucccagccug

SEQ ID NO: 3770706 - RNA, 13 nt, Human
ugcugccucagga

SEQ ID NO: 3770707 - RNA, 22 nt, Human
ugcugccuccccaacccugccc

SEQ ID NO: 3770708 - RNA, 21 nt, Human
ugcugccugcccgcacagcag

SEQ ID NO: 3770709 - RNA, 23 nt, Human
ugcugccugcccgcacagcagcc

SEQ ID NO: 3770710 - RNA, 14 nt, Human
ugcugccugccugu

SEQ ID NO: 3770711 - RNA, 18 nt, Human
ugcugccuggccacugcu

SEQ ID NO: 3770712 - RNA, 15 nt, Human
ugcugccugucccca

SEQ ID NO: 3770713 - RNA, 18 nt, Human
ugcugccuuauucaggga

SEQ ID NO: 3770714 - RNA, 23 nt, Human
ugcugccuucugacggcccugca

SEQ ID NO: 3770715 - RNA, 20 nt, Human
ugcugccuucuggauucuug

SEQ ID NO: 3770716 - RNA, 17 nt, Human
ugcugcgcccugggcuc

SEQ ID NO: 3770717 - RNA, 20 nt, Human
ugcugcgcccuuaccuuccc

SEQ ID NO: 3770718 - RNA, 16 nt, Human
ugcugcggagcaagag

SEQ ID NO: 3770719 - RNA, 19 nt, Human
ugcugcuaauauuuuccuc

SEQ ID NO: 3770720 - RNA, 22 nt, Human
ugcugcuaaucuucagggcacu

SEQ ID NO: 3770721 - RNA, 14 nt, Human
ugcugcuaauucuu

SEQ ID NO: 3770722 - RNA, 20 nt, Human
ugcugcuacccucccugcug

SEQ ID NO: 3770723 - RNA, 15 nt, Human
ugcugcuacuuauau

SEQ ID NO: 3770724 - RNA, 12 nt, Human
ugcugcuagaac

SEQ ID NO: 3770725 - RNA, 16 nt, Human
ugcugcuauuuuacug

SEQ ID NO: 3770726 - RNA, 18 nt, Human
ugcugcuauuuuacuguc

SEQ ID NO: 3770727 - RNA, 16 nt, Human
ugcugcucccucagac

SEQ ID NO: 3770728 - RNA, 17 nt, Human
ugcugcuccuuagcugc

SEQ ID NO: 3770729 - RNA, 23 nt, Human
ugcugcucuuggcuggacccagc

SEQ ID NO: 3770730 - RNA, 15 nt, Human
ugcugcugagaaccu

SEQ ID NO: 3770731 - RNA, 16 nt, Human
ugcugcugagaaccug

SEQ ID NO: 3770732 - RNA, 17 nt, Human
ugcugcugagaaccugg

SEQ ID NO: 3770733 - RNA, 20 nt, Human
ugcugcugagaaccuggccu

SEQ ID NO: 3770734 - RNA, 21 nt, Human
ugcugcugagaaccuggccuu

SEQ ID NO: 3770735 - RNA, 17 nt, Human
ugcugcugcugcgcccu

SEQ ID NO: 3770736 - RNA, 13 nt, Human
ugcugcuggccaa

SEQ ID NO: 3770737 - RNA, 12 nt, Human
ugcugcuggugc

SEQ ID NO: 3770738 - RNA, 14 nt, Human
ugcugcuguguuuu

SEQ ID NO: 3770739 - RNA, 17 nt, Human
ugcugcuucccucugcc

SEQ ID NO: 3770740 - RNA, 20 nt, Human
ugcugcuucccucugccugu

SEQ ID NO: 3770741 - RNA, 21 nt, Human
ugcugcuucccucugccuguc

SEQ ID NO: 3770742 - RNA, 20 nt, Human
ugcugcuuccgguagggagg

SEQ ID NO: 3770743 - RNA, 21 nt, Human
ugcugcuuuccccugugggga

SEQ ID NO: 3770744 - RNA, 23 nt, Human
ugcugcuuuccccuguggggauc

SEQ ID NO: 3770745 - RNA, 14 nt, Human
ugcugcuuugauau

SEQ ID NO: 3770746 - RNA, 20 nt, Human
ugcugcuuuuccuuggggca

SEQ ID NO: 3770747 - RNA, 22 nt, Human
ugcugcuuuuugagguggcacu

SEQ ID NO: 3770748 - RNA, 17 nt, Human
ugcuuaaaauaagcagg

SEQ ID NO: 3770749 - RNA, 14 nt, Human
ugcuuaaaccacuu

SEQ ID NO: 3770750 - RNA, 19 nt, Human
ugcuuaaagaauucaaauu

SEQ ID NO: 3770751 - RNA, 22 nt, Human
ugcuuaaaguugguauuaauaa

SEQ ID NO: 3770752 - RNA, 14 nt, Human
ugcuuaaaugugaa

SEQ ID NO: 3770753 - RNA, 16 nt, Human
ugcuuaaaugugaauu

SEQ ID NO: 3770754 - RNA, 23 nt, Human
ugcuuaaaugugaauuacuaacu

SEQ ID NO: 3770755 - RNA, 13 nt, Human
ugcuuaaauuucu

SEQ ID NO: 3770756 - RNA, 14 nt, Human
ugcuuaacauaccc

SEQ ID NO: 3770757 - RNA, 13 nt, Human
ugcuuaacuucac

SEQ ID NO: 3770758 - RNA, 14 nt, Human
ugcuuaacuucaca

SEQ ID NO: 3770759 - RNA, 14 nt, Human
ugcuuaaguuccag

SEQ ID NO: 3770760 - RNA, 16 nt, Human
ugcuuaaucuucaaag

SEQ ID NO: 3770761 - RNA, 16 nt, Human
ugcuuaauucaaauaa

SEQ ID NO: 3770762 - RNA, 20 nt, Human
ugcuuaauuucuaaagauaa

SEQ ID NO: 3770763 - RNA, 20 nt, Human
ugcuuacaauucccugcugu

SEQ ID NO: 3770764 - RNA, 22 nt, Human
ugcuuacaauucccugcugucg

SEQ ID NO: 3770765 - RNA, 14 nt, Human
ugcuuacaauuuuu

SEQ ID NO: 3770766 - RNA, 23 nt, Human
ugcuuacaauuuuuuuaauuuug

SEQ ID NO: 3770767 - RNA, 15 nt, Human
ugcuuacauuuuuac

SEQ ID NO: 3770768 - RNA, 18 nt, Human
ugcuuacauuuuuacaau

SEQ ID NO: 3770769 - RNA, 17 nt, Human
ugcuuaccuacuuucuu

SEQ ID NO: 3770770 - RNA, 14 nt, Human
ugcuuaccucucag

SEQ ID NO: 3770771 - RNA, 22 nt, Human
ugcuuaccucucagccuuagcu

SEQ ID NO: 3770772 - RNA, 16 nt, Human
ugcuuaccuugacugu

SEQ ID NO: 3770773 - RNA, 23 nt, Human
ugcuuacuaagcuuugccagcug

SEQ ID NO: 3770774 - RNA, 16 nt, Human
ugcuuacucauuaaaa

SEQ ID NO: 3770775 - RNA, 18 nt, Human
ugcuuacuuuggaauaca

SEQ ID NO: 3770776 - RNA, 14 nt, Human
ugcuuagaaaagaa

SEQ ID NO: 3770777 - RNA, 19 nt, Human
ugcuuagaauccaaacuug

SEQ ID NO: 3770778 - RNA, 17 nt, Human
ugcuuagagacuaucaa

SEQ ID NO: 3770779 - RNA, 14 nt, Human
ugcuuagccuccug

SEQ ID NO: 3770780 - RNA, 14 nt, Human
ugcuuaggaugugu

SEQ ID NO: 3770781 - RNA, 16 nt, Human
ugcuuaggaugugugc

SEQ ID NO: 3770782 - RNA, 14 nt, Human
ugcuuaggauguuu

SEQ ID NO: 3770783 - RNA, 14 nt, Human
ugcuuaguaaugcu

SEQ ID NO: 3770784 - RNA, 21 nt, Human
ugcuuaguaucucaucaacaa

SEQ ID NO: 3770785 - RNA, 23 nt, Human
ugcuuagucacuuauuucauaaa

SEQ ID NO: 3770786 - RNA, 20 nt, Human
ugcuuaguccaauuccuugc

SEQ ID NO: 3770787 - RNA, 19 nt, Human
ugcuuauaaccuaguuaaa

SEQ ID NO: 3770788 - RNA, 18 nt, Human
ugcuuauagguggccucu

SEQ ID NO: 3770789 - RNA, 20 nt, Human
ugcuuaugaauauuuauaac

SEQ ID NO: 3770790 - RNA, 21 nt, Human
ugcuuaugacaucacuuguac

SEQ ID NO: 3770791 - RNA, 14 nt, Human
ugcuuaugguacca

SEQ ID NO: 3770792 - RNA, 21 nt, Human
ugcuuaugguaccagaugcag

SEQ ID NO: 3770793 - RNA, 19 nt, Human
ugcuuauuuauuguauucu

SEQ ID NO: 3770794 - RNA, 15 nt, Human
ugcuuauuuuaaaau

SEQ ID NO: 3770795 - RNA, 14 nt, Human
ugcuucaacugucu

SEQ ID NO: 3770796 - RNA, 16 nt, Human
ugcuucaauaaaucuu

SEQ ID NO: 3770797 - RNA, 22 nt, Human
ugcuucaauaaaucuuuggaaa

SEQ ID NO: 3770798 - RNA, 15 nt, Human
ugcuucaaucccagc

SEQ ID NO: 3770799 - RNA, 15 nt, Human
ugcuucaauuaauaa

SEQ ID NO: 3770800 - RNA, 17 nt, Human
ugcuucacaacccaucu

SEQ ID NO: 3770801 - RNA, 13 nt, Human
ugcuucacaguag

SEQ ID NO: 3770802 - RNA, 22 nt, Human
ugcuucacaguagagccagcuu

SEQ ID NO: 3770803 - RNA, 21 nt, Human
ugcuucaccauggccuuauga

SEQ ID NO: 3770804 - RNA, 20 nt, Human
ugcuucagauauuauugcuu

SEQ ID NO: 3770805 - RNA, 20 nt, Human
ugcuucagauguggagccag

SEQ ID NO: 3770806 - RNA, 17 nt, Human
ugcuucagccugaggcu

SEQ ID NO: 3770807 - RNA, 22 nt, Human
ugcuucagccugaggcugagac

SEQ ID NO: 3770808 - RNA, 14 nt, Human
ugcuucagcuugcu

SEQ ID NO: 3770809 - RNA, 15 nt, Human
ugcuucagcuugcuu

SEQ ID NO: 3770810 - RNA, 18 nt, Human
ugcuucaguggagaauua

SEQ ID NO: 3770811 - RNA, 18 nt, Human
ugcuucauaaaugaagca

SEQ ID NO: 3770812 - RNA, 11 nt, Human
ugcuucauaca

SEQ ID NO: 3770813 - RNA, 21 nt, Human
ugcuucauagcugguuccugc

SEQ ID NO: 3770814 - RNA, 17 nt, Human
ugcuucaucauucccuc

SEQ ID NO: 3770815 - RNA, 23 nt, Human
ugcuucaucauucccucucaucu

SEQ ID NO: 3770816 - RNA, 14 nt, Human
ugcuucaucccuuu

SEQ ID NO: 3770817 - RNA, 21 nt, Human
ugcuucaugaaaauccuacca

SEQ ID NO: 3770818 - RNA, 18 nt, Human
ugcuucauguuugccuuc

SEQ ID NO: 3770819 - RNA, 20 nt, Human
ugcuuccaccucaccccacu

SEQ ID NO: 3770820 - RNA, 12 nt, Human
ugcuuccagaaa

SEQ ID NO: 3770821 - RNA, 22 nt, Human
ugcuuccagugaggcucugccc

SEQ ID NO: 3770822 - RNA, 17 nt, Human
ugcuucccaccucccug

SEQ ID NO: 3770823 - RNA, 20 nt, Human
ugcuucccaccucccugccc

SEQ ID NO: 3770824 - RNA, 23 nt, Human
ugcuucccauuguggcuccuauc

SEQ ID NO: 3770825 - RNA, 18 nt, Human
ugcuuccccuuuugccaa

SEQ ID NO: 3770826 - RNA, 13 nt, Human
ugcuucccucugc

SEQ ID NO: 3770827 - RNA, 15 nt, Human
ugcuucccucugccu

SEQ ID NO: 3770828 - RNA, 21 nt, Human
ugcuuccgguagggaggcagc

SEQ ID NO: 3770829 - RNA, 19 nt, Human
ugcuuccuauaauuuugau

SEQ ID NO: 3770830 - RNA, 15 nt, Human
ugcuuccucccaaca

SEQ ID NO: 3770831 - RNA, 13 nt, Human
ugcuuccuuucuu

SEQ ID NO: 3770832 - RNA, 18 nt, Human
ugcuucgggcccuuccca

SEQ ID NO: 3770833 - RNA, 22 nt, Human
ugcuucuaaguaaauacaauuu

SEQ ID NO: 3770834 - RNA, 21 nt, Human
ugcuucuaccaacuggaagca

SEQ ID NO: 3770835 - RNA, 14 nt, Human
ugcuucuagagcuu

SEQ ID NO: 3770836 - RNA, 15 nt, Human
ugcuucucacuuuuu

SEQ ID NO: 3770837 - RNA, 21 nt, Human
ugcuucucagauuucugagga

SEQ ID NO: 3770838 - RNA, 14 nt, Human
ugcuucucaucccc

SEQ ID NO: 3770839 - RNA, 17 nt, Human
ugcuucucaucuuguga

SEQ ID NO: 3770840 - RNA, 18 nt, Human
ugcuucucaucuugugaa

SEQ ID NO: 3770841 - RNA, 22 nt, Human
ugcuucuccaaaaaucugccug

SEQ ID NO: 3770842 - RNA, 13 nt, Human
ugcuucuccagcc

SEQ ID NO: 3770843 - RNA, 16 nt, Human
ugcuucucccaggcaa

SEQ ID NO: 3770844 - RNA, 22 nt, Human
ugcuucucccaggcaaggcugu

SEQ ID NO: 3770845 - RNA, 22 nt, Human
ugcuucucugacuucugccugg

SEQ ID NO: 3770846 - RNA, 18 nt, Human
ugcuucugaaugugcuga

SEQ ID NO: 3770847 - RNA, 17 nt, Human
ugcuucuguaguacucc

SEQ ID NO: 3770848 - RNA, 22 nt, Human
ugcuucuguuuuauaauuuugu

SEQ ID NO: 3770849 - RNA, 19 nt, Human
ugcuucuuaaccccaguaa

SEQ ID NO: 3770850 - RNA, 17 nt, Human
ugcuucuuacugauaau

SEQ ID NO: 3770851 - RNA, 16 nt, Human
ugcuucuucagagacu

SEQ ID NO: 3770852 - RNA, 14 nt, Human
ugcuucuucucagg

SEQ ID NO: 3770853 - RNA, 23 nt, Human
ugcuucuucuccuauguguaagg

SEQ ID NO: 3770854 - RNA, 14 nt, Human
ugcuucuugugaag

SEQ ID NO: 3770855 - RNA, 16 nt, Human
ugcuugaaaaaugugc

SEQ ID NO: 3770856 - RNA, 14 nt, Human
ugcuugaaagaaaa

SEQ ID NO: 3770857 - RNA, 17 nt, Human
ugcuugaacacaguauu

SEQ ID NO: 3770858 - RNA, 20 nt, Human
ugcuugaacacaguauuuuc

SEQ ID NO: 3770859 - RNA, 14 nt, Human
ugcuugaacuuaca

SEQ ID NO: 3770860 - RNA, 12 nt, Human
ugcuugaauaaa

SEQ ID NO: 3770861 - RNA, 19 nt, Human
ugcuugagaauauugaagu

SEQ ID NO: 3770862 - RNA, 15 nt, Human
ugcuugagcucagga

SEQ ID NO: 3770863 - RNA, 12 nt, Human
ugcuugaggaaa

SEQ ID NO: 3770864 - RNA, 21 nt, Human
ugcuugaggcaacucaucuua

SEQ ID NO: 3770865 - RNA, 14 nt, Human
ugcuugaugaagca

SEQ ID NO: 3770866 - RNA, 19 nt, Human
ugcuugaugggauucugga

SEQ ID NO: 3770867 - RNA, 16 nt, Human
ugcuugcauaagagcu

SEQ ID NO: 3770868 - RNA, 17 nt, Human
ugcuugcauaagagcuu

SEQ ID NO: 3770869 - RNA, 15 nt, Human
ugcuugccaaaguac

SEQ ID NO: 3770870 - RNA, 18 nt, Human
ugcuugccaaaguacaga

SEQ ID NO: 3770871 - RNA, 23 nt, Human
ugcuugccaaggcagaggccugg

SEQ ID NO: 3770872 - RNA, 18 nt, Human
ugcuugcccuaagcagaa

SEQ ID NO: 3770873 - RNA, 18 nt, Human
ugcuugccgaaacuggaa

SEQ ID NO: 3770874 - RNA, 19 nt, Human
ugcuugccuagggccuggu

SEQ ID NO: 3770875 - RNA, 11 nt, Human
ugcuugccucu

SEQ ID NO: 3770876 - RNA, 18 nt, Human
ugcuugccugcagggcca

SEQ ID NO: 3770877 - RNA, 18 nt, Human
ugcuugcucauaugcaug

SEQ ID NO: 3770878 - RNA, 18 nt, Human
ugcuugcugcugauuuaa

SEQ ID NO: 3770879 - RNA, 19 nt, Human
ugcuugcuuucuuuuuuaa

SEQ ID NO: 3770880 - RNA, 15 nt, Human
ugcuuggagcugagc

SEQ ID NO: 3770881 - RNA, 17 nt, Human
ugcuuggagcugagcaa

SEQ ID NO: 3770882 - RNA, 14 nt, Human
ugcuuggaggaagg

SEQ ID NO: 3770883 - RNA, 18 nt, Human
ugcuuggcccaggaguuu

SEQ ID NO: 3770884 - RNA, 23 nt, Human
ugcuuggcccaggaguuuggcca

SEQ ID NO: 3770885 - RNA, 19 nt, Human
ugcuugggcuucauccucc

SEQ ID NO: 3770886 - RNA, 19 nt, Human
ugcuuggguggagaagcca

SEQ ID NO: 3770887 - RNA, 20 nt, Human
ugcuuggguggagaagccau

SEQ ID NO: 3770888 - RNA, 22 nt, Human
ugcuuguacacucauucauuac

SEQ ID NO: 3770889 - RNA, 13 nt, Human
ugcuuguacauaa

SEQ ID NO: 3770890 - RNA, 22 nt, Human
ugcuuguacauaaugcgugcau

SEQ ID NO: 3770891 - RNA, 12 nt, Human
ugcuuguaccuc

SEQ ID NO: 3770892 - RNA, 23 nt, Human
uggcgagccauuugucccaagug

SEQ ID NO: 3770893 - RNA, 19 nt, Human
uggcgagugaaugccagug

SEQ ID NO: 3770894 - RNA, 13 nt, Human
uggcgaugccagc

SEQ ID NO: 3770895 - RNA, 18 nt, Human
uggcgauucccauugaaa

SEQ ID NO: 3770896 - RNA, 14 nt, Human
uggcgcaagccugu

SEQ ID NO: 3770897 - RNA, 13 nt, Human
uggcgcacccucc

SEQ ID NO: 3770898 - RNA, 18 nt, Human
uggcgcacccuccccucc

SEQ ID NO: 3770899 - RNA, 13 nt, Human
uggcgcagccaag

SEQ ID NO: 3770900 - RNA, 15 nt, Human
uggcgcaggaacuca

SEQ ID NO: 3770901 - RNA, 13 nt, Human
uggcgcagugccu

SEQ ID NO: 3770902 - RNA, 15 nt, Human
uggcgcagugccucu

SEQ ID NO: 3770903 - RNA, 17 nt, Human
uggcgccaccagcucug

SEQ ID NO: 3770904 - RNA, 21 nt, Human
uggcgcgaucucggcucacug

SEQ ID NO: 3770905 - RNA, 17 nt, Human
uggcgcuauuacaaaua

SEQ ID NO: 3770906 - RNA, 13 nt, Human
uggcgcugccccu

SEQ ID NO: 3770907 - RNA, 13 nt, Human
uggcgcuuagaga

SEQ ID NO: 3770908 - RNA, 20 nt, Human
uggcggcuggggucccagca

SEQ ID NO: 3770909 - RNA, 21 nt, Human
uggcggcuggggucccagcag

SEQ ID NO: 3770910 - RNA, 17 nt, Human
uggcgggccaaggacug

SEQ ID NO: 3770911 - RNA, 19 nt, Human
uggcggggaggaggaaauc

SEQ ID NO: 3770912 - RNA, 19 nt, Human
uggcguaaguacagagaag

SEQ ID NO: 3770913 - RNA, 20 nt, Human
uggcguaggcuacagagaag

SEQ ID NO: 3770914 - RNA, 22 nt, Human
uggcguaggcuacagagaagcc

SEQ ID NO: 3770915 - RNA, 23 nt, Human
uggcguaggcuacagagaagccu

SEQ ID NO: 3770916 - RNA, 14 nt, Human
uggcguggagcagg

SEQ ID NO: 3770917 - RNA, 17 nt, Human
uggcgugggagccagcc

SEQ ID NO: 3770918 - RNA, 18 nt, Human
uggcgugggagccagccu

SEQ ID NO: 3770919 - RNA, 14 nt, Human
uggcuaaagcucga

SEQ ID NO: 3770920 - RNA, 14 nt, Human
uggcuaaagguccc

SEQ ID NO: 3770921 - RNA, 17 nt, Human
uggcuaaggcaccagcc

SEQ ID NO: 3770922 - RNA, 16 nt, Human
uggcuaauaaggcuuu

SEQ ID NO: 3770923 - RNA, 19 nt, Human
uggcuaauguacugcauau

SEQ ID NO: 3770924 - RNA, 23 nt, Human
uggcuacgccucuucugucccug

SEQ ID NO: 3770925 - RNA, 19 nt, Human
uggcuagaggccagcccca

SEQ ID NO: 3770926 - RNA, 22 nt, Human
uggcuagaggccagccccaccc

SEQ ID NO: 3770927 - RNA, 15 nt, Human
uggcuagaguccuca

SEQ ID NO: 3770928 - RNA, 21 nt, Human
uggcuagaguccucacuccca

SEQ ID NO: 3770929 - RNA, 15 nt, Human
uggcuagucaagcuc

SEQ ID NO: 3770930 - RNA, 23 nt, Human
uggcuagucaagcuccuccuccc

SEQ ID NO: 3770931 - RNA, 15 nt, Human
uggcuaguccuuguu

SEQ ID NO: 3770932 - RNA, 19 nt, Human
uggcuauaaauauauaaaa

SEQ ID NO: 3770933 - RNA, 22 nt, Human
uggcuauagaugucuuuuccca

SEQ ID NO: 3770934 - RNA, 22 nt, Human
uggcuaucaaagaauaagaaaa

SEQ ID NO: 3770935 - RNA, 16 nt, Human
uggcuaugagggccuu

SEQ ID NO: 3770936 - RNA, 14 nt, Human
uggcuauggccacc

SEQ ID NO: 3770937 - RNA, 18 nt, Human
uggcuauguuuuuaaugu

SEQ ID NO: 3770938 - RNA, 15 nt, Human
uggcuauuuaaaacu

SEQ ID NO: 3770939 - RNA, 16 nt, Human
uggcuauuuaaagaca

SEQ ID NO: 3770940 - RNA, 13 nt, Human
uggcucacacuga

SEQ ID NO: 3770941 - RNA, 14 nt, Human
uggcucacaguaca

SEQ ID NO: 3770942 - RNA, 15 nt, Human
uggcucacccaagca

SEQ ID NO: 3770943 - RNA, 14 nt, Human
uggcucaccuuccg

SEQ ID NO: 3770944 - RNA, 14 nt, Human
uggcucacgccugu

SEQ ID NO: 3770945 - RNA, 17 nt, Human
uggcucacgccuguaau

SEQ ID NO: 3770946 - RNA, 22 nt, Human
uggcucacgucuguaaucccag

SEQ ID NO: 3770947 - RNA, 18 nt, Human
uggcucacuauggugcca

SEQ ID NO: 3770948 - RNA, 18 nt, Human
uggcucacucagcacuug

SEQ ID NO: 3770949 - RNA, 18 nt, Human
uggcucagacauguuuuc

SEQ ID NO: 3770950 - RNA, 16 nt, Human
uggcucagccagcacu

SEQ ID NO: 3770951 - RNA, 20 nt, Human
uggcucagguggggucacuc

SEQ ID NO: 3770952 - RNA, 18 nt, Human
uggcuccaaacccucgag

SEQ ID NO: 3770953 - RNA, 18 nt, Human
uggcuccacacacacaaa

SEQ ID NO: 3770954 - RNA, 15 nt, Human
uggcuccagaaaugu

SEQ ID NO: 3770955 - RNA, 13 nt, Human
uggcuccagccug

SEQ ID NO: 3770956 - RNA, 19 nt, Human
uggcuccagucugcugccc

SEQ ID NO: 3770957 - RNA, 16 nt, Human
uggcucccacaggagu

SEQ ID NO: 3770958 - RNA, 17 nt, Human
uggcucccacaggcccu

SEQ ID NO: 3770959 - RNA, 20 nt, Human
uggcucccacaggcccuucc

SEQ ID NO: 3770960 - RNA, 13 nt, Human
uggcucccaggac

SEQ ID NO: 3770961 - RNA, 15 nt, Human
uggcucccaggacac

SEQ ID NO: 3770962 - RNA, 15 nt, Human
uggcucccagggcca

SEQ ID NO: 3770963 - RNA, 16 nt, Human
uggcuccccuggggug

SEQ ID NO: 3770964 - RNA, 21 nt, Human
uggcuccccuggggugcaggc

SEQ ID NO: 3770965 - RNA, 19 nt, Human
uggcucccgcggugccaug

SEQ ID NO: 3770966 - RNA, 18 nt, Human
uggcucccucacucucag

SEQ ID NO: 3770967 - RNA, 20 nt, Human
uggcucccucacucucagga

SEQ ID NO: 3770968 - RNA, 19 nt, Human
uggcuccgaacacccucga

SEQ ID NO: 3770969 - RNA, 14 nt, Human
uggcuccggccucu

SEQ ID NO: 3770970 - RNA, 18 nt, Human
uggcuccggccucugccu

SEQ ID NO: 3770971 - RNA, 18 nt, Human
uggcuccuaucuguguuu

SEQ ID NO: 3770972 - RNA, 14 nt, Human
uggcuccucaaaca

SEQ ID NO: 3770973 - RNA, 13 nt, Human
uggcuccucucag

SEQ ID NO: 3770974 - RNA, 14 nt, Human
uggcuccucucagu

SEQ ID NO: 3770975 - RNA, 15 nt, Human
uggcuccucuguggu

SEQ ID NO: 3770976 - RNA, 21 nt, Human
uggcuccucuguggugucugc

SEQ ID NO: 3770977 - RNA, 21 nt, Human
uggcuccugaggggcaucugc

SEQ ID NO: 3770978 - RNA, 23 nt, Human
uggcuccugaggggcaucugccc

SEQ ID NO: 3770979 - RNA, 18 nt, Human
uggcuccuugugccagag

SEQ ID NO: 3770980 - RNA, 20 nt, Human
uggcuccuugugccagagaa

SEQ ID NO: 3770981 - RNA, 18 nt, Human
uggcuccuuuacaaaaga

SEQ ID NO: 3770982 - RNA, 19 nt, Human
uggcucguuggcuagauua

SEQ ID NO: 3770983 - RNA, 14 nt, Human
uggcucuccaagug

SEQ ID NO: 3770984 - RNA, 19 nt, Human
uggcucuccaagugccaga

SEQ ID NO: 3770985 - RNA, 17 nt, Human
uggcucucccauuuccu

SEQ ID NO: 3770986 - RNA, 14 nt, Human
uggcucuccuggcc

SEQ ID NO: 3770987 - RNA, 14 nt, Human
uggcucucuccagg

SEQ ID NO: 3770988 - RNA, 15 nt, Human
uggcucucuccagga

SEQ ID NO: 3770989 - RNA, 13 nt, Human
uggcucugagaag

SEQ ID NO: 3770990 - RNA, 15 nt, Human
uggcucugagaaggg

SEQ ID NO: 3770991 - RNA, 19 nt, Human
uggcucugagcgccuccau

SEQ ID NO: 3770992 - RNA, 21 nt, Human
uggcucugaggugccuguccc

SEQ ID NO: 3770993 - RNA, 22 nt, Human
uggcucugaggugccuguccca

SEQ ID NO: 3770994 - RNA, 23 nt, Human
uggcucugcaaugggcacuggga

SEQ ID NO: 3770995 - RNA, 13 nt, Human
uggcucugccagu

SEQ ID NO: 3770996 - RNA, 11 nt, Human
uggcucugcug

SEQ ID NO: 3770997 - RNA, 21 nt, Human
uggcucuggagacagccccag

SEQ ID NO: 3770998 - RNA, 18 nt, Human
uggcucuguggcuugcua

SEQ ID NO: 3770999 - RNA, 19 nt, Human
uggcucuuccaggcuggga

SEQ ID NO: 3771000 - RNA, 20 nt, Human
uggcucuuccaggcugggag

SEQ ID NO: 3771001 - RNA, 16 nt, Human
uggcucuugaacugag

SEQ ID NO: 3771002 - RNA, 22 nt, Human
uggcucuugaacugagcuugga

SEQ ID NO: 3771003 - RNA, 19 nt, Human
uggcucuugauaccccccu

SEQ ID NO: 3771004 - RNA, 20 nt, Human
uggcucuugauaccccccuc

SEQ ID NO: 3771005 - RNA, 19 nt, Human
uggcugaaauucuccugga

SEQ ID NO: 3771006 - RNA, 15 nt, Human
uggcugaacccugug

SEQ ID NO: 3771007 - RNA, 18 nt, Human
uggcugaacccugugcug

SEQ ID NO: 3771008 - RNA, 11 nt, Human
uggcugaagga

SEQ ID NO: 3771009 - RNA, 20 nt, Human
uggcugagagaguggcauug

SEQ ID NO: 3771010 - RNA, 13 nt, Human
uggcugagcccug

SEQ ID NO: 3771011 - RNA, 17 nt, Human
uggcugaggaggccucc

SEQ ID NO: 3771012 - RNA, 23 nt, Human
uggcugaggaggccuccaucuca

SEQ ID NO: 3771013 - RNA, 20 nt, Human
uggcugaggauuucaagccu

SEQ ID NO: 3771014 - RNA, 21 nt, Human
uggcugagguuccucugccug

SEQ ID NO: 3771015 - RNA, 14 nt, Human
uggcugauaauuuu

SEQ ID NO: 3771016 - RNA, 19 nt, Human
uggcugauaauuuuaaauu

SEQ ID NO: 3771017 - RNA, 23 nt, Human
uggcugcaaaggguaucaggugc

SEQ ID NO: 3771018 - RNA, 15 nt, Human
uggcugcagagcagu

SEQ ID NO: 3771019 - RNA, 13 nt, Human
uggcugcagcagc

SEQ ID NO: 3771020 - RNA, 21 nt, Human
uggcugcagcagcgguggccu

SEQ ID NO: 3771021 - RNA, 13 nt, Human
uggcugcagccuc

SEQ ID NO: 3771022 - RNA, 15 nt, Human
uggcugcagccucag

SEQ ID NO: 3771023 - RNA, 16 nt, Human
uggcugcagccucagg

SEQ ID NO: 3771024 - RNA, 17 nt, Human
uggcugcagccucagga

SEQ ID NO: 3771025 - RNA, 20 nt, Human
uggcugcagccucaggacug

SEQ ID NO: 3771026 - RNA, 13 nt, Human
uggcugcagggag

SEQ ID NO: 3771027 - RNA, 22 nt, Human
uggcugccagcuauuuuuacua

SEQ ID NO: 3771028 - RNA, 20 nt, Human
uggcugccccaaccugcuga

SEQ ID NO: 3771029 - RNA, 16 nt, Human
uggcugccuccacucc

SEQ ID NO: 3771030 - RNA, 17 nt, Human
uggcugccuccacuccc

SEQ ID NO: 3771031 - RNA, 18 nt, Human
uggcugccuccacuccca

SEQ ID NO: 3771032 - RNA, 11 nt, Human
uggcugcugaa

SEQ ID NO: 3771033 - RNA, 13 nt, Human
uggcugcugaagg

SEQ ID NO: 3771034 - RNA, 16 nt, Human
uggcugcugaaggcuc

SEQ ID NO: 3771035 - RNA, 14 nt, Human
uggcugcugacuga

SEQ ID NO: 3771036 - RNA, 14 nt, Human
uggcugcugcccag

SEQ ID NO: 3771037 - RNA, 14 nt, Human
ugggaaugaagcuu

SEQ ID NO: 3771038 - RNA, 15 nt, Human
ugggaaugaagcuug

SEQ ID NO: 3771039 - RNA, 19 nt, Human
ugggaaugaagcuugugua

SEQ ID NO: 3771040 - RNA, 21 nt, Human
ugggaaugaagcuuguguauc

SEQ ID NO: 3771041 - RNA, 18 nt, Human
ugggaaugaggcuugcug

SEQ ID NO: 3771042 - RNA, 16 nt, Human
ugggaaugcggcaaga

SEQ ID NO: 3771043 - RNA, 21 nt, Human
ugggaauguauaguauuugaa

SEQ ID NO: 3771044 - RNA, 23 nt, Human
ugggaauguauaguauuugaaaa

SEQ ID NO: 3771045 - RNA, 20 nt, Human
ugggaauguuacauuguuug

SEQ ID NO: 3771046 - RNA, 22 nt, Human
ugggaauguuugucucauccca

SEQ ID NO: 3771047 - RNA, 15 nt, Human
ugggacaacugcucc

SEQ ID NO: 3771048 - RNA, 17 nt, Human
ugggacaauuguuuuaa

SEQ ID NO: 3771049 - RNA, 13 nt, Human
ugggacaccaggg

SEQ ID NO: 3771050 - RNA, 12 nt, Human
ugggacacccug

SEQ ID NO: 3771051 - RNA, 13 nt, Human
ugggacacccugu

SEQ ID NO: 3771052 - RNA, 14 nt, Human
ugggacagggagga

SEQ ID NO: 3771053 - RNA, 18 nt, Human
ugggacagucaccucaug

SEQ ID NO: 3771054 - RNA, 22 nt, Human
ugggacaguuuaucaugaagcc

SEQ ID NO: 3771055 - RNA, 16 nt, Human
ugggacaugggaaagg

SEQ ID NO: 3771056 - RNA, 19 nt, Human
ugggacauuugcucaugga

SEQ ID NO: 3771057 - RNA, 16 nt, Human
ugggaccaaaccuagc

SEQ ID NO: 3771058 - RNA, 23 nt, Human
ugggaccaacccuggggaaggag

SEQ ID NO: 3771059 - RNA, 17 nt, Human
ugggaccacaacuauuu

SEQ ID NO: 3771060 - RNA, 20 nt, Human
ugggaccacaggugcccgcc

SEQ ID NO: 3771061 - RNA, 14 nt, Human
ugggaccaggcacc

SEQ ID NO: 3771062 - RNA, 22 nt, Human
ugggacccacgaaacugcccug

SEQ ID NO: 3771063 - RNA, 20 nt, Human
ugggacccaguggcagggca

SEQ ID NO: 3771064 - RNA, 21 nt, Human
ugggacccaguggcagggcac

SEQ ID NO: 3771065 - RNA, 20 nt, Human
ugggacccauagaucuucug

SEQ ID NO: 3771066 - RNA, 13 nt, Human
ugggacccugcuu

SEQ ID NO: 3771067 - RNA, 18 nt, Human
ugggacccuuuccuuccu

SEQ ID NO: 3771068 - RNA, 19 nt, Human
ugggaccgccagauggggc

SEQ ID NO: 3771069 - RNA, 21 nt, Human
ugggaccgccagauggggccu

SEQ ID NO: 3771070 - RNA, 23 nt, Human
ugggaccgccagauggggccucu

SEQ ID NO: 3771071 - RNA, 15 nt, Human
ugggaccgcuacacc

SEQ ID NO: 3771072 - RNA, 17 nt, Human
ugggaccugccaggcag

SEQ ID NO: 3771073 - RNA, 14 nt, Human
ugggaccuguggcu

SEQ ID NO: 3771074 - RNA, 14 nt, Human
ugggacggugccca

SEQ ID NO: 3771075 - RNA, 23 nt, Human
ugggacggugcccaagccagagg

SEQ ID NO: 3771076 - RNA, 18 nt, Human
ugggacuacaggcaccca

SEQ ID NO: 3771077 - RNA, 19 nt, Human
ugggacuagccuggcuugg

SEQ ID NO: 3771078 - RNA, 19 nt, Human
ugggacuaugcuuuucuca

SEQ ID NO: 3771079 - RNA, 20 nt, Human
ugggacuaugcuuuucucaa

SEQ ID NO: 3771080 - RNA, 18 nt, Human
ugggacucaaugcacuga

SEQ ID NO: 3771081 - RNA, 14 nt, Human
ugggacugagccag

SEQ ID NO: 3771082 - RNA, 15 nt, Human
ugggacugagccagu

SEQ ID NO: 3771083 - RNA, 17 nt, Human
ugggacugcuaaauaaa

SEQ ID NO: 3771084 - RNA, 18 nt, Human
ugggacugcuaaauaaaa

SEQ ID NO: 3771085 - RNA, 13 nt, Human
ugggacuggaguc

SEQ ID NO: 3771086 - RNA, 18 nt, Human
ugggacuggagucccugu

SEQ ID NO: 3771087 - RNA, 23 nt, Human
ugggacuggccagguuucugccc

SEQ ID NO: 3771088 - RNA, 13 nt, Human
ugggacuggccuc

SEQ ID NO: 3771089 - RNA, 16 nt, Human
ugggacuggccucugc

SEQ ID NO: 3771090 - RNA, 20 nt, Human
ugggacugggaacagaacuc

SEQ ID NO: 3771091 - RNA, 14 nt, Human
ugggacuuaacucc

SEQ ID NO: 3771092 - RNA, 19 nt, Human
ugggacuuccuugcucucc

SEQ ID NO: 3771093 - RNA, 13 nt, Human
ugggacuucuuuu

SEQ ID NO: 3771094 - RNA, 15 nt, Human
ugggacuucuuuuca

SEQ ID NO: 3771095 - RNA, 18 nt, Human
ugggacuucuuuucacau

SEQ ID NO: 3771096 - RNA, 19 nt, Human
ugggagaaauacuugaacu

SEQ ID NO: 3771097 - RNA, 23 nt, Human
ugggagaaccucaggcuuccuug

SEQ ID NO: 3771098 - RNA, 22 nt, Human
ugggagaauucuuacauguuuu

SEQ ID NO: 3771099 - RNA, 21 nt, Human
ugggagacaagaaaucccugu

SEQ ID NO: 3771100 - RNA, 22 nt, Human
ugggagacaagaaaucccuguu

SEQ ID NO: 3771101 - RNA, 21 nt, Human
ugggagaccggccugccagga

SEQ ID NO: 3771102 - RNA, 22 nt, Human
ugggagaccggccugccaggag

SEQ ID NO: 3771103 - RNA, 21 nt, Human
ugggagagagacguguacaua

SEQ ID NO: 3771104 - RNA, 18 nt, Human
ugggagagcccagccauu

SEQ ID NO: 3771105 - RNA, 16 nt, Human
ugggagagccccuggg

SEQ ID NO: 3771106 - RNA, 20 nt, Human
ugggagaggauuuuuuucug

SEQ ID NO: 3771107 - RNA, 12 nt, Human
ugggagagggcg

SEQ ID NO: 3771108 - RNA, 15 nt, Human
ugggagagggcgcag

SEQ ID NO: 3771109 - RNA, 17 nt, Human
ugggagaggugccagca

SEQ ID NO: 3771110 - RNA, 23 nt, Human
ugggagagugucaaccagacaga

SEQ ID NO: 3771111 - RNA, 21 nt, Human
ugggagauauauuuuuaagau

SEQ ID NO: 3771112 - RNA, 23 nt, Human
ugggagauauauuuuuaagauaa

SEQ ID NO: 3771113 - RNA, 18 nt, Human
ugggagauuuuuuugagu

SEQ ID NO: 3771114 - RNA, 23 nt, Human
ugggagcacuggagugcagggag

SEQ ID NO: 3771115 - RNA, 17 nt, Human
ugggagcaguccaugca

SEQ ID NO: 3771116 - RNA, 19 nt, Human
ugggagcaguccaugcaug

SEQ ID NO: 3771117 - RNA, 13 nt, Human
ugggagccagccu

SEQ ID NO: 3771118 - RNA, 20 nt, Human
ugggagccaugccgucugcc

SEQ ID NO: 3771119 - RNA, 14 nt, Human
ugggagccccaggg

SEQ ID NO: 3771120 - RNA, 16 nt, Human
ugggagccccaggguc

SEQ ID NO: 3771121 - RNA, 19 nt, Human
ugggagcccccagccuguc

SEQ ID NO: 3771122 - RNA, 14 nt, Human
ugggagccgggucu

SEQ ID NO: 3771123 - RNA, 22 nt, Human
ugggagcgucaggguuggugug

SEQ ID NO: 3771124 - RNA, 22 nt, Human
ugggagcuccacucugcuucuc

SEQ ID NO: 3771125 - RNA, 16 nt, Human
ugggagcuccucuccu

SEQ ID NO: 3771126 - RNA, 20 nt, Human
ugggagcuccucuccuggag

SEQ ID NO: 3771127 - RNA, 16 nt, Human
ugggagcugccaagag

SEQ ID NO: 3771128 - RNA, 20 nt, Human
ugggaggaaaagaaaagagg

SEQ ID NO: 3771129 - RNA, 15 nt, Human
ugggaggaagcagaa

SEQ ID NO: 3771130 - RNA, 19 nt, Human
ugggaggaagcagaauaaa

SEQ ID NO: 3771131 - RNA, 20 nt, Human
ugggaggaagcagaauaaag

SEQ ID NO: 3771132 - RNA, 20 nt, Human
ugggaggacggugcaaccca

SEQ ID NO: 3771133 - RNA, 14 nt, Human
ugggaggagggaga

SEQ ID NO: 3771134 - RNA, 15 nt, Human
ugggaggagggagag

SEQ ID NO: 3771135 - RNA, 14 nt, Human
ugggaggagggcag

SEQ ID NO: 3771136 - RNA, 18 nt, Human
ugggaggagggcaggcau

SEQ ID NO: 3771137 - RNA, 21 nt, Human
ugggaggaucucuugagccug

SEQ ID NO: 3771138 - RNA, 21 nt, Human
ugggaggauugcuugagcuca

SEQ ID NO: 3771139 - RNA, 19 nt, Human
ugggaggcaagaggggugg

SEQ ID NO: 3771140 - RNA, 16 nt, Human
ugggaggcauggcccu

SEQ ID NO: 3771141 - RNA, 18 nt, Human
ugggaggccuaggcgggc

SEQ ID NO: 3771142 - RNA, 14 nt, Human
ugggaggcgcgagc

SEQ ID NO: 3771143 - RNA, 13 nt, Human
ugggaggcucacc

SEQ ID NO: 3771144 - RNA, 23 nt, Human
ugggaggcucuggagcccacugu

SEQ ID NO: 3771145 - RNA, 19 nt, Human
ugggagggagcagacagga

SEQ ID NO: 3771146 - RNA, 22 nt, Human
ugggagggaggcucaggucccu

SEQ ID NO: 3771147 - RNA, 18 nt, Human
ugggagggauagaggggg

SEQ ID NO: 3771148 - RNA, 14 nt, Human
ugggagggauggcc

SEQ ID NO: 3771149 - RNA, 11 nt, Human
ugggaggggca

SEQ ID NO: 3771150 - RNA, 12 nt, Human
ugggaggggcag

SEQ ID NO: 3771151 - RNA, 19 nt, Human
ugggaggggcaggcugaca

SEQ ID NO: 3771152 - RNA, 20 nt, Human
ugggaggggcgcccaccucc

SEQ ID NO: 3771153 - RNA, 19 nt, Human
ugggagguggaagaaggga

SEQ ID NO: 3771154 - RNA, 19 nt, Human
ugggagguugaucagaucu

SEQ ID NO: 3771155 - RNA, 14 nt, Human
ugggaguacaaaag

SEQ ID NO: 3771156 - RNA, 15 nt, Human
ugggagucaagugug

SEQ ID NO: 3771157 - RNA, 18 nt, Human
ugggaguccaggcacagg

SEQ ID NO: 3771158 - RNA, 13 nt, Human
ugggaguccccuu

SEQ ID NO: 3771159 - RNA, 20 nt, Human
ugggaguccccuuuucuuuu

SEQ ID NO: 3771160 - RNA, 18 nt, Human
ugggagugugguuucuuu

SEQ ID NO: 3771161 - RNA, 19 nt, Human
ugggaguucagcugcuucu

SEQ ID NO: 3771162 - RNA, 22 nt, Human
ugggaguugaucgccuuuccca

SEQ ID NO: 3771163 - RNA, 14 nt, Human
ugggaguuguaguu

SEQ ID NO: 3771164 - RNA, 20 nt, Human
ugggauaaaggcccagacuc

SEQ ID NO: 3771165 - RNA, 12 nt, Human
ugggauaaaugc

SEQ ID NO: 3771166 - RNA, 12 nt, Human
ugggauacaacc

SEQ ID NO: 3771167 - RNA, 17 nt, Human
ugggauagagaauguuc

SEQ ID NO: 3771168 - RNA, 16 nt, Human
ugggauaggggcagag

SEQ ID NO: 3771169 - RNA, 20 nt, Human
ugggauauaagaggcagcgu

SEQ ID NO: 3771170 - RNA, 18 nt, Human
ugggauauugaauguuaa

SEQ ID NO: 3771171 - RNA, 20 nt, Human
ugggaucacaggugucagcc

SEQ ID NO: 3771172 - RNA, 14 nt, Human
ugggaucaugaaag

SEQ ID NO: 3771173 - RNA, 23 nt, Human
ugggaucccugucuuuccuaaga

SEQ ID NO: 3771174 - RNA, 13 nt, Human
ugggauccuggag

SEQ ID NO: 3771175 - RNA, 16 nt, Human
ugggaucuaggagagg

SEQ ID NO: 3771176 - RNA, 18 nt, Human
ugggaucugccccucccu

SEQ ID NO: 3771177 - RNA, 23 nt, Human
ugggaucugccccucccugcuuc

SEQ ID NO: 3771178 - RNA, 23 nt, Human
ugggaucugguggucagcccuag

SEQ ID NO: 3771179 - RNA, 14 nt, Human
ugggaugaaugcca

SEQ ID NO: 3771180 - RNA, 14 nt, Human
ugggcccucugguu

SEQ ID NO: 3771181 - RNA, 21 nt, Human
ugggcccugagucugggcagc

SEQ ID NO: 3771182 - RNA, 13 nt, Human
ugggcccugcaug

SEQ ID NO: 3771183 - RNA, 13 nt, Human
ugggcccugccuc

SEQ ID NO: 3771184 - RNA, 14 nt, Human
ugggcccugggcug

SEQ ID NO: 3771185 - RNA, 19 nt, Human
ugggcccuggggccuguac

SEQ ID NO: 3771186 - RNA, 13 nt, Human
ugggccgcugcca

SEQ ID NO: 3771187 - RNA, 14 nt, Human
ugggccgcugccac

SEQ ID NO: 3771188 - RNA, 18 nt, Human
ugggccguagcuugucug

SEQ ID NO: 3771189 - RNA, 18 nt, Human
ugggccuauggagagccc

SEQ ID NO: 3771190 - RNA, 20 nt, Human
ugggccuauggagagcccug

SEQ ID NO: 3771191 - RNA, 14 nt, Human
ugggccuccugugu

SEQ ID NO: 3771192 - RNA, 19 nt, Human
ugggccucggccccuccca

SEQ ID NO: 3771193 - RNA, 20 nt, Human
ugggccugccgggcugaggg

SEQ ID NO: 3771194 - RNA, 19 nt, Human
ugggccugcuccagaccug

SEQ ID NO: 3771195 - RNA, 20 nt, Human
ugggccugcuccagaccuga

SEQ ID NO: 3771196 - RNA, 16 nt, Human
ugggccugcugcugag

SEQ ID NO: 3771197 - RNA, 13 nt, Human
ugggccugcuucc

SEQ ID NO: 3771198 - RNA, 17 nt, Human
ugggccugcuuccuguc

SEQ ID NO: 3771199 - RNA, 17 nt, Human
ugggccuggcauucuug

SEQ ID NO: 3771200 - RNA, 14 nt, Human
ugggccuggcuccc

SEQ ID NO: 3771201 - RNA, 19 nt, Human
ugggccuggcucccucacu

SEQ ID NO: 3771202 - RNA, 16 nt, Human
ugggccugggcuaggg

SEQ ID NO: 3771203 - RNA, 16 nt, Human
ugggccugggcuccug

SEQ ID NO: 3771204 - RNA, 21 nt, Human
ugggccuggucucacccugga

SEQ ID NO: 3771205 - RNA, 18 nt, Human
ugggccuuagugggccag

SEQ ID NO: 3771206 - RNA, 19 nt, Human
ugggccuuagugggccagg

SEQ ID NO: 3771207 - RNA, 14 nt, Human
ugggccuugcuggg

SEQ ID NO: 3771208 - RNA, 12 nt, Human
ugggccuuggcc

SEQ ID NO: 3771209 - RNA, 17 nt, Human
ugggccuuggccuggag

SEQ ID NO: 3771210 - RNA, 14 nt, Human
ugggccuugggcuc

SEQ ID NO: 3771211 - RNA, 16 nt, Human
ugggccuugggcuccg

SEQ ID NO: 3771212 - RNA, 17 nt, Human
ugggcgcccuggaagcc

SEQ ID NO: 3771213 - RNA, 18 nt, Human
ugggcgccgugcugggca

SEQ ID NO: 3771214 - RNA, 13 nt, Human
ugggcggcagaga

SEQ ID NO: 3771215 - RNA, 15 nt, Human
ugggcggcagagagg

SEQ ID NO: 3771216 - RNA, 18 nt, Human
ugggcgggcagcacagca

SEQ ID NO: 3771217 - RNA, 17 nt, Human
ugggcgggcaggggagg

SEQ ID NO: 3771218 - RNA, 14 nt, Human
ugggcggggccuug

SEQ ID NO: 3771219 - RNA, 16 nt, Human
ugggcggggccuugcg

SEQ ID NO: 3771220 - RNA, 19 nt, Human
ugggcguacgcuggugcug

SEQ ID NO: 3771221 - RNA, 17 nt, Human
ugggcgugagaccugcc

SEQ ID NO: 3771222 - RNA, 19 nt, Human
ugggcgugagaccugcccc

SEQ ID NO: 3771223 - RNA, 22 nt, Human
ugggcuaagugauccucccacc

SEQ ID NO: 3771224 - RNA, 23 nt, Human
ugggcuagguagaaaaaggguca

SEQ ID NO: 3771225 - RNA, 16 nt, Human
ugggcuaguugggcuu

SEQ ID NO: 3771226 - RNA, 13 nt, Human
ugggcuauggaca

SEQ ID NO: 3771227 - RNA, 17 nt, Human
ugggcuauggacacagg

SEQ ID NO: 3771228 - RNA, 16 nt, Human
ugggcucaagcagucu

SEQ ID NO: 3771229 - RNA, 10 nt, Human
ugggcucagc

SEQ ID NO: 3771230 - RNA, 19 nt, Human
ugggcucccguguuuugua

SEQ ID NO: 3771231 - RNA, 11 nt, Human
ugggcucccug

SEQ ID NO: 3771232 - RNA, 14 nt, Human
ugggcucccuuccc

SEQ ID NO: 3771233 - RNA, 15 nt, Human
ugggcucccuuccuc

SEQ ID NO: 3771234 - RNA, 19 nt, Human
ugggcucccuuccucccaa

SEQ ID NO: 3771235 - RNA, 17 nt, Human
ugggcucccuugugcgu

SEQ ID NO: 3771236 - RNA, 15 nt, Human
ugggcuccuccaggg

SEQ ID NO: 3771237 - RNA, 18 nt, Human
ugggcuccuggacccccc

SEQ ID NO: 3771238 - RNA, 15 nt, Human
ugggcuccuggcaga

SEQ ID NO: 3771239 - RNA, 23 nt, Human
ugggcuccuggcagaagggagca

SEQ ID NO: 3771240 - RNA, 15 nt, Human
ugggcucuccaccuc

SEQ ID NO: 3771241 - RNA, 18 nt, Human
ugggcucuccaccucagc

SEQ ID NO: 3771242 - RNA, 13 nt, Human
ugggcucugauga

SEQ ID NO: 3771243 - RNA, 14 nt, Human
ugggcucugaugaa

SEQ ID NO: 3771244 - RNA, 15 nt, Human
ugggcucugccaccc

SEQ ID NO: 3771245 - RNA, 21 nt, Human
ugggcucugccccagcucugg

SEQ ID NO: 3771246 - RNA, 12 nt, Human
ugggcucugcug

SEQ ID NO: 3771247 - RNA, 15 nt, Human
ugggcucugcugagu

SEQ ID NO: 3771248 - RNA, 15 nt, Human
ugggcucugggagca

SEQ ID NO: 3771249 - RNA, 16 nt, Human
ugggcucugggagcag

SEQ ID NO: 3771250 - RNA, 17 nt, Human
ugggcucugugcaguca

SEQ ID NO: 3771251 - RNA, 13 nt, Human
ugggcucuuccaa

SEQ ID NO: 3771252 - RNA, 21 nt, Human
ugggcugaccccgguggcggc

SEQ ID NO: 3771253 - RNA, 18 nt, Human
ugggcugacggugcaguc

SEQ ID NO: 3771254 - RNA, 23 nt, Human
ugggcugagacuggauacugccc

SEQ ID NO: 3771255 - RNA, 19 nt, Human
ugggcugagccccuacccc

SEQ ID NO: 3771256 - RNA, 15 nt, Human
ugggcugagcccugg

SEQ ID NO: 3771257 - RNA, 18 nt, Human
ugggcugagcccuggcag

SEQ ID NO: 3771258 - RNA, 16 nt, Human
ugggcugccaugugaa

SEQ ID NO: 3771259 - RNA, 17 nt, Human
ugggcugcccuggugcu

SEQ ID NO: 3771260 - RNA, 17 nt, Human
ugggcugcuacccagaa

SEQ ID NO: 3771261 - RNA, 15 nt, Human
ugggcugcuccucau

SEQ ID NO: 3771262 - RNA, 16 nt, Human
ugggcugcuccucaug

SEQ ID NO: 3771263 - RNA, 18 nt, Human
ugggcuggaacagauuca

SEQ ID NO: 3771264 - RNA, 18 nt, Human
ugggcuggaaucaggaau

SEQ ID NO: 3771265 - RNA, 19 nt, Human
ugggcuggcaguccuggaa

SEQ ID NO: 3771266 - RNA, 16 nt, Human
ugggcugggcccacaa

SEQ ID NO: 3771267 - RNA, 12 nt, Human
ugggcugugcua

SEQ ID NO: 3771268 - RNA, 17 nt, Human
ugggcuguuggcacuca

SEQ ID NO: 3771269 - RNA, 18 nt, Human
ugggcuucacuguauaaa

SEQ ID NO: 3771270 - RNA, 23 nt, Human
ugggcuucacuguauaaauagga

SEQ ID NO: 3771271 - RNA, 13 nt, Human
ugggcuucagccu

SEQ ID NO: 3771272 - RNA, 19 nt, Human
ugggcuucagccuaguggc

SEQ ID NO: 3771273 - RNA, 18 nt, Human
ugggcuucagcugccagu

SEQ ID NO: 3771274 - RNA, 13 nt, Human
ugggcuucagggc

SEQ ID NO: 3771275 - RNA, 15 nt, Human
ugggcuucagggcag

SEQ ID NO: 3771276 - RNA, 15 nt, Human
ugggcuucauccucc

SEQ ID NO: 3771277 - RNA, 22 nt, Human
ugggcuucauccuccucagauc

SEQ ID NO: 3771278 - RNA, 12 nt, Human
ugggcuucccag

SEQ ID NO: 3771279 - RNA, 19 nt, Human
ugggcuucccaguggcugc

SEQ ID NO: 3771280 - RNA, 13 nt, Human
ugggcuuccugga

SEQ ID NO: 3771281 - RNA, 15 nt, Human
ugggcuuccuggagc

SEQ ID NO: 3771282 - RNA, 16 nt, Human
ugggcuuccuggagca

SEQ ID NO: 3771283 - RNA, 16 nt, Human
ugggcuucugugccca

SEQ ID NO: 3771284 - RNA, 22 nt, Human
ugggcuugaccaggcuuggccu

SEQ ID NO: 3771285 - RNA, 14 nt, Human
ugggcuugcuauuc

SEQ ID NO: 3771286 - RNA, 14 nt, Human
ugggcuuggccugc

SEQ ID NO: 3771287 - RNA, 15 nt, Human
ugggcuuggccugcu

SEQ ID NO: 3771288 - RNA, 18 nt, Human
ugggcuuggccugcugug

SEQ ID NO: 3771289 - RNA, 14 nt, Human
ugggcuugggccua

SEQ ID NO: 3771290 - RNA, 22 nt, Human
ugggcuuggggaccagagcugc

SEQ ID NO: 3771291 - RNA, 20 nt, Human
ugggcuuguggggccuggga

SEQ ID NO: 3771292 - RNA, 22 nt, Human
ugggcuuuuggggagccagaag

SEQ ID NO: 3771293 - RNA, 16 nt, Human
uggggaaacagcaucu

SEQ ID NO: 3771294 - RNA, 21 nt, Human
uggggaaagacacugccuggg

SEQ ID NO: 3771295 - RNA, 17 nt, Human
uggggaaaggagguggg

SEQ ID NO: 3771296 - RNA, 19 nt, Human
uggggaaaggagguggggg

SEQ ID NO: 3771297 - RNA, 21 nt, Human
uggggaaaggggucggcugac

SEQ ID NO: 3771298 - RNA, 22 nt, Human
uggggaaaggggucggcugacc

SEQ ID NO: 3771299 - RNA, 23 nt, Human
uggggaaaggggucggcugacca

SEQ ID NO: 3771300 - RNA, 23 nt, Human
uggggaacauuucuguaaauacc

SEQ ID NO: 3771301 - RNA, 17 nt, Human
uggggaagacuguggcu

SEQ ID NO: 3771302 - RNA, 18 nt, Human
uggggaagcuucuuaaau

SEQ ID NO: 3771303 - RNA, 11 nt, Human
uggggaaggag

SEQ ID NO: 3771304 - RNA, 16 nt, Human
uggggaaggagccagu

SEQ ID NO: 3771305 - RNA, 20 nt, Human
uggggaagguuaucagugcu

SEQ ID NO: 3771306 - RNA, 22 nt, Human
uggggacaggggcaggaggaag

SEQ ID NO: 3771307 - RNA, 17 nt, Human
uggggaccagagcugcc

SEQ ID NO: 3771308 - RNA, 18 nt, Human
uggggaccagagcugcca

SEQ ID NO: 3771309 - RNA, 21 nt, Human
uggggaccagcagucugccug

SEQ ID NO: 3771310 - RNA, 23 nt, Human
uggggaccagcagucugccugga

SEQ ID NO: 3771311 - RNA, 21 nt, Human
uggggacccaggcuccgcccu

SEQ ID NO: 3771312 - RNA, 19 nt, Human
uggggacggggggccccag

SEQ ID NO: 3771313 - RNA, 19 nt, Human
uggggacuccggcugugcu

SEQ ID NO: 3771314 - RNA, 17 nt, Human
uggggagacugggcuga

SEQ ID NO: 3771315 - RNA, 20 nt, Human
uggggagaucggggccagag

SEQ ID NO: 3771316 - RNA, 17 nt, Human
uggggagcagagacacu

SEQ ID NO: 3771317 - RNA, 16 nt, Human
uggggagcaggcagcc

SEQ ID NO: 3771318 - RNA, 18 nt, Human
uggggagcccgucucagu

SEQ ID NO: 3771319 - RNA, 16 nt, Human
uggggaggaaauagaa

SEQ ID NO: 3771320 - RNA, 13 nt, Human
uggggaggaggag

SEQ ID NO: 3771321 - RNA, 21 nt, Human
uggggagggccguaccccacc

SEQ ID NO: 3771322 - RNA, 15 nt, Human
uggggaggggcgcug

SEQ ID NO: 3771323 - RNA, 23 nt, Human
uggggaggggcgcuggcccagcc

SEQ ID NO: 3771324 - RNA, 16 nt, Human
uggggagguguucacu

SEQ ID NO: 3771325 - RNA, 14 nt, Human
uguauuagauguuc

SEQ ID NO: 3771326 - RNA, 18 nt, Human
uguauuagauguucucua

SEQ ID NO: 3771327 - RNA, 18 nt, Human
uguauuaggacuggcuuu

SEQ ID NO: 3771328 - RNA, 19 nt, Human
uguauuagugauauuucuc

SEQ ID NO: 3771329 - RNA, 12 nt, Human
uguauuauugcu

SEQ ID NO: 3771330 - RNA, 14 nt, Human
uguauuauuuauaa

SEQ ID NO: 3771331 - RNA, 15 nt, Human
uguauucauauuugu

SEQ ID NO: 3771332 - RNA, 22 nt, Human
uguauucauugaagucagaugu

SEQ ID NO: 3771333 - RNA, 17 nt, Human
uguauucccaguuacuu

SEQ ID NO: 3771334 - RNA, 17 nt, Human
uguauucccauaucaaa

SEQ ID NO: 3771335 - RNA, 20 nt, Human
uguauucuagcuaauguaau

SEQ ID NO: 3771336 - RNA, 22 nt, Human
uguauucucuccuguaccucuu

SEQ ID NO: 3771337 - RNA, 21 nt, Human
uguauucucugagcugugcag

SEQ ID NO: 3771338 - RNA, 17 nt, Human
uguauucugucuucauc

SEQ ID NO: 3771339 - RNA, 20 nt, Human
uguauucuuaaaaugcaaua

SEQ ID NO: 3771340 - RNA, 16 nt, Human
uguauucuuugauguu

SEQ ID NO: 3771341 - RNA, 18 nt, Human
uguauucuuugauguuaa

SEQ ID NO: 3771342 - RNA, 22 nt, Human
uguauucuuugauguuaacaca

SEQ ID NO: 3771343 - RNA, 23 nt, Human
uguauucuuugauguuaacacau

SEQ ID NO: 3771344 - RNA, 14 nt, Human
uguauugcacauug

SEQ ID NO: 3771345 - RNA, 15 nt, Human
uguauugcacauugu

SEQ ID NO: 3771346 - RNA, 17 nt, Human
uguauugcgucuuagca

SEQ ID NO: 3771347 - RNA, 13 nt, Human
uguauugcuuucu

SEQ ID NO: 3771348 - RNA, 17 nt, Human
uguauugcuuucuuuca

SEQ ID NO: 3771349 - RNA, 13 nt, Human
uguauuggccugg

SEQ ID NO: 3771350 - RNA, 14 nt, Human
uguauuguccuauu

SEQ ID NO: 3771351 - RNA, 19 nt, Human
uguauuguccuauuagugu

SEQ ID NO: 3771352 - RNA, 15 nt, Human
uguauugugcaaugu

SEQ ID NO: 3771353 - RNA, 18 nt, Human
uguauugugcaaugugua

SEQ ID NO: 3771354 - RNA, 14 nt, Human
uguauugugguauu

SEQ ID NO: 3771355 - RNA, 21 nt, Human
uguauugugucuuuugcauga

SEQ ID NO: 3771356 - RNA, 17 nt, Human
uguauuguuagauguuu

SEQ ID NO: 3771357 - RNA, 13 nt, Human
uguauuguuccca

SEQ ID NO: 3771358 - RNA, 14 nt, Human
uguauuguucccag

SEQ ID NO: 3771359 - RNA, 16 nt, Human
uguauuuaaaaaaauc

SEQ ID NO: 3771360 - RNA, 13 nt, Human
uguauuuaaauau

SEQ ID NO: 3771361 - RNA, 16 nt, Human
uguauuuaacagaaau

SEQ ID NO: 3771362 - RNA, 21 nt, Human
uguauuuaacagaaauuguau

SEQ ID NO: 3771363 - RNA, 14 nt, Human
uguauuuaagcaaa

SEQ ID NO: 3771364 - RNA, 13 nt, Human
uguauuuaauugu

SEQ ID NO: 3771365 - RNA, 18 nt, Human
uguauuuaauuguaaacu

SEQ ID NO: 3771366 - RNA, 21 nt, Human
uguauuuauauuuugugcuau

SEQ ID NO: 3771367 - RNA, 22 nt, Human
uguauuuauguaaugaaguaaa

SEQ ID NO: 3771368 - RNA, 16 nt, Human
uguauuuaugugugag

SEQ ID NO: 3771369 - RNA, 23 nt, Human
uguauuuauuccauauucaugua

SEQ ID NO: 3771370 - RNA, 22 nt, Human
uguauuuauugguuuugcagaa

SEQ ID NO: 3771371 - RNA, 16 nt, Human
uguauuuauuuaaaag

SEQ ID NO: 3771372 - RNA, 20 nt, Human
uguauuuauuuaaaagauuc

SEQ ID NO: 3771373 - RNA, 20 nt, Human
uguauuuauuuaguauuuau

SEQ ID NO: 3771374 - RNA, 23 nt, Human
uguauuuccccaacauguaauaa

SEQ ID NO: 3771375 - RNA, 13 nt, Human
uguauuugcuaau

SEQ ID NO: 3771376 - RNA, 21 nt, Human
uguauuuggaaauaaagucag

SEQ ID NO: 3771377 - RNA, 17 nt, Human
uguauuuguaguguuau

SEQ ID NO: 3771378 - RNA, 13 nt, Human
uguauuugugacu

SEQ ID NO: 3771379 - RNA, 14 nt, Human
uguauuugugacua

SEQ ID NO: 3771380 - RNA, 18 nt, Human
uguauuuguuaaugguuu

SEQ ID NO: 3771381 - RNA, 16 nt, Human
uguauuuguucauguu

SEQ ID NO: 3771382 - RNA, 12 nt, Human
uguauuuuaugu

SEQ ID NO: 3771383 - RNA, 13 nt, Human
uguauuuuauguu

SEQ ID NO: 3771384 - RNA, 14 nt, Human
uguauuuuauguua

SEQ ID NO: 3771385 - RNA, 19 nt, Human
uguauuuuauuuagacaag

SEQ ID NO: 3771386 - RNA, 21 nt, Human
uguauuuuauuuuuuucucuc

SEQ ID NO: 3771387 - RNA, 12 nt, Human
uguauuuucaug

SEQ ID NO: 3771388 - RNA, 16 nt, Human
uguauuuucaugaaaa

SEQ ID NO: 3771389 - RNA, 10 nt, Human
uguauuuucc

SEQ ID NO: 3771390 - RNA, 12 nt, Human
uguauuuuccaa

SEQ ID NO: 3771391 - RNA, 18 nt, Human
uguauuuuccaagugugc

SEQ ID NO: 3771392 - RNA, 13 nt, Human
uguauuuugaaau

SEQ ID NO: 3771393 - RNA, 15 nt, Human
uguauuuugugaguu

SEQ ID NO: 3771394 - RNA, 19 nt, Human
uguauuuugugugaccaac

SEQ ID NO: 3771395 - RNA, 23 nt, Human
uguauuuuuauauaauaucuaaa

SEQ ID NO: 3771396 - RNA, 14 nt, Human
uguauuuuucuaca

SEQ ID NO: 3771397 - RNA, 22 nt, Human
uguauuuuucuacauuauugcu

SEQ ID NO: 3771398 - RNA, 14 nt, Human
uguauuuuuuaaag

SEQ ID NO: 3771399 - RNA, 17 nt, Human
uguauuuuuuaaagcua

SEQ ID NO: 3771400 - RNA, 19 nt, Human
uguauuuuuuaaugcuaau

SEQ ID NO: 3771401 - RNA, 17 nt, Human
uguauuuuuuugcaagu

SEQ ID NO: 3771402 - RNA, 22 nt, Human
uguauuuuuuuuucuaagagaa

SEQ ID NO: 3771403 - RNA, 14 nt, Human
ugucaaaaaaaaaa

SEQ ID NO: 3771404 - RNA, 23 nt, Human
ugucaaaaaugucuuggguaggc

SEQ ID NO: 3771405 - RNA, 16 nt, Human
ugucaaaacacugugg

SEQ ID NO: 3771406 - RNA, 17 nt, Human
ugucaaaacacugugga

SEQ ID NO: 3771407 - RNA, 17 nt, Human
ugucaaaaguagaacuu

SEQ ID NO: 3771408 - RNA, 20 nt, Human
ugucaaaaguagaacuuugu

SEQ ID NO: 3771409 - RNA, 22 nt, Human
ugucaaaaguagaacuuuguau

SEQ ID NO: 3771410 - RNA, 15 nt, Human
ugucaaaauaauuuu

SEQ ID NO: 3771411 - RNA, 21 nt, Human
ugucaaacaaagccagaagcu

SEQ ID NO: 3771412 - RNA, 20 nt, Human
ugucaaacauuaguacuuua

SEQ ID NO: 3771413 - RNA, 14 nt, Human
ugucaaagugguga

SEQ ID NO: 3771414 - RNA, 18 nt, Human
ugucaaauaaacacugug

SEQ ID NO: 3771415 - RNA, 22 nt, Human
ugucaacaaaccaagcaucagg

SEQ ID NO: 3771416 - RNA, 23 nt, Human
ugucaacaaaccaagcaucaggg

SEQ ID NO: 3771417 - RNA, 13 nt, Human
ugucaacauugug

SEQ ID NO: 3771418 - RNA, 22 nt, Human
ugucaaccagacagagggucac

SEQ ID NO: 3771419 - RNA, 15 nt, Human
ugucaacuuuaugca

SEQ ID NO: 3771420 - RNA, 20 nt, Human
ugucaagaguaguuauauaa

SEQ ID NO: 3771421 - RNA, 15 nt, Human
ugucaagcugcucug

SEQ ID NO: 3771422 - RNA, 19 nt, Human
ugucaaggcugcuuagaau

SEQ ID NO: 3771423 - RNA, 18 nt, Human
ugucaagggcagaaugaa

SEQ ID NO: 3771424 - RNA, 21 nt, Human
ugucaagggcagcuuugcuca

SEQ ID NO: 3771425 - RNA, 13 nt, Human
ugucaaggugcug

SEQ ID NO: 3771426 - RNA, 16 nt, Human
ugucaagucucugcug

SEQ ID NO: 3771427 - RNA, 19 nt, Human
ugucaagucucugcuggcc

SEQ ID NO: 3771428 - RNA, 21 nt, Human
ugucaauaaacagcuucaugc

SEQ ID NO: 3771429 - RNA, 13 nt, Human
ugucaauauuaaa

SEQ ID NO: 3771430 - RNA, 15 nt, Human
ugucaaucuguccgu

SEQ ID NO: 3771431 - RNA, 23 nt, Human
ugucaaugcaguugucucuguuu

SEQ ID NO: 3771432 - RNA, 12 nt, Human
ugucaaugugug

SEQ ID NO: 3771433 - RNA, 14 nt, Human
ugucaauuacagga

SEQ ID NO: 3771434 - RNA, 17 nt, Human
ugucaauuacaggaagu

SEQ ID NO: 3771435 - RNA, 21 nt, Human
ugucaauuacaggaaguacug

SEQ ID NO: 3771436 - RNA, 17 nt, Human
ugucaauuuaugaauau

SEQ ID NO: 3771437 - RNA, 12 nt, Human
ugucacaaagaa

SEQ ID NO: 3771438 - RNA, 21 nt, Human
ugucacaauccuaacacauua

SEQ ID NO: 3771439 - RNA, 13 nt, Human
ugucacaccagcc

SEQ ID NO: 3771440 - RNA, 14 nt, Human
ugucacacuggcua

SEQ ID NO: 3771441 - RNA, 15 nt, Human
ugucacacuggcuau

SEQ ID NO: 3771442 - RNA, 21 nt, Human
ugucacaggaaggcugucuca

SEQ ID NO: 3771443 - RNA, 16 nt, Human
ugucacaggcaggucc

SEQ ID NO: 3771444 - RNA, 17 nt, Human
ugucacaggcaggucca

SEQ ID NO: 3771445 - RNA, 17 nt, Human
ugucacagggacugaaa

SEQ ID NO: 3771446 - RNA, 14 nt, Human
ugucacagggccaa

SEQ ID NO: 3771447 - RNA, 17 nt, Human
ugucacauggugccccu

SEQ ID NO: 3771448 - RNA, 21 nt, Human
ugucacauggugccccuagcu

SEQ ID NO: 3771449 - RNA, 21 nt, Human
ugucacauugcauucuauugc

SEQ ID NO: 3771450 - RNA, 18 nt, Human
ugucaccaccuucccagc

SEQ ID NO: 3771451 - RNA, 21 nt, Human
ugucaccaccuucccagcucu

SEQ ID NO: 3771452 - RNA, 22 nt, Human
ugucacccagguuggagugcag

SEQ ID NO: 3771453 - RNA, 14 nt, Human
ugucaccccagagc

SEQ ID NO: 3771454 - RNA, 18 nt, Human
ugucaccccagagccaca

SEQ ID NO: 3771455 - RNA, 20 nt, Human
ugucaccccagagccacaca

SEQ ID NO: 3771456 - RNA, 20 nt, Human
ugucacccgaucgccagcaa

SEQ ID NO: 3771457 - RNA, 18 nt, Human
ugucaccggauccugggu

SEQ ID NO: 3771458 - RNA, 16 nt, Human
ugucaccgugagcagc

SEQ ID NO: 3771459 - RNA, 22 nt, Human
ugucaccguggaccuuccugcc

SEQ ID NO: 3771460 - RNA, 23 nt, Human
ugucaccucuuccgacucuuucu

SEQ ID NO: 3771461 - RNA, 17 nt, Human
ugucaccugcuucucug

SEQ ID NO: 3771462 - RNA, 18 nt, Human
ugucaccugcuucucugc

SEQ ID NO: 3771463 - RNA, 20 nt, Human
ugucaccugcuucucugccc

SEQ ID NO: 3771464 - RNA, 14 nt, Human
ugucaccugugcuu

SEQ ID NO: 3771465 - RNA, 14 nt, Human
ugucaccuucaccu

SEQ ID NO: 3771466 - RNA, 14 nt, Human
ugucacgccagacu

SEQ ID NO: 3771467 - RNA, 19 nt, Human
ugucacguacugucugauu

SEQ ID NO: 3771468 - RNA, 15 nt, Human
ugucacuaaagcagg

SEQ ID NO: 3771469 - RNA, 16 nt, Human
ugucacuacucacagu

SEQ ID NO: 3771470 - RNA, 16 nt, Human
uguccuuagccuggac

SEQ ID NO: 3771471 - RNA, 22 nt, Human
uguccuuagccuggaccucuga

SEQ ID NO: 3771472 - RNA, 22 nt, Human
uguccuucccugcauuucugag

SEQ ID NO: 3771473 - RNA, 18 nt, Human
uguccuucucucaccucc

SEQ ID NO: 3771474 - RNA, 20 nt, Human
uguccuugaaggacuaauag

SEQ ID NO: 3771475 - RNA, 14 nt, Human
uguccuuggggaca

SEQ ID NO: 3771476 - RNA, 19 nt, Human
uguccuuuaaaaaagaaaa

SEQ ID NO: 3771477 - RNA, 17 nt, Human
uguccuuucccuccacu

SEQ ID NO: 3771478 - RNA, 19 nt, Human
uguccuuucuagagcacug

SEQ ID NO: 3771479 - RNA, 13 nt, Human
uguccuuuucaua

SEQ ID NO: 3771480 - RNA, 15 nt, Human
uguccuuuugcaaag

SEQ ID NO: 3771481 - RNA, 17 nt, Human
uguccuuuuuccucucc

SEQ ID NO: 3771482 - RNA, 18 nt, Human
uguccuuuuuccucucca

SEQ ID NO: 3771483 - RNA, 21 nt, Human
uguccuuuuuccucuccacac

SEQ ID NO: 3771484 - RNA, 21 nt, Human
ugucgaauuuuuauuauuugu

SEQ ID NO: 3771485 - RNA, 20 nt, Human
ugucgauuagacuggacagc

SEQ ID NO: 3771486 - RNA, 23 nt, Human
ugucgauuagacuggacagcuug

SEQ ID NO: 3771487 - RNA, 15 nt, Human
ugucgcccaggcugg

SEQ ID NO: 3771488 - RNA, 15 nt, Human
ugucgcucaugugug

SEQ ID NO: 3771489 - RNA, 16 nt, Human
ugucgcucaugugugc

SEQ ID NO: 3771490 - RNA, 15 nt, Human
ugucgcugcuucgug

SEQ ID NO: 3771491 - RNA, 14 nt, Human
ugucggcacauuca

SEQ ID NO: 3771492 - RNA, 22 nt, Human
ugucggccccaccagugccucu

SEQ ID NO: 3771493 - RNA, 23 nt, Human
ugucggcuccaguccccagaacu

SEQ ID NO: 3771494 - RNA, 14 nt, Human
ugucgggcaugaca

SEQ ID NO: 3771495 - RNA, 12 nt, Human
ugucgggcccuu

SEQ ID NO: 3771496 - RNA, 16 nt, Human
ugucguaaagauuugg

SEQ ID NO: 3771497 - RNA, 20 nt, Human
ugucguggacacacacagac

SEQ ID NO: 3771498 - RNA, 21 nt, Human
ugucguggguguguguagcca

SEQ ID NO: 3771499 - RNA, 22 nt, Human
ugucguugacuuuagggacuca

SEQ ID NO: 3771500 - RNA, 13 nt, Human
ugucuaaaaaaca

SEQ ID NO: 3771501 - RNA, 13 nt, Human
ugucuaaaacaau

SEQ ID NO: 3771502 - RNA, 16 nt, Human
ugucuaaacaaugcug

SEQ ID NO: 3771503 - RNA, 17 nt, Human
ugucuaaacaaugcuga

SEQ ID NO: 3771504 - RNA, 22 nt, Human
ugucuaaacaaugcugauuugg

SEQ ID NO: 3771505 - RNA, 11 nt, Human
ugucuaaacug

SEQ ID NO: 3771506 - RNA, 14 nt, Human
ugucuaagaaacau

SEQ ID NO: 3771507 - RNA, 15 nt, Human
ugucuaagaaacauu

SEQ ID NO: 3771508 - RNA, 15 nt, Human
ugucuaagauucuag

SEQ ID NO: 3771509 - RNA, 14 nt, Human
ugucuaaugaaacc

SEQ ID NO: 3771510 - RNA, 12 nt, Human
ugucuacaaaua

SEQ ID NO: 3771511 - RNA, 15 nt, Human
ugucuacaaauauaa

SEQ ID NO: 3771512 - RNA, 23 nt, Human
ugucuacacagauguucacccaa

SEQ ID NO: 3771513 - RNA, 17 nt, Human
ugucuacaccauuaugu

SEQ ID NO: 3771514 - RNA, 21 nt, Human
ugucuacaugaaaguccucag

SEQ ID NO: 3771515 - RNA, 14 nt, Human
ugucuagaguagcu

SEQ ID NO: 3771516 - RNA, 16 nt, Human
ugucuagcacuuccuu

SEQ ID NO: 3771517 - RNA, 21 nt, Human
ugucuagcaugccaacaagaa

SEQ ID NO: 3771518 - RNA, 19 nt, Human
ugucuaggcaggaccugug

SEQ ID NO: 3771519 - RNA, 15 nt, Human
ugucuauaaaagaaa

SEQ ID NO: 3771520 - RNA, 14 nt, Human
ugucuauaaagcau

SEQ ID NO: 3771521 - RNA, 13 nt, Human
ugucuauucagcu

SEQ ID NO: 3771522 - RNA, 18 nt, Human
ugucuauuguccaaaguu

SEQ ID NO: 3771523 - RNA, 15 nt, Human
ugucuauuucugcug

SEQ ID NO: 3771524 - RNA, 11 nt, Human
ugucuauuuua

SEQ ID NO: 3771525 - RNA, 16 nt, Human
ugucuauuuuaaaaua

SEQ ID NO: 3771526 - RNA, 20 nt, Human
ugucuauuuuuaauguuugu

SEQ ID NO: 3771527 - RNA, 12 nt, Human
ugucucaaaaaa

SEQ ID NO: 3771528 - RNA, 21 nt, Human
ugucucaaaaaaagaaaaaga

SEQ ID NO: 3771529 - RNA, 21 nt, Human
ugucucaaacuucagauggga

SEQ ID NO: 3771530 - RNA, 19 nt, Human
ugucucaagagggcacugg

SEQ ID NO: 3771531 - RNA, 14 nt, Human
ugucucaaugcuca

SEQ ID NO: 3771532 - RNA, 16 nt, Human
ugucucaaugcucaua

SEQ ID NO: 3771533 - RNA, 22 nt, Human
ugucucaaugcucauaacggau

SEQ ID NO: 3771534 - RNA, 23 nt, Human
ugucucacuaaagcaugaaaugu

SEQ ID NO: 3771535 - RNA, 22 nt, Human
ugucucagacuuuuguacaucu

SEQ ID NO: 3771536 - RNA, 22 nt, Human
ugucucagauuuuauuauguaa

SEQ ID NO: 3771537 - RNA, 14 nt, Human
ugucucagccuccc

SEQ ID NO: 3771538 - RNA, 16 nt, Human
ugucucaggcugccug

SEQ ID NO: 3771539 - RNA, 19 nt, Human
ugucucaggcugccugagu

SEQ ID NO: 3771540 - RNA, 17 nt, Human
ugucucaguccaccuga

SEQ ID NO: 3771541 - RNA, 11 nt, Human
ugucucaucca

SEQ ID NO: 3771542 - RNA, 21 nt, Human
ugucucauccaucaucaugug

SEQ ID NO: 3771543 - RNA, 13 nt, Human
ugucucaucccca

SEQ ID NO: 3771544 - RNA, 23 nt, Human
ugucucauccccaggggucccag

SEQ ID NO: 3771545 - RNA, 19 nt, Human
ugucucauccuccuggaac

SEQ ID NO: 3771546 - RNA, 21 nt, Human
ugucucaugccaguaacaggc

SEQ ID NO: 3771547 - RNA, 13 nt, Human
ugucucaugugug

SEQ ID NO: 3771548 - RNA, 14 nt, Human
ugucucauuuuaau

SEQ ID NO: 3771549 - RNA, 19 nt, Human
ugucuccaaccccccagca

SEQ ID NO: 3771550 - RNA, 23 nt, Human
ugucuccaaccccccagcacuga

SEQ ID NO: 3771551 - RNA, 11 nt, Human
ugucuccagac

SEQ ID NO: 3771552 - RNA, 17 nt, Human
ugucuccagacccccac

SEQ ID NO: 3771553 - RNA, 21 nt, Human
ugucucccagggccuuaaaag

SEQ ID NO: 3771554 - RNA, 12 nt, Human
ugucuccccucu

SEQ ID NO: 3771555 - RNA, 13 nt, Human
ugucucccgcccc

SEQ ID NO: 3771556 - RNA, 14 nt, Human
ugucuccuacuccu

SEQ ID NO: 3771557 - RNA, 17 nt, Human
ugucuccuacugaggau

SEQ ID NO: 3771558 - RNA, 15 nt, Human
ugucuccucucucug

SEQ ID NO: 3771559 - RNA, 17 nt, Human
ugucuccucuucuuugu

SEQ ID NO: 3771560 - RNA, 11 nt, Human
ugucuccugca

SEQ ID NO: 3771561 - RNA, 19 nt, Human
ugucuccuuugcaggcuca

SEQ ID NO: 3771562 - RNA, 15 nt, Human
ugucucgagcgcccu

SEQ ID NO: 3771563 - RNA, 18 nt, Human
ugucucgugguaggacug

SEQ ID NO: 3771564 - RNA, 19 nt, Human
ugucucgugguaggacugu

SEQ ID NO: 3771565 - RNA, 15 nt, Human
ugucucuagccacuu

SEQ ID NO: 3771566 - RNA, 16 nt, Human
ugucucuagccacuuu

SEQ ID NO: 3771567 - RNA, 12 nt, Human
ugucucucauga

SEQ ID NO: 3771568 - RNA, 13 nt, Human
ugucucuccugcc

SEQ ID NO: 3771569 - RNA, 16 nt, Human
ugucucuccugccccu

SEQ ID NO: 3771570 - RNA, 17 nt, Human
ugucucuccugccccuu

SEQ ID NO: 3771571 - RNA, 15 nt, Human
ugucucuccuuuucu

SEQ ID NO: 3771572 - RNA, 21 nt, Human
ugucucuccuuuucuuuuguu

SEQ ID NO: 3771573 - RNA, 18 nt, Human
ugucucucuucagacucu

SEQ ID NO: 3771574 - RNA, 19 nt, Human
ugucucucuucagacucuc

SEQ ID NO: 3771575 - RNA, 21 nt, Human
ugucucucuucagacucucag

SEQ ID NO: 3771576 - RNA, 15 nt, Human
ugucucugauaaaag

SEQ ID NO: 3771577 - RNA, 15 nt, Human
ugucucuuauggaug

SEQ ID NO: 3771578 - RNA, 20 nt, Human
ugucucuuauggaugucccc

SEQ ID NO: 3771579 - RNA, 13 nt, Human
ugucucuucuccu

SEQ ID NO: 3771580 - RNA, 14 nt, Human
ugucucuucuccuu

SEQ ID NO: 3771581 - RNA, 16 nt, Human
ugucucuucugagcua

SEQ ID NO: 3771582 - RNA, 17 nt, Human
ugucucuugaguuuguc

SEQ ID NO: 3771583 - RNA, 18 nt, Human
ugucucuugguccugcug

SEQ ID NO: 3771584 - RNA, 22 nt, Human
ugucucuugguccugcugcagu

SEQ ID NO: 3771585 - RNA, 22 nt, Human
ugucucuuuaagggcaugccuu

SEQ ID NO: 3771586 - RNA, 22 nt, Human
ugucucuuuaaugucacaggca

SEQ ID NO: 3771587 - RNA, 14 nt, Human
ugucucuuuucucu

SEQ ID NO: 3771588 - RNA, 18 nt, Human
ugucucuuuucucuuucu

SEQ ID NO: 3771589 - RNA, 13 nt, Human
ugucugaaacauu

SEQ ID NO: 3771590 - RNA, 12 nt, Human
ugucugaacuuu

SEQ ID NO: 3771591 - RNA, 22 nt, Human
ugucugaaggacacuuccugcc

SEQ ID NO: 3771592 - RNA, 20 nt, Human
ugucugaagucacugcacag

SEQ ID NO: 3771593 - RNA, 18 nt, Human
ugucugagaguuuaguug

SEQ ID NO: 3771594 - RNA, 15 nt, Human
ugucugaucugugcu

SEQ ID NO: 3771595 - RNA, 20 nt, Human
ugucugaucugugcuuucca

SEQ ID NO: 3771596 - RNA, 19 nt, Human
ugucugauuggcucaccca

SEQ ID NO: 3771597 - RNA, 16 nt, Human
ugucugauuggcuugu

SEQ ID NO: 3771598 - RNA, 13 nt, Human
ugucugauuucuu

SEQ ID NO: 3771599 - RNA, 16 nt, Human
ugucugcagcccugag

SEQ ID NO: 3771600 - RNA, 17 nt, Human
ugucugcagcccugaga

SEQ ID NO: 3771601 - RNA, 18 nt, Human
ugucugcagcccugagaa

SEQ ID NO: 3771602 - RNA, 19 nt, Human
ugucugcagugugcccccc

SEQ ID NO: 3771603 - RNA, 21 nt, Human
ugucugcauuucgguggcuag

SEQ ID NO: 3771604 - RNA, 15 nt, Human
ugucugccagccagc

SEQ ID NO: 3771605 - RNA, 16 nt, Human
ugucugccagccagca

SEQ ID NO: 3771606 - RNA, 16 nt, Human
ugucugccccaaguuu

SEQ ID NO: 3771607 - RNA, 17 nt, Human
ugucugccccaaguuuu

SEQ ID NO: 3771608 - RNA, 14 nt, Human
ugucugccccagcc

SEQ ID NO: 3771609 - RNA, 17 nt, Human
ugucugcgugggucaga

SEQ ID NO: 3771610 - RNA, 16 nt, Human
ugucugcuccagcucu

SEQ ID NO: 3771611 - RNA, 21 nt, Human
ugucugcuggucacuucuucu

SEQ ID NO: 3771612 - RNA, 20 nt, Human
ugucugcuuuaaagggccug

SEQ ID NO: 3771613 - RNA, 21 nt, Human
ugucugcuuuaaagggccugc

SEQ ID NO: 3771614 - RNA, 22 nt, Human
ugucugcuuuaaagggccugcc

SEQ ID NO: 3771615 - RNA, 17 nt, Human
ugugaucugucuuguaa

SEQ ID NO: 3771616 - RNA, 21 nt, Human
ugugaucuuaauauauuugaa

SEQ ID NO: 3771617 - RNA, 22 nt, Human
ugugaucuuauuuuucuaaacg

SEQ ID NO: 3771618 - RNA, 18 nt, Human
ugugaucuugcucuaucu

SEQ ID NO: 3771619 - RNA, 18 nt, Human
ugugaugaauacuguauu

SEQ ID NO: 3771620 - RNA, 18 nt, Human
ugugaugagaggaaauca

SEQ ID NO: 3771621 - RNA, 13 nt, Human
ugugaugagcuga

SEQ ID NO: 3771622 - RNA, 17 nt, Human
ugugaugauguaauuga

SEQ ID NO: 3771623 - RNA, 17 nt, Human
ugugaugcuuugaagua

SEQ ID NO: 3771624 - RNA, 15 nt, Human
ugugauggggcccug

SEQ ID NO: 3771625 - RNA, 18 nt, Human
ugugauggggcccugccu

SEQ ID NO: 3771626 - RNA, 19 nt, Human
ugugaugguucguucuguu

SEQ ID NO: 3771627 - RNA, 23 nt, Human
ugugaugguucguucuguuuaca

SEQ ID NO: 3771628 - RNA, 14 nt, Human
ugugauguauucua

SEQ ID NO: 3771629 - RNA, 18 nt, Human
ugugaugucauacagaga

SEQ ID NO: 3771630 - RNA, 19 nt, Human
ugugaugucauacagagaa

SEQ ID NO: 3771631 - RNA, 20 nt, Human
ugugaugucauacagagaag

SEQ ID NO: 3771632 - RNA, 17 nt, Human
ugugaugugacauuugu

SEQ ID NO: 3771633 - RNA, 13 nt, Human
ugugauguucuaa

SEQ ID NO: 3771634 - RNA, 16 nt, Human
ugugauguucuaaggc

SEQ ID NO: 3771635 - RNA, 16 nt, Human
ugugauuagacagaac

SEQ ID NO: 3771636 - RNA, 15 nt, Human
ugugauuauuucacu

SEQ ID NO: 3771637 - RNA, 15 nt, Human
ugugauucaaucugu

SEQ ID NO: 3771638 - RNA, 20 nt, Human
ugugauucaaucuguaaacu

SEQ ID NO: 3771639 - RNA, 22 nt, Human
ugugauuccacuacaccuggcu

SEQ ID NO: 3771640 - RNA, 20 nt, Human
ugugauuccuuugaagagga

SEQ ID NO: 3771641 - RNA, 14 nt, Human
ugugauucuaaugu

SEQ ID NO: 3771642 - RNA, 19 nt, Human
ugugauucuuccagaugug

SEQ ID NO: 3771643 - RNA, 16 nt, Human
ugugauugacagcuuu

SEQ ID NO: 3771644 - RNA, 19 nt, Human
ugugauugggaauaaauau

SEQ ID NO: 3771645 - RNA, 20 nt, Human
ugugauugggaauaaauaug

SEQ ID NO: 3771646 - RNA, 14 nt, Human
ugugauuguggaau

SEQ ID NO: 3771647 - RNA, 19 nt, Human
ugugauuuaauaguguuaa

SEQ ID NO: 3771648 - RNA, 15 nt, Human
ugugauuucccgugg

SEQ ID NO: 3771649 - RNA, 23 nt, Human
ugugauuucccguggccccagcc

SEQ ID NO: 3771650 - RNA, 24 nt, Human
ugugauuucccguggccccagccu

SEQ ID NO: 3771651 - RNA, 12 nt, Human
ugugauuugacu

SEQ ID NO: 3771652 - RNA, 16 nt, Human
ugugauuuuaacucug

SEQ ID NO: 3771653 - RNA, 19 nt, Human
ugugauuuuaacucugucu

SEQ ID NO: 3771654 - RNA, 19 nt, Human
ugugauuuuugguauuuga

SEQ ID NO: 3771655 - RNA, 21 nt, Human
ugugauuuuugguauuugaaa

SEQ ID NO: 3771656 - RNA, 15 nt, Human
ugugcaaaaauuuuu

SEQ ID NO: 3771657 - RNA, 20 nt, Human
ugugcaaaaccuuuuacugg

SEQ ID NO: 3771658 - RNA, 18 nt, Human
ugugcaacaggguaugga

SEQ ID NO: 3771659 - RNA, 20 nt, Human
ugugcaacaggguauggacu

SEQ ID NO: 3771660 - RNA, 19 nt, Human
ugugcaacgccgugggcug

SEQ ID NO: 3771661 - RNA, 18 nt, Human
ugugcaagcuuuuccuaa

SEQ ID NO: 3771662 - RNA, 19 nt, Human
ugugcaagcuuuuccuaau

SEQ ID NO: 3771663 - RNA, 18 nt, Human
ugugcaagguauuacacu

SEQ ID NO: 3771664 - RNA, 15 nt, Human
ugugcaagugucugu

SEQ ID NO: 3771665 - RNA, 19 nt, Human
ugugcaagugucugugugc

SEQ ID NO: 3771666 - RNA, 20 nt, Human
ugugcaagugucugugugca

SEQ ID NO: 3771667 - RNA, 14 nt, Human
ugugcaauguguau

SEQ ID NO: 3771668 - RNA, 22 nt, Human
ugugcacacacaccacacauac

SEQ ID NO: 3771669 - RNA, 22 nt, Human
ugugcacauccgcgugugccug

SEQ ID NO: 3771670 - RNA, 23 nt, Human
ugugcacauccgcgugugccugu

SEQ ID NO: 3771671 - RNA, 15 nt, Human
ugugcacaucucugc

SEQ ID NO: 3771672 - RNA, 19 nt, Human
ugugcacaucucugcuuga

SEQ ID NO: 3771673 - RNA, 17 nt, Human
ugugcacaucugugucu

SEQ ID NO: 3771674 - RNA, 17 nt, Human
ugugcacaucuguuuug

SEQ ID NO: 3771675 - RNA, 16 nt, Human
ugugcacaugcacgug

SEQ ID NO: 3771676 - RNA, 13 nt, Human
ugugcaccagggu

SEQ ID NO: 3771677 - RNA, 21 nt, Human
ugugcaccuuaccaacuuucu

SEQ ID NO: 3771678 - RNA, 22 nt, Human
ugugcaccuuaccaacuuucug

SEQ ID NO: 3771679 - RNA, 23 nt, Human
ugugcacgcagauuagcaggcca

SEQ ID NO: 3771680 - RNA, 21 nt, Human
ugugcacugcccauggacagg

SEQ ID NO: 3771681 - RNA, 14 nt, Human
ugugcacugucacu

SEQ ID NO: 3771682 - RNA, 19 nt, Human
ugugcagacucaauaaaau

SEQ ID NO: 3771683 - RNA, 15 nt, Human
ugugcagagcugaag

SEQ ID NO: 3771684 - RNA, 17 nt, Human
ugugcagcagauuggaa

SEQ ID NO: 3771685 - RNA, 17 nt, Human
ugugcagcauuucacuu

SEQ ID NO: 3771686 - RNA, 23 nt, Human
ugugcagccccgccuccaggcca

SEQ ID NO: 3771687 - RNA, 22 nt, Human
ugugcagccuguccugggcugg

SEQ ID NO: 3771688 - RNA, 17 nt, Human
ugugcagcuuuugguca

SEQ ID NO: 3771689 - RNA, 18 nt, Human
ugugcaggagcggcagau

SEQ ID NO: 3771690 - RNA, 19 nt, Human
ugugcaggugcuauuguua

SEQ ID NO: 3771691 - RNA, 16 nt, Human
ugugcagguggggaga

SEQ ID NO: 3771692 - RNA, 14 nt, Human
ugugcaguaacuug

SEQ ID NO: 3771693 - RNA, 19 nt, Human
ugugcaguaauagcacugc

SEQ ID NO: 3771694 - RNA, 12 nt, Human
ugugcaguguug

SEQ ID NO: 3771695 - RNA, 15 nt, Human
ugugcauagugcugg

SEQ ID NO: 3771696 - RNA, 17 nt, Human
ugugcauagugcuggga

SEQ ID NO: 3771697 - RNA, 14 nt, Human
ugugcauaguuucu

SEQ ID NO: 3771698 - RNA, 19 nt, Human
ugugcauauuguacacuuu

SEQ ID NO: 3771699 - RNA, 15 nt, Human
ugugcauguguguau

SEQ ID NO: 3771700 - RNA, 16 nt, Human
ugugcauguguguaua

SEQ ID NO: 3771701 - RNA, 15 nt, Human
ugugcaugugugugc

SEQ ID NO: 3771702 - RNA, 23 nt, Human
ugugcauuaucuagauacuguau

SEQ ID NO: 3771703 - RNA, 15 nt, Human
ugugcauucuggauu

SEQ ID NO: 3771704 - RNA, 22 nt, Human
ugugcauucuuuuaaaagacaa

SEQ ID NO: 3771705 - RNA, 13 nt, Human
ugugcauuuucua

SEQ ID NO: 3771706 - RNA, 19 nt, Human
ugugcauuuucuaaacaga

SEQ ID NO: 3771707 - RNA, 20 nt, Human
ugugccacaacgccuggcua

SEQ ID NO: 3771708 - RNA, 12 nt, Human
ugugccacaggc

SEQ ID NO: 3771709 - RNA, 21 nt, Human
ugugccacccugggcucugug

SEQ ID NO: 3771710 - RNA, 22 nt, Human
ugugccacccugggcucugugg

SEQ ID NO: 3771711 - RNA, 21 nt, Human
ugugccacuaaacuacauugu

SEQ ID NO: 3771712 - RNA, 20 nt, Human
ugugccagagaacccagccc

SEQ ID NO: 3771713 - RNA, 23 nt, Human
ugugccagagaacccagcccacc

SEQ ID NO: 3771714 - RNA, 16 nt, Human
ugugccagagccuggg

SEQ ID NO: 3771715 - RNA, 20 nt, Human
ugugccagagccuggggcuc

SEQ ID NO: 3771716 - RNA, 21 nt, Human
ugugccagagccuggggcucu

SEQ ID NO: 3771717 - RNA, 23 nt, Human
ugugccagaggaauccuggcagc

SEQ ID NO: 3771718 - RNA, 18 nt, Human
ugugccagauuuaugcau

SEQ ID NO: 3771719 - RNA, 20 nt, Human
ugugccagauuuaugcauau

SEQ ID NO: 3771720 - RNA, 21 nt, Human
ugugccagggcaaugaugaau

SEQ ID NO: 3771721 - RNA, 20 nt, Human
ugugccauagaguuuaacac

SEQ ID NO: 3771722 - RNA, 17 nt, Human
ugugcccacaucccagg

SEQ ID NO: 3771723 - RNA, 23 nt, Human
ugugcccacccuccacucuccuc

SEQ ID NO: 3771724 - RNA, 21 nt, Human
ugugcccagaauacugaugga

SEQ ID NO: 3771725 - RNA, 13 nt, Human
ugugcccagcuca

SEQ ID NO: 3771726 - RNA, 15 nt, Human
ugugcccagcucagu

SEQ ID NO: 3771727 - RNA, 21 nt, Human
ugugcccaguuaaucuugcuu

SEQ ID NO: 3771728 - RNA, 18 nt, Human
ugugcccaugggcacugc

SEQ ID NO: 3771729 - RNA, 22 nt, Human
ugugcccaugggcacugcuggg

SEQ ID NO: 3771730 - RNA, 14 nt, Human
ugugccccaugccu

SEQ ID NO: 3771731 - RNA, 23 nt, Human
ugugcccccaaccauuuccucag

SEQ ID NO: 3771732 - RNA, 22 nt, Human
ugugccccccauccuggcccau

SEQ ID NO: 3771733 - RNA, 14 nt, Human
ugugcccccucuac

SEQ ID NO: 3771734 - RNA, 13 nt, Human
ugugcccuccuga

SEQ ID NO: 3771735 - RNA, 17 nt, Human
ugugcccuccugaccca

SEQ ID NO: 3771736 - RNA, 23 nt, Human
ugugcccuccugacccauugcug

SEQ ID NO: 3771737 - RNA, 21 nt, Human
ugugcccucugggcucugagu

SEQ ID NO: 3771738 - RNA, 15 nt, Human
ugugccgaaugugca

SEQ ID NO: 3771739 - RNA, 18 nt, Human
ugugccuaauguguuuga

SEQ ID NO: 3771740 - RNA, 22 nt, Human
ugugccuauugcuagagcuccu

SEQ ID NO: 3771741 - RNA, 15 nt, Human
ugugccuccucccuc

SEQ ID NO: 3771742 - RNA, 16 nt, Human
ugugccuccucccucc

SEQ ID NO: 3771743 - RNA, 13 nt, Human
ugugccucugccu

SEQ ID NO: 3771744 - RNA, 15 nt, Human
ugugccugacccuac

SEQ ID NO: 3771745 - RNA, 14 nt, Human
ugugccugcaccag

SEQ ID NO: 3771746 - RNA, 16 nt, Human
ugugccugcaccagga

SEQ ID NO: 3771747 - RNA, 17 nt, Human
ugugccugcaccaggag

SEQ ID NO: 3771748 - RNA, 18 nt, Human
ugugccugcaccaggaga

SEQ ID NO: 3771749 - RNA, 13 nt, Human
ugugccugcagcc

SEQ ID NO: 3771750 - RNA, 13 nt, Human
ugugccuggagcu

SEQ ID NO: 3771751 - RNA, 17 nt, Human
ugugccuggagcuccug

SEQ ID NO: 3771752 - RNA, 18 nt, Human
ugugccuggagcuccugg

SEQ ID NO: 3771753 - RNA, 19 nt, Human
ugugccuggagcuccuggg

SEQ ID NO: 3771754 - RNA, 22 nt, Human
ugugccuggcuucuuucucuca

SEQ ID NO: 3771755 - RNA, 23 nt, Human
ugugccuggcuucuuucucucag

SEQ ID NO: 3771756 - RNA, 13 nt, Human
ugugccuggggga

SEQ ID NO: 3771757 - RNA, 14 nt, Human
ugugccuucgucuu

SEQ ID NO: 3771758 - RNA, 20 nt, Human
ugugccuugucacgccagac

SEQ ID NO: 3771759 - RNA, 14 nt, Human
ugugccuuuuuuau

SEQ ID NO: 3771760 - RNA, 19 nt, Human
ugugcgcauaggccugcuu

SEQ ID NO: 3771761 - RNA, 22 nt, Human
ugugcgcauaggccugcuuugu

SEQ ID NO: 3771762 - RNA, 15 nt, Human
ugugcggugcauaca

SEQ ID NO: 3771763 - RNA, 20 nt, Human
ugugcguaugcaguguagau

SEQ ID NO: 3771764 - RNA, 22 nt, Human
ugugcguggggcucccgccucc

SEQ ID NO: 3771765 - RNA, 21 nt, Human
ugugcgugguggucccugggu

SEQ ID NO: 3771766 - RNA, 22 nt, Human
ugugcgugguggucccugggua

SEQ ID NO: 3771767 - RNA, 20 nt, Human
ugugcguguguccaugugug

SEQ ID NO: 3771768 - RNA, 21 nt, Human
ugugcuaaacguguauguuuu

SEQ ID NO: 3771769 - RNA, 22 nt, Human
ugugcuaaacguguauguuuuu

SEQ ID NO: 3771770 - RNA, 14 nt, Human
ugugcuaaauauca

SEQ ID NO: 3771771 - RNA, 23 nt, Human
ugugcuaaccacgucugucuuca

SEQ ID NO: 3771772 - RNA, 14 nt, Human
ugugcuacagauga

SEQ ID NO: 3771773 - RNA, 18 nt, Human
ugugcuacaggggccaga

SEQ ID NO: 3771774 - RNA, 13 nt, Human
ugugcuagaugug

SEQ ID NO: 3771775 - RNA, 20 nt, Human
ugugcuagggaaacuucccg

SEQ ID NO: 3771776 - RNA, 18 nt, Human
ugugcuauacugcauacu

SEQ ID NO: 3771777 - RNA, 20 nt, Human
ugugcuauacugcauacuuu

SEQ ID NO: 3771778 - RNA, 14 nt, Human
ugugcuaugaauuu

SEQ ID NO: 3771779 - RNA, 18 nt, Human
ugugcuauggugcucugu

SEQ ID NO: 3771780 - RNA, 21 nt, Human
ugugcucagaauuauuaauua

SEQ ID NO: 3771781 - RNA, 16 nt, Human
ugugcucaggagcccu

SEQ ID NO: 3771782 - RNA, 22 nt, Human
ugugcucaugcauugcuugugu

SEQ ID NO: 3771783 - RNA, 17 nt, Human
ugugcuccccuuugccu

SEQ ID NO: 3771784 - RNA, 14 nt, Human
ugugcuccgugccu

SEQ ID NO: 3771785 - RNA, 16 nt, Human
ugugcuccuccuuggu

SEQ ID NO: 3771786 - RNA, 16 nt, Human
ugugcucucaccagcu

SEQ ID NO: 3771787 - RNA, 12 nt, Human
ugugcucugauc

SEQ ID NO: 3771788 - RNA, 18 nt, Human
ugugcucuggacaggcau

SEQ ID NO: 3771789 - RNA, 21 nt, Human
ugugcugaggccuuaucauuc

SEQ ID NO: 3771790 - RNA, 20 nt, Human
ugugcugaucauuugaggaa

SEQ ID NO: 3771791 - RNA, 13 nt, Human
ugugcugcagugc

SEQ ID NO: 3771792 - RNA, 16 nt, Human
ugugcugcccugaaga

SEQ ID NO: 3771793 - RNA, 14 nt, Human
ugugcugcccugcc

SEQ ID NO: 3771794 - RNA, 15 nt, Human
ugugcugcccugccc

SEQ ID NO: 3771795 - RNA, 18 nt, Human
ugugcugcccugcccacc

SEQ ID NO: 3771796 - RNA, 19 nt, Human
ugugcugcccugcccaccu

SEQ ID NO: 3771797 - RNA, 18 nt, Human
ugugcugcuguaagaaau

SEQ ID NO: 3771798 - RNA, 18 nt, Human
ugugcugcuuugauauau

SEQ ID NO: 3771799 - RNA, 20 nt, Human
ugugcuggagccacuaacua

SEQ ID NO: 3771800 - RNA, 10 nt, Human
ugugcuggga

SEQ ID NO: 3771801 - RNA, 18 nt, Human
ugugcugggagaaauacu

SEQ ID NO: 3771802 - RNA, 23 nt, Human
ugugcugggggaaugagcccaga

SEQ ID NO: 3771803 - RNA, 24 nt, Human
ugugcugggggaaugagcccagag

SEQ ID NO: 3771804 - RNA, 18 nt, Human
ugugcugggguuaucuga

SEQ ID NO: 3771805 - RNA, 12 nt, Human
ugugcuguaauu

SEQ ID NO: 3771806 - RNA, 17 nt, Human
ugugcugugcccaaguu

SEQ ID NO: 3771807 - RNA, 20 nt, Human
ugugcuguggggcugguagc

SEQ ID NO: 3771808 - RNA, 17 nt, Human
ugugcugugguuccugg

SEQ ID NO: 3771809 - RNA, 16 nt, Human
ugugcuguguaaaguu

SEQ ID NO: 3771810 - RNA, 12 nt, Human
ugugcugugugu

SEQ ID NO: 3771811 - RNA, 15 nt, Human
ugugcuguguuugcu

SEQ ID NO: 3771812 - RNA, 21 nt, Human
ugugcuguguuugcuccccuu

SEQ ID NO: 3771813 - RNA, 19 nt, Human
ugugcuguuguuaugaugu

SEQ ID NO: 3771814 - RNA, 19 nt, Human
ugugcuuaacagggaacgu

SEQ ID NO: 3771815 - RNA, 15 nt, Human
ugugcuucacaguag

SEQ ID NO: 3771816 - RNA, 22 nt, Human
ugugcuucacaguagagccagc

SEQ ID NO: 3771817 - RNA, 19 nt, Human
ugugcuucgggcccuuccc

SEQ ID NO: 3771818 - RNA, 21 nt, Human
ugugcuucuaauauuuauugc

SEQ ID NO: 3771819 - RNA, 15 nt, Human
ugugcuugaaggccc

SEQ ID NO: 3771820 - RNA, 17 nt, Human
ugugcuugaaggcccug

SEQ ID NO: 3771821 - RNA, 18 nt, Human
ugugcuuggucuguuuga

SEQ ID NO: 3771822 - RNA, 23 nt, Human
ugugcuuguuuacagcacuacuc

SEQ ID NO: 3771823 - RNA, 14 nt, Human
ugugcuuguuuuau

SEQ ID NO: 3771824 - RNA, 19 nt, Human
ugugcuuuaugcugaaaca

SEQ ID NO: 3771825 - RNA, 20 nt, Human
ugugcuuuccagcucacccc

SEQ ID NO: 3771826 - RNA, 14 nt, Human
ugugcuuugagaag

SEQ ID NO: 3771827 - RNA, 17 nt, Human
ugugcuuugcauuccua

SEQ ID NO: 3771828 - RNA, 18 nt, Human
ugugcuuugcucuugucc

SEQ ID NO: 3771829 - RNA, 16 nt, Human
ugugcuuuuaaaugca

SEQ ID NO: 3771830 - RNA, 20 nt, Human
uguggaaaagaaacacgcac

SEQ ID NO: 3771831 - RNA, 21 nt, Human
uguggaaaagccaagaggcug

SEQ ID NO: 3771832 - RNA, 19 nt, Human
uguggaaagccucugcugc

SEQ ID NO: 3771833 - RNA, 20 nt, Human
uguggaaagccucugcugcc

SEQ ID NO: 3771834 - RNA, 16 nt, Human
uguggaaagugaauuu

SEQ ID NO: 3771835 - RNA, 19 nt, Human
uguggaaagugaauuugaa

SEQ ID NO: 3771836 - RNA, 22 nt, Human
uguggaaagugaauuugaauga

SEQ ID NO: 3771837 - RNA, 23 nt, Human
uguggaaagugaauuugaaugaa

SEQ ID NO: 3771838 - RNA, 12 nt, Human
uguggaaagugu

SEQ ID NO: 3771839 - RNA, 16 nt, Human
uguggaaaguguaaag

SEQ ID NO: 3771840 - RNA, 20 nt, Human
uguggaaaguguaaagcauu

SEQ ID NO: 3771841 - RNA, 21 nt, Human
uguggaaaguguaaagcauuc

SEQ ID NO: 3771842 - RNA, 19 nt, Human
uguggaaauuaagaagaaa

SEQ ID NO: 3771843 - RNA, 21 nt, Human
uguggaacauaaaaaggacau

SEQ ID NO: 3771844 - RNA, 21 nt, Human
uguggaacccagcaguucugu

SEQ ID NO: 3771845 - RNA, 20 nt, Human
uguggaacuaauaaauacau

SEQ ID NO: 3771846 - RNA, 17 nt, Human
uguggaacugcugccac

SEQ ID NO: 3771847 - RNA, 18 nt, Human
uguggaacugcugccacu

SEQ ID NO: 3771848 - RNA, 19 nt, Human
uguggaagaaaaugguuua

SEQ ID NO: 3771849 - RNA, 20 nt, Human
uguggaagaaaaugguuuau

SEQ ID NO: 3771850 - RNA, 19 nt, Human
uguggaaggcaagccaggc

SEQ ID NO: 3771851 - RNA, 18 nt, Human
uguggaaucuggagugag

SEQ ID NO: 3771852 - RNA, 15 nt, Human
uguggaccaauuauu

SEQ ID NO: 3771853 - RNA, 17 nt, Human
uguggaccacugcauga

SEQ ID NO: 3771854 - RNA, 21 nt, Human
uguggaccauggaguggcagc

SEQ ID NO: 3771855 - RNA, 15 nt, Human
uguggacuaaaagau

SEQ ID NO: 3771856 - RNA, 23 nt, Human
uguggagaaacuguagucucagg

SEQ ID NO: 3771857 - RNA, 19 nt, Human
uguggagaagccacaggcc

SEQ ID NO: 3771858 - RNA, 24 nt, Human
uguggagacaaugucugcagcccu

SEQ ID NO: 3771859 - RNA, 13 nt, Human
uguggagccaggc

SEQ ID NO: 3771860 - RNA, 15 nt, Human
uguggagccaggcgu

SEQ ID NO: 3771861 - RNA, 16 nt, Human
uguggagcccgcaccc

SEQ ID NO: 3771862 - RNA, 16 nt, Human
uguggagccgaggccu

SEQ ID NO: 3771863 - RNA, 12 nt, Human
uguggaggaagg

SEQ ID NO: 3771864 - RNA, 16 nt, Human
uguggaggaaggauug

SEQ ID NO: 3771865 - RNA, 20 nt, Human
uguggaggaaggauuguaaa

SEQ ID NO: 3771866 - RNA, 18 nt, Human
uguggaggcagugucauu

SEQ ID NO: 3771867 - RNA, 13 nt, Human
uguggagggcaca

SEQ ID NO: 3771868 - RNA, 18 nt, Human
uguggagucauuucugau

SEQ ID NO: 3771869 - RNA, 19 nt, Human
uguggaucaaccaucgcuu

SEQ ID NO: 3771870 - RNA, 14 nt, Human
uguggauccaaugu

SEQ ID NO: 3771871 - RNA, 15 nt, Human
uguggauccaauguu

SEQ ID NO: 3771872 - RNA, 16 nt, Human
uguggaucuuuucauu

SEQ ID NO: 3771873 - RNA, 19 nt, Human
uguggaugaucaauccuuu

SEQ ID NO: 3771874 - RNA, 22 nt, Human
uguggauuuuuuccuucaaagu

SEQ ID NO: 3771875 - RNA, 22 nt, Human
uguggcaaagccuucauugccu

SEQ ID NO: 3771876 - RNA, 15 nt, Human
uguggcaagugaauu

SEQ ID NO: 3771877 - RNA, 17 nt, Human
uguggcaaucugugggc

SEQ ID NO: 3771878 - RNA, 19 nt, Human
uguggcacuggggcagggg

SEQ ID NO: 3771879 - RNA, 16 nt, Human
uguggcacuugccugg

SEQ ID NO: 3771880 - RNA, 23 nt, Human
uguggcagagagagagaaagaga

SEQ ID NO: 3771881 - RNA, 14 nt, Human
uguggcagaguuac

SEQ ID NO: 3771882 - RNA, 20 nt, Human
uguggcagaguuacaguucu

SEQ ID NO: 3771883 - RNA, 16 nt, Human
uguggcagcaggcagc

SEQ ID NO: 3771884 - RNA, 14 nt, Human
uguggcaggcagcg

SEQ ID NO: 3771885 - RNA, 20 nt, Human
uguggcagggguuagagcag

SEQ ID NO: 3771886 - RNA, 23 nt, Human
uguggcagggguuagagcaggac

SEQ ID NO: 3771887 - RNA, 18 nt, Human
uguggcaguaaagagaaa

SEQ ID NO: 3771888 - RNA, 20 nt, Human
uguggcaguaaagagaaacu

SEQ ID NO: 3771889 - RNA, 15 nt, Human
uguggcagugguuuu

SEQ ID NO: 3771890 - RNA, 23 nt, Human
uguggcaguuuggcaaacucucc

SEQ ID NO: 3771891 - RNA, 19 nt, Human
uguggcauccagagucccu

SEQ ID NO: 3771892 - RNA, 21 nt, Human
uguggcauccagagucccugc

SEQ ID NO: 3771893 - RNA, 21 nt, Human
uguggcaucuuugccuugggc

SEQ ID NO: 3771894 - RNA, 17 nt, Human
uguggcaugggugaaga

SEQ ID NO: 3771895 - RNA, 16 nt, Human
uguggccaaaggaggg

SEQ ID NO: 3771896 - RNA, 21 nt, Human
uguggccaaggagcugcuaua

SEQ ID NO: 3771897 - RNA, 13 nt, Human
uguggccaggagg

SEQ ID NO: 3771898 - RNA, 12 nt, Human
uguggccccuuc

SEQ ID NO: 3771899 - RNA, 13 nt, Human
uguggccccuuca

SEQ ID NO: 3771900 - RNA, 20 nt, Human
uguggcccucucccuuaccc

SEQ ID NO: 3771901 - RNA, 18 nt, Human
caccaugauggggcccua

SEQ ID NO: 3771902 - RNA, 20 nt, Human
caccauggcuaaggcaccag

SEQ ID NO: 3771903 - RNA, 16 nt, Human
caccaugggauuaaua

SEQ ID NO: 3771904 - RNA, 18 nt, Human
caccaugggguccuacca

SEQ ID NO: 3771905 - RNA, 23 nt, Human
caccaugggguccuaccaauaga

SEQ ID NO: 3771906 - RNA, 18 nt, Human
caccauguaaaacaaaaa

SEQ ID NO: 3771907 - RNA, 21 nt, Human
caccauguaaaacaaaaaaca

SEQ ID NO: 3771908 - RNA, 15 nt, Human
caccauguauuuugu

SEQ ID NO: 3771909 - RNA, 17 nt, Human
caccaugugagcucuuc

SEQ ID NO: 3771910 - RNA, 19 nt, Human
caccauguuggccaggcug

SEQ ID NO: 3771911 - RNA, 20 nt, Human
caccauguuggccaggcugc

SEQ ID NO: 3771912 - RNA, 19 nt, Human
caccauguuugagcucaga

SEQ ID NO: 3771913 - RNA, 18 nt, Human
caccauuauaaugaauuu

SEQ ID NO: 3771914 - RNA, 23 nt, Human
caccauucguacauaauacugaa

SEQ ID NO: 3771915 - RNA, 15 nt, Human
caccauugaacugua

SEQ ID NO: 3771916 - RNA, 15 nt, Human
caccauugaaggcuu

SEQ ID NO: 3771917 - RNA, 16 nt, Human
caccauugaaggcuua

SEQ ID NO: 3771918 - RNA, 17 nt, Human
caccauuuccccagggc

SEQ ID NO: 3771919 - RNA, 20 nt, Human
caccauuuggcaucccuggg

SEQ ID NO: 3771920 - RNA, 14 nt, Human
cacccaaaagucaa

SEQ ID NO: 3771921 - RNA, 23 nt, Human
cacccaaaagucaaaaggugccu

SEQ ID NO: 3771922 - RNA, 20 nt, Human
cacccaaaccggcaggugcg

SEQ ID NO: 3771923 - RNA, 15 nt, Human
cacccaaagcugagc

SEQ ID NO: 3771924 - RNA, 16 nt, Human
cacccaaagcugagcc

SEQ ID NO: 3771925 - RNA, 18 nt, Human
cacccaaagcugagccug

SEQ ID NO: 3771926 - RNA, 22 nt, Human
cacccaaagcugagccugcagg

SEQ ID NO: 3771927 - RNA, 24 nt, Human
cacccaacccuaucuccugacaga

SEQ ID NO: 3771928 - RNA, 16 nt, Human
cacccaagggccuggc

SEQ ID NO: 3771929 - RNA, 20 nt, Human
cacccaagggccuggccuga

SEQ ID NO: 3771930 - RNA, 17 nt, Human
cacccaauucaaaacau

SEQ ID NO: 3771931 - RNA, 14 nt, Human
cacccaauuccacu

SEQ ID NO: 3771932 - RNA, 17 nt, Human
cacccaauuccacucug

SEQ ID NO: 3771933 - RNA, 20 nt, Human
cacccacaagugccacugcc

SEQ ID NO: 3771934 - RNA, 17 nt, Human
cacccacacacucgccc

SEQ ID NO: 3771935 - RNA, 21 nt, Human
cacccacacacucgcccgccc

SEQ ID NO: 3771936 - RNA, 23 nt, Human
cacccacacacucgcccgcccac

SEQ ID NO: 3771937 - RNA, 13 nt, Human
cacccacauguga

SEQ ID NO: 3771938 - RNA, 20 nt, Human
cacccaccaucaugucuggc

SEQ ID NO: 3771939 - RNA, 14 nt, Human
cacccaccccugca

SEQ ID NO: 3771940 - RNA, 13 nt, Human
cacccacccuggg

SEQ ID NO: 3771941 - RNA, 15 nt, Human
cacccacccuuuuuu

SEQ ID NO: 3771942 - RNA, 22 nt, Human
cacccaccguccgcccugcucc

SEQ ID NO: 3771943 - RNA, 16 nt, Human
cacccaccguggagga

SEQ ID NO: 3771944 - RNA, 16 nt, Human
cacccaccucagccuc

SEQ ID NO: 3771945 - RNA, 18 nt, Human
cacccaccucccugccuc

SEQ ID NO: 3771946 - RNA, 15 nt, Human
cacccacuucugcac

SEQ ID NO: 3771947 - RNA, 11 nt, Human
cacccagaaac

SEQ ID NO: 3771948 - RNA, 21 nt, Human
cacccagacauaaaggaaaag

SEQ ID NO: 3771949 - RNA, 18 nt, Human
cacccagcaacuccaacu

SEQ ID NO: 3771950 - RNA, 16 nt, Human
cacccagcaauagaga

SEQ ID NO: 3771951 - RNA, 10 nt, Human
cacccagccc

SEQ ID NO: 3771952 - RNA, 11 nt, Human
cacccagccca

SEQ ID NO: 3771953 - RNA, 12 nt, Human
cacccagcccac

SEQ ID NO: 3771954 - RNA, 19 nt, Human
cacccagcccacuucugcc

SEQ ID NO: 3771955 - RNA, 16 nt, Human
cacccagcccagauug

SEQ ID NO: 3771956 - RNA, 19 nt, Human
cacccagccccagccaggg

SEQ ID NO: 3771957 - RNA, 12 nt, Human
cacccagcccug

SEQ ID NO: 3771958 - RNA, 22 nt, Human
cacccagcccuggucucagcag

SEQ ID NO: 3771959 - RNA, 13 nt, Human
cacccagccucag

SEQ ID NO: 3771960 - RNA, 15 nt, Human
cacccagccucaguc

SEQ ID NO: 3771961 - RNA, 14 nt, Human
cacccagcucagca

SEQ ID NO: 3771962 - RNA, 23 nt, Human
cacccaggagccccgaggccuuc

SEQ ID NO: 3771963 - RNA, 20 nt, Human
cacccaggcuggacugcaau

SEQ ID NO: 3771964 - RNA, 14 nt, Human
cacccaggggcagc

SEQ ID NO: 3771965 - RNA, 19 nt, Human
cacccaguccugcccgcca

SEQ ID NO: 3771966 - RNA, 18 nt, Human
cacccagucucugcucca

SEQ ID NO: 3771967 - RNA, 23 nt, Human
cacccagugagcacucccaaguc

SEQ ID NO: 3771968 - RNA, 23 nt, Human
cacccagugcccucuccccucag

SEQ ID NO: 3771969 - RNA, 22 nt, Human
cacccaguuuccuugggaguug

SEQ ID NO: 3771970 - RNA, 17 nt, Human
cacccauaauccuuucu

SEQ ID NO: 3771971 - RNA, 11 nt, Human
cacccaucugu

SEQ ID NO: 3771972 - RNA, 18 nt, Human
cacccaucugucugccaa

SEQ ID NO: 3771973 - RNA, 15 nt, Human
cacccaugaaucaaa

SEQ ID NO: 3771974 - RNA, 13 nt, Human
cacccaugguacc

SEQ ID NO: 3771975 - RNA, 18 nt, Human
caccccaaagcuuuccug

SEQ ID NO: 3771976 - RNA, 21 nt, Human
caccccaaccugcucuccucu

SEQ ID NO: 3771977 - RNA, 22 nt, Human
caccccaaccugcucuccucuu

SEQ ID NO: 3771978 - RNA, 12 nt, Human
caccccaagaga

SEQ ID NO: 3771979 - RNA, 19 nt, Human
caccccaauccucccagaa

SEQ ID NO: 3771980 - RNA, 12 nt, Human
caccccacacuu

SEQ ID NO: 3771981 - RNA, 21 nt, Human
caccccacccacuucugcacu

SEQ ID NO: 3771982 - RNA, 13 nt, Human
caccccacccccu

SEQ ID NO: 3771983 - RNA, 20 nt, Human
caccccacccucccuggagu

SEQ ID NO: 3771984 - RNA, 14 nt, Human
caccccacccuucc

SEQ ID NO: 3771985 - RNA, 16 nt, Human
caccccaccucuuccu

SEQ ID NO: 3771986 - RNA, 15 nt, Human
caccccaccugcgcu

SEQ ID NO: 3771987 - RNA, 18 nt, Human
caccccacgccuuauccc

SEQ ID NO: 3771988 - RNA, 14 nt, Human
caccccacucacag

SEQ ID NO: 3771989 - RNA, 15 nt, Human
caccccacucccaca

SEQ ID NO: 3771990 - RNA, 19 nt, Human
caccccacuuaucccucuc

SEQ ID NO: 3771991 - RNA, 19 nt, Human
caccccagagccacacaug

SEQ ID NO: 3771992 - RNA, 11 nt, Human
caccccagccu

SEQ ID NO: 3771993 - RNA, 17 nt, Human
caccccaggacgccacu

SEQ ID NO: 3771994 - RNA, 18 nt, Human
caccccaggacgccacuc

SEQ ID NO: 3771995 - RNA, 13 nt, Human
caccccaggacuc

SEQ ID NO: 3771996 - RNA, 22 nt, Human
caccccagggcagccagggaga

SEQ ID NO: 3771997 - RNA, 15 nt, Human
caccccagggccuga

SEQ ID NO: 3771998 - RNA, 16 nt, Human
caccccagggccugag

SEQ ID NO: 3771999 - RNA, 20 nt, Human
caccccagugcacccacucu

SEQ ID NO: 3772000 - RNA, 15 nt, Human
caccccaugcuggcc

SEQ ID NO: 3772001 - RNA, 15 nt, Human
caccccauggccggc

SEQ ID NO: 3772002 - RNA, 17 nt, Human
caccccauuuucugugg

SEQ ID NO: 3772003 - RNA, 19 nt, Human
cacccccaaggggcagucu

SEQ ID NO: 3772004 - RNA, 12 nt, Human
cacccccaaggu

SEQ ID NO: 3772005 - RNA, 11 nt, Human
cacccccaccc

SEQ ID NO: 3772006 - RNA, 22 nt, Human
cacccccacccaagggccuggc

SEQ ID NO: 3772007 - RNA, 17 nt, Human
cacccccacccccagcu

SEQ ID NO: 3772008 - RNA, 21 nt, Human
cacccccagccccgacuccag

SEQ ID NO: 3772009 - RNA, 14 nt, Human
cacccccagccugg

SEQ ID NO: 3772010 - RNA, 17 nt, Human
cacccccagcugcuugu

SEQ ID NO: 3772011 - RNA, 13 nt, Human
caccccccacacu

SEQ ID NO: 3772012 - RNA, 23 nt, Human
caccccccacacucacuccugag

SEQ ID NO: 3772013 - RNA, 16 nt, Human
caccccccacucugug

SEQ ID NO: 3772014 - RNA, 16 nt, Human
cacccccgcuggagga

SEQ ID NO: 3772015 - RNA, 18 nt, Human
cacccccggcagcagccc

SEQ ID NO: 3772016 - RNA, 21 nt, Human
cacccccggcagcagccccca

SEQ ID NO: 3772017 - RNA, 20 nt, Human
cacccccucaagccaauccc

SEQ ID NO: 3772018 - RNA, 16 nt, Human
cacccccucccacccc

SEQ ID NO: 3772019 - RNA, 14 nt, Human
cacccccuccccag

SEQ ID NO: 3772020 - RNA, 13 nt, Human
cacccccucccug

SEQ ID NO: 3772021 - RNA, 14 nt, Human
cacccccucccugg

SEQ ID NO: 3772022 - RNA, 23 nt, Human
cacccccucccuggccuguucug

SEQ ID NO: 3772023 - RNA, 13 nt, Human
cacccccugcccu

SEQ ID NO: 3772024 - RNA, 14 nt, Human
cacccccuuccccc

SEQ ID NO: 3772025 - RNA, 16 nt, Human
cacccccuucucugcu

SEQ ID NO: 3772026 - RNA, 15 nt, Human
caccccgaggcccug

SEQ ID NO: 3772027 - RNA, 17 nt, Human
caccccgaggcccugca

SEQ ID NO: 3772028 - RNA, 18 nt, Human
caccccgaggcccugcau

SEQ ID NO: 3772029 - RNA, 19 nt, Human
caccccgaggcccugcaug

SEQ ID NO: 3772030 - RNA, 13 nt, Human
caccccgcucugc

SEQ ID NO: 3772031 - RNA, 14 nt, Human
caccccgcucugca

SEQ ID NO: 3772032 - RNA, 22 nt, Human
caccccgcuguaagcuccuuug

SEQ ID NO: 3772033 - RNA, 13 nt, Human
caccccggcaggc

SEQ ID NO: 3772034 - RNA, 14 nt, Human
caccccggcaggcc

SEQ ID NO: 3772035 - RNA, 15 nt, Human
caccccggcaggccc

SEQ ID NO: 3772036 - RNA, 16 nt, Human
caccccggcaggcccu

SEQ ID NO: 3772037 - RNA, 18 nt, Human
caccccggcaggcccugc

SEQ ID NO: 3772038 - RNA, 18 nt, Human
caccccggcccccugccc

SEQ ID NO: 3772039 - RNA, 18 nt, Human
caccccgggcucucugcu

SEQ ID NO: 3772040 - RNA, 18 nt, Human
caccccggggacccugug

SEQ ID NO: 3772041 - RNA, 17 nt, Human
caccccuaaacuccagg

SEQ ID NO: 3772042 - RNA, 12 nt, Human
caccccucacuc

SEQ ID NO: 3772043 - RNA, 13 nt, Human
caccccucccauu

SEQ ID NO: 3772044 - RNA, 17 nt, Human
caccccucccauuagga

SEQ ID NO: 3772045 - RNA, 13 nt, Human
caccccuccccau

SEQ ID NO: 3772046 - RNA, 22 nt, Human
caccccuccccugcccuagagc

SEQ ID NO: 3772047 - RNA, 12 nt, Human
caccccucucug

SEQ ID NO: 3772048 - RNA, 13 nt, Human
caccccugccccc

SEQ ID NO: 3772049 - RNA, 19 nt, Human
caccccugcccccagcccc

SEQ ID NO: 3772050 - RNA, 24 nt, Human
caccccugcccugggauguccaca

SEQ ID NO: 3772051 - RNA, 15 nt, Human
caccccugccuccac

SEQ ID NO: 3772052 - RNA, 22 nt, Human
caccccugccucccgcccccuu

SEQ ID NO: 3772053 - RNA, 12 nt, Human
caccccuggggg

SEQ ID NO: 3772054 - RNA, 17 nt, Human
caccccugguucucauc

SEQ ID NO: 3772055 - RNA, 21 nt, Human
caccccuguccucacugcucc

SEQ ID NO: 3772056 - RNA, 21 nt, Human
caccccugugcuccgugccuc

SEQ ID NO: 3772057 - RNA, 12 nt, Human
caccccuuagau

SEQ ID NO: 3772058 - RNA, 16 nt, Human
caccccuuauccagga

SEQ ID NO: 3772059 - RNA, 19 nt, Human
caccccuuauccaggacuc

SEQ ID NO: 3772060 - RNA, 20 nt, Human
caccccuuauccaggacucu

SEQ ID NO: 3772061 - RNA, 14 nt, Human
caccccuuccaugu

SEQ ID NO: 3772062 - RNA, 14 nt, Human
caccccuuccccac

SEQ ID NO: 3772063 - RNA, 12 nt, Human
caccccuuccug

SEQ ID NO: 3772064 - RNA, 19 nt, Human
caccccuuccugggcacac

SEQ ID NO: 3772065 - RNA, 14 nt, Human
caccccuuccuguc

SEQ ID NO: 3772066 - RNA, 14 nt, Human
cacccgacuccuca

SEQ ID NO: 3772067 - RNA, 16 nt, Human
cacccgacuccucaaa

SEQ ID NO: 3772068 - RNA, 16 nt, Human
cacccgaggcugccca

SEQ ID NO: 3772069 - RNA, 15 nt, Human
cacccgaugcugcuu

SEQ ID NO: 3772070 - RNA, 13 nt, Human
cacccgccucucc

SEQ ID NO: 3772071 - RNA, 14 nt, Human
cacccgccucuccc

SEQ ID NO: 3772072 - RNA, 19 nt, Human
cacccgcuaagagggaggg

SEQ ID NO: 3772073 - RNA, 12 nt, Human
cacccggccccu

SEQ ID NO: 3772074 - RNA, 18 nt, Human
cacccggccccugcuggu

SEQ ID NO: 3772075 - RNA, 21 nt, Human
cacccggccccugcugguuca

SEQ ID NO: 3772076 - RNA, 20 nt, Human
cacccguucugcuggccugg

SEQ ID NO: 3772077 - RNA, 16 nt, Human
cacccuagcccucucc

SEQ ID NO: 3772078 - RNA, 19 nt, Human
cacccucacucugccaggg

SEQ ID NO: 3772079 - RNA, 20 nt, Human
cacccucagcaccccuucca

SEQ ID NO: 3772080 - RNA, 16 nt, Human
cacccucaugcugugu

SEQ ID NO: 3772081 - RNA, 12 nt, Human
cacccuccaccc

SEQ ID NO: 3772082 - RNA, 14 nt, Human
cacccuccacccug

SEQ ID NO: 3772083 - RNA, 18 nt, Human
cacccuccacccuguccc

SEQ ID NO: 3772084 - RNA, 17 nt, Human
cacccuccaccucuuca

SEQ ID NO: 3772085 - RNA, 15 nt, Human
cacccucccagcucu

SEQ ID NO: 3772086 - RNA, 12 nt, Human
cacccuccccuc

SEQ ID NO: 3772087 - RNA, 16 nt, Human
cacccuccccucucuu

SEQ ID NO: 3772088 - RNA, 22 nt, Human
cacccucccuccgauccuuccu

SEQ ID NO: 3772089 - RNA, 16 nt, Human
cacccucccuggagug

SEQ ID NO: 3772090 - RNA, 14 nt, Human
cacccuccugucuu

SEQ ID NO: 3772091 - RNA, 12 nt, Human
cacccuccuucc

SEQ ID NO: 3772092 - RNA, 20 nt, Human
cacccuccuucccacucuuc

SEQ ID NO: 3772093 - RNA, 19 nt, Human
cacccucgaagcgcgccac

SEQ ID NO: 3772094 - RNA, 17 nt, Human
cacccucguggacaccu

SEQ ID NO: 3772095 - RNA, 18 nt, Human
cacccucguggacaccug

SEQ ID NO: 3772096 - RNA, 21 nt, Human
cacccucguggacaccugccc

SEQ ID NO: 3772097 - RNA, 23 nt, Human
cacccucguggacaccugcccug

SEQ ID NO: 3772098 - RNA, 16 nt, Human
cacccucucccaggac

SEQ ID NO: 3772099 - RNA, 12 nt, Human
cacccucuggcc

SEQ ID NO: 3772100 - RNA, 13 nt, Human
cacccucuggccg

SEQ ID NO: 3772101 - RNA, 15 nt, Human
cacccucuuccuacu

SEQ ID NO: 3772102 - RNA, 21 nt, Human
cacccugaacaacgagccuuu

SEQ ID NO: 3772103 - RNA, 23 nt, Human
cacccugaaugguuccaugccug

SEQ ID NO: 3772104 - RNA, 17 nt, Human
cacccugagccccuucc

SEQ ID NO: 3772105 - RNA, 18 nt, Human
cacccugagccccuuccu

SEQ ID NO: 3772106 - RNA, 12 nt, Human
cacccugagccg

SEQ ID NO: 3772107 - RNA, 15 nt, Human
cacccugaggagucu

SEQ ID NO: 3772108 - RNA, 16 nt, Human
cacccugaggagucug

SEQ ID NO: 3772109 - RNA, 20 nt, Human
cacccugaggucagggagug

SEQ ID NO: 3772110 - RNA, 22 nt, Human
cacccugauuuaggagaagcca

SEQ ID NO: 3772111 - RNA, 17 nt, Human
cacccugauuucuugcu

SEQ ID NO: 3772112 - RNA, 17 nt, Human
cacccugcaaggcccac

SEQ ID NO: 3772113 - RNA, 12 nt, Human
cacccugcuaca

SEQ ID NO: 3772114 - RNA, 11 nt, Human
cacccuggaau

SEQ ID NO: 3772115 - RNA, 11 nt, Human
cacccuggccu

SEQ ID NO: 3772116 - RNA, 16 nt, Human
cacccugggagacaga

SEQ ID NO: 3772117 - RNA, 14 nt, Human
cacccugggcccug

SEQ ID NO: 3772118 - RNA, 17 nt, Human
cacccugggcccugggc

SEQ ID NO: 3772119 - RNA, 22 nt, Human
cacccugggcccugggcuggaa

SEQ ID NO: 3772120 - RNA, 21 nt, Human
cacccugggcucugggagcag

SEQ ID NO: 3772121 - RNA, 19 nt, Human
cacccugggcucugugggc

SEQ ID NO: 3772122 - RNA, 21 nt, Human
cacccugggcucugugggcug

SEQ ID NO: 3772123 - RNA, 17 nt, Human
cacccuggggagaaagu

SEQ ID NO: 3772124 - RNA, 13 nt, Human
cacccuggggccu

SEQ ID NO: 3772125 - RNA, 15 nt, Human
cacccuggggccugg

SEQ ID NO: 3772126 - RNA, 19 nt, Human
cacccuggggccuggaccu

SEQ ID NO: 3772127 - RNA, 21 nt, Human
cacccuggggccuggaccugc

SEQ ID NO: 3772128 - RNA, 22 nt, Human
cacccuggggccuggaccugcc

SEQ ID NO: 3772129 - RNA, 23 nt, Human
cacccugucccccagcucuggug

SEQ ID NO: 3772130 - RNA, 21 nt, Human
cacccugugauggggcccugc

SEQ ID NO: 3772131 - RNA, 17 nt, Human
cacccuguggcccuggc

SEQ ID NO: 3772132 - RNA, 15 nt, Human
cacccuguuccugcu

SEQ ID NO: 3772133 - RNA, 18 nt, Human
cacccuguuccugcugcu

SEQ ID NO: 3772134 - RNA, 21 nt, Human
cacccuguuuggauuuuuaau

SEQ ID NO: 3772135 - RNA, 18 nt, Human
cacccuuaacccaaggag

SEQ ID NO: 3772136 - RNA, 23 nt, Human
cacccuuaacccaaggagcacag

SEQ ID NO: 3772137 - RNA, 16 nt, Human
cacccuuaccaugugc

SEQ ID NO: 3772138 - RNA, 13 nt, Human
cacccuucuccca

SEQ ID NO: 3772139 - RNA, 15 nt, Human
cacccuucucccacu

SEQ ID NO: 3772140 - RNA, 16 nt, Human
cacccuucucccacuc

SEQ ID NO: 3772141 - RNA, 17 nt, Human
cacccuucucccacucu

SEQ ID NO: 3772142 - RNA, 21 nt, Human
cacccuucuuuccucuucccc

SEQ ID NO: 3772143 - RNA, 20 nt, Human
cacccuucuuuucucaugug

SEQ ID NO: 3772144 - RNA, 21 nt, Human
cacccuucuuuucucaugugu

SEQ ID NO: 3772145 - RNA, 19 nt, Human
cacccuuggacaagacaaa

SEQ ID NO: 3772146 - RNA, 17 nt, Human
cacccuuggaggcuguc

SEQ ID NO: 3772147 - RNA, 15 nt, Human
cacccuuggccuguc

SEQ ID NO: 3772148 - RNA, 18 nt, Human
cacccuugguuccuaacu

SEQ ID NO: 3772149 - RNA, 22 nt, Human
cacccuuucuacuuccaagacu

SEQ ID NO: 3772150 - RNA, 19 nt, Human
caccgaaaacguggcugcu

SEQ ID NO: 3772151 - RNA, 21 nt, Human
caccgaaguggacuggccccu

SEQ ID NO: 3772152 - RNA, 20 nt, Human
caccgacuagacacacaaag

SEQ ID NO: 3772153 - RNA, 15 nt, Human
caccgacuagccagg

SEQ ID NO: 3772154 - RNA, 15 nt, Human
caccgacugaaaaua

SEQ ID NO: 3772155 - RNA, 18 nt, Human
caccgagaguagccgaga

SEQ ID NO: 3772156 - RNA, 17 nt, Human
caccgcagacaggacca

SEQ ID NO: 3772157 - RNA, 19 nt, Human
caccgcagucgucgcacag

SEQ ID NO: 3772158 - RNA, 14 nt, Human
caccgcaugccccc

SEQ ID NO: 3772159 - RNA, 15 nt, Human
caccgcaugcccccu

SEQ ID NO: 3772160 - RNA, 16 nt, Human
caccgcaugcccccuc

SEQ ID NO: 3772161 - RNA, 18 nt, Human
caccgccacauggcuucc

SEQ ID NO: 3772162 - RNA, 13 nt, Human
caccgccauggcu

SEQ ID NO: 3772163 - RNA, 16 nt, Human
caccgccauggcuucc

SEQ ID NO: 3772164 - RNA, 22 nt, Human
caccgccauggcuuccaaggug

SEQ ID NO: 3772165 - RNA, 15 nt, Human
caccgcccgucugug

SEQ ID NO: 3772166 - RNA, 23 nt, Human
caccgcccucccuccccagcucc

SEQ ID NO: 3772167 - RNA, 14 nt, Human
caccgccuccuaca

SEQ ID NO: 3772168 - RNA, 16 nt, Human
caccgccucuucccgc

SEQ ID NO: 3772169 - RNA, 16 nt, Human
caccgcuccccagccc

SEQ ID NO: 3772170 - RNA, 21 nt, Human
caccgcuccccagcccagggu

SEQ ID NO: 3772171 - RNA, 23 nt, Human
caccgcuuccggcuccugugcuu

SEQ ID NO: 3772172 - RNA, 19 nt, Human
caccggaccagccuggccc

SEQ ID NO: 3772173 - RNA, 15 nt, Human
caccggauccugggu

SEQ ID NO: 3772174 - RNA, 22 nt, Human
caccggccccauuuacccaacu

SEQ ID NO: 3772175 - RNA, 18 nt, Human
caccggcuggccuggccc

SEQ ID NO: 3772176 - RNA, 14 nt, Human
caccgggcacucag

SEQ ID NO: 3772177 - RNA, 13 nt, Human
caccgggcagggc

SEQ ID NO: 3772178 - RNA, 15 nt, Human
caccgggccacagag

SEQ ID NO: 3772179 - RNA, 12 nt, Human
caccgggccacu

SEQ ID NO: 3772180 - RNA, 19 nt, Human
caccgggccacuccuuccu

SEQ ID NO: 3772181 - RNA, 21 nt, Human
caccgggccacuccuuccugc

SEQ ID NO: 3772182 - RNA, 22 nt, Human
caccggggccugggcaggaggg

SEQ ID NO: 3772183 - RNA, 15 nt, Human
caccgguugcuucug

SEQ ID NO: 3772184 - RNA, 17 nt, Human
caccgguugcuucuggg

SEQ ID NO: 3772185 - RNA, 20 nt, Human
caccguaaagugagcaugcu

SEQ ID NO: 3772186 - RNA, 13 nt, Human
caccguccccucc

SEQ ID NO: 3772187 - RNA, 19 nt, Human
caccguccgcccugcuccu

SEQ ID NO: 3772188 - RNA, 19 nt, Human
caccguggaccuuccugcc

SEQ ID NO: 3772189 - RNA, 20 nt, Human
caccguggaccuuccugcca

SEQ ID NO: 3772190 - RNA, 15 nt, Human
caccguguaaaccaa

SEQ ID NO: 3772191 - RNA, 23 nt, Human
caccgugucaagcugcucugagc

SEQ ID NO: 3772192 - RNA, 22 nt, Human
caccugcccccuucucccacac

SEQ ID NO: 3772193 - RNA, 18 nt, Human
caccugccccucaacucu

SEQ ID NO: 3772194 - RNA, 21 nt, Human
caccugccccucaacucuccu

SEQ ID NO: 3772195 - RNA, 14 nt, Human
caccugcccuaccu

SEQ ID NO: 3772196 - RNA, 17 nt, Human
caccugcccugcccugc

SEQ ID NO: 3772197 - RNA, 18 nt, Human
caccugcccugcccugcc

SEQ ID NO: 3772198 - RNA, 20 nt, Human
caccugcccugcccugccac

SEQ ID NO: 3772199 - RNA, 23 nt, Human
caccugcccugcccugccaccug

SEQ ID NO: 3772200 - RNA, 14 nt, Human
caccugccucagga

SEQ ID NO: 3772201 - RNA, 23 nt, Human
caccugccucggccucccaaagu

SEQ ID NO: 3772202 - RNA, 20 nt, Human
caccugccugcgucuuccgc

SEQ ID NO: 3772203 - RNA, 18 nt, Human
caccugccuggccggcca

SEQ ID NO: 3772204 - RNA, 17 nt, Human
caccugccuguugggcc

SEQ ID NO: 3772205 - RNA, 23 nt, Human
caccugcggugcuaucuccccca

SEQ ID NO: 3772206 - RNA, 13 nt, Human
caccugcucugcu

SEQ ID NO: 3772207 - RNA, 14 nt, Human
caccugcucugcug

SEQ ID NO: 3772208 - RNA, 14 nt, Human
caccugcucuucua

SEQ ID NO: 3772209 - RNA, 13 nt, Human
caccugcuggccc

SEQ ID NO: 3772210 - RNA, 16 nt, Human
caccugcuggccccuc

SEQ ID NO: 3772211 - RNA, 18 nt, Human
caccugcuggccccucac

SEQ ID NO: 3772212 - RNA, 23 nt, Human
caccugcugucuggguggcucac

SEQ ID NO: 3772213 - RNA, 21 nt, Human
caccuggaagcauuuguuucu

SEQ ID NO: 3772214 - RNA, 22 nt, Human
caccuggaagcccucucuggcu

SEQ ID NO: 3772215 - RNA, 20 nt, Human
caccuggaauauauaaccag

SEQ ID NO: 3772216 - RNA, 16 nt, Human
caccuggaccccugca

SEQ ID NO: 3772217 - RNA, 17 nt, Human
caccuggaccccugcau

SEQ ID NO: 3772218 - RNA, 18 nt, Human
caccuggaccccugcauu

SEQ ID NO: 3772219 - RNA, 19 nt, Human
caccuggaccccugcauug

SEQ ID NO: 3772220 - RNA, 17 nt, Human
caccuggcacugcugug

SEQ ID NO: 3772221 - RNA, 18 nt, Human
caccuggcacugcugugc

SEQ ID NO: 3772222 - RNA, 13 nt, Human
caccuggccaccu

SEQ ID NO: 3772223 - RNA, 17 nt, Human
caccuggcccucucuga

SEQ ID NO: 3772224 - RNA, 16 nt, Human
caccuggcccuggggc

SEQ ID NO: 3772225 - RNA, 20 nt, Human
caccuggccucugcacuccc

SEQ ID NO: 3772226 - RNA, 23 nt, Human
caccuggccucugcacuccccug

SEQ ID NO: 3772227 - RNA, 18 nt, Human
caccuggcucucaccucu

SEQ ID NO: 3772228 - RNA, 19 nt, Human
caccuggcucucaccucua

SEQ ID NO: 3772229 - RNA, 12 nt, Human
caccuggcucug

SEQ ID NO: 3772230 - RNA, 19 nt, Human
caccuggcugagguuccuc

SEQ ID NO: 3772231 - RNA, 17 nt, Human
caccugggagaaaucug

SEQ ID NO: 3772232 - RNA, 15 nt, Human
caccugggcaccugg

SEQ ID NO: 3772233 - RNA, 20 nt, Human
caccugggcccuggggccug

SEQ ID NO: 3772234 - RNA, 15 nt, Human
caccuggggaguggg

SEQ ID NO: 3772235 - RNA, 17 nt, Human
caccuggggagugggac

SEQ ID NO: 3772236 - RNA, 14 nt, Human
caccuggggcaguc

SEQ ID NO: 3772237 - RNA, 15 nt, Human
caccuggggcugcug

SEQ ID NO: 3772238 - RNA, 16 nt, Human
caccugggggccuggc

SEQ ID NO: 3772239 - RNA, 10 nt, Human
caccuggggu

SEQ ID NO: 3772240 - RNA, 16 nt, Human
caccugguggccaugc

SEQ ID NO: 3772241 - RNA, 21 nt, Human
caccugguggccaugcuccuc

SEQ ID NO: 3772242 - RNA, 17 nt, Human
caccugguggccucugc

SEQ ID NO: 3772243 - RNA, 16 nt, Human
caccugguuccggaau

SEQ ID NO: 3772244 - RNA, 13 nt, Human
caccuguaaaacu

SEQ ID NO: 3772245 - RNA, 15 nt, Human
caccuguaaaacuuu

SEQ ID NO: 3772246 - RNA, 23 nt, Human
caccuguaaaacuuuauuuuaua

SEQ ID NO: 3772247 - RNA, 16 nt, Human
caccuguaaucccagc

SEQ ID NO: 3772248 - RNA, 20 nt, Human
caccuguaaucccagcacac

SEQ ID NO: 3772249 - RNA, 21 nt, Human
caccuguaaucccagcuacuu

SEQ ID NO: 3772250 - RNA, 12 nt, Human
caccuguacagu

SEQ ID NO: 3772251 - RNA, 14 nt, Human
caccuguacuggag

SEQ ID NO: 3772252 - RNA, 15 nt, Human
caccuguacuggaga

SEQ ID NO: 3772253 - RNA, 18 nt, Human
caccuguagcacuuacug

SEQ ID NO: 3772254 - RNA, 22 nt, Human
caccuguagcacuuacugguag

SEQ ID NO: 3772255 - RNA, 15 nt, Human
caccuguagcagcca

SEQ ID NO: 3772256 - RNA, 15 nt, Human
caccuguagucccag

SEQ ID NO: 3772257 - RNA, 19 nt, Human
caccuguagucccagcuac

SEQ ID NO: 3772258 - RNA, 21 nt, Human
caccuguccccacccuccacu

SEQ ID NO: 3772259 - RNA, 17 nt, Human
caccugucgcccagugc

SEQ ID NO: 3772260 - RNA, 15 nt, Human
caccugucucagccu

SEQ ID NO: 3772261 - RNA, 14 nt, Human
caccugucugcucc

SEQ ID NO: 3772262 - RNA, 13 nt, Human
caccugucugucu

SEQ ID NO: 3772263 - RNA, 14 nt, Human
caccugucugucug

SEQ ID NO: 3772264 - RNA, 17 nt, Human
caccugucuugccuuuu

SEQ ID NO: 3772265 - RNA, 19 nt, Human
caccugugcuucgggcccu

SEQ ID NO: 3772266 - RNA, 22 nt, Human
caccuguggaacauaaaaagga

SEQ ID NO: 3772267 - RNA, 16 nt, Human
caccuguugcuuacaa

SEQ ID NO: 3772268 - RNA, 13 nt, Human
caccuuaaauuaa

SEQ ID NO: 3772269 - RNA, 23 nt, Human
caccuuaauaugcugcaacaaaa

SEQ ID NO: 3772270 - RNA, 18 nt, Human
caccuuaccaacuuucug

SEQ ID NO: 3772271 - RNA, 19 nt, Human
caccuuaccaacuuucugu

SEQ ID NO: 3772272 - RNA, 23 nt, Human
caccuuagacagucccugccaau

SEQ ID NO: 3772273 - RNA, 18 nt, Human
caccuuaggcagggaagu

SEQ ID NO: 3772274 - RNA, 19 nt, Human
caccuuaucuuaaagcacu

SEQ ID NO: 3772275 - RNA, 10 nt, Human
caccuucacc

SEQ ID NO: 3772276 - RNA, 15 nt, Human
caccuuccagcuccu

SEQ ID NO: 3772277 - RNA, 16 nt, Human
caccuuccagcuccug

SEQ ID NO: 3772278 - RNA, 18 nt, Human
caccuuccauuuuccccc

SEQ ID NO: 3772279 - RNA, 12 nt, Human
caccuucccuug

SEQ ID NO: 3772280 - RNA, 17 nt, Human
caccuucccuugccacu

SEQ ID NO: 3772281 - RNA, 19 nt, Human
caccuucccuugccacuuu

SEQ ID NO: 3772282 - RNA, 13 nt, Human
caccuuccucacu

SEQ ID NO: 3772283 - RNA, 23 nt, Human
caccuucguuuacuaugccugug

SEQ ID NO: 3772284 - RNA, 20 nt, Human
caccuucuuauuauauauau

SEQ ID NO: 3772285 - RNA, 17 nt, Human
caccuugaaucugccug

SEQ ID NO: 3772286 - RNA, 15 nt, Human
caccuugacagggca

SEQ ID NO: 3772287 - RNA, 18 nt, Human
caccuugacagggcacac

SEQ ID NO: 3772288 - RNA, 19 nt, Human
caccuugacagggcacacc

SEQ ID NO: 3772289 - RNA, 17 nt, Human
caccuugcaacacacag

SEQ ID NO: 3772290 - RNA, 13 nt, Human
caccuugcagcuc

SEQ ID NO: 3772291 - RNA, 16 nt, Human
caccuuggacauccuc

SEQ ID NO: 3772292 - RNA, 16 nt, Human
caccuuggcugcaggg

SEQ ID NO: 3772293 - RNA, 16 nt, Human
caccuugugccugggg

SEQ ID NO: 3772294 - RNA, 17 nt, Human
caccuugugccuggggu

SEQ ID NO: 3772295 - RNA, 17 nt, Human
caccuugugucuguaca

SEQ ID NO: 3772296 - RNA, 22 nt, Human
caccuuguguguuccaaguuuc

SEQ ID NO: 3772297 - RNA, 14 nt, Human
caccuuguuggagc

SEQ ID NO: 3772298 - RNA, 21 nt, Human
caccuuguuggagccugcagg

SEQ ID NO: 3772299 - RNA, 20 nt, Human
caccuuuaaguagauaagca

SEQ ID NO: 3772300 - RNA, 23 nt, Human
caccuuuauucuggcagaggagg

SEQ ID NO: 3772301 - RNA, 18 nt, Human
caccuuugcacaggaugc

SEQ ID NO: 3772302 - RNA, 15 nt, Human
caccuuuguccccac

SEQ ID NO: 3772303 - RNA, 23 nt, Human
caccuuugugggguuuuuggaga

SEQ ID NO: 3772304 - RNA, 17 nt, Human
caccuuuguuucucccc

SEQ ID NO: 3772305 - RNA, 23 nt, Human
caccuuuuaaauccuguugaaaa

SEQ ID NO: 3772306 - RNA, 17 nt, Human
caccuuuucuugccuga

SEQ ID NO: 3772307 - RNA, 17 nt, Human
caccuuuuuuaaggaaa

SEQ ID NO: 3772308 - RNA, 16 nt, Human
cacgaaacugcccugg

SEQ ID NO: 3772309 - RNA, 20 nt, Human
cacgaaacuuguuauuguga

SEQ ID NO: 3772310 - RNA, 15 nt, Human
cacgaaauguuauuu

SEQ ID NO: 3772311 - RNA, 14 nt, Human
cacgaacccaccug

SEQ ID NO: 3772312 - RNA, 16 nt, Human
cacgaauagacaucaa

SEQ ID NO: 3772313 - RNA, 23 nt, Human
cacgaauuucugugcccuccuga

SEQ ID NO: 3772314 - RNA, 23 nt, Human
cacgaccuaggcaguaggccggu

SEQ ID NO: 3772315 - RNA, 19 nt, Human
cacgacgcccucuccccac

SEQ ID NO: 3772316 - RNA, 16 nt, Human
cacgacugcccggcag

SEQ ID NO: 3772317 - RNA, 23 nt, Human
cacgagcaaagugaagacacugg

SEQ ID NO: 3772318 - RNA, 19 nt, Human
cacgagcaggcuacuguca

SEQ ID NO: 3772319 - RNA, 20 nt, Human
cacgagcuguuuacuaggga

SEQ ID NO: 3772320 - RNA, 12 nt, Human
cacgagggcugg

SEQ ID NO: 3772321 - RNA, 17 nt, Human
cacgaguaagauuaaga

SEQ ID NO: 3772322 - RNA, 18 nt, Human
cacgagucagucgccuuu

SEQ ID NO: 3772323 - RNA, 14 nt, Human
cacgauccugccac

SEQ ID NO: 3772324 - RNA, 17 nt, Human
cacgauguggcccuggc

SEQ ID NO: 3772325 - RNA, 15 nt, Human
cacgcacacacacaa

SEQ ID NO: 3772326 - RNA, 14 nt, Human
cacgcaccucccau

SEQ ID NO: 3772327 - RNA, 15 nt, Human
cacgcaccucccauc

SEQ ID NO: 3772328 - RNA, 12 nt, Human
cacgcaccugcc

SEQ ID NO: 3772329 - RNA, 15 nt, Human
cacgcaccugccuca

SEQ ID NO: 3772330 - RNA, 12 nt, Human
cacgcacgcaca

SEQ ID NO: 3772331 - RNA, 14 nt, Human
cacgcacgcacaca

SEQ ID NO: 3772332 - RNA, 13 nt, Human
cacgcacggcagc

SEQ ID NO: 3772333 - RNA, 17 nt, Human
cacgcacuucgggaggu

SEQ ID NO: 3772334 - RNA, 15 nt, Human
cacgcagccaggaca

SEQ ID NO: 3772335 - RNA, 15 nt, Human
cacgcccauguguga

SEQ ID NO: 3772336 - RNA, 23 nt, Human
cacgcccaugugugagugugugc

SEQ ID NO: 3772337 - RNA, 21 nt, Human
cacuacauucuguuaaucauu

SEQ ID NO: 3772338 - RNA, 17 nt, Human
cacuaccaaaggacacu

SEQ ID NO: 3772339 - RNA, 16 nt, Human
cacuaccccuugauuu

SEQ ID NO: 3772340 - RNA, 17 nt, Human
cacuaccuccucaggga

SEQ ID NO: 3772341 - RNA, 17 nt, Human
cacuacucacagucucu

SEQ ID NO: 3772342 - RNA, 15 nt, Human
cacuacuccucugca

SEQ ID NO: 3772343 - RNA, 14 nt, Human
cacuacucugugcc

SEQ ID NO: 3772344 - RNA, 12 nt, Human
cacuacugcagc

SEQ ID NO: 3772345 - RNA, 21 nt, Human
cacuacugcuaccacaacuau

SEQ ID NO: 3772346 - RNA, 13 nt, Human
cacuacugggugu

SEQ ID NO: 3772347 - RNA, 20 nt, Human
cacuagaaaagcugaucaua

SEQ ID NO: 3772348 - RNA, 15 nt, Human
cacuagaacucucca

SEQ ID NO: 3772349 - RNA, 19 nt, Human
cacuagacaagccagaacu

SEQ ID NO: 3772350 - RNA, 16 nt, Human
cacuagagaaugcaca

SEQ ID NO: 3772351 - RNA, 23 nt, Human
cacuagagaaugcacagauauac

SEQ ID NO: 3772352 - RNA, 14 nt, Human
cacuagccaaaccu

SEQ ID NO: 3772353 - RNA, 16 nt, Human
cacuagccaaaccuca

SEQ ID NO: 3772354 - RNA, 19 nt, Human
cacuagccaaaccucacca

SEQ ID NO: 3772355 - RNA, 19 nt, Human
cacuagcccaaugaaauga

SEQ ID NO: 3772356 - RNA, 14 nt, Human
cacuagccucucca

SEQ ID NO: 3772357 - RNA, 16 nt, Human
cacuagccucuccagg

SEQ ID NO: 3772358 - RNA, 17 nt, Human
cacuagccucuccagga

SEQ ID NO: 3772359 - RNA, 20 nt, Human
cacuagccuuuggcucugga

SEQ ID NO: 3772360 - RNA, 21 nt, Human
cacuagccuuuggcucuggag

SEQ ID NO: 3772361 - RNA, 12 nt, Human
cacuagcucuug

SEQ ID NO: 3772362 - RNA, 16 nt, Human
cacuaggacucugagg

SEQ ID NO: 3772363 - RNA, 17 nt, Human
cacuaggacucugaggc

SEQ ID NO: 3772364 - RNA, 16 nt, Human
cacuaggcacccagcu

SEQ ID NO: 3772365 - RNA, 20 nt, Human
cacuaggcccccacuugccu

SEQ ID NO: 3772366 - RNA, 21 nt, Human
cacuaggcugggugcccacag

SEQ ID NO: 3772367 - RNA, 23 nt, Human
cacuaggcugggugcccacagcc

SEQ ID NO: 3772368 - RNA, 20 nt, Human
cacuagggcagggacaggau

SEQ ID NO: 3772369 - RNA, 18 nt, Human
cacuagggccuuggaaau

SEQ ID NO: 3772370 - RNA, 17 nt, Human
cacuagguucaauuccc

SEQ ID NO: 3772371 - RNA, 17 nt, Human
cacuaguaaguaauuau

SEQ ID NO: 3772372 - RNA, 14 nt, Human
cacuaguauuucua

SEQ ID NO: 3772373 - RNA, 18 nt, Human
cacuauaauguaagcucu

SEQ ID NO: 3772374 - RNA, 16 nt, Human
cacuauaaugugaaau

SEQ ID NO: 3772375 - RNA, 15 nt, Human
cacuauacaaacaaa

SEQ ID NO: 3772376 - RNA, 23 nt, Human
cacuauauaggcaucacauuuuu

SEQ ID NO: 3772377 - RNA, 13 nt, Human
cacuauccaugca

SEQ ID NO: 3772378 - RNA, 19 nt, Human
cacuaucccggcugcccuu

SEQ ID NO: 3772379 - RNA, 14 nt, Human
cacuaucuuucagc

SEQ ID NO: 3772380 - RNA, 21 nt, Human
cacuaugaagauguuucaaaa

SEQ ID NO: 3772381 - RNA, 15 nt, Human
cacuaugcuuuccuu

SEQ ID NO: 3772382 - RNA, 18 nt, Human
cacuauguugcccaggca

SEQ ID NO: 3772383 - RNA, 20 nt, Human
cacuauguugcccaggcagg

SEQ ID NO: 3772384 - RNA, 21 nt, Human
cacuauguugcccaggcaggu

SEQ ID NO: 3772385 - RNA, 22 nt, Human
cacuauuggcugggaguggugg

SEQ ID NO: 3772386 - RNA, 19 nt, Human
cacuauuuaucugugcaaa

SEQ ID NO: 3772387 - RNA, 13 nt, Human
cacuauuuccuuu

SEQ ID NO: 3772388 - RNA, 17 nt, Human
cacuauuuccuuuauaa

SEQ ID NO: 3772389 - RNA, 16 nt, Human
cacuauuuucagaauc

SEQ ID NO: 3772390 - RNA, 18 nt, Human
cacuauuuucagaaucug

SEQ ID NO: 3772391 - RNA, 17 nt, Human
cacuauuuuuauuuaua

SEQ ID NO: 3772392 - RNA, 17 nt, Human
cacucaaaagcugggca

SEQ ID NO: 3772393 - RNA, 20 nt, Human
cacucaaaagcugggcaggu

SEQ ID NO: 3772394 - RNA, 22 nt, Human
cacucaaaggccagaccugcag

SEQ ID NO: 3772395 - RNA, 23 nt, Human
cacucaaaggccagaccugcaga

SEQ ID NO: 3772396 - RNA, 16 nt, Human
cacucaaaucuuaaga

SEQ ID NO: 3772397 - RNA, 14 nt, Human
cacucaacaugagu

SEQ ID NO: 3772398 - RNA, 15 nt, Human
cacucaagaagcagg

SEQ ID NO: 3772399 - RNA, 13 nt, Human
cacucaagcacug

SEQ ID NO: 3772400 - RNA, 16 nt, Human
cacucaagcacugaua

SEQ ID NO: 3772401 - RNA, 16 nt, Human
cacucaaguucaagga

SEQ ID NO: 3772402 - RNA, 18 nt, Human
cacucaaguucaaggacc

SEQ ID NO: 3772403 - RNA, 15 nt, Human
cacucacacagccag

SEQ ID NO: 3772404 - RNA, 18 nt, Human
cacucacacagccaggug

SEQ ID NO: 3772405 - RNA, 12 nt, Human
cacucacacagg

SEQ ID NO: 3772406 - RNA, 22 nt, Human
cacucacacaggacccccuucc

SEQ ID NO: 3772407 - RNA, 17 nt, Human
cacucacagagacacag

SEQ ID NO: 3772408 - RNA, 18 nt, Human
cacucacagagacacagg

SEQ ID NO: 3772409 - RNA, 20 nt, Human
cacucacagagucaaggccu

SEQ ID NO: 3772410 - RNA, 14 nt, Human
cacucacaugacac

SEQ ID NO: 3772411 - RNA, 12 nt, Human
cacucacaugcu

SEQ ID NO: 3772412 - RNA, 23 nt, Human
cacucacaugcuggacaggucug

SEQ ID NO: 3772413 - RNA, 14 nt, Human
cacucaccgaagcc

SEQ ID NO: 3772414 - RNA, 12 nt, Human
cacucaccugca

SEQ ID NO: 3772415 - RNA, 12 nt, Human
cacucacuccug

SEQ ID NO: 3772416 - RNA, 15 nt, Human
cacucacuggcaucu

SEQ ID NO: 3772417 - RNA, 12 nt, Human
cacucagaagac

SEQ ID NO: 3772418 - RNA, 16 nt, Human
cacucagaagacacug

SEQ ID NO: 3772419 - RNA, 18 nt, Human
cacucagaagacacugau

SEQ ID NO: 3772420 - RNA, 14 nt, Human
cacucagaagccug

SEQ ID NO: 3772421 - RNA, 16 nt, Human
cacucagaagccuggg

SEQ ID NO: 3772422 - RNA, 19 nt, Human
cacucagaagccugggggc

SEQ ID NO: 3772423 - RNA, 20 nt, Human
cacucagagacaugcagaga

SEQ ID NO: 3772424 - RNA, 18 nt, Human
cacucagauccuccucau

SEQ ID NO: 3772425 - RNA, 12 nt, Human
cacucagcacaa

SEQ ID NO: 3772426 - RNA, 15 nt, Human
cacucagcacaaggc

SEQ ID NO: 3772427 - RNA, 15 nt, Human
cacucagcaccacuc

SEQ ID NO: 3772428 - RNA, 17 nt, Human
cacucagccacccugag

SEQ ID NO: 3772429 - RNA, 11 nt, Human
cacucagcccc

SEQ ID NO: 3772430 - RNA, 15 nt, Human
cacucagccccuagg

SEQ ID NO: 3772431 - RNA, 18 nt, Human
cacucagcuguccugcag

SEQ ID NO: 3772432 - RNA, 20 nt, Human
cacucagcuguccugcagca

SEQ ID NO: 3772433 - RNA, 22 nt, Human
cacucagcuguccugcagcaaa

SEQ ID NO: 3772434 - RNA, 20 nt, Human
cacucaggcuggaguacagu

SEQ ID NO: 3772435 - RNA, 19 nt, Human
cacucagugcagcaauaua

SEQ ID NO: 3772436 - RNA, 16 nt, Human
cacucaguuuaugcug

SEQ ID NO: 3772437 - RNA, 16 nt, Human
cacucauccccucacu

SEQ ID NO: 3772438 - RNA, 18 nt, Human
cacucaugcauuguccuc

SEQ ID NO: 3772439 - RNA, 17 nt, Human
cacucaugcugaaagcc

SEQ ID NO: 3772440 - RNA, 16 nt, Human
cacucaugugacucuu

SEQ ID NO: 3772441 - RNA, 13 nt, Human
cacucauuccugu

SEQ ID NO: 3772442 - RNA, 15 nt, Human
cacucauugaccuga

SEQ ID NO: 3772443 - RNA, 18 nt, Human
cacucauugaccugaggc

SEQ ID NO: 3772444 - RNA, 12 nt, Human
cacucauuucau

SEQ ID NO: 3772445 - RNA, 22 nt, Human
cacucauuucaucucauuuaag

SEQ ID NO: 3772446 - RNA, 16 nt, Human
cacuccaaccuaaccu

SEQ ID NO: 3772447 - RNA, 16 nt, Human
cacuccaaucugggug

SEQ ID NO: 3772448 - RNA, 22 nt, Human
cacuccacauaagggguuuagu

SEQ ID NO: 3772449 - RNA, 10 nt, Human
cacuccacca

SEQ ID NO: 3772450 - RNA, 23 nt, Human
cacuccagccugagcgacaguga

SEQ ID NO: 3772451 - RNA, 13 nt, Human
cacuccagccugg

SEQ ID NO: 3772452 - RNA, 15 nt, Human
cacuccagccugggg

SEQ ID NO: 3772453 - RNA, 16 nt, Human
cacuccagccugggug

SEQ ID NO: 3772454 - RNA, 12 nt, Human
cacuccagcugg

SEQ ID NO: 3772455 - RNA, 20 nt, Human
cacuccagggacacacagcc

SEQ ID NO: 3772456 - RNA, 21 nt, Human
cacuccagugagacagcucug

SEQ ID NO: 3772457 - RNA, 16 nt, Human
cacuccagugccagca

SEQ ID NO: 3772458 - RNA, 18 nt, Human
cacuccauggagucugga

SEQ ID NO: 3772459 - RNA, 12 nt, Human
cacuccauuccc

SEQ ID NO: 3772460 - RNA, 20 nt, Human
cacucccaagguuggagccc

SEQ ID NO: 3772461 - RNA, 13 nt, Human
cacucccaggcag

SEQ ID NO: 3772462 - RNA, 15 nt, Human
cacucccaggcagcc

SEQ ID NO: 3772463 - RNA, 13 nt, Human
cacuccccaagga

SEQ ID NO: 3772464 - RNA, 14 nt, Human
cacuccccaaggaa

SEQ ID NO: 3772465 - RNA, 20 nt, Human
cacuccccaaggaagagcca

SEQ ID NO: 3772466 - RNA, 14 nt, Human
cacuccccagccag

SEQ ID NO: 3772467 - RNA, 16 nt, Human
cacuccccaugccacg

SEQ ID NO: 3772468 - RNA, 19 nt, Human
cacuccccaugccacguuc

SEQ ID NO: 3772469 - RNA, 21 nt, Human
cacucccccuaaaccccuguc

SEQ ID NO: 3772470 - RNA, 22 nt, Human
cacucccccuaaaccccugucc

SEQ ID NO: 3772471 - RNA, 14 nt, Human
cacuccccugcacu

SEQ ID NO: 3772472 - RNA, 15 nt, Human
cacuccccugcuggg

SEQ ID NO: 3772473 - RNA, 14 nt, Human
cacucccuccagca

SEQ ID NO: 3772474 - RNA, 17 nt, Human
cacucccuccagcacaa

SEQ ID NO: 3772475 - RNA, 19 nt, Human
cacucccuccagcacaaac

SEQ ID NO: 3772476 - RNA, 13 nt, Human
cacucccugcaac

SEQ ID NO: 3772477 - RNA, 14 nt, Human
cacucccuugcugg

SEQ ID NO: 3772478 - RNA, 17 nt, Human
cacucccuugcuggccc

SEQ ID NO: 3772479 - RNA, 18 nt, Human
cacucccuugcuggcccc

SEQ ID NO: 3772480 - RNA, 20 nt, Human
cacucccuugggcucccugu

SEQ ID NO: 3772481 - RNA, 12 nt, Human
cacuccuagaga

SEQ ID NO: 3772482 - RNA, 14 nt, Human
cacuccucccuccg

SEQ ID NO: 3772483 - RNA, 12 nt, Human
cagaugaauaaa

SEQ ID NO: 3772484 - RNA, 20 nt, Human
cagaugacaaaaauucaacu

SEQ ID NO: 3772485 - RNA, 16 nt, Human
cagaugacaagauggu

SEQ ID NO: 3772486 - RNA, 16 nt, Human
cagaugaccccugccc

SEQ ID NO: 3772487 - RNA, 17 nt, Human
cagaugagaaacucuug

SEQ ID NO: 3772488 - RNA, 16 nt, Human
cagaugagaacaaagc

SEQ ID NO: 3772489 - RNA, 17 nt, Human
cagaugagaacaaagcu

SEQ ID NO: 3772490 - RNA, 12 nt, Human
cagaugagcugu

SEQ ID NO: 3772491 - RNA, 22 nt, Human
cagaugaugagaauuucuaaaa

SEQ ID NO: 3772492 - RNA, 18 nt, Human
cagaugcaaagaggcaag

SEQ ID NO: 3772493 - RNA, 14 nt, Human
cagaugcaaugacu

SEQ ID NO: 3772494 - RNA, 16 nt, Human
cagaugcaccagcccu

SEQ ID NO: 3772495 - RNA, 18 nt, Human
cagaugcagagagccauu

SEQ ID NO: 3772496 - RNA, 17 nt, Human
cagaugcagcucuuccu

SEQ ID NO: 3772497 - RNA, 23 nt, Human
cagaugcagcucuuccuggacag

SEQ ID NO: 3772498 - RNA, 20 nt, Human
cagaugccacccuagccaau

SEQ ID NO: 3772499 - RNA, 14 nt, Human
cagaugccagagca

SEQ ID NO: 3772500 - RNA, 13 nt, Human
cagaugccccaga

SEQ ID NO: 3772501 - RNA, 16 nt, Human
cagaugccccagagcu

SEQ ID NO: 3772502 - RNA, 15 nt, Human
cagaugccccuuucu

SEQ ID NO: 3772503 - RNA, 18 nt, Human
cagaugcccgagggaggg

SEQ ID NO: 3772504 - RNA, 18 nt, Human
cagaugcuccaagauucu

SEQ ID NO: 3772505 - RNA, 15 nt, Human
cagaugcugauguuc

SEQ ID NO: 3772506 - RNA, 22 nt, Human
cagaugcugauguucaguguaa

SEQ ID NO: 3772507 - RNA, 23 nt, Human
cagaugcuugcggcaaaaggaaa

SEQ ID NO: 3772508 - RNA, 14 nt, Human
cagauggaaaggag

SEQ ID NO: 3772509 - RNA, 18 nt, Human
cagauggaaauauuuuga

SEQ ID NO: 3772510 - RNA, 18 nt, Human
cagauggaaccgcaggaa

SEQ ID NO: 3772511 - RNA, 22 nt, Human
cagauggaaccgcaggaagcug

SEQ ID NO: 3772512 - RNA, 16 nt, Human
cagauggaaugcugug

SEQ ID NO: 3772513 - RNA, 17 nt, Human
cagauggaaugcugugu

SEQ ID NO: 3772514 - RNA, 21 nt, Human
cagauggaaugcuguguuaaa

SEQ ID NO: 3772515 - RNA, 19 nt, Human
cagauggacuccagccugc

SEQ ID NO: 3772516 - RNA, 22 nt, Human
cagauggauugauaauugcauu

SEQ ID NO: 3772517 - RNA, 23 nt, Human
cagauggauugauaauugcauuc

SEQ ID NO: 3772518 - RNA, 15 nt, Human
cagauggauuugccu

SEQ ID NO: 3772519 - RNA, 13 nt, Human
cagauggcagcuu

SEQ ID NO: 3772520 - RNA, 15 nt, Human
cagauggcagcuuuu

SEQ ID NO: 3772521 - RNA, 22 nt, Human
cagauggcccggaugcugcuuc

SEQ ID NO: 3772522 - RNA, 21 nt, Human
cagauggggcucccgcccgug

SEQ ID NO: 3772523 - RNA, 14 nt, Human
cagaugggggaaag

SEQ ID NO: 3772524 - RNA, 23 nt, Human
cagaugggugcuuggaggaagga

SEQ ID NO: 3772525 - RNA, 15 nt, Human
cagauggucauccag

SEQ ID NO: 3772526 - RNA, 16 nt, Human
cagauggugaagcauu

SEQ ID NO: 3772527 - RNA, 22 nt, Human
cagaugguuuccacauuuagau

SEQ ID NO: 3772528 - RNA, 15 nt, Human
cagauguaauguuuu

SEQ ID NO: 3772529 - RNA, 16 nt, Human
cagauguaauguuuuc

SEQ ID NO: 3772530 - RNA, 23 nt, Human
cagauguaauguuuucuuugcaa

SEQ ID NO: 3772531 - RNA, 24 nt, Human
cagauguaggagggacugucgcug

SEQ ID NO: 3772532 - RNA, 23 nt, Human
cagaugucccuugaugcacagag

SEQ ID NO: 3772533 - RNA, 13 nt, Human
cagaugucuucug

SEQ ID NO: 3772534 - RNA, 17 nt, Human
cagaugucuucugccug

SEQ ID NO: 3772535 - RNA, 17 nt, Human
cagaugugaaccauuaa

SEQ ID NO: 3772536 - RNA, 15 nt, Human
cagaugugcagcaga

SEQ ID NO: 3772537 - RNA, 17 nt, Human
cagaugugcagcagauu

SEQ ID NO: 3772538 - RNA, 19 nt, Human
cagaugugcagcagauugg

SEQ ID NO: 3772539 - RNA, 14 nt, Human
cagauguggagcca

SEQ ID NO: 3772540 - RNA, 15 nt, Human
cagauguggagccag

SEQ ID NO: 3772541 - RNA, 16 nt, Human
cagauguggagccagg

SEQ ID NO: 3772542 - RNA, 19 nt, Human
cagauguggcuacugacau

SEQ ID NO: 3772543 - RNA, 22 nt, Human
cagaugugggccaccauugcaa

SEQ ID NO: 3772544 - RNA, 17 nt, Human
cagauguuaaaauaaau

SEQ ID NO: 3772545 - RNA, 22 nt, Human
cagauguucgguuuuuuuccug

SEQ ID NO: 3772546 - RNA, 19 nt, Human
cagauguucucucccaggg

SEQ ID NO: 3772547 - RNA, 23 nt, Human
cagauguugaaugcccacaggca

SEQ ID NO: 3772548 - RNA, 15 nt, Human
cagauguuuaaaaca

SEQ ID NO: 3772549 - RNA, 16 nt, Human
cagauguuuaaaacac

SEQ ID NO: 3772550 - RNA, 14 nt, Human
cagauguuuccaga

SEQ ID NO: 3772551 - RNA, 16 nt, Human
cagauguuuccagacu

SEQ ID NO: 3772552 - RNA, 14 nt, Human
cagauguuucuuuu

SEQ ID NO: 3772553 - RNA, 17 nt, Human
cagauguuuuacgucug

SEQ ID NO: 3772554 - RNA, 13 nt, Human
cagauuauuuugg

SEQ ID NO: 3772555 - RNA, 19 nt, Human
cagauucacacugucuggu

SEQ ID NO: 3772556 - RNA, 21 nt, Human
cagauucagaaaugaggccau

SEQ ID NO: 3772557 - RNA, 14 nt, Human
cagauucagucuug

SEQ ID NO: 3772558 - RNA, 15 nt, Human
cagauucagucuugc

SEQ ID NO: 3772559 - RNA, 18 nt, Human
cagauucagucuugccuu

SEQ ID NO: 3772560 - RNA, 15 nt, Human
cagauucauuuuucu

SEQ ID NO: 3772561 - RNA, 17 nt, Human
cagauucccagagcaaa

SEQ ID NO: 3772562 - RNA, 14 nt, Human
cagauuccuuccca

SEQ ID NO: 3772563 - RNA, 21 nt, Human
cagauucguggucuuuuccuc

SEQ ID NO: 3772564 - RNA, 18 nt, Human
cagauucuauccucaucu

SEQ ID NO: 3772565 - RNA, 17 nt, Human
cagauucuuuccugagg

SEQ ID NO: 3772566 - RNA, 22 nt, Human
cagauugaguuuucuucuguga

SEQ ID NO: 3772567 - RNA, 13 nt, Human
cagauugcaugug

SEQ ID NO: 3772568 - RNA, 23 nt, Human
cagauugcaugugacucugaagc

SEQ ID NO: 3772569 - RNA, 15 nt, Human
cagauugcugcuucu

SEQ ID NO: 3772570 - RNA, 17 nt, Human
cagauugcuuuugugca

SEQ ID NO: 3772571 - RNA, 12 nt, Human
cagauuggaagg

SEQ ID NO: 3772572 - RNA, 21 nt, Human
cagauuggaaggagacacaga

SEQ ID NO: 3772573 - RNA, 18 nt, Human
cagauuggagaaacccuu

SEQ ID NO: 3772574 - RNA, 14 nt, Human
cagauugucagcuc

SEQ ID NO: 3772575 - RNA, 20 nt, Human
cagauugucuuaauuucuau

SEQ ID NO: 3772576 - RNA, 16 nt, Human
cagauugugccacugc

SEQ ID NO: 3772577 - RNA, 21 nt, Human
cagauuguggaauguuggaua

SEQ ID NO: 3772578 - RNA, 14 nt, Human
cagauuguuaucua

SEQ ID NO: 3772579 - RNA, 13 nt, Human
cagauuguuuccu

SEQ ID NO: 3772580 - RNA, 16 nt, Human
cagauuguuucuauac

SEQ ID NO: 3772581 - RNA, 19 nt, Human
cagauuguuucuauacaaa

SEQ ID NO: 3772582 - RNA, 20 nt, Human
cagauuguuucuauacaaau

SEQ ID NO: 3772583 - RNA, 22 nt, Human
cagauuuagugaaagcuagaga

SEQ ID NO: 3772584 - RNA, 16 nt, Human
cagauuucacucuccu

SEQ ID NO: 3772585 - RNA, 13 nt, Human
cagauuuggaaag

SEQ ID NO: 3772586 - RNA, 18 nt, Human
cagauuuggcuugacaaa

SEQ ID NO: 3772587 - RNA, 15 nt, Human
cagauuugggcugga

SEQ ID NO: 3772588 - RNA, 23 nt, Human
cagauuugugaacucagccaagc

SEQ ID NO: 3772589 - RNA, 16 nt, Human
cagauuuuacaaaaga

SEQ ID NO: 3772590 - RNA, 15 nt, Human
cagauuuuacagagc

SEQ ID NO: 3772591 - RNA, 19 nt, Human
cagauuuuacagagcgcac

SEQ ID NO: 3772592 - RNA, 13 nt, Human
cagauuuuauuau

SEQ ID NO: 3772593 - RNA, 21 nt, Human
cagauuuuauuauguaaaucc

SEQ ID NO: 3772594 - RNA, 16 nt, Human
cagauuuugauagcaa

SEQ ID NO: 3772595 - RNA, 16 nt, Human
cagauuuugcuguaua

SEQ ID NO: 3772596 - RNA, 17 nt, Human
cagauuuugcuguauau

SEQ ID NO: 3772597 - RNA, 18 nt, Human
cagauuuuucggaggccc

SEQ ID NO: 3772598 - RNA, 19 nt, Human
cagauuuuuuacagcugcc

SEQ ID NO: 3772599 - RNA, 22 nt, Human
cagauuuuuuacagcugccugc

SEQ ID NO: 3772600 - RNA, 15 nt, Human
cagcaaaaauauaaa

SEQ ID NO: 3772601 - RNA, 17 nt, Human
cagcaaaaauauuuuau

SEQ ID NO: 3772602 - RNA, 12 nt, Human
cagcaaaaccau

SEQ ID NO: 3772603 - RNA, 15 nt, Human
cagcaaaacuccauc

SEQ ID NO: 3772604 - RNA, 11 nt, Human
cagcaaaccau

SEQ ID NO: 3772605 - RNA, 12 nt, Human
cagcaaaccauu

SEQ ID NO: 3772606 - RNA, 21 nt, Human
cagcaaaccauuuuuaaagua

SEQ ID NO: 3772607 - RNA, 14 nt, Human
cagcaaaccggggc

SEQ ID NO: 3772608 - RNA, 19 nt, Human
cagcaaagagugggcugca

SEQ ID NO: 3772609 - RNA, 14 nt, Human
cagcaaagccccau

SEQ ID NO: 3772610 - RNA, 21 nt, Human
cagcaaagccccaugcuggag

SEQ ID NO: 3772611 - RNA, 23 nt, Human
cagcaaagccccaugcuggagcc

SEQ ID NO: 3772612 - RNA, 15 nt, Human
cagcaaagcccccag

SEQ ID NO: 3772613 - RNA, 18 nt, Human
cagcaaagcccccagagc

SEQ ID NO: 3772614 - RNA, 22 nt, Human
cagcaaagcccccagagcccag

SEQ ID NO: 3772615 - RNA, 15 nt, Human
cagcaacacaaagcu

SEQ ID NO: 3772616 - RNA, 14 nt, Human
cagcaacacaaugu

SEQ ID NO: 3772617 - RNA, 16 nt, Human
cagcaaccagagcacu

SEQ ID NO: 3772618 - RNA, 17 nt, Human
cagcaaccagagcacug

SEQ ID NO: 3772619 - RNA, 18 nt, Human
cagcaaccagagcacugu

SEQ ID NO: 3772620 - RNA, 21 nt, Human
cagcaaccagagcacuguaua

SEQ ID NO: 3772621 - RNA, 18 nt, Human
cagcaaccuguaagacug

SEQ ID NO: 3772622 - RNA, 21 nt, Human
cagcaacgaucacaaaugacu

SEQ ID NO: 3772623 - RNA, 23 nt, Human
cagcaacuaucagacuaagccag

SEQ ID NO: 3772624 - RNA, 13 nt, Human
cagcaacugaaua

SEQ ID NO: 3772625 - RNA, 22 nt, Human
cagcaacuucuucuccaucccu

SEQ ID NO: 3772626 - RNA, 15 nt, Human
cagcaacuugucuuu

SEQ ID NO: 3772627 - RNA, 21 nt, Human
cagccccaucccaaacccuuc

SEQ ID NO: 3772628 - RNA, 14 nt, Human
cagccccauucugc

SEQ ID NO: 3772629 - RNA, 20 nt, Human
cagccccauucugccugccc

SEQ ID NO: 3772630 - RNA, 22 nt, Human
cagccccauucugccugcccag

SEQ ID NO: 3772631 - RNA, 13 nt, Human
cagcccccacagu

SEQ ID NO: 3772632 - RNA, 21 nt, Human
cagcccccacagugcugucug

SEQ ID NO: 3772633 - RNA, 17 nt, Human
cagcccccacauccugu

SEQ ID NO: 3772634 - RNA, 18 nt, Human
cagcccccagcucccacc

SEQ ID NO: 3772635 - RNA, 21 nt, Human
cagcccccagcucccaccucc

SEQ ID NO: 3772636 - RNA, 19 nt, Human
cagcccccuaagagagcac

SEQ ID NO: 3772637 - RNA, 21 nt, Human
cagcccccugaccacucagag

SEQ ID NO: 3772638 - RNA, 16 nt, Human
cagccccgacuccagc

SEQ ID NO: 3772639 - RNA, 17 nt, Human
cagccccgacuccagcc

SEQ ID NO: 3772640 - RNA, 18 nt, Human
cagccccgacuccagcca

SEQ ID NO: 3772641 - RNA, 21 nt, Human
cagccccgacuccagccagcg

SEQ ID NO: 3772642 - RNA, 17 nt, Human
cagccccgagcuguccc

SEQ ID NO: 3772643 - RNA, 17 nt, Human
cagccccggcccugggc

SEQ ID NO: 3772644 - RNA, 18 nt, Human
cagccccgguggcugggc

SEQ ID NO: 3772645 - RNA, 20 nt, Human
cagccccgguggcugggcag

SEQ ID NO: 3772646 - RNA, 13 nt, Human
cagccccuagaaa

SEQ ID NO: 3772647 - RNA, 16 nt, Human
cagccccuagaaaccc

SEQ ID NO: 3772648 - RNA, 16 nt, Human
cagccccuagcccagg

SEQ ID NO: 3772649 - RNA, 23 nt, Human
cagccccuagcccaggagagaga

SEQ ID NO: 3772650 - RNA, 24 nt, Human
cagccccuagcccaggagagagaa

SEQ ID NO: 3772651 - RNA, 11 nt, Human
cagccccuccc

SEQ ID NO: 3772652 - RNA, 14 nt, Human
cagccccucccacc

SEQ ID NO: 3772653 - RNA, 15 nt, Human
cagccccuccucugc

SEQ ID NO: 3772654 - RNA, 16 nt, Human
cagccccucuggucgc

SEQ ID NO: 3772655 - RNA, 18 nt, Human
cagccccucuggucgcuc

SEQ ID NO: 3772656 - RNA, 22 nt, Human
cagccccucuggucgcuccugc

SEQ ID NO: 3772657 - RNA, 21 nt, Human
cagccccucuugccccccacc

SEQ ID NO: 3772658 - RNA, 18 nt, Human
cagccccucuuggagaag

SEQ ID NO: 3772659 - RNA, 20 nt, Human
cagccccucuuggagaaguc

SEQ ID NO: 3772660 - RNA, 24 nt, Human
cagccccucuuggagaagucucag

SEQ ID NO: 3772661 - RNA, 19 nt, Human
cagccccugauccugugaa

SEQ ID NO: 3772662 - RNA, 20 nt, Human
cagccccugauccugugaag

SEQ ID NO: 3772663 - RNA, 21 nt, Human
cagccccugauccugugaagu

SEQ ID NO: 3772664 - RNA, 13 nt, Human
cagccccugcaca

SEQ ID NO: 3772665 - RNA, 19 nt, Human
cagccccugccccagccca

SEQ ID NO: 3772666 - RNA, 23 nt, Human
cagccccugccccucaugccaac

SEQ ID NO: 3772667 - RNA, 14 nt, Human
cagccccuggaugc

SEQ ID NO: 3772668 - RNA, 19 nt, Human
cagccccuucugacccaug

SEQ ID NO: 3772669 - RNA, 24 nt, Human
cagccccuucugacccaugcugcc

SEQ ID NO: 3772670 - RNA, 18 nt, Human
cagccccuugagaaaccu

SEQ ID NO: 3772671 - RNA, 15 nt, Human
cagccccuuuccaaa

SEQ ID NO: 3772672 - RNA, 15 nt, Human
cagccccuuucccuu

SEQ ID NO: 3772673 - RNA, 24 nt, Human
cagcccgauccuccccuggacucc

SEQ ID NO: 3772674 - RNA, 16 nt, Human
cagcccgcacaccugc

SEQ ID NO: 3772675 - RNA, 22 nt, Human
cagcccgcaucagcugcucaga

SEQ ID NO: 3772676 - RNA, 19 nt, Human
cagcccgcccacuggguaa

SEQ ID NO: 3772677 - RNA, 16 nt, Human
cagcccgcugagugga

SEQ ID NO: 3772678 - RNA, 17 nt, Human
cagcccggccgcuccac

SEQ ID NO: 3772679 - RNA, 12 nt, Human
cagcccggccug

SEQ ID NO: 3772680 - RNA, 23 nt, Human
cagcccggccugcucccagcagc

SEQ ID NO: 3772681 - RNA, 21 nt, Human
cagcccggcgccaccauccug

SEQ ID NO: 3772682 - RNA, 13 nt, Human
cagcccggcuggu

SEQ ID NO: 3772683 - RNA, 19 nt, Human
cagcccgggagccuaggac

SEQ ID NO: 3772684 - RNA, 20 nt, Human
cagcccgggagccuaggacc

SEQ ID NO: 3772685 - RNA, 14 nt, Human
cagcccgggcucug

SEQ ID NO: 3772686 - RNA, 19 nt, Human
cagcccgggcucugccucc

SEQ ID NO: 3772687 - RNA, 20 nt, Human
cagcccgggcucugccuccc

SEQ ID NO: 3772688 - RNA, 21 nt, Human
cagcccgggcucugccuccca

SEQ ID NO: 3772689 - RNA, 15 nt, Human
cagcccguguggccc

SEQ ID NO: 3772690 - RNA, 18 nt, Human
cagcccguguggccccuu

SEQ ID NO: 3772691 - RNA, 20 nt, Human
cagcccguguggccccuuca

SEQ ID NO: 3772692 - RNA, 14 nt, Human
cagcccuaaacauc

SEQ ID NO: 3772693 - RNA, 21 nt, Human
cagcccuaaaucuagacucaa

SEQ ID NO: 3772694 - RNA, 21 nt, Human
cagcccuaaggaucucucagg

SEQ ID NO: 3772695 - RNA, 16 nt, Human
cagcccuagagccugc

SEQ ID NO: 3772696 - RNA, 18 nt, Human
cagcccuagagccugccu

SEQ ID NO: 3772697 - RNA, 20 nt, Human
cagcccuagagccugccugg

SEQ ID NO: 3772698 - RNA, 20 nt, Human
cagcccuauggauguggggu

SEQ ID NO: 3772699 - RNA, 18 nt, Human
cagcccucaauugugaaa

SEQ ID NO: 3772700 - RNA, 13 nt, Human
cagcccucacccc

SEQ ID NO: 3772701 - RNA, 14 nt, Human
cagcccucaccccu

SEQ ID NO: 3772702 - RNA, 13 nt, Human
cagcccucagaau

SEQ ID NO: 3772703 - RNA, 13 nt, Human
cagcccucauccc

SEQ ID NO: 3772704 - RNA, 17 nt, Human
cagcccucccugccccu

SEQ ID NO: 3772705 - RNA, 18 nt, Human
cagcccucccuguccucc

SEQ ID NO: 3772706 - RNA, 12 nt, Human
cagcccuccuca

SEQ ID NO: 3772707 - RNA, 18 nt, Human
cagcccucucacuguguc

SEQ ID NO: 3772708 - RNA, 16 nt, Human
cagcccugacccugug

SEQ ID NO: 3772709 - RNA, 23 nt, Human
cagcccugaggacagaugccucc

SEQ ID NO: 3772710 - RNA, 12 nt, Human
cagcccugaggu

SEQ ID NO: 3772711 - RNA, 23 nt, Human
cagcccugcaccaugcugcuggg

SEQ ID NO: 3772712 - RNA, 16 nt, Human
cagcccugcagagggc

SEQ ID NO: 3772713 - RNA, 13 nt, Human
cagcccugccugg

SEQ ID NO: 3772714 - RNA, 16 nt, Human
cagcccugccuggagg

SEQ ID NO: 3772715 - RNA, 12 nt, Human
cagcccugcugg

SEQ ID NO: 3772716 - RNA, 11 nt, Human
cagcccugcuu

SEQ ID NO: 3772717 - RNA, 20 nt, Human
cagcccugcuuugggcugcc

SEQ ID NO: 3772718 - RNA, 23 nt, Human
cagcccugcuuugggcugcccug

SEQ ID NO: 3772719 - RNA, 12 nt, Human
cagcccuggagg

SEQ ID NO: 3772720 - RNA, 21 nt, Human
cagcccuggcagggggcaugc

SEQ ID NO: 3772721 - RNA, 12 nt, Human
cagcccuggccc

SEQ ID NO: 3772722 - RNA, 12 nt, Human
cagcccuggcuc

SEQ ID NO: 3772723 - RNA, 16 nt, Human
cagcccuggcugaagg

SEQ ID NO: 3772724 - RNA, 17 nt, Human
cagcccuggcugaagga

SEQ ID NO: 3772725 - RNA, 17 nt, Human
cagcccugggccccacc

SEQ ID NO: 3772726 - RNA, 18 nt, Human
cagcccugggccccacca

SEQ ID NO: 3772727 - RNA, 22 nt, Human
cagcccugggccccaccaccua

SEQ ID NO: 3772728 - RNA, 16 nt, Human
cagcccuggucucagc

SEQ ID NO: 3772729 - RNA, 19 nt, Human
cagcccuggucucagcagc

SEQ ID NO: 3772730 - RNA, 17 nt, Human
cagcccugucagcauga

SEQ ID NO: 3772731 - RNA, 21 nt, Human
cagcccugucagcaugaauuu

SEQ ID NO: 3772732 - RNA, 18 nt, Human
cagcccugucagugcagc

SEQ ID NO: 3772733 - RNA, 21 nt, Human
cagcccugucagugcagcccg

SEQ ID NO: 3772734 - RNA, 16 nt, Human
cagcccuuagcaggga

SEQ ID NO: 3772735 - RNA, 17 nt, Human
cagcccuuccucugcuc

SEQ ID NO: 3772736 - RNA, 15 nt, Human
cagcccuucuuucca

SEQ ID NO: 3772737 - RNA, 20 nt, Human
cagcccuugagggagaacuu

SEQ ID NO: 3772738 - RNA, 14 nt, Human
cagcccuugcuugu

SEQ ID NO: 3772739 - RNA, 12 nt, Human
cagcccuuggcc

SEQ ID NO: 3772740 - RNA, 13 nt, Human
cagcccuuggcca

SEQ ID NO: 3772741 - RNA, 16 nt, Human
cagcccuuuugucucu

SEQ ID NO: 3772742 - RNA, 23 nt, Human
cagcccuuuuguugagccaggcc

SEQ ID NO: 3772743 - RNA, 22 nt, Human
cagccgacccccucucccugca

SEQ ID NO: 3772744 - RNA, 19 nt, Human
cagccgagauagccaaggc

SEQ ID NO: 3772745 - RNA, 19 nt, Human
cagccgagcaggaggccua

SEQ ID NO: 3772746 - RNA, 12 nt, Human
cagccgagccgg

SEQ ID NO: 3772747 - RNA, 17 nt, Human
cagccgagccgggccug

SEQ ID NO: 3772748 - RNA, 14 nt, Human
cagccgagcucgug

SEQ ID NO: 3772749 - RNA, 23 nt, Human
cagccgagcucguguauccuggg

SEQ ID NO: 3772750 - RNA, 14 nt, Human
cagccgccacaucc

SEQ ID NO: 3772751 - RNA, 23 nt, Human
cagccgccacauccccgcuggcu

SEQ ID NO: 3772752 - RNA, 19 nt, Human
cagccgccauugccaccag

SEQ ID NO: 3772753 - RNA, 20 nt, Human
cagccgccccaucugcccca

SEQ ID NO: 3772754 - RNA, 19 nt, Human
cagccgccuuaagcugauc

SEQ ID NO: 3772755 - RNA, 16 nt, Human
cagccgcuccugucug

SEQ ID NO: 3772756 - RNA, 19 nt, Human
cagccgcuccugucugcca

SEQ ID NO: 3772757 - RNA, 22 nt, Human
cagccgcuccugucugccagcc

SEQ ID NO: 3772758 - RNA, 23 nt, Human
cagccgcuccugucugccagcca

SEQ ID NO: 3772759 - RNA, 19 nt, Human
cagccgcucggaggcccca

SEQ ID NO: 3772760 - RNA, 20 nt, Human
cagccgcucggaggccccaa

SEQ ID NO: 3772761 - RNA, 17 nt, Human
cagccgcucuccugcca

SEQ ID NO: 3772762 - RNA, 13 nt, Human
cagccgcugcccg

SEQ ID NO: 3772763 - RNA, 15 nt, Human
cagccgcugcccggc

SEQ ID NO: 3772764 - RNA, 22 nt, Human
cagccgcugcccggcgcccucu

SEQ ID NO: 3772765 - RNA, 21 nt, Human
cagccgcuuggcgaugccagc

SEQ ID NO: 3772766 - RNA, 13 nt, Human
cagccggcacagg

SEQ ID NO: 3772767 - RNA, 18 nt, Human
cagccggcacagggucug

SEQ ID NO: 3772768 - RNA, 14 nt, Human
cagccggccucucu

SEQ ID NO: 3772769 - RNA, 18 nt, Human
cagccggccucucuggcc

SEQ ID NO: 3772770 - RNA, 23 nt, Human
cagccggccucucuggccuccca

SEQ ID NO: 3772771 - RNA, 19 nt, Human
cagggucccugguggcagc

SEQ ID NO: 3772772 - RNA, 12 nt, Human
caggguccugcu

SEQ ID NO: 3772773 - RNA, 20 nt, Human
caggguccugcuauuuccca

SEQ ID NO: 3772774 - RNA, 14 nt, Human
caggguccugggag

SEQ ID NO: 3772775 - RNA, 18 nt, Human
caggguccuguagcccua

SEQ ID NO: 3772776 - RNA, 19 nt, Human
caggguccuuuugacacug

SEQ ID NO: 3772777 - RNA, 21 nt, Human
caggguccuuuugacacugcu

SEQ ID NO: 3772778 - RNA, 18 nt, Human
cagggucucucccucagg

SEQ ID NO: 3772779 - RNA, 13 nt, Human
cagggucucugcu

SEQ ID NO: 3772780 - RNA, 17 nt, Human
cagggucucugcugccg

SEQ ID NO: 3772781 - RNA, 14 nt, Human
cagggucugcucuu

SEQ ID NO: 3772782 - RNA, 22 nt, Human
cagggucugcucuuucucugcc

SEQ ID NO: 3772783 - RNA, 16 nt, Human
cagggucugggcagga

SEQ ID NO: 3772784 - RNA, 15 nt, Human
cagggugagagcugc

SEQ ID NO: 3772785 - RNA, 21 nt, Human
cagggugagagcugcucugga

SEQ ID NO: 3772786 - RNA, 15 nt, Human
cagggugcagcccaa

SEQ ID NO: 3772787 - RNA, 23 nt, Human
cagggugcagcccaaucugccag

SEQ ID NO: 3772788 - RNA, 22 nt, Human
cagggugcccagaacuucccug

SEQ ID NO: 3772789 - RNA, 18 nt, Human
caggguggagugcagugg

SEQ ID NO: 3772790 - RNA, 20 nt, Human
cagggugggauggaggagaa

SEQ ID NO: 3772791 - RNA, 13 nt, Human
cagggugggccuc

SEQ ID NO: 3772792 - RNA, 16 nt, Human
caggguggugcuggga

SEQ ID NO: 3772793 - RNA, 19 nt, Human
caggguggugcugggacug

SEQ ID NO: 3772794 - RNA, 23 nt, Human
cagggugucugcccccuccugag

SEQ ID NO: 3772795 - RNA, 24 nt, Human
cagggugucugcccccuccugagu

SEQ ID NO: 3772796 - RNA, 20 nt, Human
cagggugugagcgccacauc

SEQ ID NO: 3772797 - RNA, 20 nt, Human
caggguucccccagcccugu

SEQ ID NO: 3772798 - RNA, 20 nt, Human
caggguucuccucuccccuc

SEQ ID NO: 3772799 - RNA, 20 nt, Human
caggguugaccccagaggau

SEQ ID NO: 3772800 - RNA, 18 nt, Human
caggguugaucacacucu

SEQ ID NO: 3772801 - RNA, 13 nt, Human
caggguugggccc

SEQ ID NO: 3772802 - RNA, 21 nt, Human
caggguugggcccagaucugg

SEQ ID NO: 3772803 - RNA, 18 nt, Human
caggguuggugugcugag

SEQ ID NO: 3772804 - RNA, 19 nt, Human
caggguuuaucuuuugaga

SEQ ID NO: 3772805 - RNA, 16 nt, Human
caggguuuuaacuuug

SEQ ID NO: 3772806 - RNA, 17 nt, Human
caggguuuuaacuuugu

SEQ ID NO: 3772807 - RNA, 16 nt, Human
caggguuuuaucucug

SEQ ID NO: 3772808 - RNA, 16 nt, Human
caggguuuugccaugu

SEQ ID NO: 3772809 - RNA, 19 nt, Human
caggguuuuuaccugucac

SEQ ID NO: 3772810 - RNA, 15 nt, Human
cagguaaaacagggc

SEQ ID NO: 3772811 - RNA, 14 nt, Human
cagguaacaggcag

SEQ ID NO: 3772812 - RNA, 16 nt, Human
cagguaacaggcagau

SEQ ID NO: 3772813 - RNA, 20 nt, Human
cagguaacaggcagauacag

SEQ ID NO: 3772814 - RNA, 17 nt, Human
cagguaaugagggacug

SEQ ID NO: 3772815 - RNA, 20 nt, Human
cagguaaugagggacuggaa

SEQ ID NO: 3772816 - RNA, 18 nt, Human
cagguaccagcugcgcuu

SEQ ID NO: 3772817 - RNA, 21 nt, Human
cagguaccagcugcgcuugcu

SEQ ID NO: 3772818 - RNA, 20 nt, Human
cagguaccccagcucugcuu

SEQ ID NO: 3772819 - RNA, 22 nt, Human
cagguaccuugaccuuuguaca

SEQ ID NO: 3772820 - RNA, 15 nt, Human
cagguacgcacagac

SEQ ID NO: 3772821 - RNA, 12 nt, Human
cagguacuuugu

SEQ ID NO: 3772822 - RNA, 13 nt, Human
cagguacuuuguc

SEQ ID NO: 3772823 - RNA, 19 nt, Human
cagguagaccugucuccug

SEQ ID NO: 3772824 - RNA, 21 nt, Human
cagguagaccugucuccuggc

SEQ ID NO: 3772825 - RNA, 21 nt, Human
cagguagcauagcucuguaca

SEQ ID NO: 3772826 - RNA, 18 nt, Human
cagguagcugccccuggc

SEQ ID NO: 3772827 - RNA, 19 nt, Human
cagguagcugccccuggcu

SEQ ID NO: 3772828 - RNA, 14 nt, Human
cagguaggaggcaa

SEQ ID NO: 3772829 - RNA, 14 nt, Human
cagguaggccaagg

SEQ ID NO: 3772830 - RNA, 18 nt, Human
cagguaggggccccucuc

SEQ ID NO: 3772831 - RNA, 19 nt, Human
cagguaggggccccucuca

SEQ ID NO: 3772832 - RNA, 22 nt, Human
cagguaggggccccucucagcc

SEQ ID NO: 3772833 - RNA, 23 nt, Human
cagguaggggccccucucagccc

SEQ ID NO: 3772834 - RNA, 17 nt, Human
cagguauagacuccuga

SEQ ID NO: 3772835 - RNA, 18 nt, Human
cagguauauacuuugaaa

SEQ ID NO: 3772836 - RNA, 22 nt, Human
cagguauauacuuugaaaggag

SEQ ID NO: 3772837 - RNA, 14 nt, Human
cagguaucuccagg

SEQ ID NO: 3772838 - RNA, 20 nt, Human
cagguaugaccuucuaggaa

SEQ ID NO: 3772839 - RNA, 14 nt, Human
caggucaacagaau

SEQ ID NO: 3772840 - RNA, 16 nt, Human
caggucaacagaauga

SEQ ID NO: 3772841 - RNA, 18 nt, Human
caggucaacagaaugaaa

SEQ ID NO: 3772842 - RNA, 22 nt, Human
caggucaacagaaugaaaaaug

SEQ ID NO: 3772843 - RNA, 16 nt, Human
caggucagccacuguu

SEQ ID NO: 3772844 - RNA, 18 nt, Human
caggucaggggugacaca

SEQ ID NO: 3772845 - RNA, 19 nt, Human
caggucaucuccuuucauc

SEQ ID NO: 3772846 - RNA, 18 nt, Human
cagguccaaugagcuuuc

SEQ ID NO: 3772847 - RNA, 16 nt, Human
cagguccagcucugga

SEQ ID NO: 3772848 - RNA, 17 nt, Human
cagguccagcucuggag

SEQ ID NO: 3772849 - RNA, 16 nt, Human
cagguccaggcugugu

SEQ ID NO: 3772850 - RNA, 21 nt, Human
caggucccaaauggcccuggg

SEQ ID NO: 3772851 - RNA, 18 nt, Human
caggucccaccuccagcc

SEQ ID NO: 3772852 - RNA, 20 nt, Human
caggucccaccuccagcccg

SEQ ID NO: 3772853 - RNA, 11 nt, Human
caggucccuaa

SEQ ID NO: 3772854 - RNA, 14 nt, Human
caggucccuaauaa

SEQ ID NO: 3772855 - RNA, 21 nt, Human
caggucccuaauaaagcugug

SEQ ID NO: 3772856 - RNA, 22 nt, Human
caggucccuaauaaagcugugu

SEQ ID NO: 3772857 - RNA, 16 nt, Human
caggucccucucauuu

SEQ ID NO: 3772858 - RNA, 15 nt, Human
cagguccucagagaa

SEQ ID NO: 3772859 - RNA, 21 nt, Human
cagguccucugauacccagag

SEQ ID NO: 3772860 - RNA, 22 nt, Human
cagguccucugauacccagagc

SEQ ID NO: 3772861 - RNA, 12 nt, Human
cagguccugcuc

SEQ ID NO: 3772862 - RNA, 18 nt, Human
cagguccugguggggcag

SEQ ID NO: 3772863 - RNA, 19 nt, Human
cagguccugguggggcagc

SEQ ID NO: 3772864 - RNA, 15 nt, Human
caggucgggcucagc

SEQ ID NO: 3772865 - RNA, 21 nt, Human
caggucuaccccucccggccc

SEQ ID NO: 3772866 - RNA, 14 nt, Human
caggucucacgggc

SEQ ID NO: 3772867 - RNA, 12 nt, Human
caggucucccac

SEQ ID NO: 3772868 - RNA, 20 nt, Human
caggucucccacgugggaga

SEQ ID NO: 3772869 - RNA, 11 nt, Human
caggucuccuc

SEQ ID NO: 3772870 - RNA, 13 nt, Human
caggucuccucuu

SEQ ID NO: 3772871 - RNA, 15 nt, Human
caggucuccucuuaa

SEQ ID NO: 3772872 - RNA, 18 nt, Human
caggucuugaacuccugg

SEQ ID NO: 3772873 - RNA, 23 nt, Human
caggucuugaacuccuggccuca

SEQ ID NO: 3772874 - RNA, 20 nt, Human
caggucuuggagcugagccu

SEQ ID NO: 3772875 - RNA, 14 nt, Human
caggucuuuccuaa

SEQ ID NO: 3772876 - RNA, 17 nt, Human
caggugaaaauguucau

SEQ ID NO: 3772877 - RNA, 16 nt, Human
caggugaaacccaguc

SEQ ID NO: 3772878 - RNA, 20 nt, Human
caggugaagcaccaagcuca

SEQ ID NO: 3772879 - RNA, 19 nt, Human
caggugaaggaggcuccag

SEQ ID NO: 3772880 - RNA, 14 nt, Human
caggugacagugag

SEQ ID NO: 3772881 - RNA, 17 nt, Human
caggugaccuucuggga

SEQ ID NO: 3772882 - RNA, 13 nt, Human
caggugagaagca

SEQ ID NO: 3772883 - RNA, 18 nt, Human
caggugaggucagcacau

SEQ ID NO: 3772884 - RNA, 21 nt, Human
caggugaggucagcacaucuc

SEQ ID NO: 3772885 - RNA, 16 nt, Human
caggugaggucuguuc

SEQ ID NO: 3772886 - RNA, 20 nt, Human
caggugauccacccaccuca

SEQ ID NO: 3772887 - RNA, 20 nt, Human
caggugauguuaguguuuua

SEQ ID NO: 3772888 - RNA, 21 nt, Human
caggugauuggaccaggccau

SEQ ID NO: 3772889 - RNA, 15 nt, Human
caggugcacaagcuc

SEQ ID NO: 3772890 - RNA, 18 nt, Human
caggugcacaagcuccaa

SEQ ID NO: 3772891 - RNA, 20 nt, Human
caggugcacaagcuccaagc

SEQ ID NO: 3772892 - RNA, 13 nt, Human
caggugcagagga

SEQ ID NO: 3772893 - RNA, 14 nt, Human
caggugcagccaga

SEQ ID NO: 3772894 - RNA, 16 nt, Human
caggugcagccagagg

SEQ ID NO: 3772895 - RNA, 18 nt, Human
caggugcagcccccacug

SEQ ID NO: 3772896 - RNA, 20 nt, Human
caggugcagcccccacugcc

SEQ ID NO: 3772897 - RNA, 13 nt, Human
caggugcaguggc

SEQ ID NO: 3772898 - RNA, 23 nt, Human
caggugccagccugaggcagcca

SEQ ID NO: 3772899 - RNA, 22 nt, Human
caggugcccagcuauaccugug

SEQ ID NO: 3772900 - RNA, 11 nt, Human
caggugccucc

SEQ ID NO: 3772901 - RNA, 12 nt, Human
caggugccucca

SEQ ID NO: 3772902 - RNA, 18 nt, Human
caggugccuccaggugug

SEQ ID NO: 3772903 - RNA, 20 nt, Human
caggugcuaauuuguuuugg

SEQ ID NO: 3772904 - RNA, 21 nt, Human
caggugcuacacccuuuucca

SEQ ID NO: 3772905 - RNA, 18 nt, Human
caggugcuaggaacacuc

SEQ ID NO: 3772906 - RNA, 15 nt, Human
caggugcuauuguua

SEQ ID NO: 3772907 - RNA, 19 nt, Human
caggugcucaauaaaugau

SEQ ID NO: 3772908 - RNA, 13 nt, Human
caggugcugccau

SEQ ID NO: 3772909 - RNA, 16 nt, Human
caggugcugcuacccu

SEQ ID NO: 3772910 - RNA, 23 nt, Human
caggugcugcuacccucccugcu

SEQ ID NO: 3772911 - RNA, 13 nt, Human
caggugcugcugc

SEQ ID NO: 3772912 - RNA, 19 nt, Human
caggugcuggagcacuggg

SEQ ID NO: 3772913 - RNA, 13 nt, Human
caggugcuggggc

SEQ ID NO: 3772914 - RNA, 16 nt, Human
cagguggaaggcagac

SEQ ID NO: 3772915 - RNA, 20 nt, Human
cagugagaugagggaugggc

SEQ ID NO: 3772916 - RNA, 20 nt, Human
cagugagauuacagaggaag

SEQ ID NO: 3772917 - RNA, 24 nt, Human
cagugagccgagauugcaccacug

SEQ ID NO: 3772918 - RNA, 16 nt, Human
cagugagcgcuugggc

SEQ ID NO: 3772919 - RNA, 17 nt, Human
cagugagcggagaucgc

SEQ ID NO: 3772920 - RNA, 23 nt, Human
cagugagcuggagauacuugguc

SEQ ID NO: 3772921 - RNA, 22 nt, Human
cagugagcuuggaaaggaccag

SEQ ID NO: 3772922 - RNA, 14 nt, Human
cagugaggcucugc

SEQ ID NO: 3772923 - RNA, 16 nt, Human
cagugaggcucugccc

SEQ ID NO: 3772924 - RNA, 19 nt, Human
cagugaggcucugcccuug

SEQ ID NO: 3772925 - RNA, 16 nt, Human
cagugagggucuucuu

SEQ ID NO: 3772926 - RNA, 23 nt, Human
cagugagggucuucuuacaugca

SEQ ID NO: 3772927 - RNA, 17 nt, Human
cagugagguccuggggg

SEQ ID NO: 3772928 - RNA, 19 nt, Human
cagugagguccugggggcc

SEQ ID NO: 3772929 - RNA, 15 nt, Human
cagugaggugcccag

SEQ ID NO: 3772930 - RNA, 16 nt, Human
cagugaggugcccagc

SEQ ID NO: 3772931 - RNA, 19 nt, Human
cagugagucgaggacaggg

SEQ ID NO: 3772932 - RNA, 20 nt, Human
cagugauauggcagaagaca

SEQ ID NO: 3772933 - RNA, 15 nt, Human
cagugauauucuuug

SEQ ID NO: 3772934 - RNA, 18 nt, Human
cagugauauucuuuguua

SEQ ID NO: 3772935 - RNA, 15 nt, Human
cagugaucuccauau

SEQ ID NO: 3772936 - RNA, 18 nt, Human
cagugaugcuggaugcuc

SEQ ID NO: 3772937 - RNA, 20 nt, Human
cagugaugcuggaugcuccu

SEQ ID NO: 3772938 - RNA, 22 nt, Human
cagugaugugccuaaauaaguu

SEQ ID NO: 3772939 - RNA, 21 nt, Human
cagugauuaaggucucucuuu

SEQ ID NO: 3772940 - RNA, 18 nt, Human
cagugauuaccagggacu

SEQ ID NO: 3772941 - RNA, 14 nt, Human
cagugauuagcacu

SEQ ID NO: 3772942 - RNA, 18 nt, Human
cagugauucgagcuauau

SEQ ID NO: 3772943 - RNA, 14 nt, Human
cagugauuuuuauc

SEQ ID NO: 3772944 - RNA, 17 nt, Human
cagugauuuuuauccaa

SEQ ID NO: 3772945 - RNA, 22 nt, Human
cagugauuuuuuucuuguaauu

SEQ ID NO: 3772946 - RNA, 18 nt, Human
cagugauuuuuuuuuaga

SEQ ID NO: 3772947 - RNA, 14 nt, Human
cagugcaacacugg

SEQ ID NO: 3772948 - RNA, 15 nt, Human
cagugcaaccucugc

SEQ ID NO: 3772949 - RNA, 14 nt, Human
cagugcaagaagga

SEQ ID NO: 3772950 - RNA, 18 nt, Human
cagugcaagagacucugg

SEQ ID NO: 3772951 - RNA, 19 nt, Human
cagugcaagagacucuggc

SEQ ID NO: 3772952 - RNA, 21 nt, Human
cagugcaagagacucuggccu

SEQ ID NO: 3772953 - RNA, 24 nt, Human
cagugcaagagacucuggccucca

SEQ ID NO: 3772954 - RNA, 15 nt, Human
cagugcacccacucu

SEQ ID NO: 3772955 - RNA, 15 nt, Human
cagugcaccugggac

SEQ ID NO: 3772956 - RNA, 22 nt, Human
cagugcacuaauguguaagaca

SEQ ID NO: 3772957 - RNA, 14 nt, Human
cagugcacugaaag

SEQ ID NO: 3772958 - RNA, 16 nt, Human
cagugcagagccuucu

SEQ ID NO: 3772959 - RNA, 19 nt, Human
cagugcagagccuucucag

SEQ ID NO: 3772960 - RNA, 20 nt, Human
cagugcagcaaccagagcac

SEQ ID NO: 3772961 - RNA, 23 nt, Human
cagugcagcaaccagagcacugu

SEQ ID NO: 3772962 - RNA, 13 nt, Human
cagugcagcaaua

SEQ ID NO: 3772963 - RNA, 14 nt, Human
cagugcaggcacag

SEQ ID NO: 3772964 - RNA, 17 nt, Human
cagugcagggcaaaaua

SEQ ID NO: 3772965 - RNA, 14 nt, Human
cagugcaguauaga

SEQ ID NO: 3772966 - RNA, 22 nt, Human
cagugcaguuugguguguccuc

SEQ ID NO: 3772967 - RNA, 21 nt, Human
cagugcauaguuguagacaaa

SEQ ID NO: 3772968 - RNA, 18 nt, Human
cagugcauauuccuuucu

SEQ ID NO: 3772969 - RNA, 17 nt, Human
cagugcaugcugucccu

SEQ ID NO: 3772970 - RNA, 19 nt, Human
cagugcaugcugucccuua

SEQ ID NO: 3772971 - RNA, 22 nt, Human
cagugcaugcugucccuuacgu

SEQ ID NO: 3772972 - RNA, 15 nt, Human
cagugcaugguggcc

SEQ ID NO: 3772973 - RNA, 20 nt, Human
cagugcaugguggccagagg

SEQ ID NO: 3772974 - RNA, 16 nt, Human
cagugccaacuguggc

SEQ ID NO: 3772975 - RNA, 19 nt, Human
cagugccaacuguggcugg

SEQ ID NO: 3772976 - RNA, 20 nt, Human
cagugccaacuguggcuggu

SEQ ID NO: 3772977 - RNA, 23 nt, Human
cagugccaagcacagugccugca

SEQ ID NO: 3772978 - RNA, 13 nt, Human
cagugccaaggac

SEQ ID NO: 3772979 - RNA, 16 nt, Human
cagugccauugucuuu

SEQ ID NO: 3772980 - RNA, 17 nt, Human
cagugccauugucuuua

SEQ ID NO: 3772981 - RNA, 22 nt, Human
cagugcccacaggaucagucug

SEQ ID NO: 3772982 - RNA, 11 nt, Human
cagugcccagg

SEQ ID NO: 3772983 - RNA, 13 nt, Human
cagugcccagggc

SEQ ID NO: 3772984 - RNA, 13 nt, Human
cagugcccaggug

SEQ ID NO: 3772985 - RNA, 22 nt, Human
cagugcccagguggcuguggaa

SEQ ID NO: 3772986 - RNA, 13 nt, Human
cagugcccuccag

SEQ ID NO: 3772987 - RNA, 15 nt, Human
cagugcccugagcca

SEQ ID NO: 3772988 - RNA, 16 nt, Human
cagugcccugagccag

SEQ ID NO: 3772989 - RNA, 18 nt, Human
cagugccgccgccucgcc

SEQ ID NO: 3772990 - RNA, 19 nt, Human
cagugccgccgccucgccc

SEQ ID NO: 3772991 - RNA, 15 nt, Human
cagugccuaaaauaa

SEQ ID NO: 3772992 - RNA, 15 nt, Human
cagugccuauugaua

SEQ ID NO: 3772993 - RNA, 22 nt, Human
cagugccucucccugcugcucc

SEQ ID NO: 3772994 - RNA, 12 nt, Human
cagugccugcug

SEQ ID NO: 3772995 - RNA, 14 nt, Human
cagugccugggaau

SEQ ID NO: 3772996 - RNA, 21 nt, Human
cagugccuuauggaacacucu

SEQ ID NO: 3772997 - RNA, 15 nt, Human
cagugccuucaauaa

SEQ ID NO: 3772998 - RNA, 16 nt, Human
cagugccuucaauaaa

SEQ ID NO: 3772999 - RNA, 15 nt, Human
cagugccuuccauaa

SEQ ID NO: 3773000 - RNA, 16 nt, Human
cagugcgggugcagac

SEQ ID NO: 3773001 - RNA, 17 nt, Human
cagugcuaaaaauggga

SEQ ID NO: 3773002 - RNA, 21 nt, Human
cagugcuagugagcugggcau

SEQ ID NO: 3773003 - RNA, 12 nt, Human
cagugcucaccc

SEQ ID NO: 3773004 - RNA, 13 nt, Human
cagugcucaccca

SEQ ID NO: 3773005 - RNA, 18 nt, Human
cagugcucacccacacca

SEQ ID NO: 3773006 - RNA, 15 nt, Human
cagugcucgcuguug

SEQ ID NO: 3773007 - RNA, 16 nt, Human
cagugcucgcuguugc

SEQ ID NO: 3773008 - RNA, 17 nt, Human
cagugcucgcuguugcu

SEQ ID NO: 3773009 - RNA, 14 nt, Human
cagugcucuuuucu

SEQ ID NO: 3773010 - RNA, 23 nt, Human
cagugcugaccagacagccuccc

SEQ ID NO: 3773011 - RNA, 15 nt, Human
cagugcugcagcucc

SEQ ID NO: 3773012 - RNA, 15 nt, Human
cagugcuguacuuga

SEQ ID NO: 3773013 - RNA, 19 nt, Human
cagugcugucugaucugug

SEQ ID NO: 3773014 - RNA, 22 nt, Human
cagugcugugcugugcuauggu

SEQ ID NO: 3773015 - RNA, 12 nt, Human
cagugcuguggc

SEQ ID NO: 3773016 - RNA, 13 nt, Human
cagugcuguggcc

SEQ ID NO: 3773017 - RNA, 18 nt, Human
cagugcuguggccugggc

SEQ ID NO: 3773018 - RNA, 20 nt, Human
cagugcuugaguuuggggaa

SEQ ID NO: 3773019 - RNA, 19 nt, Human
cagugcuugauugcgugga

SEQ ID NO: 3773020 - RNA, 14 nt, Human
cagugcuugccaca

SEQ ID NO: 3773021 - RNA, 15 nt, Human
cagugcuuggcccag

SEQ ID NO: 3773022 - RNA, 16 nt, Human
cagugcuuuaauggca

SEQ ID NO: 3773023 - RNA, 18 nt, Human
caguggacuuuccacccc

SEQ ID NO: 3773024 - RNA, 14 nt, Human
caguggagaauuau

SEQ ID NO: 3773025 - RNA, 16 nt, Human
caguggagcccaggag

SEQ ID NO: 3773026 - RNA, 17 nt, Human
caguggaucacaaagug

SEQ ID NO: 3773027 - RNA, 14 nt, Human
caguggauuaauua

SEQ ID NO: 3773028 - RNA, 16 nt, Human
caguggauugcauuuc

SEQ ID NO: 3773029 - RNA, 12 nt, Human
caguggcagcug

SEQ ID NO: 3773030 - RNA, 13 nt, Human
caguggcagcugc

SEQ ID NO: 3773031 - RNA, 15 nt, Human
caguggcagcugcuu

SEQ ID NO: 3773032 - RNA, 13 nt, Human
caguggcaggcag

SEQ ID NO: 3773033 - RNA, 14 nt, Human
caguggcaggcaga

SEQ ID NO: 3773034 - RNA, 16 nt, Human
caguggcagggcacag

SEQ ID NO: 3773035 - RNA, 16 nt, Human
caguggcauggcucca

SEQ ID NO: 3773036 - RNA, 18 nt, Human
caguggccuacaaaucag

SEQ ID NO: 3773037 - RNA, 16 nt, Human
caguggccucaacccu

SEQ ID NO: 3773038 - RNA, 22 nt, Human
caguggccucaacccucccuca

SEQ ID NO: 3773039 - RNA, 23 nt, Human
caguggccucaacccucccucag

SEQ ID NO: 3773040 - RNA, 18 nt, Human
caguggccuuaccccugc

SEQ ID NO: 3773041 - RNA, 17 nt, Human
caguggccuuccccagc

SEQ ID NO: 3773042 - RNA, 21 nt, Human
caguggcgugaucucagcuca

SEQ ID NO: 3773043 - RNA, 20 nt, Human
caguggcucacgccuaugau

SEQ ID NO: 3773044 - RNA, 18 nt, Human
caguggcugguccagggc

SEQ ID NO: 3773045 - RNA, 20 nt, Human
caguggcugguccagggcua

SEQ ID NO: 3773046 - RNA, 13 nt, Human
caguggcugucac

SEQ ID NO: 3773047 - RNA, 15 nt, Human
cagugggagauguua

SEQ ID NO: 3773048 - RNA, 18 nt, Human
cagugggagcugccuguu

SEQ ID NO: 3773049 - RNA, 11 nt, Human
cagugggaggg

SEQ ID NO: 3773050 - RNA, 14 nt, Human
cagugggaggggca

SEQ ID NO: 3773051 - RNA, 19 nt, Human
cagugggaggggcaggcug

SEQ ID NO: 3773052 - RNA, 20 nt, Human
cagugggaggggcaggcuga

SEQ ID NO: 3773053 - RNA, 18 nt, Human
cagugggauuugguaaug

SEQ ID NO: 3773054 - RNA, 15 nt, Human
cagugggccuggcca

SEQ ID NO: 3773055 - RNA, 13 nt, Human
caguggggcagag

SEQ ID NO: 3773056 - RNA, 15 nt, Human
caguggggcagucau

SEQ ID NO: 3773057 - RNA, 21 nt, Human
caguggggccugaggcuccuu

SEQ ID NO: 3773058 - RNA, 15 nt, Human
caguggggccugugg

SEQ ID NO: 3773059 - RNA, 18 nt, Human
caguggggcucucugagu

SEQ ID NO: 3773060 - RNA, 20 nt, Human
caugcuacacacugcauguu

SEQ ID NO: 3773061 - RNA, 14 nt, Human
caugcucaaugaaa

SEQ ID NO: 3773062 - RNA, 18 nt, Human
caugcucaucugcugguc

SEQ ID NO: 3773063 - RNA, 17 nt, Human
caugcuccucacugccc

SEQ ID NO: 3773064 - RNA, 20 nt, Human
caugcuccucacugcccgca

SEQ ID NO: 3773065 - RNA, 19 nt, Human
caugcuccucuuccccaga

SEQ ID NO: 3773066 - RNA, 13 nt, Human
caugcucucugca

SEQ ID NO: 3773067 - RNA, 16 nt, Human
caugcucugcaaaagg

SEQ ID NO: 3773068 - RNA, 16 nt, Human
caugcucuuagaaaau

SEQ ID NO: 3773069 - RNA, 16 nt, Human
caugcugaagccaaag

SEQ ID NO: 3773070 - RNA, 18 nt, Human
caugcugaagggaccuug

SEQ ID NO: 3773071 - RNA, 19 nt, Human
caugcugacuguccucucc

SEQ ID NO: 3773072 - RNA, 21 nt, Human
caugcugacuuucauuucuug

SEQ ID NO: 3773073 - RNA, 15 nt, Human
caugcugaggccugg

SEQ ID NO: 3773074 - RNA, 14 nt, Human
caugcugagucucc

SEQ ID NO: 3773075 - RNA, 20 nt, Human
caugcugagucucccaaggc

SEQ ID NO: 3773076 - RNA, 22 nt, Human
caugcugccaauauccuaauaa

SEQ ID NO: 3773077 - RNA, 16 nt, Human
caugcugccccugccu

SEQ ID NO: 3773078 - RNA, 14 nt, Human
caugcugccuccag

SEQ ID NO: 3773079 - RNA, 22 nt, Human
caugcugcuggggaagacagug

SEQ ID NO: 3773080 - RNA, 12 nt, Human
caugcugcuuua

SEQ ID NO: 3773081 - RNA, 13 nt, Human
caugcugcuuuaa

SEQ ID NO: 3773082 - RNA, 20 nt, Human
caugcugcuuuaauugugaa

SEQ ID NO: 3773083 - RNA, 18 nt, Human
caugcuggaaccugcaaa

SEQ ID NO: 3773084 - RNA, 12 nt, Human
caugcuggagcc

SEQ ID NO: 3773085 - RNA, 22 nt, Human
caugcuggagccuguguaacag

SEQ ID NO: 3773086 - RNA, 13 nt, Human
caugcuggccagc

SEQ ID NO: 3773087 - RNA, 22 nt, Human
caugcuggcucccagggccaug

SEQ ID NO: 3773088 - RNA, 13 nt, Human
caugcugggauuu

SEQ ID NO: 3773089 - RNA, 14 nt, Human
caugcugggauuuc

SEQ ID NO: 3773090 - RNA, 17 nt, Human
caugcuggguucugcac

SEQ ID NO: 3773091 - RNA, 16 nt, Human
caugcuguacauacuu

SEQ ID NO: 3773092 - RNA, 13 nt, Human
caugcugucccuu

SEQ ID NO: 3773093 - RNA, 15 nt, Human
caugcugucccuuac

SEQ ID NO: 3773094 - RNA, 22 nt, Human
caugcugucccuuacgugaguc

SEQ ID NO: 3773095 - RNA, 18 nt, Human
caugcugucuggcacagc

SEQ ID NO: 3773096 - RNA, 20 nt, Human
caugcugucuggcacagccu

SEQ ID NO: 3773097 - RNA, 12 nt, Human
caugcuguguaa

SEQ ID NO: 3773098 - RNA, 14 nt, Human
caugcuguuauuua

SEQ ID NO: 3773099 - RNA, 15 nt, Human
caugcuguucaugaa

SEQ ID NO: 3773100 - RNA, 18 nt, Human
caugcuguucaugaaaga

SEQ ID NO: 3773101 - RNA, 17 nt, Human
caugcuguugauugcua

SEQ ID NO: 3773102 - RNA, 20 nt, Human
caugcuguugauugcuaaau

SEQ ID NO: 3773103 - RNA, 14 nt, Human
caugcuuaaauuuu

SEQ ID NO: 3773104 - RNA, 17 nt, Human
caugcuuagcagucccc

SEQ ID NO: 3773105 - RNA, 16 nt, Human
caugcuuagucacugc

SEQ ID NO: 3773106 - RNA, 17 nt, Human
caugcuuagucacugcc

SEQ ID NO: 3773107 - RNA, 18 nt, Human
caugcuuagucacugccu

SEQ ID NO: 3773108 - RNA, 15 nt, Human
caugcuuaugacaau

SEQ ID NO: 3773109 - RNA, 15 nt, Human
caugcuucccuuucc

SEQ ID NO: 3773110 - RNA, 22 nt, Human
caugcuucucaucuugugaaau

SEQ ID NO: 3773111 - RNA, 14 nt, Human
caugcuucuuccuu

SEQ ID NO: 3773112 - RNA, 14 nt, Human
caugcuugaugguu

SEQ ID NO: 3773113 - RNA, 19 nt, Human
caugcuugugaaaaugugu

SEQ ID NO: 3773114 - RNA, 13 nt, Human
caugcuuguguua

SEQ ID NO: 3773115 - RNA, 17 nt, Human
caugcuuuccauauuuu

SEQ ID NO: 3773116 - RNA, 15 nt, Human
cauggaaaaaugcca

SEQ ID NO: 3773117 - RNA, 13 nt, Human
cauggaaauauua

SEQ ID NO: 3773118 - RNA, 15 nt, Human
cauggaaaucagcca

SEQ ID NO: 3773119 - RNA, 18 nt, Human
cauggaaaugaagcaggg

SEQ ID NO: 3773120 - RNA, 21 nt, Human
cauggaaauuuaaagcagguu

SEQ ID NO: 3773121 - RNA, 23 nt, Human
cauggaacacaaacacauuguua

SEQ ID NO: 3773122 - RNA, 19 nt, Human
cauggaacgcguugaaauu

SEQ ID NO: 3773123 - RNA, 20 nt, Human
cauggaacgcguugaaauug

SEQ ID NO: 3773124 - RNA, 17 nt, Human
cauggaacucauuccug

SEQ ID NO: 3773125 - RNA, 13 nt, Human
cauggaagauuga

SEQ ID NO: 3773126 - RNA, 14 nt, Human
cauggaagggaaga

SEQ ID NO: 3773127 - RNA, 16 nt, Human
cauggaauaacaugua

SEQ ID NO: 3773128 - RNA, 15 nt, Human
cauggaaugaggguu

SEQ ID NO: 3773129 - RNA, 19 nt, Human
cauggaauggacauccugu

SEQ ID NO: 3773130 - RNA, 17 nt, Human
cauggacaauggaccgg

SEQ ID NO: 3773131 - RNA, 18 nt, Human
cauggacaauggaccgga

SEQ ID NO: 3773132 - RNA, 20 nt, Human
cauggacaauggaccggaga

SEQ ID NO: 3773133 - RNA, 22 nt, Human
cauggacaccccuuauccagga

SEQ ID NO: 3773134 - RNA, 23 nt, Human
cauggacaccccuuauccaggac

SEQ ID NO: 3773135 - RNA, 16 nt, Human
cauggacacuacaccc

SEQ ID NO: 3773136 - RNA, 21 nt, Human
cauggacacuacacccagcaa

SEQ ID NO: 3773137 - RNA, 23 nt, Human
cauggacacuacacccagcaaua

SEQ ID NO: 3773138 - RNA, 12 nt, Human
cauggacacucc

SEQ ID NO: 3773139 - RNA, 18 nt, Human
cauggacacuccagugcc

SEQ ID NO: 3773140 - RNA, 19 nt, Human
cauggacacuccagugcca

SEQ ID NO: 3773141 - RNA, 17 nt, Human
cauggacagaagaaggc

SEQ ID NO: 3773142 - RNA, 14 nt, Human
cauggacagaauuu

SEQ ID NO: 3773143 - RNA, 16 nt, Human
cauggacaggcuggcu

SEQ ID NO: 3773144 - RNA, 18 nt, Human
cauggacaugaucuucuu

SEQ ID NO: 3773145 - RNA, 19 nt, Human
cauggacguucggggcaug

SEQ ID NO: 3773146 - RNA, 23 nt, Human
cauggacucuguccugaaggccu

SEQ ID NO: 3773147 - RNA, 15 nt, Human
cauggacuucacaua

SEQ ID NO: 3773148 - RNA, 15 nt, Human
cauggacuuccacug

SEQ ID NO: 3773149 - RNA, 17 nt, Human
cauggacuucuggaugc

SEQ ID NO: 3773150 - RNA, 13 nt, Human
cauggacuuguau

SEQ ID NO: 3773151 - RNA, 13 nt, Human
cauggacuuuaua

SEQ ID NO: 3773152 - RNA, 14 nt, Human
cauggagaaacccu

SEQ ID NO: 3773153 - RNA, 13 nt, Human
cauggagaaagcu

SEQ ID NO: 3773154 - RNA, 18 nt, Human
cauggagaaagcugacuu

SEQ ID NO: 3773155 - RNA, 20 nt, Human
cauggagaaagcugacuugg

SEQ ID NO: 3773156 - RNA, 21 nt, Human
cauggagaaagcugacuuggc

SEQ ID NO: 3773157 - RNA, 22 nt, Human
cauggagaaagcugacuuggcu

SEQ ID NO: 3773158 - RNA, 19 nt, Human
cauggagaacagugauuuu

SEQ ID NO: 3773159 - RNA, 15 nt, Human
cauggagaagcagaa

SEQ ID NO: 3773160 - RNA, 14 nt, Human
cauggagccagcuc

SEQ ID NO: 3773161 - RNA, 17 nt, Human
cauggagccagcucccu

SEQ ID NO: 3773162 - RNA, 15 nt, Human
cauggagccccagcc

SEQ ID NO: 3773163 - RNA, 16 nt, Human
cauggagccccagccc

SEQ ID NO: 3773164 - RNA, 17 nt, Human
cauggagccccagcccc

SEQ ID NO: 3773165 - RNA, 12 nt, Human
cauggagcuggc

SEQ ID NO: 3773166 - RNA, 15 nt, Human
cauggagcugggcua

SEQ ID NO: 3773167 - RNA, 22 nt, Human
cauggaggagcuugggggauga

SEQ ID NO: 3773168 - RNA, 19 nt, Human
cauggaggcacacagcugc

SEQ ID NO: 3773169 - RNA, 20 nt, Human
cauggaggcacacagcugca

SEQ ID NO: 3773170 - RNA, 13 nt, Human
cauggagguucua

SEQ ID NO: 3773171 - RNA, 16 nt, Human
cauggagguucuaagg

SEQ ID NO: 3773172 - RNA, 16 nt, Human
cauggaguauauguca

SEQ ID NO: 3773173 - RNA, 13 nt, Human
cauggaguggcag

SEQ ID NO: 3773174 - RNA, 15 nt, Human
cauggaguggcagcc

SEQ ID NO: 3773175 - RNA, 19 nt, Human
cauggaguggcagcccagc

SEQ ID NO: 3773176 - RNA, 23 nt, Human
cauggaguggcagcccagccagc

SEQ ID NO: 3773177 - RNA, 20 nt, Human
cauggaguguguauuguucc

SEQ ID NO: 3773178 - RNA, 21 nt, Human
cauggaguguguauuguuccc

SEQ ID NO: 3773179 - RNA, 14 nt, Human
cauggaguugugau

SEQ ID NO: 3773180 - RNA, 18 nt, Human
cauggauauaguuuuacu

SEQ ID NO: 3773181 - RNA, 14 nt, Human
cauggauggaaaac

SEQ ID NO: 3773182 - RNA, 12 nt, Human
cauggauguuuu

SEQ ID NO: 3773183 - RNA, 12 nt, Human
cauggauuucuu

SEQ ID NO: 3773184 - RNA, 14 nt, Human
cauggauuuuccag

SEQ ID NO: 3773185 - RNA, 18 nt, Human
cauggcacuugcaucugu

SEQ ID NO: 3773186 - RNA, 13 nt, Human
cauggcagaaggc

SEQ ID NO: 3773187 - RNA, 20 nt, Human
cauggcagauguaggaggga

SEQ ID NO: 3773188 - RNA, 15 nt, Human
cauggcagcccucgg

SEQ ID NO: 3773189 - RNA, 13 nt, Human
cauggcagggggc

SEQ ID NO: 3773190 - RNA, 17 nt, Human
cauggcagggggcugcu

SEQ ID NO: 3773191 - RNA, 18 nt, Human
cauggcagggggcugcug

SEQ ID NO: 3773192 - RNA, 13 nt, Human
cauggcauauuuu

SEQ ID NO: 3773193 - RNA, 15 nt, Human
cauggcauauuuuuc

SEQ ID NO: 3773194 - RNA, 19 nt, Human
cauggcaucaccuccacca

SEQ ID NO: 3773195 - RNA, 22 nt, Human
cauggcauccuccagccccugu

SEQ ID NO: 3773196 - RNA, 18 nt, Human
cauggcaugcuuaaauuu

SEQ ID NO: 3773197 - RNA, 21 nt, Human
cauggcaugguuuugugccau

SEQ ID NO: 3773198 - RNA, 19 nt, Human
cauggccacacugugacac

SEQ ID NO: 3773199 - RNA, 22 nt, Human
cauggccacuugggucuucccu

SEQ ID NO: 3773200 - RNA, 14 nt, Human
cauggccagcugga

SEQ ID NO: 3773201 - RNA, 14 nt, Human
cauggccagguggc

SEQ ID NO: 3773202 - RNA, 15 nt, Human
cauggcccucauuaa

SEQ ID NO: 3773203 - RNA, 22 nt, Human
cauggcccucauuaaugacacu

SEQ ID NO: 3773204 - RNA, 17 nt, Human
cauggcccugagcgagu

SEQ ID NO: 3773205 - RNA, 13 nt, Human
cauggcccugggc

SEQ ID NO: 3773206 - RNA, 18 nt, Human
cauuagguuguccuagaa

SEQ ID NO: 3773207 - RNA, 16 nt, Human
cauuaguaaaugucuu

SEQ ID NO: 3773208 - RNA, 18 nt, Human
cauuaguaaaugucuuug

SEQ ID NO: 3773209 - RNA, 14 nt, Human
cauuaguacuuuau

SEQ ID NO: 3773210 - RNA, 22 nt, Human
cauuagucucagugaagacuau

SEQ ID NO: 3773211 - RNA, 13 nt, Human
cauuaguuuugaa

SEQ ID NO: 3773212 - RNA, 18 nt, Human
cauuauaaccuuaauuua

SEQ ID NO: 3773213 - RNA, 13 nt, Human
cauuauaaugaau

SEQ ID NO: 3773214 - RNA, 17 nt, Human
cauuauauagcaguaaa

SEQ ID NO: 3773215 - RNA, 12 nt, Human
cauuauauuuau

SEQ ID NO: 3773216 - RNA, 14 nt, Human
cauuaucaugugua

SEQ ID NO: 3773217 - RNA, 21 nt, Human
cauuaucgagcagcauuuuau

SEQ ID NO: 3773218 - RNA, 20 nt, Human
cauuaucgccuuuugacagc

SEQ ID NO: 3773219 - RNA, 18 nt, Human
cauuaucgggagcagugu

SEQ ID NO: 3773220 - RNA, 20 nt, Human
cauuaucgggagcagugucu

SEQ ID NO: 3773221 - RNA, 21 nt, Human
cauuaucgggagcagugucuu

SEQ ID NO: 3773222 - RNA, 23 nt, Human
cauuaucgggagcagugucuucc

SEQ ID NO: 3773223 - RNA, 12 nt, Human
cauuaucuagau

SEQ ID NO: 3773224 - RNA, 12 nt, Human
cauuaucucaaa

SEQ ID NO: 3773225 - RNA, 21 nt, Human
cauuaugaugugggucaagga

SEQ ID NO: 3773226 - RNA, 22 nt, Human
cauuaugaugugggucaaggaa

SEQ ID NO: 3773227 - RNA, 13 nt, Human
cauuaugaugugu

SEQ ID NO: 3773228 - RNA, 14 nt, Human
cauuaugauucuuu

SEQ ID NO: 3773229 - RNA, 21 nt, Human
cauuauggguuaggcauuaau

SEQ ID NO: 3773230 - RNA, 22 nt, Human
cauuauguccacuguguauaga

SEQ ID NO: 3773231 - RNA, 12 nt, Human
cauuaugugugc

SEQ ID NO: 3773232 - RNA, 14 nt, Human
cauuauguuaauau

SEQ ID NO: 3773233 - RNA, 16 nt, Human
cauuauguuaauauuu

SEQ ID NO: 3773234 - RNA, 17 nt, Human
cauuauuaaauuguaaa

SEQ ID NO: 3773235 - RNA, 19 nt, Human
cauuauuaguacugcucuu

SEQ ID NO: 3773236 - RNA, 15 nt, Human
cauuauucaaaguug

SEQ ID NO: 3773237 - RNA, 16 nt, Human
cauuauucaaaguugc

SEQ ID NO: 3773238 - RNA, 13 nt, Human
cauuauucauuua

SEQ ID NO: 3773239 - RNA, 16 nt, Human
cauuauucauuuagug

SEQ ID NO: 3773240 - RNA, 22 nt, Human
cauuauucucugcuauauauaa

SEQ ID NO: 3773241 - RNA, 18 nt, Human
cauuauucucuuuuaucu

SEQ ID NO: 3773242 - RNA, 22 nt, Human
cauuauuuauucagcuucauuu

SEQ ID NO: 3773243 - RNA, 13 nt, Human
cauuauuugcaug

SEQ ID NO: 3773244 - RNA, 12 nt, Human
cauuauuuuauu

SEQ ID NO: 3773245 - RNA, 23 nt, Human
cauucaaaauaggguauauuuuc

SEQ ID NO: 3773246 - RNA, 13 nt, Human
cauucaaauuugu

SEQ ID NO: 3773247 - RNA, 15 nt, Human
cauucaaauuugucu

SEQ ID NO: 3773248 - RNA, 12 nt, Human
cauucaacaaga

SEQ ID NO: 3773249 - RNA, 18 nt, Human
cauucaacagagacugaa

SEQ ID NO: 3773250 - RNA, 17 nt, Human
cauucaacccuggagag

SEQ ID NO: 3773251 - RNA, 16 nt, Human
cauucaagucagcucu

SEQ ID NO: 3773252 - RNA, 17 nt, Human
cauucaaguguaaaaua

SEQ ID NO: 3773253 - RNA, 21 nt, Human
cauucaaguguaaaauauuuu

SEQ ID NO: 3773254 - RNA, 22 nt, Human
cauucaaguguaaaauauuuug

SEQ ID NO: 3773255 - RNA, 21 nt, Human
cauucaauaagcaucaaacuc

SEQ ID NO: 3773256 - RNA, 22 nt, Human
cauucaauaagcaucaaacucu

SEQ ID NO: 3773257 - RNA, 13 nt, Human
cauucaauguuua

SEQ ID NO: 3773258 - RNA, 20 nt, Human
cauucaauuuauucaagaaa

SEQ ID NO: 3773259 - RNA, 21 nt, Human
cauucaauuuauucaagaaaa

SEQ ID NO: 3773260 - RNA, 23 nt, Human
cauucacaguucuuugggccaga

SEQ ID NO: 3773261 - RNA, 15 nt, Human
cauucaccugcccca

SEQ ID NO: 3773262 - RNA, 16 nt, Human
cauucaccugccccaa

SEQ ID NO: 3773263 - RNA, 19 nt, Human
cauucaccugccccaacuc

SEQ ID NO: 3773264 - RNA, 16 nt, Human
cauucacucuuccaga

SEQ ID NO: 3773265 - RNA, 20 nt, Human
cauucacuucacugugcugu

SEQ ID NO: 3773266 - RNA, 13 nt, Human
cauucacuucucu

SEQ ID NO: 3773267 - RNA, 15 nt, Human
cauucacuugcauuu

SEQ ID NO: 3773268 - RNA, 18 nt, Human
cauucacuugcauuucuu

SEQ ID NO: 3773269 - RNA, 13 nt, Human
cauucagaacacc

SEQ ID NO: 3773270 - RNA, 21 nt, Human
cauucagaacaccaagacuug

SEQ ID NO: 3773271 - RNA, 15 nt, Human
cauucagagagcagc

SEQ ID NO: 3773272 - RNA, 15 nt, Human
cauucagcaagacaa

SEQ ID NO: 3773273 - RNA, 21 nt, Human
cauucagcugagguucauuac

SEQ ID NO: 3773274 - RNA, 15 nt, Human
cauucaggaaccugg

SEQ ID NO: 3773275 - RNA, 13 nt, Human
cauucaggaauuc

SEQ ID NO: 3773276 - RNA, 16 nt, Human
cauucaggagcuuccu

SEQ ID NO: 3773277 - RNA, 21 nt, Human
cauucagugauuacugucaag

SEQ ID NO: 3773278 - RNA, 19 nt, Human
cauucauaaaccuugucua

SEQ ID NO: 3773279 - RNA, 17 nt, Human
cauucauauuacaauau

SEQ ID NO: 3773280 - RNA, 17 nt, Human
cauucauggaccacugu

SEQ ID NO: 3773281 - RNA, 15 nt, Human
cauucauuuuauauu

SEQ ID NO: 3773282 - RNA, 20 nt, Human
cauucauuuuauauugaaaa

SEQ ID NO: 3773283 - RNA, 22 nt, Human
cauucauuuuauauugaaaaaa

SEQ ID NO: 3773284 - RNA, 23 nt, Human
cauucauuuuauauugaaaaaaa

SEQ ID NO: 3773285 - RNA, 13 nt, Human
cauucauuuuuau

SEQ ID NO: 3773286 - RNA, 15 nt, Human
cauuccaaaacgaag

SEQ ID NO: 3773287 - RNA, 16 nt, Human
cauuccaaagaacagc

SEQ ID NO: 3773288 - RNA, 16 nt, Human
cauuccaaagcuuuau

SEQ ID NO: 3773289 - RNA, 14 nt, Human
cauuccaacaaagg

SEQ ID NO: 3773290 - RNA, 21 nt, Human
cauuccaacucguauagcaug

SEQ ID NO: 3773291 - RNA, 21 nt, Human
cauuccaagaauagcaucugu

SEQ ID NO: 3773292 - RNA, 17 nt, Human
cauuccaccuucccaug

SEQ ID NO: 3773293 - RNA, 14 nt, Human
cauuccagaggaag

SEQ ID NO: 3773294 - RNA, 13 nt, Human
cauuccagccccu

SEQ ID NO: 3773295 - RNA, 19 nt, Human
cauuccagccccucugguc

SEQ ID NO: 3773296 - RNA, 17 nt, Human
cauuccaggcagccucu

SEQ ID NO: 3773297 - RNA, 15 nt, Human
cauuccaugugccca

SEQ ID NO: 3773298 - RNA, 14 nt, Human
cauuccauucugga

SEQ ID NO: 3773299 - RNA, 13 nt, Human
cauuccauugccu

SEQ ID NO: 3773300 - RNA, 21 nt, Human
cauuccauugccuagcucuuu

SEQ ID NO: 3773301 - RNA, 17 nt, Human
cauucccagcucuaccc

SEQ ID NO: 3773302 - RNA, 15 nt, Human
cauuccccagccucu

SEQ ID NO: 3773303 - RNA, 15 nt, Human
cauuccccaggaggc

SEQ ID NO: 3773304 - RNA, 19 nt, Human
cauuccccaggaggccagc

SEQ ID NO: 3773305 - RNA, 20 nt, Human
cauucccgcagugggagcaa

SEQ ID NO: 3773306 - RNA, 13 nt, Human
cauucccucccau

SEQ ID NO: 3773307 - RNA, 21 nt, Human
cauucccucucaucucaggua

SEQ ID NO: 3773308 - RNA, 10 nt, Human
cauucccugg

SEQ ID NO: 3773309 - RNA, 12 nt, Human
cauucccuggga

SEQ ID NO: 3773310 - RNA, 23 nt, Human
cauuccuaacacagcauguguau

SEQ ID NO: 3773311 - RNA, 13 nt, Human
cauuccucaggga

SEQ ID NO: 3773312 - RNA, 23 nt, Human
cauuccucagggacagagacacc

SEQ ID NO: 3773313 - RNA, 21 nt, Human
cauuccucaugaauguaaauu

SEQ ID NO: 3773314 - RNA, 18 nt, Human
cauuccucccauucaaga

SEQ ID NO: 3773315 - RNA, 19 nt, Human
cauuccucccauucaagau

SEQ ID NO: 3773316 - RNA, 17 nt, Human
cauuccugaagaaccag

SEQ ID NO: 3773317 - RNA, 20 nt, Human
cauuccugaagaaccagucc

SEQ ID NO: 3773318 - RNA, 14 nt, Human
cauuccugaugcuu

SEQ ID NO: 3773319 - RNA, 19 nt, Human
cauuccugaugcuucuuca

SEQ ID NO: 3773320 - RNA, 15 nt, Human
cauuccuggagcccg

SEQ ID NO: 3773321 - RNA, 17 nt, Human
cauuccuggagcccgag

SEQ ID NO: 3773322 - RNA, 18 nt, Human
cauuccuggagcccgagg

SEQ ID NO: 3773323 - RNA, 14 nt, Human
cauuccugggcaca

SEQ ID NO: 3773324 - RNA, 16 nt, Human
cauuccugggcacagu

SEQ ID NO: 3773325 - RNA, 19 nt, Human
cauuccugguacccagcca

SEQ ID NO: 3773326 - RNA, 12 nt, Human
cauuccuuccca

SEQ ID NO: 3773327 - RNA, 15 nt, Human
cauuccuucccagag

SEQ ID NO: 3773328 - RNA, 14 nt, Human
cauuccuucuuuga

SEQ ID NO: 3773329 - RNA, 23 nt, Human
cauuccuucuuugauaauguuaa

SEQ ID NO: 3773330 - RNA, 15 nt, Human
cauuccuugauaaug

SEQ ID NO: 3773331 - RNA, 15 nt, Human
cauuccuugcugaaa

SEQ ID NO: 3773332 - RNA, 18 nt, Human
cauucgcgcucugcucag

SEQ ID NO: 3773333 - RNA, 15 nt, Human
cauucggcucccugg

SEQ ID NO: 3773334 - RNA, 19 nt, Human
cauucggcucccuggagcc

SEQ ID NO: 3773335 - RNA, 16 nt, Human
cauucgguguggugca

SEQ ID NO: 3773336 - RNA, 17 nt, Human
cauucguacauaauacu

SEQ ID NO: 3773337 - RNA, 16 nt, Human
cauucuacuugcucug

SEQ ID NO: 3773338 - RNA, 20 nt, Human
cauucuacuugcucuggacc

SEQ ID NO: 3773339 - RNA, 23 nt, Human
cauucuacuugcucuggaccugc

SEQ ID NO: 3773340 - RNA, 18 nt, Human
cauucuagguuugcaaga

SEQ ID NO: 3773341 - RNA, 14 nt, Human
cauucuaucuacug

SEQ ID NO: 3773342 - RNA, 13 nt, Human
cauucuauugccu

SEQ ID NO: 3773343 - RNA, 14 nt, Human
cauucuauugccuu

SEQ ID NO: 3773344 - RNA, 22 nt, Human
cauucuauugccuucuuugaag

SEQ ID NO: 3773345 - RNA, 17 nt, Human
cauucuauuuuagaaua

SEQ ID NO: 3773346 - RNA, 14 nt, Human
cauucucaagcccu

SEQ ID NO: 3773347 - RNA, 21 nt, Human
cauucucaagggacguccucc

SEQ ID NO: 3773348 - RNA, 16 nt, Human
cauucucaggcaccag

SEQ ID NO: 3773349 - RNA, 17 nt, Human
cauucucaggcaccagu

SEQ ID NO: 3773350 - RNA, 15 nt, Human
cauucucaguuuuuc

SEQ ID NO: 3773351 - RNA, 23 nt, Human
cggucucggaucaggcucccagg

SEQ ID NO: 3773352 - RNA, 19 nt, Human
cggucugcaagucagagga

SEQ ID NO: 3773353 - RNA, 21 nt, Human
cggucuguucuguuucaaggc

SEQ ID NO: 3773354 - RNA, 15 nt, Human
cggugaauggcuuug

SEQ ID NO: 3773355 - RNA, 22 nt, Human
cggugaauggcuuuguauagaa

SEQ ID NO: 3773356 - RNA, 21 nt, Human
cggugacaaagauggcucaga

SEQ ID NO: 3773357 - RNA, 23 nt, Human
cggugcauacacccccaccuccu

SEQ ID NO: 3773358 - RNA, 14 nt, Human
cggugcccaagcca

SEQ ID NO: 3773359 - RNA, 20 nt, Human
cggugccuggguggggcugc

SEQ ID NO: 3773360 - RNA, 17 nt, Human
cggugccuuuauuucca

SEQ ID NO: 3773361 - RNA, 21 nt, Human
cggugccuuuauuuccacugu

SEQ ID NO: 3773362 - RNA, 22 nt, Human
cggugccuuuuuucacggaagu

SEQ ID NO: 3773363 - RNA, 21 nt, Human
cggugcuaucucccccagccc

SEQ ID NO: 3773364 - RNA, 23 nt, Human
cggugcuaucucccccagcccca

SEQ ID NO: 3773365 - RNA, 13 nt, Human
cggugcuccaggc

SEQ ID NO: 3773366 - RNA, 14 nt, Human
cggugcuccaggca

SEQ ID NO: 3773367 - RNA, 22 nt, Human
cggugcuguccucagguggcca

SEQ ID NO: 3773368 - RNA, 18 nt, Human
cggugcugugagggaggg

SEQ ID NO: 3773369 - RNA, 19 nt, Human
cggugcugugagggagggg

SEQ ID NO: 3773370 - RNA, 16 nt, Human
cgguggacccagacac

SEQ ID NO: 3773371 - RNA, 14 nt, Human
cgguggaggccagg

SEQ ID NO: 3773372 - RNA, 16 nt, Human
cgguggcccugucccu

SEQ ID NO: 3773373 - RNA, 20 nt, Human
cgguggcugacaccuguaau

SEQ ID NO: 3773374 - RNA, 12 nt, Human
cgguggcugggc

SEQ ID NO: 3773375 - RNA, 21 nt, Human
cgguggcugggcagagcugca

SEQ ID NO: 3773376 - RNA, 18 nt, Human
cggugggacccccguggg

SEQ ID NO: 3773377 - RNA, 16 nt, Human
cggugggacucguggc

SEQ ID NO: 3773378 - RNA, 22 nt, Human
cggugggacucguggcugucaa

SEQ ID NO: 3773379 - RNA, 15 nt, Human
cggugggcacccacc

SEQ ID NO: 3773380 - RNA, 18 nt, Human
cggugggcacccacccug

SEQ ID NO: 3773381 - RNA, 13 nt, Human
cggugggccuggu

SEQ ID NO: 3773382 - RNA, 18 nt, Human
cggugggccuugcugggg

SEQ ID NO: 3773383 - RNA, 19 nt, Human
cggugggccuuguccccug

SEQ ID NO: 3773384 - RNA, 11 nt, Human
cggugggggua

SEQ ID NO: 3773385 - RNA, 22 nt, Human
cgguggggguagggggcuggag

SEQ ID NO: 3773386 - RNA, 17 nt, Human
cggugguaccaggucuc

SEQ ID NO: 3773387 - RNA, 22 nt, Human
cggugguuguuggggcuucuug

SEQ ID NO: 3773388 - RNA, 15 nt, Human
cgguguccauuuaua

SEQ ID NO: 3773389 - RNA, 21 nt, Human
cgguguccauuuauagaauaa

SEQ ID NO: 3773390 - RNA, 14 nt, Human
cgguguccccacca

SEQ ID NO: 3773391 - RNA, 22 nt, Human
cgguguccccaccaucugcugu

SEQ ID NO: 3773392 - RNA, 14 nt, Human
cgguguccccagag

SEQ ID NO: 3773393 - RNA, 11 nt, Human
cggugucucuc

SEQ ID NO: 3773394 - RNA, 15 nt, Human
cggugucuuguucug

SEQ ID NO: 3773395 - RNA, 13 nt, Human
cgguguggagaag

SEQ ID NO: 3773396 - RNA, 16 nt, Human
cggugugggcuguguc

SEQ ID NO: 3773397 - RNA, 18 nt, Human
cgguguggugcaguguga

SEQ ID NO: 3773398 - RNA, 20 nt, Human
cgguguggugcagugugaaa

SEQ ID NO: 3773399 - RNA, 23 nt, Human
cgguguuuaagacauuuuuggaa

SEQ ID NO: 3773400 - RNA, 14 nt, Human
cgguuaacaaauaa

SEQ ID NO: 3773401 - RNA, 18 nt, Human
cgguuauaaaaaaugguu

SEQ ID NO: 3773402 - RNA, 20 nt, Human
cgguuaugaaauucaccccc

SEQ ID NO: 3773403 - RNA, 15 nt, Human
cgguucaccagccuc

SEQ ID NO: 3773404 - RNA, 22 nt, Human
cgguucacucuucucagccacu

SEQ ID NO: 3773405 - RNA, 20 nt, Human
cgguucaggaaaauugaaug

SEQ ID NO: 3773406 - RNA, 13 nt, Human
cgguucaguguuu

SEQ ID NO: 3773407 - RNA, 19 nt, Human
cgguuccacgucccccugg

SEQ ID NO: 3773408 - RNA, 19 nt, Human
cgguuccucguucucccug

SEQ ID NO: 3773409 - RNA, 21 nt, Human
cgguugaguuuugacugcuug

SEQ ID NO: 3773410 - RNA, 13 nt, Human
cgguuuccaggga

SEQ ID NO: 3773411 - RNA, 18 nt, Human
cgguuucgaagucauuaa

SEQ ID NO: 3773412 - RNA, 11 nt, Human
cgguuucucca

SEQ ID NO: 3773413 - RNA, 19 nt, Human
cgguuucuuuuuaaguaau

SEQ ID NO: 3773414 - RNA, 21 nt, Human
cgguuuggggagcagagacac

SEQ ID NO: 3773415 - RNA, 15 nt, Human
cgguuuuuuuccugu

SEQ ID NO: 3773416 - RNA, 16 nt, Human
cguaaaaacugaaguu

SEQ ID NO: 3773417 - RNA, 12 nt, Human
cguaaaauggug

SEQ ID NO: 3773418 - RNA, 23 nt, Human
cguaaagguuuauuuuucuguua

SEQ ID NO: 3773419 - RNA, 14 nt, Human
cguaaaguacuugu

SEQ ID NO: 3773420 - RNA, 14 nt, Human
cguaaccagccaga

SEQ ID NO: 3773421 - RNA, 23 nt, Human
cguaaccagccagauccucuugg

SEQ ID NO: 3773422 - RNA, 14 nt, Human
cguaagcacuguuu

SEQ ID NO: 3773423 - RNA, 14 nt, Human
cguaaguacagaga

SEQ ID NO: 3773424 - RNA, 13 nt, Human
cguaauaagguuu

SEQ ID NO: 3773425 - RNA, 15 nt, Human
cguaauaagguuuua

SEQ ID NO: 3773426 - RNA, 23 nt, Human
cguaauaagguuuuaauuuagua

SEQ ID NO: 3773427 - RNA, 13 nt, Human
cguaaugcuuaga

SEQ ID NO: 3773428 - RNA, 14 nt, Human
cguaauucuuauuc

SEQ ID NO: 3773429 - RNA, 18 nt, Human
cguacaaguaguucugua

SEQ ID NO: 3773430 - RNA, 22 nt, Human
cguacaaguaguucuguauuug

SEQ ID NO: 3773431 - RNA, 13 nt, Human
cguacacauuuua

SEQ ID NO: 3773432 - RNA, 17 nt, Human
cguacaggcuggcgcag

SEQ ID NO: 3773433 - RNA, 16 nt, Human
cguacauaauacugaa

SEQ ID NO: 3773434 - RNA, 15 nt, Human
cguaccccacccuca

SEQ ID NO: 3773435 - RNA, 13 nt, Human
cguacuugugauu

SEQ ID NO: 3773436 - RNA, 18 nt, Human
cguagaaguuuuuguacu

SEQ ID NO: 3773437 - RNA, 22 nt, Human
cguagaaucuguguagacgaag

SEQ ID NO: 3773438 - RNA, 14 nt, Human
cguagaugauuuca

SEQ ID NO: 3773439 - RNA, 20 nt, Human
cguagccaaggugggcugag

SEQ ID NO: 3773440 - RNA, 20 nt, Human
cguagcgugcccgugugcau

SEQ ID NO: 3773441 - RNA, 13 nt, Human
cguagcuugucug

SEQ ID NO: 3773442 - RNA, 21 nt, Human
cguaguguagauuuguuuugu

SEQ ID NO: 3773443 - RNA, 14 nt, Human
cguauagaagucuu

SEQ ID NO: 3773444 - RNA, 21 nt, Human
cguaucuccggcucccagccu

SEQ ID NO: 3773445 - RNA, 21 nt, Human
cguaugaaaaugaguugugaa

SEQ ID NO: 3773446 - RNA, 20 nt, Human
cguaugaguuagaauaauaa

SEQ ID NO: 3773447 - RNA, 15 nt, Human
cguauggcuuuauuu

SEQ ID NO: 3773448 - RNA, 21 nt, Human
cguauuuaauagcaaagaauu

SEQ ID NO: 3773449 - RNA, 23 nt, Human
cguauuuaauagcaaagaauuga

SEQ ID NO: 3773450 - RNA, 20 nt, Human
cguauuuuaaaagccacaua

SEQ ID NO: 3773451 - RNA, 21 nt, Human
cgucaacguuguacuguaugu

SEQ ID NO: 3773452 - RNA, 18 nt, Human
cgucaccacgacuggcca

SEQ ID NO: 3773453 - RNA, 18 nt, Human
cgucaccaucucaggcca

SEQ ID NO: 3773454 - RNA, 12 nt, Human
cgucaccucaga

SEQ ID NO: 3773455 - RNA, 12 nt, Human
cgucagccucca

SEQ ID NO: 3773456 - RNA, 13 nt, Human
cgucagccuccag

SEQ ID NO: 3773457 - RNA, 20 nt, Human
cgucagccuccagccucugu

SEQ ID NO: 3773458 - RNA, 16 nt, Human
cgucaggguuggugug

SEQ ID NO: 3773459 - RNA, 20 nt, Human
cgucaggguuggugugcuga

SEQ ID NO: 3773460 - RNA, 22 nt, Human
cgucagucuuuuucuguuguaa

SEQ ID NO: 3773461 - RNA, 14 nt, Human
cgucaucuaguuuu

SEQ ID NO: 3773462 - RNA, 22 nt, Human
cgucaugaggagauucugccuu

SEQ ID NO: 3773463 - RNA, 22 nt, Human
cguccacgugcguguuuucuga

SEQ ID NO: 3773464 - RNA, 19 nt, Human
cguccaggagccugugccu

SEQ ID NO: 3773465 - RNA, 21 nt, Human
cguccaggccgcgcccuuucc

SEQ ID NO: 3773466 - RNA, 23 nt, Human
cguccaucacguuagcuguccca

SEQ ID NO: 3773467 - RNA, 15 nt, Human
cgucccaagauguug

SEQ ID NO: 3773468 - RNA, 21 nt, Human
cguccccucccccaccccugc

SEQ ID NO: 3773469 - RNA, 15 nt, Human
cguccgcccugcucc

SEQ ID NO: 3773470 - RNA, 15 nt, Human
cguccgcgcgccagc

SEQ ID NO: 3773471 - RNA, 20 nt, Human
cguccggcaguucugggugc

SEQ ID NO: 3773472 - RNA, 20 nt, Human
cguccucaccccuguccuca

SEQ ID NO: 3773473 - RNA, 22 nt, Human
cguccucaccccuguccucacu

SEQ ID NO: 3773474 - RNA, 13 nt, Human
cguccucccccug

SEQ ID NO: 3773475 - RNA, 16 nt, Human
cguccucccccugcca

SEQ ID NO: 3773476 - RNA, 17 nt, Human
cguccucccccugccag

SEQ ID NO: 3773477 - RNA, 14 nt, Human
cguccucccgggcc

SEQ ID NO: 3773478 - RNA, 18 nt, Human
cguccucccgggcccucc

SEQ ID NO: 3773479 - RNA, 18 nt, Human
cguccuccguccauauca

SEQ ID NO: 3773480 - RNA, 14 nt, Human
cguccuccucugug

SEQ ID NO: 3773481 - RNA, 14 nt, Human
cguccugccaccug

SEQ ID NO: 3773482 - RNA, 14 nt, Human
cguccugucagugc

SEQ ID NO: 3773483 - RNA, 20 nt, Human
cguccuuacuccugugggag

SEQ ID NO: 3773484 - RNA, 15 nt, Human
cgucgacguagaacc

SEQ ID NO: 3773485 - RNA, 16 nt, Human
cgucgcacagucucuc

SEQ ID NO: 3773486 - RNA, 15 nt, Human
cgucgcccucccagg

SEQ ID NO: 3773487 - RNA, 18 nt, Human
cgucggggggacagcucc

SEQ ID NO: 3773488 - RNA, 15 nt, Human
cgucgguccuggugc

SEQ ID NO: 3773489 - RNA, 15 nt, Human
cgucggucugugccc

SEQ ID NO: 3773490 - RNA, 17 nt, Human
cgucuaaccacagcucc

SEQ ID NO: 3773491 - RNA, 19 nt, Human
cgucuaaccacagcuccuu

SEQ ID NO: 3773492 - RNA, 19 nt, Human
cgucuaagucaugagcuga

SEQ ID NO: 3773493 - RNA, 15 nt, Human
cgucuacccugggau

SEQ ID NO: 3773494 - RNA, 16 nt, Human
cgucuaccugaggggc

SEQ ID NO: 3773495 - RNA, 17 nt, Human
cgucucaaccccucaca

SEQ ID NO: 3773496 - RNA, 14 nt, Human
cgucuccagcugcu

SEQ ID NO: 3773497 - RNA, 21 nt, Human
cgucuccaggggcugcuuccu

SEQ ID NO: 3773498 - RNA, 18 nt, Human
cgucucccaucuuaacuc

SEQ ID NO: 3773499 - RNA, 24 nt, Human
cgucucccccaacagcuggacccu

SEQ ID NO: 3773500 - RNA, 23 nt, Human
cgucucucucccauggagcccca

SEQ ID NO: 3773501 - RNA, 21 nt, Human
cgucucuuuuacccuggcccc

SEQ ID NO: 3773502 - RNA, 24 nt, Human
cgucuggaggggccccugcuucuc

SEQ ID NO: 3773503 - RNA, 17 nt, Human
cgucugggguucagccc

SEQ ID NO: 3773504 - RNA, 18 nt, Human
cgucugggguucagcccc

SEQ ID NO: 3773505 - RNA, 12 nt, Human
cgucuggguggc

SEQ ID NO: 3773506 - RNA, 15 nt, Human
cgucuguccaucugc

SEQ ID NO: 3773507 - RNA, 19 nt, Human
cgucuguggcuuucagccu

SEQ ID NO: 3773508 - RNA, 11 nt, Human
cgucugugugc

SEQ ID NO: 3773509 - RNA, 21 nt, Human
cgucugugugugaccccuccu

SEQ ID NO: 3773510 - RNA, 14 nt, Human
cgucuguucccccu

SEQ ID NO: 3773511 - RNA, 13 nt, Human
cgucuucagccua

SEQ ID NO: 3773512 - RNA, 19 nt, Human
cgucuuccgccccugccug

SEQ ID NO: 3773513 - RNA, 20 nt, Human
cgucuuccgccccugccugc

SEQ ID NO: 3773514 - RNA, 16 nt, Human
cgucuuccgucucccc

SEQ ID NO: 3773515 - RNA, 17 nt, Human
cgucuuccgucuccccc

SEQ ID NO: 3773516 - RNA, 22 nt, Human
cgucuugguguaauuugaagau

SEQ ID NO: 3773517 - RNA, 18 nt, Human
cgugaaaacggagcugaa

SEQ ID NO: 3773518 - RNA, 17 nt, Human
cgugaacccaggaggcg

SEQ ID NO: 3773519 - RNA, 16 nt, Human
cgugaagauacuuugu

SEQ ID NO: 3773520 - RNA, 17 nt, Human
cgugaagauacuuugua

SEQ ID NO: 3773521 - RNA, 18 nt, Human
cgugaagauacuuuguau

SEQ ID NO: 3773522 - RNA, 18 nt, Human
cgugaaugggugcccaca

SEQ ID NO: 3773523 - RNA, 19 nt, Human
cgugacaauaaaacauuaa

SEQ ID NO: 3773524 - RNA, 23 nt, Human
cgugaccaacuagacauucuguc

SEQ ID NO: 3773525 - RNA, 14 nt, Human
cgugacccucugcu

SEQ ID NO: 3773526 - RNA, 20 nt, Human
cgugaccggacuuuucugca

SEQ ID NO: 3773527 - RNA, 12 nt, Human
cgugaccugguc

SEQ ID NO: 3773528 - RNA, 16 nt, Human
cgugacgcugaauaaa

SEQ ID NO: 3773529 - RNA, 14 nt, Human
cgugacucacccaa

SEQ ID NO: 3773530 - RNA, 16 nt, Human
cgugacugccccaacu

SEQ ID NO: 3773531 - RNA, 22 nt, Human
cgugacugccccaacuccugga

SEQ ID NO: 3773532 - RNA, 13 nt, Human
cgugagaccugcc

SEQ ID NO: 3773533 - RNA, 16 nt, Human
cgugagaccugccccu

SEQ ID NO: 3773534 - RNA, 14 nt, Human
cgugagccacugca

SEQ ID NO: 3773535 - RNA, 13 nt, Human
cgugagccaggua

SEQ ID NO: 3773536 - RNA, 20 nt, Human
cgugagcgccugugcacaca

SEQ ID NO: 3773537 - RNA, 16 nt, Human
cgugaggucccaggaa

SEQ ID NO: 3773538 - RNA, 19 nt, Human
cgugagugaaccaucauua

SEQ ID NO: 3773539 - RNA, 19 nt, Human
cgugagugucucuugucua

SEQ ID NO: 3773540 - RNA, 20 nt, Human
cgugaguucucagggcuccu

SEQ ID NO: 3773541 - RNA, 21 nt, Human
cgugaguucucagggcuccug

SEQ ID NO: 3773542 - RNA, 13 nt, Human
cgugauacauuug

SEQ ID NO: 3773543 - RNA, 13 nt, Human
cgugauccacccg

SEQ ID NO: 3773544 - RNA, 15 nt, Human
cgugaucucagcuca

SEQ ID NO: 3773545 - RNA, 23 nt, Human
cgugauguaggguaaggugccuu

SEQ ID NO: 3773546 - RNA, 18 nt, Human
cgugcaaaacaugcuacc

SEQ ID NO: 3773547 - RNA, 21 nt, Human
cgugcaguggugcgaucuggg

SEQ ID NO: 3773548 - RNA, 14 nt, Human
cgugcauaccacuu

SEQ ID NO: 3773549 - RNA, 19 nt, Human
cgugcauaccacuuuuguu

SEQ ID NO: 3773550 - RNA, 23 nt, Human
cgugcauaccacuuuuguucuug

SEQ ID NO: 3773551 - RNA, 16 nt, Human
cgugcauguguguuca

SEQ ID NO: 3773552 - RNA, 23 nt, Human
cgugcauuagcacagauuuuaau

SEQ ID NO: 3773553 - RNA, 21 nt, Human
cgugcauuggaagaccccacc

SEQ ID NO: 3773554 - RNA, 21 nt, Human
cgugcauugugcuucuuucuu

SEQ ID NO: 3773555 - RNA, 18 nt, Human
cgugccaaagucucccuu

SEQ ID NO: 3773556 - RNA, 19 nt, Human
cgugccaggcccggggcug

SEQ ID NO: 3773557 - RNA, 22 nt, Human
cgugccagucgcgcugccugug

SEQ ID NO: 3773558 - RNA, 13 nt, Human
cgugccccugcug

SEQ ID NO: 3773559 - RNA, 15 nt, Human
cgugccccugcugcu

SEQ ID NO: 3773560 - RNA, 10 nt, Human
cgugcccucu

SEQ ID NO: 3773561 - RNA, 12 nt, Human
cgugcccucugu

SEQ ID NO: 3773562 - RNA, 15 nt, Human
cgugccgccugcacu

SEQ ID NO: 3773563 - RNA, 16 nt, Human
cgugccgccugcacuc

SEQ ID NO: 3773564 - RNA, 17 nt, Human
cgugccuccaccaccac

SEQ ID NO: 3773565 - RNA, 18 nt, Human
cgugccuccaccaccacu

SEQ ID NO: 3773566 - RNA, 20 nt, Human
cgugccuccaccaccacugg

SEQ ID NO: 3773567 - RNA, 23 nt, Human
cgugccuccuuccaccucccucc

SEQ ID NO: 3773568 - RNA, 12 nt, Human
cgugccuggcca

SEQ ID NO: 3773569 - RNA, 17 nt, Human
cgugccuggccacgccc

SEQ ID NO: 3773570 - RNA, 16 nt, Human
cgugccuuuugcaccc

SEQ ID NO: 3773571 - RNA, 17 nt, Human
cgugccuuuugcacccc

SEQ ID NO: 3773572 - RNA, 20 nt, Human
cgugccuuuugcaccccucc

SEQ ID NO: 3773573 - RNA, 23 nt, Human
cgugccuuuugcaccccucccau

SEQ ID NO: 3773574 - RNA, 19 nt, Human
cgugcguguuuucugacug

SEQ ID NO: 3773575 - RNA, 14 nt, Human
cgugcuaaauuuuc

SEQ ID NO: 3773576 - RNA, 12 nt, Human
cgugcuaaggac

SEQ ID NO: 3773577 - RNA, 15 nt, Human
cgugcuaaggacuug

SEQ ID NO: 3773578 - RNA, 17 nt, Human
cgugcuccagccuggcu

SEQ ID NO: 3773579 - RNA, 17 nt, Human
cgugcugacagcugcuc

SEQ ID NO: 3773580 - RNA, 12 nt, Human
cgugcugggcag

SEQ ID NO: 3773581 - RNA, 15 nt, Human
cgugcugggcggcug

SEQ ID NO: 3773582 - RNA, 22 nt, Human
cgugcuuguuugcucaccuggg

SEQ ID NO: 3773583 - RNA, 15 nt, Human
cguggaaagggugcu

SEQ ID NO: 3773584 - RNA, 19 nt, Human
cguggaaccucugucucau

SEQ ID NO: 3773585 - RNA, 22 nt, Human
cguggaaugcccuucacuguca

SEQ ID NO: 3773586 - RNA, 13 nt, Human
cguggacucugca

SEQ ID NO: 3773587 - RNA, 16 nt, Human
cguggacucugcacau

SEQ ID NO: 3773588 - RNA, 20 nt, Human
cguggagaaucacaggcugg

SEQ ID NO: 3773589 - RNA, 23 nt, Human
cguggagaaucacaggcugggcu

SEQ ID NO: 3773590 - RNA, 20 nt, Human
cguggagagcuggugcccgg

SEQ ID NO: 3773591 - RNA, 12 nt, Human
cguggagaggga

SEQ ID NO: 3773592 - RNA, 21 nt, Human
cguggagagggaugaggugcu

SEQ ID NO: 3773593 - RNA, 15 nt, Human
cguggagccagggag

SEQ ID NO: 3773594 - RNA, 20 nt, Human
cguggagcuuaagccacugc

SEQ ID NO: 3773595 - RNA, 22 nt, Human
cguggaggaaugcucccccauc

SEQ ID NO: 3773596 - RNA, 16 nt, Human
cguggaggagcagugc

SEQ ID NO: 3773597 - RNA, 13 nt, Human
cguggaggcugcu

SEQ ID NO: 3773598 - RNA, 15 nt, Human
cguggagggaggccc

SEQ ID NO: 3773599 - RNA, 20 nt, Human
cguggagggaggccccaggg

SEQ ID NO: 3773600 - RNA, 18 nt, Human
cguggagggguaggggcu

SEQ ID NO: 3773601 - RNA, 19 nt, Human
cguggagggguaggggcug

SEQ ID NO: 3773602 - RNA, 13 nt, Human
cguggauuaaacu

SEQ ID NO: 3773603 - RNA, 13 nt, Human
cguggcaaauaua

SEQ ID NO: 3773604 - RNA, 14 nt, Human
cguggcaccuccuc

SEQ ID NO: 3773605 - RNA, 22 nt, Human
cguggcagauaaucagccucuu

SEQ ID NO: 3773606 - RNA, 16 nt, Human
cguggcauguggccug

SEQ ID NO: 3773607 - RNA, 16 nt, Human
cguggccaucccugug

SEQ ID NO: 3773608 - RNA, 16 nt, Human
cguggccccagccugg

SEQ ID NO: 3773609 - RNA, 17 nt, Human
cguggccccagccuggc

SEQ ID NO: 3773610 - RNA, 20 nt, Human
cguggccccagccuggccca

SEQ ID NO: 3773611 - RNA, 16 nt, Human
cguggccucuugagca

SEQ ID NO: 3773612 - RNA, 13 nt, Human
cguggccuuguuc

SEQ ID NO: 3773613 - RNA, 20 nt, Human
cguggccuuguucugucacc

SEQ ID NO: 3773614 - RNA, 14 nt, Human
cguggcucagccag

SEQ ID NO: 3773615 - RNA, 14 nt, Human
cguggcucugcugg

SEQ ID NO: 3773616 - RNA, 15 nt, Human
cguggcucugcuggc

SEQ ID NO: 3773617 - RNA, 18 nt, Human
cguggcugcugugggaaa

SEQ ID NO: 3773618 - RNA, 12 nt, Human
cguggcugcuuc

SEQ ID NO: 3773619 - RNA, 17 nt, Human
cguggcugcuucaagga

SEQ ID NO: 3773620 - RNA, 23 nt, Human
cguggcuguggcauccagagucc

SEQ ID NO: 3773621 - RNA, 23 nt, Human
cgugggaaccccccucccaccca

SEQ ID NO: 3773622 - RNA, 22 nt, Human
cgugggaggcgggaguggagug

SEQ ID NO: 3773623 - RNA, 14 nt, Human
cgugggcauugucu

SEQ ID NO: 3773624 - RNA, 21 nt, Human
cgugggccccacccucgggga

SEQ ID NO: 3773625 - RNA, 17 nt, Human
cgugggcggcagagagg

SEQ ID NO: 3773626 - RNA, 17 nt, Human
cgugggcggggccuugc

SEQ ID NO: 3773627 - RNA, 20 nt, Human
cgugggcuccccucuuccuc

SEQ ID NO: 3773628 - RNA, 20 nt, Human
cguggggcagcacagagagg

SEQ ID NO: 3773629 - RNA, 15 nt, Human
cguggggcagggagc

SEQ ID NO: 3773630 - RNA, 22 nt, Human
cguggggcagggagcugggccc

SEQ ID NO: 3773631 - RNA, 11 nt, Human
cgugggucaga

SEQ ID NO: 3773632 - RNA, 12 nt, Human
cgugggucagaa

SEQ ID NO: 3773633 - RNA, 14 nt, Human
cgugggucagaaga

SEQ ID NO: 3773634 - RNA, 19 nt, Human
cguggguccugaggccugc

SEQ ID NO: 3773635 - RNA, 20 nt, Human
cgugggucuguuuuccuuuc

SEQ ID NO: 3773636 - RNA, 13 nt, Human
cgugggugugugc

SEQ ID NO: 3773637 - RNA, 23 nt, Human
cguggguguguguagccaagguc

SEQ ID NO: 3773638 - RNA, 15 nt, Human
cgugguaugucugcc

SEQ ID NO: 3773639 - RNA, 15 nt, Human
cguggucaagcacuc

SEQ ID NO: 3773640 - RNA, 16 nt, Human
cguggucccugaggau

SEQ ID NO: 3773641 - RNA, 21 nt, Human
cguggugaucaauuaaaugua

SEQ ID NO: 3773642 - RNA, 21 nt, Human
cgugguggaagaggggacagg

SEQ ID NO: 3773643 - RNA, 14 nt, Human
cgugguggacaugc

SEQ ID NO: 3773644 - RNA, 15 nt, Human
cgugguggucccugg

SEQ ID NO: 3773645 - RNA, 23 nt, Human
cgugguugaguggggggaacgcc

SEQ ID NO: 3773646 - RNA, 12 nt, Human
cguguaaaccaa

SEQ ID NO: 3773647 - RNA, 15 nt, Human
cguguaaaccaaagc

SEQ ID NO: 3773648 - RNA, 10 nt, Human
cguguacaua

SEQ ID NO: 3773649 - RNA, 15 nt, Human
cguguauccuggggc

SEQ ID NO: 3773650 - RNA, 16 nt, Human
cguguauccuggggcu

SEQ ID NO: 3773651 - RNA, 15 nt, Human
cgugucaagcugcuc

SEQ ID NO: 3773652 - RNA, 13 nt, Human
cguguccccgggg

SEQ ID NO: 3773653 - RNA, 22 nt, Human
cguguccccuauccuacuuccc

SEQ ID NO: 3773654 - RNA, 18 nt, Human
cguguccccugacagggc

SEQ ID NO: 3773655 - RNA, 15 nt, Human
cgugucgugggugug

SEQ ID NO: 3773656 - RNA, 12 nt, Human
cgugucugaauc

SEQ ID NO: 3773657 - RNA, 14 nt, Human
cgugucuguauuua

SEQ ID NO: 3773658 - RNA, 21 nt, Human
cgugugagaagugaaugcugg

SEQ ID NO: 3773659 - RNA, 23 nt, Human
cgugugagaagugaaugcuggga

SEQ ID NO: 3773660 - RNA, 15 nt, Human
cgugugauuuuucug

SEQ ID NO: 3773661 - RNA, 12 nt, Human
cgugugcugugu

SEQ ID NO: 3773662 - RNA, 23 nt, Human
cgugugggagaccggccugccag

SEQ ID NO: 3773663 - RNA, 21 nt, Human
cguguguggguggauauaaau

SEQ ID NO: 3773664 - RNA, 22 nt, Human
cguguguggguggauauaaaua

SEQ ID NO: 3773665 - RNA, 20 nt, Human
cgugugugugcguccugucg

SEQ ID NO: 3773666 - RNA, 15 nt, Human
cguguguucuaucca

SEQ ID NO: 3773667 - RNA, 15 nt, Human
cguguuaugacucca

SEQ ID NO: 3773668 - RNA, 15 nt, Human
cguguuccccucuug

SEQ ID NO: 3773669 - RNA, 13 nt, Human
cguguucucagag

SEQ ID NO: 3773670 - RNA, 18 nt, Human
cguguuugucucuucugg

SEQ ID NO: 3773671 - RNA, 13 nt, Human
cguuaaaauacca

SEQ ID NO: 3773672 - RNA, 20 nt, Human
cguuaagggaaggaacucug

SEQ ID NO: 3773673 - RNA, 22 nt, Human
cguuacucagggcuccucccag

SEQ ID NO: 3773674 - RNA, 14 nt, Human
cguuagaggaaaaa

SEQ ID NO: 3773675 - RNA, 17 nt, Human
cguuagaggaaaaauau

SEQ ID NO: 3773676 - RNA, 18 nt, Human
cguuaggauacugccucc

SEQ ID NO: 3773677 - RNA, 17 nt, Human
cguuagggaagagaaac

SEQ ID NO: 3773678 - RNA, 23 nt, Human
cguuaucuaauagggcaauuaau

SEQ ID NO: 3773679 - RNA, 21 nt, Human
cguucauggaacgcguugaaa

SEQ ID NO: 3773680 - RNA, 21 nt, Human
cguuccaccccaagagaacuc

SEQ ID NO: 3773681 - RNA, 22 nt, Human
cguuccgggcaaaugccagggc

SEQ ID NO: 3773682 - RNA, 16 nt, Human
cguuccuuucuuuucc

SEQ ID NO: 3773683 - RNA, 15 nt, Human
cguucucacacccac

SEQ ID NO: 3773684 - RNA, 17 nt, Human
cguucugcuggccugga

SEQ ID NO: 3773685 - RNA, 12 nt, Human
cguucugugcac

SEQ ID NO: 3773686 - RNA, 19 nt, Human
cguucuuaggcugcuggga

SEQ ID NO: 3773687 - RNA, 13 nt, Human
cguucuuguucug

SEQ ID NO: 3773688 - RNA, 23 nt, Human
cguugaaauuguaauuauaucug

SEQ ID NO: 3773689 - RNA, 18 nt, Human
cguugauguuggcuggga

SEQ ID NO: 3773690 - RNA, 16 nt, Human
cguuggagaagcccgu

SEQ ID NO: 3773691 - RNA, 17 nt, Human
cguuggcuagauuaacc

SEQ ID NO: 3773692 - RNA, 14 nt, Human
cguugguccagagc

SEQ ID NO: 3773693 - RNA, 21 nt, Human
cguuguaaaauauagcuguac

SEQ ID NO: 3773694 - RNA, 24 nt, Human
cguuguaaaauauagcuguacaaa

SEQ ID NO: 3773695 - RNA, 13 nt, Human
cguugucucccug

SEQ ID NO: 3773696 - RNA, 18 nt, Human
cguugucucccuggcccu

SEQ ID NO: 3773697 - RNA, 18 nt, Human
cguuguguuuuuuaagau

SEQ ID NO: 3773698 - RNA, 18 nt, Human
cguuguuuacuuaaagau

SEQ ID NO: 3773699 - RNA, 19 nt, Human
cguuuaaaguguauuauaa

SEQ ID NO: 3773700 - RNA, 23 nt, Human
cguuuaaaguguauuauaacagu

SEQ ID NO: 3773701 - RNA, 13 nt, Human
cguuuaaaguucu

SEQ ID NO: 3773702 - RNA, 22 nt, Human
cguuuaagacuguaaugaaucu

SEQ ID NO: 3773703 - RNA, 21 nt, Human
cguuuaaggugagcauaaauc

SEQ ID NO: 3773704 - RNA, 13 nt, Human
cguuuaaugaaug

SEQ ID NO: 3773705 - RNA, 14 nt, Human
cguuuaaugaaugc

SEQ ID NO: 3773706 - RNA, 18 nt, Human
cguuuaaugaaugcuuaa

SEQ ID NO: 3773707 - RNA, 16 nt, Human
cguuuacauuuuagac

SEQ ID NO: 3773708 - RNA, 17 nt, Human
cguuuaccuagaagaag

SEQ ID NO: 3773709 - RNA, 17 nt, Human
cguuuacuaugccugug

SEQ ID NO: 3773710 - RNA, 13 nt, Human
cguuuagaccaag

SEQ ID NO: 3773711 - RNA, 18 nt, Human
cguuuagcugacaaaaua

SEQ ID NO: 3773712 - RNA, 14 nt, Human
cguuuauuuucaag

SEQ ID NO: 3773713 - RNA, 22 nt, Human
cguuucagcgacuccguuggcc

SEQ ID NO: 3773714 - RNA, 20 nt, Human
cguuuccugagaagugucua

SEQ ID NO: 3773715 - RNA, 14 nt, Human
cguuuccuuuguug

SEQ ID NO: 3773716 - RNA, 17 nt, Human
cguuugaccuuuuaugu

SEQ ID NO: 3773717 - RNA, 21 nt, Human
cguuugagaagaaaacaucua

SEQ ID NO: 3773718 - RNA, 20 nt, Human
cguuugcccaaaucugccua

SEQ ID NO: 3773719 - RNA, 18 nt, Human
cguuuggugcuucucaga

SEQ ID NO: 3773720 - RNA, 20 nt, Human
cguuuguguucuguuuuguu

SEQ ID NO: 3773721 - RNA, 12 nt, Human
cguuuguuuguu

SEQ ID NO: 3773722 - RNA, 13 nt, Human
cguuuuaaaaaag

SEQ ID NO: 3773723 - RNA, 13 nt, Human
cguuuuaaggacu

SEQ ID NO: 3773724 - RNA, 23 nt, Human
cguuuuaaggacugacugaggca

SEQ ID NO: 3773725 - RNA, 12 nt, Human
cguuuucuaauu

SEQ ID NO: 3773726 - RNA, 17 nt, Human
cguuuucuaauugcuua

SEQ ID NO: 3773727 - RNA, 15 nt, Human
cguuuucuguuugga

SEQ ID NO: 3773728 - RNA, 14 nt, Human
cguuuucuuaaagu

SEQ ID NO: 3773729 - RNA, 23 nt, Human
cguuuuuauaaaaaauggugccu

SEQ ID NO: 3773730 - RNA, 13 nt, Human
cguuuuuccuuua

SEQ ID NO: 3773731 - RNA, 16 nt, Human
cguuuuugguggaguc

SEQ ID NO: 3773732 - RNA, 21 nt, Human
cguuuuuguauuuucaugaaa

SEQ ID NO: 3773733 - RNA, 16 nt, Human
cguuuuuuccucagug

SEQ ID NO: 3773734 - RNA, 20 nt, Human
cguuuuuuuuuuguuuguug

SEQ ID NO: 3773735 - RNA, 16 nt, Human
cuaaaaaacaaaacaa

SEQ ID NO: 3773736 - RNA, 21 nt, Human
cuaaaaagaaggaaaaugauc

SEQ ID NO: 3773737 - RNA, 16 nt, Human
cuaaaaagauuagcaa

SEQ ID NO: 3773738 - RNA, 12 nt, Human
cuaaaaagcaac

SEQ ID NO: 3773739 - RNA, 13 nt, Human
cuaaaaaguauaa

SEQ ID NO: 3773740 - RNA, 16 nt, Human
cuaaaaaguauaaaau

SEQ ID NO: 3773741 - RNA, 11 nt, Human
cuaaaaauaaa

SEQ ID NO: 3773742 - RNA, 11 nt, Human
cuaaaaauaau

SEQ ID NO: 3773743 - RNA, 21 nt, Human
cuaaaaauagacuuaaaucuc

SEQ ID NO: 3773744 - RNA, 13 nt, Human
cuaaaaauccaga

SEQ ID NO: 3773745 - RNA, 22 nt, Human
cuaaaaaugcaaaaaaaauuag

SEQ ID NO: 3773746 - RNA, 13 nt, Human
cuaaaaaugcaac

SEQ ID NO: 3773747 - RNA, 14 nt, Human
cuaaaaauuggugu

SEQ ID NO: 3773748 - RNA, 20 nt, Human
cuaaaacaaaagcucaucca

SEQ ID NO: 3773749 - RNA, 17 nt, Human
cuaaaacaacagaugua

SEQ ID NO: 3773750 - RNA, 22 nt, Human
cuaaaaccugagcuagaagcug

SEQ ID NO: 3773751 - RNA, 16 nt, Human
cuaaaacuaaauagca

SEQ ID NO: 3773752 - RNA, 17 nt, Human
cuaaaacucuuucggua

SEQ ID NO: 3773753 - RNA, 17 nt, Human
cuaaaacuguacuuuga

SEQ ID NO: 3773754 - RNA, 20 nt, Human
cuaaaagaauauucagagaa

SEQ ID NO: 3773755 - RNA, 22 nt, Human
cuaaaagacuucccuaacacuu

SEQ ID NO: 3773756 - RNA, 15 nt, Human
cuaaaagauccuuuu

SEQ ID NO: 3773757 - RNA, 22 nt, Human
cuaaaagcaaaauaaaaacuau

SEQ ID NO: 3773758 - RNA, 13 nt, Human
cuaaaaggcccag

SEQ ID NO: 3773759 - RNA, 14 nt, Human
cuaaaaggcccaga

SEQ ID NO: 3773760 - RNA, 14 nt, Human
cuaaaaguaaacau

SEQ ID NO: 3773761 - RNA, 19 nt, Human
cuaaaagugggcuugauuc

SEQ ID NO: 3773762 - RNA, 23 nt, Human
cuaaaagugggcuugauucugca

SEQ ID NO: 3773763 - RNA, 17 nt, Human
cuaaaauaauuuuguaa

SEQ ID NO: 3773764 - RNA, 18 nt, Human
cuaaaauaauuuuguaau

SEQ ID NO: 3773765 - RNA, 22 nt, Human
cuaaaauacauuuaaaacuuac

SEQ ID NO: 3773766 - RNA, 19 nt, Human
cuaaaauagccacuuaccu

SEQ ID NO: 3773767 - RNA, 23 nt, Human
cuaaaauauuuauuuuuuuuaag

SEQ ID NO: 3773768 - RNA, 21 nt, Human
cuaaaaucuuauaguucuagg

SEQ ID NO: 3773769 - RNA, 22 nt, Human
cuaaaaucuuauaguucuaggc

SEQ ID NO: 3773770 - RNA, 14 nt, Human
cuaaaaucuuggaa

SEQ ID NO: 3773771 - RNA, 16 nt, Human
cuaaaaucuuggaagu

SEQ ID NO: 3773772 - RNA, 21 nt, Human
cuaaaauggacuguggugacu

SEQ ID NO: 3773773 - RNA, 20 nt, Human
cuaaaaugugauguucuaag

SEQ ID NO: 3773774 - RNA, 21 nt, Human
cuaaaaugugauguucuaagg

SEQ ID NO: 3773775 - RNA, 13 nt, Human
cuaaaauguucua

SEQ ID NO: 3773776 - RNA, 17 nt, Human
cuaaaauguuuucagcu

SEQ ID NO: 3773777 - RNA, 19 nt, Human
cuaaaauugaguucuuccu

SEQ ID NO: 3773778 - RNA, 13 nt, Human
cuaaaauuugaag

SEQ ID NO: 3773779 - RNA, 23 nt, Human
cuaaaauuugcccucccaucccg

SEQ ID NO: 3773780 - RNA, 15 nt, Human
cuaaacaaaaaaagg

SEQ ID NO: 3773781 - RNA, 19 nt, Human
cuaaacaagaaucagucua

SEQ ID NO: 3773782 - RNA, 19 nt, Human
cuaaacaaugcugauuugg

SEQ ID NO: 3773783 - RNA, 16 nt, Human
cuaaacacugcgcuuu

SEQ ID NO: 3773784 - RNA, 16 nt, Human
cuaaacagacuauuua

SEQ ID NO: 3773785 - RNA, 18 nt, Human
cuaaacagacuauuuaac

SEQ ID NO: 3773786 - RNA, 17 nt, Human
cuaaacagauauaaaug

SEQ ID NO: 3773787 - RNA, 19 nt, Human
cuaaacccaauccaaaugg

SEQ ID NO: 3773788 - RNA, 19 nt, Human
cuaaaccuuaguacugagu

SEQ ID NO: 3773789 - RNA, 16 nt, Human
cuaaacggauuccaaa

SEQ ID NO: 3773790 - RNA, 19 nt, Human
cuaaacguaagcacuguuu

SEQ ID NO: 3773791 - RNA, 20 nt, Human
cuaaacguguauguuuuuca

SEQ ID NO: 3773792 - RNA, 22 nt, Human
cuaaacguguauguuuuucagu

SEQ ID NO: 3773793 - RNA, 15 nt, Human
cuaaacuaagaugug

SEQ ID NO: 3773794 - RNA, 15 nt, Human
cuaaacuaucuuuuu

SEQ ID NO: 3773795 - RNA, 17 nt, Human
cuaaacucauuuauaaa

SEQ ID NO: 3773796 - RNA, 19 nt, Human
cuaaacuccaaacauccuc

SEQ ID NO: 3773797 - RNA, 22 nt, Human
cuaaacuccuuccuggccugag

SEQ ID NO: 3773798 - RNA, 16 nt, Human
cuaaacucugaauaag

SEQ ID NO: 3773799 - RNA, 11 nt, Human
cuaaacugcau

SEQ ID NO: 3773800 - RNA, 21 nt, Human
cuaaacugcccccucugcccu

SEQ ID NO: 3773801 - RNA, 14 nt, Human
cuaaacuggagacu

SEQ ID NO: 3773802 - RNA, 17 nt, Human
cuaaacuggagacugug

SEQ ID NO: 3773803 - RNA, 20 nt, Human
cuaaacuuccccaucuucua

SEQ ID NO: 3773804 - RNA, 13 nt, Human
cuaaacuuuucug

SEQ ID NO: 3773805 - RNA, 15 nt, Human
cuaaacuuuucugau

SEQ ID NO: 3773806 - RNA, 16 nt, Human
cuaaacuuuucugaua

SEQ ID NO: 3773807 - RNA, 17 nt, Human
cuaaagaaguuugaaca

SEQ ID NO: 3773808 - RNA, 16 nt, Human
cuaaagaccaaacuuc

SEQ ID NO: 3773809 - RNA, 18 nt, Human
cuaaagagagaauguaga

SEQ ID NO: 3773810 - RNA, 19 nt, Human
cuaaagagcacuuacugua

SEQ ID NO: 3773811 - RNA, 15 nt, Human
cuaaagagcccuugc

SEQ ID NO: 3773812 - RNA, 17 nt, Human
cuaaagagcccuugccu

SEQ ID NO: 3773813 - RNA, 18 nt, Human
cuaaagagcccuugccuc

SEQ ID NO: 3773814 - RNA, 18 nt, Human
cuaaagaguuuauuuuaa

SEQ ID NO: 3773815 - RNA, 18 nt, Human
cuaaagauagaguaaaaa

SEQ ID NO: 3773816 - RNA, 20 nt, Human
cuaaagauggaguuucuaag

SEQ ID NO: 3773817 - RNA, 23 nt, Human
cuaaagauggaguuucuaagguc

SEQ ID NO: 3773818 - RNA, 18 nt, Human
cuaaagauucuauaguuc

SEQ ID NO: 3773819 - RNA, 20 nt, Human
cuaaagauucuauaguucua

SEQ ID NO: 3773820 - RNA, 15 nt, Human
cuaaagcaauagaaa

SEQ ID NO: 3773821 - RNA, 14 nt, Human
cuaaagcagccagc

SEQ ID NO: 3773822 - RNA, 18 nt, Human
cuaaagcaguggacacca

SEQ ID NO: 3773823 - RNA, 19 nt, Human
cuaaagcaugaaaugugaa

SEQ ID NO: 3773824 - RNA, 18 nt, Human
cuaaagccaaacauauau

SEQ ID NO: 3773825 - RNA, 17 nt, Human
cuaaagcccaaccuccu

SEQ ID NO: 3773826 - RNA, 13 nt, Human
cuaaaggaguuua

SEQ ID NO: 3773827 - RNA, 15 nt, Human
cuaaagguccacagg

SEQ ID NO: 3773828 - RNA, 16 nt, Human
cuaaagguguauuuaa

SEQ ID NO: 3773829 - RNA, 20 nt, Human
cuaaagguguugucccuucu

SEQ ID NO: 3773830 - RNA, 14 nt, Human
cuaaaguaauuggu

SEQ ID NO: 3773831 - RNA, 15 nt, Human
cuaaaguaugaagca

SEQ ID NO: 3773832 - RNA, 16 nt, Human
cuaaaguauguaaagu

SEQ ID NO: 3773833 - RNA, 23 nt, Human
cuaaaguccuuugagcuccuggg

SEQ ID NO: 3773834 - RNA, 21 nt, Human
cuaaagugaugggcuuucucu

SEQ ID NO: 3773835 - RNA, 22 nt, Human
cuaaaguguauuuuuuuacuaa

SEQ ID NO: 3773836 - RNA, 11 nt, Human
cuaaaguuaua

SEQ ID NO: 3773837 - RNA, 14 nt, Human
cuaaaguucuaaga

SEQ ID NO: 3773838 - RNA, 15 nt, Human
cuaaaguucuaagau

SEQ ID NO: 3773839 - RNA, 18 nt, Human
cuaaauaaaaguuuuaca

SEQ ID NO: 3773840 - RNA, 20 nt, Human
cuaaauaaaaguuuuacaaa

SEQ ID NO: 3773841 - RNA, 20 nt, Human
cuaaauaaaauauaauuguu

SEQ ID NO: 3773842 - RNA, 15 nt, Human
cuaaauaaaaugcua

SEQ ID NO: 3773843 - RNA, 19 nt, Human
cuaaauaaaaugcuagguu

SEQ ID NO: 3773844 - RNA, 15 nt, Human
cuaaauaaaauuugu

SEQ ID NO: 3773845 - RNA, 20 nt, Human
cuaaauaaaauuuguugcau

SEQ ID NO: 3773846 - RNA, 20 nt, Human
cuaaauaaacacauagauuc

SEQ ID NO: 3773847 - RNA, 18 nt, Human
cuaaauaagaaaauaaca

SEQ ID NO: 3773848 - RNA, 20 nt, Human
cuaaauaaucuuacucuaga

SEQ ID NO: 3773849 - RNA, 15 nt, Human
cuaaauagcauguau

SEQ ID NO: 3773850 - RNA, 23 nt, Human
cuaaauagcauguauugugucuu

SEQ ID NO: 3773851 - RNA, 20 nt, Human
cuaaauauauuuuaagacga

SEQ ID NO: 3773852 - RNA, 16 nt, Human
cuaaauauggacugcu

SEQ ID NO: 3773853 - RNA, 23 nt, Human
cuaaauauucagaaucuuuguua

SEQ ID NO: 3773854 - RNA, 13 nt, Human
cuaaauauuuccu

SEQ ID NO: 3773855 - RNA, 16 nt, Human
cuaaauccauuuggaa

SEQ ID NO: 3773856 - RNA, 17 nt, Human
cuaaauccuuuacuguu

SEQ ID NO: 3773857 - RNA, 16 nt, Human
cuaaaucuagacucaa

SEQ ID NO: 3773858 - RNA, 12 nt, Human
cuaaaucuauuu

SEQ ID NO: 3773859 - RNA, 19 nt, Human
cuaaaucuauuuauuaaua

SEQ ID NO: 3773860 - RNA, 20 nt, Human
cuaaaucuccaaaauaaaac

SEQ ID NO: 3773861 - RNA, 16 nt, Human
cuaaaucuccuauuuu

SEQ ID NO: 3773862 - RNA, 17 nt, Human
cuaaaucuccuauuuuu

SEQ ID NO: 3773863 - RNA, 13 nt, Human
cuaaaugcccugc

SEQ ID NO: 3773864 - RNA, 19 nt, Human
cuaaaugccuuagaaaugu

SEQ ID NO: 3773865 - RNA, 15 nt, Human
cuaaaugcugaaaaa

SEQ ID NO: 3773866 - RNA, 18 nt, Human
cuaaauggucgcccagga

SEQ ID NO: 3773867 - RNA, 17 nt, Human
cuaaauguaagaaucau

SEQ ID NO: 3773868 - RNA, 13 nt, Human
cuaaauguuaaag

SEQ ID NO: 3773869 - RNA, 14 nt, Human
cuaaauguuaaaga

SEQ ID NO: 3773870 - RNA, 16 nt, Human
cuaaauguuaaagaug

SEQ ID NO: 3773871 - RNA, 23 nt, Human
cuaaauguuaaagauguagcaaa

SEQ ID NO: 3773872 - RNA, 16 nt, Human
cuaaauguugaaagau

SEQ ID NO: 3773873 - RNA, 21 nt, Human
cuaaauguuuggcauguaaau

SEQ ID NO: 3773874 - RNA, 22 nt, Human
cuaaauuauaguguagaaaaga

SEQ ID NO: 3773875 - RNA, 14 nt, Human
cuaaauuauuuacu

SEQ ID NO: 3773876 - RNA, 16 nt, Human
cuaaauucaugcugcu

SEQ ID NO: 3773877 - RNA, 21 nt, Human
cuaaauucuuuauuucuguca

SEQ ID NO: 3773878 - RNA, 14 nt, Human
cuaaauugaauaau

SEQ ID NO: 3773879 - RNA, 23 nt, Human
cuaaauugacacuuaaaaauggu

SEQ ID NO: 3773880 - RNA, 17 nt, Human
cuaaauugauguugaug

SEQ ID NO: 3773881 - RNA, 15 nt, Human
cuaaauuuaaauuua

SEQ ID NO: 3773882 - RNA, 17 nt, Human
cuaaauuuaaauuuaaa

SEQ ID NO: 3773883 - RNA, 13 nt, Human
cuaaauuuaaugc

SEQ ID NO: 3773884 - RNA, 17 nt, Human
cuaaauuuaaugcugcc

SEQ ID NO: 3773885 - RNA, 18 nt, Human
cuaaauuuaaugcugccu

SEQ ID NO: 3773886 - RNA, 18 nt, Human
cuaaauuuauuauuuaaa

SEQ ID NO: 3773887 - RNA, 14 nt, Human
cuaaauuuuaagug

SEQ ID NO: 3773888 - RNA, 13 nt, Human
cuaaauuuuauau

SEQ ID NO: 3773889 - RNA, 15 nt, Human
cuaaauuuuauaucu

SEQ ID NO: 3773890 - RNA, 15 nt, Human
cuaaauuuucugaaa

SEQ ID NO: 3773891 - RNA, 16 nt, Human
cuaaauuuucugaaac

SEQ ID NO: 3773892 - RNA, 16 nt, Human
cuaacaaaagaugaaa

SEQ ID NO: 3773893 - RNA, 17 nt, Human
cuaacaaaagaugaaag

SEQ ID NO: 3773894 - RNA, 19 nt, Human
cuaacaaaagaugaaagca

SEQ ID NO: 3773895 - RNA, 20 nt, Human
cuaacaacauuguagccuca

SEQ ID NO: 3773896 - RNA, 16 nt, Human
cuaacaaccaaagacu

SEQ ID NO: 3773897 - RNA, 15 nt, Human
cuaacacacagcucc

SEQ ID NO: 3773898 - RNA, 14 nt, Human
cuaacacccagucu

SEQ ID NO: 3773899 - RNA, 17 nt, Human
cuaacacucagaagccu

SEQ ID NO: 3773900 - RNA, 19 nt, Human
cuaacacucagaagccugg

SEQ ID NO: 3773901 - RNA, 13 nt, Human
cuaacacuggccc

SEQ ID NO: 3773902 - RNA, 15 nt, Human
cuaacacuggccccu

SEQ ID NO: 3773903 - RNA, 16 nt, Human
cuaacacuggccccua

SEQ ID NO: 3773904 - RNA, 17 nt, Human
cuaacagcucaggaucu

SEQ ID NO: 3773905 - RNA, 15 nt, Human
cuaacagggaaggca

SEQ ID NO: 3773906 - RNA, 22 nt, Human
cuaacauauaauguuguuauuu

SEQ ID NO: 3773907 - RNA, 23 nt, Human
cuaacauauaauguuguuauuua

SEQ ID NO: 3773908 - RNA, 12 nt, Human
cuaacaucagaa

SEQ ID NO: 3773909 - RNA, 17 nt, Human
cuaacauggaaguacua

SEQ ID NO: 3773910 - RNA, 22 nt, Human
cuaacauggugaaaccccgucu

SEQ ID NO: 3773911 - RNA, 17 nt, Human
cuaacauuauauugcaa

SEQ ID NO: 3773912 - RNA, 20 nt, Human
cuaacauuauauugcaauga

SEQ ID NO: 3773913 - RNA, 22 nt, Human
cuaacauuauauugcaaugaag

SEQ ID NO: 3773914 - RNA, 15 nt, Human
cuaacauuauuuauu

SEQ ID NO: 3773915 - RNA, 21 nt, Human
cuaacauuuuaaauaaaagaa

SEQ ID NO: 3773916 - RNA, 21 nt, Human
cuaacauuuuugauaaagccu

SEQ ID NO: 3773917 - RNA, 21 nt, Human
cuaaccaaaagacaccagcca

SEQ ID NO: 3773918 - RNA, 13 nt, Human
cuaaccaaaugca

SEQ ID NO: 3773919 - RNA, 15 nt, Human
cuaaccaagaggcug

SEQ ID NO: 3773920 - RNA, 16 nt, Human
cuaaccaagaggcugg

SEQ ID NO: 3773921 - RNA, 17 nt, Human
cuaaccaagaggcuggu

SEQ ID NO: 3773922 - RNA, 15 nt, Human
cuaaccaagcugagu

SEQ ID NO: 3773923 - RNA, 20 nt, Human
cuaaccaagcugaguuuccu

SEQ ID NO: 3773924 - RNA, 12 nt, Human
cuaaccaaguuc

SEQ ID NO: 3773925 - RNA, 14 nt, Human
cuaaccacacagcc

SEQ ID NO: 3773926 - RNA, 17 nt, Human
cuaaccacgcuggaccu

SEQ ID NO: 3773927 - RNA, 20 nt, Human
cuaaccacgucugucuucac

SEQ ID NO: 3773928 - RNA, 22 nt, Human
cuaaccccaacgcacaggaaaa

SEQ ID NO: 3773929 - RNA, 13 nt, Human
cuaaccccaggcc

SEQ ID NO: 3773930 - RNA, 23 nt, Human
cuaacccuauacuguaguauucu

SEQ ID NO: 3773931 - RNA, 19 nt, Human
cuaacccuuaucaccagcu

SEQ ID NO: 3773932 - RNA, 22 nt, Human
cuaacccuuugugugcucucca

SEQ ID NO: 3773933 - RNA, 23 nt, Human
cuaacccuuugugugcucuccau

SEQ ID NO: 3773934 - RNA, 15 nt, Human
cuaaccucaucuucu

SEQ ID NO: 3773935 - RNA, 16 nt, Human
cuaaccucgcccucuc

SEQ ID NO: 3773936 - RNA, 21 nt, Human
cuaaccugaccgugggcgggg

SEQ ID NO: 3773937 - RNA, 17 nt, Human
cuaaccuggguucccuu

SEQ ID NO: 3773938 - RNA, 15 nt, Human
cuaaccugugucugc

SEQ ID NO: 3773939 - RNA, 14 nt, Human
cuaaccuugaaugc

SEQ ID NO: 3773940 - RNA, 17 nt, Human
cuaaccuugaaugcugc

SEQ ID NO: 3773941 - RNA, 19 nt, Human
cuaaccuugaaugcugcca

SEQ ID NO: 3773942 - RNA, 20 nt, Human
cuaaccuugaaugcugccag

SEQ ID NO: 3773943 - RNA, 16 nt, Human
cuaaccuugccuggua

SEQ ID NO: 3773944 - RNA, 17 nt, Human
cuaaccuugccugguac

SEQ ID NO: 3773945 - RNA, 22 nt, Human
cuaacgccugagcccagggagg

SEQ ID NO: 3773946 - RNA, 19 nt, Human
cuaacggugcucagggggc

SEQ ID NO: 3773947 - RNA, 15 nt, Human
cuaacguaaauacac

SEQ ID NO: 3773948 - RNA, 17 nt, Human
cuaacguugagccccug

SEQ ID NO: 3773949 - RNA, 13 nt, Human
cuaacuaaacucu

SEQ ID NO: 3773950 - RNA, 20 nt, Human
cuaacuacaaagguuuaaau

SEQ ID NO: 3773951 - RNA, 15 nt, Human
cuaacuagacaccaa

SEQ ID NO: 3773952 - RNA, 21 nt, Human
cuaacuagagcagcccuggag

SEQ ID NO: 3773953 - RNA, 20 nt, Human
cuaacucaaauacacauuug

SEQ ID NO: 3773954 - RNA, 20 nt, Human
cuaacucauacugugcugga

SEQ ID NO: 3773955 - RNA, 17 nt, Human
cuaacucugauguaaau

SEQ ID NO: 3773956 - RNA, 17 nt, Human
cuaacucuucuuucauu

SEQ ID NO: 3773957 - RNA, 16 nt, Human
cuaacugaacuuugaa

SEQ ID NO: 3773958 - RNA, 20 nt, Human
cuaacugcuacaaauacucu

SEQ ID NO: 3773959 - RNA, 13 nt, Human
cuaacuguaaauc

SEQ ID NO: 3773960 - RNA, 15 nt, Human
cuaacuguaaaucau

SEQ ID NO: 3773961 - RNA, 18 nt, Human
cuaacuguaaaucauguu

SEQ ID NO: 3773962 - RNA, 16 nt, Human
cuaacuguauauuugu

SEQ ID NO: 3773963 - RNA, 20 nt, Human
cuaacugugcucaagagguu

SEQ ID NO: 3773964 - RNA, 14 nt, Human
cuaacuugcuuaaa

SEQ ID NO: 3773965 - RNA, 21 nt, Human
cuaacuuggagccccagugcc

SEQ ID NO: 3773966 - RNA, 22 nt, Human
cuaacuuggagccccagugcca

SEQ ID NO: 3773967 - RNA, 14 nt, Human
cuaacuugucuuug

SEQ ID NO: 3773968 - RNA, 22 nt, Human
cuaacuugucuuuggacccuga

SEQ ID NO: 3773969 - RNA, 16 nt, Human
cuaacuuuccuucauu

SEQ ID NO: 3773970 - RNA, 19 nt, Human
cuaacuuuucaaugacauu

SEQ ID NO: 3773971 - RNA, 14 nt, Human
cuaagaaaagauuu

SEQ ID NO: 3773972 - RNA, 22 nt, Human
cuaagaaaagccuaaucacagu

SEQ ID NO: 3773973 - RNA, 20 nt, Human
cuaagaaacauuuauauuga

SEQ ID NO: 3773974 - RNA, 21 nt, Human
cuaagaaacauuuauauugau

SEQ ID NO: 3773975 - RNA, 16 nt, Human
cuaagaaacuuaaauu

SEQ ID NO: 3773976 - RNA, 16 nt, Human
cuaagaaacuuuugua

SEQ ID NO: 3773977 - RNA, 12 nt, Human
cuaagaaagaac

SEQ ID NO: 3773978 - RNA, 20 nt, Human
cuaagaaagaggagugcuug

SEQ ID NO: 3773979 - RNA, 20 nt, Human
cuaagaaauaaaacuguuaa

SEQ ID NO: 3773980 - RNA, 21 nt, Human
cuaagaaauaucugugaaaua

SEQ ID NO: 3773981 - RNA, 22 nt, Human
cuaagaaauaucugugaaauau

SEQ ID NO: 3773982 - RNA, 20 nt, Human
cuaagaaauaugugagauuu

SEQ ID NO: 3773983 - RNA, 22 nt, Human
cuaagaaaucaaguaaugaauc

SEQ ID NO: 3773984 - RNA, 20 nt, Human
cuaagaacaaaagaagcagc

SEQ ID NO: 3773985 - RNA, 15 nt, Human
cuaagaaccuggaac

SEQ ID NO: 3773986 - RNA, 20 nt, Human
cuaagaauacagcuuucuga

SEQ ID NO: 3773987 - RNA, 17 nt, Human
cuaagaauuuuuuauuu

SEQ ID NO: 3773988 - RNA, 16 nt, Human
cuaagacucaaauguu

SEQ ID NO: 3773989 - RNA, 21 nt, Human
cuaagacucaaauguucuaag

SEQ ID NO: 3773990 - RNA, 22 nt, Human
cuaagacugugacaacugucua

SEQ ID NO: 3773991 - RNA, 17 nt, Human
cuaagacuuacucuaag

SEQ ID NO: 3773992 - RNA, 15 nt, Human
cuaagacuuuacuua

SEQ ID NO: 3773993 - RNA, 19 nt, Human
cuaagagaaguagaaauca

SEQ ID NO: 3773994 - RNA, 14 nt, Human
cuaagagagaauga

SEQ ID NO: 3773995 - RNA, 18 nt, Human
cuaagagauucugauuug

SEQ ID NO: 3773996 - RNA, 16 nt, Human
cuaagagcuagcgcug

SEQ ID NO: 3773997 - RNA, 11 nt, Human
cuaagaggcug

SEQ ID NO: 3773998 - RNA, 12 nt, Human
cuaagaggcugc

SEQ ID NO: 3773999 - RNA, 14 nt, Human
cuaagaggcugccc

SEQ ID NO: 3774000 - RNA, 22 nt, Human
cuaagagugcugggcauuuuua

SEQ ID NO: 3774001 - RNA, 12 nt, Human
cuaagagugucc

SEQ ID NO: 3774002 - RNA, 18 nt, Human
cuaagauauacuuguuuu

SEQ ID NO: 3774003 - RNA, 22 nt, Human
cuaagauauacuuguuuuugua

SEQ ID NO: 3774004 - RNA, 18 nt, Human
cuaagaucgguuaacaaa

SEQ ID NO: 3774005 - RNA, 15 nt, Human
cuaagaugacauugc

SEQ ID NO: 3774006 - RNA, 20 nt, Human
cuaagaugacauugcuaaga

SEQ ID NO: 3774007 - RNA, 11 nt, Human
cuaagaugcuc

SEQ ID NO: 3774008 - RNA, 20 nt, Human
cuaagaugugauauucuaag

SEQ ID NO: 3774009 - RNA, 13 nt, Human
cuaagauguuaua

SEQ ID NO: 3774010 - RNA, 19 nt, Human
cuaagauguuauauuuuuc

SEQ ID NO: 3774011 - RNA, 22 nt, Human
cuaagauuacaaaucagaaguc

SEQ ID NO: 3774012 - RNA, 14 nt, Human
cuaagauucuaaag

SEQ ID NO: 3774013 - RNA, 15 nt, Human
cuaagauucuaauga

SEQ ID NO: 3774014 - RNA, 21 nt, Human
cuaagauucuaaugaugauca

SEQ ID NO: 3774015 - RNA, 18 nt, Human
cuaagauucuagaucaga

SEQ ID NO: 3774016 - RNA, 22 nt, Human
cuaagauucuagaucagaugcu

SEQ ID NO: 3774017 - RNA, 20 nt, Human
cuaagauuuauuuuguuaaa

SEQ ID NO: 3774018 - RNA, 14 nt, Human
cuaagcaaaaugug

SEQ ID NO: 3774019 - RNA, 16 nt, Human
cuaagcaacuaggccu

SEQ ID NO: 3774020 - RNA, 23 nt, Human
cuaagcacgggccauaugaauaa

SEQ ID NO: 3774021 - RNA, 19 nt, Human
cuaagcagaaagugccuuu

SEQ ID NO: 3774022 - RNA, 21 nt, Human
cuaagcagaaagugccuuuca

SEQ ID NO: 3774023 - RNA, 12 nt, Human
cuaagcagagga

SEQ ID NO: 3774024 - RNA, 13 nt, Human
cuaagcagaggag

SEQ ID NO: 3774025 - RNA, 15 nt, Human
cuaagcagaggaggg

SEQ ID NO: 3774026 - RNA, 18 nt, Human
cuaagcagaggaggggcc

SEQ ID NO: 3774027 - RNA, 17 nt, Human
cuaagcagcuuauuguu

SEQ ID NO: 3774028 - RNA, 19 nt, Human
cuaagccccagcaagcaau

SEQ ID NO: 3774029 - RNA, 20 nt, Human
cuaagccuaccugcucucca

SEQ ID NO: 3774030 - RNA, 23 nt, Human
cuaagccuaccugcucuccaagu

SEQ ID NO: 3774031 - RNA, 17 nt, Human
cuaagccugaaggggcg

SEQ ID NO: 3774032 - RNA, 14 nt, Human
cuaagccuguggcu

SEQ ID NO: 3774033 - RNA, 17 nt, Human
cuaagccuuuccauaag

SEQ ID NO: 3774034 - RNA, 23 nt, Human
cuaagcgcuagaggaagcagcca

SEQ ID NO: 3774035 - RNA, 21 nt, Human
cuaagcuauucaguaauaacu

SEQ ID NO: 3774036 - RNA, 22 nt, Human
cuaagcuauucaguaauaacuc

SEQ ID NO: 3774037 - RNA, 12 nt, Human
cuaagcugcagc

SEQ ID NO: 3774038 - RNA, 22 nt, Human
cuaagcuggagugcuuaucccu

SEQ ID NO: 3774039 - RNA, 21 nt, Human
cuaagcuucacuguaaaauaa

SEQ ID NO: 3774040 - RNA, 11 nt, Human
cuaaggacuug

SEQ ID NO: 3774041 - RNA, 23 nt, Human
cuaaggaguguagcaacuacagu

SEQ ID NO: 3774042 - RNA, 20 nt, Human
cuaaggaugcuaaaccuuag

SEQ ID NO: 3774043 - RNA, 20 nt, Human
cuaaggaugucacagggcca

SEQ ID NO: 3774044 - RNA, 19 nt, Human
cuaaggauuagucccuggc

SEQ ID NO: 3774045 - RNA, 20 nt, Human
cuaaggcacccacaaauaaa

SEQ ID NO: 3774046 - RNA, 22 nt, Human
cuaaggcaucuaucugugcuag

SEQ ID NO: 3774047 - RNA, 16 nt, Human
cuaaggcguggagcug

SEQ ID NO: 3774048 - RNA, 17 nt, Human
cuaaggcguggagcugc

SEQ ID NO: 3774049 - RNA, 18 nt, Human
cuaaggcguggagcugcc

SEQ ID NO: 3774050 - RNA, 21 nt, Human
cuaaggcguggagcugccuga

SEQ ID NO: 3774051 - RNA, 21 nt, Human
cuaaggcucuaugagucuaga

SEQ ID NO: 3774052 - RNA, 17 nt, Human
cuaagggaagacauuuc

SEQ ID NO: 3774053 - RNA, 12 nt, Human
cuaaggggcccg

SEQ ID NO: 3774054 - RNA, 22 nt, Human
cuaaggggcccggccagccaug

SEQ ID NO: 3774055 - RNA, 21 nt, Human
cuaagggucgaaagcucuaga

SEQ ID NO: 3774056 - RNA, 18 nt, Human
cuaagggugggugcucag

SEQ ID NO: 3774057 - RNA, 19 nt, Human
cuaaggucauuaccacagg

SEQ ID NO: 3774058 - RNA, 17 nt, Human
cuaagguggauuuucau

SEQ ID NO: 3774059 - RNA, 12 nt, Human
cuaagguucuaa

SEQ ID NO: 3774060 - RNA, 16 nt, Human
cuaagguucuaaggcc

SEQ ID NO: 3774061 - RNA, 14 nt, Human
cuaagguucucaua

SEQ ID NO: 3774062 - RNA, 18 nt, Human
cuaaguaaaaccacagca

SEQ ID NO: 3774063 - RNA, 15 nt, Human
cuaaguaaauacaau

SEQ ID NO: 3774064 - RNA, 16 nt, Human
cuaaguaaauacaauu

SEQ ID NO: 3774065 - RNA, 19 nt, Human
cuaaguaaaucucuucugu

SEQ ID NO: 3774066 - RNA, 23 nt, Human
cuaaguaaaucucuucuguguuu

SEQ ID NO: 3774067 - RNA, 19 nt, Human
cuaaguacacaauaagcaa

SEQ ID NO: 3774068 - RNA, 20 nt, Human
cuaaguacacaauaagcaaa

SEQ ID NO: 3774069 - RNA, 21 nt, Human
cuaaguacuguaauaauaccu

SEQ ID NO: 3774070 - RNA, 18 nt, Human
cuaaguauuaaaacauug

SEQ ID NO: 3774071 - RNA, 13 nt, Human
cuaaguauuuccc

SEQ ID NO: 3774072 - RNA, 16 nt, Human
cuaaguauuucccagc

SEQ ID NO: 3774073 - RNA, 18 nt, Human
cuaagucauguauguuuc

SEQ ID NO: 3774074 - RNA, 21 nt, Human
cuaaguccaguccaguccuau

SEQ ID NO: 3774075 - RNA, 19 nt, Human
cuaaguccaguguuucuuu

SEQ ID NO: 3774076 - RNA, 15 nt, Human
cuaagucccugcccc

SEQ ID NO: 3774077 - RNA, 17 nt, Human
cuaagucccugcccccu

SEQ ID NO: 3774078 - RNA, 13 nt, Human
cuaagucucugug

SEQ ID NO: 3774079 - RNA, 18 nt, Human
cuaagucucuuuuuuaca

SEQ ID NO: 3774080 - RNA, 16 nt, Human
cuaagugacauuugua

SEQ ID NO: 3774081 - RNA, 13 nt, Human
cuaagugauauaa

SEQ ID NO: 3774082 - RNA, 14 nt, Human
cuaagugauauaaa

SEQ ID NO: 3774083 - RNA, 23 nt, Human
cuaagugauccucccaccucagc

SEQ ID NO: 3774084 - RNA, 23 nt, Human
cuaagugggcauugccaugugga

SEQ ID NO: 3774085 - RNA, 17 nt, Human
cuaaguuaauuuaaagu

SEQ ID NO: 3774086 - RNA, 17 nt, Human
cuaaguuauaagacucu

SEQ ID NO: 3774087 - RNA, 21 nt, Human
cuaaguuauaagacucucaca

SEQ ID NO: 3774088 - RNA, 16 nt, Human
cuaaguuauaguauau

SEQ ID NO: 3774089 - RNA, 14 nt, Human
cuaaguucacauua

SEQ ID NO: 3774090 - RNA, 20 nt, Human
cuaaguucuuagauaucuuu

SEQ ID NO: 3774091 - RNA, 13 nt, Human
cuaaguuucaguu

SEQ ID NO: 3774092 - RNA, 12 nt, Human
cuaaguuucuaa

SEQ ID NO: 3774093 - RNA, 22 nt, Human
cuaaguuucuaagauucuaaag

SEQ ID NO: 3774094 - RNA, 14 nt, Human
cuaauaaaaaggug

SEQ ID NO: 3774095 - RNA, 12 nt, Human
cuaauaaaacug

SEQ ID NO: 3774096 - RNA, 20 nt, Human
cuaauaaaacugaugugaaa

SEQ ID NO: 3774097 - RNA, 13 nt, Human
cuaauaaaagcau

SEQ ID NO: 3774098 - RNA, 14 nt, Human
cuaauaaaauauca

SEQ ID NO: 3774099 - RNA, 23 nt, Human
cuaauaaaauaucauucagcaac

SEQ ID NO: 3774100 - RNA, 20 nt, Human
cuaauaaaauauuuucugug

SEQ ID NO: 3774101 - RNA, 17 nt, Human
cuaauaaacuaauaauu

SEQ ID NO: 3774102 - RNA, 12 nt, Human
cuaauaaagcug

SEQ ID NO: 3774103 - RNA, 17 nt, Human
cuaauaagcuaguugaa

SEQ ID NO: 3774104 - RNA, 20 nt, Human
cuaauaaucuuguuucugaa

SEQ ID NO: 3774105 - RNA, 16 nt, Human
cuaauaauuucuaaug

SEQ ID NO: 3774106 - RNA, 21 nt, Human
cuaauacagccccuuuucccu

SEQ ID NO: 3774107 - RNA, 19 nt, Human
cuaauacauuaaagcaguc

SEQ ID NO: 3774108 - RNA, 18 nt, Human
cuaauagaaaaguauguu

SEQ ID NO: 3774109 - RNA, 13 nt, Human
cuaauagaacuca

SEQ ID NO: 3774110 - RNA, 21 nt, Human
cuaauagaauaaaggcaguuu

SEQ ID NO: 3774111 - RNA, 23 nt, Human
cuaauagaauaaaggcaguuuuc

SEQ ID NO: 3774112 - RNA, 23 nt, Human
cuaauagacaauuuauuauggca

SEQ ID NO: 3774113 - RNA, 18 nt, Human
cuaauagugaucaagaag

SEQ ID NO: 3774114 - RNA, 22 nt, Human
cuaauauaaguuucuuugcuuc

SEQ ID NO: 3774115 - RNA, 17 nt, Human
cuaauauacaggguagc

SEQ ID NO: 3774116 - RNA, 15 nt, Human
cuaauauauuuaaaa

SEQ ID NO: 3774117 - RNA, 16 nt, Human
cuaauauauuuaaaaa

SEQ ID NO: 3774118 - RNA, 15 nt, Human
cuaauaucaaaugca

SEQ ID NO: 3774119 - RNA, 22 nt, Human
cuaauauccacuuguccaugug

SEQ ID NO: 3774120 - RNA, 19 nt, Human
cuaauaugaugacuguuuu

SEQ ID NO: 3774121 - RNA, 13 nt, Human
cuaauauggcaaa

SEQ ID NO: 3774122 - RNA, 17 nt, Human
cuaauauuuauugcuuu

SEQ ID NO: 3774123 - RNA, 18 nt, Human
cuaauauuuauugcuuua

SEQ ID NO: 3774124 - RNA, 13 nt, Human
cuaauauuuuccu

SEQ ID NO: 3774125 - RNA, 16 nt, Human
cuaaucaaagccaggg

SEQ ID NO: 3774126 - RNA, 17 nt, Human
cuaaucagaaauuuuua

SEQ ID NO: 3774127 - RNA, 23 nt, Human
cuaaucagaaauuuuuaucaguu

SEQ ID NO: 3774128 - RNA, 19 nt, Human
cuaaucagcauucucacuc

SEQ ID NO: 3774129 - RNA, 20 nt, Human
cuaaucaggcugaggugucu

SEQ ID NO: 3774130 - RNA, 21 nt, Human
cuaaucagggaggucauuuug

SEQ ID NO: 3774131 - RNA, 17 nt, Human
cuaaucagugucucaca

SEQ ID NO: 3774132 - RNA, 21 nt, Human
cuaaucagugucucacacugg

SEQ ID NO: 3774133 - RNA, 16 nt, Human
cuaaucauccaaugcu

SEQ ID NO: 3774134 - RNA, 20 nt, Human
cuaauccaggcagauccagg

SEQ ID NO: 3774135 - RNA, 18 nt, Human
cuaaucccgauucacccu

SEQ ID NO: 3774136 - RNA, 20 nt, Human
cuaaucccugggcauugcuu

SEQ ID NO: 3774137 - RNA, 21 nt, Human
cuaaucccugggcauugcuuu

SEQ ID NO: 3774138 - RNA, 16 nt, Human
cuaauccucuuuuucu

SEQ ID NO: 3774139 - RNA, 19 nt, Human
cuaaucuagauaucgacuu

SEQ ID NO: 3774140 - RNA, 18 nt, Human
cuaaucuauggucgggag

SEQ ID NO: 3774141 - RNA, 17 nt, Human
cuaaucuauuggguuca

SEQ ID NO: 3774142 - RNA, 15 nt, Human
cuaaucucauaccuc

SEQ ID NO: 3774143 - RNA, 22 nt, Human
cuaaucugcuaugcuugaaugc

SEQ ID NO: 3774144 - RNA, 13 nt, Human
cuaaucuguaggg

SEQ ID NO: 3774145 - RNA, 22 nt, Human
cuaaucuguagggcuggaccua

SEQ ID NO: 3774146 - RNA, 18 nt, Human
cuaaucugugcuguuuca

SEQ ID NO: 3774147 - RNA, 18 nt, Human
cuaaucuuauucauuuuc

SEQ ID NO: 3774148 - RNA, 16 nt, Human
cuaaucuugugaaaau

SEQ ID NO: 3774149 - RNA, 19 nt, Human
cuaaucuugugaaaauaau

SEQ ID NO: 3774150 - RNA, 20 nt, Human
cuaaugaaagugaugacaua

SEQ ID NO: 3774151 - RNA, 23 nt, Human
cuaaugacaugccuauaugagaa

SEQ ID NO: 3774152 - RNA, 18 nt, Human
cuaaugaggagagaaaau

SEQ ID NO: 3774153 - RNA, 19 nt, Human
cuaaugaggagagaaaaua

SEQ ID NO: 3774154 - RNA, 21 nt, Human
cuaaugaggagagaaaauaua

SEQ ID NO: 3774155 - RNA, 19 nt, Human
cuaaugaguuucuuuuaua

SEQ ID NO: 3774156 - RNA, 13 nt, Human
cuaaugauggccc

SEQ ID NO: 3774157 - RNA, 22 nt, Human
cuaaugcgcaggcuggcccugc

SEQ ID NO: 3774158 - RNA, 12 nt, Human
cuaaugcuccuu

SEQ ID NO: 3774159 - RNA, 21 nt, Human
cuaauggauuauaaucagaau

SEQ ID NO: 3774160 - RNA, 18 nt, Human
cuaauggcaugagaaaua

SEQ ID NO: 3774161 - RNA, 14 nt, Human
cuaauguaaaauga

SEQ ID NO: 3774162 - RNA, 16 nt, Human
cuaauguacugcauau

SEQ ID NO: 3774163 - RNA, 15 nt, Human
cuaauguauuuuauu

SEQ ID NO: 3774164 - RNA, 18 nt, Human
cuaaugucuguaucacuc

SEQ ID NO: 3774165 - RNA, 22 nt, Human
cuaauguuggcagaugcagcuc

SEQ ID NO: 3774166 - RNA, 16 nt, Human
cuaauguuuaagcaga

SEQ ID NO: 3774167 - RNA, 20 nt, Human
cuaauguuuaagcagaauug

SEQ ID NO: 3774168 - RNA, 20 nt, Human
cuaauguuuaugagccagac

SEQ ID NO: 3774169 - RNA, 16 nt, Human
cuaauguuugcauaua

SEQ ID NO: 3774170 - RNA, 15 nt, Human
cuaauuaacauauaa

SEQ ID NO: 3774171 - RNA, 17 nt, Human
cuaauuaaccuuacuaa

SEQ ID NO: 3774172 - RNA, 21 nt, Human
cuaauuaauauauuaaaauuc

SEQ ID NO: 3774173 - RNA, 16 nt, Human
cuaauuaaucuggaau

SEQ ID NO: 3774174 - RNA, 19 nt, Human
cuaauuaauuguaaucuga

SEQ ID NO: 3774175 - RNA, 14 nt, Human
cuaauuaauuucag

SEQ ID NO: 3774176 - RNA, 17 nt, Human
cuaauuaauuucaguaa

SEQ ID NO: 3774177 - RNA, 20 nt, Human
cuaauuacgauaaggaagaa

SEQ ID NO: 3774178 - RNA, 18 nt, Human
cuaauuaggguacauuua

SEQ ID NO: 3774179 - RNA, 17 nt, Human
cuaauuauguagcucuu

SEQ ID NO: 3774180 - RNA, 14 nt, Human
cuaauuauuuaauu

SEQ ID NO: 3774181 - RNA, 16 nt, Human
cuaauucacagugcuc

SEQ ID NO: 3774182 - RNA, 22 nt, Human
cuaauucacagugcucuuuucu

SEQ ID NO: 3774183 - RNA, 10 nt, Human
cuaauucaua

SEQ ID NO: 3774184 - RNA, 14 nt, Human
cuaauuccacagcu

SEQ ID NO: 3774185 - RNA, 14 nt, Human
cuaauucccagagu

SEQ ID NO: 3774186 - RNA, 18 nt, Human
cuaauucccauuuugcaa

SEQ ID NO: 3774187 - RNA, 19 nt, Human
cuaauucccauuuugcaaa

SEQ ID NO: 3774188 - RNA, 21 nt, Human
cuaauucccauuuugcaaaau

SEQ ID NO: 3774189 - RNA, 17 nt, Human
cuaauucgaugaaggcu

SEQ ID NO: 3774190 - RNA, 16 nt, Human
cuaauucuauuaaagu

SEQ ID NO: 3774191 - RNA, 18 nt, Human
cuaauucuuacacugccu

SEQ ID NO: 3774192 - RNA, 17 nt, Human
cuaauucuuugcaaaaa

SEQ ID NO: 3774193 - RNA, 12 nt, Human
cuaauugacuuu

SEQ ID NO: 3774194 - RNA, 13 nt, Human
cuaauugacuuua

SEQ ID NO: 3774195 - RNA, 16 nt, Human
cuaauugcaucucaaa

SEQ ID NO: 3774196 - RNA, 20 nt, Human
cuaauugcaucucaaaauua

SEQ ID NO: 3774197 - RNA, 18 nt, Human
cuaauugcuguugaaagc

SEQ ID NO: 3774198 - RNA, 21 nt, Human
cuaauuggaagaaauuccugu

SEQ ID NO: 3774199 - RNA, 23 nt, Human
cuaauugggaguccaggcacagg

SEQ ID NO: 3774200 - RNA, 13 nt, Human
cuaauuguauaac

SEQ ID NO: 3774201 - RNA, 17 nt, Human
cuaauuguauaacaggu

SEQ ID NO: 3774202 - RNA, 19 nt, Human
cuaauuguauaacagguua

SEQ ID NO: 3774203 - RNA, 14 nt, Human
cuaauuuaaaaaau

SEQ ID NO: 3774204 - RNA, 11 nt, Human
cuaauuuaaca

SEQ ID NO: 3774205 - RNA, 17 nt, Human
cuaauuuauaaaaaggu

SEQ ID NO: 3774206 - RNA, 23 nt, Human
cuaauuuauccugaaauuucaga

SEQ ID NO: 3774207 - RNA, 21 nt, Human
cuaauuuaucuugucucuggg

SEQ ID NO: 3774208 - RNA, 14 nt, Human
cuaauuuauuuugu

SEQ ID NO: 3774209 - RNA, 16 nt, Human
cuaauuucccuucuug

SEQ ID NO: 3774210 - RNA, 15 nt, Human
cuaauuucuccuccc

SEQ ID NO: 3774211 - RNA, 13 nt, Human
cuaauuugcauua

SEQ ID NO: 3774212 - RNA, 14 nt, Human
cuaauuugcauuaa

SEQ ID NO: 3774213 - RNA, 22 nt, Human
cuaauuugcauuaaauucacaa

SEQ ID NO: 3774214 - RNA, 20 nt, Human
cuaauuuuacacauuagauu

SEQ ID NO: 3774215 - RNA, 23 nt, Human
cuaauuuuuaagaaauuuugccu

SEQ ID NO: 3774216 - RNA, 14 nt, Human
cuaauuuuuguaau

SEQ ID NO: 3774217 - RNA, 19 nt, Human
cuaauuuuuguauuauuuu

SEQ ID NO: 3774218 - RNA, 20 nt, Human
cuaauuuuuguauuuuuagu

SEQ ID NO: 3774219 - RNA, 13 nt, Human
cuaauuuuuuugu

SEQ ID NO: 3774220 - RNA, 16 nt, Human
cuacaaaaacacagca

SEQ ID NO: 3774221 - RNA, 19 nt, Human
cuacaaaaagcauaaaaau

SEQ ID NO: 3774222 - RNA, 21 nt, Human
cuacaaaaccugauguuaaaa

SEQ ID NO: 3774223 - RNA, 13 nt, Human
cuacaaacaaaau

SEQ ID NO: 3774224 - RNA, 20 nt, Human
cuacaaacaaaauuucuauu

SEQ ID NO: 3774225 - RNA, 14 nt, Human
cuacaaagaagaca

SEQ ID NO: 3774226 - RNA, 16 nt, Human
cuacaaagaagacaug

SEQ ID NO: 3774227 - RNA, 18 nt, Human
cuacaaagaagacauguu

SEQ ID NO: 3774228 - RNA, 21 nt, Human
cuacaaagguuuaaaugaaca

SEQ ID NO: 3774229 - RNA, 22 nt, Human
cuacaaagguuuaaaugaacaa

SEQ ID NO: 3774230 - RNA, 18 nt, Human
cuacaaccaagcucucug

SEQ ID NO: 3774231 - RNA, 15 nt, Human
cuacaagacacagug

SEQ ID NO: 3774232 - RNA, 18 nt, Human
cuacaagagcagccugug

SEQ ID NO: 3774233 - RNA, 20 nt, Human
cuacaagagcagccuguggc

SEQ ID NO: 3774234 - RNA, 23 nt, Human
cuacaagagcagccuguggcauc

SEQ ID NO: 3774235 - RNA, 12 nt, Human
cuacaaggccua

SEQ ID NO: 3774236 - RNA, 13 nt, Human
cuacaaucucuuu

SEQ ID NO: 3774237 - RNA, 13 nt, Human
cuacaaugugaac

SEQ ID NO: 3774238 - RNA, 22 nt, Human
cuacaauuaauaguuugucuau

SEQ ID NO: 3774239 - RNA, 18 nt, Human
cuacacaccuaacuuaug

SEQ ID NO: 3774240 - RNA, 13 nt, Human
cuacacaggacag

SEQ ID NO: 3774241 - RNA, 21 nt, Human
cuacacagugggaacucugac

SEQ ID NO: 3774242 - RNA, 22 nt, Human
cuacacagugggaacucugaca

SEQ ID NO: 3774243 - RNA, 23 nt, Human
cuacacagugggaacucugacaa

SEQ ID NO: 3774244 - RNA, 21 nt, Human
cuacacauauguauuccugau

SEQ ID NO: 3774245 - RNA, 13 nt, Human
cuacacauuuuua

SEQ ID NO: 3774246 - RNA, 14 nt, Human
cuacacauuuuuaa

SEQ ID NO: 3774247 - RNA, 16 nt, Human
cuacaccacacacaac

SEQ ID NO: 3774248 - RNA, 19 nt, Human
cuacaccacacacaacagc

SEQ ID NO: 3774249 - RNA, 18 nt, Human
cuacaccacucuggcagc

SEQ ID NO: 3774250 - RNA, 16 nt, Human
cuacacccagcaauag

SEQ ID NO: 3774251 - RNA, 16 nt, Human
cuacacccuuuuccag

SEQ ID NO: 3774252 - RNA, 14 nt, Human
cuacaccuaacuca

SEQ ID NO: 3774253 - RNA, 12 nt, Human
cuacaccuggcu

SEQ ID NO: 3774254 - RNA, 13 nt, Human
cuacaccuggcug

SEQ ID NO: 3774255 - RNA, 18 nt, Human
cuacaccuuucuccuuug

SEQ ID NO: 3774256 - RNA, 23 nt, Human
cuacacgagauacagaauuuuau

SEQ ID NO: 3774257 - RNA, 19 nt, Human
cuacacucuccugggcccc

SEQ ID NO: 3774258 - RNA, 21 nt, Human
cuacacucuccugggccccuc

SEQ ID NO: 3774259 - RNA, 23 nt, Human
cuacacucuuguaauaaaauguc

SEQ ID NO: 3774260 - RNA, 15 nt, Human
cuacacugacacugg

SEQ ID NO: 3774261 - RNA, 14 nt, Human
cuacacugcaauca

SEQ ID NO: 3774262 - RNA, 21 nt, Human
cuacacugcaaucauauguga

SEQ ID NO: 3774263 - RNA, 20 nt, Human
cuacacugugaacuugggga

SEQ ID NO: 3774264 - RNA, 13 nt, Human
cuacacugugcug

SEQ ID NO: 3774265 - RNA, 15 nt, Human
cuacagaaaaaccuu

SEQ ID NO: 3774266 - RNA, 15 nt, Human
cuacagaccugcuuu

SEQ ID NO: 3774267 - RNA, 23 nt, Human
cuacagaccugcuuuuugaaaug

SEQ ID NO: 3774268 - RNA, 10 nt, Human
cuacagagaa

SEQ ID NO: 3774269 - RNA, 11 nt, Human
cuacagagaaa

SEQ ID NO: 3774270 - RNA, 17 nt, Human
cuacagagaaaccagcu

SEQ ID NO: 3774271 - RNA, 18 nt, Human
cuacagagaaaccagcuu

SEQ ID NO: 3774272 - RNA, 19 nt, Human
cuacagagaaaccagcuuc

SEQ ID NO: 3774273 - RNA, 21 nt, Human
cuacagagaaaccagcuuccu

SEQ ID NO: 3774274 - RNA, 12 nt, Human
cuacagagaagc

SEQ ID NO: 3774275 - RNA, 21 nt, Human
cuacagagccgagcaauauuu

SEQ ID NO: 3774276 - RNA, 15 nt, Human
cuacagaggccaugg

SEQ ID NO: 3774277 - RNA, 17 nt, Human
cuacagaggccaugggc

SEQ ID NO: 3774278 - RNA, 20 nt, Human
cuacagaggucucugccggc

SEQ ID NO: 3774279 - RNA, 23 nt, Human
cuacagaggucucugccggcucu

SEQ ID NO: 3774280 - RNA, 22 nt, Human
cuacagauagagaguuguugug

SEQ ID NO: 3774281 - RNA, 14 nt, Human
cuacagauagucaa

SEQ ID NO: 3774282 - RNA, 14 nt, Human
cuacagaugaguca

SEQ ID NO: 3774283 - RNA, 23 nt, Human
cuacagaugauagaggauuuuau

SEQ ID NO: 3774284 - RNA, 15 nt, Human
cuacagcacuacugg

SEQ ID NO: 3774285 - RNA, 19 nt, Human
cuacagcacuacugggugu

SEQ ID NO: 3774286 - RNA, 18 nt, Human
cuacagccucagaaacca

SEQ ID NO: 3774287 - RNA, 18 nt, Human
cuacagccuugucccccu

SEQ ID NO: 3774288 - RNA, 18 nt, Human
cuacagcuaaucagcauu

SEQ ID NO: 3774289 - RNA, 11 nt, Human
cuacagcucuu

SEQ ID NO: 3774290 - RNA, 17 nt, Human
cuacagcuggggugcag

SEQ ID NO: 3774291 - RNA, 22 nt, Human
cuacagcuggggugcagggaug

SEQ ID NO: 3774292 - RNA, 20 nt, Human
cuacagcuuucuugcucccu

SEQ ID NO: 3774293 - RNA, 23 nt, Human
cuacagcuuucuugcucccuuca

SEQ ID NO: 3774294 - RNA, 19 nt, Human
cuacagcuuugaucccuga

SEQ ID NO: 3774295 - RNA, 18 nt, Human
cuacagcuuugugacugu

SEQ ID NO: 3774296 - RNA, 18 nt, Human
cuacaggaagcaccccau

SEQ ID NO: 3774297 - RNA, 18 nt, Human
cuacaggagagggaagag

SEQ ID NO: 3774298 - RNA, 17 nt, Human
cuacaggcacccaccau

SEQ ID NO: 3774299 - RNA, 20 nt, Human
cuacaggcagucucucucuu

SEQ ID NO: 3774300 - RNA, 12 nt, Human
cuacaggccuca

SEQ ID NO: 3774301 - RNA, 21 nt, Human
cuacaggcgugagccaccaug

SEQ ID NO: 3774302 - RNA, 11 nt, Human
cuacagggccg

SEQ ID NO: 3774303 - RNA, 18 nt, Human
cuacaggggaagguggcc

SEQ ID NO: 3774304 - RNA, 20 nt, Human
cuacagggggucuggcuggu

SEQ ID NO: 3774305 - RNA, 22 nt, Human
cuacagggggucuggcuggugu

SEQ ID NO: 3774306 - RNA, 23 nt, Human
cuacagggggucuggcugguguu

SEQ ID NO: 3774307 - RNA, 17 nt, Human
cuacaggguccaacaua

SEQ ID NO: 3774308 - RNA, 18 nt, Human
cuacagguuacaacagau

SEQ ID NO: 3774309 - RNA, 13 nt, Human
cuacaguaauaaa

SEQ ID NO: 3774310 - RNA, 18 nt, Human
cuacaguccucccaucuc

SEQ ID NO: 3774311 - RNA, 11 nt, Human
cuacagugcca

SEQ ID NO: 3774312 - RNA, 17 nt, Human
cuacaguguacagucuu

SEQ ID NO: 3774313 - RNA, 20 nt, Human
cuacaguuggaaauccaucc

SEQ ID NO: 3774314 - RNA, 17 nt, Human
cuacaguuuuaacugug

SEQ ID NO: 3774315 - RNA, 20 nt, Human
cuacaguuuuaacuguggau

SEQ ID NO: 3774316 - RNA, 14 nt, Human
cuacaguuuuuccu

SEQ ID NO: 3774317 - RNA, 17 nt, Human
cuacauaaacugacuuu

SEQ ID NO: 3774318 - RNA, 22 nt, Human
cuacauaaacugacuuuauccu

SEQ ID NO: 3774319 - RNA, 18 nt, Human
cuacauacuauggaauuu

SEQ ID NO: 3774320 - RNA, 23 nt, Human
cuacauacuuucauccugacucu

SEQ ID NO: 3774321 - RNA, 16 nt, Human
cuacauaucccuucca

SEQ ID NO: 3774322 - RNA, 17 nt, Human
cuacauaucccuuccag

SEQ ID NO: 3774323 - RNA, 21 nt, Human
cuacauaucccuuccagaugg

SEQ ID NO: 3774324 - RNA, 17 nt, Human
cuacaucgcccuccaca

SEQ ID NO: 3774325 - RNA, 14 nt, Human
cuacaucuucugcc

SEQ ID NO: 3774326 - RNA, 10 nt, Human
cuacaugaaa

SEQ ID NO: 3774327 - RNA, 15 nt, Human
cuacaugaaacagaa

SEQ ID NO: 3774328 - RNA, 16 nt, Human
cuacaugaaacagaaa

SEQ ID NO: 3774329 - RNA, 13 nt, Human
cuacaugagaaca

SEQ ID NO: 3774330 - RNA, 14 nt, Human
cuacaugagaacaa

SEQ ID NO: 3774331 - RNA, 14 nt, Human
cuacaugcagccca

SEQ ID NO: 3774332 - RNA, 15 nt, Human
cuacaugcagcccau

SEQ ID NO: 3774333 - RNA, 21 nt, Human
cuacaugcagcccaugcccac

SEQ ID NO: 3774334 - RNA, 15 nt, Human
cuacaugcugggguc

SEQ ID NO: 3774335 - RNA, 18 nt, Human
cuacauguauugcacauu

SEQ ID NO: 3774336 - RNA, 18 nt, Human
cuacauuaaacaugacuc

SEQ ID NO: 3774337 - RNA, 22 nt, Human
cuacauuauaaaugucucuuua

SEQ ID NO: 3774338 - RNA, 14 nt, Human
cuacauuuccgcca

SEQ ID NO: 3774339 - RNA, 14 nt, Human
cuacauuuuaacau

SEQ ID NO: 3774340 - RNA, 12 nt, Human
cuaccaaaaugg

SEQ ID NO: 3774341 - RNA, 16 nt, Human
cuaccaaccuguucaa

SEQ ID NO: 3774342 - RNA, 12 nt, Human
cuaccaacugga

SEQ ID NO: 3774343 - RNA, 13 nt, Human
cuaccaacuuuca

SEQ ID NO: 3774344 - RNA, 14 nt, Human
cuaccaaugcaugc

SEQ ID NO: 3774345 - RNA, 19 nt, Human
cuaccaaugccaagauaau

SEQ ID NO: 3774346 - RNA, 18 nt, Human
cuaccaccagcugugucc

SEQ ID NO: 3774347 - RNA, 19 nt, Human
cuaccaccagcugugucca

SEQ ID NO: 3774348 - RNA, 17 nt, Human
cuaccaccccuuccugu

SEQ ID NO: 3774349 - RNA, 17 nt, Human
cuaccaccuccccagcc

SEQ ID NO: 3774350 - RNA, 21 nt, Human
cuaccacggccuccuuuccgu

SEQ ID NO: 3774351 - RNA, 17 nt, Human
cuaccacuccugccaag

SEQ ID NO: 3774352 - RNA, 18 nt, Human
cuaccagauaacugagga

SEQ ID NO: 3774353 - RNA, 20 nt, Human
cuaccagcgcccgcugggcu

SEQ ID NO: 3774354 - RNA, 21 nt, Human
cuaccagcgcccgcugggcug

SEQ ID NO: 3774355 - RNA, 12 nt, Human
cuaccaggaaag

SEQ ID NO: 3774356 - RNA, 13 nt, Human
cuaccaguauuua

SEQ ID NO: 3774357 - RNA, 20 nt, Human
cuaccaguauuuagaagcca

SEQ ID NO: 3774358 - RNA, 21 nt, Human
cuaccagugcaggcuggccag

SEQ ID NO: 3774359 - RNA, 15 nt, Human
cuaccaucagggaca

SEQ ID NO: 3774360 - RNA, 18 nt, Human
cuaccaucagggacagga

SEQ ID NO: 3774361 - RNA, 18 nt, Human
cuaccauccccuguagag

SEQ ID NO: 3774362 - RNA, 14 nt, Human
cucacagcagugag

SEQ ID NO: 3774363 - RNA, 18 nt, Human
cucacagcagugagacug

SEQ ID NO: 3774364 - RNA, 19 nt, Human
cucacagcagugagacugg

SEQ ID NO: 3774365 - RNA, 11 nt, Human
cucacagccuc

SEQ ID NO: 3774366 - RNA, 15 nt, Human
cucacagccucugac

SEQ ID NO: 3774367 - RNA, 16 nt, Human
cucacagccucugacc

SEQ ID NO: 3774368 - RNA, 15 nt, Human
cucacagcuaugcaa

SEQ ID NO: 3774369 - RNA, 16 nt, Human
cucacaguaacccaaa

SEQ ID NO: 3774370 - RNA, 22 nt, Human
cucacaguccuuaccagcagag

SEQ ID NO: 3774371 - RNA, 23 nt, Human
cucacaguccuuaccagcagagc

SEQ ID NO: 3774372 - RNA, 22 nt, Human
cucacagugaacacucaguggc

SEQ ID NO: 3774373 - RNA, 12 nt, Human
cucacagugacc

SEQ ID NO: 3774374 - RNA, 16 nt, Human
cucacagugacccuuc

SEQ ID NO: 3774375 - RNA, 19 nt, Human
cucacagugacccuuccca

SEQ ID NO: 3774376 - RNA, 18 nt, Human
cucacagugggagccagg

SEQ ID NO: 3774377 - RNA, 22 nt, Human
cucacagugggagccagggcug

SEQ ID NO: 3774378 - RNA, 13 nt, Human
cucacaguuccuc

SEQ ID NO: 3774379 - RNA, 18 nt, Human
cucacaguuccucgcccu

SEQ ID NO: 3774380 - RNA, 19 nt, Human
cucacaguuccucgcccug

SEQ ID NO: 3774381 - RNA, 23 nt, Human
cucacaguuccucgcccuggguc

SEQ ID NO: 3774382 - RNA, 21 nt, Human
cucacaugcuggacaggucug

SEQ ID NO: 3774383 - RNA, 21 nt, Human
cucacauggugcuacgccugc

SEQ ID NO: 3774384 - RNA, 16 nt, Human
cucacauuacacacac

SEQ ID NO: 3774385 - RNA, 14 nt, Human
cucacauuuuuaua

SEQ ID NO: 3774386 - RNA, 16 nt, Human
cucaccagaauuauuu

SEQ ID NO: 3774387 - RNA, 23 nt, Human
cucaccagccccacugccagcag

SEQ ID NO: 3774388 - RNA, 18 nt, Human
cucaccagccccagugcc

SEQ ID NO: 3774389 - RNA, 13 nt, Human
cucaccagcugca

SEQ ID NO: 3774390 - RNA, 15 nt, Human
cucaccagcugcaaa

SEQ ID NO: 3774391 - RNA, 16 nt, Human
cucaccagcugcaaag

SEQ ID NO: 3774392 - RNA, 19 nt, Human
cucaccaggcagccucugg

SEQ ID NO: 3774393 - RNA, 20 nt, Human
cucaccaggcagccucuggg

SEQ ID NO: 3774394 - RNA, 14 nt, Human
cucaccaggggcag

SEQ ID NO: 3774395 - RNA, 20 nt, Human
cucaccaggggcaggcacag

SEQ ID NO: 3774396 - RNA, 21 nt, Human
cucaccaggggcaggcacagc

SEQ ID NO: 3774397 - RNA, 23 nt, Human
cucaccaggggcaggcacagcac

SEQ ID NO: 3774398 - RNA, 24 nt, Human
cucaccaguguccccuccacuguc

SEQ ID NO: 3774399 - RNA, 22 nt, Human
cucacccacuuuggccuccguu

SEQ ID NO: 3774400 - RNA, 13 nt, Human
cucacccagugcc

SEQ ID NO: 3774401 - RNA, 15 nt, Human
cucacccauccuaga

SEQ ID NO: 3774402 - RNA, 16 nt, Human
cucacccaugugccaa

SEQ ID NO: 3774403 - RNA, 13 nt, Human
cucaccccagccc

SEQ ID NO: 3774404 - RNA, 19 nt, Human
cucaccccaucccacaccc

SEQ ID NO: 3774405 - RNA, 21 nt, Human
cucaccccaucccacacccug

SEQ ID NO: 3774406 - RNA, 19 nt, Human
cucacccccagcuuugcua

SEQ ID NO: 3774407 - RNA, 14 nt, Human
cucacccccucacc

SEQ ID NO: 3774408 - RNA, 18 nt, Human
cucacccccucccacccc

SEQ ID NO: 3774409 - RNA, 13 nt, Human
cucacccccucgg

SEQ ID NO: 3774410 - RNA, 17 nt, Human
cucacccccuucuccau

SEQ ID NO: 3774411 - RNA, 18 nt, Human
cucaccccgaggcccugc

SEQ ID NO: 3774412 - RNA, 17 nt, Human
cucaccccugcccuggg

SEQ ID NO: 3774413 - RNA, 18 nt, Human
cucaccccugcccuggga

SEQ ID NO: 3774414 - RNA, 21 nt, Human
cucaccccugguucucaucuu

SEQ ID NO: 3774415 - RNA, 15 nt, Human
cucaccccuguccuc

SEQ ID NO: 3774416 - RNA, 20 nt, Human
cucaccccuguccucacugc

SEQ ID NO: 3774417 - RNA, 15 nt, Human
cucaccgcagucguc

SEQ ID NO: 3774418 - RNA, 17 nt, Human
cucaccuaacucauacu

SEQ ID NO: 3774419 - RNA, 14 nt, Human
cucaccuagagcca

SEQ ID NO: 3774420 - RNA, 18 nt, Human
cucaccuagagccagacc

SEQ ID NO: 3774421 - RNA, 20 nt, Human
cucaccuagagccagaccaa

SEQ ID NO: 3774422 - RNA, 19 nt, Human
cucaccuauccacacaaca

SEQ ID NO: 3774423 - RNA, 14 nt, Human
cucaccucaugccc

SEQ ID NO: 3774424 - RNA, 16 nt, Human
cucaccucccccaucu

SEQ ID NO: 3774425 - RNA, 15 nt, Human
cucaccucuacccaa

SEQ ID NO: 3774426 - RNA, 22 nt, Human
cucaccucuagguccccauacu

SEQ ID NO: 3774427 - RNA, 14 nt, Human
cucaccucucccuu

SEQ ID NO: 3774428 - RNA, 15 nt, Human
cucaccucucccuug

SEQ ID NO: 3774429 - RNA, 14 nt, Human
cucaccucugccuc

SEQ ID NO: 3774430 - RNA, 15 nt, Human
cucaccucugccuca

SEQ ID NO: 3774431 - RNA, 21 nt, Human
cucaccucuggacuggcuaga

SEQ ID NO: 3774432 - RNA, 16 nt, Human
cucaccugccccucaa

SEQ ID NO: 3774433 - RNA, 15 nt, Human
cucaccugcuggccc

SEQ ID NO: 3774434 - RNA, 21 nt, Human
cucaccugcuggccccucacc

SEQ ID NO: 3774435 - RNA, 19 nt, Human
cucaccugggcaccugggg

SEQ ID NO: 3774436 - RNA, 21 nt, Human
cucaccuggggcugcuggccu

SEQ ID NO: 3774437 - RNA, 14 nt, Human
cucaccuguacucu

SEQ ID NO: 3774438 - RNA, 15 nt, Human
cucaccuguugcuua

SEQ ID NO: 3774439 - RNA, 22 nt, Human
cucaccuugugcuggggacagg

SEQ ID NO: 3774440 - RNA, 15 nt, Human
cucacgcaccuccca

SEQ ID NO: 3774441 - RNA, 16 nt, Human
cucacgcaccucccau

SEQ ID NO: 3774442 - RNA, 19 nt, Human
cucacgcaccucccauccu

SEQ ID NO: 3774443 - RNA, 20 nt, Human
cucacgccuaugaucccagc

SEQ ID NO: 3774444 - RNA, 21 nt, Human
cucacgccuguaaucccagca

SEQ ID NO: 3774445 - RNA, 22 nt, Human
cucacgccuguaaucccagcau

SEQ ID NO: 3774446 - RNA, 21 nt, Human
cucacgccuguaauuccagca

SEQ ID NO: 3774447 - RNA, 17 nt, Human
cucacgcuccuuucuga

SEQ ID NO: 3774448 - RNA, 21 nt, Human
cucacgggcaugggcacuccc

SEQ ID NO: 3774449 - RNA, 16 nt, Human
cucacguccagguuca

SEQ ID NO: 3774450 - RNA, 13 nt, Human
cucacguguguga

SEQ ID NO: 3774451 - RNA, 15 nt, Human
cucacuaauucauua

SEQ ID NO: 3774452 - RNA, 17 nt, Human
cucacuaauuuuuguau

SEQ ID NO: 3774453 - RNA, 23 nt, Human
cucacuaauuuuuguauuauuuu

SEQ ID NO: 3774454 - RNA, 20 nt, Human
cucacuacccuauucucucu

SEQ ID NO: 3774455 - RNA, 16 nt, Human
cucacuaccuccucag

SEQ ID NO: 3774456 - RNA, 13 nt, Human
cucacuaggcuuc

SEQ ID NO: 3774457 - RNA, 15 nt, Human
cucacuauggugcca

SEQ ID NO: 3774458 - RNA, 19 nt, Human
cucacuauguugcccaggc

SEQ ID NO: 3774459 - RNA, 18 nt, Human
cucacucaaguucaagga

SEQ ID NO: 3774460 - RNA, 19 nt, Human
cucacucaaguucaaggac

SEQ ID NO: 3774461 - RNA, 16 nt, Human
cucacucacagaguca

SEQ ID NO: 3774462 - RNA, 21 nt, Human
cucacucagaaguccagaguc

SEQ ID NO: 3774463 - RNA, 14 nt, Human
cucacucagcacca

SEQ ID NO: 3774464 - RNA, 12 nt, Human
cucacucagcca

SEQ ID NO: 3774465 - RNA, 18 nt, Human
cucacucagccacccuga

SEQ ID NO: 3774466 - RNA, 21 nt, Human
cucacucagccacccugaguu

SEQ ID NO: 3774467 - RNA, 14 nt, Human
cucacuccaccacc

SEQ ID NO: 3774468 - RNA, 12 nt, Human
cucacuccccag

SEQ ID NO: 3774469 - RNA, 20 nt, Human
cucacuccccagccugggcc

SEQ ID NO: 3774470 - RNA, 20 nt, Human
cucacuccccuccuuuccca

SEQ ID NO: 3774471 - RNA, 19 nt, Human
cucacuccuaccugguaau

SEQ ID NO: 3774472 - RNA, 20 nt, Human
cucacuccugagaccccugg

SEQ ID NO: 3774473 - RNA, 18 nt, Human
cucacuccuuuuaaagaa

SEQ ID NO: 3774474 - RNA, 10 nt, Human
cucacucuca

SEQ ID NO: 3774475 - RNA, 14 nt, Human
cucacucucaggaa

SEQ ID NO: 3774476 - RNA, 11 nt, Human
cucacucugcc

SEQ ID NO: 3774477 - RNA, 13 nt, Human
cucacucugccag

SEQ ID NO: 3774478 - RNA, 19 nt, Human
cucacucugcuaccuugcc

SEQ ID NO: 3774479 - RNA, 22 nt, Human
cucacucugcuaccuugcccca

SEQ ID NO: 3774480 - RNA, 15 nt, Human
cucacucuggccuca

SEQ ID NO: 3774481 - RNA, 13 nt, Human
cucacucugggcu

SEQ ID NO: 3774482 - RNA, 13 nt, Human
cucacucugucgc

SEQ ID NO: 3774483 - RNA, 13 nt, Human
cucacugaaaaca

SEQ ID NO: 3774484 - RNA, 16 nt, Human
cucacugaagccugcg

SEQ ID NO: 3774485 - RNA, 12 nt, Human
cucacugcagcc

SEQ ID NO: 3774486 - RNA, 22 nt, Human
cucacugccaggccagccuccg

SEQ ID NO: 3774487 - RNA, 22 nt, Human
cucacugccaugccagcuuauc

SEQ ID NO: 3774488 - RNA, 19 nt, Human
cucacugcccgcacacccu

SEQ ID NO: 3774489 - RNA, 14 nt, Human
cucacugccucccc

SEQ ID NO: 3774490 - RNA, 23 nt, Human
cucacugcuaagaauauuugaau

SEQ ID NO: 3774491 - RNA, 12 nt, Human
cucacugcucaa

SEQ ID NO: 3774492 - RNA, 20 nt, Human
cucacugcucccugaagcca

SEQ ID NO: 3774493 - RNA, 20 nt, Human
cucacuggcagccccagcac

SEQ ID NO: 3774494 - RNA, 16 nt, Human
cucacuggccaucccu

SEQ ID NO: 3774495 - RNA, 19 nt, Human
cucacuggcucuccuggcc

SEQ ID NO: 3774496 - RNA, 20 nt, Human
cucacugggguccuggggcc

SEQ ID NO: 3774497 - RNA, 12 nt, Human
cucacugugauc

SEQ ID NO: 3774498 - RNA, 22 nt, Human
cucacugugaucaauauuuuua

SEQ ID NO: 3774499 - RNA, 24 nt, Human
cucacugugggaaggccagcugcc

SEQ ID NO: 3774500 - RNA, 12 nt, Human
cucacuguuccc

SEQ ID NO: 3774501 - RNA, 16 nt, Human
cucacuguugcccagg

SEQ ID NO: 3774502 - RNA, 17 nt, Human
cucacuguugcccaggc

SEQ ID NO: 3774503 - RNA, 20 nt, Human
cucacuguugcccaggcugg

SEQ ID NO: 3774504 - RNA, 19 nt, Human
cucacuguuuguuuuuauu

SEQ ID NO: 3774505 - RNA, 18 nt, Human
cucacuuccauacagcuc

SEQ ID NO: 3774506 - RNA, 20 nt, Human
cucacuuggucugccaggcc

SEQ ID NO: 3774507 - RNA, 20 nt, Human
cucacuuuccuccugaggcu

SEQ ID NO: 3774508 - RNA, 21 nt, Human
cucacuuuuaaugaacaaaug

SEQ ID NO: 3774509 - RNA, 12 nt, Human
cucacuuuuccc

SEQ ID NO: 3774510 - RNA, 21 nt, Human
cucacuuuuuuuuuuuguuug

SEQ ID NO: 3774511 - RNA, 23 nt, Human
cucagaaaacaaggaugaauuaa

SEQ ID NO: 3774512 - RNA, 21 nt, Human
cucagaaacacuggggcuggc

SEQ ID NO: 3774513 - RNA, 10 nt, Human
cucagaaagu

SEQ ID NO: 3774514 - RNA, 17 nt, Human
cucagaaagugccugac

SEQ ID NO: 3774515 - RNA, 18 nt, Human
cucagaaagugccugaca

SEQ ID NO: 3774516 - RNA, 17 nt, Human
cucagaaauuuuuauuu

SEQ ID NO: 3774517 - RNA, 14 nt, Human
cucagaacccuugg

SEQ ID NO: 3774518 - RNA, 22 nt, Human
cucagaacugucggaggaaaga

SEQ ID NO: 3774519 - RNA, 20 nt, Human
cucagaacuugcugcugucu

SEQ ID NO: 3774520 - RNA, 22 nt, Human
cucagaagacacugaugggcaa

SEQ ID NO: 3774521 - RNA, 14 nt, Human
cucagaagccugag

SEQ ID NO: 3774522 - RNA, 16 nt, Human
cucagaagccugaggc

SEQ ID NO: 3774523 - RNA, 17 nt, Human
cucagaagccugaggcu

SEQ ID NO: 3774524 - RNA, 16 nt, Human
cucagaagccuggggg

SEQ ID NO: 3774525 - RNA, 12 nt, Human
cucagaaggcuu

SEQ ID NO: 3774526 - RNA, 19 nt, Human
cucagaagguauuccuuuu

SEQ ID NO: 3774527 - RNA, 11 nt, Human
cucagaaguaa

SEQ ID NO: 3774528 - RNA, 12 nt, Human
cucagaaguaaa

SEQ ID NO: 3774529 - RNA, 19 nt, Human
cucagaaguuucuucuuua

SEQ ID NO: 3774530 - RNA, 16 nt, Human
cucagaaucucaaaua

SEQ ID NO: 3774531 - RNA, 17 nt, Human
cucagaauguaaaagaa

SEQ ID NO: 3774532 - RNA, 20 nt, Human
cucagacauguuuuccguga

SEQ ID NO: 3774533 - RNA, 15 nt, Human
cucagaccgucuucc

SEQ ID NO: 3774534 - RNA, 22 nt, Human
cucagaccgucuuccuccaacc

SEQ ID NO: 3774535 - RNA, 17 nt, Human
cucagacucauacagaa

SEQ ID NO: 3774536 - RNA, 16 nt, Human
cucagacugcacccag

SEQ ID NO: 3774537 - RNA, 21 nt, Human
cucagacugcacccaggaggg

SEQ ID NO: 3774538 - RNA, 22 nt, Human
cucagacuuuggaaaaugcauu

SEQ ID NO: 3774539 - RNA, 19 nt, Human
cucagagaaaaaugcuccc

SEQ ID NO: 3774540 - RNA, 20 nt, Human
cucagagaaaaaugcucccc

SEQ ID NO: 3774541 - RNA, 23 nt, Human
cucagagaaaagagauugagaug

SEQ ID NO: 3774542 - RNA, 21 nt, Human
cucagagaccugaagugugca

SEQ ID NO: 3774543 - RNA, 18 nt, Human
cucagagagggugggagu

SEQ ID NO: 3774544 - RNA, 19 nt, Human
cucagagagggugggagug

SEQ ID NO: 3774545 - RNA, 14 nt, Human
cucagagccccgca

SEQ ID NO: 3774546 - RNA, 18 nt, Human
cucagaggacccuuucca

SEQ ID NO: 3774547 - RNA, 19 nt, Human
cucagaggacccuuuccag

SEQ ID NO: 3774548 - RNA, 12 nt, Human
cucagaggcccc

SEQ ID NO: 3774549 - RNA, 22 nt, Human
cucagaggccccaauaccccau

SEQ ID NO: 3774550 - RNA, 23 nt, Human
cucagaggccccaauaccccaug

SEQ ID NO: 3774551 - RNA, 17 nt, Human
cucagaggcgcacugug

SEQ ID NO: 3774552 - RNA, 19 nt, Human
cucagagggggacugcugc

SEQ ID NO: 3774553 - RNA, 18 nt, Human
cucagaguauggagcuca

SEQ ID NO: 3774554 - RNA, 17 nt, Human
cucagagucggaacgga

SEQ ID NO: 3774555 - RNA, 16 nt, Human
cucagagugguggggg

SEQ ID NO: 3774556 - RNA, 16 nt, Human
cucagauauuugcacc

SEQ ID NO: 3774557 - RNA, 18 nt, Human
cucagaucacuacugcag

SEQ ID NO: 3774558 - RNA, 20 nt, Human
cucagaucacuacugcaguc

SEQ ID NO: 3774559 - RNA, 21 nt, Human
cucagaucaguguaccauuug

SEQ ID NO: 3774560 - RNA, 13 nt, Human
cucagauccaggg

SEQ ID NO: 3774561 - RNA, 15 nt, Human
cucagauccagggac

SEQ ID NO: 3774562 - RNA, 16 nt, Human
cucagauccagggaca

SEQ ID NO: 3774563 - RNA, 18 nt, Human
cucagauccagggacaga

SEQ ID NO: 3774564 - RNA, 22 nt, Human
cucagauccagggacagaggcc

SEQ ID NO: 3774565 - RNA, 20 nt, Human
cucagaucccacuuuugcca

SEQ ID NO: 3774566 - RNA, 15 nt, Human
cucagauccuuguuu

SEQ ID NO: 3774567 - RNA, 17 nt, Human
cucagauccuuguuuca

SEQ ID NO: 3774568 - RNA, 18 nt, Human
cucagaucugucugauag

SEQ ID NO: 3774569 - RNA, 13 nt, Human
cucagaugcucaa

SEQ ID NO: 3774570 - RNA, 14 nt, Human
cucagaugcucaaa

SEQ ID NO: 3774571 - RNA, 15 nt, Human
cucagauggcagcuu

SEQ ID NO: 3774572 - RNA, 14 nt, Human
cucagauuccuucc

SEQ ID NO: 3774573 - RNA, 20 nt, Human
cucagauuccuucccaugga

SEQ ID NO: 3774574 - RNA, 15 nt, Human
cucagauuguaauau

SEQ ID NO: 3774575 - RNA, 13 nt, Human
cucagauuuuauu

SEQ ID NO: 3774576 - RNA, 14 nt, Human
cucagauuuuuccu

SEQ ID NO: 3774577 - RNA, 19 nt, Human
cucagcaaaagaugcuucu

SEQ ID NO: 3774578 - RNA, 13 nt, Human
cucagcaagcccu

SEQ ID NO: 3774579 - RNA, 13 nt, Human
cucagcaaggcca

SEQ ID NO: 3774580 - RNA, 22 nt, Human
cucagcaaggccaccucuuccu

SEQ ID NO: 3774581 - RNA, 20 nt, Human
cucagcacccccuucucugc

SEQ ID NO: 3774582 - RNA, 13 nt, Human
cucagcaccccuu

SEQ ID NO: 3774583 - RNA, 20 nt, Human
cucagcaccccuuccaugug

SEQ ID NO: 3774584 - RNA, 13 nt, Human
cucagcacugccu

SEQ ID NO: 3774585 - RNA, 21 nt, Human
cucagcacugccugcucccau

SEQ ID NO: 3774586 - RNA, 14 nt, Human
cucagcacuuggcc

SEQ ID NO: 3774587 - RNA, 11 nt, Human
cucagcagagu

SEQ ID NO: 3774588 - RNA, 12 nt, Human
cucagcagagug

SEQ ID NO: 3774589 - RNA, 13 nt, Human
cucagcagagugc

SEQ ID NO: 3774590 - RNA, 16 nt, Human
cucagcagagugcuuu

SEQ ID NO: 3774591 - RNA, 12 nt, Human
cucagcagcccu

SEQ ID NO: 3774592 - RNA, 15 nt, Human
cucagcagcccuccu

SEQ ID NO: 3774593 - RNA, 16 nt, Human
cucagcagcccuccuc

SEQ ID NO: 3774594 - RNA, 19 nt, Human
cucagcagcccuccucacc

SEQ ID NO: 3774595 - RNA, 21 nt, Human
cucagcagcccuccucacccc

SEQ ID NO: 3774596 - RNA, 23 nt, Human
cucagcagccgccuuaagcugau

SEQ ID NO: 3774597 - RNA, 20 nt, Human
cucagcagcgaccaccccug

SEQ ID NO: 3774598 - RNA, 23 nt, Human
cucagcagcgaccaccccugccu

SEQ ID NO: 3774599 - RNA, 14 nt, Human
cucagcauauuugu

SEQ ID NO: 3774600 - RNA, 15 nt, Human
cucagcauuucuuuu

SEQ ID NO: 3774601 - RNA, 14 nt, Human
cucagccaagcaca

SEQ ID NO: 3774602 - RNA, 16 nt, Human
cucagccaagcacagu

SEQ ID NO: 3774603 - RNA, 17 nt, Human
cucagccacacccaggc

SEQ ID NO: 3774604 - RNA, 19 nt, Human
cucagccacacccaggcac

SEQ ID NO: 3774605 - RNA, 12 nt, Human
cucagccagccu

SEQ ID NO: 3774606 - RNA, 13 nt, Human
cucagccagccuc

SEQ ID NO: 3774607 - RNA, 19 nt, Human
cucagcccacauagugaug

SEQ ID NO: 3774608 - RNA, 21 nt, Human
cucagcccacauagugauggu

SEQ ID NO: 3774609 - RNA, 19 nt, Human
cucagcccaccccccucau

SEQ ID NO: 3774610 - RNA, 13 nt, Human
cucagcccagaag

SEQ ID NO: 3774611 - RNA, 20 nt, Human
cucagcccagaagaaaauuc

SEQ ID NO: 3774612 - RNA, 22 nt, Human
cucagccccaccccagggcagc

SEQ ID NO: 3774613 - RNA, 11 nt, Human
cucagccccuc

SEQ ID NO: 3774614 - RNA, 16 nt, Human
cucagccccucuugcc

SEQ ID NO: 3774615 - RNA, 16 nt, Human
cucagccccuuucccu

SEQ ID NO: 3774616 - RNA, 11 nt, Human
cucagcccuga

SEQ ID NO: 3774617 - RNA, 13 nt, Human
cucagcccugacc

SEQ ID NO: 3774618 - RNA, 15 nt, Human
cucagcccugacccu

SEQ ID NO: 3774619 - RNA, 17 nt, Human
cucagcccugacccugu

SEQ ID NO: 3774620 - RNA, 12 nt, Human
cucagcccugga

SEQ ID NO: 3774621 - RNA, 18 nt, Human
cucagcccuggaggugcc

SEQ ID NO: 3774622 - RNA, 20 nt, Human
cucagcccuggaggugccag

SEQ ID NO: 3774623 - RNA, 13 nt, Human
cucagcccugggc

SEQ ID NO: 3774624 - RNA, 11 nt, Human
cucagcccugu

SEQ ID NO: 3774625 - RNA, 20 nt, Human
cucagccucaauaagccuug

SEQ ID NO: 3774626 - RNA, 13 nt, Human
cucagccucccaa

SEQ ID NO: 3774627 - RNA, 15 nt, Human
cucagccucccaaag

SEQ ID NO: 3774628 - RNA, 21 nt, Human
cucagccucccaaagugcugg

SEQ ID NO: 3774629 - RNA, 22 nt, Human
cucagccucccaaagugcuggg

SEQ ID NO: 3774630 - RNA, 18 nt, Human
cucagccucccaaguaac

SEQ ID NO: 3774631 - RNA, 12 nt, Human
cucagccucccg

SEQ ID NO: 3774632 - RNA, 13 nt, Human
cucagccucccga

SEQ ID NO: 3774633 - RNA, 14 nt, Human
cucagccucccgag

SEQ ID NO: 3774634 - RNA, 12 nt, Human
cucagccuccug

SEQ ID NO: 3774635 - RNA, 15 nt, Human
cucagccucuccccu

SEQ ID NO: 3774636 - RNA, 16 nt, Human
cucagccucucgaagu

SEQ ID NO: 3774637 - RNA, 13 nt, Human
cucagccugcaca

SEQ ID NO: 3774638 - RNA, 17 nt, Human
cucagccugcugcccag

SEQ ID NO: 3774639 - RNA, 13 nt, Human
cucagccuggcca

SEQ ID NO: 3774640 - RNA, 16 nt, Human
cucagccuggccagac

SEQ ID NO: 3774641 - RNA, 17 nt, Human
cucagccuggccagaca

SEQ ID NO: 3774642 - RNA, 11 nt, Human
cucagccuggg

SEQ ID NO: 3774643 - RNA, 14 nt, Human
cucagccugggaca

SEQ ID NO: 3774644 - RNA, 18 nt, Human
cucagccugugcugcccg

SEQ ID NO: 3774645 - RNA, 17 nt, Human
cucagccuugccagaga

SEQ ID NO: 3774646 - RNA, 14 nt, Human
cucagcgcggcccu

SEQ ID NO: 3774647 - RNA, 16 nt, Human
cucagcgcggcccucc

SEQ ID NO: 3774648 - RNA, 13 nt, Human
cucagcggggaca

SEQ ID NO: 3774649 - RNA, 18 nt, Human
cucagcggggacagcucc

SEQ ID NO: 3774650 - RNA, 19 nt, Human
cucagcggggacagcuccu

SEQ ID NO: 3774651 - RNA, 23 nt, Human
cucagcggggacagcuccuucug

SEQ ID NO: 3774652 - RNA, 20 nt, Human
cucagcucacugcaaccucc

SEQ ID NO: 3774653 - RNA, 16 nt, Human
cucagcucagcgccag

SEQ ID NO: 3774654 - RNA, 17 nt, Human
cucagcucagcgccagc

SEQ ID NO: 3774655 - RNA, 19 nt, Human
cucagcucccaaggcucug

SEQ ID NO: 3774656 - RNA, 18 nt, Human
cucagcucccauuucuac

SEQ ID NO: 3774657 - RNA, 12 nt, Human
cucagcucccca

SEQ ID NO: 3774658 - RNA, 14 nt, Human
cucagcucccccug

SEQ ID NO: 3774659 - RNA, 16 nt, Human
cucagcucccccuguc

SEQ ID NO: 3774660 - RNA, 16 nt, Human
cucagcucggcucagc

SEQ ID NO: 3774661 - RNA, 20 nt, Human
cucagcucucaguugcagcc

SEQ ID NO: 3774662 - RNA, 12 nt, Human
cucagcucuggc

SEQ ID NO: 3774663 - RNA, 13 nt, Human
cucagcucuggcu

SEQ ID NO: 3774664 - RNA, 12 nt, Human
cucagcucuggg

SEQ ID NO: 3774665 - RNA, 11 nt, Human
cucagcugcau

SEQ ID NO: 3774666 - RNA, 16 nt, Human
cucagcugccucacuu

SEQ ID NO: 3774667 - RNA, 15 nt, Human
cucagcugcuucucc

SEQ ID NO: 3774668 - RNA, 16 nt, Human
cucagcugcuucuccc

SEQ ID NO: 3774669 - RNA, 18 nt, Human
cucagcugucaaggcuca

SEQ ID NO: 3774670 - RNA, 16 nt, Human
cucagcuguccugcag

SEQ ID NO: 3774671 - RNA, 20 nt, Human
cucagcuuaucucuuuuaua

SEQ ID NO: 3774672 - RNA, 16 nt, Human
cucagcuuccuaccca

SEQ ID NO: 3774673 - RNA, 16 nt, Human
cucagcuucuccugug

SEQ ID NO: 3774674 - RNA, 21 nt, Human
cucagcuuugagaagccuuca

SEQ ID NO: 3774675 - RNA, 20 nt, Human
cucaggaaagaauagaaaga

SEQ ID NO: 3774676 - RNA, 19 nt, Human
cucaggaaaugcugaccca

SEQ ID NO: 3774677 - RNA, 15 nt, Human
cucaggaacuagacu

SEQ ID NO: 3774678 - RNA, 13 nt, Human
cucaggaagaaca

SEQ ID NO: 3774679 - RNA, 15 nt, Human
cucaggaagccccca

SEQ ID NO: 3774680 - RNA, 14 nt, Human
cucaggacacaggc

SEQ ID NO: 3774681 - RNA, 18 nt, Human
cucaggacacaggccugu

SEQ ID NO: 3774682 - RNA, 12 nt, Human
cucaggacagau

SEQ ID NO: 3774683 - RNA, 13 nt, Human
cucaggacccucg

SEQ ID NO: 3774684 - RNA, 15 nt, Human
cucaggacccucgcu

SEQ ID NO: 3774685 - RNA, 22 nt, Human
cucaggaccugggaccuccccu

SEQ ID NO: 3774686 - RNA, 14 nt, Human
cucaggacucagaa

SEQ ID NO: 3774687 - RNA, 14 nt, Human
cucaggacuccagc

SEQ ID NO: 3774688 - RNA, 15 nt, Human
cucaggacuccucuc

SEQ ID NO: 3774689 - RNA, 16 nt, Human
cucaggacuccucucc

SEQ ID NO: 3774690 - RNA, 15 nt, Human
cucaggacugggagc

SEQ ID NO: 3774691 - RNA, 23 nt, Human
cucaggagccgaagcccaggggc

SEQ ID NO: 3774692 - RNA, 16 nt, Human
cucaggagccucugcu

SEQ ID NO: 3774693 - RNA, 16 nt, Human
cucaggagccugugac

SEQ ID NO: 3774694 - RNA, 14 nt, Human
cucaggaggcugag

SEQ ID NO: 3774695 - RNA, 18 nt, Human
cucaggaggcugaggcag

SEQ ID NO: 3774696 - RNA, 23 nt, Human
cucaggaggcugaggcaggagga

SEQ ID NO: 3774697 - RNA, 16 nt, Human
cucaggaggcugaggg

SEQ ID NO: 3774698 - RNA, 21 nt, Human
cucaggaugagggaaaagaaa

SEQ ID NO: 3774699 - RNA, 20 nt, Human
cucaggauuuaaaaacugga

SEQ ID NO: 3774700 - RNA, 21 nt, Human
cucaggcaaggucuggccuca

SEQ ID NO: 3774701 - RNA, 13 nt, Human
cucaggcacacag

SEQ ID NO: 3774702 - RNA, 16 nt, Human
cucaggcacacagcua

SEQ ID NO: 3774703 - RNA, 19 nt, Human
cucaggcacuagccuuugg

SEQ ID NO: 3774704 - RNA, 14 nt, Human
cucaggcagcucaa

SEQ ID NO: 3774705 - RNA, 17 nt, Human
cucaggcaucauuccac

SEQ ID NO: 3774706 - RNA, 22 nt, Human
cucaggcauggaugaauaaaug

SEQ ID NO: 3774707 - RNA, 20 nt, Human
cucaggccaaacucaccugc

SEQ ID NO: 3774708 - RNA, 21 nt, Human
cucaggccaaacucaccugcc

SEQ ID NO: 3774709 - RNA, 13 nt, Human
cucaggccaccug

SEQ ID NO: 3774710 - RNA, 19 nt, Human
cucaggccaccugcccccu

SEQ ID NO: 3774711 - RNA, 22 nt, Human
cucaggccagcugcuugggcuu

SEQ ID NO: 3774712 - RNA, 23 nt, Human
cucaggccggcagccccagccug

SEQ ID NO: 3774713 - RNA, 24 nt, Human
cucaggccggcagccccagccugc

SEQ ID NO: 3774714 - RNA, 14 nt, Human
cucaggcucugccc

SEQ ID NO: 3774715 - RNA, 16 nt, Human
cucaggcucugcccug

SEQ ID NO: 3774716 - RNA, 19 nt, Human
cucaggcucugcccugccc

SEQ ID NO: 3774717 - RNA, 22 nt, Human
cucaggcucugcccugcccuag

SEQ ID NO: 3774718 - RNA, 15 nt, Human
cucaggcugccugag

SEQ ID NO: 3774719 - RNA, 21 nt, Human
cucaggcugccugagucguga

SEQ ID NO: 3774720 - RNA, 13 nt, Human
cucaggcugcugg

SEQ ID NO: 3774721 - RNA, 15 nt, Human
cucaggcugcuggag

SEQ ID NO: 3774722 - RNA, 16 nt, Human
cucaggcugcuggagg

SEQ ID NO: 3774723 - RNA, 17 nt, Human
cucaggcuggugggagg

SEQ ID NO: 3774724 - RNA, 15 nt, Human
cucaggcuugaaaug

SEQ ID NO: 3774725 - RNA, 20 nt, Human
cucagggaaaagcagcucuc

SEQ ID NO: 3774726 - RNA, 23 nt, Human
cucagggaaaagcagcucucccc

SEQ ID NO: 3774727 - RNA, 13 nt, Human
cucagggaaagca

SEQ ID NO: 3774728 - RNA, 14 nt, Human
cucagggaagccca

SEQ ID NO: 3774729 - RNA, 15 nt, Human
cucagggaagcccag

SEQ ID NO: 3774730 - RNA, 23 nt, Human
cucagggaagcccagcuccaggg

SEQ ID NO: 3774731 - RNA, 19 nt, Human
cucagggacagagacaccu

SEQ ID NO: 3774732 - RNA, 21 nt, Human
cucagggacagagacaccugc

SEQ ID NO: 3774733 - RNA, 16 nt, Human
cucagggacagagcca

SEQ ID NO: 3774734 - RNA, 21 nt, Human
cucagggacucaucuuucccu

SEQ ID NO: 3774735 - RNA, 19 nt, Human
cucagggagcagggaaggc

SEQ ID NO: 3774736 - RNA, 15 nt, Human
cucagggcagccugc

SEQ ID NO: 3774737 - RNA, 20 nt, Human
cucagggcagcgccaggcug

SEQ ID NO: 3774738 - RNA, 16 nt, Human
cucagggccaggccuc

SEQ ID NO: 3774739 - RNA, 21 nt, Human
cucagggccaggccucucccu

SEQ ID NO: 3774740 - RNA, 13 nt, Human
cucagggccaugc

SEQ ID NO: 3774741 - RNA, 17 nt, Human
cucagggccaugcugag

SEQ ID NO: 3774742 - RNA, 18 nt, Human
cucagggccaugcugagg

SEQ ID NO: 3774743 - RNA, 20 nt, Human
cucagggccaugcugaggcc

SEQ ID NO: 3774744 - RNA, 16 nt, Human
cucagggccccagcac

SEQ ID NO: 3774745 - RNA, 16 nt, Human
cucagggccuggcuca

SEQ ID NO: 3774746 - RNA, 18 nt, Human
cucagggccuggcucagg

SEQ ID NO: 3774747 - RNA, 20 nt, Human
cucagggccuggcucaggug

SEQ ID NO: 3774748 - RNA, 15 nt, Human
cucagggccuggucg

SEQ ID NO: 3774749 - RNA, 13 nt, Human
cucagggcuccca

SEQ ID NO: 3774750 - RNA, 15 nt, Human
cucagggcuccuccc

SEQ ID NO: 3774751 - RNA, 18 nt, Human
cucagggcuccucccagc

SEQ ID NO: 3774752 - RNA, 22 nt, Human
cucagggcuccugccuucuguc

SEQ ID NO: 3774753 - RNA, 15 nt, Human
cucagggcuccuugu

SEQ ID NO: 3774754 - RNA, 16 nt, Human
cucagggcugacacgu

SEQ ID NO: 3774755 - RNA, 18 nt, Human
cucaggggaaaacuguua

SEQ ID NO: 3774756 - RNA, 21 nt, Human
cucaggggcccuggagcagcc

SEQ ID NO: 3774757 - RNA, 21 nt, Human
cucaggggucugagcuccagc

SEQ ID NO: 3774758 - RNA, 17 nt, Human
cucaggguauugcuugc

SEQ ID NO: 3774759 - RNA, 21 nt, Human
cucagggucccugguggcagc

SEQ ID NO: 3774760 - RNA, 18 nt, Human
cucagggucucugcugcc

SEQ ID NO: 3774761 - RNA, 16 nt, Human
cucagggugcagaggu

SEQ ID NO: 3774762 - RNA, 24 nt, Human
cucagguaaucgaccugccucggc

SEQ ID NO: 3774763 - RNA, 20 nt, Human
cucagguacuucucucuccu

SEQ ID NO: 3774764 - RNA, 15 nt, Human
cucagguacuuguaa

SEQ ID NO: 3774765 - RNA, 19 nt, Human
cucaggucacauaaaacuu

SEQ ID NO: 3774766 - RNA, 17 nt, Human
cucaggucccugcaggg

SEQ ID NO: 3774767 - RNA, 18 nt, Human
cucaggucccugcagggc

SEQ ID NO: 3774768 - RNA, 13 nt, Human
cucaggucugagu

SEQ ID NO: 3774769 - RNA, 15 nt, Human
cucaggugcuggggc

SEQ ID NO: 3774770 - RNA, 22 nt, Human
cucaggugcuggggccugguuc

SEQ ID NO: 3774771 - RNA, 14 nt, Human
cucaggugcugucc

SEQ ID NO: 3774772 - RNA, 12 nt, Human
cucagguggcca

SEQ ID NO: 3774773 - RNA, 22 nt, Human
cucagguggccagccuggaucu

SEQ ID NO: 3774774 - RNA, 13 nt, Human
cucagguggccau

SEQ ID NO: 3774775 - RNA, 15 nt, Human
cucagguggccaugc

SEQ ID NO: 3774776 - RNA, 17 nt, Human
cucaggugucccugcac

SEQ ID NO: 3774777 - RNA, 20 nt, Human
cucagguuccuauggcuggc

SEQ ID NO: 3774778 - RNA, 14 nt, Human
cucagguugucuga

SEQ ID NO: 3774779 - RNA, 18 nt, Human
cucaguaauuuagaaauc

SEQ ID NO: 3774780 - RNA, 19 nt, Human
cucaguaauuuagaaauca

SEQ ID NO: 3774781 - RNA, 22 nt, Human
cucaguaauuuagaaaucauuu

SEQ ID NO: 3774782 - RNA, 13 nt, Human
cucaguaccccau

SEQ ID NO: 3774783 - RNA, 18 nt, Human
cucaguacuuuggaggcc

SEQ ID NO: 3774784 - RNA, 19 nt, Human
cucaguacuuuggaggccc

SEQ ID NO: 3774785 - RNA, 21 nt, Human
cucaguacuuuggaggccccu

SEQ ID NO: 3774786 - RNA, 23 nt, Human
cucaguacuuuggaggccccuau

SEQ ID NO: 3774787 - RNA, 16 nt, Human
cucaguagucccugca

SEQ ID NO: 3774788 - RNA, 15 nt, Human
cucagucaugcauaa

SEQ ID NO: 3774789 - RNA, 18 nt, Human
cucagucaugcauaaaua

SEQ ID NO: 3774790 - RNA, 18 nt, Human
cucagucauuagacuccu

SEQ ID NO: 3774791 - RNA, 16 nt, Human
cucaguccaccugagc

SEQ ID NO: 3774792 - RNA, 18 nt, Human
cucaguccaccugagcug

SEQ ID NO: 3774793 - RNA, 15 nt, Human
cucaguccauagcag

SEQ ID NO: 3774794 - RNA, 12 nt, Human
cucagucccaaa

SEQ ID NO: 3774795 - RNA, 21 nt, Human
cucagucccaaauccuuccca

SEQ ID NO: 3774796 - RNA, 14 nt, Human
cucaguccuccccu

SEQ ID NO: 3774797 - RNA, 19 nt, Human
cucaguccuccccucacag

SEQ ID NO: 3774798 - RNA, 13 nt, Human
cucagucucagga

SEQ ID NO: 3774799 - RNA, 17 nt, Human
cucagucucucuucucu

SEQ ID NO: 3774800 - RNA, 19 nt, Human
cucagucucucuucucucc

SEQ ID NO: 3774801 - RNA, 13 nt, Human
cucagucuucccu

SEQ ID NO: 3774802 - RNA, 22 nt, Human
cucagucuucccuagggcuggg

SEQ ID NO: 3774803 - RNA, 23 nt, Human
cucagucuucccuagggcugggu

SEQ ID NO: 3774804 - RNA, 19 nt, Human
cucagugaaguugcugcuu

SEQ ID NO: 3774805 - RNA, 19 nt, Human
cucagugacccuggcuccu

SEQ ID NO: 3774806 - RNA, 20 nt, Human
cucagugacccuggcuccuu

SEQ ID NO: 3774807 - RNA, 17 nt, Human
cucagugcaaccucugc

SEQ ID NO: 3774808 - RNA, 22 nt, Human
cucagugcaaccucugcuuccc

SEQ ID NO: 3774809 - RNA, 12 nt, Human
cucagugcagau

SEQ ID NO: 3774810 - RNA, 15 nt, Human
cucagugcagaugga

SEQ ID NO: 3774811 - RNA, 14 nt, Human
cucagugcagcaau

SEQ ID NO: 3774812 - RNA, 22 nt, Human
cucagugccaacuguggcuggu

SEQ ID NO: 3774813 - RNA, 13 nt, Human
cucagugccacua

SEQ ID NO: 3774814 - RNA, 15 nt, Human
cucagugcccuccag

SEQ ID NO: 3774815 - RNA, 16 nt, Human
cucaguggacuuucca

SEQ ID NO: 3774816 - RNA, 14 nt, Human
cucagugucauuua

SEQ ID NO: 3774817 - RNA, 17 nt, Human
cucagugucauuuauga

SEQ ID NO: 3774818 - RNA, 23 nt, Human
cucaguuacacaaaggaccucag

SEQ ID NO: 3774819 - RNA, 21 nt, Human
cucaguucagaaucacuucug

SEQ ID NO: 3774820 - RNA, 14 nt, Human
cucaguucccuugg

SEQ ID NO: 3774821 - RNA, 17 nt, Human
cucaguucccuuggccu

SEQ ID NO: 3774822 - RNA, 18 nt, Human
cucaguucccuuggccuc

SEQ ID NO: 3774823 - RNA, 20 nt, Human
cucaguucccuuggccucag

SEQ ID NO: 3774824 - RNA, 14 nt, Human
cucaguuggaaaua

SEQ ID NO: 3774825 - RNA, 11 nt, Human
cucaguuguag

SEQ ID NO: 3774826 - RNA, 21 nt, Human
cucaguuguagaauguauugu

SEQ ID NO: 3774827 - RNA, 20 nt, Human
cucaguugugacuaacuaga

SEQ ID NO: 3774828 - RNA, 21 nt, Human
cucaguugugcagcuuuuggu

SEQ ID NO: 3774829 - RNA, 15 nt, Human
cucaguuuaauccuu

SEQ ID NO: 3774830 - RNA, 21 nt, Human
cucaguuuaauccuucuaguu

SEQ ID NO: 3774831 - RNA, 18 nt, Human
cucaguuuuaucauuuuc

SEQ ID NO: 3774832 - RNA, 17 nt, Human
cucauaacggaucagaa

SEQ ID NO: 3774833 - RNA, 19 nt, Human
cucauaacggaucagaaau

SEQ ID NO: 3774834 - RNA, 14 nt, Human
cucauaacuugaga

SEQ ID NO: 3774835 - RNA, 17 nt, Human
cucauaacuugagaccu

SEQ ID NO: 3774836 - RNA, 18 nt, Human
cucauaauagacuuccca

SEQ ID NO: 3774837 - RNA, 13 nt, Human
cucauaaugugaa

SEQ ID NO: 3774838 - RNA, 13 nt, Human
cucauaauuuaua

SEQ ID NO: 3774839 - RNA, 15 nt, Human
cucauaauuuauaca

SEQ ID NO: 3774840 - RNA, 15 nt, Human
cucauacccaccccc

SEQ ID NO: 3774841 - RNA, 18 nt, Human
cucauacccacccccacc

SEQ ID NO: 3774842 - RNA, 16 nt, Human
cucauacccucccucc

SEQ ID NO: 3774843 - RNA, 21 nt, Human
cucauacuacauugaguagac

SEQ ID NO: 3774844 - RNA, 14 nt, Human
cucauagacacuga

SEQ ID NO: 3774845 - RNA, 16 nt, Human
cucauagcauuaacua

SEQ ID NO: 3774846 - RNA, 18 nt, Human
cucauagcauuaacuaau

SEQ ID NO: 3774847 - RNA, 20 nt, Human
cucauagccccggugugcgg

SEQ ID NO: 3774848 - RNA, 17 nt, Human
cucauagcccucacccu

SEQ ID NO: 3774849 - RNA, 20 nt, Human
cucauagcccucacccuggg

SEQ ID NO: 3774850 - RNA, 21 nt, Human
cucauagcccucacccugggg

SEQ ID NO: 3774851 - RNA, 15 nt, Human
cucauagguuaaaaa

SEQ ID NO: 3774852 - RNA, 22 nt, Human
cucauagguuaaaaaaaaaagu

SEQ ID NO: 3774853 - RNA, 19 nt, Human
cucauagguugagcaauuu

SEQ ID NO: 3774854 - RNA, 18 nt, Human
cucauaguaugguggcug

SEQ ID NO: 3774855 - RNA, 17 nt, Human
cucauauaauuauaugu

SEQ ID NO: 3774856 - RNA, 21 nt, Human
cucauaucaacuuagucaaua

SEQ ID NO: 3774857 - RNA, 13 nt, Human
cucauauggccca

SEQ ID NO: 3774858 - RNA, 22 nt, Human
cucauauuccugcagccuggag

SEQ ID NO: 3774859 - RNA, 24 nt, Human
cucauauuccugcagccuggaggc

SEQ ID NO: 3774860 - RNA, 15 nt, Human
cucauauuuaaagac

SEQ ID NO: 3774861 - RNA, 12 nt, Human
cucauauuuccc

SEQ ID NO: 3774862 - RNA, 21 nt, Human
cucauauuuuguauauaucug

SEQ ID NO: 3774863 - RNA, 16 nt, Human
cucaucaacugaauga

SEQ ID NO: 3774864 - RNA, 18 nt, Human
cucaucaauggggccagu

SEQ ID NO: 3774865 - RNA, 14 nt, Human
cucaucacacacau

SEQ ID NO: 3774866 - RNA, 15 nt, Human
cucaucacuggauga

SEQ ID NO: 3774867 - RNA, 16 nt, Human
cucaucacuguggcug

SEQ ID NO: 3774868 - RNA, 20 nt, Human
cucaucagaaacaauuucug

SEQ ID NO: 3774869 - RNA, 13 nt, Human
cucaucaggauga

SEQ ID NO: 3774870 - RNA, 22 nt, Human
cucaucaggaugaacccaggac

SEQ ID NO: 3774871 - RNA, 14 nt, Human
cucaucauucucug

SEQ ID NO: 3774872 - RNA, 19 nt, Human
cucaucauucucugucuca

SEQ ID NO: 3774873 - RNA, 22 nt, Human
cucaucauucucugucucaucc

SEQ ID NO: 3774874 - RNA, 20 nt, Human
cucauccaaacaauuuaaaa

SEQ ID NO: 3774875 - RNA, 16 nt, Human
cucauccagggcucug

SEQ ID NO: 3774876 - RNA, 19 nt, Human
cucaucccacgcacuccau

SEQ ID NO: 3774877 - RNA, 21 nt, Human
cucaucccaugagacccuggu

SEQ ID NO: 3774878 - RNA, 14 nt, Human
cucauccccagggg

SEQ ID NO: 3774879 - RNA, 16 nt, Human
cucaucccguguucuc

SEQ ID NO: 3774880 - RNA, 13 nt, Human
cucauccuccagu

SEQ ID NO: 3774881 - RNA, 22 nt, Human
cucauccuccaguaccuugcuu

SEQ ID NO: 3774882 - RNA, 13 nt, Human
cucauccuccugg

SEQ ID NO: 3774883 - RNA, 16 nt, Human
cucauccuccuucuuc

SEQ ID NO: 3774884 - RNA, 14 nt, Human
cucauccugaacag

SEQ ID NO: 3774885 - RNA, 16 nt, Human
cucauccuuguauaaa

SEQ ID NO: 3774886 - RNA, 18 nt, Human
cucaucuaucucaauccu

SEQ ID NO: 3774887 - RNA, 19 nt, Human
cucaucuaugaggaaaggu

SEQ ID NO: 3774888 - RNA, 17 nt, Human
cucaucuccccaucauu

SEQ ID NO: 3774889 - RNA, 22 nt, Human
cucaucucuaacagcucaggau

SEQ ID NO: 3774890 - RNA, 23 nt, Human
cucaucucuaacagcucaggauc

SEQ ID NO: 3774891 - RNA, 20 nt, Human
cucaucucuuagcuccccuc

SEQ ID NO: 3774892 - RNA, 22 nt, Human
cucaucucuuagcuccccucca

SEQ ID NO: 3774893 - RNA, 15 nt, Human
cucaucucuucuuuu

SEQ ID NO: 3774894 - RNA, 13 nt, Human
cucaucugcaaaa

SEQ ID NO: 3774895 - RNA, 14 nt, Human
cucaucugcacccu

SEQ ID NO: 3774896 - RNA, 18 nt, Human
cucaucugcacccuucuu

SEQ ID NO: 3774897 - RNA, 12 nt, Human
cucaucugcuca

SEQ ID NO: 3774898 - RNA, 17 nt, Human
cucaucugcucagcagc

SEQ ID NO: 3774899 - RNA, 13 nt, Human
cucaucugcuggu

SEQ ID NO: 3774900 - RNA, 14 nt, Human
cucaucugcugguc

SEQ ID NO: 3774901 - RNA, 15 nt, Human
cucaucugcuggucc

SEQ ID NO: 3774902 - RNA, 12 nt, Human
cucaucugugau

SEQ ID NO: 3774903 - RNA, 17 nt, Human
cucaucuucuucaccau

SEQ ID NO: 3774904 - RNA, 13 nt, Human
cucaucuugugaa

SEQ ID NO: 3774905 - RNA, 15 nt, Human
cucaucuuucccucc

SEQ ID NO: 3774906 - RNA, 18 nt, Human
cucaucuuucccuccuug

SEQ ID NO: 3774907 - RNA, 21 nt, Human
cucaugaaccucaagcugcau

SEQ ID NO: 3774908 - RNA, 16 nt, Human
cucaugaauguaaauu

SEQ ID NO: 3774909 - RNA, 21 nt, Human
cucaugaauguaaauuuguac

SEQ ID NO: 3774910 - RNA, 19 nt, Human
cucaugaggggagaggaga

SEQ ID NO: 3774911 - RNA, 22 nt, Human
cucaugaggggcccgagcagaa

SEQ ID NO: 3774912 - RNA, 23 nt, Human
cucaugauagaaggcuaugggga

SEQ ID NO: 3774913 - RNA, 15 nt, Human
cucaugcagccguga

SEQ ID NO: 3774914 - RNA, 20 nt, Human
cucaugcauagucccagcua

SEQ ID NO: 3774915 - RNA, 14 nt, Human
cucaugcaucucca

SEQ ID NO: 3774916 - RNA, 22 nt, Human
cucaugcaucuccaccugcucc

SEQ ID NO: 3774917 - RNA, 16 nt, Human
cucaugcauuguccuc

SEQ ID NO: 3774918 - RNA, 21 nt, Human
cucaugcccacccccugcccu

SEQ ID NO: 3774919 - RNA, 22 nt, Human
cucaugcccacccccugcccug

SEQ ID NO: 3774920 - RNA, 17 nt, Human
cucaugcccccuuucag

SEQ ID NO: 3774921 - RNA, 16 nt, Human
cucaugccccuggcug

SEQ ID NO: 3774922 - RNA, 17 nt, Human
cucaugccccuggcugg

SEQ ID NO: 3774923 - RNA, 22 nt, Human
cucaugcugccaauauccuaau

SEQ ID NO: 3774924 - RNA, 15 nt, Human
cucauggccccucug

SEQ ID NO: 3774925 - RNA, 15 nt, Human
cucaugggccccucu

SEQ ID NO: 3774926 - RNA, 14 nt, Human
cucauggguggcac

SEQ ID NO: 3774927 - RNA, 17 nt, Human
cucaugguccccauggc

SEQ ID NO: 3774928 - RNA, 16 nt, Human
cucauguaucaucugg

SEQ ID NO: 3774929 - RNA, 18 nt, Human
cucaugugacucuuucca

SEQ ID NO: 3774930 - RNA, 23 nt, Human
cucauguuaaauaggcggggcuu

SEQ ID NO: 3774931 - RNA, 14 nt, Human
cucauguucuuaau

SEQ ID NO: 3774932 - RNA, 17 nt, Human
cucauguugaaacuuua

SEQ ID NO: 3774933 - RNA, 23 nt, Human
cucauguugaagccacugccuuc

SEQ ID NO: 3774934 - RNA, 13 nt, Human
cucauguuuauga

SEQ ID NO: 3774935 - RNA, 17 nt, Human
cucauuaaaagaauauc

SEQ ID NO: 3774936 - RNA, 15 nt, Human
cucauuaaacuuuuu

SEQ ID NO: 3774937 - RNA, 16 nt, Human
cucauuacggcuccuc

SEQ ID NO: 3774938 - RNA, 18 nt, Human
cucauuacugggccuuag

SEQ ID NO: 3774939 - RNA, 19 nt, Human
cucauuagaauuaccauuu

SEQ ID NO: 3774940 - RNA, 12 nt, Human
cucauuagacug

SEQ ID NO: 3774941 - RNA, 21 nt, Human
cucauuagcauuuugcuaaau

SEQ ID NO: 3774942 - RNA, 23 nt, Human
cucauuaggcaugguuuugggcu

SEQ ID NO: 3774943 - RNA, 23 nt, Human
cuccacucagcuguccugcagca

SEQ ID NO: 3774944 - RNA, 16 nt, Human
cuccacucaugugacu

SEQ ID NO: 3774945 - RNA, 22 nt, Human
cuccacucaugugacucuuucc

SEQ ID NO: 3774946 - RNA, 14 nt, Human
cuccacucccacuu

SEQ ID NO: 3774947 - RNA, 14 nt, Human
cuccacuccuuccu

SEQ ID NO: 3774948 - RNA, 15 nt, Human
cuccacucuccccca

SEQ ID NO: 3774949 - RNA, 19 nt, Human
cuccacucucuaccagaua

SEQ ID NO: 3774950 - RNA, 17 nt, Human
cuccacucugaguccca

SEQ ID NO: 3774951 - RNA, 12 nt, Human
cuccacugcccu

SEQ ID NO: 3774952 - RNA, 11 nt, Human
cuccacugccu

SEQ ID NO: 3774953 - RNA, 15 nt, Human
cuccacugccuucga

SEQ ID NO: 3774954 - RNA, 13 nt, Human
cuccacuggaugg

SEQ ID NO: 3774955 - RNA, 23 nt, Human
cuccacuggccggagucagugcc

SEQ ID NO: 3774956 - RNA, 13 nt, Human
cuccacuggcucc

SEQ ID NO: 3774957 - RNA, 9 nt, Human
cuccacugu

SEQ ID NO: 3774958 - RNA, 12 nt, Human
cuccacugucac

SEQ ID NO: 3774959 - RNA, 13 nt, Human
cuccacugucacc

SEQ ID NO: 3774960 - RNA, 17 nt, Human
cuccacugugccuuugc

SEQ ID NO: 3774961 - RNA, 17 nt, Human
cuccacuuggcauuagc

SEQ ID NO: 3774962 - RNA, 13 nt, Human
cuccacuuggucu

SEQ ID NO: 3774963 - RNA, 16 nt, Human
cuccacuuucuagcca

SEQ ID NO: 3774964 - RNA, 15 nt, Human
cuccacuuuguugga

SEQ ID NO: 3774965 - RNA, 19 nt, Human
cuccagaaaugucccuuuc

SEQ ID NO: 3774966 - RNA, 14 nt, Human
cuccagaagauagc

SEQ ID NO: 3774967 - RNA, 14 nt, Human
cuccagaagccucu

SEQ ID NO: 3774968 - RNA, 15 nt, Human
cuccagaagccucug

SEQ ID NO: 3774969 - RNA, 16 nt, Human
cuccagaagccucugg

SEQ ID NO: 3774970 - RNA, 21 nt, Human
cuccagaaucuaaagccagug

SEQ ID NO: 3774971 - RNA, 15 nt, Human
cuccagaauuuccca

SEQ ID NO: 3774972 - RNA, 16 nt, Human
cuccagacccccaccc

SEQ ID NO: 3774973 - RNA, 18 nt, Human
cuccagacccccaccccu

SEQ ID NO: 3774974 - RNA, 15 nt, Human
cuccagaccccuggc

SEQ ID NO: 3774975 - RNA, 19 nt, Human
cuccagaccccuggcuuuu

SEQ ID NO: 3774976 - RNA, 12 nt, Human
cuccagaccuga

SEQ ID NO: 3774977 - RNA, 23 nt, Human
cuccagaccugauccuggaggcc

SEQ ID NO: 3774978 - RNA, 20 nt, Human
cuccagacguaggggagggg

SEQ ID NO: 3774979 - RNA, 18 nt, Human
cuccagacucucugugaa

SEQ ID NO: 3774980 - RNA, 21 nt, Human
cuccagagcugcggugucucc

SEQ ID NO: 3774981 - RNA, 20 nt, Human
cuccagagggcacucugcuu

SEQ ID NO: 3774982 - RNA, 21 nt, Human
cuccagagggcacucugcuug

SEQ ID NO: 3774983 - RNA, 20 nt, Human
cuccagaguggggaugacau

SEQ ID NO: 3774984 - RNA, 17 nt, Human
cuccagaugcagggcag

SEQ ID NO: 3774985 - RNA, 20 nt, Human
cuccagauuuuucggaggcc

SEQ ID NO: 3774986 - RNA, 23 nt, Human
cuccagauuuuucggaggcccca

SEQ ID NO: 3774987 - RNA, 16 nt, Human
cuccagcaacacagcc

SEQ ID NO: 3774988 - RNA, 18 nt, Human
cuccagcaacacagccug

SEQ ID NO: 3774989 - RNA, 21 nt, Human
cuccagcaacuucuucuccau

SEQ ID NO: 3774990 - RNA, 11 nt, Human
cuccagcacaa

SEQ ID NO: 3774991 - RNA, 18 nt, Human
cuccagcaccauccgcca

SEQ ID NO: 3774992 - RNA, 21 nt, Human
cuccagccaaccccuguggag

SEQ ID NO: 3774993 - RNA, 12 nt, Human
cuccagccagca

SEQ ID NO: 3774994 - RNA, 20 nt, Human
cuccagccagcgccucccuc

SEQ ID NO: 3774995 - RNA, 13 nt, Human
cuccagcccacgu

SEQ ID NO: 3774996 - RNA, 19 nt, Human
cuccagccccucuuggaga

SEQ ID NO: 3774997 - RNA, 21 nt, Human
cuccagccccucuuggagaag

SEQ ID NO: 3774998 - RNA, 12 nt, Human
cuccagccccug

SEQ ID NO: 3774999 - RNA, 14 nt, Human
cuccagccccugga

SEQ ID NO: 3775000 - RNA, 16 nt, Human
cuccagccccuggaug

SEQ ID NO: 3775001 - RNA, 16 nt, Human
cuccagccccuguccc

SEQ ID NO: 3775002 - RNA, 17 nt, Human
cuccagccccuguccca

SEQ ID NO: 3775003 - RNA, 21 nt, Human
cuccagccccuucucagaauc

SEQ ID NO: 3775004 - RNA, 22 nt, Human
cuccagccccuucucagaaucu

SEQ ID NO: 3775005 - RNA, 14 nt, Human
cuccagccccuuuc

SEQ ID NO: 3775006 - RNA, 18 nt, Human
cuccagccccuuuccaaa

SEQ ID NO: 3775007 - RNA, 15 nt, Human
cuccagcccgggagc

SEQ ID NO: 3775008 - RNA, 14 nt, Human
cuccagccucagcu

SEQ ID NO: 3775009 - RNA, 11 nt, Human
cuccagccucu

SEQ ID NO: 3775010 - RNA, 17 nt, Human
cuccagccucuguuccc

SEQ ID NO: 3775011 - RNA, 11 nt, Human
cuccagccuga

SEQ ID NO: 3775012 - RNA, 12 nt, Human
cuccagccugaa

SEQ ID NO: 3775013 - RNA, 14 nt, Human
cuccagccugagca

SEQ ID NO: 3775014 - RNA, 23 nt, Human
cuccagccugcccaagcccaggc

SEQ ID NO: 3775015 - RNA, 19 nt, Human
cuccagccugccuggcagg

SEQ ID NO: 3775016 - RNA, 21 nt, Human
cuccagccuggacccccagcu

SEQ ID NO: 3775017 - RNA, 22 nt, Human
cuccagccuggacccccagcuu

SEQ ID NO: 3775018 - RNA, 12 nt, Human
cuccagccuggc

SEQ ID NO: 3775019 - RNA, 13 nt, Human
cuccagccuggcu

SEQ ID NO: 3775020 - RNA, 13 nt, Human
cuccagcggcccu

SEQ ID NO: 3775021 - RNA, 15 nt, Human
cuccagcggcccugu

SEQ ID NO: 3775022 - RNA, 18 nt, Human
cuccagcgucagcugcuc

SEQ ID NO: 3775023 - RNA, 23 nt, Human
cuccagcgucagcugcucccugg

SEQ ID NO: 3775024 - RNA, 20 nt, Human
cuccagcgucaucggacucu

SEQ ID NO: 3775025 - RNA, 18 nt, Human
cuccagcucaccagcccc

SEQ ID NO: 3775026 - RNA, 22 nt, Human
cuccagcucagaacccagggcu

SEQ ID NO: 3775027 - RNA, 13 nt, Human
cuccagcucagca

SEQ ID NO: 3775028 - RNA, 14 nt, Human
cuccagcucagcag

SEQ ID NO: 3775029 - RNA, 15 nt, Human
cuccagcucccugug

SEQ ID NO: 3775030 - RNA, 22 nt, Human
cuccagcucccugugcccccag

SEQ ID NO: 3775031 - RNA, 11 nt, Human
cuccagcuccu

SEQ ID NO: 3775032 - RNA, 14 nt, Human
cuccagcugcacca

SEQ ID NO: 3775033 - RNA, 13 nt, Human
cuccagcugcccc

SEQ ID NO: 3775034 - RNA, 22 nt, Human
cuccagcuggccgggagccuga

SEQ ID NO: 3775035 - RNA, 20 nt, Human
cuccagcugggcucugcaau

SEQ ID NO: 3775036 - RNA, 19 nt, Human
cuccagcuggguuggaaaa

SEQ ID NO: 3775037 - RNA, 13 nt, Human
cuccagcuucccg

SEQ ID NO: 3775038 - RNA, 19 nt, Human
cuccagcuucugguacucu

SEQ ID NO: 3775039 - RNA, 21 nt, Human
cuccagcuucugguacucucc

SEQ ID NO: 3775040 - RNA, 12 nt, Human
cuccagcuugug

SEQ ID NO: 3775041 - RNA, 21 nt, Human
cuccagcuuguggagccccac

SEQ ID NO: 3775042 - RNA, 15 nt, Human
cuccagcuuuccugu

SEQ ID NO: 3775043 - RNA, 12 nt, Human
cuccaggaacca

SEQ ID NO: 3775044 - RNA, 15 nt, Human
cuccaggaagaaaga

SEQ ID NO: 3775045 - RNA, 21 nt, Human
cuccaggaaggggcuggacug

SEQ ID NO: 3775046 - RNA, 13 nt, Human
cuccaggagagga

SEQ ID NO: 3775047 - RNA, 11 nt, Human
cuccaggagca

SEQ ID NO: 3775048 - RNA, 23 nt, Human
cuccaggagcagccacauuccug

SEQ ID NO: 3775049 - RNA, 11 nt, Human
cuccaggagcu

SEQ ID NO: 3775050 - RNA, 19 nt, Human
cuccaggauugaagagcau

SEQ ID NO: 3775051 - RNA, 11 nt, Human
cuccaggcagg

SEQ ID NO: 3775052 - RNA, 22 nt, Human
cuccaggcauuuagcccucaca

SEQ ID NO: 3775053 - RNA, 20 nt, Human
cuccaggccacauggggcug

SEQ ID NO: 3775054 - RNA, 11 nt, Human
cuccaggccca

SEQ ID NO: 3775055 - RNA, 16 nt, Human
cuccaggcccaaggcu

SEQ ID NO: 3775056 - RNA, 17 nt, Human
cuccaggcccaaggcuc

SEQ ID NO: 3775057 - RNA, 22 nt, Human
cuccaggcccaaggcucccgga

SEQ ID NO: 3775058 - RNA, 16 nt, Human
cuccaggcccgucugu

SEQ ID NO: 3775059 - RNA, 19 nt, Human
cuccaggcccgucugucca

SEQ ID NO: 3775060 - RNA, 13 nt, Human
cuccaggccugcc

SEQ ID NO: 3775061 - RNA, 20 nt, Human
cuccaggccugccucccacu

SEQ ID NO: 3775062 - RNA, 13 nt, Human
cuccaggcgccgg

SEQ ID NO: 3775063 - RNA, 14 nt, Human
cuccaggcgccggc

SEQ ID NO: 3775064 - RNA, 23 nt, Human
cuccaggcuccuuuagcgcccag

SEQ ID NO: 3775065 - RNA, 22 nt, Human
cuccaggcuguaucccaugagc

SEQ ID NO: 3775066 - RNA, 23 nt, Human
cuccaggcuguaucccaugagcc

SEQ ID NO: 3775067 - RNA, 17 nt, Human
cuccaggcugucuuuca

SEQ ID NO: 3775068 - RNA, 15 nt, Human
cuccaggcuuuccca

SEQ ID NO: 3775069 - RNA, 22 nt, Human
cuccagggaauccaagccucca

SEQ ID NO: 3775070 - RNA, 18 nt, Human
cuccagggacacacagcc

SEQ ID NO: 3775071 - RNA, 23 nt, Human
cuccagggacagcaacuaucaga

SEQ ID NO: 3775072 - RNA, 18 nt, Human
cuccagggagauuuugag

SEQ ID NO: 3775073 - RNA, 14 nt, Human
cuccagggaguccc

SEQ ID NO: 3775074 - RNA, 20 nt, Human
cuccagggaguccccucccc

SEQ ID NO: 3775075 - RNA, 21 nt, Human
cuccagggaguccccuccccg

SEQ ID NO: 3775076 - RNA, 10 nt, Human
cuccagggcu

SEQ ID NO: 3775077 - RNA, 12 nt, Human
cuccagggcugg

SEQ ID NO: 3775078 - RNA, 13 nt, Human
cuccagggcugga

SEQ ID NO: 3775079 - RNA, 15 nt, Human
cuccagggcuggacu

SEQ ID NO: 3775080 - RNA, 16 nt, Human
cuccagggcuggacug

SEQ ID NO: 3775081 - RNA, 18 nt, Human
cuccagggcuggacugag

SEQ ID NO: 3775082 - RNA, 19 nt, Human
cuccagggcuggacugagg

SEQ ID NO: 3775083 - RNA, 22 nt, Human
cuccaggggcugcuuccuccug

SEQ ID NO: 3775084 - RNA, 12 nt, Human
cuccagguaccu

SEQ ID NO: 3775085 - RNA, 19 nt, Human
cuccagguaccuugaccuu

SEQ ID NO: 3775086 - RNA, 20 nt, Human
cuccagguaccuugaccuuu

SEQ ID NO: 3775087 - RNA, 17 nt, Human
cuccaggucagcugccc

SEQ ID NO: 3775088 - RNA, 17 nt, Human
cuccaggucucacgggc

SEQ ID NO: 3775089 - RNA, 16 nt, Human
cucccagguaccagcu

SEQ ID NO: 3775090 - RNA, 18 nt, Human
cucccaggugcagccaga

SEQ ID NO: 3775091 - RNA, 23 nt, Human
cucccaggugcagccagaggcac

SEQ ID NO: 3775092 - RNA, 22 nt, Human
cucccagguguuaacauuccaa

SEQ ID NO: 3775093 - RNA, 20 nt, Human
cucccaguccaaauguccuc

SEQ ID NO: 3775094 - RNA, 19 nt, Human
cucccagugucuuccugug

SEQ ID NO: 3775095 - RNA, 20 nt, Human
cucccagugucuuccugugg

SEQ ID NO: 3775096 - RNA, 17 nt, Human
cucccaguuaugaauca

SEQ ID NO: 3775097 - RNA, 14 nt, Human
cucccaucacccgc

SEQ ID NO: 3775098 - RNA, 16 nt, Human
cucccauccccuggac

SEQ ID NO: 3775099 - RNA, 16 nt, Human
cucccauccugugugu

SEQ ID NO: 3775100 - RNA, 12 nt, Human
cucccaucuggg

SEQ ID NO: 3775101 - RNA, 20 nt, Human
cucccaucugggaguccccu

SEQ ID NO: 3775102 - RNA, 22 nt, Human
cucccaucugggaguccccuuu

SEQ ID NO: 3775103 - RNA, 14 nt, Human
cucccaucugugaa

SEQ ID NO: 3775104 - RNA, 15 nt, Human
cucccaucugugaaa

SEQ ID NO: 3775105 - RNA, 20 nt, Human
cucccaucuuaacucuuugc

SEQ ID NO: 3775106 - RNA, 19 nt, Human
cucccauggagccccagcc

SEQ ID NO: 3775107 - RNA, 20 nt, Human
cucccauggagccccagccc

SEQ ID NO: 3775108 - RNA, 23 nt, Human
cucccauggagccccagcccccu

SEQ ID NO: 3775109 - RNA, 19 nt, Human
cucccauuaggacaaucag

SEQ ID NO: 3775110 - RNA, 15 nt, Human
cucccauucaagauu

SEQ ID NO: 3775111 - RNA, 19 nt, Human
cucccauucacucuuccag

SEQ ID NO: 3775112 - RNA, 15 nt, Human
cucccauuccugaag

SEQ ID NO: 3775113 - RNA, 17 nt, Human
cucccauuccugaagaa

SEQ ID NO: 3775114 - RNA, 19 nt, Human
cucccauuccugaagaacc

SEQ ID NO: 3775115 - RNA, 21 nt, Human
cuccccaaaggcuuugcccug

SEQ ID NO: 3775116 - RNA, 16 nt, Human
cuccccaaagggugug

SEQ ID NO: 3775117 - RNA, 19 nt, Human
cuccccaacccuagguucc

SEQ ID NO: 3775118 - RNA, 15 nt, Human
cuccccaacccugcc

SEQ ID NO: 3775119 - RNA, 17 nt, Human
cuccccaacccugcccc

SEQ ID NO: 3775120 - RNA, 18 nt, Human
cuccccaaggaagagcca

SEQ ID NO: 3775121 - RNA, 23 nt, Human
cuccccaaggcccccugccugcc

SEQ ID NO: 3775122 - RNA, 20 nt, Human
cuccccaaugagacuugccu

SEQ ID NO: 3775123 - RNA, 22 nt, Human
cuccccaaugagacuugccuuc

SEQ ID NO: 3775124 - RNA, 21 nt, Human
cuccccacacuaaccuggguu

SEQ ID NO: 3775125 - RNA, 15 nt, Human
cuccccacagcgucc

SEQ ID NO: 3775126 - RNA, 20 nt, Human
cuccccaccaccccagcugc

SEQ ID NO: 3775127 - RNA, 14 nt, Human
cuccccacccgccc

SEQ ID NO: 3775128 - RNA, 23 nt, Human
cuccccaccuucaauuccugggc

SEQ ID NO: 3775129 - RNA, 16 nt, Human
cuccccacgagggcug

SEQ ID NO: 3775130 - RNA, 17 nt, Human
cuccccacggccgcucc

SEQ ID NO: 3775131 - RNA, 13 nt, Human
cuccccacucugc

SEQ ID NO: 3775132 - RNA, 16 nt, Human
cuccccacucugcucu

SEQ ID NO: 3775133 - RNA, 16 nt, Human
cuccccacugccuacu

SEQ ID NO: 3775134 - RNA, 19 nt, Human
cuccccacugccuacugca

SEQ ID NO: 3775135 - RNA, 14 nt, Human
cuccccagaauuca

SEQ ID NO: 3775136 - RNA, 20 nt, Human
cuccccagcaagugagagcu

SEQ ID NO: 3775137 - RNA, 16 nt, Human
cuccccagcagguggg

SEQ ID NO: 3775138 - RNA, 21 nt, Human
cuccccagcauuccagccccu

SEQ ID NO: 3775139 - RNA, 11 nt, Human
cuccccagccc

SEQ ID NO: 3775140 - RNA, 13 nt, Human
cuccccagcccag

SEQ ID NO: 3775141 - RNA, 16 nt, Human
cuccccagcccagaga

SEQ ID NO: 3775142 - RNA, 22 nt, Human
cuccccagccccuagcccagga

SEQ ID NO: 3775143 - RNA, 12 nt, Human
cuccccagccug

SEQ ID NO: 3775144 - RNA, 13 nt, Human
cuccccagccugc

SEQ ID NO: 3775145 - RNA, 14 nt, Human
cuccccagccugcg

SEQ ID NO: 3775146 - RNA, 16 nt, Human
cuccccagccugcgcc

SEQ ID NO: 3775147 - RNA, 16 nt, Human
cuccccagcucccagg

SEQ ID NO: 3775148 - RNA, 21 nt, Human
cuccccaggaauuugggaccc

SEQ ID NO: 3775149 - RNA, 14 nt, Human
cuccccagggaagc

SEQ ID NO: 3775150 - RNA, 21 nt, Human
cuccccaggguucaguccuca

SEQ ID NO: 3775151 - RNA, 19 nt, Human
cuccccagguccagcucug

SEQ ID NO: 3775152 - RNA, 21 nt, Human
cuccccagguccagcucugga

SEQ ID NO: 3775153 - RNA, 22 nt, Human
cuccccagucucucuuaaaguu

SEQ ID NO: 3775154 - RNA, 14 nt, Human
cuccccaucccaug

SEQ ID NO: 3775155 - RNA, 19 nt, Human
cuccccaugauguuuagaa

SEQ ID NO: 3775156 - RNA, 12 nt, Human
cuccccauggag

SEQ ID NO: 3775157 - RNA, 17 nt, Human
cuccccauggagccagc

SEQ ID NO: 3775158 - RNA, 21 nt, Human
cuccccaugugccugcaccag

SEQ ID NO: 3775159 - RNA, 20 nt, Human
cuccccauguguccugguuc

SEQ ID NO: 3775160 - RNA, 19 nt, Human
cuccccauuucccaucugc

SEQ ID NO: 3775161 - RNA, 21 nt, Human
cucccccagcaaagcccccag

SEQ ID NO: 3775162 - RNA, 16 nt, Human
cucccccagccacucc

SEQ ID NO: 3775163 - RNA, 13 nt, Human
cucccccauccua

SEQ ID NO: 3775164 - RNA, 15 nt, Human
cucccccauccuccc

SEQ ID NO: 3775165 - RNA, 13 nt, Human
cuccccccacugc

SEQ ID NO: 3775166 - RNA, 16 nt, Human
cuccccccacugcagg

SEQ ID NO: 3775167 - RNA, 13 nt, Human
cucccccccaugc

SEQ ID NO: 3775168 - RNA, 15 nt, Human
cucccccccaugcac

SEQ ID NO: 3775169 - RNA, 16 nt, Human
cuccccccccccucca

SEQ ID NO: 3775170 - RNA, 14 nt, Human
cucccccccggggc

SEQ ID NO: 3775171 - RNA, 15 nt, Human
cucccccccggggcu

SEQ ID NO: 3775172 - RNA, 18 nt, Human
cucccccccggggcuggg

SEQ ID NO: 3775173 - RNA, 17 nt, Human
cuccccccgccugccac

SEQ ID NO: 3775174 - RNA, 23 nt, Human
cuccccccuccucugaaacagcu

SEQ ID NO: 3775175 - RNA, 18 nt, Human
cucccccgggaggggccc

SEQ ID NO: 3775176 - RNA, 21 nt, Human
cucccccgggaggggcccgcu

SEQ ID NO: 3775177 - RNA, 13 nt, Human
cucccccuccuuc

SEQ ID NO: 3775178 - RNA, 17 nt, Human
cucccccuccuucccag

SEQ ID NO: 3775179 - RNA, 17 nt, Human
cucccccugccagugcc

SEQ ID NO: 3775180 - RNA, 11 nt, Human
cucccccuggg

SEQ ID NO: 3775181 - RNA, 19 nt, Human
cucccccuguccccucagc

SEQ ID NO: 3775182 - RNA, 14 nt, Human
cucccccuuuuccc

SEQ ID NO: 3775183 - RNA, 17 nt, Human
cuccccgauaaagaaug

SEQ ID NO: 3775184 - RNA, 16 nt, Human
cuccccgccuguuccc

SEQ ID NO: 3775185 - RNA, 15 nt, Human
cuccccgccuuccgc

SEQ ID NO: 3775186 - RNA, 23 nt, Human
cuccccggcaugagacucagugc

SEQ ID NO: 3775187 - RNA, 16 nt, Human
cuccccuaaagccuca

SEQ ID NO: 3775188 - RNA, 16 nt, Human
cuccccuaaugccugc

SEQ ID NO: 3775189 - RNA, 18 nt, Human
cuccccuauccacccagc

SEQ ID NO: 3775190 - RNA, 18 nt, Human
cuccccucaaagucugca

SEQ ID NO: 3775191 - RNA, 13 nt, Human
cuccccucaagga

SEQ ID NO: 3775192 - RNA, 14 nt, Human
cuccccucacagcc

SEQ ID NO: 3775193 - RNA, 18 nt, Human
cuccccucacagccucug

SEQ ID NO: 3775194 - RNA, 13 nt, Human
cuccccucagccu

SEQ ID NO: 3775195 - RNA, 15 nt, Human
cuccccucagccucu

SEQ ID NO: 3775196 - RNA, 16 nt, Human
cuccccucagccucuc

SEQ ID NO: 3775197 - RNA, 14 nt, Human
cuccccuccagccu

SEQ ID NO: 3775198 - RNA, 13 nt, Human
cuccccuccccug

SEQ ID NO: 3775199 - RNA, 16 nt, Human
cuccccuccccugcug

SEQ ID NO: 3775200 - RNA, 17 nt, Human
cuccccuccccugcugc

SEQ ID NO: 3775201 - RNA, 15 nt, Human
cuccccuccuugccu

SEQ ID NO: 3775202 - RNA, 16 nt, Human
cuccccuccuugccuc

SEQ ID NO: 3775203 - RNA, 22 nt, Human
cuccccuccuugccuccugugu

SEQ ID NO: 3775204 - RNA, 16 nt, Human
cuccccuccuuuccca

SEQ ID NO: 3775205 - RNA, 13 nt, Human
cuccccucugaaa

SEQ ID NO: 3775206 - RNA, 17 nt, Human
cuccccugaccugugag

SEQ ID NO: 3775207 - RNA, 12 nt, Human
cuccccugagga

SEQ ID NO: 3775208 - RNA, 21 nt, Human
cuccccugcacuggaguccag

SEQ ID NO: 3775209 - RNA, 18 nt, Human
cuccccugcagcccuggc

SEQ ID NO: 3775210 - RNA, 12 nt, Human
cuccccugccac

SEQ ID NO: 3775211 - RNA, 15 nt, Human
cuccccugccagggc

SEQ ID NO: 3775212 - RNA, 17 nt, Human
cuccccugcccccugca

SEQ ID NO: 3775213 - RNA, 12 nt, Human
cuccccugcccu

SEQ ID NO: 3775214 - RNA, 14 nt, Human
cuccccugcccugg

SEQ ID NO: 3775215 - RNA, 12 nt, Human
cuccccugccuu

SEQ ID NO: 3775216 - RNA, 13 nt, Human
cuccccugccuug

SEQ ID NO: 3775217 - RNA, 16 nt, Human
cuccccugcugaaggu

SEQ ID NO: 3775218 - RNA, 14 nt, Human
cuccccuggacucc

SEQ ID NO: 3775219 - RNA, 21 nt, Human
cuccccuggagggggaauggc

SEQ ID NO: 3775220 - RNA, 23 nt, Human
cuccccuggggacagcaagggcu

SEQ ID NO: 3775221 - RNA, 18 nt, Human
cuccccugugccagccca

SEQ ID NO: 3775222 - RNA, 21 nt, Human
cuccccuguuccccucucccu

SEQ ID NO: 3775223 - RNA, 21 nt, Human
cuccccuguuucaaucacugu

SEQ ID NO: 3775224 - RNA, 14 nt, Human
cuccccuuccauuu

SEQ ID NO: 3775225 - RNA, 16 nt, Human
cuccccuuccauuucu

SEQ ID NO: 3775226 - RNA, 18 nt, Human
cuccccuucccagggcaa

SEQ ID NO: 3775227 - RNA, 17 nt, Human
cuccccuuccccuuccu

SEQ ID NO: 3775228 - RNA, 23 nt, Human
cuccccuuccccuuccuucuuug

SEQ ID NO: 3775229 - RNA, 16 nt, Human
cuccccuucccugcaa

SEQ ID NO: 3775230 - RNA, 14 nt, Human
cuccccuugccagc

SEQ ID NO: 3775231 - RNA, 13 nt, Human
cuccccuugggcg

SEQ ID NO: 3775232 - RNA, 15 nt, Human
cuccccuugggcggc

SEQ ID NO: 3775233 - RNA, 18 nt, Human
cucccgaauagcugggac

SEQ ID NO: 3775234 - RNA, 24 nt, Human
cucccgagcuccucuuccaugcug

SEQ ID NO: 3775235 - RNA, 22 nt, Human
cucuggaccaacccuguuuccu

SEQ ID NO: 3775236 - RNA, 14 nt, Human
cucuggaccagccu

SEQ ID NO: 3775237 - RNA, 16 nt, Human
cucuggacggcaggcu

SEQ ID NO: 3775238 - RNA, 23 nt, Human
cucuggacggcaggcucacugcc

SEQ ID NO: 3775239 - RNA, 16 nt, Human
cucuggacucuaaaga

SEQ ID NO: 3775240 - RNA, 13 nt, Human
cucuggacuggcu

SEQ ID NO: 3775241 - RNA, 19 nt, Human
cucuggacuggcuagaguc

SEQ ID NO: 3775242 - RNA, 23 nt, Human
cucuggacuuucucuaauaauaa

SEQ ID NO: 3775243 - RNA, 21 nt, Human
cucuggagaaagggcccuggg

SEQ ID NO: 3775244 - RNA, 15 nt, Human
cucuggagacagccc

SEQ ID NO: 3775245 - RNA, 18 nt, Human
cucuggagacagccccag

SEQ ID NO: 3775246 - RNA, 14 nt, Human
cucuggagcauuuc

SEQ ID NO: 3775247 - RNA, 16 nt, Human
cucuggagccaccugu

SEQ ID NO: 3775248 - RNA, 20 nt, Human
cucuggagccaccuguccca

SEQ ID NO: 3775249 - RNA, 15 nt, Human
cucuggagccagccg

SEQ ID NO: 3775250 - RNA, 15 nt, Human
cucuggagcccacug

SEQ ID NO: 3775251 - RNA, 19 nt, Human
cucuggagcccacuguacu

SEQ ID NO: 3775252 - RNA, 15 nt, Human
cucuggaggggaggg

SEQ ID NO: 3775253 - RNA, 16 nt, Human
cucuggaggggagggg

SEQ ID NO: 3775254 - RNA, 19 nt, Human
cucuggagggguguggcuc

SEQ ID NO: 3775255 - RNA, 21 nt, Human
cucuggagggguguggcuccu

SEQ ID NO: 3775256 - RNA, 12 nt, Human
cucuggaguggc

SEQ ID NO: 3775257 - RNA, 20 nt, Human
cucuggaguggccacuaagc

SEQ ID NO: 3775258 - RNA, 19 nt, Human
cucuggaugccugauugcc

SEQ ID NO: 3775259 - RNA, 23 nt, Human
cucuggaugccugauugccaagc

SEQ ID NO: 3775260 - RNA, 16 nt, Human
cucuggauggcaccag

SEQ ID NO: 3775261 - RNA, 20 nt, Human
cucuggauggcaccagaggc

SEQ ID NO: 3775262 - RNA, 16 nt, Human
cucuggauucagccuu

SEQ ID NO: 3775263 - RNA, 17 nt, Human
cucuggauucagccuuc

SEQ ID NO: 3775264 - RNA, 13 nt, Human
cucuggcagcacc

SEQ ID NO: 3775265 - RNA, 23 nt, Human
cucuggcagcaccgccucuuccc

SEQ ID NO: 3775266 - RNA, 13 nt, Human
cucuggcagccac

SEQ ID NO: 3775267 - RNA, 14 nt, Human
cucuggcagcucag

SEQ ID NO: 3775268 - RNA, 18 nt, Human
cucuggcagcucagagag

SEQ ID NO: 3775269 - RNA, 20 nt, Human
cucuggcauuagaauuauuu

SEQ ID NO: 3775270 - RNA, 14 nt, Human
cucuggcccuggcc

SEQ ID NO: 3775271 - RNA, 17 nt, Human
cucuggccucccacccg

SEQ ID NO: 3775272 - RNA, 11 nt, Human
cucuggccucu

SEQ ID NO: 3775273 - RNA, 15 nt, Human
cucuggccucuguca

SEQ ID NO: 3775274 - RNA, 21 nt, Human
cucuggccuucggccuccauc

SEQ ID NO: 3775275 - RNA, 16 nt, Human
cucuggccuuuuccua

SEQ ID NO: 3775276 - RNA, 14 nt, Human
cucuggcuagaggc

SEQ ID NO: 3775277 - RNA, 21 nt, Human
cucuggcuagaggccagcccc

SEQ ID NO: 3775278 - RNA, 15 nt, Human
cucuggcucacagac

SEQ ID NO: 3775279 - RNA, 22 nt, Human
cucuggcuccagcuggccggga

SEQ ID NO: 3775280 - RNA, 15 nt, Human
cucuggcucuacaca

SEQ ID NO: 3775281 - RNA, 12 nt, Human
cucuggcucuca

SEQ ID NO: 3775282 - RNA, 13 nt, Human
cucuggcucucau

SEQ ID NO: 3775283 - RNA, 18 nt, Human
cucuggcugaacccugug

SEQ ID NO: 3775284 - RNA, 13 nt, Human
cucuggcuggcua

SEQ ID NO: 3775285 - RNA, 23 nt, Human
cucuggcuggcuaacuggaagca

SEQ ID NO: 3775286 - RNA, 13 nt, Human
cucuggcugggga

SEQ ID NO: 3775287 - RNA, 20 nt, Human
cucuggcuguaaggcucuag

SEQ ID NO: 3775288 - RNA, 13 nt, Human
cucuggcuuccag

SEQ ID NO: 3775289 - RNA, 21 nt, Human
cucuggcuuggccacagccag

SEQ ID NO: 3775290 - RNA, 16 nt, Human
cucuggcuuggccuau

SEQ ID NO: 3775291 - RNA, 10 nt, Human
cucuggcuuu

SEQ ID NO: 3775292 - RNA, 16 nt, Human
cucuggcuuuuggaag

SEQ ID NO: 3775293 - RNA, 18 nt, Human
cucugggaaccucccaga

SEQ ID NO: 3775294 - RNA, 17 nt, Human
cucugggagaggauuuu

SEQ ID NO: 3775295 - RNA, 18 nt, Human
cucugggauuuaugcuca

SEQ ID NO: 3775296 - RNA, 19 nt, Human
cucugggauuuaugcucau

SEQ ID NO: 3775297 - RNA, 22 nt, Human
cucugggauuuaugcucaugaa

SEQ ID NO: 3775298 - RNA, 16 nt, Human
cucugggcuggaugag

SEQ ID NO: 3775299 - RNA, 19 nt, Human
cucugggcuggaugagcuc

SEQ ID NO: 3775300 - RNA, 20 nt, Human
cucugggcuggaugagcucc

SEQ ID NO: 3775301 - RNA, 17 nt, Human
cucuggggccacacaga

SEQ ID NO: 3775302 - RNA, 20 nt, Human
cucuggggccacacagaaac

SEQ ID NO: 3775303 - RNA, 22 nt, Human
cucuggggcucuaggguugcug

SEQ ID NO: 3775304 - RNA, 17 nt, Human
cucugggucaguggucc

SEQ ID NO: 3775305 - RNA, 16 nt, Human
cucuggguccuuccug

SEQ ID NO: 3775306 - RNA, 17 nt, Human
cucuggguccuuccuga

SEQ ID NO: 3775307 - RNA, 21 nt, Human
cucuggguccuuccugaaacu

SEQ ID NO: 3775308 - RNA, 22 nt, Human
cucugguacaauuucuuuuggu

SEQ ID NO: 3775309 - RNA, 15 nt, Human
cucugguccauagag

SEQ ID NO: 3775310 - RNA, 16 nt, Human
cucugguccauagaga

SEQ ID NO: 3775311 - RNA, 16 nt, Human
cucuggucgcuccugc

SEQ ID NO: 3775312 - RNA, 18 nt, Human
cucuggucgcuccugccc

SEQ ID NO: 3775313 - RNA, 19 nt, Human
cucuggugacaccagccuu

SEQ ID NO: 3775314 - RNA, 20 nt, Human
cucuggugacaccagccuuu

SEQ ID NO: 3775315 - RNA, 16 nt, Human
cucuggugauaaggac

SEQ ID NO: 3775316 - RNA, 17 nt, Human
cucuggugauaaggaca

SEQ ID NO: 3775317 - RNA, 19 nt, Human
cucuggugauaaggacaug

SEQ ID NO: 3775318 - RNA, 17 nt, Human
cucugguuguuucuguu

SEQ ID NO: 3775319 - RNA, 23 nt, Human
cucugguuguuucuguuccaaau

SEQ ID NO: 3775320 - RNA, 16 nt, Human
cucugguuuaauuaca

SEQ ID NO: 3775321 - RNA, 22 nt, Human
cucugguuuggggcgaggcaga

SEQ ID NO: 3775322 - RNA, 23 nt, Human
cucuguaaaaacacugaaaaauu

SEQ ID NO: 3775323 - RNA, 15 nt, Human
cucuguaaagcuaaa

SEQ ID NO: 3775324 - RNA, 23 nt, Human
cucuguaaguagaugcauuuggg

SEQ ID NO: 3775325 - RNA, 14 nt, Human
cucuguacagagcc

SEQ ID NO: 3775326 - RNA, 15 nt, Human
cucuguacagagccc

SEQ ID NO: 3775327 - RNA, 16 nt, Human
cucuguacagagccca

SEQ ID NO: 3775328 - RNA, 18 nt, Human
cucuguacauauuagcga

SEQ ID NO: 3775329 - RNA, 12 nt, Human
cucuguacuuuu

SEQ ID NO: 3775330 - RNA, 13 nt, Human
cucuguagccuaa

SEQ ID NO: 3775331 - RNA, 22 nt, Human
cucuguagggaacucugggguc

SEQ ID NO: 3775332 - RNA, 13 nt, Human
cucuguauauaua

SEQ ID NO: 3775333 - RNA, 22 nt, Human
cucuguaucaggacccagagga

SEQ ID NO: 3775334 - RNA, 19 nt, Human
cucugucacccuuguccuu

SEQ ID NO: 3775335 - RNA, 23 nt, Human
cucugucagaugggaagacauga

SEQ ID NO: 3775336 - RNA, 16 nt, Human
cucugucagucacagc

SEQ ID NO: 3775337 - RNA, 16 nt, Human
cucugucauaucuuca

SEQ ID NO: 3775338 - RNA, 14 nt, Human
cucuguccaggcac

SEQ ID NO: 3775339 - RNA, 22 nt, Human
cucuguccagggcccugagcuc

SEQ ID NO: 3775340 - RNA, 20 nt, Human
cucugucccauucccuggga

SEQ ID NO: 3775341 - RNA, 21 nt, Human
cucugucccauucccugggau

SEQ ID NO: 3775342 - RNA, 17 nt, Human
cucuguccccagccugg

SEQ ID NO: 3775343 - RNA, 15 nt, Human
cucuguccccuucuc

SEQ ID NO: 3775344 - RNA, 17 nt, Human
cucuguccccuucucuc

SEQ ID NO: 3775345 - RNA, 18 nt, Human
cucuguccccuucucuca

SEQ ID NO: 3775346 - RNA, 15 nt, Human
cucugucccuugcug

SEQ ID NO: 3775347 - RNA, 12 nt, Human
cucuguccugaa

SEQ ID NO: 3775348 - RNA, 13 nt, Human
cucuguccugacu

SEQ ID NO: 3775349 - RNA, 16 nt, Human
cucuguccugcuucug

SEQ ID NO: 3775350 - RNA, 22 nt, Human
cucuguccugggagugagcugg

SEQ ID NO: 3775351 - RNA, 13 nt, Human
cucugucgcccag

SEQ ID NO: 3775352 - RNA, 17 nt, Human
cucugucgcccagucug

SEQ ID NO: 3775353 - RNA, 18 nt, Human
cucugucgcccagucugg

SEQ ID NO: 3775354 - RNA, 20 nt, Human
cucugucgcccaugcuggag

SEQ ID NO: 3775355 - RNA, 15 nt, Human
cucugucuaccaucu

SEQ ID NO: 3775356 - RNA, 16 nt, Human
cucugucuaccugguc

SEQ ID NO: 3775357 - RNA, 20 nt, Human
cucugucuaccuggucuggu

SEQ ID NO: 3775358 - RNA, 18 nt, Human
cucugucuagcaugccaa

SEQ ID NO: 3775359 - RNA, 19 nt, Human
cucugucuagcaugccaac

SEQ ID NO: 3775360 - RNA, 19 nt, Human
cucugucucaaaaauaaau

SEQ ID NO: 3775361 - RNA, 14 nt, Human
cucugucucauccu

SEQ ID NO: 3775362 - RNA, 22 nt, Human
cucugucucauccuccuggaac

SEQ ID NO: 3775363 - RNA, 20 nt, Human
cucugucucaugugugcucu

SEQ ID NO: 3775364 - RNA, 17 nt, Human
cucugucugcccuucac

SEQ ID NO: 3775365 - RNA, 20 nt, Human
cucugucuggcaaugccaca

SEQ ID NO: 3775366 - RNA, 17 nt, Human
cucugucuucuggacug

SEQ ID NO: 3775367 - RNA, 15 nt, Human
cucugucuuguguuu

SEQ ID NO: 3775368 - RNA, 15 nt, Human
cucugugaccaaugu

SEQ ID NO: 3775369 - RNA, 17 nt, Human
cucugugaccaaugucu

SEQ ID NO: 3775370 - RNA, 23 nt, Human
cucugugacccacuucucaucac

SEQ ID NO: 3775371 - RNA, 19 nt, Human
cucugugaccucaggcacu

SEQ ID NO: 3775372 - RNA, 11 nt, Human
cucugugagaa

SEQ ID NO: 3775373 - RNA, 22 nt, Human
cucugugagaagguuuauuguu

SEQ ID NO: 3775374 - RNA, 18 nt, Human
cucugugagacucgagaa

SEQ ID NO: 3775375 - RNA, 17 nt, Human
cucugugagggugcuga

SEQ ID NO: 3775376 - RNA, 20 nt, Human
cucugugcagucacuggagg

SEQ ID NO: 3775377 - RNA, 14 nt, Human
cucugugccagagc

SEQ ID NO: 3775378 - RNA, 15 nt, Human
cucugugccagagcc

SEQ ID NO: 3775379 - RNA, 10 nt, Human
cucuucugaa

SEQ ID NO: 3775380 - RNA, 17 nt, Human
cucuucugacgugccuu

SEQ ID NO: 3775381 - RNA, 18 nt, Human
cucuucugcuccacccuu

SEQ ID NO: 3775382 - RNA, 14 nt, Human
cucuucuggaaugg

SEQ ID NO: 3775383 - RNA, 14 nt, Human
cucuucuggcucaa

SEQ ID NO: 3775384 - RNA, 21 nt, Human
cucuucuggggcaggcugggc

SEQ ID NO: 3775385 - RNA, 18 nt, Human
cucuucuggguuccuucc

SEQ ID NO: 3775386 - RNA, 16 nt, Human
cucuucugugggugac

SEQ ID NO: 3775387 - RNA, 23 nt, Human
cucuucugugggugacccagguc

SEQ ID NO: 3775388 - RNA, 18 nt, Human
cucuucuuaauguacaua

SEQ ID NO: 3775389 - RNA, 13 nt, Human
cucuucuuagccu

SEQ ID NO: 3775390 - RNA, 17 nt, Human
cucuucuucuucagaag

SEQ ID NO: 3775391 - RNA, 15 nt, Human
cucuucuugaaauuu

SEQ ID NO: 3775392 - RNA, 21 nt, Human
cucuucuuggggcccagugca

SEQ ID NO: 3775393 - RNA, 16 nt, Human
cucuugaacugagcuu

SEQ ID NO: 3775394 - RNA, 17 nt, Human
cucuugaacugagcuug

SEQ ID NO: 3775395 - RNA, 14 nt, Human
cucuugaccaggcu

SEQ ID NO: 3775396 - RNA, 16 nt, Human
cucuugacccugcacc

SEQ ID NO: 3775397 - RNA, 19 nt, Human
cucuugacccugcacccuc

SEQ ID NO: 3775398 - RNA, 16 nt, Human
cucuugagccugggag

SEQ ID NO: 3775399 - RNA, 16 nt, Human
cucuugagccuugaac

SEQ ID NO: 3775400 - RNA, 23 nt, Human
cucuugagccuugaacuuugacc

SEQ ID NO: 3775401 - RNA, 16 nt, Human
cucuugagcuggccuc

SEQ ID NO: 3775402 - RNA, 13 nt, Human
cucuugaguuguu

SEQ ID NO: 3775403 - RNA, 16 nt, Human
cucuugaguuguuuuu

SEQ ID NO: 3775404 - RNA, 18 nt, Human
cucuugaguuguuuuugu

SEQ ID NO: 3775405 - RNA, 21 nt, Human
cucuugaguuguuuuuguaua

SEQ ID NO: 3775406 - RNA, 23 nt, Human
cucuugaguuugucgcucaugug

SEQ ID NO: 3775407 - RNA, 18 nt, Human
cucuugauaccccccucu

SEQ ID NO: 3775408 - RNA, 21 nt, Human
cucuugauuauccauauugag

SEQ ID NO: 3775409 - RNA, 13 nt, Human
cucuugauuuuca

SEQ ID NO: 3775410 - RNA, 20 nt, Human
cucuugcacagucacugcuc

SEQ ID NO: 3775411 - RNA, 16 nt, Human
cucuugcaccaaauua

SEQ ID NO: 3775412 - RNA, 12 nt, Human
cucuugcacccg

SEQ ID NO: 3775413 - RNA, 22 nt, Human
cucuugccacugccucuuccuc

SEQ ID NO: 3775414 - RNA, 20 nt, Human
cucuugcccauccugacuga

SEQ ID NO: 3775415 - RNA, 12 nt, Human
cucuugccccaa

SEQ ID NO: 3775416 - RNA, 14 nt, Human
cucuugccccaacc

SEQ ID NO: 3775417 - RNA, 12 nt, Human
cucuugcccccc

SEQ ID NO: 3775418 - RNA, 20 nt, Human
cucuugccucaaccucccaa

SEQ ID NO: 3775419 - RNA, 19 nt, Human
cucuugccucagcuucccc

SEQ ID NO: 3775420 - RNA, 14 nt, Human
cucuugcuaaucag

SEQ ID NO: 3775421 - RNA, 20 nt, Human
cucuugcucaaaaaucuguu

SEQ ID NO: 3775422 - RNA, 12 nt, Human
cucuugcucuuu

SEQ ID NO: 3775423 - RNA, 15 nt, Human
cucuugcucuuucua

SEQ ID NO: 3775424 - RNA, 17 nt, Human
cucuugcugucucugcu

SEQ ID NO: 3775425 - RNA, 22 nt, Human
cucuugcuugugggacuagccu

SEQ ID NO: 3775426 - RNA, 17 nt, Human
cucuuggaaaaagugau

SEQ ID NO: 3775427 - RNA, 13 nt, Human
cucuuggagaagu

SEQ ID NO: 3775428 - RNA, 14 nt, Human
cucuuggagccugc

SEQ ID NO: 3775429 - RNA, 17 nt, Human
cucuuggcuggacccag

SEQ ID NO: 3775430 - RNA, 21 nt, Human
cucuugggaacugaacucacu

SEQ ID NO: 3775431 - RNA, 20 nt, Human
cucuugggcaauauucucug

SEQ ID NO: 3775432 - RNA, 18 nt, Human
cucuugggcugagacugg

SEQ ID NO: 3775433 - RNA, 19 nt, Human
cucuuggguucaagcgauu

SEQ ID NO: 3775434 - RNA, 21 nt, Human
cucuuggguucaagcgauucu

SEQ ID NO: 3775435 - RNA, 13 nt, Human
cucuugguccugc

SEQ ID NO: 3775436 - RNA, 17 nt, Human
cucuugguccugcugca

SEQ ID NO: 3775437 - RNA, 17 nt, Human
cucuugguguuaaaaca

SEQ ID NO: 3775438 - RNA, 22 nt, Human
cucuugguguuaaaacacuucu

SEQ ID NO: 3775439 - RNA, 23 nt, Human
cucuuguaaauaaagcccuggga

SEQ ID NO: 3775440 - RNA, 14 nt, Human
cucuuguaagauuu

SEQ ID NO: 3775441 - RNA, 18 nt, Human
cucuuguaagauuuugaa

SEQ ID NO: 3775442 - RNA, 21 nt, Human
cucuuguaauccgaaucucuu

SEQ ID NO: 3775443 - RNA, 21 nt, Human
cucuuguccucaguccauuua

SEQ ID NO: 3775444 - RNA, 22 nt, Human
cucuuguccucaguccauuuau

SEQ ID NO: 3775445 - RNA, 13 nt, Human
cucuugucucccc

SEQ ID NO: 3775446 - RNA, 22 nt, Human
cucuugucuggcaaaagaaaaa

SEQ ID NO: 3775447 - RNA, 12 nt, Human
cucuugugauuu

SEQ ID NO: 3775448 - RNA, 14 nt, Human
cucuugugauuucu

SEQ ID NO: 3775449 - RNA, 22 nt, Human
cucuugugauuucuuuaaaaga

SEQ ID NO: 3775450 - RNA, 13 nt, Human
cucuuguggaugu

SEQ ID NO: 3775451 - RNA, 20 nt, Human
cucuuguucuuacuuuccug

SEQ ID NO: 3775452 - RNA, 19 nt, Human
cucuuguuuuuauuaauuu

SEQ ID NO: 3775453 - RNA, 23 nt, Human
cucuuuaaaaggaaagaaaacau

SEQ ID NO: 3775454 - RNA, 16 nt, Human
cucuuuaacucaggac

SEQ ID NO: 3775455 - RNA, 22 nt, Human
cucuuuaacucaggacuccagc

SEQ ID NO: 3775456 - RNA, 15 nt, Human
cucuuuaacuucucg

SEQ ID NO: 3775457 - RNA, 19 nt, Human
cucuuuaacuuguaauaaa

SEQ ID NO: 3775458 - RNA, 16 nt, Human
cucuuuaaucuucagu

SEQ ID NO: 3775459 - RNA, 20 nt, Human
cucuuuaaugucacaggcag

SEQ ID NO: 3775460 - RNA, 15 nt, Human
cucuuuagaguuaga

SEQ ID NO: 3775461 - RNA, 21 nt, Human
cucuuuagaguuagacuguug

SEQ ID NO: 3775462 - RNA, 14 nt, Human
cucuuuauacagcu

SEQ ID NO: 3775463 - RNA, 13 nt, Human
cucuuuauagugc

SEQ ID NO: 3775464 - RNA, 14 nt, Human
cucuuuauuccuag

SEQ ID NO: 3775465 - RNA, 21 nt, Human
cucuuuauuccuaguugguga

SEQ ID NO: 3775466 - RNA, 14 nt, Human
cucuuuauugucug

SEQ ID NO: 3775467 - RNA, 20 nt, Human
cucuuuauugucuguaaauc

SEQ ID NO: 3775468 - RNA, 14 nt, Human
cucuuucacauugu

SEQ ID NO: 3775469 - RNA, 15 nt, Human
cucuuucacauuguu

SEQ ID NO: 3775470 - RNA, 16 nt, Human
cucuuucacauuguuu

SEQ ID NO: 3775471 - RNA, 11 nt, Human
cucuuucagcu

SEQ ID NO: 3775472 - RNA, 12 nt, Human
cucuuucagcuc

SEQ ID NO: 3775473 - RNA, 11 nt, Human
cucuuucagug

SEQ ID NO: 3775474 - RNA, 13 nt, Human
cucuuucauccac

SEQ ID NO: 3775475 - RNA, 17 nt, Human
cucuuucccacccagcc

SEQ ID NO: 3775476 - RNA, 19 nt, Human
cucuuucccacccagccug

SEQ ID NO: 3775477 - RNA, 16 nt, Human
cucuuucccuaggaaa

SEQ ID NO: 3775478 - RNA, 13 nt, Human
cucuuucccuucc

SEQ ID NO: 3775479 - RNA, 23 nt, Human
cucuuucccuuccaguuuauucc

SEQ ID NO: 3775480 - RNA, 16 nt, Human
cucuuuccuccuucca

SEQ ID NO: 3775481 - RNA, 22 nt, Human
cucuuuccuguuguuguuaaug

SEQ ID NO: 3775482 - RNA, 11 nt, Human
cucuuuccuug

SEQ ID NO: 3775483 - RNA, 13 nt, Human
cucuuuccuugcu

SEQ ID NO: 3775484 - RNA, 15 nt, Human
cucuuucucucccca

SEQ ID NO: 3775485 - RNA, 19 nt, Human
cucuuucucuccuuucuuu

SEQ ID NO: 3775486 - RNA, 12 nt, Human
cucuuucucugc

SEQ ID NO: 3775487 - RNA, 13 nt, Human
cucuuucucugcc

SEQ ID NO: 3775488 - RNA, 15 nt, Human
cucuuucucugccag

SEQ ID NO: 3775489 - RNA, 18 nt, Human
cucuuucucugccaguga

SEQ ID NO: 3775490 - RNA, 12 nt, Human
cucuuucucuuu

SEQ ID NO: 3775491 - RNA, 16 nt, Human
cucuuucugagugccu

SEQ ID NO: 3775492 - RNA, 17 nt, Human
cucuuucugagugccuu

SEQ ID NO: 3775493 - RNA, 14 nt, Human
cucuuucuguauau

SEQ ID NO: 3775494 - RNA, 15 nt, Human
cucuuucuguauaua

SEQ ID NO: 3775495 - RNA, 13 nt, Human
cucuuucuuccuu

SEQ ID NO: 3775496 - RNA, 17 nt, Human
cucuuucuuucaauaaa

SEQ ID NO: 3775497 - RNA, 13 nt, Human
cucuuugaaacaa

SEQ ID NO: 3775498 - RNA, 14 nt, Human
cucuuugaaugaca

SEQ ID NO: 3775499 - RNA, 23 nt, Human
cucuuugacaauuccuagauaaa

SEQ ID NO: 3775500 - RNA, 12 nt, Human
cucuuugagaaa

SEQ ID NO: 3775501 - RNA, 16 nt, Human
cucuuugauuauuugc

SEQ ID NO: 3775502 - RNA, 12 nt, Human
cucuuugccuca

SEQ ID NO: 3775503 - RNA, 13 nt, Human
cucuuugccucaa

SEQ ID NO: 3775504 - RNA, 13 nt, Human
cucuuugcugcag

SEQ ID NO: 3775505 - RNA, 17 nt, Human
cucuuugcugcagagaa

SEQ ID NO: 3775506 - RNA, 12 nt, Human
cucuuugcuuug

SEQ ID NO: 3775507 - RNA, 13 nt, Human
cucuuugcuuugc

SEQ ID NO: 3775508 - RNA, 18 nt, Human
cucuuugcuuugcuuucu

SEQ ID NO: 3775509 - RNA, 22 nt, Human
cucuuugcuuugcuuucugcuc

SEQ ID NO: 3775510 - RNA, 15 nt, Human
cucuuuggcagucua

SEQ ID NO: 3775511 - RNA, 18 nt, Human
cucuuuggcuccccugua

SEQ ID NO: 3775512 - RNA, 20 nt, Human
cucuuugggaauguuugucu

SEQ ID NO: 3775513 - RNA, 18 nt, Human
cucuuugggccuggcucc

SEQ ID NO: 3775514 - RNA, 17 nt, Human
cucuuuggggucagcca

SEQ ID NO: 3775515 - RNA, 16 nt, Human
cucuuugucuaaaaca

SEQ ID NO: 3775516 - RNA, 20 nt, Human
cucuuuguggcagaaguguu

SEQ ID NO: 3775517 - RNA, 20 nt, Human
cucuuuguggggcuuggcgu

SEQ ID NO: 3775518 - RNA, 18 nt, Human
cucuuuguuauuugaaaa

SEQ ID NO: 3775519 - RNA, 20 nt, Human
cucuuuguuuugugucucuu

SEQ ID NO: 3775520 - RNA, 14 nt, Human
cucuuuuacccugg

SEQ ID NO: 3775521 - RNA, 20 nt, Human
cucuuuuacccuggccccuc

SEQ ID NO: 3775522 - RNA, 14 nt, Human
cucuuuucaaaaca

SEQ ID NO: 3775523 - RNA, 14 nt, Human
cucuuuucaaugug

SEQ ID NO: 3775524 - RNA, 23 nt, Human
cucuuuuccacuccauugucgua

SEQ ID NO: 3775525 - RNA, 23 nt, Human
cugaagauauaacuauugcccag

SEQ ID NO: 3775526 - RNA, 16 nt, Human
cugaagaugaucauuu

SEQ ID NO: 3775527 - RNA, 22 nt, Human
cugaagaugcagcaaaauguga

SEQ ID NO: 3775528 - RNA, 16 nt, Human
cugaagaugcagcuca

SEQ ID NO: 3775529 - RNA, 15 nt, Human
cugaagcagccucuc

SEQ ID NO: 3775530 - RNA, 16 nt, Human
cugaagcagccucucc

SEQ ID NO: 3775531 - RNA, 21 nt, Human
cugaagcagguucccaagcuc

SEQ ID NO: 3775532 - RNA, 14 nt, Human
cugaagccagcugc

SEQ ID NO: 3775533 - RNA, 14 nt, Human
cugaagccauuguc

SEQ ID NO: 3775534 - RNA, 21 nt, Human
cugaagcccucccagguguua

SEQ ID NO: 3775535 - RNA, 18 nt, Human
cugaagccgccaggaccg

SEQ ID NO: 3775536 - RNA, 21 nt, Human
cugaagcuaucguaaaauuaa

SEQ ID NO: 3775537 - RNA, 20 nt, Human
cugaagcugacgaacuucca

SEQ ID NO: 3775538 - RNA, 18 nt, Human
cugaagcugccugcuuuu

SEQ ID NO: 3775539 - RNA, 14 nt, Human
cugaagcuuauuaa

SEQ ID NO: 3775540 - RNA, 23 nt, Human
cugaagcuuauuaaugcuaaggg

SEQ ID NO: 3775541 - RNA, 18 nt, Human
cugaagcuuuaccagcug

SEQ ID NO: 3775542 - RNA, 17 nt, Human
cugaaggaaaaacacaa

SEQ ID NO: 3775543 - RNA, 19 nt, Human
cugaaggacacuuccugcc

SEQ ID NO: 3775544 - RNA, 20 nt, Human
cugaaggacauugcggacag

SEQ ID NO: 3775545 - RNA, 23 nt, Human
cugaaggacauugcggacagcca

SEQ ID NO: 3775546 - RNA, 12 nt, Human
cugaaggacugu

SEQ ID NO: 3775547 - RNA, 21 nt, Human
cugaaggacugugacaggcag

SEQ ID NO: 3775548 - RNA, 16 nt, Human
cugaaggagauuuucc

SEQ ID NO: 3775549 - RNA, 21 nt, Human
cugaaggagauuuuccuuccu

SEQ ID NO: 3775550 - RNA, 13 nt, Human
cugaaggagcccc

SEQ ID NO: 3775551 - RNA, 15 nt, Human
cugaaggaggccacc

SEQ ID NO: 3775552 - RNA, 18 nt, Human
cugaaggaggccaccucc

SEQ ID NO: 3775553 - RNA, 18 nt, Human
cugaaggcagcauguaua

SEQ ID NO: 3775554 - RNA, 19 nt, Human
cugaaggcuaaaaagcaac

SEQ ID NO: 3775555 - RNA, 17 nt, Human
cugaagggaaucacauc

SEQ ID NO: 3775556 - RNA, 20 nt, Human
cugaagggcauucuuuccca

SEQ ID NO: 3775557 - RNA, 19 nt, Human
cugaaggggccaugauggc

SEQ ID NO: 3775558 - RNA, 15 nt, Human
cugaagggggcggcc

SEQ ID NO: 3775559 - RNA, 20 nt, Human
cugaagggggcggccuauga

SEQ ID NO: 3775560 - RNA, 16 nt, Human
cugaagggguuuucuu

SEQ ID NO: 3775561 - RNA, 18 nt, Human
cugaagggguuuucuuga

SEQ ID NO: 3775562 - RNA, 21 nt, Human
cugaaggguugacuuuaccca

SEQ ID NO: 3775563 - RNA, 22 nt, Human
cugaaggugaaacauuuucucc

SEQ ID NO: 3775564 - RNA, 15 nt, Human
cugaagguugaagag

SEQ ID NO: 3775565 - RNA, 21 nt, Human
cugaaguaaaacaaacaauac

SEQ ID NO: 3775566 - RNA, 17 nt, Human
cugaagucacacaguga

SEQ ID NO: 3775567 - RNA, 18 nt, Human
cugaagucacacagugag

SEQ ID NO: 3775568 - RNA, 21 nt, Human
cugaagucacacagugagucg

SEQ ID NO: 3775569 - RNA, 15 nt, Human
cugaagucacugcac

SEQ ID NO: 3775570 - RNA, 22 nt, Human
cugaagucccagauacuugggg

SEQ ID NO: 3775571 - RNA, 13 nt, Human
cugaagucugaaa

SEQ ID NO: 3775572 - RNA, 17 nt, Human
cugaagucuuuguacag

SEQ ID NO: 3775573 - RNA, 20 nt, Human
cugaagucuuuguacagaca

SEQ ID NO: 3775574 - RNA, 13 nt, Human
cugaagugaaacu

SEQ ID NO: 3775575 - RNA, 18 nt, Human
cugaagugagcacagccu

SEQ ID NO: 3775576 - RNA, 14 nt, Human
cugaagugcaucca

SEQ ID NO: 3775577 - RNA, 22 nt, Human
cugaagugcauccaaaggugcu

SEQ ID NO: 3775578 - RNA, 15 nt, Human
cugaaguggacucuu

SEQ ID NO: 3775579 - RNA, 16 nt, Human
cugaaguuaacagaga

SEQ ID NO: 3775580 - RNA, 17 nt, Human
cugaaguuauauuuccu

SEQ ID NO: 3775581 - RNA, 14 nt, Human
cugaaguucaccau

SEQ ID NO: 3775582 - RNA, 19 nt, Human
cugaaguucagccacccug

SEQ ID NO: 3775583 - RNA, 20 nt, Human
cugaaguucugccucugaug

SEQ ID NO: 3775584 - RNA, 23 nt, Human
cugaaguucugccucugauguau

SEQ ID NO: 3775585 - RNA, 22 nt, Human
cugaaguuggagugaguguggc

SEQ ID NO: 3775586 - RNA, 13 nt, Human
cugaaguuucaca

SEQ ID NO: 3775587 - RNA, 21 nt, Human
cugaaguuugauaaauagugu

SEQ ID NO: 3775588 - RNA, 12 nt, Human
cugaauaaaugu

SEQ ID NO: 3775589 - RNA, 16 nt, Human
cugaauacaaagugau

SEQ ID NO: 3775590 - RNA, 18 nt, Human
cugaauacauucugcuuu

SEQ ID NO: 3775591 - RNA, 18 nt, Human
cugaauaccacucuguaa

SEQ ID NO: 3775592 - RNA, 20 nt, Human
cugaauaccacucuguaauu

SEQ ID NO: 3775593 - RNA, 16 nt, Human
cugaauaccaguggag

SEQ ID NO: 3775594 - RNA, 20 nt, Human
cugaauaccucuuugaaaga

SEQ ID NO: 3775595 - RNA, 15 nt, Human
cugaauagaaauggg

SEQ ID NO: 3775596 - RNA, 23 nt, Human
cugaauagcucccagauuucagu

SEQ ID NO: 3775597 - RNA, 23 nt, Human
cugaauaggcgaucacaacgugc

SEQ ID NO: 3775598 - RNA, 21 nt, Human
cugaauauuuauauuucacua

SEQ ID NO: 3775599 - RNA, 17 nt, Human
cugaauccaaaagaaaa

SEQ ID NO: 3775600 - RNA, 19 nt, Human
cugaauccaaaagaaaaac

SEQ ID NO: 3775601 - RNA, 20 nt, Human
cugaaucccccuugccaccc

SEQ ID NO: 3775602 - RNA, 21 nt, Human
cugaaucccccuugccacccc

SEQ ID NO: 3775603 - RNA, 17 nt, Human
cugaaucugcuaccaaa

SEQ ID NO: 3775604 - RNA, 15 nt, Human
cugaaucuguacaga

SEQ ID NO: 3775605 - RNA, 19 nt, Human
cugaaugaaacccccacac

SEQ ID NO: 3775606 - RNA, 22 nt, Human
cugaaugaaccuucuggccucc

SEQ ID NO: 3775607 - RNA, 20 nt, Human
cugaaugaggucagcauguc

SEQ ID NO: 3775608 - RNA, 21 nt, Human
cugaaugccgcgaugggucag

SEQ ID NO: 3775609 - RNA, 22 nt, Human
cugaaugccucaaugugaccag

SEQ ID NO: 3775610 - RNA, 17 nt, Human
cugaaugccuccugugg

SEQ ID NO: 3775611 - RNA, 18 nt, Human
cugaaugccuccuguggg

SEQ ID NO: 3775612 - RNA, 19 nt, Human
cugaaugccuccugugggg

SEQ ID NO: 3775613 - RNA, 20 nt, Human
cugaaugccuccugugggga

SEQ ID NO: 3775614 - RNA, 13 nt, Human
cugaaugcuucua

SEQ ID NO: 3775615 - RNA, 15 nt, Human
cugaaugcuucuaag

SEQ ID NO: 3775616 - RNA, 16 nt, Human
cugaaugguccagggu

SEQ ID NO: 3775617 - RNA, 13 nt, Human
cugaauguaauuu

SEQ ID NO: 3775618 - RNA, 15 nt, Human
cugaauguaauuugu

SEQ ID NO: 3775619 - RNA, 18 nt, Human
cugaauguaauuugugua

SEQ ID NO: 3775620 - RNA, 15 nt, Human
cugaauguauguaaa

SEQ ID NO: 3775621 - RNA, 14 nt, Human
cugaauguucugac

SEQ ID NO: 3775622 - RNA, 19 nt, Human
cugaauguucugacauuaa

SEQ ID NO: 3775623 - RNA, 15 nt, Human
cugaauguugggacu

SEQ ID NO: 3775624 - RNA, 15 nt, Human
cugaauguuuuucua

SEQ ID NO: 3775625 - RNA, 16 nt, Human
cugaauuaauuaauuu

SEQ ID NO: 3775626 - RNA, 17 nt, Human
cugaauuaguccuugcu

SEQ ID NO: 3775627 - RNA, 18 nt, Human
cugaauuaguccuugcuu

SEQ ID NO: 3775628 - RNA, 20 nt, Human
cugaauuaguccuugcuugg

SEQ ID NO: 3775629 - RNA, 14 nt, Human
cugaauuauaagag

SEQ ID NO: 3775630 - RNA, 18 nt, Human
cugaauuaucuauuucau

SEQ ID NO: 3775631 - RNA, 17 nt, Human
cugaauucuauuugcug

SEQ ID NO: 3775632 - RNA, 23 nt, Human
cugaauucuauuugcugggcuuu

SEQ ID NO: 3775633 - RNA, 18 nt, Human
cugaauuuaaauagcuuu

SEQ ID NO: 3775634 - RNA, 14 nt, Human
cugaauuuaucuuu

SEQ ID NO: 3775635 - RNA, 16 nt, Human
cugaauuuaucuuuga

SEQ ID NO: 3775636 - RNA, 20 nt, Human
cugaauuuaucuuugauaac

SEQ ID NO: 3775637 - RNA, 14 nt, Human
cugaauuucuuuug

SEQ ID NO: 3775638 - RNA, 14 nt, Human
cugaauuugcaaag

SEQ ID NO: 3775639 - RNA, 16 nt, Human
cugaauuugcaaagua

SEQ ID NO: 3775640 - RNA, 19 nt, Human
cugaauuugcaaaguacug

SEQ ID NO: 3775641 - RNA, 18 nt, Human
cugaauuugcccugggaa

SEQ ID NO: 3775642 - RNA, 12 nt, Human
cugaauuuggag

SEQ ID NO: 3775643 - RNA, 13 nt, Human
cugaauuuucaca

SEQ ID NO: 3775644 - RNA, 20 nt, Human
cugaauuuuggggauuuuca

SEQ ID NO: 3775645 - RNA, 12 nt, Human
cugaauuuuuaa

SEQ ID NO: 3775646 - RNA, 18 nt, Human
cugaauuuuuaaacaagu

SEQ ID NO: 3775647 - RNA, 21 nt, Human
cugaauuuuuaaacaaguauu

SEQ ID NO: 3775648 - RNA, 16 nt, Human
cugaauuuuuuuguaa

SEQ ID NO: 3775649 - RNA, 18 nt, Human
cugaauuuuuuuguaaua

SEQ ID NO: 3775650 - RNA, 23 nt, Human
cugaauuuuuuuguaauaagcaa

SEQ ID NO: 3775651 - RNA, 15 nt, Human
cugacaaaucaaguu

SEQ ID NO: 3775652 - RNA, 14 nt, Human
cugacaaauuuuaa

SEQ ID NO: 3775653 - RNA, 17 nt, Human
cugacaaauuuuaauua

SEQ ID NO: 3775654 - RNA, 22 nt, Human
cugacaacauuucuauagccaa

SEQ ID NO: 3775655 - RNA, 22 nt, Human
cugacaaccaccgcuccccagc

SEQ ID NO: 3775656 - RNA, 18 nt, Human
cugacaaccauuaaaguc

SEQ ID NO: 3775657 - RNA, 13 nt, Human
cugacaagcucca

SEQ ID NO: 3775658 - RNA, 22 nt, Human
cugacaagggcugaccugccuc

SEQ ID NO: 3775659 - RNA, 19 nt, Human
cugacacaaaccugccugg

SEQ ID NO: 3775660 - RNA, 12 nt, Human
cugacacaaagg

SEQ ID NO: 3775661 - RNA, 19 nt, Human
cugacacacagcucugucc

SEQ ID NO: 3775662 - RNA, 20 nt, Human
cugacacacagcucuguccu

SEQ ID NO: 3775663 - RNA, 21 nt, Human
cugacacaccugcagccuccc

SEQ ID NO: 3775664 - RNA, 13 nt, Human
cugacacacuaac

SEQ ID NO: 3775665 - RNA, 18 nt, Human
cugacacaggaugaaggc

SEQ ID NO: 3775666 - RNA, 21 nt, Human
cugacacaugcugaacaucac

SEQ ID NO: 3775667 - RNA, 13 nt, Human
cugacacccaugu

SEQ ID NO: 3775668 - RNA, 21 nt, Human
cugacacccuucucccacucu

SEQ ID NO: 3775669 - RNA, 22 nt, Human
cugacuauucuugauguaaaau

SEQ ID NO: 3775670 - RNA, 17 nt, Human
cugacucacaagaagac

SEQ ID NO: 3775671 - RNA, 12 nt, Human
cugacucagggc

SEQ ID NO: 3775672 - RNA, 14 nt, Human
cugacucagggcuc

SEQ ID NO: 3775673 - RNA, 18 nt, Human
cugacucagggcuccugg

SEQ ID NO: 3775674 - RNA, 16 nt, Human
cugacucauucugaag

SEQ ID NO: 3775675 - RNA, 21 nt, Human
cugacucccaaagagcugccu

SEQ ID NO: 3775676 - RNA, 22 nt, Human
cugacucccaaagagcugccua

SEQ ID NO: 3775677 - RNA, 20 nt, Human
cugacuccuaccugcccugg

SEQ ID NO: 3775678 - RNA, 21 nt, Human
cugacuccuaccugcccugga

SEQ ID NO: 3775679 - RNA, 15 nt, Human
cugacuccuuagaga

SEQ ID NO: 3775680 - RNA, 15 nt, Human
cugacucgguuucuc

SEQ ID NO: 3775681 - RNA, 18 nt, Human
cugacucgguuucuccaa

SEQ ID NO: 3775682 - RNA, 20 nt, Human
cugacucgucugacugugug

SEQ ID NO: 3775683 - RNA, 21 nt, Human
cugacucgucugacugugugu

SEQ ID NO: 3775684 - RNA, 13 nt, Human
cugacucucugug

SEQ ID NO: 3775685 - RNA, 18 nt, Human
cugacucucugugaccug

SEQ ID NO: 3775686 - RNA, 14 nt, Human
cugacucugaaauc

SEQ ID NO: 3775687 - RNA, 17 nt, Human
cugacucugaaaucuga

SEQ ID NO: 3775688 - RNA, 20 nt, Human
cugacucugcccccugcugg

SEQ ID NO: 3775689 - RNA, 14 nt, Human
cugacucuucccca

SEQ ID NO: 3775690 - RNA, 11 nt, Human
cugacugaggc

SEQ ID NO: 3775691 - RNA, 14 nt, Human
cugacugaggcagu

SEQ ID NO: 3775692 - RNA, 19 nt, Human
cugacugauguugagggaa

SEQ ID NO: 3775693 - RNA, 15 nt, Human
cugacugccaagcca

SEQ ID NO: 3775694 - RNA, 18 nt, Human
cugacugccaagccaugg

SEQ ID NO: 3775695 - RNA, 22 nt, Human
cugacuggugcuauaggcugga

SEQ ID NO: 3775696 - RNA, 20 nt, Human
cugacugguuaacagcaguc

SEQ ID NO: 3775697 - RNA, 19 nt, Human
cugacuguaacauauucug

SEQ ID NO: 3775698 - RNA, 13 nt, Human
cugacuguagcuu

SEQ ID NO: 3775699 - RNA, 18 nt, Human
cugacugucacaacuccu

SEQ ID NO: 3775700 - RNA, 13 nt, Human
cugacuguccucu

SEQ ID NO: 3775701 - RNA, 16 nt, Human
cugacuguuuucucuu

SEQ ID NO: 3775702 - RNA, 19 nt, Human
cugacuucaggggcugccc

SEQ ID NO: 3775703 - RNA, 23 nt, Human
cugacuucaucucccaccuagca

SEQ ID NO: 3775704 - RNA, 22 nt, Human
cugacuucauggaauggacauc

SEQ ID NO: 3775705 - RNA, 16 nt, Human
cugacuucuaaguaaa

SEQ ID NO: 3775706 - RNA, 12 nt, Human
cugacuucugcc

SEQ ID NO: 3775707 - RNA, 13 nt, Human
cugacuucugccu

SEQ ID NO: 3775708 - RNA, 14 nt, Human
cugacuucugccug

SEQ ID NO: 3775709 - RNA, 18 nt, Human
cugacuucugccuggaga

SEQ ID NO: 3775710 - RNA, 12 nt, Human
cugacuugggga

SEQ ID NO: 3775711 - RNA, 15 nt, Human
cugacuuguuugucu

SEQ ID NO: 3775712 - RNA, 13 nt, Human
cugacuuuacacu

SEQ ID NO: 3775713 - RNA, 16 nt, Human
cugacuuugcucuuuc

SEQ ID NO: 3775714 - RNA, 18 nt, Human
cugacuuugcucuuucuu

SEQ ID NO: 3775715 - RNA, 21 nt, Human
cugacuuuuaaugucauuugu

SEQ ID NO: 3775716 - RNA, 22 nt, Human
cugagaaaacgaaacugcucua

SEQ ID NO: 3775717 - RNA, 10 nt, Human
cugagaaaag

SEQ ID NO: 3775718 - RNA, 13 nt, Human
cugagaaaagaac

SEQ ID NO: 3775719 - RNA, 20 nt, Human
cugagaaagacuauucaaac

SEQ ID NO: 3775720 - RNA, 14 nt, Human
cugagaaauuuaua

SEQ ID NO: 3775721 - RNA, 17 nt, Human
cugagaacacugugaaa

SEQ ID NO: 3775722 - RNA, 17 nt, Human
cugagaacccugcgugg

SEQ ID NO: 3775723 - RNA, 18 nt, Human
cugagaacccugcguggg

SEQ ID NO: 3775724 - RNA, 22 nt, Human
cugagaacccugcguggggaca

SEQ ID NO: 3775725 - RNA, 18 nt, Human
cugagaaccuggccuuca

SEQ ID NO: 3775726 - RNA, 19 nt, Human
cugagaaccuggccuucag

SEQ ID NO: 3775727 - RNA, 16 nt, Human
cugagaacuccugacu

SEQ ID NO: 3775728 - RNA, 23 nt, Human
cugagaagagagaucaaauggaa

SEQ ID NO: 3775729 - RNA, 16 nt, Human
cugagaagcucugaag

SEQ ID NO: 3775730 - RNA, 14 nt, Human
cugagaagcugcuc

SEQ ID NO: 3775731 - RNA, 15 nt, Human
cugagaagcugcucc

SEQ ID NO: 3775732 - RNA, 16 nt, Human
cugagaaggggaggac

SEQ ID NO: 3775733 - RNA, 21 nt, Human
cugagaaggggaggaccucug

SEQ ID NO: 3775734 - RNA, 23 nt, Human
cugagaagguccuuaaugauccg

SEQ ID NO: 3775735 - RNA, 15 nt, Human
cugagaauaagaaag

SEQ ID NO: 3775736 - RNA, 15 nt, Human
cugagaauagaagga

SEQ ID NO: 3775737 - RNA, 16 nt, Human
cugagaauagaaggaa

SEQ ID NO: 3775738 - RNA, 16 nt, Human
cugagaaucagacuga

SEQ ID NO: 3775739 - RNA, 20 nt, Human
cugagacaaauggaggccug

SEQ ID NO: 3775740 - RNA, 18 nt, Human
cugagacagcccgggcuc

SEQ ID NO: 3775741 - RNA, 21 nt, Human
cugagacagcccgggcucugc

SEQ ID NO: 3775742 - RNA, 23 nt, Human
cugagacagcccgggcucugccu

SEQ ID NO: 3775743 - RNA, 13 nt, Human
cugagacaggaga

SEQ ID NO: 3775744 - RNA, 16 nt, Human
cugagacagugaauuu

SEQ ID NO: 3775745 - RNA, 22 nt, Human
cugagaccaaggcuuucucuac

SEQ ID NO: 3775746 - RNA, 14 nt, Human
cugagacccaggac

SEQ ID NO: 3775747 - RNA, 16 nt, Human
cugagacgucaugagg

SEQ ID NO: 3775748 - RNA, 18 nt, Human
cugagacuaaucuuauuc

SEQ ID NO: 3775749 - RNA, 17 nt, Human
cugagacucagacagga

SEQ ID NO: 3775750 - RNA, 15 nt, Human
cugagacuccagacc

SEQ ID NO: 3775751 - RNA, 18 nt, Human
cugagacuccagaccuga

SEQ ID NO: 3775752 - RNA, 19 nt, Human
cugagacuccggggagcgc

SEQ ID NO: 3775753 - RNA, 21 nt, Human
cugagacuuucagugcacugu

SEQ ID NO: 3775754 - RNA, 19 nt, Human
cugagacuuucuuucugua

SEQ ID NO: 3775755 - RNA, 18 nt, Human
cugagagaauuggcucaa

SEQ ID NO: 3775756 - RNA, 17 nt, Human
cugagagacccaaggag

SEQ ID NO: 3775757 - RNA, 20 nt, Human
cugagagacccaaggaggaa

SEQ ID NO: 3775758 - RNA, 18 nt, Human
cugagagacuuuuaauca

SEQ ID NO: 3775759 - RNA, 14 nt, Human
cugagagaggccau

SEQ ID NO: 3775760 - RNA, 21 nt, Human
cugagagaggccauucuuucc

SEQ ID NO: 3775761 - RNA, 19 nt, Human
cugagagaggcuaaaaugu

SEQ ID NO: 3775762 - RNA, 20 nt, Human
cugagagaggcuaaaauguu

SEQ ID NO: 3775763 - RNA, 23 nt, Human
cugagagaggcuaaaauguuuuc

SEQ ID NO: 3775764 - RNA, 24 nt, Human
cugagagaguggcauuggcagcag

SEQ ID NO: 3775765 - RNA, 19 nt, Human
cugagagaugcagaaauau

SEQ ID NO: 3775766 - RNA, 17 nt, Human
cugagagcaaagugacc

SEQ ID NO: 3775767 - RNA, 22 nt, Human
cugagagcaucaggccuagagg

SEQ ID NO: 3775768 - RNA, 13 nt, Human
cugagagccccag

SEQ ID NO: 3775769 - RNA, 14 nt, Human
cugagagccccagc

SEQ ID NO: 3775770 - RNA, 15 nt, Human
cugagagccccagcu

SEQ ID NO: 3775771 - RNA, 17 nt, Human
cugagaggacagagaga

SEQ ID NO: 3775772 - RNA, 12 nt, Human
cugagaggcagg

SEQ ID NO: 3775773 - RNA, 14 nt, Human
cugagaggcaggca

SEQ ID NO: 3775774 - RNA, 17 nt, Human
cugagaggcaggcauag

SEQ ID NO: 3775775 - RNA, 14 nt, Human
cugagagucuagau

SEQ ID NO: 3775776 - RNA, 22 nt, Human
cugagagucuagauucucuggc

SEQ ID NO: 3775777 - RNA, 15 nt, Human
cugagagugucucug

SEQ ID NO: 3775778 - RNA, 15 nt, Human
cugagaguuuaguug

SEQ ID NO: 3775779 - RNA, 23 nt, Human
cugagauaugaacauauuguuga

SEQ ID NO: 3775780 - RNA, 14 nt, Human
cugagauccccuga

SEQ ID NO: 3775781 - RNA, 21 nt, Human
cugagauccccugagccccag

SEQ ID NO: 3775782 - RNA, 17 nt, Human
cugagauccuggacuga

SEQ ID NO: 3775783 - RNA, 19 nt, Human
cugagaucgugcuacugca

SEQ ID NO: 3775784 - RNA, 13 nt, Human
cugagauggcucc

SEQ ID NO: 3775785 - RNA, 13 nt, Human
cugagauucuuca

SEQ ID NO: 3775786 - RNA, 18 nt, Human
cugagauuuauuaaagaa

SEQ ID NO: 3775787 - RNA, 15 nt, Human
cugagauuucaucug

SEQ ID NO: 3775788 - RNA, 22 nt, Human
cugagauuucaucugcucuccu

SEQ ID NO: 3775789 - RNA, 12 nt, Human
cugagcaaagca

SEQ ID NO: 3775790 - RNA, 15 nt, Human
cugagcaaauguggc

SEQ ID NO: 3775791 - RNA, 17 nt, Human
cugagcaaauguggcuc

SEQ ID NO: 3775792 - RNA, 23 nt, Human
cugagcaacagagugagacccug

SEQ ID NO: 3775793 - RNA, 14 nt, Human
cugagcaagagcug

SEQ ID NO: 3775794 - RNA, 19 nt, Human
cugagcaaugucugugcua

SEQ ID NO: 3775795 - RNA, 13 nt, Human
cugagcacagaug

SEQ ID NO: 3775796 - RNA, 13 nt, Human
cugagcaccaggg

SEQ ID NO: 3775797 - RNA, 13 nt, Human
cugagcaccuccc

SEQ ID NO: 3775798 - RNA, 23 nt, Human
cugagcaccugcuucaugcucag

SEQ ID NO: 3775799 - RNA, 14 nt, Human
cugagcacugccag

SEQ ID NO: 3775800 - RNA, 19 nt, Human
cugagcacugccaggaggg

SEQ ID NO: 3775801 - RNA, 22 nt, Human
cugagcacugccaggagggaca

SEQ ID NO: 3775802 - RNA, 16 nt, Human
cugagcacuggagugg

SEQ ID NO: 3775803 - RNA, 12 nt, Human
cugagcacuguu

SEQ ID NO: 3775804 - RNA, 15 nt, Human
cugagcacuguuuuc

SEQ ID NO: 3775805 - RNA, 16 nt, Human
cugagcagacugguga

SEQ ID NO: 3775806 - RNA, 17 nt, Human
cugagcagacuggugag

SEQ ID NO: 3775807 - RNA, 22 nt, Human
cugagcagacuggugagcagac

SEQ ID NO: 3775808 - RNA, 22 nt, Human
cugagcagagucuugcuaccuc

SEQ ID NO: 3775809 - RNA, 23 nt, Human
cugagcagagucuugcuaccuca

SEQ ID NO: 3775810 - RNA, 18 nt, Human
cugagcagcgagccugcu

SEQ ID NO: 3775811 - RNA, 13 nt, Human
cugagcagggaga

SEQ ID NO: 3775812 - RNA, 13 nt, Human
cugagcagggccg

SEQ ID NO: 3775813 - RNA, 17 nt, Human
cugagcaguccuuggcc

SEQ ID NO: 3775814 - RNA, 14 nt, Human
cugcuagcuagcuc

SEQ ID NO: 3775815 - RNA, 20 nt, Human
cugcuagcuagcucaacuag

SEQ ID NO: 3775816 - RNA, 12 nt, Human
cugcuaggccag

SEQ ID NO: 3775817 - RNA, 16 nt, Human
cugcuaggccagagcc

SEQ ID NO: 3775818 - RNA, 19 nt, Human
cugcuaggccagagcccac

SEQ ID NO: 3775819 - RNA, 23 nt, Human
cugcuaggugggccagccccucc

SEQ ID NO: 3775820 - RNA, 20 nt, Human
cugcuauccccaucucccug

SEQ ID NO: 3775821 - RNA, 23 nt, Human
cugcuauccccaucucccugccu

SEQ ID NO: 3775822 - RNA, 15 nt, Human
cugcuaugcuugaau

SEQ ID NO: 3775823 - RNA, 21 nt, Human
cugcuauuaggccagcaagcg

SEQ ID NO: 3775824 - RNA, 17 nt, Human
cugcuauuuauuuuccu

SEQ ID NO: 3775825 - RNA, 20 nt, Human
cugcuauuuuacugucuuaa

SEQ ID NO: 3775826 - RNA, 21 nt, Human
cugcuauuuuacugucuuaau

SEQ ID NO: 3775827 - RNA, 20 nt, Human
cugcucaagaagacauggag

SEQ ID NO: 3775828 - RNA, 23 nt, Human
cugcucaagaagacauggagacu

SEQ ID NO: 3775829 - RNA, 15 nt, Human
cugcucaauacaucu

SEQ ID NO: 3775830 - RNA, 20 nt, Human
cugcucaccgcccaucaggg

SEQ ID NO: 3775831 - RNA, 23 nt, Human
cugcucaccgcccaucaggguuc

SEQ ID NO: 3775832 - RNA, 12 nt, Human
cugcucacugca

SEQ ID NO: 3775833 - RNA, 13 nt, Human
cugcucagacaga

SEQ ID NO: 3775834 - RNA, 23 nt, Human
cugcucagaucccacuuuugcca

SEQ ID NO: 3775835 - RNA, 18 nt, Human
cugcucagcaaccuuuca

SEQ ID NO: 3775836 - RNA, 15 nt, Human
cugcucagccaagcu

SEQ ID NO: 3775837 - RNA, 12 nt, Human
cugcucagcccu

SEQ ID NO: 3775838 - RNA, 16 nt, Human
cugcucagcccuggag

SEQ ID NO: 3775839 - RNA, 14 nt, Human
cugcucagcucugg

SEQ ID NO: 3775840 - RNA, 15 nt, Human
cugcucagcuucucc

SEQ ID NO: 3775841 - RNA, 16 nt, Human
cugcucagcuucuccu

SEQ ID NO: 3775842 - RNA, 22 nt, Human
cugcucagggaaaagcagcucu

SEQ ID NO: 3775843 - RNA, 23 nt, Human
cugcucagggaaaagcagcucuc

SEQ ID NO: 3775844 - RNA, 16 nt, Human
cugcucaucauucucu

SEQ ID NO: 3775845 - RNA, 18 nt, Human
cugcucaucauucucugu

SEQ ID NO: 3775846 - RNA, 13 nt, Human
cugcucauccacu

SEQ ID NO: 3775847 - RNA, 23 nt, Human
cugcuccaaccgggaugggagcc

SEQ ID NO: 3775848 - RNA, 13 nt, Human
cugcuccaccaca

SEQ ID NO: 3775849 - RNA, 13 nt, Human
cugcuccacccuu

SEQ ID NO: 3775850 - RNA, 15 nt, Human
cugcuccacccuugg

SEQ ID NO: 3775851 - RNA, 16 nt, Human
cugcuccacccuuggc

SEQ ID NO: 3775852 - RNA, 21 nt, Human
cugcuccaccuuucagcccac

SEQ ID NO: 3775853 - RNA, 24 nt, Human
cugcuccaccuuucagcccacguc

SEQ ID NO: 3775854 - RNA, 21 nt, Human
cugcuccagaauuuggaaauc

SEQ ID NO: 3775855 - RNA, 22 nt, Human
cugcuccagaauuuggaaaucc

SEQ ID NO: 3775856 - RNA, 14 nt, Human
cugcuccagaccug

SEQ ID NO: 3775857 - RNA, 15 nt, Human
cugcuccagcuguuc

SEQ ID NO: 3775858 - RNA, 13 nt, Human
cugcuccaggccu

SEQ ID NO: 3775859 - RNA, 12 nt, Human
cugcucccaagg

SEQ ID NO: 3775860 - RNA, 17 nt, Human
cugcucccaaggggccu

SEQ ID NO: 3775861 - RNA, 18 nt, Human
cugcucccaaggggccug

SEQ ID NO: 3775862 - RNA, 23 nt, Human
cugcucccaaggggccugagcag

SEQ ID NO: 3775863 - RNA, 17 nt, Human
cugcucccaccuccuga

SEQ ID NO: 3775864 - RNA, 17 nt, Human
cugcucccaccuggcuc

SEQ ID NO: 3775865 - RNA, 21 nt, Human
cugcucccagcagcccuaagg

SEQ ID NO: 3775866 - RNA, 19 nt, Human
cugcuccccagcccuggcu

SEQ ID NO: 3775867 - RNA, 14 nt, Human
cugcucccccaccc

SEQ ID NO: 3775868 - RNA, 21 nt, Human
cugcucccccacccccucccc

SEQ ID NO: 3775869 - RNA, 17 nt, Human
cugcucccccuuuuccc

SEQ ID NO: 3775870 - RNA, 13 nt, Human
cugcucccuaagc

SEQ ID NO: 3775871 - RNA, 20 nt, Human
cugcucccuaagccagccug

SEQ ID NO: 3775872 - RNA, 21 nt, Human
cugcucccuaagccagccugg

SEQ ID NO: 3775873 - RNA, 14 nt, Human
cugcucccucagac

SEQ ID NO: 3775874 - RNA, 22 nt, Human
cugcucccuccgggucuuccua

SEQ ID NO: 3775875 - RNA, 20 nt, Human
cugcucccucucccccuuac

SEQ ID NO: 3775876 - RNA, 14 nt, Human
cugcucccugaagc

SEQ ID NO: 3775877 - RNA, 19 nt, Human
cugcucccugaagccagcc

SEQ ID NO: 3775878 - RNA, 15 nt, Human
cugcuccgcugcucc

SEQ ID NO: 3775879 - RNA, 17 nt, Human
cugcuccgcugcuccuu

SEQ ID NO: 3775880 - RNA, 18 nt, Human
cugcuccgcugcuccuug

SEQ ID NO: 3775881 - RNA, 15 nt, Human
cugcuccguggagga

SEQ ID NO: 3775882 - RNA, 23 nt, Human
cugcuccguggaggagguuggga

SEQ ID NO: 3775883 - RNA, 14 nt, Human
cugcuccuagaggg

SEQ ID NO: 3775884 - RNA, 17 nt, Human
cugcuccuagagggagg

SEQ ID NO: 3775885 - RNA, 11 nt, Human
cugcuccucca

SEQ ID NO: 3775886 - RNA, 12 nt, Human
cugcuccucccu

SEQ ID NO: 3775887 - RNA, 16 nt, Human
cugcuccucccuggcu

SEQ ID NO: 3775888 - RNA, 22 nt, Human
cugcuccucccuggcugcccug

SEQ ID NO: 3775889 - RNA, 23 nt, Human
cugcuccucccuggcugcccugg

SEQ ID NO: 3775890 - RNA, 14 nt, Human
cugcuccucuccag

SEQ ID NO: 3775891 - RNA, 16 nt, Human
cugcuccucuccaggc

SEQ ID NO: 3775892 - RNA, 16 nt, Human
cugcuccucuccccag

SEQ ID NO: 3775893 - RNA, 18 nt, Human
cugcuccucuccccagca

SEQ ID NO: 3775894 - RNA, 14 nt, Human
cugcuccugagccc

SEQ ID NO: 3775895 - RNA, 18 nt, Human
cugcuccugagcccccag

SEQ ID NO: 3775896 - RNA, 13 nt, Human
cugcuccugcagc

SEQ ID NO: 3775897 - RNA, 15 nt, Human
cugcuccuggagccu

SEQ ID NO: 3775898 - RNA, 19 nt, Human
cugcuccuggagccuuuga

SEQ ID NO: 3775899 - RNA, 20 nt, Human
cugcuccuuagcugccaagc

SEQ ID NO: 3775900 - RNA, 12 nt, Human
cugcuccuuccc

SEQ ID NO: 3775901 - RNA, 14 nt, Human
cugcuccuucccca

SEQ ID NO: 3775902 - RNA, 15 nt, Human
cugcucgcccuccuu

SEQ ID NO: 3775903 - RNA, 18 nt, Human
cugcucgcccuccuuucu

SEQ ID NO: 3775904 - RNA, 22 nt, Human
cugcucgcccuccuuucugugc

SEQ ID NO: 3775905 - RNA, 15 nt, Human
cugcucgccuuagca

SEQ ID NO: 3775906 - RNA, 15 nt, Human
cugcucgggcccagg

SEQ ID NO: 3775907 - RNA, 22 nt, Human
cugcucggggugcacaggaggg

SEQ ID NO: 3775908 - RNA, 18 nt, Human
cugcucguccccaaguga

SEQ ID NO: 3775909 - RNA, 21 nt, Human
cugcucguccccaagugaccu

SEQ ID NO: 3775910 - RNA, 20 nt, Human
cugcucuagaugagcugggc

SEQ ID NO: 3775911 - RNA, 22 nt, Human
cugcucuagaugagcugggccg

SEQ ID NO: 3775912 - RNA, 16 nt, Human
cugcucuagugggaca

SEQ ID NO: 3775913 - RNA, 21 nt, Human
cugcucuauuccaaaaagguu

SEQ ID NO: 3775914 - RNA, 15 nt, Human
cugcucuauuguagc

SEQ ID NO: 3775915 - RNA, 23 nt, Human
cugcucuauuguagcauuucuug

SEQ ID NO: 3775916 - RNA, 15 nt, Human
cugcucuccgaccag

SEQ ID NO: 3775917 - RNA, 14 nt, Human
cugcucuccucuuc

SEQ ID NO: 3775918 - RNA, 15 nt, Human
cugcucuccuuccug

SEQ ID NO: 3775919 - RNA, 17 nt, Human
cugcucuccuuccugga

SEQ ID NO: 3775920 - RNA, 22 nt, Human
cugcucucuacccagcccaucu

SEQ ID NO: 3775921 - RNA, 20 nt, Human
cugcucucuuuuucuccagg

SEQ ID NO: 3775922 - RNA, 12 nt, Human
cugcucugagaa

SEQ ID NO: 3775923 - RNA, 13 nt, Human
cugcucugaggcu

SEQ ID NO: 3775924 - RNA, 23 nt, Human
cugcucugaguuauguuaaaauc

SEQ ID NO: 3775925 - RNA, 12 nt, Human
cugcucugauga

SEQ ID NO: 3775926 - RNA, 20 nt, Human
cugcucugaugaagaggagu

SEQ ID NO: 3775927 - RNA, 12 nt, Human
cugcucugaugc

SEQ ID NO: 3775928 - RNA, 12 nt, Human
cugcucugccca

SEQ ID NO: 3775929 - RNA, 14 nt, Human
cugcucugcccaga

SEQ ID NO: 3775930 - RNA, 23 nt, Human
cugcucugcccagagcuggguga

SEQ ID NO: 3775931 - RNA, 13 nt, Human
cugcucugcccca

SEQ ID NO: 3775932 - RNA, 20 nt, Human
cugcucugcgugucaccugu

SEQ ID NO: 3775933 - RNA, 15 nt, Human
cugcucugcucgccu

SEQ ID NO: 3775934 - RNA, 12 nt, Human
cugcucugguua

SEQ ID NO: 3775935 - RNA, 22 nt, Human
cugcucugguuguuucuguucc

SEQ ID NO: 3775936 - RNA, 15 nt, Human
cugcucugugcccac

SEQ ID NO: 3775937 - RNA, 16 nt, Human
cugcucuuggcuggac

SEQ ID NO: 3775938 - RNA, 21 nt, Human
cugcucuuggcuggacccagc

SEQ ID NO: 3775939 - RNA, 22 nt, Human
cugcucuuggcuggacccagcc

SEQ ID NO: 3775940 - RNA, 17 nt, Human
cugcucuuucucugcca

SEQ ID NO: 3775941 - RNA, 17 nt, Human
cugcucuuucuucuucc

SEQ ID NO: 3775942 - RNA, 19 nt, Human
cugcucuuuuauacuguac

SEQ ID NO: 3775943 - RNA, 22 nt, Human
cugcugaaaaccaucuggccug

SEQ ID NO: 3775944 - RNA, 21 nt, Human
cugcugaagaugaaucaaugg

SEQ ID NO: 3775945 - RNA, 19 nt, Human
cugcugaagcugccugcuu

SEQ ID NO: 3775946 - RNA, 13 nt, Human
cugcugaaggcuc

SEQ ID NO: 3775947 - RNA, 22 nt, Human
cugcugaaugauuuccaaagag

SEQ ID NO: 3775948 - RNA, 23 nt, Human
cugcugaaugauuuccaaagaga

SEQ ID NO: 3775949 - RNA, 15 nt, Human
cugcugaauuuucac

SEQ ID NO: 3775950 - RNA, 11 nt, Human
cugcugacagu

SEQ ID NO: 3775951 - RNA, 15 nt, Human
cugcugacaguguug

SEQ ID NO: 3775952 - RNA, 18 nt, Human
cugcugaccuccacagcu

SEQ ID NO: 3775953 - RNA, 14 nt, Human
cugcugaccugcug

SEQ ID NO: 3775954 - RNA, 13 nt, Human
cugcugagaaccu

SEQ ID NO: 3775955 - RNA, 19 nt, Human
cugcugagaaccuggccuu

SEQ ID NO: 3775956 - RNA, 20 nt, Human
cugcugagaaccuggccuuc

SEQ ID NO: 3775957 - RNA, 19 nt, Human
cugcugagauacauacaga

SEQ ID NO: 3775958 - RNA, 19 nt, Human
cugcuucccaccucccugc

SEQ ID NO: 3775959 - RNA, 20 nt, Human
cugcuucccaccucccugcc

SEQ ID NO: 3775960 - RNA, 21 nt, Human
cugcuucccaccucccugccc

SEQ ID NO: 3775961 - RNA, 12 nt, Human
cugcuucccauc

SEQ ID NO: 3775962 - RNA, 18 nt, Human
cugcuucccauccuaccc

SEQ ID NO: 3775963 - RNA, 19 nt, Human
cugcuucccauccuacccu

SEQ ID NO: 3775964 - RNA, 16 nt, Human
cugcuucccugaagcu

SEQ ID NO: 3775965 - RNA, 15 nt, Human
cugcuucccuuacuu

SEQ ID NO: 3775966 - RNA, 20 nt, Human
cugcuucccuuacuuugcug

SEQ ID NO: 3775967 - RNA, 21 nt, Human
cugcuucccuuacuuugcuga

SEQ ID NO: 3775968 - RNA, 22 nt, Human
cugcuuccgguagggaggcagc

SEQ ID NO: 3775969 - RNA, 12 nt, Human
cugcuuccuccu

SEQ ID NO: 3775970 - RNA, 13 nt, Human
cugcuuccugcuu

SEQ ID NO: 3775971 - RNA, 14 nt, Human
cugcuucuccagcc

SEQ ID NO: 3775972 - RNA, 15 nt, Human
cugcuucuccagccu

SEQ ID NO: 3775973 - RNA, 20 nt, Human
cugcuucucugacuucugcc

SEQ ID NO: 3775974 - RNA, 20 nt, Human
cugcuucugcaccuuaucuu

SEQ ID NO: 3775975 - RNA, 13 nt, Human
cugcuugaggaaa

SEQ ID NO: 3775976 - RNA, 21 nt, Human
cugcuugaggcaacucaucuu

SEQ ID NO: 3775977 - RNA, 21 nt, Human
cugcuugauaggaauucaucu

SEQ ID NO: 3775978 - RNA, 16 nt, Human
cugcuugaugaagcaa

SEQ ID NO: 3775979 - RNA, 17 nt, Human
cugcuugaugaagcaag

SEQ ID NO: 3775980 - RNA, 20 nt, Human
cugcuugaugaagcaaggaa

SEQ ID NO: 3775981 - RNA, 21 nt, Human
cugcuugccaaggcagaggcc

SEQ ID NO: 3775982 - RNA, 23 nt, Human
cugcuugccaaggcagaggccug

SEQ ID NO: 3775983 - RNA, 15 nt, Human
cugcuugccaucccu

SEQ ID NO: 3775984 - RNA, 18 nt, Human
cugcuugccaucccuccc

SEQ ID NO: 3775985 - RNA, 20 nt, Human
cugcuugccaucccucccuc

SEQ ID NO: 3775986 - RNA, 16 nt, Human
cugcuugcccuaagca

SEQ ID NO: 3775987 - RNA, 20 nt, Human
cugcuugcuugcuuuuuaau

SEQ ID NO: 3775988 - RNA, 16 nt, Human
cugcuuggagcugagc

SEQ ID NO: 3775989 - RNA, 18 nt, Human
cugcuuggcccagggggc

SEQ ID NO: 3775990 - RNA, 23 nt, Human
cugcuuggcccagggggcuuccu

SEQ ID NO: 3775991 - RNA, 17 nt, Human
cugcuugggcuucaucc

SEQ ID NO: 3775992 - RNA, 18 nt, Human
cugcuuggguggagaagc

SEQ ID NO: 3775993 - RNA, 21 nt, Human
cugcuuggguggagaagccau

SEQ ID NO: 3775994 - RNA, 18 nt, Human
cugcuugguccuugauuu

SEQ ID NO: 3775995 - RNA, 13 nt, Human
cugcuuguuuccu

SEQ ID NO: 3775996 - RNA, 14 nt, Human
cugcuuguuuccua

SEQ ID NO: 3775997 - RNA, 19 nt, Human
cugcuuuaaagggccugcc

SEQ ID NO: 3775998 - RNA, 13 nt, Human
cugcuuuaaucag

SEQ ID NO: 3775999 - RNA, 23 nt, Human
cugcuuuagaauguuuuccuucu

SEQ ID NO: 3776000 - RNA, 14 nt, Human
cugcuuuagacuug

SEQ ID NO: 3776001 - RNA, 14 nt, Human
cugcuuuccccugu

SEQ ID NO: 3776002 - RNA, 16 nt, Human
cugcuuuccccugugg

SEQ ID NO: 3776003 - RNA, 17 nt, Human
cugcuuuccccuguggg

SEQ ID NO: 3776004 - RNA, 14 nt, Human
cugcuuucucccca

SEQ ID NO: 3776005 - RNA, 19 nt, Human
cugcuuucugauguugccu

SEQ ID NO: 3776006 - RNA, 14 nt, Human
cugcuuucuuugau

SEQ ID NO: 3776007 - RNA, 19 nt, Human
cugcuuugaauaaaugugu

SEQ ID NO: 3776008 - RNA, 22 nt, Human
cugcuuugacugagcagacugg

SEQ ID NO: 3776009 - RNA, 18 nt, Human
cugcuuugcgugcccggg

SEQ ID NO: 3776010 - RNA, 23 nt, Human
cugcuuugggauuuaauuuccag

SEQ ID NO: 3776011 - RNA, 12 nt, Human
cugcuuugggcu

SEQ ID NO: 3776012 - RNA, 17 nt, Human
cugcuuugggcugcccu

SEQ ID NO: 3776013 - RNA, 23 nt, Human
cugcuuugggcugcccuggugcu

SEQ ID NO: 3776014 - RNA, 21 nt, Human
cugcuuuguugugugccucua

SEQ ID NO: 3776015 - RNA, 19 nt, Human
cugcuuuuaacucuagaau

SEQ ID NO: 3776016 - RNA, 17 nt, Human
cugcuuuuaucucagau

SEQ ID NO: 3776017 - RNA, 12 nt, Human
cugcuuuucaau

SEQ ID NO: 3776018 - RNA, 15 nt, Human
cugcuuuucacugcu

SEQ ID NO: 3776019 - RNA, 17 nt, Human
cugcuuuucugcccugg

SEQ ID NO: 3776020 - RNA, 18 nt, Human
cugcuuuucugcccuggc

SEQ ID NO: 3776021 - RNA, 20 nt, Human
cugcuuuucugcccuggcug

SEQ ID NO: 3776022 - RNA, 18 nt, Human
cugcuuuucuuuucuaac

SEQ ID NO: 3776023 - RNA, 13 nt, Human
cugcuuuuggccu

SEQ ID NO: 3776024 - RNA, 15 nt, Human
cugcuuuuggucugu

SEQ ID NO: 3776025 - RNA, 17 nt, Human
cugcuuuuggucugugu

SEQ ID NO: 3776026 - RNA, 20 nt, Human
cugcuuuugucuaugggacu

SEQ ID NO: 3776027 - RNA, 18 nt, Human
cugcuuuuuauggccugu

SEQ ID NO: 3776028 - RNA, 22 nt, Human
cugcuuuuuccaacucagaaau

SEQ ID NO: 3776029 - RNA, 14 nt, Human
cugcuuuuuggaaa

SEQ ID NO: 3776030 - RNA, 19 nt, Human
cuggaaaacagaacacuua

SEQ ID NO: 3776031 - RNA, 14 nt, Human
cuggaaaagaggag

SEQ ID NO: 3776032 - RNA, 15 nt, Human
cuggaaaagaggagu

SEQ ID NO: 3776033 - RNA, 19 nt, Human
cuggaaaagggucuuggga

SEQ ID NO: 3776034 - RNA, 17 nt, Human
cuggaaaauaauacugc

SEQ ID NO: 3776035 - RNA, 20 nt, Human
cuggaaaauaauacugcuga

SEQ ID NO: 3776036 - RNA, 18 nt, Human
cuggaaaaugugacccag

SEQ ID NO: 3776037 - RNA, 19 nt, Human
cuggaaacauucaggagcu

SEQ ID NO: 3776038 - RNA, 14 nt, Human
cuggaaaggcucag

SEQ ID NO: 3776039 - RNA, 15 nt, Human
cuggaaaggcucagu

SEQ ID NO: 3776040 - RNA, 17 nt, Human
cuggaaaggcucagucu

SEQ ID NO: 3776041 - RNA, 23 nt, Human
cuggaaaggcucagucucaggag

SEQ ID NO: 3776042 - RNA, 13 nt, Human
cuggaaaggggag

SEQ ID NO: 3776043 - RNA, 16 nt, Human
cuggaaaggggagagc

SEQ ID NO: 3776044 - RNA, 18 nt, Human
cuggaaaggggagagccu

SEQ ID NO: 3776045 - RNA, 19 nt, Human
cuggaaaggggagagccug

SEQ ID NO: 3776046 - RNA, 19 nt, Human
cuggaacaaauuauuuuug

SEQ ID NO: 3776047 - RNA, 22 nt, Human
cuggaacacuagacaagccaga

SEQ ID NO: 3776048 - RNA, 23 nt, Human
cuggaacacuagacaagccagaa

SEQ ID NO: 3776049 - RNA, 14 nt, Human
cuggaacagauuca

SEQ ID NO: 3776050 - RNA, 20 nt, Human
cuggaacaucaucaaggcac

SEQ ID NO: 3776051 - RNA, 22 nt, Human
cuggaacauccuuugcagggca

SEQ ID NO: 3776052 - RNA, 24 nt, Human
cuggaacauccuuugcagggcagc

SEQ ID NO: 3776053 - RNA, 13 nt, Human
cuggaacccagac

SEQ ID NO: 3776054 - RNA, 22 nt, Human
cuggaacccagacucagacauu

SEQ ID NO: 3776055 - RNA, 17 nt, Human
cuggaaccucagccugg

SEQ ID NO: 3776056 - RNA, 22 nt, Human
cuggaaccucagccuggccaga

SEQ ID NO: 3776057 - RNA, 15 nt, Human
cuggaaccugcaaaa

SEQ ID NO: 3776058 - RNA, 16 nt, Human
cuggaaccugcaaaaa

SEQ ID NO: 3776059 - RNA, 18 nt, Human
cuggaaccugcaaaaaau

SEQ ID NO: 3776060 - RNA, 16 nt, Human
cuggaaccuugcuguc

SEQ ID NO: 3776061 - RNA, 17 nt, Human
cuggaaccuugcugucc

SEQ ID NO: 3776062 - RNA, 18 nt, Human
cuggaaccuugcuguccu

SEQ ID NO: 3776063 - RNA, 16 nt, Human
cuggaacggugaaggu

SEQ ID NO: 3776064 - RNA, 19 nt, Human
cuggaacucuaucugggcc

SEQ ID NO: 3776065 - RNA, 20 nt, Human
cuggaacucuaucugggccu

SEQ ID NO: 3776066 - RNA, 12 nt, Human
cuggaagaaaaa

SEQ ID NO: 3776067 - RNA, 14 nt, Human
cuggaagaaaaaaa

SEQ ID NO: 3776068 - RNA, 16 nt, Human
cuggaagaacaggccu

SEQ ID NO: 3776069 - RNA, 17 nt, Human
cuggaagaacaggccuc

SEQ ID NO: 3776070 - RNA, 12 nt, Human
cuggaagagagg

SEQ ID NO: 3776071 - RNA, 16 nt, Human
cuggaagagcagcccu

SEQ ID NO: 3776072 - RNA, 11 nt, Human
cuggaagagcc

SEQ ID NO: 3776073 - RNA, 14 nt, Human
cuggaagagcccag

SEQ ID NO: 3776074 - RNA, 15 nt, Human
cuggaagagcccagu

SEQ ID NO: 3776075 - RNA, 15 nt, Human
cuggaagauagcugu

SEQ ID NO: 3776076 - RNA, 16 nt, Human
cuggaagauagcugug

SEQ ID NO: 3776077 - RNA, 14 nt, Human
cuggaagauccugc

SEQ ID NO: 3776078 - RNA, 18 nt, Human
cuggaagauccugcgggu

SEQ ID NO: 3776079 - RNA, 15 nt, Human
cuggaagcacagaaa

SEQ ID NO: 3776080 - RNA, 15 nt, Human
cuggaagcacagcuu

SEQ ID NO: 3776081 - RNA, 12 nt, Human
cuggaagcacau

SEQ ID NO: 3776082 - RNA, 15 nt, Human
cuggaagcagugccc

SEQ ID NO: 3776083 - RNA, 16 nt, Human
cuggaagcagugccca

SEQ ID NO: 3776084 - RNA, 19 nt, Human
cuggaagcagugcccaggu

SEQ ID NO: 3776085 - RNA, 15 nt, Human
cuggaagccagcuuu

SEQ ID NO: 3776086 - RNA, 12 nt, Human
cuggaagcccag

SEQ ID NO: 3776087 - RNA, 22 nt, Human
cuggaagcccagccccuacugc

SEQ ID NO: 3776088 - RNA, 21 nt, Human
cuggaagccccugggcccagu

SEQ ID NO: 3776089 - RNA, 16 nt, Human
cuggaagcccucucug

SEQ ID NO: 3776090 - RNA, 14 nt, Human
cuggaagcccugga

SEQ ID NO: 3776091 - RNA, 17 nt, Human
cuggaagcccuggagac

SEQ ID NO: 3776092 - RNA, 12 nt, Human
cuggaagcugug

SEQ ID NO: 3776093 - RNA, 14 nt, Human
cuggaagcuuuguc

SEQ ID NO: 3776094 - RNA, 15 nt, Human
cuggaagcuuugucc

SEQ ID NO: 3776095 - RNA, 22 nt, Human
cuggaagcuuuguccccugcuu

SEQ ID NO: 3776096 - RNA, 22 nt, Human
cuggaaggaggaagaauagggc

SEQ ID NO: 3776097 - RNA, 16 nt, Human
cuggaagggcagagua

SEQ ID NO: 3776098 - RNA, 13 nt, Human
cuggaagggccaa

SEQ ID NO: 3776099 - RNA, 19 nt, Human
cuggaaggggaagggacac

SEQ ID NO: 3776100 - RNA, 20 nt, Human
cuggaagguggggacaggga

SEQ ID NO: 3776101 - RNA, 19 nt, Human
cuggaaguccaauguggca

SEQ ID NO: 3776102 - RNA, 15 nt, Human
cuggaagugacuuug

SEQ ID NO: 3776103 - RNA, 22 nt, Human
cuggaggacuagaaccuggagg

SEQ ID NO: 3776104 - RNA, 24 nt, Human
cuggaggcaccugguggccaugcu

SEQ ID NO: 3776105 - RNA, 12 nt, Human
cuggaggcaggg

SEQ ID NO: 3776106 - RNA, 16 nt, Human
cuggaggcagggccuu

SEQ ID NO: 3776107 - RNA, 19 nt, Human
cuggaggcaggggcuuccu

SEQ ID NO: 3776108 - RNA, 17 nt, Human
cuggaggcccaggcugg

SEQ ID NO: 3776109 - RNA, 13 nt, Human
cuggaggcccagu

SEQ ID NO: 3776110 - RNA, 15 nt, Human
cuggaggcccaguuc

SEQ ID NO: 3776111 - RNA, 14 nt, Human
cuggaggccccugg

SEQ ID NO: 3776112 - RNA, 21 nt, Human
cuggaggccucugggccuccu

SEQ ID NO: 3776113 - RNA, 21 nt, Human
cuggaggcucaaauuuugagu

SEQ ID NO: 3776114 - RNA, 21 nt, Human
cuggagggaagaguggaggug

SEQ ID NO: 3776115 - RNA, 19 nt, Human
cuggagggaaugaaccugg

SEQ ID NO: 3776116 - RNA, 20 nt, Human
cuggagggcuagaaccugga

SEQ ID NO: 3776117 - RNA, 21 nt, Human
cuggagggcuagaaccuggag

SEQ ID NO: 3776118 - RNA, 22 nt, Human
cuggagggcuagaaccuggcag

SEQ ID NO: 3776119 - RNA, 21 nt, Human
cuggagggcuagaacuggaga

SEQ ID NO: 3776120 - RNA, 19 nt, Human
cuggagggcuggaaucugg

SEQ ID NO: 3776121 - RNA, 22 nt, Human
cuggagggcuggaaucuggaga

SEQ ID NO: 3776122 - RNA, 15 nt, Human
cuggaggggacgcug

SEQ ID NO: 3776123 - RNA, 15 nt, Human
cuggaggggccccug

SEQ ID NO: 3776124 - RNA, 19 nt, Human
cuggagggggaauggcagc

SEQ ID NO: 3776125 - RNA, 21 nt, Human
cuggagggggaauggcagcag

SEQ ID NO: 3776126 - RNA, 22 nt, Human
cuggaggucacauucaggaaga

SEQ ID NO: 3776127 - RNA, 14 nt, Human
cuggaggucagcau

SEQ ID NO: 3776128 - RNA, 22 nt, Human
cuggagguggggccuggagcag

SEQ ID NO: 3776129 - RNA, 23 nt, Human
cuggagguggggcgaggcaggcc

SEQ ID NO: 3776130 - RNA, 20 nt, Human
cuggaggugggguugggauu

SEQ ID NO: 3776131 - RNA, 22 nt, Human
cuggaggugggguugggauugg

SEQ ID NO: 3776132 - RNA, 19 nt, Human
cuggagguugaagccaagu

SEQ ID NO: 3776133 - RNA, 17 nt, Human
cuggagguuuguuuaga

SEQ ID NO: 3776134 - RNA, 15 nt, Human
cuggagucuccugag

SEQ ID NO: 3776135 - RNA, 16 nt, Human
cuggagugagcacuca

SEQ ID NO: 3776136 - RNA, 15 nt, Human
cuggagugaggaaaa

SEQ ID NO: 3776137 - RNA, 15 nt, Human
cuggagugcagugag

SEQ ID NO: 3776138 - RNA, 16 nt, Human
cuggagugcagugagc

SEQ ID NO: 3776139 - RNA, 19 nt, Human
cuggagugcccacccuggg

SEQ ID NO: 3776140 - RNA, 20 nt, Human
cuggaguggcucgccaggcc

SEQ ID NO: 3776141 - RNA, 21 nt, Human
cuggaguggcucgccaggcca

SEQ ID NO: 3776142 - RNA, 17 nt, Human
cuggaguuagggacuga

SEQ ID NO: 3776143 - RNA, 21 nt, Human
cuggaguuauugaagcagagu

SEQ ID NO: 3776144 - RNA, 22 nt, Human
cuggaguuauugaagcagagug

SEQ ID NO: 3776145 - RNA, 16 nt, Human
cuggaguucugguucc

SEQ ID NO: 3776146 - RNA, 18 nt, Human
cuggaguugaucuggaac

SEQ ID NO: 3776147 - RNA, 22 nt, Human
cuggaguuucauguacaagaug

SEQ ID NO: 3776148 - RNA, 20 nt, Human
cuggaguuugggaucccugu

SEQ ID NO: 3776149 - RNA, 22 nt, Human
cuggaguuuuuguuuggagagc

SEQ ID NO: 3776150 - RNA, 16 nt, Human
cuggauaaagccacug

SEQ ID NO: 3776151 - RNA, 21 nt, Human
cuggauaauuuugcauaaaau

SEQ ID NO: 3776152 - RNA, 19 nt, Human
cuggauaggagccugcugg

SEQ ID NO: 3776153 - RNA, 20 nt, Human
cuggauaggagccugcuggu

SEQ ID NO: 3776154 - RNA, 18 nt, Human
cuggauaguccgucucug

SEQ ID NO: 3776155 - RNA, 19 nt, Human
cuggauaguccgucucugc

SEQ ID NO: 3776156 - RNA, 18 nt, Human
cuggauauagcuagguga

SEQ ID NO: 3776157 - RNA, 13 nt, Human
cuggauauuuuca

SEQ ID NO: 3776158 - RNA, 15 nt, Human
cuggauauuuucaaa

SEQ ID NO: 3776159 - RNA, 16 nt, Human
cuggauauuuucaaau

SEQ ID NO: 3776160 - RNA, 16 nt, Human
cuggaucacagcugcu

SEQ ID NO: 3776161 - RNA, 21 nt, Human
cuggaucacgacgcugcagag

SEQ ID NO: 3776162 - RNA, 13 nt, Human
cuggaucaguaaa

SEQ ID NO: 3776163 - RNA, 13 nt, Human
cuggaucaguccu

SEQ ID NO: 3776164 - RNA, 18 nt, Human
cuggauccccucugucua

SEQ ID NO: 3776165 - RNA, 15 nt, Human
cuggauccugaaaua

SEQ ID NO: 3776166 - RNA, 20 nt, Human
cuggaucuccauucucucag

SEQ ID NO: 3776167 - RNA, 18 nt, Human
cuggaucucccagggcua

SEQ ID NO: 3776168 - RNA, 19 nt, Human
cuggaucucccagggcuac

SEQ ID NO: 3776169 - RNA, 13 nt, Human
cuggaucucccug

SEQ ID NO: 3776170 - RNA, 23 nt, Human
cuggaucuccucaaguccccaag

SEQ ID NO: 3776171 - RNA, 20 nt, Human
cuggaucugggacccuuucc

SEQ ID NO: 3776172 - RNA, 21 nt, Human
cuggaucugggacccuuuccu

SEQ ID NO: 3776173 - RNA, 13 nt, Human
cuggaugaaauuu

SEQ ID NO: 3776174 - RNA, 23 nt, Human
cuggaugaaguuaucuggcuuca

SEQ ID NO: 3776175 - RNA, 22 nt, Human
cuggaugauacuaauaaacuaa

SEQ ID NO: 3776176 - RNA, 14 nt, Human
cuggaugauauuuu

SEQ ID NO: 3776177 - RNA, 21 nt, Human
cuggaugccaccucugcaggg

SEQ ID NO: 3776178 - RNA, 13 nt, Human
cuggaugcccagg

SEQ ID NO: 3776179 - RNA, 22 nt, Human
cuggaugcccccuguggaugcu

SEQ ID NO: 3776180 - RNA, 22 nt, Human
cuggaugccucauuaugucaac

SEQ ID NO: 3776181 - RNA, 16 nt, Human
cuggauggagcccagg

SEQ ID NO: 3776182 - RNA, 21 nt, Human
cuggauggaggaaaaccaagc

SEQ ID NO: 3776183 - RNA, 15 nt, Human
cuggauggggcaggc

SEQ ID NO: 3776184 - RNA, 24 nt, Human
cuggauggggcaggccaccuggcu

SEQ ID NO: 3776185 - RNA, 15 nt, Human
cuggauguaccacca

SEQ ID NO: 3776186 - RNA, 19 nt, Human
cuggaugucugccaauuuu

SEQ ID NO: 3776187 - RNA, 15 nt, Human
cuggauguuuggaaa

SEQ ID NO: 3776188 - RNA, 17 nt, Human
cuggauuauauuaugaa

SEQ ID NO: 3776189 - RNA, 16 nt, Human
cuggauucauugucuc

SEQ ID NO: 3776190 - RNA, 20 nt, Human
cuggauuccccaucucaggc

SEQ ID NO: 3776191 - RNA, 21 nt, Human
cuggauuccccaucucaggcc

SEQ ID NO: 3776192 - RNA, 12 nt, Human
cuggauuuaacu

SEQ ID NO: 3776193 - RNA, 14 nt, Human
cuggauuuuuacca

SEQ ID NO: 3776194 - RNA, 23 nt, Human
cuggcaaaaggaucuuuguggcc

SEQ ID NO: 3776195 - RNA, 22 nt, Human
cuggcaaaauaguucugcaggu

SEQ ID NO: 3776196 - RNA, 23 nt, Human
cuggcaaaauaguucugcagguu

SEQ ID NO: 3776197 - RNA, 18 nt, Human
cuggcaaagacagaagcc

SEQ ID NO: 3776198 - RNA, 18 nt, Human
cuggcaaagggagcagaa

SEQ ID NO: 3776199 - RNA, 14 nt, Human
cuggcaacaucuuu

SEQ ID NO: 3776200 - RNA, 17 nt, Human
cuggcaacaucuuuauc

SEQ ID NO: 3776201 - RNA, 23 nt, Human
cuggcaagaaaagaguuaaggca

SEQ ID NO: 3776202 - RNA, 22 nt, Human
cuggcaagcuagaaccuggagg

SEQ ID NO: 3776203 - RNA, 19 nt, Human
cuggcaaggacuuuguaca

SEQ ID NO: 3776204 - RNA, 19 nt, Human
cuggcaauaguguguucug

SEQ ID NO: 3776205 - RNA, 20 nt, Human
cuggcaauaguguguucuga

SEQ ID NO: 3776206 - RNA, 15 nt, Human
cuggcaaugccacag

SEQ ID NO: 3776207 - RNA, 20 nt, Human
cuggcaaugccacagcccug

SEQ ID NO: 3776208 - RNA, 19 nt, Human
cuggcaauguuuauuucau

SEQ ID NO: 3776209 - RNA, 19 nt, Human
cuggcaauugucuauuuau

SEQ ID NO: 3776210 - RNA, 12 nt, Human
cuggcacacauc

SEQ ID NO: 3776211 - RNA, 14 nt, Human
cuggcacagccugg

SEQ ID NO: 3776212 - RNA, 16 nt, Human
cuggcacagccuggcu

SEQ ID NO: 3776213 - RNA, 14 nt, Human
cuggcacaggacug

SEQ ID NO: 3776214 - RNA, 15 nt, Human
cuggcacagggcagu

SEQ ID NO: 3776215 - RNA, 12 nt, Human
cuggcacagugu

SEQ ID NO: 3776216 - RNA, 19 nt, Human
cuggcacaguuuucugaga

SEQ ID NO: 3776217 - RNA, 22 nt, Human
cuggcacaguuuucugagaaag

SEQ ID NO: 3776218 - RNA, 16 nt, Human
cuggcacccggccccu

SEQ ID NO: 3776219 - RNA, 19 nt, Human
cuggcacugaauuaaucau

SEQ ID NO: 3776220 - RNA, 20 nt, Human
cuggcacugacugggcauag

SEQ ID NO: 3776221 - RNA, 16 nt, Human
cuggcacugcuuccag

SEQ ID NO: 3776222 - RNA, 17 nt, Human
cuggcacugcuuccagu

SEQ ID NO: 3776223 - RNA, 19 nt, Human
cuggcacugcuuccaguga

SEQ ID NO: 3776224 - RNA, 18 nt, Human
cuggcacuggaccccagc

SEQ ID NO: 3776225 - RNA, 21 nt, Human
cuggcacuuggagacuuguau

SEQ ID NO: 3776226 - RNA, 16 nt, Human
cuggcagaacugagcu

SEQ ID NO: 3776227 - RNA, 18 nt, Human
cuggcagaacugagcucc

SEQ ID NO: 3776228 - RNA, 13 nt, Human
cuggcagaaggga

SEQ ID NO: 3776229 - RNA, 17 nt, Human
cuggcagaagggagcag

SEQ ID NO: 3776230 - RNA, 21 nt, Human
cuggcagcaccgccucuuccc

SEQ ID NO: 3776231 - RNA, 22 nt, Human
cuggcagccacacuucucagga

SEQ ID NO: 3776232 - RNA, 12 nt, Human
cuggcagcccag

SEQ ID NO: 3776233 - RNA, 13 nt, Human
cuggcagccccug

SEQ ID NO: 3776234 - RNA, 17 nt, Human
cuggcagccgugccuuc

SEQ ID NO: 3776235 - RNA, 12 nt, Human
cuggcagccucc

SEQ ID NO: 3776236 - RNA, 22 nt, Human
cuggcagccucccauccagggc

SEQ ID NO: 3776237 - RNA, 12 nt, Human
cuggcagcucag

SEQ ID NO: 3776238 - RNA, 17 nt, Human
cuggcagcucagagagg

SEQ ID NO: 3776239 - RNA, 19 nt, Human
cuggcagcucagagagggu

SEQ ID NO: 3776240 - RNA, 17 nt, Human
cuggcagcucagcuucc

SEQ ID NO: 3776241 - RNA, 12 nt, Human
cuggcagcucuc

SEQ ID NO: 3776242 - RNA, 16 nt, Human
cuggcagcucuccagu

SEQ ID NO: 3776243 - RNA, 17 nt, Human
cuggcagcucuccaguc

SEQ ID NO: 3776244 - RNA, 21 nt, Human
cuggcagcucuggacagcccc

SEQ ID NO: 3776245 - RNA, 11 nt, Human
cuggcaggcag

SEQ ID NO: 3776246 - RNA, 16 nt, Human
cuggccucgccuggcc

SEQ ID NO: 3776247 - RNA, 17 nt, Human
cuggccucgccuggccu

SEQ ID NO: 3776248 - RNA, 20 nt, Human
cuggccucuaccacaagggc

SEQ ID NO: 3776249 - RNA, 16 nt, Human
cuggccucugcacucc

SEQ ID NO: 3776250 - RNA, 20 nt, Human
cuggccucugcacuccccug

SEQ ID NO: 3776251 - RNA, 11 nt, Human
cuggccucugu

SEQ ID NO: 3776252 - RNA, 12 nt, Human
cuggccugacuu

SEQ ID NO: 3776253 - RNA, 19 nt, Human
cuggccugagaggggaagc

SEQ ID NO: 3776254 - RNA, 15 nt, Human
cuggccugagcuggg

SEQ ID NO: 3776255 - RNA, 21 nt, Human
cuggccugaggagcagcaguu

SEQ ID NO: 3776256 - RNA, 16 nt, Human
cuggccuggcacacau

SEQ ID NO: 3776257 - RNA, 17 nt, Human
cuggccuggcacacauc

SEQ ID NO: 3776258 - RNA, 14 nt, Human
cuggccuggccagu

SEQ ID NO: 3776259 - RNA, 15 nt, Human
cuggccuggccagug

SEQ ID NO: 3776260 - RNA, 19 nt, Human
cuggccuggccagugcccu

SEQ ID NO: 3776261 - RNA, 24 nt, Human
cuggccuggccccucagggucccu

SEQ ID NO: 3776262 - RNA, 15 nt, Human
cuggccuggccggca

SEQ ID NO: 3776263 - RNA, 16 nt, Human
cuggccuuccugcccu

SEQ ID NO: 3776264 - RNA, 15 nt, Human
cuggccuucggccuc

SEQ ID NO: 3776265 - RNA, 16 nt, Human
cuggccuugggcccuc

SEQ ID NO: 3776266 - RNA, 15 nt, Human
cuggccuuguggucc

SEQ ID NO: 3776267 - RNA, 20 nt, Human
cuggccuugugguccaaaua

SEQ ID NO: 3776268 - RNA, 15 nt, Human
cuggccuuuccucuc

SEQ ID NO: 3776269 - RNA, 17 nt, Human
cuggccuuuuucauuua

SEQ ID NO: 3776270 - RNA, 20 nt, Human
cuggccuuuuucauuuaucu

SEQ ID NO: 3776271 - RNA, 20 nt, Human
cuggcgacaguuuuccuucu

SEQ ID NO: 3776272 - RNA, 15 nt, Human
cuggcgcagccaagg

SEQ ID NO: 3776273 - RNA, 19 nt, Human
cuggcgcagccaaggccga

SEQ ID NO: 3776274 - RNA, 14 nt, Human
cuggcgccucugca

SEQ ID NO: 3776275 - RNA, 15 nt, Human
cuggcgccucugcaa

SEQ ID NO: 3776276 - RNA, 15 nt, Human
cuggcggccccaacu

SEQ ID NO: 3776277 - RNA, 22 nt, Human
cuggcggccccaacucgggcuc

SEQ ID NO: 3776278 - RNA, 17 nt, Human
cuggcggcuacucagca

SEQ ID NO: 3776279 - RNA, 22 nt, Human
cuggcggcuacucagcagcccu

SEQ ID NO: 3776280 - RNA, 20 nt, Human
cuggcggcuggggucccagc

SEQ ID NO: 3776281 - RNA, 22 nt, Human
cuggcggcuggggucccagcag

SEQ ID NO: 3776282 - RNA, 18 nt, Human
cuggcgucaugcaaaguc

SEQ ID NO: 3776283 - RNA, 15 nt, Human
cuggcgucugucuuc

SEQ ID NO: 3776284 - RNA, 22 nt, Human
cuggcgucugucuucaagggcu

SEQ ID NO: 3776285 - RNA, 14 nt, Human
cuggcgugcagugg

SEQ ID NO: 3776286 - RNA, 18 nt, Human
cuggcguggauuaaacuu

SEQ ID NO: 3776287 - RNA, 19 nt, Human
cuggcguggauuaaacuua

SEQ ID NO: 3776288 - RNA, 16 nt, Human
cuggcuaacacgguga

SEQ ID NO: 3776289 - RNA, 21 nt, Human
cuggcuagaggccagccccac

SEQ ID NO: 3776290 - RNA, 16 nt, Human
cuggcuagaguccuca

SEQ ID NO: 3776291 - RNA, 21 nt, Human
cuggcuagaguccucacuccc

SEQ ID NO: 3776292 - RNA, 23 nt, Human
cuggcuauagaugucuuuuccca

SEQ ID NO: 3776293 - RNA, 22 nt, Human
cuggcucacaguacagcaugug

SEQ ID NO: 3776294 - RNA, 13 nt, Human
cuggcucacccag

SEQ ID NO: 3776295 - RNA, 21 nt, Human
cuggcucagccucaaaugcag

SEQ ID NO: 3776296 - RNA, 19 nt, Human
cuggcucauauuccugcag

SEQ ID NO: 3776297 - RNA, 11 nt, Human
cuggcuccagc

SEQ ID NO: 3776298 - RNA, 13 nt, Human
cuggcuccagcug

SEQ ID NO: 3776299 - RNA, 20 nt, Human
cuggcuccagcuggccggga

SEQ ID NO: 3776300 - RNA, 19 nt, Human
cuggcucccacaggcagcu

SEQ ID NO: 3776301 - RNA, 16 nt, Human
cuggcucccaggacac

SEQ ID NO: 3776302 - RNA, 15 nt, Human
cuggcucccagggcc

SEQ ID NO: 3776303 - RNA, 16 nt, Human
cuggcucccagggcca

SEQ ID NO: 3776304 - RNA, 18 nt, Human
cuggcucccagggccaug

SEQ ID NO: 3776305 - RNA, 14 nt, Human
cuggcuccccaaag

SEQ ID NO: 3776306 - RNA, 17 nt, Human
cuggcuccccugcagcc

SEQ ID NO: 3776307 - RNA, 21 nt, Human
cuggcucccucacucucagga

SEQ ID NO: 3776308 - RNA, 18 nt, Human
cuggcucccuccuccagg

SEQ ID NO: 3776309 - RNA, 12 nt, Human
cuggcucccucu

SEQ ID NO: 3776310 - RNA, 22 nt, Human
cuggcucccucuuggucuuccc

SEQ ID NO: 3776311 - RNA, 23 nt, Human
cuggcucccucuuggucuuccca

SEQ ID NO: 3776312 - RNA, 24 nt, Human
cuggcucccucuuggucuucccag

SEQ ID NO: 3776313 - RNA, 16 nt, Human
cuggcuccgcugugug

SEQ ID NO: 3776314 - RNA, 17 nt, Human
cuggcuccgcugugugg

SEQ ID NO: 3776315 - RNA, 16 nt, Human
cuggcuccucuguggu

SEQ ID NO: 3776316 - RNA, 14 nt, Human
cuggcuccugaggg

SEQ ID NO: 3776317 - RNA, 15 nt, Human
cuggcuccugagggg

SEQ ID NO: 3776318 - RNA, 16 nt, Human
cuggcuccugaggggc

SEQ ID NO: 3776319 - RNA, 17 nt, Human
cuggcuccuuuacaaaa

SEQ ID NO: 3776320 - RNA, 23 nt, Human
cuggcucuccaagugccagaggu

SEQ ID NO: 3776321 - RNA, 13 nt, Human
cuggcucuccugg

SEQ ID NO: 3776322 - RNA, 16 nt, Human
cuggcucucuccagga

SEQ ID NO: 3776323 - RNA, 13 nt, Human
cuggcucugagcg

SEQ ID NO: 3776324 - RNA, 24 nt, Human
cuggcucugagcgccuccauccaa

SEQ ID NO: 3776325 - RNA, 24 nt, Human
cuggcucugcaaugggcacuggga

SEQ ID NO: 3776326 - RNA, 13 nt, Human
cuggcucuguggc

SEQ ID NO: 3776327 - RNA, 23 nt, Human
cuggcucuguggcgagccauuug

SEQ ID NO: 3776328 - RNA, 21 nt, Human
cuggcucuuccaggcugggag

SEQ ID NO: 3776329 - RNA, 17 nt, Human
cuggcucuucugcccaa

SEQ ID NO: 3776330 - RNA, 23 nt, Human
cuggcucuugauaccccccucug

SEQ ID NO: 3776331 - RNA, 23 nt, Human
cuggcucuuucgucacccuugga

SEQ ID NO: 3776332 - RNA, 16 nt, Human
cuggcugaacccugug

SEQ ID NO: 3776333 - RNA, 20 nt, Human
cuggcugaacccugugcugg

SEQ ID NO: 3776334 - RNA, 14 nt, Human
cuggcugaaggacu

SEQ ID NO: 3776335 - RNA, 17 nt, Human
cuggcugaaggacugug

SEQ ID NO: 3776336 - RNA, 19 nt, Human
cuggcugaccccaaagagc

SEQ ID NO: 3776337 - RNA, 23 nt, Human
cuggcugaccccaaagagccugg

SEQ ID NO: 3776338 - RNA, 12 nt, Human
cuggcugagccc

SEQ ID NO: 3776339 - RNA, 14 nt, Human
cuggcugagcccug

SEQ ID NO: 3776340 - RNA, 17 nt, Human
cuggcugagccuggcug

SEQ ID NO: 3776341 - RNA, 18 nt, Human
cuggcugagccuggcugg

SEQ ID NO: 3776342 - RNA, 21 nt, Human
cuggcugaggauuucaagccu

SEQ ID NO: 3776343 - RNA, 23 nt, Human
cuggcugagggcaguucgcagcc

SEQ ID NO: 3776344 - RNA, 17 nt, Human
cuggcugagguuccucu

SEQ ID NO: 3776345 - RNA, 13 nt, Human
cuggcugcaguga

SEQ ID NO: 3776346 - RNA, 12 nt, Human
cuggcugcccag

SEQ ID NO: 3776347 - RNA, 18 nt, Human
cuggcugccccaaccugc

SEQ ID NO: 3776348 - RNA, 21 nt, Human
cuggcugccccaaccugcuga

SEQ ID NO: 3776349 - RNA, 13 nt, Human
cuggcugcccugg

SEQ ID NO: 3776350 - RNA, 17 nt, Human
cuggcugcccuggcccu

SEQ ID NO: 3776351 - RNA, 20 nt, Human
cuggcugcccuggcccugag

SEQ ID NO: 3776352 - RNA, 18 nt, Human
cuggcugccuccacuccc

SEQ ID NO: 3776353 - RNA, 21 nt, Human
cuggcugccuccacucccacu

SEQ ID NO: 3776354 - RNA, 22 nt, Human
cuggcugccuccacucccacuu

SEQ ID NO: 3776355 - RNA, 19 nt, Human
cuggcugccuuagaaccuu

SEQ ID NO: 3776356 - RNA, 18 nt, Human
cuggcugcggggcgggca

SEQ ID NO: 3776357 - RNA, 21 nt, Human
cuggcugcugaucgccuuccc

SEQ ID NO: 3776358 - RNA, 15 nt, Human
cuggcugcugccccc

SEQ ID NO: 3776359 - RNA, 17 nt, Human
cuggcugcugcccccac

SEQ ID NO: 3776360 - RNA, 14 nt, Human
cuggcugcuugccc

SEQ ID NO: 3776361 - RNA, 15 nt, Human
cuggcuggcugaggg

SEQ ID NO: 3776362 - RNA, 23 nt, Human
cuggcugggacguggcucagcca

SEQ ID NO: 3776363 - RNA, 14 nt, Human
cuggcugggcaugg

SEQ ID NO: 3776364 - RNA, 22 nt, Human
cuggcuggggccuaucagugug

SEQ ID NO: 3776365 - RNA, 23 nt, Human
cuggcuggggccuaucagugugc

SEQ ID NO: 3776366 - RNA, 24 nt, Human
cuggcuggggccuaucagugugcc

SEQ ID NO: 3776367 - RNA, 16 nt, Human
cuggcugggggccuca

SEQ ID NO: 3776368 - RNA, 19 nt, Human
cuggcugggggccucacuc

SEQ ID NO: 3776369 - RNA, 19 nt, Human
cuggcugggguggccugug

SEQ ID NO: 3776370 - RNA, 22 nt, Human
cuggcuggguggcaccagcagc

SEQ ID NO: 3776371 - RNA, 18 nt, Human
cuggcugguagagcaggu

SEQ ID NO: 3776372 - RNA, 16 nt, Human
cuggcugguguuaaca

SEQ ID NO: 3776373 - RNA, 18 nt, Human
cuggcuguacugcucagg

SEQ ID NO: 3776374 - RNA, 13 nt, Human
cuggcugugggcu

SEQ ID NO: 3776375 - RNA, 19 nt, Human
cuggcugugggcucccuuc

SEQ ID NO: 3776376 - RNA, 20 nt, Human
cuggcuguguucuggugagg

SEQ ID NO: 3776377 - RNA, 23 nt, Human
cuggcuguucugugguuccucug

SEQ ID NO: 3776378 - RNA, 16 nt, Human
cuggcuguuggcuggg

SEQ ID NO: 3776379 - RNA, 18 nt, Human
cuggcuguuggcuggggg

SEQ ID NO: 3776380 - RNA, 19 nt, Human
cuggcuguuggcugggggc

SEQ ID NO: 3776381 - RNA, 12 nt, Human
cuggcuuauuua

SEQ ID NO: 3776382 - RNA, 15 nt, Human
cuggcuuauuuuaau

SEQ ID NO: 3776383 - RNA, 16 nt, Human
cuggcuuauuuuaaug

SEQ ID NO: 3776384 - RNA, 21 nt, Human
cuggcuucaccaucaauccug

SEQ ID NO: 3776385 - RNA, 16 nt, Human
cuggcuuccagguauc

SEQ ID NO: 3776386 - RNA, 22 nt, Human
cuggcuuccagguaucuccagg

SEQ ID NO: 3776387 - RNA, 23 nt, Human
cuggcuuccagguaucuccagga

SEQ ID NO: 3776388 - RNA, 12 nt, Human
cuggcuucuccu

SEQ ID NO: 3776389 - RNA, 15 nt, Human
acugagugggaagcc

SEQ ID NO: 3776390 - RNA, 16 nt, Human
acugagugggaagccc

SEQ ID NO: 3776391 - RNA, 18 nt, Human
acugaguuuuccauggca

SEQ ID NO: 3776392 - RNA, 16 nt, Human
acugccuacugcaucg

SEQ ID NO: 3776393 - RNA, 15 nt, Human
acugccuagaaacaa

SEQ ID NO: 3776394 - RNA, 19 nt, Human
agcagccagcucucagcca

SEQ ID NO: 3776395 - RNA, 23 nt, Human
agcagccagcucucagccaacga

SEQ ID NO: 3776396 - RNA, 14 nt, Human
agcagccaggagag

SEQ ID NO: 3776397 - RNA, 19 nt, Human
agcagccaucauaggaagg

SEQ ID NO: 3776398 - RNA, 20 nt, Human
agcagccaucauaggaaggg

SEQ ID NO: 3776399 - RNA, 19 nt, Human
agcagcccaagcuucccuc

SEQ ID NO: 3776400 - RNA, 13 nt, Human
agcagcccacccu

SEQ ID NO: 3776401 - RNA, 14 nt, Human
agcagcccacccug

SEQ ID NO: 3776402 - RNA, 16 nt, Human
agcagcccacccugcu

SEQ ID NO: 3776403 - RNA, 17 nt, Human
agcagcccccagcuccc

SEQ ID NO: 3776404 - RNA, 19 nt, Human
agcagcccccagcucccac

SEQ ID NO: 3776405 - RNA, 20 nt, Human
agcagcccccagcucccacc

SEQ ID NO: 3776406 - RNA, 14 nt, Human
agcagcccuaagga

SEQ ID NO: 3776407 - RNA, 20 nt, Human
agcagcccucaauugugaaa

SEQ ID NO: 3776408 - RNA, 15 nt, Human
agcagcccuggaguc

SEQ ID NO: 3776409 - RNA, 17 nt, Human
agcagcccuggagucau

SEQ ID NO: 3776410 - RNA, 22 nt, Human
agcagcccuuggccagaaguca

SEQ ID NO: 3776411 - RNA, 23 nt, Human
agcagccucgccccuggcagaga

SEQ ID NO: 3776412 - RNA, 14 nt, Human
agcagccuggagcc

SEQ ID NO: 3776413 - RNA, 23 nt, Human
agcagccuggcucucccagccag

SEQ ID NO: 3776414 - RNA, 16 nt, Human
agcagccuuuaaugca

SEQ ID NO: 3776415 - RNA, 18 nt, Human
agcagccuuuaaugcauc

SEQ ID NO: 3776416 - RNA, 20 nt, Human
agcagcgaccaccccugccu

SEQ ID NO: 3776417 - RNA, 21 nt, Human
agcagcgaccaccccugccuc

SEQ ID NO: 3776418 - RNA, 22 nt, Human
agcagcgaccaccccugccucc

SEQ ID NO: 3776419 - RNA, 18 nt, Human
agcagcgaccgcccccuc

SEQ ID NO: 3776420 - RNA, 23 nt, Human
agcagcgaccgcccccuccucua

SEQ ID NO: 3776421 - RNA, 13 nt, Human
agcagcgagccug

SEQ ID NO: 3776422 - RNA, 14 nt, Human
agcagcgccuuucc

SEQ ID NO: 3776423 - RNA, 15 nt, Human
agcagcggacuucaa

SEQ ID NO: 3776424 - RNA, 15 nt, Human
agcagcgguggccuc

SEQ ID NO: 3776425 - RNA, 17 nt, Human
agcagcgguuuggggag

SEQ ID NO: 3776426 - RNA, 18 nt, Human
agcagcguuucuaugaca

SEQ ID NO: 3776427 - RNA, 20 nt, Human
agcagcuaaaccaaggacug

SEQ ID NO: 3776428 - RNA, 11 nt, Human
agcagcuacca

SEQ ID NO: 3776429 - RNA, 16 nt, Human
agcagcucaaaggcac

SEQ ID NO: 3776430 - RNA, 13 nt, Human
agcagcucaggca

SEQ ID NO: 3776431 - RNA, 21 nt, Human
agcagcuccuuccuagccuug

SEQ ID NO: 3776432 - RNA, 14 nt, Human
agcagcucuccccu

SEQ ID NO: 3776433 - RNA, 17 nt, Human
agcagcucuugcuaauc

SEQ ID NO: 3776434 - RNA, 14 nt, Human
agcagcugagcagg

SEQ ID NO: 3776435 - RNA, 18 nt, Human
agcagcuggacuacccac

SEQ ID NO: 3776436 - RNA, 16 nt, Human
agcagcuucaguuguu

SEQ ID NO: 3776437 - RNA, 17 nt, Human
agcagcuucaguuguuu

SEQ ID NO: 3776438 - RNA, 15 nt, Human
agcagcuucugccac

SEQ ID NO: 3776439 - RNA, 20 nt, Human
agcagcuucugccacuuccc

SEQ ID NO: 3776440 - RNA, 15 nt, Human
agcagcuugcugcac

SEQ ID NO: 3776441 - RNA, 17 nt, Human
agcagcuuuaaacaaau

SEQ ID NO: 3776442 - RNA, 21 nt, Human
agcagcuuuagaaucccagcc

SEQ ID NO: 3776443 - RNA, 17 nt, Human
agcagcuuuagcaaaga

SEQ ID NO: 3776444 - RNA, 22 nt, Human
agcaggaagcauucagagagca

SEQ ID NO: 3776445 - RNA, 14 nt, Human
agcaggaaggccug

SEQ ID NO: 3776446 - RNA, 16 nt, Human
agcaggaaggccuggg

SEQ ID NO: 3776447 - RNA, 20 nt, Human
agcaggacauggacaaggau

SEQ ID NO: 3776448 - RNA, 22 nt, Human
agcaggaccucccuuccgaccc

SEQ ID NO: 3776449 - RNA, 16 nt, Human
agcacugccugcuccc

SEQ ID NO: 3776450 - RNA, 21 nt, Human
agcacugccugcucccauccu

SEQ ID NO: 3776451 - RNA, 17 nt, Human
agcacugcuugaggaaa

SEQ ID NO: 3776452 - RNA, 17 nt, Human
agcacuggagugcaggg

SEQ ID NO: 3776453 - RNA, 20 nt, Human
agcacuggagugcagggagg

SEQ ID NO: 3776454 - RNA, 16 nt, Human
agcacugggcucccgg

SEQ ID NO: 3776455 - RNA, 19 nt, Human
agcacuggguugcagggga

SEQ ID NO: 3776456 - RNA, 12 nt, Human
agcacuguauac

SEQ ID NO: 3776457 - RNA, 12 nt, Human
agcacugucccu

SEQ ID NO: 3776458 - RNA, 23 nt, Human
agcacugugcuaauaacagugca

SEQ ID NO: 3776459 - RNA, 15 nt, Human
agcacuguugagaag

SEQ ID NO: 3776460 - RNA, 17 nt, Human
agcacuguugauguauc

SEQ ID NO: 3776461 - RNA, 18 nt, Human
agcacuguuuucuagugu

SEQ ID NO: 3776462 - RNA, 14 nt, Human
agcacuguuuuucc

SEQ ID NO: 3776463 - RNA, 16 nt, Human
agcacuguuuuuccau

SEQ ID NO: 3776464 - RNA, 23 nt, Human
agcacuguuuuuccauaguuuug

SEQ ID NO: 3776465 - RNA, 18 nt, Human
agcacuuaaauuccucaa

SEQ ID NO: 3776466 - RNA, 12 nt, Human
agcacuuaagag

SEQ ID NO: 3776467 - RNA, 15 nt, Human
agcacuuauuuaaug

SEQ ID NO: 3776468 - RNA, 15 nt, Human
agcacuucaggaggc

SEQ ID NO: 3776469 - RNA, 19 nt, Human
agcacuucagggcagauuu

SEQ ID NO: 3776470 - RNA, 23 nt, Human
agcacuucaucuggcugccuuug

SEQ ID NO: 3776471 - RNA, 12 nt, Human
agcacuuccaaa

SEQ ID NO: 3776472 - RNA, 18 nt, Human
agcacuuccuugccaguc

SEQ ID NO: 3776473 - RNA, 17 nt, Human
agcacuucuaaguugag

SEQ ID NO: 3776474 - RNA, 20 nt, Human
agcacuucuaaguugaguau

SEQ ID NO: 3776475 - RNA, 22 nt, Human
agcacuugcaaccgucuguuau

SEQ ID NO: 3776476 - RNA, 13 nt, Human
agcacuuggacuc

SEQ ID NO: 3776477 - RNA, 14 nt, Human
agcacuuggagcca

SEQ ID NO: 3776478 - RNA, 17 nt, Human
agcacuuggagccaagg

SEQ ID NO: 3776479 - RNA, 23 nt, Human
agcacuuggagccaaggguucag

SEQ ID NO: 3776480 - RNA, 22 nt, Human
agcacuuggggguucaggcccg

SEQ ID NO: 3776481 - RNA, 12 nt, Human
agcacuuguaua

SEQ ID NO: 3776482 - RNA, 13 nt, Human
agcacuuguauau

SEQ ID NO: 3776483 - RNA, 21 nt, Human
agcacuuguggguuuuuguuu

SEQ ID NO: 3776484 - RNA, 19 nt, Human
agccuguguaacagcuccu

SEQ ID NO: 3776485 - RNA, 21 nt, Human
agccuguguaacagcuccuug

SEQ ID NO: 3776486 - RNA, 17 nt, Human
agccuguuccccucacu

SEQ ID NO: 3776487 - RNA, 22 nt, Human
agccuguuggacccgcucugga

SEQ ID NO: 3776488 - RNA, 16 nt, Human
agccuguuguuuaagu

SEQ ID NO: 3776489 - RNA, 14 nt, Human
agccuuaccacgca

SEQ ID NO: 3776490 - RNA, 15 nt, Human
agccuuaucaagugu

SEQ ID NO: 3776491 - RNA, 20 nt, Human
agccuucaaaacuauagcuu

SEQ ID NO: 3776492 - RNA, 21 nt, Human
agccuucaaaacuauagcuug

SEQ ID NO: 3776493 - RNA, 22 nt, Human
agccuucaaaacuauagcuugc

SEQ ID NO: 3776494 - RNA, 13 nt, Human
agccuucaagcuc

SEQ ID NO: 3776495 - RNA, 17 nt, Human
agccuucaagcucugag

SEQ ID NO: 3776496 - RNA, 18 nt, Human
agccuucaagcucugagg

SEQ ID NO: 3776497 - RNA, 19 nt, Human
agccuucaagcucugaggg

SEQ ID NO: 3776498 - RNA, 23 nt, Human
agccuucaagcucugagggaaag

SEQ ID NO: 3776499 - RNA, 14 nt, Human
agccuucagcucca

SEQ ID NO: 3776500 - RNA, 13 nt, Human
agccuuccaccca

SEQ ID NO: 3776501 - RNA, 20 nt, Human
agccuuccccuaccccuugu

SEQ ID NO: 3776502 - RNA, 12 nt, Human
agccuuccucca

SEQ ID NO: 3776503 - RNA, 21 nt, Human
agccuuccucugcagcugacc

SEQ ID NO: 3776504 - RNA, 23 nt, Human
agccuuccucugcagcugaccuc

SEQ ID NO: 3776505 - RNA, 12 nt, Human
agccuucucccu

SEQ ID NO: 3776506 - RNA, 16 nt, Human
agccuucucccuagcu

SEQ ID NO: 3776507 - RNA, 15 nt, Human
agccuucuguaggaa

SEQ ID NO: 3776508 - RNA, 19 nt, Human
agccuucuuugcuugccuc

SEQ ID NO: 3776509 - RNA, 13 nt, Human
agcuaagaaccug

SEQ ID NO: 3776510 - RNA, 19 nt, Human
agcuaaggacauuucccag

SEQ ID NO: 3776511 - RNA, 18 nt, Human
agcuaaggcucuaugagu

SEQ ID NO: 3776512 - RNA, 20 nt, Human
agcuaaggcucuaugagucu

SEQ ID NO: 3776513 - RNA, 19 nt, Human
agcuaagggaagacauuuc

SEQ ID NO: 3776514 - RNA, 18 nt, Human
agcuaagggguggggcug

SEQ ID NO: 3776515 - RNA, 19 nt, Human
agcuaagggguggggcugc

SEQ ID NO: 3776516 - RNA, 20 nt, Human
agcuaagggugggugcucag

SEQ ID NO: 3776517 - RNA, 23 nt, Human
agcuaagggugggugcucagaau

SEQ ID NO: 3776518 - RNA, 19 nt, Human
agcuaauaaaaagcuuuug

SEQ ID NO: 3776519 - RNA, 14 nt, Human
agcuaauaaaauau

SEQ ID NO: 3776520 - RNA, 15 nt, Human
agcuaauaaaauauc

SEQ ID NO: 3776521 - RNA, 16 nt, Human
agcuaaucagcauucu

SEQ ID NO: 3776522 - RNA, 20 nt, Human
agcuaaucuguagggcugga

SEQ ID NO: 3776523 - RNA, 12 nt, Human
agcuacaaaugc

SEQ ID NO: 3776524 - RNA, 15 nt, Human
agcuacaacagccuc

SEQ ID NO: 3776525 - RNA, 17 nt, Human
agcuacaacuaauaaca

SEQ ID NO: 3776526 - RNA, 21 nt, Human
agcuacaccuuucuccuuugu

SEQ ID NO: 3776527 - RNA, 14 nt, Human
agcuacagagaaac

SEQ ID NO: 3776528 - RNA, 18 nt, Human
agcuacagagaaaccagc

SEQ ID NO: 3776529 - RNA, 22 nt, Human
agcuacagagaaaccagcuucc

SEQ ID NO: 3776530 - RNA, 20 nt, Human
agcuacagcuuucuugcucc

SEQ ID NO: 3776531 - RNA, 22 nt, Human
agcuacaggaagcaccccaugc

SEQ ID NO: 3776532 - RNA, 19 nt, Human
agcuacagguuacaacaga

SEQ ID NO: 3776533 - RNA, 21 nt, Human
agcuacagguuacaacagauu

SEQ ID NO: 3776534 - RNA, 16 nt, Human
agcuacccaaaagaga

SEQ ID NO: 3776535 - RNA, 19 nt, Human
agcuacccaaaagagaaaa

SEQ ID NO: 3776536 - RNA, 20 nt, Human
agcuacccaaaagagaaaaa

SEQ ID NO: 3776537 - RNA, 15 nt, Human
agcuacccuguguau

SEQ ID NO: 3776538 - RNA, 21 nt, Human
agcuacccuuuuucuccagcu

SEQ ID NO: 3776539 - RNA, 23 nt, Human
agcuaccucaaccaaugccaaaa

SEQ ID NO: 3776540 - RNA, 22 nt, Human
agcuaccugcucagcccugcac

SEQ ID NO: 3776541 - RNA, 18 nt, Human
agcuaccuguguggacag

SEQ ID NO: 3776542 - RNA, 22 nt, Human
agcuacguggcacuauauucug

SEQ ID NO: 3776543 - RNA, 13 nt, Human
agcuacuaaugau

SEQ ID NO: 3776544 - RNA, 18 nt, Human
agcuacuaaugauguuuu

SEQ ID NO: 3776545 - RNA, 17 nt, Human
agcuacuagcaaaauaa

SEQ ID NO: 3776546 - RNA, 22 nt, Human
agcuacucaagaggcugaggca

SEQ ID NO: 3776547 - RNA, 18 nt, Human
agcuacucagaagccuga

SEQ ID NO: 3776548 - RNA, 13 nt, Human
agcuacucaggag

SEQ ID NO: 3776549 - RNA, 17 nt, Human
agcuacucaggaggcug

SEQ ID NO: 3776550 - RNA, 19 nt, Human
agcuacucgggaggcugag

SEQ ID NO: 3776551 - RNA, 22 nt, Human
agcuacucgggaggcugaggca

SEQ ID NO: 3776552 - RNA, 16 nt, Human
agcuacugauuuuugu

SEQ ID NO: 3776553 - RNA, 12 nt, Human
agcuacugccau

SEQ ID NO: 3776554 - RNA, 18 nt, Human
agcuacugcggaaaagga

SEQ ID NO: 3776555 - RNA, 15 nt, Human
agcuacuuaagagaa

SEQ ID NO: 3776556 - RNA, 19 nt, Human
agcuacuuaagagaaaugg

SEQ ID NO: 3776557 - RNA, 15 nt, Human
agcuacuuccuccuc

SEQ ID NO: 3776558 - RNA, 16 nt, Human
agcuacuugggaggcu

SEQ ID NO: 3776559 - RNA, 14 nt, Human
agcuacuugggcca

SEQ ID NO: 3776560 - RNA, 15 nt, Human
agcuacuugggccau

SEQ ID NO: 3776561 - RNA, 22 nt, Human
agcuacuugggccauagcuccu

SEQ ID NO: 3776562 - RNA, 17 nt, Human
agcuacuugguuugugu

SEQ ID NO: 3776563 - RNA, 21 nt, Human
agcuacuugguuuguguucuu

SEQ ID NO: 3776564 - RNA, 16 nt, Human
agcuagaacccucugu

SEQ ID NO: 3776565 - RNA, 17 nt, Human
agcuagaacccucuguu

SEQ ID NO: 3776566 - RNA, 14 nt, Human
agcuagaaggccac

SEQ ID NO: 3776567 - RNA, 24 nt, Human
agcuagaagugggccaggacaggc

SEQ ID NO: 3776568 - RNA, 14 nt, Human
agcuagaauugagu

SEQ ID NO: 3776569 - RNA, 16 nt, Human
agcuagacacaugaag

SEQ ID NO: 3776570 - RNA, 17 nt, Human
agcuagacacaugaagg

SEQ ID NO: 3776571 - RNA, 14 nt, Human
agcuagacugguga

SEQ ID NO: 3776572 - RNA, 21 nt, Human
agcuagacuggugacugauuc

SEQ ID NO: 3776573 - RNA, 14 nt, Human
agcuagagcuucaa

SEQ ID NO: 3776574 - RNA, 12 nt, Human
agcuagaggaac

SEQ ID NO: 3776575 - RNA, 19 nt, Human
agcuagcaaaagaaguaac

SEQ ID NO: 3776576 - RNA, 17 nt, Human
agcuagcuccccuccuc

SEQ ID NO: 3776577 - RNA, 15 nt, Human
agcuaggaacaaauc

SEQ ID NO: 3776578 - RNA, 23 nt, Human
agcuaggaacaaaucuuccuggu

SEQ ID NO: 3776579 - RNA, 18 nt, Human
agcuaggaauuguguuua

SEQ ID NO: 3776580 - RNA, 12 nt, Human
agcuaggccugg

SEQ ID NO: 3776581 - RNA, 21 nt, Human
agcuaggccuggccagaugca

SEQ ID NO: 3776582 - RNA, 19 nt, Human
agcuaguaauauauucuga

SEQ ID NO: 3776583 - RNA, 14 nt, Human
agcuagucaacagu

SEQ ID NO: 3776584 - RNA, 17 nt, Human
agcuagugacccacaug

SEQ ID NO: 3776585 - RNA, 20 nt, Human
agucccagcuacuugggagg

SEQ ID NO: 3776586 - RNA, 20 nt, Human
agucccaggagcugcccaga

SEQ ID NO: 3776587 - RNA, 15 nt, Human
aguccccaccccugc

SEQ ID NO: 3776588 - RNA, 17 nt, Human
aguccccaccccugccc

SEQ ID NO: 3776589 - RNA, 21 nt, Human
aguccccaggccccaggaagc

SEQ ID NO: 3776590 - RNA, 15 nt, Human
agucccccaacccca

SEQ ID NO: 3776591 - RNA, 22 nt, Human
agucccccuauccuuggcacca

SEQ ID NO: 3776592 - RNA, 16 nt, Human
agucccccugccccag

SEQ ID NO: 3776593 - RNA, 19 nt, Human
aguccccgggcaucuuugg

SEQ ID NO: 3776594 - RNA, 16 nt, Human
aguccccgucugccug

SEQ ID NO: 3776595 - RNA, 15 nt, Human
aguccccgugccccg

SEQ ID NO: 3776596 - RNA, 23 nt, Human
aguccccgugccccgccuccccg

SEQ ID NO: 3776597 - RNA, 22 nt, Human
aguccccguggccaucccugug

SEQ ID NO: 3776598 - RNA, 16 nt, Human
aguccccucccaucug

SEQ ID NO: 3776599 - RNA, 18 nt, Human
aguccccucccaucuggg

SEQ ID NO: 3776600 - RNA, 19 nt, Human
aguccccuccccggcccua

SEQ ID NO: 3776601 - RNA, 19 nt, Human
aguccccuguuuguuucug

SEQ ID NO: 3776602 - RNA, 23 nt, Human
aguccccuguuuguuucugaaag

SEQ ID NO: 3776603 - RNA, 13 nt, Human
agucccgucagga

SEQ ID NO: 3776604 - RNA, 15 nt, Human
agucccgucaggacg

SEQ ID NO: 3776605 - RNA, 15 nt, Human
agucccuauguauuu

SEQ ID NO: 3776606 - RNA, 20 nt, Human
agucccuauguauuugcagu

SEQ ID NO: 3776607 - RNA, 21 nt, Human
agucccucaagccaccagaug

SEQ ID NO: 3776608 - RNA, 23 nt, Human
agucccugaggcagguccccaga

SEQ ID NO: 3776609 - RNA, 13 nt, Human
agucccugccaau

SEQ ID NO: 3776610 - RNA, 21 nt, Human
agucccugccacgaauuucug

SEQ ID NO: 3776611 - RNA, 13 nt, Human
agucccugccugg

SEQ ID NO: 3776612 - RNA, 15 nt, Human
agucccugccuggac

SEQ ID NO: 3776613 - RNA, 23 nt, Human
agucccugccuggaccagccucu

SEQ ID NO: 3776614 - RNA, 16 nt, Human
agucccuguaauuguu

SEQ ID NO: 3776615 - RNA, 20 nt, Human
agucccuguaauuguuguuu

SEQ ID NO: 3776616 - RNA, 16 nt, Human
agucccugucaccucu

SEQ ID NO: 3776617 - RNA, 20 nt, Human
agucccuguuuucugagccc

SEQ ID NO: 3776618 - RNA, 21 nt, Human
agucccuguuuucugagcccg

SEQ ID NO: 3776619 - RNA, 22 nt, Human
agucccuuccccucccuggcuc

SEQ ID NO: 3776620 - RNA, 23 nt, Human
agucccuuccccucccuggcucc

SEQ ID NO: 3776621 - RNA, 23 nt, Human
aguccgaaagggacuuggaagcu

SEQ ID NO: 3776622 - RNA, 21 nt, Human
aguccggccccaguacacagg

SEQ ID NO: 3776623 - RNA, 15 nt, Human
aguccgucaaaacag

SEQ ID NO: 3776624 - RNA, 21 nt, Human
aguccgugcugacagcugcuc

SEQ ID NO: 3776625 - RNA, 23 nt, Human
aguccgugcugacagcugcuccu

SEQ ID NO: 3776626 - RNA, 22 nt, Human
aguccguguggauccaauguua

SEQ ID NO: 3776627 - RNA, 20 nt, Human
aguccuacaagcuaaaauua

SEQ ID NO: 3776628 - RNA, 19 nt, Human
aguccuagaauguuucauu

SEQ ID NO: 3776629 - RNA, 21 nt, Human
aguccuagcugcacagggcag

SEQ ID NO: 3776630 - RNA, 16 nt, Human
aguccuaucugggcuu

SEQ ID NO: 3776631 - RNA, 20 nt, Human
aguccuaucugggcuuccug

SEQ ID NO: 3776632 - RNA, 17 nt, Human
aguccucaaagcuuuuu

SEQ ID NO: 3776633 - RNA, 20 nt, Human
aguccucaaagcuuuuugaa

SEQ ID NO: 3776634 - RNA, 16 nt, Human
aguccucacucccagu

SEQ ID NO: 3776635 - RNA, 14 nt, Human
aguccuccagaacu

SEQ ID NO: 3776636 - RNA, 19 nt, Human
aguccuccagaacucuucc

SEQ ID NO: 3776637 - RNA, 13 nt, Human
aguccuccccuca

SEQ ID NO: 3776638 - RNA, 15 nt, Human
aguccuccccucaca

SEQ ID NO: 3776639 - RNA, 16 nt, Human
aguccuccccucacag

SEQ ID NO: 3776640 - RNA, 22 nt, Human
aguccuccccucacagccucug

SEQ ID NO: 3776641 - RNA, 13 nt, Human
aguccucuccacc

SEQ ID NO: 3776642 - RNA, 14 nt, Human
aguccucugaauga

SEQ ID NO: 3776643 - RNA, 19 nt, Human
aguccucuuuucugagagg

SEQ ID NO: 3776644 - RNA, 22 nt, Human
aguccucuuuucugagaggacu

SEQ ID NO: 3776645 - RNA, 20 nt, Human
aguccugcacaguuuucugg

SEQ ID NO: 3776646 - RNA, 16 nt, Human
aguccugccuggccag

SEQ ID NO: 3776647 - RNA, 20 nt, Human
aguccugccuggccaggcag

SEQ ID NO: 3776648 - RNA, 21 nt, Human
aguccugccuggccaggcaga

SEQ ID NO: 3776649 - RNA, 22 nt, Human
aguccugcgaaaacccccaaac

SEQ ID NO: 3776650 - RNA, 24 nt, Human
aguccugcuaccucccuugccuuu

SEQ ID NO: 3776651 - RNA, 15 nt, Human
aguccugcuccagaa

SEQ ID NO: 3776652 - RNA, 18 nt, Human
aguccugcuccagaauuu

SEQ ID NO: 3776653 - RNA, 20 nt, Human
aguccugcucucuacccagc

SEQ ID NO: 3776654 - RNA, 20 nt, Human
aguccuggaagccagcuuuc

SEQ ID NO: 3776655 - RNA, 19 nt, Human
aguccuggaugauacuaau

SEQ ID NO: 3776656 - RNA, 18 nt, Human
aguccuggauguugugug

SEQ ID NO: 3776657 - RNA, 14 nt, Human
aguccuggccuggc

SEQ ID NO: 3776658 - RNA, 20 nt, Human
aguccuggccuggcuucucc

SEQ ID NO: 3776659 - RNA, 22 nt, Human
aguccugggagaaccucaggcu

SEQ ID NO: 3776660 - RNA, 15 nt, Human
aguccugggaugugg

SEQ ID NO: 3776661 - RNA, 13 nt, Human
aguccugugaaug

SEQ ID NO: 3776662 - RNA, 22 nt, Human
aguccugugaaugccacugccu

SEQ ID NO: 3776663 - RNA, 14 nt, Human
aguccugugaauuu

SEQ ID NO: 3776664 - RNA, 23 nt, Human
aguccugugaauuucuucacugu

SEQ ID NO: 3776665 - RNA, 21 nt, Human
aguccuuaaaaaucacacugu

SEQ ID NO: 3776666 - RNA, 23 nt, Human
aguccuuauguuaagcccuggca

SEQ ID NO: 3776667 - RNA, 16 nt, Human
aguccuucaccucacu

SEQ ID NO: 3776668 - RNA, 17 nt, Human
aguccuucaccucacug

SEQ ID NO: 3776669 - RNA, 23 nt, Human
aguccuugauuucaaaguuuugu

SEQ ID NO: 3776670 - RNA, 12 nt, Human
aguccuuuugua

SEQ ID NO: 3776671 - RNA, 14 nt, Human
aguccuuuuguaaa

SEQ ID NO: 3776672 - RNA, 16 nt, Human
aguccuuuuuuuccau

SEQ ID NO: 3776673 - RNA, 17 nt, Human
agucgcgcugccugugu

SEQ ID NO: 3776674 - RNA, 13 nt, Human
agucgcugaggaa

SEQ ID NO: 3776675 - RNA, 17 nt, Human
agucgggggcuggccua

SEQ ID NO: 3776676 - RNA, 21 nt, Human
agucgggggcuggccuaggag

SEQ ID NO: 3776677 - RNA, 14 nt, Human
agucgguccucuuu

SEQ ID NO: 3776678 - RNA, 19 nt, Human
agucguccuuacuccugug

SEQ ID NO: 3776679 - RNA, 14 nt, Human
agucgugccugugu

SEQ ID NO: 3776680 - RNA, 17 nt, Human
agucguggggugugcug

SEQ ID NO: 3776681 - RNA, 20 nt, Human
agucguggggugugcuggga

SEQ ID NO: 3776682 - RNA, 20 nt, Human
agucuaaagcugguuuaaug

SEQ ID NO: 3776683 - RNA, 17 nt, Human
agucuaaaguuuacagu

SEQ ID NO: 3776684 - RNA, 18 nt, Human
agucuaaggccauggcau

SEQ ID NO: 3776685 - RNA, 13 nt, Human
agucuaauuuuua

SEQ ID NO: 3776686 - RNA, 17 nt, Human
agucuaauuuuuauuca

SEQ ID NO: 3776687 - RNA, 14 nt, Human
agucuacagaguga

SEQ ID NO: 3776688 - RNA, 21 nt, Human
agucuaccaaccuguucaagu

SEQ ID NO: 3776689 - RNA, 14 nt, Human
agucuacccagaga

SEQ ID NO: 3776690 - RNA, 17 nt, Human
agucuacccgacauaag

SEQ ID NO: 3776691 - RNA, 15 nt, Human
agucuacgcucuccu

SEQ ID NO: 3776692 - RNA, 19 nt, Human
agucuacucuuaagccauc

SEQ ID NO: 3776693 - RNA, 18 nt, Human
agucuagauggcuccucu

SEQ ID NO: 3776694 - RNA, 19 nt, Human
agucuagauggcuccucuc

SEQ ID NO: 3776695 - RNA, 14 nt, Human
agucuagauucaaa

SEQ ID NO: 3776696 - RNA, 21 nt, Human
agucuagcguagugcagcagg

SEQ ID NO: 3776697 - RNA, 16 nt, Human
agucuaggagcuggga

SEQ ID NO: 3776698 - RNA, 22 nt, Human
agucuaggagcugggaggaaaa

SEQ ID NO: 3776699 - RNA, 20 nt, Human
agucuagguugguagaguuu

SEQ ID NO: 3776700 - RNA, 15 nt, Human
agucuaguguaguau

SEQ ID NO: 3776701 - RNA, 23 nt, Human
agucuauaugacuucagaaaugu

SEQ ID NO: 3776702 - RNA, 22 nt, Human
agucuaucaaccccagacacug

SEQ ID NO: 3776703 - RNA, 15 nt, Human
agucuauccacagag

SEQ ID NO: 3776704 - RNA, 18 nt, Human
agucuaucuaaugacaug

SEQ ID NO: 3776705 - RNA, 11 nt, Human
agucuauggcc

SEQ ID NO: 3776706 - RNA, 17 nt, Human
agucucaaaaauacaaa

SEQ ID NO: 3776707 - RNA, 19 nt, Human
agucucaaaaauacaaaau

SEQ ID NO: 3776708 - RNA, 20 nt, Human
agucucaaaaauacaaaaua

SEQ ID NO: 3776709 - RNA, 21 nt, Human
agucucaaaaauacaaaauaa

SEQ ID NO: 3776710 - RNA, 16 nt, Human
agucucaaugaaauag

SEQ ID NO: 3776711 - RNA, 21 nt, Human
agucucacaugauuccagcca

SEQ ID NO: 3776712 - RNA, 23 nt, Human
agucucacaugauuccagccauc

SEQ ID NO: 3776713 - RNA, 13 nt, Human
agucucaggaaau

SEQ ID NO: 3776714 - RNA, 21 nt, Human
agucucagugcuagcuuauuu

SEQ ID NO: 3776715 - RNA, 21 nt, Human
agucucaugccuugagaucug

SEQ ID NO: 3776716 - RNA, 19 nt, Human
agucuccaaagucucugga

SEQ ID NO: 3776717 - RNA, 18 nt, Human
agucuccagcccacguuc

SEQ ID NO: 3776718 - RNA, 13 nt, Human
agucucccaaggc

SEQ ID NO: 3776719 - RNA, 14 nt, Human
agucucccagggag

SEQ ID NO: 3776720 - RNA, 15 nt, Human
agucucccagggagc

SEQ ID NO: 3776721 - RNA, 23 nt, Human
agucucccccacccuuguuccag

SEQ ID NO: 3776722 - RNA, 14 nt, Human
agucucccucccuu

SEQ ID NO: 3776723 - RNA, 12 nt, Human
agucucccuucu

SEQ ID NO: 3776724 - RNA, 14 nt, Human
agucucccuucucc

SEQ ID NO: 3776725 - RNA, 17 nt, Human
agucucccuucucccau

SEQ ID NO: 3776726 - RNA, 22 nt, Human
agucuccggccucuccagccuc

SEQ ID NO: 3776727 - RNA, 14 nt, Human
agucuccucuuuaa

SEQ ID NO: 3776728 - RNA, 20 nt, Human
agugaagacagaaccacagg

SEQ ID NO: 3776729 - RNA, 20 nt, Human
agugaagaggggcagcccuu

SEQ ID NO: 3776730 - RNA, 15 nt, Human
agugaagguuuacaa

SEQ ID NO: 3776731 - RNA, 21 nt, Human
agugaagucaugaccuccagg

SEQ ID NO: 3776732 - RNA, 15 nt, Human
agugaauaaacuuca

SEQ ID NO: 3776733 - RNA, 18 nt, Human
agugaauaaacuucagca

SEQ ID NO: 3776734 - RNA, 19 nt, Human
agugaauaaacuucagcac

SEQ ID NO: 3776735 - RNA, 20 nt, Human
agugaauaaacuucagcacc

SEQ ID NO: 3776736 - RNA, 21 nt, Human
agugaauaaacuucagcacca

SEQ ID NO: 3776737 - RNA, 18 nt, Human
agugaauaacugcaaagu

SEQ ID NO: 3776738 - RNA, 12 nt, Human
agugaauauuca

SEQ ID NO: 3776739 - RNA, 23 nt, Human
agugaaucuaaaagcuuuugcuu

SEQ ID NO: 3776740 - RNA, 13 nt, Human
agugaaugaaaga

SEQ ID NO: 3776741 - RNA, 16 nt, Human
agugaaugauucagug

SEQ ID NO: 3776742 - RNA, 14 nt, Human
agugaauucccuca

SEQ ID NO: 3776743 - RNA, 12 nt, Human
agugaauugaag

SEQ ID NO: 3776744 - RNA, 13 nt, Human
agugaauuugaau

SEQ ID NO: 3776745 - RNA, 20 nt, Human
agugaauuugaaugaaaaau

SEQ ID NO: 3776746 - RNA, 16 nt, Human
agugaauuugcacugu

SEQ ID NO: 3776747 - RNA, 15 nt, Human
agugaauuuuucucu

SEQ ID NO: 3776748 - RNA, 20 nt, Human
agugaauuuuucucuaacuc

SEQ ID NO: 3776749 - RNA, 18 nt, Human
agugaauuuuugcaauaa

SEQ ID NO: 3776750 - RNA, 23 nt, Human
agugaauuuuugcaauaaugcag

SEQ ID NO: 3776751 - RNA, 24 nt, Human
agugaauuuuugcaauaaugcagu

SEQ ID NO: 3776752 - RNA, 14 nt, Human
agugacaaaauaga

SEQ ID NO: 3776753 - RNA, 14 nt, Human
agugacaaggcccc

SEQ ID NO: 3776754 - RNA, 16 nt, Human
agugacaaggccccag

SEQ ID NO: 3776755 - RNA, 18 nt, Human
agugacaaggccccagag

SEQ ID NO: 3776756 - RNA, 13 nt, Human
agugacagaguaa

SEQ ID NO: 3776757 - RNA, 19 nt, Human
agugacagaguucacuaua

SEQ ID NO: 3776758 - RNA, 13 nt, Human
agugacagggaag

SEQ ID NO: 3776759 - RNA, 20 nt, Human
agugacagggaagcuacagg

SEQ ID NO: 3776760 - RNA, 15 nt, Human
agugacaguauuuug

SEQ ID NO: 3776761 - RNA, 19 nt, Human
agugacaguggauugcauu

SEQ ID NO: 3776762 - RNA, 17 nt, Human
agugacccacaugccau

SEQ ID NO: 3776763 - RNA, 15 nt, Human
agugacccggaggcc

SEQ ID NO: 3776764 - RNA, 16 nt, Human
agugacccggaggcca

SEQ ID NO: 3776765 - RNA, 17 nt, Human
agugacccggaggccac

SEQ ID NO: 3776766 - RNA, 23 nt, Human
agugacccggaggccacaugagu

SEQ ID NO: 3776767 - RNA, 17 nt, Human
agugacccugcucucac

SEQ ID NO: 3776768 - RNA, 18 nt, Human
agugaccugaggaagcgu

SEQ ID NO: 3776769 - RNA, 17 nt, Human
agugacuaaaccauugu

SEQ ID NO: 3776770 - RNA, 18 nt, Human
agugacuaguacaaauua

SEQ ID NO: 3776771 - RNA, 23 nt, Human
agugacucauccucuugaagaug

SEQ ID NO: 3776772 - RNA, 16 nt, Human
agugacuccaagaaca

SEQ ID NO: 3776773 - RNA, 13 nt, Human
agugacuccagga

SEQ ID NO: 3776774 - RNA, 17 nt, Human
agugacuccaggagagg

SEQ ID NO: 3776775 - RNA, 20 nt, Human
agugacucgggcuccugugc

SEQ ID NO: 3776776 - RNA, 22 nt, Human
agugacucgggcuccugugccc

SEQ ID NO: 3776777 - RNA, 17 nt, Human
agugacuguaucugugu

SEQ ID NO: 3776778 - RNA, 17 nt, Human
agugacuguucaagagc

SEQ ID NO: 3776779 - RNA, 14 nt, Human
agugacuugcccag

SEQ ID NO: 3776780 - RNA, 16 nt, Human
agugacuuguguccca

SEQ ID NO: 3776781 - RNA, 18 nt, Human
agugacuuuggcugcaug

SEQ ID NO: 3776782 - RNA, 18 nt, Human
agugagaaaaagcuccug

SEQ ID NO: 3776783 - RNA, 20 nt, Human
agugagaaaaagcuccuguc

SEQ ID NO: 3776784 - RNA, 22 nt, Human
agugagaaaaagcuccuguccu

SEQ ID NO: 3776785 - RNA, 23 nt, Human
agugagaagaauauuguuccuaa

SEQ ID NO: 3776786 - RNA, 12 nt, Human
agugagacagaa

SEQ ID NO: 3776787 - RNA, 21 nt, Human
agugagacaguccagccugga

SEQ ID NO: 3776788 - RNA, 16 nt, Human
agugagacccugucuc

SEQ ID NO: 3776789 - RNA, 17 nt, Human
agugagacccugucuca

SEQ ID NO: 3776790 - RNA, 14 nt, Human
agugagagggcaug

SEQ ID NO: 3776791 - RNA, 22 nt, Human
agugagagggcaugcgcacaag

SEQ ID NO: 3776792 - RNA, 12 nt, Human
agugagcaugcu

SEQ ID NO: 3776793 - RNA, 22 nt, Human
agugagcauggaacacuucgag

SEQ ID NO: 3776794 - RNA, 15 nt, Human
agugagccacuccgg

SEQ ID NO: 3776795 - RNA, 11 nt, Human
agugagccuga

SEQ ID NO: 3776796 - RNA, 14 nt, Human
agugagccuggcuc

SEQ ID NO: 3776797 - RNA, 12 nt, Human
agugagcugguu

SEQ ID NO: 3776798 - RNA, 23 nt, Human
agugagcugguuuuuagcggaga

SEQ ID NO: 3776799 - RNA, 21 nt, Human
agugagcuuggaaaggaccag

SEQ ID NO: 3776800 - RNA, 14 nt, Human
agugaggaaggcag

SEQ ID NO: 3776801 - RNA, 14 nt, Human
agugaggagaauga

SEQ ID NO: 3776802 - RNA, 16 nt, Human
agugaggaugaaaaaa

SEQ ID NO: 3776803 - RNA, 16 nt, Human
agugaggccacugaag

SEQ ID NO: 3776804 - RNA, 12 nt, Human
agugaggcucug

SEQ ID NO: 3776805 - RNA, 15 nt, Human
agugaggcucugccc

SEQ ID NO: 3776806 - RNA, 16 nt, Human
agugaggcucugcccu

SEQ ID NO: 3776807 - RNA, 12 nt, Human
agugagggccug

SEQ ID NO: 3776808 - RNA, 20 nt, Human
agugagggcuugucauuacc

SEQ ID NO: 3776809 - RNA, 22 nt, Human
agugagggucagagaggaguca

SEQ ID NO: 3776810 - RNA, 16 nt, Human
agugagucgaggacag

SEQ ID NO: 3776811 - RNA, 14 nt, Human
agugagucucucug

SEQ ID NO: 3776812 - RNA, 15 nt, Human
agugagucucucugg

SEQ ID NO: 3776813 - RNA, 14 nt, Human
agugagucugucag

SEQ ID NO: 3776814 - RNA, 15 nt, Human
agugagucugucagc

SEQ ID NO: 3776815 - RNA, 23 nt, Human
agugagugcaaaaagcugaguau

SEQ ID NO: 3776816 - RNA, 15 nt, Human
agugagugugcugcu

SEQ ID NO: 3776817 - RNA, 18 nt, Human
agugaguguggcuccccu

SEQ ID NO: 3776818 - RNA, 19 nt, Human
agugaguguggcuccccuc

SEQ ID NO: 3776819 - RNA, 14 nt, Human
agugaguguuucua

SEQ ID NO: 3776820 - RNA, 16 nt, Human
agugaguguuucuaug

SEQ ID NO: 3776821 - RNA, 23 nt, Human
agugaguugauagcacagacccu

SEQ ID NO: 3776822 - RNA, 17 nt, Human
agugauaacuccuaaga

SEQ ID NO: 3776823 - RNA, 19 nt, Human
agugauaauuucuggaauu

SEQ ID NO: 3776824 - RNA, 17 nt, Human
agugauacaacuucaag

SEQ ID NO: 3776825 - RNA, 20 nt, Human
agugauacuauccaguuacu

SEQ ID NO: 3776826 - RNA, 15 nt, Human
agugauauucuuugu

SEQ ID NO: 3776827 - RNA, 19 nt, Human
agugauauucuuuguuaau

SEQ ID NO: 3776828 - RNA, 15 nt, Human
agugauauuggaacu

SEQ ID NO: 3776829 - RNA, 15 nt, Human
agugauauuucucua

SEQ ID NO: 3776830 - RNA, 14 nt, Human
agugaucaaacuac

SEQ ID NO: 3776831 - RNA, 16 nt, Human
agugaucaagaagacu

SEQ ID NO: 3776832 - RNA, 19 nt, Human
agugaucaauaaaauguga

SEQ ID NO: 3776833 - RNA, 20 nt, Human
agugaucaauaaaaugugau

SEQ ID NO: 3776834 - RNA, 20 nt, Human
agugauccucccaccucagc

SEQ ID NO: 3776835 - RNA, 24 nt, Human
agugauccucccaccucagccucc

SEQ ID NO: 3776836 - RNA, 19 nt, Human
agugaugggcuuucucuuu

SEQ ID NO: 3776837 - RNA, 20 nt, Human
agugauggguuaguggaugg

SEQ ID NO: 3776838 - RNA, 17 nt, Human
agugauguuuuuaugau

SEQ ID NO: 3776839 - RNA, 23 nt, Human
agugauuaaggucucucuuugga

SEQ ID NO: 3776840 - RNA, 19 nt, Human
agugauucucaugccucag

SEQ ID NO: 3776841 - RNA, 14 nt, Human
agugauugcagcuu

SEQ ID NO: 3776842 - RNA, 16 nt, Human
agugauuguaugaauu

SEQ ID NO: 3776843 - RNA, 15 nt, Human
agugauugucuuaau

SEQ ID NO: 3776844 - RNA, 17 nt, Human
agugauugucuuaauau

SEQ ID NO: 3776845 - RNA, 13 nt, Human
agugauuucuaga

SEQ ID NO: 3776846 - RNA, 21 nt, Human
agugauuucuggggccccacc

SEQ ID NO: 3776847 - RNA, 23 nt, Human
agugauuuuuauccaaucuuguu

SEQ ID NO: 3776848 - RNA, 21 nt, Human
agugauuuuuaugccaccuga

SEQ ID NO: 3776849 - RNA, 17 nt, Human
agugcaaaucauagcug

SEQ ID NO: 3776850 - RNA, 18 nt, Human
agugcaaauuugauacau

SEQ ID NO: 3776851 - RNA, 15 nt, Human
agugcaacaguagca

SEQ ID NO: 3776852 - RNA, 24 nt, Human
agugcaaccacacaccucaccaga

SEQ ID NO: 3776853 - RNA, 18 nt, Human
agugcaagccccugcucc

SEQ ID NO: 3776854 - RNA, 14 nt, Human
agugcaaggaccua

SEQ ID NO: 3776855 - RNA, 23 nt, Human
agugcaauaaaucugacccagug

SEQ ID NO: 3776856 - RNA, 15 nt, Human
agugcaauauauuuu

SEQ ID NO: 3776857 - RNA, 16 nt, Human
agugcaaugacacagu

SEQ ID NO: 3776858 - RNA, 11 nt, Human
agugcacaccu

SEQ ID NO: 3776859 - RNA, 13 nt, Human
agugcacagcugu

SEQ ID NO: 3776860 - RNA, 18 nt, Human
agugcacggggcacagcg

SEQ ID NO: 3776861 - RNA, 21 nt, Human
agugcacuaauguguaagaca

SEQ ID NO: 3776862 - RNA, 21 nt, Human
agugcacugaaagucacggcu

SEQ ID NO: 3776863 - RNA, 18 nt, Human
agugcacuuucuaauguu

SEQ ID NO: 3776864 - RNA, 21 nt, Human
agugcacuuucuaauguuucu

SEQ ID NO: 3776865 - RNA, 18 nt, Human
agugcagcaaccagagca

SEQ ID NO: 3776866 - RNA, 21 nt, Human
agugcagcaaccagagcacug

SEQ ID NO: 3776867 - RNA, 15 nt, Human
agugcagcagggcag

SEQ ID NO: 3776868 - RNA, 21 nt, Human
agugcagcagguuaagaauuu

SEQ ID NO: 3776869 - RNA, 21 nt, Human
agugcagcccguguggccccu

SEQ ID NO: 3776870 - RNA, 15 nt, Human
agugcagcugauuuu

SEQ ID NO: 3776871 - RNA, 16 nt, Human
agugcagcugauuuua

SEQ ID NO: 3776872 - RNA, 22 nt, Human
aguggaauccuauauagaaugc

SEQ ID NO: 3776873 - RNA, 22 nt, Human
aguggaaugcuuccuagaaguu

SEQ ID NO: 3776874 - RNA, 15 nt, Human
aguggacagucugcu

SEQ ID NO: 3776875 - RNA, 15 nt, Human
aguggaccaggacag

SEQ ID NO: 3776876 - RNA, 19 nt, Human
aguggaccaggacaggacc

SEQ ID NO: 3776877 - RNA, 20 nt, Human
aguggaccaggacaggacca

SEQ ID NO: 3776878 - RNA, 16 nt, Human
aguggacccugaaaug

SEQ ID NO: 3776879 - RNA, 16 nt, Human
aguggaccgcccuuuu

SEQ ID NO: 3776880 - RNA, 13 nt, Human
aguggacucaggg

SEQ ID NO: 3776881 - RNA, 16 nt, Human
aguggacucagugggu

SEQ ID NO: 3776882 - RNA, 19 nt, Human
aguggagccugacagccag

SEQ ID NO: 3776883 - RNA, 12 nt, Human
aguggaggugga

SEQ ID NO: 3776884 - RNA, 19 nt, Human
aguggaggugggcugggcc

SEQ ID NO: 3776885 - RNA, 14 nt, Human
aguggagguuuguc

SEQ ID NO: 3776886 - RNA, 17 nt, Human
aguggagucugccaccc

SEQ ID NO: 3776887 - RNA, 18 nt, Human
aguggaucacucaccauu

SEQ ID NO: 3776888 - RNA, 23 nt, Human
aguggaucuccaaggaccagguu

SEQ ID NO: 3776889 - RNA, 15 nt, Human
aguggaugauguuuc

SEQ ID NO: 3776890 - RNA, 12 nt, Human
aguggauguaua

SEQ ID NO: 3776891 - RNA, 22 nt, Human
aguggcaaagcuguucuuccug

SEQ ID NO: 3776892 - RNA, 21 nt, Human
aguggcaccugucugcuccag

SEQ ID NO: 3776893 - RNA, 21 nt, Human
aguggcagcccagccagcguc

SEQ ID NO: 3776894 - RNA, 12 nt, Human
aguggcagcugc

SEQ ID NO: 3776895 - RNA, 20 nt, Human
aguggcagcugcuuuugucu

SEQ ID NO: 3776896 - RNA, 15 nt, Human
aguggcagggcacag

SEQ ID NO: 3776897 - RNA, 17 nt, Human
aguggcagggcacaggg

SEQ ID NO: 3776898 - RNA, 20 nt, Human
aguggcagggcacagggccu

SEQ ID NO: 3776899 - RNA, 22 nt, Human
aguggcagggcacagggccugg

SEQ ID NO: 3776900 - RNA, 23 nt, Human
aguggcagucuucaguuugcaga

SEQ ID NO: 3776901 - RNA, 19 nt, Human
aguggcaucaucucagcuc

SEQ ID NO: 3776902 - RNA, 22 nt, Human
aguggcauguuuugugcauuug

SEQ ID NO: 3776903 - RNA, 16 nt, Human
aguggcauuggcagca

SEQ ID NO: 3776904 - RNA, 20 nt, Human
aguggccacuaagcagagga

SEQ ID NO: 3776905 - RNA, 21 nt, Human
aguggccagaccagagcucug

SEQ ID NO: 3776906 - RNA, 23 nt, Human
aguggccagaccagagcucugga

SEQ ID NO: 3776907 - RNA, 17 nt, Human
aguggccaucauuucug

SEQ ID NO: 3776908 - RNA, 19 nt, Human
aguggccccaccuggcccu

SEQ ID NO: 3776909 - RNA, 22 nt, Human
aguggccuacaaaucaguaauu

SEQ ID NO: 3776910 - RNA, 15 nt, Human
aguggccucaacccu

SEQ ID NO: 3776911 - RNA, 21 nt, Human
aguggccuccgucacuaccug

SEQ ID NO: 3776912 - RNA, 21 nt, Human
aguggccucuuugucuaaaac

SEQ ID NO: 3776913 - RNA, 23 nt, Human
aguggccuggcuccgcugugugg

SEQ ID NO: 3776914 - RNA, 20 nt, Human
aguggccuuaccccugccuu

SEQ ID NO: 3776915 - RNA, 17 nt, Human
aguggccuuccccagca

SEQ ID NO: 3776916 - RNA, 21 nt, Human
aguggcgaaaucccugcucac

SEQ ID NO: 3776917 - RNA, 19 nt, Human
aguggcgcgaucucagcuc

SEQ ID NO: 3776918 - RNA, 23 nt, Human
aguggcguugggagggggagaaa

SEQ ID NO: 3776919 - RNA, 15 nt, Human
aguggcguuguugca

SEQ ID NO: 3776920 - RNA, 13 nt, Human
aguggcuccuccc

SEQ ID NO: 3776921 - RNA, 14 nt, Human
aguggcugcugacu

SEQ ID NO: 3776922 - RNA, 16 nt, Human
aguggcugcugcccag

SEQ ID NO: 3776923 - RNA, 16 nt, Human
aguggcuggaucugug

SEQ ID NO: 3776924 - RNA, 22 nt, Human
aguggcuggggcauggaaggca

SEQ ID NO: 3776925 - RNA, 18 nt, Human
aguggcugguccagggcu

SEQ ID NO: 3776926 - RNA, 17 nt, Human
aguggcugucaucagcc

SEQ ID NO: 3776927 - RNA, 17 nt, Human
aguggcuguccagugcc

SEQ ID NO: 3776928 - RNA, 23 nt, Human
aguggcuuaaaacaacacucaca

SEQ ID NO: 3776929 - RNA, 21 nt, Human
aguggcuucacuccugcugua

SEQ ID NO: 3776930 - RNA, 19 nt, Human
aguggcuuuuuuccuccug

SEQ ID NO: 3776931 - RNA, 20 nt, Human
agugggaaggacuuggcgcg

SEQ ID NO: 3776932 - RNA, 15 nt, Human
agugggacagagucu

SEQ ID NO: 3776933 - RNA, 17 nt, Human
agugggacagagucugg

SEQ ID NO: 3776934 - RNA, 21 nt, Human
agugggacagggcauggccag

SEQ ID NO: 3776935 - RNA, 18 nt, Human
agugggacccauagaucu

SEQ ID NO: 3776936 - RNA, 14 nt, Human
agugggagaaaaca

SEQ ID NO: 3776937 - RNA, 14 nt, Human
agugggagcugccu

SEQ ID NO: 3776938 - RNA, 11 nt, Human
agugggagggg

SEQ ID NO: 3776939 - RNA, 13 nt, Human
agugggaggggca

SEQ ID NO: 3776940 - RNA, 14 nt, Human
agugggaggggcag

SEQ ID NO: 3776941 - RNA, 17 nt, Human
agugggaggggcaggcu

SEQ ID NO: 3776942 - RNA, 20 nt, Human
agugggaucugucacaccag

SEQ ID NO: 3776943 - RNA, 15 nt, Human
agugggaugaaccag

SEQ ID NO: 3776944 - RNA, 13 nt, Human
agugggccaggac

SEQ ID NO: 3776945 - RNA, 16 nt, Human
agugggccaggacagg

SEQ ID NO: 3776946 - RNA, 20 nt, Human
agugggccaggacaggcccg

SEQ ID NO: 3776947 - RNA, 21 nt, Human
agugggccaggacaggcccgg

SEQ ID NO: 3776948 - RNA, 14 nt, Human
agugggccagugug

SEQ ID NO: 3776949 - RNA, 22 nt, Human
agugggcuugauucugcaguaa

SEQ ID NO: 3776950 - RNA, 18 nt, Human
aguggggagacaccucag

SEQ ID NO: 3776951 - RNA, 19 nt, Human
aguggggagacaccucaga

SEQ ID NO: 3776952 - RNA, 13 nt, Human
aguggggccugug

SEQ ID NO: 3776953 - RNA, 13 nt, Human
aguggggcucucu

SEQ ID NO: 3776954 - RNA, 12 nt, Human
aguggggcuggg

SEQ ID NO: 3776955 - RNA, 20 nt, Human
agugggggaguggccacaga

SEQ ID NO: 3776956 - RNA, 19 nt, Human
aguggggguggggguaggg

SEQ ID NO: 3776957 - RNA, 22 nt, Human
aguggggucucccucuccugcc

SEQ ID NO: 3776958 - RNA, 20 nt, Human
agugggguggugucagaccc

SEQ ID NO: 3776959 - RNA, 18 nt, Human
agugggguuaucucugug

SEQ ID NO: 3776960 - RNA, 21 nt, Human
agugggguuucgcagccugag

SEQ ID NO: 3776961 - RNA, 15 nt, Human
aguggguaaaauuag

SEQ ID NO: 3776962 - RNA, 17 nt, Human
aguggguacccccagga

SEQ ID NO: 3776963 - RNA, 16 nt, Human
agugggucccacuucc

SEQ ID NO: 3776964 - RNA, 18 nt, Human
agugggugaauaauacag

SEQ ID NO: 3776965 - RNA, 22 nt, Human
agugggugagaugcuggagaag

SEQ ID NO: 3776966 - RNA, 15 nt, Human
aguggguuauucugg

SEQ ID NO: 3776967 - RNA, 18 nt, Human
aguggguuauucuggagu

SEQ ID NO: 3776968 - RNA, 19 nt, Human
aguggguuauucuggaguu

SEQ ID NO: 3776969 - RNA, 21 nt, Human
aguggguuucacaagugaaaa

SEQ ID NO: 3776970 - RNA, 22 nt, Human
aguggguuuuuuaguugaauuu

SEQ ID NO: 3776971 - RNA, 23 nt, Human
aguggguuuuuuaguugaauuuu

SEQ ID NO: 3776972 - RNA, 23 nt, Human
aguggucaaaccgcacucaccca

SEQ ID NO: 3776973 - RNA, 17 nt, Human
agugguccacaucccgg

SEQ ID NO: 3776974 - RNA, 17 nt, Human
agugguccuagaggccc

SEQ ID NO: 3776975 - RNA, 22 nt, Human
aguggucgcuuacuuugaguga

SEQ ID NO: 3776976 - RNA, 13 nt, Human
aguggucuuucug

SEQ ID NO: 3776977 - RNA, 16 nt, Human
aguggucuuucuggag

SEQ ID NO: 3776978 - RNA, 14 nt, Human
aguggucuuuguaa

SEQ ID NO: 3776979 - RNA, 15 nt, Human
aguggucuuuguaag

SEQ ID NO: 3776980 - RNA, 18 nt, Human
aguggucuuuguaagagu

SEQ ID NO: 3776981 - RNA, 22 nt, Human
aguggucuuuguaagaguguag

SEQ ID NO: 3776982 - RNA, 24 nt, Human
aguggucuuuguaagaguguagaa

SEQ ID NO: 3776983 - RNA, 22 nt, Human
aguggugauuugaaaaauauaa

SEQ ID NO: 3776984 - RNA, 14 nt, Human
aguggugcagacag

SEQ ID NO: 3776985 - RNA, 21 nt, Human
aguggugcgaucucggcucag

SEQ ID NO: 3776986 - RNA, 17 nt, Human
aguggugcgaucugggu

SEQ ID NO: 3776987 - RNA, 20 nt, Human
aguggugcucaguuguagaa

SEQ ID NO: 3776988 - RNA, 13 nt, Human
agugguggcaggg

SEQ ID NO: 3776989 - RNA, 15 nt, Human
agugguggcagggcc

SEQ ID NO: 3776990 - RNA, 21 nt, Human
agugguggugaacagaacaaa

SEQ ID NO: 3776991 - RNA, 18 nt, Human
aguggugguuuucuguuc

SEQ ID NO: 3776992 - RNA, 20 nt, Human
aguggugguuuucuguucuu

SEQ ID NO: 3776993 - RNA, 21 nt, Human
aguggugguuuucuguucuuu

SEQ ID NO: 3776994 - RNA, 15 nt, Human
aguggugugaucuca

SEQ ID NO: 3776995 - RNA, 22 nt, Human
agugguuucauaggagacacau

SEQ ID NO: 3776996 - RNA, 18 nt, Human
agugguuuuauacugaag

SEQ ID NO: 3776997 - RNA, 20 nt, Human
agugguuuuauacugaagga

SEQ ID NO: 3776998 - RNA, 14 nt, Human
aguguaaaaaugag

SEQ ID NO: 3776999 - RNA, 17 nt, Human
aguguaaaaaugagaac

SEQ ID NO: 3777000 - RNA, 22 nt, Human
aguguaaaauauuuuaaaauaa

SEQ ID NO: 3777001 - RNA, 13 nt, Human
aguguaaagcauu

SEQ ID NO: 3777002 - RNA, 16 nt, Human
aguguaaagcauucca

SEQ ID NO: 3777003 - RNA, 21 nt, Human
aguguaaauccuuuuucuuua

SEQ ID NO: 3777004 - RNA, 13 nt, Human
aguguaacaagaa

SEQ ID NO: 3777005 - RNA, 17 nt, Human
aguguaacaagaaagga

SEQ ID NO: 3777006 - RNA, 23 nt, Human
aguguaacaauuguguagccuuu

SEQ ID NO: 3777007 - RNA, 17 nt, Human
aguguaacagcugaggu

SEQ ID NO: 3777008 - RNA, 18 nt, Human
aguguaacuugcuuaaau

SEQ ID NO: 3777009 - RNA, 17 nt, Human
aguguaagcuagaagaa

SEQ ID NO: 3777010 - RNA, 16 nt, Human
aguguaaugaauaccu

SEQ ID NO: 3777011 - RNA, 14 nt, Human
aguguaauugagaa

SEQ ID NO: 3777012 - RNA, 20 nt, Human
aguguaauuucuuugccugu

SEQ ID NO: 3777013 - RNA, 21 nt, Human
aguguaauuucuuugccuguu

SEQ ID NO: 3777014 - RNA, 18 nt, Human
aguguacagccagaccag

SEQ ID NO: 3777015 - RNA, 19 nt, Human
aguuaugccgcuagauaca

SEQ ID NO: 3777016 - RNA, 13 nt, Human
aguuaugugaaug

SEQ ID NO: 3777017 - RNA, 22 nt, Human
aguuauguguaugugaguauuc

SEQ ID NO: 3777018 - RNA, 17 nt, Human
aguuauuaaaauuguug

SEQ ID NO: 3777019 - RNA, 17 nt, Human
aguuauuaauuucuuca

SEQ ID NO: 3777020 - RNA, 20 nt, Human
aguuauuauauuuacaaaug

SEQ ID NO: 3777021 - RNA, 17 nt, Human
aguuauugaagcagagu

SEQ ID NO: 3777022 - RNA, 22 nt, Human
aguuauugauaaguucauacau

SEQ ID NO: 3777023 - RNA, 23 nt, Human
aguuauugauaaguucauacauu

SEQ ID NO: 3777024 - RNA, 16 nt, Human
aguuauugcaguuuau

SEQ ID NO: 3777025 - RNA, 18 nt, Human
aguuauugcaguuuauca

SEQ ID NO: 3777026 - RNA, 12 nt, Human
aguuauuguaca

SEQ ID NO: 3777027 - RNA, 18 nt, Human
aguuauuguacagcuguu

SEQ ID NO: 3777028 - RNA, 22 nt, Human
aguuauugucccuggcuuccuu

SEQ ID NO: 3777029 - RNA, 23 nt, Human
aguuauugucccuggcuuccuua

SEQ ID NO: 3777030 - RNA, 12 nt, Human
aguuauuuaaau

SEQ ID NO: 3777031 - RNA, 22 nt, Human
aguuauuuaugccucuguauuu

SEQ ID NO: 3777032 - RNA, 19 nt, Human
aguuauuucccuuuagcug

SEQ ID NO: 3777033 - RNA, 14 nt, Human
aguuauuuuccagg

SEQ ID NO: 3777034 - RNA, 14 nt, Human
aguuauuuucuaca

SEQ ID NO: 3777035 - RNA, 23 nt, Human
aguuauuuugcacccacugaaag

SEQ ID NO: 3777036 - RNA, 21 nt, Human
aguuauuuuuauuuauuuaaa

SEQ ID NO: 3777037 - RNA, 16 nt, Human
aguuauuuuuguacau

SEQ ID NO: 3777038 - RNA, 18 nt, Human
aguuauuuuuguacaugu

SEQ ID NO: 3777039 - RNA, 13 nt, Human
aguucaaaauucu

SEQ ID NO: 3777040 - RNA, 18 nt, Human
aguucaaacauaaggaaa

SEQ ID NO: 3777041 - RNA, 14 nt, Human
aguucaaacucaca

SEQ ID NO: 3777042 - RNA, 13 nt, Human
aguucaagaaaua

SEQ ID NO: 3777043 - RNA, 17 nt, Human
aguucaagaaaugaaga

SEQ ID NO: 3777044 - RNA, 18 nt, Human
aguucaagaaaugaagag

SEQ ID NO: 3777045 - RNA, 18 nt, Human
aguucaagaccagccugg

SEQ ID NO: 3777046 - RNA, 22 nt, Human
aguucaaggaacuugaaaaaua

SEQ ID NO: 3777047 - RNA, 15 nt, Human
aguucaaggaccaac

SEQ ID NO: 3777048 - RNA, 15 nt, Human
aguucaaucucccgc

SEQ ID NO: 3777049 - RNA, 22 nt, Human
aguucaaucucccgcugcugcu

SEQ ID NO: 3777050 - RNA, 14 nt, Human
aguucaaugaucua

SEQ ID NO: 3777051 - RNA, 22 nt, Human
aguucaaugaucuagguuuaac

SEQ ID NO: 3777052 - RNA, 18 nt, Human
aguucaauggcugcugaa

SEQ ID NO: 3777053 - RNA, 15 nt, Human
aguucacacccugca

SEQ ID NO: 3777054 - RNA, 16 nt, Human
aguucacacccugcaa

SEQ ID NO: 3777055 - RNA, 17 nt, Human
aguucaccuauuucaaa

SEQ ID NO: 3777056 - RNA, 15 nt, Human
aguucacuucaucuu

SEQ ID NO: 3777057 - RNA, 18 nt, Human
aguucagagcugcccucu

SEQ ID NO: 3777058 - RNA, 21 nt, Human
aguucagagcugcccucuccu

SEQ ID NO: 3777059 - RNA, 22 nt, Human
aguucagagcugcccucuccug

SEQ ID NO: 3777060 - RNA, 16 nt, Human
aguucagaucuuaaua

SEQ ID NO: 3777061 - RNA, 14 nt, Human
aguucagcacuugu

SEQ ID NO: 3777062 - RNA, 21 nt, Human
aguucagcauccgcaggugcu

SEQ ID NO: 3777063 - RNA, 16 nt, Human
aguucagccacccuga

SEQ ID NO: 3777064 - RNA, 15 nt, Human
aguucagcugcuucu

SEQ ID NO: 3777065 - RNA, 21 nt, Human
aguucaggagucccaaggaaa

SEQ ID NO: 3777066 - RNA, 19 nt, Human
aguucagggaagauaaguu

SEQ ID NO: 3777067 - RNA, 19 nt, Human
aguucagguaacaggcaga

SEQ ID NO: 3777068 - RNA, 20 nt, Human
aguucagguaacaggcagau

SEQ ID NO: 3777069 - RNA, 19 nt, Human
aguucagguagcugccccu

SEQ ID NO: 3777070 - RNA, 21 nt, Human
aguucagguagcugccccugg

SEQ ID NO: 3777071 - RNA, 20 nt, Human
aguucaguaagaccggaagc

SEQ ID NO: 3777072 - RNA, 14 nt, Human
aguucaguaccugg

SEQ ID NO: 3777073 - RNA, 19 nt, Human
aguucaguaccuggaggag

SEQ ID NO: 3777074 - RNA, 20 nt, Human
aguucaguaccuggaggagg

SEQ ID NO: 3777075 - RNA, 19 nt, Human
aguucaguggcacucaaca

SEQ ID NO: 3777076 - RNA, 13 nt, Human
aguucaguggcag

SEQ ID NO: 3777077 - RNA, 21 nt, Human
aguucaguggcagggcucagg

SEQ ID NO: 3777078 - RNA, 22 nt, Human
aguucaguggcagggcucagga

SEQ ID NO: 3777079 - RNA, 18 nt, Human
aguucauaaauuuauggu

SEQ ID NO: 3777080 - RNA, 19 nt, Human
aguucauaacagugccauu

SEQ ID NO: 3777081 - RNA, 10 nt, Human
aguucauaca

SEQ ID NO: 3777082 - RNA, 20 nt, Human
aguucauagggucucuucag

SEQ ID NO: 3777083 - RNA, 20 nt, Human
aguucaucagaguuauggug

SEQ ID NO: 3777084 - RNA, 22 nt, Human
aguucauccaauccucacuggg

SEQ ID NO: 3777085 - RNA, 19 nt, Human
aguucaucccagccccaau

SEQ ID NO: 3777086 - RNA, 16 nt, Human
aguucaucccuucucu

SEQ ID NO: 3777087 - RNA, 20 nt, Human
aguucaucccuucucuucca

SEQ ID NO: 3777088 - RNA, 22 nt, Human
aguucaucccuucucuuccagg

SEQ ID NO: 3777089 - RNA, 22 nt, Human
aguucaucuugaauuguaagga

SEQ ID NO: 3777090 - RNA, 13 nt, Human
aguucaugcagcu

SEQ ID NO: 3777091 - RNA, 17 nt, Human
aguucaugucugcuauc

SEQ ID NO: 3777092 - RNA, 16 nt, Human
aguucauuagaaauau

SEQ ID NO: 3777093 - RNA, 14 nt, Human
aguuccaagagucu

SEQ ID NO: 3777094 - RNA, 21 nt, Human
aguuccacugagcuccaugug

SEQ ID NO: 3777095 - RNA, 22 nt, Human
aguuccaugaagaccacaucca

SEQ ID NO: 3777096 - RNA, 18 nt, Human
aguucccacauuaaagaa

SEQ ID NO: 3777097 - RNA, 22 nt, Human
aguucccacauuaaagaagacc

SEQ ID NO: 3777098 - RNA, 17 nt, Human
aguucccaguuggagcu

SEQ ID NO: 3777099 - RNA, 19 nt, Human
aguucccaguuggagcucc

SEQ ID NO: 3777100 - RNA, 20 nt, Human
aguucccaguuggagcucca

SEQ ID NO: 3777101 - RNA, 21 nt, Human
aguucccaguuggagcuccag

SEQ ID NO: 3777102 - RNA, 16 nt, Human
aguucccauucuuuca

SEQ ID NO: 3777103 - RNA, 16 nt, Human
aguuccccaugcagac

SEQ ID NO: 3777104 - RNA, 15 nt, Human
aguucccccaaccuc

SEQ ID NO: 3777105 - RNA, 24 nt, Human
aguuccccuggaagcagugcccag

SEQ ID NO: 3777106 - RNA, 19 nt, Human
aguucccucugcucagcca

SEQ ID NO: 3777107 - RNA, 15 nt, Human
aguucccugaaacac

SEQ ID NO: 3777108 - RNA, 17 nt, Human
aguucccugaaacacga

SEQ ID NO: 3777109 - RNA, 20 nt, Human
aguucccugucucuugaaaa

SEQ ID NO: 3777110 - RNA, 17 nt, Human
aguucccuugaaacuuu

SEQ ID NO: 3777111 - RNA, 17 nt, Human
aguucccuuggccucag

SEQ ID NO: 3777112 - RNA, 22 nt, Human
aguuccuaagaagcuucuaaua

SEQ ID NO: 3777113 - RNA, 20 nt, Human
aguuccuauaacacugugaa

SEQ ID NO: 3777114 - RNA, 18 nt, Human
aguuccucuagugcccuc

SEQ ID NO: 3777115 - RNA, 22 nt, Human
aguuccucuuuugugcugcuuc

SEQ ID NO: 3777116 - RNA, 18 nt, Human
aguuccugaaccugaugc

SEQ ID NO: 3777117 - RNA, 19 nt, Human
aguuccugaaccugaugcu

SEQ ID NO: 3777118 - RNA, 20 nt, Human
aguuccugcggagugaagag

SEQ ID NO: 3777119 - RNA, 14 nt, Human
aguuccugugcaca

SEQ ID NO: 3777120 - RNA, 14 nt, Human
aguuccuuauguau

SEQ ID NO: 3777121 - RNA, 20 nt, Human
aguuccuucagcuuccauuu

SEQ ID NO: 3777122 - RNA, 19 nt, Human
aguuccuuuccuuuucuuu

SEQ ID NO: 3777123 - RNA, 18 nt, Human
aguucgagaccagccugg

SEQ ID NO: 3777124 - RNA, 21 nt, Human
aguucgagaccagccuggcca

SEQ ID NO: 3777125 - RNA, 21 nt, Human
aguucgaugggcccaauucuu

SEQ ID NO: 3777126 - RNA, 13 nt, Human
aguucgcagccac

SEQ ID NO: 3777127 - RNA, 21 nt, Human
aguucgcagccacccugagga

SEQ ID NO: 3777128 - RNA, 17 nt, Human
aguucgccuggagcccu

SEQ ID NO: 3777129 - RNA, 17 nt, Human
aguucggcucugggugg

SEQ ID NO: 3777130 - RNA, 19 nt, Human
aguucggugagcuacaaau

SEQ ID NO: 3777131 - RNA, 16 nt, Human
aguucuaagauucuaa

SEQ ID NO: 3777132 - RNA, 17 nt, Human
aguucuaagauucuaau

SEQ ID NO: 3777133 - RNA, 16 nt, Human
aguucuaauaauuucu

SEQ ID NO: 3777134 - RNA, 19 nt, Human
aguucuaauaauuucuaau

SEQ ID NO: 3777135 - RNA, 21 nt, Human
aguucuaauaauuucuaaugu

SEQ ID NO: 3777136 - RNA, 16 nt, Human
aguucuacucaggcug

SEQ ID NO: 3777137 - RNA, 17 nt, Human
aguucuacucaggcugg

SEQ ID NO: 3777138 - RNA, 23 nt, Human
aguucuacuucauguaauccaaa

SEQ ID NO: 3777139 - RNA, 14 nt, Human
aguucuagaaaaac

SEQ ID NO: 3777140 - RNA, 22 nt, Human
aguucuagacauggagguucua

SEQ ID NO: 3777141 - RNA, 23 nt, Human
aguucuagacauggagguucuaa

SEQ ID NO: 3777142 - RNA, 16 nt, Human
aguucuagagaagagg

SEQ ID NO: 3777143 - RNA, 13 nt, Human
aguucuaggaaaa

SEQ ID NO: 3777144 - RNA, 14 nt, Human
aguucuaggaaaau

SEQ ID NO: 3777145 - RNA, 14 nt, Human
aguucuaggcacug

SEQ ID NO: 3777146 - RNA, 18 nt, Human
aguucuauacuguaaagc

SEQ ID NO: 3777147 - RNA, 12 nt, Human
aguucucagggc

SEQ ID NO: 3777148 - RNA, 14 nt, Human
aguucucagggcuc

SEQ ID NO: 3777149 - RNA, 19 nt, Human
aguucucagggcuccugcc

SEQ ID NO: 3777150 - RNA, 12 nt, Human
aguucucuccuu

SEQ ID NO: 3777151 - RNA, 16 nt, Human
aguucucuccuucuuc

SEQ ID NO: 3777152 - RNA, 20 nt, Human
aguucucuucacucaaggau

SEQ ID NO: 3777153 - RNA, 20 nt, Human
aguucucuugguguuaaaac

SEQ ID NO: 3777154 - RNA, 13 nt, Human
aguucugaagaag

SEQ ID NO: 3777155 - RNA, 18 nt, Human
aguucugcaaauagaaaa

SEQ ID NO: 3777156 - RNA, 20 nt, Human
aguucugcaaauagaaaaca

SEQ ID NO: 3777157 - RNA, 20 nt, Human
aguucugccaggagacaggu

SEQ ID NO: 3777158 - RNA, 14 nt, Human
auagaauuuccaau

SEQ ID NO: 3777159 - RNA, 13 nt, Human
auagaauuuuuaa

SEQ ID NO: 3777160 - RNA, 16 nt, Human
auagacaaauagaaaa

SEQ ID NO: 3777161 - RNA, 22 nt, Human
auagacaauuuauuauggcaca

SEQ ID NO: 3777162 - RNA, 18 nt, Human
auagacagaagaaacaag

SEQ ID NO: 3777163 - RNA, 15 nt, Human
auagacagcaugaga

SEQ ID NO: 3777164 - RNA, 13 nt, Human
auagacaguuugu

SEQ ID NO: 3777165 - RNA, 16 nt, Human
auagacauuuguaaau

SEQ ID NO: 3777166 - RNA, 18 nt, Human
auagacccacaagaggca

SEQ ID NO: 3777167 - RNA, 15 nt, Human
auagacuagagaaac

SEQ ID NO: 3777168 - RNA, 17 nt, Human
auagacuggaaaaaaug

SEQ ID NO: 3777169 - RNA, 15 nt, Human
auagacuuaaaucuc

SEQ ID NO: 3777170 - RNA, 12 nt, Human
auagagaauguu

SEQ ID NO: 3777171 - RNA, 23 nt, Human
auagagacuguagauugcuucug

SEQ ID NO: 3777172 - RNA, 21 nt, Human
auagagagggagaagaaguca

SEQ ID NO: 3777173 - RNA, 17 nt, Human
auagagaguuguugugu

SEQ ID NO: 3777174 - RNA, 17 nt, Human
auagagaugagcuuucu

SEQ ID NO: 3777175 - RNA, 24 nt, Human
auagagauuuuuuaaccauggcag

SEQ ID NO: 3777176 - RNA, 21 nt, Human
auagagcaccuaguccaguga

SEQ ID NO: 3777177 - RNA, 14 nt, Human
auagagcagaaauu

SEQ ID NO: 3777178 - RNA, 19 nt, Human
auagagccgggugucccca

SEQ ID NO: 3777179 - RNA, 15 nt, Human
auagagccugaggga

SEQ ID NO: 3777180 - RNA, 14 nt, Human
auagagcuguauua

SEQ ID NO: 3777181 - RNA, 23 nt, Human
auagagcuguucaacaucacuga

SEQ ID NO: 3777182 - RNA, 12 nt, Human
auagagcuuuua

SEQ ID NO: 3777183 - RNA, 21 nt, Human
auagaggaagccugauuaaag

SEQ ID NO: 3777184 - RNA, 22 nt, Human
auagaggaagccugauuaaaga

SEQ ID NO: 3777185 - RNA, 12 nt, Human
auagaggcuagc

SEQ ID NO: 3777186 - RNA, 21 nt, Human
auagaggcuucuccgccagcc

SEQ ID NO: 3777187 - RNA, 14 nt, Human
auagagggccaaga

SEQ ID NO: 3777188 - RNA, 16 nt, Human
auagagguaccagcaa

SEQ ID NO: 3777189 - RNA, 15 nt, Human
auagaggugagggaa

SEQ ID NO: 3777190 - RNA, 15 nt, Human
auagaguauaugcac

SEQ ID NO: 3777191 - RNA, 21 nt, Human
auagaguguacuuaacuauuc

SEQ ID NO: 3777192 - RNA, 16 nt, Human
auagagugugauguau

SEQ ID NO: 3777193 - RNA, 16 nt, Human
auagaguuuaacacaa

SEQ ID NO: 3777194 - RNA, 15 nt, Human
auagaguuugcuauu

SEQ ID NO: 3777195 - RNA, 20 nt, Human
auagauaaaacaucuuugaa

SEQ ID NO: 3777196 - RNA, 15 nt, Human
auagauaauauuguu

SEQ ID NO: 3777197 - RNA, 21 nt, Human
auagauacccuacgcugucca

SEQ ID NO: 3777198 - RNA, 18 nt, Human
auagauaggucagugcaa

SEQ ID NO: 3777199 - RNA, 17 nt, Human
auagaucacauaacaga

SEQ ID NO: 3777200 - RNA, 21 nt, Human
auagaugcaagauauuuauau

SEQ ID NO: 3777201 - RNA, 17 nt, Human
auagaugcuggcccagg

SEQ ID NO: 3777202 - RNA, 12 nt, Human
auagaugggaau

SEQ ID NO: 3777203 - RNA, 19 nt, Human
auagaugggaaugaagcuu

SEQ ID NO: 3777204 - RNA, 13 nt, Human
auagaugggucug

SEQ ID NO: 3777205 - RNA, 19 nt, Human
auagaugucccuuucuugg

SEQ ID NO: 3777206 - RNA, 22 nt, Human
auagaugucccuuucuuggcca

SEQ ID NO: 3777207 - RNA, 15 nt, Human
auagaugucuuuuau

SEQ ID NO: 3777208 - RNA, 17 nt, Human
auagaugucuuuuauag

SEQ ID NO: 3777209 - RNA, 14 nt, Human
auagaugucuuuuc

SEQ ID NO: 3777210 - RNA, 12 nt, Human
auagaugugugg

SEQ ID NO: 3777211 - RNA, 22 nt, Human
auagauguuuugguagauuaaa

SEQ ID NO: 3777212 - RNA, 20 nt, Human
auagauuaaaucauacuccu

SEQ ID NO: 3777213 - RNA, 13 nt, Human
auagauuagaauu

SEQ ID NO: 3777214 - RNA, 15 nt, Human
auagauuagaauucu

SEQ ID NO: 3777215 - RNA, 16 nt, Human
auagauuagaauucug

SEQ ID NO: 3777216 - RNA, 21 nt, Human
auagauuagagaguguugaaa

SEQ ID NO: 3777217 - RNA, 23 nt, Human
auagauuagauuauauugagaca

SEQ ID NO: 3777218 - RNA, 15 nt, Human
auagauuauaacuug

SEQ ID NO: 3777219 - RNA, 15 nt, Human
auagauucuaaagau

SEQ ID NO: 3777220 - RNA, 18 nt, Human
auagauugugaauaauga

SEQ ID NO: 3777221 - RNA, 14 nt, Human
auagauuucugauu

SEQ ID NO: 3777222 - RNA, 15 nt, Human
auagauuucugauuu

SEQ ID NO: 3777223 - RNA, 16 nt, Human
auagauuucugauuuu

SEQ ID NO: 3777224 - RNA, 21 nt, Human
auagauuucugauuuuaugua

SEQ ID NO: 3777225 - RNA, 14 nt, Human
auagauuugaccuc

SEQ ID NO: 3777226 - RNA, 15 nt, Human
auagcaaaagaagaa

SEQ ID NO: 3777227 - RNA, 17 nt, Human
auagcaaaagaagaagu

SEQ ID NO: 3777228 - RNA, 18 nt, Human
auagcaaaagaagaaguu

SEQ ID NO: 3777229 - RNA, 19 nt, Human
auagcaaaagaagaaguuu

SEQ ID NO: 3777230 - RNA, 15 nt, Human
auagcaaaaucaaga

SEQ ID NO: 3777231 - RNA, 15 nt, Human
auagcaaagaauuga

SEQ ID NO: 3777232 - RNA, 19 nt, Human
auagcaaauguuuugacau

SEQ ID NO: 3777233 - RNA, 23 nt, Human
auagcaaauguuuugacaugaaa

SEQ ID NO: 3777234 - RNA, 16 nt, Human
auagcaacaacaauug

SEQ ID NO: 3777235 - RNA, 17 nt, Human
auagcaacaacaauugg

SEQ ID NO: 3777236 - RNA, 18 nt, Human
auagcaacaacaauuggu

SEQ ID NO: 3777237 - RNA, 19 nt, Human
auagcaacaacaauuggua

SEQ ID NO: 3777238 - RNA, 16 nt, Human
auagcaacacucuaua

SEQ ID NO: 3777239 - RNA, 22 nt, Human
auagcaacuuuuguguaaugaa

SEQ ID NO: 3777240 - RNA, 16 nt, Human
auagcaagacauuaua

SEQ ID NO: 3777241 - RNA, 22 nt, Human
auagcaagugaauuuuucucua

SEQ ID NO: 3777242 - RNA, 17 nt, Human
auagcaauagcauggau

SEQ ID NO: 3777243 - RNA, 15 nt, Human
auagcacagacccug

SEQ ID NO: 3777244 - RNA, 14 nt, Human
auagcaccagggcu

SEQ ID NO: 3777245 - RNA, 13 nt, Human
auagcacuuugaa

SEQ ID NO: 3777246 - RNA, 14 nt, Human
auagcacuuugaaa

SEQ ID NO: 3777247 - RNA, 19 nt, Human
auagcacuuugaaauaccu

SEQ ID NO: 3777248 - RNA, 20 nt, Human
auagcacuuugaaauaccuc

SEQ ID NO: 3777249 - RNA, 20 nt, Human
auagcagcaaaaauauaaaa

SEQ ID NO: 3777250 - RNA, 15 nt, Human
auagcaguaaaaaau

SEQ ID NO: 3777251 - RNA, 16 nt, Human
auagcaguagucuuuu

SEQ ID NO: 3777252 - RNA, 22 nt, Human
auagcauaugacaaauguuucu

SEQ ID NO: 3777253 - RNA, 23 nt, Human
auagcauaugacaaauguuucua

SEQ ID NO: 3777254 - RNA, 15 nt, Human
auagcaucacuuaaa

SEQ ID NO: 3777255 - RNA, 18 nt, Human
auagcaucacuuaaaaca

SEQ ID NO: 3777256 - RNA, 23 nt, Human
auagcaucucaggagauuucaug

SEQ ID NO: 3777257 - RNA, 21 nt, Human
auagcaucuggaagaucauuu

SEQ ID NO: 3777258 - RNA, 23 nt, Human
auagcaucuuugaauacaaagaa

SEQ ID NO: 3777259 - RNA, 18 nt, Human
auagcauggauagaguau

SEQ ID NO: 3777260 - RNA, 10 nt, Human
auagcaugua

SEQ ID NO: 3777261 - RNA, 22 nt, Human
auagcauguauugugucuuuug

SEQ ID NO: 3777262 - RNA, 15 nt, Human
auagcauuaacuaau

SEQ ID NO: 3777263 - RNA, 12 nt, Human
auagcauugcuu

SEQ ID NO: 3777264 - RNA, 15 nt, Human
auagcauuguaaaag

SEQ ID NO: 3777265 - RNA, 16 nt, Human
auagcauuuaugguaa

SEQ ID NO: 3777266 - RNA, 14 nt, Human
auagccaaaaauag

SEQ ID NO: 3777267 - RNA, 15 nt, Human
auagccaaaaauagc

SEQ ID NO: 3777268 - RNA, 15 nt, Human
auagccaaggccaaa

SEQ ID NO: 3777269 - RNA, 21 nt, Human
auagccacauuuggaauacuu

SEQ ID NO: 3777270 - RNA, 22 nt, Human
auagccacuaaccuugccuggu

SEQ ID NO: 3777271 - RNA, 23 nt, Human
auagccacuaaccuugccuggua

SEQ ID NO: 3777272 - RNA, 19 nt, Human
auagccacuuaccuucaau

SEQ ID NO: 3777273 - RNA, 21 nt, Human
auagccacuuaccuucaauaa

SEQ ID NO: 3777274 - RNA, 23 nt, Human
auagccacuuaccuucaauaaag

SEQ ID NO: 3777275 - RNA, 18 nt, Human
auagcccaggauauauuu

SEQ ID NO: 3777276 - RNA, 14 nt, Human
auagcccagguccu

SEQ ID NO: 3777277 - RNA, 16 nt, Human
auagcccuguccuggu

SEQ ID NO: 3777278 - RNA, 18 nt, Human
auagccgggcaugguggc

SEQ ID NO: 3777279 - RNA, 17 nt, Human
auagccuaggugacaga

SEQ ID NO: 3777280 - RNA, 19 nt, Human
auagccuauauuuacagug

SEQ ID NO: 3777281 - RNA, 13 nt, Human
auagccuguggcc

SEQ ID NO: 3777282 - RNA, 20 nt, Human
auagcgucauaacuagaacu

SEQ ID NO: 3777283 - RNA, 15 nt, Human
auagcguguguagau

SEQ ID NO: 3777284 - RNA, 13 nt, Human
auagcguucuugu

SEQ ID NO: 3777285 - RNA, 22 nt, Human
auagcguuggaauuaaaacaau

SEQ ID NO: 3777286 - RNA, 15 nt, Human
auagcuaacauuuua

SEQ ID NO: 3777287 - RNA, 22 nt, Human
auagcuaacauuuuaaauaaaa

SEQ ID NO: 3777288 - RNA, 15 nt, Human
auagcuaacuguaaa

SEQ ID NO: 3777289 - RNA, 17 nt, Human
auagcuaacuguaaauc

SEQ ID NO: 3777290 - RNA, 21 nt, Human
auagcuaagaaauaaaacugu

SEQ ID NO: 3777291 - RNA, 13 nt, Human
auagcuaaguaca

SEQ ID NO: 3777292 - RNA, 17 nt, Human
auagcuaauaauguuaa

SEQ ID NO: 3777293 - RNA, 15 nt, Human
auagcuacaggaagc

SEQ ID NO: 3777294 - RNA, 15 nt, Human
auagcuagacuggug

SEQ ID NO: 3777295 - RNA, 19 nt, Human
auagcuagacuggugacug

SEQ ID NO: 3777296 - RNA, 17 nt, Human
auagcuauauccaugua

SEQ ID NO: 3777297 - RNA, 23 nt, Human
auagcuauauccauguacuguag

SEQ ID NO: 3777298 - RNA, 18 nt, Human
auagcuauuacugucugg

SEQ ID NO: 3777299 - RNA, 20 nt, Human
auagcuauuuuuauggaauu

SEQ ID NO: 3777300 - RNA, 20 nt, Human
auagcucaggugucccugca

SEQ ID NO: 3777301 - RNA, 20 nt, Human
auagcuccugcuccacagcc

SEQ ID NO: 3777302 - RNA, 14 nt, Human
auagcuccuuuuga

SEQ ID NO: 3777303 - RNA, 10 nt, Human
auauauauau

SEQ ID NO: 3777304 - RNA, 14 nt, Human
auauauauauaaag

SEQ ID NO: 3777305 - RNA, 15 nt, Human
auauauauauaaagu

SEQ ID NO: 3777306 - RNA, 14 nt, Human
auauauauauauaa

SEQ ID NO: 3777307 - RNA, 14 nt, Human
auauauauauauau

SEQ ID NO: 3777308 - RNA, 16 nt, Human
auauauauauauauaa

SEQ ID NO: 3777309 - RNA, 16 nt, Human
auauauauauauaugu

SEQ ID NO: 3777310 - RNA, 14 nt, Human
auauauauauauca

SEQ ID NO: 3777311 - RNA, 15 nt, Human
auauauauauaugca

SEQ ID NO: 3777312 - RNA, 14 nt, Human
auauauauauaugu

SEQ ID NO: 3777313 - RNA, 14 nt, Human
auauauauaucagu

SEQ ID NO: 3777314 - RNA, 14 nt, Human
auauauaucaguuu

SEQ ID NO: 3777315 - RNA, 22 nt, Human
auauauaugcauauauauaugu

SEQ ID NO: 3777316 - RNA, 20 nt, Human
auauauaugccuuuuuccua

SEQ ID NO: 3777317 - RNA, 16 nt, Human
auauauauuaucuuuu

SEQ ID NO: 3777318 - RNA, 13 nt, Human
auauauauuuuaa

SEQ ID NO: 3777319 - RNA, 17 nt, Human
auauaucacccagacau

SEQ ID NO: 3777320 - RNA, 16 nt, Human
auauaucccugauaaa

SEQ ID NO: 3777321 - RNA, 17 nt, Human
auauaucuaaauuuaga

SEQ ID NO: 3777322 - RNA, 15 nt, Human
auauaucuaucuauu

SEQ ID NO: 3777323 - RNA, 12 nt, Human
auauaucugaaa

SEQ ID NO: 3777324 - RNA, 18 nt, Human
auauaucugaaaacugga

SEQ ID NO: 3777325 - RNA, 20 nt, Human
auauaucugcuguccagaca

SEQ ID NO: 3777326 - RNA, 15 nt, Human
auauaugaaaacuau

SEQ ID NO: 3777327 - RNA, 14 nt, Human
auauauggacaugg

SEQ ID NO: 3777328 - RNA, 15 nt, Human
auauauggacauggc

SEQ ID NO: 3777329 - RNA, 14 nt, Human
auauauggauaaug

SEQ ID NO: 3777330 - RNA, 13 nt, Human
auauauggcagag

SEQ ID NO: 3777331 - RNA, 14 nt, Human
auauauggcagagu

SEQ ID NO: 3777332 - RNA, 21 nt, Human
auauauggcagaguuguaaau

SEQ ID NO: 3777333 - RNA, 15 nt, Human
auauauggcauuugc

SEQ ID NO: 3777334 - RNA, 15 nt, Human
auauauguauguaaa

SEQ ID NO: 3777335 - RNA, 16 nt, Human
auauauguauguaaaa

SEQ ID NO: 3777336 - RNA, 13 nt, Human
auauaugugaaag

SEQ ID NO: 3777337 - RNA, 12 nt, Human
auauaugugaac

SEQ ID NO: 3777338 - RNA, 18 nt, Human
auauaugugaacauuuau

SEQ ID NO: 3777339 - RNA, 14 nt, Human
auauaugugaugau

SEQ ID NO: 3777340 - RNA, 15 nt, Human
auauaugugugugug

SEQ ID NO: 3777341 - RNA, 23 nt, Human
auauauguguguuuaaauaaagu

SEQ ID NO: 3777342 - RNA, 14 nt, Human
auauauguuuaccu

SEQ ID NO: 3777343 - RNA, 17 nt, Human
auauauguuuaccuuuu

SEQ ID NO: 3777344 - RNA, 22 nt, Human
auauauguuuuaagaggcaggg

SEQ ID NO: 3777345 - RNA, 18 nt, Human
auauauguuuuugaaggc

SEQ ID NO: 3777346 - RNA, 18 nt, Human
auauauuaaaaauauaaa

SEQ ID NO: 3777347 - RNA, 22 nt, Human
auauauuauacuuguaauuaug

SEQ ID NO: 3777348 - RNA, 14 nt, Human
auauauuaucuuuu

SEQ ID NO: 3777349 - RNA, 14 nt, Human
auauauuauuacuu

SEQ ID NO: 3777350 - RNA, 14 nt, Human
auauauuauuauaa

SEQ ID NO: 3777351 - RNA, 16 nt, Human
auauauuauuauaauc

SEQ ID NO: 3777352 - RNA, 14 nt, Human
auauauuauuugca

SEQ ID NO: 3777353 - RNA, 15 nt, Human
auauauucccaauag

SEQ ID NO: 3777354 - RNA, 16 nt, Human
auauauucucuuuggu

SEQ ID NO: 3777355 - RNA, 23 nt, Human
auauauucucuuugguguacaaa

SEQ ID NO: 3777356 - RNA, 18 nt, Human
auauauugaacuuuugua

SEQ ID NO: 3777357 - RNA, 15 nt, Human
auauauugaauauuu

SEQ ID NO: 3777358 - RNA, 14 nt, Human
auauauugaauuaa

SEQ ID NO: 3777359 - RNA, 19 nt, Human
auauauugguaacauccuu

SEQ ID NO: 3777360 - RNA, 12 nt, Human
auauauuuaaaa

SEQ ID NO: 3777361 - RNA, 18 nt, Human
auauauuuaaaaguguca

SEQ ID NO: 3777362 - RNA, 20 nt, Human
auauauuuaaagggaaauug

SEQ ID NO: 3777363 - RNA, 13 nt, Human
auauauuuaauga

SEQ ID NO: 3777364 - RNA, 15 nt, Human
auauauuuaaugaua

SEQ ID NO: 3777365 - RNA, 10 nt, Human
auauauuuau

SEQ ID NO: 3777366 - RNA, 15 nt, Human
auauauuuauuuaaa

SEQ ID NO: 3777367 - RNA, 9 nt, Human
auauauuuc

SEQ ID NO: 3777368 - RNA, 22 nt, Human
auauauuucacguguucccucu

SEQ ID NO: 3777369 - RNA, 21 nt, Human
auauauuuguguauuuaacag

SEQ ID NO: 3777370 - RNA, 16 nt, Human
auauauuuuacaauuu

SEQ ID NO: 3777371 - RNA, 14 nt, Human
auauauuuuguaug

SEQ ID NO: 3777372 - RNA, 17 nt, Human
auauauuuuguaugcaa

SEQ ID NO: 3777373 - RNA, 19 nt, Human
auauauuuuguaugcaagc

SEQ ID NO: 3777374 - RNA, 20 nt, Human
auauauuuuguaugcaagca

SEQ ID NO: 3777375 - RNA, 16 nt, Human
auauauuuugugugaa

SEQ ID NO: 3777376 - RNA, 16 nt, Human
auauauuuuguuuaca

SEQ ID NO: 3777377 - RNA, 23 nt, Human
auauauuuuuaagauaauaauau

SEQ ID NO: 3777378 - RNA, 21 nt, Human
auauauuuuuauauuuaguua

SEQ ID NO: 3777379 - RNA, 14 nt, Human
auauauuuuucaca

SEQ ID NO: 3777380 - RNA, 15 nt, Human
auauauuuuugguug

SEQ ID NO: 3777381 - RNA, 20 nt, Human
auauauuuuugguugucaau

SEQ ID NO: 3777382 - RNA, 20 nt, Human
auauauuuuuuaauuugaug

SEQ ID NO: 3777383 - RNA, 14 nt, Human
auaucaaaagacac

SEQ ID NO: 3777384 - RNA, 16 nt, Human
auaucaaaagacacag

SEQ ID NO: 3777385 - RNA, 18 nt, Human
auaucaaauuaauugugu

SEQ ID NO: 3777386 - RNA, 20 nt, Human
auaucaaauuaauuguguga

SEQ ID NO: 3777387 - RNA, 21 nt, Human
auaucaaauuaauugugugaa

SEQ ID NO: 3777388 - RNA, 16 nt, Human
auaucaagaugauucu

SEQ ID NO: 3777389 - RNA, 15 nt, Human
auaucaauuuaaaaa

SEQ ID NO: 3777390 - RNA, 19 nt, Human
auaucaccaggacuguuac

SEQ ID NO: 3777391 - RNA, 22 nt, Human
auaucacccagacauaaaggaa

SEQ ID NO: 3777392 - RNA, 15 nt, Human
auaucacucauuaau

SEQ ID NO: 3777393 - RNA, 18 nt, Human
auaucacuugucaauaaa

SEQ ID NO: 3777394 - RNA, 14 nt, Human
auaucagaaaaggg

SEQ ID NO: 3777395 - RNA, 17 nt, Human
auaucagaaaagggaag

SEQ ID NO: 3777396 - RNA, 14 nt, Human
auaucagccugagu

SEQ ID NO: 3777397 - RNA, 19 nt, Human
auaucauacuguucaaugg

SEQ ID NO: 3777398 - RNA, 18 nt, Human
auaucaucagcauaccuu

SEQ ID NO: 3777399 - RNA, 17 nt, Human
auaucaucaguauugaa

SEQ ID NO: 3777400 - RNA, 16 nt, Human
auaucauccacacaug

SEQ ID NO: 3777401 - RNA, 24 nt, Human
auaucauccacacaugaaucugca

SEQ ID NO: 3777402 - RNA, 13 nt, Human
auaucaugcaaaa

SEQ ID NO: 3777403 - RNA, 15 nt, Human
auaucauucagcaac

SEQ ID NO: 3777404 - RNA, 17 nt, Human
auaucauucuaaagaua

SEQ ID NO: 3777405 - RNA, 19 nt, Human
auauccaaaagcuuuuuau

SEQ ID NO: 3777406 - RNA, 14 nt, Human
auauccacacauuu

SEQ ID NO: 3777407 - RNA, 18 nt, Human
auauccaggucaacagaa

SEQ ID NO: 3777408 - RNA, 22 nt, Human
auauccaggucaacagaaugaa

SEQ ID NO: 3777409 - RNA, 14 nt, Human
auauccauguacug

SEQ ID NO: 3777410 - RNA, 17 nt, Human
auauccauguacuguag

SEQ ID NO: 3777411 - RNA, 17 nt, Human
auauccauucuuucuga

SEQ ID NO: 3777412 - RNA, 16 nt, Human
auaucccaaacuguga

SEQ ID NO: 3777413 - RNA, 18 nt, Human
auauccccuauuuaacag

SEQ ID NO: 3777414 - RNA, 15 nt, Human
auauccccucccagu

SEQ ID NO: 3777415 - RNA, 20 nt, Human
auaucccuuggacauuuuau

SEQ ID NO: 3777416 - RNA, 22 nt, Human
auaucccuuggacauuuuaugu

SEQ ID NO: 3777417 - RNA, 22 nt, Human
auauccuaaacaucauucauuu

SEQ ID NO: 3777418 - RNA, 13 nt, Human
auauccuaauaaa

SEQ ID NO: 3777419 - RNA, 20 nt, Human
auauccuaauaaaaagguga

SEQ ID NO: 3777420 - RNA, 23 nt, Human
auauccuaauaaaaaggugacca

SEQ ID NO: 3777421 - RNA, 14 nt, Human
auauccugccucag

SEQ ID NO: 3777422 - RNA, 13 nt, Human
auauccugugacu

SEQ ID NO: 3777423 - RNA, 15 nt, Human
auaucgcugacuuca

SEQ ID NO: 3777424 - RNA, 14 nt, Human
auaucuaaaauauu

SEQ ID NO: 3777425 - RNA, 19 nt, Human
auaucuaaaguuauauuuc

SEQ ID NO: 3777426 - RNA, 19 nt, Human
auaucuaauauauaugaau

SEQ ID NO: 3777427 - RNA, 14 nt, Human
auaucuacagauag

SEQ ID NO: 3777428 - RNA, 16 nt, Human
auaucuagguuuauga

SEQ ID NO: 3777429 - RNA, 17 nt, Human
auaucuagguuuaugac

SEQ ID NO: 3777430 - RNA, 22 nt, Human
auaucuauaguagacacacuau

SEQ ID NO: 3777431 - RNA, 14 nt, Human
auaucuauauauaa

SEQ ID NO: 3777432 - RNA, 17 nt, Human
auaucuauauauaauuc

SEQ ID NO: 3777433 - RNA, 20 nt, Human
auaucuauauauaauucugu

SEQ ID NO: 3777434 - RNA, 17 nt, Human
auaucuauauuuuacau

SEQ ID NO: 3777435 - RNA, 22 nt, Human
auaucuauauuuuacauaaauu

SEQ ID NO: 3777436 - RNA, 14 nt, Human
auaucuaucuauuu

SEQ ID NO: 3777437 - RNA, 18 nt, Human
auaucuaucuauuugagg

SEQ ID NO: 3777438 - RNA, 14 nt, Human
auaucuaucuuaua

SEQ ID NO: 3777439 - RNA, 20 nt, Human
auaucuaucuuauauaguuu

SEQ ID NO: 3777440 - RNA, 21 nt, Human
auaucuaucuuauauaguuua

SEQ ID NO: 3777441 - RNA, 15 nt, Human
auaucuauguuuuac

SEQ ID NO: 3777442 - RNA, 12 nt, Human
auaucuauuaau

SEQ ID NO: 3777443 - RNA, 13 nt, Human
auaucuauuaaua

SEQ ID NO: 3777444 - RNA, 18 nt, Human
auaucuauuaauauaugu

SEQ ID NO: 3777445 - RNA, 20 nt, Human
auaucuccgucaacucauau

SEQ ID NO: 3777446 - RNA, 21 nt, Human
auaucuccgucaacucauauu

SEQ ID NO: 3777447 - RNA, 22 nt, Human
auaucuccugaaaagguuuaug

SEQ ID NO: 3777448 - RNA, 23 nt, Human
auaucuccugaaaagguuuauga

SEQ ID NO: 3777449 - RNA, 16 nt, Human
aucuugaucugcucag

SEQ ID NO: 3777450 - RNA, 20 nt, Human
aucuugaucugcucagcccu

SEQ ID NO: 3777451 - RNA, 24 nt, Human
aucuugcaccccaaagcuuuccug

SEQ ID NO: 3777452 - RNA, 22 nt, Human
aucuugcagaaguucuuagugu

SEQ ID NO: 3777453 - RNA, 14 nt, Human
aucuugcauguaac

SEQ ID NO: 3777454 - RNA, 15 nt, Human
aucuugccuccaggu

SEQ ID NO: 3777455 - RNA, 16 nt, Human
aucuugcucuaucuca

SEQ ID NO: 3777456 - RNA, 14 nt, Human
aucuugcucugcug

SEQ ID NO: 3777457 - RNA, 15 nt, Human
aucuugcucuguaau

SEQ ID NO: 3777458 - RNA, 23 nt, Human
aucuugcuucccuaaucuauggu

SEQ ID NO: 3777459 - RNA, 14 nt, Human
aucuuggacugaca

SEQ ID NO: 3777460 - RNA, 16 nt, Human
aucuuggacugacauu

SEQ ID NO: 3777461 - RNA, 19 nt, Human
aucuuggacugacauuuag

SEQ ID NO: 3777462 - RNA, 19 nt, Human
aucuuggcagguaggaaua

SEQ ID NO: 3777463 - RNA, 19 nt, Human
aucuuggcccuguuaaggc

SEQ ID NO: 3777464 - RNA, 20 nt, Human
aucuuggccuaaaccucagu

SEQ ID NO: 3777465 - RNA, 21 nt, Human
aucuuggccuaaaccucaguu

SEQ ID NO: 3777466 - RNA, 16 nt, Human
aucuuggccuuacugu

SEQ ID NO: 3777467 - RNA, 18 nt, Human
aucuugggacuggguuug

SEQ ID NO: 3777468 - RNA, 22 nt, Human
aucuuggggacaucucuuugaa

SEQ ID NO: 3777469 - RNA, 16 nt, Human
aucuuggggggguggc

SEQ ID NO: 3777470 - RNA, 20 nt, Human
aucuuggggggguggccgcu

SEQ ID NO: 3777471 - RNA, 23 nt, Human
aucuugguaaauuuccccaacag

SEQ ID NO: 3777472 - RNA, 22 nt, Human
aucuugguacuacuagaugucu

SEQ ID NO: 3777473 - RNA, 19 nt, Human
aucuugguguguuaagagu

SEQ ID NO: 3777474 - RNA, 21 nt, Human
aucuugguugaugccaaaaaa

SEQ ID NO: 3777475 - RNA, 20 nt, Human
aucuugguuugccuuccaga

SEQ ID NO: 3777476 - RNA, 20 nt, Human
aucuuguagcuuuaucaaag

SEQ ID NO: 3777477 - RNA, 14 nt, Human
aucuuguccccaac

SEQ ID NO: 3777478 - RNA, 15 nt, Human
aucuugucucugggc

SEQ ID NO: 3777479 - RNA, 18 nt, Human
aucuugugaaaauaauug

SEQ ID NO: 3777480 - RNA, 15 nt, Human
aucuugugaaauggc

SEQ ID NO: 3777481 - RNA, 19 nt, Human
aucuugugcuagaauacuu

SEQ ID NO: 3777482 - RNA, 22 nt, Human
aucuugugcuagaauacuuuuu

SEQ ID NO: 3777483 - RNA, 18 nt, Human
aucuugugugauuaacuu

SEQ ID NO: 3777484 - RNA, 16 nt, Human
aucuuguguuguccuu

SEQ ID NO: 3777485 - RNA, 15 nt, Human
aucuuguucaggaaa

SEQ ID NO: 3777486 - RNA, 19 nt, Human
aucuuguucaggaaaaggu

SEQ ID NO: 3777487 - RNA, 19 nt, Human
aucuuguuccaaggccagg

SEQ ID NO: 3777488 - RNA, 15 nt, Human
aucuuguuucugaaa

SEQ ID NO: 3777489 - RNA, 14 nt, Human
aucuuuaaaccaau

SEQ ID NO: 3777490 - RNA, 13 nt, Human
aucuuuaagcaga

SEQ ID NO: 3777491 - RNA, 17 nt, Human
aucuuuaagcagagaag

SEQ ID NO: 3777492 - RNA, 16 nt, Human
aucuuuaauuuuacau

SEQ ID NO: 3777493 - RNA, 21 nt, Human
aucuuuaauuuuacauuuccu

SEQ ID NO: 3777494 - RNA, 22 nt, Human
aucuuuaauuuuacauuuccua

SEQ ID NO: 3777495 - RNA, 17 nt, Human
aucuuuacaaaacuaca

SEQ ID NO: 3777496 - RNA, 21 nt, Human
aucuuuacaaaacuacaugag

SEQ ID NO: 3777497 - RNA, 13 nt, Human
aucuuuauuaauc

SEQ ID NO: 3777498 - RNA, 16 nt, Human
aucuuuauugaaauuc

SEQ ID NO: 3777499 - RNA, 16 nt, Human
aucuuuauugagaaag

SEQ ID NO: 3777500 - RNA, 18 nt, Human
aucuuuauugagaaagag

SEQ ID NO: 3777501 - RNA, 18 nt, Human
aucuuucaaaccagcuuc

SEQ ID NO: 3777502 - RNA, 17 nt, Human
aucuuucacacuuccac

SEQ ID NO: 3777503 - RNA, 22 nt, Human
aucuuucagaaauauaacacau

SEQ ID NO: 3777504 - RNA, 14 nt, Human
aucuuucccuccuu

SEQ ID NO: 3777505 - RNA, 17 nt, Human
aucuuucccuccuuggu

SEQ ID NO: 3777506 - RNA, 11 nt, Human
aucuuuccugu

SEQ ID NO: 3777507 - RNA, 15 nt, Human
aucuuuccuuccucu

SEQ ID NO: 3777508 - RNA, 21 nt, Human
aucuuucuaugcugcuuuuau

SEQ ID NO: 3777509 - RNA, 16 nt, Human
aucuuucuauuccaaa

SEQ ID NO: 3777510 - RNA, 22 nt, Human
aucuuucuccuugaauaucuuu

SEQ ID NO: 3777511 - RNA, 13 nt, Human
aucuuucugcaga

SEQ ID NO: 3777512 - RNA, 17 nt, Human
aucuuucuuuaccugag

SEQ ID NO: 3777513 - RNA, 21 nt, Human
aucuuugaaagguuagagaau

SEQ ID NO: 3777514 - RNA, 15 nt, Human
aucuuugauguguug

SEQ ID NO: 3777515 - RNA, 16 nt, Human
aucuuugauguguugu

SEQ ID NO: 3777516 - RNA, 14 nt, Human
aucuuugauucucc

SEQ ID NO: 3777517 - RNA, 14 nt, Human
aucuuugcacucca

SEQ ID NO: 3777518 - RNA, 19 nt, Human
aucuuugcagguugcuuug

SEQ ID NO: 3777519 - RNA, 15 nt, Human
aucuuugccacccuc

SEQ ID NO: 3777520 - RNA, 13 nt, Human
aucuuugccuugg

SEQ ID NO: 3777521 - RNA, 20 nt, Human
aucuuugccuugggcugcuc

SEQ ID NO: 3777522 - RNA, 20 nt, Human
aucuuuguaccaaaauuuua

SEQ ID NO: 3777523 - RNA, 14 nt, Human
aucuuugugauaau

SEQ ID NO: 3777524 - RNA, 17 nt, Human
aucuuugugauaauuua

SEQ ID NO: 3777525 - RNA, 15 nt, Human
aucuuuguggccaag

SEQ ID NO: 3777526 - RNA, 16 nt, Human
aucuuuguggccaagg

SEQ ID NO: 3777527 - RNA, 13 nt, Human
aucuuuuaugauu

SEQ ID NO: 3777528 - RNA, 15 nt, Human
aucuuuuauguuuga

SEQ ID NO: 3777529 - RNA, 21 nt, Human
aucuuuuauguuugaauaugg

SEQ ID NO: 3777530 - RNA, 16 nt, Human
aucuuuucacaaauaa

SEQ ID NO: 3777531 - RNA, 22 nt, Human
aucuuuucauugaacagcaaag

SEQ ID NO: 3777532 - RNA, 22 nt, Human
aucuuuucauuuaggugaggaa

SEQ ID NO: 3777533 - RNA, 13 nt, Human
aucuuuucuacag

SEQ ID NO: 3777534 - RNA, 14 nt, Human
aucuuuucuacagc

SEQ ID NO: 3777535 - RNA, 17 nt, Human
aucuuuucuacagcaaa

SEQ ID NO: 3777536 - RNA, 13 nt, Human
aucuuuucuuauu

SEQ ID NO: 3777537 - RNA, 12 nt, Human
aucuuuucuuua

SEQ ID NO: 3777538 - RNA, 13 nt, Human
aucuuuucuuuag

SEQ ID NO: 3777539 - RNA, 19 nt, Human
aucuuuucuuuagagaacu

SEQ ID NO: 3777540 - RNA, 11 nt, Human
aucuuuugaac

SEQ ID NO: 3777541 - RNA, 17 nt, Human
aucuuuugaagcauaga

SEQ ID NO: 3777542 - RNA, 23 nt, Human
aucuuuugauaugcauauuuguu

SEQ ID NO: 3777543 - RNA, 15 nt, Human
aucuuuuguauaguu

SEQ ID NO: 3777544 - RNA, 16 nt, Human
aucuuuuguauuaaga

SEQ ID NO: 3777545 - RNA, 23 nt, Human
aucuuuuguuuccuuuuuuccca

SEQ ID NO: 3777546 - RNA, 15 nt, Human
aucuuuuuaaagcuu

SEQ ID NO: 3777547 - RNA, 18 nt, Human
aucuuuuuaccuuucaua

SEQ ID NO: 3777548 - RNA, 19 nt, Human
aucuuuuuauugaugugca

SEQ ID NO: 3777549 - RNA, 13 nt, Human
aucuuuuucacug

SEQ ID NO: 3777550 - RNA, 13 nt, Human
aucuuuuucuaac

SEQ ID NO: 3777551 - RNA, 23 nt, Human
aucuuuuuuagcauaaaauuuuc

SEQ ID NO: 3777552 - RNA, 21 nt, Human
aucuuuuuuguuaacugauuu

SEQ ID NO: 3777553 - RNA, 20 nt, Human
aucuuuuuuguucaaagauu

SEQ ID NO: 3777554 - RNA, 14 nt, Human
augaaaaaauauau

SEQ ID NO: 3777555 - RNA, 17 nt, Human
augaaaaaauauauauc

SEQ ID NO: 3777556 - RNA, 16 nt, Human
augaaaaaauguauau

SEQ ID NO: 3777557 - RNA, 14 nt, Human
augaaaaagaagaa

SEQ ID NO: 3777558 - RNA, 16 nt, Human
augaaaaagaagaauc

SEQ ID NO: 3777559 - RNA, 15 nt, Human
augaaaaagcaugua

SEQ ID NO: 3777560 - RNA, 21 nt, Human
augaaaaagcauguacagugu

SEQ ID NO: 3777561 - RNA, 13 nt, Human
augaaaaauagca

SEQ ID NO: 3777562 - RNA, 13 nt, Human
augaaaaauauga

SEQ ID NO: 3777563 - RNA, 16 nt, Human
augaaaaaugaaagau

SEQ ID NO: 3777564 - RNA, 18 nt, Human
augaaaaauuggggagga

SEQ ID NO: 3777565 - RNA, 16 nt, Human
augaaaaauuuaagca

SEQ ID NO: 3777566 - RNA, 17 nt, Human
augaaaaauuuaagcau

SEQ ID NO: 3777567 - RNA, 16 nt, Human
augaaaacacauuuuu

SEQ ID NO: 3777568 - RNA, 18 nt, Human
augaaaacaguguguaaa

SEQ ID NO: 3777569 - RNA, 20 nt, Human
augaaaacauggaacagugu

SEQ ID NO: 3777570 - RNA, 19 nt, Human
augaaaacguuuuauugug

SEQ ID NO: 3777571 - RNA, 15 nt, Human
augaaaacuauacaa

SEQ ID NO: 3777572 - RNA, 13 nt, Human
augaaaagacaag

SEQ ID NO: 3777573 - RNA, 22 nt, Human
augaaaagacaagaaaaucagg

SEQ ID NO: 3777574 - RNA, 23 nt, Human
augaaaagcuuuguuuguucuug

SEQ ID NO: 3777575 - RNA, 12 nt, Human
augaaaaggaau

SEQ ID NO: 3777576 - RNA, 17 nt, Human
augaaaauaaagaaugg

SEQ ID NO: 3777577 - RNA, 13 nt, Human
augaaaauauuua

SEQ ID NO: 3777578 - RNA, 19 nt, Human
augaaaaugaguugugaaa

SEQ ID NO: 3777579 - RNA, 21 nt, Human
augaaaaugaguugugaaagu

SEQ ID NO: 3777580 - RNA, 13 nt, Human
augaaaaugucuu

SEQ ID NO: 3777581 - RNA, 15 nt, Human
augaaaauuguguua

SEQ ID NO: 3777582 - RNA, 17 nt, Human
augaaaauuuuaaaaau

SEQ ID NO: 3777583 - RNA, 21 nt, Human
augaaaauuuuaccagcagaa

SEQ ID NO: 3777584 - RNA, 16 nt, Human
augaaacaccuucucu

SEQ ID NO: 3777585 - RNA, 13 nt, Human
augaaacagaaac

SEQ ID NO: 3777586 - RNA, 15 nt, Human
augaaacccccacac

SEQ ID NO: 3777587 - RNA, 18 nt, Human
augaaacccccacacaca

SEQ ID NO: 3777588 - RNA, 22 nt, Human
augaaaccuuauuuuuucccaa

SEQ ID NO: 3777589 - RNA, 19 nt, Human
augaaacuaaagcaauaga

SEQ ID NO: 3777590 - RNA, 22 nt, Human
augaaacuaaagcaauagaaac

SEQ ID NO: 3777591 - RNA, 17 nt, Human
augaaacuagaaagcag

SEQ ID NO: 3777592 - RNA, 13 nt, Human
augaaacuuggau

SEQ ID NO: 3777593 - RNA, 18 nt, Human
augaaacuuguguaaaua

SEQ ID NO: 3777594 - RNA, 16 nt, Human
augagauauuaaacca

SEQ ID NO: 3777595 - RNA, 19 nt, Human
augagaucccgccucuucu

SEQ ID NO: 3777596 - RNA, 12 nt, Human
augagaugugug

SEQ ID NO: 3777597 - RNA, 22 nt, Human
augagauuguuuuaucaugaca

SEQ ID NO: 3777598 - RNA, 14 nt, Human
augagcaccuccau

SEQ ID NO: 3777599 - RNA, 14 nt, Human
augagcacuucuaa

SEQ ID NO: 3777600 - RNA, 21 nt, Human
augagcaucaggccaggcccu

SEQ ID NO: 3777601 - RNA, 14 nt, Human
augagcaucccagg

SEQ ID NO: 3777602 - RNA, 17 nt, Human
augagcauccugagccc

SEQ ID NO: 3777603 - RNA, 18 nt, Human
augagcauccugagcccc

SEQ ID NO: 3777604 - RNA, 15 nt, Human
augagcauggagcug

SEQ ID NO: 3777605 - RNA, 18 nt, Human
augagcauggagcuggcc

SEQ ID NO: 3777606 - RNA, 21 nt, Human
augagcauguuuagacuuuaa

SEQ ID NO: 3777607 - RNA, 16 nt, Human
augagccgcccaaggc

SEQ ID NO: 3777608 - RNA, 21 nt, Human
augagccgcccaaggccuucc

SEQ ID NO: 3777609 - RNA, 22 nt, Human
augagccgcccaaggccuuccc

SEQ ID NO: 3777610 - RNA, 20 nt, Human
augagccgcugugagccccu

SEQ ID NO: 3777611 - RNA, 11 nt, Human
augagccuggc

SEQ ID NO: 3777612 - RNA, 12 nt, Human
augagccuggca

SEQ ID NO: 3777613 - RNA, 15 nt, Human
augagcuauguauua

SEQ ID NO: 3777614 - RNA, 13 nt, Human
augagcuccagac

SEQ ID NO: 3777615 - RNA, 22 nt, Human
augagcuccagacccccagcaa

SEQ ID NO: 3777616 - RNA, 10 nt, Human
augagcuccc

SEQ ID NO: 3777617 - RNA, 21 nt, Human
augagcucccacaagccugag

SEQ ID NO: 3777618 - RNA, 22 nt, Human
augagcuccucuuccuggcuuc

SEQ ID NO: 3777619 - RNA, 19 nt, Human
augagcuccuuaaggcucu

SEQ ID NO: 3777620 - RNA, 22 nt, Human
augagcucuacccagggccugc

SEQ ID NO: 3777621 - RNA, 13 nt, Human
augagcugagggg

SEQ ID NO: 3777622 - RNA, 13 nt, Human
augagcuggaagg

SEQ ID NO: 3777623 - RNA, 18 nt, Human
augagcugugcacaaagu

SEQ ID NO: 3777624 - RNA, 20 nt, Human
augagcuuuauguaauaaug

SEQ ID NO: 3777625 - RNA, 13 nt, Human
augagcuuucuga

SEQ ID NO: 3777626 - RNA, 19 nt, Human
augagcuuucugaacagcu

SEQ ID NO: 3777627 - RNA, 21 nt, Human
augagcuuugucuacuucaaa

SEQ ID NO: 3777628 - RNA, 21 nt, Human
augaggaaaauaauguaauug

SEQ ID NO: 3777629 - RNA, 23 nt, Human
augaggaauaauuauuuauuuaa

SEQ ID NO: 3777630 - RNA, 17 nt, Human
augaggagagaaaauau

SEQ ID NO: 3777631 - RNA, 17 nt, Human
augaggaggggagggua

SEQ ID NO: 3777632 - RNA, 12 nt, Human
augaggagggug

SEQ ID NO: 3777633 - RNA, 18 nt, Human
augaggcaaugucaggaa

SEQ ID NO: 3777634 - RNA, 13 nt, Human
augaggcagagga

SEQ ID NO: 3777635 - RNA, 22 nt, Human
augaggcauuuguuugaacuga

SEQ ID NO: 3777636 - RNA, 15 nt, Human
augaggccacuggag

SEQ ID NO: 3777637 - RNA, 17 nt, Human
augaggccagaccaugg

SEQ ID NO: 3777638 - RNA, 15 nt, Human
augaggcccuccaca

SEQ ID NO: 3777639 - RNA, 15 nt, Human
augaggccgcuagag

SEQ ID NO: 3777640 - RNA, 22 nt, Human
augaggcugcuuuccaaagcca

SEQ ID NO: 3777641 - RNA, 15 nt, Human
augaggcuugcugag

SEQ ID NO: 3777642 - RNA, 18 nt, Human
augaggcuugcugagagg

SEQ ID NO: 3777643 - RNA, 14 nt, Human
augagggaaaagaa

SEQ ID NO: 3777644 - RNA, 15 nt, Human
augagggaaaagaaa

SEQ ID NO: 3777645 - RNA, 14 nt, Human
augagggacuggaa

SEQ ID NO: 3777646 - RNA, 17 nt, Human
augagggagaugccaug

SEQ ID NO: 3777647 - RNA, 16 nt, Human
augagggaugggccug

SEQ ID NO: 3777648 - RNA, 18 nt, Human
augagggaugggccuggc

SEQ ID NO: 3777649 - RNA, 14 nt, Human
augagggcagcagc

SEQ ID NO: 3777650 - RNA, 15 nt, Human
augagggcagcagcc

SEQ ID NO: 3777651 - RNA, 20 nt, Human
augagggcagcagccagccc

SEQ ID NO: 3777652 - RNA, 11 nt, Human
augagggccac

SEQ ID NO: 3777653 - RNA, 19 nt, Human
augaggggacauuuuggug

SEQ ID NO: 3777654 - RNA, 12 nt, Human
augaggggagag

SEQ ID NO: 3777655 - RNA, 20 nt, Human
augagggucuugguuccagc

SEQ ID NO: 3777656 - RNA, 18 nt, Human
augagguacugagaguga

SEQ ID NO: 3777657 - RNA, 16 nt, Human
augagguaucuucuuu

SEQ ID NO: 3777658 - RNA, 18 nt, Human
augaggucagagccugca

SEQ ID NO: 3777659 - RNA, 20 nt, Human
augaggucagagccugcagu

SEQ ID NO: 3777660 - RNA, 19 nt, Human
augaggucccaggcagaga

SEQ ID NO: 3777661 - RNA, 14 nt, Human
augaggucugaaau

SEQ ID NO: 3777662 - RNA, 17 nt, Human
augaggucugaaaugga

SEQ ID NO: 3777663 - RNA, 16 nt, Human
augaggucugggcuag

SEQ ID NO: 3777664 - RNA, 14 nt, Human
augaggucuguuua

SEQ ID NO: 3777665 - RNA, 15 nt, Human
augaggucuguuuaa

SEQ ID NO: 3777666 - RNA, 14 nt, Human
augaggugggaggu

SEQ ID NO: 3777667 - RNA, 22 nt, Human
augaggugggagguggaagaag

SEQ ID NO: 3777668 - RNA, 21 nt, Human
augaguaaaaaaaaaaacaau

SEQ ID NO: 3777669 - RNA, 15 nt, Human
augaguaaaggagua

SEQ ID NO: 3777670 - RNA, 16 nt, Human
augaguaacauuugcu

SEQ ID NO: 3777671 - RNA, 17 nt, Human
augaguacaaaugccuu

SEQ ID NO: 3777672 - RNA, 13 nt, Human
augaguagccagg

SEQ ID NO: 3777673 - RNA, 17 nt, Human
augaguauacaauauau

SEQ ID NO: 3777674 - RNA, 18 nt, Human
augaguauacaauauaua

SEQ ID NO: 3777675 - RNA, 21 nt, Human
augaguauacaauauauaaaa

SEQ ID NO: 3777676 - RNA, 16 nt, Human
augagucccaguggga

SEQ ID NO: 3777677 - RNA, 16 nt, Human
augaguccuugaaaau

SEQ ID NO: 3777678 - RNA, 12 nt, Human
augagucuagau

SEQ ID NO: 3777679 - RNA, 17 nt, Human
augagucuagauguuua

SEQ ID NO: 3777680 - RNA, 19 nt, Human
augagucuguuguguguca

SEQ ID NO: 3777681 - RNA, 13 nt, Human
augagugauucuu

SEQ ID NO: 3777682 - RNA, 17 nt, Human
augaguggcuuuaauga

SEQ ID NO: 3777683 - RNA, 21 nt, Human
augaguguaacaagaaaggag

SEQ ID NO: 3777684 - RNA, 23 nt, Human
augagugugauccaguuuuucau

SEQ ID NO: 3777685 - RNA, 13 nt, Human
augagugugcaug

SEQ ID NO: 3777686 - RNA, 17 nt, Human
augaguuacugugcauu

SEQ ID NO: 3777687 - RNA, 19 nt, Human
augaguuagaauaauaaau

SEQ ID NO: 3777688 - RNA, 16 nt, Human
augaguuaucuaagaa

SEQ ID NO: 3777689 - RNA, 18 nt, Human
augaguuggcugggaaua

SEQ ID NO: 3777690 - RNA, 15 nt, Human
augaguugugaaagu

SEQ ID NO: 3777691 - RNA, 20 nt, Human
augaguugugaaaguuuuga

SEQ ID NO: 3777692 - RNA, 15 nt, Human
augaguuuaaaaauc

SEQ ID NO: 3777693 - RNA, 22 nt, Human
augaguuuaaaaaucaacuuuu

SEQ ID NO: 3777694 - RNA, 15 nt, Human
augaguuucauagcu

SEQ ID NO: 3777695 - RNA, 15 nt, Human
augaguuugcccugg

SEQ ID NO: 3777696 - RNA, 14 nt, Human
augaguuugcuuau

SEQ ID NO: 3777697 - RNA, 18 nt, Human
augaguuuugggaaguua

SEQ ID NO: 3777698 - RNA, 20 nt, Human
augaguuuuugauagcuuua

SEQ ID NO: 3777699 - RNA, 17 nt, Human
augauaaagagacagug

SEQ ID NO: 3777700 - RNA, 17 nt, Human
augauaaguaaaugcua

SEQ ID NO: 3777701 - RNA, 12 nt, Human
augauaaugaac

SEQ ID NO: 3777702 - RNA, 17 nt, Human
augauacagcagagcua

SEQ ID NO: 3777703 - RNA, 18 nt, Human
augauacuucgacacugu

SEQ ID NO: 3777704 - RNA, 20 nt, Human
augauagauuugaccuccuc

SEQ ID NO: 3777705 - RNA, 17 nt, Human
augauaugcuuguaacu

SEQ ID NO: 3777706 - RNA, 21 nt, Human
augauauguaaacauaauucu

SEQ ID NO: 3777707 - RNA, 18 nt, Human
augauauuaaaaauuggc

SEQ ID NO: 3777708 - RNA, 13 nt, Human
augauauugcaua

SEQ ID NO: 3777709 - RNA, 13 nt, Human
augaucaaaaaua

SEQ ID NO: 3777710 - RNA, 12 nt, Human
augaucaaaugu

SEQ ID NO: 3777711 - RNA, 13 nt, Human
augaucaaauguu

SEQ ID NO: 3777712 - RNA, 15 nt, Human
augaucaaauguuua

SEQ ID NO: 3777713 - RNA, 17 nt, Human
augaucaaauguuuaau

SEQ ID NO: 3777714 - RNA, 18 nt, Human
augaucaauccuuuauua

SEQ ID NO: 3777715 - RNA, 19 nt, Human
augaucacggcucacugca

SEQ ID NO: 3777716 - RNA, 23 nt, Human
augaucacggcucacugcagccu

SEQ ID NO: 3777717 - RNA, 19 nt, Human
augaucagcuguuugucau

SEQ ID NO: 3777718 - RNA, 13 nt, Human
augaucaguuuuu

SEQ ID NO: 3777719 - RNA, 15 nt, Human
augaucaguuuuuuu

SEQ ID NO: 3777720 - RNA, 22 nt, Human
augaucauuugcccuuaaggac

SEQ ID NO: 3777721 - RNA, 10 nt, Human
augauccagc

SEQ ID NO: 3777722 - RNA, 22 nt, Human
augauccagcagauuauucacu

SEQ ID NO: 3777723 - RNA, 21 nt, Human
augauccaugaguuugcccug

SEQ ID NO: 3777724 - RNA, 22 nt, Human
augauccaugaguuugcccugg

SEQ ID NO: 3777725 - RNA, 18 nt, Human
augauccccacgccacag

SEQ ID NO: 3777726 - RNA, 19 nt, Human
augauccccacgccacagc

SEQ ID NO: 3777727 - RNA, 23 nt, Human
augauccccacgccacagcccuu

SEQ ID NO: 3777728 - RNA, 16 nt, Human
augauccuaggcauuu

SEQ ID NO: 3777729 - RNA, 20 nt, Human
augauccuguauucagacag

SEQ ID NO: 3777730 - RNA, 22 nt, Human
augaucgaaaaaauaauuauuu

SEQ ID NO: 3777731 - RNA, 15 nt, Human
augaucuacucagaa

SEQ ID NO: 3777732 - RNA, 16 nt, Human
augaucuacucagaaa

SEQ ID NO: 3777733 - RNA, 15 nt, Human
augaucuaggaagac

SEQ ID NO: 3777734 - RNA, 20 nt, Human
augaucuaggaagacuuugg

SEQ ID NO: 3777735 - RNA, 22 nt, Human
augaucuagguuuaacucagau

SEQ ID NO: 3777736 - RNA, 21 nt, Human
augaucugagucccaggagcu

SEQ ID NO: 3777737 - RNA, 15 nt, Human
augaucugugccuuu

SEQ ID NO: 3777738 - RNA, 14 nt, Human
augaucuucuuuau

SEQ ID NO: 3777739 - RNA, 12 nt, Human
auguguuugcuu

SEQ ID NO: 3777740 - RNA, 14 nt, Human
auguguuuucugaa

SEQ ID NO: 3777741 - RNA, 15 nt, Human
auguguuuucugaau

SEQ ID NO: 3777742 - RNA, 18 nt, Human
auguguuuuguuuauuaa

SEQ ID NO: 3777743 - RNA, 15 nt, Human
auguguuuuucucca

SEQ ID NO: 3777744 - RNA, 19 nt, Human
auguuaaaaaaauaagaag

SEQ ID NO: 3777745 - RNA, 18 nt, Human
auguuaaaauaaaugguu

SEQ ID NO: 3777746 - RNA, 23 nt, Human
auguuaaacuagcauaucugccu

SEQ ID NO: 3777747 - RNA, 24 nt, Human
auguuaaacuagcauaucugccuu

SEQ ID NO: 3777748 - RNA, 23 nt, Human
auguuaaacuuauaacccacuuu

SEQ ID NO: 3777749 - RNA, 16 nt, Human
auguuaaagagaauga

SEQ ID NO: 3777750 - RNA, 13 nt, Human
auguuaaagaugu

SEQ ID NO: 3777751 - RNA, 22 nt, Human
auguuaaauaaauuguauauuc

SEQ ID NO: 3777752 - RNA, 18 nt, Human
auguuaaaucccauucau

SEQ ID NO: 3777753 - RNA, 14 nt, Human
auguuaaauuugua

SEQ ID NO: 3777754 - RNA, 22 nt, Human
auguuaaauuuguaaguuucag

SEQ ID NO: 3777755 - RNA, 23 nt, Human
auguuaacaaugccuauuguaau

SEQ ID NO: 3777756 - RNA, 13 nt, Human
auguuaacacauu

SEQ ID NO: 3777757 - RNA, 18 nt, Human
auguuaacacauuuugua

SEQ ID NO: 3777758 - RNA, 22 nt, Human
auguuaacacauuuuguauaau

SEQ ID NO: 3777759 - RNA, 18 nt, Human
auguuaaccaaggaaaua

SEQ ID NO: 3777760 - RNA, 21 nt, Human
auguuaaccucagugucauuu

SEQ ID NO: 3777761 - RNA, 19 nt, Human
auguuaaccucugcuuuua

SEQ ID NO: 3777762 - RNA, 16 nt, Human
auguuaagacuugaca

SEQ ID NO: 3777763 - RNA, 18 nt, Human
auguuaagacuugacagu

SEQ ID NO: 3777764 - RNA, 21 nt, Human
auguuaagcagcuaaauuuuc

SEQ ID NO: 3777765 - RNA, 21 nt, Human
auguuaagcccuggcaggcag

SEQ ID NO: 3777766 - RNA, 13 nt, Human
auguuaaggaaac

SEQ ID NO: 3777767 - RNA, 22 nt, Human
auguuaauauuuuagguguaaa

SEQ ID NO: 3777768 - RNA, 22 nt, Human
auguuaauucagcacugauuuc

SEQ ID NO: 3777769 - RNA, 19 nt, Human
auguuaauugauagaauaa

SEQ ID NO: 3777770 - RNA, 20 nt, Human
auguuaauuuguguguuuuu

SEQ ID NO: 3777771 - RNA, 20 nt, Human
auguuacaucuguuuuaaau

SEQ ID NO: 3777772 - RNA, 16 nt, Human
auguuaccaucuuacu

SEQ ID NO: 3777773 - RNA, 21 nt, Human
auguuaccaucuuacuugagc

SEQ ID NO: 3777774 - RNA, 14 nt, Human
auguuacugaccag

SEQ ID NO: 3777775 - RNA, 16 nt, Human
auguuacugaucaugc

SEQ ID NO: 3777776 - RNA, 19 nt, Human
auguuacugaucaugcauu

SEQ ID NO: 3777777 - RNA, 21 nt, Human
auguuacugaucaugcauugu

SEQ ID NO: 3777778 - RNA, 22 nt, Human
auguuacugaucaugcauuguu

SEQ ID NO: 3777779 - RNA, 22 nt, Human
auguuagacucaugguguguua

SEQ ID NO: 3777780 - RNA, 22 nt, Human
auguuagagguuuuaaagugau

SEQ ID NO: 3777781 - RNA, 20 nt, Human
auguuaggcugggcccagag

SEQ ID NO: 3777782 - RNA, 16 nt, Human
auguuaguaauaccuc

SEQ ID NO: 3777783 - RNA, 22 nt, Human
auguuagucauuguuauuuaua

SEQ ID NO: 3777784 - RNA, 23 nt, Human
auguuaguuaccuuauaguuacu

SEQ ID NO: 3777785 - RNA, 15 nt, Human
auguuaguuuuccuu

SEQ ID NO: 3777786 - RNA, 14 nt, Human
auguuauauauaaa

SEQ ID NO: 3777787 - RNA, 19 nt, Human
auguuauauauaaauauau

SEQ ID NO: 3777788 - RNA, 22 nt, Human
auguuauauauaaauauauuau

SEQ ID NO: 3777789 - RNA, 13 nt, Human
auguuauauauuu

SEQ ID NO: 3777790 - RNA, 17 nt, Human
auguuauauauuuuuug

SEQ ID NO: 3777791 - RNA, 18 nt, Human
auguuauaucauauguau

SEQ ID NO: 3777792 - RNA, 23 nt, Human
auguuauauuuuucuuaaaaagu

SEQ ID NO: 3777793 - RNA, 20 nt, Human
auguuaucuucucaaguucu

SEQ ID NO: 3777794 - RNA, 13 nt, Human
auguuaugauaaa

SEQ ID NO: 3777795 - RNA, 16 nt, Human
auguuaugauaaaaaa

SEQ ID NO: 3777796 - RNA, 20 nt, Human
auguuaugauaaaaaauuuu

SEQ ID NO: 3777797 - RNA, 22 nt, Human
auguuaugauaaaaaauuuugu

SEQ ID NO: 3777798 - RNA, 17 nt, Human
auguuaugcauaaaguc

SEQ ID NO: 3777799 - RNA, 18 nt, Human
auguuaugcauaaaguca

SEQ ID NO: 3777800 - RNA, 21 nt, Human
auguuauguaaaaggccaaac

SEQ ID NO: 3777801 - RNA, 14 nt, Human
auguuauugaaaaa

SEQ ID NO: 3777802 - RNA, 23 nt, Human
auguuauuuaacagcugaauuau

SEQ ID NO: 3777803 - RNA, 15 nt, Human
auguuauuucugcaa

SEQ ID NO: 3777804 - RNA, 19 nt, Human
auguuauuuguaauagaug

SEQ ID NO: 3777805 - RNA, 18 nt, Human
auguucaaagccacauua

SEQ ID NO: 3777806 - RNA, 22 nt, Human
auguucacuuuugacaaaggca

SEQ ID NO: 3777807 - RNA, 16 nt, Human
auguucagaagaaauu

SEQ ID NO: 3777808 - RNA, 23 nt, Human
auguucagaagguugcucuagau

SEQ ID NO: 3777809 - RNA, 22 nt, Human
auguucaguguaauuucuuugc

SEQ ID NO: 3777810 - RNA, 16 nt, Human
auguucaucaauuccc

SEQ ID NO: 3777811 - RNA, 14 nt, Human
auguucauuguaau

SEQ ID NO: 3777812 - RNA, 22 nt, Human
auguucauuguaauguuacuga

SEQ ID NO: 3777813 - RNA, 23 nt, Human
auguucauuguaauguuacugau

SEQ ID NO: 3777814 - RNA, 15 nt, Human
auguuccaauaaaca

SEQ ID NO: 3777815 - RNA, 16 nt, Human
auguuccaauaaacag

SEQ ID NO: 3777816 - RNA, 20 nt, Human
auguuccgaauugagcacaa

SEQ ID NO: 3777817 - RNA, 19 nt, Human
auguuccugaauucuauuu

SEQ ID NO: 3777818 - RNA, 22 nt, Human
auguuccuuuggaagaaaaaau

SEQ ID NO: 3777819 - RNA, 23 nt, Human
auguucgguuuuuuuccuguuuc

SEQ ID NO: 3777820 - RNA, 17 nt, Human
auguucuaaccuuuaca

SEQ ID NO: 3777821 - RNA, 12 nt, Human
auguucuaaggc

SEQ ID NO: 3777822 - RNA, 13 nt, Human
auguucuaaggcu

SEQ ID NO: 3777823 - RNA, 14 nt, Human
auguucuaaggcuc

SEQ ID NO: 3777824 - RNA, 16 nt, Human
auguucuaaggcucug

SEQ ID NO: 3777825 - RNA, 20 nt, Human
auguucuaaggcucugagag

SEQ ID NO: 3777826 - RNA, 22 nt, Human
auguucuaaggcucugagaguc

SEQ ID NO: 3777827 - RNA, 18 nt, Human
auguucuaagucuuucca

SEQ ID NO: 3777828 - RNA, 19 nt, Human
auguucuaagucuuuccau

SEQ ID NO: 3777829 - RNA, 19 nt, Human
auguucuaaguuucuaaga

SEQ ID NO: 3777830 - RNA, 23 nt, Human
auguucuaaguuucuaagauucu

SEQ ID NO: 3777831 - RNA, 20 nt, Human
auguucuaugguuaugaaag

SEQ ID NO: 3777832 - RNA, 21 nt, Human
auguucuaugguuaugaaaga

SEQ ID NO: 3777833 - RNA, 20 nt, Human
auguucuauuuuuuguuuug

SEQ ID NO: 3777834 - RNA, 14 nt, Human
auguucucuaucau

SEQ ID NO: 3777835 - RNA, 15 nt, Human
auguucucuaucauu

SEQ ID NO: 3777836 - RNA, 16 nt, Human
auguucucuaucauuu

SEQ ID NO: 3777837 - RNA, 19 nt, Human
auguucucuaucauuuaau

SEQ ID NO: 3777838 - RNA, 17 nt, Human
auguucucucuucucca

SEQ ID NO: 3777839 - RNA, 18 nt, Human
auguucucugaggacacu

SEQ ID NO: 3777840 - RNA, 14 nt, Human
auguucugacauua

SEQ ID NO: 3777841 - RNA, 13 nt, Human
auguucuggcccu

SEQ ID NO: 3777842 - RNA, 15 nt, Human
auguucugggacaca

SEQ ID NO: 3777843 - RNA, 21 nt, Human
auguucuuaugcaaaauggaa

SEQ ID NO: 3777844 - RNA, 11 nt, Human
auguucuucca

SEQ ID NO: 3777845 - RNA, 20 nt, Human
auguucuuuauauacaauaa

SEQ ID NO: 3777846 - RNA, 16 nt, Human
auguucuuuggaaagu

SEQ ID NO: 3777847 - RNA, 21 nt, Human
auguugaaaaaauuuaaaagu

SEQ ID NO: 3777848 - RNA, 18 nt, Human
auguugaagaauacaguu

SEQ ID NO: 3777849 - RNA, 15 nt, Human
auguugaauacuuuu

SEQ ID NO: 3777850 - RNA, 12 nt, Human
auguugaauauu

SEQ ID NO: 3777851 - RNA, 21 nt, Human
auguugacaucacuggcaugg

SEQ ID NO: 3777852 - RNA, 18 nt, Human
auguugaucauguacuuu

SEQ ID NO: 3777853 - RNA, 20 nt, Human
auguugauccauccagcuug

SEQ ID NO: 3777854 - RNA, 24 nt, Human
auguugauccauccagcuugccag

SEQ ID NO: 3777855 - RNA, 21 nt, Human
auguugauuuuuacuguguuu

SEQ ID NO: 3777856 - RNA, 15 nt, Human
auguugcaaugugaa

SEQ ID NO: 3777857 - RNA, 21 nt, Human
auguugcacacccacucagcu

SEQ ID NO: 3777858 - RNA, 16 nt, Human
auguugccauguguuu

SEQ ID NO: 3777859 - RNA, 13 nt, Human
auguugcccaggc

SEQ ID NO: 3777860 - RNA, 14 nt, Human
auguugcuaacagc

SEQ ID NO: 3777861 - RNA, 19 nt, Human
auguugcuaugugccuuau

SEQ ID NO: 3777862 - RNA, 22 nt, Human
auguugcuaugugccuuauguu

SEQ ID NO: 3777863 - RNA, 20 nt, Human
auguugcugaggagugagga

SEQ ID NO: 3777864 - RNA, 11 nt, Human
auguugcugcc

SEQ ID NO: 3777865 - RNA, 19 nt, Human
auguugcuggacugucaua

SEQ ID NO: 3777866 - RNA, 17 nt, Human
auguugcuuaggaugug

SEQ ID NO: 3777867 - RNA, 23 nt, Human
auguuggacaccuuuagguucuu

SEQ ID NO: 3777868 - RNA, 18 nt, Human
auguuggauuuauaaaug

SEQ ID NO: 3777869 - RNA, 19 nt, Human
auguuggcagaugcagcuc

SEQ ID NO: 3777870 - RNA, 12 nt, Human
auguuggcuggg

SEQ ID NO: 3777871 - RNA, 19 nt, Human
auguugggaaacuuggcuc

SEQ ID NO: 3777872 - RNA, 20 nt, Human
auguugggaaacuuggcucg

SEQ ID NO: 3777873 - RNA, 17 nt, Human
auguuggucaggcuggu

SEQ ID NO: 3777874 - RNA, 14 nt, Human
auguugguguucca

SEQ ID NO: 3777875 - RNA, 18 nt, Human
auguugguugcacuuugu

SEQ ID NO: 3777876 - RNA, 17 nt, Human
auguugguuuacuuuca

SEQ ID NO: 3777877 - RNA, 19 nt, Human
auguugguuuacuuucaaa

SEQ ID NO: 3777878 - RNA, 17 nt, Human
auguuguaauauuucuu

SEQ ID NO: 3777879 - RNA, 15 nt, Human
auguuguaaugcugc

SEQ ID NO: 3777880 - RNA, 12 nt, Human
auguuguagugu

SEQ ID NO: 3777881 - RNA, 19 nt, Human
auguuguagugucccccac

SEQ ID NO: 3777882 - RNA, 22 nt, Human
auuaaucacuguguauauuuga

SEQ ID NO: 3777883 - RNA, 23 nt, Human
auuaaucacuguguauauuugau

SEQ ID NO: 3777884 - RNA, 17 nt, Human
auuaauccacauguuuc

SEQ ID NO: 3777885 - RNA, 20 nt, Human
auuaaucuuaguguaugauu

SEQ ID NO: 3777886 - RNA, 22 nt, Human
auuaaucuuaguguaugauuac

SEQ ID NO: 3777887 - RNA, 18 nt, Human
auuaaucuuucuuuaccu

SEQ ID NO: 3777888 - RNA, 19 nt, Human
auuaaugaaaauaagaauu

SEQ ID NO: 3777889 - RNA, 13 nt, Human
auuaaugaaauau

SEQ ID NO: 3777890 - RNA, 17 nt, Human
auuaaugaaauaucugu

SEQ ID NO: 3777891 - RNA, 11 nt, Human
auuaaugcacu

SEQ ID NO: 3777892 - RNA, 15 nt, Human
auuaaugcacuuucu

SEQ ID NO: 3777893 - RNA, 13 nt, Human
auuaaugcccaga

SEQ ID NO: 3777894 - RNA, 15 nt, Human
auuaaugccuuuaaa

SEQ ID NO: 3777895 - RNA, 16 nt, Human
auuaaugccuuuaaag

SEQ ID NO: 3777896 - RNA, 21 nt, Human
auuaaugccuuuaaaguauga

SEQ ID NO: 3777897 - RNA, 17 nt, Human
auuaauggucuaaaaau

SEQ ID NO: 3777898 - RNA, 12 nt, Human
auuaauguugau

SEQ ID NO: 3777899 - RNA, 13 nt, Human
auuaauuaaacau

SEQ ID NO: 3777900 - RNA, 16 nt, Human
auuaauuggcagcaga

SEQ ID NO: 3777901 - RNA, 18 nt, Human
auuaauugugugaacuug

SEQ ID NO: 3777902 - RNA, 18 nt, Human
auuaauuguuuugcacuu

SEQ ID NO: 3777903 - RNA, 16 nt, Human
auuaauuuaucagauu

SEQ ID NO: 3777904 - RNA, 17 nt, Human
auuaauuuaugcagaau

SEQ ID NO: 3777905 - RNA, 17 nt, Human
auuaauuugauuaacaa

SEQ ID NO: 3777906 - RNA, 22 nt, Human
auuaauuugauuaacaaauaug

SEQ ID NO: 3777907 - RNA, 21 nt, Human
auuaauuugcaucugaaauag

SEQ ID NO: 3777908 - RNA, 16 nt, Human
auuaauuuuuuuauug

SEQ ID NO: 3777909 - RNA, 22 nt, Human
auuacaaaaugacauuuugcca

SEQ ID NO: 3777910 - RNA, 23 nt, Human
auuacaaaguuaaaauuguuauc

SEQ ID NO: 3777911 - RNA, 21 nt, Human
auuacaaaucagaagucaucu

SEQ ID NO: 3777912 - RNA, 22 nt, Human
auuacaaaucagaagucaucuu

SEQ ID NO: 3777913 - RNA, 13 nt, Human
auuacaaauugcu

SEQ ID NO: 3777914 - RNA, 22 nt, Human
auuacaaauugcuuacuuugga

SEQ ID NO: 3777915 - RNA, 15 nt, Human
auuacaacagugaga

SEQ ID NO: 3777916 - RNA, 17 nt, Human
auuacaacggagucaaa

SEQ ID NO: 3777917 - RNA, 14 nt, Human
auuacaaguauuuu

SEQ ID NO: 3777918 - RNA, 15 nt, Human
auuacaauuuuaucu

SEQ ID NO: 3777919 - RNA, 14 nt, Human
auuacacuugguaa

SEQ ID NO: 3777920 - RNA, 15 nt, Human
auuacagauaaaaug

SEQ ID NO: 3777921 - RNA, 20 nt, Human
auuacaggcaccugccacca

SEQ ID NO: 3777922 - RNA, 16 nt, Human
auuacaggcaugugcc

SEQ ID NO: 3777923 - RNA, 17 nt, Human
auuacaggcgugagcca

SEQ ID NO: 3777924 - RNA, 22 nt, Human
auuacaggcgugagccaccucg

SEQ ID NO: 3777925 - RNA, 19 nt, Human
auuacaggcuccugccacc

SEQ ID NO: 3777926 - RNA, 15 nt, Human
auuacagggcacagg

SEQ ID NO: 3777927 - RNA, 16 nt, Human
auuacagggcacaggc

SEQ ID NO: 3777928 - RNA, 13 nt, Human
auuacagguguga

SEQ ID NO: 3777929 - RNA, 12 nt, Human
auuacaguauaa

SEQ ID NO: 3777930 - RNA, 14 nt, Human
auuacaguauaauu

SEQ ID NO: 3777931 - RNA, 18 nt, Human
auuacaguccaaaauacu

SEQ ID NO: 3777932 - RNA, 14 nt, Human
auuacaguguuuau

SEQ ID NO: 3777933 - RNA, 22 nt, Human
auuacauaaauaaauuaaauaa

SEQ ID NO: 3777934 - RNA, 21 nt, Human
auuacauaaucuguacaauga

SEQ ID NO: 3777935 - RNA, 23 nt, Human
auuacauaauuuaguuguuucua

SEQ ID NO: 3777936 - RNA, 14 nt, Human
auuacauccuugug

SEQ ID NO: 3777937 - RNA, 16 nt, Human
auuacauguaaaacau

SEQ ID NO: 3777938 - RNA, 16 nt, Human
auuacauguaauuuga

SEQ ID NO: 3777939 - RNA, 21 nt, Human
auuacauuacugaaaacuuca

SEQ ID NO: 3777940 - RNA, 19 nt, Human
auuacauugcuuuuucuug

SEQ ID NO: 3777941 - RNA, 15 nt, Human
auuacauuuguauaa

SEQ ID NO: 3777942 - RNA, 18 nt, Human
auuacauuuguauaaaau

SEQ ID NO: 3777943 - RNA, 15 nt, Human
auuacauuuucagug

SEQ ID NO: 3777944 - RNA, 20 nt, Human
auuaccaauaggcaaauuaa

SEQ ID NO: 3777945 - RNA, 12 nt, Human
auuaccacugaa

SEQ ID NO: 3777946 - RNA, 12 nt, Human
auuaccagggac

SEQ ID NO: 3777947 - RNA, 13 nt, Human
auuacccaagcaa

SEQ ID NO: 3777948 - RNA, 15 nt, Human
auuacccaagcaaaa

SEQ ID NO: 3777949 - RNA, 19 nt, Human
auuacccagcuaaauaauc

SEQ ID NO: 3777950 - RNA, 19 nt, Human
auuacccccuccuucagac

SEQ ID NO: 3777951 - RNA, 17 nt, Human
auuaccgcguuguaaaa

SEQ ID NO: 3777952 - RNA, 18 nt, Human
auuaccgcguuguaaaau

SEQ ID NO: 3777953 - RNA, 21 nt, Human
auuaccgcguuguaaaauaua

SEQ ID NO: 3777954 - RNA, 17 nt, Human
auuaccuccugagaaaa

SEQ ID NO: 3777955 - RNA, 19 nt, Human
auuaccuucuauuggucuc

SEQ ID NO: 3777956 - RNA, 23 nt, Human
auuaccuuuuaccagcuuuuaac

SEQ ID NO: 3777957 - RNA, 20 nt, Human
auuaccuuuuuugauaaagu

SEQ ID NO: 3777958 - RNA, 21 nt, Human
auuacguaugucugguucuca

SEQ ID NO: 3777959 - RNA, 14 nt, Human
auuacgugagccag

SEQ ID NO: 3777960 - RNA, 20 nt, Human
auuacgugagccagguaaug

SEQ ID NO: 3777961 - RNA, 13 nt, Human
auuacgugcucug

SEQ ID NO: 3777962 - RNA, 21 nt, Human
auuacuaacuucuaaaacugu

SEQ ID NO: 3777963 - RNA, 20 nt, Human
auuacuaaggaguaaucugu

SEQ ID NO: 3777964 - RNA, 19 nt, Human
auuacuaauuuuacacauu

SEQ ID NO: 3777965 - RNA, 20 nt, Human
auuacuaauuuuacacauua

SEQ ID NO: 3777966 - RNA, 19 nt, Human
auuacuccuauuuuuguaa

SEQ ID NO: 3777967 - RNA, 20 nt, Human
auuacuccuauuuuuguaaa

SEQ ID NO: 3777968 - RNA, 15 nt, Human
auuacucuuaaggaa

SEQ ID NO: 3777969 - RNA, 17 nt, Human
auuacucuuguaagauu

SEQ ID NO: 3777970 - RNA, 20 nt, Human
auuacugccauucacuucau

SEQ ID NO: 3777971 - RNA, 21 nt, Human
auuacuggccuuuuucauuua

SEQ ID NO: 3777972 - RNA, 15 nt, Human
auuacugggccuuag

SEQ ID NO: 3777973 - RNA, 15 nt, Human
auuacugguccaaaa

SEQ ID NO: 3777974 - RNA, 13 nt, Human
auuacuguaagaa

SEQ ID NO: 3777975 - RNA, 15 nt, Human
auuacugucaauaaa

SEQ ID NO: 3777976 - RNA, 17 nt, Human
auuacugucaauaaaca

SEQ ID NO: 3777977 - RNA, 17 nt, Human
auuacuguuuaagacac

SEQ ID NO: 3777978 - RNA, 16 nt, Human
auuacuguuuauuucu

SEQ ID NO: 3777979 - RNA, 13 nt, Human
auuacuguuuguc

SEQ ID NO: 3777980 - RNA, 15 nt, Human
auuacuuaucaucca

SEQ ID NO: 3777981 - RNA, 19 nt, Human
auuacuuaucccugcccau

SEQ ID NO: 3777982 - RNA, 15 nt, Human
auuacuuauuuuuga

SEQ ID NO: 3777983 - RNA, 16 nt, Human
auuacuuauuuuugac

SEQ ID NO: 3777984 - RNA, 17 nt, Human
auuacuuauuuuugaca

SEQ ID NO: 3777985 - RNA, 22 nt, Human
auuacuucucuauaaaaaauau

SEQ ID NO: 3777986 - RNA, 13 nt, Human
auuacuuguaaau

SEQ ID NO: 3777987 - RNA, 20 nt, Human
auuacuuguaaauauaaaga

SEQ ID NO: 3777988 - RNA, 14 nt, Human
auuacuuuaucacu

SEQ ID NO: 3777989 - RNA, 14 nt, Human
auuacuuuuuucca

SEQ ID NO: 3777990 - RNA, 16 nt, Human
auuagaaaaaaauuac

SEQ ID NO: 3777991 - RNA, 12 nt, Human
auuagaaaacuu

SEQ ID NO: 3777992 - RNA, 16 nt, Human
auuagaaaacuuuguu

SEQ ID NO: 3777993 - RNA, 17 nt, Human
auuagaaaacuuuguua

SEQ ID NO: 3777994 - RNA, 18 nt, Human
auuagaaaacuuuguuag

SEQ ID NO: 3777995 - RNA, 13 nt, Human
auuagaaaauguu

SEQ ID NO: 3777996 - RNA, 22 nt, Human
auuagaaaauguuauuuaacag

SEQ ID NO: 3777997 - RNA, 11 nt, Human
auuagaaauga

SEQ ID NO: 3777998 - RNA, 23 nt, Human
auuagaaauuagcugugugaaau

SEQ ID NO: 3777999 - RNA, 23 nt, Human
auuagaacaggcaagugaagaaa

SEQ ID NO: 3778000 - RNA, 10 nt, Human
auuagaacuu

SEQ ID NO: 3778001 - RNA, 15 nt, Human
auuagaagacaacag

SEQ ID NO: 3778002 - RNA, 13 nt, Human
auuagaagacauu

SEQ ID NO: 3778003 - RNA, 14 nt, Human
auuagaaguguuaa

SEQ ID NO: 3778004 - RNA, 13 nt, Human
auuagaauagugu

SEQ ID NO: 3778005 - RNA, 22 nt, Human
auuagaauaguguucugcaaaa

SEQ ID NO: 3778006 - RNA, 15 nt, Human
auuagaauuaccauu

SEQ ID NO: 3778007 - RNA, 12 nt, Human
auuagaauucug

SEQ ID NO: 3778008 - RNA, 15 nt, Human
auuagaauucuguau

SEQ ID NO: 3778009 - RNA, 18 nt, Human
auuagaauucuguauaga

SEQ ID NO: 3778010 - RNA, 21 nt, Human
auuagaauucuguauagauua

SEQ ID NO: 3778011 - RNA, 13 nt, Human
auuagacagaaca

SEQ ID NO: 3778012 - RNA, 14 nt, Human
auuagacagaacac

SEQ ID NO: 3778013 - RNA, 17 nt, Human
auuagacagaacaccua

SEQ ID NO: 3778014 - RNA, 22 nt, Human
auuagacuggaacuugaacuga

SEQ ID NO: 3778015 - RNA, 14 nt, Human
auuagacuggacag

SEQ ID NO: 3778016 - RNA, 22 nt, Human
auuagacuguaggaagaguagc

SEQ ID NO: 3778017 - RNA, 18 nt, Human
auuagacugugauucaga

SEQ ID NO: 3778018 - RNA, 14 nt, Human
auuagacuucuguu

SEQ ID NO: 3778019 - RNA, 16 nt, Human
auuagacuucuguuuu

SEQ ID NO: 3778020 - RNA, 19 nt, Human
auuagacuucuguuuucaa

SEQ ID NO: 3778021 - RNA, 15 nt, Human
auuagagaguguuga

SEQ ID NO: 3778022 - RNA, 13 nt, Human
auuagagcaggcg

SEQ ID NO: 3778023 - RNA, 14 nt, Human
auuagagcauugaa

SEQ ID NO: 3778024 - RNA, 16 nt, Human
auuagagccuguaaac

SEQ ID NO: 3778025 - RNA, 19 nt, Human
auuagagggaggagaauga

SEQ ID NO: 3778026 - RNA, 22 nt, Human
auuagagggagguguuuaaaga

SEQ ID NO: 3778027 - RNA, 18 nt, Human
auuagauaaauguccauu

SEQ ID NO: 3778028 - RNA, 18 nt, Human
auuuagaaacuaauugac

SEQ ID NO: 3778029 - RNA, 15 nt, Human
auuuagaaauauaau

SEQ ID NO: 3778030 - RNA, 18 nt, Human
auuuagaagaaagauguu

SEQ ID NO: 3778031 - RNA, 23 nt, Human
auuuagaagccaacuaugauuau

SEQ ID NO: 3778032 - RNA, 11 nt, Human
auuuagaaugg

SEQ ID NO: 3778033 - RNA, 14 nt, Human
auuuagacaagaga

SEQ ID NO: 3778034 - RNA, 20 nt, Human
auuuagacaagagaugggaa

SEQ ID NO: 3778035 - RNA, 19 nt, Human
auuuagagcuagucuuuca

SEQ ID NO: 3778036 - RNA, 13 nt, Human
auuuagauguaua

SEQ ID NO: 3778037 - RNA, 18 nt, Human
auuuagcaaauaauuucc

SEQ ID NO: 3778038 - RNA, 18 nt, Human
auuuagccaccaucuuug

SEQ ID NO: 3778039 - RNA, 16 nt, Human
auuuagcccucacauu

SEQ ID NO: 3778040 - RNA, 16 nt, Human
auuuagccgggcgcgg

SEQ ID NO: 3778041 - RNA, 15 nt, Human
auuuagccuguccug

SEQ ID NO: 3778042 - RNA, 21 nt, Human
auuuagcuccaaaccuucaca

SEQ ID NO: 3778043 - RNA, 12 nt, Human
auuuaggaacuu

SEQ ID NO: 3778044 - RNA, 22 nt, Human
auuuaggcagauugaaaaggac

SEQ ID NO: 3778045 - RNA, 20 nt, Human
auuuagggagaaauguuguu

SEQ ID NO: 3778046 - RNA, 22 nt, Human
auuuagggagaaauguuguuca

SEQ ID NO: 3778047 - RNA, 19 nt, Human
auuuagggaguauucuaau

SEQ ID NO: 3778048 - RNA, 17 nt, Human
auuuaggguacuaaauu

SEQ ID NO: 3778049 - RNA, 19 nt, Human
auuuagguuuuuauuagua

SEQ ID NO: 3778050 - RNA, 23 nt, Human
auuuagguuuuuguuuguuuccu

SEQ ID NO: 3778051 - RNA, 14 nt, Human
auuuaguaaaccaa

SEQ ID NO: 3778052 - RNA, 15 nt, Human
auuuaguaagaauac

SEQ ID NO: 3778053 - RNA, 18 nt, Human
auuuaguauuuuguuuca

SEQ ID NO: 3778054 - RNA, 22 nt, Human
auuuagucucuuuauuccuagu

SEQ ID NO: 3778055 - RNA, 13 nt, Human
auuuaguguucau

SEQ ID NO: 3778056 - RNA, 23 nt, Human
auuuaguguuuuuuuauuucuac

SEQ ID NO: 3778057 - RNA, 16 nt, Human
auuuaguuauaguuuc

SEQ ID NO: 3778058 - RNA, 13 nt, Human
auuuaguuauuga

SEQ ID NO: 3778059 - RNA, 15 nt, Human
auuuaguuugauuau

SEQ ID NO: 3778060 - RNA, 19 nt, Human
auuuaguuuuuguucuuaa

SEQ ID NO: 3778061 - RNA, 23 nt, Human
auuuauaaaaauaaaaaacacug

SEQ ID NO: 3778062 - RNA, 15 nt, Human
auuuauaaaacuucu

SEQ ID NO: 3778063 - RNA, 15 nt, Human
auuuauaaacagaca

SEQ ID NO: 3778064 - RNA, 21 nt, Human
auuuauaaacagacaauaugu

SEQ ID NO: 3778065 - RNA, 14 nt, Human
auuuauaaaugcua

SEQ ID NO: 3778066 - RNA, 13 nt, Human
auuuauaacucau

SEQ ID NO: 3778067 - RNA, 15 nt, Human
auuuauaacucauca

SEQ ID NO: 3778068 - RNA, 19 nt, Human
auuuauaacucaucauaaa

SEQ ID NO: 3778069 - RNA, 17 nt, Human
auuuauaagcagauuua

SEQ ID NO: 3778070 - RNA, 15 nt, Human
auuuauaauacagaa

SEQ ID NO: 3778071 - RNA, 17 nt, Human
auuuauaauacagaauc

SEQ ID NO: 3778072 - RNA, 13 nt, Human
auuuauaaucacu

SEQ ID NO: 3778073 - RNA, 14 nt, Human
auuuauaauguuag

SEQ ID NO: 3778074 - RNA, 11 nt, Human
auuuauaauug

SEQ ID NO: 3778075 - RNA, 12 nt, Human
auuuauaauuuu

SEQ ID NO: 3778076 - RNA, 14 nt, Human
auuuauacaaauua

SEQ ID NO: 3778077 - RNA, 22 nt, Human
auuuauaccucaaacuaucugg

SEQ ID NO: 3778078 - RNA, 23 nt, Human
auuuauaccucaauuuucacugu

SEQ ID NO: 3778079 - RNA, 15 nt, Human
auuuauacuggcaug

SEQ ID NO: 3778080 - RNA, 17 nt, Human
auuuauacuguauauau

SEQ ID NO: 3778081 - RNA, 13 nt, Human
auuuauaguaaug

SEQ ID NO: 3778082 - RNA, 12 nt, Human
auuuauaguuug

SEQ ID NO: 3778083 - RNA, 14 nt, Human
auuuauaguuugua

SEQ ID NO: 3778084 - RNA, 15 nt, Human
auuuauauaaaugua

SEQ ID NO: 3778085 - RNA, 15 nt, Human
auuuauauaaauuuu

SEQ ID NO: 3778086 - RNA, 15 nt, Human
auuuauauaauuaug

SEQ ID NO: 3778087 - RNA, 16 nt, Human
auuuauauaauuaugu

SEQ ID NO: 3778088 - RNA, 20 nt, Human
auuuauauaauuauguuauu

SEQ ID NO: 3778089 - RNA, 22 nt, Human
auuuauauaauuauguuauuga

SEQ ID NO: 3778090 - RNA, 15 nt, Human
auuuauauagauuau

SEQ ID NO: 3778091 - RNA, 14 nt, Human
auuuauauauguau

SEQ ID NO: 3778092 - RNA, 14 nt, Human
auuuauauauuuau

SEQ ID NO: 3778093 - RNA, 15 nt, Human
auuuauauauuuaua

SEQ ID NO: 3778094 - RNA, 16 nt, Human
auuuauauauuuauaa

SEQ ID NO: 3778095 - RNA, 15 nt, Human
auuuauaucacaugu

SEQ ID NO: 3778096 - RNA, 11 nt, Human
auuuauaugua

SEQ ID NO: 3778097 - RNA, 16 nt, Human
auuuauauguacauga

SEQ ID NO: 3778098 - RNA, 15 nt, Human
auuuauauguacugu

SEQ ID NO: 3778099 - RNA, 21 nt, Human
auuuauauguauguguuuaga

SEQ ID NO: 3778100 - RNA, 20 nt, Human
auuuauauugauaagaucuu

SEQ ID NO: 3778101 - RNA, 21 nt, Human
auuuauauuguaaauauugug

SEQ ID NO: 3778102 - RNA, 16 nt, Human
auuuauauuuauugac

SEQ ID NO: 3778103 - RNA, 18 nt, Human
auuuauauuuuuauuuua

SEQ ID NO: 3778104 - RNA, 20 nt, Human
auuuaucaaagcauagaugu

SEQ ID NO: 3778105 - RNA, 13 nt, Human
auuuaucaaauca

SEQ ID NO: 3778106 - RNA, 14 nt, Human
auuuaucaaaucag

SEQ ID NO: 3778107 - RNA, 14 nt, Human
auuuaucacacaaa

SEQ ID NO: 3778108 - RNA, 16 nt, Human
auuuaucacacuucug

SEQ ID NO: 3778109 - RNA, 14 nt, Human
auuuaucagugaca

SEQ ID NO: 3778110 - RNA, 20 nt, Human
auuuauccacaggaaagugu

SEQ ID NO: 3778111 - RNA, 20 nt, Human
auuuauccugaaauuucaga

SEQ ID NO: 3778112 - RNA, 21 nt, Human
auuuauccugaaauuucagau

SEQ ID NO: 3778113 - RNA, 15 nt, Human
auuuaucuaaauuaa

SEQ ID NO: 3778114 - RNA, 11 nt, Human
auuuaucuaua

SEQ ID NO: 3778115 - RNA, 15 nt, Human
auuuaucuauaauuu

SEQ ID NO: 3778116 - RNA, 20 nt, Human
auuuaucuauuguaagauaa

SEQ ID NO: 3778117 - RNA, 19 nt, Human
auuuaucugagucaacucc

SEQ ID NO: 3778118 - RNA, 16 nt, Human
auuuaucuugaaggaa

SEQ ID NO: 3778119 - RNA, 20 nt, Human
auuuaucuugaaggaaaaau

SEQ ID NO: 3778120 - RNA, 16 nt, Human
auuuaucuuucaaaga

SEQ ID NO: 3778121 - RNA, 13 nt, Human
auuuaucuuugau

SEQ ID NO: 3778122 - RNA, 22 nt, Human
auuuaugaaguuuaaaacagua

SEQ ID NO: 3778123 - RNA, 18 nt, Human
auuuaugaguuuuugaua

SEQ ID NO: 3778124 - RNA, 17 nt, Human
auuuaugauuuaauaaa

SEQ ID NO: 3778125 - RNA, 13 nt, Human
auuuaugcacauu

SEQ ID NO: 3778126 - RNA, 22 nt, Human
auuuaugcauauuauuuuaugu

SEQ ID NO: 3778127 - RNA, 12 nt, Human
auuuauguagau

SEQ ID NO: 3778128 - RNA, 14 nt, Human
auuuauguauggug

SEQ ID NO: 3778129 - RNA, 12 nt, Human
auuuauguauug

SEQ ID NO: 3778130 - RNA, 15 nt, Human
auuuauguccaggug

SEQ ID NO: 3778131 - RNA, 18 nt, Human
auuuaugugugaggagcu

SEQ ID NO: 3778132 - RNA, 23 nt, Human
auuuauuaaacagauuuuuacaa

SEQ ID NO: 3778133 - RNA, 16 nt, Human
auuuauuaaagaaaaa

SEQ ID NO: 3778134 - RNA, 23 nt, Human
auuuauuaaagaaaaaaauguau

SEQ ID NO: 3778135 - RNA, 17 nt, Human
auuuauuaaauaaaauc

SEQ ID NO: 3778136 - RNA, 16 nt, Human
auuuauuaacuuaaua

SEQ ID NO: 3778137 - RNA, 22 nt, Human
auuuauuaagauggauucucag

SEQ ID NO: 3778138 - RNA, 20 nt, Human
auuuauuaauauauauuauc

SEQ ID NO: 3778139 - RNA, 15 nt, Human
auuuauuaauugcuu

SEQ ID NO: 3778140 - RNA, 18 nt, Human
auuuauuaauugcuuuga

SEQ ID NO: 3778141 - RNA, 12 nt, Human
auuuauuacaac

SEQ ID NO: 3778142 - RNA, 12 nt, Human
auuuauuacaua

SEQ ID NO: 3778143 - RNA, 22 nt, Human
auuuauuagcccugcauuuuca

SEQ ID NO: 3778144 - RNA, 17 nt, Human
auuuauuauugaaauug

SEQ ID NO: 3778145 - RNA, 13 nt, Human
auuuauuauuuau

SEQ ID NO: 3778146 - RNA, 14 nt, Human
auuuauuauuuuca

SEQ ID NO: 3778147 - RNA, 11 nt, Human
auuuauucaau

SEQ ID NO: 3778148 - RNA, 17 nt, Human
auuuauucaauaaagua

SEQ ID NO: 3778149 - RNA, 19 nt, Human
auuuauucugggaauguau

SEQ ID NO: 3778150 - RNA, 11 nt, Human
auuuauucuuu

SEQ ID NO: 3778151 - RNA, 13 nt, Human
auuuauugaaaug

SEQ ID NO: 3778152 - RNA, 22 nt, Human
auuuauugaaaugauuucacag

SEQ ID NO: 3778153 - RNA, 18 nt, Human
auuuauugaagaaacaga

SEQ ID NO: 3778154 - RNA, 14 nt, Human
auuuauugacucuu

SEQ ID NO: 3778155 - RNA, 20 nt, Human
auuuauugacucuugaguug

SEQ ID NO: 3778156 - RNA, 15 nt, Human
auuuauugaggaaaa

SEQ ID NO: 3778157 - RNA, 18 nt, Human
auuuauugaggaaaaaua

SEQ ID NO: 3778158 - RNA, 22 nt, Human
auuuauugcagaggauguucau

SEQ ID NO: 3778159 - RNA, 19 nt, Human
auuuauugcuugauacuuu

SEQ ID NO: 3778160 - RNA, 16 nt, Human
auuuauuguuuaugua

SEQ ID NO: 3778161 - RNA, 16 nt, Human
auuuauuuaaaagauu

SEQ ID NO: 3778162 - RNA, 14 nt, Human
auuuauuuaaaugu

SEQ ID NO: 3778163 - RNA, 12 nt, Human
auuuauuuaaua

SEQ ID NO: 3778164 - RNA, 17 nt, Human
auuuauuuaaugugagu

SEQ ID NO: 3778165 - RNA, 21 nt, Human
auuuauuuaaugugaguuugg

SEQ ID NO: 3778166 - RNA, 15 nt, Human
auuuauuuaauguua

SEQ ID NO: 3778167 - RNA, 13 nt, Human
auuuauuuacaaa

SEQ ID NO: 3778168 - RNA, 24 nt, Human
auuuauuuacugagcuucucugug

SEQ ID NO: 3778169 - RNA, 15 nt, Human
auuuauuuauguacu

SEQ ID NO: 3778170 - RNA, 16 nt, Human
auuuauuuauuaagau

SEQ ID NO: 3778171 - RNA, 14 nt, Human
auuuauuucaaaaa

SEQ ID NO: 3778172 - RNA, 19 nt, Human
auuuauuuccaauguuuca

SEQ ID NO: 3778173 - RNA, 23 nt, Human
auuuauuuccuaguucuguagaa

SEQ ID NO: 3778174 - RNA, 23 nt, Human
auuuccuugaauguggcuugaga

SEQ ID NO: 3778175 - RNA, 14 nt, Human
auuuccuuuaugug

SEQ ID NO: 3778176 - RNA, 15 nt, Human
auuuccuuuauguga

SEQ ID NO: 3778177 - RNA, 18 nt, Human
auuuccuuuaugugaauu

SEQ ID NO: 3778178 - RNA, 18 nt, Human
auuuccuuuggagcuuuu

SEQ ID NO: 3778179 - RNA, 15 nt, Human
auuuccuuuuugaca

SEQ ID NO: 3778180 - RNA, 17 nt, Human
auuuccuuuuugacacu

SEQ ID NO: 3778181 - RNA, 20 nt, Human
auuuccuuuuugacacugaa

SEQ ID NO: 3778182 - RNA, 15 nt, Human
auuucgcuucuuaga

SEQ ID NO: 3778183 - RNA, 21 nt, Human
auuucgucuguuuauaaacau

SEQ ID NO: 3778184 - RNA, 14 nt, Human
auuucgugagcccc

SEQ ID NO: 3778185 - RNA, 20 nt, Human
auuucgugggucuguuuucc

SEQ ID NO: 3778186 - RNA, 20 nt, Human
auuucuaaaaaacagaggcc

SEQ ID NO: 3778187 - RNA, 12 nt, Human
auuucuaaaaga

SEQ ID NO: 3778188 - RNA, 14 nt, Human
auuucuaaaaucuu

SEQ ID NO: 3778189 - RNA, 13 nt, Human
auuucuaaaucuc

SEQ ID NO: 3778190 - RNA, 23 nt, Human
auuucuaacucugauguaaauga

SEQ ID NO: 3778191 - RNA, 19 nt, Human
auuucuaauuauguagcuc

SEQ ID NO: 3778192 - RNA, 15 nt, Human
auuucuacugucaaa

SEQ ID NO: 3778193 - RNA, 21 nt, Human
auuucuacugucaaaugaugu

SEQ ID NO: 3778194 - RNA, 15 nt, Human
auuucuacugugacu

SEQ ID NO: 3778195 - RNA, 18 nt, Human
auuucuacugugacugau

SEQ ID NO: 3778196 - RNA, 14 nt, Human
auuucuagaaacaa

SEQ ID NO: 3778197 - RNA, 16 nt, Human
auuucuagccugcacu

SEQ ID NO: 3778198 - RNA, 16 nt, Human
auuucuagcuuaucua

SEQ ID NO: 3778199 - RNA, 15 nt, Human
auuucuaggaagaau

SEQ ID NO: 3778200 - RNA, 16 nt, Human
auuucuaggaagaauu

SEQ ID NO: 3778201 - RNA, 17 nt, Human
auuucuaggaagaauuu

SEQ ID NO: 3778202 - RNA, 20 nt, Human
auuucuagguaggaaaugug

SEQ ID NO: 3778203 - RNA, 21 nt, Human
auuucuaguccaaaauuacaa

SEQ ID NO: 3778204 - RNA, 17 nt, Human
auuucuaguuauuuauu

SEQ ID NO: 3778205 - RNA, 17 nt, Human
auuucuauagccaaaaa

SEQ ID NO: 3778206 - RNA, 13 nt, Human
auuucuaucccaa

SEQ ID NO: 3778207 - RNA, 14 nt, Human
auuucuaugaaaua

SEQ ID NO: 3778208 - RNA, 14 nt, Human
auuucuaugagaaa

SEQ ID NO: 3778209 - RNA, 19 nt, Human
auuucuaugcugaguuugu

SEQ ID NO: 3778210 - RNA, 21 nt, Human
auuucuaugcugaguuugugc

SEQ ID NO: 3778211 - RNA, 13 nt, Human
auuucuauuuauu

SEQ ID NO: 3778212 - RNA, 15 nt, Human
auuucuauuucuccu

SEQ ID NO: 3778213 - RNA, 18 nt, Human
auuucuauuuuuguagaa

SEQ ID NO: 3778214 - RNA, 19 nt, Human
auuucucaacaaagcacag

SEQ ID NO: 3778215 - RNA, 23 nt, Human
auuucucacacucuaacuguaua

SEQ ID NO: 3778216 - RNA, 14 nt, Human
auuucucauguuuu

SEQ ID NO: 3778217 - RNA, 17 nt, Human
auuucuccagaacccau

SEQ ID NO: 3778218 - RNA, 15 nt, Human
auuucuccauacgca

SEQ ID NO: 3778219 - RNA, 19 nt, Human
auuucuccucccuuccuuu

SEQ ID NO: 3778220 - RNA, 10 nt, Human
auuucuccuu

SEQ ID NO: 3778221 - RNA, 15 nt, Human
auuucuccuuugaua

SEQ ID NO: 3778222 - RNA, 20 nt, Human
auuucuccuuugauaaaaua

SEQ ID NO: 3778223 - RNA, 15 nt, Human
auuucucuuaaguac

SEQ ID NO: 3778224 - RNA, 20 nt, Human
auuucugaagguagcauucu

SEQ ID NO: 3778225 - RNA, 11 nt, Human
auuucugagaa

SEQ ID NO: 3778226 - RNA, 23 nt, Human
auuucugagaagguccuuaauga

SEQ ID NO: 3778227 - RNA, 15 nt, Human
auuucugauauagaa

SEQ ID NO: 3778228 - RNA, 11 nt, Human
auuucugauuu

SEQ ID NO: 3778229 - RNA, 19 nt, Human
auuucugauuuuauguaaa

SEQ ID NO: 3778230 - RNA, 13 nt, Human
auuucugcaaaca

SEQ ID NO: 3778231 - RNA, 13 nt, Human
auuucugcauaug

SEQ ID NO: 3778232 - RNA, 22 nt, Human
auuucugcauauguugaauacu

SEQ ID NO: 3778233 - RNA, 23 nt, Human
auuucugcauauguugaauacuu

SEQ ID NO: 3778234 - RNA, 14 nt, Human
auuucugcugaauu

SEQ ID NO: 3778235 - RNA, 20 nt, Human
auuucugcugaauuuucaca

SEQ ID NO: 3778236 - RNA, 18 nt, Human
auuucugggucuuuugcu

SEQ ID NO: 3778237 - RNA, 23 nt, Human
auuucuguaaauaccauugacac

SEQ ID NO: 3778238 - RNA, 13 nt, Human
auuucuguauaua

SEQ ID NO: 3778239 - RNA, 20 nt, Human
auuucugucacaguaaaaau

SEQ ID NO: 3778240 - RNA, 23 nt, Human
auuucugucacaguaaaaauaaa

SEQ ID NO: 3778241 - RNA, 16 nt, Human
auuucugugcccuccu

SEQ ID NO: 3778242 - RNA, 11 nt, Human
auuucuguguu

SEQ ID NO: 3778243 - RNA, 16 nt, Human
auuucuguuuagauaa

SEQ ID NO: 3778244 - RNA, 22 nt, Human
auuucuuauacgcuuuucuuug

SEQ ID NO: 3778245 - RNA, 14 nt, Human
auuucuuauauaug

SEQ ID NO: 3778246 - RNA, 14 nt, Human
auuucuuaugugac

SEQ ID NO: 3778247 - RNA, 19 nt, Human
auuucuuaugugacauuaa

SEQ ID NO: 3778248 - RNA, 21 nt, Human
auuucuuaugugacauuaaca

SEQ ID NO: 3778249 - RNA, 15 nt, Human
auuucuucaaaaugu

SEQ ID NO: 3778250 - RNA, 19 nt, Human
auuucuucaaaauguauau

SEQ ID NO: 3778251 - RNA, 13 nt, Human
auuucuucaccag

SEQ ID NO: 3778252 - RNA, 18 nt, Human
auuucuucagucagaaaa

SEQ ID NO: 3778253 - RNA, 16 nt, Human
auuucuuccacaagag

SEQ ID NO: 3778254 - RNA, 20 nt, Human
auuucuuccacaagagccca

SEQ ID NO: 3778255 - RNA, 20 nt, Human
auuucuuccuaccaagucaa

SEQ ID NO: 3778256 - RNA, 17 nt, Human
auuucuucguucuuuuu

SEQ ID NO: 3778257 - RNA, 19 nt, Human
auuucuucguucuuuuuaa

SEQ ID NO: 3778258 - RNA, 18 nt, Human
auuucuugggcccuccug

SEQ ID NO: 3778259 - RNA, 20 nt, Human
auuucuugggcccuccugaa

SEQ ID NO: 3778260 - RNA, 19 nt, Human
auuucuugguaagaagccg

SEQ ID NO: 3778261 - RNA, 13 nt, Human
auuucuuguuugu

SEQ ID NO: 3778262 - RNA, 18 nt, Human
auuucuuuaaaagaauga

SEQ ID NO: 3778263 - RNA, 20 nt, Human
auuucuuuaaaagaaugacu

SEQ ID NO: 3778264 - RNA, 21 nt, Human
auuucuuuaaaagaaugacua

SEQ ID NO: 3778265 - RNA, 22 nt, Human
auuucuuuauaaaauuuacugu

SEQ ID NO: 3778266 - RNA, 22 nt, Human
auuucuuuauauuuauccacua

SEQ ID NO: 3778267 - RNA, 13 nt, Human
auuucuuuccaga

SEQ ID NO: 3778268 - RNA, 22 nt, Human
auuucuuugaaaaaaaauaaau

SEQ ID NO: 3778269 - RNA, 21 nt, Human
auuucuuugccuguucaguua

SEQ ID NO: 3778270 - RNA, 17 nt, Human
auuucuuugcuguaaga

SEQ ID NO: 3778271 - RNA, 22 nt, Human
auuucuuugcuguaagaugucu

SEQ ID NO: 3778272 - RNA, 21 nt, Human
auuucuuuguuaucaaacuuc

SEQ ID NO: 3778273 - RNA, 22 nt, Human
auuucuuuguuaucaaacuuca

SEQ ID NO: 3778274 - RNA, 18 nt, Human
auuucuuuucuuccuggc

SEQ ID NO: 3778275 - RNA, 19 nt, Human
auuucuuuucuuuuuacau

SEQ ID NO: 3778276 - RNA, 23 nt, Human
auuucuuuugccguuauuaaaaa

SEQ ID NO: 3778277 - RNA, 21 nt, Human
auuucuuuuguaauaaacuau

SEQ ID NO: 3778278 - RNA, 18 nt, Human
auuucuuuuuuaaaugaa

SEQ ID NO: 3778279 - RNA, 22 nt, Human
auuucuuuuuuaaaugaagaaa

SEQ ID NO: 3778280 - RNA, 14 nt, Human
auuugaaaaaaacu

SEQ ID NO: 3778281 - RNA, 20 nt, Human
auuugaaaaauauaaaauua

SEQ ID NO: 3778282 - RNA, 17 nt, Human
auuugaaaacagaaauu

SEQ ID NO: 3778283 - RNA, 18 nt, Human
auuugaaaaugauaaaag

SEQ ID NO: 3778284 - RNA, 11 nt, Human
auuugaaagaa

SEQ ID NO: 3778285 - RNA, 14 nt, Human
auuugaaagaaagg

SEQ ID NO: 3778286 - RNA, 16 nt, Human
auuugaaagugccuuu

SEQ ID NO: 3778287 - RNA, 15 nt, Human
auuugaaauaagaau

SEQ ID NO: 3778288 - RNA, 11 nt, Human
auuugaaauuu

SEQ ID NO: 3778289 - RNA, 20 nt, Human
auuugaacaaugaaguugaa

SEQ ID NO: 3778290 - RNA, 13 nt, Human
auuugaacacugg

SEQ ID NO: 3778291 - RNA, 18 nt, Human
auuugaacacuuggugcu

SEQ ID NO: 3778292 - RNA, 19 nt, Human
auuugaagaaugaacaaau

SEQ ID NO: 3778293 - RNA, 20 nt, Human
auuugaagacaaaaauacuc

SEQ ID NO: 3778294 - RNA, 18 nt, Human
auuugaagguagaauguu

SEQ ID NO: 3778295 - RNA, 14 nt, Human
auuugaaggucugc

SEQ ID NO: 3778296 - RNA, 17 nt, Human
auuugaaguguaccugu

SEQ ID NO: 3778297 - RNA, 22 nt, Human
auuugaaguguaccuguguaca

SEQ ID NO: 3778298 - RNA, 23 nt, Human
auuugaaucagccuacaggccuc

SEQ ID NO: 3778299 - RNA, 14 nt, Human
auuugaaugaaaaa

SEQ ID NO: 3778300 - RNA, 16 nt, Human
auuugaaugaaaaauu

SEQ ID NO: 3778301 - RNA, 19 nt, Human
auuugaaugaaaaauuuaa

SEQ ID NO: 3778302 - RNA, 17 nt, Human
auuugaauggguccauu

SEQ ID NO: 3778303 - RNA, 22 nt, Human
auuugaauguaugcuucauaca

SEQ ID NO: 3778304 - RNA, 23 nt, Human
auuugaauguaugcuucauacag

SEQ ID NO: 3778305 - RNA, 18 nt, Human
auuugaauguuaagcaga

SEQ ID NO: 3778306 - RNA, 19 nt, Human
auuugaauguuaagcagau

SEQ ID NO: 3778307 - RNA, 19 nt, Human
auuugaauuaaaacuucuu

SEQ ID NO: 3778308 - RNA, 21 nt, Human
auuugaauuaaaacuucuuaa

SEQ ID NO: 3778309 - RNA, 23 nt, Human
auuugacaaaauuuguugaaauu

SEQ ID NO: 3778310 - RNA, 17 nt, Human
auuugacuauucuguau

SEQ ID NO: 3778311 - RNA, 13 nt, Human
auuugacuguuuu

SEQ ID NO: 3778312 - RNA, 17 nt, Human
auuugacuguuuuuacc

SEQ ID NO: 3778313 - RNA, 19 nt, Human
auuugacuugcaugaagag

SEQ ID NO: 3778314 - RNA, 18 nt, Human
auuugacuuuaauuuaug

SEQ ID NO: 3778315 - RNA, 17 nt, Human
auuugagaaaugcauau

SEQ ID NO: 3778316 - RNA, 23 nt, Human
auuugagaauagacccuuacuag

SEQ ID NO: 3778317 - RNA, 17 nt, Human
auuugagagaaauauga

SEQ ID NO: 3778318 - RNA, 17 nt, Human
caacagcaaaucacgac

SEQ ID NO: 3778319 - RNA, 17 nt, Human
caacagccacucagaaa

SEQ ID NO: 3778320 - RNA, 15 nt, Human
caacagccucacuug

SEQ ID NO: 3778321 - RNA, 12 nt, Human
caacagcgccca

SEQ ID NO: 3778322 - RNA, 15 nt, Human
caacagcgcccaaag

SEQ ID NO: 3778323 - RNA, 23 nt, Human
caacagcguuccuagagaagaca

SEQ ID NO: 3778324 - RNA, 15 nt, Human
caacagcuacaacag

SEQ ID NO: 3778325 - RNA, 22 nt, Human
caacagcucaagucuucccuga

SEQ ID NO: 3778326 - RNA, 19 nt, Human
caacagcuggacccugacc

SEQ ID NO: 3778327 - RNA, 15 nt, Human
caacaggagaauuuu

SEQ ID NO: 3778328 - RNA, 15 nt, Human
caacaggaggacaau

SEQ ID NO: 3778329 - RNA, 16 nt, Human
caacaggaggacaauu

SEQ ID NO: 3778330 - RNA, 20 nt, Human
caacaggccucagggcuccu

SEQ ID NO: 3778331 - RNA, 13 nt, Human
caacaggcugggc

SEQ ID NO: 3778332 - RNA, 22 nt, Human
caacaggcuguucugcacugaa

SEQ ID NO: 3778333 - RNA, 18 nt, Human
caacaggguuuuuuucca

SEQ ID NO: 3778334 - RNA, 17 nt, Human
caacagguaaaacaggg

SEQ ID NO: 3778335 - RNA, 22 nt, Human
caacagguggcaggaccaggac

SEQ ID NO: 3778336 - RNA, 23 nt, Human
caacagguggcaggaccaggacu

SEQ ID NO: 3778337 - RNA, 20 nt, Human
caacaguagcauaggacccu

SEQ ID NO: 3778338 - RNA, 18 nt, Human
caacagucaaaacagaga

SEQ ID NO: 3778339 - RNA, 12 nt, Human
caacagugaguc

SEQ ID NO: 3778340 - RNA, 14 nt, Human
caacagugcuaaaa

SEQ ID NO: 3778341 - RNA, 18 nt, Human
caacagugcuaaaaaugg

SEQ ID NO: 3778342 - RNA, 17 nt, Human
caacaguggggaagagu

SEQ ID NO: 3778343 - RNA, 12 nt, Human
caacagugugaa

SEQ ID NO: 3778344 - RNA, 13 nt, Human
caacagugugaag

SEQ ID NO: 3778345 - RNA, 17 nt, Human
caacagugugaaguuag

SEQ ID NO: 3778346 - RNA, 18 nt, Human
caacagugugaaguuaga

SEQ ID NO: 3778347 - RNA, 23 nt, Human
caacagugugaaguuagaauucc

SEQ ID NO: 3778348 - RNA, 16 nt, Human
caacaguuacauaauu

SEQ ID NO: 3778349 - RNA, 15 nt, Human
caacaguuccuucag

SEQ ID NO: 3778350 - RNA, 12 nt, Human
caacaguuuaau

SEQ ID NO: 3778351 - RNA, 20 nt, Human
caacaguuuaaugaagaucu

SEQ ID NO: 3778352 - RNA, 22 nt, Human
caacaguuuuccuaugcuuuga

SEQ ID NO: 3778353 - RNA, 15 nt, Human
caacauacucccauc

SEQ ID NO: 3778354 - RNA, 17 nt, Human
caacauacucccaucug

SEQ ID NO: 3778355 - RNA, 14 nt, Human
caacauauaaaaua

SEQ ID NO: 3778356 - RNA, 12 nt, Human
caacauauacaa

SEQ ID NO: 3778357 - RNA, 22 nt, Human
caacaucaauguucauuguaau

SEQ ID NO: 3778358 - RNA, 14 nt, Human
caacaucacagccc

SEQ ID NO: 3778359 - RNA, 13 nt, Human
caacaucagcuug

SEQ ID NO: 3778360 - RNA, 13 nt, Human
caacauccacucu

SEQ ID NO: 3778361 - RNA, 15 nt, Human
caacaugagucaaga

SEQ ID NO: 3778362 - RNA, 22 nt, Human
caacaugaugagguaguaccuu

SEQ ID NO: 3778363 - RNA, 23 nt, Human
caacauggagaaacccugucucu

SEQ ID NO: 3778364 - RNA, 12 nt, Human
caacauggcuuu

SEQ ID NO: 3778365 - RNA, 21 nt, Human
caacauggugaaaccccaucu

SEQ ID NO: 3778366 - RNA, 13 nt, Human
caacauguauaau

SEQ ID NO: 3778367 - RNA, 19 nt, Human
caacauguauaauauuuuu

SEQ ID NO: 3778368 - RNA, 22 nt, Human
caacauguugggaaacuuggcu

SEQ ID NO: 3778369 - RNA, 23 nt, Human
caacauguugggaaacuuggcuc

SEQ ID NO: 3778370 - RNA, 20 nt, Human
caacauuaaaacaauauugu

SEQ ID NO: 3778371 - RNA, 21 nt, Human
caacauuacagggaaugccug

SEQ ID NO: 3778372 - RNA, 17 nt, Human
caacauugcuugugcca

SEQ ID NO: 3778373 - RNA, 18 nt, Human
caacauuuacaacucauu

SEQ ID NO: 3778374 - RNA, 22 nt, Human
caacauuuuagcucuauugaua

SEQ ID NO: 3778375 - RNA, 19 nt, Human
caacauuuugagaacaaag

SEQ ID NO: 3778376 - RNA, 13 nt, Human
caaccaagucaca

SEQ ID NO: 3778377 - RNA, 18 nt, Human
caaccaagucaugugcau

SEQ ID NO: 3778378 - RNA, 14 nt, Human
caaccaauggaaug

SEQ ID NO: 3778379 - RNA, 14 nt, Human
caaccacacccaca

SEQ ID NO: 3778380 - RNA, 20 nt, Human
caaccacacuugucggcucc

SEQ ID NO: 3778381 - RNA, 21 nt, Human
caaccacacuugucggcucca

SEQ ID NO: 3778382 - RNA, 17 nt, Human
caaccaccgcuccccag

SEQ ID NO: 3778383 - RNA, 22 nt, Human
caaccaccgcuccccagcccag

SEQ ID NO: 3778384 - RNA, 18 nt, Human
caaccacugcgaccacaa

SEQ ID NO: 3778385 - RNA, 14 nt, Human
caaccacuggucug

SEQ ID NO: 3778386 - RNA, 22 nt, Human
caaccacuggucuguagggauu

SEQ ID NO: 3778387 - RNA, 12 nt, Human
caaccagacaga

SEQ ID NO: 3778388 - RNA, 15 nt, Human
caaccagacagaggg

SEQ ID NO: 3778389 - RNA, 15 nt, Human
caaccagagcacugu

SEQ ID NO: 3778390 - RNA, 16 nt, Human
caaccagagcacugua

SEQ ID NO: 3778391 - RNA, 17 nt, Human
caaccagcuaagaaaag

SEQ ID NO: 3778392 - RNA, 22 nt, Human
caaccagcuaagaaaagauuuu

SEQ ID NO: 3778393 - RNA, 22 nt, Human
caaccagggauuguuucuguuu

SEQ ID NO: 3778394 - RNA, 12 nt, Human
caaccagugcca

SEQ ID NO: 3778395 - RNA, 15 nt, Human
caaccagugccaagg

SEQ ID NO: 3778396 - RNA, 18 nt, Human
caaccaucaaaguggcaa

SEQ ID NO: 3778397 - RNA, 13 nt, Human
caaccaucgcuuu

SEQ ID NO: 3778398 - RNA, 23 nt, Human
caaccaugaguggcauggccacc

SEQ ID NO: 3778399 - RNA, 18 nt, Human
caaccauggacuuuauaa

SEQ ID NO: 3778400 - RNA, 14 nt, Human
caaccaugucauuu

SEQ ID NO: 3778401 - RNA, 16 nt, Human
caaccaugucauuuca

SEQ ID NO: 3778402 - RNA, 17 nt, Human
caaccauuaaagucaga

SEQ ID NO: 3778403 - RNA, 16 nt, Human
caaccauuuccucaga

SEQ ID NO: 3778404 - RNA, 14 nt, Human
caaccauuugaaac

SEQ ID NO: 3778405 - RNA, 19 nt, Human
caacccaaggacugaggga

SEQ ID NO: 3778406 - RNA, 22 nt, Human
caacccaaggacugagggacuc

SEQ ID NO: 3778407 - RNA, 17 nt, Human
caacccaccugcgucuc

SEQ ID NO: 3778408 - RNA, 20 nt, Human
caacccaucuaccccuggau

SEQ ID NO: 3778409 - RNA, 22 nt, Human
caacccaugaugagcuccucuu

SEQ ID NO: 3778410 - RNA, 15 nt, Human
caaccccaacuccag

SEQ ID NO: 3778411 - RNA, 23 nt, Human
caaccccacacgcuccucccucu

SEQ ID NO: 3778412 - RNA, 12 nt, Human
caaccccagccg

SEQ ID NO: 3778413 - RNA, 23 nt, Human
caaccccagccgcucggaggccc

SEQ ID NO: 3778414 - RNA, 19 nt, Human
caaccccaguucugcuccu

SEQ ID NO: 3778415 - RNA, 22 nt, Human
caaccccaguucugcuccucuc

SEQ ID NO: 3778416 - RNA, 11 nt, Human
caacccccacc

SEQ ID NO: 3778417 - RNA, 18 nt, Human
caacccccaccccacacu

SEQ ID NO: 3778418 - RNA, 20 nt, Human
caacccccagcacccgggcu

SEQ ID NO: 3778419 - RNA, 14 nt, Human
caacccccagccug

SEQ ID NO: 3778420 - RNA, 15 nt, Human
caacccccagccugc

SEQ ID NO: 3778421 - RNA, 16 nt, Human
caacccccagccugcu

SEQ ID NO: 3778422 - RNA, 15 nt, Human
caacccccagcuccc

SEQ ID NO: 3778423 - RNA, 18 nt, Human
caacccccagcucccgcu

SEQ ID NO: 3778424 - RNA, 16 nt, Human
caacccccauuucuau

SEQ ID NO: 3778425 - RNA, 16 nt, Human
caaccccccaccugcc

SEQ ID NO: 3778426 - RNA, 14 nt, Human
caaccccccagcac

SEQ ID NO: 3778427 - RNA, 22 nt, Human
caaccccccaucacaaacuuaa

SEQ ID NO: 3778428 - RNA, 23 nt, Human
caaccccucgcccagucccagca

SEQ ID NO: 3778429 - RNA, 12 nt, Human
caaccccugagg

SEQ ID NO: 3778430 - RNA, 13 nt, Human
caaccccugagga

SEQ ID NO: 3778431 - RNA, 17 nt, Human
caaccccuggaccccag

SEQ ID NO: 3778432 - RNA, 22 nt, Human
caaccccuggaccccagccuca

SEQ ID NO: 3778433 - RNA, 21 nt, Human
caaccccuguggagcccgcac

SEQ ID NO: 3778434 - RNA, 19 nt, Human
caaccccuuaagcccuggc

SEQ ID NO: 3778435 - RNA, 18 nt, Human
caaccccuucgcuccugu

SEQ ID NO: 3778436 - RNA, 20 nt, Human
caacccgucuggcccaccag

SEQ ID NO: 3778437 - RNA, 21 nt, Human
caacccguggaggcugcucgg

SEQ ID NO: 3778438 - RNA, 21 nt, Human
caacccuagguucccuguucu

SEQ ID NO: 3778439 - RNA, 18 nt, Human
caacccucagagccaccc

SEQ ID NO: 3778440 - RNA, 12 nt, Human
caacccucaggg

SEQ ID NO: 3778441 - RNA, 15 nt, Human
caacccucaucacca

SEQ ID NO: 3778442 - RNA, 17 nt, Human
caacccucccucagccc

SEQ ID NO: 3778443 - RNA, 11 nt, Human
caacccugcaa

SEQ ID NO: 3778444 - RNA, 12 nt, Human
caacccugcaaa

SEQ ID NO: 3778445 - RNA, 11 nt, Human
caacccugccc

SEQ ID NO: 3778446 - RNA, 16 nt, Human
caacccugccccugcc

SEQ ID NO: 3778447 - RNA, 22 nt, Human
caacccugccccugccccguca

SEQ ID NO: 3778448 - RNA, 15 nt, Human
caacccugccgucac

SEQ ID NO: 3778449 - RNA, 19 nt, Human
caacccuggcauuaugucc

SEQ ID NO: 3778450 - RNA, 16 nt, Human
caacccuguuuccuga

SEQ ID NO: 3778451 - RNA, 12 nt, Human
caacccuucccc

SEQ ID NO: 3778452 - RNA, 17 nt, Human
caacccuucccucaccu

SEQ ID NO: 3778453 - RNA, 10 nt, Human
caacccuucu

SEQ ID NO: 3778454 - RNA, 21 nt, Human
caacccuucuccucuuguaaa

SEQ ID NO: 3778455 - RNA, 22 nt, Human
caaccgagagaaugcugaccug

SEQ ID NO: 3778456 - RNA, 18 nt, Human
caaccgaugcuccagcca

SEQ ID NO: 3778457 - RNA, 21 nt, Human
caaccgaugcuccagccaacc

SEQ ID NO: 3778458 - RNA, 17 nt, Human
caaccgccucaaaaugu

SEQ ID NO: 3778459 - RNA, 13 nt, Human
caaccggcuuugu

SEQ ID NO: 3778460 - RNA, 22 nt, Human
caaccggcuuuguggcacuggg

SEQ ID NO: 3778461 - RNA, 21 nt, Human
caaccgguggauccucaaaca

SEQ ID NO: 3778462 - RNA, 20 nt, Human
caaccguggcccuuccugga

SEQ ID NO: 3778463 - RNA, 19 nt, Human
caagagucgcugugccaca

SEQ ID NO: 3778464 - RNA, 22 nt, Human
caagagucgcugugccacaggc

SEQ ID NO: 3778465 - RNA, 14 nt, Human
caagagucuaaaga

SEQ ID NO: 3778466 - RNA, 20 nt, Human
caagagucuaauagucuuug

SEQ ID NO: 3778467 - RNA, 20 nt, Human
caagagugaauucccucacu

SEQ ID NO: 3778468 - RNA, 14 nt, Human
caagagugauucuu

SEQ ID NO: 3778469 - RNA, 15 nt, Human
caagagugauucuug

SEQ ID NO: 3778470 - RNA, 19 nt, Human
caagagugauucuugcugc

SEQ ID NO: 3778471 - RNA, 18 nt, Human
caagagugauugcagcuu

SEQ ID NO: 3778472 - RNA, 22 nt, Human
caagaguuuauuuccaaauaaa

SEQ ID NO: 3778473 - RNA, 16 nt, Human
caagauaaaggacagu

SEQ ID NO: 3778474 - RNA, 18 nt, Human
caagauaaaggacaguga

SEQ ID NO: 3778475 - RNA, 15 nt, Human
caagauaccuuuuuu

SEQ ID NO: 3778476 - RNA, 21 nt, Human
caagauauuguacauaaaaga

SEQ ID NO: 3778477 - RNA, 18 nt, Human
caagaucauguaccccaa

SEQ ID NO: 3778478 - RNA, 15 nt, Human
caagaucugugcagc

SEQ ID NO: 3778479 - RNA, 18 nt, Human
caagaugaaauuccauuu

SEQ ID NO: 3778480 - RNA, 17 nt, Human
caagaugacuggggugg

SEQ ID NO: 3778481 - RNA, 19 nt, Human
caagaugagagaacuggag

SEQ ID NO: 3778482 - RNA, 23 nt, Human
caagaugagauuggcauggcuuu

SEQ ID NO: 3778483 - RNA, 19 nt, Human
caagauggaauuuaucaaa

SEQ ID NO: 3778484 - RNA, 13 nt, Human
caagauggcacag

SEQ ID NO: 3778485 - RNA, 20 nt, Human
caagauggcacagggcauga

SEQ ID NO: 3778486 - RNA, 18 nt, Human
caagaugggcaucuuuug

SEQ ID NO: 3778487 - RNA, 22 nt, Human
caagauggggagugagaggcug

SEQ ID NO: 3778488 - RNA, 19 nt, Human
caagaugggggcagggcug

SEQ ID NO: 3778489 - RNA, 13 nt, Human
caagaugguucua

SEQ ID NO: 3778490 - RNA, 15 nt, Human
caagaugucagacug

SEQ ID NO: 3778491 - RNA, 17 nt, Human
caagaugucagacuggc

SEQ ID NO: 3778492 - RNA, 19 nt, Human
caagauguugauuuuuacu

SEQ ID NO: 3778493 - RNA, 13 nt, Human
caagauucagcua

SEQ ID NO: 3778494 - RNA, 14 nt, Human
caagauucccagag

SEQ ID NO: 3778495 - RNA, 15 nt, Human
caagauucccagaga

SEQ ID NO: 3778496 - RNA, 18 nt, Human
caagauucccagagacag

SEQ ID NO: 3778497 - RNA, 19 nt, Human
caagauucccagagacagg

SEQ ID NO: 3778498 - RNA, 15 nt, Human
caagauucccaggag

SEQ ID NO: 3778499 - RNA, 21 nt, Human
caagauucccaggaguucugc

SEQ ID NO: 3778500 - RNA, 12 nt, Human
caagauucuaga

SEQ ID NO: 3778501 - RNA, 14 nt, Human
caagauucuagaug

SEQ ID NO: 3778502 - RNA, 22 nt, Human
caagauugguguuuuuuucuau

SEQ ID NO: 3778503 - RNA, 22 nt, Human
caagauuguuccugcuuuuccc

SEQ ID NO: 3778504 - RNA, 16 nt, Human
caagauuuaaaugcca

SEQ ID NO: 3778505 - RNA, 14 nt, Human
caagauuuagaaaa

SEQ ID NO: 3778506 - RNA, 22 nt, Human
caagauuuaugagaaauauuug

SEQ ID NO: 3778507 - RNA, 12 nt, Human
caagauuucaga

SEQ ID NO: 3778508 - RNA, 13 nt, Human
caagauuuccuug

SEQ ID NO: 3778509 - RNA, 15 nt, Human
caagauuuuccuuuu

SEQ ID NO: 3778510 - RNA, 18 nt, Human
caagauuuuuuaauuguu

SEQ ID NO: 3778511 - RNA, 22 nt, Human
caagcaaaaucauggaaugguu

SEQ ID NO: 3778512 - RNA, 14 nt, Human
caagcaaacccaga

SEQ ID NO: 3778513 - RNA, 19 nt, Human
caagcaaaggugaagagac

SEQ ID NO: 3778514 - RNA, 15 nt, Human
caagcaaaugugaau

SEQ ID NO: 3778515 - RNA, 17 nt, Human
caagcaaaugugaauca

SEQ ID NO: 3778516 - RNA, 19 nt, Human
caagcaaaugugaaucauu

SEQ ID NO: 3778517 - RNA, 16 nt, Human
caagcaaccugggucc

SEQ ID NO: 3778518 - RNA, 15 nt, Human
caagcaagcucucuu

SEQ ID NO: 3778519 - RNA, 22 nt, Human
caagcaagcucucuugccgagg

SEQ ID NO: 3778520 - RNA, 15 nt, Human
caagcaaguucugag

SEQ ID NO: 3778521 - RNA, 14 nt, Human
caagcaauccuccu

SEQ ID NO: 3778522 - RNA, 14 nt, Human
caagcacagcagcc

SEQ ID NO: 3778523 - RNA, 15 nt, Human
caagcacaguggugg

SEQ ID NO: 3778524 - RNA, 17 nt, Human
caagcacaucugcauuu

SEQ ID NO: 3778525 - RNA, 14 nt, Human
caagcaccuccugc

SEQ ID NO: 3778526 - RNA, 11 nt, Human
caagcacugau

SEQ ID NO: 3778527 - RNA, 12 nt, Human
caagcacugaua

SEQ ID NO: 3778528 - RNA, 18 nt, Human
caagcacugcuaggcgag

SEQ ID NO: 3778529 - RNA, 23 nt, Human
caagcacugcuaggcgagugcca

SEQ ID NO: 3778530 - RNA, 17 nt, Human
caagcacugugcucagg

SEQ ID NO: 3778531 - RNA, 19 nt, Human
caagcagaggaccagggcc

SEQ ID NO: 3778532 - RNA, 20 nt, Human
caagcagaggaccagggccu

SEQ ID NO: 3778533 - RNA, 18 nt, Human
caagcagagguggccaga

SEQ ID NO: 3778534 - RNA, 20 nt, Human
caagcagagguggccagagc

SEQ ID NO: 3778535 - RNA, 21 nt, Human
caagcagagugcacagcuguc

SEQ ID NO: 3778536 - RNA, 17 nt, Human
caagcagauacugcugu

SEQ ID NO: 3778537 - RNA, 22 nt, Human
caagcagccaagcuccuuggga

SEQ ID NO: 3778538 - RNA, 13 nt, Human
caagcagcuuaga

SEQ ID NO: 3778539 - RNA, 17 nt, Human
caagcaggaaaugaaaa

SEQ ID NO: 3778540 - RNA, 23 nt, Human
caagcaggaaaugaaaaugucuu

SEQ ID NO: 3778541 - RNA, 18 nt, Human
caagcaggacagugcuug

SEQ ID NO: 3778542 - RNA, 18 nt, Human
caagcaggacauggacaa

SEQ ID NO: 3778543 - RNA, 13 nt, Human
caagcaggagacg

SEQ ID NO: 3778544 - RNA, 19 nt, Human
caagcaggcgcugugcuau

SEQ ID NO: 3778545 - RNA, 23 nt, Human
caagcaguggauacgugucaaug

SEQ ID NO: 3778546 - RNA, 14 nt, Human
caagcaguuucaau

SEQ ID NO: 3778547 - RNA, 15 nt, Human
caagcaguuucaaua

SEQ ID NO: 3778548 - RNA, 16 nt, Human
caagcaguuucaauaa

SEQ ID NO: 3778549 - RNA, 21 nt, Human
caagcaguuucaauaaaguuu

SEQ ID NO: 3778550 - RNA, 22 nt, Human
caagcaguuucaauaaaguuug

SEQ ID NO: 3778551 - RNA, 16 nt, Human
caagcauaccaacacg

SEQ ID NO: 3778552 - RNA, 21 nt, Human
caagcauaccaacacgagcag

SEQ ID NO: 3778553 - RNA, 13 nt, Human
caagcaucuccug

SEQ ID NO: 3778554 - RNA, 14 nt, Human
caagcaucuccuga

SEQ ID NO: 3778555 - RNA, 21 nt, Human
caagcaucuuggggggguggc

SEQ ID NO: 3778556 - RNA, 21 nt, Human
caagcaugaagauaaacacag

SEQ ID NO: 3778557 - RNA, 13 nt, Human
caagcauguaacu

SEQ ID NO: 3778558 - RNA, 21 nt, Human
caagcauguauuuuugucaau

SEQ ID NO: 3778559 - RNA, 13 nt, Human
caagcauguggau

SEQ ID NO: 3778560 - RNA, 22 nt, Human
caagcauucagaagaaaaagaa

SEQ ID NO: 3778561 - RNA, 23 nt, Human
caagcauugcuucagaaugaauu

SEQ ID NO: 3778562 - RNA, 17 nt, Human
caagccaagaaagaugu

SEQ ID NO: 3778563 - RNA, 16 nt, Human
caagccaagcagccaa

SEQ ID NO: 3778564 - RNA, 18 nt, Human
caagccaagcagccaagc

SEQ ID NO: 3778565 - RNA, 21 nt, Human
caagccaagcagccaagcucc

SEQ ID NO: 3778566 - RNA, 21 nt, Human
caagccaagggaaccuguguc

SEQ ID NO: 3778567 - RNA, 23 nt, Human
caagccaagggaaccuguguccg

SEQ ID NO: 3778568 - RNA, 14 nt, Human
caagccacagaagc

SEQ ID NO: 3778569 - RNA, 19 nt, Human
caagccacagaagccagga

SEQ ID NO: 3778570 - RNA, 21 nt, Human
caagccaccaacauacuccca

SEQ ID NO: 3778571 - RNA, 21 nt, Human
caagccagauuuuccugaaaa

SEQ ID NO: 3778572 - RNA, 15 nt, Human
caagccagauuuuuu

SEQ ID NO: 3778573 - RNA, 13 nt, Human
caagccagccaac

SEQ ID NO: 3778574 - RNA, 13 nt, Human
caagccaggcuca

SEQ ID NO: 3778575 - RNA, 19 nt, Human
caagccagggauggggcca

SEQ ID NO: 3778576 - RNA, 24 nt, Human
caagccagggauggggccacagcc

SEQ ID NO: 3778577 - RNA, 14 nt, Human
caagccagggugug

SEQ ID NO: 3778578 - RNA, 21 nt, Human
caagccauggguagccugggu

SEQ ID NO: 3778579 - RNA, 19 nt, Human
caagccauguauaaaugug

SEQ ID NO: 3778580 - RNA, 21 nt, Human
caagccauguauaaaugugau

SEQ ID NO: 3778581 - RNA, 19 nt, Human
caagcccagcccauggaga

SEQ ID NO: 3778582 - RNA, 15 nt, Human
caagcccaggccacc

SEQ ID NO: 3778583 - RNA, 21 nt, Human
caagcccaggugccagccuga

SEQ ID NO: 3778584 - RNA, 17 nt, Human
caagccccucuuucugu

SEQ ID NO: 3778585 - RNA, 17 nt, Human
caagccccugcccaucu

SEQ ID NO: 3778586 - RNA, 21 nt, Human
caagcccgacuugcuguuuug

SEQ ID NO: 3778587 - RNA, 18 nt, Human
caagcccuacagagcugu

SEQ ID NO: 3778588 - RNA, 14 nt, Human
caagcccugagagu

SEQ ID NO: 3778589 - RNA, 17 nt, Human
caagccguggcuucccg

SEQ ID NO: 3778590 - RNA, 18 nt, Human
caagccguggcuucccgc

SEQ ID NO: 3778591 - RNA, 18 nt, Human
caagccugagggaaaggc

SEQ ID NO: 3778592 - RNA, 22 nt, Human
caagccugagggaaaggccagc

SEQ ID NO: 3778593 - RNA, 23 nt, Human
caagccugcacaauaaaaauguu

SEQ ID NO: 3778594 - RNA, 14 nt, Human
caagccugccuagg

SEQ ID NO: 3778595 - RNA, 12 nt, Human
caagccugguca

SEQ ID NO: 3778596 - RNA, 16 nt, Human
caagccuggucagccc

SEQ ID NO: 3778597 - RNA, 18 nt, Human
caagccuggucagcccaa

SEQ ID NO: 3778598 - RNA, 14 nt, Human
caagccugucugag

SEQ ID NO: 3778599 - RNA, 16 nt, Human
caagcgauucuccugc

SEQ ID NO: 3778600 - RNA, 18 nt, Human
caagcgauucuccugccu

SEQ ID NO: 3778601 - RNA, 20 nt, Human
caagcgauucuccugccuca

SEQ ID NO: 3778602 - RNA, 17 nt, Human
caagcgauucucuugcc

SEQ ID NO: 3778603 - RNA, 21 nt, Human
caagcgauucucuugccucaa

SEQ ID NO: 3778604 - RNA, 16 nt, Human
caagcgcccuggcccc

SEQ ID NO: 3778605 - RNA, 17 nt, Human
caagcgcccuggccccc

SEQ ID NO: 3778606 - RNA, 18 nt, Human
caagcgcccuggccccca

SEQ ID NO: 3778607 - RNA, 19 nt, Human
caauacacuaguuguuucu

SEQ ID NO: 3778608 - RNA, 15 nt, Human
caauacagauauauu

SEQ ID NO: 3778609 - RNA, 14 nt, Human
caauacagcaaacc

SEQ ID NO: 3778610 - RNA, 19 nt, Human
caauacaguacaggcagca

SEQ ID NO: 3778611 - RNA, 13 nt, Human
caauacagugcuc

SEQ ID NO: 3778612 - RNA, 15 nt, Human
caauacaugcugcua

SEQ ID NO: 3778613 - RNA, 19 nt, Human
caauacccaaauccucucc

SEQ ID NO: 3778614 - RNA, 23 nt, Human
caauacccuuugaauuggacaau

SEQ ID NO: 3778615 - RNA, 17 nt, Human
caauacucauaauguga

SEQ ID NO: 3778616 - RNA, 23 nt, Human
caauagaaacucaccauguaaaa

SEQ ID NO: 3778617 - RNA, 12 nt, Human
caauagagacug

SEQ ID NO: 3778618 - RNA, 14 nt, Human
caauagcaccccua

SEQ ID NO: 3778619 - RNA, 17 nt, Human
caauagcacuuucauug

SEQ ID NO: 3778620 - RNA, 18 nt, Human
caauagcauuagaaauaa

SEQ ID NO: 3778621 - RNA, 18 nt, Human
caauagcuuuacccucag

SEQ ID NO: 3778622 - RNA, 18 nt, Human
caauaggaaaaacugauu

SEQ ID NO: 3778623 - RNA, 22 nt, Human
caauaggaguggugauuugaaa

SEQ ID NO: 3778624 - RNA, 21 nt, Human
caauaggaugggcuucugugc

SEQ ID NO: 3778625 - RNA, 23 nt, Human
caauaggcaaaggggggaaggga

SEQ ID NO: 3778626 - RNA, 15 nt, Human
caauaggcaaauuaa

SEQ ID NO: 3778627 - RNA, 17 nt, Human
caauaggcaaauuaauc

SEQ ID NO: 3778628 - RNA, 22 nt, Human
caauaggugcugaguguacaga

SEQ ID NO: 3778629 - RNA, 16 nt, Human
caauagugggcccucc

SEQ ID NO: 3778630 - RNA, 20 nt, Human
caauaguguccuaugcaaua

SEQ ID NO: 3778631 - RNA, 21 nt, Human
caauaguguccuaugcaauaa

SEQ ID NO: 3778632 - RNA, 14 nt, Human
caauaguguguucu

SEQ ID NO: 3778633 - RNA, 16 nt, Human
caauaguuugcauaga

SEQ ID NO: 3778634 - RNA, 23 nt, Human
caauauaaaaggcaaauguguac

SEQ ID NO: 3778635 - RNA, 18 nt, Human
caauauaaccaauguuua

SEQ ID NO: 3778636 - RNA, 21 nt, Human
caauauaaccaauguuuaaaa

SEQ ID NO: 3778637 - RNA, 16 nt, Human
caauauaagcuuuucu

SEQ ID NO: 3778638 - RNA, 21 nt, Human
caauauaauguuuuuaauauu

SEQ ID NO: 3778639 - RNA, 13 nt, Human
caauauagcaaga

SEQ ID NO: 3778640 - RNA, 16 nt, Human
caauauauaaaaauau

SEQ ID NO: 3778641 - RNA, 18 nt, Human
caauauauaaaaauauau

SEQ ID NO: 3778642 - RNA, 22 nt, Human
caauauaucuaaauugaauaau

SEQ ID NO: 3778643 - RNA, 18 nt, Human
caauauauuaccagcaag

SEQ ID NO: 3778644 - RNA, 20 nt, Human
caauauauugaacuuuugua

SEQ ID NO: 3778645 - RNA, 13 nt, Human
caauauccuaaua

SEQ ID NO: 3778646 - RNA, 14 nt, Human
caauauccuaauaa

SEQ ID NO: 3778647 - RNA, 20 nt, Human
caauauccuaauaaaaaggu

SEQ ID NO: 3778648 - RNA, 12 nt, Human
caauauccuuug

SEQ ID NO: 3778649 - RNA, 15 nt, Human
caauauccuuugccu

SEQ ID NO: 3778650 - RNA, 16 nt, Human
caauaucuaauauaua

SEQ ID NO: 3778651 - RNA, 23 nt, Human
caauaugaaguuacuuucuuaau

SEQ ID NO: 3778652 - RNA, 11 nt, Human
caauaugcuua

SEQ ID NO: 3778653 - RNA, 12 nt, Human
caauaugcuuac

SEQ ID NO: 3778654 - RNA, 15 nt, Human
caauauguaaauagu

SEQ ID NO: 3778655 - RNA, 14 nt, Human
caauauguauugua

SEQ ID NO: 3778656 - RNA, 16 nt, Human
caauauguauuguaaa

SEQ ID NO: 3778657 - RNA, 12 nt, Human
caauaugugcca

SEQ ID NO: 3778658 - RNA, 19 nt, Human
caauaugugccaaucaaua

SEQ ID NO: 3778659 - RNA, 21 nt, Human
caauauuaaauacagacacua

SEQ ID NO: 3778660 - RNA, 23 nt, Human
caauauuaaauacagacacuaag

SEQ ID NO: 3778661 - RNA, 23 nt, Human
caauauuaaugccuuuaaaguau

SEQ ID NO: 3778662 - RNA, 13 nt, Human
caauauuauaauu

SEQ ID NO: 3778663 - RNA, 19 nt, Human
caauauuccagaucuuuca

SEQ ID NO: 3778664 - RNA, 13 nt, Human
caauauuccuuag

SEQ ID NO: 3778665 - RNA, 17 nt, Human
caauauucgcuguguca

SEQ ID NO: 3778666 - RNA, 12 nt, Human
caauauucucug

SEQ ID NO: 3778667 - RNA, 21 nt, Human
caauauugauugggaaaacau

SEQ ID NO: 3778668 - RNA, 18 nt, Human
caauauuguacaguuuuu

SEQ ID NO: 3778669 - RNA, 16 nt, Human
caauauugucucccuu

SEQ ID NO: 3778670 - RNA, 14 nt, Human
caauauuuauggau

SEQ ID NO: 3778671 - RNA, 22 nt, Human
caauauuuauuguauuuuagua

SEQ ID NO: 3778672 - RNA, 19 nt, Human
caauauuuccucaugugau

SEQ ID NO: 3778673 - RNA, 22 nt, Human
caauauuucugcuuucuuugau

SEQ ID NO: 3778674 - RNA, 22 nt, Human
caauauuugugugcuaaacgug

SEQ ID NO: 3778675 - RNA, 23 nt, Human
caauauuugugugcuaaacgugu

SEQ ID NO: 3778676 - RNA, 13 nt, Human
caauauuuuaagc

SEQ ID NO: 3778677 - RNA, 17 nt, Human
caauauuuuaagcauua

SEQ ID NO: 3778678 - RNA, 15 nt, Human
caauauuuuaugguu

SEQ ID NO: 3778679 - RNA, 23 nt, Human
caauauuuuaugguuauguuuuu

SEQ ID NO: 3778680 - RNA, 11 nt, Human
caauauuuucc

SEQ ID NO: 3778681 - RNA, 13 nt, Human
caauauuuuccau

SEQ ID NO: 3778682 - RNA, 16 nt, Human
caauauuuuccaugaa

SEQ ID NO: 3778683 - RNA, 19 nt, Human
caauauuuucuuuaaugcu

SEQ ID NO: 3778684 - RNA, 21 nt, Human
caauauuuuggaguauguuaa

SEQ ID NO: 3778685 - RNA, 12 nt, Human
caauauuuuucu

SEQ ID NO: 3778686 - RNA, 22 nt, Human
caaucaaauaaguauuuauaau

SEQ ID NO: 3778687 - RNA, 14 nt, Human
caaucaacacuacc

SEQ ID NO: 3778688 - RNA, 15 nt, Human
caaucaacucuaaua

SEQ ID NO: 3778689 - RNA, 16 nt, Human
caaucaagauaaagga

SEQ ID NO: 3778690 - RNA, 15 nt, Human
caaucaagucuguuu

SEQ ID NO: 3778691 - RNA, 15 nt, Human
caaucagaaugaaca

SEQ ID NO: 3778692 - RNA, 19 nt, Human
caaucagagaccaggcccu

SEQ ID NO: 3778693 - RNA, 16 nt, Human
caaucagauuuuccug

SEQ ID NO: 3778694 - RNA, 12 nt, Human
caaucagcacug

SEQ ID NO: 3778695 - RNA, 16 nt, Human
caaucagcacugaaaa

SEQ ID NO: 3778696 - RNA, 17 nt, Human
caaucagcugcuuuguu

SEQ ID NO: 3778697 - RNA, 18 nt, Human
caaucagcugcuuuguua

SEQ ID NO: 3778698 - RNA, 19 nt, Human
caaucaguauaauucugua

SEQ ID NO: 3778699 - RNA, 14 nt, Human
caaucaguccccuc

SEQ ID NO: 3778700 - RNA, 15 nt, Human
caaucaguccccucc

SEQ ID NO: 3778701 - RNA, 21 nt, Human
caaucaguccccucccaucug

SEQ ID NO: 3778702 - RNA, 20 nt, Human
caaucauauuaauacaauga

SEQ ID NO: 3778703 - RNA, 17 nt, Human
caaucaucugugugaaa

SEQ ID NO: 3778704 - RNA, 19 nt, Human
caaucaucugugugaaaau

SEQ ID NO: 3778705 - RNA, 20 nt, Human
caaucaucugugugaaaaug

SEQ ID NO: 3778706 - RNA, 21 nt, Human
caaucauugcugaaaauggua

SEQ ID NO: 3778707 - RNA, 13 nt, Human
caaucauuguaca

SEQ ID NO: 3778708 - RNA, 20 nt, Human
caaucauuguacaguuuguu

SEQ ID NO: 3778709 - RNA, 17 nt, Human
caaucauuguuuugaau

SEQ ID NO: 3778710 - RNA, 20 nt, Human
caaucauuguuuugaauauu

SEQ ID NO: 3778711 - RNA, 21 nt, Human
caauccagguacgcacagaca

SEQ ID NO: 3778712 - RNA, 16 nt, Human
caauccaucagugcca

SEQ ID NO: 3778713 - RNA, 22 nt, Human
caauccauguuaguuuuuacuu

SEQ ID NO: 3778714 - RNA, 22 nt, Human
caauccccucauucaggaaaac

SEQ ID NO: 3778715 - RNA, 20 nt, Human
caauccccuccuugggcacu

SEQ ID NO: 3778716 - RNA, 20 nt, Human
caaucccucaccuucugagu

SEQ ID NO: 3778717 - RNA, 22 nt, Human
caauccuaacacauuaucggga

SEQ ID NO: 3778718 - RNA, 21 nt, Human
caauccuaauuucuccucccu

SEQ ID NO: 3778719 - RNA, 12 nt, Human
caauccuaugca

SEQ ID NO: 3778720 - RNA, 16 nt, Human
caauccuaugcauggu

SEQ ID NO: 3778721 - RNA, 18 nt, Human
caauccuaugcaugguuu

SEQ ID NO: 3778722 - RNA, 20 nt, Human
caauccuaugcaugguuuca

SEQ ID NO: 3778723 - RNA, 22 nt, Human
caauccuaugcaugguuucagc

SEQ ID NO: 3778724 - RNA, 14 nt, Human
caauccuauguuuu

SEQ ID NO: 3778725 - RNA, 20 nt, Human
caauccuauguuuuuguuca

SEQ ID NO: 3778726 - RNA, 17 nt, Human
caauccucacugggugg

SEQ ID NO: 3778727 - RNA, 19 nt, Human
caauccucucaccucagcc

SEQ ID NO: 3778728 - RNA, 18 nt, Human
caauccugauuccucucu

SEQ ID NO: 3778729 - RNA, 21 nt, Human
caauccugauuccucucuaag

SEQ ID NO: 3778730 - RNA, 11 nt, Human
caauccugccc

SEQ ID NO: 3778731 - RNA, 13 nt, Human
caauccugccccc

SEQ ID NO: 3778732 - RNA, 11 nt, Human
caauccuggac

SEQ ID NO: 3778733 - RNA, 17 nt, Human
caauccugucuuucuga

SEQ ID NO: 3778734 - RNA, 15 nt, Human
caauccuuacaaaug

SEQ ID NO: 3778735 - RNA, 17 nt, Human
caauccuuacaaaugau

SEQ ID NO: 3778736 - RNA, 14 nt, Human
caauccuuguucag

SEQ ID NO: 3778737 - RNA, 19 nt, Human
caaucgacuggguuuaugu

SEQ ID NO: 3778738 - RNA, 13 nt, Human
caaucgcaaauca

SEQ ID NO: 3778739 - RNA, 15 nt, Human
caaucgcaaaucaaa

SEQ ID NO: 3778740 - RNA, 20 nt, Human
caaucuaaccacaucaauau

SEQ ID NO: 3778741 - RNA, 16 nt, Human
caaucuacucaaagca

SEQ ID NO: 3778742 - RNA, 17 nt, Human
caaucuacucaaagcau

SEQ ID NO: 3778743 - RNA, 23 nt, Human
caaucuauuauuucucuaauuau

SEQ ID NO: 3778744 - RNA, 19 nt, Human
caaucuauuuauuggacau

SEQ ID NO: 3778745 - RNA, 21 nt, Human
caaucucaaauucucaaccua

SEQ ID NO: 3778746 - RNA, 18 nt, Human
caaucucuuaaauugggu

SEQ ID NO: 3778747 - RNA, 21 nt, Human
caaucucuuaaauuggguuca

SEQ ID NO: 3778748 - RNA, 14 nt, Human
caaucucuuuuugu

SEQ ID NO: 3778749 - RNA, 19 nt, Human
caaucugacauucucagga

SEQ ID NO: 3778750 - RNA, 17 nt, Human
caaucuggaagaaaaaa

SEQ ID NO: 3778751 - RNA, 17 nt, Human
accgcuucugccuuuuc

SEQ ID NO: 3778752 - RNA, 22 nt, Human
accgcuuguggggacccaggcu

SEQ ID NO: 3778753 - RNA, 15 nt, Human
accggaagcuccugg

SEQ ID NO: 3778754 - RNA, 17 nt, Human
accggaagcuccuggua

SEQ ID NO: 3778755 - RNA, 15 nt, Human
accggaagguuuuua

SEQ ID NO: 3778756 - RNA, 23 nt, Human
accggagcuuucaaagaaggaau

SEQ ID NO: 3778757 - RNA, 13 nt, Human
accggauccuggg

SEQ ID NO: 3778758 - RNA, 18 nt, Human
accggcaauuuccggcca

SEQ ID NO: 3778759 - RNA, 15 nt, Human
accggccugccagga

SEQ ID NO: 3778760 - RNA, 14 nt, Human
accggcucucaccu

SEQ ID NO: 3778761 - RNA, 16 nt, Human
accggcucucaccugg

SEQ ID NO: 3778762 - RNA, 21 nt, Human
accggcucucaccuggcccug

SEQ ID NO: 3778763 - RNA, 18 nt, Human
accggcuggccuggcccc

SEQ ID NO: 3778764 - RNA, 18 nt, Human
accgggaauaaccuucca

SEQ ID NO: 3778765 - RNA, 20 nt, Human
accgggcacucagaagacac

SEQ ID NO: 3778766 - RNA, 15 nt, Human
accgggcagggccgc

SEQ ID NO: 3778767 - RNA, 19 nt, Human
accgggccacagagaaagu

SEQ ID NO: 3778768 - RNA, 20 nt, Human
accgggccacuccuuccugc

SEQ ID NO: 3778769 - RNA, 21 nt, Human
accgggccacuccuuccugcc

SEQ ID NO: 3778770 - RNA, 21 nt, Human
accgggcugggagcucugcag

SEQ ID NO: 3778771 - RNA, 18 nt, Human
accgguugcuucugggaa

SEQ ID NO: 3778772 - RNA, 22 nt, Human
accguaaagguuuauuuuucug

SEQ ID NO: 3778773 - RNA, 16 nt, Human
accguccccucccagg

SEQ ID NO: 3778774 - RNA, 18 nt, Human
accguccccucccaggga

SEQ ID NO: 3778775 - RNA, 17 nt, Human
accguccucaccccugu

SEQ ID NO: 3778776 - RNA, 22 nt, Human
accgugagcaggaaggccuggg

SEQ ID NO: 3778777 - RNA, 14 nt, Human
accgugaggccaga

SEQ ID NO: 3778778 - RNA, 17 nt, Human
accgugaggccagagac

SEQ ID NO: 3778779 - RNA, 22 nt, Human
accguggaggaggaaggcaaga

SEQ ID NO: 3778780 - RNA, 15 nt, Human
accguggcccugccc

SEQ ID NO: 3778781 - RNA, 20 nt, Human
accguggcccuuccuggaca

SEQ ID NO: 3778782 - RNA, 22 nt, Human
accguggcccuuccuggacagc

SEQ ID NO: 3778783 - RNA, 18 nt, Human
accgugggcagggagcgg

SEQ ID NO: 3778784 - RNA, 16 nt, Human
accgugguaugucugc

SEQ ID NO: 3778785 - RNA, 13 nt, Human
accgugucaagcu

SEQ ID NO: 3778786 - RNA, 17 nt, Human
accgugucaagcugcuc

SEQ ID NO: 3778787 - RNA, 16 nt, Human
accguguuggucugua

SEQ ID NO: 3778788 - RNA, 15 nt, Human
accguguuugucucu

SEQ ID NO: 3778789 - RNA, 18 nt, Human
accguguuugucucuucu

SEQ ID NO: 3778790 - RNA, 19 nt, Human
accguguuugucucuucug

SEQ ID NO: 3778791 - RNA, 19 nt, Human
accuaaaaaagauauauua

SEQ ID NO: 3778792 - RNA, 13 nt, Human
accuaaaacuuaa

SEQ ID NO: 3778793 - RNA, 21 nt, Human
accuaaaagagauuucaagag

SEQ ID NO: 3778794 - RNA, 19 nt, Human
accuaaaauuugcccuccc

SEQ ID NO: 3778795 - RNA, 19 nt, Human
accuaaacgguucaguuuc

SEQ ID NO: 3778796 - RNA, 16 nt, Human
accuaaagguguauuu

SEQ ID NO: 3778797 - RNA, 19 nt, Human
accuaacauucgaucucau

SEQ ID NO: 3778798 - RNA, 17 nt, Human
accuaaccagggccaga

SEQ ID NO: 3778799 - RNA, 13 nt, Human
accuaaccugugu

SEQ ID NO: 3778800 - RNA, 19 nt, Human
accuaacgcccuauuuuug

SEQ ID NO: 3778801 - RNA, 16 nt, Human
accuaagggacauguu

SEQ ID NO: 3778802 - RNA, 14 nt, Human
accuaaguacugua

SEQ ID NO: 3778803 - RNA, 17 nt, Human
accuaaguacuguaaua

SEQ ID NO: 3778804 - RNA, 14 nt, Human
accuaagucucugu

SEQ ID NO: 3778805 - RNA, 20 nt, Human
accuaaguuucaguugauuu

SEQ ID NO: 3778806 - RNA, 11 nt, Human
accuaauccaa

SEQ ID NO: 3778807 - RNA, 20 nt, Human
accuaauccaggcagaucca

SEQ ID NO: 3778808 - RNA, 17 nt, Human
accuaaucucuguaaag

SEQ ID NO: 3778809 - RNA, 13 nt, Human
accuaaugaaagu

SEQ ID NO: 3778810 - RNA, 12 nt, Human
accuaauguuua

SEQ ID NO: 3778811 - RNA, 19 nt, Human
accuaauguuuaugagcca

SEQ ID NO: 3778812 - RNA, 20 nt, Human
accuaauguuuaugagccag

SEQ ID NO: 3778813 - RNA, 22 nt, Human
accuacaccauuaucuuggaaa

SEQ ID NO: 3778814 - RNA, 15 nt, Human
accuacaguguacag

SEQ ID NO: 3778815 - RNA, 18 nt, Human
accuacaguguacagucu

SEQ ID NO: 3778816 - RNA, 20 nt, Human
accuacaguguacagucuug

SEQ ID NO: 3778817 - RNA, 18 nt, Human
accuacaguuuuaacugu

SEQ ID NO: 3778818 - RNA, 19 nt, Human
accuacaguuuuaacugug

SEQ ID NO: 3778819 - RNA, 17 nt, Human
accuaccacagugucug

SEQ ID NO: 3778820 - RNA, 12 nt, Human
accuaccacaug

SEQ ID NO: 3778821 - RNA, 19 nt, Human
accuaccaccccuuccugu

SEQ ID NO: 3778822 - RNA, 22 nt, Human
accuaccccucccuccuggagg

SEQ ID NO: 3778823 - RNA, 17 nt, Human
accuacccucagugagc

SEQ ID NO: 3778824 - RNA, 15 nt, Human
accuaccucagguug

SEQ ID NO: 3778825 - RNA, 15 nt, Human
accuaccuguugagc

SEQ ID NO: 3778826 - RNA, 17 nt, Human
accuaccuguugagcau

SEQ ID NO: 3778827 - RNA, 17 nt, Human
accuacuguucuaaagc

SEQ ID NO: 3778828 - RNA, 18 nt, Human
accuacuguucuaaagcu

SEQ ID NO: 3778829 - RNA, 21 nt, Human
accuacuguucuaaagcucug

SEQ ID NO: 3778830 - RNA, 15 nt, Human
accuagagccagacc

SEQ ID NO: 3778831 - RNA, 16 nt, Human
accuagagccagacca

SEQ ID NO: 3778832 - RNA, 13 nt, Human
accuagaucagaa

SEQ ID NO: 3778833 - RNA, 21 nt, Human
accuagauguauaacuaggag

SEQ ID NO: 3778834 - RNA, 13 nt, Human
accuagauuuaau

SEQ ID NO: 3778835 - RNA, 17 nt, Human
accuagauuuaauauaa

SEQ ID NO: 3778836 - RNA, 12 nt, Human
accuagauuuuu

SEQ ID NO: 3778837 - RNA, 13 nt, Human
accuagcaauucc

SEQ ID NO: 3778838 - RNA, 14 nt, Human
accuagcaauucca

SEQ ID NO: 3778839 - RNA, 14 nt, Human
accuagcagcaccg

SEQ ID NO: 3778840 - RNA, 23 nt, Human
accuagcagcaccguucugugca

SEQ ID NO: 3778841 - RNA, 13 nt, Human
accuagccuuaga

SEQ ID NO: 3778842 - RNA, 18 nt, Human
accuagcuggcucuguga

SEQ ID NO: 3778843 - RNA, 14 nt, Human
accuagcugugcaa

SEQ ID NO: 3778844 - RNA, 18 nt, Human
accuaggaagccucagau

SEQ ID NO: 3778845 - RNA, 17 nt, Human
accuaggauaucuucuc

SEQ ID NO: 3778846 - RNA, 17 nt, Human
accuaggccacuccucc

SEQ ID NO: 3778847 - RNA, 12 nt, Human
accuaggcuagg

SEQ ID NO: 3778848 - RNA, 15 nt, Human
accuagggaggaccu

SEQ ID NO: 3778849 - RNA, 16 nt, Human
accuagggugauauua

SEQ ID NO: 3778850 - RNA, 21 nt, Human
accuagggugauauuaaccag

SEQ ID NO: 3778851 - RNA, 14 nt, Human
accuaguacugccc

SEQ ID NO: 3778852 - RNA, 18 nt, Human
accuauaaaacaggucaa

SEQ ID NO: 3778853 - RNA, 16 nt, Human
accuauaaugugugua

SEQ ID NO: 3778854 - RNA, 17 nt, Human
accuauaauguguguau

SEQ ID NO: 3778855 - RNA, 15 nt, Human
accuauaccuguguu

SEQ ID NO: 3778856 - RNA, 16 nt, Human
accuauagucccagcu

SEQ ID NO: 3778857 - RNA, 17 nt, Human
accuauaugauuuauag

SEQ ID NO: 3778858 - RNA, 17 nt, Human
accuaugagugagaaua

SEQ ID NO: 3778859 - RNA, 19 nt, Human
accuaugauauuuucugug

SEQ ID NO: 3778860 - RNA, 22 nt, Human
accuaugguauaaugguugacu

SEQ ID NO: 3778861 - RNA, 15 nt, Human
accuaugucauuuca

SEQ ID NO: 3778862 - RNA, 18 nt, Human
accuaugucauuucauuu

SEQ ID NO: 3778863 - RNA, 17 nt, Human
accuauuucaaaaauuu

SEQ ID NO: 3778864 - RNA, 16 nt, Human
accuauuuccagaaau

SEQ ID NO: 3778865 - RNA, 17 nt, Human
accuauuuccagaaaua

SEQ ID NO: 3778866 - RNA, 19 nt, Human
accuauuuccagaaauaca

SEQ ID NO: 3778867 - RNA, 15 nt, Human
accucaaaauuuaac

SEQ ID NO: 3778868 - RNA, 20 nt, Human
accucaaacuaucuggccau

SEQ ID NO: 3778869 - RNA, 23 nt, Human
accucaaacuuccagucagguag

SEQ ID NO: 3778870 - RNA, 21 nt, Human
accucaaccauccuggcugcg

SEQ ID NO: 3778871 - RNA, 15 nt, Human
accucaaccuguaaa

SEQ ID NO: 3778872 - RNA, 18 nt, Human
accucaaccuguaaauua

SEQ ID NO: 3778873 - RNA, 19 nt, Human
accucaaccuguaaauuau

SEQ ID NO: 3778874 - RNA, 21 nt, Human
accucaaccuguaaauuauuu

SEQ ID NO: 3778875 - RNA, 21 nt, Human
accucaagggggacugucuuu

SEQ ID NO: 3778876 - RNA, 20 nt, Human
accucaagugauccucccac

SEQ ID NO: 3778877 - RNA, 23 nt, Human
accucaagugaucugcccaccuc

SEQ ID NO: 3778878 - RNA, 17 nt, Human
accucacaccucacucu

SEQ ID NO: 3778879 - RNA, 16 nt, Human
accucacacuccuuua

SEQ ID NO: 3778880 - RNA, 20 nt, Human
accucacagugacccuuccc

SEQ ID NO: 3778881 - RNA, 21 nt, Human
accucacagugacccuuccca

SEQ ID NO: 3778882 - RNA, 18 nt, Human
accucaccccgaggcccu

SEQ ID NO: 3778883 - RNA, 20 nt, Human
accucaccccguuacagcuc

SEQ ID NO: 3778884 - RNA, 22 nt, Human
accucaccccguuacagcuccc

SEQ ID NO: 3778885 - RNA, 19 nt, Human
accucacccgaggcugccc

SEQ ID NO: 3778886 - RNA, 17 nt, Human
accucacgcaccuccca

SEQ ID NO: 3778887 - RNA, 20 nt, Human
accucacuauucaaguauua

SEQ ID NO: 3778888 - RNA, 16 nt, Human
accucacucagcacca

SEQ ID NO: 3778889 - RNA, 20 nt, Human
accucacucagcaccacuca

SEQ ID NO: 3778890 - RNA, 14 nt, Human
accucacuccuguu

SEQ ID NO: 3778891 - RNA, 23 nt, Human
accucacucugcuaccuugcccc

SEQ ID NO: 3778892 - RNA, 15 nt, Human
accucacucuugcca

SEQ ID NO: 3778893 - RNA, 16 nt, Human
accucacucuugccaa

SEQ ID NO: 3778894 - RNA, 21 nt, Human
accucacugggguccuggggc

SEQ ID NO: 3778895 - RNA, 16 nt, Human
accucagagccccgca

SEQ ID NO: 3778896 - RNA, 21 nt, Human
accucagauggcagcuuuuaa

SEQ ID NO: 3778897 - RNA, 15 nt, Human
accucagcaaccugu

SEQ ID NO: 3778898 - RNA, 22 nt, Human
accucagccaugaggaguugcu

SEQ ID NO: 3778899 - RNA, 11 nt, Human
accucagccug

SEQ ID NO: 3778900 - RNA, 12 nt, Human
accucagccugc

SEQ ID NO: 3778901 - RNA, 19 nt, Human
accucagccuggccagaca

SEQ ID NO: 3778902 - RNA, 20 nt, Human
accucagccuggccagacac

SEQ ID NO: 3778903 - RNA, 13 nt, Human
accucagccuggg

SEQ ID NO: 3778904 - RNA, 14 nt, Human
accucagccugggc

SEQ ID NO: 3778905 - RNA, 15 nt, Human
accucagcugcuucu

SEQ ID NO: 3778906 - RNA, 18 nt, Human
accucaggcacuagccuu

SEQ ID NO: 3778907 - RNA, 19 nt, Human
accucaggcacuagccuuu

SEQ ID NO: 3778908 - RNA, 23 nt, Human
accucaggcacuagccuuuggcu

SEQ ID NO: 3778909 - RNA, 12 nt, Human
accucaggcagc

SEQ ID NO: 3778910 - RNA, 16 nt, Human
accucaggcagcucaa

SEQ ID NO: 3778911 - RNA, 17 nt, Human
accucaggcagcucaag

SEQ ID NO: 3778912 - RNA, 18 nt, Human
acucuuuguuauuugaaa

SEQ ID NO: 3778913 - RNA, 12 nt, Human
acucuuuugcuu

SEQ ID NO: 3778914 - RNA, 20 nt, Human
acucuuuugcuuuauuccag

SEQ ID NO: 3778915 - RNA, 19 nt, Human
acucuuuuuagggccaggc

SEQ ID NO: 3778916 - RNA, 20 nt, Human
acucuuuuuucauggacacu

SEQ ID NO: 3778917 - RNA, 15 nt, Human
acugaaaaaauauau

SEQ ID NO: 3778918 - RNA, 16 nt, Human
acugaaaaauuauacu

SEQ ID NO: 3778919 - RNA, 12 nt, Human
acugaaaacaua

SEQ ID NO: 3778920 - RNA, 17 nt, Human
acugaaaacauaaaaag

SEQ ID NO: 3778921 - RNA, 15 nt, Human
acugaaaacaucugg

SEQ ID NO: 3778922 - RNA, 16 nt, Human
acugaaaagaaggaaa

SEQ ID NO: 3778923 - RNA, 20 nt, Human
acugaaaaggaggggucugg

SEQ ID NO: 3778924 - RNA, 13 nt, Human
acugaaacuuccc

SEQ ID NO: 3778925 - RNA, 19 nt, Human
acugaaagguagacuuuua

SEQ ID NO: 3778926 - RNA, 14 nt, Human
acugaaaguguuuc

SEQ ID NO: 3778927 - RNA, 15 nt, Human
acugaaauauacaca

SEQ ID NO: 3778928 - RNA, 17 nt, Human
acugaaauauacacaca

SEQ ID NO: 3778929 - RNA, 17 nt, Human
acugaaaugccugcuuu

SEQ ID NO: 3778930 - RNA, 14 nt, Human
acugaacaaaaaaa

SEQ ID NO: 3778931 - RNA, 22 nt, Human
acugaacaaacuaucagaggaa

SEQ ID NO: 3778932 - RNA, 19 nt, Human
acugaacaccauugaaggc

SEQ ID NO: 3778933 - RNA, 21 nt, Human
acugaacaguaacauagcugu

SEQ ID NO: 3778934 - RNA, 16 nt, Human
acugaacauuccagag

SEQ ID NO: 3778935 - RNA, 16 nt, Human
acugaaccacuuguag

SEQ ID NO: 3778936 - RNA, 19 nt, Human
acugaacgauccuucaaag

SEQ ID NO: 3778937 - RNA, 21 nt, Human
acugaacuguguguaauuguu

SEQ ID NO: 3778938 - RNA, 13 nt, Human
acugaacuucagg

SEQ ID NO: 3778939 - RNA, 13 nt, Human
acugaacuuucuu

SEQ ID NO: 3778940 - RNA, 16 nt, Human
acugaacuuucuuauc

SEQ ID NO: 3778941 - RNA, 15 nt, Human
acugaacuuugaaga

SEQ ID NO: 3778942 - RNA, 16 nt, Human
acugaacuuugaagac

SEQ ID NO: 3778943 - RNA, 23 nt, Human
acugaagaggaggaggagggucu

SEQ ID NO: 3778944 - RNA, 12 nt, Human
acugaagaguaa

SEQ ID NO: 3778945 - RNA, 17 nt, Human
acugaagauagaagaaa

SEQ ID NO: 3778946 - RNA, 14 nt, Human
acugaagccugcag

SEQ ID NO: 3778947 - RNA, 19 nt, Human
acugaagccugcaggaguu

SEQ ID NO: 3778948 - RNA, 23 nt, Human
acugaaggaaaaacacaagcaaa

SEQ ID NO: 3778949 - RNA, 13 nt, Human
acugaaggagaag

SEQ ID NO: 3778950 - RNA, 14 nt, Human
acugaaggagaagg

SEQ ID NO: 3778951 - RNA, 21 nt, Human
acugaaggagaaggugcccca

SEQ ID NO: 3778952 - RNA, 19 nt, Human
acugaaggcuaaaaagcaa

SEQ ID NO: 3778953 - RNA, 20 nt, Human
acugaaggcuuucagggccu

SEQ ID NO: 3778954 - RNA, 17 nt, Human
acugaagguaaaauuga

SEQ ID NO: 3778955 - RNA, 13 nt, Human
acugaagucugaa

SEQ ID NO: 3778956 - RNA, 16 nt, Human
acugaagucugaaauu

SEQ ID NO: 3778957 - RNA, 21 nt, Human
acugaagucuuacuacagaaa

SEQ ID NO: 3778958 - RNA, 17 nt, Human
acugaaguuaacagaga

SEQ ID NO: 3778959 - RNA, 21 nt, Human
acugaaguuaacagagacaga

SEQ ID NO: 3778960 - RNA, 18 nt, Human
acugaaguuugauaaaua

SEQ ID NO: 3778961 - RNA, 21 nt, Human
acugaaguuugauaaauagug

SEQ ID NO: 3778962 - RNA, 22 nt, Human
acugaaguuugauaaauagugu

SEQ ID NO: 3778963 - RNA, 22 nt, Human
acugaauaaauuguacagccgg

SEQ ID NO: 3778964 - RNA, 13 nt, Human
acugaauaccacu

SEQ ID NO: 3778965 - RNA, 21 nt, Human
acugaauaccacucuguaauu

SEQ ID NO: 3778966 - RNA, 22 nt, Human
acugaauaccacucuguaauug

SEQ ID NO: 3778967 - RNA, 18 nt, Human
acugaauauuuauauuuc

SEQ ID NO: 3778968 - RNA, 22 nt, Human
acugaauauuuauauuucacua

SEQ ID NO: 3778969 - RNA, 22 nt, Human
acugaaugaaacccccacacac

SEQ ID NO: 3778970 - RNA, 20 nt, Human
acugaaugaagcaguauuuu

SEQ ID NO: 3778971 - RNA, 20 nt, Human
acugaaugaggucagcaugu

SEQ ID NO: 3778972 - RNA, 21 nt, Human
acugaaugccucaaugugacc

SEQ ID NO: 3778973 - RNA, 22 nt, Human
acugaauggacuuugcacacuu

SEQ ID NO: 3778974 - RNA, 20 nt, Human
acugaaugggaucaugaaag

SEQ ID NO: 3778975 - RNA, 21 nt, Human
acugaaugggaucaugaaagu

SEQ ID NO: 3778976 - RNA, 13 nt, Human
acugaauuaauca

SEQ ID NO: 3778977 - RNA, 14 nt, Human
acugaauuaugaaa

SEQ ID NO: 3778978 - RNA, 21 nt, Human
acugaauuccaaacaugguuu

SEQ ID NO: 3778979 - RNA, 15 nt, Human
acugaauuuuuaugu

SEQ ID NO: 3778980 - RNA, 15 nt, Human
acugaauuuuuuugu

SEQ ID NO: 3778981 - RNA, 17 nt, Human
acugacaaaucaaguuu

SEQ ID NO: 3778982 - RNA, 19 nt, Human
acugacaaaucaaguuucc

SEQ ID NO: 3778983 - RNA, 18 nt, Human
acugacaagccaucuuga

SEQ ID NO: 3778984 - RNA, 23 nt, Human
acugacacaaaaaguagauuaag

SEQ ID NO: 3778985 - RNA, 16 nt, Human
acugacacaaaggaag

SEQ ID NO: 3778986 - RNA, 17 nt, Human
acugacacaaaggaagu

SEQ ID NO: 3778987 - RNA, 20 nt, Human
acugacacaggaaaccaaca

SEQ ID NO: 3778988 - RNA, 13 nt, Human
acugacacaugcu

SEQ ID NO: 3778989 - RNA, 17 nt, Human
acugacaccuuugcagg

SEQ ID NO: 3778990 - RNA, 20 nt, Human
acugacaccuuugcaggcau

SEQ ID NO: 3778991 - RNA, 14 nt, Human
acugacagaggggg

SEQ ID NO: 3778992 - RNA, 20 nt, Human
acugacagcaugugcccucc

SEQ ID NO: 3778993 - RNA, 21 nt, Human
acugacaggcagccuggacau

SEQ ID NO: 3778994 - RNA, 15 nt, Human
acugacauauaucua

SEQ ID NO: 3778995 - RNA, 16 nt, Human
acugacaugcccuccc

SEQ ID NO: 3778996 - RNA, 13 nt, Human
acugaccagccuc

SEQ ID NO: 3778997 - RNA, 15 nt, Human
acugaccagccucca

SEQ ID NO: 3778998 - RNA, 23 nt, Human
acugaccauccacucuacccucc

SEQ ID NO: 3778999 - RNA, 18 nt, Human
acugacccucccuuccug

SEQ ID NO: 3779000 - RNA, 12 nt, Human
acugacccuucc

SEQ ID NO: 3779001 - RNA, 15 nt, Human
acugacccuuccaga

SEQ ID NO: 3779002 - RNA, 13 nt, Human
acugaccuugaug

SEQ ID NO: 3779003 - RNA, 22 nt, Human
acugaccuuggagagacacagc

SEQ ID NO: 3779004 - RNA, 14 nt, Human
acugacgccagggu

SEQ ID NO: 3779005 - RNA, 18 nt, Human
acugacuauucuugaugu

SEQ ID NO: 3779006 - RNA, 24 nt, Human
acugacuauucuugauguaaaauc

SEQ ID NO: 3779007 - RNA, 12 nt, Human
acugacucugga

SEQ ID NO: 3779008 - RNA, 13 nt, Human
acugacucuuaag

SEQ ID NO: 3779009 - RNA, 15 nt, Human
acugacucuuaagaa

SEQ ID NO: 3779010 - RNA, 16 nt, Human
acugacuucuaaguaa

SEQ ID NO: 3779011 - RNA, 13 nt, Human
acugacuugagac

SEQ ID NO: 3779012 - RNA, 20 nt, Human
acugacuuguuugucuucca

SEQ ID NO: 3779013 - RNA, 12 nt, Human
acugagaaauuu

SEQ ID NO: 3779014 - RNA, 17 nt, Human
acugagaaauuuauaaa

SEQ ID NO: 3779015 - RNA, 15 nt, Human
acugagacagcccgg

SEQ ID NO: 3779016 - RNA, 21 nt, Human
acugagacagcccgggcucug

SEQ ID NO: 3779017 - RNA, 23 nt, Human
acugagacagcccgggcucugcc

SEQ ID NO: 3779018 - RNA, 16 nt, Human
acugagagagcgcagc

SEQ ID NO: 3779019 - RNA, 17 nt, Human
acugagagaucugcugu

SEQ ID NO: 3779020 - RNA, 20 nt, Human
acugagagaugcagaaauau

SEQ ID NO: 3779021 - RNA, 18 nt, Human
acugagagugaacaaauu

SEQ ID NO: 3779022 - RNA, 19 nt, Human
acugagauaccagcgagga

SEQ ID NO: 3779023 - RNA, 17 nt, Human
acugagaugugaacaca

SEQ ID NO: 3779024 - RNA, 22 nt, Human
acugagaugugaacacaucagc

SEQ ID NO: 3779025 - RNA, 20 nt, Human
acugagcaacgcuauuccag

SEQ ID NO: 3779026 - RNA, 21 nt, Human
acugagcaagacccugucucu

SEQ ID NO: 3779027 - RNA, 14 nt, Human
acugagcacccucu

SEQ ID NO: 3779028 - RNA, 13 nt, Human
acugagcacuguu

SEQ ID NO: 3779029 - RNA, 12 nt, Human
acugagcagacu

SEQ ID NO: 3779030 - RNA, 21 nt, Human
acugagccccgcagaccuccc

SEQ ID NO: 3779031 - RNA, 23 nt, Human
acugagccccgcagaccucccca

SEQ ID NO: 3779032 - RNA, 23 nt, Human
acugagcuccaugugcccccucu

SEQ ID NO: 3779033 - RNA, 14 nt, Human
acugagcuccucug

SEQ ID NO: 3779034 - RNA, 17 nt, Human
acugagcuuggaagcuu

SEQ ID NO: 3779035 - RNA, 19 nt, Human
acugaggacaaaguggagg

SEQ ID NO: 3779036 - RNA, 15 nt, Human
acugaggcacgagca

SEQ ID NO: 3779037 - RNA, 13 nt, Human
acugaggcagaca

SEQ ID NO: 3779038 - RNA, 22 nt, Human
acugaggcagacagcagcucag

SEQ ID NO: 3779039 - RNA, 23 nt, Human
acugaggcagacagcagcucagg

SEQ ID NO: 3779040 - RNA, 18 nt, Human
acugaggcaguuugagga

SEQ ID NO: 3779041 - RNA, 21 nt, Human
acugaggccugagacccagga

SEQ ID NO: 3779042 - RNA, 22 nt, Human
acugagggaccaacugggccca

SEQ ID NO: 3779043 - RNA, 14 nt, Human
acugagggacucug

SEQ ID NO: 3779044 - RNA, 22 nt, Human
acugagggacucugaagccucu

SEQ ID NO: 3779045 - RNA, 17 nt, Human
acugaggggaggggagc

SEQ ID NO: 3779046 - RNA, 17 nt, Human
acugagggggccuggau

SEQ ID NO: 3779047 - RNA, 18 nt, Human
acugaggggucuccagga

SEQ ID NO: 3779048 - RNA, 19 nt, Human
acugaguacguugugcauu

SEQ ID NO: 3779049 - RNA, 23 nt, Human
acugagugacucuauauagcuga

SEQ ID NO: 3779050 - RNA, 22 nt, Human
acgaggcccucgggcccagccc

SEQ ID NO: 3779051 - RNA, 14 nt, Human
acgaggcugggcca

SEQ ID NO: 3779052 - RNA, 12 nt, Human
acgagggcuggc

SEQ ID NO: 3779053 - RNA, 14 nt, Human
acgagggcuggcug

SEQ ID NO: 3779054 - RNA, 16 nt, Human
acgagggcuggcuggc

SEQ ID NO: 3779055 - RNA, 20 nt, Human
acgaggucaagagaucgaga

SEQ ID NO: 3779056 - RNA, 20 nt, Human
acgaggucaggagaucgaga

SEQ ID NO: 3779057 - RNA, 14 nt, Human
acgaucacaaauga

SEQ ID NO: 3779058 - RNA, 15 nt, Human
acgaucacaaaugac

SEQ ID NO: 3779059 - RNA, 17 nt, Human
acgaucaggcacagguc

SEQ ID NO: 3779060 - RNA, 15 nt, Human
acgaugauguacaga

SEQ ID NO: 3779061 - RNA, 15 nt, Human
acgauggcacccagu

SEQ ID NO: 3779062 - RNA, 19 nt, Human
acgauguggcccuggccug

SEQ ID NO: 3779063 - RNA, 15 nt, Human
acgaugugucuguau

SEQ ID NO: 3779064 - RNA, 19 nt, Human
acgauucauuuuugaaacu

SEQ ID NO: 3779065 - RNA, 16 nt, Human
acgauuccuucucuga

SEQ ID NO: 3779066 - RNA, 14 nt, Human
acgauuuaauucuc

SEQ ID NO: 3779067 - RNA, 13 nt, Human
acgauuucuguuu

SEQ ID NO: 3779068 - RNA, 14 nt, Human
acgauuucuguuua

SEQ ID NO: 3779069 - RNA, 18 nt, Human
acgcaaaaccacuuuccu

SEQ ID NO: 3779070 - RNA, 23 nt, Human
acgcaaugaaaagucguuuucca

SEQ ID NO: 3779071 - RNA, 12 nt, Human
acgcacacagcu

SEQ ID NO: 3779072 - RNA, 13 nt, Human
acgcacacagcuu

SEQ ID NO: 3779073 - RNA, 15 nt, Human
acgcacagccaagga

SEQ ID NO: 3779074 - RNA, 17 nt, Human
acgcacagccaaggacu

SEQ ID NO: 3779075 - RNA, 19 nt, Human
acgcacauauacacacaca

SEQ ID NO: 3779076 - RNA, 22 nt, Human
acgcaccaccaugccaggcuaa

SEQ ID NO: 3779077 - RNA, 19 nt, Human
acgcaccucccauccuaau

SEQ ID NO: 3779078 - RNA, 14 nt, Human
acgcacgcacacac

SEQ ID NO: 3779079 - RNA, 23 nt, Human
acgcacugagcaacgcuauucca

SEQ ID NO: 3779080 - RNA, 13 nt, Human
acgcagccaggac

SEQ ID NO: 3779081 - RNA, 14 nt, Human
acgcagcccuagag

SEQ ID NO: 3779082 - RNA, 19 nt, Human
acgcagcccuagagccugc

SEQ ID NO: 3779083 - RNA, 12 nt, Human
acgcagcccugc

SEQ ID NO: 3779084 - RNA, 16 nt, Human
acgcaggaacucccag

SEQ ID NO: 3779085 - RNA, 16 nt, Human
acgcaggcaucugauu

SEQ ID NO: 3779086 - RNA, 22 nt, Human
acgcaucuaguuccccuguuua

SEQ ID NO: 3779087 - RNA, 15 nt, Human
acgccacagcccagc

SEQ ID NO: 3779088 - RNA, 12 nt, Human
acgccacauccc

SEQ ID NO: 3779089 - RNA, 13 nt, Human
acgccaccauucc

SEQ ID NO: 3779090 - RNA, 21 nt, Human
acgccacucauuucaucucau

SEQ ID NO: 3779091 - RNA, 18 nt, Human
acgccacugcacuauagc

SEQ ID NO: 3779092 - RNA, 14 nt, Human
acgccacugcacuc

SEQ ID NO: 3779093 - RNA, 21 nt, Human
acgccacugcacuccagccug

SEQ ID NO: 3779094 - RNA, 18 nt, Human
acgccagggaccccagaa

SEQ ID NO: 3779095 - RNA, 24 nt, Human
acgccaggggaaaaucagccugcu

SEQ ID NO: 3779096 - RNA, 15 nt, Human
acgccaucccagccc

SEQ ID NO: 3779097 - RNA, 18 nt, Human
acgcccacuucccugggu

SEQ ID NO: 3779098 - RNA, 15 nt, Human
acgcccaucucagga

SEQ ID NO: 3779099 - RNA, 16 nt, Human
acgcccaugugugagu

SEQ ID NO: 3779100 - RNA, 16 nt, Human
acgcccguccugccug

SEQ ID NO: 3779101 - RNA, 18 nt, Human
acgcccguccugccugug

SEQ ID NO: 3779102 - RNA, 14 nt, Human
acgcccuccccucc

SEQ ID NO: 3779103 - RNA, 21 nt, Human
acgcccuccccuccccugcug

SEQ ID NO: 3779104 - RNA, 23 nt, Human
acgcccuccccuccccugcugca

SEQ ID NO: 3779105 - RNA, 14 nt, Human
acgcccucucccca

SEQ ID NO: 3779106 - RNA, 17 nt, Human
acgcccuuggccauggg

SEQ ID NO: 3779107 - RNA, 23 nt, Human
acgccggggacagaggccugccc

SEQ ID NO: 3779108 - RNA, 17 nt, Human
acgccuaugaucccagc

SEQ ID NO: 3779109 - RNA, 18 nt, Human
acgccuaugaucccagca

SEQ ID NO: 3779110 - RNA, 18 nt, Human
acgccucacugaaacaug

SEQ ID NO: 3779111 - RNA, 14 nt, Human
acgccucccacugg

SEQ ID NO: 3779112 - RNA, 15 nt, Human
acgccugagcccagg

SEQ ID NO: 3779113 - RNA, 16 nt, Human
acgccugagcccaggg

SEQ ID NO: 3779114 - RNA, 17 nt, Human
acgccugagcccaggga

SEQ ID NO: 3779115 - RNA, 19 nt, Human
acgccugaggcaauuagac

SEQ ID NO: 3779116 - RNA, 18 nt, Human
acgccugcaaacgcugcc

SEQ ID NO: 3779117 - RNA, 21 nt, Human
acgccugcccuccccagagca

SEQ ID NO: 3779118 - RNA, 16 nt, Human
acgccuguaaucccag

SEQ ID NO: 3779119 - RNA, 18 nt, Human
acgccuguaaucccagca

SEQ ID NO: 3779120 - RNA, 20 nt, Human
acgccuguaaucccagcacu

SEQ ID NO: 3779121 - RNA, 19 nt, Human
acgccuguaaucccagcag

SEQ ID NO: 3779122 - RNA, 16 nt, Human
acgccuguaguccuag

SEQ ID NO: 3779123 - RNA, 18 nt, Human
acgccuuguucuuggcca

SEQ ID NO: 3779124 - RNA, 20 nt, Human
acgcgaaaccaauuccucau

SEQ ID NO: 3779125 - RNA, 22 nt, Human
acgcgaaaguaucaccagggug

SEQ ID NO: 3779126 - RNA, 19 nt, Human
acgcgcagaugugcagcag

SEQ ID NO: 3779127 - RNA, 23 nt, Human
acgcgccucgccggaucugaggg

SEQ ID NO: 3779128 - RNA, 14 nt, Human
acgcgcgcacacac

SEQ ID NO: 3779129 - RNA, 15 nt, Human
acgcgcgcacacaca

SEQ ID NO: 3779130 - RNA, 15 nt, Human
acgcgguuugguuug

SEQ ID NO: 3779131 - RNA, 15 nt, Human
acgcgucuccuguuu

SEQ ID NO: 3779132 - RNA, 13 nt, Human
acgcgucuuccug

SEQ ID NO: 3779133 - RNA, 15 nt, Human
acgcgucuuccugag

SEQ ID NO: 3779134 - RNA, 20 nt, Human
acgcgugcacacaccagagc

SEQ ID NO: 3779135 - RNA, 23 nt, Human
acgcgugcacacaccagagccca

SEQ ID NO: 3779136 - RNA, 16 nt, Human
acgcgugccguggcac

SEQ ID NO: 3779137 - RNA, 21 nt, Human
acgcguguguacacgggacug

SEQ ID NO: 3779138 - RNA, 16 nt, Human
acgcuaaagagcccuu

SEQ ID NO: 3779139 - RNA, 21 nt, Human
acgcuccaaagucauaauugc

SEQ ID NO: 3779140 - RNA, 11 nt, Human
acgcuccagcu

SEQ ID NO: 3779141 - RNA, 14 nt, Human
acgcuccagcugcc

SEQ ID NO: 3779142 - RNA, 19 nt, Human
acgcuccagcugccccggc

SEQ ID NO: 3779143 - RNA, 14 nt, Human
acgcuccccgccug

SEQ ID NO: 3779144 - RNA, 17 nt, Human
acgcuccccgccuguuc

SEQ ID NO: 3779145 - RNA, 19 nt, Human
acgcuccccgccuguuccc

SEQ ID NO: 3779146 - RNA, 20 nt, Human
acgcuccccgccuguucccc

SEQ ID NO: 3779147 - RNA, 16 nt, Human
acgcucccucccccug

SEQ ID NO: 3779148 - RNA, 19 nt, Human
acuccggccugaugacaga

SEQ ID NO: 3779149 - RNA, 14 nt, Human
acuccggcugugcu

SEQ ID NO: 3779150 - RNA, 16 nt, Human
acuccggcugugcugg

SEQ ID NO: 3779151 - RNA, 20 nt, Human
acuccgugcuuaaccaaaga

SEQ ID NO: 3779152 - RNA, 21 nt, Human
acuccguuggccacuccgaga

SEQ ID NO: 3779153 - RNA, 19 nt, Human
acuccuaaaccuuugcccc

SEQ ID NO: 3779154 - RNA, 21 nt, Human
acuccuacaugauguuaugua

SEQ ID NO: 3779155 - RNA, 20 nt, Human
acuccuagagaacgcagccc

SEQ ID NO: 3779156 - RNA, 21 nt, Human
acuccuagagaacgcagcccu

SEQ ID NO: 3779157 - RNA, 23 nt, Human
acuccuagcuguccuuuuuccuc

SEQ ID NO: 3779158 - RNA, 14 nt, Human
acuccuaugcuuua

SEQ ID NO: 3779159 - RNA, 16 nt, Human
acuccucaggguugag

SEQ ID NO: 3779160 - RNA, 19 nt, Human
acuccucaggguugagguc

SEQ ID NO: 3779161 - RNA, 22 nt, Human
acuccucaguucuugccacuuu

SEQ ID NO: 3779162 - RNA, 13 nt, Human
acuccucccaggg

SEQ ID NO: 3779163 - RNA, 19 nt, Human
acuccucccaggguuuuaa

SEQ ID NO: 3779164 - RNA, 22 nt, Human
acuccucccaggguuuuaacuu

SEQ ID NO: 3779165 - RNA, 23 nt, Human
acuccuccccacccuccuggccu

SEQ ID NO: 3779166 - RNA, 11 nt, Human
acuccucccuc

SEQ ID NO: 3779167 - RNA, 16 nt, Human
acuccucccugaugua

SEQ ID NO: 3779168 - RNA, 13 nt, Human
acuccuccucuuu

SEQ ID NO: 3779169 - RNA, 15 nt, Human
acuccuccuuucucc

SEQ ID NO: 3779170 - RNA, 16 nt, Human
acuccuccuuuuucca

SEQ ID NO: 3779171 - RNA, 23 nt, Human
acuccucggccuggcuccuaccc

SEQ ID NO: 3779172 - RNA, 20 nt, Human
acuccucugacucagggcuc

SEQ ID NO: 3779173 - RNA, 12 nt, Human
acuccucugcag

SEQ ID NO: 3779174 - RNA, 15 nt, Human
acuccucugcgucua

SEQ ID NO: 3779175 - RNA, 20 nt, Human
acuccucugcgucuauccug

SEQ ID NO: 3779176 - RNA, 14 nt, Human
acuccucuuauuug

SEQ ID NO: 3779177 - RNA, 16 nt, Human
acuccucuuauuugcu

SEQ ID NO: 3779178 - RNA, 16 nt, Human
acuccugaccucaggc

SEQ ID NO: 3779179 - RNA, 19 nt, Human
acuccugacgucugaagcu

SEQ ID NO: 3779180 - RNA, 16 nt, Human
acuccugaggacagcu

SEQ ID NO: 3779181 - RNA, 19 nt, Human
acuccugaggacagcuguc

SEQ ID NO: 3779182 - RNA, 15 nt, Human
acuccugcaaaauuu

SEQ ID NO: 3779183 - RNA, 18 nt, Human
acuccugcaaaauuuuau

SEQ ID NO: 3779184 - RNA, 18 nt, Human
acuccugcaggcagccag

SEQ ID NO: 3779185 - RNA, 19 nt, Human
acuccugcaggcagccagg

SEQ ID NO: 3779186 - RNA, 17 nt, Human
acuccugccaaggagga

SEQ ID NO: 3779187 - RNA, 12 nt, Human
acuccuggaaau

SEQ ID NO: 3779188 - RNA, 12 nt, Human
acuccuggccuc

SEQ ID NO: 3779189 - RNA, 16 nt, Human
acuccuggguugagcu

SEQ ID NO: 3779190 - RNA, 23 nt, Human
acuccuggguugagcuguugccu

SEQ ID NO: 3779191 - RNA, 22 nt, Human
acuccugguccuaggcuggaag

SEQ ID NO: 3779192 - RNA, 21 nt, Human
acuccuggucugaaaauguug

SEQ ID NO: 3779193 - RNA, 17 nt, Human
acuccuguacacugaau

SEQ ID NO: 3779194 - RNA, 18 nt, Human
acuccugucuucugcuuu

SEQ ID NO: 3779195 - RNA, 17 nt, Human
acuccugugggagccuc

SEQ ID NO: 3779196 - RNA, 18 nt, Human
acuccugugggagccucg

SEQ ID NO: 3779197 - RNA, 17 nt, Human
acuccuguuacuuaccu

SEQ ID NO: 3779198 - RNA, 12 nt, Human
acuccuuagaga

SEQ ID NO: 3779199 - RNA, 13 nt, Human
acuccuuccuggc

SEQ ID NO: 3779200 - RNA, 17 nt, Human
aauaaaaacuuacacuc

SEQ ID NO: 3779201 - RNA, 23 nt, Human
aauaaaaagaucacuuucucagu

SEQ ID NO: 3779202 - RNA, 13 nt, Human
aauaaaaagcuuu

SEQ ID NO: 3779203 - RNA, 12 nt, Human
aauaaaaaguua

SEQ ID NO: 3779204 - RNA, 12 nt, Human
aauaaaaauaau

SEQ ID NO: 3779205 - RNA, 22 nt, Human
aauaaaaauauuguguugugaa

SEQ ID NO: 3779206 - RNA, 13 nt, Human
aauaaaaauggau

SEQ ID NO: 3779207 - RNA, 14 nt, Human
aauaaaacaaaggg

SEQ ID NO: 3779208 - RNA, 23 nt, Human
aauaaaacauuuuaaauggacag

SEQ ID NO: 3779209 - RNA, 19 nt, Human
aauaaaacauuuucacaca

SEQ ID NO: 3779210 - RNA, 20 nt, Human
aauaaaacccguugauuacu

SEQ ID NO: 3779211 - RNA, 21 nt, Human
aauaaaaccgaaggugaaaaa

SEQ ID NO: 3779212 - RNA, 18 nt, Human
aauaaaacugaugugaaa

SEQ ID NO: 3779213 - RNA, 19 nt, Human
aauaaaacugaugugaaac

SEQ ID NO: 3779214 - RNA, 12 nt, Human
aauaaaacuguc

SEQ ID NO: 3779215 - RNA, 12 nt, Human
aauaaaacuuuu

SEQ ID NO: 3779216 - RNA, 14 nt, Human
aauaaaacuuuuua

SEQ ID NO: 3779217 - RNA, 15 nt, Human
aauaaaagcccagga

SEQ ID NO: 3779218 - RNA, 17 nt, Human
aauaaaagcccaggagc

SEQ ID NO: 3779219 - RNA, 13 nt, Human
aauaaaaggucua

SEQ ID NO: 3779220 - RNA, 20 nt, Human
aauaaaaguuuuacaaaggg

SEQ ID NO: 3779221 - RNA, 16 nt, Human
aauaaaauaauucuaa

SEQ ID NO: 3779222 - RNA, 12 nt, Human
aauaaaauauaa

SEQ ID NO: 3779223 - RNA, 14 nt, Human
aauaaaauauuuuc

SEQ ID NO: 3779224 - RNA, 16 nt, Human
aauaaaauauuuucug

SEQ ID NO: 3779225 - RNA, 17 nt, Human
aauaaaauauuuucugu

SEQ ID NO: 3779226 - RNA, 19 nt, Human
aauaaaauauuuucugugu

SEQ ID NO: 3779227 - RNA, 22 nt, Human
aauaaaauauuuucuguguguu

SEQ ID NO: 3779228 - RNA, 23 nt, Human
aauaaaauauuuucuguguguuc

SEQ ID NO: 3779229 - RNA, 16 nt, Human
aauaaaaucaauuuuu

SEQ ID NO: 3779230 - RNA, 22 nt, Human
aauaaaauccauacauuugugu

SEQ ID NO: 3779231 - RNA, 13 nt, Human
aauaaaauguuua

SEQ ID NO: 3779232 - RNA, 17 nt, Human
aauaaaauuaagaaugu

SEQ ID NO: 3779233 - RNA, 18 nt, Human
aauaaaauucaacaaaca

SEQ ID NO: 3779234 - RNA, 15 nt, Human
aauaaaauugcacuu

SEQ ID NO: 3779235 - RNA, 12 nt, Human
aauaaaauuuaa

SEQ ID NO: 3779236 - RNA, 12 nt, Human
aauaaaauuugu

SEQ ID NO: 3779237 - RNA, 13 nt, Human
aauaaaauuuguu

SEQ ID NO: 3779238 - RNA, 18 nt, Human
aauaaaauuuuuuuucau

SEQ ID NO: 3779239 - RNA, 22 nt, Human
aauaaaauuuuuuuucauguuu

SEQ ID NO: 3779240 - RNA, 13 nt, Human
aauaaacaaauaa

SEQ ID NO: 3779241 - RNA, 15 nt, Human
aauaaacacuacaga

SEQ ID NO: 3779242 - RNA, 11 nt, Human
aauaaacacuc

SEQ ID NO: 3779243 - RNA, 19 nt, Human
aauaaacacucuugaaaaa

SEQ ID NO: 3779244 - RNA, 19 nt, Human
aauaaaccaaugaacgaag

SEQ ID NO: 3779245 - RNA, 10 nt, Human
aauaaaccau

SEQ ID NO: 3779246 - RNA, 17 nt, Human
aauaaaccucaaaaugu

SEQ ID NO: 3779247 - RNA, 12 nt, Human
aauaaacgauuu

SEQ ID NO: 3779248 - RNA, 20 nt, Human
aauaaacuacucuuugauuu

SEQ ID NO: 3779249 - RNA, 17 nt, Human
aauaaacuuagaauaaa

SEQ ID NO: 3779250 - RNA, 22 nt, Human
aauaaacuuagaauaaaauugu

SEQ ID NO: 3779251 - RNA, 15 nt, Human
aauaaacuuuuuuuc

SEQ ID NO: 3779252 - RNA, 17 nt, Human
aauaaacuuuuuuucaa

SEQ ID NO: 3779253 - RNA, 17 nt, Human
aauaaacuuuuuuuuga

SEQ ID NO: 3779254 - RNA, 13 nt, Human
aauaaagaaaaga

SEQ ID NO: 3779255 - RNA, 15 nt, Human
aauaaagaaaagaug

SEQ ID NO: 3779256 - RNA, 13 nt, Human
aauaaagaaauug

SEQ ID NO: 3779257 - RNA, 17 nt, Human
aauaaagaauggaaagc

SEQ ID NO: 3779258 - RNA, 17 nt, Human
aauaaagacaaccauau

SEQ ID NO: 3779259 - RNA, 20 nt, Human
aauaaagacaaccauauuua

SEQ ID NO: 3779260 - RNA, 15 nt, Human
aauaaagcaauuuuc

SEQ ID NO: 3779261 - RNA, 23 nt, Human
aauaaagcaauuuuccuugaagc

SEQ ID NO: 3779262 - RNA, 15 nt, Human
aauaaagcacugagc

SEQ ID NO: 3779263 - RNA, 11 nt, Human
aauaaagcccu

SEQ ID NO: 3779264 - RNA, 15 nt, Human
aauaaagcccuggga

SEQ ID NO: 3779265 - RNA, 18 nt, Human
aauaaagccuucaaacuc

SEQ ID NO: 3779266 - RNA, 17 nt, Human
aauaaagcgaaaaacuc

SEQ ID NO: 3779267 - RNA, 22 nt, Human
aauaaaggacuguaaucuuauu

SEQ ID NO: 3779268 - RNA, 23 nt, Human
aauaaaggcagcuguugucucuu

SEQ ID NO: 3779269 - RNA, 16 nt, Human
aauaaaggcaguuuuc

SEQ ID NO: 3779270 - RNA, 16 nt, Human
aauaaaguaucaugca

SEQ ID NO: 3779271 - RNA, 17 nt, Human
aauaaaguaucaugcau

SEQ ID NO: 3779272 - RNA, 20 nt, Human
aauaaaguauuccaccuuaa

SEQ ID NO: 3779273 - RNA, 13 nt, Human
aauaaaguauuua

SEQ ID NO: 3779274 - RNA, 23 nt, Human
aauaaaguauuuaauuagugcua

SEQ ID NO: 3779275 - RNA, 15 nt, Human
aauaaaguguaacaa

SEQ ID NO: 3779276 - RNA, 16 nt, Human
aauaaaguguuuucag

SEQ ID NO: 3779277 - RNA, 19 nt, Human
aauaaaguucugaguguuu

SEQ ID NO: 3779278 - RNA, 18 nt, Human
aauaaauaaaaacuaauu

SEQ ID NO: 3779279 - RNA, 12 nt, Human
aauaaauaaaug

SEQ ID NO: 3779280 - RNA, 19 nt, Human
aauaaauaaggaaaagcuu

SEQ ID NO: 3779281 - RNA, 16 nt, Human
aauaaauacauucuug

SEQ ID NO: 3779282 - RNA, 21 nt, Human
aauaaauagcuauauccaugu

SEQ ID NO: 3779283 - RNA, 15 nt, Human
aauaaauaguucuuc

SEQ ID NO: 3779284 - RNA, 13 nt, Human
aauaaauauauau

SEQ ID NO: 3779285 - RNA, 14 nt, Human
aauaaauauauaua

SEQ ID NO: 3779286 - RNA, 15 nt, Human
aauaaauauauauaa

SEQ ID NO: 3779287 - RNA, 23 nt, Human
aauaaauauaucuaccccagacu

SEQ ID NO: 3779288 - RNA, 10 nt, Human
aauaaauaug

SEQ ID NO: 3779289 - RNA, 11 nt, Human
aauaaauaugc

SEQ ID NO: 3779290 - RNA, 19 nt, Human
aauaaauaugccucuccuu

SEQ ID NO: 3779291 - RNA, 21 nt, Human
aauaaaucauuaauacucuuc

SEQ ID NO: 3779292 - RNA, 21 nt, Human
aauaaaucauucuuacuaaaa

SEQ ID NO: 3779293 - RNA, 15 nt, Human
aauaaaucugaccca

SEQ ID NO: 3779294 - RNA, 23 nt, Human
aauaaaugaaugucacuucugga

SEQ ID NO: 3779295 - RNA, 14 nt, Human
aauaaaugucacuu

SEQ ID NO: 3779296 - RNA, 19 nt, Human
aauaaaugucacuuuuuga

SEQ ID NO: 3779297 - RNA, 21 nt, Human
aauaaaugugccuucauuuuu

SEQ ID NO: 3779298 - RNA, 20 nt, Human
aauaaauugcuaauguugcu

SEQ ID NO: 3779299 - RNA, 16 nt, Human
aauaaauuguauauuc

SEQ ID NO: 3779300 - RNA, 15 nt, Human
aauaaauuuauauga

SEQ ID NO: 3779301 - RNA, 20 nt, Human
aauaaauuuauuuucuugga

SEQ ID NO: 3779302 - RNA, 13 nt, Human
aauaaauuugacu

SEQ ID NO: 3779303 - RNA, 20 nt, Human
aauaaauuugacuuuucugu

SEQ ID NO: 3779304 - RNA, 14 nt, Human
aauaaauuuugaaa

SEQ ID NO: 3779305 - RNA, 16 nt, Human
aauaaauuuugaaaag

SEQ ID NO: 3779306 - RNA, 18 nt, Human
aauaaauuuugaaaagua

SEQ ID NO: 3779307 - RNA, 14 nt, Human
aauaacaaaaugga

SEQ ID NO: 3779308 - RNA, 15 nt, Human
aauaacuguguacug

SEQ ID NO: 3779309 - RNA, 23 nt, Human
aauaacuuagacucuaguauuua

SEQ ID NO: 3779310 - RNA, 13 nt, Human
aauaacuucaguc

SEQ ID NO: 3779311 - RNA, 21 nt, Human
aauaacuucaguccugcucca

SEQ ID NO: 3779312 - RNA, 12 nt, Human
aauaacuuuuuu

SEQ ID NO: 3779313 - RNA, 12 nt, Human
aauaagaaaaga

SEQ ID NO: 3779314 - RNA, 15 nt, Human
aauaagaauggaaaa

SEQ ID NO: 3779315 - RNA, 17 nt, Human
aauaagacauaacguuu

SEQ ID NO: 3779316 - RNA, 14 nt, Human
aauaagauucuaac

SEQ ID NO: 3779317 - RNA, 14 nt, Human
aauaagcaggaugu

SEQ ID NO: 3779318 - RNA, 17 nt, Human
aauaagcuaguugaaua

SEQ ID NO: 3779319 - RNA, 18 nt, Human
aauaagcuaguugaauac

SEQ ID NO: 3779320 - RNA, 20 nt, Human
aauaagcuauuugauguaau

SEQ ID NO: 3779321 - RNA, 14 nt, Human
aauaagcucuaguu

SEQ ID NO: 3779322 - RNA, 15 nt, Human
aauaagcucuaguuc

SEQ ID NO: 3779323 - RNA, 21 nt, Human
aauaaggcaggcauugaggaa

SEQ ID NO: 3779324 - RNA, 17 nt, Human
aauaaggccuuaauaug

SEQ ID NO: 3779325 - RNA, 13 nt, Human
aauaagguuuuaa

SEQ ID NO: 3779326 - RNA, 22 nt, Human
aauaaguaucacacuguauaua

SEQ ID NO: 3779327 - RNA, 16 nt, Human
aauaaguauuuauaau

SEQ ID NO: 3779328 - RNA, 14 nt, Human
aauaagucaacagu

SEQ ID NO: 3779329 - RNA, 16 nt, Human
aauaagucaacaguaa

SEQ ID NO: 3779330 - RNA, 17 nt, Human
aauaagugccaggaugg

SEQ ID NO: 3779331 - RNA, 21 nt, Human
aauaagugugugguagaaaca

SEQ ID NO: 3779332 - RNA, 23 nt, Human
aauaagugugugguagaaacaaa

SEQ ID NO: 3779333 - RNA, 11 nt, Human
aauaaguuauu

SEQ ID NO: 3779334 - RNA, 20 nt, Human
aauaaguuuuuguuucacag

SEQ ID NO: 3779335 - RNA, 12 nt, Human
aauaauaaauag

SEQ ID NO: 3779336 - RNA, 13 nt, Human
aauaauaaauagu

SEQ ID NO: 3779337 - RNA, 11 nt, Human
aauaauaaauc

SEQ ID NO: 3779338 - RNA, 14 nt, Human
aauaauaaauugca

SEQ ID NO: 3779339 - RNA, 20 nt, Human
aauaauaccucaauguuuga

SEQ ID NO: 3779340 - RNA, 16 nt, Human
aauaauaccuuagaag

SEQ ID NO: 3779341 - RNA, 14 nt, Human
aauaauagacugua

SEQ ID NO: 3779342 - RNA, 17 nt, Human
aauaauauauuuuaaau

SEQ ID NO: 3779343 - RNA, 17 nt, Human
aauaauauauuuucugu

SEQ ID NO: 3779344 - RNA, 19 nt, Human
aauaauauauuuucuguuu

SEQ ID NO: 3779345 - RNA, 15 nt, Human
aauaauaugcauugu

SEQ ID NO: 3779346 - RNA, 20 nt, Human
aauaauauguuuccuucccu

SEQ ID NO: 3779347 - RNA, 14 nt, Human
aauaauauuguugu

SEQ ID NO: 3779348 - RNA, 13 nt, Human
aauaauauuguuu

SEQ ID NO: 3779349 - RNA, 15 nt, Human
aauaaucaagagccu

SEQ ID NO: 3779350 - RNA, 20 nt, Human
aauaaucacgcuuuccugaa

SEQ ID NO: 3779351 - RNA, 21 nt, Human
aauaaucacgcuuuccugaau

SEQ ID NO: 3779352 - RNA, 14 nt, Human
aauaauccugcaaa

SEQ ID NO: 3779353 - RNA, 13 nt, Human
aauaaucggccca

SEQ ID NO: 3779354 - RNA, 14 nt, Human
aauaaucucauugg

SEQ ID NO: 3779355 - RNA, 19 nt, Human
aauaaucuuauuagggaga

SEQ ID NO: 3779356 - RNA, 23 nt, Human
aauaaucuuauuagggagaaaau

SEQ ID NO: 3779357 - RNA, 14 nt, Human
aauaaucuuguuuc

SEQ ID NO: 3779358 - RNA, 16 nt, Human
aauaaugagcuauuaa

SEQ ID NO: 3779359 - RNA, 10 nt, Human
aauaaugcag

SEQ ID NO: 3779360 - RNA, 12 nt, Human
aauaaugcagua

SEQ ID NO: 3779361 - RNA, 19 nt, Human
aauaaugcaguaugguaca

SEQ ID NO: 3779362 - RNA, 22 nt, Human
aauaaugccuuuguaaccacaa

SEQ ID NO: 3779363 - RNA, 12 nt, Human
aauaaugcugca

SEQ ID NO: 3779364 - RNA, 12 nt, Human
aauaaugcuuug

SEQ ID NO: 3779365 - RNA, 18 nt, Human
aauaauggguuucuuuca

SEQ ID NO: 3779366 - RNA, 16 nt, Human
aauaauguaauuguaa

SEQ ID NO: 3779367 - RNA, 11 nt, Human
aauaaugucuc

SEQ ID NO: 3779368 - RNA, 13 nt, Human
aauaaugucucug

SEQ ID NO: 3779369 - RNA, 23 nt, Human
aauaaugucuuguuaauauucuu

SEQ ID NO: 3779370 - RNA, 17 nt, Human
aauaaugugcacugaau

SEQ ID NO: 3779371 - RNA, 16 nt, Human
aauaaugugggaagaa

SEQ ID NO: 3779372 - RNA, 19 nt, Human
aauaauguguaguucaugu

SEQ ID NO: 3779373 - RNA, 12 nt, Human
aauaauguuuca

SEQ ID NO: 3779374 - RNA, 23 nt, Human
aauaauuauaugcuauuucuaua

SEQ ID NO: 3779375 - RNA, 17 nt, Human
aauaauucauauucuuc

SEQ ID NO: 3779376 - RNA, 14 nt, Human
aauaauucuaaauc

SEQ ID NO: 3779377 - RNA, 14 nt, Human
aauaauugguucuu

SEQ ID NO: 3779378 - RNA, 13 nt, Human
aauaauuuauagu

SEQ ID NO: 3779379 - RNA, 13 nt, Human
aauaauuuuaaaa

SEQ ID NO: 3779380 - RNA, 17 nt, Human
aauaauuuuaaaaaugg

SEQ ID NO: 3779381 - RNA, 21 nt, Human
aauaauuuuaagaaaucaaag

SEQ ID NO: 3779382 - RNA, 23 nt, Human
aauaauuuuaugaacugcaugua

SEQ ID NO: 3779383 - RNA, 20 nt, Human
aauaauuuuuauauuugaaa

SEQ ID NO: 3779384 - RNA, 21 nt, Human
aauacaaaaaauuagccgggc

SEQ ID NO: 3779385 - RNA, 18 nt, Human
aauacaaaaaucagccag

SEQ ID NO: 3779386 - RNA, 13 nt, Human
aauacaaaacuuc

SEQ ID NO: 3779387 - RNA, 20 nt, Human
aauacaaacauauuuguuaa

SEQ ID NO: 3779388 - RNA, 21 nt, Human
aauacaaagaaccaagaaaaa

SEQ ID NO: 3779389 - RNA, 17 nt, Human
aauacaaaguuagagaa

SEQ ID NO: 3779390 - RNA, 18 nt, Human
aauacaaauggauuuugg

SEQ ID NO: 3779391 - RNA, 15 nt, Human
aauacaaauugguug

SEQ ID NO: 3779392 - RNA, 22 nt, Human
aauacaagacugccauauuaaa

SEQ ID NO: 3779393 - RNA, 17 nt, Human
aauacaaguuucaucca

SEQ ID NO: 3779394 - RNA, 12 nt, Human
aauacaauaaac

SEQ ID NO: 3779395 - RNA, 12 nt, Human
aauacaauuuug

SEQ ID NO: 3779396 - RNA, 18 nt, Human
aauacaauuuuguuucug

SEQ ID NO: 3779397 - RNA, 20 nt, Human
aauacaauuuuguuucugua

SEQ ID NO: 3779398 - RNA, 15 nt, Human
aauacacaaguaaac

SEQ ID NO: 3779399 - RNA, 17 nt, Human
aauacacaaguaaacau

SEQ ID NO: 3779400 - RNA, 15 nt, Human
aauacacauuugcua

SEQ ID NO: 3779401 - RNA, 16 nt, Human
aauacaccacuacauu

SEQ ID NO: 3779402 - RNA, 18 nt, Human
aauacaccacuacauucu

SEQ ID NO: 3779403 - RNA, 20 nt, Human
aauacaccacuacauucugu

SEQ ID NO: 3779404 - RNA, 21 nt, Human
aauacaccacuacauucuguu

SEQ ID NO: 3779405 - RNA, 20 nt, Human
aauacacuaauuccuuucua

SEQ ID NO: 3779406 - RNA, 17 nt, Human
aauacacuugcccugcu

SEQ ID NO: 3779407 - RNA, 19 nt, Human
aauacagaaauuagccggg

SEQ ID NO: 3779408 - RNA, 13 nt, Human
aauacagaggcaa

SEQ ID NO: 3779409 - RNA, 18 nt, Human
aauacagauaaaugauuc

SEQ ID NO: 3779410 - RNA, 19 nt, Human
aauacagauauauuuucuu

SEQ ID NO: 3779411 - RNA, 15 nt, Human
aauacagcagcaaga

SEQ ID NO: 3779412 - RNA, 16 nt, Human
aauacagcagcaagaa

SEQ ID NO: 3779413 - RNA, 17 nt, Human
aauacagcagcaagaaa

SEQ ID NO: 3779414 - RNA, 13 nt, Human
aauacaggaaaca

SEQ ID NO: 3779415 - RNA, 16 nt, Human
aauacagggcauuuug

SEQ ID NO: 3779416 - RNA, 19 nt, Human
aauacaguaagcugcucua

SEQ ID NO: 3779417 - RNA, 16 nt, Human
aauacaguauucugua

SEQ ID NO: 3779418 - RNA, 17 nt, Human
aauacaguucugucaua

SEQ ID NO: 3779419 - RNA, 15 nt, Human
aauacauacggucag

SEQ ID NO: 3779420 - RNA, 19 nt, Human
aauacauagggauaugcgu

SEQ ID NO: 3779421 - RNA, 18 nt, Human
aauacauauggauguuac

SEQ ID NO: 3779422 - RNA, 17 nt, Human
aauacaugacauuuauu

SEQ ID NO: 3779423 - RNA, 17 nt, Human
aauacaugaugauuuca

SEQ ID NO: 3779424 - RNA, 21 nt, Human
aauacaugcuaagagaaguag

SEQ ID NO: 3779425 - RNA, 14 nt, Human
aauacauuaaagca

SEQ ID NO: 3779426 - RNA, 15 nt, Human
aauacauuaaagcag

SEQ ID NO: 3779427 - RNA, 15 nt, Human
aauacauucugcuuu

SEQ ID NO: 3779428 - RNA, 12 nt, Human
aauacauucuug

SEQ ID NO: 3779429 - RNA, 16 nt, Human
aauacauuuaaaacuu

SEQ ID NO: 3779430 - RNA, 12 nt, Human
aauacauuuuau

SEQ ID NO: 3779431 - RNA, 12 nt, Human
aauaccaaggaa

SEQ ID NO: 3779432 - RNA, 19 nt, Human
aauaccacaucaaauaaga

SEQ ID NO: 3779433 - RNA, 17 nt, Human
aauaccacucuguaauu

SEQ ID NO: 3779434 - RNA, 19 nt, Human
aauaccacucuguaauugc

SEQ ID NO: 3779435 - RNA, 20 nt, Human
aauaccacucuguaauugca

SEQ ID NO: 3779436 - RNA, 16 nt, Human
aauaccagacugcagg

SEQ ID NO: 3779437 - RNA, 20 nt, Human
aauaccagugaaccaaagag

SEQ ID NO: 3779438 - RNA, 18 nt, Human
aauaccaugccauuuaaa

SEQ ID NO: 3779439 - RNA, 20 nt, Human
aauaccauuaaaacugcuuu

SEQ ID NO: 3779440 - RNA, 22 nt, Human
aauaccauuuuuuaaggaaaca

SEQ ID NO: 3779441 - RNA, 23 nt, Human
aauaccauuuuuuaaggaaacaa

SEQ ID NO: 3779442 - RNA, 15 nt, Human
aauaccucaauguuu

SEQ ID NO: 3779443 - RNA, 15 nt, Human
aauaccucaugcuuc

SEQ ID NO: 3779444 - RNA, 15 nt, Human
aauaccucuaauagu

SEQ ID NO: 3779445 - RNA, 16 nt, Human
aauaccucuuagcuga

SEQ ID NO: 3779446 - RNA, 15 nt, Human
aauaccucuuugaaa

SEQ ID NO: 3779447 - RNA, 18 nt, Human
aauaccugaaugcucugu

SEQ ID NO: 3779448 - RNA, 18 nt, Human
aauaccugucccccugac

SEQ ID NO: 3779449 - RNA, 19 nt, Human
aauaccugucccccugaca

SEQ ID NO: 3779450 - RNA, 19 nt, Human
aauaccuuagugcaguuau

SEQ ID NO: 3779451 - RNA, 23 nt, Human
aauacgacacugaaauaugugaa

SEQ ID NO: 3779452 - RNA, 18 nt, Human
aauacgcacuacaugugg

SEQ ID NO: 3779453 - RNA, 20 nt, Human
aauacgugggcauucaaaug

SEQ ID NO: 3779454 - RNA, 13 nt, Human
aauacguuugaua

SEQ ID NO: 3779455 - RNA, 15 nt, Human
aauacuaaaauaugu

SEQ ID NO: 3779456 - RNA, 13 nt, Human
aauacuaaugaaa

SEQ ID NO: 3779457 - RNA, 14 nt, Human
aauacuaccuugaa

SEQ ID NO: 3779458 - RNA, 17 nt, Human
aauacuaguugugaccu

SEQ ID NO: 3779459 - RNA, 21 nt, Human
aauacuauauuuauacuguau

SEQ ID NO: 3779460 - RNA, 19 nt, Human
aauacuauuuaagauguga

SEQ ID NO: 3779461 - RNA, 20 nt, Human
aauacuauuuaagaugugaa

SEQ ID NO: 3779462 - RNA, 20 nt, Human
aauacucaaaugaguaacau

SEQ ID NO: 3779463 - RNA, 15 nt, Human
aauacucauguguau

SEQ ID NO: 3779464 - RNA, 17 nt, Human
aauacucuaauucuaac

SEQ ID NO: 3779465 - RNA, 20 nt, Human
aauacucuacccucuuagaa

SEQ ID NO: 3779466 - RNA, 22 nt, Human
aauacucuacccucuuagaaaa

SEQ ID NO: 3779467 - RNA, 17 nt, Human
aauacucuauuuuuaca

SEQ ID NO: 3779468 - RNA, 14 nt, Human
aauacucuguugua

SEQ ID NO: 3779469 - RNA, 20 nt, Human
aauacugaaccacuuguaga

SEQ ID NO: 3779470 - RNA, 23 nt, Human
aauacugacuccaaccauucaaa

SEQ ID NO: 3779471 - RNA, 11 nt, Human
aauacugcacu

SEQ ID NO: 3779472 - RNA, 16 nt, Human
aauacugccagaugcu

SEQ ID NO: 3779473 - RNA, 13 nt, Human
aauacugcuugaa

SEQ ID NO: 3779474 - RNA, 16 nt, Human
aauacuguguggaacu

SEQ ID NO: 3779475 - RNA, 17 nt, Human
aauacuguuauucuuug

SEQ ID NO: 3779476 - RNA, 19 nt, Human
aauacuguuauucuuugca

SEQ ID NO: 3779477 - RNA, 22 nt, Human
aauacuguuauucuuugcacuu

SEQ ID NO: 3779478 - RNA, 18 nt, Human
aauacuuaaauguuaugu

SEQ ID NO: 3779479 - RNA, 16 nt, Human
aauacuuacauucucu

SEQ ID NO: 3779480 - RNA, 23 nt, Human
aauacuuauucauugugguuauu

SEQ ID NO: 3779481 - RNA, 12 nt, Human
aauacuuccaga

SEQ ID NO: 3779482 - RNA, 17 nt, Human
aauacuucuugugugua

SEQ ID NO: 3779483 - RNA, 14 nt, Human
aauacuugaaccau

SEQ ID NO: 3779484 - RNA, 14 nt, Human
aauacuugaacuug

SEQ ID NO: 3779485 - RNA, 18 nt, Human
aauacuugaacuugccuc

SEQ ID NO: 3779486 - RNA, 19 nt, Human
aauacuugaacuugccucu

SEQ ID NO: 3779487 - RNA, 17 nt, Human
aauacuugucaauauuu

SEQ ID NO: 3779488 - RNA, 15 nt, Human
aauacuuuaaaggaa

SEQ ID NO: 3779489 - RNA, 15 nt, Human
aauacuuugaaugug

SEQ ID NO: 3779490 - RNA, 14 nt, Human
aauagaaaaguuau

SEQ ID NO: 3779491 - RNA, 19 nt, Human
aauagaaaaguuauuagug

SEQ ID NO: 3779492 - RNA, 14 nt, Human
aauagaaaaugguc

SEQ ID NO: 3779493 - RNA, 15 nt, Human
aauagaaaauggucc

SEQ ID NO: 3779494 - RNA, 21 nt, Human
aauagaaacucaccauguaaa

SEQ ID NO: 3779495 - RNA, 16 nt, Human
aauagaaauaaguggu

SEQ ID NO: 3779496 - RNA, 17 nt, Human
aauagaaauggggaacu

SEQ ID NO: 3779497 - RNA, 13 nt, Human
aauagaacacagu

SEQ ID NO: 3779498 - RNA, 22 nt, Human
aauagaacauugauugcugugu

SEQ ID NO: 3779499 - RNA, 22 nt, Human
aauagaagcuaagguuuagaua

SEQ ID NO: 3779500 - RNA, 19 nt, Human
aauagaaggaaacuagcuu

SEQ ID NO: 3779501 - RNA, 22 nt, Human
aauagaaggauguacauuucca

SEQ ID NO: 3779502 - RNA, 18 nt, Human
aauagaagugcuccccuc

SEQ ID NO: 3779503 - RNA, 16 nt, Human
aauagaauguaaaugu

SEQ ID NO: 3779504 - RNA, 15 nt, Human
aauagacaaaaagua

SEQ ID NO: 3779505 - RNA, 23 nt, Human
aauagacacuccccgaagucuuu

SEQ ID NO: 3779506 - RNA, 13 nt, Human
aauagacaucaaa

SEQ ID NO: 3779507 - RNA, 15 nt, Human
aauagagaugagcuu

SEQ ID NO: 3779508 - RNA, 14 nt, Human
aauagagccugagg

SEQ ID NO: 3779509 - RNA, 19 nt, Human
aauagagcuguucaacauc

SEQ ID NO: 3779510 - RNA, 18 nt, Human
aauagauaugaaagcuga

SEQ ID NO: 3779511 - RNA, 16 nt, Human
aauagaugcugacugu

SEQ ID NO: 3779512 - RNA, 12 nt, Human
aauagaugucuu

SEQ ID NO: 3779513 - RNA, 14 nt, Human
aauagaugucuuuu

SEQ ID NO: 3779514 - RNA, 11 nt, Human
aauagauucuc

SEQ ID NO: 3779515 - RNA, 21 nt, Human
aauagauuuuauaagaugacu

SEQ ID NO: 3779516 - RNA, 14 nt, Human
aauagcaaagaauu

SEQ ID NO: 3779517 - RNA, 21 nt, Human
aauagcaaguggcauaaagca

SEQ ID NO: 3779518 - RNA, 16 nt, Human
aauagcaauagcaugg

SEQ ID NO: 3779519 - RNA, 16 nt, Human
aauagcacuuaaauuc

SEQ ID NO: 3779520 - RNA, 19 nt, Human
aauagcacuuucauugcca

SEQ ID NO: 3779521 - RNA, 22 nt, Human
aauagcagcccucaauugugaa

SEQ ID NO: 3779522 - RNA, 12 nt, Human
aauagcaucugu

SEQ ID NO: 3779523 - RNA, 19 nt, Human
aauagcaucuguacaaagg

SEQ ID NO: 3779524 - RNA, 18 nt, Human
aauagcauguauuguguc

SEQ ID NO: 3779525 - RNA, 15 nt, Human
aauagcauguuguag

SEQ ID NO: 3779526 - RNA, 22 nt, Human
aauagccacauuuggaauacuu

SEQ ID NO: 3779527 - RNA, 21 nt, Human
aauagccacuaaccuugccug

SEQ ID NO: 3779528 - RNA, 22 nt, Human
aauagccacuuaccuucaauaa

SEQ ID NO: 3779529 - RNA, 18 nt, Human
aauagccauauuuguaaa

SEQ ID NO: 3779530 - RNA, 22 nt, Human
aauagcgcuguuuuuguugugu

SEQ ID NO: 3779531 - RNA, 18 nt, Human
aauagcgucauaacuaga

SEQ ID NO: 3779532 - RNA, 18 nt, Human
aauagcuaauaauguuaa

SEQ ID NO: 3779533 - RNA, 15 nt, Human
aauagcuauauccau

SEQ ID NO: 3779534 - RNA, 18 nt, Human
aauagcuauauccaugua

SEQ ID NO: 3779535 - RNA, 22 nt, Human
aauagcuauauccauguacugu

SEQ ID NO: 3779536 - RNA, 15 nt, Human
aauagcuuuaaugau

SEQ ID NO: 3779537 - RNA, 21 nt, Human
aauagcuuuacccucaggcau

SEQ ID NO: 3779538 - RNA, 15 nt, Human
aauagcuuuuguguc

SEQ ID NO: 3779539 - RNA, 17 nt, Human
aauaggaaaaacugauu

SEQ ID NO: 3779540 - RNA, 18 nt, Human
aauaggaaaaacugauuu

SEQ ID NO: 3779541 - RNA, 20 nt, Human
aauaggaaucauucagaaau

SEQ ID NO: 3779542 - RNA, 14 nt, Human
aauaggacuuguuu

SEQ ID NO: 3779543 - RNA, 20 nt, Human
aauaggaugggcuucugugc

SEQ ID NO: 3779544 - RNA, 16 nt, Human
aauaggauuuuuagaa

SEQ ID NO: 3779545 - RNA, 13 nt, Human
aauaggcaaaggg

SEQ ID NO: 3779546 - RNA, 18 nt, Human
aauaggcacuuuaaaaca

SEQ ID NO: 3779547 - RNA, 19 nt, Human
aauagggcccaugggaggg

SEQ ID NO: 3779548 - RNA, 20 nt, Human
aauagggcccaugggaggga

SEQ ID NO: 3779549 - RNA, 21 nt, Human
aauagggcugagcucucugug

SEQ ID NO: 3779550 - RNA, 22 nt, Human
aauaguaaaagauaacaagauc

SEQ ID NO: 3779551 - RNA, 13 nt, Human
aauaguagaugug

SEQ ID NO: 3779552 - RNA, 22 nt, Human
aauaguagauguggccuuugaa

SEQ ID NO: 3779553 - RNA, 13 nt, Human
aauaguaggcaag

SEQ ID NO: 3779554 - RNA, 18 nt, Human
aauaguauccuccagguu

SEQ ID NO: 3779555 - RNA, 20 nt, Human
aauaguauccuccagguuuu

SEQ ID NO: 3779556 - RNA, 23 nt, Human
aauaguauccuccagguuuuuca

SEQ ID NO: 3779557 - RNA, 23 nt, Human
aauaguaugaguaaugcuuaagg

SEQ ID NO: 3779558 - RNA, 15 nt, Human
aauaguauuugagag

SEQ ID NO: 3779559 - RNA, 19 nt, Human
acaccugcagauucuagga

SEQ ID NO: 3779560 - RNA, 22 nt, Human
acaccugcccugcccugccacc

SEQ ID NO: 3779561 - RNA, 11 nt, Human
acaccuggccc

SEQ ID NO: 3779562 - RNA, 14 nt, Human
acaccuggcccugg

SEQ ID NO: 3779563 - RNA, 15 nt, Human
acaccuggcccuggg

SEQ ID NO: 3779564 - RNA, 19 nt, Human
acaccuggcccuggggccu

SEQ ID NO: 3779565 - RNA, 20 nt, Human
acaccuggcccuggggccug

SEQ ID NO: 3779566 - RNA, 20 nt, Human
acaccuguagcacuuacugg

SEQ ID NO: 3779567 - RNA, 15 nt, Human
acaccuucauuuuga

SEQ ID NO: 3779568 - RNA, 14 nt, Human
acaccuuccagcuc

SEQ ID NO: 3779569 - RNA, 12 nt, Human
acaccuucuaua

SEQ ID NO: 3779570 - RNA, 18 nt, Human
acaccuucuuauuauaua

SEQ ID NO: 3779571 - RNA, 14 nt, Human
acaccuugacaggg

SEQ ID NO: 3779572 - RNA, 18 nt, Human
acaccuuguuucccucuc

SEQ ID NO: 3779573 - RNA, 18 nt, Human
acaccuuugcaggcaugc

SEQ ID NO: 3779574 - RNA, 15 nt, Human
acaccuuuuaacuca

SEQ ID NO: 3779575 - RNA, 23 nt, Human
acaccuuuuauugacacagaaaa

SEQ ID NO: 3779576 - RNA, 15 nt, Human
acacgaaagagagag

SEQ ID NO: 3779577 - RNA, 18 nt, Human
acacgaauagacaucaaa

SEQ ID NO: 3779578 - RNA, 12 nt, Human
acacgaauauug

SEQ ID NO: 3779579 - RNA, 13 nt, Human
acacgaaucucac

SEQ ID NO: 3779580 - RNA, 21 nt, Human
acacgagcaggcuacugucag

SEQ ID NO: 3779581 - RNA, 14 nt, Human
acacgcacacacac

SEQ ID NO: 3779582 - RNA, 17 nt, Human
acacgcaccugccucag

SEQ ID NO: 3779583 - RNA, 16 nt, Human
acacgcacgcacacac

SEQ ID NO: 3779584 - RNA, 18 nt, Human
acacgcacgcacacacac

SEQ ID NO: 3779585 - RNA, 21 nt, Human
acacgcacggcagccacagcu

SEQ ID NO: 3779586 - RNA, 14 nt, Human
acacgcaggagcac

SEQ ID NO: 3779587 - RNA, 22 nt, Human
acacgccugcaaacgcugccug

SEQ ID NO: 3779588 - RNA, 21 nt, Human
acacgcgggcgcgaucccaca

SEQ ID NO: 3779589 - RNA, 23 nt, Human
acacgcgggcgcgaucccacaca

SEQ ID NO: 3779590 - RNA, 17 nt, Human
acacgcuccuuccucug

SEQ ID NO: 3779591 - RNA, 19 nt, Human
acacgcuccuuccucugag

SEQ ID NO: 3779592 - RNA, 18 nt, Human
acacgcugcucugcccca

SEQ ID NO: 3779593 - RNA, 22 nt, Human
acacgcugcucugccccagcuu

SEQ ID NO: 3779594 - RNA, 12 nt, Human
acacgcuuuugu

SEQ ID NO: 3779595 - RNA, 22 nt, Human
acacggagcccagcccucccca

SEQ ID NO: 3779596 - RNA, 18 nt, Human
acacggaggcaucugcac

SEQ ID NO: 3779597 - RNA, 16 nt, Human
acacggaucugagaau

SEQ ID NO: 3779598 - RNA, 19 nt, Human
acacggaucugagaaucuu

SEQ ID NO: 3779599 - RNA, 20 nt, Human
acacgggagccgcuggcaga

SEQ ID NO: 3779600 - RNA, 19 nt, Human
acacgggcagccuggcucc

SEQ ID NO: 3779601 - RNA, 13 nt, Human
acacgggccuguc

SEQ ID NO: 3779602 - RNA, 20 nt, Human
acacguaaugaaacuuggau

SEQ ID NO: 3779603 - RNA, 22 nt, Human
acacguauuugaauggccuuca

SEQ ID NO: 3779604 - RNA, 17 nt, Human
acacgucugacccucuc

SEQ ID NO: 3779605 - RNA, 19 nt, Human
acacgucugacccucucca

SEQ ID NO: 3779606 - RNA, 13 nt, Human
acacgugagaauc

SEQ ID NO: 3779607 - RNA, 16 nt, Human
acacgugagaaucccu

SEQ ID NO: 3779608 - RNA, 21 nt, Human
acacgugagaaucccuggcaa

SEQ ID NO: 3779609 - RNA, 22 nt, Human
acacguggaggaaugcuccccc

SEQ ID NO: 3779610 - RNA, 23 nt, Human
acacguggccaagagaaacuucc

SEQ ID NO: 3779611 - RNA, 16 nt, Human
acacgugggcuccccu

SEQ ID NO: 3779612 - RNA, 19 nt, Human
acacgugggcuccccucuu

SEQ ID NO: 3779613 - RNA, 14 nt, Human
acacguuuuaagga

SEQ ID NO: 3779614 - RNA, 17 nt, Human
acacguuuuaaggacug

SEQ ID NO: 3779615 - RNA, 14 nt, Human
acacuaaaaauaaa

SEQ ID NO: 3779616 - RNA, 18 nt, Human
acacuaaaauuuuaggca

SEQ ID NO: 3779617 - RNA, 15 nt, Human
acacuaaauguuaaa

SEQ ID NO: 3779618 - RNA, 19 nt, Human
acacuaaauguuaaagaug

SEQ ID NO: 3779619 - RNA, 20 nt, Human
acacuaaauguuaaagaugu

SEQ ID NO: 3779620 - RNA, 21 nt, Human
acacuaaauguuaaagaugua

SEQ ID NO: 3779621 - RNA, 23 nt, Human
acacuaaccaagcugaguuuccu

SEQ ID NO: 3779622 - RNA, 16 nt, Human
acacuaacgaaauauc

SEQ ID NO: 3779623 - RNA, 21 nt, Human
acacuaacgaaauaucaaagu

SEQ ID NO: 3779624 - RNA, 19 nt, Human
acacuaacucaccagcccc

SEQ ID NO: 3779625 - RNA, 14 nt, Human
acacuaagggugua

SEQ ID NO: 3779626 - RNA, 17 nt, Human
acacuaauauauuuaaa

SEQ ID NO: 3779627 - RNA, 20 nt, Human
acacuaauauauuuaaaaau

SEQ ID NO: 3779628 - RNA, 15 nt, Human
acacuaaugaggaaa

SEQ ID NO: 3779629 - RNA, 23 nt, Human
acacuaauuccuuucuauccuac

SEQ ID NO: 3779630 - RNA, 17 nt, Human
acacuacacacugugua

SEQ ID NO: 3779631 - RNA, 15 nt, Human
acacuacaccacaca

SEQ ID NO: 3779632 - RNA, 17 nt, Human
acacuacaccacacaca

SEQ ID NO: 3779633 - RNA, 15 nt, Human
acacuacacccagca

SEQ ID NO: 3779634 - RNA, 16 nt, Human
acacuaccgaaugugu

SEQ ID NO: 3779635 - RNA, 18 nt, Human
acacuaccgaaugugucu

SEQ ID NO: 3779636 - RNA, 19 nt, Human
acacuaccgaaugugucuu

SEQ ID NO: 3779637 - RNA, 14 nt, Human
acacuacugagaau

SEQ ID NO: 3779638 - RNA, 19 nt, Human
acacuagccagacacucug

SEQ ID NO: 3779639 - RNA, 17 nt, Human
acacuagcccaaugaaa

SEQ ID NO: 3779640 - RNA, 19 nt, Human
acacuaguuuugugccagc

SEQ ID NO: 3779641 - RNA, 18 nt, Human
acacuauuaccaugagaa

SEQ ID NO: 3779642 - RNA, 14 nt, Human
acacuauuuuaugc

SEQ ID NO: 3779643 - RNA, 14 nt, Human
acacuauuuucaga

SEQ ID NO: 3779644 - RNA, 15 nt, Human
acacuauuuucagaa

SEQ ID NO: 3779645 - RNA, 16 nt, Human
acacucaaaagcuggg

SEQ ID NO: 3779646 - RNA, 13 nt, Human
acacucaaaucaa

SEQ ID NO: 3779647 - RNA, 16 nt, Human
acacucacuccugaga

SEQ ID NO: 3779648 - RNA, 15 nt, Human
acacucaugcugaaa

SEQ ID NO: 3779649 - RNA, 17 nt, Human
acacucauugaccugag

SEQ ID NO: 3779650 - RNA, 16 nt, Human
acacuccaauuaagga

SEQ ID NO: 3779651 - RNA, 21 nt, Human
acacuccaauuaaggauuuua

SEQ ID NO: 3779652 - RNA, 17 nt, Human
acacuccagccugagca

SEQ ID NO: 3779653 - RNA, 15 nt, Human
acacuccagccuggg

SEQ ID NO: 3779654 - RNA, 13 nt, Human
acacuccagugcc

SEQ ID NO: 3779655 - RNA, 14 nt, Human
acacuccaucagcu

SEQ ID NO: 3779656 - RNA, 13 nt, Human
acacuccuugcau

SEQ ID NO: 3779657 - RNA, 14 nt, Human
acacuccuugcauc

SEQ ID NO: 3779658 - RNA, 23 nt, Human
acacucgcccgcccacuguccug

SEQ ID NO: 3779659 - RNA, 24 nt, Human
acacucgcccgcccacuguccugg

SEQ ID NO: 3779660 - RNA, 17 nt, Human
acacucguaugauacuu

SEQ ID NO: 3779661 - RNA, 13 nt, Human
acacucuccuggg

SEQ ID NO: 3779662 - RNA, 15 nt, Human
acacucuccugggcc

SEQ ID NO: 3779663 - RNA, 16 nt, Human
acacucuccugggccc

SEQ ID NO: 3779664 - RNA, 19 nt, Human
acacucuccugggccccuc

SEQ ID NO: 3779665 - RNA, 14 nt, Human
acacucucuggaag

SEQ ID NO: 3779666 - RNA, 13 nt, Human
acacucuguaauu

SEQ ID NO: 3779667 - RNA, 16 nt, Human
acacugaaaaauuaua

SEQ ID NO: 3779668 - RNA, 13 nt, Human
acacugaaaguuu

SEQ ID NO: 3779669 - RNA, 17 nt, Human
acacugaaauauacaca

SEQ ID NO: 3779670 - RNA, 14 nt, Human
acacugaaaugccu

SEQ ID NO: 3779671 - RNA, 15 nt, Human
acacugaaaugccuu

SEQ ID NO: 3779672 - RNA, 19 nt, Human
acacugaaguuaacagaga

SEQ ID NO: 3779673 - RNA, 21 nt, Human
acacugaauuuuuauguguga

SEQ ID NO: 3779674 - RNA, 19 nt, Human
acacugguucucaaugaaa

SEQ ID NO: 3779675 - RNA, 20 nt, Human
acacuguauguuauagaacu

SEQ ID NO: 3779676 - RNA, 17 nt, Human
acacugucaugcuucau

SEQ ID NO: 3779677 - RNA, 21 nt, Human
acacugugacaucucuauucc

SEQ ID NO: 3779678 - RNA, 22 nt, Human
acacugugcccagcccggaccu

SEQ ID NO: 3779679 - RNA, 12 nt, Human
acacugugcccu

SEQ ID NO: 3779680 - RNA, 17 nt, Human
acacugugcccuggugg

SEQ ID NO: 3779681 - RNA, 18 nt, Human
acacugugcccuggugga

SEQ ID NO: 3779682 - RNA, 14 nt, Human
acacugugcuuucu

SEQ ID NO: 3779683 - RNA, 15 nt, Human
acacugugcuuucua

SEQ ID NO: 3779684 - RNA, 19 nt, Human
acacugugggugugugacu

SEQ ID NO: 3779685 - RNA, 18 nt, Human
acacugugguagguguuu

SEQ ID NO: 3779686 - RNA, 23 nt, Human
acacuguguaaauacccauaugu

SEQ ID NO: 3779687 - RNA, 19 nt, Human
acacuguuagaacacuauu

SEQ ID NO: 3779688 - RNA, 15 nt, Human
acacuguuauuuuca

SEQ ID NO: 3779689 - RNA, 16 nt, Human
acacuguucucugccc

SEQ ID NO: 3779690 - RNA, 17 nt, Human
acacuguucucugcccu

SEQ ID NO: 3779691 - RNA, 18 nt, Human
acacuguucuuagcucaa

SEQ ID NO: 3779692 - RNA, 16 nt, Human
acacuguuguuuaguu

SEQ ID NO: 3779693 - RNA, 21 nt, Human
acacuguuuacaagaaaaaau

SEQ ID NO: 3779694 - RNA, 23 nt, Human
acacuguuuacaagaaaaaauga

SEQ ID NO: 3779695 - RNA, 15 nt, Human
acacuguuucaaacu

SEQ ID NO: 3779696 - RNA, 20 nt, Human
acacuguuucaaacuuuacu

SEQ ID NO: 3779697 - RNA, 23 nt, Human
acacuguuucaaacuuuacuaug

SEQ ID NO: 3779698 - RNA, 18 nt, Human
acacuuacacuuuaugca

SEQ ID NO: 3779699 - RNA, 18 nt, Human
acacuuaccccauggcug

SEQ ID NO: 3779700 - RNA, 17 nt, Human
acacuuacuguaagaca

SEQ ID NO: 3779701 - RNA, 14 nt, Human
acacuuacuguugu

SEQ ID NO: 3779702 - RNA, 15 nt, Human
acacuuagcuggaga

SEQ ID NO: 3779703 - RNA, 14 nt, Human
acacuuauaaguga

SEQ ID NO: 3779704 - RNA, 14 nt, Human
acacuuauugcuuu

SEQ ID NO: 3779705 - RNA, 20 nt, Human
acacuuauugcuuugaaacu

SEQ ID NO: 3779706 - RNA, 17 nt, Human
acacuucagagagcugg

SEQ ID NO: 3779707 - RNA, 18 nt, Human
acacuucaggcucuucuc

SEQ ID NO: 3779708 - RNA, 17 nt, Human
acacuucaguuaucuug

SEQ ID NO: 3779709 - RNA, 21 nt, Human
acacuuccaccagccugcacu

SEQ ID NO: 3779710 - RNA, 11 nt, Human
acacuucccug

SEQ ID NO: 3779711 - RNA, 14 nt, Human
acacuuccugccua

SEQ ID NO: 3779712 - RNA, 13 nt, Human
acacuuccugucc

SEQ ID NO: 3779713 - RNA, 22 nt, Human
acacuucucaggacacaggccu

SEQ ID NO: 3779714 - RNA, 23 nt, Human
acacuucucaggacacaggccug

SEQ ID NO: 3779715 - RNA, 14 nt, Human
acacuucuguccug

SEQ ID NO: 3779716 - RNA, 20 nt, Human
acacuucugugagaccccca

SEQ ID NO: 3779717 - RNA, 22 nt, Human
acacuucuucuuggucuuauuu

SEQ ID NO: 3779718 - RNA, 13 nt, Human
acacuugcccugc

SEQ ID NO: 3779719 - RNA, 15 nt, Human
acacuugcccugcuc

SEQ ID NO: 3779720 - RNA, 22 nt, Human
acacuuggcccaaguggcagag

SEQ ID NO: 3779721 - RNA, 20 nt, Human
acacuuggggagauuugcca

SEQ ID NO: 3779722 - RNA, 18 nt, Human
acacuuggugcugggaac

SEQ ID NO: 3779723 - RNA, 19 nt, Human
acacuuggugcugggaacc

SEQ ID NO: 3779724 - RNA, 17 nt, Human
acacuugguuggguccu

SEQ ID NO: 3779725 - RNA, 21 nt, Human
acacuuguaauuuuguaucuu

SEQ ID NO: 3779726 - RNA, 12 nt, Human
acacuugugaau

SEQ ID NO: 3779727 - RNA, 14 nt, Human
acacuugugacuuu

SEQ ID NO: 3779728 - RNA, 20 nt, Human
acacuugugacuuuugcuuu

SEQ ID NO: 3779729 - RNA, 22 nt, Human
acacuugugauuauaaaauuaa

SEQ ID NO: 3779730 - RNA, 13 nt, Human
acacuugugugug

SEQ ID NO: 3779731 - RNA, 16 nt, Human
acacuugugugugggc

SEQ ID NO: 3779732 - RNA, 23 nt, Human
acacuugugugugggcugugagu

SEQ ID NO: 3779733 - RNA, 19 nt, Human
acacuuguuccagcucuuu

SEQ ID NO: 3779734 - RNA, 21 nt, Human
acacuuuaugccggaugugcu

SEQ ID NO: 3779735 - RNA, 22 nt, Human
acacuuuaugccggaugugcuu

SEQ ID NO: 3779736 - RNA, 21 nt, Human
acacuuugaaauguguuucug

SEQ ID NO: 3779737 - RNA, 17 nt, Human
acacuuuggcccagggu

SEQ ID NO: 3779738 - RNA, 18 nt, Human
acacuuuggcccagggug

SEQ ID NO: 3779739 - RNA, 19 nt, Human
acacuuuucaccuccuuca

SEQ ID NO: 3779740 - RNA, 13 nt, Human
acacuuuugguua

SEQ ID NO: 3779741 - RNA, 21 nt, Human
acacuuuuucuuuacaaacaa

SEQ ID NO: 3779742 - RNA, 14 nt, Human
acagaaaaaaaaca

SEQ ID NO: 3779743 - RNA, 11 nt, Human
acagaaaaacc

SEQ ID NO: 3779744 - RNA, 12 nt, Human
acagaaaacaac

SEQ ID NO: 3779745 - RNA, 21 nt, Human
acagaaaauauacuguaaaga

SEQ ID NO: 3779746 - RNA, 17 nt, Human
acagaaaauucuucucc

SEQ ID NO: 3779747 - RNA, 12 nt, Human
acagaaacacug

SEQ ID NO: 3779748 - RNA, 18 nt, Human
acagaaacacugccuuuu

SEQ ID NO: 3779749 - RNA, 14 nt, Human
acagaaacauuuuc

SEQ ID NO: 3779750 - RNA, 11 nt, Human
acagaaagaga

SEQ ID NO: 3779751 - RNA, 16 nt, Human
acagaaagagagcacu

SEQ ID NO: 3779752 - RNA, 18 nt, Human
acagaaagagagcacuga

SEQ ID NO: 3779753 - RNA, 16 nt, Human
acagaaagguuuucuu

SEQ ID NO: 3779754 - RNA, 22 nt, Human
acagaaagucauuccuucuuuu

SEQ ID NO: 3779755 - RNA, 13 nt, Human
acagaaauacuau

SEQ ID NO: 3779756 - RNA, 17 nt, Human
acagaaauauaauaaaa

SEQ ID NO: 3779757 - RNA, 14 nt, Human
acagaaauauauau

SEQ ID NO: 3779758 - RNA, 19 nt, Human
acagaaauauauauacaua

SEQ ID NO: 3779759 - RNA, 24 nt, Human
acagaaaugauuacuaaggaagau

SEQ ID NO: 3779760 - RNA, 15 nt, Human
acagaaaugcugcug

SEQ ID NO: 3779761 - RNA, 19 nt, Human
acagaaaugcugcuggcca

SEQ ID NO: 3779762 - RNA, 21 nt, Human
acagaaaugcugcuggccaaa

SEQ ID NO: 3779763 - RNA, 17 nt, Human
acagaaauggaaagcag

SEQ ID NO: 3779764 - RNA, 19 nt, Human
acagaaauggggaauucuc

SEQ ID NO: 3779765 - RNA, 22 nt, Human
acagaaauggggaauucucuaa

SEQ ID NO: 3779766 - RNA, 13 nt, Human
acagaaauguaca

SEQ ID NO: 3779767 - RNA, 17 nt, Human
acagaaauuagccgggc

SEQ ID NO: 3779768 - RNA, 21 nt, Human
acagaacacauaauucaggaa

SEQ ID NO: 3779769 - RNA, 13 nt, Human
acagaacacuaaa

SEQ ID NO: 3779770 - RNA, 12 nt, Human
acagaacacuua

SEQ ID NO: 3779771 - RNA, 14 nt, Human
acagaacagcuuca

SEQ ID NO: 3779772 - RNA, 13 nt, Human
acagaacaggguc

SEQ ID NO: 3779773 - RNA, 16 nt, Human
acagaacaugcuguua

SEQ ID NO: 3779774 - RNA, 16 nt, Human
acagaaccuuguuauu

SEQ ID NO: 3779775 - RNA, 19 nt, Human
acagaaccuuguuauuucu

SEQ ID NO: 3779776 - RNA, 15 nt, Human
acagaacuaaauguu

SEQ ID NO: 3779777 - RNA, 17 nt, Human
acagaacuugaaugugu

SEQ ID NO: 3779778 - RNA, 20 nt, Human
acagaacuugaaugugucag

SEQ ID NO: 3779779 - RNA, 12 nt, Human
acagaagaaaca

SEQ ID NO: 3779780 - RNA, 16 nt, Human
acagaagaaggcagca

SEQ ID NO: 3779781 - RNA, 18 nt, Human
acagaagcacaugcaccu

SEQ ID NO: 3779782 - RNA, 22 nt, Human
acagcaaacaggugcuaauuug

SEQ ID NO: 3779783 - RNA, 15 nt, Human
acagcaaaccaagag

SEQ ID NO: 3779784 - RNA, 16 nt, Human
acagcaaaccaagaga

SEQ ID NO: 3779785 - RNA, 18 nt, Human
acagcaaaccaagagauu

SEQ ID NO: 3779786 - RNA, 23 nt, Human
acagcaaaccaagagauugcuaa

SEQ ID NO: 3779787 - RNA, 16 nt, Human
acagcaaaugcaaaaa

SEQ ID NO: 3779788 - RNA, 17 nt, Human
acagcaaggaggcuggc

SEQ ID NO: 3779789 - RNA, 18 nt, Human
acagcaaggaggcuggcu

SEQ ID NO: 3779790 - RNA, 19 nt, Human
acagcaaggaggcuggcug

SEQ ID NO: 3779791 - RNA, 21 nt, Human
acagcaaguagauaaauauuu

SEQ ID NO: 3779792 - RNA, 16 nt, Human
acagcaagucaggguu

SEQ ID NO: 3779793 - RNA, 16 nt, Human
acagcaagugugaaua

SEQ ID NO: 3779794 - RNA, 15 nt, Human
acagcaauuccucag

SEQ ID NO: 3779795 - RNA, 15 nt, Human
acagcacagagaaga

SEQ ID NO: 3779796 - RNA, 13 nt, Human
acagcacuacucu

SEQ ID NO: 3779797 - RNA, 14 nt, Human
acagcacuacucug

SEQ ID NO: 3779798 - RNA, 17 nt, Human
acagcacuacucugugc

SEQ ID NO: 3779799 - RNA, 16 nt, Human
acagcacuacugggug

SEQ ID NO: 3779800 - RNA, 17 nt, Human
acagcacuacugggugu

SEQ ID NO: 3779801 - RNA, 20 nt, Human
acagcacuggcucucuccag

SEQ ID NO: 3779802 - RNA, 15 nt, Human
acagcagcaagaaaa

SEQ ID NO: 3779803 - RNA, 13 nt, Human
acagcagcaucuc

SEQ ID NO: 3779804 - RNA, 13 nt, Human
acagcagcauuuu

SEQ ID NO: 3779805 - RNA, 19 nt, Human
acagcagcauuuuuauuuc

SEQ ID NO: 3779806 - RNA, 17 nt, Human
acagcagccccugcaca

SEQ ID NO: 3779807 - RNA, 18 nt, Human
acagcagccugcuuccca

SEQ ID NO: 3779808 - RNA, 19 nt, Human
acagcagccugcuucccac

SEQ ID NO: 3779809 - RNA, 22 nt, Human
acagcagccuggggcuggccuc

SEQ ID NO: 3779810 - RNA, 19 nt, Human
acagcaggcccaccuaccu

SEQ ID NO: 3779811 - RNA, 18 nt, Human
acagcaggcugccagugc

SEQ ID NO: 3779812 - RNA, 22 nt, Human
acagcaggguagucugguuucu

SEQ ID NO: 3779813 - RNA, 18 nt, Human
acagcagguccuccaucc

SEQ ID NO: 3779814 - RNA, 13 nt, Human
acagcaguguucc

SEQ ID NO: 3779815 - RNA, 22 nt, Human
acagcauaacaagguccaagau

SEQ ID NO: 3779816 - RNA, 17 nt, Human
acagcaucauuuugcau

SEQ ID NO: 3779817 - RNA, 11 nt, Human
acagcaucucc

SEQ ID NO: 3779818 - RNA, 22 nt, Human
acagcaucuccaagcagcuuag

SEQ ID NO: 3779819 - RNA, 16 nt, Human
acagcauggcacuccc

SEQ ID NO: 3779820 - RNA, 12 nt, Human
acagcaugugcc

SEQ ID NO: 3779821 - RNA, 20 nt, Human
acagcaugugcccuccugag

SEQ ID NO: 3779822 - RNA, 16 nt, Human
acagcauguguuaauc

SEQ ID NO: 3779823 - RNA, 11 nt, Human
acagcauugcu

SEQ ID NO: 3779824 - RNA, 15 nt, Human
acagcauugcuuucu

SEQ ID NO: 3779825 - RNA, 18 nt, Human
acagcauugcuuucugaa

SEQ ID NO: 3779826 - RNA, 22 nt, Human
acagcauugcuuucugaaauua

SEQ ID NO: 3779827 - RNA, 15 nt, Human
acagcauuuuccucu

SEQ ID NO: 3779828 - RNA, 19 nt, Human
acagcauuuuccucugcuu

SEQ ID NO: 3779829 - RNA, 22 nt, Human
acagccaacacgcaccugccuc

SEQ ID NO: 3779830 - RNA, 16 nt, Human
acagccaacuagcccc

SEQ ID NO: 3779831 - RNA, 17 nt, Human
acagccaacuagccccu

SEQ ID NO: 3779832 - RNA, 19 nt, Human
acagccaacuagccccugg

SEQ ID NO: 3779833 - RNA, 20 nt, Human
acagccaacuagccccuggg

SEQ ID NO: 3779834 - RNA, 18 nt, Human
acagccaagugccaaaug

SEQ ID NO: 3779835 - RNA, 11 nt, Human
acagccacaca

SEQ ID NO: 3779836 - RNA, 13 nt, Human
acagccacacaca

SEQ ID NO: 3779837 - RNA, 21 nt, Human
acagccacacacacagaaaau

SEQ ID NO: 3779838 - RNA, 18 nt, Human
acagccacggccaggcca

SEQ ID NO: 3779839 - RNA, 14 nt, Human
acagccacucagaa

SEQ ID NO: 3779840 - RNA, 15 nt, Human
acagccaggugccuu

SEQ ID NO: 3779841 - RNA, 21 nt, Human
acagccagugggagauguuag

SEQ ID NO: 3779842 - RNA, 16 nt, Human
acagccaucccagccu

SEQ ID NO: 3779843 - RNA, 19 nt, Human
acagccaucccagccuugg

SEQ ID NO: 3779844 - RNA, 16 nt, Human
acagccaugcccgcau

SEQ ID NO: 3779845 - RNA, 17 nt, Human
acagcccaaagaaggaa

SEQ ID NO: 3779846 - RNA, 15 nt, Human
acagcccacguccug

SEQ ID NO: 3779847 - RNA, 17 nt, Human
acagcccacguccuguc

SEQ ID NO: 3779848 - RNA, 19 nt, Human
acagcccacguccugucag

SEQ ID NO: 3779849 - RNA, 20 nt, Human
acagcccacguccugucagu

SEQ ID NO: 3779850 - RNA, 18 nt, Human
acagcccagagccuggcu

SEQ ID NO: 3779851 - RNA, 17 nt, Human
acagcccagccacggac

SEQ ID NO: 3779852 - RNA, 20 nt, Human
acagcccaggccuccagcuc

SEQ ID NO: 3779853 - RNA, 21 nt, Human
acagcccaggccuccagcuca

SEQ ID NO: 3779854 - RNA, 12 nt, Human
acagccccaccc

SEQ ID NO: 3779855 - RNA, 13 nt, Human
acagccccagagc

SEQ ID NO: 3779856 - RNA, 14 nt, Human
acagccccagagca

SEQ ID NO: 3779857 - RNA, 15 nt, Human
acagccccagagcag

SEQ ID NO: 3779858 - RNA, 15 nt, Human
acagcccccucugcc

SEQ ID NO: 3779859 - RNA, 14 nt, Human
acagccccuccucc

SEQ ID NO: 3779860 - RNA, 16 nt, Human
acagccccuccuccau

SEQ ID NO: 3779861 - RNA, 22 nt, Human
acagcccgcaugcagcagcuug

SEQ ID NO: 3779862 - RNA, 18 nt, Human
acagcccgggcucugccu

SEQ ID NO: 3779863 - RNA, 23 nt, Human
acagcccgggcucugccucccau

SEQ ID NO: 3779864 - RNA, 15 nt, Human
acagcccuauuucuu

SEQ ID NO: 3779865 - RNA, 23 nt, Human
acagcccuccaucuaaacugccc

SEQ ID NO: 3779866 - RNA, 15 nt, Human
acagcccucccgccc

SEQ ID NO: 3779867 - RNA, 18 nt, Human
acagcccucccgccccuu

SEQ ID NO: 3779868 - RNA, 22 nt, Human
acagcccucccgccccuucccc

SEQ ID NO: 3779869 - RNA, 13 nt, Human
acagcccugucag

SEQ ID NO: 3779870 - RNA, 14 nt, Human
acagcccugucagc

SEQ ID NO: 3779871 - RNA, 17 nt, Human
acagcccugucagcaug

SEQ ID NO: 3779872 - RNA, 18 nt, Human
acagcccugucagcauga

SEQ ID NO: 3779873 - RNA, 19 nt, Human
acagcccugucagcaugaa

SEQ ID NO: 3779874 - RNA, 21 nt, Human
acagcccugucagcaugaauu

SEQ ID NO: 3779875 - RNA, 22 nt, Human
acagcccugucagcaugaauuu

SEQ ID NO: 3779876 - RNA, 22 nt, Human
acagcccuuaugcgguuaauuu

SEQ ID NO: 3779877 - RNA, 14 nt, Human
acagccgcuccaga

SEQ ID NO: 3779878 - RNA, 14 nt, Human
acagccgcuccugu

SEQ ID NO: 3779879 - RNA, 20 nt, Human
acagccgcuccugucugcca

SEQ ID NO: 3779880 - RNA, 19 nt, Human
acagccgucagccaaaugu

SEQ ID NO: 3779881 - RNA, 23 nt, Human
acagccucacuuggucugccagg

SEQ ID NO: 3779882 - RNA, 15 nt, Human
acagccuccccugcc

SEQ ID NO: 3779883 - RNA, 21 nt, Human
acagccuccccugccagggca

SEQ ID NO: 3779884 - RNA, 22 nt, Human
acagccuccccugccagggcag

SEQ ID NO: 3779885 - RNA, 23 nt, Human
acagccuccucugucugcccuuc

SEQ ID NO: 3779886 - RNA, 12 nt, Human
acagccucugac

SEQ ID NO: 3779887 - RNA, 23 nt, Human
acagccucugaccccuccucacu

SEQ ID NO: 3779888 - RNA, 13 nt, Human
acagccucugacu

SEQ ID NO: 3779889 - RNA, 21 nt, Human
acagccugacaacauuucuau

SEQ ID NO: 3779890 - RNA, 22 nt, Human
acagccugagucaccugcagaa

SEQ ID NO: 3779891 - RNA, 14 nt, Human
acagccuggcacag

SEQ ID NO: 3779892 - RNA, 21 nt, Human
acagccuggucgccuuccacc

SEQ ID NO: 3779893 - RNA, 18 nt, Human
acagccugugucuuuaaa

SEQ ID NO: 3779894 - RNA, 14 nt, Human
acagcgacauagcc

SEQ ID NO: 3779895 - RNA, 14 nt, Human
acagcgagaggcag

SEQ ID NO: 3779896 - RNA, 15 nt, Human
acagcgagaggcaga

SEQ ID NO: 3779897 - RNA, 15 nt, Human
acagcgccagccuca

SEQ ID NO: 3779898 - RNA, 13 nt, Human
acagcggccccug

SEQ ID NO: 3779899 - RNA, 19 nt, Human
acagcggccccugcauccc

SEQ ID NO: 3779900 - RNA, 19 nt, Human
acagcggcuggacuuggag

SEQ ID NO: 3779901 - RNA, 21 nt, Human
acagcggcuggacuuggaggu

SEQ ID NO: 3779902 - RNA, 19 nt, Human
acagcgucccuagcaguga

SEQ ID NO: 3779903 - RNA, 13 nt, Human
acagcguuccuag

SEQ ID NO: 3779904 - RNA, 15 nt, Human
acagcuaacauggaa

SEQ ID NO: 3779905 - RNA, 17 nt, Human
acagcuaacauggaagu

SEQ ID NO: 3779906 - RNA, 14 nt, Human
acagcuacaacagc

SEQ ID NO: 3779907 - RNA, 21 nt, Human
acagcuacuugguuuguguuc

SEQ ID NO: 3779908 - RNA, 19 nt, Human
acagcucaggaggcgcccu

SEQ ID NO: 3779909 - RNA, 21 nt, Human
acagcucaguucuagucucuc

SEQ ID NO: 3779910 - RNA, 17 nt, Human
acagcucauuaaacuuu

SEQ ID NO: 3779911 - RNA, 17 nt, Human
acagcuccacccuggcc

SEQ ID NO: 3779912 - RNA, 15 nt, Human
acagcucccacccca

SEQ ID NO: 3779913 - RNA, 14 nt, Human
acagcuccccaagu

SEQ ID NO: 3779914 - RNA, 16 nt, Human
acagcucccccagcuc

SEQ ID NO: 3779915 - RNA, 12 nt, Human
acagcuccuccc

SEQ ID NO: 3779916 - RNA, 16 nt, Human
acagcuccuucugucc

SEQ ID NO: 3779917 - RNA, 15 nt, Human
acagcuccuugggag

SEQ ID NO: 3779918 - RNA, 17 nt, Human
acagcuccuugggagga

SEQ ID NO: 3779919 - RNA, 19 nt, Human
acagcuccuugggaggaag

SEQ ID NO: 3779920 - RNA, 21 nt, Human
acagcuccuugggaggaagca

SEQ ID NO: 3779921 - RNA, 15 nt, Human
acagcuccuuuucca

SEQ ID NO: 3779922 - RNA, 13 nt, Human
acagcucuagaca

SEQ ID NO: 3779923 - RNA, 20 nt, Human
acagcucugcauacucauua

SEQ ID NO: 3779924 - RNA, 13 nt, Human
acagcucuguccu

SEQ ID NO: 3779925 - RNA, 16 nt, Human
acagcucuguccuggg

SEQ ID NO: 3779926 - RNA, 20 nt, Human
acagcucuguguugccaugu

SEQ ID NO: 3779927 - RNA, 17 nt, Human
acagcucuucuccaggc

SEQ ID NO: 3779928 - RNA, 15 nt, Human
acagcugagagacuu

SEQ ID NO: 3779929 - RNA, 16 nt, Human
acagcugagagacuuu

SEQ ID NO: 3779930 - RNA, 22 nt, Human
acagcugagagacuuuuaauca

SEQ ID NO: 3779931 - RNA, 23 nt, Human
acagcugagcacauucuggcuca

SEQ ID NO: 3779932 - RNA, 20 nt, Human
acauguccagcaccuugugc

SEQ ID NO: 3779933 - RNA, 21 nt, Human
acauguccuuguguguuuuga

SEQ ID NO: 3779934 - RNA, 18 nt, Human
acaugucuccuauccugg

SEQ ID NO: 3779935 - RNA, 17 nt, Human
acaugucuguucuacau

SEQ ID NO: 3779936 - RNA, 12 nt, Human
acaugucuuaau

SEQ ID NO: 3779937 - RNA, 22 nt, Human
acaugucuuaaugaaguuugaa

SEQ ID NO: 3779938 - RNA, 14 nt, Human
acaugugaaaagaa

SEQ ID NO: 3779939 - RNA, 17 nt, Human
acaugugaaaagaauag

SEQ ID NO: 3779940 - RNA, 17 nt, Human
acaugugaaaccuuuuu

SEQ ID NO: 3779941 - RNA, 20 nt, Human
acaugugaaaccuuuuuuaa

SEQ ID NO: 3779942 - RNA, 21 nt, Human
acaugugaaaccuuuuuuaag

SEQ ID NO: 3779943 - RNA, 23 nt, Human
acaugugaaaccuuuuuuaagau

SEQ ID NO: 3779944 - RNA, 12 nt, Human
acaugugacaca

SEQ ID NO: 3779945 - RNA, 15 nt, Human
acaugugacacauau

SEQ ID NO: 3779946 - RNA, 13 nt, Human
acaugugacauuu

SEQ ID NO: 3779947 - RNA, 17 nt, Human
acaugugauacauuuuu

SEQ ID NO: 3779948 - RNA, 22 nt, Human
acaugugccagggcaaugauga

SEQ ID NO: 3779949 - RNA, 17 nt, Human
acaugugccgaaugugc

SEQ ID NO: 3779950 - RNA, 23 nt, Human
acauguggugggacagggaccca

SEQ ID NO: 3779951 - RNA, 23 nt, Human
acaugugguuacacagugugaau

SEQ ID NO: 3779952 - RNA, 21 nt, Human
acauguguagccuauguugug

SEQ ID NO: 3779953 - RNA, 18 nt, Human
acauguguagccugugca

SEQ ID NO: 3779954 - RNA, 13 nt, Human
acauguguguaua

SEQ ID NO: 3779955 - RNA, 18 nt, Human
acauguguguauauaugu

SEQ ID NO: 3779956 - RNA, 23 nt, Human
acauguguguauauauguguaua

SEQ ID NO: 3779957 - RNA, 22 nt, Human
acauguguguauauguagaugu

SEQ ID NO: 3779958 - RNA, 14 nt, Human
acauguuaaaccau

SEQ ID NO: 3779959 - RNA, 17 nt, Human
acauguuaaacuuacuu

SEQ ID NO: 3779960 - RNA, 19 nt, Human
acauguuacuggauaaauu

SEQ ID NO: 3779961 - RNA, 15 nt, Human
acauguugguauuua

SEQ ID NO: 3779962 - RNA, 18 nt, Human
acauguuuagaguugcaa

SEQ ID NO: 3779963 - RNA, 14 nt, Human
acauguuuauguaa

SEQ ID NO: 3779964 - RNA, 23 nt, Human
acauguuuauguaaacaaaucuu

SEQ ID NO: 3779965 - RNA, 21 nt, Human
acauguuuauuuauucugcau

SEQ ID NO: 3779966 - RNA, 12 nt, Human
acauguuucaga

SEQ ID NO: 3779967 - RNA, 13 nt, Human
acauguuuccagc

SEQ ID NO: 3779968 - RNA, 22 nt, Human
acauguuucuuuguaaugaaaa

SEQ ID NO: 3779969 - RNA, 23 nt, Human
acauguuucuuuguaaugaaaac

SEQ ID NO: 3779970 - RNA, 22 nt, Human
acauguuugcaccuuucuaguu

SEQ ID NO: 3779971 - RNA, 22 nt, Human
acauguuuuagacaaauacuca

SEQ ID NO: 3779972 - RNA, 17 nt, Human
acauguuuucaaaugga

SEQ ID NO: 3779973 - RNA, 23 nt, Human
acauguuuugauaaaguaguaaa

SEQ ID NO: 3779974 - RNA, 17 nt, Human
acauguuuuuauacaaa

SEQ ID NO: 3779975 - RNA, 15 nt, Human
acauuaaaaaaugaa

SEQ ID NO: 3779976 - RNA, 15 nt, Human
acauuaaaugacucu

SEQ ID NO: 3779977 - RNA, 12 nt, Human
acauuaagaaaa

SEQ ID NO: 3779978 - RNA, 17 nt, Human
acauuaagaaaaucaua

SEQ ID NO: 3779979 - RNA, 21 nt, Human
acauuaagaaaaucauauugc

SEQ ID NO: 3779980 - RNA, 15 nt, Human
acauuaagaauguug

SEQ ID NO: 3779981 - RNA, 18 nt, Human
acauuaauauacuugaau

SEQ ID NO: 3779982 - RNA, 21 nt, Human
acauuaaucaaucaucugugu

SEQ ID NO: 3779983 - RNA, 17 nt, Human
acauuaauggucuaaaa

SEQ ID NO: 3779984 - RNA, 15 nt, Human
acauuaauguuaauu

SEQ ID NO: 3779985 - RNA, 15 nt, Human
acauuaauguugauu

SEQ ID NO: 3779986 - RNA, 22 nt, Human
acauuacaaaguuaaaauuguu

SEQ ID NO: 3779987 - RNA, 17 nt, Human
acauuacugaaaacuuc

SEQ ID NO: 3779988 - RNA, 18 nt, Human
acauuagaacacugcauu

SEQ ID NO: 3779989 - RNA, 12 nt, Human
acauuagaacuu

SEQ ID NO: 3779990 - RNA, 15 nt, Human
acauuagaagacaau

SEQ ID NO: 3779991 - RNA, 20 nt, Human
acauuagaauaaaagguagu

SEQ ID NO: 3779992 - RNA, 14 nt, Human
acauuagagaacau

SEQ ID NO: 3779993 - RNA, 19 nt, Human
acauuagauuuuauuuuac

SEQ ID NO: 3779994 - RNA, 15 nt, Human
uucaaacacaaaugc

SEQ ID NO: 3779995 - RNA, 18 nt, Human
uucaaacagucucaggaa

SEQ ID NO: 3779996 - RNA, 14 nt, Human
uucaaacauauaua

SEQ ID NO: 3779997 - RNA, 22 nt, Human
uucaaaccaguauacaagauaa

SEQ ID NO: 3779998 - RNA, 16 nt, Human
uucaaacuggggccuc

SEQ ID NO: 3779999 - RNA, 13 nt, Human
uucauuaccuuuu

SEQ ID NO: 3780000 - RNA, 21 nt, Human
uucauuaccuuuuuugauaaa

SEQ ID NO: 3780001 - RNA, 21 nt, Human
uucauuacuugauuaagauuu

SEQ ID NO: 3780002 - RNA, 14 nt, Human
uucauuagcuguga

SEQ ID NO: 3780003 - RNA, 15 nt, Human
uucauuagucauguu

SEQ ID NO: 3780004 - RNA, 16 nt, Human
uucauuagucauguuu

SEQ ID NO: 3780005 - RNA, 14 nt, Human
uucauuaucucaaa

SEQ ID NO: 3780006 - RNA, 22 nt, Human
uucauuauuaguacugcucuug

SEQ ID NO: 3780007 - RNA, 13 nt, Human
uucauuauuggaa

SEQ ID NO: 3780008 - RNA, 22 nt, Human
uucauuauuuuauuaugaaacu

SEQ ID NO: 3780009 - RNA, 17 nt, Human
uucauucaauauugaca

SEQ ID NO: 3780010 - RNA, 18 nt, Human
uucauucauauuacaaua

SEQ ID NO: 3780011 - RNA, 23 nt, Human
uucauucauauuacaauauuugu

SEQ ID NO: 3780012 - RNA, 12 nt, Human
uucauucauccc

SEQ ID NO: 3780013 - RNA, 18 nt, Human
uucauucauggaccacug

SEQ ID NO: 3780014 - RNA, 22 nt, Human
uucauucaugucauguguacaa

SEQ ID NO: 3780015 - RNA, 14 nt, Human
uucauucauucacu

SEQ ID NO: 3780016 - RNA, 16 nt, Human
uucauuccauucugga

SEQ ID NO: 3780017 - RNA, 21 nt, Human
uucauuccauugccuagcucu

SEQ ID NO: 3780018 - RNA, 13 nt, Human
uucauucuccugc

SEQ ID NO: 3780019 - RNA, 17 nt, Human
uucauucuccuuguugu

SEQ ID NO: 3780020 - RNA, 21 nt, Human
uucauucucgugagucauuua

SEQ ID NO: 3780021 - RNA, 18 nt, Human
uucauucugcaaguauac

SEQ ID NO: 3780022 - RNA, 14 nt, Human
uucauucuggucuc

SEQ ID NO: 3780023 - RNA, 13 nt, Human
uucauucuuagcu

SEQ ID NO: 3780024 - RNA, 18 nt, Human
uucauucuucucuagcug

SEQ ID NO: 3780025 - RNA, 13 nt, Human
uucauucuugaaa

SEQ ID NO: 3780026 - RNA, 22 nt, Human
uucauugagaguuuugucuuga

SEQ ID NO: 3780027 - RNA, 18 nt, Human
uucauugaguugguuacu

SEQ ID NO: 3780028 - RNA, 18 nt, Human
uucauugauaugaaaaau

SEQ ID NO: 3780029 - RNA, 20 nt, Human
uucauugauuuccuguguca

SEQ ID NO: 3780030 - RNA, 17 nt, Human
uucauugccagugucuu

SEQ ID NO: 3780031 - RNA, 20 nt, Human
uucauugcccccagggcacu

SEQ ID NO: 3780032 - RNA, 18 nt, Human
uucauugccuguguaugg

SEQ ID NO: 3780033 - RNA, 12 nt, Human
uucauuguaaaa

SEQ ID NO: 3780034 - RNA, 17 nt, Human
uucauuguaauguuacu

SEQ ID NO: 3780035 - RNA, 14 nt, Human
uucauuguaugaug

SEQ ID NO: 3780036 - RNA, 15 nt, Human
uucauugucccucuu

SEQ ID NO: 3780037 - RNA, 23 nt, Human
uucauugugguuauuuuuauaca

SEQ ID NO: 3780038 - RNA, 19 nt, Human
uucauuuacuguggcuucu

SEQ ID NO: 3780039 - RNA, 18 nt, Human
uucauuuaggugaggaag

SEQ ID NO: 3780040 - RNA, 19 nt, Human
uucauuuagucaugugacc

SEQ ID NO: 3780041 - RNA, 17 nt, Human
uucauuuaucuauaauu

SEQ ID NO: 3780042 - RNA, 15 nt, Human
uucauuucaacuguu

SEQ ID NO: 3780043 - RNA, 14 nt, Human
uucauuuccugccc

SEQ ID NO: 3780044 - RNA, 16 nt, Human
uucauuuccugugucu

SEQ ID NO: 3780045 - RNA, 16 nt, Human
uucauuugcacaagua

SEQ ID NO: 3780046 - RNA, 22 nt, Human
uucauuuguggugauauagaau

SEQ ID NO: 3780047 - RNA, 13 nt, Human
uucauuuguguca

SEQ ID NO: 3780048 - RNA, 15 nt, Human
uucauuuuaaaaagu

SEQ ID NO: 3780049 - RNA, 21 nt, Human
uucauuuuaacaucugagaaa

SEQ ID NO: 3780050 - RNA, 18 nt, Human
uucauuuuauauugaaaa

SEQ ID NO: 3780051 - RNA, 19 nt, Human
uucauuuuauauugaaaaa

SEQ ID NO: 3780052 - RNA, 13 nt, Human
uucauuuugagcu

SEQ ID NO: 3780053 - RNA, 17 nt, Human
uucauuuugagcugaaa

SEQ ID NO: 3780054 - RNA, 13 nt, Human
uucauuuugcuuu

SEQ ID NO: 3780055 - RNA, 14 nt, Human
uucauuuugcuuua

SEQ ID NO: 3780056 - RNA, 14 nt, Human
uucauuuuuaauca

SEQ ID NO: 3780057 - RNA, 21 nt, Human
uucauuuuuguuauccuuuuu

SEQ ID NO: 3780058 - RNA, 16 nt, Human
uuccaaaagccaaugg

SEQ ID NO: 3780059 - RNA, 18 nt, Human
uuccaaaaguggccucuu

SEQ ID NO: 3780060 - RNA, 21 nt, Human
uuccaaaauaauuuuaagaaa

SEQ ID NO: 3780061 - RNA, 14 nt, Human
uuccaaaauauuau

SEQ ID NO: 3780062 - RNA, 14 nt, Human
uuccaaaauucuua

SEQ ID NO: 3780063 - RNA, 20 nt, Human
uuccaaaauucuuauuuuuc

SEQ ID NO: 3780064 - RNA, 22 nt, Human
uuccaaacaugagguucucucu

SEQ ID NO: 3780065 - RNA, 16 nt, Human
uuccaaaccugacaga

SEQ ID NO: 3780066 - RNA, 21 nt, Human
uuccaaagaauguuagagcac

SEQ ID NO: 3780067 - RNA, 20 nt, Human
uuccaaagcagagagcauua

SEQ ID NO: 3780068 - RNA, 16 nt, Human
uuccaaagcuuuauua

SEQ ID NO: 3780069 - RNA, 23 nt, Human
uuccaaaggccauggagagcugg

SEQ ID NO: 3780070 - RNA, 16 nt, Human
uuccaaaguacacugu

SEQ ID NO: 3780071 - RNA, 14 nt, Human
uuccaaagucucua

SEQ ID NO: 3780072 - RNA, 16 nt, Human
uuccaaagucucuaau

SEQ ID NO: 3780073 - RNA, 17 nt, Human
uuccaaagucucuaauu

SEQ ID NO: 3780074 - RNA, 15 nt, Human
uuccaaauaaaaugu

SEQ ID NO: 3780075 - RNA, 17 nt, Human
uuccaaauaaaauguuc

SEQ ID NO: 3780076 - RNA, 23 nt, Human
uuccaaauaauauguuuccuucc

SEQ ID NO: 3780077 - RNA, 21 nt, Human
uuccaaaugaauguugucugu

SEQ ID NO: 3780078 - RNA, 21 nt, Human
uuccaaauguaauaaacuuua

SEQ ID NO: 3780079 - RNA, 23 nt, Human
uuccaaauuauuucuuaauuauu

SEQ ID NO: 3780080 - RNA, 18 nt, Human
uuccaaauucaguuucau

SEQ ID NO: 3780081 - RNA, 18 nt, Human
uuccaacaccacagacac

SEQ ID NO: 3780082 - RNA, 23 nt, Human
uuccaacaccacagacacacaca

SEQ ID NO: 3780083 - RNA, 22 nt, Human
uuccaacacugauuuccccuuu

SEQ ID NO: 3780084 - RNA, 21 nt, Human
uuccaaccauuuaucuugaag

SEQ ID NO: 3780085 - RNA, 15 nt, Human
uuccaaccccaacuc

SEQ ID NO: 3780086 - RNA, 19 nt, Human
uuccaacccucaucaccaa

SEQ ID NO: 3780087 - RNA, 22 nt, Human
uuccaacguuuggaagauccug

SEQ ID NO: 3780088 - RNA, 16 nt, Human
uuccaacugcugcccc

SEQ ID NO: 3780089 - RNA, 17 nt, Human
uuccaacuuggcugcag

SEQ ID NO: 3780090 - RNA, 22 nt, Human
uuccaacuuggcugcaggaauc

SEQ ID NO: 3780091 - RNA, 21 nt, Human
uuccaagaaagaugaauacau

SEQ ID NO: 3780092 - RNA, 23 nt, Human
uuccaagaauagcaucuguacaa

SEQ ID NO: 3780093 - RNA, 16 nt, Human
uuccaagacaugucug

SEQ ID NO: 3780094 - RNA, 16 nt, Human
uuccaagacucuagag

SEQ ID NO: 3780095 - RNA, 17 nt, Human
uuccaagacucuagagu

SEQ ID NO: 3780096 - RNA, 22 nt, Human
uuccaagacucuagaguccaag

SEQ ID NO: 3780097 - RNA, 20 nt, Human
uuccaagacuuauuuucaca

SEQ ID NO: 3780098 - RNA, 14 nt, Human
uuccaagagccuga

SEQ ID NO: 3780099 - RNA, 13 nt, Human
uuccaagagcuga

SEQ ID NO: 3780100 - RNA, 13 nt, Human
uuccaagagucua

SEQ ID NO: 3780101 - RNA, 16 nt, Human
uuccaagcaaauguua

SEQ ID NO: 3780102 - RNA, 23 nt, Human
uuccaagcuuccauagcugcugc

SEQ ID NO: 3780103 - RNA, 18 nt, Human
uuccaaggggcaaauuuu

SEQ ID NO: 3780104 - RNA, 19 nt, Human
uuccaaguaauauaaugga

SEQ ID NO: 3780105 - RNA, 15 nt, Human
uuccaagucuccacc

SEQ ID NO: 3780106 - RNA, 12 nt, Human
uuccaagugugc

SEQ ID NO: 3780107 - RNA, 22 nt, Human
uuccaagugugcauauuguaca

SEQ ID NO: 3780108 - RNA, 13 nt, Human
uuccaauaaacag

SEQ ID NO: 3780109 - RNA, 13 nt, Human
uuccaauauuucu

SEQ ID NO: 3780110 - RNA, 18 nt, Human
uuccaaugucuggagacc

SEQ ID NO: 3780111 - RNA, 19 nt, Human
uuccaauucuaucuuuugu

SEQ ID NO: 3780112 - RNA, 22 nt, Human
uuccaauuuacauacucugcuu

SEQ ID NO: 3780113 - RNA, 17 nt, Human
uuccaauuuaguuguug

SEQ ID NO: 3780114 - RNA, 18 nt, Human
uuccacaaaaucugucca

SEQ ID NO: 3780115 - RNA, 19 nt, Human
uuccacaagauucccagag

SEQ ID NO: 3780116 - RNA, 19 nt, Human
uuccacacagaaugcaacc

SEQ ID NO: 3780117 - RNA, 15 nt, Human
uuccacacccccacc

SEQ ID NO: 3780118 - RNA, 16 nt, Human
uuccacacccccaccc

SEQ ID NO: 3780119 - RNA, 19 nt, Human
uuccacaccuagcaucuca

SEQ ID NO: 3780120 - RNA, 19 nt, Human
uuccacaccuggcacugcu

SEQ ID NO: 3780121 - RNA, 15 nt, Human
uuccacaccuuuuau

SEQ ID NO: 3780122 - RNA, 18 nt, Human
uuccacaguugccaccac

SEQ ID NO: 3780123 - RNA, 16 nt, Human
uuccacauauaaagcu

SEQ ID NO: 3780124 - RNA, 20 nt, Human
uuccacauccggaggagaag

SEQ ID NO: 3780125 - RNA, 15 nt, Human
uuccacauguuacug

SEQ ID NO: 3780126 - RNA, 21 nt, Human
uuccaccacagccagcaccug

SEQ ID NO: 3780127 - RNA, 11 nt, Human
uuccaccagcc

SEQ ID NO: 3780128 - RNA, 19 nt, Human
uuccaccccaagagaacuc

SEQ ID NO: 3780129 - RNA, 20 nt, Human
uuccacccccucccuggccu

SEQ ID NO: 3780130 - RNA, 13 nt, Human
uuccacccuggaa

SEQ ID NO: 3780131 - RNA, 13 nt, Human
uuccaccucaccc

SEQ ID NO: 3780132 - RNA, 16 nt, Human
uuccaccugcucugcu

SEQ ID NO: 3780133 - RNA, 13 nt, Human
uuccaccuggaag

SEQ ID NO: 3780134 - RNA, 16 nt, Human
uuccaccuuaaauuaa

SEQ ID NO: 3780135 - RNA, 20 nt, Human
uuccaccuuaaauuaaacaa

SEQ ID NO: 3780136 - RNA, 15 nt, Human
uuccaccuucccaug

SEQ ID NO: 3780137 - RNA, 18 nt, Human
uuccacuacaccuggcug

SEQ ID NO: 3780138 - RNA, 22 nt, Human
uuccacuacaccuggcugaggu

SEQ ID NO: 3780139 - RNA, 16 nt, Human
uuccacuccauugucg

SEQ ID NO: 3780140 - RNA, 18 nt, Human
uuccacuccuccuagcca

SEQ ID NO: 3780141 - RNA, 21 nt, Human
uuccacuccuccuagccaccc

SEQ ID NO: 3780142 - RNA, 18 nt, Human
uuccacucugauagaauu

SEQ ID NO: 3780143 - RNA, 12 nt, Human
uuccacugagcu

SEQ ID NO: 3780144 - RNA, 23 nt, Human
uuccacugauggaaacaaagugg

SEQ ID NO: 3780145 - RNA, 14 nt, Human
uuccacugccucug

SEQ ID NO: 3780146 - RNA, 23 nt, Human
uuccacugccugggaugaugcag

SEQ ID NO: 3780147 - RNA, 17 nt, Human
uuccacugcguugucca

SEQ ID NO: 3780148 - RNA, 20 nt, Human
uuauuguggauaacaaagau

SEQ ID NO: 3780149 - RNA, 16 nt, Human
uuauuguguuugucau

SEQ ID NO: 3780150 - RNA, 20 nt, Human
uuauuguguuuuuaauuuau

SEQ ID NO: 3780151 - RNA, 13 nt, Human
uuauuguuccaag

SEQ ID NO: 3780152 - RNA, 12 nt, Human
uuauuguuuaaa

SEQ ID NO: 3780153 - RNA, 13 nt, Human
uuauuuaaaagau

SEQ ID NO: 3780154 - RNA, 16 nt, Human
uuauuuaaaagauuca

SEQ ID NO: 3780155 - RNA, 21 nt, Human
uuauuuaaaauguaaaaagga

SEQ ID NO: 3780156 - RNA, 14 nt, Human
uuauuuaaagcauu

SEQ ID NO: 3780157 - RNA, 13 nt, Human
uuauuuaaauaga

SEQ ID NO: 3780158 - RNA, 13 nt, Human
uuauuuaacagcu

SEQ ID NO: 3780159 - RNA, 23 nt, Human
uuauuuaacagcugaauuaucua

SEQ ID NO: 3780160 - RNA, 14 nt, Human
uuauuuaagacuaa

SEQ ID NO: 3780161 - RNA, 14 nt, Human
uuauuuaauaacaa

SEQ ID NO: 3780162 - RNA, 19 nt, Human
uuauuuaauaacauuaccu

SEQ ID NO: 3780163 - RNA, 18 nt, Human
uuauuuaaugaaagacug

SEQ ID NO: 3780164 - RNA, 14 nt, Human
uuauuuaauuaaaa

SEQ ID NO: 3780165 - RNA, 11 nt, Human
uuauuuacaag

SEQ ID NO: 3780166 - RNA, 17 nt, Human
uuauuuacuaauuuucu

SEQ ID NO: 3780167 - RNA, 15 nt, Human
uuauuuagacaagag

SEQ ID NO: 3780168 - RNA, 17 nt, Human
uuauuuagacucaucuu

SEQ ID NO: 3780169 - RNA, 23 nt, Human
uuauuuagacucaucuuacugua

SEQ ID NO: 3780170 - RNA, 15 nt, Human
uuauuuagauucacu

SEQ ID NO: 3780171 - RNA, 15 nt, Human
uuauuuauacacugu

SEQ ID NO: 3780172 - RNA, 13 nt, Human
uuauuuauaugua

SEQ ID NO: 3780173 - RNA, 15 nt, Human
uuauuuauauguacu

SEQ ID NO: 3780174 - RNA, 18 nt, Human
uuauuuauauguacuguu

SEQ ID NO: 3780175 - RNA, 21 nt, Human
uuauuuauauguacuguuuua

SEQ ID NO: 3780176 - RNA, 16 nt, Human
uuauuuauauguaugu

SEQ ID NO: 3780177 - RNA, 13 nt, Human
uuauuuauguacu

SEQ ID NO: 3780178 - RNA, 16 nt, Human
uuauuuauguacuuuu

SEQ ID NO: 3780179 - RNA, 12 nt, Human
uuauuuauguau

SEQ ID NO: 3780180 - RNA, 15 nt, Human
uuauuuauguauggu

SEQ ID NO: 3780181 - RNA, 21 nt, Human
uuauuuauguauggugcaaug

SEQ ID NO: 3780182 - RNA, 21 nt, Human
uuauuuauguauugugcaaug

SEQ ID NO: 3780183 - RNA, 15 nt, Human
uuauuuauuggagau

SEQ ID NO: 3780184 - RNA, 13 nt, Human
uuauuuauuuaau

SEQ ID NO: 3780185 - RNA, 14 nt, Human
uuauuuauuuaaua

SEQ ID NO: 3780186 - RNA, 15 nt, Human
uuauuuauuuaugga

SEQ ID NO: 3780187 - RNA, 15 nt, Human
uucacagcucugugu

SEQ ID NO: 3780188 - RNA, 23 nt, Human
uucacagcucuguguugccaugu

SEQ ID NO: 3780189 - RNA, 13 nt, Human
uucacagcuuuua

SEQ ID NO: 3780190 - RNA, 19 nt, Human
uucacaggcgaggccugga

SEQ ID NO: 3780191 - RNA, 23 nt, Human
uucacagggguucccuucucuca

SEQ ID NO: 3780192 - RNA, 18 nt, Human
uucacaguaccaucugaa

SEQ ID NO: 3780193 - RNA, 19 nt, Human
uucacaguacccaaacugc

SEQ ID NO: 3780194 - RNA, 23 nt, Human
uucacaguacccaaacugcuuuu

SEQ ID NO: 3780195 - RNA, 18 nt, Human
uucacaguagagccagcu

SEQ ID NO: 3780196 - RNA, 16 nt, Human
uucacagucacugaug

SEQ ID NO: 3780197 - RNA, 14 nt, Human
uucacauaaaugca

SEQ ID NO: 3780198 - RNA, 19 nt, Human
uucacauaaaugcagccca

SEQ ID NO: 3780199 - RNA, 23 nt, Human
uucacauagcccacuuacauuua

SEQ ID NO: 3780200 - RNA, 21 nt, Human
uucacauaucuaguaugaaau

SEQ ID NO: 3780201 - RNA, 21 nt, Human
uucacaucgcagauucucccu

SEQ ID NO: 3780202 - RNA, 20 nt, Human
uucacaucuaaccucaucuu

SEQ ID NO: 3780203 - RNA, 14 nt, Human
uucacaugaacaua

SEQ ID NO: 3780204 - RNA, 19 nt, Human
uucacaugagcuauuucca

SEQ ID NO: 3780205 - RNA, 15 nt, Human
uucacauguuuucaa

SEQ ID NO: 3780206 - RNA, 16 nt, Human
uucacauguuuucaaa

SEQ ID NO: 3780207 - RNA, 17 nt, Human
uucacauguuuucaaau

SEQ ID NO: 3780208 - RNA, 20 nt, Human
uucacauuaauggucuaaaa

SEQ ID NO: 3780209 - RNA, 15 nt, Human
uucacauuagaagac

SEQ ID NO: 3780210 - RNA, 23 nt, Human
uucacauuccccuggggacccac

SEQ ID NO: 3780211 - RNA, 12 nt, Human
uucacauucuua

SEQ ID NO: 3780212 - RNA, 19 nt, Human
uucacauuguauucagagu

SEQ ID NO: 3780213 - RNA, 20 nt, Human
uucacauuguuugcugcuau

SEQ ID NO: 3780214 - RNA, 13 nt, Human
uucaccaaaauua

SEQ ID NO: 3780215 - RNA, 19 nt, Human
uucaccagaauggaaagac

SEQ ID NO: 3780216 - RNA, 18 nt, Human
uucaccagauuugcuaau

SEQ ID NO: 3780217 - RNA, 23 nt, Human
uucaccaguacauucucaguuuu

SEQ ID NO: 3780218 - RNA, 19 nt, Human
uucaccaucaauccugauu

SEQ ID NO: 3780219 - RNA, 21 nt, Human
uucaccaugauggccaggcug

SEQ ID NO: 3780220 - RNA, 17 nt, Human
uucaccauguaaaacaa

SEQ ID NO: 3780221 - RNA, 21 nt, Human
uucaccauguaaaacaaaaaa

SEQ ID NO: 3780222 - RNA, 22 nt, Human
uucaccauguuggccaggcugg

SEQ ID NO: 3780223 - RNA, 13 nt, Human
uucaccauucgua

SEQ ID NO: 3780224 - RNA, 17 nt, Human
uucacccacagaaagag

SEQ ID NO: 3780225 - RNA, 19 nt, Human
uucacccacagaaagagag

SEQ ID NO: 3780226 - RNA, 15 nt, Human
uucacccagacagcu

SEQ ID NO: 3780227 - RNA, 18 nt, Human
uucacccagcuaaucugu

SEQ ID NO: 3780228 - RNA, 21 nt, Human
uucacccaggccuauguugau

SEQ ID NO: 3780229 - RNA, 22 nt, Human
uucaccccaguggccacucagc

SEQ ID NO: 3780230 - RNA, 23 nt, Human
uucaccccaucccuccuuaagag

SEQ ID NO: 3780231 - RNA, 16 nt, Human
uucacccccuuuccug

SEQ ID NO: 3780232 - RNA, 15 nt, Human
uucaccccucccuuu

SEQ ID NO: 3780233 - RNA, 16 nt, Human
uucaccccucccuuuc

SEQ ID NO: 3780234 - RNA, 18 nt, Human
uucaccccucccuuucuc

SEQ ID NO: 3780235 - RNA, 22 nt, Human
uucaccccucccuuucuccccu

SEQ ID NO: 3780236 - RNA, 16 nt, Human
uucaccuaagagauuc

SEQ ID NO: 3780237 - RNA, 17 nt, Human
uucaccuaagucucugu

SEQ ID NO: 3780238 - RNA, 19 nt, Human
uucaccuaagucucuguga

SEQ ID NO: 3780239 - RNA, 22 nt, Human
uucaccuacauuugagaauuau

SEQ ID NO: 3780240 - RNA, 18 nt, Human
uucaccuaccgaguucaa

SEQ ID NO: 3780241 - RNA, 13 nt, Human
uucaccuccuuca

SEQ ID NO: 3780242 - RNA, 16 nt, Human
uucaccugauucaacu

SEQ ID NO: 3780243 - RNA, 18 nt, Human
uucaccugccccaacucu

SEQ ID NO: 3780244 - RNA, 13 nt, Human
uucaccuguaaaa

SEQ ID NO: 3780245 - RNA, 16 nt, Human
uucaccuguaaaacuu

SEQ ID NO: 3780246 - RNA, 17 nt, Human
uucaccuguaaaccuga

SEQ ID NO: 3780247 - RNA, 20 nt, Human
uucaccuuuguccccaccgc

SEQ ID NO: 3780248 - RNA, 17 nt, Human
uucacgaaguguugcau

SEQ ID NO: 3780249 - RNA, 15 nt, Human
uucacgagagcccgg

SEQ ID NO: 3780250 - RNA, 14 nt, Human
uucacgcaacuuga

SEQ ID NO: 3780251 - RNA, 16 nt, Human
uucacgcaacuugaaa

SEQ ID NO: 3780252 - RNA, 13 nt, Human
uucacggaagagc

SEQ ID NO: 3780253 - RNA, 18 nt, Human
uucacggaagagccuugc

SEQ ID NO: 3780254 - RNA, 13 nt, Human
uucacggaaguuu

SEQ ID NO: 3780255 - RNA, 14 nt, Human
uucacguagaacau

SEQ ID NO: 3780256 - RNA, 14 nt, Human
uucacgugcagcuc

SEQ ID NO: 3780257 - RNA, 23 nt, Human
uucacuacccaucgguguccauu

SEQ ID NO: 3780258 - RNA, 13 nt, Human
uucacuauuuccu

SEQ ID NO: 3780259 - RNA, 19 nt, Human
uucacuauuuccuuuauaa

SEQ ID NO: 3780260 - RNA, 14 nt, Human
uucacucaagcacu

SEQ ID NO: 3780261 - RNA, 16 nt, Human
uucacucacucuaaag

SEQ ID NO: 3780262 - RNA, 17 nt, Human
uucacucccccuaaacc

SEQ ID NO: 3780263 - RNA, 21 nt, Human
uucacuccggugugccugcag

SEQ ID NO: 3780264 - RNA, 22 nt, Human
uucacuccggugugccugcagc

SEQ ID NO: 3780265 - RNA, 19 nt, Human
uucacucuaagucauguau

SEQ ID NO: 3780266 - RNA, 13 nt, Human
uucacucucugaa

SEQ ID NO: 3780267 - RNA, 16 nt, Human
uucacucuuccagaau

SEQ ID NO: 3780268 - RNA, 22 nt, Human
uucacugaagaaaccuucagau

SEQ ID NO: 3780269 - RNA, 19 nt, Human
uucacugaaguucuccuga

SEQ ID NO: 3780270 - RNA, 11 nt, Human
uucacugauuu

SEQ ID NO: 3780271 - RNA, 16 nt, Human
uucacugcuggcugcc

SEQ ID NO: 3780272 - RNA, 14 nt, Human
uucacuggagcaca

SEQ ID NO: 3780273 - RNA, 15 nt, Human
uucacuggagcacaa

SEQ ID NO: 3780274 - RNA, 17 nt, Human
uucacuggaguuacauu

SEQ ID NO: 3780275 - RNA, 20 nt, Human
uucacuggccacaguuguuu

SEQ ID NO: 3780276 - RNA, 13 nt, Human
uucacugggccaa

SEQ ID NO: 3780277 - RNA, 18 nt, Human
uucacugguacucugcca

SEQ ID NO: 3780278 - RNA, 18 nt, Human
uucacuguauaaauagga

SEQ ID NO: 3780279 - RNA, 22 nt, Human
uucacuguauaaauaggagagg

SEQ ID NO: 3780280 - RNA, 23 nt, Human
uucacuguauaaauaggagagga

SEQ ID NO: 3780281 - RNA, 22 nt, Human
uucacuguccuccaagccagcg

SEQ ID NO: 3780282 - RNA, 16 nt, Human
uucacugucuuuaauu

SEQ ID NO: 3780283 - RNA, 23 nt, Human
uucacuguuucaucuaagugccu

SEQ ID NO: 3780284 - RNA, 15 nt, Human
uucacuuacagcacc

SEQ ID NO: 3780285 - RNA, 15 nt, Human
uucacuucacugugc

SEQ ID NO: 3780286 - RNA, 15 nt, Human
uucacuucaucuucu

SEQ ID NO: 3780287 - RNA, 18 nt, Human
uucacuucaucuucucag

SEQ ID NO: 3780288 - RNA, 15 nt, Human
uucacuucuuucccu

SEQ ID NO: 3780289 - RNA, 13 nt, Human
uucacuuuaauuc

SEQ ID NO: 3780290 - RNA, 14 nt, Human
uucacuuucauuuu

SEQ ID NO: 3780291 - RNA, 17 nt, Human
uucacuuuugacaaagg

SEQ ID NO: 3780292 - RNA, 14 nt, Human
uucagaaaaagaaa

SEQ ID NO: 3780293 - RNA, 16 nt, Human
uucagaaaaagaaaug

SEQ ID NO: 3780294 - RNA, 22 nt, Human
uucagaaaacugagcugcaauc

SEQ ID NO: 3780295 - RNA, 14 nt, Human
uucagaaaauauua

SEQ ID NO: 3780296 - RNA, 19 nt, Human
uucagaaaauguucuguuu

SEQ ID NO: 3780297 - RNA, 13 nt, Human
uucagaaagcauu

SEQ ID NO: 3780298 - RNA, 19 nt, Human
uucagaaagccuuucauuu

SEQ ID NO: 3780299 - RNA, 20 nt, Human
uucagaaagccuuucauuuu

SEQ ID NO: 3780300 - RNA, 19 nt, Human
uucagaaauacagauaaau

SEQ ID NO: 3780301 - RNA, 22 nt, Human
uucagaaaugaggccauggacu

SEQ ID NO: 3780302 - RNA, 16 nt, Human
uucagaaauguguuau

SEQ ID NO: 3780303 - RNA, 22 nt, Human
uucagaacaacugcaaagaaag

SEQ ID NO: 3780304 - RNA, 16 nt, Human
uucagaaccauccaua

SEQ ID NO: 3780305 - RNA, 15 nt, Human
uucagaaccucuucc

SEQ ID NO: 3780306 - RNA, 12 nt, Human
uucagaagaaaa

SEQ ID NO: 3780307 - RNA, 16 nt, Human
uucagaagaaauaaau

SEQ ID NO: 3780308 - RNA, 11 nt, Human
uucagaagacc

SEQ ID NO: 3780309 - RNA, 17 nt, Human
uucagaagucacacauu

SEQ ID NO: 3780310 - RNA, 21 nt, Human
uucagaagugagcuuugcugc

SEQ ID NO: 3780311 - RNA, 15 nt, Human
uucagaaguuuaaau

SEQ ID NO: 3780312 - RNA, 21 nt, Human
uucagaauaugucagugcuga

SEQ ID NO: 3780313 - RNA, 13 nt, Human
uucagaauauuca

SEQ ID NO: 3780314 - RNA, 16 nt, Human
uucagaauuaaacuuu

SEQ ID NO: 3780315 - RNA, 21 nt, Human
uucagaauuuaguguauccau

SEQ ID NO: 3780316 - RNA, 19 nt, Human
uucagacaaaauggauaca

SEQ ID NO: 3780317 - RNA, 15 nt, Human
uucagacaagcaaca

SEQ ID NO: 3780318 - RNA, 16 nt, Human
uucagacacuuuggaa

SEQ ID NO: 3780319 - RNA, 20 nt, Human
uucagacaucugagguuuua

SEQ ID NO: 3780320 - RNA, 12 nt, Human
uucagacucaga

SEQ ID NO: 3780321 - RNA, 14 nt, Human
uucagacuugucaa

SEQ ID NO: 3780322 - RNA, 19 nt, Human
uucagagacuccugcaggc

SEQ ID NO: 3780323 - RNA, 19 nt, Human
uucagagagcagugcuuuu

SEQ ID NO: 3780324 - RNA, 21 nt, Human
uucagagagcagugcuuuugg

SEQ ID NO: 3780325 - RNA, 17 nt, Human
uucagagggaaaguaaa

SEQ ID NO: 3780326 - RNA, 21 nt, Human
uucagaguucuuuuugaagua

SEQ ID NO: 3780327 - RNA, 23 nt, Human
uucagauaacuguuauuuauaau

SEQ ID NO: 3780328 - RNA, 17 nt, Human
uucagauacaaacugca

SEQ ID NO: 3780329 - RNA, 12 nt, Human
uucagauacaug

SEQ ID NO: 3780330 - RNA, 14 nt, Human
uucagauauaaaag

SEQ ID NO: 3780331 - RNA, 15 nt, Human
uucagauauaaaaga

SEQ ID NO: 3780332 - RNA, 19 nt, Human
uucagauauaaaagacuga

SEQ ID NO: 3780333 - RNA, 16 nt, Human
uucagauauauuuuuc

SEQ ID NO: 3780334 - RNA, 15 nt, Human
uucagaucacugaau

SEQ ID NO: 3780335 - RNA, 21 nt, Human
uucagaucacugaauuuauaa

SEQ ID NO: 3780336 - RNA, 17 nt, Human
uucaguuccucuuugca

SEQ ID NO: 3780337 - RNA, 22 nt, Human
uucaguuccucuuugcauggaa

SEQ ID NO: 3780338 - RNA, 18 nt, Human
uucaguugaucacuggca

SEQ ID NO: 3780339 - RNA, 16 nt, Human
uucaguugauuuuaca

SEQ ID NO: 3780340 - RNA, 22 nt, Human
uucaguugguucguucuguacu

SEQ ID NO: 3780341 - RNA, 15 nt, Human
uucaguugucucuga

SEQ ID NO: 3780342 - RNA, 23 nt, Human
uucaguuguuuguuuuugcuugu

SEQ ID NO: 3780343 - RNA, 15 nt, Human
uucaguuuaucuguu

SEQ ID NO: 3780344 - RNA, 18 nt, Human
uucaguuuaucuguucau

SEQ ID NO: 3780345 - RNA, 16 nt, Human
uucaguuucauaaaag

SEQ ID NO: 3780346 - RNA, 18 nt, Human
uucaguuucuaaaauuga

SEQ ID NO: 3780347 - RNA, 17 nt, Human
uucaguuucuucugcgc

SEQ ID NO: 3780348 - RNA, 19 nt, Human
uucaguuuuaccagaugau

SEQ ID NO: 3780349 - RNA, 16 nt, Human
uucaguuuugauauuu

SEQ ID NO: 3780350 - RNA, 15 nt, Human
uucauaaagaauugu

SEQ ID NO: 3780351 - RNA, 14 nt, Human
uucauaaagauuca

SEQ ID NO: 3780352 - RNA, 12 nt, Human
uucauaaaugaa

SEQ ID NO: 3780353 - RNA, 14 nt, Human
uucauaaauuauuu

SEQ ID NO: 3780354 - RNA, 20 nt, Human
uucauaaauuauuugauuau

SEQ ID NO: 3780355 - RNA, 18 nt, Human
uucauaacagugccauug

SEQ ID NO: 3780356 - RNA, 22 nt, Human
uucauaacagugccauugucuu

SEQ ID NO: 3780357 - RNA, 15 nt, Human
uucauaaccuagccu

SEQ ID NO: 3780358 - RNA, 22 nt, Human
uucauaacuuauugcugauuuu

SEQ ID NO: 3780359 - RNA, 14 nt, Human
uucauaagauauuu

SEQ ID NO: 3780360 - RNA, 15 nt, Human
uucauaaucacucua

SEQ ID NO: 3780361 - RNA, 13 nt, Human
uucauaaugacuu

SEQ ID NO: 3780362 - RNA, 13 nt, Human
uucauaauuuguu

SEQ ID NO: 3780363 - RNA, 23 nt, Human
uucauacauauuuuuguagcacu

SEQ ID NO: 3780364 - RNA, 14 nt, Human
uucauaccuaagua

SEQ ID NO: 3780365 - RNA, 21 nt, Human
uucauaccuaaguacuguaau

SEQ ID NO: 3780366 - RNA, 23 nt, Human
uucauacuccuuuuaagcaguga

SEQ ID NO: 3780367 - RNA, 14 nt, Human
uucauacucuagau

SEQ ID NO: 3780368 - RNA, 17 nt, Human
uucauacucuagauuuu

SEQ ID NO: 3780369 - RNA, 18 nt, Human
uucauacuuaaaaauuua

SEQ ID NO: 3780370 - RNA, 15 nt, Human
uucauagaauacuca

SEQ ID NO: 3780371 - RNA, 16 nt, Human
uucauagacccucuca

SEQ ID NO: 3780372 - RNA, 17 nt, Human
uucauagacccucucaa

SEQ ID NO: 3780373 - RNA, 18 nt, Human
uucauagagaauauaaaa

SEQ ID NO: 3780374 - RNA, 14 nt, Human
uucauagauuuccu

SEQ ID NO: 3780375 - RNA, 23 nt, Human
uucauaguauccauauuuuauua

SEQ ID NO: 3780376 - RNA, 14 nt, Human
uucauaguucagaa

SEQ ID NO: 3780377 - RNA, 19 nt, Human
uucauaguucagaauuuag

SEQ ID NO: 3780378 - RNA, 23 nt, Human
uucauaucacacuguuaaaaguu

SEQ ID NO: 3780379 - RNA, 20 nt, Human
uucauaucuauuuauuaaau

SEQ ID NO: 3780380 - RNA, 22 nt, Human
uucauaucuauuuauuaaauuu

SEQ ID NO: 3780381 - RNA, 21 nt, Human
uucauaugaaaggugccaugg

SEQ ID NO: 3780382 - RNA, 13 nt, Human
uucauauguaauc

SEQ ID NO: 3780383 - RNA, 20 nt, Human
uucauauguaccauguacau

SEQ ID NO: 3780384 - RNA, 18 nt, Human
uucauauucaugcaagua

SEQ ID NO: 3780385 - RNA, 14 nt, Human
uucauauuggaaaa

SEQ ID NO: 3780386 - RNA, 20 nt, Human
uucauauuuaauuugaaggu

SEQ ID NO: 3780387 - RNA, 15 nt, Human
uucauauuucuuugg

SEQ ID NO: 3780388 - RNA, 14 nt, Human
uucauauuuguacu

SEQ ID NO: 3780389 - RNA, 15 nt, Human
uucauauuuguacuu

SEQ ID NO: 3780390 - RNA, 17 nt, Human
uucauauuuuaaacaga

SEQ ID NO: 3780391 - RNA, 19 nt, Human
uucauauuuuucaaaauag

SEQ ID NO: 3780392 - RNA, 21 nt, Human
uucauauuuuucauagcuaaa

SEQ ID NO: 3780393 - RNA, 16 nt, Human
uucaucaaauggaaga

SEQ ID NO: 3780394 - RNA, 19 nt, Human
uucaucaaauggaagacac

SEQ ID NO: 3780395 - RNA, 13 nt, Human
uucaucaaucauu

SEQ ID NO: 3780396 - RNA, 22 nt, Human
uucaucaaucauuguacaguuu

SEQ ID NO: 3780397 - RNA, 15 nt, Human
uucaucaaugaauga

SEQ ID NO: 3780398 - RNA, 13 nt, Human
uucaucagcauuu

SEQ ID NO: 3780399 - RNA, 15 nt, Human
uucaucaguguuaaa

SEQ ID NO: 3780400 - RNA, 18 nt, Human
uucaucauccuaagcuau

SEQ ID NO: 3780401 - RNA, 20 nt, Human
uucaucauucacuucacugu

SEQ ID NO: 3780402 - RNA, 17 nt, Human
uucaucauucccucuca

SEQ ID NO: 3780403 - RNA, 20 nt, Human
uucaucauucccucucaucu

SEQ ID NO: 3780404 - RNA, 21 nt, Human
uucauccaauccucacugggu

SEQ ID NO: 3780405 - RNA, 22 nt, Human
uucauccaauccucacugggug

SEQ ID NO: 3780406 - RNA, 24 nt, Human
uucaucccaaaggacagccgccug

SEQ ID NO: 3780407 - RNA, 19 nt, Human
uucaucccaacugucuuuu

SEQ ID NO: 3780408 - RNA, 14 nt, Human
uucaucccagcccc

SEQ ID NO: 3780409 - RNA, 16 nt, Human
uucaucccagccccaa

SEQ ID NO: 3780410 - RNA, 19 nt, Human
uucaucccaugauguagug

SEQ ID NO: 3780411 - RNA, 14 nt, Human
uucauccccucaga

SEQ ID NO: 3780412 - RNA, 14 nt, Human
uucauccccuuacc

SEQ ID NO: 3780413 - RNA, 15 nt, Human
uucauccccuuaccc

SEQ ID NO: 3780414 - RNA, 16 nt, Human
uucaucccuucucuuc

SEQ ID NO: 3780415 - RNA, 18 nt, Human
uucaucccuucucuucca

SEQ ID NO: 3780416 - RNA, 18 nt, Human
uucauccugacucugccc

SEQ ID NO: 3780417 - RNA, 18 nt, Human
uucaucgaaucuacuaau

SEQ ID NO: 3780418 - RNA, 20 nt, Human
uucaucuaccauuuucuggu

SEQ ID NO: 3780419 - RNA, 15 nt, Human
uucaucuaggauuuu

SEQ ID NO: 3780420 - RNA, 23 nt, Human
uucaucuauuuuuggcagucuga

SEQ ID NO: 3780421 - RNA, 12 nt, Human
uucaucucauuu

SEQ ID NO: 3780422 - RNA, 16 nt, Human
uucaucucauuuaagg

SEQ ID NO: 3780423 - RNA, 19 nt, Human
uucaucucauuuaagggaa

SEQ ID NO: 3780424 - RNA, 23 nt, Human
uucaucucauuuaagggaaaaau

SEQ ID NO: 3780425 - RNA, 22 nt, Human
uucaucuccagggaguccccuc

SEQ ID NO: 3780426 - RNA, 12 nt, Human
uucaucuggaac

SEQ ID NO: 3780427 - RNA, 17 nt, Human
uucaucuggaaccauca

SEQ ID NO: 3780428 - RNA, 17 nt, Human
uucaucuucaguugucu

SEQ ID NO: 3780429 - RNA, 13 nt, Human
uucaucuuccugu

SEQ ID NO: 3780430 - RNA, 18 nt, Human
uucaucuuccuguguccu

SEQ ID NO: 3780431 - RNA, 12 nt, Human
uucaucuugaau

SEQ ID NO: 3780432 - RNA, 18 nt, Human
uucaugaaaauccuacca

SEQ ID NO: 3780433 - RNA, 13 nt, Human
uucaugaaaugcu

SEQ ID NO: 3780434 - RNA, 23 nt, Human
uucaugaaaugcuaugucauuuc

SEQ ID NO: 3780435 - RNA, 21 nt, Human
uucaugaacuucgcaucaaaa

SEQ ID NO: 3780436 - RNA, 15 nt, Human
uucaugacagccucc

SEQ ID NO: 3780437 - RNA, 16 nt, Human
uucaugacagccucca

SEQ ID NO: 3780438 - RNA, 12 nt, Human
uucaugauaaug

SEQ ID NO: 3780439 - RNA, 12 nt, Human
uucaugaugcag

SEQ ID NO: 3780440 - RNA, 16 nt, Human
uucaugaugcagucuc

SEQ ID NO: 3780441 - RNA, 23 nt, Human
uucaugauuagaaauuaccugug

SEQ ID NO: 3780442 - RNA, 23 nt, Human
uucaugauuucauuucaacuguu

SEQ ID NO: 3780443 - RNA, 15 nt, Human
uucaugcaaacucuu

SEQ ID NO: 3780444 - RNA, 16 nt, Human
uucaugcaaacucuuu

SEQ ID NO: 3780445 - RNA, 20 nt, Human
uucaugcaaacucuuugguc

SEQ ID NO: 3780446 - RNA, 14 nt, Human
uucaugcaaguauu

SEQ ID NO: 3780447 - RNA, 15 nt, Human
uucaugcacuuaaag

SEQ ID NO: 3780448 - RNA, 19 nt, Human
uucaugcacuuaaagaagu

SEQ ID NO: 3780449 - RNA, 23 nt, Human
uucaugcacuuaaagaaguauuu

SEQ ID NO: 3780450 - RNA, 13 nt, Human
uucaugcagcugu

SEQ ID NO: 3780451 - RNA, 14 nt, Human
uucaugccuuugua

SEQ ID NO: 3780452 - RNA, 18 nt, Human
uucaugccuuuguaaguu

SEQ ID NO: 3780453 - RNA, 21 nt, Human
uucaugccuuuguaaguuauu

SEQ ID NO: 3780454 - RNA, 17 nt, Human
uucaugcuaucucugug

SEQ ID NO: 3780455 - RNA, 15 nt, Human
uucaugcucugcaaa

SEQ ID NO: 3780456 - RNA, 21 nt, Human
uucauggaacgcguugaaauu

SEQ ID NO: 3780457 - RNA, 22 nt, Human
uucauggaacgcguugaaauug

SEQ ID NO: 3780458 - RNA, 18 nt, Human
uucauggaauggacaucc

SEQ ID NO: 3780459 - RNA, 15 nt, Human
uucauggacacuuug

SEQ ID NO: 3780460 - RNA, 21 nt, Human
uucauggacacuuugaaaugu

SEQ ID NO: 3780461 - RNA, 17 nt, Human
uucauggaccacuguuu

SEQ ID NO: 3780462 - RNA, 13 nt, Human
uucauggaucaga

SEQ ID NO: 3780463 - RNA, 16 nt, Human
uucauggaucagaucu

SEQ ID NO: 3780464 - RNA, 14 nt, Human
uucauguaaacugu

SEQ ID NO: 3780465 - RNA, 16 nt, Human
uucauguaaaguguca

SEQ ID NO: 3780466 - RNA, 21 nt, Human
uucauguaauuuuauuuuaaa

SEQ ID NO: 3780467 - RNA, 20 nt, Human
uucauguagagaaaagcaca

SEQ ID NO: 3780468 - RNA, 21 nt, Human
uucauguagagaaaagcacac

SEQ ID NO: 3780469 - RNA, 19 nt, Human
uucauguccugugucaguu

SEQ ID NO: 3780470 - RNA, 22 nt, Human
uucauguccugugucaguuuau

SEQ ID NO: 3780471 - RNA, 15 nt, Human
uucaugugucccaga

SEQ ID NO: 3780472 - RNA, 18 nt, Human
uucaugugucccagaaga

SEQ ID NO: 3780473 - RNA, 21 nt, Human
uucaugugugccaaggcugau

SEQ ID NO: 3780474 - RNA, 13 nt, Human
uucauguuaguua

SEQ ID NO: 3780475 - RNA, 16 nt, Human
uucauguuaguuaccu

SEQ ID NO: 3780476 - RNA, 19 nt, Human
uucauguuuggugcauaga

SEQ ID NO: 3780477 - RNA, 15 nt, Human
uucauguuuuaacaa

SEQ ID NO: 3780478 - RNA, 15 nt, Human
uucauuaaaagcuac

SEQ ID NO: 3780479 - RNA, 13 nt, Human
uucauuaaauaaa

SEQ ID NO: 3780480 - RNA, 14 nt, Human
uucauuaaauaaau

SEQ ID NO: 3780481 - RNA, 18 nt, Human
uucauuaauaauaaauuc

SEQ ID NO: 3780482 - RNA, 21 nt, Human
uucauuaauaauaaauucccu

SEQ ID NO: 3780483 - RNA, 20 nt, Human
uucauuacaauggaaacaau

SEQ ID NO: 3780484 - RNA, 13 nt, Human
uucauuacagcuu

SEQ ID NO: 3780485 - RNA, 18 nt, Human
uucauuacagcuuaauca

SEQ ID NO: 3780486 - RNA, 17 nt, Human
uguaguguuggagaaga

SEQ ID NO: 3780487 - RNA, 20 nt, Human
uguaguguuggagaagaacu

SEQ ID NO: 3780488 - RNA, 13 nt, Human
uguaguuaaugau

SEQ ID NO: 3780489 - RNA, 17 nt, Human
uguaguuaauuuaucua

SEQ ID NO: 3780490 - RNA, 13 nt, Human
uguaguucaugua

SEQ ID NO: 3780491 - RNA, 20 nt, Human
uguaguucauguaaauaaua

SEQ ID NO: 3780492 - RNA, 14 nt, Human
uguaguucuuuaaa

SEQ ID NO: 3780493 - RNA, 14 nt, Human
uguaguugaacuga

SEQ ID NO: 3780494 - RNA, 21 nt, Human
uguaguuguucguugguuaua

SEQ ID NO: 3780495 - RNA, 19 nt, Human
uguaguuuaccucuuuaaa

SEQ ID NO: 3780496 - RNA, 19 nt, Human
uguaguuuuucuucaacau

SEQ ID NO: 3780497 - RNA, 22 nt, Human
uguauaaaaauaaaaaagaucc

SEQ ID NO: 3780498 - RNA, 13 nt, Human
uguauaaaagugu

SEQ ID NO: 3780499 - RNA, 19 nt, Human
uguauaaaggugugcugug

SEQ ID NO: 3780500 - RNA, 18 nt, Human
uguauaaauaggagagga

SEQ ID NO: 3780501 - RNA, 19 nt, Human
uguauaaauauacaguaua

SEQ ID NO: 3780502 - RNA, 12 nt, Human
uguauaaaugua

SEQ ID NO: 3780503 - RNA, 18 nt, Human
uguauaaauguauauaca

SEQ ID NO: 3780504 - RNA, 15 nt, Human
uguauaacuaggagc

SEQ ID NO: 3780505 - RNA, 18 nt, Human
uguauaacuuuaacuucu

SEQ ID NO: 3780506 - RNA, 16 nt, Human
uguauaagcacugaaa

SEQ ID NO: 3780507 - RNA, 18 nt, Human
uguauaagcacugaaaaa

SEQ ID NO: 3780508 - RNA, 14 nt, Human
uguauaaggacagu

SEQ ID NO: 3780509 - RNA, 17 nt, Human
uguauaaguaagaaaau

SEQ ID NO: 3780510 - RNA, 18 nt, Human
uguauaaguaagaaaaua

SEQ ID NO: 3780511 - RNA, 16 nt, Human
uguauaaguccuugca

SEQ ID NO: 3780512 - RNA, 19 nt, Human
uguauaaguccuugcaaga

SEQ ID NO: 3780513 - RNA, 18 nt, Human
uguauaagugcacacaga

SEQ ID NO: 3780514 - RNA, 20 nt, Human
uguauaagugcacacagaaa

SEQ ID NO: 3780515 - RNA, 23 nt, Human
uguauaaguuauuuuuguacaug

SEQ ID NO: 3780516 - RNA, 20 nt, Human
uguauaauauugaaaauuga

SEQ ID NO: 3780517 - RNA, 15 nt, Human
uguauaauauuuuua

SEQ ID NO: 3780518 - RNA, 21 nt, Human
uguauaauuggauuuccuaau

SEQ ID NO: 3780519 - RNA, 18 nt, Human
uguauacaaguacuggua

SEQ ID NO: 3780520 - RNA, 12 nt, Human
uguauacaugug

SEQ ID NO: 3780521 - RNA, 15 nt, Human
uguauacuauaguac

SEQ ID NO: 3780522 - RNA, 15 nt, Human
uguauacuuuaaaua

SEQ ID NO: 3780523 - RNA, 17 nt, Human
uguauacuuuaaauaau

SEQ ID NO: 3780524 - RNA, 13 nt, Human
uguauacuuuagu

SEQ ID NO: 3780525 - RNA, 23 nt, Human
uguauagaaccucuuugucuaca

SEQ ID NO: 3780526 - RNA, 18 nt, Human
uguauagcucuuuuccua

SEQ ID NO: 3780527 - RNA, 15 nt, Human
uguauaguauuugaa

SEQ ID NO: 3780528 - RNA, 19 nt, Human
uguauaguauuugaaaaca

SEQ ID NO: 3780529 - RNA, 21 nt, Human
uguauaguauuugaaaacaga

SEQ ID NO: 3780530 - RNA, 16 nt, Human
uguauaguguaaaaua

SEQ ID NO: 3780531 - RNA, 16 nt, Human
uguauaguuaacacac

SEQ ID NO: 3780532 - RNA, 13 nt, Human
uguauaguuaugu

SEQ ID NO: 3780533 - RNA, 14 nt, Human
uguauaguuaugua

SEQ ID NO: 3780534 - RNA, 19 nt, Human
uguauaguuauguaaauaa

SEQ ID NO: 3780535 - RNA, 18 nt, Human
uguauaguugcuugccug

SEQ ID NO: 3780536 - RNA, 15 nt, Human
uguauaguugcuuuu

SEQ ID NO: 3780537 - RNA, 17 nt, Human
uguauaguugcuuuuga

SEQ ID NO: 3780538 - RNA, 21 nt, Human
uguauaguuguggacauuuaa

SEQ ID NO: 3780539 - RNA, 12 nt, Human
uguauauaaaaa

SEQ ID NO: 3780540 - RNA, 14 nt, Human
uguauauaaaaaug

SEQ ID NO: 3780541 - RNA, 16 nt, Human
uguauauaaaaauggc

SEQ ID NO: 3780542 - RNA, 15 nt, Human
uguauauacaauaac

SEQ ID NO: 3780543 - RNA, 14 nt, Human
uguauauacacaua

SEQ ID NO: 3780544 - RNA, 18 nt, Human
uguauauacacauauacc

SEQ ID NO: 3780545 - RNA, 17 nt, Human
uguuuauuaaucuuagu

SEQ ID NO: 3780546 - RNA, 13 nt, Human
uguuuauucauau

SEQ ID NO: 3780547 - RNA, 17 nt, Human
uguuuauucauaugcau

SEQ ID NO: 3780548 - RNA, 18 nt, Human
uguuuauucauaugcaua

SEQ ID NO: 3780549 - RNA, 13 nt, Human
uguuuauuccuga

SEQ ID NO: 3780550 - RNA, 17 nt, Human
uguuuauucuucuagag

SEQ ID NO: 3780551 - RNA, 20 nt, Human
uguuuauugaauucauuuca

SEQ ID NO: 3780552 - RNA, 23 nt, Human
uguuuauugaauucauuucacug

SEQ ID NO: 3780553 - RNA, 19 nt, Human
uguuuauugucaaaguggu

SEQ ID NO: 3780554 - RNA, 20 nt, Human
uguuuauuguugcugguuau

SEQ ID NO: 3780555 - RNA, 13 nt, Human
uguuuauuuacaa

SEQ ID NO: 3780556 - RNA, 12 nt, Human
uguuuauuuucu

SEQ ID NO: 3780557 - RNA, 22 nt, Human
uguuuauuuuuauauagcuuga

SEQ ID NO: 3780558 - RNA, 12 nt, Human
uguuuauuuuuc

SEQ ID NO: 3780559 - RNA, 14 nt, Human
uguuuauuuuucau

SEQ ID NO: 3780560 - RNA, 15 nt, Human
uguuuauuuuucaua

SEQ ID NO: 3780561 - RNA, 19 nt, Human
uguuuauuuuucauauugu

SEQ ID NO: 3780562 - RNA, 19 nt, Human
uguuuauuuuucuugucuu

SEQ ID NO: 3780563 - RNA, 23 nt, Human
uguuuauuuuucuugucuuuauu

SEQ ID NO: 3780564 - RNA, 16 nt, Human
uguuucaaaauaaaaa

SEQ ID NO: 3780565 - RNA, 15 nt, Human
uguuucaaggcacuc

SEQ ID NO: 3780566 - RNA, 19 nt, Human
uguuucaaggcacucuaga

SEQ ID NO: 3780567 - RNA, 20 nt, Human
uguuucaaggcacucuagau

SEQ ID NO: 3780568 - RNA, 21 nt, Human
uguuucaaggcacucuagauu

SEQ ID NO: 3780569 - RNA, 17 nt, Human
uguuucaaguggggcuc

SEQ ID NO: 3780570 - RNA, 16 nt, Human
uguuucaauugcaucu

SEQ ID NO: 3780571 - RNA, 13 nt, Human
uguuucacaaggu

SEQ ID NO: 3780572 - RNA, 16 nt, Human
uguuucacaaggucuu

SEQ ID NO: 3780573 - RNA, 17 nt, Human
uguuucacaguuugaaa

SEQ ID NO: 3780574 - RNA, 18 nt, Human
uguuucacgaaguuuguu

SEQ ID NO: 3780575 - RNA, 22 nt, Human
uguuucagcuaagggaagacau

SEQ ID NO: 3780576 - RNA, 24 nt, Human
uguuucagcuaagggaagacauuu

SEQ ID NO: 3780577 - RNA, 15 nt, Human
uguuucauccuuccc

SEQ ID NO: 3780578 - RNA, 19 nt, Human
uguuucauguuuugugacu

SEQ ID NO: 3780579 - RNA, 16 nt, Human
uguuucauuaacugug

SEQ ID NO: 3780580 - RNA, 15 nt, Human
uguuuccaauguuua

SEQ ID NO: 3780581 - RNA, 23 nt, Human
uguuuccaauguuuagcaaauac

SEQ ID NO: 3780582 - RNA, 20 nt, Human
uguuuccagcagaagacaaa

SEQ ID NO: 3780583 - RNA, 20 nt, Human
uguuuccagcauucccaggu

SEQ ID NO: 3780584 - RNA, 22 nt, Human
uguuucccaggcccacugugcc

SEQ ID NO: 3780585 - RNA, 18 nt, Human
uguuucccuucccuucca

SEQ ID NO: 3780586 - RNA, 15 nt, Human
uguuuccuggcacug

SEQ ID NO: 3780587 - RNA, 20 nt, Human
uguuuccuggcacugcuucc

SEQ ID NO: 3780588 - RNA, 12 nt, Human
uguuuccuucag

SEQ ID NO: 3780589 - RNA, 15 nt, Human
uguuuccuucagugc

SEQ ID NO: 3780590 - RNA, 13 nt, Human
uguuuccuucccu

SEQ ID NO: 3780591 - RNA, 23 nt, Human
uguuuccuugaggggagccagga

SEQ ID NO: 3780592 - RNA, 23 nt, Human
uguuuccuuguuuaucagauaca

SEQ ID NO: 3780593 - RNA, 16 nt, Human
uguuuccuuuuucaga

SEQ ID NO: 3780594 - RNA, 16 nt, Human
uguuuccuuuuuuccc

SEQ ID NO: 3780595 - RNA, 19 nt, Human
uguuucgugaaguauacug

SEQ ID NO: 3780596 - RNA, 20 nt, Human
uguuucuaccggagagagaa

SEQ ID NO: 3780597 - RNA, 23 nt, Human
uguuucuagagccugcuggaucu

SEQ ID NO: 3780598 - RNA, 16 nt, Human
uguuucuagaguuccu

SEQ ID NO: 3780599 - RNA, 13 nt, Human
uguuucuccccca

SEQ ID NO: 3780600 - RNA, 21 nt, Human
uguuucucccccauguucugu

SEQ ID NO: 3780601 - RNA, 15 nt, Human
uguuucuccugagcu

SEQ ID NO: 3780602 - RNA, 18 nt, Human
uguuucucuugagcuggc

SEQ ID NO: 3780603 - RNA, 12 nt, Human
uguuucugaaaa

SEQ ID NO: 3780604 - RNA, 13 nt, Human
uguuucugaaaag

SEQ ID NO: 3780605 - RNA, 16 nt, Human
uguuucugaaaagaaa

SEQ ID NO: 3780606 - RNA, 22 nt, Human
uguuucugaaaagaaauaauaa

SEQ ID NO: 3780607 - RNA, 23 nt, Human
uguuucugaaaagaaauaauaau

SEQ ID NO: 3780608 - RNA, 23 nt, Human
uguuucuggacccuuauaaaauc

SEQ ID NO: 3780609 - RNA, 17 nt, Human
uguuucuggauuucaua

SEQ ID NO: 3780610 - RNA, 11 nt, Human
uguuucuguac

SEQ ID NO: 3780611 - RNA, 14 nt, Human
uguuucugucagga

SEQ ID NO: 3780612 - RNA, 14 nt, Human
uguuucugugggcg

SEQ ID NO: 3780613 - RNA, 15 nt, Human
uguggggugaaaagu

SEQ ID NO: 3780614 - RNA, 21 nt, Human
uguggguacagagaggucaag

SEQ ID NO: 3780615 - RNA, 15 nt, Human
ugugggucaaggaau

SEQ ID NO: 3780616 - RNA, 17 nt, Human
ugugggugauggggagg

SEQ ID NO: 3780617 - RNA, 14 nt, Human
uguggguguccugc

SEQ ID NO: 3780618 - RNA, 23 nt, Human
uguggguguccugccugucugcc

SEQ ID NO: 3780619 - RNA, 21 nt, Human
uguggguuucuaaagcugcca

SEQ ID NO: 3780620 - RNA, 21 nt, Human
ugugguaagcaacauggcuuu

SEQ ID NO: 3780621 - RNA, 16 nt, Human
ugugguacaaucucaa

SEQ ID NO: 3780622 - RNA, 12 nt, Human
ugugguacagag

SEQ ID NO: 3780623 - RNA, 15 nt, Human
ugugguacagagaag

SEQ ID NO: 3780624 - RNA, 16 nt, Human
ugugguacagagaagc

SEQ ID NO: 3780625 - RNA, 13 nt, Human
ugugguagaaaca

SEQ ID NO: 3780626 - RNA, 22 nt, Human
ugugguagggacuuaaaaaacu

SEQ ID NO: 3780627 - RNA, 23 nt, Human
uguggucacagcuguauagcugc

SEQ ID NO: 3780628 - RNA, 14 nt, Human
ugugguccaaauag

SEQ ID NO: 3780629 - RNA, 16 nt, Human
uguggucccaacagga

SEQ ID NO: 3780630 - RNA, 16 nt, Human
uguggucccaccccac

SEQ ID NO: 3780631 - RNA, 11 nt, Human
uguggucucag

SEQ ID NO: 3780632 - RNA, 14 nt, Human
uguggucucaggau

SEQ ID NO: 3780633 - RNA, 13 nt, Human
uguggucuccacu

SEQ ID NO: 3780634 - RNA, 17 nt, Human
uguggugaaaagcaggu

SEQ ID NO: 3780635 - RNA, 17 nt, Human
uguggugacuuuggaua

SEQ ID NO: 3780636 - RNA, 16 nt, Human
uguggugcagugugaa

SEQ ID NO: 3780637 - RNA, 19 nt, Human
uguggugccugaggucugu

SEQ ID NO: 3780638 - RNA, 13 nt, Human
uguggugcugaca

SEQ ID NO: 3780639 - RNA, 14 nt, Human
ugugguggccucag

SEQ ID NO: 3780640 - RNA, 13 nt, Human
ugugguguaauuu

SEQ ID NO: 3780641 - RNA, 14 nt, Human
uguggugucugugu

SEQ ID NO: 3780642 - RNA, 16 nt, Human
uguggugugagcuuca

SEQ ID NO: 3780643 - RNA, 14 nt, Human
ugugguuaaugcca

SEQ ID NO: 3780644 - RNA, 20 nt, Human
ugugguuauaacuuaaugaa

SEQ ID NO: 3780645 - RNA, 20 nt, Human
ugugguuauuuuuauacagu

SEQ ID NO: 3780646 - RNA, 21 nt, Human
ugugguuauuuuuauacagua

SEQ ID NO: 3780647 - RNA, 15 nt, Human
ugugguuuauauauu

SEQ ID NO: 3780648 - RNA, 14 nt, Human
ugugguuuauguca

SEQ ID NO: 3780649 - RNA, 22 nt, Human
ugugguuucauguuaguuaccu

SEQ ID NO: 3780650 - RNA, 12 nt, Human
ugugguuucuuu

SEQ ID NO: 3780651 - RNA, 16 nt, Human
ugugguuucuuuuuga

SEQ ID NO: 3780652 - RNA, 18 nt, Human
ugugguuuggaauauuaa

SEQ ID NO: 3780653 - RNA, 12 nt, Human
ugugguuuguug

SEQ ID NO: 3780654 - RNA, 21 nt, Human
ugugguuuuccccucccuggg

SEQ ID NO: 3780655 - RNA, 23 nt, Human
ugugguuuuccccucccuggguu

SEQ ID NO: 3780656 - RNA, 19 nt, Human
ugugguuuucuuuugccau

SEQ ID NO: 3780657 - RNA, 16 nt, Human
uguguaaaaaaaccac

SEQ ID NO: 3780658 - RNA, 20 nt, Human
uguguaaacaaaaugaagcu

SEQ ID NO: 3780659 - RNA, 14 nt, Human
uguguaaaguuagu

SEQ ID NO: 3780660 - RNA, 19 nt, Human
uguguaagagaauguugaa

SEQ ID NO: 3780661 - RNA, 13 nt, Human
uguguaaguagau

SEQ ID NO: 3780662 - RNA, 15 nt, Human
uguguaauaaagugu

SEQ ID NO: 3780663 - RNA, 19 nt, Human
uguguaauaaaguguuuuc

SEQ ID NO: 3780664 - RNA, 20 nt, Human
uguguaauaaaguguuuuca

SEQ ID NO: 3780665 - RNA, 22 nt, Human
uguguaauaaaguguuuucaga

SEQ ID NO: 3780666 - RNA, 15 nt, Human
uguguaaucaauaaa

SEQ ID NO: 3780667 - RNA, 20 nt, Human
uguguaaucaauaaacgauu

SEQ ID NO: 3780668 - RNA, 13 nt, Human
uguguaaugaaaa

SEQ ID NO: 3780669 - RNA, 21 nt, Human
uguguaauuagugccacuuaa

SEQ ID NO: 3780670 - RNA, 23 nt, Human
uguguaauuuaaaauugugaugu

SEQ ID NO: 3780671 - RNA, 16 nt, Human
uguguaauuuuguucu

SEQ ID NO: 3780672 - RNA, 17 nt, Human
uguguacaauguacaca

SEQ ID NO: 3780673 - RNA, 21 nt, Human
uguguacagaauucugcuacc

SEQ ID NO: 3780674 - RNA, 23 nt, Human
uguguacagaauucugcuaccuc

SEQ ID NO: 3780675 - RNA, 18 nt, Human
uguguacauaacucugua

SEQ ID NO: 3780676 - RNA, 22 nt, Human
uguguacucacugaagccugcg

SEQ ID NO: 3780677 - RNA, 16 nt, Human
uguguacucuggccuc

SEQ ID NO: 3780678 - RNA, 17 nt, Human
uguguacucuggccucu

SEQ ID NO: 3780679 - RNA, 18 nt, Human
uguguacucuggccucug

SEQ ID NO: 3780680 - RNA, 10 nt, Human
uguguacugu

SEQ ID NO: 3780681 - RNA, 17 nt, Human
uguguacuguauagaca

SEQ ID NO: 3780682 - RNA, 17 nt, Human
uguguagaaaaaaaaac

SEQ ID NO: 3780683 - RNA, 21 nt, Human
uguguagaguuaagaagcugu

SEQ ID NO: 3780684 - RNA, 15 nt, Human
uguguagccugugca

SEQ ID NO: 3780685 - RNA, 20 nt, Human
uguguagccuuuuuguauaa

SEQ ID NO: 3780686 - RNA, 19 nt, Human
uguguagcugugaccugcu

SEQ ID NO: 3780687 - RNA, 17 nt, Human
uguguagcuuugcucuu

SEQ ID NO: 3780688 - RNA, 14 nt, Human
uguguaguucaugu

SEQ ID NO: 3780689 - RNA, 14 nt, Human
uguguaguuccagc

SEQ ID NO: 3780690 - RNA, 13 nt, Human
uguguauaaacaa

SEQ ID NO: 3780691 - RNA, 22 nt, Human
uguguauacagcccugacgcaa

SEQ ID NO: 3780692 - RNA, 15 nt, Human
uguguauauaguuuu

SEQ ID NO: 3780693 - RNA, 13 nt, Human
uguguauauauac

SEQ ID NO: 3780694 - RNA, 18 nt, Human
uguguauauauguguaua

SEQ ID NO: 3780695 - RNA, 13 nt, Human
uguguauauggac

SEQ ID NO: 3780696 - RNA, 14 nt, Human
uguguauauggaca

SEQ ID NO: 3780697 - RNA, 15 nt, Human
uguguauauuugauu

SEQ ID NO: 3780698 - RNA, 21 nt, Human
uguguauauuugauuuauuaa

SEQ ID NO: 3780699 - RNA, 23 nt, Human
uguguaugcacaugaacuuagau

SEQ ID NO: 3780700 - RNA, 14 nt, Human
uguguaugccaaga

SEQ ID NO: 3780701 - RNA, 18 nt, Human
uguguaugcgugugugug

SEQ ID NO: 3780702 - RNA, 13 nt, Human
uguguaugcugcu

SEQ ID NO: 3780703 - RNA, 15 nt, Human
uguguauguacauau

SEQ ID NO: 3780704 - RNA, 19 nt, Human
uguguaugugcgugugugc

SEQ ID NO: 3780705 - RNA, 12 nt, Human
uguguauguggg

SEQ ID NO: 3780706 - RNA, 22 nt, Human
uguguauguguacgugugugug

SEQ ID NO: 3780707 - RNA, 16 nt, Human
uguguauguguauuua

SEQ ID NO: 3780708 - RNA, 16 nt, Human
uguguaugugugugug

SEQ ID NO: 3780709 - RNA, 19 nt, Human
uguguauucauugaaguca

SEQ ID NO: 3780710 - RNA, 14 nt, Human
uguguauuccaaga

SEQ ID NO: 3780711 - RNA, 15 nt, Human
uguguauuguuccca

SEQ ID NO: 3780712 - RNA, 22 nt, Human
uguguauuuaacagggagggga

SEQ ID NO: 3780713 - RNA, 23 nt, Human
uguguauuuaauuguaaacugua

SEQ ID NO: 3780714 - RNA, 23 nt, Human
uguguauuucaguuauugucccu

SEQ ID NO: 3780715 - RNA, 11 nt, Human
uguguauuugc

SEQ ID NO: 3780716 - RNA, 13 nt, Human
uguguauuugcua

SEQ ID NO: 3780717 - RNA, 15 nt, Human
uguguauuuucaguc

SEQ ID NO: 3780718 - RNA, 23 nt, Human
ugugucacaaugagauugaauuu

SEQ ID NO: 3780719 - RNA, 15 nt, Human
ugugucacuggcugc

SEQ ID NO: 3780720 - RNA, 14 nt, Human
ugugucacuugugc

SEQ ID NO: 3780721 - RNA, 17 nt, Human
ugugucacuugugcuuu

SEQ ID NO: 3780722 - RNA, 21 nt, Human
ugugucacuugugcuuugcuc

SEQ ID NO: 3780723 - RNA, 14 nt, Human
ugugucagcugagg

SEQ ID NO: 3780724 - RNA, 19 nt, Human
ugugucagguggggcagcu

SEQ ID NO: 3780725 - RNA, 22 nt, Human
ugugucaguggggcucucugag

SEQ ID NO: 3780726 - RNA, 14 nt, Human
ugugucauuucaaa

SEQ ID NO: 3780727 - RNA, 16 nt, Human
uguguccaccuguggg

SEQ ID NO: 3780728 - RNA, 19 nt, Human
uguguccaccugugggugu

SEQ ID NO: 3780729 - RNA, 14 nt, Human
uguuggcagccucu

SEQ ID NO: 3780730 - RNA, 21 nt, Human
uguuggcagugagugagccug

SEQ ID NO: 3780731 - RNA, 15 nt, Human
uguuggccaaagcca

SEQ ID NO: 3780732 - RNA, 13 nt, Human
uguuggccaggcu

SEQ ID NO: 3780733 - RNA, 23 nt, Human
uguuggccaggcuggucuaaaac

SEQ ID NO: 3780734 - RNA, 16 nt, Human
uguuggccuccggccu

SEQ ID NO: 3780735 - RNA, 15 nt, Human
uguuggcgagaggag

SEQ ID NO: 3780736 - RNA, 20 nt, Human
uguuggcgagaggaggggcc

SEQ ID NO: 3780737 - RNA, 22 nt, Human
uguuggcguaggcuacagagaa

SEQ ID NO: 3780738 - RNA, 17 nt, Human
uguuggcugggggccuc

SEQ ID NO: 3780739 - RNA, 19 nt, Human
uguuggcugggggccucag

SEQ ID NO: 3780740 - RNA, 13 nt, Human
uguugggaaaaag

SEQ ID NO: 3780741 - RNA, 14 nt, Human
uguugggacugcua

SEQ ID NO: 3780742 - RNA, 19 nt, Human
uguugggacugcuaaauaa

SEQ ID NO: 3780743 - RNA, 14 nt, Human
uguuggggcugcuc

SEQ ID NO: 3780744 - RNA, 21 nt, Human
uguugguaauuauuuugguac

SEQ ID NO: 3780745 - RNA, 18 nt, Human
uguugguauuuaucuauu

SEQ ID NO: 3780746 - RNA, 14 nt, Human
uguuggugcacagc

SEQ ID NO: 3780747 - RNA, 18 nt, Human
uguuggugcacagcacaa

SEQ ID NO: 3780748 - RNA, 16 nt, Human
uguugguuguuuuuuc

SEQ ID NO: 3780749 - RNA, 14 nt, Human
uguugguuuaauau

SEQ ID NO: 3780750 - RNA, 14 nt, Human
uguugguuuacuuu

SEQ ID NO: 3780751 - RNA, 19 nt, Human
uguugguuuacuuucaaau

SEQ ID NO: 3780752 - RNA, 20 nt, Human
uguugguuuacuuucaaauc

SEQ ID NO: 3780753 - RNA, 13 nt, Human
uguuguaaaacaa

SEQ ID NO: 3780754 - RNA, 23 nt, Human
uguuguaaaacaaaauuugacua

SEQ ID NO: 3780755 - RNA, 13 nt, Human
uguuguaaagcaa

SEQ ID NO: 3780756 - RNA, 14 nt, Human
uguuguaaauauuu

SEQ ID NO: 3780757 - RNA, 13 nt, Human
uguuguaaauuag

SEQ ID NO: 3780758 - RNA, 18 nt, Human
uguuguaagaauucugau

SEQ ID NO: 3780759 - RNA, 17 nt, Human
uguuguaagcaacaggc

SEQ ID NO: 3780760 - RNA, 22 nt, Human
uguuguaaugcugcacuuccug

SEQ ID NO: 3780761 - RNA, 18 nt, Human
uguuguaauucuucaguu

SEQ ID NO: 3780762 - RNA, 21 nt, Human
uguuguacauacgauuuaagg

SEQ ID NO: 3780763 - RNA, 22 nt, Human
uguuguacauuuaugauuuaau

SEQ ID NO: 3780764 - RNA, 15 nt, Human
uguuguacuuaaaug

SEQ ID NO: 3780765 - RNA, 16 nt, Human
uguuguacuuaaaugg

SEQ ID NO: 3780766 - RNA, 17 nt, Human
uguuguagagaaaacau

SEQ ID NO: 3780767 - RNA, 22 nt, Human
uguuguagauacaaucagcugc

SEQ ID NO: 3780768 - RNA, 21 nt, Human
uguuguagauugauuguauug

SEQ ID NO: 3780769 - RNA, 13 nt, Human
uguuguauuaaca

SEQ ID NO: 3780770 - RNA, 11 nt, Human
uguugucaaga

SEQ ID NO: 3780771 - RNA, 16 nt, Human
uguugucaagaauagc

SEQ ID NO: 3780772 - RNA, 13 nt, Human
uguugucaccaga

SEQ ID NO: 3780773 - RNA, 15 nt, Human
uguugucagcaucuu

SEQ ID NO: 3780774 - RNA, 14 nt, Human
uguugucagcugaa

SEQ ID NO: 3780775 - RNA, 14 nt, Human
uguugucauugcug

SEQ ID NO: 3780776 - RNA, 15 nt, Human
uguugucauugcugu

SEQ ID NO: 3780777 - RNA, 14 nt, Human
uguuguccuuuuca

SEQ ID NO: 3780778 - RNA, 20 nt, Human
uguugucguaaagauuuggg

SEQ ID NO: 3780779 - RNA, 17 nt, Human
uguugucuguuuguucu

SEQ ID NO: 3780780 - RNA, 16 nt, Human
uguugucuugaaagau

SEQ ID NO: 3780781 - RNA, 12 nt, Human
uguugugccaca

SEQ ID NO: 3780782 - RNA, 22 nt, Human
uguuguggguucuauguuuacu

SEQ ID NO: 3780783 - RNA, 15 nt, Human
uguugugugugggag

SEQ ID NO: 3780784 - RNA, 14 nt, Human
uguuguuaaaauua

SEQ ID NO: 3780785 - RNA, 14 nt, Human
uguuguuaaauauc

SEQ ID NO: 3780786 - RNA, 17 nt, Human
uguuguuaaugaaaaug

SEQ ID NO: 3780787 - RNA, 20 nt, Human
uguuguuaaugaaaauguca

SEQ ID NO: 3780788 - RNA, 12 nt, Human
uguuguuagaga

SEQ ID NO: 3780789 - RNA, 19 nt, Human
uguuguuaugaugugcuua

SEQ ID NO: 3780790 - RNA, 11 nt, Human
uguuguuauuu

SEQ ID NO: 3780791 - RNA, 17 nt, Human
uguauguguaauaaaua

SEQ ID NO: 3780792 - RNA, 12 nt, Human
uguauguguauu

SEQ ID NO: 3780793 - RNA, 14 nt, Human
uguauguguguaug

SEQ ID NO: 3780794 - RNA, 19 nt, Human
uguauguguguuucugucc

SEQ ID NO: 3780795 - RNA, 20 nt, Human
uguauguguguuucuguccu

SEQ ID NO: 3780796 - RNA, 11 nt, Human
uguauguguuu

SEQ ID NO: 3780797 - RNA, 19 nt, Human
uguauguguuuagaauuga

SEQ ID NO: 3780798 - RNA, 22 nt, Human
uguauguuaaagagaaugaguc

SEQ ID NO: 3780799 - RNA, 15 nt, Human
uguauguuauagaua

SEQ ID NO: 3780800 - RNA, 14 nt, Human
uguauguugugaag

SEQ ID NO: 3780801 - RNA, 13 nt, Human
uguauguuuacau

SEQ ID NO: 3780802 - RNA, 15 nt, Human
uguauguuuacauau

SEQ ID NO: 3780803 - RNA, 18 nt, Human
uguauguuuuucaguuca

SEQ ID NO: 3780804 - RNA, 22 nt, Human
uguauguuuuucaguucaaagu

SEQ ID NO: 3780805 - RNA, 14 nt, Human
uguauuaaauuaca

SEQ ID NO: 3780806 - RNA, 14 nt, Human
uguauuaacaaaag

SEQ ID NO: 3780807 - RNA, 22 nt, Human
uguauuaacacuacucaaagca

SEQ ID NO: 3780808 - RNA, 18 nt, Human
uguauuaagagugaaaau

SEQ ID NO: 3780809 - RNA, 19 nt, Human
uguauuaagggauuuagua

SEQ ID NO: 3780810 - RNA, 22 nt, Human
uguauuaauaaauagagcaauu

SEQ ID NO: 3780811 - RNA, 13 nt, Human
uguauuacaaauc

SEQ ID NO: 3780812 - RNA, 15 nt, Human
uguauuacauaaaua

SEQ ID NO: 3780813 - RNA, 16 nt, Human
uguauuagauguucuc

SEQ ID NO: 3780814 - RNA, 15 nt, Human
uguauuagucacaga

SEQ ID NO: 3780815 - RNA, 19 nt, Human
uguauuauacuuagucaaa

SEQ ID NO: 3780816 - RNA, 15 nt, Human
uguauuauguccugu

SEQ ID NO: 3780817 - RNA, 21 nt, Human
uguauuauuuacauuuaauag

SEQ ID NO: 3780818 - RNA, 13 nt, Human
uguauuauuucau

SEQ ID NO: 3780819 - RNA, 21 nt, Human
uguauuauuucauuauguaaa

SEQ ID NO: 3780820 - RNA, 14 nt, Human
uguauucaauuaaa

SEQ ID NO: 3780821 - RNA, 23 nt, Human
uguauucacgugcagcagcaaca

SEQ ID NO: 3780822 - RNA, 18 nt, Human
uguauucagacagaugag

SEQ ID NO: 3780823 - RNA, 17 nt, Human
uguauucaucuuuugua

SEQ ID NO: 3780824 - RNA, 19 nt, Human
uguauuccaguuuguuuau

SEQ ID NO: 3780825 - RNA, 20 nt, Human
uguauucucugagcugugca

SEQ ID NO: 3780826 - RNA, 17 nt, Human
uguauucuuugauguua

SEQ ID NO: 3780827 - RNA, 18 nt, Human
uguauucuuuucucagug

SEQ ID NO: 3780828 - RNA, 20 nt, Human
uguauugaaucauguaguau

SEQ ID NO: 3780829 - RNA, 15 nt, Human
uguauugagauuucu

SEQ ID NO: 3780830 - RNA, 23 nt, Human
uguauugaugacaguaguaccaa

SEQ ID NO: 3780831 - RNA, 14 nt, Human
uguauugcuguccu

SEQ ID NO: 3780832 - RNA, 19 nt, Human
uguauuggauauauaagag

SEQ ID NO: 3780833 - RNA, 14 nt, Human
uguauuggccugga

SEQ ID NO: 3780834 - RNA, 16 nt, Human
uguauugguuaaaacu

SEQ ID NO: 3780835 - RNA, 18 nt, Human
uguauugguuaaaacugu

SEQ ID NO: 3780836 - RNA, 19 nt, Human
uguauuguaaacauguguu

SEQ ID NO: 3780837 - RNA, 17 nt, Human
uguauuguaacuauguu

SEQ ID NO: 3780838 - RNA, 11 nt, Human
uguauuguacc

SEQ ID NO: 3780839 - RNA, 19 nt, Human
uguauuguaccuuuuaaca

SEQ ID NO: 3780840 - RNA, 15 nt, Human
ugucacuuugcucug

SEQ ID NO: 3780841 - RNA, 18 nt, Human
ugucacuuugcucugggu

SEQ ID NO: 3780842 - RNA, 21 nt, Human
ugucacuuuuugaggcaaaag

SEQ ID NO: 3780843 - RNA, 22 nt, Human
ugucagaaaaacaauaagagcg

SEQ ID NO: 3780844 - RNA, 12 nt, Human
ugucagacacag

SEQ ID NO: 3780845 - RNA, 14 nt, Human
ugucagacacagau

SEQ ID NO: 3780846 - RNA, 21 nt, Human
ugucagacagaacuugaaugu

SEQ ID NO: 3780847 - RNA, 20 nt, Human
ugucagaccuauuugacaua

SEQ ID NO: 3780848 - RNA, 14 nt, Human
ugucagacuuuaaa

SEQ ID NO: 3780849 - RNA, 15 nt, Human
ugucagauacaaugu

SEQ ID NO: 3780850 - RNA, 15 nt, Human
ugucagauaugauau

SEQ ID NO: 3780851 - RNA, 21 nt, Human
ugucagauauuuuuucagaaa

SEQ ID NO: 3780852 - RNA, 18 nt, Human
ugucagauccaggagcuc

SEQ ID NO: 3780853 - RNA, 21 nt, Human
ugucagauccaggagcuccag

SEQ ID NO: 3780854 - RNA, 18 nt, Human
ugucagaugagaacaaag

SEQ ID NO: 3780855 - RNA, 21 nt, Human
ugucagaugcccgagggaggg

SEQ ID NO: 3780856 - RNA, 14 nt, Human
ugucagauuccuuu

SEQ ID NO: 3780857 - RNA, 17 nt, Human
ugucagauuccuuuccc

SEQ ID NO: 3780858 - RNA, 13 nt, Human
ugucagcaggaag

SEQ ID NO: 3780859 - RNA, 16 nt, Human
ugucagcagggacugu

SEQ ID NO: 3780860 - RNA, 20 nt, Human
ugucagcaguugcugguaaa

SEQ ID NO: 3780861 - RNA, 16 nt, Human
ugucagccauuccugu

SEQ ID NO: 3780862 - RNA, 19 nt, Human
ugucagcuacuaaugaugu

SEQ ID NO: 3780863 - RNA, 21 nt, Human
ugucagcuacuaaugauguuu

SEQ ID NO: 3780864 - RNA, 20 nt, Human
ugucagcuccccucggagaa

SEQ ID NO: 3780865 - RNA, 19 nt, Human
ugucagcugaggcuggggg

SEQ ID NO: 3780866 - RNA, 24 nt, Human
ugucagcugaggcugggggagagc

SEQ ID NO: 3780867 - RNA, 17 nt, Human
ugucaggaacagaagga

SEQ ID NO: 3780868 - RNA, 18 nt, Human
ugucaggaacagaaggau

SEQ ID NO: 3780869 - RNA, 16 nt, Human
ugucaggagagcagcg

SEQ ID NO: 3780870 - RNA, 11 nt, Human
ugucaggaggc

SEQ ID NO: 3780871 - RNA, 14 nt, Human
ugucaggcacuggg

SEQ ID NO: 3780872 - RNA, 14 nt, Human
ugucaggccugugu

SEQ ID NO: 3780873 - RNA, 15 nt, Human
ugucaggcugcuggc

SEQ ID NO: 3780874 - RNA, 24 nt, Human
ugucaggcugcuggcgccucugca

SEQ ID NO: 3780875 - RNA, 23 nt, Human
ugucagggaguguucccuaucca

SEQ ID NO: 3780876 - RNA, 20 nt, Human
ugucagguggggcagcuuga

SEQ ID NO: 3780877 - RNA, 15 nt, Human
ugucaguauccaggc

SEQ ID NO: 3780878 - RNA, 18 nt, Human
ugucaguauguggaagug

SEQ ID NO: 3780879 - RNA, 20 nt, Human
ugucaguauguggaagugug

SEQ ID NO: 3780880 - RNA, 15 nt, Human
ugucaguauuucaac

SEQ ID NO: 3780881 - RNA, 18 nt, Human
ugucaguauuucagugua

SEQ ID NO: 3780882 - RNA, 14 nt, Human
ugucagucacagcc

SEQ ID NO: 3780883 - RNA, 18 nt, Human
ugucagucacagccaccc

SEQ ID NO: 3780884 - RNA, 13 nt, Human
ugucagucugcuu

SEQ ID NO: 3780885 - RNA, 15 nt, Human
ugucaguggaagaag

SEQ ID NO: 3780886 - RNA, 12 nt, Human
ugucagugugac

SEQ ID NO: 3780887 - RNA, 14 nt, Human
ugucagugugacug

SEQ ID NO: 3780888 - RNA, 22 nt, Human
ugucaguuuauguuuuggucca

SEQ ID NO: 3780889 - RNA, 21 nt, Human
ugucauaacauccagagcuuu

SEQ ID NO: 3780890 - RNA, 15 nt, Human
ugucauaagaaugaa

SEQ ID NO: 3780891 - RNA, 14 nt, Human
ugucauacagagaa

SEQ ID NO: 3780892 - RNA, 16 nt, Human
ugucauauacugccau

SEQ ID NO: 3780893 - RNA, 22 nt, Human
ugucauauauggggggccaaca

SEQ ID NO: 3780894 - RNA, 19 nt, Human
ugucauauauuacuagcau

SEQ ID NO: 3780895 - RNA, 13 nt, Human
ugucauaucagca

SEQ ID NO: 3780896 - RNA, 17 nt, Human
ugucauaucagcacaua

SEQ ID NO: 3780897 - RNA, 23 nt, Human
ugucauaucagcacauauuuucu

SEQ ID NO: 3780898 - RNA, 14 nt, Human
ugucaucaauuaaa

SEQ ID NO: 3780899 - RNA, 15 nt, Human
ugucaucaauuaaag

SEQ ID NO: 3780900 - RNA, 19 nt, Human
ugucaucagaagauaacuu

SEQ ID NO: 3780901 - RNA, 18 nt, Human
ugucaucagccaccaucc

SEQ ID NO: 3780902 - RNA, 19 nt, Human
ugucaucauuguauauaug

SEQ ID NO: 3780903 - RNA, 23 nt, Human
ugucauccucaaagaaaguguau

SEQ ID NO: 3780904 - RNA, 23 nt, Human
ugucauccuuggucuuuguaucu

SEQ ID NO: 3780905 - RNA, 13 nt, Human
ugucaucugagaa

SEQ ID NO: 3780906 - RNA, 16 nt, Human
ugucaugaacauguuc

SEQ ID NO: 3780907 - RNA, 20 nt, Human
ugucaugcagaguauuucua

SEQ ID NO: 3780908 - RNA, 15 nt, Human
ugucaugccccccuc

SEQ ID NO: 3780909 - RNA, 16 nt, Human
ugucaugccccccuca

SEQ ID NO: 3780910 - RNA, 14 nt, Human
ugucaugcugccuu

SEQ ID NO: 3780911 - RNA, 15 nt, Human
ugucaugcugccuua

SEQ ID NO: 3780912 - RNA, 11 nt, Human
ugucaugugua

SEQ ID NO: 3780913 - RNA, 13 nt, Human
ugucauguguaua

SEQ ID NO: 3780914 - RNA, 16 nt, Human
ugucauguguucccuu

SEQ ID NO: 3780915 - RNA, 18 nt, Human
ugucauguguucccuuug

SEQ ID NO: 3780916 - RNA, 22 nt, Human
ugucauguguucccuuugucuu

SEQ ID NO: 3780917 - RNA, 13 nt, Human
ugucauuaaaggu

SEQ ID NO: 3780918 - RNA, 18 nt, Human
ugucauuaaauaaaaauu

SEQ ID NO: 3780919 - RNA, 19 nt, Human
ugucauuaccagacgguuc

SEQ ID NO: 3780920 - RNA, 22 nt, Human
ugucauuagugagacauauuua

SEQ ID NO: 3780921 - RNA, 16 nt, Human
ugucauucaaaugggu

SEQ ID NO: 3780922 - RNA, 21 nt, Human
ugucauucaaaugggugauau

SEQ ID NO: 3780923 - RNA, 15 nt, Human
ugucauucagaaaaa

SEQ ID NO: 3780924 - RNA, 23 nt, Human
ugucauucgcuacuaugauuuaa

SEQ ID NO: 3780925 - RNA, 12 nt, Human
ugucauuguuau

SEQ ID NO: 3780926 - RNA, 17 nt, Human
ugucauuuaugugucag

SEQ ID NO: 3780927 - RNA, 16 nt, Human
ugucauuucauuuccu

SEQ ID NO: 3780928 - RNA, 17 nt, Human
ugucauuucauuuccua

SEQ ID NO: 3780929 - RNA, 23 nt, Human
ugucauuugcuggagcucugccc

SEQ ID NO: 3780930 - RNA, 12 nt, Human
ugucauuugcuu

SEQ ID NO: 3780931 - RNA, 13 nt, Human
ugucauuuguuaa

SEQ ID NO: 3780932 - RNA, 20 nt, Human
ugucauuuucauuagcaaaa

SEQ ID NO: 3780933 - RNA, 14 nt, Human
ugucauuuucucca

SEQ ID NO: 3780934 - RNA, 15 nt, Human
ugucauuuuugcagu

SEQ ID NO: 3780935 - RNA, 15 nt, Human
ugucauuuuuuuucu

SEQ ID NO: 3780936 - RNA, 17 nt, Human
uguccaaacguccucuu

SEQ ID NO: 3780937 - RNA, 17 nt, Human
uguccaaacugccuaag

SEQ ID NO: 3780938 - RNA, 19 nt, Human
uguccaaagaggcugcccc

SEQ ID NO: 3780939 - RNA, 20 nt, Human
uguccaaagaggcugccccu

SEQ ID NO: 3780940 - RNA, 17 nt, Human
uguccaaagcagggucu

SEQ ID NO: 3780941 - RNA, 19 nt, Human
uguccaaaggaggcuggca

SEQ ID NO: 3780942 - RNA, 21 nt, Human
uguccaaccuaaccccuuucc

SEQ ID NO: 3780943 - RNA, 14 nt, Human
uguccaacuaaaaa

SEQ ID NO: 3780944 - RNA, 14 nt, Human
uguccaacuggccc

SEQ ID NO: 3780945 - RNA, 19 nt, Human
uguccaacuggcccuauuu

SEQ ID NO: 3780946 - RNA, 20 nt, Human
ugugaagaugcauuguaguu

SEQ ID NO: 3780947 - RNA, 17 nt, Human
ugugaagauguuugcaa

SEQ ID NO: 3780948 - RNA, 15 nt, Human
ugugaagcauuuaca

SEQ ID NO: 3780949 - RNA, 14 nt, Human
ugugaagcccuguu

SEQ ID NO: 3780950 - RNA, 12 nt, Human
ugugaagcugga

SEQ ID NO: 3780951 - RNA, 21 nt, Human
ugugaagcuggaacugcggga

SEQ ID NO: 3780952 - RNA, 22 nt, Human
ugugaagcuuaagggucauaug

SEQ ID NO: 3780953 - RNA, 18 nt, Human
ugugaaggaccuucacuc

SEQ ID NO: 3780954 - RNA, 23 nt, Human
ugugaaggcagagaaagggacaa

SEQ ID NO: 3780955 - RNA, 14 nt, Human
ugugaagggaagga

SEQ ID NO: 3780956 - RNA, 17 nt, Human
ugugaaggugauuuaag

SEQ ID NO: 3780957 - RNA, 18 nt, Human
ugugaaguguuaauacua

SEQ ID NO: 3780958 - RNA, 14 nt, Human
ugugaaguuuacau

SEQ ID NO: 3780959 - RNA, 20 nt, Human
ugugaaguuuacauuguaaa

SEQ ID NO: 3780960 - RNA, 16 nt, Human
ugugaauaauuacagu

SEQ ID NO: 3780961 - RNA, 16 nt, Human
ugugaauaccccaaga

SEQ ID NO: 3780962 - RNA, 18 nt, Human
ugugaauauaaaugugug

SEQ ID NO: 3780963 - RNA, 20 nt, Human
ugugaauauggacucaguuu

SEQ ID NO: 3780964 - RNA, 16 nt, Human
ugugaaucaaggguca

SEQ ID NO: 3780965 - RNA, 22 nt, Human
ugugaaucaagggucaggccuu

SEQ ID NO: 3780966 - RNA, 14 nt, Human
ugugaaucagaccc

SEQ ID NO: 3780967 - RNA, 15 nt, Human
ugugaaucagacccu

SEQ ID NO: 3780968 - RNA, 20 nt, Human
ugugaaugcagguuuuauca

SEQ ID NO: 3780969 - RNA, 15 nt, Human
ugugaaugcuucuca

SEQ ID NO: 3780970 - RNA, 16 nt, Human
ugugaaugggaaaaga

SEQ ID NO: 3780971 - RNA, 13 nt, Human
ugugaauuacuaa

SEQ ID NO: 3780972 - RNA, 15 nt, Human
ugugaauuacuaacu

SEQ ID NO: 3780973 - RNA, 22 nt, Human
ugugaauuaggcuguaacuacu

SEQ ID NO: 3780974 - RNA, 19 nt, Human
ugugaauuauugacacuga

SEQ ID NO: 3780975 - RNA, 13 nt, Human
ugugaauucagau

SEQ ID NO: 3780976 - RNA, 14 nt, Human
ugugaauucagauu

SEQ ID NO: 3780977 - RNA, 19 nt, Human
ugugaauugaaauguucgu

SEQ ID NO: 3780978 - RNA, 16 nt, Human
ugugaauugauaauaa

SEQ ID NO: 3780979 - RNA, 17 nt, Human
ugugaauugauaauaaa

SEQ ID NO: 3780980 - RNA, 18 nt, Human
ugugaauugccugcagag

SEQ ID NO: 3780981 - RNA, 22 nt, Human
ugugaauuuuuaagcugcaaau

SEQ ID NO: 3780982 - RNA, 15 nt, Human
ugugacaaaaaauua

SEQ ID NO: 3780983 - RNA, 21 nt, Human
ugugacaaaaaauuaaagcau

SEQ ID NO: 3780984 - RNA, 21 nt, Human
ugugacaauucuguuuuuaau

SEQ ID NO: 3780985 - RNA, 19 nt, Human
ugugacaauuuuguacaaa

SEQ ID NO: 3780986 - RNA, 15 nt, Human
ugugacacacuacac

SEQ ID NO: 3780987 - RNA, 17 nt, Human
ugugacaggcagcagag

SEQ ID NO: 3780988 - RNA, 12 nt, Human
ugugacagggcc

SEQ ID NO: 3780989 - RNA, 13 nt, Human
ugugacagggcca

SEQ ID NO: 3780990 - RNA, 14 nt, Human
ugugacagggccag

SEQ ID NO: 3780991 - RNA, 21 nt, Human
ugugacauacccccuccccca

SEQ ID NO: 3780992 - RNA, 21 nt, Human
ugugacaucucuauuccccac

SEQ ID NO: 3780993 - RNA, 21 nt, Human
ugugacaugcgggcugggcag

SEQ ID NO: 3780994 - RNA, 20 nt, Human
ugugacauggugccugagag

SEQ ID NO: 3780995 - RNA, 15 nt, Human
ugugacauguuuuau

SEQ ID NO: 3780996 - RNA, 10 nt, Human
ugugacauuu

SEQ ID NO: 3780997 - RNA, 17 nt, Human
ugugacauuuauauauu

SEQ ID NO: 3780998 - RNA, 22 nt, Human
ugugacauuuggagagggggcc

SEQ ID NO: 3780999 - RNA, 18 nt, Human
ugugacauuugucauuuu

SEQ ID NO: 3781000 - RNA, 22 nt, Human
ugugacauuugucauuuucauu

SEQ ID NO: 3781001 - RNA, 18 nt, Human
ugugaccaaaaguuacau

SEQ ID NO: 3781002 - RNA, 13 nt, Human
ugugaccaacugu

SEQ ID NO: 3781003 - RNA, 17 nt, Human
ugugaccaacuguguug

SEQ ID NO: 3781004 - RNA, 19 nt, Human
ugugaccaacuguguugua

SEQ ID NO: 3781005 - RNA, 21 nt, Human
ugugaccaacuguguuguauu

SEQ ID NO: 3781006 - RNA, 22 nt, Human
ugugaccacugcagaagacagu

SEQ ID NO: 3781007 - RNA, 21 nt, Human
ugugacccacuucucaucaca

SEQ ID NO: 3781008 - RNA, 17 nt, Human
ugugacccagcacugcc

SEQ ID NO: 3781009 - RNA, 20 nt, Human
ugugacccagcacugcccaa

SEQ ID NO: 3781010 - RNA, 17 nt, Human
ugugacccccagcuccg

SEQ ID NO: 3781011 - RNA, 20 nt, Human
ugugacccccagcuccggcc

SEQ ID NO: 3781012 - RNA, 16 nt, Human
ugugaccccuccuggg

SEQ ID NO: 3781013 - RNA, 17 nt, Human
ugugaccccuccugggg

SEQ ID NO: 3781014 - RNA, 21 nt, Human
ugugaccccuccuggggccag

SEQ ID NO: 3781015 - RNA, 23 nt, Human
ugugaccccuccuggggccaggc

SEQ ID NO: 3781016 - RNA, 15 nt, Human
ugugaccugaaguuc

SEQ ID NO: 3781017 - RNA, 22 nt, Human
ugugaccugcugagcucugaga

SEQ ID NO: 3781018 - RNA, 17 nt, Human
ugugaccuuaggcccgg

SEQ ID NO: 3781019 - RNA, 16 nt, Human
ugugacgcgcaagucu

SEQ ID NO: 3781020 - RNA, 18 nt, Human
ugugacuaauuguauaac

SEQ ID NO: 3781021 - RNA, 19 nt, Human
ugugacuagugcugaagcu

SEQ ID NO: 3781022 - RNA, 20 nt, Human
ugugacuauauagagauguu

SEQ ID NO: 3781023 - RNA, 16 nt, Human
ugugacucuaaauucu

SEQ ID NO: 3781024 - RNA, 16 nt, Human
ugugacugaucucucg

SEQ ID NO: 3781025 - RNA, 20 nt, Human
ugugacuggcuaaagcucga

SEQ ID NO: 3781026 - RNA, 20 nt, Human
ugugacuguacccaaaugga

SEQ ID NO: 3781027 - RNA, 15 nt, Human
ugugacuucuccagg

SEQ ID NO: 3781028 - RNA, 14 nt, Human
ugugacuuugaaaa

SEQ ID NO: 3781029 - RNA, 20 nt, Human
ugugacuuugaaaauauaua

SEQ ID NO: 3781030 - RNA, 15 nt, Human
ugugacuuugacgcu

SEQ ID NO: 3781031 - RNA, 14 nt, Human
ugugacuuuugcuu

SEQ ID NO: 3781032 - RNA, 16 nt, Human
ugugacuuuugcuuua

SEQ ID NO: 3781033 - RNA, 17 nt, Human
ugugacuuuugcuuuaa

SEQ ID NO: 3781034 - RNA, 16 nt, Human
ugugacuuuugugaaa

SEQ ID NO: 3781035 - RNA, 20 nt, Human
ugugagaaaaccccuuccca

SEQ ID NO: 3781036 - RNA, 19 nt, Human
ugugagaagguuuauuguu

SEQ ID NO: 3781037 - RNA, 14 nt, Human
ugugagaaucaaaa

SEQ ID NO: 3781038 - RNA, 18 nt, Human
ugugagauguguaucagu

SEQ ID NO: 3781039 - RNA, 20 nt, Human
ugugagauuuuuuauugcua

SEQ ID NO: 3781040 - RNA, 14 nt, Human
ugugagcaagaagu

SEQ ID NO: 3781041 - RNA, 14 nt, Human
ugugagcagugagu

SEQ ID NO: 3781042 - RNA, 14 nt, Human
ugugagcccagcug

SEQ ID NO: 3781043 - RNA, 18 nt, Human
ugugagcccagcuggguc

SEQ ID NO: 3781044 - RNA, 13 nt, Human
ugugaggagcugc

SEQ ID NO: 3781045 - RNA, 17 nt, Human
ugugaggagcugcuggc

SEQ ID NO: 3781046 - RNA, 12 nt, Human
ugugaggcaggg

SEQ ID NO: 3781047 - RNA, 13 nt, Human
ugugaggcagggg

SEQ ID NO: 3781048 - RNA, 18 nt, Human
ugugaggcaggggcggag

SEQ ID NO: 3781049 - RNA, 14 nt, Human
ugugaggccagggc

SEQ ID NO: 3781050 - RNA, 15 nt, Human
ugugagggaaagagc

SEQ ID NO: 3781051 - RNA, 14 nt, Human
ugugagggagggga

SEQ ID NO: 3781052 - RNA, 22 nt, Human
ugugagggaggggaaaagcauu

SEQ ID NO: 3781053 - RNA, 12 nt, Human
ugugagggcagu

SEQ ID NO: 3781054 - RNA, 17 nt, Human
ugugaggguccugcagc

SEQ ID NO: 3781055 - RNA, 19 nt, Human
ugugaguaaaucagauguu

SEQ ID NO: 3781056 - RNA, 16 nt, Human
ugugaguaucagaauu

SEQ ID NO: 3781057 - RNA, 17 nt, Human
ugugaguaucagaauug

SEQ ID NO: 3781058 - RNA, 18 nt, Human
ugugaguaucagaauuga

SEQ ID NO: 3781059 - RNA, 23 nt, Human
ugugaguauucucauucuuccca

SEQ ID NO: 3781060 - RNA, 16 nt, Human
ugugagucaauacaua

SEQ ID NO: 3781061 - RNA, 19 nt, Human
ugugagucaccaagcccag

SEQ ID NO: 3781062 - RNA, 21 nt, Human
ugugagugccuuuugcagaag

SEQ ID NO: 3781063 - RNA, 11 nt, Human
ugugaguguga

SEQ ID NO: 3781064 - RNA, 13 nt, Human
ugugagugugaau

SEQ ID NO: 3781065 - RNA, 14 nt, Human
ugugagugugacag

SEQ ID NO: 3781066 - RNA, 15 nt, Human
ugugagugugacagg

SEQ ID NO: 3781067 - RNA, 23 nt, Human
ugugaguguguccaagugugugu

SEQ ID NO: 3781068 - RNA, 14 nt, Human
ugugagugugugca

SEQ ID NO: 3781069 - RNA, 16 nt, Human
ugugaguuuaaagcaa

SEQ ID NO: 3781070 - RNA, 19 nt, Human
ugugaguuuaccuuguaua

SEQ ID NO: 3781071 - RNA, 22 nt, Human
ugugaguuuaccuuguauacug

SEQ ID NO: 3781072 - RNA, 19 nt, Human
ugugaguuuggucuggacu

SEQ ID NO: 3781073 - RNA, 20 nt, Human
ugugaguuuggucuggacug

SEQ ID NO: 3781074 - RNA, 17 nt, Human
ugugaguuuguuucuuu

SEQ ID NO: 3781075 - RNA, 19 nt, Human
ugugaguuuguuucuuuga

SEQ ID NO: 3781076 - RNA, 21 nt, Human
ugugauacauuuuuuaagcuu

SEQ ID NO: 3781077 - RNA, 13 nt, Human
ugugauauauaag

SEQ ID NO: 3781078 - RNA, 14 nt, Human
ugugauauauaagu

SEQ ID NO: 3781079 - RNA, 15 nt, Human
ugugauauggagccc

SEQ ID NO: 3781080 - RNA, 14 nt, Human
ugugauauuaacag

SEQ ID NO: 3781081 - RNA, 15 nt, Human
ugugauauuccccuu

SEQ ID NO: 3781082 - RNA, 19 nt, Human
ugugauauucuaagacuua

SEQ ID NO: 3781083 - RNA, 23 nt, Human
ugugaucagcuuucaaagcauuu

SEQ ID NO: 3781084 - RNA, 17 nt, Human
ugugauccuuuuauguu

SEQ ID NO: 3781085 - RNA, 13 nt, Human
ugugaucugggaa

SEQ ID NO: 3781086 - RNA, 15 nt, Human
ugugaucugucuugu

SEQ ID NO: 3781087 - RNA, 18 nt, Human
ugugaucugucuuguaau

SEQ ID NO: 3781088 - RNA, 14 nt, Human
ugugaugagcugau

SEQ ID NO: 3781089 - RNA, 16 nt, Human
ugugaugaggcagagg

SEQ ID NO: 3781090 - RNA, 14 nt, Human
ugugaugaggggag

SEQ ID NO: 3781091 - RNA, 23 nt, Human
uuaauauaacugccuuaaaacuu

SEQ ID NO: 3781092 - RNA, 20 nt, Human
uuaauauauauuaucuuuuc

SEQ ID NO: 3781093 - RNA, 13 nt, Human
uuaauauauuucc

SEQ ID NO: 3781094 - RNA, 17 nt, Human
uuaauaucacucauuaa

SEQ ID NO: 3781095 - RNA, 18 nt, Human
uuaauaucaucaguauug

SEQ ID NO: 3781096 - RNA, 20 nt, Human
uuaauaucccuacauguauu

SEQ ID NO: 3781097 - RNA, 23 nt, Human
uuaauaugaaauuuuuuuucaug

SEQ ID NO: 3781098 - RNA, 18 nt, Human
uuaauaugcugcaacaaa

SEQ ID NO: 3781099 - RNA, 12 nt, Human
uuaauauggauu

SEQ ID NO: 3781100 - RNA, 22 nt, Human
uuaauauggggaugcagcauua

SEQ ID NO: 3781101 - RNA, 22 nt, Human
uuaauauguauuuuauguaugu

SEQ ID NO: 3781102 - RNA, 16 nt, Human
uuaauauuaaagccau

SEQ ID NO: 3781103 - RNA, 21 nt, Human
uuaauauuaaagccauguuua

SEQ ID NO: 3781104 - RNA, 22 nt, Human
uuaauauuaaagccauguuuau

SEQ ID NO: 3781105 - RNA, 21 nt, Human
uuaauauuaccuaaugaaagu

SEQ ID NO: 3781106 - RNA, 15 nt, Human
uuaauauucuauuaa

SEQ ID NO: 3781107 - RNA, 18 nt, Human
uuaauauugauaugcuua

SEQ ID NO: 3781108 - RNA, 16 nt, Human
uuaauauugauuuauu

SEQ ID NO: 3781109 - RNA, 14 nt, Human
uuaauauuucuuca

SEQ ID NO: 3781110 - RNA, 16 nt, Human
uuaauauuuguuuagu

SEQ ID NO: 3781111 - RNA, 20 nt, Human
uuacuccccuugagcugaga

SEQ ID NO: 3781112 - RNA, 15 nt, Human
uuacuccucacacuu

SEQ ID NO: 3781113 - RNA, 21 nt, Human
uuacuccucacacuuacugua

SEQ ID NO: 3781114 - RNA, 14 nt, Human
uuacucuaagaucu

SEQ ID NO: 3781115 - RNA, 21 nt, Human
uuacucuaagaucuuagauuc

SEQ ID NO: 3781116 - RNA, 22 nt, Human
uuacucuaagaucuuagauucu

SEQ ID NO: 3781117 - RNA, 18 nt, Human
uuacucuagauaccuaaa

SEQ ID NO: 3781118 - RNA, 19 nt, Human
uuacucuccaaccuggaca

SEQ ID NO: 3781119 - RNA, 18 nt, Human
uuacucugccuacagaac

SEQ ID NO: 3781120 - RNA, 23 nt, Human
uuacucuuguaagauuuugaaaa

SEQ ID NO: 3781121 - RNA, 23 nt, Human
uuacugaacaguaacauagcugu

SEQ ID NO: 3781122 - RNA, 18 nt, Human
uuacugaagguaaaauug

SEQ ID NO: 3781123 - RNA, 14 nt, Human
uuacugacauuucu

SEQ ID NO: 3781124 - RNA, 13 nt, Human
uuacugagcuucu

SEQ ID NO: 3781125 - RNA, 14 nt, Human
uuacugagcuucuc

SEQ ID NO: 3781126 - RNA, 13 nt, Human
uuacugaucaugc

SEQ ID NO: 3781127 - RNA, 15 nt, Human
uuacugaucaugcau

SEQ ID NO: 3781128 - RNA, 18 nt, Human
uuacugaucaugcauugu

SEQ ID NO: 3781129 - RNA, 19 nt, Human
uuacugaucaugcauuguu

SEQ ID NO: 3781130 - RNA, 13 nt, Human
uuacugcaaaugu

SEQ ID NO: 3781131 - RNA, 21 nt, Human
uuacugccaaagggaaauauc

SEQ ID NO: 3781132 - RNA, 19 nt, Human
uuacugccgguuugaaaau

SEQ ID NO: 3781133 - RNA, 20 nt, Human
uuacugcuuaauucaaauaa

SEQ ID NO: 3781134 - RNA, 17 nt, Human
uuacugcuuuaaucaga

SEQ ID NO: 3781135 - RNA, 22 nt, Human
uuacugcuuuuaacuucugaua

SEQ ID NO: 3781136 - RNA, 22 nt, Human
uuacuggaucucuuaagacagc

SEQ ID NO: 3781137 - RNA, 18 nt, Human
uuacuggccuuuuucauu

SEQ ID NO: 3781138 - RNA, 15 nt, Human
uuacuggcguggauu

SEQ ID NO: 3781139 - RNA, 22 nt, Human
uuacuggggcuggggaaggaag

SEQ ID NO: 3781140 - RNA, 16 nt, Human
uuacuguaaaaugcaa

SEQ ID NO: 3781141 - RNA, 15 nt, Human
uuacuguaagacauu

SEQ ID NO: 3781142 - RNA, 12 nt, Human
uuacuguacaug

SEQ ID NO: 3781143 - RNA, 23 nt, Human
uuacuguacaugaaaacacauuu

SEQ ID NO: 3781144 - RNA, 20 nt, Human
uuacugucaauaaacagcuu

SEQ ID NO: 3781145 - RNA, 19 nt, Human
uuacugucuuaauuaagua

SEQ ID NO: 3781146 - RNA, 17 nt, Human
uuacugucuuuuuucua

SEQ ID NO: 3781147 - RNA, 21 nt, Human
uuacugugcauugggauuuua

SEQ ID NO: 3781148 - RNA, 16 nt, Human
uuacuguggaggaagg

SEQ ID NO: 3781149 - RNA, 23 nt, Human
uuacuguggaggaaggauuguaa

SEQ ID NO: 3781150 - RNA, 14 nt, Human
uuacuguguaaacu

SEQ ID NO: 3781151 - RNA, 16 nt, Human
uuacuguguaaacuca

SEQ ID NO: 3781152 - RNA, 13 nt, Human
uuacuguguaauu

SEQ ID NO: 3781153 - RNA, 14 nt, Human
uuacugugucuuug

SEQ ID NO: 3781154 - RNA, 11 nt, Human
uuacuguguua

SEQ ID NO: 3781155 - RNA, 15 nt, Human
uuacuguuaaccauu

SEQ ID NO: 3781156 - RNA, 16 nt, Human
uuacuguucuugcugc

SEQ ID NO: 3781157 - RNA, 14 nt, Human
uuacuguugauaau

SEQ ID NO: 3781158 - RNA, 15 nt, Human
uuacuguuucuguca

SEQ ID NO: 3781159 - RNA, 16 nt, Human
uuacuguuucugucag

SEQ ID NO: 3781160 - RNA, 14 nt, Human
uuacuuacagcaua

SEQ ID NO: 3781161 - RNA, 14 nt, Human
uuacuuagcaaugu

SEQ ID NO: 3781162 - RNA, 23 nt, Human
uuacuuaucauccacauuguuuu

SEQ ID NO: 3781163 - RNA, 21 nt, Human
uuacuucacuauacaaacaaa

SEQ ID NO: 3781164 - RNA, 11 nt, Human
uuacuucauau

SEQ ID NO: 3781165 - RNA, 22 nt, Human
uuacuucguguccgacucuucu

SEQ ID NO: 3781166 - RNA, 15 nt, Human
uuacuucucuauaaa

SEQ ID NO: 3781167 - RNA, 11 nt, Human
uuacuucugcu

SEQ ID NO: 3781168 - RNA, 17 nt, Human
uuacuugauaagggacu

SEQ ID NO: 3781169 - RNA, 15 nt, Human
uuacuugcuucucua

SEQ ID NO: 3781170 - RNA, 18 nt, Human
uuacuuggaaauauuaaa

SEQ ID NO: 3781171 - RNA, 21 nt, Human
uuacuuggaaauauuaaaaga

SEQ ID NO: 3781172 - RNA, 16 nt, Human
uuacuuguaaauauaa

SEQ ID NO: 3781173 - RNA, 21 nt, Human
uuacuuguaaauauaaagacg

SEQ ID NO: 3781174 - RNA, 15 nt, Human
uuacuuguuuuggau

SEQ ID NO: 3781175 - RNA, 17 nt, Human
uuacuuuaaaaggagcc

SEQ ID NO: 3781176 - RNA, 13 nt, Human
uuacuuuaaacua

SEQ ID NO: 3781177 - RNA, 15 nt, Human
uuacuuuaacaugcc

SEQ ID NO: 3781178 - RNA, 13 nt, Human
uuacuuuagaaaa

SEQ ID NO: 3781179 - RNA, 18 nt, Human
uuacuuuagaagccugca

SEQ ID NO: 3781180 - RNA, 15 nt, Human
uuacuuuccauugcu

SEQ ID NO: 3781181 - RNA, 13 nt, Human
uuacuuucuuaau

SEQ ID NO: 3781182 - RNA, 21 nt, Human
uuacuuuggggcuaauuuaac

SEQ ID NO: 3781183 - RNA, 22 nt, Human
uuacuuuguaaauucugauuuc

SEQ ID NO: 3781184 - RNA, 11 nt, Human
uuacuuuguau

SEQ ID NO: 3781185 - RNA, 12 nt, Human
uuacuuuguaug

SEQ ID NO: 3781186 - RNA, 14 nt, Human
uuacuuuuaaacug

SEQ ID NO: 3781187 - RNA, 22 nt, Human
uuacuuuuauaauaaaaggaaa

SEQ ID NO: 3781188 - RNA, 23 nt, Human
uuacuuuuauaauaaaaggaaaa

SEQ ID NO: 3781189 - RNA, 16 nt, Human
uuacuuuucauauuug

SEQ ID NO: 3781190 - RNA, 18 nt, Human
uuacuuuuccucuuagaa

SEQ ID NO: 3781191 - RNA, 22 nt, Human
uuacuuuuuuuuuuuuuuggua

SEQ ID NO: 3781192 - RNA, 23 nt, Human
uuacuuuuuuuuuuuuuugguag

SEQ ID NO: 3781193 - RNA, 15 nt, Human
uuagaaaacaaaauu

SEQ ID NO: 3781194 - RNA, 20 nt, Human
uuagaaaaggugauaaaauc

SEQ ID NO: 3781195 - RNA, 13 nt, Human
uuagaaaaugugu

SEQ ID NO: 3781196 - RNA, 13 nt, Human
uuagaaacauaaa

SEQ ID NO: 3781197 - RNA, 12 nt, Human
uuagaaacugga

SEQ ID NO: 3781198 - RNA, 19 nt, Human
uuagaaacuggaaauacua

SEQ ID NO: 3781199 - RNA, 16 nt, Human
uuagaaagauaauuca

SEQ ID NO: 3781200 - RNA, 16 nt, Human
uuagaaagcauuugaa

SEQ ID NO: 3781201 - RNA, 17 nt, Human
uuagaaagcauuugaau

SEQ ID NO: 3781202 - RNA, 15 nt, Human
uuagaaauagacagu

SEQ ID NO: 3781203 - RNA, 13 nt, Human
uuagaaaucauuu

SEQ ID NO: 3781204 - RNA, 20 nt, Human
uuagaaauguaaacugccau

SEQ ID NO: 3781205 - RNA, 14 nt, Human
uuagaaauuagaaa

SEQ ID NO: 3781206 - RNA, 17 nt, Human
uuagaaauuuauuuccu

SEQ ID NO: 3781207 - RNA, 17 nt, Human
uuagaacacacacacuu

SEQ ID NO: 3781208 - RNA, 20 nt, Human
uuagaacacacacacuuacu

SEQ ID NO: 3781209 - RNA, 13 nt, Human
uuagaacacuauu

SEQ ID NO: 3781210 - RNA, 14 nt, Human
uuagaacacuauuu

SEQ ID NO: 3781211 - RNA, 21 nt, Human
uuagaacacuauuuucagaau

SEQ ID NO: 3781212 - RNA, 15 nt, Human
uuagaacagguuuuu

SEQ ID NO: 3781213 - RNA, 13 nt, Human
uuagaaccuuucu

SEQ ID NO: 3781214 - RNA, 14 nt, Human
uuagaauaaaauug

SEQ ID NO: 3781215 - RNA, 13 nt, Human
uuagaauaaauuc

SEQ ID NO: 3781216 - RNA, 19 nt, Human
uuagaauauuaucuucaua

SEQ ID NO: 3781217 - RNA, 18 nt, Human
uuagaaucaaacauuuug

SEQ ID NO: 3781218 - RNA, 23 nt, Human
uuagaaucaaacauuuugaaagu

SEQ ID NO: 3781219 - RNA, 18 nt, Human
uuagaauccaaacuugga

SEQ ID NO: 3781220 - RNA, 15 nt, Human
uuagaaucuauuuuc

SEQ ID NO: 3781221 - RNA, 21 nt, Human
uuagaaucuauuuucuaugua

SEQ ID NO: 3781222 - RNA, 13 nt, Human
uuagaaugaaaau

SEQ ID NO: 3781223 - RNA, 14 nt, Human
uuagaauucuguau

SEQ ID NO: 3781224 - RNA, 15 nt, Human
uuagaauucuguaua

SEQ ID NO: 3781225 - RNA, 17 nt, Human
uuagaauugaagguuuu

SEQ ID NO: 3781226 - RNA, 14 nt, Human
uuagacaaaucuaa

SEQ ID NO: 3781227 - RNA, 16 nt, Human
uuagacaagagauggg

SEQ ID NO: 3781228 - RNA, 12 nt, Human
uuagacagaggc

SEQ ID NO: 3781229 - RNA, 20 nt, Human
uuagacagagucucacuguu

SEQ ID NO: 3781230 - RNA, 13 nt, Human
uuagacagccaaa

SEQ ID NO: 3781231 - RNA, 23 nt, Human
uuagacagucaaggaguggcuua

SEQ ID NO: 3781232 - RNA, 14 nt, Human
uuagacagucccug

SEQ ID NO: 3781233 - RNA, 16 nt, Human
uuagacagucccugcc

SEQ ID NO: 3781234 - RNA, 18 nt, Human
uuagacagucccugccaa

SEQ ID NO: 3781235 - RNA, 13 nt, Human
uuagacauaacaa

SEQ ID NO: 3781236 - RNA, 19 nt, Human
uuagacccucaugcugcca

SEQ ID NO: 3781237 - RNA, 15 nt, Human
uuagaccgcucucuu

SEQ ID NO: 3781238 - RNA, 16 nt, Human
uuagaccgcucucuuu

SEQ ID NO: 3781239 - RNA, 22 nt, Human
uuagaccgcucucuuuucugua

SEQ ID NO: 3781240 - RNA, 11 nt, Human
uuagaccucag

SEQ ID NO: 3781241 - RNA, 13 nt, Human
uuagaccucagcc

SEQ ID NO: 3781242 - RNA, 16 nt, Human
uuagaccuguguuacu

SEQ ID NO: 3781243 - RNA, 18 nt, Human
uuagacuaaggccauuau

SEQ ID NO: 3781244 - RNA, 14 nt, Human
uuagacuacauuua

SEQ ID NO: 3781245 - RNA, 14 nt, Human
uuagacugccagcu

SEQ ID NO: 3781246 - RNA, 17 nt, Human
uuagacuggaacuugaa

SEQ ID NO: 3781247 - RNA, 18 nt, Human
uuagacugugauucagaa

SEQ ID NO: 3781248 - RNA, 18 nt, Human
uuagacuucuguuuucaa

SEQ ID NO: 3781249 - RNA, 13 nt, Human
uuagacuugaaaa

SEQ ID NO: 3781250 - RNA, 17 nt, Human
uuagacuugaaauacua

SEQ ID NO: 3781251 - RNA, 12 nt, Human
uuagagaaaaua

SEQ ID NO: 3781252 - RNA, 13 nt, Human
uuagagaacuaaa

SEQ ID NO: 3781253 - RNA, 12 nt, Human
uuagagaauaaa

SEQ ID NO: 3781254 - RNA, 24 nt, Human
uuagagacagagcgacagagcagu

SEQ ID NO: 3781255 - RNA, 20 nt, Human
uuagagacaggguccugcua

SEQ ID NO: 3781256 - RNA, 14 nt, Human
uuagagaguguuga

SEQ ID NO: 3781257 - RNA, 16 nt, Human
uuagagaguguugaaa

SEQ ID NO: 3781258 - RNA, 17 nt, Human
uuagagaguguugaaac

SEQ ID NO: 3781259 - RNA, 13 nt, Human
uuagagaugaauu

SEQ ID NO: 3781260 - RNA, 20 nt, Human
uuagagcaacuuucuggggc

SEQ ID NO: 3781261 - RNA, 18 nt, Human
uuagaggaaaaaaaugac

SEQ ID NO: 3781262 - RNA, 16 nt, Human
uuagaggaaaaauauu

SEQ ID NO: 3781263 - RNA, 17 nt, Human
uuauauuaaccagauau

SEQ ID NO: 3781264 - RNA, 19 nt, Human
uuauauuacugacauuucu

SEQ ID NO: 3781265 - RNA, 17 nt, Human
uuauauucaaccaugga

SEQ ID NO: 3781266 - RNA, 23 nt, Human
uuauauucaaccauggacuuuau

SEQ ID NO: 3781267 - RNA, 20 nt, Human
uuauauugaagacaauuuga

SEQ ID NO: 3781268 - RNA, 15 nt, Human
uuauauugagacaaa

SEQ ID NO: 3781269 - RNA, 22 nt, Human
uuauauuguaagaaauacugua

SEQ ID NO: 3781270 - RNA, 13 nt, Human
uuauauuuaucca

SEQ ID NO: 3781271 - RNA, 15 nt, Human
uuauauuuauugacu

SEQ ID NO: 3781272 - RNA, 20 nt, Human
uuauauuuauugacucuuga

SEQ ID NO: 3781273 - RNA, 10 nt, Human
uuauauuuca

SEQ ID NO: 3781274 - RNA, 18 nt, Human
uuauauuucaaguacacu

SEQ ID NO: 3781275 - RNA, 11 nt, Human
uuauauuucca

SEQ ID NO: 3781276 - RNA, 15 nt, Human
uuauauuuggaugca

SEQ ID NO: 3781277 - RNA, 18 nt, Human
uuauauuugugcuauagu

SEQ ID NO: 3781278 - RNA, 15 nt, Human
uuauauuuuuauaga

SEQ ID NO: 3781279 - RNA, 17 nt, Human
uuauauuuuucuuaaaa

SEQ ID NO: 3781280 - RNA, 16 nt, Human
uuauauuuuuucaguu

SEQ ID NO: 3781281 - RNA, 20 nt, Human
uuaucaaaauagucuaaggc

SEQ ID NO: 3781282 - RNA, 18 nt, Human
uuaucaaacccuagccuu

SEQ ID NO: 3781283 - RNA, 21 nt, Human
uuaucaaacccuagccuugcu

SEQ ID NO: 3781284 - RNA, 22 nt, Human
uuaucaagaguugugacaacuu

SEQ ID NO: 3781285 - RNA, 13 nt, Human
uuaucaagcuaau

SEQ ID NO: 3781286 - RNA, 17 nt, Human
uuaucaaggacucuggu

SEQ ID NO: 3781287 - RNA, 19 nt, Human
uuaucaauaucuaauauau

SEQ ID NO: 3781288 - RNA, 14 nt, Human
uuaucaauuuguca

SEQ ID NO: 3781289 - RNA, 21 nt, Human
uuaucaauuugucauuuugaa

SEQ ID NO: 3781290 - RNA, 17 nt, Human
uuaucacauguauguuu

SEQ ID NO: 3781291 - RNA, 21 nt, Human
uuaucaccagcugccucuucu

SEQ ID NO: 3781292 - RNA, 17 nt, Human
uuaucacccagaagaaa

SEQ ID NO: 3781293 - RNA, 19 nt, Human
uuaucacccagaagaaaau

SEQ ID NO: 3781294 - RNA, 19 nt, Human
uuaucaccuggcuuguuua

SEQ ID NO: 3781295 - RNA, 20 nt, Human
uuaucacuuuuugaacuaag

SEQ ID NO: 3781296 - RNA, 17 nt, Human
uuaucagauacaucacu

SEQ ID NO: 3781297 - RNA, 14 nt, Human
uuaucagcaaaaaa

SEQ ID NO: 3781298 - RNA, 14 nt, Human
uuaucagcaaagaa

SEQ ID NO: 3781299 - RNA, 14 nt, Human
uuaucagugcuucc

SEQ ID NO: 3781300 - RNA, 13 nt, Human
uuaucaguuucca

SEQ ID NO: 3781301 - RNA, 20 nt, Human
uuaucauccacauuguuuua

SEQ ID NO: 3781302 - RNA, 14 nt, Human
uuaucaugaagccu

SEQ ID NO: 3781303 - RNA, 16 nt, Human
uuaucaugaagccugu

SEQ ID NO: 3781304 - RNA, 14 nt, Human
uuaucaugaauuuu

SEQ ID NO: 3781305 - RNA, 19 nt, Human
uuaucaugaauuuuaaagu

SEQ ID NO: 3781306 - RNA, 16 nt, Human
uuaucaugcugucuuu

SEQ ID NO: 3781307 - RNA, 22 nt, Human
uuaucaugugaaaucauucauu

SEQ ID NO: 3781308 - RNA, 14 nt, Human
uuaucauguguaau

SEQ ID NO: 3781309 - RNA, 19 nt, Human
uuaucauucauucuuagcu

SEQ ID NO: 3781310 - RNA, 19 nt, Human
uuaucauuuuuuccuguuu

SEQ ID NO: 3781311 - RNA, 15 nt, Human
uuauccaaaaugugu

SEQ ID NO: 3781312 - RNA, 16 nt, Human
uuauccaaaaugugua

SEQ ID NO: 3781313 - RNA, 18 nt, Human
uuauccaaaauguguauu

SEQ ID NO: 3781314 - RNA, 22 nt, Human
uuauccaaaauguguauuucuu

SEQ ID NO: 3781315 - RNA, 18 nt, Human
uuauccaggacucuguca

SEQ ID NO: 3781316 - RNA, 17 nt, Human
uuauccaugacaggccu

SEQ ID NO: 3781317 - RNA, 23 nt, Human
uuaucccaaaguuguuguaaccu

SEQ ID NO: 3781318 - RNA, 13 nt, Human
uuaucccagcugc

SEQ ID NO: 3781319 - RNA, 15 nt, Human
uuaucccucaccugu

SEQ ID NO: 3781320 - RNA, 17 nt, Human
uuaucccucaccuguag

SEQ ID NO: 3781321 - RNA, 14 nt, Human
uuaucccuuaagaa

SEQ ID NO: 3781322 - RNA, 15 nt, Human
uuaucccuuaagaau

SEQ ID NO: 3781323 - RNA, 16 nt, Human
uuauccuccaccgucu

SEQ ID NO: 3781324 - RNA, 14 nt, Human
uuauccucccugua

SEQ ID NO: 3781325 - RNA, 15 nt, Human
uuauccucuuuagag

SEQ ID NO: 3781326 - RNA, 16 nt, Human
uuauccugcauuguua

SEQ ID NO: 3781327 - RNA, 15 nt, Human
uuauccuuucauaua

SEQ ID NO: 3781328 - RNA, 24 nt, Human
uuauccuuuuuuaaaaguaaaugu

SEQ ID NO: 3781329 - RNA, 14 nt, Human
uuaucgaaacucau

SEQ ID NO: 3781330 - RNA, 13 nt, Human
uuaucgaaauaac

SEQ ID NO: 3781331 - RNA, 19 nt, Human
uuaucgaaauaacaauguu

SEQ ID NO: 3781332 - RNA, 20 nt, Human
uuaucgcccuggcaggcagg

SEQ ID NO: 3781333 - RNA, 16 nt, Human
uuaucggaagcagugc

SEQ ID NO: 3781334 - RNA, 16 nt, Human
uuaucguuuucuuaaa

SEQ ID NO: 3781335 - RNA, 15 nt, Human
uuaucguuuuuguau

SEQ ID NO: 3781336 - RNA, 14 nt, Human
uuaucuaaauuaaa

SEQ ID NO: 3781337 - RNA, 18 nt, Human
uuaucuaccaacuuucaa

SEQ ID NO: 3781338 - RNA, 14 nt, Human
uuaucuagauacug

SEQ ID NO: 3781339 - RNA, 14 nt, Human
uuaucuagauguaa

SEQ ID NO: 3781340 - RNA, 18 nt, Human
uuaucuagauguaaauuu

SEQ ID NO: 3781341 - RNA, 14 nt, Human
uuaucuagcugcau

SEQ ID NO: 3781342 - RNA, 17 nt, Human
uuaucuauaauuuaccu

SEQ ID NO: 3781343 - RNA, 17 nt, Human
uuaucuauuguaagaua

SEQ ID NO: 3781344 - RNA, 19 nt, Human
uuaucucagauauuugcac

SEQ ID NO: 3781345 - RNA, 17 nt, Human
uuaucucagauguuaaa

SEQ ID NO: 3781346 - RNA, 22 nt, Human
uuaucucagauguuaaaauaaa

SEQ ID NO: 3781347 - RNA, 19 nt, Human
uuaucucagucaugcauaa

SEQ ID NO: 3781348 - RNA, 20 nt, Human
uuaucucagucaugcauaaa

SEQ ID NO: 3781349 - RNA, 14 nt, Human
uuaucucucugugc

SEQ ID NO: 3781350 - RNA, 19 nt, Human
uuaucucuuuuauauuugu

SEQ ID NO: 3781351 - RNA, 18 nt, Human
uuaucugaauuuuuaaac

SEQ ID NO: 3781352 - RNA, 18 nt, Human
uuaucugagucaacuccu

SEQ ID NO: 3781353 - RNA, 21 nt, Human
uuaucugccucucuuguaauu

SEQ ID NO: 3781354 - RNA, 20 nt, Human
uuaucugggcauagaugcag

SEQ ID NO: 3781355 - RNA, 16 nt, Human
uuaucugucagcugca

SEQ ID NO: 3781356 - RNA, 18 nt, Human
uuaucugugcgugaaaca

SEQ ID NO: 3781357 - RNA, 16 nt, Human
uuaucuguuugagaaa

SEQ ID NO: 3781358 - RNA, 20 nt, Human
uuaucuguuugagaaaguca

SEQ ID NO: 3781359 - RNA, 20 nt, Human
uuaucuuacaauauugauug

SEQ ID NO: 3781360 - RNA, 13 nt, Human
uuaucuuacgaaa

SEQ ID NO: 3781361 - RNA, 21 nt, Human
uuaucuuauacuguacaauaa

SEQ ID NO: 3781362 - RNA, 18 nt, Human
uuaucuucucaaguucua

SEQ ID NO: 3781363 - RNA, 22 nt, Human
uuaucuucuggacuauagcugu

SEQ ID NO: 3781364 - RNA, 14 nt, Human
uuaucuugauacau

SEQ ID NO: 3781365 - RNA, 16 nt, Human
uuaucuuggacugaca

SEQ ID NO: 3781366 - RNA, 17 nt, Human
uuaucuuggacugacau

SEQ ID NO: 3781367 - RNA, 17 nt, Human
uuaucuugucucugggc

SEQ ID NO: 3781368 - RNA, 12 nt, Human
uuaucuuuauau

SEQ ID NO: 3781369 - RNA, 24 nt, Human
uuaucuuucgugauaaacuuugcu

SEQ ID NO: 3781370 - RNA, 14 nt, Human
uuaucuuugaauau

SEQ ID NO: 3781371 - RNA, 11 nt, Human
uuaucuuugau

SEQ ID NO: 3781372 - RNA, 17 nt, Human
uuaucuuuucuacagca

SEQ ID NO: 3781373 - RNA, 15 nt, Human
uuaucuuuuuaccuu

SEQ ID NO: 3781374 - RNA, 15 nt, Human
uuaugaaaauaaaua

SEQ ID NO: 3781375 - RNA, 14 nt, Human
uuaugaaacuuuug

SEQ ID NO: 3781376 - RNA, 18 nt, Human
uuaugaaacuuuuggaag

SEQ ID NO: 3781377 - RNA, 15 nt, Human
uuaugaaagaauaua

SEQ ID NO: 3781378 - RNA, 20 nt, Human
uuaugaaauaaagaaauugc

SEQ ID NO: 3781379 - RNA, 20 nt, Human
uuaugaacccuuccugagcu

SEQ ID NO: 3781380 - RNA, 22 nt, Human
uuaugaacugcauguauaaaug

SEQ ID NO: 3781381 - RNA, 23 nt, Human
uuaugaacugcauguauaaauga

SEQ ID NO: 3781382 - RNA, 20 nt, Human
uuaugaagaaaauacuuaaa

SEQ ID NO: 3781383 - RNA, 23 nt, Human
uuaugaagaaaauacuuaaaugu

SEQ ID NO: 3781384 - RNA, 23 nt, Human
uuaugaagaugggggccucuuuc

SEQ ID NO: 3781385 - RNA, 11 nt, Human
uuaugaaguuu

SEQ ID NO: 3781386 - RNA, 16 nt, Human
uuaugaaguuuaaaac

SEQ ID NO: 3781387 - RNA, 22 nt, Human
uuaugaaguuuaaaacaguauu

SEQ ID NO: 3781388 - RNA, 19 nt, Human
uuaugaauauuuauaacag

SEQ ID NO: 3781389 - RNA, 22 nt, Human
uuaugaauauuuauaacagcau

SEQ ID NO: 3781390 - RNA, 17 nt, Human
uuaugaaugugaagccu

SEQ ID NO: 3781391 - RNA, 16 nt, Human
uuaugaauuacauuug

SEQ ID NO: 3781392 - RNA, 14 nt, Human
uuaugacaguuaua

SEQ ID NO: 3781393 - RNA, 18 nt, Human
uuaugaccucuuccuuua

SEQ ID NO: 3781394 - RNA, 13 nt, Human
uuaugagaaacug

SEQ ID NO: 3781395 - RNA, 15 nt, Human
uuaugagaaagccuu

SEQ ID NO: 3781396 - RNA, 11 nt, Human
uuaugagaaau

SEQ ID NO: 3781397 - RNA, 12 nt, Human
uuaugagaaaug

SEQ ID NO: 3781398 - RNA, 13 nt, Human
uuaugagaaaugu

SEQ ID NO: 3781399 - RNA, 20 nt, Human
uuaugagauugguuuuccug

SEQ ID NO: 3781400 - RNA, 13 nt, Human
uuaugagccaggc

SEQ ID NO: 3781401 - RNA, 17 nt, Human
uuaugaggagcugcaga

SEQ ID NO: 3781402 - RNA, 18 nt, Human
uuaugaggagugaacauu

SEQ ID NO: 3781403 - RNA, 22 nt, Human
uuaugaggcaaccugauuguaa

SEQ ID NO: 3781404 - RNA, 20 nt, Human
uuaugaguaacuauuauuau

SEQ ID NO: 3781405 - RNA, 15 nt, Human
uuaugaguuugcuua

SEQ ID NO: 3781406 - RNA, 13 nt, Human
uuaugauaaaaaa

SEQ ID NO: 3781407 - RNA, 19 nt, Human
uuaugauaaaaaauuuugu

SEQ ID NO: 3781408 - RNA, 22 nt, Human
uuaugauagcaaauggccucau

SEQ ID NO: 3781409 - RNA, 18 nt, Human
uuaugauauuuuuuuaag

SEQ ID NO: 3781410 - RNA, 13 nt, Human
uuaugauccagca

SEQ ID NO: 3781411 - RNA, 22 nt, Human
uuaugauccagcagauuauuca

SEQ ID NO: 3781412 - RNA, 13 nt, Human
uuaugaugaugaa

SEQ ID NO: 3781413 - RNA, 14 nt, Human
uuaugaugaugaaa

SEQ ID NO: 3781414 - RNA, 23 nt, Human
uuaugaugaugaaaauuuuacca

SEQ ID NO: 3781415 - RNA, 11 nt, Human
uuaugaugugc

SEQ ID NO: 3781416 - RNA, 14 nt, Human
uuaugaugugcuua

SEQ ID NO: 3781417 - RNA, 16 nt, Human
uuaugaugugcuuaac

SEQ ID NO: 3781418 - RNA, 20 nt, Human
uuaugaugugggucaaggaa

SEQ ID NO: 3781419 - RNA, 13 nt, Human
uuaugauuuaaua

SEQ ID NO: 3781420 - RNA, 17 nt, Human
uuaugauuuaauaaaau

SEQ ID NO: 3781421 - RNA, 14 nt, Human
uuaugauuuucaua

SEQ ID NO: 3781422 - RNA, 15 nt, Human
uuaugcaaaagcaag

SEQ ID NO: 3781423 - RNA, 17 nt, Human
uuaugcaaauucccaga

SEQ ID NO: 3781424 - RNA, 17 nt, Human
uuaugcaaggaaggaaa

SEQ ID NO: 3781425 - RNA, 18 nt, Human
uuaugcaaggaaggaaag

SEQ ID NO: 3781426 - RNA, 22 nt, Human
uuaugcaaggucuugcauuuaa

SEQ ID NO: 3781427 - RNA, 23 nt, Human
uuaugcaauuagguuuuuccuua

SEQ ID NO: 3781428 - RNA, 19 nt, Human
uuaugcacuaaauaugaac

SEQ ID NO: 3781429 - RNA, 18 nt, Human
uuaugcagauagaaucaa

SEQ ID NO: 3781430 - RNA, 14 nt, Human
uuaugcauagauaa

SEQ ID NO: 3781431 - RNA, 13 nt, Human
uuaugccaccccc

SEQ ID NO: 3781432 - RNA, 22 nt, Human
uuaugccacuuccuuuuaacug

SEQ ID NO: 3781433 - RNA, 18 nt, Human
uuaugccauuuguuuauu

SEQ ID NO: 3781434 - RNA, 21 nt, Human
uuaugcccaguuucugccucu

SEQ ID NO: 3781435 - RNA, 17 nt, Human
uuaugccggaugugcuu

SEQ ID NO: 3781436 - RNA, 15 nt, Human
uuaugccuuuuauuu

SEQ ID NO: 3781437 - RNA, 19 nt, Human
uuaugcgguuaauuuugaa

SEQ ID NO: 3781438 - RNA, 17 nt, Human
uuaugcucucacuguuu

SEQ ID NO: 3781439 - RNA, 17 nt, Human
uuaugcucuuaauugcc

SEQ ID NO: 3781440 - RNA, 16 nt, Human
uuaugcuuaaauucaa

SEQ ID NO: 3781441 - RNA, 14 nt, Human
uuaugcuucuugga

SEQ ID NO: 3781442 - RNA, 13 nt, Human
uuaugcuuuaaac

SEQ ID NO: 3781443 - RNA, 13 nt, Human
uuauggaaaacug

SEQ ID NO: 3781444 - RNA, 21 nt, Human
uuauggaauugauuugcauug

SEQ ID NO: 3781445 - RNA, 21 nt, Human
uuauggacaaugacccagugg

SEQ ID NO: 3781446 - RNA, 18 nt, Human
uuauggagucauuuuuac

SEQ ID NO: 3781447 - RNA, 21 nt, Human
uuauggcacuaguauuucuau

SEQ ID NO: 3781448 - RNA, 12 nt, Human
uuauggccucag

SEQ ID NO: 3781449 - RNA, 18 nt, Human
uuauggcuauaggugcua

SEQ ID NO: 3781450 - RNA, 21 nt, Human
uuauggcucacuaugaaucua

SEQ ID NO: 3781451 - RNA, 18 nt, Human
uuauggcuuuugugcauu

SEQ ID NO: 3781452 - RNA, 11 nt, Human
uuaugggucac

SEQ ID NO: 3781453 - RNA, 23 nt, Human
uuaugguaacugcuuucuguucc

SEQ ID NO: 3781454 - RNA, 13 nt, Human
uuaugguagaaaa

SEQ ID NO: 3781455 - RNA, 15 nt, Human
uuaugguuauguuuu

SEQ ID NO: 3781456 - RNA, 16 nt, Human
uuaugguuauguuuuu

SEQ ID NO: 3781457 - RNA, 20 nt, Human
uuauguaaaauguuuuagca

SEQ ID NO: 3781458 - RNA, 15 nt, Human
uuauguaaacaaauc

SEQ ID NO: 3781459 - RNA, 17 nt, Human
uuauguaaacaaaucuu

SEQ ID NO: 3781460 - RNA, 19 nt, Human
uuauguaaaucccauuauu

SEQ ID NO: 3781461 - RNA, 22 nt, Human
uuauguaaaucccauuauucaa

SEQ ID NO: 3781462 - RNA, 17 nt, Human
uuauguaaauuauguaa

SEQ ID NO: 3781463 - RNA, 18 nt, Human
uuauguaagagcaccuuc

SEQ ID NO: 3781464 - RNA, 15 nt, Human
uuauguaaucuaugu

SEQ ID NO: 3781465 - RNA, 13 nt, Human
uuauguacuguac

SEQ ID NO: 3781466 - RNA, 15 nt, Human
uuauguacuguacua

SEQ ID NO: 3781467 - RNA, 17 nt, Human
uuauguacuguacuaau

SEQ ID NO: 3781468 - RNA, 22 nt, Human
uuauguagauauuuggcuuaaa

SEQ ID NO: 3781469 - RNA, 16 nt, Human
uuauguaguaauugac

SEQ ID NO: 3781470 - RNA, 11 nt, Human
uuauguauuuc

SEQ ID NO: 3781471 - RNA, 20 nt, Human
uuauguauuuccuggauguu

SEQ ID NO: 3781472 - RNA, 20 nt, Human
uuaugucauucucuuucuca

SEQ ID NO: 3781473 - RNA, 22 nt, Human
uuaugucccuucacauaguuuu

SEQ ID NO: 3781474 - RNA, 20 nt, Human
uuauguccugugagaugugu

SEQ ID NO: 3781475 - RNA, 13 nt, Human
uuaugucuaaaga

SEQ ID NO: 3781476 - RNA, 15 nt, Human
uuaugugaaacaugu

SEQ ID NO: 3781477 - RNA, 20 nt, Human
uuaugugaauuuuuaagcug

SEQ ID NO: 3781478 - RNA, 15 nt, Human
uuaugugacauuaac

SEQ ID NO: 3781479 - RNA, 14 nt, Human
uuaugugaucaauu

SEQ ID NO: 3781480 - RNA, 19 nt, Human
uuauguguaugugccauuu

SEQ ID NO: 3781481 - RNA, 21 nt, Human
uuaugugugcauguguguaua

SEQ ID NO: 3781482 - RNA, 10 nt, Human
uuaugugugu

SEQ ID NO: 3781483 - RNA, 13 nt, Human
uuauguuaaaauc

SEQ ID NO: 3781484 - RNA, 14 nt, Human
uuauguuaaacuag

SEQ ID NO: 3781485 - RNA, 17 nt, Human
uuauguuaaaucaauaa

SEQ ID NO: 3781486 - RNA, 14 nt, Human
uugggaauuuuauu

SEQ ID NO: 3781487 - RNA, 22 nt, Human
uugggaccgccagauggggccu

SEQ ID NO: 3781488 - RNA, 22 nt, Human
uugggacugcuaaauaaaauuu

SEQ ID NO: 3781489 - RNA, 14 nt, Human
uugggagacaugug

SEQ ID NO: 3781490 - RNA, 17 nt, Human
uugggagacaugugaca

SEQ ID NO: 3781491 - RNA, 15 nt, Human
uugggagagccccug

SEQ ID NO: 3781492 - RNA, 13 nt, Human
uugggaggaagca

SEQ ID NO: 3781493 - RNA, 14 nt, Human
uugggaggaagcag

SEQ ID NO: 3781494 - RNA, 18 nt, Human
uugggaggaagcagaaua

SEQ ID NO: 3781495 - RNA, 23 nt, Human
uugggaggaagcagaauaaagca

SEQ ID NO: 3781496 - RNA, 16 nt, Human
uugggaggccauuugu

SEQ ID NO: 3781497 - RNA, 19 nt, Human
uugggagggaaaagggaag

SEQ ID NO: 3781498 - RNA, 15 nt, Human
uugggagugagaugc

SEQ ID NO: 3781499 - RNA, 15 nt, Human
uugggauaucuccug

SEQ ID NO: 3781500 - RNA, 17 nt, Human
uugggaugucuuauuuu

SEQ ID NO: 3781501 - RNA, 18 nt, Human
uugggaugucuuauuuuu

SEQ ID NO: 3781502 - RNA, 15 nt, Human
uuguagcuccucccc

SEQ ID NO: 3781503 - RNA, 20 nt, Human
uuguaggcgaaucauuuguu

SEQ ID NO: 3781504 - RNA, 17 nt, Human
uuguaggggucaaagaa

SEQ ID NO: 3781505 - RNA, 19 nt, Human
uuguaggggucaaagaaau

SEQ ID NO: 3781506 - RNA, 14 nt, Human
uuguaggguuucua

SEQ ID NO: 3781507 - RNA, 18 nt, Human
uuguagguacuuuuggaa

SEQ ID NO: 3781508 - RNA, 20 nt, Human
uuguagguacuuuuggaauc

SEQ ID NO: 3781509 - RNA, 18 nt, Human
uuguaguaaagaaauuua

SEQ ID NO: 3781510 - RNA, 15 nt, Human
uuguaguagucucau

SEQ ID NO: 3781511 - RNA, 19 nt, Human
uuguaguuccacuuauagc

SEQ ID NO: 3781512 - RNA, 13 nt, Human
uuguaguugaaua

SEQ ID NO: 3781513 - RNA, 20 nt, Human
uuguauaaaaauagaagaau

SEQ ID NO: 3781514 - RNA, 12 nt, Human
uuguauaaaaua

SEQ ID NO: 3781515 - RNA, 16 nt, Human
uuguauaaaauaauuu

SEQ ID NO: 3781516 - RNA, 12 nt, Human
uuguauaaauuu

SEQ ID NO: 3781517 - RNA, 15 nt, Human
uuguauaacagguua

SEQ ID NO: 3781518 - RNA, 16 nt, Human
uuguauaacuaacagc

SEQ ID NO: 3781519 - RNA, 20 nt, Human
uuguauaauuggauuuccua

SEQ ID NO: 3781520 - RNA, 12 nt, Human
uuguauaauugu

SEQ ID NO: 3781521 - RNA, 12 nt, Human
uuguauaauuuc

SEQ ID NO: 3781522 - RNA, 15 nt, Human
uuguauacauccugg

SEQ ID NO: 3781523 - RNA, 17 nt, Human
uuguauagagauaugca

SEQ ID NO: 3781524 - RNA, 16 nt, Human
uuguauaguguaaaau

SEQ ID NO: 3781525 - RNA, 16 nt, Human
uuguauaguuaacaca

SEQ ID NO: 3781526 - RNA, 17 nt, Human
uuguauaguuauguaaa

SEQ ID NO: 3781527 - RNA, 18 nt, Human
uuguauaguuauguaaau

SEQ ID NO: 3781528 - RNA, 15 nt, Human
uuguauauaugugug

SEQ ID NO: 3781529 - RNA, 13 nt, Human
uuguauauuacaa

SEQ ID NO: 3781530 - RNA, 16 nt, Human
uuguauauuacaauga

SEQ ID NO: 3781531 - RNA, 18 nt, Human
uuguauauuauggaagau

SEQ ID NO: 3781532 - RNA, 22 nt, Human
uuguauauucuauuuuacaacu

SEQ ID NO: 3781533 - RNA, 16 nt, Human
uuguauauugucagau

SEQ ID NO: 3781534 - RNA, 15 nt, Human
uuguauauuuguaca

SEQ ID NO: 3781535 - RNA, 15 nt, Human
uuguaucagaggccu

SEQ ID NO: 3781536 - RNA, 14 nt, Human
uuguauccccugca

SEQ ID NO: 3781537 - RNA, 15 nt, Human
uuguauccccugcag

SEQ ID NO: 3781538 - RNA, 20 nt, Human
uuguaucguauagcuguauu

SEQ ID NO: 3781539 - RNA, 22 nt, Human
uuguaucguauagcuguauuga

SEQ ID NO: 3781540 - RNA, 20 nt, Human
uuguaucuagugcagcugau

SEQ ID NO: 3781541 - RNA, 13 nt, Human
uuguaucucuuuu

SEQ ID NO: 3781542 - RNA, 20 nt, Human
uuguaugauccuaaugaaug

SEQ ID NO: 3781543 - RNA, 13 nt, Human
uuguaugaugugu

SEQ ID NO: 3781544 - RNA, 24 nt, Human
uuguaugcaagcaguuucaauaaa

SEQ ID NO: 3781545 - RNA, 20 nt, Human
uuguauggggaggcaagugu

SEQ ID NO: 3781546 - RNA, 13 nt, Human
uuguauuaaacuc

SEQ ID NO: 3781547 - RNA, 14 nt, Human
uuguauuacagaug

SEQ ID NO: 3781548 - RNA, 13 nt, Human
uuguauuagaugu

SEQ ID NO: 3781549 - RNA, 15 nt, Human
uuguauuagauguuc

SEQ ID NO: 3781550 - RNA, 17 nt, Human
uuguauuauuuuuguag

SEQ ID NO: 3781551 - RNA, 22 nt, Human
uuguauucaaaaauuaucuaua

SEQ ID NO: 3781552 - RNA, 15 nt, Human
uuguauucucuccug

SEQ ID NO: 3781553 - RNA, 20 nt, Human
uuguauucucugagcugugc

SEQ ID NO: 3781554 - RNA, 18 nt, Human
uuguauucuuugauguua

SEQ ID NO: 3781555 - RNA, 19 nt, Human
uuguauugugguauugaau

SEQ ID NO: 3781556 - RNA, 18 nt, Human
uuguauuguuagauguuu

SEQ ID NO: 3781557 - RNA, 16 nt, Human
uuguauuuauguguau

SEQ ID NO: 3781558 - RNA, 14 nt, Human
uuguauuuauucaa

SEQ ID NO: 3781559 - RNA, 20 nt, Human
uuguauuuuacuaauaaaau

SEQ ID NO: 3781560 - RNA, 14 nt, Human
uuguauuuuaguau

SEQ ID NO: 3781561 - RNA, 18 nt, Human
uuguauuuucaugaaaau

SEQ ID NO: 3781562 - RNA, 18 nt, Human
uuguauuuugauuauuuu

SEQ ID NO: 3781563 - RNA, 15 nt, Human
uuguauuuuuaaugg

SEQ ID NO: 3781564 - RNA, 22 nt, Human
uuguauuuuuuugcaagugaag

SEQ ID NO: 3781565 - RNA, 22 nt, Human
uugucaaacuguagaaaugaug

SEQ ID NO: 3781566 - RNA, 20 nt, Human
uugucaagucucugcuggcc

SEQ ID NO: 3781567 - RNA, 19 nt, Human
uugucaauauuaaauacag

SEQ ID NO: 3781568 - RNA, 19 nt, Human
uugucaauauuuaaacaug

SEQ ID NO: 3781569 - RNA, 18 nt, Human
uugucaaugcuggagaaa

SEQ ID NO: 3781570 - RNA, 23 nt, Human
uugucacaauccuaacacauuau

SEQ ID NO: 3781571 - RNA, 17 nt, Human
uugucacacacuuuggc

SEQ ID NO: 3781572 - RNA, 22 nt, Human
uugucacaugaaacauuugcaa

SEQ ID NO: 3781573 - RNA, 15 nt, Human
uugucaccugcuucu

SEQ ID NO: 3781574 - RNA, 18 nt, Human
uugucacgcuucuucuuu

SEQ ID NO: 3781575 - RNA, 13 nt, Human
uugucagacauaa

SEQ ID NO: 3781576 - RNA, 18 nt, Human
uugucagacuuuaaagaa

SEQ ID NO: 3781577 - RNA, 15 nt, Human
uugucaguaucugua

SEQ ID NO: 3781578 - RNA, 15 nt, Human
uugucagugacagua

SEQ ID NO: 3781579 - RNA, 16 nt, Human
uugucaucaccaugga

SEQ ID NO: 3781580 - RNA, 19 nt, Human
uugucaucagccaaaacgu

SEQ ID NO: 3781581 - RNA, 21 nt, Human
uugucaucauuguauauaugu

SEQ ID NO: 3781582 - RNA, 14 nt, Human
uugucauguguaua

SEQ ID NO: 3781583 - RNA, 22 nt, Human
uugucauguguauaaaaauaaa

SEQ ID NO: 3781584 - RNA, 14 nt, Human
uugucauuaaaggu

SEQ ID NO: 3781585 - RNA, 19 nt, Human
uugucauuagccugaguag

SEQ ID NO: 3781586 - RNA, 22 nt, Human
uugucauuguaaacaaacucuu

SEQ ID NO: 3781587 - RNA, 20 nt, Human
uugucauuuucauuagcaaa

SEQ ID NO: 3781588 - RNA, 12 nt, Human
uugucauuuucu

SEQ ID NO: 3781589 - RNA, 19 nt, Human
uugucauuuugaagcuaau

SEQ ID NO: 3781590 - RNA, 19 nt, Human
uuguccaauuguugacagu

SEQ ID NO: 3781591 - RNA, 14 nt, Human
uuguccacccaccu

SEQ ID NO: 3781592 - RNA, 13 nt, Human
uuguccagagaca

SEQ ID NO: 3781593 - RNA, 13 nt, Human
uuguccagagcug

SEQ ID NO: 3781594 - RNA, 19 nt, Human
uuguccagcugagcgccag

SEQ ID NO: 3781595 - RNA, 16 nt, Human
uuguccauauuuucac

SEQ ID NO: 3781596 - RNA, 14 nt, Human
uuguccauuuguaa

SEQ ID NO: 3781597 - RNA, 20 nt, Human
uugucccacucaagccaagc

SEQ ID NO: 3781598 - RNA, 21 nt, Human
uugucccagaggcugccccac

SEQ ID NO: 3781599 - RNA, 17 nt, Human
uuguccccaaugaauau

SEQ ID NO: 3781600 - RNA, 11 nt, Human
uuguccccaca

SEQ ID NO: 3781601 - RNA, 17 nt, Human
uuguccccacacuccua

SEQ ID NO: 3781602 - RNA, 11 nt, Human
uuguccccagu

SEQ ID NO: 3781603 - RNA, 15 nt, Human
uuguccccguggucu

SEQ ID NO: 3781604 - RNA, 13 nt, Human
uuguccccugcuu

SEQ ID NO: 3781605 - RNA, 15 nt, Human
uugucccugugccua

SEQ ID NO: 3781606 - RNA, 16 nt, Human
uuguccgcuggguggu

SEQ ID NO: 3781607 - RNA, 17 nt, Human
uuguccgguuuacuuua

SEQ ID NO: 3781608 - RNA, 21 nt, Human
uuguccgguuuacuuuaacuu

SEQ ID NO: 3781609 - RNA, 16 nt, Human
uuguccuaugggaguc

SEQ ID NO: 3781610 - RNA, 19 nt, Human
uuguccuauuaguguuaua

SEQ ID NO: 3781611 - RNA, 22 nt, Human
uuguccucagccccgcguggaa

SEQ ID NO: 3781612 - RNA, 16 nt, Human
uuguccuccugcugcc

SEQ ID NO: 3781613 - RNA, 16 nt, Human
uuguccuuagccugga

SEQ ID NO: 3781614 - RNA, 14 nt, Human
uuguccuugcuggu

SEQ ID NO: 3781615 - RNA, 20 nt, Human
uuguccuuuaaaaaagaaaa

SEQ ID NO: 3781616 - RNA, 15 nt, Human
uuguccuuugauucc

SEQ ID NO: 3781617 - RNA, 14 nt, Human
uugucggcuccagu

SEQ ID NO: 3781618 - RNA, 20 nt, Human
uugucgggcaccagccagcg

SEQ ID NO: 3781619 - RNA, 11 nt, Human
uugucuaaaau

SEQ ID NO: 3781620 - RNA, 22 nt, Human
uugucuaaaaugccucagugua

SEQ ID NO: 3781621 - RNA, 15 nt, Human
uugucuaacucagaa

SEQ ID NO: 3781622 - RNA, 13 nt, Human
uugucuaagaaau

SEQ ID NO: 3781623 - RNA, 19 nt, Human
uugucuacaccauuaugug

SEQ ID NO: 3781624 - RNA, 15 nt, Human
uugucuauucuccag

SEQ ID NO: 3781625 - RNA, 12 nt, Human
uugucuauuuua

SEQ ID NO: 3781626 - RNA, 23 nt, Human
uugucuauuuuucucuucauauu

SEQ ID NO: 3781627 - RNA, 16 nt, Human
uugucuauuuuugucu

SEQ ID NO: 3781628 - RNA, 18 nt, Human
uugucuauuuuugucuua

SEQ ID NO: 3781629 - RNA, 18 nt, Human
uugucucaaugcucauaa

SEQ ID NO: 3781630 - RNA, 12 nt, Human
uugucucagaag

SEQ ID NO: 3781631 - RNA, 22 nt, Human
uugucucagauuuuauuaugua

SEQ ID NO: 3781632 - RNA, 22 nt, Human
uugucuccccuguuccccucuc

SEQ ID NO: 3781633 - RNA, 23 nt, Human
uugucuccccuguuccccucucc

SEQ ID NO: 3781634 - RNA, 14 nt, Human
uugucucccuggcc

SEQ ID NO: 3781635 - RNA, 15 nt, Human
uugucucccuggccc

SEQ ID NO: 3781636 - RNA, 18 nt, Human
uugucucccuggcccuca

SEQ ID NO: 3781637 - RNA, 14 nt, Human
uugucucuacuuuu

SEQ ID NO: 3781638 - RNA, 19 nt, Human
uugucucuaugccagcuca

SEQ ID NO: 3781639 - RNA, 13 nt, Human
uugucucuccuuu

SEQ ID NO: 3781640 - RNA, 13 nt, Human
uugucucugaugc

SEQ ID NO: 3781641 - RNA, 23 nt, Human
uugucucuguuuuacaaguugga

SEQ ID NO: 3781642 - RNA, 17 nt, Human
uugucugaaacauuuca

SEQ ID NO: 3781643 - RNA, 21 nt, Human
uugucugaagucacugcacag

SEQ ID NO: 3781644 - RNA, 20 nt, Human
uugucuggcaaggacuuugu

SEQ ID NO: 3781645 - RNA, 21 nt, Human
uugucuggcaaggacuuugua

SEQ ID NO: 3781646 - RNA, 17 nt, Human
uugucugguuaaaaaau

SEQ ID NO: 3781647 - RNA, 18 nt, Human
uugucugguuaaaaaaua

SEQ ID NO: 3781648 - RNA, 20 nt, Human
uugucuguuuguuucaagaa

SEQ ID NO: 3781649 - RNA, 15 nt, Human
uugucuuaucuggcc

SEQ ID NO: 3781650 - RNA, 19 nt, Human
uugucuuccuauuucagaa

SEQ ID NO: 3781651 - RNA, 23 nt, Human
uugucuuccuauuucagaaguuu

SEQ ID NO: 3781652 - RNA, 15 nt, Human
uugucuucuccccag

SEQ ID NO: 3781653 - RNA, 13 nt, Human
uuggacccuucca

SEQ ID NO: 3781654 - RNA, 17 nt, Human
uuggaccuaauccaagc

SEQ ID NO: 3781655 - RNA, 17 nt, Human
uuggaccucgugcuuua

SEQ ID NO: 3781656 - RNA, 16 nt, Human
uuggaccucugcucug

SEQ ID NO: 3781657 - RNA, 13 nt, Human
uuggacggccuga

SEQ ID NO: 3781658 - RNA, 17 nt, Human
uuggacuaaaugccuag

SEQ ID NO: 3781659 - RNA, 13 nt, Human
uuggacuauuaua

SEQ ID NO: 3781660 - RNA, 14 nt, Human
uuggacugacauuu

SEQ ID NO: 3781661 - RNA, 15 nt, Human
uuggacuggaugcau

SEQ ID NO: 3781662 - RNA, 20 nt, Human
uuggacuuuucguuaacauu

SEQ ID NO: 3781663 - RNA, 18 nt, Human
uuggagaaaugaaaacag

SEQ ID NO: 3781664 - RNA, 17 nt, Human
uuggagacauuccuggg

SEQ ID NO: 3781665 - RNA, 15 nt, Human
uuggagaccuuaccc

SEQ ID NO: 3781666 - RNA, 20 nt, Human
uuggagacucuguggggccu

SEQ ID NO: 3781667 - RNA, 22 nt, Human
uuggagacuuucuuuaaauuau

SEQ ID NO: 3781668 - RNA, 15 nt, Human
uuggagagacacagc

SEQ ID NO: 3781669 - RNA, 15 nt, Human
uuggagaguuuccug

SEQ ID NO: 3781670 - RNA, 21 nt, Human
uuggagaguuuccugaaacaa

SEQ ID NO: 3781671 - RNA, 20 nt, Human
uuggagauaaucuagaacac

SEQ ID NO: 3781672 - RNA, 11 nt, Human
uuggagcauug

SEQ ID NO: 3781673 - RNA, 15 nt, Human
uuggagcccagggca

SEQ ID NO: 3781674 - RNA, 16 nt, Human
uuggagcguggacugg

SEQ ID NO: 3781675 - RNA, 14 nt, Human
uuggagcugagccu

SEQ ID NO: 3781676 - RNA, 15 nt, Human
uuggagcuuacauag

SEQ ID NO: 3781677 - RNA, 21 nt, Human
uuggagcuuuuuucuuuaaga

SEQ ID NO: 3781678 - RNA, 14 nt, Human
uuggaggaaguugg

SEQ ID NO: 3781679 - RNA, 19 nt, Human
uuggaggaccaaaaaaaua

SEQ ID NO: 3781680 - RNA, 15 nt, Human
uuggaggccagccag

SEQ ID NO: 3781681 - RNA, 14 nt, Human
uuggagggccuggg

SEQ ID NO: 3781682 - RNA, 23 nt, Human
uuggagggugggagagcccagcc

SEQ ID NO: 3781683 - RNA, 13 nt, Human
uugucuugaaaga

SEQ ID NO: 3781684 - RNA, 14 nt, Human
uugucuugaaagau

SEQ ID NO: 3781685 - RNA, 15 nt, Human
uugucuugaaugucu

SEQ ID NO: 3781686 - RNA, 18 nt, Human
uugucuuguguauuucag

SEQ ID NO: 3781687 - RNA, 13 nt, Human
uugucuuuauaug

SEQ ID NO: 3781688 - RNA, 12 nt, Human
uugucuuuauuu

SEQ ID NO: 3781689 - RNA, 17 nt, Human
uugugaaacacagcugu

SEQ ID NO: 3781690 - RNA, 18 nt, Human
uugugaaacacagcuguu

SEQ ID NO: 3781691 - RNA, 19 nt, Human
uugugaaacagacuuguau

SEQ ID NO: 3781692 - RNA, 21 nt, Human
uugugaaauaaaacuggcuuu

SEQ ID NO: 3781693 - RNA, 13 nt, Human
uugugaaauuauu

SEQ ID NO: 3781694 - RNA, 15 nt, Human
uugugaaauuuuuca

SEQ ID NO: 3781695 - RNA, 19 nt, Human
uugugaaauuuuucauauu

SEQ ID NO: 3781696 - RNA, 19 nt, Human
uugugaacaagucccugua

SEQ ID NO: 3781697 - RNA, 11 nt, Human
uugugaacaga

SEQ ID NO: 3781698 - RNA, 13 nt, Human
uugugaaccaaug

SEQ ID NO: 3781699 - RNA, 17 nt, Human
uugugaaccaaugcaag

SEQ ID NO: 3781700 - RNA, 19 nt, Human
uugugaacucagccaagca

SEQ ID NO: 3781701 - RNA, 22 nt, Human
uugugaagaacuauuuuauucu

SEQ ID NO: 3781702 - RNA, 11 nt, Human
uugugaagagg

SEQ ID NO: 3781703 - RNA, 21 nt, Human
uugugaaggauuauggaaaaa

SEQ ID NO: 3781704 - RNA, 13 nt, Human
uugugaaggcagg

SEQ ID NO: 3781705 - RNA, 22 nt, Human
uugugaaggcaggggaauguau

SEQ ID NO: 3781706 - RNA, 23 nt, Human
uugugaagugaaggauuuguguu

SEQ ID NO: 3781707 - RNA, 23 nt, Human
uugugaauauguacauaggcagc

SEQ ID NO: 3781708 - RNA, 16 nt, Human
uugugaaugcuucuca

SEQ ID NO: 3781709 - RNA, 14 nt, Human
uugugaauggauug

SEQ ID NO: 3781710 - RNA, 15 nt, Human
uugugaauggauugg

SEQ ID NO: 3781711 - RNA, 18 nt, Human
uugugaauugauaauaaa

SEQ ID NO: 3781712 - RNA, 22 nt, Human
uugugacaaaaaauuaaagcau

SEQ ID NO: 3781713 - RNA, 18 nt, Human
uugugacagcucuuuuug

SEQ ID NO: 3781714 - RNA, 21 nt, Human
uugugacagggcggggguggc

SEQ ID NO: 3781715 - RNA, 16 nt, Human
uugugaccuuaguguu

SEQ ID NO: 3781716 - RNA, 19 nt, Human
uugugaccuuaguguuucu

SEQ ID NO: 3781717 - RNA, 22 nt, Human
uugugacuaauuguauaacagg

SEQ ID NO: 3781718 - RNA, 13 nt, Human
uugugacuagugc

SEQ ID NO: 3781719 - RNA, 16 nt, Human
uugugacuagugcuga

SEQ ID NO: 3781720 - RNA, 17 nt, Human
uugugacuagugcugaa

SEQ ID NO: 3781721 - RNA, 21 nt, Human
uugugacuagugcugaagcuu

SEQ ID NO: 3781722 - RNA, 22 nt, Human
uugugacuagugcugaagcuua

SEQ ID NO: 3781723 - RNA, 18 nt, Human
uugugacuuuugcuuuaa

SEQ ID NO: 3781724 - RNA, 12 nt, Human
uugugagauggg

SEQ ID NO: 3781725 - RNA, 18 nt, Human
uugugaggaagccgcugg

SEQ ID NO: 3781726 - RNA, 21 nt, Human
uugugaggaagccgcuggggc

SEQ ID NO: 3781727 - RNA, 19 nt, Human
uugugaguuuguuucuuug

SEQ ID NO: 3781728 - RNA, 21 nt, Human
uugugaguuuguuucuuugaa

SEQ ID NO: 3781729 - RNA, 22 nt, Human
uugugauaaguucuaguugcuu

SEQ ID NO: 3781730 - RNA, 13 nt, Human
uugugauaauuua

SEQ ID NO: 3781731 - RNA, 14 nt, Human
uugugauaauuuaa

SEQ ID NO: 3781732 - RNA, 15 nt, Human
uugugauagcacuuu

SEQ ID NO: 3781733 - RNA, 21 nt, Human
uugugauaugcacaauguaga

SEQ ID NO: 3781734 - RNA, 23 nt, Human
uugugaucagaccauaauguuac

SEQ ID NO: 3781735 - RNA, 14 nt, Human
uugugaucuugcuc

SEQ ID NO: 3781736 - RNA, 16 nt, Human
uugugauggagugcug

SEQ ID NO: 3781737 - RNA, 17 nt, Human
uugugauggagugcugu

SEQ ID NO: 3781738 - RNA, 18 nt, Human
uugugaugucccaacuug

SEQ ID NO: 3781739 - RNA, 22 nt, Human
uugugaugucccaacuuguaaa

SEQ ID NO: 3781740 - RNA, 18 nt, Human
uugugauuauuucacuuu

SEQ ID NO: 3781741 - RNA, 19 nt, Human
uugugauucaaucuguaaa

SEQ ID NO: 3781742 - RNA, 23 nt, Human
uugugauucaaucuguaaacugu

SEQ ID NO: 3781743 - RNA, 21 nt, Human
uugugauucuuccagauguga

SEQ ID NO: 3781744 - RNA, 14 nt, Human
uugugauuucuuua

SEQ ID NO: 3781745 - RNA, 16 nt, Human
uugugauuugacuguu

SEQ ID NO: 3781746 - RNA, 22 nt, Human
uugugauuugacuguuuuuacc

SEQ ID NO: 3781747 - RNA, 21 nt, Human
uugugcaaaauauuugacuau

SEQ ID NO: 3781748 - RNA, 23 nt, Human
uugugcaauguaaauauuuuaaa

SEQ ID NO: 3781749 - RNA, 20 nt, Human
uugugcaguaacuugggagu

SEQ ID NO: 3781750 - RNA, 14 nt, Human
uugugcauucugga

SEQ ID NO: 3781751 - RNA, 12 nt, Human
uugugcauuugg

SEQ ID NO: 3781752 - RNA, 19 nt, Human
uugugcauuuguaaaugcu

SEQ ID NO: 3781753 - RNA, 22 nt, Human
uugugccaauauguauuguaaa

SEQ ID NO: 3781754 - RNA, 17 nt, Human
uugugcccacugucucu

SEQ ID NO: 3781755 - RNA, 15 nt, Human
uugugccuaaugugu

SEQ ID NO: 3781756 - RNA, 16 nt, Human
uugugccuuuuauagc

SEQ ID NO: 3781757 - RNA, 14 nt, Human
uugugcuacagaug

SEQ ID NO: 3781758 - RNA, 18 nt, Human
uugugcuagaaauuuuca

SEQ ID NO: 3781759 - RNA, 11 nt, Human
uugugcugcca

SEQ ID NO: 3781760 - RNA, 13 nt, Human
uugugcugcuucu

SEQ ID NO: 3781761 - RNA, 11 nt, Human
uugugcuucuc

SEQ ID NO: 3781762 - RNA, 16 nt, Human
uugugcuucuccccag

SEQ ID NO: 3781763 - RNA, 23 nt, Human
uugugcuucuuucuuugggaaua

SEQ ID NO: 3781764 - RNA, 15 nt, Human
uugugcuuugcucuu

SEQ ID NO: 3781765 - RNA, 15 nt, Human
uugugcuuuuccuga

SEQ ID NO: 3781766 - RNA, 19 nt, Human
uuguggaauguuggauaag

SEQ ID NO: 3781767 - RNA, 16 nt, Human
uuguggauaacaaaga

SEQ ID NO: 3781768 - RNA, 18 nt, Human
uuguggauauaaaaugug

SEQ ID NO: 3781769 - RNA, 23 nt, Human
uuguggauuuaacagaaauguac

SEQ ID NO: 3781770 - RNA, 16 nt, Human
uuguggauuucaguuu

SEQ ID NO: 3781771 - RNA, 18 nt, Human
uuguggccaaggagcugc

SEQ ID NO: 3781772 - RNA, 11 nt, Human
uuguggccuca

SEQ ID NO: 3781773 - RNA, 13 nt, Human
uuguggccucaga

SEQ ID NO: 3781774 - RNA, 13 nt, Human
uuguggccuggga

SEQ ID NO: 3781775 - RNA, 17 nt, Human
uuguggcuauccugauu

SEQ ID NO: 3781776 - RNA, 15 nt, Human
uugugggccugggcu

SEQ ID NO: 3781777 - RNA, 19 nt, Human
uugugggccugggcuccug

SEQ ID NO: 3781778 - RNA, 15 nt, Human
uuguggggacccagg

SEQ ID NO: 3781779 - RNA, 16 nt, Human
uugugggggacuguaa

SEQ ID NO: 3781780 - RNA, 20 nt, Human
uuguggguucuauguuuacu

SEQ ID NO: 3781781 - RNA, 21 nt, Human
uuguggugugaguaucagaau

SEQ ID NO: 3781782 - RNA, 14 nt, Human
uugugguuauuuuu

SEQ ID NO: 3781783 - RNA, 19 nt, Human
uugugguuauuuuuauaca

SEQ ID NO: 3781784 - RNA, 16 nt, Human
uugugguuuuauggag

SEQ ID NO: 3781785 - RNA, 19 nt, Human
uuguguaauagaaaacuga

SEQ ID NO: 3781786 - RNA, 21 nt, Human
uuguguaauagaaaacugaaa

SEQ ID NO: 3781787 - RNA, 13 nt, Human
uuguguaauuuau

SEQ ID NO: 3781788 - RNA, 15 nt, Human
uuguguacagugugu

SEQ ID NO: 3781789 - RNA, 23 nt, Human
uuguguacucggaaauuaaaguu

SEQ ID NO: 3781790 - RNA, 15 nt, Human
uuguguacucuggcc

SEQ ID NO: 3781791 - RNA, 16 nt, Human
uuguguacuuuuaaga

SEQ ID NO: 3781792 - RNA, 14 nt, Human
uuguguagccuuuu

SEQ ID NO: 3781793 - RNA, 20 nt, Human
uuguguauccauuaucaugu

SEQ ID NO: 3781794 - RNA, 21 nt, Human
uuguguauccauuaucaugug

SEQ ID NO: 3781795 - RNA, 22 nt, Human
uuguguauuuacgcuuugauuc

SEQ ID NO: 3781796 - RNA, 22 nt, Human
uugugucaacaugaacaaauuu

SEQ ID NO: 3781797 - RNA, 21 nt, Human
uugugucaaugggcaaugaca

SEQ ID NO: 3781798 - RNA, 18 nt, Human
uugugucccauuccccca

SEQ ID NO: 3781799 - RNA, 13 nt, Human
uugugucugcagg

SEQ ID NO: 3781800 - RNA, 17 nt, Human
uugugucugcaggauug

SEQ ID NO: 3781801 - RNA, 23 nt, Human
uugugugaaagguacuucaaauc

SEQ ID NO: 3781802 - RNA, 17 nt, Human
uugugugauauuucaga

SEQ ID NO: 3781803 - RNA, 21 nt, Human
uugugugauauuucagaaaua

SEQ ID NO: 3781804 - RNA, 13 nt, Human
uugugugauugaa

SEQ ID NO: 3781805 - RNA, 15 nt, Human
uugugugccucuagc

SEQ ID NO: 3781806 - RNA, 17 nt, Human
uugugugccucuagcug

SEQ ID NO: 3781807 - RNA, 21 nt, Human
uugugugcggagucauuuugu

SEQ ID NO: 3781808 - RNA, 15 nt, Human
uuguguguaugugua

SEQ ID NO: 3781809 - RNA, 15 nt, Human
uugugugucaugcca

SEQ ID NO: 3781810 - RNA, 19 nt, Human
uugugugucuuaauuauua

SEQ ID NO: 3781811 - RNA, 19 nt, Human
uugugugugcucugcuuca

SEQ ID NO: 3781812 - RNA, 16 nt, Human
uuguguguuauuuaaa

SEQ ID NO: 3781813 - RNA, 20 nt, Human
uuguguguuauuuaaaugag

SEQ ID NO: 3781814 - RNA, 13 nt, Human
uuguguguugucu

SEQ ID NO: 3781815 - RNA, 17 nt, Human
uuguguguuuauuguca

SEQ ID NO: 3781816 - RNA, 18 nt, Human
uuguguguuuauuucacu

SEQ ID NO: 3781817 - RNA, 20 nt, Human
uuguguucccauuucagcug

SEQ ID NO: 3781818 - RNA, 13 nt, Human
uuguguucuaaua

SEQ ID NO: 3781819 - RNA, 20 nt, Human
uuguguugaagagguuuuaa

SEQ ID NO: 3781820 - RNA, 12 nt, Human
uuguguugacau

SEQ ID NO: 3781821 - RNA, 12 nt, Human
uuguguuguaau

SEQ ID NO: 3781822 - RNA, 14 nt, Human
uuguguuguaauuc

SEQ ID NO: 3781823 - RNA, 13 nt, Human
uuguguugugaau

SEQ ID NO: 3781824 - RNA, 16 nt, Human
uuguguuuauucuuga

SEQ ID NO: 3781825 - RNA, 19 nt, Human
uuguguuucuuuaguuuuu

SEQ ID NO: 3781826 - RNA, 21 nt, Human
uuguguuuuuuaagauagugu

SEQ ID NO: 3781827 - RNA, 23 nt, Human
uuguuaaaaaaaaaaagauugua

SEQ ID NO: 3781828 - RNA, 20 nt, Human
uuguuaaaauuaugaaucug

SEQ ID NO: 3781829 - RNA, 12 nt, Human
uuguuaaauuuu

SEQ ID NO: 3781830 - RNA, 18 nt, Human
uuguuaacucuugucuau

SEQ ID NO: 3781831 - RNA, 22 nt, Human
uuguuaacucuugucuauuuuu

SEQ ID NO: 3781832 - RNA, 18 nt, Human
uuguuaauacaagguaua

SEQ ID NO: 3781833 - RNA, 23 nt, Human
uuuaaauguguacaauguacaca

SEQ ID NO: 3781834 - RNA, 20 nt, Human
uuuaaauuaauaucuuucug

SEQ ID NO: 3781835 - RNA, 22 nt, Human
uuuaaauuagauaacaaaauuu

SEQ ID NO: 3781836 - RNA, 16 nt, Human
uuuaaauuauaaggac

SEQ ID NO: 3781837 - RNA, 21 nt, Human
uuuaaauuauaaggacugcau

SEQ ID NO: 3781838 - RNA, 22 nt, Human
uuuaaauuauaaggacugcaug

SEQ ID NO: 3781839 - RNA, 14 nt, Human
uuuaaauucugaga

SEQ ID NO: 3781840 - RNA, 22 nt, Human
uuuaaauuuuacccuuuagacu

SEQ ID NO: 3781841 - RNA, 22 nt, Human
uuuaaauuuucuucaguuggug

SEQ ID NO: 3781842 - RNA, 15 nt, Human
uuuaacaaaagcaag

SEQ ID NO: 3781843 - RNA, 14 nt, Human
uuuaacaacauguu

SEQ ID NO: 3781844 - RNA, 12 nt, Human
uuuaacaagaag

SEQ ID NO: 3781845 - RNA, 21 nt, Human
uuuaacaagaagaugaauggc

SEQ ID NO: 3781846 - RNA, 21 nt, Human
uuuaacaauaacuacuguguu

SEQ ID NO: 3781847 - RNA, 14 nt, Human
uuuaacaaugcgaa

SEQ ID NO: 3781848 - RNA, 20 nt, Human
uuuaacaaugcgaaugguag

SEQ ID NO: 3781849 - RNA, 17 nt, Human
uuuaacaccugaugugu

SEQ ID NO: 3781850 - RNA, 21 nt, Human
uuuaacaccugauguguacau

SEQ ID NO: 3781851 - RNA, 13 nt, Human
uuuaacagaaaug

SEQ ID NO: 3781852 - RNA, 15 nt, Human
uuuaacagaaaugua

SEQ ID NO: 3781853 - RNA, 19 nt, Human
uuuaacagaaauuguauau

SEQ ID NO: 3781854 - RNA, 17 nt, Human
uuuaacagcugaauuau

SEQ ID NO: 3781855 - RNA, 14 nt, Human
uuuaacagggucuc

SEQ ID NO: 3781856 - RNA, 16 nt, Human
uuuaacagucauuuaa

SEQ ID NO: 3781857 - RNA, 17 nt, Human
uuuaacagucauuuaaa

SEQ ID NO: 3781858 - RNA, 22 nt, Human
uuuaacauaaagguuauuuucu

SEQ ID NO: 3781859 - RNA, 14 nt, Human
uuuaacauaagcua

SEQ ID NO: 3781860 - RNA, 18 nt, Human
uuuaacauaagcuauuuu

SEQ ID NO: 3781861 - RNA, 19 nt, Human
uuuaacauaagcuauuuuu

SEQ ID NO: 3781862 - RNA, 13 nt, Human
uuuaacauuccuc

SEQ ID NO: 3781863 - RNA, 22 nt, Human
uuuaacauuccucaugaaugua

SEQ ID NO: 3781864 - RNA, 23 nt, Human
uuuaacauuccucaugaauguaa

SEQ ID NO: 3781865 - RNA, 21 nt, Human
uuuaacauuugccuugcagaa

SEQ ID NO: 3781866 - RNA, 19 nt, Human
uuuaaccaaaacaugucuc

SEQ ID NO: 3781867 - RNA, 12 nt, Human
uuuaaccaaagg

SEQ ID NO: 3781868 - RNA, 23 nt, Human
uuuaaccaaaggugaaggaauau

SEQ ID NO: 3781869 - RNA, 21 nt, Human
uuuaaccauggugcuuguuaa

SEQ ID NO: 3781870 - RNA, 20 nt, Human
uuuaaccauuaaaacugaag

SEQ ID NO: 3781871 - RNA, 22 nt, Human
uuuaaccauugucuuguucugu

SEQ ID NO: 3781872 - RNA, 17 nt, Human
uuuaaccucuuuaagua

SEQ ID NO: 3781873 - RNA, 16 nt, Human
uuuaacuaugaacuga

SEQ ID NO: 3781874 - RNA, 23 nt, Human
uuuaacucagaucacuacugcag

SEQ ID NO: 3781875 - RNA, 19 nt, Human
uuuaacucaggacuccagc

SEQ ID NO: 3781876 - RNA, 20 nt, Human
uuuaacucccauuaccaugu

SEQ ID NO: 3781877 - RNA, 18 nt, Human
uuuaacuccucaauucca

SEQ ID NO: 3781878 - RNA, 12 nt, Human
uuuaacucuguc

SEQ ID NO: 3781879 - RNA, 14 nt, Human
uuuaacugagaaau

SEQ ID NO: 3781880 - RNA, 21 nt, Human
uuuaacugccguaauuuaacu

SEQ ID NO: 3781881 - RNA, 19 nt, Human
uuuaacuggugcacuuugu

SEQ ID NO: 3781882 - RNA, 13 nt, Human
uuuaacuguggau

SEQ ID NO: 3781883 - RNA, 12 nt, Human
uuuaacuugagc

SEQ ID NO: 3781884 - RNA, 18 nt, Human
uuuaacuuuaaguuucag

SEQ ID NO: 3781885 - RNA, 23 nt, Human
uuuaacuuuaccaugcucaauga

SEQ ID NO: 3781886 - RNA, 19 nt, Human
uuuaacuuuaucacauuau

SEQ ID NO: 3781887 - RNA, 19 nt, Human
uuuaagaaaagcccugaga

SEQ ID NO: 3781888 - RNA, 15 nt, Human
uuuaagaauugagua

SEQ ID NO: 3781889 - RNA, 20 nt, Human
uuuaagacgaaacauuuguu

SEQ ID NO: 3781890 - RNA, 13 nt, Human
uuuaagagagaaa

SEQ ID NO: 3781891 - RNA, 14 nt, Human
uuuaagauaauuau

SEQ ID NO: 3781892 - RNA, 15 nt, Human
uuuaagauaauuaua

SEQ ID NO: 3781893 - RNA, 14 nt, Human
uuuaagauagugua

SEQ ID NO: 3781894 - RNA, 13 nt, Human
uuuaagaugugaa

SEQ ID NO: 3781895 - RNA, 11 nt, Human
uuuaagauuua

SEQ ID NO: 3781896 - RNA, 17 nt, Human
uuuaagcaacaucuuuu

SEQ ID NO: 3781897 - RNA, 13 nt, Human
uuuaagcagcucu

SEQ ID NO: 3781898 - RNA, 15 nt, Human
uuuaagcauuacucu

SEQ ID NO: 3781899 - RNA, 16 nt, Human
uuuaagcauuacucuu

SEQ ID NO: 3781900 - RNA, 23 nt, Human
uuuaagcauuguuugcuuauugu

SEQ ID NO: 3781901 - RNA, 18 nt, Human
uuuaagccaaaacaaugu

SEQ ID NO: 3781902 - RNA, 21 nt, Human
uuuaagccuaaagauuuugau

SEQ ID NO: 3781903 - RNA, 19 nt, Human
uuuaagccucauauuuaaa

SEQ ID NO: 3781904 - RNA, 18 nt, Human
uuuaagccuuuguugaac

SEQ ID NO: 3781905 - RNA, 23 nt, Human
uuuaagccuuuguugaacuguua

SEQ ID NO: 3781906 - RNA, 18 nt, Human
uuuaagcucugagcuguc

SEQ ID NO: 3781907 - RNA, 14 nt, Human
uuuaagcuucaguu

SEQ ID NO: 3781908 - RNA, 21 nt, Human
uuuaagcuucaguugcuuguc

SEQ ID NO: 3781909 - RNA, 12 nt, Human
uuuaaggaauau

SEQ ID NO: 3781910 - RNA, 15 nt, Human
uuuaaggauaaauuu

SEQ ID NO: 3781911 - RNA, 20 nt, Human
uuuaaggaugcuuguacaua

SEQ ID NO: 3781912 - RNA, 21 nt, Human
uuuaaggaugcuuguacauaa

SEQ ID NO: 3781913 - RNA, 22 nt, Human
uuuaaggaugcuuguacauaau

SEQ ID NO: 3781914 - RNA, 20 nt, Human
uuuaaggaugggguuaugaa

SEQ ID NO: 3781915 - RNA, 20 nt, Human
uuuaagggcccuuuuucaau

SEQ ID NO: 3781916 - RNA, 22 nt, Human
uuuaaggguuuguggaaaauga

SEQ ID NO: 3781917 - RNA, 17 nt, Human
uuuaaggucuguuugcu

SEQ ID NO: 3781918 - RNA, 16 nt, Human
uuuaagguuuuuacug

SEQ ID NO: 3781919 - RNA, 13 nt, Human
uuuaaguauuuau

SEQ ID NO: 3781920 - RNA, 20 nt, Human
uuuaagucaguauggucuaa

SEQ ID NO: 3781921 - RNA, 18 nt, Human
uuuaagugcguguguaga

SEQ ID NO: 3781922 - RNA, 18 nt, Human
uuuaagugcuuuguaaug

SEQ ID NO: 3781923 - RNA, 20 nt, Human
uuuaaguguuguaaauauuu

SEQ ID NO: 3781924 - RNA, 19 nt, Human
uuuaaguucuuaugaggag

SEQ ID NO: 3781925 - RNA, 22 nt, Human
uuuaaguuucaaacuuacuauu

SEQ ID NO: 3781926 - RNA, 18 nt, Human
uuuaaguuuugacaagcu

SEQ ID NO: 3781927 - RNA, 21 nt, Human
uuucuuaacuucuugcuucuu

SEQ ID NO: 3781928 - RNA, 13 nt, Human
uuucuuaauauau

SEQ ID NO: 3781929 - RNA, 22 nt, Human
uuucuuaauauauagcauuuau

SEQ ID NO: 3781930 - RNA, 21 nt, Human
uuucuuaaucauuuuuuauau

SEQ ID NO: 3781931 - RNA, 22 nt, Human
uuucuuacaggcacaaaaugau

SEQ ID NO: 3781932 - RNA, 15 nt, Human
uuucuuacuccuccu

SEQ ID NO: 3781933 - RNA, 20 nt, Human
uuucuuacugauuuuuaagu

SEQ ID NO: 3781934 - RNA, 12 nt, Human
uuucuuagcuuu

SEQ ID NO: 3781935 - RNA, 19 nt, Human
uuucuuagcuuuuuaauug

SEQ ID NO: 3781936 - RNA, 17 nt, Human
uuucuuaucuucugcaa

SEQ ID NO: 3781937 - RNA, 13 nt, Human
uuucuuaugugac

SEQ ID NO: 3781938 - RNA, 17 nt, Human
uuucuuaugugacauua

SEQ ID NO: 3781939 - RNA, 12 nt, Human
uuucccuggucc

SEQ ID NO: 3781940 - RNA, 14 nt, Human
uuucccuuaucaaa

SEQ ID NO: 3781941 - RNA, 16 nt, Human
uuucccuucaguaccc

SEQ ID NO: 3781942 - RNA, 20 nt, Human
uuucccuucaguacccucuc

SEQ ID NO: 3781943 - RNA, 13 nt, Human
uuucccuuccagu

SEQ ID NO: 3781944 - RNA, 15 nt, Human
uuucccuugaggaaa

SEQ ID NO: 3781945 - RNA, 18 nt, Human
uuucccuuuagcuguguu

SEQ ID NO: 3781946 - RNA, 19 nt, Human
uuucccuuuagcuguguua

SEQ ID NO: 3781947 - RNA, 22 nt, Human
uuuccguaauaacacccuuccu

SEQ ID NO: 3781948 - RNA, 15 nt, Human
uuuccguuaaaauac

SEQ ID NO: 3781949 - RNA, 23 nt, Human
uuuccguuugauuugucacugcu

SEQ ID NO: 3781950 - RNA, 20 nt, Human
uuuccuaaauauauuuuaag

SEQ ID NO: 3781951 - RNA, 17 nt, Human
uuuccuaaaugcaguga

SEQ ID NO: 3781952 - RNA, 14 nt, Human
uuuccuaaauguuu

SEQ ID NO: 3781953 - RNA, 19 nt, Human
uuuccuaagugauuguaug

SEQ ID NO: 3781954 - RNA, 21 nt, Human
uuuccuacuugcacucuucua

SEQ ID NO: 3781955 - RNA, 18 nt, Human
uuuccuagcacacacuuu

SEQ ID NO: 3781956 - RNA, 14 nt, Human
uuuccuaugaugua

SEQ ID NO: 3781957 - RNA, 18 nt, Human
uuuccuaugauguauacu

SEQ ID NO: 3781958 - RNA, 15 nt, Human
uuuccuaugcuauug

SEQ ID NO: 3781959 - RNA, 15 nt, Human
uuuccuaugcuuuga

SEQ ID NO: 3781960 - RNA, 16 nt, Human
uuuccuauuucagugu

SEQ ID NO: 3781961 - RNA, 11 nt, Human
uuuccucagug

SEQ ID NO: 3781962 - RNA, 14 nt, Human
uuuccucaucuguc

SEQ ID NO: 3781963 - RNA, 19 nt, Human
uuuccucauuccugaaaga

SEQ ID NO: 3781964 - RNA, 15 nt, Human
uuuccucccuugggu

SEQ ID NO: 3781965 - RNA, 22 nt, Human
uuuccucccuuggguucugaua

SEQ ID NO: 3781966 - RNA, 18 nt, Human
uuuccuccucaggcacac

SEQ ID NO: 3781967 - RNA, 12 nt, Human
uuuccuccucug

SEQ ID NO: 3781968 - RNA, 21 nt, Human
uuuccuccugaggcuuuggau

SEQ ID NO: 3781969 - RNA, 22 nt, Human
uuuccucuauacaucucucccc

SEQ ID NO: 3781970 - RNA, 20 nt, Human
uuuccucuauugauguacag

SEQ ID NO: 3781971 - RNA, 14 nt, Human
uuuccucuccacac

SEQ ID NO: 3781972 - RNA, 19 nt, Human
uuuccucucuuuguucuca

SEQ ID NO: 3781973 - RNA, 23 nt, Human
uuuccucucuuuguucucagcuc

SEQ ID NO: 3781974 - RNA, 23 nt, Human
uuuccucugaggaugauguacuu

SEQ ID NO: 3781975 - RNA, 23 nt, Human
uuuccucuguucaaagcugccug

SEQ ID NO: 3781976 - RNA, 15 nt, Human
uuuccucuuccaaag

SEQ ID NO: 3781977 - RNA, 12 nt, Human
uuuccucuugaa

SEQ ID NO: 3781978 - RNA, 13 nt, Human
uuuccucuuguga

SEQ ID NO: 3781979 - RNA, 22 nt, Human
uuuccugagcuuggccagaagg

SEQ ID NO: 3781980 - RNA, 16 nt, Human
uuuccugaggcugggc

SEQ ID NO: 3781981 - RNA, 23 nt, Human
uuuccugccuuuuaguuccugug

SEQ ID NO: 3781982 - RNA, 19 nt, Human
uuuccuggaauugccagcu

SEQ ID NO: 3781983 - RNA, 20 nt, Human
uuuccuggacacucagaccu

SEQ ID NO: 3781984 - RNA, 16 nt, Human
uuuccuggaugucuga

SEQ ID NO: 3781985 - RNA, 23 nt, Human
uuuccuggcacugcuuccaguga

SEQ ID NO: 3781986 - RNA, 23 nt, Human
uuuccuggcacuggaccccagca

SEQ ID NO: 3781987 - RNA, 19 nt, Human
uuuccugggacaucuucug

SEQ ID NO: 3781988 - RNA, 12 nt, Human
uuuccuguccuc

SEQ ID NO: 3781989 - RNA, 12 nt, Human
uuuccugugucu

SEQ ID NO: 3781990 - RNA, 15 nt, Human
uuuccuguuugggaa

SEQ ID NO: 3781991 - RNA, 16 nt, Human
uuuccuuaaacugugu

SEQ ID NO: 3781992 - RNA, 17 nt, Human
uuuccuuacauaaacau

SEQ ID NO: 3781993 - RNA, 20 nt, Human
uuuccuucaagaaugcagua

SEQ ID NO: 3781994 - RNA, 18 nt, Human
uuuccuucagugccuuau

SEQ ID NO: 3781995 - RNA, 16 nt, Human
uuuccuuccagcccag

SEQ ID NO: 3781996 - RNA, 19 nt, Human
uuuccuuccaucccuaccc

SEQ ID NO: 3781997 - RNA, 19 nt, Human
uuuccuucccuuuucuguu

SEQ ID NO: 3781998 - RNA, 20 nt, Human
uuuccuucccuuuucuguuc

SEQ ID NO: 3781999 - RNA, 16 nt, Human
uuuccuuccuucccug

SEQ ID NO: 3782000 - RNA, 18 nt, Human
uuuccuuccuucccuggc

SEQ ID NO: 3782001 - RNA, 12 nt, Human
uuuccuucuuug

SEQ ID NO: 3782002 - RNA, 14 nt, Human
uuuccuugaagccg

SEQ ID NO: 3782003 - RNA, 16 nt, Human
uuuccuuggcuggugc

SEQ ID NO: 3782004 - RNA, 18 nt, Human
uuuccuuggggcaggcag

SEQ ID NO: 3782005 - RNA, 13 nt, Human
uuuccuugugcaa

SEQ ID NO: 3782006 - RNA, 23 nt, Human
uuuccuuuaaaaaaauuuaagug

SEQ ID NO: 3782007 - RNA, 19 nt, Human
uuuccuuuauauuuaguga

SEQ ID NO: 3782008 - RNA, 21 nt, Human
uuuccuuuaugugaauuuuua

SEQ ID NO: 3782009 - RNA, 23 nt, Human
uuuccuuuaugugaauuuuuaag

SEQ ID NO: 3782010 - RNA, 16 nt, Human
uuuccuuuccccagcc

SEQ ID NO: 3782011 - RNA, 17 nt, Human
uuuccuuuccccagccc

SEQ ID NO: 3782012 - RNA, 20 nt, Human
uuuccuuuccccagcccagg

SEQ ID NO: 3782013 - RNA, 9 nt, Human
uuuccuuug

SEQ ID NO: 3782014 - RNA, 21 nt, Human
uuuccuuuuaaaacacuucca

SEQ ID NO: 3782015 - RNA, 21 nt, Human
uuuccuuuucuauuccuucug

SEQ ID NO: 3782016 - RNA, 16 nt, Human
uuuccuuuuugacacu

SEQ ID NO: 3782017 - RNA, 18 nt, Human
uuuccuuuuuuauacaca

SEQ ID NO: 3782018 - RNA, 13 nt, Human
uuucgauaaacaa

SEQ ID NO: 3782019 - RNA, 15 nt, Human
uuucgauguuuuuga

SEQ ID NO: 3782020 - RNA, 13 nt, Human
uuucgccuuuccu

SEQ ID NO: 3782021 - RNA, 14 nt, Human
uuucguaugaaaau

SEQ ID NO: 3782022 - RNA, 19 nt, Human
uuucguccacagcuuccug

SEQ ID NO: 3782023 - RNA, 13 nt, Human
uuucguggggagg

SEQ ID NO: 3782024 - RNA, 21 nt, Human
uuucgugggucuguuuuccuu

SEQ ID NO: 3782025 - RNA, 13 nt, Human
uuucguucaguua

SEQ ID NO: 3782026 - RNA, 15 nt, Human
uuucuaaaacuaaau

SEQ ID NO: 3782027 - RNA, 12 nt, Human
uuucuaaaagaa

SEQ ID NO: 3782028 - RNA, 20 nt, Human
uuucuaaaagaauauucaga

SEQ ID NO: 3782029 - RNA, 19 nt, Human
uuucuaaaagcuuucaugu

SEQ ID NO: 3782030 - RNA, 22 nt, Human
uuucuaaacguaagcacuguuu

SEQ ID NO: 3782031 - RNA, 16 nt, Human
uuucuaaacuggagac

SEQ ID NO: 3782032 - RNA, 19 nt, Human
uuucuaaacuggagacugu

SEQ ID NO: 3782033 - RNA, 14 nt, Human
uuucuaaaggcuac

SEQ ID NO: 3782034 - RNA, 15 nt, Human
uuucuaaccaagagg

SEQ ID NO: 3782035 - RNA, 19 nt, Human
uuucuaaccaagaggcugg

SEQ ID NO: 3782036 - RNA, 13 nt, Human
uuucuaaccuuga

SEQ ID NO: 3782037 - RNA, 20 nt, Human
uuucuaacuacaaagguuua

SEQ ID NO: 3782038 - RNA, 16 nt, Human
uuucuaacucugaugu

SEQ ID NO: 3782039 - RNA, 13 nt, Human
uuucuaagagaag

SEQ ID NO: 3782040 - RNA, 13 nt, Human
uuucuaaucaaaa

SEQ ID NO: 3782041 - RNA, 14 nt, Human
uuucuaaugagaua

SEQ ID NO: 3782042 - RNA, 19 nt, Human
uuucuaaugaggagagaaa

SEQ ID NO: 3782043 - RNA, 15 nt, Human
uuucuaaugugugaa

SEQ ID NO: 3782044 - RNA, 14 nt, Human
uuucuaauuaugua

SEQ ID NO: 3782045 - RNA, 17 nt, Human
uuucuaauuauguagcu

SEQ ID NO: 3782046 - RNA, 13 nt, Human
uuucuaauugcuu

SEQ ID NO: 3782047 - RNA, 14 nt, Human
uuucuaauugcuua

SEQ ID NO: 3782048 - RNA, 23 nt, Human
uuucuaauugcuuauuuauugua

SEQ ID NO: 3782049 - RNA, 20 nt, Human
uuucuacaaauaauuuuagu

SEQ ID NO: 3782050 - RNA, 17 nt, Human
uuucuacaaugugaacu

SEQ ID NO: 3782051 - RNA, 21 nt, Human
uuucuacaaugugaacuuuau

SEQ ID NO: 3782052 - RNA, 20 nt, Human
uuucuacacuguauuacaua

SEQ ID NO: 3782053 - RNA, 22 nt, Human
uuucuacagcaaauuuauaauu

SEQ ID NO: 3782054 - RNA, 23 nt, Human
uuucuacagcaaauuuauaauuu

SEQ ID NO: 3782055 - RNA, 18 nt, Human
uuucuacaguauuaugua

SEQ ID NO: 3782056 - RNA, 19 nt, Human
uuucuacagugguuuuaua

SEQ ID NO: 3782057 - RNA, 15 nt, Human
uuucuacccagcgag

SEQ ID NO: 3782058 - RNA, 17 nt, Human
uuucuacccuagccauu

SEQ ID NO: 3782059 - RNA, 23 nt, Human
uuucuacucgaguuacagacaaa

SEQ ID NO: 3782060 - RNA, 18 nt, Human
uuucuacuuugaagucau

SEQ ID NO: 3782061 - RNA, 19 nt, Human
uuucuagaauuauuuuuca

SEQ ID NO: 3782062 - RNA, 21 nt, Human
uuucuagaauuuaucacacuu

SEQ ID NO: 3782063 - RNA, 21 nt, Human
uuucuagacuauaaauguugc

SEQ ID NO: 3782064 - RNA, 16 nt, Human
uuucuagagcacugcc

SEQ ID NO: 3782065 - RNA, 15 nt, Human
uuucuagauacaaua

SEQ ID NO: 3782066 - RNA, 17 nt, Human
uuucuagauacaauaaa

SEQ ID NO: 3782067 - RNA, 20 nt, Human
uuucuagauacaauaaauug

SEQ ID NO: 3782068 - RNA, 20 nt, Human
uuucuagcccgaauacaaac

SEQ ID NO: 3782069 - RNA, 14 nt, Human
uuucuaggaagaau

SEQ ID NO: 3782070 - RNA, 22 nt, Human
uuucuaggaagaauuuuaaaaa

SEQ ID NO: 3782071 - RNA, 16 nt, Human
uuucuaggacugaauu

SEQ ID NO: 3782072 - RNA, 15 nt, Human
uuucuagggaaauga

SEQ ID NO: 3782073 - RNA, 18 nt, Human
uuucuagggaaaugaaag

SEQ ID NO: 3782074 - RNA, 17 nt, Human
uuucuagguaggaaaug

SEQ ID NO: 3782075 - RNA, 15 nt, Human
uuucuaguccaaaau

SEQ ID NO: 3782076 - RNA, 14 nt, Human
uuucuaguggucuu

SEQ ID NO: 3782077 - RNA, 18 nt, Human
uuucuaguggucuuugua

SEQ ID NO: 3782078 - RNA, 23 nt, Human
uuucuaguggucuuuguaagagu

SEQ ID NO: 3782079 - RNA, 16 nt, Human
uuucuaguguaucaaa

SEQ ID NO: 3782080 - RNA, 14 nt, Human
uuucuaguugagga

SEQ ID NO: 3782081 - RNA, 15 nt, Human
uuucuauaacagaua

SEQ ID NO: 3782082 - RNA, 13 nt, Human
uuucuauauuuuc

SEQ ID NO: 3782083 - RNA, 14 nt, Human
uuugccaugugcuu

SEQ ID NO: 3782084 - RNA, 21 nt, Human
uuugcccaacaccagccccug

SEQ ID NO: 3782085 - RNA, 13 nt, Human
uuugcccauuuug

SEQ ID NO: 3782086 - RNA, 22 nt, Human
uuugcccccaaacccccauucu

SEQ ID NO: 3782087 - RNA, 21 nt, Human
uuugcccugguagggcaguaa

SEQ ID NO: 3782088 - RNA, 15 nt, Human
uuugcccuuaaggac

SEQ ID NO: 3782089 - RNA, 23 nt, Human
uuugcccuuuacuugucuuucug

SEQ ID NO: 3782090 - RNA, 22 nt, Human
uuugccuccagaagcacuggga

SEQ ID NO: 3782091 - RNA, 21 nt, Human
uuugccuccuguguacugugu

SEQ ID NO: 3782092 - RNA, 17 nt, Human
uuugccucuuccagucu

SEQ ID NO: 3782093 - RNA, 21 nt, Human
uuugccuguaacaagccagau

SEQ ID NO: 3782094 - RNA, 11 nt, Human
uuugccugugc

SEQ ID NO: 3782095 - RNA, 14 nt, Human
uuugccuguucagu

SEQ ID NO: 3782096 - RNA, 15 nt, Human
uuugccuguucaguu

SEQ ID NO: 3782097 - RNA, 16 nt, Human
uuugccuguucaguua

SEQ ID NO: 3782098 - RNA, 14 nt, Human
uuugccuugcagaa

SEQ ID NO: 3782099 - RNA, 19 nt, Human
uuugccuugcagaacugcc

SEQ ID NO: 3782100 - RNA, 15 nt, Human
uuugcgcuccuggcc

SEQ ID NO: 3782101 - RNA, 19 nt, Human
uuugcuaagcauuccaacu

SEQ ID NO: 3782102 - RNA, 14 nt, Human
uuugcuaauuaaaa

SEQ ID NO: 3782103 - RNA, 20 nt, Human
uuugcuagcaguaaaagaug

SEQ ID NO: 3782104 - RNA, 16 nt, Human
uuugcuaucugggcug

SEQ ID NO: 3782105 - RNA, 19 nt, Human
uuugcuaugagcuggggau

SEQ ID NO: 3782106 - RNA, 16 nt, Human
uuugcuauuguaaaua

SEQ ID NO: 3782107 - RNA, 19 nt, Human
uuugcucagaacacauucu

SEQ ID NO: 3782108 - RNA, 18 nt, Human
uuugcucagcuucuccaa

SEQ ID NO: 3782109 - RNA, 23 nt, Human
uuugcucagugucuggcugcaga

SEQ ID NO: 3782110 - RNA, 16 nt, Human
uuugcucauauuuccc

SEQ ID NO: 3782111 - RNA, 13 nt, Human
uuugcucauggaa

SEQ ID NO: 3782112 - RNA, 19 nt, Human
uuugcuccaccccacucac

SEQ ID NO: 3782113 - RNA, 19 nt, Human
uuugcucuaaaauauuuau

SEQ ID NO: 3782114 - RNA, 21 nt, Human
uuugcucuucagaugccacuu

SEQ ID NO: 3782115 - RNA, 17 nt, Human
uuugcucuuguuuuuau

SEQ ID NO: 3782116 - RNA, 13 nt, Human
uuugcucuuucuu

SEQ ID NO: 3782117 - RNA, 17 nt, Human
uuugcugacccucccca

SEQ ID NO: 3782118 - RNA, 21 nt, Human
uuugcugacccuccccaaagg

SEQ ID NO: 3782119 - RNA, 19 nt, Human
uuugcugagcauguacuga

SEQ ID NO: 3782120 - RNA, 21 nt, Human
uuugcugauuuccccucuucc

SEQ ID NO: 3782121 - RNA, 10 nt, Human
uuugcugcca

SEQ ID NO: 3782122 - RNA, 12 nt, Human
uuugcugggaga

SEQ ID NO: 3782123 - RNA, 19 nt, Human
uuugcuggggccgaaagaa

SEQ ID NO: 3782124 - RNA, 13 nt, Human
uuugcuguagaag

SEQ ID NO: 3782125 - RNA, 23 nt, Human
uuugcugucccauagucccugcc

SEQ ID NO: 3782126 - RNA, 16 nt, Human
uuugcugucccuuuuc

SEQ ID NO: 3782127 - RNA, 17 nt, Human
uuugcugugaggcuguc

SEQ ID NO: 3782128 - RNA, 19 nt, Human
uuugcugugaggcuguccu

SEQ ID NO: 3782129 - RNA, 21 nt, Human
uuugcugugaggcuguccugu

SEQ ID NO: 3782130 - RNA, 21 nt, Human
uuugcuguuuuaaacauuaau

SEQ ID NO: 3782131 - RNA, 12 nt, Human
uuugcuuagaaa

SEQ ID NO: 3782132 - RNA, 15 nt, Human
uuugcuucaaaaaca

SEQ ID NO: 3782133 - RNA, 19 nt, Human
uuugcuucaugugucccag

SEQ ID NO: 3782134 - RNA, 20 nt, Human
uuugcuucauuguacuaccu

SEQ ID NO: 3782135 - RNA, 14 nt, Human
uuugcuucuagagc

SEQ ID NO: 3782136 - RNA, 16 nt, Human
uuugcuucucucucua

SEQ ID NO: 3782137 - RNA, 19 nt, Human
uuugcuugcucauaugcau

SEQ ID NO: 3782138 - RNA, 15 nt, Human
uuugcuuucugcuca

SEQ ID NO: 3782139 - RNA, 14 nt, Human
uuugcuuuuucuga

SEQ ID NO: 3782140 - RNA, 13 nt, Human
uuuggaaacuaau

SEQ ID NO: 3782141 - RNA, 15 nt, Human
uuuggaaacuaauaa

SEQ ID NO: 3782142 - RNA, 17 nt, Human
uuuggaaacuaauaaaa

SEQ ID NO: 3782143 - RNA, 15 nt, Human
uuuggaaaguacacu

SEQ ID NO: 3782144 - RNA, 20 nt, Human
uuuggaaaguacacucugcu

SEQ ID NO: 3782145 - RNA, 21 nt, Human
uuuggaaaguacacucugcug

SEQ ID NO: 3782146 - RNA, 15 nt, Human
uuuggaaaucucuuu

SEQ ID NO: 3782147 - RNA, 16 nt, Human
uuuggaaaucuuuaaa

SEQ ID NO: 3782148 - RNA, 21 nt, Human
uuuggaacagugcuacugaaa

SEQ ID NO: 3782149 - RNA, 21 nt, Human
uuuggaaccagacucuugccu

SEQ ID NO: 3782150 - RNA, 18 nt, Human
uuuggaacccuaaauaau

SEQ ID NO: 3782151 - RNA, 12 nt, Human
uuuggaagaagg

SEQ ID NO: 3782152 - RNA, 11 nt, Human
uuuggaaggag

SEQ ID NO: 3782153 - RNA, 14 nt, Human
uuuggaaguuuuca

SEQ ID NO: 3782154 - RNA, 15 nt, Human
uuuggaauacuuuuu

SEQ ID NO: 3782155 - RNA, 17 nt, Human
uuuggaauacuuuuugu

SEQ ID NO: 3782156 - RNA, 15 nt, Human
uuuggaauauuaaaa

SEQ ID NO: 3782157 - RNA, 14 nt, Human
uuuggaaucuagaa

SEQ ID NO: 3782158 - RNA, 20 nt, Human
uuuggaaucuagaagaaaug

SEQ ID NO: 3782159 - RNA, 19 nt, Human
uuuggacaaaauggaauac

SEQ ID NO: 3782160 - RNA, 17 nt, Human
uuuggacacacacagcu

SEQ ID NO: 3782161 - RNA, 16 nt, Human
uuuggaccccagcugg

SEQ ID NO: 3782162 - RNA, 15 nt, Human
uuuggacccugaggc

SEQ ID NO: 3782163 - RNA, 16 nt, Human
uuuggacuguuuuguu

SEQ ID NO: 3782164 - RNA, 21 nt, Human
uuuggacuuuguauacuuuaa

SEQ ID NO: 3782165 - RNA, 15 nt, Human
uuuggacuuuguuac

SEQ ID NO: 3782166 - RNA, 15 nt, Human
uuuggagacuuucuu

SEQ ID NO: 3782167 - RNA, 18 nt, Human
uuuggagaguuuccugaa

SEQ ID NO: 3782168 - RNA, 17 nt, Human
uuuggagguuuauuacg

SEQ ID NO: 3782169 - RNA, 17 nt, Human
uuuggaguccccucacc

SEQ ID NO: 3782170 - RNA, 20 nt, Human
uuuggauauaggucagugag

SEQ ID NO: 3782171 - RNA, 15 nt, Human
uuuggaucuugaaug

SEQ ID NO: 3782172 - RNA, 10 nt, Human
uuuggaugcc

SEQ ID NO: 3782173 - RNA, 19 nt, Human
uuuggaugggagugagaca

SEQ ID NO: 3782174 - RNA, 21 nt, Human
uuuggaugggagugagacaga

SEQ ID NO: 3782175 - RNA, 14 nt, Human
uuuggauuaaauua

SEQ ID NO: 3782176 - RNA, 18 nt, Human
uuuggauuauucuuucuc

SEQ ID NO: 3782177 - RNA, 18 nt, Human
uuuggauucuaaauacau

SEQ ID NO: 3782178 - RNA, 14 nt, Human
uuuggauuguauau

SEQ ID NO: 3782179 - RNA, 18 nt, Human
uuuggauuuuuaauuaaa

SEQ ID NO: 3782180 - RNA, 17 nt, Human
uuuggcaaugccaucau

SEQ ID NO: 3782181 - RNA, 14 nt, Human
uuuggcacucugac

SEQ ID NO: 3782182 - RNA, 15 nt, Human
uuuggcacucugacu

SEQ ID NO: 3782183 - RNA, 17 nt, Human
uuuggcacuggggcacu

SEQ ID NO: 3782184 - RNA, 23 nt, Human
uuuggcauguaaauguaaacuca

SEQ ID NO: 3782185 - RNA, 13 nt, Human
uuuggcauuugca

SEQ ID NO: 3782186 - RNA, 14 nt, Human
uuuggccagaaguc

SEQ ID NO: 3782187 - RNA, 23 nt, Human
uuuggccaucucuggaugccuga

SEQ ID NO: 3782188 - RNA, 12 nt, Human
uuuggcccaggg

SEQ ID NO: 3782189 - RNA, 12 nt, Human
uuuggcccccga

SEQ ID NO: 3782190 - RNA, 19 nt, Human
uuuggcgggccaaggacug

SEQ ID NO: 3782191 - RNA, 13 nt, Human
uuugguguguucc

SEQ ID NO: 3782192 - RNA, 19 nt, Human
uuugguuaaguuggcuucu

SEQ ID NO: 3782193 - RNA, 20 nt, Human
uuugguuaugaauacuuugc

SEQ ID NO: 3782194 - RNA, 13 nt, Human
uuugguucccuuc

SEQ ID NO: 3782195 - RNA, 13 nt, Human
uuugguuccucuc

SEQ ID NO: 3782196 - RNA, 11 nt, Human
uuugguucuaa

SEQ ID NO: 3782197 - RNA, 13 nt, Human
uuugguucuaagg

SEQ ID NO: 3782198 - RNA, 13 nt, Human
uuugguucuaaua

SEQ ID NO: 3782199 - RNA, 14 nt, Human
uuugguucuggggc

SEQ ID NO: 3782200 - RNA, 15 nt, Human
uuugguugaauaaac

SEQ ID NO: 3782201 - RNA, 17 nt, Human
uuugguugaauaaacua

SEQ ID NO: 3782202 - RNA, 18 nt, Human
uuugguuguauucuuuga

SEQ ID NO: 3782203 - RNA, 14 nt, Human
uuugguuuacauuu

SEQ ID NO: 3782204 - RNA, 19 nt, Human
uuugguuucccaagagcua

SEQ ID NO: 3782205 - RNA, 13 nt, Human
uuugguuucuagc

SEQ ID NO: 3782206 - RNA, 18 nt, Human
uuugguuuuaaaauacug

SEQ ID NO: 3782207 - RNA, 22 nt, Human
uuugguuuuaaaauacuguaga

SEQ ID NO: 3782208 - RNA, 22 nt, Human
uuuguaaaaacagcauugcuuu

SEQ ID NO: 3782209 - RNA, 13 nt, Human
uuuguaaaaugua

SEQ ID NO: 3782210 - RNA, 14 nt, Human
uuuguaaacauuua

SEQ ID NO: 3782211 - RNA, 16 nt, Human
uuuguaaacucaaaau

SEQ ID NO: 3782212 - RNA, 16 nt, Human
uuuguaaacuggaauu

SEQ ID NO: 3782213 - RNA, 15 nt, Human
uuuguaaacuuugaa

SEQ ID NO: 3782214 - RNA, 17 nt, Human
uuuguaaagaaaaauau

SEQ ID NO: 3782215 - RNA, 18 nt, Human
uuuguaaagauuucuguu

SEQ ID NO: 3782216 - RNA, 22 nt, Human
uuuguaaaguguggucccaaca

SEQ ID NO: 3782217 - RNA, 21 nt, Human
uuuguaaaguugguuggauaa

SEQ ID NO: 3782218 - RNA, 14 nt, Human
uuuguaaauaagag

SEQ ID NO: 3782219 - RNA, 15 nt, Human
uuuguaaaucacauc

SEQ ID NO: 3782220 - RNA, 14 nt, Human
uuuguaaauguuau

SEQ ID NO: 3782221 - RNA, 18 nt, Human
uuuguaaauguuauuucu

SEQ ID NO: 3782222 - RNA, 15 nt, Human
uuuguaaauuaacuu

SEQ ID NO: 3782223 - RNA, 22 nt, Human
uuuguaaauuaacuuuuauaaa

SEQ ID NO: 3782224 - RNA, 18 nt, Human
uuuguaaauuauuuaugu

SEQ ID NO: 3782225 - RNA, 12 nt, Human
uuuguaaauucu

SEQ ID NO: 3782226 - RNA, 16 nt, Human
uuuguaaauucugauu

SEQ ID NO: 3782227 - RNA, 19 nt, Human
uuuguaaauucugauuucu

SEQ ID NO: 3782228 - RNA, 20 nt, Human
uuuguaaauucugauuucuu

SEQ ID NO: 3782229 - RNA, 16 nt, Human
uuuguaaauuuagugu

SEQ ID NO: 3782230 - RNA, 19 nt, Human
uuuguaacccacugagagg

SEQ ID NO: 3782231 - RNA, 20 nt, Human
uuuguaacccagauuuugcu

SEQ ID NO: 3782232 - RNA, 22 nt, Human
uuuguaacuguuuagaugaaug

SEQ ID NO: 3782233 - RNA, 18 nt, Human
uuuguaagaacuaaagaa

SEQ ID NO: 3782234 - RNA, 20 nt, Human
uuuguaagaaggcaauauua

SEQ ID NO: 3782235 - RNA, 21 nt, Human
uuuguaagaguguagaagcau

SEQ ID NO: 3782236 - RNA, 15 nt, Human
uuuguaagaugcugg

SEQ ID NO: 3782237 - RNA, 17 nt, Human
uuuguaaggcuuguucc

SEQ ID NO: 3782238 - RNA, 21 nt, Human
uuuguaagucaguguugagau

SEQ ID NO: 3782239 - RNA, 13 nt, Human
uuuguaaguuauu

SEQ ID NO: 3782240 - RNA, 21 nt, Human
uuuguaauaauaaagaauagc

SEQ ID NO: 3782241 - RNA, 14 nt, Human
uuuguaaugaauuc

SEQ ID NO: 3782242 - RNA, 23 nt, Human
uuuguaaugucaccaccuuccca

SEQ ID NO: 3782243 - RNA, 18 nt, Human
uuuguaaugugugaaaaa

SEQ ID NO: 3782244 - RNA, 23 nt, Human
uuuguaauuaaaagcaaaucauu

SEQ ID NO: 3782245 - RNA, 14 nt, Human
uuuguaauuauugu

SEQ ID NO: 3782246 - RNA, 13 nt, Human
uuuguaauugcuu

SEQ ID NO: 3782247 - RNA, 23 nt, Human
uuuguacaaaaaaaaaguuuuau

SEQ ID NO: 3782248 - RNA, 12 nt, Human
uuuguacagaau

SEQ ID NO: 3782249 - RNA, 14 nt, Human
uuuguacagacaac

SEQ ID NO: 3782250 - RNA, 22 nt, Human
uuuguacagacguaugcuuauu

SEQ ID NO: 3782251 - RNA, 18 nt, Human
uuuguacaguuugcugua

SEQ ID NO: 3782252 - RNA, 12 nt, Human
uuuguaccagug

SEQ ID NO: 3782253 - RNA, 17 nt, Human
uuuguaccaugguguga

SEQ ID NO: 3782254 - RNA, 15 nt, Human
uuuguacugaaaaau

SEQ ID NO: 3782255 - RNA, 16 nt, Human
uuuguacuguaaagag

SEQ ID NO: 3782256 - RNA, 13 nt, Human
uuuguacuguuua

SEQ ID NO: 3782257 - RNA, 20 nt, Human
uuuguacuuuaucaugaaug

SEQ ID NO: 3782258 - RNA, 17 nt, Human
uuuguagcacugacaga

SEQ ID NO: 3782259 - RNA, 14 nt, Human
uuuguagguaaaau

SEQ ID NO: 3782260 - RNA, 14 nt, Human
uuuguagguacuuu

SEQ ID NO: 3782261 - RNA, 17 nt, Human
uuuguaguagcguuuuu

SEQ ID NO: 3782262 - RNA, 19 nt, Human
uuuguaguagcguuuuuua

SEQ ID NO: 3782263 - RNA, 14 nt, Human
uuuguaguugaaua

SEQ ID NO: 3782264 - RNA, 15 nt, Human
uuuguaguugaauau

SEQ ID NO: 3782265 - RNA, 19 nt, Human
uuuguauaaaauaauuuuu

SEQ ID NO: 3782266 - RNA, 18 nt, Human
uuuguauaacuucuuaaa

SEQ ID NO: 3782267 - RNA, 21 nt, Human
uuuguauaauuggauuuccua

SEQ ID NO: 3782268 - RNA, 16 nt, Human
uuuguauaauuguauc

SEQ ID NO: 3782269 - RNA, 17 nt, Human
uuuguauaauuguaucg

SEQ ID NO: 3782270 - RNA, 20 nt, Human
uuuguauaauuguaucguau

SEQ ID NO: 3782271 - RNA, 14 nt, Human
uuuguauacuuuaa

SEQ ID NO: 3782272 - RNA, 22 nt, Human
uuuguauacuuuaaauaauuua

SEQ ID NO: 3782273 - RNA, 15 nt, Human
uuuguauaguugcuu

SEQ ID NO: 3782274 - RNA, 21 nt, Human
uuuguauaguugcuugccuga

SEQ ID NO: 3782275 - RNA, 14 nt, Human
uuuguauauauauu

SEQ ID NO: 3782276 - RNA, 14 nt, Human
uuuguauauuacac

SEQ ID NO: 3782277 - RNA, 19 nt, Human
uuuguauauuacacauuug

SEQ ID NO: 3782278 - RNA, 20 nt, Human
uuuguaucucugaagcaugu

SEQ ID NO: 3782279 - RNA, 21 nt, Human
uuuguaucucugaagcauguu

SEQ ID NO: 3782280 - RNA, 22 nt, Human
uuuguaucuuccauauuuggaa

SEQ ID NO: 3782281 - RNA, 12 nt, Human
uuuguaugcaag

SEQ ID NO: 3782282 - RNA, 23 nt, Human
uuuguaugcaagcaguuucaaua

SEQ ID NO: 3782283 - RNA, 15 nt, Human
uuuguauguauaauu

SEQ ID NO: 3782284 - RNA, 13 nt, Human
uuuguaugugugu

SEQ ID NO: 3782285 - RNA, 22 nt, Human
uuuguauguugugaagauguuu

SEQ ID NO: 3782286 - RNA, 16 nt, Human
uuuguauuaagaaagg

SEQ ID NO: 3782287 - RNA, 23 nt, Human
uuuguauuauugcuguugcuuga

SEQ ID NO: 3782288 - RNA, 15 nt, Human
uuuguauucucuccu

SEQ ID NO: 3782289 - RNA, 18 nt, Human
uuucaaggcccucagcau

SEQ ID NO: 3782290 - RNA, 20 nt, Human
uuucaagguaauuucuugug

SEQ ID NO: 3782291 - RNA, 11 nt, Human
uuucaaguagc

SEQ ID NO: 3782292 - RNA, 17 nt, Human
uuucaaguauuuaagcc

SEQ ID NO: 3782293 - RNA, 23 nt, Human
uuucaaguauuuaagccuaaaga

SEQ ID NO: 3782294 - RNA, 20 nt, Human
uuucaagucaaauuaauaau

SEQ ID NO: 3782295 - RNA, 23 nt, Human
uuucaagucaaauuaauaaucuu

SEQ ID NO: 3782296 - RNA, 22 nt, Human
uuucaaguuccaaguugcuaau

SEQ ID NO: 3782297 - RNA, 16 nt, Human
uuucaaguuguaaaua

SEQ ID NO: 3782298 - RNA, 13 nt, Human
uuucaauaaaguu

SEQ ID NO: 3782299 - RNA, 15 nt, Human
uuucaauaaaguuug

SEQ ID NO: 3782300 - RNA, 21 nt, Human
uuucaauaaaguuugaucuuc

SEQ ID NO: 3782301 - RNA, 21 nt, Human
uuucaauaacgaaguugggca

SEQ ID NO: 3782302 - RNA, 15 nt, Human
uuucaauagcacaua

SEQ ID NO: 3782303 - RNA, 13 nt, Human
uuucaauagccac

SEQ ID NO: 3782304 - RNA, 12 nt, Human
uuucaauaggaa

SEQ ID NO: 3782305 - RNA, 17 nt, Human
uuucaauaggaaaaacu

SEQ ID NO: 3782306 - RNA, 13 nt, Human
uuucaauauauug

SEQ ID NO: 3782307 - RNA, 14 nt, Human
uuucaauauauuga

SEQ ID NO: 3782308 - RNA, 18 nt, Human
uuucaauauauugaacuu

SEQ ID NO: 3782309 - RNA, 14 nt, Human
uuucaaucacuguc

SEQ ID NO: 3782310 - RNA, 23 nt, Human
uuucaaucacuguccuccacaca

SEQ ID NO: 3782311 - RNA, 13 nt, Human
uuucaaucuucaa

SEQ ID NO: 3782312 - RNA, 14 nt, Human
uuucaaugacauuu

SEQ ID NO: 3782313 - RNA, 21 nt, Human
uuucaaugguuugcaaggaag

SEQ ID NO: 3782314 - RNA, 15 nt, Human
uuucaauguaauuaa

SEQ ID NO: 3782315 - RNA, 20 nt, Human
uuucaauguaauuaaacugu

SEQ ID NO: 3782316 - RNA, 20 nt, Human
uuucaaugugauucuaaugu

SEQ ID NO: 3782317 - RNA, 14 nt, Human
uuucaauguguaua

SEQ ID NO: 3782318 - RNA, 15 nt, Human
uuucaauuaaacgga

SEQ ID NO: 3782319 - RNA, 16 nt, Human
uuucaauuaaacggau

SEQ ID NO: 3782320 - RNA, 21 nt, Human
uuucaauuaaacggauuauuu

SEQ ID NO: 3782321 - RNA, 16 nt, Human
uuucaauucaaaaaug

SEQ ID NO: 3782322 - RNA, 19 nt, Human
uuucaauucaaaaauguac

SEQ ID NO: 3782323 - RNA, 20 nt, Human
uuucaauucaaaaauguaca

SEQ ID NO: 3782324 - RNA, 12 nt, Human
uuuuauucuugu

SEQ ID NO: 3782325 - RNA, 19 nt, Human
uuuuauugaaucuauuuaa

SEQ ID NO: 3782326 - RNA, 19 nt, Human
uuuuauugagaauuuuaaa

SEQ ID NO: 3782327 - RNA, 15 nt, Human
uuuuauugccuucuc

SEQ ID NO: 3782328 - RNA, 17 nt, Human
uuuuauugcuaguauuu

SEQ ID NO: 3782329 - RNA, 20 nt, Human
uuuuauugcuaguauuugaa

SEQ ID NO: 3782330 - RNA, 19 nt, Human
uuuuauuguaacagacauu

SEQ ID NO: 3782331 - RNA, 11 nt, Human
uuuuauugugu

SEQ ID NO: 3782332 - RNA, 10 nt, Human
uuuuauuguu

SEQ ID NO: 3782333 - RNA, 13 nt, Human
uuuuauuguugaa

SEQ ID NO: 3782334 - RNA, 14 nt, Human
uuuuauuguuuuca

SEQ ID NO: 3782335 - RNA, 22 nt, Human
uuuuauuucauugguuaauuuu

SEQ ID NO: 3782336 - RNA, 11 nt, Human
uuuuauuuccu

SEQ ID NO: 3782337 - RNA, 14 nt, Human
uuuuauuucuccuu

SEQ ID NO: 3782338 - RNA, 18 nt, Human
uuuuauuucuccuuuugu

SEQ ID NO: 3782339 - RNA, 15 nt, Human
uuuuauuugacaaaa

SEQ ID NO: 3782340 - RNA, 15 nt, Human
uuuuauuuuacuauu

SEQ ID NO: 3782341 - RNA, 11 nt, Human
uuuuauuuuau

SEQ ID NO: 3782342 - RNA, 17 nt, Human
uuuuauuuuuagaauuu

SEQ ID NO: 3782343 - RNA, 17 nt, Human
uuuuauuuuuuucuacc

SEQ ID NO: 3782344 - RNA, 17 nt, Human
uuuucaaaagguauuau

SEQ ID NO: 3782345 - RNA, 20 nt, Human
uuuucaaaauccaaaaagaa

SEQ ID NO: 3782346 - RNA, 16 nt, Human
uuuucaaacaaagaug

SEQ ID NO: 3782347 - RNA, 12 nt, Human
uuuucaaagcaa

SEQ ID NO: 3782348 - RNA, 15 nt, Human
uuuucaaauguucuc

SEQ ID NO: 3782349 - RNA, 22 nt, Human
uuuucaacaaauaucuuguguu

SEQ ID NO: 3782350 - RNA, 13 nt, Human
uuuucaacuuuga

SEQ ID NO: 3782351 - RNA, 24 nt, Human
uuuucaacuuugaauaaagaauac

SEQ ID NO: 3782352 - RNA, 16 nt, Human
uuuucaagaaguucuu

SEQ ID NO: 3782353 - RNA, 22 nt, Human
uuuucaagcagcaucuucuggu

SEQ ID NO: 3782354 - RNA, 22 nt, Human
uuuucaagcaucuccugaggau

SEQ ID NO: 3782355 - RNA, 16 nt, Human
uuuucaaggcccucag

SEQ ID NO: 3782356 - RNA, 16 nt, Human
uuuucaaguauuuaag

SEQ ID NO: 3782357 - RNA, 13 nt, Human
uuuucaaguugua

SEQ ID NO: 3782358 - RNA, 13 nt, Human
uuuucaauaacug

SEQ ID NO: 3782359 - RNA, 16 nt, Human
uuuucaauaacuggaa

SEQ ID NO: 3782360 - RNA, 14 nt, Human
uuuucaauauauug

SEQ ID NO: 3782361 - RNA, 20 nt, Human
uuuucaauauauugaacuuu

SEQ ID NO: 3782362 - RNA, 22 nt, Human
uuuucaauauauugaacuuuug

SEQ ID NO: 3782363 - RNA, 14 nt, Human
uuuucaauauuuau

SEQ ID NO: 3782364 - RNA, 16 nt, Human
uuuucaauauuuauua

SEQ ID NO: 3782365 - RNA, 18 nt, Human
uuuucaaugaauuuuaua

SEQ ID NO: 3782366 - RNA, 14 nt, Human
uuuucaauuaaacg

SEQ ID NO: 3782367 - RNA, 18 nt, Human
uuuucaauuaaacggauu

SEQ ID NO: 3782368 - RNA, 18 nt, Human
uuuucaauucaaaaaugu

SEQ ID NO: 3782369 - RNA, 17 nt, Human
uuuucaauuuuaaacau

SEQ ID NO: 3782370 - RNA, 14 nt, Human
uuuucacaaauaaa

SEQ ID NO: 3782371 - RNA, 15 nt, Human
uuuucacaguucucu

SEQ ID NO: 3782372 - RNA, 15 nt, Human
uuuucacauaaaugc

SEQ ID NO: 3782373 - RNA, 22 nt, Human
uuuucacauaaaugcagcccau

SEQ ID NO: 3782374 - RNA, 18 nt, Human
uuuucacauucuuauaaa

SEQ ID NO: 3782375 - RNA, 13 nt, Human
uuuucaccccacc

SEQ ID NO: 3782376 - RNA, 20 nt, Human
uuuucaccccacccuucccc

SEQ ID NO: 3782377 - RNA, 17 nt, Human
uuuucaccuccuucaau

SEQ ID NO: 3782378 - RNA, 18 nt, Human
uuuucacggaaguuuuca

SEQ ID NO: 3782379 - RNA, 19 nt, Human
uuuucacggaaguuuucaa

SEQ ID NO: 3782380 - RNA, 20 nt, Human
uuuucacggaaguuuucaau

SEQ ID NO: 3782381 - RNA, 20 nt, Human
uuuucacugcuggcugccuu

SEQ ID NO: 3782382 - RNA, 16 nt, Human
uuuucacuguagaaug

SEQ ID NO: 3782383 - RNA, 18 nt, Human
uuuucacuuugugauuau

SEQ ID NO: 3782384 - RNA, 22 nt, Human
uuuucagaaccucuuccccaga

SEQ ID NO: 3782385 - RNA, 20 nt, Human
uuuucagaagaaauaaauau

SEQ ID NO: 3782386 - RNA, 21 nt, Human
uuuucagaaucugaauguaau

SEQ ID NO: 3782387 - RNA, 22 nt, Human
uuuucagaaucugaauguaauu

SEQ ID NO: 3782388 - RNA, 23 nt, Human
uuuucagaaucugaauguaauuu

SEQ ID NO: 3782389 - RNA, 14 nt, Human
uuuucagacugcuu

SEQ ID NO: 3782390 - RNA, 22 nt, Human
uuuucagagauuuauauaaaug

SEQ ID NO: 3782391 - RNA, 17 nt, Human
uuuucagauauaaaaga

SEQ ID NO: 3782392 - RNA, 14 nt, Human
uuuucagauucagg

SEQ ID NO: 3782393 - RNA, 17 nt, Human
uuuucagauuugcacaa

SEQ ID NO: 3782394 - RNA, 13 nt, Human
uuuucagcauuga

SEQ ID NO: 3782395 - RNA, 21 nt, Human
uuuucagcuaggaacaaaucu

SEQ ID NO: 3782396 - RNA, 12 nt, Human
uuuucagcuucu

SEQ ID NO: 3782397 - RNA, 15 nt, Human
uuuucagcuucugcu

SEQ ID NO: 3782398 - RNA, 20 nt, Human
uuuucagcuucugcugggcu

SEQ ID NO: 3782399 - RNA, 23 nt, Human
uuuucaguauuuuggagaaauua

SEQ ID NO: 3782400 - RNA, 23 nt, Human
uuuucagucauauaaaagcuaug

SEQ ID NO: 3782401 - RNA, 15 nt, Human
uuuucaguuguucuu

SEQ ID NO: 3782402 - RNA, 16 nt, Human
uuuucaguuguuuguu

SEQ ID NO: 3782403 - RNA, 22 nt, Human
uuuucaguuuauuugaaccaau

SEQ ID NO: 3782404 - RNA, 20 nt, Human
uuuucaguuucaauucagug

SEQ ID NO: 3782405 - RNA, 14 nt, Human
uuuucaguuuucag

SEQ ID NO: 3782406 - RNA, 13 nt, Human
uuuucauaacuua

SEQ ID NO: 3782407 - RNA, 21 nt, Human
uuuucauaacuuauugcugau

SEQ ID NO: 3782408 - RNA, 16 nt, Human
uuuucauaagauauuu

SEQ ID NO: 3782409 - RNA, 21 nt, Human
uuuucauagauugagaaguuu

SEQ ID NO: 3782410 - RNA, 15 nt, Human
uuuucauaggucuga

SEQ ID NO: 3782411 - RNA, 16 nt, Human
uuuucauaggucugaa

SEQ ID NO: 3782412 - RNA, 16 nt, Human
uuuucauaucauuucu

SEQ ID NO: 3782413 - RNA, 14 nt, Human
uuuucauauugugc

SEQ ID NO: 3782414 - RNA, 22 nt, Human
agacuguguaaaauguaaugca

SEQ ID NO: 3782415 - RNA, 19 nt, Human
agacugugugugcccucug

SEQ ID NO: 3782416 - RNA, 20 nt, Human
agacugugugugcccucugg

SEQ ID NO: 3782417 - RNA, 18 nt, Human
agacuguuaaaugaaacc

SEQ ID NO: 3782418 - RNA, 15 nt, Human
agacuguugcucaaa

SEQ ID NO: 3782419 - RNA, 18 nt, Human
agacuuaagcccagugca

SEQ ID NO: 3782420 - RNA, 15 nt, Human
agacuuacagcaaau

SEQ ID NO: 3782421 - RNA, 18 nt, Human
agacuuacagcaaauccu

SEQ ID NO: 3782422 - RNA, 21 nt, Human
agacuuacuuuacucauuuuu

SEQ ID NO: 3782423 - RNA, 16 nt, Human
agacuuagggcaccag

SEQ ID NO: 3782424 - RNA, 14 nt, Human
agacuuaucaacau

SEQ ID NO: 3782425 - RNA, 17 nt, Human
agacuuauuuucacaug

SEQ ID NO: 3782426 - RNA, 18 nt, Human
agacuucaaaauauugag

SEQ ID NO: 3782427 - RNA, 22 nt, Human
agacuucaagcauggcuauuuu

SEQ ID NO: 3782428 - RNA, 22 nt, Human
agacuucaguauguugucaaag

SEQ ID NO: 3782429 - RNA, 14 nt, Human
agacuucaucccuc

SEQ ID NO: 3782430 - RNA, 21 nt, Human
agacuucauugucccucuuca

SEQ ID NO: 3782431 - RNA, 19 nt, Human
agacuuccaaaccugacag

SEQ ID NO: 3782432 - RNA, 19 nt, Human
agacuucccacggcuccuc

SEQ ID NO: 3782433 - RNA, 15 nt, Human
agacuucccagcuuc

SEQ ID NO: 3782434 - RNA, 18 nt, Human
agacuucccagcuucugc

SEQ ID NO: 3782435 - RNA, 15 nt, Human
agacuucccugaaug

SEQ ID NO: 3782436 - RNA, 19 nt, Human
agacuucccugaauguauu

SEQ ID NO: 3782437 - RNA, 14 nt, Human
agacuuccuagacu

SEQ ID NO: 3782438 - RNA, 18 nt, Human
agacuucucuuugccuca

SEQ ID NO: 3782439 - RNA, 17 nt, Human
aggaaggagcugccugg

SEQ ID NO: 3782440 - RNA, 20 nt, Human
aggaaggagcugccuggacc

SEQ ID NO: 3782441 - RNA, 18 nt, Human
aggaaggaggacccagga

SEQ ID NO: 3782442 - RNA, 19 nt, Human
aggaaggaggacccaggac

SEQ ID NO: 3782443 - RNA, 22 nt, Human
aggaaggaggacccaggacagg

SEQ ID NO: 3782444 - RNA, 21 nt, Human
aggaaggaggggaagcugcag

SEQ ID NO: 3782445 - RNA, 14 nt, Human
aggaaggaugagca

SEQ ID NO: 3782446 - RNA, 17 nt, Human
aggaaggaugagcauuu

SEQ ID NO: 3782447 - RNA, 16 nt, Human
aggaaggauuguaaaa

SEQ ID NO: 3782448 - RNA, 17 nt, Human
aggaaggauuguaaaaa

SEQ ID NO: 3782449 - RNA, 15 nt, Human
aggaaggcacuucug

SEQ ID NO: 3782450 - RNA, 17 nt, Human
aggaaggcaggaagaga

SEQ ID NO: 3782451 - RNA, 19 nt, Human
aggaaggcaggaagagagc

SEQ ID NO: 3782452 - RNA, 13 nt, Human
aggaaggccuggg

SEQ ID NO: 3782453 - RNA, 13 nt, Human
aggaaggcggggc

SEQ ID NO: 3782454 - RNA, 20 nt, Human
aggaaggcucuucuccccag

SEQ ID NO: 3782455 - RNA, 15 nt, Human
aggaaggcugagagg

SEQ ID NO: 3782456 - RNA, 21 nt, Human
aggaaggcuuguugugcuuuu

SEQ ID NO: 3782457 - RNA, 18 nt, Human
aggaagggcauccuucug

SEQ ID NO: 3782458 - RNA, 16 nt, Human
aggaaggggccagagg

SEQ ID NO: 3782459 - RNA, 18 nt, Human
aggaaggggccagaggcu

SEQ ID NO: 3782460 - RNA, 14 nt, Human
aggaaggggcugga

SEQ ID NO: 3782461 - RNA, 14 nt, Human
aggaagguacugua

SEQ ID NO: 3782462 - RNA, 18 nt, Human
aggaagguacuguaugau

SEQ ID NO: 3782463 - RNA, 19 nt, Human
aggaaggugaaucugcccu

SEQ ID NO: 3782464 - RNA, 11 nt, Human
aggaaguacug

SEQ ID NO: 3782465 - RNA, 15 nt, Human
aggaaguagcacagg

SEQ ID NO: 3782466 - RNA, 19 nt, Human
aggaaguagcacaggcuga

SEQ ID NO: 3782467 - RNA, 16 nt, Human
aggaagucucaucugg

SEQ ID NO: 3782468 - RNA, 14 nt, Human
aggaagugaagaau

SEQ ID NO: 3782469 - RNA, 14 nt, Human
aggaaguguuuaug

SEQ ID NO: 3782470 - RNA, 14 nt, Human
aggaaguucagauc

SEQ ID NO: 3782471 - RNA, 17 nt, Human
aggaauaauuauuuauu

SEQ ID NO: 3782472 - RNA, 22 nt, Human
aggaauaccugucccccugaca

SEQ ID NO: 3782473 - RNA, 17 nt, Human
aggaauacugaacaucu

SEQ ID NO: 3782474 - RNA, 18 nt, Human
aggaauagcaugucacua

SEQ ID NO: 3782475 - RNA, 17 nt, Human
aggaauaguugagcccc

SEQ ID NO: 3782476 - RNA, 21 nt, Human
aggaauaguugagccccaagu

SEQ ID NO: 3782477 - RNA, 12 nt, Human
aggaauauaugg

SEQ ID NO: 3782478 - RNA, 22 nt, Human
aggaauaucaauauaauguuuu

SEQ ID NO: 3782479 - RNA, 22 nt, Human
aggaauaugacggaagaacaua

SEQ ID NO: 3782480 - RNA, 18 nt, Human
aggaauaugggagaaaua

SEQ ID NO: 3782481 - RNA, 14 nt, Human
aggaauauuauauu

SEQ ID NO: 3782482 - RNA, 16 nt, Human
aggaaucaagagcugc

SEQ ID NO: 3782483 - RNA, 16 nt, Human
aggaaucacucuugug

SEQ ID NO: 3782484 - RNA, 21 nt, Human
aggaaucaugucaggccugug

SEQ ID NO: 3782485 - RNA, 21 nt, Human
aggaaucaugugccaagcaga

SEQ ID NO: 3782486 - RNA, 22 nt, Human
aggaaucauucagaaauguuga

SEQ ID NO: 3782487 - RNA, 23 nt, Human
aggaaucauucagaaauguugag

SEQ ID NO: 3782488 - RNA, 21 nt, Human
aggaauccacucccaggcagc

SEQ ID NO: 3782489 - RNA, 23 nt, Human
aggaauccagacccggcugcgug

SEQ ID NO: 3782490 - RNA, 14 nt, Human
aggaauccuggcag

SEQ ID NO: 3782491 - RNA, 18 nt, Human
aggaauccuggcagccca

SEQ ID NO: 3782492 - RNA, 19 nt, Human
aggaaucgaggaaccagag

SEQ ID NO: 3782493 - RNA, 22 nt, Human
aggaaucugugggucugggagu

SEQ ID NO: 3782494 - RNA, 16 nt, Human
aggaaugaaaaaagcu

SEQ ID NO: 3782495 - RNA, 13 nt, Human
aggaaugagaagu

SEQ ID NO: 3782496 - RNA, 14 nt, Human
aggaaugagaagua

SEQ ID NO: 3782497 - RNA, 16 nt, Human
aggaaugauauugcug

SEQ ID NO: 3782498 - RNA, 17 nt, Human
aggaaugcaaagaugaa

SEQ ID NO: 3782499 - RNA, 17 nt, Human
aggaaugcuggacugga

SEQ ID NO: 3782500 - RNA, 15 nt, Human
aggaauggacauuuc

SEQ ID NO: 3782501 - RNA, 17 nt, Human
aggaauggacauuucua

SEQ ID NO: 3782502 - RNA, 21 nt, Human
aggaauggaggcucuaauuga

SEQ ID NO: 3782503 - RNA, 23 nt, Human
aggaaugggaaggaugaagggcc

SEQ ID NO: 3782504 - RNA, 15 nt, Human
aggaaugucuuuggu

SEQ ID NO: 3782505 - RNA, 22 nt, Human
aggaauguuuuguagcucuagg

SEQ ID NO: 3782506 - RNA, 16 nt, Human
aggaauuacgugcucu

SEQ ID NO: 3782507 - RNA, 22 nt, Human
aggaauucuaggcaucccaggg

SEQ ID NO: 3782508 - RNA, 13 nt, Human
aggaauucuguau

SEQ ID NO: 3782509 - RNA, 22 nt, Human
aggaauucuguauagauuagaa

SEQ ID NO: 3782510 - RNA, 23 nt, Human
aggaauugacccacaagaaauga

SEQ ID NO: 3782511 - RNA, 23 nt, Human
aggaauuguguuuauaauuuuaa

SEQ ID NO: 3782512 - RNA, 18 nt, Human
aggaauuucaccuguaaa

SEQ ID NO: 3782513 - RNA, 15 nt, Human
aggaauuucccagga

SEQ ID NO: 3782514 - RNA, 21 nt, Human
aggaauuucccaggacccuga

SEQ ID NO: 3782515 - RNA, 16 nt, Human
aggaauuuucuccaau

SEQ ID NO: 3782516 - RNA, 13 nt, Human
aggaauuuugcua

SEQ ID NO: 3782517 - RNA, 16 nt, Human
aggacaaaacuucuug

SEQ ID NO: 3782518 - RNA, 20 nt, Human
aggacaaaacuucuugucag

SEQ ID NO: 3782519 - RNA, 16 nt, Human
aggacaaacagcucag

SEQ ID NO: 3782520 - RNA, 16 nt, Human
aggacaaagucuccag

SEQ ID NO: 3782521 - RNA, 17 nt, Human
aggacaaagucuccagc

SEQ ID NO: 3782522 - RNA, 17 nt, Human
aggacaaagugccaaag

SEQ ID NO: 3782523 - RNA, 22 nt, Human
aggacaaagugccaaagaaagu

SEQ ID NO: 3782524 - RNA, 20 nt, Human
aggacaaaucugcaaagcau

SEQ ID NO: 3782525 - RNA, 23 nt, Human
aggacaaauugagacagugcaca

SEQ ID NO: 3782526 - RNA, 14 nt, Human
aggacaaggcuaga

SEQ ID NO: 3782527 - RNA, 18 nt, Human
aggacaaucaguccccuc

SEQ ID NO: 3782528 - RNA, 18 nt, Human
aggacaauucaugaacuu

SEQ ID NO: 3782529 - RNA, 15 nt, Human
aggacaauuucaaaa

SEQ ID NO: 3782530 - RNA, 13 nt, Human
aggacacacuaau

SEQ ID NO: 3782531 - RNA, 23 nt, Human
aggacacagaugaaacacaaaca

SEQ ID NO: 3782532 - RNA, 13 nt, Human
aggacacagucag

SEQ ID NO: 3782533 - RNA, 18 nt, Human
aggacacaguuccuggga

SEQ ID NO: 3782534 - RNA, 19 nt, Human
aggacaccacacccagccu

SEQ ID NO: 3782535 - RNA, 20 nt, Human
aggacaccuguacuggagag

SEQ ID NO: 3782536 - RNA, 23 nt, Human
aggacacgcgccccccucccaga

SEQ ID NO: 3782537 - RNA, 23 nt, Human
aggacacgggccuguccacaggc

SEQ ID NO: 3782538 - RNA, 18 nt, Human
aggacacuaaccacgcug

SEQ ID NO: 3782539 - RNA, 12 nt, Human
aggacacucccg

SEQ ID NO: 3782540 - RNA, 14 nt, Human
aggacacugauaug

SEQ ID NO: 3782541 - RNA, 15 nt, Human
aggacacuuccugcc

SEQ ID NO: 3782542 - RNA, 22 nt, Human
aggacagaaggcuccugccccc

SEQ ID NO: 3782543 - RNA, 15 nt, Human
aggacagagagaaau

SEQ ID NO: 3782544 - RNA, 15 nt, Human
aggacagcacagacu

SEQ ID NO: 3782545 - RNA, 22 nt, Human
aggacagccuguggcggugccu

SEQ ID NO: 3782546 - RNA, 12 nt, Human
aggacagcuguc

SEQ ID NO: 3782547 - RNA, 13 nt, Human
aggacagcugucc

SEQ ID NO: 3782548 - RNA, 20 nt, Human
aggacaggaaaguggcaccu

SEQ ID NO: 3782549 - RNA, 14 nt, Human
aggacaggauccag

SEQ ID NO: 3782550 - RNA, 16 nt, Human
aggacaggcagaaaga

SEQ ID NO: 3782551 - RNA, 16 nt, Human
aggacagggguuccuu

SEQ ID NO: 3782552 - RNA, 21 nt, Human
aggacauagagguauauugga

SEQ ID NO: 3782553 - RNA, 14 nt, Human
aggacaucagcaaa

SEQ ID NO: 3782554 - RNA, 13 nt, Human
aggacaugaaacu

SEQ ID NO: 3782555 - RNA, 18 nt, Human
aggacaugaaacuccacc

SEQ ID NO: 3782556 - RNA, 20 nt, Human
aggacaugcaauaaaauuua

SEQ ID NO: 3782557 - RNA, 17 nt, Human
aggacaugcugaagcca

SEQ ID NO: 3782558 - RNA, 16 nt, Human
agggccacgugccagg

SEQ ID NO: 3782559 - RNA, 18 nt, Human
agggccacgugccaggcc

SEQ ID NO: 3782560 - RNA, 20 nt, Human
agggccacgugccaggcccg

SEQ ID NO: 3782561 - RNA, 18 nt, Human
agggccacucugccucug

SEQ ID NO: 3782562 - RNA, 23 nt, Human
agggccacugguccccaacaaug

SEQ ID NO: 3782563 - RNA, 17 nt, Human
agggccagaaguagcuu

SEQ ID NO: 3782564 - RNA, 11 nt, Human
agggccagagc

SEQ ID NO: 3782565 - RNA, 14 nt, Human
agggccagagccag

SEQ ID NO: 3782566 - RNA, 16 nt, Human
agggccagagccaggg

SEQ ID NO: 3782567 - RNA, 12 nt, Human
agggccaggacu

SEQ ID NO: 3782568 - RNA, 19 nt, Human
agggccaggacugagcccc

SEQ ID NO: 3782569 - RNA, 21 nt, Human
agggccaggacugagccccgc

SEQ ID NO: 3782570 - RNA, 12 nt, Human
agggccaggcag

SEQ ID NO: 3782571 - RNA, 22 nt, Human
agggccaggcaggugccuggac

SEQ ID NO: 3782572 - RNA, 12 nt, Human
agggccagggcc

SEQ ID NO: 3782573 - RNA, 14 nt, Human
agggccagggcccu

SEQ ID NO: 3782574 - RNA, 15 nt, Human
agggccagggcccug

SEQ ID NO: 3782575 - RNA, 22 nt, Human
agggccagggcccugcagaggg

SEQ ID NO: 3782576 - RNA, 17 nt, Human
agggccaguccugccug

SEQ ID NO: 3782577 - RNA, 21 nt, Human
agggccaguccugccuggcca

SEQ ID NO: 3782578 - RNA, 22 nt, Human
agggccaguccugccuggccag

SEQ ID NO: 3782579 - RNA, 23 nt, Human
agggccaguggggccuguggaau

SEQ ID NO: 3782580 - RNA, 17 nt, Human
agggccaugccugcccc

SEQ ID NO: 3782581 - RNA, 23 nt, Human
agggccaugcugaggccugggcc

SEQ ID NO: 3782582 - RNA, 21 nt, Human
agggccauggcucaggguggu

SEQ ID NO: 3782583 - RNA, 19 nt, Human
agggcccaagucccuguuu

SEQ ID NO: 3782584 - RNA, 23 nt, Human
agggcccagagaggguggugacc

SEQ ID NO: 3782585 - RNA, 13 nt, Human
agggcccagagca

SEQ ID NO: 3782586 - RNA, 18 nt, Human
agggcccagagcaggaag

SEQ ID NO: 3782587 - RNA, 17 nt, Human
agggcccagagcccagc

SEQ ID NO: 3782588 - RNA, 20 nt, Human
agggcccagagcccagcucc

SEQ ID NO: 3782589 - RNA, 21 nt, Human
agggcccagagcccagcucca

SEQ ID NO: 3782590 - RNA, 17 nt, Human
agggcccaggcaggcca

SEQ ID NO: 3782591 - RNA, 17 nt, Human
agggcccaugggaggga

SEQ ID NO: 3782592 - RNA, 19 nt, Human
agggccccucacccugccu

SEQ ID NO: 3782593 - RNA, 14 nt, Human
agggccccucugcc

SEQ ID NO: 3782594 - RNA, 15 nt, Human
agggccccucugccc

SEQ ID NO: 3782595 - RNA, 16 nt, Human
agggccccucugccca

SEQ ID NO: 3782596 - RNA, 19 nt, Human
agggccccucugcccagcu

SEQ ID NO: 3782597 - RNA, 16 nt, Human
agggcccgggaagcaa

SEQ ID NO: 3782598 - RNA, 15 nt, Human
agggcccuccuuccu

SEQ ID NO: 3782599 - RNA, 15 nt, Human
agggcccugagcuga

SEQ ID NO: 3782600 - RNA, 14 nt, Human
agggcccuggaggc

SEQ ID NO: 3782601 - RNA, 13 nt, Human
agggcccuggugu

SEQ ID NO: 3782602 - RNA, 24 nt, Human
agggcccugguguuucuagcacug

SEQ ID NO: 3782603 - RNA, 15 nt, Human
agggcccuucacugc

SEQ ID NO: 3782604 - RNA, 19 nt, Human
aggucaccuuuauucuggc

SEQ ID NO: 3782605 - RNA, 19 nt, Human
aggucacuccuggggccuc

SEQ ID NO: 3782606 - RNA, 16 nt, Human
aggucacuggaaaggg

SEQ ID NO: 3782607 - RNA, 20 nt, Human
aggucacuggaaaggggaga

SEQ ID NO: 3782608 - RNA, 14 nt, Human
aggucacuggcucu

SEQ ID NO: 3782609 - RNA, 12 nt, Human
aggucagagccu

SEQ ID NO: 3782610 - RNA, 19 nt, Human
aggucagcauuugaucugu

SEQ ID NO: 3782611 - RNA, 12 nt, Human
aggucaggaaac

SEQ ID NO: 3782612 - RNA, 12 nt, Human
aggucaggcccu

SEQ ID NO: 3782613 - RNA, 19 nt, Human
aggucaggggugacacaga

SEQ ID NO: 3782614 - RNA, 21 nt, Human
aggucaggggugacacagacu

SEQ ID NO: 3782615 - RNA, 15 nt, Human
aggucaguacccacc

SEQ ID NO: 3782616 - RNA, 15 nt, Human
aggucagugcaaaua

SEQ ID NO: 3782617 - RNA, 17 nt, Human
aggucauagcugagauu

SEQ ID NO: 3782618 - RNA, 21 nt, Human
aggucauuaaggccacaucca

SEQ ID NO: 3782619 - RNA, 18 nt, Human
aggucauuuccauguaug

SEQ ID NO: 3782620 - RNA, 17 nt, Human
aggucauuuuuuuuaag

SEQ ID NO: 3782621 - RNA, 23 nt, Human
aggucauuuuuuuuaagaaaaag

SEQ ID NO: 3782622 - RNA, 16 nt, Human
agguccaaugagcuuu

SEQ ID NO: 3782623 - RNA, 14 nt, Human
agguccacaggucu

SEQ ID NO: 3782624 - RNA, 15 nt, Human
agguccacaggucua

SEQ ID NO: 3782625 - RNA, 19 nt, Human
agguccacaggucuagacu

SEQ ID NO: 3782626 - RNA, 21 nt, Human
agguccacggucuguucuuga

SEQ ID NO: 3782627 - RNA, 22 nt, Human
agguccacggucuguucuugaa

SEQ ID NO: 3782628 - RNA, 20 nt, Human
agguccagagagaccgagga

SEQ ID NO: 3782629 - RNA, 15 nt, Human
agguccagcccaucu

SEQ ID NO: 3782630 - RNA, 16 nt, Human
agguccagcccaucuc

SEQ ID NO: 3782631 - RNA, 23 nt, Human
agguccagcccaucucggagcau

SEQ ID NO: 3782632 - RNA, 17 nt, Human
agguccagcccuggcug

SEQ ID NO: 3782633 - RNA, 20 nt, Human
agguccagcccuggcugaag

SEQ ID NO: 3782634 - RNA, 13 nt, Human
agguccagcucug

SEQ ID NO: 3782635 - RNA, 14 nt, Human
agguccagcucugg

SEQ ID NO: 3782636 - RNA, 17 nt, Human
agguccagcucuggagg

SEQ ID NO: 3782637 - RNA, 11 nt, Human
aggucccaggc

SEQ ID NO: 3782638 - RNA, 17 nt, Human
agguccccagcuuuggc

SEQ ID NO: 3782639 - RNA, 18 nt, Human
agguccccagcuuuggcu

SEQ ID NO: 3782640 - RNA, 14 nt, Human
aggucccccugcag

SEQ ID NO: 3782641 - RNA, 10 nt, Human
aggucccuaa

SEQ ID NO: 3782642 - RNA, 15 nt, Human
aggucccuaauaaag

SEQ ID NO: 3782643 - RNA, 13 nt, Human
agguccuaaggca

SEQ ID NO: 3782644 - RNA, 16 nt, Human
agguccuacagggcca

SEQ ID NO: 3782645 - RNA, 18 nt, Human
agguccuccccucucuug

SEQ ID NO: 3782646 - RNA, 15 nt, Human
agguccucuggagcc

SEQ ID NO: 3782647 - RNA, 16 nt, Human
agguccugagcacugc

SEQ ID NO: 3782648 - RNA, 17 nt, Human
agguccugagcacugcc

SEQ ID NO: 3782649 - RNA, 19 nt, Human
agguccugagcacugccag

SEQ ID NO: 3782650 - RNA, 23 nt, Human
agguccugagcacugccaggagg

SEQ ID NO: 3782651 - RNA, 21 nt, Human
agguccugcagucuggcugag

SEQ ID NO: 3782652 - RNA, 19 nt, Human
agguccugcucagcaguga

SEQ ID NO: 3782653 - RNA, 16 nt, Human
agguccugggggccug

SEQ ID NO: 3782654 - RNA, 18 nt, Human
agguccugggggccugac

SEQ ID NO: 3782655 - RNA, 21 nt, Human
agguccugggggccugaccuc

SEQ ID NO: 3782656 - RNA, 22 nt, Human
agguccugggggccugaccucc

SEQ ID NO: 3782657 - RNA, 20 nt, Human
agguccugugaucuuauuuu

SEQ ID NO: 3782658 - RNA, 23 nt, Human
agguccugugaucuuauuuuucu

SEQ ID NO: 3782659 - RNA, 14 nt, Human
agguccuuuagaaa

SEQ ID NO: 3782660 - RNA, 15 nt, Human
agguccuuuagaaac

SEQ ID NO: 3782661 - RNA, 20 nt, Human
aggucgcuugggaauuuuau

SEQ ID NO: 3782662 - RNA, 17 nt, Human
aggucggaggcuuggga

SEQ ID NO: 3782663 - RNA, 15 nt, Human
aggucgggcucagcu

SEQ ID NO: 3782664 - RNA, 18 nt, Human
aggucgggcucagcucug

SEQ ID NO: 3782665 - RNA, 21 nt, Human
aggucuauuuaaaaaaaaagu

SEQ ID NO: 3782666 - RNA, 12 nt, Human
aggucucagccc

SEQ ID NO: 3782667 - RNA, 13 nt, Human
aggucucccggga

SEQ ID NO: 3782668 - RNA, 16 nt, Human
aggucucccgggaagc

SEQ ID NO: 3782669 - RNA, 15 nt, Human
aggucuccuccaccg

SEQ ID NO: 3782670 - RNA, 13 nt, Human
aggucuccucuua

SEQ ID NO: 3782671 - RNA, 23 nt, Human
aggucuccucuuaaaaaauaaaa

SEQ ID NO: 3782672 - RNA, 20 nt, Human
aggucucgcugaugcugggc

SEQ ID NO: 3782673 - RNA, 21 nt, Human
aggucucgcugaugcugggcu

SEQ ID NO: 3782674 - RNA, 23 nt, Human
aggucucgcugaugcugggcugg

SEQ ID NO: 3782675 - RNA, 16 nt, Human
aggucucugccggcuc

SEQ ID NO: 3782676 - RNA, 13 nt, Human
aggucucuucccc

SEQ ID NO: 3782677 - RNA, 16 nt, Human
aggucucuucucccag

SEQ ID NO: 3782678 - RNA, 17 nt, Human
aggucucuucucccaga

SEQ ID NO: 3782679 - RNA, 19 nt, Human
aggucucuucucccagaau

SEQ ID NO: 3782680 - RNA, 23 nt, Human
aggucucuucucccagaauccca

SEQ ID NO: 3782681 - RNA, 20 nt, Human
aggucugacacgucugccua

SEQ ID NO: 3782682 - RNA, 22 nt, Human
aggucugagcacuggaguggcu

SEQ ID NO: 3782683 - RNA, 18 nt, Human
aggucugagccacagcag

SEQ ID NO: 3782684 - RNA, 20 nt, Human
aggucugaguuguuacccca

SEQ ID NO: 3782685 - RNA, 16 nt, Human
aggucuggccucaggu

SEQ ID NO: 3782686 - RNA, 14 nt, Human
aggucugugcugag

SEQ ID NO: 3782687 - RNA, 13 nt, Human
aggucuguucuuu

SEQ ID NO: 3782688 - RNA, 22 nt, Human
aggucuguucuuuccaaaguac

SEQ ID NO: 3782689 - RNA, 12 nt, Human
aggucuguuuaa

SEQ ID NO: 3782690 - RNA, 14 nt, Human
aggucuguuugcug

SEQ ID NO: 3782691 - RNA, 22 nt, Human
aggucuguuuuguguacuuuua

SEQ ID NO: 3782692 - RNA, 16 nt, Human
aggucuucagccauca

SEQ ID NO: 3782693 - RNA, 19 nt, Human
aggucuuggagcugagccu

SEQ ID NO: 3782694 - RNA, 22 nt, Human
aggucuuggagcugagccucuc

SEQ ID NO: 3782695 - RNA, 13 nt, Human
aggucuuggugcc

SEQ ID NO: 3782696 - RNA, 11 nt, Human
aggucuuuccu

SEQ ID NO: 3782697 - RNA, 21 nt, Human
aggucuuuguaagaacuaaag

SEQ ID NO: 3782698 - RNA, 15 nt, Human
aggucuuuugacaug

SEQ ID NO: 3782699 - RNA, 21 nt, Human
aggugaaaaaagcuuuuauga

SEQ ID NO: 3782700 - RNA, 13 nt, Human
aggugaaaauguu

SEQ ID NO: 3782701 - RNA, 16 nt, Human
aggugaaacauuuucu

SEQ ID NO: 3782702 - RNA, 21 nt, Human
aggugaaacuccagaugccac

SEQ ID NO: 3782703 - RNA, 16 nt, Human
aggugaaagggagcua

SEQ ID NO: 3782704 - RNA, 19 nt, Human
aggugaaaguuaauccacu

SEQ ID NO: 3782705 - RNA, 14 nt, Human
aggugaaggaauau

SEQ ID NO: 3782706 - RNA, 17 nt, Human
aggugaaggaauauaug

SEQ ID NO: 3782707 - RNA, 21 nt, Human
aggugaaggaggcuccaggca

SEQ ID NO: 3782708 - RNA, 19 nt, Human
aggugacacuauaguuuaa

SEQ ID NO: 3782709 - RNA, 19 nt, Human
aggugacagaaggaccagc

SEQ ID NO: 3782710 - RNA, 22 nt, Human
aggugacagagugagacucugu

SEQ ID NO: 3782711 - RNA, 21 nt, Human
aggugacagugagguccuggg

SEQ ID NO: 3782712 - RNA, 15 nt, Human
aggugacauauacau

SEQ ID NO: 3782713 - RNA, 14 nt, Human
aggugacaugugaa

SEQ ID NO: 3782714 - RNA, 20 nt, Human
aggugaccaaaauccccuuc

SEQ ID NO: 3782715 - RNA, 13 nt, Human
aggugaccccagg

SEQ ID NO: 3782716 - RNA, 21 nt, Human
aggugaccccagggcacagga

SEQ ID NO: 3782717 - RNA, 18 nt, Human
aggugacccugaugaaaa

SEQ ID NO: 3782718 - RNA, 19 nt, Human
aggugacugggcccugccu

SEQ ID NO: 3782719 - RNA, 14 nt, Human
aggugagaaaaaaa

SEQ ID NO: 3782720 - RNA, 15 nt, Human
aggugagaaaaaaac

SEQ ID NO: 3782721 - RNA, 13 nt, Human
aggugagaaauuu

SEQ ID NO: 3782722 - RNA, 16 nt, Human
aggugagaagcagagg

SEQ ID NO: 3782723 - RNA, 16 nt, Human
aggugagaccaccucu

SEQ ID NO: 3782724 - RNA, 18 nt, Human
aggugagcacggccaaca

SEQ ID NO: 3782725 - RNA, 18 nt, Human
aggugaggagcagagcag

SEQ ID NO: 3782726 - RNA, 13 nt, Human
aggugaggccugu

SEQ ID NO: 3782727 - RNA, 17 nt, Human
aggugaggccugucugu

SEQ ID NO: 3782728 - RNA, 13 nt, Human
aggugagggaagc

SEQ ID NO: 3782729 - RNA, 17 nt, Human
aggugaggucuguuccu

SEQ ID NO: 3782730 - RNA, 19 nt, Human
aggugaguuugagcugccu

SEQ ID NO: 3782731 - RNA, 22 nt, Human
aggugaguuugagcugccuucc

SEQ ID NO: 3782732 - RNA, 14 nt, Human
aggugauaaaauca

SEQ ID NO: 3782733 - RNA, 17 nt, Human
aggugauagcauugcuu

SEQ ID NO: 3782734 - RNA, 16 nt, Human
aggugauauauuuaaa

SEQ ID NO: 3782735 - RNA, 18 nt, Human
aggugauauuuuucuuau

SEQ ID NO: 3782736 - RNA, 23 nt, Human
aggugauccacccaccucagccu

SEQ ID NO: 3782737 - RNA, 22 nt, Human
aggugauccacucgccuucauc

SEQ ID NO: 3782738 - RNA, 15 nt, Human
aggugauccauguaa

SEQ ID NO: 3782739 - RNA, 22 nt, Human
aggugcaacaagguccucuguc

SEQ ID NO: 3782740 - RNA, 13 nt, Human
aggugcaaccagg

SEQ ID NO: 3782741 - RNA, 21 nt, Human
aggugcaauuucaagguucua

SEQ ID NO: 3782742 - RNA, 22 nt, Human
aggugcaauuucaagguucuaa

SEQ ID NO: 3782743 - RNA, 20 nt, Human
aggugcacaagcuccaagcu

SEQ ID NO: 3782744 - RNA, 22 nt, Human
aggugcacagacgucccuccac

SEQ ID NO: 3782745 - RNA, 15 nt, Human
aggugcacugggagg

SEQ ID NO: 3782746 - RNA, 23 nt, Human
aggugcacugggaggcuccccuu

SEQ ID NO: 3782747 - RNA, 13 nt, Human
aggugcagaggaa

SEQ ID NO: 3782748 - RNA, 18 nt, Human
aggugcagagugcccaga

SEQ ID NO: 3782749 - RNA, 19 nt, Human
aggugcagagugcccagaa

SEQ ID NO: 3782750 - RNA, 11 nt, Human
aggugcagugg

SEQ ID NO: 3782751 - RNA, 16 nt, Human
aggugcaguggcucac

SEQ ID NO: 3782752 - RNA, 16 nt, Human
aggugcaguuccccca

SEQ ID NO: 3782753 - RNA, 23 nt, Human
aggugcaucuggggaacuagagg

SEQ ID NO: 3782754 - RNA, 22 nt, Human
agcaaggcccgagcagcugagc

SEQ ID NO: 3782755 - RNA, 19 nt, Human
agcaaggcccugcugccca

SEQ ID NO: 3782756 - RNA, 17 nt, Human
agcaaggcgcuaacuug

SEQ ID NO: 3782757 - RNA, 20 nt, Human
agcaaggguucccucaagag

SEQ ID NO: 3782758 - RNA, 19 nt, Human
agcaaggucuugcucuccu

SEQ ID NO: 3782759 - RNA, 20 nt, Human
agcaaguagauaaauauuug

SEQ ID NO: 3782760 - RNA, 15 nt, Human
agcaagucagaauag

SEQ ID NO: 3782761 - RNA, 13 nt, Human
agcaagucucuuu

SEQ ID NO: 3782762 - RNA, 13 nt, Human
agcaagucugcag

SEQ ID NO: 3782763 - RNA, 16 nt, Human
agcaagugagacccug

SEQ ID NO: 3782764 - RNA, 20 nt, Human
agcaagugagacccugucuc

SEQ ID NO: 3782765 - RNA, 17 nt, Human
agcaagugagagcuggg

SEQ ID NO: 3782766 - RNA, 21 nt, Human
agcaagugauugggacagagg

SEQ ID NO: 3782767 - RNA, 15 nt, Human
agcaagugugaauac

SEQ ID NO: 3782768 - RNA, 15 nt, Human
agcaaguucgucugu

SEQ ID NO: 3782769 - RNA, 15 nt, Human
agcaauaaaugaaug

SEQ ID NO: 3782770 - RNA, 19 nt, Human
agcaauaauggucccaucc

SEQ ID NO: 3782771 - RNA, 20 nt, Human
agcaauaauggucccaucca

SEQ ID NO: 3782772 - RNA, 21 nt, Human
agcaauaauggucccauccag

SEQ ID NO: 3782773 - RNA, 16 nt, Human
agcaauauauuaccag

SEQ ID NO: 3782774 - RNA, 24 nt, Human
agcaauauauuaccagcaagaaua

SEQ ID NO: 3782775 - RNA, 12 nt, Human
agcaauauguca

SEQ ID NO: 3782776 - RNA, 12 nt, Human
agcaauauucuu

SEQ ID NO: 3782777 - RNA, 15 nt, Human
agcaauauuuaugga

SEQ ID NO: 3782778 - RNA, 22 nt, Human
agcaauauuuauggaugcaaca

SEQ ID NO: 3782779 - RNA, 19 nt, Human
agcaauccuagguaggguu

SEQ ID NO: 3782780 - RNA, 17 nt, Human
agcaauccuccugagug

SEQ ID NO: 3782781 - RNA, 23 nt, Human
agcaaucucuucauuauucucug

SEQ ID NO: 3782782 - RNA, 18 nt, Human
agcaaugauguccagaag

SEQ ID NO: 3782783 - RNA, 23 nt, Human
agcaaugauguccagaagaauau

SEQ ID NO: 3782784 - RNA, 20 nt, Human
agcaaugcccguaaugcuua

SEQ ID NO: 3782785 - RNA, 16 nt, Human
agcaaugucugugcua

SEQ ID NO: 3782786 - RNA, 17 nt, Human
agcaauguuaucuuggu

SEQ ID NO: 3782787 - RNA, 19 nt, Human
agcaauucauaaaaacugc

SEQ ID NO: 3782788 - RNA, 15 nt, Human
agcaauucuccugcc

SEQ ID NO: 3782789 - RNA, 17 nt, Human
agcaauugcugcaucuu

SEQ ID NO: 3782790 - RNA, 20 nt, Human
agcaauugcugcaucuuagu

SEQ ID NO: 3782791 - RNA, 16 nt, Human
agcaauugugugguca

SEQ ID NO: 3782792 - RNA, 16 nt, Human
agcaauuuaaauguua

SEQ ID NO: 3782793 - RNA, 17 nt, Human
agcaauuuaaauguuau

SEQ ID NO: 3782794 - RNA, 23 nt, Human
agcaauuuaauauuuugcacagu

SEQ ID NO: 3782795 - RNA, 21 nt, Human
agcaauuucgccguugaagag

SEQ ID NO: 3782796 - RNA, 22 nt, Human
agcaauuucgccguugaagagg

SEQ ID NO: 3782797 - RNA, 13 nt, Human
agcaauuucuaau

SEQ ID NO: 3782798 - RNA, 21 nt, Human
agcaauuuuccuugaagccga

SEQ ID NO: 3782799 - RNA, 14 nt, Human
agcacaaaauucaa

SEQ ID NO: 3782800 - RNA, 19 nt, Human
agcacaacuuuaagaggac

SEQ ID NO: 3782801 - RNA, 19 nt, Human
agcacaaguuauuuaaauc

SEQ ID NO: 3782802 - RNA, 18 nt, Human
agcacaauaaauggcugu

SEQ ID NO: 3782803 - RNA, 23 nt, Human
agcacaaugucucacaugggaca

SEQ ID NO: 3782804 - RNA, 12 nt, Human
agcacacuggcu

SEQ ID NO: 3782805 - RNA, 19 nt, Human
agcacacuggcucacccag

SEQ ID NO: 3782806 - RNA, 20 nt, Human
agcacacuggcucacccagu

SEQ ID NO: 3782807 - RNA, 14 nt, Human
agcacacuguagca

SEQ ID NO: 3782808 - RNA, 19 nt, Human
agcacacuguagcauuaca

SEQ ID NO: 3782809 - RNA, 13 nt, Human
agcacagaaggag

SEQ ID NO: 3782810 - RNA, 14 nt, Human
agcacagacccugc

SEQ ID NO: 3782811 - RNA, 20 nt, Human
agcacagacccugcccugug

SEQ ID NO: 3782812 - RNA, 21 nt, Human
agcacagacccugcccugugg

SEQ ID NO: 3782813 - RNA, 15 nt, Human
agcacagagaagaca

SEQ ID NO: 3782814 - RNA, 20 nt, Human
agcacagauaaaaaguggaa

SEQ ID NO: 3782815 - RNA, 16 nt, Human
agcacagauggccagc

SEQ ID NO: 3782816 - RNA, 22 nt, Human
agcacagauuuuaauugucaug

SEQ ID NO: 3782817 - RNA, 23 nt, Human
agcacagauuuuaauugucaugg

SEQ ID NO: 3782818 - RNA, 12 nt, Human
agcacagcagcc

SEQ ID NO: 3782819 - RNA, 12 nt, Human
agcacagcccuc

SEQ ID NO: 3782820 - RNA, 14 nt, Human
agcacagcccuccc

SEQ ID NO: 3782821 - RNA, 15 nt, Human
agcacagcccucccg

SEQ ID NO: 3782822 - RNA, 16 nt, Human
agcacagcccucccgc

SEQ ID NO: 3782823 - RNA, 21 nt, Human
agcacagcccucccgccccuu

SEQ ID NO: 3782824 - RNA, 22 nt, Human
agcacagcccucccgccccuuc

SEQ ID NO: 3782825 - RNA, 12 nt, Human
agcacagccuag

SEQ ID NO: 3782826 - RNA, 22 nt, Human
agcacagccucuuagaugcagu

SEQ ID NO: 3782827 - RNA, 21 nt, Human
agcacagcucaggaacuagac

SEQ ID NO: 3782828 - RNA, 12 nt, Human
agcacagcuccc

SEQ ID NO: 3782829 - RNA, 17 nt, Human
agcacagcucccugcca

SEQ ID NO: 3782830 - RNA, 20 nt, Human
agcacagcuuagauuucaua

SEQ ID NO: 3782831 - RNA, 14 nt, Human
agcacagcuugacc

SEQ ID NO: 3782832 - RNA, 15 nt, Human
agcacaggucccacc

SEQ ID NO: 3782833 - RNA, 23 nt, Human
agcacaggucccaccuccagccc

SEQ ID NO: 3782834 - RNA, 21 nt, Human
agcacaggugggcuucccagu

SEQ ID NO: 3782835 - RNA, 18 nt, Human
agcacagucagguugaag

SEQ ID NO: 3782836 - RNA, 15 nt, Human
agcacagugaucaag

SEQ ID NO: 3782837 - RNA, 15 nt, Human
agcacagugguggca

SEQ ID NO: 3782838 - RNA, 23 nt, Human
agcacagugguggcagggccuag

SEQ ID NO: 3782839 - RNA, 12 nt, Human
agcacaguuuga

SEQ ID NO: 3782840 - RNA, 14 nt, Human
agcacauccaggca

SEQ ID NO: 3782841 - RNA, 22 nt, Human
agcacauccaggcaauggccua

SEQ ID NO: 3782842 - RNA, 19 nt, Human
agcacaucucaacaggccu

SEQ ID NO: 3782843 - RNA, 15 nt, Human
agcacaucugcauuu

SEQ ID NO: 3782844 - RNA, 16 nt, Human
agcacaucugcauuuu

SEQ ID NO: 3782845 - RNA, 23 nt, Human
agcacaugaaaccuuauuuuuuc

SEQ ID NO: 3782846 - RNA, 20 nt, Human
agcacaugccucucucaggc

SEQ ID NO: 3782847 - RNA, 22 nt, Human
aggugggguugggauugggggc

SEQ ID NO: 3782848 - RNA, 23 nt, Human
agguggguuuucuucccaucacu

SEQ ID NO: 3782849 - RNA, 21 nt, Human
aggugguaguaaaacacagag

SEQ ID NO: 3782850 - RNA, 22 nt, Human
aggugguaguaaaacacagagg

SEQ ID NO: 3782851 - RNA, 18 nt, Human
aggugguaugugugugua

SEQ ID NO: 3782852 - RNA, 19 nt, Human
aggugguccugagaccuga

SEQ ID NO: 3782853 - RNA, 15 nt, Human
agguggugcuuacau

SEQ ID NO: 3782854 - RNA, 20 nt, Human
aggugguggcacugagcccc

SEQ ID NO: 3782855 - RNA, 18 nt, Human
agguggugucacuguccc

SEQ ID NO: 3782856 - RNA, 16 nt, Human
agguggugugaucuua

SEQ ID NO: 3782857 - RNA, 17 nt, Human
aggugguuauggagagg

SEQ ID NO: 3782858 - RNA, 19 nt, Human
agguguagccacaccagga

SEQ ID NO: 3782859 - RNA, 13 nt, Human
agguguauuuaaa

SEQ ID NO: 3782860 - RNA, 17 nt, Human
aggugucaggcugcugg

SEQ ID NO: 3782861 - RNA, 19 nt, Human
aggugucaggcugcuggcg

SEQ ID NO: 3782862 - RNA, 21 nt, Human
aggugucauacagauuugcaa

SEQ ID NO: 3782863 - RNA, 17 nt, Human
aggugucauuuccauua

SEQ ID NO: 3782864 - RNA, 17 nt, Human
agguguccccagcccac

SEQ ID NO: 3782865 - RNA, 16 nt, Human
aggugucccugcacuu

SEQ ID NO: 3782866 - RNA, 14 nt, Human
agguguccuacaga

SEQ ID NO: 3782867 - RNA, 17 nt, Human
agguguccuacagaaaa

SEQ ID NO: 3782868 - RNA, 17 nt, Human
aggugucucaggcugcc

SEQ ID NO: 3782869 - RNA, 14 nt, Human
aggugucugcaccc

SEQ ID NO: 3782870 - RNA, 20 nt, Human
aggugucuuccucccaagug

SEQ ID NO: 3782871 - RNA, 20 nt, Human
aggugugagccaccacgccc

SEQ ID NO: 3782872 - RNA, 21 nt, Human
aggugugagucaccaagccca

SEQ ID NO: 3782873 - RNA, 20 nt, Human
aggugugcucugaucaucca

SEQ ID NO: 3782874 - RNA, 23 nt, Human
agguguggcuuuaggagcagugg

SEQ ID NO: 3782875 - RNA, 16 nt, Human
aggugugugagacuac

SEQ ID NO: 3782876 - RNA, 16 nt, Human
agguguuggugacaau

SEQ ID NO: 3782877 - RNA, 16 nt, Human
agguguugucccuucu

SEQ ID NO: 3782878 - RNA, 13 nt, Human
agguguuuaaaga

SEQ ID NO: 3782879 - RNA, 14 nt, Human
agguguuuauacag

SEQ ID NO: 3782880 - RNA, 15 nt, Human
agguguuugaacaga

SEQ ID NO: 3782881 - RNA, 13 nt, Human
agguguuuucugu

SEQ ID NO: 3782882 - RNA, 15 nt, Human
agguguuuucugugu

SEQ ID NO: 3782883 - RNA, 16 nt, Human
agguguuuucugugua

SEQ ID NO: 3782884 - RNA, 22 nt, Human
agguguuuuguucaccauuaua

SEQ ID NO: 3782885 - RNA, 22 nt, Human
agguuaaaaaaaggcauuguuu

SEQ ID NO: 3782886 - RNA, 23 nt, Human
agguuaaaaaaauggcagugaug

SEQ ID NO: 3782887 - RNA, 22 nt, Human
agguuaaaagaccauaagcaaa

SEQ ID NO: 3782888 - RNA, 14 nt, Human
agguuaaauguuuu

SEQ ID NO: 3782889 - RNA, 18 nt, Human
agguuaaauguuuuguaa

SEQ ID NO: 3782890 - RNA, 16 nt, Human
agguuaaggcugagga

SEQ ID NO: 3782891 - RNA, 21 nt, Human
agguuaggaguucgagaccag

SEQ ID NO: 3782892 - RNA, 18 nt, Human
agguuaggauuuaacagu

SEQ ID NO: 3782893 - RNA, 23 nt, Human
agguuaggcaguauaaagaauag

SEQ ID NO: 3782894 - RNA, 14 nt, Human
agguuauaggucac

SEQ ID NO: 3782895 - RNA, 15 nt, Human
agguuaucagugcuu

SEQ ID NO: 3782896 - RNA, 14 nt, Human
agguuaucgaaaua

SEQ ID NO: 3782897 - RNA, 20 nt, Human
agguuaucgaaauaacaaug

SEQ ID NO: 3782898 - RNA, 19 nt, Human
agguuaucuacuuuuacuc

SEQ ID NO: 3782899 - RNA, 16 nt, Human
agguuauuuauuuaaa

SEQ ID NO: 3782900 - RNA, 17 nt, Human
agguuauuuuaguuucu

SEQ ID NO: 3782901 - RNA, 15 nt, Human
agguucaaagauauu

SEQ ID NO: 3782902 - RNA, 16 nt, Human
agguucacgugcagcu

SEQ ID NO: 3782903 - RNA, 18 nt, Human
agguucauggauuuucca

SEQ ID NO: 3782904 - RNA, 18 nt, Human
agguuccaacuguauaua

SEQ ID NO: 3782905 - RNA, 14 nt, Human
agguucccucccag

SEQ ID NO: 3782906 - RNA, 18 nt, Human
agguucccuguucuuccu

SEQ ID NO: 3782907 - RNA, 16 nt, Human
agguuccgauguuauu

SEQ ID NO: 3782908 - RNA, 13 nt, Human
agguuccucugcc

SEQ ID NO: 3782909 - RNA, 16 nt, Human
agguuccucugccugc

SEQ ID NO: 3782910 - RNA, 18 nt, Human
agguuccucugccugccc

SEQ ID NO: 3782911 - RNA, 17 nt, Human
agguucuaaaguucuaa

SEQ ID NO: 3782912 - RNA, 16 nt, Human
agcacucuuaaagcaa

SEQ ID NO: 3782913 - RNA, 20 nt, Human
agcacugaaaguauguuuua

SEQ ID NO: 3782914 - RNA, 20 nt, Human
agcacugaccugucaugccc

SEQ ID NO: 3782915 - RNA, 10 nt, Human
agcacugagg

SEQ ID NO: 3782916 - RNA, 21 nt, Human
agcacugaggaagaacggggc

SEQ ID NO: 3782917 - RNA, 17 nt, Human
agcacugauuucacaac

SEQ ID NO: 3782918 - RNA, 18 nt, Human
agcacugauuucacaaca

SEQ ID NO: 3782919 - RNA, 15 nt, Human
agcacugccugcucc

SEQ ID NO: 3782920 - RNA, 20 nt, Human
agcacugccugcucccaucc

SEQ ID NO: 3782921 - RNA, 21 nt, Human
agcacugcuaggcgagugcca

SEQ ID NO: 3782922 - RNA, 22 nt, Human
agcacugcuaggcgagugccag

SEQ ID NO: 3782923 - RNA, 23 nt, Human
agcacugcuaggcgagugccagg

SEQ ID NO: 3782924 - RNA, 23 nt, Human
agcacuggagugcagggaggaga

SEQ ID NO: 3782925 - RNA, 12 nt, Human
agcacuggccug

SEQ ID NO: 3782926 - RNA, 12 nt, Human
agcacugggcuc

SEQ ID NO: 3782927 - RNA, 18 nt, Human
agcacugggcucccgggc

SEQ ID NO: 3782928 - RNA, 15 nt, Human
agcacuguaaacuuc

SEQ ID NO: 3782929 - RNA, 15 nt, Human
agcacugucccuugc

SEQ ID NO: 3782930 - RNA, 16 nt, Human
agcacugucccuugcc

SEQ ID NO: 3782931 - RNA, 20 nt, Human
agcacugucucaguuucacu

SEQ ID NO: 3782932 - RNA, 15 nt, Human
agcacugugcucagg

SEQ ID NO: 3782933 - RNA, 18 nt, Human
agcacugugcucagggcu

SEQ ID NO: 3782934 - RNA, 17 nt, Human
agcacuguuccagccug

SEQ ID NO: 3782935 - RNA, 20 nt, Human
agcacuguuccagccugccc

SEQ ID NO: 3782936 - RNA, 15 nt, Human
agcacuguugaugua

SEQ ID NO: 3782937 - RNA, 18 nt, Human
agcacuguugauguaucu

SEQ ID NO: 3782938 - RNA, 20 nt, Human
agcacuguuuucuaguguau

SEQ ID NO: 3782939 - RNA, 21 nt, Human
agcacuguuuuuccauaguuu

SEQ ID NO: 3782940 - RNA, 17 nt, Human
agcacuuaagagaauau

SEQ ID NO: 3782941 - RNA, 20 nt, Human
agcacuuacagauaggccuu

SEQ ID NO: 3782942 - RNA, 18 nt, Human
agcacuuccaaaauucuu

SEQ ID NO: 3782943 - RNA, 16 nt, Human
agcacuuccuugccag

SEQ ID NO: 3782944 - RNA, 21 nt, Human
agcacuuggacucuugcucuu

SEQ ID NO: 3782945 - RNA, 14 nt, Human
agcacuuggcccuu

SEQ ID NO: 3782946 - RNA, 19 nt, Human
agcacuugucucauuuuaa

SEQ ID NO: 3782947 - RNA, 20 nt, Human
agcacuuuagaauaugccuu

SEQ ID NO: 3782948 - RNA, 18 nt, Human
agcacuuugaaauaccuc

SEQ ID NO: 3782949 - RNA, 19 nt, Human
agcacuuugaaauaccuca

SEQ ID NO: 3782950 - RNA, 19 nt, Human
agcacuuugcaaggaaugu

SEQ ID NO: 3782951 - RNA, 22 nt, Human
agcacuuugggaggccaaggug

SEQ ID NO: 3782952 - RNA, 19 nt, Human
agcacuuugggaggcugag

SEQ ID NO: 3782953 - RNA, 23 nt, Human
agcagaaaaaggcugugcugccc

SEQ ID NO: 3782954 - RNA, 22 nt, Human
agcagaaaacccuugggccaga

SEQ ID NO: 3782955 - RNA, 13 nt, Human
agcagaaaauaca

SEQ ID NO: 3782956 - RNA, 14 nt, Human
agcagaaagugccu

SEQ ID NO: 3782957 - RNA, 18 nt, Human
agcagaaagugccuuuca

SEQ ID NO: 3782958 - RNA, 15 nt, Human
agcagaaaucuagaa

SEQ ID NO: 3782959 - RNA, 20 nt, Human
agcagaacaguuaagcagcc

SEQ ID NO: 3782960 - RNA, 13 nt, Human
agcagaagacaaa

SEQ ID NO: 3782961 - RNA, 14 nt, Human
agcagaagcagcaa

SEQ ID NO: 3782962 - RNA, 14 nt, Human
agcagaagcucucg

SEQ ID NO: 3782963 - RNA, 13 nt, Human
agcagaaggaagg

SEQ ID NO: 3782964 - RNA, 17 nt, Human
agcagaaggggagaugg

SEQ ID NO: 3782965 - RNA, 23 nt, Human
agcagaaggggguggugucucca

SEQ ID NO: 3782966 - RNA, 22 nt, Human
agcagaauaaagcaauuuuccu

SEQ ID NO: 3782967 - RNA, 23 nt, Human
agcagaauaaagcaauuuuccuu

SEQ ID NO: 3782968 - RNA, 13 nt, Human
agcagaaugugau

SEQ ID NO: 3782969 - RNA, 22 nt, Human
agcagaauguucuggaaaugaa

SEQ ID NO: 3782970 - RNA, 15 nt, Human
agcagaauucauuca

SEQ ID NO: 3782971 - RNA, 17 nt, Human
agcagaauuggaaaaga

SEQ ID NO: 3782972 - RNA, 11 nt, Human
agcagacacau

SEQ ID NO: 3782973 - RNA, 12 nt, Human
agcagacacaug

SEQ ID NO: 3782974 - RNA, 16 nt, Human
agcagacacaugccag

SEQ ID NO: 3782975 - RNA, 15 nt, Human
agcagacagagccag

SEQ ID NO: 3782976 - RNA, 23 nt, Human
agcagacagagccaggagaagcu

SEQ ID NO: 3782977 - RNA, 12 nt, Human
agcagacaggcc

SEQ ID NO: 3782978 - RNA, 22 nt, Human
agcagaccaccccgccugcccu

SEQ ID NO: 3782979 - RNA, 22 nt, Human
agcagaccauuggggcucccag

SEQ ID NO: 3782980 - RNA, 22 nt, Human
agcagacgauaguuaucuguuc

SEQ ID NO: 3782981 - RNA, 17 nt, Human
agcagacugaucaggac

SEQ ID NO: 3782982 - RNA, 14 nt, Human
agcagacuggugag

SEQ ID NO: 3782983 - RNA, 18 nt, Human
agcagacuuuuaaagacu

SEQ ID NO: 3782984 - RNA, 16 nt, Human
agcagagaaggccagg

SEQ ID NO: 3782985 - RNA, 13 nt, Human
agcagagaagggc

SEQ ID NO: 3782986 - RNA, 16 nt, Human
agcagagaauauaaca

SEQ ID NO: 3782987 - RNA, 21 nt, Human
agcagagaaugaaagggccca

SEQ ID NO: 3782988 - RNA, 23 nt, Human
agcagagaaugaaagggcccaga

SEQ ID NO: 3782989 - RNA, 14 nt, Human
agcagagaauucuc

SEQ ID NO: 3782990 - RNA, 15 nt, Human
agcagagacacuaac

SEQ ID NO: 3782991 - RNA, 19 nt, Human
aguauuuauauauuuauaa

SEQ ID NO: 3782992 - RNA, 17 nt, Human
aguauuuauuuauguac

SEQ ID NO: 3782993 - RNA, 14 nt, Human
aguauuuauuuugu

SEQ ID NO: 3782994 - RNA, 15 nt, Human
aguauuuauuuugua

SEQ ID NO: 3782995 - RNA, 13 nt, Human
aguauuucagugu

SEQ ID NO: 3782996 - RNA, 20 nt, Human
aguauuucaguguaguuaau

SEQ ID NO: 3782997 - RNA, 15 nt, Human
aguauuucauugccu

SEQ ID NO: 3782998 - RNA, 13 nt, Human
aguauuucccagc

SEQ ID NO: 3782999 - RNA, 18 nt, Human
aguauuugaaaacagaaa

SEQ ID NO: 3783000 - RNA, 20 nt, Human
aguauuugaaaacagaaauu

SEQ ID NO: 3783001 - RNA, 21 nt, Human
aguauuugaaaacagaaauug

SEQ ID NO: 3783002 - RNA, 15 nt, Human
aguauuugaauuaaa

SEQ ID NO: 3783003 - RNA, 13 nt, Human
aguauuugauuca

SEQ ID NO: 3783004 - RNA, 17 nt, Human
aguauuugggaagugaa

SEQ ID NO: 3783005 - RNA, 21 nt, Human
aguauuugggaagugaagacu

SEQ ID NO: 3783006 - RNA, 21 nt, Human
aguauuugucguguguagaaa

SEQ ID NO: 3783007 - RNA, 14 nt, Human
aguauuuguuaauu

SEQ ID NO: 3783008 - RNA, 17 nt, Human
aguauuuuaaaauagcg

SEQ ID NO: 3783009 - RNA, 12 nt, Human
aguauuuuagug

SEQ ID NO: 3783010 - RNA, 18 nt, Human
aguauuuuagugaacuug

SEQ ID NO: 3783011 - RNA, 20 nt, Human
aguauuuuagugaacuugaa

SEQ ID NO: 3783012 - RNA, 21 nt, Human
aguauuuuaguggacccugaa

SEQ ID NO: 3783013 - RNA, 19 nt, Human
aguauuuucccugcuaggg

SEQ ID NO: 3783014 - RNA, 14 nt, Human
aguauuuuccugua

SEQ ID NO: 3783015 - RNA, 17 nt, Human
aguauuuugcuggaaua

SEQ ID NO: 3783016 - RNA, 14 nt, Human
aguauuuuuaaagg

SEQ ID NO: 3783017 - RNA, 13 nt, Human
aguauuuuuauaa

SEQ ID NO: 3783018 - RNA, 22 nt, Human
aguauuuuuauaaauauaagcc

SEQ ID NO: 3783019 - RNA, 14 nt, Human
aguauuuuugcugc

SEQ ID NO: 3783020 - RNA, 19 nt, Human
aguauuuuuuacauuuuac

SEQ ID NO: 3783021 - RNA, 16 nt, Human
aguauuuuuucaguau

SEQ ID NO: 3783022 - RNA, 15 nt, Human
agucaaaaauuaaac

SEQ ID NO: 3783023 - RNA, 19 nt, Human
agucaaaacacuuguaauu

SEQ ID NO: 3783024 - RNA, 14 nt, Human
agucaaaacagaga

SEQ ID NO: 3783025 - RNA, 21 nt, Human
agucaaaacagagaugugaua

SEQ ID NO: 3783026 - RNA, 13 nt, Human
agucaaaacuuua

SEQ ID NO: 3783027 - RNA, 18 nt, Human
agucaaaaggugccugug

SEQ ID NO: 3783028 - RNA, 19 nt, Human
agucaaaauauuuuuaaaa

SEQ ID NO: 3783029 - RNA, 19 nt, Human
agucaaacacuugugacuu

SEQ ID NO: 3783030 - RNA, 15 nt, Human
agucaaacugugcca

SEQ ID NO: 3783031 - RNA, 22 nt, Human
agucaaaugguaggcauuuccu

SEQ ID NO: 3783032 - RNA, 22 nt, Human
agucaaauguaauguggcuucu

SEQ ID NO: 3783033 - RNA, 15 nt, Human
agucaaauuaauaau

SEQ ID NO: 3783034 - RNA, 17 nt, Human
agucaaauugugugaaa

SEQ ID NO: 3783035 - RNA, 18 nt, Human
agucaacaguaaaccacu

SEQ ID NO: 3783036 - RNA, 12 nt, Human
agucaacaguac

SEQ ID NO: 3783037 - RNA, 15 nt, Human
agucaaccaacccca

SEQ ID NO: 3783038 - RNA, 22 nt, Human
agucaacccuccuaaaaguuca

SEQ ID NO: 3783039 - RNA, 19 nt, Human
agucaagaaaaauuauugu

SEQ ID NO: 3783040 - RNA, 14 nt, Human
agucaagaagaaaa

SEQ ID NO: 3783041 - RNA, 13 nt, Human
agucaagcuccuc

SEQ ID NO: 3783042 - RNA, 22 nt, Human
agucaagcuguugaagucucag

SEQ ID NO: 3783043 - RNA, 14 nt, Human
agucaaggccugcu

SEQ ID NO: 3783044 - RNA, 19 nt, Human
agucaaggccugcucccug

SEQ ID NO: 3783045 - RNA, 20 nt, Human
agucaagugcguccacgagc

SEQ ID NO: 3783046 - RNA, 14 nt, Human
agucaauaagaaaa

SEQ ID NO: 3783047 - RNA, 17 nt, Human
agucaaucauuucucac

SEQ ID NO: 3783048 - RNA, 15 nt, Human
agucaaugacaugaa

SEQ ID NO: 3783049 - RNA, 14 nt, Human
agucaauggcuugu

SEQ ID NO: 3783050 - RNA, 18 nt, Human
agucacaaagaacaugua

SEQ ID NO: 3783051 - RNA, 23 nt, Human
agucacaauguucuuuauauaca

SEQ ID NO: 3783052 - RNA, 11 nt, Human
agucacacagu

SEQ ID NO: 3783053 - RNA, 22 nt, Human
agucacacaguauuacuucugc

SEQ ID NO: 3783054 - RNA, 15 nt, Human
agucacacagugagu

SEQ ID NO: 3783055 - RNA, 17 nt, Human
agucacacaguguugga

SEQ ID NO: 3783056 - RNA, 21 nt, Human
agucacagaacaaauguuugu

SEQ ID NO: 3783057 - RNA, 17 nt, Human
agucacagggcaguacc

SEQ ID NO: 3783058 - RNA, 20 nt, Human
agucacauuccugaacagga

SEQ ID NO: 3783059 - RNA, 22 nt, Human
agucaccaaaagacacugcaga

SEQ ID NO: 3783060 - RNA, 19 nt, Human
agucaccacuccauuccca

SEQ ID NO: 3783061 - RNA, 14 nt, Human
agucaccagagacu

SEQ ID NO: 3783062 - RNA, 20 nt, Human
agucacccuaccugugccug

SEQ ID NO: 3783063 - RNA, 24 nt, Human
agucacccuuccaccauuguccua

SEQ ID NO: 3783064 - RNA, 14 nt, Human
agucaccucaugga

SEQ ID NO: 3783065 - RNA, 13 nt, Human
agucaccucuguc

SEQ ID NO: 3783066 - RNA, 20 nt, Human
agucaccuuccaggaccccu

SEQ ID NO: 3783067 - RNA, 15 nt, Human
agucaccuucccuug

SEQ ID NO: 3783068 - RNA, 16 nt, Human
agucaccuucccuugc

SEQ ID NO: 3783069 - RNA, 18 nt, Human
agucaccuucccuugcca

SEQ ID NO: 3783070 - RNA, 21 nt, Human
agucacggcugcgcacugugu

SEQ ID NO: 3783071 - RNA, 18 nt, Human
agucacuaccuucaugca

SEQ ID NO: 3783072 - RNA, 20 nt, Human
agucacucuagucaaugaca

SEQ ID NO: 3783073 - RNA, 15 nt, Human
agucacugagacagc

SEQ ID NO: 3783074 - RNA, 19 nt, Human
agucacugagacagcccgg

SEQ ID NO: 3783075 - RNA, 13 nt, Human
agucacugcacag

SEQ ID NO: 3783076 - RNA, 21 nt, Human
agucacugcacguuuucaucu

SEQ ID NO: 3783077 - RNA, 21 nt, Human
agucacugccacuuugcacau

SEQ ID NO: 3783078 - RNA, 20 nt, Human
agucacugccucucccuggc

SEQ ID NO: 3783079 - RNA, 23 nt, Human
agucacuggagguugaagccaag

SEQ ID NO: 3783080 - RNA, 23 nt, Human
agucacuggucuguuugcauuug

SEQ ID NO: 3783081 - RNA, 16 nt, Human
agucacuuacuauugu

SEQ ID NO: 3783082 - RNA, 24 nt, Human
agucacuucgugggaucugccccu

SEQ ID NO: 3783083 - RNA, 23 nt, Human
agucacuugaugugccauuuuaa

SEQ ID NO: 3783084 - RNA, 17 nt, Human
agucacuuuuuuuuucc

SEQ ID NO: 3783085 - RNA, 13 nt, Human
agucagaaaacuu

SEQ ID NO: 3783086 - RNA, 15 nt, Human
agucagaaaacuuua

SEQ ID NO: 3783087 - RNA, 23 nt, Human
agucagaaaacuuuaaaaaauau

SEQ ID NO: 3783088 - RNA, 22 nt, Human
agucagaaguuucugccgcagc

SEQ ID NO: 3783089 - RNA, 16 nt, Human
agucagacagaugugg

SEQ ID NO: 3783090 - RNA, 15 nt, Human
agucagacugcuggg

SEQ ID NO: 3783091 - RNA, 23 nt, Human
agucagagccaugucuucucccu

SEQ ID NO: 3783092 - RNA, 18 nt, Human
agucagaggauggccagu

SEQ ID NO: 3783093 - RNA, 12 nt, Human
agucagauguuu

SEQ ID NO: 3783094 - RNA, 16 nt, Human
agucagauucuugcau

SEQ ID NO: 3783095 - RNA, 16 nt, Human
agucagccucgcaggc

SEQ ID NO: 3783096 - RNA, 23 nt, Human
agucagccuucccccucccaggg

SEQ ID NO: 3783097 - RNA, 14 nt, Human
agucagcucucugc

SEQ ID NO: 3783098 - RNA, 17 nt, Human
agucagcucuucaucug

SEQ ID NO: 3783099 - RNA, 22 nt, Human
agucagcucuucaucugcccaa

SEQ ID NO: 3783100 - RNA, 22 nt, Human
agucaggaguccaagaccagac

SEQ ID NO: 3783101 - RNA, 11 nt, Human
agucaggauga

SEQ ID NO: 3783102 - RNA, 22 nt, Human
agucaggccuuaauuuucagua

SEQ ID NO: 3783103 - RNA, 19 nt, Human
agucagggguucccuuuuu

SEQ ID NO: 3783104 - RNA, 19 nt, Human
agucaguaggacuccuuau

SEQ ID NO: 3783105 - RNA, 15 nt, Human
aggugcagccagagg

SEQ ID NO: 3783106 - RNA, 16 nt, Human
aggugcagccagaggc

SEQ ID NO: 3783107 - RNA, 17 nt, Human
aggugcagccagaggca

SEQ ID NO: 3783108 - RNA, 15 nt, Human
aggugcaggcaggcu

SEQ ID NO: 3783109 - RNA, 23 nt, Human
aggugcaguucccccaaccucag

SEQ ID NO: 3783110 - RNA, 20 nt, Human
aggugcauauuuauaaaaau

SEQ ID NO: 3783111 - RNA, 15 nt, Human
aggugccagcaacug

SEQ ID NO: 3783112 - RNA, 21 nt, Human
aggugccagcaacugaauaaa

SEQ ID NO: 3783113 - RNA, 21 nt, Human
aggugccagccugaggcagcc

SEQ ID NO: 3783114 - RNA, 20 nt, Human
aggugcccuuggaggccagc

SEQ ID NO: 3783115 - RNA, 22 nt, Human
aggugcccuuggaggccagcca

SEQ ID NO: 3783116 - RNA, 17 nt, Human
aggugccugucccaccc

SEQ ID NO: 3783117 - RNA, 18 nt, Human
aggugccugugaggcagg

SEQ ID NO: 3783118 - RNA, 11 nt, Human
aggugccuucu

SEQ ID NO: 3783119 - RNA, 16 nt, Human
aggugccuucuucagg

SEQ ID NO: 3783120 - RNA, 18 nt, Human
aggugccuucuucagggc

SEQ ID NO: 3783121 - RNA, 20 nt, Human
aggugccuucuucagggccu

SEQ ID NO: 3783122 - RNA, 17 nt, Human
aggugcuaauuuguuuu

SEQ ID NO: 3783123 - RNA, 24 nt, Human
aggugcuacaaaaacacagcaagg

SEQ ID NO: 3783124 - RNA, 18 nt, Human
aggugcucucuuucuguc

SEQ ID NO: 3783125 - RNA, 16 nt, Human
aggugcugccauccag

SEQ ID NO: 3783126 - RNA, 20 nt, Human
aggugcugcuacccucccug

SEQ ID NO: 3783127 - RNA, 22 nt, Human
aggugcugcuacccucccugcu

SEQ ID NO: 3783128 - RNA, 22 nt, Human
aggugcuggagcacugggcucc

SEQ ID NO: 3783129 - RNA, 14 nt, Human
aggugcuggaggug

SEQ ID NO: 3783130 - RNA, 17 nt, Human
aggugcuggagguggga

SEQ ID NO: 3783131 - RNA, 13 nt, Human
aggugcugggagg

SEQ ID NO: 3783132 - RNA, 22 nt, Human
aggugcuucuaguucugccagg

SEQ ID NO: 3783133 - RNA, 13 nt, Human
agguggaaaaaca

SEQ ID NO: 3783134 - RNA, 15 nt, Human
agguggaaauaaacu

SEQ ID NO: 3783135 - RNA, 15 nt, Human
aguguaugauuacug

SEQ ID NO: 3783136 - RNA, 19 nt, Human
aguguaugauuacuggccu

SEQ ID NO: 3783137 - RNA, 16 nt, Human
aguguaugucuuguau

SEQ ID NO: 3783138 - RNA, 21 nt, Human
aguguauuuuucaauaaagca

SEQ ID NO: 3783139 - RNA, 15 nt, Human
agugucaaauaaaca

SEQ ID NO: 3783140 - RNA, 19 nt, Human
agugucaaguugugcuugu

SEQ ID NO: 3783141 - RNA, 19 nt, Human
agugucacuuaccuagauu

SEQ ID NO: 3783142 - RNA, 17 nt, Human
aguguccaaagcagggu

SEQ ID NO: 3783143 - RNA, 21 nt, Human
aguguccaaagcagggucugg

SEQ ID NO: 3783144 - RNA, 21 nt, Human
aguguccauugacauguacag

SEQ ID NO: 3783145 - RNA, 22 nt, Human
aguguccauugacauguacaga

SEQ ID NO: 3783146 - RNA, 23 nt, Human
aguguccauugacauguacagag

SEQ ID NO: 3783147 - RNA, 22 nt, Human
aguguccauuuugugaagcccu

SEQ ID NO: 3783148 - RNA, 18 nt, Human
agugucccccacccccac

SEQ ID NO: 3783149 - RNA, 14 nt, Human
agugucccccaggu

SEQ ID NO: 3783150 - RNA, 13 nt, Human
aguguccccucca

SEQ ID NO: 3783151 - RNA, 19 nt, Human
aguguccuaugcaauaaaa

SEQ ID NO: 3783152 - RNA, 15 nt, Human
aguguccugagcuca

SEQ ID NO: 3783153 - RNA, 14 nt, Human
agugucuaaaaaca

SEQ ID NO: 3783154 - RNA, 15 nt, Human
agugucucacacugg

SEQ ID NO: 3783155 - RNA, 19 nt, Human
agugucucaguccaccuga

SEQ ID NO: 3783156 - RNA, 22 nt, Human
agugucucaguccaccugagcu

SEQ ID NO: 3783157 - RNA, 18 nt, Human
agugucugcuggagacau

SEQ ID NO: 3783158 - RNA, 21 nt, Human
agugucuggaauuguggcuau

SEQ ID NO: 3783159 - RNA, 18 nt, Human
agugucuggaucaguaaa

SEQ ID NO: 3783160 - RNA, 14 nt, Human
agugucugggcuga

SEQ ID NO: 3783161 - RNA, 22 nt, Human
agugucuguaucggagacagug

SEQ ID NO: 3783162 - RNA, 14 nt, Human
agugucuuccugug

SEQ ID NO: 3783163 - RNA, 23 nt, Human
agugucuuuccacggagccacuc

SEQ ID NO: 3783164 - RNA, 23 nt, Human
agugucuuucuuuggugccuuuc

SEQ ID NO: 3783165 - RNA, 17 nt, Human
agugucuuuuuuuguau

SEQ ID NO: 3783166 - RNA, 20 nt, Human
agugucuuuuuuuguauagu

SEQ ID NO: 3783167 - RNA, 14 nt, Human
agugugaacuggac

SEQ ID NO: 3783168 - RNA, 17 nt, Human
agugugaaguacaauaa

SEQ ID NO: 3783169 - RNA, 13 nt, Human
agugugaaguuag

SEQ ID NO: 3783170 - RNA, 22 nt, Human
agugugaaguuagaauuccuuc

SEQ ID NO: 3783171 - RNA, 14 nt, Human
agugugaauauaaa

SEQ ID NO: 3783172 - RNA, 18 nt, Human
agugugaauauaaaugug

SEQ ID NO: 3783173 - RNA, 16 nt, Human
agugugacagggccag

SEQ ID NO: 3783174 - RNA, 12 nt, Human
agugugagaauc

SEQ ID NO: 3783175 - RNA, 16 nt, Human
agugugagcagugagu

SEQ ID NO: 3783176 - RNA, 21 nt, Human
agugugagcagugaguuacag

SEQ ID NO: 3783177 - RNA, 16 nt, Human
agugugaguaagagcu

SEQ ID NO: 3783178 - RNA, 18 nt, Human
agugugaguaaucugaga

SEQ ID NO: 3783179 - RNA, 18 nt, Human
agugugauguauguguaa

SEQ ID NO: 3783180 - RNA, 22 nt, Human
agugugauguauguguaauaaa

SEQ ID NO: 3783181 - RNA, 23 nt, Human
agugugauguauguguaauaaau

SEQ ID NO: 3783182 - RNA, 20 nt, Human
agugugauugggaauaaaua

SEQ ID NO: 3783183 - RNA, 14 nt, Human
agugugcaaaauau

SEQ ID NO: 3783184 - RNA, 15 nt, Human
agugugcaaggcagc

SEQ ID NO: 3783185 - RNA, 17 nt, Human
agugugcaguaucugug

SEQ ID NO: 3783186 - RNA, 15 nt, Human
agugugccacaugga

SEQ ID NO: 3783187 - RNA, 14 nt, Human
agcccugaguuccu

SEQ ID NO: 3783188 - RNA, 18 nt, Human
agcccugaguuccuagcc

SEQ ID NO: 3783189 - RNA, 20 nt, Human
agcccugaguuccuagccac

SEQ ID NO: 3783190 - RNA, 21 nt, Human
agcccugauugcgcaaaacug

SEQ ID NO: 3783191 - RNA, 14 nt, Human
agcccugcagaggg

SEQ ID NO: 3783192 - RNA, 22 nt, Human
agcccugccucuccgccccuga

SEQ ID NO: 3783193 - RNA, 11 nt, Human
agcccugcucc

SEQ ID NO: 3783194 - RNA, 12 nt, Human
agcccugcuggc

SEQ ID NO: 3783195 - RNA, 16 nt, Human
agcccugcuggccgcc

SEQ ID NO: 3783196 - RNA, 17 nt, Human
agcccugcuggccgccu

SEQ ID NO: 3783197 - RNA, 21 nt, Human
agcccugcuggccgccucacc

SEQ ID NO: 3783198 - RNA, 21 nt, Human
agcccugcuuugggcugcccu

SEQ ID NO: 3783199 - RNA, 12 nt, Human
agcccuggagac

SEQ ID NO: 3783200 - RNA, 21 nt, Human
agcccuggagccaacugcugc

SEQ ID NO: 3783201 - RNA, 12 nt, Human
agcccuggaggu

SEQ ID NO: 3783202 - RNA, 21 nt, Human
agcccuggaggugccagcaaa

SEQ ID NO: 3783203 - RNA, 19 nt, Human
agcccuggagucaugccaa

SEQ ID NO: 3783204 - RNA, 12 nt, Human
agcccuggcagg

SEQ ID NO: 3783205 - RNA, 13 nt, Human
agcccuggcagga

SEQ ID NO: 3783206 - RNA, 16 nt, Human
agcccuggccagaggc

SEQ ID NO: 3783207 - RNA, 12 nt, Human
agcccuggcccc

SEQ ID NO: 3783208 - RNA, 15 nt, Human
agcccuggcucugca

SEQ ID NO: 3783209 - RNA, 13 nt, Human
agcccuggcugaa

SEQ ID NO: 3783210 - RNA, 14 nt, Human
agcccugggaccgc

SEQ ID NO: 3783211 - RNA, 18 nt, Human
agcccugggaucacugug

SEQ ID NO: 3783212 - RNA, 16 nt, Human
agcccugggccccacc

SEQ ID NO: 3783213 - RNA, 14 nt, Human
agcccuggucucag

SEQ ID NO: 3783214 - RNA, 17 nt, Human
agcccuggucucagcag

SEQ ID NO: 3783215 - RNA, 15 nt, Human
agcccugguggcagu

SEQ ID NO: 3783216 - RNA, 22 nt, Human
agcccugguggcagugggagcu

SEQ ID NO: 3783217 - RNA, 15 nt, Human
agcccuguaauuuuu

SEQ ID NO: 3783218 - RNA, 19 nt, Human
agcccugucagugcagccc

SEQ ID NO: 3783219 - RNA, 14 nt, Human
agcccuguccuggu

SEQ ID NO: 3783220 - RNA, 23 nt, Human
agcccuguccuggugguauuuuc

SEQ ID NO: 3783221 - RNA, 23 nt, Human
agcccugucgagacacuugccuu

SEQ ID NO: 3783222 - RNA, 14 nt, Human
agcccugucgggcu

SEQ ID NO: 3783223 - RNA, 18 nt, Human
agcccugucgggcuuugu

SEQ ID NO: 3783224 - RNA, 22 nt, Human
agcccugucgggcuuuguguga

SEQ ID NO: 3783225 - RNA, 18 nt, Human
agcccugucuccucucuc

SEQ ID NO: 3783226 - RNA, 17 nt, Human
agcccuguugacacagg

SEQ ID NO: 3783227 - RNA, 19 nt, Human
agcccuguugugccacaga

SEQ ID NO: 3783228 - RNA, 21 nt, Human
agcccuuagcagggaaacagc

SEQ ID NO: 3783229 - RNA, 22 nt, Human
agcccuuccaugucgccucugc

SEQ ID NO: 3783230 - RNA, 16 nt, Human
agcccuuccucugcuc

SEQ ID NO: 3783231 - RNA, 18 nt, Human
agcccuuccucugcuccc

SEQ ID NO: 3783232 - RNA, 19 nt, Human
agcccuuccucugcucccc

SEQ ID NO: 3783233 - RNA, 20 nt, Human
agcccuucuauacccaccca

SEQ ID NO: 3783234 - RNA, 19 nt, Human
agcccuucuuuccacagaa

SEQ ID NO: 3783235 - RNA, 20 nt, Human
agcccuugagcuccccaaaa

SEQ ID NO: 3783236 - RNA, 17 nt, Human
agcccuugcauugcaga

SEQ ID NO: 3783237 - RNA, 23 nt, Human
agcccuugccuccccauuuccca

SEQ ID NO: 3783238 - RNA, 11 nt, Human
agcccuuggcc

SEQ ID NO: 3783239 - RNA, 13 nt, Human
agcccuuucugug

SEQ ID NO: 3783240 - RNA, 18 nt, Human
agcccuuucugugugcac

SEQ ID NO: 3783241 - RNA, 16 nt, Human
agccgaccucagccuu

SEQ ID NO: 3783242 - RNA, 12 nt, Human
agccgacucugg

SEQ ID NO: 3783243 - RNA, 18 nt, Human
agccgacucuggcccugg

SEQ ID NO: 3783244 - RNA, 20 nt, Human
agccgacucuggcccuggcc

SEQ ID NO: 3783245 - RNA, 23 nt, Human
agccgacugcacagcggccccug

SEQ ID NO: 3783246 - RNA, 14 nt, Human
agccgagagccugc

SEQ ID NO: 3783247 - RNA, 18 nt, Human
agccgagagccugcuccc

SEQ ID NO: 3783248 - RNA, 20 nt, Human
agccgagauagccaaggcca

SEQ ID NO: 3783249 - RNA, 17 nt, Human
agccgagaucacgccac

SEQ ID NO: 3783250 - RNA, 20 nt, Human
agccgagaucacgccacugc

SEQ ID NO: 3783251 - RNA, 21 nt, Human
agccgagaucacgccacugca

SEQ ID NO: 3783252 - RNA, 19 nt, Human
agccgagauugcaccacug

SEQ ID NO: 3783253 - RNA, 16 nt, Human
agccgagccgggccug

SEQ ID NO: 3783254 - RNA, 16 nt, Human
agccgcaucuucucca

SEQ ID NO: 3783255 - RNA, 17 nt, Human
agccgcaucuucuccau

SEQ ID NO: 3783256 - RNA, 14 nt, Human
agccgccaggaccg

SEQ ID NO: 3783257 - RNA, 21 nt, Human
agccgccaggaccgccaaaga

SEQ ID NO: 3783258 - RNA, 17 nt, Human
agccgccaucagcccaa

SEQ ID NO: 3783259 - RNA, 21 nt, Human
agccgccauugccaccaggag

SEQ ID NO: 3783260 - RNA, 22 nt, Human
agccgccauugccaccaggaga

SEQ ID NO: 3783261 - RNA, 13 nt, Human
agccgcccaaggc

SEQ ID NO: 3783262 - RNA, 16 nt, Human
agccgcccaaggccuu

SEQ ID NO: 3783263 - RNA, 16 nt, Human
agccgccuucacagca

SEQ ID NO: 3783264 - RNA, 16 nt, Human
agccgcuccugucugc

SEQ ID NO: 3783265 - RNA, 12 nt, Human
agccgcucggag

SEQ ID NO: 3783266 - RNA, 19 nt, Human
agccgcugagcgaggagau

SEQ ID NO: 3783267 - RNA, 13 nt, Human
agccgcuggggcc

SEQ ID NO: 3783268 - RNA, 14 nt, Human
agccgcuggggcca

SEQ ID NO: 3783269 - RNA, 19 nt, Human
agccgcugugagccccugg

SEQ ID NO: 3783270 - RNA, 21 nt, Human
agccgcuuggcgaugccagcc

SEQ ID NO: 3783271 - RNA, 15 nt, Human
agccggcacaggguc

SEQ ID NO: 3783272 - RNA, 14 nt, Human
agccggccucucug

SEQ ID NO: 3783273 - RNA, 19 nt, Human
agccggccucucuggccuc

SEQ ID NO: 3783274 - RNA, 22 nt, Human
agccggccucucuggccuccca

SEQ ID NO: 3783275 - RNA, 13 nt, Human
agccggcggccca

SEQ ID NO: 3783276 - RNA, 18 nt, Human
agccggcggcccaagccc

SEQ ID NO: 3783277 - RNA, 19 nt, Human
agccggcguggcaaauaua

SEQ ID NO: 3783278 - RNA, 11 nt, Human
agccgggccgc

SEQ ID NO: 3783279 - RNA, 18 nt, Human
aguucaguggcagggcuc

SEQ ID NO: 3783280 - RNA, 23 nt, Human
aguucaguggcagggcucaggau

SEQ ID NO: 3783281 - RNA, 16 nt, Human
aguucaguuccucuuu

SEQ ID NO: 3783282 - RNA, 23 nt, Human
aguucaguuccucuuugcaugga

SEQ ID NO: 3783283 - RNA, 24 nt, Human
aguucaguuccucuuugcauggaa

SEQ ID NO: 3783284 - RNA, 15 nt, Human
aguucauacauugua

SEQ ID NO: 3783285 - RNA, 14 nt, Human
aguucauacccugu

SEQ ID NO: 3783286 - RNA, 12 nt, Human
aguucauacuug

SEQ ID NO: 3783287 - RNA, 18 nt, Human
aguucauauguaccaugu

SEQ ID NO: 3783288 - RNA, 22 nt, Human
aguucauauguaccauguacau

SEQ ID NO: 3783289 - RNA, 19 nt, Human
aguucauauuccauauuua

SEQ ID NO: 3783290 - RNA, 20 nt, Human
aguucauccaauccucacug

SEQ ID NO: 3783291 - RNA, 18 nt, Human
aguucaucgauuuucuau

SEQ ID NO: 3783292 - RNA, 15 nt, Human
aguucaucuugaauu

SEQ ID NO: 3783293 - RNA, 19 nt, Human
aguucaucuugaauuguaa

SEQ ID NO: 3783294 - RNA, 21 nt, Human
aguucaugagaaucuauauuu

SEQ ID NO: 3783295 - RNA, 14 nt, Human
aguucauguaaaua

SEQ ID NO: 3783296 - RNA, 16 nt, Human
aguucaugucugcuau

SEQ ID NO: 3783297 - RNA, 17 nt, Human
aguucauguuugcuuca

SEQ ID NO: 3783298 - RNA, 14 nt, Human
aguuccacagauug

SEQ ID NO: 3783299 - RNA, 21 nt, Human
aguuccacagauuguuucuau

SEQ ID NO: 3783300 - RNA, 21 nt, Human
aguuccaccaucaagccacca

SEQ ID NO: 3783301 - RNA, 14 nt, Human
aguuccagaagugu

SEQ ID NO: 3783302 - RNA, 18 nt, Human
aguuccagaagugugacu

SEQ ID NO: 3783303 - RNA, 14 nt, Human
aguucccaagaaag

SEQ ID NO: 3783304 - RNA, 23 nt, Human
aguucccaagaaaggaaaccuuu

SEQ ID NO: 3783305 - RNA, 17 nt, Human
aguucccacauuaaaga

SEQ ID NO: 3783306 - RNA, 13 nt, Human
aguucccagaauc

SEQ ID NO: 3783307 - RNA, 15 nt, Human
aguucccagaaucaa

SEQ ID NO: 3783308 - RNA, 18 nt, Human
aguucccaguuggagcuc

SEQ ID NO: 3783309 - RNA, 15 nt, Human
aguucccauguuaaa

SEQ ID NO: 3783310 - RNA, 17 nt, Human
aguuccccaugcagaca

SEQ ID NO: 3783311 - RNA, 22 nt, Human
aguuccccuggaagcagugccc

SEQ ID NO: 3783312 - RNA, 18 nt, Human
aguuccccuguuuauuca

SEQ ID NO: 3783313 - RNA, 19 nt, Human
aguuccccuguuuauucau

SEQ ID NO: 3783314 - RNA, 20 nt, Human
aguuccccuguuuauucaua

SEQ ID NO: 3783315 - RNA, 17 nt, Human
aguucccuacuuccugu

SEQ ID NO: 3783316 - RNA, 17 nt, Human
aguucccucugcucagc

SEQ ID NO: 3783317 - RNA, 20 nt, Human
aguucccucugcucagccaa

SEQ ID NO: 3783318 - RNA, 14 nt, Human
aguucccugaaaac

SEQ ID NO: 3783319 - RNA, 24 nt, Human
aguucccugaaaacccagagagga

SEQ ID NO: 3783320 - RNA, 16 nt, Human
aguucccuuggccuca

SEQ ID NO: 3783321 - RNA, 15 nt, Human
aguuccuaagaagcu

SEQ ID NO: 3783322 - RNA, 16 nt, Human
aguuccuaagaagcuu

SEQ ID NO: 3783323 - RNA, 17 nt, Human
aguuccuagccaccgcc

SEQ ID NO: 3783324 - RNA, 23 nt, Human
aguuccucauuagcauuuugcua

SEQ ID NO: 3783325 - RNA, 17 nt, Human
aguuccucgcccugggu

SEQ ID NO: 3783326 - RNA, 14 nt, Human
aguuccucuuuugu

SEQ ID NO: 3783327 - RNA, 13 nt, Human
aguuccugcuaaa

SEQ ID NO: 3783328 - RNA, 20 nt, Human
aguuccugucccuucucuua

SEQ ID NO: 3783329 - RNA, 16 nt, Human
aguuccugugcacagc

SEQ ID NO: 3783330 - RNA, 17 nt, Human
aguuccugugcacagcc

SEQ ID NO: 3783331 - RNA, 17 nt, Human
aguuccuguggcucccu

SEQ ID NO: 3783332 - RNA, 18 nt, Human
aguucgagaccaaccuga

SEQ ID NO: 3783333 - RNA, 17 nt, Human
aguucgcagccacccug

SEQ ID NO: 3783334 - RNA, 23 nt, Human
aguucuaacagugaaguuuuacu

SEQ ID NO: 3783335 - RNA, 19 nt, Human
aguucuaagauucuaauga

SEQ ID NO: 3783336 - RNA, 17 nt, Human
aguucuaauaauuucua

SEQ ID NO: 3783337 - RNA, 20 nt, Human
aguucuaauaauuucuaaug

SEQ ID NO: 3783338 - RNA, 14 nt, Human
aguucuaccggcuu

SEQ ID NO: 3783339 - RNA, 20 nt, Human
aguucuaccucaggcagcuc

SEQ ID NO: 3783340 - RNA, 22 nt, Human
aguucuaccucaggcagcucaa

SEQ ID NO: 3783341 - RNA, 22 nt, Human
aguucuacuauggcugaguucu

SEQ ID NO: 3783342 - RNA, 21 nt, Human
aguucuagacauggagguucu

SEQ ID NO: 3783343 - RNA, 15 nt, Human
aguucuagagaagag

SEQ ID NO: 3783344 - RNA, 20 nt, Human
aguucuagagaagaggcugg

SEQ ID NO: 3783345 - RNA, 18 nt, Human
aguucuagugcagcugaa

SEQ ID NO: 3783346 - RNA, 22 nt, Human
aguucuagugcagcugaaauug

SEQ ID NO: 3783347 - RNA, 23 nt, Human
aguucuagugcagcugaaauuga

SEQ ID NO: 3783348 - RNA, 16 nt, Human
aguucuaguuugcauu

SEQ ID NO: 3783349 - RNA, 17 nt, Human
aguucuaguuugcauuc

SEQ ID NO: 3783350 - RNA, 20 nt, Human
aguucuauacuguaaagcgc

SEQ ID NO: 3783351 - RNA, 23 nt, Human
aguucuauuuauuugugagacug

SEQ ID NO: 3783352 - RNA, 15 nt, Human
aguucucaaugugaa

SEQ ID NO: 3783353 - RNA, 18 nt, Human
aguucucacuguucccuc

SEQ ID NO: 3783354 - RNA, 15 nt, Human
aguucucagggcucc

SEQ ID NO: 3783355 - RNA, 18 nt, Human
aguucucagggcuccugc

SEQ ID NO: 3783356 - RNA, 13 nt, Human
aguucucuccuuc

SEQ ID NO: 3783357 - RNA, 15 nt, Human
agucugaacagcugu

SEQ ID NO: 3783358 - RNA, 16 nt, Human
agucugaacagcugua

SEQ ID NO: 3783359 - RNA, 12 nt, Human
agucugaaggcu

SEQ ID NO: 3783360 - RNA, 16 nt, Human
agucugaaggcugggu

SEQ ID NO: 3783361 - RNA, 17 nt, Human
agucugaaggcuggguu

SEQ ID NO: 3783362 - RNA, 17 nt, Human
agucugaaguuucauuu

SEQ ID NO: 3783363 - RNA, 21 nt, Human
agucugagggcuuguaguucu

SEQ ID NO: 3783364 - RNA, 22 nt, Human
agucugagguccugagcacugc

SEQ ID NO: 3783365 - RNA, 15 nt, Human
agucugauccaggag

SEQ ID NO: 3783366 - RNA, 16 nt, Human
agucugauucccaagc

SEQ ID NO: 3783367 - RNA, 18 nt, Human
agucugauucccaagcuc

SEQ ID NO: 3783368 - RNA, 21 nt, Human
agucugcagauagaaagcauu

SEQ ID NO: 3783369 - RNA, 13 nt, Human
agucugcauuaca

SEQ ID NO: 3783370 - RNA, 23 nt, Human
agucugcgucucugcuuuaaagu

SEQ ID NO: 3783371 - RNA, 23 nt, Human
agucugcucuagaugagcugggc

SEQ ID NO: 3783372 - RNA, 13 nt, Human
agucugcugcccu

SEQ ID NO: 3783373 - RNA, 22 nt, Human
agucuggcccuagacucggggu

SEQ ID NO: 3783374 - RNA, 19 nt, Human
agucuggcuguacccagga

SEQ ID NO: 3783375 - RNA, 22 nt, Human
agucugggacacaaaacuccgc

SEQ ID NO: 3783376 - RNA, 14 nt, Human
agucugggcugccg

SEQ ID NO: 3783377 - RNA, 16 nt, Human
agucugggcugccggg

SEQ ID NO: 3783378 - RNA, 17 nt, Human
agucuggggaccagcuu

SEQ ID NO: 3783379 - RNA, 15 nt, Human
agucugguuucuaga

SEQ ID NO: 3783380 - RNA, 20 nt, Human
agucugguuucuagacuugu

SEQ ID NO: 3783381 - RNA, 15 nt, Human
agucuguccaggcuc

SEQ ID NO: 3783382 - RNA, 15 nt, Human
agucugucucuguca

SEQ ID NO: 3783383 - RNA, 16 nt, Human
agucugucuuuccuga

SEQ ID NO: 3783384 - RNA, 21 nt, Human
agucugugagauucauucaug

SEQ ID NO: 3783385 - RNA, 20 nt, Human
agucugugccacguguuugu

SEQ ID NO: 3783386 - RNA, 16 nt, Human
agucugugccuggagc

SEQ ID NO: 3783387 - RNA, 21 nt, Human
agucugugccuggagcuccug

SEQ ID NO: 3783388 - RNA, 22 nt, Human
agucugugccuggagcuccugg

SEQ ID NO: 3783389 - RNA, 11 nt, Human
agucugugugc

SEQ ID NO: 3783390 - RNA, 18 nt, Human
agucugugugggacugua

SEQ ID NO: 3783391 - RNA, 22 nt, Human
agucugugugggacuguacaca

SEQ ID NO: 3783392 - RNA, 16 nt, Human
agucuguucugguaau

SEQ ID NO: 3783393 - RNA, 15 nt, Human
agucuguuuuguaaa

SEQ ID NO: 3783394 - RNA, 17 nt, Human
agucuuaacauuucuaa

SEQ ID NO: 3783395 - RNA, 14 nt, Human
agucuuaacugguc

SEQ ID NO: 3783396 - RNA, 18 nt, Human
agucuuacuacagaaaug

SEQ ID NO: 3783397 - RNA, 19 nt, Human
agucuuacuacagaaauga

SEQ ID NO: 3783398 - RNA, 21 nt, Human
agucuuagaucauaguuuuau

SEQ ID NO: 3783399 - RNA, 15 nt, Human
agucuuaucaagcag

SEQ ID NO: 3783400 - RNA, 21 nt, Human
agucuuaucugagcugagcca

SEQ ID NO: 3783401 - RNA, 22 nt, Human
agucuuaucugagcugagccag

SEQ ID NO: 3783402 - RNA, 17 nt, Human
agucuuaugcuuccaga

SEQ ID NO: 3783403 - RNA, 16 nt, Human
agucuucaagggcugc

SEQ ID NO: 3783404 - RNA, 20 nt, Human
agucuucaagggcugcuuca

SEQ ID NO: 3783405 - RNA, 20 nt, Human
agucuucaguuugcagagua

SEQ ID NO: 3783406 - RNA, 21 nt, Human
agucuucaguuugcagaguag

SEQ ID NO: 3783407 - RNA, 14 nt, Human
agucuucaugaaau

SEQ ID NO: 3783408 - RNA, 18 nt, Human
agucuucauguucccacu

SEQ ID NO: 3783409 - RNA, 14 nt, Human
agucuuccaaacca

SEQ ID NO: 3783410 - RNA, 19 nt, Human
agucuuccacaaagaaaau

SEQ ID NO: 3783411 - RNA, 20 nt, Human
agucuuccacaaagaaaauu

SEQ ID NO: 3783412 - RNA, 18 nt, Human
agucuucccuagggcugg

SEQ ID NO: 3783413 - RNA, 16 nt, Human
agucuuccugacacuu

SEQ ID NO: 3783414 - RNA, 17 nt, Human
agucuuccugacacuuu

SEQ ID NO: 3783415 - RNA, 14 nt, Human
agucuucuauuuau

SEQ ID NO: 3783416 - RNA, 21 nt, Human
agucuugcuaccucagucagu

SEQ ID NO: 3783417 - RNA, 20 nt, Human
agucuugcuguggucucuuu

SEQ ID NO: 3783418 - RNA, 21 nt, Human
agucuugcuguggucucuuug

SEQ ID NO: 3783419 - RNA, 23 nt, Human
agucuugcuguggucucuuugug

SEQ ID NO: 3783420 - RNA, 22 nt, Human
agucuuggcggcagcagccauc

SEQ ID NO: 3783421 - RNA, 17 nt, Human
agucuugugacuagugc

SEQ ID NO: 3783422 - RNA, 23 nt, Human
agcuccacucugcuucucugacu

SEQ ID NO: 3783423 - RNA, 24 nt, Human
agcuccacucugcuucucugacuu

SEQ ID NO: 3783424 - RNA, 14 nt, Human
agcuccagaccccc

SEQ ID NO: 3783425 - RNA, 16 nt, Human
agcuccagacccccag

SEQ ID NO: 3783426 - RNA, 14 nt, Human
agcuccagccccuu

SEQ ID NO: 3783427 - RNA, 18 nt, Human
agcuccagccccuuucca

SEQ ID NO: 3783428 - RNA, 20 nt, Human
agcuccagccccuuuccaaa

SEQ ID NO: 3783429 - RNA, 16 nt, Human
agcuccagccugacau

SEQ ID NO: 3783430 - RNA, 13 nt, Human
agcuccagcucac

SEQ ID NO: 3783431 - RNA, 18 nt, Human
agcuccagcucaccagcc

SEQ ID NO: 3783432 - RNA, 21 nt, Human
agcuccagggaauccaagccu

SEQ ID NO: 3783433 - RNA, 13 nt, Human
agcuccagggcca

SEQ ID NO: 3783434 - RNA, 14 nt, Human
agcuccaguggaag

SEQ ID NO: 3783435 - RNA, 19 nt, Human
agcuccaguggaagaagaa

SEQ ID NO: 3783436 - RNA, 16 nt, Human
agcuccaguguccuga

SEQ ID NO: 3783437 - RNA, 21 nt, Human
agcuccaguguccugagcuca

SEQ ID NO: 3783438 - RNA, 23 nt, Human
agcuccaguguccugagcucagc

SEQ ID NO: 3783439 - RNA, 13 nt, Human
agcuccaguucga

SEQ ID NO: 3783440 - RNA, 20 nt, Human
agcuccauacacacgcugcc

SEQ ID NO: 3783441 - RNA, 18 nt, Human
agcucccaagggauggug

SEQ ID NO: 3783442 - RNA, 22 nt, Human
agcucccaagggauggugcccu

SEQ ID NO: 3783443 - RNA, 16 nt, Human
agcucccacaagccuc

SEQ ID NO: 3783444 - RNA, 17 nt, Human
agcucccacaagccuga

SEQ ID NO: 3783445 - RNA, 13 nt, Human
agcucccacccca

SEQ ID NO: 3783446 - RNA, 17 nt, Human
agcucccaccccacccc

SEQ ID NO: 3783447 - RNA, 23 nt, Human
agcucccaccccacccccuucag

SEQ ID NO: 3783448 - RNA, 11 nt, Human
agcucccaccu

SEQ ID NO: 3783449 - RNA, 19 nt, Human
agcucccaccuccccuugg

SEQ ID NO: 3783450 - RNA, 14 nt, Human
agcucccaggaaca

SEQ ID NO: 3783451 - RNA, 16 nt, Human
agcucccauuucuacu

SEQ ID NO: 3783452 - RNA, 16 nt, Human
agcucccccagcuccc

SEQ ID NO: 3783453 - RNA, 14 nt, Human
agcuccccccaccu

SEQ ID NO: 3783454 - RNA, 23 nt, Human
agcucccccucccccacugccau

SEQ ID NO: 3783455 - RNA, 19 nt, Human
agcucccccuguccccuca

SEQ ID NO: 3783456 - RNA, 14 nt, Human
agcuccccucccca

SEQ ID NO: 3783457 - RNA, 15 nt, Human
agcuccccuccccaa

SEQ ID NO: 3783458 - RNA, 17 nt, Human
agcuccccucggagaag

SEQ ID NO: 3783459 - RNA, 19 nt, Human
agcuccccucggagaagag

SEQ ID NO: 3783460 - RNA, 22 nt, Human
agcuccccucggagaagagcug

SEQ ID NO: 3783461 - RNA, 18 nt, Human
agcucccgcuccgggcuc

SEQ ID NO: 3783462 - RNA, 15 nt, Human
agcucccuaggagac

SEQ ID NO: 3783463 - RNA, 17 nt, Human
agcucccuaggagacca

SEQ ID NO: 3783464 - RNA, 13 nt, Human
agcucccucugcc

SEQ ID NO: 3783465 - RNA, 13 nt, Human
agcucccugcccc

SEQ ID NO: 3783466 - RNA, 18 nt, Human
agcucccuggcuucugug

SEQ ID NO: 3783467 - RNA, 23 nt, Human
agcucccuggcuucuguggggcc

SEQ ID NO: 3783468 - RNA, 16 nt, Human
agcucccuucuucccu

SEQ ID NO: 3783469 - RNA, 17 nt, Human
agcuccgccucccgggu

SEQ ID NO: 3783470 - RNA, 19 nt, Human
agcuccggcguguguucag

SEQ ID NO: 3783471 - RNA, 15 nt, Human
agcuccguggagcag

SEQ ID NO: 3783472 - RNA, 17 nt, Human
agcuccuagcagagaga

SEQ ID NO: 3783473 - RNA, 16 nt, Human
agcuccucaacucacc

SEQ ID NO: 3783474 - RNA, 14 nt, Human
agcuccucacugug

SEQ ID NO: 3783475 - RNA, 11 nt, Human
agcuccucccc

SEQ ID NO: 3783476 - RNA, 13 nt, Human
agcuccuccccuu

SEQ ID NO: 3783477 - RNA, 13 nt, Human
agcuccucccucu

SEQ ID NO: 3783478 - RNA, 16 nt, Human
agcuccuccucccugc

SEQ ID NO: 3783479 - RNA, 23 nt, Human
agcuccuccucccugcaucugac

SEQ ID NO: 3783480 - RNA, 20 nt, Human
agcuccuccucggaaccgcu

SEQ ID NO: 3783481 - RNA, 21 nt, Human
agcuccuccuugucuuggcag

SEQ ID NO: 3783482 - RNA, 21 nt, Human
agcuccucuccccagcccaga

SEQ ID NO: 3783483 - RNA, 24 nt, Human
agcuccucuccccagcccagagac

SEQ ID NO: 3783484 - RNA, 13 nt, Human
agcuccucuccug

SEQ ID NO: 3783485 - RNA, 14 nt, Human
agcuccucuccugg

SEQ ID NO: 3783486 - RNA, 12 nt, Human
agcuccucuguc

SEQ ID NO: 3783487 - RNA, 15 nt, Human
agcuccucuguccug

SEQ ID NO: 3783488 - RNA, 21 nt, Human
agcuccucuguccugcuucug

SEQ ID NO: 3783489 - RNA, 24 nt, Human
agcuccucugucucgagcgcccug

SEQ ID NO: 3783490 - RNA, 18 nt, Human
agcuccucuuccaugcug

SEQ ID NO: 3783491 - RNA, 15 nt, Human
agcuccugaccaguu

SEQ ID NO: 3783492 - RNA, 19 nt, Human
agcuccugaccaguugcag

SEQ ID NO: 3783493 - RNA, 23 nt, Human
agcuccugcuccacagccauccc

SEQ ID NO: 3783494 - RNA, 18 nt, Human
agcuccuguccccugcua

SEQ ID NO: 3783495 - RNA, 24 nt, Human
agcuccuguccccugcuacaccua

SEQ ID NO: 3783496 - RNA, 12 nt, Human
agcuccuguccu

SEQ ID NO: 3783497 - RNA, 12 nt, Human
agcuccuguggc

SEQ ID NO: 3783498 - RNA, 13 nt, Human
agcuccuguggcc

SEQ ID NO: 3783499 - RNA, 12 nt, Human
agcuccuucugu

SEQ ID NO: 3783500 - RNA, 23 nt, Human
agcuccuucuguccuacucugug

SEQ ID NO: 3783501 - RNA, 21 nt, Human
agcuccuugggaggaagcaga

SEQ ID NO: 3783502 - RNA, 19 nt, Human
agcucgaauuaagaauaug

SEQ ID NO: 3783503 - RNA, 23 nt, Human
agcucgauguggucacagcugua

SEQ ID NO: 3783504 - RNA, 14 nt, Human
agcucgcacccccc

SEQ ID NO: 3783505 - RNA, 13 nt, Human
agcucgcuaaagu

SEQ ID NO: 3783506 - RNA, 16 nt, Human
agcucggggagccuua

SEQ ID NO: 3783507 - RNA, 15 nt, Human
agcucgguacccggg

SEQ ID NO: 3783508 - RNA, 15 nt, Human
agcucgguggaccca

SEQ ID NO: 3783509 - RNA, 19 nt, Human
agcucgguggacccaggga

SEQ ID NO: 3783510 - RNA, 17 nt, Human
agcucuaauguuugcau

SEQ ID NO: 3783511 - RNA, 20 nt, Human
agcucuaauguuugcauaua

SEQ ID NO: 3783512 - RNA, 22 nt, Human
agcucuaauguuugcauauaag

SEQ ID NO: 3783513 - RNA, 13 nt, Human
agcucuacccagg

SEQ ID NO: 3783514 - RNA, 15 nt, Human
agcucuacccagggc

SEQ ID NO: 3783515 - RNA, 21 nt, Human
agcucuacccagggccugcag

SEQ ID NO: 3783516 - RNA, 15 nt, Human
agcucuagaaucugc

SEQ ID NO: 3783517 - RNA, 16 nt, Human
agcucuagacaacccu

SEQ ID NO: 3783518 - RNA, 22 nt, Human
agcucuauguuuacaaauggac

SEQ ID NO: 3783519 - RNA, 22 nt, Human
agcucucaugcugccccugccu

SEQ ID NO: 3783520 - RNA, 14 nt, Human
agcucuccagcucc

SEQ ID NO: 3783521 - RNA, 17 nt, Human
agcucuccagcuccaag

SEQ ID NO: 3783522 - RNA, 13 nt, Human
agcucucccucug

SEQ ID NO: 3783523 - RNA, 14 nt, Human
agcucucccucugg

SEQ ID NO: 3783524 - RNA, 15 nt, Human
agcucucccucuggc

SEQ ID NO: 3783525 - RNA, 17 nt, Human
agcucucccucuggccc

SEQ ID NO: 3783526 - RNA, 18 nt, Human
agcucucccucuggcccu

SEQ ID NO: 3783527 - RNA, 19 nt, Human
agcucucccucuggcccug

SEQ ID NO: 3783528 - RNA, 23 nt, Human
agcucucccucuggcccugccuu

SEQ ID NO: 3783529 - RNA, 18 nt, Human
agcucuccggucucucuc

SEQ ID NO: 3783530 - RNA, 13 nt, Human
agcucucugcccu

SEQ ID NO: 3783531 - RNA, 17 nt, Human
agcucucuguauaaaca

SEQ ID NO: 3783532 - RNA, 18 nt, Human
agcucugaaaccaguguu

SEQ ID NO: 3783533 - RNA, 19 nt, Human
agcucugaaaccaguguua

SEQ ID NO: 3783534 - RNA, 16 nt, Human
agcucugaaagagaaa

SEQ ID NO: 3783535 - RNA, 16 nt, Human
agcucugaaaucuucc

SEQ ID NO: 3783536 - RNA, 22 nt, Human
agcucugaagaacucucuggaa

SEQ ID NO: 3783537 - RNA, 23 nt, Human
agcucugaagucacaucacagga

SEQ ID NO: 3783538 - RNA, 21 nt, Human
agcucugaccacuugaggccu

SEQ ID NO: 3783539 - RNA, 17 nt, Human
agcucugagaggcccug

SEQ ID NO: 3783540 - RNA, 18 nt, Human
agcucugagaggcccugg

SEQ ID NO: 3783541 - RNA, 19 nt, Human
agcucugagaggcccugga

SEQ ID NO: 3783542 - RNA, 12 nt, Human
agcucugagcug

SEQ ID NO: 3783543 - RNA, 13 nt, Human
agcucugagcugu

SEQ ID NO: 3783544 - RNA, 22 nt, Human
agcucugcagagcaggaaacau

SEQ ID NO: 3783545 - RNA, 19 nt, Human
agcucugcaucuccugucu

SEQ ID NO: 3783546 - RNA, 19 nt, Human
agcucugccgucucuggag

SEQ ID NO: 3783547 - RNA, 20 nt, Human
agcucugccgucucuggagc

SEQ ID NO: 3783548 - RNA, 11 nt, Human
agcucugccuu

SEQ ID NO: 3783549 - RNA, 22 nt, Human
agcucugcuugccgaaacugga

SEQ ID NO: 3783550 - RNA, 17 nt, Human
agcucuggacagcccca

SEQ ID NO: 3783551 - RNA, 17 nt, Human
agcucuggagccaccug

SEQ ID NO: 3783552 - RNA, 18 nt, Human
agcucuggcugaacccug

SEQ ID NO: 3783553 - RNA, 20 nt, Human
agcucuggcuuccagaaaac

SEQ ID NO: 3783554 - RNA, 23 nt, Human
agcucuguaucaggacccagagg

SEQ ID NO: 3783555 - RNA, 16 nt, Human
agcucuguccugggag

SEQ ID NO: 3783556 - RNA, 12 nt, Human
agcucugucugu

SEQ ID NO: 3783557 - RNA, 16 nt, Human
agcucuguguugccau

SEQ ID NO: 3783558 - RNA, 17 nt, Human
agcucuguucuuccuca

SEQ ID NO: 3783559 - RNA, 23 nt, Human
agcucuguucuuccucagccagc

SEQ ID NO: 3783560 - RNA, 20 nt, Human
agcucuuaauuguucauuuu

SEQ ID NO: 3783561 - RNA, 15 nt, Human
agcucuucaggccuc

SEQ ID NO: 3783562 - RNA, 17 nt, Human
agcucuucaucugccca

SEQ ID NO: 3783563 - RNA, 18 nt, Human
agcucuucaucugcccaa

SEQ ID NO: 3783564 - RNA, 19 nt, Human
agcucuucaucugcccaac

SEQ ID NO: 3783565 - RNA, 14 nt, Human
agcucuuccuagcu

SEQ ID NO: 3783566 - RNA, 22 nt, Human
agcucuuccuaucccucuccua

SEQ ID NO: 3783567 - RNA, 15 nt, Human
auaaaagauacauuu

SEQ ID NO: 3783568 - RNA, 18 nt, Human
auaaaagauacauuugua

SEQ ID NO: 3783569 - RNA, 20 nt, Human
auaaaagaugaaagagcagu

SEQ ID NO: 3783570 - RNA, 21 nt, Human
auaaaagauggggucuguaaa

SEQ ID NO: 3783571 - RNA, 19 nt, Human
auaaaagcaauuccaaccu

SEQ ID NO: 3783572 - RNA, 20 nt, Human
auaaaagcagcaucugcuaa

SEQ ID NO: 3783573 - RNA, 16 nt, Human
auaaaagcccaggagc

SEQ ID NO: 3783574 - RNA, 13 nt, Human
auaaaagccuguu

SEQ ID NO: 3783575 - RNA, 19 nt, Human
auaaaagccuguuuaagag

SEQ ID NO: 3783576 - RNA, 15 nt, Human
auaaaagcuauggug

SEQ ID NO: 3783577 - RNA, 22 nt, Human
auaaaagcugaaguuacuuuau

SEQ ID NO: 3783578 - RNA, 12 nt, Human
auaaaaggaaaa

SEQ ID NO: 3783579 - RNA, 20 nt, Human
auaaaaggaagccaaagagu

SEQ ID NO: 3783580 - RNA, 20 nt, Human
auaaaaggcaaauguguaca

SEQ ID NO: 3783581 - RNA, 19 nt, Human
auaaaaggugucuuucccu

SEQ ID NO: 3783582 - RNA, 17 nt, Human
auaaaagugaucaauaa

SEQ ID NO: 3783583 - RNA, 22 nt, Human
auaaaagugaucaauaaaaugu

SEQ ID NO: 3783584 - RNA, 21 nt, Human
auaaaagugauuguuggcaca

SEQ ID NO: 3783585 - RNA, 13 nt, Human
auaaaauaaagua

SEQ ID NO: 3783586 - RNA, 14 nt, Human
auaaaauaaaguau

SEQ ID NO: 3783587 - RNA, 16 nt, Human
auaaaauaaaguauau

SEQ ID NO: 3783588 - RNA, 19 nt, Human
auaaaauaacuaaaaugua

SEQ ID NO: 3783589 - RNA, 15 nt, Human
auaaaauaauucuaa

SEQ ID NO: 3783590 - RNA, 16 nt, Human
auaaaauaauucuaaa

SEQ ID NO: 3783591 - RNA, 17 nt, Human
auaaaauacauagugaa

SEQ ID NO: 3783592 - RNA, 22 nt, Human
auaaaauagauauaaauuuuua

SEQ ID NO: 3783593 - RNA, 18 nt, Human
auaaaauaguaugaaaau

SEQ ID NO: 3783594 - RNA, 18 nt, Human
auaaaauaguuguccaua

SEQ ID NO: 3783595 - RNA, 15 nt, Human
auaaaauauaaacaa

SEQ ID NO: 3783596 - RNA, 15 nt, Human
auaaaauauaauugu

SEQ ID NO: 3783597 - RNA, 20 nt, Human
auaaaauaucauucagcaac

SEQ ID NO: 3783598 - RNA, 14 nt, Human
auaaaauauuuucu

SEQ ID NO: 3783599 - RNA, 23 nt, Human
auaaaauauuuucuguguguucc

SEQ ID NO: 3783600 - RNA, 16 nt, Human
auaaaaucaaguuuua

SEQ ID NO: 3783601 - RNA, 20 nt, Human
auaaaaucaauuuuuaggaa

SEQ ID NO: 3783602 - RNA, 23 nt, Human
auaaaaucagccaauuauguuaa

SEQ ID NO: 3783603 - RNA, 12 nt, Human
auaaaaucauaa

SEQ ID NO: 3783604 - RNA, 15 nt, Human
auaaaaucauaagua

SEQ ID NO: 3783605 - RNA, 21 nt, Human
auaaaauccuaagacacaaau

SEQ ID NO: 3783606 - RNA, 16 nt, Human
auaaaauccugugcaa

SEQ ID NO: 3783607 - RNA, 17 nt, Human
auaaaaucugauaugua

SEQ ID NO: 3783608 - RNA, 18 nt, Human
auaaaaugaaaauuguau

SEQ ID NO: 3783609 - RNA, 19 nt, Human
auaaaaugcuagguucuac

SEQ ID NO: 3783610 - RNA, 22 nt, Human
auaaaauggcaacaaacugcac

SEQ ID NO: 3783611 - RNA, 22 nt, Human
auaaaaugguguuuucauguaa

SEQ ID NO: 3783612 - RNA, 16 nt, Human
auaaaauguaaacugu

SEQ ID NO: 3783613 - RNA, 18 nt, Human
auaaaauguaaacuguuu

SEQ ID NO: 3783614 - RNA, 11 nt, Human
auaaaauguac

SEQ ID NO: 3783615 - RNA, 15 nt, Human
auaaaaugucuucaa

SEQ ID NO: 3783616 - RNA, 13 nt, Human
auaaaaugugauu

SEQ ID NO: 3783617 - RNA, 11 nt, Human
auaaaaugugc

SEQ ID NO: 3783618 - RNA, 17 nt, Human
auaaaauguugaaaagu

SEQ ID NO: 3783619 - RNA, 17 nt, Human
auaaaauuaaagaaaau

SEQ ID NO: 3783620 - RNA, 21 nt, Human
auaaaauuaaagaaaauaaaa

SEQ ID NO: 3783621 - RNA, 13 nt, Human
auaaaauuaagaa

SEQ ID NO: 3783622 - RNA, 16 nt, Human
auaaaauuagaaagca

SEQ ID NO: 3783623 - RNA, 20 nt, Human
auaaaauuauagaugggaau

SEQ ID NO: 3783624 - RNA, 23 nt, Human
auaaaauuauagaugggaaugaa

SEQ ID NO: 3783625 - RNA, 13 nt, Human
auaaaauuauucc

SEQ ID NO: 3783626 - RNA, 20 nt, Human
auaccaaaauguugcugaaa

SEQ ID NO: 3783627 - RNA, 18 nt, Human
auaccaaaauuauuucag

SEQ ID NO: 3783628 - RNA, 18 nt, Human
auaccaaagcacauuuua

SEQ ID NO: 3783629 - RNA, 24 nt, Human
auaccaaauagcuucuguuuuguu

SEQ ID NO: 3783630 - RNA, 17 nt, Human
auaccaaauuaaaaaaa

SEQ ID NO: 3783631 - RNA, 17 nt, Human
auaccaaggaacaggaa

SEQ ID NO: 3783632 - RNA, 19 nt, Human
auaccaaguugauacuuga

SEQ ID NO: 3783633 - RNA, 13 nt, Human
auaccaauaaagu

SEQ ID NO: 3783634 - RNA, 21 nt, Human
auaccaaugaaaaaauguaua

SEQ ID NO: 3783635 - RNA, 22 nt, Human
auaccacaggaaccacaagacu

SEQ ID NO: 3783636 - RNA, 17 nt, Human
auaccacgcuagggcug

SEQ ID NO: 3783637 - RNA, 15 nt, Human
auaccacucuguaau

SEQ ID NO: 3783638 - RNA, 22 nt, Human
auaccagccccuguauggcacu

SEQ ID NO: 3783639 - RNA, 16 nt, Human
auaccagcgaggaggc

SEQ ID NO: 3783640 - RNA, 16 nt, Human
auaccaggauuuuuuu

SEQ ID NO: 3783641 - RNA, 17 nt, Human
auaccaggccgccccag

SEQ ID NO: 3783642 - RNA, 16 nt, Human
auaccagguugaaaga

SEQ ID NO: 3783643 - RNA, 12 nt, Human
auaccagugugg

SEQ ID NO: 3783644 - RNA, 17 nt, Human
auaccauuaaaacugcu

SEQ ID NO: 3783645 - RNA, 11 nt, Human
auacccacccc

SEQ ID NO: 3783646 - RNA, 15 nt, Human
auacccaugaacuua

SEQ ID NO: 3783647 - RNA, 17 nt, Human
auaccccaagacuccca

SEQ ID NO: 3783648 - RNA, 19 nt, Human
auaccccaagacucccaug

SEQ ID NO: 3783649 - RNA, 16 nt, Human
auaccccaucauucau

SEQ ID NO: 3783650 - RNA, 13 nt, Human
auaccccccucug

SEQ ID NO: 3783651 - RNA, 19 nt, Human
auacccccugcaaagccca

SEQ ID NO: 3783652 - RNA, 16 nt, Human
auaccccgugaagcau

SEQ ID NO: 3783653 - RNA, 19 nt, Human
auaccccuuacuuagcaug

SEQ ID NO: 3783654 - RNA, 18 nt, Human
auacccgccuagcugcug

SEQ ID NO: 3783655 - RNA, 14 nt, Human
auacccucccuccc

SEQ ID NO: 3783656 - RNA, 15 nt, Human
auaccggaauuacuu

SEQ ID NO: 3783657 - RNA, 16 nt, Human
auaccggaauuacuuu

SEQ ID NO: 3783658 - RNA, 13 nt, Human
auaccuaaaacau

SEQ ID NO: 3783659 - RNA, 14 nt, Human
auaccuaacugaau

SEQ ID NO: 3783660 - RNA, 15 nt, Human
auaccuaagaaguac

SEQ ID NO: 3783661 - RNA, 13 nt, Human
auaccuaagcaaa

SEQ ID NO: 3783662 - RNA, 13 nt, Human
auaccuaaguacu

SEQ ID NO: 3783663 - RNA, 20 nt, Human
auaccuaaguacuguaauaa

SEQ ID NO: 3783664 - RNA, 17 nt, Human
auaccuacauguauuug

SEQ ID NO: 3783665 - RNA, 13 nt, Human
auaccuauaaugu

SEQ ID NO: 3783666 - RNA, 16 nt, Human
auaccuauaaugugug

SEQ ID NO: 3783667 - RNA, 16 nt, Human
auaccucaaacuaucu

SEQ ID NO: 3783668 - RNA, 18 nt, Human
auaccucaaccuauggua

SEQ ID NO: 3783669 - RNA, 12 nt, Human
auaccucacuuu

SEQ ID NO: 3783670 - RNA, 15 nt, Human
auaccucaggaaaga

SEQ ID NO: 3783671 - RNA, 17 nt, Human
auaccucaggaaagaau

SEQ ID NO: 3783672 - RNA, 18 nt, Human
auaccucaggaaagaaua

SEQ ID NO: 3783673 - RNA, 21 nt, Human
auaccucauguuuaugaaaau

SEQ ID NO: 3783674 - RNA, 15 nt, Human
auaccucuuagcuga

SEQ ID NO: 3783675 - RNA, 17 nt, Human
auaccucuuagcugagu

SEQ ID NO: 3783676 - RNA, 17 nt, Human
auaccucuuugaaagaa

SEQ ID NO: 3783677 - RNA, 19 nt, Human
auaccugaaugcucuguag

SEQ ID NO: 3783678 - RNA, 17 nt, Human
auaccugcuaucagcag

SEQ ID NO: 3783679 - RNA, 17 nt, Human
auaccugggauacugug

SEQ ID NO: 3783680 - RNA, 20 nt, Human
auaccugggauacugugccc

SEQ ID NO: 3783681 - RNA, 12 nt, Human
auaccugucccc

SEQ ID NO: 3783682 - RNA, 16 nt, Human
auaccugugccucggc

SEQ ID NO: 3783683 - RNA, 19 nt, Human
auaccuguguuucuugccu

SEQ ID NO: 3783684 - RNA, 20 nt, Human
auaccuguguuucuugccuc

SEQ ID NO: 3783685 - RNA, 15 nt, Human
auaccuuaaaauuug

SEQ ID NO: 3783686 - RNA, 17 nt, Human
auaccuuaaaauuugaa

SEQ ID NO: 3783687 - RNA, 19 nt, Human
auaccuuaaaauuugaaac

SEQ ID NO: 3783688 - RNA, 23 nt, Human
auaccuuaaaauuugaaacauug

SEQ ID NO: 3783689 - RNA, 14 nt, Human
auaccuuagaaggu

SEQ ID NO: 3783690 - RNA, 19 nt, Human
auacgaaauaauuguuguu

SEQ ID NO: 3783691 - RNA, 21 nt, Human
auacgaaauaauuguuguucu

SEQ ID NO: 3783692 - RNA, 13 nt, Human
auacgaacaaaac

SEQ ID NO: 3783693 - RNA, 16 nt, Human
auacgacaguacacug

SEQ ID NO: 3783694 - RNA, 13 nt, Human
auacgauuuaagg

SEQ ID NO: 3783695 - RNA, 17 nt, Human
auacgcacuacaugugg

SEQ ID NO: 3783696 - RNA, 21 nt, Human
auacgcucagcucauccaugc

SEQ ID NO: 3783697 - RNA, 23 nt, Human
auacgcucagcucauccaugccu

SEQ ID NO: 3783698 - RNA, 21 nt, Human
auacgcuggcaacacagaggc

SEQ ID NO: 3783699 - RNA, 18 nt, Human
auacggucagguuuaaca

SEQ ID NO: 3783700 - RNA, 21 nt, Human
auacgugaaaauuauuugaaa

SEQ ID NO: 3783701 - RNA, 13 nt, Human
auacguuugauaa

SEQ ID NO: 3783702 - RNA, 13 nt, Human
auacuaaaaagaa

SEQ ID NO: 3783703 - RNA, 18 nt, Human
auacuaaaaaucaugaga

SEQ ID NO: 3783704 - RNA, 16 nt, Human
auacuaaaauaugucu

SEQ ID NO: 3783705 - RNA, 13 nt, Human
auacuacaguuug

SEQ ID NO: 3783706 - RNA, 16 nt, Human
auacuacaguuuguua

SEQ ID NO: 3783707 - RNA, 20 nt, Human
auacuacaguuuguuaguau

SEQ ID NO: 3783708 - RNA, 12 nt, Human
auacuacaucuu

SEQ ID NO: 3783709 - RNA, 16 nt, Human
auacuacaucuuuaaa

SEQ ID NO: 3783710 - RNA, 14 nt, Human
auacuaccuugaaa

SEQ ID NO: 3783711 - RNA, 13 nt, Human
auacuacuccugu

SEQ ID NO: 3783712 - RNA, 19 nt, Human
auacuacugaaacagauuu

SEQ ID NO: 3783713 - RNA, 16 nt, Human
auagaaaugccaagca

SEQ ID NO: 3783714 - RNA, 13 nt, Human
auagaaaugcugg

SEQ ID NO: 3783715 - RNA, 15 nt, Human
auagaaauguagguc

SEQ ID NO: 3783716 - RNA, 21 nt, Human
auagaaauguagguccucaga

SEQ ID NO: 3783717 - RNA, 12 nt, Human
auagaaaugucu

SEQ ID NO: 3783718 - RNA, 17 nt, Human
auagaaauuuuguaaga

SEQ ID NO: 3783719 - RNA, 16 nt, Human
auagaacuucauggau

SEQ ID NO: 3783720 - RNA, 19 nt, Human
auagaagaaaaaagaaugu

SEQ ID NO: 3783721 - RNA, 18 nt, Human
auagaagaaugcaugcuu

SEQ ID NO: 3783722 - RNA, 14 nt, Human
auagaagauguuug

SEQ ID NO: 3783723 - RNA, 16 nt, Human
auagaagcuguaguag

SEQ ID NO: 3783724 - RNA, 12 nt, Human
auagaaggaaac

SEQ ID NO: 3783725 - RNA, 14 nt, Human
auagaaggaaacua

SEQ ID NO: 3783726 - RNA, 10 nt, Human
auagaaggag

SEQ ID NO: 3783727 - RNA, 19 nt, Human
auagaaggauguacauuuc

SEQ ID NO: 3783728 - RNA, 19 nt, Human
auagaaggcuauggggaua

SEQ ID NO: 3783729 - RNA, 13 nt, Human
auagaaggugaug

SEQ ID NO: 3783730 - RNA, 18 nt, Human
auagaaguauaaagaauu

SEQ ID NO: 3783731 - RNA, 18 nt, Human
auagaagucuucaugaaa

SEQ ID NO: 3783732 - RNA, 12 nt, Human
auagaauaaagg

SEQ ID NO: 3783733 - RNA, 19 nt, Human
auagaauaaaggcaguuuu

SEQ ID NO: 3783734 - RNA, 13 nt, Human
auagaauagcaug

SEQ ID NO: 3783735 - RNA, 18 nt, Human
auagaauaggcacuuuaa

SEQ ID NO: 3783736 - RNA, 12 nt, Human
auagaauauuua

SEQ ID NO: 3783737 - RNA, 13 nt, Human
auagaaugacagu

SEQ ID NO: 3783738 - RNA, 20 nt, Human
auagaauguaaaugucucac

SEQ ID NO: 3783739 - RNA, 17 nt, Human
auagaauuaacacauga

SEQ ID NO: 3783740 - RNA, 13 nt, Human
auagaauuagcuu

SEQ ID NO: 3783741 - RNA, 13 nt, Human
auagaauugacau

SEQ ID NO: 3783742 - RNA, 18 nt, Human
auagaauugacauugaaa

SEQ ID NO: 3783743 - RNA, 18 nt, Human
auagaauugcaaucuaua

SEQ ID NO: 3783744 - RNA, 18 nt, Human
auagaauugcaauuuuaa

SEQ ID NO: 3783745 - RNA, 17 nt, Human
auagaauuuuuaauguu

SEQ ID NO: 3783746 - RNA, 15 nt, Human
auagacaaaaaguau

SEQ ID NO: 3783747 - RNA, 16 nt, Human
auagacaaaaaguaua

SEQ ID NO: 3783748 - RNA, 21 nt, Human
auagacaauugagguaaguuu

SEQ ID NO: 3783749 - RNA, 12 nt, Human
auagacacgcac

SEQ ID NO: 3783750 - RNA, 13 nt, Human
auagacagaagaa

SEQ ID NO: 3783751 - RNA, 16 nt, Human
auagacagaagaaaca

SEQ ID NO: 3783752 - RNA, 19 nt, Human
auagacagaagaaacaagg

SEQ ID NO: 3783753 - RNA, 21 nt, Human
auagacagaauagauagcacu

SEQ ID NO: 3783754 - RNA, 22 nt, Human
auagacaggagaagaaagaacu

SEQ ID NO: 3783755 - RNA, 13 nt, Human
auagacagguccu

SEQ ID NO: 3783756 - RNA, 20 nt, Human
auagacaguauauuuauagu

SEQ ID NO: 3783757 - RNA, 16 nt, Human
auagacaguuuguaaa

SEQ ID NO: 3783758 - RNA, 19 nt, Human
auagacgaguugauuuccu

SEQ ID NO: 3783759 - RNA, 14 nt, Human
auagagaauguucc

SEQ ID NO: 3783760 - RNA, 18 nt, Human
auagagagggagaagaag

SEQ ID NO: 3783761 - RNA, 14 nt, Human
auagagaucauccu

SEQ ID NO: 3783762 - RNA, 22 nt, Human
auagagcaaaauugauguguuu

SEQ ID NO: 3783763 - RNA, 16 nt, Human
auagagcagaaauucu

SEQ ID NO: 3783764 - RNA, 19 nt, Human
auagagcagaaauucuguu

SEQ ID NO: 3783765 - RNA, 13 nt, Human
auagagcuguauu

SEQ ID NO: 3783766 - RNA, 16 nt, Human
auagagcuuuuaaaaa

SEQ ID NO: 3783767 - RNA, 22 nt, Human
auagaggcuucuccgccagccu

SEQ ID NO: 3783768 - RNA, 23 nt, Human
auagaguaaaaagaaaacaaaac

SEQ ID NO: 3783769 - RNA, 14 nt, Human
auagaguauaugca

SEQ ID NO: 3783770 - RNA, 14 nt, Human
auagaguguacuua

SEQ ID NO: 3783771 - RNA, 22 nt, Human
auagagugugauguauguguaa

SEQ ID NO: 3783772 - RNA, 14 nt, Human
auagaguguuauca

SEQ ID NO: 3783773 - RNA, 13 nt, Human
auagaguucaucc

SEQ ID NO: 3783774 - RNA, 15 nt, Human
auagauaacucuuug

SEQ ID NO: 3783775 - RNA, 20 nt, Human
auagauaagaguagaaacug

SEQ ID NO: 3783776 - RNA, 16 nt, Human
auagauaauauuguuu

SEQ ID NO: 3783777 - RNA, 13 nt, Human
auagauauuuuca

SEQ ID NO: 3783778 - RNA, 17 nt, Human
auagauauuuucacaau

SEQ ID NO: 3783779 - RNA, 19 nt, Human
auagaucacauaacagaau

SEQ ID NO: 3783780 - RNA, 16 nt, Human
auagaucccccagacu

SEQ ID NO: 3783781 - RNA, 13 nt, Human
auagaucuccagc

SEQ ID NO: 3783782 - RNA, 13 nt, Human
auagaucuucuga

SEQ ID NO: 3783783 - RNA, 14 nt, Human
auagaucuucugaa

SEQ ID NO: 3783784 - RNA, 21 nt, Human
auagaucuucugaaaugaaac

SEQ ID NO: 3783785 - RNA, 15 nt, Human
auagaugcuggccca

SEQ ID NO: 3783786 - RNA, 18 nt, Human
auagaugcuguguauaug

SEQ ID NO: 3783787 - RNA, 22 nt, Human
auagaugggucuggcugagcug

SEQ ID NO: 3783788 - RNA, 14 nt, Human
auagaugucuuuua

SEQ ID NO: 3783789 - RNA, 19 nt, Human
auagaugucuuuuauagug

SEQ ID NO: 3783790 - RNA, 11 nt, Human
auagaugugug

SEQ ID NO: 3783791 - RNA, 14 nt, Human
auagauguguggac

SEQ ID NO: 3783792 - RNA, 12 nt, Human
auagauguuuga

SEQ ID NO: 3783793 - RNA, 14 nt, Human
auagauuaaaucau

SEQ ID NO: 3783794 - RNA, 18 nt, Human
auaaaucauaaagucagu

SEQ ID NO: 3783795 - RNA, 18 nt, Human
auaaaucauauugaugaa

SEQ ID NO: 3783796 - RNA, 19 nt, Human
auaaaucauucuuacuaaa

SEQ ID NO: 3783797 - RNA, 14 nt, Human
auaaaucauuuuau

SEQ ID NO: 3783798 - RNA, 18 nt, Human
auaaaucauuuuauguca

SEQ ID NO: 3783799 - RNA, 13 nt, Human
auaaauccaguga

SEQ ID NO: 3783800 - RNA, 23 nt, Human
auaaauccagugaccucucucuc

SEQ ID NO: 3783801 - RNA, 15 nt, Human
auaaauccaguucua

SEQ ID NO: 3783802 - RNA, 18 nt, Human
auaaauccaguucuacua

SEQ ID NO: 3783803 - RNA, 21 nt, Human
auaaaucgcuuuugauaauca

SEQ ID NO: 3783804 - RNA, 19 nt, Human
auaaaucugacccagugcc

SEQ ID NO: 3783805 - RNA, 16 nt, Human
auaaaucugugaacuu

SEQ ID NO: 3783806 - RNA, 19 nt, Human
auaaaucugugaacuugaa

SEQ ID NO: 3783807 - RNA, 20 nt, Human
auaaaucugugaacuugaaa

SEQ ID NO: 3783808 - RNA, 21 nt, Human
auaaaucugugaacuugaaau

SEQ ID NO: 3783809 - RNA, 22 nt, Human
auaaaucuguucugggcucuuu

SEQ ID NO: 3783810 - RNA, 14 nt, Human
auaaaucuguugcc

SEQ ID NO: 3783811 - RNA, 13 nt, Human
auaaaucuuaaaa

SEQ ID NO: 3783812 - RNA, 20 nt, Human
auaaaugaagcagcuuuaaa

SEQ ID NO: 3783813 - RNA, 16 nt, Human
auaaaugaaguuuaua

SEQ ID NO: 3783814 - RNA, 18 nt, Human
auaaaugaaguuuauaca

SEQ ID NO: 3783815 - RNA, 12 nt, Human
auaaaugagcaa

SEQ ID NO: 3783816 - RNA, 18 nt, Human
auaaaugauucaaaaagu

SEQ ID NO: 3783817 - RNA, 12 nt, Human
auaaaugcaaau

SEQ ID NO: 3783818 - RNA, 14 nt, Human
auaaaugcaaauaa

SEQ ID NO: 3783819 - RNA, 20 nt, Human
auaaaugcaauauguauuaa

SEQ ID NO: 3783820 - RNA, 15 nt, Human
auaaaugcaauauua

SEQ ID NO: 3783821 - RNA, 21 nt, Human
auaaaugcuauuuuuuauuuu

SEQ ID NO: 3783822 - RNA, 15 nt, Human
auaaauggaaaucau

SEQ ID NO: 3783823 - RNA, 13 nt, Human
auaaauggcuggu

SEQ ID NO: 3783824 - RNA, 17 nt, Human
auaaaugggaacauuua

SEQ ID NO: 3783825 - RNA, 22 nt, Human
auaaaugguauagcaaauguuu

SEQ ID NO: 3783826 - RNA, 15 nt, Human
auaaauguacauuaa

SEQ ID NO: 3783827 - RNA, 14 nt, Human
auaaauguauauac

SEQ ID NO: 3783828 - RNA, 18 nt, Human
auaaauguauauacacau

SEQ ID NO: 3783829 - RNA, 19 nt, Human
auaaauguauauacacaua

SEQ ID NO: 3783830 - RNA, 21 nt, Human
auaaauguaucauagaaaugu

SEQ ID NO: 3783831 - RNA, 18 nt, Human
auaaauguaucuuauuca

SEQ ID NO: 3783832 - RNA, 22 nt, Human
auaaauguauucaaauaccaau

SEQ ID NO: 3783833 - RNA, 23 nt, Human
auaaaugucuuuuuuuuaaugug

SEQ ID NO: 3783834 - RNA, 11 nt, Human
auaaauuaaau

SEQ ID NO: 3783835 - RNA, 12 nt, Human
auaaauuaaaua

SEQ ID NO: 3783836 - RNA, 14 nt, Human
auaaauuaguuguu

SEQ ID NO: 3783837 - RNA, 13 nt, Human
auaaauuauaagu

SEQ ID NO: 3783838 - RNA, 14 nt, Human
auaaauuauguuua

SEQ ID NO: 3783839 - RNA, 21 nt, Human
auaaauuauuaguuuacauca

SEQ ID NO: 3783840 - RNA, 19 nt, Human
auaaauucaccuagucuaa

SEQ ID NO: 3783841 - RNA, 15 nt, Human
auaaauuccacugga

SEQ ID NO: 3783842 - RNA, 13 nt, Human
auaaauuccucuu

SEQ ID NO: 3783843 - RNA, 16 nt, Human
auaaauucuauaggaa

SEQ ID NO: 3783844 - RNA, 18 nt, Human
auaaauugcauaaagcau

SEQ ID NO: 3783845 - RNA, 19 nt, Human
auaaauugcaugcugcuuu

SEQ ID NO: 3783846 - RNA, 19 nt, Human
auaaauugcuaauguugcu

SEQ ID NO: 3783847 - RNA, 13 nt, Human
auaaauuguauau

SEQ ID NO: 3783848 - RNA, 18 nt, Human
auaaauuguauauucacu

SEQ ID NO: 3783849 - RNA, 18 nt, Human
auaaauugucuuaaugga

SEQ ID NO: 3783850 - RNA, 13 nt, Human
auaaauugucuuu

SEQ ID NO: 3783851 - RNA, 22 nt, Human
auaaauugucuuuaaaaacugu

SEQ ID NO: 3783852 - RNA, 13 nt, Human
auaaauuguuuga

SEQ ID NO: 3783853 - RNA, 17 nt, Human
auaaauuguuugaccau

SEQ ID NO: 3783854 - RNA, 20 nt, Human
auaaauuugacuuuucugua

SEQ ID NO: 3783855 - RNA, 21 nt, Human
auaaauuugacuuuucuguaa

SEQ ID NO: 3783856 - RNA, 13 nt, Human
auaaauuuugaaa

SEQ ID NO: 3783857 - RNA, 14 nt, Human
auaaauuuugaaaa

SEQ ID NO: 3783858 - RNA, 15 nt, Human
auaaauuuuuuauaa

SEQ ID NO: 3783859 - RNA, 13 nt, Human
auaacaaaaugga

SEQ ID NO: 3783860 - RNA, 15 nt, Human
acuguaggcacacuu

SEQ ID NO: 3783861 - RNA, 15 nt, Human
acuguagucucagga

SEQ ID NO: 3783862 - RNA, 18 nt, Human
acuguaguuuuucuucaa

SEQ ID NO: 3783863 - RNA, 13 nt, Human
acuguauaaauag

SEQ ID NO: 3783864 - RNA, 20 nt, Human
acuguauaaauaggagagga

SEQ ID NO: 3783865 - RNA, 21 nt, Human
acuguauaaauaggagaggau

SEQ ID NO: 3783866 - RNA, 18 nt, Human
acuguauagacaguuugu

SEQ ID NO: 3783867 - RNA, 20 nt, Human
acuguauagcucuuuuccua

SEQ ID NO: 3783868 - RNA, 16 nt, Human
acuguauauuacagau

SEQ ID NO: 3783869 - RNA, 14 nt, Human
acuguauauucagg

SEQ ID NO: 3783870 - RNA, 19 nt, Human
acuguauauuuguaugaua

SEQ ID NO: 3783871 - RNA, 14 nt, Human
acuguaucaugaca

SEQ ID NO: 3783872 - RNA, 15 nt, Human
acuguaucuaggcaa

SEQ ID NO: 3783873 - RNA, 14 nt, Human
acuguaucugugua

SEQ ID NO: 3783874 - RNA, 16 nt, Human
acuguaugaucaaaug

SEQ ID NO: 3783875 - RNA, 17 nt, Human
acuguaugaucaaaugu

SEQ ID NO: 3783876 - RNA, 18 nt, Human
acuguaugaucaaauguu

SEQ ID NO: 3783877 - RNA, 14 nt, Human
acuguaugugauga

SEQ ID NO: 3783878 - RNA, 16 nt, Human
acuguaugugaugaau

SEQ ID NO: 3783879 - RNA, 20 nt, Human
acuguauuacauaaauaaau

SEQ ID NO: 3783880 - RNA, 23 nt, Human
acuguauugggaaguuacuguua

SEQ ID NO: 3783881 - RNA, 13 nt, Human
acuguauuuguga

SEQ ID NO: 3783882 - RNA, 20 nt, Human
acuguauuuuuaccuuuuuc

SEQ ID NO: 3783883 - RNA, 20 nt, Human
acugucaaagaaucaaucca

SEQ ID NO: 3783884 - RNA, 15 nt, Human
acugucaaaugaugu

SEQ ID NO: 3783885 - RNA, 13 nt, Human
acugucaauaaac

SEQ ID NO: 3783886 - RNA, 15 nt, Human
acugucacucauugc

SEQ ID NO: 3783887 - RNA, 21 nt, Human
acugucacuguuucucugcug

SEQ ID NO: 3783888 - RNA, 18 nt, Human
acuguccccuugaaggag

SEQ ID NO: 3783889 - RNA, 21 nt, Human
acugucccuccuggugucacc

SEQ ID NO: 3783890 - RNA, 15 nt, Human
acuguccuaacaugg

SEQ ID NO: 3783891 - RNA, 23 nt, Human
acuguccuacccacccuccuuuc

SEQ ID NO: 3783892 - RNA, 18 nt, Human
acuguccucuccccucca

SEQ ID NO: 3783893 - RNA, 19 nt, Human
acuguccucuccccuccag

SEQ ID NO: 3783894 - RNA, 20 nt, Human
acuguccucuccccuccagc

SEQ ID NO: 3783895 - RNA, 14 nt, Human
acuguccucuuuca

SEQ ID NO: 3783896 - RNA, 23 nt, Human
acuguccucuuucagaaaacaga

SEQ ID NO: 3783897 - RNA, 16 nt, Human
acuguccugggccugc

SEQ ID NO: 3783898 - RNA, 12 nt, Human
acuguccugucc

SEQ ID NO: 3783899 - RNA, 13 nt, Human
acuguccuguccu

SEQ ID NO: 3783900 - RNA, 17 nt, Human
acuguccuguugauuaa

SEQ ID NO: 3783901 - RNA, 14 nt, Human
acuguccuuuccuu

SEQ ID NO: 3783902 - RNA, 17 nt, Human
acugucgcugcuucgug

SEQ ID NO: 3783903 - RNA, 20 nt, Human
acugucggaggaaagacaac

SEQ ID NO: 3783904 - RNA, 16 nt, Human
acugucuaacuuuaga

SEQ ID NO: 3783905 - RNA, 18 nt, Human
acugucucaguuucacuu

SEQ ID NO: 3783906 - RNA, 22 nt, Human
acugucuccauggcccugcaaa

SEQ ID NO: 3783907 - RNA, 15 nt, Human
acugucucuccugau

SEQ ID NO: 3783908 - RNA, 15 nt, Human
acugucugagaguuu

SEQ ID NO: 3783909 - RNA, 22 nt, Human
acugucuggggagcgggucugc

SEQ ID NO: 3783910 - RNA, 23 nt, Human
acugucuguguuuuuuuggcagu

SEQ ID NO: 3783911 - RNA, 14 nt, Human
acugucuuaauuaa

SEQ ID NO: 3783912 - RNA, 13 nt, Human
acugucuuccuca

SEQ ID NO: 3783913 - RNA, 14 nt, Human
acugucuuccucaa

SEQ ID NO: 3783914 - RNA, 19 nt, Human
acugucuuuaaaagagaga

SEQ ID NO: 3783915 - RNA, 12 nt, Human
acugucuuucag

SEQ ID NO: 3783916 - RNA, 14 nt, Human
acugucuuuccuag

SEQ ID NO: 3783917 - RNA, 23 nt, Human
acugucuuuuuucuaaaguaaaa

SEQ ID NO: 3783918 - RNA, 21 nt, Human
acugucuuuuuuucccuacca

SEQ ID NO: 3783919 - RNA, 22 nt, Human
acugugaaguuuacauuguaaa

SEQ ID NO: 3783920 - RNA, 14 nt, Human
acugugacaggcag

SEQ ID NO: 3783921 - RNA, 22 nt, Human
acugugaccaaguauaaacuuu

SEQ ID NO: 3783922 - RNA, 21 nt, Human
acugugagcucccaggugcag

SEQ ID NO: 3783923 - RNA, 13 nt, Human
acugugaugaagc

SEQ ID NO: 3783924 - RNA, 13 nt, Human
acugugcacaccc

SEQ ID NO: 3783925 - RNA, 19 nt, Human
acugugcacaucugugucu

SEQ ID NO: 3783926 - RNA, 13 nt, Human
agcucagccccag

SEQ ID NO: 3783927 - RNA, 15 nt, Human
agcucagccccagcc

SEQ ID NO: 3783928 - RNA, 19 nt, Human
agcucagcugcauuccgca

SEQ ID NO: 3783929 - RNA, 18 nt, Human
agcucaggacagaugcca

SEQ ID NO: 3783930 - RNA, 14 nt, Human
agcucaggaccagg

SEQ ID NO: 3783931 - RNA, 14 nt, Human
agcucagggccugg

SEQ ID NO: 3783932 - RNA, 18 nt, Human
agcucagggccuggcuca

SEQ ID NO: 3783933 - RNA, 20 nt, Human
agcucagggccuggcucagg

SEQ ID NO: 3783934 - RNA, 16 nt, Human
agcucaggggcagcuc

SEQ ID NO: 3783935 - RNA, 13 nt, Human
agcucagucccau

SEQ ID NO: 3783936 - RNA, 22 nt, Human
agcucaguucuagucucucugg

SEQ ID NO: 3783937 - RNA, 16 nt, Human
agcucaucuucacugc

SEQ ID NO: 3783938 - RNA, 17 nt, Human
agcucaucuucacugca

SEQ ID NO: 3783939 - RNA, 19 nt, Human
agcucauguagcaaucaga

SEQ ID NO: 3783940 - RNA, 18 nt, Human
agcucauuaaacuuuuuu

SEQ ID NO: 3783941 - RNA, 21 nt, Human
agcucauuaaacuuuuuuaac

SEQ ID NO: 3783942 - RNA, 21 nt, Human
agcucauuauaaugucauuaa

SEQ ID NO: 3783943 - RNA, 13 nt, Human
agcuccaaccugc

SEQ ID NO: 3783944 - RNA, 22 nt, Human
agcuccaaccugcaaagaucug

SEQ ID NO: 3783945 - RNA, 23 nt, Human
agcuccaagaccuguugguucca

SEQ ID NO: 3783946 - RNA, 15 nt, Human
agcuccaagccccau

SEQ ID NO: 3783947 - RNA, 15 nt, Human
agcuccaagcuccca

SEQ ID NO: 3783948 - RNA, 16 nt, Human
agcuccaagcucccag

SEQ ID NO: 3783949 - RNA, 21 nt, Human
agcuccacacccucucccagg

SEQ ID NO: 3783950 - RNA, 21 nt, Human
agcuccaccccgcaagcacca

SEQ ID NO: 3783951 - RNA, 18 nt, Human
agcuccacucugcuucuc

SEQ ID NO: 3783952 - RNA, 19 nt, Human
agcuccagacccccagcaa

SEQ ID NO: 3783953 - RNA, 13 nt, Human
agcuccagagcaa

SEQ ID NO: 3783954 - RNA, 16 nt, Human
agcuccagccccuuuc

SEQ ID NO: 3783955 - RNA, 21 nt, Human
agcuccagccccuuuccaaaa

SEQ ID NO: 3783956 - RNA, 19 nt, Human
agcuccagcuccuuugggc

SEQ ID NO: 3783957 - RNA, 15 nt, Human
agcuccaguccugcu

SEQ ID NO: 3783958 - RNA, 17 nt, Human
agcuccaguccugcucu

SEQ ID NO: 3783959 - RNA, 18 nt, Human
agcuccaguguccugagc

SEQ ID NO: 3783960 - RNA, 19 nt, Human
agcuccaguguccugagcu

SEQ ID NO: 3783961 - RNA, 20 nt, Human
agcuccaguguccugagcuc

SEQ ID NO: 3783962 - RNA, 22 nt, Human
agcuccaguguccugagcucag

SEQ ID NO: 3783963 - RNA, 23 nt, Human
agcuccauacacacgcugccuuc

SEQ ID NO: 3783964 - RNA, 19 nt, Human
agcuccaugugccucuuug

SEQ ID NO: 3783965 - RNA, 21 nt, Human
agcuccauuuaaacagauguc

SEQ ID NO: 3783966 - RNA, 13 nt, Human
agcuccauuuucu

SEQ ID NO: 3783967 - RNA, 23 nt, Human
agcucccaagggauggugcccug

SEQ ID NO: 3783968 - RNA, 15 nt, Human
agcucccaccccacc

SEQ ID NO: 3783969 - RNA, 21 nt, Human
agcucccaccuccccuugggc

SEQ ID NO: 3783970 - RNA, 12 nt, Human
agcucccaggaa

SEQ ID NO: 3783971 - RNA, 13 nt, Human
agcucccaggaac

SEQ ID NO: 3783972 - RNA, 14 nt, Human
agcucccaggccga

SEQ ID NO: 3783973 - RNA, 20 nt, Human
agcucccaggugcagccaga

SEQ ID NO: 3783974 - RNA, 17 nt, Human
agcucccauuucuacuc

SEQ ID NO: 3783975 - RNA, 14 nt, Human
agcuccccaccacc

SEQ ID NO: 3783976 - RNA, 21 nt, Human
agcuccccaccaccccagcug

SEQ ID NO: 3783977 - RNA, 23 nt, Human
agcucccccagcaaagcccccag

SEQ ID NO: 3783978 - RNA, 15 nt, Human
agcucccccagcucc

SEQ ID NO: 3783979 - RNA, 20 nt, Human
agcuccccccaccuccccca

SEQ ID NO: 3783980 - RNA, 16 nt, Human
agcucccccugucccc

SEQ ID NO: 3783981 - RNA, 21 nt, Human
agcuccccgcuucugccugca

SEQ ID NO: 3783982 - RNA, 14 nt, Human
agcuccccuccucu

SEQ ID NO: 3783983 - RNA, 19 nt, Human
agcuccccuccucuccccu

SEQ ID NO: 3783984 - RNA, 14 nt, Human
agcucccucugccu

SEQ ID NO: 3783985 - RNA, 11 nt, Human
agcucccugcc

SEQ ID NO: 3783986 - RNA, 14 nt, Human
agcucccuggcuuc

SEQ ID NO: 3783987 - RNA, 21 nt, Human
agcucccugugcccccagggu

SEQ ID NO: 3783988 - RNA, 16 nt, Human
agcucccuucucugua

SEQ ID NO: 3783989 - RNA, 23 nt, Human
agcucccuucucuguagggaacu

SEQ ID NO: 3783990 - RNA, 23 nt, Human
agcuccgcaggacuuccccggag

SEQ ID NO: 3783991 - RNA, 16 nt, Human
agcuccgccucugucc

SEQ ID NO: 3783992 - RNA, 21 nt, Human
agcuccgcuuucuacccagcg

SEQ ID NO: 3783993 - RNA, 23 nt, Human
agcuccucaacucaccuaauguu

SEQ ID NO: 3783994 - RNA, 15 nt, Human
agcuccucauccagg

SEQ ID NO: 3783995 - RNA, 21 nt, Human
agcuccucauccagggcucug

SEQ ID NO: 3783996 - RNA, 19 nt, Human
agcuccuccccuuccucuu

SEQ ID NO: 3783997 - RNA, 14 nt, Human
agcuccucccucuc

SEQ ID NO: 3783998 - RNA, 15 nt, Human
agcuccucccucuca

SEQ ID NO: 3783999 - RNA, 16 nt, Human
agcuccucccuuguuc

SEQ ID NO: 3784000 - RNA, 20 nt, Human
agcuccucccuuguucucua

SEQ ID NO: 3784001 - RNA, 20 nt, Human
agcuccuccgugcuuccuca

SEQ ID NO: 3784002 - RNA, 15 nt, Human
agcuccuccucccug

SEQ ID NO: 3784003 - RNA, 15 nt, Human
agcuccucuccugga

SEQ ID NO: 3784004 - RNA, 19 nt, Human
agcuccucugggcaggacc

SEQ ID NO: 3784005 - RNA, 14 nt, Human
agcuccucuuccau

SEQ ID NO: 3784006 - RNA, 15 nt, Human
agcuccucuuccaug

SEQ ID NO: 3784007 - RNA, 15 nt, Human
agcuccugaaaaaug

SEQ ID NO: 3784008 - RNA, 24 nt, Human
agcuccugaccaguugcagucacu

SEQ ID NO: 3784009 - RNA, 23 nt, Human
agcuccugggaaggcuacucacc

SEQ ID NO: 3784010 - RNA, 22 nt, Human
agcuccuggucuugagaugucu

SEQ ID NO: 3784011 - RNA, 16 nt, Human
agcuccuguccccugc

SEQ ID NO: 3784012 - RNA, 13 nt, Human
agcuccuguccuc

SEQ ID NO: 3784013 - RNA, 16 nt, Human
agcuccuguccuccca

SEQ ID NO: 3784014 - RNA, 16 nt, Human
agcuccuguggcccca

SEQ ID NO: 3784015 - RNA, 15 nt, Human
agaagugcauuucug

SEQ ID NO: 3784016 - RNA, 16 nt, Human
agaagugccccugcug

SEQ ID NO: 3784017 - RNA, 15 nt, Human
agaaguggaccagga

SEQ ID NO: 3784018 - RNA, 17 nt, Human
agaaguggaccaggaca

SEQ ID NO: 3784019 - RNA, 18 nt, Human
agaaguggaccaggacag

SEQ ID NO: 3784020 - RNA, 23 nt, Human
agaaguggaccaggacaggacca

SEQ ID NO: 3784021 - RNA, 18 nt, Human
agaagugggccaggacag

SEQ ID NO: 3784022 - RNA, 18 nt, Human
agaagugucauguuuaua

SEQ ID NO: 3784023 - RNA, 12 nt, Human
agaagugugauu

SEQ ID NO: 3784024 - RNA, 21 nt, Human
agaagugugccuucucucucc

SEQ ID NO: 3784025 - RNA, 15 nt, Human
agaaguuaguuugua

SEQ ID NO: 3784026 - RNA, 15 nt, Human
agaaguucuuugauu

SEQ ID NO: 3784027 - RNA, 20 nt, Human
agaaguugaggauuguugaa

SEQ ID NO: 3784028 - RNA, 14 nt, Human
agaaguuguuuguc

SEQ ID NO: 3784029 - RNA, 13 nt, Human
agaaguuuaaaua

SEQ ID NO: 3784030 - RNA, 15 nt, Human
agaaguuuaaggaau

SEQ ID NO: 3784031 - RNA, 17 nt, Human
agaaguuuaaggaauau

SEQ ID NO: 3784032 - RNA, 19 nt, Human
agaaguuucaucauuuuuu

SEQ ID NO: 3784033 - RNA, 16 nt, Human
agaaguuucccuuccu

SEQ ID NO: 3784034 - RNA, 23 nt, Human
agaaguuucuggcccuggcugac

SEQ ID NO: 3784035 - RNA, 15 nt, Human
agaaguuugaacauu

SEQ ID NO: 3784036 - RNA, 16 nt, Human
agaaguuuuuguacug

SEQ ID NO: 3784037 - RNA, 19 nt, Human
agaaguuuuuguacuguaa

SEQ ID NO: 3784038 - RNA, 14 nt, Human
agaauaaacauuug

SEQ ID NO: 3784039 - RNA, 16 nt, Human
agaauaaacauuuguu

SEQ ID NO: 3784040 - RNA, 13 nt, Human
agaauaaacuggc

SEQ ID NO: 3784041 - RNA, 12 nt, Human
agaauaaagcaa

SEQ ID NO: 3784042 - RNA, 15 nt, Human
agaauaaagcaauuu

SEQ ID NO: 3784043 - RNA, 17 nt, Human
agaauaaagcaauuuuc

SEQ ID NO: 3784044 - RNA, 21 nt, Human
agaauaaaguucugaguguuu

SEQ ID NO: 3784045 - RNA, 13 nt, Human
agaauaagaauuu

SEQ ID NO: 3784046 - RNA, 14 nt, Human
agaauaagagaaag

SEQ ID NO: 3784047 - RNA, 12 nt, Human
agaauaaguuau

SEQ ID NO: 3784048 - RNA, 17 nt, Human
agaauaaguuauugcag

SEQ ID NO: 3784049 - RNA, 14 nt, Human
agaauaauaagagg

SEQ ID NO: 3784050 - RNA, 22 nt, Human
agaauaauaugcugccaaauuu

SEQ ID NO: 3784051 - RNA, 16 nt, Human
agaauaauguucuauu

SEQ ID NO: 3784052 - RNA, 21 nt, Human
agaauaauucaauuuuaaaga

SEQ ID NO: 3784053 - RNA, 16 nt, Human
agaauaauuuauagua

SEQ ID NO: 3784054 - RNA, 14 nt, Human
agaauacagcuuuc

SEQ ID NO: 3784055 - RNA, 15 nt, Human
agaauacagcuuucu

SEQ ID NO: 3784056 - RNA, 17 nt, Human
agaauacagcuuucuga

SEQ ID NO: 3784057 - RNA, 14 nt, Human
agaauacugaugga

SEQ ID NO: 3784058 - RNA, 15 nt, Human
agaauacugauggaa

SEQ ID NO: 3784059 - RNA, 16 nt, Human
agaauacuuuucucuu

SEQ ID NO: 3784060 - RNA, 12 nt, Human
agaauagaaaca

SEQ ID NO: 3784061 - RNA, 13 nt, Human
agaauagaaacaa

SEQ ID NO: 3784062 - RNA, 17 nt, Human
agaauagaacacaguuu

SEQ ID NO: 3784063 - RNA, 12 nt, Human
agaauagaagga

SEQ ID NO: 3784064 - RNA, 13 nt, Human
agaauagaaggaa

SEQ ID NO: 3784065 - RNA, 16 nt, Human
agaauagaaggaaacu

SEQ ID NO: 3784066 - RNA, 17 nt, Human
agaauagaaggaaacua

SEQ ID NO: 3784067 - RNA, 20 nt, Human
agaauagaaggaaacuagcu

SEQ ID NO: 3784068 - RNA, 18 nt, Human
agaauagcaucuguacaa

SEQ ID NO: 3784069 - RNA, 16 nt, Human
agaauaggacuuguuu

SEQ ID NO: 3784070 - RNA, 17 nt, Human
agaauaggcacuuuaaa

SEQ ID NO: 3784071 - RNA, 20 nt, Human
agaauaggcacuuuaaaaca

SEQ ID NO: 3784072 - RNA, 22 nt, Human
agaauaggcacuuuaaaacacu

SEQ ID NO: 3784073 - RNA, 18 nt, Human
agaauaggcauuaacaca

SEQ ID NO: 3784074 - RNA, 23 nt, Human
agaauagggcccaugggagggag

SEQ ID NO: 3784075 - RNA, 20 nt, Human
agaauaguugaaccuauuuc

SEQ ID NO: 3784076 - RNA, 21 nt, Human
agaauaguugaaccuauuucu

SEQ ID NO: 3784077 - RNA, 23 nt, Human
agaauaguugaaccuauuucucu

SEQ ID NO: 3784078 - RNA, 13 nt, Human
agaauauaacaug

SEQ ID NO: 3784079 - RNA, 15 nt, Human
agaauauaauuaucg

SEQ ID NO: 3784080 - RNA, 14 nt, Human
agaauauaggucuc

SEQ ID NO: 3784081 - RNA, 19 nt, Human
agaauauaggucucuucuc

SEQ ID NO: 3784082 - RNA, 12 nt, Human
agaauauauaua

SEQ ID NO: 3784083 - RNA, 13 nt, Human
agaauauauuuau

SEQ ID NO: 3784084 - RNA, 22 nt, Human
agaauauccuuuaaaauuuaaa

SEQ ID NO: 3784085 - RNA, 13 nt, Human
agaauauguuuca

SEQ ID NO: 3784086 - RNA, 18 nt, Human
agaauauuaucuucauaa

SEQ ID NO: 3784087 - RNA, 18 nt, Human
agaauauucagagaauau

SEQ ID NO: 3784088 - RNA, 12 nt, Human
agaauauucagg

SEQ ID NO: 3784089 - RNA, 21 nt, Human
agaauauugaaguacuugcca

SEQ ID NO: 3784090 - RNA, 21 nt, Human
agaauauugcaaaauacauga

SEQ ID NO: 3784091 - RNA, 22 nt, Human
agaauauugcaaaauacaugaa

SEQ ID NO: 3784092 - RNA, 16 nt, Human
agaauauuguauuguu

SEQ ID NO: 3784093 - RNA, 18 nt, Human
agaauauuguauuguuag

SEQ ID NO: 3784094 - RNA, 21 nt, Human
agaauauuguuccuaaguucu

SEQ ID NO: 3784095 - RNA, 11 nt, Human
agaauauuuau

SEQ ID NO: 3784096 - RNA, 16 nt, Human
agaauauuucuauuga

SEQ ID NO: 3784097 - RNA, 22 nt, Human
agaauauuuuuauauuuccuuu

SEQ ID NO: 3784098 - RNA, 23 nt, Human
agaauauuuuuauauuuccuuua

SEQ ID NO: 3784099 - RNA, 21 nt, Human
agaaucaaagcaaugcauuuu

SEQ ID NO: 3784100 - RNA, 23 nt, Human
agaaucaacauuucucaauaauu

SEQ ID NO: 3784101 - RNA, 16 nt, Human
agaaucaauuuaagug

SEQ ID NO: 3784102 - RNA, 13 nt, Human
agaaucacaggcu

SEQ ID NO: 3784103 - RNA, 22 nt, Human
agaaucaccuaauuaauuucag

SEQ ID NO: 3784104 - RNA, 22 nt, Human
agaaucacuucugagaacucau

SEQ ID NO: 3784105 - RNA, 13 nt, Human
agaaucagagaag

SEQ ID NO: 3784106 - RNA, 23 nt, Human
agaaucagagaaggaacauaccc

SEQ ID NO: 3784107 - RNA, 16 nt, Human
agaaucagaguagaaa

SEQ ID NO: 3784108 - RNA, 22 nt, Human
agaaucagcacagauaaaaagu

SEQ ID NO: 3784109 - RNA, 17 nt, Human
agaaucauaugauucug

SEQ ID NO: 3784110 - RNA, 21 nt, Human
agaaucauaugauucugcuuu

SEQ ID NO: 3784111 - RNA, 22 nt, Human
agaaucauaugauucugcuuuu

SEQ ID NO: 3784112 - RNA, 13 nt, Human
agaaucaucagga

SEQ ID NO: 3784113 - RNA, 15 nt, Human
agaaucauguuucuu

SEQ ID NO: 3784114 - RNA, 14 nt, Human
agaaucauuauuua

SEQ ID NO: 3784115 - RNA, 20 nt, Human
agaaucauuauuuauuaaau

SEQ ID NO: 3784116 - RNA, 20 nt, Human
agaauccacguauuccccuu

SEQ ID NO: 3784117 - RNA, 19 nt, Human
agaaucccucuacauggac

SEQ ID NO: 3784118 - RNA, 15 nt, Human
agaaucccuguguua

SEQ ID NO: 3784119 - RNA, 19 nt, Human
agaaucccuguguuaauuu

SEQ ID NO: 3784120 - RNA, 20 nt, Human
agaauccuggcccucugugu

SEQ ID NO: 3784121 - RNA, 22 nt, Human
agaauccuggcccucuguguug

SEQ ID NO: 3784122 - RNA, 22 nt, Human
agaauccuuuuguagaaugaac

SEQ ID NO: 3784123 - RNA, 13 nt, Human
agaaucucuuucg

SEQ ID NO: 3784124 - RNA, 18 nt, Human
agaaucugaauguaauuu

SEQ ID NO: 3784125 - RNA, 19 nt, Human
agaaucuguuucccagcag

SEQ ID NO: 3784126 - RNA, 19 nt, Human
agaaucuugguuugccuuc

SEQ ID NO: 3784127 - RNA, 17 nt, Human
agaaucuuuauugagaa

SEQ ID NO: 3784128 - RNA, 18 nt, Human
agaaucuuuauugagaaa

SEQ ID NO: 3784129 - RNA, 19 nt, Human
agaaucuuuccuuccucuc

SEQ ID NO: 3784130 - RNA, 18 nt, Human
agaaugaaaaaugaaaga

SEQ ID NO: 3784131 - RNA, 16 nt, Human
agaaugaaaacucauu

SEQ ID NO: 3784132 - RNA, 16 nt, Human
agaaugaaagcuguuc

SEQ ID NO: 3784133 - RNA, 21 nt, Human
agaaugaaagcuguuccuugg

SEQ ID NO: 3784134 - RNA, 15 nt, Human
agaaugaaauguaug

SEQ ID NO: 3784135 - RNA, 12 nt, Human
agaaugaacaaa

SEQ ID NO: 3784136 - RNA, 19 nt, Human
agaaugaagguuuuuguaa

SEQ ID NO: 3784137 - RNA, 13 nt, Human
agaaugaccuugu

SEQ ID NO: 3784138 - RNA, 14 nt, Human
agaaugaccuugua

SEQ ID NO: 3784139 - RNA, 14 nt, Human
agaaugagagugug

SEQ ID NO: 3784140 - RNA, 13 nt, Human
agaaugaggagga

SEQ ID NO: 3784141 - RNA, 13 nt, Human
agaaugaggcugc

SEQ ID NO: 3784142 - RNA, 20 nt, Human
agaaugaggcugcuuuccaa

SEQ ID NO: 3784143 - RNA, 21 nt, Human
agaaugaguccuugauuucaa

SEQ ID NO: 3784144 - RNA, 22 nt, Human
agaaugaguccuugauuucaaa

SEQ ID NO: 3784145 - RNA, 14 nt, Human
agaaugaucugauu

SEQ ID NO: 3784146 - RNA, 17 nt, Human
agaaugaucugauugac

SEQ ID NO: 3784147 - RNA, 20 nt, Human
agaaugaugauaacagaacu

SEQ ID NO: 3784148 - RNA, 19 nt, Human
agaaugaugcacauuucau

SEQ ID NO: 3784149 - RNA, 14 nt, Human
agaaugauuucaug

SEQ ID NO: 3784150 - RNA, 19 nt, Human
agaaugcacaaacagaggc

SEQ ID NO: 3784151 - RNA, 23 nt, Human
agaaugcacaaacagaggccgcc

SEQ ID NO: 3784152 - RNA, 22 nt, Human
agaaugcauugauauugugaac

SEQ ID NO: 3784153 - RNA, 16 nt, Human
agaaugccauucucuu

SEQ ID NO: 3784154 - RNA, 12 nt, Human
agaaugcugaaa

SEQ ID NO: 3784155 - RNA, 13 nt, Human
agaaugcugguuu

SEQ ID NO: 3784156 - RNA, 15 nt, Human
agaaugcuguacauc

SEQ ID NO: 3784157 - RNA, 20 nt, Human
agaaugcuguacaucuauuu

SEQ ID NO: 3784158 - RNA, 20 nt, Human
agaauggaucacaagaugga

SEQ ID NO: 3784159 - RNA, 18 nt, Human
agaauggcauuugcaaua

SEQ ID NO: 3784160 - RNA, 17 nt, Human
agaaugggaauauuuua

SEQ ID NO: 3784161 - RNA, 17 nt, Human
agaaugggcaguuacau

SEQ ID NO: 3784162 - RNA, 18 nt, Human
agaauggggaucacagag

SEQ ID NO: 3784163 - RNA, 16 nt, Human
agaauggugauuuuaa

SEQ ID NO: 3784164 - RNA, 18 nt, Human
agaauggugauuuuaaau

SEQ ID NO: 3784165 - RNA, 19 nt, Human
agcuccuguggccccaccc

SEQ ID NO: 3784166 - RNA, 18 nt, Human
agcuccuuaaggcucuuu

SEQ ID NO: 3784167 - RNA, 13 nt, Human
agcuccuuccugg

SEQ ID NO: 3784168 - RNA, 15 nt, Human
agcuccuuccuggag

SEQ ID NO: 3784169 - RNA, 13 nt, Human
agcuccuucuguc

SEQ ID NO: 3784170 - RNA, 21 nt, Human
agcuccuucuguccuacucug

SEQ ID NO: 3784171 - RNA, 22 nt, Human
agcuccuucuguccuacucugu

SEQ ID NO: 3784172 - RNA, 18 nt, Human
agcuccuugggaggaagc

SEQ ID NO: 3784173 - RNA, 22 nt, Human
agcuccuugggaggaagcagaa

SEQ ID NO: 3784174 - RNA, 14 nt, Human
agcuccuuuuccag

SEQ ID NO: 3784175 - RNA, 13 nt, Human
agcucgauccaaa

SEQ ID NO: 3784176 - RNA, 16 nt, Human
agcucgauccaaauug

SEQ ID NO: 3784177 - RNA, 22 nt, Human
agcucgauguggucacagcugu

SEQ ID NO: 3784178 - RNA, 20 nt, Human
agcucgcaccccccuguucu

SEQ ID NO: 3784179 - RNA, 21 nt, Human
agcucgcaccccccuguucua

SEQ ID NO: 3784180 - RNA, 15 nt, Human
agcucggggagccuu

SEQ ID NO: 3784181 - RNA, 22 nt, Human
agcucgguacccggggcccagg

SEQ ID NO: 3784182 - RNA, 14 nt, Human
agcucgguggaccc

SEQ ID NO: 3784183 - RNA, 17 nt, Human
agcucguguauccuggg

SEQ ID NO: 3784184 - RNA, 19 nt, Human
agcucguguauccuggggc

SEQ ID NO: 3784185 - RNA, 14 nt, Human
agcucuaaaaucug

SEQ ID NO: 3784186 - RNA, 22 nt, Human
agcucuaauaaaacagcugucu

SEQ ID NO: 3784187 - RNA, 18 nt, Human
agcucuaauguuugcaua

SEQ ID NO: 3784188 - RNA, 19 nt, Human
agcucuacccagggccugc

SEQ ID NO: 3784189 - RNA, 14 nt, Human
agcucuacccugca

SEQ ID NO: 3784190 - RNA, 17 nt, Human
agcucuacugccucaac

SEQ ID NO: 3784191 - RNA, 13 nt, Human
agcucuagaaucu

SEQ ID NO: 3784192 - RNA, 19 nt, Human
agcucuagacaacccugca

SEQ ID NO: 3784193 - RNA, 20 nt, Human
agcucuagacaacccugcaa

SEQ ID NO: 3784194 - RNA, 17 nt, Human
agcucuaucaccaagga

SEQ ID NO: 3784195 - RNA, 22 nt, Human
agcucuaucaccaaggagccaa

SEQ ID NO: 3784196 - RNA, 22 nt, Human
agcucuauuaagauuuccaagu

SEQ ID NO: 3784197 - RNA, 16 nt, Human
agcucuauuaugaaug

SEQ ID NO: 3784198 - RNA, 18 nt, Human
agcucuauugauacucuu

SEQ ID NO: 3784199 - RNA, 13 nt, Human
agcucucagccaa

SEQ ID NO: 3784200 - RNA, 21 nt, Human
agcucucaguugcagcccugc

SEQ ID NO: 3784201 - RNA, 15 nt, Human
agcucucaucugagg

SEQ ID NO: 3784202 - RNA, 13 nt, Human
agcucuccagcuc

SEQ ID NO: 3784203 - RNA, 16 nt, Human
agcucuccagcuccaa

SEQ ID NO: 3784204 - RNA, 19 nt, Human
agcucuccagucaggaggc

SEQ ID NO: 3784205 - RNA, 15 nt, Human
agcucuccccucaga

SEQ ID NO: 3784206 - RNA, 11 nt, Human
agcucucccuc

SEQ ID NO: 3784207 - RNA, 16 nt, Human
agcucucccucuggcc

SEQ ID NO: 3784208 - RNA, 14 nt, Human
agcucuccugacuu

SEQ ID NO: 3784209 - RNA, 17 nt, Human
agcucuccugacuuuua

SEQ ID NO: 3784210 - RNA, 18 nt, Human
agcucucggaacugcaug

SEQ ID NO: 3784211 - RNA, 23 nt, Human
agcucucggaacugcaugcugcu

SEQ ID NO: 3784212 - RNA, 16 nt, Human
agcucucuaggccucu

SEQ ID NO: 3784213 - RNA, 18 nt, Human
agcucucuaggccucucc

SEQ ID NO: 3784214 - RNA, 15 nt, Human
agcucucugcaucua

SEQ ID NO: 3784215 - RNA, 12 nt, Human
agcuuggcagcc

SEQ ID NO: 3784216 - RNA, 15 nt, Human
agcuuggcagccgag

SEQ ID NO: 3784217 - RNA, 20 nt, Human
agcuuggcagccgagcucgu

SEQ ID NO: 3784218 - RNA, 14 nt, Human
agcuuggccagaag

SEQ ID NO: 3784219 - RNA, 24 nt, Human
agcuugggagagccccuggggccu

SEQ ID NO: 3784220 - RNA, 11 nt, Human
agcuugggcag

SEQ ID NO: 3784221 - RNA, 22 nt, Human
agcuuggggccaccaaagcugc

SEQ ID NO: 3784222 - RNA, 18 nt, Human
agcuugguucugugaaca

SEQ ID NO: 3784223 - RNA, 22 nt, Human
agcuuguccaacccgaggcccg

SEQ ID NO: 3784224 - RNA, 22 nt, Human
agcuugucuaugguacaaaaau

SEQ ID NO: 3784225 - RNA, 17 nt, Human
agcuuguggcaagugaa

SEQ ID NO: 3784226 - RNA, 20 nt, Human
agcuugugugcaaaagcagu

SEQ ID NO: 3784227 - RNA, 13 nt, Human
agcuuguuuacau

SEQ ID NO: 3784228 - RNA, 23 nt, Human
agcuuguuuacaugcuuauucca

SEQ ID NO: 3784229 - RNA, 13 nt, Human
agcuuguuuugga

SEQ ID NO: 3784230 - RNA, 20 nt, Human
agcuuguuuuggacuuuguu

SEQ ID NO: 3784231 - RNA, 21 nt, Human
agcuuguuuuggacuuuguua

SEQ ID NO: 3784232 - RNA, 13 nt, Human
agcuuuaaaagaa

SEQ ID NO: 3784233 - RNA, 15 nt, Human
agcuuuaaacaaauu

SEQ ID NO: 3784234 - RNA, 17 nt, Human
agcuuuaaauuauguga

SEQ ID NO: 3784235 - RNA, 20 nt, Human
agcuuuacacacacagaugu

SEQ ID NO: 3784236 - RNA, 15 nt, Human
agcuuuacaugcaau

SEQ ID NO: 3784237 - RNA, 17 nt, Human
agcuuuacccucaggca

SEQ ID NO: 3784238 - RNA, 20 nt, Human
agcuuuacccucaggcauag

SEQ ID NO: 3784239 - RNA, 18 nt, Human
agcuuuagaaacagugca

SEQ ID NO: 3784240 - RNA, 18 nt, Human
agcuuuagaaucccagcc

SEQ ID NO: 3784241 - RNA, 16 nt, Human
agcuuuagacccuggg

SEQ ID NO: 3784242 - RNA, 14 nt, Human
agcuuuauacgugu

SEQ ID NO: 3784243 - RNA, 18 nt, Human
agcuuuauauauggacau

SEQ ID NO: 3784244 - RNA, 21 nt, Human
agcuuuaugguccuaaaagca

SEQ ID NO: 3784245 - RNA, 22 nt, Human
agcuuuauuuuuuaaguauuua

SEQ ID NO: 3784246 - RNA, 17 nt, Human
agcuuucaaagaaggaa

SEQ ID NO: 3784247 - RNA, 16 nt, Human
agcuuucaaagcauuu

SEQ ID NO: 3784248 - RNA, 15 nt, Human
agcuuucaauuccgu

SEQ ID NO: 3784249 - RNA, 19 nt, Human
agcuuuccauguugcugcc

SEQ ID NO: 3784250 - RNA, 20 nt, Human
agcuuuccauguugcugcca

SEQ ID NO: 3784251 - RNA, 15 nt, Human
agcuuuccugcccca

SEQ ID NO: 3784252 - RNA, 22 nt, Human
agcuuuccuuuuucccaauaaa

SEQ ID NO: 3784253 - RNA, 23 nt, Human
agcuuuccuuuuucccaauaaau

SEQ ID NO: 3784254 - RNA, 18 nt, Human
agcuuucugaacagcugg

SEQ ID NO: 3784255 - RNA, 20 nt, Human
agcuuucugaacagcuggug

SEQ ID NO: 3784256 - RNA, 19 nt, Human
agcuuucugaccuucagcu

SEQ ID NO: 3784257 - RNA, 22 nt, Human
agcuuucugagcaagaggauuu

SEQ ID NO: 3784258 - RNA, 17 nt, Human
agcuuucuugcucccuu

SEQ ID NO: 3784259 - RNA, 20 nt, Human
agcuuucuuucacaaaaaag

SEQ ID NO: 3784260 - RNA, 12 nt, Human
agcuuugaaaau

SEQ ID NO: 3784261 - RNA, 16 nt, Human
agcuuugaaaauucag

SEQ ID NO: 3784262 - RNA, 19 nt, Human
agcuuugaaggccgaaggc

SEQ ID NO: 3784263 - RNA, 16 nt, Human
agcuuugacucaggag

SEQ ID NO: 3784264 - RNA, 21 nt, Human
agcuuugacuggaggguccau

SEQ ID NO: 3784265 - RNA, 17 nt, Human
agcuuugagaagccuuc

SEQ ID NO: 3784266 - RNA, 19 nt, Human
agcuuugagaagccuucag

SEQ ID NO: 3784267 - RNA, 15 nt, Human
agcuuugauuuuuac

SEQ ID NO: 3784268 - RNA, 17 nt, Human
agcuuugccagcugcug

SEQ ID NO: 3784269 - RNA, 20 nt, Human
agcuuugccagcugcugcug

SEQ ID NO: 3784270 - RNA, 13 nt, Human
agcuuugcugcua

SEQ ID NO: 3784271 - RNA, 22 nt, Human
agcuuugcugcugaaggcucau

SEQ ID NO: 3784272 - RNA, 19 nt, Human
agcuuuggacacacacagc

SEQ ID NO: 3784273 - RNA, 18 nt, Human
agcuuuggaccuaaucca

SEQ ID NO: 3784274 - RNA, 13 nt, Human
agcuuuggcagug

SEQ ID NO: 3784275 - RNA, 17 nt, Human
agcuuuggucugugugu

SEQ ID NO: 3784276 - RNA, 22 nt, Human
agcuuugucacuguuucacuac

SEQ ID NO: 3784277 - RNA, 22 nt, Human
agcuuuguguuugguuuacauu

SEQ ID NO: 3784278 - RNA, 12 nt, Human
agcuuuguucuu

SEQ ID NO: 3784279 - RNA, 18 nt, Human
agcuuuguucuucuuaaa

SEQ ID NO: 3784280 - RNA, 18 nt, Human
agcuuuguuuagucuuua

SEQ ID NO: 3784281 - RNA, 20 nt, Human
agcuuuguuuagucuuuaua

SEQ ID NO: 3784282 - RNA, 15 nt, Human
agcuuuguuuguucu

SEQ ID NO: 3784283 - RNA, 22 nt, Human
agcuuuguuuguugucagcuga

SEQ ID NO: 3784284 - RNA, 17 nt, Human
agcuuuuaguacccacc

SEQ ID NO: 3784285 - RNA, 19 nt, Human
agcuuuuaguacccaccug

SEQ ID NO: 3784286 - RNA, 17 nt, Human
agcuuuuauuguauaaa

SEQ ID NO: 3784287 - RNA, 19 nt, Human
agcuuuuauuguauaaacu

SEQ ID NO: 3784288 - RNA, 12 nt, Human
agcuuuucaccu

SEQ ID NO: 3784289 - RNA, 14 nt, Human
agcuuuuccucccu

SEQ ID NO: 3784290 - RNA, 13 nt, Human
agcuuuugucuac

SEQ ID NO: 3784291 - RNA, 22 nt, Human
agcuuuugugggggacuguaag

SEQ ID NO: 3784292 - RNA, 24 nt, Human
agcuuuugugggggacuguaaguu

SEQ ID NO: 3784293 - RNA, 14 nt, Human
agcuuuuuaauugu

SEQ ID NO: 3784294 - RNA, 22 nt, Human
agcuuuuuaauuguuguuucuu

SEQ ID NO: 3784295 - RNA, 19 nt, Human
agcuuuuuccagaggcuau

SEQ ID NO: 3784296 - RNA, 15 nt, Human
agcuuuuuccuccug

SEQ ID NO: 3784297 - RNA, 14 nt, Human
agcuuuuuggaauc

SEQ ID NO: 3784298 - RNA, 20 nt, Human
agcuuuuuuauuuuuuauac

SEQ ID NO: 3784299 - RNA, 22 nt, Human
agcuuuuuucucugauacagaa

SEQ ID NO: 3784300 - RNA, 23 nt, Human
agcuuuuuucucugauacagaaa

SEQ ID NO: 3784301 - RNA, 10 nt, Human
aggaaaaaaa

SEQ ID NO: 3784302 - RNA, 14 nt, Human
aggaaaaaaacuuu

SEQ ID NO: 3784303 - RNA, 14 nt, Human
aggaaaaaaagacu

SEQ ID NO: 3784304 - RNA, 13 nt, Human
aggaaaaaaauag

SEQ ID NO: 3784305 - RNA, 21 nt, Human
aggaaaaaaaucguccaggga

SEQ ID NO: 3784306 - RNA, 15 nt, Human
aggaaaaaauaaaca

SEQ ID NO: 3784307 - RNA, 15 nt, Human
aggaaaaacugauuu

SEQ ID NO: 3784308 - RNA, 15 nt, Human
aggaaaaagcacaag

SEQ ID NO: 3784309 - RNA, 13 nt, Human
aggaaaaagcucc

SEQ ID NO: 3784310 - RNA, 22 nt, Human
aggaaaaaggacaggcagaaag

SEQ ID NO: 3784311 - RNA, 15 nt, Human
aggaaaaauauguga

SEQ ID NO: 3784312 - RNA, 16 nt, Human
aggaaaaauaugugaa

SEQ ID NO: 3784313 - RNA, 20 nt, Human
aggaaaaccaagccguggcu

SEQ ID NO: 3784314 - RNA, 21 nt, Human
aggaaaaccaagccguggcuu

SEQ ID NO: 3784315 - RNA, 10 nt, Human
aggaaaagaa

SEQ ID NO: 3784316 - RNA, 13 nt, Human
aggaaaagaaaaa

SEQ ID NO: 3784317 - RNA, 15 nt, Human
aggaaaagaaaaaaa

SEQ ID NO: 3784318 - RNA, 15 nt, Human
aggaaaagaaaucua

SEQ ID NO: 3784319 - RNA, 23 nt, Human
agaauggugauuuuaaaugugug

SEQ ID NO: 3784320 - RNA, 13 nt, Human
agaaugguggcuu

SEQ ID NO: 3784321 - RNA, 17 nt, Human
agaaugguggcuucuuu

SEQ ID NO: 3784322 - RNA, 19 nt, Human
agaauggugugaacccggg

SEQ ID NO: 3784323 - RNA, 23 nt, Human
agaaugguugccuuaaagaaagu

SEQ ID NO: 3784324 - RNA, 17 nt, Human
agaauguaaaagaacuu

SEQ ID NO: 3784325 - RNA, 13 nt, Human
agaauguaaagcu

SEQ ID NO: 3784326 - RNA, 16 nt, Human
agaauguaaagcuugu

SEQ ID NO: 3784327 - RNA, 17 nt, Human
agaauguaaagcuuguc

SEQ ID NO: 3784328 - RNA, 13 nt, Human
agaauguaaaugu

SEQ ID NO: 3784329 - RNA, 22 nt, Human
agaauguaaaugucucacugag

SEQ ID NO: 3784330 - RNA, 14 nt, Human
agaauguaucccca

SEQ ID NO: 3784331 - RNA, 21 nt, Human
agaauguauccccaaaagcgu

SEQ ID NO: 3784332 - RNA, 15 nt, Human
agaauguaucuguga

SEQ ID NO: 3784333 - RNA, 16 nt, Human
agaauguaucugugaa

SEQ ID NO: 3784334 - RNA, 16 nt, Human
agaauguauuguaccu

SEQ ID NO: 3784335 - RNA, 17 nt, Human
agaauguauuguaccuu

SEQ ID NO: 3784336 - RNA, 21 nt, Human
agaauguauuguaccuuuuaa

SEQ ID NO: 3784337 - RNA, 15 nt, Human
agaaugucagaaaaa

SEQ ID NO: 3784338 - RNA, 15 nt, Human
agaaugucaguaugu

SEQ ID NO: 3784339 - RNA, 16 nt, Human
agaaugucauuuuggu

SEQ ID NO: 3784340 - RNA, 18 nt, Human
agaaugugcucaugcauu

SEQ ID NO: 3784341 - RNA, 16 nt, Human
agaauguguuucaaac

SEQ ID NO: 3784342 - RNA, 19 nt, Human
agaauguuaagacuugaca

SEQ ID NO: 3784343 - RNA, 17 nt, Human
agaauguuacugccuua

SEQ ID NO: 3784344 - RNA, 16 nt, Human
agaauguuagagcaca

SEQ ID NO: 3784345 - RNA, 14 nt, Human
agaauguuccagac

SEQ ID NO: 3784346 - RNA, 14 nt, Human
agaauguucucaau

SEQ ID NO: 3784347 - RNA, 16 nt, Human
agaauguugguuuacu

SEQ ID NO: 3784348 - RNA, 13 nt, Human
agaauguuucauu

SEQ ID NO: 3784349 - RNA, 21 nt, Human
agaauguuuucaaauguucuc

SEQ ID NO: 3784350 - RNA, 14 nt, Human
agaauguuuuccuu

SEQ ID NO: 3784351 - RNA, 15 nt, Human
agaauuaaacuuuua

SEQ ID NO: 3784352 - RNA, 22 nt, Human
agaauuaaacuuuuaauucauu

SEQ ID NO: 3784353 - RNA, 14 nt, Human
agaauuagauuaua

SEQ ID NO: 3784354 - RNA, 22 nt, Human
agaauuagugccagaauuuuag

SEQ ID NO: 3784355 - RNA, 13 nt, Human
agaauuauauagg

SEQ ID NO: 3784356 - RNA, 17 nt, Human
agaauuaucuaauuuau

SEQ ID NO: 3784357 - RNA, 21 nt, Human
agaauuaucuaauuuauaaaa

SEQ ID NO: 3784358 - RNA, 11 nt, Human
agaauuauuua

SEQ ID NO: 3784359 - RNA, 15 nt, Human
agaauuauuuuguga

SEQ ID NO: 3784360 - RNA, 20 nt, Human
agcugcaucauccuugcagg

SEQ ID NO: 3784361 - RNA, 15 nt, Human
agcugcaucuacuca

SEQ ID NO: 3784362 - RNA, 14 nt, Human
agcugccaagagug

SEQ ID NO: 3784363 - RNA, 17 nt, Human
agcugccaccugccugu

SEQ ID NO: 3784364 - RNA, 12 nt, Human
agcugccagaga

SEQ ID NO: 3784365 - RNA, 13 nt, Human
agcugccagagaa

SEQ ID NO: 3784366 - RNA, 23 nt, Human
agcugccaggagcacggcucugu

SEQ ID NO: 3784367 - RNA, 15 nt, Human
agcugccaguguccu

SEQ ID NO: 3784368 - RNA, 17 nt, Human
agcugccauccagggau

SEQ ID NO: 3784369 - RNA, 19 nt, Human
agcugcccccgcucauggg

SEQ ID NO: 3784370 - RNA, 17 nt, Human
agcugccccggccccuc

SEQ ID NO: 3784371 - RNA, 13 nt, Human
agcugccccuccc

SEQ ID NO: 3784372 - RNA, 14 nt, Human
agcugccccuggcu

SEQ ID NO: 3784373 - RNA, 21 nt, Human
agcugcccuaugggccugccg

SEQ ID NO: 3784374 - RNA, 11 nt, Human
agcugcccucc

SEQ ID NO: 3784375 - RNA, 23 nt, Human
agcugcccuccccuccggacugg

SEQ ID NO: 3784376 - RNA, 20 nt, Human
agcugcccucuccugggcag

SEQ ID NO: 3784377 - RNA, 15 nt, Human
agcugcccuuccgca

SEQ ID NO: 3784378 - RNA, 13 nt, Human
agcugccucacuu

SEQ ID NO: 3784379 - RNA, 15 nt, Human
agcugccuccccucc

SEQ ID NO: 3784380 - RNA, 18 nt, Human
agcugccuccccuccucu

SEQ ID NO: 3784381 - RNA, 17 nt, Human
agcugccugaaaaucaa

SEQ ID NO: 3784382 - RNA, 21 nt, Human
agcugccugggaucccucauc

SEQ ID NO: 3784383 - RNA, 15 nt, Human
agcugccuguaguua

SEQ ID NO: 3784384 - RNA, 18 nt, Human
agcugccuguaguuagga

SEQ ID NO: 3784385 - RNA, 23 nt, Human
agcugccuguaguuaggaaauaa

SEQ ID NO: 3784386 - RNA, 23 nt, Human
agcugccugucccuaccccaugg

SEQ ID NO: 3784387 - RNA, 21 nt, Human
agcugccuguucagcuccagc

SEQ ID NO: 3784388 - RNA, 16 nt, Human
agcugccuuagcuuca

SEQ ID NO: 3784389 - RNA, 12 nt, Human
agcugccuuccc

SEQ ID NO: 3784390 - RNA, 13 nt, Human
agcugccuucccu

SEQ ID NO: 3784391 - RNA, 18 nt, Human
agcugccuucccuagcuu

SEQ ID NO: 3784392 - RNA, 16 nt, Human
agcugccuuggcucag

SEQ ID NO: 3784393 - RNA, 17 nt, Human
agcugccuuggcucaga

SEQ ID NO: 3784394 - RNA, 15 nt, Human
agcugcgggcugggu

SEQ ID NO: 3784395 - RNA, 18 nt, Human
agcugcgguccacccagg

SEQ ID NO: 3784396 - RNA, 13 nt, Human
agcugcuaaaucu

SEQ ID NO: 3784397 - RNA, 15 nt, Human
agcugcuaaaucucc

SEQ ID NO: 3784398 - RNA, 14 nt, Human
agcugcuacaaaga

SEQ ID NO: 3784399 - RNA, 15 nt, Human
agcugcuacaaagaa

SEQ ID NO: 3784400 - RNA, 17 nt, Human
agcugcuacaaagaaga

SEQ ID NO: 3784401 - RNA, 18 nt, Human
agcugcuacaaagaagac

SEQ ID NO: 3784402 - RNA, 19 nt, Human
agcugcuauccccaucucc

SEQ ID NO: 3784403 - RNA, 16 nt, Human
agcugcucaacuugca

SEQ ID NO: 3784404 - RNA, 16 nt, Human
agcugcuccaggccug

SEQ ID NO: 3784405 - RNA, 17 nt, Human
agcugcuccaggccugc

SEQ ID NO: 3784406 - RNA, 19 nt, Human
agcugcuccaggccugcag

SEQ ID NO: 3784407 - RNA, 20 nt, Human
agcugcuccccagcagcgga

SEQ ID NO: 3784408 - RNA, 14 nt, Human
agcugcuccccucc

SEQ ID NO: 3784409 - RNA, 15 nt, Human
agcugcuccccuccc

SEQ ID NO: 3784410 - RNA, 12 nt, Human
agcugcucugcc

SEQ ID NO: 3784411 - RNA, 13 nt, Human
agcugcucugccc

SEQ ID NO: 3784412 - RNA, 19 nt, Human
agcugcucugcccagagcu

SEQ ID NO: 3784413 - RNA, 21 nt, Human
agcugcucugcccagagcugg

SEQ ID NO: 3784414 - RNA, 15 nt, Human
agcugcucuggaaaa

SEQ ID NO: 3784415 - RNA, 20 nt, Human
agcugcugaaacaacaaaua

SEQ ID NO: 3784416 - RNA, 13 nt, Human
agcugcugacagu

SEQ ID NO: 3784417 - RNA, 22 nt, Human
agcugcugaccaauugugcugc

SEQ ID NO: 3784418 - RNA, 17 nt, Human
agcugcugagccgcaga

SEQ ID NO: 3784419 - RNA, 14 nt, Human
agcugcuggagacu

SEQ ID NO: 3784420 - RNA, 23 nt, Human
agcugcuggagacuccuaggcag

SEQ ID NO: 3784421 - RNA, 17 nt, Human
agcugcuggcuugcagu

SEQ ID NO: 3784422 - RNA, 20 nt, Human
agcugcuugggcuucauccu

SEQ ID NO: 3784423 - RNA, 14 nt, Human
agcugcuugugucc

SEQ ID NO: 3784424 - RNA, 15 nt, Human
agcugcuuguguccc

SEQ ID NO: 3784425 - RNA, 20 nt, Human
agcugcuugugucccuccug

SEQ ID NO: 3784426 - RNA, 14 nt, Human
agcugcuuuguuac

SEQ ID NO: 3784427 - RNA, 20 nt, Human
agcugcuuuguuaccuuaaa

SEQ ID NO: 3784428 - RNA, 23 nt, Human
agcugcuuuugucuaugggacuc

SEQ ID NO: 3784429 - RNA, 13 nt, Human
agcuggacagagg

SEQ ID NO: 3784430 - RNA, 21 nt, Human
agcuggacagaggggacucug

SEQ ID NO: 3784431 - RNA, 15 nt, Human
agcuggacccugacc

SEQ ID NO: 3784432 - RNA, 17 nt, Human
agcuggacccugaccag

SEQ ID NO: 3784433 - RNA, 16 nt, Human
agcuggacuacccacg

SEQ ID NO: 3784434 - RNA, 17 nt, Human
agcuggagaaauauggu

SEQ ID NO: 3784435 - RNA, 15 nt, Human
agcuggagaagaccc

SEQ ID NO: 3784436 - RNA, 23 nt, Human
agcuggagaggagcccugccucu

SEQ ID NO: 3784437 - RNA, 18 nt, Human
agcuggagaugaggccag

SEQ ID NO: 3784438 - RNA, 14 nt, Human
agcuggagccuggu

SEQ ID NO: 3784439 - RNA, 13 nt, Human
agcuggaggcagg

SEQ ID NO: 3784440 - RNA, 17 nt, Human
agcuggaggcaggggcu

SEQ ID NO: 3784441 - RNA, 23 nt, Human
agcuggaggcaggggcuuccugg

SEQ ID NO: 3784442 - RNA, 20 nt, Human
agcuggaugauggucuucag

SEQ ID NO: 3784443 - RNA, 16 nt, Human
agcuggcagcagagug

SEQ ID NO: 3784444 - RNA, 20 nt, Human
agcuggccgaggguccuggc

SEQ ID NO: 3784445 - RNA, 19 nt, Human
agcuggccgggagccugau

SEQ ID NO: 3784446 - RNA, 19 nt, Human
agcuggccgugggccuggg

SEQ ID NO: 3784447 - RNA, 22 nt, Human
agcuggccucucacugccuccc

SEQ ID NO: 3784448 - RNA, 21 nt, Human
agcuggcgucaugcaaaguca

SEQ ID NO: 3784449 - RNA, 11 nt, Human
agcuggcucua

SEQ ID NO: 3784450 - RNA, 22 nt, Human
agcuggcucuauaaggcagccu

SEQ ID NO: 3784451 - RNA, 21 nt, Human
agcuggcucugugagggugcu

SEQ ID NO: 3784452 - RNA, 13 nt, Human
agcuggcuggggu

SEQ ID NO: 3784453 - RNA, 19 nt, Human
agcuggcugggguggccug

SEQ ID NO: 3784454 - RNA, 20 nt, Human
agcuggcuuacacuggcaau

SEQ ID NO: 3784455 - RNA, 14 nt, Human
agcugggaaagcau

SEQ ID NO: 3784456 - RNA, 21 nt, Human
agcugggacaccccgacuuuu

SEQ ID NO: 3784457 - RNA, 18 nt, Human
agcugggacuacaggcac

SEQ ID NO: 3784458 - RNA, 23 nt, Human
agcugggacuacaggcacccacc

SEQ ID NO: 3784459 - RNA, 17 nt, Human
agcugggacuacaggug

SEQ ID NO: 3784460 - RNA, 19 nt, Human
agcugggacuacaggugug

SEQ ID NO: 3784461 - RNA, 14 nt, Human
agcugggagccggg

SEQ ID NO: 3784462 - RNA, 15 nt, Human
agcugggagccgggc

SEQ ID NO: 3784463 - RNA, 12 nt, Human
agcugggaggaa

SEQ ID NO: 3784464 - RNA, 14 nt, Human
agcugggaggaaaa

SEQ ID NO: 3784465 - RNA, 16 nt, Human
agcugggaggcaagag

SEQ ID NO: 3784466 - RNA, 17 nt, Human
agcugggaggcaagagg

SEQ ID NO: 3784467 - RNA, 20 nt, Human
agcugggaggcauggcccug

SEQ ID NO: 3784468 - RNA, 22 nt, Human
agcugggaggcauggcccuggg

SEQ ID NO: 3784469 - RNA, 21 nt, Human
agcugggaucugacugcacgu

SEQ ID NO: 3784470 - RNA, 18 nt, Human
agcugggauuacaggcuc

SEQ ID NO: 3784471 - RNA, 21 nt, Human
agcugggauuacaggcuccug

SEQ ID NO: 3784472 - RNA, 23 nt, Human
agcugggauuacaggcuccugcc

SEQ ID NO: 3784473 - RNA, 15 nt, Human
agcugggauuuuaaa

SEQ ID NO: 3784474 - RNA, 16 nt, Human
aggaaaagaaaucuau

SEQ ID NO: 3784475 - RNA, 14 nt, Human
aggaaaagacacau

SEQ ID NO: 3784476 - RNA, 17 nt, Human
aggaaaagccucugugu

SEQ ID NO: 3784477 - RNA, 14 nt, Human
aggaaaaggccugg

SEQ ID NO: 3784478 - RNA, 24 nt, Human
aggaaaaguuuaauauuaaagcca

SEQ ID NO: 3784479 - RNA, 14 nt, Human
aggaaaaugucugu

SEQ ID NO: 3784480 - RNA, 11 nt, Human
aggaaaauuau

SEQ ID NO: 3784481 - RNA, 14 nt, Human
aggaaaauugaaug

SEQ ID NO: 3784482 - RNA, 21 nt, Human
aggaaaauuuuagcgugcuca

SEQ ID NO: 3784483 - RNA, 19 nt, Human
aggaaacaaccaugucauu

SEQ ID NO: 3784484 - RNA, 14 nt, Human
aggaaacaagugaa

SEQ ID NO: 3784485 - RNA, 17 nt, Human
aggaaacaauauuuaua

SEQ ID NO: 3784486 - RNA, 12 nt, Human
aggaaacaguua

SEQ ID NO: 3784487 - RNA, 16 nt, Human
aggaaaccacagcugc

SEQ ID NO: 3784488 - RNA, 17 nt, Human
aggaaaccacagcugcu

SEQ ID NO: 3784489 - RNA, 20 nt, Human
aggaaaccacagcugcugga

SEQ ID NO: 3784490 - RNA, 23 nt, Human
aggaaaccaguuaggucucaaua

SEQ ID NO: 3784491 - RNA, 16 nt, Human
aggaaacccagcucug

SEQ ID NO: 3784492 - RNA, 18 nt, Human
aggaaacccagcucuggu

SEQ ID NO: 3784493 - RNA, 22 nt, Human
aggaaaccgccuaguuuacugu

SEQ ID NO: 3784494 - RNA, 18 nt, Human
aggaaacuagcuuacaug

SEQ ID NO: 3784495 - RNA, 16 nt, Human
aggaaacucaccugcu

SEQ ID NO: 3784496 - RNA, 23 nt, Human
aggaaacucaccugcuggccccu

SEQ ID NO: 3784497 - RNA, 20 nt, Human
aggaaacuccacaucugccu

SEQ ID NO: 3784498 - RNA, 22 nt, Human
aggaaacuccacaucugccuua

SEQ ID NO: 3784499 - RNA, 12 nt, Human
aggaaagaauag

SEQ ID NO: 3784500 - RNA, 12 nt, Human
aggaaagagagc

SEQ ID NO: 3784501 - RNA, 17 nt, Human
aggaaagaggaagcaaa

SEQ ID NO: 3784502 - RNA, 13 nt, Human
aggaaagaggcuc

SEQ ID NO: 3784503 - RNA, 17 nt, Human
aggaaagagucuucaac

SEQ ID NO: 3784504 - RNA, 17 nt, Human
aggaaagcaaaggagau

SEQ ID NO: 3784505 - RNA, 21 nt, Human
agcuggugcauuacagagagg

SEQ ID NO: 3784506 - RNA, 22 nt, Human
agcuggugcauuacagagagga

SEQ ID NO: 3784507 - RNA, 14 nt, Human
agcuggugcccgga

SEQ ID NO: 3784508 - RNA, 13 nt, Human
agcuggugcggcu

SEQ ID NO: 3784509 - RNA, 17 nt, Human
agcuggugcggcuggcc

SEQ ID NO: 3784510 - RNA, 13 nt, Human
agcuggugggaag

SEQ ID NO: 3784511 - RNA, 14 nt, Human
agcuggugguuuca

SEQ ID NO: 3784512 - RNA, 17 nt, Human
agcugguguagcuacag

SEQ ID NO: 3784513 - RNA, 19 nt, Human
agcugguguagcuacagag

SEQ ID NO: 3784514 - RNA, 18 nt, Human
agcuggugucugauuguu

SEQ ID NO: 3784515 - RNA, 22 nt, Human
agcugguuccugcuagaaaugg

SEQ ID NO: 3784516 - RNA, 22 nt, Human
agcugguuuccucauuccugaa

SEQ ID NO: 3784517 - RNA, 15 nt, Human
agcuguaaaaagaga

SEQ ID NO: 3784518 - RNA, 19 nt, Human
agcuguaaaaagagagaaa

SEQ ID NO: 3784519 - RNA, 16 nt, Human
agcuguaaaccagaga

SEQ ID NO: 3784520 - RNA, 13 nt, Human
agcuguaaggcau

SEQ ID NO: 3784521 - RNA, 17 nt, Human
agcuguaaggcaugaag

SEQ ID NO: 3784522 - RNA, 22 nt, Human
agcuguacaaauauaagaauaa

SEQ ID NO: 3784523 - RNA, 19 nt, Human
agcuguacuucgucuucua

SEQ ID NO: 3784524 - RNA, 11 nt, Human
agcuguaucaa

SEQ ID NO: 3784525 - RNA, 14 nt, Human
agcuguaugauucc

SEQ ID NO: 3784526 - RNA, 17 nt, Human
agcuguaugauucccag

SEQ ID NO: 3784527 - RNA, 11 nt, Human
agcuguauuga

SEQ ID NO: 3784528 - RNA, 16 nt, Human
agcuguauugaaucau

SEQ ID NO: 3784529 - RNA, 15 nt, Human
agcuguauuuugaaa

SEQ ID NO: 3784530 - RNA, 16 nt, Human
agcugucaaggcucag

SEQ ID NO: 3784531 - RNA, 20 nt, Human
agcugucacuuuugcuccga

SEQ ID NO: 3784532 - RNA, 19 nt, Human
agcugucaucaauuaaagg

SEQ ID NO: 3784533 - RNA, 14 nt, Human
agcuguccagagaa

SEQ ID NO: 3784534 - RNA, 18 nt, Human
agcugucccugucaccaa

SEQ ID NO: 3784535 - RNA, 14 nt, Human
agcugucccuugcu

SEQ ID NO: 3784536 - RNA, 15 nt, Human
agcuguccucccucc

SEQ ID NO: 3784537 - RNA, 14 nt, Human
agcuguccugcagc

SEQ ID NO: 3784538 - RNA, 15 nt, Human
agcuguccugcagca

SEQ ID NO: 3784539 - RNA, 14 nt, Human
agcuguccuuuuuc

SEQ ID NO: 3784540 - RNA, 19 nt, Human
agcugucucaaaccuccaa

SEQ ID NO: 3784541 - RNA, 16 nt, Human
agcugucuuuuggagg

SEQ ID NO: 3784542 - RNA, 15 nt, Human
agcugugaacaggcu

SEQ ID NO: 3784543 - RNA, 18 nt, Human
agcugugaccugcugagc

SEQ ID NO: 3784544 - RNA, 22 nt, Human
agcugugaccugcugagcucug

SEQ ID NO: 3784545 - RNA, 23 nt, Human
agcugugaccugcugagcucuga

SEQ ID NO: 3784546 - RNA, 18 nt, Human
agcugugacuucuccagg

SEQ ID NO: 3784547 - RNA, 16 nt, Human
agcugugagccuuggc

SEQ ID NO: 3784548 - RNA, 18 nt, Human
agcugugagccuuggcug

SEQ ID NO: 3784549 - RNA, 19 nt, Human
agcugugaguucucccugu

SEQ ID NO: 3784550 - RNA, 20 nt, Human
agcugugcacaaaguggcau

SEQ ID NO: 3784551 - RNA, 12 nt, Human
agcugugcaggu

SEQ ID NO: 3784552 - RNA, 12 nt, Human
agcugugccacc

SEQ ID NO: 3784553 - RNA, 16 nt, Human
agcugugcgugugugu

SEQ ID NO: 3784554 - RNA, 17 nt, Human
agcugugcgugugugug

SEQ ID NO: 3784555 - RNA, 17 nt, Human
agcugugcucuggacag

SEQ ID NO: 3784556 - RNA, 18 nt, Human
agcugugcucuggacagg

SEQ ID NO: 3784557 - RNA, 19 nt, Human
agcugugcucuggacaggc

SEQ ID NO: 3784558 - RNA, 20 nt, Human
agcugugcucuggacaggca

SEQ ID NO: 3784559 - RNA, 18 nt, Human
agcuguggcagaguuaca

SEQ ID NO: 3784560 - RNA, 21 nt, Human
agcuguggcagaguuacaguu

SEQ ID NO: 3784561 - RNA, 18 nt, Human
agcuguguccuugcaccu

SEQ ID NO: 3784562 - RNA, 20 nt, Human
agcuguguccuugcaccugc

SEQ ID NO: 3784563 - RNA, 21 nt, Human
agcuguguccuugcaccugca

SEQ ID NO: 3784564 - RNA, 18 nt, Human
agcuguuacugucuucag

SEQ ID NO: 3784565 - RNA, 14 nt, Human
agcuguucacagcc

SEQ ID NO: 3784566 - RNA, 16 nt, Human
agcuguuccuguucag

SEQ ID NO: 3784567 - RNA, 20 nt, Human
agcuguuccuugguccuagu

SEQ ID NO: 3784568 - RNA, 13 nt, Human
agcuguucuuccu

SEQ ID NO: 3784569 - RNA, 14 nt, Human
agcuguucuuccug

SEQ ID NO: 3784570 - RNA, 21 nt, Human
agcuguugacucuaguacugu

SEQ ID NO: 3784571 - RNA, 16 nt, Human
agcuguugagcuguuu

SEQ ID NO: 3784572 - RNA, 23 nt, Human
agcuguuguacauuuaugauuua

SEQ ID NO: 3784573 - RNA, 19 nt, Human
agcuguugucucuucuccu

SEQ ID NO: 3784574 - RNA, 12 nt, Human
agcuguuuaaga

SEQ ID NO: 3784575 - RNA, 16 nt, Human
agcuguuuaagauggg

SEQ ID NO: 3784576 - RNA, 16 nt, Human
agcuguuuggaaaaga

SEQ ID NO: 3784577 - RNA, 17 nt, Human
agcuguuugguuuuaaa

SEQ ID NO: 3784578 - RNA, 19 nt, Human
agcuguuugguuuuaaaau

SEQ ID NO: 3784579 - RNA, 24 nt, Human
agcuguuugguuuuaaaauacugu

SEQ ID NO: 3784580 - RNA, 20 nt, Human
agcuguuuuaguuaaauuuc

SEQ ID NO: 3784581 - RNA, 15 nt, Human
agcuguuuucccuga

SEQ ID NO: 3784582 - RNA, 14 nt, Human
agcuguuuuguuga

SEQ ID NO: 3784583 - RNA, 23 nt, Human
agcuguuuuguugacauucugaa

SEQ ID NO: 3784584 - RNA, 14 nt, Human
agcuuaaaaaaaac

SEQ ID NO: 3784585 - RNA, 22 nt, Human
agcuuaaaacuuugaaguuagc

SEQ ID NO: 3784586 - RNA, 14 nt, Human
agcuuaaaauacaa

SEQ ID NO: 3784587 - RNA, 18 nt, Human
agcuuaaaauacaagacu

SEQ ID NO: 3784588 - RNA, 16 nt, Human
agcuuaagggucauau

SEQ ID NO: 3784589 - RNA, 20 nt, Human
agcuuaagggucauauguuu

SEQ ID NO: 3784590 - RNA, 19 nt, Human
agcuuaauggcugauaauu

SEQ ID NO: 3784591 - RNA, 16 nt, Human
agcuuacauaguuuua

SEQ ID NO: 3784592 - RNA, 22 nt, Human
agcuuacauaguuuuaaacuca

SEQ ID NO: 3784593 - RNA, 17 nt, Human
agcuuaccucccaccuu

SEQ ID NO: 3784594 - RNA, 15 nt, Human
agcuuacguaguucu

SEQ ID NO: 3784595 - RNA, 21 nt, Human
agcuuacucuguccauuuauc

SEQ ID NO: 3784596 - RNA, 15 nt, Human
agcuuagaaacugga

SEQ ID NO: 3784597 - RNA, 14 nt, Human
agcuuagaccucag

SEQ ID NO: 3784598 - RNA, 17 nt, Human
agcuuagaccucagccu

SEQ ID NO: 3784599 - RNA, 18 nt, Human
agcuuagaccucagccug

SEQ ID NO: 3784600 - RNA, 18 nt, Human
agcuuagcuuuagaaaca

SEQ ID NO: 3784601 - RNA, 19 nt, Human
agcuuagcuuuagaaacag

SEQ ID NO: 3784602 - RNA, 14 nt, Human
agcuuagggcccug

SEQ ID NO: 3784603 - RNA, 18 nt, Human
agcuuagggcccuggagg

SEQ ID NO: 3784604 - RNA, 16 nt, Human
agcuuagggucucagg

SEQ ID NO: 3784605 - RNA, 13 nt, Human
agcuuaucaauuu

SEQ ID NO: 3784606 - RNA, 17 nt, Human
agcuuaucaauuuguca

SEQ ID NO: 3784607 - RNA, 18 nt, Human
agcuuauccauaaaaaaa

SEQ ID NO: 3784608 - RNA, 15 nt, Human
agcuuaucucagggg

SEQ ID NO: 3784609 - RNA, 19 nt, Human
agcuuaucucuuuuauauu

SEQ ID NO: 3784610 - RNA, 15 nt, Human
agcuuaugaaaagaa

SEQ ID NO: 3784611 - RNA, 20 nt, Human
agcuuauuaaaacucauuuu

SEQ ID NO: 3784612 - RNA, 18 nt, Human
agcuuauuaaugcuaagg

SEQ ID NO: 3784613 - RNA, 22 nt, Human
agcuuauuaaugcuaagggcag

SEQ ID NO: 3784614 - RNA, 21 nt, Human
agcuuauugucuagugaaacu

SEQ ID NO: 3784615 - RNA, 18 nt, Human
agcuucacaguacccaaa

SEQ ID NO: 3784616 - RNA, 13 nt, Human
agcuucacuucug

SEQ ID NO: 3784617 - RNA, 21 nt, Human
agcuucagaaguuuggcaaua

SEQ ID NO: 3784618 - RNA, 21 nt, Human
agcuucagauggugaagcauu

SEQ ID NO: 3784619 - RNA, 13 nt, Human
agcuucaggaacc

SEQ ID NO: 3784620 - RNA, 16 nt, Human
agcuucaggaaccucg

SEQ ID NO: 3784621 - RNA, 23 nt, Human
agcuucagguuaucgaaauaaca

SEQ ID NO: 3784622 - RNA, 21 nt, Human
agcuucaguaaguuaucuuug

SEQ ID NO: 3784623 - RNA, 19 nt, Human
agcuucaguugcuugucuu

SEQ ID NO: 3784624 - RNA, 15 nt, Human
agcuucaguuuccug

SEQ ID NO: 3784625 - RNA, 20 nt, Human
agcuucaugcacuuaaagaa

SEQ ID NO: 3784626 - RNA, 15 nt, Human
agcuucaugccuuug

SEQ ID NO: 3784627 - RNA, 18 nt, Human
agcuucaugccuuuguaa

SEQ ID NO: 3784628 - RNA, 20 nt, Human
agcuucaugccuuuguaagu

SEQ ID NO: 3784629 - RNA, 18 nt, Human
acuguuagcacuguugau

SEQ ID NO: 3784630 - RNA, 21 nt, Human
acuguuagcacuguugaugua

SEQ ID NO: 3784631 - RNA, 13 nt, Human
acuguuagcuuuu

SEQ ID NO: 3784632 - RNA, 19 nt, Human
acuguuauccuauuuagau

SEQ ID NO: 3784633 - RNA, 12 nt, Human
acuguuauucuu

SEQ ID NO: 3784634 - RNA, 13 nt, Human
acuguuauuuaua

SEQ ID NO: 3784635 - RNA, 14 nt, Human
acuguuauuuauaa

SEQ ID NO: 3784636 - RNA, 15 nt, Human
acuguuauuuauaau

SEQ ID NO: 3784637 - RNA, 17 nt, Human
acuguuauuuauaauca

SEQ ID NO: 3784638 - RNA, 20 nt, Human
acuguuauuuauaaucacuu

SEQ ID NO: 3784639 - RNA, 23 nt, Human
acuguucaaugguucugaaauaa

SEQ ID NO: 3784640 - RNA, 17 nt, Human
acuguucagcuguccuc

SEQ ID NO: 3784641 - RNA, 15 nt, Human
acuguucccccugug

SEQ ID NO: 3784642 - RNA, 18 nt, Human
acuguucccccugugcag

SEQ ID NO: 3784643 - RNA, 20 nt, Human
acuguucccucugcuccugg

SEQ ID NO: 3784644 - RNA, 16 nt, Human
acuguucucugcccuc

SEQ ID NO: 3784645 - RNA, 21 nt, Human
acuguucucuucuugaacacu

SEQ ID NO: 3784646 - RNA, 13 nt, Human
acuguucuguguc

SEQ ID NO: 3784647 - RNA, 16 nt, Human
acuguucugugucuuu

SEQ ID NO: 3784648 - RNA, 13 nt, Human
acuguucuuagcu

SEQ ID NO: 3784649 - RNA, 21 nt, Human
acuguucuuagcucaaugagc

SEQ ID NO: 3784650 - RNA, 23 nt, Human
acuguucuuagcucaaugagcau

SEQ ID NO: 3784651 - RNA, 10 nt, Human
acuguucuug

SEQ ID NO: 3784652 - RNA, 14 nt, Human
acuguucuugcugc

SEQ ID NO: 3784653 - RNA, 17 nt, Human
acuguucuugcugcuag

SEQ ID NO: 3784654 - RNA, 15 nt, Human
acuguugauaaaaac

SEQ ID NO: 3784655 - RNA, 15 nt, Human
acuguugauguaucu

SEQ ID NO: 3784656 - RNA, 16 nt, Human
acuguugauguaucug

SEQ ID NO: 3784657 - RNA, 20 nt, Human
acuguugauguaucugaguu

SEQ ID NO: 3784658 - RNA, 12 nt, Human
acuguugcacgu

SEQ ID NO: 3784659 - RNA, 16 nt, Human
acuguugcacgugugu

SEQ ID NO: 3784660 - RNA, 14 nt, Human
acuguugccagaga

SEQ ID NO: 3784661 - RNA, 13 nt, Human
acuguugcccagg

SEQ ID NO: 3784662 - RNA, 20 nt, Human
acuguugggguggguauaaa

SEQ ID NO: 3784663 - RNA, 21 nt, Human
acuguugggguggguauaaaa

SEQ ID NO: 3784664 - RNA, 20 nt, Human
acuguuguaacuaggcucag

SEQ ID NO: 3784665 - RNA, 12 nt, Human
acuguuguauaa

SEQ ID NO: 3784666 - RNA, 15 nt, Human
acuguuguauaaauu

SEQ ID NO: 3784667 - RNA, 14 nt, Human
acuguuuaaucaua

SEQ ID NO: 3784668 - RNA, 20 nt, Human
acuguuuaaucauaguuacu

SEQ ID NO: 3784669 - RNA, 18 nt, Human
acuguuuaauguucugug

SEQ ID NO: 3784670 - RNA, 20 nt, Human
acuguuuagauuugccauag

SEQ ID NO: 3784671 - RNA, 14 nt, Human
acuguuuauacacu

SEQ ID NO: 3784672 - RNA, 17 nt, Human
acuguuuauacacugug

SEQ ID NO: 3784673 - RNA, 24 nt, Human
acuguuuauuacuuccaugaauuu

SEQ ID NO: 3784674 - RNA, 15 nt, Human
acuguuuauuucugu

SEQ ID NO: 3784675 - RNA, 19 nt, Human
acuguuuauuucuguuucu

SEQ ID NO: 3784676 - RNA, 15 nt, Human
acuguuucaaacuuu

SEQ ID NO: 3784677 - RNA, 20 nt, Human
acuguuucacuacucagcau

SEQ ID NO: 3784678 - RNA, 12 nt, Human
acuguuucucug

SEQ ID NO: 3784679 - RNA, 16 nt, Human
acuguuucucuugagc

SEQ ID NO: 3784680 - RNA, 20 nt, Human
acuguuucucuugagcuggc

SEQ ID NO: 3784681 - RNA, 21 nt, Human
acuguuucucuugagcuggcc

SEQ ID NO: 3784682 - RNA, 13 nt, Human
acuguuucuugcu

SEQ ID NO: 3784683 - RNA, 16 nt, Human
acuguuucuugcuugu

SEQ ID NO: 3784684 - RNA, 20 nt, Human
acuguuucuugcuuguaccu

SEQ ID NO: 3784685 - RNA, 21 nt, Human
acuguuugaaaacuucagaag

SEQ ID NO: 3784686 - RNA, 18 nt, Human
acuguuugagguuuuuaa

SEQ ID NO: 3784687 - RNA, 21 nt, Human
acuguuugccuucuacuuuua

SEQ ID NO: 3784688 - RNA, 19 nt, Human
acuguuuggaaauaaaucu

SEQ ID NO: 3784689 - RNA, 23 nt, Human
acuguuuggaaauugauuuugaa

SEQ ID NO: 3784690 - RNA, 20 nt, Human
acuguuuguuuacaaaauca

SEQ ID NO: 3784691 - RNA, 21 nt, Human
acuguuuguuuuuauuuaaau

SEQ ID NO: 3784692 - RNA, 22 nt, Human
acuguuuguuuuuauuuaaauu

SEQ ID NO: 3784693 - RNA, 23 nt, Human
acuguuuucuaguguaucaaaau

SEQ ID NO: 3784694 - RNA, 22 nt, Human
acuguuuucucucggcucccca

SEQ ID NO: 3784695 - RNA, 20 nt, Human
acuguuuucuuuaugucuuu

SEQ ID NO: 3784696 - RNA, 18 nt, Human
acuguuuuggguagcugc

SEQ ID NO: 3784697 - RNA, 19 nt, Human
acuguuuuggguagcugcc

SEQ ID NO: 3784698 - RNA, 17 nt, Human
acuguuuuuacccauau

SEQ ID NO: 3784699 - RNA, 19 nt, Human
acuguuuuuagacaccuuc

SEQ ID NO: 3784700 - RNA, 12 nt, Human
acuguuuuucca

SEQ ID NO: 3784701 - RNA, 22 nt, Human
acuguuuuuccauaguuuugau

SEQ ID NO: 3784702 - RNA, 20 nt, Human
acuguuuuuuaaacuaggaa

SEQ ID NO: 3784703 - RNA, 13 nt, Human
acuguuuuuuaag

SEQ ID NO: 3784704 - RNA, 17 nt, Human
acuguuuuuuccugagc

SEQ ID NO: 3784705 - RNA, 20 nt, Human
acuuaaaaaaaaaaaaaagc

SEQ ID NO: 3784706 - RNA, 13 nt, Human
acuuaaaaaaaug

SEQ ID NO: 3784707 - RNA, 16 nt, Human
acuuaaaaaaaugaca

SEQ ID NO: 3784708 - RNA, 13 nt, Human
acuuaaaaaacuu

SEQ ID NO: 3784709 - RNA, 13 nt, Human
acuuaaaaauggu

SEQ ID NO: 3784710 - RNA, 22 nt, Human
acuuaaaaaugguuuaaauggu

SEQ ID NO: 3784711 - RNA, 18 nt, Human
acuuaaaaauguaaauau

SEQ ID NO: 3784712 - RNA, 12 nt, Human
acuuaaaacacg

SEQ ID NO: 3784713 - RNA, 14 nt, Human
acuuaaaaugugca

SEQ ID NO: 3784714 - RNA, 16 nt, Human
acuuaaaaugugcagu

SEQ ID NO: 3784715 - RNA, 18 nt, Human
acuuaaaaugugcaguaa

SEQ ID NO: 3784716 - RNA, 14 nt, Human
agccagcucucagc

SEQ ID NO: 3784717 - RNA, 16 nt, Human
agccagcucugcauua

SEQ ID NO: 3784718 - RNA, 16 nt, Human
agccagcugccgacca

SEQ ID NO: 3784719 - RNA, 12 nt, Human
agccagcuuguu

SEQ ID NO: 3784720 - RNA, 20 nt, Human
agccagcuuguuuacaugcu

SEQ ID NO: 3784721 - RNA, 20 nt, Human
agccaggaagaucccccaga

SEQ ID NO: 3784722 - RNA, 22 nt, Human
agccaggacaccgggcagggcc

SEQ ID NO: 3784723 - RNA, 15 nt, Human
agccaggacagucag

SEQ ID NO: 3784724 - RNA, 14 nt, Human
agccaggagaagcu

SEQ ID NO: 3784725 - RNA, 20 nt, Human
agccaggagaagcucagcug

SEQ ID NO: 3784726 - RNA, 14 nt, Human
agccaggagcuggg

SEQ ID NO: 3784727 - RNA, 18 nt, Human
agccaggagcugggcaga

SEQ ID NO: 3784728 - RNA, 11 nt, Human
agccaggaggg

SEQ ID NO: 3784729 - RNA, 15 nt, Human
agccaggaucauggu

SEQ ID NO: 3784730 - RNA, 20 nt, Human
agccaggaucaugguguaau

SEQ ID NO: 3784731 - RNA, 22 nt, Human
agccaggaucaugguguaauaa

SEQ ID NO: 3784732 - RNA, 22 nt, Human
agccaggcaacuucaguccugg

SEQ ID NO: 3784733 - RNA, 11 nt, Human
agccaggcaca

SEQ ID NO: 3784734 - RNA, 20 nt, Human
agccaggcacacacugugcu

SEQ ID NO: 3784735 - RNA, 21 nt, Human
agccaggccacaagacccuug

SEQ ID NO: 3784736 - RNA, 14 nt, Human
agccaggcccagcc

SEQ ID NO: 3784737 - RNA, 15 nt, Human
agccaggccccaggc

SEQ ID NO: 3784738 - RNA, 19 nt, Human
agccaggcgcuagcacagc

SEQ ID NO: 3784739 - RNA, 14 nt, Human
agccaggcgggcuc

SEQ ID NO: 3784740 - RNA, 18 nt, Human
agccaggcgggcucaagg

SEQ ID NO: 3784741 - RNA, 19 nt, Human
agccaggcgggcucaagga

SEQ ID NO: 3784742 - RNA, 20 nt, Human
agccaggcuagcuggagccu

SEQ ID NO: 3784743 - RNA, 18 nt, Human
agccaggcucacucacag

SEQ ID NO: 3784744 - RNA, 15 nt, Human
agccaggcucaggcc

SEQ ID NO: 3784745 - RNA, 16 nt, Human
agccaggcucugugcu

SEQ ID NO: 3784746 - RNA, 17 nt, Human
agccaggcucugugcug

SEQ ID NO: 3784747 - RNA, 21 nt, Human
agccaggcucugugcugaccc

SEQ ID NO: 3784748 - RNA, 19 nt, Human
agccagggagagcccagga

SEQ ID NO: 3784749 - RNA, 21 nt, Human
agccagggagagcccaggagc

SEQ ID NO: 3784750 - RNA, 12 nt, Human
agccagggccag

SEQ ID NO: 3784751 - RNA, 19 nt, Human
agccagggcccgggaagca

SEQ ID NO: 3784752 - RNA, 23 nt, Human
agccagggcuaugggagcagcuu

SEQ ID NO: 3784753 - RNA, 11 nt, Human
agccagggcug

SEQ ID NO: 3784754 - RNA, 12 nt, Human
agccagggcugc

SEQ ID NO: 3784755 - RNA, 17 nt, Human
agccaggggagcagagg

SEQ ID NO: 3784756 - RNA, 21 nt, Human
agccagggggagcugggccug

SEQ ID NO: 3784757 - RNA, 14 nt, Human
agccagggucucca

SEQ ID NO: 3784758 - RNA, 15 nt, Human
agccagggucuccag

SEQ ID NO: 3784759 - RNA, 17 nt, Human
agccaggucccccugca

SEQ ID NO: 3784760 - RNA, 18 nt, Human
agccaggucccccugcag

SEQ ID NO: 3784761 - RNA, 15 nt, Human
agccaggucccucuc

SEQ ID NO: 3784762 - RNA, 14 nt, Human
agccagucccaggg

SEQ ID NO: 3784763 - RNA, 15 nt, Human
agccagucuuaacau

SEQ ID NO: 3784764 - RNA, 19 nt, Human
agccagugaccugaggaag

SEQ ID NO: 3784765 - RNA, 18 nt, Human
agccagugacuccaggag

SEQ ID NO: 3784766 - RNA, 22 nt, Human
agccagugacuccaggagagga

SEQ ID NO: 3784767 - RNA, 18 nt, Human
agccagugcccugagcca

SEQ ID NO: 3784768 - RNA, 21 nt, Human
agccaguuugccggauacaaa

SEQ ID NO: 3784769 - RNA, 19 nt, Human
agccauacuuaucucucug

SEQ ID NO: 3784770 - RNA, 14 nt, Human
agccauaggcccuu

SEQ ID NO: 3784771 - RNA, 21 nt, Human
agccauauaaguuugaaggaa

SEQ ID NO: 3784772 - RNA, 14 nt, Human
agccauauuuguaa

SEQ ID NO: 3784773 - RNA, 16 nt, Human
agccaucaccucagau

SEQ ID NO: 3784774 - RNA, 18 nt, Human
agccccaaaacucuccuc

SEQ ID NO: 3784775 - RNA, 24 nt, Human
agccccaaaacucuccucugcugc

SEQ ID NO: 3784776 - RNA, 23 nt, Human
agccccaaagucaauuaaaggcu

SEQ ID NO: 3784777 - RNA, 21 nt, Human
agccccaaauugucaccugcu

SEQ ID NO: 3784778 - RNA, 22 nt, Human
agccccaacccaaaccuggaga

SEQ ID NO: 3784779 - RNA, 16 nt, Human
agccccaagaaggcug

SEQ ID NO: 3784780 - RNA, 14 nt, Human
agccccaaguccug

SEQ ID NO: 3784781 - RNA, 14 nt, Human
agccccacacagcu

SEQ ID NO: 3784782 - RNA, 23 nt, Human
agccccacaccagggccagccuc

SEQ ID NO: 3784783 - RNA, 20 nt, Human
agccccacacuggggugccg

SEQ ID NO: 3784784 - RNA, 14 nt, Human
agccccacagccca

SEQ ID NO: 3784785 - RNA, 16 nt, Human
agccccacagcccacg

SEQ ID NO: 3784786 - RNA, 17 nt, Human
agccccacagcccacgu

SEQ ID NO: 3784787 - RNA, 16 nt, Human
agccccacccaggcca

SEQ ID NO: 3784788 - RNA, 20 nt, Human
agccccacccaggccaggca

SEQ ID NO: 3784789 - RNA, 23 nt, Human
agccccaccccagggcagccagg

SEQ ID NO: 3784790 - RNA, 17 nt, Human
agccccacccuggccua

SEQ ID NO: 3784791 - RNA, 15 nt, Human
agccccacucucaga

SEQ ID NO: 3784792 - RNA, 17 nt, Human
agccccacucucagagg

SEQ ID NO: 3784793 - RNA, 19 nt, Human
agccccacucucagaggcc

SEQ ID NO: 3784794 - RNA, 14 nt, Human
agccccacugccag

SEQ ID NO: 3784795 - RNA, 19 nt, Human
agccccacugccagcagca

SEQ ID NO: 3784796 - RNA, 20 nt, Human
agccccacugccagcagcag

SEQ ID NO: 3784797 - RNA, 13 nt, Human
agccccacuuacc

SEQ ID NO: 3784798 - RNA, 21 nt, Human
agccccagcaccaccaggucu

SEQ ID NO: 3784799 - RNA, 14 nt, Human
agccccagccaggg

SEQ ID NO: 3784800 - RNA, 11 nt, Human
agccccagccc

SEQ ID NO: 3784801 - RNA, 15 nt, Human
agccccagcccagcc

SEQ ID NO: 3784802 - RNA, 17 nt, Human
agccccagcccagccca

SEQ ID NO: 3784803 - RNA, 19 nt, Human
agccccagcccagccccac

SEQ ID NO: 3784804 - RNA, 21 nt, Human
agccccagcccagccccacuc

SEQ ID NO: 3784805 - RNA, 15 nt, Human
agccccagccugcua

SEQ ID NO: 3784806 - RNA, 17 nt, Human
agccccagccugcuagc

SEQ ID NO: 3784807 - RNA, 16 nt, Human
agccccaggccucugu

SEQ ID NO: 3784808 - RNA, 21 nt, Human
agccccaggccucuguguccu

SEQ ID NO: 3784809 - RNA, 16 nt, Human
agccccaggggacaag

SEQ ID NO: 3784810 - RNA, 23 nt, Human
agccccagugccaagcacagugc

SEQ ID NO: 3784811 - RNA, 13 nt, Human
agccccagugccc

SEQ ID NO: 3784812 - RNA, 23 nt, Human
agccccauaauuuuuuuuuuccu

SEQ ID NO: 3784813 - RNA, 15 nt, Human
agccccauccucugu

SEQ ID NO: 3784814 - RNA, 23 nt, Human
agccccauccucuguacagagcc

SEQ ID NO: 3784815 - RNA, 18 nt, Human
agccccauccugccgccc

SEQ ID NO: 3784816 - RNA, 14 nt, Human
agccccaucugugc

SEQ ID NO: 3784817 - RNA, 19 nt, Human
agccccaugcuggagccug

SEQ ID NO: 3784818 - RNA, 21 nt, Human
agccccaugcuggagccugug

SEQ ID NO: 3784819 - RNA, 22 nt, Human
agccccaugcuggagccugugu

SEQ ID NO: 3784820 - RNA, 23 nt, Human
agccccaugcuggagccugugua

SEQ ID NO: 3784821 - RNA, 14 nt, Human
agccccauuaacug

SEQ ID NO: 3784822 - RNA, 15 nt, Human
agccccauuaacugc

SEQ ID NO: 3784823 - RNA, 16 nt, Human
agccccauuccuggga

SEQ ID NO: 3784824 - RNA, 22 nt, Human
agcccccacccuguuccugcug

SEQ ID NO: 3784825 - RNA, 23 nt, Human
agcccccacccuguuccugcugc

SEQ ID NO: 3784826 - RNA, 19 nt, Human
agcccccaccgugggcagg

SEQ ID NO: 3784827 - RNA, 18 nt, Human
agcccccagccccucccc

SEQ ID NO: 3784828 - RNA, 13 nt, Human
agcccccagccug

SEQ ID NO: 3784829 - RNA, 12 nt, Human
agcccccagcua

SEQ ID NO: 3784830 - RNA, 19 nt, Human
agcccccagcuaagaaccu

SEQ ID NO: 3784831 - RNA, 20 nt, Human
agcccccagcuaagaaccug

SEQ ID NO: 3784832 - RNA, 20 nt, Human
agcccccagcuuccagcagg

SEQ ID NO: 3784833 - RNA, 17 nt, Human
agcccccaggcugcugg

SEQ ID NO: 3784834 - RNA, 20 nt, Human
agcccccccaacacugugcc

SEQ ID NO: 3784835 - RNA, 14 nt, Human
agcccccucacagu

SEQ ID NO: 3784836 - RNA, 13 nt, Human
agcccccuccugg

SEQ ID NO: 3784837 - RNA, 20 nt, Human
agcccccugaccacucagag

SEQ ID NO: 3784838 - RNA, 16 nt, Human
agcccccuggccucug

SEQ ID NO: 3784839 - RNA, 17 nt, Human
agcccccuggccucugu

SEQ ID NO: 3784840 - RNA, 16 nt, Human
agccccgacuccagcc

SEQ ID NO: 3784841 - RNA, 22 nt, Human
agccccgacuccagccagcgcc

SEQ ID NO: 3784842 - RNA, 23 nt, Human
agccccgacuccagccagcgccu

SEQ ID NO: 3784843 - RNA, 17 nt, Human
agccccgaggccuucuc

SEQ ID NO: 3784844 - RNA, 20 nt, Human
agccccgcaaaacccacuga

SEQ ID NO: 3784845 - RNA, 22 nt, Human
agccccgcagaccuccccagcc

SEQ ID NO: 3784846 - RNA, 15 nt, Human
agccccgcccucuuc

SEQ ID NO: 3784847 - RNA, 16 nt, Human
agccccgcccucuucc

SEQ ID NO: 3784848 - RNA, 18 nt, Human
agccccgcccucuuccug

SEQ ID NO: 3784849 - RNA, 16 nt, Human
agccccgccuccaggc

SEQ ID NO: 3784850 - RNA, 20 nt, Human
agccccgcgaccauguggcc

SEQ ID NO: 3784851 - RNA, 18 nt, Human
agccccggcccugggcuc

SEQ ID NO: 3784852 - RNA, 19 nt, Human
agccccgguggcugggcag

SEQ ID NO: 3784853 - RNA, 17 nt, Human
agccccuaccccacacc

SEQ ID NO: 3784854 - RNA, 21 nt, Human
agccccuaccccacaccaggc

SEQ ID NO: 3784855 - RNA, 18 nt, Human
agccccuagaaacccaag

SEQ ID NO: 3784856 - RNA, 13 nt, Human
agccccuccaucu

SEQ ID NO: 3784857 - RNA, 16 nt, Human
agccccuccaucugua

SEQ ID NO: 3784858 - RNA, 13 nt, Human
agccccucccaag

SEQ ID NO: 3784859 - RNA, 20 nt, Human
agccccucccaagcuggcug

SEQ ID NO: 3784860 - RNA, 21 nt, Human
agccccucccaagcuggcugg

SEQ ID NO: 3784861 - RNA, 22 nt, Human
agccccucccaagcuggcuggg

SEQ ID NO: 3784862 - RNA, 15 nt, Human
agccccucccuccuc

SEQ ID NO: 3784863 - RNA, 22 nt, Human
agccccuccuccagccccuguc

SEQ ID NO: 3784864 - RNA, 14 nt, Human
agccccuccucugc

SEQ ID NO: 3784865 - RNA, 16 nt, Human
agccccuccucugcca

SEQ ID NO: 3784866 - RNA, 18 nt, Human
agccccuccucugccacc

SEQ ID NO: 3784867 - RNA, 23 nt, Human
agccccuccucugccaccucccc

SEQ ID NO: 3784868 - RNA, 21 nt, Human
agccccucuccccgcaguguu

SEQ ID NO: 3784869 - RNA, 16 nt, Human
agccccucuggucgcu

SEQ ID NO: 3784870 - RNA, 22 nt, Human
agccccucuuucuguccccucu

SEQ ID NO: 3784871 - RNA, 15 nt, Human
agccccugccccagc

SEQ ID NO: 3784872 - RNA, 17 nt, Human
agccccugccccagccc

SEQ ID NO: 3784873 - RNA, 18 nt, Human
agccccugccccagccca

SEQ ID NO: 3784874 - RNA, 16 nt, Human
agccccugggcccagu

SEQ ID NO: 3784875 - RNA, 19 nt, Human
agccacuugccugugcuac

SEQ ID NO: 3784876 - RNA, 23 nt, Human
agccacuuucaaucuucaauccu

SEQ ID NO: 3784877 - RNA, 20 nt, Human
agccagaaccccgagcccua

SEQ ID NO: 3784878 - RNA, 14 nt, Human
agccagaaccugga

SEQ ID NO: 3784879 - RNA, 21 nt, Human
agccagaacguggcucugcug

SEQ ID NO: 3784880 - RNA, 22 nt, Human
agccagaagccacccaaagcag

SEQ ID NO: 3784881 - RNA, 14 nt, Human
agccagaagcugag

SEQ ID NO: 3784882 - RNA, 20 nt, Human
agccagaagcugagcaccag

SEQ ID NO: 3784883 - RNA, 19 nt, Human
agccagaaucagcacagau

SEQ ID NO: 3784884 - RNA, 19 nt, Human
agccagacacucugcucug

SEQ ID NO: 3784885 - RNA, 19 nt, Human
agccagaccuauuccuccu

SEQ ID NO: 3784886 - RNA, 18 nt, Human
agccagacucuggucuuc

SEQ ID NO: 3784887 - RNA, 19 nt, Human
agccagacuggcacaguuu

SEQ ID NO: 3784888 - RNA, 11 nt, Human
agccagagaag

SEQ ID NO: 3784889 - RNA, 14 nt, Human
agccagaggacugu

SEQ ID NO: 3784890 - RNA, 17 nt, Human
agccagaggacugugau

SEQ ID NO: 3784891 - RNA, 13 nt, Human
agccagaggagag

SEQ ID NO: 3784892 - RNA, 18 nt, Human
agccagaggagagaggac

SEQ ID NO: 3784893 - RNA, 20 nt, Human
agccagaggagagaggaccc

SEQ ID NO: 3784894 - RNA, 14 nt, Human
agccagaggcuggg

SEQ ID NO: 3784895 - RNA, 13 nt, Human
agccagaggucug

SEQ ID NO: 3784896 - RNA, 15 nt, Human
agccagauccucuug

SEQ ID NO: 3784897 - RNA, 17 nt, Human
agccagauccucuuggu

SEQ ID NO: 3784898 - RNA, 15 nt, Human
agccagcacacaggg

SEQ ID NO: 3784899 - RNA, 13 nt, Human
agccagcaccugg

SEQ ID NO: 3784900 - RNA, 18 nt, Human
agccagcaccuguaagaa

SEQ ID NO: 3784901 - RNA, 20 nt, Human
agccagcacuuguccagcug

SEQ ID NO: 3784902 - RNA, 14 nt, Human
agccagcagacauu

SEQ ID NO: 3784903 - RNA, 15 nt, Human
agccagcagacauug

SEQ ID NO: 3784904 - RNA, 14 nt, Human
agccagcagccagc

SEQ ID NO: 3784905 - RNA, 20 nt, Human
agccagcagccagcucucag

SEQ ID NO: 3784906 - RNA, 14 nt, Human
agccagcaggcucu

SEQ ID NO: 3784907 - RNA, 17 nt, Human
agccagcaggcucucag

SEQ ID NO: 3784908 - RNA, 19 nt, Human
agccagcaggcucucaggc

SEQ ID NO: 3784909 - RNA, 22 nt, Human
agccagcaggcucucaggccag

SEQ ID NO: 3784910 - RNA, 15 nt, Human
agccagcaguucaga

SEQ ID NO: 3784911 - RNA, 21 nt, Human
agccagcaguucagagcugcc

SEQ ID NO: 3784912 - RNA, 22 nt, Human
agccagcaguucagagcugccc

SEQ ID NO: 3784913 - RNA, 14 nt, Human
agccagcaucggaa

SEQ ID NO: 3784914 - RNA, 19 nt, Human
agccagccaagcuuuaaau

SEQ ID NO: 3784915 - RNA, 14 nt, Human
agccagccacucua

SEQ ID NO: 3784916 - RNA, 14 nt, Human
agccagcccagccc

SEQ ID NO: 3784917 - RNA, 15 nt, Human
agccagcccagccca

SEQ ID NO: 3784918 - RNA, 16 nt, Human
agccagcccagcccag

SEQ ID NO: 3784919 - RNA, 17 nt, Human
agccagcccagcccagc

SEQ ID NO: 3784920 - RNA, 12 nt, Human
agccagcccucc

SEQ ID NO: 3784921 - RNA, 13 nt, Human
agccagcccuccc

SEQ ID NO: 3784922 - RNA, 22 nt, Human
agccagcccucccuguccuccu

SEQ ID NO: 3784923 - RNA, 17 nt, Human
agccagcccugccugga

SEQ ID NO: 3784924 - RNA, 20 nt, Human
agccagcccugccuggagga

SEQ ID NO: 3784925 - RNA, 21 nt, Human
agccagcccugccuggaggac

SEQ ID NO: 3784926 - RNA, 19 nt, Human
agccagccgagcaggaggc

SEQ ID NO: 3784927 - RNA, 19 nt, Human
agccagccggggcgagugg

SEQ ID NO: 3784928 - RNA, 18 nt, Human
agccagccucgcccaucc

SEQ ID NO: 3784929 - RNA, 14 nt, Human
agccagccugaccu

SEQ ID NO: 3784930 - RNA, 15 nt, Human
agccagccugaccuu

SEQ ID NO: 3784931 - RNA, 23 nt, Human
agccagccugaccuuccuuccug

SEQ ID NO: 3784932 - RNA, 12 nt, Human
agccagcgccuc

SEQ ID NO: 3784933 - RNA, 15 nt, Human
agccagcgccucccu

SEQ ID NO: 3784934 - RNA, 16 nt, Human
agccagcgccucccuc

SEQ ID NO: 3784935 - RNA, 22 nt, Human
agccagcgccucccuccacccc

SEQ ID NO: 3784936 - RNA, 22 nt, Human
agccagcgggaauggcagcugc

SEQ ID NO: 3784937 - RNA, 18 nt, Human
agccagcguccuccucug

SEQ ID NO: 3784938 - RNA, 15 nt, Human
agccagcucacagug

SEQ ID NO: 3784939 - RNA, 21 nt, Human
agccagcucacagugcugugu

SEQ ID NO: 3784940 - RNA, 19 nt, Human
agccagcucccucuauuua

SEQ ID NO: 3784941 - RNA, 20 nt, Human
agccagcugcagcugggcug

SEQ ID NO: 3784942 - RNA, 11 nt, Human
agccagcugcc

SEQ ID NO: 3784943 - RNA, 20 nt, Human
agccagcugcccccagagcc

SEQ ID NO: 3784944 - RNA, 13 nt, Human
agccagcuuuccc

SEQ ID NO: 3784945 - RNA, 14 nt, Human
agccagcuuucccu

SEQ ID NO: 3784946 - RNA, 17 nt, Human
agccaggaauuucccag

SEQ ID NO: 3784947 - RNA, 22 nt, Human
agccaggaauuucccaggaccc

SEQ ID NO: 3784948 - RNA, 16 nt, Human
agccaggaggccugcu

SEQ ID NO: 3784949 - RNA, 23 nt, Human
agccaggaucaugguguaauaag

SEQ ID NO: 3784950 - RNA, 23 nt, Human
agccaggcacacacugugcuuuc

SEQ ID NO: 3784951 - RNA, 13 nt, Human
agccaggcccagc

SEQ ID NO: 3784952 - RNA, 14 nt, Human
agccaggccccagg

SEQ ID NO: 3784953 - RNA, 12 nt, Human
agccaggccugg

SEQ ID NO: 3784954 - RNA, 23 nt, Human
agccaggcgcuagcacagcuccc

SEQ ID NO: 3784955 - RNA, 18 nt, Human
agccaggcucaggccaug

SEQ ID NO: 3784956 - RNA, 20 nt, Human
agccaggcugccaaggccag

SEQ ID NO: 3784957 - RNA, 16 nt, Human
agccagggaaagacug

SEQ ID NO: 3784958 - RNA, 16 nt, Human
agccagggagagccca

SEQ ID NO: 3784959 - RNA, 17 nt, Human
agccagggagagcccag

SEQ ID NO: 3784960 - RNA, 22 nt, Human
agccagggagagcccaggagcu

SEQ ID NO: 3784961 - RNA, 20 nt, Human
agccagggauggggccacag

SEQ ID NO: 3784962 - RNA, 21 nt, Human
agccagggauggggccacagc

SEQ ID NO: 3784963 - RNA, 11 nt, Human
agccagggcca

SEQ ID NO: 3784964 - RNA, 21 nt, Human
agccagggcugcuagacggag

SEQ ID NO: 3784965 - RNA, 14 nt, Human
agccagggcuggag

SEQ ID NO: 3784966 - RNA, 16 nt, Human
agccagggcuggagaa

SEQ ID NO: 3784967 - RNA, 18 nt, Human
agccaggggagcagaggg

SEQ ID NO: 3784968 - RNA, 22 nt, Human
agccagggggacuagccccugu

SEQ ID NO: 3784969 - RNA, 12 nt, Human
agccagggucuc

SEQ ID NO: 3784970 - RNA, 16 nt, Human
agccagggucuccaga

SEQ ID NO: 3784971 - RNA, 21 nt, Human
agccagggucucucccucagg

SEQ ID NO: 3784972 - RNA, 21 nt, Human
agccaggguguggcccugcca

SEQ ID NO: 3784973 - RNA, 19 nt, Human
agccagguauggcucugca

SEQ ID NO: 3784974 - RNA, 15 nt, Human
agccaggucccccug

SEQ ID NO: 3784975 - RNA, 16 nt, Human
agccaggucccccugc

SEQ ID NO: 3784976 - RNA, 16 nt, Human
agccaggugccuugga

SEQ ID NO: 3784977 - RNA, 16 nt, Human
agccaguaaacagagg

SEQ ID NO: 3784978 - RNA, 18 nt, Human
agccaguaaacagaggag

SEQ ID NO: 3784979 - RNA, 14 nt, Human
agccaguaauccug

SEQ ID NO: 3784980 - RNA, 15 nt, Human
agccaguaauccugu

SEQ ID NO: 3784981 - RNA, 13 nt, Human
agccagucuuuac

SEQ ID NO: 3784982 - RNA, 18 nt, Human
agccagugaccugaggaa

SEQ ID NO: 3784983 - RNA, 21 nt, Human
agccagugaccugaggaagcg

SEQ ID NO: 3784984 - RNA, 15 nt, Human
agccagugacuccag

SEQ ID NO: 3784985 - RNA, 15 nt, Human
agccagugcccugag

SEQ ID NO: 3784986 - RNA, 17 nt, Human
agccaguucaguaccug

SEQ ID NO: 3784987 - RNA, 22 nt, Human
agccaguucaguaccuggagga

SEQ ID NO: 3784988 - RNA, 13 nt, Human
agccauaaaugau

SEQ ID NO: 3784989 - RNA, 17 nt, Human
agccauacauaaaagaa

SEQ ID NO: 3784990 - RNA, 18 nt, Human
agccauacauaaaagaaa

SEQ ID NO: 3784991 - RNA, 21 nt, Human
agccauacauaaaagaaauaa

SEQ ID NO: 3784992 - RNA, 21 nt, Human
agccauauuuguaaaaugaca

SEQ ID NO: 3784993 - RNA, 13 nt, Human
agccaucaaaaug

SEQ ID NO: 3784994 - RNA, 15 nt, Human
agccaucaccucaga

SEQ ID NO: 3784995 - RNA, 19 nt, Human
agccaucaccucagauggc

SEQ ID NO: 3784996 - RNA, 22 nt, Human
agccaucaccucagauggcagc

SEQ ID NO: 3784997 - RNA, 18 nt, Human
agccaucccagccuuggc

SEQ ID NO: 3784998 - RNA, 19 nt, Human
agccaucccagccuuggca

SEQ ID NO: 3784999 - RNA, 22 nt, Human
agccaucuccaucuugaaggaa

SEQ ID NO: 3785000 - RNA, 14 nt, Human
agccaucugcccag

SEQ ID NO: 3785001 - RNA, 20 nt, Human
agccaugacuugagaaacaa

SEQ ID NO: 3785002 - RNA, 18 nt, Human
agccaugaggaguugcug

SEQ ID NO: 3785003 - RNA, 20 nt, Human
agccaugaggaguugcuguu

SEQ ID NO: 3785004 - RNA, 23 nt, Human
agccaugaguuccagaaaguaaa

SEQ ID NO: 3785005 - RNA, 17 nt, Human
agccaugccagcuggcc

SEQ ID NO: 3785006 - RNA, 21 nt, Human
agccaugccgucugccggacc

SEQ ID NO: 3785007 - RNA, 23 nt, Human
agccaugcgcccccuccgcccug

SEQ ID NO: 3785008 - RNA, 20 nt, Human
agccauggagauucucauaa

SEQ ID NO: 3785009 - RNA, 22 nt, Human
agccauggagauucucauaacu

SEQ ID NO: 3785010 - RNA, 12 nt, Human
agccaugggacc

SEQ ID NO: 3785011 - RNA, 13 nt, Human
agccauguacaga

SEQ ID NO: 3785012 - RNA, 15 nt, Human
agccauguauaaaug

SEQ ID NO: 3785013 - RNA, 18 nt, Human
agccauguauaaauguga

SEQ ID NO: 3785014 - RNA, 14 nt, Human
agccaugucugcau

SEQ ID NO: 3785015 - RNA, 21 nt, Human
agccaugucuucucccuggaa

SEQ ID NO: 3785016 - RNA, 23 nt, Human
agccaugugcugcgugccugugg

SEQ ID NO: 3785017 - RNA, 20 nt, Human
agccauguuuaagauuuaau

SEQ ID NO: 3785018 - RNA, 17 nt, Human
agccauuaaaugaauau

SEQ ID NO: 3785019 - RNA, 18 nt, Human
agccauuaccauggagac

SEQ ID NO: 3785020 - RNA, 14 nt, Human
agccauucacugcc

SEQ ID NO: 3785021 - RNA, 23 nt, Human
agccauuccugguacccagccau

SEQ ID NO: 3785022 - RNA, 16 nt, Human
agccauugcacccagc

SEQ ID NO: 3785023 - RNA, 15 nt, Human
agccauuuuuacugu

SEQ ID NO: 3785024 - RNA, 21 nt, Human
acuuaaagggcccaaugaauu

SEQ ID NO: 3785025 - RNA, 17 nt, Human
acuuaaauaaugugaaa

SEQ ID NO: 3785026 - RNA, 20 nt, Human
acuuaaauaaugugaaacug

SEQ ID NO: 3785027 - RNA, 16 nt, Human
acuuaaauaguauuuc

SEQ ID NO: 3785028 - RNA, 19 nt, Human
acuuaaaugguaauaagca

SEQ ID NO: 3785029 - RNA, 15 nt, Human
acuuaaauguuauua

SEQ ID NO: 3785030 - RNA, 17 nt, Human
acuuaaauuuuaauuua

SEQ ID NO: 3785031 - RNA, 20 nt, Human
acuuaacaagcucccaggcc

SEQ ID NO: 3785032 - RNA, 14 nt, Human
acuuaacagaugca

SEQ ID NO: 3785033 - RNA, 17 nt, Human
acuuaacggaccaaagc

SEQ ID NO: 3785034 - RNA, 23 nt, Human
acuuaacuauucaggagaguaga

SEQ ID NO: 3785035 - RNA, 14 nt, Human
acuuaacuguuuca

SEQ ID NO: 3785036 - RNA, 14 nt, Human
acuuaagagaaaug

SEQ ID NO: 3785037 - RNA, 15 nt, Human
acuuaagagaauauu

SEQ ID NO: 3785038 - RNA, 18 nt, Human
acuuaagagaauauuuua

SEQ ID NO: 3785039 - RNA, 15 nt, Human
acuuaagcaaaagaa

SEQ ID NO: 3785040 - RNA, 15 nt, Human
acuuaagcacaagca

SEQ ID NO: 3785041 - RNA, 17 nt, Human
acuuaagcauuuaggaa

SEQ ID NO: 3785042 - RNA, 21 nt, Human
acuuaagcccagugcacugaa

SEQ ID NO: 3785043 - RNA, 19 nt, Human
acuuaaguugguccuuuac

SEQ ID NO: 3785044 - RNA, 13 nt, Human
acuuaauaaauuc

SEQ ID NO: 3785045 - RNA, 18 nt, Human
acuuaauaacuguguacu

SEQ ID NO: 3785046 - RNA, 19 nt, Human
acuuaauaaucaagagccu

SEQ ID NO: 3785047 - RNA, 13 nt, Human
acuuaauaaugug

SEQ ID NO: 3785048 - RNA, 19 nt, Human
acuuaauacuaccuugaaa

SEQ ID NO: 3785049 - RNA, 19 nt, Human
acuuaauacucaaaugagu

SEQ ID NO: 3785050 - RNA, 15 nt, Human
acuuaauagaaacau

SEQ ID NO: 3785051 - RNA, 23 nt, Human
acuuaauaucuucauuucuaaau

SEQ ID NO: 3785052 - RNA, 19 nt, Human
acuuaaucaauuaauuuuu

SEQ ID NO: 3785053 - RNA, 19 nt, Human
acuuaaucuaaauggaacc

SEQ ID NO: 3785054 - RNA, 15 nt, Human
acuuaaugaaaacaa

SEQ ID NO: 3785055 - RNA, 19 nt, Human
acuuaaugagacuuuaaaa

SEQ ID NO: 3785056 - RNA, 15 nt, Human
acuuaauguauguua

SEQ ID NO: 3785057 - RNA, 16 nt, Human
acuuacacuuuaugca

SEQ ID NO: 3785058 - RNA, 19 nt, Human
acuuacaugauucauuuua

SEQ ID NO: 3785059 - RNA, 23 nt, Human
acuuacauuguucaauuagaaua

SEQ ID NO: 3785060 - RNA, 19 nt, Human
acuuacauuuacaaacuga

SEQ ID NO: 3785061 - RNA, 23 nt, Human
acuuacccaggugggucccggcu

SEQ ID NO: 3785062 - RNA, 17 nt, Human
agcccgggcucugccuc

SEQ ID NO: 3785063 - RNA, 12 nt, Human
agcccgggcugc

SEQ ID NO: 3785064 - RNA, 15 nt, Human
agcccgggcugccug

SEQ ID NO: 3785065 - RNA, 18 nt, Human
agcccgggcugccugggc

SEQ ID NO: 3785066 - RNA, 16 nt, Human
agcccgguaagagcaa

SEQ ID NO: 3785067 - RNA, 14 nt, Human
agcccgucucagug

SEQ ID NO: 3785068 - RNA, 15 nt, Human
agcccgucucagugu

SEQ ID NO: 3785069 - RNA, 15 nt, Human
agcccguguggcccc

SEQ ID NO: 3785070 - RNA, 19 nt, Human
agcccguguggccccuuca

SEQ ID NO: 3785071 - RNA, 13 nt, Human
agcccuaaacauc

SEQ ID NO: 3785072 - RNA, 14 nt, Human
agcccuaaacauca

SEQ ID NO: 3785073 - RNA, 19 nt, Human
agcccuaaaucuagacuca

SEQ ID NO: 3785074 - RNA, 17 nt, Human
agcccuaaccccuucca

SEQ ID NO: 3785075 - RNA, 19 nt, Human
agcccuaagguccuaaggc

SEQ ID NO: 3785076 - RNA, 15 nt, Human
agcccuacucccugc

SEQ ID NO: 3785077 - RNA, 14 nt, Human
agcccuagagccug

SEQ ID NO: 3785078 - RNA, 20 nt, Human
agcccuagagccugccugga

SEQ ID NO: 3785079 - RNA, 14 nt, Human
agcccuauggaugu

SEQ ID NO: 3785080 - RNA, 16 nt, Human
agcccuauuucuugau

SEQ ID NO: 3785081 - RNA, 15 nt, Human
agcccucagaacccu

SEQ ID NO: 3785082 - RNA, 18 nt, Human
agcccucagaacccuugg

SEQ ID NO: 3785083 - RNA, 19 nt, Human
agcccucagaacccuuggc

SEQ ID NO: 3785084 - RNA, 15 nt, Human
agcccuccaaaagca

SEQ ID NO: 3785085 - RNA, 12 nt, Human
agcccucccacu

SEQ ID NO: 3785086 - RNA, 22 nt, Human
agcccucccacuuugcuguucc

SEQ ID NO: 3785087 - RNA, 15 nt, Human
agcccuccccaggaa

SEQ ID NO: 3785088 - RNA, 20 nt, Human
agcccuccccauggagccag

SEQ ID NO: 3785089 - RNA, 16 nt, Human
agcccucccugccccu

SEQ ID NO: 3785090 - RNA, 17 nt, Human
agcccucccugccccuc

SEQ ID NO: 3785091 - RNA, 23 nt, Human
agcccucccugccccucccuuca

SEQ ID NO: 3785092 - RNA, 15 nt, Human
agcccucccuguccu

SEQ ID NO: 3785093 - RNA, 20 nt, Human
agcccucccuguccuccucg

SEQ ID NO: 3785094 - RNA, 16 nt, Human
agcccuccgccuucac

SEQ ID NO: 3785095 - RNA, 14 nt, Human
agcccuccucaccc

SEQ ID NO: 3785096 - RNA, 17 nt, Human
agcccuccucugcacuc

SEQ ID NO: 3785097 - RNA, 12 nt, Human
agcccuccuucc

SEQ ID NO: 3785098 - RNA, 16 nt, Human
agcccucucacugugu

SEQ ID NO: 3785099 - RNA, 11 nt, Human
agcccucuucc

SEQ ID NO: 3785100 - RNA, 12 nt, Human
agcccucuucca

SEQ ID NO: 3785101 - RNA, 16 nt, Human
agcccucuuccaucau

SEQ ID NO: 3785102 - RNA, 23 nt, Human
agcccucuuccaucaugucccca

SEQ ID NO: 3785103 - RNA, 17 nt, Human
agcccugacuggugcua

SEQ ID NO: 3785104 - RNA, 18 nt, Human
agcccugagaaagcccug

SEQ ID NO: 3785105 - RNA, 19 nt, Human
agcccugaggacagaugcc

SEQ ID NO: 3785106 - RNA, 22 nt, Human
agcccugaggacagaugccucc

SEQ ID NO: 3785107 - RNA, 21 nt, Human
agcccugaggugaaagggagc

SEQ ID NO: 3785108 - RNA, 23 nt, Human
agcccugaguuucaaguauccuu

SEQ ID NO: 3785109 - RNA, 23 nt, Human
agcccugauguguccucagggag

SEQ ID NO: 3785110 - RNA, 12 nt, Human
agcccugcacca

SEQ ID NO: 3785111 - RNA, 13 nt, Human
agcccugcaccau

SEQ ID NO: 3785112 - RNA, 14 nt, Human
agcccugcaccaug

SEQ ID NO: 3785113 - RNA, 22 nt, Human
agcccugcaccaugcugcuggg

SEQ ID NO: 3785114 - RNA, 16 nt, Human
agcccugcauuuucau

SEQ ID NO: 3785115 - RNA, 12 nt, Human
agcccugcccca

SEQ ID NO: 3785116 - RNA, 20 nt, Human
agcccugccccacaccuccu

SEQ ID NO: 3785117 - RNA, 13 nt, Human
agcccugccucuc

SEQ ID NO: 3785118 - RNA, 15 nt, Human
agcccugccucuccg

SEQ ID NO: 3785119 - RNA, 14 nt, Human
agcccugccuggag

SEQ ID NO: 3785120 - RNA, 17 nt, Human
agcccugccuggaggac

SEQ ID NO: 3785121 - RNA, 20 nt, Human
agcccugccuggaggaccug

SEQ ID NO: 3785122 - RNA, 12 nt, Human
agcccugcuccc

SEQ ID NO: 3785123 - RNA, 19 nt, Human
agcccugcugcugccugcc

SEQ ID NO: 3785124 - RNA, 22 nt, Human
agcccugcuuugggcugcccug

SEQ ID NO: 3785125 - RNA, 23 nt, Human
agcccugcuuugggcugcccugg

SEQ ID NO: 3785126 - RNA, 18 nt, Human
agcccuggagccaacugc

SEQ ID NO: 3785127 - RNA, 22 nt, Human
agcccuggagccaacugcugcu

SEQ ID NO: 3785128 - RNA, 11 nt, Human
agcccuggagg

SEQ ID NO: 3785129 - RNA, 15 nt, Human
agcccuggaggugcc

SEQ ID NO: 3785130 - RNA, 22 nt, Human
agcccuggaggugccagcaaag

SEQ ID NO: 3785131 - RNA, 23 nt, Human
agcccuggauuucagaaagagca

SEQ ID NO: 3785132 - RNA, 11 nt, Human
agcccuggcag

SEQ ID NO: 3785133 - RNA, 17 nt, Human
agcccuggcaggaugac

SEQ ID NO: 3785134 - RNA, 11 nt, Human
agcccuggccc

SEQ ID NO: 3785135 - RNA, 15 nt, Human
agcccuggcccccug

SEQ ID NO: 3785136 - RNA, 12 nt, Human
agcccuggcuga

SEQ ID NO: 3785137 - RNA, 16 nt, Human
agcccuggcugaagga

SEQ ID NO: 3785138 - RNA, 18 nt, Human
agcccuggcugaaggacu

SEQ ID NO: 3785139 - RNA, 20 nt, Human
agcccuggcugaaggacugu

SEQ ID NO: 3785140 - RNA, 12 nt, Human
agcccuggcugu

SEQ ID NO: 3785141 - RNA, 20 nt, Human
agcccugggaccgcuacacc

SEQ ID NO: 3785142 - RNA, 17 nt, Human
agcccugggaggcucug

SEQ ID NO: 3785143 - RNA, 18 nt, Human
agcccugggaggcucugg

SEQ ID NO: 3785144 - RNA, 20 nt, Human
agcccugggaggcucuggag

SEQ ID NO: 3785145 - RNA, 16 nt, Human
agcccugggaucacug

SEQ ID NO: 3785146 - RNA, 23 nt, Human
agcccugggccccaccaccuagg

SEQ ID NO: 3785147 - RNA, 12 nt, Human
agcccuggggcu

SEQ ID NO: 3785148 - RNA, 23 nt, Human
agcccugguggcagugggagcug

SEQ ID NO: 3785149 - RNA, 20 nt, Human
agcccugucagugcagcccg

SEQ ID NO: 3785150 - RNA, 17 nt, Human
agcccuguccugguggu

SEQ ID NO: 3785151 - RNA, 20 nt, Human
agcccuguugacacaggucu

SEQ ID NO: 3785152 - RNA, 14 nt, Human
agcccuucauuugg

SEQ ID NO: 3785153 - RNA, 12 nt, Human
agcccuuccucu

SEQ ID NO: 3785154 - RNA, 21 nt, Human
agcccuuccucugcucccccu

SEQ ID NO: 3785155 - RNA, 23 nt, Human
agcccuucuaccuuccugcaaca

SEQ ID NO: 3785156 - RNA, 19 nt, Human
agcccuucuauacccaccc

SEQ ID NO: 3785157 - RNA, 23 nt, Human
agcccuucuauacccacccagaa

SEQ ID NO: 3785158 - RNA, 17 nt, Human
agcccuucuuuccacag

SEQ ID NO: 3785159 - RNA, 18 nt, Human
agcccuucuuuccacaga

SEQ ID NO: 3785160 - RNA, 16 nt, Human
agcccuugaagauauc

SEQ ID NO: 3785161 - RNA, 22 nt, Human
agcccuugcccaugcugggcuc

SEQ ID NO: 3785162 - RNA, 12 nt, Human
agcccuugccuc

SEQ ID NO: 3785163 - RNA, 23 nt, Human
agcccuuggggguccuccuccag

SEQ ID NO: 3785164 - RNA, 12 nt, Human
agcccuuggguu

SEQ ID NO: 3785165 - RNA, 21 nt, Human
agcccuugugaaucaaggguc

SEQ ID NO: 3785166 - RNA, 15 nt, Human
agcccuuuccaagcu

SEQ ID NO: 3785167 - RNA, 14 nt, Human
agcccuuuugucuc

SEQ ID NO: 3785168 - RNA, 16 nt, Human
agccgaauagcugaug

SEQ ID NO: 3785169 - RNA, 22 nt, Human
agccgacaacuauuucggccuu

SEQ ID NO: 3785170 - RNA, 13 nt, Human
agccgacccccuc

SEQ ID NO: 3785171 - RNA, 20 nt, Human
agccgacccccucucccugc

SEQ ID NO: 3785172 - RNA, 12 nt, Human
agccgaccucag

SEQ ID NO: 3785173 - RNA, 19 nt, Human
agccgacucuggcccuggc

SEQ ID NO: 3785174 - RNA, 15 nt, Human
agccgagagccugcu

SEQ ID NO: 3785175 - RNA, 21 nt, Human
agccgagagccugcuccccca

SEQ ID NO: 3785176 - RNA, 18 nt, Human
agccgagaucacgccacu

SEQ ID NO: 3785177 - RNA, 21 nt, Human
agccgagccgggccuggggcu

SEQ ID NO: 3785178 - RNA, 18 nt, Human
agccgauucaccugagca

SEQ ID NO: 3785179 - RNA, 14 nt, Human
agccgcagccuccc

SEQ ID NO: 3785180 - RNA, 16 nt, Human
agccgcaucccagacu

SEQ ID NO: 3785181 - RNA, 16 nt, Human
agccauuuuucaaagc

SEQ ID NO: 3785182 - RNA, 19 nt, Human
agcccaaaccaccagaagc

SEQ ID NO: 3785183 - RNA, 22 nt, Human
agcccaaaccaccagaagccca

SEQ ID NO: 3785184 - RNA, 14 nt, Human
agcccaaagaagga

SEQ ID NO: 3785185 - RNA, 16 nt, Human
agcccaaagcuguugg

SEQ ID NO: 3785186 - RNA, 20 nt, Human
agcccaaaggggacaggccu

SEQ ID NO: 3785187 - RNA, 20 nt, Human
agcccaaagugguauagaaa

SEQ ID NO: 3785188 - RNA, 23 nt, Human
agcccaaagugguauagaaaugc

SEQ ID NO: 3785189 - RNA, 11 nt, Human
agcccaaccuc

SEQ ID NO: 3785190 - RNA, 23 nt, Human
agcccaaccucuuccuccugaca

SEQ ID NO: 3785191 - RNA, 19 nt, Human
agcccaagcuucccuccau

SEQ ID NO: 3785192 - RNA, 22 nt, Human
agcccaagguuuaaacuucucu

SEQ ID NO: 3785193 - RNA, 14 nt, Human
agcccaaguccaaa

SEQ ID NO: 3785194 - RNA, 17 nt, Human
agcccaaguccaaaugu

SEQ ID NO: 3785195 - RNA, 16 nt, Human
agcccaaugaaaugaa

SEQ ID NO: 3785196 - RNA, 23 nt, Human
agcccacacuugagaggaugaau

SEQ ID NO: 3785197 - RNA, 21 nt, Human
agcccaccauuuggcaucccu

SEQ ID NO: 3785198 - RNA, 14 nt, Human
agcccaccccccuc

SEQ ID NO: 3785199 - RNA, 14 nt, Human
agcccacccuccug

SEQ ID NO: 3785200 - RNA, 19 nt, Human
agcccacccuccugucuuc

SEQ ID NO: 3785201 - RNA, 21 nt, Human
agcccacccuccugucuuccc

SEQ ID NO: 3785202 - RNA, 13 nt, Human
agcccacccugcu

SEQ ID NO: 3785203 - RNA, 19 nt, Human
agcccacgacacugcagcc

SEQ ID NO: 3785204 - RNA, 14 nt, Human
agcccacgccccca

SEQ ID NO: 3785205 - RNA, 23 nt, Human
agcccacgcccccacuggugaca

SEQ ID NO: 3785206 - RNA, 20 nt, Human
agcccacgcugacuacaggg

SEQ ID NO: 3785207 - RNA, 20 nt, Human
agccuccccugccagggcag

SEQ ID NO: 3785208 - RNA, 20 nt, Human
agccucccgaauagcuggga

SEQ ID NO: 3785209 - RNA, 19 nt, Human
agccucccgaguagcuggg

SEQ ID NO: 3785210 - RNA, 20 nt, Human
agccucccgaguagcuggga

SEQ ID NO: 3785211 - RNA, 19 nt, Human
agccucccgaguagggagg

SEQ ID NO: 3785212 - RNA, 23 nt, Human
agccucccuauuuuuuuucuguu

SEQ ID NO: 3785213 - RNA, 21 nt, Human
agccucccucugaccugcagg

SEQ ID NO: 3785214 - RNA, 22 nt, Human
agccucccucugaccugcaggc

SEQ ID NO: 3785215 - RNA, 13 nt, Human
agccucccugaag

SEQ ID NO: 3785216 - RNA, 18 nt, Human
agccucccugucggccug

SEQ ID NO: 3785217 - RNA, 14 nt, Human
agccuccgagaggg

SEQ ID NO: 3785218 - RNA, 18 nt, Human
agccuccgagagggagag

SEQ ID NO: 3785219 - RNA, 16 nt, Human
agccuccgcuucccug

SEQ ID NO: 3785220 - RNA, 17 nt, Human
agccuccguauuucaga

SEQ ID NO: 3785221 - RNA, 12 nt, Human
agccuccuccug

SEQ ID NO: 3785222 - RNA, 19 nt, Human
agccuccuccugaccacgg

SEQ ID NO: 3785223 - RNA, 11 nt, Human
agccuccucug

SEQ ID NO: 3785224 - RNA, 18 nt, Human
agccuccucuggacggca

SEQ ID NO: 3785225 - RNA, 13 nt, Human
agcggcuggcagc

SEQ ID NO: 3785226 - RNA, 23 nt, Human
agcggcuggcagcccaccccuca

SEQ ID NO: 3785227 - RNA, 19 nt, Human
agcggcuggugcagggccu

SEQ ID NO: 3785228 - RNA, 20 nt, Human
agcgggaauggcagcugcca

SEQ ID NO: 3785229 - RNA, 19 nt, Human
agcgggcagguucugccug

SEQ ID NO: 3785230 - RNA, 15 nt, Human
agcggggacagcucc

SEQ ID NO: 3785231 - RNA, 20 nt, Human
agcggggacagcuccuucug

SEQ ID NO: 3785232 - RNA, 21 nt, Human
agcggggccccagggcuaccc

SEQ ID NO: 3785233 - RNA, 19 nt, Human
agcggggcgaagcccaggc

SEQ ID NO: 3785234 - RNA, 14 nt, Human
agcgggggaggccc

SEQ ID NO: 3785235 - RNA, 13 nt, Human
agcggucucaggc

SEQ ID NO: 3785236 - RNA, 22 nt, Human
agcggugcuguccucagguggc

SEQ ID NO: 3785237 - RNA, 12 nt, Human
agcgguggcccu

SEQ ID NO: 3785238 - RNA, 20 nt, Human
agcggugggggaggaggguu

SEQ ID NO: 3785239 - RNA, 14 nt, Human
agcggugucucucc

SEQ ID NO: 3785240 - RNA, 20 nt, Human
agcggugucucuccugcccc

SEQ ID NO: 3785241 - RNA, 15 nt, Human
agcguagugcagcag

SEQ ID NO: 3785242 - RNA, 15 nt, Human
agcgucagcugcucc

SEQ ID NO: 3785243 - RNA, 15 nt, Human
agcguccagaaaugg

SEQ ID NO: 3785244 - RNA, 19 nt, Human
agcgucccagucucuggca

SEQ ID NO: 3785245 - RNA, 17 nt, Human
agcgucccuagcaguga

SEQ ID NO: 3785246 - RNA, 13 nt, Human
agcgucccuggcg

SEQ ID NO: 3785247 - RNA, 17 nt, Human
agcguccuccucuguga

SEQ ID NO: 3785248 - RNA, 19 nt, Human
agcgugaagccagggcccg

SEQ ID NO: 3785249 - RNA, 22 nt, Human
agcgugagacgccaccauuccu

SEQ ID NO: 3785250 - RNA, 22 nt, Human
agcgugagccacugcaccgggc

SEQ ID NO: 3785251 - RNA, 17 nt, Human
agcgugcuuuaaaaaau

SEQ ID NO: 3785252 - RNA, 18 nt, Human
agcguggccuuguucugu

SEQ ID NO: 3785253 - RNA, 22 nt, Human
agcguggccuuguucugucacc

SEQ ID NO: 3785254 - RNA, 18 nt, Human
agcguucuuguaauuuua

SEQ ID NO: 3785255 - RNA, 14 nt, Human
agcguuuugcaagg

SEQ ID NO: 3785256 - RNA, 11 nt, Human
agcguuuuuua

SEQ ID NO: 3785257 - RNA, 17 nt, Human
agcguuuuuuaaaugua

SEQ ID NO: 3785258 - RNA, 23 nt, Human
agcguuuuuuaaauguauacuau

SEQ ID NO: 3785259 - RNA, 15 nt, Human
agcuaaaaccugagc

SEQ ID NO: 3785260 - RNA, 16 nt, Human
agcuaaaaugauuuua

SEQ ID NO: 3785261 - RNA, 18 nt, Human
agcuaaaccaaggacuga

SEQ ID NO: 3785262 - RNA, 19 nt, Human
agcuaaaccaaggacugag

SEQ ID NO: 3785263 - RNA, 16 nt, Human
agcuaaagaaguuuga

SEQ ID NO: 3785264 - RNA, 20 nt, Human
agcuaaauaccucaaucagu

SEQ ID NO: 3785265 - RNA, 13 nt, Human
agcuaaauccuuu

SEQ ID NO: 3785266 - RNA, 16 nt, Human
agcuaacacuggcccc

SEQ ID NO: 3785267 - RNA, 17 nt, Human
agcuaacacuggccccu

SEQ ID NO: 3785268 - RNA, 18 nt, Human
agcuaacagggaaggcag

SEQ ID NO: 3785269 - RNA, 12 nt, Human
agcuaagaaccu

SEQ ID NO: 3785270 - RNA, 14 nt, Human
agcuaagaaccugg

SEQ ID NO: 3785271 - RNA, 17 nt, Human
agcuaagcuaggaauga

SEQ ID NO: 3785272 - RNA, 23 nt, Human
agcuaaggaggggaaaaaaaugu

SEQ ID NO: 3785273 - RNA, 10 nt, Human
agcuaaggcu

SEQ ID NO: 3785274 - RNA, 13 nt, Human
agcuaaggcucua

SEQ ID NO: 3785275 - RNA, 15 nt, Human
agcuaaggcucuaug

SEQ ID NO: 3785276 - RNA, 19 nt, Human
agcuaagguuuagauaaau

SEQ ID NO: 3785277 - RNA, 19 nt, Human
agcuaagugaaaaggucau

SEQ ID NO: 3785278 - RNA, 16 nt, Human
agcuaauaaaaagcuu

SEQ ID NO: 3785279 - RNA, 21 nt, Human
agcuaauaaaaagcuuuuguc

SEQ ID NO: 3785280 - RNA, 23 nt, Human
agcuaauaaaauaucauucagca

SEQ ID NO: 3785281 - RNA, 18 nt, Human
agcuaauaacaugugaaa

SEQ ID NO: 3785282 - RNA, 21 nt, Human
agcuaauaauguuaaccaagg

SEQ ID NO: 3785283 - RNA, 17 nt, Human
agcuaauggaaaaugau

SEQ ID NO: 3785284 - RNA, 12 nt, Human
agcuaauuauuu

SEQ ID NO: 3785285 - RNA, 21 nt, Human
agcuaauuauuuuaauuaggu

SEQ ID NO: 3785286 - RNA, 19 nt, Human
agcuaauucuuugaccugu

SEQ ID NO: 3785287 - RNA, 13 nt, Human
agcuaauuugcau

SEQ ID NO: 3785288 - RNA, 14 nt, Human
agcuaauuugcauu

SEQ ID NO: 3785289 - RNA, 16 nt, Human
agcuacaacagccuca

SEQ ID NO: 3785290 - RNA, 19 nt, Human
agcuacaacagccucacuu

SEQ ID NO: 3785291 - RNA, 13 nt, Human
agcuacagagaaa

SEQ ID NO: 3785292 - RNA, 16 nt, Human
agcuacagagaaacca

SEQ ID NO: 3785293 - RNA, 17 nt, Human
agcuacagagaaaccag

SEQ ID NO: 3785294 - RNA, 21 nt, Human
agcuacagagaaaccagcuuc

SEQ ID NO: 3785295 - RNA, 22 nt, Human
agcuacagcuuucuugcucccu

SEQ ID NO: 3785296 - RNA, 18 nt, Human
agcuacagguuacaacag

SEQ ID NO: 3785297 - RNA, 22 nt, Human
agcuacagguuacaacagauuu

SEQ ID NO: 3785298 - RNA, 14 nt, Human
agcuaccaugacaa

SEQ ID NO: 3785299 - RNA, 22 nt, Human
agcuacccaggaggcugaggug

SEQ ID NO: 3785300 - RNA, 19 nt, Human
agcuacccuuuuccuuugu

SEQ ID NO: 3785301 - RNA, 21 nt, Human
agcuacccuuuuccuuugugg

SEQ ID NO: 3785302 - RNA, 22 nt, Human
agcuacccuuuuccuuuguggu

SEQ ID NO: 3785303 - RNA, 22 nt, Human
agcuaccuguguggacaggacu

SEQ ID NO: 3785304 - RNA, 16 nt, Human
agcuacuaaugauguu

SEQ ID NO: 3785305 - RNA, 15 nt, Human
agcuacucgggaggc

SEQ ID NO: 3785306 - RNA, 23 nt, Human
agcuacugauuuccuuuggagcu

SEQ ID NO: 3785307 - RNA, 18 nt, Human
agcuacugccauccuggc

SEQ ID NO: 3785308 - RNA, 18 nt, Human
agcuacuggauucuuauu

SEQ ID NO: 3785309 - RNA, 20 nt, Human
agcuacugugugugugaaug

SEQ ID NO: 3785310 - RNA, 23 nt, Human
agcuacugugugugugaaugaac

SEQ ID NO: 3785311 - RNA, 21 nt, Human
agcuacuuaagagaaauggca

SEQ ID NO: 3785312 - RNA, 16 nt, Human
agcuacuuccuccucc

SEQ ID NO: 3785313 - RNA, 21 nt, Human
agcuacuuccuccuccccacu

SEQ ID NO: 3785314 - RNA, 14 nt, Human
agcuacuugggagg

SEQ ID NO: 3785315 - RNA, 14 nt, Human
agcuacuugguuug

SEQ ID NO: 3785316 - RNA, 17 nt, Human
agcuagaaaacauuuuu

SEQ ID NO: 3785317 - RNA, 15 nt, Human
agcuagaaauaugau

SEQ ID NO: 3785318 - RNA, 16 nt, Human
agcuagaaggccacau

SEQ ID NO: 3785319 - RNA, 18 nt, Human
agcuagacgagcaggcuu

SEQ ID NO: 3785320 - RNA, 16 nt, Human
agcuagacuggugacu

SEQ ID NO: 3785321 - RNA, 17 nt, Human
agcuagacuggugacug

SEQ ID NO: 3785322 - RNA, 20 nt, Human
agcuagaggaaccaaccccc

SEQ ID NO: 3785323 - RNA, 13 nt, Human
agcuagaugcuuu

SEQ ID NO: 3785324 - RNA, 12 nt, Human
agcuagccagag

SEQ ID NO: 3785325 - RNA, 19 nt, Human
agcuagccagaggacugug

SEQ ID NO: 3785326 - RNA, 21 nt, Human
agcuagcgcugccgcacccca

SEQ ID NO: 3785327 - RNA, 14 nt, Human
agcuagcuccccuc

SEQ ID NO: 3785328 - RNA, 18 nt, Human
agcuagcuccccuccucu

SEQ ID NO: 3785329 - RNA, 16 nt, Human
agcuagcuuuuaggaa

SEQ ID NO: 3785330 - RNA, 20 nt, Human
agcuagcuuuuaggaaaauc

SEQ ID NO: 3785331 - RNA, 12 nt, Human
agcuaggaauga

SEQ ID NO: 3785332 - RNA, 19 nt, Human
agcuaggagcaaagccugu

SEQ ID NO: 3785333 - RNA, 20 nt, Human
agcuaggagcaaagccuguu

SEQ ID NO: 3785334 - RNA, 20 nt, Human
agcuaggauuugaacacuug

SEQ ID NO: 3785335 - RNA, 13 nt, Human
agcuaggcagggu

SEQ ID NO: 3785336 - RNA, 16 nt, Human
agcuaggccuggccag

SEQ ID NO: 3785337 - RNA, 14 nt, Human
agcuaggugacaua

SEQ ID NO: 3785338 - RNA, 19 nt, Human
agcuaggugacauauacau

SEQ ID NO: 3785339 - RNA, 16 nt, Human
agcuagucuuuugcuu

SEQ ID NO: 3785340 - RNA, 19 nt, Human
agcuaguggcuucaaaaua

SEQ ID NO: 3785341 - RNA, 19 nt, Human
agcuaguugaauacuugaa

SEQ ID NO: 3785342 - RNA, 23 nt, Human
agcuaguugaauacuugaaccau

SEQ ID NO: 3785343 - RNA, 17 nt, Human
agcuauaccugugccuc

SEQ ID NO: 3785344 - RNA, 17 nt, Human
agcuauagacccgagga

SEQ ID NO: 3785345 - RNA, 19 nt, Human
agcuauagacccgaggaaa

SEQ ID NO: 3785346 - RNA, 17 nt, Human
agcuauauccauguacu

SEQ ID NO: 3785347 - RNA, 19 nt, Human
agcuauaucuauauauaau

SEQ ID NO: 3785348 - RNA, 23 nt, Human
agcuaucaagugugcuuuagcuu

SEQ ID NO: 3785349 - RNA, 18 nt, Human
agcuauccggacagagca

SEQ ID NO: 3785350 - RNA, 15 nt, Human
agcuauccuggcucu

SEQ ID NO: 3785351 - RNA, 18 nt, Human
agcuccucauccagggcu

SEQ ID NO: 3785352 - RNA, 19 nt, Human
agcuccucauccagggcuc

SEQ ID NO: 3785353 - RNA, 14 nt, Human
agcuccuccccugg

SEQ ID NO: 3785354 - RNA, 17 nt, Human
agcuccuccccuggagg

SEQ ID NO: 3785355 - RNA, 16 nt, Human
agcuccuccucggaac

SEQ ID NO: 3785356 - RNA, 17 nt, Human
agcuccucuccccagcc

SEQ ID NO: 3785357 - RNA, 18 nt, Human
agcuccucuccccagccc

SEQ ID NO: 3785358 - RNA, 20 nt, Human
agcuccucuccccagcccag

SEQ ID NO: 3785359 - RNA, 23 nt, Human
agcuccucuccccagcccagaga

SEQ ID NO: 3785360 - RNA, 18 nt, Human
agcuccucuccuggagga

SEQ ID NO: 3785361 - RNA, 12 nt, Human
agcuccucuggg

SEQ ID NO: 3785362 - RNA, 14 nt, Human
agcuccucugggca

SEQ ID NO: 3785363 - RNA, 15 nt, Human
agcuccucugggcag

SEQ ID NO: 3785364 - RNA, 17 nt, Human
agcuccucugggcagga

SEQ ID NO: 3785365 - RNA, 13 nt, Human
agcuccucuucca

SEQ ID NO: 3785366 - RNA, 13 nt, Human
agcuccucuuccu

SEQ ID NO: 3785367 - RNA, 14 nt, Human
agcuccugaccagu

SEQ ID NO: 3785368 - RNA, 16 nt, Human
agcuccugggaaggcu

SEQ ID NO: 3785369 - RNA, 22 nt, Human
agcuccuggggcguccaggccg

SEQ ID NO: 3785370 - RNA, 11 nt, Human
agcuccuguaa

SEQ ID NO: 3785371 - RNA, 17 nt, Human
agcuccuguccccugcu

SEQ ID NO: 3785372 - RNA, 20 nt, Human
agcuccuguccccugcuaca

SEQ ID NO: 3785373 - RNA, 14 nt, Human
agcuccuguccucc

SEQ ID NO: 3785374 - RNA, 15 nt, Human
agcuccuguccuccc

SEQ ID NO: 3785375 - RNA, 17 nt, Human
agcuccuguccucccau

SEQ ID NO: 3785376 - RNA, 22 nt, Human
agcuccuguggccccacccugg

SEQ ID NO: 3785377 - RNA, 16 nt, Human
agcuccuuaaggcucu

SEQ ID NO: 3785378 - RNA, 22 nt, Human
agcuccuuaaggcucuuuugua

SEQ ID NO: 3785379 - RNA, 19 nt, Human
agcuccuuccuagccuugc

SEQ ID NO: 3785380 - RNA, 19 nt, Human
agcuccuuccuggagacug

SEQ ID NO: 3785381 - RNA, 22 nt, Human
agcuccuugagggcaagagcca

SEQ ID NO: 3785382 - RNA, 16 nt, Human
acuuuguucuggcucu

SEQ ID NO: 3785383 - RNA, 20 nt, Human
acuuuguucuggcucuucca

SEQ ID NO: 3785384 - RNA, 15 nt, Human
acuuuguucuuuagg

SEQ ID NO: 3785385 - RNA, 20 nt, Human
acuuuguucuuuaggagauu

SEQ ID NO: 3785386 - RNA, 13 nt, Human
acuuuuaaacugu

SEQ ID NO: 3785387 - RNA, 14 nt, Human
acuuuuacaaguaa

SEQ ID NO: 3785388 - RNA, 16 nt, Human
acuuuuacucugccua

SEQ ID NO: 3785389 - RNA, 13 nt, Human
acuuuuauaaacu

SEQ ID NO: 3785390 - RNA, 19 nt, Human
acuuuuauaaacuuuaccu

SEQ ID NO: 3785391 - RNA, 16 nt, Human
acuuuuauaaauuaaa

SEQ ID NO: 3785392 - RNA, 21 nt, Human
acuuuuauaaauuaaauauau

SEQ ID NO: 3785393 - RNA, 11 nt, Human
acuuuuauaau

SEQ ID NO: 3785394 - RNA, 19 nt, Human
acuuuuauaauaaaaggaa

SEQ ID NO: 3785395 - RNA, 21 nt, Human
acuuuuaucuauucugagaaa

SEQ ID NO: 3785396 - RNA, 20 nt, Human
acuuuuaugagcuuccaagg

SEQ ID NO: 3785397 - RNA, 16 nt, Human
acuuuuaugauacuug

SEQ ID NO: 3785398 - RNA, 20 nt, Human
acuuuuaugauguauauuua

SEQ ID NO: 3785399 - RNA, 15 nt, Human
acuuuuauuugcaac

SEQ ID NO: 3785400 - RNA, 22 nt, Human
acuuuuauuugcaacauuuaca

SEQ ID NO: 3785401 - RNA, 22 nt, Human
acuuuucaaggcuuauauucaa

SEQ ID NO: 3785402 - RNA, 20 nt, Human
acuuuucauucucuuuuaau

SEQ ID NO: 3785403 - RNA, 21 nt, Human
acuuuuccaauaugugauuuu

SEQ ID NO: 3785404 - RNA, 15 nt, Human
acuuuuccaguauuu

SEQ ID NO: 3785405 - RNA, 18 nt, Human
acuuuuccaguauuuuag

SEQ ID NO: 3785406 - RNA, 21 nt, Human
acuuuuccauguaucuaccuc

SEQ ID NO: 3785407 - RNA, 17 nt, Human
acuuuuccauucccaau

SEQ ID NO: 3785408 - RNA, 17 nt, Human
acuuuuccccuguccug

SEQ ID NO: 3785409 - RNA, 20 nt, Human
acuuuuccguuucagcggaa

SEQ ID NO: 3785410 - RNA, 13 nt, Human
acuuuuccucuua

SEQ ID NO: 3785411 - RNA, 20 nt, Human
acuuuuccucuuagaagaau

SEQ ID NO: 3785412 - RNA, 18 nt, Human
acuuuuccuugcauacaa

SEQ ID NO: 3785413 - RNA, 12 nt, Human
acuuuucguuaa

SEQ ID NO: 3785414 - RNA, 16 nt, Human
acuuuucguuaacauu

SEQ ID NO: 3785415 - RNA, 22 nt, Human
acuuuucguuaacauugaccaa

SEQ ID NO: 3785416 - RNA, 23 nt, Human
acuuuucuaaacuaggcuccuuc

SEQ ID NO: 3785417 - RNA, 23 nt, Human
acuuuucuagaauuauuuuucac

SEQ ID NO: 3785418 - RNA, 12 nt, Human
acuuuucugaua

SEQ ID NO: 3785419 - RNA, 20 nt, Human
acuuuucuguaauucagguu

SEQ ID NO: 3785420 - RNA, 12 nt, Human
acuuuucuucua

SEQ ID NO: 3785421 - RNA, 20 nt, Human
acuuuucuucuauugccucu

SEQ ID NO: 3785422 - RNA, 16 nt, Human
acuuuucuuucagcca

SEQ ID NO: 3785423 - RNA, 12 nt, Human
acuuuugcuuua

SEQ ID NO: 3785424 - RNA, 23 nt, Human
acuuuuggaaucuagaagaaaug

SEQ ID NO: 3785425 - RNA, 16 nt, Human
acuuuugguuaagucu

SEQ ID NO: 3785426 - RNA, 12 nt, Human
acuuuugugaaa

SEQ ID NO: 3785427 - RNA, 19 nt, Human
acuuuuuaacuauuaagag

SEQ ID NO: 3785428 - RNA, 17 nt, Human
acuuuuuaguaauuucu

SEQ ID NO: 3785429 - RNA, 15 nt, Human
acuuuuuauauauau

SEQ ID NO: 3785430 - RNA, 22 nt, Human
acuuuuuauauucucagcagag

SEQ ID NO: 3785431 - RNA, 12 nt, Human
acuuuuuauugc

SEQ ID NO: 3785432 - RNA, 15 nt, Human
acuuuuuauugccuu

SEQ ID NO: 3785433 - RNA, 16 nt, Human
acuuuuuauugccuuc

SEQ ID NO: 3785434 - RNA, 18 nt, Human
acuuuuuauugccuucuc

SEQ ID NO: 3785435 - RNA, 18 nt, Human
acuuuuucauuugccuau

SEQ ID NO: 3785436 - RNA, 11 nt, Human
acuuuuuccag

SEQ ID NO: 3785437 - RNA, 19 nt, Human
acuuuuucuuaaucauuuu

SEQ ID NO: 3785438 - RNA, 17 nt, Human
acuuuuucuuuuguaag

SEQ ID NO: 3785439 - RNA, 16 nt, Human
acuuuuugaggcaaaa

SEQ ID NO: 3785440 - RNA, 15 nt, Human
acuuuuugcagcuuu

SEQ ID NO: 3785441 - RNA, 19 nt, Human
acuuuuugguggauguaaa

SEQ ID NO: 3785442 - RNA, 13 nt, Human
acuuuuugugaag

SEQ ID NO: 3785443 - RNA, 13 nt, Human
acuuuuuuaaaua

SEQ ID NO: 3785444 - RNA, 15 nt, Human
acuuuuuuaaauaaa

SEQ ID NO: 3785445 - RNA, 21 nt, Human
acuuuuuuaaauaaacuuuuu

SEQ ID NO: 3785446 - RNA, 19 nt, Human
acuuuuuuaaauauuuucu

SEQ ID NO: 3785447 - RNA, 23 nt, Human
acuuuuuuauuuaaaaaacuaaa

SEQ ID NO: 3785448 - RNA, 23 nt, Human
acuuuuuugcuauccagcuauuu

SEQ ID NO: 3785449 - RNA, 21 nt, Human
acuuuuuuggggauaugcuua

SEQ ID NO: 3785450 - RNA, 13 nt, Human
acuuuuuuucaau

SEQ ID NO: 3785451 - RNA, 15 nt, Human
acuuuuuuucaaugu

SEQ ID NO: 3785452 - RNA, 15 nt, Human
acuuuuuuuuaaguu

SEQ ID NO: 3785453 - RNA, 22 nt, Human
acuuuuuuuuuccaaaaaaaua

SEQ ID NO: 3785454 - RNA, 20 nt, Human
agaaaaaaaaaaacuuacac

SEQ ID NO: 3785455 - RNA, 13 nt, Human
agaaaaaaaaaag

SEQ ID NO: 3785456 - RNA, 15 nt, Human
agaaaaaaaaaagaa

SEQ ID NO: 3785457 - RNA, 16 nt, Human
agaaaaaaaaaagaag

SEQ ID NO: 3785458 - RNA, 17 nt, Human
agaaaaaaaaaagaaga

SEQ ID NO: 3785459 - RNA, 15 nt, Human
agaaaaaaaaagaaa

SEQ ID NO: 3785460 - RNA, 16 nt, Human
agaaaaaaaaagaaaa

SEQ ID NO: 3785461 - RNA, 18 nt, Human
agaaaaaaaaagaaaaaa

SEQ ID NO: 3785462 - RNA, 21 nt, Human
agaaaaaaaaaugccauaaua

SEQ ID NO: 3785463 - RNA, 22 nt, Human
agaaaaaaaaaugccauaauac

SEQ ID NO: 3785464 - RNA, 19 nt, Human
agaaaaaaaaauucacaug

SEQ ID NO: 3785465 - RNA, 20 nt, Human
agaaaaaaaauaacacagag

SEQ ID NO: 3785466 - RNA, 12 nt, Human
agaaaaaaacaa

SEQ ID NO: 3785467 - RNA, 18 nt, Human
agaaaaaaacauucuauc

SEQ ID NO: 3785468 - RNA, 13 nt, Human
agaaaaaaaccau

SEQ ID NO: 3785469 - RNA, 12 nt, Human
agaaaaaaacga

SEQ ID NO: 3785470 - RNA, 18 nt, Human
agaaaaaaacgaaaacag

SEQ ID NO: 3785471 - RNA, 17 nt, Human
agaaaaaaagauuuauu

SEQ ID NO: 3785472 - RNA, 16 nt, Human
agaaaaaaaucuucuc

SEQ ID NO: 3785473 - RNA, 22 nt, Human
agaaaaaaauguauuuuauguu

SEQ ID NO: 3785474 - RNA, 13 nt, Human
agaaaaaaauuca

SEQ ID NO: 3785475 - RNA, 14 nt, Human
agaaaaaaguugua

SEQ ID NO: 3785476 - RNA, 13 nt, Human
agaaaaaauaaau

SEQ ID NO: 3785477 - RNA, 11 nt, Human
agaaaaaauac

SEQ ID NO: 3785478 - RNA, 23 nt, Human
agaaaaacaaacucguuuuuuac

SEQ ID NO: 3785479 - RNA, 13 nt, Human
agaaaaacaauaa

SEQ ID NO: 3785480 - RNA, 16 nt, Human
agaaaaacaauaagag

SEQ ID NO: 3785481 - RNA, 15 nt, Human
agaaaaagaaaugca

SEQ ID NO: 3785482 - RNA, 22 nt, Human
agaaaaagaacaugcaguuuga

SEQ ID NO: 3785483 - RNA, 20 nt, Human
agaaaaagcaauaaccucaa

SEQ ID NO: 3785484 - RNA, 18 nt, Human
agaaaaaggaugcacaga

SEQ ID NO: 3785485 - RNA, 13 nt, Human
agaaaaaggguca

SEQ ID NO: 3785486 - RNA, 14 nt, Human
agaaaaauaaagaa

SEQ ID NO: 3785487 - RNA, 11 nt, Human
agaaaaauauu

SEQ ID NO: 3785488 - RNA, 21 nt, Human
agaaaaaucuugugcuagaau

SEQ ID NO: 3785489 - RNA, 18 nt, Human
agaaaaaugagccuggca

SEQ ID NO: 3785490 - RNA, 15 nt, Human
agaaaaauuauugua

SEQ ID NO: 3785491 - RNA, 20 nt, Human
agaaaacaaaaaaaccucua

SEQ ID NO: 3785492 - RNA, 21 nt, Human
agaaaacaaaaaacgaaugaa

SEQ ID NO: 3785493 - RNA, 22 nt, Human
agaaaacaagaugagauuggca

SEQ ID NO: 3785494 - RNA, 13 nt, Human
agaaaacagaaaa

SEQ ID NO: 3785495 - RNA, 20 nt, Human
agaaaacaggaaaaaaacuu

SEQ ID NO: 3785496 - RNA, 18 nt, Human
agccugggcagccaggcu

SEQ ID NO: 3785497 - RNA, 21 nt, Human
agccugggcagccaggcugcc

SEQ ID NO: 3785498 - RNA, 17 nt, Human
agccugggcccaucucc

SEQ ID NO: 3785499 - RNA, 19 nt, Human
agccugggcccaucucccu

SEQ ID NO: 3785500 - RNA, 20 nt, Human
agccugggcccaucucccug

SEQ ID NO: 3785501 - RNA, 21 nt, Human
agccugggcccaucucccugc

SEQ ID NO: 3785502 - RNA, 12 nt, Human
agccugggccua

SEQ ID NO: 3785503 - RNA, 20 nt, Human
agccugggccuauggagagc

SEQ ID NO: 3785504 - RNA, 21 nt, Human
agccugggccuauggagagcc

SEQ ID NO: 3785505 - RNA, 14 nt, Human
agccugggcgacag

SEQ ID NO: 3785506 - RNA, 18 nt, Human
agccugggcgcugguccu

SEQ ID NO: 3785507 - RNA, 16 nt, Human
agccuggggccuggca

SEQ ID NO: 3785508 - RNA, 18 nt, Human
agccuggggccuggcagg

SEQ ID NO: 3785509 - RNA, 17 nt, Human
agccuggggcugaggcu

SEQ ID NO: 3785510 - RNA, 14 nt, Human
agccugggggccug

SEQ ID NO: 3785511 - RNA, 15 nt, Human
agccugggggccugg

SEQ ID NO: 3785512 - RNA, 17 nt, Human
agccugggggccuggcu

SEQ ID NO: 3785513 - RNA, 23 nt, Human
agccugggguggggucaugcccu

SEQ ID NO: 3785514 - RNA, 21 nt, Human
agccugguaggaaagggcaag

SEQ ID NO: 3785515 - RNA, 15 nt, Human
agccuggucagccca

SEQ ID NO: 3785516 - RNA, 20 nt, Human
agccuggucagcccaaacca

SEQ ID NO: 3785517 - RNA, 14 nt, Human
agccuggugcugcu

SEQ ID NO: 3785518 - RNA, 15 nt, Human
agccuggugcugcug

SEQ ID NO: 3785519 - RNA, 21 nt, Human
agccugguuuagccuggaugu

SEQ ID NO: 3785520 - RNA, 20 nt, Human
agccuguaacacuccucugc

SEQ ID NO: 3785521 - RNA, 17 nt, Human
agccuguaagccugcaa

SEQ ID NO: 3785522 - RNA, 16 nt, Human
agccuguaaucccagc

SEQ ID NO: 3785523 - RNA, 20 nt, Human
agccugucagauccaggagc

SEQ ID NO: 3785524 - RNA, 22 nt, Human
agccugucagauccaggagcuc

SEQ ID NO: 3785525 - RNA, 22 nt, Human
agccugucauccuuggucuuug

SEQ ID NO: 3785526 - RNA, 19 nt, Human
agccugucccauggacacu

SEQ ID NO: 3785527 - RNA, 18 nt, Human
agccuguccugggcuggu

SEQ ID NO: 3785528 - RNA, 14 nt, Human
agccuguccuguca

SEQ ID NO: 3785529 - RNA, 22 nt, Human
agccugugaacccaggacaagc

SEQ ID NO: 3785530 - RNA, 19 nt, Human
agccugugacauacccccu

SEQ ID NO: 3785531 - RNA, 16 nt, Human
agccugugcaaaaaaa

SEQ ID NO: 3785532 - RNA, 21 nt, Human
agccugugcaaaaaaauuaaa

SEQ ID NO: 3785533 - RNA, 12 nt, Human
agccugugccuc

SEQ ID NO: 3785534 - RNA, 15 nt, Human
agccuguggaugauc

SEQ ID NO: 3785535 - RNA, 11 nt, Human
agccuguggca

SEQ ID NO: 3785536 - RNA, 22 nt, Human
agccuguggcaguaaagagaaa

SEQ ID NO: 3785537 - RNA, 12 nt, Human
agcuccuuggga

SEQ ID NO: 3785538 - RNA, 15 nt, Human
agcuccuugggaggc

SEQ ID NO: 3785539 - RNA, 20 nt, Human
agcuccuugggaggccccac

SEQ ID NO: 3785540 - RNA, 22 nt, Human
agcuccuuugggcuucagcugc

SEQ ID NO: 3785541 - RNA, 18 nt, Human
agcuccuuuuccagagca

SEQ ID NO: 3785542 - RNA, 14 nt, Human
agcucggcucagcu

SEQ ID NO: 3785543 - RNA, 12 nt, Human
agcucgguggac

SEQ ID NO: 3785544 - RNA, 16 nt, Human
agcucgguggacccag

SEQ ID NO: 3785545 - RNA, 18 nt, Human
agcucguguauccugggg

SEQ ID NO: 3785546 - RNA, 17 nt, Human
agcucuaaaaucugcuu

SEQ ID NO: 3785547 - RNA, 14 nt, Human
agcucuaauguuug

SEQ ID NO: 3785548 - RNA, 21 nt, Human
agcucuaauguuugcauauaa

SEQ ID NO: 3785549 - RNA, 14 nt, Human
agcucuagaaucug

SEQ ID NO: 3785550 - RNA, 19 nt, Human
agcucuauuaugaauguga

SEQ ID NO: 3785551 - RNA, 23 nt, Human
agcucucaucugaggcauccagc

SEQ ID NO: 3785552 - RNA, 22 nt, Human
agcucucccucuggcccugccu

SEQ ID NO: 3785553 - RNA, 20 nt, Human
agcucucggaacugcaugcu

SEQ ID NO: 3785554 - RNA, 22 nt, Human
agcucucggaacugcaugcugc

SEQ ID NO: 3785555 - RNA, 13 nt, Human
agcucucuaggcc

SEQ ID NO: 3785556 - RNA, 17 nt, Human
agcucucuaggccucuc

SEQ ID NO: 3785557 - RNA, 19 nt, Human
agcucucuaggccucucca

SEQ ID NO: 3785558 - RNA, 16 nt, Human
agcucucuccucccuu

SEQ ID NO: 3785559 - RNA, 11 nt, Human
agcucucugca

SEQ ID NO: 3785560 - RNA, 14 nt, Human
agcucucugcccug

SEQ ID NO: 3785561 - RNA, 18 nt, Human
agcucucugcccugugua

SEQ ID NO: 3785562 - RNA, 19 nt, Human
agcucucuguauaaacauu

SEQ ID NO: 3785563 - RNA, 19 nt, Human
agcucucuucaaugacaua

SEQ ID NO: 3785564 - RNA, 21 nt, Human
agcucugaagucacaucacag

SEQ ID NO: 3785565 - RNA, 10 nt, Human
agcucugaga

SEQ ID NO: 3785566 - RNA, 16 nt, Human
agcucugagaggcccu

SEQ ID NO: 3785567 - RNA, 10 nt, Human
agcucugagc

SEQ ID NO: 3785568 - RNA, 14 nt, Human
agcucugagcuguc

SEQ ID NO: 3785569 - RNA, 12 nt, Human
agcucugaggga

SEQ ID NO: 3785570 - RNA, 23 nt, Human
agcucugaguuccggcaccagua

SEQ ID NO: 3785571 - RNA, 21 nt, Human
agcucugcagagcaggaaaca

SEQ ID NO: 3785572 - RNA, 14 nt, Human
agcucugcagccca

SEQ ID NO: 3785573 - RNA, 13 nt, Human
agcucugcauuau

SEQ ID NO: 3785574 - RNA, 23 nt, Human
agcucugcccauccugccccuga

SEQ ID NO: 3785575 - RNA, 22 nt, Human
agcucugcgucgguccuggugc

SEQ ID NO: 3785576 - RNA, 12 nt, Human
agcucugcuccu

SEQ ID NO: 3785577 - RNA, 13 nt, Human
agcucugcuugcc

SEQ ID NO: 3785578 - RNA, 12 nt, Human
agcucuggacca

SEQ ID NO: 3785579 - RNA, 15 nt, Human
agcucuggaccagcc

SEQ ID NO: 3785580 - RNA, 17 nt, Human
agcucuggaccagccug

SEQ ID NO: 3785581 - RNA, 14 nt, Human
agcucuggagccac

SEQ ID NO: 3785582 - RNA, 18 nt, Human
agcucuggagccaccugu

SEQ ID NO: 3785583 - RNA, 17 nt, Human
agcucuggaggggaggg

SEQ ID NO: 3785584 - RNA, 19 nt, Human
agcucuggcucacagacug

SEQ ID NO: 3785585 - RNA, 19 nt, Human
agcucuggcugaacccugu

SEQ ID NO: 3785586 - RNA, 12 nt, Human
agcucuggcuuc

SEQ ID NO: 3785587 - RNA, 18 nt, Human
agcucugggagaggauuu

SEQ ID NO: 3785588 - RNA, 19 nt, Human
agcucuggggugggcaguu

SEQ ID NO: 3785589 - RNA, 20 nt, Human
agcucuggggugggcaguuu

SEQ ID NO: 3785590 - RNA, 22 nt, Human
agcucuggggugggcaguuuuu

SEQ ID NO: 3785591 - RNA, 17 nt, Human
agcucugguccauagag

SEQ ID NO: 3785592 - RNA, 20 nt, Human
agcucugguccauagagagc

SEQ ID NO: 3785593 - RNA, 22 nt, Human
agcucuguaucaggacccagag

SEQ ID NO: 3785594 - RNA, 14 nt, Human
agcucuguccuggg

SEQ ID NO: 3785595 - RNA, 23 nt, Human
agcucuguccugggagugagcug

SEQ ID NO: 3785596 - RNA, 14 nt, Human
agcucugucugucc

SEQ ID NO: 3785597 - RNA, 15 nt, Human
agcucuguguugcca

SEQ ID NO: 3785598 - RNA, 18 nt, Human
agcucuguucuuccucag

SEQ ID NO: 3785599 - RNA, 19 nt, Human
agcucuguucuuccucagc

SEQ ID NO: 3785600 - RNA, 20 nt, Human
agcucuguucuuccucagcc

SEQ ID NO: 3785601 - RNA, 16 nt, Human
agcucuguugcaauua

SEQ ID NO: 3785602 - RNA, 16 nt, Human
agcucuuaacuacagu

SEQ ID NO: 3785603 - RNA, 13 nt, Human
agcucuucaggcc

SEQ ID NO: 3785604 - RNA, 17 nt, Human
agcucuucaggccuccc

SEQ ID NO: 3785605 - RNA, 18 nt, Human
agcucuucaggccucccu

SEQ ID NO: 3785606 - RNA, 14 nt, Human
agcucuucaucugc

SEQ ID NO: 3785607 - RNA, 13 nt, Human
agcucuucauguu

SEQ ID NO: 3785608 - RNA, 16 nt, Human
agcucuucauguuuca

SEQ ID NO: 3785609 - RNA, 22 nt, Human
agcucuuccuggacaggccagg

SEQ ID NO: 3785610 - RNA, 14 nt, Human
agcucuucuccauc

SEQ ID NO: 3785611 - RNA, 23 nt, Human
agcucuucugccggcccuggggc

SEQ ID NO: 3785612 - RNA, 18 nt, Human
agcucuucuuaaaguauu

SEQ ID NO: 3785613 - RNA, 16 nt, Human
agcucuucuucccagc

SEQ ID NO: 3785614 - RNA, 14 nt, Human
agcucuugcccuuc

SEQ ID NO: 3785615 - RNA, 13 nt, Human
agcucuuuccucc

SEQ ID NO: 3785616 - RNA, 14 nt, Human
agcucuuugcacua

SEQ ID NO: 3785617 - RNA, 22 nt, Human
agcucuuuggcagucuauaugu

SEQ ID NO: 3785618 - RNA, 22 nt, Human
agcugaaaaccuaaguccuuua

SEQ ID NO: 3785619 - RNA, 12 nt, Human
agcugaaaauau

SEQ ID NO: 3785620 - RNA, 20 nt, Human
agcugaaaauauaaaacaaa

SEQ ID NO: 3785621 - RNA, 17 nt, Human
agcugaaaguugggacu

SEQ ID NO: 3785622 - RNA, 18 nt, Human
agcugaaauaugcuggcu

SEQ ID NO: 3785623 - RNA, 20 nt, Human
agcugaaauaugcuggcugg

SEQ ID NO: 3785624 - RNA, 20 nt, Human
agcugaaaugcugcauuuua

SEQ ID NO: 3785625 - RNA, 21 nt, Human
agcugaacaauaggcuguucc

SEQ ID NO: 3785626 - RNA, 22 nt, Human
agcugaacaauaggcuguuccc

SEQ ID NO: 3785627 - RNA, 14 nt, Human
agcugaacacauuu

SEQ ID NO: 3785628 - RNA, 16 nt, Human
agcugaacacauuucu

SEQ ID NO: 3785629 - RNA, 18 nt, Human
agcugaagaauugaaaag

SEQ ID NO: 3785630 - RNA, 15 nt, Human
agcugaagagcuggg

SEQ ID NO: 3785631 - RNA, 16 nt, Human
agcugaagauuuugga

SEQ ID NO: 3785632 - RNA, 19 nt, Human
agcugaagccgccaggacc

SEQ ID NO: 3785633 - RNA, 18 nt, Human
agcugaaugccuccugug

SEQ ID NO: 3785634 - RNA, 22 nt, Human
agcugaauguuuuucuaaagga

SEQ ID NO: 3785635 - RNA, 20 nt, Human
agcugaauugagccuaaaaa

SEQ ID NO: 3785636 - RNA, 19 nt, Human
agcugacaaaauuuugcuc

SEQ ID NO: 3785637 - RNA, 20 nt, Human
agcugacacaaaccugccug

SEQ ID NO: 3785638 - RNA, 23 nt, Human
agcugacacaaaccugccugggu

SEQ ID NO: 3785639 - RNA, 16 nt, Human
agcugacaguccucuc

SEQ ID NO: 3785640 - RNA, 13 nt, Human
auaugauuguuuc

SEQ ID NO: 3785641 - RNA, 19 nt, Human
auaugauuuuuuaaaagaa

SEQ ID NO: 3785642 - RNA, 16 nt, Human
auaugcaaugugaagc

SEQ ID NO: 3785643 - RNA, 16 nt, Human
auaugcacacauuuuu

SEQ ID NO: 3785644 - RNA, 17 nt, Human
auaugcaccuugugucu

SEQ ID NO: 3785645 - RNA, 23 nt, Human
auaugcacuaagucucuuuuuua

SEQ ID NO: 3785646 - RNA, 17 nt, Human
auaugcagauuuugccc

SEQ ID NO: 3785647 - RNA, 20 nt, Human
auaugcagugauauggcaga

SEQ ID NO: 3785648 - RNA, 17 nt, Human
auaugcaguuuuccuua

SEQ ID NO: 3785649 - RNA, 19 nt, Human
auaugcauauauauaugug

SEQ ID NO: 3785650 - RNA, 19 nt, Human
auaugcccacauuuagucu

SEQ ID NO: 3785651 - RNA, 21 nt, Human
auaugcccacauuuagucucu

SEQ ID NO: 3785652 - RNA, 22 nt, Human
auaugcccacauuuagucucuu

SEQ ID NO: 3785653 - RNA, 15 nt, Human
auaugccugcucuuu

SEQ ID NO: 3785654 - RNA, 22 nt, Human
auaugccugggcagaaggaaga

SEQ ID NO: 3785655 - RNA, 14 nt, Human
auaugccuuguaua

SEQ ID NO: 3785656 - RNA, 15 nt, Human
auaugcguauuauac

SEQ ID NO: 3785657 - RNA, 14 nt, Human
auaugcuaauuugg

SEQ ID NO: 3785658 - RNA, 19 nt, Human
auaugcuaccaccagcugu

SEQ ID NO: 3785659 - RNA, 16 nt, Human
auaugcuauuucuaua

SEQ ID NO: 3785660 - RNA, 21 nt, Human
auaugcuauuucuauauuuuc

SEQ ID NO: 3785661 - RNA, 23 nt, Human
auaugcuauuucuauauuuucau

SEQ ID NO: 3785662 - RNA, 20 nt, Human
auaugcucugauuuaucuga

SEQ ID NO: 3785663 - RNA, 16 nt, Human
auaugcucugcauguu

SEQ ID NO: 3785664 - RNA, 18 nt, Human
auaugcucuuuuguuugg

SEQ ID NO: 3785665 - RNA, 14 nt, Human
auaugcuuacugau

SEQ ID NO: 3785666 - RNA, 20 nt, Human
auaugcuucuguuuuauaau

SEQ ID NO: 3785667 - RNA, 22 nt, Human
auaugcuucuguuuuauaauuu

SEQ ID NO: 3785668 - RNA, 13 nt, Human
auaugcuucuuua

SEQ ID NO: 3785669 - RNA, 19 nt, Human
auaugcuuguaacuaaaau

SEQ ID NO: 3785670 - RNA, 14 nt, Human
auaugcuuuauuaa

SEQ ID NO: 3785671 - RNA, 15 nt, Human
auauggaaauauaua

SEQ ID NO: 3785672 - RNA, 16 nt, Human
auauggaaauauauau

SEQ ID NO: 3785673 - RNA, 20 nt, Human
auauggaacuucuaauauau

SEQ ID NO: 3785674 - RNA, 19 nt, Human
auauggaauuuugcaaaga

SEQ ID NO: 3785675 - RNA, 19 nt, Human
auauggacauaucaucugu

SEQ ID NO: 3785676 - RNA, 11 nt, Human
auauggagccc

SEQ ID NO: 3785677 - RNA, 15 nt, Human
auauggcaagaaagc

SEQ ID NO: 3785678 - RNA, 17 nt, Human
auauggcaagaaagcug

SEQ ID NO: 3785679 - RNA, 18 nt, Human
auauggcaagaaagcugg

SEQ ID NO: 3785680 - RNA, 19 nt, Human
auauggcagaguuguaaau

SEQ ID NO: 3785681 - RNA, 23 nt, Human
auauggcagaguuguaaauauau

SEQ ID NO: 3785682 - RNA, 13 nt, Human
auauggccacagu

SEQ ID NO: 3785683 - RNA, 23 nt, Human
auauggccacaguagucuugaug

SEQ ID NO: 3785684 - RNA, 22 nt, Human
auauggcucuucauaauucuaa

SEQ ID NO: 3785685 - RNA, 17 nt, Human
auaugggcauuguaguu

SEQ ID NO: 3785686 - RNA, 17 nt, Human
auauggggggccaacac

SEQ ID NO: 3785687 - RNA, 22 nt, Human
auaugggguauuggacauagau

SEQ ID NO: 3785688 - RNA, 22 nt, Human
auauggguuuauaauuuucuga

SEQ ID NO: 3785689 - RNA, 14 nt, Human
auaugguauauaua

SEQ ID NO: 3785690 - RNA, 14 nt, Human
auauggucuaaugu

SEQ ID NO: 3785691 - RNA, 16 nt, Human
auauggucuaauguuu

SEQ ID NO: 3785692 - RNA, 15 nt, Human
auauguaaaacauuu

SEQ ID NO: 3785693 - RNA, 13 nt, Human
auauguaaaauaa

SEQ ID NO: 3785694 - RNA, 15 nt, Human
auauguaaaauaaaa

SEQ ID NO: 3785695 - RNA, 20 nt, Human
auauguaaucucuaggaagu

SEQ ID NO: 3785696 - RNA, 17 nt, Human
auauguacaauuguggg

SEQ ID NO: 3785697 - RNA, 14 nt, Human
auauguacaugaga

SEQ ID NO: 3785698 - RNA, 11 nt, Human
auauguaccaa

SEQ ID NO: 3785699 - RNA, 13 nt, Human
auauguacuguuu

SEQ ID NO: 3785700 - RNA, 21 nt, Human
auauguacuugucaaagaagg

SEQ ID NO: 3785701 - RNA, 19 nt, Human
auauguagacuauauacau

SEQ ID NO: 3785702 - RNA, 18 nt, Human
auauguagauguaugcac

SEQ ID NO: 3785703 - RNA, 23 nt, Human
auauguagauguaugcacacaca

SEQ ID NO: 3785704 - RNA, 18 nt, Human
auauguagccuucacaca

SEQ ID NO: 3785705 - RNA, 15 nt, Human
auauguauacaugug

SEQ ID NO: 3785706 - RNA, 21 nt, Human
auauguauauauauauaugca

SEQ ID NO: 3785707 - RNA, 18 nt, Human
auauguauccaguacauu

SEQ ID NO: 3785708 - RNA, 19 nt, Human
auauguauccaguacauuu

SEQ ID NO: 3785709 - RNA, 12 nt, Human
auauguaugggu

SEQ ID NO: 3785710 - RNA, 15 nt, Human
auauguauguaaaaa

SEQ ID NO: 3785711 - RNA, 11 nt, Human
auauguaugug

SEQ ID NO: 3785712 - RNA, 13 nt, Human
auauguauguguu

SEQ ID NO: 3785713 - RNA, 15 nt, Human
auauguauguguuua

SEQ ID NO: 3785714 - RNA, 20 nt, Human
auauguauguguuuagaauu

SEQ ID NO: 3785715 - RNA, 21 nt, Human
auauguauguguuuagaauug

SEQ ID NO: 3785716 - RNA, 23 nt, Human
auauguauguguuuagaauugaa

SEQ ID NO: 3785717 - RNA, 17 nt, Human
auauguauuauuuauaa

SEQ ID NO: 3785718 - RNA, 23 nt, Human
auauguauuauuuauaauuccua

SEQ ID NO: 3785719 - RNA, 21 nt, Human
auauguauuguaaacaugugu

SEQ ID NO: 3785720 - RNA, 15 nt, Human
auauguauuuaccaa

SEQ ID NO: 3785721 - RNA, 16 nt, Human
auauguauuuaccaaa

SEQ ID NO: 3785722 - RNA, 18 nt, Human
auauguauuuaccaaaaa

SEQ ID NO: 3785723 - RNA, 11 nt, Human
auauguauuuu

SEQ ID NO: 3785724 - RNA, 13 nt, Human
auauguauuuuau

SEQ ID NO: 3785725 - RNA, 19 nt, Human
auauguauuuuauguaugu

SEQ ID NO: 3785726 - RNA, 22 nt, Human
auauguauuuuauguauguuua

SEQ ID NO: 3785727 - RNA, 15 nt, Human
auaugucacuagaau

SEQ ID NO: 3785728 - RNA, 17 nt, Human
auaugucacuagaaugg

SEQ ID NO: 3785729 - RNA, 14 nt, Human
auaugucagggcgu

SEQ ID NO: 3785730 - RNA, 18 nt, Human
auaugucagucacuaaaa

SEQ ID NO: 3785731 - RNA, 20 nt, Human
auaugucucgcuagugaugu

SEQ ID NO: 3785732 - RNA, 16 nt, Human
auaugucugcuccuuu

SEQ ID NO: 3785733 - RNA, 13 nt, Human
auaugugaacauu

SEQ ID NO: 3785734 - RNA, 11 nt, Human
auaugugaauc

SEQ ID NO: 3785735 - RNA, 22 nt, Human
auaugugagauuuuuuauugcu

SEQ ID NO: 3785736 - RNA, 13 nt, Human
auaugugaucugu

SEQ ID NO: 3785737 - RNA, 16 nt, Human
auaugugaucugucuu

SEQ ID NO: 3785738 - RNA, 20 nt, Human
auaugugaucugucuuguaa

SEQ ID NO: 3785739 - RNA, 19 nt, Human
auaugugccaaucaauagc

SEQ ID NO: 3785740 - RNA, 21 nt, Human
auauguggaguucaucuugaa

SEQ ID NO: 3785741 - RNA, 15 nt, Human
auauguguauauaua

SEQ ID NO: 3785742 - RNA, 18 nt, Human
auauguguauauauacau

SEQ ID NO: 3785743 - RNA, 14 nt, Human
auauguguauguac

SEQ ID NO: 3785744 - RNA, 16 nt, Human
auauguguauguacgu

SEQ ID NO: 3785745 - RNA, 21 nt, Human
auaugugugccuauuugugug

SEQ ID NO: 3785746 - RNA, 16 nt, Human
auauguguguguaugu

SEQ ID NO: 3785747 - RNA, 23 nt, Human
auauguguguguguguguugcuu

SEQ ID NO: 3785748 - RNA, 19 nt, Human
auauguguguuuaaauaaa

SEQ ID NO: 3785749 - RNA, 20 nt, Human
auauguguguuuaaauaaag

SEQ ID NO: 3785750 - RNA, 18 nt, Human
auauguguuuuucacauu

SEQ ID NO: 3785751 - RNA, 18 nt, Human
auauguucuuuaaaaaua

SEQ ID NO: 3785752 - RNA, 14 nt, Human
auauguugaauacu

SEQ ID NO: 3785753 - RNA, 15 nt, Human
auauguugaauacuu

SEQ ID NO: 3785754 - RNA, 22 nt, Human
auauguugaugaaaaauagcaa

SEQ ID NO: 3785755 - RNA, 20 nt, Human
auauguugcuauaauaaaga

SEQ ID NO: 3785756 - RNA, 13 nt, Human
auauguuguucuu

SEQ ID NO: 3785757 - RNA, 14 nt, Human
auauguuguucuua

SEQ ID NO: 3785758 - RNA, 21 nt, Human
auauguuuaaaauaaaaugaa

SEQ ID NO: 3785759 - RNA, 18 nt, Human
auauguuucacacaaaca

SEQ ID NO: 3785760 - RNA, 13 nt, Human
auauguuuccuug

SEQ ID NO: 3785761 - RNA, 17 nt, Human
auauguuuuuuagauca

SEQ ID NO: 3785762 - RNA, 21 nt, Human
auauguuuuuuagaucaaaua

SEQ ID NO: 3785763 - RNA, 17 nt, Human
auauuaaaaaacuucau

SEQ ID NO: 3785764 - RNA, 24 nt, Human
auauuaaaaaacuucauguaauuu

SEQ ID NO: 3785765 - RNA, 17 nt, Human
auauuaaaaaagagaca

SEQ ID NO: 3785766 - RNA, 12 nt, Human
auauuaaaaagu

SEQ ID NO: 3785767 - RNA, 16 nt, Human
auauuaaaaagucuuu

SEQ ID NO: 3785768 - RNA, 13 nt, Human
auauuaaaaauau

SEQ ID NO: 3785769 - RNA, 21 nt, Human
auauuaaaaauauaaaacugc

SEQ ID NO: 3785770 - RNA, 21 nt, Human
auauuaaaaaugguaaaauug

SEQ ID NO: 3785771 - RNA, 23 nt, Human
auauuaaaagaaaggguucugua

SEQ ID NO: 3785772 - RNA, 15 nt, Human
auauuaaaagucaca

SEQ ID NO: 3785773 - RNA, 21 nt, Human
auauuaaaauaagcacugugc

SEQ ID NO: 3785774 - RNA, 15 nt, Human
auauuaaaauuccaa

SEQ ID NO: 3785775 - RNA, 21 nt, Human
auauuaaaauuccaaauucau

SEQ ID NO: 3785776 - RNA, 17 nt, Human
auauuaaacauccacaa

SEQ ID NO: 3785777 - RNA, 19 nt, Human
auauuaaauacagacacua

SEQ ID NO: 3785778 - RNA, 18 nt, Human
auauuaaauuuuuuguug

SEQ ID NO: 3785779 - RNA, 24 nt, Human
auauuaagaaagacuaucuaaaug

SEQ ID NO: 3785780 - RNA, 22 nt, Human
auauuaaggaagacaaugugaa

SEQ ID NO: 3785781 - RNA, 20 nt, Human
auauuaaguaagucucaagg

SEQ ID NO: 3785782 - RNA, 12 nt, Human
auauuaauguac

SEQ ID NO: 3785783 - RNA, 21 nt, Human
auacuuaaauguuauguauau

SEQ ID NO: 3785784 - RNA, 14 nt, Human
auauugucuuuuug

SEQ ID NO: 3785785 - RNA, 18 nt, Human
auauugugccaauaugua

SEQ ID NO: 3785786 - RNA, 21 nt, Human
auauugugccaauauguauug

SEQ ID NO: 3785787 - RNA, 19 nt, Human
auauuguggguguuaauuu

SEQ ID NO: 3785788 - RNA, 17 nt, Human
auauuguguuuguguau

SEQ ID NO: 3785789 - RNA, 18 nt, Human
auauuguucaaacaauau

SEQ ID NO: 3785790 - RNA, 21 nt, Human
auauuguucaaacaauaucau

SEQ ID NO: 3785791 - RNA, 18 nt, Human
auauuguuccuaaguucu

SEQ ID NO: 3785792 - RNA, 19 nt, Human
auauuguuccuaaguucuu

SEQ ID NO: 3785793 - RNA, 13 nt, Human
auauuguugacaa

SEQ ID NO: 3785794 - RNA, 17 nt, Human
aggacuagaaccuggag

SEQ ID NO: 3785795 - RNA, 18 nt, Human
aggacuagaaccuggagg

SEQ ID NO: 3785796 - RNA, 15 nt, Human
aggacuaggguccug

SEQ ID NO: 3785797 - RNA, 19 nt, Human
aggacuaggguccugggga

SEQ ID NO: 3785798 - RNA, 16 nt, Human
aggacuauagcccagg

SEQ ID NO: 3785799 - RNA, 19 nt, Human
aggacuauagcccaggucc

SEQ ID NO: 3785800 - RNA, 22 nt, Human
aggacucacagguuggaagaga

SEQ ID NO: 3785801 - RNA, 19 nt, Human
aggacucagcuccccagag

SEQ ID NO: 3785802 - RNA, 18 nt, Human
aggacuccaggcagcaga

SEQ ID NO: 3785803 - RNA, 15 nt, Human
aggacuccaggccca

SEQ ID NO: 3785804 - RNA, 16 nt, Human
aggacuccaggcccaa

SEQ ID NO: 3785805 - RNA, 23 nt, Human
aggacuccaggcccaaggcuccc

SEQ ID NO: 3785806 - RNA, 17 nt, Human
aggacucccaacccugg

SEQ ID NO: 3785807 - RNA, 20 nt, Human
aggacucccaacccuggcuu

SEQ ID NO: 3785808 - RNA, 16 nt, Human
aggacuccccaggcca

SEQ ID NO: 3785809 - RNA, 14 nt, Human
aggacucccuccuc

SEQ ID NO: 3785810 - RNA, 16 nt, Human
aggacucccuccucac

SEQ ID NO: 3785811 - RNA, 19 nt, Human
aggacucccuccucaccuc

SEQ ID NO: 3785812 - RNA, 20 nt, Human
aggacucgcuuguaaauacc

SEQ ID NO: 3785813 - RNA, 21 nt, Human
aggacucgcuuguaaauacca

SEQ ID NO: 3785814 - RNA, 21 nt, Human
aggacucucacgauaugcaag

SEQ ID NO: 3785815 - RNA, 14 nt, Human
aggacucugcagcc

SEQ ID NO: 3785816 - RNA, 16 nt, Human
aggacucugcagccuc

SEQ ID NO: 3785817 - RNA, 13 nt, Human
aggacucugccuc

SEQ ID NO: 3785818 - RNA, 14 nt, Human
aggacucugccucc

SEQ ID NO: 3785819 - RNA, 19 nt, Human
aggacucugccuccucuuc

SEQ ID NO: 3785820 - RNA, 20 nt, Human
aggacugaauuaugaaacuu

SEQ ID NO: 3785821 - RNA, 17 nt, Human
aggacugacugaggcag

SEQ ID NO: 3785822 - RNA, 13 nt, Human
aggacugagcccc

SEQ ID NO: 3785823 - RNA, 24 nt, Human
aggacugagccccgcagaccuccc

SEQ ID NO: 3785824 - RNA, 17 nt, Human
aggacugaugucuccua

SEQ ID NO: 3785825 - RNA, 18 nt, Human
aggacugauuucagagug

SEQ ID NO: 3785826 - RNA, 20 nt, Human
aggacugcaccauugcugcu

SEQ ID NO: 3785827 - RNA, 20 nt, Human
aggacugcaugguaauuuau

SEQ ID NO: 3785828 - RNA, 21 nt, Human
aggacugccccgugcagacug

SEQ ID NO: 3785829 - RNA, 19 nt, Human
aggacugggagcccccagc

SEQ ID NO: 3785830 - RNA, 12 nt, Human
aggacugggcca

SEQ ID NO: 3785831 - RNA, 15 nt, Human
aggacugggccacuu

SEQ ID NO: 3785832 - RNA, 15 nt, Human
aggacuguauuugug

SEQ ID NO: 3785833 - RNA, 18 nt, Human
aggacuguauuugugacu

SEQ ID NO: 3785834 - RNA, 16 nt, Human
aggacugugacaggca

SEQ ID NO: 3785835 - RNA, 18 nt, Human
aggacugugacaggcagc

SEQ ID NO: 3785836 - RNA, 21 nt, Human
aggacugugacaggcagcaga

SEQ ID NO: 3785837 - RNA, 19 nt, Human
aggacuguuucaaacaugc

SEQ ID NO: 3785838 - RNA, 21 nt, Human
aggacuguuuuuuccugagcu

SEQ ID NO: 3785839 - RNA, 21 nt, Human
aggacuuaacggcuccaggau

SEQ ID NO: 3785840 - RNA, 20 nt, Human
aggacuuccuguccagcucc

SEQ ID NO: 3785841 - RNA, 14 nt, Human
aggacuucuuuaau

SEQ ID NO: 3785842 - RNA, 16 nt, Human
aggacuucuuuaauuu

SEQ ID NO: 3785843 - RNA, 16 nt, Human
aggacuugaaagcauc

SEQ ID NO: 3785844 - RNA, 19 nt, Human
aggacuugaaagcauccau

SEQ ID NO: 3785845 - RNA, 21 nt, Human
aggacuugaaagcauccaugu

SEQ ID NO: 3785846 - RNA, 16 nt, Human
aggacuuggucugauu

SEQ ID NO: 3785847 - RNA, 23 nt, Human
aggacuuggucugauuucaggau

SEQ ID NO: 3785848 - RNA, 16 nt, Human
aggacuuguuagaucu

SEQ ID NO: 3785849 - RNA, 20 nt, Human
aggacuuuauagaucagcca

SEQ ID NO: 3785850 - RNA, 17 nt, Human
aggacuuucugaagccu

SEQ ID NO: 3785851 - RNA, 22 nt, Human
aggacuuuucuuuguggcuucc

SEQ ID NO: 3785852 - RNA, 23 nt, Human
aggacuuuucuuuguggcuuccu

SEQ ID NO: 3785853 - RNA, 11 nt, Human
aggagaaacug

SEQ ID NO: 3785854 - RNA, 18 nt, Human
aggagaaacuggaacucu

SEQ ID NO: 3785855 - RNA, 19 nt, Human
aggagaaacuggaacucuc

SEQ ID NO: 3785856 - RNA, 12 nt, Human
aggagaacaaau

SEQ ID NO: 3785857 - RNA, 13 nt, Human
aggagaacaaaua

SEQ ID NO: 3785858 - RNA, 14 nt, Human
aggagaaccacuac

SEQ ID NO: 3785859 - RNA, 16 nt, Human
aggagaaccagauucu

SEQ ID NO: 3785860 - RNA, 15 nt, Human
aggagaacuugcugc

SEQ ID NO: 3785861 - RNA, 19 nt, Human
aggagaacuugcugccucg

SEQ ID NO: 3785862 - RNA, 13 nt, Human
aggagaagaaaau

SEQ ID NO: 3785863 - RNA, 16 nt, Human
aggagaagaaggaaau

SEQ ID NO: 3785864 - RNA, 15 nt, Human
aggagaagaguugag

SEQ ID NO: 3785865 - RNA, 11 nt, Human
aggagaagcca

SEQ ID NO: 3785866 - RNA, 12 nt, Human
aggagaagccag

SEQ ID NO: 3785867 - RNA, 15 nt, Human
aggagaagccaggaa

SEQ ID NO: 3785868 - RNA, 12 nt, Human
aggagaagcuca

SEQ ID NO: 3785869 - RNA, 14 nt, Human
aggagaagcucagc

SEQ ID NO: 3785870 - RNA, 20 nt, Human
aggagaauggcgugaacccg

SEQ ID NO: 3785871 - RNA, 16 nt, Human
aggagacaaaagagca

SEQ ID NO: 3785872 - RNA, 15 nt, Human
aggagacacagaugu

SEQ ID NO: 3785873 - RNA, 16 nt, Human
aggagacacagauguu

SEQ ID NO: 3785874 - RNA, 20 nt, Human
aggagacagguuagcugcuc

SEQ ID NO: 3785875 - RNA, 16 nt, Human
aggagacggaggggag

SEQ ID NO: 3785876 - RNA, 15 nt, Human
aggagacucaccucu

SEQ ID NO: 3785877 - RNA, 22 nt, Human
aggagagaaaauauauguauuu

SEQ ID NO: 3785878 - RNA, 15 nt, Human
aggagagaagaauga

SEQ ID NO: 3785879 - RNA, 12 nt, Human
aggagagagaaa

SEQ ID NO: 3785880 - RNA, 21 nt, Human
aggagagagaaagccaggcag

SEQ ID NO: 3785881 - RNA, 20 nt, Human
aggagagagcagcuucugcc

SEQ ID NO: 3785882 - RNA, 10 nt, Human
aggagagagg

SEQ ID NO: 3785883 - RNA, 18 nt, Human
aggagagauagccugugg

SEQ ID NO: 3785884 - RNA, 12 nt, Human
aggagagcagcg

SEQ ID NO: 3785885 - RNA, 14 nt, Human
aggagagccagaga

SEQ ID NO: 3785886 - RNA, 23 nt, Human
aggagagccagagaagugacagg

SEQ ID NO: 3785887 - RNA, 14 nt, Human
aggagagccagccc

SEQ ID NO: 3785888 - RNA, 15 nt, Human
aggagagccagcccu

SEQ ID NO: 3785889 - RNA, 16 nt, Human
aggagagccagcccuc

SEQ ID NO: 3785890 - RNA, 12 nt, Human
aggagagccugc

SEQ ID NO: 3785891 - RNA, 16 nt, Human
aggagagccugcugca

SEQ ID NO: 3785892 - RNA, 20 nt, Human
aggagagccugcugcauggg

SEQ ID NO: 3785893 - RNA, 13 nt, Human
aggagaggagaga

SEQ ID NO: 3785894 - RNA, 16 nt, Human
aggagaggagagccag

SEQ ID NO: 3785895 - RNA, 17 nt, Human
aggagaggagagccaga

SEQ ID NO: 3785896 - RNA, 15 nt, Human
aggagaggaugagag

SEQ ID NO: 3785897 - RNA, 19 nt, Human
aggagaggaugagagccca

SEQ ID NO: 3785898 - RNA, 20 nt, Human
aggagaggaugagagcccag

SEQ ID NO: 3785899 - RNA, 16 nt, Human
aggagaggauggccca

SEQ ID NO: 3785900 - RNA, 21 nt, Human
aggagaggcaacauccaaaau

SEQ ID NO: 3785901 - RNA, 16 nt, Human
aggagagggaaaaugu

SEQ ID NO: 3785902 - RNA, 17 nt, Human
aggagagggaaaauguu

SEQ ID NO: 3785903 - RNA, 14 nt, Human
aggagaggggcaca

SEQ ID NO: 3785904 - RNA, 16 nt, Human
aggagaggggcacagg

SEQ ID NO: 3785905 - RNA, 13 nt, Human
aggagaggggcag

SEQ ID NO: 3785906 - RNA, 19 nt, Human
aggagaggggcagaacagc

SEQ ID NO: 3785907 - RNA, 17 nt, Human
aggagaguagaacagau

SEQ ID NO: 3785908 - RNA, 24 nt, Human
aggagagucccagagcaggaggcc

SEQ ID NO: 3785909 - RNA, 14 nt, Human
aggagaguggccau

SEQ ID NO: 3785910 - RNA, 18 nt, Human
aggagauaucugagggag

SEQ ID NO: 3785911 - RNA, 23 nt, Human
aggagaucgagaccauccuggcu

SEQ ID NO: 3785912 - RNA, 18 nt, Human
aggagaugcuccuugggc

SEQ ID NO: 3785913 - RNA, 22 nt, Human
aggagaugcuccuugggcccuu

SEQ ID NO: 3785914 - RNA, 14 nt, Human
aggagaugggccuu

SEQ ID NO: 3785915 - RNA, 17 nt, Human
aggagauguaagagcuu

SEQ ID NO: 3785916 - RNA, 16 nt, Human
aggagauucugccuuu

SEQ ID NO: 3785917 - RNA, 21 nt, Human
aggagauucugccuuugccag

SEQ ID NO: 3785918 - RNA, 15 nt, Human
aggagauugagaagg

SEQ ID NO: 3785919 - RNA, 22 nt, Human
aggagauugagaaggagagaaa

SEQ ID NO: 3785920 - RNA, 16 nt, Human
aggagcaaagccuguu

SEQ ID NO: 3785921 - RNA, 16 nt, Human
aggagcaaaggcugag

SEQ ID NO: 3785922 - RNA, 22 nt, Human
aggagcaaaggcugagaacacu

SEQ ID NO: 3785923 - RNA, 17 nt, Human
aggagcaaauguuucug

SEQ ID NO: 3785924 - RNA, 16 nt, Human
aggagcacagguccca

SEQ ID NO: 3785925 - RNA, 16 nt, Human
aggagcacggcucugu

SEQ ID NO: 3785926 - RNA, 13 nt, Human
aggagcagccaca

SEQ ID NO: 3785927 - RNA, 16 nt, Human
aggagcagccucagaa

SEQ ID NO: 3785928 - RNA, 16 nt, Human
aggagcagcuucaguu

SEQ ID NO: 3785929 - RNA, 21 nt, Human
auaguaccauuuauacaaauu

SEQ ID NO: 3785930 - RNA, 15 nt, Human
auaguaccuuugcuc

SEQ ID NO: 3785931 - RNA, 18 nt, Human
auaguaccuuugcucuug

SEQ ID NO: 3785932 - RNA, 18 nt, Human
auaguacucuuuguagca

SEQ ID NO: 3785933 - RNA, 14 nt, Human
auaguacuggcaug

SEQ ID NO: 3785934 - RNA, 16 nt, Human
auaguagcauacauuu

SEQ ID NO: 3785935 - RNA, 12 nt, Human
auaguauaaacc

SEQ ID NO: 3785936 - RNA, 15 nt, Human
auaguauaucuggac

SEQ ID NO: 3785937 - RNA, 23 nt, Human
auaguauccauauuuuauuacug

SEQ ID NO: 3785938 - RNA, 16 nt, Human
auaguauccuccaggu

SEQ ID NO: 3785939 - RNA, 19 nt, Human
auaguauccuccagguuuu

SEQ ID NO: 3785940 - RNA, 20 nt, Human
auaguauccuccagguuuuu

SEQ ID NO: 3785941 - RNA, 17 nt, Human
auaguaugguggcuggg

SEQ ID NO: 3785942 - RNA, 18 nt, Human
auaguaugguggcugggu

SEQ ID NO: 3785943 - RNA, 21 nt, Human
auaguauuccauugugugagu

SEQ ID NO: 3785944 - RNA, 13 nt, Human
auaguauuugaaa

SEQ ID NO: 3785945 - RNA, 22 nt, Human
auaguauuugaaaacagaaauu

SEQ ID NO: 3785946 - RNA, 20 nt, Human
auaguauuugauucaaaaua

SEQ ID NO: 3785947 - RNA, 16 nt, Human
auaguauuuuuaucca

SEQ ID NO: 3785948 - RNA, 19 nt, Human
auagucaaaccauaaacuu

SEQ ID NO: 3785949 - RNA, 22 nt, Human
auagucaaaccauaaacuucau

SEQ ID NO: 3785950 - RNA, 16 nt, Human
auauuguugcauugcu

SEQ ID NO: 3785951 - RNA, 22 nt, Human
auauuguuguauaauuucgaga

SEQ ID NO: 3785952 - RNA, 19 nt, Human
auauuguuucugcauucau

SEQ ID NO: 3785953 - RNA, 18 nt, Human
auauuguuugguaaaugu

SEQ ID NO: 3785954 - RNA, 23 nt, Human
auauuuaaacaugguuacaauca

SEQ ID NO: 3785955 - RNA, 14 nt, Human
auauuuaaagacag

SEQ ID NO: 3785956 - RNA, 12 nt, Human
auauuuaaaggg

SEQ ID NO: 3785957 - RNA, 19 nt, Human
auauuuaacauuauuuaua

SEQ ID NO: 3785958 - RNA, 22 nt, Human
auauuuaacauuauuuauaugg

SEQ ID NO: 3785959 - RNA, 13 nt, Human
auauuuaacuggu

SEQ ID NO: 3785960 - RNA, 16 nt, Human
auauuuaacuggugca

SEQ ID NO: 3785961 - RNA, 16 nt, Human
auauuuaagaaaauac

SEQ ID NO: 3785962 - RNA, 19 nt, Human
auauuuaaguauucaagaa

SEQ ID NO: 3785963 - RNA, 9 nt, Human
auauuuaau

SEQ ID NO: 3785964 - RNA, 21 nt, Human
auauuuaaugcauuaaaccug

SEQ ID NO: 3785965 - RNA, 15 nt, Human
auauuuaauguuuua

SEQ ID NO: 3785966 - RNA, 14 nt, Human
auauuuaauuauua

SEQ ID NO: 3785967 - RNA, 22 nt, Human
auauuuacaacacuuuaauggg

SEQ ID NO: 3785968 - RNA, 13 nt, Human
auauuuacaaccu

SEQ ID NO: 3785969 - RNA, 23 nt, Human
auauuuacagugaaaauguaagc

SEQ ID NO: 3785970 - RNA, 15 nt, Human
auauuuacauaugaa

SEQ ID NO: 3785971 - RNA, 20 nt, Human
auauuuacauaugaaauuua

SEQ ID NO: 3785972 - RNA, 19 nt, Human
auauuuaccucagccuggg

SEQ ID NO: 3785973 - RNA, 14 nt, Human
auauuuacguauga

SEQ ID NO: 3785974 - RNA, 22 nt, Human
auauuuagauguaauuuugugu

SEQ ID NO: 3785975 - RNA, 19 nt, Human
auauuuagauuguuaaaau

SEQ ID NO: 3785976 - RNA, 19 nt, Human
auauuuagcaaauaauuuc

SEQ ID NO: 3785977 - RNA, 17 nt, Human
auauuuaguauugaaua

SEQ ID NO: 3785978 - RNA, 11 nt, Human
auauuuauaac

SEQ ID NO: 3785979 - RNA, 15 nt, Human
auauuuauaacucau

SEQ ID NO: 3785980 - RNA, 22 nt, Human
auauuuauauaauuauguuauu

SEQ ID NO: 3785981 - RNA, 12 nt, Human
auauuuauccaa

SEQ ID NO: 3785982 - RNA, 21 nt, Human
auauuuaugaagaaaauacuu

SEQ ID NO: 3785983 - RNA, 18 nt, Human
auauuuaugucuauuuaa

SEQ ID NO: 3785984 - RNA, 16 nt, Human
auauuuauucauuauu

SEQ ID NO: 3785985 - RNA, 14 nt, Human
auauuuauugugcu

SEQ ID NO: 3785986 - RNA, 13 nt, Human
auauuuauuuaaa

SEQ ID NO: 3785987 - RNA, 15 nt, Human
auauuuauuuuaaua

SEQ ID NO: 3785988 - RNA, 19 nt, Human
auauuuauuuuuuuuaagu

SEQ ID NO: 3785989 - RNA, 18 nt, Human
auauuucaaguacacuga

SEQ ID NO: 3785990 - RNA, 15 nt, Human
auauuucagauguaa

SEQ ID NO: 3785991 - RNA, 18 nt, Human
auauuucagauguaaugu

SEQ ID NO: 3785992 - RNA, 21 nt, Human
auauuucagauguaauguuuu

SEQ ID NO: 3785993 - RNA, 20 nt, Human
auauuucagguucuucagaa

SEQ ID NO: 3785994 - RNA, 21 nt, Human
auauuuccauauggauuuucu

SEQ ID NO: 3785995 - RNA, 20 nt, Human
auauuucccuaaaauacauu

SEQ ID NO: 3785996 - RNA, 19 nt, Human
auauuucccugaaggaacc

SEQ ID NO: 3785997 - RNA, 21 nt, Human
auauuucccugaaggaaccaa

SEQ ID NO: 3785998 - RNA, 18 nt, Human
auauuuccuauaccauuu

SEQ ID NO: 3785999 - RNA, 21 nt, Human
auauuuccuuaaacugugugg

SEQ ID NO: 3786000 - RNA, 14 nt, Human
auauuuccuuuaug

SEQ ID NO: 3786001 - RNA, 19 nt, Human
auauuuccuuuaugugaau

SEQ ID NO: 3786002 - RNA, 15 nt, Human
auauuucugauauaa

SEQ ID NO: 3786003 - RNA, 13 nt, Human
auauuucuucaaa

SEQ ID NO: 3786004 - RNA, 18 nt, Human
auauuucuucaaauaucu

SEQ ID NO: 3786005 - RNA, 19 nt, Human
auauuucuucguucuuuuu

SEQ ID NO: 3786006 - RNA, 19 nt, Human
auauuugaaauauugacuu

SEQ ID NO: 3786007 - RNA, 14 nt, Human
auauuugaaucuug

SEQ ID NO: 3786008 - RNA, 18 nt, Human
auauuugaaucuugucuc

SEQ ID NO: 3786009 - RNA, 15 nt, Human
auauuugacuugcau

SEQ ID NO: 3786010 - RNA, 15 nt, Human
auauuugauuuauua

SEQ ID NO: 3786011 - RNA, 20 nt, Human
auauuugcaaaguguauuag

SEQ ID NO: 3786012 - RNA, 13 nt, Human
auauuugcuuuuu

SEQ ID NO: 3786013 - RNA, 14 nt, Human
auauuuggaauaaa

SEQ ID NO: 3786014 - RNA, 23 nt, Human
auauuuggaauaaaaauuccaga

SEQ ID NO: 3786015 - RNA, 18 nt, Human
auauuuggcuuaaauaua

SEQ ID NO: 3786016 - RNA, 17 nt, Human
auauuuguaaaaugaca

SEQ ID NO: 3786017 - RNA, 19 nt, Human
auauuuguaaaaugacaau

SEQ ID NO: 3786018 - RNA, 11 nt, Human
auauuuguaca

SEQ ID NO: 3786019 - RNA, 20 nt, Human
auauuuguacuuucuguuaa

SEQ ID NO: 3786020 - RNA, 12 nt, Human
auauuuguagaa

SEQ ID NO: 3786021 - RNA, 20 nt, Human
auauuuguauuuaaaugaaa

SEQ ID NO: 3786022 - RNA, 19 nt, Human
auauuuguauuuauucuuu

SEQ ID NO: 3786023 - RNA, 22 nt, Human
auauuugugauagcacuuucua

SEQ ID NO: 3786024 - RNA, 17 nt, Human
auauuugugcuauagua

SEQ ID NO: 3786025 - RNA, 21 nt, Human
auauuuguuaaauauuuacau

SEQ ID NO: 3786026 - RNA, 23 nt, Human
auauuuguuuaguucagcaaaac

SEQ ID NO: 3786027 - RNA, 20 nt, Human
auauuuuaaaaucuccuaaa

SEQ ID NO: 3786028 - RNA, 14 nt, Human
auauuuuaaaauga

SEQ ID NO: 3786029 - RNA, 15 nt, Human
auauuuuaaaauuug

SEQ ID NO: 3786030 - RNA, 14 nt, Human
auauuuuaaacaga

SEQ ID NO: 3786031 - RNA, 14 nt, Human
auauuuuaagacga

SEQ ID NO: 3786032 - RNA, 14 nt, Human
auauuuuaagcauu

SEQ ID NO: 3786033 - RNA, 23 nt, Human
auauuuuaagcauuacucuugua

SEQ ID NO: 3786034 - RNA, 15 nt, Human
auauuuuaauuucaa

SEQ ID NO: 3786035 - RNA, 16 nt, Human
auauuuuacauaaauu

SEQ ID NO: 3786036 - RNA, 20 nt, Human
auauuuuacauaaauuuagu

SEQ ID NO: 3786037 - RNA, 17 nt, Human
auauuuuaccucuuauu

SEQ ID NO: 3786038 - RNA, 14 nt, Human
auauuuuauaauuu

SEQ ID NO: 3786039 - RNA, 13 nt, Human
auauuuuaugauc

SEQ ID NO: 3786040 - RNA, 14 nt, Human
auauuuuaugguua

SEQ ID NO: 3786041 - RNA, 15 nt, Human
auauuuuaugguuau

SEQ ID NO: 3786042 - RNA, 21 nt, Human
auauuuuauuucaauguaauu

SEQ ID NO: 3786043 - RNA, 14 nt, Human
auauuuuauuuuua

SEQ ID NO: 3786044 - RNA, 19 nt, Human
auauuuucaacgcagcccu

SEQ ID NO: 3786045 - RNA, 13 nt, Human
auauuuucacaau

SEQ ID NO: 3786046 - RNA, 21 nt, Human
auauuuucaccauuugauuau

SEQ ID NO: 3786047 - RNA, 18 nt, Human
auauuuucaugcuguuca

SEQ ID NO: 3786048 - RNA, 17 nt, Human
auauuuucguaugaaaa

SEQ ID NO: 3786049 - RNA, 19 nt, Human
auauuuucguaugaaaaug

SEQ ID NO: 3786050 - RNA, 13 nt, Human
auauuuucucuag

SEQ ID NO: 3786051 - RNA, 19 nt, Human
auauuuucucuaggaaaua

SEQ ID NO: 3786052 - RNA, 18 nt, Human
auauuuucucuguacuuu

SEQ ID NO: 3786053 - RNA, 12 nt, Human
auauuuucugug

SEQ ID NO: 3786054 - RNA, 21 nt, Human
auauuuucugugcagccacug

SEQ ID NO: 3786055 - RNA, 12 nt, Human
auauuuucuuuc

SEQ ID NO: 3786056 - RNA, 14 nt, Human
auauuuugauaaua

SEQ ID NO: 3786057 - RNA, 15 nt, Human
auauuuugaucuuca

SEQ ID NO: 3786058 - RNA, 20 nt, Human
auauuuuguaaaauguauua

SEQ ID NO: 3786059 - RNA, 14 nt, Human
auauuuuguaugca

SEQ ID NO: 3786060 - RNA, 17 nt, Human
auauuuuguaugcaagc

SEQ ID NO: 3786061 - RNA, 14 nt, Human
auauuuugucuaaa

SEQ ID NO: 3786062 - RNA, 22 nt, Human
auauuuugugugaaauugcaua

SEQ ID NO: 3786063 - RNA, 17 nt, Human
auauuuuuaaaaaauga

SEQ ID NO: 3786064 - RNA, 14 nt, Human
auauuuuuaaagau

SEQ ID NO: 3786065 - RNA, 14 nt, Human
auauuuuuaagaua

SEQ ID NO: 3786066 - RNA, 20 nt, Human
auauuuuuaagauaauaaua

SEQ ID NO: 3786067 - RNA, 13 nt, Human
auauuuuuauaga

SEQ ID NO: 3786068 - RNA, 19 nt, Human
auauuuuuauagacaaaua

SEQ ID NO: 3786069 - RNA, 16 nt, Human
auauuuuuauauuuac

SEQ ID NO: 3786070 - RNA, 18 nt, Human
auauuuuuauauuuaguu

SEQ ID NO: 3786071 - RNA, 20 nt, Human
auauuuuuauauuuccuuua

SEQ ID NO: 3786072 - RNA, 14 nt, Human
auauuuuuaucuuu

SEQ ID NO: 3786073 - RNA, 14 nt, Human
auauuuuucacaua

SEQ ID NO: 3786074 - RNA, 16 nt, Human
aggauuccucuuuucu

SEQ ID NO: 3786075 - RNA, 14 nt, Human
aggauucuaaaaug

SEQ ID NO: 3786076 - RNA, 20 nt, Human
aggauucucaccagcugugu

SEQ ID NO: 3786077 - RNA, 21 nt, Human
aggauucugcuggccucugcg

SEQ ID NO: 3786078 - RNA, 17 nt, Human
aggauucuuccucccuc

SEQ ID NO: 3786079 - RNA, 24 nt, Human
aggauugaaaauguccaggaaagu

SEQ ID NO: 3786080 - RNA, 19 nt, Human
aggauugaacuucuuugaa

SEQ ID NO: 3786081 - RNA, 13 nt, Human
aggauugaagagc

SEQ ID NO: 3786082 - RNA, 17 nt, Human
aggauugauuaugcaga

SEQ ID NO: 3786083 - RNA, 16 nt, Human
aggauugcgagagaug

SEQ ID NO: 3786084 - RNA, 23 nt, Human
aggauugcgagagauguguguug

SEQ ID NO: 3786085 - RNA, 17 nt, Human
aggauugcuacuguccu

SEQ ID NO: 3786086 - RNA, 22 nt, Human
aggauugcuacuguccuaccca

SEQ ID NO: 3786087 - RNA, 19 nt, Human
aggauugcuugagcccagg

SEQ ID NO: 3786088 - RNA, 20 nt, Human
aggauugcuugagcccagga

SEQ ID NO: 3786089 - RNA, 21 nt, Human
aggauuggggaagagagccug

SEQ ID NO: 3786090 - RNA, 18 nt, Human
aggauuuaaaaacuggaa

SEQ ID NO: 3786091 - RNA, 12 nt, Human
aggauuuaacag

SEQ ID NO: 3786092 - RNA, 18 nt, Human
aggauuuaacagucauuu

SEQ ID NO: 3786093 - RNA, 21 nt, Human
aggauuuaacagucauuuaaa

SEQ ID NO: 3786094 - RNA, 14 nt, Human
aggauuucaagccu

SEQ ID NO: 3786095 - RNA, 15 nt, Human
aggauuucaagccug

SEQ ID NO: 3786096 - RNA, 20 nt, Human
aggauuucaugauuucauuu

SEQ ID NO: 3786097 - RNA, 20 nt, Human
aggauuugguccgucauaac

SEQ ID NO: 3786098 - RNA, 19 nt, Human
aggauuuuaacaaaagcaa

SEQ ID NO: 3786099 - RNA, 23 nt, Human
aggauuuuaacaaaagcaagacu

SEQ ID NO: 3786100 - RNA, 23 nt, Human
aggauuuuaacuuaacugaaaug

SEQ ID NO: 3786101 - RNA, 22 nt, Human
aggauuuuagcuaggauuugaa

SEQ ID NO: 3786102 - RNA, 14 nt, Human
aggauuuuaugcuu

SEQ ID NO: 3786103 - RNA, 20 nt, Human
aggauuuuaugcuuuaaaca

SEQ ID NO: 3786104 - RNA, 19 nt, Human
aggauuuugauccaagcug

SEQ ID NO: 3786105 - RNA, 21 nt, Human
aggauuuuuuuuaauguuuaa

SEQ ID NO: 3786106 - RNA, 21 nt, Human
aggauuuuuuuuuuuuuuuga

SEQ ID NO: 3786107 - RNA, 15 nt, Human
aggcaaaaauguaaa

SEQ ID NO: 3786108 - RNA, 17 nt, Human
aggcaaaauccuugcuu

SEQ ID NO: 3786109 - RNA, 19 nt, Human
aggcaaaauccuugcuuau

SEQ ID NO: 3786110 - RNA, 18 nt, Human
aggcaaacauuuucucuu

SEQ ID NO: 3786111 - RNA, 22 nt, Human
aggcaaacauuuucucuuagaa

SEQ ID NO: 3786112 - RNA, 14 nt, Human
aggcaaagcuggcu

SEQ ID NO: 3786113 - RNA, 16 nt, Human
aggcaaaggguccaga

SEQ ID NO: 3786114 - RNA, 15 nt, Human
aggcaaauaaaauuc

SEQ ID NO: 3786115 - RNA, 15 nt, Human
aggcaaauuugcauu

SEQ ID NO: 3786116 - RNA, 17 nt, Human
aggcaacucaucuuagg

SEQ ID NO: 3786117 - RNA, 17 nt, Human
aggcaacugaacaaaaa

SEQ ID NO: 3786118 - RNA, 18 nt, Human
aggcaacugaacaaaaaa

SEQ ID NO: 3786119 - RNA, 19 nt, Human
aggcaacugaggcagacag

SEQ ID NO: 3786120 - RNA, 19 nt, Human
aggcaacugcauuggcuuu

SEQ ID NO: 3786121 - RNA, 12 nt, Human
aggcaagagaau

SEQ ID NO: 3786122 - RNA, 14 nt, Human
aggcaagcaccucc

SEQ ID NO: 3786123 - RNA, 14 nt, Human
aggcaagccaggcu

SEQ ID NO: 3786124 - RNA, 16 nt, Human
aggcaagccaggcuca

SEQ ID NO: 3786125 - RNA, 14 nt, Human
aggcaaggcaggug

SEQ ID NO: 3786126 - RNA, 20 nt, Human
aggcaaggcaggugccucca

SEQ ID NO: 3786127 - RNA, 18 nt, Human
aggcaaggcuaugugauu

SEQ ID NO: 3786128 - RNA, 17 nt, Human
aggcaaggcugucaauu

SEQ ID NO: 3786129 - RNA, 19 nt, Human
aggcaaguuaagagaaacu

SEQ ID NO: 3786130 - RNA, 20 nt, Human
aggcaaguuaagagaaacuu

SEQ ID NO: 3786131 - RNA, 18 nt, Human
aggcaaguuucuagcuag

SEQ ID NO: 3786132 - RNA, 17 nt, Human
aggcaauaaaaaucaua

SEQ ID NO: 3786133 - RNA, 14 nt, Human
aggcaaugcuggcu

SEQ ID NO: 3786134 - RNA, 15 nt, Human
aggcaaugcuggcug

SEQ ID NO: 3786135 - RNA, 16 nt, Human
aggcaaugcuggcugu

SEQ ID NO: 3786136 - RNA, 19 nt, Human
aggcaauggccuaaacuuc

SEQ ID NO: 3786137 - RNA, 17 nt, Human
aggcaaugucaggaaca

SEQ ID NO: 3786138 - RNA, 22 nt, Human
aggcaaugucaggaacagaagg

SEQ ID NO: 3786139 - RNA, 14 nt, Human
aggcaauucuccug

SEQ ID NO: 3786140 - RNA, 13 nt, Human
aggcacaaaauga

SEQ ID NO: 3786141 - RNA, 17 nt, Human
aggcacaaaaugaugga

SEQ ID NO: 3786142 - RNA, 14 nt, Human
aggcacaauauggg

SEQ ID NO: 3786143 - RNA, 22 nt, Human
aggcacacaaggggcccuugga

SEQ ID NO: 3786144 - RNA, 13 nt, Human
aggcacacagcua

SEQ ID NO: 3786145 - RNA, 14 nt, Human
aggcacacagcugc

SEQ ID NO: 3786146 - RNA, 16 nt, Human
aucauuauaaacguga

SEQ ID NO: 3786147 - RNA, 16 nt, Human
aucauuauguaauguc

SEQ ID NO: 3786148 - RNA, 22 nt, Human
aucauucacuucacugugcugu

SEQ ID NO: 3786149 - RNA, 14 nt, Human
aucauucagaaaug

SEQ ID NO: 3786150 - RNA, 21 nt, Human
aucauucaucuucuucuuuaa

SEQ ID NO: 3786151 - RNA, 13 nt, Human
aucauucccucuc

SEQ ID NO: 3786152 - RNA, 22 nt, Human
aucauucccucucaucucaggu

SEQ ID NO: 3786153 - RNA, 14 nt, Human
aucauuccuuuuua

SEQ ID NO: 3786154 - RNA, 21 nt, Human
aucauuccuuuuuauuuauau

SEQ ID NO: 3786155 - RNA, 12 nt, Human
aucauucucugu

SEQ ID NO: 3786156 - RNA, 14 nt, Human
aucauucucugucu

SEQ ID NO: 3786157 - RNA, 23 nt, Human
aucauucuuacuaaaaaguauaa

SEQ ID NO: 3786158 - RNA, 14 nt, Human
aucauugaaaucuu

SEQ ID NO: 3786159 - RNA, 21 nt, Human
aucauugaaaucuuuuugcuu

SEQ ID NO: 3786160 - RNA, 21 nt, Human
aucauugcacucuagccuggg

SEQ ID NO: 3786161 - RNA, 22 nt, Human
aucauugcugucugcagccuug

SEQ ID NO: 3786162 - RNA, 23 nt, Human
aucauugcuuugaagcaguugug

SEQ ID NO: 3786163 - RNA, 20 nt, Human
aucauuggaacaacugauac

SEQ ID NO: 3786164 - RNA, 21 nt, Human
aucauuggauucugagagcug

SEQ ID NO: 3786165 - RNA, 16 nt, Human
aucauuguacaguuug

SEQ ID NO: 3786166 - RNA, 18 nt, Human
aucauuguacaguuuguu

SEQ ID NO: 3786167 - RNA, 22 nt, Human
aucauuguacauagcauguuua

SEQ ID NO: 3786168 - RNA, 16 nt, Human
aucauuguccagagcu

SEQ ID NO: 3786169 - RNA, 23 nt, Human
aucauuguccagagcugcuuccc

SEQ ID NO: 3786170 - RNA, 13 nt, Human
aucauugugaaau

SEQ ID NO: 3786171 - RNA, 18 nt, Human
aucauuguucuuuucaau

SEQ ID NO: 3786172 - RNA, 13 nt, Human
aucauuuaauaau

SEQ ID NO: 3786173 - RNA, 22 nt, Human
aucauuuauuuuuuacauuauu

SEQ ID NO: 3786174 - RNA, 22 nt, Human
aucauuucaccugcugcuugcc

SEQ ID NO: 3786175 - RNA, 15 nt, Human
aucauuucuugggcc

SEQ ID NO: 3786176 - RNA, 18 nt, Human
aucauuucuugggcccuc

SEQ ID NO: 3786177 - RNA, 19 nt, Human
aucauuucuugggcccucc

SEQ ID NO: 3786178 - RNA, 22 nt, Human
aucauuucuugggcccuccuga

SEQ ID NO: 3786179 - RNA, 23 nt, Human
aucauuucuuuuugggagagacu

SEQ ID NO: 3786180 - RNA, 11 nt, Human
aucauuugagu

SEQ ID NO: 3786181 - RNA, 15 nt, Human
aucauuugcccuuaa

SEQ ID NO: 3786182 - RNA, 19 nt, Human
aucauuuuauaugucaaag

SEQ ID NO: 3786183 - RNA, 14 nt, Human
aucauuuucccccc

SEQ ID NO: 3786184 - RNA, 17 nt, Human
aucauuuuccccccacu

SEQ ID NO: 3786185 - RNA, 22 nt, Human
aucauuuugcaaucccuuaaua

SEQ ID NO: 3786186 - RNA, 17 nt, Human
aucauuuugcauucaaa

SEQ ID NO: 3786187 - RNA, 16 nt, Human
aucauuuuuguacagu

SEQ ID NO: 3786188 - RNA, 22 nt, Human
aucauuuuuguacaguuugcug

SEQ ID NO: 3786189 - RNA, 14 nt, Human
aucauuuuuguauc

SEQ ID NO: 3786190 - RNA, 14 nt, Human
aucauuuuuuccug

SEQ ID NO: 3786191 - RNA, 19 nt, Human
auccaaaagaagcccccag

SEQ ID NO: 3786192 - RNA, 13 nt, Human
auccaaaagcuuu

SEQ ID NO: 3786193 - RNA, 16 nt, Human
auccaaaaguggaagu

SEQ ID NO: 3786194 - RNA, 19 nt, Human
auccaaaaucuugaucagu

SEQ ID NO: 3786195 - RNA, 14 nt, Human
auccaaaaugugua

SEQ ID NO: 3786196 - RNA, 17 nt, Human
auccaaaauguguauuu

SEQ ID NO: 3786197 - RNA, 18 nt, Human
auccaaacaauuuaaaaa

SEQ ID NO: 3786198 - RNA, 21 nt, Human
auccaaacauguauuuaugua

SEQ ID NO: 3786199 - RNA, 13 nt, Human
auccaaauauugu

SEQ ID NO: 3786200 - RNA, 20 nt, Human
auccaaauugugcuucuccc

SEQ ID NO: 3786201 - RNA, 22 nt, Human
auccaaauuuuuuuuuaaagca

SEQ ID NO: 3786202 - RNA, 17 nt, Human
auccaaccauuuucauu

SEQ ID NO: 3786203 - RNA, 18 nt, Human
auccaaccccccaccugc

SEQ ID NO: 3786204 - RNA, 20 nt, Human
auccaaccccccaccugcca

SEQ ID NO: 3786205 - RNA, 16 nt, Human
auccaacuaaugccuu

SEQ ID NO: 3786206 - RNA, 19 nt, Human
auccaagauauuuuaaaau

SEQ ID NO: 3786207 - RNA, 16 nt, Human
auccaagcaaauguga

SEQ ID NO: 3786208 - RNA, 16 nt, Human
auccaagcaagacuga

SEQ ID NO: 3786209 - RNA, 15 nt, Human
auccaagccuccaca

SEQ ID NO: 3786210 - RNA, 18 nt, Human
auccaagccuccacagcg

SEQ ID NO: 3786211 - RNA, 13 nt, Human
auccaagcucccu

SEQ ID NO: 3786212 - RNA, 14 nt, Human
auccaagcucccug

SEQ ID NO: 3786213 - RNA, 17 nt, Human
auccaagcucccugccc

SEQ ID NO: 3786214 - RNA, 18 nt, Human
auccaagcucccugcccc

SEQ ID NO: 3786215 - RNA, 12 nt, Human
auccaagugaac

SEQ ID NO: 3786216 - RNA, 17 nt, Human
auccaauccucacuggg

SEQ ID NO: 3786217 - RNA, 18 nt, Human
auccaauccucacugggu

SEQ ID NO: 3786218 - RNA, 21 nt, Human
auauugcugauggugcaauga

SEQ ID NO: 3786219 - RNA, 21 nt, Human
auauugcuuuuucuaaugugg

SEQ ID NO: 3786220 - RNA, 19 nt, Human
auauuggacaaagaaccuu

SEQ ID NO: 3786221 - RNA, 13 nt, Human
auauugguauuca

SEQ ID NO: 3786222 - RNA, 19 nt, Human
auauugguugggaugacuu

SEQ ID NO: 3786223 - RNA, 20 nt, Human
auauugguugggaugacuug

SEQ ID NO: 3786224 - RNA, 13 nt, Human
auauugguuuuau

SEQ ID NO: 3786225 - RNA, 12 nt, Human
auauuguaagaa

SEQ ID NO: 3786226 - RNA, 15 nt, Human
auauuguaagaaaua

SEQ ID NO: 3786227 - RNA, 16 nt, Human
auauuguaagaaauac

SEQ ID NO: 3786228 - RNA, 15 nt, Human
auauuguacacuuuu

SEQ ID NO: 3786229 - RNA, 12 nt, Human
auauuguacagu

SEQ ID NO: 3786230 - RNA, 16 nt, Human
auauugucagauauuu

SEQ ID NO: 3786231 - RNA, 17 nt, Human
auauugucagauauuuu

SEQ ID NO: 3786232 - RNA, 17 nt, Human
auauugucuuuuuguau

SEQ ID NO: 3786233 - RNA, 14 nt, Human
auauugugaacauu

SEQ ID NO: 3786234 - RNA, 21 nt, Human
auauuguggguguuaauuuuu

SEQ ID NO: 3786235 - RNA, 12 nt, Human
auauuguuaagg

SEQ ID NO: 3786236 - RNA, 20 nt, Human
auauuguucaaacaauauca

SEQ ID NO: 3786237 - RNA, 22 nt, Human
auauuguucaaacaauaucaua

SEQ ID NO: 3786238 - RNA, 13 nt, Human
auauuguuccuaa

SEQ ID NO: 3786239 - RNA, 14 nt, Human
auauuguuugcuaa

SEQ ID NO: 3786240 - RNA, 19 nt, Human
auauuguuuuacaauaguu

SEQ ID NO: 3786241 - RNA, 19 nt, Human
auauuuaaaaacaaaaggc

SEQ ID NO: 3786242 - RNA, 22 nt, Human
auauuuaaaaacaaaaggcaau

SEQ ID NO: 3786243 - RNA, 16 nt, Human
auauuuaaaaauaagu

SEQ ID NO: 3786244 - RNA, 18 nt, Human
auauuuaaaaaugucuug

SEQ ID NO: 3786245 - RNA, 16 nt, Human
auauuuaaaaguguca

SEQ ID NO: 3786246 - RNA, 14 nt, Human
auauuuaaacagca

SEQ ID NO: 3786247 - RNA, 15 nt, Human
auauuuaaacucaag

SEQ ID NO: 3786248 - RNA, 23 nt, Human
auauuuaaacucaagacaaugca

SEQ ID NO: 3786249 - RNA, 19 nt, Human
auauuuaaagggaaauuga

SEQ ID NO: 3786250 - RNA, 19 nt, Human
auauuuaaauguaaagaca

SEQ ID NO: 3786251 - RNA, 19 nt, Human
auauuuaagaaaauacaau

SEQ ID NO: 3786252 - RNA, 20 nt, Human
auauuuaagaaaauacaaua

SEQ ID NO: 3786253 - RNA, 18 nt, Human
auauuuaagcaacaucuu

SEQ ID NO: 3786254 - RNA, 23 nt, Human
auauuuaaggagauguaagagcu

SEQ ID NO: 3786255 - RNA, 21 nt, Human
auauuuaaguauaaaauacaa

SEQ ID NO: 3786256 - RNA, 20 nt, Human
auauuuaaguauucaagaaa

SEQ ID NO: 3786257 - RNA, 13 nt, Human
auauuuaaucuuu

SEQ ID NO: 3786258 - RNA, 12 nt, Human
auauuuaaugau

SEQ ID NO: 3786259 - RNA, 13 nt, Human
auauuuaaugaua

SEQ ID NO: 3786260 - RNA, 23 nt, Human
auauuuaaugauaaguaaaugcu

SEQ ID NO: 3786261 - RNA, 15 nt, Human
auauuuaauguugaa

SEQ ID NO: 3786262 - RNA, 16 nt, Human
auauuuaauguugaac

SEQ ID NO: 3786263 - RNA, 20 nt, Human
auauuuaauguugaacaaaa

SEQ ID NO: 3786264 - RNA, 17 nt, Human
auauuuacaauguauua

SEQ ID NO: 3786265 - RNA, 21 nt, Human
auauuuacaauguauuaagcc

SEQ ID NO: 3786266 - RNA, 16 nt, Human
auauuuaccucagccu

SEQ ID NO: 3786267 - RNA, 18 nt, Human
auauuuacuaaaauggac

SEQ ID NO: 3786268 - RNA, 16 nt, Human
auauuuauaaaaauaa

SEQ ID NO: 3786269 - RNA, 22 nt, Human
auauuuauaacucaucauaaaa

SEQ ID NO: 3786270 - RNA, 19 nt, Human
auauuuauagguacccaau

SEQ ID NO: 3786271 - RNA, 14 nt, Human
auauuuauauaauu

SEQ ID NO: 3786272 - RNA, 15 nt, Human
auauuuauauauauu

SEQ ID NO: 3786273 - RNA, 14 nt, Human
auauuuauccacua

SEQ ID NO: 3786274 - RNA, 15 nt, Human
auauuuaugaagaaa

SEQ ID NO: 3786275 - RNA, 19 nt, Human
auauuuaugaagaaaauac

SEQ ID NO: 3786276 - RNA, 14 nt, Human
auauuuauguagau

SEQ ID NO: 3786277 - RNA, 20 nt, Human
auauuuauguagaugugcau

SEQ ID NO: 3786278 - RNA, 19 nt, Human
auauuuaugucuauuuaag

SEQ ID NO: 3786279 - RNA, 21 nt, Human
auauuuaugucuauuuaagcc

SEQ ID NO: 3786280 - RNA, 16 nt, Human
auauuuauuaaauaaa

SEQ ID NO: 3786281 - RNA, 18 nt, Human
auauuuauuaaauaaaau

SEQ ID NO: 3786282 - RNA, 20 nt, Human
auauuuauuaaauaaaauca

SEQ ID NO: 3786283 - RNA, 23 nt, Human
auauuuauuaaauaaaaucaauu

SEQ ID NO: 3786284 - RNA, 14 nt, Human
auauuuauuaccuc

SEQ ID NO: 3786285 - RNA, 19 nt, Human
auauuuauuacuguaagaa

SEQ ID NO: 3786286 - RNA, 22 nt, Human
auauuuauuacuguaagaaaau

SEQ ID NO: 3786287 - RNA, 23 nt, Human
auauuuauucauuauuugucaaa

SEQ ID NO: 3786288 - RNA, 13 nt, Human
auauuuauugacu

SEQ ID NO: 3786289 - RNA, 21 nt, Human
auauuuauugcuuuauaaaua

SEQ ID NO: 3786290 - RNA, 13 nt, Human
auauuuauuguau

SEQ ID NO: 3786291 - RNA, 17 nt, Human
auauuuauuuaaagcau

SEQ ID NO: 3786292 - RNA, 17 nt, Human
auauuuauuuauuuauu

SEQ ID NO: 3786293 - RNA, 17 nt, Human
auauuuauuuuaauaau

SEQ ID NO: 3786294 - RNA, 21 nt, Human
auauuuauuuucuuucuguaa

SEQ ID NO: 3786295 - RNA, 13 nt, Human
auauuuauuuuua

SEQ ID NO: 3786296 - RNA, 12 nt, Human
auauuucagaaa

SEQ ID NO: 3786297 - RNA, 14 nt, Human
auauuucagaaaua

SEQ ID NO: 3786298 - RNA, 15 nt, Human
auauuucagaaauac

SEQ ID NO: 3786299 - RNA, 20 nt, Human
auauuucagaaauacagaua

SEQ ID NO: 3786300 - RNA, 22 nt, Human
auccaugacaggccugaagaua

SEQ ID NO: 3786301 - RNA, 24 nt, Human
auccaugacaggccugaagauauu

SEQ ID NO: 3786302 - RNA, 20 nt, Human
auccaugaccuaguuuucca

SEQ ID NO: 3786303 - RNA, 17 nt, Human
auccauggccagcagca

SEQ ID NO: 3786304 - RNA, 23 nt, Human
auccauggccagcagcaccugcc

SEQ ID NO: 3786305 - RNA, 19 nt, Human
auccaugggggcagggcau

SEQ ID NO: 3786306 - RNA, 13 nt, Human
auccauguaacug

SEQ ID NO: 3786307 - RNA, 22 nt, Human
auccauguacuguaguuuuucu

SEQ ID NO: 3786308 - RNA, 13 nt, Human
auccauuaauuua

SEQ ID NO: 3786309 - RNA, 16 nt, Human
auccauuaggccagca

SEQ ID NO: 3786310 - RNA, 17 nt, Human
auccauuaggccagcaa

SEQ ID NO: 3786311 - RNA, 17 nt, Human
auccauucccaagaaau

SEQ ID NO: 3786312 - RNA, 14 nt, Human
auccauuccucagg

SEQ ID NO: 3786313 - RNA, 18 nt, Human
auccauuccucagggaca

SEQ ID NO: 3786314 - RNA, 13 nt, Human
auccauucuuucu

SEQ ID NO: 3786315 - RNA, 16 nt, Human
auccauucuuucugau

SEQ ID NO: 3786316 - RNA, 21 nt, Human
auccauuucaucuauuucuga

SEQ ID NO: 3786317 - RNA, 22 nt, Human
auccauuucaucuauuucugag

SEQ ID NO: 3786318 - RNA, 23 nt, Human
auccauuucaucuauuucugaga

SEQ ID NO: 3786319 - RNA, 13 nt, Human
auccauuucuaau

SEQ ID NO: 3786320 - RNA, 14 nt, Human
auccauuucuaauu

SEQ ID NO: 3786321 - RNA, 23 nt, Human
auccauuugcguuccaugaugcu

SEQ ID NO: 3786322 - RNA, 19 nt, Human
auccauuuggaaaucuuua

SEQ ID NO: 3786323 - RNA, 21 nt, Human
auccauuuggaaaucuuuaaa

SEQ ID NO: 3786324 - RNA, 19 nt, Human
aucccaaacccuucagugc

SEQ ID NO: 3786325 - RNA, 22 nt, Human
aucccaaagccuugugucuaca

SEQ ID NO: 3786326 - RNA, 22 nt, Human
aucccaaaguuguuguaaccug

SEQ ID NO: 3786327 - RNA, 16 nt, Human
aucccaacacugccag

SEQ ID NO: 3786328 - RNA, 20 nt, Human
aucccaaccagugccaagga

SEQ ID NO: 3786329 - RNA, 23 nt, Human
aucccaacugucuuuuuuucccu

SEQ ID NO: 3786330 - RNA, 17 nt, Human
aucccaaucauuguugc

SEQ ID NO: 3786331 - RNA, 14 nt, Human
aucccacccacaug

SEQ ID NO: 3786332 - RNA, 23 nt, Human
aucccacccacaugugacacaua

SEQ ID NO: 3786333 - RNA, 18 nt, Human
aucccaccuccaucccag

SEQ ID NO: 3786334 - RNA, 18 nt, Human
aucccacgcuucucuuug

SEQ ID NO: 3786335 - RNA, 18 nt, Human
aucccacucacaacagcu

SEQ ID NO: 3786336 - RNA, 22 nt, Human
aucccacuuucuauagcagauu

SEQ ID NO: 3786337 - RNA, 16 nt, Human
aucccagcaccugccu

SEQ ID NO: 3786338 - RNA, 21 nt, Human
aucccagcaccugccuccucg

SEQ ID NO: 3786339 - RNA, 17 nt, Human
aucccagcacuuuggga

SEQ ID NO: 3786340 - RNA, 19 nt, Human
aucccagcacuuugggagg

SEQ ID NO: 3786341 - RNA, 21 nt, Human
aucccagcacuuugggaggcc

SEQ ID NO: 3786342 - RNA, 22 nt, Human
aucccagcacuuugggaggcug

SEQ ID NO: 3786343 - RNA, 14 nt, Human
aucccagcccccug

SEQ ID NO: 3786344 - RNA, 19 nt, Human
aucccagcccccugaccac

SEQ ID NO: 3786345 - RNA, 22 nt, Human
aucccagccggccaauggaaac

SEQ ID NO: 3786346 - RNA, 18 nt, Human
aucccagcggcuggugca

SEQ ID NO: 3786347 - RNA, 23 nt, Human
aucccagcggcuggugcagggcc

SEQ ID NO: 3786348 - RNA, 18 nt, Human
aucccagcuacuugggaa

SEQ ID NO: 3786349 - RNA, 13 nt, Human
aucccagcugccu

SEQ ID NO: 3786350 - RNA, 22 nt, Human
aucccaggacaccacacccagc

SEQ ID NO: 3786351 - RNA, 23 nt, Human
aucccaggaucgcaagagccaug

SEQ ID NO: 3786352 - RNA, 19 nt, Human
aucccaggcuucacccuga

SEQ ID NO: 3786353 - RNA, 17 nt, Human
aucccaggggcccaagg

SEQ ID NO: 3786354 - RNA, 19 nt, Human
aucccaggggcccaaggcg

SEQ ID NO: 3786355 - RNA, 11 nt, Human
aucccauccca

SEQ ID NO: 3786356 - RNA, 15 nt, Human
aucccaucccgcucu

SEQ ID NO: 3786357 - RNA, 20 nt, Human
aucccaucccgcucuuuucc

SEQ ID NO: 3786358 - RNA, 21 nt, Human
aucccaucgucucggccuuca

SEQ ID NO: 3786359 - RNA, 19 nt, Human
aucccaugagacccuggug

SEQ ID NO: 3786360 - RNA, 16 nt, Human
aucccaugagccucag

SEQ ID NO: 3786361 - RNA, 20 nt, Human
aggcagaucugugccccaug

SEQ ID NO: 3786362 - RNA, 16 nt, Human
aggcagauugaaaagg

SEQ ID NO: 3786363 - RNA, 22 nt, Human
aggcagauuuuacagagcgcac

SEQ ID NO: 3786364 - RNA, 23 nt, Human
aggcagcaaggcccgagcagcug

SEQ ID NO: 3786365 - RNA, 19 nt, Human
aggcagcagugugaggcca

SEQ ID NO: 3786366 - RNA, 20 nt, Human
aggcagcagugugaggccag

SEQ ID NO: 3786367 - RNA, 22 nt, Human
aggcagcagugugaggccaggg

SEQ ID NO: 3786368 - RNA, 13 nt, Human
aggcagccagcca

SEQ ID NO: 3786369 - RNA, 17 nt, Human
aggcagccagugcccug

SEQ ID NO: 3786370 - RNA, 19 nt, Human
aggcagccagugcccugag

SEQ ID NO: 3786371 - RNA, 12 nt, Human
aggcagcccagg

SEQ ID NO: 3786372 - RNA, 16 nt, Human
aggcagccccauucug

SEQ ID NO: 3786373 - RNA, 17 nt, Human
aggcagccccauucugc

SEQ ID NO: 3786374 - RNA, 20 nt, Human
aggcagccccauucugccug

SEQ ID NO: 3786375 - RNA, 21 nt, Human
aggcagccccauucugccugc

SEQ ID NO: 3786376 - RNA, 22 nt, Human
aggcagccccauucugccugcc

SEQ ID NO: 3786377 - RNA, 15 nt, Human
aggcagcccugccau

SEQ ID NO: 3786378 - RNA, 20 nt, Human
aggcagcccugucugaagga

SEQ ID NO: 3786379 - RNA, 13 nt, Human
aggcagccgcccu

SEQ ID NO: 3786380 - RNA, 23 nt, Human
aggcagccgugggccccacccuc

SEQ ID NO: 3786381 - RNA, 15 nt, Human
aggcagccucugggg

SEQ ID NO: 3786382 - RNA, 16 nt, Human
aggcagccucuggggg

SEQ ID NO: 3786383 - RNA, 22 nt, Human
aggcagccucugggggguggcc

SEQ ID NO: 3786384 - RNA, 22 nt, Human
aggcagccuggacauagagagg

SEQ ID NO: 3786385 - RNA, 19 nt, Human
aggcagcgccaagcaaccu

SEQ ID NO: 3786386 - RNA, 17 nt, Human
aggcagcugccugcucu

SEQ ID NO: 3786387 - RNA, 23 nt, Human
aggcagcuuuaaccauuaaaacu

SEQ ID NO: 3786388 - RNA, 20 nt, Human
aggcagcuuuuucucuccca

SEQ ID NO: 3786389 - RNA, 16 nt, Human
aggcaggaagggcagg

SEQ ID NO: 3786390 - RNA, 17 nt, Human
aggcaggaagggcagga

SEQ ID NO: 3786391 - RNA, 20 nt, Human
aggcaggaagggcaggaagg

SEQ ID NO: 3786392 - RNA, 23 nt, Human
aggcaggaccuucgggcugugcc

SEQ ID NO: 3786393 - RNA, 12 nt, Human
aggcaggaggau

SEQ ID NO: 3786394 - RNA, 20 nt, Human
aggcaggaguuucguuuuca

SEQ ID NO: 3786395 - RNA, 22 nt, Human
aggcaggcauagaggcuucucc

SEQ ID NO: 3786396 - RNA, 14 nt, Human
aggcaggcauggcc

SEQ ID NO: 3786397 - RNA, 23 nt, Human
aggcaggcauugaggaagagucu

SEQ ID NO: 3786398 - RNA, 14 nt, Human
aggcaggccgacug

SEQ ID NO: 3786399 - RNA, 23 nt, Human
aggcaggcuaaggcguggagcug

SEQ ID NO: 3786400 - RNA, 16 nt, Human
aggcaggcucccaggg

SEQ ID NO: 3786401 - RNA, 21 nt, Human
aggcagggaacauggggagga

SEQ ID NO: 3786402 - RNA, 23 nt, Human
aggcagggaacauggggaggagg

SEQ ID NO: 3786403 - RNA, 19 nt, Human
aggcagggaaguccccagg

SEQ ID NO: 3786404 - RNA, 23 nt, Human
aggcagggaaguccccaggcccc

SEQ ID NO: 3786405 - RNA, 19 nt, Human
aggcagggaggcagccgcc

SEQ ID NO: 3786406 - RNA, 12 nt, Human
aggcagggaggg

SEQ ID NO: 3786407 - RNA, 13 nt, Human
aggcagggagggg

SEQ ID NO: 3786408 - RNA, 14 nt, Human
aggcagggagggga

SEQ ID NO: 3786409 - RNA, 12 nt, Human
aggcagggcagg

SEQ ID NO: 3786410 - RNA, 15 nt, Human
aggcagggcaggacc

SEQ ID NO: 3786411 - RNA, 17 nt, Human
aggcagggcaggaccag

SEQ ID NO: 3786412 - RNA, 19 nt, Human
aggcagggccuugcccaga

SEQ ID NO: 3786413 - RNA, 12 nt, Human
aggcagggcucu

SEQ ID NO: 3786414 - RNA, 13 nt, Human
aggcagggcucuc

SEQ ID NO: 3786415 - RNA, 14 nt, Human
aggcagggcucucc

SEQ ID NO: 3786416 - RNA, 15 nt, Human
aggcagggcucuccu

SEQ ID NO: 3786417 - RNA, 19 nt, Human
aggcaggggaauguaugug

SEQ ID NO: 3786418 - RNA, 16 nt, Human
aggcaggggccuccau

SEQ ID NO: 3786419 - RNA, 13 nt, Human
aggcaggggcgga

SEQ ID NO: 3786420 - RNA, 17 nt, Human
aggcaggggcuuccugg

SEQ ID NO: 3786421 - RNA, 18 nt, Human
aggcaggggcuuccuggu

SEQ ID NO: 3786422 - RNA, 20 nt, Human
aggcagggucaggagagggg

SEQ ID NO: 3786423 - RNA, 21 nt, Human
aggcagggucccauuucucac

SEQ ID NO: 3786424 - RNA, 14 nt, Human
aggcagggugcagu

SEQ ID NO: 3786425 - RNA, 23 nt, Human
aggcaggguuuuaucucugucua

SEQ ID NO: 3786426 - RNA, 16 nt, Human
aggcagguagccaggg

SEQ ID NO: 3786427 - RNA, 14 nt, Human
aggcagguccaggg

SEQ ID NO: 3786428 - RNA, 16 nt, Human
aggcagguccccagac

SEQ ID NO: 3786429 - RNA, 16 nt, Human
aggcaggugacaguga

SEQ ID NO: 3786430 - RNA, 18 nt, Human
aggcaggugacagugagg

SEQ ID NO: 3786431 - RNA, 13 nt, Human
aggcaggugccug

SEQ ID NO: 3786432 - RNA, 15 nt, Human
aggcaggugccugga

SEQ ID NO: 3786433 - RNA, 17 nt, Human
aggcaggugggauggau

SEQ ID NO: 3786434 - RNA, 15 nt, Human
aggcaguaggccggu

SEQ ID NO: 3786435 - RNA, 16 nt, Human
aggcaguauaaagaau

SEQ ID NO: 3786436 - RNA, 19 nt, Human
aggcagucgggggcuggcc

SEQ ID NO: 3786437 - RNA, 19 nt, Human
aggcagugggucccacuuc

SEQ ID NO: 3786438 - RNA, 15 nt, Human
aggcagugucauuug

SEQ ID NO: 3786439 - RNA, 19 nt, Human
aggcaguucaaagcaggau

SEQ ID NO: 3786440 - RNA, 19 nt, Human
aggcaguugcccagccucu

SEQ ID NO: 3786441 - RNA, 16 nt, Human
aggcaguuuagugcau

SEQ ID NO: 3786442 - RNA, 21 nt, Human
aggcauacgagagcagagguc

SEQ ID NO: 3786443 - RNA, 22 nt, Human
aggcauagaggcuucuccgcca

SEQ ID NO: 3786444 - RNA, 20 nt, Human
aggcauauugcuuuuucuaa

SEQ ID NO: 3786445 - RNA, 12 nt, Human
aggcauauuuua

SEQ ID NO: 3786446 - RNA, 14 nt, Human
aggcaucacagcua

SEQ ID NO: 3786447 - RNA, 20 nt, Human
aggcauccagcagucucugc

SEQ ID NO: 3786448 - RNA, 23 nt, Human
aggcauccagcagucucugccuu

SEQ ID NO: 3786449 - RNA, 20 nt, Human
aggcauccuuccucacacca

SEQ ID NO: 3786450 - RNA, 21 nt, Human
aggcaucucuguacuuugcuu

SEQ ID NO: 3786451 - RNA, 11 nt, Human
aggcaugaagg

SEQ ID NO: 3786452 - RNA, 15 nt, Human
aggcaugagggauca

SEQ ID NO: 3786453 - RNA, 19 nt, Human
auauuucagauguaauguu

SEQ ID NO: 3786454 - RNA, 19 nt, Human
auauuucccaugauuucau

SEQ ID NO: 3786455 - RNA, 19 nt, Human
auauuucccuaaaauacau

SEQ ID NO: 3786456 - RNA, 23 nt, Human
auauuuccuauaccauuuccgua

SEQ ID NO: 3786457 - RNA, 17 nt, Human
auauuuccuuuauguga

SEQ ID NO: 3786458 - RNA, 18 nt, Human
auauuuccuuuaugugaa

SEQ ID NO: 3786459 - RNA, 20 nt, Human
auauuuccuuuaugugaauu

SEQ ID NO: 3786460 - RNA, 15 nt, Human
auauuucgaaagcug

SEQ ID NO: 3786461 - RNA, 13 nt, Human
auauuucucuagu

SEQ ID NO: 3786462 - RNA, 23 nt, Human
auauuucugaggagccugcaaca

SEQ ID NO: 3786463 - RNA, 23 nt, Human
auauuucuguaauuauaucuaaa

SEQ ID NO: 3786464 - RNA, 12 nt, Human
auauuucuucaa

SEQ ID NO: 3786465 - RNA, 14 nt, Human
auauuucuucaaau

SEQ ID NO: 3786466 - RNA, 15 nt, Human
auauuucuucaaaua

SEQ ID NO: 3786467 - RNA, 23 nt, Human
auauuugaaaaaaacuucauucu

SEQ ID NO: 3786468 - RNA, 15 nt, Human
auauuugaaucuugu

SEQ ID NO: 3786469 - RNA, 17 nt, Human
auauuugaaucuugucu

SEQ ID NO: 3786470 - RNA, 21 nt, Human
auauuugaaucuugucucaau

SEQ ID NO: 3786471 - RNA, 13 nt, Human
auauuugaauuuu

SEQ ID NO: 3786472 - RNA, 14 nt, Human
auauuugauuuauu

SEQ ID NO: 3786473 - RNA, 21 nt, Human
auauuugcuagacucuagaca

SEQ ID NO: 3786474 - RNA, 21 nt, Human
auauuuggaagaaaaaaaucu

SEQ ID NO: 3786475 - RNA, 23 nt, Human
auauuuggaagaaaaaaaucuuc

SEQ ID NO: 3786476 - RNA, 16 nt, Human
auauuugguuuuccug

SEQ ID NO: 3786477 - RNA, 15 nt, Human
auauuuguaaaauga

SEQ ID NO: 3786478 - RNA, 16 nt, Human
auauuuguaaaaugac

SEQ ID NO: 3786479 - RNA, 15 nt, Human
auauuuguaaagcua

SEQ ID NO: 3786480 - RNA, 13 nt, Human
auauuuguacaua

SEQ ID NO: 3786481 - RNA, 14 nt, Human
auauuuguacuuuc

SEQ ID NO: 3786482 - RNA, 15 nt, Human
auauuuguacuuucu

SEQ ID NO: 3786483 - RNA, 22 nt, Human
auauuuguaucacaaaucuuaa

SEQ ID NO: 3786484 - RNA, 12 nt, Human
auauuuguaucg

SEQ ID NO: 3786485 - RNA, 17 nt, Human
auauuugugcauuuucu

SEQ ID NO: 3786486 - RNA, 21 nt, Human
auauuugugcauuuucuaaac

SEQ ID NO: 3786487 - RNA, 14 nt, Human
auauuuguggaaua

SEQ ID NO: 3786488 - RNA, 23 nt, Human
auauuugugugcuaaacguguau

SEQ ID NO: 3786489 - RNA, 14 nt, Human
auauuuguuuaguu

SEQ ID NO: 3786490 - RNA, 16 nt, Human
auauuuuaaagaauug

SEQ ID NO: 3786491 - RNA, 12 nt, Human
auauuuuaaaua

SEQ ID NO: 3786492 - RNA, 16 nt, Human
auauuuuaaccugcau

SEQ ID NO: 3786493 - RNA, 19 nt, Human
auauuuuaaccugcauaaa

SEQ ID NO: 3786494 - RNA, 17 nt, Human
auauuuuaagcauuacu

SEQ ID NO: 3786495 - RNA, 19 nt, Human
auauuuuaaugcaguugcu

SEQ ID NO: 3786496 - RNA, 13 nt, Human
auauuuuaaugua

SEQ ID NO: 3786497 - RNA, 11 nt, Human
auauuuuaauu

SEQ ID NO: 3786498 - RNA, 12 nt, Human
auauuuuacuug

SEQ ID NO: 3786499 - RNA, 22 nt, Human
auauuuuaugauccagcagauu

SEQ ID NO: 3786500 - RNA, 20 nt, Human
auauuuuaugugagagaaag

SEQ ID NO: 3786501 - RNA, 19 nt, Human
auauuuuauucaagguaaa

SEQ ID NO: 3786502 - RNA, 17 nt, Human
auauuuucaaauuguau

SEQ ID NO: 3786503 - RNA, 24 nt, Human
auauuuucaaauuguaucuagugc

SEQ ID NO: 3786504 - RNA, 20 nt, Human
auauuuucaacgcagcccug

SEQ ID NO: 3786505 - RNA, 14 nt, Human
auccuaugugauuu

SEQ ID NO: 3786506 - RNA, 16 nt, Human
auccuaugugauuuua

SEQ ID NO: 3786507 - RNA, 18 nt, Human
auccuauucucaccagga

SEQ ID NO: 3786508 - RNA, 20 nt, Human
auccuauucucaccaggaag

SEQ ID NO: 3786509 - RNA, 22 nt, Human
auccuauuucaguacuucagca

SEQ ID NO: 3786510 - RNA, 16 nt, Human
auccucaaacacugca

SEQ ID NO: 3786511 - RNA, 18 nt, Human
auccucaaaugcggggug

SEQ ID NO: 3786512 - RNA, 16 nt, Human
auccucacugcccucc

SEQ ID NO: 3786513 - RNA, 14 nt, Human
auccucagaugcuc

SEQ ID NO: 3786514 - RNA, 14 nt, Human
auccucaguuccug

SEQ ID NO: 3786515 - RNA, 19 nt, Human
auccucauacccaccccca

SEQ ID NO: 3786516 - RNA, 19 nt, Human
auccuccaaccaggcuccu

SEQ ID NO: 3786517 - RNA, 19 nt, Human
auccuccacguucugcuca

SEQ ID NO: 3786518 - RNA, 12 nt, Human
auccuccagcuu

SEQ ID NO: 3786519 - RNA, 14 nt, Human
auccuccagcuucu

SEQ ID NO: 3786520 - RNA, 12 nt, Human
auccuccagggc

SEQ ID NO: 3786521 - RNA, 14 nt, Human
auccuccaggugca

SEQ ID NO: 3786522 - RNA, 18 nt, Human
auccuccagguuuuucaa

SEQ ID NO: 3786523 - RNA, 22 nt, Human
auccuccagguuuuucaauuaa

SEQ ID NO: 3786524 - RNA, 23 nt, Human
auccuccagguuuuucaauuaaa

SEQ ID NO: 3786525 - RNA, 21 nt, Human
auccuccaguaccuugcuucu

SEQ ID NO: 3786526 - RNA, 15 nt, Human
auccucccaccucag

SEQ ID NO: 3786527 - RNA, 18 nt, Human
auccucccaccucagccu

SEQ ID NO: 3786528 - RNA, 13 nt, Human
auccucccagaaa

SEQ ID NO: 3786529 - RNA, 12 nt, Human
auccucccaggc

SEQ ID NO: 3786530 - RNA, 22 nt, Human
auccuccccuggacucccgugu

SEQ ID NO: 3786531 - RNA, 18 nt, Human
auccuccccuucccugca

SEQ ID NO: 3786532 - RNA, 14 nt, Human
auccuccuccuucc

SEQ ID NO: 3786533 - RNA, 11 nt, Human
auccuccugca

SEQ ID NO: 3786534 - RNA, 14 nt, Human
auccuccuggaacc

SEQ ID NO: 3786535 - RNA, 21 nt, Human
auccuccuggaaccuugcugu

SEQ ID NO: 3786536 - RNA, 18 nt, Human
auccuccugggauuggcu

SEQ ID NO: 3786537 - RNA, 20 nt, Human
auccucucaaccaccuuuca

SEQ ID NO: 3786538 - RNA, 16 nt, Human
auccucuccuuugaaa

SEQ ID NO: 3786539 - RNA, 12 nt, Human
auccucucuggg

SEQ ID NO: 3786540 - RNA, 17 nt, Human
auccucucuuccucuuc

SEQ ID NO: 3786541 - RNA, 18 nt, Human
auccucugagugugacca

SEQ ID NO: 3786542 - RNA, 12 nt, Human
auccucugaucu

SEQ ID NO: 3786543 - RNA, 20 nt, Human
auccucuguaaacuuuuugu

SEQ ID NO: 3786544 - RNA, 16 nt, Human
auccucuguacagagc

SEQ ID NO: 3786545 - RNA, 20 nt, Human
auccucuguacagagcccac

SEQ ID NO: 3786546 - RNA, 15 nt, Human
auccucuuccucuga

SEQ ID NO: 3786547 - RNA, 16 nt, Human
auccucuuccucugag

SEQ ID NO: 3786548 - RNA, 17 nt, Human
auccucuuccucugagg

SEQ ID NO: 3786549 - RNA, 18 nt, Human
auccucuucuuuuagcag

SEQ ID NO: 3786550 - RNA, 20 nt, Human
auccucuucuuuuagcagua

SEQ ID NO: 3786551 - RNA, 15 nt, Human
auccucuuuagaguu

SEQ ID NO: 3786552 - RNA, 21 nt, Human
auccugaaauagaggcuaaau

SEQ ID NO: 3786553 - RNA, 14 nt, Human
auccugaacagcau

SEQ ID NO: 3786554 - RNA, 13 nt, Human
auccugaagagca

SEQ ID NO: 3786555 - RNA, 14 nt, Human
auccugacucugcc

SEQ ID NO: 3786556 - RNA, 13 nt, Human
auccugagccaga

SEQ ID NO: 3786557 - RNA, 14 nt, Human
auccugagccagau

SEQ ID NO: 3786558 - RNA, 21 nt, Human
auccugagccagauuucacuc

SEQ ID NO: 3786559 - RNA, 24 nt, Human
auccugagccaucggugaaacuaa

SEQ ID NO: 3786560 - RNA, 14 nt, Human
auccugagccccgc

SEQ ID NO: 3786561 - RNA, 20 nt, Human
auccugagccccgcccucuu

SEQ ID NO: 3786562 - RNA, 22 nt, Human
auccugagccccgcccucuucc

SEQ ID NO: 3786563 - RNA, 19 nt, Human
auccugaugagguuucuac

SEQ ID NO: 3786564 - RNA, 20 nt, Human
auccugauuccucucuaagu

SEQ ID NO: 3786565 - RNA, 17 nt, Human
auccugcaaugaaaggu

SEQ ID NO: 3786566 - RNA, 16 nt, Human
auccugcaauuccacu

SEQ ID NO: 3786567 - RNA, 16 nt, Human
auccugcacugacucu

SEQ ID NO: 3786568 - RNA, 23 nt, Human
auccugccagccccacacagcua

SEQ ID NO: 3786569 - RNA, 14 nt, Human
auccugcccagugu

SEQ ID NO: 3786570 - RNA, 15 nt, Human
auccugcccaguguu

SEQ ID NO: 3786571 - RNA, 21 nt, Human
auccugcuucugauaugcagu

SEQ ID NO: 3786572 - RNA, 22 nt, Human
auccuggacaugaagauucuuu

SEQ ID NO: 3786573 - RNA, 16 nt, Human
auccuggacugagggg

SEQ ID NO: 3786574 - RNA, 16 nt, Human
auccuggagaagccuc

SEQ ID NO: 3786575 - RNA, 19 nt, Human
auccuggcacccggccccu

SEQ ID NO: 3786576 - RNA, 20 nt, Human
auccuggcacccggccccug

SEQ ID NO: 3786577 - RNA, 22 nt, Human
auccuggcacccggccccugcu

SEQ ID NO: 3786578 - RNA, 23 nt, Human
auccuggcacccggccccugcug

SEQ ID NO: 3786579 - RNA, 11 nt, Human
auccuggcagc

SEQ ID NO: 3786580 - RNA, 18 nt, Human
auccuggcagcccagaga

SEQ ID NO: 3786581 - RNA, 20 nt, Human
auccuggcagcccagagacu

SEQ ID NO: 3786582 - RNA, 17 nt, Human
auccuggcccagggcau

SEQ ID NO: 3786583 - RNA, 18 nt, Human
auccuggcccagggcauc

SEQ ID NO: 3786584 - RNA, 18 nt, Human
auccuggcuaacauggug

SEQ ID NO: 3786585 - RNA, 15 nt, Human
auccuggcuggagaa

SEQ ID NO: 3786586 - RNA, 15 nt, Human
auccuggcuuugccc

SEQ ID NO: 3786587 - RNA, 18 nt, Human
auccuggcuuugcccaac

SEQ ID NO: 3786588 - RNA, 15 nt, Human
auccuggggcucccu

SEQ ID NO: 3786589 - RNA, 21 nt, Human
auccugggggacccaauguag

SEQ ID NO: 3786590 - RNA, 18 nt, Human
auccugggggccuggguu

SEQ ID NO: 3786591 - RNA, 12 nt, Human
auccuggguaau

SEQ ID NO: 3786592 - RNA, 19 nt, Human
auccuguaggaagguacug

SEQ ID NO: 3786593 - RNA, 21 nt, Human
auccuguaggaagguacugua

SEQ ID NO: 3786594 - RNA, 22 nt, Human
auccuguaggaagguacuguau

SEQ ID NO: 3786595 - RNA, 18 nt, Human
auccuguauucagacaga

SEQ ID NO: 3786596 - RNA, 18 nt, Human
auccugucaucugagaau

SEQ ID NO: 3786597 - RNA, 19 nt, Human
auccugucgauuagacugg

SEQ ID NO: 3786598 - RNA, 19 nt, Human
auccugucuuuaaggaaaa

SEQ ID NO: 3786599 - RNA, 23 nt, Human
auccugucuuucugagcacacuu

SEQ ID NO: 3786600 - RNA, 18 nt, Human
auccugugacauguaaca

SEQ ID NO: 3786601 - RNA, 11 nt, Human
auccugugacu

SEQ ID NO: 3786602 - RNA, 21 nt, Human
auccugugaggagccccaucu

SEQ ID NO: 3786603 - RNA, 15 nt, Human
auccugugcaauaga

SEQ ID NO: 3786604 - RNA, 17 nt, Human
auccuguggucacugac

SEQ ID NO: 3786605 - RNA, 20 nt, Human
auccugugugguuuagugua

SEQ ID NO: 3786606 - RNA, 13 nt, Human
auccuguguguua

SEQ ID NO: 3786607 - RNA, 15 nt, Human
aucaacuaguauuug

SEQ ID NO: 3786608 - RNA, 13 nt, Human
aucaacucuaaua

SEQ ID NO: 3786609 - RNA, 22 nt, Human
aucaacuuagucaauaagaaaa

SEQ ID NO: 3786610 - RNA, 15 nt, Human
aucaacuugcuuauc

SEQ ID NO: 3786611 - RNA, 15 nt, Human
aucaacuuuaaucaa

SEQ ID NO: 3786612 - RNA, 13 nt, Human
aucaagaagggcu

SEQ ID NO: 3786613 - RNA, 20 nt, Human
aucaagaagggcugcaugau

SEQ ID NO: 3786614 - RNA, 22 nt, Human
aucaagaugagagaacuggagg

SEQ ID NO: 3786615 - RNA, 21 nt, Human
aucaagaugugacauguuuua

SEQ ID NO: 3786616 - RNA, 13 nt, Human
aucaagcccuuua

SEQ ID NO: 3786617 - RNA, 17 nt, Human
aucaagcuagaaggcca

SEQ ID NO: 3786618 - RNA, 12 nt, Human
aucaagcuguga

SEQ ID NO: 3786619 - RNA, 22 nt, Human
aucaaggaagaaaugguucaga

SEQ ID NO: 3786620 - RNA, 21 nt, Human
aucaaggacucugguuucuca

SEQ ID NO: 3786621 - RNA, 15 nt, Human
aucaaggcacugccu

SEQ ID NO: 3786622 - RNA, 18 nt, Human
aucaaggccuuauuggaa

SEQ ID NO: 3786623 - RNA, 21 nt, Human
aucaaggguacacugccuucu

SEQ ID NO: 3786624 - RNA, 15 nt, Human
aucaagggucaggcc

SEQ ID NO: 3786625 - RNA, 19 nt, Human
aucaagggugcgucuggga

SEQ ID NO: 3786626 - RNA, 23 nt, Human
aucaagguuauaauuuuuuuuaa

SEQ ID NO: 3786627 - RNA, 13 nt, Human
aucaaguaaugaa

SEQ ID NO: 3786628 - RNA, 17 nt, Human
aucaaguagacuacugu

SEQ ID NO: 3786629 - RNA, 13 nt, Human
aucaaguauagaa

SEQ ID NO: 3786630 - RNA, 16 nt, Human
aucaaguauagaaaau

SEQ ID NO: 3786631 - RNA, 20 nt, Human
aucaaguauuacuaaauuga

SEQ ID NO: 3786632 - RNA, 19 nt, Human
aucaagucaaucauuucuc

SEQ ID NO: 3786633 - RNA, 13 nt, Human
aucaagugucuuc

SEQ ID NO: 3786634 - RNA, 16 nt, Human
aucaaguucuuaaaau

SEQ ID NO: 3786635 - RNA, 23 nt, Human
aucaaguuggcuucuaaucaaag

SEQ ID NO: 3786636 - RNA, 15 nt, Human
aucaaguuuccaagc

SEQ ID NO: 3786637 - RNA, 22 nt, Human
aucaaguuuccaagcaaauguu

SEQ ID NO: 3786638 - RNA, 23 nt, Human
aucaaguuuccaagcaaauguua

SEQ ID NO: 3786639 - RNA, 17 nt, Human
aucaauaaaaugugauu

SEQ ID NO: 3786640 - RNA, 16 nt, Human
aucaauaauauauuuu

SEQ ID NO: 3786641 - RNA, 20 nt, Human
aucaauaauauauuuucugu

SEQ ID NO: 3786642 - RNA, 12 nt, Human
aucaauacacua

SEQ ID NO: 3786643 - RNA, 22 nt, Human
aucaauaguguccuaugcaaua

SEQ ID NO: 3786644 - RNA, 15 nt, Human
aucaauaugcagaau

SEQ ID NO: 3786645 - RNA, 18 nt, Human
aucaauauugucauuccu

SEQ ID NO: 3786646 - RNA, 22 nt, Human
aucaauauugucauuccuguau

SEQ ID NO: 3786647 - RNA, 13 nt, Human
aucaaucauugua

SEQ ID NO: 3786648 - RNA, 16 nt, Human
aucaaucauuguacag

SEQ ID NO: 3786649 - RNA, 17 nt, Human
aucaaucauuguacagu

SEQ ID NO: 3786650 - RNA, 23 nt, Human
aucuucaucugagagaggcuaaa

SEQ ID NO: 3786651 - RNA, 17 nt, Human
aggccuuccagcugcug

SEQ ID NO: 3786652 - RNA, 18 nt, Human
aggccuuccagcugcugu

SEQ ID NO: 3786653 - RNA, 19 nt, Human
aggccuuccccuggcacug

SEQ ID NO: 3786654 - RNA, 16 nt, Human
aggccuuccucucucc

SEQ ID NO: 3786655 - RNA, 19 nt, Human
aggccuuccucucuccaga

SEQ ID NO: 3786656 - RNA, 17 nt, Human
aggccuucucugaagga

SEQ ID NO: 3786657 - RNA, 14 nt, Human
aggccuucuuguga

SEQ ID NO: 3786658 - RNA, 18 nt, Human
aggccuucuugugaucuu

SEQ ID NO: 3786659 - RNA, 9 nt, Human
aggccuugc

SEQ ID NO: 3786660 - RNA, 18 nt, Human
aggccuugggcucugcug

SEQ ID NO: 3786661 - RNA, 16 nt, Human
aggccuuucccuaagc

SEQ ID NO: 3786662 - RNA, 22 nt, Human
aggcgaccaccgccccuggccg

SEQ ID NO: 3786663 - RNA, 19 nt, Human
aggcgcaagggaggcccag

SEQ ID NO: 3786664 - RNA, 22 nt, Human
aggcgcacuuuccuccuggcag

SEQ ID NO: 3786665 - RNA, 21 nt, Human
aggcgcagugcuucucuacag

SEQ ID NO: 3786666 - RNA, 19 nt, Human
aggcgcugagacugugcug

SEQ ID NO: 3786667 - RNA, 22 nt, Human
aggcgcugcccaccugccggcc

SEQ ID NO: 3786668 - RNA, 18 nt, Human
aggcggacguuccagccg

SEQ ID NO: 3786669 - RNA, 24 nt, Human
aggcggagaguacagugagccaag

SEQ ID NO: 3786670 - RNA, 21 nt, Human
aggcgggaaaagcagcccuug

SEQ ID NO: 3786671 - RNA, 15 nt, Human
aggcgggaaggaggg

SEQ ID NO: 3786672 - RNA, 12 nt, Human
aggcgggccagc

SEQ ID NO: 3786673 - RNA, 16 nt, Human
aggcggggcuugccuu

SEQ ID NO: 3786674 - RNA, 16 nt, Human
aggcggugggccuggu

SEQ ID NO: 3786675 - RNA, 21 nt, Human
aggcgucccgcaccugucuga

SEQ ID NO: 3786676 - RNA, 21 nt, Human
aggcgucuguauauuuuggga

SEQ ID NO: 3786677 - RNA, 13 nt, Human
aggcgugaggaug

SEQ ID NO: 3786678 - RNA, 15 nt, Human
aggcguggagcugcc

SEQ ID NO: 3786679 - RNA, 16 nt, Human
aggcguggagcugccu

SEQ ID NO: 3786680 - RNA, 19 nt, Human
aggcguucuucgaggugga

SEQ ID NO: 3786681 - RNA, 14 nt, Human
aggcuaaaaagcaa

SEQ ID NO: 3786682 - RNA, 13 nt, Human
aggcuaaacaucc

SEQ ID NO: 3786683 - RNA, 21 nt, Human
aggcuaaacauccaauauuuu

SEQ ID NO: 3786684 - RNA, 19 nt, Human
aggcuaaauuacucaggaa

SEQ ID NO: 3786685 - RNA, 19 nt, Human
aggcuaaggcaggaaaauu

SEQ ID NO: 3786686 - RNA, 23 nt, Human
aggcuaaggcguggagcugccug

SEQ ID NO: 3786687 - RNA, 24 nt, Human
aggcuaaguugggaucuaggagag

SEQ ID NO: 3786688 - RNA, 19 nt, Human
aggcuaauguuggcagaug

SEQ ID NO: 3786689 - RNA, 18 nt, Human
aggcuacaauuuucuccc

SEQ ID NO: 3786690 - RNA, 19 nt, Human
aggcuacaauuuucuccca

SEQ ID NO: 3786691 - RNA, 19 nt, Human
aggcuacacugacacuggu

SEQ ID NO: 3786692 - RNA, 19 nt, Human
aggcuacagagaagccuuc

SEQ ID NO: 3786693 - RNA, 22 nt, Human
aggcuacagagaagccuucaag

SEQ ID NO: 3786694 - RNA, 12 nt, Human
aggcuacagggc

SEQ ID NO: 3786695 - RNA, 14 nt, Human
aggcuaccuuugua

SEQ ID NO: 3786696 - RNA, 20 nt, Human
aggcuacuucggggcuggga

SEQ ID NO: 3786697 - RNA, 22 nt, Human
aggcuacuucggggcugggaag

SEQ ID NO: 3786698 - RNA, 15 nt, Human
aggcuagauguaugu

SEQ ID NO: 3786699 - RNA, 16 nt, Human
aggcuagauguaugua

SEQ ID NO: 3786700 - RNA, 21 nt, Human
aggcuagguggguugaaagcc

SEQ ID NO: 3786701 - RNA, 19 nt, Human
aggcuauggggauagaugu

SEQ ID NO: 3786702 - RNA, 21 nt, Human
aggcuauggggauagaugugu

SEQ ID NO: 3786703 - RNA, 18 nt, Human
aggcuauguauaaaauac

SEQ ID NO: 3786704 - RNA, 18 nt, Human
aggcuauuauuuucacug

SEQ ID NO: 3786705 - RNA, 19 nt, Human
aggcuauuauuuucacugu

SEQ ID NO: 3786706 - RNA, 22 nt, Human
aggcuauuccugagagcugcau

SEQ ID NO: 3786707 - RNA, 22 nt, Human
aggcuauuuguaaaucugccac

SEQ ID NO: 3786708 - RNA, 17 nt, Human
aggcuauuuucuaaaga

SEQ ID NO: 3786709 - RNA, 17 nt, Human
aggcucaacaauaaaac

SEQ ID NO: 3786710 - RNA, 15 nt, Human
aggcucaacuaggga

SEQ ID NO: 3786711 - RNA, 16 nt, Human
aggcucaacuagggag

SEQ ID NO: 3786712 - RNA, 22 nt, Human
aggcucacugcaacuucugccu

SEQ ID NO: 3786713 - RNA, 15 nt, Human
aggcucacugccagg

SEQ ID NO: 3786714 - RNA, 19 nt, Human
aggcucacugccaggccag

SEQ ID NO: 3786715 - RNA, 20 nt, Human
aggcucacugccaggccagc

SEQ ID NO: 3786716 - RNA, 14 nt, Human
aggcucacugguca

SEQ ID NO: 3786717 - RNA, 21 nt, Human
aggcucaggcaggggccucca

SEQ ID NO: 3786718 - RNA, 19 nt, Human
aggcucagucucaggagca

SEQ ID NO: 3786719 - RNA, 20 nt, Human
aggcucauagggaagaccug

SEQ ID NO: 3786720 - RNA, 21 nt, Human
aggcucauagggaagaccugc

SEQ ID NO: 3786721 - RNA, 14 nt, Human
aggcucauuuacug

SEQ ID NO: 3786722 - RNA, 12 nt, Human
aggcucauuuua

SEQ ID NO: 3786723 - RNA, 22 nt, Human
aggcuccaccccauccaguuca

SEQ ID NO: 3786724 - RNA, 13 nt, Human
aggcuccaggagc

SEQ ID NO: 3786725 - RNA, 14 nt, Human
aggcuccaggagca

SEQ ID NO: 3786726 - RNA, 23 nt, Human
aggcuccaggagcagccacauuc

SEQ ID NO: 3786727 - RNA, 15 nt, Human
aggcucccagggaca

SEQ ID NO: 3786728 - RNA, 14 nt, Human
aggcuccccugagg

SEQ ID NO: 3786729 - RNA, 13 nt, Human
aggcuccccuucu

SEQ ID NO: 3786730 - RNA, 15 nt, Human
aggcuccgcccuuag

SEQ ID NO: 3786731 - RNA, 21 nt, Human
aggcuccuguuagcuccucac

SEQ ID NO: 3786732 - RNA, 22 nt, Human
aggcuccuguuuugcacagcca

SEQ ID NO: 3786733 - RNA, 21 nt, Human
aggcucgagcaugccuggaug

SEQ ID NO: 3786734 - RNA, 16 nt, Human
aggcucgauuuuguau

SEQ ID NO: 3786735 - RNA, 20 nt, Human
aggcucgccuucccuccugc

SEQ ID NO: 3786736 - RNA, 18 nt, Human
aggcucuaaccacacagc

SEQ ID NO: 3786737 - RNA, 17 nt, Human
aggcucuagaucauaag

SEQ ID NO: 3786738 - RNA, 11 nt, Human
aggcucucagg

SEQ ID NO: 3786739 - RNA, 18 nt, Human
aggcucucaggccagcug

SEQ ID NO: 3786740 - RNA, 21 nt, Human
aggcucucaggccagcugcuu

SEQ ID NO: 3786741 - RNA, 23 nt, Human
aggcucuccuugcuccuggccuu

SEQ ID NO: 3786742 - RNA, 19 nt, Human
aggcucugacccagugaga

SEQ ID NO: 3786743 - RNA, 19 nt, Human
aggcucugagagucuagau

SEQ ID NO: 3786744 - RNA, 15 nt, Human
aggcucugcacagau

SEQ ID NO: 3786745 - RNA, 11 nt, Human
aggcucugccu

SEQ ID NO: 3786746 - RNA, 13 nt, Human
aggcucugccuuc

SEQ ID NO: 3786747 - RNA, 22 nt, Human
aggcucugugcugacccuccug

SEQ ID NO: 3786748 - RNA, 19 nt, Human
aggcucuuagcagcuucca

SEQ ID NO: 3786749 - RNA, 19 nt, Human
aggcucuucuccccagagu

SEQ ID NO: 3786750 - RNA, 14 nt, Human
aggcucuucuccuu

SEQ ID NO: 3786751 - RNA, 21 nt, Human
aggcucuuuggggucagccag

SEQ ID NO: 3786752 - RNA, 13 nt, Human
aggcugaaagagg

SEQ ID NO: 3786753 - RNA, 21 nt, Human
aggcugacaccuaacucuucu

SEQ ID NO: 3786754 - RNA, 19 nt, Human
aggcugaccaagagagaaa

SEQ ID NO: 3786755 - RNA, 14 nt, Human
aggcugaccacagc

SEQ ID NO: 3786756 - RNA, 16 nt, Human
aggcugaccacagcac

SEQ ID NO: 3786757 - RNA, 17 nt, Human
aggcugaccacagcaca

SEQ ID NO: 3786758 - RNA, 18 nt, Human
aggcugaccacagcacag

SEQ ID NO: 3786759 - RNA, 14 nt, Human
aggcugagacagga

SEQ ID NO: 3786760 - RNA, 16 nt, Human
aggcugagacugcggg

SEQ ID NO: 3786761 - RNA, 14 nt, Human
aggcugaggaaagg

SEQ ID NO: 3786762 - RNA, 18 nt, Human
aggcugaggcaagagaau

SEQ ID NO: 3786763 - RNA, 14 nt, Human
aggcugaggcagaa

SEQ ID NO: 3786764 - RNA, 19 nt, Human
aggcugaggcaggagaaug

SEQ ID NO: 3786765 - RNA, 14 nt, Human
aggcugaggccugg

SEQ ID NO: 3786766 - RNA, 17 nt, Human
aggcugaggccuggacu

SEQ ID NO: 3786767 - RNA, 11 nt, Human
aggcugaggcg

SEQ ID NO: 3786768 - RNA, 21 nt, Human
aggcugaggcggguggaucac

SEQ ID NO: 3786769 - RNA, 18 nt, Human
aggcugaggcuggcacag

SEQ ID NO: 3786770 - RNA, 14 nt, Human
aggcugaggugucu

SEQ ID NO: 3786771 - RNA, 18 nt, Human
aggcugagugcaggccca

SEQ ID NO: 3786772 - RNA, 20 nt, Human
aggcugagugcaggcccacc

SEQ ID NO: 3786773 - RNA, 17 nt, Human
aggcugauaauuccagu

SEQ ID NO: 3786774 - RNA, 17 nt, Human
aggcugcagaaggccaa

SEQ ID NO: 3786775 - RNA, 19 nt, Human
aggcugcagcuggacagag

SEQ ID NO: 3786776 - RNA, 20 nt, Human
aggcugcagcuggacagagg

SEQ ID NO: 3786777 - RNA, 21 nt, Human
aggcugcagcuggacagaggg

SEQ ID NO: 3786778 - RNA, 22 nt, Human
aggcugcagcuggacagagggg

SEQ ID NO: 3786779 - RNA, 16 nt, Human
aggcugcauagaagga

SEQ ID NO: 3786780 - RNA, 14 nt, Human
aggcugccagugcc

SEQ ID NO: 3786781 - RNA, 16 nt, Human
aggcugccagugccug

SEQ ID NO: 3786782 - RNA, 17 nt, Human
aggcugccccucucacc

SEQ ID NO: 3786783 - RNA, 13 nt, Human
aggcugcccuccu

SEQ ID NO: 3786784 - RNA, 23 nt, Human
aggcugccugagcaccucccagc

SEQ ID NO: 3786785 - RNA, 19 nt, Human
aggcugcggccccuccccc

SEQ ID NO: 3786786 - RNA, 17 nt, Human
aggcugcgucuggaggg

SEQ ID NO: 3786787 - RNA, 15 nt, Human
aggcugcucagggcu

SEQ ID NO: 3786788 - RNA, 16 nt, Human
aggcugcucagggcug

SEQ ID NO: 3786789 - RNA, 20 nt, Human
aggcugcucggggugcacag

SEQ ID NO: 3786790 - RNA, 14 nt, Human
aggcugcuggagga

SEQ ID NO: 3786791 - RNA, 16 nt, Human
aggcugcuggaggaaa

SEQ ID NO: 3786792 - RNA, 22 nt, Human
aggcugcugggauggugggcuu

SEQ ID NO: 3786793 - RNA, 20 nt, Human
aggcugcuggggccucagac

SEQ ID NO: 3786794 - RNA, 13 nt, Human
auccccucaggac

SEQ ID NO: 3786795 - RNA, 12 nt, Human
auccccugagcc

SEQ ID NO: 3786796 - RNA, 13 nt, Human
auccccugccucc

SEQ ID NO: 3786797 - RNA, 12 nt, Human
auccccugcuac

SEQ ID NO: 3786798 - RNA, 13 nt, Human
auccccuucuccc

SEQ ID NO: 3786799 - RNA, 21 nt, Human
aucccgaagaauggagaggaa

SEQ ID NO: 3786800 - RNA, 17 nt, Human
aucccgagcaccuccac

SEQ ID NO: 3786801 - RNA, 15 nt, Human
aucccgagucuggga

SEQ ID NO: 3786802 - RNA, 20 nt, Human
aucccgauucacccugucca

SEQ ID NO: 3786803 - RNA, 22 nt, Human
aucccgccucuucuucuucaga

SEQ ID NO: 3786804 - RNA, 14 nt, Human
aucccggcugcccu

SEQ ID NO: 3786805 - RNA, 22 nt, Human
aucuucauggaauucacaaagu

SEQ ID NO: 3786806 - RNA, 14 nt, Human
aucuucauguaaau

SEQ ID NO: 3786807 - RNA, 18 nt, Human
aucuucauguaaauugac

SEQ ID NO: 3786808 - RNA, 17 nt, Human
aucuuccauauuuggaa

SEQ ID NO: 3786809 - RNA, 11 nt, Human
aucuucccagc

SEQ ID NO: 3786810 - RNA, 20 nt, Human
aucuucccagcagggccacu

SEQ ID NO: 3786811 - RNA, 21 nt, Human
aucuuccccaacgaaaagcac

SEQ ID NO: 3786812 - RNA, 21 nt, Human
aucuucccuagaggguuccug

SEQ ID NO: 3786813 - RNA, 14 nt, Human
aucuucccucuccc

SEQ ID NO: 3786814 - RNA, 14 nt, Human
aucuuccucugcua

SEQ ID NO: 3786815 - RNA, 18 nt, Human
aucuuccucugcuaaauu

SEQ ID NO: 3786816 - RNA, 16 nt, Human
aucuucgucuucacuc

SEQ ID NO: 3786817 - RNA, 18 nt, Human
aucuucguucuuguuagu

SEQ ID NO: 3786818 - RNA, 21 nt, Human
aucuucuaaacccaauccaaa

SEQ ID NO: 3786819 - RNA, 13 nt, Human
aucuucuaaaugg

SEQ ID NO: 3786820 - RNA, 23 nt, Human
aucuucuauauaauuccuguuuu

SEQ ID NO: 3786821 - RNA, 15 nt, Human
aucuucucaaguucu

SEQ ID NO: 3786822 - RNA, 14 nt, Human
aucuucucagcucc

SEQ ID NO: 3786823 - RNA, 21 nt, Human
aucuucucagcucccauuucu

SEQ ID NO: 3786824 - RNA, 22 nt, Human
aucuucucagcucccauuucua

SEQ ID NO: 3786825 - RNA, 13 nt, Human
aucuucuccagau

SEQ ID NO: 3786826 - RNA, 16 nt, Human
aucuucugccuucuca

SEQ ID NO: 3786827 - RNA, 17 nt, Human
aucuucuuaugcaauuu

SEQ ID NO: 3786828 - RNA, 14 nt, Human
aucuucuucaccau

SEQ ID NO: 3786829 - RNA, 21 nt, Human
aucuugaaauuaagaaggcaa

SEQ ID NO: 3786830 - RNA, 18 nt, Human
aucuugaaggaaaaauuc

SEQ ID NO: 3786831 - RNA, 20 nt, Human
aucuugaaggaaaaauucaa

SEQ ID NO: 3786832 - RNA, 22 nt, Human
aucuugaaggaaaaauucaaua

SEQ ID NO: 3786833 - RNA, 16 nt, Human
aucuugaagggcccag

SEQ ID NO: 3786834 - RNA, 18 nt, Human
aucuugaauacucugccc

SEQ ID NO: 3786835 - RNA, 19 nt, Human
aucuugaauacucugcccu

SEQ ID NO: 3786836 - RNA, 12 nt, Human
aucuugaaugug

SEQ ID NO: 3786837 - RNA, 13 nt, Human
aucuugaaugugg

SEQ ID NO: 3786838 - RNA, 21 nt, Human
aucuugaauguggucucagga

SEQ ID NO: 3786839 - RNA, 18 nt, Human
aucuugaauuguaaggaa

SEQ ID NO: 3786840 - RNA, 17 nt, Human
aucuugacauucaaggc

SEQ ID NO: 3786841 - RNA, 17 nt, Human
aucuugaccaagcagga

SEQ ID NO: 3786842 - RNA, 21 nt, Human
aucuugaccaagcaggaagcu

SEQ ID NO: 3786843 - RNA, 23 nt, Human
aucuugaccaagcaggaagcuca

SEQ ID NO: 3786844 - RNA, 17 nt, Human
aucuugacuacagucag

SEQ ID NO: 3786845 - RNA, 22 nt, Human
aucuugaggugguaguaaaaca

SEQ ID NO: 3786846 - RNA, 13 nt, Human
aucuugauacauu

SEQ ID NO: 3786847 - RNA, 16 nt, Human
aucuugauacauucaa

SEQ ID NO: 3786848 - RNA, 17 nt, Human
aucuugaugucuuuguu

SEQ ID NO: 3786849 - RNA, 22 nt, Human
aucuugcaguaucggcacugua

SEQ ID NO: 3786850 - RNA, 24 nt, Human
aucuugcaguaucggcacuguaca

SEQ ID NO: 3786851 - RNA, 19 nt, Human
aucuugcccgcucaggcug

SEQ ID NO: 3786852 - RNA, 17 nt, Human
aucuugccggucauuuu

SEQ ID NO: 3786853 - RNA, 14 nt, Human
aucuugccuccagg

SEQ ID NO: 3786854 - RNA, 22 nt, Human
aucuugcgaauccaagcucccu

SEQ ID NO: 3786855 - RNA, 14 nt, Human
aucuugcuaccagu

SEQ ID NO: 3786856 - RNA, 16 nt, Human
aucuugcuaccaguau

SEQ ID NO: 3786857 - RNA, 19 nt, Human
aucuugcuaccaguauuua

SEQ ID NO: 3786858 - RNA, 15 nt, Human
aucuugcucugcuga

SEQ ID NO: 3786859 - RNA, 16 nt, Human
aucuugcucugcugac

SEQ ID NO: 3786860 - RNA, 17 nt, Human
aucuugcucugcugaca

SEQ ID NO: 3786861 - RNA, 19 nt, Human
aucuugcucugcugacaga

SEQ ID NO: 3786862 - RNA, 14 nt, Human
aucuugcucuguaa

SEQ ID NO: 3786863 - RNA, 17 nt, Human
aucuugcucuguaaucu

SEQ ID NO: 3786864 - RNA, 22 nt, Human
aucuugcucuguaaucucguuu

SEQ ID NO: 3786865 - RNA, 12 nt, Human
aucuugcuggcu

SEQ ID NO: 3786866 - RNA, 12 nt, Human
aucuugcuugaa

SEQ ID NO: 3786867 - RNA, 23 nt, Human
aucuugcuuucuuuguuuggcug

SEQ ID NO: 3786868 - RNA, 22 nt, Human
aucuuggacaaaucacauauuu

SEQ ID NO: 3786869 - RNA, 21 nt, Human
aucuuggacucaugaggaggg

SEQ ID NO: 3786870 - RNA, 15 nt, Human
aucuuggagagcugg

SEQ ID NO: 3786871 - RNA, 23 nt, Human
aucuuggcacauuuaagagacag

SEQ ID NO: 3786872 - RNA, 20 nt, Human
aucuuggcagguaggaauau

SEQ ID NO: 3786873 - RNA, 17 nt, Human
aucuuggccuuacugua

SEQ ID NO: 3786874 - RNA, 13 nt, Human
aucuuggcuaugu

SEQ ID NO: 3786875 - RNA, 22 nt, Human
aucuuggcuauguaauucuugu

SEQ ID NO: 3786876 - RNA, 17 nt, Human
aucuuggggacaucucu

SEQ ID NO: 3786877 - RNA, 23 nt, Human
aucuugggggacagggcuggccc

SEQ ID NO: 3786878 - RNA, 20 nt, Human
aucuuggucagauuugaacu

SEQ ID NO: 3786879 - RNA, 19 nt, Human
aucuugguccaggaaaugu

SEQ ID NO: 3786880 - RNA, 23 nt, Human
aucuugguccaggaaaugugcac

SEQ ID NO: 3786881 - RNA, 15 nt, Human
aucuugguguguuaa

SEQ ID NO: 3786882 - RNA, 14 nt, Human
aucuugucaugugu

SEQ ID NO: 3786883 - RNA, 15 nt, Human
aucuugucucaaugc

SEQ ID NO: 3786884 - RNA, 20 nt, Human
aucuugucucaaugcucaua

SEQ ID NO: 3786885 - RNA, 14 nt, Human
aucuugucucuggg

SEQ ID NO: 3786886 - RNA, 11 nt, Human
aucuugugaaa

SEQ ID NO: 3786887 - RNA, 14 nt, Human
aucuugugaaaaua

SEQ ID NO: 3786888 - RNA, 22 nt, Human
aucuuguggcuuugcaaccauu

SEQ ID NO: 3786889 - RNA, 23 nt, Human
aucuugugugauuaacuuauuua

SEQ ID NO: 3786890 - RNA, 17 nt, Human
aucuuguguuguccuuu

SEQ ID NO: 3786891 - RNA, 22 nt, Human
aucuuguguuguccuuuugucu

SEQ ID NO: 3786892 - RNA, 17 nt, Human
aucuuguucaggaaaag

SEQ ID NO: 3786893 - RNA, 14 nt, Human
aucuuguuuccaaa

SEQ ID NO: 3786894 - RNA, 17 nt, Human
aucuuguuuugaaaaua

SEQ ID NO: 3786895 - RNA, 15 nt, Human
aucuuguuuuuccac

SEQ ID NO: 3786896 - RNA, 23 nt, Human
aucuuguuuuuccacuacugcua

SEQ ID NO: 3786897 - RNA, 21 nt, Human
aucuuuaaaagaugcuuuuaa

SEQ ID NO: 3786898 - RNA, 13 nt, Human
aucuuuauugaaa

SEQ ID NO: 3786899 - RNA, 17 nt, Human
aucuuuauugagaaaga

SEQ ID NO: 3786900 - RNA, 17 nt, Human
aucuuucaaaccagcuu

SEQ ID NO: 3786901 - RNA, 22 nt, Human
aucuuucacacuuccaccagcc

SEQ ID NO: 3786902 - RNA, 18 nt, Human
aucuuucacccacagaaa

SEQ ID NO: 3786903 - RNA, 14 nt, Human
aucuuucagaaaua

SEQ ID NO: 3786904 - RNA, 13 nt, Human
aucuuucccuccu

SEQ ID NO: 3786905 - RNA, 13 nt, Human
aucuuuccuuccu

SEQ ID NO: 3786906 - RNA, 17 nt, Human
aucuuucgauaaacaac

SEQ ID NO: 3786907 - RNA, 18 nt, Human
aucuuucgcacagcaguu

SEQ ID NO: 3786908 - RNA, 23 nt, Human
aucuuucgcacagcaguuccgga

SEQ ID NO: 3786909 - RNA, 16 nt, Human
aucuuucuaugcugcu

SEQ ID NO: 3786910 - RNA, 11 nt, Human
aucuuucuucu

SEQ ID NO: 3786911 - RNA, 20 nt, Human
aucuuucuuuaccugagacc

SEQ ID NO: 3786912 - RNA, 22 nt, Human
aucuuucuuuaccugagaccag

SEQ ID NO: 3786913 - RNA, 22 nt, Human
aucuuugaaagguuagagaaua

SEQ ID NO: 3786914 - RNA, 19 nt, Human
aucuuugaaauuauguaaa

SEQ ID NO: 3786915 - RNA, 14 nt, Human
aucuuugauguguu

SEQ ID NO: 3786916 - RNA, 17 nt, Human
aucuuugauguguuguu

SEQ ID NO: 3786917 - RNA, 19 nt, Human
aucuuugauguguuguucu

SEQ ID NO: 3786918 - RNA, 18 nt, Human
aucuuugauucuccuuca

SEQ ID NO: 3786919 - RNA, 20 nt, Human
aucuuugauucuccuucagc

SEQ ID NO: 3786920 - RNA, 16 nt, Human
aucuuugcacuccaau

SEQ ID NO: 3786921 - RNA, 17 nt, Human
aucuuugcagacaggca

SEQ ID NO: 3786922 - RNA, 16 nt, Human
aucuuugccacccuca

SEQ ID NO: 3786923 - RNA, 13 nt, Human
aucuuugccucuc

SEQ ID NO: 3786924 - RNA, 14 nt, Human
aucuuugccuuggg

SEQ ID NO: 3786925 - RNA, 22 nt, Human
aucuuugccuugggcugcuccu

SEQ ID NO: 3786926 - RNA, 22 nt, Human
aucuuuggacagaagcagcucu

SEQ ID NO: 3786927 - RNA, 17 nt, Human
aucuuuguaccaaaauu

SEQ ID NO: 3786928 - RNA, 21 nt, Human
aucuuuguaccaaaauuuuaa

SEQ ID NO: 3786929 - RNA, 19 nt, Human
aucuuuguggccaaggagc

SEQ ID NO: 3786930 - RNA, 18 nt, Human
aucuuuuaaaguguuacu

SEQ ID NO: 3786931 - RNA, 16 nt, Human
aucuuuuauguuugaa

SEQ ID NO: 3786932 - RNA, 20 nt, Human
aucuuuuauguuugaauaug

SEQ ID NO: 3786933 - RNA, 13 nt, Human
aucuuuuauucuu

SEQ ID NO: 3786934 - RNA, 14 nt, Human
aucuuuuauucuuu

SEQ ID NO: 3786935 - RNA, 14 nt, Human
aucuuuucacaaau

SEQ ID NO: 3786936 - RNA, 15 nt, Human
aucuuuucacaaaua

SEQ ID NO: 3786937 - RNA, 17 nt, Human
aucuuuucacaaauaaa

SEQ ID NO: 3786938 - RNA, 16 nt, Human
agggaagaaaagagcu

SEQ ID NO: 3786939 - RNA, 14 nt, Human
agggaagaacuauu

SEQ ID NO: 3786940 - RNA, 18 nt, Human
agggaagaaggaggaaug

SEQ ID NO: 3786941 - RNA, 15 nt, Human
agggaagagaaacag

SEQ ID NO: 3786942 - RNA, 19 nt, Human
agggaagagacagcccagg

SEQ ID NO: 3786943 - RNA, 17 nt, Human
agggaagauaaguugga

SEQ ID NO: 3786944 - RNA, 18 nt, Human
agggaagauaaguuggaa

SEQ ID NO: 3786945 - RNA, 20 nt, Human
agggaagauaaguuggaaac

SEQ ID NO: 3786946 - RNA, 19 nt, Human
agggaagcacugccucccu

SEQ ID NO: 3786947 - RNA, 14 nt, Human
agggaagcccagcu

SEQ ID NO: 3786948 - RNA, 18 nt, Human
agggaagcccagcuccag

SEQ ID NO: 3786949 - RNA, 23 nt, Human
agggaagcccagcuccagggcca

SEQ ID NO: 3786950 - RNA, 13 nt, Human
agggaagcuacag

SEQ ID NO: 3786951 - RNA, 19 nt, Human
agggaagcuacagguuaca

SEQ ID NO: 3786952 - RNA, 14 nt, Human
agggaagcucuugg

SEQ ID NO: 3786953 - RNA, 16 nt, Human
agggaagcuggccuga

SEQ ID NO: 3786954 - RNA, 23 nt, Human
agggaagcuggccugagagggga

SEQ ID NO: 3786955 - RNA, 18 nt, Human
agggaaggacagaaagga

SEQ ID NO: 3786956 - RNA, 22 nt, Human
agggaaggauacaaaagcaugu

SEQ ID NO: 3786957 - RNA, 16 nt, Human
agggaaggcaggcagg

SEQ ID NO: 3786958 - RNA, 12 nt, Human
agggaagggagc

SEQ ID NO: 3786959 - RNA, 15 nt, Human
aucccggcugcccuu

SEQ ID NO: 3786960 - RNA, 15 nt, Human
aucccguuuucccca

SEQ ID NO: 3786961 - RNA, 16 nt, Human
aucccguuuuccccau

SEQ ID NO: 3786962 - RNA, 13 nt, Human
aucccuacaugua

SEQ ID NO: 3786963 - RNA, 18 nt, Human
aucccuacauguauugca

SEQ ID NO: 3786964 - RNA, 21 nt, Human
aucccuacccccuaagagcca

SEQ ID NO: 3786965 - RNA, 17 nt, Human
aucccuaccgacccagg

SEQ ID NO: 3786966 - RNA, 19 nt, Human
aucccuaugcugccuaggc

SEQ ID NO: 3786967 - RNA, 21 nt, Human
aucccucacacauccagacau

SEQ ID NO: 3786968 - RNA, 12 nt, Human
aucccucaccca

SEQ ID NO: 3786969 - RNA, 17 nt, Human
aucccucaccuucugag

SEQ ID NO: 3786970 - RNA, 14 nt, Human
aucccucauccuca

SEQ ID NO: 3786971 - RNA, 23 nt, Human
aucccucauccucauacccaccc

SEQ ID NO: 3786972 - RNA, 13 nt, Human
aucccucaucugu

SEQ ID NO: 3786973 - RNA, 23 nt, Human
aucccucuaaugagacugaccau

SEQ ID NO: 3786974 - RNA, 20 nt, Human
aucccucuacagagcuuccc

SEQ ID NO: 3786975 - RNA, 22 nt, Human
aucccucuacagagcuucccug

SEQ ID NO: 3786976 - RNA, 11 nt, Human
aucccucucca

SEQ ID NO: 3786977 - RNA, 12 nt, Human
aucccucuccau

SEQ ID NO: 3786978 - RNA, 22 nt, Human
aucccucuccauaaccccaccc

SEQ ID NO: 3786979 - RNA, 16 nt, Human
aucccucucuggauug

SEQ ID NO: 3786980 - RNA, 17 nt, Human
aucccugaaggccccgc

SEQ ID NO: 3786981 - RNA, 15 nt, Human
aucccugccagcucu

SEQ ID NO: 3786982 - RNA, 14 nt, Human
aucccugccugguc

SEQ ID NO: 3786983 - RNA, 20 nt, Human
aucccugcucacugcagccu

SEQ ID NO: 3786984 - RNA, 10 nt, Human
aucccuggcc

SEQ ID NO: 3786985 - RNA, 19 nt, Human
aucccuggcugggauccac

SEQ ID NO: 3786986 - RNA, 17 nt, Human
aucccugggccugcugc

SEQ ID NO: 3786987 - RNA, 15 nt, Human
aucccugggccuugg

SEQ ID NO: 3786988 - RNA, 15 nt, Human
aucccuguguuaauu

SEQ ID NO: 3786989 - RNA, 18 nt, Human
aucccuguguugucucua

SEQ ID NO: 3786990 - RNA, 19 nt, Human
aucccuguuacccagagaa

SEQ ID NO: 3786991 - RNA, 14 nt, Human
aucccuguucauug

SEQ ID NO: 3786992 - RNA, 16 nt, Human
aucccuguuuaauauu

SEQ ID NO: 3786993 - RNA, 22 nt, Human
aucccuguuuaauauuuaaaca

SEQ ID NO: 3786994 - RNA, 16 nt, Human
aucccuucauacuuga

SEQ ID NO: 3786995 - RNA, 20 nt, Human
aucccuucauacuugaacgu

SEQ ID NO: 3786996 - RNA, 16 nt, Human
aucccuuccaccugcu

SEQ ID NO: 3786997 - RNA, 19 nt, Human
aucccuuccaccugcucug

SEQ ID NO: 3786998 - RNA, 13 nt, Human
aucccuucucaca

SEQ ID NO: 3786999 - RNA, 13 nt, Human
aucccuucucuuc

SEQ ID NO: 3787000 - RNA, 21 nt, Human
aucccuucucuuccaggcagc

SEQ ID NO: 3787001 - RNA, 14 nt, Human
aucccuugaccagg

SEQ ID NO: 3787002 - RNA, 18 nt, Human
aucccuugaccaggccug

SEQ ID NO: 3787003 - RNA, 19 nt, Human
aucccuuggacauuuuaug

SEQ ID NO: 3787004 - RNA, 21 nt, Human
aucccuuggacauuuuauguc

SEQ ID NO: 3787005 - RNA, 15 nt, Human
auccgaaaucagcag

SEQ ID NO: 3787006 - RNA, 16 nt, Human
auccgaaccuccucug

SEQ ID NO: 3787007 - RNA, 14 nt, Human
auccgaaucucuuu

SEQ ID NO: 3787008 - RNA, 17 nt, Human
auccgacugcuuuggac

SEQ ID NO: 3787009 - RNA, 23 nt, Human
auccgacuugaauuuucccacug

SEQ ID NO: 3787010 - RNA, 14 nt, Human
auccgccaauauua

SEQ ID NO: 3787011 - RNA, 14 nt, Human
auccgccuuuugua

SEQ ID NO: 3787012 - RNA, 18 nt, Human
auccgccuuuuguauaca

SEQ ID NO: 3787013 - RNA, 14 nt, Human
auccgcucucuucc

SEQ ID NO: 3787014 - RNA, 15 nt, Human
auccgcucucuuccu

SEQ ID NO: 3787015 - RNA, 22 nt, Human
auccggcaacaucaacccgagu

SEQ ID NO: 3787016 - RNA, 15 nt, Human
auccggcagccugga

SEQ ID NO: 3787017 - RNA, 17 nt, Human
auccgugccucuuuuua

SEQ ID NO: 3787018 - RNA, 14 nt, Human
auccuaaaacaaau

SEQ ID NO: 3787019 - RNA, 14 nt, Human
auccuaaacaucau

SEQ ID NO: 3787020 - RNA, 16 nt, Human
auccuaaagaacaaag

SEQ ID NO: 3787021 - RNA, 12 nt, Human
auccuaagaaau

SEQ ID NO: 3787022 - RNA, 15 nt, Human
auccuaagacacaaa

SEQ ID NO: 3787023 - RNA, 17 nt, Human
auccuaagcaucuaagu

SEQ ID NO: 3787024 - RNA, 19 nt, Human
auccuaagggucgaaagcu

SEQ ID NO: 3787025 - RNA, 23 nt, Human
auccuaagggucgaaagcucuag

SEQ ID NO: 3787026 - RNA, 12 nt, Human
auccuaauaaaa

SEQ ID NO: 3787027 - RNA, 14 nt, Human
auccuaauaaaaag

SEQ ID NO: 3787028 - RNA, 17 nt, Human
auccuaauaaaaaggug

SEQ ID NO: 3787029 - RNA, 13 nt, Human
auccuaaugaaug

SEQ ID NO: 3787030 - RNA, 19 nt, Human
auccuaaugaaugcauaaa

SEQ ID NO: 3787031 - RNA, 19 nt, Human
auccuacaagacacaguga

SEQ ID NO: 3787032 - RNA, 18 nt, Human
auccuaccaaugcaugca

SEQ ID NO: 3787033 - RNA, 21 nt, Human
auccuaccccaauuccuugua

SEQ ID NO: 3787034 - RNA, 22 nt, Human
auccuacccucgggcccaccug

SEQ ID NO: 3787035 - RNA, 15 nt, Human
auccuaccuugcuuu

SEQ ID NO: 3787036 - RNA, 22 nt, Human
auccuaccuugcuuuugcuucu

SEQ ID NO: 3787037 - RNA, 21 nt, Human
auccuacgaguaauugcauuu

SEQ ID NO: 3787038 - RNA, 18 nt, Human
auccuagauuauaucaaa

SEQ ID NO: 3787039 - RNA, 20 nt, Human
auccuagauuauaucaaagu

SEQ ID NO: 3787040 - RNA, 19 nt, Human
auccuagcacaugcuucaa

SEQ ID NO: 3787041 - RNA, 13 nt, Human
auccuagcugugu

SEQ ID NO: 3787042 - RNA, 16 nt, Human
auccuaggcauuugcu

SEQ ID NO: 3787043 - RNA, 21 nt, Human
auccuaggcauuugcugaaua

SEQ ID NO: 3787044 - RNA, 14 nt, Human
auccuaggcugaca

SEQ ID NO: 3787045 - RNA, 20 nt, Human
auccuagguaggguuuaauc

SEQ ID NO: 3787046 - RNA, 19 nt, Human
auccuaguuccaccaucaa

SEQ ID NO: 3787047 - RNA, 15 nt, Human
auccuauauagaaug

SEQ ID NO: 3787048 - RNA, 19 nt, Human
auccuaucaacaacaaggu

SEQ ID NO: 3787049 - RNA, 13 nt, Human
auccuaugcaugg

SEQ ID NO: 3787050 - RNA, 22 nt, Human
auccuaugcaugguuucagcac

SEQ ID NO: 3787051 - RNA, 23 nt, Human
auccuaugcaugguuucagcacu

SEQ ID NO: 3787052 - RNA, 21 nt, Human
auccuaugguuucuccaucca

SEQ ID NO: 3787053 - RNA, 12 nt, Human
auccuauguuuu

SEQ ID NO: 3787054 - RNA, 16 nt, Human
auccuauuguugaugg

SEQ ID NO: 3787055 - RNA, 17 nt, Human
auccucaaacacugcag

SEQ ID NO: 3787056 - RNA, 15 nt, Human
auccucaaagaaagu

SEQ ID NO: 3787057 - RNA, 18 nt, Human
auccucaaagaaagugua

SEQ ID NO: 3787058 - RNA, 20 nt, Human
auccucaaagaaaguguauu

SEQ ID NO: 3787059 - RNA, 12 nt, Human
auccucaaucca

SEQ ID NO: 3787060 - RNA, 16 nt, Human
auccucacagugaaca

SEQ ID NO: 3787061 - RNA, 15 nt, Human
auccucacugggugg

SEQ ID NO: 3787062 - RNA, 15 nt, Human
auccucaucuuuuuu

SEQ ID NO: 3787063 - RNA, 23 nt, Human
auccucauuugggguagcuagag

SEQ ID NO: 3787064 - RNA, 18 nt, Human
auccuccacuuguucagg

SEQ ID NO: 3787065 - RNA, 11 nt, Human
auccuccagca

SEQ ID NO: 3787066 - RNA, 15 nt, Human
auccuccagcaggga

SEQ ID NO: 3787067 - RNA, 13 nt, Human
auccuccagcuuc

SEQ ID NO: 3787068 - RNA, 19 nt, Human
auccuccaggugcacaagc

SEQ ID NO: 3787069 - RNA, 23 nt, Human
auccuccaggugcacaagcucca

SEQ ID NO: 3787070 - RNA, 12 nt, Human
auccuccagguu

SEQ ID NO: 3787071 - RNA, 17 nt, Human
auccuccagguuuuuca

SEQ ID NO: 3787072 - RNA, 19 nt, Human
auccuccagguuuuucaau

SEQ ID NO: 3787073 - RNA, 19 nt, Human
auccuccaguaccuugcuu

SEQ ID NO: 3787074 - RNA, 20 nt, Human
auccuccaguaccuugcuuc

SEQ ID NO: 3787075 - RNA, 19 nt, Human
auccucccaccucagccuc

SEQ ID NO: 3787076 - RNA, 16 nt, Human
auccuccccuggacuc

SEQ ID NO: 3787077 - RNA, 11 nt, Human
auccuccccuu

SEQ ID NO: 3787078 - RNA, 15 nt, Human
auccuccccuucccu

SEQ ID NO: 3787079 - RNA, 15 nt, Human
auccuccguccagcc

SEQ ID NO: 3787080 - RNA, 11 nt, Human
auccuccucau

SEQ ID NO: 3787081 - RNA, 13 nt, Human
auccuccuccagg

SEQ ID NO: 3787082 - RNA, 14 nt, Human
auccuccucccacc

SEQ ID NO: 3787083 - RNA, 17 nt, Human
auccuccuccuuccuag

SEQ ID NO: 3787084 - RNA, 17 nt, Human
augaagguuucugaaaa

SEQ ID NO: 3787085 - RNA, 23 nt, Human
augaaguaauaugcacacauuuu

SEQ ID NO: 3787086 - RNA, 13 nt, Human
augaaguacucau

SEQ ID NO: 3787087 - RNA, 19 nt, Human
augaaguguguuuccuuca

SEQ ID NO: 3787088 - RNA, 23 nt, Human
augaaguguguuuccuucagugc

SEQ ID NO: 3787089 - RNA, 14 nt, Human
augaaguugaaaau

SEQ ID NO: 3787090 - RNA, 15 nt, Human
augaaguuguaggua

SEQ ID NO: 3787091 - RNA, 22 nt, Human
augaaguuuaaaacaguauuua

SEQ ID NO: 3787092 - RNA, 23 nt, Human
augaaguuuccuuggcuggugca

SEQ ID NO: 3787093 - RNA, 19 nt, Human
augaaguuugaacuucaua

SEQ ID NO: 3787094 - RNA, 14 nt, Human
augaauaauggaaa

SEQ ID NO: 3787095 - RNA, 15 nt, Human
augaauacaaauuuu

SEQ ID NO: 3787096 - RNA, 13 nt, Human
augaauacagcag

SEQ ID NO: 3787097 - RNA, 15 nt, Human
augaauacagcagca

SEQ ID NO: 3787098 - RNA, 17 nt, Human
augaauacagcagcaag

SEQ ID NO: 3787099 - RNA, 14 nt, Human
augaauacauuucc

SEQ ID NO: 3787100 - RNA, 24 nt, Human
augaauaccuuagugcaguuauuu

SEQ ID NO: 3787101 - RNA, 21 nt, Human
augaauacuguauuuuguauu

SEQ ID NO: 3787102 - RNA, 13 nt, Human
augaauauauggc

SEQ ID NO: 3787103 - RNA, 17 nt, Human
augaauaucuauuaaua

SEQ ID NO: 3787104 - RNA, 19 nt, Human
augaauaucuauuaauaua

SEQ ID NO: 3787105 - RNA, 20 nt, Human
augaauaucuauuaauauau

SEQ ID NO: 3787106 - RNA, 16 nt, Human
augaauauuuaguguu

SEQ ID NO: 3787107 - RNA, 15 nt, Human
augaauauuuauaac

SEQ ID NO: 3787108 - RNA, 19 nt, Human
augaauauuuugauaauaa

SEQ ID NO: 3787109 - RNA, 21 nt, Human
augaaucacuguuuuuagaca

SEQ ID NO: 3787110 - RNA, 16 nt, Human
augaauccaacugcuu

SEQ ID NO: 3787111 - RNA, 18 nt, Human
augaaucccacccacaug

SEQ ID NO: 3787112 - RNA, 17 nt, Human
augaaucgcuucucuuu

SEQ ID NO: 3787113 - RNA, 14 nt, Human
augaaucuaugcca

SEQ ID NO: 3787114 - RNA, 16 nt, Human
augaaucuauuauacu

SEQ ID NO: 3787115 - RNA, 20 nt, Human
augaaucucccacuccagcg

SEQ ID NO: 3787116 - RNA, 13 nt, Human
auccugccauuua

SEQ ID NO: 3787117 - RNA, 16 nt, Human
auccugccauuuaaaa

SEQ ID NO: 3787118 - RNA, 23 nt, Human
auccugcccccugaaacuuauuu

SEQ ID NO: 3787119 - RNA, 13 nt, Human
auccugccccuga

SEQ ID NO: 3787120 - RNA, 21 nt, Human
auccugccuuagagccaggca

SEQ ID NO: 3787121 - RNA, 13 nt, Human
auccugcuaaguu

SEQ ID NO: 3787122 - RNA, 15 nt, Human
auccugcuguucuag

SEQ ID NO: 3787123 - RNA, 19 nt, Human
auccugcuucugauaugca

SEQ ID NO: 3787124 - RNA, 12 nt, Human
auccugcuugau

SEQ ID NO: 3787125 - RNA, 14 nt, Human
auccuggaggccca

SEQ ID NO: 3787126 - RNA, 17 nt, Human
auccuggaggcccaguu

SEQ ID NO: 3787127 - RNA, 12 nt, Human
auccuggcagcc

SEQ ID NO: 3787128 - RNA, 15 nt, Human
auccuggcagcccag

SEQ ID NO: 3787129 - RNA, 16 nt, Human
auccuggcagcccaga

SEQ ID NO: 3787130 - RNA, 21 nt, Human
auccuggcccagggcaucugg

SEQ ID NO: 3787131 - RNA, 19 nt, Human
auccuggcucuguggcuug

SEQ ID NO: 3787132 - RNA, 22 nt, Human
auccuggcucuguggcuugcua

SEQ ID NO: 3787133 - RNA, 24 nt, Human
auccuggcucuuuggagaucaagg

SEQ ID NO: 3787134 - RNA, 20 nt, Human
auccuggcugucgagaaaca

SEQ ID NO: 3787135 - RNA, 18 nt, Human
auccugggcauccuucuu

SEQ ID NO: 3787136 - RNA, 21 nt, Human
auccugggcuuuuguuuugcu

SEQ ID NO: 3787137 - RNA, 22 nt, Human
auccugggcuuuuguuuugcuu

SEQ ID NO: 3787138 - RNA, 20 nt, Human
auccuggggcauuaaaaaaa

SEQ ID NO: 3787139 - RNA, 22 nt, Human
auccuggguggucugcaggcag

SEQ ID NO: 3787140 - RNA, 23 nt, Human
auccugguuccuaggggaaugag

SEQ ID NO: 3787141 - RNA, 20 nt, Human
auccuguaggaagguacugu

SEQ ID NO: 3787142 - RNA, 16 nt, Human
auccuguauaagcacu

SEQ ID NO: 3787143 - RNA, 21 nt, Human
auccuguauucuucaaccagu

SEQ ID NO: 3787144 - RNA, 16 nt, Human
auccugucaucugaga

SEQ ID NO: 3787145 - RNA, 14 nt, Human
auccuguccucagc

SEQ ID NO: 3787146 - RNA, 18 nt, Human
auccuguccucagcuucu

SEQ ID NO: 3787147 - RNA, 17 nt, Human
auccugucuguucaugg

SEQ ID NO: 3787148 - RNA, 21 nt, Human
auccugucuuuaaggaaaaaa

SEQ ID NO: 3787149 - RNA, 16 nt, Human
auccugugacauguaa

SEQ ID NO: 3787150 - RNA, 13 nt, Human
auccuguggguga

SEQ ID NO: 3787151 - RNA, 12 nt, Human
auccuguugaaa

SEQ ID NO: 3787152 - RNA, 13 nt, Human
auccuguugaaaa

SEQ ID NO: 3787153 - RNA, 12 nt, Human
auccuuacaaau

SEQ ID NO: 3787154 - RNA, 16 nt, Human
auccuuacaaaugauu

SEQ ID NO: 3787155 - RNA, 18 nt, Human
auccuuacaaaugauugc

SEQ ID NO: 3787156 - RNA, 13 nt, Human
auccuuacaaguu

SEQ ID NO: 3787157 - RNA, 13 nt, Human
auccuuagagguc

SEQ ID NO: 3787158 - RNA, 19 nt, Human
auccuucaucuuuuaaaga

SEQ ID NO: 3787159 - RNA, 22 nt, Human
auccuuccaaagaauucuuaua

SEQ ID NO: 3787160 - RNA, 19 nt, Human
auccuucccugucugccag

SEQ ID NO: 3787161 - RNA, 17 nt, Human
auccuucccuuuggaga

SEQ ID NO: 3787162 - RNA, 14 nt, Human
auccuuccuuccca

SEQ ID NO: 3787163 - RNA, 20 nt, Human
auccuucgugaacauccccu

SEQ ID NO: 3787164 - RNA, 12 nt, Human
auccuugaagau

SEQ ID NO: 3787165 - RNA, 16 nt, Human
auccuugaagguauau

SEQ ID NO: 3787166 - RNA, 16 nt, Human
auccuugacuggaccu

SEQ ID NO: 3787167 - RNA, 15 nt, Human
auccuugacuuuuua

SEQ ID NO: 3787168 - RNA, 18 nt, Human
auccuugggggcucccag

SEQ ID NO: 3787169 - RNA, 22 nt, Human
auccuugggggcucccagggca

SEQ ID NO: 3787170 - RNA, 18 nt, Human
auccuuggucuuuguauc

SEQ ID NO: 3787171 - RNA, 14 nt, Human
auccuugucuuauu

SEQ ID NO: 3787172 - RNA, 19 nt, Human
auccuuguguuuaucagaa

SEQ ID NO: 3787173 - RNA, 12 nt, Human
auccuuguuuca

SEQ ID NO: 3787174 - RNA, 13 nt, Human
auccuuguuucaa

SEQ ID NO: 3787175 - RNA, 14 nt, Human
auccuuguuucaaa

SEQ ID NO: 3787176 - RNA, 14 nt, Human
auccuuuccagcau

SEQ ID NO: 3787177 - RNA, 17 nt, Human
auccuuuccagcaugag

SEQ ID NO: 3787178 - RNA, 13 nt, Human
auccuuucuaaca

SEQ ID NO: 3787179 - RNA, 17 nt, Human
auccuuucugccucuca

SEQ ID NO: 3787180 - RNA, 18 nt, Human
auccuuugccugccuggu

SEQ ID NO: 3787181 - RNA, 13 nt, Human
auccuuuuauguu

SEQ ID NO: 3787182 - RNA, 17 nt, Human
auccuuuuauguuauuu

SEQ ID NO: 3787183 - RNA, 19 nt, Human
auccuuuuauguuauuuau

SEQ ID NO: 3787184 - RNA, 16 nt, Human
auccuuuucuguguuu

SEQ ID NO: 3787185 - RNA, 18 nt, Human
auccuuuuguagaaugaa

SEQ ID NO: 3787186 - RNA, 22 nt, Human
auccuuuuuaaauucaguccua

SEQ ID NO: 3787187 - RNA, 18 nt, Human
auccuuuuucuuuauaaa

SEQ ID NO: 3787188 - RNA, 13 nt, Human
aucgaaaaaauaa

SEQ ID NO: 3787189 - RNA, 18 nt, Human
aucgaaauaacaauguua

SEQ ID NO: 3787190 - RNA, 15 nt, Human
aucgaaccguuuuga

SEQ ID NO: 3787191 - RNA, 18 nt, Human
aucgaaucuacuaauucc

SEQ ID NO: 3787192 - RNA, 13 nt, Human
aucgaaugaaauu

SEQ ID NO: 3787193 - RNA, 14 nt, Human
aucgaaugaaauua

SEQ ID NO: 3787194 - RNA, 21 nt, Human
aucgacuuguuuuugcacaug

SEQ ID NO: 3787195 - RNA, 23 nt, Human
aucgaugggggaugcuucaugug

SEQ ID NO: 3787196 - RNA, 11 nt, Human
aucgauuggcu

SEQ ID NO: 3787197 - RNA, 17 nt, Human
aucgcaccauucugacu

SEQ ID NO: 3787198 - RNA, 20 nt, Human
aucgcagaccuuuuuuagga

SEQ ID NO: 3787199 - RNA, 14 nt, Human
aucgccacaaacuc

SEQ ID NO: 3787200 - RNA, 13 nt, Human
aucgccuucccca

SEQ ID NO: 3787201 - RNA, 23 nt, Human
aucgcgccacuacacuccagccu

SEQ ID NO: 3787202 - RNA, 22 nt, Human
aucgcuccugcagccccagccc

SEQ ID NO: 3787203 - RNA, 12 nt, Human
aucgcuggcccc

SEQ ID NO: 3787204 - RNA, 23 nt, Human
aucgcuguguguuaguucccaac

SEQ ID NO: 3787205 - RNA, 17 nt, Human
aucgcuucauguaacua

SEQ ID NO: 3787206 - RNA, 18 nt, Human
aucggaggcuugucagag

SEQ ID NO: 3787207 - RNA, 20 nt, Human
aucggaggcuugucagagcu

SEQ ID NO: 3787208 - RNA, 22 nt, Human
aucggaggcuugucagagcugg

SEQ ID NO: 3787209 - RNA, 19 nt, Human
aucggcccacagcucccac

SEQ ID NO: 3787210 - RNA, 22 nt, Human
aucggccuagggcccccacagu

SEQ ID NO: 3787211 - RNA, 13 nt, Human
aucggccuccucu

SEQ ID NO: 3787212 - RNA, 17 nt, Human
aucgggagcagugucuu

SEQ ID NO: 3787213 - RNA, 15 nt, Human
aucgggggcuggggc

SEQ ID NO: 3787214 - RNA, 19 nt, Human
aucggucuugcccagagga

SEQ ID NO: 3787215 - RNA, 15 nt, Human
aucgguuaacaaaua

SEQ ID NO: 3787216 - RNA, 17 nt, Human
aucguaaaauuaagaaa

SEQ ID NO: 3787217 - RNA, 16 nt, Human
aucguauagcuguauu

SEQ ID NO: 3787218 - RNA, 18 nt, Human
aucgucacugcuuaacuu

SEQ ID NO: 3787219 - RNA, 17 nt, Human
aucgucaugcacaguau

SEQ ID NO: 3787220 - RNA, 23 nt, Human
aucguccagggagcauuuuccuc

SEQ ID NO: 3787221 - RNA, 23 nt, Human
aucgucucucccucccuuugaaa

SEQ ID NO: 3787222 - RNA, 20 nt, Human
aucgugacgcugaauaaaug

SEQ ID NO: 3787223 - RNA, 22 nt, Human
aucgugacgcugaauaaauguc

SEQ ID NO: 3787224 - RNA, 19 nt, Human
aucgugccguuacucucca

SEQ ID NO: 3787225 - RNA, 23 nt, Human
aucgugccguuacucuccaaccu

SEQ ID NO: 3787226 - RNA, 12 nt, Human
aucgugcuaaau

SEQ ID NO: 3787227 - RNA, 17 nt, Human
aucgugcuaaauuuuca

SEQ ID NO: 3787228 - RNA, 21 nt, Human
aucguguauugagauuucuua

SEQ ID NO: 3787229 - RNA, 18 nt, Human
agggcuuuguuuugcaca

SEQ ID NO: 3787230 - RNA, 13 nt, Human
agggcuuuucaaa

SEQ ID NO: 3787231 - RNA, 16 nt, Human
aggggaaaaaaauguu

SEQ ID NO: 3787232 - RNA, 13 nt, Human
aggggaaccugcc

SEQ ID NO: 3787233 - RNA, 15 nt, Human
aggggaaccugccau

SEQ ID NO: 3787234 - RNA, 13 nt, Human
aggggaagaauga

SEQ ID NO: 3787235 - RNA, 13 nt, Human
aggggaagagaag

SEQ ID NO: 3787236 - RNA, 15 nt, Human
aggggaagaggccug

SEQ ID NO: 3787237 - RNA, 16 nt, Human
aggggaagaguguacu

SEQ ID NO: 3787238 - RNA, 17 nt, Human
aggggaagcacucgugu

SEQ ID NO: 3787239 - RNA, 21 nt, Human
aggggaagcagaaauccaagc

SEQ ID NO: 3787240 - RNA, 17 nt, Human
aggggaaggagaaguaa

SEQ ID NO: 3787241 - RNA, 14 nt, Human
aggggaagggccag

SEQ ID NO: 3787242 - RNA, 14 nt, Human
aggggaagucccug

SEQ ID NO: 3787243 - RNA, 11 nt, Human
aggggaauauu

SEQ ID NO: 3787244 - RNA, 19 nt, Human
aggggaauauuuuauucaa

SEQ ID NO: 3787245 - RNA, 20 nt, Human
aggggaauguuugccucugc

SEQ ID NO: 3787246 - RNA, 13 nt, Human
aggggacaggccu

SEQ ID NO: 3787247 - RNA, 15 nt, Human
aggggacaggccuca

SEQ ID NO: 3787248 - RNA, 17 nt, Human
aggggacaggccucacc

SEQ ID NO: 3787249 - RNA, 13 nt, Human
aggggaccaggag

SEQ ID NO: 3787250 - RNA, 15 nt, Human
aggggaccaggagug

SEQ ID NO: 3787251 - RNA, 16 nt, Human
aggggaccaggagugg

SEQ ID NO: 3787252 - RNA, 15 nt, Human
aggggacccccgccc

SEQ ID NO: 3787253 - RNA, 22 nt, Human
aggggacccccgcccccugccc

SEQ ID NO: 3787254 - RNA, 19 nt, Human
aggggacccuccgcucugu

SEQ ID NO: 3787255 - RNA, 13 nt, Human
aggggaccuggaa

SEQ ID NO: 3787256 - RNA, 23 nt, Human
aggggaccuggaagggagguggg

SEQ ID NO: 3787257 - RNA, 19 nt, Human
aggggacuauuuaugaagg

SEQ ID NO: 3787258 - RNA, 17 nt, Human
aggggacugccaccucc

SEQ ID NO: 3787259 - RNA, 15 nt, Human
aggggagagccugcu

SEQ ID NO: 3787260 - RNA, 17 nt, Human
aggggagagccugcugg

SEQ ID NO: 3787261 - RNA, 13 nt, Human
aggggagcagagg

SEQ ID NO: 3787262 - RNA, 15 nt, Human
aggggagccaggagg

SEQ ID NO: 3787263 - RNA, 11 nt, Human
aggggagcccu

SEQ ID NO: 3787264 - RNA, 12 nt, Human
aggggagcccuc

SEQ ID NO: 3787265 - RNA, 16 nt, Human
aggggagcccuccacg

SEQ ID NO: 3787266 - RNA, 13 nt, Human
aggggaggagggc

SEQ ID NO: 3787267 - RNA, 19 nt, Human
aggggaggaucacuggagc

SEQ ID NO: 3787268 - RNA, 21 nt, Human
aggggaggcagccggcaccca

SEQ ID NO: 3787269 - RNA, 20 nt, Human
aggggaggccaucuggagag

SEQ ID NO: 3787270 - RNA, 18 nt, Human
aggggaggggcuccuuuc

SEQ ID NO: 3787271 - RNA, 18 nt, Human
aggggagggggauccgac

SEQ ID NO: 3787272 - RNA, 16 nt, Human
aggggaggggggcaca

SEQ ID NO: 3787273 - RNA, 19 nt, Human
aggggagggucagccaggg

SEQ ID NO: 3787274 - RNA, 15 nt, Human
aggggaggguggcag

SEQ ID NO: 3787275 - RNA, 16 nt, Human
aggggaggguggcagg

SEQ ID NO: 3787276 - RNA, 19 nt, Human
aggggaggguggcagguga

SEQ ID NO: 3787277 - RNA, 16 nt, Human
aggggaguugugucug

SEQ ID NO: 3787278 - RNA, 13 nt, Human
aggggauauuuaa

SEQ ID NO: 3787279 - RNA, 19 nt, Human
aggggcaaacaccugcuga

SEQ ID NO: 3787280 - RNA, 17 nt, Human
aggggcaaauucuuuug

SEQ ID NO: 3787281 - RNA, 20 nt, Human
aggggcaacgaagaaaaaaa

SEQ ID NO: 3787282 - RNA, 15 nt, Human
aggggcagagccagg

SEQ ID NO: 3787283 - RNA, 13 nt, Human
aggggcagaggcc

SEQ ID NO: 3787284 - RNA, 19 nt, Human
aggggcagauggaaaggag

SEQ ID NO: 3787285 - RNA, 13 nt, Human
aggggcagcccuu

SEQ ID NO: 3787286 - RNA, 13 nt, Human
aggggcagccugc

SEQ ID NO: 3787287 - RNA, 18 nt, Human
aggggcagccugccuugc

SEQ ID NO: 3787288 - RNA, 14 nt, Human
aggggcagcugacc

SEQ ID NO: 3787289 - RNA, 15 nt, Human
aggggcagcugacca

SEQ ID NO: 3787290 - RNA, 11 nt, Human
aggggcagcuu

SEQ ID NO: 3787291 - RNA, 14 nt, Human
aggggcaggagcuc

SEQ ID NO: 3787292 - RNA, 12 nt, Human
aggggcaggagg

SEQ ID NO: 3787293 - RNA, 17 nt, Human
aggggcaggcacagcac

SEQ ID NO: 3787294 - RNA, 15 nt, Human
aggggcaggcccugc

SEQ ID NO: 3787295 - RNA, 23 nt, Human
aggggcaggcccugcacuguccu

SEQ ID NO: 3787296 - RNA, 16 nt, Human
aggggcaucugccccu

SEQ ID NO: 3787297 - RNA, 21 nt, Human
aggggcaucugccccuccccc

SEQ ID NO: 3787298 - RNA, 18 nt, Human
aggggcauggccagcagc

SEQ ID NO: 3787299 - RNA, 23 nt, Human
aggggcauguauuggccuggagg

SEQ ID NO: 3787300 - RNA, 15 nt, Human
aggggcauugcugac

SEQ ID NO: 3787301 - RNA, 13 nt, Human
aggggccagaggc

SEQ ID NO: 3787302 - RNA, 14 nt, Human
aggggccagaggcu

SEQ ID NO: 3787303 - RNA, 15 nt, Human
aggggccagaggcuc

SEQ ID NO: 3787304 - RNA, 17 nt, Human
aggggccagaggcucgu

SEQ ID NO: 3787305 - RNA, 19 nt, Human
aggggcccacagggaaccc

SEQ ID NO: 3787306 - RNA, 19 nt, Human
aggggcccaguccuggccu

SEQ ID NO: 3787307 - RNA, 20 nt, Human
aggggccccccugcccugug

SEQ ID NO: 3787308 - RNA, 17 nt, Human
aggggccccguguccug

SEQ ID NO: 3787309 - RNA, 18 nt, Human
aggggccccguguccugc

SEQ ID NO: 3787310 - RNA, 13 nt, Human
aggggccccucuc

SEQ ID NO: 3787311 - RNA, 14 nt, Human
aggggccccucuca

SEQ ID NO: 3787312 - RNA, 16 nt, Human
aggggccccugcuucu

SEQ ID NO: 3787313 - RNA, 15 nt, Human
aggggcccgcuugcc

SEQ ID NO: 3787314 - RNA, 23 nt, Human
aucuguuagaugcuacuaagaaa

SEQ ID NO: 3787315 - RNA, 14 nt, Human
aucuguuagggccu

SEQ ID NO: 3787316 - RNA, 21 nt, Human
aucuguuuaaagcauauagag

SEQ ID NO: 3787317 - RNA, 12 nt, Human
aucuguuuacag

SEQ ID NO: 3787318 - RNA, 14 nt, Human
aucuguuucccagc

SEQ ID NO: 3787319 - RNA, 18 nt, Human
aucuguuuugaaggcaaa

SEQ ID NO: 3787320 - RNA, 22 nt, Human
aucuguuuugugguuuggaaua

SEQ ID NO: 3787321 - RNA, 14 nt, Human
aucuguuuuucuaa

SEQ ID NO: 3787322 - RNA, 12 nt, Human
aucuuaaaaagu

SEQ ID NO: 3787323 - RNA, 17 nt, Human
aucuuaaaaaguuguuc

SEQ ID NO: 3787324 - RNA, 19 nt, Human
aucuuaaaaaguuguucaa

SEQ ID NO: 3787325 - RNA, 19 nt, Human
aucuuaaagaaacagcuuu

SEQ ID NO: 3787326 - RNA, 20 nt, Human
aucuuaaagaaacagcuuuc

SEQ ID NO: 3787327 - RNA, 12 nt, Human
aucuuaacucuu

SEQ ID NO: 3787328 - RNA, 15 nt, Human
aucuuaacucuuugc

SEQ ID NO: 3787329 - RNA, 13 nt, Human
aucuuaagaaaua

SEQ ID NO: 3787330 - RNA, 16 nt, Human
aucuuaagaaauaaau

SEQ ID NO: 3787331 - RNA, 14 nt, Human
aucuuaauacuguu

SEQ ID NO: 3787332 - RNA, 22 nt, Human
aucuuaauacuguuauucuuug

SEQ ID NO: 3787333 - RNA, 12 nt, Human
aucuuaauauaa

SEQ ID NO: 3787334 - RNA, 13 nt, Human
aucuuaauauaaa

SEQ ID NO: 3787335 - RNA, 16 nt, Human
aucuuaauauauuuga

SEQ ID NO: 3787336 - RNA, 21 nt, Human
aucuuaauguuccucaaagcu

SEQ ID NO: 3787337 - RNA, 13 nt, Human
aucuuaauuuugg

SEQ ID NO: 3787338 - RNA, 21 nt, Human
aucuuacaacaggcuuaugaa

SEQ ID NO: 3787339 - RNA, 15 nt, Human
aucuuacugaaggua

SEQ ID NO: 3787340 - RNA, 13 nt, Human
aucuuacuuugua

SEQ ID NO: 3787341 - RNA, 16 nt, Human
aucuuacuuuguaaau

SEQ ID NO: 3787342 - RNA, 13 nt, Human
aucuuagauucuc

SEQ ID NO: 3787343 - RNA, 18 nt, Human
aucuuagauucucugugu

SEQ ID NO: 3787344 - RNA, 16 nt, Human
aucuuagcugccaagu

SEQ ID NO: 3787345 - RNA, 18 nt, Human
aucuuagugccugagagu

SEQ ID NO: 3787346 - RNA, 12 nt, Human
aucuuagugguu

SEQ ID NO: 3787347 - RNA, 15 nt, Human
aucuuauaauuuaaa

SEQ ID NO: 3787348 - RNA, 13 nt, Human
aucuuauacugua

SEQ ID NO: 3787349 - RNA, 15 nt, Human
aucuuauagcacuuu

SEQ ID NO: 3787350 - RNA, 18 nt, Human
aucuuauagcacuuugaa

SEQ ID NO: 3787351 - RNA, 17 nt, Human
aucuuauaguucuaggc

SEQ ID NO: 3787352 - RNA, 22 nt, Human
aucuuaucaagaguugugacaa

SEQ ID NO: 3787353 - RNA, 20 nt, Human
aucuuaucauggucucaguc

SEQ ID NO: 3787354 - RNA, 19 nt, Human
aucuuaucucagauauuug

SEQ ID NO: 3787355 - RNA, 14 nt, Human
aucuuauuaaaguu

SEQ ID NO: 3787356 - RNA, 23 nt, Human
aucuuauuaaaguuucaaaaauc

SEQ ID NO: 3787357 - RNA, 21 nt, Human
aucuuauuagggagaaaauuc

SEQ ID NO: 3787358 - RNA, 13 nt, Human
aucuuauucauuu

SEQ ID NO: 3787359 - RNA, 13 nt, Human
aucuuauuuagga

SEQ ID NO: 3787360 - RNA, 15 nt, Human
aucuuauuuuucuaa

SEQ ID NO: 3787361 - RNA, 21 nt, Human
aucuuauuuuucuaaacguaa

SEQ ID NO: 3787362 - RNA, 19 nt, Human
aucuucaaagcuugaagau

SEQ ID NO: 3787363 - RNA, 12 nt, Human
aucuucacauag

SEQ ID NO: 3787364 - RNA, 21 nt, Human
aucuucaccagaggaaucacu

SEQ ID NO: 3787365 - RNA, 17 nt, Human
aucuucacccaggccua

SEQ ID NO: 3787366 - RNA, 19 nt, Human
aucuucacccaggccuaug

SEQ ID NO: 3787367 - RNA, 14 nt, Human
aucuucagcuucuu

SEQ ID NO: 3787368 - RNA, 14 nt, Human
aucuucaguuuuau

SEQ ID NO: 3787369 - RNA, 22 nt, Human
aucuucauaucuaucagaguau

SEQ ID NO: 3787370 - RNA, 23 nt, Human
aucuucauggaauucacaaagua

SEQ ID NO: 3787371 - RNA, 19 nt, Human
aucuuccaacucaaacucu

SEQ ID NO: 3787372 - RNA, 18 nt, Human
aucuuccagaagugugau

SEQ ID NO: 3787373 - RNA, 14 nt, Human
aucuuccauauuug

SEQ ID NO: 3787374 - RNA, 15 nt, Human
aucuuccauauuugg

SEQ ID NO: 3787375 - RNA, 14 nt, Human
aucuucccaugcau

SEQ ID NO: 3787376 - RNA, 20 nt, Human
augaaaauccuaccaaccuc

SEQ ID NO: 3787377 - RNA, 18 nt, Human
augaaaaugaguugugaa

SEQ ID NO: 3787378 - RNA, 20 nt, Human
augaaaaugaguugugaaag

SEQ ID NO: 3787379 - RNA, 13 nt, Human
augaaaaugucag

SEQ ID NO: 3787380 - RNA, 14 nt, Human
augaaaaugucuug

SEQ ID NO: 3787381 - RNA, 15 nt, Human
augaaaaugucuugu

SEQ ID NO: 3787382 - RNA, 11 nt, Human
augaaaauugu

SEQ ID NO: 3787383 - RNA, 15 nt, Human
augaaaauuguauua

SEQ ID NO: 3787384 - RNA, 13 nt, Human
augaaaauuugag

SEQ ID NO: 3787385 - RNA, 19 nt, Human
augaaaauuugagacuauu

SEQ ID NO: 3787386 - RNA, 12 nt, Human
augaaacacagc

SEQ ID NO: 3787387 - RNA, 12 nt, Human
augaaacaccuu

SEQ ID NO: 3787388 - RNA, 17 nt, Human
augaaacaccuucucug

SEQ ID NO: 3787389 - RNA, 13 nt, Human
augaaacuaaagc

SEQ ID NO: 3787390 - RNA, 15 nt, Human
augaaacuaaagcaa

SEQ ID NO: 3787391 - RNA, 16 nt, Human
augaaacuaaagcaau

SEQ ID NO: 3787392 - RNA, 23 nt, Human
augaaacuaaagcaauagaaaca

SEQ ID NO: 3787393 - RNA, 14 nt, Human
augaaagaaaggcc

SEQ ID NO: 3787394 - RNA, 14 nt, Human
augaaagaauauau

SEQ ID NO: 3787395 - RNA, 18 nt, Human
augaaagaguaaaggaaa

SEQ ID NO: 3787396 - RNA, 12 nt, Human
augaaagaugau

SEQ ID NO: 3787397 - RNA, 19 nt, Human
augaaagauggcugugccu

SEQ ID NO: 3787398 - RNA, 20 nt, Human
augaaagauggcugugccuc

SEQ ID NO: 3787399 - RNA, 12 nt, Human
augaaagcaugu

SEQ ID NO: 3787400 - RNA, 18 nt, Human
augaaagcauguggcaug

SEQ ID NO: 3787401 - RNA, 23 nt, Human
augaaagcugauuacugucaaua

SEQ ID NO: 3787402 - RNA, 16 nt, Human
augaaagcuguuccuu

SEQ ID NO: 3787403 - RNA, 18 nt, Human
augaaagcuguuccuugg

SEQ ID NO: 3787404 - RNA, 12 nt, Human
augaaaggagag

SEQ ID NO: 3787405 - RNA, 15 nt, Human
augaaagguacuaua

SEQ ID NO: 3787406 - RNA, 17 nt, Human
augaaaggugccaugga

SEQ ID NO: 3787407 - RNA, 16 nt, Human
augaaagguuuacauu

SEQ ID NO: 3787408 - RNA, 16 nt, Human
augaaaguauuaaaau

SEQ ID NO: 3787409 - RNA, 16 nt, Human
augaaagucaguuuaa

SEQ ID NO: 3787410 - RNA, 20 nt, Human
augaaagucuagaaauaaaa

SEQ ID NO: 3787411 - RNA, 19 nt, Human
augaaagucuugugacuag

SEQ ID NO: 3787412 - RNA, 16 nt, Human
augaaauaaaauauau

SEQ ID NO: 3787413 - RNA, 14 nt, Human
augaaauaaagaaa

SEQ ID NO: 3787414 - RNA, 19 nt, Human
augaaauacacaaguaaac

SEQ ID NO: 3787415 - RNA, 20 nt, Human
augaaauacacaaguaaaca

SEQ ID NO: 3787416 - RNA, 17 nt, Human
augaaauacuauuuaaa

SEQ ID NO: 3787417 - RNA, 13 nt, Human
augaaauaugcau

SEQ ID NO: 3787418 - RNA, 15 nt, Human
augaaauaugcaucu

SEQ ID NO: 3787419 - RNA, 19 nt, Human
augaaauccuugacuggac

SEQ ID NO: 3787420 - RNA, 16 nt, Human
augaaauccuuuuccu

SEQ ID NO: 3787421 - RNA, 18 nt, Human
augaaaucuuacagcugg

SEQ ID NO: 3787422 - RNA, 16 nt, Human
augaaaugaacacaaa

SEQ ID NO: 3787423 - RNA, 22 nt, Human
augaaaugugaauuuuuauugu

SEQ ID NO: 3787424 - RNA, 23 nt, Human
augaaaugugaauuuuuauuguu

SEQ ID NO: 3787425 - RNA, 16 nt, Human
augaaauuacuuauca

SEQ ID NO: 3787426 - RNA, 23 nt, Human
augaaauuacuuaucauccacau

SEQ ID NO: 3787427 - RNA, 21 nt, Human
augaaauuauauaaguauucu

SEQ ID NO: 3787428 - RNA, 20 nt, Human
augaaauugucuagcagagc

SEQ ID NO: 3787429 - RNA, 14 nt, Human
augaaauuuaaaca

SEQ ID NO: 3787430 - RNA, 21 nt, Human
augaaauuuaaacauuaaaaa

SEQ ID NO: 3787431 - RNA, 17 nt, Human
augaaauuuaauauagc

SEQ ID NO: 3787432 - RNA, 15 nt, Human
augaaauuuuaccaa

SEQ ID NO: 3787433 - RNA, 20 nt, Human
augaaauuuuccaaugucug

SEQ ID NO: 3787434 - RNA, 14 nt, Human
augaaauuuuugua

SEQ ID NO: 3787435 - RNA, 17 nt, Human
augaacaaaauuauuug

SEQ ID NO: 3787436 - RNA, 12 nt, Human
augaacaaaugg

SEQ ID NO: 3787437 - RNA, 15 nt, Human
augaacaaauugaac

SEQ ID NO: 3787438 - RNA, 20 nt, Human
augaacacaaauuaugcuaa

SEQ ID NO: 3787439 - RNA, 13 nt, Human
augaacagugcac

SEQ ID NO: 3787440 - RNA, 20 nt, Human
augaacauuagaaaaauagc

SEQ ID NO: 3787441 - RNA, 10 nt, Human
augaacauuc

SEQ ID NO: 3787442 - RNA, 13 nt, Human
augaaccacaucu

SEQ ID NO: 3787443 - RNA, 22 nt, Human
augaacccaggacgcuucugaa

SEQ ID NO: 3787444 - RNA, 18 nt, Human
augaacccuuccugagcu

SEQ ID NO: 3787445 - RNA, 17 nt, Human
augaacccuuuguuucu

SEQ ID NO: 3787446 - RNA, 17 nt, Human
augaaccgcugaauaug

SEQ ID NO: 3787447 - RNA, 23 nt, Human
augaaccucaagcugcaucuaga

SEQ ID NO: 3787448 - RNA, 14 nt, Human
augaaccuucuggc

SEQ ID NO: 3787449 - RNA, 17 nt, Human
augaaccuucuggccuc

SEQ ID NO: 3787450 - RNA, 16 nt, Human
augaacggugagcauu

SEQ ID NO: 3787451 - RNA, 14 nt, Human
augaacucaacuuu

SEQ ID NO: 3787452 - RNA, 19 nt, Human
augaacugcauguauaaau

SEQ ID NO: 3787453 - RNA, 20 nt, Human
augaacugcauguauaaaug

SEQ ID NO: 3787454 - RNA, 19 nt, Human
augaacuggaggccaggaa

SEQ ID NO: 3787455 - RNA, 16 nt, Human
augaacuuaacaugcu

SEQ ID NO: 3787456 - RNA, 20 nt, Human
augaacuuagauuuuacaug

SEQ ID NO: 3787457 - RNA, 17 nt, Human
augaacuuauucuguag

SEQ ID NO: 3787458 - RNA, 20 nt, Human
augaacuucgcaucaaaaga

SEQ ID NO: 3787459 - RNA, 22 nt, Human
augaacuucgcaucaaaagaca

SEQ ID NO: 3787460 - RNA, 23 nt, Human
augaacuucgcaucaaaagacaa

SEQ ID NO: 3787461 - RNA, 22 nt, Human
augaagaaaagugggccagugu

SEQ ID NO: 3787462 - RNA, 22 nt, Human
augaagaaaauacuuaaauguu

SEQ ID NO: 3787463 - RNA, 23 nt, Human
augaagaaaauacuuaaauguua

SEQ ID NO: 3787464 - RNA, 15 nt, Human
augaagaacugagga

SEQ ID NO: 3787465 - RNA, 17 nt, Human
augaagaauagaaacaa

SEQ ID NO: 3787466 - RNA, 24 nt, Human
augaagaccuuuuucugcacuaua

SEQ ID NO: 3787467 - RNA, 19 nt, Human
augaagacucgcaauuuca

SEQ ID NO: 3787468 - RNA, 18 nt, Human
augaagagaagcaauuuu

SEQ ID NO: 3787469 - RNA, 13 nt, Human
augaagagcaaaa

SEQ ID NO: 3787470 - RNA, 18 nt, Human
augaagagugagagggca

SEQ ID NO: 3787471 - RNA, 21 nt, Human
augaagauaccaucagcaaag

SEQ ID NO: 3787472 - RNA, 22 nt, Human
augaagauauuuuuccauuuuu

SEQ ID NO: 3787473 - RNA, 18 nt, Human
augaagauguagaggaga

SEQ ID NO: 3787474 - RNA, 12 nt, Human
augaagauuauu

SEQ ID NO: 3787475 - RNA, 15 nt, Human
aggggcccuggagca

SEQ ID NO: 3787476 - RNA, 20 nt, Human
aggggcccuuggagcgugga

SEQ ID NO: 3787477 - RNA, 19 nt, Human
aggggccgaugcccagaga

SEQ ID NO: 3787478 - RNA, 16 nt, Human
aggggccgcugccacc

SEQ ID NO: 3787479 - RNA, 17 nt, Human
aggggccgggggcaguc

SEQ ID NO: 3787480 - RNA, 19 nt, Human
aggggccucuuaugggcug

SEQ ID NO: 3787481 - RNA, 12 nt, Human
aggggccugagc

SEQ ID NO: 3787482 - RNA, 17 nt, Human
aggggccugccaccugg

SEQ ID NO: 3787483 - RNA, 21 nt, Human
aggggccugccaccuggaccc

SEQ ID NO: 3787484 - RNA, 13 nt, Human
aggggccugccca

SEQ ID NO: 3787485 - RNA, 14 nt, Human
aggggccugcccag

SEQ ID NO: 3787486 - RNA, 21 nt, Human
aggggccuggagauccuccug

SEQ ID NO: 3787487 - RNA, 16 nt, Human
aggggcgcccaccucc

SEQ ID NO: 3787488 - RNA, 16 nt, Human
aggggcgcuggcccag

SEQ ID NO: 3787489 - RNA, 20 nt, Human
aggggcgcuggcccagccgg

SEQ ID NO: 3787490 - RNA, 23 nt, Human
aggggcgcuggcccagccggccu

SEQ ID NO: 3787491 - RNA, 17 nt, Human
aggggcggcaggaggga

SEQ ID NO: 3787492 - RNA, 20 nt, Human
aggggcggcaggagggaggu

SEQ ID NO: 3787493 - RNA, 21 nt, Human
aggggcgggaauauuguuucu

SEQ ID NO: 3787494 - RNA, 19 nt, Human
aggggcgucuguucccccu

SEQ ID NO: 3787495 - RNA, 20 nt, Human
aggggcgugggaguggccug

SEQ ID NO: 3787496 - RNA, 14 nt, Human
aggggcguguggcu

SEQ ID NO: 3787497 - RNA, 14 nt, Human
aggggcuaccagga

SEQ ID NO: 3787498 - RNA, 15 nt, Human
aggggcuaccaggaa

SEQ ID NO: 3787499 - RNA, 17 nt, Human
aggggcuaccaggaaag

SEQ ID NO: 3787500 - RNA, 20 nt, Human
aggggcuagaaccuagagaa

SEQ ID NO: 3787501 - RNA, 15 nt, Human
aggggcucaggaaaa

SEQ ID NO: 3787502 - RNA, 16 nt, Human
aggggcuccaugccag

SEQ ID NO: 3787503 - RNA, 23 nt, Human
aggggcuccuggaaaggcucagu

SEQ ID NO: 3787504 - RNA, 22 nt, Human
aggggcucucagcucagcgcca

SEQ ID NO: 3787505 - RNA, 15 nt, Human
aggggcucuggagag

SEQ ID NO: 3787506 - RNA, 15 nt, Human
aggggcugcccgcuc

SEQ ID NO: 3787507 - RNA, 20 nt, Human
aggggcugcccgcucccagu

SEQ ID NO: 3787508 - RNA, 20 nt, Human
aggggcugcuuccuccugga

SEQ ID NO: 3787509 - RNA, 21 nt, Human
aggggcugcuuccuccuggaa

SEQ ID NO: 3787510 - RNA, 15 nt, Human
aggggcuggacuggc

SEQ ID NO: 3787511 - RNA, 18 nt, Human
aggggcuggacuggcugu

SEQ ID NO: 3787512 - RNA, 23 nt, Human
aggggcuggccuuccugcccuac

SEQ ID NO: 3787513 - RNA, 17 nt, Human
aggggcuggcuucagga

SEQ ID NO: 3787514 - RNA, 19 nt, Human
aggggcuggcuucaggagg

SEQ ID NO: 3787515 - RNA, 21 nt, Human
aggggcuuaauuauugauguu

SEQ ID NO: 3787516 - RNA, 12 nt, Human
agggggagaaaa

SEQ ID NO: 3787517 - RNA, 21 nt, Human
agggggagaaaaggaaaagaa

SEQ ID NO: 3787518 - RNA, 21 nt, Human
agggggagccccuucugcuca

SEQ ID NO: 3787519 - RNA, 15 nt, Human
agggggaggggaagu

SEQ ID NO: 3787520 - RNA, 13 nt, Human
augaauaauggaa

SEQ ID NO: 3787521 - RNA, 14 nt, Human
augaauacaaauuu

SEQ ID NO: 3787522 - RNA, 16 nt, Human
augaauacagcagcaa

SEQ ID NO: 3787523 - RNA, 21 nt, Human
augaauacagggcaugcauuu

SEQ ID NO: 3787524 - RNA, 12 nt, Human
augaauauaaaa

SEQ ID NO: 3787525 - RNA, 23 nt, Human
augaauauauuuaagcaacaucu

SEQ ID NO: 3787526 - RNA, 18 nt, Human
augaauaucuauuaauau

SEQ ID NO: 3787527 - RNA, 14 nt, Human
augaauaugaugac

SEQ ID NO: 3787528 - RNA, 12 nt, Human
augaauauuuug

SEQ ID NO: 3787529 - RNA, 14 nt, Human
augaauauuuugau

SEQ ID NO: 3787530 - RNA, 22 nt, Human
augaauauuuugauaauaauau

SEQ ID NO: 3787531 - RNA, 14 nt, Human
augaaucaaagaca

SEQ ID NO: 3787532 - RNA, 13 nt, Human
augaaucacuguu

SEQ ID NO: 3787533 - RNA, 19 nt, Human
augaaucacuguuuuuaga

SEQ ID NO: 3787534 - RNA, 23 nt, Human
augaaucacuguuuuuagacacc

SEQ ID NO: 3787535 - RNA, 11 nt, Human
augaaucuaug

SEQ ID NO: 3787536 - RNA, 21 nt, Human
augaaucuaugccaaagauca

SEQ ID NO: 3787537 - RNA, 23 nt, Human
augaaucugucucccaguuauga

SEQ ID NO: 3787538 - RNA, 22 nt, Human
augaaugacuuccccaauaucu

SEQ ID NO: 3787539 - RNA, 23 nt, Human
augaaugacuuccccaauaucuu

SEQ ID NO: 3787540 - RNA, 21 nt, Human
augaaugcccagugagacugu

SEQ ID NO: 3787541 - RNA, 20 nt, Human
augaaugcccccagcuggcc

SEQ ID NO: 3787542 - RNA, 21 nt, Human
augaaugcccccagcuggccc

SEQ ID NO: 3787543 - RNA, 21 nt, Human
augaaugcuuaaagaauucaa

SEQ ID NO: 3787544 - RNA, 21 nt, Human
augaaugggcaaaacugaauu

SEQ ID NO: 3787545 - RNA, 19 nt, Human
augaauguaaauuuguacu

SEQ ID NO: 3787546 - RNA, 17 nt, Human
augaauguaugugcacu

SEQ ID NO: 3787547 - RNA, 15 nt, Human
augaauguauuuauu

SEQ ID NO: 3787548 - RNA, 17 nt, Human
augaauguauuuauuug

SEQ ID NO: 3787549 - RNA, 20 nt, Human
augaauguauuuauuuggga

SEQ ID NO: 3787550 - RNA, 19 nt, Human
augaaugucacuucuggau

SEQ ID NO: 3787551 - RNA, 14 nt, Human
augaaugugaagcc

SEQ ID NO: 3787552 - RNA, 16 nt, Human
augaaugugaagccuu

SEQ ID NO: 3787553 - RNA, 23 nt, Human
augaauguuccugccuccuugau

SEQ ID NO: 3787554 - RNA, 22 nt, Human
augaauguuuacacucuuugua

SEQ ID NO: 3787555 - RNA, 15 nt, Human
augaauuacauuugu

SEQ ID NO: 3787556 - RNA, 18 nt, Human
augaauuacauuuguaua

SEQ ID NO: 3787557 - RNA, 21 nt, Human
augaauugcguuggucucugc

SEQ ID NO: 3787558 - RNA, 22 nt, Human
augaauuguacagaauauuucu

SEQ ID NO: 3787559 - RNA, 21 nt, Human
augaauuuauugcacauuguu

SEQ ID NO: 3787560 - RNA, 15 nt, Human
augaauuuggagacu

SEQ ID NO: 3787561 - RNA, 14 nt, Human
augaauuuguaaug

SEQ ID NO: 3787562 - RNA, 19 nt, Human
augaauuuguaaugucuug

SEQ ID NO: 3787563 - RNA, 17 nt, Human
augaauuuuaaaaucug

SEQ ID NO: 3787564 - RNA, 15 nt, Human
augaauuuuaagggu

SEQ ID NO: 3787565 - RNA, 14 nt, Human
augaauuuuagcuu

SEQ ID NO: 3787566 - RNA, 16 nt, Human
augaauuuuagcuuuu

SEQ ID NO: 3787567 - RNA, 18 nt, Human
augaauuuucaaguaauu

SEQ ID NO: 3787568 - RNA, 22 nt, Human
augaauuuucaaguaauuguga

SEQ ID NO: 3787569 - RNA, 15 nt, Human
augacaaaaauucaa

SEQ ID NO: 3787570 - RNA, 19 nt, Human
augacaaaaauucaacuca

SEQ ID NO: 3787571 - RNA, 18 nt, Human
augacaacuggaauaguu

SEQ ID NO: 3787572 - RNA, 19 nt, Human
augacaacuggaauaguuu

SEQ ID NO: 3787573 - RNA, 19 nt, Human
augacaacuucuaauugcc

SEQ ID NO: 3787574 - RNA, 15 nt, Human
augacaagccccagg

SEQ ID NO: 3787575 - RNA, 15 nt, Human
augacaauaaagcuu

SEQ ID NO: 3787576 - RNA, 17 nt, Human
augacacauuuggcagu

SEQ ID NO: 3787577 - RNA, 15 nt, Human
augacaccaucuuuu

SEQ ID NO: 3787578 - RNA, 16 nt, Human
augacaccaucuuuua

SEQ ID NO: 3787579 - RNA, 17 nt, Human
augacacugaaaugccu

SEQ ID NO: 3787580 - RNA, 16 nt, Human
augacacugagaacag

SEQ ID NO: 3787581 - RNA, 20 nt, Human
augacagaaaauauguauua

SEQ ID NO: 3787582 - RNA, 16 nt, Human
augacagauguugaau

SEQ ID NO: 3787583 - RNA, 16 nt, Human
augacagccugcagca

SEQ ID NO: 3787584 - RNA, 15 nt, Human
augacaggccugucc

SEQ ID NO: 3787585 - RNA, 22 nt, Human
augacaguaauuguguuuacau

SEQ ID NO: 3787586 - RNA, 19 nt, Human
augacaguccgucaaaaca

SEQ ID NO: 3787587 - RNA, 20 nt, Human
augacaguccgucaaaacag

SEQ ID NO: 3787588 - RNA, 17 nt, Human
augacaguguuccccga

SEQ ID NO: 3787589 - RNA, 20 nt, Human
augacauaacagugcagggc

SEQ ID NO: 3787590 - RNA, 23 nt, Human
augacauacgcuuuuaaugaaaa

SEQ ID NO: 3787591 - RNA, 20 nt, Human
augacaucuuuuuaaagcuu

SEQ ID NO: 3787592 - RNA, 21 nt, Human
augacaucuuuuuaaagcuua

SEQ ID NO: 3787593 - RNA, 22 nt, Human
augacaugaggaaaauaaugua

SEQ ID NO: 3787594 - RNA, 16 nt, Human
augacaugcacugacc

SEQ ID NO: 3787595 - RNA, 17 nt, Human
augacaugcacugaccc

SEQ ID NO: 3787596 - RNA, 18 nt, Human
augacaugcacugacccu

SEQ ID NO: 3787597 - RNA, 19 nt, Human
augacaugcacugacccuu

SEQ ID NO: 3787598 - RNA, 22 nt, Human
augacaugcacugacccuucca

SEQ ID NO: 3787599 - RNA, 13 nt, Human
augacauguguca

SEQ ID NO: 3787600 - RNA, 15 nt, Human
augacauguuauaua

SEQ ID NO: 3787601 - RNA, 22 nt, Human
augacauuaaagaaggguugag

SEQ ID NO: 3787602 - RNA, 16 nt, Human
augacauucaugccug

SEQ ID NO: 3787603 - RNA, 18 nt, Human
augacauucaugccuggc

SEQ ID NO: 3787604 - RNA, 16 nt, Human
augacauugacuauuu

SEQ ID NO: 3787605 - RNA, 20 nt, Human
augacauuggauagaacaug

SEQ ID NO: 3787606 - RNA, 22 nt, Human
augacauuucuuugugcuuugg

SEQ ID NO: 3787607 - RNA, 20 nt, Human
augaccaauuuuaacuuaga

SEQ ID NO: 3787608 - RNA, 18 nt, Human
augaccacacuccagcug

SEQ ID NO: 3787609 - RNA, 13 nt, Human
augaccaguaaag

SEQ ID NO: 3787610 - RNA, 13 nt, Human
augacccaaagac

SEQ ID NO: 3787611 - RNA, 15 nt, Human
augacccaaagacca

SEQ ID NO: 3787612 - RNA, 16 nt, Human
augacccaaagaccaa

SEQ ID NO: 3787613 - RNA, 16 nt, Human
augacccaccccugug

SEQ ID NO: 3787614 - RNA, 15 nt, Human
augacccaggcuggg

SEQ ID NO: 3787615 - RNA, 22 nt, Human
augacccagugguuccuaaucc

SEQ ID NO: 3787616 - RNA, 16 nt, Human
augacccccccagcuu

SEQ ID NO: 3787617 - RNA, 18 nt, Human
augacccugccucuccca

SEQ ID NO: 3787618 - RNA, 23 nt, Human
augacccugccucucccaggcag

SEQ ID NO: 3787619 - RNA, 20 nt, Human
augaccucauuaaccgaugc

SEQ ID NO: 3787620 - RNA, 20 nt, Human
augaccucuguccucccucu

SEQ ID NO: 3787621 - RNA, 21 nt, Human
augaccuuauccuuccucucc

SEQ ID NO: 3787622 - RNA, 17 nt, Human
augaccuucuaggaagc

SEQ ID NO: 3787623 - RNA, 18 nt, Human
augaccuuguaauguaac

SEQ ID NO: 3787624 - RNA, 13 nt, Human
augaccuuucaau

SEQ ID NO: 3787625 - RNA, 15 nt, Human
augaccuuucaauag

SEQ ID NO: 3787626 - RNA, 22 nt, Human
augaccuuucaauaggaaaaac

SEQ ID NO: 3787627 - RNA, 21 nt, Human
augacgacaaagcugcuaaau

SEQ ID NO: 3787628 - RNA, 13 nt, Human
augccauaauaca

SEQ ID NO: 3787629 - RNA, 17 nt, Human
augccauaauacaaaag

SEQ ID NO: 3787630 - RNA, 16 nt, Human
augccaucaucuccug

SEQ ID NO: 3787631 - RNA, 18 nt, Human
augccauggacagaagaa

SEQ ID NO: 3787632 - RNA, 16 nt, Human
augccauuuguacuga

SEQ ID NO: 3787633 - RNA, 19 nt, Human
augcccacccccugcccug

SEQ ID NO: 3787634 - RNA, 17 nt, Human
augcccacguucuuucc

SEQ ID NO: 3787635 - RNA, 11 nt, Human
augcccagaga

SEQ ID NO: 3787636 - RNA, 16 nt, Human
augcccagagacccag

SEQ ID NO: 3787637 - RNA, 18 nt, Human
augcccagagacccagcg

SEQ ID NO: 3787638 - RNA, 11 nt, Human
augcccagccc

SEQ ID NO: 3787639 - RNA, 13 nt, Human
augcccagccccu

SEQ ID NO: 3787640 - RNA, 15 nt, Human
augcccagcguuuga

SEQ ID NO: 3787641 - RNA, 21 nt, Human
augcccagggccacucugccu

SEQ ID NO: 3787642 - RNA, 16 nt, Human
augcccagugagacug

SEQ ID NO: 3787643 - RNA, 17 nt, Human
augcccaguuucugccu

SEQ ID NO: 3787644 - RNA, 18 nt, Human
augcccaguuucugccuc

SEQ ID NO: 3787645 - RNA, 15 nt, Human
augccccggccaccu

SEQ ID NO: 3787646 - RNA, 17 nt, Human
augccccggccaccucu

SEQ ID NO: 3787647 - RNA, 18 nt, Human
augccccgucccccucug

SEQ ID NO: 3787648 - RNA, 16 nt, Human
augccccuggcuggga

SEQ ID NO: 3787649 - RNA, 13 nt, Human
augcccucccuuc

SEQ ID NO: 3787650 - RNA, 23 nt, Human
augcccuccucucccauuguccc

SEQ ID NO: 3787651 - RNA, 14 nt, Human
augcccuggaggug

SEQ ID NO: 3787652 - RNA, 14 nt, Human
augcccuggaucca

SEQ ID NO: 3787653 - RNA, 19 nt, Human
augcccuggauccaucagg

SEQ ID NO: 3787654 - RNA, 12 nt, Human
augcccugugca

SEQ ID NO: 3787655 - RNA, 19 nt, Human
augccgauauacucuagau

SEQ ID NO: 3787656 - RNA, 15 nt, Human
augccgauuucugua

SEQ ID NO: 3787657 - RNA, 18 nt, Human
augccgcgaugggucagg

SEQ ID NO: 3787658 - RNA, 14 nt, Human
augccggaugugcu

SEQ ID NO: 3787659 - RNA, 15 nt, Human
augccggaugugcuu

SEQ ID NO: 3787660 - RNA, 22 nt, Human
augccguggauugcacguggcc

SEQ ID NO: 3787661 - RNA, 20 nt, Human
augccguuacuuuucauauu

SEQ ID NO: 3787662 - RNA, 15 nt, Human
augccuaagaagaug

SEQ ID NO: 3787663 - RNA, 20 nt, Human
augccuaagaagaugacuuc

SEQ ID NO: 3787664 - RNA, 15 nt, Human
agggugggugcucag

SEQ ID NO: 3787665 - RNA, 16 nt, Human
agggugggugcucaga

SEQ ID NO: 3787666 - RNA, 23 nt, Human
aggguggugcugggacugagcca

SEQ ID NO: 3787667 - RNA, 17 nt, Human
agggugguggagccagu

SEQ ID NO: 3787668 - RNA, 20 nt, Human
agggugguucaacaaagaaa

SEQ ID NO: 3787669 - RNA, 15 nt, Human
agggugucugccccc

SEQ ID NO: 3787670 - RNA, 23 nt, Human
aggguguggggccaugccuccuc

SEQ ID NO: 3787671 - RNA, 17 nt, Human
aggguuaugauuaagua

SEQ ID NO: 3787672 - RNA, 18 nt, Human
aggguuauugcauuugga

SEQ ID NO: 3787673 - RNA, 22 nt, Human
aggguucaaaaugucuguagcu

SEQ ID NO: 3787674 - RNA, 18 nt, Human
aggguucagagacucagg

SEQ ID NO: 3787675 - RNA, 17 nt, Human
aggguucccgcggggcu

SEQ ID NO: 3787676 - RNA, 19 nt, Human
aggguucccgcggggcugu

SEQ ID NO: 3787677 - RNA, 23 nt, Human
aggguuccuguagaccuagggag

SEQ ID NO: 3787678 - RNA, 14 nt, Human
aggguucugccucu

SEQ ID NO: 3787679 - RNA, 19 nt, Human
aggguucugccucuccagg

SEQ ID NO: 3787680 - RNA, 18 nt, Human
aggguugaccccagagga

SEQ ID NO: 3787681 - RNA, 14 nt, Human
aggguugaucacac

SEQ ID NO: 3787682 - RNA, 16 nt, Human
aggguugcuggagccu

SEQ ID NO: 3787683 - RNA, 20 nt, Human
aggguuggcaccuucccccu

SEQ ID NO: 3787684 - RNA, 17 nt, Human
aggguuggccccugccc

SEQ ID NO: 3787685 - RNA, 14 nt, Human
aggguugugauuuu

SEQ ID NO: 3787686 - RNA, 14 nt, Human
aggguuuaaagaug

SEQ ID NO: 3787687 - RNA, 20 nt, Human
aggguuuauguuuaggaugu

SEQ ID NO: 3787688 - RNA, 19 nt, Human
aggguuucgagaagcugcu

SEQ ID NO: 3787689 - RNA, 20 nt, Human
aggguuuggcugugucuaaa

SEQ ID NO: 3787690 - RNA, 22 nt, Human
aggguuuggcugugucuaaacu

SEQ ID NO: 3787691 - RNA, 18 nt, Human
aggguuugugacagggcg

SEQ ID NO: 3787692 - RNA, 21 nt, Human
aggguuugugacagggcgggg

SEQ ID NO: 3787693 - RNA, 22 nt, Human
aggguuuugccauguuggccag

SEQ ID NO: 3787694 - RNA, 13 nt, Human
aggguuuuuaccu

SEQ ID NO: 3787695 - RNA, 22 nt, Human
aggguuuuuaccugucacauug

SEQ ID NO: 3787696 - RNA, 14 nt, Human
agguaaaacagggc

SEQ ID NO: 3787697 - RNA, 13 nt, Human
agguaaaaugcca

SEQ ID NO: 3787698 - RNA, 16 nt, Human
agguaaaaugccauga

SEQ ID NO: 3787699 - RNA, 14 nt, Human
agguaaaauguauu

SEQ ID NO: 3787700 - RNA, 16 nt, Human
agguaaaauguauuuu

SEQ ID NO: 3787701 - RNA, 14 nt, Human
agguaaaauucuaa

SEQ ID NO: 3787702 - RNA, 19 nt, Human
agguaaaauucuaaauaaa

SEQ ID NO: 3787703 - RNA, 14 nt, Human
agguaaacaguucu

SEQ ID NO: 3787704 - RNA, 14 nt, Human
agguaaauaaaaag

SEQ ID NO: 3787705 - RNA, 20 nt, Human
agguaaauaaaaagaaaggc

SEQ ID NO: 3787706 - RNA, 23 nt, Human
agguaaaucagacuaugaaguuu

SEQ ID NO: 3787707 - RNA, 13 nt, Human
agguaacagaaca

SEQ ID NO: 3787708 - RNA, 21 nt, Human
agguaacagaacagcuucagg

SEQ ID NO: 3787709 - RNA, 23 nt, Human
agguaacagaacagcuucagguu

SEQ ID NO: 3787710 - RNA, 19 nt, Human
agguaagggugacaaaugg

SEQ ID NO: 3787711 - RNA, 19 nt, Human
agguaaugaccaugaaaga

SEQ ID NO: 3787712 - RNA, 20 nt, Human
agguaaugaccaugaaagac

SEQ ID NO: 3787713 - RNA, 21 nt, Human
agguaauuuuuacccuaaugu

SEQ ID NO: 3787714 - RNA, 16 nt, Human
agguacaagaagcauu

SEQ ID NO: 3787715 - RNA, 14 nt, Human
agguacacuuguga

SEQ ID NO: 3787716 - RNA, 16 nt, Human
agguacacuugugaau

SEQ ID NO: 3787717 - RNA, 15 nt, Human
agguacagagaagga

SEQ ID NO: 3787718 - RNA, 18 nt, Human
agguacagagaccucccu

SEQ ID NO: 3787719 - RNA, 21 nt, Human
agguaccacugauuuggagau

SEQ ID NO: 3787720 - RNA, 22 nt, Human
agguaccagcaauauguaaaua

SEQ ID NO: 3787721 - RNA, 16 nt, Human
agguaccagcugcgcu

SEQ ID NO: 3787722 - RNA, 12 nt, Human
agguaccauccu

SEQ ID NO: 3787723 - RNA, 18 nt, Human
agguacccaauagcugcc

SEQ ID NO: 3787724 - RNA, 20 nt, Human
agguacccaauagcugccca

SEQ ID NO: 3787725 - RNA, 19 nt, Human
agguaccccagcucugcuu

SEQ ID NO: 3787726 - RNA, 21 nt, Human
agguaccccagcucugcuugc

SEQ ID NO: 3787727 - RNA, 17 nt, Human
agguaccccuuucuggc

SEQ ID NO: 3787728 - RNA, 22 nt, Human
agguaccuugaccuuuguacag

SEQ ID NO: 3787729 - RNA, 16 nt, Human
agguaccuuucacaua

SEQ ID NO: 3787730 - RNA, 13 nt, Human
agguacgcacaga

SEQ ID NO: 3787731 - RNA, 12 nt, Human
agguacuauuau

SEQ ID NO: 3787732 - RNA, 14 nt, Human
agguacuauucuga

SEQ ID NO: 3787733 - RNA, 11 nt, Human
agguacuguau

SEQ ID NO: 3787734 - RNA, 15 nt, Human
agguacuguaugauc

SEQ ID NO: 3787735 - RNA, 21 nt, Human
agguacuguaugaucaaaugu

SEQ ID NO: 3787736 - RNA, 23 nt, Human
agguagaaauaucugaaaaugua

SEQ ID NO: 3787737 - RNA, 15 nt, Human
agguagaaccucacc

SEQ ID NO: 3787738 - RNA, 18 nt, Human
agguagaacgccagggac

SEQ ID NO: 3787739 - RNA, 17 nt, Human
agguagaauguuuucaa

SEQ ID NO: 3787740 - RNA, 20 nt, Human
agguagaccaggauuucuaa

SEQ ID NO: 3787741 - RNA, 19 nt, Human
agguagacuuuuaugagaa

SEQ ID NO: 3787742 - RNA, 15 nt, Human
agguagagucugagg

SEQ ID NO: 3787743 - RNA, 19 nt, Human
agguagcugaaaggggaag

SEQ ID NO: 3787744 - RNA, 14 nt, Human
agguaggccaaggu

SEQ ID NO: 3787745 - RNA, 15 nt, Human
agguagggagauauu

SEQ ID NO: 3787746 - RNA, 17 nt, Human
agguaggggccccucuc

SEQ ID NO: 3787747 - RNA, 22 nt, Human
agguaggggccccucucagccc

SEQ ID NO: 3787748 - RNA, 20 nt, Human
agguagguggaucaccugag

SEQ ID NO: 3787749 - RNA, 15 nt, Human
agguagucucacugc

SEQ ID NO: 3787750 - RNA, 22 nt, Human
agguaguucaagaaaugaagag

SEQ ID NO: 3787751 - RNA, 23 nt, Human
agguaguucaagaaaugaagagc

SEQ ID NO: 3787752 - RNA, 12 nt, Human
agguauaauugu

SEQ ID NO: 3787753 - RNA, 14 nt, Human
agguauauacuuug

SEQ ID NO: 3787754 - RNA, 15 nt, Human
agguauaucauucua

SEQ ID NO: 3787755 - RNA, 18 nt, Human
agguauaucauucuaaag

SEQ ID NO: 3787756 - RNA, 20 nt, Human
agguauggaaggguuugugg

SEQ ID NO: 3787757 - RNA, 14 nt, Human
agguauguugccuu

SEQ ID NO: 3787758 - RNA, 20 nt, Human
agguauuaaaacuaaauuuc

SEQ ID NO: 3787759 - RNA, 16 nt, Human
agguauuauuaucuuu

SEQ ID NO: 3787760 - RNA, 17 nt, Human
agguauuuuguuucuuu

SEQ ID NO: 3787761 - RNA, 20 nt, Human
agguauuuuguuucuuuuaa

SEQ ID NO: 3787762 - RNA, 17 nt, Human
aggucaacagaaugaaa

SEQ ID NO: 3787763 - RNA, 22 nt, Human
aggucaacagaaugaaaaauga

SEQ ID NO: 3787764 - RNA, 18 nt, Human
aggucaagcccaggagga

SEQ ID NO: 3787765 - RNA, 20 nt, Human
aggucaaggccugucccugg

SEQ ID NO: 3787766 - RNA, 22 nt, Human
aggucaaguaagaagacaugaa

SEQ ID NO: 3787767 - RNA, 21 nt, Human
aggucaaugccagagacggaa

SEQ ID NO: 3787768 - RNA, 15 nt, Human
aggucacauaaaacu

SEQ ID NO: 3787769 - RNA, 20 nt, Human
aggucaccucacucagcacc

SEQ ID NO: 3787770 - RNA, 14 nt, Human
aggucacuccuggg

SEQ ID NO: 3787771 - RNA, 15 nt, Human
aggucacuccugggg

SEQ ID NO: 3787772 - RNA, 23 nt, Human
aggucacucuuccugcaaggacu

SEQ ID NO: 3787773 - RNA, 16 nt, Human
aggucacuggcucucc

SEQ ID NO: 3787774 - RNA, 21 nt, Human
aggucacuggcucuccaagug

SEQ ID NO: 3787775 - RNA, 16 nt, Human
aggucacuguuuccug

SEQ ID NO: 3787776 - RNA, 18 nt, Human
aggucacuguuuccuggg

SEQ ID NO: 3787777 - RNA, 19 nt, Human
aggucagacuaagaaauau

SEQ ID NO: 3787778 - RNA, 19 nt, Human
aggucagcgugcuuagccu

SEQ ID NO: 3787779 - RNA, 21 nt, Human
aggucaggagaucgagaccau

SEQ ID NO: 3787780 - RNA, 16 nt, Human
aggucaggaguuccua

SEQ ID NO: 3787781 - RNA, 13 nt, Human
aggucaggcccug

SEQ ID NO: 3787782 - RNA, 21 nt, Human
augacggaagaacauagaacu

SEQ ID NO: 3787783 - RNA, 16 nt, Human
augacgguauuaugcu

SEQ ID NO: 3787784 - RNA, 20 nt, Human
augacgguauuaugcuucuu

SEQ ID NO: 3787785 - RNA, 19 nt, Human
augacguacaaguaguucu

SEQ ID NO: 3787786 - RNA, 20 nt, Human
augacguacaaguaguucug

SEQ ID NO: 3787787 - RNA, 14 nt, Human
augacuaaagagag

SEQ ID NO: 3787788 - RNA, 15 nt, Human
augacuaaagagaga

SEQ ID NO: 3787789 - RNA, 17 nt, Human
augacuaaagagagaau

SEQ ID NO: 3787790 - RNA, 17 nt, Human
augacuaauucuugcau

SEQ ID NO: 3787791 - RNA, 20 nt, Human
augacuagaaagugaauaaa

SEQ ID NO: 3787792 - RNA, 22 nt, Human
augacuagaggcagggagggga

SEQ ID NO: 3787793 - RNA, 15 nt, Human
augacuauguaaacu

SEQ ID NO: 3787794 - RNA, 12 nt, Human
augacuccagaa

SEQ ID NO: 3787795 - RNA, 17 nt, Human
augacuccauagaccuu

SEQ ID NO: 3787796 - RNA, 15 nt, Human
augacucuuuauugu

SEQ ID NO: 3787797 - RNA, 13 nt, Human
augacugaauggg

SEQ ID NO: 3787798 - RNA, 13 nt, Human
augacugcacaug

SEQ ID NO: 3787799 - RNA, 21 nt, Human
augacugcuccccagcccugg

SEQ ID NO: 3787800 - RNA, 22 nt, Human
augacugcuccccagcccuggc

SEQ ID NO: 3787801 - RNA, 12 nt, Human
augacugcuugc

SEQ ID NO: 3787802 - RNA, 13 nt, Human
augacugcuugcc

SEQ ID NO: 3787803 - RNA, 21 nt, Human
augacugcuugcccuaagcag

SEQ ID NO: 3787804 - RNA, 15 nt, Human
augacuggaauuuuu

SEQ ID NO: 3787805 - RNA, 16 nt, Human
augacuggcauuuuau

SEQ ID NO: 3787806 - RNA, 18 nt, Human
augacuggggugggaggu

SEQ ID NO: 3787807 - RNA, 17 nt, Human
augacugugauuuucag

SEQ ID NO: 3787808 - RNA, 12 nt, Human
aaaaaucaucua

SEQ ID NO: 3787809 - RNA, 17 nt, Human
aaaaaucaucuauuuug

SEQ ID NO: 3787810 - RNA, 21 nt, Human
aaaaauccaaauauuguuaag

SEQ ID NO: 3787811 - RNA, 15 nt, Human
aaaaauccuucuaau

SEQ ID NO: 3787812 - RNA, 18 nt, Human
aaaaaucuaccuucugua

SEQ ID NO: 3787813 - RNA, 19 nt, Human
aaaaaucuaccuucuguag

SEQ ID NO: 3787814 - RNA, 14 nt, Human
aaaaaucuauauuu

SEQ ID NO: 3787815 - RNA, 18 nt, Human
aaaaaucugcuguuaacu

SEQ ID NO: 3787816 - RNA, 12 nt, Human
aaaaaucuguuu

SEQ ID NO: 3787817 - RNA, 19 nt, Human
aaaaaucuuaauacuguua

SEQ ID NO: 3787818 - RNA, 13 nt, Human
aaaaaucuugugc

SEQ ID NO: 3787819 - RNA, 14 nt, Human
aaaaaugacagacu

SEQ ID NO: 3787820 - RNA, 12 nt, Human
aaaaaugagaac

SEQ ID NO: 3787821 - RNA, 22 nt, Human
aaaaaugagcuugauuaaauca

SEQ ID NO: 3787822 - RNA, 20 nt, Human
aaaaaugcaaauccuaugug

SEQ ID NO: 3787823 - RNA, 23 nt, Human
aaaaaugcaaauccuaugugauu

SEQ ID NO: 3787824 - RNA, 17 nt, Human
aaaaaugccauaauaca

SEQ ID NO: 3787825 - RNA, 22 nt, Human
aaaaaugccauaauacaaaagg

SEQ ID NO: 3787826 - RNA, 12 nt, Human
aaaaaugccuuu

SEQ ID NO: 3787827 - RNA, 14 nt, Human
aaaaaugccuuuga

SEQ ID NO: 3787828 - RNA, 15 nt, Human
aaaaaugccuuugag

SEQ ID NO: 3787829 - RNA, 18 nt, Human
aaaaaugccuuugagaca

SEQ ID NO: 3787830 - RNA, 21 nt, Human
aaaaaugccuuugagacaguu

SEQ ID NO: 3787831 - RNA, 13 nt, Human
aaaaaugcuaaua

SEQ ID NO: 3787832 - RNA, 19 nt, Human
aaaaauggaaaaauaaaca

SEQ ID NO: 3787833 - RNA, 18 nt, Human
aaaaaugggacuucuuuu

SEQ ID NO: 3787834 - RNA, 16 nt, Human
aaaaaugguaaaauug

SEQ ID NO: 3787835 - RNA, 12 nt, Human
aaaaauguaaau

SEQ ID NO: 3787836 - RNA, 18 nt, Human
aaaaaugucaaaaguaga

SEQ ID NO: 3787837 - RNA, 12 nt, Human
aaaaaugucuua

SEQ ID NO: 3787838 - RNA, 18 nt, Human
aaaaaugugcaaaacagc

SEQ ID NO: 3787839 - RNA, 12 nt, Human
aaaaauguguaa

SEQ ID NO: 3787840 - RNA, 22 nt, Human
aaaaauguuaagcaucuaagga

SEQ ID NO: 3787841 - RNA, 20 nt, Human
aaaaauguuggauuuauaaa

SEQ ID NO: 3787842 - RNA, 22 nt, Human
aaaaauguuggauuuauaaaug

SEQ ID NO: 3787843 - RNA, 20 nt, Human
aaaaauguuuuuucaugugu

SEQ ID NO: 3787844 - RNA, 11 nt, Human
aaaaauuaaaa

SEQ ID NO: 3787845 - RNA, 17 nt, Human
aaaaauuaaaauggaug

SEQ ID NO: 3787846 - RNA, 13 nt, Human
aaaaauuacaguu

SEQ ID NO: 3787847 - RNA, 16 nt, Human
aaaaauuacuuaguau

SEQ ID NO: 3787848 - RNA, 19 nt, Human
aaaaauuaucuauagcuaa

SEQ ID NO: 3787849 - RNA, 18 nt, Human
aaaaauuaucuauuugua

SEQ ID NO: 3787850 - RNA, 22 nt, Human
aaaaauuaucuauuuguauaua

SEQ ID NO: 3787851 - RNA, 19 nt, Human
aaaaauuauugauugcuuu

SEQ ID NO: 3787852 - RNA, 15 nt, Human
aaaaauucaauagua

SEQ ID NO: 3787853 - RNA, 17 nt, Human
aaaaauucaauaguaau

SEQ ID NO: 3787854 - RNA, 14 nt, Human
aaaaauugaaaugu

SEQ ID NO: 3787855 - RNA, 13 nt, Human
aaaaauugaagag

SEQ ID NO: 3787856 - RNA, 17 nt, Human
aaaaauuggggauucuu

SEQ ID NO: 3787857 - RNA, 14 nt, Human
aaaaauugucuuca

SEQ ID NO: 3787858 - RNA, 14 nt, Human
aaaaauugugauca

SEQ ID NO: 3787859 - RNA, 11 nt, Human
aaaaauuguua

SEQ ID NO: 3787860 - RNA, 21 nt, Human
aaaaauuguuaauuuuuccua

SEQ ID NO: 3787861 - RNA, 23 nt, Human
aaaaauuguuucaaaauaaaaac

SEQ ID NO: 3787862 - RNA, 16 nt, Human
aaaaauuuaagcauug

SEQ ID NO: 3787863 - RNA, 22 nt, Human
aaaaauuuaagcauuguuugcu

SEQ ID NO: 3787864 - RNA, 18 nt, Human
aaaaauuuacuuuaaacu

SEQ ID NO: 3787865 - RNA, 23 nt, Human
aaaaauuuggaauucuguucauu

SEQ ID NO: 3787866 - RNA, 19 nt, Human
aaaaauuuuguaauuuucu

SEQ ID NO: 3787867 - RNA, 21 nt, Human
aaaaauuuugugacauuccuu

SEQ ID NO: 3787868 - RNA, 16 nt, Human
aaaacaaaaagaacaa

SEQ ID NO: 3787869 - RNA, 17 nt, Human
aaaacaaaaagaacaaa

SEQ ID NO: 3787870 - RNA, 13 nt, Human
aaaacaaaaccaa

SEQ ID NO: 3787871 - RNA, 20 nt, Human
aaaacaaaacuauacuugaa

SEQ ID NO: 3787872 - RNA, 12 nt, Human
aaaacaaaauuu

SEQ ID NO: 3787873 - RNA, 15 nt, Human
aaaacaaaauuuuau

SEQ ID NO: 3787874 - RNA, 13 nt, Human
aaaacaaauaaua

SEQ ID NO: 3787875 - RNA, 16 nt, Human
aaaacaaauaauaucu

SEQ ID NO: 3787876 - RNA, 22 nt, Human
aaaacaacuauggaucagaaua

SEQ ID NO: 3787877 - RNA, 12 nt, Human
aaaacaacuuua

SEQ ID NO: 3787878 - RNA, 14 nt, Human
aaaacaaggaugaa

SEQ ID NO: 3787879 - RNA, 16 nt, Human
aaaacaauaaaauuuu

SEQ ID NO: 3787880 - RNA, 17 nt, Human
aaaacaauauuguuucu

SEQ ID NO: 3787881 - RNA, 19 nt, Human
aaaacaauauuuauuguau

SEQ ID NO: 3787882 - RNA, 16 nt, Human
aaaacaaucacacuca

SEQ ID NO: 3787883 - RNA, 22 nt, Human
aaaacacacgcgcgcacacaca

SEQ ID NO: 3787884 - RNA, 23 nt, Human
aaaacacagacauucugccaggc

SEQ ID NO: 3787885 - RNA, 13 nt, Human
aaaacacagcaag

SEQ ID NO: 3787886 - RNA, 16 nt, Human
aaaacacauguuuuua

SEQ ID NO: 3787887 - RNA, 14 nt, Human
aaaacaccagcuuu

SEQ ID NO: 3787888 - RNA, 14 nt, Human
aaaacacuaguuuu

SEQ ID NO: 3787889 - RNA, 20 nt, Human
aaaacacugaaaaauuauac

SEQ ID NO: 3787890 - RNA, 18 nt, Human
aaaacacugccaucuuag

SEQ ID NO: 3787891 - RNA, 14 nt, Human
aaaacacuguggaa

SEQ ID NO: 3787892 - RNA, 19 nt, Human
aaaaaaggacaauuucaaa

SEQ ID NO: 3787893 - RNA, 11 nt, Human
aaaaaagucuc

SEQ ID NO: 3787894 - RNA, 18 nt, Human
aaaaaaguuauauagguu

SEQ ID NO: 3787895 - RNA, 12 nt, Human
aaaaaaguugua

SEQ ID NO: 3787896 - RNA, 20 nt, Human
aaaaaaguuuacaaguguau

SEQ ID NO: 3787897 - RNA, 20 nt, Human
aaaaaauacugccagaugcu

SEQ ID NO: 3787898 - RNA, 11 nt, Human
aaaaaauacuu

SEQ ID NO: 3787899 - RNA, 21 nt, Human
aaaaaauagaugucuuuuaua

SEQ ID NO: 3787900 - RNA, 12 nt, Human
aaaaaauaucua

SEQ ID NO: 3787901 - RNA, 22 nt, Human
aaaaaaugcugaacauugcaua

SEQ ID NO: 3787902 - RNA, 11 nt, Human
aaaaaauuaag

SEQ ID NO: 3787903 - RNA, 21 nt, Human
aaaaaauucagugaugugccu

SEQ ID NO: 3787904 - RNA, 11 nt, Human
aaaaaauuggu

SEQ ID NO: 3787905 - RNA, 12 nt, Human
aaaaaauuuguc

SEQ ID NO: 3787906 - RNA, 11 nt, Human
aaaaacaaaag

SEQ ID NO: 3787907 - RNA, 16 nt, Human
aaaaacaaagagcguu

SEQ ID NO: 3787908 - RNA, 12 nt, Human
aaaaacaacuuu

SEQ ID NO: 3787909 - RNA, 13 nt, Human
aaaaacacagcaa

SEQ ID NO: 3787910 - RNA, 18 nt, Human
aaaaacacagcaagggug

SEQ ID NO: 3787911 - RNA, 20 nt, Human
aaaaacagcauugcuuucug

SEQ ID NO: 3787912 - RNA, 21 nt, Human
aaaaacagcauugcuuucuga

SEQ ID NO: 3787913 - RNA, 19 nt, Human
aaaaacagguauauacuuu

SEQ ID NO: 3787914 - RNA, 16 nt, Human
aaaaacauagaaaaau

SEQ ID NO: 3787915 - RNA, 15 nt, Human
aaaaacauauucuug

SEQ ID NO: 3787916 - RNA, 13 nt, Human
aaaaacauguaug

SEQ ID NO: 3787917 - RNA, 14 nt, Human
aaaaaccaaaacug

SEQ ID NO: 3787918 - RNA, 18 nt, Human
aaaaaccaguauuguaca

SEQ ID NO: 3787919 - RNA, 19 nt, Human
aaaaaccaucuguaaaaga

SEQ ID NO: 3787920 - RNA, 19 nt, Human
aaaaacccagcaacagaaa

SEQ ID NO: 3787921 - RNA, 23 nt, Human
aaaaaccugagauuuauuaaaga

SEQ ID NO: 3787922 - RNA, 13 nt, Human
aaaaaccuugggu

SEQ ID NO: 3787923 - RNA, 14 nt, Human
aaaaacuaaaaacu

SEQ ID NO: 3787924 - RNA, 20 nt, Human
aaaaacuaaaucucuaauau

SEQ ID NO: 3787925 - RNA, 19 nt, Human
aaaaacucuuuaacuugua

SEQ ID NO: 3787926 - RNA, 12 nt, Human
aaaaacugaagu

SEQ ID NO: 3787927 - RNA, 13 nt, Human
aaaaacugauuuu

SEQ ID NO: 3787928 - RNA, 15 nt, Human
aaaaacugauuuuuu

SEQ ID NO: 3787929 - RNA, 12 nt, Human
aaaaacuguauu

SEQ ID NO: 3787930 - RNA, 20 nt, Human
aaaaacugucuuuaaaagag

SEQ ID NO: 3787931 - RNA, 15 nt, Human
aaaaacuugaaaaua

SEQ ID NO: 3787932 - RNA, 12 nt, Human
aaaaacuuguaa

SEQ ID NO: 3787933 - RNA, 18 nt, Human
aaaaacuuguaaaugcug

SEQ ID NO: 3787934 - RNA, 22 nt, Human
aaaaacuugugcuauaaagcua

SEQ ID NO: 3787935 - RNA, 13 nt, Human
aaaaagaaaaaag

SEQ ID NO: 3787936 - RNA, 14 nt, Human
aaaaagaaaagaua

SEQ ID NO: 3787937 - RNA, 12 nt, Human
aaaaagaaauga

SEQ ID NO: 3787938 - RNA, 20 nt, Human
aaaaagaacaugcaguuuga

SEQ ID NO: 3787939 - RNA, 11 nt, Human
aaaaagaagaa

SEQ ID NO: 3787940 - RNA, 14 nt, Human
aaaaagaagaaucu

SEQ ID NO: 3787941 - RNA, 14 nt, Human
aaaaagaaguaggg

SEQ ID NO: 3787942 - RNA, 17 nt, Human
aaaaagaaugaagccuc

SEQ ID NO: 3787943 - RNA, 17 nt, Human
aaaaagauaccuuaaaa

SEQ ID NO: 3787944 - RNA, 16 nt, Human
aaaaagaugacccauu

SEQ ID NO: 3787945 - RNA, 14 nt, Human
aaaaagauguacag

SEQ ID NO: 3787946 - RNA, 15 nt, Human
aaaaagauucuuuuu

SEQ ID NO: 3787947 - RNA, 13 nt, Human
aaaaagauuuguu

SEQ ID NO: 3787948 - RNA, 17 nt, Human
aaaaagcacuaguauaa

SEQ ID NO: 3787949 - RNA, 21 nt, Human
aaaaagcagcuaccagguguu

SEQ ID NO: 3787950 - RNA, 15 nt, Human
aaaaagcauguacag

SEQ ID NO: 3787951 - RNA, 18 nt, Human
aaaaagcauguacagugu

SEQ ID NO: 3787952 - RNA, 17 nt, Human
aaaaagccaguuugggu

SEQ ID NO: 3787953 - RNA, 17 nt, Human
aaaaagcuaauaccagu

SEQ ID NO: 3787954 - RNA, 19 nt, Human
aaaaagcuauaaauuauau

SEQ ID NO: 3787955 - RNA, 13 nt, Human
aaaaccuuuuacu

SEQ ID NO: 3787956 - RNA, 15 nt, Human
aaaaccuuuuacugg

SEQ ID NO: 3787957 - RNA, 14 nt, Human
aaaacgaaaacagu

SEQ ID NO: 3787958 - RNA, 16 nt, Human
aaaacgauuuaauuua

SEQ ID NO: 3787959 - RNA, 17 nt, Human
aaaacgauuuaauuuau

SEQ ID NO: 3787960 - RNA, 17 nt, Human
aaaacgcaaagggcuga

SEQ ID NO: 3787961 - RNA, 14 nt, Human
aaaacgcauggagu

SEQ ID NO: 3787962 - RNA, 17 nt, Human
aaaacgcauggagugug

SEQ ID NO: 3787963 - RNA, 18 nt, Human
aaaacgcauggagugugu

SEQ ID NO: 3787964 - RNA, 16 nt, Human
aaaacgcgcagaugug

SEQ ID NO: 3787965 - RNA, 17 nt, Human
aaaacguggcugcuuca

SEQ ID NO: 3787966 - RNA, 13 nt, Human
aaaacuaaaaacu

SEQ ID NO: 3787967 - RNA, 16 nt, Human
aaaacuaaaaacuaga

SEQ ID NO: 3787968 - RNA, 17 nt, Human
aaaacuacuuagcacuu

SEQ ID NO: 3787969 - RNA, 23 nt, Human
aaaacuagagcucuaagcccauu

SEQ ID NO: 3787970 - RNA, 18 nt, Human
aaaacuaggcauuuguaa

SEQ ID NO: 3787971 - RNA, 13 nt, Human
aaaacuauacaac

SEQ ID NO: 3787972 - RNA, 16 nt, Human
aaaacuauucaugcua

SEQ ID NO: 3787973 - RNA, 13 nt, Human
aaaacucauuuuu

SEQ ID NO: 3787974 - RNA, 19 nt, Human
aaaacuccgcccccagccu

SEQ ID NO: 3787975 - RNA, 22 nt, Human
aaaacucgaggacuguauuugu

SEQ ID NO: 3787976 - RNA, 19 nt, Human
aaaacucuacuuaauccaa

SEQ ID NO: 3787977 - RNA, 21 nt, Human
aaaacucuuuaacuuguaaua

SEQ ID NO: 3787978 - RNA, 13 nt, Human
aaaacugaaaaau

SEQ ID NO: 3787979 - RNA, 18 nt, Human
aaaacugaagucugaaau

SEQ ID NO: 3787980 - RNA, 18 nt, Human
aaaacugauugaaugaua

SEQ ID NO: 3787981 - RNA, 22 nt, Human
aaaacugauuuuuuuuuccuuc

SEQ ID NO: 3787982 - RNA, 22 nt, Human
aaaacugcacugucaagaugau

SEQ ID NO: 3787983 - RNA, 11 nt, Human
aaaacugcucc

SEQ ID NO: 3787984 - RNA, 12 nt, Human
aaaacugcuuuu

SEQ ID NO: 3787985 - RNA, 17 nt, Human
aaaacuguacauuuaaa

SEQ ID NO: 3787986 - RNA, 15 nt, Human
aaaacuguacuuuga

SEQ ID NO: 3787987 - RNA, 17 nt, Human
aaaacugugaccaagua

SEQ ID NO: 3787988 - RNA, 19 nt, Human
aaaacugugaccaaguaua

SEQ ID NO: 3787989 - RNA, 16 nt, Human
aaaacuguuaccuaaa

SEQ ID NO: 3787990 - RNA, 23 nt, Human
aaaacuguuuuggguagcugcca

SEQ ID NO: 3787991 - RNA, 21 nt, Human
aaaacuuaacuuccaaugaaa

SEQ ID NO: 3787992 - RNA, 21 nt, Human
aaaacuuaugcugauuuauuu

SEQ ID NO: 3787993 - RNA, 13 nt, Human
aaaacuucagaag

SEQ ID NO: 3787994 - RNA, 21 nt, Human
aaaacuucaguuucacagaaa

SEQ ID NO: 3787995 - RNA, 18 nt, Human
aaaacuucauucucguga

SEQ ID NO: 3787996 - RNA, 18 nt, Human
aaaacuucuuaaauaucu

SEQ ID NO: 3787997 - RNA, 18 nt, Human
aaaacuucuugucagaca

SEQ ID NO: 3787998 - RNA, 23 nt, Human
aaaacuucuugucagacauaaag

SEQ ID NO: 3787999 - RNA, 17 nt, Human
aaaacuuguaaaugcug

SEQ ID NO: 3788000 - RNA, 17 nt, Human
aaaacuugugcuauaaa

SEQ ID NO: 3788001 - RNA, 20 nt, Human
aaaacuuuacuaagaugaca

SEQ ID NO: 3788002 - RNA, 21 nt, Human
aaaacuuuaugcuaagugaaa

SEQ ID NO: 3788003 - RNA, 13 nt, Human
aaaacuuuauuuu

SEQ ID NO: 3788004 - RNA, 16 nt, Human
aaaacuuuauuuuaua

SEQ ID NO: 3788005 - RNA, 14 nt, Human
aaaacuuuccucgc

SEQ ID NO: 3788006 - RNA, 14 nt, Human
aaaacuuuuaaacu

SEQ ID NO: 3788007 - RNA, 15 nt, Human
aaaacuuuuauaaau

SEQ ID NO: 3788008 - RNA, 21 nt, Human
aaaacuuuuauaaauuaaaua

SEQ ID NO: 3788009 - RNA, 11 nt, Human
aaaagaaaaaa

SEQ ID NO: 3788010 - RNA, 21 nt, Human
aaaagaaaaaaaaaagaagaa

SEQ ID NO: 3788011 - RNA, 18 nt, Human
aaaagaaaaaaaaagaaa

SEQ ID NO: 3788012 - RNA, 19 nt, Human
aaaagaaaaaaaaagaaaa

SEQ ID NO: 3788013 - RNA, 22 nt, Human
aaaagaaaaaaaaagaaaaaag

SEQ ID NO: 3788014 - RNA, 13 nt, Human
aaaagaaaaacca

SEQ ID NO: 3788015 - RNA, 15 nt, Human
aaaagaaaaauaaua

SEQ ID NO: 3788016 - RNA, 15 nt, Human
aaaagaaaauaaaaa

SEQ ID NO: 3788017 - RNA, 22 nt, Human
aaaagaaaaugaaaaacaacca

SEQ ID NO: 3788018 - RNA, 11 nt, Human
aaaagaaagaa

SEQ ID NO: 3788019 - RNA, 17 nt, Human
aaaagaaagaaaaucag

SEQ ID NO: 3788020 - RNA, 20 nt, Human
aaaagaaagaaguuauuuuc

SEQ ID NO: 3788021 - RNA, 10 nt, Human
aaaagaaagc

SEQ ID NO: 3788022 - RNA, 21 nt, Human
aaaagaaaucaauaguugaau

SEQ ID NO: 3788023 - RNA, 22 nt, Human
aaaagaaaucuauagaaagugu

SEQ ID NO: 3788024 - RNA, 13 nt, Human
aaaagaaaugaug

SEQ ID NO: 3788025 - RNA, 17 nt, Human
aaaagaacaauauugac

SEQ ID NO: 3788026 - RNA, 22 nt, Human
aaaagaacaugcaguuugaaau

SEQ ID NO: 3788027 - RNA, 12 nt, Human
aaaagaacuucc

SEQ ID NO: 3788028 - RNA, 11 nt, Human
aaaagaagaag

SEQ ID NO: 3788029 - RNA, 12 nt, Human
aaaagaagaagu

SEQ ID NO: 3788030 - RNA, 14 nt, Human
aaaagaaggaaaga

SEQ ID NO: 3788031 - RNA, 11 nt, Human
aaaagaaguaa

SEQ ID NO: 3788032 - RNA, 16 nt, Human
aaaagaauacagaaag

SEQ ID NO: 3788033 - RNA, 12 nt, Human
aaaagaauauuu

SEQ ID NO: 3788034 - RNA, 11 nt, Human
aaaagaaugac

SEQ ID NO: 3788035 - RNA, 13 nt, Human
aaaagaauuguug

SEQ ID NO: 3788036 - RNA, 13 nt, Human
aaaagacaauucu

SEQ ID NO: 3788037 - RNA, 15 nt, Human
aaaagacacugcaga

SEQ ID NO: 3788038 - RNA, 13 nt, Human
aaaagacagggcu

SEQ ID NO: 3788039 - RNA, 19 nt, Human
aaaagacaguguauguaga

SEQ ID NO: 3788040 - RNA, 13 nt, Human
aaaagacauucag

SEQ ID NO: 3788041 - RNA, 13 nt, Human
aaaagacucuuuu

SEQ ID NO: 3788042 - RNA, 14 nt, Human
aaaagacuucccua

SEQ ID NO: 3788043 - RNA, 14 nt, Human
aaaagagaaaagaa

SEQ ID NO: 3788044 - RNA, 15 nt, Human
aaaagagaagaagaa

SEQ ID NO: 3788045 - RNA, 17 nt, Human
aaaagagaagaagaaaa

SEQ ID NO: 3788046 - RNA, 23 nt, Human
aaaagagaauuagauuauauugg

SEQ ID NO: 3788047 - RNA, 22 nt, Human
aaaagagaccacccauaucaug

SEQ ID NO: 3788048 - RNA, 21 nt, Human
aaaagagauauuuuaaaauga

SEQ ID NO: 3788049 - RNA, 16 nt, Human
aaaagagaugaugaaa

SEQ ID NO: 3788050 - RNA, 15 nt, Human
aaaagagauugagau

SEQ ID NO: 3788051 - RNA, 22 nt, Human
aaaagaggaaagaaugaaagag

SEQ ID NO: 3788052 - RNA, 17 nt, Human
aaaagagguuuuucuua

SEQ ID NO: 3788053 - RNA, 17 nt, Human
aaaagagucuuccaauu

SEQ ID NO: 3788054 - RNA, 13 nt, Human
aaaagauaaagau

SEQ ID NO: 3788055 - RNA, 22 nt, Human
aaaaauggaacauaaaauacaa

SEQ ID NO: 3788056 - RNA, 12 nt, Human
aaaaauggauau

SEQ ID NO: 3788057 - RNA, 15 nt, Human
aaaaauggauauuau

SEQ ID NO: 3788058 - RNA, 17 nt, Human
aaaaaugggacuucuuu

SEQ ID NO: 3788059 - RNA, 13 nt, Human
aaaaaugguaauu

SEQ ID NO: 3788060 - RNA, 20 nt, Human
aaaaaugguagcauuuuaaa

SEQ ID NO: 3788061 - RNA, 22 nt, Human
aaaaaugguauaaguaacuuua

SEQ ID NO: 3788062 - RNA, 18 nt, Human
aaaaaugguggcuucagc

SEQ ID NO: 3788063 - RNA, 20 nt, Human
aaaaaugguggcuucagcuc

SEQ ID NO: 3788064 - RNA, 18 nt, Human
aaaaauguaggagacugu

SEQ ID NO: 3788065 - RNA, 16 nt, Human
aaaaauguauaugcac

SEQ ID NO: 3788066 - RNA, 12 nt, Human
aaaaauguauuu

SEQ ID NO: 3788067 - RNA, 18 nt, Human
aaaaauguuaagcaucua

SEQ ID NO: 3788068 - RNA, 16 nt, Human
aaaaauguuggauuua

SEQ ID NO: 3788069 - RNA, 16 nt, Human
aaaaauguuuuuucau

SEQ ID NO: 3788070 - RNA, 12 nt, Human
aaaaauuaaaau

SEQ ID NO: 3788071 - RNA, 18 nt, Human
aaaaauuacuaauuuuac

SEQ ID NO: 3788072 - RNA, 13 nt, Human
aaaaauuagcuga

SEQ ID NO: 3788073 - RNA, 11 nt, Human
aaaaauuauua

SEQ ID NO: 3788074 - RNA, 18 nt, Human
aaaaauucaauaguaaua

SEQ ID NO: 3788075 - RNA, 19 nt, Human
aaaaauucaauaguaauau

SEQ ID NO: 3788076 - RNA, 13 nt, Human
aaaaauuccagaa

SEQ ID NO: 3788077 - RNA, 18 nt, Human
aaaaauuccuaagaauca

SEQ ID NO: 3788078 - RNA, 19 nt, Human
aaaaauuccuuuguguuuc

SEQ ID NO: 3788079 - RNA, 15 nt, Human
aaaaauuuaaaagua

SEQ ID NO: 3788080 - RNA, 21 nt, Human
aaaaauuuaaaggguguacuu

SEQ ID NO: 3788081 - RNA, 18 nt, Human
aaaaauuuaagcauuguu

SEQ ID NO: 3788082 - RNA, 20 nt, Human
aaaaauuuaagcauuguuug

SEQ ID NO: 3788083 - RNA, 21 nt, Human
aaaaauuuacuacaauaugua

SEQ ID NO: 3788084 - RNA, 19 nt, Human
aaaaauuuacuuuaaacua

SEQ ID NO: 3788085 - RNA, 12 nt, Human
aaaaauuugaac

SEQ ID NO: 3788086 - RNA, 17 nt, Human
aaaaauuugaacacugg

SEQ ID NO: 3788087 - RNA, 14 nt, Human
aaaaauuuguuuaa

SEQ ID NO: 3788088 - RNA, 16 nt, Human
aaaaauuuguuuaaag

SEQ ID NO: 3788089 - RNA, 23 nt, Human
aaaaauuuugugacauuccuucu

SEQ ID NO: 3788090 - RNA, 22 nt, Human
aaaaauuuuuggauugacagua

SEQ ID NO: 3788091 - RNA, 12 nt, Human
aaaacaaaaaac

SEQ ID NO: 3788092 - RNA, 14 nt, Human
aaaacaaaaaacaa

SEQ ID NO: 3788093 - RNA, 11 nt, Human
aaaacaaaaag

SEQ ID NO: 3788094 - RNA, 23 nt, Human
aaaacaaaaauucacaagcugcc

SEQ ID NO: 3788095 - RNA, 10 nt, Human
aaaacaaaac

SEQ ID NO: 3788096 - RNA, 16 nt, Human
aaaacaaaacaaaacu

SEQ ID NO: 3788097 - RNA, 14 nt, Human
aaaacaaaacuaua

SEQ ID NO: 3788098 - RNA, 15 nt, Human
aaaacaaaacugcau

SEQ ID NO: 3788099 - RNA, 10 nt, Human
aaaacaaaau

SEQ ID NO: 3788100 - RNA, 22 nt, Human
aaaacaacuuaauaaaaacuua

SEQ ID NO: 3788101 - RNA, 17 nt, Human
aaaacaagaaaguuucc

SEQ ID NO: 3788102 - RNA, 23 nt, Human
aaaagccuuguguauauuuguau

SEQ ID NO: 3788103 - RNA, 19 nt, Human
aaaagcgugagcuuaaaau

SEQ ID NO: 3788104 - RNA, 23 nt, Human
aaaagcgugagcuuaaaauacaa

SEQ ID NO: 3788105 - RNA, 14 nt, Human
aaaagcuaagagaa

SEQ ID NO: 3788106 - RNA, 20 nt, Human
aaaagcuacaguuuugugaa

SEQ ID NO: 3788107 - RNA, 17 nt, Human
aaaagcuauaaagcagu

SEQ ID NO: 3788108 - RNA, 21 nt, Human
aaaagcuauaaagcaguauuu

SEQ ID NO: 3788109 - RNA, 16 nt, Human
aaaagcuauaaauuau

SEQ ID NO: 3788110 - RNA, 19 nt, Human
aaaagcuaucuucauguaa

SEQ ID NO: 3788111 - RNA, 15 nt, Human
aaaagcuauuagcca

SEQ ID NO: 3788112 - RNA, 21 nt, Human
aaaagcuauuagccaggauca

SEQ ID NO: 3788113 - RNA, 20 nt, Human
aaaagcuauuuaaagcaucu

SEQ ID NO: 3788114 - RNA, 14 nt, Human
aaaagcucauauuu

SEQ ID NO: 3788115 - RNA, 15 nt, Human
aaaagcucauuucau

SEQ ID NO: 3788116 - RNA, 22 nt, Human
aaaagcuccaugugccucuuug

SEQ ID NO: 3788117 - RNA, 22 nt, Human
aaaagcuccauuuuuagugaaa

SEQ ID NO: 3788118 - RNA, 13 nt, Human
aaaagcucuuuua

SEQ ID NO: 3788119 - RNA, 18 nt, Human
aaaagcugaacacauuuc

SEQ ID NO: 3788120 - RNA, 10 nt, Human
aaaagcugau

SEQ ID NO: 3788121 - RNA, 23 nt, Human
aaaagcugaucauaagugaauuu

SEQ ID NO: 3788122 - RNA, 17 nt, Human
aaaagcuggauuuucuu

SEQ ID NO: 3788123 - RNA, 14 nt, Human
aaaagcuuccauga

SEQ ID NO: 3788124 - RNA, 20 nt, Human
aaaagcuucuuaauuaauuu

SEQ ID NO: 3788125 - RNA, 21 nt, Human
aaaagcuucuuaauuaauuug

SEQ ID NO: 3788126 - RNA, 17 nt, Human
aaaagcuuuaugauuuu

SEQ ID NO: 3788127 - RNA, 20 nt, Human
aaaagcuuuaugauuuucau

SEQ ID NO: 3788128 - RNA, 13 nt, Human
aaaagcuuuuguc

SEQ ID NO: 3788129 - RNA, 11 nt, Human
aaaaggaaaaa

SEQ ID NO: 3788130 - RNA, 21 nt, Human
aaaaggaaaaaaagacucuuu

SEQ ID NO: 3788131 - RNA, 15 nt, Human
aaaaggaaaagaaaa

SEQ ID NO: 3788132 - RNA, 21 nt, Human
aaaaggacaggcagaaagagu

SEQ ID NO: 3788133 - RNA, 22 nt, Human
aaaaggagagacucccaugaag

SEQ ID NO: 3788134 - RNA, 22 nt, Human
aaaaggagccaauuuaaagaaa

SEQ ID NO: 3788135 - RNA, 14 nt, Human
aaaaggaguauaca

SEQ ID NO: 3788136 - RNA, 15 nt, Human
aaaaggauaguauuu

SEQ ID NO: 3788137 - RNA, 16 nt, Human
aaaaggauaguauuuu

SEQ ID NO: 3788138 - RNA, 19 nt, Human
aaaaggaucuuuguggcca

SEQ ID NO: 3788139 - RNA, 13 nt, Human
aaaaggaugcaca

SEQ ID NO: 3788140 - RNA, 22 nt, Human
aaaaggaugcacagaguuguua

SEQ ID NO: 3788141 - RNA, 11 nt, Human
aaaaggcagga

SEQ ID NO: 3788142 - RNA, 13 nt, Human
aaaaggcaguuac

SEQ ID NO: 3788143 - RNA, 22 nt, Human
aaaaggccaaaccucuguucag

SEQ ID NO: 3788144 - RNA, 20 nt, Human
aaaaggcgguacuaguucag

SEQ ID NO: 3788145 - RNA, 19 nt, Human
aaaaggcugugcugcccug

SEQ ID NO: 3788146 - RNA, 12 nt, Human
aaaagggaagua

SEQ ID NO: 3788147 - RNA, 14 nt, Human
aaaagggaagucua

SEQ ID NO: 3788148 - RNA, 20 nt, Human
aaaagggaaguugugccuuu

SEQ ID NO: 3788149 - RNA, 19 nt, Human
aaaagggacugagaaauuu

SEQ ID NO: 3788150 - RNA, 22 nt, Human
aaaagggccaaagaaccaaaga

SEQ ID NO: 3788151 - RNA, 13 nt, Human
aaaaggggcuccu

SEQ ID NO: 3788152 - RNA, 19 nt, Human
aaaagggucuugggaaaua

SEQ ID NO: 3788153 - RNA, 21 nt, Human
aaaagggucuugggaaauaug

SEQ ID NO: 3788154 - RNA, 19 nt, Human
aaaagguaugcaaucaaau

SEQ ID NO: 3788155 - RNA, 15 nt, Human
aaaagguauuaaauu

SEQ ID NO: 3788156 - RNA, 14 nt, Human
aaaagguauuauac

SEQ ID NO: 3788157 - RNA, 18 nt, Human
aaaagguauuuugaauac

SEQ ID NO: 3788158 - RNA, 19 nt, Human
aaaagguauuuugaauacc

SEQ ID NO: 3788159 - RNA, 21 nt, Human
aaaagguauuuugaauaccau

SEQ ID NO: 3788160 - RNA, 19 nt, Human
aaaagguucacuaaagcag

SEQ ID NO: 3788161 - RNA, 19 nt, Human
aaaagguuuaugaaaaaga

SEQ ID NO: 3788162 - RNA, 22 nt, Human
aaaaguaaguaccacucaggcc

SEQ ID NO: 3788163 - RNA, 13 nt, Human
aaaaguaauaaaa

SEQ ID NO: 3788164 - RNA, 13 nt, Human
aaaaguaauauuu

SEQ ID NO: 3788165 - RNA, 13 nt, Human
aaaaguaaugccu

SEQ ID NO: 3788166 - RNA, 18 nt, Human
aaaaguagaacuuuguau

SEQ ID NO: 3788167 - RNA, 13 nt, Human
aaaaguagcaauu

SEQ ID NO: 3788168 - RNA, 20 nt, Human
aaaaguagguuuacauucau

SEQ ID NO: 3788169 - RNA, 15 nt, Human
aaaaguauauguuag

SEQ ID NO: 3788170 - RNA, 23 nt, Human
aaaaguauguucuaaccuuuaca

SEQ ID NO: 3788171 - RNA, 20 nt, Human
aaaaguauuauuuuccaaaa

SEQ ID NO: 3788172 - RNA, 14 nt, Human
aaaaguauugccaa

SEQ ID NO: 3788173 - RNA, 16 nt, Human
aaaaguauugccaaac

SEQ ID NO: 3788174 - RNA, 14 nt, Human
aaaaguauuuuccu

SEQ ID NO: 3788175 - RNA, 15 nt, Human
aaaaguauuuugaag

SEQ ID NO: 3788176 - RNA, 18 nt, Human
aaaaguauuuugaaguuu

SEQ ID NO: 3788177 - RNA, 20 nt, Human
aaaaguauuuugaaguuuac

SEQ ID NO: 3788178 - RNA, 22 nt, Human
aaaaguauuuugaaguuuacau

SEQ ID NO: 3788179 - RNA, 15 nt, Human
aaaagucaaaaggug

SEQ ID NO: 3788180 - RNA, 15 nt, Human
aaaagucacuuacua

SEQ ID NO: 3788181 - RNA, 19 nt, Human
aaaagucagacugcuggga

SEQ ID NO: 3788182 - RNA, 16 nt, Human
aaaagucagagacaga

SEQ ID NO: 3788183 - RNA, 19 nt, Human
aaaagucucuauuuaaauu

SEQ ID NO: 3788184 - RNA, 14 nt, Human
aaaagucugcauua

SEQ ID NO: 3788185 - RNA, 18 nt, Human
aaaagucugucuuuccug

SEQ ID NO: 3788186 - RNA, 19 nt, Human
aaaagucuucacucucuga

SEQ ID NO: 3788187 - RNA, 14 nt, Human
aaaagucuuuuaaa

SEQ ID NO: 3788188 - RNA, 18 nt, Human
aaaagucuuuuaaaaagu

SEQ ID NO: 3788189 - RNA, 15 nt, Human
aaaagugaagacaga

SEQ ID NO: 3788190 - RNA, 13 nt, Human
aaaagugacacag

SEQ ID NO: 3788191 - RNA, 14 nt, Human
aaaagugacacagc

SEQ ID NO: 3788192 - RNA, 20 nt, Human
aaaagugaucaauaaaaugu

SEQ ID NO: 3788193 - RNA, 17 nt, Human
aaaagugauuguuggca

SEQ ID NO: 3788194 - RNA, 18 nt, Human
aaaagugccucaagagga

SEQ ID NO: 3788195 - RNA, 22 nt, Human
aaaagugcugcagggcuuuaaa

SEQ ID NO: 3788196 - RNA, 21 nt, Human
aaaaguguguauauauuuugu

SEQ ID NO: 3788197 - RNA, 18 nt, Human
aaaaguuaaaaaaaauaa

SEQ ID NO: 3788198 - RNA, 18 nt, Human
aaaaguuacauguuugca

SEQ ID NO: 3788199 - RNA, 19 nt, Human
aaaaguuacauguuugcac

SEQ ID NO: 3788200 - RNA, 14 nt, Human
aaaaguuagcugag

SEQ ID NO: 3788201 - RNA, 12 nt, Human
aaaaguuauaac

SEQ ID NO: 3788202 - RNA, 12 nt, Human
aaaaguuauuaa

SEQ ID NO: 3788203 - RNA, 17 nt, Human
aaaaguuauuaaaauug

SEQ ID NO: 3788204 - RNA, 13 nt, Human
aaaaguuccaaga

SEQ ID NO: 3788205 - RNA, 15 nt, Human
aaaaguuccaagagu

SEQ ID NO: 3788206 - RNA, 22 nt, Human
aaaaguuccaagagucuaaaga

SEQ ID NO: 3788207 - RNA, 13 nt, Human
aaaaguugaauuu

SEQ ID NO: 3788208 - RNA, 14 nt, Human
aaaaguugcagcug

SEQ ID NO: 3788209 - RNA, 18 nt, Human
aaaaguugcagcuguuuu

SEQ ID NO: 3788210 - RNA, 17 nt, Human
aaaaguugcauuuuaac

SEQ ID NO: 3788211 - RNA, 17 nt, Human
aaaauaguuuguuuaau

SEQ ID NO: 3788212 - RNA, 24 nt, Human
aaaauauaauuuuuuagagagcug

SEQ ID NO: 3788213 - RNA, 14 nt, Human
aaaauauacauguu

SEQ ID NO: 3788214 - RNA, 15 nt, Human
aaaauauacuguaaa

SEQ ID NO: 3788215 - RNA, 18 nt, Human
aaaauauauaccccccca

SEQ ID NO: 3788216 - RNA, 23 nt, Human
aaaauauauauagaaauauauac

SEQ ID NO: 3788217 - RNA, 18 nt, Human
aaaauauauaucaaauau

SEQ ID NO: 3788218 - RNA, 13 nt, Human
aaaauauauguau

SEQ ID NO: 3788219 - RNA, 15 nt, Human
aaaauauauuuaaug

SEQ ID NO: 3788220 - RNA, 13 nt, Human
aaaauaucaaauu

SEQ ID NO: 3788221 - RNA, 13 nt, Human
aaaauaucauuca

SEQ ID NO: 3788222 - RNA, 22 nt, Human
aaaauaucuacauuaauauacu

SEQ ID NO: 3788223 - RNA, 14 nt, Human
aaaauaucuuuuga

SEQ ID NO: 3788224 - RNA, 22 nt, Human
aaaauaugaccacacuccagcu

SEQ ID NO: 3788225 - RNA, 14 nt, Human
aaaauaugcacuaa

SEQ ID NO: 3788226 - RNA, 16 nt, Human
aaaauauggaacuucu

SEQ ID NO: 3788227 - RNA, 20 nt, Human
aaaauauggaacuucuaaua

SEQ ID NO: 3788228 - RNA, 21 nt, Human
aaaauauggaacuucuaauau

SEQ ID NO: 3788229 - RNA, 20 nt, Human
aaaauauggguugcauuugg

SEQ ID NO: 3788230 - RNA, 13 nt, Human
aaaauaugucucg

SEQ ID NO: 3788231 - RNA, 14 nt, Human
aaaauauguucuuu

SEQ ID NO: 3788232 - RNA, 21 nt, Human
aaaauauuaucuuuguaauua

SEQ ID NO: 3788233 - RNA, 20 nt, Human
aaaauauucaauaagagauu

SEQ ID NO: 3788234 - RNA, 15 nt, Human
aaaauauuccugcau

SEQ ID NO: 3788235 - RNA, 14 nt, Human
aaaauauuguuucu

SEQ ID NO: 3788236 - RNA, 15 nt, Human
aaaauauuguuucug

SEQ ID NO: 3788237 - RNA, 14 nt, Human
aaaauauuuaaugu

SEQ ID NO: 3788238 - RNA, 13 nt, Human
aaaauauuuauaa

SEQ ID NO: 3788239 - RNA, 21 nt, Human
aaaauauuuauaaaacuucuc

SEQ ID NO: 3788240 - RNA, 15 nt, Human
aaaauauuuaugaag

SEQ ID NO: 3788241 - RNA, 20 nt, Human
aaaauauuuaugaagaaaau

SEQ ID NO: 3788242 - RNA, 13 nt, Human
aaaauauuuuaua

SEQ ID NO: 3788243 - RNA, 17 nt, Human
aaaauauuuuauaauuu

SEQ ID NO: 3788244 - RNA, 18 nt, Human
aaaauauuuuaugaucca

SEQ ID NO: 3788245 - RNA, 12 nt, Human
aaaauauuuuca

SEQ ID NO: 3788246 - RNA, 16 nt, Human
aaaauauuuuccugcc

SEQ ID NO: 3788247 - RNA, 18 nt, Human
aaaccuacccucagugag

SEQ ID NO: 3788248 - RNA, 17 nt, Human
aaaccuagagaagauaa

SEQ ID NO: 3788249 - RNA, 17 nt, Human
aaaccucaaaaugucua

SEQ ID NO: 3788250 - RNA, 18 nt, Human
aaaccucuaauuuauuuu

SEQ ID NO: 3788251 - RNA, 11 nt, Human
aaaccucuccu

SEQ ID NO: 3788252 - RNA, 15 nt, Human
aaaccucugugagca

SEQ ID NO: 3788253 - RNA, 11 nt, Human
aaaccucuguu

SEQ ID NO: 3788254 - RNA, 21 nt, Human
aaaccucuguucaguguaaau

SEQ ID NO: 3788255 - RNA, 15 nt, Human
aaaccugaagacuga

SEQ ID NO: 3788256 - RNA, 16 nt, Human
aaaccugagauuuauu

SEQ ID NO: 3788257 - RNA, 21 nt, Human
aaaccugagauuuauuaaaga

SEQ ID NO: 3788258 - RNA, 22 nt, Human
aaaccugagauuuauuaaagaa

SEQ ID NO: 3788259 - RNA, 23 nt, Human
aaaccugagauuuauuaaagaaa

SEQ ID NO: 3788260 - RNA, 12 nt, Human
aaaccugcccug

SEQ ID NO: 3788261 - RNA, 16 nt, Human
aaaccugcccugccug

SEQ ID NO: 3788262 - RNA, 16 nt, Human
aaaccugccuggguuu

SEQ ID NO: 3788263 - RNA, 15 nt, Human
aaaccugcuuuucaa

SEQ ID NO: 3788264 - RNA, 12 nt, Human
aaaccuggagau

SEQ ID NO: 3788265 - RNA, 17 nt, Human
aaaccuguaucuuucua

SEQ ID NO: 3788266 - RNA, 22 nt, Human
aaaccugugucucugagaguag

SEQ ID NO: 3788267 - RNA, 12 nt, Human
aaaccuguucua

SEQ ID NO: 3788268 - RNA, 20 nt, Human
aaaccuguuuuuuuuucauu

SEQ ID NO: 3788269 - RNA, 19 nt, Human
aaaccuuaauauuucuuca

SEQ ID NO: 3788270 - RNA, 23 nt, Human
aaaccuuaauauuucuucaaaua

SEQ ID NO: 3788271 - RNA, 16 nt, Human
aaaccuuauuguaccu

SEQ ID NO: 3788272 - RNA, 17 nt, Human
aaaccuuauuguaccuc

SEQ ID NO: 3788273 - RNA, 19 nt, Human
aaaccuuauuuuuucccaa

SEQ ID NO: 3788274 - RNA, 14 nt, Human
aaaccuugguguag

SEQ ID NO: 3788275 - RNA, 17 nt, Human
aaaccuuuagggcagcu

SEQ ID NO: 3788276 - RNA, 17 nt, Human
aaaccuuucaaauuuca

SEQ ID NO: 3788277 - RNA, 19 nt, Human
aaaccuuuggcuacacaau

SEQ ID NO: 3788278 - RNA, 15 nt, Human
aaaccuuuuauuaua

SEQ ID NO: 3788279 - RNA, 15 nt, Human
aaaccuuuuuuaaga

SEQ ID NO: 3788280 - RNA, 16 nt, Human
aaaccuuuuuuaagau

SEQ ID NO: 3788281 - RNA, 20 nt, Human
aaaccuuuuuuaagauuuuu

SEQ ID NO: 3788282 - RNA, 22 nt, Human
aaaccuuuuuuaagauuuuucu

SEQ ID NO: 3788283 - RNA, 18 nt, Human
aaacgaagccaucuuucu

SEQ ID NO: 3788284 - RNA, 19 nt, Human
aaacgaagccaucuuucuu

SEQ ID NO: 3788285 - RNA, 21 nt, Human
aaacgauuuaauucucuugaa

SEQ ID NO: 3788286 - RNA, 20 nt, Human
aaacgauuuuuaaaauguac

SEQ ID NO: 3788287 - RNA, 20 nt, Human
aaacgcauggaguguguauu

SEQ ID NO: 3788288 - RNA, 13 nt, Human
aaacgcuaccucu

SEQ ID NO: 3788289 - RNA, 18 nt, Human
aaacgcuaccucucuguc

SEQ ID NO: 3788290 - RNA, 12 nt, Human
aaacgcugccug

SEQ ID NO: 3788291 - RNA, 16 nt, Human
aaacggaugauuucua

SEQ ID NO: 3788292 - RNA, 20 nt, Human
aaacggauuauuuuuucaga

SEQ ID NO: 3788293 - RNA, 17 nt, Human
aaacgggaacaugcccc

SEQ ID NO: 3788294 - RNA, 15 nt, Human
aaacgggcucagcaa

SEQ ID NO: 3788295 - RNA, 15 nt, Human
aaacgucuuaaauau

SEQ ID NO: 3788296 - RNA, 14 nt, Human
aaacgugcccucug

SEQ ID NO: 3788297 - RNA, 14 nt, Human
aaacguuucaguaa

SEQ ID NO: 3788298 - RNA, 21 nt, Human
aaacguuuuauuguguuuuua

SEQ ID NO: 3788299 - RNA, 14 nt, Human
aaacuaaaaacuag

SEQ ID NO: 3788300 - RNA, 17 nt, Human
aaacuaaaucucuaaua

SEQ ID NO: 3788301 - RNA, 20 nt, Human
aaacuaaauuguaaacuccu

SEQ ID NO: 3788302 - RNA, 13 nt, Human
aaacuaaauuuca

SEQ ID NO: 3788303 - RNA, 20 nt, Human
aaacuaacagauaagcaaga

SEQ ID NO: 3788304 - RNA, 15 nt, Human
aaacuaagauucuuu

SEQ ID NO: 3788305 - RNA, 16 nt, Human
aaacuaagauucuuuu

SEQ ID NO: 3788306 - RNA, 16 nt, Human
aaacuaaggugcuaaa

SEQ ID NO: 3788307 - RNA, 13 nt, Human
aaacuaauaaaau

SEQ ID NO: 3788308 - RNA, 12 nt, Human
aaacuaaugagu

SEQ ID NO: 3788309 - RNA, 17 nt, Human
aaacuacaaaaauuaac

SEQ ID NO: 3788310 - RNA, 22 nt, Human
aaacuacacaucccuaaugugu

SEQ ID NO: 3788311 - RNA, 15 nt, Human
aaacuacauauugua

SEQ ID NO: 3788312 - RNA, 20 nt, Human
aaacuacauuagguugugaa

SEQ ID NO: 3788313 - RNA, 21 nt, Human
aaacuacauuagguugugaau

SEQ ID NO: 3788314 - RNA, 18 nt, Human
aaacuacauugacagauu

SEQ ID NO: 3788315 - RNA, 14 nt, Human
aaacuacauuuuaa

SEQ ID NO: 3788316 - RNA, 18 nt, Human
aaacuacauuuuaacaug

SEQ ID NO: 3788317 - RNA, 20 nt, Human
aaacuaccuaacauuauuua

SEQ ID NO: 3788318 - RNA, 13 nt, Human
aaacuacucuuug

SEQ ID NO: 3788319 - RNA, 14 nt, Human
aaacuacucuuuga

SEQ ID NO: 3788320 - RNA, 20 nt, Human
aaacuacugaaugaagcagu

SEQ ID NO: 3788321 - RNA, 20 nt, Human
aaacuacuuugcugcuaaua

SEQ ID NO: 3788322 - RNA, 21 nt, Human
aaacuagacuugaggaaacca

SEQ ID NO: 3788323 - RNA, 23 nt, Human
aaacuagcucgugauuggcauau

SEQ ID NO: 3788324 - RNA, 19 nt, Human
aaacuagcuuacaugagaa

SEQ ID NO: 3788325 - RNA, 23 nt, Human
aaacuagcuuacaugagaacaga

SEQ ID NO: 3788326 - RNA, 15 nt, Human
aaacuaggaaaauug

SEQ ID NO: 3788327 - RNA, 17 nt, Human
aaacuaggaaauuuuuu

SEQ ID NO: 3788328 - RNA, 14 nt, Human
aaacuaguaguucu

SEQ ID NO: 3788329 - RNA, 17 nt, Human
aaacuaguaguucucuu

SEQ ID NO: 3788330 - RNA, 15 nt, Human
aaacuaguuuuuccu

SEQ ID NO: 3788331 - RNA, 16 nt, Human
aaacuaguuuuuccua

SEQ ID NO: 3788332 - RNA, 22 nt, Human
aaacuauaagcaagaaggcaaa

SEQ ID NO: 3788333 - RNA, 13 nt, Human
aaacuauacuuga

SEQ ID NO: 3788334 - RNA, 22 nt, Human
aaacuauacuugaacaaaaggg

SEQ ID NO: 3788335 - RNA, 21 nt, Human
aaacuauuaaggauguagcuu

SEQ ID NO: 3788336 - RNA, 19 nt, Human
aaacuauucaugcuaccca

SEQ ID NO: 3788337 - RNA, 13 nt, Human
aaacuauuuaucu

SEQ ID NO: 3788338 - RNA, 20 nt, Human
aaacuauuugucuuucagga

SEQ ID NO: 3788339 - RNA, 21 nt, Human
aaacucaaaauauuuguacau

SEQ ID NO: 3788340 - RNA, 14 nt, Human
aaacucaagcuucu

SEQ ID NO: 3788341 - RNA, 16 nt, Human
aaacucaccugcuggc

SEQ ID NO: 3788342 - RNA, 18 nt, Human
aaacucaccugcuggccc

SEQ ID NO: 3788343 - RNA, 20 nt, Human
aaacucacugcucaagaaga

SEQ ID NO: 3788344 - RNA, 13 nt, Human
aaacucacuguga

SEQ ID NO: 3788345 - RNA, 21 nt, Human
aaacucagccugggacaguuu

SEQ ID NO: 3788346 - RNA, 23 nt, Human
aaacucaggauggucaucuugga

SEQ ID NO: 3788347 - RNA, 17 nt, Human
aaacucaggcaaagaaa

SEQ ID NO: 3788348 - RNA, 18 nt, Human
aaacucagggacagagcc

SEQ ID NO: 3788349 - RNA, 17 nt, Human
aaacucauauuacaaaa

SEQ ID NO: 3788350 - RNA, 16 nt, Human
aaacucaucugaaaug

SEQ ID NO: 3788351 - RNA, 13 nt, Human
aaacucaucugga

SEQ ID NO: 3788352 - RNA, 16 nt, Human
aaacucauuucuagca

SEQ ID NO: 3788353 - RNA, 12 nt, Human
aaacucauuuuu

SEQ ID NO: 3788354 - RNA, 16 nt, Human
aaacuccacaucugcc

SEQ ID NO: 3788355 - RNA, 11 nt, Human
aaacuccugac

SEQ ID NO: 3788356 - RNA, 14 nt, Human
aaacuccugugacc

SEQ ID NO: 3788357 - RNA, 20 nt, Human
aaacuccuuccuggccugag

SEQ ID NO: 3788358 - RNA, 20 nt, Human
aaacucgaggacuguauuug

SEQ ID NO: 3788359 - RNA, 21 nt, Human
aaacucuaaacauuaaucaau

SEQ ID NO: 3788360 - RNA, 17 nt, Human
aaacucuauggucuuau

SEQ ID NO: 3788361 - RNA, 18 nt, Human
aaacucuccucugcugcu

SEQ ID NO: 3788362 - RNA, 17 nt, Human
aaacucugaauuuaucu

SEQ ID NO: 3788363 - RNA, 18 nt, Human
aaacucugaauuuaucuu

SEQ ID NO: 3788364 - RNA, 15 nt, Human
aaacucugagugcaa

SEQ ID NO: 3788365 - RNA, 17 nt, Human
aaacucugcauccagag

SEQ ID NO: 3788366 - RNA, 11 nt, Human
aaacucugcug

SEQ ID NO: 3788367 - RNA, 12 nt, Human
aaacucugcugu

SEQ ID NO: 3788368 - RNA, 19 nt, Human
aaacucuguugcaagugca

SEQ ID NO: 3788369 - RNA, 13 nt, Human
aaacucuuaucuc

SEQ ID NO: 3788370 - RNA, 16 nt, Human
aaacucuuaucucagu

SEQ ID NO: 3788371 - RNA, 22 nt, Human
aaacucuuaucucagucaugca

SEQ ID NO: 3788372 - RNA, 20 nt, Human
aaacucuuuggucguuuuuu

SEQ ID NO: 3788373 - RNA, 13 nt, Human
aaacucuuuuccc

SEQ ID NO: 3788374 - RNA, 14 nt, Human
aaacugaaaaucua

SEQ ID NO: 3788375 - RNA, 21 nt, Human
aaacugaagcagccucucccc

SEQ ID NO: 3788376 - RNA, 22 nt, Human
aaacugaagcagccucucccca

SEQ ID NO: 3788377 - RNA, 17 nt, Human
aaacugaagucugaaau

SEQ ID NO: 3788378 - RNA, 19 nt, Human
aaacugaagucugaaauuu

SEQ ID NO: 3788379 - RNA, 22 nt, Human
aaacugacaugcccucccuucu

SEQ ID NO: 3788380 - RNA, 13 nt, Human
aaacugacuauca

SEQ ID NO: 3788381 - RNA, 11 nt, Human
aaacugagcau

SEQ ID NO: 3788382 - RNA, 14 nt, Human
aaacugaggaauuu

SEQ ID NO: 3788383 - RNA, 19 nt, Human
aaacugaggaauuucaccu

SEQ ID NO: 3788384 - RNA, 18 nt, Human
aaacugaggaauuuucuu

SEQ ID NO: 3788385 - RNA, 15 nt, Human
aaacugaugugaaac

SEQ ID NO: 3788386 - RNA, 12 nt, Human
aaacugcaauag

SEQ ID NO: 3788387 - RNA, 21 nt, Human
aaacugcaauagagacuguag

SEQ ID NO: 3788388 - RNA, 22 nt, Human
aaacugcaauagagacuguaga

SEQ ID NO: 3788389 - RNA, 18 nt, Human
aaacugcacaugauuuca

SEQ ID NO: 3788390 - RNA, 15 nt, Human
aaacugcacugucaa

SEQ ID NO: 3788391 - RNA, 23 nt, Human
aaacugcauaagugaaaaucuua

SEQ ID NO: 3788392 - RNA, 14 nt, Human
aaaauuuuauagcu

SEQ ID NO: 3788393 - RNA, 22 nt, Human
aaaauuuugcuccccagugaag

SEQ ID NO: 3788394 - RNA, 16 nt, Human
aaaauuuugcuuuuaa

SEQ ID NO: 3788395 - RNA, 13 nt, Human
aaaauuuuguaau

SEQ ID NO: 3788396 - RNA, 19 nt, Human
aaaauuuuguaauuuucuu

SEQ ID NO: 3788397 - RNA, 18 nt, Human
aaaauuuuguauguuaaa

SEQ ID NO: 3788398 - RNA, 19 nt, Human
aaaauuuugugacauuccu

SEQ ID NO: 3788399 - RNA, 20 nt, Human
aaaauuuugugacauuccuu

SEQ ID NO: 3788400 - RNA, 16 nt, Human
aaaauuuuguuuauaa

SEQ ID NO: 3788401 - RNA, 19 nt, Human
aaaauuuuuaaucuuuaau

SEQ ID NO: 3788402 - RNA, 23 nt, Human
aaaauuuuuggauugacaguaac

SEQ ID NO: 3788403 - RNA, 19 nt, Human
aaaauuuuuucucuaggaa

SEQ ID NO: 3788404 - RNA, 21 nt, Human
aaaauuuuuuuggucuuuuug

SEQ ID NO: 3788405 - RNA, 16 nt, Human
aaacaaaaagaugucu

SEQ ID NO: 3788406 - RNA, 23 nt, Human
aaacaaaaauucacaagcugccu

SEQ ID NO: 3788407 - RNA, 20 nt, Human
aaacaaaacuauacuugaac

SEQ ID NO: 3788408 - RNA, 19 nt, Human
aaacaaaagcugaacacau

SEQ ID NO: 3788409 - RNA, 23 nt, Human
aaacaaaagcugaacacauuucu

SEQ ID NO: 3788410 - RNA, 13 nt, Human
aaacaaaaugaag

SEQ ID NO: 3788411 - RNA, 17 nt, Human
aaacaaaauggcuucag

SEQ ID NO: 3788412 - RNA, 14 nt, Human
aaacaaaauuucua

SEQ ID NO: 3788413 - RNA, 13 nt, Human
aaacaaaauuuga

SEQ ID NO: 3788414 - RNA, 17 nt, Human
aaacaaaauuugacuaa

SEQ ID NO: 3788415 - RNA, 22 nt, Human
aaacaaacauuguguugacauu

SEQ ID NO: 3788416 - RNA, 13 nt, Human
aaacaaaccagaa

SEQ ID NO: 3788417 - RNA, 12 nt, Human
aaacaaagaugu

SEQ ID NO: 3788418 - RNA, 15 nt, Human
aaacaaauaaucaca

SEQ ID NO: 3788419 - RNA, 17 nt, Human
aaacaaauaaucacauu

SEQ ID NO: 3788420 - RNA, 13 nt, Human
aaacaaauaugca

SEQ ID NO: 3788421 - RNA, 17 nt, Human
aaacaaauaugcaaaag

SEQ ID NO: 3788422 - RNA, 19 nt, Human
aaacaaauucauauucugu

SEQ ID NO: 3788423 - RNA, 14 nt, Human
aaacaacaaaaaau

SEQ ID NO: 3788424 - RNA, 12 nt, Human
aaacaacacugu

SEQ ID NO: 3788425 - RNA, 22 nt, Human
aaacaacagcucgauccaaauu

SEQ ID NO: 3788426 - RNA, 12 nt, Human
aaacaacauuua

SEQ ID NO: 3788427 - RNA, 17 nt, Human
aaacaacauuuauaugu

SEQ ID NO: 3788428 - RNA, 17 nt, Human
aaacaacucuuugagaa

SEQ ID NO: 3788429 - RNA, 19 nt, Human
aaacaagaaaaauaaagaa

SEQ ID NO: 3788430 - RNA, 16 nt, Human
aaacaagaaaguuucc

SEQ ID NO: 3788431 - RNA, 22 nt, Human
aaacuguugccagagauggagg

SEQ ID NO: 3788432 - RNA, 18 nt, Human
aaacuguuucuuuaaaau

SEQ ID NO: 3788433 - RNA, 20 nt, Human
aaacuguuuuagaccuauaa

SEQ ID NO: 3788434 - RNA, 20 nt, Human
aaacuguuuuggguagcugc

SEQ ID NO: 3788435 - RNA, 17 nt, Human
aaacuuaaauguuauua

SEQ ID NO: 3788436 - RNA, 23 nt, Human
aaacuuaacuuuaacugaacaau

SEQ ID NO: 3788437 - RNA, 17 nt, Human
aaacuuaauuuaauauu

SEQ ID NO: 3788438 - RNA, 17 nt, Human
aaacuuagaauaaaauu

SEQ ID NO: 3788439 - RNA, 15 nt, Human
aaacuuauaaaucau

SEQ ID NO: 3788440 - RNA, 20 nt, Human
aaacuuaucuuacaaagugu

SEQ ID NO: 3788441 - RNA, 17 nt, Human
aaacuuaugaauguuuc

SEQ ID NO: 3788442 - RNA, 20 nt, Human
aaacuuaugcugauuuauuu

SEQ ID NO: 3788443 - RNA, 10 nt, Human
aaacuuauuu

SEQ ID NO: 3788444 - RNA, 12 nt, Human
aaacuuauuuga

SEQ ID NO: 3788445 - RNA, 18 nt, Human
aaacuuauuuuauauuuu

SEQ ID NO: 3788446 - RNA, 19 nt, Human
aaacuuauuuuuuucugau

SEQ ID NO: 3788447 - RNA, 22 nt, Human
aaacuuauuuuuuucugauugu

SEQ ID NO: 3788448 - RNA, 19 nt, Human
aaacuucagacauagaauu

SEQ ID NO: 3788449 - RNA, 13 nt, Human
aaacuucagcacc

SEQ ID NO: 3788450 - RNA, 20 nt, Human
aaacuucauguaauuuuauu

SEQ ID NO: 3788451 - RNA, 21 nt, Human
aaacuucauguaauuuuauuu

SEQ ID NO: 3788452 - RNA, 18 nt, Human
aaacuuccaaagaaaguu

SEQ ID NO: 3788453 - RNA, 21 nt, Human
aaacuuccagugcaacacuga

SEQ ID NO: 3788454 - RNA, 23 nt, Human
aaacuuccagugcaacacugaag

SEQ ID NO: 3788455 - RNA, 23 nt, Human
aaacuucccgucccauauccugc

SEQ ID NO: 3788456 - RNA, 21 nt, Human
aaacuucccuuucugcuugug

SEQ ID NO: 3788457 - RNA, 17 nt, Human
aaacuucuggcucccuc

SEQ ID NO: 3788458 - RNA, 17 nt, Human
aaacuucuuaaauaucu

SEQ ID NO: 3788459 - RNA, 19 nt, Human
aaacuucuuaaauaucuuu

SEQ ID NO: 3788460 - RNA, 15 nt, Human
aaacuucuugucaga

SEQ ID NO: 3788461 - RNA, 23 nt, Human
aaacuucuugucagacauaaagc

SEQ ID NO: 3788462 - RNA, 19 nt, Human
aaacuugacuccauuucau

SEQ ID NO: 3788463 - RNA, 22 nt, Human
aaacuugauguguuaucucuua

SEQ ID NO: 3788464 - RNA, 19 nt, Human
aaacuuggauacuuggauu

SEQ ID NO: 3788465 - RNA, 20 nt, Human
aaacuuggauacuuggauuu

SEQ ID NO: 3788466 - RNA, 24 nt, Human
aaacuuggcucgaaucucugugcc

SEQ ID NO: 3788467 - RNA, 11 nt, Human
aaacuuguaaa

SEQ ID NO: 3788468 - RNA, 16 nt, Human
aaacuuguaauuuuuu

SEQ ID NO: 3788469 - RNA, 20 nt, Human
aaacuuguaauuuuuuuaau

SEQ ID NO: 3788470 - RNA, 16 nt, Human
aaacuugucacuugca

SEQ ID NO: 3788471 - RNA, 17 nt, Human
aaacuugucacuugcau

SEQ ID NO: 3788472 - RNA, 19 nt, Human
aaacuugucacuugcaugu

SEQ ID NO: 3788473 - RNA, 20 nt, Human
aaacuugucacuugcauguc

SEQ ID NO: 3788474 - RNA, 13 nt, Human
aaacuugugaaug

SEQ ID NO: 3788475 - RNA, 18 nt, Human
aaacuuguuacuaaagaa

SEQ ID NO: 3788476 - RNA, 17 nt, Human
aaacuuguuauugugaa

SEQ ID NO: 3788477 - RNA, 12 nt, Human
aaacuuuaaaaa

SEQ ID NO: 3788478 - RNA, 22 nt, Human
aaacuuuaaaaaauauuuauua

SEQ ID NO: 3788479 - RNA, 14 nt, Human
aaacuuuaaaccug

SEQ ID NO: 3788480 - RNA, 22 nt, Human
aaacuuuaaaccuguagaauca

SEQ ID NO: 3788481 - RNA, 14 nt, Human
aaacuuuaauaugu

SEQ ID NO: 3788482 - RNA, 12 nt, Human
aaacuuuaugcu

SEQ ID NO: 3788483 - RNA, 19 nt, Human
aaacuuuauuuuauauaau

SEQ ID NO: 3788484 - RNA, 18 nt, Human
aaacuuuccucgccugac

SEQ ID NO: 3788485 - RNA, 21 nt, Human
aaacuuucuacucauuuuaau

SEQ ID NO: 3788486 - RNA, 16 nt, Human
aaacuuugaaguuagc

SEQ ID NO: 3788487 - RNA, 14 nt, Human
aaacuuugcuaaau

SEQ ID NO: 3788488 - RNA, 19 nt, Human
aaacuuuggaaccagacuc

SEQ ID NO: 3788489 - RNA, 20 nt, Human
aaacuuugggaaaacauguu

SEQ ID NO: 3788490 - RNA, 14 nt, Human
aaacuuuuauaaau

SEQ ID NO: 3788491 - RNA, 21 nt, Human
aaacuuuuauaaauuaaauau

SEQ ID NO: 3788492 - RNA, 18 nt, Human
aaacuuuucaaggcuuau

SEQ ID NO: 3788493 - RNA, 17 nt, Human
aaacuuuuuuuugagaa

SEQ ID NO: 3788494 - RNA, 10 nt, Human
aaagaaaaaa

SEQ ID NO: 3788495 - RNA, 22 nt, Human
aaagaaaaaaaaaaagaaagaa

SEQ ID NO: 3788496 - RNA, 21 nt, Human
aaagaaaaaaaaaagaagaag

SEQ ID NO: 3788497 - RNA, 22 nt, Human
aaagaaaaaaaaaagaagaaga

SEQ ID NO: 3788498 - RNA, 23 nt, Human
aaagaaaaaaaaccaucaaguug

SEQ ID NO: 3788499 - RNA, 15 nt, Human
aaagaaaaaaauuga

SEQ ID NO: 3788500 - RNA, 18 nt, Human
aaagaaaaaaauugaaau

SEQ ID NO: 3788501 - RNA, 19 nt, Human
aaagaaaaaaauugaaaug

SEQ ID NO: 3788502 - RNA, 21 nt, Human
aaagaaaaaaauugaaaugua

SEQ ID NO: 3788503 - RNA, 22 nt, Human
aaagaaaaaaauugaaauguaa

SEQ ID NO: 3788504 - RNA, 18 nt, Human
aaagaaaaaagagaaaag

SEQ ID NO: 3788505 - RNA, 18 nt, Human
aaagaaaaauauuuaaug

SEQ ID NO: 3788506 - RNA, 16 nt, Human
aaagaaaacccacccc

SEQ ID NO: 3788507 - RNA, 13 nt, Human
aaagaaaaccuuu

SEQ ID NO: 3788508 - RNA, 14 nt, Human
aaagaaaagauaaa

SEQ ID NO: 3788509 - RNA, 15 nt, Human
aaagaaaagaugcac

SEQ ID NO: 3788510 - RNA, 20 nt, Human
aaagaaaagaugcacuuugc

SEQ ID NO: 3788511 - RNA, 13 nt, Human
aaagaaaauaugc

SEQ ID NO: 3788512 - RNA, 16 nt, Human
aaagaaaauuccuaua

SEQ ID NO: 3788513 - RNA, 12 nt, Human
aaagaaaauuuu

SEQ ID NO: 3788514 - RNA, 19 nt, Human
aaagaaaauuuuuguagua

SEQ ID NO: 3788515 - RNA, 13 nt, Human
aaagaaacagcuu

SEQ ID NO: 3788516 - RNA, 12 nt, Human
aaagaaacaugg

SEQ ID NO: 3788517 - RNA, 13 nt, Human
aaagaaacauuug

SEQ ID NO: 3788518 - RNA, 10 nt, Human
aaagaaagaa

SEQ ID NO: 3788519 - RNA, 13 nt, Human
aaagaaagagaga

SEQ ID NO: 3788520 - RNA, 15 nt, Human
aaagaaagagagaaa

SEQ ID NO: 3788521 - RNA, 17 nt, Human
aaagaaagccucagaga

SEQ ID NO: 3788522 - RNA, 18 nt, Human
aaagaaagccucagagaa

SEQ ID NO: 3788523 - RNA, 12 nt, Human
aaagaaaguggu

SEQ ID NO: 3788524 - RNA, 23 nt, Human
aaagaaaguggucuuaagaaaug

SEQ ID NO: 3788525 - RNA, 16 nt, Human
aaagaaaguguauuug

SEQ ID NO: 3788526 - RNA, 23 nt, Human
aaagaaaguugcacggcugcuga

SEQ ID NO: 3788527 - RNA, 15 nt, Human
aaagaaauaauaaua

SEQ ID NO: 3788528 - RNA, 17 nt, Human
aaagaaauauaccuaaa

SEQ ID NO: 3788529 - RNA, 13 nt, Human
aaagaaauaucug

SEQ ID NO: 3788530 - RNA, 13 nt, Human
aaagaaaucaugu

SEQ ID NO: 3788531 - RNA, 15 nt, Human
aaagaaaucuauaga

SEQ ID NO: 3788532 - RNA, 23 nt, Human
aaagaaaucuauagaaaguguuc

SEQ ID NO: 3788533 - RNA, 17 nt, Human
aaagaaaugcacaaugu

SEQ ID NO: 3788534 - RNA, 15 nt, Human
aaagaaauguaaggg

SEQ ID NO: 3788535 - RNA, 19 nt, Human
aaagaaaugucuauuaagg

SEQ ID NO: 3788536 - RNA, 20 nt, Human
aaacucuguugcaagugcaa

SEQ ID NO: 3788537 - RNA, 16 nt, Human
aaacucuuuaacuucu

SEQ ID NO: 3788538 - RNA, 23 nt, Human
aaacucuuuaacuuguaauaaac

SEQ ID NO: 3788539 - RNA, 13 nt, Human
aaacucuuuauuu

SEQ ID NO: 3788540 - RNA, 13 nt, Human
aaacugaaaaucu

SEQ ID NO: 3788541 - RNA, 17 nt, Human
aaacugaauuuguacuu

SEQ ID NO: 3788542 - RNA, 19 nt, Human
aaacugacaugcccucccu

SEQ ID NO: 3788543 - RNA, 20 nt, Human
aaacugacaugcccucccuu

SEQ ID NO: 3788544 - RNA, 12 nt, Human
aaacugacuuua

SEQ ID NO: 3788545 - RNA, 21 nt, Human
aaacugagacucagacaggaa

SEQ ID NO: 3788546 - RNA, 23 nt, Human
aaacugagacucagacaggaaag

SEQ ID NO: 3788547 - RNA, 21 nt, Human
aaacugagaugugaacacauc

SEQ ID NO: 3788548 - RNA, 23 nt, Human
aaacugagaugugaacacaucag

SEQ ID NO: 3788549 - RNA, 13 nt, Human
aaacugauuuuuu

SEQ ID NO: 3788550 - RNA, 19 nt, Human
aaacugauuuuuuuuuccu

SEQ ID NO: 3788551 - RNA, 23 nt, Human
aaacugauuuuuuuuuccuucag

SEQ ID NO: 3788552 - RNA, 12 nt, Human
aaacugcacaug

SEQ ID NO: 3788553 - RNA, 22 nt, Human
aaacugcacaugauuucacaaa

SEQ ID NO: 3788554 - RNA, 16 nt, Human
aaacugcaugcccaga

SEQ ID NO: 3788555 - RNA, 14 nt, Human
aaacugcauuagaa

SEQ ID NO: 3788556 - RNA, 12 nt, Human
aaacugcauuug

SEQ ID NO: 3788557 - RNA, 17 nt, Human
aaacugcguuaaaggcu

SEQ ID NO: 3788558 - RNA, 13 nt, Human
aaacugcuuguuu

SEQ ID NO: 3788559 - RNA, 17 nt, Human
aaacugcuuguuuccua

SEQ ID NO: 3788560 - RNA, 22 nt, Human
aaacugcuuguuuccuagcaca

SEQ ID NO: 3788561 - RNA, 21 nt, Human
aaacugcuuuuuuuuuuccag

SEQ ID NO: 3788562 - RNA, 23 nt, Human
aaacugcuuuuuuuuuuccagca

SEQ ID NO: 3788563 - RNA, 14 nt, Human
aaacuggaaugagc

SEQ ID NO: 3788564 - RNA, 10 nt, Human
aaacuggaga

SEQ ID NO: 3788565 - RNA, 21 nt, Human
aaacuggagacugugugugcc

SEQ ID NO: 3788566 - RNA, 11 nt, Human
aaacuggaguc

SEQ ID NO: 3788567 - RNA, 20 nt, Human
aaacuggcaaacuucagacu

SEQ ID NO: 3788568 - RNA, 16 nt, Human
aaacuggcaaagcaga

SEQ ID NO: 3788569 - RNA, 18 nt, Human
aaacuggccauggccugc

SEQ ID NO: 3788570 - RNA, 15 nt, Human
aaacuggccugacuu

SEQ ID NO: 3788571 - RNA, 19 nt, Human
aaacugggaugaaacuaaa

SEQ ID NO: 3788572 - RNA, 20 nt, Human
aaacugggcuggaagauauu

SEQ ID NO: 3788573 - RNA, 17 nt, Human
aaacuggggccuccaga

SEQ ID NO: 3788574 - RNA, 16 nt, Human
aaacuguacagugucu

SEQ ID NO: 3788575 - RNA, 15 nt, Human
aaacuguacauuuaa

SEQ ID NO: 3788576 - RNA, 20 nt, Human
aaacuguacuuugauucaca

SEQ ID NO: 3788577 - RNA, 22 nt, Human
aaacuguacuuugauucacaug

SEQ ID NO: 3788578 - RNA, 15 nt, Human
aaacuguaugcucac

SEQ ID NO: 3788579 - RNA, 22 nt, Human
aaacuguauugaugacaguagu

SEQ ID NO: 3788580 - RNA, 17 nt, Human
aaacugucaaagaauca

SEQ ID NO: 3788581 - RNA, 14 nt, Human
aaacugucacuguu

SEQ ID NO: 3788582 - RNA, 20 nt, Human
aaacuguccucuuucagaaa

SEQ ID NO: 3788583 - RNA, 19 nt, Human
aaacuguguauuccaagac

SEQ ID NO: 3788584 - RNA, 20 nt, Human
aaacuguguggacugugaug

SEQ ID NO: 3788585 - RNA, 14 nt, Human
aaacuguguugcca

SEQ ID NO: 3788586 - RNA, 16 nt, Human
aaacuguguugccaca

SEQ ID NO: 3788587 - RNA, 19 nt, Human
aaacuguuaauaguucagg

SEQ ID NO: 3788588 - RNA, 22 nt, Human
aaacuguucaagaaauaauaaa

SEQ ID NO: 3788589 - RNA, 20 nt, Human
aaacuguucccaccugcugg

SEQ ID NO: 3788590 - RNA, 16 nt, Human
aaacuguugccagaga

SEQ ID NO: 3788591 - RNA, 16 nt, Human
aaacuguuucuuuaaa

SEQ ID NO: 3788592 - RNA, 23 nt, Human
aaacuguuugaaaacuucagaag

SEQ ID NO: 3788593 - RNA, 23 nt, Human
aaacuguuuuggguagcugccac

SEQ ID NO: 3788594 - RNA, 18 nt, Human
aaacuuaaccgcaucaga

SEQ ID NO: 3788595 - RNA, 16 nt, Human
aaacuuaaucuaaaug

SEQ ID NO: 3788596 - RNA, 18 nt, Human
aaacuuaaucuaaaugga

SEQ ID NO: 3788597 - RNA, 23 nt, Human
aaacuuaccuaagugacauuugu

SEQ ID NO: 3788598 - RNA, 22 nt, Human
aaacuuagaauaaaauuguaaa

SEQ ID NO: 3788599 - RNA, 20 nt, Human
aaacuuagcaucuaauuuca

SEQ ID NO: 3788600 - RNA, 21 nt, Human
aaacuuagugcggacaaguuu

SEQ ID NO: 3788601 - RNA, 15 nt, Human
aaacuuaguuuguga

SEQ ID NO: 3788602 - RNA, 20 nt, Human
aaacuuauaaaucauauuga

SEQ ID NO: 3788603 - RNA, 13 nt, Human
aaacuuaugaaug

SEQ ID NO: 3788604 - RNA, 16 nt, Human
aaacuuaugaauguuu

SEQ ID NO: 3788605 - RNA, 14 nt, Human
aaacuuauuugagu

SEQ ID NO: 3788606 - RNA, 22 nt, Human
aaacuuauuuuauauuuucccu

SEQ ID NO: 3788607 - RNA, 20 nt, Human
aaacuuauuuuuuucugauu

SEQ ID NO: 3788608 - RNA, 16 nt, Human
aaacuucaagcaccag

SEQ ID NO: 3788609 - RNA, 20 nt, Human
aaacuucagaagcaaacaau

SEQ ID NO: 3788610 - RNA, 23 nt, Human
aaacuucagcgguuuauauaagc

SEQ ID NO: 3788611 - RNA, 20 nt, Human
aaacuucaguuucacagaaa

SEQ ID NO: 3788612 - RNA, 16 nt, Human
aaacuuccaagaccug

SEQ ID NO: 3788613 - RNA, 14 nt, Human
aaacuucguuuaau

SEQ ID NO: 3788614 - RNA, 18 nt, Human
aaacuucucugaagggag

SEQ ID NO: 3788615 - RNA, 16 nt, Human
aaacuucuuaaauauc

SEQ ID NO: 3788616 - RNA, 20 nt, Human
aaacuucuuaaauaucuuuu

SEQ ID NO: 3788617 - RNA, 17 nt, Human
aaacuucuugucagaca

SEQ ID NO: 3788618 - RNA, 13 nt, Human
aaacuuggauacu

SEQ ID NO: 3788619 - RNA, 15 nt, Human
aaacuuggauucucu

SEQ ID NO: 3788620 - RNA, 18 nt, Human
aaacuuggauucucuaac

SEQ ID NO: 3788621 - RNA, 20 nt, Human
aaacuuggugcuuauugaua

SEQ ID NO: 3788622 - RNA, 12 nt, Human
aaacuuguaaau

SEQ ID NO: 3788623 - RNA, 19 nt, Human
aaacuuguaaauaaaggaa

SEQ ID NO: 3788624 - RNA, 18 nt, Human
aaacuugucacuugcaug

SEQ ID NO: 3788625 - RNA, 15 nt, Human
aaacuugugaaugcu

SEQ ID NO: 3788626 - RNA, 15 nt, Human
aaacuuguguaaaua

SEQ ID NO: 3788627 - RNA, 16 nt, Human
aaacuuguuucacuga

SEQ ID NO: 3788628 - RNA, 17 nt, Human
aaacuuguuucacugaa

SEQ ID NO: 3788629 - RNA, 20 nt, Human
aaaggugaguuugagcugcc

SEQ ID NO: 3788630 - RNA, 22 nt, Human
aaaggugaguuugagcugccuu

SEQ ID NO: 3788631 - RNA, 15 nt, Human
aaaggugauugucac

SEQ ID NO: 3788632 - RNA, 13 nt, Human
aaaggugccaugg

SEQ ID NO: 3788633 - RNA, 19 nt, Human
aaagguggauuuuguuuaa

SEQ ID NO: 3788634 - RNA, 22 nt, Human
aaaggugguauguguguguaug

SEQ ID NO: 3788635 - RNA, 14 nt, Human
aaagguguauuuaa

SEQ ID NO: 3788636 - RNA, 20 nt, Human
aaagguucuagguuucaaag

SEQ ID NO: 3788637 - RNA, 19 nt, Human
aaagguugaauaauauaug

SEQ ID NO: 3788638 - RNA, 16 nt, Human
aaagguuuacagaauu

SEQ ID NO: 3788639 - RNA, 16 nt, Human
aaagguuuaugaaaaa

SEQ ID NO: 3788640 - RNA, 19 nt, Human
aaagguuugcauucucaca

SEQ ID NO: 3788641 - RNA, 18 nt, Human
aaagguuuuauuuuguaa

SEQ ID NO: 3788642 - RNA, 14 nt, Human
aaagguuuuccucu

SEQ ID NO: 3788643 - RNA, 23 nt, Human
aaagguuuuggaucuugaaugug

SEQ ID NO: 3788644 - RNA, 20 nt, Human
aaaguaaaaagggaauuaug

SEQ ID NO: 3788645 - RNA, 13 nt, Human
aaaguaaagcuaa

SEQ ID NO: 3788646 - RNA, 18 nt, Human
aaaguaaauacaugcaua

SEQ ID NO: 3788647 - RNA, 22 nt, Human
aaaguaacucauuuguuaaaau

SEQ ID NO: 3788648 - RNA, 15 nt, Human
aaaguaauauuuauu

SEQ ID NO: 3788649 - RNA, 18 nt, Human
aaaguaauauuuauuaaa

SEQ ID NO: 3788650 - RNA, 12 nt, Human
aaaguaauguaa

SEQ ID NO: 3788651 - RNA, 13 nt, Human
aaaguaauguaaa

SEQ ID NO: 3788652 - RNA, 17 nt, Human
aaaguacaauguguuuu

SEQ ID NO: 3788653 - RNA, 19 nt, Human
aaaguacacuguuucaaac

SEQ ID NO: 3788654 - RNA, 21 nt, Human
aaaguacagaauuugaauuau

SEQ ID NO: 3788655 - RNA, 14 nt, Human
aaaguacagguacu

SEQ ID NO: 3788656 - RNA, 20 nt, Human
aaaguacagguacuuugucu

SEQ ID NO: 3788657 - RNA, 22 nt, Human
aaaguacagguacuuugucuaa

SEQ ID NO: 3788658 - RNA, 14 nt, Human
aaaguacauuuaau

SEQ ID NO: 3788659 - RNA, 15 nt, Human
aaaguacauuuuuug

SEQ ID NO: 3788660 - RNA, 18 nt, Human
aaaguacauuuuuugaaa

SEQ ID NO: 3788661 - RNA, 19 nt, Human
aaaguacauuuuuugaaau

SEQ ID NO: 3788662 - RNA, 12 nt, Human
aaaguacuguaa

SEQ ID NO: 3788663 - RNA, 14 nt, Human
aaaguacuuguagu

SEQ ID NO: 3788664 - RNA, 15 nt, Human
aaaguacuuguaguu

SEQ ID NO: 3788665 - RNA, 15 nt, Human
aaaguagaacuuugu

SEQ ID NO: 3788666 - RNA, 20 nt, Human
aaaguagaagucuuagaugu

SEQ ID NO: 3788667 - RNA, 11 nt, Human
aaaguagaggu

SEQ ID NO: 3788668 - RNA, 12 nt, Human
aaaguagggggc

SEQ ID NO: 3788669 - RNA, 19 nt, Human
aaaguaguacuucuucugu

SEQ ID NO: 3788670 - RNA, 18 nt, Human
aaaguauaaauuugugua

SEQ ID NO: 3788671 - RNA, 14 nt, Human
aaaguauaauguuu

SEQ ID NO: 3788672 - RNA, 17 nt, Human
aaaguauagagagaagu

SEQ ID NO: 3788673 - RNA, 17 nt, Human
aaaguauauauagaauc

SEQ ID NO: 3788674 - RNA, 18 nt, Human
aaaguauauauagaaucu

SEQ ID NO: 3788675 - RNA, 19 nt, Human
aaaguaucgggggcugggg

SEQ ID NO: 3788676 - RNA, 14 nt, Human
aaaguaugcauuau

SEQ ID NO: 3788677 - RNA, 19 nt, Human
aaaguauguauuauuuaca

SEQ ID NO: 3788678 - RNA, 13 nt, Human
aaaguauuaagca

SEQ ID NO: 3788679 - RNA, 17 nt, Human
aaaguauuauuuuccaa

SEQ ID NO: 3788680 - RNA, 16 nt, Human
aaaguauuccaccuua

SEQ ID NO: 3788681 - RNA, 22 nt, Human
aaaguauucuucucuuccuuuu

SEQ ID NO: 3788682 - RNA, 14 nt, Human
aaaguauugccaaa

SEQ ID NO: 3788683 - RNA, 15 nt, Human
aaaguauugccaaac

SEQ ID NO: 3788684 - RNA, 18 nt, Human
aaaguauugccaaacauu

SEQ ID NO: 3788685 - RNA, 19 nt, Human
aaaguauugccaaacauua

SEQ ID NO: 3788686 - RNA, 14 nt, Human
aaaguauuguaaau

SEQ ID NO: 3788687 - RNA, 15 nt, Human
aaaguauuguaaauu

SEQ ID NO: 3788688 - RNA, 16 nt, Human
aaaguauuguaaauua

SEQ ID NO: 3788689 - RNA, 20 nt, Human
aaaguauuguaaugagugaa

SEQ ID NO: 3788690 - RNA, 18 nt, Human
aaaguauuuaauuagugc

SEQ ID NO: 3788691 - RNA, 23 nt, Human
aaaguauuuaauuagugcuaagu

SEQ ID NO: 3788692 - RNA, 14 nt, Human
aaaguauuuuccug

SEQ ID NO: 3788693 - RNA, 21 nt, Human
aaaguauuuuccuguaaaaaa

SEQ ID NO: 3788694 - RNA, 12 nt, Human
aaaguauuuucu

SEQ ID NO: 3788695 - RNA, 15 nt, Human
aaaguauuuugaagu

SEQ ID NO: 3788696 - RNA, 17 nt, Human
aaaguauuuugaaguuu

SEQ ID NO: 3788697 - RNA, 23 nt, Human
aaaguauuuugaaguuuacauuu

SEQ ID NO: 3788698 - RNA, 18 nt, Human
aaagucaauguuuucagu

SEQ ID NO: 3788699 - RNA, 18 nt, Human
aaagucacaauguucuuu

SEQ ID NO: 3788700 - RNA, 20 nt, Human
aaagucacaauguucuuuau

SEQ ID NO: 3788701 - RNA, 17 nt, Human
aaagucaccaaauagug

SEQ ID NO: 3788702 - RNA, 13 nt, Human
aaagucagaaguu

SEQ ID NO: 3788703 - RNA, 18 nt, Human
aaagucagagacagauac

SEQ ID NO: 3788704 - RNA, 18 nt, Human
aaagucagauucuugcau

SEQ ID NO: 3788705 - RNA, 16 nt, Human
aaagucagguccaauu

SEQ ID NO: 3788706 - RNA, 16 nt, Human
aaagucaugauguuuu

SEQ ID NO: 3788707 - RNA, 17 nt, Human
aaagucaugauguuuuu

SEQ ID NO: 3788708 - RNA, 18 nt, Human
aaagucaugauguuuuua

SEQ ID NO: 3788709 - RNA, 20 nt, Human
aaagucaugcaaaggcuggg

SEQ ID NO: 3788710 - RNA, 21 nt, Human
aaagucaugcaaaggcuggga

SEQ ID NO: 3788711 - RNA, 19 nt, Human
aaaguccaauuuuaauuua

SEQ ID NO: 3788712 - RNA, 14 nt, Human
aaaguccuuuucuu

SEQ ID NO: 3788713 - RNA, 22 nt, Human
aaaguccuuuuuuuccaucuuu

SEQ ID NO: 3788714 - RNA, 12 nt, Human
aaagucuaaagu

SEQ ID NO: 3788715 - RNA, 19 nt, Human
aaagucuaaaguuuacagu

SEQ ID NO: 3788716 - RNA, 14 nt, Human
aaagucucuauuua

SEQ ID NO: 3788717 - RNA, 15 nt, Human
aaagucucuauuuaa

SEQ ID NO: 3788718 - RNA, 12 nt, Human
aaagucucuugu

SEQ ID NO: 3788719 - RNA, 19 nt, Human
aaagucugcauuacauucc

SEQ ID NO: 3788720 - RNA, 22 nt, Human
aaagucuguccuugaaggacua

SEQ ID NO: 3788721 - RNA, 22 nt, Human
aaagucugugugaugaacuuuc

SEQ ID NO: 3788722 - RNA, 18 nt, Human
aaagucuguugauuaaag

SEQ ID NO: 3788723 - RNA, 20 nt, Human
aaagucuucacucucugaag

SEQ ID NO: 3788724 - RNA, 19 nt, Human
aaagucuugugacuagugc

SEQ ID NO: 3788725 - RNA, 22 nt, Human
aaagucuugugacuagugcuga

SEQ ID NO: 3788726 - RNA, 21 nt, Human
aaagucuuuuaaaaaguauug

SEQ ID NO: 3788727 - RNA, 20 nt, Human
aaagugaaaguccagaaacu

SEQ ID NO: 3788728 - RNA, 13 nt, Human
aaagugaagcaaa

SEQ ID NO: 3788729 - RNA, 22 nt, Human
aaagugaaugaaagauuaaaca

SEQ ID NO: 3788730 - RNA, 12 nt, Human
aaagugaauuug

SEQ ID NO: 3788731 - RNA, 21 nt, Human
aaagugaauuugaaugaaaaa

SEQ ID NO: 3788732 - RNA, 13 nt, Human
aaagugacacagc

SEQ ID NO: 3788733 - RNA, 20 nt, Human
aaagugaggccacugaagag

SEQ ID NO: 3788734 - RNA, 23 nt, Human
aaagugaucaauaaaaugugauu

SEQ ID NO: 3788735 - RNA, 15 nt, Human
aaagugaugaacugg

SEQ ID NO: 3788736 - RNA, 15 nt, Human
aaagugaugacauau

SEQ ID NO: 3788737 - RNA, 16 nt, Human
aaagugaugacauauu

SEQ ID NO: 3788738 - RNA, 15 nt, Human
aaagugauuaaacgu

SEQ ID NO: 3788739 - RNA, 13 nt, Human
aaagugccaaaga

SEQ ID NO: 3788740 - RNA, 14 nt, Human
aaagugccaaagaa

SEQ ID NO: 3788741 - RNA, 15 nt, Human
aaagugccaguauuu

SEQ ID NO: 3788742 - RNA, 20 nt, Human
aaagugccugacacacuaac

SEQ ID NO: 3788743 - RNA, 15 nt, Human
aaagugccuuucagg

SEQ ID NO: 3788744 - RNA, 12 nt, Human
aaagugccuuug

SEQ ID NO: 3788745 - RNA, 13 nt, Human
aaagugcuaaggu

SEQ ID NO: 3788746 - RNA, 21 nt, Human
aaagugcuaagguucuaaggc

SEQ ID NO: 3788747 - RNA, 21 nt, Human
aaagugcugcagggcuuuaaa

SEQ ID NO: 3788748 - RNA, 12 nt, Human
aaagugcuggga

SEQ ID NO: 3788749 - RNA, 13 nt, Human
aaagugcuugugu

SEQ ID NO: 3788750 - RNA, 20 nt, Human
aaaguggaaaacaaggaagu

SEQ ID NO: 3788751 - RNA, 20 nt, Human
aaaguggaacgaaaaugaaa

SEQ ID NO: 3788752 - RNA, 13 nt, Human
aaaguggaaggaa

SEQ ID NO: 3788753 - RNA, 16 nt, Human
aaaguggaaggaaaga

SEQ ID NO: 3788754 - RNA, 22 nt, Human
aaaguggcaccugucugcucca

SEQ ID NO: 3788755 - RNA, 17 nt, Human
aaaguggccaugccacc

SEQ ID NO: 3788756 - RNA, 22 nt, Human
aaaguggguuuuuuaguugaau

SEQ ID NO: 3788757 - RNA, 23 nt, Human
aaagugguacuugaucauuuuua

SEQ ID NO: 3788758 - RNA, 21 nt, Human
aaaguggugcucaguuguaga

SEQ ID NO: 3788759 - RNA, 18 nt, Human
aaaguguaaagcauucca

SEQ ID NO: 3788760 - RNA, 17 nt, Human
aaaguguaacauaugca

SEQ ID NO: 3788761 - RNA, 14 nt, Human
aaaguguauuugga

SEQ ID NO: 3788762 - RNA, 22 nt, Human
aaaguguauuuggaaauaaagu

SEQ ID NO: 3788763 - RNA, 16 nt, Human
aaaguguauuuuauaa

SEQ ID NO: 3788764 - RNA, 21 nt, Human
aaaguguauuuuuuuacuaau

SEQ ID NO: 3788765 - RNA, 18 nt, Human
aaagugucaccuuuucuu

SEQ ID NO: 3788766 - RNA, 20 nt, Human
aaagugucaccuuuucuugc

SEQ ID NO: 3788767 - RNA, 21 nt, Human
aaagugugaaauaaauuuuuu

SEQ ID NO: 3788768 - RNA, 14 nt, Human
aaagugugagcagu

SEQ ID NO: 3788769 - RNA, 22 nt, Human
aaagugugagcagugaguuaca

SEQ ID NO: 3788770 - RNA, 14 nt, Human
aaagugugcuuuau

SEQ ID NO: 3788771 - RNA, 19 nt, Human
aaaguguggucccaacagg

SEQ ID NO: 3788772 - RNA, 16 nt, Human
aaaguguguauauauu

SEQ ID NO: 3788773 - RNA, 12 nt, Human
aaaguguguauu

SEQ ID NO: 3788774 - RNA, 14 nt, Human
aaaguguguauuaa

SEQ ID NO: 3788775 - RNA, 14 nt, Human
aaaguguguuguug

SEQ ID NO: 3788776 - RNA, 14 nt, Human
aaaguguuacuuuu

SEQ ID NO: 3788777 - RNA, 12 nt, Human
aaaguguuucag

SEQ ID NO: 3788778 - RNA, 13 nt, Human
aaaguguuucagc

SEQ ID NO: 3788779 - RNA, 18 nt, Human
aaacuuguuucacugaaa

SEQ ID NO: 3788780 - RNA, 20 nt, Human
aaacuuguuugcugugaaca

SEQ ID NO: 3788781 - RNA, 13 nt, Human
aaacuuuaauaua

SEQ ID NO: 3788782 - RNA, 21 nt, Human
aaacuuuagaguagcaugaga

SEQ ID NO: 3788783 - RNA, 18 nt, Human
aaacuuuaggguaaaaau

SEQ ID NO: 3788784 - RNA, 16 nt, Human
aaacuuuagguuuuuu

SEQ ID NO: 3788785 - RNA, 13 nt, Human
aaacuuuauacau

SEQ ID NO: 3788786 - RNA, 14 nt, Human
aaacuuuauuuuau

SEQ ID NO: 3788787 - RNA, 23 nt, Human
aaacuuuauuuuauauaauaaag

SEQ ID NO: 3788788 - RNA, 20 nt, Human
aaacuuucauuccuucagau

SEQ ID NO: 3788789 - RNA, 20 nt, Human
aaacuuuccucuuccugccu

SEQ ID NO: 3788790 - RNA, 15 nt, Human
aaacuuucuuaauau

SEQ ID NO: 3788791 - RNA, 12 nt, Human
aaacuuugaaau

SEQ ID NO: 3788792 - RNA, 15 nt, Human
aaacuuugauucuuu

SEQ ID NO: 3788793 - RNA, 13 nt, Human
aaacuuugggaaa

SEQ ID NO: 3788794 - RNA, 17 nt, Human
aaacuuugggaaaacau

SEQ ID NO: 3788795 - RNA, 15 nt, Human
aaacuuuuagaaacu

SEQ ID NO: 3788796 - RNA, 13 nt, Human
aaacuuuuauaaa

SEQ ID NO: 3788797 - RNA, 18 nt, Human
aaacuuuuauaaauuaaa

SEQ ID NO: 3788798 - RNA, 12 nt, Human
aaacuuuucuag

SEQ ID NO: 3788799 - RNA, 14 nt, Human
aaacuuuucucaga

SEQ ID NO: 3788800 - RNA, 12 nt, Human
aaacuuuucuga

SEQ ID NO: 3788801 - RNA, 16 nt, Human
aaacuuuucugauaga

SEQ ID NO: 3788802 - RNA, 17 nt, Human
aaacuuuucugauagag

SEQ ID NO: 3788803 - RNA, 24 nt, Human
aaacuuuuguaaagaaauuuacua

SEQ ID NO: 3788804 - RNA, 19 nt, Human
aaacuuuuuuauuuaaaaa

SEQ ID NO: 3788805 - RNA, 24 nt, Human
aaacuuuuuugaaauaauaaaucu

SEQ ID NO: 3788806 - RNA, 14 nt, Human
aaacuuuuuuucaa

SEQ ID NO: 3788807 - RNA, 17 nt, Human
aaacuuuuuuucaaugu

SEQ ID NO: 3788808 - RNA, 22 nt, Human
aaacuuuuuuucuguaccaguu

SEQ ID NO: 3788809 - RNA, 11 nt, Human
aaagaaaaaaa

SEQ ID NO: 3788810 - RNA, 21 nt, Human
aaagaaaaaaaaaaaagccag

SEQ ID NO: 3788811 - RNA, 22 nt, Human
aaagaaaaaaaaaaaagccagc

SEQ ID NO: 3788812 - RNA, 20 nt, Human
aaagaaaaaaaaaagaagaa

SEQ ID NO: 3788813 - RNA, 16 nt, Human
aaagaaaaaaaaagaa

SEQ ID NO: 3788814 - RNA, 18 nt, Human
aaagaaaaaaaagaaagc

SEQ ID NO: 3788815 - RNA, 18 nt, Human
aaagaaaaaaauguauuu

SEQ ID NO: 3788816 - RNA, 15 nt, Human
aaagaaaaaaauguc

SEQ ID NO: 3788817 - RNA, 19 nt, Human
aaagaaaaaaaugucaaaa

SEQ ID NO: 3788818 - RNA, 16 nt, Human
aaagaaaaaaauugaa

SEQ ID NO: 3788819 - RNA, 13 nt, Human
aaagaaaaacaaa

SEQ ID NO: 3788820 - RNA, 13 nt, Human
aaagaaaaauauu

SEQ ID NO: 3788821 - RNA, 21 nt, Human
aaagaaaaauuauuaaaggaa

SEQ ID NO: 3788822 - RNA, 19 nt, Human
aaagaaaacaaaaaacgaa

SEQ ID NO: 3788823 - RNA, 14 nt, Human
aaagaaaacaaaac

SEQ ID NO: 3788824 - RNA, 12 nt, Human
aaagaaaacuug

SEQ ID NO: 3788825 - RNA, 22 nt, Human
aaaguuuaauauuaaagccaug

SEQ ID NO: 3788826 - RNA, 15 nt, Human
aaaguuuaaucagag

SEQ ID NO: 3788827 - RNA, 19 nt, Human
aaaguuuacaaguguauau

SEQ ID NO: 3788828 - RNA, 22 nt, Human
aaaguuuacaguaaauaaauug

SEQ ID NO: 3788829 - RNA, 18 nt, Human
aaaguuucaaaaaucuga

SEQ ID NO: 3788830 - RNA, 20 nt, Human
aaaguuucaaaaaucugaag

SEQ ID NO: 3788831 - RNA, 19 nt, Human
aaaguuucaauuuguuucc

SEQ ID NO: 3788832 - RNA, 11 nt, Human
aaaguuucaug

SEQ ID NO: 3788833 - RNA, 20 nt, Human
aaaguuuccuaaucagaaau

SEQ ID NO: 3788834 - RNA, 16 nt, Human
aaaguuuguugaaaca

SEQ ID NO: 3788835 - RNA, 15 nt, Human
aaaguuuuacaaagg

SEQ ID NO: 3788836 - RNA, 15 nt, Human
aaaguuuucccuuga

SEQ ID NO: 3788837 - RNA, 15 nt, Human
aaaguuuuccugaga

SEQ ID NO: 3788838 - RNA, 13 nt, Human
aaaguuuugaaaa

SEQ ID NO: 3788839 - RNA, 21 nt, Human
aaaguuuugaguagauauuac

SEQ ID NO: 3788840 - RNA, 18 nt, Human
aaaguuuuguaaaagaaa

SEQ ID NO: 3788841 - RNA, 14 nt, Human
aaaguuuuguugua

SEQ ID NO: 3788842 - RNA, 14 nt, Human
aaaguuuuuguuug

SEQ ID NO: 3788843 - RNA, 19 nt, Human
aaauaaaaaaaaaaaagag

SEQ ID NO: 3788844 - RNA, 13 nt, Human
aaauaaaaaaaag

SEQ ID NO: 3788845 - RNA, 15 nt, Human
aaauaaaaaaaagaa

SEQ ID NO: 3788846 - RNA, 20 nt, Human
aaauaaaaaaaagaaaaaag

SEQ ID NO: 3788847 - RNA, 18 nt, Human
aaauaaaaaaagaaaaaa

SEQ ID NO: 3788848 - RNA, 15 nt, Human
aaauaaaaaacacug

SEQ ID NO: 3788849 - RNA, 21 nt, Human
aaauaaaaaagcucuuuuaau

SEQ ID NO: 3788850 - RNA, 13 nt, Human
aaauaaaaaaguc

SEQ ID NO: 3788851 - RNA, 14 nt, Human
aaauaaaaaauaua

SEQ ID NO: 3788852 - RNA, 18 nt, Human
aaauaaaaacaaacguuu

SEQ ID NO: 3788853 - RNA, 20 nt, Human
aaauaaaaagaaaggcuguu

SEQ ID NO: 3788854 - RNA, 19 nt, Human
aaauaaaaagugacacagc

SEQ ID NO: 3788855 - RNA, 16 nt, Human
aaauaaaaagugcuuu

SEQ ID NO: 3788856 - RNA, 18 nt, Human
aaauaaaacauuuucaca

SEQ ID NO: 3788857 - RNA, 14 nt, Human
aaauaaaaccagcu

SEQ ID NO: 3788858 - RNA, 21 nt, Human
aaauaaaacccguugauuacu

SEQ ID NO: 3788859 - RNA, 11 nt, Human
aaauaaaaccu

SEQ ID NO: 3788860 - RNA, 12 nt, Human
aaauaaaaccuu

SEQ ID NO: 3788861 - RNA, 16 nt, Human
aaauaaaacuuuuuaa

SEQ ID NO: 3788862 - RNA, 11 nt, Human
aaauaaaagca

SEQ ID NO: 3788863 - RNA, 13 nt, Human
aaauaaaagcagc

SEQ ID NO: 3788864 - RNA, 18 nt, Human
aaauaaaaggaagccaaa

SEQ ID NO: 3788865 - RNA, 17 nt, Human
aaauaaaaguuuuacaa

SEQ ID NO: 3788866 - RNA, 13 nt, Human
aaauaaaauacuu

SEQ ID NO: 3788867 - RNA, 19 nt, Human
aaauaaaaugaaaauugua

SEQ ID NO: 3788868 - RNA, 23 nt, Human
aaauaaaaugaaaauuguauuau

SEQ ID NO: 3788869 - RNA, 14 nt, Human
aaauaaaaugacca

SEQ ID NO: 3788870 - RNA, 16 nt, Human
aaauaaaaugaccagu

SEQ ID NO: 3788871 - RNA, 13 nt, Human
aaauaaaaugcua

SEQ ID NO: 3788872 - RNA, 14 nt, Human
aaauaaaaugcuag

SEQ ID NO: 3788873 - RNA, 15 nt, Human
aaauaaaauggauuu

SEQ ID NO: 3788874 - RNA, 13 nt, Human
aaauaaaauuaug

SEQ ID NO: 3788875 - RNA, 16 nt, Human
aaauaaaauuuguugc

SEQ ID NO: 3788876 - RNA, 17 nt, Human
aaauaaaauuuguugca

SEQ ID NO: 3788877 - RNA, 18 nt, Human
aaauaaaauuuguugcau

SEQ ID NO: 3788878 - RNA, 13 nt, Human
aaauaaacacugu

SEQ ID NO: 3788879 - RNA, 22 nt, Human
aaauaaaccaaaggacauuaug

SEQ ID NO: 3788880 - RNA, 13 nt, Human
aaauaaaccacug

SEQ ID NO: 3788881 - RNA, 19 nt, Human
aaauaaaccucaaaauguc

SEQ ID NO: 3788882 - RNA, 15 nt, Human
aaauaaacgucuuaa

SEQ ID NO: 3788883 - RNA, 14 nt, Human
aaauaaacuguugc

SEQ ID NO: 3788884 - RNA, 13 nt, Human
aaauaaacuuuuu

SEQ ID NO: 3788885 - RNA, 20 nt, Human
aaauaaacuuuuuuucaaug

SEQ ID NO: 3788886 - RNA, 19 nt, Human
aaauaaagacaaccauauu

SEQ ID NO: 3788887 - RNA, 13 nt, Human
aaauaaaggaacc

SEQ ID NO: 3788888 - RNA, 20 nt, Human
aaauaaaguauauauagaau

SEQ ID NO: 3788889 - RNA, 19 nt, Human
aaauaaaguaucaugcauu

SEQ ID NO: 3788890 - RNA, 15 nt, Human
aaauaaaguuacauu

SEQ ID NO: 3788891 - RNA, 18 nt, Human
aaauaaaguuggugacag

SEQ ID NO: 3788892 - RNA, 14 nt, Human
aaauaaauaaaagc

SEQ ID NO: 3788893 - RNA, 16 nt, Human
aaauaaauaaaagccu

SEQ ID NO: 3788894 - RNA, 11 nt, Human
aaauaaauaau

SEQ ID NO: 3788895 - RNA, 14 nt, Human
aaauaaauaauuuu

SEQ ID NO: 3788896 - RNA, 20 nt, Human
aaauaaauagcuauauccau

SEQ ID NO: 3788897 - RNA, 13 nt, Human
aaauaaauauacc

SEQ ID NO: 3788898 - RNA, 15 nt, Human
aaauaaauguaucau

SEQ ID NO: 3788899 - RNA, 21 nt, Human
aaauaaauguaucauagaaau

SEQ ID NO: 3788900 - RNA, 14 nt, Human
aaauaaauuugacu

SEQ ID NO: 3788901 - RNA, 19 nt, Human
aaauaaauuugguucuaau

SEQ ID NO: 3788902 - RNA, 17 nt, Human
aaauaacaaugugcucu

SEQ ID NO: 3788903 - RNA, 14 nt, Human
aaauaacaauguua

SEQ ID NO: 3788904 - RNA, 17 nt, Human
aaauaacaauguuaagg

SEQ ID NO: 3788905 - RNA, 16 nt, Human
aaauaacagaagaaaa

SEQ ID NO: 3788906 - RNA, 12 nt, Human
aaauaacaguau

SEQ ID NO: 3788907 - RNA, 21 nt, Human
aaauaaccaacccuucccuga

SEQ ID NO: 3788908 - RNA, 15 nt, Human
aaauaacccauaauu

SEQ ID NO: 3788909 - RNA, 23 nt, Human
aaauaacccuucaacguuucuuc

SEQ ID NO: 3788910 - RNA, 14 nt, Human
aaauaacugaauuu

SEQ ID NO: 3788911 - RNA, 13 nt, Human
aaauaacuggaaa

SEQ ID NO: 3788912 - RNA, 20 nt, Human
aaauaacuggaaaacagaac

SEQ ID NO: 3788913 - RNA, 21 nt, Human
aaauaacuggaggaauuuucu

SEQ ID NO: 3788914 - RNA, 15 nt, Human
aaauaacuucaagca

SEQ ID NO: 3788915 - RNA, 16 nt, Human
aaauaacuucaagcaa

SEQ ID NO: 3788916 - RNA, 16 nt, Human
aaauaacuucaguccu

SEQ ID NO: 3788917 - RNA, 13 nt, Human
aaauaagaaaaga

SEQ ID NO: 3788918 - RNA, 22 nt, Human
aaauaagaaaagauguagauuu

SEQ ID NO: 3788919 - RNA, 14 nt, Human
aaauaagaaauaau

SEQ ID NO: 3788920 - RNA, 20 nt, Human
aaauaagaacgaggauuuua

SEQ ID NO: 3788921 - RNA, 14 nt, Human
aaauaagaagaaug

SEQ ID NO: 3788922 - RNA, 22 nt, Human
aaauaaggaaugauauaagguu

SEQ ID NO: 3788923 - RNA, 22 nt, Human
aaauaaggauuuuucucuuauu

SEQ ID NO: 3788924 - RNA, 14 nt, Human
aaauaagguguauu

SEQ ID NO: 3788925 - RNA, 14 nt, Human
aaauaaguauuuau

SEQ ID NO: 3788926 - RNA, 21 nt, Human
aaauaagucaacaguaaacca

SEQ ID NO: 3788927 - RNA, 19 nt, Human
aaauaagugcccucuccca

SEQ ID NO: 3788928 - RNA, 20 nt, Human
aaauaagugguuauuucuca

SEQ ID NO: 3788929 - RNA, 17 nt, Human
aaauaauaaagaugcuc

SEQ ID NO: 3788930 - RNA, 19 nt, Human
aaauaauaaagaugcucuu

SEQ ID NO: 3788931 - RNA, 14 nt, Human
aaauaaucaaaagc

SEQ ID NO: 3788932 - RNA, 15 nt, Human
aaauaaucaaaagcu

SEQ ID NO: 3788933 - RNA, 20 nt, Human
aaauaaugcuacaauuuuaa

SEQ ID NO: 3788934 - RNA, 13 nt, Human
aaauaaugcugca

SEQ ID NO: 3788935 - RNA, 17 nt, Human
aaauaaugcuucagaua

SEQ ID NO: 3788936 - RNA, 21 nt, Human
aaauaaugcuucagauauuau

SEQ ID NO: 3788937 - RNA, 13 nt, Human
aaauaaugcuuug

SEQ ID NO: 3788938 - RNA, 16 nt, Human
aaauaaugcuuugaaa

SEQ ID NO: 3788939 - RNA, 16 nt, Human
aaauaaugucuuguua

SEQ ID NO: 3788940 - RNA, 22 nt, Human
aaauaaugugaaacuggauuaa

SEQ ID NO: 3788941 - RNA, 20 nt, Human
aaauaauguguaguucaugu

SEQ ID NO: 3788942 - RNA, 23 nt, Human
aaauaauuauauaacuguauuug

SEQ ID NO: 3788943 - RNA, 15 nt, Human
aaauaauucuaaagg

SEQ ID NO: 3788944 - RNA, 15 nt, Human
aaauaauuguuguuc

SEQ ID NO: 3788945 - RNA, 13 nt, Human
aaauaauuuccua

SEQ ID NO: 3788946 - RNA, 18 nt, Human
aaauaauuuuaaaaaugg

SEQ ID NO: 3788947 - RNA, 20 nt, Human
aaauaauuuuaaaaauggug

SEQ ID NO: 3788948 - RNA, 12 nt, Human
aaauaauuuuau

SEQ ID NO: 3788949 - RNA, 18 nt, Human
aaauaauuuuauuccaga

SEQ ID NO: 3788950 - RNA, 22 nt, Human
aaauaauuuuuauauuugaaau

SEQ ID NO: 3788951 - RNA, 15 nt, Human
aaauacaaaaauacu

SEQ ID NO: 3788952 - RNA, 16 nt, Human
aaauacaaguucuauu

SEQ ID NO: 3788953 - RNA, 14 nt, Human
aaauacaauaaacu

SEQ ID NO: 3788954 - RNA, 15 nt, Human
aaauacaauaaacua

SEQ ID NO: 3788955 - RNA, 21 nt, Human
aaauacaauuuuguuucugua

SEQ ID NO: 3788956 - RNA, 19 nt, Human
aaauacacacucaaaucaa

SEQ ID NO: 3788957 - RNA, 22 nt, Human
aaauacaccaccucacuccugu

SEQ ID NO: 3788958 - RNA, 17 nt, Human
aaauacagauagauaua

SEQ ID NO: 3788959 - RNA, 15 nt, Human
aaauacagauuuuga

SEQ ID NO: 3788960 - RNA, 13 nt, Human
aaauacaggaaac

SEQ ID NO: 3788961 - RNA, 14 nt, Human
aaauacaggaaaca

SEQ ID NO: 3788962 - RNA, 13 nt, Human
aaauacaugacau

SEQ ID NO: 3788963 - RNA, 14 nt, Human
aaauacaugaugau

SEQ ID NO: 3788964 - RNA, 14 nt, Human
aaauacaugcaucu

SEQ ID NO: 3788965 - RNA, 19 nt, Human
aaauacaugccacaucaaa

SEQ ID NO: 3788966 - RNA, 23 nt, Human
aaauacaugccacaucaaaccuu

SEQ ID NO: 3788967 - RNA, 18 nt, Human
aaauacauuuaaaacuua

SEQ ID NO: 3788968 - RNA, 18 nt, Human
aaauaccagccaguaaau

SEQ ID NO: 3788969 - RNA, 21 nt, Human
aaauaccagccaguaaauggg

SEQ ID NO: 3788970 - RNA, 15 nt, Human
aaauaccauuauuau

SEQ ID NO: 3788971 - RNA, 14 nt, Human
aaagugccuuugca

SEQ ID NO: 3788972 - RNA, 16 nt, Human
aaagugcuaagguucu

SEQ ID NO: 3788973 - RNA, 13 nt, Human
aaagugcugagau

SEQ ID NO: 3788974 - RNA, 11 nt, Human
aaagugcuggg

SEQ ID NO: 3788975 - RNA, 17 nt, Human
aaagugcuuguguaauu

SEQ ID NO: 3788976 - RNA, 23 nt, Human
aaagugcuuguguaauuuaugug

SEQ ID NO: 3788977 - RNA, 15 nt, Human
aaaguggaaguaugu

SEQ ID NO: 3788978 - RNA, 15 nt, Human
aaaguggaauuucuu

SEQ ID NO: 3788979 - RNA, 17 nt, Human
aaaguggcaagaccaaa

SEQ ID NO: 3788980 - RNA, 19 nt, Human
aaaguggccaagaagcagu

SEQ ID NO: 3788981 - RNA, 14 nt, Human
aaaguggccucuuu

SEQ ID NO: 3788982 - RNA, 21 nt, Human
aaaguggcgugggagccagcc

SEQ ID NO: 3788983 - RNA, 17 nt, Human
aaagugggcuugauucu

SEQ ID NO: 3788984 - RNA, 21 nt, Human
aaaguggguuauucuggaguu

SEQ ID NO: 3788985 - RNA, 17 nt, Human
aaaguggguuuuuuagu

SEQ ID NO: 3788986 - RNA, 21 nt, Human
aaaguggguuuuuuaguugaa

SEQ ID NO: 3788987 - RNA, 14 nt, Human
aaagugguacuuga

SEQ ID NO: 3788988 - RNA, 20 nt, Human
aaagugguacuugaucauuu

SEQ ID NO: 3788989 - RNA, 23 nt, Human
aaagugguagguacuuuuuguga

SEQ ID NO: 3788990 - RNA, 16 nt, Human
aaagugguauagaaau

SEQ ID NO: 3788991 - RNA, 20 nt, Human
aaagugguauagaaaugcug

SEQ ID NO: 3788992 - RNA, 23 nt, Human
aaauguuuuucugccagggagcu

SEQ ID NO: 3788993 - RNA, 23 nt, Human
aaauguuuuuggucuuuuauaau

SEQ ID NO: 3788994 - RNA, 21 nt, Human
aaauguuuuuuuuuaaagacu

SEQ ID NO: 3788995 - RNA, 17 nt, Human
aaauuaaaaagauucuu

SEQ ID NO: 3788996 - RNA, 13 nt, Human
aaauuaaacaauu

SEQ ID NO: 3788997 - RNA, 19 nt, Human
aaauuaaacuuauuuacaa

SEQ ID NO: 3788998 - RNA, 14 nt, Human
aaauuaaagaaaau

SEQ ID NO: 3788999 - RNA, 21 nt, Human
aaauuaaagccuuuaguauca

SEQ ID NO: 3789000 - RNA, 22 nt, Human
aaauuaaagccuuuaguaucag

SEQ ID NO: 3789001 - RNA, 16 nt, Human
aaauuaaaguuugcuu

SEQ ID NO: 3789002 - RNA, 15 nt, Human
aaauuaaauaaaaua

SEQ ID NO: 3789003 - RNA, 16 nt, Human
aaauuaaauauaugua

SEQ ID NO: 3789004 - RNA, 23 nt, Human
aaauuaaauauauguauguaaaa

SEQ ID NO: 3789005 - RNA, 21 nt, Human
aaauuaacuggguaaugaaac

SEQ ID NO: 3789006 - RNA, 13 nt, Human
aaauuaacuuuua

SEQ ID NO: 3789007 - RNA, 23 nt, Human
aaauuaacuuuuauaaacuuuac

SEQ ID NO: 3789008 - RNA, 14 nt, Human
aaauuaagaagaaa

SEQ ID NO: 3789009 - RNA, 14 nt, Human
aaauuaagaauguu

SEQ ID NO: 3789010 - RNA, 22 nt, Human
aaauuaaggcaacugaacaaaa

SEQ ID NO: 3789011 - RNA, 12 nt, Human
aaauuaaggugu

SEQ ID NO: 3789012 - RNA, 17 nt, Human
aaauuaagguguuugaa

SEQ ID NO: 3789013 - RNA, 23 nt, Human
aaauuaagguguuugaaaauagu

SEQ ID NO: 3789014 - RNA, 12 nt, Human
aaauuaauaucu

SEQ ID NO: 3789015 - RNA, 13 nt, Human
aaauuaaucacaa

SEQ ID NO: 3789016 - RNA, 14 nt, Human
aaauuaaucugggc

SEQ ID NO: 3789017 - RNA, 16 nt, Human
aaauuacaauuuuauc

SEQ ID NO: 3789018 - RNA, 16 nt, Human
aaauuacacccaaaga

SEQ ID NO: 3789019 - RNA, 14 nt, Human
aaauuacauauacu

SEQ ID NO: 3789020 - RNA, 18 nt, Human
aaauuacauuuguaauuu

SEQ ID NO: 3789021 - RNA, 19 nt, Human
aaauuaccagaguuguucu

SEQ ID NO: 3789022 - RNA, 15 nt, Human
aaauuaccuguggau

SEQ ID NO: 3789023 - RNA, 19 nt, Human
aaauuacuauagcaaagua

SEQ ID NO: 3789024 - RNA, 14 nt, Human
aaauuacuuuguga

SEQ ID NO: 3789025 - RNA, 11 nt, Human
aaauuagaaaa

SEQ ID NO: 3789026 - RNA, 17 nt, Human
aaauuagaaaauauucu

SEQ ID NO: 3789027 - RNA, 20 nt, Human
aaauuagaaaauguuauuua

SEQ ID NO: 3789028 - RNA, 16 nt, Human
aaauuagagaaauaua

SEQ ID NO: 3789029 - RNA, 20 nt, Human
aaauuagccaguaauccugu

SEQ ID NO: 3789030 - RNA, 21 nt, Human
aaauuagccaguaauccugua

SEQ ID NO: 3789031 - RNA, 15 nt, Human
aaauuagccgggcgu

SEQ ID NO: 3789032 - RNA, 21 nt, Human
aaauuagccuaagauauacuu

SEQ ID NO: 3789033 - RNA, 17 nt, Human
aaauuagcugugugaaa

SEQ ID NO: 3789034 - RNA, 15 nt, Human
aaauuaggaauaaau

SEQ ID NO: 3789035 - RNA, 18 nt, Human
aaauuaggaauaaauaaa

SEQ ID NO: 3789036 - RNA, 21 nt, Human
aaauuaggauguaaaucugcu

SEQ ID NO: 3789037 - RNA, 18 nt, Human
aaauuaggauuucaugau

SEQ ID NO: 3789038 - RNA, 17 nt, Human
aaauuagguuuuguaca

SEQ ID NO: 3789039 - RNA, 19 nt, Human
aaauuagguuuuguacaau

SEQ ID NO: 3789040 - RNA, 15 nt, Human
aaauuaguucccauu

SEQ ID NO: 3789041 - RNA, 15 nt, Human
aaauuauaaagauaa

SEQ ID NO: 3789042 - RNA, 23 nt, Human
aaauuauaaggacugcaugguaa

SEQ ID NO: 3789043 - RNA, 23 nt, Human
aaauuauaauguauucauauuug

SEQ ID NO: 3789044 - RNA, 17 nt, Human
aaauuauagaugggaau

SEQ ID NO: 3789045 - RNA, 21 nt, Human
aaauuauagcucuaauguuug

SEQ ID NO: 3789046 - RNA, 12 nt, Human
aaauuauauucc

SEQ ID NO: 3789047 - RNA, 18 nt, Human
aaauuauauuugugcuau

SEQ ID NO: 3789048 - RNA, 17 nt, Human
aaauuaucaagcuaaua

SEQ ID NO: 3789049 - RNA, 20 nt, Human
aaauuaucuugauacauuca

SEQ ID NO: 3789050 - RNA, 21 nt, Human
aaauuaucuugauacauucaa

SEQ ID NO: 3789051 - RNA, 17 nt, Human
aaauuaugcuaagaauu

SEQ ID NO: 3789052 - RNA, 14 nt, Human
aaauuaugguaaaa

SEQ ID NO: 3789053 - RNA, 15 nt, Human
aaauuauguaaauua

SEQ ID NO: 3789054 - RNA, 23 nt, Human
aaauuaugugccagauuuaugca

SEQ ID NO: 3789055 - RNA, 20 nt, Human
aaauuauguuacaucuguuu

SEQ ID NO: 3789056 - RNA, 14 nt, Human
aaauuauguuuuua

SEQ ID NO: 3789057 - RNA, 14 nt, Human
aaauuauuaaugaa

SEQ ID NO: 3789058 - RNA, 23 nt, Human
aaauuauuaguuuacaucauuuu

SEQ ID NO: 3789059 - RNA, 19 nt, Human
aaauuauuauaagcauuga

SEQ ID NO: 3789060 - RNA, 21 nt, Human
aaauuauucaguuaagaaaaa

SEQ ID NO: 3789061 - RNA, 20 nt, Human
aaauuauuguuuuucuuuuu

SEQ ID NO: 3789062 - RNA, 15 nt, Human
aaauuauuuaauaaa

SEQ ID NO: 3789063 - RNA, 16 nt, Human
aaauuauuuguguaau

SEQ ID NO: 3789064 - RNA, 17 nt, Human
aaauuauuuuaaacaaa

SEQ ID NO: 3789065 - RNA, 20 nt, Human
aaauuauuuuaaauuauaag

SEQ ID NO: 3789066 - RNA, 17 nt, Human
aaauuauuuuguucaua

SEQ ID NO: 3789067 - RNA, 21 nt, Human
aaauucaaaaaguguuuauuu

SEQ ID NO: 3789068 - RNA, 21 nt, Human
aaauucaacguuaauaauucu

SEQ ID NO: 3789069 - RNA, 16 nt, Human
aaauucaacuuuguaa

SEQ ID NO: 3789070 - RNA, 18 nt, Human
aaauucacaaacuuuuau

SEQ ID NO: 3789071 - RNA, 16 nt, Human
aaauucacaauagaaa

SEQ ID NO: 3789072 - RNA, 21 nt, Human
aaauucacaugaugcacuuca

SEQ ID NO: 3789073 - RNA, 12 nt, Human
aaauucagcaaa

SEQ ID NO: 3789074 - RNA, 21 nt, Human
aaauucagcaaaccauuuuua

SEQ ID NO: 3789075 - RNA, 13 nt, Human
aaauucagcauuu

SEQ ID NO: 3789076 - RNA, 15 nt, Human
aaauucagcauuuga

SEQ ID NO: 3789077 - RNA, 20 nt, Human
aaauucaggcuacugcuuca

SEQ ID NO: 3789078 - RNA, 14 nt, Human
aaauucaguuucau

SEQ ID NO: 3789079 - RNA, 17 nt, Human
aaauucauauucuuuua

SEQ ID NO: 3789080 - RNA, 14 nt, Human
aaauucaugcugcu

SEQ ID NO: 3789081 - RNA, 12 nt, Human
aaauucauuucu

SEQ ID NO: 3789082 - RNA, 13 nt, Human
aaauucauuuuuu

SEQ ID NO: 3789083 - RNA, 17 nt, Human
aaauuccaaagucucua

SEQ ID NO: 3789084 - RNA, 18 nt, Human
aaauuccaaagucucuaa

SEQ ID NO: 3789085 - RNA, 22 nt, Human
aaauuccaaagucucuaauucu

SEQ ID NO: 3789086 - RNA, 13 nt, Human
aaauuccacugga

SEQ ID NO: 3789087 - RNA, 20 nt, Human
aaauucccaacaaacauuga

SEQ ID NO: 3789088 - RNA, 18 nt, Human
aaauucccuggccuuuca

SEQ ID NO: 3789089 - RNA, 18 nt, Human
aaauucccuucaucugga

SEQ ID NO: 3789090 - RNA, 17 nt, Human
aaauuccuauugugauu

SEQ ID NO: 3789091 - RNA, 22 nt, Human
aaauuccuauugugauuugacu

SEQ ID NO: 3789092 - RNA, 14 nt, Human
aaauuccuguagca

SEQ ID NO: 3789093 - RNA, 23 nt, Human
aaauuccuuagcuuagaccucag

SEQ ID NO: 3789094 - RNA, 18 nt, Human
aaauucgaccugauuuac

SEQ ID NO: 3789095 - RNA, 21 nt, Human
aaauucgcugcaaccuguuga

SEQ ID NO: 3789096 - RNA, 15 nt, Human
aaauucuacaacaca

SEQ ID NO: 3789097 - RNA, 19 nt, Human
aaauucuauaggaacauau

SEQ ID NO: 3789098 - RNA, 19 nt, Human
aaauucuauuacaguaugu

SEQ ID NO: 3789099 - RNA, 13 nt, Human
aaauucuccugga

SEQ ID NO: 3789100 - RNA, 14 nt, Human
aaauucuccuggag

SEQ ID NO: 3789101 - RNA, 16 nt, Human
aaauucuccuggaggu

SEQ ID NO: 3789102 - RNA, 16 nt, Human
aaauucugaauauuuu

SEQ ID NO: 3789103 - RNA, 12 nt, Human
aaauucugaauu

SEQ ID NO: 3789104 - RNA, 21 nt, Human
aaauucugaauuugcaaagua

SEQ ID NO: 3789105 - RNA, 14 nt, Human
aaauucugauuucu

SEQ ID NO: 3789106 - RNA, 16 nt, Human
aaauucugauuucuuu

SEQ ID NO: 3789107 - RNA, 20 nt, Human
aaauucugauuucuuuucac

SEQ ID NO: 3789108 - RNA, 16 nt, Human
aaauucugucucugga

SEQ ID NO: 3789109 - RNA, 11 nt, Human
aaauucugugg

SEQ ID NO: 3789110 - RNA, 10 nt, Human
aaauucuguu

SEQ ID NO: 3789111 - RNA, 15 nt, Human
aaauucuguuuuuaa

SEQ ID NO: 3789112 - RNA, 23 nt, Human
aaauucuucuccacuuucuagcc

SEQ ID NO: 3789113 - RNA, 18 nt, Human
aaauucuugcaaaguauc

SEQ ID NO: 3789114 - RNA, 21 nt, Human
aaauucuugcaaaguaucccu

SEQ ID NO: 3789115 - RNA, 17 nt, Human
aaauucuuuauuucugu

SEQ ID NO: 3789116 - RNA, 13 nt, Human
aaauaaaacuuuu

SEQ ID NO: 3789117 - RNA, 22 nt, Human
aaauaaaagugaaugaaagauu

SEQ ID NO: 3789118 - RNA, 14 nt, Human
aaauaaaauaaagc

SEQ ID NO: 3789119 - RNA, 14 nt, Human
aaauaaaauauauc

SEQ ID NO: 3789120 - RNA, 15 nt, Human
aaauaaaaugaccag

SEQ ID NO: 3789121 - RNA, 22 nt, Human
aaauaaaauuaaagcugaaaac

SEQ ID NO: 3789122 - RNA, 12 nt, Human
aaauaaaauucc

SEQ ID NO: 3789123 - RNA, 18 nt, Human
aaauaaacaaauaacaau

SEQ ID NO: 3789124 - RNA, 22 nt, Human
aaauaaaccaaaggaaaauguc

SEQ ID NO: 3789125 - RNA, 17 nt, Human
aaauaaacgucuuaaau

SEQ ID NO: 3789126 - RNA, 14 nt, Human
aaauaaacucuaaa

SEQ ID NO: 3789127 - RNA, 17 nt, Human
aaauaaacuuuuuuuca

SEQ ID NO: 3789128 - RNA, 18 nt, Human
aaauaaacuuuuuuucaa

SEQ ID NO: 3789129 - RNA, 13 nt, Human
aaauaaagaaaua

SEQ ID NO: 3789130 - RNA, 13 nt, Human
aaauaaagaagua

SEQ ID NO: 3789131 - RNA, 13 nt, Human
aaauaaaguauau

SEQ ID NO: 3789132 - RNA, 15 nt, Human
aaauaaaguauauau

SEQ ID NO: 3789133 - RNA, 15 nt, Human
aaauaaaguaucaug

SEQ ID NO: 3789134 - RNA, 19 nt, Human
aaauaaaguuggucuuuug

SEQ ID NO: 3789135 - RNA, 15 nt, Human
aaauaaauagaaaag

SEQ ID NO: 3789136 - RNA, 13 nt, Human
aaauaaauagcuu

SEQ ID NO: 3789137 - RNA, 11 nt, Human
aaauaaauaua

SEQ ID NO: 3789138 - RNA, 13 nt, Human
aaauaaauauaua

SEQ ID NO: 3789139 - RNA, 17 nt, Human
aaauaaaucuacuguuu

SEQ ID NO: 3789140 - RNA, 20 nt, Human
aaauaaaugagcuauguauu

SEQ ID NO: 3789141 - RNA, 14 nt, Human
aaauaaauggaaau

SEQ ID NO: 3789142 - RNA, 16 nt, Human
aaauaaauguaucaua

SEQ ID NO: 3789143 - RNA, 12 nt, Human
aaauaaauuagu

SEQ ID NO: 3789144 - RNA, 11 nt, Human
aaauaaauuau

SEQ ID NO: 3789145 - RNA, 16 nt, Human
aaauaaauugaaauau

SEQ ID NO: 3789146 - RNA, 14 nt, Human
aaauaaauuguaua

SEQ ID NO: 3789147 - RNA, 15 nt, Human
aaauaaauuguauau

SEQ ID NO: 3789148 - RNA, 15 nt, Human
aaauaaauuguuuga

SEQ ID NO: 3789149 - RNA, 14 nt, Human
aaauaaauuuauau

SEQ ID NO: 3789150 - RNA, 23 nt, Human
aaauaacaaaucucaagcaaaca

SEQ ID NO: 3789151 - RNA, 20 nt, Human
aaauaacaaaugccaaauua

SEQ ID NO: 3789152 - RNA, 21 nt, Human
aaauaacaagucgaugaacua

SEQ ID NO: 3789153 - RNA, 14 nt, Human
aaauaacaaugugc

SEQ ID NO: 3789154 - RNA, 13 nt, Human
aaauaacacacau

SEQ ID NO: 3789155 - RNA, 19 nt, Human
aaauaaccaauccuggaca

SEQ ID NO: 3789156 - RNA, 18 nt, Human
aaauaaccccauucuuug

SEQ ID NO: 3789157 - RNA, 14 nt, Human
aaauaacuaaaaug

SEQ ID NO: 3789158 - RNA, 15 nt, Human
aaauaacuaaaaugu

SEQ ID NO: 3789159 - RNA, 15 nt, Human
aaauuacuauagcaa

SEQ ID NO: 3789160 - RNA, 14 nt, Human
aaauuacucuuucu

SEQ ID NO: 3789161 - RNA, 14 nt, Human
aaauuacuguguua

SEQ ID NO: 3789162 - RNA, 18 nt, Human
aaauuacuuaguauugca

SEQ ID NO: 3789163 - RNA, 17 nt, Human
aaauuacuuugugaaua

SEQ ID NO: 3789164 - RNA, 12 nt, Human
aaauuagaaaau

SEQ ID NO: 3789165 - RNA, 13 nt, Human
aaauuagaaaaua

SEQ ID NO: 3789166 - RNA, 20 nt, Human
aaauuagacugugauucaga

SEQ ID NO: 3789167 - RNA, 20 nt, Human
aaauuagauccuaagaugug

SEQ ID NO: 3789168 - RNA, 22 nt, Human
aaauuagccuaagauauacuug

SEQ ID NO: 3789169 - RNA, 18 nt, Human
aaauuagcugugugaaau

SEQ ID NO: 3789170 - RNA, 16 nt, Human
aaauuaggaauaaaua

SEQ ID NO: 3789171 - RNA, 19 nt, Human
aaauuagggcucuaauuuc

SEQ ID NO: 3789172 - RNA, 20 nt, Human
aaauuagggcucuaauuucc

SEQ ID NO: 3789173 - RNA, 18 nt, Human
aaauuagguauuuugucc

SEQ ID NO: 3789174 - RNA, 16 nt, Human
aaauuagguugaaaca

SEQ ID NO: 3789175 - RNA, 17 nt, Human
aaauuagguugaaacau

SEQ ID NO: 3789176 - RNA, 18 nt, Human
aaauuagguugaaacaua

SEQ ID NO: 3789177 - RNA, 19 nt, Human
aaauuagguugaaacauau

SEQ ID NO: 3789178 - RNA, 22 nt, Human
aaauuaguaggcucauuuacug

SEQ ID NO: 3789179 - RNA, 13 nt, Human
aaauuaguuauau

SEQ ID NO: 3789180 - RNA, 17 nt, Human
aaauuauaacuuaaaau

SEQ ID NO: 3789181 - RNA, 19 nt, Human
aaauuauaacuuaaaauau

SEQ ID NO: 3789182 - RNA, 15 nt, Human
aaauuauaaggacug

SEQ ID NO: 3789183 - RNA, 16 nt, Human
aaauuauaaggacugc

SEQ ID NO: 3789184 - RNA, 17 nt, Human
aaauuauaaggacugca

SEQ ID NO: 3789185 - RNA, 15 nt, Human
aaauuauagcucuaa

SEQ ID NO: 3789186 - RNA, 18 nt, Human
aaauuauaggagacuugu

SEQ ID NO: 3789187 - RNA, 18 nt, Human
aaauuauauaaguauucu

SEQ ID NO: 3789188 - RNA, 22 nt, Human
aaauuauauuugugcuauagua

SEQ ID NO: 3789189 - RNA, 15 nt, Human
aaauuaucaagcuaa

SEQ ID NO: 3789190 - RNA, 18 nt, Human
aaauuaucaagcuaauaa

SEQ ID NO: 3789191 - RNA, 20 nt, Human
aaauuaucaagcuaauaaaa

SEQ ID NO: 3789192 - RNA, 22 nt, Human
aaauuaucaggcaaauuugcau

SEQ ID NO: 3789193 - RNA, 23 nt, Human
aaauuaucaggcaaauuugcauu

SEQ ID NO: 3789194 - RNA, 16 nt, Human
aaauuaucuauagcua

SEQ ID NO: 3789195 - RNA, 16 nt, Human
aaauuaucuauuugua

SEQ ID NO: 3789196 - RNA, 22 nt, Human
aaauuaucuugauacauucaaa

SEQ ID NO: 3789197 - RNA, 22 nt, Human
aaauuauguaaauuaucaggca

SEQ ID NO: 3789198 - RNA, 17 nt, Human
aaauuauguauguuuac

SEQ ID NO: 3789199 - RNA, 23 nt, Human
aaauuauguuuauauaaaugcuu

SEQ ID NO: 3789200 - RNA, 24 nt, Human
aaauuauguuuauauaaaugcuuu

SEQ ID NO: 3789201 - RNA, 16 nt, Human
aaauuauguuuuuauu

SEQ ID NO: 3789202 - RNA, 19 nt, Human
aaauuauuaguuuacauca

SEQ ID NO: 3789203 - RNA, 14 nt, Human
aaauuauucaguua

SEQ ID NO: 3789204 - RNA, 15 nt, Human
aaauuauuuauuauu

SEQ ID NO: 3789205 - RNA, 17 nt, Human
aaauuauuugauuauuu

SEQ ID NO: 3789206 - RNA, 13 nt, Human
aaauuauuugcau

SEQ ID NO: 3789207 - RNA, 16 nt, Human
aaauuauuuguaagau

SEQ ID NO: 3789208 - RNA, 16 nt, Human
aaauuauuuuaaacaa

SEQ ID NO: 3789209 - RNA, 16 nt, Human
aaauuauuuuaaauua

SEQ ID NO: 3789210 - RNA, 22 nt, Human
aaauuauuuuaaauuauaagga

SEQ ID NO: 3789211 - RNA, 16 nt, Human
aaauuauuuuggauuu

SEQ ID NO: 3789212 - RNA, 19 nt, Human
aaauuauuuuguucauaca

SEQ ID NO: 3789213 - RNA, 22 nt, Human
aaauuauuuuguucauacauau

SEQ ID NO: 3789214 - RNA, 14 nt, Human
aaauucaaagcaug

SEQ ID NO: 3789215 - RNA, 20 nt, Human
aaauucaacuuuguaaaaau

SEQ ID NO: 3789216 - RNA, 19 nt, Human
aaauucaauuguaaauuga

SEQ ID NO: 3789217 - RNA, 23 nt, Human
aaauucaauuguaaauugaauca

SEQ ID NO: 3789218 - RNA, 14 nt, Human
aaauucacaaacuu

SEQ ID NO: 3789219 - RNA, 15 nt, Human
aaauucacaaacuuu

SEQ ID NO: 3789220 - RNA, 17 nt, Human
aaauucacaaacuuuua

SEQ ID NO: 3789221 - RNA, 22 nt, Human
aaauucacccccuuuccuggac

SEQ ID NO: 3789222 - RNA, 14 nt, Human
aaauucacuuucau

SEQ ID NO: 3789223 - RNA, 20 nt, Human
aaauucagauauauuuuuca

SEQ ID NO: 3789224 - RNA, 22 nt, Human
aaauucaggugaaaauguucau

SEQ ID NO: 3789225 - RNA, 17 nt, Human
aaauucaguccuaagaa

SEQ ID NO: 3789226 - RNA, 20 nt, Human
aaauucaguuuuuuuccagu

SEQ ID NO: 3789227 - RNA, 18 nt, Human
aaauucauggcaugcuua

SEQ ID NO: 3789228 - RNA, 14 nt, Human
aaauucauuucaca

SEQ ID NO: 3789229 - RNA, 19 nt, Human
aaauucauuucacauuaau

SEQ ID NO: 3789230 - RNA, 16 nt, Human
aaauucauuucuaauu

SEQ ID NO: 3789231 - RNA, 22 nt, Human
aaauucauuuuuuucacuggag

SEQ ID NO: 3789232 - RNA, 14 nt, Human
aaauuccaaagucu

SEQ ID NO: 3789233 - RNA, 17 nt, Human
aaauuccagaaaggaua

SEQ ID NO: 3789234 - RNA, 15 nt, Human
aaauucccuaaagcc

SEQ ID NO: 3789235 - RNA, 24 nt, Human
aaauuccuaagaaucagaguagaa

SEQ ID NO: 3789236 - RNA, 16 nt, Human
aaauuccuauugugau

SEQ ID NO: 3789237 - RNA, 19 nt, Human
aaauuccucaacaguguuu

SEQ ID NO: 3789238 - RNA, 14 nt, Human
aaauuccucuuugc

SEQ ID NO: 3789239 - RNA, 22 nt, Human
aaauuccuuagcuuagaccuca

SEQ ID NO: 3789240 - RNA, 17 nt, Human
aaauucgaccugauuua

SEQ ID NO: 3789241 - RNA, 23 nt, Human
aaauucgaccugauuuacaguuu

SEQ ID NO: 3789242 - RNA, 23 nt, Human
aaauucuauaggaacauaugaaa

SEQ ID NO: 3789243 - RNA, 16 nt, Human
aaauucugaauuugca

SEQ ID NO: 3789244 - RNA, 18 nt, Human
aaauucugaauuugcaaa

SEQ ID NO: 3789245 - RNA, 20 nt, Human
aaauucugaauuugcaaagu

SEQ ID NO: 3789246 - RNA, 17 nt, Human
aaauucuguuaaaaucu

SEQ ID NO: 3789247 - RNA, 13 nt, Human
aaauucuguuucu

SEQ ID NO: 3789248 - RNA, 17 nt, Human
aaauucuguuuuuaaaa

SEQ ID NO: 3789249 - RNA, 22 nt, Human
aaauucuguuuuuaaaaauuag

SEQ ID NO: 3789250 - RNA, 21 nt, Human
aaauucuucuaauugcugugu

SEQ ID NO: 3789251 - RNA, 23 nt, Human
aaauucuucugaacucaaacuga

SEQ ID NO: 3789252 - RNA, 14 nt, Human
aaauugaaaaguua

SEQ ID NO: 3789253 - RNA, 20 nt, Human
aaauugaaauguaaggcugu

SEQ ID NO: 3789254 - RNA, 12 nt, Human
aaauugaaccuu

SEQ ID NO: 3789255 - RNA, 17 nt, Human
aaauugaagagagauau

SEQ ID NO: 3789256 - RNA, 23 nt, Human
aaauugaauaaugguaccagaua

SEQ ID NO: 3789257 - RNA, 18 nt, Human
aaauugaauacuuugaau

SEQ ID NO: 3789258 - RNA, 21 nt, Human
aaauugaauacuuugaaugug

SEQ ID NO: 3789259 - RNA, 15 nt, Human
aaauugaauuuaaca

SEQ ID NO: 3789260 - RNA, 17 nt, Human
aaauugaauuuaacaau

SEQ ID NO: 3789261 - RNA, 14 nt, Human
aaauagaaauaagu

SEQ ID NO: 3789262 - RNA, 21 nt, Human
aaauagaauguaaaugucuca

SEQ ID NO: 3789263 - RNA, 19 nt, Human
aaauagacaguauauuuau

SEQ ID NO: 3789264 - RNA, 11 nt, Human
aaauagagcaa

SEQ ID NO: 3789265 - RNA, 19 nt, Human
aaauagaguauaugcacuu

SEQ ID NO: 3789266 - RNA, 18 nt, Human
aaauagaguguaguuuac

SEQ ID NO: 3789267 - RNA, 15 nt, Human
aaauagauaauuaaa

SEQ ID NO: 3789268 - RNA, 15 nt, Human
aaauagauauaaauu

SEQ ID NO: 3789269 - RNA, 15 nt, Human
aaauagaugcugugu

SEQ ID NO: 3789270 - RNA, 22 nt, Human
aaauagaugcuguguauauggu

SEQ ID NO: 3789271 - RNA, 21 nt, Human
aaauagauuuuauaagaugac

SEQ ID NO: 3789272 - RNA, 12 nt, Human
aaauagcaaaga

SEQ ID NO: 3789273 - RNA, 18 nt, Human
aaauagcaacaugcuuca

SEQ ID NO: 3789274 - RNA, 14 nt, Human
aaauagcauguauu

SEQ ID NO: 3789275 - RNA, 15 nt, Human
aaauagcauguauug

SEQ ID NO: 3789276 - RNA, 13 nt, Human
aaauagcauuugu

SEQ ID NO: 3789277 - RNA, 21 nt, Human
aaauagccacuuaccuucaau

SEQ ID NO: 3789278 - RNA, 21 nt, Human
aaauagccgggcaugguggcg

SEQ ID NO: 3789279 - RNA, 15 nt, Human
aaauagcguucuugu

SEQ ID NO: 3789280 - RNA, 19 nt, Human
aaauagcguucuuguaauu

SEQ ID NO: 3789281 - RNA, 18 nt, Human
aaauagcuaauaauguua

SEQ ID NO: 3789282 - RNA, 19 nt, Human
aaauagcuauauccaugua

SEQ ID NO: 3789283 - RNA, 13 nt, Human
aaauagcucuuuc

SEQ ID NO: 3789284 - RNA, 15 nt, Human
aaauagcuucuguuu

SEQ ID NO: 3789285 - RNA, 23 nt, Human
aaauagcuuggguagcgcacucu

SEQ ID NO: 3789286 - RNA, 13 nt, Human
aaauaggaaacaa

SEQ ID NO: 3789287 - RNA, 14 nt, Human
aaauaggaaacaag

SEQ ID NO: 3789288 - RNA, 19 nt, Human
aaauaggaaucauucagaa

SEQ ID NO: 3789289 - RNA, 20 nt, Human
aaauaggaaucauucagaaa

SEQ ID NO: 3789290 - RNA, 24 nt, Human
aaauaggagaggaugagagcccag

SEQ ID NO: 3789291 - RNA, 14 nt, Human
aaauaggauuuuua

SEQ ID NO: 3789292 - RNA, 19 nt, Human
aaauaggcuauuaaaaaag

SEQ ID NO: 3789293 - RNA, 17 nt, Human
aaauaggggauauuuaa

SEQ ID NO: 3789294 - RNA, 15 nt, Human
aaauaggguauauuu

SEQ ID NO: 3789295 - RNA, 13 nt, Human
aaauaguaaaaau

SEQ ID NO: 3789296 - RNA, 19 nt, Human
aaauaguaugaaaauggaa

SEQ ID NO: 3789297 - RNA, 12 nt, Human
aaauaguauuuc

SEQ ID NO: 3789298 - RNA, 21 nt, Human
aaauagucuagacuaaaagau

SEQ ID NO: 3789299 - RNA, 23 nt, Human
aaauagucucuuuaaaaggaaag

SEQ ID NO: 3789300 - RNA, 15 nt, Human
aaauagugaauuaua

SEQ ID NO: 3789301 - RNA, 19 nt, Human
aaauagugguucuuggaaa

SEQ ID NO: 3789302 - RNA, 13 nt, Human
aaauagugugaaa

SEQ ID NO: 3789303 - RNA, 15 nt, Human
aaauagugugaaaua

SEQ ID NO: 3789304 - RNA, 18 nt, Human
aaauagugugaaauauau

SEQ ID NO: 3789305 - RNA, 14 nt, Human
aaauaguuaauaua

SEQ ID NO: 3789306 - RNA, 17 nt, Human
aaauaguuaauauaguc

SEQ ID NO: 3789307 - RNA, 23 nt, Human
aaauaguugagccagcagacauu

SEQ ID NO: 3789308 - RNA, 12 nt, Human
aaauaguuuauu

SEQ ID NO: 3789309 - RNA, 20 nt, Human
aaauaguuuauuuuaaaaca

SEQ ID NO: 3789310 - RNA, 21 nt, Human
aaauaguuuggauauguaaaa

SEQ ID NO: 3789311 - RNA, 16 nt, Human
aaauauaaaacaaaua

SEQ ID NO: 3789312 - RNA, 22 nt, Human
aaauauaaacaaagauucauga

SEQ ID NO: 3789313 - RNA, 12 nt, Human
aaauauaaacau

SEQ ID NO: 3789314 - RNA, 12 nt, Human
aaauauaaagac

SEQ ID NO: 3789315 - RNA, 20 nt, Human
aaauauaaagcaucuaaacu

SEQ ID NO: 3789316 - RNA, 13 nt, Human
aaauauaaaucuu

SEQ ID NO: 3789317 - RNA, 14 nt, Human
aaauauaacacauu

SEQ ID NO: 3789318 - RNA, 14 nt, Human
aaauauaagauuuu

SEQ ID NO: 3789319 - RNA, 17 nt, Human
aaauuuaaaaguaaaau

SEQ ID NO: 3789320 - RNA, 19 nt, Human
aaauuuaaaaguaaaaugu

SEQ ID NO: 3789321 - RNA, 15 nt, Human
aaauuuaaagauauu

SEQ ID NO: 3789322 - RNA, 18 nt, Human
aaauuuaaagcagguucu

SEQ ID NO: 3789323 - RNA, 15 nt, Human
aaauuuaagcauugu

SEQ ID NO: 3789324 - RNA, 15 nt, Human
aaauuuaaguaucuu

SEQ ID NO: 3789325 - RNA, 21 nt, Human
aaauuuaagugcguguguaga

SEQ ID NO: 3789326 - RNA, 17 nt, Human
aaauuuacaucauuucu

SEQ ID NO: 3789327 - RNA, 12 nt, Human
aaauuuacuaua

SEQ ID NO: 3789328 - RNA, 14 nt, Human
aaauuuacuuuaca

SEQ ID NO: 3789329 - RNA, 16 nt, Human
aaauuuacuuuacaca

SEQ ID NO: 3789330 - RNA, 21 nt, Human
aaauuuagcauuguagugcuu

SEQ ID NO: 3789331 - RNA, 22 nt, Human
aaauuuagcauuguagugcuuu

SEQ ID NO: 3789332 - RNA, 14 nt, Human
aaauuuauaauuuu

SEQ ID NO: 3789333 - RNA, 13 nt, Human
aaauuuauaugua

SEQ ID NO: 3789334 - RNA, 14 nt, Human
aaauuuauuaaaua

SEQ ID NO: 3789335 - RNA, 21 nt, Human
aaauuuauuagcccugcauuu

SEQ ID NO: 3789336 - RNA, 13 nt, Human
aaauuuauuuccu

SEQ ID NO: 3789337 - RNA, 18 nt, Human
aaauuuauuuuauaagaa

SEQ ID NO: 3789338 - RNA, 19 nt, Human
aaauuuauuuuauaagaaa

SEQ ID NO: 3789339 - RNA, 19 nt, Human
aaauuucaaaagacauguu

SEQ ID NO: 3789340 - RNA, 18 nt, Human
aaauuucacuacuagauu

SEQ ID NO: 3789341 - RNA, 18 nt, Human
aaauuucagguuguuggu

SEQ ID NO: 3789342 - RNA, 16 nt, Human
aaauuuccaguaccuu

SEQ ID NO: 3789343 - RNA, 18 nt, Human
aaauuuccccaacagugu

SEQ ID NO: 3789344 - RNA, 23 nt, Human
aaauuuccccaacagugugaagu

SEQ ID NO: 3789345 - RNA, 20 nt, Human
aaauuucuuaugugacauua

SEQ ID NO: 3789346 - RNA, 16 nt, Human
aaauuugaaacauugc

SEQ ID NO: 3789347 - RNA, 20 nt, Human
aaauuugaauggguccauuu

SEQ ID NO: 3789348 - RNA, 12 nt, Human
aaauuugaauuu

SEQ ID NO: 3789349 - RNA, 22 nt, Human
aaauuugaauuuuguguuagag

SEQ ID NO: 3789350 - RNA, 18 nt, Human
aaauuugacuaauuuuac

SEQ ID NO: 3789351 - RNA, 18 nt, Human
aaauuugacuuuucugua

SEQ ID NO: 3789352 - RNA, 14 nt, Human
aaauuugagacuau

SEQ ID NO: 3789353 - RNA, 16 nt, Human
aaauuugauacuuaua

SEQ ID NO: 3789354 - RNA, 14 nt, Human
aaauuugauuucua

SEQ ID NO: 3789355 - RNA, 14 nt, Human
aaauuugcuagcag

SEQ ID NO: 3789356 - RNA, 12 nt, Human
aaauuuggaauu

SEQ ID NO: 3789357 - RNA, 21 nt, Human
aaauuuggggacagauucagu

SEQ ID NO: 3789358 - RNA, 15 nt, Human
aaauuugguucuaau

SEQ ID NO: 3789359 - RNA, 16 nt, Human
aaauuugguucuaaua

SEQ ID NO: 3789360 - RNA, 13 nt, Human
aaauuuguaaguu

SEQ ID NO: 3789361 - RNA, 16 nt, Human
aaauuugucugaaaca

SEQ ID NO: 3789362 - RNA, 18 nt, Human
aaauuugucugaaacauu

SEQ ID NO: 3789363 - RNA, 21 nt, Human
aaauuugucugguuaaaaaau

SEQ ID NO: 3789364 - RNA, 12 nt, Human
aaauuuguggaa

SEQ ID NO: 3789365 - RNA, 18 nt, Human
aaauuuguggguuuuuuu

SEQ ID NO: 3789366 - RNA, 20 nt, Human
aaauuuguuacuuaaauaua

SEQ ID NO: 3789367 - RNA, 15 nt, Human
aaauuuguucuugua

SEQ ID NO: 3789368 - RNA, 13 nt, Human
aaauuuguugcau

SEQ ID NO: 3789369 - RNA, 22 nt, Human
aaauuuguuuugacggaugauu

SEQ ID NO: 3789370 - RNA, 16 nt, Human
aaauuuuaagcuagga

SEQ ID NO: 3789371 - RNA, 23 nt, Human
aaauuuuagcgugcucacugacc

SEQ ID NO: 3789372 - RNA, 22 nt, Human
aaauuuuaggcaaguuuucccu

SEQ ID NO: 3789373 - RNA, 12 nt, Human
aaauuuuauucc

SEQ ID NO: 3789374 - RNA, 16 nt, Human
aaauuuuauuuugugc

SEQ ID NO: 3789375 - RNA, 14 nt, Human
aaauuuucuagacu

SEQ ID NO: 3789376 - RNA, 18 nt, Human
aaauuuucuagacuuucu

SEQ ID NO: 3789377 - RNA, 20 nt, Human
aaauuuucuagacuuucugu

SEQ ID NO: 3789378 - RNA, 17 nt, Human
aaauuuugaaaaguaau

SEQ ID NO: 3789379 - RNA, 18 nt, Human
aaauuuugaaaaguaaua

SEQ ID NO: 3789380 - RNA, 14 nt, Human
aaauuuugcaaaua

SEQ ID NO: 3789381 - RNA, 17 nt, Human
aaauuuugccuaauaca

SEQ ID NO: 3789382 - RNA, 21 nt, Human
aaauuuugcuaucaacaauaa

SEQ ID NO: 3789383 - RNA, 22 nt, Human
aaauuuugcuuuuaauuaaaua

SEQ ID NO: 3789384 - RNA, 18 nt, Human
aaauuuuguaaugaauuc

SEQ ID NO: 3789385 - RNA, 21 nt, Human
aaauuuuguaauuuucuugau

SEQ ID NO: 3789386 - RNA, 18 nt, Human
aaauuuuucagaugcuuc

SEQ ID NO: 3789387 - RNA, 16 nt, Human
aaauuuuucauauuuu

SEQ ID NO: 3789388 - RNA, 19 nt, Human
aaauuuuucauauuuuaau

SEQ ID NO: 3789389 - RNA, 19 nt, Human
aaauuuuuggauugacagu

SEQ ID NO: 3789390 - RNA, 12 nt, Human
aaauuuuuguaa

SEQ ID NO: 3789391 - RNA, 13 nt, Human
aaauuuuuuggca

SEQ ID NO: 3789392 - RNA, 23 nt, Human
aaauuuuuuuucauguuuuaaca

SEQ ID NO: 3789393 - RNA, 15 nt, Human
aacaaaaaacaauau

SEQ ID NO: 3789394 - RNA, 19 nt, Human
aacaaaaacacuaaaaaua

SEQ ID NO: 3789395 - RNA, 11 nt, Human
aacaaaaagaa

SEQ ID NO: 3789396 - RNA, 13 nt, Human
aacaaaaauuagg

SEQ ID NO: 3789397 - RNA, 11 nt, Human
aacaaaaauuu

SEQ ID NO: 3789398 - RNA, 15 nt, Human
aacaaaagcaagacu

SEQ ID NO: 3789399 - RNA, 13 nt, Human
aacaaaaggguca

SEQ ID NO: 3789400 - RNA, 15 nt, Human
aacaaaaguguuuaa

SEQ ID NO: 3789401 - RNA, 13 nt, Human
aacaaaaguuccc

SEQ ID NO: 3789402 - RNA, 20 nt, Human
aacaaaaucuccucuuuuag

SEQ ID NO: 3789403 - RNA, 14 nt, Human
aacaaaauguaugu

SEQ ID NO: 3789404 - RNA, 19 nt, Human
aacaaaauuuguuugaaau

SEQ ID NO: 3789405 - RNA, 14 nt, Human
aacaaacaaacaaa

SEQ ID NO: 3789406 - RNA, 15 nt, Human
aacaaacaauaccug

SEQ ID NO: 3789407 - RNA, 22 nt, Human
aacccuuaaacaguugcacagc

SEQ ID NO: 3789408 - RNA, 19 nt, Human
aacccuucaucuuccugug

SEQ ID NO: 3789409 - RNA, 20 nt, Human
aacccuuccccacugcacac

SEQ ID NO: 3789410 - RNA, 23 nt, Human
aacccuucuccucuuguaaauaa

SEQ ID NO: 3789411 - RNA, 16 nt, Human
aacccuucuucauguu

SEQ ID NO: 3789412 - RNA, 13 nt, Human
aacccuucuuuua

SEQ ID NO: 3789413 - RNA, 14 nt, Human
aacccuugaaaaga

SEQ ID NO: 3789414 - RNA, 21 nt, Human
aacccuugucagugacaguau

SEQ ID NO: 3789415 - RNA, 16 nt, Human
aacccuuugugugcuc

SEQ ID NO: 3789416 - RNA, 17 nt, Human
aaccgacaggcccuggc

SEQ ID NO: 3789417 - RNA, 21 nt, Human
aaccgagggggcugcucccac

SEQ ID NO: 3789418 - RNA, 13 nt, Human
aaccgaugcucca

SEQ ID NO: 3789419 - RNA, 15 nt, Human
aaccgaugcuccagc

SEQ ID NO: 3789420 - RNA, 21 nt, Human
aaccgaugcuccagccaaccc

SEQ ID NO: 3789421 - RNA, 14 nt, Human
aaccgaugcuuuac

SEQ ID NO: 3789422 - RNA, 17 nt, Human
aaccgaugcuuuaccaa

SEQ ID NO: 3789423 - RNA, 13 nt, Human
aaccgcaggaagc

SEQ ID NO: 3789424 - RNA, 15 nt, Human
aaccgccagcucugu

SEQ ID NO: 3789425 - RNA, 16 nt, Human
aaccgcuaaaagaaac

SEQ ID NO: 3789426 - RNA, 19 nt, Human
aaccgcucaccuagagcca

SEQ ID NO: 3789427 - RNA, 16 nt, Human
aaccgcuuuggccuga

SEQ ID NO: 3789428 - RNA, 17 nt, Human
aaccguagaugauuuca

SEQ ID NO: 3789429 - RNA, 17 nt, Human
aaccguggcccuuccug

SEQ ID NO: 3789430 - RNA, 16 nt, Human
aaccgugguaugucug

SEQ ID NO: 3789431 - RNA, 19 nt, Human
aaccguguuugucucuucu

SEQ ID NO: 3789432 - RNA, 21 nt, Human
aaccguguuugucucuucugg

SEQ ID NO: 3789433 - RNA, 18 nt, Human
aaccguuuugaagcuacu

SEQ ID NO: 3789434 - RNA, 17 nt, Human
aaccuaaaacucuuucg

SEQ ID NO: 3789435 - RNA, 15 nt, Human
aaccuaaccccuuuc

SEQ ID NO: 3789436 - RNA, 11 nt, Human
aaccuaaccug

SEQ ID NO: 3789437 - RNA, 15 nt, Human
aaccuaaccuguguc

SEQ ID NO: 3789438 - RNA, 18 nt, Human
aaccuaacuugcgcagaa

SEQ ID NO: 3789439 - RNA, 13 nt, Human
aaccuaagcaaaa

SEQ ID NO: 3789440 - RNA, 18 nt, Human
aaccuaauuaauauauua

SEQ ID NO: 3789441 - RNA, 18 nt, Human
aaccuacacacugucaug

SEQ ID NO: 3789442 - RNA, 23 nt, Human
aaccuacagagaugcuaagagaa

SEQ ID NO: 3789443 - RNA, 20 nt, Human
aaccuacaguuuuaacugug

SEQ ID NO: 3789444 - RNA, 18 nt, Human
aaccuaccuguaacuuuu

SEQ ID NO: 3789445 - RNA, 23 nt, Human
aaccuaccuucauuucaggaggg

SEQ ID NO: 3789446 - RNA, 15 nt, Human
aaccuagagaagaua

SEQ ID NO: 3789447 - RNA, 11 nt, Human
aaccuagagau

SEQ ID NO: 3789448 - RNA, 12 nt, Human
aaccuagccccu

SEQ ID NO: 3789449 - RNA, 20 nt, Human
aaccuagggugauauuaacc

SEQ ID NO: 3789450 - RNA, 20 nt, Human
aaccuaguuaaagaaaggaa

SEQ ID NO: 3789451 - RNA, 22 nt, Human
aaccuaguuaaagaaaggaaaa

SEQ ID NO: 3789452 - RNA, 16 nt, Human
aaccuauuuugaaaaa

SEQ ID NO: 3789453 - RNA, 21 nt, Human
aaccuauuuugaaaaauuccu

SEQ ID NO: 3789454 - RNA, 18 nt, Human
aaccucaacugccuacuc

SEQ ID NO: 3789455 - RNA, 17 nt, Human
aaccucaccaacuccua

SEQ ID NO: 3789456 - RNA, 20 nt, Human
aaccucaccccgaggcccug

SEQ ID NO: 3789457 - RNA, 23 nt, Human
aaccucaccccgaggcccugcau

SEQ ID NO: 3789458 - RNA, 22 nt, Human
aaccucacgcaccucccauccu

SEQ ID NO: 3789459 - RNA, 11 nt, Human
aaccucagccu

SEQ ID NO: 3789460 - RNA, 14 nt, Human
aaccucaguaauuu

SEQ ID NO: 3789461 - RNA, 13 nt, Human
aaccucaguguca

SEQ ID NO: 3789462 - RNA, 18 nt, Human
aaccucccagagguccag

SEQ ID NO: 3789463 - RNA, 20 nt, Human
aaccucccagagguccagcc

SEQ ID NO: 3789464 - RNA, 21 nt, Human
aaccucccagagguccagccc

SEQ ID NO: 3789465 - RNA, 23 nt, Human
aaccucccagagguccagcccau

SEQ ID NO: 3789466 - RNA, 23 nt, Human
aaccuccccagccugcgccugcu

SEQ ID NO: 3789467 - RNA, 13 nt, Human
aaccucccucuug

SEQ ID NO: 3789468 - RNA, 16 nt, Human
aaccucccucuuguuu

SEQ ID NO: 3789469 - RNA, 20 nt, Human
aaccuccgccaaugcacggc

SEQ ID NO: 3789470 - RNA, 12 nt, Human
aaccuccucugu

SEQ ID NO: 3789471 - RNA, 22 nt, Human
aaccuccuguggaacccagcag

SEQ ID NO: 3789472 - RNA, 21 nt, Human
aaccuccuguuagcuguuauu

SEQ ID NO: 3789473 - RNA, 19 nt, Human
aaccuccuuucucuucucu

SEQ ID NO: 3789474 - RNA, 22 nt, Human
aaccucgagguuucucaaagaa

SEQ ID NO: 3789475 - RNA, 17 nt, Human
aaccucgaguacugugg

SEQ ID NO: 3789476 - RNA, 19 nt, Human
aaccucgcgcuugcuggcc

SEQ ID NO: 3789477 - RNA, 24 nt, Human
aaccucuaaauucuuucauuuuag

SEQ ID NO: 3789478 - RNA, 19 nt, Human
aaccucuaauuuauuuugu

SEQ ID NO: 3789479 - RNA, 23 nt, Human
aaccucuacuaaaaagaaggaaa

SEQ ID NO: 3789480 - RNA, 13 nt, Human
aaccucucacucc

SEQ ID NO: 3789481 - RNA, 18 nt, Human
aaccucucacuucacccu

SEQ ID NO: 3789482 - RNA, 20 nt, Human
aaccucugauuuauuuugua

SEQ ID NO: 3789483 - RNA, 16 nt, Human
aaccucugcuucccag

SEQ ID NO: 3789484 - RNA, 20 nt, Human
aaccucugcuucccagguuc

SEQ ID NO: 3789485 - RNA, 13 nt, Human
aaccucuguucag

SEQ ID NO: 3789486 - RNA, 18 nt, Human
aaccucuguucaguguaa

SEQ ID NO: 3789487 - RNA, 11 nt, Human
aaccucuuccc

SEQ ID NO: 3789488 - RNA, 17 nt, Human
aaccucuucuggcucaa

SEQ ID NO: 3789489 - RNA, 16 nt, Human
aaccucuuuucugcau

SEQ ID NO: 3789490 - RNA, 11 nt, Human
aaccugaaaaa

SEQ ID NO: 3789491 - RNA, 22 nt, Human
aaccugaaaagauguugugucu

SEQ ID NO: 3789492 - RNA, 23 nt, Human
aaccugacagaugucagccgagc

SEQ ID NO: 3789493 - RNA, 20 nt, Human
aaccugagccccaaaaggua

SEQ ID NO: 3789494 - RNA, 20 nt, Human
aaccugagucguacagaaag

SEQ ID NO: 3789495 - RNA, 21 nt, Human
aaccugaugaaaauaaagaau

SEQ ID NO: 3789496 - RNA, 17 nt, Human
aaccugaugcagucacg

SEQ ID NO: 3789497 - RNA, 16 nt, Human
aaccugauuguaaacu

SEQ ID NO: 3789498 - RNA, 16 nt, Human
aaccugcaaaaucugu

SEQ ID NO: 3789499 - RNA, 13 nt, Human
aaccugcccugcc

SEQ ID NO: 3789500 - RNA, 11 nt, Human
aaccugcucuc

SEQ ID NO: 3789501 - RNA, 20 nt, Human
aaccugcucuccucuugcca

SEQ ID NO: 3789502 - RNA, 13 nt, Human
aaccugcuuuuca

SEQ ID NO: 3789503 - RNA, 19 nt, Human
aaccuggagagcuagaacc

SEQ ID NO: 3789504 - RNA, 22 nt, Human
aaccuggagggcuggaaucugg

SEQ ID NO: 3789505 - RNA, 11 nt, Human
aaccuggccuu

SEQ ID NO: 3789506 - RNA, 17 nt, Human
aaccugggauucaggaa

SEQ ID NO: 3789507 - RNA, 21 nt, Human
aaccugggauucaggaaugug

SEQ ID NO: 3789508 - RNA, 18 nt, Human
aaccuggguccaaauaaa

SEQ ID NO: 3789509 - RNA, 17 nt, Human
aaccuggguugcagaca

SEQ ID NO: 3789510 - RNA, 19 nt, Human
aaccuggguugcagacagg

SEQ ID NO: 3789511 - RNA, 23 nt, Human
aaccuggucacaggacucugccu

SEQ ID NO: 3789512 - RNA, 14 nt, Human
aaccuggugcugga

SEQ ID NO: 3789513 - RNA, 20 nt, Human
aaccuguaaauuauuuuaaa

SEQ ID NO: 3789514 - RNA, 13 nt, Human
aaccuguaauaaa

SEQ ID NO: 3789515 - RNA, 15 nt, Human
aaccuguacuucaag

SEQ ID NO: 3789516 - RNA, 15 nt, Human
aaccuguccuaagga

SEQ ID NO: 3789517 - RNA, 15 nt, Human
aaccuguccuugcac

SEQ ID NO: 3789518 - RNA, 18 nt, Human
aaccugucuccacugugc

SEQ ID NO: 3789519 - RNA, 18 nt, Human
aaccugugagcugcacca

SEQ ID NO: 3789520 - RNA, 16 nt, Human
aaccugugaguaaaua

SEQ ID NO: 3789521 - RNA, 18 nt, Human
aaccugugaguaaauauu

SEQ ID NO: 3789522 - RNA, 19 nt, Human
aaccuguuuuuuuuucauu

SEQ ID NO: 3789523 - RNA, 12 nt, Human
aaccuuaauauu

SEQ ID NO: 3789524 - RNA, 17 nt, Human
aaccuuaauuuauuauu

SEQ ID NO: 3789525 - RNA, 23 nt, Human
aaccuuagauguucuaagucuuu

SEQ ID NO: 3789526 - RNA, 16 nt, Human
aaccuuagcucccucc

SEQ ID NO: 3789527 - RNA, 16 nt, Human
aaccuuauuguaccuc

SEQ ID NO: 3789528 - RNA, 13 nt, Human
aaccuucucuaug

SEQ ID NO: 3789529 - RNA, 12 nt, Human
aaccuucuggcc

SEQ ID NO: 3789530 - RNA, 20 nt, Human
aaccuugaaaaaaaacagug

SEQ ID NO: 3789531 - RNA, 18 nt, Human
aaccuugaaaacuuuaug

SEQ ID NO: 3789532 - RNA, 14 nt, Human
aaccuugaaugcug

SEQ ID NO: 3789533 - RNA, 20 nt, Human
aaccuugaaugcugccagug

SEQ ID NO: 3789534 - RNA, 16 nt, Human
aaccuugccugguaca

SEQ ID NO: 3789535 - RNA, 18 nt, Human
aaccuugccugguacagu

SEQ ID NO: 3789536 - RNA, 10 nt, Human
aaauguauuu

SEQ ID NO: 3789537 - RNA, 16 nt, Human
aaauguauuuuauguu

SEQ ID NO: 3789538 - RNA, 18 nt, Human
aaauguauuuuauguuau

SEQ ID NO: 3789539 - RNA, 23 nt, Human
aaaugucaaaaguagaacuuugu

SEQ ID NO: 3789540 - RNA, 15 nt, Human
aaaugucaaauguga

SEQ ID NO: 3789541 - RNA, 17 nt, Human
aaaugucacagaagcag

SEQ ID NO: 3789542 - RNA, 22 nt, Human
aaaugucacuuuuugaggcaaa

SEQ ID NO: 3789543 - RNA, 22 nt, Human
aaaugucagauacaauguauuu

SEQ ID NO: 3789544 - RNA, 15 nt, Human
aaaugucaguucuga

SEQ ID NO: 3789545 - RNA, 16 nt, Human
aaaugucaguucugau

SEQ ID NO: 3789546 - RNA, 21 nt, Human
aaauguccaguaagaucacug

SEQ ID NO: 3789547 - RNA, 22 nt, Human
aaauguccaguaagaucacugu

SEQ ID NO: 3789548 - RNA, 22 nt, Human
aaauguccuugugaugugcacg

SEQ ID NO: 3789549 - RNA, 11 nt, Human
aaaugucuaau

SEQ ID NO: 3789550 - RNA, 18 nt, Human
aaaugucuaauguauuuu

SEQ ID NO: 3789551 - RNA, 24 nt, Human
aacacucaguggcccauggcauuu

SEQ ID NO: 3789552 - RNA, 16 nt, Human
aacacucaugcugaaa

SEQ ID NO: 3789553 - RNA, 21 nt, Human
aacacucauugaccugaggcc

SEQ ID NO: 3789554 - RNA, 12 nt, Human
aacacuccuuca

SEQ ID NO: 3789555 - RNA, 16 nt, Human
aacacuccuugcauca

SEQ ID NO: 3789556 - RNA, 13 nt, Human
aacacucuauauu

SEQ ID NO: 3789557 - RNA, 14 nt, Human
aacacucugagacu

SEQ ID NO: 3789558 - RNA, 19 nt, Human
aacacucuuuugcuuuauu

SEQ ID NO: 3789559 - RNA, 15 nt, Human
aacacugagcuguca

SEQ ID NO: 3789560 - RNA, 15 nt, Human
aacacugauuucccc

SEQ ID NO: 3789561 - RNA, 12 nt, Human
aacacugcccuc

SEQ ID NO: 3789562 - RNA, 14 nt, Human
aacacugcuugugu

SEQ ID NO: 3789563 - RNA, 13 nt, Human
aacacuggccccu

SEQ ID NO: 3789564 - RNA, 21 nt, Human
aacacugggagaaaugaaaaa

SEQ ID NO: 3789565 - RNA, 23 nt, Human
aacacuggggacuuggccucucu

SEQ ID NO: 3789566 - RNA, 15 nt, Human
aacacuggggcuggc

SEQ ID NO: 3789567 - RNA, 18 nt, Human
aacacuggggcuggcaca

SEQ ID NO: 3789568 - RNA, 16 nt, Human
aacacugggggagggg

SEQ ID NO: 3789569 - RNA, 21 nt, Human
aacacugggggcaccuuaaga

SEQ ID NO: 3789570 - RNA, 22 nt, Human
aacacuggucugcuguuccagu

SEQ ID NO: 3789571 - RNA, 22 nt, Human
aacacuggugugaccugagggc

SEQ ID NO: 3789572 - RNA, 18 nt, Human
aacacugguuuuaaauau

SEQ ID NO: 3789573 - RNA, 16 nt, Human
aacacugucuugaaga

SEQ ID NO: 3789574 - RNA, 12 nt, Human
aacacugugaaa

SEQ ID NO: 3789575 - RNA, 21 nt, Human
aacacugugcccugguggaga

SEQ ID NO: 3789576 - RNA, 20 nt, Human
aacacuguggaacuaauaaa

SEQ ID NO: 3789577 - RNA, 18 nt, Human
aacacuguggguguguga

SEQ ID NO: 3789578 - RNA, 18 nt, Human
aacacuguuaucauuuuu

SEQ ID NO: 3789579 - RNA, 21 nt, Human
aacacuguuaucauuuuuucc

SEQ ID NO: 3789580 - RNA, 21 nt, Human
aacacuguucucugcccucca

SEQ ID NO: 3789581 - RNA, 14 nt, Human
aacacuucuguccu

SEQ ID NO: 3789582 - RNA, 20 nt, Human
aacacuuggugcugggaacc

SEQ ID NO: 3789583 - RNA, 21 nt, Human
aacacuugugacuuuugcuuu

SEQ ID NO: 3789584 - RNA, 18 nt, Human
aacacuuuacaauguuca

SEQ ID NO: 3789585 - RNA, 18 nt, Human
aacacuuuuuugggggua

SEQ ID NO: 3789586 - RNA, 23 nt, Human
aacagaaaaauauguaccaagaa

SEQ ID NO: 3789587 - RNA, 14 nt, Human
aacagaaaacauuc

SEQ ID NO: 3789588 - RNA, 13 nt, Human
aacagaaacaaaa

SEQ ID NO: 3789589 - RNA, 18 nt, Human
aacagaaagggcaacaau

SEQ ID NO: 3789590 - RNA, 13 nt, Human
aacagaaauguac

SEQ ID NO: 3789591 - RNA, 14 nt, Human
aacagaaauuggua

SEQ ID NO: 3789592 - RNA, 18 nt, Human
aacuuacaaaaacacuuc

SEQ ID NO: 3789593 - RNA, 21 nt, Human
aacuuacaaagauucucuaug

SEQ ID NO: 3789594 - RNA, 12 nt, Human
aacuuacacaca

SEQ ID NO: 3789595 - RNA, 20 nt, Human
aacuuacauauuuauuuuua

SEQ ID NO: 3789596 - RNA, 16 nt, Human
aacuuagaauaaaauu

SEQ ID NO: 3789597 - RNA, 18 nt, Human
aacuuagaauaaaauugu

SEQ ID NO: 3789598 - RNA, 15 nt, Human
aacuuagagcuuuuu

SEQ ID NO: 3789599 - RNA, 23 nt, Human
aacuuagcauuuucugcaucucc

SEQ ID NO: 3789600 - RNA, 22 nt, Human
aacuuagccauuuuucaaagca

SEQ ID NO: 3789601 - RNA, 20 nt, Human
aacuuagugacaaaauagac

SEQ ID NO: 3789602 - RNA, 15 nt, Human
aacuuaguuugugaa

SEQ ID NO: 3789603 - RNA, 20 nt, Human
aacuuauauacuauuucccu

SEQ ID NO: 3789604 - RNA, 23 nt, Human
aacuuauauuaauaguaauuugu

SEQ ID NO: 3789605 - RNA, 12 nt, Human
aacuuaugaaug

SEQ ID NO: 3789606 - RNA, 14 nt, Human
aacuuaugaauguu

SEQ ID NO: 3789607 - RNA, 17 nt, Human
aacuuauguagauauuu

SEQ ID NO: 3789608 - RNA, 18 nt, Human
aacuuauguagauauuug

SEQ ID NO: 3789609 - RNA, 12 nt, Human
aacuuauguuuu

SEQ ID NO: 3789610 - RNA, 13 nt, Human
aacuuauuuagag

SEQ ID NO: 3789611 - RNA, 17 nt, Human
aacuuauuuuaaaauau

SEQ ID NO: 3789612 - RNA, 17 nt, Human
aacuuauuuuauuucca

SEQ ID NO: 3789613 - RNA, 16 nt, Human
aacuuauuuuuuucug

SEQ ID NO: 3789614 - RNA, 14 nt, Human
aacuucacauauug

SEQ ID NO: 3789615 - RNA, 22 nt, Human
aacuucacauauugauuuccgu

SEQ ID NO: 3789616 - RNA, 16 nt, Human
aacuucacauuaaaaa

SEQ ID NO: 3789617 - RNA, 21 nt, Human
aacuucagaugggaggaaaga

SEQ ID NO: 3789618 - RNA, 18 nt, Human
aacuucagcaguaccuau

SEQ ID NO: 3789619 - RNA, 12 nt, Human
aacuucaggaaa

SEQ ID NO: 3789620 - RNA, 15 nt, Human
aacuucaguccuggg

SEQ ID NO: 3789621 - RNA, 17 nt, Human
aacuucauauguaaucu

SEQ ID NO: 3789622 - RNA, 15 nt, Human
aacuucauggaucag

SEQ ID NO: 3789623 - RNA, 20 nt, Human
aacuucaugucaacuucugg

SEQ ID NO: 3789624 - RNA, 12 nt, Human
aacuucauucuc

SEQ ID NO: 3789625 - RNA, 16 nt, Human
aacuuccaaauaaaua

SEQ ID NO: 3789626 - RNA, 20 nt, Human
aacuuccaagaccugacuca

SEQ ID NO: 3789627 - RNA, 13 nt, Human
aacuuccaauuua

SEQ ID NO: 3789628 - RNA, 19 nt, Human
aacuuccagguguuacugu

SEQ ID NO: 3789629 - RNA, 23 nt, Human
aacuuccuuggacucauuuuaaa

SEQ ID NO: 3789630 - RNA, 20 nt, Human
aacuucgaaagcaucauuau

SEQ ID NO: 3789631 - RNA, 19 nt, Human
aacuucgcaucaaaagaca

SEQ ID NO: 3789632 - RNA, 15 nt, Human
aacuucuaaaacugu

SEQ ID NO: 3789633 - RNA, 15 nt, Human
aacuucuaauugcca

SEQ ID NO: 3789634 - RNA, 17 nt, Human
aacuucuuauggaauug

SEQ ID NO: 3789635 - RNA, 19 nt, Human
aacuucuucagagcugaca

SEQ ID NO: 3789636 - RNA, 19 nt, Human
aacuucuugcuucuuucua

SEQ ID NO: 3789637 - RNA, 22 nt, Human
aacuucuugcuucuuucuagaa

SEQ ID NO: 3789638 - RNA, 13 nt, Human
aacuucuugucag

SEQ ID NO: 3789639 - RNA, 20 nt, Human
aacuucuugucagacauaaa

SEQ ID NO: 3789640 - RNA, 21 nt, Human
aacuucuugucagacauaaag

SEQ ID NO: 3789641 - RNA, 13 nt, Human
aacuucuuucacu

SEQ ID NO: 3789642 - RNA, 22 nt, Human
aacuugaaaauauaugauggcu

SEQ ID NO: 3789643 - RNA, 12 nt, Human
aacuugaaauuu

SEQ ID NO: 3789644 - RNA, 18 nt, Human
aacuugagaacuuuauuu

SEQ ID NO: 3789645 - RNA, 22 nt, Human
aacuugagaacuuuauuuccaa

SEQ ID NO: 3789646 - RNA, 15 nt, Human
aacuugagcauguua

SEQ ID NO: 3789647 - RNA, 12 nt, Human
aacuugaggaca

SEQ ID NO: 3789648 - RNA, 14 nt, Human
aacuugaggacaca

SEQ ID NO: 3789649 - RNA, 15 nt, Human
aacuugaggacacau

SEQ ID NO: 3789650 - RNA, 16 nt, Human
aacuugaggacacaug

SEQ ID NO: 3789651 - RNA, 19 nt, Human
aacuugaggacacaugucc

SEQ ID NO: 3789652 - RNA, 16 nt, Human
aacuugaggguaauaa

SEQ ID NO: 3789653 - RNA, 19 nt, Human
aacuugaggguaauaaacu

SEQ ID NO: 3789654 - RNA, 17 nt, Human
aacuugauccauuucua

SEQ ID NO: 3789655 - RNA, 14 nt, Human
aacuugcaaaauca

SEQ ID NO: 3789656 - RNA, 17 nt, Human
aacuugcaaaaucaguu

SEQ ID NO: 3789657 - RNA, 19 nt, Human
aacuugcaaaaucaguuuu

SEQ ID NO: 3789658 - RNA, 23 nt, Human
aacuugcaagggcggccuuuccc

SEQ ID NO: 3789659 - RNA, 14 nt, Human
aacuugcaucacuu

SEQ ID NO: 3789660 - RNA, 11 nt, Human
aacuugccuuu

SEQ ID NO: 3789661 - RNA, 22 nt, Human
aacuugcugcaguaugaaaaua

SEQ ID NO: 3789662 - RNA, 14 nt, Human
aacuugcugcuguc

SEQ ID NO: 3789663 - RNA, 15 nt, Human
aacuugcuuaaaugu

SEQ ID NO: 3789664 - RNA, 18 nt, Human
aacuugcuuaucaacuuc

SEQ ID NO: 3789665 - RNA, 16 nt, Human
aacuuggaugaguuuu

SEQ ID NO: 3789666 - RNA, 17 nt, Human
aacuuggaugaguuuug

SEQ ID NO: 3789667 - RNA, 11 nt, Human
aacuuggcuca

SEQ ID NO: 3789668 - RNA, 18 nt, Human
aacuuggcugcaggaauc

SEQ ID NO: 3789669 - RNA, 11 nt, Human
aacuugggagu

SEQ ID NO: 3789670 - RNA, 17 nt, Human
aacuuggugcuuauuga

SEQ ID NO: 3789671 - RNA, 17 nt, Human
aacuugguucugcuuca

SEQ ID NO: 3789672 - RNA, 15 nt, Human
aacuuguaaaugcug

SEQ ID NO: 3789673 - RNA, 20 nt, Human
aacuuguaauuuuuuuaauu

SEQ ID NO: 3789674 - RNA, 23 nt, Human
aacuuguagcuguaaaacgcugu

SEQ ID NO: 3789675 - RNA, 15 nt, Human
aacuuguauuaugug

SEQ ID NO: 3789676 - RNA, 20 nt, Human
aacuugucaaaaaacaaaaa

SEQ ID NO: 3789677 - RNA, 12 nt, Human
aacuugugaaug

SEQ ID NO: 3789678 - RNA, 17 nt, Human
aacuugugaaugcuucu

SEQ ID NO: 3789679 - RNA, 14 nt, Human
aacuuguguaaaua

SEQ ID NO: 3789680 - RNA, 19 nt, Human
aacuugugucccuaaugug

SEQ ID NO: 3789681 - RNA, 18 nt, Human
aacuuguuauugugaaug

SEQ ID NO: 3789682 - RNA, 20 nt, Human
aacuuguuauugugaaugau

SEQ ID NO: 3789683 - RNA, 20 nt, Human
aacuuguucuuccaaagcag

SEQ ID NO: 3789684 - RNA, 16 nt, Human
aacuuguuuaauaaag

SEQ ID NO: 3789685 - RNA, 15 nt, Human
aacuuuaaaaaauau

SEQ ID NO: 3789686 - RNA, 17 nt, Human
aacuuuaaaaaauauuu

SEQ ID NO: 3789687 - RNA, 19 nt, Human
aacuuuaaagcguuugcac

SEQ ID NO: 3789688 - RNA, 13 nt, Human
aacuuuaaauuau

SEQ ID NO: 3789689 - RNA, 20 nt, Human
aacuuuaacuucuguuuuac

SEQ ID NO: 3789690 - RNA, 13 nt, Human
aacuuuaagagga

SEQ ID NO: 3789691 - RNA, 15 nt, Human
aacuuuaagaggaca

SEQ ID NO: 3789692 - RNA, 18 nt, Human
aacuuuaagcagcucuug

SEQ ID NO: 3789693 - RNA, 19 nt, Human
aacuuuaauauguauuuua

SEQ ID NO: 3789694 - RNA, 16 nt, Human
aacuuuaaucaaguug

SEQ ID NO: 3789695 - RNA, 20 nt, Human
aacuuuaauucucuuucaaa

SEQ ID NO: 3789696 - RNA, 16 nt, Human
aacagcuucagguuau

SEQ ID NO: 3789697 - RNA, 22 nt, Human
aacagcuucauguucccaaaau

SEQ ID NO: 3789698 - RNA, 22 nt, Human
aacagcuuuggggugucuuuuu

SEQ ID NO: 3789699 - RNA, 15 nt, Human
aacaggaaaaaaacu

SEQ ID NO: 3789700 - RNA, 16 nt, Human
aacaggaaaaaaacuu

SEQ ID NO: 3789701 - RNA, 22 nt, Human
aacaggaaaaaaacuuuuauaa

SEQ ID NO: 3789702 - RNA, 11 nt, Human
aacaggaaaag

SEQ ID NO: 3789703 - RNA, 22 nt, Human
aacaggaagaucuuaaauuuug

SEQ ID NO: 3789704 - RNA, 19 nt, Human
aacaggacuuaaaaugaca

SEQ ID NO: 3789705 - RNA, 21 nt, Human
aacaggagcugggauccuaag

SEQ ID NO: 3789706 - RNA, 14 nt, Human
aacaggaggacaau

SEQ ID NO: 3789707 - RNA, 16 nt, Human
aacaggaggacaauuc

SEQ ID NO: 3789708 - RNA, 14 nt, Human
aacaggcaagugaa

SEQ ID NO: 3789709 - RNA, 16 nt, Human
aacaggcacugcccug

SEQ ID NO: 3789710 - RNA, 18 nt, Human
aacaggcacuuggcagcc

SEQ ID NO: 3789711 - RNA, 14 nt, Human
aacaggcagauaca

SEQ ID NO: 3789712 - RNA, 17 nt, Human
aacaggccauugugaac

SEQ ID NO: 3789713 - RNA, 13 nt, Human
aacaggcccagca

SEQ ID NO: 3789714 - RNA, 18 nt, Human
aacaggcuacucuccucg

SEQ ID NO: 3789715 - RNA, 22 nt, Human
aacaggcugggcuucaguggca

SEQ ID NO: 3789716 - RNA, 21 nt, Human
aacaggcuguucugcacugaa

SEQ ID NO: 3789717 - RNA, 23 nt, Human
aacaggcuguucugcacugaaaa

SEQ ID NO: 3789718 - RNA, 13 nt, Human
aacagggaaggca

SEQ ID NO: 3789719 - RNA, 19 nt, Human
aacagggauugauuuuaaa

SEQ ID NO: 3789720 - RNA, 18 nt, Human
aacagggcaucuccagga

SEQ ID NO: 3789721 - RNA, 16 nt, Human
aacagggccacauaga

SEQ ID NO: 3789722 - RNA, 15 nt, Human
aacagggccuugcua

SEQ ID NO: 3789723 - RNA, 14 nt, Human
aacagggcugccuu

SEQ ID NO: 3789724 - RNA, 18 nt, Human
aacagggucucuagugcu

SEQ ID NO: 3789725 - RNA, 23 nt, Human
aacagggucucuagugcugugaa

SEQ ID NO: 3789726 - RNA, 13 nt, Human
aacaggucuccuc

SEQ ID NO: 3789727 - RNA, 15 nt, Human
aacaggucuccucuu

SEQ ID NO: 3789728 - RNA, 16 nt, Human
aacagguggcaggacc

SEQ ID NO: 3789729 - RNA, 22 nt, Human
aacagguuauuuuaguuucugu

SEQ ID NO: 3789730 - RNA, 17 nt, Human
aacagguugggauggga

SEQ ID NO: 3789731 - RNA, 19 nt, Human
aacaguaaaccacugaaaa

SEQ ID NO: 3789732 - RNA, 14 nt, Human
aacaguaaaugugc

SEQ ID NO: 3789733 - RNA, 15 nt, Human
aacaguaacauagcu

SEQ ID NO: 3789734 - RNA, 22 nt, Human
aacaguagugauaguuguaccg

SEQ ID NO: 3789735 - RNA, 20 nt, Human
aacaguaugugggauauuga

SEQ ID NO: 3789736 - RNA, 11 nt, Human
aacaguauuua

SEQ ID NO: 3789737 - RNA, 12 nt, Human
aacaguauuuau

SEQ ID NO: 3789738 - RNA, 16 nt, Human
aacaguauuuauuuug

SEQ ID NO: 3789739 - RNA, 18 nt, Human
aacaguauuuauuuugua

SEQ ID NO: 3789740 - RNA, 17 nt, Human
aacagucaaaacagaga

SEQ ID NO: 3789741 - RNA, 21 nt, Human
aacagucauguuuuaaaugua

SEQ ID NO: 3789742 - RNA, 18 nt, Human
aacaguccauugaaaggg

SEQ ID NO: 3789743 - RNA, 14 nt, Human
aacagucucaggaa

SEQ ID NO: 3789744 - RNA, 23 nt, Human
aacagugcaccugggacagggag

SEQ ID NO: 3789745 - RNA, 20 nt, Human
aacagugcagggcaaaauau

SEQ ID NO: 3789746 - RNA, 18 nt, Human
aacagugccauugucuuu

SEQ ID NO: 3789747 - RNA, 20 nt, Human
aacagugccauugucuuuau

SEQ ID NO: 3789748 - RNA, 12 nt, Human
aacagugccugc

SEQ ID NO: 3789749 - RNA, 13 nt, Human
aacagugccugcu

SEQ ID NO: 3789750 - RNA, 14 nt, Human
aacagugugaaguu

SEQ ID NO: 3789751 - RNA, 15 nt, Human
aacagugugaaguua

SEQ ID NO: 3789752 - RNA, 16 nt, Human
aacagugugaaguuag

SEQ ID NO: 3789753 - RNA, 17 nt, Human
aacagugugaaguuaga

SEQ ID NO: 3789754 - RNA, 23 nt, Human
aacaguguguaaacaaaaugaag

SEQ ID NO: 3789755 - RNA, 13 nt, Human
aacaguguuuccc

SEQ ID NO: 3789756 - RNA, 19 nt, Human
aacaguguuucccauaauu

SEQ ID NO: 3789757 - RNA, 17 nt, Human
aacaguuaacuuucaga

SEQ ID NO: 3789758 - RNA, 17 nt, Human
aagaaggaugauucaac

SEQ ID NO: 3789759 - RNA, 19 nt, Human
aagaaggcaaaaauaguuu

SEQ ID NO: 3789760 - RNA, 14 nt, Human
aagaaggcaauauu

SEQ ID NO: 3789761 - RNA, 12 nt, Human
aagaaggcuggg

SEQ ID NO: 3789762 - RNA, 16 nt, Human
aagaagggacugagag

SEQ ID NO: 3789763 - RNA, 14 nt, Human
aagaagggagaaga

SEQ ID NO: 3789764 - RNA, 15 nt, Human
aagaagggagaagaa

SEQ ID NO: 3789765 - RNA, 16 nt, Human
aagaagggcugcauga

SEQ ID NO: 3789766 - RNA, 20 nt, Human
aagaagggcugcaugauguu

SEQ ID NO: 3789767 - RNA, 21 nt, Human
aagaagguuaccaagaagccu

SEQ ID NO: 3789768 - RNA, 15 nt, Human
aagaaguaggcauga

SEQ ID NO: 3789769 - RNA, 22 nt, Human
aagaagugaccaaggaggaguu

SEQ ID NO: 3789770 - RNA, 16 nt, Human
aagaagugaguguuuc

SEQ ID NO: 3789771 - RNA, 19 nt, Human
aagaaguggggcagcagca

SEQ ID NO: 3789772 - RNA, 20 nt, Human
aagaaguucuuugauucugu

SEQ ID NO: 3789773 - RNA, 17 nt, Human
aagaaguuuaaggaaua

SEQ ID NO: 3789774 - RNA, 13 nt, Human
aagaaguuuuaaa

SEQ ID NO: 3789775 - RNA, 18 nt, Human
aagaaguuuuaaaaagcc

SEQ ID NO: 3789776 - RNA, 23 nt, Human
aagaaguuuuaaaaagccaguuu

SEQ ID NO: 3789777 - RNA, 15 nt, Human
aagaauaaaauguug

SEQ ID NO: 3789778 - RNA, 18 nt, Human
aagaauaaaauguugaaa

SEQ ID NO: 3789779 - RNA, 16 nt, Human
aagaauaaucacgcuu

SEQ ID NO: 3789780 - RNA, 22 nt, Human
aagaauacaaacauauuuguua

SEQ ID NO: 3789781 - RNA, 15 nt, Human
aagaauacagcuuuc

SEQ ID NO: 3789782 - RNA, 13 nt, Human
aagaauacaguua

SEQ ID NO: 3789783 - RNA, 12 nt, Human
aagaauacuuga

SEQ ID NO: 3789784 - RNA, 13 nt, Human
aagaauacuugaa

SEQ ID NO: 3789785 - RNA, 14 nt, Human
aagaauacuugaac

SEQ ID NO: 3789786 - RNA, 13 nt, Human
aagaauagaaaca

SEQ ID NO: 3789787 - RNA, 15 nt, Human
aagaauagaaacaag

SEQ ID NO: 3789788 - RNA, 21 nt, Human
aagaauauguuuccuuguuua

SEQ ID NO: 3789789 - RNA, 12 nt, Human
aagaauauugca

SEQ ID NO: 3789790 - RNA, 14 nt, Human
aagaauauugcaaa

SEQ ID NO: 3789791 - RNA, 11 nt, Human
aagaauauugu

SEQ ID NO: 3789792 - RNA, 12 nt, Human
aagaauauugua

SEQ ID NO: 3789793 - RNA, 22 nt, Human
aagaauauuguuccuaaguucu

SEQ ID NO: 3789794 - RNA, 12 nt, Human
aagaaucagaga

SEQ ID NO: 3789795 - RNA, 16 nt, Human
aagaaucagaguagaa

SEQ ID NO: 3789796 - RNA, 22 nt, Human
aagaaucauuguaaacauuagu

SEQ ID NO: 3789797 - RNA, 23 nt, Human
aagaaucccuagacuuuaggcuu

SEQ ID NO: 3789798 - RNA, 21 nt, Human
aagaaucccuguucauuguaa

SEQ ID NO: 3789799 - RNA, 21 nt, Human
aagaaucuugguuugccuucc

SEQ ID NO: 3789800 - RNA, 14 nt, Human
aagaaugaaagagu

SEQ ID NO: 3789801 - RNA, 19 nt, Human
aagaaugaacaaauugaac

SEQ ID NO: 3789802 - RNA, 21 nt, Human
aagaaugaagguuuuuguaaa

SEQ ID NO: 3789803 - RNA, 18 nt, Human
aagaaugauuaugaauua

SEQ ID NO: 3789804 - RNA, 20 nt, Human
aagaaugcacaagaauggau

SEQ ID NO: 3789805 - RNA, 19 nt, Human
aagaaugcugguuuuccua

SEQ ID NO: 3789806 - RNA, 17 nt, Human
aagaaugcuuaaucaga

SEQ ID NO: 3789807 - RNA, 16 nt, Human
aagaauggagcaguac

SEQ ID NO: 3789808 - RNA, 19 nt, Human
aagaaugguccgugcuaag

SEQ ID NO: 3789809 - RNA, 16 nt, Human
aagaauguacguccag

SEQ ID NO: 3789810 - RNA, 15 nt, Human
aagaaugucagaaaa

SEQ ID NO: 3789811 - RNA, 18 nt, Human
aagaaugucgauuaaaau

SEQ ID NO: 3789812 - RNA, 13 nt, Human
aagaauguguuuc

SEQ ID NO: 3789813 - RNA, 16 nt, Human
aagaauguguuucaaa

SEQ ID NO: 3789814 - RNA, 18 nt, Human
aagaauguuaagacuuga

SEQ ID NO: 3789815 - RNA, 20 nt, Human
aagaauguuacugccuuaau

SEQ ID NO: 3789816 - RNA, 16 nt, Human
aagaauguuagagcac

SEQ ID NO: 3789817 - RNA, 16 nt, Human
aagaauguuagaguaa

SEQ ID NO: 3789818 - RNA, 14 nt, Human
aagaauguugguuu

SEQ ID NO: 3789819 - RNA, 18 nt, Human
aagaauguugguuuacuu

SEQ ID NO: 3789820 - RNA, 21 nt, Human
aagaauguugguuuacuuuca

SEQ ID NO: 3789821 - RNA, 18 nt, Human
aagaauuaagauacaaau

SEQ ID NO: 3789822 - RNA, 12 nt, Human
aagaauucaaau

SEQ ID NO: 3789823 - RNA, 21 nt, Human
aagaauucaaauuuuaucugc

SEQ ID NO: 3789824 - RNA, 20 nt, Human
aagaauucuccaaaacaauu

SEQ ID NO: 3789825 - RNA, 15 nt, Human
aagaauugaaaaguu

SEQ ID NO: 3789826 - RNA, 18 nt, Human
aagaauugaaaaguuuuu

SEQ ID NO: 3789827 - RNA, 20 nt, Human
aagaauugaaaaguuuuugu

SEQ ID NO: 3789828 - RNA, 16 nt, Human
aagaauugaacccagg

SEQ ID NO: 3789829 - RNA, 16 nt, Human
aagaauugaagcagga

SEQ ID NO: 3789830 - RNA, 21 nt, Human
aagaauugaccaucugcuuuu

SEQ ID NO: 3789831 - RNA, 23 nt, Human
aagaauugauugggcacaucauu

SEQ ID NO: 3789832 - RNA, 21 nt, Human
aagaauuguuggggguuuuuu

SEQ ID NO: 3789833 - RNA, 22 nt, Human
aagaauuguuggggguuuuuuu

SEQ ID NO: 3789834 - RNA, 14 nt, Human
aagaauuugcauac

SEQ ID NO: 3789835 - RNA, 14 nt, Human
aagaauuuuaaaaa

SEQ ID NO: 3789836 - RNA, 20 nt, Human
aagaauuuuaaaaaugaauc

SEQ ID NO: 3789837 - RNA, 22 nt, Human
aagaauuuucagaccccagcgg

SEQ ID NO: 3789838 - RNA, 22 nt, Human
aagaauuuuccugagacaaauu

SEQ ID NO: 3789839 - RNA, 14 nt, Human
aagaauuuuuuauu

SEQ ID NO: 3789840 - RNA, 18 nt, Human
aagacaaaaauacucuaa

SEQ ID NO: 3789841 - RNA, 17 nt, Human
aagccagcuuucccugc

SEQ ID NO: 3789842 - RNA, 18 nt, Human
aagccaggagcaaauguu

SEQ ID NO: 3789843 - RNA, 21 nt, Human
aagccaggcagguagccaggg

SEQ ID NO: 3789844 - RNA, 18 nt, Human
aagccaggcucacucaca

SEQ ID NO: 3789845 - RNA, 20 nt, Human
aagccagggcccgggaagca

SEQ ID NO: 3789846 - RNA, 16 nt, Human
aagccagggcuggaga

SEQ ID NO: 3789847 - RNA, 12 nt, Human
aagccagggucu

SEQ ID NO: 3789848 - RNA, 20 nt, Human
aagccagggucucucccuca

SEQ ID NO: 3789849 - RNA, 13 nt, Human
aagccaggucccu

SEQ ID NO: 3789850 - RNA, 21 nt, Human
aagccagguuccacagaggac

SEQ ID NO: 3789851 - RNA, 23 nt, Human
aagccagguuccacagaggacac

SEQ ID NO: 3789852 - RNA, 17 nt, Human
aagccagugacuccagg

SEQ ID NO: 3789853 - RNA, 23 nt, Human
aagccaguguugccuaaguauua

SEQ ID NO: 3789854 - RNA, 20 nt, Human
aagccaguuuggguaaaaua

SEQ ID NO: 3789855 - RNA, 14 nt, Human
aagccaugagaaug

SEQ ID NO: 3789856 - RNA, 16 nt, Human
aagccaugagaauguu

SEQ ID NO: 3789857 - RNA, 22 nt, Human
aagccaugaguuccagaaagua

SEQ ID NO: 3789858 - RNA, 23 nt, Human
aagccaugaguuccagaaaguaa

SEQ ID NO: 3789859 - RNA, 21 nt, Human
aagccauggguagccugggug

SEQ ID NO: 3789860 - RNA, 18 nt, Human
aagccauguauaaaugug

SEQ ID NO: 3789861 - RNA, 20 nt, Human
aagccauguauaaaugugau

SEQ ID NO: 3789862 - RNA, 17 nt, Human
aagccauguuuaagauu

SEQ ID NO: 3789863 - RNA, 16 nt, Human
aagccauguuuauuac

SEQ ID NO: 3789864 - RNA, 21 nt, Human
aagccauguuuauuacaguau

SEQ ID NO: 3789865 - RNA, 23 nt, Human
aagccauguuuauuacaguauaa

SEQ ID NO: 3789866 - RNA, 18 nt, Human
aagccauuaaaugaauau

SEQ ID NO: 3789867 - RNA, 20 nt, Human
aagccauucuaaggaaauua

SEQ ID NO: 3789868 - RNA, 13 nt, Human
aagccauugucuu

SEQ ID NO: 3789869 - RNA, 18 nt, Human
aagcccaauauuauaauu

SEQ ID NO: 3789870 - RNA, 16 nt, Human
aagcccaccauuuggc

SEQ ID NO: 3789871 - RNA, 18 nt, Human
aagcccagaaaaggacag

SEQ ID NO: 3789872 - RNA, 16 nt, Human
aagcccagagggucug

SEQ ID NO: 3789873 - RNA, 18 nt, Human
aagcccagcccauggaga

SEQ ID NO: 3789874 - RNA, 22 nt, Human
aagcccaggaaaggcuccagga

SEQ ID NO: 3789875 - RNA, 15 nt, Human
aagcccaggagccca

SEQ ID NO: 3789876 - RNA, 16 nt, Human
aagcccaggagcccau

SEQ ID NO: 3789877 - RNA, 15 nt, Human
aagcccaggggccgg

SEQ ID NO: 3789878 - RNA, 17 nt, Human
aagcccagugcacugaa

SEQ ID NO: 3789879 - RNA, 16 nt, Human
aagcccauucauucca

SEQ ID NO: 3789880 - RNA, 23 nt, Human
aagcccauucauuccauucugga

SEQ ID NO: 3789881 - RNA, 16 nt, Human
aagccccacccaggcc

SEQ ID NO: 3789882 - RNA, 14 nt, Human
aagccccaggcagg

SEQ ID NO: 3789883 - RNA, 21 nt, Human
aagccccaggcaggcugugcg

SEQ ID NO: 3789884 - RNA, 21 nt, Human
aagccccaugcuggagccugu

SEQ ID NO: 3789885 - RNA, 15 nt, Human
aagcccccagagccc

SEQ ID NO: 3789886 - RNA, 16 nt, Human
aagcccccagagccca

SEQ ID NO: 3789887 - RNA, 18 nt, Human
aagcccccagagcccagg

SEQ ID NO: 3789888 - RNA, 19 nt, Human
aagcccccagagcccaggc

SEQ ID NO: 3789889 - RNA, 17 nt, Human
aagccccugcccaucug

SEQ ID NO: 3789890 - RNA, 18 nt, Human
aagccccugccccuccuc

SEQ ID NO: 3789891 - RNA, 21 nt, Human
aagccccuugcucuccccugc

SEQ ID NO: 3789892 - RNA, 19 nt, Human
aagcccgccugacagaaac

SEQ ID NO: 3789893 - RNA, 15 nt, Human
aagcccggcuccugg

SEQ ID NO: 3789894 - RNA, 18 nt, Human
aagcccggcuccugguca

SEQ ID NO: 3789895 - RNA, 22 nt, Human
aagcccggcuccuggucaccua

SEQ ID NO: 3789896 - RNA, 17 nt, Human
aagcccuaacucagcca

SEQ ID NO: 3789897 - RNA, 16 nt, Human
aagcccuacagagcug

SEQ ID NO: 3789898 - RNA, 17 nt, Human
aagcccuacagagcugu

SEQ ID NO: 3789899 - RNA, 20 nt, Human
aagcccucccagguguuaac

SEQ ID NO: 3789900 - RNA, 11 nt, Human
aagcccuccuu

SEQ ID NO: 3789901 - RNA, 13 nt, Human
aagcccuccuucc

SEQ ID NO: 3789902 - RNA, 13 nt, Human
aagcccucuucca

SEQ ID NO: 3789903 - RNA, 14 nt, Human
aagcccucuuccau

SEQ ID NO: 3789904 - RNA, 19 nt, Human
aagcccugagcuuucugcu

SEQ ID NO: 3789905 - RNA, 19 nt, Human
aagcccugucgagacacuu

SEQ ID NO: 3789906 - RNA, 22 nt, Human
aagcccuguugugccacagagu

SEQ ID NO: 3789907 - RNA, 14 nt, Human
aagccgacucuggc

SEQ ID NO: 3789908 - RNA, 19 nt, Human
aagccgacucuggcccugg

SEQ ID NO: 3789909 - RNA, 21 nt, Human
aagccgacucuggcccuggcc

SEQ ID NO: 3789910 - RNA, 17 nt, Human
aagccgagagccuuuug

SEQ ID NO: 3789911 - RNA, 15 nt, Human
aagccgccaggaccg

SEQ ID NO: 3789912 - RNA, 14 nt, Human
aagccgugcccugc

SEQ ID NO: 3789913 - RNA, 13 nt, Human
aagccguggcuuc

SEQ ID NO: 3789914 - RNA, 16 nt, Human
aagccuaaaugccuua

SEQ ID NO: 3789915 - RNA, 17 nt, Human
aagccuaagggauccug

SEQ ID NO: 3789916 - RNA, 16 nt, Human
aagccuaccugcucuc

SEQ ID NO: 3789917 - RNA, 19 nt, Human
aagccuaccugcucuccaa

SEQ ID NO: 3789918 - RNA, 18 nt, Human
aagccuagauguuuuaua

SEQ ID NO: 3789919 - RNA, 18 nt, Human
aagccuauuguaaauaca

SEQ ID NO: 3789920 - RNA, 22 nt, Human
aagccucaaagagagaaaguuu

SEQ ID NO: 3789921 - RNA, 21 nt, Human
aagccucaagguuuuagguuc

SEQ ID NO: 3789922 - RNA, 19 nt, Human
aagccucagauuccuuccc

SEQ ID NO: 3789923 - RNA, 21 nt, Human
aagccucagauuccuucccau

SEQ ID NO: 3789924 - RNA, 21 nt, Human
aagccucaucaucagagccuu

SEQ ID NO: 3789925 - RNA, 15 nt, Human
aagccuccacagcga

SEQ ID NO: 3789926 - RNA, 20 nt, Human
aagccuccauuuaguucuuu

SEQ ID NO: 3789927 - RNA, 22 nt, Human
aagccuccauuuaguucuuugu

SEQ ID NO: 3789928 - RNA, 15 nt, Human
aagccucgacacaga

SEQ ID NO: 3789929 - RNA, 18 nt, Human
aagccucgaggugccuuc

SEQ ID NO: 3789930 - RNA, 15 nt, Human
aagccucugcccagg

SEQ ID NO: 3789931 - RNA, 12 nt, Human
aagccucuggcu

SEQ ID NO: 3789932 - RNA, 18 nt, Human
aagccucugugucacugg

SEQ ID NO: 3789933 - RNA, 20 nt, Human
aagccucugugucacuggcu

SEQ ID NO: 3789934 - RNA, 21 nt, Human
aagccucugugucacuggcug

SEQ ID NO: 3789935 - RNA, 15 nt, Human
aagccugaggcuggg

SEQ ID NO: 3789936 - RNA, 16 nt, Human
aagccugagggaaagg

SEQ ID NO: 3789937 - RNA, 22 nt, Human
aagccugaguacuccacacugc

SEQ ID NO: 3789938 - RNA, 15 nt, Human
aagccugaugcugac

SEQ ID NO: 3789939 - RNA, 12 nt, Human
aagccugcaacu

SEQ ID NO: 3789940 - RNA, 21 nt, Human
aagccugcacaauaaaaaugu

SEQ ID NO: 3789941 - RNA, 17 nt, Human
aagccugcccuugucug

SEQ ID NO: 3789942 - RNA, 20 nt, Human
aagccugcccuugucugaga

SEQ ID NO: 3789943 - RNA, 23 nt, Human
aagccugccuaggaauucccagc

SEQ ID NO: 3789944 - RNA, 21 nt, Human
aagccugcguugguccagagc

SEQ ID NO: 3789945 - RNA, 22 nt, Human
aagccugcguugguccagagcg

SEQ ID NO: 3789946 - RNA, 12 nt, Human
aagccugcuccu

SEQ ID NO: 3789947 - RNA, 21 nt, Human
aagccuggccuacaugguuga

SEQ ID NO: 3789948 - RNA, 17 nt, Human
aagccugggauugacag

SEQ ID NO: 3789949 - RNA, 20 nt, Human
aagccugggggccuggcugg

SEQ ID NO: 3789950 - RNA, 21 nt, Human
aagccugggggccuggcuggc

SEQ ID NO: 3789951 - RNA, 23 nt, Human
aagccugggggccuggcuggcug

SEQ ID NO: 3789952 - RNA, 15 nt, Human
aagccuggucagccc

SEQ ID NO: 3789953 - RNA, 21 nt, Human
aagccuguaacacuccucugc

SEQ ID NO: 3789954 - RNA, 17 nt, Human
aagccuguaaucccagc

SEQ ID NO: 3789955 - RNA, 21 nt, Human
aagccuguauucucaaacaca

SEQ ID NO: 3789956 - RNA, 15 nt, Human
aagccuguggcugug

SEQ ID NO: 3789957 - RNA, 17 nt, Human
aagccuguucauggcag

SEQ ID NO: 3789958 - RNA, 18 nt, Human
aagccuguuccccucacu

SEQ ID NO: 3789959 - RNA, 15 nt, Human
aagccuguuguuuaa

SEQ ID NO: 3789960 - RNA, 18 nt, Human
aagccuguuguuuaagug

SEQ ID NO: 3789961 - RNA, 15 nt, Human
aagccuguuuaagag

SEQ ID NO: 3789962 - RNA, 18 nt, Human
aagccuguuuaagagaca

SEQ ID NO: 3789963 - RNA, 17 nt, Human
aagccuuaagcugcagg

SEQ ID NO: 3789964 - RNA, 16 nt, Human
aagccuuaucaagugu

SEQ ID NO: 3789965 - RNA, 14 nt, Human
aagccuucaagcuc

SEQ ID NO: 3789966 - RNA, 16 nt, Human
aagccuuccacacuca

SEQ ID NO: 3789967 - RNA, 23 nt, Human
aagccuugauugguguugccagu

SEQ ID NO: 3789968 - RNA, 13 nt, Human
aagccuuguguau

SEQ ID NO: 3789969 - RNA, 19 nt, Human
aagccuuguguauauuugu

SEQ ID NO: 3789970 - RNA, 17 nt, Human
aagccuuuacugacccu

SEQ ID NO: 3789971 - RNA, 16 nt, Human
aagccuuuuuccccaa

SEQ ID NO: 3789972 - RNA, 21 nt, Human
aagcgauauacagaugaaaau

SEQ ID NO: 3789973 - RNA, 20 nt, Human
aagcgauucucuugccucaa

SEQ ID NO: 3789974 - RNA, 14 nt, Human
aagcgcccuggccc

SEQ ID NO: 3789975 - RNA, 21 nt, Human
aagcgcccuggcccccacaug

SEQ ID NO: 3789976 - RNA, 16 nt, Human
aagcgccuccaacccu

SEQ ID NO: 3789977 - RNA, 20 nt, Human
aagcggcccuaagggagugu

SEQ ID NO: 3789978 - RNA, 14 nt, Human
aagcggcuggcagc

SEQ ID NO: 3789979 - RNA, 14 nt, Human
aagcggggggaggg

SEQ ID NO: 3789980 - RNA, 23 nt, Human
aagcgugaaggccgagaagcaag

SEQ ID NO: 3789981 - RNA, 15 nt, Human
aagcgugagccacug

SEQ ID NO: 3789982 - RNA, 21 nt, Human
aagcgugagccacugcaccgg

SEQ ID NO: 3789983 - RNA, 15 nt, Human
aagcuaaaauaaaga

SEQ ID NO: 3789984 - RNA, 15 nt, Human
aacucuuauaaauuu

SEQ ID NO: 3789985 - RNA, 14 nt, Human
aacucuuaucucag

SEQ ID NO: 3789986 - RNA, 16 nt, Human
aacucuucaaggucug

SEQ ID NO: 3789987 - RNA, 23 nt, Human
aacucuucccccucucccaguug

SEQ ID NO: 3789988 - RNA, 21 nt, Human
aacucuugacagcuauaauua

SEQ ID NO: 3789989 - RNA, 19 nt, Human
aagccaauccccuccuugg

SEQ ID NO: 3789990 - RNA, 20 nt, Human
aagccaauuuuucugcacug

SEQ ID NO: 3789991 - RNA, 22 nt, Human
aagccaauuuuucugcacugag

SEQ ID NO: 3789992 - RNA, 15 nt, Human
aagccacaggccuga

SEQ ID NO: 3789993 - RNA, 17 nt, Human
aagccacaggccugaga

SEQ ID NO: 3789994 - RNA, 19 nt, Human
aagccacaggccugagauu

SEQ ID NO: 3789995 - RNA, 13 nt, Human
aagccacauagag

SEQ ID NO: 3789996 - RNA, 18 nt, Human
aagccacauuauuucuag

SEQ ID NO: 3789997 - RNA, 14 nt, Human
aagccaccagaugu

SEQ ID NO: 3789998 - RNA, 11 nt, Human
aagccacccuc

SEQ ID NO: 3789999 - RNA, 15 nt, Human
aagccacccucccag

SEQ ID NO: 3790000 - RNA, 19 nt, Human
aagccacccucccagcucu

SEQ ID NO: 3790001 - RNA, 15 nt, Human
aagccacuagacucu

SEQ ID NO: 3790002 - RNA, 19 nt, Human
aagccacucugucccuucc

SEQ ID NO: 3790003 - RNA, 18 nt, Human
aagccacuuaaaauguuc

SEQ ID NO: 3790004 - RNA, 13 nt, Human
aagccacuugaaa

SEQ ID NO: 3790005 - RNA, 20 nt, Human
aagccagaagcugagcacca

SEQ ID NO: 3790006 - RNA, 18 nt, Human
aagccagcaggcucucag

SEQ ID NO: 3790007 - RNA, 20 nt, Human
aagccagcaggcucucaggc

SEQ ID NO: 3790008 - RNA, 11 nt, Human
aagccagccuu

SEQ ID NO: 3790009 - RNA, 21 nt, Human
aagccagcugcagcugggcug

SEQ ID NO: 3790010 - RNA, 19 nt, Human
aagccagcugcccccagag

SEQ ID NO: 3790011 - RNA, 22 nt, Human
aagccagcugcccccagagcca

SEQ ID NO: 3790012 - RNA, 12 nt, Human
aagccagcuugu

SEQ ID NO: 3790013 - RNA, 21 nt, Human
aagccagcuuguuuacaugcu

SEQ ID NO: 3790014 - RNA, 12 nt, Human
aagccagcuuuc

SEQ ID NO: 3790015 - RNA, 21 nt, Human
aagccaggaauuucccaggac

SEQ ID NO: 3790016 - RNA, 21 nt, Human
aagccaggagcaaauguuucu

SEQ ID NO: 3790017 - RNA, 19 nt, Human
aagccaggcucacucacag

SEQ ID NO: 3790018 - RNA, 22 nt, Human
aagccaggcucacucacagagu

SEQ ID NO: 3790019 - RNA, 22 nt, Human
aagccagggauggggccacagc

SEQ ID NO: 3790020 - RNA, 14 nt, Human
aagccagggcugga

SEQ ID NO: 3790021 - RNA, 23 nt, Human
aagccagggucucucccucaggu

SEQ ID NO: 3790022 - RNA, 15 nt, Human
aagccaggucccucu

SEQ ID NO: 3790023 - RNA, 17 nt, Human
aagccaggucccucuca

SEQ ID NO: 3790024 - RNA, 22 nt, Human
aagccagugacuccaggagagg

SEQ ID NO: 3790025 - RNA, 17 nt, Human
aagccagugcggcaggu

SEQ ID NO: 3790026 - RNA, 23 nt, Human
aagccaguuuggguaaaauacuu

SEQ ID NO: 3790027 - RNA, 18 nt, Human
aagccauaauuguucuua

SEQ ID NO: 3790028 - RNA, 23 nt, Human
aagccaucaccucagauggcagc

SEQ ID NO: 3790029 - RNA, 20 nt, Human
aagccaucuugaguggucau

SEQ ID NO: 3790030 - RNA, 15 nt, Human
aagccaucuugguaa

SEQ ID NO: 3790031 - RNA, 14 nt, Human
aagccauguuuaag

SEQ ID NO: 3790032 - RNA, 19 nt, Human
aagccauguuuaagauuua

SEQ ID NO: 3790033 - RNA, 22 nt, Human
aagccauguuuaagauuuaauu

SEQ ID NO: 3790034 - RNA, 14 nt, Human
aagccauugucuuc

SEQ ID NO: 3790035 - RNA, 17 nt, Human
aagccauuuuuacaucu

SEQ ID NO: 3790036 - RNA, 19 nt, Human
aagcccagccccuacugcu

SEQ ID NO: 3790037 - RNA, 12 nt, Human
aagcccagcucc

SEQ ID NO: 3790038 - RNA, 13 nt, Human
aagcccagcucca

SEQ ID NO: 3790039 - RNA, 21 nt, Human
aagcccagcuccagggccaga

SEQ ID NO: 3790040 - RNA, 14 nt, Human
aagcccaggagccc

SEQ ID NO: 3790041 - RNA, 22 nt, Human
aagcccagugcacugaaaguca

SEQ ID NO: 3790042 - RNA, 18 nt, Human
aagcccaguucagcuugg

SEQ ID NO: 3790043 - RNA, 22 nt, Human
aagcccauaugcuaccaccagc

SEQ ID NO: 3790044 - RNA, 22 nt, Human
aagcccaucaauuauagaaagc

SEQ ID NO: 3790045 - RNA, 15 nt, Human
aagcccauccugacc

SEQ ID NO: 3790046 - RNA, 16 nt, Human
aagcccauccugacca

SEQ ID NO: 3790047 - RNA, 18 nt, Human
aagcccauccugaccagc

SEQ ID NO: 3790048 - RNA, 19 nt, Human
aagcccaugaguccuugaa

SEQ ID NO: 3790049 - RNA, 22 nt, Human
aagcccaugaguccuugaaaau

SEQ ID NO: 3790050 - RNA, 12 nt, Human
aagccccaggca

SEQ ID NO: 3790051 - RNA, 17 nt, Human
aagccccaggcaggcug

SEQ ID NO: 3790052 - RNA, 12 nt, Human
aagccccauccu

SEQ ID NO: 3790053 - RNA, 19 nt, Human
aagccccaugcuggagccu

SEQ ID NO: 3790054 - RNA, 20 nt, Human
aagccccaugcuggagccug

SEQ ID NO: 3790055 - RNA, 20 nt, Human
aagcccccaccgugggcagg

SEQ ID NO: 3790056 - RNA, 12 nt, Human
aagcccccagag

SEQ ID NO: 3790057 - RNA, 13 nt, Human
aagcccccagagc

SEQ ID NO: 3790058 - RNA, 17 nt, Human
aagcccccagagcccag

SEQ ID NO: 3790059 - RNA, 21 nt, Human
aagcccccagcuaagaaccug

SEQ ID NO: 3790060 - RNA, 23 nt, Human
aagcccccccuuauaguuugggc

SEQ ID NO: 3790061 - RNA, 15 nt, Human
aagcccgacuugcug

SEQ ID NO: 3790062 - RNA, 9 nt, Human
aagcccucc

SEQ ID NO: 3790063 - RNA, 15 nt, Human
aagcccuccuuccac

SEQ ID NO: 3790064 - RNA, 16 nt, Human
aagcccucuuccauca

SEQ ID NO: 3790065 - RNA, 18 nt, Human
aagcccucuuccaucaug

SEQ ID NO: 3790066 - RNA, 12 nt, Human
aagcccugaggg

SEQ ID NO: 3790067 - RNA, 19 nt, Human
aagcccuggagccaacugc

SEQ ID NO: 3790068 - RNA, 20 nt, Human
aagcccugucgagacacuug

SEQ ID NO: 3790069 - RNA, 16 nt, Human
aagcccuuaaaaauau

SEQ ID NO: 3790070 - RNA, 20 nt, Human
aagcccuuccaugucgccuc

SEQ ID NO: 3790071 - RNA, 23 nt, Human
aagcccuuccaugucgccucugc

SEQ ID NO: 3790072 - RNA, 16 nt, Human
aagccgacucuggccc

SEQ ID NO: 3790073 - RNA, 13 nt, Human
aagccgcugcugg

SEQ ID NO: 3790074 - RNA, 20 nt, Human
aagccgcuggggccaguugg

SEQ ID NO: 3790075 - RNA, 14 nt, Human
aagccggcggccca

SEQ ID NO: 3790076 - RNA, 14 nt, Human
aagccgggaacaga

SEQ ID NO: 3790077 - RNA, 22 nt, Human
aagccguuguuuacuuaaagau

SEQ ID NO: 3790078 - RNA, 12 nt, Human
aagccuaaagau

SEQ ID NO: 3790079 - RNA, 18 nt, Human
aagccucaaaacaaaggc

SEQ ID NO: 3790080 - RNA, 13 nt, Human
aagccuccacagc

SEQ ID NO: 3790081 - RNA, 19 nt, Human
aagccuccauuuaguucuu

SEQ ID NO: 3790082 - RNA, 14 nt, Human
aagccuccccagcu

SEQ ID NO: 3790083 - RNA, 19 nt, Human
aagccuccuccagccgcca

SEQ ID NO: 3790084 - RNA, 23 nt, Human
aagccucuggcuagaggccagcc

SEQ ID NO: 3790085 - RNA, 23 nt, Human
aagccucugugucacuggcugcc

SEQ ID NO: 3790086 - RNA, 24 nt, Human
aagccucugugucacuggcugccu

SEQ ID NO: 3790087 - RNA, 20 nt, Human
aagccugaguuugcuuucaa

SEQ ID NO: 3790088 - RNA, 14 nt, Human
aagccugcaggagu

SEQ ID NO: 3790089 - RNA, 10 nt, Human
aagccugccc

SEQ ID NO: 3790090 - RNA, 15 nt, Human
aagccugcccuuguc

SEQ ID NO: 3790091 - RNA, 21 nt, Human
aagccugccuaggaauuccca

SEQ ID NO: 3790092 - RNA, 16 nt, Human
aagccugcuccuuccc

SEQ ID NO: 3790093 - RNA, 17 nt, Human
aagccugcuccuucccu

SEQ ID NO: 3790094 - RNA, 15 nt, Human
aagccugcugucuug

SEQ ID NO: 3790095 - RNA, 14 nt, Human
aagccuggaaaaaa

SEQ ID NO: 3790096 - RNA, 22 nt, Human
aagccuggguuugguguauggu

SEQ ID NO: 3790097 - RNA, 16 nt, Human
aagccugugcaaaaaa

SEQ ID NO: 3790098 - RNA, 17 nt, Human
aagccuguggaugauca

SEQ ID NO: 3790099 - RNA, 19 nt, Human
aagccuguuuuguuggaag

SEQ ID NO: 3790100 - RNA, 22 nt, Human
aagccuuaucaagugucuucca

SEQ ID NO: 3790101 - RNA, 13 nt, Human
aagccuucaaaac

SEQ ID NO: 3790102 - RNA, 22 nt, Human
aagccuucaaaacuauagcuug

SEQ ID NO: 3790103 - RNA, 15 nt, Human
aagccuucagcucca

SEQ ID NO: 3790104 - RNA, 16 nt, Human
aagccuucagcuccag

SEQ ID NO: 3790105 - RNA, 17 nt, Human
aagccuucagcuccagg

SEQ ID NO: 3790106 - RNA, 19 nt, Human
aagccuucagcuccaggga

SEQ ID NO: 3790107 - RNA, 16 nt, Human
aagccuucauugccuu

SEQ ID NO: 3790108 - RNA, 20 nt, Human
aagccuuccccuuauccucc

SEQ ID NO: 3790109 - RNA, 22 nt, Human
aagccuuccccuuauccucccu

SEQ ID NO: 3790110 - RNA, 20 nt, Human
aagccuugauugguguugcc

SEQ ID NO: 3790111 - RNA, 21 nt, Human
aagccuuguguauauuuguau

SEQ ID NO: 3790112 - RNA, 23 nt, Human
aagccuuuacugacccuggggcu

SEQ ID NO: 3790113 - RNA, 19 nt, Human
aagccuuuaguaucagugu

SEQ ID NO: 3790114 - RNA, 15 nt, Human
aagcgaaaaaaucag

SEQ ID NO: 3790115 - RNA, 16 nt, Human
aagcgauauacagaug

SEQ ID NO: 3790116 - RNA, 14 nt, Human
aagcgauucuccug

SEQ ID NO: 3790117 - RNA, 14 nt, Human
aagcgauucuucug

SEQ ID NO: 3790118 - RNA, 15 nt, Human
aagcgauucuucugc

SEQ ID NO: 3790119 - RNA, 23 nt, Human
aagcgcauccaaucucaaggaau

SEQ ID NO: 3790120 - RNA, 20 nt, Human
aagcgccuccaacccuagca

SEQ ID NO: 3790121 - RNA, 21 nt, Human
aagcggcccuaagggaguguc

SEQ ID NO: 3790122 - RNA, 13 nt, Human
aagcggggggagg

SEQ ID NO: 3790123 - RNA, 14 nt, Human
aagcggugucucuc

SEQ ID NO: 3790124 - RNA, 15 nt, Human
aagcguauggcuuua

SEQ ID NO: 3790125 - RNA, 12 nt, Human
aagcguggugga

SEQ ID NO: 3790126 - RNA, 13 nt, Human
aagcuaaaauaaa

SEQ ID NO: 3790127 - RNA, 16 nt, Human
aagcuaaaauaaagaa

SEQ ID NO: 3790128 - RNA, 11 nt, Human
aaggcucuaga

SEQ ID NO: 3790129 - RNA, 12 nt, Human
aaggcucuagau

SEQ ID NO: 3790130 - RNA, 18 nt, Human
aaggcucugaaagccagc

SEQ ID NO: 3790131 - RNA, 21 nt, Human
aaggcucugagagucuagauu

SEQ ID NO: 3790132 - RNA, 14 nt, Human
aaggcucuuuugua

SEQ ID NO: 3790133 - RNA, 16 nt, Human
aaggcugaccaagaga

SEQ ID NO: 3790134 - RNA, 19 nt, Human
aaggcugaccaagagagaa

SEQ ID NO: 3790135 - RNA, 17 nt, Human
aaggcugaggaaaggcc

SEQ ID NO: 3790136 - RNA, 23 nt, Human
aaggcugaggaaaggccagcugg

SEQ ID NO: 3790137 - RNA, 15 nt, Human
aaggcugcuuagaau

SEQ ID NO: 3790138 - RNA, 17 nt, Human
aaggcugugcugcccug

SEQ ID NO: 3790139 - RNA, 21 nt, Human
aaggcugugcugcccugaaga

SEQ ID NO: 3790140 - RNA, 13 nt, Human
aaggcuguguaag

SEQ ID NO: 3790141 - RNA, 21 nt, Human
aaggcuguguaagauuuguuu

SEQ ID NO: 3790142 - RNA, 19 nt, Human
aaggcuguguacacugaca

SEQ ID NO: 3790143 - RNA, 20 nt, Human
aaggcuguuaaauacaggaa

SEQ ID NO: 3790144 - RNA, 22 nt, Human
aaggcuguuaaauacaggaaac

SEQ ID NO: 3790145 - RNA, 13 nt, Human
aaggcuguugcau

SEQ ID NO: 3790146 - RNA, 23 nt, Human
aaggcuguugcaugggcuaauga

SEQ ID NO: 3790147 - RNA, 15 nt, Human
aaggcuuauaaaaca

SEQ ID NO: 3790148 - RNA, 16 nt, Human
aaggcuuauaaaacag

SEQ ID NO: 3790149 - RNA, 13 nt, Human
aaggcuucagucu

SEQ ID NO: 3790150 - RNA, 14 nt, Human
aaggcuugaagcug

SEQ ID NO: 3790151 - RNA, 16 nt, Human
aaggcuugaagcugug

SEQ ID NO: 3790152 - RNA, 14 nt, Human
aaggcuuucucuac

SEQ ID NO: 3790153 - RNA, 23 nt, Human
aaggcuuugauuaguuuucuugu

SEQ ID NO: 3790154 - RNA, 11 nt, Human
aaggcuuugug

SEQ ID NO: 3790155 - RNA, 22 nt, Human
aaggcuuuucaaccacaaaacu

SEQ ID NO: 3790156 - RNA, 16 nt, Human
aaggcuuuuuauaaac

SEQ ID NO: 3790157 - RNA, 13 nt, Human
aagggaaaaauca

SEQ ID NO: 3790158 - RNA, 22 nt, Human
aagggaaagcuucauucuccuu

SEQ ID NO: 3790159 - RNA, 13 nt, Human
aagggaaauauca

SEQ ID NO: 3790160 - RNA, 15 nt, Human
aagggaaauaucauu

SEQ ID NO: 3790161 - RNA, 23 nt, Human
aagggaacagugaggugcccagc

SEQ ID NO: 3790162 - RNA, 14 nt, Human
aagggaagaaacug

SEQ ID NO: 3790163 - RNA, 14 nt, Human
aagggaagacauuu

SEQ ID NO: 3790164 - RNA, 16 nt, Human
aagggaagacauuucu

SEQ ID NO: 3790165 - RNA, 18 nt, Human
aagggaaggaacucuggc

SEQ ID NO: 3790166 - RNA, 19 nt, Human
aagggaagugguucuuaga

SEQ ID NO: 3790167 - RNA, 12 nt, Human
aagggacaugaa

SEQ ID NO: 3790168 - RNA, 19 nt, Human
aagggacauguuuugauaa

SEQ ID NO: 3790169 - RNA, 20 nt, Human
aagggacauguuuugauaaa

SEQ ID NO: 3790170 - RNA, 15 nt, Human
aagggacugagaaau

SEQ ID NO: 3790171 - RNA, 13 nt, Human
aagggagaaaaaa

SEQ ID NO: 3790172 - RNA, 9 nt, Human
aagggagcc

SEQ ID NO: 3790173 - RNA, 18 nt, Human
aagggagcuggcuccagc

SEQ ID NO: 3790174 - RNA, 16 nt, Human
aagggaggcccagcgc

SEQ ID NO: 3790175 - RNA, 18 nt, Human
aagggagggcagagcugg

SEQ ID NO: 3790176 - RNA, 19 nt, Human
aagggagggcagagcuggu

SEQ ID NO: 3790177 - RNA, 20 nt, Human
aagggagggcagagcuggug

SEQ ID NO: 3790178 - RNA, 14 nt, Human
aagggagggcucug

SEQ ID NO: 3790179 - RNA, 17 nt, Human
aagggagggcucugagg

SEQ ID NO: 3790180 - RNA, 18 nt, Human
aagggagggcucugaggc

SEQ ID NO: 3790181 - RNA, 17 nt, Human
aagggaggugggccgug

SEQ ID NO: 3790182 - RNA, 18 nt, Human
aagggaguuuaaaaaugg

SEQ ID NO: 3790183 - RNA, 13 nt, Human
aagggauaaagaa

SEQ ID NO: 3790184 - RNA, 15 nt, Human
aagggaucugguccu

SEQ ID NO: 3790185 - RNA, 17 nt, Human
aagggauggcaagaugu

SEQ ID NO: 3790186 - RNA, 21 nt, Human
aagggauuuucagcccucaga

SEQ ID NO: 3790187 - RNA, 15 nt, Human
aagggcaaauaauga

SEQ ID NO: 3790188 - RNA, 14 nt, Human
aagggcaaaucugc

SEQ ID NO: 3790189 - RNA, 21 nt, Human
aagggcaauaccguguugguu

SEQ ID NO: 3790190 - RNA, 11 nt, Human
aacuuucauuu

SEQ ID NO: 3790191 - RNA, 11 nt, Human
aacuuucugua

SEQ ID NO: 3790192 - RNA, 21 nt, Human
aacuuucuuaauauuuuuaca

SEQ ID NO: 3790193 - RNA, 20 nt, Human
aacuuugaauaaagaauacu

SEQ ID NO: 3790194 - RNA, 18 nt, Human
aacuuuggaguccccuca

SEQ ID NO: 3790195 - RNA, 12 nt, Human
aacuuugggaaa

SEQ ID NO: 3790196 - RNA, 22 nt, Human
aacuuugggaaaacauguuaau

SEQ ID NO: 3790197 - RNA, 13 nt, Human
aacuuuguauagu

SEQ ID NO: 3790198 - RNA, 14 nt, Human
aacuuuguauaguu

SEQ ID NO: 3790199 - RNA, 21 nt, Human
aacuuuguauaguuauguaaa

SEQ ID NO: 3790200 - RNA, 19 nt, Human
aacuuuguggaugucuucc

SEQ ID NO: 3790201 - RNA, 20 nt, Human
aacuuuguuaggccaaagac

SEQ ID NO: 3790202 - RNA, 15 nt, Human
aacuuuuaaacuaca

SEQ ID NO: 3790203 - RNA, 12 nt, Human
aacuuuuauaaa

SEQ ID NO: 3790204 - RNA, 15 nt, Human
aacuuuuauaaacuu

SEQ ID NO: 3790205 - RNA, 16 nt, Human
aacuuuuauaaacuuu

SEQ ID NO: 3790206 - RNA, 17 nt, Human
aacuuuuauaaauuaaa

SEQ ID NO: 3790207 - RNA, 22 nt, Human
aacuuuuauaaauuaaauauau

SEQ ID NO: 3790208 - RNA, 15 nt, Human
aacuuuuccccuguc

SEQ ID NO: 3790209 - RNA, 19 nt, Human
aacuuuucuaacagaaagc

SEQ ID NO: 3790210 - RNA, 12 nt, Human
aacuuuucuaga

SEQ ID NO: 3790211 - RNA, 11 nt, Human
aacuuuuguaa

SEQ ID NO: 3790212 - RNA, 18 nt, Human
aacuuuuguaaagaaauu

SEQ ID NO: 3790213 - RNA, 14 nt, Human
aacuuuuguaaaua

SEQ ID NO: 3790214 - RNA, 14 nt, Human
aacuuuuguacuga

SEQ ID NO: 3790215 - RNA, 13 nt, Human
aacuuuugugaau

SEQ ID NO: 3790216 - RNA, 19 nt, Human
aacuuuugugaauuaggcu

SEQ ID NO: 3790217 - RNA, 23 nt, Human
aacuuuuuauugccuucucacca

SEQ ID NO: 3790218 - RNA, 23 nt, Human
aacuuuuuguucugguccuuuuu

SEQ ID NO: 3790219 - RNA, 15 nt, Human
aacuuuuuuaaauaa

SEQ ID NO: 3790220 - RNA, 21 nt, Human
aacuuuuuuaaauaaacuuuu

SEQ ID NO: 3790221 - RNA, 22 nt, Human
aacuuuuuuaaauaaacuuuuu

SEQ ID NO: 3790222 - RNA, 23 nt, Human
aacuuuuuuauuuaaaaaacuaa

SEQ ID NO: 3790223 - RNA, 13 nt, Human
aacuuuuuuccac

SEQ ID NO: 3790224 - RNA, 19 nt, Human
aacuuuuuugaaauaauaa

SEQ ID NO: 3790225 - RNA, 12 nt, Human
aacuuuuuuggu

SEQ ID NO: 3790226 - RNA, 15 nt, Human
aacuuuuuuucaaug

SEQ ID NO: 3790227 - RNA, 21 nt, Human
aacuuuuuuucuguaccaguu

SEQ ID NO: 3790228 - RNA, 15 nt, Human
aagaaaaaaaaaaga

SEQ ID NO: 3790229 - RNA, 18 nt, Human
aagaaaaaaaaagaaaaa

SEQ ID NO: 3790230 - RNA, 14 nt, Human
aagaaaaaaaaaug

SEQ ID NO: 3790231 - RNA, 19 nt, Human
aagaaaaaaacgaaaacag

SEQ ID NO: 3790232 - RNA, 23 nt, Human
aagaaaaaaauaauuuuaugaac

SEQ ID NO: 3790233 - RNA, 17 nt, Human
aagaaaaaaauguauuu

SEQ ID NO: 3790234 - RNA, 22 nt, Human
aagaaaaaaauguauuuuaugu

SEQ ID NO: 3790235 - RNA, 20 nt, Human
aagaaaaaaaugucaaaagu

SEQ ID NO: 3790236 - RNA, 19 nt, Human
aagaaaaaaauugaaaugu

SEQ ID NO: 3790237 - RNA, 12 nt, Human
aagaaaaaauac

SEQ ID NO: 3790238 - RNA, 16 nt, Human
aagaaaaaauacauuu

SEQ ID NO: 3790239 - RNA, 14 nt, Human
aagaaaaacuguuu

SEQ ID NO: 3790240 - RNA, 11 nt, Human
aagaaaaacuu

SEQ ID NO: 3790241 - RNA, 18 nt, Human
aagaaaaagaaaaagaaa

SEQ ID NO: 3790242 - RNA, 15 nt, Human
aagaaaaagaagaac

SEQ ID NO: 3790243 - RNA, 12 nt, Human
aagaaaaagauu

SEQ ID NO: 3790244 - RNA, 17 nt, Human
aagaaaaaggaugcaca

SEQ ID NO: 3790245 - RNA, 13 nt, Human
aagaaaaauauuu

SEQ ID NO: 3790246 - RNA, 22 nt, Human
aagaaaaaucauguuugcucuc

SEQ ID NO: 3790247 - RNA, 14 nt, Human
aagaaaacaacuuc

SEQ ID NO: 3790248 - RNA, 15 nt, Human
aagaaaacacuguua

SEQ ID NO: 3790249 - RNA, 15 nt, Human
aagaaaagagaagaa

SEQ ID NO: 3790250 - RNA, 16 nt, Human
aagaaaagagaagaag

SEQ ID NO: 3790251 - RNA, 23 nt, Human
aagaaaagagauauuuuaaaaug

SEQ ID NO: 3790252 - RNA, 11 nt, Human
aagaaaagaug

SEQ ID NO: 3790253 - RNA, 14 nt, Human
aagaaaagaugaaa

SEQ ID NO: 3790254 - RNA, 12 nt, Human
aagaaaagauuu

SEQ ID NO: 3790255 - RNA, 22 nt, Human
aagaaaaguagguuuacauuca

SEQ ID NO: 3790256 - RNA, 14 nt, Human
aagaaaaguauuuu

SEQ ID NO: 3790257 - RNA, 21 nt, Human
aagaaaaguauuuugaaguuu

SEQ ID NO: 3790258 - RNA, 20 nt, Human
aagaaaagugcauauuuauc

SEQ ID NO: 3790259 - RNA, 16 nt, Human
aagaaaaguuuaccau

SEQ ID NO: 3790260 - RNA, 15 nt, Human
aagaaaaguuuugua

SEQ ID NO: 3790261 - RNA, 22 nt, Human
aagaaaaguuuuguaaauuucu

SEQ ID NO: 3790262 - RNA, 18 nt, Human
aagaaaauaaaaaaaaga

SEQ ID NO: 3790263 - RNA, 20 nt, Human
aagaaaauaagagcucagga

SEQ ID NO: 3790264 - RNA, 19 nt, Human
aagaaaauacauaagacca

SEQ ID NO: 3790265 - RNA, 16 nt, Human
aagaaaauaccaagga

SEQ ID NO: 3790266 - RNA, 22 nt, Human
aagaaaauagagaugagcuuuc

SEQ ID NO: 3790267 - RNA, 15 nt, Human
aagaaaauaguggug

SEQ ID NO: 3790268 - RNA, 22 nt, Human
aagaaaauaguggugugauuug

SEQ ID NO: 3790269 - RNA, 13 nt, Human
aagaaaauaucac

SEQ ID NO: 3790270 - RNA, 17 nt, Human
aagaaaaucauauugcu

SEQ ID NO: 3790271 - RNA, 16 nt, Human
aagaaaaugaaaugca

SEQ ID NO: 3790272 - RNA, 19 nt, Human
aagaaacaacucuuugaga

SEQ ID NO: 3790273 - RNA, 19 nt, Human
aagaaacagaucuccuggc

SEQ ID NO: 3790274 - RNA, 16 nt, Human
aaggguucccucaaga

SEQ ID NO: 3790275 - RNA, 19 nt, Human
aaggguuuuccacccugga

SEQ ID NO: 3790276 - RNA, 14 nt, Human
aagguaaaauucua

SEQ ID NO: 3790277 - RNA, 17 nt, Human
aagguaaaauucuaaau

SEQ ID NO: 3790278 - RNA, 12 nt, Human
aagguaaaauug

SEQ ID NO: 3790279 - RNA, 16 nt, Human
aagguaaaauugaaag

SEQ ID NO: 3790280 - RNA, 16 nt, Human
aagguaaauaaaaaga

SEQ ID NO: 3790281 - RNA, 18 nt, Human
aagguacaagaagcauuu

SEQ ID NO: 3790282 - RNA, 17 nt, Human
aagguacuguaugauca

SEQ ID NO: 3790283 - RNA, 20 nt, Human
aagguacuguaugaucaaau

SEQ ID NO: 3790284 - RNA, 20 nt, Human
aagguagaaauaucugaaaa

SEQ ID NO: 3790285 - RNA, 14 nt, Human
aagguagacuuuua

SEQ ID NO: 3790286 - RNA, 22 nt, Human
aagguaguucaagaaaugaaga

SEQ ID NO: 3790287 - RNA, 12 nt, Human
aagguaguuuuu

SEQ ID NO: 3790288 - RNA, 15 nt, Human
aagguauaauaaaau

SEQ ID NO: 3790289 - RNA, 23 nt, Human
aagguauaucauucuaaagauag

SEQ ID NO: 3790290 - RNA, 22 nt, Human
aagguauaucuagguuuaugac

SEQ ID NO: 3790291 - RNA, 23 nt, Human
aagguauaucuagguuuaugaca

SEQ ID NO: 3790292 - RNA, 18 nt, Human
aagguauuaaauugaugu

SEQ ID NO: 3790293 - RNA, 22 nt, Human
aagguauuaaauugauguugcu

SEQ ID NO: 3790294 - RNA, 22 nt, Human
aagguauuauacaugugauaca

SEQ ID NO: 3790295 - RNA, 18 nt, Human
aagguauuccuuuugugu

SEQ ID NO: 3790296 - RNA, 19 nt, Human
aagguauuuaaaguauuuu

SEQ ID NO: 3790297 - RNA, 18 nt, Human
aagguauuuaauagguuu

SEQ ID NO: 3790298 - RNA, 14 nt, Human
aaggucaaauuuau

SEQ ID NO: 3790299 - RNA, 19 nt, Human
aaggucaccagcaccaaca

SEQ ID NO: 3790300 - RNA, 14 nt, Human
aaggucaccucacu

SEQ ID NO: 3790301 - RNA, 17 nt, Human
aaggucaccucacucag

SEQ ID NO: 3790302 - RNA, 19 nt, Human
aaggucaccucacucagca

SEQ ID NO: 3790303 - RNA, 14 nt, Human
aaggucacuguuuc

SEQ ID NO: 3790304 - RNA, 18 nt, Human
aaggucacuguuuccugg

SEQ ID NO: 3790305 - RNA, 13 nt, Human
aaggucaucaucg

SEQ ID NO: 3790306 - RNA, 18 nt, Human
aaggucauuuuuuuuaag

SEQ ID NO: 3790307 - RNA, 19 nt, Human
aaggucauuuuuuuuaaga

SEQ ID NO: 3790308 - RNA, 19 nt, Human
aagguccacaggucuagac

SEQ ID NO: 3790309 - RNA, 19 nt, Human
aagguccgguguucuaaga

SEQ ID NO: 3790310 - RNA, 21 nt, Human
aagguccgguguucuaagaug

SEQ ID NO: 3790311 - RNA, 22 nt, Human
aaggucggaggcuugggaccgc

SEQ ID NO: 3790312 - RNA, 18 nt, Human
aaggucguuuuuuucauu

SEQ ID NO: 3790313 - RNA, 19 nt, Human
aaggucuagguggaggugg

SEQ ID NO: 3790314 - RNA, 15 nt, Human
aaggucucauucuuc

SEQ ID NO: 3790315 - RNA, 17 nt, Human
aaggucuguuugcuguu

SEQ ID NO: 3790316 - RNA, 19 nt, Human
aaggucuguuuuguguacu

SEQ ID NO: 3790317 - RNA, 20 nt, Human
aaggucuguuuuguguacuu

SEQ ID NO: 3790318 - RNA, 19 nt, Human
aaggucuuugguucagcua

SEQ ID NO: 3790319 - RNA, 19 nt, Human
aaggugaaacauuuucucc

SEQ ID NO: 3790320 - RNA, 15 nt, Human
aaggugaaggaauau

SEQ ID NO: 3790321 - RNA, 17 nt, Human
aaggugagcauaaauca

SEQ ID NO: 3790322 - RNA, 18 nt, Human
aaggugaggccugucugu

SEQ ID NO: 3790323 - RNA, 21 nt, Human
aaggugaguuugagcugccuu

SEQ ID NO: 3790324 - RNA, 22 nt, Human
aaggugaguuugagcugccuuc

SEQ ID NO: 3790325 - RNA, 22 nt, Human
aaggugauaaaaucauaaguau

SEQ ID NO: 3790326 - RNA, 14 nt, Human
aaggugcaguuccc

SEQ ID NO: 3790327 - RNA, 23 nt, Human
aaggugcaguucccccaaccuca

SEQ ID NO: 3790328 - RNA, 12 nt, Human
aaggugcaucug

SEQ ID NO: 3790329 - RNA, 15 nt, Human
aaggugcuaaaucug

SEQ ID NO: 3790330 - RNA, 15 nt, Human
aaggugcuggaggug

SEQ ID NO: 3790331 - RNA, 20 nt, Human
aaggugcuggaggugggagc

SEQ ID NO: 3790332 - RNA, 20 nt, Human
aaggugcuguugucauugcu

SEQ ID NO: 3790333 - RNA, 22 nt, Human
aaggugcuguugucauugcuuu

SEQ ID NO: 3790334 - RNA, 23 nt, Human
aagguggaccuuuuaaaguguuu

SEQ ID NO: 3790335 - RNA, 14 nt, Human
aagguggauuuugu

SEQ ID NO: 3790336 - RNA, 17 nt, Human
aaggugggccuugcuac

SEQ ID NO: 3790337 - RNA, 22 nt, Human
aaggugggccuugcuaccucaa

SEQ ID NO: 3790338 - RNA, 20 nt, Human
aaggugggcugagcccuggc

SEQ ID NO: 3790339 - RNA, 22 nt, Human
aagguggggguuggcuggguac

SEQ ID NO: 3790340 - RNA, 16 nt, Human
aaggugguaugugugu

SEQ ID NO: 3790341 - RNA, 20 nt, Human
aagguggugggggugcagau

SEQ ID NO: 3790342 - RNA, 15 nt, Human
aaggugguguuucug

SEQ ID NO: 3790343 - RNA, 17 nt, Human
aagguguaacucuaauu

SEQ ID NO: 3790344 - RNA, 20 nt, Human
aagguguagccacaccagga

SEQ ID NO: 3790345 - RNA, 18 nt, Human
aagguguccuacagaaaa

SEQ ID NO: 3790346 - RNA, 15 nt, Human
aaggugucuuccucc

SEQ ID NO: 3790347 - RNA, 22 nt, Human
aagguguucauucacuugcauu

SEQ ID NO: 3790348 - RNA, 15 nt, Human
aagguuauaauuuuu

SEQ ID NO: 3790349 - RNA, 15 nt, Human
aagguuaucagugcu

SEQ ID NO: 3790350 - RNA, 23 nt, Human
aagaacugcauggaccuaacauu

SEQ ID NO: 3790351 - RNA, 13 nt, Human
aagaacuggaaac

SEQ ID NO: 3790352 - RNA, 19 nt, Human
aagaacugucauguaaaca

SEQ ID NO: 3790353 - RNA, 20 nt, Human
aagaacuguguuucaaguuc

SEQ ID NO: 3790354 - RNA, 19 nt, Human
aagaacuuccccauacaaa

SEQ ID NO: 3790355 - RNA, 14 nt, Human
aagaacuuguuuaa

SEQ ID NO: 3790356 - RNA, 18 nt, Human
aagaacuuguuuaauaaa

SEQ ID NO: 3790357 - RNA, 18 nt, Human
aagaacuuuuucuuuucc

SEQ ID NO: 3790358 - RNA, 19 nt, Human
aagaacuuuuucuuuuccc

SEQ ID NO: 3790359 - RNA, 13 nt, Human
aagaagaaaagag

SEQ ID NO: 3790360 - RNA, 14 nt, Human
aagaagaaaagaga

SEQ ID NO: 3790361 - RNA, 18 nt, Human
aagaagaaauaguucugu

SEQ ID NO: 3790362 - RNA, 19 nt, Human
aagaagacaaacuuugcau

SEQ ID NO: 3790363 - RNA, 17 nt, Human
aagaagacauggagacu

SEQ ID NO: 3790364 - RNA, 17 nt, Human
aagaagacauguuuuag

SEQ ID NO: 3790365 - RNA, 14 nt, Human
aagaagagaagcug

SEQ ID NO: 3790366 - RNA, 10 nt, Human
aagaagagac

SEQ ID NO: 3790367 - RNA, 14 nt, Human
aagaagagacagga

SEQ ID NO: 3790368 - RNA, 15 nt, Human
aagaagagcuaucag

SEQ ID NO: 3790369 - RNA, 22 nt, Human
aagaagaggagaaaaaaacuuc

SEQ ID NO: 3790370 - RNA, 14 nt, Human
aagaagauguuuaa

SEQ ID NO: 3790371 - RNA, 21 nt, Human
aagaagcaaccucaguaauuu

SEQ ID NO: 3790372 - RNA, 12 nt, Human
aagaagcaggcu

SEQ ID NO: 3790373 - RNA, 19 nt, Human
aagaagccacagaccuagg

SEQ ID NO: 3790374 - RNA, 14 nt, Human
aagaagcuguugua

SEQ ID NO: 3790375 - RNA, 22 nt, Human
aagaagcuucuaauaaauuaua

SEQ ID NO: 3790376 - RNA, 18 nt, Human
aagaaggaaagaugguua

SEQ ID NO: 3790377 - RNA, 19 nt, Human
aagaaggaaaugaauuucu

SEQ ID NO: 3790378 - RNA, 16 nt, Human
aagaaggaagacuuua

SEQ ID NO: 3790379 - RNA, 11 nt, Human
aagaaggaagu

SEQ ID NO: 3790380 - RNA, 14 nt, Human
aagaaggcaaaaau

SEQ ID NO: 3790381 - RNA, 16 nt, Human
aagaaggcaaaaaugu

SEQ ID NO: 3790382 - RNA, 15 nt, Human
aagaaggcaauauua

SEQ ID NO: 3790383 - RNA, 19 nt, Human
aagaaggcagcagguggca

SEQ ID NO: 3790384 - RNA, 17 nt, Human
aagaagggacugagaga

SEQ ID NO: 3790385 - RNA, 17 nt, Human
aagaagggagaagaaag

SEQ ID NO: 3790386 - RNA, 13 nt, Human
aagaagggaugga

SEQ ID NO: 3790387 - RNA, 22 nt, Human
aagaagggcuagaaccuggagg

SEQ ID NO: 3790388 - RNA, 21 nt, Human
aagaaggguccuucccucucc

SEQ ID NO: 3790389 - RNA, 18 nt, Human
aagaagguggaccuuuua

SEQ ID NO: 3790390 - RNA, 22 nt, Human
aagaagguggaccuuuuaaagu

SEQ ID NO: 3790391 - RNA, 18 nt, Human
aagaagguuuguguuuuu

SEQ ID NO: 3790392 - RNA, 22 nt, Human
aagaaguaaaagcaaaaaagaa

SEQ ID NO: 3790393 - RNA, 23 nt, Human
aagaagucuucucugccuguaag

SEQ ID NO: 3790394 - RNA, 16 nt, Human
aagaagugaaaaucua

SEQ ID NO: 3790395 - RNA, 18 nt, Human
aagaaguggggcagcagc

SEQ ID NO: 3790396 - RNA, 18 nt, Human
aagaaguguccgagaacu

SEQ ID NO: 3790397 - RNA, 14 nt, Human
aagaaguuuaagga

SEQ ID NO: 3790398 - RNA, 19 nt, Human
aagaaguuuauucucauuu

SEQ ID NO: 3790399 - RNA, 20 nt, Human
aagaauaaaauguugaaaag

SEQ ID NO: 3790400 - RNA, 14 nt, Human
aagaauaaacauuu

SEQ ID NO: 3790401 - RNA, 13 nt, Human
aagaauaauaaaa

SEQ ID NO: 3790402 - RNA, 22 nt, Human
aagaauaaucacgcuuuccuga

SEQ ID NO: 3790403 - RNA, 21 nt, Human
aagaauaauucaauuuuaaag

SEQ ID NO: 3790404 - RNA, 22 nt, Human
aagaauaauucaauuuuaaaga

SEQ ID NO: 3790405 - RNA, 13 nt, Human
aagaauaauuuau

SEQ ID NO: 3790406 - RNA, 16 nt, Human
aagaauacaaacauau

SEQ ID NO: 3790407 - RNA, 16 nt, Human
aagaauacuucucauu

SEQ ID NO: 3790408 - RNA, 15 nt, Human
aagaauacuugaacu

SEQ ID NO: 3790409 - RNA, 16 nt, Human
aagaauacuugaacuu

SEQ ID NO: 3790410 - RNA, 16 nt, Human
aagaauagcaucugua

SEQ ID NO: 3790411 - RNA, 17 nt, Human
aagaauagcauuguaaa

SEQ ID NO: 3790412 - RNA, 18 nt, Human
aagaauagcauuguaaaa

SEQ ID NO: 3790413 - RNA, 22 nt, Human
aagaauaggacuuguuuuuguu

SEQ ID NO: 3790414 - RNA, 12 nt, Human
aagaauauauau

SEQ ID NO: 3790415 - RNA, 19 nt, Human
aagaauauccuuuaaaauu

SEQ ID NO: 3790416 - RNA, 18 nt, Human
aagaauauguuuccuugu

SEQ ID NO: 3790417 - RNA, 16 nt, Human
aagaauauucagagaa

SEQ ID NO: 3790418 - RNA, 20 nt, Human
aagauggaauuuaucaaacc

SEQ ID NO: 3790419 - RNA, 16 nt, Human
aagauggaguuucuaa

SEQ ID NO: 3790420 - RNA, 17 nt, Human
aagauggaguuucuaag

SEQ ID NO: 3790421 - RNA, 16 nt, Human
aagauggauucucaga

SEQ ID NO: 3790422 - RNA, 21 nt, Human
aagauggcccagcuccccaag

SEQ ID NO: 3790423 - RNA, 22 nt, Human
aagauggcccagcuccccaaga

SEQ ID NO: 3790424 - RNA, 15 nt, Human
aagauggcccauccu

SEQ ID NO: 3790425 - RNA, 17 nt, Human
aagauggcugacuuugc

SEQ ID NO: 3790426 - RNA, 16 nt, Human
aagauggcugugccuc

SEQ ID NO: 3790427 - RNA, 18 nt, Human
aagauggcugugccucug

SEQ ID NO: 3790428 - RNA, 18 nt, Human
aagaugggggcagggcug

SEQ ID NO: 3790429 - RNA, 15 nt, Human
aagauggggucugua

SEQ ID NO: 3790430 - RNA, 21 nt, Human
aagauggggucuguaaaaucu

SEQ ID NO: 3790431 - RNA, 22 nt, Human
aagauggguccaggauuccucu

SEQ ID NO: 3790432 - RNA, 14 nt, Human
aagaugggugggga

SEQ ID NO: 3790433 - RNA, 22 nt, Human
aagauguagaggagaaacugga

SEQ ID NO: 3790434 - RNA, 20 nt, Human
aagauguccuccuuguucua

SEQ ID NO: 3790435 - RNA, 18 nt, Human
aagaugucuguuugcuga

SEQ ID NO: 3790436 - RNA, 13 nt, Human
aagaugugaauua

SEQ ID NO: 3790437 - RNA, 16 nt, Human
aagaugugaauuauug

SEQ ID NO: 3790438 - RNA, 18 nt, Human
aagaugugacauguuuua

SEQ ID NO: 3790439 - RNA, 14 nt, Human
aagaugugauauuc

SEQ ID NO: 3790440 - RNA, 19 nt, Human
aagaugugauauucuaaga

SEQ ID NO: 3790441 - RNA, 20 nt, Human
aagaugugcagcauuucacu

SEQ ID NO: 3790442 - RNA, 19 nt, Human
aagaugugucuucaauuug

SEQ ID NO: 3790443 - RNA, 15 nt, Human
aagauguguucuuau

SEQ ID NO: 3790444 - RNA, 16 nt, Human
aagauguguucuuauu

SEQ ID NO: 3790445 - RNA, 15 nt, Human
aagauguuauacaac

SEQ ID NO: 3790446 - RNA, 22 nt, Human
aagauguuauauuuuucuuaaa

SEQ ID NO: 3790447 - RNA, 20 nt, Human
aagauguuaugguguuuaga

SEQ ID NO: 3790448 - RNA, 21 nt, Human
aagauguugaagaauacaguu

SEQ ID NO: 3790449 - RNA, 16 nt, Human
aagauguugauuuuua

SEQ ID NO: 3790450 - RNA, 22 nt, Human
aagauguugauuuuuacugugu

SEQ ID NO: 3790451 - RNA, 15 nt, Human
aagauguugugucuu

SEQ ID NO: 3790452 - RNA, 18 nt, Human
aagauguugugucuugug

SEQ ID NO: 3790453 - RNA, 14 nt, Human
aagauguuuaacuu

SEQ ID NO: 3790454 - RNA, 17 nt, Human
aagauuaaacagaugau

SEQ ID NO: 3790455 - RNA, 19 nt, Human
aagauuaauagcauucgaa

SEQ ID NO: 3790456 - RNA, 21 nt, Human
aagauuacaaaucagaaguca

SEQ ID NO: 3790457 - RNA, 14 nt, Human
aagauuauaauugu

SEQ ID NO: 3790458 - RNA, 20 nt, Human
aagauuauagauucuaaaga

SEQ ID NO: 3790459 - RNA, 21 nt, Human
aagauuauagauucuaaagau

SEQ ID NO: 3790460 - RNA, 18 nt, Human
aagauuauuuuuuaugag

SEQ ID NO: 3790461 - RNA, 21 nt, Human
aagauucaaugccccugaauu

SEQ ID NO: 3790462 - RNA, 19 nt, Human
aagauucacaccugacucu

SEQ ID NO: 3790463 - RNA, 13 nt, Human
aagauucagcuag

SEQ ID NO: 3790464 - RNA, 20 nt, Human
aagauucauuuuuaaucaug

SEQ ID NO: 3790465 - RNA, 18 nt, Human
aagauucccagagacagg

SEQ ID NO: 3790466 - RNA, 12 nt, Human
aagauucuagau

SEQ ID NO: 3790467 - RNA, 13 nt, Human
aagauucuagaug

SEQ ID NO: 3790468 - RNA, 15 nt, Human
aagauucuagaugau

SEQ ID NO: 3790469 - RNA, 20 nt, Human
aagauucuauaguucuagac

SEQ ID NO: 3790470 - RNA, 19 nt, Human
aagauucuauguuaauauu

SEQ ID NO: 3790471 - RNA, 19 nt, Human
aagauucucuauguaucaa

SEQ ID NO: 3790472 - RNA, 19 nt, Human
aagauucuucccauucucc

SEQ ID NO: 3790473 - RNA, 21 nt, Human
aagauucuucccauucuccau

SEQ ID NO: 3790474 - RNA, 23 nt, Human
aagauucuucccauucuccauuu

SEQ ID NO: 3790475 - RNA, 16 nt, Human
aagauucuuuuaaauu

SEQ ID NO: 3790476 - RNA, 17 nt, Human
aagauucuuuuaaauua

SEQ ID NO: 3790477 - RNA, 20 nt, Human
aagauucuuuuaaauuagaa

SEQ ID NO: 3790478 - RNA, 16 nt, Human
aagauucuuuuucuga

SEQ ID NO: 3790479 - RNA, 21 nt, Human
aagauugaaaaggaagaucag

SEQ ID NO: 3790480 - RNA, 22 nt, Human
aagauugagaaguuacuuucca

SEQ ID NO: 3790481 - RNA, 16 nt, Human
aagauugauaucuaua

SEQ ID NO: 3790482 - RNA, 16 nt, Human
aagauugcugaaauuu

SEQ ID NO: 3790483 - RNA, 19 nt, Human
aagauugcuuaauaaauug

SEQ ID NO: 3790484 - RNA, 21 nt, Human
aagauugguguuuuuuucuau

SEQ ID NO: 3790485 - RNA, 21 nt, Human
aagauuguaauuaaaaugaua

SEQ ID NO: 3790486 - RNA, 14 nt, Human
aagauuguauugcu

SEQ ID NO: 3790487 - RNA, 17 nt, Human
aagauugucauuaguga

SEQ ID NO: 3790488 - RNA, 20 nt, Human
aagauugugggggaaaaaua

SEQ ID NO: 3790489 - RNA, 20 nt, Human
aagauuguuauuaaauguag

SEQ ID NO: 3790490 - RNA, 15 nt, Human
aagauuguuccugcu

SEQ ID NO: 3790491 - RNA, 13 nt, Human
aagauuguuuauc

SEQ ID NO: 3790492 - RNA, 15 nt, Human
aagauuguuuaucua

SEQ ID NO: 3790493 - RNA, 20 nt, Human
aagauuguuuaucuagaugu

SEQ ID NO: 3790494 - RNA, 12 nt, Human
aagauuuaagca

SEQ ID NO: 3790495 - RNA, 13 nt, Human
aagauuuaauauu

SEQ ID NO: 3790496 - RNA, 18 nt, Human
aagauuuaauuugccaaa

SEQ ID NO: 3790497 - RNA, 21 nt, Human
aagauuuagaaaaaaguuuac

SEQ ID NO: 3790498 - RNA, 18 nt, Human
aagauuuaucaaaucagu

SEQ ID NO: 3790499 - RNA, 12 nt, Human
aagauuuauguu

SEQ ID NO: 3790500 - RNA, 14 nt, Human
aagauuuauuuugu

SEQ ID NO: 3790501 - RNA, 23 nt, Human
aagauuuauuuuguuaaaaucuc

SEQ ID NO: 3790502 - RNA, 16 nt, Human
aagauuuccauauaaa

SEQ ID NO: 3790503 - RNA, 16 nt, Human
aagauuuccuugugca

SEQ ID NO: 3790504 - RNA, 17 nt, Human
aagauuucuaaauaaaa

SEQ ID NO: 3790505 - RNA, 18 nt, Human
aagauuucuaaauaaaag

SEQ ID NO: 3790506 - RNA, 17 nt, Human
aagauuuggaagcucuu

SEQ ID NO: 3790507 - RNA, 17 nt, Human
aagauuuguuuuuaaac

SEQ ID NO: 3790508 - RNA, 23 nt, Human
aagauuuguuuuuaaacuguaca

SEQ ID NO: 3790509 - RNA, 17 nt, Human
aagauuuuaaucaaguu

SEQ ID NO: 3790510 - RNA, 13 nt, Human
aagauuuucagaa

SEQ ID NO: 3790511 - RNA, 16 nt, Human
aagauuuuccucuugu

SEQ ID NO: 3790512 - RNA, 21 nt, Human
aagauuuuccuuuuuuauaca

SEQ ID NO: 3790513 - RNA, 23 nt, Human
aagauuuugaaaacuacauuuua

SEQ ID NO: 3790514 - RNA, 14 nt, Human
aagauuuuuuaaua

SEQ ID NO: 3790515 - RNA, 17 nt, Human
aagauuuuuuaauaauu

SEQ ID NO: 3790516 - RNA, 20 nt, Human
aagauuuuuuaauuguuuaa

SEQ ID NO: 3790517 - RNA, 14 nt, Human
aagauuuuuucauu

SEQ ID NO: 3790518 - RNA, 23 nt, Human
aagauuuuuuuuuuuucucucaa

SEQ ID NO: 3790519 - RNA, 15 nt, Human
aagcaaaaaagaaaa

SEQ ID NO: 3790520 - RNA, 20 nt, Human
aagcaaaaacgaaagcuggg

SEQ ID NO: 3790521 - RNA, 12 nt, Human
aagcaaaaaugc

SEQ ID NO: 3790522 - RNA, 17 nt, Human
aagcaaaaaugcuaaua

SEQ ID NO: 3790523 - RNA, 11 nt, Human
aagcaaaagaa

SEQ ID NO: 3790524 - RNA, 13 nt, Human
aagcaaaagaaaa

SEQ ID NO: 3790525 - RNA, 14 nt, Human
aagcaaaagaaaaa

SEQ ID NO: 3790526 - RNA, 15 nt, Human
aagcaaaagaaaaag

SEQ ID NO: 3790527 - RNA, 12 nt, Human
aagcaaaaggca

SEQ ID NO: 3790528 - RNA, 17 nt, Human
aagcaaaaucauggaau

SEQ ID NO: 3790529 - RNA, 13 nt, Human
aagcaaaauccug

SEQ ID NO: 3790530 - RNA, 22 nt, Human
aagcaaaauuauagaaguuuag

SEQ ID NO: 3790531 - RNA, 12 nt, Human
aagcaaacacau

SEQ ID NO: 3790532 - RNA, 13 nt, Human
aagcaaacacauu

SEQ ID NO: 3790533 - RNA, 13 nt, Human
aagcaaacccaga

SEQ ID NO: 3790534 - RNA, 22 nt, Human
aagcaaacugguuauuuaaaau

SEQ ID NO: 3790535 - RNA, 22 nt, Human
aagcaaagacuuuccucuuagu

SEQ ID NO: 3790536 - RNA, 17 nt, Human
aagcaaagcacagagag

SEQ ID NO: 3790537 - RNA, 14 nt, Human
aagcaaauaaauau

SEQ ID NO: 3790538 - RNA, 23 nt, Human
aagcaaauacuuagcaaaaagug

SEQ ID NO: 3790539 - RNA, 17 nt, Human
aagcaaaucgaaugaaa

SEQ ID NO: 3790540 - RNA, 18 nt, Human
aagcaaaucgaaugaaau

SEQ ID NO: 3790541 - RNA, 17 nt, Human
aagcaacaauuuucaga

SEQ ID NO: 3790542 - RNA, 22 nt, Human
aagcaaccucaguaauuuagaa

SEQ ID NO: 3790543 - RNA, 16 nt, Human
aagcaacugucuauuu

SEQ ID NO: 3790544 - RNA, 15 nt, Human
aagcaagagagaugu

SEQ ID NO: 3790545 - RNA, 18 nt, Human
aagcaagagagauguuuu

SEQ ID NO: 3790546 - RNA, 15 nt, Human
aagcaagauuucaga

SEQ ID NO: 3790547 - RNA, 16 nt, Human
aagcaagauuucagau

SEQ ID NO: 3790548 - RNA, 16 nt, Human
aagcaagcaacacaga

SEQ ID NO: 3790549 - RNA, 14 nt, Human
aagcaaggcggugg

SEQ ID NO: 3790550 - RNA, 19 nt, Human
aagcaaguaaaaaggcuaa

SEQ ID NO: 3790551 - RNA, 20 nt, Human
aagcaaguaaaaaggcuaaa

SEQ ID NO: 3790552 - RNA, 19 nt, Human
aagcaaguucgucuguugu

SEQ ID NO: 3790553 - RNA, 19 nt, Human
aagcaauaaaauuuuuuug

SEQ ID NO: 3790554 - RNA, 21 nt, Human
aagcaauaauggucccaucca

SEQ ID NO: 3790555 - RNA, 13 nt, Human
aagcaauagaaac

SEQ ID NO: 3790556 - RNA, 22 nt, Human
aauaucaguuacucagcccugg

SEQ ID NO: 3790557 - RNA, 13 nt, Human
aauaucauucagc

SEQ ID NO: 3790558 - RNA, 20 nt, Human
aauauccaauugcugcuugu

SEQ ID NO: 3790559 - RNA, 14 nt, Human
aauauccauauuaa

SEQ ID NO: 3790560 - RNA, 17 nt, Human
aauaucccggggguggg

SEQ ID NO: 3790561 - RNA, 16 nt, Human
aauaucccuacaugua

SEQ ID NO: 3790562 - RNA, 15 nt, Human
aauaaaaaauuauga

SEQ ID NO: 3790563 - RNA, 18 nt, Human
aauaaaaacccacaaaaa

SEQ ID NO: 3790564 - RNA, 19 nt, Human
aauaaaaacugacuccuua

SEQ ID NO: 3790565 - RNA, 15 nt, Human
aauaaaaagaaaggc

SEQ ID NO: 3790566 - RNA, 15 nt, Human
aauauuuauugcuuu

SEQ ID NO: 3790567 - RNA, 21 nt, Human
aauauuuauugcuuuauaaau

SEQ ID NO: 3790568 - RNA, 11 nt, Human
aauauuuauuu

SEQ ID NO: 3790569 - RNA, 15 nt, Human
aauauuuauuuuaau

SEQ ID NO: 3790570 - RNA, 18 nt, Human
aauauuuauuuuaauaau

SEQ ID NO: 3790571 - RNA, 14 nt, Human
aauauuucaagaca

SEQ ID NO: 3790572 - RNA, 16 nt, Human
aauauuucaagacauu

SEQ ID NO: 3790573 - RNA, 15 nt, Human
aauauuucagauaau

SEQ ID NO: 3790574 - RNA, 16 nt, Human
aauauuuccauaugga

SEQ ID NO: 3790575 - RNA, 19 nt, Human
aauauuuccuuaaacugug

SEQ ID NO: 3790576 - RNA, 13 nt, Human
aauauuucuauug

SEQ ID NO: 3790577 - RNA, 11 nt, Human
aauauuugaau

SEQ ID NO: 3790578 - RNA, 13 nt, Human
aauauuugaaucu

SEQ ID NO: 3790579 - RNA, 18 nt, Human
aauauuugguuuuccugu

SEQ ID NO: 3790580 - RNA, 11 nt, Human
aauauuuuaaa

SEQ ID NO: 3790581 - RNA, 16 nt, Human
aauauuuuaaagaauu

SEQ ID NO: 3790582 - RNA, 14 nt, Human
aauauuuuaagcau

SEQ ID NO: 3790583 - RNA, 21 nt, Human
aauauuuuaauuuuuaaaugc

SEQ ID NO: 3790584 - RNA, 21 nt, Human
aauauuuuagguguaaaauaa

SEQ ID NO: 3790585 - RNA, 18 nt, Human
aauauuuuaugauccagc

SEQ ID NO: 3790586 - RNA, 12 nt, Human
aauauuuuaugg

SEQ ID NO: 3790587 - RNA, 14 nt, Human
aauauuuuauucaa

SEQ ID NO: 3790588 - RNA, 13 nt, Human
aauauuuucagua

SEQ ID NO: 3790589 - RNA, 17 nt, Human
aauauuuucauuauaca

SEQ ID NO: 3790590 - RNA, 13 nt, Human
aauauuuucugug

SEQ ID NO: 3790591 - RNA, 15 nt, Human
aauauuuucugugug

SEQ ID NO: 3790592 - RNA, 16 nt, Human
aauauuuucugugugu

SEQ ID NO: 3790593 - RNA, 22 nt, Human
aauauuuucuguguguuccugg

SEQ ID NO: 3790594 - RNA, 23 nt, Human
aauauuuucuguguguuccuggc

SEQ ID NO: 3790595 - RNA, 13 nt, Human
aauauuuugaauc

SEQ ID NO: 3790596 - RNA, 16 nt, Human
aauauuuugauaauaa

SEQ ID NO: 3790597 - RNA, 21 nt, Human
aauauuuuguauuauugcugu

SEQ ID NO: 3790598 - RNA, 13 nt, Human
aauauuuugucua

SEQ ID NO: 3790599 - RNA, 15 nt, Human
aauauuuugucuaaa

SEQ ID NO: 3790600 - RNA, 16 nt, Human
aauauuuugucuaaaa

SEQ ID NO: 3790601 - RNA, 16 nt, Human
aauauuuuuauauaca

SEQ ID NO: 3790602 - RNA, 18 nt, Human
aauauuuuuauauacaga

SEQ ID NO: 3790603 - RNA, 19 nt, Human
aauauuuuuauauuuccuu

SEQ ID NO: 3790604 - RNA, 19 nt, Human
aauauuuuuuauauauaca

SEQ ID NO: 3790605 - RNA, 21 nt, Human
aauauuuuuuauauauacagu

SEQ ID NO: 3790606 - RNA, 17 nt, Human
aauauuuuuuuguagau

SEQ ID NO: 3790607 - RNA, 14 nt, Human
aaucaaaaauugaa

SEQ ID NO: 3790608 - RNA, 20 nt, Human
aaucaaaauaacgccccaga

SEQ ID NO: 3790609 - RNA, 16 nt, Human
aaucaaaaucucucca

SEQ ID NO: 3790610 - RNA, 19 nt, Human
aaucaaaaucucuccacuu

SEQ ID NO: 3790611 - RNA, 13 nt, Human
aaucaaacauuuu

SEQ ID NO: 3790612 - RNA, 22 nt, Human
aaucaaagcaaugcauuuugga

SEQ ID NO: 3790613 - RNA, 16 nt, Human
aaucaaauaaguauuu

SEQ ID NO: 3790614 - RNA, 18 nt, Human
aaucaaauaaguauuuau

SEQ ID NO: 3790615 - RNA, 16 nt, Human
aaucaaauaauaccuu

SEQ ID NO: 3790616 - RNA, 15 nt, Human
aaucaaauaugcaaa

SEQ ID NO: 3790617 - RNA, 22 nt, Human
aaucaaauaugcaaagcacuga

SEQ ID NO: 3790618 - RNA, 17 nt, Human
aaucaacaccuuaauau

SEQ ID NO: 3790619 - RNA, 13 nt, Human
aaucaacagaagc

SEQ ID NO: 3790620 - RNA, 20 nt, Human
aaucaaccaccuauuuuuga

SEQ ID NO: 3790621 - RNA, 16 nt, Human
aaucaacugaaagugu

SEQ ID NO: 3790622 - RNA, 13 nt, Human
aaucaacuuuuua

SEQ ID NO: 3790623 - RNA, 22 nt, Human
aaucaagagccuuaaaacauca

SEQ ID NO: 3790624 - RNA, 13 nt, Human
aaucaagagcugc

SEQ ID NO: 3790625 - RNA, 14 nt, Human
aaucaagagcugcc

SEQ ID NO: 3790626 - RNA, 12 nt, Human
aaucaagauaaa

SEQ ID NO: 3790627 - RNA, 15 nt, Human
aaucaagauaaagga

SEQ ID NO: 3790628 - RNA, 16 nt, Human
aaucaagcaagccucu

SEQ ID NO: 3790629 - RNA, 16 nt, Human
aaucaagcagguuaga

SEQ ID NO: 3790630 - RNA, 15 nt, Human
aaucaagcuucaguu

SEQ ID NO: 3790631 - RNA, 18 nt, Human
aaucaagggucaggccuu

SEQ ID NO: 3790632 - RNA, 17 nt, Human
aaucaagucuguuuacu

SEQ ID NO: 3790633 - RNA, 19 nt, Human
aaucaaguuuccaagcaaa

SEQ ID NO: 3790634 - RNA, 13 nt, Human
aaucaauaaacga

SEQ ID NO: 3790635 - RNA, 15 nt, Human
aaucaauaaagaaaa

SEQ ID NO: 3790636 - RNA, 14 nt, Human
aaucaauacacuag

SEQ ID NO: 3790637 - RNA, 12 nt, Human
aaucaauaguug

SEQ ID NO: 3790638 - RNA, 13 nt, Human
aaucaaugaauau

SEQ ID NO: 3790639 - RNA, 14 nt, Human
aaucaaugaauauu

SEQ ID NO: 3790640 - RNA, 22 nt, Human
aaucaaugcaagagugauugca

SEQ ID NO: 3790641 - RNA, 22 nt, Human
aaucaauuaauuuuuuuauugu

SEQ ID NO: 3790642 - RNA, 15 nt, Human
aaucaauucuaguca

SEQ ID NO: 3790643 - RNA, 20 nt, Human
aaucaauuuaaacccauuuu

SEQ ID NO: 3790644 - RNA, 12 nt, Human
aaucaauuuaag

SEQ ID NO: 3790645 - RNA, 13 nt, Human
aaucacauccugg

SEQ ID NO: 3790646 - RNA, 15 nt, Human
aaucaccaaaggcuc

SEQ ID NO: 3790647 - RNA, 13 nt, Human
aaucaccauguaa

SEQ ID NO: 3790648 - RNA, 15 nt, Human
aaucaccgaaaacgu

SEQ ID NO: 3790649 - RNA, 21 nt, Human
aaucaccgaaaacguggcugc

SEQ ID NO: 3790650 - RNA, 19 nt, Human
aaucaccgaugcaaacauu

SEQ ID NO: 3790651 - RNA, 16 nt, Human
aaucacgcuuuuugaa

SEQ ID NO: 3790652 - RNA, 16 nt, Human
aaucacuaacauuaua

SEQ ID NO: 3790653 - RNA, 22 nt, Human
aaucacuaacauuauauugcaa

SEQ ID NO: 3790654 - RNA, 22 nt, Human
aaucacucuuguggauguuuua

SEQ ID NO: 3790655 - RNA, 13 nt, Human
aaucacuguguau

SEQ ID NO: 3790656 - RNA, 16 nt, Human
aaucacuguguauauu

SEQ ID NO: 3790657 - RNA, 19 nt, Human
aaucacuguguauauuuga

SEQ ID NO: 3790658 - RNA, 14 nt, Human
aaucacuguuuuua

SEQ ID NO: 3790659 - RNA, 19 nt, Human
aaucacuuaacauuccuaa

SEQ ID NO: 3790660 - RNA, 14 nt, Human
aaucacuuccauag

SEQ ID NO: 3790661 - RNA, 16 nt, Human
aaucacuugauucaua

SEQ ID NO: 3790662 - RNA, 21 nt, Human
aaucacuugauucauaaagau

SEQ ID NO: 3790663 - RNA, 13 nt, Human
aaucacuuugucu

SEQ ID NO: 3790664 - RNA, 16 nt, Human
aaucacuuugucuaac

SEQ ID NO: 3790665 - RNA, 14 nt, Human
aaucagaaauuuuu

SEQ ID NO: 3790666 - RNA, 13 nt, Human
aaucagaauuaga

SEQ ID NO: 3790667 - RNA, 13 nt, Human
aaucagacaaagu

SEQ ID NO: 3790668 - RNA, 17 nt, Human
aaucagacuaugaaguu

SEQ ID NO: 3790669 - RNA, 16 nt, Human
aaucagagaaggaaca

SEQ ID NO: 3790670 - RNA, 18 nt, Human
aaucagagaccaggcccu

SEQ ID NO: 3790671 - RNA, 15 nt, Human
aaucagaguagaaau

SEQ ID NO: 3790672 - RNA, 17 nt, Human
aaucagaguagaaauaa

SEQ ID NO: 3790673 - RNA, 14 nt, Human
aaucagauuuuccu

SEQ ID NO: 3790674 - RNA, 12 nt, Human
aaucagcacuga

SEQ ID NO: 3790675 - RNA, 18 nt, Human
aaucagcauucucacucc

SEQ ID NO: 3790676 - RNA, 14 nt, Human
aaucagcauuuagu

SEQ ID NO: 3790677 - RNA, 18 nt, Human
aaucagccaaguuuuaua

SEQ ID NO: 3790678 - RNA, 19 nt, Human
aaucagccaauuauguuaa

SEQ ID NO: 3790679 - RNA, 21 nt, Human
aaucagccaauuauguuaaac

SEQ ID NO: 3790680 - RNA, 17 nt, Human
aaucagccuacaggccu

SEQ ID NO: 3790681 - RNA, 16 nt, Human
aaucagccucuuaaag

SEQ ID NO: 3790682 - RNA, 16 nt, Human
aaucagcuauuuugug

SEQ ID NO: 3790683 - RNA, 12 nt, Human
aaucagcugcuu

SEQ ID NO: 3790684 - RNA, 17 nt, Human
aaucagcugcuuuguua

SEQ ID NO: 3790685 - RNA, 18 nt, Human
aaucaggaauauuuucca

SEQ ID NO: 3790686 - RNA, 21 nt, Human
aaucaggguuaguauugucca

SEQ ID NO: 3790687 - RNA, 16 nt, Human
aaucagguggcuuuug

SEQ ID NO: 3790688 - RNA, 21 nt, Human
aaucagguuuucuuuuaagaa

SEQ ID NO: 3790689 - RNA, 14 nt, Human
aaucaguaagaggu

SEQ ID NO: 3790690 - RNA, 11 nt, Human
aaucaguauau

SEQ ID NO: 3790691 - RNA, 19 nt, Human
aaucagucagugcaaaugu

SEQ ID NO: 3790692 - RNA, 21 nt, Human
aaucagucagugcaaauguca

SEQ ID NO: 3790693 - RNA, 22 nt, Human
aaucagucauguguaauaugca

SEQ ID NO: 3790694 - RNA, 18 nt, Human
aaucagugggcaggauaa

SEQ ID NO: 3790695 - RNA, 24 nt, Human
aaucagugggcaggauaaacugaa

SEQ ID NO: 3790696 - RNA, 17 nt, Human
aaucaguguagccccaa

SEQ ID NO: 3790697 - RNA, 14 nt, Human
aaucagugugucua

SEQ ID NO: 3790698 - RNA, 15 nt, Human
aaucaguuaguuuuu

SEQ ID NO: 3790699 - RNA, 22 nt, Human
aaucaguuauacaguuauaaaa

SEQ ID NO: 3790700 - RNA, 18 nt, Human
aaucauaaacugugugca

SEQ ID NO: 3790701 - RNA, 16 nt, Human
aaucauaaguauuugg

SEQ ID NO: 3790702 - RNA, 23 nt, Human
aaucauaggcaccuuuuacugug

SEQ ID NO: 3790703 - RNA, 15 nt, Human
aaucauaguuacugu

SEQ ID NO: 3790704 - RNA, 19 nt, Human
aaucauaguuacuguguaa

SEQ ID NO: 3790705 - RNA, 18 nt, Human
aaucauauaaauagaaug

SEQ ID NO: 3790706 - RNA, 19 nt, Human
aaucauauugaugaaaaga

SEQ ID NO: 3790707 - RNA, 18 nt, Human
aaucaucaagaagggcug

SEQ ID NO: 3790708 - RNA, 22 nt, Human
aaucaucagaaaggaaaaacaa

SEQ ID NO: 3790709 - RNA, 18 nt, Human
aauaacccauaauugaag

SEQ ID NO: 3790710 - RNA, 16 nt, Human
aauaaccccaaaauga

SEQ ID NO: 3790711 - RNA, 17 nt, Human
aauaaccccaaaaugaa

SEQ ID NO: 3790712 - RNA, 18 nt, Human
aauaacccuuugguuuuu

SEQ ID NO: 3790713 - RNA, 19 nt, Human
aauaaccuuccauacauuu

SEQ ID NO: 3790714 - RNA, 15 nt, Human
aauaacgauaaaaga

SEQ ID NO: 3790715 - RNA, 22 nt, Human
aauaacguuuaagccaaaacaa

SEQ ID NO: 3790716 - RNA, 15 nt, Human
aauaacuaaaaggua

SEQ ID NO: 3790717 - RNA, 13 nt, Human
aauaacuaaaaug

SEQ ID NO: 3790718 - RNA, 19 nt, Human
aauaacuacuguguuccug

SEQ ID NO: 3790719 - RNA, 14 nt, Human
aauaacuccuucuu

SEQ ID NO: 3790720 - RNA, 19 nt, Human
aauaacucuguggcauuau

SEQ ID NO: 3790721 - RNA, 15 nt, Human
aauaacugaauuugg

SEQ ID NO: 3790722 - RNA, 21 nt, Human
aauaacuggaaaacagaacac

SEQ ID NO: 3790723 - RNA, 21 nt, Human
aauaacuggaacaaauuauuu

SEQ ID NO: 3790724 - RNA, 16 nt, Human
aauaacuguguacugu

SEQ ID NO: 3790725 - RNA, 15 nt, Human
aauaacuucaguccu

SEQ ID NO: 3790726 - RNA, 15 nt, Human
aauaacuucugaccu

SEQ ID NO: 3790727 - RNA, 13 nt, Human
aauaagaaacuuu

SEQ ID NO: 3790728 - RNA, 15 nt, Human
aauaagaaaguuuca

SEQ ID NO: 3790729 - RNA, 21 nt, Human
aaucauggaaugguuauaaaa

SEQ ID NO: 3790730 - RNA, 21 nt, Human
aaucauggcuaagcuuaaaaa

SEQ ID NO: 3790731 - RNA, 17 nt, Human
aaucauggugcucagag

SEQ ID NO: 3790732 - RNA, 15 nt, Human
aaucaugguuuuucu

SEQ ID NO: 3790733 - RNA, 14 nt, Human
aaucauguacauuu

SEQ ID NO: 3790734 - RNA, 19 nt, Human
aaucauguacauuucugaa

SEQ ID NO: 3790735 - RNA, 23 nt, Human
aaucaugucagucugcuuagaaa

SEQ ID NO: 3790736 - RNA, 22 nt, Human
aaucauguccauacacuuuguu

SEQ ID NO: 3790737 - RNA, 15 nt, Human
aaucauguguguuaa

SEQ ID NO: 3790738 - RNA, 16 nt, Human
aaucauguuucuuuga

SEQ ID NO: 3790739 - RNA, 16 nt, Human
aaucauucagaaaugu

SEQ ID NO: 3790740 - RNA, 20 nt, Human
aaucauuguaaacauuaguu

SEQ ID NO: 3790741 - RNA, 16 nt, Human
aaucauuguacaguuu

SEQ ID NO: 3790742 - RNA, 18 nt, Human
aaucauuguacaguuugu

SEQ ID NO: 3790743 - RNA, 14 nt, Human
aaucauuguuuuga

SEQ ID NO: 3790744 - RNA, 16 nt, Human
aaucauuguuuugaau

SEQ ID NO: 3790745 - RNA, 19 nt, Human
aaucauuguuuugaauauu

SEQ ID NO: 3790746 - RNA, 20 nt, Human
aaucauuuccccauaacuca

SEQ ID NO: 3790747 - RNA, 13 nt, Human
aaucauuucucac

SEQ ID NO: 3790748 - RNA, 22 nt, Human
aaucauuucugcaucagcugcu

SEQ ID NO: 3790749 - RNA, 11 nt, Human
aaucauuuguu

SEQ ID NO: 3790750 - RNA, 14 nt, Human
aaucauuuguuuac

SEQ ID NO: 3790751 - RNA, 17 nt, Human
aaucauuuuaauuauua

SEQ ID NO: 3790752 - RNA, 20 nt, Human
aaucauuuuacccuuggcuc

SEQ ID NO: 3790753 - RNA, 17 nt, Human
aaucauuuuaggaaagg

SEQ ID NO: 3790754 - RNA, 23 nt, Human
aaucauuuuauaugucaaagcag

SEQ ID NO: 3790755 - RNA, 18 nt, Human
aaucauuuucauuccuaa

SEQ ID NO: 3790756 - RNA, 16 nt, Human
aaucauuuuccuuuuu

SEQ ID NO: 3790757 - RNA, 13 nt, Human
aaucauuuugcaa

SEQ ID NO: 3790758 - RNA, 19 nt, Human
aaucauuuuuuauauauau

SEQ ID NO: 3790759 - RNA, 21 nt, Human
aaucauuuuuuauauauaugc

SEQ ID NO: 3790760 - RNA, 23 nt, Human
aaucauuuuuuauauauaugcau

SEQ ID NO: 3790761 - RNA, 16 nt, Human
aauccaaaagaaaaac

SEQ ID NO: 3790762 - RNA, 21 nt, Human
aauccaaacuuggauuuuuga

SEQ ID NO: 3790763 - RNA, 14 nt, Human
aauccaaauauugu

SEQ ID NO: 3790764 - RNA, 23 nt, Human
aauccaagcgaggucaacagaga

SEQ ID NO: 3790765 - RNA, 13 nt, Human
aauccacacauca

SEQ ID NO: 3790766 - RNA, 17 nt, Human
aauccacucccaggcag

SEQ ID NO: 3790767 - RNA, 18 nt, Human
aauccacucccaggcagc

SEQ ID NO: 3790768 - RNA, 20 nt, Human
aauccagaaacuuguucuuc

SEQ ID NO: 3790769 - RNA, 19 nt, Human
aauccaggacccugccagg

SEQ ID NO: 3790770 - RNA, 17 nt, Human
aauccaggcagauccag

SEQ ID NO: 3790771 - RNA, 22 nt, Human
aauccaggcagauccaggacua

SEQ ID NO: 3790772 - RNA, 13 nt, Human
aauccauacauuu

SEQ ID NO: 3790773 - RNA, 14 nt, Human
aauccauacauuug

SEQ ID NO: 3790774 - RNA, 17 nt, Human
aauccauacauuugugu

SEQ ID NO: 3790775 - RNA, 19 nt, Human
aauccaucagugccaaacu

SEQ ID NO: 3790776 - RNA, 21 nt, Human
aauccaucuaaauaccugccc

SEQ ID NO: 3790777 - RNA, 15 nt, Human
aauccaugcuugggu

SEQ ID NO: 3790778 - RNA, 22 nt, Human
aauccauguuaguuuuuacuuu

SEQ ID NO: 3790779 - RNA, 22 nt, Human
aauccauuuggaaaucuuuaaa

SEQ ID NO: 3790780 - RNA, 14 nt, Human
aaucccaaaaguca

SEQ ID NO: 3790781 - RNA, 16 nt, Human
aaucccaaauuugauu

SEQ ID NO: 3790782 - RNA, 18 nt, Human
aaucccauucauaacuuu

SEQ ID NO: 3790783 - RNA, 20 nt, Human
aaucccauucauaacuuuca

SEQ ID NO: 3790784 - RNA, 15 nt, Human
aauccccaguaaaau

SEQ ID NO: 3790785 - RNA, 21 nt, Human
aauccccaguaaaauugccau

SEQ ID NO: 3790786 - RNA, 14 nt, Human
aaucccccaggaga

SEQ ID NO: 3790787 - RNA, 19 nt, Human
aauccccucauucaggaaa

SEQ ID NO: 3790788 - RNA, 21 nt, Human
aauccccucccugucaaagcu

SEQ ID NO: 3790789 - RNA, 17 nt, Human
aauccccuccuugggca

SEQ ID NO: 3790790 - RNA, 17 nt, Human
aauccccuucuccccug

SEQ ID NO: 3790791 - RNA, 20 nt, Human
aauccccuucuccccugcac

SEQ ID NO: 3790792 - RNA, 23 nt, Human
aauccccuucuccccugcacugu

SEQ ID NO: 3790793 - RNA, 17 nt, Human
aaucccgccaccuaucu

SEQ ID NO: 3790794 - RNA, 18 nt, Human
aaucccugcucacugcag

SEQ ID NO: 3790795 - RNA, 17 nt, Human
aaucccugggcauugcu

SEQ ID NO: 3790796 - RNA, 14 nt, Human
aaucccuguucauu

SEQ ID NO: 3790797 - RNA, 17 nt, Human
aaucccuguucauugua

SEQ ID NO: 3790798 - RNA, 14 nt, Human
aaucccuguuuaau

SEQ ID NO: 3790799 - RNA, 11 nt, Human
aaucccuucau

SEQ ID NO: 3790800 - RNA, 20 nt, Human
aauccgaaccuccucuguga

SEQ ID NO: 3790801 - RNA, 12 nt, Human
aauccgcccauc

SEQ ID NO: 3790802 - RNA, 13 nt, Human
aauccgcucucuu

SEQ ID NO: 3790803 - RNA, 15 nt, Human
aauccuaagacacaa

SEQ ID NO: 3790804 - RNA, 17 nt, Human
aauccuaaguuaccuuu

SEQ ID NO: 3790805 - RNA, 19 nt, Human
aauccuaauuucuccuccc

SEQ ID NO: 3790806 - RNA, 24 nt, Human
aauccuaauuucuccucccuuccu

SEQ ID NO: 3790807 - RNA, 15 nt, Human
aauccuaccucaaaa

SEQ ID NO: 3790808 - RNA, 14 nt, Human
aauccuaccuugcu

SEQ ID NO: 3790809 - RNA, 21 nt, Human
aauccuaccuugcuuuugcuu

SEQ ID NO: 3790810 - RNA, 15 nt, Human
aauccuaugcauggu

SEQ ID NO: 3790811 - RNA, 18 nt, Human
aauccuaugcaugguuuc

SEQ ID NO: 3790812 - RNA, 21 nt, Human
aauccuaugcaugguuucagc

SEQ ID NO: 3790813 - RNA, 14 nt, Human
aauccuaugugauu

SEQ ID NO: 3790814 - RNA, 15 nt, Human
aauccucacugggug

SEQ ID NO: 3790815 - RNA, 20 nt, Human
aauccucucaccucagccuc

SEQ ID NO: 3790816 - RNA, 17 nt, Human
aauccugauuccucucu

SEQ ID NO: 3790817 - RNA, 17 nt, Human
aauccugcaaugaaagg

SEQ ID NO: 3790818 - RNA, 12 nt, Human
aauccugccccc

SEQ ID NO: 3790819 - RNA, 18 nt, Human
aauccuguaggaagguac

SEQ ID NO: 3790820 - RNA, 19 nt, Human
aauccugucgauuagacug

SEQ ID NO: 3790821 - RNA, 21 nt, Human
aauccugucgauuagacugga

SEQ ID NO: 3790822 - RNA, 19 nt, Human
aauccuuacaaaugauugc

SEQ ID NO: 3790823 - RNA, 19 nt, Human
aauccuuagaucuggcaug

SEQ ID NO: 3790824 - RNA, 20 nt, Human
aauccuuccaaaaauuauua

SEQ ID NO: 3790825 - RNA, 21 nt, Human
aauccuuccauuccacacaga

SEQ ID NO: 3790826 - RNA, 13 nt, Human
aauccuucuaguu

SEQ ID NO: 3790827 - RNA, 14 nt, Human
aauccuucuaguuu

SEQ ID NO: 3790828 - RNA, 16 nt, Human
aauccuucuaguuucc

SEQ ID NO: 3790829 - RNA, 20 nt, Human
aauccuucuaguuucccaca

SEQ ID NO: 3790830 - RNA, 21 nt, Human
aauccuucuaguuucccacaa

SEQ ID NO: 3790831 - RNA, 18 nt, Human
aauccuuuauuauuauuu

SEQ ID NO: 3790832 - RNA, 22 nt, Human
aauccuuuguuuucugacuaau

SEQ ID NO: 3790833 - RNA, 23 nt, Human
aauccuuuguuuucugacuaauu

SEQ ID NO: 3790834 - RNA, 18 nt, Human
aaucgaggaaccagagcc

SEQ ID NO: 3790835 - RNA, 19 nt, Human
aaucgagugagacaaaauu

SEQ ID NO: 3790836 - RNA, 21 nt, Human
aaucgagugccgcaucucaca

SEQ ID NO: 3790837 - RNA, 14 nt, Human
aaucgcuuaaagau

SEQ ID NO: 3790838 - RNA, 12 nt, Human
aaucgcuucucu

SEQ ID NO: 3790839 - RNA, 21 nt, Human
aaucggaucuggggcucuggg

SEQ ID NO: 3790840 - RNA, 22 nt, Human
aaucggaucuggggcucuggga

SEQ ID NO: 3790841 - RNA, 22 nt, Human
aaucggcccacagcucccaccc

SEQ ID NO: 3790842 - RNA, 15 nt, Human
aaucguuaugugugu

SEQ ID NO: 3790843 - RNA, 14 nt, Human
aaucuaacaaugga

SEQ ID NO: 3790844 - RNA, 14 nt, Human
aaucuaacauuauu

SEQ ID NO: 3790845 - RNA, 20 nt, Human
aaucuaaccacaucaauauu

SEQ ID NO: 3790846 - RNA, 13 nt, Human
aaucuaagggaaa

SEQ ID NO: 3790847 - RNA, 16 nt, Human
aaucuaauauuaaaaa

SEQ ID NO: 3790848 - RNA, 17 nt, Human
aaucuaauauuaaaaau

SEQ ID NO: 3790849 - RNA, 13 nt, Human
aaucuaaugacau

SEQ ID NO: 3790850 - RNA, 20 nt, Human
aaucuacaaucucuuuuugu

SEQ ID NO: 3790851 - RNA, 17 nt, Human
aaucuacccaaaggaua

SEQ ID NO: 3790852 - RNA, 13 nt, Human
aaucuacugcauu

SEQ ID NO: 3790853 - RNA, 18 nt, Human
aaggaugaucuaggaaga

SEQ ID NO: 3790854 - RNA, 23 nt, Human
aaggaugaucuaggaagacuuug

SEQ ID NO: 3790855 - RNA, 19 nt, Human
aaggaugaugucuuuuuau

SEQ ID NO: 3790856 - RNA, 19 nt, Human
aaggaugccccgucccccu

SEQ ID NO: 3790857 - RNA, 17 nt, Human
aaggauguaaacagugc

SEQ ID NO: 3790858 - RNA, 20 nt, Human
aaggauguaaacagugccug

SEQ ID NO: 3790859 - RNA, 16 nt, Human
aaggauguacauuucc

SEQ ID NO: 3790860 - RNA, 14 nt, Human
aaggaugucacagg

SEQ ID NO: 3790861 - RNA, 15 nt, Human
aaggaugucacaggg

SEQ ID NO: 3790862 - RNA, 22 nt, Human
aaggaugugauuguggaaugga

SEQ ID NO: 3790863 - RNA, 16 nt, Human
aaggaugugggggaag

SEQ ID NO: 3790864 - RNA, 16 nt, Human
aaggauuauggaaaaa

SEQ ID NO: 3790865 - RNA, 19 nt, Human
aaggauuauggaaaaauaa

SEQ ID NO: 3790866 - RNA, 20 nt, Human
aaggauucugcuggccucug

SEQ ID NO: 3790867 - RNA, 14 nt, Human
aaggauugugauau

SEQ ID NO: 3790868 - RNA, 14 nt, Human
aaggcaaaaacaaa

SEQ ID NO: 3790869 - RNA, 13 nt, Human
aaggcaaaaauag

SEQ ID NO: 3790870 - RNA, 15 nt, Human
aaggcaaaaauguaa

SEQ ID NO: 3790871 - RNA, 12 nt, Human
aaggcaaaauug

SEQ ID NO: 3790872 - RNA, 15 nt, Human
aaggcaaaauugcaa

SEQ ID NO: 3790873 - RNA, 15 nt, Human
aaggcaaacccauca

SEQ ID NO: 3790874 - RNA, 20 nt, Human
aaggcaaacccaucaacaaa

SEQ ID NO: 3790875 - RNA, 16 nt, Human
aaggcaaaugcccaag

SEQ ID NO: 3790876 - RNA, 21 nt, Human
aaggcaacaaaagaagcccgg

SEQ ID NO: 3790877 - RNA, 20 nt, Human
aaggcaacugaacaaaaaaa

SEQ ID NO: 3790878 - RNA, 12 nt, Human
aaggcaacuggg

SEQ ID NO: 3790879 - RNA, 13 nt, Human
aaggcaagagggg

SEQ ID NO: 3790880 - RNA, 16 nt, Human
aaggcaagccaggcuc

SEQ ID NO: 3790881 - RNA, 13 nt, Human
aaggcaaggcugu

SEQ ID NO: 3790882 - RNA, 15 nt, Human
aaggcaaggcuguca

SEQ ID NO: 3790883 - RNA, 17 nt, Human
aaggcaauauuaaccua

SEQ ID NO: 3790884 - RNA, 19 nt, Human
aaggcacccccgucaagag

SEQ ID NO: 3790885 - RNA, 12 nt, Human
aaggcacugccu

SEQ ID NO: 3790886 - RNA, 13 nt, Human
aaggcacugccug

SEQ ID NO: 3790887 - RNA, 14 nt, Human
aaggcacugccuga

SEQ ID NO: 3790888 - RNA, 19 nt, Human
aaggcagaaagcaaaauua

SEQ ID NO: 3790889 - RNA, 16 nt, Human
aaggcagaggccuggg

SEQ ID NO: 3790890 - RNA, 17 nt, Human
aaggcagaggccugggc

SEQ ID NO: 3790891 - RNA, 20 nt, Human
aaggcagauuuuacagagcg

SEQ ID NO: 3790892 - RNA, 19 nt, Human
aaggcagcaaggcccgagc

SEQ ID NO: 3790893 - RNA, 20 nt, Human
aaggcagcucuaaaugucaa

SEQ ID NO: 3790894 - RNA, 22 nt, Human
aaggcagcuguugucucuucuc

SEQ ID NO: 3790895 - RNA, 13 nt, Human
aaggcaggaagag

SEQ ID NO: 3790896 - RNA, 14 nt, Human
aaggcaggcagggc

SEQ ID NO: 3790897 - RNA, 16 nt, Human
aaggcaggcagggcuc

SEQ ID NO: 3790898 - RNA, 17 nt, Human
aaggcaggcagggcucu

SEQ ID NO: 3790899 - RNA, 21 nt, Human
aaggcaggcagggcucuccug

SEQ ID NO: 3790900 - RNA, 16 nt, Human
aaggcaggugccucca

SEQ ID NO: 3790901 - RNA, 20 nt, Human
aaggcaggugccuccaggug

SEQ ID NO: 3790902 - RNA, 23 nt, Human
aaggcaguagaacuccaggcccu

SEQ ID NO: 3790903 - RNA, 23 nt, Human
aaggcaguuaccauuaaaccauc

SEQ ID NO: 3790904 - RNA, 19 nt, Human
aaggcauaucagucucuga

SEQ ID NO: 3790905 - RNA, 20 nt, Human
aaggcauaucaugcuuugaa

SEQ ID NO: 3790906 - RNA, 18 nt, Human
aaggcaucuaucugugcu

SEQ ID NO: 3790907 - RNA, 21 nt, Human
aaggcaugauguuaaccagaa

SEQ ID NO: 3790908 - RNA, 21 nt, Human
aaggcaugccuggacaaaccc

SEQ ID NO: 3790909 - RNA, 17 nt, Human
aaggcauggcggccccc

SEQ ID NO: 3790910 - RNA, 16 nt, Human
aaggcauguuccucug

SEQ ID NO: 3790911 - RNA, 12 nt, Human
aaggcauucucu

SEQ ID NO: 3790912 - RNA, 15 nt, Human
aaggcauuguuugag

SEQ ID NO: 3790913 - RNA, 16 nt, Human
aaggccaaaccucugu

SEQ ID NO: 3790914 - RNA, 14 nt, Human
aaggccaccucuuc

SEQ ID NO: 3790915 - RNA, 12 nt, Human
aaggccaccugc

SEQ ID NO: 3790916 - RNA, 14 nt, Human
aaggccaccugcag

SEQ ID NO: 3790917 - RNA, 19 nt, Human
aaggccagaguggccuggc

SEQ ID NO: 3790918 - RNA, 20 nt, Human
aaggccagaguggccuggcc

SEQ ID NO: 3790919 - RNA, 14 nt, Human
aaggccagcuggca

SEQ ID NO: 3790920 - RNA, 21 nt, Human
aaggccaguggaaauucaggu

SEQ ID NO: 3790921 - RNA, 18 nt, Human
aaggccauaaaacaggua

SEQ ID NO: 3790922 - RNA, 18 nt, Human
aaggccauggagagcugg

SEQ ID NO: 3790923 - RNA, 14 nt, Human
aaggcccagccccu

SEQ ID NO: 3790924 - RNA, 21 nt, Human
aaggcccccucucaggagcca

SEQ ID NO: 3790925 - RNA, 19 nt, Human
aaggccccgcccaggcuua

SEQ ID NO: 3790926 - RNA, 18 nt, Human
aaggcccgagcagcugag

SEQ ID NO: 3790927 - RNA, 23 nt, Human
aaggcccuguuagugcacugauu

SEQ ID NO: 3790928 - RNA, 20 nt, Human
aaggccgaagcucuggcuga

SEQ ID NO: 3790929 - RNA, 15 nt, Human
aaggccuaggauucu

SEQ ID NO: 3790930 - RNA, 14 nt, Human
aaggccucccacag

SEQ ID NO: 3790931 - RNA, 12 nt, Human
aaggccucuugg

SEQ ID NO: 3790932 - RNA, 20 nt, Human
aaggccucuuggagaccuua

SEQ ID NO: 3790933 - RNA, 13 nt, Human
aaggccucuugua

SEQ ID NO: 3790934 - RNA, 11 nt, Human
aaggccugggg

SEQ ID NO: 3790935 - RNA, 12 nt, Human
aauauuaaaagu

SEQ ID NO: 3790936 - RNA, 14 nt, Human
aauauuaaagccau

SEQ ID NO: 3790937 - RNA, 19 nt, Human
aauauuaaagccauguuua

SEQ ID NO: 3790938 - RNA, 20 nt, Human
aauauuaaagccauguuuau

SEQ ID NO: 3790939 - RNA, 22 nt, Human
aauauuaaagccauguuuauua

SEQ ID NO: 3790940 - RNA, 14 nt, Human
aauauuaaauacag

SEQ ID NO: 3790941 - RNA, 16 nt, Human
aauauuaaauacagac

SEQ ID NO: 3790942 - RNA, 22 nt, Human
aauauuaaauacagacacuaag

SEQ ID NO: 3790943 - RNA, 21 nt, Human
aauauuaagcaugacagaaaa

SEQ ID NO: 3790944 - RNA, 22 nt, Human
aauauuaagcaugacagaaaau

SEQ ID NO: 3790945 - RNA, 22 nt, Human
aauauuaagguaguuauucaca

SEQ ID NO: 3790946 - RNA, 15 nt, Human
aauauuaaugccuuu

SEQ ID NO: 3790947 - RNA, 20 nt, Human
aauauuacagauaaaaugua

SEQ ID NO: 3790948 - RNA, 16 nt, Human
aauauuacuuuaacau

SEQ ID NO: 3790949 - RNA, 13 nt, Human
aauauuagaugug

SEQ ID NO: 3790950 - RNA, 18 nt, Human
aauauuagaugugauuua

SEQ ID NO: 3790951 - RNA, 19 nt, Human
aauauuagaugugauuuaa

SEQ ID NO: 3790952 - RNA, 23 nt, Human
aauauuaggcuuaaaaacugaaa

SEQ ID NO: 3790953 - RNA, 21 nt, Human
aauauuagugaccucagcuuu

SEQ ID NO: 3790954 - RNA, 16 nt, Human
aauauuauacuaagaa

SEQ ID NO: 3790955 - RNA, 19 nt, Human
aauauuauauuuggaugca

SEQ ID NO: 3790956 - RNA, 16 nt, Human
aauauuaugagaugcu

SEQ ID NO: 3790957 - RNA, 14 nt, Human
aauauuauguguuu

SEQ ID NO: 3790958 - RNA, 20 nt, Human
aauauuauuuguguuuccua

SEQ ID NO: 3790959 - RNA, 15 nt, Human
aauauucaauaaagc

SEQ ID NO: 3790960 - RNA, 16 nt, Human
aauauucaauaaagcu

SEQ ID NO: 3790961 - RNA, 17 nt, Human
aauauucacugggccaa

SEQ ID NO: 3790962 - RNA, 19 nt, Human
aauauucagacaaaaugga

SEQ ID NO: 3790963 - RNA, 20 nt, Human
aauauucaggguaaauagga

SEQ ID NO: 3790964 - RNA, 19 nt, Human
aauauucauaguagaacuu

SEQ ID NO: 3790965 - RNA, 23 nt, Human
aauauucauauuggaaaaaucac

SEQ ID NO: 3790966 - RNA, 14 nt, Human
aauauucuuucaau

SEQ ID NO: 3790967 - RNA, 15 nt, Human
aauauugaaaauuga

SEQ ID NO: 3790968 - RNA, 16 nt, Human
aauauugacauuugua

SEQ ID NO: 3790969 - RNA, 14 nt, Human
aauauugacuuugu

SEQ ID NO: 3790970 - RNA, 19 nt, Human
aauauugagcagaauucau

SEQ ID NO: 3790971 - RNA, 16 nt, Human
aauauugaggcuuugu

SEQ ID NO: 3790972 - RNA, 11 nt, Human
aauauugcuga

SEQ ID NO: 3790973 - RNA, 13 nt, Human
aauauugcugaug

SEQ ID NO: 3790974 - RNA, 18 nt, Human
aauauugcugauggugca

SEQ ID NO: 3790975 - RNA, 22 nt, Human
aauauugcugauggugcaauga

SEQ ID NO: 3790976 - RNA, 20 nt, Human
aauauugcuuuggucauaug

SEQ ID NO: 3790977 - RNA, 22 nt, Human
aauauuguauuguuagauguuu

SEQ ID NO: 3790978 - RNA, 16 nt, Human
aauauugucauuccug

SEQ ID NO: 3790979 - RNA, 9 nt, Human
aauauugug

SEQ ID NO: 3790980 - RNA, 14 nt, Human
aauauuguuccuaa

SEQ ID NO: 3790981 - RNA, 18 nt, Human
aauauuguuguauaauuu

SEQ ID NO: 3790982 - RNA, 13 nt, Human
aauauuguuucua

SEQ ID NO: 3790983 - RNA, 23 nt, Human
aauauuguuucugcauucauuuu

SEQ ID NO: 3790984 - RNA, 19 nt, Human
aauauuguuucuuuaucac

SEQ ID NO: 3790985 - RNA, 16 nt, Human
aauauuguuugguaaa

SEQ ID NO: 3790986 - RNA, 23 nt, Human
aauauuguuugguaaauguuucu

SEQ ID NO: 3790987 - RNA, 20 nt, Human
aauauuuaaaauuuauugcu

SEQ ID NO: 3790988 - RNA, 12 nt, Human
aauauuuaaaca

SEQ ID NO: 3790989 - RNA, 13 nt, Human
aauauuuaaacau

SEQ ID NO: 3790990 - RNA, 21 nt, Human
aauauuuaacauuauuuauau

SEQ ID NO: 3790991 - RNA, 16 nt, Human
aauauuuacaauguau

SEQ ID NO: 3790992 - RNA, 15 nt, Human
aauauuuacauauga

SEQ ID NO: 3790993 - RNA, 16 nt, Human
aauauuuauaaaacuu

SEQ ID NO: 3790994 - RNA, 19 nt, Human
aauauuuauaaaugagcaa

SEQ ID NO: 3790995 - RNA, 14 nt, Human
aauauuuauauauu

SEQ ID NO: 3790996 - RNA, 14 nt, Human
aauauuuauauuuc

SEQ ID NO: 3790997 - RNA, 13 nt, Human
aauauuuaugaag

SEQ ID NO: 3790998 - RNA, 19 nt, Human
aauguuuuguaaacauuua

SEQ ID NO: 3790999 - RNA, 18 nt, Human
aauguuuuguaaacuuug

SEQ ID NO: 3791000 - RNA, 15 nt, Human
aauguuuuuuuuuaa

SEQ ID NO: 3791001 - RNA, 20 nt, Human
aauuaaaaaaaaaaaacuuu

SEQ ID NO: 3791002 - RNA, 16 nt, Human
aauuaaaaaaaaauug

SEQ ID NO: 3791003 - RNA, 18 nt, Human
aauuaaaaaagauaaaca

SEQ ID NO: 3791004 - RNA, 17 nt, Human
aauuaaaaaauuuccag

SEQ ID NO: 3791005 - RNA, 12 nt, Human
aauuaaaaacua

SEQ ID NO: 3791006 - RNA, 15 nt, Human
aauuaaaaagauucu

SEQ ID NO: 3791007 - RNA, 11 nt, Human
aauuaaaacaa

SEQ ID NO: 3791008 - RNA, 16 nt, Human
aauuaaaacagcugca

SEQ ID NO: 3791009 - RNA, 14 nt, Human
aauuaaaacuucuu

SEQ ID NO: 3791010 - RNA, 15 nt, Human
aauuaaaacuucuua

SEQ ID NO: 3791011 - RNA, 20 nt, Human
aauuaaaaggauaguauuuu

SEQ ID NO: 3791012 - RNA, 22 nt, Human
aauuaaaaggauaguauuuuua

SEQ ID NO: 3791013 - RNA, 16 nt, Human
aauuaaaagucuuuuu

SEQ ID NO: 3791014 - RNA, 21 nt, Human
aauuaaaauugucccauuugc

SEQ ID NO: 3791015 - RNA, 14 nt, Human
aauuaaacaauuua

SEQ ID NO: 3791016 - RNA, 19 nt, Human
aauuaaacaauuuauuuua

SEQ ID NO: 3791017 - RNA, 13 nt, Human
aauuaaacggauu

SEQ ID NO: 3791018 - RNA, 23 nt, Human
aauuaaacggauuauuuuuucag

SEQ ID NO: 3791019 - RNA, 13 nt, Human
aauuaaagaaaau

SEQ ID NO: 3791020 - RNA, 13 nt, Human
aauuaaagaaaua

SEQ ID NO: 3791021 - RNA, 13 nt, Human
aauuaaagugucc

SEQ ID NO: 3791022 - RNA, 18 nt, Human
aauuaaaguguccauuga

SEQ ID NO: 3791023 - RNA, 17 nt, Human
aauuaaauaaaauaacc

SEQ ID NO: 3791024 - RNA, 16 nt, Human
aauuaaauauauguau

SEQ ID NO: 3791025 - RNA, 23 nt, Human
aauuaaauauauguauguaaaaa

SEQ ID NO: 3791026 - RNA, 12 nt, Human
aauuaaaucugu

SEQ ID NO: 3791027 - RNA, 18 nt, Human
aauuaaauuuugugucuc

SEQ ID NO: 3791028 - RNA, 17 nt, Human
aauuaacacuuaagguu

SEQ ID NO: 3791029 - RNA, 20 nt, Human
aauuaacauauaauauaugu

SEQ ID NO: 3791030 - RNA, 19 nt, Human
aauuaacaugaauauuuag

SEQ ID NO: 3791031 - RNA, 14 nt, Human
aauuaacauguuaa

SEQ ID NO: 3791032 - RNA, 14 nt, Human
aauuaaccuggugc

SEQ ID NO: 3791033 - RNA, 14 nt, Human
aauuaacugaaaca

SEQ ID NO: 3791034 - RNA, 18 nt, Human
aauuaacuggguaaugaa

SEQ ID NO: 3791035 - RNA, 21 nt, Human
aauuaacuggguaaugaaaca

SEQ ID NO: 3791036 - RNA, 17 nt, Human
aauuaacuugaguuuua

SEQ ID NO: 3791037 - RNA, 13 nt, Human
aauuaacuuuuau

SEQ ID NO: 3791038 - RNA, 15 nt, Human
aauuaacuuuuauaa

SEQ ID NO: 3791039 - RNA, 16 nt, Human
aauuaacuuuuauaaa

SEQ ID NO: 3791040 - RNA, 12 nt, Human
aauuaagaagaa

SEQ ID NO: 3791041 - RNA, 11 nt, Human
aauuaagaaug

SEQ ID NO: 3791042 - RNA, 16 nt, Human
aauuaagaauguucuc

SEQ ID NO: 3791043 - RNA, 22 nt, Human
aauuaagauacaaauuaauuuu

SEQ ID NO: 3791044 - RNA, 18 nt, Human
aauuaagcaaauguuaaa

SEQ ID NO: 3791045 - RNA, 22 nt, Human
aauuaaggcaacugaacaaaaa

SEQ ID NO: 3791046 - RNA, 18 nt, Human
aauuaagggccgauuuaa

SEQ ID NO: 3791047 - RNA, 16 nt, Human
aauuaagguguuugaa

SEQ ID NO: 3791048 - RNA, 20 nt, Human
aauuaagguguuugaaaaua

SEQ ID NO: 3791049 - RNA, 17 nt, Human
aauuaaugaaauaucug

SEQ ID NO: 3791050 - RNA, 12 nt, Human
aauuaauuguaa

SEQ ID NO: 3791051 - RNA, 14 nt, Human
aauuaauuugauua

SEQ ID NO: 3791052 - RNA, 15 nt, Human
aauuaauuugauuaa

SEQ ID NO: 3791053 - RNA, 18 nt, Human
aauuacaaaaaaaaauuu

SEQ ID NO: 3791054 - RNA, 16 nt, Human
aauuacaacuaaguga

SEQ ID NO: 3791055 - RNA, 16 nt, Human
aauuacaauauuucug

SEQ ID NO: 3791056 - RNA, 14 nt, Human
aauuacaauuuuau

SEQ ID NO: 3791057 - RNA, 19 nt, Human
aauuacaauuuuaucuguu

SEQ ID NO: 3791058 - RNA, 23 nt, Human
aauuacagugccuaaaauaagaa

SEQ ID NO: 3791059 - RNA, 13 nt, Human
aauuacauauacu

SEQ ID NO: 3791060 - RNA, 17 nt, Human
aauuacauguaaaacau

SEQ ID NO: 3791061 - RNA, 13 nt, Human
aauuacauuugua

SEQ ID NO: 3791062 - RNA, 18 nt, Human
aauuaccaguaaagugua

SEQ ID NO: 3791063 - RNA, 22 nt, Human
aauuaccaguaaaguguaacau

SEQ ID NO: 3791064 - RNA, 23 nt, Human
aauuaccauuuguuaauaucacu

SEQ ID NO: 3791065 - RNA, 17 nt, Human
aauuacccuuuugcagg

SEQ ID NO: 3791066 - RNA, 18 nt, Human
aauuaccuggauguucuu

SEQ ID NO: 3791067 - RNA, 14 nt, Human
aauuacuaacuucu

SEQ ID NO: 3791068 - RNA, 15 nt, Human
aauuacuaacuucua

SEQ ID NO: 3791069 - RNA, 17 nt, Human
aauuacuaacuucuaaa

SEQ ID NO: 3791070 - RNA, 20 nt, Human
aauuacuaacuucuaaaacu

SEQ ID NO: 3791071 - RNA, 21 nt, Human
aauuacuaacuucuaaaacug

SEQ ID NO: 3791072 - RNA, 19 nt, Human
aauuacucaggaagaacac

SEQ ID NO: 3791073 - RNA, 15 nt, Human
aauuacugccuugaa

SEQ ID NO: 3791074 - RNA, 23 nt, Human
aauuacuguuuauuaaaguacaa

SEQ ID NO: 3791075 - RNA, 12 nt, Human
aauuacuuaaaa

SEQ ID NO: 3791076 - RNA, 19 nt, Human
aauuacuuaucccugccca

SEQ ID NO: 3791077 - RNA, 11 nt, Human
aauuagaaaau

SEQ ID NO: 3791078 - RNA, 14 nt, Human
aauuagaaaauauu

SEQ ID NO: 3791079 - RNA, 18 nt, Human
aauuagaaaauauucucu

SEQ ID NO: 3791080 - RNA, 19 nt, Human
aauuagaaaauauucucua

SEQ ID NO: 3791081 - RNA, 22 nt, Human
aauuagaaaauguuauuuaaca

SEQ ID NO: 3791082 - RNA, 18 nt, Human
aauuagaaauuggcugga

SEQ ID NO: 3791083 - RNA, 15 nt, Human
aauuagaauaguguu

SEQ ID NO: 3791084 - RNA, 16 nt, Human
aauuagacacuuugga

SEQ ID NO: 3791085 - RNA, 21 nt, Human
aauuagacugugauucagaaa

SEQ ID NO: 3791086 - RNA, 12 nt, Human
aauuagagcaga

SEQ ID NO: 3791087 - RNA, 20 nt, Human
aauuagauccauuaauuuaa

SEQ ID NO: 3791088 - RNA, 17 nt, Human
aauuagaugcauguuga

SEQ ID NO: 3791089 - RNA, 14 nt, Human
aauuagccaguaau

SEQ ID NO: 3791090 - RNA, 19 nt, Human
aauuagccaguaauccugu

SEQ ID NO: 3791091 - RNA, 20 nt, Human
aauuagccaguaauccugua

SEQ ID NO: 3791092 - RNA, 19 nt, Human
aauuagccuaagauauacu

SEQ ID NO: 3791093 - RNA, 15 nt, Human
aauuagcugcuucua

SEQ ID NO: 3791094 - RNA, 17 nt, Human
aauuaggaaaaaaacua

SEQ ID NO: 3791095 - RNA, 20 nt, Human
aaucaauacacuaguuguuu

SEQ ID NO: 3791096 - RNA, 14 nt, Human
aaucaaucuugcau

SEQ ID NO: 3791097 - RNA, 16 nt, Human
aaucaaucuugcaugu

SEQ ID NO: 3791098 - RNA, 18 nt, Human
aaucaaucuugcauguaa

SEQ ID NO: 3791099 - RNA, 14 nt, Human
aaucaauuaaaagu

SEQ ID NO: 3791100 - RNA, 20 nt, Human
aaucaauuacugguccaaaa

SEQ ID NO: 3791101 - RNA, 16 nt, Human
aaucaauuuuuaggaa

SEQ ID NO: 3791102 - RNA, 13 nt, Human
aaucacaauacau

SEQ ID NO: 3791103 - RNA, 17 nt, Human
aaucacaauuuuuaaug

SEQ ID NO: 3791104 - RNA, 13 nt, Human
aaucacaggcugg

SEQ ID NO: 3791105 - RNA, 22 nt, Human
aaucacauauuuuaaaauuugu

SEQ ID NO: 3791106 - RNA, 18 nt, Human
aaucacaugaauuauuac

SEQ ID NO: 3791107 - RNA, 20 nt, Human
aaucaccagggccaaaagcu

SEQ ID NO: 3791108 - RNA, 15 nt, Human
aaucaccauguaagc

SEQ ID NO: 3791109 - RNA, 19 nt, Human
aaucaccauguaagcacuc

SEQ ID NO: 3791110 - RNA, 23 nt, Human
aaucaccauguaagcacucugga

SEQ ID NO: 3791111 - RNA, 14 nt, Human
aaucaccgaaaacg

SEQ ID NO: 3791112 - RNA, 23 nt, Human
aaucaccgaaaacguggcugcuu

SEQ ID NO: 3791113 - RNA, 19 nt, Human
aaucaccuaauuaauuuca

SEQ ID NO: 3791114 - RNA, 15 nt, Human
aaucacgcuuuuuga

SEQ ID NO: 3791115 - RNA, 20 nt, Human
aaucacgcuuuuugaaaaag

SEQ ID NO: 3791116 - RNA, 15 nt, Human
aaucacguaaagcua

SEQ ID NO: 3791117 - RNA, 20 nt, Human
aaucacguaaagcuagaaau

SEQ ID NO: 3791118 - RNA, 15 nt, Human
aaucacuaacauuau

SEQ ID NO: 3791119 - RNA, 12 nt, Human
aaucacucagag

SEQ ID NO: 3791120 - RNA, 18 nt, Human
aaucacucuaauuaauug

SEQ ID NO: 3791121 - RNA, 21 nt, Human
aaucacucuaauuaauuguaa

SEQ ID NO: 3791122 - RNA, 16 nt, Human
aaucacucuuguggau

SEQ ID NO: 3791123 - RNA, 18 nt, Human
aaucacucuuguggaugu

SEQ ID NO: 3791124 - RNA, 10 nt, Human
aaucacugug

SEQ ID NO: 3791125 - RNA, 18 nt, Human
aaucacuguguauauuug

SEQ ID NO: 3791126 - RNA, 19 nt, Human
aaucacuguuuagaacaca

SEQ ID NO: 3791127 - RNA, 21 nt, Human
aaucacuguuuagaacacaca

SEQ ID NO: 3791128 - RNA, 17 nt, Human
aaucacuuaacauuccu

SEQ ID NO: 3791129 - RNA, 16 nt, Human
aaucacuuaggaaaug

SEQ ID NO: 3791130 - RNA, 18 nt, Human
aaucacuugauucauaaa

SEQ ID NO: 3791131 - RNA, 13 nt, Human
aaucagaaauuuu

SEQ ID NO: 3791132 - RNA, 21 nt, Human
aaucagaagauagucuuggaa

SEQ ID NO: 3791133 - RNA, 24 nt, Human
aaucagaagucaucuugcuaccag

SEQ ID NO: 3791134 - RNA, 14 nt, Human
aaucagaauggaag

SEQ ID NO: 3791135 - RNA, 12 nt, Human
aaucagacugac

SEQ ID NO: 3791136 - RNA, 13 nt, Human
aaucagagacaaa

SEQ ID NO: 3791137 - RNA, 18 nt, Human
aaucagaguagaaauaaa

SEQ ID NO: 3791138 - RNA, 14 nt, Human
aaucagauagauau

SEQ ID NO: 3791139 - RNA, 15 nt, Human
aaucagaucuuuauu

SEQ ID NO: 3791140 - RNA, 13 nt, Human
aaucagcacugaa

SEQ ID NO: 3791141 - RNA, 14 nt, Human
aaucagcacugaaa

SEQ ID NO: 3791142 - RNA, 17 nt, Human
aaucagccaaguuuuau

SEQ ID NO: 3791143 - RNA, 18 nt, Human
aaucagccaauuauguua

SEQ ID NO: 3791144 - RNA, 13 nt, Human
accacacuggacu

SEQ ID NO: 3791145 - RNA, 22 nt, Human
accacacuggacuccggcccuc

SEQ ID NO: 3791146 - RNA, 13 nt, Human
accacagacacac

SEQ ID NO: 3791147 - RNA, 15 nt, Human
accacagacacacac

SEQ ID NO: 3791148 - RNA, 21 nt, Human
accacagcaaggcaccugcag

SEQ ID NO: 3791149 - RNA, 16 nt, Human
accacagcacagccaa

SEQ ID NO: 3791150 - RNA, 17 nt, Human
accacagccagcaccug

SEQ ID NO: 3791151 - RNA, 13 nt, Human
accacagcccugu

SEQ ID NO: 3791152 - RNA, 17 nt, Human
accacagcccugucagu

SEQ ID NO: 3791153 - RNA, 12 nt, Human
accacagcugcu

SEQ ID NO: 3791154 - RNA, 15 nt, Human
accacaggcucaggc

SEQ ID NO: 3791155 - RNA, 22 nt, Human
accacagguucaugccaccaug

SEQ ID NO: 3791156 - RNA, 12 nt, Human
accacagugucu

SEQ ID NO: 3791157 - RNA, 18 nt, Human
accacauacguaaaaauc

SEQ ID NO: 3791158 - RNA, 19 nt, Human
accacauagcaugaggcca

SEQ ID NO: 3791159 - RNA, 23 nt, Human
accacauccacacacgcaggaac

SEQ ID NO: 3791160 - RNA, 22 nt, Human
accacauccuccguccagccgc

SEQ ID NO: 3791161 - RNA, 17 nt, Human
accacaucuugcucugc

SEQ ID NO: 3791162 - RNA, 20 nt, Human
accacaucuugcucugcuga

SEQ ID NO: 3791163 - RNA, 18 nt, Human
accacaugugcacaugca

SEQ ID NO: 3791164 - RNA, 24 nt, Human
accacauuggagauguuuaguaau

SEQ ID NO: 3791165 - RNA, 16 nt, Human
accaccaagccaaggg

SEQ ID NO: 3791166 - RNA, 14 nt, Human
accaccaagccuug

SEQ ID NO: 3791167 - RNA, 15 nt, Human
accaccaagccuuga

SEQ ID NO: 3791168 - RNA, 14 nt, Human
accaccacuggcca

SEQ ID NO: 3791169 - RNA, 23 nt, Human
accaccacuuaugccccuagaag

SEQ ID NO: 3791170 - RNA, 15 nt, Human
accaccagcuguguc

SEQ ID NO: 3791171 - RNA, 20 nt, Human
accaccagggcaucucuggg

SEQ ID NO: 3791172 - RNA, 23 nt, Human
accaccaucaccagacaggugcg

SEQ ID NO: 3791173 - RNA, 23 nt, Human
accacccacucuccucugccuca

SEQ ID NO: 3791174 - RNA, 18 nt, Human
accaccccaacaaaccau

SEQ ID NO: 3791175 - RNA, 14 nt, Human
accaccccaucugc

SEQ ID NO: 3791176 - RNA, 18 nt, Human
accaccccaucugcauuc

SEQ ID NO: 3791177 - RNA, 14 nt, Human
accaccccccacuc

SEQ ID NO: 3791178 - RNA, 18 nt, Human
accaccccgccugcccuc

SEQ ID NO: 3791179 - RNA, 14 nt, Human
accaccccuaccac

SEQ ID NO: 3791180 - RNA, 19 nt, Human
accaccccugccuccaccc

SEQ ID NO: 3791181 - RNA, 13 nt, Human
accacccucacug

SEQ ID NO: 3791182 - RNA, 19 nt, Human
accacccucacuggcucuc

SEQ ID NO: 3791183 - RNA, 11 nt, Human
accacccuccc

SEQ ID NO: 3791184 - RNA, 14 nt, Human
accacccugcucau

SEQ ID NO: 3791185 - RNA, 15 nt, Human
accaccgcuccccag

SEQ ID NO: 3791186 - RNA, 18 nt, Human
accaccgcuccccagccc

SEQ ID NO: 3791187 - RNA, 18 nt, Human
accaccuaaucaggcuga

SEQ ID NO: 3791188 - RNA, 20 nt, Human
accaccuaggccacuccucc

SEQ ID NO: 3791189 - RNA, 17 nt, Human
accaccucaaauuuaaa

SEQ ID NO: 3791190 - RNA, 16 nt, Human
accaccucacuccugu

SEQ ID NO: 3791191 - RNA, 17 nt, Human
accaccucuccagaggc

SEQ ID NO: 3791192 - RNA, 15 nt, Human
accaccuucccagcu

SEQ ID NO: 3791193 - RNA, 22 nt, Human
accaccuucccagcucucccuc

SEQ ID NO: 3791194 - RNA, 20 nt, Human
accaccuuuguuucuccccc

SEQ ID NO: 3791195 - RNA, 21 nt, Human
accacgaaagcacacacaaaa

SEQ ID NO: 3791196 - RNA, 24 nt, Human
accacgacuggccagggccacgcu

SEQ ID NO: 3791197 - RNA, 21 nt, Human
accacgauguggcccuggccu

SEQ ID NO: 3791198 - RNA, 22 nt, Human
accacgauguggcccuggccug

SEQ ID NO: 3791199 - RNA, 13 nt, Human
accacgcccggcu

SEQ ID NO: 3791200 - RNA, 14 nt, Human
accacgcccggcua

SEQ ID NO: 3791201 - RNA, 13 nt, Human
accacgccuggcu

SEQ ID NO: 3791202 - RNA, 18 nt, Human
accacgcuggaccuugaa

SEQ ID NO: 3791203 - RNA, 14 nt, Human
accacggaaaagag

SEQ ID NO: 3791204 - RNA, 21 nt, Human
accacggacguuuccaucagg

SEQ ID NO: 3791205 - RNA, 14 nt, Human
accacggccacugg

SEQ ID NO: 3791206 - RNA, 22 nt, Human
accacgggacaucacagggugg

SEQ ID NO: 3791207 - RNA, 23 nt, Human
accacgugcuacccccaugcugg

SEQ ID NO: 3791208 - RNA, 13 nt, Human
accacguuucuaa

SEQ ID NO: 3791209 - RNA, 17 nt, Human
accacuacaugcagccc

SEQ ID NO: 3791210 - RNA, 14 nt, Human
accacuacauucug

SEQ ID NO: 3791211 - RNA, 15 nt, Human
accacuagccucagg

SEQ ID NO: 3791212 - RNA, 16 nt, Human
accacuagccucaggg

SEQ ID NO: 3791213 - RNA, 15 nt, Human
accacuauaaaaugu

SEQ ID NO: 3791214 - RNA, 20 nt, Human
accacucaaauuaaucuuuc

SEQ ID NO: 3791215 - RNA, 17 nt, Human
accacucgugcaucccu

SEQ ID NO: 3791216 - RNA, 12 nt, Human
acugugcagagu

SEQ ID NO: 3791217 - RNA, 21 nt, Human
acugugcaggugcuauuguua

SEQ ID NO: 3791218 - RNA, 16 nt, Human
acugugcauagugcug

SEQ ID NO: 3791219 - RNA, 12 nt, Human
acugugccacaa

SEQ ID NO: 3791220 - RNA, 17 nt, Human
acugugccaugugccag

SEQ ID NO: 3791221 - RNA, 18 nt, Human
acugugccaugugccagg

SEQ ID NO: 3791222 - RNA, 16 nt, Human
acugugccauguguuu

SEQ ID NO: 3791223 - RNA, 17 nt, Human
acugugcccugguggag

SEQ ID NO: 3791224 - RNA, 14 nt, Human
acugugccuuugca

SEQ ID NO: 3791225 - RNA, 19 nt, Human
acugugccuuugcaaauca

SEQ ID NO: 3791226 - RNA, 22 nt, Human
acugugccuuugcaaaucagug

SEQ ID NO: 3791227 - RNA, 22 nt, Human
acugugcgcauaggccugcuuu

SEQ ID NO: 3791228 - RNA, 15 nt, Human
acugugcuacugucu

SEQ ID NO: 3791229 - RNA, 23 nt, Human
acugugcuacugucuuuggaaaa

SEQ ID NO: 3791230 - RNA, 14 nt, Human
acugugcucagggc

SEQ ID NO: 3791231 - RNA, 20 nt, Human
acugugcuccagccugggca

SEQ ID NO: 3791232 - RNA, 13 nt, Human
acugugcuguugu

SEQ ID NO: 3791233 - RNA, 18 nt, Human
acugugcuguuguuauga

SEQ ID NO: 3791234 - RNA, 22 nt, Human
acugugcuguuguuaugaugug

SEQ ID NO: 3791235 - RNA, 23 nt, Human
acugugcuguuguuaugaugugc

SEQ ID NO: 3791236 - RNA, 21 nt, Human
acugugcuuucuauuguacag

SEQ ID NO: 3791237 - RNA, 14 nt, Human
acuguggaaaaaua

SEQ ID NO: 3791238 - RNA, 15 nt, Human
acuguggaaaaauau

SEQ ID NO: 3791239 - RNA, 22 nt, Human
acuguggagacugcuccugagc

SEQ ID NO: 3791240 - RNA, 18 nt, Human
acuguggaggaaggauug

SEQ ID NO: 3791241 - RNA, 23 nt, Human
acuguggaggaaggauuguaaaa

SEQ ID NO: 3791242 - RNA, 20 nt, Human
acuguggcacuugccugggu

SEQ ID NO: 3791243 - RNA, 22 nt, Human
acuguggcacuugccuggguca

SEQ ID NO: 3791244 - RNA, 20 nt, Human
acuguggccguuaucuggaa

SEQ ID NO: 3791245 - RNA, 12 nt, Human
acuguggccuug

SEQ ID NO: 3791246 - RNA, 22 nt, Human
acuguggccuuggucuaacuuu

SEQ ID NO: 3791247 - RNA, 17 nt, Human
acugugggcaauuuaga

SEQ ID NO: 3791248 - RNA, 19 nt, Human
acugugggcaauuuagaaa

SEQ ID NO: 3791249 - RNA, 20 nt, Human
acugugggcaauuuagaaaa

SEQ ID NO: 3791250 - RNA, 22 nt, Human
acuguggggaaccaauugcuuu

SEQ ID NO: 3791251 - RNA, 22 nt, Human
acuguggggugugcacaucucu

SEQ ID NO: 3791252 - RNA, 22 nt, Human
acuguggguuuguggggggagg

SEQ ID NO: 3791253 - RNA, 17 nt, Human
acugugguaaaugccac

SEQ ID NO: 3791254 - RNA, 14 nt, Human
acuguggugacuuu

SEQ ID NO: 3791255 - RNA, 15 nt, Human
acuguggugacuuug

SEQ ID NO: 3791256 - RNA, 19 nt, Human
acuguguaaaauguaaugc

SEQ ID NO: 3791257 - RNA, 12 nt, Human
acuguguaacug

SEQ ID NO: 3791258 - RNA, 17 nt, Human
acuguguaacugcccaa

SEQ ID NO: 3791259 - RNA, 17 nt, Human
acuguguacauaacuga

SEQ ID NO: 3791260 - RNA, 12 nt, Human
acuguguauaga

SEQ ID NO: 3791261 - RNA, 17 nt, Human
acuguguauauuugauu

SEQ ID NO: 3791262 - RNA, 18 nt, Human
acuguguauauuugauuu

SEQ ID NO: 3791263 - RNA, 16 nt, Human
acuguguauguacaua

SEQ ID NO: 3791264 - RNA, 21 nt, Human
acuguguauuccaagacaugu

SEQ ID NO: 3791265 - RNA, 18 nt, Human
acugugucccucucucug

SEQ ID NO: 3791266 - RNA, 13 nt, Human
acuguguccuggu

SEQ ID NO: 3791267 - RNA, 12 nt, Human
acugugugcuca

SEQ ID NO: 3791268 - RNA, 21 nt, Human
acugugugcucaggagcccug

SEQ ID NO: 3791269 - RNA, 17 nt, Human
acuguguggacugugau

SEQ ID NO: 3791270 - RNA, 19 nt, Human
acuguguggacugugaugc

SEQ ID NO: 3791271 - RNA, 16 nt, Human
acuguguguaauuguu

SEQ ID NO: 3791272 - RNA, 23 nt, Human
acugugugugcccucugggcucu

SEQ ID NO: 3791273 - RNA, 18 nt, Human
acugugugugugaaugaa

SEQ ID NO: 3791274 - RNA, 12 nt, Human
acuguguuccug

SEQ ID NO: 3791275 - RNA, 21 nt, Human
acuguguuguauuaacaaaag

SEQ ID NO: 3791276 - RNA, 15 nt, Human
acuguguuucaaguu

SEQ ID NO: 3791277 - RNA, 18 nt, Human
acuguuaaccauuuaagu

SEQ ID NO: 3791278 - RNA, 19 nt, Human
acuguuaagaaaucuguuu

SEQ ID NO: 3791279 - RNA, 12 nt, Human
acuguuacagua

SEQ ID NO: 3791280 - RNA, 16 nt, Human
acuguuacaguaaugu

SEQ ID NO: 3791281 - RNA, 13 nt, Human
acuguuaccauug

SEQ ID NO: 3791282 - RNA, 16 nt, Human
acuguuaccauuggaa

SEQ ID NO: 3791283 - RNA, 17 nt, Human
acuguuaccauuggaaa

SEQ ID NO: 3791284 - RNA, 18 nt, Human
acuguuaccauuggaaau

SEQ ID NO: 3791285 - RNA, 20 nt, Human
acuguuagaaaauggacacu

SEQ ID NO: 3791286 - RNA, 16 nt, Human
acuguuagaacacuau

SEQ ID NO: 3791287 - RNA, 17 nt, Human
acuguuagaacacuauu

SEQ ID NO: 3791288 - RNA, 17 nt, Human
acuuagcuuaucaauuu

SEQ ID NO: 3791289 - RNA, 14 nt, Human
acuuaggcuuugua

SEQ ID NO: 3791290 - RNA, 15 nt, Human
acuuagguguggggg

SEQ ID NO: 3791291 - RNA, 17 nt, Human
acuuaguagauuaaaaa

SEQ ID NO: 3791292 - RNA, 18 nt, Human
acuuauaaaguagaaaug

SEQ ID NO: 3791293 - RNA, 19 nt, Human
acuuauaaaucauauugau

SEQ ID NO: 3791294 - RNA, 23 nt, Human
acuuauaagguguuuucugugua

SEQ ID NO: 3791295 - RNA, 13 nt, Human
acuuauagccucu

SEQ ID NO: 3791296 - RNA, 22 nt, Human
acuuauaucaucagcauaccuu

SEQ ID NO: 3791297 - RNA, 12 nt, Human
acuuauauugaa

SEQ ID NO: 3791298 - RNA, 15 nt, Human
acuuauauuguaaga

SEQ ID NO: 3791299 - RNA, 22 nt, Human
acuuauauuuucguaugaaaau

SEQ ID NO: 3791300 - RNA, 20 nt, Human
acuuaucagcuacuuaagag

SEQ ID NO: 3791301 - RNA, 21 nt, Human
acuuaucaguuugcuaauguu

SEQ ID NO: 3791302 - RNA, 20 nt, Human
acuuaucauccacauuguuu

SEQ ID NO: 3791303 - RNA, 22 nt, Human
acuuaucauccacauuguuuua

SEQ ID NO: 3791304 - RNA, 16 nt, Human
acuuaucccugcccau

SEQ ID NO: 3791305 - RNA, 19 nt, Human
acuuauccuaaaacaaaua

SEQ ID NO: 3791306 - RNA, 17 nt, Human
acuuaucucucugugcu

SEQ ID NO: 3791307 - RNA, 22 nt, Human
acuuaucucucugugcugugga

SEQ ID NO: 3791308 - RNA, 22 nt, Human
acuuaugaaaugugcacuuuau

SEQ ID NO: 3791309 - RNA, 12 nt, Human
acuuaugaaugu

SEQ ID NO: 3791310 - RNA, 16 nt, Human
acuuaugauuucaugu

SEQ ID NO: 3791311 - RNA, 14 nt, Human
acuuaugcugauuu

SEQ ID NO: 3791312 - RNA, 14 nt, Human
acuuauguuuuuaa

SEQ ID NO: 3791313 - RNA, 16 nt, Human
acuuauguuuuuaaau

SEQ ID NO: 3791314 - RNA, 16 nt, Human
acuuauuacaauuugu

SEQ ID NO: 3791315 - RNA, 20 nt, Human
acuuauuacugcuaaguauu

SEQ ID NO: 3791316 - RNA, 15 nt, Human
acuuauucaaagaga

SEQ ID NO: 3791317 - RNA, 13 nt, Human
acuuauugaauau

SEQ ID NO: 3791318 - RNA, 18 nt, Human
acuuauugaauauaugau

SEQ ID NO: 3791319 - RNA, 18 nt, Human
acuuauugcuuugaaacu

SEQ ID NO: 3791320 - RNA, 21 nt, Human
acuuauuggaacucugcuuga

SEQ ID NO: 3791321 - RNA, 13 nt, Human
acuuauuguaaau

SEQ ID NO: 3791322 - RNA, 20 nt, Human
acuuauuguggauaacaaag

SEQ ID NO: 3791323 - RNA, 22 nt, Human
acuuauuguggauaacaaagau

SEQ ID NO: 3791324 - RNA, 18 nt, Human
acuuauuuaaauagauga

SEQ ID NO: 3791325 - RNA, 15 nt, Human
acuuauuuauauaaa

SEQ ID NO: 3791326 - RNA, 16 nt, Human
acuuauuucuucaaau

SEQ ID NO: 3791327 - RNA, 12 nt, Human
acuuauuugagu

SEQ ID NO: 3791328 - RNA, 13 nt, Human
acuuauuuggggu

SEQ ID NO: 3791329 - RNA, 16 nt, Human
acuuauuuuauuucca

SEQ ID NO: 3791330 - RNA, 19 nt, Human
acuuauuuuugacaguguu

SEQ ID NO: 3791331 - RNA, 22 nt, Human
acuuauuuuugacaguguugaa

SEQ ID NO: 3791332 - RNA, 19 nt, Human
acuuauuuuuuucugauug

SEQ ID NO: 3791333 - RNA, 19 nt, Human
acuucaaaacaaacagaug

SEQ ID NO: 3791334 - RNA, 18 nt, Human
acuucaaaaguauuuucc

SEQ ID NO: 3791335 - RNA, 15 nt, Human
acuucaaaauauuga

SEQ ID NO: 3791336 - RNA, 18 nt, Human
acuucaaacuacuuugcu

SEQ ID NO: 3791337 - RNA, 16 nt, Human
acuucaaagcaagcug

SEQ ID NO: 3791338 - RNA, 19 nt, Human
acuucaaauuuuuuaaaag

SEQ ID NO: 3791339 - RNA, 18 nt, Human
acuucaagcaccagggaa

SEQ ID NO: 3791340 - RNA, 16 nt, Human
acuucacacacaggca

SEQ ID NO: 3791341 - RNA, 16 nt, Human
acuucacacugcaaga

SEQ ID NO: 3791342 - RNA, 23 nt, Human
acuucacacugcaagagccuugg

SEQ ID NO: 3791343 - RNA, 12 nt, Human
acuucacagagu

SEQ ID NO: 3791344 - RNA, 19 nt, Human
acuucacagagugugcugg

SEQ ID NO: 3791345 - RNA, 19 nt, Human
acuucacgcuuucagcgaa

SEQ ID NO: 3791346 - RNA, 19 nt, Human
acuucacugucaggaagaa

SEQ ID NO: 3791347 - RNA, 14 nt, Human
acuucacugugcug

SEQ ID NO: 3791348 - RNA, 17 nt, Human
acuucagaagcaaacaa

SEQ ID NO: 3791349 - RNA, 18 nt, Human
acuucagaagcaaacaau

SEQ ID NO: 3791350 - RNA, 15 nt, Human
acuucagagagcugg

SEQ ID NO: 3791351 - RNA, 16 nt, Human
acuucagagagcuggu

SEQ ID NO: 3791352 - RNA, 17 nt, Human
acuucagagagcuggua

SEQ ID NO: 3791353 - RNA, 18 nt, Human
acuucagagagcugguag

SEQ ID NO: 3791354 - RNA, 14 nt, Human
acuucagcaagaga

SEQ ID NO: 3791355 - RNA, 10 nt, Human
acuucagcac

SEQ ID NO: 3791356 - RNA, 16 nt, Human
acuucagcuagagcuu

SEQ ID NO: 3791357 - RNA, 13 nt, Human
acuucagcucugu

SEQ ID NO: 3791358 - RNA, 11 nt, Human
acuucagcuga

SEQ ID NO: 3791359 - RNA, 20 nt, Human
acuucaggcucuucuccuuu

SEQ ID NO: 3791360 - RNA, 16 nt, Human
acuucagggcagauuu

SEQ ID NO: 3791361 - RNA, 23 nt, Human
acuucagggcagggcucugauau

SEQ ID NO: 3791362 - RNA, 21 nt, Human
acuucaggguucuccucuccc

SEQ ID NO: 3791363 - RNA, 23 nt, Human
acuucaggguucuccucuccccu

SEQ ID NO: 3791364 - RNA, 17 nt, Human
acuucaguauguuguca

SEQ ID NO: 3791365 - RNA, 15 nt, Human
acuucaguccugcuc

SEQ ID NO: 3791366 - RNA, 21 nt, Human
acuucaguuucacagaaaaua

SEQ ID NO: 3791367 - RNA, 22 nt, Human
acuucaguuucacagaaaauaa

SEQ ID NO: 3791368 - RNA, 15 nt, Human
acuucaucuggaagu

SEQ ID NO: 3791369 - RNA, 19 nt, Human
acuucaugacaagcauuuu

SEQ ID NO: 3791370 - RNA, 15 nt, Human
acuucauggaaugga

SEQ ID NO: 3791371 - RNA, 12 nt, Human
acuucauguaaa

SEQ ID NO: 3791372 - RNA, 23 nt, Human
acuucauguaauuuuauuuuaaa

SEQ ID NO: 3791373 - RNA, 14 nt, Human
acuucaugucaacu

SEQ ID NO: 3791374 - RNA, 17 nt, Human
acuucauuaauaauaaa

SEQ ID NO: 3791375 - RNA, 15 nt, Human
acuucauucuugaaa

SEQ ID NO: 3791376 - RNA, 13 nt, Human
acugcaggcccug

SEQ ID NO: 3791377 - RNA, 19 nt, Human
acugcaggcccuggccucc

SEQ ID NO: 3791378 - RNA, 10 nt, Human
acugcaggga

SEQ ID NO: 3791379 - RNA, 22 nt, Human
acugcagggacacgggcagccu

SEQ ID NO: 3791380 - RNA, 16 nt, Human
acugcagggacugcca

SEQ ID NO: 3791381 - RNA, 17 nt, Human
acugcagggacugccag

SEQ ID NO: 3791382 - RNA, 18 nt, Human
acugcagggacugccagu

SEQ ID NO: 3791383 - RNA, 22 nt, Human
acugcagggccaggacugagcc

SEQ ID NO: 3791384 - RNA, 17 nt, Human
acugcagguuggacccc

SEQ ID NO: 3791385 - RNA, 20 nt, Human
acugcagguuggaccccaga

SEQ ID NO: 3791386 - RNA, 21 nt, Human
acugcagguuggaccccagag

SEQ ID NO: 3791387 - RNA, 14 nt, Human
acugcauacaaucu

SEQ ID NO: 3791388 - RNA, 16 nt, Human
acugcauaccaaccug

SEQ ID NO: 3791389 - RNA, 16 nt, Human
acugcauaugaaagga

SEQ ID NO: 3791390 - RNA, 20 nt, Human
acugcaucaagaugugacau

SEQ ID NO: 3791391 - RNA, 22 nt, Human
acugcaucaagaugugacaugu

SEQ ID NO: 3791392 - RNA, 14 nt, Human
acugcauccagccu

SEQ ID NO: 3791393 - RNA, 23 nt, Human
acugcauccuccgccucccgggu

SEQ ID NO: 3791394 - RNA, 17 nt, Human
acugcaugcccagagac

SEQ ID NO: 3791395 - RNA, 13 nt, Human
acugcaugcugcu

SEQ ID NO: 3791396 - RNA, 16 nt, Human
acugcaugcugcugga

SEQ ID NO: 3791397 - RNA, 17 nt, Human
acugcaugcugcuggac

SEQ ID NO: 3791398 - RNA, 21 nt, Human
acugcauguaccauuugcaug

SEQ ID NO: 3791399 - RNA, 16 nt, Human
acugcauguuugugau

SEQ ID NO: 3791400 - RNA, 20 nt, Human
acugcauuaccgcguuguaa

SEQ ID NO: 3791401 - RNA, 21 nt, Human
acugcauuaccgcguuguaaa

SEQ ID NO: 3791402 - RNA, 16 nt, Human
acugcauuagaaauua

SEQ ID NO: 3791403 - RNA, 15 nt, Human
acugcauuauauuua

SEQ ID NO: 3791404 - RNA, 14 nt, Human
acugcauuauuuga

SEQ ID NO: 3791405 - RNA, 16 nt, Human
acugcauuuagggagu

SEQ ID NO: 3791406 - RNA, 12 nt, Human
acugcauuuuag

SEQ ID NO: 3791407 - RNA, 15 nt, Human
acugccaagccaugg

SEQ ID NO: 3791408 - RNA, 22 nt, Human
acugccacacgucugacccucu

SEQ ID NO: 3791409 - RNA, 13 nt, Human
acugccaccuccc

SEQ ID NO: 3791410 - RNA, 22 nt, Human
acugccacuuugcacauuuuga

SEQ ID NO: 3791411 - RNA, 13 nt, Human
acugccagcaacg

SEQ ID NO: 3791412 - RNA, 12 nt, Human
acugccaggagg

SEQ ID NO: 3791413 - RNA, 14 nt, Human
acugccaggaggga

SEQ ID NO: 3791414 - RNA, 14 nt, Human
acugccaggcucuc

SEQ ID NO: 3791415 - RNA, 17 nt, Human
acugccaggcucucuuu

SEQ ID NO: 3791416 - RNA, 19 nt, Human
acugccagucccccugccc

SEQ ID NO: 3791417 - RNA, 16 nt, Human
acugccagucucacug

SEQ ID NO: 3791418 - RNA, 13 nt, Human
acugccauaaaac

SEQ ID NO: 3791419 - RNA, 21 nt, Human
acugccauaaaacauuaagaa

SEQ ID NO: 3791420 - RNA, 22 nt, Human
acugccauaaaacauuaagaaa

SEQ ID NO: 3791421 - RNA, 13 nt, Human
acugccauaugau

SEQ ID NO: 3791422 - RNA, 14 nt, Human
acugccauccuggc

SEQ ID NO: 3791423 - RNA, 17 nt, Human
acugccauuauuuucug

SEQ ID NO: 3791424 - RNA, 23 nt, Human
acugccauuauuuucugucagau

SEQ ID NO: 3791425 - RNA, 19 nt, Human
acugcccaaagugcuucca

SEQ ID NO: 3791426 - RNA, 15 nt, Human
acugcccacccccuc

SEQ ID NO: 3791427 - RNA, 17 nt, Human
acugcccacccccucaa

SEQ ID NO: 3791428 - RNA, 16 nt, Human
acugcccagcggacag

SEQ ID NO: 3791429 - RNA, 17 nt, Human
acugcccaggcacugca

SEQ ID NO: 3791430 - RNA, 16 nt, Human
acugcccauggacagg

SEQ ID NO: 3791431 - RNA, 19 nt, Human
acugcccauggacaggcug

SEQ ID NO: 3791432 - RNA, 21 nt, Human
acugcccauggacaggcuggc

SEQ ID NO: 3791433 - RNA, 14 nt, Human
acccaugaaucaaa

SEQ ID NO: 3791434 - RNA, 17 nt, Human
acccaugaaucaaagac

SEQ ID NO: 3791435 - RNA, 18 nt, Human
acccaugcaagcagagga

SEQ ID NO: 3791436 - RNA, 22 nt, Human
acccaugcaagcagaggaccag

SEQ ID NO: 3791437 - RNA, 18 nt, Human
acccauggaaaaaugcca

SEQ ID NO: 3791438 - RNA, 16 nt, Human
acccaugggcucugac

SEQ ID NO: 3791439 - RNA, 22 nt, Human
acccauuaaggggaagaaugaa

SEQ ID NO: 3791440 - RNA, 21 nt, Human
acccauucagagacugucccu

SEQ ID NO: 3791441 - RNA, 17 nt, Human
acccauuccauuuaucu

SEQ ID NO: 3791442 - RNA, 17 nt, Human
acccauuccuauuucuu

SEQ ID NO: 3791443 - RNA, 15 nt, Human
acccauuccuuccca

SEQ ID NO: 3791444 - RNA, 16 nt, Human
acccauuccuucccag

SEQ ID NO: 3791445 - RNA, 13 nt, Human
acccauugcuguu

SEQ ID NO: 3791446 - RNA, 23 nt, Human
acccauuuaaauuuuuuuccuua

SEQ ID NO: 3791447 - RNA, 15 nt, Human
acccauuuguucaua

SEQ ID NO: 3791448 - RNA, 23 nt, Human
accccaaaauuagccaguaaucc

SEQ ID NO: 3791449 - RNA, 22 nt, Human
accccaacagcacccucuccag

SEQ ID NO: 3791450 - RNA, 14 nt, Human
accccaaccugcuc

SEQ ID NO: 3791451 - RNA, 20 nt, Human
accccaaccugcucuccucu

SEQ ID NO: 3791452 - RNA, 17 nt, Human
accccaacgcacaggaa

SEQ ID NO: 3791453 - RNA, 16 nt, Human
accccaagaggaaguu

SEQ ID NO: 3791454 - RNA, 21 nt, Human
accccaagccagcccggccgc

SEQ ID NO: 3791455 - RNA, 15 nt, Human
accccaagcgcccug

SEQ ID NO: 3791456 - RNA, 17 nt, Human
accccaaggagggagau

SEQ ID NO: 3791457 - RNA, 19 nt, Human
accccaccauaugaauugu

SEQ ID NO: 3791458 - RNA, 15 nt, Human
accccacccccaccc

SEQ ID NO: 3791459 - RNA, 12 nt, Human
accccacccccu

SEQ ID NO: 3791460 - RNA, 12 nt, Human
accccacccuca

SEQ ID NO: 3791461 - RNA, 18 nt, Human
accccacccucccuggag

SEQ ID NO: 3791462 - RNA, 19 nt, Human
accccacccuguuuggauu

SEQ ID NO: 3791463 - RNA, 13 nt, Human
accccacccuucc

SEQ ID NO: 3791464 - RNA, 16 nt, Human
accccacccuugccca

SEQ ID NO: 3791465 - RNA, 17 nt, Human
accccacccuugcccac

SEQ ID NO: 3791466 - RNA, 22 nt, Human
accccacccuugcccaccccac

SEQ ID NO: 3791467 - RNA, 11 nt, Human
accccaccugc

SEQ ID NO: 3791468 - RNA, 14 nt, Human
accccaccugcagg

SEQ ID NO: 3791469 - RNA, 12 nt, Human
accccaccugcg

SEQ ID NO: 3791470 - RNA, 16 nt, Human
accccacucacagaga

SEQ ID NO: 3791471 - RNA, 18 nt, Human
accccacucacagagaca

SEQ ID NO: 3791472 - RNA, 13 nt, Human
accccacucccac

SEQ ID NO: 3791473 - RNA, 22 nt, Human
accccacuuagccuuucuuuuc

SEQ ID NO: 3791474 - RNA, 19 nt, Human
accccagacuagauguagu

SEQ ID NO: 3791475 - RNA, 15 nt, Human
accccagagccacac

SEQ ID NO: 3791476 - RNA, 18 nt, Human
accccagagccacacaug

SEQ ID NO: 3791477 - RNA, 13 nt, Human
accccagagugug

SEQ ID NO: 3791478 - RNA, 13 nt, Human
accccagcauccu

SEQ ID NO: 3791479 - RNA, 12 nt, Human
accccagccuaa

SEQ ID NO: 3791480 - RNA, 21 nt, Human
accccagccucaaauccagga

SEQ ID NO: 3791481 - RNA, 22 nt, Human
accccagccuggccacgcagcc

SEQ ID NO: 3791482 - RNA, 14 nt, Human
accccagcucugcu

SEQ ID NO: 3791483 - RNA, 13 nt, Human
accccagcuggga

SEQ ID NO: 3791484 - RNA, 17 nt, Human
accccagcugggaggca

SEQ ID NO: 3791485 - RNA, 19 nt, Human
accccagcugugagccuug

SEQ ID NO: 3791486 - RNA, 21 nt, Human
accccagcugugagccuuggc

SEQ ID NO: 3791487 - RNA, 17 nt, Human
accccaggacgccacuc

SEQ ID NO: 3791488 - RNA, 19 nt, Human
accccaggcccacucaggg

SEQ ID NO: 3791489 - RNA, 12 nt, Human
accccaggcccc

SEQ ID NO: 3791490 - RNA, 15 nt, Human
accccaggccccgag

SEQ ID NO: 3791491 - RNA, 15 nt, Human
accccagggcagcca

SEQ ID NO: 3791492 - RNA, 17 nt, Human
accccagggcagccagg

SEQ ID NO: 3791493 - RNA, 21 nt, Human
accccagggcagccagggaga

SEQ ID NO: 3791494 - RNA, 11 nt, Human
accccagggcc

SEQ ID NO: 3791495 - RNA, 15 nt, Human
accccaguucugcuc

SEQ ID NO: 3791496 - RNA, 21 nt, Human
accccaguucugcuccucucc

SEQ ID NO: 3791497 - RNA, 18 nt, Human
accccaucccuccuuaag

SEQ ID NO: 3791498 - RNA, 17 nt, Human
accccaucccugucuuu

SEQ ID NO: 3791499 - RNA, 18 nt, Human
accccauccuccagggcu

SEQ ID NO: 3791500 - RNA, 17 nt, Human
accccaucugcauuccc

SEQ ID NO: 3791501 - RNA, 13 nt, Human
accccaucugccc

SEQ ID NO: 3791502 - RNA, 16 nt, Human
accccaugccaaagcu

SEQ ID NO: 3791503 - RNA, 17 nt, Human
accccaugcuguugauu

SEQ ID NO: 3791504 - RNA, 22 nt, Human
accccaugcuguugauugcuaa

SEQ ID NO: 3791505 - RNA, 21 nt, Human
accccauggugcuaggaagag

SEQ ID NO: 3791506 - RNA, 13 nt, Human
accccauucccgc

SEQ ID NO: 3791507 - RNA, 23 nt, Human
accccauucuuugcuugaacaca

SEQ ID NO: 3791508 - RNA, 14 nt, Human
accccauuucucuc

SEQ ID NO: 3791509 - RNA, 16 nt, Human
accccauuuucugugg

SEQ ID NO: 3791510 - RNA, 16 nt, Human
acccccaaggggcagu

SEQ ID NO: 3791511 - RNA, 12 nt, Human
acccccacacac

SEQ ID NO: 3791512 - RNA, 20 nt, Human
acccccacacacacacacau

SEQ ID NO: 3791513 - RNA, 15 nt, Human
acccccacaccucag

SEQ ID NO: 3791514 - RNA, 10 nt, Human
acccccacca

SEQ ID NO: 3791515 - RNA, 14 nt, Human
acccccaccccaca

SEQ ID NO: 3791516 - RNA, 16 nt, Human
acccccaccccacacu

SEQ ID NO: 3791517 - RNA, 16 nt, Human
acccccaccccuugcu

SEQ ID NO: 3791518 - RNA, 11 nt, Human
acccccacccu

SEQ ID NO: 3791519 - RNA, 18 nt, Human
acccccacucucauuccc

SEQ ID NO: 3791520 - RNA, 11 nt, Human
acccccagcaa

SEQ ID NO: 3791521 - RNA, 11 nt, Human
acccccagccc

SEQ ID NO: 3791522 - RNA, 20 nt, Human
acccccagccccgacuccag

SEQ ID NO: 3791523 - RNA, 21 nt, Human
acccccagccccgacuccagc

SEQ ID NO: 3791524 - RNA, 14 nt, Human
acccccagccuggg

SEQ ID NO: 3791525 - RNA, 15 nt, Human
acccccagccugggc

SEQ ID NO: 3791526 - RNA, 16 nt, Human
acccccagcuuugcua

SEQ ID NO: 3791527 - RNA, 15 nt, Human
acccccauucucauc

SEQ ID NO: 3791528 - RNA, 14 nt, Human
accccccaagcugu

SEQ ID NO: 3791529 - RNA, 22 nt, Human
accccccacacucacuccugag

SEQ ID NO: 3791530 - RNA, 12 nt, Human
accccccaccug

SEQ ID NO: 3791531 - RNA, 15 nt, Human
accccccagcacuga

SEQ ID NO: 3791532 - RNA, 14 nt, Human
accccccuguacac

SEQ ID NO: 3791533 - RNA, 19 nt, Human
accccccuguucuaagggg

SEQ ID NO: 3791534 - RNA, 20 nt, Human
accccccuuucacaggcagc

SEQ ID NO: 3791535 - RNA, 15 nt, Human
acccccgcccaggcu

SEQ ID NO: 3791536 - RNA, 20 nt, Human
acccccgcccaggcuggcca

SEQ ID NO: 3791537 - RNA, 14 nt, Human
acccccgcccccug

SEQ ID NO: 3791538 - RNA, 15 nt, Human
acccccgcccccugc

SEQ ID NO: 3791539 - RNA, 19 nt, Human
acccccgcccccugcccuc

SEQ ID NO: 3791540 - RNA, 20 nt, Human
acccccgcccccugcccucc

SEQ ID NO: 3791541 - RNA, 20 nt, Human
acccccguggggcagggagc

SEQ ID NO: 3791542 - RNA, 13 nt, Human
acccccucacccc

SEQ ID NO: 3791543 - RNA, 16 nt, Human
acccccucauuguuua

SEQ ID NO: 3791544 - RNA, 14 nt, Human
acccccucccaccc

SEQ ID NO: 3791545 - RNA, 16 nt, Human
acccccucccaccccc

SEQ ID NO: 3791546 - RNA, 17 nt, Human
acccccucccaccccca

SEQ ID NO: 3791547 - RNA, 13 nt, Human
acccccuccccag

SEQ ID NO: 3791548 - RNA, 15 nt, Human
acccccuccccgccc

SEQ ID NO: 3791549 - RNA, 14 nt, Human
acccccucccuggc

SEQ ID NO: 3791550 - RNA, 17 nt, Human
acccccucccuggccug

SEQ ID NO: 3791551 - RNA, 15 nt, Human
acccccuccucucug

SEQ ID NO: 3791552 - RNA, 15 nt, Human
acccccuccugcugc

SEQ ID NO: 3791553 - RNA, 19 nt, Human
acccccuccuucagacacc

SEQ ID NO: 3791554 - RNA, 15 nt, Human
acccccucucccugc

SEQ ID NO: 3791555 - RNA, 22 nt, Human
acccccucuucugagcacagau

SEQ ID NO: 3791556 - RNA, 11 nt, Human
acccccugaau

SEQ ID NO: 3791557 - RNA, 22 nt, Human
acccccugagauccccugagcc

SEQ ID NO: 3791558 - RNA, 14 nt, Human
acccccugcaaagc

SEQ ID NO: 3791559 - RNA, 13 nt, Human
acccccugcccug

SEQ ID NO: 3791560 - RNA, 18 nt, Human
acccccuucagugcccac

SEQ ID NO: 3791561 - RNA, 19 nt, Human
acccccuuccuacucccag

SEQ ID NO: 3791562 - RNA, 18 nt, Human
acccccuucuccauccac

SEQ ID NO: 3791563 - RNA, 19 nt, Human
acccccuucuccauccaca

SEQ ID NO: 3791564 - RNA, 16 nt, Human
acccccuucucugcuc

SEQ ID NO: 3791565 - RNA, 23 nt, Human
acccccuucucugcuccaccaca

SEQ ID NO: 3791566 - RNA, 14 nt, Human
acccccuucugggc

SEQ ID NO: 3791567 - RNA, 18 nt, Human
acccccuuugugcugugg

SEQ ID NO: 3791568 - RNA, 15 nt, Human
accccgacuuuuguu

SEQ ID NO: 3791569 - RNA, 15 nt, Human
accccgcagacaccu

SEQ ID NO: 3791570 - RNA, 17 nt, Human
accccgcagacaccuug

SEQ ID NO: 3791571 - RNA, 20 nt, Human
accccgcagacaccuuggac

SEQ ID NO: 3791572 - RNA, 21 nt, Human
accccgcucugcaugcggccc

SEQ ID NO: 3791573 - RNA, 14 nt, Human
accccggcaggccc

SEQ ID NO: 3791574 - RNA, 17 nt, Human
accccggcaggcccugc

SEQ ID NO: 3791575 - RNA, 18 nt, Human
accccggcaggcccugca

SEQ ID NO: 3791576 - RNA, 21 nt, Human
accccggcaggcccugcagug

SEQ ID NO: 3791577 - RNA, 15 nt, Human
accccggccaccugc

SEQ ID NO: 3791578 - RNA, 13 nt, Human
accccgggcgggu

SEQ ID NO: 3791579 - RNA, 13 nt, Human
accccgggcucuc

SEQ ID NO: 3791580 - RNA, 13 nt, Human
acccucccagacc

SEQ ID NO: 3791581 - RNA, 15 nt, Human
acccucccagaccug

SEQ ID NO: 3791582 - RNA, 16 nt, Human
acccucccauggcacc

SEQ ID NO: 3791583 - RNA, 17 nt, Human
acccucccauggcaccu

SEQ ID NO: 3791584 - RNA, 23 nt, Human
acccuccccgcaccccccaagcu

SEQ ID NO: 3791585 - RNA, 12 nt, Human
acccuccccucu

SEQ ID NO: 3791586 - RNA, 13 nt, Human
acccuccccucuc

SEQ ID NO: 3791587 - RNA, 15 nt, Human
acccuccccuuccca

SEQ ID NO: 3791588 - RNA, 14 nt, Human
acccucccucagcc

SEQ ID NO: 3791589 - RNA, 18 nt, Human
acccucccucagccccuc

SEQ ID NO: 3791590 - RNA, 20 nt, Human
acccucccugcuguccccuc

SEQ ID NO: 3791591 - RNA, 21 nt, Human
acccucccugcuguccccucu

SEQ ID NO: 3791592 - RNA, 13 nt, Human
acccucccuggag

SEQ ID NO: 3791593 - RNA, 14 nt, Human
acccucccuggagu

SEQ ID NO: 3791594 - RNA, 15 nt, Human
acccuccgccuucac

SEQ ID NO: 3791595 - RNA, 19 nt, Human
acccuccuccagaccauuc

SEQ ID NO: 3791596 - RNA, 11 nt, Human
acccuccuggc

SEQ ID NO: 3791597 - RNA, 15 nt, Human
acccuccuggccuca

SEQ ID NO: 3791598 - RNA, 13 nt, Human
acccuccuggcuc

SEQ ID NO: 3791599 - RNA, 20 nt, Human
acuuccauggcccucauuaa

SEQ ID NO: 3791600 - RNA, 22 nt, Human
acuucccaguucaggaguccca

SEQ ID NO: 3791601 - RNA, 23 nt, Human
acuucccaguucaggagucccaa

SEQ ID NO: 3791602 - RNA, 18 nt, Human
acuuccccaauaucuugc

SEQ ID NO: 3791603 - RNA, 20 nt, Human
acuuccccauggcccugagc

SEQ ID NO: 3791604 - RNA, 21 nt, Human
acuucccccaaauuuaaagaa

SEQ ID NO: 3791605 - RNA, 22 nt, Human
acuuccccgcauuccaggcucc

SEQ ID NO: 3791606 - RNA, 16 nt, Human
acuuccccuccuaccc

SEQ ID NO: 3791607 - RNA, 19 nt, Human
acuucccgggccagggcug

SEQ ID NO: 3791608 - RNA, 20 nt, Human
acuucccucuguuucucuuu

SEQ ID NO: 3791609 - RNA, 22 nt, Human
acuucccugacacugcggggcu

SEQ ID NO: 3791610 - RNA, 22 nt, Human
acuucccugauugaccugcucc

SEQ ID NO: 3791611 - RNA, 13 nt, Human
acuucccugggca

SEQ ID NO: 3791612 - RNA, 14 nt, Human
acuucccuuucugc

SEQ ID NO: 3791613 - RNA, 16 nt, Human
acuuccgucacauccc

SEQ ID NO: 3791614 - RNA, 20 nt, Human
acuuccuaaauauuaugaga

SEQ ID NO: 3791615 - RNA, 17 nt, Human
acuuccucgccucuccc

SEQ ID NO: 3791616 - RNA, 19 nt, Human
acuuccugccuggucuccu

SEQ ID NO: 3791617 - RNA, 17 nt, Human
acuuccuguccagagag

SEQ ID NO: 3791618 - RNA, 22 nt, Human
acuuccuguccagcuccaaccu

SEQ ID NO: 3791619 - RNA, 17 nt, Human
acuuccuguuugggccc

SEQ ID NO: 3791620 - RNA, 22 nt, Human
acuuccuuacuaagcauagcaa

SEQ ID NO: 3791621 - RNA, 15 nt, Human
acuuccuuacuuuua

SEQ ID NO: 3791622 - RNA, 18 nt, Human
acuuccuuaugcuucuuu

SEQ ID NO: 3791623 - RNA, 14 nt, Human
acuuccuugagaca

SEQ ID NO: 3791624 - RNA, 23 nt, Human
acuucgacacuguucuuagcuca

SEQ ID NO: 3791625 - RNA, 17 nt, Human
acuucgcaucaaaagac

SEQ ID NO: 3791626 - RNA, 15 nt, Human
acuucggccagagcu

SEQ ID NO: 3791627 - RNA, 19 nt, Human
acuucgggaaggugucugg

SEQ ID NO: 3791628 - RNA, 17 nt, Human
acuucggggcugggaag

SEQ ID NO: 3791629 - RNA, 19 nt, Human
acuucgucuucuaauuuca

SEQ ID NO: 3791630 - RNA, 22 nt, Human
acuucgugggaucugccccucc

SEQ ID NO: 3791631 - RNA, 20 nt, Human
acuucguuuaaugaaugcuu

SEQ ID NO: 3791632 - RNA, 16 nt, Human
acuucuaaaacuguac

SEQ ID NO: 3791633 - RNA, 17 nt, Human
acuucuaagaaaagccu

SEQ ID NO: 3791634 - RNA, 17 nt, Human
acuucuaauugccaugu

SEQ ID NO: 3791635 - RNA, 17 nt, Human
acuucucaggacacagg

SEQ ID NO: 3791636 - RNA, 21 nt, Human
acuucucaggacacaggccug

SEQ ID NO: 3791637 - RNA, 18 nt, Human
acuucucaucacacacau

SEQ ID NO: 3791638 - RNA, 20 nt, Human
acuucucauuuuuuaaaaaa

SEQ ID NO: 3791639 - RNA, 15 nt, Human
acuucuccacccugc

SEQ ID NO: 3791640 - RNA, 15 nt, Human
acuucuccagccuag

SEQ ID NO: 3791641 - RNA, 22 nt, Human
acuucuccauccuuucugccuc

SEQ ID NO: 3791642 - RNA, 14 nt, Human
acuucucugaaggg

SEQ ID NO: 3791643 - RNA, 23 nt, Human
acuucucugccuuugacauuuaa

SEQ ID NO: 3791644 - RNA, 20 nt, Human
acuucucuuaaacuugugaa

SEQ ID NO: 3791645 - RNA, 14 nt, Human
acuucucuuccuug

SEQ ID NO: 3791646 - RNA, 16 nt, Human
acuucucuugcuuucu

SEQ ID NO: 3791647 - RNA, 21 nt, Human
acuucucuuguuagguaauuu

SEQ ID NO: 3791648 - RNA, 17 nt, Human
acuucucuuugccucaa

SEQ ID NO: 3791649 - RNA, 19 nt, Human
acuucugcuuuccacaccu

SEQ ID NO: 3791650 - RNA, 22 nt, Human
acuucugcuuuccacaccuggc

SEQ ID NO: 3791651 - RNA, 21 nt, Human
acuucuguaauuguguggauu

SEQ ID NO: 3791652 - RNA, 23 nt, Human
acuucugugagacccccacaccu

SEQ ID NO: 3791653 - RNA, 23 nt, Human
acuucuguuuucaaucucguaua

SEQ ID NO: 3791654 - RNA, 17 nt, Human
acuucuuauacauuuga

SEQ ID NO: 3791655 - RNA, 23 nt, Human
acuucuuauggaauugauuugca

SEQ ID NO: 3791656 - RNA, 21 nt, Human
acuucuucagagcugacacag

SEQ ID NO: 3791657 - RNA, 18 nt, Human
acuucuucucuuagauuc

SEQ ID NO: 3791658 - RNA, 13 nt, Human
acuucuucuguaa

SEQ ID NO: 3791659 - RNA, 12 nt, Human
acuucuugaagg

SEQ ID NO: 3791660 - RNA, 13 nt, Human
acuucuugaaggu

SEQ ID NO: 3791661 - RNA, 21 nt, Human
acuucuugaauauaaaaaauc

SEQ ID NO: 3791662 - RNA, 23 nt, Human
acuucuugaauauaaaaaaucau

SEQ ID NO: 3791663 - RNA, 18 nt, Human
acuucuugcuucuuucua

SEQ ID NO: 3791664 - RNA, 20 nt, Human
acuucuugcuucuuucuaga

SEQ ID NO: 3791665 - RNA, 15 nt, Human
acuucuugucagaca

SEQ ID NO: 3791666 - RNA, 17 nt, Human
acuucuugucagacaua

SEQ ID NO: 3791667 - RNA, 21 nt, Human
acuucuugucagacauaaagc

SEQ ID NO: 3791668 - RNA, 22 nt, Human
acuucuugucagacauaaagcc

SEQ ID NO: 3791669 - RNA, 19 nt, Human
acuucuuguguguaugcac

SEQ ID NO: 3791670 - RNA, 15 nt, Human
acuucuuucagcaga

SEQ ID NO: 3791671 - RNA, 17 nt, Human
acuucuuucccuuccuc

SEQ ID NO: 3791672 - RNA, 15 nt, Human
acuucuuuuauaacu

SEQ ID NO: 3791673 - RNA, 20 nt, Human
acuucuuuugcucuuagcug

SEQ ID NO: 3791674 - RNA, 23 nt, Human
acuucuuuuuuuuuauuuuuaga

SEQ ID NO: 3791675 - RNA, 14 nt, Human
acuugaaaauuaac

SEQ ID NO: 3791676 - RNA, 17 nt, Human
acuugaaaauuaacaug

SEQ ID NO: 3791677 - RNA, 20 nt, Human
acuugaaagcauccaugugu

SEQ ID NO: 3791678 - RNA, 20 nt, Human
acuugaaauauccugcuuga

SEQ ID NO: 3791679 - RNA, 17 nt, Human
acuugaaauuauaucug

SEQ ID NO: 3791680 - RNA, 20 nt, Human
acuugaaauuugaauuuugu

SEQ ID NO: 3791681 - RNA, 15 nt, Human
acuugaacaaaaggg

SEQ ID NO: 3791682 - RNA, 17 nt, Human
acuugaacaaaaggguc

SEQ ID NO: 3791683 - RNA, 20 nt, Human
acuugaacaaaagggucaga

SEQ ID NO: 3791684 - RNA, 21 nt, Human
acuugaacaaaagggucagag

SEQ ID NO: 3791685 - RNA, 15 nt, Human
acuugaaccauaaaa

SEQ ID NO: 3791686 - RNA, 19 nt, Human
acuugaaccauaaaauguc

SEQ ID NO: 3791687 - RNA, 20 nt, Human
acuugaaccauaaaaugucc

SEQ ID NO: 3791688 - RNA, 19 nt, Human
acuugaaccauaguuacug

SEQ ID NO: 3791689 - RNA, 20 nt, Human
acuugaacguuuucuaauug

SEQ ID NO: 3791690 - RNA, 18 nt, Human
acuugaacuucaccugca

SEQ ID NO: 3791691 - RNA, 12 nt, Human
acuugaacuugu

SEQ ID NO: 3791692 - RNA, 21 nt, Human
acuugaagggccagagccagg

SEQ ID NO: 3791693 - RNA, 22 nt, Human
acuugaaguuguuacuaacuaa

SEQ ID NO: 3791694 - RNA, 19 nt, Human
acuugaauaaccaucugaa

SEQ ID NO: 3791695 - RNA, 16 nt, Human
acuugaaucaaagcag

SEQ ID NO: 3791696 - RNA, 20 nt, Human
acuugaaugaaaauguccau

SEQ ID NO: 3791697 - RNA, 24 nt, Human
acuugaaugcuaguuauacuuauu

SEQ ID NO: 3791698 - RNA, 19 nt, Human
acuugaauuuucccacugc

SEQ ID NO: 3791699 - RNA, 13 nt, Human
acuugacagugga

SEQ ID NO: 3791700 - RNA, 18 nt, Human
acuugacccugagcugac

SEQ ID NO: 3791701 - RNA, 17 nt, Human
acuugagaacuugacaa

SEQ ID NO: 3791702 - RNA, 19 nt, Human
acuugagaauuacccuuuu

SEQ ID NO: 3791703 - RNA, 14 nt, Human
acuugagaccuaau

SEQ ID NO: 3791704 - RNA, 19 nt, Human
acuugagaggaugaaugua

SEQ ID NO: 3791705 - RNA, 16 nt, Human
acuugagaugauuucc

SEQ ID NO: 3791706 - RNA, 21 nt, Human
acuugagauguaugaaggcuu

SEQ ID NO: 3791707 - RNA, 22 nt, Human
acuugagauguaugaaggcuuu

SEQ ID NO: 3791708 - RNA, 21 nt, Human
acuugagcgugaaucuguauc

SEQ ID NO: 3791709 - RNA, 13 nt, Human
acuugaggacaca

SEQ ID NO: 3791710 - RNA, 16 nt, Human
acuugaggacacaugu

SEQ ID NO: 3791711 - RNA, 15 nt, Human
acuugagggcccaga

SEQ ID NO: 3791712 - RNA, 16 nt, Human
acuugagggcccagag

SEQ ID NO: 3791713 - RNA, 19 nt, Human
acuugaggguaauaaacuu

SEQ ID NO: 3791714 - RNA, 18 nt, Human
acuugaguaaaauacucu

SEQ ID NO: 3791715 - RNA, 16 nt, Human
acuugaguguaauguu

SEQ ID NO: 3791716 - RNA, 21 nt, Human
acuugaguuacaccagaccug

SEQ ID NO: 3791717 - RNA, 15 nt, Human
acuugaguuuuauuu

SEQ ID NO: 3791718 - RNA, 23 nt, Human
acuugauaagggacugauguuug

SEQ ID NO: 3791719 - RNA, 22 nt, Human
acuugaugaguguaacaagaaa

SEQ ID NO: 3791720 - RNA, 14 nt, Human
acuugaugcaugug

SEQ ID NO: 3791721 - RNA, 19 nt, Human
acuugauggcuccgaacac

SEQ ID NO: 3791722 - RNA, 16 nt, Human
acuugauggucagaca

SEQ ID NO: 3791723 - RNA, 22 nt, Human
agaauaaauacuguuuuacugu

SEQ ID NO: 3791724 - RNA, 16 nt, Human
agaauaaggcaggcau

SEQ ID NO: 3791725 - RNA, 21 nt, Human
agaauaagucauguuccuuca

SEQ ID NO: 3791726 - RNA, 20 nt, Human
agaauaaucacgcuuuccug

SEQ ID NO: 3791727 - RNA, 16 nt, Human
agaauaaucuuugggu

SEQ ID NO: 3791728 - RNA, 14 nt, Human
agaauaauguucua

SEQ ID NO: 3791729 - RNA, 19 nt, Human
agaauaauguucuauugug

SEQ ID NO: 3791730 - RNA, 17 nt, Human
agaauaccacaucaaau

SEQ ID NO: 3791731 - RNA, 18 nt, Human
agaauaccacaucaaaua

SEQ ID NO: 3791732 - RNA, 15 nt, Human
agaauacuucucauu

SEQ ID NO: 3791733 - RNA, 14 nt, Human
agaauacuugaacu

SEQ ID NO: 3791734 - RNA, 15 nt, Human
agaauacuugaacuu

SEQ ID NO: 3791735 - RNA, 14 nt, Human
agaauacuuuucuc

SEQ ID NO: 3791736 - RNA, 14 nt, Human
agaauagaaagaaa

SEQ ID NO: 3791737 - RNA, 22 nt, Human
agaauagaaauaaaggauguga

SEQ ID NO: 3791738 - RNA, 14 nt, Human
agaauagaaggaaa

SEQ ID NO: 3791739 - RNA, 15 nt, Human
agaauagaaggaaac

SEQ ID NO: 3791740 - RNA, 16 nt, Human
agaauagaugcugacu

SEQ ID NO: 3791741 - RNA, 19 nt, Human
agaauagcaucuguacaaa

SEQ ID NO: 3791742 - RNA, 19 nt, Human
agaauagccacauuuggaa

SEQ ID NO: 3791743 - RNA, 21 nt, Human
agaauagccacauuuggaaua

SEQ ID NO: 3791744 - RNA, 15 nt, Human
agaauaggacuuguu

SEQ ID NO: 3791745 - RNA, 21 nt, Human
agaauaggacuuguuuuuguu

SEQ ID NO: 3791746 - RNA, 19 nt, Human
agaauaggcauuaacacaa

SEQ ID NO: 3791747 - RNA, 16 nt, Human
agaauauaaaaaacuu

SEQ ID NO: 3791748 - RNA, 15 nt, Human
agaauauaacaugaa

SEQ ID NO: 3791749 - RNA, 16 nt, Human
agaauauaacaugaaa

SEQ ID NO: 3791750 - RNA, 13 nt, Human
agaauauaauacu

SEQ ID NO: 3791751 - RNA, 17 nt, Human
agaauauaauuaucgga

SEQ ID NO: 3791752 - RNA, 15 nt, Human
agaauauauauauau

SEQ ID NO: 3791753 - RNA, 12 nt, Human
agaauauauuua

SEQ ID NO: 3791754 - RNA, 20 nt, Human
agaauauauuuauuuaaagc

SEQ ID NO: 3791755 - RNA, 23 nt, Human
agaauauauuuauuuaaagcauu

SEQ ID NO: 3791756 - RNA, 20 nt, Human
agaauaucaagaugauucug

SEQ ID NO: 3791757 - RNA, 16 nt, Human
agaauaucacagaaaa

SEQ ID NO: 3791758 - RNA, 19 nt, Human
agaauauccuacuucucca

SEQ ID NO: 3791759 - RNA, 12 nt, Human
agaauaugccuu

SEQ ID NO: 3791760 - RNA, 17 nt, Human
agaauauguuucaaacu

SEQ ID NO: 3791761 - RNA, 13 nt, Human
agaauauguuucc

SEQ ID NO: 3791762 - RNA, 15 nt, Human
agaauauguuuccuu

SEQ ID NO: 3791763 - RNA, 18 nt, Human
agaauauguuuccuuguu

SEQ ID NO: 3791764 - RNA, 19 nt, Human
agaauauuagcuuuacugu

SEQ ID NO: 3791765 - RNA, 20 nt, Human
agaauauuagcuuuacuguu

SEQ ID NO: 3791766 - RNA, 14 nt, Human
agaauauucagaca

SEQ ID NO: 3791767 - RNA, 15 nt, Human
agaauauugcaaaau

SEQ ID NO: 3791768 - RNA, 18 nt, Human
agaauauugcaaaauaca

SEQ ID NO: 3791769 - RNA, 15 nt, Human
agaauauuguuccua

SEQ ID NO: 3791770 - RNA, 16 nt, Human
agaauauuguuccuaa

SEQ ID NO: 3791771 - RNA, 16 nt, Human
agaauauuuauuaccu

SEQ ID NO: 3791772 - RNA, 17 nt, Human
agaauauuucuauugaa

SEQ ID NO: 3791773 - RNA, 19 nt, Human
agaauauuucuauugaauu

SEQ ID NO: 3791774 - RNA, 14 nt, Human
agaauauuuuaagu

SEQ ID NO: 3791775 - RNA, 14 nt, Human
agaaucaaacauuu

SEQ ID NO: 3791776 - RNA, 21 nt, Human
agaaucaacauuucucaauaa

SEQ ID NO: 3791777 - RNA, 14 nt, Human
agaaucaaucagua

SEQ ID NO: 3791778 - RNA, 16 nt, Human
agaaucacaggcuggg

SEQ ID NO: 3791779 - RNA, 17 nt, Human
agaaucagaagauaguc

SEQ ID NO: 3791780 - RNA, 17 nt, Human
agaaucagaguagaaau

SEQ ID NO: 3791781 - RNA, 18 nt, Human
agaaucagaguagaaaua

SEQ ID NO: 3791782 - RNA, 19 nt, Human
agaaucagucuauccacag

SEQ ID NO: 3791783 - RNA, 16 nt, Human
agaaucagugcaaaga

SEQ ID NO: 3791784 - RNA, 20 nt, Human
agaaucauaugauucugcuu

SEQ ID NO: 3791785 - RNA, 18 nt, Human
agaaucaugugaacccgg

SEQ ID NO: 3791786 - RNA, 21 nt, Human
agaaucaugugcgucagucca

SEQ ID NO: 3791787 - RNA, 16 nt, Human
agaaucauguuucuuu

SEQ ID NO: 3791788 - RNA, 19 nt, Human
agaaucauguuucuuugau

SEQ ID NO: 3791789 - RNA, 13 nt, Human
agaaucauuaccu

SEQ ID NO: 3791790 - RNA, 17 nt, Human
agaaucauuauuuauua

SEQ ID NO: 3791791 - RNA, 22 nt, Human
agaaucauuauuuauuaaauuu

SEQ ID NO: 3791792 - RNA, 13 nt, Human
agaaucauuguaa

SEQ ID NO: 3791793 - RNA, 15 nt, Human
agaaucauuuagcau

SEQ ID NO: 3791794 - RNA, 18 nt, Human
agaauccaagugaacacu

SEQ ID NO: 3791795 - RNA, 18 nt, Human
agaauccacauuucuaaa

SEQ ID NO: 3791796 - RNA, 22 nt, Human
agaauccacccauccuaccaau

SEQ ID NO: 3791797 - RNA, 15 nt, Human
agaaucccaaauuug

SEQ ID NO: 3791798 - RNA, 18 nt, Human
agaaucccaaauuugauu

SEQ ID NO: 3791799 - RNA, 12 nt, Human
agaaucccagcc

SEQ ID NO: 3791800 - RNA, 19 nt, Human
agaaucccuagacuuuagg

SEQ ID NO: 3791801 - RNA, 16 nt, Human
agaaucccucuacaug

SEQ ID NO: 3791802 - RNA, 14 nt, Human
agaaagugccuuuc

SEQ ID NO: 3791803 - RNA, 16 nt, Human
agaaagugccuuucag

SEQ ID NO: 3791804 - RNA, 21 nt, Human
agaaagugccuuucaggaucu

SEQ ID NO: 3791805 - RNA, 20 nt, Human
agaaagugggugagaugcug

SEQ ID NO: 3791806 - RNA, 14 nt, Human
agaaaguggugcuc

SEQ ID NO: 3791807 - RNA, 16 nt, Human
agaaaguguauuugga

SEQ ID NO: 3791808 - RNA, 16 nt, Human
agaaagugugcuuuau

SEQ ID NO: 3791809 - RNA, 14 nt, Human
agaaaguguucugu

SEQ ID NO: 3791810 - RNA, 20 nt, Human
agaaaguguucuguuacaaa

SEQ ID NO: 3791811 - RNA, 17 nt, Human
agaaaguugcacggcug

SEQ ID NO: 3791812 - RNA, 21 nt, Human
agaaaguugcacggcugcuga

SEQ ID NO: 3791813 - RNA, 12 nt, Human
agaaaguuuccc

SEQ ID NO: 3791814 - RNA, 14 nt, Human
agaaauaaaacugu

SEQ ID NO: 3791815 - RNA, 19 nt, Human
agaaauaaaaggaagccaa

SEQ ID NO: 3791816 - RNA, 20 nt, Human
agaaauaaaaggaagccaaa

SEQ ID NO: 3791817 - RNA, 13 nt, Human
agaaauaaaccaa

SEQ ID NO: 3791818 - RNA, 17 nt, Human
agaaauaaaccuuaaua

SEQ ID NO: 3791819 - RNA, 23 nt, Human
agaaauaaaccuuaauauuucuu

SEQ ID NO: 3791820 - RNA, 19 nt, Human
agaaauaaagagaagauau

SEQ ID NO: 3791821 - RNA, 15 nt, Human
agaaauaaaguuucu

SEQ ID NO: 3791822 - RNA, 19 nt, Human
agaaauaaauagcuauauc

SEQ ID NO: 3791823 - RNA, 22 nt, Human
agaaauaaauagcuauauccau

SEQ ID NO: 3791824 - RNA, 14 nt, Human
agaaauaaauauac

SEQ ID NO: 3791825 - RNA, 21 nt, Human
agaaauaaauccacccauguu

SEQ ID NO: 3791826 - RNA, 17 nt, Human
agaaauaaauuuauuuc

SEQ ID NO: 3791827 - RNA, 17 nt, Human
agaaauaagugguuauu

SEQ ID NO: 3791828 - RNA, 16 nt, Human
agaaauaaguuuuugu

SEQ ID NO: 3791829 - RNA, 23 nt, Human
agaaauaaguuuuuguuucacag

SEQ ID NO: 3791830 - RNA, 15 nt, Human
agaaauaauaugcau

SEQ ID NO: 3791831 - RNA, 23 nt, Human
agaaauacaaaaauacucagaua

SEQ ID NO: 3791832 - RNA, 16 nt, Human
agaaauacagacugga

SEQ ID NO: 3791833 - RNA, 17 nt, Human
agaaauacaguacuguu

SEQ ID NO: 3791834 - RNA, 14 nt, Human
agaaauacagucuu

SEQ ID NO: 3791835 - RNA, 19 nt, Human
agaaauacagucuuccaca

SEQ ID NO: 3791836 - RNA, 23 nt, Human
agaaauacuacuguguaagggcc

SEQ ID NO: 3791837 - RNA, 13 nt, Human
agaaauagacaaa

SEQ ID NO: 3791838 - RNA, 18 nt, Human
agaaauagacaaaaagua

SEQ ID NO: 3791839 - RNA, 22 nt, Human
agaaauagacaaaaaguauauu

SEQ ID NO: 3791840 - RNA, 20 nt, Human
agaaauagccugcgcuguuu

SEQ ID NO: 3791841 - RNA, 20 nt, Human
agaaauagcuuaugaaaaga

SEQ ID NO: 3791842 - RNA, 16 nt, Human
agaaauaguucuguga

SEQ ID NO: 3791843 - RNA, 23 nt, Human
agaaauaguuugagaaaugcaua

SEQ ID NO: 3791844 - RNA, 20 nt, Human
agaaauauaauaaaaugugu

SEQ ID NO: 3791845 - RNA, 12 nt, Human
agaaauaucugu

SEQ ID NO: 3791846 - RNA, 14 nt, Human
agaaauaucuguga

SEQ ID NO: 3791847 - RNA, 23 nt, Human
agaaauaucugugaaauaucauc

SEQ ID NO: 3791848 - RNA, 15 nt, Human
agaaauaugauuuua

SEQ ID NO: 3791849 - RNA, 14 nt, Human
agaaauauggacac

SEQ ID NO: 3791850 - RNA, 15 nt, Human
agaaauaugugguuu

SEQ ID NO: 3791851 - RNA, 15 nt, Human
agaaauauuuuaaaa

SEQ ID NO: 3791852 - RNA, 14 nt, Human
agaaauauuuuaau

SEQ ID NO: 3791853 - RNA, 15 nt, Human
agaaaucaauaguug

SEQ ID NO: 3791854 - RNA, 19 nt, Human
agaaaucaauaguugaauu

SEQ ID NO: 3791855 - RNA, 11 nt, Human
agaaaucaugu

SEQ ID NO: 3791856 - RNA, 17 nt, Human
agaaaucauguuaugau

SEQ ID NO: 3791857 - RNA, 21 nt, Human
agaaaucauguuaugauaaaa

SEQ ID NO: 3791858 - RNA, 16 nt, Human
agaaauccauaucuua

SEQ ID NO: 3791859 - RNA, 22 nt, Human
agaaaucccuguuuaauauuua

SEQ ID NO: 3791860 - RNA, 12 nt, Human
agaaaucuaaaa

SEQ ID NO: 3791861 - RNA, 19 nt, Human
agaaaucuauagaaagugu

SEQ ID NO: 3791862 - RNA, 13 nt, Human
agaaaucugaaaa

SEQ ID NO: 3791863 - RNA, 13 nt, Human
agaaaucuguuuu

SEQ ID NO: 3791864 - RNA, 14 nt, Human
agaaaugaaagcag

SEQ ID NO: 3791865 - RNA, 19 nt, Human
agaaaugaaauuuuaccaa

SEQ ID NO: 3791866 - RNA, 20 nt, Human
agaaaugaaauuuuaccaag

SEQ ID NO: 3791867 - RNA, 23 nt, Human
agaaaugaaauuuuaccaaguua

SEQ ID NO: 3791868 - RNA, 23 nt, Human
agaagcccccagcuaagaaccug

SEQ ID NO: 3791869 - RNA, 14 nt, Human
agaagcccggcucc

SEQ ID NO: 3791870 - RNA, 16 nt, Human
agaagcccggcuccug

SEQ ID NO: 3791871 - RNA, 13 nt, Human
agaagcccugaug

SEQ ID NO: 3791872 - RNA, 14 nt, Human
agaagccgggaaca

SEQ ID NO: 3791873 - RNA, 22 nt, Human
agaagccgggaacagacaacag

SEQ ID NO: 3791874 - RNA, 15 nt, Human
agaagccuauuguaa

SEQ ID NO: 3791875 - RNA, 15 nt, Human
agaagccuccccagc

SEQ ID NO: 3791876 - RNA, 13 nt, Human
agaagccucuggc

SEQ ID NO: 3791877 - RNA, 23 nt, Human
agaagccucugggucaguggucc

SEQ ID NO: 3791878 - RNA, 12 nt, Human
agaagccugagg

SEQ ID NO: 3791879 - RNA, 14 nt, Human
agaagccugaggcu

SEQ ID NO: 3791880 - RNA, 17 nt, Human
agaagccugaugcugac

SEQ ID NO: 3791881 - RNA, 14 nt, Human
agaagccugggggc

SEQ ID NO: 3791882 - RNA, 17 nt, Human
agaagccugggggccug

SEQ ID NO: 3791883 - RNA, 20 nt, Human
agaagccugggggccuggcu

SEQ ID NO: 3791884 - RNA, 16 nt, Human
agaagccuguuuuguu

SEQ ID NO: 3791885 - RNA, 17 nt, Human
agaagccuucaagcucu

SEQ ID NO: 3791886 - RNA, 14 nt, Human
agaagccuucagcu

SEQ ID NO: 3791887 - RNA, 19 nt, Human
agaagccuucagcuccagg

SEQ ID NO: 3791888 - RNA, 19 nt, Human
agaagcgauuuaaguuaca

SEQ ID NO: 3791889 - RNA, 19 nt, Human
agaagcgugagacgccacc

SEQ ID NO: 3791890 - RNA, 18 nt, Human
agaagcuaagguuuagau

SEQ ID NO: 3791891 - RNA, 21 nt, Human
agaagcuauaaauuccucuuu

SEQ ID NO: 3791892 - RNA, 15 nt, Human
agaagcucccaggaa

SEQ ID NO: 3791893 - RNA, 16 nt, Human
agaagcucccccagca

SEQ ID NO: 3791894 - RNA, 23 nt, Human
agaagcucccugaaguaagcaaa

SEQ ID NO: 3791895 - RNA, 19 nt, Human
agaagcucucgggcuagga

SEQ ID NO: 3791896 - RNA, 22 nt, Human
agaagcugccaggugagaaacu

SEQ ID NO: 3791897 - RNA, 13 nt, Human
agaagcugcucaa

SEQ ID NO: 3791898 - RNA, 23 nt, Human
agaagcugcucaacuugcaaaau

SEQ ID NO: 3791899 - RNA, 22 nt, Human
agaagcugcuccaggccugcag

SEQ ID NO: 3791900 - RNA, 17 nt, Human
agaagcugcucuggaau

SEQ ID NO: 3791901 - RNA, 13 nt, Human
agaagcuguagua

SEQ ID NO: 3791902 - RNA, 14 nt, Human
agaagcuguuguac

SEQ ID NO: 3791903 - RNA, 18 nt, Human
agaagcuguuguacauuu

SEQ ID NO: 3791904 - RNA, 13 nt, Human
agaagcuuaggca

SEQ ID NO: 3791905 - RNA, 16 nt, Human
agaagcuuaggcaggg

SEQ ID NO: 3791906 - RNA, 17 nt, Human
agaagcuucagaaguuu

SEQ ID NO: 3791907 - RNA, 18 nt, Human
agaagcuuccauuccaag

SEQ ID NO: 3791908 - RNA, 9 nt, Human
agaaggaag

SEQ ID NO: 3791909 - RNA, 20 nt, Human
agaaggaaggcagggaggag

SEQ ID NO: 3791910 - RNA, 13 nt, Human
agaaggaagggca

SEQ ID NO: 3791911 - RNA, 22 nt, Human
agaaggaauucuaggcauccca

SEQ ID NO: 3791912 - RNA, 15 nt, Human
agaaggagaaggaag

SEQ ID NO: 3791913 - RNA, 14 nt, Human
agaaggagacagag

SEQ ID NO: 3791914 - RNA, 20 nt, Human
agaaggagacagagcugguu

SEQ ID NO: 3791915 - RNA, 13 nt, Human
agaaggagagaaa

SEQ ID NO: 3791916 - RNA, 19 nt, Human
agaaggaggagagggaaaa

SEQ ID NO: 3791917 - RNA, 14 nt, Human
agaaggaugaauga

SEQ ID NO: 3791918 - RNA, 17 nt, Human
agaaggauguacauuuc

SEQ ID NO: 3791919 - RNA, 11 nt, Human
agaaggcaaaa

SEQ ID NO: 3791920 - RNA, 13 nt, Human
agaaggcaauauu

SEQ ID NO: 3791921 - RNA, 15 nt, Human
agaaggcagggaaag

SEQ ID NO: 3791922 - RNA, 19 nt, Human
agaaggcauggacuucugg

SEQ ID NO: 3791923 - RNA, 18 nt, Human
agaaggcauuugcagggu

SEQ ID NO: 3791924 - RNA, 13 nt, Human
agaaggccaagag

SEQ ID NO: 3791925 - RNA, 18 nt, Human
agaaggcucuucugacua

SEQ ID NO: 3791926 - RNA, 15 nt, Human
agaagggaaacaguc

SEQ ID NO: 3791927 - RNA, 18 nt, Human
agaagggaauccuccucc

SEQ ID NO: 3791928 - RNA, 11 nt, Human
agaagggaggc

SEQ ID NO: 3791929 - RNA, 16 nt, Human
agaagggagggcagag

SEQ ID NO: 3791930 - RNA, 21 nt, Human
agaagggcuagaaccuggaga

SEQ ID NO: 3791931 - RNA, 23 nt, Human
agaagggcuagaaccuggagagc

SEQ ID NO: 3791932 - RNA, 15 nt, Human
agaaggggaagcacu

SEQ ID NO: 3791933 - RNA, 15 nt, Human
agaaggggacugcca

SEQ ID NO: 3791934 - RNA, 16 nt, Human
agaaggggacugccac

SEQ ID NO: 3791935 - RNA, 21 nt, Human
agaaggggcgggaauauuguu

SEQ ID NO: 3791936 - RNA, 17 nt, Human
agaagggggccaugagg

SEQ ID NO: 3791937 - RNA, 20 nt, Human
agaagggggucaaagcaagg

SEQ ID NO: 3791938 - RNA, 15 nt, Human
agaaggguccuuccc

SEQ ID NO: 3791939 - RNA, 18 nt, Human
agaaggguccuucccucu

SEQ ID NO: 3791940 - RNA, 20 nt, Human
agaaggguccuucccucucc

SEQ ID NO: 3791941 - RNA, 23 nt, Human
agaaggguuuuccacccuggaau

SEQ ID NO: 3791942 - RNA, 13 nt, Human
agaaggucuguuu

SEQ ID NO: 3791943 - RNA, 22 nt, Human
agaagguggaccuuuuaaagug

SEQ ID NO: 3791944 - RNA, 24 nt, Human
agaagguggaccuuuuaaaguguu

SEQ ID NO: 3791945 - RNA, 22 nt, Human
agaagguggggguuggcugggu

SEQ ID NO: 3791946 - RNA, 18 nt, Human
agaagguuaccaagaagc

SEQ ID NO: 3791947 - RNA, 16 nt, Human
agaagguugcucuaga

SEQ ID NO: 3791948 - RNA, 20 nt, Human
agaagguugcucuagauuga

SEQ ID NO: 3791949 - RNA, 14 nt, Human
agaagguuuauugu

SEQ ID NO: 3791950 - RNA, 16 nt, Human
agaagguuuauuguua

SEQ ID NO: 3791951 - RNA, 17 nt, Human
agaagguuuauuguuaa

SEQ ID NO: 3791952 - RNA, 15 nt, Human
agaaguaaaagcaaa

SEQ ID NO: 3791953 - RNA, 20 nt, Human
agaaguaacaagagugauuc

SEQ ID NO: 3791954 - RNA, 21 nt, Human
agaaguaagaggcuaccucuu

SEQ ID NO: 3791955 - RNA, 20 nt, Human
agaaguagauuaagagccau

SEQ ID NO: 3791956 - RNA, 21 nt, Human
agaaguaggcaugagggauca

SEQ ID NO: 3791957 - RNA, 14 nt, Human
agaaguauuauaaa

SEQ ID NO: 3791958 - RNA, 19 nt, Human
agaaguauuauaaauuaug

SEQ ID NO: 3791959 - RNA, 15 nt, Human
agaaguauuuuuaga

SEQ ID NO: 3791960 - RNA, 19 nt, Human
agaaguauuuuuagaauaa

SEQ ID NO: 3791961 - RNA, 17 nt, Human
agaagucaaaguaaaac

SEQ ID NO: 3791962 - RNA, 17 nt, Human
agaagucaacagugaaa

SEQ ID NO: 3791963 - RNA, 17 nt, Human
agaagucaaggcuuaga

SEQ ID NO: 3791964 - RNA, 14 nt, Human
agaagucacacagu

SEQ ID NO: 3791965 - RNA, 18 nt, Human
agaagucacagggcagua

SEQ ID NO: 3791966 - RNA, 23 nt, Human
agaagucacagggcaguaccuga

SEQ ID NO: 3791967 - RNA, 23 nt, Human
accucgugccaccccgagggcug

SEQ ID NO: 3791968 - RNA, 21 nt, Human
accucuaaauucuuucauuuu

SEQ ID NO: 3791969 - RNA, 16 nt, Human
accucuaauaguauaa

SEQ ID NO: 3791970 - RNA, 18 nt, Human
accucuaauuuauuuugu

SEQ ID NO: 3791971 - RNA, 21 nt, Human
accucuacccaaacccuaggu

SEQ ID NO: 3791972 - RNA, 13 nt, Human
accucuagaauuu

SEQ ID NO: 3791973 - RNA, 19 nt, Human
accucuagaauuuuaagcc

SEQ ID NO: 3791974 - RNA, 19 nt, Human
accucuagguccccauacu

SEQ ID NO: 3791975 - RNA, 20 nt, Human
accucuauaauugccacuga

SEQ ID NO: 3791976 - RNA, 12 nt, Human
accucucaauau

SEQ ID NO: 3791977 - RNA, 19 nt, Human
accucucaauauucaauaa

SEQ ID NO: 3791978 - RNA, 23 nt, Human
accucucaauauucaauaaagcu

SEQ ID NO: 3791979 - RNA, 12 nt, Human
accucucacucc

SEQ ID NO: 3791980 - RNA, 18 nt, Human
accucucaucaguguccu

SEQ ID NO: 3791981 - RNA, 10 nt, Human
accucuccaa

SEQ ID NO: 3791982 - RNA, 13 nt, Human
accucuccaaggg

SEQ ID NO: 3791983 - RNA, 22 nt, Human
accucuccaagggcuucugcac

SEQ ID NO: 3791984 - RNA, 18 nt, Human
accucuccagccucagcu

SEQ ID NO: 3791985 - RNA, 20 nt, Human
accucuccagccucagcucu

SEQ ID NO: 3791986 - RNA, 15 nt, Human
accucuccaucuuca

SEQ ID NO: 3791987 - RNA, 20 nt, Human
accucuccaucuucagcuuc

SEQ ID NO: 3791988 - RNA, 12 nt, Human
accucucccuca

SEQ ID NO: 3791989 - RNA, 17 nt, Human
accucucccugacccug

SEQ ID NO: 3791990 - RNA, 22 nt, Human
accucucccugacccuguauau

SEQ ID NO: 3791991 - RNA, 13 nt, Human
accucucccuugg

SEQ ID NO: 3791992 - RNA, 14 nt, Human
accucucccuugga

SEQ ID NO: 3791993 - RNA, 14 nt, Human
accucucucacucc

SEQ ID NO: 3791994 - RNA, 14 nt, Human
accucucucucugg

SEQ ID NO: 3791995 - RNA, 14 nt, Human
accucucugucaug

SEQ ID NO: 3791996 - RNA, 16 nt, Human
accucucugucaugug

SEQ ID NO: 3791997 - RNA, 14 nt, Human
accucucugucccu

SEQ ID NO: 3791998 - RNA, 15 nt, Human
accucucugucccuu

SEQ ID NO: 3791999 - RNA, 14 nt, Human
accucugacagcag

SEQ ID NO: 3792000 - RNA, 21 nt, Human
accucugacagcagcaucucu

SEQ ID NO: 3792001 - RNA, 17 nt, Human
accucugauuuauuuug

SEQ ID NO: 3792002 - RNA, 18 nt, Human
accucugauuuauuuugu

SEQ ID NO: 3792003 - RNA, 12 nt, Human
accucugcacaa

SEQ ID NO: 3792004 - RNA, 16 nt, Human
accucugcacaagcug

SEQ ID NO: 3792005 - RNA, 20 nt, Human
accucugcagcaauaaagca

SEQ ID NO: 3792006 - RNA, 14 nt, Human
accucugccucaau

SEQ ID NO: 3792007 - RNA, 15 nt, Human
accucugccucaaug

SEQ ID NO: 3792008 - RNA, 20 nt, Human
accucugccugaagucacac

SEQ ID NO: 3792009 - RNA, 17 nt, Human
accucugcggaccccag

SEQ ID NO: 3792010 - RNA, 18 nt, Human
accucugcggaccccagc

SEQ ID NO: 3792011 - RNA, 20 nt, Human
accucugcggaccccagcug

SEQ ID NO: 3792012 - RNA, 12 nt, Human
accucugcucug

SEQ ID NO: 3792013 - RNA, 22 nt, Human
agaccuggagccccuggguggg

SEQ ID NO: 3792014 - RNA, 22 nt, Human
agaccuggcaaggacacagaug

SEQ ID NO: 3792015 - RNA, 14 nt, Human
agaccuggcagcuc

SEQ ID NO: 3792016 - RNA, 15 nt, Human
agaccuggcagcucu

SEQ ID NO: 3792017 - RNA, 15 nt, Human
agaccuguccuccug

SEQ ID NO: 3792018 - RNA, 16 nt, Human
agaccugucuccuggc

SEQ ID NO: 3792019 - RNA, 19 nt, Human
agaccuguuagcagacagg

SEQ ID NO: 3792020 - RNA, 22 nt, Human
agaccuuccauaaugcuacugu

SEQ ID NO: 3792021 - RNA, 16 nt, Human
agaccuucuccaaaug

SEQ ID NO: 3792022 - RNA, 21 nt, Human
agaccuuguuacuucugaggu

SEQ ID NO: 3792023 - RNA, 18 nt, Human
agacuggccugaggagca

SEQ ID NO: 3792024 - RNA, 22 nt, Human
agacugggaagauaggcucugc

SEQ ID NO: 3792025 - RNA, 21 nt, Human
agacugggaaggcuugggauu

SEQ ID NO: 3792026 - RNA, 22 nt, Human
agacugggaaggcuugggauuu

SEQ ID NO: 3792027 - RNA, 23 nt, Human
agacugggaaggcuugggauuug

SEQ ID NO: 3792028 - RNA, 12 nt, Human
agacugggcuga

SEQ ID NO: 3792029 - RNA, 14 nt, Human
agacugggcugagg

SEQ ID NO: 3792030 - RNA, 14 nt, Human
agacuggggccacu

SEQ ID NO: 3792031 - RNA, 15 nt, Human
agacugguccugugu

SEQ ID NO: 3792032 - RNA, 12 nt, Human
agacuggugacu

SEQ ID NO: 3792033 - RNA, 13 nt, Human
agacuggugacug

SEQ ID NO: 3792034 - RNA, 20 nt, Human
agacuggugacugauucuuc

SEQ ID NO: 3792035 - RNA, 20 nt, Human
agacugguuccauggccucu

SEQ ID NO: 3792036 - RNA, 16 nt, Human
agacugguuuucugcc

SEQ ID NO: 3792037 - RNA, 18 nt, Human
agacugguuuucugccaa

SEQ ID NO: 3792038 - RNA, 14 nt, Human
agacuguaaugaau

SEQ ID NO: 3792039 - RNA, 14 nt, Human
agacuguacaaagu

SEQ ID NO: 3792040 - RNA, 17 nt, Human
agacuguagauauguau

SEQ ID NO: 3792041 - RNA, 23 nt, Human
agacuguagauauguauucuuuu

SEQ ID NO: 3792042 - RNA, 18 nt, Human
agacugucuggccccccu

SEQ ID NO: 3792043 - RNA, 16 nt, Human
agacugugauucagaa

SEQ ID NO: 3792044 - RNA, 17 nt, Human
agacugugauucagaaa

SEQ ID NO: 3792045 - RNA, 19 nt, Human
agacugugcuguuguucuc

SEQ ID NO: 3792046 - RNA, 19 nt, Human
agacuguggagacugcucc

SEQ ID NO: 3792047 - RNA, 22 nt, Human
agacugugucucucugauaccu

SEQ ID NO: 3792048 - RNA, 16 nt, Human
agacugugugugcccu

SEQ ID NO: 3792049 - RNA, 17 nt, Human
agacugugugugcccuc

SEQ ID NO: 3792050 - RNA, 18 nt, Human
agacugugugugcccucu

SEQ ID NO: 3792051 - RNA, 17 nt, Human
agacuguuaaaugaaac

SEQ ID NO: 3792052 - RNA, 14 nt, Human
agacuguugcucaa

SEQ ID NO: 3792053 - RNA, 17 nt, Human
agacuguugucccugca

SEQ ID NO: 3792054 - RNA, 17 nt, Human
agacuuaauagaaacau

SEQ ID NO: 3792055 - RNA, 23 nt, Human
agacuuaauagaaacauugaaga

SEQ ID NO: 3792056 - RNA, 21 nt, Human
agacuuaaugagacuuuaaaa

SEQ ID NO: 3792057 - RNA, 20 nt, Human
agacuuacagcaaauccuuu

SEQ ID NO: 3792058 - RNA, 23 nt, Human
agacuuacagggauaaggccugu

SEQ ID NO: 3792059 - RNA, 15 nt, Human
agacuuaccaggaag

SEQ ID NO: 3792060 - RNA, 14 nt, Human
agacuuacucuaag

SEQ ID NO: 3792061 - RNA, 19 nt, Human
agacuuacuuuacucauuu

SEQ ID NO: 3792062 - RNA, 19 nt, Human
agacuuaguauauuuucuu

SEQ ID NO: 3792063 - RNA, 21 nt, Human
agacuucacacugcaagagcc

SEQ ID NO: 3792064 - RNA, 14 nt, Human
agacuucagggagu

SEQ ID NO: 3792065 - RNA, 13 nt, Human
agacuucaguaug

SEQ ID NO: 3792066 - RNA, 17 nt, Human
agacuucauuuuuccua

SEQ ID NO: 3792067 - RNA, 20 nt, Human
agacuuccaaaccugacaga

SEQ ID NO: 3792068 - RNA, 21 nt, Human
agacuuccaaaccugacagau

SEQ ID NO: 3792069 - RNA, 13 nt, Human
agacuuccaaaga

SEQ ID NO: 3792070 - RNA, 14 nt, Human
agacuucccagcuu

SEQ ID NO: 3792071 - RNA, 14 nt, Human
agacuuccuugaga

SEQ ID NO: 3792072 - RNA, 16 nt, Human
agacuucgacucagga

SEQ ID NO: 3792073 - RNA, 20 nt, Human
agacuucgacucaggaucca

SEQ ID NO: 3792074 - RNA, 17 nt, Human
agacuucucuuugccuc

SEQ ID NO: 3792075 - RNA, 13 nt, Human
agacuucuguuuu

SEQ ID NO: 3792076 - RNA, 17 nt, Human
agacuucuguuuucaau

SEQ ID NO: 3792077 - RNA, 18 nt, Human
agacuugaaaagagacag

SEQ ID NO: 3792078 - RNA, 22 nt, Human
agacuugaaaagagacaggcag

SEQ ID NO: 3792079 - RNA, 12 nt, Human
agacuugacagu

SEQ ID NO: 3792080 - RNA, 13 nt, Human
agacuugacagug

SEQ ID NO: 3792081 - RNA, 23 nt, Human
agacuugccaacaccacagaaau

SEQ ID NO: 3792082 - RNA, 15 nt, Human
agacuugccauguga

SEQ ID NO: 3792083 - RNA, 16 nt, Human
agacuugccuuccuaa

SEQ ID NO: 3792084 - RNA, 12 nt, Human
agacuugcugaa

SEQ ID NO: 3792085 - RNA, 18 nt, Human
agacuuggcaacagaagc

SEQ ID NO: 3792086 - RNA, 19 nt, Human
agacuuggcaacagaagca

SEQ ID NO: 3792087 - RNA, 15 nt, Human
agacuugggacauug

SEQ ID NO: 3792088 - RNA, 21 nt, Human
agacuuguauagcaugaaaua

SEQ ID NO: 3792089 - RNA, 21 nt, Human
agacuuguauauucuauuuua

SEQ ID NO: 3792090 - RNA, 17 nt, Human
agacuuuaacauaagcu

SEQ ID NO: 3792091 - RNA, 17 nt, Human
agacuuuagaaauaaau

SEQ ID NO: 3792092 - RNA, 20 nt, Human
agacuuuaggcuuucagcuu

SEQ ID NO: 3792093 - RNA, 16 nt, Human
agacuuuauguaguuu

SEQ ID NO: 3792094 - RNA, 17 nt, Human
agacuuuauguaguuuu

SEQ ID NO: 3792095 - RNA, 15 nt, Human
agacuuuccauuaca

SEQ ID NO: 3792096 - RNA, 22 nt, Human
agacuuuccauuacaaguauuu

SEQ ID NO: 3792097 - RNA, 21 nt, Human
agacuuucuuucuguaggugg

SEQ ID NO: 3792098 - RNA, 23 nt, Human
agacuuuggaaaaugcauuguau

SEQ ID NO: 3792099 - RNA, 23 nt, Human
agacuuugguuauuuuacuuuuu

SEQ ID NO: 3792100 - RNA, 18 nt, Human
agacuuuguuuuuaaaau

SEQ ID NO: 3792101 - RNA, 19 nt, Human
agacuuuguuuuuaaaaug

SEQ ID NO: 3792102 - RNA, 19 nt, Human
agacuuuucuuucagccaa

SEQ ID NO: 3792103 - RNA, 14 nt, Human
agacuuuuguacau

SEQ ID NO: 3792104 - RNA, 19 nt, Human
agacuuuuugguggaugua

SEQ ID NO: 3792105 - RNA, 20 nt, Human
agacuuuuugguggauguaa

SEQ ID NO: 3792106 - RNA, 13 nt, Human
agagaaaaaagaa

SEQ ID NO: 3792107 - RNA, 17 nt, Human
agagaaaaaagaagugu

SEQ ID NO: 3792108 - RNA, 16 nt, Human
agagaaaaagaaaugc

SEQ ID NO: 3792109 - RNA, 21 nt, Human
agagaaaaaugcuuugcuuug

SEQ ID NO: 3792110 - RNA, 23 nt, Human
agagaaaacaugcagaacaaaug

SEQ ID NO: 3792111 - RNA, 13 nt, Human
agagaaaauaaaa

SEQ ID NO: 3792112 - RNA, 15 nt, Human
agagaaaauauaugu

SEQ ID NO: 3792113 - RNA, 19 nt, Human
agagaaaauauauguauuu

SEQ ID NO: 3792114 - RNA, 23 nt, Human
agagaaaauauauguauuuuuau

SEQ ID NO: 3792115 - RNA, 14 nt, Human
agagaaaauugaau

SEQ ID NO: 3792116 - RNA, 16 nt, Human
agagaaaauugaauuu

SEQ ID NO: 3792117 - RNA, 21 nt, Human
agagaaaccagcuuccuucag

SEQ ID NO: 3792118 - RNA, 21 nt, Human
agagaaaccguccucuuuuuc

SEQ ID NO: 3792119 - RNA, 21 nt, Human
agagaaacucuauggguauca

SEQ ID NO: 3792120 - RNA, 16 nt, Human
agagaaagaaaaugaa

SEQ ID NO: 3792121 - RNA, 15 nt, Human
agagaaagaagagac

SEQ ID NO: 3792122 - RNA, 14 nt, Human
agagaaagccaggc

SEQ ID NO: 3792123 - RNA, 17 nt, Human
agagaaagccaggcagg

SEQ ID NO: 3792124 - RNA, 14 nt, Human
agagaaagcgcaga

SEQ ID NO: 3792125 - RNA, 18 nt, Human
agagaaaggccugcacac

SEQ ID NO: 3792126 - RNA, 12 nt, Human
agagaaagggga

SEQ ID NO: 3792127 - RNA, 18 nt, Human
agagaaagugauuucuag

SEQ ID NO: 3792128 - RNA, 24 nt, Human
agagaaagugggugagaugcugga

SEQ ID NO: 3792129 - RNA, 23 nt, Human
agagaaauauuuuaauuuuuaaa

SEQ ID NO: 3792130 - RNA, 14 nt, Human
agagaaaucugaaa

SEQ ID NO: 3792131 - RNA, 17 nt, Human
agagaaauucuguuaaa

SEQ ID NO: 3792132 - RNA, 13 nt, Human
agagaaccaggcu

SEQ ID NO: 3792133 - RNA, 17 nt, Human
agagaaccgagcaaaga

SEQ ID NO: 3792134 - RNA, 21 nt, Human
agagaaccgagcaaagaucaa

SEQ ID NO: 3792135 - RNA, 19 nt, Human
agagaaccuaacuguaucu

SEQ ID NO: 3792136 - RNA, 21 nt, Human
agagaaccuaacuguaucuug

SEQ ID NO: 3792137 - RNA, 23 nt, Human
agagaaccuaacuguaucuugag

SEQ ID NO: 3792138 - RNA, 22 nt, Human
agagaaccucacgcaccuccca

SEQ ID NO: 3792139 - RNA, 22 nt, Human
agagaacucgcgcucaguaaac

SEQ ID NO: 3792140 - RNA, 17 nt, Human
agagaagaaagaacgga

SEQ ID NO: 3792141 - RNA, 11 nt, Human
agagaagaaga

SEQ ID NO: 3792142 - RNA, 13 nt, Human
agagaagaagaaa

SEQ ID NO: 3792143 - RNA, 15 nt, Human
agagaagaaugagcc

SEQ ID NO: 3792144 - RNA, 13 nt, Human
agagaagauaauu

SEQ ID NO: 3792145 - RNA, 15 nt, Human
agagaagauaauugu

SEQ ID NO: 3792146 - RNA, 20 nt, Human
agagaagauaauuguugaaa

SEQ ID NO: 3792147 - RNA, 16 nt, Human
agagaagccagcuugu

SEQ ID NO: 3792148 - RNA, 17 nt, Human
agagaagccccuucccc

SEQ ID NO: 3792149 - RNA, 20 nt, Human
agagaagccccuuccccaug

SEQ ID NO: 3792150 - RNA, 23 nt, Human
agagaagccccuuccccauggga

SEQ ID NO: 3792151 - RNA, 14 nt, Human
agagaagccuucaa

SEQ ID NO: 3792152 - RNA, 18 nt, Human
agagaagcggauuuccag

SEQ ID NO: 3792153 - RNA, 12 nt, Human
agagaagcuggg

SEQ ID NO: 3792154 - RNA, 14 nt, Human
agagaaggcagcag

SEQ ID NO: 3792155 - RNA, 21 nt, Human
agagaagggcauaaaacagcu

SEQ ID NO: 3792156 - RNA, 15 nt, Human
agagaaggggaggag

SEQ ID NO: 3792157 - RNA, 19 nt, Human
agagaugaagagugagagg

SEQ ID NO: 3792158 - RNA, 23 nt, Human
agagaugccuccaccgcugccua

SEQ ID NO: 3792159 - RNA, 16 nt, Human
agagaugccucccuga

SEQ ID NO: 3792160 - RNA, 23 nt, Human
agagaugcuguaacuuaaaauag

SEQ ID NO: 3792161 - RNA, 12 nt, Human
agagauggagga

SEQ ID NO: 3792162 - RNA, 22 nt, Human
agagaugggacugggagggccc

SEQ ID NO: 3792163 - RNA, 23 nt, Human
agagaugggacugggagggccca

SEQ ID NO: 3792164 - RNA, 20 nt, Human
agagaugggagcuccucucc

SEQ ID NO: 3792165 - RNA, 16 nt, Human
agagaugucucuuaua

SEQ ID NO: 3792166 - RNA, 18 nt, Human
agagauguguaauuuuuc

SEQ ID NO: 3792167 - RNA, 19 nt, Human
agagauguguaauuuuucu

SEQ ID NO: 3792168 - RNA, 18 nt, Human
agagauguguguugauac

SEQ ID NO: 3792169 - RNA, 22 nt, Human
agagauguguguugauacuguu

SEQ ID NO: 3792170 - RNA, 23 nt, Human
agagauguguguugauacuguug

SEQ ID NO: 3792171 - RNA, 24 nt, Human
agagauguguguugauacuguugc

SEQ ID NO: 3792172 - RNA, 12 nt, Human
agagauguuuuu

SEQ ID NO: 3792173 - RNA, 20 nt, Human
agagauguuuuuaaaaguuu

SEQ ID NO: 3792174 - RNA, 20 nt, Human
agagauuaccuccugagaaa

SEQ ID NO: 3792175 - RNA, 13 nt, Human
agagauucauuuu

SEQ ID NO: 3792176 - RNA, 15 nt, Human
agagauucauuuucu

SEQ ID NO: 3792177 - RNA, 23 nt, Human
agagauucugaacuaaagugcug

SEQ ID NO: 3792178 - RNA, 19 nt, Human
agagauucugauuugccac

SEQ ID NO: 3792179 - RNA, 21 nt, Human
agagauuggaucaaguauuac

SEQ ID NO: 3792180 - RNA, 13 nt, Human
agagauuuaauua

SEQ ID NO: 3792181 - RNA, 23 nt, Human
agagauuuauauaaauguaaaaa

SEQ ID NO: 3792182 - RNA, 22 nt, Human
agaccuuguuacuucugaggua

SEQ ID NO: 3792183 - RNA, 22 nt, Human
agaccuuguucacacucucaca

SEQ ID NO: 3792184 - RNA, 16 nt, Human
agaccuuucaaagcca

SEQ ID NO: 3792185 - RNA, 17 nt, Human
agaccuuuucaacuugg

SEQ ID NO: 3792186 - RNA, 14 nt, Human
agaccuuuuucugc

SEQ ID NO: 3792187 - RNA, 13 nt, Human
agacgaggcccuc

SEQ ID NO: 3792188 - RNA, 16 nt, Human
agacgaugucuucaua

SEQ ID NO: 3792189 - RNA, 15 nt, Human
agacgccaccauucc

SEQ ID NO: 3792190 - RNA, 17 nt, Human
agacgccaccauuccug

SEQ ID NO: 3792191 - RNA, 14 nt, Human
agacgccuggcugc

SEQ ID NO: 3792192 - RNA, 15 nt, Human
agacgccuggcugcu

SEQ ID NO: 3792193 - RNA, 19 nt, Human
agacgcucauucagcaucu

SEQ ID NO: 3792194 - RNA, 20 nt, Human
agacgcugugcugcccugcc

SEQ ID NO: 3792195 - RNA, 16 nt, Human
agacggaggggaguag

SEQ ID NO: 3792196 - RNA, 20 nt, Human
agacggagucucgcucuguc

SEQ ID NO: 3792197 - RNA, 14 nt, Human
agacgggcccuggu

SEQ ID NO: 3792198 - RNA, 17 nt, Human
agacguaggggaggggu

SEQ ID NO: 3792199 - RNA, 21 nt, Human
agacguggaaccucugucuca

SEQ ID NO: 3792200 - RNA, 16 nt, Human
agacguuuuauaagca

SEQ ID NO: 3792201 - RNA, 13 nt, Human
agacuaagaaaua

SEQ ID NO: 3792202 - RNA, 14 nt, Human
agacuaagaaauau

SEQ ID NO: 3792203 - RNA, 21 nt, Human
agacuaagaucgguuaacaaa

SEQ ID NO: 3792204 - RNA, 13 nt, Human
agacuaagccagc

SEQ ID NO: 3792205 - RNA, 13 nt, Human
agacuaagcccug

SEQ ID NO: 3792206 - RNA, 14 nt, Human
agacuaagcccugu

SEQ ID NO: 3792207 - RNA, 15 nt, Human
agacuaauuuaaaaa

SEQ ID NO: 3792208 - RNA, 15 nt, Human
agacuacacaggaug

SEQ ID NO: 3792209 - RNA, 21 nt, Human
agacuacagcuggggugcagg

SEQ ID NO: 3792210 - RNA, 14 nt, Human
agacuacuaagagg

SEQ ID NO: 3792211 - RNA, 16 nt, Human
agacuacuauuuucuu

SEQ ID NO: 3792212 - RNA, 19 nt, Human
agacuacuauuuucuuuuu

SEQ ID NO: 3792213 - RNA, 14 nt, Human
agacuagaauucua

SEQ ID NO: 3792214 - RNA, 22 nt, Human
agacuagaauucuagugcugcu

SEQ ID NO: 3792215 - RNA, 19 nt, Human
agacuagauugccuuuguu

SEQ ID NO: 3792216 - RNA, 23 nt, Human
agacuagcaaucucuucauuauu

SEQ ID NO: 3792217 - RNA, 19 nt, Human
agacuauauacaugugugu

SEQ ID NO: 3792218 - RNA, 17 nt, Human
agacuauauuguacaca

SEQ ID NO: 3792219 - RNA, 17 nt, Human
agacuaucaaacagaaa

SEQ ID NO: 3792220 - RNA, 15 nt, Human
agacuaucagcccaa

SEQ ID NO: 3792221 - RNA, 17 nt, Human
agacuaucuaaauguug

SEQ ID NO: 3792222 - RNA, 17 nt, Human
agacuaucuuacuauuu

SEQ ID NO: 3792223 - RNA, 21 nt, Human
agacuauggagccuggcacag

SEQ ID NO: 3792224 - RNA, 20 nt, Human
agacuauucaaacagucuca

SEQ ID NO: 3792225 - RNA, 17 nt, Human
agacuauuuaaacuuau

SEQ ID NO: 3792226 - RNA, 22 nt, Human
agacuauuuaaacuuauaaauc

SEQ ID NO: 3792227 - RNA, 14 nt, Human
agacuauuuuuaga

SEQ ID NO: 3792228 - RNA, 15 nt, Human
agacucaaauguucu

SEQ ID NO: 3792229 - RNA, 22 nt, Human
agacucaagguucccagagaug

SEQ ID NO: 3792230 - RNA, 12 nt, Human
agacucaccucu

SEQ ID NO: 3792231 - RNA, 16 nt, Human
agacucaccucugccu

SEQ ID NO: 3792232 - RNA, 18 nt, Human
agacucagggccccagca

SEQ ID NO: 3792233 - RNA, 22 nt, Human
agacucagguuguaguaaagaa

SEQ ID NO: 3792234 - RNA, 18 nt, Human
agacucagugcagaugga

SEQ ID NO: 3792235 - RNA, 12 nt, Human
agacucaguguu

SEQ ID NO: 3792236 - RNA, 15 nt, Human
agacucaguuuguca

SEQ ID NO: 3792237 - RNA, 16 nt, Human
agacucaguuugucag

SEQ ID NO: 3792238 - RNA, 22 nt, Human
agacucauauuacugguaggaa

SEQ ID NO: 3792239 - RNA, 20 nt, Human
agacucauccugaacagcau

SEQ ID NO: 3792240 - RNA, 22 nt, Human
agacucauccugaacagcaugg

SEQ ID NO: 3792241 - RNA, 18 nt, Human
agacucaucuuacuguac

SEQ ID NO: 3792242 - RNA, 12 nt, Human
agacuccaaaga

SEQ ID NO: 3792243 - RNA, 14 nt, Human
agacuccaaagaaa

SEQ ID NO: 3792244 - RNA, 14 nt, Human
agacuccauaguuu

SEQ ID NO: 3792245 - RNA, 16 nt, Human
agacuccauaguuugg

SEQ ID NO: 3792246 - RNA, 22 nt, Human
agacuccaucucuauauaaaaa

SEQ ID NO: 3792247 - RNA, 15 nt, Human
agacucccaugaagc

SEQ ID NO: 3792248 - RNA, 16 nt, Human
agacucccaugaagcc

SEQ ID NO: 3792249 - RNA, 18 nt, Human
agacucccaugaagccuu

SEQ ID NO: 3792250 - RNA, 19 nt, Human
agacucccaugaagccuuu

SEQ ID NO: 3792251 - RNA, 21 nt, Human
agacucccaugaagccuuuug

SEQ ID NO: 3792252 - RNA, 23 nt, Human
agacucccaugaagccuuuugaa

SEQ ID NO: 3792253 - RNA, 19 nt, Human
agacucccauuccugaaga

SEQ ID NO: 3792254 - RNA, 23 nt, Human
agacucccauuccugaagaacca

SEQ ID NO: 3792255 - RNA, 17 nt, Human
agacuccuagcuguccu

SEQ ID NO: 3792256 - RNA, 11 nt, Human
agacuccuagg

SEQ ID NO: 3792257 - RNA, 14 nt, Human
agacuccuaggcag

SEQ ID NO: 3792258 - RNA, 22 nt, Human
agacuccuaggcaggacaugcu

SEQ ID NO: 3792259 - RNA, 13 nt, Human
agacuccugcagg

SEQ ID NO: 3792260 - RNA, 14 nt, Human
agacuccugcaggc

SEQ ID NO: 3792261 - RNA, 15 nt, Human
agacuccugcaggca

SEQ ID NO: 3792262 - RNA, 19 nt, Human
agacuccugcaggcagcca

SEQ ID NO: 3792263 - RNA, 20 nt, Human
agacuccugcaggcagccag

SEQ ID NO: 3792264 - RNA, 23 nt, Human
agacuccugcaggcagccaggcc

SEQ ID NO: 3792265 - RNA, 16 nt, Human
agacuccugcccuguu

SEQ ID NO: 3792266 - RNA, 17 nt, Human
agacuccuucaacaauu

SEQ ID NO: 3792267 - RNA, 20 nt, Human
agacuccuugagagaccagg

SEQ ID NO: 3792268 - RNA, 19 nt, Human
agacucgagaacuuucauu

SEQ ID NO: 3792269 - RNA, 19 nt, Human
agacucgcgacaaugcaaa

SEQ ID NO: 3792270 - RNA, 20 nt, Human
agacucgcgacaaugcaaac

SEQ ID NO: 3792271 - RNA, 21 nt, Human
agacucgcgacaaugcaaacc

SEQ ID NO: 3792272 - RNA, 17 nt, Human
agacucggggugcuucc

SEQ ID NO: 3792273 - RNA, 22 nt, Human
agacucggggugcuuccuugua

SEQ ID NO: 3792274 - RNA, 13 nt, Human
agacucuaccaga

SEQ ID NO: 3792275 - RNA, 21 nt, Human
agacucuaccagacuguguau

SEQ ID NO: 3792276 - RNA, 19 nt, Human
agacucuacccauauuaca

SEQ ID NO: 3792277 - RNA, 16 nt, Human
agacucuagaguccaa

SEQ ID NO: 3792278 - RNA, 13 nt, Human
agacucucucugg

SEQ ID NO: 3792279 - RNA, 17 nt, Human
agacucugucuaccugg

SEQ ID NO: 3792280 - RNA, 14 nt, Human
agacucuuuaugcu

SEQ ID NO: 3792281 - RNA, 21 nt, Human
agacucuuuuccuucccuuuu

SEQ ID NO: 3792282 - RNA, 23 nt, Human
agacucuuuuuguaccuggugac

SEQ ID NO: 3792283 - RNA, 15 nt, Human
agacugaacagccaa

SEQ ID NO: 3792284 - RNA, 12 nt, Human
agacugaccaau

SEQ ID NO: 3792285 - RNA, 17 nt, Human
agacugagcaccugcuu

SEQ ID NO: 3792286 - RNA, 16 nt, Human
agacugaggacaaagu

SEQ ID NO: 3792287 - RNA, 19 nt, Human
agacugaucaggaccucca

SEQ ID NO: 3792288 - RNA, 19 nt, Human
agacugcaagaggcuccug

SEQ ID NO: 3792289 - RNA, 21 nt, Human
agacugcaagaggcuccuguc

SEQ ID NO: 3792290 - RNA, 21 nt, Human
agacugcaaugugaucuaugu

SEQ ID NO: 3792291 - RNA, 16 nt, Human
agacugcacccaggag

SEQ ID NO: 3792292 - RNA, 17 nt, Human
agacugcacccaggagg

SEQ ID NO: 3792293 - RNA, 22 nt, Human
agacugccacaaggaagaaauu

SEQ ID NO: 3792294 - RNA, 13 nt, Human
agacugccagcuc

SEQ ID NO: 3792295 - RNA, 14 nt, Human
agacugccagcucu

SEQ ID NO: 3792296 - RNA, 21 nt, Human
agacugccauauuaaauuuuu

SEQ ID NO: 3792297 - RNA, 20 nt, Human
agacugcgggaugguccugg

SEQ ID NO: 3792298 - RNA, 22 nt, Human
agacugcgggaugguccugggg

SEQ ID NO: 3792299 - RNA, 16 nt, Human
agacugcuccugagcc

SEQ ID NO: 3792300 - RNA, 21 nt, Human
agacugcuguggccaggaggu

SEQ ID NO: 3792301 - RNA, 15 nt, Human
aauuggguucacagc

SEQ ID NO: 3792302 - RNA, 13 nt, Human
aauuggguucaug

SEQ ID NO: 3792303 - RNA, 15 nt, Human
aauuggguucaugau

SEQ ID NO: 3792304 - RNA, 19 nt, Human
aauuggguucaugaugcag

SEQ ID NO: 3792305 - RNA, 18 nt, Human
aauugguaucaagaaagu

SEQ ID NO: 3792306 - RNA, 19 nt, Human
aauugguguaauggggcag

SEQ ID NO: 3792307 - RNA, 17 nt, Human
aauuguaaaacugaggc

SEQ ID NO: 3792308 - RNA, 21 nt, Human
aauuguaaaguaaaagcuaua

SEQ ID NO: 3792309 - RNA, 14 nt, Human
aauuguaacuguuc

SEQ ID NO: 3792310 - RNA, 16 nt, Human
aauuguaacuguucuu

SEQ ID NO: 3792311 - RNA, 11 nt, Human
aauuguaauag

SEQ ID NO: 3792312 - RNA, 17 nt, Human
aauuguaauuaauaaua

SEQ ID NO: 3792313 - RNA, 15 nt, Human
aauuguaauuauauc

SEQ ID NO: 3792314 - RNA, 12 nt, Human
aauuguacaaaa

SEQ ID NO: 3792315 - RNA, 14 nt, Human
aauuguacagccgg

SEQ ID NO: 3792316 - RNA, 21 nt, Human
aauuguacauauuuguggaau

SEQ ID NO: 3792317 - RNA, 22 nt, Human
aauuguaccuuuuuuguuuuuu

SEQ ID NO: 3792318 - RNA, 16 nt, Human
aauuguauaacagguu

SEQ ID NO: 3792319 - RNA, 19 nt, Human
aauuguauaacagguuauu

SEQ ID NO: 3792320 - RNA, 15 nt, Human
aauuguauagagaua

SEQ ID NO: 3792321 - RNA, 14 nt, Human
aauuguauauucac

SEQ ID NO: 3792322 - RNA, 14 nt, Human
aauuguauauugua

SEQ ID NO: 3792323 - RNA, 20 nt, Human
aauuguaucagaggccuaua

SEQ ID NO: 3792324 - RNA, 19 nt, Human
aauuguaucguauagcugu

SEQ ID NO: 3792325 - RNA, 13 nt, Human
aauuguaucuagu

SEQ ID NO: 3792326 - RNA, 11 nt, Human
aauuguauuuu

SEQ ID NO: 3792327 - RNA, 12 nt, Human
aauuguauuuuu

SEQ ID NO: 3792328 - RNA, 17 nt, Human
aauuguccguguucaua

SEQ ID NO: 3792329 - RNA, 18 nt, Human
aauugucgaaaagagucu

SEQ ID NO: 3792330 - RNA, 13 nt, Human
aauugucuauuua

SEQ ID NO: 3792331 - RNA, 19 nt, Human
aauugucuuaauggaugaa

SEQ ID NO: 3792332 - RNA, 17 nt, Human
aauugucuucauguaca

SEQ ID NO: 3792333 - RNA, 15 nt, Human
aauugucuuuaaaaa

SEQ ID NO: 3792334 - RNA, 20 nt, Human
aauugucuuuugucaugugg

SEQ ID NO: 3792335 - RNA, 14 nt, Human
acauuaucuucugg

SEQ ID NO: 3792336 - RNA, 17 nt, Human
acauuaugcuccagaaa

SEQ ID NO: 3792337 - RNA, 22 nt, Human
acauuauuaaguaacuuauuua

SEQ ID NO: 3792338 - RNA, 12 nt, Human
acauuauuacuu

SEQ ID NO: 3792339 - RNA, 12 nt, Human
acauuauucugg

SEQ ID NO: 3792340 - RNA, 18 nt, Human
acauuauuuauaugggga

SEQ ID NO: 3792341 - RNA, 12 nt, Human
acauuauuucua

SEQ ID NO: 3792342 - RNA, 16 nt, Human
acauuauuucuagucc

SEQ ID NO: 3792343 - RNA, 14 nt, Human
acauuauuugcaug

SEQ ID NO: 3792344 - RNA, 24 nt, Human
acauucaaaauaggguauauuuuc

SEQ ID NO: 3792345 - RNA, 16 nt, Human
acauucaggaagauga

SEQ ID NO: 3792346 - RNA, 19 nt, Human
acauucaggaauucuugga

SEQ ID NO: 3792347 - RNA, 22 nt, Human
acauucauagucuuuggagaaa

SEQ ID NO: 3792348 - RNA, 13 nt, Human
acauuccaagaca

SEQ ID NO: 3792349 - RNA, 14 nt, Human
acauuccaagacag

SEQ ID NO: 3792350 - RNA, 16 nt, Human
acauuccaagacucua

SEQ ID NO: 3792351 - RNA, 18 nt, Human
acauucccaagguuacuu

SEQ ID NO: 3792352 - RNA, 23 nt, Human
acauuccguuuacauuuuagaca

SEQ ID NO: 3792353 - RNA, 19 nt, Human
acauuccuaaacuaucuuu

SEQ ID NO: 3792354 - RNA, 18 nt, Human
acauuccucaugaaugua

SEQ ID NO: 3792355 - RNA, 21 nt, Human
acauuccucaugaauguaaau

SEQ ID NO: 3792356 - RNA, 22 nt, Human
acauuccucaugaauguaaauu

SEQ ID NO: 3792357 - RNA, 17 nt, Human
acauuccuugccugcac

SEQ ID NO: 3792358 - RNA, 21 nt, Human
acauuccuugcugaaacgcau

SEQ ID NO: 3792359 - RNA, 14 nt, Human
acauucgaucucau

SEQ ID NO: 3792360 - RNA, 19 nt, Human
acauucgaucucauucagu

SEQ ID NO: 3792361 - RNA, 19 nt, Human
acauucucaguuuuucuua

SEQ ID NO: 3792362 - RNA, 19 nt, Human
acauucucgcuucccugaa

SEQ ID NO: 3792363 - RNA, 18 nt, Human
acauucucuaauaagaaa

SEQ ID NO: 3792364 - RNA, 19 nt, Human
acauucucuaauaagaaaa

SEQ ID NO: 3792365 - RNA, 16 nt, Human
acauucugaugagcaa

SEQ ID NO: 3792366 - RNA, 16 nt, Human
acauucugccaggccc

SEQ ID NO: 3792367 - RNA, 23 nt, Human
acauucuggggaaacaacauuua

SEQ ID NO: 3792368 - RNA, 12 nt, Human
acauucuguuaa

SEQ ID NO: 3792369 - RNA, 13 nt, Human
acauucuuaaaaa

SEQ ID NO: 3792370 - RNA, 17 nt, Human
acauucuuauaaauaug

SEQ ID NO: 3792371 - RNA, 20 nt, Human
acauucuuggcuuaaucauu

SEQ ID NO: 3792372 - RNA, 22 nt, Human
acauucuuggcuuaaucauuuu

SEQ ID NO: 3792373 - RNA, 18 nt, Human
acauucuuuuugcucuaa

SEQ ID NO: 3792374 - RNA, 12 nt, Human
acauugaagaau

SEQ ID NO: 3792375 - RNA, 15 nt, Human
acauugaaguaauga

SEQ ID NO: 3792376 - RNA, 19 nt, Human
acauugacgauuccuucuc

SEQ ID NO: 3792377 - RNA, 16 nt, Human
acauugagcugauaua

SEQ ID NO: 3792378 - RNA, 22 nt, Human
acauugaguagacacauuuaag

SEQ ID NO: 3792379 - RNA, 16 nt, Human
acauugauucagccug

SEQ ID NO: 3792380 - RNA, 16 nt, Human
acauugcagucugcuu

SEQ ID NO: 3792381 - RNA, 15 nt, Human
acauugcauucuauu

SEQ ID NO: 3792382 - RNA, 14 nt, Human
acauugccaaaaag

SEQ ID NO: 3792383 - RNA, 16 nt, Human
acauugccuuugaaug

SEQ ID NO: 3792384 - RNA, 22 nt, Human
acauugcggacagccacggcca

SEQ ID NO: 3792385 - RNA, 15 nt, Human
acauugcguuugacc

SEQ ID NO: 3792386 - RNA, 23 nt, Human
acauugcguuugaccuuuuaugu

SEQ ID NO: 3792387 - RNA, 18 nt, Human
acauugcuuuuaaaacua

SEQ ID NO: 3792388 - RNA, 16 nt, Human
acauuggaaacaaguc

SEQ ID NO: 3792389 - RNA, 15 nt, Human
acauuggaagcaggu

SEQ ID NO: 3792390 - RNA, 20 nt, Human
acauuggaagcagguuaaau

SEQ ID NO: 3792391 - RNA, 22 nt, Human
acauuggaagcagguuaaaugu

SEQ ID NO: 3792392 - RNA, 15 nt, Human
acauuggaauguucu

SEQ ID NO: 3792393 - RNA, 22 nt, Human
acauuggagaugccauccucuu

SEQ ID NO: 3792394 - RNA, 15 nt, Human
acauugggaagggga

SEQ ID NO: 3792395 - RNA, 19 nt, Human
acauugggaaggggacccc

SEQ ID NO: 3792396 - RNA, 23 nt, Human
acauugggaaggggacccccgcc

SEQ ID NO: 3792397 - RNA, 16 nt, Human
acauugggucuauucc

SEQ ID NO: 3792398 - RNA, 16 nt, Human
acauugguaagaauga

SEQ ID NO: 3792399 - RNA, 22 nt, Human
acauugguguuguacucaauuu

SEQ ID NO: 3792400 - RNA, 23 nt, Human
acauuguaagagagaugagcacu

SEQ ID NO: 3792401 - RNA, 12 nt, Human
acauugucaaua

SEQ ID NO: 3792402 - RNA, 22 nt, Human
acauugucuccuauauauuucu

SEQ ID NO: 3792403 - RNA, 12 nt, Human
acauugucugcg

SEQ ID NO: 3792404 - RNA, 11 nt, Human
acauugugcca

SEQ ID NO: 3792405 - RNA, 17 nt, Human
acauuguuauuuucagu

SEQ ID NO: 3792406 - RNA, 21 nt, Human
acauuguucaccuuuguagca

SEQ ID NO: 3792407 - RNA, 14 nt, Human
acauuguugagcua

SEQ ID NO: 3792408 - RNA, 21 nt, Human
acauuguugcucccugugaca

SEQ ID NO: 3792409 - RNA, 20 nt, Human
acauuguuguuuuuuuaaua

SEQ ID NO: 3792410 - RNA, 16 nt, Human
acauuguuuuaaaaag

SEQ ID NO: 3792411 - RNA, 12 nt, Human
acauuguuuugc

SEQ ID NO: 3792412 - RNA, 10 nt, Human
acauuuaaaa

SEQ ID NO: 3792413 - RNA, 14 nt, Human
acauuuaaaacauu

SEQ ID NO: 3792414 - RNA, 22 nt, Human
acauuuaaaacauuaaaauaua

SEQ ID NO: 3792415 - RNA, 14 nt, Human
acauuuaaaccuuu

SEQ ID NO: 3792416 - RNA, 14 nt, Human
acauuuaaagcauu

SEQ ID NO: 3792417 - RNA, 16 nt, Human
acauuuaauacagcag

SEQ ID NO: 3792418 - RNA, 12 nt, Human
acauuuaauuua

SEQ ID NO: 3792419 - RNA, 15 nt, Human
acauuuacaaacuga

SEQ ID NO: 3792420 - RNA, 14 nt, Human
acauuuacauguau

SEQ ID NO: 3792421 - RNA, 21 nt, Human
acauuuacuacaguuuuuaac

SEQ ID NO: 3792422 - RNA, 17 nt, Human
acauuuagaaaagugaa

SEQ ID NO: 3792423 - RNA, 20 nt, Human
acauuuagaaaagugaauug

SEQ ID NO: 3792424 - RNA, 12 nt, Human
acauuuauaauu

SEQ ID NO: 3792425 - RNA, 14 nt, Human
acauuuaugauuua

SEQ ID NO: 3792426 - RNA, 15 nt, Human
acauuuaugauuuaa

SEQ ID NO: 3792427 - RNA, 19 nt, Human
acauuuaugauuuaauaaa

SEQ ID NO: 3792428 - RNA, 14 nt, Human
acauuuauucugcu

SEQ ID NO: 3792429 - RNA, 23 nt, Human
acauuuauuuuuuuuaaagaaaa

SEQ ID NO: 3792430 - RNA, 16 nt, Human
acauuucacauuauuc

SEQ ID NO: 3792431 - RNA, 24 nt, Human
acauuucaccuacuuuguaaguga

SEQ ID NO: 3792432 - RNA, 23 nt, Human
acauuucauaauuuguuuccagc

SEQ ID NO: 3792433 - RNA, 17 nt, Human
acauuuccuaaauauau

SEQ ID NO: 3792434 - RNA, 12 nt, Human
acauuucuaacu

SEQ ID NO: 3792435 - RNA, 14 nt, Human
acauuucuaacucu

SEQ ID NO: 3792436 - RNA, 12 nt, Human
acauuucuauaa

SEQ ID NO: 3792437 - RNA, 18 nt, Human
acauuucuuuucuuuuua

SEQ ID NO: 3792438 - RNA, 16 nt, Human
acauuugagucccuuc

SEQ ID NO: 3792439 - RNA, 22 nt, Human
acauuugaugcaugucuuuuaa

SEQ ID NO: 3792440 - RNA, 16 nt, Human
acauuugccuugcaga

SEQ ID NO: 3792441 - RNA, 21 nt, Human
acauuugccuugcagaacugc

SEQ ID NO: 3792442 - RNA, 15 nt, Human
acauuugccuugcug

SEQ ID NO: 3792443 - RNA, 17 nt, Human
acauuugcuacuguugu

SEQ ID NO: 3792444 - RNA, 18 nt, Human
acauuugcucauggaauu

SEQ ID NO: 3792445 - RNA, 15 nt, Human
acauuugcugccauu

SEQ ID NO: 3792446 - RNA, 23 nt, Human
acauuugcuuuuugugauaugca

SEQ ID NO: 3792447 - RNA, 16 nt, Human
accaauauuuaaucuu

SEQ ID NO: 3792448 - RNA, 11 nt, Human
accaauauuug

SEQ ID NO: 3792449 - RNA, 16 nt, Human
accaauauuuguagaa

SEQ ID NO: 3792450 - RNA, 13 nt, Human
accaaucaugaau

SEQ ID NO: 3792451 - RNA, 15 nt, Human
accaaucaugaauua

SEQ ID NO: 3792452 - RNA, 13 nt, Human
accaauccuggac

SEQ ID NO: 3792453 - RNA, 20 nt, Human
accaaucuuacuuuguaaau

SEQ ID NO: 3792454 - RNA, 22 nt, Human
accaaugcaugcagccacugug

SEQ ID NO: 3792455 - RNA, 21 nt, Human
accaaugccaaaaaaagacag

SEQ ID NO: 3792456 - RNA, 13 nt, Human
accaaugucuuga

SEQ ID NO: 3792457 - RNA, 15 nt, Human
accaauguucucucu

SEQ ID NO: 3792458 - RNA, 23 nt, Human
accaauuauaagggcaaauugga

SEQ ID NO: 3792459 - RNA, 17 nt, Human
accaauuauugauauau

SEQ ID NO: 3792460 - RNA, 22 nt, Human
accaauugcugcuacuuauaua

SEQ ID NO: 3792461 - RNA, 16 nt, Human
accaauugguuaaucu

SEQ ID NO: 3792462 - RNA, 17 nt, Human
accaauugugcugccau

SEQ ID NO: 3792463 - RNA, 18 nt, Human
accaauuuacacugccau

SEQ ID NO: 3792464 - RNA, 14 nt, Human
accacaaaaaugaa

SEQ ID NO: 3792465 - RNA, 10 nt, Human
accacaaagg

SEQ ID NO: 3792466 - RNA, 14 nt, Human
accacaaaggccaa

SEQ ID NO: 3792467 - RNA, 18 nt, Human
accacaaaggccaaacug

SEQ ID NO: 3792468 - RNA, 13 nt, Human
accacaacaugag

SEQ ID NO: 3792469 - RNA, 15 nt, Human
accacaacugacaca

SEQ ID NO: 3792470 - RNA, 16 nt, Human
accacaagacugcaca

SEQ ID NO: 3792471 - RNA, 12 nt, Human
accacaagggcu

SEQ ID NO: 3792472 - RNA, 18 nt, Human
accacacaccucaccaga

SEQ ID NO: 3792473 - RNA, 14 nt, Human
accacacauuucac

SEQ ID NO: 3792474 - RNA, 21 nt, Human
accacacauuucacugucugu

SEQ ID NO: 3792475 - RNA, 17 nt, Human
accacaccaaaccucuc

SEQ ID NO: 3792476 - RNA, 16 nt, Human
accacacccagccuca

SEQ ID NO: 3792477 - RNA, 18 nt, Human
accacacccggcuaauuu

SEQ ID NO: 3792478 - RNA, 13 nt, Human
accacacccugua

SEQ ID NO: 3792479 - RNA, 16 nt, Human
accacaccgcagaagc

SEQ ID NO: 3792480 - RNA, 15 nt, Human
accacaccucccuga

SEQ ID NO: 3792481 - RNA, 22 nt, Human
accacaccucccugaaccaucc

SEQ ID NO: 3792482 - RNA, 13 nt, Human
accacaccuggcu

SEQ ID NO: 3792483 - RNA, 22 nt, Human
accacacguaaugaaacuugga

SEQ ID NO: 3792484 - RNA, 16 nt, Human
accacacuggacuccg

SEQ ID NO: 3792485 - RNA, 21 nt, Human
accacacuggacuccggcccu

SEQ ID NO: 3792486 - RNA, 16 nt, Human
accacacuuccugucc

SEQ ID NO: 3792487 - RNA, 21 nt, Human
accacacuuccuguccagaga

SEQ ID NO: 3792488 - RNA, 13 nt, Human
accacacuugaaa

SEQ ID NO: 3792489 - RNA, 12 nt, Human
accacagacaca

SEQ ID NO: 3792490 - RNA, 18 nt, Human
accacagacacacacacg

SEQ ID NO: 3792491 - RNA, 20 nt, Human
accacagacacacacacgca

SEQ ID NO: 3792492 - RNA, 16 nt, Human
accacagccagcaccu

SEQ ID NO: 3792493 - RNA, 14 nt, Human
accacagcccuguc

SEQ ID NO: 3792494 - RNA, 15 nt, Human
accacagcccuguca

SEQ ID NO: 3792495 - RNA, 12 nt, Human
aauugugaaaaa

SEQ ID NO: 3792496 - RNA, 15 nt, Human
aauugugaacucauu

SEQ ID NO: 3792497 - RNA, 16 nt, Human
aauugugaauugauaa

SEQ ID NO: 3792498 - RNA, 11 nt, Human
aauugugaugu

SEQ ID NO: 3792499 - RNA, 20 nt, Human
aauugugccgagaaaagcau

SEQ ID NO: 3792500 - RNA, 13 nt, Human
aauugugcugcca

SEQ ID NO: 3792501 - RNA, 12 nt, Human
aauugugcuucu

SEQ ID NO: 3792502 - RNA, 17 nt, Human
aauugugcuucucccca

SEQ ID NO: 3792503 - RNA, 21 nt, Human
aauuguggggaugaugaaaua

SEQ ID NO: 3792504 - RNA, 16 nt, Human
aauugugggucuauuu

SEQ ID NO: 3792505 - RNA, 21 nt, Human
aauugugggucuauuucuagu

SEQ ID NO: 3792506 - RNA, 19 nt, Human
aauugugugauauuucaga

SEQ ID NO: 3792507 - RNA, 23 nt, Human
aauugugugauauuucagaaaua

SEQ ID NO: 3792508 - RNA, 19 nt, Human
aauuguguggauucuuuaa

SEQ ID NO: 3792509 - RNA, 23 nt, Human
aauugugugugaugugaagccaa

SEQ ID NO: 3792510 - RNA, 20 nt, Human
aauuguguuuacauuuuaug

SEQ ID NO: 3792511 - RNA, 23 nt, Human
aauuguuccuuggagaaaugaaa

SEQ ID NO: 3792512 - RNA, 20 nt, Human
aauuguugaacagguguuuu

SEQ ID NO: 3792513 - RNA, 21 nt, Human
aauuguugaacagguguuuuu

SEQ ID NO: 3792514 - RNA, 17 nt, Human
aauuguugagauacuuu

SEQ ID NO: 3792515 - RNA, 12 nt, Human
aauuguuguucu

SEQ ID NO: 3792516 - RNA, 23 nt, Human
aauuguuguucuguuaacugaau

SEQ ID NO: 3792517 - RNA, 13 nt, Human
aauuguuguuucu

SEQ ID NO: 3792518 - RNA, 15 nt, Human
aauuguuguuucuuu

SEQ ID NO: 3792519 - RNA, 17 nt, Human
aauuguuguuucuuucu

SEQ ID NO: 3792520 - RNA, 20 nt, Human
aauuguuguuucuuucuagu

SEQ ID NO: 3792521 - RNA, 13 nt, Human
aauuguuguuugu

SEQ ID NO: 3792522 - RNA, 17 nt, Human
aauuguuguuuguaugu

SEQ ID NO: 3792523 - RNA, 13 nt, Human
aauuguuuaaaaa

SEQ ID NO: 3792524 - RNA, 20 nt, Human
aauuguuuaaguguuguaaa

SEQ ID NO: 3792525 - RNA, 12 nt, Human
aauuguuucaca

SEQ ID NO: 3792526 - RNA, 19 nt, Human
aauuguuuggcuuccuccu

SEQ ID NO: 3792527 - RNA, 20 nt, Human
aauuguuuguaagugaagug

SEQ ID NO: 3792528 - RNA, 15 nt, Human
aauuguuuguccuca

SEQ ID NO: 3792529 - RNA, 16 nt, Human
aauuguuugucuuuaa

SEQ ID NO: 3792530 - RNA, 14 nt, Human
aauuuaaaaaaaua

SEQ ID NO: 3792531 - RNA, 13 nt, Human
aauuuaaaaaaua

SEQ ID NO: 3792532 - RNA, 18 nt, Human
aauuuaaaaaauaaauaa

SEQ ID NO: 3792533 - RNA, 14 nt, Human
aauuuaaaaauaua

SEQ ID NO: 3792534 - RNA, 15 nt, Human
aauuuaaaaauauau

SEQ ID NO: 3792535 - RNA, 21 nt, Human
aauuuaaaaguaaaaugucuu

SEQ ID NO: 3792536 - RNA, 9 nt, Human
aauuuaaac

SEQ ID NO: 3792537 - RNA, 15 nt, Human
aauuuaaacaccucc

SEQ ID NO: 3792538 - RNA, 19 nt, Human
aauuuaaacaccuccucau

SEQ ID NO: 3792539 - RNA, 18 nt, Human
aauuuaaacaggcccagc

SEQ ID NO: 3792540 - RNA, 13 nt, Human
aauuuaaacauua

SEQ ID NO: 3792541 - RNA, 14 nt, Human
aauuuaaacauuaa

SEQ ID NO: 3792542 - RNA, 22 nt, Human
aauuuaaacauuaaaaauggaa

SEQ ID NO: 3792543 - RNA, 17 nt, Human
aauuuaaacccauuuua

SEQ ID NO: 3792544 - RNA, 20 nt, Human
aauuuaaagaaguaugggaa

SEQ ID NO: 3792545 - RNA, 17 nt, Human
aauuuaaagauauuguu

SEQ ID NO: 3792546 - RNA, 12 nt, Human
aauuuaaagcaa

SEQ ID NO: 3792547 - RNA, 15 nt, Human
aauuuaaagccacaa

SEQ ID NO: 3792548 - RNA, 18 nt, Human
aauuuaaaggguguacuu

SEQ ID NO: 3792549 - RNA, 22 nt, Human
aauuuaaaggguguacuuauau

SEQ ID NO: 3792550 - RNA, 22 nt, Human
aauuuaaaguuguuugugccuu

SEQ ID NO: 3792551 - RNA, 16 nt, Human
aauuuaaauagcuuuu

SEQ ID NO: 3792552 - RNA, 14 nt, Human
aauuuaaauauaau

SEQ ID NO: 3792553 - RNA, 23 nt, Human
aauuuaaauauaauucuguaaau

SEQ ID NO: 3792554 - RNA, 18 nt, Human
aauuuaaaugaaagaaaa

SEQ ID NO: 3792555 - RNA, 19 nt, Human
aauuuaaaugaaagaaaau

SEQ ID NO: 3792556 - RNA, 13 nt, Human
aauuuaaauguua

SEQ ID NO: 3792557 - RNA, 13 nt, Human
aauuuaagcauug

SEQ ID NO: 3792558 - RNA, 14 nt, Human
aauuuaagcauugu

SEQ ID NO: 3792559 - RNA, 15 nt, Human
aauuuaagcauuguu

SEQ ID NO: 3792560 - RNA, 23 nt, Human
aauuuaagcauuguuugcuuauu

SEQ ID NO: 3792561 - RNA, 15 nt, Human
aauuuaagcuuaagc

SEQ ID NO: 3792562 - RNA, 16 nt, Human
aauuuaaggucuguuu

SEQ ID NO: 3792563 - RNA, 14 nt, Human
aauuuaagugcgug

SEQ ID NO: 3792564 - RNA, 23 nt, Human
aauuuaagugcguguguagaguu

SEQ ID NO: 3792565 - RNA, 12 nt, Human
aauuuaaguuuu

SEQ ID NO: 3792566 - RNA, 20 nt, Human
aauuuaaguuuugacaagcu

SEQ ID NO: 3792567 - RNA, 24 nt, Human
aauuuaaguuuugacaagcuggcu

SEQ ID NO: 3792568 - RNA, 15 nt, Human
aauuuaauauuuacu

SEQ ID NO: 3792569 - RNA, 14 nt, Human
aauuuaaucuuuuu

SEQ ID NO: 3792570 - RNA, 16 nt, Human
aauuuacaaaaauaua

SEQ ID NO: 3792571 - RNA, 13 nt, Human
aauuuacaaagug

SEQ ID NO: 3792572 - RNA, 14 nt, Human
aauuuacaaagugu

SEQ ID NO: 3792573 - RNA, 15 nt, Human
aauuuacaaagugug

SEQ ID NO: 3792574 - RNA, 18 nt, Human
aauuuacagagacagaaa

SEQ ID NO: 3792575 - RNA, 15 nt, Human
aauuuacauacucug

SEQ ID NO: 3792576 - RNA, 13 nt, Human
aauuuaccuaaga

SEQ ID NO: 3792577 - RNA, 18 nt, Human
aauuuaccuaagauuaca

SEQ ID NO: 3792578 - RNA, 16 nt, Human
aauuuacuacaauaug

SEQ ID NO: 3792579 - RNA, 21 nt, Human
aauuuacuacaauauguacau

SEQ ID NO: 3792580 - RNA, 22 nt, Human
aauuuacuacaauauguacauu

SEQ ID NO: 3792581 - RNA, 13 nt, Human
aauuuacuauaua

SEQ ID NO: 3792582 - RNA, 16 nt, Human
aauuuacuauauauau

SEQ ID NO: 3792583 - RNA, 16 nt, Human
aauuuacuuguuuugg

SEQ ID NO: 3792584 - RNA, 16 nt, Human
aauuuacuuuaaacua

SEQ ID NO: 3792585 - RNA, 22 nt, Human
aauuuagaaaaagaacaugcag

SEQ ID NO: 3792586 - RNA, 17 nt, Human
aauuuagaaauauaauu

SEQ ID NO: 3792587 - RNA, 17 nt, Human
aauuuagaaaucauuuu

SEQ ID NO: 3792588 - RNA, 21 nt, Human
aauuuagaaaucauuuugcaa

SEQ ID NO: 3792589 - RNA, 16 nt, Human
aauuuagacuuggauu

SEQ ID NO: 3792590 - RNA, 16 nt, Human
aauuuagauuguaaac

SEQ ID NO: 3792591 - RNA, 16 nt, Human
aauuuaggguacuaaa

SEQ ID NO: 3792592 - RNA, 22 nt, Human
aauuuaggguacuaaauuuaaa

SEQ ID NO: 3792593 - RNA, 20 nt, Human
aauuugucauuuugaagcua

SEQ ID NO: 3792594 - RNA, 22 nt, Human
aauuugucauuuugaagcuaau

SEQ ID NO: 3792595 - RNA, 20 nt, Human
aauuuguguaauaaaguguu

SEQ ID NO: 3792596 - RNA, 17 nt, Human
aauuuguguaauauuac

SEQ ID NO: 3792597 - RNA, 14 nt, Human
aauuuguguguuuu

SEQ ID NO: 3792598 - RNA, 17 nt, Human
aauuuguguguuuuuag

SEQ ID NO: 3792599 - RNA, 16 nt, Human
aauuuguuauaaugaa

SEQ ID NO: 3792600 - RNA, 14 nt, Human
aauuuguucuugua

SEQ ID NO: 3792601 - RNA, 12 nt, Human
aauuuguugcau

SEQ ID NO: 3792602 - RNA, 13 nt, Human
aauuuguuugugc

SEQ ID NO: 3792603 - RNA, 15 nt, Human
aauuuuaaagccauu

SEQ ID NO: 3792604 - RNA, 16 nt, Human
aauuuuaaagugcaaa

SEQ ID NO: 3792605 - RNA, 17 nt, Human
aauuuuaaauaaaagug

SEQ ID NO: 3792606 - RNA, 18 nt, Human
aauuuuaaauaaaaguga

SEQ ID NO: 3792607 - RNA, 19 nt, Human
aauuuuaaccuaugauauu

SEQ ID NO: 3792608 - RNA, 16 nt, Human
aauuuuaagauuccuu

SEQ ID NO: 3792609 - RNA, 17 nt, Human
aauuuuaagauuccuuu

SEQ ID NO: 3792610 - RNA, 18 nt, Human
aauuuuaagauuccuuuu

SEQ ID NO: 3792611 - RNA, 18 nt, Human
aauuuuaagcuaggaaaa

SEQ ID NO: 3792612 - RNA, 13 nt, Human
aauuuuaaugcua

SEQ ID NO: 3792613 - RNA, 15 nt, Human
aauuuuaauuuauuu

SEQ ID NO: 3792614 - RNA, 23 nt, Human
aauuuuacaagggcauaaaguaa

SEQ ID NO: 3792615 - RNA, 20 nt, Human
aauuuuacauguuuauaaau

SEQ ID NO: 3792616 - RNA, 12 nt, Human
aauuuuacauuu

SEQ ID NO: 3792617 - RNA, 17 nt, Human
aauuuuaccaaguuaua

SEQ ID NO: 3792618 - RNA, 23 nt, Human
aauuuuaccaaguuauauaaaga

SEQ ID NO: 3792619 - RNA, 17 nt, Human
aauuuuacccuuuagac

SEQ ID NO: 3792620 - RNA, 12 nt, Human
aauuuuaggaac

SEQ ID NO: 3792621 - RNA, 13 nt, Human
aauuuuaguauuc

SEQ ID NO: 3792622 - RNA, 14 nt, Human
aauuuuaguauuca

SEQ ID NO: 3792623 - RNA, 19 nt, Human
aauuuuauagcucaguuua

SEQ ID NO: 3792624 - RNA, 16 nt, Human
aauuuuaucucuuauu

SEQ ID NO: 3792625 - RNA, 14 nt, Human
aauuuuaucuguuu

SEQ ID NO: 3792626 - RNA, 19 nt, Human
aauuuuaugaacugcaugu

SEQ ID NO: 3792627 - RNA, 20 nt, Human
aauuuuaugaacugcaugua

SEQ ID NO: 3792628 - RNA, 12 nt, Human
aauuuuaugaau

SEQ ID NO: 3792629 - RNA, 12 nt, Human
aauuuuauuccu

SEQ ID NO: 3792630 - RNA, 19 nt, Human
aauuuuauuuuaaaauuuc

SEQ ID NO: 3792631 - RNA, 19 nt, Human
aauuuucaaguaauuguga

SEQ ID NO: 3792632 - RNA, 13 nt, Human
aauuuucagauuu

SEQ ID NO: 3792633 - RNA, 14 nt, Human
aauuuucagauuug

SEQ ID NO: 3792634 - RNA, 18 nt, Human
aauuuucaucuaggauuu

SEQ ID NO: 3792635 - RNA, 12 nt, Human
aauuuucauuuu

SEQ ID NO: 3792636 - RNA, 13 nt, Human
aauuuucauuuua

SEQ ID NO: 3792637 - RNA, 15 nt, Human
aauuuucauuuuaca

SEQ ID NO: 3792638 - RNA, 19 nt, Human
aauuuucauuuuacaguua

SEQ ID NO: 3792639 - RNA, 19 nt, Human
aauuuucauuuugcacuga

SEQ ID NO: 3792640 - RNA, 16 nt, Human
aauuuuccuugaagcc

SEQ ID NO: 3792641 - RNA, 17 nt, Human
aauuuuccuugaagccg

SEQ ID NO: 3792642 - RNA, 11 nt, Human
aauuuuccuuu

SEQ ID NO: 3792643 - RNA, 15 nt, Human
aauuuucuaaaagcu

SEQ ID NO: 3792644 - RNA, 16 nt, Human
aauuuucuaaaagcuu

SEQ ID NO: 3792645 - RNA, 20 nt, Human
aauuuucuacaaauaauuuu

SEQ ID NO: 3792646 - RNA, 23 nt, Human
aauuuucucaaaagcauuuauca

SEQ ID NO: 3792647 - RNA, 21 nt, Human
aauuuucuguguucugaaguc

SEQ ID NO: 3792648 - RNA, 17 nt, Human
aauuuucuucaguuggu

SEQ ID NO: 3792649 - RNA, 14 nt, Human
aauuuucuucaugc

SEQ ID NO: 3792650 - RNA, 19 nt, Human
aauuuucuugaugacugga

SEQ ID NO: 3792651 - RNA, 12 nt, Human
aauuuucuuuca

SEQ ID NO: 3792652 - RNA, 13 nt, Human
aauuuugaaaaac

SEQ ID NO: 3792653 - RNA, 13 nt, Human
aauuuugaaaagu

SEQ ID NO: 3792654 - RNA, 16 nt, Human
aauuuugauaguggga

SEQ ID NO: 3792655 - RNA, 16 nt, Human
aauuuugaugaacaaa

SEQ ID NO: 3792656 - RNA, 21 nt, Human
aauuuugcaaauauaaacauc

SEQ ID NO: 3792657 - RNA, 22 nt, Human
aauuuugcuggaauuccuaacu

SEQ ID NO: 3792658 - RNA, 20 nt, Human
aauuuugguuguauucuuug

SEQ ID NO: 3792659 - RNA, 15 nt, Human
aauuuuguaacgaag

SEQ ID NO: 3792660 - RNA, 12 nt, Human
aauuuuguaauu

SEQ ID NO: 3792661 - RNA, 13 nt, Human
aauuuuguaauuu

SEQ ID NO: 3792662 - RNA, 13 nt, Human
accccaggcccac

SEQ ID NO: 3792663 - RNA, 15 nt, Human
accccaggcccacuc

SEQ ID NO: 3792664 - RNA, 13 nt, Human
accccaggccccg

SEQ ID NO: 3792665 - RNA, 10 nt, Human
accccagggc

SEQ ID NO: 3792666 - RNA, 16 nt, Human
accccagggcacagga

SEQ ID NO: 3792667 - RNA, 15 nt, Human
accccagggccugag

SEQ ID NO: 3792668 - RNA, 17 nt, Human
accccagggccugagcc

SEQ ID NO: 3792669 - RNA, 24 nt, Human
accccagggccugagccuggccag

SEQ ID NO: 3792670 - RNA, 13 nt, Human
accccagguuucu

SEQ ID NO: 3792671 - RNA, 17 nt, Human
accccaguggccacuca

SEQ ID NO: 3792672 - RNA, 19 nt, Human
accccaguggccacucagc

SEQ ID NO: 3792673 - RNA, 23 nt, Human
accccaguucugcuccucuccag

SEQ ID NO: 3792674 - RNA, 15 nt, Human
accccaguuuuuguu

SEQ ID NO: 3792675 - RNA, 19 nt, Human
accccauagugaccggcug

SEQ ID NO: 3792676 - RNA, 15 nt, Human
accccaucccacacc

SEQ ID NO: 3792677 - RNA, 16 nt, Human
accccaucugcauucc

SEQ ID NO: 3792678 - RNA, 14 nt, Human
accccaucugccca

SEQ ID NO: 3792679 - RNA, 17 nt, Human
accccaucugcccagga

SEQ ID NO: 3792680 - RNA, 15 nt, Human
accccaucugugaau

SEQ ID NO: 3792681 - RNA, 16 nt, Human
accccaucugugaaua

SEQ ID NO: 3792682 - RNA, 23 nt, Human
accccaugucaccggauccuggg

SEQ ID NO: 3792683 - RNA, 15 nt, Human
accccauucccgcag

SEQ ID NO: 3792684 - RNA, 13 nt, Human
accccauucuuug

SEQ ID NO: 3792685 - RNA, 19 nt, Human
accccauuucucuccucac

SEQ ID NO: 3792686 - RNA, 18 nt, Human
accccauuugcuuucuuu

SEQ ID NO: 3792687 - RNA, 14 nt, Human
acccccacacacac

SEQ ID NO: 3792688 - RNA, 21 nt, Human
acccccacacacacacacaug

SEQ ID NO: 3792689 - RNA, 17 nt, Human
acccccacaccucaguu

SEQ ID NO: 3792690 - RNA, 15 nt, Human
acccccaccaagggc

SEQ ID NO: 3792691 - RNA, 12 nt, Human
acccccacccca

SEQ ID NO: 3792692 - RNA, 15 nt, Human
acccccaccccacac

SEQ ID NO: 3792693 - RNA, 17 nt, Human
acccccaccccacacuu

SEQ ID NO: 3792694 - RNA, 15 nt, Human
acccccacccccagc

SEQ ID NO: 3792695 - RNA, 18 nt, Human
acccccacccccagcuca

SEQ ID NO: 3792696 - RNA, 14 nt, Human
acccccaccccuuc

SEQ ID NO: 3792697 - RNA, 20 nt, Human
acccccaccccuuccccacu

SEQ ID NO: 3792698 - RNA, 21 nt, Human
acccccacucucauuccccag

SEQ ID NO: 3792699 - RNA, 17 nt, Human
acccccacuggacugac

SEQ ID NO: 3792700 - RNA, 12 nt, Human
acccccagcccc

SEQ ID NO: 3792701 - RNA, 12 nt, Human
acccccagccug

SEQ ID NO: 3792702 - RNA, 14 nt, Human
acccccagccugcu

SEQ ID NO: 3792703 - RNA, 15 nt, Human
acccccagccugcua

SEQ ID NO: 3792704 - RNA, 13 nt, Human
acccccagccugg

SEQ ID NO: 3792705 - RNA, 16 nt, Human
acccccagccugggcc

SEQ ID NO: 3792706 - RNA, 12 nt, Human
acccccagcuca

SEQ ID NO: 3792707 - RNA, 20 nt, Human
acccccagcucaauggacug

SEQ ID NO: 3792708 - RNA, 21 nt, Human
acccccagcucaauggacugg

SEQ ID NO: 3792709 - RNA, 13 nt, Human
acccccagcuccc

SEQ ID NO: 3792710 - RNA, 14 nt, Human
acccccagcuuugc

SEQ ID NO: 3792711 - RNA, 15 nt, Human
acccccauucugucc

SEQ ID NO: 3792712 - RNA, 18 nt, Human
acccccauuucuauuuau

SEQ ID NO: 3792713 - RNA, 13 nt, Human
accccccaccugc

SEQ ID NO: 3792714 - RNA, 20 nt, Human
accccccagaaccuguccuu

SEQ ID NO: 3792715 - RNA, 12 nt, Human
acccccccagcu

SEQ ID NO: 3792716 - RNA, 14 nt, Human
accccccgugggcu

SEQ ID NO: 3792717 - RNA, 18 nt, Human
accccccuuucacaggca

SEQ ID NO: 3792718 - RNA, 22 nt, Human
acccccgaguuuggucccuggg

SEQ ID NO: 3792719 - RNA, 17 nt, Human
acccccucaccccucca

SEQ ID NO: 3792720 - RNA, 13 nt, Human
acccccucccacc

SEQ ID NO: 3792721 - RNA, 19 nt, Human
acccccucccacccccagc

SEQ ID NO: 3792722 - RNA, 14 nt, Human
acccccuccccagg

SEQ ID NO: 3792723 - RNA, 16 nt, Human
acccccuccccagggg

SEQ ID NO: 3792724 - RNA, 16 nt, Human
acccccucccuggccu

SEQ ID NO: 3792725 - RNA, 20 nt, Human
acccccucccuggccuguuc

SEQ ID NO: 3792726 - RNA, 13 nt, Human
acccccuccucuc

SEQ ID NO: 3792727 - RNA, 14 nt, Human
acccccuccugcug

SEQ ID NO: 3792728 - RNA, 16 nt, Human
acccccuccuucagac

SEQ ID NO: 3792729 - RNA, 21 nt, Human
acccccucgggucuccucacu

SEQ ID NO: 3792730 - RNA, 14 nt, Human
acccccucuagaaa

SEQ ID NO: 3792731 - RNA, 21 nt, Human
acccccucuucugagcacaga

SEQ ID NO: 3792732 - RNA, 20 nt, Human
acccccugagauccccugag

SEQ ID NO: 3792733 - RNA, 17 nt, Human
acccccugcaaagccca

SEQ ID NO: 3792734 - RNA, 20 nt, Human
acccccugcaaagcccagcu

SEQ ID NO: 3792735 - RNA, 12 nt, Human
acccccugcagc

SEQ ID NO: 3792736 - RNA, 13 nt, Human
acccccugcagcu

SEQ ID NO: 3792737 - RNA, 15 nt, Human
acccccugcccugca

SEQ ID NO: 3792738 - RNA, 13 nt, Human
acccccugugccu

SEQ ID NO: 3792739 - RNA, 17 nt, Human
acccccuuaaauuuaau

SEQ ID NO: 3792740 - RNA, 11 nt, Human
acccccuuccc

SEQ ID NO: 3792741 - RNA, 11 nt, Human
acaaucuauuu

SEQ ID NO: 3792742 - RNA, 17 nt, Human
acaaucucccuucacaa

SEQ ID NO: 3792743 - RNA, 12 nt, Human
acaaucucuuaa

SEQ ID NO: 3792744 - RNA, 18 nt, Human
acaaucuuaaggggcagc

SEQ ID NO: 3792745 - RNA, 19 nt, Human
acaaucuuaaggggcagcu

SEQ ID NO: 3792746 - RNA, 12 nt, Human
acaaucuucugu

SEQ ID NO: 3792747 - RNA, 24 nt, Human
acaaugaacaucccuuuuucaaug

SEQ ID NO: 3792748 - RNA, 16 nt, Human
acaaugacauuuauau

SEQ ID NO: 3792749 - RNA, 17 nt, Human
acaaugacuuacuguac

SEQ ID NO: 3792750 - RNA, 19 nt, Human
acaaugacuuacuguacau

SEQ ID NO: 3792751 - RNA, 22 nt, Human
acaaugacuuacuguacaugaa

SEQ ID NO: 3792752 - RNA, 21 nt, Human
acaaugaucaccgacugaaaa

SEQ ID NO: 3792753 - RNA, 20 nt, Human
acaaugauccuguauucaga

SEQ ID NO: 3792754 - RNA, 16 nt, Human
acaaugaugaugauaa

SEQ ID NO: 3792755 - RNA, 22 nt, Human
acaaugcaccuagcugugcaag

SEQ ID NO: 3792756 - RNA, 24 nt, Human
acaaugcaguacaggacauauauu

SEQ ID NO: 3792757 - RNA, 22 nt, Human
acaaugcaguucugagcaccgu

SEQ ID NO: 3792758 - RNA, 20 nt, Human
acaaugccuauuguaauaua

SEQ ID NO: 3792759 - RNA, 17 nt, Human
acaaugcuguauuuuaa

SEQ ID NO: 3792760 - RNA, 18 nt, Human
acaaugcuguauuuuaaa

SEQ ID NO: 3792761 - RNA, 22 nt, Human
acaaugcugugcccuaaagugu

SEQ ID NO: 3792762 - RNA, 16 nt, Human
acaauggaaacugaau

SEQ ID NO: 3792763 - RNA, 18 nt, Human
acaauggacccuuuuugu

SEQ ID NO: 3792764 - RNA, 19 nt, Human
acaauggauaggcacagga

SEQ ID NO: 3792765 - RNA, 18 nt, Human
acaauggcagaacaggug

SEQ ID NO: 3792766 - RNA, 14 nt, Human
acaaugguaacauu

SEQ ID NO: 3792767 - RNA, 22 nt, Human
acaaugguguuauuugaaacuu

SEQ ID NO: 3792768 - RNA, 15 nt, Human
acaauguaauuauuu

SEQ ID NO: 3792769 - RNA, 18 nt, Human
acaauguaauuauuuaug

SEQ ID NO: 3792770 - RNA, 23 nt, Human
acaauguauuuauuuaaaagauu

SEQ ID NO: 3792771 - RNA, 18 nt, Human
acaaugucaguauuucag

SEQ ID NO: 3792772 - RNA, 11 nt, Human
acaaugucugc

SEQ ID NO: 3792773 - RNA, 17 nt, Human
acaaugugaaaagaaaa

SEQ ID NO: 3792774 - RNA, 17 nt, Human
acaaugugaacuuuauu

SEQ ID NO: 3792775 - RNA, 17 nt, Human
acaaugugacuuugaaa

SEQ ID NO: 3792776 - RNA, 23 nt, Human
acaaugugucuuucuuuuuggac

SEQ ID NO: 3792777 - RNA, 19 nt, Human
acaauguguuuuucuccag

SEQ ID NO: 3792778 - RNA, 21 nt, Human
acaauguuaaggaaacucuua

SEQ ID NO: 3792779 - RNA, 15 nt, Human
acaauguucauccca

SEQ ID NO: 3792780 - RNA, 12 nt, Human
acaauguucuuu

SEQ ID NO: 3792781 - RNA, 22 nt, Human
acaauguuguagugucccccac

SEQ ID NO: 3792782 - RNA, 16 nt, Human
acaauuaaagcuguua

SEQ ID NO: 3792783 - RNA, 21 nt, Human
acaauuagauaaauguccauu

SEQ ID NO: 3792784 - RNA, 14 nt, Human
acaauuccaaagga

SEQ ID NO: 3792785 - RNA, 23 nt, Human
acaauuccuagauaaaaagaugg

SEQ ID NO: 3792786 - RNA, 23 nt, Human
acaauuccucuacuaacaaucag

SEQ ID NO: 3792787 - RNA, 24 nt, Human
acaauucuaaaaugauuguaguaa

SEQ ID NO: 3792788 - RNA, 21 nt, Human
acaauucuguuuuuaaugcua

SEQ ID NO: 3792789 - RNA, 17 nt, Human
acaauucuuuauacaac

SEQ ID NO: 3792790 - RNA, 12 nt, Human
acaauugaaaug

SEQ ID NO: 3792791 - RNA, 19 nt, Human
acaauugaaguaaacuuuu

SEQ ID NO: 3792792 - RNA, 17 nt, Human
acaauugaagucaauua

SEQ ID NO: 3792793 - RNA, 21 nt, Human
acaauugcuuacucauuaaaa

SEQ ID NO: 3792794 - RNA, 20 nt, Human
acaauugggagcugccaaga

SEQ ID NO: 3792795 - RNA, 22 nt, Human
acaauugguaaaacucacugug

SEQ ID NO: 3792796 - RNA, 22 nt, Human
acaauugugggcauaaacuguu

SEQ ID NO: 3792797 - RNA, 14 nt, Human
acaauuguguagcc

SEQ ID NO: 3792798 - RNA, 17 nt, Human
acaauuguguagccuuu

SEQ ID NO: 3792799 - RNA, 23 nt, Human
acaauuguguagccuuuuuguau

SEQ ID NO: 3792800 - RNA, 20 nt, Human
acaauuuaaagcaaaggagu

SEQ ID NO: 3792801 - RNA, 20 nt, Human
acaauuuacaaaguguguau

SEQ ID NO: 3792802 - RNA, 23 nt, Human
acaauuuacaaaguguguauuaa

SEQ ID NO: 3792803 - RNA, 23 nt, Human
acaauuuauaaaauagaaauaua

SEQ ID NO: 3792804 - RNA, 18 nt, Human
acaauuuaugaauugaau

SEQ ID NO: 3792805 - RNA, 13 nt, Human
acaauuuauuaug

SEQ ID NO: 3792806 - RNA, 15 nt, Human
acaauuuauuuuauu

SEQ ID NO: 3792807 - RNA, 20 nt, Human
acaauuuauuuuauuuuagc

SEQ ID NO: 3792808 - RNA, 20 nt, Human
acaauuucaaaaaaauaaaa

SEQ ID NO: 3792809 - RNA, 17 nt, Human
acaauuuccuuuauauu

SEQ ID NO: 3792810 - RNA, 16 nt, Human
acaauuucuuuugguu

SEQ ID NO: 3792811 - RNA, 13 nt, Human
acaauuugauaca

SEQ ID NO: 3792812 - RNA, 15 nt, Human
acaauuugauacaua

SEQ ID NO: 3792813 - RNA, 18 nt, Human
acaauuuggcaauuuugu

SEQ ID NO: 3792814 - RNA, 16 nt, Human
acaauuuucagauuug

SEQ ID NO: 3792815 - RNA, 12 nt, Human
acaauuuuguac

SEQ ID NO: 3792816 - RNA, 20 nt, Human
acaauuuuguuucuguacuu

SEQ ID NO: 3792817 - RNA, 21 nt, Human
acaauuuuuauuucuuuuacu

SEQ ID NO: 3792818 - RNA, 16 nt, Human
acaauuuuuuaucaug

SEQ ID NO: 3792819 - RNA, 17 nt, Human
acaauuuuuuuaauuuu

SEQ ID NO: 3792820 - RNA, 18 nt, Human
acaauuuuuuuaauuuug

SEQ ID NO: 3792821 - RNA, 17 nt, Human
acaauuuuuuuuauuag

SEQ ID NO: 3792822 - RNA, 18 nt, Human
acaauuuuuuuuauuagu

SEQ ID NO: 3792823 - RNA, 16 nt, Human
acacaaaacuccgccc

SEQ ID NO: 3792824 - RNA, 19 nt, Human
acacaaaaguuucucuuuu

SEQ ID NO: 3792825 - RNA, 22 nt, Human
acacaaacaaacaagcuaggug

SEQ ID NO: 3792826 - RNA, 16 nt, Human
acacaaaccugccugg

SEQ ID NO: 3792827 - RNA, 17 nt, Human
acacaaaccugccuggg

SEQ ID NO: 3792828 - RNA, 12 nt, Human
acacaaagagag

SEQ ID NO: 3792829 - RNA, 13 nt, Human
acacaaaggaagu

SEQ ID NO: 3792830 - RNA, 13 nt, Human
acacaaaggggau

SEQ ID NO: 3792831 - RNA, 13 nt, Human
acacaacaaaaau

SEQ ID NO: 3792832 - RNA, 15 nt, Human
acacaacaaaaauuu

SEQ ID NO: 3792833 - RNA, 13 nt, Human
acacaacacacac

SEQ ID NO: 3792834 - RNA, 17 nt, Human
acacaacggcagugaag

SEQ ID NO: 3792835 - RNA, 18 nt, Human
acacaagcccacagcaca

SEQ ID NO: 3792836 - RNA, 14 nt, Human
acacaaggggcccu

SEQ ID NO: 3792837 - RNA, 20 nt, Human
acacaaggucauggccacac

SEQ ID NO: 3792838 - RNA, 16 nt, Human
acacaaguaagagacu

SEQ ID NO: 3792839 - RNA, 15 nt, Human
acacaaguccuguga

SEQ ID NO: 3792840 - RNA, 22 nt, Human
acacaagugcaguagugcaguu

SEQ ID NO: 3792841 - RNA, 13 nt, Human
acacaauaagcaa

SEQ ID NO: 3792842 - RNA, 14 nt, Human
acacaauaugaaua

SEQ ID NO: 3792843 - RNA, 16 nt, Human
acacaauguuauucgu

SEQ ID NO: 3792844 - RNA, 17 nt, Human
acacaauuggaagucua

SEQ ID NO: 3792845 - RNA, 14 nt, Human
acacacaacaauua

SEQ ID NO: 3792846 - RNA, 14 nt, Human
acacacaaguaaga

SEQ ID NO: 3792847 - RNA, 10 nt, Human
acacacacaa

SEQ ID NO: 3792848 - RNA, 16 nt, Human
acacacacaaagagag

SEQ ID NO: 3792849 - RNA, 13 nt, Human
acacacacacaca

SEQ ID NO: 3792850 - RNA, 15 nt, Human
acacacacacagcca

SEQ ID NO: 3792851 - RNA, 13 nt, Human
acacacacacaug

SEQ ID NO: 3792852 - RNA, 13 nt, Human
acacacacacgca

SEQ ID NO: 3792853 - RNA, 14 nt, Human
acacacacacgcac

SEQ ID NO: 3792854 - RNA, 15 nt, Human
acacacacagaaaau

SEQ ID NO: 3792855 - RNA, 16 nt, Human
acacacacagaaaaua

SEQ ID NO: 3792856 - RNA, 14 nt, Human
acacacacagaugu

SEQ ID NO: 3792857 - RNA, 11 nt, Human
acacacacagc

SEQ ID NO: 3792858 - RNA, 11 nt, Human
acacacacaua

SEQ ID NO: 3792859 - RNA, 14 nt, Human
acacacacauacac

SEQ ID NO: 3792860 - RNA, 17 nt, Human
acacacacauacacgaa

SEQ ID NO: 3792861 - RNA, 14 nt, Human
acacacacauauac

SEQ ID NO: 3792862 - RNA, 17 nt, Human
acacacaccacacauac

SEQ ID NO: 3792863 - RNA, 12 nt, Human
acacacacgcac

SEQ ID NO: 3792864 - RNA, 15 nt, Human
acacacacgcacaua

SEQ ID NO: 3792865 - RNA, 21 nt, Human
acacacacgcacgcacacaca

SEQ ID NO: 3792866 - RNA, 23 nt, Human
accucagcucugggagaggauuu

SEQ ID NO: 3792867 - RNA, 12 nt, Human
accucaggaaag

SEQ ID NO: 3792868 - RNA, 17 nt, Human
accucaggaaagaauag

SEQ ID NO: 3792869 - RNA, 23 nt, Human
accucaggaaagaauagaaagaa

SEQ ID NO: 3792870 - RNA, 17 nt, Human
accucaggcacuagccu

SEQ ID NO: 3792871 - RNA, 12 nt, Human
accucaggcagg

SEQ ID NO: 3792872 - RNA, 15 nt, Human
accucaggcaggaag

SEQ ID NO: 3792873 - RNA, 21 nt, Human
accucaggccaggugcagugg

SEQ ID NO: 3792874 - RNA, 11 nt, Human
accucaggccu

SEQ ID NO: 3792875 - RNA, 18 nt, Human
accucaggcuuccuuggc

SEQ ID NO: 3792876 - RNA, 12 nt, Human
accucagggcuc

SEQ ID NO: 3792877 - RNA, 15 nt, Human
accucagggcuccca

SEQ ID NO: 3792878 - RNA, 20 nt, Human
accucagggcucccaggggu

SEQ ID NO: 3792879 - RNA, 15 nt, Human
accucaggugaucca

SEQ ID NO: 3792880 - RNA, 21 nt, Human
accucaggugauccacccacc

SEQ ID NO: 3792881 - RNA, 14 nt, Human
accucagguugcug

SEQ ID NO: 3792882 - RNA, 19 nt, Human
accucagguugcugguugc

SEQ ID NO: 3792883 - RNA, 15 nt, Human
accucaguaauuuag

SEQ ID NO: 3792884 - RNA, 17 nt, Human
accucagucaguauugu

SEQ ID NO: 3792885 - RNA, 18 nt, Human
accucagucaguauuguu

SEQ ID NO: 3792886 - RNA, 21 nt, Human
acacacagguggugucacugu

SEQ ID NO: 3792887 - RNA, 14 nt, Human
acacacaugcacac

SEQ ID NO: 3792888 - RNA, 14 nt, Human
acacacaugcauac

SEQ ID NO: 3792889 - RNA, 16 nt, Human
acacacaugcauacac

SEQ ID NO: 3792890 - RNA, 18 nt, Human
acacacaugcauacacac

SEQ ID NO: 3792891 - RNA, 14 nt, Human
acacaccagagccc

SEQ ID NO: 3792892 - RNA, 17 nt, Human
acacaccaggcgcuaau

SEQ ID NO: 3792893 - RNA, 16 nt, Human
acacaccaggcugugg

SEQ ID NO: 3792894 - RNA, 18 nt, Human
acacaccaggcugugggc

SEQ ID NO: 3792895 - RNA, 22 nt, Human
acacaccaggcugugggccuca

SEQ ID NO: 3792896 - RNA, 13 nt, Human
acacacccugagg

SEQ ID NO: 3792897 - RNA, 15 nt, Human
acacacgcacgcaca

SEQ ID NO: 3792898 - RNA, 17 nt, Human
acacacgcacgcacaca

SEQ ID NO: 3792899 - RNA, 14 nt, Human
acacacgcugccuu

SEQ ID NO: 3792900 - RNA, 23 nt, Human
acacacggugccuuuauuuccac

SEQ ID NO: 3792901 - RNA, 19 nt, Human
acacacuacaccacacaca

SEQ ID NO: 3792902 - RNA, 14 nt, Human
acacacugaaagcu

SEQ ID NO: 3792903 - RNA, 15 nt, Human
acacacugaggcagg

SEQ ID NO: 3792904 - RNA, 16 nt, Human
acacacugaggcaggg

SEQ ID NO: 3792905 - RNA, 13 nt, Human
acacacugaugcu

SEQ ID NO: 3792906 - RNA, 21 nt, Human
acacacugcauguuugugauu

SEQ ID NO: 3792907 - RNA, 16 nt, Human
acacacugguacuuag

SEQ ID NO: 3792908 - RNA, 19 nt, Human
acacacugugcuuucuauu

SEQ ID NO: 3792909 - RNA, 16 nt, Human
acacacuguguccugg

SEQ ID NO: 3792910 - RNA, 20 nt, Human
acacacuguguccuggugcu

SEQ ID NO: 3792911 - RNA, 14 nt, Human
acacacuuacuuuu

SEQ ID NO: 3792912 - RNA, 13 nt, Human
acacacuuuauuu

SEQ ID NO: 3792913 - RNA, 23 nt, Human
acacacuuuugguuaagucuguu

SEQ ID NO: 3792914 - RNA, 17 nt, Human
acacacuuuuuauuaga

SEQ ID NO: 3792915 - RNA, 23 nt, Human
acacagaaaauauacuguaaaga

SEQ ID NO: 3792916 - RNA, 20 nt, Human
acacagaaaauguugagaau

SEQ ID NO: 3792917 - RNA, 14 nt, Human
acacagaaacacug

SEQ ID NO: 3792918 - RNA, 14 nt, Human
acacagaaaccaau

SEQ ID NO: 3792919 - RNA, 16 nt, Human
acacagaaaugcugcu

SEQ ID NO: 3792920 - RNA, 20 nt, Human
acacagaaaugcugcuggcc

SEQ ID NO: 3792921 - RNA, 21 nt, Human
acacagaaaugcugcuggcca

SEQ ID NO: 3792922 - RNA, 23 nt, Human
acacagaaggggacugccaccuc

SEQ ID NO: 3792923 - RNA, 12 nt, Human
acacagaccacc

SEQ ID NO: 3792924 - RNA, 20 nt, Human
acacagacuauugacaucag

SEQ ID NO: 3792925 - RNA, 15 nt, Human
acacagacucauauu

SEQ ID NO: 3792926 - RNA, 23 nt, Human
acacagacucauccugaacagca

SEQ ID NO: 3792927 - RNA, 21 nt, Human
acacagacuguugucccugca

SEQ ID NO: 3792928 - RNA, 12 nt, Human
acacagaggaag

SEQ ID NO: 3792929 - RNA, 13 nt, Human
acacagaggaaga

SEQ ID NO: 3792930 - RNA, 17 nt, Human
acacagaggaagagcag

SEQ ID NO: 3792931 - RNA, 20 nt, Human
acacagaggaauuuauaccu

SEQ ID NO: 3792932 - RNA, 21 nt, Human
acacagaugaaacacaaacaa

SEQ ID NO: 3792933 - RNA, 11 nt, Human
acacagccaca

SEQ ID NO: 3792934 - RNA, 14 nt, Human
acacagccacacac

SEQ ID NO: 3792935 - RNA, 19 nt, Human
acacagccacacacacaga

SEQ ID NO: 3792936 - RNA, 20 nt, Human
acacagccacacacacagaa

SEQ ID NO: 3792937 - RNA, 20 nt, Human
acacagccaggugccuugga

SEQ ID NO: 3792938 - RNA, 14 nt, Human
acacagccugggcc

SEQ ID NO: 3792939 - RNA, 18 nt, Human
acacagcgucccuagcag

SEQ ID NO: 3792940 - RNA, 21 nt, Human
acacagcgucccuagcaguga

SEQ ID NO: 3792941 - RNA, 21 nt, Human
acacagcuaacacacagcucc

SEQ ID NO: 3792942 - RNA, 23 nt, Human
acacagcuaacacacagcuccca

SEQ ID NO: 3792943 - RNA, 15 nt, Human
acacagcuacagcuu

SEQ ID NO: 3792944 - RNA, 11 nt, Human
acacagcucug

SEQ ID NO: 3792945 - RNA, 13 nt, Human
acacagcucuucu

SEQ ID NO: 3792946 - RNA, 20 nt, Human
acacagcucuucuccaggcu

SEQ ID NO: 3792947 - RNA, 19 nt, Human
acacagcugcagagacaga

SEQ ID NO: 3792948 - RNA, 11 nt, Human
acacagcugcc

SEQ ID NO: 3792949 - RNA, 18 nt, Human
acacagcuguucuucugu

SEQ ID NO: 3792950 - RNA, 14 nt, Human
acacaggaggagaa

SEQ ID NO: 3792951 - RNA, 16 nt, Human
acacaggcaacugagg

SEQ ID NO: 3792952 - RNA, 19 nt, Human
acacaggcaacugaggcag

SEQ ID NO: 3792953 - RNA, 15 nt, Human
acacaggcagcuuuc

SEQ ID NO: 3792954 - RNA, 18 nt, Human
acacaggcauuuccuggg

SEQ ID NO: 3792955 - RNA, 19 nt, Human
acacaggccacccugugca

SEQ ID NO: 3792956 - RNA, 16 nt, Human
acacaggcccggcucc

SEQ ID NO: 3792957 - RNA, 18 nt, Human
acacaggcccggcuccag

SEQ ID NO: 3792958 - RNA, 21 nt, Human
acacaggcccggcuccaggcu

SEQ ID NO: 3792959 - RNA, 22 nt, Human
acacaggcccggcuccaggcuc

SEQ ID NO: 3792960 - RNA, 16 nt, Human
acacaggcccucccug

SEQ ID NO: 3792961 - RNA, 13 nt, Human
acacaggccugug

SEQ ID NO: 3792962 - RNA, 18 nt, Human
acacagggacuugaaguu

SEQ ID NO: 3792963 - RNA, 17 nt, Human
acacaggggaggugaua

SEQ ID NO: 3792964 - RNA, 21 nt, Human
acacagguggugucacugucc

SEQ ID NO: 3792965 - RNA, 23 nt, Human
acacagucucacccagacuccag

SEQ ID NO: 3792966 - RNA, 19 nt, Human
acacagucuuggcucacug

SEQ ID NO: 3792967 - RNA, 11 nt, Human
acacagugagu

SEQ ID NO: 3792968 - RNA, 19 nt, Human
acacagugccuucaauaaa

SEQ ID NO: 3792969 - RNA, 20 nt, Human
acacagugggaacucugaca

SEQ ID NO: 3792970 - RNA, 22 nt, Human
acacagugggaacucugacaag

SEQ ID NO: 3792971 - RNA, 12 nt, Human
acacauaaagga

SEQ ID NO: 3792972 - RNA, 14 nt, Human
acacauaaaggaua

SEQ ID NO: 3792973 - RNA, 15 nt, Human
acacauaauuaacac

SEQ ID NO: 3792974 - RNA, 22 nt, Human
acacauacaguuuuaugcucuu

SEQ ID NO: 3792975 - RNA, 15 nt, Human
acacauacccucuuc

SEQ ID NO: 3792976 - RNA, 17 nt, Human
acacauaccuuugguua

SEQ ID NO: 3792977 - RNA, 22 nt, Human
acacauacucauuuuucaugau

SEQ ID NO: 3792978 - RNA, 17 nt, Human
acacauagauucaccug

SEQ ID NO: 3792979 - RNA, 21 nt, Human
acacauauaccuauaaugugu

SEQ ID NO: 3792980 - RNA, 16 nt, Human
acacauauauauuaca

SEQ ID NO: 3792981 - RNA, 12 nt, Human
acacaucaguca

SEQ ID NO: 3792982 - RNA, 14 nt, Human
acacaucaucugua

SEQ ID NO: 3792983 - RNA, 15 nt, Human
acacaucaucuguaa

SEQ ID NO: 3792984 - RNA, 20 nt, Human
acacaucccuaaugugugcc

SEQ ID NO: 3792985 - RNA, 18 nt, Human
acacauccgccuuuugua

SEQ ID NO: 3792986 - RNA, 16 nt, Human
acacaucgcacugugg

SEQ ID NO: 3792987 - RNA, 14 nt, Human
acacaucuucccua

SEQ ID NO: 3792988 - RNA, 15 nt, Human
acacaucuucccuag

SEQ ID NO: 3792989 - RNA, 19 nt, Human
acacaugaagguaaauaaa

SEQ ID NO: 3792990 - RNA, 15 nt, Human
acacaugaaguccaa

SEQ ID NO: 3792991 - RNA, 18 nt, Human
acacaugauccugcaauu

SEQ ID NO: 3792992 - RNA, 14 nt, Human
acacaugcauacac

SEQ ID NO: 3792993 - RNA, 17 nt, Human
acacaugcauacacaca

SEQ ID NO: 3792994 - RNA, 18 nt, Human
acacaugcauacacacac

SEQ ID NO: 3792995 - RNA, 19 nt, Human
acacaugcauacacacaca

SEQ ID NO: 3792996 - RNA, 19 nt, Human
acacaugcuucccuuuccu

SEQ ID NO: 3792997 - RNA, 14 nt, Human
acacauggaaaccc

SEQ ID NO: 3792998 - RNA, 19 nt, Human
acacauggaaacccauagg

SEQ ID NO: 3792999 - RNA, 15 nt, Human
acacauguauuuggu

SEQ ID NO: 3793000 - RNA, 19 nt, Human
acacauguccaagaagccc

SEQ ID NO: 3793001 - RNA, 21 nt, Human
acacauguccaagaagcccag

SEQ ID NO: 3793002 - RNA, 18 nt, Human
acacauuacaaaguuaaa

SEQ ID NO: 3793003 - RNA, 20 nt, Human
acacauuaucgggagcagug

SEQ ID NO: 3793004 - RNA, 23 nt, Human
acacauuaucgggagcagugucu

SEQ ID NO: 3793005 - RNA, 18 nt, Human
acacauucggcucccugg

SEQ ID NO: 3793006 - RNA, 21 nt, Human
acacauugcugugaacaggaa

SEQ ID NO: 3793007 - RNA, 14 nt, Human
acacauuguuauuu

SEQ ID NO: 3793008 - RNA, 15 nt, Human
acacauuucaaauga

SEQ ID NO: 3793009 - RNA, 16 nt, Human
acacauuugcuacugu

SEQ ID NO: 3793010 - RNA, 14 nt, Human
acacauuugcuuuu

SEQ ID NO: 3793011 - RNA, 13 nt, Human
acacauuuguaca

SEQ ID NO: 3793012 - RNA, 22 nt, Human
acacauuuguugccagauuuca

SEQ ID NO: 3793013 - RNA, 20 nt, Human
acacauuuuauuuuauuaug

SEQ ID NO: 3793014 - RNA, 21 nt, Human
acacauuuugguucuucucaa

SEQ ID NO: 3793015 - RNA, 13 nt, Human
acacauuuuguau

SEQ ID NO: 3793016 - RNA, 19 nt, Human
acacauuuuuaaauuguua

SEQ ID NO: 3793017 - RNA, 14 nt, Human
acacauuuuucaga

SEQ ID NO: 3793018 - RNA, 14 nt, Human
acacauuuuuuaaa

SEQ ID NO: 3793019 - RNA, 15 nt, Human
acaccaaaaaauauc

SEQ ID NO: 3793020 - RNA, 18 nt, Human
acaccaacauaaaaauga

SEQ ID NO: 3793021 - RNA, 14 nt, Human
acaccaagcacagc

SEQ ID NO: 3793022 - RNA, 21 nt, Human
acaccaagcacagcagccugg

SEQ ID NO: 3793023 - RNA, 13 nt, Human
acaccacacacaa

SEQ ID NO: 3793024 - RNA, 17 nt, Human
acaccacacacaacagc

SEQ ID NO: 3793025 - RNA, 19 nt, Human
acaccacacacaacagcca

SEQ ID NO: 3793026 - RNA, 15 nt, Human
acaccacacccagcc

SEQ ID NO: 3793027 - RNA, 24 nt, Human
acccgaggcugcccacuaugguca

SEQ ID NO: 3793028 - RNA, 12 nt, Human
acccgaugcugc

SEQ ID NO: 3793029 - RNA, 13 nt, Human
acccgaugcugcu

SEQ ID NO: 3793030 - RNA, 23 nt, Human
acccgaugcugcuuuccccugug

SEQ ID NO: 3793031 - RNA, 18 nt, Human
accugcccuuuuuucugc

SEQ ID NO: 3793032 - RNA, 21 nt, Human
accugcccuuuuuucugccuc

SEQ ID NO: 3793033 - RNA, 22 nt, Human
accugcccuuuuuucugccucc

SEQ ID NO: 3793034 - RNA, 13 nt, Human
accugccgaccuc

SEQ ID NO: 3793035 - RNA, 17 nt, Human
accugccgaccucgucc

SEQ ID NO: 3793036 - RNA, 20 nt, Human
accugccgaccucguccucc

SEQ ID NO: 3793037 - RNA, 22 nt, Human
accugccucccuucaugcaugg

SEQ ID NO: 3793038 - RNA, 17 nt, Human
accugccuccugccugc

SEQ ID NO: 3793039 - RNA, 11 nt, Human
accugccucuc

SEQ ID NO: 3793040 - RNA, 19 nt, Human
accugccucucacacacau

SEQ ID NO: 3793041 - RNA, 23 nt, Human
accugccucucacacacauagau

SEQ ID NO: 3793042 - RNA, 11 nt, Human
accugccugcg

SEQ ID NO: 3793043 - RNA, 22 nt, Human
accugccugcgucuuccgcccc

SEQ ID NO: 3793044 - RNA, 19 nt, Human
accugcggugcuaucuccc

SEQ ID NO: 3793045 - RNA, 22 nt, Human
accugcggugcuaucuccccca

SEQ ID NO: 3793046 - RNA, 21 nt, Human
accugcgucucauacucaccu

SEQ ID NO: 3793047 - RNA, 21 nt, Human
accugcuaggccagagcccac

SEQ ID NO: 3793048 - RNA, 20 nt, Human
accugcucacgucaaaugca

SEQ ID NO: 3793049 - RNA, 16 nt, Human
accugcucagcccugc

SEQ ID NO: 3793050 - RNA, 17 nt, Human
accugcucccaggccag

SEQ ID NO: 3793051 - RNA, 15 nt, Human
accugcuccgcugcu

SEQ ID NO: 3793052 - RNA, 22 nt, Human
accugcuccgcugcuccuuggc

SEQ ID NO: 3793053 - RNA, 14 nt, Human
accugcucuccucu

SEQ ID NO: 3793054 - RNA, 17 nt, Human
accugcucuccucuucu

SEQ ID NO: 3793055 - RNA, 23 nt, Human
accugcucugugcccacccucca

SEQ ID NO: 3793056 - RNA, 16 nt, Human
accugcugaccugugc

SEQ ID NO: 3793057 - RNA, 17 nt, Human
accugcugaccugugca

SEQ ID NO: 3793058 - RNA, 18 nt, Human
accugcugaccugugcac

SEQ ID NO: 3793059 - RNA, 15 nt, Human
accugcugagcucug

SEQ ID NO: 3793060 - RNA, 21 nt, Human
accugcugagcucugagaggc

SEQ ID NO: 3793061 - RNA, 18 nt, Human
accugcugagggaccagc

SEQ ID NO: 3793062 - RNA, 19 nt, Human
accugcugagggaccagcc

SEQ ID NO: 3793063 - RNA, 11 nt, Human
accugcugcuu

SEQ ID NO: 3793064 - RNA, 19 nt, Human
accugcuucaugcucagcc

SEQ ID NO: 3793065 - RNA, 23 nt, Human
accugcuucaugcucagcccuga

SEQ ID NO: 3793066 - RNA, 15 nt, Human
accugcuucucugcc

SEQ ID NO: 3793067 - RNA, 18 nt, Human
accugcuuggguggagaa

SEQ ID NO: 3793068 - RNA, 20 nt, Human
accugcuuggguggagaagc

SEQ ID NO: 3793069 - RNA, 22 nt, Human
accugcuuggguggagaagcca

SEQ ID NO: 3793070 - RNA, 15 nt, Human
accugcuuucaagac

SEQ ID NO: 3793071 - RNA, 15 nt, Human
accugcuuugacuga

SEQ ID NO: 3793072 - RNA, 15 nt, Human
accugcuuuucaaug

SEQ ID NO: 3793073 - RNA, 19 nt, Human
accugcuuuucaauguguu

SEQ ID NO: 3793074 - RNA, 15 nt, Human
accugcuuuuugaaa

SEQ ID NO: 3793075 - RNA, 16 nt, Human
accugcuuuuugaaau

SEQ ID NO: 3793076 - RNA, 18 nt, Human
accugcuuuuugaaauga

SEQ ID NO: 3793077 - RNA, 23 nt, Human
accugcuuuuugaaaugaaauuu

SEQ ID NO: 3793078 - RNA, 20 nt, Human
acacuuuucaugugugauuu

SEQ ID NO: 3793079 - RNA, 21 nt, Human
acacuuuuucucuuuccauga

SEQ ID NO: 3793080 - RNA, 22 nt, Human
acacuuuuuuggggauaugcuu

SEQ ID NO: 3793081 - RNA, 14 nt, Human
acagaaaaaccuug

SEQ ID NO: 3793082 - RNA, 21 nt, Human
acagaaaaaccuuggguuaga

SEQ ID NO: 3793083 - RNA, 15 nt, Human
acagaaaaagacuuu

SEQ ID NO: 3793084 - RNA, 18 nt, Human
acagaaaacaacaaaaaa

SEQ ID NO: 3793085 - RNA, 19 nt, Human
acagaaaacaacaaaaaau

SEQ ID NO: 3793086 - RNA, 21 nt, Human
acagaaaacaacaaaaaauaa

SEQ ID NO: 3793087 - RNA, 12 nt, Human
acagaaaauaua

SEQ ID NO: 3793088 - RNA, 18 nt, Human
acagaaaauauacuguaa

SEQ ID NO: 3793089 - RNA, 13 nt, Human
acagaaaauaugu

SEQ ID NO: 3793090 - RNA, 15 nt, Human
acagaaaauauguau

SEQ ID NO: 3793091 - RNA, 15 nt, Human
acagaaacacugccu

SEQ ID NO: 3793092 - RNA, 18 nt, Human
acagaaaccucuacuaaa

SEQ ID NO: 3793093 - RNA, 15 nt, Human
acagaaaccuuuuua

SEQ ID NO: 3793094 - RNA, 20 nt, Human
acagaaagagacuccgucuc

SEQ ID NO: 3793095 - RNA, 17 nt, Human
acagaaagagagcacug

SEQ ID NO: 3793096 - RNA, 18 nt, Human
acagaaaguggugcucag

SEQ ID NO: 3793097 - RNA, 17 nt, Human
acagaaauauauauaca

SEQ ID NO: 3793098 - RNA, 20 nt, Human
acagaaauauauauacauau

SEQ ID NO: 3793099 - RNA, 20 nt, Human
acagaaauugguaccuugca

SEQ ID NO: 3793100 - RNA, 21 nt, Human
acagaaauugguaccuugcac

SEQ ID NO: 3793101 - RNA, 23 nt, Human
acagaaauugguaccuugcacac

SEQ ID NO: 3793102 - RNA, 14 nt, Human
acagaaauuguaua

SEQ ID NO: 3793103 - RNA, 16 nt, Human
acagaaauuguauauu

SEQ ID NO: 3793104 - RNA, 23 nt, Human
acagaaauuguauauuguaauuu

SEQ ID NO: 3793105 - RNA, 12 nt, Human
acagaaauuuaa

SEQ ID NO: 3793106 - RNA, 19 nt, Human
acagaacaaauguuuguuu

SEQ ID NO: 3793107 - RNA, 12 nt, Human
acagaacacugu

SEQ ID NO: 3793108 - RNA, 15 nt, Human
acagaacagcuucag

SEQ ID NO: 3793109 - RNA, 18 nt, Human
acagaacagcuucagguu

SEQ ID NO: 3793110 - RNA, 14 nt, Human
acagaacaggguca

SEQ ID NO: 3793111 - RNA, 16 nt, Human
acagaacauagacaga

SEQ ID NO: 3793112 - RNA, 17 nt, Human
acagaacaucauuagaa

SEQ ID NO: 3793113 - RNA, 21 nt, Human
acagaacaugcuguuauuuag

SEQ ID NO: 3793114 - RNA, 23 nt, Human
acagaaccuuguuauuucucaga

SEQ ID NO: 3793115 - RNA, 16 nt, Human
acagaacuaaauguuc

SEQ ID NO: 3793116 - RNA, 20 nt, Human
acagaacucgguguccccac

SEQ ID NO: 3793117 - RNA, 18 nt, Human
acagaacucuuucaaaac

SEQ ID NO: 3793118 - RNA, 14 nt, Human
acagaacuucagaa

SEQ ID NO: 3793119 - RNA, 17 nt, Human
acagaacuucagaaaga

SEQ ID NO: 3793120 - RNA, 20 nt, Human
acagaacuucagaaagacuu

SEQ ID NO: 3793121 - RNA, 18 nt, Human
acagaagaaaauagaauu

SEQ ID NO: 3793122 - RNA, 15 nt, Human
acagaagaaacuggg

SEQ ID NO: 3793123 - RNA, 20 nt, Human
acagaagaaggcagcaggug

SEQ ID NO: 3793124 - RNA, 13 nt, Human
acagaagcauuug

SEQ ID NO: 3793125 - RNA, 22 nt, Human
acagaagcauuuguauuuugug

SEQ ID NO: 3793126 - RNA, 15 nt, Human
acagaagccaggagc

SEQ ID NO: 3793127 - RNA, 18 nt, Human
acagaagccaggagcaaa

SEQ ID NO: 3793128 - RNA, 21 nt, Human
acagaagccucacugcaagca

SEQ ID NO: 3793129 - RNA, 19 nt, Human
acagaagcuucagaaguuu

SEQ ID NO: 3793130 - RNA, 19 nt, Human
acagaaggcuccugccccc

SEQ ID NO: 3793131 - RNA, 17 nt, Human
acagaagggagggcaga

SEQ ID NO: 3793132 - RNA, 22 nt, Human
acagaagggagggcagagcugg

SEQ ID NO: 3793133 - RNA, 13 nt, Human
acagaaguccugu

SEQ ID NO: 3793134 - RNA, 15 nt, Human
acagaaguccuguau

SEQ ID NO: 3793135 - RNA, 22 nt, Human
acagaaguccuguaugucuguc

SEQ ID NO: 3793136 - RNA, 15 nt, Human
acagaauaaugaaug

SEQ ID NO: 3793137 - RNA, 22 nt, Human
acagaauacuguuaaaggaaaa

SEQ ID NO: 3793138 - RNA, 15 nt, Human
acagaauauuuuuau

SEQ ID NO: 3793139 - RNA, 23 nt, Human
acagaaucauaugauucugcuuu

SEQ ID NO: 3793140 - RNA, 15 nt, Human
acagaaugaaaaaug

SEQ ID NO: 3793141 - RNA, 20 nt, Human
acagaauguaucugugaagu

SEQ ID NO: 3793142 - RNA, 20 nt, Human
acagaauguuuuacugugaa

SEQ ID NO: 3793143 - RNA, 19 nt, Human
acagacaaaaacagccuca

SEQ ID NO: 3793144 - RNA, 20 nt, Human
acagacaaaaacagccucac

SEQ ID NO: 3793145 - RNA, 14 nt, Human
acagacaacagaag

SEQ ID NO: 3793146 - RNA, 18 nt, Human
acagacacacacacgcac

SEQ ID NO: 3793147 - RNA, 11 nt, Human
acagacacagg

SEQ ID NO: 3793148 - RNA, 13 nt, Human
acagacacaggcc

SEQ ID NO: 3793149 - RNA, 14 nt, Human
acagacacaggccc

SEQ ID NO: 3793150 - RNA, 15 nt, Human
acagacacaggcccg

SEQ ID NO: 3793151 - RNA, 22 nt, Human
acagacacaggcccggcuccag

SEQ ID NO: 3793152 - RNA, 22 nt, Human
acagacacuaacgaaauaucaa

SEQ ID NO: 3793153 - RNA, 21 nt, Human
acagacacucccacuuggcau

SEQ ID NO: 3793154 - RNA, 14 nt, Human
acagacacuggcau

SEQ ID NO: 3793155 - RNA, 21 nt, Human
acagacagagaaggcagcagg

SEQ ID NO: 3793156 - RNA, 13 nt, Human
acagacagcccuc

SEQ ID NO: 3793157 - RNA, 13 nt, Human
acagacaggcucu

SEQ ID NO: 3793158 - RNA, 18 nt, Human
acagacauacuaaccagc

SEQ ID NO: 3793159 - RNA, 14 nt, Human
acagacauauuuaa

SEQ ID NO: 3793160 - RNA, 12 nt, Human
acagacauuguu

SEQ ID NO: 3793161 - RNA, 14 nt, Human
acagacccugcccu

SEQ ID NO: 3793162 - RNA, 18 nt, Human
acagaccgaacuguugua

SEQ ID NO: 3793163 - RNA, 22 nt, Human
acagaccuggagccccugggug

SEQ ID NO: 3793164 - RNA, 21 nt, Human
acagacggaaggguaaacaau

SEQ ID NO: 3793165 - RNA, 15 nt, Human
acagacguaugcuua

SEQ ID NO: 3793166 - RNA, 17 nt, Human
acagacuauuuaacuug

SEQ ID NO: 3793167 - RNA, 14 nt, Human
acagacuauuuuua

SEQ ID NO: 3793168 - RNA, 17 nt, Human
acagacuauuuuuagau

SEQ ID NO: 3793169 - RNA, 23 nt, Human
acagacuauuuuuagauuuucuu

SEQ ID NO: 3793170 - RNA, 20 nt, Human
acagacucaaaugcucagac

SEQ ID NO: 3793171 - RNA, 11 nt, Human
acagacugcaa

SEQ ID NO: 3793172 - RNA, 22 nt, Human
acagacuggaagcacagcuuca

SEQ ID NO: 3793173 - RNA, 12 nt, Human
acagacuuguau

SEQ ID NO: 3793174 - RNA, 14 nt, Human
acagacuuguauau

SEQ ID NO: 3793175 - RNA, 14 nt, Human
acgccuuguucuug

SEQ ID NO: 3793176 - RNA, 13 nt, Human
acgcgaaaccaau

SEQ ID NO: 3793177 - RNA, 21 nt, Human
acgcgcagaugugcagcagau

SEQ ID NO: 3793178 - RNA, 17 nt, Human
acgcgccccccucccag

SEQ ID NO: 3793179 - RNA, 20 nt, Human
acgcgccccccucccagagg

SEQ ID NO: 3793180 - RNA, 20 nt, Human
acgcgccuugucuccuacuc

SEQ ID NO: 3793181 - RNA, 18 nt, Human
acgcgcuucgacuuuucu

SEQ ID NO: 3793182 - RNA, 20 nt, Human
acgcgguuugguuugcagcg

SEQ ID NO: 3793183 - RNA, 20 nt, Human
acgcguaucuaggcuuuggu

SEQ ID NO: 3793184 - RNA, 23 nt, Human
acgcguguguacacgggacugac

SEQ ID NO: 3793185 - RNA, 13 nt, Human
acgcguugaaauu

SEQ ID NO: 3793186 - RNA, 13 nt, Human
acgcuacccggga

SEQ ID NO: 3793187 - RNA, 21 nt, Human
acgcuacccgggaagggggcu

SEQ ID NO: 3793188 - RNA, 18 nt, Human
acgcuacuauaaagagaa

SEQ ID NO: 3793189 - RNA, 14 nt, Human
acgcuauuccagcu

SEQ ID NO: 3793190 - RNA, 22 nt, Human
acgcuauuccagcugucccccc

SEQ ID NO: 3793191 - RNA, 17 nt, Human
acgcuccagcugccccg

SEQ ID NO: 3793192 - RNA, 19 nt, Human
acgcucccucccccugccc

SEQ ID NO: 3793193 - RNA, 20 nt, Human
acgcuccgcugccgugccgc

SEQ ID NO: 3793194 - RNA, 22 nt, Human
acgcuccucccucugaggcugu

SEQ ID NO: 3793195 - RNA, 14 nt, Human
acgcuccuuccucu

SEQ ID NO: 3793196 - RNA, 21 nt, Human
acgcuccuuuguguguguguc

SEQ ID NO: 3793197 - RNA, 22 nt, Human
acgcuccuuuguguguguguca

SEQ ID NO: 3793198 - RNA, 18 nt, Human
acgcucucuacucugcuu

SEQ ID NO: 3793199 - RNA, 11 nt, Human
acgcucucugg

SEQ ID NO: 3793200 - RNA, 15 nt, Human
acgcucucuggccuu

SEQ ID NO: 3793201 - RNA, 11 nt, Human
acgcucugcug

SEQ ID NO: 3793202 - RNA, 13 nt, Human
acgcugaauaaau

SEQ ID NO: 3793203 - RNA, 16 nt, Human
acgcugaauaaauguc

SEQ ID NO: 3793204 - RNA, 19 nt, Human
acgcugaauaaaugucuuu

SEQ ID NO: 3793205 - RNA, 17 nt, Human
acgcugacuacagggcc

SEQ ID NO: 3793206 - RNA, 15 nt, Human
acgcugagccaccug

SEQ ID NO: 3793207 - RNA, 22 nt, Human
acgcugagccaccugcccuuuu

SEQ ID NO: 3793208 - RNA, 16 nt, Human
acgcugauacauaacu

SEQ ID NO: 3793209 - RNA, 12 nt, Human
acgcugccugcc

SEQ ID NO: 3793210 - RNA, 14 nt, Human
acgcugccugcccg

SEQ ID NO: 3793211 - RNA, 18 nt, Human
acgcugccuucgguaccc

SEQ ID NO: 3793212 - RNA, 14 nt, Human
acgcugcucugccc

SEQ ID NO: 3793213 - RNA, 15 nt, Human
acgcugcucugcccc

SEQ ID NO: 3793214 - RNA, 16 nt, Human
acgcugcucugcccca

SEQ ID NO: 3793215 - RNA, 19 nt, Human
acgcugcucugccccagcu

SEQ ID NO: 3793216 - RNA, 20 nt, Human
acgcugcucugccccagcuu

SEQ ID NO: 3793217 - RNA, 12 nt, Human
acgcugcuguca

SEQ ID NO: 3793218 - RNA, 13 nt, Human
acgcuggaccuug

SEQ ID NO: 3793219 - RNA, 16 nt, Human
acgcuggagugcagug

SEQ ID NO: 3793220 - RNA, 19 nt, Human
acgcuggagugcagugagc

SEQ ID NO: 3793221 - RNA, 19 nt, Human
acgcugguagagauggagg

SEQ ID NO: 3793222 - RNA, 19 nt, Human
acgcugucuccagaccccc

SEQ ID NO: 3793223 - RNA, 21 nt, Human
acgcugucuccagacccccac

SEQ ID NO: 3793224 - RNA, 22 nt, Human
acgcugucuccagacccccacc

SEQ ID NO: 3793225 - RNA, 23 nt, Human
acgcugucuccagacccccaccc

SEQ ID NO: 3793226 - RNA, 15 nt, Human
acgcugugcugcccu

SEQ ID NO: 3793227 - RNA, 17 nt, Human
acgcugugcugcccugc

SEQ ID NO: 3793228 - RNA, 22 nt, Human
acgcugugcugcccugcccacc

SEQ ID NO: 3793229 - RNA, 14 nt, Human
acgcugugggcagg

SEQ ID NO: 3793230 - RNA, 15 nt, Human
acgcugugggcaggu

SEQ ID NO: 3793231 - RNA, 22 nt, Human
acgcuguucuaauggcacuuau

SEQ ID NO: 3793232 - RNA, 13 nt, Human
acgcuucacagug

SEQ ID NO: 3793233 - RNA, 13 nt, Human
acgcuucuccgga

SEQ ID NO: 3793234 - RNA, 18 nt, Human
acgcuugcguaugucugu

SEQ ID NO: 3793235 - RNA, 20 nt, Human
acgcuugcguaugucuguua

SEQ ID NO: 3793236 - RNA, 15 nt, Human
acgcuugcucauuuu

SEQ ID NO: 3793237 - RNA, 22 nt, Human
acagagggucacaguguuuaca

SEQ ID NO: 3793238 - RNA, 19 nt, Human
acagagguauuaaaacuaa

SEQ ID NO: 3793239 - RNA, 21 nt, Human
acagaguaaauagcauucucu

SEQ ID NO: 3793240 - RNA, 14 nt, Human
acagaguaagacau

SEQ ID NO: 3793241 - RNA, 23 nt, Human
acagaguacuuggcuguuagccc

SEQ ID NO: 3793242 - RNA, 23 nt, Human
acagaguaugaacaccugggcuu

SEQ ID NO: 3793243 - RNA, 15 nt, Human
acagagucaaggccu

SEQ ID NO: 3793244 - RNA, 17 nt, Human
acagagucucacuguug

SEQ ID NO: 3793245 - RNA, 23 nt, Human
acagagucucacuguugcccagg

SEQ ID NO: 3793246 - RNA, 19 nt, Human
acagagugauagccuuccg

SEQ ID NO: 3793247 - RNA, 18 nt, Human
acagaguggucuuucugg

SEQ ID NO: 3793248 - RNA, 19 nt, Human
acagaguggucuuucugga

SEQ ID NO: 3793249 - RNA, 16 nt, Human
acagaguuguuacauu

SEQ ID NO: 3793250 - RNA, 13 nt, Human
acagauaagcaag

SEQ ID NO: 3793251 - RNA, 15 nt, Human
acagauaagcaagag

SEQ ID NO: 3793252 - RNA, 21 nt, Human
acagauaauaauggguuucuu

SEQ ID NO: 3793253 - RNA, 14 nt, Human
acagauaaucagug

SEQ ID NO: 3793254 - RNA, 13 nt, Human
acagauaccucca

SEQ ID NO: 3793255 - RNA, 22 nt, Human
acagauacuggaaguuuugcau

SEQ ID NO: 3793256 - RNA, 21 nt, Human
acagauaguaucuagcaauca

SEQ ID NO: 3793257 - RNA, 15 nt, Human
acagauauacuuugu

SEQ ID NO: 3793258 - RNA, 20 nt, Human
acagaucauagauuucugau

SEQ ID NO: 3793259 - RNA, 21 nt, Human
acagaucauagauuucugauu

SEQ ID NO: 3793260 - RNA, 22 nt, Human
acagaucaucuuggaacugcau

SEQ ID NO: 3793261 - RNA, 17 nt, Human
acagaucuccaaagcuu

SEQ ID NO: 3793262 - RNA, 16 nt, Human
acagaucuggaaccuc

SEQ ID NO: 3793263 - RNA, 22 nt, Human
acagaucuggaaccucagccug

SEQ ID NO: 3793264 - RNA, 13 nt, Human
acagaugaaaauu

SEQ ID NO: 3793265 - RNA, 16 nt, Human
acagaugaaaauuuga

SEQ ID NO: 3793266 - RNA, 23 nt, Human
acagaugaaaauuugagacuauu

SEQ ID NO: 3793267 - RNA, 19 nt, Human
acagaugaaacacaaacaa

SEQ ID NO: 3793268 - RNA, 14 nt, Human
acagaugaauaaac

SEQ ID NO: 3793269 - RNA, 17 nt, Human
acagaugaauguauuua

SEQ ID NO: 3793270 - RNA, 20 nt, Human
acagaugaugagaauuucua

SEQ ID NO: 3793271 - RNA, 20 nt, Human
acagaugccauauaguguua

SEQ ID NO: 3793272 - RNA, 13 nt, Human
acagaugccccag

SEQ ID NO: 3793273 - RNA, 17 nt, Human
acagaugccccagagcu

SEQ ID NO: 3793274 - RNA, 21 nt, Human
acagaugccccagagcuguuu

SEQ ID NO: 3793275 - RNA, 13 nt, Human
acagaugccuccu

SEQ ID NO: 3793276 - RNA, 17 nt, Human
acagauggauuugccug

SEQ ID NO: 3793277 - RNA, 22 nt, Human
acagauggcacuuugaaggggc

SEQ ID NO: 3793278 - RNA, 14 nt, Human
acagauguccauca

SEQ ID NO: 3793279 - RNA, 22 nt, Human
acagauguccaucagaugacaa

SEQ ID NO: 3793280 - RNA, 22 nt, Human
acagaugugggcuuugauuucc

SEQ ID NO: 3793281 - RNA, 16 nt, Human
acagauucacacuguc

SEQ ID NO: 3793282 - RNA, 19 nt, Human
acagauugccuguuucuga

SEQ ID NO: 3793283 - RNA, 13 nt, Human
acagauugcugcu

SEQ ID NO: 3793284 - RNA, 24 nt, Human
acagauuggagagggcucugugcu

SEQ ID NO: 3793285 - RNA, 15 nt, Human
acagauuggauuuua

SEQ ID NO: 3793286 - RNA, 23 nt, Human
acagauuguuucuauacaaauau

SEQ ID NO: 3793287 - RNA, 17 nt, Human
acagauuucauaccuca

SEQ ID NO: 3793288 - RNA, 20 nt, Human
acagauuuccauccuaguca

SEQ ID NO: 3793289 - RNA, 14 nt, Human
acagauuugagcuc

SEQ ID NO: 3793290 - RNA, 14 nt, Human
acagauuuggaaag

SEQ ID NO: 3793291 - RNA, 20 nt, Human
acagauuuggugaauuugaa

SEQ ID NO: 3793292 - RNA, 13 nt, Human
acagauuugugaa

SEQ ID NO: 3793293 - RNA, 14 nt, Human
acagauuugugaac

SEQ ID NO: 3793294 - RNA, 21 nt, Human
acagauuugugaacucagcca

SEQ ID NO: 3793295 - RNA, 11 nt, Human
acagauuuuaa

SEQ ID NO: 3793296 - RNA, 17 nt, Human
acagauuuuaauuguca

SEQ ID NO: 3793297 - RNA, 19 nt, Human
acagauuuugauagcaaag

SEQ ID NO: 3793298 - RNA, 17 nt, Human
acagauuuuuacaaaug

SEQ ID NO: 3793299 - RNA, 15 nt, Human
acagcaaaaccauug

SEQ ID NO: 3793300 - RNA, 15 nt, Human
acagcaaacaggugc

SEQ ID NO: 3793301 - RNA, 19 nt, Human
acagcaaauuuauaauuuu

SEQ ID NO: 3793302 - RNA, 20 nt, Human
acagcaacacaaagcuuuug

SEQ ID NO: 3793303 - RNA, 22 nt, Human
acagcaacgaucacaaaugacu

SEQ ID NO: 3793304 - RNA, 16 nt, Human
acagcaaggagauuua

SEQ ID NO: 3793305 - RNA, 17 nt, Human
acagcaaggagauuuac

SEQ ID NO: 3793306 - RNA, 18 nt, Human
acagcaagggugauggga

SEQ ID NO: 3793307 - RNA, 19 nt, Human
acagcaauuccucaggcua

SEQ ID NO: 3793308 - RNA, 14 nt, Human
acagcaauuucuaa

SEQ ID NO: 3793309 - RNA, 13 nt, Human
acagcacagagaa

SEQ ID NO: 3793310 - RNA, 21 nt, Human
acagcacagagaagacaaaau

SEQ ID NO: 3793311 - RNA, 12 nt, Human
acagcacagcca

SEQ ID NO: 3793312 - RNA, 16 nt, Human
acagcacagcucccug

SEQ ID NO: 3793313 - RNA, 17 nt, Human
acagcacaugcuggcca

SEQ ID NO: 3793314 - RNA, 13 nt, Human
acagcaccaaauc

SEQ ID NO: 3793315 - RNA, 19 nt, Human
acagcacgggggccaagga

SEQ ID NO: 3793316 - RNA, 20 nt, Human
acagcacuacucugugccag

SEQ ID NO: 3793317 - RNA, 18 nt, Human
acagcacuacuggguguc

SEQ ID NO: 3793318 - RNA, 22 nt, Human
acagcacuacugggugucauuu

SEQ ID NO: 3793319 - RNA, 21 nt, Human
accuuucaccuuuguguauuu

SEQ ID NO: 3793320 - RNA, 16 nt, Human
accuuucagcugugaa

SEQ ID NO: 3793321 - RNA, 20 nt, Human
accuuucauaaucuuugcuu

SEQ ID NO: 3793322 - RNA, 13 nt, Human
accuuucccaucu

SEQ ID NO: 3793323 - RNA, 14 nt, Human
accuuucccucacc

SEQ ID NO: 3793324 - RNA, 15 nt, Human
accuuucuccuuugu

SEQ ID NO: 3793325 - RNA, 19 nt, Human
accuuucuccuuuguacuu

SEQ ID NO: 3793326 - RNA, 20 nt, Human
accuuucuccuuuguacuuu

SEQ ID NO: 3793327 - RNA, 23 nt, Human
accuuucuccuuuguacuuugug

SEQ ID NO: 3793328 - RNA, 17 nt, Human
accuuugacaaagguaa

SEQ ID NO: 3793329 - RNA, 22 nt, Human
accuuugacaaagguaaaucag

SEQ ID NO: 3793330 - RNA, 14 nt, Human
accuuugcaggcau

SEQ ID NO: 3793331 - RNA, 23 nt, Human
accuuuggguugcaaucugggga

SEQ ID NO: 3793332 - RNA, 19 nt, Human
accuuuguauucucuccug

SEQ ID NO: 3793333 - RNA, 13 nt, Human
accuuugucccca

SEQ ID NO: 3793334 - RNA, 14 nt, Human
accuuuguccccac

SEQ ID NO: 3793335 - RNA, 16 nt, Human
accuuuguccccaccg

SEQ ID NO: 3793336 - RNA, 23 nt, Human
accuuugugggguuuuuggagaa

SEQ ID NO: 3793337 - RNA, 15 nt, Human
accuuuguguauuuu

SEQ ID NO: 3793338 - RNA, 22 nt, Human
accuuuguuugcaucugaaaau

SEQ ID NO: 3793339 - RNA, 22 nt, Human
accuuuuaaauccuguugaaaa

SEQ ID NO: 3793340 - RNA, 14 nt, Human
accuuuuacuguga

SEQ ID NO: 3793341 - RNA, 16 nt, Human
accuuuuacugugaug

SEQ ID NO: 3793342 - RNA, 15 nt, Human
accuuuuauguagca

SEQ ID NO: 3793343 - RNA, 15 nt, Human
accuuuuauguagua

SEQ ID NO: 3793344 - RNA, 16 nt, Human
accuuuuauugacaca

SEQ ID NO: 3793345 - RNA, 13 nt, Human
accuuuucaggaa

SEQ ID NO: 3793346 - RNA, 19 nt, Human
accuuuugggaauguuuua

SEQ ID NO: 3793347 - RNA, 16 nt, Human
accuuuuuauuucaaa

SEQ ID NO: 3793348 - RNA, 15 nt, Human
accuuuuuccuuccu

SEQ ID NO: 3793349 - RNA, 16 nt, Human
accuuuuuuaagauuu

SEQ ID NO: 3793350 - RNA, 20 nt, Human
accuuuuuuaagauuuuucu

SEQ ID NO: 3793351 - RNA, 22 nt, Human
accuuuuuuaagauuuuucuca

SEQ ID NO: 3793352 - RNA, 14 nt, Human
accuuuuuuauaca

SEQ ID NO: 3793353 - RNA, 17 nt, Human
accuuuuuuauacauaa

SEQ ID NO: 3793354 - RNA, 19 nt, Human
accuuuuuuuuuuuuccaa

SEQ ID NO: 3793355 - RNA, 13 nt, Human
acgaaaaaauggu

SEQ ID NO: 3793356 - RNA, 13 nt, Human
acgaaacccacuc

SEQ ID NO: 3793357 - RNA, 14 nt, Human
acgaaagagagaga

SEQ ID NO: 3793358 - RNA, 23 nt, Human
acgaaagagagagaaacaaacuu

SEQ ID NO: 3793359 - RNA, 23 nt, Human
acgaaauaauuguuguucuguua

SEQ ID NO: 3793360 - RNA, 15 nt, Human
acgaacccaccugcu

SEQ ID NO: 3793361 - RNA, 16 nt, Human
acgaacccaccugcug

SEQ ID NO: 3793362 - RNA, 11 nt, Human
acgaagaaaaa

SEQ ID NO: 3793363 - RNA, 14 nt, Human
acgaaggagcccau

SEQ ID NO: 3793364 - RNA, 14 nt, Human
acgaaguguugcau

SEQ ID NO: 3793365 - RNA, 18 nt, Human
acgaauagacaucaaacu

SEQ ID NO: 3793366 - RNA, 14 nt, Human
acgaauauugcuga

SEQ ID NO: 3793367 - RNA, 15 nt, Human
acgaauauugcugau

SEQ ID NO: 3793368 - RNA, 21 nt, Human
acgaauauugcugauggugca

SEQ ID NO: 3793369 - RNA, 14 nt, Human
acgaauauuuucag

SEQ ID NO: 3793370 - RNA, 19 nt, Human
acgaauuucugugcccucc

SEQ ID NO: 3793371 - RNA, 21 nt, Human
acgaauuucugugcccuccug

SEQ ID NO: 3793372 - RNA, 22 nt, Human
acgacaaagccaaacucugcca

SEQ ID NO: 3793373 - RNA, 12 nt, Human
acgacaaagcug

SEQ ID NO: 3793374 - RNA, 15 nt, Human
acgacaaagcugcua

SEQ ID NO: 3793375 - RNA, 23 nt, Human
acgacaaagcugcuaaaucuccu

SEQ ID NO: 3793376 - RNA, 14 nt, Human
acgacaaggaaagg

SEQ ID NO: 3793377 - RNA, 21 nt, Human
acgacacggucggggcaucug

SEQ ID NO: 3793378 - RNA, 16 nt, Human
acgaccggggccagca

SEQ ID NO: 3793379 - RNA, 21 nt, Human
acgacucuuuuccaaacacag

SEQ ID NO: 3793380 - RNA, 12 nt, Human
acgacugucucc

SEQ ID NO: 3793381 - RNA, 16 nt, Human
acgagacguuuccuac

SEQ ID NO: 3793382 - RNA, 17 nt, Human
acgagagcagaggucuc

SEQ ID NO: 3793383 - RNA, 21 nt, Human
acgagaggggaagaguguacu

SEQ ID NO: 3793384 - RNA, 19 nt, Human
acgagcuguuuacuaggga

SEQ ID NO: 3793385 - RNA, 15 nt, Human
acgaggaaccgaaaa

SEQ ID NO: 3793386 - RNA, 16 nt, Human
acgaggcccucgggcc

SEQ ID NO: 3793387 - RNA, 19 nt, Human
acgaggcccucgggcccag

SEQ ID NO: 3793388 - RNA, 17 nt, Human
acgaggcugggccaagc

SEQ ID NO: 3793389 - RNA, 14 nt, Human
acgagggugccgug

SEQ ID NO: 3793390 - RNA, 14 nt, Human
acgagguaugaggu

SEQ ID NO: 3793391 - RNA, 17 nt, Human
acgagucaauccccuca

SEQ ID NO: 3793392 - RNA, 13 nt, Human
acgagugcuaagu

SEQ ID NO: 3793393 - RNA, 23 nt, Human
acgauaaggaagaaacagaagag

SEQ ID NO: 3793394 - RNA, 23 nt, Human
acgauacgcuacuauaaagagaa

SEQ ID NO: 3793395 - RNA, 16 nt, Human
acgaucacaaaugacu

SEQ ID NO: 3793396 - RNA, 21 nt, Human
acagcccucccgccccuuccc

SEQ ID NO: 3793397 - RNA, 20 nt, Human
acagcccugucagugcagcc

SEQ ID NO: 3793398 - RNA, 21 nt, Human
acagcccugucagugcagccc

SEQ ID NO: 3793399 - RNA, 23 nt, Human
acagcccuuaugcgguuaauuuu

SEQ ID NO: 3793400 - RNA, 15 nt, Human
acagcccuuuugucu

SEQ ID NO: 3793401 - RNA, 22 nt, Human
acagccgcagccucccucugac

SEQ ID NO: 3793402 - RNA, 23 nt, Human
acagccgcuccugucugccagcc

SEQ ID NO: 3793403 - RNA, 18 nt, Human
acagccggggccugccua

SEQ ID NO: 3793404 - RNA, 17 nt, Human
acagccgucagccaaau

SEQ ID NO: 3793405 - RNA, 14 nt, Human
acagccucacagaa

SEQ ID NO: 3793406 - RNA, 17 nt, Human
acagccucacagaagaa

SEQ ID NO: 3793407 - RNA, 12 nt, Human
acagccucacuu

SEQ ID NO: 3793408 - RNA, 18 nt, Human
acagccucacuugaaugu

SEQ ID NO: 3793409 - RNA, 15 nt, Human
acagccucccacccc

SEQ ID NO: 3793410 - RNA, 17 nt, Human
acagccuccccugccag

SEQ ID NO: 3793411 - RNA, 12 nt, Human
acagccuccucu

SEQ ID NO: 3793412 - RNA, 17 nt, Human
acagccuccucugucug

SEQ ID NO: 3793413 - RNA, 11 nt, Human
acagccuggca

SEQ ID NO: 3793414 - RNA, 12 nt, Human
acagccuggcac

SEQ ID NO: 3793415 - RNA, 18 nt, Human
acagccugggccccagcu

SEQ ID NO: 3793416 - RNA, 20 nt, Human
acagccuguggcggugccug

SEQ ID NO: 3793417 - RNA, 22 nt, Human
acagccuguggcggugccuggg

SEQ ID NO: 3793418 - RNA, 23 nt, Human
acagccugugucuuuaaaugcug

SEQ ID NO: 3793419 - RNA, 20 nt, Human
acagcgacauagcccauccc

SEQ ID NO: 3793420 - RNA, 17 nt, Human
acagcgagacuccgucu

SEQ ID NO: 3793421 - RNA, 22 nt, Human
acagcgagaggcagagaaagaa

SEQ ID NO: 3793422 - RNA, 17 nt, Human
acagcgagggcagcugc

SEQ ID NO: 3793423 - RNA, 23 nt, Human
acagcgagggcagcugcuauuua

SEQ ID NO: 3793424 - RNA, 18 nt, Human
acagcgccagccucagac

SEQ ID NO: 3793425 - RNA, 18 nt, Human
acagcggagucuguccug

SEQ ID NO: 3793426 - RNA, 18 nt, Human
acagcggcuggacuugga

SEQ ID NO: 3793427 - RNA, 14 nt, Human
acagcgucccuggc

SEQ ID NO: 3793428 - RNA, 15 nt, Human
acagcgucccuggcg

SEQ ID NO: 3793429 - RNA, 17 nt, Human
acagcgucccuggcgca

SEQ ID NO: 3793430 - RNA, 19 nt, Human
acagcgugcuaaaauaaca

SEQ ID NO: 3793431 - RNA, 16 nt, Human
acagcguuaugugucu

SEQ ID NO: 3793432 - RNA, 16 nt, Human
acagcguuuaagacug

SEQ ID NO: 3793433 - RNA, 14 nt, Human
acagcuaacaugga

SEQ ID NO: 3793434 - RNA, 16 nt, Human
acagcuaaugggacac

SEQ ID NO: 3793435 - RNA, 17 nt, Human
acagcuaaugggacacu

SEQ ID NO: 3793436 - RNA, 16 nt, Human
acagcuacaacagccu

SEQ ID NO: 3793437 - RNA, 22 nt, Human
acagcuaucgaacuucacaacu

SEQ ID NO: 3793438 - RNA, 21 nt, Human
acagcuaugcaaaaagcuagu

SEQ ID NO: 3793439 - RNA, 17 nt, Human
acagcuaugggagcccc

SEQ ID NO: 3793440 - RNA, 20 nt, Human
acagcucaagucuucccuga

SEQ ID NO: 3793441 - RNA, 23 nt, Human
acagcucaagucuucccugauca

SEQ ID NO: 3793442 - RNA, 18 nt, Human
acagcucagaaguuucuu

SEQ ID NO: 3793443 - RNA, 23 nt, Human
acagcucaguucuagucucucug

SEQ ID NO: 3793444 - RNA, 22 nt, Human
acagcucccaccccacccccuu

SEQ ID NO: 3793445 - RNA, 14 nt, Human
acagcuccuucugu

SEQ ID NO: 3793446 - RNA, 18 nt, Human
acagcuccuucuguccua

SEQ ID NO: 3793447 - RNA, 20 nt, Human
acagcuccuugggaggaagc

SEQ ID NO: 3793448 - RNA, 22 nt, Human
acagcuccuugggaggaagcag

SEQ ID NO: 3793449 - RNA, 15 nt, Human
acagcucgauccaaa

SEQ ID NO: 3793450 - RNA, 12 nt, Human
acagcucuggcc

SEQ ID NO: 3793451 - RNA, 14 nt, Human
acagcucuguccug

SEQ ID NO: 3793452 - RNA, 18 nt, Human
acagcucuucuccaggcu

SEQ ID NO: 3793453 - RNA, 19 nt, Human
acagcucuucuccaggcug

SEQ ID NO: 3793454 - RNA, 20 nt, Human
acagcucuucuccaggcugu

SEQ ID NO: 3793455 - RNA, 19 nt, Human
acagcucuuuuugugaagu

SEQ ID NO: 3793456 - RNA, 16 nt, Human
acagcugaauuaucua

SEQ ID NO: 3793457 - RNA, 16 nt, Human
acagcugaggucucuu

SEQ ID NO: 3793458 - RNA, 16 nt, Human
acagcugauacuucau

SEQ ID NO: 3793459 - RNA, 18 nt, Human
acagcugcaauucccugg

SEQ ID NO: 3793460 - RNA, 16 nt, Human
acagcugcauuagaaa

SEQ ID NO: 3793461 - RNA, 14 nt, Human
acagcugccucuuc

SEQ ID NO: 3793462 - RNA, 15 nt, Human
acagcugccucuucc

SEQ ID NO: 3793463 - RNA, 19 nt, Human
acuagcaccugccagggag

SEQ ID NO: 3793464 - RNA, 13 nt, Human
acuagcauaucug

SEQ ID NO: 3793465 - RNA, 15 nt, Human
acuagcauaucugcc

SEQ ID NO: 3793466 - RNA, 23 nt, Human
acuagccaacggccccagcuucu

SEQ ID NO: 3793467 - RNA, 22 nt, Human
acuagccagacacucugcucug

SEQ ID NO: 3793468 - RNA, 19 nt, Human
acuagccuuuggcucugga

SEQ ID NO: 3793469 - RNA, 20 nt, Human
acuagccuuuggcucuggag

SEQ ID NO: 3793470 - RNA, 22 nt, Human
acuagccuuuggcucuggagac

SEQ ID NO: 3793471 - RNA, 14 nt, Human
acuagcuuacauga

SEQ ID NO: 3793472 - RNA, 18 nt, Human
acuaggaaauccauucac

SEQ ID NO: 3793473 - RNA, 16 nt, Human
acuaggacucugaggc

SEQ ID NO: 3793474 - RNA, 17 nt, Human
acuaggacucugaggcu

SEQ ID NO: 3793475 - RNA, 15 nt, Human
acuaggauacugcug

SEQ ID NO: 3793476 - RNA, 16 nt, Human
acuaggcauuuguaaa

SEQ ID NO: 3793477 - RNA, 23 nt, Human
acuaggcauuuguaaauauuaaa

SEQ ID NO: 3793478 - RNA, 18 nt, Human
acuaggcccccacuugcc

SEQ ID NO: 3793479 - RNA, 22 nt, Human
acuaggccuugcggcuccucag

SEQ ID NO: 3793480 - RNA, 23 nt, Human
acuaggcugagcaaucugacccu

SEQ ID NO: 3793481 - RNA, 19 nt, Human
acuaggcugggugcccaca

SEQ ID NO: 3793482 - RNA, 22 nt, Human
acuaggcugggugcccacagcc

SEQ ID NO: 3793483 - RNA, 23 nt, Human
acuaggcugggugcccacagccc

SEQ ID NO: 3793484 - RNA, 14 nt, Human
acuagggaccuggg

SEQ ID NO: 3793485 - RNA, 16 nt, Human
acuagggaccugggga

SEQ ID NO: 3793486 - RNA, 18 nt, Human
acuagggagccauguuuc

SEQ ID NO: 3793487 - RNA, 22 nt, Human
acuagggagccauguuucacaa

SEQ ID NO: 3793488 - RNA, 16 nt, Human
acuagggaucccucau

SEQ ID NO: 3793489 - RNA, 22 nt, Human
acuaggggauauaggagaggaa

SEQ ID NO: 3793490 - RNA, 15 nt, Human
acuagguaacuucau

SEQ ID NO: 3793491 - RNA, 16 nt, Human
acuagguaacuucaua

SEQ ID NO: 3793492 - RNA, 22 nt, Human
acuaggugcccagaaugaggcu

SEQ ID NO: 3793493 - RNA, 16 nt, Human
acuagguucaauuccc

SEQ ID NO: 3793494 - RNA, 19 nt, Human
acuaguaaguaauuaugca

SEQ ID NO: 3793495 - RNA, 13 nt, Human
acuaguacaaauu

SEQ ID NO: 3793496 - RNA, 20 nt, Human
acuaguacaaauuauaaaaa

SEQ ID NO: 3793497 - RNA, 19 nt, Human
acuaguaguuccugcuaca

SEQ ID NO: 3793498 - RNA, 18 nt, Human
acuaguauuucuaugaaa

SEQ ID NO: 3793499 - RNA, 20 nt, Human
acuaguauuucuaugaaaua

SEQ ID NO: 3793500 - RNA, 16 nt, Human
acuaguauuuguugag

SEQ ID NO: 3793501 - RNA, 13 nt, Human
acuagucacccca

SEQ ID NO: 3793502 - RNA, 16 nt, Human
acuagugaggaaagau

SEQ ID NO: 3793503 - RNA, 16 nt, Human
acuagugcaaaucaua

SEQ ID NO: 3793504 - RNA, 15 nt, Human
acuagugcugaagcu

SEQ ID NO: 3793505 - RNA, 19 nt, Human
acuagugcugaagcuuauu

SEQ ID NO: 3793506 - RNA, 18 nt, Human
acuaguuacacaucuuca

SEQ ID NO: 3793507 - RNA, 15 nt, Human
acuauaaaacaaaaa

SEQ ID NO: 3793508 - RNA, 13 nt, Human
acuauaaaagcuu

SEQ ID NO: 3793509 - RNA, 19 nt, Human
acuauaaaaugucuucaag

SEQ ID NO: 3793510 - RNA, 20 nt, Human
acuauaaagaaguaacaaaa

SEQ ID NO: 3793511 - RNA, 13 nt, Human
acuauaaagagaa

SEQ ID NO: 3793512 - RNA, 14 nt, Human
acuauaaagagaag

SEQ ID NO: 3793513 - RNA, 14 nt, Human
acuauaagaacuuu

SEQ ID NO: 3793514 - RNA, 18 nt, Human
acuauaagaacuuugagc

SEQ ID NO: 3793515 - RNA, 23 nt, Human
acuauacuugaacaaaaggguca

SEQ ID NO: 3793516 - RNA, 20 nt, Human
acuauagcaaaguaguacuu

SEQ ID NO: 3793517 - RNA, 20 nt, Human
acuauagcccagguccucug

SEQ ID NO: 3793518 - RNA, 20 nt, Human
acuauagcuugcagaacugu

SEQ ID NO: 3793519 - RNA, 15 nt, Human
acuauagguccagaa

SEQ ID NO: 3793520 - RNA, 19 nt, Human
acuauauaauuuauuucca

SEQ ID NO: 3793521 - RNA, 22 nt, Human
acuauauacaucacguuaaagu

SEQ ID NO: 3793522 - RNA, 14 nt, Human
acuauauacaugug

SEQ ID NO: 3793523 - RNA, 16 nt, Human
acuauauagagauguu

SEQ ID NO: 3793524 - RNA, 17 nt, Human
acuauauagagauguuu

SEQ ID NO: 3793525 - RNA, 16 nt, Human
acuauauauauaaaug

SEQ ID NO: 3793526 - RNA, 18 nt, Human
acuauaugcaaacagggu

SEQ ID NO: 3793527 - RNA, 19 nt, Human
acuauauuaguauguaugu

SEQ ID NO: 3793528 - RNA, 19 nt, Human
acuaucaaacugaagccag

SEQ ID NO: 3793529 - RNA, 22 nt, Human
acuaucaguuuguccuguagag

SEQ ID NO: 3793530 - RNA, 14 nt, Human
acuaucauaaaauc

SEQ ID NO: 3793531 - RNA, 17 nt, Human
acuaucaucuuauucag

SEQ ID NO: 3793532 - RNA, 17 nt, Human
acuaucauuuaauaaua

SEQ ID NO: 3793533 - RNA, 17 nt, Human
acuaucccggcugcccu

SEQ ID NO: 3793534 - RNA, 16 nt, Human
acuaucuacucuccuc

SEQ ID NO: 3793535 - RNA, 20 nt, Human
acuaucucuacugaauguca

SEQ ID NO: 3793536 - RNA, 14 nt, Human
acuaucugucuggu

SEQ ID NO: 3793537 - RNA, 22 nt, Human
acuaucugugcguagaaguucu

SEQ ID NO: 3793538 - RNA, 11 nt, Human
acuaucuugug

SEQ ID NO: 3793539 - RNA, 22 nt, Human
acuaucuuuuugcuuacaguuu

SEQ ID NO: 3793540 - RNA, 16 nt, Human
acuaugaaaaugcugg

SEQ ID NO: 3793541 - RNA, 18 nt, Human
acuaugaacuucucucag

SEQ ID NO: 3793542 - RNA, 19 nt, Human
acuaugaacuucucucaga

SEQ ID NO: 3793543 - RNA, 21 nt, Human
acuaugaacuucucucagacu

SEQ ID NO: 3793544 - RNA, 16 nt, Human
acuaugccugugucuu

SEQ ID NO: 3793545 - RNA, 18 nt, Human
acuaugccugugucuucu

SEQ ID NO: 3793546 - RNA, 23 nt, Human
acuaugcguggcuggaaccacau

SEQ ID NO: 3793547 - RNA, 14 nt, Human
acuaugcguuuuua

SEQ ID NO: 3793548 - RNA, 14 nt, Human
acuauggaaaauca

SEQ ID NO: 3793549 - RNA, 17 nt, Human
acuauggaaaaucagcu

SEQ ID NO: 3793550 - RNA, 22 nt, Human
acuauggaaaaucagcugcuca

SEQ ID NO: 3793551 - RNA, 22 nt, Human
acuauggagugcaccaaagaga

SEQ ID NO: 3793552 - RNA, 21 nt, Human
acuauggauaaacuaaacacg

SEQ ID NO: 3793553 - RNA, 16 nt, Human
acuauggcugaguucu

SEQ ID NO: 3793554 - RNA, 15 nt, Human
acuaugggaugagaa

SEQ ID NO: 3793555 - RNA, 16 nt, Human
acuaugguauuugagu

SEQ ID NO: 3793556 - RNA, 14 nt, Human
acuauguaaacuac

SEQ ID NO: 3793557 - RNA, 16 nt, Human
acuauguaaacuacuu

SEQ ID NO: 3793558 - RNA, 19 nt, Human
acuauguacaauauuuuaa

SEQ ID NO: 3793559 - RNA, 21 nt, Human
acuauguacaauauuuuaagc

SEQ ID NO: 3793560 - RNA, 14 nt, Human
acuauguggaugug

SEQ ID NO: 3793561 - RNA, 15 nt, Human
acuauguugcccagg

SEQ ID NO: 3793562 - RNA, 16 nt, Human
acuauguugcccaggc

SEQ ID NO: 3793563 - RNA, 20 nt, Human
acuauguugcccaggcaggu

SEQ ID NO: 3793564 - RNA, 14 nt, Human
acuauuaagcagua

SEQ ID NO: 3793565 - RNA, 20 nt, Human
acuauuaaggauguagcuuu

SEQ ID NO: 3793566 - RNA, 20 nt, Human
acuauuauguuguuagagaa

SEQ ID NO: 3793567 - RNA, 18 nt, Human
acuauucaaacagucuca

SEQ ID NO: 3793568 - RNA, 23 nt, Human
acuauucugauuacacaaaacaa

SEQ ID NO: 3793569 - RNA, 17 nt, Human
acuauucuugauguaaa

SEQ ID NO: 3793570 - RNA, 23 nt, Human
acuauucuugauguaaaaucuug

SEQ ID NO: 3793571 - RNA, 12 nt, Human
acuauugacauc

SEQ ID NO: 3793572 - RNA, 13 nt, Human
acuauugcccagg

SEQ ID NO: 3793573 - RNA, 16 nt, Human
acuauuggaaaguacu

SEQ ID NO: 3793574 - RNA, 23 nt, Human
acuauugugcucagagacacugu

SEQ ID NO: 3793575 - RNA, 14 nt, Human
acuauuguuacauu

SEQ ID NO: 3793576 - RNA, 18 nt, Human
acuauuuaaacuuauaaa

SEQ ID NO: 3793577 - RNA, 21 nt, Human
acuauuuaaacuuauaaauca

SEQ ID NO: 3793578 - RNA, 20 nt, Human
acuauuuaaagccuccucau

SEQ ID NO: 3793579 - RNA, 17 nt, Human
acuauuuaacugacuau

SEQ ID NO: 3793580 - RNA, 18 nt, Human
acuauuuaacuugagggu

SEQ ID NO: 3793581 - RNA, 16 nt, Human
acuauuuaagauguga

SEQ ID NO: 3793582 - RNA, 20 nt, Human
acuauuuaguuuuuguaauu

SEQ ID NO: 3793583 - RNA, 12 nt, Human
acuauuuaucug

SEQ ID NO: 3793584 - RNA, 19 nt, Human
acuauuuauugacucuggg

SEQ ID NO: 3793585 - RNA, 17 nt, Human
acuauuuauuuacaaau

SEQ ID NO: 3793586 - RNA, 16 nt, Human
acuauuuccuuuauaa

SEQ ID NO: 3793587 - RNA, 14 nt, Human
acuauuucggccuu

SEQ ID NO: 3793588 - RNA, 19 nt, Human
acuauuugcuuauuuaaua

SEQ ID NO: 3793589 - RNA, 23 nt, Human
acuauuugcuuauuuaauaaaga

SEQ ID NO: 3793590 - RNA, 16 nt, Human
acuauuugucuuucag

SEQ ID NO: 3793591 - RNA, 15 nt, Human
acuauuuuauucuaa

SEQ ID NO: 3793592 - RNA, 17 nt, Human
acuauuuuauuuucuaa

SEQ ID NO: 3793593 - RNA, 22 nt, Human
acuauuuucagaugugaaccau

SEQ ID NO: 3793594 - RNA, 15 nt, Human
acaguucacacccug

SEQ ID NO: 3793595 - RNA, 18 nt, Human
acaguucacacccugcaa

SEQ ID NO: 3793596 - RNA, 19 nt, Human
acaguucacacccugcaag

SEQ ID NO: 3793597 - RNA, 12 nt, Human
acaguucaguuc

SEQ ID NO: 3793598 - RNA, 20 nt, Human
acaguuccccuauguggaag

SEQ ID NO: 3793599 - RNA, 19 nt, Human
acaguucggugagcuacaa

SEQ ID NO: 3793600 - RNA, 22 nt, Human
acaguucggugagcuacaaaug

SEQ ID NO: 3793601 - RNA, 13 nt, Human
acaguucugaaga

SEQ ID NO: 3793602 - RNA, 15 nt, Human
acaguucuucgggaa

SEQ ID NO: 3793603 - RNA, 21 nt, Human
acaguucuucgggaagagagg

SEQ ID NO: 3793604 - RNA, 24 nt, Human
acaguucuucgggaagagaggagu

SEQ ID NO: 3793605 - RNA, 17 nt, Human
acaguucuugugugguu

SEQ ID NO: 3793606 - RNA, 22 nt, Human
acauagcuacccaaaagagaaa

SEQ ID NO: 3793607 - RNA, 17 nt, Human
acauaguaaguucagca

SEQ ID NO: 3793608 - RNA, 20 nt, Human
acauaguaaguucagcacuu

SEQ ID NO: 3793609 - RNA, 22 nt, Human
acauaguaaguucagcacuugu

SEQ ID NO: 3793610 - RNA, 14 nt, Human
acauagucuggcug

SEQ ID NO: 3793611 - RNA, 15 nt, Human
acauagucuggcugu

SEQ ID NO: 3793612 - RNA, 16 nt, Human
acauagugaugguucc

SEQ ID NO: 3793613 - RNA, 20 nt, Human
acauagugggacccugucuc

SEQ ID NO: 3793614 - RNA, 17 nt, Human
acauaguucuccaguug

SEQ ID NO: 3793615 - RNA, 15 nt, Human
acauaguuuuucagu

SEQ ID NO: 3793616 - RNA, 16 nt, Human
acauauaaauugucuu

SEQ ID NO: 3793617 - RNA, 17 nt, Human
acauauaaauugucuua

SEQ ID NO: 3793618 - RNA, 15 nt, Human
acauauacacacaca

SEQ ID NO: 3793619 - RNA, 20 nt, Human
acauauacacgaauagacau

SEQ ID NO: 3793620 - RNA, 16 nt, Human
acauauaccuauaaug

SEQ ID NO: 3793621 - RNA, 20 nt, Human
acauauaccuauaaugugug

SEQ ID NO: 3793622 - RNA, 23 nt, Human
acauauaccuauaauguguguau

SEQ ID NO: 3793623 - RNA, 15 nt, Human
acauauauauauaua

SEQ ID NO: 3793624 - RNA, 21 nt, Human
acauauauuuuuaaaaaauga

SEQ ID NO: 3793625 - RNA, 19 nt, Human
acauauauuuuuuaaaaua

SEQ ID NO: 3793626 - RNA, 20 nt, Human
acauauauuuuuuaaaauaa

SEQ ID NO: 3793627 - RNA, 23 nt, Human
acauaucuacacuucgcaccgga

SEQ ID NO: 3793628 - RNA, 20 nt, Human
acauaucuaguaugaaauua

SEQ ID NO: 3793629 - RNA, 15 nt, Human
acauaucuuuauuaa

SEQ ID NO: 3793630 - RNA, 18 nt, Human
acauaucuuuauuaauca

SEQ ID NO: 3793631 - RNA, 14 nt, Human
acauaugaaaauac

SEQ ID NO: 3793632 - RNA, 15 nt, Human
acauaugaaauuuaa

SEQ ID NO: 3793633 - RNA, 14 nt, Human
acauaugacuugau

SEQ ID NO: 3793634 - RNA, 19 nt, Human
acauaugaguguggaagcc

SEQ ID NO: 3793635 - RNA, 21 nt, Human
acauaugaguguggaagccgg

SEQ ID NO: 3793636 - RNA, 16 nt, Human
acauaugcaccuugug

SEQ ID NO: 3793637 - RNA, 18 nt, Human
acauaugcaccuuguguc

SEQ ID NO: 3793638 - RNA, 13 nt, Human
acauauggaauuu

SEQ ID NO: 3793639 - RNA, 17 nt, Human
acauauggaauuuugca

SEQ ID NO: 3793640 - RNA, 13 nt, Human
acauauggauguu

SEQ ID NO: 3793641 - RNA, 15 nt, Human
acauauggauguuac

SEQ ID NO: 3793642 - RNA, 13 nt, Human
acauauguaaaau

SEQ ID NO: 3793643 - RNA, 14 nt, Human
acauauguaaaaua

SEQ ID NO: 3793644 - RNA, 16 nt, Human
acauauguacauaaau

SEQ ID NO: 3793645 - RNA, 18 nt, Human
acauauuaggaaaauaug

SEQ ID NO: 3793646 - RNA, 20 nt, Human
acauauucauuuggaaauaa

SEQ ID NO: 3793647 - RNA, 22 nt, Human
acauauuccauguuuggaagac

SEQ ID NO: 3793648 - RNA, 16 nt, Human
acauauugauuuccgu

SEQ ID NO: 3793649 - RNA, 18 nt, Human
acauauugauuuccguua

SEQ ID NO: 3793650 - RNA, 15 nt, Human
acauauuuaauguuu

SEQ ID NO: 3793651 - RNA, 16 nt, Human
acauauuuuauagaac

SEQ ID NO: 3793652 - RNA, 18 nt, Human
acauauuuuauagaacuu

SEQ ID NO: 3793653 - RNA, 22 nt, Human
acauauuuuuuauaucuggaau

SEQ ID NO: 3793654 - RNA, 23 nt, Human
acaucaaauaauugaagagacaa

SEQ ID NO: 3793655 - RNA, 16 nt, Human
acaucaacaucuuggu

SEQ ID NO: 3793656 - RNA, 14 nt, Human
acaucacagcccag

SEQ ID NO: 3793657 - RNA, 13 nt, Human
acaucacaggaca

SEQ ID NO: 3793658 - RNA, 23 nt, Human
acaucaccgacgcgucuccuguu

SEQ ID NO: 3793659 - RNA, 22 nt, Human
acaucacuauccaugcaccaaa

SEQ ID NO: 3793660 - RNA, 22 nt, Human
acaucacugcuugaugaagcaa

SEQ ID NO: 3793661 - RNA, 17 nt, Human
acaucacuguucaugcu

SEQ ID NO: 3793662 - RNA, 15 nt, Human
acaucagaaaggaau

SEQ ID NO: 3793663 - RNA, 12 nt, Human
acaucagauaag

SEQ ID NO: 3793664 - RNA, 11 nt, Human
acaucagccag

SEQ ID NO: 3793665 - RNA, 14 nt, Human
acaucagccagcug

SEQ ID NO: 3793666 - RNA, 20 nt, Human
acaucaguggcauggcucca

SEQ ID NO: 3793667 - RNA, 22 nt, Human
acaucaguggcauggcuccagu

SEQ ID NO: 3793668 - RNA, 20 nt, Human
acaucaucaaggcacugccu

SEQ ID NO: 3793669 - RNA, 14 nt, Human
acaucaucuguaag

SEQ ID NO: 3793670 - RNA, 20 nt, Human
acaucaucuguaagcuguuu

SEQ ID NO: 3793671 - RNA, 18 nt, Human
acaucauuacuauaagaa

SEQ ID NO: 3793672 - RNA, 15 nt, Human
acaucauucauuuuu

SEQ ID NO: 3793673 - RNA, 13 nt, Human
acaucauuucuuu

SEQ ID NO: 3793674 - RNA, 22 nt, Human
acaucauuucuuuuugggagag

SEQ ID NO: 3793675 - RNA, 16 nt, Human
acauccaaagcagaca

SEQ ID NO: 3793676 - RNA, 19 nt, Human
acauccaacuccagcaacu

SEQ ID NO: 3793677 - RNA, 14 nt, Human
acauccaaggagaa

SEQ ID NO: 3793678 - RNA, 21 nt, Human
acauccacaugauaccucuga

SEQ ID NO: 3793679 - RNA, 21 nt, Human
acauccagagcuuugucguau

SEQ ID NO: 3793680 - RNA, 13 nt, Human
acauccauguccu

SEQ ID NO: 3793681 - RNA, 21 nt, Human
acaucccaccccauccuccag

SEQ ID NO: 3793682 - RNA, 14 nt, Human
acaucccacugcca

SEQ ID NO: 3793683 - RNA, 16 nt, Human
acaucccauguaacag

SEQ ID NO: 3793684 - RNA, 17 nt, Human
acaucccauugcccugg

SEQ ID NO: 3793685 - RNA, 18 nt, Human
acauccccccgccaaaag

SEQ ID NO: 3793686 - RNA, 12 nt, Human
acaucccugggc

SEQ ID NO: 3793687 - RNA, 13 nt, Human
acaucccugggcc

SEQ ID NO: 3793688 - RNA, 20 nt, Human
acaucccuuaccugggaaag

SEQ ID NO: 3793689 - RNA, 18 nt, Human
acauccgccuuuuguaua

SEQ ID NO: 3793690 - RNA, 16 nt, Human
acauccgcgugugccu

SEQ ID NO: 3793691 - RNA, 17 nt, Human
acauccgcgugugccug

SEQ ID NO: 3793692 - RNA, 13 nt, Human
acauccuccuccc

SEQ ID NO: 3793693 - RNA, 13 nt, Human
acauccucuucug

SEQ ID NO: 3793694 - RNA, 12 nt, Human
acauccugggua

SEQ ID NO: 3793695 - RNA, 19 nt, Human
acauccuguauaagcacug

SEQ ID NO: 3793696 - RNA, 22 nt, Human
acauccugucaucugagaauga

SEQ ID NO: 3793697 - RNA, 14 nt, Human
acauccuguguuuc

SEQ ID NO: 3793698 - RNA, 12 nt, Human
acauccuugugg

SEQ ID NO: 3793699 - RNA, 17 nt, Human
acauccuuucuaaacaa

SEQ ID NO: 3793700 - RNA, 18 nt, Human
acauccuuugcagggcag

SEQ ID NO: 3793701 - RNA, 23 nt, Human
acauccuuugcagggcagcccca

SEQ ID NO: 3793702 - RNA, 14 nt, Human
acaucgaaugugua

SEQ ID NO: 3793703 - RNA, 14 nt, Human
acaucgcccuccac

SEQ ID NO: 3793704 - RNA, 16 nt, Human
acaucgcgaugggaac

SEQ ID NO: 3793705 - RNA, 21 nt, Human
acaucuaagccugaaggggcg

SEQ ID NO: 3793706 - RNA, 20 nt, Human
acaucuaguaguuguucuga

SEQ ID NO: 3793707 - RNA, 20 nt, Human
acaucucaacaggccucagg

SEQ ID NO: 3793708 - RNA, 21 nt, Human
acaucucaacaggccucaggg

SEQ ID NO: 3793709 - RNA, 12 nt, Human
acaucucagaga

SEQ ID NO: 3793710 - RNA, 11 nt, Human
acaucuccuua

SEQ ID NO: 3793711 - RNA, 15 nt, Human
acaucucugaaagca

SEQ ID NO: 3793712 - RNA, 15 nt, Human
acaucucugacuuuc

SEQ ID NO: 3793713 - RNA, 22 nt, Human
acaucucugcacccuggggccu

SEQ ID NO: 3793714 - RNA, 15 nt, Human
acaucucugcuugag

SEQ ID NO: 3793715 - RNA, 14 nt, Human
acaucuggaaaaua

SEQ ID NO: 3793716 - RNA, 13 nt, Human
acaucuggcuuau

SEQ ID NO: 3793717 - RNA, 17 nt, Human
acaucuguguuucaagu

SEQ ID NO: 3793718 - RNA, 16 nt, Human
acaucuguuuuaaauu

SEQ ID NO: 3793719 - RNA, 17 nt, Human
acaucuguuuuaaauuu

SEQ ID NO: 3793720 - RNA, 18 nt, Human
acaucuuaguauuugcau

SEQ ID NO: 3793721 - RNA, 11 nt, Human
acaucuuccac

SEQ ID NO: 3793722 - RNA, 14 nt, Human
acaucuugaucugc

SEQ ID NO: 3793723 - RNA, 21 nt, Human
acaucuugaucugcucagccc

SEQ ID NO: 3793724 - RNA, 15 nt, Human
acaucuugcucugcu

SEQ ID NO: 3793725 - RNA, 17 nt, Human
acaucuugcucugcuga

SEQ ID NO: 3793726 - RNA, 24 nt, Human
acaucuuggcacauuuaagagaca

SEQ ID NO: 3793727 - RNA, 16 nt, Human
acaucuuuauugaaau

SEQ ID NO: 3793728 - RNA, 22 nt, Human
acaucuuuauugaaauucuauu

SEQ ID NO: 3793729 - RNA, 16 nt, Human
acaucuuuuaagacaa

SEQ ID NO: 3793730 - RNA, 16 nt, Human
acaucuuuuuaaagcu

SEQ ID NO: 3793731 - RNA, 15 nt, Human
acaucuuuuuucaca

SEQ ID NO: 3793732 - RNA, 14 nt, Human
acaugaaaauuuua

SEQ ID NO: 3793733 - RNA, 16 nt, Human
acaugaaaauuuuaaa

SEQ ID NO: 3793734 - RNA, 23 nt, Human
acaugaaaauuuuaaaaauacau

SEQ ID NO: 3793735 - RNA, 17 nt, Human
acaugaaauuuuuguaa

SEQ ID NO: 3793736 - RNA, 14 nt, Human
acaugaacuuagau

SEQ ID NO: 3793737 - RNA, 22 nt, Human
acaugaacuuagauuuuacaug

SEQ ID NO: 3793738 - RNA, 16 nt, Human
acaugaagaagcuaaa

SEQ ID NO: 3793739 - RNA, 14 nt, Human
acaugaagaccuuu

SEQ ID NO: 3793740 - RNA, 18 nt, Human
acaugaagauucuuuccc

SEQ ID NO: 3793741 - RNA, 20 nt, Human
acaugaagcuucaugcacuu

SEQ ID NO: 3793742 - RNA, 13 nt, Human
acaugaagguaaa

SEQ ID NO: 3793743 - RNA, 23 nt, Human
acaugaagguaaauaaaaagaaa

SEQ ID NO: 3793744 - RNA, 14 nt, Human
acaugaaguauuuu

SEQ ID NO: 3793745 - RNA, 19 nt, Human
acaugaaguguguuuccuu

SEQ ID NO: 3793746 - RNA, 13 nt, Human
acaugaauaugau

SEQ ID NO: 3793747 - RNA, 21 nt, Human
acaugaaucccacccacaugu

SEQ ID NO: 3793748 - RNA, 15 nt, Human
acaugaauuuuagcu

SEQ ID NO: 3793749 - RNA, 17 nt, Human
acaugaauuuuagcuuu

SEQ ID NO: 3793750 - RNA, 22 nt, Human
acaugaauuuuagcuuuugugg

SEQ ID NO: 3793751 - RNA, 18 nt, Human
aaugacauuuauaucaca

SEQ ID NO: 3793752 - RNA, 19 nt, Human
aaugaccaguaauugugaa

SEQ ID NO: 3793753 - RNA, 22 nt, Human
aaugaccuucauucugagacca

SEQ ID NO: 3793754 - RNA, 18 nt, Human
aaugaccuuguaauguaa

SEQ ID NO: 3793755 - RNA, 21 nt, Human
aaugaccuuguaauguaacug

SEQ ID NO: 3793756 - RNA, 13 nt, Human
aaugaccuuucaa

SEQ ID NO: 3793757 - RNA, 17 nt, Human
aaugaccuuucaauagg

SEQ ID NO: 3793758 - RNA, 20 nt, Human
aaugaccuuucaauaggaaa

SEQ ID NO: 3793759 - RNA, 14 nt, Human
aaugacguuuacau

SEQ ID NO: 3793760 - RNA, 17 nt, Human
aaugacuaaaaaacaaa

SEQ ID NO: 3793761 - RNA, 12 nt, Human
aaugacuacuua

SEQ ID NO: 3793762 - RNA, 14 nt, Human
aaugacuacuuagc

SEQ ID NO: 3793763 - RNA, 23 nt, Human
aaugacuauauaauuuauuucca

SEQ ID NO: 3793764 - RNA, 20 nt, Human
aaugacucagaauauugcuu

SEQ ID NO: 3793765 - RNA, 20 nt, Human
aaugacucaggacauccccc

SEQ ID NO: 3793766 - RNA, 17 nt, Human
aaugacuuacuguacau

SEQ ID NO: 3793767 - RNA, 14 nt, Human
aaugacuuauugug

SEQ ID NO: 3793768 - RNA, 13 nt, Human
aaugacuuuauua

SEQ ID NO: 3793769 - RNA, 14 nt, Human
aaugacuuuauuau

SEQ ID NO: 3793770 - RNA, 20 nt, Human
aaugagaaaaugucuuuauu

SEQ ID NO: 3793771 - RNA, 12 nt, Human
aaugagaaaucu

SEQ ID NO: 3793772 - RNA, 13 nt, Human
aaugagaaaugga

SEQ ID NO: 3793773 - RNA, 13 nt, Human
aaugagaaucuac

SEQ ID NO: 3793774 - RNA, 13 nt, Human
aaugagacagcag

SEQ ID NO: 3793775 - RNA, 15 nt, Human
aaugagacauccagc

SEQ ID NO: 3793776 - RNA, 14 nt, Human
aaugagacuaugcg

SEQ ID NO: 3793777 - RNA, 19 nt, Human
aaugagacucuagggucca

SEQ ID NO: 3793778 - RNA, 17 nt, Human
aaugagaucccgccucu

SEQ ID NO: 3793779 - RNA, 13 nt, Human
aaugagcccagag

SEQ ID NO: 3793780 - RNA, 14 nt, Human
aaugagcccagaga

SEQ ID NO: 3793781 - RNA, 21 nt, Human
aaugagccuacgcugaagaug

SEQ ID NO: 3793782 - RNA, 12 nt, Human
aaugagccuggc

SEQ ID NO: 3793783 - RNA, 16 nt, Human
aaugagcuauguauua

SEQ ID NO: 3793784 - RNA, 19 nt, Human
aaugagcuauuaaaacuca

SEQ ID NO: 3793785 - RNA, 23 nt, Human
aaugagcuauuaaaacucagccu

SEQ ID NO: 3793786 - RNA, 17 nt, Human
aaugagcuugauuaaau

SEQ ID NO: 3793787 - RNA, 18 nt, Human
aaugagcuugauuaaauc

SEQ ID NO: 3793788 - RNA, 14 nt, Human
aaugagcuuucuga

SEQ ID NO: 3793789 - RNA, 15 nt, Human
aaugagcuuucugaa

SEQ ID NO: 3793790 - RNA, 14 nt, Human
aaugaggacauguu

SEQ ID NO: 3793791 - RNA, 16 nt, Human
aaugaggacauguuuu

SEQ ID NO: 3793792 - RNA, 14 nt, Human
aaugaggagacaca

SEQ ID NO: 3793793 - RNA, 19 nt, Human
aaugaggagagaaaauaua

SEQ ID NO: 3793794 - RNA, 12 nt, Human
aaugaggaggaa

SEQ ID NO: 3793795 - RNA, 18 nt, Human
aaugaggaggaaggagag

SEQ ID NO: 3793796 - RNA, 15 nt, Human
aaugaggauuauuga

SEQ ID NO: 3793797 - RNA, 22 nt, Human
aaugaggccauggacucugucc

SEQ ID NO: 3793798 - RNA, 18 nt, Human
aaugaggcuugcugagag

SEQ ID NO: 3793799 - RNA, 14 nt, Human
aaugagggccaaga

SEQ ID NO: 3793800 - RNA, 18 nt, Human
aaugagggccaagaaaga

SEQ ID NO: 3793801 - RNA, 19 nt, Human
aaugaggucagcaugucua

SEQ ID NO: 3793802 - RNA, 16 nt, Human
aaugaggucccaggca

SEQ ID NO: 3793803 - RNA, 14 nt, Human
aaugaggucuguuu

SEQ ID NO: 3793804 - RNA, 16 nt, Human
aaugaggucuguuuaa

SEQ ID NO: 3793805 - RNA, 14 nt, Human
aaugagucuguugu

SEQ ID NO: 3793806 - RNA, 16 nt, Human
aaugagugaauugaau

SEQ ID NO: 3793807 - RNA, 14 nt, Human
aaugagugugaagg

SEQ ID NO: 3793808 - RNA, 19 nt, Human
aaugaguuaccuacauuuu

SEQ ID NO: 3793809 - RNA, 17 nt, Human
aaugaguuuaaaaauca

SEQ ID NO: 3793810 - RNA, 21 nt, Human
aaugaguuucacagugugauu

SEQ ID NO: 3793811 - RNA, 14 nt, Human
aaugaguuucuuag

SEQ ID NO: 3793812 - RNA, 19 nt, Human
aaugaguuucuuagacuuu

SEQ ID NO: 3793813 - RNA, 21 nt, Human
aaugaguuuuuauggggcuga

SEQ ID NO: 3793814 - RNA, 21 nt, Human
aaugauaaguaaaugcuaggu

SEQ ID NO: 3793815 - RNA, 20 nt, Human
aaugauaauauuguggugcc

SEQ ID NO: 3793816 - RNA, 18 nt, Human
aaugauacccugaauuug

SEQ ID NO: 3793817 - RNA, 16 nt, Human
aaugauacugauggug

SEQ ID NO: 3793818 - RNA, 14 nt, Human
aaugauagauuuga

SEQ ID NO: 3793819 - RNA, 18 nt, Human
aaugauagauuugaccuc

SEQ ID NO: 3793820 - RNA, 15 nt, Human
aaugauagcuacugu

SEQ ID NO: 3793821 - RNA, 13 nt, Human
aaugauaugcauu

SEQ ID NO: 3793822 - RNA, 15 nt, Human
aaugauaugcuugua

SEQ ID NO: 3793823 - RNA, 18 nt, Human
aaugauaugcuuguaacu

SEQ ID NO: 3793824 - RNA, 14 nt, Human
aaugauauugcuga

SEQ ID NO: 3793825 - RNA, 22 nt, Human
aaugauauugcugaagaaucua

SEQ ID NO: 3793826 - RNA, 16 nt, Human
aaugaucagcaucugu

SEQ ID NO: 3793827 - RNA, 16 nt, Human
aaugauccccagcugu

SEQ ID NO: 3793828 - RNA, 23 nt, Human
aaugauccuguauucagacagau

SEQ ID NO: 3793829 - RNA, 17 nt, Human
aaugaucgaaaaaauaa

SEQ ID NO: 3793830 - RNA, 18 nt, Human
aaugaucgaaaaaauaau

SEQ ID NO: 3793831 - RNA, 21 nt, Human
aaugaucgaaaaaauaauuau

SEQ ID NO: 3793832 - RNA, 13 nt, Human
aaugaucuagguu

SEQ ID NO: 3793833 - RNA, 14 nt, Human
aaugaucuagguuu

SEQ ID NO: 3793834 - RNA, 18 nt, Human
aaugaucuagguuuaacu

SEQ ID NO: 3793835 - RNA, 22 nt, Human
aaugaucuagguuuaacucaga

SEQ ID NO: 3793836 - RNA, 23 nt, Human
aaugaucuagguuuaacucagau

SEQ ID NO: 3793837 - RNA, 15 nt, Human
aaugaugaguauuag

SEQ ID NO: 3793838 - RNA, 17 nt, Human
aaugaugaugauaauga

SEQ ID NO: 3793839 - RNA, 21 nt, Human
aaugaugauguggaagaacuu

SEQ ID NO: 3793840 - RNA, 12 nt, Human
aaugaugcacau

SEQ ID NO: 3793841 - RNA, 20 nt, Human
aaugaugccaugaggaacaa

SEQ ID NO: 3793842 - RNA, 15 nt, Human
aaugauggacccaau

SEQ ID NO: 3793843 - RNA, 18 nt, Human
aaugauggcaauuuugua

SEQ ID NO: 3793844 - RNA, 21 nt, Human
aaugauggcccauucuacuug

SEQ ID NO: 3793845 - RNA, 22 nt, Human
aaugaugguaggaagaagcucu

SEQ ID NO: 3793846 - RNA, 14 nt, Human
aaugauguccagaa

SEQ ID NO: 3793847 - RNA, 17 nt, Human
aaugaugugcaaaaccu

SEQ ID NO: 3793848 - RNA, 14 nt, Human
aaugauguugaaua

SEQ ID NO: 3793849 - RNA, 16 nt, Human
aaugauuaauuaaaac

SEQ ID NO: 3793850 - RNA, 15 nt, Human
aaugauuaugaauua

SEQ ID NO: 3793851 - RNA, 21 nt, Human
aaugauuaugaauuacauuug

SEQ ID NO: 3793852 - RNA, 23 nt, Human
aaugauuaugaauuacauuugua

SEQ ID NO: 3793853 - RNA, 15 nt, Human
aaugauuauuuucau

SEQ ID NO: 3793854 - RNA, 13 nt, Human
aaugauucagugu

SEQ ID NO: 3793855 - RNA, 14 nt, Human
aaugauucauguua

SEQ ID NO: 3793856 - RNA, 19 nt, Human
aaugauugcuuuuaaaauu

SEQ ID NO: 3793857 - RNA, 15 nt, Human
aaugauuguaguaau

SEQ ID NO: 3793858 - RNA, 11 nt, Human
aaugauuucag

SEQ ID NO: 3793859 - RNA, 18 nt, Human
aaugauuuccaaagagaa

SEQ ID NO: 3793860 - RNA, 19 nt, Human
aaugauuuuaucugugaau

SEQ ID NO: 3793861 - RNA, 13 nt, Human
aaugcaaaaaucu

SEQ ID NO: 3793862 - RNA, 20 nt, Human
aaugcaaacacacaaaggua

SEQ ID NO: 3793863 - RNA, 23 nt, Human
aaugcaaaccaucauugaaaucu

SEQ ID NO: 3793864 - RNA, 13 nt, Human
aaugcaaacuggg

SEQ ID NO: 3793865 - RNA, 13 nt, Human
aaugcaaagaauc

SEQ ID NO: 3793866 - RNA, 14 nt, Human
aaugcaaauaacaa

SEQ ID NO: 3793867 - RNA, 17 nt, Human
aaugcaaauaacaaaug

SEQ ID NO: 3793868 - RNA, 17 nt, Human
aaugcaaccauuugaaa

SEQ ID NO: 3793869 - RNA, 20 nt, Human
aaugcaacuacccaaaacaa

SEQ ID NO: 3793870 - RNA, 21 nt, Human
aaugcaagauuuuccacaaga

SEQ ID NO: 3793871 - RNA, 16 nt, Human
aaugcaauagaagugc

SEQ ID NO: 3793872 - RNA, 17 nt, Human
aaugcaauagaagugcu

SEQ ID NO: 3793873 - RNA, 16 nt, Human
aaugcaauauuaaugc

SEQ ID NO: 3793874 - RNA, 18 nt, Human
aaugcacaaacagaggcc

SEQ ID NO: 3793875 - RNA, 15 nt, Human
aaugcacacaaaaca

SEQ ID NO: 3793876 - RNA, 13 nt, Human
aaugcacacuagc

SEQ ID NO: 3793877 - RNA, 16 nt, Human
aaugcacauccauucc

SEQ ID NO: 3793878 - RNA, 13 nt, Human
aaugcaccuggaa

SEQ ID NO: 3793879 - RNA, 19 nt, Human
aaugcacuuuguucuggcu

SEQ ID NO: 3793880 - RNA, 18 nt, Human
aaugcagcccauuucucc

SEQ ID NO: 3793881 - RNA, 23 nt, Human
aaugcagggauugcugccacuuu

SEQ ID NO: 3793882 - RNA, 15 nt, Human
aaugcaguauauuuc

SEQ ID NO: 3793883 - RNA, 15 nt, Human
aaugcaguaugguac

SEQ ID NO: 3793884 - RNA, 16 nt, Human
aaugcaguaugguaca

SEQ ID NO: 3793885 - RNA, 17 nt, Human
aaugcaguuacaaauua

SEQ ID NO: 3793886 - RNA, 20 nt, Human
aaugcaguuacaaauuauaa

SEQ ID NO: 3793887 - RNA, 19 nt, Human
aaugcauauccugagccau

SEQ ID NO: 3793888 - RNA, 14 nt, Human
aaugcauauuugca

SEQ ID NO: 3793889 - RNA, 18 nt, Human
aaugcauauuugcaaagu

SEQ ID NO: 3793890 - RNA, 21 nt, Human
aaugcauccagcaguacaaua

SEQ ID NO: 3793891 - RNA, 19 nt, Human
aaugcauccauuccucagg

SEQ ID NO: 3793892 - RNA, 23 nt, Human
aaugcauccauuccucagggaca

SEQ ID NO: 3793893 - RNA, 19 nt, Human
aaugcaucuagauuaugga

SEQ ID NO: 3793894 - RNA, 20 nt, Human
aaugcaucuuugauguguug

SEQ ID NO: 3793895 - RNA, 21 nt, Human
aaugcaugaacaaguuuuaau

SEQ ID NO: 3793896 - RNA, 19 nt, Human
aaugcaugauuuuguaacc

SEQ ID NO: 3793897 - RNA, 15 nt, Human
aauuuuccuugaagc

SEQ ID NO: 3793898 - RNA, 20 nt, Human
aauuuuccuuuaauaugaaa

SEQ ID NO: 3793899 - RNA, 23 nt, Human
aauuuuccuuuaauaugaaauuu

SEQ ID NO: 3793900 - RNA, 17 nt, Human
aauuuucucauuuucuu

SEQ ID NO: 3793901 - RNA, 21 nt, Human
aauuuucuugaugacuggaau

SEQ ID NO: 3793902 - RNA, 22 nt, Human
aauuuugaaaaguaauauuuau

SEQ ID NO: 3793903 - RNA, 19 nt, Human
aauuuugaagugcuguuua

SEQ ID NO: 3793904 - RNA, 20 nt, Human
aauuuugaagugcuguuuau

SEQ ID NO: 3793905 - RNA, 17 nt, Human
aaugcauuauuuugaau

SEQ ID NO: 3793906 - RNA, 14 nt, Human
aaugcauucuucuc

SEQ ID NO: 3793907 - RNA, 16 nt, Human
aaugcauugauauugu

SEQ ID NO: 3793908 - RNA, 21 nt, Human
aaugcauugauauugugaaca

SEQ ID NO: 3793909 - RNA, 12 nt, Human
aaugcauuguau

SEQ ID NO: 3793910 - RNA, 13 nt, Human
aaugccaagauaa

SEQ ID NO: 3793911 - RNA, 13 nt, Human
aaugccaaucucu

SEQ ID NO: 3793912 - RNA, 16 nt, Human
aaugccacagcccugu

SEQ ID NO: 3793913 - RNA, 23 nt, Human
aaugccacagcccugucagcaug

SEQ ID NO: 3793914 - RNA, 12 nt, Human
aaugccagggcc

SEQ ID NO: 3793915 - RNA, 21 nt, Human
aaugccaguaacgcgucuucc

SEQ ID NO: 3793916 - RNA, 18 nt, Human
aaugccauaauacaaaag

SEQ ID NO: 3793917 - RNA, 23 nt, Human
aaugccauagucaaagagaguuu

SEQ ID NO: 3793918 - RNA, 23 nt, Human
aaugccaucaauaaaaaauuaug

SEQ ID NO: 3793919 - RNA, 13 nt, Human
aaugccauucucu

SEQ ID NO: 3793920 - RNA, 20 nt, Human
aaugccauuuauuuauugau

SEQ ID NO: 3793921 - RNA, 20 nt, Human
aaugccauuuuaaggaaaac

SEQ ID NO: 3793922 - RNA, 11 nt, Human
aaugcccagac

SEQ ID NO: 3793923 - RNA, 11 nt, Human
aaugcccagcc

SEQ ID NO: 3793924 - RNA, 14 nt, Human
aaugcccagccccu

SEQ ID NO: 3793925 - RNA, 20 nt, Human
aaugcccagccccuucugac

SEQ ID NO: 3793926 - RNA, 21 nt, Human
aaugccccugaauuuaaauag

SEQ ID NO: 3793927 - RNA, 18 nt, Human
aaugcccguaaugcuuag

SEQ ID NO: 3793928 - RNA, 22 nt, Human
aaugcccucaggggacuugaau

SEQ ID NO: 3793929 - RNA, 11 nt, Human
aaugcccucuu

SEQ ID NO: 3793930 - RNA, 22 nt, Human
aaugcccuuacacuuacuguug

SEQ ID NO: 3793931 - RNA, 14 nt, Human
aaugcccuucacug

SEQ ID NO: 3793932 - RNA, 17 nt, Human
aaugcccuucacuguca

SEQ ID NO: 3793933 - RNA, 15 nt, Human
aaugccuaauaaaca

SEQ ID NO: 3793934 - RNA, 20 nt, Human
aaugccucaguguauuugua

SEQ ID NO: 3793935 - RNA, 21 nt, Human
aaugccucaguguauuuguau

SEQ ID NO: 3793936 - RNA, 14 nt, Human
aaugccuccucccu

SEQ ID NO: 3793937 - RNA, 17 nt, Human
aaugccuccugugggga

SEQ ID NO: 3793938 - RNA, 22 nt, Human
aaugccucuccuuaaaugcuuc

SEQ ID NO: 3793939 - RNA, 20 nt, Human
aaugccuuaaaauggaauug

SEQ ID NO: 3793940 - RNA, 15 nt, Human
aaugccuuacuuugu

SEQ ID NO: 3793941 - RNA, 21 nt, Human
aaugccuuacuuuguaugaua

SEQ ID NO: 3793942 - RNA, 22 nt, Human
aaugccuuagaaauguaaacug

SEQ ID NO: 3793943 - RNA, 19 nt, Human
aaugccuuugagacaguuu

SEQ ID NO: 3793944 - RNA, 22 nt, Human
aaugccuuugagacaguuucuu

SEQ ID NO: 3793945 - RNA, 23 nt, Human
aaugccuuugagacaguuucuua

SEQ ID NO: 3793946 - RNA, 15 nt, Human
aaugccuuuucccaa

SEQ ID NO: 3793947 - RNA, 14 nt, Human
aaugcgauuuuauu

SEQ ID NO: 3793948 - RNA, 20 nt, Human
aaugcgcaggcuggcccugc

SEQ ID NO: 3793949 - RNA, 20 nt, Human
aaugcggccgcauucccuga

SEQ ID NO: 3793950 - RNA, 22 nt, Human
aaugcgguuauaaaaaaugguu

SEQ ID NO: 3793951 - RNA, 23 nt, Human
aaugcgguuauaaaaaaugguuc

SEQ ID NO: 3793952 - RNA, 19 nt, Human
aaugcuaauuuaaagagac

SEQ ID NO: 3793953 - RNA, 17 nt, Human
aaugcuacgugugauuu

SEQ ID NO: 3793954 - RNA, 15 nt, Human
aaugcuagaaaaauu

SEQ ID NO: 3793955 - RNA, 14 nt, Human
aaugcuagaagaaa

SEQ ID NO: 3793956 - RNA, 18 nt, Human
aaugcuagcucugagcca

SEQ ID NO: 3793957 - RNA, 17 nt, Human
aaugcuaggucucggac

SEQ ID NO: 3793958 - RNA, 18 nt, Human
aaugcuagguuaauucca

SEQ ID NO: 3793959 - RNA, 16 nt, Human
aaugcuaugucauuuc

SEQ ID NO: 3793960 - RNA, 18 nt, Human
aaugcuauuuuuguuuuu

SEQ ID NO: 3793961 - RNA, 20 nt, Human
aaugcuauuuuuguuuuuag

SEQ ID NO: 3793962 - RNA, 20 nt, Human
aaugcuccccacagcguccc

SEQ ID NO: 3793963 - RNA, 11 nt, Human
aaugcuccccc

SEQ ID NO: 3793964 - RNA, 14 nt, Human
aaugcucccccauc

SEQ ID NO: 3793965 - RNA, 20 nt, Human
aaugcucccccauccucccc

SEQ ID NO: 3793966 - RNA, 19 nt, Human
aaugcuccuuguuccuaga

SEQ ID NO: 3793967 - RNA, 18 nt, Human
aaugcugaacauugcaua

SEQ ID NO: 3793968 - RNA, 13 nt, Human
aaugcugcacuaa

SEQ ID NO: 3793969 - RNA, 12 nt, Human
aaugcugcacuu

SEQ ID NO: 3793970 - RNA, 13 nt, Human
aaugcugcacuuc

SEQ ID NO: 3793971 - RNA, 17 nt, Human
aaugcugcacuuccugu

SEQ ID NO: 3793972 - RNA, 12 nt, Human
aaugcugcagau

SEQ ID NO: 3793973 - RNA, 14 nt, Human
aaugcugcauuuua

SEQ ID NO: 3793974 - RNA, 22 nt, Human
aaugcugccuucccaugaaucu

SEQ ID NO: 3793975 - RNA, 17 nt, Human
aaugcugcuggccaaau

SEQ ID NO: 3793976 - RNA, 22 nt, Human
aaugcuggacuggaggccccug

SEQ ID NO: 3793977 - RNA, 22 nt, Human
aaugcuggagaaaaauaucugu

SEQ ID NO: 3793978 - RNA, 23 nt, Human
aaugcuggcuauagaugucuuuu

SEQ ID NO: 3793979 - RNA, 19 nt, Human
aaugcugguuuuccuaaau

SEQ ID NO: 3793980 - RNA, 22 nt, Human
aaugcuguauuagucacagaga

SEQ ID NO: 3793981 - RNA, 16 nt, Human
aaugcuguauuuuaaa

SEQ ID NO: 3793982 - RNA, 21 nt, Human
aaugcuguauuuuaaaagaau

SEQ ID NO: 3793983 - RNA, 22 nt, Human
aaugcuguauuuuaaaagaaug

SEQ ID NO: 3793984 - RNA, 19 nt, Human
aaugcugucuuucuugcuc

SEQ ID NO: 3793985 - RNA, 20 nt, Human
aaugcugugcccuaaagugu

SEQ ID NO: 3793986 - RNA, 16 nt, Human
aaugcuuaauuucuaa

SEQ ID NO: 3793987 - RNA, 20 nt, Human
aaugcuuaauuucuaaagau

SEQ ID NO: 3793988 - RNA, 22 nt, Human
aaugcuucauucaauauugaca

SEQ ID NO: 3793989 - RNA, 14 nt, Human
aaugcuucuaagua

SEQ ID NO: 3793990 - RNA, 21 nt, Human
aaugcuucuaaguaaauacaa

SEQ ID NO: 3793991 - RNA, 22 nt, Human
aaugcuucuaaguaaauacaau

SEQ ID NO: 3793992 - RNA, 20 nt, Human
aaugcuugcugcugauuuaa

SEQ ID NO: 3793993 - RNA, 17 nt, Human
aaugcuuggcuucucau

SEQ ID NO: 3793994 - RNA, 11 nt, Human
aaugcuuuuug

SEQ ID NO: 3793995 - RNA, 18 nt, Human
aauggaaaaaaaaaaaag

SEQ ID NO: 3793996 - RNA, 14 nt, Human
aauggaaaaugauu

SEQ ID NO: 3793997 - RNA, 17 nt, Human
aauggaaacagaggacc

SEQ ID NO: 3793998 - RNA, 13 nt, Human
aauggaaaggaga

SEQ ID NO: 3793999 - RNA, 16 nt, Human
aauggaaauuuugcua

SEQ ID NO: 3794000 - RNA, 14 nt, Human
aauggaaccacucu

SEQ ID NO: 3794001 - RNA, 14 nt, Human
aauggaaccaggcu

SEQ ID NO: 3794002 - RNA, 18 nt, Human
aauggaaccccaccacug

SEQ ID NO: 3794003 - RNA, 16 nt, Human
aauggaagagaaaucu

SEQ ID NO: 3794004 - RNA, 16 nt, Human
aauggaagagagaaag

SEQ ID NO: 3794005 - RNA, 22 nt, Human
aauggaauaaaaggcuugaagc

SEQ ID NO: 3794006 - RNA, 14 nt, Human
aauggaauacugaa

SEQ ID NO: 3794007 - RNA, 18 nt, Human
aauggacaaaauccauga

SEQ ID NO: 3794008 - RNA, 19 nt, Human
aauggacauaggacucaaa

SEQ ID NO: 3794009 - RNA, 14 nt, Human
aauggacauuucua

SEQ ID NO: 3794010 - RNA, 22 nt, Human
aauggacccuuuuuguuaugau

SEQ ID NO: 3794011 - RNA, 21 nt, Human
aauggaccggagagugggggu

SEQ ID NO: 3794012 - RNA, 23 nt, Human
aauggacguguuaugacuccaga

SEQ ID NO: 3794013 - RNA, 14 nt, Human
aauggacucaaacu

SEQ ID NO: 3794014 - RNA, 23 nt, Human
aauggacuggaaggggaagggac

SEQ ID NO: 3794015 - RNA, 16 nt, Human
aauggacuguggugac

SEQ ID NO: 3794016 - RNA, 18 nt, Human
aauggacuuugcacacuu

SEQ ID NO: 3794017 - RNA, 13 nt, Human
aauggagaggaac

SEQ ID NO: 3794018 - RNA, 20 nt, Human
aauggaggccauauuuccau

SEQ ID NO: 3794019 - RNA, 17 nt, Human
aauggaggccauugugu

SEQ ID NO: 3794020 - RNA, 21 nt, Human
aauggaguagaccccuggcug

SEQ ID NO: 3794021 - RNA, 22 nt, Human
aauggagucauuugagucucuu

SEQ ID NO: 3794022 - RNA, 19 nt, Human
aauggauacuacaucuuua

SEQ ID NO: 3794023 - RNA, 16 nt, Human
aauggaucacaagaug

SEQ ID NO: 3794024 - RNA, 22 nt, Human
aauggauccccagugaaaacua

SEQ ID NO: 3794025 - RNA, 13 nt, Human
aauggauuuuucu

SEQ ID NO: 3794026 - RNA, 20 nt, Human
aauggcaacaaacugcacau

SEQ ID NO: 3794027 - RNA, 21 nt, Human
aauggcaaggcagcccugucu

SEQ ID NO: 3794028 - RNA, 17 nt, Human
aauggcaaguuuuccau

SEQ ID NO: 3794029 - RNA, 20 nt, Human
aauggcacagcccaaagaag

SEQ ID NO: 3794030 - RNA, 19 nt, Human
aauggcacuguugcaaacu

SEQ ID NO: 3794031 - RNA, 18 nt, Human
aauggcagcagaaaacuu

SEQ ID NO: 3794032 - RNA, 21 nt, Human
aauggcccugggucccaggac

SEQ ID NO: 3794033 - RNA, 22 nt, Human
aauggccugccuugaagccacu

SEQ ID NO: 3794034 - RNA, 13 nt, Human
aauggccuuuauu

SEQ ID NO: 3794035 - RNA, 23 nt, Human
aauggcguccguggguugcuaac

SEQ ID NO: 3794036 - RNA, 20 nt, Human
aauggcgucuggaaguccaa

SEQ ID NO: 3794037 - RNA, 16 nt, Human
aauggcuaauucccag

SEQ ID NO: 3794038 - RNA, 13 nt, Human
aauggcuccuuca

SEQ ID NO: 3794039 - RNA, 15 nt, Human
aauggcugauaauuu

SEQ ID NO: 3794040 - RNA, 21 nt, Human
acaaaaugacauuuugccaaa

SEQ ID NO: 3794041 - RNA, 15 nt, Human
acaaaauggaauacu

SEQ ID NO: 3794042 - RNA, 19 nt, Human
acaaaauggaauacucuua

SEQ ID NO: 3794043 - RNA, 12 nt, Human
acaaaauguaac

SEQ ID NO: 3794044 - RNA, 17 nt, Human
acaaaauguaacuguua

SEQ ID NO: 3794045 - RNA, 20 nt, Human
acaaaauguaacuguuacca

SEQ ID NO: 3794046 - RNA, 20 nt, Human
acaaaauguaggguuauaau

SEQ ID NO: 3794047 - RNA, 22 nt, Human
acaaaauguaggguuauaauaa

SEQ ID NO: 3794048 - RNA, 17 nt, Human
acaaaauguuauuuccc

SEQ ID NO: 3794049 - RNA, 20 nt, Human
acaaaauuaagcaaauguua

SEQ ID NO: 3794050 - RNA, 14 nt, Human
acaaaauuucuauu

SEQ ID NO: 3794051 - RNA, 13 nt, Human
acaaaauuugacu

SEQ ID NO: 3794052 - RNA, 20 nt, Human
acaaaauuugacuaauuuua

SEQ ID NO: 3794053 - RNA, 22 nt, Human
acaaaauuuuauuuugugcuca

SEQ ID NO: 3794054 - RNA, 13 nt, Human
acaaacaaaagca

SEQ ID NO: 3794055 - RNA, 16 nt, Human
acaaacaaaauuucua

SEQ ID NO: 3794056 - RNA, 19 nt, Human
acaaacaaaauuucuauua

SEQ ID NO: 3794057 - RNA, 14 nt, Human
acaaacaagcauau

SEQ ID NO: 3794058 - RNA, 14 nt, Human
acaaacaauaccug

SEQ ID NO: 3794059 - RNA, 18 nt, Human
acaaacaauggaaacuga

SEQ ID NO: 3794060 - RNA, 20 nt, Human
acaaacaauggaaacugaau

SEQ ID NO: 3794061 - RNA, 15 nt, Human
acaaacacauuguua

SEQ ID NO: 3794062 - RNA, 14 nt, Human
acaaacagaugcuc

SEQ ID NO: 3794063 - RNA, 14 nt, Human
acaaacauaagugc

SEQ ID NO: 3794064 - RNA, 22 nt, Human
acaaacauauuuguuaaauauu

SEQ ID NO: 3794065 - RNA, 14 nt, Human
aagugguuuuaaua

SEQ ID NO: 3794066 - RNA, 18 nt, Human
aaguguaaagcauuccaa

SEQ ID NO: 3794067 - RNA, 17 nt, Human
aaguguaacagcugagg

SEQ ID NO: 3794068 - RNA, 12 nt, Human
aaguguaacugg

SEQ ID NO: 3794069 - RNA, 19 nt, Human
aaguguaagaaacacacug

SEQ ID NO: 3794070 - RNA, 15 nt, Human
aaguguaauaauaug

SEQ ID NO: 3794071 - RNA, 13 nt, Human
aaguguaggcaga

SEQ ID NO: 3794072 - RNA, 14 nt, Human
aaguguaggcagac

SEQ ID NO: 3794073 - RNA, 19 nt, Human
aaguguaggcagacacagg

SEQ ID NO: 3794074 - RNA, 19 nt, Human
aaguguauaauauaaaaaa

SEQ ID NO: 3794075 - RNA, 23 nt, Human
aaguguauaucagaaaagggaag

SEQ ID NO: 3794076 - RNA, 17 nt, Human
aaguguauuauaacagu

SEQ ID NO: 3794077 - RNA, 13 nt, Human
aaguguauuugga

SEQ ID NO: 3794078 - RNA, 15 nt, Human
aaguguauuuggaaa

SEQ ID NO: 3794079 - RNA, 21 nt, Human
aaguguauuuuauaaaauuaa

SEQ ID NO: 3794080 - RNA, 15 nt, Human
aaguguauuuuucaa

SEQ ID NO: 3794081 - RNA, 22 nt, Human
aaguguauuuuucaauaaagca

SEQ ID NO: 3794082 - RNA, 18 nt, Human
aaguguauuuuuuuacua

SEQ ID NO: 3794083 - RNA, 22 nt, Human
aagugucauauguaggugucug

SEQ ID NO: 3794084 - RNA, 24 nt, Human
aagugucauauguaggugucugca

SEQ ID NO: 3794085 - RNA, 12 nt, Human
aagugucauguu

SEQ ID NO: 3794086 - RNA, 19 nt, Human
aaguguccauugacaugua

SEQ ID NO: 3794087 - RNA, 15 nt, Human
aaguguccgagaacu

SEQ ID NO: 3794088 - RNA, 17 nt, Human
aagugucucugccuuga

SEQ ID NO: 3794089 - RNA, 19 nt, Human
aagugugaguaagagcugg

SEQ ID NO: 3794090 - RNA, 11 nt, Human
aagugugauug

SEQ ID NO: 3794091 - RNA, 20 nt, Human
aagugugcacguugcuucag

SEQ ID NO: 3794092 - RNA, 21 nt, Human
aagugugcauauuguacacuu

SEQ ID NO: 3794093 - RNA, 18 nt, Human
aagugugggucugugugu

SEQ ID NO: 3794094 - RNA, 20 nt, Human
aagugugggucugugugugu

SEQ ID NO: 3794095 - RNA, 15 nt, Human
aaguguguauauauu

SEQ ID NO: 3794096 - RNA, 21 nt, Human
aaguguguauauauuuugugu

SEQ ID NO: 3794097 - RNA, 20 nt, Human
aagugugucaaaucaauaaa

SEQ ID NO: 3794098 - RNA, 11 nt, Human
aagugugugug

SEQ ID NO: 3794099 - RNA, 17 nt, Human
aaguguguguggcagca

SEQ ID NO: 3794100 - RNA, 21 nt, Human
aaguguguguuuuucauaaag

SEQ ID NO: 3794101 - RNA, 22 nt, Human
aaguguucuguuacaaaaugua

SEQ ID NO: 3794102 - RNA, 14 nt, Human
aaguguuggaaaaa

SEQ ID NO: 3794103 - RNA, 20 nt, Human
aaguguuggaaaaaauuugu

SEQ ID NO: 3794104 - RNA, 15 nt, Human
aaguguuuauguugu

SEQ ID NO: 3794105 - RNA, 15 nt, Human
aaguguuucagcuaa

SEQ ID NO: 3794106 - RNA, 21 nt, Human
aaguguuuccuucauuucuga

SEQ ID NO: 3794107 - RNA, 14 nt, Human
aaguguuuucucug

SEQ ID NO: 3794108 - RNA, 23 nt, Human
aaguguuuuguucuuucuggagu

SEQ ID NO: 3794109 - RNA, 18 nt, Human
aaguuaaaaaaaauaaua

SEQ ID NO: 3794110 - RNA, 20 nt, Human
aaguuaaaaaaaauaauaaa

SEQ ID NO: 3794111 - RNA, 11 nt, Human
aaguuaaaggg

SEQ ID NO: 3794112 - RNA, 12 nt, Human
aaguuaaauaaa

SEQ ID NO: 3794113 - RNA, 13 nt, Human
aaguuaacagaga

SEQ ID NO: 3794114 - RNA, 21 nt, Human
aaguuaagagaaacuuuauac

SEQ ID NO: 3794115 - RNA, 22 nt, Human
aaguuaauguauauaaaaaugg

SEQ ID NO: 3794116 - RNA, 12 nt, Human
aaguuaauuuaa

SEQ ID NO: 3794117 - RNA, 20 nt, Human
aaguuacaaauugcuugaaa

SEQ ID NO: 3794118 - RNA, 15 nt, Human
aaguuacaauguuuu

SEQ ID NO: 3794119 - RNA, 19 nt, Human
aaguuacacagaaaugcug

SEQ ID NO: 3794120 - RNA, 21 nt, Human
aaguuacacagaaaugcugcu

SEQ ID NO: 3794121 - RNA, 22 nt, Human
aaguuacacagaaaugcugcug

SEQ ID NO: 3794122 - RNA, 14 nt, Human
aaguuacacauuuu

SEQ ID NO: 3794123 - RNA, 16 nt, Human
aaguuacauguuugca

SEQ ID NO: 3794124 - RNA, 19 nt, Human
aaguuacauguuugcaccu

SEQ ID NO: 3794125 - RNA, 23 nt, Human
aaguuacauugcuggucuuguaa

SEQ ID NO: 3794126 - RNA, 19 nt, Human
aaguuacuagguaacuuca

SEQ ID NO: 3794127 - RNA, 14 nt, Human
aaguuacugaaugc

SEQ ID NO: 3794128 - RNA, 16 nt, Human
aaguuacuuauucuag

SEQ ID NO: 3794129 - RNA, 13 nt, Human
aaguuacuuucuu

SEQ ID NO: 3794130 - RNA, 19 nt, Human
aaguuacuuugucagaggc

SEQ ID NO: 3794131 - RNA, 14 nt, Human
aaguuagaaucuau

SEQ ID NO: 3794132 - RNA, 19 nt, Human
aaguuagaaucuauuuucu

SEQ ID NO: 3794133 - RNA, 15 nt, Human
aaguuagaauuccuu

SEQ ID NO: 3794134 - RNA, 19 nt, Human
aaguuaguaggauaugccu

SEQ ID NO: 3794135 - RNA, 20 nt, Human
aaguuaguaucuuuugauau

SEQ ID NO: 3794136 - RNA, 18 nt, Human
aaguuaguuccacugaga

SEQ ID NO: 3794137 - RNA, 19 nt, Human
aaguuaguuccacugagac

SEQ ID NO: 3794138 - RNA, 14 nt, Human
aaguuaguuucagu

SEQ ID NO: 3794139 - RNA, 22 nt, Human
aaguuaguuuguauauauuauu

SEQ ID NO: 3794140 - RNA, 14 nt, Human
aaguuauaagacuc

SEQ ID NO: 3794141 - RNA, 17 nt, Human
aaguuauaguauaucug

SEQ ID NO: 3794142 - RNA, 15 nt, Human
aaguuauagugaaua

SEQ ID NO: 3794143 - RNA, 13 nt, Human
aaguuauauuuca

SEQ ID NO: 3794144 - RNA, 23 nt, Human
aaguuauauuuccuauaccauuu

SEQ ID NO: 3794145 - RNA, 15 nt, Human
aaguuauguguaugu

SEQ ID NO: 3794146 - RNA, 14 nt, Human
aaguuauuaaaauu

SEQ ID NO: 3794147 - RNA, 17 nt, Human
aaguuauuaaaauuguu

SEQ ID NO: 3794148 - RNA, 22 nt, Human
aaguuauuaagagguaagacuu

SEQ ID NO: 3794149 - RNA, 14 nt, Human
aaguuauuaauauu

SEQ ID NO: 3794150 - RNA, 17 nt, Human
aaguuauuagugguuua

SEQ ID NO: 3794151 - RNA, 19 nt, Human
aaguuauugauaaguucau

SEQ ID NO: 3794152 - RNA, 22 nt, Human
aaguuauugauaaguucauaca

SEQ ID NO: 3794153 - RNA, 23 nt, Human
aaguuauugauaaguucauacau

SEQ ID NO: 3794154 - RNA, 12 nt, Human
aaguuauuguac

SEQ ID NO: 3794155 - RNA, 19 nt, Human
aaguuauuuuuguacaugu

SEQ ID NO: 3794156 - RNA, 11 nt, Human
aaguucaaacu

SEQ ID NO: 3794157 - RNA, 16 nt, Human
aaguucaacauguuau

SEQ ID NO: 3794158 - RNA, 22 nt, Human
aaguucaauauaagcuuuucuu

SEQ ID NO: 3794159 - RNA, 17 nt, Human
aaguucacaaaauggug

SEQ ID NO: 3794160 - RNA, 21 nt, Human
aaguucaccagacucuauaaa

SEQ ID NO: 3794161 - RNA, 13 nt, Human
aaguucauacauu

SEQ ID NO: 3794162 - RNA, 19 nt, Human
aaguucauaccuaaguacu

SEQ ID NO: 3794163 - RNA, 23 nt, Human
aaguucauauuccauauuuauuc

SEQ ID NO: 3794164 - RNA, 20 nt, Human
aaguucauugcaauuaaacu

SEQ ID NO: 3794165 - RNA, 15 nt, Human
aaguuccaagagucu

SEQ ID NO: 3794166 - RNA, 19 nt, Human
aaguuccaaguugcuaaua

SEQ ID NO: 3794167 - RNA, 19 nt, Human
aaguuccaugggauacaac

SEQ ID NO: 3794168 - RNA, 19 nt, Human
aaguucccaguuggagcuc

SEQ ID NO: 3794169 - RNA, 17 nt, Human
aaguucccuacuuccug

SEQ ID NO: 3794170 - RNA, 20 nt, Human
aaguuccuuggccaugcaga

SEQ ID NO: 3794171 - RNA, 12 nt, Human
aaguucuaagau

SEQ ID NO: 3794172 - RNA, 20 nt, Human
aaguucuaagauucuaauga

SEQ ID NO: 3794173 - RNA, 21 nt, Human
aaguucuaauaauuucuaaug

SEQ ID NO: 3794174 - RNA, 18 nt, Human
aaguucuagagaagaggc

SEQ ID NO: 3794175 - RNA, 21 nt, Human
aaguucuagagaagaggcugg

SEQ ID NO: 3794176 - RNA, 15 nt, Human
aaguucuauuuaagu

SEQ ID NO: 3794177 - RNA, 16 nt, Human
aaguucugcuuucucc

SEQ ID NO: 3794178 - RNA, 19 nt, Human
aaguucuggaugcauuucu

SEQ ID NO: 3794179 - RNA, 17 nt, Human
aaguucuguguauuuaa

SEQ ID NO: 3794180 - RNA, 23 nt, Human
aaguucuguguuuaauuucuuca

SEQ ID NO: 3794181 - RNA, 13 nt, Human
aaguucuuagaua

SEQ ID NO: 3794182 - RNA, 23 nt, Human
aaguucuuagauaucuuuuuauu

SEQ ID NO: 3794183 - RNA, 20 nt, Human
aaguugaaagaguccuauuu

SEQ ID NO: 3794184 - RNA, 17 nt, Human
acacacugaugcuuaga

SEQ ID NO: 3794185 - RNA, 17 nt, Human
acacacugguacuuaga

SEQ ID NO: 3794186 - RNA, 20 nt, Human
acacacuguacacauaagcc

SEQ ID NO: 3794187 - RNA, 19 nt, Human
acacacugucaugcuucau

SEQ ID NO: 3794188 - RNA, 11 nt, Human
acacacugugc

SEQ ID NO: 3794189 - RNA, 23 nt, Human
acacacugugcuuucuauuguac

SEQ ID NO: 3794190 - RNA, 11 nt, Human
acacagaaaau

SEQ ID NO: 3794191 - RNA, 12 nt, Human
acacagaaaaua

SEQ ID NO: 3794192 - RNA, 13 nt, Human
acacagaaaauau

SEQ ID NO: 3794193 - RNA, 14 nt, Human
acacagaaaauaua

SEQ ID NO: 3794194 - RNA, 18 nt, Human
acacagaaaauguugaga

SEQ ID NO: 3794195 - RNA, 13 nt, Human
acacagaaacacu

SEQ ID NO: 3794196 - RNA, 21 nt, Human
acacagaaacacugccuuuuu

SEQ ID NO: 3794197 - RNA, 13 nt, Human
acacagaaaccuu

SEQ ID NO: 3794198 - RNA, 18 nt, Human
acacagaaaccuuuuuaa

SEQ ID NO: 3794199 - RNA, 21 nt, Human
acacagaaaccuuuuuaaaaa

SEQ ID NO: 3794200 - RNA, 17 nt, Human
acacagaaagccuauca

SEQ ID NO: 3794201 - RNA, 12 nt, Human
acacagaaauau

SEQ ID NO: 3794202 - RNA, 16 nt, Human
acacagaaauauauau

SEQ ID NO: 3794203 - RNA, 21 nt, Human
acacagaaauauauauacaua

SEQ ID NO: 3794204 - RNA, 19 nt, Human
acacagaggcugccucucc

SEQ ID NO: 3794205 - RNA, 21 nt, Human
acacagaguggucuuucugga

SEQ ID NO: 3794206 - RNA, 16 nt, Human
acacagauacacacac

SEQ ID NO: 3794207 - RNA, 17 nt, Human
acacagauacacacaca

SEQ ID NO: 3794208 - RNA, 16 nt, Human
acacagauagaccuuu

SEQ ID NO: 3794209 - RNA, 11 nt, Human
acacagauguu

SEQ ID NO: 3794210 - RNA, 22 nt, Human
acacagcagaggcccagauauu

SEQ ID NO: 3794211 - RNA, 17 nt, Human
acacagcauuguauaug

SEQ ID NO: 3794212 - RNA, 15 nt, Human
acacagccacacaca

SEQ ID NO: 3794213 - RNA, 19 nt, Human
acacagccugggccccagc

SEQ ID NO: 3794214 - RNA, 17 nt, Human
acacagcuacucucccc

SEQ ID NO: 3794215 - RNA, 12 nt, Human
acacagcucugu

SEQ ID NO: 3794216 - RNA, 11 nt, Human
acacagcucuu

SEQ ID NO: 3794217 - RNA, 16 nt, Human
acacagcucuucucca

SEQ ID NO: 3794218 - RNA, 18 nt, Human
acacagcucuucuccagg

SEQ ID NO: 3794219 - RNA, 19 nt, Human
acacagcucuucuccaggc

SEQ ID NO: 3794220 - RNA, 13 nt, Human
acacagcugcuuu

SEQ ID NO: 3794221 - RNA, 15 nt, Human
acacagcugggcugu

SEQ ID NO: 3794222 - RNA, 20 nt, Human
acacagcuuuaucaccagag

SEQ ID NO: 3794223 - RNA, 18 nt, Human
acacaggacagggguucc

SEQ ID NO: 3794224 - RNA, 16 nt, Human
acacaggauagauaac

SEQ ID NO: 3794225 - RNA, 24 nt, Human
acacaggauccuauucucaccagg

SEQ ID NO: 3794226 - RNA, 15 nt, Human
acacaggcaacugag

SEQ ID NO: 3794227 - RNA, 17 nt, Human
acacaggcccggcucca

SEQ ID NO: 3794228 - RNA, 19 nt, Human
acacaggcccggcuccagg

SEQ ID NO: 3794229 - RNA, 20 nt, Human
acacaggcccggcuccaggc

SEQ ID NO: 3794230 - RNA, 16 nt, Human
acacaggccuguguag

SEQ ID NO: 3794231 - RNA, 22 nt, Human
acacaggccuguguagcuguga

SEQ ID NO: 3794232 - RNA, 11 nt, Human
acacagggcag

SEQ ID NO: 3794233 - RNA, 16 nt, Human
acacaggggcuugacu

SEQ ID NO: 3794234 - RNA, 20 nt, Human
acacagggugacggugacaa

SEQ ID NO: 3794235 - RNA, 15 nt, Human
acacaggucuuuccu

SEQ ID NO: 3794236 - RNA, 18 nt, Human
acacagguggugucacug

SEQ ID NO: 3794237 - RNA, 22 nt, Human
acacagguggugucacuguccc

SEQ ID NO: 3794238 - RNA, 16 nt, Human
acacagguucacgugc

SEQ ID NO: 3794239 - RNA, 19 nt, Human
acacaguauuacuucugcu

SEQ ID NO: 3794240 - RNA, 13 nt, Human
acacaguauuuuc

SEQ ID NO: 3794241 - RNA, 18 nt, Human
acacagucaaaauaauuc

SEQ ID NO: 3794242 - RNA, 15 nt, Human
acacagucugcaaga

SEQ ID NO: 3794243 - RNA, 17 nt, Human
acacagugaccauacua

SEQ ID NO: 3794244 - RNA, 20 nt, Human
acacagugccuucaauaaau

SEQ ID NO: 3794245 - RNA, 21 nt, Human
acacaguguuuuuguaaagug

SEQ ID NO: 3794246 - RNA, 16 nt, Human
acacaguuccugggaa

SEQ ID NO: 3794247 - RNA, 18 nt, Human
acacaguuccugggaaca

SEQ ID NO: 3794248 - RNA, 19 nt, Human
acacauaagccaaaacuga

SEQ ID NO: 3794249 - RNA, 13 nt, Human
acacauaauuaaa

SEQ ID NO: 3794250 - RNA, 16 nt, Human
acacauaauuaaagug

SEQ ID NO: 3794251 - RNA, 18 nt, Human
acacauaauuaaaguguc

SEQ ID NO: 3794252 - RNA, 21 nt, Human
acacauaauuaaaguguccau

SEQ ID NO: 3794253 - RNA, 17 nt, Human
acacauacaguuuuaug

SEQ ID NO: 3794254 - RNA, 18 nt, Human
acacauagauuaauggca

SEQ ID NO: 3794255 - RNA, 21 nt, Human
acacauagauuaauggcacug

SEQ ID NO: 3794256 - RNA, 13 nt, Human
acacauagauuca

SEQ ID NO: 3794257 - RNA, 19 nt, Human
acacauagauucaccugua

SEQ ID NO: 3794258 - RNA, 14 nt, Human
acacauauaaacau

SEQ ID NO: 3794259 - RNA, 17 nt, Human
acacauaugagggggaa

SEQ ID NO: 3794260 - RNA, 16 nt, Human
acacauaugucauaua

SEQ ID NO: 3794261 - RNA, 18 nt, Human
acacaucacccuuaccau

SEQ ID NO: 3794262 - RNA, 20 nt, Human
acacaucagccaucaacuaa

SEQ ID NO: 3794263 - RNA, 22 nt, Human
acacaucagcuugcccuguuaa

SEQ ID NO: 3794264 - RNA, 16 nt, Human
acacaucccagcccaa

SEQ ID NO: 3794265 - RNA, 19 nt, Human
acacaucccuaaugugugc

SEQ ID NO: 3794266 - RNA, 21 nt, Human
acacauccgccuuuuguauac

SEQ ID NO: 3794267 - RNA, 13 nt, Human
aauuccgucacca

SEQ ID NO: 3794268 - RNA, 14 nt, Human
aauuccuacagcac

SEQ ID NO: 3794269 - RNA, 15 nt, Human
aauuccuacagcacu

SEQ ID NO: 3794270 - RNA, 20 nt, Human
aauuccuagauaaaaagaug

SEQ ID NO: 3794271 - RNA, 12 nt, Human
aauuccuauaag

SEQ ID NO: 3794272 - RNA, 22 nt, Human
aauuccuauacgcagcgugcuu

SEQ ID NO: 3794273 - RNA, 18 nt, Human
aauuccuauugugauuug

SEQ ID NO: 3794274 - RNA, 21 nt, Human
aauuccucauccucagaugcu

SEQ ID NO: 3794275 - RNA, 21 nt, Human
aauucgcccgagcuguuuaug

SEQ ID NO: 3794276 - RNA, 23 nt, Human
aauucgcccgagcuguuuauguu

SEQ ID NO: 3794277 - RNA, 15 nt, Human
aauucggugugcacc

SEQ ID NO: 3794278 - RNA, 22 nt, Human
aauucuaaauaaaauauaauug

SEQ ID NO: 3794279 - RNA, 13 nt, Human
aauucuaaaugaa

SEQ ID NO: 3794280 - RNA, 22 nt, Human
aauucuaaucuaacaauggaag

SEQ ID NO: 3794281 - RNA, 15 nt, Human
aauucuacauuguca

SEQ ID NO: 3794282 - RNA, 22 nt, Human
aauucuauaaggccauaaaaca

SEQ ID NO: 3794283 - RNA, 13 nt, Human
aauucuaugccug

SEQ ID NO: 3794284 - RNA, 15 nt, Human
aauucuaugccuguc

SEQ ID NO: 3794285 - RNA, 23 nt, Human
aauucuauuaaagugcuaagguu

SEQ ID NO: 3794286 - RNA, 14 nt, Human
aauucuauuugcug

SEQ ID NO: 3794287 - RNA, 17 nt, Human
aauucucaaccuaccac

SEQ ID NO: 3794288 - RNA, 19 nt, Human
aauucucaugugauccuuu

SEQ ID NO: 3794289 - RNA, 20 nt, Human
aauucucaugugauccuuuu

SEQ ID NO: 3794290 - RNA, 21 nt, Human
aauucucaugugauccuuuua

SEQ ID NO: 3794291 - RNA, 21 nt, Human
aauucucauuugucacacacu

SEQ ID NO: 3794292 - RNA, 15 nt, Human
aauucuccacugugc

SEQ ID NO: 3794293 - RNA, 15 nt, Human
aauucuccugccuuu

SEQ ID NO: 3794294 - RNA, 18 nt, Human
aauucuccugccuuugcc

SEQ ID NO: 3794295 - RNA, 15 nt, Human
aauucucuaguuuga

SEQ ID NO: 3794296 - RNA, 17 nt, Human
aauucucuaguuugauu

SEQ ID NO: 3794297 - RNA, 15 nt, Human
aauucugaaguuaua

SEQ ID NO: 3794298 - RNA, 17 nt, Human
aauucugaauuugcaaa

SEQ ID NO: 3794299 - RNA, 19 nt, Human
aauucugaauuugcaaagu

SEQ ID NO: 3794300 - RNA, 20 nt, Human
aauucugaauuugcaaagua

SEQ ID NO: 3794301 - RNA, 23 nt, Human
aauucugaguuuuguguuuguug

SEQ ID NO: 3794302 - RNA, 19 nt, Human
aauucugcaauguuuuccu

SEQ ID NO: 3794303 - RNA, 19 nt, Human
aauucugcuaccucacugg

SEQ ID NO: 3794304 - RNA, 20 nt, Human
aauucuguacauagccuaua

SEQ ID NO: 3794305 - RNA, 14 nt, Human
aauucuguauagau

SEQ ID NO: 3794306 - RNA, 23 nt, Human
aauucuguggguccgauaauauc

SEQ ID NO: 3794307 - RNA, 17 nt, Human
aauucuguucauuuguu

SEQ ID NO: 3794308 - RNA, 13 nt, Human
aauucuguuucuu

SEQ ID NO: 3794309 - RNA, 18 nt, Human
aauucuguuuuuaaaaau

SEQ ID NO: 3794310 - RNA, 14 nt, Human
aauucuguuuuucu

SEQ ID NO: 3794311 - RNA, 14 nt, Human
aauucuuaaaauau

SEQ ID NO: 3794312 - RNA, 22 nt, Human
aauucuuacacugccuguauac

SEQ ID NO: 3794313 - RNA, 23 nt, Human
aauucuuacacugccuguauacu

SEQ ID NO: 3794314 - RNA, 18 nt, Human
aauucuuacccuguacau

SEQ ID NO: 3794315 - RNA, 23 nt, Human
aauucuuauuccauauuagaaaa

SEQ ID NO: 3794316 - RNA, 15 nt, Human
aauucuuauucuuuc

SEQ ID NO: 3794317 - RNA, 23 nt, Human
aauucuucaccuaagucucugug

SEQ ID NO: 3794318 - RNA, 19 nt, Human
aauucuucagcguaaaaug

SEQ ID NO: 3794319 - RNA, 15 nt, Human
aauucuucugaacuc

SEQ ID NO: 3794320 - RNA, 15 nt, Human
aauucuucuguccug

SEQ ID NO: 3794321 - RNA, 17 nt, Human
aauucuugcauauuuug

SEQ ID NO: 3794322 - RNA, 15 nt, Human
aauucuuggaauacu

SEQ ID NO: 3794323 - RNA, 15 nt, Human
aauucuuguauauua

SEQ ID NO: 3794324 - RNA, 17 nt, Human
aauucuuuaaaauuaca

SEQ ID NO: 3794325 - RNA, 14 nt, Human
aauucuuuauacaa

SEQ ID NO: 3794326 - RNA, 19 nt, Human
aauucuuuauacaacagug

SEQ ID NO: 3794327 - RNA, 22 nt, Human
aauucuuuauacaacagugcua

SEQ ID NO: 3794328 - RNA, 18 nt, Human
acaccagagcccaccuug

SEQ ID NO: 3794329 - RNA, 20 nt, Human
acaccagccuuucucccagg

SEQ ID NO: 3794330 - RNA, 14 nt, Human
acaccagggccagc

SEQ ID NO: 3794331 - RNA, 18 nt, Human
acaccagggccagccucu

SEQ ID NO: 3794332 - RNA, 15 nt, Human
acaccaugauuccuu

SEQ ID NO: 3794333 - RNA, 16 nt, Human
acaccaugauuccuuu

SEQ ID NO: 3794334 - RNA, 18 nt, Human
acaccaugauuccuuuaa

SEQ ID NO: 3794335 - RNA, 22 nt, Human
acaccauuggaccccacccagc

SEQ ID NO: 3794336 - RNA, 19 nt, Human
acacccaaagagguauuua

SEQ ID NO: 3794337 - RNA, 20 nt, Human
acacccaaagcauggacuaa

SEQ ID NO: 3794338 - RNA, 14 nt, Human
acacccaaagcuga

SEQ ID NO: 3794339 - RNA, 15 nt, Human
acacccacacucaga

SEQ ID NO: 3794340 - RNA, 22 nt, Human
acacccaccguccgcccugcuc

SEQ ID NO: 3794341 - RNA, 13 nt, Human
acacccagcaaua

SEQ ID NO: 3794342 - RNA, 13 nt, Human
acacccagcccac

SEQ ID NO: 3794343 - RNA, 21 nt, Human
acacccagcccacuucugcca

SEQ ID NO: 3794344 - RNA, 14 nt, Human
acacccagccucag

SEQ ID NO: 3794345 - RNA, 20 nt, Human
acacccagccucaguccucc

SEQ ID NO: 3794346 - RNA, 23 nt, Human
acacccagccucaguccuccccu

SEQ ID NO: 3794347 - RNA, 12 nt, Human
acaccccaccug

SEQ ID NO: 3794348 - RNA, 20 nt, Human
acaccccauugguggacuac

SEQ ID NO: 3794349 - RNA, 17 nt, Human
acaccccgacuuuuguu

SEQ ID NO: 3794350 - RNA, 16 nt, Human
acaccccuccccugcc

SEQ ID NO: 3794351 - RNA, 23 nt, Human
acaccccuccccugcccuagagc

SEQ ID NO: 3794352 - RNA, 18 nt, Human
acaccccuuauccaggac

SEQ ID NO: 3794353 - RNA, 19 nt, Human
acaccccuuauccaggacu

SEQ ID NO: 3794354 - RNA, 17 nt, Human
acacccgacuccucaaa

SEQ ID NO: 3794355 - RNA, 18 nt, Human
acacccgugagcgccugu

SEQ ID NO: 3794356 - RNA, 20 nt, Human
acacccucacucugccaggg

SEQ ID NO: 3794357 - RNA, 22 nt, Human
acacccucgaagcgcgccacuc

SEQ ID NO: 3794358 - RNA, 12 nt, Human
acacccucuccc

SEQ ID NO: 3794359 - RNA, 13 nt, Human
acacccugcaagg

SEQ ID NO: 3794360 - RNA, 12 nt, Human
acacccugcccu

SEQ ID NO: 3794361 - RNA, 22 nt, Human
acacccuucucccacucuccua

SEQ ID NO: 3794362 - RNA, 13 nt, Human
acaccgacuagcc

SEQ ID NO: 3794363 - RNA, 20 nt, Human
acaccggcuggcagggcugg

SEQ ID NO: 3794364 - RNA, 16 nt, Human
acaccgggccuggaga

SEQ ID NO: 3794365 - RNA, 19 nt, Human
acaccgggguggugggaac

SEQ ID NO: 3794366 - RNA, 15 nt, Human
acaccuaacucaccu

SEQ ID NO: 3794367 - RNA, 18 nt, Human
acaccuaagggacauguu

SEQ ID NO: 3794368 - RNA, 22 nt, Human
acaccuaagggacauguuuuga

SEQ ID NO: 3794369 - RNA, 21 nt, Human
acaccuagcuuuauucuucag

SEQ ID NO: 3794370 - RNA, 23 nt, Human
acaccuaggcuaggguggggaga

SEQ ID NO: 3794371 - RNA, 20 nt, Human
acaccuaugucauuucauuu

SEQ ID NO: 3794372 - RNA, 20 nt, Human
acaccucacucugcuaccuu

SEQ ID NO: 3794373 - RNA, 18 nt, Human
acaccucaguucccuugg

SEQ ID NO: 3794374 - RNA, 21 nt, Human
acaccucaguucccuuggccu

SEQ ID NO: 3794375 - RNA, 22 nt, Human
acaccucaguucccuuggccuc

SEQ ID NO: 3794376 - RNA, 13 nt, Human
acaccucccugaa

SEQ ID NO: 3794377 - RNA, 15 nt, Human
acaccuccucucacu

SEQ ID NO: 3794378 - RNA, 11 nt, Human
acaccuccuuc

SEQ ID NO: 3794379 - RNA, 22 nt, Human
acaccuccuucccucucuggag

SEQ ID NO: 3794380 - RNA, 12 nt, Human
acaccucgcccc

SEQ ID NO: 3794381 - RNA, 22 nt, Human
acaccucguuagggaagagaaa

SEQ ID NO: 3794382 - RNA, 18 nt, Human
acaccucugcacaagcug

SEQ ID NO: 3794383 - RNA, 13 nt, Human
acaccucugccag

SEQ ID NO: 3794384 - RNA, 15 nt, Human
acaccucugcuuucu

SEQ ID NO: 3794385 - RNA, 21 nt, Human
acaccucugcuuucugauguu

SEQ ID NO: 3794386 - RNA, 16 nt, Human
acaccugacucugaaa

SEQ ID NO: 3794387 - RNA, 21 nt, Human
acaccugacucugaaaucuga

SEQ ID NO: 3794388 - RNA, 12 nt, Human
acaccugcaccu

SEQ ID NO: 3794389 - RNA, 16 nt, Human
acaccugcaccucccc

SEQ ID NO: 3794390 - RNA, 18 nt, Human
acaccugcaccucccccc

SEQ ID NO: 3794391 - RNA, 19 nt, Human
acaccugcagccucccucc

SEQ ID NO: 3794392 - RNA, 15 nt, Human
acaccugcccugccc

SEQ ID NO: 3794393 - RNA, 17 nt, Human
acaccugcccugcccug

SEQ ID NO: 3794394 - RNA, 17 nt, Human
acaccuggcccuggggc

SEQ ID NO: 3794395 - RNA, 23 nt, Human
acaccuggcugagguuccucugc

SEQ ID NO: 3794396 - RNA, 21 nt, Human
acaccuuagccugcccuccuu

SEQ ID NO: 3794397 - RNA, 23 nt, Human
acaccuuagccugcccuccuuuc

SEQ ID NO: 3794398 - RNA, 15 nt, Human
acaccuuauauuuac

SEQ ID NO: 3794399 - RNA, 21 nt, Human
acaccuucuuauuauauauau

SEQ ID NO: 3794400 - RNA, 15 nt, Human
acaccuugacagggc

SEQ ID NO: 3794401 - RNA, 15 nt, Human
acaccuuuagguucu

SEQ ID NO: 3794402 - RNA, 17 nt, Human
acaccuuucuccuuugu

SEQ ID NO: 3794403 - RNA, 17 nt, Human
acaccuuuuaacucacc

SEQ ID NO: 3794404 - RNA, 13 nt, Human
acacgaaacuugu

SEQ ID NO: 3794405 - RNA, 23 nt, Human
acacgaaacuuguuauugugaau

SEQ ID NO: 3794406 - RNA, 14 nt, Human
acacgaaagagaga

SEQ ID NO: 3794407 - RNA, 18 nt, Human
acacgaacuuuagcugca

SEQ ID NO: 3794408 - RNA, 14 nt, Human
acacgaauauugcu

SEQ ID NO: 3794409 - RNA, 18 nt, Human
acacgaauauugcugaug

SEQ ID NO: 3794410 - RNA, 21 nt, Human
acacgaauauugcugauggug

SEQ ID NO: 3794411 - RNA, 22 nt, Human
acacgaccggggccagcaccac

SEQ ID NO: 3794412 - RNA, 13 nt, Human
acacgcacacaca

SEQ ID NO: 3794413 - RNA, 23 nt, Human
acacgcacacacacacacaggag

SEQ ID NO: 3794414 - RNA, 13 nt, Human
acacgcacgcaca

SEQ ID NO: 3794415 - RNA, 20 nt, Human
acacgcacgcacacacacaa

SEQ ID NO: 3794416 - RNA, 15 nt, Human
acacgcaggagcaca

SEQ ID NO: 3794417 - RNA, 20 nt, Human
acacgccccaauuuucaggu

SEQ ID NO: 3794418 - RNA, 23 nt, Human
acacgcgccccccucccagaggc

SEQ ID NO: 3794419 - RNA, 12 nt, Human
acacgcuccuuc

SEQ ID NO: 3794420 - RNA, 16 nt, Human
acacgcuccuuccucu

SEQ ID NO: 3794421 - RNA, 12 nt, Human
acacgcugccuu

SEQ ID NO: 3794422 - RNA, 17 nt, Human
acacgcugcucugcccc

SEQ ID NO: 3794423 - RNA, 18 nt, Human
acacggagcccagcccuc

SEQ ID NO: 3794424 - RNA, 14 nt, Human
acacggaggcaucu

SEQ ID NO: 3794425 - RNA, 17 nt, Human
acacggaggcaucugca

SEQ ID NO: 3794426 - RNA, 14 nt, Human
acacggccacauca

SEQ ID NO: 3794427 - RNA, 16 nt, Human
acacgggcagccuggc

SEQ ID NO: 3794428 - RNA, 15 nt, Human
acacgggccugucca

SEQ ID NO: 3794429 - RNA, 16 nt, Human
acacgggggcagcuga

SEQ ID NO: 3794430 - RNA, 16 nt, Human
acacgggguauuuuag

SEQ ID NO: 3794431 - RNA, 22 nt, Human
acacgguuugaagccuggaaca

SEQ ID NO: 3794432 - RNA, 23 nt, Human
aauagaguguaguuuacagaaaa

SEQ ID NO: 3794433 - RNA, 19 nt, Human
aauagauaugaaagcugau

SEQ ID NO: 3794434 - RNA, 21 nt, Human
aauagaugacauugacuauuu

SEQ ID NO: 3794435 - RNA, 19 nt, Human
aauagauguuugauagauu

SEQ ID NO: 3794436 - RNA, 22 nt, Human
aauagauguuugauagauuuuc

SEQ ID NO: 3794437 - RNA, 15 nt, Human
aauagauuauaguug

SEQ ID NO: 3794438 - RNA, 22 nt, Human
aauagauugcucaaaucagguu

SEQ ID NO: 3794439 - RNA, 15 nt, Human
aauagcaaagaauug

SEQ ID NO: 3794440 - RNA, 18 nt, Human
aauagcaaagaauugacu

SEQ ID NO: 3794441 - RNA, 17 nt, Human
aauagcaacaugcuuca

SEQ ID NO: 3794442 - RNA, 15 nt, Human
aauagcaaccuuuuu

SEQ ID NO: 3794443 - RNA, 15 nt, Human
aauagcaacuuuugu

SEQ ID NO: 3794444 - RNA, 21 nt, Human
aauagcaaggcugugcaucua

SEQ ID NO: 3794445 - RNA, 15 nt, Human
aauagcaauauucuu

SEQ ID NO: 3794446 - RNA, 20 nt, Human
aauagcacuuucauugccag

SEQ ID NO: 3794447 - RNA, 23 nt, Human
aauagcagcccucaauugugaaa

SEQ ID NO: 3794448 - RNA, 19 nt, Human
aauagcauguauugugucu

SEQ ID NO: 3794449 - RNA, 12 nt, Human
aauagcauguca

SEQ ID NO: 3794450 - RNA, 15 nt, Human
aauagcaugucacua

SEQ ID NO: 3794451 - RNA, 20 nt, Human
aauagcaugucacuaaagca

SEQ ID NO: 3794452 - RNA, 20 nt, Human
aauagcauguccuaaugcuu

SEQ ID NO: 3794453 - RNA, 17 nt, Human
aauagcauguuguagau

SEQ ID NO: 3794454 - RNA, 18 nt, Human
aauagcauguuguagaua

SEQ ID NO: 3794455 - RNA, 21 nt, Human
aauagccaacacccaucuguu

SEQ ID NO: 3794456 - RNA, 20 nt, Human
aauagccacuaaccuugccu

SEQ ID NO: 3794457 - RNA, 23 nt, Human
aauagccacugcauaccaaccug

SEQ ID NO: 3794458 - RNA, 20 nt, Human
aauagccacuuaccuucaau

SEQ ID NO: 3794459 - RNA, 22 nt, Human
aauagccauauuuguaaaauga

SEQ ID NO: 3794460 - RNA, 16 nt, Human
aauagcguucuuguaa

SEQ ID NO: 3794461 - RNA, 21 nt, Human
aauagcuaaauaccucaauca

SEQ ID NO: 3794462 - RNA, 16 nt, Human
aauagcuacagugcau

SEQ ID NO: 3794463 - RNA, 21 nt, Human
aauagcuagacuggugacuga

SEQ ID NO: 3794464 - RNA, 20 nt, Human
aauagcuauauccauguacu

SEQ ID NO: 3794465 - RNA, 21 nt, Human
aauagcuauauccauguacug

SEQ ID NO: 3794466 - RNA, 20 nt, Human
aauagcucccagauuucagu

SEQ ID NO: 3794467 - RNA, 14 nt, Human
aauagcugggacua

SEQ ID NO: 3794468 - RNA, 18 nt, Human
aauagcuguaaacuucca

SEQ ID NO: 3794469 - RNA, 17 nt, Human
aauagcuuaugaaaaga

SEQ ID NO: 3794470 - RNA, 14 nt, Human
aauagcuuguauag

SEQ ID NO: 3794471 - RNA, 19 nt, Human
aauagcuuguauaguguaa

SEQ ID NO: 3794472 - RNA, 21 nt, Human
aaucuuaauacuguuauucuu

SEQ ID NO: 3794473 - RNA, 14 nt, Human
aaucuuaauguucc

SEQ ID NO: 3794474 - RNA, 18 nt, Human
aaucuuacagcugggugg

SEQ ID NO: 3794475 - RNA, 14 nt, Human
aaucuuacucuaga

SEQ ID NO: 3794476 - RNA, 19 nt, Human
aaucuuaggggagagcuuu

SEQ ID NO: 3794477 - RNA, 16 nt, Human
aaucuuauaauuuaaa

SEQ ID NO: 3794478 - RNA, 19 nt, Human
aaucuuauaauuuaaaaua

SEQ ID NO: 3794479 - RNA, 19 nt, Human
aaucuuauaguucuaggca

SEQ ID NO: 3794480 - RNA, 21 nt, Human
aaucuuaucauggucucaguc

SEQ ID NO: 3794481 - RNA, 17 nt, Human
aaucuuauuaaaguuuc

SEQ ID NO: 3794482 - RNA, 20 nt, Human
aaucuuauuaaaguuucaaa

SEQ ID NO: 3794483 - RNA, 14 nt, Human
aaucuucaauaguu

SEQ ID NO: 3794484 - RNA, 15 nt, Human
aaucuuccaauuuag

SEQ ID NO: 3794485 - RNA, 17 nt, Human
aaucuucccaugcauuc

SEQ ID NO: 3794486 - RNA, 14 nt, Human
aaucuuccuguuua

SEQ ID NO: 3794487 - RNA, 16 nt, Human
aaucuucuccagauuu

SEQ ID NO: 3794488 - RNA, 18 nt, Human
acagagaacuaacacuau

SEQ ID NO: 3794489 - RNA, 19 nt, Human
acagagaacuaacacuauu

SEQ ID NO: 3794490 - RNA, 23 nt, Human
acagagaacuagugguggcucug

SEQ ID NO: 3794491 - RNA, 9 nt, Human
acagagaag

SEQ ID NO: 3794492 - RNA, 15 nt, Human
acagagaagccagcu

SEQ ID NO: 3794493 - RNA, 19 nt, Human
acagagaagccagcuuguu

SEQ ID NO: 3794494 - RNA, 13 nt, Human
acagagaagccau

SEQ ID NO: 3794495 - RNA, 12 nt, Human
acagagaagccu

SEQ ID NO: 3794496 - RNA, 14 nt, Human
acagagaagccuuc

SEQ ID NO: 3794497 - RNA, 16 nt, Human
acagagaagccuucaa

SEQ ID NO: 3794498 - RNA, 23 nt, Human
acagagaagccuucaagcucuga

SEQ ID NO: 3794499 - RNA, 19 nt, Human
acagagaaggaaugucuuu

SEQ ID NO: 3794500 - RNA, 22 nt, Human
acagagaaggaaugucuuuggu

SEQ ID NO: 3794501 - RNA, 14 nt, Human
acagagaaggcagg

SEQ ID NO: 3794502 - RNA, 12 nt, Human
acagagaaguca

SEQ ID NO: 3794503 - RNA, 14 nt, Human
acagagaagucaca

SEQ ID NO: 3794504 - RNA, 16 nt, Human
acagagaagucacagg

SEQ ID NO: 3794505 - RNA, 16 nt, Human
acagagacaccugcac

SEQ ID NO: 3794506 - RNA, 17 nt, Human
acagagacaccugcacc

SEQ ID NO: 3794507 - RNA, 19 nt, Human
acagagacauuccuccgag

SEQ ID NO: 3794508 - RNA, 19 nt, Human
acagagaccucccuguuca

SEQ ID NO: 3794509 - RNA, 20 nt, Human
acagagaggagaaacacauc

SEQ ID NO: 3794510 - RNA, 24 nt, Human
acagagagggagagcagagaaaga

SEQ ID NO: 3794511 - RNA, 21 nt, Human
acagagagggcaccaucacaa

SEQ ID NO: 3794512 - RNA, 19 nt, Human
acagagaugcuaagagaaa

SEQ ID NO: 3794513 - RNA, 16 nt, Human
acagagcaguugagag

SEQ ID NO: 3794514 - RNA, 20 nt, Human
acagagccaggagaagcuca

SEQ ID NO: 3794515 - RNA, 22 nt, Human
acagagccaggagaagcucagc

SEQ ID NO: 3794516 - RNA, 18 nt, Human
acagagcccacgccccca

SEQ ID NO: 3794517 - RNA, 17 nt, Human
acagagccguaaaaacu

SEQ ID NO: 3794518 - RNA, 23 nt, Human
acagagccuucugaggacauucc

SEQ ID NO: 3794519 - RNA, 16 nt, Human
acagagcgacagagca

SEQ ID NO: 3794520 - RNA, 15 nt, Human
acagagcucuccagc

SEQ ID NO: 3794521 - RNA, 15 nt, Human
acagagcuucccuga

SEQ ID NO: 3794522 - RNA, 14 nt, Human
acagaggaagagca

SEQ ID NO: 3794523 - RNA, 19 nt, Human
acagaggcagccccauucu

SEQ ID NO: 3794524 - RNA, 15 nt, Human
acagaggcccucaag

SEQ ID NO: 3794525 - RNA, 12 nt, Human
acagaggccugc

SEQ ID NO: 3794526 - RNA, 13 nt, Human
acagaggccugcc

SEQ ID NO: 3794527 - RNA, 14 nt, Human
acagaggccugccc

SEQ ID NO: 3794528 - RNA, 16 nt, Human
acagagggaagaaaag

SEQ ID NO: 3794529 - RNA, 18 nt, Human
acagaggggguggccucc

SEQ ID NO: 3794530 - RNA, 19 nt, Human
acagaggggguggccuccc

SEQ ID NO: 3794531 - RNA, 21 nt, Human
acagaggggguggccucccaa

SEQ ID NO: 3794532 - RNA, 22 nt, Human
acagagguauuaaaacuaaauu

SEQ ID NO: 3794533 - RNA, 15 nt, Human
acagaguaagacauu

SEQ ID NO: 3794534 - RNA, 16 nt, Human
acagaguaagacauug

SEQ ID NO: 3794535 - RNA, 19 nt, Human
acagagucucacuguugcc

SEQ ID NO: 3794536 - RNA, 13 nt, Human
acagagucugggu

SEQ ID NO: 3794537 - RNA, 19 nt, Human
acagagugagacucugucu

SEQ ID NO: 3794538 - RNA, 21 nt, Human
acagaguggaauaagacagag

SEQ ID NO: 3794539 - RNA, 21 nt, Human
acagaguggucuuucuggaga

SEQ ID NO: 3794540 - RNA, 16 nt, Human
acagaguugauuuuuu

SEQ ID NO: 3794541 - RNA, 17 nt, Human
acagaguuguuacauuu

SEQ ID NO: 3794542 - RNA, 18 nt, Human
acagaguuguuacauuuu

SEQ ID NO: 3794543 - RNA, 21 nt, Human
acagaguuguuacauuuuuaa

SEQ ID NO: 3794544 - RNA, 22 nt, Human
acagauaaaaaguggaauuucu

SEQ ID NO: 3794545 - RNA, 16 nt, Human
acagauaaaauguaaa

SEQ ID NO: 3794546 - RNA, 17 nt, Human
acagauaaagauugugu

SEQ ID NO: 3794547 - RNA, 20 nt, Human
acagauaagcaagagagaug

SEQ ID NO: 3794548 - RNA, 16 nt, Human
acagauaccuccaacc

SEQ ID NO: 3794549 - RNA, 19 nt, Human
acagauaccuccaacccug

SEQ ID NO: 3794550 - RNA, 21 nt, Human
acagauaccuccaacccugcc

SEQ ID NO: 3794551 - RNA, 22 nt, Human
acagauaccuccaacccugccg

SEQ ID NO: 3794552 - RNA, 20 nt, Human
acagauacuccuccaagguu

SEQ ID NO: 3794553 - RNA, 21 nt, Human
acagauacuggaaguuuugca

SEQ ID NO: 3794554 - RNA, 16 nt, Human
acagauaggccuucuu

SEQ ID NO: 3794555 - RNA, 23 nt, Human
acagauagucaaaccauaaacuu

SEQ ID NO: 3794556 - RNA, 14 nt, Human
acagauauaaaugg

SEQ ID NO: 3794557 - RNA, 18 nt, Human
acagauccccaagccugg

SEQ ID NO: 3794558 - RNA, 18 nt, Human
acagaugccacacaagga

SEQ ID NO: 3794559 - RNA, 14 nt, Human
acagaugccccaga

SEQ ID NO: 3794560 - RNA, 18 nt, Human
acagaugccuccuuccuc

SEQ ID NO: 3794561 - RNA, 19 nt, Human
acagauggaaaaacugagg

SEQ ID NO: 3794562 - RNA, 14 nt, Human
acagauggccagcc

SEQ ID NO: 3794563 - RNA, 20 nt, Human
acagauguaaaagacuuuuu

SEQ ID NO: 3794564 - RNA, 20 nt, Human
acagaugucagccgagccgg

SEQ ID NO: 3794565 - RNA, 21 nt, Human
acagauguccaucagaugaca

SEQ ID NO: 3794566 - RNA, 17 nt, Human
acagaugugcugacaag

SEQ ID NO: 3794567 - RNA, 13 nt, Human
acagauucagucu

SEQ ID NO: 3794568 - RNA, 14 nt, Human
acagauucagucuu

SEQ ID NO: 3794569 - RNA, 17 nt, Human
acagauucagucuugcc

SEQ ID NO: 3794570 - RNA, 15 nt, Human
acagauucuuucagu

SEQ ID NO: 3794571 - RNA, 19 nt, Human
acagauucuuucaguucuu

SEQ ID NO: 3794572 - RNA, 20 nt, Human
acagauucuuucaguucuuu

SEQ ID NO: 3794573 - RNA, 18 nt, Human
acagauugaauuugccua

SEQ ID NO: 3794574 - RNA, 13 nt, Human
acagauuggauuu

SEQ ID NO: 3794575 - RNA, 22 nt, Human
acagauuggauuuuauguugac

SEQ ID NO: 3794576 - RNA, 23 nt, Human
acagauuggauuuuauguugaca

SEQ ID NO: 3794577 - RNA, 15 nt, Human
acagauuguuucuau

SEQ ID NO: 3794578 - RNA, 16 nt, Human
acagauuguuucuaua

SEQ ID NO: 3794579 - RNA, 18 nt, Human
acagauuguuucuauaca

SEQ ID NO: 3794580 - RNA, 15 nt, Human
acagauuguuugcaa

SEQ ID NO: 3794581 - RNA, 20 nt, Human
acagauuuauuccuuuguua

SEQ ID NO: 3794582 - RNA, 15 nt, Human
acagauuugagcuca

SEQ ID NO: 3794583 - RNA, 15 nt, Human
acagauuuggaaaga

SEQ ID NO: 3794584 - RNA, 12 nt, Human
acagauuuguga

SEQ ID NO: 3794585 - RNA, 22 nt, Human
acagauuugugaacucagccaa

SEQ ID NO: 3794586 - RNA, 18 nt, Human
acagauuuuaauugucau

SEQ ID NO: 3794587 - RNA, 20 nt, Human
acagauuuuaauugucaugg

SEQ ID NO: 3794588 - RNA, 17 nt, Human
acagauuuugauagcaa

SEQ ID NO: 3794589 - RNA, 20 nt, Human
acagauuuugauagcaaagc

SEQ ID NO: 3794590 - RNA, 20 nt, Human
acagauuuugggguuguguu

SEQ ID NO: 3794591 - RNA, 20 nt, Human
acagcaaaaccauugcuuca

SEQ ID NO: 3794592 - RNA, 10 nt, Human
acagcaaauu

SEQ ID NO: 3794593 - RNA, 20 nt, Human
acagcaaauuuauaauuuua

SEQ ID NO: 3794594 - RNA, 22 nt, Human
acagcaaauuuauaauuuuaag

SEQ ID NO: 3794595 - RNA, 17 nt, Human
acagcaacaauuuauga

SEQ ID NO: 3794596 - RNA, 20 nt, Human
acagcaacaauuuaugaauu

SEQ ID NO: 3794597 - RNA, 17 nt, Human
acagcaacacaaagcuu

SEQ ID NO: 3794598 - RNA, 20 nt, Human
acagcaacgaucacaaauga

SEQ ID NO: 3794599 - RNA, 20 nt, Human
acagcaaggaggcuggcugg

SEQ ID NO: 3794600 - RNA, 23 nt, Human
acagcaaggaggcuggcuggggc

SEQ ID NO: 3794601 - RNA, 16 nt, Human
acagcaaggcaccugc

SEQ ID NO: 3794602 - RNA, 18 nt, Human
acagcaaggcaccugcag

SEQ ID NO: 3794603 - RNA, 15 nt, Human
acagcaaguagauaa

SEQ ID NO: 3794604 - RNA, 12 nt, Human
acagcaagucag

SEQ ID NO: 3794605 - RNA, 17 nt, Human
acagcaauuccucaggc

SEQ ID NO: 3794606 - RNA, 17 nt, Human
acagcacagcucccugc

SEQ ID NO: 3794607 - RNA, 18 nt, Human
acagcacagcucccugcc

SEQ ID NO: 3794608 - RNA, 12 nt, Human
acagcacaugcu

SEQ ID NO: 3794609 - RNA, 12 nt, Human
acagcacuacuc

SEQ ID NO: 3794610 - RNA, 15 nt, Human
acagcacuacucugu

SEQ ID NO: 3794611 - RNA, 14 nt, Human
acagcacuggggag

SEQ ID NO: 3794612 - RNA, 23 nt, Human
acagcagacucagcucugacauu

SEQ ID NO: 3794613 - RNA, 15 nt, Human
acagcagagguucuu

SEQ ID NO: 3794614 - RNA, 21 nt, Human
acagcagauaacaaugcagca

SEQ ID NO: 3794615 - RNA, 16 nt, Human
acagcagcaagaaaaa

SEQ ID NO: 3794616 - RNA, 19 nt, Human
aaugaauaaugccuuugua

SEQ ID NO: 3794617 - RNA, 20 nt, Human
aaugaauaaugccuuuguaa

SEQ ID NO: 3794618 - RNA, 17 nt, Human
aaugaauaauggaaaau

SEQ ID NO: 3794619 - RNA, 17 nt, Human
aaugaauaguuuuucau

SEQ ID NO: 3794620 - RNA, 19 nt, Human
aaugaauaucuauuaauau

SEQ ID NO: 3794621 - RNA, 19 nt, Human
aaugaauauugaaguuuca

SEQ ID NO: 3794622 - RNA, 18 nt, Human
aaugaauauuuugauaau

SEQ ID NO: 3794623 - RNA, 20 nt, Human
aaugaaucguaaugaaguug

SEQ ID NO: 3794624 - RNA, 13 nt, Human
aaugaaugaaacu

SEQ ID NO: 3794625 - RNA, 14 nt, Human
aaugaaugcuuaaa

SEQ ID NO: 3794626 - RNA, 14 nt, Human
aaugaaugucagug

SEQ ID NO: 3794627 - RNA, 15 nt, Human
aaugaaugucagugu

SEQ ID NO: 3794628 - RNA, 22 nt, Human
aaugaaugucagugugacugau

SEQ ID NO: 3794629 - RNA, 20 nt, Human
aaugaaugugugugguuuuu

SEQ ID NO: 3794630 - RNA, 17 nt, Human
aaugaauuaaauaaacc

SEQ ID NO: 3794631 - RNA, 23 nt, Human
aaugaauuuagugagcauaggug

SEQ ID NO: 3794632 - RNA, 14 nt, Human
aaugacaacagaag

SEQ ID NO: 3794633 - RNA, 16 nt, Human
aaugacaacagaagcu

SEQ ID NO: 3794634 - RNA, 19 nt, Human
aaugacagcaaacagauca

SEQ ID NO: 3794635 - RNA, 22 nt, Human
aaugacaucucaggggccagag

SEQ ID NO: 3794636 - RNA, 13 nt, Human
aaugacaucuuca

SEQ ID NO: 3794637 - RNA, 13 nt, Human
aaugacaugaauu

SEQ ID NO: 3794638 - RNA, 14 nt, Human
aaugacauguguca

SEQ ID NO: 3794639 - RNA, 16 nt, Human
aaugacccaaagacca

SEQ ID NO: 3794640 - RNA, 20 nt, Human
aaugaccuuguaauguaacu

SEQ ID NO: 3794641 - RNA, 15 nt, Human
aaugaccuuucaaua

SEQ ID NO: 3794642 - RNA, 16 nt, Human
aaugaccuuucaauag

SEQ ID NO: 3794643 - RNA, 18 nt, Human
aaugaccuuucaauagga

SEQ ID NO: 3794644 - RNA, 24 nt, Human
aaugacuaaaaauauuauaacuua

SEQ ID NO: 3794645 - RNA, 13 nt, Human
aaugacucuuccc

SEQ ID NO: 3794646 - RNA, 18 nt, Human
aaugacuuacuguacaug

SEQ ID NO: 3794647 - RNA, 19 nt, Human
aaugacuuauuguggauaa

SEQ ID NO: 3794648 - RNA, 22 nt, Human
aaugacuuauuguggauaacaa

SEQ ID NO: 3794649 - RNA, 23 nt, Human
aaugacuuauuguggauaacaaa

SEQ ID NO: 3794650 - RNA, 24 nt, Human
aaugacuuauuguggauaacaaag

SEQ ID NO: 3794651 - RNA, 17 nt, Human
aaugacuuuauuauuua

SEQ ID NO: 3794652 - RNA, 13 nt, Human
acagcaucagggu

SEQ ID NO: 3794653 - RNA, 20 nt, Human
acagcaucauuuugcauuca

SEQ ID NO: 3794654 - RNA, 20 nt, Human
acagcaucuccaagcagcuu

SEQ ID NO: 3794655 - RNA, 17 nt, Human
acagcauggugcaugcc

SEQ ID NO: 3794656 - RNA, 21 nt, Human
acagcauguacggauuuucag

SEQ ID NO: 3794657 - RNA, 15 nt, Human
acagcaugugcccuc

SEQ ID NO: 3794658 - RNA, 16 nt, Human
acagcaugugcccucc

SEQ ID NO: 3794659 - RNA, 23 nt, Human
acagcauucuugucacaauaaau

SEQ ID NO: 3794660 - RNA, 23 nt, Human
acagcauuuguguguuacaaugu

SEQ ID NO: 3794661 - RNA, 17 nt, Human
acagccaacuauggccu

SEQ ID NO: 3794662 - RNA, 19 nt, Human
acagccacacacacagaaa

SEQ ID NO: 3794663 - RNA, 15 nt, Human
acagccacggccagg

SEQ ID NO: 3794664 - RNA, 17 nt, Human
acagccacggccaggcc

SEQ ID NO: 3794665 - RNA, 12 nt, Human
acagccacucag

SEQ ID NO: 3794666 - RNA, 20 nt, Human
acagccacuccccuccacuc

SEQ ID NO: 3794667 - RNA, 15 nt, Human
acagccagacuggca

SEQ ID NO: 3794668 - RNA, 14 nt, Human
acagccagcaagag

SEQ ID NO: 3794669 - RNA, 19 nt, Human
acagccaggugccuuggag

SEQ ID NO: 3794670 - RNA, 18 nt, Human
acagccaucccagccuug

SEQ ID NO: 3794671 - RNA, 15 nt, Human
acagccaugauucuu

SEQ ID NO: 3794672 - RNA, 18 nt, Human
acagcccaaagaaggaaa

SEQ ID NO: 3794673 - RNA, 15 nt, Human
acagcccacugagaa

SEQ ID NO: 3794674 - RNA, 10 nt, Human
acagcccaga

SEQ ID NO: 3794675 - RNA, 16 nt, Human
acagcccagccacgga

SEQ ID NO: 3794676 - RNA, 15 nt, Human
acagcccaggauacu

SEQ ID NO: 3794677 - RNA, 20 nt, Human
acagcccgcaugcagcagcu

SEQ ID NO: 3794678 - RNA, 19 nt, Human
acagcccgggcucugccuc

SEQ ID NO: 3794679 - RNA, 22 nt, Human
acagcccgggcucugccuccca

SEQ ID NO: 3794680 - RNA, 19 nt, Human
acagcccuucuuuccacag

SEQ ID NO: 3794681 - RNA, 21 nt, Human
acagcccuucuuuccacagaa

SEQ ID NO: 3794682 - RNA, 16 nt, Human
acagcccuuuugucuc

SEQ ID NO: 3794683 - RNA, 19 nt, Human
acagccgauucaccugagc

SEQ ID NO: 3794684 - RNA, 13 nt, Human
acagccgcagccu

SEQ ID NO: 3794685 - RNA, 20 nt, Human
acagccgcagccucccucug

SEQ ID NO: 3794686 - RNA, 23 nt, Human
acagccgcagccucccucugacc

SEQ ID NO: 3794687 - RNA, 13 nt, Human
acagccgcuccag

SEQ ID NO: 3794688 - RNA, 15 nt, Human
acagccgcuccagag

SEQ ID NO: 3794689 - RNA, 16 nt, Human
acagccucccaccccc

SEQ ID NO: 3794690 - RNA, 19 nt, Human
acagccuccccugccaggg

SEQ ID NO: 3794691 - RNA, 13 nt, Human
acagccuccucug

SEQ ID NO: 3794692 - RNA, 22 nt, Human
acagccuccucugucugcccuu

SEQ ID NO: 3794693 - RNA, 18 nt, Human
acagccucugaccccucc

SEQ ID NO: 3794694 - RNA, 21 nt, Human
acagccucugaccccuccuca

SEQ ID NO: 3794695 - RNA, 22 nt, Human
acagccucugaccccuccucac

SEQ ID NO: 3794696 - RNA, 13 nt, Human
acagccucuuuuu

SEQ ID NO: 3794697 - RNA, 20 nt, Human
acagccugacaacauuucua

SEQ ID NO: 3794698 - RNA, 15 nt, Human
acagccugcaaguca

SEQ ID NO: 3794699 - RNA, 15 nt, Human
acagccuggcacagg

SEQ ID NO: 3794700 - RNA, 12 nt, Human
acagccugggcc

SEQ ID NO: 3794701 - RNA, 20 nt, Human
acagccuggucgccuuccac

SEQ ID NO: 3794702 - RNA, 21 nt, Human
acagccuguggcggugccugg

SEQ ID NO: 3794703 - RNA, 19 nt, Human
acagcgaaguagcuugcuc

SEQ ID NO: 3794704 - RNA, 18 nt, Human
acagcgagacuccgucuc

SEQ ID NO: 3794705 - RNA, 19 nt, Human
acagcgagaggcagagaaa

SEQ ID NO: 3794706 - RNA, 15 nt, Human
acagcgagggcagcu

SEQ ID NO: 3794707 - RNA, 18 nt, Human
acagcgagggcagcugcu

SEQ ID NO: 3794708 - RNA, 19 nt, Human
acagcgagggcagcugcua

SEQ ID NO: 3794709 - RNA, 12 nt, Human
acagcgcugggu

SEQ ID NO: 3794710 - RNA, 15 nt, Human
acagcggccccugca

SEQ ID NO: 3794711 - RNA, 16 nt, Human
acagcggccccugcau

SEQ ID NO: 3794712 - RNA, 18 nt, Human
acagcuaacacacagcuc

SEQ ID NO: 3794713 - RNA, 20 nt, Human
acagcuaaucagcauucuca

SEQ ID NO: 3794714 - RNA, 15 nt, Human
acagcuaaugggaca

SEQ ID NO: 3794715 - RNA, 19 nt, Human
acagcuaaugggacacuaa

SEQ ID NO: 3794716 - RNA, 18 nt, Human
acagcuacaacagccuca

SEQ ID NO: 3794717 - RNA, 21 nt, Human
acagcuacaacagccucacuu

SEQ ID NO: 3794718 - RNA, 22 nt, Human
acagcuacucuccccacgaggg

SEQ ID NO: 3794719 - RNA, 23 nt, Human
acagcuacucuccccacgagggc

SEQ ID NO: 3794720 - RNA, 14 nt, Human
acagcuaugcaaaa

SEQ ID NO: 3794721 - RNA, 21 nt, Human
acagcuaugggagccccaggg

SEQ ID NO: 3794722 - RNA, 14 nt, Human
acagcucaggaggc

SEQ ID NO: 3794723 - RNA, 21 nt, Human
acagcucaggaucucuuagca

SEQ ID NO: 3794724 - RNA, 16 nt, Human
acagcucauuaaacuu

SEQ ID NO: 3794725 - RNA, 13 nt, Human
acagcucccaccc

SEQ ID NO: 3794726 - RNA, 18 nt, Human
acagcucccaccccaccc

SEQ ID NO: 3794727 - RNA, 12 nt, Human
acagcuccccca

SEQ ID NO: 3794728 - RNA, 16 nt, Human
acagcucccucugccu

SEQ ID NO: 3794729 - RNA, 17 nt, Human
acagcucccucugccug

SEQ ID NO: 3794730 - RNA, 14 nt, Human
acagcucccugcca

SEQ ID NO: 3794731 - RNA, 14 nt, Human
acagcuccucccac

SEQ ID NO: 3794732 - RNA, 13 nt, Human
acagcuccuuggg

SEQ ID NO: 3794733 - RNA, 23 nt, Human
acagcuccuugggaggaagcaga

SEQ ID NO: 3794734 - RNA, 20 nt, Human
acagcuccuuuuccagagca

SEQ ID NO: 3794735 - RNA, 21 nt, Human
acagcuccuuuuccagagcau

SEQ ID NO: 3794736 - RNA, 17 nt, Human
acagcucuguccuggga

SEQ ID NO: 3794737 - RNA, 17 nt, Human
acagcucuguguugcca

SEQ ID NO: 3794738 - RNA, 19 nt, Human
acagcucuguguugccaug

SEQ ID NO: 3794739 - RNA, 16 nt, Human
acagcucuucuccagg

SEQ ID NO: 3794740 - RNA, 18 nt, Human
acagcugagcacauucug

SEQ ID NO: 3794741 - RNA, 23 nt, Human
acagcugagcacccagcucuguc

SEQ ID NO: 3794742 - RNA, 15 nt, Human
acagcugcagagaca

SEQ ID NO: 3794743 - RNA, 17 nt, Human
acagcugcagagacaga

SEQ ID NO: 3794744 - RNA, 21 nt, Human
acagcugcagagacagagagg

SEQ ID NO: 3794745 - RNA, 12 nt, Human
acagcugccugc

SEQ ID NO: 3794746 - RNA, 14 nt, Human
acagcugccuggga

SEQ ID NO: 3794747 - RNA, 15 nt, Human
acagcugccuuagcu

SEQ ID NO: 3794748 - RNA, 19 nt, Human
acagcugccuuagcuucag

SEQ ID NO: 3794749 - RNA, 23 nt, Human
acagcugcuuucuguugucauug

SEQ ID NO: 3794750 - RNA, 14 nt, Human
acagcuggacccug

SEQ ID NO: 3794751 - RNA, 13 nt, Human
acagcuggcucua

SEQ ID NO: 3794752 - RNA, 20 nt, Human
acagcuggcucuacuucccc

SEQ ID NO: 3794753 - RNA, 23 nt, Human
acagcuggggugcagggaugugg

SEQ ID NO: 3794754 - RNA, 19 nt, Human
acagcuggguggcacugcc

SEQ ID NO: 3794755 - RNA, 20 nt, Human
acagcuggugcccugcuuuc

SEQ ID NO: 3794756 - RNA, 11 nt, Human
acagcuggugu

SEQ ID NO: 3794757 - RNA, 22 nt, Human
acagcugguguagcuacagaga

SEQ ID NO: 3794758 - RNA, 23 nt, Human
acagcugguguagcuacagagaa

SEQ ID NO: 3794759 - RNA, 22 nt, Human
acagcuguauagcugcuuccag

SEQ ID NO: 3794760 - RNA, 21 nt, Human
acagauuguuucuauacaaau

SEQ ID NO: 3794761 - RNA, 14 nt, Human
acagauuguuugca

SEQ ID NO: 3794762 - RNA, 20 nt, Human
acagauuuaauacaguuuau

SEQ ID NO: 3794763 - RNA, 15 nt, Human
acagauuugugaacu

SEQ ID NO: 3794764 - RNA, 14 nt, Human
acagauuuuaauug

SEQ ID NO: 3794765 - RNA, 22 nt, Human
acagcaaaaccauugcuucacu

SEQ ID NO: 3794766 - RNA, 18 nt, Human
acagcaaaacuccaucuc

SEQ ID NO: 3794767 - RNA, 13 nt, Human
acagcaaaccaag

SEQ ID NO: 3794768 - RNA, 14 nt, Human
acagcaaaccaaga

SEQ ID NO: 3794769 - RNA, 17 nt, Human
acagcaaaccaagagau

SEQ ID NO: 3794770 - RNA, 21 nt, Human
acagcaaaccaagagauugcu

SEQ ID NO: 3794771 - RNA, 18 nt, Human
acagcaaauuuauaauuu

SEQ ID NO: 3794772 - RNA, 14 nt, Human
acagcaaccccagg

SEQ ID NO: 3794773 - RNA, 21 nt, Human
acagcaacgaucacaaaugac

SEQ ID NO: 3794774 - RNA, 21 nt, Human
acagcaaggagauuuacaacu

SEQ ID NO: 3794775 - RNA, 16 nt, Human
acagcaaggaggcugg

SEQ ID NO: 3794776 - RNA, 21 nt, Human
acagcaaggaggcuggcuggg

SEQ ID NO: 3794777 - RNA, 19 nt, Human
acagcaagucacuggccag

SEQ ID NO: 3794778 - RNA, 15 nt, Human
acagcaagugugaau

SEQ ID NO: 3794779 - RNA, 14 nt, Human
acagcacagagaag

SEQ ID NO: 3794780 - RNA, 22 nt, Human
acagcacagagaagacaaaauu

SEQ ID NO: 3794781 - RNA, 20 nt, Human
acagcacagcucccugccaa

SEQ ID NO: 3794782 - RNA, 15 nt, Human
acagcacaugcuggc

SEQ ID NO: 3794783 - RNA, 18 nt, Human
acagcacaugcuggccag

SEQ ID NO: 3794784 - RNA, 21 nt, Human
acagcacaugcuggccagccu

SEQ ID NO: 3794785 - RNA, 19 nt, Human
acagcacuacuggguguca

SEQ ID NO: 3794786 - RNA, 20 nt, Human
acagcacuacugggugucau

SEQ ID NO: 3794787 - RNA, 21 nt, Human
acagcacuacugggugucauu

SEQ ID NO: 3794788 - RNA, 22 nt, Human
acagcacuggcucucuccagga

SEQ ID NO: 3794789 - RNA, 14 nt, Human
acagcagcaagaaa

SEQ ID NO: 3794790 - RNA, 21 nt, Human
acagcagcaagaaaaaaaaau

SEQ ID NO: 3794791 - RNA, 22 nt, Human
acagcagcauuuuuauuucaga

SEQ ID NO: 3794792 - RNA, 13 nt, Human
acagcagccugcu

SEQ ID NO: 3794793 - RNA, 17 nt, Human
acagcagcucaggcaca

SEQ ID NO: 3794794 - RNA, 16 nt, Human
acagcagcuucaccag

SEQ ID NO: 3794795 - RNA, 12 nt, Human
acagcaggcagc

SEQ ID NO: 3794796 - RNA, 16 nt, Human
acagcaggcagcgcca

SEQ ID NO: 3794797 - RNA, 14 nt, Human
acagcaggcugcca

SEQ ID NO: 3794798 - RNA, 20 nt, Human
acagcaggcugccagugccu

SEQ ID NO: 3794799 - RNA, 11 nt, Human
acagcaggugu

SEQ ID NO: 3794800 - RNA, 14 nt, Human
acagcagugagacu

SEQ ID NO: 3794801 - RNA, 16 nt, Human
acagcagugucaucag

SEQ ID NO: 3794802 - RNA, 15 nt, Human
acagcaguugaaaag

SEQ ID NO: 3794803 - RNA, 21 nt, Human
acagcaguugaaaagacucca

SEQ ID NO: 3794804 - RNA, 21 nt, Human
acagcaucauuuugcauucaa

SEQ ID NO: 3794805 - RNA, 21 nt, Human
acagcauccccaaaacaaagu

SEQ ID NO: 3794806 - RNA, 14 nt, Human
acagcaucuccaag

SEQ ID NO: 3794807 - RNA, 14 nt, Human
acagcaucuguagu

SEQ ID NO: 3794808 - RNA, 23 nt, Human
acagcauggcacucccuccagca

SEQ ID NO: 3794809 - RNA, 18 nt, Human
acagcaugugcccuccug

SEQ ID NO: 3794810 - RNA, 13 nt, Human
acagcauguguau

SEQ ID NO: 3794811 - RNA, 14 nt, Human
acagcauguguuaa

SEQ ID NO: 3794812 - RNA, 19 nt, Human
acagcauucuugucacaau

SEQ ID NO: 3794813 - RNA, 12 nt, Human
acagcauugcuu

SEQ ID NO: 3794814 - RNA, 13 nt, Human
acagcauugcuuu

SEQ ID NO: 3794815 - RNA, 17 nt, Human
acagcauuuguguguua

SEQ ID NO: 3794816 - RNA, 23 nt, Human
acagccaaaugcauggugcaguu

SEQ ID NO: 3794817 - RNA, 20 nt, Human
acagccaacacgcaccugcc

SEQ ID NO: 3794818 - RNA, 21 nt, Human
acagccaacacgcaccugccu

SEQ ID NO: 3794819 - RNA, 21 nt, Human
acagccaacagcuacaacagc

SEQ ID NO: 3794820 - RNA, 23 nt, Human
acagccaacagcuacaacagccu

SEQ ID NO: 3794821 - RNA, 21 nt, Human
acagccaacuagccccugggg

SEQ ID NO: 3794822 - RNA, 19 nt, Human
acagccaacuauggccugu

SEQ ID NO: 3794823 - RNA, 10 nt, Human
acagccacac

SEQ ID NO: 3794824 - RNA, 14 nt, Human
acagccacacacac

SEQ ID NO: 3794825 - RNA, 17 nt, Human
acagccacacacacaga

SEQ ID NO: 3794826 - RNA, 22 nt, Human
acagccacacacacagaaaaua

SEQ ID NO: 3794827 - RNA, 16 nt, Human
acagccacggccaggc

SEQ ID NO: 3794828 - RNA, 16 nt, Human
acagccacuccccggc

SEQ ID NO: 3794829 - RNA, 20 nt, Human
acagccagaacucugugucc

SEQ ID NO: 3794830 - RNA, 13 nt, Human
acagccagacugg

SEQ ID NO: 3794831 - RNA, 13 nt, Human
acagccagcaccu

SEQ ID NO: 3794832 - RNA, 14 nt, Human
acagccagggggau

SEQ ID NO: 3794833 - RNA, 16 nt, Human
acagccaggugccuug

SEQ ID NO: 3794834 - RNA, 17 nt, Human
acagccaggugccuugg

SEQ ID NO: 3794835 - RNA, 20 nt, Human
acagccauaggcccuuucag

SEQ ID NO: 3794836 - RNA, 19 nt, Human
acagcccaaagaaggaaaa

SEQ ID NO: 3794837 - RNA, 20 nt, Human
acagcccaggauacuggcac

SEQ ID NO: 3794838 - RNA, 21 nt, Human
acagcccaggauacuggcaca

SEQ ID NO: 3794839 - RNA, 13 nt, Human
acagcccaggccu

SEQ ID NO: 3794840 - RNA, 16 nt, Human
acagccccagagcagg

SEQ ID NO: 3794841 - RNA, 17 nt, Human
acagccccagagcaggg

SEQ ID NO: 3794842 - RNA, 16 nt, Human
acagccccucccuccu

SEQ ID NO: 3794843 - RNA, 19 nt, Human
acagccccucccuccucug

SEQ ID NO: 3794844 - RNA, 16 nt, Human
acagcccgauccuccc

SEQ ID NO: 3794845 - RNA, 21 nt, Human
acagcccgauccuccccugga

SEQ ID NO: 3794846 - RNA, 23 nt, Human
acagcccgauccuccccuggacu

SEQ ID NO: 3794847 - RNA, 15 nt, Human
acagcccgcaugcag

SEQ ID NO: 3794848 - RNA, 15 nt, Human
acagcccgggcucug

SEQ ID NO: 3794849 - RNA, 16 nt, Human
acagcccgggcucugc

SEQ ID NO: 3794850 - RNA, 17 nt, Human
acagcccgggcucugcc

SEQ ID NO: 3794851 - RNA, 20 nt, Human
acagcccgggcucugccucc

SEQ ID NO: 3794852 - RNA, 17 nt, Human
acagcccuauuucuuga

SEQ ID NO: 3794853 - RNA, 18 nt, Human
acagcccuauuucuugau

SEQ ID NO: 3794854 - RNA, 14 nt, Human
acagcccuccaucu

SEQ ID NO: 3794855 - RNA, 14 nt, Human
acagcccucccgcc

SEQ ID NO: 3794856 - RNA, 12 nt, Human
acagcccuguca

SEQ ID NO: 3794857 - RNA, 20 nt, Human
acagcccuucuuuccacaga

SEQ ID NO: 3794858 - RNA, 22 nt, Human
acagccgaguggauagaugccc

SEQ ID NO: 3794859 - RNA, 18 nt, Human
acagccgcuccugucugc

SEQ ID NO: 3794860 - RNA, 15 nt, Human
acaugcaacccgaag

SEQ ID NO: 3794861 - RNA, 20 nt, Human
acaugcaaggcacuguacua

SEQ ID NO: 3794862 - RNA, 17 nt, Human
acaugcaaggucauuuu

SEQ ID NO: 3794863 - RNA, 21 nt, Human
acaugcaauuuauuaaaauga

SEQ ID NO: 3794864 - RNA, 18 nt, Human
acaugcacaccucccccu

SEQ ID NO: 3794865 - RNA, 15 nt, Human
acaugcacacucaug

SEQ ID NO: 3794866 - RNA, 23 nt, Human
acaugcacagcuaacauggaagu

SEQ ID NO: 3794867 - RNA, 20 nt, Human
acaugcagcccaugcccacc

SEQ ID NO: 3794868 - RNA, 13 nt, Human
acaugcaguuuga

SEQ ID NO: 3794869 - RNA, 19 nt, Human
acaugcaguuugaaauucu

SEQ ID NO: 3794870 - RNA, 14 nt, Human
acaugcauacacac

SEQ ID NO: 3794871 - RNA, 16 nt, Human
acaugcauacacacac

SEQ ID NO: 3794872 - RNA, 24 nt, Human
acaugcauacacacacacacacag

SEQ ID NO: 3794873 - RNA, 16 nt, Human
acaugcauacuucaaa

SEQ ID NO: 3794874 - RNA, 21 nt, Human
acaugcauacuucaaaaguau

SEQ ID NO: 3794875 - RNA, 18 nt, Human
acaugccaagcacugugc

SEQ ID NO: 3794876 - RNA, 14 nt, Human
acaugccacaagga

SEQ ID NO: 3794877 - RNA, 22 nt, Human
acaugccacaucaaaccuuuga

SEQ ID NO: 3794878 - RNA, 18 nt, Human
acaugccauuuguacuga

SEQ ID NO: 3794879 - RNA, 21 nt, Human
acaugccauuuguacugaccc

SEQ ID NO: 3794880 - RNA, 13 nt, Human
acaugcccucccu

SEQ ID NO: 3794881 - RNA, 21 nt, Human
acaugcccucccuucucccug

SEQ ID NO: 3794882 - RNA, 19 nt, Human
acaugccuaccaauauuua

SEQ ID NO: 3794883 - RNA, 17 nt, Human
acaugccucucucaggc

SEQ ID NO: 3794884 - RNA, 21 nt, Human
acaugccugccccaaacaaau

SEQ ID NO: 3794885 - RNA, 14 nt, Human
acaugcgaccccga

SEQ ID NO: 3794886 - RNA, 23 nt, Human
acaugcggagaacaaaugugaag

SEQ ID NO: 3794887 - RNA, 17 nt, Human
acaugcgggcugggcag

SEQ ID NO: 3794888 - RNA, 19 nt, Human
acaugcuaagagaaguaga

SEQ ID NO: 3794889 - RNA, 22 nt, Human
acaugcuacacacugcauguuu

SEQ ID NO: 3794890 - RNA, 21 nt, Human
acaugcuaccugaucccacuc

SEQ ID NO: 3794891 - RNA, 18 nt, Human
acaugcuggacaggucug

SEQ ID NO: 3794892 - RNA, 21 nt, Human
acaugcuggugaauauuuuca

SEQ ID NO: 3794893 - RNA, 19 nt, Human
acaugcuguacauacuuuu

SEQ ID NO: 3794894 - RNA, 19 nt, Human
acaugcuguguaagcugug

SEQ ID NO: 3794895 - RNA, 21 nt, Human
acaugcuguguaagcuguguc

SEQ ID NO: 3794896 - RNA, 13 nt, Human
acaugcuguuauu

SEQ ID NO: 3794897 - RNA, 21 nt, Human
acaugcuuauuccaugacugc

SEQ ID NO: 3794898 - RNA, 21 nt, Human
acaugcuucaugaaaauccua

SEQ ID NO: 3794899 - RNA, 18 nt, Human
acaugcuucccuuuccug

SEQ ID NO: 3794900 - RNA, 19 nt, Human
acaugcuucccuuuccuga

SEQ ID NO: 3794901 - RNA, 14 nt, Human
acauggacuuguau

SEQ ID NO: 3794902 - RNA, 17 nt, Human
acauggagacuccugcc

SEQ ID NO: 3794903 - RNA, 22 nt, Human
acauggagacuccugcccuguu

SEQ ID NO: 3794904 - RNA, 13 nt, Human
aauguguaagaac

SEQ ID NO: 3794905 - RNA, 15 nt, Human
aauguguaauuuugu

SEQ ID NO: 3794906 - RNA, 16 nt, Human
aauguguaauuuuguu

SEQ ID NO: 3794907 - RNA, 19 nt, Human
aauguguaauuuuguucua

SEQ ID NO: 3794908 - RNA, 16 nt, Human
aauguguaguucaugu

SEQ ID NO: 3794909 - RNA, 14 nt, Human
aauguguauaaaca

SEQ ID NO: 3794910 - RNA, 15 nt, Human
aauguguauaaacaa

SEQ ID NO: 3794911 - RNA, 16 nt, Human
aauguguauaaauugu

SEQ ID NO: 3794912 - RNA, 19 nt, Human
aauguguaucggaugcuuu

SEQ ID NO: 3794913 - RNA, 22 nt, Human
aauguguauuacaaauauuuug

SEQ ID NO: 3794914 - RNA, 12 nt, Human
aaugugucuuua

SEQ ID NO: 3794915 - RNA, 13 nt, Human
aaugugugaaaaa

SEQ ID NO: 3794916 - RNA, 18 nt, Human
aaugugugagugcaugua

SEQ ID NO: 3794917 - RNA, 21 nt, Human
aaugugugagugcauguacua

SEQ ID NO: 3794918 - RNA, 19 nt, Human
aaugugugccauagaguuu

SEQ ID NO: 3794919 - RNA, 23 nt, Human
aauguguggauugccucugaaaa

SEQ ID NO: 3794920 - RNA, 15 nt, Human
aauguguguauaugg

SEQ ID NO: 3794921 - RNA, 12 nt, Human
aauguguguaug

SEQ ID NO: 3794922 - RNA, 16 nt, Human
aauguguguaugugug

SEQ ID NO: 3794923 - RNA, 23 nt, Human
aaugugugugaugugacauuugu

SEQ ID NO: 3794924 - RNA, 11 nt, Human
aaugugugugu

SEQ ID NO: 3794925 - RNA, 22 nt, Human
aauguguucucggaguguguau

SEQ ID NO: 3794926 - RNA, 13 nt, Human
aauguguuucaaa

SEQ ID NO: 3794927 - RNA, 14 nt, Human
aauguuaaagaugu

SEQ ID NO: 3794928 - RNA, 15 nt, Human
aauguuaaagaugua

SEQ ID NO: 3794929 - RNA, 18 nt, Human
aauguuaaagggauauuu

SEQ ID NO: 3794930 - RNA, 15 nt, Human
aauguuaaagucagu

SEQ ID NO: 3794931 - RNA, 12 nt, Human
aauguuaaauuu

SEQ ID NO: 3794932 - RNA, 13 nt, Human
aauguuaaauuug

SEQ ID NO: 3794933 - RNA, 18 nt, Human
aauguuaaauuuguaagu

SEQ ID NO: 3794934 - RNA, 19 nt, Human
aauguuaagacuugacagu

SEQ ID NO: 3794935 - RNA, 15 nt, Human
aauguuacagaaucu

SEQ ID NO: 3794936 - RNA, 16 nt, Human
aauguuaccucugaau

SEQ ID NO: 3794937 - RNA, 13 nt, Human
aauguuacugauc

SEQ ID NO: 3794938 - RNA, 18 nt, Human
aauguuacugaucaugca

SEQ ID NO: 3794939 - RNA, 19 nt, Human
aauguuacugaucaugcau

SEQ ID NO: 3794940 - RNA, 15 nt, Human
aauguuacugccuua

SEQ ID NO: 3794941 - RNA, 16 nt, Human
aauguuagagcacagu

SEQ ID NO: 3794942 - RNA, 15 nt, Human
aauguuagauaguua

SEQ ID NO: 3794943 - RNA, 17 nt, Human
aauguuagccucaauuu

SEQ ID NO: 3794944 - RNA, 16 nt, Human
aauguuagucauuguu

SEQ ID NO: 3794945 - RNA, 13 nt, Human
aauguuauaaagu

SEQ ID NO: 3794946 - RNA, 23 nt, Human
aauguuaucuuauacuguacaau

SEQ ID NO: 3794947 - RNA, 22 nt, Human
aauguuauguuguguucuaaua

SEQ ID NO: 3794948 - RNA, 14 nt, Human
aauguuauuuaaca

SEQ ID NO: 3794949 - RNA, 12 nt, Human
aauguuauuucu

SEQ ID NO: 3794950 - RNA, 19 nt, Human
aauguuauuucugcaaaca

SEQ ID NO: 3794951 - RNA, 18 nt, Human
aauguuauuuucuucuaa

SEQ ID NO: 3794952 - RNA, 20 nt, Human
aauguuauuuucuucuaagu

SEQ ID NO: 3794953 - RNA, 18 nt, Human
aauguucacaauauauuu

SEQ ID NO: 3794954 - RNA, 22 nt, Human
aauguucacugguacucugcca

SEQ ID NO: 3794955 - RNA, 19 nt, Human
aauguucauacugaugugu

SEQ ID NO: 3794956 - RNA, 13 nt, Human
aauguucaucaau

SEQ ID NO: 3794957 - RNA, 22 nt, Human
aauguucaucccaugauguagu

SEQ ID NO: 3794958 - RNA, 21 nt, Human
aauguucauuguaauguuacu

SEQ ID NO: 3794959 - RNA, 12 nt, Human
aauguuccagac

SEQ ID NO: 3794960 - RNA, 17 nt, Human
aauguuccagacauucu

SEQ ID NO: 3794961 - RNA, 16 nt, Human
aauguucuaaguuucu

SEQ ID NO: 3794962 - RNA, 17 nt, Human
aauguucuaaguuucua

SEQ ID NO: 3794963 - RNA, 19 nt, Human
aauguucuaaguuucuaag

SEQ ID NO: 3794964 - RNA, 21 nt, Human
aauguucuaaguuucuaagau

SEQ ID NO: 3794965 - RNA, 22 nt, Human
aauguucuaaguuucuaagauu

SEQ ID NO: 3794966 - RNA, 17 nt, Human
aauguucugacauuaac

SEQ ID NO: 3794967 - RNA, 19 nt, Human
aauguucugcuaaauuuca

SEQ ID NO: 3794968 - RNA, 12 nt, Human
aauguucuucca

SEQ ID NO: 3794969 - RNA, 11 nt, Human
aauguucuuug

SEQ ID NO: 3794970 - RNA, 21 nt, Human
aauguucuuuggaaaguacac

SEQ ID NO: 3794971 - RNA, 12 nt, Human
aauguugaaaag

SEQ ID NO: 3794972 - RNA, 22 nt, Human
aauguugaacaaaauaaauugg

SEQ ID NO: 3794973 - RNA, 18 nt, Human
aauguugacaugggacau

SEQ ID NO: 3794974 - RNA, 21 nt, Human
aauguugauuucuaguuauuu

SEQ ID NO: 3794975 - RNA, 23 nt, Human
aauguugauuucuaguuauuuau

SEQ ID NO: 3794976 - RNA, 17 nt, Human
aauguugcugaaaaaug

SEQ ID NO: 3794977 - RNA, 13 nt, Human
aauguugcuggau

SEQ ID NO: 3794978 - RNA, 22 nt, Human
aauguuggauuuauaaaugcua

SEQ ID NO: 3794979 - RNA, 13 nt, Human
aauguugggacug

SEQ ID NO: 3794980 - RNA, 13 nt, Human
aauguugguuuac

SEQ ID NO: 3794981 - RNA, 12 nt, Human
aauguugugaau

SEQ ID NO: 3794982 - RNA, 13 nt, Human
aauguugugaaua

SEQ ID NO: 3794983 - RNA, 18 nt, Human
aauguuguuaugcuauua

SEQ ID NO: 3794984 - RNA, 21 nt, Human
aauguuguucauuauuggagg

SEQ ID NO: 3794985 - RNA, 12 nt, Human
aauguuguuucc

SEQ ID NO: 3794986 - RNA, 22 nt, Human
aauguuguuuccuaauaucaaa

SEQ ID NO: 3794987 - RNA, 23 nt, Human
aauguuguuuccuaauaucaaau

SEQ ID NO: 3794988 - RNA, 17 nt, Human
aauguuuaaaaaaguuu

SEQ ID NO: 3794989 - RNA, 19 nt, Human
aauguuuaaaaaaguuuaa

SEQ ID NO: 3794990 - RNA, 13 nt, Human
aauguuuaaaaca

SEQ ID NO: 3794991 - RNA, 15 nt, Human
aauguuuaaacauuu

SEQ ID NO: 3794992 - RNA, 15 nt, Human
aauguuuaaaccuuu

SEQ ID NO: 3794993 - RNA, 21 nt, Human
aauguuuaagcagaauuggaa

SEQ ID NO: 3794994 - RNA, 20 nt, Human
aauguuuaaucauauaaaua

SEQ ID NO: 3794995 - RNA, 12 nt, Human
aauguuuacaaa

SEQ ID NO: 3794996 - RNA, 20 nt, Human
aauguuuacacucuuuguaa

SEQ ID NO: 3794997 - RNA, 21 nt, Human
aauguuuacagggagccuccu

SEQ ID NO: 3794998 - RNA, 20 nt, Human
aauguuuagcaaauacauau

SEQ ID NO: 3794999 - RNA, 16 nt, Human
aauguuuaugagccag

SEQ ID NO: 3795000 - RNA, 22 nt, Human
aauguuuaugagccagacaaau

SEQ ID NO: 3795001 - RNA, 21 nt, Human
aauguuuaugcaaggaaggaa

SEQ ID NO: 3795002 - RNA, 16 nt, Human
aauguuuauuaaaugc

SEQ ID NO: 3795003 - RNA, 23 nt, Human
aauguuucaaacauauauaacaa

SEQ ID NO: 3795004 - RNA, 20 nt, Human
aauguuuccaaccuggagua

SEQ ID NO: 3795005 - RNA, 13 nt, Human
aauguuuccuuua

SEQ ID NO: 3795006 - RNA, 15 nt, Human
aauguuugccucugc

SEQ ID NO: 3795007 - RNA, 20 nt, Human
aauguuuggcauguaaaugu

SEQ ID NO: 3795008 - RNA, 18 nt, Human
aauguuugucucauccca

SEQ ID NO: 3795009 - RNA, 19 nt, Human
aauguuuuaaauguacaga

SEQ ID NO: 3795010 - RNA, 15 nt, Human
aauguuuuaaauucu

SEQ ID NO: 3795011 - RNA, 16 nt, Human
aauguuuuaacaagaa

SEQ ID NO: 3795012 - RNA, 16 nt, Human
aauguuuucaaaaggu

SEQ ID NO: 3795013 - RNA, 12 nt, Human
aauguuuugaca

SEQ ID NO: 3795014 - RNA, 14 nt, Human
aauguuuuguaaac

SEQ ID NO: 3795015 - RNA, 15 nt, Human
aauguuuuguaaacu

SEQ ID NO: 3795016 - RNA, 17 nt, Human
aauguuuuguaaacuuu

SEQ ID NO: 3795017 - RNA, 19 nt, Human
aauguuuuguaaacuuuga

SEQ ID NO: 3795018 - RNA, 23 nt, Human
aauguuuuguaaacuuugaaaua

SEQ ID NO: 3795019 - RNA, 20 nt, Human
acauuaguaaaugucuuugu

SEQ ID NO: 3795020 - RNA, 22 nt, Human
acauuaguaaaugucuuuguaa

SEQ ID NO: 3795021 - RNA, 22 nt, Human
acauuaguacuuuauagaagaa

SEQ ID NO: 3795022 - RNA, 14 nt, Human
acauuagucucagu

SEQ ID NO: 3795023 - RNA, 15 nt, Human
acauuauaaacgcuu

SEQ ID NO: 3795024 - RNA, 14 nt, Human
acauuauauugcaa

SEQ ID NO: 3795025 - RNA, 15 nt, Human
acauuauauugcaau

SEQ ID NO: 3795026 - RNA, 17 nt, Human
acauuauauugcaauga

SEQ ID NO: 3795027 - RNA, 19 nt, Human
acauuauauugcaaugaag

SEQ ID NO: 3795028 - RNA, 20 nt, Human
acauuauauuucuauuuuau

SEQ ID NO: 3795029 - RNA, 19 nt, Human
acauuaucgggagcagugu

SEQ ID NO: 3795030 - RNA, 21 nt, Human
acauuaucgggagcagugucu

SEQ ID NO: 3795031 - RNA, 20 nt, Human
acauuaucuaacugugcuca

SEQ ID NO: 3795032 - RNA, 22 nt, Human
acauuaugugguuuuagauuuu

SEQ ID NO: 3795033 - RNA, 13 nt, Human
acauuaugugugc

SEQ ID NO: 3795034 - RNA, 15 nt, Human
acauuaugugugcau

SEQ ID NO: 3795035 - RNA, 20 nt, Human
acauuaugugugcaugugug

SEQ ID NO: 3795036 - RNA, 21 nt, Human
acauuaugugugcaugugugu

SEQ ID NO: 3795037 - RNA, 13 nt, Human
acauuauuucuag

SEQ ID NO: 3795038 - RNA, 13 nt, Human
acauuauuugcau

SEQ ID NO: 3795039 - RNA, 19 nt, Human
acauucaaauuugucuggu

SEQ ID NO: 3795040 - RNA, 18 nt, Human
acauucaacagagacuga

SEQ ID NO: 3795041 - RNA, 18 nt, Human
acauucaacccuggagag

SEQ ID NO: 3795042 - RNA, 13 nt, Human
acauucaaggcau

SEQ ID NO: 3795043 - RNA, 15 nt, Human
acauucaauaagcau

SEQ ID NO: 3795044 - RNA, 12 nt, Human
acauucaauguu

SEQ ID NO: 3795045 - RNA, 14 nt, Human
acauucaccugccc

SEQ ID NO: 3795046 - RNA, 16 nt, Human
acauucagaacaccaa

SEQ ID NO: 3795047 - RNA, 15 nt, Human
acauucagcugaggu

SEQ ID NO: 3795048 - RNA, 21 nt, Human
acauucagcugagguucauua

SEQ ID NO: 3795049 - RNA, 17 nt, Human
augaaagacuguacaaa

SEQ ID NO: 3795050 - RNA, 19 nt, Human
augaaagacuguacaaagu

SEQ ID NO: 3795051 - RNA, 18 nt, Human
augaaagauuaaacagau

SEQ ID NO: 3795052 - RNA, 12 nt, Human
augaaagauuca

SEQ ID NO: 3795053 - RNA, 13 nt, Human
augaaagcaacaa

SEQ ID NO: 3795054 - RNA, 20 nt, Human
augaaagcagggaauuucua

SEQ ID NO: 3795055 - RNA, 21 nt, Human
augaaagcagggaauuucuau

SEQ ID NO: 3795056 - RNA, 21 nt, Human
augaaagcugauuacugucaa

SEQ ID NO: 3795057 - RNA, 18 nt, Human
augaaagggcccagagag

SEQ ID NO: 3795058 - RNA, 19 nt, Human
augaaagggcccagagagg

SEQ ID NO: 3795059 - RNA, 15 nt, Human
augaaagguauguag

SEQ ID NO: 3795060 - RNA, 21 nt, Human
augaaagguuuacauugucaa

SEQ ID NO: 3795061 - RNA, 20 nt, Human
augaaagucuugugacuagu

SEQ ID NO: 3795062 - RNA, 20 nt, Human
augaaagugaugacauauuu

SEQ ID NO: 3795063 - RNA, 18 nt, Human
augaaauaacacagcagu

SEQ ID NO: 3795064 - RNA, 20 nt, Human
augaaauaacuccuucuugu

SEQ ID NO: 3795065 - RNA, 22 nt, Human
augaaauaacuccuucuuguag

SEQ ID NO: 3795066 - RNA, 22 nt, Human
augaaauacuguuugagguuuu

SEQ ID NO: 3795067 - RNA, 18 nt, Human
augaaauauauuuaaaau

SEQ ID NO: 3795068 - RNA, 13 nt, Human
augaaauauuaug

SEQ ID NO: 3795069 - RNA, 17 nt, Human
augaaauauuauguuaa

SEQ ID NO: 3795070 - RNA, 18 nt, Human
augaaauauuauguuaaa

SEQ ID NO: 3795071 - RNA, 20 nt, Human
augaaauauuauguuaaaac

SEQ ID NO: 3795072 - RNA, 21 nt, Human
augaaauauuauguuaaaacu

SEQ ID NO: 3795073 - RNA, 13 nt, Human
augaaauauugcu

SEQ ID NO: 3795074 - RNA, 17 nt, Human
augaaauauugcuguau

SEQ ID NO: 3795075 - RNA, 23 nt, Human
augaaaugcuaugucauuucaug

SEQ ID NO: 3795076 - RNA, 12 nt, Human
augaaauguuuu

SEQ ID NO: 3795077 - RNA, 19 nt, Human
augaaauuauauaaguauu

SEQ ID NO: 3795078 - RNA, 13 nt, Human
augaaauuccauu

SEQ ID NO: 3795079 - RNA, 23 nt, Human
augaaauugucuagcagagcagg

SEQ ID NO: 3795080 - RNA, 12 nt, Human
augaaauuuaaa

SEQ ID NO: 3795081 - RNA, 21 nt, Human
augaaauuuaauauagcuauu

SEQ ID NO: 3795082 - RNA, 21 nt, Human
augaaauuuuaccaaguuaua

SEQ ID NO: 3795083 - RNA, 19 nt, Human
augaaauuuucuagacuuu

SEQ ID NO: 3795084 - RNA, 14 nt, Human
augaacaaaauuau

SEQ ID NO: 3795085 - RNA, 15 nt, Human
augaacaaaauuauu

SEQ ID NO: 3795086 - RNA, 21 nt, Human
augaacaaguuuuaauguaua

SEQ ID NO: 3795087 - RNA, 14 nt, Human
augaacacaaauua

SEQ ID NO: 3795088 - RNA, 15 nt, Human
augaacacaaauuau

SEQ ID NO: 3795089 - RNA, 15 nt, Human
augaacacacugugu

SEQ ID NO: 3795090 - RNA, 20 nt, Human
augaacaccauaccuuugcu

SEQ ID NO: 3795091 - RNA, 13 nt, Human
augaacacuuaua

SEQ ID NO: 3795092 - RNA, 16 nt, Human
augaacauacaaaugc

SEQ ID NO: 3795093 - RNA, 21 nt, Human
augaacauagacuagagaaac

SEQ ID NO: 3795094 - RNA, 21 nt, Human
augaacauauuguugaaaggu

SEQ ID NO: 3795095 - RNA, 13 nt, Human
augaacauuccaa

SEQ ID NO: 3795096 - RNA, 22 nt, Human
augaaccacaucuugcucugcu

SEQ ID NO: 3795097 - RNA, 20 nt, Human
augaaccagccggggccuua

SEQ ID NO: 3795098 - RNA, 18 nt, Human
augaacccgaggcugaga

SEQ ID NO: 3795099 - RNA, 13 nt, Human
augaacccuuccu

SEQ ID NO: 3795100 - RNA, 22 nt, Human
augaacccuuccugagcuuuau

SEQ ID NO: 3795101 - RNA, 13 nt, Human
augaaccuggagg

SEQ ID NO: 3795102 - RNA, 24 nt, Human
augaaccuucuggccucccacaga

SEQ ID NO: 3795103 - RNA, 15 nt, Human
augaacggccuugcu

SEQ ID NO: 3795104 - RNA, 15 nt, Human
augaacggugagcau

SEQ ID NO: 3795105 - RNA, 13 nt, Human
augaacuauuccc

SEQ ID NO: 3795106 - RNA, 12 nt, Human
augaacucugaa

SEQ ID NO: 3795107 - RNA, 16 nt, Human
augaacugaaguuuca

SEQ ID NO: 3795108 - RNA, 13 nt, Human
augaacugcaugu

SEQ ID NO: 3795109 - RNA, 12 nt, Human
augaacuuagau

SEQ ID NO: 3795110 - RNA, 19 nt, Human
augaacuuagauuuuacau

SEQ ID NO: 3795111 - RNA, 18 nt, Human
augaacuuauucuguaga

SEQ ID NO: 3795112 - RNA, 15 nt, Human
augaacuugaggaca

SEQ ID NO: 3795113 - RNA, 17 nt, Human
augaacuugaggacaca

SEQ ID NO: 3795114 - RNA, 20 nt, Human
augaacuugaggacacaugu

SEQ ID NO: 3795115 - RNA, 18 nt, Human
augaacuuguaaaggaau

SEQ ID NO: 3795116 - RNA, 17 nt, Human
augaagaaaaaauacau

SEQ ID NO: 3795117 - RNA, 19 nt, Human
augaagaaaaaauacauuu

SEQ ID NO: 3795118 - RNA, 21 nt, Human
augaagaaaagugggccagug

SEQ ID NO: 3795119 - RNA, 13 nt, Human
caagggauggugc

SEQ ID NO: 3795120 - RNA, 21 nt, Human
caagggcagaaugaaucuaug

SEQ ID NO: 3795121 - RNA, 14 nt, Human
caagggccugaugg

SEQ ID NO: 3795122 - RNA, 13 nt, Human
caagggccuggcc

SEQ ID NO: 3795123 - RNA, 18 nt, Human
caagggcggccuuuccca

SEQ ID NO: 3795124 - RNA, 19 nt, Human
caagggcggccuuucccac

SEQ ID NO: 3795125 - RNA, 19 nt, Human
caagggcuucugcacccuc

SEQ ID NO: 3795126 - RNA, 20 nt, Human
caagggcuucugcacccucc

SEQ ID NO: 3795127 - RNA, 21 nt, Human
caagggcuucugcacccucca

SEQ ID NO: 3795128 - RNA, 20 nt, Human
caagggcuuuguuuugcaca

SEQ ID NO: 3795129 - RNA, 16 nt, Human
caaggggaaaaucuca

SEQ ID NO: 3795130 - RNA, 21 nt, Human
caaggggacccauaggaaauc

SEQ ID NO: 3795131 - RNA, 16 nt, Human
caaggggcagucugga

SEQ ID NO: 3795132 - RNA, 17 nt, Human
caaggggcccaaauucu

SEQ ID NO: 3795133 - RNA, 22 nt, Human
caaggggcccuuggagcgugga

SEQ ID NO: 3795134 - RNA, 16 nt, Human
caaggggccugagcag

SEQ ID NO: 3795135 - RNA, 21 nt, Human
caaggggccugagcaguccuu

SEQ ID NO: 3795136 - RNA, 15 nt, Human
caagggggacugucu

SEQ ID NO: 3795137 - RNA, 15 nt, Human
caaggggugccuggg

SEQ ID NO: 3795138 - RNA, 19 nt, Human
caaggguagggugggccuu

SEQ ID NO: 3795139 - RNA, 16 nt, Human
caagggucaggccuuu

SEQ ID NO: 3795140 - RNA, 23 nt, Human
caagggucauuauggguuaggca

SEQ ID NO: 3795141 - RNA, 21 nt, Human
caagggugaugggaaagcauu

SEQ ID NO: 3795142 - RNA, 23 nt, Human
caagggugaugggaaagcauugu

SEQ ID NO: 3795143 - RNA, 21 nt, Human
caaggguggcaucccaguggc

SEQ ID NO: 3795144 - RNA, 16 nt, Human
caaggguuaaggccug

SEQ ID NO: 3795145 - RNA, 19 nt, Human
caaggguucagagacucag

SEQ ID NO: 3795146 - RNA, 20 nt, Human
caaggguucagagacucagg

SEQ ID NO: 3795147 - RNA, 13 nt, Human
caagguaaaauuc

SEQ ID NO: 3795148 - RNA, 13 nt, Human
caagguagaauga

SEQ ID NO: 3795149 - RNA, 16 nt, Human
caagguagccauccca

SEQ ID NO: 3795150 - RNA, 13 nt, Human
caaggucauuuuu

SEQ ID NO: 3795151 - RNA, 21 nt, Human
caagguccucugucagucaca

SEQ ID NO: 3795152 - RNA, 14 nt, Human
caaggucugcuuuu

SEQ ID NO: 3795153 - RNA, 18 nt, Human
caaggucuggccucaggu

SEQ ID NO: 3795154 - RNA, 16 nt, Human
caaggucuucagccau

SEQ ID NO: 3795155 - RNA, 13 nt, Human
caaggucuugcuc

SEQ ID NO: 3795156 - RNA, 15 nt, Human
caaggucuugcucuc

SEQ ID NO: 3795157 - RNA, 23 nt, Human
caaggugaagaugggaacgcaga

SEQ ID NO: 3795158 - RNA, 13 nt, Human
caaggugacagaa

SEQ ID NO: 3795159 - RNA, 15 nt, Human
caaggugcaggcagg

SEQ ID NO: 3795160 - RNA, 17 nt, Human
caaggugcuguugucau

SEQ ID NO: 3795161 - RNA, 15 nt, Human
caagguggaguggau

SEQ ID NO: 3795162 - RNA, 17 nt, Human
caagguggccaaauuau

SEQ ID NO: 3795163 - RNA, 12 nt, Human
caaggugggagg

SEQ ID NO: 3795164 - RNA, 17 nt, Human
caaggugggcugagccc

SEQ ID NO: 3795165 - RNA, 18 nt, Human
caaggugggcugagcccu

SEQ ID NO: 3795166 - RNA, 20 nt, Human
caaggugggcugagcccugg

SEQ ID NO: 3795167 - RNA, 23 nt, Human
caaggugggcugagcccuggcag

SEQ ID NO: 3795168 - RNA, 17 nt, Human
caagguguccuacagaa

SEQ ID NO: 3795169 - RNA, 16 nt, Human
caagguucccucugag

SEQ ID NO: 3795170 - RNA, 18 nt, Human
caagguucccucugagaa

SEQ ID NO: 3795171 - RNA, 13 nt, Human
caagguucuaacc

SEQ ID NO: 3795172 - RNA, 21 nt, Human
caagguucugggugcaggagc

SEQ ID NO: 3795173 - RNA, 17 nt, Human
caagguuggagcccagg

SEQ ID NO: 3795174 - RNA, 18 nt, Human
caagguuuaaagagucua

SEQ ID NO: 3795175 - RNA, 22 nt, Human
caagguuuaggcugguggccca

SEQ ID NO: 3795176 - RNA, 18 nt, Human
caagguuuuagguucuaa

SEQ ID NO: 3795177 - RNA, 23 nt, Human
caagguuuuagguucuaaaguuc

SEQ ID NO: 3795178 - RNA, 23 nt, Human
caaguaaauagcaacaugcuuca

SEQ ID NO: 3795179 - RNA, 13 nt, Human
caaguaagaagac

SEQ ID NO: 3795180 - RNA, 16 nt, Human
caaguaagaagacaug

SEQ ID NO: 3795181 - RNA, 18 nt, Human
caaguaagaagacaugaa

SEQ ID NO: 3795182 - RNA, 16 nt, Human
caaguaagaggcugga

SEQ ID NO: 3795183 - RNA, 23 nt, Human
caaguaauugugaaaaaguuaaa

SEQ ID NO: 3795184 - RNA, 14 nt, Human
caaguaauuucagu

SEQ ID NO: 3795185 - RNA, 20 nt, Human
caaguacauggcuagcuuuu

SEQ ID NO: 3795186 - RNA, 13 nt, Human
caaguagauaaau

SEQ ID NO: 3795187 - RNA, 16 nt, Human
caaguagcauuuacug

SEQ ID NO: 3795188 - RNA, 17 nt, Human
caaguagcauuuacugu

SEQ ID NO: 3795189 - RNA, 21 nt, Human
caaguagcugggauuuuaaac

SEQ ID NO: 3795190 - RNA, 13 nt, Human
caaguaguucugu

SEQ ID NO: 3795191 - RNA, 17 nt, Human
caaguaguucuguauuu

SEQ ID NO: 3795192 - RNA, 20 nt, Human
caaguaguucuguauuugaa

SEQ ID NO: 3795193 - RNA, 18 nt, Human
cacaccaggcgcuaauuc

SEQ ID NO: 3795194 - RNA, 19 nt, Human
cacaccaggcugugggccu

SEQ ID NO: 3795195 - RNA, 21 nt, Human
cacaccaggcugugggccuca

SEQ ID NO: 3795196 - RNA, 15 nt, Human
cacaccagggccagc

SEQ ID NO: 3795197 - RNA, 15 nt, Human
cacacccaaagcuga

SEQ ID NO: 3795198 - RNA, 14 nt, Human
cacacccagcccac

SEQ ID NO: 3795199 - RNA, 20 nt, Human
cacacccagcccacuucugc

SEQ ID NO: 3795200 - RNA, 13 nt, Human
cacaccccaccug

SEQ ID NO: 3795201 - RNA, 17 nt, Human
cacaccccaccugcgcu

SEQ ID NO: 3795202 - RNA, 23 nt, Human
cacacccccaccccuugcucuca

SEQ ID NO: 3795203 - RNA, 17 nt, Human
cacacccgcgccccgcg

SEQ ID NO: 3795204 - RNA, 19 nt, Human
cacacccucacucugccag

SEQ ID NO: 3795205 - RNA, 18 nt, Human
cacacccucucccaggac

SEQ ID NO: 3795206 - RNA, 13 nt, Human
cacacccugaggu

SEQ ID NO: 3795207 - RNA, 13 nt, Human
cacacccugcaag

SEQ ID NO: 3795208 - RNA, 15 nt, Human
cacacccugcaaggc

SEQ ID NO: 3795209 - RNA, 20 nt, Human
cacaccguguaaaccaaagc

SEQ ID NO: 3795210 - RNA, 22 nt, Human
cacaccuacuagucaccagaga

SEQ ID NO: 3795211 - RNA, 14 nt, Human
cacaccuagcguca

SEQ ID NO: 3795212 - RNA, 18 nt, Human
cacaccucacucuuuaua

SEQ ID NO: 3795213 - RNA, 15 nt, Human
cacaccucagaggcu

SEQ ID NO: 3795214 - RNA, 18 nt, Human
cacaccucaguucccuug

SEQ ID NO: 3795215 - RNA, 12 nt, Human
cacaccuccaca

SEQ ID NO: 3795216 - RNA, 12 nt, Human
cacaccuccucc

SEQ ID NO: 3795217 - RNA, 14 nt, Human
cacaccuccuccca

SEQ ID NO: 3795218 - RNA, 19 nt, Human
cacaccuccuucccucucu

SEQ ID NO: 3795219 - RNA, 22 nt, Human
cacaccuccuucccucucugga

SEQ ID NO: 3795220 - RNA, 14 nt, Human
cacaccucugccag

SEQ ID NO: 3795221 - RNA, 11 nt, Human
cacaccugagc

SEQ ID NO: 3795222 - RNA, 17 nt, Human
cacaccugagccagccu

SEQ ID NO: 3795223 - RNA, 18 nt, Human
cacaccugcagccucccu

SEQ ID NO: 3795224 - RNA, 15 nt, Human
cacaccugcccuaaa

SEQ ID NO: 3795225 - RNA, 14 nt, Human
cacaccuggcccug

SEQ ID NO: 3795226 - RNA, 19 nt, Human
cacaccuggcccuggggcc

SEQ ID NO: 3795227 - RNA, 22 nt, Human
cacaccuguaaucccagcacuu

SEQ ID NO: 3795228 - RNA, 20 nt, Human
cacaccuguagucccagcua

SEQ ID NO: 3795229 - RNA, 14 nt, Human
cacacgcacacaca

SEQ ID NO: 3795230 - RNA, 14 nt, Human
cacacgcacgcaca

SEQ ID NO: 3795231 - RNA, 17 nt, Human
cacacgcacgcacacac

SEQ ID NO: 3795232 - RNA, 19 nt, Human
cacacgcacgcacacacac

SEQ ID NO: 3795233 - RNA, 19 nt, Human
cacacgcaggaacucccag

SEQ ID NO: 3795234 - RNA, 22 nt, Human
cacacgcaggaacucccagcaa

SEQ ID NO: 3795235 - RNA, 21 nt, Human
cacacgccccaauuuucaggu

SEQ ID NO: 3795236 - RNA, 14 nt, Human
cacacgcgcgcaca

SEQ ID NO: 3795237 - RNA, 19 nt, Human
cacacgcgcgcgcacacac

SEQ ID NO: 3795238 - RNA, 12 nt, Human
cacacgcugccu

SEQ ID NO: 3795239 - RNA, 13 nt, Human
cacacgcugccuu

SEQ ID NO: 3795240 - RNA, 13 nt, Human
cacacgcugcucu

SEQ ID NO: 3795241 - RNA, 19 nt, Human
cacacgcugcucugcccca

SEQ ID NO: 3795242 - RNA, 20 nt, Human
cacacgguuugaagccugga

SEQ ID NO: 3795243 - RNA, 17 nt, Human
cacacguacuuaaauga

SEQ ID NO: 3795244 - RNA, 19 nt, Human
cacacgucauguuucuuca

SEQ ID NO: 3795245 - RNA, 18 nt, Human
cacacuaccgaauguguc

SEQ ID NO: 3795246 - RNA, 21 nt, Human
cacacuaccgaaugugucuuu

SEQ ID NO: 3795247 - RNA, 19 nt, Human
cacacuagccucuccagga

SEQ ID NO: 3795248 - RNA, 17 nt, Human
cacacuauuaccaugag

SEQ ID NO: 3795249 - RNA, 17 nt, Human
cacacucacuccugaga

SEQ ID NO: 3795250 - RNA, 19 nt, Human
cacacucacuccugagacc

SEQ ID NO: 3795251 - RNA, 12 nt, Human
cacacucacugc

SEQ ID NO: 3795252 - RNA, 19 nt, Human
cacacucagauccuccuca

SEQ ID NO: 3795253 - RNA, 13 nt, Human
cacacucagugca

SEQ ID NO: 3795254 - RNA, 14 nt, Human
cacacucauccccu

SEQ ID NO: 3795255 - RNA, 19 nt, Human
cacacucaugcauuguccu

SEQ ID NO: 3795256 - RNA, 20 nt, Human
cacacucaugcauuguccuc

SEQ ID NO: 3795257 - RNA, 16 nt, Human
cacacuccaagauaug

SEQ ID NO: 3795258 - RNA, 21 nt, Human
cacacucccaagguuggagcc

SEQ ID NO: 3795259 - RNA, 23 nt, Human
cacacucccaagguuggagccca

SEQ ID NO: 3795260 - RNA, 12 nt, Human
cacacucugacg

SEQ ID NO: 3795261 - RNA, 14 nt, Human
cacacugaggcagg

SEQ ID NO: 3795262 - RNA, 15 nt, Human
cacacugaggcaggg

SEQ ID NO: 3795263 - RNA, 14 nt, Human
cacacugcaacagg

SEQ ID NO: 3795264 - RNA, 16 nt, Human
cacacugcaagagccu

SEQ ID NO: 3795265 - RNA, 18 nt, Human
cacacugguacuuagagu

SEQ ID NO: 3795266 - RNA, 14 nt, Human
cacacugguucuca

SEQ ID NO: 3795267 - RNA, 22 nt, Human
cacacugugacacacuacacca

SEQ ID NO: 3795268 - RNA, 16 nt, Human
cacacugugcuuucua

SEQ ID NO: 3795269 - RNA, 23 nt, Human
cacacuguguccuggugcucucu

SEQ ID NO: 3795270 - RNA, 24 nt, Human
cacacuguguccuggugcucucug

SEQ ID NO: 3795271 - RNA, 22 nt, Human
cacacuuacuguaagacauuag

SEQ ID NO: 3795272 - RNA, 13 nt, Human
cacacuucaaacu

SEQ ID NO: 3795273 - RNA, 18 nt, Human
cacacuucaaacuacuuu

SEQ ID NO: 3795274 - RNA, 16 nt, Human
caaguggggcucgcca

SEQ ID NO: 3795275 - RNA, 21 nt, Human
caaguggggcucgccaugccg

SEQ ID NO: 3795276 - RNA, 14 nt, Human
caagugggggcaga

SEQ ID NO: 3795277 - RNA, 20 nt, Human
caagugggggcagagggcag

SEQ ID NO: 3795278 - RNA, 19 nt, Human
caaguggggugcugggagg

SEQ ID NO: 3795279 - RNA, 18 nt, Human
caaguggugguaacccug

SEQ ID NO: 3795280 - RNA, 19 nt, Human
caaguggugguaacccugg

SEQ ID NO: 3795281 - RNA, 15 nt, Human
caaguguaaaauauu

SEQ ID NO: 3795282 - RNA, 16 nt, Human
caaguguaaaauauuu

SEQ ID NO: 3795283 - RNA, 19 nt, Human
caaguguaaugaauaccuu

SEQ ID NO: 3795284 - RNA, 14 nt, Human
caaguguauaucag

SEQ ID NO: 3795285 - RNA, 16 nt, Human
caaguguauaucagaa

SEQ ID NO: 3795286 - RNA, 13 nt, Human
caagugucuucca

SEQ ID NO: 3795287 - RNA, 15 nt, Human
caagugugaauacug

SEQ ID NO: 3795288 - RNA, 19 nt, Human
caagugugcuuuagcuuga

SEQ ID NO: 3795289 - RNA, 11 nt, Human
caagugugugc

SEQ ID NO: 3795290 - RNA, 14 nt, Human
caagugugugcaca

SEQ ID NO: 3795291 - RNA, 17 nt, Human
caagugugugcaugugu

SEQ ID NO: 3795292 - RNA, 14 nt, Human
caaguuaaauguag

SEQ ID NO: 3795293 - RNA, 13 nt, Human
caaguuaagagaa

SEQ ID NO: 3795294 - RNA, 21 nt, Human
caaguuaagagaaacuuuaua

SEQ ID NO: 3795295 - RNA, 22 nt, Human
caaguuaagagaaacuuuauac

SEQ ID NO: 3795296 - RNA, 16 nt, Human
caaguuagcucaggag

SEQ ID NO: 3795297 - RNA, 16 nt, Human
caaguuauaaaucaau

SEQ ID NO: 3795298 - RNA, 20 nt, Human
caaguuauaaaucaauguca

SEQ ID NO: 3795299 - RNA, 19 nt, Human
caaguuauauaaagagaaa

SEQ ID NO: 3795300 - RNA, 21 nt, Human
caaguuauauaaagagaaaau

SEQ ID NO: 3795301 - RNA, 13 nt, Human
caaguuauuaauu

SEQ ID NO: 3795302 - RNA, 12 nt, Human
caaguuauugua

SEQ ID NO: 3795303 - RNA, 20 nt, Human
caaguuauuuuuaauuuggu

SEQ ID NO: 3795304 - RNA, 12 nt, Human
caaguucaagga

SEQ ID NO: 3795305 - RNA, 14 nt, Human
caaguucaaggacc

SEQ ID NO: 3795306 - RNA, 21 nt, Human
caaguuccuuggccaugcaga

SEQ ID NO: 3795307 - RNA, 16 nt, Human
caaguucgucuguugu

SEQ ID NO: 3795308 - RNA, 13 nt, Human
caaguucuagaga

SEQ ID NO: 3795309 - RNA, 19 nt, Human
caaguucuagagaagaggc

SEQ ID NO: 3795310 - RNA, 19 nt, Human
caaguugaggacuucuugc

SEQ ID NO: 3795311 - RNA, 13 nt, Human
caaguuggaguca

SEQ ID NO: 3795312 - RNA, 12 nt, Human
caaguuguaaau

SEQ ID NO: 3795313 - RNA, 18 nt, Human
caaguugugccaaauuau

SEQ ID NO: 3795314 - RNA, 21 nt, Human
caaguuguggugcugacaaag

SEQ ID NO: 3795315 - RNA, 17 nt, Human
caaguuguucaaacauu

SEQ ID NO: 3795316 - RNA, 21 nt, Human
caaguuguuccuuaagucaga

SEQ ID NO: 3795317 - RNA, 17 nt, Human
caaguuguuugagaaau

SEQ ID NO: 3795318 - RNA, 23 nt, Human
caaguuguuugagaaauuaagua

SEQ ID NO: 3795319 - RNA, 15 nt, Human
caaguuuauauauau

SEQ ID NO: 3795320 - RNA, 20 nt, Human
caaguuuaucaguaaauaac

SEQ ID NO: 3795321 - RNA, 18 nt, Human
caaguuuccaagcaaaug

SEQ ID NO: 3795322 - RNA, 23 nt, Human
caaguuucuagcuagaaauauga

SEQ ID NO: 3795323 - RNA, 12 nt, Human
caaguuugaauu

SEQ ID NO: 3795324 - RNA, 13 nt, Human
caaguuuugugaa

SEQ ID NO: 3795325 - RNA, 14 nt, Human
caaguuuugugaaa

SEQ ID NO: 3795326 - RNA, 18 nt, Human
caaguuuugugaaauuuu

SEQ ID NO: 3795327 - RNA, 19 nt, Human
caaguuuugugaaauuuuu

SEQ ID NO: 3795328 - RNA, 16 nt, Human
caauaaaaaaaagaaa

SEQ ID NO: 3795329 - RNA, 21 nt, Human
caauaaaaaaaagaaaugaaa

SEQ ID NO: 3795330 - RNA, 13 nt, Human
caauaaaaaauua

SEQ ID NO: 3795331 - RNA, 16 nt, Human
caauaaaaaauuauga

SEQ ID NO: 3795332 - RNA, 14 nt, Human
caauaaaaaucaua

SEQ ID NO: 3795333 - RNA, 17 nt, Human
caauaaaaauggcucag

SEQ ID NO: 3795334 - RNA, 13 nt, Human
caauaaaaauguu

SEQ ID NO: 3795335 - RNA, 12 nt, Human
caauaaaagcuu

SEQ ID NO: 3795336 - RNA, 20 nt, Human
caauaaaaucauguacauuu

SEQ ID NO: 3795337 - RNA, 15 nt, Human
caauaaaauggguuu

SEQ ID NO: 3795338 - RNA, 15 nt, Human
caauaaaaugugauu

SEQ ID NO: 3795339 - RNA, 16 nt, Human
cacagagucaaggccu

SEQ ID NO: 3795340 - RNA, 18 nt, Human
cacagagucaaggccugc

SEQ ID NO: 3795341 - RNA, 21 nt, Human
cacagaguuguuacauuuuua

SEQ ID NO: 3795342 - RNA, 19 nt, Human
cacagauaacugaaaauua

SEQ ID NO: 3795343 - RNA, 22 nt, Human
cacagauaacugaaaauuauuu

SEQ ID NO: 3795344 - RNA, 17 nt, Human
cacagauauacuuugug

SEQ ID NO: 3795345 - RNA, 20 nt, Human
cacagauauacuuuguggac

SEQ ID NO: 3795346 - RNA, 16 nt, Human
cacagaugcuccaggg

SEQ ID NO: 3795347 - RNA, 12 nt, Human
cacagauggauu

SEQ ID NO: 3795348 - RNA, 20 nt, Human
cacagauggauuugccugug

SEQ ID NO: 3795349 - RNA, 23 nt, Human
cacagauggauuugccugugcca

SEQ ID NO: 3795350 - RNA, 21 nt, Human
cacagauuguuucuauacaaa

SEQ ID NO: 3795351 - RNA, 12 nt, Human
cacagauuuuaa

SEQ ID NO: 3795352 - RNA, 21 nt, Human
cacagauuuuaauugucaugg

SEQ ID NO: 3795353 - RNA, 17 nt, Human
cacagcaaacugucccc

SEQ ID NO: 3795354 - RNA, 14 nt, Human
cacagcaaccccag

SEQ ID NO: 3795355 - RNA, 21 nt, Human
cacagcaacgaucacaaauga

SEQ ID NO: 3795356 - RNA, 18 nt, Human
cacagcaaggaggcuggc

SEQ ID NO: 3795357 - RNA, 21 nt, Human
cacagcaaggaggcuggcugg

SEQ ID NO: 3795358 - RNA, 23 nt, Human
cacagcacaaauuaguuauauau

SEQ ID NO: 3795359 - RNA, 12 nt, Human
cacagcacagcc

SEQ ID NO: 3795360 - RNA, 13 nt, Human
cacagcacaugcu

SEQ ID NO: 3795361 - RNA, 21 nt, Human
cacagcacaugcuggccagcc

SEQ ID NO: 3795362 - RNA, 20 nt, Human
cacagcacgggggccaagga

SEQ ID NO: 3795363 - RNA, 18 nt, Human
cacagcagcaucuucaaa

SEQ ID NO: 3795364 - RNA, 14 nt, Human
cacagcagccugcu

SEQ ID NO: 3795365 - RNA, 19 nt, Human
cacagcagccugcuuccca

SEQ ID NO: 3795366 - RNA, 14 nt, Human
cacagcagccuggg

SEQ ID NO: 3795367 - RNA, 16 nt, Human
cacagcagcugaacag

SEQ ID NO: 3795368 - RNA, 23 nt, Human
cacagcagcuuauaaugggcucu

SEQ ID NO: 3795369 - RNA, 16 nt, Human
cacagcaggcugccag

SEQ ID NO: 3795370 - RNA, 19 nt, Human
cacagcaggcugccagugc

SEQ ID NO: 3795371 - RNA, 22 nt, Human
cacagcaguugaaaagacucca

SEQ ID NO: 3795372 - RNA, 20 nt, Human
cacagcaucauuuugcauuc

SEQ ID NO: 3795373 - RNA, 13 nt, Human
cacagcaucugua

SEQ ID NO: 3795374 - RNA, 16 nt, Human
cacagccaaauuuaaa

SEQ ID NO: 3795375 - RNA, 18 nt, Human
cacagccacacacacaga

SEQ ID NO: 3795376 - RNA, 22 nt, Human
cacagccacacacacagaaaau

SEQ ID NO: 3795377 - RNA, 13 nt, Human
cacagccaccccu

SEQ ID NO: 3795378 - RNA, 16 nt, Human
cacagccagaaccccg

SEQ ID NO: 3795379 - RNA, 17 nt, Human
cacagccagacuggcac

SEQ ID NO: 3795380 - RNA, 17 nt, Human
cacagccagcaccuggc

SEQ ID NO: 3795381 - RNA, 15 nt, Human
cacagccaggugccu

SEQ ID NO: 3795382 - RNA, 17 nt, Human
cacagccaggugccuug

SEQ ID NO: 3795383 - RNA, 13 nt, Human
cacagccauccca

SEQ ID NO: 3795384 - RNA, 16 nt, Human
cacagccaucccagcc

SEQ ID NO: 3795385 - RNA, 20 nt, Human
cacagcccacguccugucag

SEQ ID NO: 3795386 - RNA, 14 nt, Human
cacagcccaggccu

SEQ ID NO: 3795387 - RNA, 16 nt, Human
cacagcccaggccucc

SEQ ID NO: 3795388 - RNA, 21 nt, Human
cacagcccaggccuccagcuc

SEQ ID NO: 3795389 - RNA, 22 nt, Human
cacagcccaggccuccagcuca

SEQ ID NO: 3795390 - RNA, 17 nt, Human
cacagcccgcaugcagc

SEQ ID NO: 3795391 - RNA, 23 nt, Human
cacagcccgcaugcagcagcuug

SEQ ID NO: 3795392 - RNA, 14 nt, Human
cacagcccucccgc

SEQ ID NO: 3795393 - RNA, 18 nt, Human
cacagcccugucagcaug

SEQ ID NO: 3795394 - RNA, 22 nt, Human
cacagcccugucagcaugaauu

SEQ ID NO: 3795395 - RNA, 23 nt, Human
cacagcccugucagcaugaauuu

SEQ ID NO: 3795396 - RNA, 14 nt, Human
cacagcccuuuugu

SEQ ID NO: 3795397 - RNA, 22 nt, Human
cacagccgcagccucccucuga

SEQ ID NO: 3795398 - RNA, 18 nt, Human
cacagccggggccugccu

SEQ ID NO: 3795399 - RNA, 19 nt, Human
cacagccuccccugccagg

SEQ ID NO: 3795400 - RNA, 11 nt, Human
cacagccucug

SEQ ID NO: 3795401 - RNA, 23 nt, Human
cacagccucugaccccuccucac

SEQ ID NO: 3795402 - RNA, 12 nt, Human
cacagccugggc

SEQ ID NO: 3795403 - RNA, 18 nt, Human
cacagccuucuccacugg

SEQ ID NO: 3795404 - RNA, 17 nt, Human
cacagcgagacuccguc

SEQ ID NO: 3795405 - RNA, 17 nt, Human
cacagcgagggcagcug

SEQ ID NO: 3795406 - RNA, 16 nt, Human
cacagcgccagccuca

SEQ ID NO: 3795407 - RNA, 21 nt, Human
cacagcggagguguggagccg

SEQ ID NO: 3795408 - RNA, 16 nt, Human
cacagcgucccuggcg

SEQ ID NO: 3795409 - RNA, 21 nt, Human
cacagcuaacaauugugaagu

SEQ ID NO: 3795410 - RNA, 15 nt, Human
cacagcuaccucuuc

SEQ ID NO: 3795411 - RNA, 16 nt, Human
cacagcuacucucccc

SEQ ID NO: 3795412 - RNA, 13 nt, Human
cacagcucaggag

SEQ ID NO: 3795413 - RNA, 17 nt, Human
cacagcucccuucuguu

SEQ ID NO: 3795414 - RNA, 10 nt, Human
cacagcuccu

SEQ ID NO: 3795415 - RNA, 21 nt, Human
cacagcuccuuuuccagagca

SEQ ID NO: 3795416 - RNA, 22 nt, Human
cacagcuccuuuuccagagcau

SEQ ID NO: 3795417 - RNA, 11 nt, Human
cacagcucugu

SEQ ID NO: 3795418 - RNA, 15 nt, Human
cacagcucuguccug

SEQ ID NO: 3795419 - RNA, 18 nt, Human
cacagcucuguccuggga

SEQ ID NO: 3795420 - RNA, 14 nt, Human
cacagcucuguguu

SEQ ID NO: 3795421 - RNA, 19 nt, Human
cacagcucuucuccaggcu

SEQ ID NO: 3795422 - RNA, 19 nt, Human
cacagcugagagacuuuua

SEQ ID NO: 3795423 - RNA, 19 nt, Human
cacagcugcagagacagag

SEQ ID NO: 3795424 - RNA, 22 nt, Human
cacagcugccucuucccucuuc

SEQ ID NO: 3795425 - RNA, 12 nt, Human
cacagcugcuca

SEQ ID NO: 3795426 - RNA, 22 nt, Human
cacagcugcucaauaaaguaca

SEQ ID NO: 3795427 - RNA, 17 nt, Human
cacagcuguauagcugc

SEQ ID NO: 3795428 - RNA, 20 nt, Human
cacagcuguauagcugcuuc

SEQ ID NO: 3795429 - RNA, 22 nt, Human
caauauagaaaaauaaaaaucu

SEQ ID NO: 3795430 - RNA, 19 nt, Human
caauauagaaacacgaacu

SEQ ID NO: 3795431 - RNA, 21 nt, Human
caauauauaaaaauauauaua

SEQ ID NO: 3795432 - RNA, 19 nt, Human
caauauaucuaaauugaau

SEQ ID NO: 3795433 - RNA, 21 nt, Human
caauauaucuaaauugaauaa

SEQ ID NO: 3795434 - RNA, 16 nt, Human
caauauauuaccagca

SEQ ID NO: 3795435 - RNA, 16 nt, Human
caauauauuuuguaug

SEQ ID NO: 3795436 - RNA, 14 nt, Human
caauaucagacuuu

SEQ ID NO: 3795437 - RNA, 20 nt, Human
caauaucaguuauuuuuuga

SEQ ID NO: 3795438 - RNA, 12 nt, Human
caauauccuaau

SEQ ID NO: 3795439 - RNA, 15 nt, Human
caauauccuaauaaa

SEQ ID NO: 3795440 - RNA, 19 nt, Human
caauauccuaauaaaaagg

SEQ ID NO: 3795441 - RNA, 14 nt, Human
caauauccucgcuc

SEQ ID NO: 3795442 - RNA, 23 nt, Human
caauaucugaagcccucccaggu

SEQ ID NO: 3795443 - RNA, 21 nt, Human
caauauguauuguaaacaugu

SEQ ID NO: 3795444 - RNA, 23 nt, Human
caauauguauuguaaacaugugu

SEQ ID NO: 3795445 - RNA, 22 nt, Human
caauaugugagugccuuuugca

SEQ ID NO: 3795446 - RNA, 12 nt, Human
caauauuaaaua

SEQ ID NO: 3795447 - RNA, 20 nt, Human
caauauuaaauacagacacu

SEQ ID NO: 3795448 - RNA, 15 nt, Human
caauauuaaaucugc

SEQ ID NO: 3795449 - RNA, 24 nt, Human
caauauuaaccuaaucaccaugua

SEQ ID NO: 3795450 - RNA, 14 nt, Human
caauauuauaauuu

SEQ ID NO: 3795451 - RNA, 18 nt, Human
caauauuauacuaagaaa

SEQ ID NO: 3795452 - RNA, 13 nt, Human
caauauucaaaug

SEQ ID NO: 3795453 - RNA, 15 nt, Human
caauauucaaaugcg

SEQ ID NO: 3795454 - RNA, 15 nt, Human
caauauucaauaaag

SEQ ID NO: 3795455 - RNA, 16 nt, Human
caauauucaauaaagc

SEQ ID NO: 3795456 - RNA, 21 nt, Human
caauauuccugaaugaaauau

SEQ ID NO: 3795457 - RNA, 14 nt, Human
caauauuccuuagu

SEQ ID NO: 3795458 - RNA, 19 nt, Human
caauauucucuguacauau

SEQ ID NO: 3795459 - RNA, 12 nt, Human
caauauugaauu

SEQ ID NO: 3795460 - RNA, 21 nt, Human
caauauugaauuuuuccuaug

SEQ ID NO: 3795461 - RNA, 14 nt, Human
caauauugacuuug

SEQ ID NO: 3795462 - RNA, 17 nt, Human
caauauugacuuugucu

SEQ ID NO: 3795463 - RNA, 16 nt, Human
caauauuguacaguuu

SEQ ID NO: 3795464 - RNA, 14 nt, Human
caauauuguauauu

SEQ ID NO: 3795465 - RNA, 16 nt, Human
caauauugucauuccu

SEQ ID NO: 3795466 - RNA, 22 nt, Human
caauauugucucccuuccagca

SEQ ID NO: 3795467 - RNA, 14 nt, Human
caauauuguuucua

SEQ ID NO: 3795468 - RNA, 15 nt, Human
caauauuuaaggaga

SEQ ID NO: 3795469 - RNA, 17 nt, Human
caauauuuauaaagaau

SEQ ID NO: 3795470 - RNA, 19 nt, Human
caauauuuauggaugcaac

SEQ ID NO: 3795471 - RNA, 12 nt, Human
caauauuuauua

SEQ ID NO: 3795472 - RNA, 13 nt, Human
caauauuuauuau

SEQ ID NO: 3795473 - RNA, 16 nt, Human
caauauuuauuguauu

SEQ ID NO: 3795474 - RNA, 12 nt, Human
caauauuucaga

SEQ ID NO: 3795475 - RNA, 20 nt, Human
caauauuucagauaaucaca

SEQ ID NO: 3795476 - RNA, 14 nt, Human
caauauuuccucau

SEQ ID NO: 3795477 - RNA, 17 nt, Human
caauauuuccucaugug

SEQ ID NO: 3795478 - RNA, 15 nt, Human
caauauuugaauuuu

SEQ ID NO: 3795479 - RNA, 15 nt, Human
caauauuuguagaag

SEQ ID NO: 3795480 - RNA, 11 nt, Human
caauauuuuaa

SEQ ID NO: 3795481 - RNA, 14 nt, Human
caauauuuuaagca

SEQ ID NO: 3795482 - RNA, 17 nt, Human
caauauuuuaugguuau

SEQ ID NO: 3795483 - RNA, 22 nt, Human
caauauuuuaugguuauguuuu

SEQ ID NO: 3795484 - RNA, 21 nt, Human
augcaagagugauugcagcuu

SEQ ID NO: 3795485 - RNA, 12 nt, Human
augcaagauauu

SEQ ID NO: 3795486 - RNA, 14 nt, Human
augcaagcagagga

SEQ ID NO: 3795487 - RNA, 23 nt, Human
augcaagcuaguggcuucaaaau

SEQ ID NO: 3795488 - RNA, 14 nt, Human
augcaaggaaggaa

SEQ ID NO: 3795489 - RNA, 20 nt, Human
augcaaggaaggaaagaaag

SEQ ID NO: 3795490 - RNA, 22 nt, Human
augcaaggaccaggacucccuc

SEQ ID NO: 3795491 - RNA, 16 nt, Human
augcaaggucauuuuu

SEQ ID NO: 3795492 - RNA, 15 nt, Human
augcaauaaaauuau

SEQ ID NO: 3795493 - RNA, 19 nt, Human
augcaauaaaauuauuugc

SEQ ID NO: 3795494 - RNA, 20 nt, Human
augcaauaaaauuauuugca

SEQ ID NO: 3795495 - RNA, 21 nt, Human
augcaauaaaauuauuugcag

SEQ ID NO: 3795496 - RNA, 23 nt, Human
augcaauaaaauuuaaaaaauaa

SEQ ID NO: 3795497 - RNA, 22 nt, Human
augcaauagaagugcuccccuc

SEQ ID NO: 3795498 - RNA, 20 nt, Human
augcaauauaucuaaauuga

SEQ ID NO: 3795499 - RNA, 21 nt, Human
augcaauauaucuaaauugaa

SEQ ID NO: 3795500 - RNA, 22 nt, Human
augcaauauaucuaaauugaau

SEQ ID NO: 3795501 - RNA, 17 nt, Human
augcaauuuccuuuuuu

SEQ ID NO: 3795502 - RNA, 12 nt, Human
augcaauuugau

SEQ ID NO: 3795503 - RNA, 13 nt, Human
augcaauuuuuau

SEQ ID NO: 3795504 - RNA, 16 nt, Human
augcacaaugucuugg

SEQ ID NO: 3795505 - RNA, 14 nt, Human
augcacaauuccau

SEQ ID NO: 3795506 - RNA, 21 nt, Human
augcacacacacacgcuuucu

SEQ ID NO: 3795507 - RNA, 16 nt, Human
augcacacacauauau

SEQ ID NO: 3795508 - RNA, 21 nt, Human
augcacacagugcuuuccgug

SEQ ID NO: 3795509 - RNA, 19 nt, Human
augcacacauuuuuuaaau

SEQ ID NO: 3795510 - RNA, 22 nt, Human
augcacacuagccucuccagga

SEQ ID NO: 3795511 - RNA, 18 nt, Human
augcacagagaagcuggg

SEQ ID NO: 3795512 - RNA, 17 nt, Human
augcacagaguuguuac

SEQ ID NO: 3795513 - RNA, 18 nt, Human
augcacagaguuguuaca

SEQ ID NO: 3795514 - RNA, 21 nt, Human
augcacagaguuguuacauuu

SEQ ID NO: 3795515 - RNA, 16 nt, Human
augcacagauauacuu

SEQ ID NO: 3795516 - RNA, 17 nt, Human
augcacagauauacuuu

SEQ ID NO: 3795517 - RNA, 19 nt, Human
augcacagauauacuuugu

SEQ ID NO: 3795518 - RNA, 12 nt, Human
augcacagcugu

SEQ ID NO: 3795519 - RNA, 18 nt, Human
augcacaguauuuguaau

SEQ ID NO: 3795520 - RNA, 14 nt, Human
augcaccaccaagc

SEQ ID NO: 3795521 - RNA, 20 nt, Human
augcaccuagcugugcaaga

SEQ ID NO: 3795522 - RNA, 14 nt, Human
augcaccuggaaua

SEQ ID NO: 3795523 - RNA, 18 nt, Human
augcaccuugugucugua

SEQ ID NO: 3795524 - RNA, 13 nt, Human
augcacggccucg

SEQ ID NO: 3795525 - RNA, 22 nt, Human
augcacgugugcacacacacca

SEQ ID NO: 3795526 - RNA, 13 nt, Human
augcacuaugagg

SEQ ID NO: 3795527 - RNA, 14 nt, Human
augcacucagcucu

SEQ ID NO: 3795528 - RNA, 23 nt, Human
augcacugacccuuccagacaua

SEQ ID NO: 3795529 - RNA, 12 nt, Human
augcacugugaa

SEQ ID NO: 3795530 - RNA, 13 nt, Human
augcacugugaag

SEQ ID NO: 3795531 - RNA, 21 nt, Human
augcacuuaaagaaguauuuu

SEQ ID NO: 3795532 - RNA, 18 nt, Human
augcacuuugcuuuaaua

SEQ ID NO: 3795533 - RNA, 19 nt, Human
augcacuuugcuuuaauau

SEQ ID NO: 3795534 - RNA, 23 nt, Human
augcacuuugcuuuaauauaaau

SEQ ID NO: 3795535 - RNA, 11 nt, Human
augcagaaaua

SEQ ID NO: 3795536 - RNA, 13 nt, Human
augcagaaggaag

SEQ ID NO: 3795537 - RNA, 22 nt, Human
augcagacaugagugcgugcuc

SEQ ID NO: 3795538 - RNA, 21 nt, Human
augcagagagccauuuuguga

SEQ ID NO: 3795539 - RNA, 22 nt, Human
augcagagagccauuuugugaa

SEQ ID NO: 3795540 - RNA, 23 nt, Human
augcagagcgccgugaguucuca

SEQ ID NO: 3795541 - RNA, 23 nt, Human
augcagagguaaaagugugagca

SEQ ID NO: 3795542 - RNA, 15 nt, Human
augcagagucagcag

SEQ ID NO: 3795543 - RNA, 17 nt, Human
augcagagucagcagaa

SEQ ID NO: 3795544 - RNA, 16 nt, Human
augcagaguugacaug

SEQ ID NO: 3795545 - RNA, 17 nt, Human
augcagauagaaucaau

SEQ ID NO: 3795546 - RNA, 14 nt, Human
augcagaugccaga

SEQ ID NO: 3795547 - RNA, 15 nt, Human
augcagaugccuggg

SEQ ID NO: 3795548 - RNA, 23 nt, Human
augcagauggggcucccgcccgu

SEQ ID NO: 3795549 - RNA, 11 nt, Human
augcagcagcu

SEQ ID NO: 3795550 - RNA, 12 nt, Human
augcagcauuug

SEQ ID NO: 3795551 - RNA, 14 nt, Human
augcagcauuugau

SEQ ID NO: 3795552 - RNA, 17 nt, Human
augcagccacuuaggac

SEQ ID NO: 3795553 - RNA, 18 nt, Human
augcagccacuuaggaca

SEQ ID NO: 3795554 - RNA, 15 nt, Human
augcagcccaugccc

SEQ ID NO: 3795555 - RNA, 14 nt, Human
augcagcccauuuc

SEQ ID NO: 3795556 - RNA, 20 nt, Human
augcagcccauuucuccaga

SEQ ID NO: 3795557 - RNA, 14 nt, Human
augcagccucacag

SEQ ID NO: 3795558 - RNA, 13 nt, Human
augcagcucaaga

SEQ ID NO: 3795559 - RNA, 16 nt, Human
augcagcucuuccugg

SEQ ID NO: 3795560 - RNA, 22 nt, Human
augcaggagcuucugggagauu

SEQ ID NO: 3795561 - RNA, 19 nt, Human
augcagggauugcugccac

SEQ ID NO: 3795562 - RNA, 15 nt, Human
augcagggcagucau

SEQ ID NO: 3795563 - RNA, 16 nt, Human
augcagggggcuccug

SEQ ID NO: 3795564 - RNA, 22 nt, Human
augcagguuagaaauaauguca

SEQ ID NO: 3795565 - RNA, 13 nt, Human
augcagguuuuau

SEQ ID NO: 3795566 - RNA, 16 nt, Human
augcaguaaauuaucu

SEQ ID NO: 3795567 - RNA, 17 nt, Human
augcaguacaggacaua

SEQ ID NO: 3795568 - RNA, 18 nt, Human
augcaguacuaacauuua

SEQ ID NO: 3795569 - RNA, 23 nt, Human
augcaguaugguacauuuuucaa

SEQ ID NO: 3795570 - RNA, 19 nt, Human
augcagucuccucuuuaaa

SEQ ID NO: 3795571 - RNA, 22 nt, Human
augcagucuuagaucauaguuu

SEQ ID NO: 3795572 - RNA, 13 nt, Human
augcagugccagg

SEQ ID NO: 3795573 - RNA, 17 nt, Human
augcagugcucgcuguu

SEQ ID NO: 3795574 - RNA, 24 nt, Human
augcagugcucgcuguugcugaau

SEQ ID NO: 3795575 - RNA, 23 nt, Human
augcaguguagauuuuauagugu

SEQ ID NO: 3795576 - RNA, 19 nt, Human
augcaguuagcugaagaau

SEQ ID NO: 3795577 - RNA, 20 nt, Human
augcaguuagcugaagaauu

SEQ ID NO: 3795578 - RNA, 13 nt, Human
augcaguucugaa

SEQ ID NO: 3795579 - RNA, 13 nt, Human
augcaguuugaaa

SEQ ID NO: 3795580 - RNA, 18 nt, Human
augcaguuugaaauucug

SEQ ID NO: 3795581 - RNA, 22 nt, Human
augcaguuugaaauucugaauu

SEQ ID NO: 3795582 - RNA, 14 nt, Human
augcauaaauaugc

SEQ ID NO: 3795583 - RNA, 15 nt, Human
augcauaaauaugca

SEQ ID NO: 3795584 - RNA, 16 nt, Human
augcauaaauaugcag

SEQ ID NO: 3795585 - RNA, 20 nt, Human
augcauaacugacaaaucaa

SEQ ID NO: 3795586 - RNA, 19 nt, Human
augcauaauaauccugcaa

SEQ ID NO: 3795587 - RNA, 23 nt, Human
augcauaauaauccugcaaagua

SEQ ID NO: 3795588 - RNA, 23 nt, Human
augcauacacacacacacacagc

SEQ ID NO: 3795589 - RNA, 17 nt, Human
augcauacacucucaaa

SEQ ID NO: 3795590 - RNA, 14 nt, Human
augcauacauacac

SEQ ID NO: 3795591 - RNA, 16 nt, Human
augcauagagugugau

SEQ ID NO: 3795592 - RNA, 23 nt, Human
augcauagucccagcuacccagg

SEQ ID NO: 3795593 - RNA, 20 nt, Human
augcauaugucacuagaaug

SEQ ID NO: 3795594 - RNA, 23 nt, Human
augcauaugucacuagaauggau

SEQ ID NO: 3795595 - RNA, 13 nt, Human
augcauauuacug

SEQ ID NO: 3795596 - RNA, 14 nt, Human
augcauauuacugu

SEQ ID NO: 3795597 - RNA, 16 nt, Human
augcauauuauuuuau

SEQ ID NO: 3795598 - RNA, 15 nt, Human
augcauauuguauua

SEQ ID NO: 3795599 - RNA, 17 nt, Human
augcauauuugcaaagu

SEQ ID NO: 3795600 - RNA, 21 nt, Human
augcauauuugcaaaguguau

SEQ ID NO: 3795601 - RNA, 15 nt, Human
augcaucaauccugu

SEQ ID NO: 3795602 - RNA, 20 nt, Human
augcaucagaaagggagggc

SEQ ID NO: 3795603 - RNA, 14 nt, Human
augcauccauuccu

SEQ ID NO: 3795604 - RNA, 18 nt, Human
augcauccauuccucagg

SEQ ID NO: 3795605 - RNA, 14 nt, Human
augcaucuagauua

SEQ ID NO: 3795606 - RNA, 17 nt, Human
augcaucuccaccugcu

SEQ ID NO: 3795607 - RNA, 16 nt, Human
augcaucuuacugaag

SEQ ID NO: 3795608 - RNA, 19 nt, Human
augcaucuuugauguguug

SEQ ID NO: 3795609 - RNA, 21 nt, Human
augcaucuuugauguguuguu

SEQ ID NO: 3795610 - RNA, 16 nt, Human
augcaugaaguaauau

SEQ ID NO: 3795611 - RNA, 13 nt, Human
augcaugcaaaug

SEQ ID NO: 3795612 - RNA, 17 nt, Human
augcaugcacuguuccc

SEQ ID NO: 3795613 - RNA, 17 nt, Human
augcaugcuuuccauau

SEQ ID NO: 3795614 - RNA, 22 nt, Human
augcauggugccccaggaccag

SEQ ID NO: 3795615 - RNA, 18 nt, Human
augcaugguuucagcacu

SEQ ID NO: 3795616 - RNA, 16 nt, Human
augcaugucaaacaug

SEQ ID NO: 3795617 - RNA, 15 nt, Human
augcaugucuuuuaa

SEQ ID NO: 3795618 - RNA, 17 nt, Human
augcaugugaagaaagg

SEQ ID NO: 3795619 - RNA, 18 nt, Human
augcauguugaccauguc

SEQ ID NO: 3795620 - RNA, 22 nt, Human
augcauguugaccaugucuaug

SEQ ID NO: 3795621 - RNA, 19 nt, Human
augcauguuuuccagcucc

SEQ ID NO: 3795622 - RNA, 12 nt, Human
augcauuaaacc

SEQ ID NO: 3795623 - RNA, 21 nt, Human
augcauuauaggaucauuugu

SEQ ID NO: 3795624 - RNA, 19 nt, Human
augcauucacauuuagaaa

SEQ ID NO: 3795625 - RNA, 23 nt, Human
augcauucacauuuagaaaagug

SEQ ID NO: 3795626 - RNA, 14 nt, Human
augcauucuucucu

SEQ ID NO: 3795627 - RNA, 18 nt, Human
augcauugauauugugaa

SEQ ID NO: 3795628 - RNA, 22 nt, Human
cacagcaggcugccagugccug

SEQ ID NO: 3795629 - RNA, 17 nt, Human
cacagcagugagacugg

SEQ ID NO: 3795630 - RNA, 14 nt, Human
cacagcaucucagc

SEQ ID NO: 3795631 - RNA, 15 nt, Human
cacagcaucucagcu

SEQ ID NO: 3795632 - RNA, 16 nt, Human
cacagcaucucagcuc

SEQ ID NO: 3795633 - RNA, 16 nt, Human
cacagcauuguauaug

SEQ ID NO: 3795634 - RNA, 10 nt, Human
cacagccaca

SEQ ID NO: 3795635 - RNA, 17 nt, Human
cacagccacacacacag

SEQ ID NO: 3795636 - RNA, 15 nt, Human
cacagccagcaccug

SEQ ID NO: 3795637 - RNA, 16 nt, Human
cacagccagcaccugg

SEQ ID NO: 3795638 - RNA, 18 nt, Human
cacagccaggggagcaga

SEQ ID NO: 3795639 - RNA, 15 nt, Human
augcauuguugaggu

SEQ ID NO: 3795640 - RNA, 22 nt, Human
augcauuguuguucugcucaau

SEQ ID NO: 3795641 - RNA, 10 nt, Human
augcauuuga

SEQ ID NO: 3795642 - RNA, 12 nt, Human
augcauuugaaa

SEQ ID NO: 3795643 - RNA, 13 nt, Human
augcauuugaggu

SEQ ID NO: 3795644 - RNA, 23 nt, Human
augcauuugaggucaaguaagaa

SEQ ID NO: 3795645 - RNA, 18 nt, Human
augcauuuggguccagga

SEQ ID NO: 3795646 - RNA, 22 nt, Human
augcauuuggguccaggaggaa

SEQ ID NO: 3795647 - RNA, 12 nt, Human
augcauuuugca

SEQ ID NO: 3795648 - RNA, 18 nt, Human
augcauuuugcagcagug

SEQ ID NO: 3795649 - RNA, 23 nt, Human
augcauuuuguuugguauuguau

SEQ ID NO: 3795650 - RNA, 19 nt, Human
augccaaaaaaaaauacau

SEQ ID NO: 3795651 - RNA, 18 nt, Human
augccaaaaaaagacagg

SEQ ID NO: 3795652 - RNA, 23 nt, Human
augccaaagaucacuuguuguuu

SEQ ID NO: 3795653 - RNA, 15 nt, Human
augccaaauuaaaaa

SEQ ID NO: 3795654 - RNA, 18 nt, Human
augccaaauuaaaaaaga

SEQ ID NO: 3795655 - RNA, 13 nt, Human
augccaacaagaa

SEQ ID NO: 3795656 - RNA, 16 nt, Human
augccaacaagaaugc

SEQ ID NO: 3795657 - RNA, 18 nt, Human
augccaacaagaaugcau

SEQ ID NO: 3795658 - RNA, 21 nt, Human
augccaacaagaaugcauuga

SEQ ID NO: 3795659 - RNA, 14 nt, Human
augccaacuugucc

SEQ ID NO: 3795660 - RNA, 23 nt, Human
augccaagaaguuuaaggaauau

SEQ ID NO: 3795661 - RNA, 19 nt, Human
augccaagcacugugcuca

SEQ ID NO: 3795662 - RNA, 21 nt, Human
augccaagcacugugcucagg

SEQ ID NO: 3795663 - RNA, 23 nt, Human
augccaaguuguuugagaaauua

SEQ ID NO: 3795664 - RNA, 16 nt, Human
augccaauacuaguca

SEQ ID NO: 3795665 - RNA, 22 nt, Human
augccaauuagcaauugacugu

SEQ ID NO: 3795666 - RNA, 13 nt, Human
augccaauuucuc

SEQ ID NO: 3795667 - RNA, 14 nt, Human
augccacacaccuu

SEQ ID NO: 3795668 - RNA, 16 nt, Human
augccacacagagugg

SEQ ID NO: 3795669 - RNA, 21 nt, Human
augccacaccaagcugugcca

SEQ ID NO: 3795670 - RNA, 22 nt, Human
augccacaccaagcugugccac

SEQ ID NO: 3795671 - RNA, 13 nt, Human
augccacagcccu

SEQ ID NO: 3795672 - RNA, 15 nt, Human
augccacagcccugu

SEQ ID NO: 3795673 - RNA, 15 nt, Human
augccacauucaaaa

SEQ ID NO: 3795674 - RNA, 17 nt, Human
augccacgggaaguuua

SEQ ID NO: 3795675 - RNA, 21 nt, Human
augccacguuccacaguugcc

SEQ ID NO: 3795676 - RNA, 17 nt, Human
augccacuaaauugaca

SEQ ID NO: 3795677 - RNA, 14 nt, Human
augccacuccuccc

SEQ ID NO: 3795678 - RNA, 18 nt, Human
augccacuccucccuccg

SEQ ID NO: 3795679 - RNA, 14 nt, Human
augccacugccuuc

SEQ ID NO: 3795680 - RNA, 17 nt, Human
augccacugccuucgcu

SEQ ID NO: 3795681 - RNA, 18 nt, Human
augccacugccuucgcuu

SEQ ID NO: 3795682 - RNA, 18 nt, Human
augccacuucuaagaaaa

SEQ ID NO: 3795683 - RNA, 20 nt, Human
augccagagcaaagggccag

SEQ ID NO: 3795684 - RNA, 13 nt, Human
augccagcuggcc

SEQ ID NO: 3795685 - RNA, 16 nt, Human
augccaggaccagucc

SEQ ID NO: 3795686 - RNA, 19 nt, Human
augccagguucuauuugga

SEQ ID NO: 3795687 - RNA, 20 nt, Human
augccagguucuauuuggaa

SEQ ID NO: 3795688 - RNA, 14 nt, Human
augccagugugcug

SEQ ID NO: 3795689 - RNA, 22 nt, Human
augccauagaaauguagguccu

SEQ ID NO: 3795690 - RNA, 15 nt, Human
augccaucaucuccu

SEQ ID NO: 3795691 - RNA, 12 nt, Human
augccauccuca

SEQ ID NO: 3795692 - RNA, 21 nt, Human
augccauccucaaacacugca

SEQ ID NO: 3795693 - RNA, 23 nt, Human
augccauccucaaacacugcagg

SEQ ID NO: 3795694 - RNA, 21 nt, Human
augccauccucuuucucuuuu

SEQ ID NO: 3795695 - RNA, 14 nt, Human
augccaugaugccu

SEQ ID NO: 3795696 - RNA, 17 nt, Human
augccauggacagaaga

SEQ ID NO: 3795697 - RNA, 19 nt, Human
augccauggacagaagaag

SEQ ID NO: 3795698 - RNA, 14 nt, Human
augccauuuguuua

SEQ ID NO: 3795699 - RNA, 23 nt, Human
augcccacauuuagucucuuuau

SEQ ID NO: 3795700 - RNA, 10 nt, Human
augcccagag

SEQ ID NO: 3795701 - RNA, 20 nt, Human
augcccagagggcccaggca

SEQ ID NO: 3795702 - RNA, 12 nt, Human
augcccagcccc

SEQ ID NO: 3795703 - RNA, 17 nt, Human
augcccagccccuucug

SEQ ID NO: 3795704 - RNA, 15 nt, Human
augcccagugagacu

SEQ ID NO: 3795705 - RNA, 14 nt, Human
augccccaaauaua

SEQ ID NO: 3795706 - RNA, 15 nt, Human
augccccaaauauag

SEQ ID NO: 3795707 - RNA, 16 nt, Human
augcccccagcuggcc

SEQ ID NO: 3795708 - RNA, 13 nt, Human
augccccccucaa

SEQ ID NO: 3795709 - RNA, 22 nt, Human
augccccccucaaaccuccucu

SEQ ID NO: 3795710 - RNA, 18 nt, Human
augcccccucgugccagu

SEQ ID NO: 3795711 - RNA, 13 nt, Human
augcccccuuuca

SEQ ID NO: 3795712 - RNA, 19 nt, Human
augcccccuuucagauguc

SEQ ID NO: 3795713 - RNA, 20 nt, Human
augccccggccaccucugcg

SEQ ID NO: 3795714 - RNA, 21 nt, Human
augccccgucccccucuggcu

SEQ ID NO: 3795715 - RNA, 20 nt, Human
augccccuguacuccagccu

SEQ ID NO: 3795716 - RNA, 21 nt, Human
augcccucccuucucccugga

SEQ ID NO: 3795717 - RNA, 15 nt, Human
augcccuccucuccc

SEQ ID NO: 3795718 - RNA, 10 nt, Human
augcccucuc

SEQ ID NO: 3795719 - RNA, 13 nt, Human
augcccucucagg

SEQ ID NO: 3795720 - RNA, 14 nt, Human
augcccugcuccag

SEQ ID NO: 3795721 - RNA, 23 nt, Human
augcccugugcaaccucuuggcc

SEQ ID NO: 3795722 - RNA, 16 nt, Human
augcccuucuccuuau

SEQ ID NO: 3795723 - RNA, 22 nt, Human
augcccuuucuugaauugcauu

SEQ ID NO: 3795724 - RNA, 16 nt, Human
augccgauuucuguaa

SEQ ID NO: 3795725 - RNA, 17 nt, Human
augccgcgaugggucag

SEQ ID NO: 3795726 - RNA, 22 nt, Human
augccgcugcauccgugagcag

SEQ ID NO: 3795727 - RNA, 17 nt, Human
augccggaugugcuuuu

SEQ ID NO: 3795728 - RNA, 22 nt, Human
augccguuacuuuucauauuug

SEQ ID NO: 3795729 - RNA, 21 nt, Human
augccuaagaagaugacuucc

SEQ ID NO: 3795730 - RNA, 16 nt, Human
augccucacuaauuuu

SEQ ID NO: 3795731 - RNA, 20 nt, Human
augccucacuaauuuuugua

SEQ ID NO: 3795732 - RNA, 19 nt, Human
augccucaguguauuugua

SEQ ID NO: 3795733 - RNA, 20 nt, Human
augccucaguguauuuguau

SEQ ID NO: 3795734 - RNA, 14 nt, Human
augccucccugacc

SEQ ID NO: 3795735 - RNA, 14 nt, Human
augccuccucagga

SEQ ID NO: 3795736 - RNA, 15 nt, Human
augccuccucaggag

SEQ ID NO: 3795737 - RNA, 14 nt, Human
augccuccuuccuc

SEQ ID NO: 3795738 - RNA, 19 nt, Human
augccucucucaggccaaa

SEQ ID NO: 3795739 - RNA, 14 nt, Human
augccucugaggcc

SEQ ID NO: 3795740 - RNA, 17 nt, Human
augccucugaggccagc

SEQ ID NO: 3795741 - RNA, 20 nt, Human
augccucugaggccagccug

SEQ ID NO: 3795742 - RNA, 23 nt, Human
augccucugaggccagccuggcc

SEQ ID NO: 3795743 - RNA, 18 nt, Human
augccucugccaaaggau

SEQ ID NO: 3795744 - RNA, 22 nt, Human
augccucugccaaaggauguga

SEQ ID NO: 3795745 - RNA, 14 nt, Human
augccucugucuag

SEQ ID NO: 3795746 - RNA, 14 nt, Human
augccugagggugg

SEQ ID NO: 3795747 - RNA, 15 nt, Human
augccugagggugga

SEQ ID NO: 3795748 - RNA, 17 nt, Human
augccugaggguggaga

SEQ ID NO: 3795749 - RNA, 19 nt, Human
augccugccccaaacaaau

SEQ ID NO: 3795750 - RNA, 16 nt, Human
augccugcggaguugu

SEQ ID NO: 3795751 - RNA, 19 nt, Human
augccugcucuuuggccug

SEQ ID NO: 3795752 - RNA, 20 nt, Human
augccuggauggggcugcac

SEQ ID NO: 3795753 - RNA, 23 nt, Human
augccuggauggggcugcaccgg

SEQ ID NO: 3795754 - RNA, 17 nt, Human
augccugggcagaagga

SEQ ID NO: 3795755 - RNA, 16 nt, Human
augccuggucuuuccu

SEQ ID NO: 3795756 - RNA, 15 nt, Human
augccugguggcagc

SEQ ID NO: 3795757 - RNA, 21 nt, Human
augccugguggcagcugcggu

SEQ ID NO: 3795758 - RNA, 16 nt, Human
augccuguaauucagu

SEQ ID NO: 3795759 - RNA, 19 nt, Human
augccugucuuaauuuucu

SEQ ID NO: 3795760 - RNA, 15 nt, Human
augccuguggcugcg

SEQ ID NO: 3795761 - RNA, 19 nt, Human
augccuuaaaauggaauug

SEQ ID NO: 3795762 - RNA, 16 nt, Human
augccuuacucuucuu

SEQ ID NO: 3795763 - RNA, 16 nt, Human
augccuuacuuuguau

SEQ ID NO: 3795764 - RNA, 16 nt, Human
augccuuccccugggc

SEQ ID NO: 3795765 - RNA, 12 nt, Human
augccuugugcu

SEQ ID NO: 3795766 - RNA, 21 nt, Human
augccuuuaaaguaugaaucu

SEQ ID NO: 3795767 - RNA, 21 nt, Human
augccuuucuaguccuauucu

SEQ ID NO: 3795768 - RNA, 15 nt, Human
augccuuugagacag

SEQ ID NO: 3795769 - RNA, 13 nt, Human
augccuuuguaag

SEQ ID NO: 3795770 - RNA, 15 nt, Human
augccuuuguaaguu

SEQ ID NO: 3795771 - RNA, 16 nt, Human
augccuuuguaaguua

SEQ ID NO: 3795772 - RNA, 18 nt, Human
augcgcaggcuggcccug

SEQ ID NO: 3795773 - RNA, 16 nt, Human
cacguaaugaaacuug

SEQ ID NO: 3795774 - RNA, 15 nt, Human
cacguacaaaaucca

SEQ ID NO: 3795775 - RNA, 18 nt, Human
cacguacacacacauaca

SEQ ID NO: 3795776 - RNA, 17 nt, Human
cacguaguagggucagg

SEQ ID NO: 3795777 - RNA, 20 nt, Human
cacgucacguguagugucca

SEQ ID NO: 3795778 - RNA, 13 nt, Human
cacgucccccugg

SEQ ID NO: 3795779 - RNA, 15 nt, Human
cacgucccccugggg

SEQ ID NO: 3795780 - RNA, 20 nt, Human
cacgucccccuggggcuucu

SEQ ID NO: 3795781 - RNA, 19 nt, Human
cacguccugagaaagcuca

SEQ ID NO: 3795782 - RNA, 16 nt, Human
cacguccugucagugc

SEQ ID NO: 3795783 - RNA, 17 nt, Human
cacguccugucagugcc

SEQ ID NO: 3795784 - RNA, 18 nt, Human
cacgucugacccucucca

SEQ ID NO: 3795785 - RNA, 14 nt, Human
cacgugacacaaac

SEQ ID NO: 3795786 - RNA, 16 nt, Human
cacgugcagcucaagg

SEQ ID NO: 3795787 - RNA, 13 nt, Human
cacgugccaggcc

SEQ ID NO: 3795788 - RNA, 16 nt, Human
cacgugccaggcccgg

SEQ ID NO: 3795789 - RNA, 23 nt, Human
cacguggagagcuggugcccgga

SEQ ID NO: 3795790 - RNA, 18 nt, Human
cacguggccucuugagca

SEQ ID NO: 3795791 - RNA, 15 nt, Human
cacgugggaaccccc

SEQ ID NO: 3795792 - RNA, 21 nt, Human
cacgugggaaccccccuccca

SEQ ID NO: 3795793 - RNA, 19 nt, Human
cacgugggcuccccucuuc

SEQ ID NO: 3795794 - RNA, 20 nt, Human
cacguguaacugucagccgg

SEQ ID NO: 3795795 - RNA, 17 nt, Human
cacguguguuuuucuau

SEQ ID NO: 3795796 - RNA, 19 nt, Human
cacguguguuuuucuauua

SEQ ID NO: 3795797 - RNA, 20 nt, Human
cacguguguuuuucuauuaa

SEQ ID NO: 3795798 - RNA, 22 nt, Human
cacguguguuuuucuauuaaaa

SEQ ID NO: 3795799 - RNA, 23 nt, Human
cacguguguuuuucuauuaaaag

SEQ ID NO: 3795800 - RNA, 18 nt, Human
cacguuccacaguugcca

SEQ ID NO: 3795801 - RNA, 22 nt, Human
cacguucuuacuaguuucccuu

SEQ ID NO: 3795802 - RNA, 14 nt, Human
cacguuuuaaggac

SEQ ID NO: 3795803 - RNA, 16 nt, Human
cacguuuuaaggacug

SEQ ID NO: 3795804 - RNA, 19 nt, Human
cacuaaaacacacaggugc

SEQ ID NO: 3795805 - RNA, 15 nt, Human
cacuaaaauuuuagg

SEQ ID NO: 3795806 - RNA, 22 nt, Human
cacuaaacucugaauaagcacu

SEQ ID NO: 3795807 - RNA, 12 nt, Human
cacuaaagcagu

SEQ ID NO: 3795808 - RNA, 18 nt, Human
cacuaaagccagccugac

SEQ ID NO: 3795809 - RNA, 20 nt, Human
cacuaaagccagccugaccu

SEQ ID NO: 3795810 - RNA, 21 nt, Human
cacuaaagccagccugaccuu

SEQ ID NO: 3795811 - RNA, 15 nt, Human
cacuaaaguauguaa

SEQ ID NO: 3795812 - RNA, 13 nt, Human
cacuaaaucagag

SEQ ID NO: 3795813 - RNA, 16 nt, Human
cacuaaaucagagaca

SEQ ID NO: 3795814 - RNA, 13 nt, Human
cacuaaauguuaa

SEQ ID NO: 3795815 - RNA, 16 nt, Human
cacuaaauguuaaaga

SEQ ID NO: 3795816 - RNA, 21 nt, Human
cacuaaauugacacuuaaaaa

SEQ ID NO: 3795817 - RNA, 14 nt, Human
cacuaacagagugg

SEQ ID NO: 3795818 - RNA, 20 nt, Human
cacuaacauuauauugcaau

SEQ ID NO: 3795819 - RNA, 14 nt, Human
cacuaaccuugccu

SEQ ID NO: 3795820 - RNA, 11 nt, Human
cacuaacuaga

SEQ ID NO: 3795821 - RNA, 20 nt, Human
cacuaagaacaaaagaagca

SEQ ID NO: 3795822 - RNA, 16 nt, Human
cacuaagcagaggagg

SEQ ID NO: 3795823 - RNA, 12 nt, Human
cacuaaggggcc

SEQ ID NO: 3795824 - RNA, 17 nt, Human
cacuaaggugugcucug

SEQ ID NO: 3795825 - RNA, 16 nt, Human
cacuaauauauuuaaa

SEQ ID NO: 3795826 - RNA, 20 nt, Human
cacuaauauauuuaaaaaua

SEQ ID NO: 3795827 - RNA, 12 nt, Human
cacuaauucaua

SEQ ID NO: 3795828 - RNA, 18 nt, Human
cacuaauuuuuguauuau

SEQ ID NO: 3795829 - RNA, 13 nt, Human
cacuacaaccucc

SEQ ID NO: 3795830 - RNA, 14 nt, Human
cacuacaaccuccg

SEQ ID NO: 3795831 - RNA, 21 nt, Human
cacuacaagucagcuccagcu

SEQ ID NO: 3795832 - RNA, 16 nt, Human
cacuacaccacacaca

SEQ ID NO: 3795833 - RNA, 17 nt, Human
cacuacaccacacacaa

SEQ ID NO: 3795834 - RNA, 23 nt, Human
cacuacaccacacacaacagcca

SEQ ID NO: 3795835 - RNA, 23 nt, Human
cacuacaccuggcugagguuccu

SEQ ID NO: 3795836 - RNA, 16 nt, Human
cacuacacuccagccu

SEQ ID NO: 3795837 - RNA, 20 nt, Human
cacuacacuccagccugagc

SEQ ID NO: 3795838 - RNA, 21 nt, Human
cacuacacuccagccugagca

SEQ ID NO: 3795839 - RNA, 14 nt, Human
cacuacauaaacug

SEQ ID NO: 3795840 - RNA, 17 nt, Human
cacuacauaaacugacu

SEQ ID NO: 3795841 - RNA, 21 nt, Human
cacuacaugcagcccaugccc

SEQ ID NO: 3795842 - RNA, 15 nt, Human
cacuacauucuguua

SEQ ID NO: 3795843 - RNA, 16 nt, Human
cacuacauucuguuaa

SEQ ID NO: 3795844 - RNA, 15 nt, Human
cacuaccgauucuuu

SEQ ID NO: 3795845 - RNA, 12 nt, Human
cacccccagccc

SEQ ID NO: 3795846 - RNA, 19 nt, Human
cacccccagccugggccua

SEQ ID NO: 3795847 - RNA, 12 nt, Human
cacccccagcuc

SEQ ID NO: 3795848 - RNA, 18 nt, Human
caccccccacacucacuc

SEQ ID NO: 3795849 - RNA, 18 nt, Human
caccccccagaaccuguc

SEQ ID NO: 3795850 - RNA, 20 nt, Human
caccccccagaaccuguccu

SEQ ID NO: 3795851 - RNA, 21 nt, Human
caccccccagaaccuguccuu

SEQ ID NO: 3795852 - RNA, 12 nt, Human
caccccccaggc

SEQ ID NO: 3795853 - RNA, 13 nt, Human
caccccccugggc

SEQ ID NO: 3795854 - RNA, 16 nt, Human
caccccccuguucuaa

SEQ ID NO: 3795855 - RNA, 16 nt, Human
cacccccgccucccuc

SEQ ID NO: 3795856 - RNA, 11 nt, Human
cacccccguca

SEQ ID NO: 3795857 - RNA, 18 nt, Human
cacccccucaccccucca

SEQ ID NO: 3795858 - RNA, 19 nt, Human
cacccccucccacccccag

SEQ ID NO: 3795859 - RNA, 15 nt, Human
cacccccuccccagg

SEQ ID NO: 3795860 - RNA, 15 nt, Human
cacccccuccugcug

SEQ ID NO: 3795861 - RNA, 17 nt, Human
cacccccuccugcugca

SEQ ID NO: 3795862 - RNA, 17 nt, Human
cacccccugcccugcac

SEQ ID NO: 3795863 - RNA, 16 nt, Human
cacccccuucagugcc

SEQ ID NO: 3795864 - RNA, 20 nt, Human
cacccccuucagugcccacc

SEQ ID NO: 3795865 - RNA, 18 nt, Human
cacccccuucuccaucca

SEQ ID NO: 3795866 - RNA, 17 nt, Human
cacccccuucucugcuc

SEQ ID NO: 3795867 - RNA, 16 nt, Human
caccccgaggcccugc

SEQ ID NO: 3795868 - RNA, 20 nt, Human
caccccgaggcccugcaugg

SEQ ID NO: 3795869 - RNA, 22 nt, Human
caccccgaggcccugcaugggc

SEQ ID NO: 3795870 - RNA, 16 nt, Human
caccccgccugcccuc

SEQ ID NO: 3795871 - RNA, 15 nt, Human
caccccgcucugcau

SEQ ID NO: 3795872 - RNA, 19 nt, Human
caccccgcuguaagcuccu

SEQ ID NO: 3795873 - RNA, 23 nt, Human
caccccggcccccugcccguucu

SEQ ID NO: 3795874 - RNA, 15 nt, Human
caccccgggcucucu

SEQ ID NO: 3795875 - RNA, 20 nt, Human
caccccggggacccugugac

SEQ ID NO: 3795876 - RNA, 22 nt, Human
caccccgucugggguucagccc

SEQ ID NO: 3795877 - RNA, 20 nt, Human
caccccguuacagcucccca

SEQ ID NO: 3795878 - RNA, 15 nt, Human
caccccuaaagagau

SEQ ID NO: 3795879 - RNA, 10 nt, Human
caccccuccc

SEQ ID NO: 3795880 - RNA, 15 nt, Human
caccccuccccugcc

SEQ ID NO: 3795881 - RNA, 13 nt, Human
caccccucccucu

SEQ ID NO: 3795882 - RNA, 12 nt, Human
caccccuccuuc

SEQ ID NO: 3795883 - RNA, 23 nt, Human
caccccuccuuccuugaccagca

SEQ ID NO: 3795884 - RNA, 18 nt, Human
caccccugcccccacuuc

SEQ ID NO: 3795885 - RNA, 18 nt, Human
caccccugcccccagccc

SEQ ID NO: 3795886 - RNA, 16 nt, Human
caccccugcccuggga

SEQ ID NO: 3795887 - RNA, 12 nt, Human
caccccugccuc

SEQ ID NO: 3795888 - RNA, 14 nt, Human
caccccugccucca

SEQ ID NO: 3795889 - RNA, 22 nt, Human
caccccugccuccacccucuga

SEQ ID NO: 3795890 - RNA, 23 nt, Human
caccccugccuccacccucugag

SEQ ID NO: 3795891 - RNA, 10 nt, Human
caccccugcu

SEQ ID NO: 3795892 - RNA, 18 nt, Human
caccccuggaagagccca

SEQ ID NO: 3795893 - RNA, 19 nt, Human
caccccuggaagagcccag

SEQ ID NO: 3795894 - RNA, 20 nt, Human
caccccuggaagagcccagu

SEQ ID NO: 3795895 - RNA, 18 nt, Human
caccccugggggcucuca

SEQ ID NO: 3795896 - RNA, 17 nt, Human
caccccuguccucacug

SEQ ID NO: 3795897 - RNA, 23 nt, Human
caccccuguccucacugcucccu

SEQ ID NO: 3795898 - RNA, 13 nt, Human
caccccugucucu

SEQ ID NO: 3795899 - RNA, 22 nt, Human
caccccugugcuccgugccucc

SEQ ID NO: 3795900 - RNA, 17 nt, Human
caccccuuauccaggac

SEQ ID NO: 3795901 - RNA, 11 nt, Human
caccccuucca

SEQ ID NO: 3795902 - RNA, 15 nt, Human
caccccuuccaugug

SEQ ID NO: 3795903 - RNA, 16 nt, Human
caccccuuccaugugg

SEQ ID NO: 3795904 - RNA, 16 nt, Human
caccccuuccugggca

SEQ ID NO: 3795905 - RNA, 19 nt, Human
caccccuugcucucaaccc

SEQ ID NO: 3795906 - RNA, 21 nt, Human
cacccgacgucauguauuuga

SEQ ID NO: 3795907 - RNA, 14 nt, Human
cacccgacuccagu

SEQ ID NO: 3795908 - RNA, 12 nt, Human
cacccgaggcug

SEQ ID NO: 3795909 - RNA, 15 nt, Human
cacccgaggcugccc

SEQ ID NO: 3795910 - RNA, 13 nt, Human
cacccgaugcugc

SEQ ID NO: 3795911 - RNA, 18 nt, Human
cacccgaugcugcuuucc

SEQ ID NO: 3795912 - RNA, 19 nt, Human
cacccgaugcugcuuuccc

SEQ ID NO: 3795913 - RNA, 16 nt, Human
cacccggccccugcug

SEQ ID NO: 3795914 - RNA, 17 nt, Human
cacccggccccugcugg

SEQ ID NO: 3795915 - RNA, 21 nt, Human
cacccggcugcagaggccaga

SEQ ID NO: 3795916 - RNA, 22 nt, Human
cacccggugaccucuagcccug

SEQ ID NO: 3795917 - RNA, 16 nt, Human
cacccguguuuguaaa

SEQ ID NO: 3795918 - RNA, 20 nt, Human
cacucaagaagcaggcuaca

SEQ ID NO: 3795919 - RNA, 23 nt, Human
cacucaagaagcaggcuacacug

SEQ ID NO: 3795920 - RNA, 14 nt, Human
cacucaagcacuga

SEQ ID NO: 3795921 - RNA, 16 nt, Human
cacucaagccaagcag

SEQ ID NO: 3795922 - RNA, 11 nt, Human
cacucaaggcg

SEQ ID NO: 3795923 - RNA, 17 nt, Human
cacucaaggcggugcuu

SEQ ID NO: 3795924 - RNA, 21 nt, Human
cacucaaggcggugcuugaua

SEQ ID NO: 3795925 - RNA, 19 nt, Human
cacucaaguucaaggacca

SEQ ID NO: 3795926 - RNA, 17 nt, Human
cacucaaugcagccaga

SEQ ID NO: 3795927 - RNA, 17 nt, Human
cacucacaacagcugcc

SEQ ID NO: 3795928 - RNA, 22 nt, Human
cacucacacagccaggugccuu

SEQ ID NO: 3795929 - RNA, 23 nt, Human
cacucacagagucaaggccugcu

SEQ ID NO: 3795930 - RNA, 14 nt, Human
cacucacaugcugg

SEQ ID NO: 3795931 - RNA, 18 nt, Human
cacucaccaguguccccu

SEQ ID NO: 3795932 - RNA, 14 nt, Human
cacucaccaugaag

SEQ ID NO: 3795933 - RNA, 17 nt, Human
cacucacuaggccccca

SEQ ID NO: 3795934 - RNA, 15 nt, Human
cacucacuccugaga

SEQ ID NO: 3795935 - RNA, 17 nt, Human
cacucacugcggagaac

SEQ ID NO: 3795936 - RNA, 24 nt, Human
cacucagaaaagacgcaccagccc

SEQ ID NO: 3795937 - RNA, 13 nt, Human
cacucagaagccu

SEQ ID NO: 3795938 - RNA, 23 nt, Human
cacucagaagccugggggccugg

SEQ ID NO: 3795939 - RNA, 12 nt, Human
cacucagaccug

SEQ ID NO: 3795940 - RNA, 13 nt, Human
cacucagcacaag

SEQ ID NO: 3795941 - RNA, 14 nt, Human
cacucagcaccacu

SEQ ID NO: 3795942 - RNA, 17 nt, Human
cacucagcacuuggccc

SEQ ID NO: 3795943 - RNA, 12 nt, Human
cacucagccccu

SEQ ID NO: 3795944 - RNA, 18 nt, Human
cacucagccccuaggagu

SEQ ID NO: 3795945 - RNA, 22 nt, Human
cacucagcucuuggcuccacug

SEQ ID NO: 3795946 - RNA, 11 nt, Human
cacucagcugu

SEQ ID NO: 3795947 - RNA, 20 nt, Human
cacucaggggucacugaggc

SEQ ID NO: 3795948 - RNA, 18 nt, Human
cacucagucucucuucuc

SEQ ID NO: 3795949 - RNA, 13 nt, Human
cacucaugcugaa

SEQ ID NO: 3795950 - RNA, 18 nt, Human
cacucauucugaauuaau

SEQ ID NO: 3795951 - RNA, 22 nt, Human
cacucauugaccugaggcccuu

SEQ ID NO: 3795952 - RNA, 23 nt, Human
cacucauugcugagccucugcuc

SEQ ID NO: 3795953 - RNA, 14 nt, Human
cacucauuucaucu

SEQ ID NO: 3795954 - RNA, 22 nt, Human
cacuccaaccuaaccugugucu

SEQ ID NO: 3795955 - RNA, 23 nt, Human
cacuccaaccuaaccugugucug

SEQ ID NO: 3795956 - RNA, 19 nt, Human
cacuccaagauauggacac

SEQ ID NO: 3795957 - RNA, 13 nt, Human
cacuccaauuaag

SEQ ID NO: 3795958 - RNA, 21 nt, Human
cacuccaauuaaggauuuuau

SEQ ID NO: 3795959 - RNA, 15 nt, Human
cacuccaccacccaa

SEQ ID NO: 3795960 - RNA, 18 nt, Human
cacuccaccacccaaaag

SEQ ID NO: 3795961 - RNA, 19 nt, Human
cacuccaccacccaaaagu

SEQ ID NO: 3795962 - RNA, 16 nt, Human
cacuccagaccccugg

SEQ ID NO: 3795963 - RNA, 14 nt, Human
cacuccagccugag

SEQ ID NO: 3795964 - RNA, 15 nt, Human
cacuccagcugggau

SEQ ID NO: 3795965 - RNA, 20 nt, Human
cacuccaggaaggggcugga

SEQ ID NO: 3795966 - RNA, 13 nt, Human
cacuccagggaca

SEQ ID NO: 3795967 - RNA, 21 nt, Human
cacuccagggacacacagccu

SEQ ID NO: 3795968 - RNA, 16 nt, Human
cacuccagugagacag

SEQ ID NO: 3795969 - RNA, 22 nt, Human
cacuccaugcuuagucacugcc

SEQ ID NO: 3795970 - RNA, 15 nt, Human
cacucccacccaguc

SEQ ID NO: 3795971 - RNA, 17 nt, Human
cacucccaccugacaca

SEQ ID NO: 3795972 - RNA, 18 nt, Human
cacucccaccugcaucug

SEQ ID NO: 3795973 - RNA, 22 nt, Human
cacucccaccugcaucuggggc

SEQ ID NO: 3795974 - RNA, 12 nt, Human
cacucccagcau

SEQ ID NO: 3795975 - RNA, 15 nt, Human
cacuccccagccugg

SEQ ID NO: 3795976 - RNA, 14 nt, Human
cacuccccuagggg

SEQ ID NO: 3795977 - RNA, 22 nt, Human
cacucccgagacggcacugaga

SEQ ID NO: 3795978 - RNA, 13 nt, Human
cacucccucacaa

SEQ ID NO: 3795979 - RNA, 14 nt, Human
cacucccuccuaac

SEQ ID NO: 3795980 - RNA, 12 nt, Human
cacucccugcaa

SEQ ID NO: 3795981 - RNA, 17 nt, Human
cacucccugcaaccuga

SEQ ID NO: 3795982 - RNA, 22 nt, Human
cacucccuucccaugacccagg

SEQ ID NO: 3795983 - RNA, 18 nt, Human
cacucccuucuaccugcc

SEQ ID NO: 3795984 - RNA, 19 nt, Human
cacucccuucuaccugcca

SEQ ID NO: 3795985 - RNA, 22 nt, Human
cacucccuucuaccugccacuc

SEQ ID NO: 3795986 - RNA, 14 nt, Human
cacucccuucuccu

SEQ ID NO: 3795987 - RNA, 19 nt, Human
cacucccuugcuggcccca

SEQ ID NO: 3795988 - RNA, 20 nt, Human
cacucccuugcuggccccag

SEQ ID NO: 3795989 - RNA, 19 nt, Human
cacuccgagaggugggcca

SEQ ID NO: 3795990 - RNA, 17 nt, Human
cacuccggugugccugc

SEQ ID NO: 3795991 - RNA, 14 nt, Human
cacuccuaccuggu

SEQ ID NO: 3795992 - RNA, 21 nt, Human
cacuccuagagaacgcagccc

SEQ ID NO: 3795993 - RNA, 15 nt, Human
cacuccuccaaagga

SEQ ID NO: 3795994 - RNA, 13 nt, Human
cacuccucccucc

SEQ ID NO: 3795995 - RNA, 17 nt, Human
cacuccucccugaugua

SEQ ID NO: 3795996 - RNA, 18 nt, Human
cacuccucccugauguac

SEQ ID NO: 3795997 - RNA, 12 nt, Human
cacuccucugac

SEQ ID NO: 3795998 - RNA, 13 nt, Human
cacuccucugacu

SEQ ID NO: 3795999 - RNA, 13 nt, Human
cacuccucugcug

SEQ ID NO: 3796000 - RNA, 16 nt, Human
cacuccucugcugacc

SEQ ID NO: 3796001 - RNA, 13 nt, Human
cacuccugccaag

SEQ ID NO: 3796002 - RNA, 12 nt, Human
cacuccugcucu

SEQ ID NO: 3796003 - RNA, 11 nt, Human
cacuccugcug

SEQ ID NO: 3796004 - RNA, 12 nt, Human
cacuccugcugu

SEQ ID NO: 3796005 - RNA, 21 nt, Human
cacuccugcuuaaucuucaaa

SEQ ID NO: 3796006 - RNA, 11 nt, Human
cacuccugggg

SEQ ID NO: 3796007 - RNA, 12 nt, Human
cacuccuggggc

SEQ ID NO: 3796008 - RNA, 13 nt, Human
cacuccuguacac

SEQ ID NO: 3796009 - RNA, 11 nt, Human
cacuccuuccu

SEQ ID NO: 3796010 - RNA, 13 nt, Human
cacuccuuccugc

SEQ ID NO: 3796011 - RNA, 21 nt, Human
cacuccuuccugccaccugcu

SEQ ID NO: 3796012 - RNA, 16 nt, Human
auggugcuuaaguucc

SEQ ID NO: 3796013 - RNA, 19 nt, Human
augguggaugauccccacg

SEQ ID NO: 3796014 - RNA, 19 nt, Human
augguggcaugcaccugca

SEQ ID NO: 3796015 - RNA, 15 nt, Human
augguggcuggguug

SEQ ID NO: 3796016 - RNA, 17 nt, Human
augguggcuggguugga

SEQ ID NO: 3796017 - RNA, 18 nt, Human
augguggcuucagcucca

SEQ ID NO: 3796018 - RNA, 21 nt, Human
augguggugcaugucugcaaa

SEQ ID NO: 3796019 - RNA, 19 nt, Human
auggugguuguuucuucca

SEQ ID NO: 3796020 - RNA, 18 nt, Human
augguguacauaauguau

SEQ ID NO: 3796021 - RNA, 22 nt, Human
augguguagcccucccacuuug

SEQ ID NO: 3796022 - RNA, 18 nt, Human
auggugucucuucuuuag

SEQ ID NO: 3796023 - RNA, 20 nt, Human
auggugugaccacugcagaa

SEQ ID NO: 3796024 - RNA, 14 nt, Human
augguguuacauau

SEQ ID NO: 3796025 - RNA, 22 nt, Human
augguguucuccugcugcuccc

SEQ ID NO: 3796026 - RNA, 17 nt, Human
augguguuuuucuugua

SEQ ID NO: 3796027 - RNA, 15 nt, Human
augguuacaaucauu

SEQ ID NO: 3796028 - RNA, 20 nt, Human
augguuacaaucauugcuga

SEQ ID NO: 3796029 - RNA, 13 nt, Human
augguuacacugu

SEQ ID NO: 3796030 - RNA, 23 nt, Human
augguuacacuguuagaacacua

SEQ ID NO: 3796031 - RNA, 17 nt, Human
augguuaccaugucuuu

SEQ ID NO: 3796032 - RNA, 22 nt, Human
augguuaccaugucuuucucuc

SEQ ID NO: 3796033 - RNA, 21 nt, Human
augguuaccucugcauaaaua

SEQ ID NO: 3796034 - RNA, 14 nt, Human
augguuaugaaaga

SEQ ID NO: 3796035 - RNA, 16 nt, Human
augguuauguuuuucu

SEQ ID NO: 3796036 - RNA, 21 nt, Human
augguucagaauuaaacuuuu

SEQ ID NO: 3796037 - RNA, 19 nt, Human
augguucuggcuguuugag

SEQ ID NO: 3796038 - RNA, 14 nt, Human
augguucuucaccu

SEQ ID NO: 3796039 - RNA, 19 nt, Human
augguugagaaaugaauaa

SEQ ID NO: 3796040 - RNA, 14 nt, Human
augguuguauuaga

SEQ ID NO: 3796041 - RNA, 14 nt, Human
augguuuaaaagaa

SEQ ID NO: 3796042 - RNA, 16 nt, Human
augguuuaacaaaaug

SEQ ID NO: 3796043 - RNA, 21 nt, Human
augguuuacauccuucacugc

SEQ ID NO: 3796044 - RNA, 21 nt, Human
augguuuauuuuguauugugg

SEQ ID NO: 3796045 - RNA, 13 nt, Human
augguuucagcac

SEQ ID NO: 3796046 - RNA, 15 nt, Human
augguuucuugcaag

SEQ ID NO: 3796047 - RNA, 21 nt, Human
augguuugaauauaaacacua

SEQ ID NO: 3796048 - RNA, 16 nt, Human
augguuugcaaggaag

SEQ ID NO: 3796049 - RNA, 14 nt, Human
augguuuggagcug

SEQ ID NO: 3796050 - RNA, 14 nt, Human
augguuuuaaacuu

SEQ ID NO: 3796051 - RNA, 14 nt, Human
augguuuucaaaau

SEQ ID NO: 3796052 - RNA, 16 nt, Human
augguuuucaaaauaa

SEQ ID NO: 3796053 - RNA, 21 nt, Human
augguuuuuaaauuuuguaau

SEQ ID NO: 3796054 - RNA, 18 nt, Human
augguuuuugagauauua

SEQ ID NO: 3796055 - RNA, 13 nt, Human
auguaaaaaagaa

SEQ ID NO: 3796056 - RNA, 13 nt, Human
auguaaaacauuu

SEQ ID NO: 3796057 - RNA, 17 nt, Human
auguaaaagaaaaucca

SEQ ID NO: 3796058 - RNA, 19 nt, Human
auguaaaagaacuuacuga

SEQ ID NO: 3796059 - RNA, 17 nt, Human
auguaaaagacuuuuuu

SEQ ID NO: 3796060 - RNA, 21 nt, Human
auguaaaagagucaucuggua

SEQ ID NO: 3796061 - RNA, 15 nt, Human
auguaaaaggccaaa

SEQ ID NO: 3796062 - RNA, 18 nt, Human
auguaaaaggccaaaccu

SEQ ID NO: 3796063 - RNA, 21 nt, Human
auguaaaaucuugucaugugu

SEQ ID NO: 3796064 - RNA, 15 nt, Human
augugugaggagcug

SEQ ID NO: 3796065 - RNA, 19 nt, Human
augugugaggagcugcugg

SEQ ID NO: 3796066 - RNA, 16 nt, Human
augugugagugcaugu

SEQ ID NO: 3796067 - RNA, 17 nt, Human
augugugagugugugca

SEQ ID NO: 3796068 - RNA, 21 nt, Human
augugugauucaaugccucug

SEQ ID NO: 3796069 - RNA, 20 nt, Human
augugugcauguguguauaa

SEQ ID NO: 3796070 - RNA, 13 nt, Human
augugugcccagc

SEQ ID NO: 3796071 - RNA, 16 nt, Human
augugugguggccuca

SEQ ID NO: 3796072 - RNA, 17 nt, Human
auguguguaagugugug

SEQ ID NO: 3796073 - RNA, 23 nt, Human
auguguguauaagugcacacaga

SEQ ID NO: 3796074 - RNA, 13 nt, Human
auguguguaugug

SEQ ID NO: 3796075 - RNA, 14 nt, Human
auguguguaugugu

SEQ ID NO: 3796076 - RNA, 11 nt, Human
augugugugca

SEQ ID NO: 3796077 - RNA, 10 nt, Human
augugugugu

SEQ ID NO: 3796078 - RNA, 12 nt, Human
auguguguguau

SEQ ID NO: 3796079 - RNA, 13 nt, Human
auguguguguaug

SEQ ID NO: 3796080 - RNA, 12 nt, Human
augugugugugu

SEQ ID NO: 3796081 - RNA, 16 nt, Human
auguguguguguguau

SEQ ID NO: 3796082 - RNA, 18 nt, Human
auguguguugauacuguu

SEQ ID NO: 3796083 - RNA, 20 nt, Human
auguguguugauacuguugc

SEQ ID NO: 3796084 - RNA, 16 nt, Human
auguguguuuugcuaa

SEQ ID NO: 3796085 - RNA, 23 nt, Human
auguguguuuugcuaaaggaaaa

SEQ ID NO: 3796086 - RNA, 14 nt, Human
auguguuaaucuua

SEQ ID NO: 3796087 - RNA, 17 nt, Human
auguguuaaucuuaaug

SEQ ID NO: 3796088 - RNA, 22 nt, Human
auguguucccuuugucuuucaa

SEQ ID NO: 3796089 - RNA, 14 nt, Human
auguguugaaaaaa

SEQ ID NO: 3796090 - RNA, 14 nt, Human
auguguugaaaacc

SEQ ID NO: 3796091 - RNA, 16 nt, Human
auguguugaaaaccaa

SEQ ID NO: 3796092 - RNA, 22 nt, Human
auguguugaaaaccaaaaugac

SEQ ID NO: 3796093 - RNA, 14 nt, Human
auguguugaaacug

SEQ ID NO: 3796094 - RNA, 14 nt, Human
auguguugugauag

SEQ ID NO: 3796095 - RNA, 15 nt, Human
auguguuuacuuuaa

SEQ ID NO: 3796096 - RNA, 12 nt, Human
auguguuuagaa

SEQ ID NO: 3796097 - RNA, 17 nt, Human
auguguuuagaauugaa

SEQ ID NO: 3796098 - RNA, 18 nt, Human
auguguuuaugugagcug

SEQ ID NO: 3796099 - RNA, 18 nt, Human
auguguuucacaguuuga

SEQ ID NO: 3796100 - RNA, 21 nt, Human
auguguuucacaguuugaaau

SEQ ID NO: 3796101 - RNA, 23 nt, Human
auguguuucacaguuugaaauaa

SEQ ID NO: 3796102 - RNA, 15 nt, Human
auguguuugcuuucu

SEQ ID NO: 3796103 - RNA, 16 nt, Human
auguguuugcuuucug

SEQ ID NO: 3796104 - RNA, 18 nt, Human
auguguuugguucugggg

SEQ ID NO: 3796105 - RNA, 16 nt, Human
auguguuugugugugu

SEQ ID NO: 3796106 - RNA, 14 nt, Human
auguguuuuagagu

SEQ ID NO: 3796107 - RNA, 21 nt, Human
auguuaaaaaaauaagaagaa

SEQ ID NO: 3796108 - RNA, 22 nt, Human
auguuaaaaaaauaagaagaau

SEQ ID NO: 3796109 - RNA, 14 nt, Human
auguuaaaauaaau

SEQ ID NO: 3796110 - RNA, 12 nt, Human
auguuaaaaugu

SEQ ID NO: 3796111 - RNA, 15 nt, Human
auguuaaaauguguu

SEQ ID NO: 3796112 - RNA, 12 nt, Human
auguuaaaccau

SEQ ID NO: 3796113 - RNA, 13 nt, Human
auguuaaaccaug

SEQ ID NO: 3796114 - RNA, 20 nt, Human
auguuaaaccaugggauaaa

SEQ ID NO: 3796115 - RNA, 21 nt, Human
auguuaaacuagcauaucugc

SEQ ID NO: 3796116 - RNA, 21 nt, Human
auguuaaacuuacuuaguguu

SEQ ID NO: 3796117 - RNA, 18 nt, Human
auguuaaagagaaugagu

SEQ ID NO: 3796118 - RNA, 18 nt, Human
auguuaaauaaauuguau

SEQ ID NO: 3796119 - RNA, 24 nt, Human
auguuaaauaggcggggcuugccu

SEQ ID NO: 3796120 - RNA, 23 nt, Human
auguuaaauuuguaaguuucagg

SEQ ID NO: 3796121 - RNA, 20 nt, Human
auguuaacacauuuuguaua

SEQ ID NO: 3796122 - RNA, 21 nt, Human
auguuaacacauuuuguauaa

SEQ ID NO: 3796123 - RNA, 23 nt, Human
auguuaaccagaauaaaguucug

SEQ ID NO: 3796124 - RNA, 23 nt, Human
auguuaacugacaagcuccauuu

SEQ ID NO: 3796125 - RNA, 20 nt, Human
auguuaagacuugacagugg

SEQ ID NO: 3796126 - RNA, 13 nt, Human
auguuaagcagau

SEQ ID NO: 3796127 - RNA, 17 nt, Human
auguuaaggaaacucuu

SEQ ID NO: 3796128 - RNA, 19 nt, Human
auguuaaguccucccugac

SEQ ID NO: 3796129 - RNA, 15 nt, Human
auguuaaguuacuuc

SEQ ID NO: 3796130 - RNA, 14 nt, Human
auguuaaguuauau

SEQ ID NO: 3796131 - RNA, 19 nt, Human
auguuaaguugauggugau

SEQ ID NO: 3796132 - RNA, 15 nt, Human
auguuaauauugauu

SEQ ID NO: 3796133 - RNA, 13 nt, Human
auguuaauauuuc

SEQ ID NO: 3796134 - RNA, 17 nt, Human
auguuacaaguuuauau

SEQ ID NO: 3796135 - RNA, 20 nt, Human
auguuacaaguuuauauaua

SEQ ID NO: 3796136 - RNA, 19 nt, Human
auguuacauaagauaaaug

SEQ ID NO: 3796137 - RNA, 23 nt, Human
auguuacauaguguaggcuuuac

SEQ ID NO: 3796138 - RNA, 14 nt, Human
auguuacauuauua

SEQ ID NO: 3796139 - RNA, 14 nt, Human
auguuaccucugaa

SEQ ID NO: 3796140 - RNA, 17 nt, Human
auguuacuacaugcacu

SEQ ID NO: 3796141 - RNA, 13 nt, Human
auguuacugauca

SEQ ID NO: 3796142 - RNA, 20 nt, Human
auguuagcuccaaagcauuu

SEQ ID NO: 3796143 - RNA, 16 nt, Human
auguuagggugcucug

SEQ ID NO: 3796144 - RNA, 22 nt, Human
auguuaguuaccuuauaguuac

SEQ ID NO: 3796145 - RNA, 15 nt, Human
auguuaguuucuugg

SEQ ID NO: 3796146 - RNA, 14 nt, Human
auguuauagaacuu

SEQ ID NO: 3796147 - RNA, 14 nt, Human
auguuauagcugca

SEQ ID NO: 3796148 - RNA, 14 nt, Human
auguuauagugaau

SEQ ID NO: 3796149 - RNA, 15 nt, Human
auguuauauauaaau

SEQ ID NO: 3796150 - RNA, 19 nt, Human
auguuauaucauauguaua

SEQ ID NO: 3796151 - RNA, 20 nt, Human
auguuauauuuuucuuaaaa

SEQ ID NO: 3796152 - RNA, 21 nt, Human
auguuaucuuauacuguacaa

SEQ ID NO: 3796153 - RNA, 15 nt, Human
auguuaucuucucaa

SEQ ID NO: 3796154 - RNA, 17 nt, Human
auguuaucuucucaagu

SEQ ID NO: 3796155 - RNA, 21 nt, Human
auguuaucuucucaaguucua

SEQ ID NO: 3796156 - RNA, 21 nt, Human
auguuaugauaaaaaauuuug

SEQ ID NO: 3796157 - RNA, 12 nt, Human
auguuauguaua

SEQ ID NO: 3796158 - RNA, 18 nt, Human
auguuauuuauauauugg

SEQ ID NO: 3796159 - RNA, 20 nt, Human
auguuauuuauauauuggua

SEQ ID NO: 3796160 - RNA, 12 nt, Human
auguuauuuccc

SEQ ID NO: 3796161 - RNA, 17 nt, Human
auguuauuucugcaaac

SEQ ID NO: 3796162 - RNA, 15 nt, Human
auguuauuuguaaua

SEQ ID NO: 3796163 - RNA, 17 nt, Human
auguucaaagccacauu

SEQ ID NO: 3796164 - RNA, 22 nt, Human
auguucaacuggagacacuauu

SEQ ID NO: 3796165 - RNA, 12 nt, Human
auguucaauuau

SEQ ID NO: 3796166 - RNA, 19 nt, Human
auguucacgcaacuugaaa

SEQ ID NO: 3796167 - RNA, 14 nt, Human
auguucacuuuuga

SEQ ID NO: 3796168 - RNA, 18 nt, Human
auguucacuuuugacaaa

SEQ ID NO: 3796169 - RNA, 20 nt, Human
auguucacuuuugacaaagg

SEQ ID NO: 3796170 - RNA, 20 nt, Human
auguucagauugcuuugauu

SEQ ID NO: 3796171 - RNA, 16 nt, Human
auguucagcacugucc

SEQ ID NO: 3796172 - RNA, 22 nt, Human
auguucagcacugucccuugcc

SEQ ID NO: 3796173 - RNA, 18 nt, Human
auguucaguguaauuucu

SEQ ID NO: 3796174 - RNA, 11 nt, Human
auguucauuua

SEQ ID NO: 3796175 - RNA, 18 nt, Human
auguucauuuguuuguuu

SEQ ID NO: 3796176 - RNA, 18 nt, Human
auguuccaauaaacagga

SEQ ID NO: 3796177 - RNA, 14 nt, Human
auguuccacuaacc

SEQ ID NO: 3796178 - RNA, 14 nt, Human
auguucccuucucc

SEQ ID NO: 3796179 - RNA, 16 nt, Human
auguuccucaaagcuu

SEQ ID NO: 3796180 - RNA, 20 nt, Human
auguuccuucaagaucaugu

SEQ ID NO: 3796181 - RNA, 15 nt, Human
auguucggguguggg

SEQ ID NO: 3796182 - RNA, 15 nt, Human
auguucuaaggcucu

SEQ ID NO: 3796183 - RNA, 17 nt, Human
auguucuaaggcucuga

SEQ ID NO: 3796184 - RNA, 19 nt, Human
auguucuaaggcucugaga

SEQ ID NO: 3796185 - RNA, 21 nt, Human
auguucuagucugcuuuggua

SEQ ID NO: 3796186 - RNA, 14 nt, Human
auguucuauugugg

SEQ ID NO: 3796187 - RNA, 17 nt, Human
auguucucugaggacac

SEQ ID NO: 3796188 - RNA, 18 nt, Human
auguucugacauuaacag

SEQ ID NO: 3796189 - RNA, 20 nt, Human
auguucugacauuaacaguu

SEQ ID NO: 3796190 - RNA, 22 nt, Human
auguucugacccugcuucaaau

SEQ ID NO: 3796191 - RNA, 12 nt, Human
auguucugcccc

SEQ ID NO: 3796192 - RNA, 17 nt, Human
auguucugcccccagcc

SEQ ID NO: 3796193 - RNA, 12 nt, Human
auguucugggac

SEQ ID NO: 3796194 - RNA, 13 nt, Human
auguucugggaca

SEQ ID NO: 3796195 - RNA, 13 nt, Human
auguucugucccu

SEQ ID NO: 3796196 - RNA, 23 nt, Human
auguucugucccuugccccccug

SEQ ID NO: 3796197 - RNA, 18 nt, Human
auguucugugauacagaa

SEQ ID NO: 3796198 - RNA, 16 nt, Human
auguucuguuugcugu

SEQ ID NO: 3796199 - RNA, 13 nt, Human
auguucuuccagu

SEQ ID NO: 3796200 - RNA, 16 nt, Human
auguucuuuauauaca

SEQ ID NO: 3796201 - RNA, 22 nt, Human
auguucuuuauauacaauaaug

SEQ ID NO: 3796202 - RNA, 19 nt, Human
auguucuuuggaaaguaca

SEQ ID NO: 3796203 - RNA, 16 nt, Human
auguugaaaagucaaa

SEQ ID NO: 3796204 - RNA, 19 nt, Human
auguugaaaagucaaacug

SEQ ID NO: 3796205 - RNA, 19 nt, Human
auguugaacaaaauaaauu

SEQ ID NO: 3796206 - RNA, 19 nt, Human
auguugacauaccuuuuau

SEQ ID NO: 3796207 - RNA, 12 nt, Human
auguugacauuu

SEQ ID NO: 3796208 - RNA, 13 nt, Human
auguugacauuug

SEQ ID NO: 3796209 - RNA, 16 nt, Human
auguugagaaucccaa

SEQ ID NO: 3796210 - RNA, 18 nt, Human
cacugagcacuguuuucu

SEQ ID NO: 3796211 - RNA, 19 nt, Human
cacugagcacuguuuucua

SEQ ID NO: 3796212 - RNA, 22 nt, Human
cacugagcacuguuuucuagug

SEQ ID NO: 3796213 - RNA, 14 nt, Human
cacugagccccccc

SEQ ID NO: 3796214 - RNA, 13 nt, Human
cacugaggcaggg

SEQ ID NO: 3796215 - RNA, 17 nt, Human
cacugaggcagggaagu

SEQ ID NO: 3796216 - RNA, 16 nt, Human
cacugaggccugagac

SEQ ID NO: 3796217 - RNA, 19 nt, Human
cacugaggccugagaccca

SEQ ID NO: 3796218 - RNA, 21 nt, Human
cacugaggccugagacccagg

SEQ ID NO: 3796219 - RNA, 23 nt, Human
cacugaggccugagacccaggac

SEQ ID NO: 3796220 - RNA, 10 nt, Human
cacugagggc

SEQ ID NO: 3796221 - RNA, 13 nt, Human
cacugagggccac

SEQ ID NO: 3796222 - RNA, 15 nt, Human
cacugaguuuuccau

SEQ ID NO: 3796223 - RNA, 20 nt, Human
cacugauauaucaugaguga

SEQ ID NO: 3796224 - RNA, 19 nt, Human
cacugauauuuuaccucuu

SEQ ID NO: 3796225 - RNA, 22 nt, Human
cacugauauuuuaccucuuauu

SEQ ID NO: 3796226 - RNA, 15 nt, Human
cacugauccagcccu

SEQ ID NO: 3796227 - RNA, 17 nt, Human
cacugaugcugccccuc

SEQ ID NO: 3796228 - RNA, 16 nt, Human
cacugaugcuuagaug

SEQ ID NO: 3796229 - RNA, 19 nt, Human
cacugauuucacaacagau

SEQ ID NO: 3796230 - RNA, 21 nt, Human
cacugauuucacaacagauca

SEQ ID NO: 3796231 - RNA, 23 nt, Human
cacugauuugacauagucuggcu

SEQ ID NO: 3796232 - RNA, 14 nt, Human
cacugauuuggaga

SEQ ID NO: 3796233 - RNA, 13 nt, Human
cacugcaaccucc

SEQ ID NO: 3796234 - RNA, 19 nt, Human
cacugcaaccuccaccucg

SEQ ID NO: 3796235 - RNA, 23 nt, Human
cacugcaaccuccgccucuuggg

SEQ ID NO: 3796236 - RNA, 20 nt, Human
auguugcucagucucccuuu

SEQ ID NO: 3796237 - RNA, 20 nt, Human
auguugcugaaaaaugggca

SEQ ID NO: 3796238 - RNA, 16 nt, Human
auguuggauaaggaau

SEQ ID NO: 3796239 - RNA, 17 nt, Human
auguuggauaaggaauu

SEQ ID NO: 3796240 - RNA, 20 nt, Human
auguuggauuuauaaaugcu

SEQ ID NO: 3796241 - RNA, 17 nt, Human
auguuggccaggcuggu

SEQ ID NO: 3796242 - RNA, 21 nt, Human
auguuggccaggcuggucuaa

SEQ ID NO: 3796243 - RNA, 12 nt, Human
auguugggacug

SEQ ID NO: 3796244 - RNA, 15 nt, Human
auguugguugcacuu

SEQ ID NO: 3796245 - RNA, 16 nt, Human
auguugguugcacuuu

SEQ ID NO: 3796246 - RNA, 19 nt, Human
auguugguugcacuuugua

SEQ ID NO: 3796247 - RNA, 20 nt, Human
auguugguugcacuuuguag

SEQ ID NO: 3796248 - RNA, 18 nt, Human
auguugguuuacuuucaa

SEQ ID NO: 3796249 - RNA, 18 nt, Human
auguuguaaacaggaagc

SEQ ID NO: 3796250 - RNA, 14 nt, Human
auguuguaauauuu

SEQ ID NO: 3796251 - RNA, 14 nt, Human
auguuguaaugcug

SEQ ID NO: 3796252 - RNA, 18 nt, Human
auguuguaaugcugcacu

SEQ ID NO: 3796253 - RNA, 14 nt, Human
auguugucaaagag

SEQ ID NO: 3796254 - RNA, 14 nt, Human
auguugucuaagaa

SEQ ID NO: 3796255 - RNA, 17 nt, Human
auguugucuaagaaauu

SEQ ID NO: 3796256 - RNA, 14 nt, Human
auguugugaagaug

SEQ ID NO: 3796257 - RNA, 17 nt, Human
auguugugaauaauuac

SEQ ID NO: 3796258 - RNA, 16 nt, Human
auguugugguuuguug

SEQ ID NO: 3796259 - RNA, 17 nt, Human
auguuguuaugcuauua

SEQ ID NO: 3796260 - RNA, 13 nt, Human
auguuguuauuua

SEQ ID NO: 3796261 - RNA, 15 nt, Human
auguuguuauuuaaa

SEQ ID NO: 3796262 - RNA, 14 nt, Human
auguuguugaaagg

SEQ ID NO: 3796263 - RNA, 16 nt, Human
auguuguuuauaauaa

SEQ ID NO: 3796264 - RNA, 20 nt, Human
auguuguuuauaauaaaaau

SEQ ID NO: 3796265 - RNA, 22 nt, Human
auguuguuuauaauaaaaauau

SEQ ID NO: 3796266 - RNA, 19 nt, Human
auguuguuuuguacagaug

SEQ ID NO: 3796267 - RNA, 14 nt, Human
auguuuaaaacauc

SEQ ID NO: 3796268 - RNA, 20 nt, Human
auguuuaaaauuucuuagaa

SEQ ID NO: 3796269 - RNA, 14 nt, Human
auguuuaaacauuu

SEQ ID NO: 3796270 - RNA, 17 nt, Human
auguuuaacuuaaucaa

SEQ ID NO: 3796271 - RNA, 14 nt, Human
auguuuaagauuua

SEQ ID NO: 3796272 - RNA, 14 nt, Human
auguuuaaucauau

SEQ ID NO: 3796273 - RNA, 17 nt, Human
auguuuaaucuguuaug

SEQ ID NO: 3796274 - RNA, 19 nt, Human
auguuuacagaggacagua

SEQ ID NO: 3796275 - RNA, 19 nt, Human
auguuuagacuuuaacaua

SEQ ID NO: 3796276 - RNA, 21 nt, Human
auguuuagacuuuaacauaag

SEQ ID NO: 3796277 - RNA, 21 nt, Human
auguuuagauagggcugggca

SEQ ID NO: 3796278 - RNA, 14 nt, Human
auguuuaguaaacu

SEQ ID NO: 3796279 - RNA, 19 nt, Human
auguuuauaacuauucagu

SEQ ID NO: 3796280 - RNA, 23 nt, Human
auguuuauaucugcaaaaaaccu

SEQ ID NO: 3796281 - RNA, 20 nt, Human
auguuuaugcaaggaaggaa

SEQ ID NO: 3796282 - RNA, 13 nt, Human
auguuuauuaaau

SEQ ID NO: 3796283 - RNA, 17 nt, Human
auguuuauuaaaugcuu

SEQ ID NO: 3796284 - RNA, 18 nt, Human
auguuuauucuucuagag

SEQ ID NO: 3796285 - RNA, 21 nt, Human
auguuuauucuucuagaguuc

SEQ ID NO: 3796286 - RNA, 20 nt, Human
auguuuauuuaaaagagcag

SEQ ID NO: 3796287 - RNA, 13 nt, Human
auguuuauuuaua

SEQ ID NO: 3796288 - RNA, 13 nt, Human
auguuucaaacuu

SEQ ID NO: 3796289 - RNA, 14 nt, Human
auguuucaaacuuu

SEQ ID NO: 3796290 - RNA, 16 nt, Human
auguuucacacaaaca

SEQ ID NO: 3796291 - RNA, 22 nt, Human
auguuucauguuuugugacuau

SEQ ID NO: 3796292 - RNA, 24 nt, Human
auguuuccagcagaagacaaaaag

SEQ ID NO: 3796293 - RNA, 15 nt, Human
auguuuccagcauuc

SEQ ID NO: 3796294 - RNA, 16 nt, Human
auguuuccagcauucc

SEQ ID NO: 3796295 - RNA, 24 nt, Human
auguuucucuuugauuauuugcau

SEQ ID NO: 3796296 - RNA, 12 nt, Human
auguuucuggau

SEQ ID NO: 3796297 - RNA, 21 nt, Human
auguuucuuugaucaugaaua

SEQ ID NO: 3796298 - RNA, 18 nt, Human
auguuucuuuguaaugaa

SEQ ID NO: 3796299 - RNA, 18 nt, Human
auguuucuuuuguaugua

SEQ ID NO: 3796300 - RNA, 11 nt, Human
auguuugaaua

SEQ ID NO: 3796301 - RNA, 21 nt, Human
auguuugaauauggacaagag

SEQ ID NO: 3796302 - RNA, 23 nt, Human
auguuugagcaguggccuacaaa

SEQ ID NO: 3796303 - RNA, 19 nt, Human
auguuugcaccuuucuagu

SEQ ID NO: 3796304 - RNA, 13 nt, Human
auguuugcagggg

SEQ ID NO: 3796305 - RNA, 22 nt, Human
auguuugccucugccucugaca

SEQ ID NO: 3796306 - RNA, 16 nt, Human
auguuugcuauugaca

SEQ ID NO: 3796307 - RNA, 22 nt, Human
auguuugcucagaacacauucu

SEQ ID NO: 3796308 - RNA, 20 nt, Human
auguuugcugaacauuggag

SEQ ID NO: 3796309 - RNA, 15 nt, Human
auguuuggcucugcu

SEQ ID NO: 3796310 - RNA, 23 nt, Human
auguuugggcagaagggagaagg

SEQ ID NO: 3796311 - RNA, 12 nt, Human
auguuugggguc

SEQ ID NO: 3796312 - RNA, 13 nt, Human
auguuugguaaga

SEQ ID NO: 3796313 - RNA, 19 nt, Human
auguuuggugcauagaacu

SEQ ID NO: 3796314 - RNA, 21 nt, Human
auguuuggugcauagaacugg

SEQ ID NO: 3796315 - RNA, 14 nt, Human
auguuuguaaaacu

SEQ ID NO: 3796316 - RNA, 21 nt, Human
auguuugucucaguuggaaau

SEQ ID NO: 3796317 - RNA, 17 nt, Human
auguuugugcaguaacu

SEQ ID NO: 3796318 - RNA, 13 nt, Human
auguuuguggccu

SEQ ID NO: 3796319 - RNA, 14 nt, Human
auguuuguggccuc

SEQ ID NO: 3796320 - RNA, 12 nt, Human
auguuuuaaaga

SEQ ID NO: 3796321 - RNA, 15 nt, Human
auguuuuaaauguac

SEQ ID NO: 3796322 - RNA, 18 nt, Human
auguuuuaagaggcaggg

SEQ ID NO: 3796323 - RNA, 15 nt, Human
auguuuuaaggcuuc

SEQ ID NO: 3796324 - RNA, 15 nt, Human
auguuuuaauuccau

SEQ ID NO: 3796325 - RNA, 17 nt, Human
auguuuuaauuccauga

SEQ ID NO: 3796326 - RNA, 18 nt, Human
auguuuuaauuccaugaa

SEQ ID NO: 3796327 - RNA, 14 nt, Human
auguuuuacacugu

SEQ ID NO: 3796328 - RNA, 20 nt, Human
auguuuuaccguaauaauua

SEQ ID NO: 3796329 - RNA, 19 nt, Human
auguuuuagacaaauacuc

SEQ ID NO: 3796330 - RNA, 22 nt, Human
auguuuuagacaaauacucaug

SEQ ID NO: 3796331 - RNA, 17 nt, Human
auguuuuagcacagcgu

SEQ ID NO: 3796332 - RNA, 16 nt, Human
auguuuuauaaguuca

SEQ ID NO: 3796333 - RNA, 22 nt, Human
auguuuuaucguccagugacuu

SEQ ID NO: 3796334 - RNA, 18 nt, Human
auguuuuauuauuucuau

SEQ ID NO: 3796335 - RNA, 20 nt, Human
auguuuuauuauuucuauua

SEQ ID NO: 3796336 - RNA, 12 nt, Human
auguuuucagcu

SEQ ID NO: 3796337 - RNA, 17 nt, Human
auguuuucaggcuagau

SEQ ID NO: 3796338 - RNA, 18 nt, Human
auguuuuccagcuccuca

SEQ ID NO: 3796339 - RNA, 16 nt, Human
auguuuuccauuguuu

SEQ ID NO: 3796340 - RNA, 22 nt, Human
auguuuucgaaaaucaaauggu

SEQ ID NO: 3796341 - RNA, 18 nt, Human
auguuuucugaaaauaua

SEQ ID NO: 3796342 - RNA, 16 nt, Human
auguuuucuuugcaaa

SEQ ID NO: 3796343 - RNA, 21 nt, Human
auguuuucuuugcaaaguauu

SEQ ID NO: 3796344 - RNA, 18 nt, Human
auguuuucuuugcuuuaa

SEQ ID NO: 3796345 - RNA, 16 nt, Human
auguuuugacauuuuu

SEQ ID NO: 3796346 - RNA, 22 nt, Human
auguuuugguagauuaaauaua

SEQ ID NO: 3796347 - RNA, 15 nt, Human
auguuuugguaucug

SEQ ID NO: 3796348 - RNA, 23 nt, Human
auguuuugguaucuguucuuuaa

SEQ ID NO: 3796349 - RNA, 19 nt, Human
auguuuuguaaacauuuau

SEQ ID NO: 3796350 - RNA, 15 nt, Human
auguuuuguaaacuu

SEQ ID NO: 3796351 - RNA, 16 nt, Human
auguuuuguaaacuuu

SEQ ID NO: 3796352 - RNA, 18 nt, Human
auguuuuguaaacuuuga

SEQ ID NO: 3796353 - RNA, 20 nt, Human
auguuuuguaaacuuugaaa

SEQ ID NO: 3796354 - RNA, 21 nt, Human
caaagccuguucauggcagau

SEQ ID NO: 3796355 - RNA, 12 nt, Human
caaagccuucau

SEQ ID NO: 3796356 - RNA, 16 nt, Human
caaagccuucucccua

SEQ ID NO: 3796357 - RNA, 17 nt, Human
caaagccuugugucuac

SEQ ID NO: 3796358 - RNA, 19 nt, Human
caaagcgaauuuuaaaaga

SEQ ID NO: 3796359 - RNA, 14 nt, Human
caaagcuaggccug

SEQ ID NO: 3796360 - RNA, 16 nt, Human
caaagcuaggccuggc

SEQ ID NO: 3796361 - RNA, 18 nt, Human
caaagcuaggccuggcca

SEQ ID NO: 3796362 - RNA, 20 nt, Human
caaagcugacgaggcugggc

SEQ ID NO: 3796363 - RNA, 12 nt, Human
caaagcugagcc

SEQ ID NO: 3796364 - RNA, 14 nt, Human
caaagcugcccacu

SEQ ID NO: 3796365 - RNA, 23 nt, Human
caaagcugcuaaaucuccuauuu

SEQ ID NO: 3796366 - RNA, 17 nt, Human
caaagcuggcucaccuu

SEQ ID NO: 3796367 - RNA, 20 nt, Human
caaagcuguuaaacuguuag

SEQ ID NO: 3796368 - RNA, 22 nt, Human
caaagcuguuaaacuguuagca

SEQ ID NO: 3796369 - RNA, 22 nt, Human
caaagcuuagcaggagaggaga

SEQ ID NO: 3796370 - RNA, 15 nt, Human
caaagcuuccauucc

SEQ ID NO: 3796371 - RNA, 21 nt, Human
caaagcuucuaucccaggagg

SEQ ID NO: 3796372 - RNA, 14 nt, Human
caaagcuugaagau

SEQ ID NO: 3796373 - RNA, 22 nt, Human
caaagcuuggaagagccugcag

SEQ ID NO: 3796374 - RNA, 16 nt, Human
caaagcuuuccugccc

SEQ ID NO: 3796375 - RNA, 23 nt, Human
caaagcuuuccugccccaggccu

SEQ ID NO: 3796376 - RNA, 17 nt, Human
caaagcuuucuuuguuu

SEQ ID NO: 3796377 - RNA, 20 nt, Human
caaagcuuuuagaaauacug

SEQ ID NO: 3796378 - RNA, 12 nt, Human
caaaggaagcac

SEQ ID NO: 3796379 - RNA, 14 nt, Human
caaaggaagcacau

SEQ ID NO: 3796380 - RNA, 20 nt, Human
caaaggaagcuuucucugcu

SEQ ID NO: 3796381 - RNA, 21 nt, Human
caaaggaaggacccugaggcc

SEQ ID NO: 3796382 - RNA, 17 nt, Human
caaaggaagguggaugg

SEQ ID NO: 3796383 - RNA, 20 nt, Human
caaaggaagugcccccuccc

SEQ ID NO: 3796384 - RNA, 19 nt, Human
caaaggaaucuccaguuuu

SEQ ID NO: 3796385 - RNA, 22 nt, Human
caaaggaaucuccaguuuucag

SEQ ID NO: 3796386 - RNA, 14 nt, Human
caaaggagauugga

SEQ ID NO: 3796387 - RNA, 11 nt, Human
caaaggagccu

SEQ ID NO: 3796388 - RNA, 15 nt, Human
caaaggagccuguga

SEQ ID NO: 3796389 - RNA, 17 nt, Human
caaaggagcucgaagga

SEQ ID NO: 3796390 - RNA, 17 nt, Human
caaaggaggcuggcagg

SEQ ID NO: 3796391 - RNA, 20 nt, Human
caaaggagggucaggaagga

SEQ ID NO: 3796392 - RNA, 14 nt, Human
caaaggaugugaua

SEQ ID NO: 3796393 - RNA, 19 nt, Human
caaaggauuaauugcugca

SEQ ID NO: 3796394 - RNA, 20 nt, Human
caaaggcaaguuaagagaaa

SEQ ID NO: 3796395 - RNA, 14 nt, Human
caaaggccaaacug

SEQ ID NO: 3796396 - RNA, 19 nt, Human
caaaggccagaccugcaga

SEQ ID NO: 3796397 - RNA, 13 nt, Human
caaaggccagggu

SEQ ID NO: 3796398 - RNA, 17 nt, Human
caaaggccccagcaucu

SEQ ID NO: 3796399 - RNA, 13 nt, Human
caaaggcugggac

SEQ ID NO: 3796400 - RNA, 18 nt, Human
caaaggcuguauucagca

SEQ ID NO: 3796401 - RNA, 19 nt, Human
caaaggcuguauucagcaa

SEQ ID NO: 3796402 - RNA, 17 nt, Human
caaagggaaauaucauu

SEQ ID NO: 3796403 - RNA, 18 nt, Human
caaagggaaauaucauuu

SEQ ID NO: 3796404 - RNA, 14 nt, Human
caaagggagagaga

SEQ ID NO: 3796405 - RNA, 15 nt, Human
caaagggagcagaac

SEQ ID NO: 3796406 - RNA, 18 nt, Human
caaagggagucugccagg

SEQ ID NO: 3796407 - RNA, 20 nt, Human
caaagggcacagcaucugua

SEQ ID NO: 3796408 - RNA, 23 nt, Human
caaagggcacagcaucuguaguc

SEQ ID NO: 3796409 - RNA, 20 nt, Human
caaagggccugcccagacaa

SEQ ID NO: 3796410 - RNA, 14 nt, Human
caaagggcugaaag

SEQ ID NO: 3796411 - RNA, 15 nt, Human
caaaggggacaggcc

SEQ ID NO: 3796412 - RNA, 18 nt, Human
caaaggggacaggccuca

SEQ ID NO: 3796413 - RNA, 23 nt, Human
caaaggggaucauaaaguuagaa

SEQ ID NO: 3796414 - RNA, 22 nt, Human
caaagggggaggcuaaagccca

SEQ ID NO: 3796415 - RNA, 24 nt, Human
caaaggguacuuccacugauggaa

SEQ ID NO: 3796416 - RNA, 23 nt, Human
caaaggguaucaggugcugccau

SEQ ID NO: 3796417 - RNA, 16 nt, Human
caaaggguccagaagg

SEQ ID NO: 3796418 - RNA, 20 nt, Human
caaagggugaagcuauuuau

SEQ ID NO: 3796419 - RNA, 18 nt, Human
caaaggguuuuaauguag

SEQ ID NO: 3796420 - RNA, 13 nt, Human
caaaggucuuuuu

SEQ ID NO: 3796421 - RNA, 20 nt, Human
caaaggucuuuuuaaaccag

SEQ ID NO: 3796422 - RNA, 14 nt, Human
caaagguggcucuc

SEQ ID NO: 3796423 - RNA, 21 nt, Human
caaagguucuagguuucaaag

SEQ ID NO: 3796424 - RNA, 22 nt, Human
caaagguucuagguuucaaaga

SEQ ID NO: 3796425 - RNA, 16 nt, Human
caaagguuuaaaugaa

SEQ ID NO: 3796426 - RNA, 16 nt, Human
caaagguuuggaagga

SEQ ID NO: 3796427 - RNA, 17 nt, Human
caaagguuuggaaggag

SEQ ID NO: 3796428 - RNA, 21 nt, Human
caaagguuuggaaggagcaga

SEQ ID NO: 3796429 - RNA, 14 nt, Human
caaaguaaaagaaa

SEQ ID NO: 3796430 - RNA, 18 nt, Human
caaaguaaugacagaaca

SEQ ID NO: 3796431 - RNA, 18 nt, Human
caaaguaauuuggaaauu

SEQ ID NO: 3796432 - RNA, 20 nt, Human
caaaguacacuguuucaaac

SEQ ID NO: 3796433 - RNA, 15 nt, Human
caaaguacagaauuu

SEQ ID NO: 3796434 - RNA, 20 nt, Human
caaaguacagguacuuuguc

SEQ ID NO: 3796435 - RNA, 14 nt, Human
caaaguagaagucu

SEQ ID NO: 3796436 - RNA, 21 nt, Human
caaaguagaagucuuagaugu

SEQ ID NO: 3796437 - RNA, 17 nt, Human
caaaguagaucaugcau

SEQ ID NO: 3796438 - RNA, 18 nt, Human
caaaguauaaauuugugu

SEQ ID NO: 3796439 - RNA, 19 nt, Human
caaaguauaaauuugugua

SEQ ID NO: 3796440 - RNA, 19 nt, Human
caaaguaucaggacgagaa

SEQ ID NO: 3796441 - RNA, 19 nt, Human
caaaguaucccuacuguaa

SEQ ID NO: 3796442 - RNA, 21 nt, Human
caaaguaucccuacuguaauu

SEQ ID NO: 3796443 - RNA, 14 nt, Human
caaaguauuaagca

SEQ ID NO: 3796444 - RNA, 16 nt, Human
caaaguauuaagcaua

SEQ ID NO: 3796445 - RNA, 19 nt, Human
caaaguauuaagcauauau

SEQ ID NO: 3796446 - RNA, 16 nt, Human
caaaguauuguaaauu

SEQ ID NO: 3796447 - RNA, 22 nt, Human
caaaguauuuuuuuaucuuggg

SEQ ID NO: 3796448 - RNA, 16 nt, Human
caaagucaagccacau

SEQ ID NO: 3796449 - RNA, 20 nt, Human
caaagucagaacaaauucag

SEQ ID NO: 3796450 - RNA, 17 nt, Human
caaagucaugauguuuu

SEQ ID NO: 3796451 - RNA, 19 nt, Human
caaagucuaaaguuuacag

SEQ ID NO: 3796452 - RNA, 20 nt, Human
caaagucuaaaguuuacagu

SEQ ID NO: 3796453 - RNA, 14 nt, Human
caaagucuguguga

SEQ ID NO: 3796454 - RNA, 23 nt, Human
caaagugaaggacauagagguau

SEQ ID NO: 3796455 - RNA, 12 nt, Human
caaagugcaagg

SEQ ID NO: 3796456 - RNA, 22 nt, Human
caaagugcuauuacgaaguuca

SEQ ID NO: 3796457 - RNA, 15 nt, Human
caaagugcugagauu

SEQ ID NO: 3796458 - RNA, 20 nt, Human
caaagugcugggauuacagg

SEQ ID NO: 3796459 - RNA, 23 nt, Human
caaaguggaaggaaagaugcuca

SEQ ID NO: 3796460 - RNA, 13 nt, Human
caaaguggcaaaa

SEQ ID NO: 3796461 - RNA, 22 nt, Human
caaaguguauuaggaaguguuu

SEQ ID NO: 3796462 - RNA, 23 nt, Human
caaaguguauuuuauaaaauuaa

SEQ ID NO: 3796463 - RNA, 12 nt, Human
caaaguguguau

SEQ ID NO: 3796464 - RNA, 11 nt, Human
caaaguguuaa

SEQ ID NO: 3796465 - RNA, 14 nt, Human
caggccuccuacag

SEQ ID NO: 3796466 - RNA, 12 nt, Human
caggccucucca

SEQ ID NO: 3796467 - RNA, 17 nt, Human
caggccucuguguccuu

SEQ ID NO: 3796468 - RNA, 22 nt, Human
caggccucuguguccuucccug

SEQ ID NO: 3796469 - RNA, 16 nt, Human
caggccugagauuuca

SEQ ID NO: 3796470 - RNA, 21 nt, Human
caggccugagauuucaucugc

SEQ ID NO: 3796471 - RNA, 23 nt, Human
caggccugagauuucaucugcuc

SEQ ID NO: 3796472 - RNA, 12 nt, Human
caggccugcagc

SEQ ID NO: 3796473 - RNA, 12 nt, Human
caggccugccag

SEQ ID NO: 3796474 - RNA, 17 nt, Human
caggccugccucccacu

SEQ ID NO: 3796475 - RNA, 20 nt, Human
caggccuggcaaguggguga

SEQ ID NO: 3796476 - RNA, 16 nt, Human
caggccugggucugug

SEQ ID NO: 3796477 - RNA, 19 nt, Human
caggccuguguagcuguga

SEQ ID NO: 3796478 - RNA, 23 nt, Human
caggccuguguagcugugaccug

SEQ ID NO: 3796479 - RNA, 14 nt, Human
caggccuguugcuu

SEQ ID NO: 3796480 - RNA, 16 nt, Human
caggccuguugcuuuu

SEQ ID NO: 3796481 - RNA, 16 nt, Human
caggccuuaucuccaa

SEQ ID NO: 3796482 - RNA, 17 nt, Human
caggccuuugagcucag

SEQ ID NO: 3796483 - RNA, 20 nt, Human
caggcgagagaggagccaga

SEQ ID NO: 3796484 - RNA, 16 nt, Human
caggcgauccaccugu

SEQ ID NO: 3796485 - RNA, 15 nt, Human
caggcgccccuuccc

SEQ ID NO: 3796486 - RNA, 15 nt, Human
caggcgcuaauucaa

SEQ ID NO: 3796487 - RNA, 16 nt, Human
caggcgcuagcacagc

SEQ ID NO: 3796488 - RNA, 19 nt, Human
caggcgcuagcacagcucc

SEQ ID NO: 3796489 - RNA, 20 nt, Human
caggcgcuagcacagcuccc

SEQ ID NO: 3796490 - RNA, 16 nt, Human
caggcgggaggaggug

SEQ ID NO: 3796491 - RNA, 15 nt, Human
caggcgggcucaagg

SEQ ID NO: 3796492 - RNA, 15 nt, Human
caggcggugggcacc

SEQ ID NO: 3796493 - RNA, 18 nt, Human
caggcgugagccaccucg

SEQ ID NO: 3796494 - RNA, 23 nt, Human
caggcuaaacauccaauauuuuc

SEQ ID NO: 3796495 - RNA, 14 nt, Human
caggcuacucuccu

SEQ ID NO: 3796496 - RNA, 15 nt, Human
caggcuacucuccuc

SEQ ID NO: 3796497 - RNA, 16 nt, Human
caggcuacucuccucg

SEQ ID NO: 3796498 - RNA, 15 nt, Human
caguuaagaaaaaaa

SEQ ID NO: 3796499 - RNA, 20 nt, Human
caguuaagaaaaaaauaauu

SEQ ID NO: 3796500 - RNA, 22 nt, Human
caguuaagaaaaaaauaauuuu

SEQ ID NO: 3796501 - RNA, 17 nt, Human
caguuaagccuuuggaa

SEQ ID NO: 3796502 - RNA, 15 nt, Human
caguuaaguuuuucc

SEQ ID NO: 3796503 - RNA, 15 nt, Human
caguuaaucuugcuu

SEQ ID NO: 3796504 - RNA, 14 nt, Human
caguuaauuuuucc

SEQ ID NO: 3796505 - RNA, 16 nt, Human
caguuaauuuuuccaa

SEQ ID NO: 3796506 - RNA, 22 nt, Human
caguuacaaauuauaauguauu

SEQ ID NO: 3796507 - RNA, 12 nt, Human
caguuacacaug

SEQ ID NO: 3796508 - RNA, 14 nt, Human
caguuacagaaagu

SEQ ID NO: 3796509 - RNA, 15 nt, Human
caguuacagaaagug

SEQ ID NO: 3796510 - RNA, 22 nt, Human
caguuaccacacaucuaugaua

SEQ ID NO: 3796511 - RNA, 18 nt, Human
caguuaccauuaaaccau

SEQ ID NO: 3796512 - RNA, 14 nt, Human
caguuacucagccc

SEQ ID NO: 3796513 - RNA, 13 nt, Human
caguuacucugaa

SEQ ID NO: 3796514 - RNA, 15 nt, Human
caguuacucugaagg

SEQ ID NO: 3796515 - RNA, 16 nt, Human
caguuacucugaaggg

SEQ ID NO: 3796516 - RNA, 15 nt, Human
caguuacuuuuccuu

SEQ ID NO: 3796517 - RNA, 19 nt, Human
caguuacuuuuccuugcau

SEQ ID NO: 3796518 - RNA, 17 nt, Human
caguuagagaugccucc

SEQ ID NO: 3796519 - RNA, 15 nt, Human
caguuagcaaacuuu

SEQ ID NO: 3796520 - RNA, 19 nt, Human
caguuaggguugaguuacu

SEQ ID NO: 3796521 - RNA, 18 nt, Human
caguuauauuuugcaguu

SEQ ID NO: 3796522 - RNA, 16 nt, Human
caguuaucuaaguuaa

SEQ ID NO: 3796523 - RNA, 22 nt, Human
caguuaugauuuuuuuuucaua

SEQ ID NO: 3796524 - RNA, 20 nt, Human
caguuaugugaaugaucucu

SEQ ID NO: 3796525 - RNA, 16 nt, Human
caguuaugugaccuca

SEQ ID NO: 3796526 - RNA, 21 nt, Human
caguuaugugaccucacgugc

SEQ ID NO: 3796527 - RNA, 17 nt, Human
caguuauuauauuuaca

SEQ ID NO: 3796528 - RNA, 22 nt, Human
caguuauuauauuuacaaaugg

SEQ ID NO: 3796529 - RNA, 20 nt, Human
caguuauugguggaaucuuu

SEQ ID NO: 3796530 - RNA, 21 nt, Human
caguuauugguggaaucuuua

SEQ ID NO: 3796531 - RNA, 17 nt, Human
caguuauugucccuggc

SEQ ID NO: 3796532 - RNA, 14 nt, Human
caguuauuuauagu

SEQ ID NO: 3796533 - RNA, 14 nt, Human
caguuauuuugaua

SEQ ID NO: 3796534 - RNA, 21 nt, Human
caguucaaaauucuaaaugua

SEQ ID NO: 3796535 - RNA, 15 nt, Human
caguucaaagucaug

SEQ ID NO: 3796536 - RNA, 19 nt, Human
caguucaaucucccgcugc

SEQ ID NO: 3796537 - RNA, 18 nt, Human
caguucacacccugcaag

SEQ ID NO: 3796538 - RNA, 13 nt, Human
caguucagcacca

SEQ ID NO: 3796539 - RNA, 16 nt, Human
caguucagcaccaccc

SEQ ID NO: 3796540 - RNA, 17 nt, Human
caguucagcaccacccu

SEQ ID NO: 3796541 - RNA, 20 nt, Human
caguucaggagucccaagga

SEQ ID NO: 3796542 - RNA, 23 nt, Human
caguucaguaauaaacuguguuu

SEQ ID NO: 3796543 - RNA, 21 nt, Human
caguucaguaccuggaggagg

SEQ ID NO: 3796544 - RNA, 19 nt, Human
caguucaguggcagggcuc

SEQ ID NO: 3796545 - RNA, 16 nt, Human
caguucaucgauuuuc

SEQ ID NO: 3796546 - RNA, 19 nt, Human
caguucaucgauuuucuau

SEQ ID NO: 3796547 - RNA, 23 nt, Human
caguuccaaucaguagcuuaaga

SEQ ID NO: 3796548 - RNA, 23 nt, Human
caguucccagaaucaaagcaaug

SEQ ID NO: 3796549 - RNA, 17 nt, Human
caguuccccuggaagca

SEQ ID NO: 3796550 - RNA, 14 nt, Human
caguucccuuggcc

SEQ ID NO: 3796551 - RNA, 20 nt, Human
caguuccggauuggcuugug

SEQ ID NO: 3796552 - RNA, 13 nt, Human
caguuccucgccc

SEQ ID NO: 3796553 - RNA, 14 nt, Human
caguuccucgcccu

SEQ ID NO: 3796554 - RNA, 17 nt, Human
caguuccucgcccuggg

SEQ ID NO: 3796555 - RNA, 18 nt, Human
caguuccucgcccugggu

SEQ ID NO: 3796556 - RNA, 19 nt, Human
caguuccuguggcucccuc

SEQ ID NO: 3796557 - RNA, 21 nt, Human
caguucgacucugugcuggcc

SEQ ID NO: 3796558 - RNA, 20 nt, Human
caguucgccuggagcccucc

SEQ ID NO: 3796559 - RNA, 17 nt, Human
caguucuacagaaaaac

SEQ ID NO: 3796560 - RNA, 17 nt, Human
caguucuacucaggcug

SEQ ID NO: 3796561 - RNA, 18 nt, Human
caguucuaguuugcauuc

SEQ ID NO: 3796562 - RNA, 18 nt, Human
caguucugcaaauagaaa

SEQ ID NO: 3796563 - RNA, 21 nt, Human
caguucugcuccucuccaggc

SEQ ID NO: 3796564 - RNA, 23 nt, Human
caguucuggauggugugccuucc

SEQ ID NO: 3796565 - RNA, 17 nt, Human
caguucugggugcuccc

SEQ ID NO: 3796566 - RNA, 12 nt, Human
caguucuuagcc

SEQ ID NO: 3796567 - RNA, 14 nt, Human
caguucuugaguug

SEQ ID NO: 3796568 - RNA, 20 nt, Human
caguucuuugggccagacau

SEQ ID NO: 3796569 - RNA, 14 nt, Human
caguugaaaagacu

SEQ ID NO: 3796570 - RNA, 22 nt, Human
caguugaaaagacuccaaagaa

SEQ ID NO: 3796571 - RNA, 21 nt, Human
caguugaauuuauggaaucua

SEQ ID NO: 3796572 - RNA, 14 nt, Human
caguugacagcagg

SEQ ID NO: 3796573 - RNA, 16 nt, Human
caguugagacaagaaa

SEQ ID NO: 3796574 - RNA, 13 nt, Human
caguugcacagca

SEQ ID NO: 3796575 - RNA, 15 nt, Human
caguugcacagcauc

SEQ ID NO: 3796576 - RNA, 17 nt, Human
caguugcacagcaucuc

SEQ ID NO: 3796577 - RNA, 20 nt, Human
caguugcacuuggccucugg

SEQ ID NO: 3796578 - RNA, 19 nt, Human
caguugcagucacucuagu

SEQ ID NO: 3796579 - RNA, 15 nt, Human
caguugccaccaccu

SEQ ID NO: 3796580 - RNA, 16 nt, Human
caguugccaccaccuc

SEQ ID NO: 3796581 - RNA, 18 nt, Human
caguugccaccaccucug

SEQ ID NO: 3796582 - RNA, 13 nt, Human
caguugccuuuua

SEQ ID NO: 3796583 - RNA, 15 nt, Human
caguugcuaaacacu

SEQ ID NO: 3796584 - RNA, 21 nt, Human
caguugcuaaacacugcgcuu

SEQ ID NO: 3796585 - RNA, 13 nt, Human
caguugcugguaa

SEQ ID NO: 3796586 - RNA, 23 nt, Human
caguugcugguaaaaugaagaau

SEQ ID NO: 3796587 - RNA, 14 nt, Human
caguugcuugucuu

SEQ ID NO: 3796588 - RNA, 17 nt, Human
caguuggagcuccagcc

SEQ ID NO: 3796589 - RNA, 22 nt, Human
caguuggaguuuuuuguaccaa

SEQ ID NO: 3796590 - RNA, 17 nt, Human
caguuggccagagagcc

SEQ ID NO: 3796591 - RNA, 18 nt, Human
caguuggccagagagccu

SEQ ID NO: 3796592 - RNA, 14 nt, Human
caguugggagcacu

SEQ ID NO: 3796593 - RNA, 17 nt, Human
caguugggagcacugga

SEQ ID NO: 3796594 - RNA, 17 nt, Human
caguugguaacuuuugu

SEQ ID NO: 3796595 - RNA, 20 nt, Human
caguuggucccccuuccaug

SEQ ID NO: 3796596 - RNA, 22 nt, Human
caguuggucccccuuccaugga

SEQ ID NO: 3796597 - RNA, 22 nt, Human
caguuguaacauucuauuucaa

SEQ ID NO: 3796598 - RNA, 19 nt, Human
caguuguagaauguauugu

SEQ ID NO: 3796599 - RNA, 21 nt, Human
caguuguaggguuacagagac

SEQ ID NO: 3796600 - RNA, 23 nt, Human
caguuguaggguuacagagaccu

SEQ ID NO: 3796601 - RNA, 14 nt, Human
caguuguauuuaac

SEQ ID NO: 3796602 - RNA, 18 nt, Human
caguugucccgauuguaa

SEQ ID NO: 3796603 - RNA, 21 nt, Human
caguugucccgauuguaacuc

SEQ ID NO: 3796604 - RNA, 22 nt, Human
caguugucccgauuguaacuca

SEQ ID NO: 3796605 - RNA, 12 nt, Human
caguuguccucc

SEQ ID NO: 3796606 - RNA, 13 nt, Human
caguugucucuga

SEQ ID NO: 3796607 - RNA, 15 nt, Human
caguugucucugaug

SEQ ID NO: 3796608 - RNA, 17 nt, Human
caguugucucugaugca

SEQ ID NO: 3796609 - RNA, 12 nt, Human
caguugugcagc

SEQ ID NO: 3796610 - RNA, 21 nt, Human
caguuguggugugaguaucag

SEQ ID NO: 3796611 - RNA, 17 nt, Human
caguuguuagugugucu

SEQ ID NO: 3796612 - RNA, 21 nt, Human
caguuguuaguuacuaccucc

SEQ ID NO: 3796613 - RNA, 23 nt, Human
caguuguucaauaauaaauauuu

SEQ ID NO: 3796614 - RNA, 12 nt, Human
caguuguucuuu

SEQ ID NO: 3796615 - RNA, 15 nt, Human
caguuguuggccucc

SEQ ID NO: 3796616 - RNA, 21 nt, Human
caguuguuuguuuuugcuugu

SEQ ID NO: 3796617 - RNA, 16 nt, Human
caguuuaaaaaaauug

SEQ ID NO: 3796618 - RNA, 15 nt, Human
caguuuaaaagcacg

SEQ ID NO: 3796619 - RNA, 12 nt, Human
caguuuaaagca

SEQ ID NO: 3796620 - RNA, 13 nt, Human
caguuuaaugaag

SEQ ID NO: 3796621 - RNA, 16 nt, Human
aaaccauuuuuguuac

SEQ ID NO: 3796622 - RNA, 18 nt, Human
aaaccauuuuuguuacuc

SEQ ID NO: 3796623 - RNA, 23 nt, Human
aaacccaccuuguuggagccugc

SEQ ID NO: 3796624 - RNA, 22 nt, Human
aaacccagcugcaccccuuccu

SEQ ID NO: 3796625 - RNA, 19 nt, Human
aaacccauaggcccacaca

SEQ ID NO: 3796626 - RNA, 17 nt, Human
aaaccccaaacagugac

SEQ ID NO: 3796627 - RNA, 16 nt, Human
aaacccgacagaggga

SEQ ID NO: 3796628 - RNA, 18 nt, Human
aaacccgacagagggaag

SEQ ID NO: 3796629 - RNA, 15 nt, Human
aaacccgaggguuga

SEQ ID NO: 3796630 - RNA, 21 nt, Human
aaacccguuuuaugauuuacu

SEQ ID NO: 3796631 - RNA, 13 nt, Human
aaacccuagccuu

SEQ ID NO: 3796632 - RNA, 15 nt, Human
aaacccuagccuugc

SEQ ID NO: 3796633 - RNA, 17 nt, Human
aaacccuagccuugcuu

SEQ ID NO: 3796634 - RNA, 18 nt, Human
aaacccuagccuugcuug

SEQ ID NO: 3796635 - RNA, 21 nt, Human
aaacccuagguucccgguccc

SEQ ID NO: 3796636 - RNA, 14 nt, Human
aaacccucagagcc

SEQ ID NO: 3796637 - RNA, 14 nt, Human
aaacccugucaaac

SEQ ID NO: 3796638 - RNA, 15 nt, Human
aaacccugucaaaca

SEQ ID NO: 3796639 - RNA, 17 nt, Human
aaacccugucaaacauu

SEQ ID NO: 3796640 - RNA, 14 nt, Human
aaacccuucagugc

SEQ ID NO: 3796641 - RNA, 16 nt, Human
aaacccuugaaaagac

SEQ ID NO: 3796642 - RNA, 16 nt, Human
aaaccgaauaaauguu

SEQ ID NO: 3796643 - RNA, 20 nt, Human
caguuugaucacacuauuuu

SEQ ID NO: 3796644 - RNA, 17 nt, Human
caguuugcaaaaaaugu

SEQ ID NO: 3796645 - RNA, 18 nt, Human
caguuugcaccugucccc

SEQ ID NO: 3796646 - RNA, 21 nt, Human
caguuugcagaaaagcaccug

SEQ ID NO: 3796647 - RNA, 16 nt, Human
caguuugguauuugcg

SEQ ID NO: 3796648 - RNA, 21 nt, Human
caguuugguugguaacucugu

SEQ ID NO: 3796649 - RNA, 15 nt, Human
caguuuguaaauguu

SEQ ID NO: 3796650 - RNA, 16 nt, Human
caguuuguaaauguua

SEQ ID NO: 3796651 - RNA, 17 nt, Human
caguuuguaaauguuau

SEQ ID NO: 3796652 - RNA, 23 nt, Human
caguuuguaaauguuauuucugc

SEQ ID NO: 3796653 - RNA, 16 nt, Human
caguuugucacaugaa

SEQ ID NO: 3796654 - RNA, 23 nt, Human
caguuugugugucuuaauuauua

SEQ ID NO: 3796655 - RNA, 21 nt, Human
caguuuguuaguaugaggcau

SEQ ID NO: 3796656 - RNA, 13 nt, Human
caguuuguuuaca

SEQ ID NO: 3796657 - RNA, 16 nt, Human
caguuuguuuacacac

SEQ ID NO: 3796658 - RNA, 18 nt, Human
caguuuguuuacacacgu

SEQ ID NO: 3796659 - RNA, 14 nt, Human
caguuuuaacaaau

SEQ ID NO: 3796660 - RNA, 12 nt, Human
caguuuuaacug

SEQ ID NO: 3796661 - RNA, 15 nt, Human
caguuuuaacugugg

SEQ ID NO: 3796662 - RNA, 16 nt, Human
caguuuuaacugugga

SEQ ID NO: 3796663 - RNA, 22 nt, Human
caguuuuaacuguggauauugu

SEQ ID NO: 3796664 - RNA, 21 nt, Human
caguuuuaugcucuuuuuuac

SEQ ID NO: 3796665 - RNA, 22 nt, Human
caguuuucaagucaaauuaaua

SEQ ID NO: 3796666 - RNA, 13 nt, Human
caguuuucauagu

SEQ ID NO: 3796667 - RNA, 12 nt, Human
caguuuuccaug

SEQ ID NO: 3796668 - RNA, 14 nt, Human
caguuuuccaugaa

SEQ ID NO: 3796669 - RNA, 16 nt, Human
caguuuuccaugaaaa

SEQ ID NO: 3796670 - RNA, 18 nt, Human
caguuuuccaugaaaacg

SEQ ID NO: 3796671 - RNA, 19 nt, Human
caguuuuccaugaaaacgu

SEQ ID NO: 3796672 - RNA, 14 nt, Human
caguuuucugagaa

SEQ ID NO: 3796673 - RNA, 23 nt, Human
caguuuugacaucagccagcugc

SEQ ID NO: 3796674 - RNA, 20 nt, Human
caguuuugaccuaacauacc

SEQ ID NO: 3796675 - RNA, 19 nt, Human
caguuuugguguguaacuu

SEQ ID NO: 3796676 - RNA, 22 nt, Human
caguuuuuaacucuacugugua

SEQ ID NO: 3796677 - RNA, 22 nt, Human
caguuuuucagaguggaaugcu

SEQ ID NO: 3796678 - RNA, 12 nt, Human
caguuuuucagg

SEQ ID NO: 3796679 - RNA, 21 nt, Human
caguuuuucauaagauauuuu

SEQ ID NO: 3796680 - RNA, 23 nt, Human
caguuuuucauaagauauuuuau

SEQ ID NO: 3796681 - RNA, 20 nt, Human
caguuuuucauuuuaaaaag

SEQ ID NO: 3796682 - RNA, 15 nt, Human
caguuuuucuuaaua

SEQ ID NO: 3796683 - RNA, 13 nt, Human
caguuuuuguguu

SEQ ID NO: 3796684 - RNA, 19 nt, Human
caguuuuuuuuuucuuguc

SEQ ID NO: 3796685 - RNA, 23 nt, Human
cauaaaaacaacuuuauacccag

SEQ ID NO: 3796686 - RNA, 23 nt, Human
cauaaaaagccugcaauuucaua

SEQ ID NO: 3796687 - RNA, 13 nt, Human
cauaaaaagcuga

SEQ ID NO: 3796688 - RNA, 13 nt, Human
cauaaaaaggaca

SEQ ID NO: 3796689 - RNA, 22 nt, Human
cauaaaaaggacaucagcaaac

SEQ ID NO: 3796690 - RNA, 18 nt, Human
cauaaaaaguuaaaaaaa

SEQ ID NO: 3796691 - RNA, 16 nt, Human
cauaaaagaaauaaac

SEQ ID NO: 3796692 - RNA, 19 nt, Human
cauaaaauaaaguauauau

SEQ ID NO: 3796693 - RNA, 20 nt, Human
cauaaaauaaaguauauaua

SEQ ID NO: 3796694 - RNA, 19 nt, Human
cauaaaauaaggagcauau

SEQ ID NO: 3796695 - RNA, 14 nt, Human
cauaaaaucaaaac

SEQ ID NO: 3796696 - RNA, 20 nt, Human
cauaaacaagaccacguuuc

SEQ ID NO: 3796697 - RNA, 13 nt, Human
cauaaacugacuu

SEQ ID NO: 3796698 - RNA, 16 nt, Human
cauaaacuucaugguc

SEQ ID NO: 3796699 - RNA, 18 nt, Human
cauaaagaagauguuuaa

SEQ ID NO: 3796700 - RNA, 12 nt, Human
cauaaagaagca

SEQ ID NO: 3796701 - RNA, 21 nt, Human
cauaaagaagcaauaaagaag

SEQ ID NO: 3796702 - RNA, 13 nt, Human
cauaaagcaaaua

SEQ ID NO: 3796703 - RNA, 16 nt, Human
cauaaagcaggcagaa

SEQ ID NO: 3796704 - RNA, 22 nt, Human
cauaaagccauguuuccucuuu

SEQ ID NO: 3796705 - RNA, 21 nt, Human
cauaaagccuuggauguauau

SEQ ID NO: 3796706 - RNA, 20 nt, Human
cauaaagcucaaaugaaaug

SEQ ID NO: 3796707 - RNA, 21 nt, Human
cauaaagcucaaaugaaaugu

SEQ ID NO: 3796708 - RNA, 21 nt, Human
cauaaaggauaaacuuuuaga

SEQ ID NO: 3796709 - RNA, 23 nt, Human
cauaaaggugguaugugugugua

SEQ ID NO: 3796710 - RNA, 14 nt, Human
cauaaaguaaauac

SEQ ID NO: 3796711 - RNA, 22 nt, Human
cauaaaguaaauacaugcauau

SEQ ID NO: 3796712 - RNA, 12 nt, Human
cauaaaguacuu

SEQ ID NO: 3796713 - RNA, 18 nt, Human
cauaaauaaaaugaccag

SEQ ID NO: 3796714 - RNA, 18 nt, Human
cauaaaucugugaacuug

SEQ ID NO: 3796715 - RNA, 22 nt, Human
cauaaaucugugaacuugaaau

SEQ ID NO: 3796716 - RNA, 23 nt, Human
cauaaaucugugaacuugaaauu

SEQ ID NO: 3796717 - RNA, 14 nt, Human
cauaaaugcagccc

SEQ ID NO: 3796718 - RNA, 18 nt, Human
cauaaaugcagcccauuu

SEQ ID NO: 3796719 - RNA, 12 nt, Human
cauaaauuauuu

SEQ ID NO: 3796720 - RNA, 19 nt, Human
cauaaauucaacuuuguaa

SEQ ID NO: 3796721 - RNA, 20 nt, Human
cauaaauucaacuuuguaaa

SEQ ID NO: 3796722 - RNA, 20 nt, Human
cauaaauuuacuuuacacaa

SEQ ID NO: 3796723 - RNA, 20 nt, Human
cauaaauuuaguauuuuguu

SEQ ID NO: 3796724 - RNA, 18 nt, Human
cauaacaaauaaccaacc

SEQ ID NO: 3796725 - RNA, 17 nt, Human
cauaacaggguaaauua

SEQ ID NO: 3796726 - RNA, 19 nt, Human
cauaacagugccauugucu

SEQ ID NO: 3796727 - RNA, 22 nt, Human
cauaacagugccauugucuuua

SEQ ID NO: 3796728 - RNA, 12 nt, Human
cauaacauaaau

SEQ ID NO: 3796729 - RNA, 21 nt, Human
cauaacauaaaucugugaacu

SEQ ID NO: 3796730 - RNA, 20 nt, Human
cauaacauuuucagaauagu

SEQ ID NO: 3796731 - RNA, 13 nt, Human
cauaaccacugcu

SEQ ID NO: 3796732 - RNA, 18 nt, Human
cauaacccacuugucacu

SEQ ID NO: 3796733 - RNA, 22 nt, Human
cauaacggaucagaaauacaga

SEQ ID NO: 3796734 - RNA, 19 nt, Human
cauaacuaaauuugauacu

SEQ ID NO: 3796735 - RNA, 20 nt, Human
cauaacuaaauuugauacuu

SEQ ID NO: 3796736 - RNA, 22 nt, Human
cauaacuaaauuugauacuuau

SEQ ID NO: 3796737 - RNA, 15 nt, Human
cauaacugacaaauc

SEQ ID NO: 3796738 - RNA, 21 nt, Human
cauaacugacaaaucaaguuu

SEQ ID NO: 3796739 - RNA, 19 nt, Human
cauaacugccuugaaccug

SEQ ID NO: 3796740 - RNA, 23 nt, Human
cauaacuuauugcugauuuuaau

SEQ ID NO: 3796741 - RNA, 13 nt, Human
cauaacuuccugu

SEQ ID NO: 3796742 - RNA, 19 nt, Human
cauaagaaaacuaagaaau

SEQ ID NO: 3796743 - RNA, 21 nt, Human
cauaagaccauaacagccaac

SEQ ID NO: 3796744 - RNA, 18 nt, Human
cauaagacuuugggauag

SEQ ID NO: 3796745 - RNA, 23 nt, Human
cauaagagccacaggucuuuaug

SEQ ID NO: 3796746 - RNA, 14 nt, Human
cauaagauaaaugu

SEQ ID NO: 3796747 - RNA, 17 nt, Human
cauaagauauuuuucau

SEQ ID NO: 3796748 - RNA, 15 nt, Human
cauaagcaacaauuu

SEQ ID NO: 3796749 - RNA, 17 nt, Human
cauaagcaacaauuuuc

SEQ ID NO: 3796750 - RNA, 21 nt, Human
cauaagcaacaauuuucagau

SEQ ID NO: 3796751 - RNA, 20 nt, Human
cauaagccaaaacugagcau

SEQ ID NO: 3796752 - RNA, 15 nt, Human
cauaagccaauuuuu

SEQ ID NO: 3796753 - RNA, 21 nt, Human
cauaagccuccauuuaguucu

SEQ ID NO: 3796754 - RNA, 22 nt, Human
cauaagcuauagacccgaggaa

SEQ ID NO: 3796755 - RNA, 14 nt, Human
cauaagcucagaau

SEQ ID NO: 3796756 - RNA, 17 nt, Human
cauaagcuuccauuuua

SEQ ID NO: 3796757 - RNA, 17 nt, Human
cauaaggaaacuggguu

SEQ ID NO: 3796758 - RNA, 15 nt, Human
cauaaggcuucaaaa

SEQ ID NO: 3796759 - RNA, 19 nt, Human
cauaaggcuucaaaauguu

SEQ ID NO: 3796760 - RNA, 21 nt, Human
cauaagggagcguagaaucug

SEQ ID NO: 3796761 - RNA, 21 nt, Human
cauaagggguuugccauuuga

SEQ ID NO: 3796762 - RNA, 21 nt, Human
cauaagguuucguuucuguau

SEQ ID NO: 3796763 - RNA, 17 nt, Human
cauaagguuuuuaugca

SEQ ID NO: 3796764 - RNA, 16 nt, Human
cauaaguaauucaaga

SEQ ID NO: 3796765 - RNA, 22 nt, Human
cauaaguauuuggaauuagaac

SEQ ID NO: 3796766 - RNA, 14 nt, Human
cauaagugaauuua

SEQ ID NO: 3796767 - RNA, 22 nt, Human
cauaagugcuauugcagagccg

SEQ ID NO: 3796768 - RNA, 23 nt, Human
cauaauaaaaaauuaugacaaug

SEQ ID NO: 3796769 - RNA, 18 nt, Human
cauaauaaauaucuguac

SEQ ID NO: 3796770 - RNA, 17 nt, Human
cauaauaagcuaaagag

SEQ ID NO: 3796771 - RNA, 16 nt, Human
cauaauacugaaccac

SEQ ID NO: 3796772 - RNA, 17 nt, Human
cauaauacugaaccacu

SEQ ID NO: 3796773 - RNA, 21 nt, Human
caaaguuaaacgugaugugcu

SEQ ID NO: 3796774 - RNA, 16 nt, Human
caaaguuaaccuaccu

SEQ ID NO: 3796775 - RNA, 17 nt, Human
caaaguuaaccuaccug

SEQ ID NO: 3796776 - RNA, 21 nt, Human
caaaguucccuacuuccugug

SEQ ID NO: 3796777 - RNA, 22 nt, Human
caaaguucccuacuuccuguga

SEQ ID NO: 3796778 - RNA, 20 nt, Human
caaaguucuaauaauuucua

SEQ ID NO: 3796779 - RNA, 22 nt, Human
caaaguuguuguaaccugcugu

SEQ ID NO: 3796780 - RNA, 16 nt, Human
caaaguuucaauuugu

SEQ ID NO: 3796781 - RNA, 16 nt, Human
caaaguuucagaguau

SEQ ID NO: 3796782 - RNA, 20 nt, Human
caaaguuuugaaaagcuauu

SEQ ID NO: 3796783 - RNA, 18 nt, Human
caaauaaaaagugcuuuu

SEQ ID NO: 3796784 - RNA, 15 nt, Human
caaauaaaaauauug

SEQ ID NO: 3796785 - RNA, 22 nt, Human
cagggaaggaggagccuguccu

SEQ ID NO: 3796786 - RNA, 23 nt, Human
cagggaaggaggagccuguccug

SEQ ID NO: 3796787 - RNA, 18 nt, Human
cagggaaggaucccauga

SEQ ID NO: 3796788 - RNA, 14 nt, Human
cagggaaggcaggc

SEQ ID NO: 3796789 - RNA, 15 nt, Human
cagggaaggcaggca

SEQ ID NO: 3796790 - RNA, 16 nt, Human
cagggaaggcaggcag

SEQ ID NO: 3796791 - RNA, 20 nt, Human
cagggaaggcaggcagggcu

SEQ ID NO: 3796792 - RNA, 21 nt, Human
cagggaaggcaggcagggcuc

SEQ ID NO: 3796793 - RNA, 23 nt, Human
cagggaaggcaggcagggcucuc

SEQ ID NO: 3796794 - RNA, 15 nt, Human
cagggaaggccugac

SEQ ID NO: 3796795 - RNA, 23 nt, Human
cagggaaggccugacuucugcug

SEQ ID NO: 3796796 - RNA, 21 nt, Human
cagggaagggacugggagggg

SEQ ID NO: 3796797 - RNA, 14 nt, Human
cagggaagucccca

SEQ ID NO: 3796798 - RNA, 14 nt, Human
cagggaauccaagc

SEQ ID NO: 3796799 - RNA, 23 nt, Human
cagggaauuucaggaacuagaga

SEQ ID NO: 3796800 - RNA, 14 nt, Human
cagggaauuucuau

SEQ ID NO: 3796801 - RNA, 16 nt, Human
cagggacaccagccag

SEQ ID NO: 3796802 - RNA, 17 nt, Human
cagggacaccagccagg

SEQ ID NO: 3796803 - RNA, 21 nt, Human
cagggacaccagccaggcucu

SEQ ID NO: 3796804 - RNA, 23 nt, Human
cagggacaccagccaggcucugu

SEQ ID NO: 3796805 - RNA, 22 nt, Human
cagggacaccugggagaaaucu

SEQ ID NO: 3796806 - RNA, 15 nt, Human
cagggacacgggcag

SEQ ID NO: 3796807 - RNA, 18 nt, Human
cagggacagagacaccug

SEQ ID NO: 3796808 - RNA, 22 nt, Human
cagggacagagacaccugcacc

SEQ ID NO: 3796809 - RNA, 14 nt, Human
cagggacagagcca

SEQ ID NO: 3796810 - RNA, 19 nt, Human
cagggacagaggccccagc

SEQ ID NO: 3796811 - RNA, 21 nt, Human
cagggacagaggccccagccu

SEQ ID NO: 3796812 - RNA, 23 nt, Human
cagggacagaggccccagccucc

SEQ ID NO: 3796813 - RNA, 13 nt, Human
cagggacagaggg

SEQ ID NO: 3796814 - RNA, 14 nt, Human
cagggacagagggg

SEQ ID NO: 3796815 - RNA, 23 nt, Human
cagggacagaggggguggccucc

SEQ ID NO: 3796816 - RNA, 14 nt, Human
cagggacagcaacu

SEQ ID NO: 3796817 - RNA, 14 nt, Human
cagggaccacagca

SEQ ID NO: 3796818 - RNA, 14 nt, Human
cagggaccauggcu

SEQ ID NO: 3796819 - RNA, 21 nt, Human
cagggaccgcccccugucucu

SEQ ID NO: 3796820 - RNA, 23 nt, Human
cagggaccggcggaccccagcca

SEQ ID NO: 3796821 - RNA, 19 nt, Human
cagggacgaagaagagcca

SEQ ID NO: 3796822 - RNA, 21 nt, Human
cagggacugaaaaccucuccu

SEQ ID NO: 3796823 - RNA, 14 nt, Human
cagggacugccagu

SEQ ID NO: 3796824 - RNA, 18 nt, Human
cagggacuguuccugucu

SEQ ID NO: 3796825 - RNA, 14 nt, Human
cagggacuugaagu

SEQ ID NO: 3796826 - RNA, 15 nt, Human
cagggacuugaaguu

SEQ ID NO: 3796827 - RNA, 12 nt, Human
cagggagaagcu

SEQ ID NO: 3796828 - RNA, 19 nt, Human
cagggagacccguccauuu

SEQ ID NO: 3796829 - RNA, 22 nt, Human
cagggagaccgagcgcuuucug

SEQ ID NO: 3796830 - RNA, 23 nt, Human
cagggagacgguuuccagggagg

SEQ ID NO: 3796831 - RNA, 15 nt, Human
cagggagagcccagg

SEQ ID NO: 3796832 - RNA, 21 nt, Human
cagggagcaggcggugggcac

SEQ ID NO: 3796833 - RNA, 18 nt, Human
cagggagcaugagaggag

SEQ ID NO: 3796834 - RNA, 22 nt, Human
cagggagcaugagaggaggcag

SEQ ID NO: 3796835 - RNA, 15 nt, Human
cagggagcauggcug

SEQ ID NO: 3796836 - RNA, 19 nt, Human
cagggagcauuuuccucca

SEQ ID NO: 3796837 - RNA, 19 nt, Human
cagggagccuagaagcugg

SEQ ID NO: 3796838 - RNA, 12 nt, Human
cagggagccucc

SEQ ID NO: 3796839 - RNA, 14 nt, Human
cagggagccuccug

SEQ ID NO: 3796840 - RNA, 22 nt, Human
cagggagccuuugguucuggcc

SEQ ID NO: 3796841 - RNA, 15 nt, Human
cagggagcggccggc

SEQ ID NO: 3796842 - RNA, 22 nt, Human
cagggagcugggcccgacaugg

SEQ ID NO: 3796843 - RNA, 17 nt, Human
cagggagcugggcuucc

SEQ ID NO: 3796844 - RNA, 22 nt, Human
cagggaggagaggggaagggcc

SEQ ID NO: 3796845 - RNA, 21 nt, Human
cagggaggagguggcagcccu

SEQ ID NO: 3796846 - RNA, 22 nt, Human
cagggaggagguggcagcccug

SEQ ID NO: 3796847 - RNA, 17 nt, Human
cagggaggcccugugcc

SEQ ID NO: 3796848 - RNA, 23 nt, Human
cagggaggccgaagcuaacaggg

SEQ ID NO: 3796849 - RNA, 14 nt, Human
cagggagggccugg

SEQ ID NO: 3796850 - RNA, 18 nt, Human
cagggagggccugggccc

SEQ ID NO: 3796851 - RNA, 16 nt, Human
cagggagggcuucugc

SEQ ID NO: 3796852 - RNA, 13 nt, Human
cagggaggggacu

SEQ ID NO: 3796853 - RNA, 21 nt, Human
cagggaggggacuauuuauga

SEQ ID NO: 3796854 - RNA, 22 nt, Human
cagggaggggccggcccugugu

SEQ ID NO: 3796855 - RNA, 17 nt, Human
cagggaggucaggcccu

SEQ ID NO: 3796856 - RNA, 13 nt, Human
cagggaguccccu

SEQ ID NO: 3796857 - RNA, 22 nt, Human
cagggaguccccuccccggccc

SEQ ID NO: 3796858 - RNA, 20 nt, Human
cagggaguguaguaaagccg

SEQ ID NO: 3796859 - RNA, 19 nt, Human
cagggauaaggccuguggg

SEQ ID NO: 3796860 - RNA, 12 nt, Human
cagggaugagca

SEQ ID NO: 3796861 - RNA, 20 nt, Human
cagggaugagcauggagcug

SEQ ID NO: 3796862 - RNA, 22 nt, Human
cagggaugagcauggagcuggc

SEQ ID NO: 3796863 - RNA, 23 nt, Human
cagggaugagcauggagcuggcc

SEQ ID NO: 3796864 - RNA, 20 nt, Human
cagggaugauucaagccauu

SEQ ID NO: 3796865 - RNA, 20 nt, Human
cagggaugcccuggaggugg

SEQ ID NO: 3796866 - RNA, 19 nt, Human
cagggauggccguuggcca

SEQ ID NO: 3796867 - RNA, 16 nt, Human
cagggaugguguucaa

SEQ ID NO: 3796868 - RNA, 20 nt, Human
cagggauguggguuccacag

SEQ ID NO: 3796869 - RNA, 22 nt, Human
cagggauguggguuccacagac

SEQ ID NO: 3796870 - RNA, 20 nt, Human
cagggauuaaccucugcacu

SEQ ID NO: 3796871 - RNA, 20 nt, Human
cagggauugauuuuaaaaug

SEQ ID NO: 3796872 - RNA, 16 nt, Human
cagggauugcugccac

SEQ ID NO: 3796873 - RNA, 14 nt, Human
cagggauuugagga

SEQ ID NO: 3796874 - RNA, 20 nt, Human
cagggauuuguccuugggga

SEQ ID NO: 3796875 - RNA, 15 nt, Human
cagggcaaaauauuc

SEQ ID NO: 3796876 - RNA, 12 nt, Human
cagggcaaagcc

SEQ ID NO: 3796877 - RNA, 16 nt, Human
cagggcaaagccaggu

SEQ ID NO: 3796878 - RNA, 20 nt, Human
cagggcaaagccaggucccu

SEQ ID NO: 3796879 - RNA, 21 nt, Human
cagggcaaaugacaugcacug

SEQ ID NO: 3796880 - RNA, 23 nt, Human
cagggcaaaugacaugcacugac

SEQ ID NO: 3796881 - RNA, 21 nt, Human
cagggcaagcuccgcaggacu

SEQ ID NO: 3796882 - RNA, 22 nt, Human
cagggcaagcuccgcaggacuu

SEQ ID NO: 3796883 - RNA, 17 nt, Human
cagggcaaucaauguuc

SEQ ID NO: 3796884 - RNA, 13 nt, Human
cagggcacaggag

SEQ ID NO: 3796885 - RNA, 19 nt, Human
cagggcacaggagcuaccu

SEQ ID NO: 3796886 - RNA, 20 nt, Human
cagggcacaggagcuaccug

SEQ ID NO: 3796887 - RNA, 18 nt, Human
cagggcacaggccaugga

SEQ ID NO: 3796888 - RNA, 18 nt, Human
cagggcacagggccuggc

SEQ ID NO: 3796889 - RNA, 16 nt, Human
cagggcaccaagccca

SEQ ID NO: 3796890 - RNA, 21 nt, Human
cagggcaccaagcccacaggu

SEQ ID NO: 3796891 - RNA, 15 nt, Human
cagggcaccugccac

SEQ ID NO: 3796892 - RNA, 19 nt, Human
cagggcagagugagaccca

SEQ ID NO: 3796893 - RNA, 16 nt, Human
cagggcagcacacggc

SEQ ID NO: 3796894 - RNA, 16 nt, Human
cagggcagccagggag

SEQ ID NO: 3796895 - RNA, 13 nt, Human
cagggcagcgcca

SEQ ID NO: 3796896 - RNA, 18 nt, Human
cagggcagcgccaggcug

SEQ ID NO: 3796897 - RNA, 19 nt, Human
cagggcagcgccaggcuga

SEQ ID NO: 3796898 - RNA, 16 nt, Human
cagggcagcugggccc

SEQ ID NO: 3796899 - RNA, 17 nt, Human
cagggcagcugggccca

SEQ ID NO: 3796900 - RNA, 18 nt, Human
cagggcagcugggcccaa

SEQ ID NO: 3796901 - RNA, 16 nt, Human
cagggcaggaccagcc

SEQ ID NO: 3796902 - RNA, 15 nt, Human
cagggcagggcucug

SEQ ID NO: 3796903 - RNA, 19 nt, Human
cagggcagggcucugauau

SEQ ID NO: 3796904 - RNA, 23 nt, Human
cagggcaguaccugagggucugu

SEQ ID NO: 3796905 - RNA, 17 nt, Human
cagggcaucuccaggaa

SEQ ID NO: 3796906 - RNA, 16 nt, Human
cagggcaucucugggc

SEQ ID NO: 3796907 - RNA, 17 nt, Human
cagggcaucucugggcu

SEQ ID NO: 3796908 - RNA, 18 nt, Human
cagggcaucuugcuggcu

SEQ ID NO: 3796909 - RNA, 20 nt, Human
cagggcaucuugcuggcuac

SEQ ID NO: 3796910 - RNA, 14 nt, Human
cagggcaugaaaug

SEQ ID NO: 3796911 - RNA, 24 nt, Human
cagggcaugaaaugaacacaaauu

SEQ ID NO: 3796912 - RNA, 18 nt, Human
cagggcaugccccggcca

SEQ ID NO: 3796913 - RNA, 22 nt, Human
cagggcaugccccggccaccuc

SEQ ID NO: 3796914 - RNA, 19 nt, Human
cagggccaacuugagggcc

SEQ ID NO: 3796915 - RNA, 22 nt, Human
cagggccaacuugagggcccag

SEQ ID NO: 3796916 - RNA, 16 nt, Human
cagggccaauccccag

SEQ ID NO: 3796917 - RNA, 16 nt, Human
cagggccacgcuccag

SEQ ID NO: 3796918 - RNA, 20 nt, Human
cagggccacgcuccagcugc

SEQ ID NO: 3796919 - RNA, 23 nt, Human
cagggccacgcuccagcugcccc

SEQ ID NO: 3796920 - RNA, 15 nt, Human
cagggccacgugcca

SEQ ID NO: 3796921 - RNA, 13 nt, Human
cagggccacuccc

SEQ ID NO: 3796922 - RNA, 19 nt, Human
cagggccacucccggcacu

SEQ ID NO: 3796923 - RNA, 20 nt, Human
cagggccacucugccucugc

SEQ ID NO: 3796924 - RNA, 20 nt, Human
cagggccaggacugagcccc

SEQ ID NO: 3796925 - RNA, 18 nt, Human
cauaauacugaaccacuu

SEQ ID NO: 3796926 - RNA, 17 nt, Human
cauaauccaguaaaaua

SEQ ID NO: 3796927 - RNA, 19 nt, Human
cagguuguaguaaagaaau

SEQ ID NO: 3796928 - RNA, 12 nt, Human
cagguuuaacau

SEQ ID NO: 3796929 - RNA, 14 nt, Human
cagguuuaagcugu

SEQ ID NO: 3796930 - RNA, 21 nt, Human
cagguuuaaguagauuucaug

SEQ ID NO: 3796931 - RNA, 23 nt, Human
cagguuugggaccccuggugguu

SEQ ID NO: 3796932 - RNA, 17 nt, Human
cagguuuuaaaagccuu

SEQ ID NO: 3796933 - RNA, 19 nt, Human
cagguuuucugggugucca

SEQ ID NO: 3796934 - RNA, 12 nt, Human
cagguuuuucaa

SEQ ID NO: 3796935 - RNA, 16 nt, Human
cagguuuuucaauuaa

SEQ ID NO: 3796936 - RNA, 17 nt, Human
caguaaaauuauacugu

SEQ ID NO: 3796937 - RNA, 15 nt, Human
caguaaaauugccau

SEQ ID NO: 3796938 - RNA, 21 nt, Human
caguaaaauugccauauugca

SEQ ID NO: 3796939 - RNA, 16 nt, Human
caguaaacagaggagu

SEQ ID NO: 3796940 - RNA, 14 nt, Human
caguaaaccacuga

SEQ ID NO: 3796941 - RNA, 13 nt, Human
caguaaaccuguc

SEQ ID NO: 3796942 - RNA, 17 nt, Human
caguaaacuuagaguuu

SEQ ID NO: 3796943 - RNA, 13 nt, Human
caguaaagagaaa

SEQ ID NO: 3796944 - RNA, 19 nt, Human
caguaaagagaaacuuugu

SEQ ID NO: 3796945 - RNA, 15 nt, Human
caguaaauaaauugu

SEQ ID NO: 3796946 - RNA, 19 nt, Human
caguaaauaaauuguuuga

SEQ ID NO: 3796947 - RNA, 17 nt, Human
caguaaauaacuggaaa

SEQ ID NO: 3796948 - RNA, 22 nt, Human
caguaaaugggggugcauuuga

SEQ ID NO: 3796949 - RNA, 13 nt, Human
caguaacacaggc

SEQ ID NO: 3796950 - RNA, 15 nt, Human
caguaacaggcucaa

SEQ ID NO: 3796951 - RNA, 18 nt, Human
caguaacagggccuugcu

SEQ ID NO: 3796952 - RNA, 20 nt, Human
caguaacccccuuaaauuua

SEQ ID NO: 3796953 - RNA, 14 nt, Human
caguaacuaaagcu

SEQ ID NO: 3796954 - RNA, 18 nt, Human
caguaacuguuuuuuaag

SEQ ID NO: 3796955 - RNA, 14 nt, Human
caguaacuuuaugu

SEQ ID NO: 3796956 - RNA, 16 nt, Human
caguaacuuuaugugu

SEQ ID NO: 3796957 - RNA, 17 nt, Human
caguaacuuuaugugua

SEQ ID NO: 3796958 - RNA, 19 nt, Human
caguaagaucacuguuuag

SEQ ID NO: 3796959 - RNA, 15 nt, Human
caguaagccacugcc

SEQ ID NO: 3796960 - RNA, 15 nt, Human
caguaaguuaucuuu

SEQ ID NO: 3796961 - RNA, 20 nt, Human
caguaaguuaucuuugaaua

SEQ ID NO: 3796962 - RNA, 15 nt, Human
caguaauaaaacauc

SEQ ID NO: 3796963 - RNA, 21 nt, Human
caguaauaaaugaaugucacu

SEQ ID NO: 3796964 - RNA, 12 nt, Human
caguaauaacuc

SEQ ID NO: 3796965 - RNA, 13 nt, Human
caguaauaacucu

SEQ ID NO: 3796966 - RNA, 17 nt, Human
caguaauagcacugcca

SEQ ID NO: 3796967 - RNA, 12 nt, Human
caguaauccugu

SEQ ID NO: 3796968 - RNA, 13 nt, Human
caguaauccugua

SEQ ID NO: 3796969 - RNA, 16 nt, Human
caguaauccuguagga

SEQ ID NO: 3796970 - RNA, 12 nt, Human
cauccuggcugc

SEQ ID NO: 3796971 - RNA, 12 nt, Human
cauccuggguaa

SEQ ID NO: 3796972 - RNA, 19 nt, Human
cauccugucaucugagaau

SEQ ID NO: 3796973 - RNA, 15 nt, Human
cauccuuauccuuca

SEQ ID NO: 3796974 - RNA, 22 nt, Human
cauccuuauccuucaucuuuua

SEQ ID NO: 3796975 - RNA, 17 nt, Human
cauccuucccacucugu

SEQ ID NO: 3796976 - RNA, 13 nt, Human
cauccuucccuuu

SEQ ID NO: 3796977 - RNA, 12 nt, Human
cauccuuccuau

SEQ ID NO: 3796978 - RNA, 14 nt, Human
cauccuuccuuccc

SEQ ID NO: 3796979 - RNA, 16 nt, Human
cauccuuccuucccac

SEQ ID NO: 3796980 - RNA, 12 nt, Human
cauccuucugcc

SEQ ID NO: 3796981 - RNA, 21 nt, Human
cauccuuggucuuuguaucuu

SEQ ID NO: 3796982 - RNA, 13 nt, Human
cauccuugucuua

SEQ ID NO: 3796983 - RNA, 20 nt, Human
cauccuuguggcacauuuuu

SEQ ID NO: 3796984 - RNA, 19 nt, Human
cauccuuuacguguuuaaa

SEQ ID NO: 3796985 - RNA, 19 nt, Human
cauccuuucacuucuuucc

SEQ ID NO: 3796986 - RNA, 16 nt, Human
cauccuuucugccucu

SEQ ID NO: 3796987 - RNA, 16 nt, Human
cauccuuugcacuguc

SEQ ID NO: 3796988 - RNA, 18 nt, Human
cauccuuugcagggcagc

SEQ ID NO: 3796989 - RNA, 19 nt, Human
cauccuuuucugcagaggg

SEQ ID NO: 3796990 - RNA, 15 nt, Human
caucgaauguguaca

SEQ ID NO: 3796991 - RNA, 16 nt, Human
caucgcaccauucuga

SEQ ID NO: 3796992 - RNA, 13 nt, Human
caucgcacugugg

SEQ ID NO: 3796993 - RNA, 13 nt, Human
caucgccagacaa

SEQ ID NO: 3796994 - RNA, 16 nt, Human
caucggaaaaauaauc

SEQ ID NO: 3796995 - RNA, 17 nt, Human
caucggccuagggcccc

SEQ ID NO: 3796996 - RNA, 22 nt, Human
caucggugaaacuaacagauaa

SEQ ID NO: 3796997 - RNA, 17 nt, Human
caucgugaagaagccug

SEQ ID NO: 3796998 - RNA, 23 nt, Human
caucguugcaaccacugcaauau

SEQ ID NO: 3796999 - RNA, 15 nt, Human
caucguugcccccau

SEQ ID NO: 3797000 - RNA, 23 nt, Human
caucuaaaaauagacuuaaaucu

SEQ ID NO: 3797001 - RNA, 17 nt, Human
caucuaaaaauauacau

SEQ ID NO: 3797002 - RNA, 23 nt, Human
caucuaaaaauauacauguuuau

SEQ ID NO: 3797003 - RNA, 18 nt, Human
caucuaaacuaagaugug

SEQ ID NO: 3797004 - RNA, 21 nt, Human
caucuaaacugcccccucugc

SEQ ID NO: 3797005 - RNA, 12 nt, Human
caucuaaacuuu

SEQ ID NO: 3797006 - RNA, 14 nt, Human
caucuaaacuuuaa

SEQ ID NO: 3797007 - RNA, 19 nt, Human
caucuaaccucaucuucuu

SEQ ID NO: 3797008 - RNA, 20 nt, Human
caucuaagcugcagcuuccu

SEQ ID NO: 3797009 - RNA, 21 nt, Human
caucuaagcugcagcuuccug

SEQ ID NO: 3797010 - RNA, 23 nt, Human
caucuaauagcggguuacuuuca

SEQ ID NO: 3797011 - RNA, 21 nt, Human
caucuaauucucuguggaaug

SEQ ID NO: 3797012 - RNA, 16 nt, Human
caucuaauucugauuc

SEQ ID NO: 3797013 - RNA, 23 nt, Human
caucuaauuuuauuuugugaagu

SEQ ID NO: 3797014 - RNA, 20 nt, Human
caucuacaaaacauuaaacu

SEQ ID NO: 3797015 - RNA, 19 nt, Human
caucuaccuuuucucuuca

SEQ ID NO: 3797016 - RNA, 13 nt, Human
caucuagccagcc

SEQ ID NO: 3797017 - RNA, 21 nt, Human
caucuagccagccccucuucc

SEQ ID NO: 3797018 - RNA, 12 nt, Human
caucuaggauuu

SEQ ID NO: 3797019 - RNA, 20 nt, Human
caucuaggggagccuugauu

SEQ ID NO: 3797020 - RNA, 18 nt, Human
caucuagguaaauuacag

SEQ ID NO: 3797021 - RNA, 22 nt, Human
caucuagugagcagucaggaaa

SEQ ID NO: 3797022 - RNA, 14 nt, Human
caucuauaaagaag

SEQ ID NO: 3797023 - RNA, 13 nt, Human
caucuaucuaguu

SEQ ID NO: 3797024 - RNA, 17 nt, Human
caucuaucuaguucuaa

SEQ ID NO: 3797025 - RNA, 19 nt, Human
caucuaugucccuugcugu

SEQ ID NO: 3797026 - RNA, 15 nt, Human
caucuauuucugaga

SEQ ID NO: 3797027 - RNA, 14 nt, Human
caucuauuuugaug

SEQ ID NO: 3797028 - RNA, 17 nt, Human
caucuauuuugaugcag

SEQ ID NO: 3797029 - RNA, 16 nt, Human
caucuauuuuggauug

SEQ ID NO: 3797030 - RNA, 13 nt, Human
caucucacagcua

SEQ ID NO: 3797031 - RNA, 16 nt, Human
caucucaccuccugcu

SEQ ID NO: 3797032 - RNA, 18 nt, Human
caucucaccuccugcugg

SEQ ID NO: 3797033 - RNA, 18 nt, Human
caucucagacccuuuagc

SEQ ID NO: 3797034 - RNA, 20 nt, Human
caucucagccuaccaugaga

SEQ ID NO: 3797035 - RNA, 20 nt, Human
caucucaggacacuuccgua

SEQ ID NO: 3797036 - RNA, 18 nt, Human
caucucaggagauuucau

SEQ ID NO: 3797037 - RNA, 17 nt, Human
caucucaggccaccugc

SEQ ID NO: 3797038 - RNA, 17 nt, Human
caucucaggccagagcc

SEQ ID NO: 3797039 - RNA, 17 nt, Human
caucucaguaugaauua

SEQ ID NO: 3797040 - RNA, 17 nt, Human
caucucaguccucaaag

SEQ ID NO: 3797041 - RNA, 18 nt, Human
caucucaucaugucuauu

SEQ ID NO: 3797042 - RNA, 23 nt, Human
caucucaugaggggagaggagac

SEQ ID NO: 3797043 - RNA, 23 nt, Human
caucucauguaucaucuggauag

SEQ ID NO: 3797044 - RNA, 19 nt, Human
caucucauuuaauccuccc

SEQ ID NO: 3797045 - RNA, 20 nt, Human
caucucauuuaauccucccu

SEQ ID NO: 3797046 - RNA, 20 nt, Human
caucuccaagaaugcugaaa

SEQ ID NO: 3797047 - RNA, 16 nt, Human
caucuccacccccagc

SEQ ID NO: 3797048 - RNA, 15 nt, Human
caucuccaucagcug

SEQ ID NO: 3797049 - RNA, 21 nt, Human
caucucccacccuguaccuca

SEQ ID NO: 3797050 - RNA, 13 nt, Human
caucuccccucag

SEQ ID NO: 3797051 - RNA, 14 nt, Human
caucucccugcuuu

SEQ ID NO: 3797052 - RNA, 13 nt, Human
caucucccuuccu

SEQ ID NO: 3797053 - RNA, 19 nt, Human
caucuccuauaaucuguca

SEQ ID NO: 3797054 - RNA, 20 nt, Human
caucuccuauaaucugucaa

SEQ ID NO: 3797055 - RNA, 21 nt, Human
caucuccuauaaucugucaaa

SEQ ID NO: 3797056 - RNA, 22 nt, Human
caucuccugaggaucagaaagu

SEQ ID NO: 3797057 - RNA, 22 nt, Human
caucuccugccuuccuccuggg

SEQ ID NO: 3797058 - RNA, 15 nt, Human
caucuccugugcaug

SEQ ID NO: 3797059 - RNA, 17 nt, Human
caucucgcucccuccca

SEQ ID NO: 3797060 - RNA, 22 nt, Human
caucucgcucccucccaggacu

SEQ ID NO: 3797061 - RNA, 15 nt, Human
caucucggagcaucc

SEQ ID NO: 3797062 - RNA, 21 nt, Human
caucucggagcaucccggagg

SEQ ID NO: 3797063 - RNA, 23 nt, Human
caucucuaacagcucaggaucuc

SEQ ID NO: 3797064 - RNA, 16 nt, Human
caucucucauccucca

SEQ ID NO: 3797065 - RNA, 17 nt, Human
caucucucauccuccag

SEQ ID NO: 3797066 - RNA, 16 nt, Human
caucucucccuccccu

SEQ ID NO: 3797067 - RNA, 21 nt, Human
caucucucuacuccuaccuca

SEQ ID NO: 3797068 - RNA, 15 nt, Human
caucucucugcccaa

SEQ ID NO: 3797069 - RNA, 11 nt, Human
caucucugcac

SEQ ID NO: 3797070 - RNA, 13 nt, Human
caucucugcucca

SEQ ID NO: 3797071 - RNA, 16 nt, Human
caucucuggaugccug

SEQ ID NO: 3797072 - RNA, 16 nt, Human
caucuuuuuaaagcuu

SEQ ID NO: 3797073 - RNA, 13 nt, Human
caugaaaaagcag

SEQ ID NO: 3797074 - RNA, 15 nt, Human
caugaaaaagcagcu

SEQ ID NO: 3797075 - RNA, 18 nt, Human
caugaaaaagcagcuacc

SEQ ID NO: 3797076 - RNA, 19 nt, Human
caugaaaaagcagcuacca

SEQ ID NO: 3797077 - RNA, 14 nt, Human
caugaaaacacauu

SEQ ID NO: 3797078 - RNA, 19 nt, Human
caugaaaacguuuuauugu

SEQ ID NO: 3797079 - RNA, 15 nt, Human
caugaaaauagcaau

SEQ ID NO: 3797080 - RNA, 16 nt, Human
caugaaaauccuacca

SEQ ID NO: 3797081 - RNA, 13 nt, Human
caugaaaaugcaa

SEQ ID NO: 3797082 - RNA, 11 nt, Human
caugaaacacc

SEQ ID NO: 3797083 - RNA, 19 nt, Human
caugaaacagaaacaaaaa

SEQ ID NO: 3797084 - RNA, 17 nt, Human
caugaaagacuucucua

SEQ ID NO: 3797085 - RNA, 24 nt, Human
caugaaaguagacaguuuugagaa

SEQ ID NO: 3797086 - RNA, 22 nt, Human
caugaaaguagcagugugaagu

SEQ ID NO: 3797087 - RNA, 13 nt, Human
caugaaauaaaau

SEQ ID NO: 3797088 - RNA, 18 nt, Human
caugaaauaaaauauauc

SEQ ID NO: 3797089 - RNA, 13 nt, Human
caugaaauaugca

SEQ ID NO: 3797090 - RNA, 13 nt, Human
caugaaaugaaca

SEQ ID NO: 3797091 - RNA, 24 nt, Human
caugaaauugucuagcagagcagg

SEQ ID NO: 3797092 - RNA, 16 nt, Human
caugaacacacugugu

SEQ ID NO: 3797093 - RNA, 20 nt, Human
caugaacacacuguguccug

SEQ ID NO: 3797094 - RNA, 18 nt, Human
caugaacacccuuagaaa

SEQ ID NO: 3797095 - RNA, 20 nt, Human
caugaacuuagauuuuacau

SEQ ID NO: 3797096 - RNA, 13 nt, Human
caugaagaccaca

SEQ ID NO: 3797097 - RNA, 18 nt, Human
caugaagagaagcaauuu

SEQ ID NO: 3797098 - RNA, 21 nt, Human
caugaagagaagcaauuuugg

SEQ ID NO: 3797099 - RNA, 14 nt, Human
caugaagagcaaaa

SEQ ID NO: 3797100 - RNA, 18 nt, Human
caugaagauguagaggag

SEQ ID NO: 3797101 - RNA, 18 nt, Human
caugaagauucuuuccca

SEQ ID NO: 3797102 - RNA, 22 nt, Human
caugaagccacagcccaggccu

SEQ ID NO: 3797103 - RNA, 16 nt, Human
caugaagccuguggau

SEQ ID NO: 3797104 - RNA, 12 nt, Human
caugaagccuuu

SEQ ID NO: 3797105 - RNA, 19 nt, Human
caugaagccuuuugaaagg

SEQ ID NO: 3797106 - RNA, 16 nt, Human
caugaaggugucauac

SEQ ID NO: 3797107 - RNA, 19 nt, Human
caugaaguaauaugcacac

SEQ ID NO: 3797108 - RNA, 20 nt, Human
caugaaguuuccuuggcugg

SEQ ID NO: 3797109 - RNA, 23 nt, Human
caugaaguuuccuuggcuggugc

SEQ ID NO: 3797110 - RNA, 17 nt, Human
caugaaucaaaagugcc

SEQ ID NO: 3797111 - RNA, 18 nt, Human
caugaaucaaaagugccu

SEQ ID NO: 3797112 - RNA, 16 nt, Human
caugaaucgcuucucu

SEQ ID NO: 3797113 - RNA, 16 nt, Human
caugaaugcacacuag

SEQ ID NO: 3797114 - RNA, 19 nt, Human
caugaauguaaauuuguac

SEQ ID NO: 3797115 - RNA, 17 nt, Human
caugaauguaucaggaa

SEQ ID NO: 3797116 - RNA, 17 nt, Human
caugaauuauuacagug

SEQ ID NO: 3797117 - RNA, 22 nt, Human
caugaauuuauugcacauuguu

SEQ ID NO: 3797118 - RNA, 23 nt, Human
caugaauuuauugcacauuguuc

SEQ ID NO: 3797119 - RNA, 22 nt, Human
caugaauuuguaaugucuugag

SEQ ID NO: 3797120 - RNA, 13 nt, Human
caugaauuuuaca

SEQ ID NO: 3797121 - RNA, 16 nt, Human
caugaauuuuagcuuu

SEQ ID NO: 3797122 - RNA, 19 nt, Human
caugacaacuuugccagcu

SEQ ID NO: 3797123 - RNA, 17 nt, Human
caugacaagccccaggc

SEQ ID NO: 3797124 - RNA, 12 nt, Human
caugacacagcu

SEQ ID NO: 3797125 - RNA, 18 nt, Human
caugacacgaauauugcu

SEQ ID NO: 3797126 - RNA, 14 nt, Human
caugacacugaaau

SEQ ID NO: 3797127 - RNA, 13 nt, Human
caugacagccucc

SEQ ID NO: 3797128 - RNA, 20 nt, Human
caugacagcgcuaaacguug

SEQ ID NO: 3797129 - RNA, 23 nt, Human
caugacaguucauucagggccga

SEQ ID NO: 3797130 - RNA, 15 nt, Human
caugacauaacagug

SEQ ID NO: 3797131 - RNA, 18 nt, Human
caugacauaugacuugau

SEQ ID NO: 3797132 - RNA, 15 nt, Human
caugacauguuauau

SEQ ID NO: 3797133 - RNA, 23 nt, Human
caugacauuccuaaacuaucuuu

SEQ ID NO: 3797134 - RNA, 15 nt, Human
caugacccaccccug

SEQ ID NO: 3797135 - RNA, 18 nt, Human
cagucccccaaccccagc

SEQ ID NO: 3797136 - RNA, 20 nt, Human
caguccccccacccucauuc

SEQ ID NO: 3797137 - RNA, 19 nt, Human
cagucccccuauccuuggc

SEQ ID NO: 3797138 - RNA, 23 nt, Human
cagucccccuauccuuggcacca

SEQ ID NO: 3797139 - RNA, 16 nt, Human
cagucccccugcccca

SEQ ID NO: 3797140 - RNA, 23 nt, Human
caguccccguggccaucccugug

SEQ ID NO: 3797141 - RNA, 15 nt, Human
caguccccucccauc

SEQ ID NO: 3797142 - RNA, 14 nt, Human
caguccccuucccu

SEQ ID NO: 3797143 - RNA, 13 nt, Human
cagucccugccaa

SEQ ID NO: 3797144 - RNA, 16 nt, Human
cagucccugccaaugg

SEQ ID NO: 3797145 - RNA, 12 nt, Human
cagucccugggg

SEQ ID NO: 3797146 - RNA, 21 nt, Human
cagucccugggggaagcccug

SEQ ID NO: 3797147 - RNA, 16 nt, Human
cagucccuuuaaagaa

SEQ ID NO: 3797148 - RNA, 21 nt, Human
caguccuacucaagcgggugg

SEQ ID NO: 3797149 - RNA, 18 nt, Human
caguccuagaauguuuca

SEQ ID NO: 3797150 - RNA, 18 nt, Human
caguccuagcugcacagg

SEQ ID NO: 3797151 - RNA, 17 nt, Human
caguccuaucugggcuu

SEQ ID NO: 3797152 - RNA, 14 nt, Human
caguccucccaucu

SEQ ID NO: 3797153 - RNA, 13 nt, Human
caguccuccccuc

SEQ ID NO: 3797154 - RNA, 23 nt, Human
caguccuccccucacagccucug

SEQ ID NO: 3797155 - RNA, 13 nt, Human
caguccucuccac

SEQ ID NO: 3797156 - RNA, 12 nt, Human
caguccugccug

SEQ ID NO: 3797157 - RNA, 15 nt, Human
caguccugccuggcc

SEQ ID NO: 3797158 - RNA, 17 nt, Human
caguccugccuggccag

SEQ ID NO: 3797159 - RNA, 14 nt, Human
caguccugcuccag

SEQ ID NO: 3797160 - RNA, 18 nt, Human
caguccugcucucuaccc

SEQ ID NO: 3797161 - RNA, 23 nt, Human
caguccugcucucuacccagccc

SEQ ID NO: 3797162 - RNA, 11 nt, Human
caguccuggcc

SEQ ID NO: 3797163 - RNA, 19 nt, Human
caguccuggccuggcuucu

SEQ ID NO: 3797164 - RNA, 13 nt, Human
caguccugggaga

SEQ ID NO: 3797165 - RNA, 23 nt, Human
caguccugggagaaccucaggcu

SEQ ID NO: 3797166 - RNA, 17 nt, Human
caguccuguaguuuuau

SEQ ID NO: 3797167 - RNA, 18 nt, Human
caguccuguaguuuuauu

SEQ ID NO: 3797168 - RNA, 12 nt, Human
caguccuguccu

SEQ ID NO: 3797169 - RNA, 15 nt, Human
caguccuuaaaaauc

SEQ ID NO: 3797170 - RNA, 16 nt, Human
caguccuuaaaaauca

SEQ ID NO: 3797171 - RNA, 18 nt, Human
caguccuuaccagcagag

SEQ ID NO: 3797172 - RNA, 15 nt, Human
caguccuuccaccuc

SEQ ID NO: 3797173 - RNA, 20 nt, Human
caguccuuuguaaacagugu

SEQ ID NO: 3797174 - RNA, 19 nt, Human
cagucgccuuucagcaggc

SEQ ID NO: 3797175 - RNA, 17 nt, Human
cagucgcgcugccugug

SEQ ID NO: 3797176 - RNA, 13 nt, Human
cagucgggggcug

SEQ ID NO: 3797177 - RNA, 14 nt, Human
cagucgggggcugg

SEQ ID NO: 3797178 - RNA, 18 nt, Human
cagucgucgcacagucuc

SEQ ID NO: 3797179 - RNA, 20 nt, Human
cagucgucgcacagucucuc

SEQ ID NO: 3797180 - RNA, 13 nt, Human
cagucgugccugu

SEQ ID NO: 3797181 - RNA, 14 nt, Human
cagucgugccugug

SEQ ID NO: 3797182 - RNA, 14 nt, Human
cagucguucccagu

SEQ ID NO: 3797183 - RNA, 21 nt, Human
cagucuaaauuuauuauuuaa

SEQ ID NO: 3797184 - RNA, 22 nt, Human
cagucuacccagagaagccccu

SEQ ID NO: 3797185 - RNA, 19 nt, Human
cagucuaguugccaaaucu

SEQ ID NO: 3797186 - RNA, 17 nt, Human
cagucuauccacagaga

SEQ ID NO: 3797187 - RNA, 17 nt, Human
cagucuauucacagaag

SEQ ID NO: 3797188 - RNA, 12 nt, Human
cagucucacauu

SEQ ID NO: 3797189 - RNA, 20 nt, Human
cagucucaccauuuccccag

SEQ ID NO: 3797190 - RNA, 17 nt, Human
cagucucacccagacuc

SEQ ID NO: 3797191 - RNA, 19 nt, Human
cagucucaggagcaugggg

SEQ ID NO: 3797192 - RNA, 16 nt, Human
cagucuccaccaggaa

SEQ ID NO: 3797193 - RNA, 15 nt, Human
cagucuccggccucu

SEQ ID NO: 3797194 - RNA, 18 nt, Human
cagucuccggccucucca

SEQ ID NO: 3797195 - RNA, 15 nt, Human
cagucuccucuuuaa

SEQ ID NO: 3797196 - RNA, 17 nt, Human
cagucuccucuuuaaaa

SEQ ID NO: 3797197 - RNA, 19 nt, Human
cagucuccucuuuaaaaca

SEQ ID NO: 3797198 - RNA, 21 nt, Human
cagucucucucucucucuccc

SEQ ID NO: 3797199 - RNA, 17 nt, Human
cagucucucuucucucc

SEQ ID NO: 3797200 - RNA, 12 nt, Human
cagucucugccu

SEQ ID NO: 3797201 - RNA, 17 nt, Human
cagucucugccuugccu

SEQ ID NO: 3797202 - RNA, 23 nt, Human
cagucucugcuccaccuuucagc

SEQ ID NO: 3797203 - RNA, 20 nt, Human
cagucucuuuaaucuucagu

SEQ ID NO: 3797204 - RNA, 13 nt, Human
cagucugaaguuu

SEQ ID NO: 3797205 - RNA, 12 nt, Human
cagucugacccu

SEQ ID NO: 3797206 - RNA, 19 nt, Human
cagucugauucccaagcuc

SEQ ID NO: 3797207 - RNA, 23 nt, Human
cagucugauucccaagcucugcu

SEQ ID NO: 3797208 - RNA, 15 nt, Human
cagucuggaaugcag

SEQ ID NO: 3797209 - RNA, 19 nt, Human
cagucuggaaugcaguggu

SEQ ID NO: 3797210 - RNA, 13 nt, Human
cagucuggagggg

SEQ ID NO: 3797211 - RNA, 18 nt, Human
cagucuggaggggcaugg

SEQ ID NO: 3797212 - RNA, 18 nt, Human
cagucuggcugagcccug

SEQ ID NO: 3797213 - RNA, 23 nt, Human
cagucugucaugaacauguuccu

SEQ ID NO: 3797214 - RNA, 14 nt, Human
cagucugucuucug

SEQ ID NO: 3797215 - RNA, 17 nt, Human
cagucugucuucuguau

SEQ ID NO: 3797216 - RNA, 21 nt, Human
cagucuguuccccauggccac

SEQ ID NO: 3797217 - RNA, 15 nt, Human
caugguuuggagcug

SEQ ID NO: 3797218 - RNA, 18 nt, Human
caugguuuggagcugauc

SEQ ID NO: 3797219 - RNA, 22 nt, Human
cauguaaaacaaaaaacaauau

SEQ ID NO: 3797220 - RNA, 14 nt, Human
cauguaaaagaguc

SEQ ID NO: 3797221 - RNA, 21 nt, Human
cauguaaacaaaauuuaguuu

SEQ ID NO: 3797222 - RNA, 17 nt, Human
cauguaaagaaaugucu

SEQ ID NO: 3797223 - RNA, 18 nt, Human
cauguaaagaaaugucuu

SEQ ID NO: 3797224 - RNA, 18 nt, Human
cauguaaagugucagaag

SEQ ID NO: 3797225 - RNA, 14 nt, Human
cauguaaauaauac

SEQ ID NO: 3797226 - RNA, 21 nt, Human
cauguaaauaccagacugcag

SEQ ID NO: 3797227 - RNA, 23 nt, Human
cauguaaauaccagacugcaggu

SEQ ID NO: 3797228 - RNA, 17 nt, Human
cauguaacagaaagggc

SEQ ID NO: 3797229 - RNA, 18 nt, Human
cauguaaccggcauguuu

SEQ ID NO: 3797230 - RNA, 21 nt, Human
cauguaacugccuagaaacaa

SEQ ID NO: 3797231 - RNA, 23 nt, Human
cauguaagcugaaaauauggcaa

SEQ ID NO: 3797232 - RNA, 12 nt, Human
cauguaauaaaa

SEQ ID NO: 3797233 - RNA, 22 nt, Human
cauguaauaaaaaguauauguu

SEQ ID NO: 3797234 - RNA, 18 nt, Human
cauguaauuaaguacuau

SEQ ID NO: 3797235 - RNA, 14 nt, Human
cauguaauuugugu

SEQ ID NO: 3797236 - RNA, 22 nt, Human
cauguacagagaacuaacacua

SEQ ID NO: 3797237 - RNA, 13 nt, Human
cauguacauuugg

SEQ ID NO: 3797238 - RNA, 19 nt, Human
cauguacccuaaggucauu

SEQ ID NO: 3797239 - RNA, 16 nt, Human
cauguaccuccccugc

SEQ ID NO: 3797240 - RNA, 22 nt, Human
cauguaccuccccugccuugcu

SEQ ID NO: 3797241 - RNA, 22 nt, Human
cauguacuaguuuuaguuuucu

SEQ ID NO: 3797242 - RNA, 22 nt, Human
cauguacuguaguuuuucuuca

SEQ ID NO: 3797243 - RNA, 13 nt, Human
cauguacuuguuu

SEQ ID NO: 3797244 - RNA, 22 nt, Human
cauguacuuuuuaguaauuucu

SEQ ID NO: 3797245 - RNA, 14 nt, Human
cauguagaaaacaa

SEQ ID NO: 3797246 - RNA, 18 nt, Human
cauguagcccccuggccu

SEQ ID NO: 3797247 - RNA, 15 nt, Human
cauguagcugaguuu

SEQ ID NO: 3797248 - RNA, 19 nt, Human
cauguaguaacacuaauau

SEQ ID NO: 3797249 - RNA, 23 nt, Human
cauguaguaacacuaauauauuu

SEQ ID NO: 3797250 - RNA, 19 nt, Human
cauguaguaucaaauauua

SEQ ID NO: 3797251 - RNA, 23 nt, Human
cauguagugugggaggcuccugu

SEQ ID NO: 3797252 - RNA, 21 nt, Human
cauguauaaaugaaguuuaua

SEQ ID NO: 3797253 - RNA, 14 nt, Human
cauguauaaaugug

SEQ ID NO: 3797254 - RNA, 17 nt, Human
cauguauaaaugugaua

SEQ ID NO: 3797255 - RNA, 15 nt, Human
cauguauaauauuuu

SEQ ID NO: 3797256 - RNA, 15 nt, Human
cauguauaguugcuu

SEQ ID NO: 3797257 - RNA, 20 nt, Human
cauguauaguugcuuuugaa

SEQ ID NO: 3797258 - RNA, 18 nt, Human
cauguaucauaauuacca

SEQ ID NO: 3797259 - RNA, 19 nt, Human
cauguaucauaauuaccaa

SEQ ID NO: 3797260 - RNA, 15 nt, Human
cauguaucaucugga

SEQ ID NO: 3797261 - RNA, 14 nt, Human
cauguaucuaccuc

SEQ ID NO: 3797262 - RNA, 13 nt, Human
cauguaugucuug

SEQ ID NO: 3797263 - RNA, 12 nt, Human
cauguauguuuc

SEQ ID NO: 3797264 - RNA, 12 nt, Human
cauguauguuuu

SEQ ID NO: 3797265 - RNA, 14 nt, Human
cauguauuggccug

SEQ ID NO: 3797266 - RNA, 18 nt, Human
cauguauuggccuggagg

SEQ ID NO: 3797267 - RNA, 14 nt, Human
cauguauugugucu

SEQ ID NO: 3797268 - RNA, 20 nt, Human
cauguauugugucuuuugca

SEQ ID NO: 3797269 - RNA, 23 nt, Human
cauguauugugucuuuugcauga

SEQ ID NO: 3797270 - RNA, 20 nt, Human
cauguauuuaucucuauuua

SEQ ID NO: 3797271 - RNA, 20 nt, Human
cauguauuuggugauuacau

SEQ ID NO: 3797272 - RNA, 13 nt, Human
caugucaaacaug

SEQ ID NO: 3797273 - RNA, 15 nt, Human
caugucaacagcguu

SEQ ID NO: 3797274 - RNA, 13 nt, Human
caugucacugcag

SEQ ID NO: 3797275 - RNA, 18 nt, Human
caugucagcaaaaagcaa

SEQ ID NO: 3797276 - RNA, 20 nt, Human
caugucagcaaaaagcaaaa

SEQ ID NO: 3797277 - RNA, 12 nt, Human
cauguccaaaga

SEQ ID NO: 3797278 - RNA, 15 nt, Human
cauguccaaagaggc

SEQ ID NO: 3797279 - RNA, 16 nt, Human
cauguccaaagaggcu

SEQ ID NO: 3797280 - RNA, 15 nt, Human
cauguccaagaagcc

SEQ ID NO: 3797281 - RNA, 16 nt, Human
cauguccaagaagccc

SEQ ID NO: 3797282 - RNA, 20 nt, Human
cauguccagcaccuugugcc

SEQ ID NO: 3797283 - RNA, 19 nt, Human
cauguccauacacuuuguu

SEQ ID NO: 3797284 - RNA, 22 nt, Human
cauguccauacacuuuguugca

SEQ ID NO: 3797285 - RNA, 23 nt, Human
cauguccauacacuuuguugcaa

SEQ ID NO: 3797286 - RNA, 21 nt, Human
cauguccccaaaccugcaagg

SEQ ID NO: 3797287 - RNA, 15 nt, Human
cauguccccucccag

SEQ ID NO: 3797288 - RNA, 16 nt, Human
cauguccccucccaga

SEQ ID NO: 3797289 - RNA, 18 nt, Human
cauguccccucccagagc

SEQ ID NO: 3797290 - RNA, 17 nt, Human
caugucccuacaccccu

SEQ ID NO: 3797291 - RNA, 19 nt, Human
cauguccuaauucuucugu

SEQ ID NO: 3797292 - RNA, 14 nt, Human
cauguccuaugugu

SEQ ID NO: 3797293 - RNA, 13 nt, Human
cauguccugccua

SEQ ID NO: 3797294 - RNA, 14 nt, Human
cauguccuguguca

SEQ ID NO: 3797295 - RNA, 15 nt, Human
cauguccugugucag

SEQ ID NO: 3797296 - RNA, 17 nt, Human
cauguccuucugagccc

SEQ ID NO: 3797297 - RNA, 19 nt, Human
cauguccuuugcgccugug

SEQ ID NO: 3797298 - RNA, 18 nt, Human
caugucgccucugcauuc

SEQ ID NO: 3797299 - RNA, 20 nt, Human
caugucgccucugcauucag

SEQ ID NO: 3797300 - RNA, 13 nt, Human
caugucggccucu

SEQ ID NO: 3797301 - RNA, 14 nt, Human
caugucggccucua

SEQ ID NO: 3797302 - RNA, 14 nt, Human
caugucgugaccaa

SEQ ID NO: 3797303 - RNA, 16 nt, Human
caugucuccuacugag

SEQ ID NO: 3797304 - RNA, 20 nt, Human
caugucuccuacugaggaua

SEQ ID NO: 3797305 - RNA, 17 nt, Human
caugucuccuauccugg

SEQ ID NO: 3797306 - RNA, 14 nt, Human
caugucugcauuuc

SEQ ID NO: 3797307 - RNA, 17 nt, Human
caugucuuaaugaaguu

SEQ ID NO: 3797308 - RNA, 14 nt, Human
caugucuuauuuaa

SEQ ID NO: 3797309 - RNA, 15 nt, Human
caugucuuauuuaaa

SEQ ID NO: 3797310 - RNA, 13 nt, Human
caugucuuguaca

SEQ ID NO: 3797311 - RNA, 17 nt, Human
caugucuuucuccaggg

SEQ ID NO: 3797312 - RNA, 23 nt, Human
caugucuuuucuugcaugaggcu

SEQ ID NO: 3797313 - RNA, 12 nt, Human
caugugaaaccu

SEQ ID NO: 3797314 - RNA, 18 nt, Human
caugugaaaccuuuuuua

SEQ ID NO: 3797315 - RNA, 24 nt, Human
caugugaaaccuuuuuuaagauuu

SEQ ID NO: 3797316 - RNA, 13 nt, Human
caugugacauuua

SEQ ID NO: 3797317 - RNA, 13 nt, Human
caugugacucuga

SEQ ID NO: 3797318 - RNA, 17 nt, Human
caugugacucuggcuug

SEQ ID NO: 3797319 - RNA, 17 nt, Human
caugugaucucauuguu

SEQ ID NO: 3797320 - RNA, 17 nt, Human
caugugaugagaggaaa

SEQ ID NO: 3797321 - RNA, 21 nt, Human
caugugaugagaggaaaucac

SEQ ID NO: 3797322 - RNA, 19 nt, Human
caugugauggacacuccag

SEQ ID NO: 3797323 - RNA, 17 nt, Human
caugugcauaguuucuu

SEQ ID NO: 3797324 - RNA, 22 nt, Human
caugugccacaacgccuggcua

SEQ ID NO: 3797325 - RNA, 24 nt, Human
caugugccagggcaaugaugaaug

SEQ ID NO: 3797326 - RNA, 21 nt, Human
caugugccagguuuuuggucu

SEQ ID NO: 3797327 - RNA, 12 nt, Human
caugugcccucc

SEQ ID NO: 3797328 - RNA, 14 nt, Human
caugugcccuccug

SEQ ID NO: 3797329 - RNA, 15 nt, Human
caugugccugaucca

SEQ ID NO: 3797330 - RNA, 19 nt, Human
caugugccugauccagccu

SEQ ID NO: 3797331 - RNA, 20 nt, Human
caugugccugcaccaggaga

SEQ ID NO: 3797332 - RNA, 21 nt, Human
caugugccugcaccaggagac

SEQ ID NO: 3797333 - RNA, 22 nt, Human
caugugccugcaccaggagaca

SEQ ID NO: 3797334 - RNA, 20 nt, Human
caugugcuacaggggccaga

SEQ ID NO: 3797335 - RNA, 22 nt, Human
caugugcuacaggggccagaag

SEQ ID NO: 3797336 - RNA, 19 nt, Human
caugugcugugaccauuua

SEQ ID NO: 3797337 - RNA, 16 nt, Human
cauguggaaagugaau

SEQ ID NO: 3797338 - RNA, 22 nt, Human
cauguggaaagugaauuugaau

SEQ ID NO: 3797339 - RNA, 19 nt, Human
cauguggcuccucccagcc

SEQ ID NO: 3797340 - RNA, 12 nt, Human
cauguggcugga

SEQ ID NO: 3797341 - RNA, 20 nt, Human
cauguggcuuuuuuaaaaaa

SEQ ID NO: 3797342 - RNA, 21 nt, Human
caaguuuucuuccaugauuuu

SEQ ID NO: 3797343 - RNA, 16 nt, Human
caaguuuugugaaauu

SEQ ID NO: 3797344 - RNA, 20 nt, Human
caaguuuugugaaauuuuuc

SEQ ID NO: 3797345 - RNA, 21 nt, Human
caaguuuugugaaauuuuuca

SEQ ID NO: 3797346 - RNA, 13 nt, Human
caauaaaaaaaag

SEQ ID NO: 3797347 - RNA, 20 nt, Human
caauaaaaaaaagaaaugaa

SEQ ID NO: 3797348 - RNA, 20 nt, Human
caauaaaaacauugccuuug

SEQ ID NO: 3797349 - RNA, 12 nt, Human
caauaaaacauu

SEQ ID NO: 3797350 - RNA, 15 nt, Human
caauaaaacauuaau

SEQ ID NO: 3797351 - RNA, 20 nt, Human
caauaaaagcaauuccaacc

SEQ ID NO: 3797352 - RNA, 17 nt, Human
caauaaaagcccaggag

SEQ ID NO: 3797353 - RNA, 19 nt, Human
caauaaaagcccaggagcc

SEQ ID NO: 3797354 - RNA, 13 nt, Human
caauaaaauagca

SEQ ID NO: 3797355 - RNA, 17 nt, Human
caauaaaauuauuugca

SEQ ID NO: 3797356 - RNA, 19 nt, Human
caauaaaauuauuugcagg

SEQ ID NO: 3797357 - RNA, 11 nt, Human
caauaaaauuu

SEQ ID NO: 3797358 - RNA, 13 nt, Human
caauaaaauuuaa

SEQ ID NO: 3797359 - RNA, 20 nt, Human
caauaaaauuuaaaaaauaa

SEQ ID NO: 3797360 - RNA, 18 nt, Human
caauaaaauuucuaagag

SEQ ID NO: 3797361 - RNA, 14 nt, Human
caaucauuguacag

SEQ ID NO: 3797362 - RNA, 12 nt, Human
caaucauuguuu

SEQ ID NO: 3797363 - RNA, 12 nt, Human
caaucauuucuc

SEQ ID NO: 3797364 - RNA, 15 nt, Human
caauccaagagucug

SEQ ID NO: 3797365 - RNA, 19 nt, Human
caauccagguacgcacaga

SEQ ID NO: 3797366 - RNA, 22 nt, Human
caauccagguacgcacagacag

SEQ ID NO: 3797367 - RNA, 23 nt, Human
caauccauguuaguuuuuacuuu

SEQ ID NO: 3797368 - RNA, 17 nt, Human
caaucccaccaacccuc

SEQ ID NO: 3797369 - RNA, 23 nt, Human
caaucccaccaacccucagagcc

SEQ ID NO: 3797370 - RNA, 21 nt, Human
caauccccucauucaggaaaa

SEQ ID NO: 3797371 - RNA, 16 nt, Human
caaucccugaucccug

SEQ ID NO: 3797372 - RNA, 22 nt, Human
caaucccuuaauauccuaaaca

SEQ ID NO: 3797373 - RNA, 20 nt, Human
caauccuaauuucuccuccc

SEQ ID NO: 3797374 - RNA, 17 nt, Human
caauccuagguaggguu

SEQ ID NO: 3797375 - RNA, 15 nt, Human
caauccuagugcuuu

SEQ ID NO: 3797376 - RNA, 14 nt, Human
caauccuaugcaug

SEQ ID NO: 3797377 - RNA, 23 nt, Human
caauccuaugcaugguuucagca

SEQ ID NO: 3797378 - RNA, 16 nt, Human
caauccucacugggug

SEQ ID NO: 3797379 - RNA, 18 nt, Human
caauccucccacuucagc

SEQ ID NO: 3797380 - RNA, 12 nt, Human
caauccuggcuc

SEQ ID NO: 3797381 - RNA, 11 nt, Human
caauccuuaca

SEQ ID NO: 3797382 - RNA, 12 nt, Human
caauccuuacaa

SEQ ID NO: 3797383 - RNA, 16 nt, Human
caauccuuacaaauga

SEQ ID NO: 3797384 - RNA, 20 nt, Human
caaucgacuggguuuauguc

SEQ ID NO: 3797385 - RNA, 23 nt, Human
caaucgguguguagugauguuuc

SEQ ID NO: 3797386 - RNA, 12 nt, Human
caaucuaauuuu

SEQ ID NO: 3797387 - RNA, 19 nt, Human
caaucuauugcuucaccau

SEQ ID NO: 3797388 - RNA, 18 nt, Human
caaucucaaggaaucuuu

SEQ ID NO: 3797389 - RNA, 21 nt, Human
caaucucguauagaagucuuc

SEQ ID NO: 3797390 - RNA, 15 nt, Human
caaucucuucauuau

SEQ ID NO: 3797391 - RNA, 16 nt, Human
caaucuggaagaaaaa

SEQ ID NO: 3797392 - RNA, 20 nt, Human
caaucuggaugccucauuau

SEQ ID NO: 3797393 - RNA, 23 nt, Human
caaucugugaugacauucccugc

SEQ ID NO: 3797394 - RNA, 19 nt, Human
caaucuuaaggggcagcuu

SEQ ID NO: 3797395 - RNA, 22 nt, Human
caaucuuacuuuguaaauucug

SEQ ID NO: 3797396 - RNA, 14 nt, Human
caaucuucaauccu

SEQ ID NO: 3797397 - RNA, 13 nt, Human
caaucuugcaugu

SEQ ID NO: 3797398 - RNA, 18 nt, Human
caaucuugcauguaacgc

SEQ ID NO: 3797399 - RNA, 22 nt, Human
caaucuuuaaaccaauugcugc

SEQ ID NO: 3797400 - RNA, 15 nt, Human
caaugaaaaaaugua

SEQ ID NO: 3797401 - RNA, 20 nt, Human
caaugaaaacucuuugcugc

SEQ ID NO: 3797402 - RNA, 12 nt, Human
caaugaaaaguc

SEQ ID NO: 3797403 - RNA, 23 nt, Human
caaugaaauacacaaguaaacau

SEQ ID NO: 3797404 - RNA, 13 nt, Human
caaugaaaugaau

SEQ ID NO: 3797405 - RNA, 15 nt, Human
caaugaaccauaaau

SEQ ID NO: 3797406 - RNA, 16 nt, Human
caaugaaccauaaauu

SEQ ID NO: 3797407 - RNA, 13 nt, Human
caaugaaccccca

SEQ ID NO: 3797408 - RNA, 16 nt, Human
caaugaacggccuugc

SEQ ID NO: 3797409 - RNA, 14 nt, Human
caaugaagccagcu

SEQ ID NO: 3797410 - RNA, 21 nt, Human
caaugaauaaaaacucaagga

SEQ ID NO: 3797411 - RNA, 14 nt, Human
caaugaauauugaa

SEQ ID NO: 3797412 - RNA, 16 nt, Human
caaugacaaagcagau

SEQ ID NO: 3797413 - RNA, 17 nt, Human
caaugacaucucagggg

SEQ ID NO: 3797414 - RNA, 19 nt, Human
caaugacaucuucaaagcu

SEQ ID NO: 3797415 - RNA, 21 nt, Human
caaugaccuuucaauaggaaa

SEQ ID NO: 3797416 - RNA, 17 nt, Human
caaugacugugcuacug

SEQ ID NO: 3797417 - RNA, 15 nt, Human
caaugacuuacugua

SEQ ID NO: 3797418 - RNA, 18 nt, Human
caaugacuuacuguacau

SEQ ID NO: 3797419 - RNA, 21 nt, Human
caaugagacucuaggguccag

SEQ ID NO: 3797420 - RNA, 13 nt, Human
caaugagcauguu

SEQ ID NO: 3797421 - RNA, 14 nt, Human
caaugagcauguuu

SEQ ID NO: 3797422 - RNA, 18 nt, Human
caaugagcauguuuagac

SEQ ID NO: 3797423 - RNA, 17 nt, Human
caaugagcuuucugaac

SEQ ID NO: 3797424 - RNA, 20 nt, Human
caaugagcuuucugaacagc

SEQ ID NO: 3797425 - RNA, 22 nt, Human
caaugagcuuucugaacagcug

SEQ ID NO: 3797426 - RNA, 17 nt, Human
caaugaggucugaaaug

SEQ ID NO: 3797427 - RNA, 19 nt, Human
caaugaggucugaaaugga

SEQ ID NO: 3797428 - RNA, 19 nt, Human
caaugauccuguauucaga

SEQ ID NO: 3797429 - RNA, 16 nt, Human
caaugaucuagguuua

SEQ ID NO: 3797430 - RNA, 16 nt, Human
caaugauggcaauuuu

SEQ ID NO: 3797431 - RNA, 13 nt, Human
caaugauggucac

SEQ ID NO: 3797432 - RNA, 13 nt, Human
caaugauuauuuu

SEQ ID NO: 3797433 - RNA, 22 nt, Human
caaugauuguuaauuuacagcu

SEQ ID NO: 3797434 - RNA, 16 nt, Human
caaugcaagagugauu

SEQ ID NO: 3797435 - RNA, 13 nt, Human
caaugcacuuugu

SEQ ID NO: 3797436 - RNA, 14 nt, Human
caaugcagaugcca

SEQ ID NO: 3797437 - RNA, 16 nt, Human
caaugcagaugccaga

SEQ ID NO: 3797438 - RNA, 16 nt, Human
caaugcaguugucucu

SEQ ID NO: 3797439 - RNA, 16 nt, Human
caaugcaugcagccac

SEQ ID NO: 3797440 - RNA, 13 nt, Human
caaugcauuuugg

SEQ ID NO: 3797441 - RNA, 21 nt, Human
caaugcauuuuggaaagcucc

SEQ ID NO: 3797442 - RNA, 14 nt, Human
caaugccaagauaa

SEQ ID NO: 3797443 - RNA, 18 nt, Human
caaugccauccucaaaca

SEQ ID NO: 3797444 - RNA, 20 nt, Human
caaugcccguaaugcuuaga

SEQ ID NO: 3797445 - RNA, 17 nt, Human
caaugcucaggugcugg

SEQ ID NO: 3797446 - RNA, 20 nt, Human
caaugcugauguccucacca

SEQ ID NO: 3797447 - RNA, 21 nt, Human
caaugcugauuuggugaccaa

SEQ ID NO: 3797448 - RNA, 18 nt, Human
caaugcugcgucucccau

SEQ ID NO: 3797449 - RNA, 20 nt, Human
caaugcuggcuguuggcugg

SEQ ID NO: 3797450 - RNA, 22 nt, Human
caaugcuggcuguuggcugggg

SEQ ID NO: 3797451 - RNA, 23 nt, Human
caaugcuguauuuuaaaagaaug

SEQ ID NO: 3797452 - RNA, 17 nt, Human
caaugcuuuauuuguaa

SEQ ID NO: 3797453 - RNA, 18 nt, Human
caaugcuuuauuuguaaa

SEQ ID NO: 3797454 - RNA, 23 nt, Human
caaugcuuuauuuguaaauuuag

SEQ ID NO: 3797455 - RNA, 16 nt, Human
caauggaaaccucacg

SEQ ID NO: 3797456 - RNA, 16 nt, Human
caauggaaccuccuuu

SEQ ID NO: 3797457 - RNA, 13 nt, Human
caauggaagauuu

SEQ ID NO: 3797458 - RNA, 14 nt, Human
caauggaccggaga

SEQ ID NO: 3797459 - RNA, 22 nt, Human
caauggaguagaccccuggcug

SEQ ID NO: 3797460 - RNA, 17 nt, Human
caauggauuugaugcug

SEQ ID NO: 3797461 - RNA, 22 nt, Human
caauggauuugaugcuguuuga

SEQ ID NO: 3797462 - RNA, 12 nt, Human
caauggcagccu

SEQ ID NO: 3797463 - RNA, 15 nt, Human
caauggcagccuugg

SEQ ID NO: 3797464 - RNA, 17 nt, Human
caauggcuaauucccag

SEQ ID NO: 3797465 - RNA, 22 nt, Human
caauggcugcugaagcugccug

SEQ ID NO: 3797466 - RNA, 21 nt, Human
caaugggagcugaggccacac

SEQ ID NO: 3797467 - RNA, 20 nt, Human
caaugggauguaugaauaca

SEQ ID NO: 3797468 - RNA, 21 nt, Human
caaugggauguaugaauacag

SEQ ID NO: 3797469 - RNA, 15 nt, Human
caaugggcaaugaca

SEQ ID NO: 3797470 - RNA, 18 nt, Human
caaugggcacugggauga

SEQ ID NO: 3797471 - RNA, 15 nt, Human
caauggggccaguca

SEQ ID NO: 3797472 - RNA, 16 nt, Human
caaugguaauuauaaa

SEQ ID NO: 3797473 - RNA, 16 nt, Human
caaugguaguuucugu

SEQ ID NO: 3797474 - RNA, 21 nt, Human
caaugguguuauuugaaacuu

SEQ ID NO: 3797475 - RNA, 22 nt, Human
caaugguguucaccaucggcag

SEQ ID NO: 3797476 - RNA, 15 nt, Human
caaugguguuuuucu

SEQ ID NO: 3797477 - RNA, 19 nt, Human
caaugguguuuuucuugua

SEQ ID NO: 3797478 - RNA, 18 nt, Human
caaugguuugcaaggaag

SEQ ID NO: 3797479 - RNA, 19 nt, Human
caaugguuugcaaggaagc

SEQ ID NO: 3797480 - RNA, 16 nt, Human
caaugguuuuuaaauu

SEQ ID NO: 3797481 - RNA, 18 nt, Human
caaugguuuuuaaauuuu

SEQ ID NO: 3797482 - RNA, 23 nt, Human
caaugguuuuuaaauuuuguaau

SEQ ID NO: 3797483 - RNA, 17 nt, Human
caauguaagcauacuuu

SEQ ID NO: 3797484 - RNA, 18 nt, Human
caauguaauuaaacuguu

SEQ ID NO: 3797485 - RNA, 16 nt, Human
caauguagauaagugu

SEQ ID NO: 3797486 - RNA, 21 nt, Human
caauguagauaaguguucugu

SEQ ID NO: 3797487 - RNA, 17 nt, Human
caauguaucccuucuca

SEQ ID NO: 3797488 - RNA, 23 nt, Human
caauguaucccuucucacagcac

SEQ ID NO: 3797489 - RNA, 20 nt, Human
caauguauugauaagagggc

SEQ ID NO: 3797490 - RNA, 15 nt, Human
caauguauuuauuua

SEQ ID NO: 3797491 - RNA, 15 nt, Human
caaugucaaggugcu

SEQ ID NO: 3797492 - RNA, 18 nt, Human
caaugucaaugaacaagc

SEQ ID NO: 3797493 - RNA, 14 nt, Human
caaugucaggaaca

SEQ ID NO: 3797494 - RNA, 19 nt, Human
caaugucaggaacagaagg

SEQ ID NO: 3797495 - RNA, 21 nt, Human
caaugucaguauuucagugua

SEQ ID NO: 3797496 - RNA, 16 nt, Human
caaugucugcagcccu

SEQ ID NO: 3797497 - RNA, 18 nt, Human
caaugucugcagcccuga

SEQ ID NO: 3797498 - RNA, 19 nt, Human
caaugucugcagcccugag

SEQ ID NO: 3797499 - RNA, 15 nt, Human
caaugucuggagacc

SEQ ID NO: 3797500 - RNA, 16 nt, Human
caaugucuggagacca

SEQ ID NO: 3797501 - RNA, 12 nt, Human
caaugucugugc

SEQ ID NO: 3797502 - RNA, 13 nt, Human
caaugucugugcu

SEQ ID NO: 3797503 - RNA, 14 nt, Human
caaugucugugcua

SEQ ID NO: 3797504 - RNA, 11 nt, Human
caaugugaaaa

SEQ ID NO: 3797505 - RNA, 12 nt, Human
caaugugaaaaa

SEQ ID NO: 3797506 - RNA, 12 nt, Human
cacagcccuccc

SEQ ID NO: 3797507 - RNA, 17 nt, Human
cacagcccucccgcccc

SEQ ID NO: 3797508 - RNA, 18 nt, Human
cacagcccugucagugca

SEQ ID NO: 3797509 - RNA, 21 nt, Human
cacagcccugucagugcagcc

SEQ ID NO: 3797510 - RNA, 23 nt, Human
cacagcccuuaugcgguuaauuu

SEQ ID NO: 3797511 - RNA, 20 nt, Human
cacagccgauucaccugagc

SEQ ID NO: 3797512 - RNA, 21 nt, Human
cacagccgauucaccugagca

SEQ ID NO: 3797513 - RNA, 18 nt, Human
cacagccuagcacagcag

SEQ ID NO: 3797514 - RNA, 20 nt, Human
cacagccuagcacagcagcu

SEQ ID NO: 3797515 - RNA, 23 nt, Human
cacagccuccccugccagggcag

SEQ ID NO: 3797516 - RNA, 20 nt, Human
cacagccuccucugucugcc

SEQ ID NO: 3797517 - RNA, 21 nt, Human
cacagccuccucugucugccc

SEQ ID NO: 3797518 - RNA, 10 nt, Human
cacagccucu

SEQ ID NO: 3797519 - RNA, 12 nt, Human
cacagccucuga

SEQ ID NO: 3797520 - RNA, 19 nt, Human
cacagccucugaaaaccaa

SEQ ID NO: 3797521 - RNA, 14 nt, Human
cacagccucugacc

SEQ ID NO: 3797522 - RNA, 17 nt, Human
cacagccucugaccccu

SEQ ID NO: 3797523 - RNA, 21 nt, Human
cacagccucuuagaugcaguu

SEQ ID NO: 3797524 - RNA, 22 nt, Human
cacagccugcacuugggggcuc

SEQ ID NO: 3797525 - RNA, 23 nt, Human
cacagccugcacuugggggcuca

SEQ ID NO: 3797526 - RNA, 14 nt, Human
cacagccugggccc

SEQ ID NO: 3797527 - RNA, 21 nt, Human
cacagccugggccccagcucg

SEQ ID NO: 3797528 - RNA, 16 nt, Human
cacagcgagggcagcu

SEQ ID NO: 3797529 - RNA, 18 nt, Human
cacagcgagggcagcugc

SEQ ID NO: 3797530 - RNA, 15 nt, Human
cacagcgcuggccgg

SEQ ID NO: 3797531 - RNA, 21 nt, Human
cacagcggagucuguccugug

SEQ ID NO: 3797532 - RNA, 23 nt, Human
cacagcggagucuguccugugac

SEQ ID NO: 3797533 - RNA, 14 nt, Human
cacagcggccccug

SEQ ID NO: 3797534 - RNA, 20 nt, Human
cacagcggggccccagggcu

SEQ ID NO: 3797535 - RNA, 22 nt, Human
cacagcgucccuagcagugaac

SEQ ID NO: 3797536 - RNA, 14 nt, Human
cacagcgucccugg

SEQ ID NO: 3797537 - RNA, 22 nt, Human
cacagcgucccuggcgcaggug

SEQ ID NO: 3797538 - RNA, 20 nt, Human
cacagcuaacaauugugaag

SEQ ID NO: 3797539 - RNA, 22 nt, Human
cacagcuaacauggaaguacua

SEQ ID NO: 3797540 - RNA, 20 nt, Human
cacagcuacuugguuugugu

SEQ ID NO: 3797541 - RNA, 22 nt, Human
cacagcuaugaaggcuguacac

SEQ ID NO: 3797542 - RNA, 16 nt, Human
cacagcucaggaacua

SEQ ID NO: 3797543 - RNA, 19 nt, Human
cacagcucccaccccaccc

SEQ ID NO: 3797544 - RNA, 13 nt, Human
cacagcucccuuc

SEQ ID NO: 3797545 - RNA, 20 nt, Human
cacagcucuccggucucucu

SEQ ID NO: 3797546 - RNA, 15 nt, Human
cacagcucuucucca

SEQ ID NO: 3797547 - RNA, 17 nt, Human
cacagcucuucuccagg

SEQ ID NO: 3797548 - RNA, 18 nt, Human
cacagcucuucuccaggc

SEQ ID NO: 3797549 - RNA, 21 nt, Human
cacagcucuucuccaggcugu

SEQ ID NO: 3797550 - RNA, 18 nt, Human
cacagcugagagacuuuu

SEQ ID NO: 3797551 - RNA, 14 nt, Human
cacagcugagaggc

SEQ ID NO: 3797552 - RNA, 21 nt, Human
cacagcugccggucgcccuuu

SEQ ID NO: 3797553 - RNA, 18 nt, Human
cacagcugcucugugacc

SEQ ID NO: 3797554 - RNA, 14 nt, Human
cacagcugcuggag

SEQ ID NO: 3797555 - RNA, 15 nt, Human
cacagcugcuggaga

SEQ ID NO: 3797556 - RNA, 14 nt, Human
cacagcugggcugu

SEQ ID NO: 3797557 - RNA, 15 nt, Human
cacagcugggcugug

SEQ ID NO: 3797558 - RNA, 12 nt, Human
cacagcuguggu

SEQ ID NO: 3797559 - RNA, 22 nt, Human
cacagcuguggugagguugggc

SEQ ID NO: 3797560 - RNA, 17 nt, Human
cacagcuuagauuucau

SEQ ID NO: 3797561 - RNA, 19 nt, Human
cacagcuuagauuucauag

SEQ ID NO: 3797562 - RNA, 14 nt, Human
cacagcuucagcca

SEQ ID NO: 3797563 - RNA, 15 nt, Human
cacagcuuccccucu

SEQ ID NO: 3797564 - RNA, 14 nt, Human
caucuccaucagcu

SEQ ID NO: 3797565 - RNA, 16 nt, Human
caucuccaucagcugu

SEQ ID NO: 3797566 - RNA, 16 nt, Human
caucucccacccugua

SEQ ID NO: 3797567 - RNA, 18 nt, Human
caucucccagauaaugug

SEQ ID NO: 3797568 - RNA, 11 nt, Human
caucucccugc

SEQ ID NO: 3797569 - RNA, 13 nt, Human
caucucccugccu

SEQ ID NO: 3797570 - RNA, 14 nt, Human
caucucccugccug

SEQ ID NO: 3797571 - RNA, 16 nt, Human
caucucccuggugcuu

SEQ ID NO: 3797572 - RNA, 20 nt, Human
caucucccuggugcuuaugc

SEQ ID NO: 3797573 - RNA, 22 nt, Human
caucucccuuccugugggagca

SEQ ID NO: 3797574 - RNA, 18 nt, Human
caucuccuauaaucuguc

SEQ ID NO: 3797575 - RNA, 16 nt, Human
caucuccuuagaaaag

SEQ ID NO: 3797576 - RNA, 22 nt, Human
caucucgccaccccuccuuccu

SEQ ID NO: 3797577 - RNA, 18 nt, Human
caucucuaacagcucagg

SEQ ID NO: 3797578 - RNA, 20 nt, Human
caucucuaacagcucaggau

SEQ ID NO: 3797579 - RNA, 19 nt, Human
caucucuaccuucucccca

SEQ ID NO: 3797580 - RNA, 20 nt, Human
caucucuaccuucuccccag

SEQ ID NO: 3797581 - RNA, 21 nt, Human
caucucuaccuucuccccagc

SEQ ID NO: 3797582 - RNA, 22 nt, Human
caucucuacuaaaaauacaaac

SEQ ID NO: 3797583 - RNA, 18 nt, Human
caucucucagaagggagg

SEQ ID NO: 3797584 - RNA, 12 nt, Human
caucucucccca

SEQ ID NO: 3797585 - RNA, 13 nt, Human
caucucuccccaa

SEQ ID NO: 3797586 - RNA, 12 nt, Human
caucucucccuc

SEQ ID NO: 3797587 - RNA, 15 nt, Human
caucucucccucccc

SEQ ID NO: 3797588 - RNA, 23 nt, Human
caucucucccuccccugccauuu

SEQ ID NO: 3797589 - RNA, 23 nt, Human
caucucucuacuccuaccucagc

SEQ ID NO: 3797590 - RNA, 11 nt, Human
caucucucucc

SEQ ID NO: 3797591 - RNA, 13 nt, Human
caucucucugccc

SEQ ID NO: 3797592 - RNA, 21 nt, Human
caucucucuggcccucuaccc

SEQ ID NO: 3797593 - RNA, 14 nt, Human
caucucugacuuuc

SEQ ID NO: 3797594 - RNA, 22 nt, Human
caucucugcaaucuucucagaa

SEQ ID NO: 3797595 - RNA, 12 nt, Human
caucucugcuug

SEQ ID NO: 3797596 - RNA, 20 nt, Human
caucucugcuugagucaggu

SEQ ID NO: 3797597 - RNA, 13 nt, Human
caucucugcuugg

SEQ ID NO: 3797598 - RNA, 14 nt, Human
caucucuggaugcc

SEQ ID NO: 3797599 - RNA, 12 nt, Human
caucucugggcu

SEQ ID NO: 3797600 - RNA, 14 nt, Human
caucucugggcugg

SEQ ID NO: 3797601 - RNA, 19 nt, Human
caucucugucccauucccu

SEQ ID NO: 3797602 - RNA, 22 nt, Human
caucucugucccauucccuggg

SEQ ID NO: 3797603 - RNA, 21 nt, Human
caucucuuagcuccccuccaa

SEQ ID NO: 3797604 - RNA, 21 nt, Human
caucucuuccuccgaggccag

SEQ ID NO: 3797605 - RNA, 22 nt, Human
caucucuucuggguuccuuccu

SEQ ID NO: 3797606 - RNA, 20 nt, Human
caucucuugaggccaggagu

SEQ ID NO: 3797607 - RNA, 16 nt, Human
caucucuuguuuaaau

SEQ ID NO: 3797608 - RNA, 15 nt, Human
caucucuuugaauuu

SEQ ID NO: 3797609 - RNA, 22 nt, Human
caucucuuugaauuuucugugu

SEQ ID NO: 3797610 - RNA, 14 nt, Human
caucugaaauguua

SEQ ID NO: 3797611 - RNA, 23 nt, Human
caucugaauuugcccugggaaac

SEQ ID NO: 3797612 - RNA, 15 nt, Human
caucugaccacgugc

SEQ ID NO: 3797613 - RNA, 14 nt, Human
caucugaccagcag

SEQ ID NO: 3797614 - RNA, 21 nt, Human
caucugaccagcagcgccuuu

SEQ ID NO: 3797615 - RNA, 12 nt, Human
caucugacucac

SEQ ID NO: 3797616 - RNA, 14 nt, Human
caucugagaaaagc

SEQ ID NO: 3797617 - RNA, 20 nt, Human
caucugagagaggcuaaaau

SEQ ID NO: 3797618 - RNA, 14 nt, Human
caucugauaucuau

SEQ ID NO: 3797619 - RNA, 22 nt, Human
caucugauaucuauaguagaca

SEQ ID NO: 3797620 - RNA, 13 nt, Human
caucugauuaaaa

SEQ ID NO: 3797621 - RNA, 20 nt, Human
caucugcaaaaggccucuug

SEQ ID NO: 3797622 - RNA, 23 nt, Human
caucugcaaaaggccucuuguaa

SEQ ID NO: 3797623 - RNA, 19 nt, Human
caucugcaccccuucucuc

SEQ ID NO: 3797624 - RNA, 21 nt, Human
caucugcaccccuucucuccu

SEQ ID NO: 3797625 - RNA, 23 nt, Human
caucugcaccccuucucuccucc

SEQ ID NO: 3797626 - RNA, 19 nt, Human
caucugcacccuucuuuuc

SEQ ID NO: 3797627 - RNA, 20 nt, Human
caucugcacccuucuuuucu

SEQ ID NO: 3797628 - RNA, 21 nt, Human
caucugcacccuucuuuucuc

SEQ ID NO: 3797629 - RNA, 16 nt, Human
caucugcauugcccag

SEQ ID NO: 3797630 - RNA, 17 nt, Human
caucugcauugcccagu

SEQ ID NO: 3797631 - RNA, 17 nt, Human
caucugcccaacugugu

SEQ ID NO: 3797632 - RNA, 12 nt, Human
caucugcccagg

SEQ ID NO: 3797633 - RNA, 15 nt, Human
caucugcccaggggu

SEQ ID NO: 3797634 - RNA, 14 nt, Human
caucugccccuccc

SEQ ID NO: 3797635 - RNA, 20 nt, Human
caucugcccgccugcccacc

SEQ ID NO: 3797636 - RNA, 20 nt, Human
caucugccuuaaaaccaaag

SEQ ID NO: 3797637 - RNA, 17 nt, Human
caucugcgggggcagug

SEQ ID NO: 3797638 - RNA, 19 nt, Human
caucugcgggggcagugcu

SEQ ID NO: 3797639 - RNA, 20 nt, Human
caucugcgggggcagugcuc

SEQ ID NO: 3797640 - RNA, 16 nt, Human
caucugcgugacaaua

SEQ ID NO: 3797641 - RNA, 18 nt, Human
caucugcgugacaauaaa

SEQ ID NO: 3797642 - RNA, 15 nt, Human
caucugcucuccuuc

SEQ ID NO: 3797643 - RNA, 14 nt, Human
caucugcugguccg

SEQ ID NO: 3797644 - RNA, 14 nt, Human
caucugcugucuuu

SEQ ID NO: 3797645 - RNA, 21 nt, Human
caucugcugucuuuucuuugc

SEQ ID NO: 3797646 - RNA, 22 nt, Human
caucugcuuacaauucccugcu

SEQ ID NO: 3797647 - RNA, 12 nt, Human
caucuggaacca

SEQ ID NO: 3797648 - RNA, 20 nt, Human
caucuggagagcccagaguc

SEQ ID NO: 3797649 - RNA, 15 nt, Human
caucuggaguucuca

SEQ ID NO: 3797650 - RNA, 22 nt, Human
cauuuugggacaauuguuuuaa

SEQ ID NO: 3797651 - RNA, 22 nt, Human
cauuuugggguacccacugcuc

SEQ ID NO: 3797652 - RNA, 16 nt, Human
cauuuugguacuuugg

SEQ ID NO: 3797653 - RNA, 18 nt, Human
cauuuuguaacaaaugaa

SEQ ID NO: 3797654 - RNA, 16 nt, Human
cauuuuguaauaauaa

SEQ ID NO: 3797655 - RNA, 17 nt, Human
cauuuuguauaauugua

SEQ ID NO: 3797656 - RNA, 14 nt, Human
cauuuugugaaugg

SEQ ID NO: 3797657 - RNA, 16 nt, Human
cauuuugugaauggau

SEQ ID NO: 3797658 - RNA, 22 nt, Human
cauuuuguggucauuaagcauu

SEQ ID NO: 3797659 - RNA, 12 nt, Human
cauuuuguugua

SEQ ID NO: 3797660 - RNA, 13 nt, Human
cauuuuguuguaa

SEQ ID NO: 3797661 - RNA, 16 nt, Human
cauuuuguuguaaaaa

SEQ ID NO: 3797662 - RNA, 18 nt, Human
cauuuuguuguaaaaaga

SEQ ID NO: 3797663 - RNA, 20 nt, Human
cauuuuguuugguauuguau

SEQ ID NO: 3797664 - RNA, 23 nt, Human
cauuuuguuugguauuguauuua

SEQ ID NO: 3797665 - RNA, 14 nt, Human
cauuuuuaaauaca

SEQ ID NO: 3797666 - RNA, 14 nt, Human
cauuuuuaaaugug

SEQ ID NO: 3797667 - RNA, 18 nt, Human
cauuuuuaaauguguuuu

SEQ ID NO: 3797668 - RNA, 15 nt, Human
cauuuuuaaucauga

SEQ ID NO: 3797669 - RNA, 20 nt, Human
cauuuuuacaauguaauuau

SEQ ID NO: 3797670 - RNA, 14 nt, Human
cauuuuuaccauua

SEQ ID NO: 3797671 - RNA, 16 nt, Human
cauuuuuagccugugu

SEQ ID NO: 3797672 - RNA, 15 nt, Human
cauuuuuauuuauga

SEQ ID NO: 3797673 - RNA, 17 nt, Human
cauuuuuauuuaugaag

SEQ ID NO: 3797674 - RNA, 21 nt, Human
cauuuuucaacuuugaauaaa

SEQ ID NO: 3797675 - RNA, 12 nt, Human
cauuuuucaaua

SEQ ID NO: 3797676 - RNA, 15 nt, Human
cauuuuucaauauau

SEQ ID NO: 3797677 - RNA, 21 nt, Human
cauuuuucauucacuucucuu

SEQ ID NO: 3797678 - RNA, 16 nt, Human
cauuuuuccguaaaaa

SEQ ID NO: 3797679 - RNA, 13 nt, Human
cauuuuuccuaac

SEQ ID NO: 3797680 - RNA, 18 nt, Human
cauuuuuccuucccuucu

SEQ ID NO: 3797681 - RNA, 13 nt, Human
cauuuuucuucca

SEQ ID NO: 3797682 - RNA, 17 nt, Human
cauuuuucuuccaggau

SEQ ID NO: 3797683 - RNA, 14 nt, Human
cauuuuucuuguuu

SEQ ID NO: 3797684 - RNA, 19 nt, Human
cauuuuugaaacugcauuu

SEQ ID NO: 3797685 - RNA, 18 nt, Human
cauuuuugaauacaggca

SEQ ID NO: 3797686 - RNA, 20 nt, Human
cauuuuugaauacaggcaua

SEQ ID NO: 3797687 - RNA, 13 nt, Human
cauuuuuguacag

SEQ ID NO: 3797688 - RNA, 14 nt, Human
cauuuuuguacagu

SEQ ID NO: 3797689 - RNA, 14 nt, Human
cauuuuuuaaaaca

SEQ ID NO: 3797690 - RNA, 16 nt, Human
cauuuuuuaaaacaag

SEQ ID NO: 3797691 - RNA, 15 nt, Human
cauuuuuuaaaugca

SEQ ID NO: 3797692 - RNA, 19 nt, Human
cauuuuuuaaaugcaccug

SEQ ID NO: 3797693 - RNA, 23 nt, Human
cauuuuuuaauuuacuuguuuug

SEQ ID NO: 3797694 - RNA, 22 nt, Human
cauuuuuugggcagcaauuuaa

SEQ ID NO: 3797695 - RNA, 18 nt, Human
cauuuuuuucuaccuaua

SEQ ID NO: 3797696 - RNA, 17 nt, Human
cauuuuuuuucuuugaa

SEQ ID NO: 3797697 - RNA, 21 nt, Human
cauuuuuuuucuuugaauaaa

SEQ ID NO: 3797698 - RNA, 22 nt, Human
cauuuuuuuucuuugaauaaau

SEQ ID NO: 3797699 - RNA, 13 nt, Human
ccaaaaaaauacu

SEQ ID NO: 3797700 - RNA, 17 nt, Human
ccaaaaaaauccagaaa

SEQ ID NO: 3797701 - RNA, 12 nt, Human
ccaaaaaacuac

SEQ ID NO: 3797702 - RNA, 20 nt, Human
ccaaaaaagcuguauuuuga

SEQ ID NO: 3797703 - RNA, 12 nt, Human
ccaaaaaauauc

SEQ ID NO: 3797704 - RNA, 20 nt, Human
ccaaaaaauucuacaacaca

SEQ ID NO: 3797705 - RNA, 19 nt, Human
ccaaaaaccaguauuguac

SEQ ID NO: 3797706 - RNA, 20 nt, Human
ccaaaaaccaguauuguaca

SEQ ID NO: 3797707 - RNA, 16 nt, Human
ccaaaaagaccagacu

SEQ ID NO: 3797708 - RNA, 16 nt, Human
ccaaaaaucugccugg

SEQ ID NO: 3797709 - RNA, 17 nt, Human
ccaaaaaucugccuggg

SEQ ID NO: 3797710 - RNA, 14 nt, Human
ccaaaaauuauuau

SEQ ID NO: 3797711 - RNA, 12 nt, Human
ccaaaacaaaca

SEQ ID NO: 3797712 - RNA, 15 nt, Human
ccaaaacccaugugg

SEQ ID NO: 3797713 - RNA, 17 nt, Human
ccaaaaccgccagcucu

SEQ ID NO: 3797714 - RNA, 18 nt, Human
ccaaaaccgccagcucug

SEQ ID NO: 3797715 - RNA, 19 nt, Human
ccaaaaccgccagcucugu

SEQ ID NO: 3797716 - RNA, 20 nt, Human
ccaaaacucuccucugcugc

SEQ ID NO: 3797717 - RNA, 21 nt, Human
ccaaaacucuccucugcugcu

SEQ ID NO: 3797718 - RNA, 12 nt, Human
ccaaaacugcuc

SEQ ID NO: 3797719 - RNA, 16 nt, Human
ccaaaacugugcagag

SEQ ID NO: 3797720 - RNA, 16 nt, Human
ccaaaagauugcugaa

SEQ ID NO: 3797721 - RNA, 22 nt, Human
ccaaaagauugcugaaauuuua

SEQ ID NO: 3797722 - RNA, 20 nt, Human
ccaaaagccaauggcugcag

SEQ ID NO: 3797723 - RNA, 14 nt, Human
ccaaaagcugcuca

SEQ ID NO: 3797724 - RNA, 12 nt, Human
ccaaaaggaaaa

SEQ ID NO: 3797725 - RNA, 17 nt, Human
ccaaaaggaaaaagcuc

SEQ ID NO: 3797726 - RNA, 19 nt, Human
ccaaaagguuuaagaaaua

SEQ ID NO: 3797727 - RNA, 22 nt, Human
ccaaaagucaaaaggugccugu

SEQ ID NO: 3797728 - RNA, 18 nt, Human
ccaaaaguuuuccugaga

SEQ ID NO: 3797729 - RNA, 11 nt, Human
cacagcuuccu

SEQ ID NO: 3797730 - RNA, 12 nt, Human
cacagcuuccug

SEQ ID NO: 3797731 - RNA, 18 nt, Human
cacagcuugaccugaggc

SEQ ID NO: 3797732 - RNA, 20 nt, Human
cacagcuugaccugaggcug

SEQ ID NO: 3797733 - RNA, 21 nt, Human
cacagcuuuuaguacccaccu

SEQ ID NO: 3797734 - RNA, 23 nt, Human
cacagcuuuuaguacccaccuga

SEQ ID NO: 3797735 - RNA, 15 nt, Human
cacaggaaguagagg

SEQ ID NO: 3797736 - RNA, 19 nt, Human
cacaggacacagucagauu

SEQ ID NO: 3797737 - RNA, 23 nt, Human
cacaggacaggaaaguggcaccu

SEQ ID NO: 3797738 - RNA, 18 nt, Human
cacaggacagggguuccu

SEQ ID NO: 3797739 - RNA, 16 nt, Human
cacaggacucugccuc

SEQ ID NO: 3797740 - RNA, 21 nt, Human
cacaggagacacugugcuaua

SEQ ID NO: 3797741 - RNA, 18 nt, Human
cacaggagcuaccugugu

SEQ ID NO: 3797742 - RNA, 22 nt, Human
cacaggaggagaaaucucacuu

SEQ ID NO: 3797743 - RNA, 22 nt, Human
cacaggaggcaggcauggcccu

SEQ ID NO: 3797744 - RNA, 14 nt, Human
cacaggagggaggg

SEQ ID NO: 3797745 - RNA, 21 nt, Human
cacaggagggagggggaaggc

SEQ ID NO: 3797746 - RNA, 19 nt, Human
cacaggagggcggccuccu

SEQ ID NO: 3797747 - RNA, 22 nt, Human
cacaggagggcggccuccuucu

SEQ ID NO: 3797748 - RNA, 22 nt, Human
cacaggagggggucguggagag

SEQ ID NO: 3797749 - RNA, 23 nt, Human
cacaggagggggucguggagagc

SEQ ID NO: 3797750 - RNA, 20 nt, Human
cacaggauccuauucucacc

SEQ ID NO: 3797751 - RNA, 16 nt, Human
cacaggaugaagcauu

SEQ ID NO: 3797752 - RNA, 14 nt, Human
cacaggcaacugag

SEQ ID NO: 3797753 - RNA, 18 nt, Human
cacaggcaacugaggcag

SEQ ID NO: 3797754 - RNA, 20 nt, Human
cacaggcaacugaggcagac

SEQ ID NO: 3797755 - RNA, 15 nt, Human
cacaggcagcuuucu

SEQ ID NO: 3797756 - RNA, 19 nt, Human
cacaggcagcuuucuagaa

SEQ ID NO: 3797757 - RNA, 19 nt, Human
cacaggcagggcaggacca

SEQ ID NO: 3797758 - RNA, 22 nt, Human
cacaggcagggcaggaccagcc

SEQ ID NO: 3797759 - RNA, 11 nt, Human
cacaggcaggu

SEQ ID NO: 3797760 - RNA, 14 nt, Human
cacaggcaggucca

SEQ ID NO: 3797761 - RNA, 15 nt, Human
cacaggcagguccag

SEQ ID NO: 3797762 - RNA, 19 nt, Human
cacaggcagguccaggguu

SEQ ID NO: 3797763 - RNA, 20 nt, Human
cacaggcaguuacuucugag

SEQ ID NO: 3797764 - RNA, 16 nt, Human
cacaggcauuuccugg

SEQ ID NO: 3797765 - RNA, 18 nt, Human
cacaggcauuuccugggu

SEQ ID NO: 3797766 - RNA, 23 nt, Human
cacaggccacccugugcagaagg

SEQ ID NO: 3797767 - RNA, 17 nt, Human
cacaggcccggcuccag

SEQ ID NO: 3797768 - RNA, 18 nt, Human
cacaggcccuuccucucc

SEQ ID NO: 3797769 - RNA, 19 nt, Human
cacaggcccuuccucucca

SEQ ID NO: 3797770 - RNA, 23 nt, Human
cacaggcccuuccucuccacugc

SEQ ID NO: 3797771 - RNA, 18 nt, Human
cacaggcccuuuccucag

SEQ ID NO: 3797772 - RNA, 23 nt, Human
cacaggcccuuuccucaggcaag

SEQ ID NO: 3797773 - RNA, 16 nt, Human
cacaggccucccuguu

SEQ ID NO: 3797774 - RNA, 14 nt, Human
cacaggccugagau

SEQ ID NO: 3797775 - RNA, 23 nt, Human
cacaggccugagauuucaucugc

SEQ ID NO: 3797776 - RNA, 13 nt, Human
cacaggccugugu

SEQ ID NO: 3797777 - RNA, 15 nt, Human
cacaggcucaggcag

SEQ ID NO: 3797778 - RNA, 19 nt, Human
cacaggcucaggcaggggc

SEQ ID NO: 3797779 - RNA, 20 nt, Human
cacaggcugagugcaggccc

SEQ ID NO: 3797780 - RNA, 17 nt, Human
cacaggcugggcugggc

SEQ ID NO: 3797781 - RNA, 19 nt, Human
cacaggcuuagggacagga

SEQ ID NO: 3797782 - RNA, 22 nt, Human
cacagggacugaaaaccucucc

SEQ ID NO: 3797783 - RNA, 17 nt, Human
cacagggacuugaaguu

SEQ ID NO: 3797784 - RNA, 20 nt, Human
cacagggagugcacauaucc

SEQ ID NO: 3797785 - RNA, 15 nt, Human
cacagggcaguaccu

SEQ ID NO: 3797786 - RNA, 20 nt, Human
cacagggcaugccccggcca

SEQ ID NO: 3797787 - RNA, 13 nt, Human
cacagggccuggc

SEQ ID NO: 3797788 - RNA, 14 nt, Human
cacagggccuggcc

SEQ ID NO: 3797789 - RNA, 17 nt, Human
cacagggccuggcccau

SEQ ID NO: 3797790 - RNA, 18 nt, Human
cacaggggaaaagaggag

SEQ ID NO: 3797791 - RNA, 17 nt, Human
cacaggggaggugauag

SEQ ID NO: 3797792 - RNA, 16 nt, Human
cacagggucugcucuu

SEQ ID NO: 3797793 - RNA, 14 nt, Human
cacaggguugggcc

SEQ ID NO: 3797794 - RNA, 21 nt, Human
cagaaaccuauccucacugcc

SEQ ID NO: 3797795 - RNA, 20 nt, Human
cagaaacgaaguagaaaggg

SEQ ID NO: 3797796 - RNA, 17 nt, Human
cagaaacgcauccagca

SEQ ID NO: 3797797 - RNA, 24 nt, Human
cagaaagaaguggggacagagcag

SEQ ID NO: 3797798 - RNA, 19 nt, Human
cagaaagcagaacagugau

SEQ ID NO: 3797799 - RNA, 17 nt, Human
cagaaagcagaggcugg

SEQ ID NO: 3797800 - RNA, 16 nt, Human
cagaaagcauuacauu

SEQ ID NO: 3797801 - RNA, 20 nt, Human
cagaaagccccacccaggcc

SEQ ID NO: 3797802 - RNA, 23 nt, Human
cagaaagccccacccaggccagg

SEQ ID NO: 3797803 - RNA, 14 nt, Human
cagaaagccuauca

SEQ ID NO: 3797804 - RNA, 22 nt, Human
cagaaagccuaucaaagaccuu

SEQ ID NO: 3797805 - RNA, 14 nt, Human
cagaaagcugccug

SEQ ID NO: 3797806 - RNA, 16 nt, Human
cagaaaggaaaaacaa

SEQ ID NO: 3797807 - RNA, 18 nt, Human
cagaaaggaaaaccugaa

SEQ ID NO: 3797808 - RNA, 12 nt, Human
cagaaaggagag

SEQ ID NO: 3797809 - RNA, 13 nt, Human
cagaaaggagagu

SEQ ID NO: 3797810 - RNA, 20 nt, Human
cagaaaggauauuuaagaaa

SEQ ID NO: 3797811 - RNA, 18 nt, Human
cagaaagggagggcucug

SEQ ID NO: 3797812 - RNA, 19 nt, Human
cagaaagggagggcucuga

SEQ ID NO: 3797813 - RNA, 20 nt, Human
cagaaagggagggcucugag

SEQ ID NO: 3797814 - RNA, 21 nt, Human
cagaaagggagggcucugagg

SEQ ID NO: 3797815 - RNA, 15 nt, Human
cagaaagguucugcc

SEQ ID NO: 3797816 - RNA, 21 nt, Human
cagaaagucauuccuucuuuu

SEQ ID NO: 3797817 - RNA, 14 nt, Human
cagaaagugccuga

SEQ ID NO: 3797818 - RNA, 15 nt, Human
cagaaagugccugac

SEQ ID NO: 3797819 - RNA, 23 nt, Human
cagaaagugccuuucaggaucua

SEQ ID NO: 3797820 - RNA, 22 nt, Human
cagaaaguggugcucaguugua

SEQ ID NO: 3797821 - RNA, 23 nt, Human
cagaaagugugcuuuaugcugaa

SEQ ID NO: 3797822 - RNA, 20 nt, Human
cagaaauaaaguuggugaca

SEQ ID NO: 3797823 - RNA, 11 nt, Human
cagaaauacag

SEQ ID NO: 3797824 - RNA, 15 nt, Human
cagaaauacagauuu

SEQ ID NO: 3797825 - RNA, 13 nt, Human
cagaaauacauau

SEQ ID NO: 3797826 - RNA, 23 nt, Human
cagaaauaccaaaauuauuucag

SEQ ID NO: 3797827 - RNA, 14 nt, Human
cagaaauagacaaa

SEQ ID NO: 3797828 - RNA, 21 nt, Human
cagaaauagacaaaaaguaua

SEQ ID NO: 3797829 - RNA, 18 nt, Human
cagaaauauauauacaua

SEQ ID NO: 3797830 - RNA, 20 nt, Human
cagaaauauauauacauaug

SEQ ID NO: 3797831 - RNA, 15 nt, Human
cagaaauaugugguu

SEQ ID NO: 3797832 - RNA, 14 nt, Human
cagaaauccaucua

SEQ ID NO: 3797833 - RNA, 16 nt, Human
cagaaaucuagaagac

SEQ ID NO: 3797834 - RNA, 20 nt, Human
cagaaaugagaucaggcucu

SEQ ID NO: 3797835 - RNA, 23 nt, Human
cagaaaugagaucaggcucugcc

SEQ ID NO: 3797836 - RNA, 23 nt, Human
cagaaaugaggccauggacucug

SEQ ID NO: 3797837 - RNA, 14 nt, Human
cagaaaugcugcug

SEQ ID NO: 3797838 - RNA, 17 nt, Human
cagaaauggaaagcaga

SEQ ID NO: 3797839 - RNA, 21 nt, Human
cagaaauggggaauucucuaa

SEQ ID NO: 3797840 - RNA, 16 nt, Human
cagaaauguacagcaa

SEQ ID NO: 3797841 - RNA, 23 nt, Human
cagaaaugucaugagauugcugu

SEQ ID NO: 3797842 - RNA, 16 nt, Human
cagaaaugucccuuuc

SEQ ID NO: 3797843 - RNA, 22 nt, Human
cagaaaugucccuuucuucucc

SEQ ID NO: 3797844 - RNA, 17 nt, Human
cagaaauguguuaucac

SEQ ID NO: 3797845 - RNA, 17 nt, Human
cagaaauucuguuuuua

SEQ ID NO: 3797846 - RNA, 21 nt, Human
cagaaauuggaacagaauguu

SEQ ID NO: 3797847 - RNA, 19 nt, Human
cagaaauugguaccuugca

SEQ ID NO: 3797848 - RNA, 13 nt, Human
cagaaauuguaua

SEQ ID NO: 3797849 - RNA, 18 nt, Human
cagaaauuguauauugua

SEQ ID NO: 3797850 - RNA, 19 nt, Human
cagaaauuguauauuguaa

SEQ ID NO: 3797851 - RNA, 22 nt, Human
cagaaauuguauauuguaauuu

SEQ ID NO: 3797852 - RNA, 17 nt, Human
cagaaauuuaauucaga

SEQ ID NO: 3797853 - RNA, 18 nt, Human
cagaaauuuuuauuuuuc

SEQ ID NO: 3797854 - RNA, 14 nt, Human
cagaacaaaugaag

SEQ ID NO: 3797855 - RNA, 21 nt, Human
cagaacaagguucccucugag

SEQ ID NO: 3797856 - RNA, 18 nt, Human
cagaacacacuccaucag

SEQ ID NO: 3797857 - RNA, 14 nt, Human
cagaacacauucuu

SEQ ID NO: 3797858 - RNA, 19 nt, Human
cagaacacggcucacgcuu

SEQ ID NO: 3797859 - RNA, 11 nt, Human
cagaacacugu

SEQ ID NO: 3797860 - RNA, 12 nt, Human
cagaacagcaga

SEQ ID NO: 3797861 - RNA, 14 nt, Human
cagaacagcagagg

SEQ ID NO: 3797862 - RNA, 17 nt, Human
cagaacagccgcuccug

SEQ ID NO: 3797863 - RNA, 20 nt, Human
cagaacagcuguugacucua

SEQ ID NO: 3797864 - RNA, 15 nt, Human
cagaacagcuucagg

SEQ ID NO: 3797865 - RNA, 24 nt, Human
cagaacagcuucagguuaucgaaa

SEQ ID NO: 3797866 - RNA, 12 nt, Human
cagaacaggguc

SEQ ID NO: 3797867 - RNA, 18 nt, Human
cagaacagugauuaccag

SEQ ID NO: 3797868 - RNA, 21 nt, Human
cagaacaucgcgaugggaacc

SEQ ID NO: 3797869 - RNA, 15 nt, Human
cagaaccaauuauuu

SEQ ID NO: 3797870 - RNA, 22 nt, Human
cagaaccacacuugaaaccuuu

SEQ ID NO: 3797871 - RNA, 12 nt, Human
cagaaccacagg

SEQ ID NO: 3797872 - RNA, 10 nt, Human
cagaaccagg

SEQ ID NO: 3797873 - RNA, 17 nt, Human
cagaaccagucuuucaa

SEQ ID NO: 3797874 - RNA, 14 nt, Human
cagaacccagggcu

SEQ ID NO: 3797875 - RNA, 19 nt, Human
cagaacccagggcucugcc

SEQ ID NO: 3797876 - RNA, 19 nt, Human
cagaacccuuggcuugccc

SEQ ID NO: 3797877 - RNA, 18 nt, Human
cagaaccggagagccagc

SEQ ID NO: 3797878 - RNA, 14 nt, Human
cagaaccucuuccc

SEQ ID NO: 3797879 - RNA, 16 nt, Human
cagaaccucuucccca

SEQ ID NO: 3797880 - RNA, 18 nt, Human
cagaaccucuuccccaga

SEQ ID NO: 3797881 - RNA, 21 nt, Human
cagaaccucuuccccagaaag

SEQ ID NO: 3797882 - RNA, 21 nt, Human
cagaaccuggagggcuagaac

SEQ ID NO: 3797883 - RNA, 17 nt, Human
cagaaccuuguuauuuc

SEQ ID NO: 3797884 - RNA, 18 nt, Human
cagaaccuuguuauuucu

SEQ ID NO: 3797885 - RNA, 21 nt, Human
cagaacgaaccuuggccuggg

SEQ ID NO: 3797886 - RNA, 19 nt, Human
auuaucauguguaaucaau

SEQ ID NO: 3797887 - RNA, 22 nt, Human
auuaucauguguaaucaauaaa

SEQ ID NO: 3797888 - RNA, 12 nt, Human
auuaucccugaa

SEQ ID NO: 3797889 - RNA, 16 nt, Human
auuauccuagauuaua

SEQ ID NO: 3797890 - RNA, 21 nt, Human
auuaucggaagcagugccuuc

SEQ ID NO: 3797891 - RNA, 16 nt, Human
auuaucgggaacagug

SEQ ID NO: 3797892 - RNA, 20 nt, Human
auuaucguuuucuuaaagug

SEQ ID NO: 3797893 - RNA, 14 nt, Human
auuaucuagauacu

SEQ ID NO: 3797894 - RNA, 20 nt, Human
auuaucuauacauaucuuua

SEQ ID NO: 3797895 - RNA, 19 nt, Human
auuaucuauuugugugugu

SEQ ID NO: 3797896 - RNA, 14 nt, Human
auuaucugggcuua

SEQ ID NO: 3797897 - RNA, 16 nt, Human
auuaucuugauacauu

SEQ ID NO: 3797898 - RNA, 20 nt, Human
auuaucuugauacauucaaa

SEQ ID NO: 3797899 - RNA, 18 nt, Human
auuaucuuggaaagaaac

SEQ ID NO: 3797900 - RNA, 18 nt, Human
auuaucuuuguaauuauu

SEQ ID NO: 3797901 - RNA, 13 nt, Human
auuaugaaaauaa

SEQ ID NO: 3797902 - RNA, 21 nt, Human
auuaugaaacuuguguaaaua

SEQ ID NO: 3797903 - RNA, 18 nt, Human
auuaugaaacuuuuggaa

SEQ ID NO: 3797904 - RNA, 19 nt, Human
auuaugaagaaggugaaua

SEQ ID NO: 3797905 - RNA, 20 nt, Human
auuaugaauuacauuuguau

SEQ ID NO: 3797906 - RNA, 14 nt, Human
auuaugacuguuuu

SEQ ID NO: 3797907 - RNA, 21 nt, Human
auuaugacuguuuuuuaaacu

SEQ ID NO: 3797908 - RNA, 23 nt, Human
auuaugagauugguuuuccugug

SEQ ID NO: 3797909 - RNA, 15 nt, Human
auuaugauuagcuuu

SEQ ID NO: 3797910 - RNA, 17 nt, Human
auuaugcaaauucccag

SEQ ID NO: 3797911 - RNA, 16 nt, Human
auuaugcacuaaauau

SEQ ID NO: 3797912 - RNA, 18 nt, Human
auuaugcacuaaauauga

SEQ ID NO: 3797913 - RNA, 23 nt, Human
auuaugcaugaaguaauaugcac

SEQ ID NO: 3797914 - RNA, 16 nt, Human
auuaugcauuauauca

SEQ ID NO: 3797915 - RNA, 19 nt, Human
auuaugccuuuuuugauca

SEQ ID NO: 3797916 - RNA, 11 nt, Human
auuaugcuaag

SEQ ID NO: 3797917 - RNA, 13 nt, Human
auuaugcuaagaa

SEQ ID NO: 3797918 - RNA, 20 nt, Human
auuauggaaaaauaaaacug

SEQ ID NO: 3797919 - RNA, 15 nt, Human
auuauggaaaacugu

SEQ ID NO: 3797920 - RNA, 15 nt, Human
auuaugggucacagg

SEQ ID NO: 3797921 - RNA, 19 nt, Human
auuaugguaaaauuuugua

SEQ ID NO: 3797922 - RNA, 22 nt, Human
auuauguaaaauguuuuagcaa

SEQ ID NO: 3797923 - RNA, 13 nt, Human
auuauguaaaucc

SEQ ID NO: 3797924 - RNA, 14 nt, Human
auuauguagcucuu

SEQ ID NO: 3797925 - RNA, 17 nt, Human
auuauguccacugugua

SEQ ID NO: 3797926 - RNA, 19 nt, Human
auuaugugacauuuuacau

SEQ ID NO: 3797927 - RNA, 16 nt, Human
auuaugugguuuuaga

SEQ ID NO: 3797928 - RNA, 11 nt, Human
auuaugugugc

SEQ ID NO: 3797929 - RNA, 13 nt, Human
auuaugugugcau

SEQ ID NO: 3797930 - RNA, 22 nt, Human
auuauguuaaacuagcauaucu

SEQ ID NO: 3797931 - RNA, 19 nt, Human
auuauguuauugaaaaaaa

SEQ ID NO: 3797932 - RNA, 22 nt, Human
auuauguuauugaaaaaaauug

SEQ ID NO: 3797933 - RNA, 16 nt, Human
auuauguuguuagaga

SEQ ID NO: 3797934 - RNA, 12 nt, Human
auuauguuuaua

SEQ ID NO: 3797935 - RNA, 16 nt, Human
auuauguuuauauaaa

SEQ ID NO: 3797936 - RNA, 16 nt, Human
auuauguuuuuuaaaa

SEQ ID NO: 3797937 - RNA, 14 nt, Human
auuauuaacuacau

SEQ ID NO: 3797938 - RNA, 20 nt, Human
auucaauauugacauuugua

SEQ ID NO: 3797939 - RNA, 14 nt, Human
auucaaucuguaaa

SEQ ID NO: 3797940 - RNA, 18 nt, Human
auucaaucuguaaacugu

SEQ ID NO: 3797941 - RNA, 18 nt, Human
auucaaugccccugaauu

SEQ ID NO: 3797942 - RNA, 21 nt, Human
auucaauuaaagaaauaauuu

SEQ ID NO: 3797943 - RNA, 22 nt, Human
auucaauuaaagaaauaauuuu

SEQ ID NO: 3797944 - RNA, 14 nt, Human
auucaauuccucug

SEQ ID NO: 3797945 - RNA, 19 nt, Human
auucaauuuauucaagaaa

SEQ ID NO: 3797946 - RNA, 19 nt, Human
auucacaagacccaaaagg

SEQ ID NO: 3797947 - RNA, 16 nt, Human
auucacaagcugccuc

SEQ ID NO: 3797948 - RNA, 20 nt, Human
auucacaagcugccucccug

SEQ ID NO: 3797949 - RNA, 23 nt, Human
auucacaaguuaagauucuuggu

SEQ ID NO: 3797950 - RNA, 13 nt, Human
auucacaauagaa

SEQ ID NO: 3797951 - RNA, 22 nt, Human
auucacaaugaaaugcucuccu

SEQ ID NO: 3797952 - RNA, 14 nt, Human
auucacaauuauuc

SEQ ID NO: 3797953 - RNA, 15 nt, Human
auucacaccccaccu

SEQ ID NO: 3797954 - RNA, 18 nt, Human
auucacaccccaccugcg

SEQ ID NO: 3797955 - RNA, 11 nt, Human
auucacacugu

SEQ ID NO: 3797956 - RNA, 16 nt, Human
auucacacuguuccag

SEQ ID NO: 3797957 - RNA, 19 nt, Human
auucacagugcucuuuucu

SEQ ID NO: 3797958 - RNA, 22 nt, Human
auucacaguucuuugggccaga

SEQ ID NO: 3797959 - RNA, 20 nt, Human
auucacaucuaaccucaucu

SEQ ID NO: 3797960 - RNA, 18 nt, Human
auucacauuguuaagaaa

SEQ ID NO: 3797961 - RNA, 16 nt, Human
auucaccaguacauuc

SEQ ID NO: 3797962 - RNA, 18 nt, Human
auucaccauguaaaacaa

SEQ ID NO: 3797963 - RNA, 18 nt, Human
auucaccuaagagauucu

SEQ ID NO: 3797964 - RNA, 19 nt, Human
auucaccuccuaaaacaac

SEQ ID NO: 3797965 - RNA, 13 nt, Human
auucaccugagca

SEQ ID NO: 3797966 - RNA, 19 nt, Human
auucaccugccccaacucu

SEQ ID NO: 3797967 - RNA, 12 nt, Human
auucaccuguaa

SEQ ID NO: 3797968 - RNA, 16 nt, Human
auucaccuguaaaacu

SEQ ID NO: 3797969 - RNA, 18 nt, Human
auucaccuguaaaacuuu

SEQ ID NO: 3797970 - RNA, 23 nt, Human
auucaccuuccagugucucggag

SEQ ID NO: 3797971 - RNA, 16 nt, Human
auucacucaagcacug

SEQ ID NO: 3797972 - RNA, 18 nt, Human
auucacucaagcacugau

SEQ ID NO: 3797973 - RNA, 21 nt, Human
auucacucauacaucuggccg

SEQ ID NO: 3797974 - RNA, 12 nt, Human
auucacucccac

SEQ ID NO: 3797975 - RNA, 13 nt, Human
auucacucccaca

SEQ ID NO: 3797976 - RNA, 20 nt, Human
auucacugaaguucuccuga

SEQ ID NO: 3797977 - RNA, 15 nt, Human
auucacugcccccag

SEQ ID NO: 3797978 - RNA, 18 nt, Human
auucacuuagcagaaccu

SEQ ID NO: 3797979 - RNA, 12 nt, Human
auucacuucacg

SEQ ID NO: 3797980 - RNA, 13 nt, Human
auucacuucacgc

SEQ ID NO: 3797981 - RNA, 15 nt, Human
auucacuucacugug

SEQ ID NO: 3797982 - RNA, 14 nt, Human
auucacuugcauuu

SEQ ID NO: 3797983 - RNA, 22 nt, Human
auucagaaaauguucuguuugc

SEQ ID NO: 3797984 - RNA, 13 nt, Human
auucagaaaugag

SEQ ID NO: 3797985 - RNA, 24 nt, Human
auucagaaggaucuucaucugacu

SEQ ID NO: 3797986 - RNA, 15 nt, Human
auucagaaggggagg

SEQ ID NO: 3797987 - RNA, 12 nt, Human
auucagacagcu

SEQ ID NO: 3797988 - RNA, 13 nt, Human
auucagacagcug

SEQ ID NO: 3797989 - RNA, 14 nt, Human
auucagacagcugc

SEQ ID NO: 3797990 - RNA, 19 nt, Human
auucagacagcugccuggg

SEQ ID NO: 3797991 - RNA, 11 nt, Human
auucagacauc

SEQ ID NO: 3797992 - RNA, 14 nt, Human
auucagagaauauc

SEQ ID NO: 3797993 - RNA, 18 nt, Human
auucagauauauuuuuca

SEQ ID NO: 3797994 - RNA, 21 nt, Human
auucagauauauuuuucacag

SEQ ID NO: 3797995 - RNA, 20 nt, Human
auucagauaugauucaaaug

SEQ ID NO: 3797996 - RNA, 23 nt, Human
auucagaucacugaauuuauaaa

SEQ ID NO: 3797997 - RNA, 14 nt, Human
auucagauuucucu

SEQ ID NO: 3797998 - RNA, 20 nt, Human
auucagauuucucuuugaaa

SEQ ID NO: 3797999 - RNA, 20 nt, Human
auucagcaaggcgcuaacuu

SEQ ID NO: 3798000 - RNA, 17 nt, Human
auucagcacugauuuca

SEQ ID NO: 3798001 - RNA, 17 nt, Human
auucagccauguacaga

SEQ ID NO: 3798002 - RNA, 20 nt, Human
auucagcccauuucacaccu

SEQ ID NO: 3798003 - RNA, 15 nt, Human
auucagccuucuuuu

SEQ ID NO: 3798004 - RNA, 21 nt, Human
auucagccuucuuuuucugga

SEQ ID NO: 3798005 - RNA, 17 nt, Human
auucagcggaauauuga

SEQ ID NO: 3798006 - RNA, 22 nt, Human
auucagcuagaacuuugaagga

SEQ ID NO: 3798007 - RNA, 14 nt, Human
auucagcucaugga

SEQ ID NO: 3798008 - RNA, 12 nt, Human
auucagcugccc

SEQ ID NO: 3798009 - RNA, 17 nt, Human
auucaggaaaaggccug

SEQ ID NO: 3798010 - RNA, 18 nt, Human
auucaggaaccuggacca

SEQ ID NO: 3798011 - RNA, 19 nt, Human
auucaggaaccuggaccaa

SEQ ID NO: 3798012 - RNA, 16 nt, Human
auucaggaagaugaaa

SEQ ID NO: 3798013 - RNA, 21 nt, Human
auucaggaagcucagggccug

SEQ ID NO: 3798014 - RNA, 23 nt, Human
auucaggaagcucagggccuggc

SEQ ID NO: 3798015 - RNA, 19 nt, Human
auucaggacugcugguuug

SEQ ID NO: 3798016 - RNA, 21 nt, Human
auucaggacuuaacggcucca

SEQ ID NO: 3798017 - RNA, 18 nt, Human
auucaggacuugaaagaa

SEQ ID NO: 3798018 - RNA, 21 nt, Human
auucaggagaguagaacagau

SEQ ID NO: 3798019 - RNA, 20 nt, Human
auucagggaaggaggagccu

SEQ ID NO: 3798020 - RNA, 23 nt, Human
auucagggaaggaggagccuguc

SEQ ID NO: 3798021 - RNA, 17 nt, Human
auucagguaauacaaac

SEQ ID NO: 3798022 - RNA, 23 nt, Human
auucagguauguugccuuuaugg

SEQ ID NO: 3798023 - RNA, 14 nt, Human
auucagguuuuucc

SEQ ID NO: 3798024 - RNA, 15 nt, Human
auucagguuuuuccu

SEQ ID NO: 3798025 - RNA, 13 nt, Human
auucaguauguuu

SEQ ID NO: 3798026 - RNA, 16 nt, Human
auucagucuugccuua

SEQ ID NO: 3798027 - RNA, 17 nt, Human
auucagugcuguggccu

SEQ ID NO: 3798028 - RNA, 21 nt, Human
auucagugcuguggccugggc

SEQ ID NO: 3798029 - RNA, 15 nt, Human
auucaguuaagaaaa

SEQ ID NO: 3798030 - RNA, 20 nt, Human
auucaguugguaagcuucca

SEQ ID NO: 3798031 - RNA, 21 nt, Human
auucaguuguuagugugucuu

SEQ ID NO: 3798032 - RNA, 14 nt, Human
auucaguuucauaa

SEQ ID NO: 3798033 - RNA, 20 nt, Human
auucaguuucuaaaauugag

SEQ ID NO: 3798034 - RNA, 13 nt, Human
auucaguuuuuuu

SEQ ID NO: 3798035 - RNA, 19 nt, Human
auucaguuuuuuuccaguu

SEQ ID NO: 3798036 - RNA, 21 nt, Human
auucauaagccaauuuuucug

SEQ ID NO: 3798037 - RNA, 23 nt, Human
auucauaagccaauuuuucugca

SEQ ID NO: 3798038 - RNA, 11 nt, Human
auucauaauaa

SEQ ID NO: 3798039 - RNA, 15 nt, Human
auucauaaugacuua

SEQ ID NO: 3798040 - RNA, 14 nt, Human
auucauacuuaaaa

SEQ ID NO: 3798041 - RNA, 13 nt, Human
auucauaugcaua

SEQ ID NO: 3798042 - RNA, 20 nt, Human
auucauauuacaauauuugu

SEQ ID NO: 3798043 - RNA, 20 nt, Human
auucauauuggaaaaaucac

SEQ ID NO: 3798044 - RNA, 18 nt, Human
auucauauuuacuucuua

SEQ ID NO: 3798045 - RNA, 18 nt, Human
auucauauuuaugaaucu

SEQ ID NO: 3798046 - RNA, 17 nt, Human
auucaucucucuuuaau

SEQ ID NO: 3798047 - RNA, 17 nt, Human
auucaucuuguguuuua

SEQ ID NO: 3798048 - RNA, 17 nt, Human
auucaugaacuucgcau

SEQ ID NO: 3798049 - RNA, 13 nt, Human
auucaugacuaug

SEQ ID NO: 3798050 - RNA, 14 nt, Human
auucaugcuaccca

SEQ ID NO: 3798051 - RNA, 16 nt, Human
auucaugcuacugcca

SEQ ID NO: 3798052 - RNA, 18 nt, Human
auucauggaccacuguuu

SEQ ID NO: 3798053 - RNA, 23 nt, Human
aaaauuaaucugggccagaauuu

SEQ ID NO: 3798054 - RNA, 20 nt, Human
aaaauuagaaauuggcugga

SEQ ID NO: 3798055 - RNA, 22 nt, Human
aaaauuauacuaacuuauuuau

SEQ ID NO: 3798056 - RNA, 16 nt, Human
aaaauuauagaaguuu

SEQ ID NO: 3798057 - RNA, 13 nt, Human
aaaauuaucuaua

SEQ ID NO: 3798058 - RNA, 18 nt, Human
aaaauuaucuauuuguau

SEQ ID NO: 3798059 - RNA, 16 nt, Human
aaaauuaugaaucuga

SEQ ID NO: 3798060 - RNA, 22 nt, Human
aaaauuaugaaucugauuuuua

SEQ ID NO: 3798061 - RNA, 14 nt, Human
aaaauuauuucaga

SEQ ID NO: 3798062 - RNA, 19 nt, Human
aaaauuauuucagaaaugu

SEQ ID NO: 3798063 - RNA, 13 nt, Human
aaaauuauuugua

SEQ ID NO: 3798064 - RNA, 13 nt, Human
aaaauuauuuugg

SEQ ID NO: 3798065 - RNA, 18 nt, Human
aaaauucaacaaacauuu

SEQ ID NO: 3798066 - RNA, 18 nt, Human
aaaauucacuauuggcug

SEQ ID NO: 3798067 - RNA, 21 nt, Human
aaaauucagcaaaccauuuuu

SEQ ID NO: 3798068 - RNA, 19 nt, Human
aaaauucagcaaagugguu

SEQ ID NO: 3798069 - RNA, 20 nt, Human
aaaauucauaguaagauuga

SEQ ID NO: 3798070 - RNA, 16 nt, Human
aaaauucauuucacau

SEQ ID NO: 3798071 - RNA, 14 nt, Human
aaaauucauuucua

SEQ ID NO: 3798072 - RNA, 15 nt, Human
aaaauucauuucuaa

SEQ ID NO: 3798073 - RNA, 17 nt, Human
aaaauuccaaauucaug

SEQ ID NO: 3798074 - RNA, 13 nt, Human
aaaauuccacuca

SEQ ID NO: 3798075 - RNA, 12 nt, Human
aaaauuccagaa

SEQ ID NO: 3798076 - RNA, 16 nt, Human
aaaauuccagaaagga

SEQ ID NO: 3798077 - RNA, 14 nt, Human
aaaauuccuauugu

SEQ ID NO: 3798078 - RNA, 23 nt, Human
aaaauucgaccugauuuacaguu

SEQ ID NO: 3798079 - RNA, 22 nt, Human
aaaauucgcccgagcuguuuau

SEQ ID NO: 3798080 - RNA, 13 nt, Human
aaaauucuaaaua

SEQ ID NO: 3798081 - RNA, 20 nt, Human
aaaauucucagucaguaauu

SEQ ID NO: 3798082 - RNA, 17 nt, Human
aaaauucuugaaagaau

SEQ ID NO: 3798083 - RNA, 20 nt, Human
cagaggagagaggacccccu

SEQ ID NO: 3798084 - RNA, 18 nt, Human
cagaggagccaccaguuc

SEQ ID NO: 3798085 - RNA, 21 nt, Human
cagaggaggcagaauaagaaa

SEQ ID NO: 3798086 - RNA, 18 nt, Human
cagaggagggcagcagaa

SEQ ID NO: 3798087 - RNA, 21 nt, Human
cagaggaguacaggugaagca

SEQ ID NO: 3798088 - RNA, 15 nt, Human
cagaggaugagcucu

SEQ ID NO: 3798089 - RNA, 13 nt, Human
cagaggauggcca

SEQ ID NO: 3798090 - RNA, 15 nt, Human
cagaggauggccagu

SEQ ID NO: 3798091 - RNA, 16 nt, Human
cagaggauggccagug

SEQ ID NO: 3798092 - RNA, 13 nt, Human
cagaggcagcccc

SEQ ID NO: 3798093 - RNA, 14 nt, Human
cagaggcagcccca

SEQ ID NO: 3798094 - RNA, 18 nt, Human
cagaggcagccccauucu

SEQ ID NO: 3798095 - RNA, 19 nt, Human
cagaggcagccccauucug

SEQ ID NO: 3798096 - RNA, 21 nt, Human
cagaggcagcccgcacaccug

SEQ ID NO: 3798097 - RNA, 21 nt, Human
cagaggcaguaccugggcaag

SEQ ID NO: 3798098 - RNA, 14 nt, Human
cagaggccaacacu

SEQ ID NO: 3798099 - RNA, 21 nt, Human
cagaggccaugggccuccugu

SEQ ID NO: 3798100 - RNA, 18 nt, Human
cagaggcccaggcugccg

SEQ ID NO: 3798101 - RNA, 23 nt, Human
cagaggccccaauaccccaugga

SEQ ID NO: 3798102 - RNA, 15 nt, Human
auucuguauagauua

SEQ ID NO: 3798103 - RNA, 18 nt, Human
auucugucccuagguguu

SEQ ID NO: 3798104 - RNA, 20 nt, Human
auucugucgccuuagcaugu

SEQ ID NO: 3798105 - RNA, 24 nt, Human
auucugucucuggauuauauuaug

SEQ ID NO: 3798106 - RNA, 23 nt, Human
auucugucuucauccccucagaa

SEQ ID NO: 3798107 - RNA, 14 nt, Human
auucugucuugaag

SEQ ID NO: 3798108 - RNA, 17 nt, Human
auucuguggaacaagcc

SEQ ID NO: 3798109 - RNA, 16 nt, Human
auucuguuaaaaucua

SEQ ID NO: 3798110 - RNA, 22 nt, Human
auucuguuaaaaucuauucugu

SEQ ID NO: 3798111 - RNA, 19 nt, Human
auucuguucugauauuaau

SEQ ID NO: 3798112 - RNA, 13 nt, Human
auucuguuggaag

SEQ ID NO: 3798113 - RNA, 14 nt, Human
auucuguuggccag

SEQ ID NO: 3798114 - RNA, 12 nt, Human
auucuguuucuu

SEQ ID NO: 3798115 - RNA, 18 nt, Human
auucuguuuuagguuaaa

SEQ ID NO: 3798116 - RNA, 15 nt, Human
auucuuaaaaaaaga

SEQ ID NO: 3798117 - RNA, 23 nt, Human
auucuuaaaauauauuucagaua

SEQ ID NO: 3798118 - RNA, 13 nt, Human
auucuuaaaaugc

SEQ ID NO: 3798119 - RNA, 20 nt, Human
auucuuaaaaugcaauauuu

SEQ ID NO: 3798120 - RNA, 19 nt, Human
auucuuaaaguugaauuua

SEQ ID NO: 3798121 - RNA, 14 nt, Human
auucuuaaauaugu

SEQ ID NO: 3798122 - RNA, 17 nt, Human
auucuuacaaacaugug

SEQ ID NO: 3798123 - RNA, 23 nt, Human
auucuuacacugccuguauacuu

SEQ ID NO: 3798124 - RNA, 15 nt, Human
auucuuacauguuuu

SEQ ID NO: 3798125 - RNA, 20 nt, Human
auucuuacauuuuacuuuuu

SEQ ID NO: 3798126 - RNA, 17 nt, Human
auucuuacuaaaaagua

SEQ ID NO: 3798127 - RNA, 18 nt, Human
auucuuagccuguggcag

SEQ ID NO: 3798128 - RNA, 12 nt, Human
auucuuauaaau

SEQ ID NO: 3798129 - RNA, 20 nt, Human
auucuuauaaauaugaagcu

SEQ ID NO: 3798130 - RNA, 13 nt, Human
auucuuauuacua

SEQ ID NO: 3798131 - RNA, 18 nt, Human
auucuuauuuaaugaaag

SEQ ID NO: 3798132 - RNA, 16 nt, Human
auucuuauuuuuuaaa

SEQ ID NO: 3798133 - RNA, 14 nt, Human
auucuucaaccagu

SEQ ID NO: 3798134 - RNA, 21 nt, Human
auucuucaagagacccuucaa

SEQ ID NO: 3798135 - RNA, 18 nt, Human
auucuucaagaucccauu

SEQ ID NO: 3798136 - RNA, 20 nt, Human
auucuucagcguaaaauggu

SEQ ID NO: 3798137 - RNA, 13 nt, Human
auucuuccaucug

SEQ ID NO: 3798138 - RNA, 23 nt, Human
auucuuccaucugauugugaugu

SEQ ID NO: 3798139 - RNA, 22 nt, Human
auucuucccuuuuaaacacauu

SEQ ID NO: 3798140 - RNA, 19 nt, Human
auucuuccuaguuuucucc

SEQ ID NO: 3798141 - RNA, 22 nt, Human
auucuuccucccucccucuuuc

SEQ ID NO: 3798142 - RNA, 14 nt, Human
auucuucuagaguu

SEQ ID NO: 3798143 - RNA, 15 nt, Human
auucuucucuagcug

SEQ ID NO: 3798144 - RNA, 16 nt, Human
auucuucucuguuguc

SEQ ID NO: 3798145 - RNA, 13 nt, Human
auucuucugaacu

SEQ ID NO: 3798146 - RNA, 19 nt, Human
auucuucugcuucagccuc

SEQ ID NO: 3798147 - RNA, 13 nt, Human
auucuucuguccu

SEQ ID NO: 3798148 - RNA, 15 nt, Human
auucuucuguccuga

SEQ ID NO: 3798149 - RNA, 14 nt, Human
auucuucuguguuu

SEQ ID NO: 3798150 - RNA, 20 nt, Human
auucuugaaagaauuuuccu

SEQ ID NO: 3798151 - RNA, 15 nt, Human
auucuugaaggaaaa

SEQ ID NO: 3798152 - RNA, 14 nt, Human
auucuugaagucag

SEQ ID NO: 3798153 - RNA, 19 nt, Human
auucuugaucaguaguuug

SEQ ID NO: 3798154 - RNA, 19 nt, Human
auucuugauguaaaaucuu

SEQ ID NO: 3798155 - RNA, 22 nt, Human
auucuugauuuauuugcuucuu

SEQ ID NO: 3798156 - RNA, 12 nt, Human
auucuugcauau

SEQ ID NO: 3798157 - RNA, 17 nt, Human
auucuugguauuuggau

SEQ ID NO: 3798158 - RNA, 18 nt, Human
auucuugguugaggaaac

SEQ ID NO: 3798159 - RNA, 14 nt, Human
auucuugucaaaaa

SEQ ID NO: 3798160 - RNA, 17 nt, Human
auucuugucacaauaaa

SEQ ID NO: 3798161 - RNA, 12 nt, Human
auucuugugcuu

SEQ ID NO: 3798162 - RNA, 18 nt, Human
auucuugugcuuuuccug

SEQ ID NO: 3798163 - RNA, 20 nt, Human
auucuuguugcuguacaaaa

SEQ ID NO: 3798164 - RNA, 18 nt, Human
auucuuguuuucuuucuu

SEQ ID NO: 3798165 - RNA, 16 nt, Human
auucuuguuuugcuuc

SEQ ID NO: 3798166 - RNA, 15 nt, Human
auucuuuaaugauuc

SEQ ID NO: 3798167 - RNA, 19 nt, Human
auucuuuaaugauuccuau

SEQ ID NO: 3798168 - RNA, 21 nt, Human
auucuuuauacaacagugcua

SEQ ID NO: 3798169 - RNA, 19 nt, Human
auucuuucaagugaaucua

SEQ ID NO: 3798170 - RNA, 20 nt, Human
auucuuucaauacagauaua

SEQ ID NO: 3798171 - RNA, 18 nt, Human
auucuuucagcuaucagu

SEQ ID NO: 3798172 - RNA, 15 nt, Human
auucuuucaguucuu

SEQ ID NO: 3798173 - RNA, 16 nt, Human
auucuuuccauuauga

SEQ ID NO: 3798174 - RNA, 16 nt, Human
auucuuuccauuugca

SEQ ID NO: 3798175 - RNA, 19 nt, Human
auucuuuccauuugcauuu

SEQ ID NO: 3798176 - RNA, 22 nt, Human
auucuuuccauuugcauuuguu

SEQ ID NO: 3798177 - RNA, 20 nt, Human
auucuuucccagugagucuc

SEQ ID NO: 3798178 - RNA, 17 nt, Human
auucuuugauguuaaca

SEQ ID NO: 3798179 - RNA, 19 nt, Human
auucuuugauguuaacaca

SEQ ID NO: 3798180 - RNA, 20 nt, Human
auucuuugauguuaacacau

SEQ ID NO: 3798181 - RNA, 19 nt, Human
auucuuuuccaaaauaaaa

SEQ ID NO: 3798182 - RNA, 13 nt, Human
auucuuuucucag

SEQ ID NO: 3798183 - RNA, 19 nt, Human
auucuuuucucaguguugg

SEQ ID NO: 3798184 - RNA, 20 nt, Human
auucuuuucugcaaaauaga

SEQ ID NO: 3798185 - RNA, 12 nt, Human
auucuuuugcca

SEQ ID NO: 3798186 - RNA, 14 nt, Human
auucuuuugccaag

SEQ ID NO: 3798187 - RNA, 13 nt, Human
auucuuuuucuga

SEQ ID NO: 3798188 - RNA, 15 nt, Human
auucuuuuucugauu

SEQ ID NO: 3798189 - RNA, 22 nt, Human
auucuuuuucuuuuuuaaauua

SEQ ID NO: 3798190 - RNA, 16 nt, Human
auucuuuuugaaaugu

SEQ ID NO: 3798191 - RNA, 20 nt, Human
auucuuuuugcucuaaaaua

SEQ ID NO: 3798192 - RNA, 17 nt, Human
auucuuuuuuaaauuuu

SEQ ID NO: 3798193 - RNA, 15 nt, Human
auucuuuuuuauuaa

SEQ ID NO: 3798194 - RNA, 19 nt, Human
auucuuuuuuauuaaucac

SEQ ID NO: 3798195 - RNA, 20 nt, Human
auucuuuuuuauuaaucacu

SEQ ID NO: 3798196 - RNA, 21 nt, Human
auucuuuuuuauuaaucacug

SEQ ID NO: 3798197 - RNA, 15 nt, Human
auugaaaaaaauaau

SEQ ID NO: 3798198 - RNA, 14 nt, Human
auugaaaaaauaga

SEQ ID NO: 3798199 - RNA, 22 nt, Human
auugaaaaaauagagccugagg

SEQ ID NO: 3798200 - RNA, 18 nt, Human
auugaaaacuuuucucag

SEQ ID NO: 3798201 - RNA, 13 nt, Human
auugaaaaggaca

SEQ ID NO: 3798202 - RNA, 12 nt, Human
auugaaaaguac

SEQ ID NO: 3798203 - RNA, 14 nt, Human
auugaaaaugaaug

SEQ ID NO: 3798204 - RNA, 20 nt, Human
auugaaaauuauuaaucaga

SEQ ID NO: 3798205 - RNA, 22 nt, Human
auugaaaauuauuaaucagaag

SEQ ID NO: 3798206 - RNA, 18 nt, Human
auugaaaggcauucucug

SEQ ID NO: 3798207 - RNA, 20 nt, Human
auugaaauauaaugcaaacc

SEQ ID NO: 3798208 - RNA, 14 nt, Human
auugaaauguaagg

SEQ ID NO: 3798209 - RNA, 12 nt, Human
auugaaauguca

SEQ ID NO: 3798210 - RNA, 12 nt, Human
auugaaauuaua

SEQ ID NO: 3798211 - RNA, 12 nt, Human
auugaaauucua

SEQ ID NO: 3798212 - RNA, 13 nt, Human
auugaaauucuga

SEQ ID NO: 3798213 - RNA, 17 nt, Human
auugaaauuguacauau

SEQ ID NO: 3798214 - RNA, 19 nt, Human
auugaaauugugaacucau

SEQ ID NO: 3798215 - RNA, 22 nt, Human
auugaacaaguuguuucauuga

SEQ ID NO: 3798216 - RNA, 14 nt, Human
auugaacacaaacu

SEQ ID NO: 3798217 - RNA, 16 nt, Human
auugaacacaaacugu

SEQ ID NO: 3798218 - RNA, 18 nt, Human
auugaaccuuugugcccu

SEQ ID NO: 3798219 - RNA, 23 nt, Human
auugaacucuuugaaugacaaag

SEQ ID NO: 3798220 - RNA, 14 nt, Human
auugaagaaacaga

SEQ ID NO: 3798221 - RNA, 15 nt, Human
auugaagaaacagau

SEQ ID NO: 3798222 - RNA, 13 nt, Human
auugaagacaauu

SEQ ID NO: 3798223 - RNA, 18 nt, Human
auugaagagagagcugag

SEQ ID NO: 3798224 - RNA, 21 nt, Human
auugaagagagauauaucuga

SEQ ID NO: 3798225 - RNA, 23 nt, Human
auugaagagagauauaucugaaa

SEQ ID NO: 3798226 - RNA, 18 nt, Human
auugaagcagaguggcag

SEQ ID NO: 3798227 - RNA, 15 nt, Human
auugaagcccuccaa

SEQ ID NO: 3798228 - RNA, 18 nt, Human
auugcaacaggcugggcu

SEQ ID NO: 3798229 - RNA, 21 nt, Human
auugcaacaggcugggcuuca

SEQ ID NO: 3798230 - RNA, 12 nt, Human
auugcaauagaa

SEQ ID NO: 3798231 - RNA, 16 nt, Human
auugcaauaucugaag

SEQ ID NO: 3798232 - RNA, 16 nt, Human
auugcaaugaaggaaa

SEQ ID NO: 3798233 - RNA, 22 nt, Human
auugcacaauauugaacuuuuu

SEQ ID NO: 3798234 - RNA, 17 nt, Human
auugcaccuggauguac

SEQ ID NO: 3798235 - RNA, 16 nt, Human
auugcacguggccucu

SEQ ID NO: 3798236 - RNA, 23 nt, Human
auugcacguggccucuugagcag

SEQ ID NO: 3798237 - RNA, 15 nt, Human
auugcacuccagccu

SEQ ID NO: 3798238 - RNA, 17 nt, Human
auugcacuccagccugg

SEQ ID NO: 3798239 - RNA, 18 nt, Human
auugcacuccagccuggg

SEQ ID NO: 3798240 - RNA, 19 nt, Human
auugcacuccagccugggc

SEQ ID NO: 3798241 - RNA, 18 nt, Human
auugcagaaaauucugug

SEQ ID NO: 3798242 - RNA, 19 nt, Human
auugcagaauuguuuagau

SEQ ID NO: 3798243 - RNA, 20 nt, Human
auugcagauaacuuugacuu

SEQ ID NO: 3798244 - RNA, 23 nt, Human
auugcaguuuaucauucaagugu

SEQ ID NO: 3798245 - RNA, 14 nt, Human
auugcauaaagcau

SEQ ID NO: 3798246 - RNA, 20 nt, Human
auugcauacuauuaaacaug

SEQ ID NO: 3798247 - RNA, 15 nt, Human
auugcauacuuugua

SEQ ID NO: 3798248 - RNA, 18 nt, Human
auugcauauaacuuauau

SEQ ID NO: 3798249 - RNA, 22 nt, Human
auugcauauaacuuauauugua

SEQ ID NO: 3798250 - RNA, 16 nt, Human
auugcauauauacaua

SEQ ID NO: 3798251 - RNA, 18 nt, Human
auugcaucaccucuguaa

SEQ ID NO: 3798252 - RNA, 15 nt, Human
auugcaucuguauaa

SEQ ID NO: 3798253 - RNA, 19 nt, Human
auugcaucuguauaaguaa

SEQ ID NO: 3798254 - RNA, 19 nt, Human
auugcaugccgggugcagc

SEQ ID NO: 3798255 - RNA, 23 nt, Human
auugcaugccgggugcagcaucu

SEQ ID NO: 3798256 - RNA, 20 nt, Human
auugcaugcugcuuuaauug

SEQ ID NO: 3798257 - RNA, 17 nt, Human
auugcauggguuuugua

SEQ ID NO: 3798258 - RNA, 15 nt, Human
auugcaugugacucu

SEQ ID NO: 3798259 - RNA, 17 nt, Human
auugcaugugacucuga

SEQ ID NO: 3798260 - RNA, 18 nt, Human
auugcaugugacucugaa

SEQ ID NO: 3798261 - RNA, 14 nt, Human
cagaggccccagcc

SEQ ID NO: 3798262 - RNA, 19 nt, Human
cagaggcccccagcccagg

SEQ ID NO: 3798263 - RNA, 24 nt, Human
cagaggcccccagcccagggcucc

SEQ ID NO: 3798264 - RNA, 15 nt, Human
cagaggcgucccgca

SEQ ID NO: 3798265 - RNA, 13 nt, Human
cagaggcugccuc

SEQ ID NO: 3798266 - RNA, 14 nt, Human
cagaggcuggaggc

SEQ ID NO: 3798267 - RNA, 16 nt, Human
cagaggcuggaggcag

SEQ ID NO: 3798268 - RNA, 19 nt, Human
cagaggcuggaggcagggc

SEQ ID NO: 3798269 - RNA, 20 nt, Human
cagaggcuggaggcagggcc

SEQ ID NO: 3798270 - RNA, 14 nt, Human
cagaggcuggccuc

SEQ ID NO: 3798271 - RNA, 15 nt, Human
cagaggcuucuucag

SEQ ID NO: 3798272 - RNA, 21 nt, Human
cagagggagugacagaggcag

SEQ ID NO: 3798273 - RNA, 17 nt, Human
cagagggcagaggcugg

SEQ ID NO: 3798274 - RNA, 10 nt, Human
cagagggcug

SEQ ID NO: 3798275 - RNA, 15 nt, Human
cagagggcuggaggc

SEQ ID NO: 3798276 - RNA, 19 nt, Human
cagagggcuugugaacaga

SEQ ID NO: 3798277 - RNA, 17 nt, Human
cagaggggacucugggc

SEQ ID NO: 3798278 - RNA, 16 nt, Human
cagaggggcaggcccu

SEQ ID NO: 3798279 - RNA, 18 nt, Human
cagaggggcaggcccugc

SEQ ID NO: 3798280 - RNA, 19 nt, Human
cagaggggcaggcccugca

SEQ ID NO: 3798281 - RNA, 17 nt, Human
cagaggggccugccacc

SEQ ID NO: 3798282 - RNA, 22 nt, Human
cagaggggccugccaccuggac

SEQ ID NO: 3798283 - RNA, 23 nt, Human
cagaggggccugccaccuggacc

SEQ ID NO: 3798284 - RNA, 17 nt, Human
cagaggggguggccucc

SEQ ID NO: 3798285 - RNA, 20 nt, Human
cagaggggguggccucccaa

SEQ ID NO: 3798286 - RNA, 19 nt, Human
cagagggguaagagaggau

SEQ ID NO: 3798287 - RNA, 13 nt, Human
cagagggucacag

SEQ ID NO: 3798288 - RNA, 15 nt, Human
cagagggucacagug

SEQ ID NO: 3798289 - RNA, 16 nt, Human
cagagggucugggggc

SEQ ID NO: 3798290 - RNA, 17 nt, Human
cagagggucugggggca

SEQ ID NO: 3798291 - RNA, 16 nt, Human
cagaggguuaggagug

SEQ ID NO: 3798292 - RNA, 21 nt, Human
cagagguaaaagugugagcag

SEQ ID NO: 3798293 - RNA, 14 nt, Human
cagagguaacagaa

SEQ ID NO: 3798294 - RNA, 15 nt, Human
cagagguaacagaac

SEQ ID NO: 3798295 - RNA, 16 nt, Human
cagagguaacagaaca

SEQ ID NO: 3798296 - RNA, 19 nt, Human
cagagguaacagaacagcu

SEQ ID NO: 3798297 - RNA, 15 nt, Human
cagagguacccuggg

SEQ ID NO: 3798298 - RNA, 23 nt, Human
cagagguauuaaaacuaaauuuc

SEQ ID NO: 3798299 - RNA, 19 nt, Human
cagaggucagacuaagaaa

SEQ ID NO: 3798300 - RNA, 15 nt, Human
cagagguccacaaca

SEQ ID NO: 3798301 - RNA, 20 nt, Human
cagagguccacaacacacag

SEQ ID NO: 3798302 - RNA, 15 nt, Human
cagagguccagccca

SEQ ID NO: 3798303 - RNA, 16 nt, Human
cagagguccagcccau

SEQ ID NO: 3798304 - RNA, 15 nt, Human
cagaggucucugccg

SEQ ID NO: 3798305 - RNA, 15 nt, Human
cagaggucugugcug

SEQ ID NO: 3798306 - RNA, 16 nt, Human
cagaggucugugcuga

SEQ ID NO: 3798307 - RNA, 13 nt, Human
cagaggugggcag

SEQ ID NO: 3798308 - RNA, 16 nt, Human
cagaggugggcaggug

SEQ ID NO: 3798309 - RNA, 22 nt, Human
cagaggugggcaggugguggca

SEQ ID NO: 3798310 - RNA, 23 nt, Human
cagaggugggcaggugguggcac

SEQ ID NO: 3798311 - RNA, 18 nt, Human
cagagguugugcacuguu

SEQ ID NO: 3798312 - RNA, 13 nt, Human
cagaguaagacau

SEQ ID NO: 3798313 - RNA, 17 nt, Human
cagaguaagcugcuuuu

SEQ ID NO: 3798314 - RNA, 21 nt, Human
cagaguaauccaagcaaaugu

SEQ ID NO: 3798315 - RNA, 13 nt, Human
cagaguagaaaua

SEQ ID NO: 3798316 - RNA, 20 nt, Human
cagaguaggggucugucuuu

SEQ ID NO: 3798317 - RNA, 19 nt, Human
cagagucacaagccucgag

SEQ ID NO: 3798318 - RNA, 22 nt, Human
cagagucacaagccucgaggug

SEQ ID NO: 3798319 - RNA, 13 nt, Human
cagagucccccca

SEQ ID NO: 3798320 - RNA, 14 nt, Human
cagaguccccccac

SEQ ID NO: 3798321 - RNA, 14 nt, Human
cagaguccuuucca

SEQ ID NO: 3798322 - RNA, 19 nt, Human
cagagucucacuguugccc

SEQ ID NO: 3798323 - RNA, 15 nt, Human
cagagugagacccug

SEQ ID NO: 3798324 - RNA, 17 nt, Human
cagagugagacucuguc

SEQ ID NO: 3798325 - RNA, 18 nt, Human
cagagugagacucugucu

SEQ ID NO: 3798326 - RNA, 19 nt, Human
cagagugagacucugucuc

SEQ ID NO: 3798327 - RNA, 20 nt, Human
cagagugagacucugucuca

SEQ ID NO: 3798328 - RNA, 14 nt, Human
cagagugcccagaa

SEQ ID NO: 3798329 - RNA, 20 nt, Human
cagagugccccaccugccac

SEQ ID NO: 3798330 - RNA, 15 nt, Human
cagagugcuuuucug

SEQ ID NO: 3798331 - RNA, 12 nt, Human
cagaguggcagu

SEQ ID NO: 3798332 - RNA, 18 nt, Human
cagaguggccuggccagg

SEQ ID NO: 3798333 - RNA, 21 nt, Human
cagaguggucuuucuggagag

SEQ ID NO: 3798334 - RNA, 22 nt, Human
cagaguggucuuucuggagagg

SEQ ID NO: 3798335 - RNA, 15 nt, Human
cagagugguggggga

SEQ ID NO: 3798336 - RNA, 17 nt, Human
cagaguguagccagguc

SEQ ID NO: 3798337 - RNA, 16 nt, Human
cagagugugcuggagg

SEQ ID NO: 3798338 - RNA, 19 nt, Human
cagagugugggaagggaga

SEQ ID NO: 3798339 - RNA, 17 nt, Human
cagaguuaaaucucaaa

SEQ ID NO: 3798340 - RNA, 16 nt, Human
cagaguuacaguucug

SEQ ID NO: 3798341 - RNA, 12 nt, Human
cagaguucacua

SEQ ID NO: 3798342 - RNA, 17 nt, Human
cagaguuccugcggagu

SEQ ID NO: 3798343 - RNA, 14 nt, Human
cagaguugaagaca

SEQ ID NO: 3798344 - RNA, 19 nt, Human
cagaguugcugggagcuga

SEQ ID NO: 3798345 - RNA, 20 nt, Human
cagaguugcugggagcugaa

SEQ ID NO: 3798346 - RNA, 12 nt, Human
cagaguuguaaa

SEQ ID NO: 3798347 - RNA, 13 nt, Human
cagaguuguaaau

SEQ ID NO: 3798348 - RNA, 14 nt, Human
cagaguuguaaaua

SEQ ID NO: 3798349 - RNA, 16 nt, Human
cagaguuguaaauaua

SEQ ID NO: 3798350 - RNA, 18 nt, Human
cagaguuguuacauuuuu

SEQ ID NO: 3798351 - RNA, 23 nt, Human
cagaguuuagaggaaaaaaauga

SEQ ID NO: 3798352 - RNA, 20 nt, Human
cagaguuugccuuccuuucu

SEQ ID NO: 3798353 - RNA, 13 nt, Human
cagaguuuggaua

SEQ ID NO: 3798354 - RNA, 14 nt, Human
cagaguuuucauua

SEQ ID NO: 3798355 - RNA, 14 nt, Human
cagauaaacaguag

SEQ ID NO: 3798356 - RNA, 17 nt, Human
cagauaaagauugugug

SEQ ID NO: 3798357 - RNA, 22 nt, Human
cagauaacaaugcagcaaggcc

SEQ ID NO: 3798358 - RNA, 22 nt, Human
cagauaacugaaaauuauuuaa

SEQ ID NO: 3798359 - RNA, 20 nt, Human
cagauaacugaggaggggag

SEQ ID NO: 3798360 - RNA, 14 nt, Human
cagauaacuguuau

SEQ ID NO: 3798361 - RNA, 20 nt, Human
cagauaacuguuauuuauaa

SEQ ID NO: 3798362 - RNA, 15 nt, Human
cagauaacuuagcuu

SEQ ID NO: 3798363 - RNA, 22 nt, Human
cagauaagcaagagagauguuu

SEQ ID NO: 3798364 - RNA, 14 nt, Human
cagauaaucacaau

SEQ ID NO: 3798365 - RNA, 16 nt, Human
cagauaaucagccucu

SEQ ID NO: 3798366 - RNA, 13 nt, Human
cagauaaugugaa

SEQ ID NO: 3798367 - RNA, 14 nt, Human
cagauacacacaca

SEQ ID NO: 3798368 - RNA, 23 nt, Human
cagauacaggaaaagcugcugac

SEQ ID NO: 3798369 - RNA, 12 nt, Human
cagauacaucac

SEQ ID NO: 3798370 - RNA, 17 nt, Human
cagauacaugguuguga

SEQ ID NO: 3798371 - RNA, 15 nt, Human
cagauacauuucccu

SEQ ID NO: 3798372 - RNA, 15 nt, Human
cagauaccaagcaug

SEQ ID NO: 3798373 - RNA, 21 nt, Human
aaacauucuaucuacugauuu

SEQ ID NO: 3798374 - RNA, 12 nt, Human
aaacauugaaga

SEQ ID NO: 3798375 - RNA, 13 nt, Human
aaacauugcuuuu

SEQ ID NO: 3798376 - RNA, 16 nt, Human
aaacauugcuuuuaaa

SEQ ID NO: 3798377 - RNA, 13 nt, Human
aaacauuggaagc

SEQ ID NO: 3798378 - RNA, 15 nt, Human
aaacauuggauuauc

SEQ ID NO: 3798379 - RNA, 19 nt, Human
aaacauuguguugacauua

SEQ ID NO: 3798380 - RNA, 23 nt, Human
aaacauuuaacuuguuuccaaug

SEQ ID NO: 3798381 - RNA, 20 nt, Human
aaacauuuauuuugacauaa

SEQ ID NO: 3798382 - RNA, 18 nt, Human
aaacauuucauaauuugu

SEQ ID NO: 3798383 - RNA, 20 nt, Human
aaacauuucauuaugagguc

SEQ ID NO: 3798384 - RNA, 12 nt, Human
aaacauuugcug

SEQ ID NO: 3798385 - RNA, 14 nt, Human
aaacauuuuaaaaa

SEQ ID NO: 3798386 - RNA, 19 nt, Human
aaacauuuucagaaauauu

SEQ ID NO: 3798387 - RNA, 19 nt, Human
aaacauuuugucauauaag

SEQ ID NO: 3798388 - RNA, 19 nt, Human
aaaccaaaaguuauuaaaa

SEQ ID NO: 3798389 - RNA, 22 nt, Human
aaaccaaaaugacaucuuuuua

SEQ ID NO: 3798390 - RNA, 13 nt, Human
aaaccaaaggaca

SEQ ID NO: 3798391 - RNA, 13 nt, Human
aaaccaacaccau

SEQ ID NO: 3798392 - RNA, 12 nt, Human
aaaccaagaaga

SEQ ID NO: 3798393 - RNA, 18 nt, Human
aaaccaagagauugcuaa

SEQ ID NO: 3798394 - RNA, 16 nt, Human
aaaccaaucaagauaa

SEQ ID NO: 3798395 - RNA, 19 nt, Human
aaaccaauuuuuuguucuu

SEQ ID NO: 3798396 - RNA, 12 nt, Human
aaaccacaaagg

SEQ ID NO: 3798397 - RNA, 22 nt, Human
aaaccacaaaggccaaacugcu

SEQ ID NO: 3798398 - RNA, 21 nt, Human
aaaccacaacugacacaggaa

SEQ ID NO: 3798399 - RNA, 14 nt, Human
aaaccacaacuuuu

SEQ ID NO: 3798400 - RNA, 16 nt, Human
aaaccacagcaguuga

SEQ ID NO: 3798401 - RNA, 18 nt, Human
aaaccacagcccugucag

SEQ ID NO: 3798402 - RNA, 14 nt, Human
aaaccacagcugcu

SEQ ID NO: 3798403 - RNA, 14 nt, Human
aaaccaccagaagc

SEQ ID NO: 3798404 - RNA, 15 nt, Human
aaaccaccagaagcc

SEQ ID NO: 3798405 - RNA, 16 nt, Human
aaaccacugaaaaaau

SEQ ID NO: 3798406 - RNA, 12 nt, Human
aaaccagaagca

SEQ ID NO: 3798407 - RNA, 16 nt, Human
aaaccaggacccuguc

SEQ ID NO: 3798408 - RNA, 17 nt, Human
aaaccaggcuuucuaga

SEQ ID NO: 3798409 - RNA, 19 nt, Human
aaaccaggguuuaucuuuu

SEQ ID NO: 3798410 - RNA, 22 nt, Human
aaaccagguccaaugagcuuuc

SEQ ID NO: 3798411 - RNA, 24 nt, Human
aaaccagguccaaugagcuuucug

SEQ ID NO: 3798412 - RNA, 19 nt, Human
aaaccaguauacaagauaa

SEQ ID NO: 3798413 - RNA, 14 nt, Human
aaaccaguauugua

SEQ ID NO: 3798414 - RNA, 19 nt, Human
aaaccaguguagccuugcc

SEQ ID NO: 3798415 - RNA, 19 nt, Human
aaaccaguguuagggaagg

SEQ ID NO: 3798416 - RNA, 20 nt, Human
aaaccaguuuagauuucaag

SEQ ID NO: 3798417 - RNA, 15 nt, Human
aaaccauaaacuuca

SEQ ID NO: 3798418 - RNA, 18 nt, Human
aaaccaucauugaaaucu

SEQ ID NO: 3798419 - RNA, 13 nt, Human
aaaccaucucccu

SEQ ID NO: 3798420 - RNA, 15 nt, Human
aaaccaucucccugg

SEQ ID NO: 3798421 - RNA, 22 nt, Human
aaaccaugcucuggcauguuga

SEQ ID NO: 3798422 - RNA, 17 nt, Human
aaaccauuuuuaaagua

SEQ ID NO: 3798423 - RNA, 23 nt, Human
cagccuggugggccuccucuguc

SEQ ID NO: 3798424 - RNA, 19 nt, Human
cagccugguuuagccugga

SEQ ID NO: 3798425 - RNA, 16 nt, Human
cagccugugcugcccg

SEQ ID NO: 3798426 - RNA, 21 nt, Human
cagccuguggcaucuuugccu

SEQ ID NO: 3798427 - RNA, 21 nt, Human
cagccuguggcggugccuggg

SEQ ID NO: 3798428 - RNA, 22 nt, Human
cagccuguggcggugccugggu

SEQ ID NO: 3798429 - RNA, 14 nt, Human
cagccuucccccuc

SEQ ID NO: 3798430 - RNA, 16 nt, Human
cagccuuccccuugcc

SEQ ID NO: 3798431 - RNA, 23 nt, Human
cagccuuccccuugcccagggcu

SEQ ID NO: 3798432 - RNA, 18 nt, Human
cagccuuccucugcagcu

SEQ ID NO: 3798433 - RNA, 22 nt, Human
cagccuuccucugcagcugacc

SEQ ID NO: 3798434 - RNA, 16 nt, Human
cagccuucuacugcuc

SEQ ID NO: 3798435 - RNA, 23 nt, Human
cagccuucuuccaucccaggaca

SEQ ID NO: 3798436 - RNA, 17 nt, Human
cagccuucuuugcuugc

SEQ ID NO: 3798437 - RNA, 18 nt, Human
cagccuucuuuuucugga

SEQ ID NO: 3798438 - RNA, 14 nt, Human
cagccuugaacucu

SEQ ID NO: 3798439 - RNA, 24 nt, Human
cagccuugaccauucuccaccugc

SEQ ID NO: 3798440 - RNA, 16 nt, Human
cagccuugagcccugg

SEQ ID NO: 3798441 - RNA, 18 nt, Human
cagccuugagcccuggcu

SEQ ID NO: 3798442 - RNA, 17 nt, Human
cagccuuucucccaggc

SEQ ID NO: 3798443 - RNA, 19 nt, Human
cagccuuucucccaggcca

SEQ ID NO: 3798444 - RNA, 18 nt, Human
cagccuuuguuccccacu

SEQ ID NO: 3798445 - RNA, 22 nt, Human
cagccuuuguuccccacuggag

SEQ ID NO: 3798446 - RNA, 19 nt, Human
cagcgaaguagcuugcucc

SEQ ID NO: 3798447 - RNA, 14 nt, Human
cagcgaccaccccu

SEQ ID NO: 3798448 - RNA, 17 nt, Human
cagcgacuccguuggcc

SEQ ID NO: 3798449 - RNA, 19 nt, Human
cagcgagcccugguggcag

SEQ ID NO: 3798450 - RNA, 20 nt, Human
cagcgagcgcccagcuccug

SEQ ID NO: 3798451 - RNA, 12 nt, Human
cagcgagggccc

SEQ ID NO: 3798452 - RNA, 18 nt, Human
cagcgauguaugcagcua

SEQ ID NO: 3798453 - RNA, 16 nt, Human
cagcgccaagcaaccu

SEQ ID NO: 3798454 - RNA, 22 nt, Human
cagcgccaagcaaccugggucc

SEQ ID NO: 3798455 - RNA, 24 nt, Human
cagcgccaagugcgugccguguga

SEQ ID NO: 3798456 - RNA, 14 nt, Human
cagcgccagccuca

SEQ ID NO: 3798457 - RNA, 18 nt, Human
cagcgccaggcugaccac

SEQ ID NO: 3798458 - RNA, 18 nt, Human
cagcgcccaaaggacgca

SEQ ID NO: 3798459 - RNA, 21 nt, Human
cagcgcccaaaggacgcacug

SEQ ID NO: 3798460 - RNA, 19 nt, Human
cagcgcccgcugggcugag

SEQ ID NO: 3798461 - RNA, 12 nt, Human
cagcgcccuucc

SEQ ID NO: 3798462 - RNA, 13 nt, Human
cagcgcccuuccu

SEQ ID NO: 3798463 - RNA, 15 nt, Human
cagcgcccuuccucu

SEQ ID NO: 3798464 - RNA, 22 nt, Human
cagcgccuaguggggucucccu

SEQ ID NO: 3798465 - RNA, 18 nt, Human
cagcgccucccuccaccc

SEQ ID NO: 3798466 - RNA, 20 nt, Human
cagcgccucccuccacccca

SEQ ID NO: 3798467 - RNA, 21 nt, Human
cagcgccucccuccaccccag

SEQ ID NO: 3798468 - RNA, 23 nt, Human
cagcgccucccuccaccccagga

SEQ ID NO: 3798469 - RNA, 19 nt, Human
cagcgccuggccuacccag

SEQ ID NO: 3798470 - RNA, 12 nt, Human
cagcgccuuucc

SEQ ID NO: 3798471 - RNA, 23 nt, Human
cagcgcggacauccccugcuggc

SEQ ID NO: 3798472 - RNA, 20 nt, Human
cagcgcucugccucaccgcu

SEQ ID NO: 3798473 - RNA, 16 nt, Human
cagcgcuuugggaggc

SEQ ID NO: 3798474 - RNA, 22 nt, Human
cagcgcuuugggaggccgaggc

SEQ ID NO: 3798475 - RNA, 21 nt, Human
cagcggagucuguccugugac

SEQ ID NO: 3798476 - RNA, 16 nt, Human
cagcgggaauggcagc

SEQ ID NO: 3798477 - RNA, 23 nt, Human
cagcgggaauggcagcugccacg

SEQ ID NO: 3798478 - RNA, 19 nt, Human
cagcgggagccucccugcc

SEQ ID NO: 3798479 - RNA, 15 nt, Human
cagcggggacagcuc

SEQ ID NO: 3798480 - RNA, 19 nt, Human
cagcggggcgaagcccagg

SEQ ID NO: 3798481 - RNA, 15 nt, Human
cagcgguggccucuu

SEQ ID NO: 3798482 - RNA, 19 nt, Human
cagcggugggaccuaggga

SEQ ID NO: 3798483 - RNA, 22 nt, Human
cagcggugggaccuagggaggc

SEQ ID NO: 3798484 - RNA, 15 nt, Human
cagcguccuccucug

SEQ ID NO: 3798485 - RNA, 14 nt, Human
cagcguccugucca

SEQ ID NO: 3798486 - RNA, 21 nt, Human
cagcgugcccgcuuccgcugu

SEQ ID NO: 3798487 - RNA, 14 nt, Human
cagcguggccuugu

SEQ ID NO: 3798488 - RNA, 15 nt, Human
cagcguggccuuguu

SEQ ID NO: 3798489 - RNA, 16 nt, Human
cagcguggcucuaaaa

SEQ ID NO: 3798490 - RNA, 21 nt, Human
cagcguuccuagagaagacag

SEQ ID NO: 3798491 - RNA, 16 nt, Human
cagcguuucuaugaca

SEQ ID NO: 3798492 - RNA, 22 nt, Human
cagcguuugaggggcuggccuu

SEQ ID NO: 3798493 - RNA, 19 nt, Human
cagcguuuugcaagguaaa

SEQ ID NO: 3798494 - RNA, 22 nt, Human
cagcuaaaccaaggacugagca

SEQ ID NO: 3798495 - RNA, 16 nt, Human
cagcuaacacacagcu

SEQ ID NO: 3798496 - RNA, 17 nt, Human
cagcuaacacacagcuc

SEQ ID NO: 3798497 - RNA, 18 nt, Human
cagcuaacacacagcucc

SEQ ID NO: 3798498 - RNA, 15 nt, Human
cagcuaacauggaag

SEQ ID NO: 3798499 - RNA, 19 nt, Human
cagcuaacauggaaguacu

SEQ ID NO: 3798500 - RNA, 23 nt, Human
cagcuaagaaaagauuuuaauca

SEQ ID NO: 3798501 - RNA, 18 nt, Human
cagcuaagaaccuggaac

SEQ ID NO: 3798502 - RNA, 23 nt, Human
cagcuaagaaccuggaacuuggg

SEQ ID NO: 3798503 - RNA, 18 nt, Human
cagcuaagggaagacauu

SEQ ID NO: 3798504 - RNA, 14 nt, Human
cagcuaauucuacu

SEQ ID NO: 3798505 - RNA, 22 nt, Human
cagcuaauucuacucacagugc

SEQ ID NO: 3798506 - RNA, 17 nt, Human
cagcuacaacagccuca

SEQ ID NO: 3798507 - RNA, 18 nt, Human
cagcuacaccuuucuccu

SEQ ID NO: 3798508 - RNA, 15 nt, Human
cagcuacucagaagc

SEQ ID NO: 3798509 - RNA, 16 nt, Human
cagcuacucaggaggc

SEQ ID NO: 3798510 - RNA, 17 nt, Human
cagcuacucgggaggcu

SEQ ID NO: 3798511 - RNA, 15 nt, Human
cagcuacucucccca

SEQ ID NO: 3798512 - RNA, 16 nt, Human
cagcuacugauuuuug

SEQ ID NO: 3798513 - RNA, 17 nt, Human
cagcuacuuccuccucc

SEQ ID NO: 3798514 - RNA, 21 nt, Human
cagcuacuuccuccuccccac

SEQ ID NO: 3798515 - RNA, 16 nt, Human
cagcuacuugggaagc

SEQ ID NO: 3798516 - RNA, 19 nt, Human
auuuaaucuuuucuuauuu

SEQ ID NO: 3798517 - RNA, 17 nt, Human
auuuaaugcauuaaacc

SEQ ID NO: 3798518 - RNA, 12 nt, Human
auuuaaugcugc

SEQ ID NO: 3798519 - RNA, 14 nt, Human
auuuaaugcugugg

SEQ ID NO: 3798520 - RNA, 12 nt, Human
auuuaauguuga

SEQ ID NO: 3798521 - RNA, 17 nt, Human
auuuaauguuuuaaaug

SEQ ID NO: 3798522 - RNA, 19 nt, Human
auuuaauguuuuaaaugua

SEQ ID NO: 3798523 - RNA, 21 nt, Human
auuuaauguuuuaaauguaca

SEQ ID NO: 3798524 - RNA, 13 nt, Human
auuuaauuaaaaa

SEQ ID NO: 3798525 - RNA, 20 nt, Human
auuuaauuauuaacuacauu

SEQ ID NO: 3798526 - RNA, 12 nt, Human
auuuaauucaga

SEQ ID NO: 3798527 - RNA, 15 nt, Human
auuuaauucucuuga

SEQ ID NO: 3798528 - RNA, 18 nt, Human
auuuaauuuaggacacau

SEQ ID NO: 3798529 - RNA, 22 nt, Human
auuuaauuugaagguagaaugu

SEQ ID NO: 3798530 - RNA, 22 nt, Human
auuuaauuugauaucacagucu

SEQ ID NO: 3798531 - RNA, 21 nt, Human
auuuaauuugccaaaauaaug

SEQ ID NO: 3798532 - RNA, 18 nt, Human
auuuaauuuugacacuau

SEQ ID NO: 3798533 - RNA, 23 nt, Human
auuuaauuuuuuugagacagagu

SEQ ID NO: 3798534 - RNA, 18 nt, Human
auuuacaaaguguguauu

SEQ ID NO: 3798535 - RNA, 22 nt, Human
auuuacaacugggggaggguga

SEQ ID NO: 3798536 - RNA, 18 nt, Human
auuuacaagggaagauuu

SEQ ID NO: 3798537 - RNA, 15 nt, Human
auuuacaauguauua

SEQ ID NO: 3798538 - RNA, 14 nt, Human
auuuacacugggag

SEQ ID NO: 3798539 - RNA, 12 nt, Human
auuuacacuuuu

SEQ ID NO: 3798540 - RNA, 14 nt, Human
auuuacagaacaaa

SEQ ID NO: 3798541 - RNA, 16 nt, Human
auuuacagagaaguga

SEQ ID NO: 3798542 - RNA, 21 nt, Human
auuuacagugaaaauguaagc

SEQ ID NO: 3798543 - RNA, 13 nt, Human
auuuacaguuuca

SEQ ID NO: 3798544 - RNA, 15 nt, Human
auuuacauaugaaau

SEQ ID NO: 3798545 - RNA, 16 nt, Human
auuuacaucauuucuu

SEQ ID NO: 3798546 - RNA, 22 nt, Human
auuuacauguauuauuucauua

SEQ ID NO: 3798547 - RNA, 15 nt, Human
auuuacauuuaauag

SEQ ID NO: 3798548 - RNA, 19 nt, Human
auuuacccuucuuuucuga

SEQ ID NO: 3798549 - RNA, 15 nt, Human
auuuaccuaagauua

SEQ ID NO: 3798550 - RNA, 17 nt, Human
auuuaccuaagauuaca

SEQ ID NO: 3798551 - RNA, 13 nt, Human
auuuaccucagcc

SEQ ID NO: 3798552 - RNA, 13 nt, Human
auuuacuaaacau

SEQ ID NO: 3798553 - RNA, 22 nt, Human
auuuacuaagccacaagaaauu

SEQ ID NO: 3798554 - RNA, 23 nt, Human
auuuacuaagccacaagaaauuu

SEQ ID NO: 3798555 - RNA, 12 nt, Human
auuuacuauaua

SEQ ID NO: 3798556 - RNA, 20 nt, Human
auuuacugagcuucucugug

SEQ ID NO: 3798557 - RNA, 13 nt, Human
auuuacuuaagac

SEQ ID NO: 3798558 - RNA, 19 nt, Human
auuuacuuaagacuuaaug

SEQ ID NO: 3798559 - RNA, 16 nt, Human
auuuacuucuuauaca

SEQ ID NO: 3798560 - RNA, 20 nt, Human
auuuacuugccauuacucaa

SEQ ID NO: 3798561 - RNA, 22 nt, Human
auuuacuugccauuacucaauu

SEQ ID NO: 3798562 - RNA, 21 nt, Human
auuuagaaaaagaacaugcag

SEQ ID NO: 3798563 - RNA, 21 nt, Human
auuuagaaaauagagcuuuua

SEQ ID NO: 3798564 - RNA, 22 nt, Human
auuuagaaacuaauugacuuua

SEQ ID NO: 3798565 - RNA, 14 nt, Human
auuuagaacuguau

SEQ ID NO: 3798566 - RNA, 19 nt, Human
auuuagaagugucauguuu

SEQ ID NO: 3798567 - RNA, 21 nt, Human
auuuagaauggugauuuuaaa

SEQ ID NO: 3798568 - RNA, 16 nt, Human
auuuagagaggaaaag

SEQ ID NO: 3798569 - RNA, 17 nt, Human
auuuagagaugaauuaa

SEQ ID NO: 3798570 - RNA, 23 nt, Human
auuuagagaugaauuaaauuuaa

SEQ ID NO: 3798571 - RNA, 22 nt, Human
auuuagagaugcuguaacuuaa

SEQ ID NO: 3798572 - RNA, 16 nt, Human
auuuagaugcauauua

SEQ ID NO: 3798573 - RNA, 14 nt, Human
auuuagauuguaaa

SEQ ID NO: 3798574 - RNA, 13 nt, Human
auuuagcaaauaa

SEQ ID NO: 3798575 - RNA, 13 nt, Human
auuuagcacaaaa

SEQ ID NO: 3798576 - RNA, 23 nt, Human
auuuagcacauacuacacauuca

SEQ ID NO: 3798577 - RNA, 22 nt, Human
auuuagcaugacaagccccagg

SEQ ID NO: 3798578 - RNA, 17 nt, Human
auuuagccaaugcuuac

SEQ ID NO: 3798579 - RNA, 13 nt, Human
auuuagcccucac

SEQ ID NO: 3798580 - RNA, 18 nt, Human
auuuagcguagcuaagug

SEQ ID NO: 3798581 - RNA, 15 nt, Human
auuuagcuguaucaa

SEQ ID NO: 3798582 - RNA, 23 nt, Human
auuuaggaaguugacuuauagua

SEQ ID NO: 3798583 - RNA, 16 nt, Human
auuuagggaguauucu

SEQ ID NO: 3798584 - RNA, 18 nt, Human
auuuagggaguauucuaa

SEQ ID NO: 3798585 - RNA, 20 nt, Human
auuuagggaguauucuaaua

SEQ ID NO: 3798586 - RNA, 19 nt, Human
auuuaggguacuaaauuua

SEQ ID NO: 3798587 - RNA, 17 nt, Human
auuuagguuucugaguu

SEQ ID NO: 3798588 - RNA, 21 nt, Human
auuuagguuucugaguuccug

SEQ ID NO: 3798589 - RNA, 23 nt, Human
auuuagguuucugaguuccugca

SEQ ID NO: 3798590 - RNA, 19 nt, Human
auuuaguaauagccugggu

SEQ ID NO: 3798591 - RNA, 14 nt, Human
auuuaguaguguaa

SEQ ID NO: 3798592 - RNA, 16 nt, Human
auuuagucaugugacc

SEQ ID NO: 3798593 - RNA, 15 nt, Human
auuuagugaacuacg

SEQ ID NO: 3798594 - RNA, 13 nt, Human
auuuagugagcau

SEQ ID NO: 3798595 - RNA, 18 nt, Human
auuuagugaucuuagcau

SEQ ID NO: 3798596 - RNA, 19 nt, Human
auuuagugaucuuagcaua

SEQ ID NO: 3798597 - RNA, 15 nt, Human
auuuaguguauccau

SEQ ID NO: 3798598 - RNA, 12 nt, Human
auuuaguucuuu

SEQ ID NO: 3798599 - RNA, 17 nt, Human
auuuaguucuuuguuau

SEQ ID NO: 3798600 - RNA, 16 nt, Human
auuuaguuguaaacca

SEQ ID NO: 3798601 - RNA, 17 nt, Human
auuuaguuguuucuaga

SEQ ID NO: 3798602 - RNA, 19 nt, Human
auuuaguuuuuguaauuua

SEQ ID NO: 3798603 - RNA, 17 nt, Human
auuuauaaaaauaaaaa

SEQ ID NO: 3798604 - RNA, 17 nt, Human
auuuauaaacagacaau

SEQ ID NO: 3798605 - RNA, 23 nt, Human
auuuauaaacagacaauauguga

SEQ ID NO: 3798606 - RNA, 22 nt, Human
auuuauaaauauauuuaagaua

SEQ ID NO: 3798607 - RNA, 17 nt, Human
auuuauaaaugagcaaa

SEQ ID NO: 3798608 - RNA, 15 nt, Human
auuuauaaaugcuau

SEQ ID NO: 3798609 - RNA, 16 nt, Human
auuuauaaaugcuauu

SEQ ID NO: 3798610 - RNA, 20 nt, Human
auuuauaacguguucaauau

SEQ ID NO: 3798611 - RNA, 16 nt, Human
auuuauaacucaucau

SEQ ID NO: 3798612 - RNA, 20 nt, Human
auuuauaacucaucauaaaa

SEQ ID NO: 3798613 - RNA, 18 nt, Human
auuuauaauacagaaucu

SEQ ID NO: 3798614 - RNA, 22 nt, Human
auuuauaaucacuuuuuuccac

SEQ ID NO: 3798615 - RNA, 23 nt, Human
auuuauaaucacuuuuuuccaca

SEQ ID NO: 3798616 - RNA, 14 nt, Human
auuuauaauguuug

SEQ ID NO: 3798617 - RNA, 17 nt, Human
auuuauaauugcaucua

SEQ ID NO: 3798618 - RNA, 22 nt, Human
auuuauacaagauugaaaaucu

SEQ ID NO: 3798619 - RNA, 14 nt, Human
auuuauacuauuua

SEQ ID NO: 3798620 - RNA, 20 nt, Human
auuuauacucuuuuuucaug

SEQ ID NO: 3798621 - RNA, 16 nt, Human
auuuauacuggcaugc

SEQ ID NO: 3798622 - RNA, 22 nt, Human
auuuauaguuuguacaugcauu

SEQ ID NO: 3798623 - RNA, 18 nt, Human
auuuauauaugaaaacua

SEQ ID NO: 3798624 - RNA, 14 nt, Human
auuuauauauugaa

SEQ ID NO: 3798625 - RNA, 19 nt, Human
auuuauauauuuauaacuc

SEQ ID NO: 3798626 - RNA, 20 nt, Human
auuuauauauuuauaacuca

SEQ ID NO: 3798627 - RNA, 14 nt, Human
caggacucccuccu

SEQ ID NO: 3798628 - RNA, 17 nt, Human
caggacucccuccucac

SEQ ID NO: 3798629 - RNA, 19 nt, Human
caggacucccuccucaccu

SEQ ID NO: 3798630 - RNA, 20 nt, Human
caggacucugcagccucaga

SEQ ID NO: 3798631 - RNA, 13 nt, Human
caggacucugccu

SEQ ID NO: 3798632 - RNA, 15 nt, Human
caggacucugccucc

SEQ ID NO: 3798633 - RNA, 16 nt, Human
caggacucugccuccu

SEQ ID NO: 3798634 - RNA, 20 nt, Human
caggacugaauuguccccag

SEQ ID NO: 3798635 - RNA, 21 nt, Human
caggacugaauuguccccagu

SEQ ID NO: 3798636 - RNA, 17 nt, Human
caggacugagccccgca

SEQ ID NO: 3798637 - RNA, 12 nt, Human
caggacugaugu

SEQ ID NO: 3798638 - RNA, 16 nt, Human
caggacugggccacuu

SEQ ID NO: 3798639 - RNA, 23 nt, Human
caggacuguccccuugaaggaga

SEQ ID NO: 3798640 - RNA, 14 nt, Human
caggacugugacuc

SEQ ID NO: 3798641 - RNA, 21 nt, Human
caggacuuaacggcuccagga

SEQ ID NO: 3798642 - RNA, 22 nt, Human
caggacuuccccggagggcugc

SEQ ID NO: 3798643 - RNA, 19 nt, Human
caggacuuugaggcaagug

SEQ ID NO: 3798644 - RNA, 23 nt, Human
caggagaaaugcauccauuccuc

SEQ ID NO: 3798645 - RNA, 11 nt, Human
caggagaacca

SEQ ID NO: 3798646 - RNA, 17 nt, Human
caggagaaccacuacau

SEQ ID NO: 3798647 - RNA, 16 nt, Human
caggagaaccuaacau

SEQ ID NO: 3798648 - RNA, 21 nt, Human
caggagaagaaagaggugacc

SEQ ID NO: 3798649 - RNA, 14 nt, Human
caggagaagcucag

SEQ ID NO: 3798650 - RNA, 17 nt, Human
caggagaagcucagcug

SEQ ID NO: 3798651 - RNA, 13 nt, Human
caggagacgacag

SEQ ID NO: 3798652 - RNA, 21 nt, Human
caggagacuguggagacugcu

SEQ ID NO: 3798653 - RNA, 12 nt, Human
caggagagagaa

SEQ ID NO: 3798654 - RNA, 19 nt, Human
caggagagagaaagccagg

SEQ ID NO: 3798655 - RNA, 23 nt, Human
caggagagagaaagccaggcagg

SEQ ID NO: 3798656 - RNA, 19 nt, Human
caggagagaguugaaccua

SEQ ID NO: 3798657 - RNA, 13 nt, Human
caggagagccagc

SEQ ID NO: 3798658 - RNA, 19 nt, Human
caggagagccagcccuccc

SEQ ID NO: 3798659 - RNA, 15 nt, Human
caggagagcuuaggg

SEQ ID NO: 3798660 - RNA, 17 nt, Human
cagccccuugagaaacc

SEQ ID NO: 3798661 - RNA, 12 nt, Human
cagccccuuucc

SEQ ID NO: 3798662 - RNA, 20 nt, Human
cagcccgauccuccccugga

SEQ ID NO: 3798663 - RNA, 22 nt, Human
cagcccgauccuccccuggacu

SEQ ID NO: 3798664 - RNA, 15 nt, Human
cagcccgcacaccug

SEQ ID NO: 3798665 - RNA, 19 nt, Human
cagcccgcuaggcucgccu

SEQ ID NO: 3798666 - RNA, 18 nt, Human
cagcccggaccuuggcag

SEQ ID NO: 3798667 - RNA, 14 nt, Human
cagcccggccugcu

SEQ ID NO: 3798668 - RNA, 21 nt, Human
cagcccggccugcucccagca

SEQ ID NO: 3798669 - RNA, 14 nt, Human
cagcccggcugguu

SEQ ID NO: 3798670 - RNA, 19 nt, Human
cagcccggcugguuuugua

SEQ ID NO: 3798671 - RNA, 16 nt, Human
cagcccgggagccuag

SEQ ID NO: 3798672 - RNA, 13 nt, Human
cagcccgggcucu

SEQ ID NO: 3798673 - RNA, 19 nt, Human
cagcccuaaggaucucuca

SEQ ID NO: 3798674 - RNA, 21 nt, Human
cagcccuagagccugccugga

SEQ ID NO: 3798675 - RNA, 22 nt, Human
cagcccuagagccugccuggag

SEQ ID NO: 3798676 - RNA, 11 nt, Human
cagcccuagga

SEQ ID NO: 3798677 - RNA, 18 nt, Human
cagcccuaggguggagag

SEQ ID NO: 3798678 - RNA, 15 nt, Human
cagcccuauggaugu

SEQ ID NO: 3798679 - RNA, 19 nt, Human
cagcccucacacacccugu

SEQ ID NO: 3798680 - RNA, 18 nt, Human
cagcccucaccccugguu

SEQ ID NO: 3798681 - RNA, 20 nt, Human
cagcccuccccauggagcca

SEQ ID NO: 3798682 - RNA, 21 nt, Human
cagcccuccccauggagccag

SEQ ID NO: 3798683 - RNA, 15 nt, Human
cagcccucccugccc

SEQ ID NO: 3798684 - RNA, 15 nt, Human
cagcccucccugucc

SEQ ID NO: 3798685 - RNA, 16 nt, Human
cagcccucccuguccu

SEQ ID NO: 3798686 - RNA, 19 nt, Human
cagcccucccuguccuccu

SEQ ID NO: 3798687 - RNA, 20 nt, Human
cagcccucccuguccuccuc

SEQ ID NO: 3798688 - RNA, 21 nt, Human
cagcccucccuguccuccucg

SEQ ID NO: 3798689 - RNA, 14 nt, Human
cagcccuccucacc

SEQ ID NO: 3798690 - RNA, 22 nt, Human
cagcccuccucaccccgucugg

SEQ ID NO: 3798691 - RNA, 21 nt, Human
cagcccucggcgcuccgggac

SEQ ID NO: 3798692 - RNA, 18 nt, Human
cagcccugagaaagcccu

SEQ ID NO: 3798693 - RNA, 19 nt, Human
cagcccugaguuccuagcc

SEQ ID NO: 3798694 - RNA, 15 nt, Human
cagcccugcaccaug

SEQ ID NO: 3798695 - RNA, 15 nt, Human
cagcccugcagaggg

SEQ ID NO: 3798696 - RNA, 17 nt, Human
cagcccugcagagggca

SEQ ID NO: 3798697 - RNA, 23 nt, Human
cagcccugccccacaccuccucu

SEQ ID NO: 3798698 - RNA, 13 nt, Human
cagcccugcccuu

SEQ ID NO: 3798699 - RNA, 21 nt, Human
cagcccugccuggaggaccug

SEQ ID NO: 3798700 - RNA, 11 nt, Human
cagcccugcug

SEQ ID NO: 3798701 - RNA, 13 nt, Human
cagcccugcuggc

SEQ ID NO: 3798702 - RNA, 16 nt, Human
cagcccugcuggccgc

SEQ ID NO: 3798703 - RNA, 18 nt, Human
cagcccugcuggccgccu

SEQ ID NO: 3798704 - RNA, 20 nt, Human
cagcccugcuggccgccuca

SEQ ID NO: 3798705 - RNA, 13 nt, Human
cagcccugcuuug

SEQ ID NO: 3798706 - RNA, 14 nt, Human
cagcccuggagggu

SEQ ID NO: 3798707 - RNA, 20 nt, Human
cagcccugggccccaccacc

SEQ ID NO: 3798708 - RNA, 23 nt, Human
cagcccugggccccaccaccuag

SEQ ID NO: 3798709 - RNA, 14 nt, Human
cagcccuggggcug

SEQ ID NO: 3798710 - RNA, 19 nt, Human
cagcccuggggcugggccc

SEQ ID NO: 3798711 - RNA, 15 nt, Human
cagcccuggucucag

SEQ ID NO: 3798712 - RNA, 18 nt, Human
cagcccuggucucagcag

SEQ ID NO: 3798713 - RNA, 13 nt, Human
cagcccugucagc

SEQ ID NO: 3798714 - RNA, 16 nt, Human
cagcccugucagcaug

SEQ ID NO: 3798715 - RNA, 18 nt, Human
cagcccugucagcaugaa

SEQ ID NO: 3798716 - RNA, 11 nt, Human
cagcccugugg

SEQ ID NO: 3798717 - RNA, 13 nt, Human
cagcccuguucug

SEQ ID NO: 3798718 - RNA, 23 nt, Human
cagcccuuaugcgguuaauuuug

SEQ ID NO: 3798719 - RNA, 16 nt, Human
cagcccuuccaaacuc

SEQ ID NO: 3798720 - RNA, 13 nt, Human
cagcccuuccucu

SEQ ID NO: 3798721 - RNA, 18 nt, Human
cagcccuuccucugcucc

SEQ ID NO: 3798722 - RNA, 19 nt, Human
cagcccuuccucugcuccc

SEQ ID NO: 3798723 - RNA, 23 nt, Human
cagcccuuccucugcucccccuu

SEQ ID NO: 3798724 - RNA, 20 nt, Human
cagcccuugagcuccccaaa

SEQ ID NO: 3798725 - RNA, 13 nt, Human
cagcccuugcuug

SEQ ID NO: 3798726 - RNA, 15 nt, Human
cagcccuugcuuguu

SEQ ID NO: 3798727 - RNA, 20 nt, Human
cagcccuuugggaggcugag

SEQ ID NO: 3798728 - RNA, 23 nt, Human
cagcccuuugggaggcugaggcg

SEQ ID NO: 3798729 - RNA, 17 nt, Human
cagccgagcaggaggcc

SEQ ID NO: 3798730 - RNA, 19 nt, Human
cagccgagccgggccuggg

SEQ ID NO: 3798731 - RNA, 23 nt, Human
cagccgccaugcuccuggcccac

SEQ ID NO: 3798732 - RNA, 18 nt, Human
cagccgccuuaagcugau

SEQ ID NO: 3798733 - RNA, 14 nt, Human
cagccgcuccuguc

SEQ ID NO: 3798734 - RNA, 21 nt, Human
cagccgcucggaggccccaaa

SEQ ID NO: 3798735 - RNA, 20 nt, Human
cagccgcucuccugccacau

SEQ ID NO: 3798736 - RNA, 19 nt, Human
cagccgcugagcgaggaga

SEQ ID NO: 3798737 - RNA, 14 nt, Human
cagccgcuucugac

SEQ ID NO: 3798738 - RNA, 15 nt, Human
cagccggcacagggu

SEQ ID NO: 3798739 - RNA, 17 nt, Human
cagccggcacagggucu

SEQ ID NO: 3798740 - RNA, 14 nt, Human
cagccggcacccac

SEQ ID NO: 3798741 - RNA, 16 nt, Human
cagccggccaauggaa

SEQ ID NO: 3798742 - RNA, 24 nt, Human
cagccggccucucuggccucccac

SEQ ID NO: 3798743 - RNA, 12 nt, Human
cagccgggcccu

SEQ ID NO: 3798744 - RNA, 15 nt, Human
cagccgggcccugag

SEQ ID NO: 3798745 - RNA, 14 nt, Human
cagccggggaagac

SEQ ID NO: 3798746 - RNA, 17 nt, Human
cagccggggccugccua

SEQ ID NO: 3798747 - RNA, 18 nt, Human
cagccggggccugccuag

SEQ ID NO: 3798748 - RNA, 19 nt, Human
cagccggggccugccuagc

SEQ ID NO: 3798749 - RNA, 20 nt, Human
cagccggggccugccuagca

SEQ ID NO: 3798750 - RNA, 15 nt, Human
cagccggggcgagug

SEQ ID NO: 3798751 - RNA, 17 nt, Human
cagccgguaccugggaa

SEQ ID NO: 3798752 - RNA, 19 nt, Human
cagccgucagccaaaugua

SEQ ID NO: 3798753 - RNA, 17 nt, Human
cagccgugagcauguuu

SEQ ID NO: 3798754 - RNA, 17 nt, Human
cagccgugaugcucagg

SEQ ID NO: 3798755 - RNA, 13 nt, Human
cagccgugggccc

SEQ ID NO: 3798756 - RNA, 15 nt, Human
cagccgugggcccca

SEQ ID NO: 3798757 - RNA, 22 nt, Human
cagccuacuagggaccugggga

SEQ ID NO: 3798758 - RNA, 21 nt, Human
cagccuagggcugagcugggg

SEQ ID NO: 3798759 - RNA, 18 nt, Human
cagccuaggggucaggga

SEQ ID NO: 3798760 - RNA, 19 nt, Human
cagccuaggggucagggac

SEQ ID NO: 3798761 - RNA, 23 nt, Human
cagccuaugagcauccugagccc

SEQ ID NO: 3798762 - RNA, 17 nt, Human
cagccucaaccuccugg

SEQ ID NO: 3798763 - RNA, 20 nt, Human
cagccucaaccuccugggcu

SEQ ID NO: 3798764 - RNA, 19 nt, Human
cagccucaagucacuccca

SEQ ID NO: 3798765 - RNA, 20 nt, Human
cagccucaauaagccuuguc

SEQ ID NO: 3798766 - RNA, 21 nt, Human
cagccucaauaagccuugucg

SEQ ID NO: 3798767 - RNA, 14 nt, Human
cagccucacagaag

SEQ ID NO: 3798768 - RNA, 15 nt, Human
cagccucacaguccu

SEQ ID NO: 3798769 - RNA, 13 nt, Human
cagccucagacug

SEQ ID NO: 3798770 - RNA, 14 nt, Human
cagccucagacugg

SEQ ID NO: 3798771 - RNA, 21 nt, Human
cagccucagagacaucagccc

SEQ ID NO: 3798772 - RNA, 18 nt, Human
cagccucagcgcggcccu

SEQ ID NO: 3798773 - RNA, 20 nt, Human
cagccucaggacugggagcc

SEQ ID NO: 3798774 - RNA, 15 nt, Human
cagccucaguccucc

SEQ ID NO: 3798775 - RNA, 16 nt, Human
cagccucaguccuccc

SEQ ID NO: 3798776 - RNA, 21 nt, Human
cagccucagugacccuggcuc

SEQ ID NO: 3798777 - RNA, 13 nt, Human
cagccuccagccu

SEQ ID NO: 3798778 - RNA, 15 nt, Human
cagccuccagccucu

SEQ ID NO: 3798779 - RNA, 21 nt, Human
cagccuccauccuacccccug

SEQ ID NO: 3798780 - RNA, 14 nt, Human
cagccuccaugcug

SEQ ID NO: 3798781 - RNA, 17 nt, Human
cagccuccaugcugccu

SEQ ID NO: 3798782 - RNA, 18 nt, Human
cagccuccaugcugccuc

SEQ ID NO: 3798783 - RNA, 20 nt, Human
cagccuccaugcugccucca

SEQ ID NO: 3798784 - RNA, 15 nt, Human
cagccucccaaagug

SEQ ID NO: 3798785 - RNA, 22 nt, Human
cagccucccaaagugcugagau

SEQ ID NO: 3798786 - RNA, 20 nt, Human
cagccucccaaagugcuggg

SEQ ID NO: 3798787 - RNA, 19 nt, Human
cagccucccaaguagcugg

SEQ ID NO: 3798788 - RNA, 16 nt, Human
cagccucccacagugc

SEQ ID NO: 3798789 - RNA, 19 nt, Human
cagccucccacccccaucu

SEQ ID NO: 3798790 - RNA, 18 nt, Human
cagccuccccugccaggg

SEQ ID NO: 3798791 - RNA, 20 nt, Human
cagccucccgaauagcuggg

SEQ ID NO: 3798792 - RNA, 21 nt, Human
cagccucccucugaccugcag

SEQ ID NO: 3798793 - RNA, 14 nt, Human
cagccucccugaag

SEQ ID NO: 3798794 - RNA, 18 nt, Human
cagccuccgcuucccugg

SEQ ID NO: 3798795 - RNA, 20 nt, Human
cagccuccgcuucccugguu

SEQ ID NO: 3798796 - RNA, 16 nt, Human
cagccuccucaucugg

SEQ ID NO: 3798797 - RNA, 17 nt, Human
cagccuccucuggacgg

SEQ ID NO: 3798798 - RNA, 20 nt, Human
cagccucgaacuccugggcu

SEQ ID NO: 3798799 - RNA, 19 nt, Human
cagccucgcaggccucccu

SEQ ID NO: 3798800 - RNA, 19 nt, Human
cagccucgccccuggcaga

SEQ ID NO: 3798801 - RNA, 21 nt, Human
cagccucgccccuggcagaga

SEQ ID NO: 3798802 - RNA, 22 nt, Human
cagccucguuggaagaggaaca

SEQ ID NO: 3798803 - RNA, 14 nt, Human
cagccucuagggac

SEQ ID NO: 3798804 - RNA, 20 nt, Human
cagcuggugggaagcgucug

SEQ ID NO: 3798805 - RNA, 20 nt, Human
cagcugguguagcuacagag

SEQ ID NO: 3798806 - RNA, 21 nt, Human
cagcugguguagcuacagaga

SEQ ID NO: 3798807 - RNA, 23 nt, Human
cagcugguguagcuacagagaaa

SEQ ID NO: 3798808 - RNA, 20 nt, Human
cagcuguaacacagcugaga

SEQ ID NO: 3798809 - RNA, 16 nt, Human
cagcuguaaucuauga

SEQ ID NO: 3798810 - RNA, 19 nt, Human
cagcuguccccccacuccc

SEQ ID NO: 3798811 - RNA, 17 nt, Human
cagcugucuuuuggagg

SEQ ID NO: 3798812 - RNA, 20 nt, Human
cagcugugaacauggacucu

SEQ ID NO: 3798813 - RNA, 13 nt, Human
cagcugugagccu

SEQ ID NO: 3798814 - RNA, 16 nt, Human
cagcugugagccuugg

SEQ ID NO: 3798815 - RNA, 17 nt, Human
cagcugugagccuuggc

SEQ ID NO: 3798816 - RNA, 12 nt, Human
cagcugugccuc

SEQ ID NO: 3798817 - RNA, 17 nt, Human
cagcugugccucgcucc

SEQ ID NO: 3798818 - RNA, 16 nt, Human
cagcuguggcagaguu

SEQ ID NO: 3798819 - RNA, 19 nt, Human
cagcuguggcagaguuaca

SEQ ID NO: 3798820 - RNA, 23 nt, Human
cagcugugugacauuuggagagg

SEQ ID NO: 3798821 - RNA, 22 nt, Human
cagcuguuagaguccaacgugg

SEQ ID NO: 3798822 - RNA, 19 nt, Human
cagcuguugacucuaguac

SEQ ID NO: 3798823 - RNA, 19 nt, Human
cagcuguugucucuucucc

SEQ ID NO: 3798824 - RNA, 14 nt, Human
cagcuguuuaagau

SEQ ID NO: 3798825 - RNA, 21 nt, Human
cagcuguuuaugcauagauaa

SEQ ID NO: 3798826 - RNA, 20 nt, Human
cagcuguuuuaguuaaauuu

SEQ ID NO: 3798827 - RNA, 15 nt, Human
cagcuguuuuguuga

SEQ ID NO: 3798828 - RNA, 16 nt, Human
cagcuguuuuguugac

SEQ ID NO: 3798829 - RNA, 19 nt, Human
cagcuguuuuguugacauu

SEQ ID NO: 3798830 - RNA, 18 nt, Human
cagcuuagaguuggccau

SEQ ID NO: 3798831 - RNA, 15 nt, Human
cagcuuagggcccug

SEQ ID NO: 3798832 - RNA, 19 nt, Human
cagcuuagggcccuggagg

SEQ ID NO: 3798833 - RNA, 17 nt, Human
cagcuuaggggcugcug

SEQ ID NO: 3798834 - RNA, 16 nt, Human
cagcuuauacgaaaua

SEQ ID NO: 3798835 - RNA, 16 nt, Human
cagcuuaucucuuuua

SEQ ID NO: 3798836 - RNA, 21 nt, Human
cagcuuaucucuuuuauauuu

SEQ ID NO: 3798837 - RNA, 13 nt, Human
auuuuaaacaaag

SEQ ID NO: 3798838 - RNA, 20 nt, Human
auuuuaaaccauaaaaagcu

SEQ ID NO: 3798839 - RNA, 14 nt, Human
auuuuaaacuagau

SEQ ID NO: 3798840 - RNA, 16 nt, Human
auuuuaaacuagauga

SEQ ID NO: 3798841 - RNA, 12 nt, Human
auuuuaaagaau

SEQ ID NO: 3798842 - RNA, 22 nt, Human
auuuuaaaguaugcauuauuaa

SEQ ID NO: 3798843 - RNA, 17 nt, Human
auuuuaaagugcaaaag

SEQ ID NO: 3798844 - RNA, 22 nt, Human
auuuuaaaguuaaacauuuuua

SEQ ID NO: 3798845 - RNA, 18 nt, Human
auuuuaaaguuaguaucu

SEQ ID NO: 3798846 - RNA, 15 nt, Human
auuuuaaauaaaaga

SEQ ID NO: 3798847 - RNA, 16 nt, Human
auuuuaaauaaaagaa

SEQ ID NO: 3798848 - RNA, 21 nt, Human
auuuuaaauaaaagugaucaa

SEQ ID NO: 3798849 - RNA, 21 nt, Human
auuuuaaaucuaaaucuauuu

SEQ ID NO: 3798850 - RNA, 21 nt, Human
auuuuaaauuauaaggacugc

SEQ ID NO: 3798851 - RNA, 18 nt, Human
auuuuaacaaaagcaaga

SEQ ID NO: 3798852 - RNA, 21 nt, Human
auuuuaacaagaagaugaaug

SEQ ID NO: 3798853 - RNA, 22 nt, Human
auuuuaacaagaagaugaaugg

SEQ ID NO: 3798854 - RNA, 14 nt, Human
auuuuaacacacau

SEQ ID NO: 3798855 - RNA, 17 nt, Human
auuuuaacacacauaaa

SEQ ID NO: 3798856 - RNA, 18 nt, Human
auuuuaacacacauaaag

SEQ ID NO: 3798857 - RNA, 22 nt, Human
auuuuaacacacauaaaggaua

SEQ ID NO: 3798858 - RNA, 22 nt, Human
auuuuaaccuaugauauuuucu

SEQ ID NO: 3798859 - RNA, 13 nt, Human
auuuuaacucaua

SEQ ID NO: 3798860 - RNA, 13 nt, Human
auuuuaacucugu

SEQ ID NO: 3798861 - RNA, 17 nt, Human
auuuuaacuuuaucaca

SEQ ID NO: 3798862 - RNA, 19 nt, Human
auuuuaacuuuaucacauu

SEQ ID NO: 3798863 - RNA, 16 nt, Human
auuuuaagacugauuu

SEQ ID NO: 3798864 - RNA, 22 nt, Human
auuuuaagauuccuuuucuugu

SEQ ID NO: 3798865 - RNA, 22 nt, Human
auuuuaagcacucuuaaagcaa

SEQ ID NO: 3798866 - RNA, 21 nt, Human
auuuuaagcauuacucuugua

SEQ ID NO: 3798867 - RNA, 24 nt, Human
auuuuaagcauuacucuuguaaga

SEQ ID NO: 3798868 - RNA, 14 nt, Human
auuuuaagcauugu

SEQ ID NO: 3798869 - RNA, 13 nt, Human
auuuuaagccuuu

SEQ ID NO: 3798870 - RNA, 23 nt, Human
auuuuaagcuaggaaaagaaauc

SEQ ID NO: 3798871 - RNA, 14 nt, Human
auuuuaaguauugc

SEQ ID NO: 3798872 - RNA, 20 nt, Human
auuuuaaguauugcaucugu

SEQ ID NO: 3798873 - RNA, 15 nt, Human
auuuuaagucccugu

SEQ ID NO: 3798874 - RNA, 16 nt, Human
auuuuaagugcuuugu

SEQ ID NO: 3798875 - RNA, 15 nt, Human
auuuuaauaaacacu

SEQ ID NO: 3798876 - RNA, 16 nt, Human
auuuuaauaaacacuc

SEQ ID NO: 3798877 - RNA, 17 nt, Human
auuuuaauaaacacucu

SEQ ID NO: 3798878 - RNA, 18 nt, Human
auuuuaauaauguuucaa

SEQ ID NO: 3798879 - RNA, 14 nt, Human
auuuuaaucaaauu

SEQ ID NO: 3798880 - RNA, 23 nt, Human
auuuuaaugaagaaaguggaaaa

SEQ ID NO: 3798881 - RNA, 22 nt, Human
auuuuaaugcaguugcuuacua

SEQ ID NO: 3798882 - RNA, 19 nt, Human
auuuuaauggauuguuaau

SEQ ID NO: 3798883 - RNA, 22 nt, Human
auuuuaauguaaagauuugcuu

SEQ ID NO: 3798884 - RNA, 18 nt, Human
auuuuaauuagguuaacu

SEQ ID NO: 3798885 - RNA, 20 nt, Human
auuuuaauuagguuaacuau

SEQ ID NO: 3798886 - RNA, 14 nt, Human
auuuuaauugucau

SEQ ID NO: 3798887 - RNA, 19 nt, Human
auuuuaauuuaguaaaugu

SEQ ID NO: 3798888 - RNA, 18 nt, Human
auuuuaauuucaagcuua

SEQ ID NO: 3798889 - RNA, 19 nt, Human
auuuuaauuuuuaaaugca

SEQ ID NO: 3798890 - RNA, 17 nt, Human
auuuuacaaaagaugua

SEQ ID NO: 3798891 - RNA, 20 nt, Human
auuuuacaauaggugcuuau

SEQ ID NO: 3798892 - RNA, 15 nt, Human
auuuuacacagaaac

SEQ ID NO: 3798893 - RNA, 19 nt, Human
auuuuacacagaaacacug

SEQ ID NO: 3798894 - RNA, 20 nt, Human
auuuuacacagaaacacugc

SEQ ID NO: 3798895 - RNA, 17 nt, Human
auuuuaccaaguuauau

SEQ ID NO: 3798896 - RNA, 18 nt, Human
auuuuaccaaguuauaua

SEQ ID NO: 3798897 - RNA, 19 nt, Human
auuuuaccaaguuauauaa

SEQ ID NO: 3798898 - RNA, 23 nt, Human
auuuuaccaaguuauauaaagag

SEQ ID NO: 3798899 - RNA, 19 nt, Human
auuuuaccuagcuaauuau

SEQ ID NO: 3798900 - RNA, 18 nt, Human
auuuuacuacuguggaaa

SEQ ID NO: 3798901 - RNA, 20 nt, Human
auuuuacuguacagacagaa

SEQ ID NO: 3798902 - RNA, 16 nt, Human
auuuuacugucuuaau

SEQ ID NO: 3798903 - RNA, 16 nt, Human
auuuuacuuggaaaua

SEQ ID NO: 3798904 - RNA, 21 nt, Human
auuuuagaaaccccucuguag

SEQ ID NO: 3798905 - RNA, 12 nt, Human
auuuuagacaaa

SEQ ID NO: 3798906 - RNA, 22 nt, Human
auuuuagauggaauaagagaaa

SEQ ID NO: 3798907 - RNA, 20 nt, Human
auuuuagcaguucugcaaau

SEQ ID NO: 3798908 - RNA, 23 nt, Human
auuuuagcucuauugauacucuu

SEQ ID NO: 3798909 - RNA, 13 nt, Human
auuuuagcuuuug

SEQ ID NO: 3798910 - RNA, 15 nt, Human
auuuuaggaacuuca

SEQ ID NO: 3798911 - RNA, 17 nt, Human
auuuuaggaggaccaga

SEQ ID NO: 3798912 - RNA, 17 nt, Human
auuuuaggcacccaucc

SEQ ID NO: 3798913 - RNA, 20 nt, Human
auuuuaggcacucuuaaaug

SEQ ID NO: 3798914 - RNA, 22 nt, Human
auuuuaggcacucuuaaaugau

SEQ ID NO: 3798915 - RNA, 21 nt, Human
auuuuagguguugauuuucug

SEQ ID NO: 3798916 - RNA, 23 nt, Human
auuuuagguguugauuuucuguu

SEQ ID NO: 3798917 - RNA, 23 nt, Human
auuuuaguauauuuauauaauua

SEQ ID NO: 3798918 - RNA, 14 nt, Human
auuuuaguauucau

SEQ ID NO: 3798919 - RNA, 14 nt, Human
auuuuaguccaaau

SEQ ID NO: 3798920 - RNA, 15 nt, Human
auuuuaguuucuguu

SEQ ID NO: 3798921 - RNA, 19 nt, Human
auuuuaguuuuucauuaaa

SEQ ID NO: 3798922 - RNA, 20 nt, Human
auuuuauaaaauuaaagaaa

SEQ ID NO: 3798923 - RNA, 22 nt, Human
auuuuauaaaauuaaagaaaau

SEQ ID NO: 3798924 - RNA, 12 nt, Human
auuuuauaaagu

SEQ ID NO: 3798925 - RNA, 21 nt, Human
auuuuauaaaucgcuuuugau

SEQ ID NO: 3798926 - RNA, 15 nt, Human
auuuuauaaauguau

SEQ ID NO: 3798927 - RNA, 14 nt, Human
auuuuauaagaaaa

SEQ ID NO: 3798928 - RNA, 15 nt, Human
auuuuauaagaaaaa

SEQ ID NO: 3798929 - RNA, 20 nt, Human
auuuuauaagaaaaacuuuu

SEQ ID NO: 3798930 - RNA, 19 nt, Human
auuuuauagcuacuaauuu

SEQ ID NO: 3798931 - RNA, 18 nt, Human
auuuuauagcucaguuua

SEQ ID NO: 3798932 - RNA, 12 nt, Human
auuuuauaucuu

SEQ ID NO: 3798933 - RNA, 14 nt, Human
auuuuauaucuugu

SEQ ID NO: 3798934 - RNA, 23 nt, Human
auuuuauaugcuuacugauauau

SEQ ID NO: 3798935 - RNA, 15 nt, Human
auuuuauaugucaaa

SEQ ID NO: 3798936 - RNA, 14 nt, Human
auuuuauauugaaa

SEQ ID NO: 3798937 - RNA, 21 nt, Human
auuuuaucugccucucuugua

SEQ ID NO: 3798938 - RNA, 22 nt, Human
auuuuaucuguuuccugacauu

SEQ ID NO: 3798939 - RNA, 19 nt, Human
auuuuaucuuucgcacagc

SEQ ID NO: 3798940 - RNA, 21 nt, Human
auuuuaucuuugauucuccuu

SEQ ID NO: 3798941 - RNA, 23 nt, Human
auuuuaucuuugauucuccuuca

SEQ ID NO: 3798942 - RNA, 18 nt, Human
auuuuaugagaaauguaa

SEQ ID NO: 3798943 - RNA, 21 nt, Human
auuuuaugagaaauguaaugc

SEQ ID NO: 3798944 - RNA, 14 nt, Human
auuuuaugauccag

SEQ ID NO: 3798945 - RNA, 16 nt, Human
auuuuaugauccagca

SEQ ID NO: 3798946 - RNA, 14 nt, Human
auuuuaugcaaaua

SEQ ID NO: 3798947 - RNA, 17 nt, Human
caguaaagagaaacuuu

SEQ ID NO: 3798948 - RNA, 20 nt, Human
caguaaagagaaacuuugug

SEQ ID NO: 3798949 - RNA, 18 nt, Human
caguaaauaacuggaaaa

SEQ ID NO: 3798950 - RNA, 22 nt, Human
caguaaauaacuggaaaacaga

SEQ ID NO: 3798951 - RNA, 19 nt, Human
caguaaaugggggugcauu

SEQ ID NO: 3798952 - RNA, 22 nt, Human
caguaacacauagacugugcgc

SEQ ID NO: 3798953 - RNA, 18 nt, Human
caguaacgcaggggaaac

SEQ ID NO: 3798954 - RNA, 20 nt, Human
caguaacgcgucuuccugag

SEQ ID NO: 3798955 - RNA, 21 nt, Human
caguaacgcgucuuccugagu

SEQ ID NO: 3798956 - RNA, 21 nt, Human
caguaacgggucguaaugacu

SEQ ID NO: 3798957 - RNA, 14 nt, Human
caguaacugucagg

SEQ ID NO: 3798958 - RNA, 21 nt, Human
caguaagaccggaagcuccug

SEQ ID NO: 3798959 - RNA, 22 nt, Human
caguaagaccggaagcuccugg

SEQ ID NO: 3798960 - RNA, 16 nt, Human
caguaagaucacuguu

SEQ ID NO: 3798961 - RNA, 21 nt, Human
caguaagaucacuguuuagau

SEQ ID NO: 3798962 - RNA, 13 nt, Human
caguaaguuccua

SEQ ID NO: 3798963 - RNA, 13 nt, Human
caguaauaaaaca

SEQ ID NO: 3798964 - RNA, 18 nt, Human
caguaauaaaacaucuuu

SEQ ID NO: 3798965 - RNA, 20 nt, Human
caguaauauuuauauauuua

SEQ ID NO: 3798966 - RNA, 23 nt, Human
caguaauccuguaggaagguacu

SEQ ID NO: 3798967 - RNA, 21 nt, Human
caguaaugagcuuaagaaauu

SEQ ID NO: 3798968 - RNA, 18 nt, Human
caguaaugucauaaagug

SEQ ID NO: 3798969 - RNA, 17 nt, Human
caguaauuugaggacaa

SEQ ID NO: 3798970 - RNA, 21 nt, Human
caguacaaugugacuuugaaa

SEQ ID NO: 3798971 - RNA, 12 nt, Human
caguacaggcag

SEQ ID NO: 3798972 - RNA, 19 nt, Human
caguacaggcagcacagag

SEQ ID NO: 3798973 - RNA, 16 nt, Human
caguacagugguucua

SEQ ID NO: 3798974 - RNA, 15 nt, Human
caguacaugggaaag

SEQ ID NO: 3798975 - RNA, 12 nt, Human
caguacauuuaa

SEQ ID NO: 3798976 - RNA, 12 nt, Human
caguaccacaug

SEQ ID NO: 3798977 - RNA, 14 nt, Human
caguacccaccacc

SEQ ID NO: 3798978 - RNA, 19 nt, Human
caguacccauggggcuagg

SEQ ID NO: 3798979 - RNA, 14 nt, Human
caguacccucucag

SEQ ID NO: 3798980 - RNA, 22 nt, Human
caguacccucucagcuccaggu

SEQ ID NO: 3798981 - RNA, 20 nt, Human
caguaccuagcuggcucugu

SEQ ID NO: 3798982 - RNA, 15 nt, Human
caguaccugaggguc

SEQ ID NO: 3798983 - RNA, 23 nt, Human
caguaccuggguccccagcccuu

SEQ ID NO: 3798984 - RNA, 18 nt, Human
caguacuaacauuuauuu

SEQ ID NO: 3798985 - RNA, 13 nt, Human
caguacuggagcu

SEQ ID NO: 3798986 - RNA, 15 nt, Human
caguacuucagcaag

SEQ ID NO: 3798987 - RNA, 20 nt, Human
caguacuucagcaagagaga

SEQ ID NO: 3798988 - RNA, 16 nt, Human
caguacuuugugcauu

SEQ ID NO: 3798989 - RNA, 18 nt, Human
caguacuuugugcauucu

SEQ ID NO: 3798990 - RNA, 15 nt, Human
caguacuuuuuuaaa

SEQ ID NO: 3798991 - RNA, 21 nt, Human
caguacuuuuuuaaauauuuu

SEQ ID NO: 3798992 - RNA, 19 nt, Human
caguagaaauaauaugcau

SEQ ID NO: 3798993 - RNA, 14 nt, Human
caguagaacuccag

SEQ ID NO: 3798994 - RNA, 14 nt, Human
caguagaacugucu

SEQ ID NO: 3798995 - RNA, 15 nt, Human
caguagaacugucug

SEQ ID NO: 3798996 - RNA, 20 nt, Human
caguagaaggucggaggcuu

SEQ ID NO: 3798997 - RNA, 23 nt, Human
caguagaaggucggaggcuuggg

SEQ ID NO: 3798998 - RNA, 22 nt, Human
caguagacauuuuaacaagaag

SEQ ID NO: 3798999 - RNA, 18 nt, Human
cagcuucaugccuuugua

SEQ ID NO: 3799000 - RNA, 15 nt, Human
cagcuucauuuccug

SEQ ID NO: 3799001 - RNA, 18 nt, Human
cagcuucauuuccugugu

SEQ ID NO: 3799002 - RNA, 19 nt, Human
cagcuucauuuccuguguc

SEQ ID NO: 3799003 - RNA, 21 nt, Human
cagcuucauuuccugugucuu

SEQ ID NO: 3799004 - RNA, 13 nt, Human
cagcuucauuugu

SEQ ID NO: 3799005 - RNA, 14 nt, Human
cagcuuccagcagg

SEQ ID NO: 3799006 - RNA, 17 nt, Human
cagcuuccagcaggagg

SEQ ID NO: 3799007 - RNA, 18 nt, Human
cagcuuccccucucuccu

SEQ ID NO: 3799008 - RNA, 20 nt, Human
cagcuuccuacccacaccuc

SEQ ID NO: 3799009 - RNA, 15 nt, Human
cagcuuccuucagag

SEQ ID NO: 3799010 - RNA, 18 nt, Human
cagcuucucauccugcag

SEQ ID NO: 3799011 - RNA, 19 nt, Human
cagcuucucauccugcagg

SEQ ID NO: 3799012 - RNA, 12 nt, Human
cagcuucuccag

SEQ ID NO: 3799013 - RNA, 13 nt, Human
cagcuucuccagg

SEQ ID NO: 3799014 - RNA, 15 nt, Human
cagcuucuccugugu

SEQ ID NO: 3799015 - RNA, 16 nt, Human
cagcuucuccugugug

SEQ ID NO: 3799016 - RNA, 14 nt, Human
cagcuucugccacu

SEQ ID NO: 3799017 - RNA, 16 nt, Human
cagcuucugcccccug

SEQ ID NO: 3799018 - RNA, 17 nt, Human
cagcuucugcugggcug

SEQ ID NO: 3799019 - RNA, 18 nt, Human
cagcuucugcugggcugg

SEQ ID NO: 3799020 - RNA, 14 nt, Human
cagcuucugguacu

SEQ ID NO: 3799021 - RNA, 19 nt, Human
cagcuucugguacucuccu

SEQ ID NO: 3799022 - RNA, 23 nt, Human
cagcuucugguacucuccuagag

SEQ ID NO: 3799023 - RNA, 19 nt, Human
cagcuugaccgugaggcca

SEQ ID NO: 3799024 - RNA, 21 nt, Human
cagcuugaccgugaggccaga

SEQ ID NO: 3799025 - RNA, 15 nt, Human
cagcuugaccugagg

SEQ ID NO: 3799026 - RNA, 16 nt, Human
cagcuugaccugaggc

SEQ ID NO: 3799027 - RNA, 21 nt, Human
cagcuugaccugaggcugugg

SEQ ID NO: 3799028 - RNA, 22 nt, Human
cagcuugaccugaggcuguggu

SEQ ID NO: 3799029 - RNA, 19 nt, Human
cagcuugaggguugggcug

SEQ ID NO: 3799030 - RNA, 21 nt, Human
cagcuugaggguugggcuggu

SEQ ID NO: 3799031 - RNA, 18 nt, Human
cagcuugcacauuuggua

SEQ ID NO: 3799032 - RNA, 16 nt, Human
cagcuugccccggccc

SEQ ID NO: 3799033 - RNA, 17 nt, Human
cagcuugggcagaucuc

SEQ ID NO: 3799034 - RNA, 17 nt, Human
cagcuugggcccagcug

SEQ ID NO: 3799035 - RNA, 20 nt, Human
cagcuugggcccagcugggc

SEQ ID NO: 3799036 - RNA, 21 nt, Human
cagcuuggggccaccaaagcu

SEQ ID NO: 3799037 - RNA, 15 nt, Human
cagcuuguagccagc

SEQ ID NO: 3799038 - RNA, 17 nt, Human
cagcuuguagccagccg

SEQ ID NO: 3799039 - RNA, 21 nt, Human
cagcuuguagccagccggggc

SEQ ID NO: 3799040 - RNA, 15 nt, Human
cagcuuguaggagcu

SEQ ID NO: 3799041 - RNA, 13 nt, Human
cagcuuguauuuu

SEQ ID NO: 3799042 - RNA, 14 nt, Human
cagcuugugcacaa

SEQ ID NO: 3799043 - RNA, 15 nt, Human
cagcuuguggagccc

SEQ ID NO: 3799044 - RNA, 20 nt, Human
cagcuugugugcaaaagcag

SEQ ID NO: 3799045 - RNA, 23 nt, Human
cagcuuguuuuggacuuuguuac

SEQ ID NO: 3799046 - RNA, 17 nt, Human
cagcuuuaaacucaggg

SEQ ID NO: 3799047 - RNA, 21 nt, Human
cagcuuuaaacucagggacag

SEQ ID NO: 3799048 - RNA, 18 nt, Human
cagcuuuacacacacaga

SEQ ID NO: 3799049 - RNA, 15 nt, Human
cagcuuuacaugcaa

SEQ ID NO: 3799050 - RNA, 21 nt, Human
cagcuuuacaugcaauuuauu

SEQ ID NO: 3799051 - RNA, 13 nt, Human
cagcuuuauguuc

SEQ ID NO: 3799052 - RNA, 14 nt, Human
cagcuuucaagugc

SEQ ID NO: 3799053 - RNA, 16 nt, Human
cagcuuucagggccau

SEQ ID NO: 3799054 - RNA, 16 nt, Human
cagcuuucaugauuag

SEQ ID NO: 3799055 - RNA, 13 nt, Human
cagcuuuccagua

SEQ ID NO: 3799056 - RNA, 23 nt, Human
cagcuuuccucaaaacuucagac

SEQ ID NO: 3799057 - RNA, 14 nt, Human
cagcuuuccuguau

SEQ ID NO: 3799058 - RNA, 15 nt, Human
cagcuuucugaccuu

SEQ ID NO: 3799059 - RNA, 21 nt, Human
cagcuuucugaccuucagcuc

SEQ ID NO: 3799060 - RNA, 22 nt, Human
cagcuuucuugcucccuucagc

SEQ ID NO: 3799061 - RNA, 23 nt, Human
cagcuuucuugcucccuucagcc

SEQ ID NO: 3799062 - RNA, 12 nt, Human
cagcuuugcaaa

SEQ ID NO: 3799063 - RNA, 22 nt, Human
cagcuuugcccaacaccagccc

SEQ ID NO: 3799064 - RNA, 20 nt, Human
cagcuuugcucauauuuccc

SEQ ID NO: 3799065 - RNA, 21 nt, Human
cagcuuugcucauauuuccca

SEQ ID NO: 3799066 - RNA, 12 nt, Human
cagcuuuguuug

SEQ ID NO: 3799067 - RNA, 23 nt, Human
cagcuuuguuuguugucagcuga

SEQ ID NO: 3799068 - RNA, 16 nt, Human
cagcuuuuaaccaucu

SEQ ID NO: 3799069 - RNA, 18 nt, Human
cagcuuuuaguacccacc

SEQ ID NO: 3799070 - RNA, 19 nt, Human
cagcuuuuaguacccaccu

SEQ ID NO: 3799071 - RNA, 22 nt, Human
cagcuuuuaguacccaccugag

SEQ ID NO: 3799072 - RNA, 23 nt, Human
cagcuuuuaguacccaccugagc

SEQ ID NO: 3799073 - RNA, 15 nt, Human
cagcuuuucauugcu

SEQ ID NO: 3799074 - RNA, 18 nt, Human
cagcuuuucccaaaagcc

SEQ ID NO: 3799075 - RNA, 16 nt, Human
cagcuuuucucaacug

SEQ ID NO: 3799076 - RNA, 19 nt, Human
cagcuuuuuaaaguggguu

SEQ ID NO: 3799077 - RNA, 13 nt, Human
cagcuuuuugucu

SEQ ID NO: 3799078 - RNA, 19 nt, Human
cagcuuuuugucuuuucug

SEQ ID NO: 3799079 - RNA, 21 nt, Human
caggaaaaaaaaaaaaaagac

SEQ ID NO: 3799080 - RNA, 16 nt, Human
caggaaaaaaacuuuu

SEQ ID NO: 3799081 - RNA, 17 nt, Human
caggaaaaacccgucaa

SEQ ID NO: 3799082 - RNA, 13 nt, Human
caggaaaaagaac

SEQ ID NO: 3799083 - RNA, 14 nt, Human
caggaaaaaggaca

SEQ ID NO: 3799084 - RNA, 22 nt, Human
caggaaaaaggacaggcagaaa

SEQ ID NO: 3799085 - RNA, 16 nt, Human
caggaaaacacccagg

SEQ ID NO: 3799086 - RNA, 20 nt, Human
caggaaaacugacagaggag

SEQ ID NO: 3799087 - RNA, 23 nt, Human
caggaaaacugacagaggagggc

SEQ ID NO: 3799088 - RNA, 18 nt, Human
caggaaaagccucugugu

SEQ ID NO: 3799089 - RNA, 19 nt, Human
caggaaaagccucuguguc

SEQ ID NO: 3799090 - RNA, 15 nt, Human
caggaaaagcugcug

SEQ ID NO: 3799091 - RNA, 16 nt, Human
ccaucacaaacuuaaa

SEQ ID NO: 3799092 - RNA, 15 nt, Human
ccaucacaugaccac

SEQ ID NO: 3799093 - RNA, 12 nt, Human
ccaucacccgcu

SEQ ID NO: 3799094 - RNA, 16 nt, Human
ccaucacccucuuccu

SEQ ID NO: 3799095 - RNA, 20 nt, Human
ccaucacccucuuccuguga

SEQ ID NO: 3799096 - RNA, 16 nt, Human
cccagcccuggcucug

SEQ ID NO: 3799097 - RNA, 18 nt, Human
cccagcccuggcucugca

SEQ ID NO: 3799098 - RNA, 16 nt, Human
cccagcccuguggaag

SEQ ID NO: 3799099 - RNA, 19 nt, Human
cccagcccuuccucugcuc

SEQ ID NO: 3799100 - RNA, 17 nt, Human
cccagccgcugcccggc

SEQ ID NO: 3799101 - RNA, 15 nt, Human
cccagccggccucuc

SEQ ID NO: 3799102 - RNA, 16 nt, Human
cccagccggccucucu

SEQ ID NO: 3799103 - RNA, 21 nt, Human
cccagccucaaauccaggacc

SEQ ID NO: 3799104 - RNA, 12 nt, Human
cccagccucagu

SEQ ID NO: 3799105 - RNA, 22 nt, Human
cccagccucaguccuccccuca

SEQ ID NO: 3799106 - RNA, 20 nt, Human
cccagccuccaagcuccauc

SEQ ID NO: 3799107 - RNA, 18 nt, Human
cccagccucccugaagcc

SEQ ID NO: 3799108 - RNA, 11 nt, Human
cccagccugcg

SEQ ID NO: 3799109 - RNA, 19 nt, Human
cccagccugcgccugcugc

SEQ ID NO: 3799110 - RNA, 12 nt, Human
cccagccugcua

SEQ ID NO: 3799111 - RNA, 16 nt, Human
cccagccugcuagcua

SEQ ID NO: 3799112 - RNA, 18 nt, Human
cccagccuggaugccauc

SEQ ID NO: 3799113 - RNA, 22 nt, Human
cccagccuggccacgcagccag

SEQ ID NO: 3799114 - RNA, 18 nt, Human
cccagccuggcccagcuc

SEQ ID NO: 3799115 - RNA, 19 nt, Human
cccagccuggcccagcucc

SEQ ID NO: 3799116 - RNA, 11 nt, Human
cccagccuggg

SEQ ID NO: 3799117 - RNA, 21 nt, Human
cccagccugggcccaucuccc

SEQ ID NO: 3799118 - RNA, 15 nt, Human
cccagccugggccua

SEQ ID NO: 3799119 - RNA, 16 nt, Human
cccagccugggccuau

SEQ ID NO: 3799120 - RNA, 22 nt, Human
cccagccugucagauccaggag

SEQ ID NO: 3799121 - RNA, 22 nt, Human
cccagccuuuguuccccacugg

SEQ ID NO: 3799122 - RNA, 14 nt, Human
cccagcgagcccug

SEQ ID NO: 3799123 - RNA, 14 nt, Human
cccagcgauucccu

SEQ ID NO: 3799124 - RNA, 21 nt, Human
cccagcgauucccucucccag

SEQ ID NO: 3799125 - RNA, 14 nt, Human
cccagcggacacac

SEQ ID NO: 3799126 - RNA, 20 nt, Human
cccagcggacaguggcagga

SEQ ID NO: 3799127 - RNA, 23 nt, Human
cccagcggacaguggcaggacag

SEQ ID NO: 3799128 - RNA, 14 nt, Human
cccagcggccccuc

SEQ ID NO: 3799129 - RNA, 22 nt, Human
cccagcggcuggugcagggccu

SEQ ID NO: 3799130 - RNA, 17 nt, Human
cccagcuaagaaccugg

SEQ ID NO: 3799131 - RNA, 18 nt, Human
cccagcuaagaaccugga

SEQ ID NO: 3799132 - RNA, 20 nt, Human
cccagcuaagaaccuggaac

SEQ ID NO: 3799133 - RNA, 20 nt, Human
cccagcuaaucuguagggcu

SEQ ID NO: 3799134 - RNA, 14 nt, Human
cccagcuaauuuuu

SEQ ID NO: 3799135 - RNA, 22 nt, Human
cccagcuaccucaaccaaugcc

SEQ ID NO: 3799136 - RNA, 21 nt, Human
cccagcuacucaagaggcuga

SEQ ID NO: 3799137 - RNA, 19 nt, Human
cccagcuacucgggaagcu

SEQ ID NO: 3799138 - RNA, 20 nt, Human
cccagcuacucgggaggcug

SEQ ID NO: 3799139 - RNA, 17 nt, Human
cccagcuacuugggagg

SEQ ID NO: 3799140 - RNA, 22 nt, Human
cccagcuaggaagagcaggacu

SEQ ID NO: 3799141 - RNA, 17 nt, Human
cccagcuauaccugugc

SEQ ID NO: 3799142 - RNA, 11 nt, Human
cccagcucaau

SEQ ID NO: 3799143 - RNA, 14 nt, Human
cccagcucagaggg

SEQ ID NO: 3799144 - RNA, 15 nt, Human
cccagcucagagggu

SEQ ID NO: 3799145 - RNA, 16 nt, Human
cccagcucaggggcag

SEQ ID NO: 3799146 - RNA, 9 nt, Human
cccagcucc

SEQ ID NO: 3799147 - RNA, 13 nt, Human
cccagcuccaggg

SEQ ID NO: 3799148 - RNA, 21 nt, Human
cccagcucucccucuggcccu

SEQ ID NO: 3799149 - RNA, 23 nt, Human
cccagcucucccucuggcccugc

SEQ ID NO: 3799150 - RNA, 11 nt, Human
cccagcucugc

SEQ ID NO: 3799151 - RNA, 13 nt, Human
cccagcucugcuu

SEQ ID NO: 3799152 - RNA, 23 nt, Human
cccagcucugguccauagagagc

SEQ ID NO: 3799153 - RNA, 15 nt, Human
cccagcucuggugag

SEQ ID NO: 3799154 - RNA, 20 nt, Human
cccagcucuucuccccaggu

SEQ ID NO: 3799155 - RNA, 17 nt, Human
cccagcugacauggaaa

SEQ ID NO: 3799156 - RNA, 18 nt, Human
cccagcugcaccccuucc

SEQ ID NO: 3799157 - RNA, 20 nt, Human
cccagcugcaccccuuccug

SEQ ID NO: 3799158 - RNA, 13 nt, Human
cccagcugcucug

SEQ ID NO: 3799159 - RNA, 19 nt, Human
cccagcugcucugcccaga

SEQ ID NO: 3799160 - RNA, 11 nt, Human
cccagcuggga

SEQ ID NO: 3799161 - RNA, 12 nt, Human
cccagcugggag

SEQ ID NO: 3799162 - RNA, 13 nt, Human
cccagcugggagg

SEQ ID NO: 3799163 - RNA, 15 nt, Human
cccagcugggaggca

SEQ ID NO: 3799164 - RNA, 18 nt, Human
cccagcugggaggcaaga

SEQ ID NO: 3799165 - RNA, 12 nt, Human
cccagcugggcu

SEQ ID NO: 3799166 - RNA, 20 nt, Human
cccagcugggcucugccacc

SEQ ID NO: 3799167 - RNA, 22 nt, Human
cccagcuggggccaggcugggu

SEQ ID NO: 3799168 - RNA, 22 nt, Human
cccagcuggugggaagcgucug

SEQ ID NO: 3799169 - RNA, 15 nt, Human
cccagcugucugugu

SEQ ID NO: 3799170 - RNA, 15 nt, Human
cccagcugugagccu

SEQ ID NO: 3799171 - RNA, 19 nt, Human
cccagcugugagccuuggc

SEQ ID NO: 3799172 - RNA, 22 nt, Human
cccagcugugcuuaugguacca

SEQ ID NO: 3799173 - RNA, 22 nt, Human
cccagcuuaaaggggcuagagu

SEQ ID NO: 3799174 - RNA, 17 nt, Human
cccagcuucacuucuga

SEQ ID NO: 3799175 - RNA, 17 nt, Human
cccagcuuguaggagcu

SEQ ID NO: 3799176 - RNA, 18 nt, Human
cccagcuuguaggagcug

SEQ ID NO: 3799177 - RNA, 13 nt, Human
cccagcuuugccc

SEQ ID NO: 3799178 - RNA, 19 nt, Human
cccaggaaaggcaggauug

SEQ ID NO: 3799179 - RNA, 16 nt, Human
cccaggaaaggcccag

SEQ ID NO: 3799180 - RNA, 15 nt, Human
cccaggaaaggcucc

SEQ ID NO: 3799181 - RNA, 16 nt, Human
cccaggaaaggcucca

SEQ ID NO: 3799182 - RNA, 11 nt, Human
cccaggaacaa

SEQ ID NO: 3799183 - RNA, 15 nt, Human
cccaggaacugggcc

SEQ ID NO: 3799184 - RNA, 22 nt, Human
cccaggaaugaagauaccauca

SEQ ID NO: 3799185 - RNA, 22 nt, Human
cccaggaaugccaaggagacau

SEQ ID NO: 3799186 - RNA, 22 nt, Human
cccaggaauggagccugcacgg

SEQ ID NO: 3799187 - RNA, 21 nt, Human
cccaggacaagcaugguccca

SEQ ID NO: 3799188 - RNA, 23 nt, Human
cccaggacaccacacccagccuc

SEQ ID NO: 3799189 - RNA, 20 nt, Human
cccaggaccaagccacagca

SEQ ID NO: 3799190 - RNA, 21 nt, Human
cccaggaccacaggcucaggc

SEQ ID NO: 3799191 - RNA, 12 nt, Human
cccaggaccaga

SEQ ID NO: 3799192 - RNA, 15 nt, Human
cccaggaccagaagc

SEQ ID NO: 3799193 - RNA, 14 nt, Human
cccaggaccagcuc

SEQ ID NO: 3799194 - RNA, 17 nt, Human
cccaggaccagcucagg

SEQ ID NO: 3799195 - RNA, 20 nt, Human
cccaggaccagcucaggaca

SEQ ID NO: 3799196 - RNA, 22 nt, Human
cccaggaccagcucaggacaga

SEQ ID NO: 3799197 - RNA, 19 nt, Human
cccaggaccagcuggggcg

SEQ ID NO: 3799198 - RNA, 20 nt, Human
cccaggaccccauggcagug

SEQ ID NO: 3799199 - RNA, 16 nt, Human
cccaggaccccugagu

SEQ ID NO: 3799200 - RNA, 16 nt, Human
cccaggaccuggcugc

SEQ ID NO: 3799201 - RNA, 19 nt, Human
cccaggacgccacucauuu

SEQ ID NO: 3799202 - RNA, 16 nt, Human
cccaggacgcuucuga

SEQ ID NO: 3799203 - RNA, 17 nt, Human
cccaggacgcuucugaa

SEQ ID NO: 3799204 - RNA, 19 nt, Human
cccaggacgcuucugaaug

SEQ ID NO: 3799205 - RNA, 15 nt, Human
cccaggacggggccg

SEQ ID NO: 3799206 - RNA, 22 nt, Human
cccaggacggggccggccaggu

SEQ ID NO: 3799207 - RNA, 23 nt, Human
cccaggacggggccggccaggug

SEQ ID NO: 3799208 - RNA, 13 nt, Human
cccaggacuccuc

SEQ ID NO: 3799209 - RNA, 15 nt, Human
cccaggacugggcca

SEQ ID NO: 3799210 - RNA, 15 nt, Human
cccaggagacaguuc

SEQ ID NO: 3799211 - RNA, 15 nt, Human
cccaggagagagaaa

SEQ ID NO: 3799212 - RNA, 23 nt, Human
cccaggagagccagcccucccug

SEQ ID NO: 3799213 - RNA, 18 nt, Human
cccaggagcauccaccuc

SEQ ID NO: 3799214 - RNA, 22 nt, Human
cccaggagcauccaccuccuuc

SEQ ID NO: 3799215 - RNA, 18 nt, Human
cccaggagccccgaggcc

SEQ ID NO: 3799216 - RNA, 21 nt, Human
cccaggagccccgaggccuuc

SEQ ID NO: 3799217 - RNA, 19 nt, Human
cccaggagccugcccagcc

SEQ ID NO: 3799218 - RNA, 12 nt, Human
cccaggagcucc

SEQ ID NO: 3799219 - RNA, 21 nt, Human
cccaggaggcagggaggcagc

SEQ ID NO: 3799220 - RNA, 23 nt, Human
cccaggaggcagggaggcagccg

SEQ ID NO: 3799221 - RNA, 10 nt, Human
cccaggaggg

SEQ ID NO: 3799222 - RNA, 14 nt, Human
cccaggagggaggg

SEQ ID NO: 3799223 - RNA, 22 nt, Human
cccaggaggggaacacugcccu

SEQ ID NO: 3799224 - RNA, 17 nt, Human
cccaggaguucugcuca

SEQ ID NO: 3799225 - RNA, 16 nt, Human
cccaggaguuuggcca

SEQ ID NO: 3799226 - RNA, 14 nt, Human
cccaggcaaauaaa

SEQ ID NO: 3799227 - RNA, 15 nt, Human
cccaggcaaauaaaa

SEQ ID NO: 3799228 - RNA, 21 nt, Human
cccaggcaaauaaaauucccu

SEQ ID NO: 3799229 - RNA, 14 nt, Human
cccaggcaggccac

SEQ ID NO: 3799230 - RNA, 11 nt, Human
cccaggcaggg

SEQ ID NO: 3799231 - RNA, 21 nt, Human
cccaggcauuccccaggaggc

SEQ ID NO: 3799232 - RNA, 17 nt, Human
cccaggccaggccacca

SEQ ID NO: 3799233 - RNA, 20 nt, Human
cccaggccaggccaccagga

SEQ ID NO: 3799234 - RNA, 23 nt, Human
cccaggccaggcuccuuccuguc

SEQ ID NO: 3799235 - RNA, 16 nt, Human
cagauuuuaauuguca

SEQ ID NO: 3799236 - RNA, 18 nt, Human
cagauuuuaauugucaug

SEQ ID NO: 3799237 - RNA, 19 nt, Human
cagauuuuaauugucaugg

SEQ ID NO: 3799238 - RNA, 15 nt, Human
cagauuuuaauuuug

SEQ ID NO: 3799239 - RNA, 19 nt, Human
cagauuuuacaaaagaugu

SEQ ID NO: 3799240 - RNA, 12 nt, Human
cagauuuuaguu

SEQ ID NO: 3799241 - RNA, 13 nt, Human
cagauuuuaguuu

SEQ ID NO: 3799242 - RNA, 22 nt, Human
cagauuuuauuauguaaauccc

SEQ ID NO: 3799243 - RNA, 22 nt, Human
cagauuuucagcaaacucuuuu

SEQ ID NO: 3799244 - RNA, 12 nt, Human
cagauuuuccug

SEQ ID NO: 3799245 - RNA, 14 nt, Human
cagauuuuccugaa

SEQ ID NO: 3799246 - RNA, 14 nt, Human
cagauuuuccugug

SEQ ID NO: 3799247 - RNA, 13 nt, Human
cagauuuugauaa

SEQ ID NO: 3799248 - RNA, 20 nt, Human
cagauuuugauaacuguuua

SEQ ID NO: 3799249 - RNA, 23 nt, Human
cagauuuugggguuguguuguca

SEQ ID NO: 3799250 - RNA, 19 nt, Human
ccaucaccuacucacacag

SEQ ID NO: 3799251 - RNA, 21 nt, Human
ccaucaccuacucacacaggc

SEQ ID NO: 3799252 - RNA, 14 nt, Human
ccaucacuggagca

SEQ ID NO: 3799253 - RNA, 18 nt, Human
ccaucacuggagcaccag

SEQ ID NO: 3799254 - RNA, 23 nt, Human
ccaucagaaacacccucacacug

SEQ ID NO: 3799255 - RNA, 22 nt, Human
ccaucagaggacaccuguacug

SEQ ID NO: 3799256 - RNA, 12 nt, Human
ccaucagaugac

SEQ ID NO: 3799257 - RNA, 13 nt, Human
ccaucagccucca

SEQ ID NO: 3799258 - RNA, 21 nt, Human
ccaucagcuuaggggcugcug

SEQ ID NO: 3799259 - RNA, 17 nt, Human
ccaucaggacucuugug

SEQ ID NO: 3799260 - RNA, 20 nt, Human
ccaucaggguaggcuggagu

SEQ ID NO: 3799261 - RNA, 22 nt, Human
ccaucaguguacccccgcccag

SEQ ID NO: 3799262 - RNA, 23 nt, Human
ccaucaguguacccccgcccagg

SEQ ID NO: 3799263 - RNA, 16 nt, Human
ccaucaucaugugugu

SEQ ID NO: 3799264 - RNA, 16 nt, Human
ccaucauccucuggcu

SEQ ID NO: 3799265 - RNA, 19 nt, Human
ccaucauggggggagcacc

SEQ ID NO: 3799266 - RNA, 12 nt, Human
ccaucaugucug

SEQ ID NO: 3799267 - RNA, 13 nt, Human
ccaucaugucugg

SEQ ID NO: 3799268 - RNA, 17 nt, Human
ccaucauugaaaucuuu

SEQ ID NO: 3799269 - RNA, 22 nt, Human
ccaucauugcugucugcagccu

SEQ ID NO: 3799270 - RNA, 12 nt, Human
ccaucauuucug

SEQ ID NO: 3799271 - RNA, 12 nt, Human
ccauccagaggc

SEQ ID NO: 3799272 - RNA, 13 nt, Human
ccauccagcuugc

SEQ ID NO: 3799273 - RNA, 19 nt, Human
ccauccagguucagcuugu

SEQ ID NO: 3799274 - RNA, 16 nt, Human
ccauccauuaggccag

SEQ ID NO: 3799275 - RNA, 17 nt, Human
ccauccauuaggccagc

SEQ ID NO: 3799276 - RNA, 17 nt, Human
ccaucccaaccagugcc

SEQ ID NO: 3799277 - RNA, 18 nt, Human
ccaucccaaccagugcca

SEQ ID NO: 3799278 - RNA, 21 nt, Human
ccaucccaaccagugccaagg

SEQ ID NO: 3799279 - RNA, 13 nt, Human
ccaucccaccucu

SEQ ID NO: 3799280 - RNA, 17 nt, Human
ccaucccacugcucccc

SEQ ID NO: 3799281 - RNA, 15 nt, Human
ccaucccagccccaa

SEQ ID NO: 3799282 - RNA, 14 nt, Human
ccaucccaucccau

SEQ ID NO: 3799283 - RNA, 16 nt, Human
ccaucccaucccaucc

SEQ ID NO: 3799284 - RNA, 17 nt, Human
ccaucccaucccauccc

SEQ ID NO: 3799285 - RNA, 19 nt, Human
ccauccccccucaccaggg

SEQ ID NO: 3799286 - RNA, 20 nt, Human
ccauccccccucaccagggg

SEQ ID NO: 3799287 - RNA, 12 nt, Human
ccaucccccugc

SEQ ID NO: 3799288 - RNA, 13 nt, Human
ccaucccccugcc

SEQ ID NO: 3799289 - RNA, 17 nt, Human
ccauccccuauggacca

SEQ ID NO: 3799290 - RNA, 11 nt, Human
ccauccccucc

SEQ ID NO: 3799291 - RNA, 16 nt, Human
ccauccccuguagagu

SEQ ID NO: 3799292 - RNA, 23 nt, Human
ccauccccuugaggucucagccc

SEQ ID NO: 3799293 - RNA, 15 nt, Human
ccaucccucccucca

SEQ ID NO: 3799294 - RNA, 22 nt, Human
ccaucccucgugguccccaaca

SEQ ID NO: 3799295 - RNA, 16 nt, Human
ccaucccuggcccccu

SEQ ID NO: 3799296 - RNA, 23 nt, Human
ccaucccuggcccccucccugga

SEQ ID NO: 3799297 - RNA, 16 nt, Human
ccauccgccagggccc

SEQ ID NO: 3799298 - RNA, 22 nt, Human
ccauccuaaucauccaaugcuc

SEQ ID NO: 3799299 - RNA, 15 nt, Human
ccauccuaccaaugc

SEQ ID NO: 3799300 - RNA, 19 nt, Human
ccauccuaccaaugcaugc

SEQ ID NO: 3799301 - RNA, 17 nt, Human
ccauccuacccccugug

SEQ ID NO: 3799302 - RNA, 12 nt, Human
ccauccuacccu

SEQ ID NO: 3799303 - RNA, 16 nt, Human
ccauccuacccucggg

SEQ ID NO: 3799304 - RNA, 18 nt, Human
ccauccuacccucgggcc

SEQ ID NO: 3799305 - RNA, 15 nt, Human
ccauccuccagcagg

SEQ ID NO: 3799306 - RNA, 17 nt, Human
ccauccuccagcuucug

SEQ ID NO: 3799307 - RNA, 14 nt, Human
ccauccuccccuuc

SEQ ID NO: 3799308 - RNA, 18 nt, Human
ccauccuccuccuuccua

SEQ ID NO: 3799309 - RNA, 21 nt, Human
ccauccucuguacagagccca

SEQ ID NO: 3799310 - RNA, 16 nt, Human
ccauccucuucuuuua

SEQ ID NO: 3799311 - RNA, 12 nt, Human
ccauccugacug

SEQ ID NO: 3799312 - RNA, 20 nt, Human
ccauccugaggcuccacuug

SEQ ID NO: 3799313 - RNA, 18 nt, Human
ccauccugcagccuccuc

SEQ ID NO: 3799314 - RNA, 22 nt, Human
ccauccugcagccuccuccuga

SEQ ID NO: 3799315 - RNA, 12 nt, Human
ccauccuggccc

SEQ ID NO: 3799316 - RNA, 20 nt, Human
ccauccuggcccagggcauc

SEQ ID NO: 3799317 - RNA, 17 nt, Human
ccauccuggcccaucag

SEQ ID NO: 3799318 - RNA, 16 nt, Human
ccauccugucccacca

SEQ ID NO: 3799319 - RNA, 20 nt, Human
ccauccuucccugucugcca

SEQ ID NO: 3799320 - RNA, 15 nt, Human
ccauccuucccuuug

SEQ ID NO: 3799321 - RNA, 17 nt, Human
ccaucgccagcugauga

SEQ ID NO: 3799322 - RNA, 22 nt, Human
ccaucgccgggacuccagaacc

SEQ ID NO: 3799323 - RNA, 16 nt, Human
ccaucgcuguguguua

SEQ ID NO: 3799324 - RNA, 20 nt, Human
ccaucgcuguguguuaguuc

SEQ ID NO: 3799325 - RNA, 18 nt, Human
ccaucgugaagaagccug

SEQ ID NO: 3799326 - RNA, 20 nt, Human
ccaucgugaagaagccugua

SEQ ID NO: 3799327 - RNA, 14 nt, Human
ccaucuaaacugcc

SEQ ID NO: 3799328 - RNA, 16 nt, Human
ccaucuaagcugcagc

SEQ ID NO: 3799329 - RNA, 15 nt, Human
ccaucuaccccugga

SEQ ID NO: 3799330 - RNA, 20 nt, Human
ccaucuaugucccuugcugu

SEQ ID NO: 3799331 - RNA, 22 nt, Human
ccaucuaugucccuugcuguga

SEQ ID NO: 3799332 - RNA, 15 nt, Human
ccaucucacacauga

SEQ ID NO: 3799333 - RNA, 17 nt, Human
ccaucucacacaugagc

SEQ ID NO: 3799334 - RNA, 20 nt, Human
ccaucucacacaugagcauc

SEQ ID NO: 3799335 - RNA, 21 nt, Human
ccaucucacacaugagcauca

SEQ ID NO: 3799336 - RNA, 21 nt, Human
ccaucucaccuccugcugggc

SEQ ID NO: 3799337 - RNA, 23 nt, Human
ccaucucaccuccugcugggcag

SEQ ID NO: 3799338 - RNA, 21 nt, Human
ccaucucaggccaccugcccc

SEQ ID NO: 3799339 - RNA, 18 nt, Human
ccaucucaggccagagcc

SEQ ID NO: 3799340 - RNA, 14 nt, Human
ccaucuccccucag

SEQ ID NO: 3799341 - RNA, 18 nt, Human
ccaucucccugccuggcc

SEQ ID NO: 3799342 - RNA, 13 nt, Human
ccaucucccugcu

SEQ ID NO: 3799343 - RNA, 22 nt, Human
ccaucucgcucccucccaggac

SEQ ID NO: 3799344 - RNA, 23 nt, Human
ccaucucggagcaucccggagga

SEQ ID NO: 3799345 - RNA, 23 nt, Human
ccaucucuauauaaaaacaaaaa

SEQ ID NO: 3799346 - RNA, 17 nt, Human
ccaucucucccuccccu

SEQ ID NO: 3799347 - RNA, 20 nt, Human
ccaucucucuacuccuaccu

SEQ ID NO: 3799348 - RNA, 13 nt, Human
ccaucucucuggc

SEQ ID NO: 3799349 - RNA, 18 nt, Human
ccaucucugaacuucagc

SEQ ID NO: 3799350 - RNA, 12 nt, Human
ccaucucuggau

SEQ ID NO: 3799351 - RNA, 13 nt, Human
ccaucucuuccua

SEQ ID NO: 3799352 - RNA, 19 nt, Human
ccaucugcaccccccuggg

SEQ ID NO: 3799353 - RNA, 17 nt, Human
ccaucugcaccccuucu

SEQ ID NO: 3799354 - RNA, 17 nt, Human
ccaucugcauucccagc

SEQ ID NO: 3799355 - RNA, 12 nt, Human
ccaucugcccag

SEQ ID NO: 3799356 - RNA, 19 nt, Human
ccaucugccccacagucuc

SEQ ID NO: 3799357 - RNA, 21 nt, Human
ccaucugcgggggcagugcuc

SEQ ID NO: 3799358 - RNA, 11 nt, Human
ccaucugcucc

SEQ ID NO: 3799359 - RNA, 12 nt, Human
ccaucugcuccu

SEQ ID NO: 3799360 - RNA, 15 nt, Human
ccaucugcuccugga

SEQ ID NO: 3799361 - RNA, 23 nt, Human
ccaucugcuuuuauuaaauuugu

SEQ ID NO: 3799362 - RNA, 19 nt, Human
ccaucuggagagcccagag

SEQ ID NO: 3799363 - RNA, 22 nt, Human
ccaucuggagagcccagagucc

SEQ ID NO: 3799364 - RNA, 14 nt, Human
ccaucuggcagggu

SEQ ID NO: 3799365 - RNA, 22 nt, Human
ccaucuggccuggccuggcccu

SEQ ID NO: 3799366 - RNA, 22 nt, Human
ccaucugggaguccccuuuucu

SEQ ID NO: 3799367 - RNA, 17 nt, Human
ccaucuggguccuugca

SEQ ID NO: 3799368 - RNA, 18 nt, Human
ccaucuggguccuugcac

SEQ ID NO: 3799369 - RNA, 23 nt, Human
ccaucuggguccuugcaccccuc

SEQ ID NO: 3799370 - RNA, 22 nt, Human
ccaucugguuaggauggcagga

SEQ ID NO: 3799371 - RNA, 22 nt, Human
ccaucugugggcacgcuguggg

SEQ ID NO: 3799372 - RNA, 15 nt, Human
ccaucuguguccugg

SEQ ID NO: 3799373 - RNA, 16 nt, Human
ccaucuuaaaaacaac

SEQ ID NO: 3799374 - RNA, 14 nt, Human
ccaucuucacccag

SEQ ID NO: 3799375 - RNA, 16 nt, Human
ccaucuucacccaggc

SEQ ID NO: 3799376 - RNA, 16 nt, Human
ccaucuuccagguggg

SEQ ID NO: 3799377 - RNA, 20 nt, Human
ccaucuuuacucccaagacu

SEQ ID NO: 3799378 - RNA, 20 nt, Human
ccaucuuuuuaaccucuguu

SEQ ID NO: 3799379 - RNA, 17 nt, Human
cccaguguuguuuguaa

SEQ ID NO: 3799380 - RNA, 14 nt, Human
cccaguucacccug

SEQ ID NO: 3799381 - RNA, 15 nt, Human
cccaguucugcuccu

SEQ ID NO: 3799382 - RNA, 20 nt, Human
cccaguucugcuccucucca

SEQ ID NO: 3799383 - RNA, 23 nt, Human
cccaguucugcuccucuccaggc

SEQ ID NO: 3799384 - RNA, 20 nt, Human
cccaguugcacucaggugac

SEQ ID NO: 3799385 - RNA, 15 nt, Human
cccaguuggagcucc

SEQ ID NO: 3799386 - RNA, 21 nt, Human
cccaguuggagcuccagccug

SEQ ID NO: 3799387 - RNA, 22 nt, Human
cccaguuucuaaacuggagacu

SEQ ID NO: 3799388 - RNA, 17 nt, Human
cccaguuucugccucug

SEQ ID NO: 3799389 - RNA, 19 nt, Human
cccaguuuuguugccccag

SEQ ID NO: 3799390 - RNA, 18 nt, Human
cccauaaaaauuuuuccu

SEQ ID NO: 3799391 - RNA, 14 nt, Human
cccauaacucaaug

SEQ ID NO: 3799392 - RNA, 16 nt, Human
cccauacaaauaagca

SEQ ID NO: 3799393 - RNA, 13 nt, Human
cccauacucagcc

SEQ ID NO: 3799394 - RNA, 14 nt, Human
cccauacucagccu

SEQ ID NO: 3799395 - RNA, 17 nt, Human
cccauagaaacaugaca

SEQ ID NO: 3799396 - RNA, 20 nt, Human
cccauagauacucucuucuu

SEQ ID NO: 3799397 - RNA, 16 nt, Human
cccauagaucuucuga

SEQ ID NO: 3799398 - RNA, 17 nt, Human
cccauagaucuucugaa

SEQ ID NO: 3799399 - RNA, 17 nt, Human
cccauaggcccacacac

SEQ ID NO: 3799400 - RNA, 20 nt, Human
cccauaggcccacacacagg

SEQ ID NO: 3799401 - RNA, 20 nt, Human
cccauaugcuaccaccagcu

SEQ ID NO: 3799402 - RNA, 23 nt, Human
cccauauuggcauggauuucugu

SEQ ID NO: 3799403 - RNA, 15 nt, Human
cccauauuguaaaac

SEQ ID NO: 3799404 - RNA, 14 nt, Human
cagauuuuuacaaa

SEQ ID NO: 3799405 - RNA, 22 nt, Human
cagauuuuuauauuaguugcuu

SEQ ID NO: 3799406 - RNA, 18 nt, Human
cagcaaaaaaguccaauu

SEQ ID NO: 3799407 - RNA, 14 nt, Human
cagcaaaaagcaaa

SEQ ID NO: 3799408 - RNA, 18 nt, Human
cagcaaaaauauaaaaua

SEQ ID NO: 3799409 - RNA, 20 nt, Human
cagcaaaaccauugcuucac

SEQ ID NO: 3799410 - RNA, 15 nt, Human
cagcaaacacuccac

SEQ ID NO: 3799411 - RNA, 15 nt, Human
cagcaaaccaagaga

SEQ ID NO: 3799412 - RNA, 16 nt, Human
cagcaaaccaagagau

SEQ ID NO: 3799413 - RNA, 23 nt, Human
cagcaaaccaagagauugcuaau

SEQ ID NO: 3799414 - RNA, 21 nt, Human
cagcaaaccuaauugcacaac

SEQ ID NO: 3799415 - RNA, 15 nt, Human
cagcaaagaaaaaaa

SEQ ID NO: 3799416 - RNA, 21 nt, Human
cagcaaagaggacucgcuugu

SEQ ID NO: 3799417 - RNA, 13 nt, Human
cagcaaagccccc

SEQ ID NO: 3799418 - RNA, 13 nt, Human
cagcaaaugcaaa

SEQ ID NO: 3799419 - RNA, 22 nt, Human
cagcaaauuaauuggcagcaga

SEQ ID NO: 3799420 - RNA, 23 nt, Human
cagcaaauuaauuggcagcagau

SEQ ID NO: 3799421 - RNA, 13 nt, Human
cagcaaauuuuca

SEQ ID NO: 3799422 - RNA, 14 nt, Human
cagcaacacagagc

SEQ ID NO: 3799423 - RNA, 14 nt, Human
cagcaacacagccu

SEQ ID NO: 3799424 - RNA, 18 nt, Human
cagcaacacagccugggc

SEQ ID NO: 3799425 - RNA, 14 nt, Human
cagcaaccagagca

SEQ ID NO: 3799426 - RNA, 19 nt, Human
cagcaaccagagcacugua

SEQ ID NO: 3799427 - RNA, 16 nt, Human
cagcaaccccaggcug

SEQ ID NO: 3799428 - RNA, 14 nt, Human
cagcaacccuccua

SEQ ID NO: 3799429 - RNA, 16 nt, Human
cagcaacgaucacaaa

SEQ ID NO: 3799430 - RNA, 19 nt, Human
cagcaacgaucacaaauga

SEQ ID NO: 3799431 - RNA, 18 nt, Human
cagcaacgcuuguagaac

SEQ ID NO: 3799432 - RNA, 20 nt, Human
cagcaacggcacagcuaauu

SEQ ID NO: 3799433 - RNA, 14 nt, Human
cagcaacuccaacu

SEQ ID NO: 3799434 - RNA, 23 nt, Human
cagcaacuuguccuagcacagau

SEQ ID NO: 3799435 - RNA, 13 nt, Human
cagcaagaaaaaa

SEQ ID NO: 3799436 - RNA, 17 nt, Human
cagcaagaaaaaaaaau

SEQ ID NO: 3799437 - RNA, 22 nt, Human
cagcaagaagauccuaaaacaa

SEQ ID NO: 3799438 - RNA, 14 nt, Human
cagcaagaauaaaa

SEQ ID NO: 3799439 - RNA, 23 nt, Human
cagcaagacuucucuuugccuca

SEQ ID NO: 3799440 - RNA, 21 nt, Human
cagcaagcccuacagagcugu

SEQ ID NO: 3799441 - RNA, 20 nt, Human
cagcaagccgaauagcugau

SEQ ID NO: 3799442 - RNA, 17 nt, Human
cagcaaggagauuuaca

SEQ ID NO: 3799443 - RNA, 18 nt, Human
cagcaaggaggcuggcug

SEQ ID NO: 3799444 - RNA, 19 nt, Human
cagcaaggaggcuggcugg

SEQ ID NO: 3799445 - RNA, 16 nt, Human
cagcaaggcaccugca

SEQ ID NO: 3799446 - RNA, 20 nt, Human
cagcaaggccaccucuuccu

SEQ ID NO: 3799447 - RNA, 15 nt, Human
cagcaaggcccgagc

SEQ ID NO: 3799448 - RNA, 20 nt, Human
cagcaaggcccgagcagcug

SEQ ID NO: 3799449 - RNA, 22 nt, Human
cagcaaggcccgagcagcugag

SEQ ID NO: 3799450 - RNA, 19 nt, Human
cagcaaggcccugcugccc

SEQ ID NO: 3799451 - RNA, 18 nt, Human
cagcaaggcgcuaacuug

SEQ ID NO: 3799452 - RNA, 17 nt, Human
cagcaaggggcucugcc

SEQ ID NO: 3799453 - RNA, 22 nt, Human
cagcaagggugaugggaaagca

SEQ ID NO: 3799454 - RNA, 14 nt, Human
cagcaagguggagu

SEQ ID NO: 3799455 - RNA, 16 nt, Human
cagcaagugagagcug

SEQ ID NO: 3799456 - RNA, 21 nt, Human
cagcaagugagagcugggugu

SEQ ID NO: 3799457 - RNA, 14 nt, Human
cagcaagugguccu

SEQ ID NO: 3799458 - RNA, 23 nt, Human
cagcaaguuagaacuagccaaac

SEQ ID NO: 3799459 - RNA, 17 nt, Human
cagcaaguucacaugga

SEQ ID NO: 3799460 - RNA, 18 nt, Human
cagcaaugacaucucagg

SEQ ID NO: 3799461 - RNA, 20 nt, Human
cagcaaugacaucucagggg

SEQ ID NO: 3799462 - RNA, 21 nt, Human
cagcaaugacaucucaggggc

SEQ ID NO: 3799463 - RNA, 20 nt, Human
cagcaaugauguccagaaga

SEQ ID NO: 3799464 - RNA, 16 nt, Human
cagcaauuaugaaaau

SEQ ID NO: 3799465 - RNA, 13 nt, Human
cagcacaaggcca

SEQ ID NO: 3799466 - RNA, 13 nt, Human
cagcacacagggc

SEQ ID NO: 3799467 - RNA, 15 nt, Human
cagcacacagggcag

SEQ ID NO: 3799468 - RNA, 18 nt, Human
cagcacacagggcaguga

SEQ ID NO: 3799469 - RNA, 14 nt, Human
cagcacagagaaga

SEQ ID NO: 3799470 - RNA, 16 nt, Human
cagcacagagaccccc

SEQ ID NO: 3799471 - RNA, 12 nt, Human
cagcacagagag

SEQ ID NO: 3799472 - RNA, 17 nt, Human
cagcacagagagggggc

SEQ ID NO: 3799473 - RNA, 13 nt, Human
cagcacagcaagg

SEQ ID NO: 3799474 - RNA, 21 nt, Human
cagcacagcaaggaggcuggc

SEQ ID NO: 3799475 - RNA, 16 nt, Human
cagcacagcucccugc

SEQ ID NO: 3799476 - RNA, 24 nt, Human
cagcacauaggguucccacgaagc

SEQ ID NO: 3799477 - RNA, 18 nt, Human
cagcacaugcuggccagc

SEQ ID NO: 3799478 - RNA, 15 nt, Human
cagcaccaaaucaaa

SEQ ID NO: 3799479 - RNA, 15 nt, Human
cagcaccaccagguc

SEQ ID NO: 3799480 - RNA, 13 nt, Human
cagcaccacccua

SEQ ID NO: 3799481 - RNA, 21 nt, Human
cagcaccacucaagaccaaau

SEQ ID NO: 3799482 - RNA, 22 nt, Human
cagcaccacucaagaccaaaug

SEQ ID NO: 3799483 - RNA, 17 nt, Human
cagcaccaucucuccuc

SEQ ID NO: 3799484 - RNA, 19 nt, Human
cagcaccaucucuccuccu

SEQ ID NO: 3799485 - RNA, 14 nt, Human
cagcacccccacgc

SEQ ID NO: 3799486 - RNA, 15 nt, Human
cagcaccccuuccau

SEQ ID NO: 3799487 - RNA, 23 nt, Human
cagcaccccuuccauguggagaa

SEQ ID NO: 3799488 - RNA, 16 nt, Human
cagcacccuauaaauc

SEQ ID NO: 3799489 - RNA, 17 nt, Human
cagcaccgaggggccuu

SEQ ID NO: 3799490 - RNA, 15 nt, Human
cagcaccgccucuuc

SEQ ID NO: 3799491 - RNA, 18 nt, Human
cagcaccggaccagccug

SEQ ID NO: 3799492 - RNA, 12 nt, Human
cagcaccuccuc

SEQ ID NO: 3799493 - RNA, 15 nt, Human
cagcaccugccuccu

SEQ ID NO: 3799494 - RNA, 20 nt, Human
cagcaccuguaagaaacaga

SEQ ID NO: 3799495 - RNA, 18 nt, Human
cagcaccuugugccuggg

SEQ ID NO: 3799496 - RNA, 18 nt, Human
cagcacgauuucuguuua

SEQ ID NO: 3799497 - RNA, 19 nt, Human
cagcacgauuucuguuuag

SEQ ID NO: 3799498 - RNA, 13 nt, Human
cagcacgggggcc

SEQ ID NO: 3799499 - RNA, 16 nt, Human
cagcacguguggccug

SEQ ID NO: 3799500 - RNA, 17 nt, Human
cagcacuagccaaaccu

SEQ ID NO: 3799501 - RNA, 11 nt, Human
cagcacugaaa

SEQ ID NO: 3799502 - RNA, 12 nt, Human
cagcacugagga

SEQ ID NO: 3799503 - RNA, 13 nt, Human
cagcacugaggaa

SEQ ID NO: 3799504 - RNA, 15 nt, Human
cagcacugccugcuc

SEQ ID NO: 3799505 - RNA, 14 nt, Human
cagcacuggcucuc

SEQ ID NO: 3799506 - RNA, 18 nt, Human
cagcacuggcucucucca

SEQ ID NO: 3799507 - RNA, 21 nt, Human
cagcacuggcucucuccagga

SEQ ID NO: 3799508 - RNA, 14 nt, Human
cagcacugucccuu

SEQ ID NO: 3799509 - RNA, 23 nt, Human
cagcacugucucaguuucacuuu

SEQ ID NO: 3799510 - RNA, 12 nt, Human
cagcacuuccau

SEQ ID NO: 3799511 - RNA, 13 nt, Human
cagcacuuccaug

SEQ ID NO: 3799512 - RNA, 23 nt, Human
cagcacuuggggguucaggcccg

SEQ ID NO: 3799513 - RNA, 18 nt, Human
cagcacuuguccagcuga

SEQ ID NO: 3799514 - RNA, 14 nt, Human
cagcacuuuagaau

SEQ ID NO: 3799515 - RNA, 15 nt, Human
cagcacuuugggagg

SEQ ID NO: 3799516 - RNA, 18 nt, Human
cagcacuuugggaggcca

SEQ ID NO: 3799517 - RNA, 23 nt, Human
cagcacuuugggaggccaaggag

SEQ ID NO: 3799518 - RNA, 18 nt, Human
cagcacuuugggaggccu

SEQ ID NO: 3799519 - RNA, 22 nt, Human
cagcacuuugggaggccuaggc

SEQ ID NO: 3799520 - RNA, 17 nt, Human
cagcacuuugggaggcu

SEQ ID NO: 3799521 - RNA, 22 nt, Human
cagcagaaaacuugugugaaau

SEQ ID NO: 3799522 - RNA, 17 nt, Human
cagcagaaaugccuuac

SEQ ID NO: 3799523 - RNA, 19 nt, Human
cagcagaaaugccuuaccc

SEQ ID NO: 3799524 - RNA, 18 nt, Human
aaaguggccucuuugucu

SEQ ID NO: 3799525 - RNA, 21 nt, Human
aaagugggaggucaggaaacu

SEQ ID NO: 3799526 - RNA, 12 nt, Human
aaaguggugaga

SEQ ID NO: 3799527 - RNA, 19 nt, Human
aaaguggugcucaguugua

SEQ ID NO: 3799528 - RNA, 22 nt, Human
aaaguggugcucaguuguagaa

SEQ ID NO: 3799529 - RNA, 14 nt, Human
aaagugguuguuag

SEQ ID NO: 3799530 - RNA, 16 nt, Human
aaaguguaaagcauuc

SEQ ID NO: 3799531 - RNA, 15 nt, Human
aaaguguauuuggaa

SEQ ID NO: 3799532 - RNA, 16 nt, Human
aaaguguccauugaca

SEQ ID NO: 3799533 - RNA, 23 nt, Human
aaaguguccauugacauguacag

SEQ ID NO: 3799534 - RNA, 13 nt, Human
aaagugugcuuua

SEQ ID NO: 3799535 - RNA, 22 nt, Human
aaagugugcuuuaugcugaaac

SEQ ID NO: 3799536 - RNA, 23 nt, Human
aaagugugcuuuaugcugaaaca

SEQ ID NO: 3799537 - RNA, 19 nt, Human
aaaguguguauauauuuug

SEQ ID NO: 3799538 - RNA, 20 nt, Human
aaaguguguauauauuuugu

SEQ ID NO: 3799539 - RNA, 15 nt, Human
aaaguguguauuaaa

SEQ ID NO: 3799540 - RNA, 17 nt, Human
aaaguguguuguugcuu

SEQ ID NO: 3799541 - RNA, 11 nt, Human
aaaguguuacu

SEQ ID NO: 3799542 - RNA, 16 nt, Human
aaaguguucuguuaca

SEQ ID NO: 3799543 - RNA, 18 nt, Human
aaaguguucuguuacaaa

SEQ ID NO: 3799544 - RNA, 19 nt, Human
aaaguguucuguuacaaaa

SEQ ID NO: 3799545 - RNA, 20 nt, Human
aaaguguucuguuacaaaau

SEQ ID NO: 3799546 - RNA, 21 nt, Human
aaaguguuuauuuuucauauu

SEQ ID NO: 3799547 - RNA, 21 nt, Human
aaaguguuuucucugaacaca

SEQ ID NO: 3799548 - RNA, 23 nt, Human
aaaguguuuucucugaacacauu

SEQ ID NO: 3799549 - RNA, 20 nt, Human
aaaguguuuuguaccaguga

SEQ ID NO: 3799550 - RNA, 22 nt, Human
aaaguuaaaaaaaauaauaaau

SEQ ID NO: 3799551 - RNA, 12 nt, Human
aaaguuaaaagu

SEQ ID NO: 3799552 - RNA, 22 nt, Human
aaaguuaacaggcaaacauuuu

SEQ ID NO: 3799553 - RNA, 16 nt, Human
aaaguuaaucuucaug

SEQ ID NO: 3799554 - RNA, 17 nt, Human
aaaguuacagaaauacu

SEQ ID NO: 3799555 - RNA, 20 nt, Human
aaaguuagaaucuauuuucu

SEQ ID NO: 3799556 - RNA, 18 nt, Human
aaaguuaguaucuuuuga

SEQ ID NO: 3799557 - RNA, 21 nt, Human
aaaguuaguaucuuuugauau

SEQ ID NO: 3799558 - RNA, 23 nt, Human
aaaguuagucuacucuuaagcca

SEQ ID NO: 3799559 - RNA, 22 nt, Human
ccaugagaauaagagaaagaaa

SEQ ID NO: 3799560 - RNA, 22 nt, Human
ccaugagaauguuuuagcacag

SEQ ID NO: 3799561 - RNA, 13 nt, Human
ccaugagccucag

SEQ ID NO: 3799562 - RNA, 18 nt, Human
ccaugagccucagcaucc

SEQ ID NO: 3799563 - RNA, 19 nt, Human
ccaugagccucagcauccu

SEQ ID NO: 3799564 - RNA, 15 nt, Human
ccaugagcuccagac

SEQ ID NO: 3799565 - RNA, 19 nt, Human
ccaugagcuccagaccccc

SEQ ID NO: 3799566 - RNA, 21 nt, Human
ccaugagcuccuuaaggcucu

SEQ ID NO: 3799567 - RNA, 22 nt, Human
ccaugaggagaaaaaaagcaug

SEQ ID NO: 3799568 - RNA, 15 nt, Human
ccaugaggccucagu

SEQ ID NO: 3799569 - RNA, 18 nt, Human
ccaugagggagaugccau

SEQ ID NO: 3799570 - RNA, 15 nt, Human
ccaugaguccccugu

SEQ ID NO: 3799571 - RNA, 18 nt, Human
ccaugaguccccuguuug

SEQ ID NO: 3799572 - RNA, 21 nt, Human
ccaugaguuggggucuggcag

SEQ ID NO: 3799573 - RNA, 16 nt, Human
ccaugaucccuguguu

SEQ ID NO: 3799574 - RNA, 19 nt, Human
ccaugauggcaacagaucu

SEQ ID NO: 3799575 - RNA, 18 nt, Human
ccaugauguagugccucu

SEQ ID NO: 3799576 - RNA, 15 nt, Human
ccaugauguggagug

SEQ ID NO: 3799577 - RNA, 14 nt, Human
ccaugauucgccca

SEQ ID NO: 3799578 - RNA, 23 nt, Human
ccaugauucuauuuauauguaca

SEQ ID NO: 3799579 - RNA, 22 nt, Human
ccaugauuucauguacugcauu

SEQ ID NO: 3799580 - RNA, 22 nt, Human
ccaugcaagaacucaucacugu

SEQ ID NO: 3799581 - RNA, 15 nt, Human
ccaugcaagcagagg

SEQ ID NO: 3799582 - RNA, 17 nt, Human
ccaugcaagcagaggac

SEQ ID NO: 3799583 - RNA, 23 nt, Human
ccaugcaagcagaggaccagggc

SEQ ID NO: 3799584 - RNA, 18 nt, Human
ccaugcaauauuuccuca

SEQ ID NO: 3799585 - RNA, 21 nt, Human
ccaugcacccucauacacaga

SEQ ID NO: 3799586 - RNA, 13 nt, Human
ccaugcacuguga

SEQ ID NO: 3799587 - RNA, 21 nt, Human
ccaugcacugugaaggacccu

SEQ ID NO: 3799588 - RNA, 11 nt, Human
ccaugcagaaa

SEQ ID NO: 3799589 - RNA, 18 nt, Human
ccaugcaugacagccucu

SEQ ID NO: 3799590 - RNA, 20 nt, Human
ccaugcauuucauaaacuaa

SEQ ID NO: 3799591 - RNA, 21 nt, Human
ccaugccacguuccacaguug

SEQ ID NO: 3799592 - RNA, 14 nt, Human
ccaugccagcuggc

SEQ ID NO: 3799593 - RNA, 16 nt, Human
ccaugcccaccugccc

SEQ ID NO: 3799594 - RNA, 17 nt, Human
ccaugcccaccugccca

SEQ ID NO: 3799595 - RNA, 18 nt, Human
ccaugcccagcucagagg

SEQ ID NO: 3799596 - RNA, 21 nt, Human
ccaugcccggcuaauuuuugu

SEQ ID NO: 3799597 - RNA, 21 nt, Human
ccaugccucagcccugacccu

SEQ ID NO: 3799598 - RNA, 13 nt, Human
ccaugccugaggg

SEQ ID NO: 3799599 - RNA, 17 nt, Human
ccaugccugagggugga

SEQ ID NO: 3799600 - RNA, 18 nt, Human
ccaugccugaggguggag

SEQ ID NO: 3799601 - RNA, 22 nt, Human
ccaugccugccccccucaucuc

SEQ ID NO: 3799602 - RNA, 14 nt, Human
ccaugccuguccag

SEQ ID NO: 3799603 - RNA, 13 nt, Human
ccaugccuguggc

SEQ ID NO: 3799604 - RNA, 14 nt, Human
ccaugccuguggcu

SEQ ID NO: 3799605 - RNA, 16 nt, Human
ccaugccuguggcugc

SEQ ID NO: 3799606 - RNA, 16 nt, Human
ccaugccuuaaaccua

SEQ ID NO: 3799607 - RNA, 13 nt, Human
ccaugcgcucagg

SEQ ID NO: 3799608 - RNA, 18 nt, Human
ccaugcucaucugcuggu

SEQ ID NO: 3799609 - RNA, 16 nt, Human
ccaugcuccucacugc

SEQ ID NO: 3799610 - RNA, 15 nt, Human
ccaugcuccucuucc

SEQ ID NO: 3799611 - RNA, 18 nt, Human
ccaugcuccucuucccca

SEQ ID NO: 3799612 - RNA, 20 nt, Human
ccaugcuccucuuccccaga

SEQ ID NO: 3799613 - RNA, 15 nt, Human
ccaugcuccuggccc

SEQ ID NO: 3799614 - RNA, 14 nt, Human
ccaugcugcccugu

SEQ ID NO: 3799615 - RNA, 16 nt, Human
ccaugcugcccuguga

SEQ ID NO: 3799616 - RNA, 20 nt, Human
ccaugcugcuggggaagaca

SEQ ID NO: 3799617 - RNA, 22 nt, Human
ccaugcugcuggggaagacagu

SEQ ID NO: 3799618 - RNA, 23 nt, Human
ccaugcugcuggggaagacagug

SEQ ID NO: 3799619 - RNA, 12 nt, Human
ccaugcuggagc

SEQ ID NO: 3799620 - RNA, 13 nt, Human
ccaugcuggagcc

SEQ ID NO: 3799621 - RNA, 15 nt, Human
ccaugcuggagccug

SEQ ID NO: 3799622 - RNA, 17 nt, Human
ccaugcuggagccugug

SEQ ID NO: 3799623 - RNA, 19 nt, Human
ccaugcuggagccugugua

SEQ ID NO: 3799624 - RNA, 18 nt, Human
ccaugcugucuggcacag

SEQ ID NO: 3799625 - RNA, 21 nt, Human
ccaugcugucuggcacagccu

SEQ ID NO: 3799626 - RNA, 21 nt, Human
ccaugcuguugauugcuaaau

SEQ ID NO: 3799627 - RNA, 22 nt, Human
ccaugcuguugauugcuaaaug

SEQ ID NO: 3799628 - RNA, 24 nt, Human
ccaugcuguugauugcuaaaugua

SEQ ID NO: 3799629 - RNA, 17 nt, Human
ccaugcuuagucacugc

SEQ ID NO: 3799630 - RNA, 21 nt, Human
ccaugcuuagucacugccugc

SEQ ID NO: 3799631 - RNA, 22 nt, Human
ccaugcuuagucacugccugca

SEQ ID NO: 3799632 - RNA, 22 nt, Human
ccaugcuucucaucuugugaaa

SEQ ID NO: 3799633 - RNA, 17 nt, Human
ccauggaacuguuuccu

SEQ ID NO: 3799634 - RNA, 21 nt, Human
ccauggaagaggcuacagggc

SEQ ID NO: 3799635 - RNA, 23 nt, Human
ccauggaagaggcuacagggcca

SEQ ID NO: 3799636 - RNA, 14 nt, Human
ccauggaaugcuug

SEQ ID NO: 3799637 - RNA, 15 nt, Human
ccauggaaugcuuga

SEQ ID NO: 3799638 - RNA, 15 nt, Human
ccauggacaggcugg

SEQ ID NO: 3799639 - RNA, 19 nt, Human
ccauggacaggcuggcucc

SEQ ID NO: 3799640 - RNA, 21 nt, Human
ccauggacucuguccugaagg

SEQ ID NO: 3799641 - RNA, 13 nt, Human
ccauggacuuugu

SEQ ID NO: 3799642 - RNA, 15 nt, Human
ccauggagaaagcug

SEQ ID NO: 3799643 - RNA, 18 nt, Human
ccauggagagcuggagcc

SEQ ID NO: 3799644 - RNA, 14 nt, Human
ccauggagccagcu

SEQ ID NO: 3799645 - RNA, 13 nt, Human
ccauggagcccca

SEQ ID NO: 3799646 - RNA, 15 nt, Human
ccauggagccccagc

SEQ ID NO: 3799647 - RNA, 13 nt, Human
ccauggaggcaca

SEQ ID NO: 3799648 - RNA, 20 nt, Human
ccauggaggcacacagcugc

SEQ ID NO: 3799649 - RNA, 18 nt, Human
ccauggagggggcuugca

SEQ ID NO: 3799650 - RNA, 22 nt, Human
ccauggaguggcagcccagcca

SEQ ID NO: 3799651 - RNA, 13 nt, Human
ccauggccagcag

SEQ ID NO: 3799652 - RNA, 20 nt, Human
ccauggccagcagcaccugc

SEQ ID NO: 3799653 - RNA, 21 nt, Human
ccauggccagcagcaccugcc

SEQ ID NO: 3799654 - RNA, 14 nt, Human
ccauggcccugugc

SEQ ID NO: 3799655 - RNA, 21 nt, Human
ccauggccggcuuucaggagc

SEQ ID NO: 3799656 - RNA, 22 nt, Human
ccauggccggcuuucaggagcu

SEQ ID NO: 3799657 - RNA, 21 nt, Human
ccauggcgugucccucucgga

SEQ ID NO: 3799658 - RNA, 20 nt, Human
ccauggcuuccaaggugguc

SEQ ID NO: 3799659 - RNA, 15 nt, Human
ccaugggaccaaacc

SEQ ID NO: 3799660 - RNA, 21 nt, Human
ccaugggaccaaaccuagccc

SEQ ID NO: 3799661 - RNA, 15 nt, Human
ccaugggaccacaac

SEQ ID NO: 3799662 - RNA, 19 nt, Human
ccaugggaggccuuucccu

SEQ ID NO: 3799663 - RNA, 13 nt, Human
ccaugggauaaau

SEQ ID NO: 3799664 - RNA, 17 nt, Human
ccaugggauaaaugcca

SEQ ID NO: 3799665 - RNA, 16 nt, Human
ccaugggcacugcugg

SEQ ID NO: 3799666 - RNA, 14 nt, Human
ccaugggcagagcc

SEQ ID NO: 3799667 - RNA, 14 nt, Human
ccccucuuccucuu

SEQ ID NO: 3799668 - RNA, 18 nt, Human
ccccucuugccccaaccc

SEQ ID NO: 3799669 - RNA, 23 nt, Human
ccccucuuggagaagucucagcu

SEQ ID NO: 3799670 - RNA, 14 nt, Human
ccccucuuucucuu

SEQ ID NO: 3799671 - RNA, 18 nt, Human
ccccucuuucucuuucuu

SEQ ID NO: 3799672 - RNA, 16 nt, Human
ccccugaaacuuauuu

SEQ ID NO: 3799673 - RNA, 17 nt, Human
ccccugaaacuuauuuu

SEQ ID NO: 3799674 - RNA, 17 nt, Human
ccccugaauuuaaauag

SEQ ID NO: 3799675 - RNA, 20 nt, Human
ccccugaccugugagcccag

SEQ ID NO: 3799676 - RNA, 21 nt, Human
ccccugagacaaauggaggcc

SEQ ID NO: 3799677 - RNA, 18 nt, Human
ccccugagcaaugucugu

SEQ ID NO: 3799678 - RNA, 12 nt, Human
ccccugagccca

SEQ ID NO: 3799679 - RNA, 13 nt, Human
ccccugagcccca

SEQ ID NO: 3799680 - RNA, 16 nt, Human
ccccugcaaagcccag

SEQ ID NO: 3799681 - RNA, 21 nt, Human
ccccugcaaagcccagcuuga

SEQ ID NO: 3799682 - RNA, 13 nt, Human
ccccugcacucca

SEQ ID NO: 3799683 - RNA, 18 nt, Human
ccccugcacuccagccug

SEQ ID NO: 3799684 - RNA, 11 nt, Human
ccccugcacug

SEQ ID NO: 3799685 - RNA, 18 nt, Human
ccccugcacuguaaaaug

SEQ ID NO: 3799686 - RNA, 13 nt, Human
ccccugcagcccu

SEQ ID NO: 3799687 - RNA, 23 nt, Human
ccccugcagcuuguagccagccg

SEQ ID NO: 3799688 - RNA, 14 nt, Human
ccccugcaggaagg

SEQ ID NO: 3799689 - RNA, 15 nt, Human
ccccugcaggaagga

SEQ ID NO: 3799690 - RNA, 21 nt, Human
ccccugcaggaaggagcugcc

SEQ ID NO: 3799691 - RNA, 20 nt, Human
ccccugcaguuccccuggaa

SEQ ID NO: 3799692 - RNA, 12 nt, Human
ccccugccacca

SEQ ID NO: 3799693 - RNA, 16 nt, Human
ccccugccagugccuu

SEQ ID NO: 3799694 - RNA, 17 nt, Human
ccccugccagugccuua

SEQ ID NO: 3799695 - RNA, 14 nt, Human
ccccugcccaucug

SEQ ID NO: 3799696 - RNA, 12 nt, Human
ccccugccccca

SEQ ID NO: 3799697 - RNA, 16 nt, Human
ccccugcccccaggac

SEQ ID NO: 3799698 - RNA, 17 nt, Human
ccccugcccccaggacu

SEQ ID NO: 3799699 - RNA, 16 nt, Human
ccccugcccccugcag

SEQ ID NO: 3799700 - RNA, 14 nt, Human
ccccugccccguca

SEQ ID NO: 3799701 - RNA, 15 nt, Human
ccccugccccgucac

SEQ ID NO: 3799702 - RNA, 22 nt, Human
ccccugccccgucaccaucuca

SEQ ID NO: 3799703 - RNA, 17 nt, Human
ccccugcccggcugcgg

SEQ ID NO: 3799704 - RNA, 23 nt, Human
ccccugcccuccccucucugcac

SEQ ID NO: 3799705 - RNA, 13 nt, Human
ccccugcccucgu

SEQ ID NO: 3799706 - RNA, 23 nt, Human
ccccugcccucguggccagcccg

SEQ ID NO: 3799707 - RNA, 13 nt, Human
ccccugcccugca

SEQ ID NO: 3799708 - RNA, 14 nt, Human
ccccugcccugcac

SEQ ID NO: 3799709 - RNA, 15 nt, Human
ccccugccuccaucc

SEQ ID NO: 3799710 - RNA, 16 nt, Human
ccccugccucucugca

SEQ ID NO: 3799711 - RNA, 17 nt, Human
ccccugccucucugcag

SEQ ID NO: 3799712 - RNA, 12 nt, Human
ccccugccugcc

SEQ ID NO: 3799713 - RNA, 13 nt, Human
ccccugccugcca

SEQ ID NO: 3799714 - RNA, 14 nt, Human
ccccugccugccau

SEQ ID NO: 3799715 - RNA, 15 nt, Human
ccccugccugcccug

SEQ ID NO: 3799716 - RNA, 19 nt, Human
ccccugccuuugggagcag

SEQ ID NO: 3799717 - RNA, 20 nt, Human
ccccugcugcugucaccucu

SEQ ID NO: 3799718 - RNA, 21 nt, Human
ccccugcugcugucaccucuc

SEQ ID NO: 3799719 - RNA, 14 nt, Human
ccccugcuggcucu

SEQ ID NO: 3799720 - RNA, 22 nt, Human
ccccugcuggcucuucugccca

SEQ ID NO: 3799721 - RNA, 23 nt, Human
ccccugcuucagauguggagcca

SEQ ID NO: 3799722 - RNA, 20 nt, Human
ccccuggaagcagugcccag

SEQ ID NO: 3799723 - RNA, 16 nt, Human
ccccuggaccccagcc

SEQ ID NO: 3799724 - RNA, 18 nt, Human
ccccuggaccccagccuc

SEQ ID NO: 3799725 - RNA, 19 nt, Human
ccccuggaccccagccuca

SEQ ID NO: 3799726 - RNA, 15 nt, Human
ccccuggagagaagu

SEQ ID NO: 3799727 - RNA, 11 nt, Human
ccccuggagcc

SEQ ID NO: 3799728 - RNA, 15 nt, Human
ccccuggagggggaa

SEQ ID NO: 3799729 - RNA, 18 nt, Human
ccccuggaugcagccuca

SEQ ID NO: 3799730 - RNA, 19 nt, Human
ccccuggaugcagccucac

SEQ ID NO: 3799731 - RNA, 16 nt, Human
ccccuggcacuggcaa

SEQ ID NO: 3799732 - RNA, 12 nt, Human
ccccuggcagcc

SEQ ID NO: 3799733 - RNA, 14 nt, Human
ccccuggcagcccc

SEQ ID NO: 3799734 - RNA, 15 nt, Human
ccccuggcccagcgg

SEQ ID NO: 3799735 - RNA, 23 nt, Human
ccccuggccgcgcuccgggcuuu

SEQ ID NO: 3799736 - RNA, 19 nt, Human
ccccuggccuccggcguca

SEQ ID NO: 3799737 - RNA, 15 nt, Human
ccccuggccuuggga

SEQ ID NO: 3799738 - RNA, 23 nt, Human
ccccuggcugggacguggcucag

SEQ ID NO: 3799739 - RNA, 17 nt, Human
ccccuggcuguuuggac

SEQ ID NO: 3799740 - RNA, 20 nt, Human
ccccuggcuuuucacugcug

SEQ ID NO: 3799741 - RNA, 22 nt, Human
ccccuggcuuuucacugcuggc

SEQ ID NO: 3799742 - RNA, 18 nt, Human
ccccugggcuuggccugc

SEQ ID NO: 3799743 - RNA, 19 nt, Human
ccccugggcuuggccugcu

SEQ ID NO: 3799744 - RNA, 21 nt, Human
ccccugggcuuggccugcugu

SEQ ID NO: 3799745 - RNA, 15 nt, Human
ccccuggggccuaga

SEQ ID NO: 3799746 - RNA, 23 nt, Human
ccccuggggccuagacucuguaa

SEQ ID NO: 3799747 - RNA, 16 nt, Human
ccccuggggugcaggc

SEQ ID NO: 3799748 - RNA, 20 nt, Human
ccccugggguggccaccagu

SEQ ID NO: 3799749 - RNA, 21 nt, Human
ccccugggucagucugguggg

SEQ ID NO: 3799750 - RNA, 17 nt, Human
ccccugguccccuccuu

SEQ ID NO: 3799751 - RNA, 18 nt, Human
ccccuggucccucugcag

SEQ ID NO: 3799752 - RNA, 15 nt, Human
ccccuggucuuugag

SEQ ID NO: 3799753 - RNA, 23 nt, Human
ccccuggugcacuggccccaccc

SEQ ID NO: 3799754 - RNA, 12 nt, Human
ccccuggugguu

SEQ ID NO: 3799755 - RNA, 18 nt, Human
ccccugucccaugcaggc

SEQ ID NO: 3799756 - RNA, 22 nt, Human
ccccuguccccgcacugggcuu

SEQ ID NO: 3799757 - RNA, 14 nt, Human
cccaccucccugcc

SEQ ID NO: 3799758 - RNA, 17 nt, Human
cccaccucggucacucc

SEQ ID NO: 3799759 - RNA, 19 nt, Human
cccaccucucucacuccuu

SEQ ID NO: 3799760 - RNA, 17 nt, Human
cccaccucugugaccuc

SEQ ID NO: 3799761 - RNA, 18 nt, Human
cccaccucugugaccuca

SEQ ID NO: 3799762 - RNA, 21 nt, Human
cccaccucugugaccucaggc

SEQ ID NO: 3799763 - RNA, 17 nt, Human
cccaccugagcuuugga

SEQ ID NO: 3799764 - RNA, 19 nt, Human
cccaccugcaucuggggcc

SEQ ID NO: 3799765 - RNA, 21 nt, Human
cccaccugccacuaggcuggg

SEQ ID NO: 3799766 - RNA, 13 nt, Human
cccaccugcccau

SEQ ID NO: 3799767 - RNA, 13 nt, Human
cccaccugccugg

SEQ ID NO: 3799768 - RNA, 12 nt, Human
cccaccugcuga

SEQ ID NO: 3799769 - RNA, 15 nt, Human
cccaccuggccucug

SEQ ID NO: 3799770 - RNA, 17 nt, Human
cccaccuggccucugca

SEQ ID NO: 3799771 - RNA, 19 nt, Human
cccaccuggccucugcacu

SEQ ID NO: 3799772 - RNA, 21 nt, Human
cccaccuucaauuccugggcc

SEQ ID NO: 3799773 - RNA, 22 nt, Human
cccaccuucaauuccugggccc

SEQ ID NO: 3799774 - RNA, 12 nt, Human
cccaccuuggcu

SEQ ID NO: 3799775 - RNA, 22 nt, Human
cccaccuuggcucaaguccucu

SEQ ID NO: 3799776 - RNA, 21 nt, Human
cccaccuuuauuaaaaucuua

SEQ ID NO: 3799777 - RNA, 20 nt, Human
cccacgaaacugcccuggcu

SEQ ID NO: 3799778 - RNA, 16 nt, Human
cccacgacacugcagc

SEQ ID NO: 3799779 - RNA, 13 nt, Human
cccacgagggcug

SEQ ID NO: 3799780 - RNA, 16 nt, Human
cccacgagggucagga

SEQ ID NO: 3799781 - RNA, 17 nt, Human
cccacgagggugccgug

SEQ ID NO: 3799782 - RNA, 20 nt, Human
cccacgauuuucuccagcuc

SEQ ID NO: 3799783 - RNA, 13 nt, Human
cccacgccacagc

SEQ ID NO: 3799784 - RNA, 16 nt, Human
cccacgccacagcccu

SEQ ID NO: 3799785 - RNA, 17 nt, Human
cccacgcccccacuggu

SEQ ID NO: 3799786 - RNA, 14 nt, Human
cccacgccuuaucc

SEQ ID NO: 3799787 - RNA, 16 nt, Human
cccacgcucacccccu

SEQ ID NO: 3799788 - RNA, 16 nt, Human
cccacgcugacuacag

SEQ ID NO: 3799789 - RNA, 20 nt, Human
cccacgcugacuacagggcc

SEQ ID NO: 3799790 - RNA, 20 nt, Human
cccacgcuggagugcaguga

SEQ ID NO: 3799791 - RNA, 17 nt, Human
cccacggccgcuccagg

SEQ ID NO: 3799792 - RNA, 15 nt, Human
cccacggccuuucua

SEQ ID NO: 3799793 - RNA, 15 nt, Human
cccacggcuccucga

SEQ ID NO: 3799794 - RNA, 19 nt, Human
cccacggggccucgggacc

SEQ ID NO: 3799795 - RNA, 15 nt, Human
cccacguccugucag

SEQ ID NO: 3799796 - RNA, 18 nt, Human
cccacgugucuuccacuu

SEQ ID NO: 3799797 - RNA, 17 nt, Human
cccacguucucucugcc

SEQ ID NO: 3799798 - RNA, 23 nt, Human
cccacguucucucugccugugag

SEQ ID NO: 3799799 - RNA, 13 nt, Human
cccacguucuuuc

SEQ ID NO: 3799800 - RNA, 17 nt, Human
cccacuaaugcaaacug

SEQ ID NO: 3799801 - RNA, 18 nt, Human
cccacuacugcagcaccu

SEQ ID NO: 3799802 - RNA, 15 nt, Human
cccacuagcucuugu

SEQ ID NO: 3799803 - RNA, 22 nt, Human
cccacuagcucuuguugagccg

SEQ ID NO: 3799804 - RNA, 18 nt, Human
cccacuauccuucgugaa

SEQ ID NO: 3799805 - RNA, 17 nt, Human
cccacucaagccaagca

SEQ ID NO: 3799806 - RNA, 20 nt, Human
cccacucaagccaagcagcc

SEQ ID NO: 3799807 - RNA, 18 nt, Human
cccacucagcuccgugaa

SEQ ID NO: 3799808 - RNA, 18 nt, Human
cccacuccaagccagcaa

SEQ ID NO: 3799809 - RNA, 13 nt, Human
cccacucccugca

SEQ ID NO: 3799810 - RNA, 20 nt, Human
cccacucccuggcucucaga

SEQ ID NO: 3799811 - RNA, 19 nt, Human
cccacucccuugcuggccc

SEQ ID NO: 3799812 - RNA, 21 nt, Human
ccccuuuauguacaggaugcu

SEQ ID NO: 3799813 - RNA, 15 nt, Human
ccccuuucacaggca

SEQ ID NO: 3799814 - RNA, 16 nt, Human
ccccuuucacaggcag

SEQ ID NO: 3799815 - RNA, 21 nt, Human
ccccuuucacaggcagccagu

SEQ ID NO: 3799816 - RNA, 13 nt, Human
ccccuuucccggg

SEQ ID NO: 3799817 - RNA, 14 nt, Human
ccccuuucccgggc

SEQ ID NO: 3799818 - RNA, 13 nt, Human
ccccuuuccuguc

SEQ ID NO: 3799819 - RNA, 20 nt, Human
ccccuuugggcccagggaca

SEQ ID NO: 3799820 - RNA, 16 nt, Human
ccccuuugggcccugc

SEQ ID NO: 3799821 - RNA, 16 nt, Human
ccccuuugugcugugg

SEQ ID NO: 3799822 - RNA, 16 nt, Human
ccccuuuucagcuucu

SEQ ID NO: 3799823 - RNA, 17 nt, Human
ccccuuuucagcuucug

SEQ ID NO: 3799824 - RNA, 15 nt, Human
ccccuuuucuuuucu

SEQ ID NO: 3799825 - RNA, 17 nt, Human
ccccuuuucuuuucuac

SEQ ID NO: 3799826 - RNA, 17 nt, Human
ccccuuuuucuuccuca

SEQ ID NO: 3799827 - RNA, 24 nt, Human
cccgaaagaggcacccuuccaucu

SEQ ID NO: 3799828 - RNA, 19 nt, Human
cccgaaaggucaccucacu

SEQ ID NO: 3799829 - RNA, 21 nt, Human
cccgaaaggucaccucacuca

SEQ ID NO: 3799830 - RNA, 20 nt, Human
cccgaagaauggagaggaac

SEQ ID NO: 3799831 - RNA, 22 nt, Human
cccgaagguuauggucaauccc

SEQ ID NO: 3799832 - RNA, 14 nt, Human
cccgaauacaaaca

SEQ ID NO: 3799833 - RNA, 20 nt, Human
cccgaauacaaacaccugga

SEQ ID NO: 3799834 - RNA, 18 nt, Human
cccgaauagcugggacua

SEQ ID NO: 3799835 - RNA, 15 nt, Human
cccgacagagggaag

SEQ ID NO: 3799836 - RNA, 18 nt, Human
cccgacagccuggcacag

SEQ ID NO: 3799837 - RNA, 23 nt, Human
cccgacauggacccggagcuaac

SEQ ID NO: 3799838 - RNA, 22 nt, Human
cccgaccaccugcccaaccugc

SEQ ID NO: 3799839 - RNA, 15 nt, Human
cccgacgccacagcc

SEQ ID NO: 3799840 - RNA, 16 nt, Human
cccgacuccagccagc

SEQ ID NO: 3799841 - RNA, 12 nt, Human
cccgacuccuca

SEQ ID NO: 3799842 - RNA, 13 nt, Human
cccgagcagcuga

SEQ ID NO: 3799843 - RNA, 22 nt, Human
cccgagcagcugagcagggccg

SEQ ID NO: 3799844 - RNA, 14 nt, Human
cccgagcuccucuu

SEQ ID NO: 3799845 - RNA, 16 nt, Human
cccgaggacccagacc

SEQ ID NO: 3799846 - RNA, 19 nt, Human
cccgaggacccagacccag

SEQ ID NO: 3799847 - RNA, 22 nt, Human
cccgaggacgcucccugcucca

SEQ ID NO: 3799848 - RNA, 13 nt, Human
cccgaggcccugc

SEQ ID NO: 3799849 - RNA, 20 nt, Human
cccgaggccuucucugaagg

SEQ ID NO: 3799850 - RNA, 21 nt, Human
cccgaggccuucucugaagga

SEQ ID NO: 3799851 - RNA, 21 nt, Human
cccgaguagcugggacuacag

SEQ ID NO: 3799852 - RNA, 22 nt, Human
cccgaguagcugggacuacagg

SEQ ID NO: 3799853 - RNA, 23 nt, Human
cccgagucauucguucuguggag

SEQ ID NO: 3799854 - RNA, 19 nt, Human
cccgauccuccccuggacu

SEQ ID NO: 3799855 - RNA, 15 nt, Human
cccgaucgccagcaa

SEQ ID NO: 3799856 - RNA, 15 nt, Human
cccgaugcugcuuuc

SEQ ID NO: 3799857 - RNA, 22 nt, Human
cccgauggaggacuccaggcag

SEQ ID NO: 3799858 - RNA, 23 nt, Human
cccgauggaggacuccaggcagc

SEQ ID NO: 3799859 - RNA, 19 nt, Human
cccgcaaacccccuuugug

SEQ ID NO: 3799860 - RNA, 22 nt, Human
cccgcaaugugcccccagacgc

SEQ ID NO: 3799861 - RNA, 19 nt, Human
cccgcacagagcuggggcu

SEQ ID NO: 3799862 - RNA, 11 nt, Human
cccgcacagca

SEQ ID NO: 3799863 - RNA, 14 nt, Human
cccgcacagcagcc

SEQ ID NO: 3799864 - RNA, 15 nt, Human
cccgcacagcagccu

SEQ ID NO: 3799865 - RNA, 15 nt, Human
cccgcagacaccuug

SEQ ID NO: 3799866 - RNA, 18 nt, Human
cccgcagaccuccccagc

SEQ ID NO: 3799867 - RNA, 20 nt, Human
cccgcagaccuccccagccc

SEQ ID NO: 3799868 - RNA, 14 nt, Human
cccgcagaccucug

SEQ ID NO: 3799869 - RNA, 15 nt, Human
cccgcagaccucugg

SEQ ID NO: 3799870 - RNA, 22 nt, Human
cccgcagagcgcgccccuagcc

SEQ ID NO: 3799871 - RNA, 13 nt, Human
cccgcagcccugg

SEQ ID NO: 3799872 - RNA, 16 nt, Human
cccgcagcccuggcag

SEQ ID NO: 3799873 - RNA, 15 nt, Human
cccgcaggacauggc

SEQ ID NO: 3799874 - RNA, 18 nt, Human
cccgcauccccugccucc

SEQ ID NO: 3799875 - RNA, 20 nt, Human
cccgcauccccugccuccau

SEQ ID NO: 3799876 - RNA, 15 nt, Human
cccgccaaaagcugc

SEQ ID NO: 3799877 - RNA, 14 nt, Human
cccgccacacagac

SEQ ID NO: 3799878 - RNA, 16 nt, Human
cccgccagccgcuccc

SEQ ID NO: 3799879 - RNA, 12 nt, Human
cccgcccacugu

SEQ ID NO: 3799880 - RNA, 17 nt, Human
cccgcccacuguccugg

SEQ ID NO: 3799881 - RNA, 13 nt, Human
cccgcccagcugc

SEQ ID NO: 3799882 - RNA, 17 nt, Human
cccgcccaggcuggcca

SEQ ID NO: 3799883 - RNA, 20 nt, Human
cccgcccaggcuggccagcc

SEQ ID NO: 3799884 - RNA, 22 nt, Human
cccgcccaggcuggccagcccc

SEQ ID NO: 3799885 - RNA, 20 nt, Human
cccgccccccacacuucccu

SEQ ID NO: 3799886 - RNA, 23 nt, Human
cccgccccccacacuucccuggc

SEQ ID NO: 3799887 - RNA, 16 nt, Human
cccgcccccugcccuc

SEQ ID NO: 3799888 - RNA, 15 nt, Human
cccgccccugcagca

SEQ ID NO: 3799889 - RNA, 20 nt, Human
cccgccccuuccccgaggga

SEQ ID NO: 3799890 - RNA, 14 nt, Human
cccgcccucuuccu

SEQ ID NO: 3799891 - RNA, 15 nt, Human
cccgcccucuuccug

SEQ ID NO: 3799892 - RNA, 20 nt, Human
cccgccgcuuuucuccucuu

SEQ ID NO: 3799893 - RNA, 12 nt, Human
cccgccucuccc

SEQ ID NO: 3799894 - RNA, 13 nt, Human
cccgccugcccac

SEQ ID NO: 3799895 - RNA, 15 nt, Human
cccgccugcccaccu

SEQ ID NO: 3799896 - RNA, 18 nt, Human
cccgccugcccaccugcc

SEQ ID NO: 3799897 - RNA, 12 nt, Human
cccgccugcccu

SEQ ID NO: 3799898 - RNA, 13 nt, Human
cccgccugcccuc

SEQ ID NO: 3799899 - RNA, 17 nt, Human
cccgccugcccucaugg

SEQ ID NO: 3799900 - RNA, 19 nt, Human
cccgcgcgcgucccccugc

SEQ ID NO: 3799901 - RNA, 21 nt, Human
cccgcggggacauugggaagg

SEQ ID NO: 3799902 - RNA, 13 nt, Human
cccgcuaaggaag

SEQ ID NO: 3799903 - RNA, 15 nt, Human
cccgcucagcccucc

SEQ ID NO: 3799904 - RNA, 20 nt, Human
cccgcucaugggccccucug

SEQ ID NO: 3799905 - RNA, 15 nt, Human
cccgcucccaguguc

SEQ ID NO: 3799906 - RNA, 23 nt, Human
cccgcucccagugucuuccugug

SEQ ID NO: 3799907 - RNA, 14 nt, Human
cccgcucugcaugc

SEQ ID NO: 3799908 - RNA, 16 nt, Human
cccgcugcugugcaac

SEQ ID NO: 3799909 - RNA, 13 nt, Human
cccgcuggaggau

SEQ ID NO: 3799910 - RNA, 21 nt, Human
cccgcuggaggaugugggcag

SEQ ID NO: 3799911 - RNA, 19 nt, Human
cccgcugucagccauuccu

SEQ ID NO: 3799912 - RNA, 17 nt, Human
cagccccuagcccagga

SEQ ID NO: 3799913 - RNA, 22 nt, Human
cagccccuagcccaggagagag

SEQ ID NO: 3799914 - RNA, 17 nt, Human
cagccccuccaucugua

SEQ ID NO: 3799915 - RNA, 21 nt, Human
cagccccucccaccacagcag

SEQ ID NO: 3799916 - RNA, 21 nt, Human
cagccccucccccaucuccca

SEQ ID NO: 3799917 - RNA, 22 nt, Human
cagccccucccccaucucccac

SEQ ID NO: 3799918 - RNA, 18 nt, Human
cagccccucccuccucug

SEQ ID NO: 3799919 - RNA, 21 nt, Human
cagccccucccuccucugaga

SEQ ID NO: 3799920 - RNA, 14 nt, Human
cagccccuccucug

SEQ ID NO: 3799921 - RNA, 17 nt, Human
cagccccuccucugcca

SEQ ID NO: 3799922 - RNA, 20 nt, Human
cagccccuccucugccaccu

SEQ ID NO: 3799923 - RNA, 22 nt, Human
cagccccuccucugccaccucc

SEQ ID NO: 3799924 - RNA, 17 nt, Human
cagccccucuugccccc

SEQ ID NO: 3799925 - RNA, 22 nt, Human
cagccccucuugccccccaccc

SEQ ID NO: 3799926 - RNA, 21 nt, Human
cagccccucuuggagaagucu

SEQ ID NO: 3799927 - RNA, 23 nt, Human
cagccccucuuggagaagucuca

SEQ ID NO: 3799928 - RNA, 11 nt, Human
cagccccugcc

SEQ ID NO: 3799929 - RNA, 23 nt, Human
cagccccugccccagcccaaguc

SEQ ID NO: 3799930 - RNA, 13 nt, Human
cagccccuggaug

SEQ ID NO: 3799931 - RNA, 17 nt, Human
cagccccuggaugcagc

SEQ ID NO: 3799932 - RNA, 19 nt, Human
cagccccuggaugcagccu

SEQ ID NO: 3799933 - RNA, 21 nt, Human
cagccccuggaugcagccuca

SEQ ID NO: 3799934 - RNA, 22 nt, Human
cagccccuggaugcagccucac

SEQ ID NO: 3799935 - RNA, 13 nt, Human
cagccccuggccc

SEQ ID NO: 3799936 - RNA, 13 nt, Human
cagccccuguccc

SEQ ID NO: 3799937 - RNA, 14 nt, Human
cagccccuguccca

SEQ ID NO: 3799938 - RNA, 21 nt, Human
cagccccuguucuggcagagu

SEQ ID NO: 3799939 - RNA, 16 nt, Human
cagccccuucugaccc

SEQ ID NO: 3799940 - RNA, 17 nt, Human
cagccccuucugaccca

SEQ ID NO: 3799941 - RNA, 21 nt, Human
cagccccuucugacccaugcu

SEQ ID NO: 3799942 - RNA, 23 nt, Human
cagccccuuucccuuguagcucc

SEQ ID NO: 3799943 - RNA, 17 nt, Human
cagcccgauccuccccu

SEQ ID NO: 3799944 - RNA, 23 nt, Human
cagcccgauccuccccuggacuc

SEQ ID NO: 3799945 - RNA, 21 nt, Human
cagcccgcaucagcugcucag

SEQ ID NO: 3799946 - RNA, 15 nt, Human
cagcccgcaugcagc

SEQ ID NO: 3799947 - RNA, 21 nt, Human
cagcccgcaugcagcagcuug

SEQ ID NO: 3799948 - RNA, 17 nt, Human
cagcccgcugaguggac

SEQ ID NO: 3799949 - RNA, 15 nt, Human
cagcccggcgccacc

SEQ ID NO: 3799950 - RNA, 15 nt, Human
cagcccggcucccac

SEQ ID NO: 3799951 - RNA, 14 nt, Human
cagcccgggagccu

SEQ ID NO: 3799952 - RNA, 15 nt, Human
cagcccgggagccua

SEQ ID NO: 3799953 - RNA, 21 nt, Human
cagcccgggagccuaggacca

SEQ ID NO: 3799954 - RNA, 15 nt, Human
cagcccgggcucugc

SEQ ID NO: 3799955 - RNA, 16 nt, Human
cagcccgggcucugcc

SEQ ID NO: 3799956 - RNA, 21 nt, Human
cagcccguguggccccuucac

SEQ ID NO: 3799957 - RNA, 18 nt, Human
cagcccuaaggaucucuc

SEQ ID NO: 3799958 - RNA, 20 nt, Human
cagcccuaaggaucucucag

SEQ ID NO: 3799959 - RNA, 22 nt, Human
cagcccuaaggaucucucagga

SEQ ID NO: 3799960 - RNA, 15 nt, Human
cagcccuagagccug

SEQ ID NO: 3799961 - RNA, 23 nt, Human
cagcccuagagccugccuggagc

SEQ ID NO: 3799962 - RNA, 14 nt, Human
cagcccuauggaug

SEQ ID NO: 3799963 - RNA, 17 nt, Human
cagcccucacacacccu

SEQ ID NO: 3799964 - RNA, 15 nt, Human
cagcccucaccccug

SEQ ID NO: 3799965 - RNA, 18 nt, Human
cagcccucauuggcucuu

SEQ ID NO: 3799966 - RNA, 22 nt, Human
cagcccuccaucuaaacugccc

SEQ ID NO: 3799967 - RNA, 20 nt, Human
cagcccucccgccccuuccc

SEQ ID NO: 3799968 - RNA, 13 nt, Human
cagcccucccugc

SEQ ID NO: 3799969 - RNA, 13 nt, Human
cagcccucccugu

SEQ ID NO: 3799970 - RNA, 14 nt, Human
cagcccucccuguc

SEQ ID NO: 3799971 - RNA, 22 nt, Human
cagcccucccuguccuccucgg

SEQ ID NO: 3799972 - RNA, 13 nt, Human
cagcccuccucac

SEQ ID NO: 3799973 - RNA, 16 nt, Human
cagcccuccucacccc

SEQ ID NO: 3799974 - RNA, 18 nt, Human
cagcccucggcgcuccgg

SEQ ID NO: 3799975 - RNA, 15 nt, Human
cagcccucucacugu

SEQ ID NO: 3799976 - RNA, 22 nt, Human
cagcccugaggugaaagggagc

SEQ ID NO: 3799977 - RNA, 18 nt, Human
cagcccugaguuccuagc

SEQ ID NO: 3799978 - RNA, 13 nt, Human
cagcccugcagag

SEQ ID NO: 3799979 - RNA, 20 nt, Human
cagcccugccccacaccucc

SEQ ID NO: 3799980 - RNA, 21 nt, Human
cagcccugccccacaccuccu

SEQ ID NO: 3799981 - RNA, 17 nt, Human
cagcccugccuggagga

SEQ ID NO: 3799982 - RNA, 20 nt, Human
cagcccugccuggaggaccu

SEQ ID NO: 3799983 - RNA, 14 nt, Human
cagcccugcuggcc

SEQ ID NO: 3799984 - RNA, 21 nt, Human
cagcccugcuggccgccucac

SEQ ID NO: 3799985 - RNA, 23 nt, Human
cagcccugcuggccgccucaccc

SEQ ID NO: 3799986 - RNA, 22 nt, Human
cagcccugcuuugggcugcccu

SEQ ID NO: 3799987 - RNA, 17 nt, Human
cagcccuggaggugcca

SEQ ID NO: 3799988 - RNA, 22 nt, Human
cagcccuggaggugccagcaaa

SEQ ID NO: 3799989 - RNA, 15 nt, Human
cagcccuggcucugc

SEQ ID NO: 3799990 - RNA, 20 nt, Human
cagcccuggcugaaggacug

SEQ ID NO: 3799991 - RNA, 13 nt, Human
cagcccugggccc

SEQ ID NO: 3799992 - RNA, 21 nt, Human
cagcccugggccccaccaccu

SEQ ID NO: 3799993 - RNA, 13 nt, Human
cagcccuggggcu

SEQ ID NO: 3799994 - RNA, 12 nt, Human
cagcccuggucu

SEQ ID NO: 3799995 - RNA, 16 nt, Human
cagcccugucuuccua

SEQ ID NO: 3799996 - RNA, 13 nt, Human
cagcccuuagcag

SEQ ID NO: 3799997 - RNA, 16 nt, Human
cagcccuuccucugcu

SEQ ID NO: 3799998 - RNA, 19 nt, Human
cagcccuucuuuccacaga

SEQ ID NO: 3799999 - RNA, 11 nt, Human
cagcccuugcu

SEQ ID NO: 3800000 - RNA, 12 nt, Human
cagcccuugcuu

SEQ ID NO: 3800001 - RNA, 14 nt, Human
cagcccuuggccag

SEQ ID NO: 3800002 - RNA, 14 nt, Human
cagccgacccccuc

SEQ ID NO: 3800003 - RNA, 15 nt, Human
cagccgacccccucu

SEQ ID NO: 3800004 - RNA, 16 nt, Human
cagccgagcaggaggc

SEQ ID NO: 3800005 - RNA, 18 nt, Human
cagccgagcaggaggccu

SEQ ID NO: 3800006 - RNA, 23 nt, Human
cagccgagcaggaggccuaggag

SEQ ID NO: 3800007 - RNA, 22 nt, Human
cagccgagcucguguauccugg

SEQ ID NO: 3800008 - RNA, 21 nt, Human
cagccgagcuuuuacucccug

SEQ ID NO: 3800009 - RNA, 21 nt, Human
cagccgaguggauagaugccc

SEQ ID NO: 3800010 - RNA, 18 nt, Human
cagccgauucaccugagc

SEQ ID NO: 3800011 - RNA, 13 nt, Human
cagccgccacauc

SEQ ID NO: 3800012 - RNA, 18 nt, Human
cagccgccaucagcccaa

SEQ ID NO: 3800013 - RNA, 22 nt, Human
cagccgccauugccaccaggag

SEQ ID NO: 3800014 - RNA, 22 nt, Human
cagccgccuuccuugaccuucc

SEQ ID NO: 3800015 - RNA, 22 nt, Human
cagccgcuccccagcccugccg

SEQ ID NO: 3800016 - RNA, 12 nt, Human
cagccgcuccug

SEQ ID NO: 3800017 - RNA, 21 nt, Human
cagccgcuccugucugccagc

SEQ ID NO: 3800018 - RNA, 12 nt, Human
cagccgcugccc

SEQ ID NO: 3800019 - RNA, 12 nt, Human
cagccgcuuggc

SEQ ID NO: 3800020 - RNA, 23 nt, Human
cagccggcacagggucugcucuu

SEQ ID NO: 3800021 - RNA, 19 nt, Human
cagccggccaauggaaacc

SEQ ID NO: 3800022 - RNA, 20 nt, Human
cagccggccaauggaaaccu

SEQ ID NO: 3800023 - RNA, 15 nt, Human
cagccggccucucug

SEQ ID NO: 3800024 - RNA, 16 nt, Human
cagccggccucucugg

SEQ ID NO: 3800025 - RNA, 17 nt, Human
cagccggccucucuggc

SEQ ID NO: 3800026 - RNA, 22 nt, Human
cagccggccucucuggccuccc

SEQ ID NO: 3800027 - RNA, 15 nt, Human
cagccggggccugcc

SEQ ID NO: 3800028 - RNA, 19 nt, Human
cagccgguaccugggaagg

SEQ ID NO: 3800029 - RNA, 21 nt, Human
cagccgguaccugggaagggg

SEQ ID NO: 3800030 - RNA, 18 nt, Human
cagccgucagccaaaugu

SEQ ID NO: 3800031 - RNA, 14 nt, Human
cagccgugccuuca

SEQ ID NO: 3800032 - RNA, 17 nt, Human
cagccgugggccccacc

SEQ ID NO: 3800033 - RNA, 16 nt, Human
cagccuacaggccuca

SEQ ID NO: 3800034 - RNA, 15 nt, Human
cagccuacucuccuu

SEQ ID NO: 3800035 - RNA, 18 nt, Human
cagccuagccgaccucag

SEQ ID NO: 3800036 - RNA, 19 nt, Human
cagccuagccgaccucagc

SEQ ID NO: 3800037 - RNA, 13 nt, Human
cagccuaugagca

SEQ ID NO: 3800038 - RNA, 18 nt, Human
cagccucaaauccaggac

SEQ ID NO: 3800039 - RNA, 19 nt, Human
cagccucaaauccaggacc

SEQ ID NO: 3800040 - RNA, 18 nt, Human
cagccucaauaagccuug

SEQ ID NO: 3800041 - RNA, 12 nt, Human
cagccucacaga

SEQ ID NO: 3800042 - RNA, 20 nt, Human
cagccucacaguccuuacca

SEQ ID NO: 3800043 - RNA, 16 nt, Human
cagccucacccuugcg

SEQ ID NO: 3800044 - RNA, 13 nt, Human
cagccucacuugg

SEQ ID NO: 3800045 - RNA, 20 nt, Human
cagccucagcgcggcccucc

SEQ ID NO: 3800046 - RNA, 19 nt, Human
cagccucaguccuccccuc

SEQ ID NO: 3800047 - RNA, 22 nt, Human
cagccucaguccuccccucaca

SEQ ID NO: 3800048 - RNA, 23 nt, Human
cagccucaguccuccccucacag

SEQ ID NO: 3800049 - RNA, 12 nt, Human
cagccuccagag

SEQ ID NO: 3800050 - RNA, 14 nt, Human
cagccuccagccuc

SEQ ID NO: 3800051 - RNA, 16 nt, Human
cagccuccagccucug

SEQ ID NO: 3800052 - RNA, 18 nt, Human
cagccuccauccuacccc

SEQ ID NO: 3800053 - RNA, 19 nt, Human
cagccucccaaagugcugg

SEQ ID NO: 3800054 - RNA, 18 nt, Human
cagccucccacccccauc

SEQ ID NO: 3800055 - RNA, 20 nt, Human
cagccucccauccagggccc

SEQ ID NO: 3800056 - RNA, 23 nt, Human
cagccucccauccagggccccca

SEQ ID NO: 3800057 - RNA, 22 nt, Human
cagccuccccugccagggcagg

SEQ ID NO: 3800058 - RNA, 22 nt, Human
cagccucccgaauagcugggac

SEQ ID NO: 3800059 - RNA, 23 nt, Human
cagccucccgaauagcugggacu

SEQ ID NO: 3800060 - RNA, 14 nt, Human
cccagagggcccag

SEQ ID NO: 3800061 - RNA, 18 nt, Human
cccagagggcccaggcag

SEQ ID NO: 3800062 - RNA, 15 nt, Human
cccagagggccugca

SEQ ID NO: 3800063 - RNA, 20 nt, Human
cccagaggggccugccaccu

SEQ ID NO: 3800064 - RNA, 23 nt, Human
cccagagguaacagaacagcuuc

SEQ ID NO: 3800065 - RNA, 16 nt, Human
cccagagguccagccc

SEQ ID NO: 3800066 - RNA, 15 nt, Human
cccagagugugaaac

SEQ ID NO: 3800067 - RNA, 23 nt, Human
cccagaguugcugggagcugaaa

SEQ ID NO: 3800068 - RNA, 14 nt, Human
cccagauaccagcc

SEQ ID NO: 3800069 - RNA, 15 nt, Human
cccagaucagccaga

SEQ ID NO: 3800070 - RNA, 20 nt, Human
cccagaucauguuuugguga

SEQ ID NO: 3800071 - RNA, 12 nt, Human
cccagauccuca

SEQ ID NO: 3800072 - RNA, 20 nt, Human
cccagaucuggucccuugca

SEQ ID NO: 3800073 - RNA, 21 nt, Human
cccagaugggggaaagcacag

SEQ ID NO: 3800074 - RNA, 19 nt, Human
cccagauguuuuacgucug

SEQ ID NO: 3800075 - RNA, 22 nt, Human
cccagauugcaacaggcugggc

SEQ ID NO: 3800076 - RNA, 17 nt, Human
cccagauuggcucacac

SEQ ID NO: 3800077 - RNA, 20 nt, Human
cccagauuggcucacacuga

SEQ ID NO: 3800078 - RNA, 21 nt, Human
cccagauuuugcuguauauuu

SEQ ID NO: 3800079 - RNA, 21 nt, Human
cccagcaacccuccuaucacc

SEQ ID NO: 3800080 - RNA, 16 nt, Human
cccagcaauuaugaaa

SEQ ID NO: 3800081 - RNA, 18 nt, Human
cccagcacaugaaaccuu

SEQ ID NO: 3800082 - RNA, 15 nt, Human
cccagcacccagcaa

SEQ ID NO: 3800083 - RNA, 22 nt, Human
cccagcaccucagccugcacag

SEQ ID NO: 3800084 - RNA, 16 nt, Human
cccagcaccugccucc

SEQ ID NO: 3800085 - RNA, 13 nt, Human
cccagcacugagg

SEQ ID NO: 3800086 - RNA, 15 nt, Human
cccagcacugaggaa

SEQ ID NO: 3800087 - RNA, 24 nt, Human
cccagcacugaggaagaacggggc

SEQ ID NO: 3800088 - RNA, 21 nt, Human
cccagcacugcuugaggaaaa

SEQ ID NO: 3800089 - RNA, 15 nt, Human
cccagcacuuuggga

SEQ ID NO: 3800090 - RNA, 12 nt, Human
cccagcagccag

SEQ ID NO: 3800091 - RNA, 15 nt, Human
cccagcagccagcca

SEQ ID NO: 3800092 - RNA, 17 nt, Human
cccagcagcccuaagga

SEQ ID NO: 3800093 - RNA, 19 nt, Human
cccagcagggccucaaagu

SEQ ID NO: 3800094 - RNA, 16 nt, Human
cccagcagguggggag

SEQ ID NO: 3800095 - RNA, 17 nt, Human
cccagcaucacucccca

SEQ ID NO: 3800096 - RNA, 17 nt, Human
cccagcaucgcacucug

SEQ ID NO: 3800097 - RNA, 22 nt, Human
cccagcaugacauaacagugca

SEQ ID NO: 3800098 - RNA, 19 nt, Human
cccagcaugcaccacgggc

SEQ ID NO: 3800099 - RNA, 18 nt, Human
cccagcauuccagccccu

SEQ ID NO: 3800100 - RNA, 16 nt, Human
cccugcuccucccugg

SEQ ID NO: 3800101 - RNA, 19 nt, Human
cccugcuccucccuggcug

SEQ ID NO: 3800102 - RNA, 18 nt, Human
cccugcuccugcagcaug

SEQ ID NO: 3800103 - RNA, 22 nt, Human
cccugcucuccgaccagacacc

SEQ ID NO: 3800104 - RNA, 13 nt, Human
cccugcugccaug

SEQ ID NO: 3800105 - RNA, 12 nt, Human
cccugcugcucc

SEQ ID NO: 3800106 - RNA, 13 nt, Human
cccugcugcugcc

SEQ ID NO: 3800107 - RNA, 18 nt, Human
cccugcuggccgccucac

SEQ ID NO: 3800108 - RNA, 13 nt, Human
cccugcuggcucu

SEQ ID NO: 3800109 - RNA, 13 nt, Human
cccugcugguuca

SEQ ID NO: 3800110 - RNA, 20 nt, Human
cccugcugguucaggguugg

SEQ ID NO: 3800111 - RNA, 20 nt, Human
cccugcugucauugcuucuu

SEQ ID NO: 3800112 - RNA, 13 nt, Human
cccugcuguuuau

SEQ ID NO: 3800113 - RNA, 23 nt, Human
cccugcuucuccagccuggaccc

SEQ ID NO: 3800114 - RNA, 22 nt, Human
ccccaggugguuauggagaggg

SEQ ID NO: 3800115 - RNA, 17 nt, Human
ccccaguaaaauugcca

SEQ ID NO: 3800116 - RNA, 16 nt, Human
ccccaguaagccacug

SEQ ID NO: 3800117 - RNA, 16 nt, Human
ccccagucagccucuc

SEQ ID NO: 3800118 - RNA, 11 nt, Human
ccccaguccca

SEQ ID NO: 3800119 - RNA, 17 nt, Human
ccccaguccccuucccg

SEQ ID NO: 3800120 - RNA, 16 nt, Human
ccccagugcacccacu

SEQ ID NO: 3800121 - RNA, 16 nt, Human
ccccagugcccacagg

SEQ ID NO: 3800122 - RNA, 21 nt, Human
ccccaguuccucccaggaagc

SEQ ID NO: 3800123 - RNA, 21 nt, Human
ccccaguucugcuccucucca

SEQ ID NO: 3800124 - RNA, 23 nt, Human
ccccaguucugcuccucuccagg

SEQ ID NO: 3800125 - RNA, 16 nt, Human
ccccauaacucaaugg

SEQ ID NO: 3800126 - RNA, 15 nt, Human
ccccauacucugucu

SEQ ID NO: 3800127 - RNA, 13 nt, Human
ccccaucacugcg

SEQ ID NO: 3800128 - RNA, 19 nt, Human
ccccaucaggacucuugug

SEQ ID NO: 3800129 - RNA, 13 nt, Human
ccccaucagugcu

SEQ ID NO: 3800130 - RNA, 16 nt, Human
ccccaucauccucugg

SEQ ID NO: 3800131 - RNA, 17 nt, Human
ccccaucauccucuggc

SEQ ID NO: 3800132 - RNA, 17 nt, Human
ccccaucauugguaccc

SEQ ID NO: 3800133 - RNA, 16 nt, Human
ccccaucccacacccu

SEQ ID NO: 3800134 - RNA, 14 nt, Human
ccccauccuccagc

SEQ ID NO: 3800135 - RNA, 18 nt, Human
ccccauccuccagcuucu

SEQ ID NO: 3800136 - RNA, 17 nt, Human
ccccauccuccccuucc

SEQ ID NO: 3800137 - RNA, 19 nt, Human
ccccauccuccccuucccu

SEQ ID NO: 3800138 - RNA, 13 nt, Human
ccccauccuggcc

SEQ ID NO: 3800139 - RNA, 16 nt, Human
ccccauccuggcccau

SEQ ID NO: 3800140 - RNA, 17 nt, Human
ccccauccuggcccauc

SEQ ID NO: 3800141 - RNA, 19 nt, Human
ccccaucgccagcugauga

SEQ ID NO: 3800142 - RNA, 18 nt, Human
ccccaucucccugccugg

SEQ ID NO: 3800143 - RNA, 14 nt, Human
ccccaucugcccag

SEQ ID NO: 3800144 - RNA, 19 nt, Human
ccccaucuggguccuugca

SEQ ID NO: 3800145 - RNA, 21 nt, Human
ccccaucugugcauucuccug

SEQ ID NO: 3800146 - RNA, 17 nt, Human
ccccaucuucacccagg

SEQ ID NO: 3800147 - RNA, 14 nt, Human
ccccaucuugcuuc

SEQ ID NO: 3800148 - RNA, 13 nt, Human
ccccaugcacugu

SEQ ID NO: 3800149 - RNA, 19 nt, Human
ccccaugcacugugaagga

SEQ ID NO: 3800150 - RNA, 13 nt, Human
ccccaugccaaag

SEQ ID NO: 3800151 - RNA, 15 nt, Human
ccccaugccugucca

SEQ ID NO: 3800152 - RNA, 22 nt, Human
ccccaugccuguccagccuggg

SEQ ID NO: 3800153 - RNA, 14 nt, Human
ccccaugcuggagc

SEQ ID NO: 3800154 - RNA, 19 nt, Human
ccccaugcuggagccugug

SEQ ID NO: 3800155 - RNA, 20 nt, Human
ccccaugcuggagccugugu

SEQ ID NO: 3800156 - RNA, 22 nt, Human
ccccaugcuggagccuguguaa

SEQ ID NO: 3800157 - RNA, 15 nt, Human
ccccaugcuggaggu

SEQ ID NO: 3800158 - RNA, 13 nt, Human
ccccauggcccug

SEQ ID NO: 3800159 - RNA, 19 nt, Human
ccccauggccggcuuucag

SEQ ID NO: 3800160 - RNA, 22 nt, Human
ccccaugggaagacgaggcccu

SEQ ID NO: 3800161 - RNA, 15 nt, Human
ccccaugucucucag

SEQ ID NO: 3800162 - RNA, 23 nt, Human
ccccaugugccugcaccaggaga

SEQ ID NO: 3800163 - RNA, 14 nt, Human
ccccauguguccug

SEQ ID NO: 3800164 - RNA, 23 nt, Human
ccccauguguccugguucccguu

SEQ ID NO: 3800165 - RNA, 21 nt, Human
ccccauguuguaaugcugcac

SEQ ID NO: 3800166 - RNA, 17 nt, Human
ccccauuagagucagcc

SEQ ID NO: 3800167 - RNA, 23 nt, Human
ccccauuccugggaaauauuccc

SEQ ID NO: 3800168 - RNA, 15 nt, Human
ccccauucugccugc

SEQ ID NO: 3800169 - RNA, 16 nt, Human
ccccauucuuccuagu

SEQ ID NO: 3800170 - RNA, 22 nt, Human
ccccauucuuugcuugaacaca

SEQ ID NO: 3800171 - RNA, 15 nt, Human
ccccauucuuuugua

SEQ ID NO: 3800172 - RNA, 17 nt, Human
ccccauugccuccuccu

SEQ ID NO: 3800173 - RNA, 17 nt, Human
ccccauuuauccaccuc

SEQ ID NO: 3800174 - RNA, 21 nt, Human
ccccauuuauccaccuccauc

SEQ ID NO: 3800175 - RNA, 17 nt, Human
ccccauuucccaucugc

SEQ ID NO: 3800176 - RNA, 22 nt, Human
ccccauuucccaucugcacccc

SEQ ID NO: 3800177 - RNA, 13 nt, Human
ccccauuucuauu

SEQ ID NO: 3800178 - RNA, 20 nt, Human
ccccauuucuauuuauuuac

SEQ ID NO: 3800179 - RNA, 20 nt, Human
cccccaacacugugcccugg

SEQ ID NO: 3800180 - RNA, 23 nt, Human
cccccaaccaaguggcucccaca

SEQ ID NO: 3800181 - RNA, 20 nt, Human
cccccaaccauuuccucaga

SEQ ID NO: 3800182 - RNA, 18 nt, Human
cccccaaccccugaggaa

SEQ ID NO: 3800183 - RNA, 14 nt, Human
cccccaaccucagg

SEQ ID NO: 3800184 - RNA, 15 nt, Human
cccccaaccucaggg

SEQ ID NO: 3800185 - RNA, 18 nt, Human
cccccaagggaggcugcu

SEQ ID NO: 3800186 - RNA, 20 nt, Human
cccccaagggaggcugcugc

SEQ ID NO: 3800187 - RNA, 16 nt, Human
cccccaaggggcaguc

SEQ ID NO: 3800188 - RNA, 18 nt, Human
cccccaagguucuccaac

SEQ ID NO: 3800189 - RNA, 13 nt, Human
cccccaauccaug

SEQ ID NO: 3800190 - RNA, 12 nt, Human
cccccacacaca

SEQ ID NO: 3800191 - RNA, 14 nt, Human
cccccaccacacau

SEQ ID NO: 3800192 - RNA, 15 nt, Human
cccccaccacuagga

SEQ ID NO: 3800193 - RNA, 17 nt, Human
cccccacugccuuugac

SEQ ID NO: 3800194 - RNA, 13 nt, Human
cccccacuggcug

SEQ ID NO: 3800195 - RNA, 14 nt, Human
cccccacuggcugu

SEQ ID NO: 3800196 - RNA, 15 nt, Human
cccccacuggcugug

SEQ ID NO: 3800197 - RNA, 21 nt, Human
cccccacuggcugugggcucc

SEQ ID NO: 3800198 - RNA, 13 nt, Human
cccccacugguga

SEQ ID NO: 3800199 - RNA, 22 nt, Human
cccccacuugccucuuccuuga

SEQ ID NO: 3800200 - RNA, 20 nt, Human
cccccagcaaagcccccaga

SEQ ID NO: 3800201 - RNA, 12 nt, Human
cccccagcccaa

SEQ ID NO: 3800202 - RNA, 15 nt, Human
cccccagcccaaagg

SEQ ID NO: 3800203 - RNA, 21 nt, Human
cccccagcccagggcuccugc

SEQ ID NO: 3800204 - RNA, 22 nt, Human
cccccagcccccuccuggugcc

SEQ ID NO: 3800205 - RNA, 12 nt, Human
cccccagcccug

SEQ ID NO: 3800206 - RNA, 14 nt, Human
cccccagccugggc

SEQ ID NO: 3800207 - RNA, 12 nt, Human
cccccagccugu

SEQ ID NO: 3800208 - RNA, 13 nt, Human
cccccagcuaaga

SEQ ID NO: 3800209 - RNA, 15 nt, Human
cccccagcuccggcc

SEQ ID NO: 3800210 - RNA, 14 nt, Human
cccccagcucuggu

SEQ ID NO: 3800211 - RNA, 11 nt, Human
cccccagcugg

SEQ ID NO: 3800212 - RNA, 23 nt, Human
cccccagcuuugcuaccaaagca

SEQ ID NO: 3800213 - RNA, 14 nt, Human
cccccaggacaggc

SEQ ID NO: 3800214 - RNA, 13 nt, Human
cccccaggacugg

SEQ ID NO: 3800215 - RNA, 17 nt, Human
cccccaggacugggcca

SEQ ID NO: 3800216 - RNA, 18 nt, Human
cccccaguaucucuucag

SEQ ID NO: 3800217 - RNA, 19 nt, Human
cccccauccuccccuuccc

SEQ ID NO: 3800218 - RNA, 18 nt, Human
cccccaucuucgggacca

SEQ ID NO: 3800219 - RNA, 23 nt, Human
cccccauguuguaaugcugcacu

SEQ ID NO: 3800220 - RNA, 17 nt, Human
cccccauucucaucugc

SEQ ID NO: 3800221 - RNA, 16 nt, Human
cccccauuuccucggg

SEQ ID NO: 3800222 - RNA, 11 nt, Human
ccccccacucu

SEQ ID NO: 3800223 - RNA, 12 nt, Human
ccccccacucuc

SEQ ID NO: 3800224 - RNA, 14 nt, Human
ccccccagcacuga

SEQ ID NO: 3800225 - RNA, 14 nt, Human
ccccccaugcacug

SEQ ID NO: 3800226 - RNA, 14 nt, Human
ccccccucccagag

SEQ ID NO: 3800227 - RNA, 12 nt, Human
ccccccucuguc

SEQ ID NO: 3800228 - RNA, 13 nt, Human
cccccgagcuggg

SEQ ID NO: 3800229 - RNA, 12 nt, Human
cccccgccacuc

SEQ ID NO: 3800230 - RNA, 13 nt, Human
cccccgcccaggc

SEQ ID NO: 3800231 - RNA, 14 nt, Human
cccccgcccccugc

SEQ ID NO: 3800232 - RNA, 22 nt, Human
cccccgggaggggcccgcuugc

SEQ ID NO: 3800233 - RNA, 18 nt, Human
cccccgggccgacggagc

SEQ ID NO: 3800234 - RNA, 15 nt, Human
cccccggggcugggu

SEQ ID NO: 3800235 - RNA, 19 nt, Human
cccccuaaaccccuguccc

SEQ ID NO: 3800236 - RNA, 20 nt, Human
cccccucaggacccucgcug

SEQ ID NO: 3800237 - RNA, 16 nt, Human
cccccucccaccccca

SEQ ID NO: 3800238 - RNA, 15 nt, Human
cccccucccagaggc

SEQ ID NO: 3800239 - RNA, 13 nt, Human
cccccucccccac

SEQ ID NO: 3800240 - RNA, 13 nt, Human
cccccucccugga

SEQ ID NO: 3800241 - RNA, 14 nt, Human
cccccucccuggau

SEQ ID NO: 3800242 - RNA, 16 nt, Human
cccccucccuggauga

SEQ ID NO: 3800243 - RNA, 19 nt, Human
cccccuccgcccugccacu

SEQ ID NO: 3800244 - RNA, 17 nt, Human
cccccuccgccuccagg

SEQ ID NO: 3800245 - RNA, 12 nt, Human
cccccuccucuc

SEQ ID NO: 3800246 - RNA, 13 nt, Human
cccccuccugcug

SEQ ID NO: 3800247 - RNA, 17 nt, Human
ccccuccucugcuugcc

SEQ ID NO: 3800248 - RNA, 20 nt, Human
ccccuccugaaccgcacagc

SEQ ID NO: 3800249 - RNA, 12 nt, Human
ccccuccugcug

SEQ ID NO: 3800250 - RNA, 14 nt, Human
ccccuccuggggcc

SEQ ID NO: 3800251 - RNA, 15 nt, Human
ccccuccuggggcca

SEQ ID NO: 3800252 - RNA, 13 nt, Human
ccccuccuucaga

SEQ ID NO: 3800253 - RNA, 18 nt, Human
ccccuccuugccuccugu

SEQ ID NO: 3800254 - RNA, 20 nt, Human
ccccuccuugccuccugugu

SEQ ID NO: 3800255 - RNA, 14 nt, Human
ccccuccuugcucu

SEQ ID NO: 3800256 - RNA, 13 nt, Human
ccccuccuugggc

SEQ ID NO: 3800257 - RNA, 14 nt, Human
ccccucgcccaguc

SEQ ID NO: 3800258 - RNA, 15 nt, Human
ccccucggagaagag

SEQ ID NO: 3800259 - RNA, 19 nt, Human
ccccucuaaugcucacgcu

SEQ ID NO: 3800260 - RNA, 12 nt, Human
ccccucucacca

SEQ ID NO: 3800261 - RNA, 17 nt, Human
ccccucucccaguuguc

SEQ ID NO: 3800262 - RNA, 16 nt, Human
ccccucucccuucccu

SEQ ID NO: 3800263 - RNA, 15 nt, Human
ccccucuccuucuua

SEQ ID NO: 3800264 - RNA, 11 nt, Human
ccccucucugc

SEQ ID NO: 3800265 - RNA, 13 nt, Human
ccccucucugggc

SEQ ID NO: 3800266 - RNA, 15 nt, Human
ccccucugaccugca

SEQ ID NO: 3800267 - RNA, 18 nt, Human
ccccucugcacccagaac

SEQ ID NO: 3800268 - RNA, 12 nt, Human
ccccucugcccu

SEQ ID NO: 3800269 - RNA, 12 nt, Human
ccccucugcugg

SEQ ID NO: 3800270 - RNA, 12 nt, Human
ccccucugcuuu

SEQ ID NO: 3800271 - RNA, 18 nt, Human
ccccucuggcuccagcug

SEQ ID NO: 3800272 - RNA, 19 nt, Human
ccccucuggcuccagcugg

SEQ ID NO: 3800273 - RNA, 12 nt, Human
ccccucuggucg

SEQ ID NO: 3800274 - RNA, 23 nt, Human
ccccucuggucgcuccugcccac

SEQ ID NO: 3800275 - RNA, 11 nt, Human
ccccucuguag

SEQ ID NO: 3800276 - RNA, 12 nt, Human
ccccucugucca

SEQ ID NO: 3800277 - RNA, 19 nt, Human
ccccucuuccucuugaccc

SEQ ID NO: 3800278 - RNA, 17 nt, Human
cagcuguuuuguugaca

SEQ ID NO: 3800279 - RNA, 22 nt, Human
cagcuguuuuguugacauucug

SEQ ID NO: 3800280 - RNA, 23 nt, Human
cagcuguuuuguugacauucuga

SEQ ID NO: 3800281 - RNA, 21 nt, Human
cagcuuacacaaaucuauuua

SEQ ID NO: 3800282 - RNA, 17 nt, Human
cagcuuagauuucauag

SEQ ID NO: 3800283 - RNA, 19 nt, Human
cagcuuagauuucauaguu

SEQ ID NO: 3800284 - RNA, 14 nt, Human
cagcuuagggcccu

SEQ ID NO: 3800285 - RNA, 18 nt, Human
cagcuuagggcccuggag

SEQ ID NO: 3800286 - RNA, 21 nt, Human
cagcuuauacgaaauaauugu

SEQ ID NO: 3800287 - RNA, 18 nt, Human
cagcuuaucucuuuuaua

SEQ ID NO: 3800288 - RNA, 22 nt, Human
cagcuuaucucuuuuauauuug

SEQ ID NO: 3800289 - RNA, 23 nt, Human
cagcuuaucucuuuuauauuugu

SEQ ID NO: 3800290 - RNA, 13 nt, Human
cagcuuauuguuu

SEQ ID NO: 3800291 - RNA, 13 nt, Human
cagcuucaccaga

SEQ ID NO: 3800292 - RNA, 22 nt, Human
cagcuucacuucugacucuucc

SEQ ID NO: 3800293 - RNA, 15 nt, Human
cagcuucagccagga

SEQ ID NO: 3800294 - RNA, 17 nt, Human
cagcuucagccaggagc

SEQ ID NO: 3800295 - RNA, 14 nt, Human
cagcuucagguuau

SEQ ID NO: 3800296 - RNA, 19 nt, Human
cagcuucaugccuuuguaa

SEQ ID NO: 3800297 - RNA, 15 nt, Human
cagcuuccagcagga

SEQ ID NO: 3800298 - RNA, 16 nt, Human
cagcuuccagcaggag

SEQ ID NO: 3800299 - RNA, 18 nt, Human
cagcuuccccaguagcug

SEQ ID NO: 3800300 - RNA, 18 nt, Human
cagcuuccugucaagcaa

SEQ ID NO: 3800301 - RNA, 18 nt, Human
cagcuuccuguccccauc

SEQ ID NO: 3800302 - RNA, 16 nt, Human
cagcuuccuucagaga

SEQ ID NO: 3800303 - RNA, 20 nt, Human
cagcuuccuucagagagcag

SEQ ID NO: 3800304 - RNA, 20 nt, Human
cagcuuccuuuccugugugu

SEQ ID NO: 3800305 - RNA, 20 nt, Human
cagcuucguuuauuuucaag

SEQ ID NO: 3800306 - RNA, 20 nt, Human
cagcuucucauccugcaggc

SEQ ID NO: 3800307 - RNA, 15 nt, Human
cagcuucuccaggcu

SEQ ID NO: 3800308 - RNA, 12 nt, Human
cagcuucugcca

SEQ ID NO: 3800309 - RNA, 19 nt, Human
cagcuucugccacuuccca

SEQ ID NO: 3800310 - RNA, 14 nt, Human
cagcuucugccccc

SEQ ID NO: 3800311 - RNA, 19 nt, Human
cagcuucugcccccugcag

SEQ ID NO: 3800312 - RNA, 14 nt, Human
cagcuucugcuggg

SEQ ID NO: 3800313 - RNA, 15 nt, Human
cagcuucugcugggc

SEQ ID NO: 3800314 - RNA, 21 nt, Human
cagcuucugguacucuccuag

SEQ ID NO: 3800315 - RNA, 22 nt, Human
cagcuucugguacucuccuaga

SEQ ID NO: 3800316 - RNA, 14 nt, Human
cagcuucuucaucu

SEQ ID NO: 3800317 - RNA, 18 nt, Human
cagcuugaaacugagaug

SEQ ID NO: 3800318 - RNA, 18 nt, Human
cagcuugaccgugaggcc

SEQ ID NO: 3800319 - RNA, 17 nt, Human
cagcuugaccugaggcu

SEQ ID NO: 3800320 - RNA, 15 nt, Human
cagcuugaggguugg

SEQ ID NO: 3800321 - RNA, 18 nt, Human
cagcuugaggguugggcu

SEQ ID NO: 3800322 - RNA, 19 nt, Human
cagcuugaucaaaggcaca

SEQ ID NO: 3800323 - RNA, 16 nt, Human
cagcuugcacauuugg

SEQ ID NO: 3800324 - RNA, 17 nt, Human
cagcuugccagaugcug

SEQ ID NO: 3800325 - RNA, 16 nt, Human
cagcuugcgaauaaca

SEQ ID NO: 3800326 - RNA, 23 nt, Human
cagcuugcucuucagugggagaa

SEQ ID NO: 3800327 - RNA, 14 nt, Human
cagcuugcugcccu

SEQ ID NO: 3800328 - RNA, 17 nt, Human
cagcuugcugcccuagg

SEQ ID NO: 3800329 - RNA, 14 nt, Human
cagcuugggagagc

SEQ ID NO: 3800330 - RNA, 20 nt, Human
cagcuugggcagaucuccca

SEQ ID NO: 3800331 - RNA, 13 nt, Human
cagcuugggccca

SEQ ID NO: 3800332 - RNA, 14 nt, Human
cagcuugggcccag

SEQ ID NO: 3800333 - RNA, 22 nt, Human
cagcuugggcccagcugggcuc

SEQ ID NO: 3800334 - RNA, 20 nt, Human
cagcuuggggccaccaaagc

SEQ ID NO: 3800335 - RNA, 22 nt, Human
cagcuuggggccaccaaagcug

SEQ ID NO: 3800336 - RNA, 19 nt, Human
cagcuuguaaauagcucag

SEQ ID NO: 3800337 - RNA, 12 nt, Human
cagcuuguagcc

SEQ ID NO: 3800338 - RNA, 18 nt, Human
cagcuuguagccagccgg

SEQ ID NO: 3800339 - RNA, 19 nt, Human
cagcuuguagccagccggg

SEQ ID NO: 3800340 - RNA, 16 nt, Human
cagcuuguaggagcug

SEQ ID NO: 3800341 - RNA, 19 nt, Human
cagcuuguaugcaauggau

SEQ ID NO: 3800342 - RNA, 20 nt, Human
cagcuuguggcaagugaauu

SEQ ID NO: 3800343 - RNA, 22 nt, Human
cagcuuguuuuggacuuuguua

SEQ ID NO: 3800344 - RNA, 22 nt, Human
cagcuuuaaaaaauuaaucugg

SEQ ID NO: 3800345 - RNA, 19 nt, Human
cagcuuuaaacucagggac

SEQ ID NO: 3800346 - RNA, 15 nt, Human
cagcuuuaaccauua

SEQ ID NO: 3800347 - RNA, 14 nt, Human
cagcuuuagccaag

SEQ ID NO: 3800348 - RNA, 21 nt, Human
cagcuuuauggagauauaauu

SEQ ID NO: 3800349 - RNA, 17 nt, Human
cagcuuucaaagcauuu

SEQ ID NO: 3800350 - RNA, 14 nt, Human
cagcuuucagggcc

SEQ ID NO: 3800351 - RNA, 21 nt, Human
cagcuuucaucuuuguggaug

SEQ ID NO: 3800352 - RNA, 17 nt, Human
cagcuuucaugauuagc

SEQ ID NO: 3800353 - RNA, 23 nt, Human
cagcuuuccccaugucucgacuc

SEQ ID NO: 3800354 - RNA, 23 nt, Human
cagcuuucuccccgcuaaggaag

SEQ ID NO: 3800355 - RNA, 19 nt, Human
cagcuuucuugcucccuuc

SEQ ID NO: 3800356 - RNA, 14 nt, Human
cagcuuugauauuu

SEQ ID NO: 3800357 - RNA, 17 nt, Human
cagcuuugaucccugac

SEQ ID NO: 3800358 - RNA, 23 nt, Human
cagcuuugcccaacaccagcccc

SEQ ID NO: 3800359 - RNA, 15 nt, Human
cagcuuugccuucca

SEQ ID NO: 3800360 - RNA, 16 nt, Human
cagcuuugcucauauu

SEQ ID NO: 3800361 - RNA, 13 nt, Human
cagcuuugcugcu

SEQ ID NO: 3800362 - RNA, 14 nt, Human
cagcuuugcugcug

SEQ ID NO: 3800363 - RNA, 19 nt, Human
cagcuuugugacuguauau

SEQ ID NO: 3800364 - RNA, 21 nt, Human
cagcuuuguuuguugucagcu

SEQ ID NO: 3800365 - RNA, 11 nt, Human
cagcuuuuaac

SEQ ID NO: 3800366 - RNA, 20 nt, Human
cagcuuuuaguacccaccug

SEQ ID NO: 3800367 - RNA, 11 nt, Human
cagcuuuucaa

SEQ ID NO: 3800368 - RNA, 23 nt, Human
cagcuuuucauugcugugacagu

SEQ ID NO: 3800369 - RNA, 23 nt, Human
cagcuuuuggauuggacaaaaug

SEQ ID NO: 3800370 - RNA, 16 nt, Human
cagcuuuuugucuuuu

SEQ ID NO: 3800371 - RNA, 19 nt, Human
cagcuuuuuuuuccccccu

SEQ ID NO: 3800372 - RNA, 17 nt, Human
caggaaaaggccugggg

SEQ ID NO: 3800373 - RNA, 19 nt, Human
caggaaaaggccuggggug

SEQ ID NO: 3800374 - RNA, 17 nt, Human
caggaaaauccucuggc

SEQ ID NO: 3800375 - RNA, 23 nt, Human
caggaaacaguugcauguaguaa

SEQ ID NO: 3800376 - RNA, 21 nt, Human
caggaaacuccacaucugccu

SEQ ID NO: 3800377 - RNA, 18 nt, Human
caggaaacuccugugacc

SEQ ID NO: 3800378 - RNA, 19 nt, Human
caggaaacuccugugacca

SEQ ID NO: 3800379 - RNA, 16 nt, Human
caggaaagagaacuuc

SEQ ID NO: 3800380 - RNA, 20 nt, Human
caggaaagagaacuuccaga

SEQ ID NO: 3800381 - RNA, 16 nt, Human
caggaaaggcuccagg

SEQ ID NO: 3800382 - RNA, 21 nt, Human
caggaaaguggcaccugucug

SEQ ID NO: 3800383 - RNA, 14 nt, Human
caggaaaguucaga

SEQ ID NO: 3800384 - RNA, 22 nt, Human
caggaaaugcugacccaugggc

SEQ ID NO: 3800385 - RNA, 13 nt, Human
caggaacagaagg

SEQ ID NO: 3800386 - RNA, 15 nt, Human
caggaacagaaggau

SEQ ID NO: 3800387 - RNA, 16 nt, Human
caggaaccacaccaca

SEQ ID NO: 3800388 - RNA, 15 nt, Human
caggaaccgaggcag

SEQ ID NO: 3800389 - RNA, 18 nt, Human
caggaaccgaggcaggga

SEQ ID NO: 3800390 - RNA, 18 nt, Human
caggaaccucgaguacug

SEQ ID NO: 3800391 - RNA, 21 nt, Human
caggaaccucgaguacugugg

SEQ ID NO: 3800392 - RNA, 16 nt, Human
caggagaagaaagaac

SEQ ID NO: 3800393 - RNA, 19 nt, Human
caggagaagaaagaacuau

SEQ ID NO: 3800394 - RNA, 13 nt, Human
caggagaagcuca

SEQ ID NO: 3800395 - RNA, 22 nt, Human
caggagaaggccaauuccuaua

SEQ ID NO: 3800396 - RNA, 15 nt, Human
caggagaauugcuug

SEQ ID NO: 3800397 - RNA, 13 nt, Human
caggagacaaaag

SEQ ID NO: 3800398 - RNA, 14 nt, Human
caggagacaggaag

SEQ ID NO: 3800399 - RNA, 23 nt, Human
caggagacagguuagcugcuccc

SEQ ID NO: 3800400 - RNA, 16 nt, Human
caggagacccacaggu

SEQ ID NO: 3800401 - RNA, 23 nt, Human
caggagacuggcgugaacccagg

SEQ ID NO: 3800402 - RNA, 13 nt, Human
caggagagagaaa

SEQ ID NO: 3800403 - RNA, 14 nt, Human
caggagagagaaag

SEQ ID NO: 3800404 - RNA, 16 nt, Human
caggagagcuuagggu

SEQ ID NO: 3800405 - RNA, 14 nt, Human
caggagaggagagc

SEQ ID NO: 3800406 - RNA, 16 nt, Human
caggagaggagagcca

SEQ ID NO: 3800407 - RNA, 21 nt, Human
caggagaggagagccagagaa

SEQ ID NO: 3800408 - RNA, 18 nt, Human
caggagaggauggcccag

SEQ ID NO: 3800409 - RNA, 23 nt, Human
caggagaucgagaccauccuggc

SEQ ID NO: 3800410 - RNA, 23 nt, Human
caggagaugcugugccccuggcc

SEQ ID NO: 3800411 - RNA, 17 nt, Human
caggagauugagaagga

SEQ ID NO: 3800412 - RNA, 19 nt, Human
caggagauugagaaggaga

SEQ ID NO: 3800413 - RNA, 15 nt, Human
caggagcacacccag

SEQ ID NO: 3800414 - RNA, 16 nt, Human
caggagcacacccagc

SEQ ID NO: 3800415 - RNA, 21 nt, Human
caggagcacacccagccccca

SEQ ID NO: 3800416 - RNA, 16 nt, Human
caggagcacaggcagc

SEQ ID NO: 3800417 - RNA, 17 nt, Human
caggagcacaggcagcu

SEQ ID NO: 3800418 - RNA, 19 nt, Human
caggagcacggcucugucc

SEQ ID NO: 3800419 - RNA, 14 nt, Human
caggagcagccaca

SEQ ID NO: 3800420 - RNA, 15 nt, Human
caggagcaggcacgg

SEQ ID NO: 3800421 - RNA, 17 nt, Human
caggagcaggcacgggu

SEQ ID NO: 3800422 - RNA, 18 nt, Human
caggagcaggcacgggug

SEQ ID NO: 3800423 - RNA, 16 nt, Human
caggagcaguaucaug

SEQ ID NO: 3800424 - RNA, 12 nt, Human
caggagcccauu

SEQ ID NO: 3800425 - RNA, 16 nt, Human
caggagccccgaggcc

SEQ ID NO: 3800426 - RNA, 21 nt, Human
caggagccgaagcccaggggc

SEQ ID NO: 3800427 - RNA, 16 nt, Human
caggagccucacuggg

SEQ ID NO: 3800428 - RNA, 17 nt, Human
caggagccuccugcccu

SEQ ID NO: 3800429 - RNA, 20 nt, Human
caggagccuccugcccuuac

SEQ ID NO: 3800430 - RNA, 16 nt, Human
caggagccugcccagc

SEQ ID NO: 3800431 - RNA, 13 nt, Human
caggagcgcaaga

SEQ ID NO: 3800432 - RNA, 16 nt, Human
caggagcgcucccuug

SEQ ID NO: 3800433 - RNA, 17 nt, Human
caggagcuaccugugug

SEQ ID NO: 3800434 - RNA, 18 nt, Human
caggagcuaccugugugg

SEQ ID NO: 3800435 - RNA, 22 nt, Human
caggagcuaccuguguggacag

SEQ ID NO: 3800436 - RNA, 23 nt, Human
caggagcuaccuguguggacagg

SEQ ID NO: 3800437 - RNA, 21 nt, Human
caggagcuccaguguccugag

SEQ ID NO: 3800438 - RNA, 22 nt, Human
caggagcuccaguguccugagc

SEQ ID NO: 3800439 - RNA, 13 nt, Human
caggagcuccccu

SEQ ID NO: 3800440 - RNA, 16 nt, Human
caggagcuccccuccc

SEQ ID NO: 3800441 - RNA, 21 nt, Human
caggagcuccccuccccaacu

SEQ ID NO: 3800442 - RNA, 22 nt, Human
cccgagcugggggccaugagcu

SEQ ID NO: 3800443 - RNA, 23 nt, Human
cccgagcugggggccaugagcuc

SEQ ID NO: 3800444 - RNA, 14 nt, Human
cccgagcuggugca

SEQ ID NO: 3800445 - RNA, 22 nt, Human
cccgagcuggugcauuacagag

SEQ ID NO: 3800446 - RNA, 14 nt, Human
cccgagcuguuuau

SEQ ID NO: 3800447 - RNA, 15 nt, Human
cccgaggacccagac

SEQ ID NO: 3800448 - RNA, 19 nt, Human
cccgaggaggugucucagg

SEQ ID NO: 3800449 - RNA, 21 nt, Human
cccgaggaggugucucaggcu

SEQ ID NO: 3800450 - RNA, 12 nt, Human
cccgaggcccgc

SEQ ID NO: 3800451 - RNA, 13 nt, Human
cccgaggcccgca

SEQ ID NO: 3800452 - RNA, 15 nt, Human
cccgaggcccgcaug

SEQ ID NO: 3800453 - RNA, 14 nt, Human
cccgaggcccugca

SEQ ID NO: 3800454 - RNA, 15 nt, Human
cccgaggcccugcau

SEQ ID NO: 3800455 - RNA, 15 nt, Human
cccgaggccuucucu

SEQ ID NO: 3800456 - RNA, 19 nt, Human
cccgaggcugcccacuaug

SEQ ID NO: 3800457 - RNA, 23 nt, Human
cccgagggcugagccugguccca

SEQ ID NO: 3800458 - RNA, 15 nt, Human
cccgaguagcuggga

SEQ ID NO: 3800459 - RNA, 16 nt, Human
cccgaguagcugggac

SEQ ID NO: 3800460 - RNA, 17 nt, Human
cccgaguagcugggacu

SEQ ID NO: 3800461 - RNA, 14 nt, Human
cccgagucugggac

SEQ ID NO: 3800462 - RNA, 19 nt, Human
cccgaguuuggucccuggg

SEQ ID NO: 3800463 - RNA, 14 nt, Human
cccgauuguaacuc

SEQ ID NO: 3800464 - RNA, 20 nt, Human
cccgcaaacccccuuugugc

SEQ ID NO: 3800465 - RNA, 18 nt, Human
cccgcaaugugcccccag

SEQ ID NO: 3800466 - RNA, 12 nt, Human
cccgcacaccug

SEQ ID NO: 3800467 - RNA, 16 nt, Human
cccgcacagcagccug

SEQ ID NO: 3800468 - RNA, 16 nt, Human
cccgcacccccacccu

SEQ ID NO: 3800469 - RNA, 19 nt, Human
cccgcaccccccaagcugu

SEQ ID NO: 3800470 - RNA, 15 nt, Human
cccgcaccuguacag

SEQ ID NO: 3800471 - RNA, 17 nt, Human
cccgcagaccucuggau

SEQ ID NO: 3800472 - RNA, 21 nt, Human
cccgcagaccucuggauuagg

SEQ ID NO: 3800473 - RNA, 13 nt, Human
cccgcagagcgcg

SEQ ID NO: 3800474 - RNA, 22 nt, Human
cccgcagguaccccagcucugc

SEQ ID NO: 3800475 - RNA, 16 nt, Human
cccgcaugcagcagcu

SEQ ID NO: 3800476 - RNA, 19 nt, Human
cccgcccaaaccuuucccc

SEQ ID NO: 3800477 - RNA, 16 nt, Human
cccgcccacuguccug

SEQ ID NO: 3800478 - RNA, 18 nt, Human
cccgcccaggcuggccag

SEQ ID NO: 3800479 - RNA, 19 nt, Human
cccgccccacauuccgaca

SEQ ID NO: 3800480 - RNA, 14 nt, Human
cccgccccccacac

SEQ ID NO: 3800481 - RNA, 17 nt, Human
cccgcccccugcccucc

SEQ ID NO: 3800482 - RNA, 17 nt, Human
cccgccccugcagcacg

SEQ ID NO: 3800483 - RNA, 16 nt, Human
cccgccgauagaggga

SEQ ID NO: 3800484 - RNA, 14 nt, Human
cccgccuccaaccc

SEQ ID NO: 3800485 - RNA, 21 nt, Human
cccgccucucccgucagggcc

SEQ ID NO: 3800486 - RNA, 12 nt, Human
cccgccugccag

SEQ ID NO: 3800487 - RNA, 13 nt, Human
cccgccugccagu

SEQ ID NO: 3800488 - RNA, 17 nt, Human
cccgccuggccaggagc

SEQ ID NO: 3800489 - RNA, 12 nt, Human
cccgccuuggcc

SEQ ID NO: 3800490 - RNA, 14 nt, Human
cccgccuuggccug

SEQ ID NO: 3800491 - RNA, 17 nt, Human
cccgcgccacaggaccc

SEQ ID NO: 3800492 - RNA, 22 nt, Human
cccgcuaagagggagggagggc

SEQ ID NO: 3800493 - RNA, 23 nt, Human
cccgcuaagagggagggagggcu

SEQ ID NO: 3800494 - RNA, 21 nt, Human
cccgcuaggcucgccuucccu

SEQ ID NO: 3800495 - RNA, 14 nt, Human
cccgcucagcccuc

SEQ ID NO: 3800496 - RNA, 19 nt, Human
cccgcucagcccucccugc

SEQ ID NO: 3800497 - RNA, 13 nt, Human
cccgcucugcaug

SEQ ID NO: 3800498 - RNA, 15 nt, Human
cccgcucuuuuccua

SEQ ID NO: 3800499 - RNA, 19 nt, Human
cccgcugaguggacuggag

SEQ ID NO: 3800500 - RNA, 22 nt, Human
cccgcugcccaggggagcccuc

SEQ ID NO: 3800501 - RNA, 12 nt, Human
cccgcugcugcu

SEQ ID NO: 3800502 - RNA, 13 nt, Human
cccgcuggcuggg

SEQ ID NO: 3800503 - RNA, 15 nt, Human
cccgcugggcugagc

SEQ ID NO: 3800504 - RNA, 21 nt, Human
cccgcugggcugagccccuac

SEQ ID NO: 3800505 - RNA, 20 nt, Human
cccgcugucagccauuccug

SEQ ID NO: 3800506 - RNA, 12 nt, Human
cccgcuugccuc
